United States Patent Application Publication US 2013/0267429 A1 - sequence listing, part 17

SEQ ID NO: 383029 - DNA, 55 bp, Artificial
  Synthetic oligonucleotide
ctctaaagaccaggcctagcagaaaacacagggtggtcgtcagggtgggcccacc

SEQ ID NO: 383030 - DNA, 55 bp, Artificial
  Synthetic oligonucleotide
ctctaaagcctggaggaaagaggacttatcaggctaggcatgtggtatgggcagg

SEQ ID NO: 383031 - DNA, 60 bp, Artificial
  Synthetic oligonucleotide
ctctaaaggatatatgagcgttcctcaagtattgtgtgctgttactcgaacagtttctac

SEQ ID NO: 383032 - DNA, 55 bp, Artificial
  Synthetic oligonucleotide
ctctaaatatggtgatgaaccatggacaatgcaagagactagtgctttgacattt

SEQ ID NO: 383033 - DNA, 60 bp, Artificial
  Synthetic oligonucleotide
ctctaaatattttagctctatcgattgtcaaataagtattaaacgtagctgatgctggtc

SEQ ID NO: 383034 - DNA, 60 bp, Artificial
  Synthetic oligonucleotide
ctctaaatcattgaaatcgaaaggaggtataattccatcatgcccgtatggaatcgagaa

SEQ ID NO: 383035 - DNA, 55 bp, Artificial
  Synthetic oligonucleotide
ctctaaatccggacaaattctggagatgtacatctggtaatccatctttaacaag

SEQ ID NO: 383036 - DNA, 56 bp, Artificial
  Synthetic oligonucleotide
ctctaaattatagtgatggtttgataagttaatacgatttttgtctgaaaccatct

SEQ ID NO: 383037 - DNA, 55 bp, Artificial
  Synthetic oligonucleotide
ctctaaattcacacaattggactctattagggacatgacttttaattcacccgct

SEQ ID NO: 383038 - DNA, 58 bp, Artificial
  Synthetic oligonucleotide
ctctaaattcgacgcgtctaacatcttgtaagtcaatatctggaggtagctcgtaacc

SEQ ID NO: 383039 - DNA, 55 bp, Artificial
  Synthetic oligonucleotide
ctctaaattgggcaccgcgcctacgcataacccggtacgcctcgttgcgtgtggc

SEQ ID NO: 383040 - DNA, 56 bp, Artificial
  Synthetic oligonucleotide
ctctaaatttgacacaaagagagatagaacctataaaagtccacttaaagccagga

SEQ ID NO: 383041 - DNA, 55 bp, Artificial
  Synthetic oligonucleotide
ctctaacaaactgtctcaagtgtttcaggaactaaaggctgctggctatattggg

SEQ ID NO: 383042 - DNA, 55 bp, Artificial
  Synthetic oligonucleotide
ctctaacaacagtaggagttgtgccaattatctggcctatgttagacaccccgac

SEQ ID NO: 383043 - DNA, 60 bp, Artificial
  Synthetic oligonucleotide
ctctaacaatgaggtagactatcgtgtggatggtggagatcgttggcatcataaggtgtg

SEQ ID NO: 383044 - DNA, 55 bp, Artificial
  Synthetic oligonucleotide
ctctaacagcagtaatactactagcaactctagccaatataggaactataggatg

SEQ ID NO: 383045 - DNA, 55 bp, Artificial
  Synthetic oligonucleotide
ctctaaccatgtggtatcactaactggtaaagaaagagagctcagtgtaggtaga

SEQ ID NO: 383046 - DNA, 59 bp, Artificial
  Synthetic oligonucleotide
ctctaacccattatgcagcccaaccagggggatactacaatggaacaagaggagacaga

SEQ ID NO: 383047 - DNA, 58 bp, Artificial
  Synthetic oligonucleotide
ctctaacctagaaaaatctcttacttcactgtctgaagttgtcttacagaatcgaaga

SEQ ID NO: 383048 - DNA, 57 bp, Artificial
  Synthetic oligonucleotide
ctctaacctgtcccccgctctctgctcaatatatagcccagatctacactgacgtaa

SEQ ID NO: 383049 - DNA, 60 bp, Artificial
  Synthetic oligonucleotide
ctctaactatgacacacaagatggtccactactcgggcccaggcgataaattctgggcag

SEQ ID NO: 383050 - DNA, 60 bp, Artificial
  Synthetic oligonucleotide
ctctaactattctgatgcttctgttctacatctcggtagcactcgttttcttcgtggtac

SEQ ID NO: 383051 - DNA, 52 bp, Artificial
  Synthetic oligonucleotide
ctctaactcggcaaaccgacaagacttcactcaggatccaagcaaattcacc

SEQ ID NO: 383052 - DNA, 54 bp, Artificial
  Synthetic oligonucleotide
ctctaacttggggtgaggatagtaaaagccattttccgaccgaccggcgccagc

SEQ ID NO: 383053 - DNA, 55 bp, Artificial
  Synthetic oligonucleotide
ctctaagttggttttcaatagccttctagaggtaaatgatttgatggcttcggga

SEQ ID NO: 383054 - DNA, 56 bp, Artificial
  Synthetic oligonucleotide
ctctaataattaacatactaactgttccaagtaagcgagttcaggtttacctgcag

SEQ ID NO: 383055 - DNA, 58 bp, Artificial
  Synthetic oligonucleotide
ctctaatacagcggcacggtacacttctttctaaatcggatgaaattacactgactaa

SEQ ID NO: 383056 - DNA, 56 bp, Artificial
  Synthetic oligonucleotide
ctctaatacaggtgctggaaaagcccttacggggcttagtactggcactagtcaaa

SEQ ID NO: 383057 - DNA, 60 bp, Artificial
  Synthetic oligonucleotide
ctctaatacatcgtgtacataatgtctatctgttgcaaaacgtacagctctaattacatt

SEQ ID NO: 383058 - DNA, 53 bp, Artificial
  Synthetic oligonucleotide
ctctaataggcgattcaattgttgggcatcgtttaaggattttgattgtgact

SEQ ID NO: 383059 - DNA, 58 bp, Artificial
  Synthetic oligonucleotide
ctctaatcaagagttgtccgtgcggcaggcatgacgaccctaagactcctccggaacc

SEQ ID NO: 383060 - DNA, 58 bp, Artificial
  Synthetic oligonucleotide
ctctaatcgatggacgcttagacaatatcccagccctgctagagccattttacagggg

SEQ ID NO: 383061 - DNA, 55 bp, Artificial
  Synthetic oligonucleotide
ctctaatctaaaatttgagacgtgggacccattggatacaccatactctgattta

SEQ ID NO: 383062 - DNA, 54 bp, Artificial
  Synthetic oligonucleotide
ctctaattctctgcaatcgggggaacgggggggcaatttatatgtgccccccaa

SEQ ID NO: 383063 - DNA, 52 bp, Artificial
  Synthetic oligonucleotide
ctctaatttcctagggaggattggggttaaattaggtgatggcgccaaaacg

SEQ ID NO: 383064 - DNA, 60 bp, Artificial
  Synthetic oligonucleotide
ctctacaacacggcgtcgcacttgttccgaaaaaccgagtctagcgctgctctcgcgatc

SEQ ID NO: 383065 - DNA, 60 bp, Artificial
  Synthetic oligonucleotide
ctctacacaaagtgtcggggatcaacgcgtgcacatgcacagaccctgacggagacaaac

SEQ ID NO: 383066 - DNA, 50 bp, Artificial
  Synthetic oligonucleotide
ctctacacctgaaataactggaccacatacgaatacagtaattgaatgga

SEQ ID NO: 383067 - DNA, 58 bp, Artificial
  Synthetic oligonucleotide
ctctacacgagagggaacattcctaacatcgacattatgtttatattacccaactgaa

SEQ ID NO: 383068 - DNA, 60 bp, Artificial
  Synthetic oligonucleotide
ctctacactgactctgttactgcttcttcaactcccccctctgagctttctgcggacgcc

SEQ ID NO: 383069 - DNA, 60 bp, Artificial
  Synthetic oligonucleotide
ctctacagacggacgtcaactccatacagcgaacagtcactatcatagatacactaatcg

SEQ ID NO: 383070 - DNA, 60 bp, Artificial
  Synthetic oligonucleotide
ctctacagacggtaagaagagaacatcactcaaacagtgcacaaggcagatcctagaggt

SEQ ID NO: 383071 - DNA, 60 bp, Artificial
  Synthetic oligonucleotide
ctctacagcattccaccaagctctacaaaatcccaaagtcaggggcctgtatcttcctgc

SEQ ID NO: 383072 - DNA, 60 bp, Artificial
  Synthetic oligonucleotide
ctctacagcgttagtcttgtggaatcttatgattgcaaatcattgtgcagcttggcatct

SEQ ID NO: 383073 - DNA, 59 bp, Artificial
  Synthetic oligonucleotide
ctctacaggctgctcaagaagaacgagaatatcagaatgaaatcaagcgccaaatgaaa

SEQ ID NO: 383074 - DNA, 60 bp, Artificial
  Synthetic oligonucleotide
ctctacagtccaacaaatctgatgtccccctggatatttgtactaacatatgtaaatatc

SEQ ID NO: 383075 - DNA, 59 bp, Artificial
  Synthetic oligonucleotide
ctctacatcaacagtcaaaggcatccaacttggttctgaactagcttttgatactacgg

SEQ ID NO: 383076 - DNA, 54 bp, Artificial
  Synthetic oligonucleotide
ctctacatgctctcatggggcaaggaagcagtgaaccatttccatcttggtgat

SEQ ID NO: 383077 - DNA, 55 bp, Artificial
  Synthetic oligonucleotide
ctctacatgtattcccctagatataggcataatacccctactagcatctaaatct

SEQ ID NO: 383078 - DNA, 57 bp, Artificial
  Synthetic oligonucleotide
ctctacattgtaccgccgttggcttgactcattctagtaaccctacctcagtcgaat

SEQ ID NO: 383079 - DNA, 52 bp, Artificial
  Synthetic oligonucleotide
ctctaccaagtatttgcccttagagaaaggtataaaaccttattacccacag

SEQ ID NO: 383080 - DNA, 59 bp, Artificial
  Synthetic oligonucleotide
ctctaccagtgttcaagtctgtggaacttgtggcaccgcccaagagaaagccagtggtg

SEQ ID NO: 383081 - DNA, 54 bp, Artificial
  Synthetic oligonucleotide
ctctacccaaccaccaaaagtaacatcccaatcaattgatattctcaggcattt

SEQ ID NO: 383082 - DNA, 56 bp, Artificial
  Synthetic oligonucleotide
ctctacccacaaatctacacgttgacctactccgaggacgggttcatgtacatacc

SEQ ID NO: 383083 - DNA, 53 bp, Artificial
  Synthetic oligonucleotide
ctctacccaggggtagtaaaactaaatactcccggtggttgtctcaatcaaga

SEQ ID NO: 383084 - DNA, 52 bp, Artificial
  Synthetic oligonucleotide
ctctaccccagtgtgtacacttacacaatttcgggcaactccctgcattacg

SEQ ID NO: 383085 - DNA, 56 bp, Artificial
  Synthetic oligonucleotide
ctctaccggaagggaacttctcagccacaatgaccattgacctaatgaacaatgcc

SEQ ID NO: 383086 - DNA, 54 bp, Artificial
  Synthetic oligonucleotide
ctctacctcatatcgatcattcctggacttttgttcctgcggagcatactacta

SEQ ID NO: 383087 - DNA, 55 bp, Artificial
  Synthetic oligonucleotide
ctctacgaggatcagatcagagattacagacgcggacaaaggcgaatcttcaacc

SEQ ID NO: 383088 - DNA, 55 bp, Artificial
  Synthetic oligonucleotide
ctctacgcggtggcgggtcctctgcatctttacctagcaatcctttcgctggtgg

SEQ ID NO: 383089 - DNA, 58 bp, Artificial
  Synthetic oligonucleotide
ctctacgcttcatataggagcccgagcactatcccgtacctgttgtatccccctcacg

SEQ ID NO: 383090 - DNA, 55 bp, Artificial
  Synthetic oligonucleotide
ctctacggaggacctggtcaatcttctgcccgccatcctctctcctggagccctc

SEQ ID NO: 383091 - DNA, 55 bp, Artificial
  Synthetic oligonucleotide
ctctacgggatgtggcctctcctcttgctcctgttggcgttgccccagagggcat

SEQ ID NO: 383092 - DNA, 56 bp, Artificial
  Synthetic oligonucleotide
ctctacgggcccttatcggtctcagcctacgtggcggggatcttgggcctgggtga

SEQ ID NO: 383093 - DNA, 56 bp, Artificial
  Synthetic oligonucleotide
ctctacggtgtacttggacccctgcatgggccccgccctttgcaacaggagagtcg

SEQ ID NO: 383094 - DNA, 56 bp, Artificial
  Synthetic oligonucleotide
ctctacgtattaacgcagtacctttagtatcatccattaattgcaaaggatccatg

SEQ ID NO: 383095 - DNA, 50 bp, Artificial
  Synthetic oligonucleotide
ctctacgtctcgaacggtgaagtgttcaaagtgacggaatccaagcgcaa

SEQ ID NO: 383096 - DNA, 54 bp, Artificial
  Synthetic oligonucleotide
ctctacgtgggggacctgtgcgggtctgtcttccttgtcggccaactgtttacc

SEQ ID NO: 383097 - DNA, 60 bp, Artificial
  Synthetic oligonucleotide
ctctactaagcgttccatccaaccactgatccatggcaaatagaagcaatgctatcgaag

SEQ ID NO: 383098 - DNA, 52 bp, Artificial
  Synthetic oligonucleotide
ctctactcgagaagagttgttctaaccgttttcattaaacggtagtcgtggt

SEQ ID NO: 383099 - DNA, 52 bp, Artificial
  Synthetic oligonucleotide
ctctactcgttctacattgcttgctttagggcgaacataatcacgtgaatta

SEQ ID NO: 383100 - DNA, 60 bp, Artificial
  Synthetic oligonucleotide
ctctactgaacttgcgccagatagccctaaagctcggacctcacttggaatcgaaacagc

SEQ ID NO: 383101 - DNA, 60 bp, Artificial
  Synthetic oligonucleotide
ctctactgataaagtagacatgaccaattatatcatgctccgttacaaatgtctcatttc

SEQ ID NO: 383102 - DNA, 55 bp, Artificial
  Synthetic oligonucleotide
ctctactgcgtctcgacaaaggaattatcagtggacattcatgatgccacaggta

SEQ ID NO: 383103 - DNA, 60 bp, Artificial
  Synthetic oligonucleotide
ctctactgtgggacaaattcaatcttggtgagcatgaggacgcggtagcaatcgataagc

SEQ ID NO: 383104 - DNA, 60 bp, Artificial
  Synthetic oligonucleotide
ctctagaaccatactctctcttgactggtctgagttcgataaacgagctctacacgaagt

SEQ ID NO: 383105 - DNA, 55 bp, Artificial
  Synthetic oligonucleotide
ctctagaaccatctaaccaatcctttacatcagtgtgagtgtttaacaagaatgg

SEQ ID NO: 383106 - DNA, 60 bp, Artificial
  Synthetic oligonucleotide
ctctagaactgatctggtgtctctcaactctctctatgtaattggtgtctggagtcctat

SEQ ID NO: 383107 - DNA, 60 bp, Artificial
  Synthetic oligonucleotide
ctctagaatctgcatcctatgcatagatgaccgtggtcaccacactttgtaacacgattg

SEQ ID NO: 383108 - DNA, 60 bp, Artificial
  Synthetic oligonucleotide
ctctagaattcgatgaagttgtcatgagagttggtaaacttgagactgaaccgtgggatg

SEQ ID NO: 383109 - DNA, 55 bp, Artificial
  Synthetic oligonucleotide
ctctagacaactgcactcaagtacaccacatgttcgcttacaatcgcgaacacgg

SEQ ID NO: 383110 - DNA, 60 bp, Artificial
  Synthetic oligonucleotide
ctctagacaccatattggcctcccgcaactctctctatgtaattggtgtctggagtccta

SEQ ID NO: 383111 - DNA, 60 bp, Artificial
  Synthetic oligonucleotide
ctctagaccgatggctacgtcactcacaagtagccgaacgtctcaaggaatactattcat

SEQ ID NO: 383112 - DNA, 60 bp, Artificial
  Synthetic oligonucleotide
ctctagagagcatactagtgcatggggttgcgaatcatggggctgcctagctattggaac

SEQ ID NO: 383113 - DNA, 55 bp, Artificial
  Synthetic oligonucleotide
ctctagagatggacactatcgcagcaagagcgctcactgtgatgcgagcatgtgc

SEQ ID NO: 383114 - DNA, 59 bp, Artificial
  Synthetic oligonucleotide
ctctagatcagacctgtgaacacctcaaagtttcctgcgccccaaaatctgtacagttc

SEQ ID NO: 383115 - DNA, 58 bp, Artificial
  Synthetic oligonucleotide
ctctagattttcatgaggcaaacgtcaagagcctttacgacaaggttcgactacagct

SEQ ID NO: 383116 - DNA, 57 bp, Artificial
  Synthetic oligonucleotide
ctctagcactcctaaatacagatgtatatcaactgtgttcaactcctaaagttgatg

SEQ ID NO: 383117 - DNA, 51 bp, Artificial
  Synthetic oligonucleotide
ctctagcagggaccgattaatccaatcgaaataagccttatgccaggcgct

SEQ ID NO: 383118 - DNA, 58 bp, Artificial
  Synthetic oligonucleotide
ctctagcagtccgcatcttcttggttagcgagctcaagagaggccgcaacacggcagg

SEQ ID NO: 383119 - DNA, 60 bp, Artificial
  Synthetic oligonucleotide
ctctagcatatgaagctgcaaattatgacatgtatcgcttaaagaagctgacactccgtt

SEQ ID NO: 383120 - DNA, 60 bp, Artificial
  Synthetic oligonucleotide
ctctagcatgaagagaccatgtgcgtcagcaatggtttcaccagctctattaggcaggtc

SEQ ID NO: 383121 - DNA, 53 bp, Artificial
  Synthetic oligonucleotide
ctctagcatgagccccccgtcgaagctgatgtccctcattttacaataaatgt

SEQ ID NO: 383122 - DNA, 53 bp, Artificial
  Synthetic oligonucleotide
ctctagccccctatcggtgtattggtgtcttatttatagtaaagttactaggg

SEQ ID NO: 383123 - DNA, 60 bp, Artificial
  Synthetic oligonucleotide
ctctagcctccactctcagctccgtcatgtttatgaaaccatcaaagtttcgcaaactgg

SEQ ID NO: 383124 - DNA, 60 bp, Artificial
  Synthetic oligonucleotide
ctctagctacctgggtgggtgctaatttggaagatccagcatctagggacctagtagtca

SEQ ID NO: 383125 - DNA, 60 bp, Artificial
  Synthetic oligonucleotide
ctctagctttaattttcaaagttagcaagtcatgtgtgtctccaatctggatacttgtaa

SEQ ID NO: 383126 - DNA, 53 bp, Artificial
  Synthetic oligonucleotide
ctctaggaatagcctctgacacagtaagtaaaaaaaaacaccttaaagggata

SEQ ID NO: 383127 - DNA, 55 bp, Artificial
  Synthetic oligonucleotide
ctctaggacggacaagtattagctacactgtcgggcatggccaaggcagccaaca

SEQ ID NO: 383128 - DNA, 60 bp, Artificial
  Synthetic oligonucleotide
ctctaggagagcgcattattccgctccatcctgcgccaacagggtggacgtccgagcagg

SEQ ID NO: 383129 - DNA, 56 bp, Artificial
  Synthetic oligonucleotide
ctctaggagctagttccttaagtatattaagagcctcttgtttacttcctgagtta

SEQ ID NO: 383130 - DNA, 54 bp, Artificial
  Synthetic oligonucleotide
ctctaggaggaggtaggagaggcacgggagcccaaggggaaacactgggagaaa

SEQ ID NO: 383131 - DNA, 55 bp, Artificial
  Synthetic oligonucleotide
ctctaggatggatcaaaagccgagggtagttagagtaacaggtgcaccaataaag

SEQ ID NO: 383132 - DNA, 59 bp, Artificial
  Synthetic oligonucleotide
ctctaggtatgctcgtgcatgactgaggacggaactcagatccattctagctaactcag

SEQ ID NO: 383133 - DNA, 54 bp, Artificial
  Synthetic oligonucleotide
ctctaggtgaccgtcccgtctcgcttctacctagcaactgtgggtgtgttgggc

SEQ ID NO: 383134 - DNA, 55 bp, Artificial
  Synthetic oligonucleotide
ctctaggtgtatttagatacaagagccgttgttatgtcgggcttgtatggggctt

SEQ ID NO: 383135 - DNA, 60 bp, Artificial
  Synthetic oligonucleotide
ctctagtaggggcctctgcagtctcaggtactgcggtgcgagtgtccctcaataatgctg

SEQ ID NO: 383136 - DNA, 55 bp, Artificial
  Synthetic oligonucleotide
ctctagtattattcagtctgggtctcctatacctacctttactggtaccgatggc

SEQ ID NO: 383137 - DNA, 55 bp, Artificial
  Synthetic oligonucleotide
ctctagtcgcatcacaccaccaacagtggcacacagtgacgcgctagccaggcgg

SEQ ID NO: 383138 - DNA, 60 bp, Artificial
  Synthetic oligonucleotide
ctctagtgccatcagctttcccgcctgcacttattgtttgtacctgtaaaactgctgaac

SEQ ID NO: 383139 - DNA, 60 bp, Artificial
  Synthetic oligonucleotide
ctctagtgcgcactgggatggaccccaggatgtgctcccttatgcaaggatcaactctcc

SEQ ID NO: 383140 - DNA, 56 bp, Artificial
  Synthetic oligonucleotide
ctctagtgctaaactaagtaactgcataaatacaactaagccaatcgctctcaatg

SEQ ID NO: 383141 - DNA, 60 bp, Artificial
  Synthetic oligonucleotide
ctctagtggaggcaaccaaattctgtgcacctatatacgagtgtgcttgggctagctcca

SEQ ID NO: 383142 - DNA, 60 bp, Artificial
  Synthetic oligonucleotide
ctctagtggcatatccaagcttgacttgatagtatctaacatagaggtttcatgagagga

SEQ ID NO: 383143 - DNA, 55 bp, Artificial
  Synthetic oligonucleotide
ctctagtggcctcatcaggaaccctagagttcatcactgagggttttacgtggac

SEQ ID NO: 383144 - DNA, 60 bp, Artificial
  Synthetic oligonucleotide
ctctagtgtcacatttataccacctatggctgatctgccagataagggaaaaccttttga

SEQ ID NO: 383145 - DNA, 55 bp, Artificial
  Synthetic oligonucleotide
ctctagtgttattgttagttatgtttaacttcgatagcttagttacagccaccgc

SEQ ID NO: 383146 - DNA, 55 bp, Artificial
  Synthetic oligonucleotide
ctctagttggagtaataaatcccaggaggagatatgggaaaacatgacctggctg

SEQ ID NO: 383147 - DNA, 55 bp, Artificial
  Synthetic oligonucleotide
ctctagttggagtaataaatctcagagtgagatatgggatagcatgacctggctg

SEQ ID NO: 383148 - DNA, 55 bp, Artificial
  Synthetic oligonucleotide
ctctagttggagtaataaatcttggagtgagatttgggacaacatgacctggttg

SEQ ID NO: 383149 - DNA, 60 bp, Artificial
  Synthetic oligonucleotide
ctctagttgtggactcctcgtgtctgataatgaacctgcaaattaagacctatggtcaag

SEQ ID NO: 383150 - DNA, 56 bp, Artificial
  Synthetic oligonucleotide
ctctagtttggaattgtaaacccgaagctcttatgaatcctggaaagtcacacgag

SEQ ID NO: 383151 - DNA, 60 bp, Artificial
  Synthetic oligonucleotide
ctctagtttgtataagcggccgcataagagcggcgtgacacagactatcgagtaatgtaa

SEQ ID NO: 383152 - DNA, 53 bp, Artificial
  Synthetic oligonucleotide
ctctataaataactcactacaagaactggagtgggactatgggagcgatgaca

SEQ ID NO: 383153 - DNA, 51 bp, Artificial
  Synthetic oligonucleotide
ctctataagggaatagacaatagcgtgccattggcttttgacccgaataac

SEQ ID NO: 383154 - DNA, 53 bp, Artificial
  Synthetic oligonucleotide
ctctataataacgcccttaatggtccctacttagtaatgcccaatacctccgg

SEQ ID NO: 383155 - DNA, 60 bp, Artificial
  Synthetic oligonucleotide
ctctatagaaatgcagttcacatcgtgtttacagaactattagcatacaaagagctagat

SEQ ID NO: 383156 - DNA, 55 bp, Artificial
  Synthetic oligonucleotide
ctctatataaggagccttgtattcaggttgcaaacacgcaccacaacgcgagttt

SEQ ID NO: 383157 - DNA, 55 bp, Artificial
  Synthetic oligonucleotide
ctctatatcggttgctgagcacccatttgtggcacgggacttccttaaaggtcgg

SEQ ID NO: 383158 - DNA, 56 bp, Artificial
  Synthetic oligonucleotide
ctctatatgtaaccatctctttcaaatcaggatcgagaaaagtcttggctttagat

SEQ ID NO: 383159 - DNA, 59 bp, Artificial
  Synthetic oligonucleotide
ctctatatgtaggatgggtaccagctcataaaggaataggaggtaatcaagaggtagac

SEQ ID NO: 383160 - DNA, 55 bp, Artificial
  Synthetic oligonucleotide
ctctatcaaagcagtgagtagtacatgtaatgcttcctttacacatagtagcaat

SEQ ID NO: 383161 - DNA, 55 bp, Artificial
  Synthetic oligonucleotide
ctctatcaaattgttctcggtcacacaaccgaaacgttccagtataaaacctggc

SEQ ID NO: 383162 - DNA, 55 bp, Artificial
  Synthetic oligonucleotide
ctctatcagatcatactggtgaagttttgcaaattacggacatggtggctcatgc

SEQ ID NO: 383163 - DNA, 55 bp, Artificial
  Synthetic oligonucleotide
ctctatcagcctcttgggatccctccgatcggacaaatgtgtctcctgttgagga

SEQ ID NO: 383164 - DNA, 56 bp, Artificial
  Synthetic oligonucleotide
ctctatcgaatcagtgtttctagttcaggaattcgccagtagaatagagaagcatg

SEQ ID NO: 383165 - DNA, 55 bp, Artificial
  Synthetic oligonucleotide
ctctatcggccatcctctcaacatgcctagctttatccctactgcaacttcaccc

SEQ ID NO: 383166 - DNA, 55 bp, Artificial
  Synthetic oligonucleotide
ctctatctcagaaactaccaaccaacaagctgaattacaggctgtcctcatggcc

SEQ ID NO: 383167 - DNA, 60 bp, Artificial
  Synthetic oligonucleotide
ctctatctgggagtaccagatatgtggcacgacctggtggttatcaagccgtagaaggtg

SEQ ID NO: 383168 - DNA, 57 bp, Artificial
  Synthetic oligonucleotide
ctctatcttatcaaatggttattgaccgcgtttgaaatgactcatactagactatcc

SEQ ID NO: 383169 - DNA, 60 bp, Artificial
  Synthetic oligonucleotide
ctctatgaattggggtctggggtctcatttatactagaaggctctatagaactctcaatc

SEQ ID NO: 383170 - DNA, 55 bp, Artificial
  Synthetic oligonucleotide
ctctatgatgaggaacttgacgataaagcgattgaaatggcaaacgacctttatc

SEQ ID NO: 383171 - DNA, 60 bp, Artificial
  Synthetic oligonucleotide
ctctatgatgtgtgggatagcgcccacactacgaaactagggatagcgccctagctccga

SEQ ID NO: 383172 - DNA, 54 bp, Artificial
  Synthetic oligonucleotide
ctctatgcacccagcagtgcatgcacttgtgaagaagtttaaactgcgcgagag

SEQ ID NO: 383173 - DNA, 59 bp, Artificial
  Synthetic oligonucleotide
ctctatgcagtcctacttctagtggtactattgttgttggtcttatatccattttattc

SEQ ID NO: 383174 - DNA, 60 bp, Artificial
  Synthetic oligonucleotide
ctctatgccgcagggtaactcacagcgtacgctggctggtgtcactgtgagcgtaggtgg

SEQ ID NO: 383175 - DNA, 60 bp, Artificial
  Synthetic oligonucleotide
ctctatgcttggcacattgccctcaaatgctgcttgaaacatgagacagtcaagcagtgc

SEQ ID NO: 383176 - DNA, 60 bp, Artificial
  Synthetic oligonucleotide
ctctatggaacagatggacttgagccaattgatctgaatacaagtgcaggctacccctat

SEQ ID NO: 383177 - DNA, 55 bp, Artificial
  Synthetic oligonucleotide
ctctatggacacaacaaacaaaggcagacgaaaagaagagaaactatgtgccatg

SEQ ID NO: 383178 - DNA, 60 bp, Artificial
  Synthetic oligonucleotide
ctctatggagactcaaagcctcaaaagttcacctcatctgccaatggagtaaccacacat

SEQ ID NO: 383179 - DNA, 55 bp, Artificial
  Synthetic oligonucleotide
ctctatggcaagcgcacgcgggaacccacccggatggttactcatctctgcctgg

SEQ ID NO: 383180 - DNA, 60 bp, Artificial
  Synthetic oligonucleotide
ctctatggcaatgagagctgcgggtgggcgggatggctcctgtccccccgtggctctcgg

SEQ ID NO: 383181 - DNA, 60 bp, Artificial
  Synthetic oligonucleotide
ctctatgggtgtggctccgatgctctcagaaaacttgctactggtttcgctggtgccggt

SEQ ID NO: 383182 - DNA, 60 bp, Artificial
  Synthetic oligonucleotide
ctctatggtactatataccgacgtgtcccagtgggactcatctcaacacaatacgcagcc

SEQ ID NO: 383183 - DNA, 59 bp, Artificial
  Synthetic oligonucleotide
ctctatgtagctggcacctggtcccggattgcagagaaagatagtgggaatcccacctt

SEQ ID NO: 383184 - DNA, 58 bp, Artificial
  Synthetic oligonucleotide
ctctatgtagttgaaagcgttcggaggattagctaactgagactccatatgaagaaca

SEQ ID NO: 383185 - DNA, 60 bp, Artificial
  Synthetic oligonucleotide
ctctatgtctagcactgccgtctgcgaaacagtaccccctgctgaaattgctagcggact

SEQ ID NO: 383186 - DNA, 55 bp, Artificial
  Synthetic oligonucleotide
ctctattacgaactcggtatttataacctcgtaaaacatcagaggctacatcggg

SEQ ID NO: 383187 - DNA, 55 bp, Artificial
  Synthetic oligonucleotide
ctctattagtgatcaccgagcagaccatacattcactgtgtctcgaccacggaga

SEQ ID NO: 383188 - DNA, 53 bp, Artificial
  Synthetic oligonucleotide
ctctattccgaacctcgtcccatcggtacccgttacctcaccaaaccgctgta

SEQ ID NO: 383189 - DNA, 55 bp, Artificial
  Synthetic oligonucleotide
ctctattggagccttacaaacacgatggacaagatgtaggtgggcttggcttcac

SEQ ID NO: 383190 - DNA, 51 bp, Artificial
  Synthetic oligonucleotide
ctctattggccagaggggtcatgggggagtgcccataaagggctgtgcgac

SEQ ID NO: 383191 - DNA, 55 bp, Artificial
  Synthetic oligonucleotide
ctctattggcgaatgtgaccgcagtacgtcaagagtatgctataccagttggtcc

SEQ ID NO: 383192 - DNA, 55 bp, Artificial
  Synthetic oligonucleotide
ctctattgttacctctgactcccagttgtttaataaaccatattggttacataag

SEQ ID NO: 383193 - DNA, 60 bp, Artificial
  Synthetic oligonucleotide
ctctatttacgatgttccatgcgagcagatagggcctgctcttctacggaaaaacatcaa

SEQ ID NO: 383194 - DNA, 55 bp, Artificial
  Synthetic oligonucleotide
ctctcaaaactctatatgaatcgggggaactgggggtacatttatagtagaactc

SEQ ID NO: 383195 - DNA, 56 bp, Artificial
  Synthetic oligonucleotide
ctctcaaacctccggggtgagagctccggccacaccaagccccttccagacactaa

SEQ ID NO: 383196 - DNA, 56 bp, Artificial
  Synthetic oligonucleotide
ctctcaaacctctcatgaattgggggtactgggggtacattaatacctatgagttc

SEQ ID NO: 383197 - DNA, 55 bp, Artificial
  Synthetic oligonucleotide
ctctcaaagatgctagagacaaaattgtcgagggtacgttatattcaaatgttag

SEQ ID NO: 383198 - DNA, 55 bp, Artificial
  Synthetic oligonucleotide
ctctcaacgcttggtctgggcctgtgtaggtgttgaaatcggtcggggccaacct

SEQ ID NO: 383199 - DNA, 58 bp, Artificial
  Synthetic oligonucleotide
ctctcaactgaggacgcttgtgatctcacccccccacactcggctcgttccaagtttg

SEQ ID NO: 383200 - DNA, 55 bp, Artificial
  Synthetic oligonucleotide
ctctcaataggtggatagcaaagcaagaacaagtcacaattggtcagttggccga

SEQ ID NO: 383201 - DNA, 57 bp, Artificial
  Synthetic oligonucleotide
ctctcaatgactttttccccgctgtggatagtatttttttttgagcgcgaagtatga

SEQ ID NO: 383202 - DNA, 58 bp, Artificial
  Synthetic oligonucleotide
ctctcaatggtctcccaggaccatacattaagtggtttatggaagggattggactaga

SEQ ID NO: 383203 - DNA, 57 bp, Artificial
  Synthetic oligonucleotide
ctctcaatgttcctctgcccccgaaccctagtagggccagcacttccgagacaccca

SEQ ID NO: 383204 - DNA, 57 bp, Artificial
  Synthetic oligonucleotide
ctctcaatgttgacaggcctgttcccgcgactataactttccacgctaaaggggtca

SEQ ID NO: 383205 - DNA, 58 bp, Artificial
  Synthetic oligonucleotide
ctctcaatttgatagttctttatcgccctacctaataaatgcagtcttaaacataaga

SEQ ID NO: 383206 - DNA, 60 bp, Artificial
  Synthetic oligonucleotide
ctctcacaaatctatcactgcatatgctaaagatctcacaatcagggatacctagtggcc

SEQ ID NO: 383207 - DNA, 55 bp, Artificial
  Synthetic oligonucleotide
ctctcacaccttgaacaggaggagaattatttctcagcggtcccacttgattttg

SEQ ID NO: 383208 - DNA, 57 bp, Artificial
  Synthetic oligonucleotide
ctctcacactcttattaacgggctgccgcttccagaacattacagaaaaaactacca

SEQ ID NO: 383209 - DNA, 60 bp, Artificial
  Synthetic oligonucleotide
ctctcacagccaattgatgattacgtgcgtgagctgaagttgtatggcagtagagtagat

SEQ ID NO: 383210 - DNA, 56 bp, Artificial
  Synthetic oligonucleotide
ctctcacaggttaccaaataagcgtaagtacaggtagtgcacagttcttctttttc

SEQ ID NO: 383211 - DNA, 50 bp, Artificial
  Synthetic oligonucleotide
ctctcacatccactggatggttctcgcccaccactatcgcggccggacta

SEQ ID NO: 383212 - DNA, 57 bp, Artificial
  Synthetic oligonucleotide
ctctcaccaagaacccaaacgtcttttgaacactactaatgtattcactattgtcaa

SEQ ID NO: 383213 - DNA, 54 bp, Artificial
  Synthetic oligonucleotide
ctctcaccgataaagtaacaaacgccttaacaaaggaaggcctgcccctatctc

SEQ ID NO: 383214 - DNA, 60 bp, Artificial
  Synthetic oligonucleotide
ctctcaccgctgccgagtatgaccagtccacctatggctcttcgactggcccagtttatg

SEQ ID NO: 383215 - DNA, 59 bp, Artificial
  Synthetic oligonucleotide
ctctcacgggtggcagcgactctcagaaaacttggagcgcctccccttagagcgtggaa

SEQ ID NO: 383216 - DNA, 55 bp, Artificial
  Synthetic oligonucleotide
ctctcacgtgggtactattccactaaccgaccattgggtggtcaatcctggcacc

SEQ ID NO: 383217 - DNA, 55 bp, Artificial
  Synthetic oligonucleotide
ctctcactagaagtgaggcaagctgcattcaggtgatgcaccaacgcctctttcg

SEQ ID NO: 383218 - DNA, 55 bp, Artificial
  Synthetic oligonucleotide
ctctcactagatctacattgcccggggttggggataatattcatagcttgccgca

SEQ ID NO: 383219 - DNA, 60 bp, Artificial
  Synthetic oligonucleotide
ctctcactggatctggatatgtcaggactcaatgcaacaatgcctctctcttgctcaaag

SEQ ID NO: 383220 - DNA, 55 bp, Artificial
  Synthetic oligonucleotide
ctctcacttagcggtgtctacctcttaaggtcaccaagcactccgagcgccagcg

SEQ ID NO: 383221 - DNA, 60 bp, Artificial
  Synthetic oligonucleotide
ctctcacttgcatgcggctcacaggtgaaccaggcacctactttgacaactccgattaca

SEQ ID NO: 383222 - DNA, 56 bp, Artificial
  Synthetic oligonucleotide
ctctcacttggttttaactagcagtagacgtggatcttcattcagtatccccacta

SEQ ID NO: 383223 - DNA, 59 bp, Artificial
  Synthetic oligonucleotide
ctctcagaactccactacaggatctgaattctcaaaccttgtgggatttagggatggcc

SEQ ID NO: 383224 - DNA, 51 bp, Artificial
  Synthetic oligonucleotide
ctctcagaatggtgggccagctagataacaccctgaagaaggtgagtccac

SEQ ID NO: 383225 - DNA, 60 bp, Artificial
  Synthetic oligonucleotide
ctctcagacgtatgttactccaaccgatccctcgcccaacatttgctgagccaccaaaga

SEQ ID NO: 383226 - DNA, 55 bp, Artificial
  Synthetic oligonucleotide
ctctcagagtcggaacagtggtgactgcatatgaggattgctctgggttggtctc

SEQ ID NO: 383227 - DNA, 51 bp, Artificial
  Synthetic oligonucleotide
ctctcagatctctattgcaccgagacagtacctcttacaactgaaattcaa

SEQ ID NO: 383228 - DNA, 60 bp, Artificial
  Synthetic oligonucleotide
ctctcagattacctgatgggcctccctgctctcagcggtcgaagttcttactgatggatg

SEQ ID NO: 383229 - DNA, 55 bp, Artificial
  Synthetic oligonucleotide
ctctcagcattcgatgaaagaaggaacaagtacttagaagagcatcccagtgccg

SEQ ID NO: 383230 - DNA, 55 bp, Artificial
  Synthetic oligonucleotide
ctctcagcctttccctacacctggaaggtggggagggaggtctgccatcgcttcg

SEQ ID NO: 383231 - DNA, 56 bp, Artificial
  Synthetic oligonucleotide
ctctcagctaggagtcgtagaagttagcagtttatccagaaggatgatctgctacc

SEQ ID NO: 383232 - DNA, 55 bp, Artificial
  Synthetic oligonucleotide
ctctcagtcgttttaggtcgccatcatctcttttctgcttgcgcatcaatctctg

SEQ ID NO: 383233 - DNA, 55 bp, Artificial
  Synthetic oligonucleotide
ctctcagtgaactgccggagaccctggagacattgcttttactgacacttctggc

SEQ ID NO: 383234 - DNA, 55 bp, Artificial
  Synthetic oligonucleotide
ctctcagttgagtacggcgacactggcacagttatgtgtgaacatgggcatgtgg

SEQ ID NO: 383235 - DNA, 56 bp, Artificial
  Synthetic oligonucleotide
ctctcataaccttgtataacccaaaggactagctcatgttgctaggcaactaaacc

SEQ ID NO: 383236 - DNA, 60 bp, Artificial
  Synthetic oligonucleotide
ctctcatagactaccaaagaactgcaagctgttcgagctagaatgcatgggagcggagtg

SEQ ID NO: 383237 - DNA, 56 bp, Artificial
  Synthetic oligonucleotide
ctctcatattccggtatgtttgcacgccagtttgcctctccttttcccacgtaacg

SEQ ID NO: 383238 - DNA, 60 bp, Artificial
  Synthetic oligonucleotide
ctctcatcattgcgggtcggtggacacgtagtggtgacgctgaatccacgggggagtgac

SEQ ID NO: 383239 - DNA, 55 bp, Artificial
  Synthetic oligonucleotide
ctctcatccagtggatgcattgagtggattgactgtcagggctgtctctaggctt

SEQ ID NO: 383240 - DNA, 51 bp, Artificial
  Synthetic oligonucleotide
ctctcatgacatccgttcactgcataagcgattctttcaaagttcgctcgt

SEQ ID NO: 383241 - DNA, 60 bp, Artificial
  Synthetic oligonucleotide
ctctcatgaggctagccgcactgacaggtacgtacgtttacgaccatcttactccgctgc

SEQ ID NO: 383242 - DNA, 59 bp, Artificial
  Synthetic oligonucleotide
ctctcatgggctacacccaagtatgataaaggagagttaccttccaggggattcatgaa

SEQ ID NO: 383243 - DNA, 57 bp, Artificial
  Synthetic oligonucleotide
ctctcatgggtcccagcacacaaaggaatagggggtaatgaacaggtagacaaatta

SEQ ID NO: 383244 - DNA, 53 bp, Artificial
  Synthetic oligonucleotide
ctctcattatttcatctttggagggtttcttttcagagttaccctttgaggag

SEQ ID NO: 383245 - DNA, 60 bp, Artificial
  Synthetic oligonucleotide
ctctccaaagtcgatagagtagtgtatagtatcatatacccatcagaggtcgaggctgga

SEQ ID NO: 383246 - DNA, 55 bp, Artificial
  Synthetic oligonucleotide
ctctccaacaacgcggtaagcaaactggcgtcatcattggccgctgacgcaacga

SEQ ID NO: 383247 - DNA, 55 bp, Artificial
  Synthetic oligonucleotide
ctctccaagggaataaaagtcagccagtgagtttctgcgtccatacccaagtctt

SEQ ID NO: 383248 - DNA, 55 bp, Artificial
  Synthetic oligonucleotide
ctctccacagcaagctcatggtcctacattgtggaaacatctagtccagacaatg

SEQ ID NO: 383249 - DNA, 60 bp, Artificial
  Synthetic oligonucleotide
ctctccactgcacactggcggcgcgttaggcttgagagaccgagctcggtacctaagctt

SEQ ID NO: 383250 - DNA, 59 bp, Artificial
  Synthetic oligonucleotide
ctctccagactgccgaccccattaccaaactgaccgccccctaccgacatgctcagatc

SEQ ID NO: 383251 - DNA, 52 bp, Artificial
  Synthetic oligonucleotide
ctctccagctagtgacccaagactgtcatacactatgttgggagagatcctt

SEQ ID NO: 383252 - DNA, 58 bp, Artificial
  Synthetic oligonucleotide
ctctccaggggaaacgccgtggtgcgctcatcgacttcgagaacggcactgtcggacc

SEQ ID NO: 383253 - DNA, 55 bp, Artificial
  Synthetic oligonucleotide
ctctccaggtgaaatcaatagggtggctgcatgcctcagaaagcttggggtcccg

SEQ ID NO: 383254 - DNA, 60 bp, Artificial
  Synthetic oligonucleotide
ctctccatcattttttgatgtcacaatagcccgtatttcaatgttggacgttaaagatgc

SEQ ID NO: 383255 - DNA, 58 bp, Artificial
  Synthetic oligonucleotide
ctctccatcgtcaatctgggtttttgccggagctccagataggtgtccgcctacatgc

SEQ ID NO: 383256 - DNA, 55 bp, Artificial
  Synthetic oligonucleotide
ctctcccaaaggaggtattgaaggcctatgtcagaaaatgtggacaatgatctct

SEQ ID NO: 383257 - DNA, 55 bp, Artificial
  Synthetic oligonucleotide
ctctcccagtgggcccgtgaggctctccagactggtattacccttttggccctcc

SEQ ID NO: 383258 - DNA, 55 bp, Artificial
  Synthetic oligonucleotide
ctctcccatgcagaataagacaaattgtacatatgtggcagagagtaggacaagc

SEQ ID NO: 383259 - DNA, 60 bp, Artificial
  Synthetic oligonucleotide
ctctccccacaactgacgttctacaggctatgtatggccatccttcacctgaaagacaga

SEQ ID NO: 383260 - DNA, 59 bp, Artificial
  Synthetic oligonucleotide
ctctccccacacatagaacctagatttgaattctgcagcgaatcgcccgaccacacttt

SEQ ID NO: 383261 - DNA, 55 bp, Artificial
  Synthetic oligonucleotide
ctctccccacagaagtgcgctaatttcaagcaagcctttgaggtgggtgcaagtg

SEQ ID NO: 383262 - DNA, 58 bp, Artificial
  Synthetic oligonucleotide
ctctccccactcgagagtgtccccgtccttgtcgatgtaggatttgacgtcggagctg

SEQ ID NO: 383263 - DNA, 55 bp, Artificial
  Synthetic oligonucleotide
ctctccccataaaatgatgaatccaagcggtggcgcccttgctgtgctctcaaag

SEQ ID NO: 383264 - DNA, 56 bp, Artificial
  Synthetic oligonucleotide
ctctcccccgttgtgcttgacacggccccctgcctcttttccgatggctcccctca

SEQ ID NO: 383265 - DNA, 57 bp, Artificial
  Synthetic oligonucleotide
ctctcccgatgcccccggcattcctcttggggatccctcatatgcaacagcgtcctt

SEQ ID NO: 383266 - DNA, 55 bp, Artificial
  Synthetic oligonucleotide
ctctcccggcgggtcaataccgcctcacgtccttgacaataccacatacgtcggg

SEQ ID NO: 383267 - DNA, 60 bp, Artificial
  Synthetic oligonucleotide
ctctcccgggtctaagacgctggtccctagccggctcagatgcctgtatggatggagttc

SEQ ID NO: 383268 - DNA, 55 bp, Artificial
  Synthetic oligonucleotide
ctctcccggtggtgctgcttatcttgtgagcaattttccacagggtgccaacgat

SEQ ID NO: 383269 - DNA, 58 bp, Artificial
  Synthetic oligonucleotide
ctctccctagaccgtggccgtgaattctgggacccacgacttatgcaggttgctgaaa

SEQ ID NO: 383270 - DNA, 59 bp, Artificial
  Synthetic oligonucleotide
ctctccctccactgcgttacatgacaaagagcggctgctggtatggaatggagattagg

SEQ ID NO: 383271 - DNA, 60 bp, Artificial
  Synthetic oligonucleotide
ctctccctgaaacatctcttagtgatgactatgtcttggttggagcacatgagtgcccta

SEQ ID NO: 383272 - DNA, 55 bp, Artificial
  Synthetic oligonucleotide
ctctcccttattagaggaccctactaatttaatgatacaatggctcttatcagga

SEQ ID NO: 383273 - DNA, 56 bp, Artificial
  Synthetic oligonucleotide
ctctcccttcgccatccgagtggacgtccgtcctcctacggatgcccaggtcggac

SEQ ID NO: 383274 - DNA, 54 bp, Artificial
  Synthetic oligonucleotide
ctctcccttgagagtattgggccctaaagttaataaggcctctgaatgggttaa

SEQ ID NO: 383275 - DNA, 55 bp, Artificial
  Synthetic oligonucleotide
ctctccgacatagtatccatgaacgattctacacactttgttgtggacaggccag

SEQ ID NO: 383276 - DNA, 51 bp, Artificial
  Synthetic oligonucleotide
ctctccgcggtgtagaggtgtcacgggggcagcctctgggaatcggggtga

SEQ ID NO: 383277 - DNA, 55 bp, Artificial
  Synthetic oligonucleotide
ctctccgcttgtgacgattatgacggttacactagacttaagggaaactattctg

SEQ ID NO: 383278 - DNA, 59 bp, Artificial
  Synthetic oligonucleotide
ctctccgggctcggggcaactcagtctgtaaatgcacggcttattggtatgggacataa

SEQ ID NO: 383279 - DNA, 52 bp, Artificial
  Synthetic oligonucleotide
ctctccgggtgggttccccgcctttcaagtacctctgcaacccgccttggga

SEQ ID NO: 383280 - DNA, 55 bp, Artificial
  Synthetic oligonucleotide
ctctccgtctgcgaacaggcctcttcttggctattctgtgttggactttgatggg

SEQ ID NO: 383281 - DNA, 55 bp, Artificial
  Synthetic oligonucleotide
ctctccgtgactatttccgtgatattggtcgtatggttctcactgccgagggtcg

SEQ ID NO: 383282 - DNA, 55 bp, Artificial
  Synthetic oligonucleotide
ctctccgttcgattactgcaggggcttacgagtccatgcagaaggctcggctcct

SEQ ID NO: 383283 - DNA, 58 bp, Artificial
  Synthetic oligonucleotide
ctctcctatttccggtgaaactatcatttccagtggttgccggcctcaattcacgaca

SEQ ID NO: 383284 - DNA, 55 bp, Artificial
  Synthetic oligonucleotide
ctctcctcaacaacctagaataataacttattcacacttttggtggaaaggaaca

SEQ ID NO: 383285 - DNA, 60 bp, Artificial
  Synthetic oligonucleotide
ctctcctcaagcaagctaagccggattcggatttgttgttagctgccaaccgtgagactg

SEQ ID NO: 383286 - DNA, 60 bp, Artificial
  Synthetic oligonucleotide
ctctcctcacctccgagcagacgaacatgaggaccactgaaacccgacggcgcaatgact

SEQ ID NO: 383287 - DNA, 54 bp, Artificial
  Synthetic oligonucleotide
ctctcctcaggttgtggttgaaccgtatctgaacgtggtaaaccctggtcctcg

SEQ ID NO: 383288 - DNA, 56 bp, Artificial
  Synthetic oligonucleotide
ctctcctcaggttgtggttgaaccttatctgtacgtggtagaccctggtcctcgtg

SEQ ID NO: 383289 - DNA, 60 bp, Artificial
  Synthetic oligonucleotide
ctctcctcaggttgtggttgaaccttatttgcacatggtatatcctcgttctggtgtata

SEQ ID NO: 383290 - DNA, 60 bp, Artificial
  Synthetic oligonucleotide
ctctcctcccgtctgttccacttgtgcgtggcacacgccctggagccctttcgcgatatg

SEQ ID NO: 383291 - DNA, 55 bp, Artificial
  Synthetic oligonucleotide
ctctcctgcatacatgtgtacacctagtggttccatggtgtctagtgatactcag

SEQ ID NO: 383292 - DNA, 60 bp, Artificial
  Synthetic oligonucleotide
ctctcctggatctaggacgctggctcctagtctttgcaaatctcgatacgtatgtagctc

SEQ ID NO: 383293 - DNA, 55 bp, Artificial
  Synthetic oligonucleotide
ctctcctggcagtggattatgctgcttggagactgcacccagagcaagtgccgtc

SEQ ID NO: 383294 - DNA, 56 bp, Artificial
  Synthetic oligonucleotide
ctctcctggtgggtccatgatattagtttgaggtggaatgggttgggtacttggtg

SEQ ID NO: 383295 - DNA, 55 bp, Artificial
  Synthetic oligonucleotide
ctctccttccgaacactctatcgactgcaacagatgctatccctcagacaacaac

SEQ ID NO: 383296 - DNA, 55 bp, Artificial
  Synthetic oligonucleotide
ctctccttgcttatggttactaagcctctactcgagaagagttgttctaaccgtt

SEQ ID NO: 383297 - DNA, 56 bp, Artificial
  Synthetic oligonucleotide
ctctcctttaccattactggagataataccaaatggaatgaaaatcagaatcctcg

SEQ ID NO: 383298 - DNA, 55 bp, Artificial
  Synthetic oligonucleotide
ctctcctttctgcgacacttgagacgccaagcgttcgagcttttagctgccgagc

SEQ ID NO: 383299 - DNA, 54 bp, Artificial
  Synthetic oligonucleotide
ctctccttttggtagtgagacatggtccttaacagaaactagtttagaaatagt

SEQ ID NO: 383300 - DNA, 53 bp, Artificial
  Synthetic oligonucleotide
ctctcgaaatcaagagatccaacttcatctagtattctcttggagcccatcaa

SEQ ID NO: 383301 - DNA, 60 bp, Artificial
  Synthetic oligonucleotide
ctctcgaacgatgtctaaaactgaaaggatggggatgggactgtatgtcaagtatgatgg

SEQ ID NO: 383302 - DNA, 55 bp, Artificial
  Synthetic oligonucleotide
ctctcgaccgccaatctttttacggttgatgtacttcccgatttcactccgatcc

SEQ ID NO: 383303 - DNA, 57 bp, Artificial
  Synthetic oligonucleotide
ctctcgactaaagtcgtcgtacgatggtagatctaaaaagatcaagaatctaagcct

SEQ ID NO: 383304 - DNA, 51 bp, Artificial
  Synthetic oligonucleotide
ctctcgagggaggtattagaacctggaaccaagagtatgcatgtgaattta

SEQ ID NO: 383305 - DNA, 59 bp, Artificial
  Synthetic oligonucleotide
ctctcgatctaagggaatgcaccatagagggttggatcttggggaatcctaaatgcgac

SEQ ID NO: 383306 - DNA, 50 bp, Artificial
  Synthetic oligonucleotide
ctctcgcaaaagagtatctcgacgagacgtgggcaagaaacgggagtcac

SEQ ID NO: 383307 - DNA, 60 bp, Artificial
  Synthetic oligonucleotide
ctctcgcaacctgatgccttcgccaaagatatcactccaagaccgtctatctaaggtcac

SEQ ID NO: 383308 - DNA, 51 bp, Artificial
  Synthetic oligonucleotide
ctctcgcaatccccgcgactatcgagcgagacgaaaatgcaagaacgcggc

SEQ ID NO: 383309 - DNA, 60 bp, Artificial
  Synthetic oligonucleotide
ctctcgccgccacccctggacttcgctcacaaccattcactccatctgtggacatgtctc

SEQ ID NO: 383310 - DNA, 57 bp, Artificial
  Synthetic oligonucleotide
ctctcgcctcaactatcagttggagggcaaccccggccactcgtacagccagcctcg

SEQ ID NO: 383311 - DNA, 55 bp, Artificial
  Synthetic oligonucleotide
ctctcgccttgacacatcttccaataggttttacaccttaaagagtataatttgg

SEQ ID NO: 383312 - DNA, 52 bp, Artificial
  Synthetic oligonucleotide
ctctcgcgagagtctagtcaaaaccctcgtgaggctcaaagatcggctgagg

SEQ ID NO: 383313 - DNA, 60 bp, Artificial
  Synthetic oligonucleotide
ctctcgcggaattccacgcacgagatgtattgggtaagtcgagcctcaggcaatgtggta

SEQ ID NO: 383314 - DNA, 56 bp, Artificial
  Synthetic oligonucleotide
ctctcgcgtgccttctctcggccctctgccctcgctctagtccccggatggcgttt

SEQ ID NO: 383315 - DNA, 52 bp, Artificial
  Synthetic oligonucleotide
ctctcgctccaccggctactccgacaccatccaaaccgaagatccggaagtg

SEQ ID NO: 383316 - DNA, 54 bp, Artificial
  Synthetic oligonucleotide
ctctcgctgaaaagtgattcaatctttagtcgaagcatcctcgacagattatct

SEQ ID NO: 383317 - DNA, 55 bp, Artificial
  Synthetic oligonucleotide
ctctcgcttctctcatcaagcgtcagggacgcaccatcaacgcggaaccccgcga

SEQ ID NO: 383318 - DNA, 60 bp, Artificial
  Synthetic oligonucleotide
ctctcggaagtacacctcctttccatggctgctagggtgtgctgccaactggatcctgcg

SEQ ID NO: 383319 - DNA, 58 bp, Artificial
  Synthetic oligonucleotide
ctctcggacgagaaggcaacgaacccgatcgtgccttcctttgacatgagtaatgagg

SEQ ID NO: 383320 - DNA, 55 bp, Artificial
  Synthetic oligonucleotide
ctctcggatttgccttaagcgaaaacaacttgactatcgaagtcttgtctagacc

SEQ ID NO: 383321 - DNA, 60 bp, Artificial
  Synthetic oligonucleotide
ctctcggcataaataccgcgaaccctatctatacacgatcacctgatgttgagttctgga

SEQ ID NO: 383322 - DNA, 55 bp, Artificial
  Synthetic oligonucleotide
ctctcggcctacagggttgtgctttccaatctactgtcgctgagcttcagcgcct

SEQ ID NO: 383323 - DNA, 54 bp, Artificial
  Synthetic oligonucleotide
ctctcggcctcgttatttccttcggtttgggtgctattactgctggggtactcc

SEQ ID NO: 383324 - DNA, 57 bp, Artificial
  Synthetic oligonucleotide
ctctcgggaagttcctcaggatcaatcacgttcgggccgtctttatcagattgcccg

SEQ ID NO: 383325 - DNA, 60 bp, Artificial
  Synthetic oligonucleotide
ctctcgggcacatatgatgtacataggattccaacgaccaacgagctcccatagtttctg

SEQ ID NO: 383326 - DNA, 57 bp, Artificial
  Synthetic oligonucleotide
ctctcgggcctgacgaattccactatgccatcgttggacgggaaaagggcgagcaag

SEQ ID NO: 383327 - DNA, 53 bp, Artificial
  Synthetic oligonucleotide
ctctcggtcggggagtcaacaatagaacagtgcccccaccggggggaaatgac

SEQ ID NO: 383328 - DNA, 60 bp, Artificial
  Synthetic oligonucleotide
ctctcggtcttgagtgcgttattatggaggagtgtggtatgccccagtggcttatccggc

SEQ ID NO: 383329 - DNA, 58 bp, Artificial
  Synthetic oligonucleotide
ctctcggtgccattcttgagaaatttatcggaagggtctcctatgtgaggagcgacgt

SEQ ID NO: 383330 - DNA, 55 bp, Artificial
  Synthetic oligonucleotide
ctctcggtgctgctaaaggtgaaggggcgcagtccaggaatgcaaagaggggagc

SEQ ID NO: 383331 - DNA, 55 bp, Artificial
  Synthetic oligonucleotide
ctctcgtaaaccaaggaatgacaatgacgcgtgccacaagaatagcaaggcgcgc

SEQ ID NO: 383332 - DNA, 55 bp, Artificial
  Synthetic oligonucleotide
ctctcgtaaagactcactctctaaagcctgggcttctttaaaactgtctacgaac

SEQ ID NO: 383333 - DNA, 60 bp, Artificial
  Synthetic oligonucleotide
ctctcgtaatctgtgcatgacttagtgactccccggtgcgtgaatccatgctggaacttg

SEQ ID NO: 383334 - DNA, 55 bp, Artificial
  Synthetic oligonucleotide
ctctcgtatcaggttcatcgtaaccacggctaatgtcgctaagactaagtcgtgg

SEQ ID NO: 383335 - DNA, 59 bp, Artificial
  Synthetic oligonucleotide
ctctcgtcgtgtcatacgccatgagggtaccccagttgatcttcgacatatttgtgggc

SEQ ID NO: 383336 - DNA, 50 bp, Artificial
  Synthetic oligonucleotide
ctctcgtgaattcggttgcacaaatggagacatttaatagtgatgcaaac

SEQ ID NO: 383337 - DNA, 55 bp, Artificial
  Synthetic oligonucleotide
ctctcgtgcgatctcggttacctgggtcacttgacgtactcccctccgacgtaca

SEQ ID NO: 383338 - DNA, 60 bp, Artificial
  Synthetic oligonucleotide
ctctcgtgcgcactggtatggatccaagaatgtgctctctgatgcaaggatcaaccctcc

SEQ ID NO: 383339 - DNA, 60 bp, Artificial
  Synthetic oligonucleotide
ctctcgtggacatacatcattctgagatggaacggtgcagtccgacccacagacatgggg

SEQ ID NO: 383340 - DNA, 55 bp, Artificial
  Synthetic oligonucleotide
ctctcgtgttagatgcagggcatcaattaggaatgtcactgggtgttattcctgc

SEQ ID NO: 383341 - DNA, 58 bp, Artificial
  Synthetic oligonucleotide
ctctcgttaatcgttgtgaacacatcttgtcttttgagtatttgtttgtgtcctgtcc

SEQ ID NO: 383342 - DNA, 60 bp, Artificial
  Synthetic oligonucleotide
ctctcgttcatgtattcatatcgaaaccatgtatcctttgaaaccatgtattctttagtc

SEQ ID NO: 383343 - DNA, 58 bp, Artificial
  Synthetic oligonucleotide
ctctcgttccacaaaacgtggagaccaccactcttctggatggtaatgtgtctatacg

SEQ ID NO: 383344 - DNA, 55 bp, Artificial
  Synthetic oligonucleotide
ctctcgttcgacgagagagttcaatacgccgtctggcaacacgaaagagtaaatc

SEQ ID NO: 383345 - DNA, 53 bp, Artificial
  Synthetic oligonucleotide
ctctcgttgtaggcgtggtgtgcgcagcaatactacgccggcacgtgggccct

SEQ ID NO: 383346 - DNA, 55 bp, Artificial
  Synthetic oligonucleotide
ctctcgttgtcgacacgggagtgcagtttgggcccgcgatattggctaatgagtc

SEQ ID NO: 383347 - DNA, 60 bp, Artificial
  Synthetic oligonucleotide
ctctcgtttgccggctcgctagaaatccacacacttggtgaaacacgcagcacctaccag

SEQ ID NO: 383348 - DNA, 55 bp, Artificial
  Synthetic oligonucleotide
ctctcgtttgctcgaactgtatctccacgtgcatgttcatctcgggcctcccgtc

SEQ ID NO: 383349 - DNA, 57 bp, Artificial
  Synthetic oligonucleotide
ctctcgtttttgccttctgacttctttccttcggttcgagatctcctagacactgcc

SEQ ID NO: 383350 - DNA, 55 bp, Artificial
  Synthetic oligonucleotide
ctctctaaacaagagtcgtctacagttggtcagttagcggatttcaactttgtgg

SEQ ID NO: 383351 - DNA, 54 bp, Artificial
  Synthetic oligonucleotide
ctctctaacaggcgttttaattgttgggctagttttaaagatctcgatttggat

SEQ ID NO: 383352 - DNA, 50 bp, Artificial
  Synthetic oligonucleotide
ctctctaatggctacgcatgtagaggcgatatggagtgttacctggtatt

SEQ ID NO: 383353 - DNA, 60 bp, Artificial
  Synthetic oligonucleotide
ctctctaattcgactccactgatacatttcgaccgtccatccaacggagttcattgtctg

SEQ ID NO: 383354 - DNA, 60 bp, Artificial
  Synthetic oligonucleotide
ctctctacacttagtaatgcaaatggttaccgcagtgcagcaagatctgggtgaagtggt

SEQ ID NO: 383355 - DNA, 55 bp, Artificial
  Synthetic oligonucleotide
ctctctaccctaaactttaacaatctccacgtatggaactcatgtagcataggta

SEQ ID NO: 383356 - DNA, 55 bp, Artificial
  Synthetic oligonucleotide
ctctctactgattaactaaccacctagtgttcgagtttcggacatgtgacgggca

SEQ ID NO: 383357 - DNA, 60 bp, Artificial
  Synthetic oligonucleotide
ctctctagaatggttaactcacatcggcagtgacactgacagacttattgtagattttgg

SEQ ID NO: 383358 - DNA, 59 bp, Artificial
  Synthetic oligonucleotide
ctctctagcgacaccgattggggtcaaattcatttatcccctagtattagtgtcgcata

SEQ ID NO: 383359 - DNA, 55 bp, Artificial
  Synthetic oligonucleotide
ctctctatcacgacacccgggttggctgacaaggttaaggagtactgggaggttg

SEQ ID NO: 383360 - DNA, 55 bp, Artificial
  Synthetic oligonucleotide
ctctctattcatgggagagggcgctagcattgttgcacacaccacctctaggccc

SEQ ID NO: 383361 - DNA, 55 bp, Artificial
  Synthetic oligonucleotide
ctctctcaaacaaggccagaggttccttggtgatgtaatcccttaccttgttggg

SEQ ID NO: 383362 - DNA, 60 bp, Artificial
  Synthetic oligonucleotide
ctctctcaaacacagccagaggttccttgagaatgtaatccctcactctgttaactgact

SEQ ID NO: 383363 - DNA, 60 bp, Artificial
  Synthetic oligonucleotide
ctctctcaaacatagccagcggttccttgagaatgtaatctctcaccctgttgactgatt

SEQ ID NO: 383364 - DNA, 56 bp, Artificial
  Synthetic oligonucleotide
ctctctcaaagaaagccagaggttccttgagaacgtaatccctgactttgtttaca

SEQ ID NO: 383365 - DNA, 56 bp, Artificial
  Synthetic oligonucleotide
ctctctcaattttatgggttatgtcattggaggttatgggtccttgccacaagaac

SEQ ID NO: 383366 - DNA, 56 bp, Artificial
  Synthetic oligonucleotide
ctctctcatataccgccaagggttccttgagaatgtaatcacgtaccttgtttacg

SEQ ID NO: 383367 - DNA, 50 bp, Artificial
  Synthetic oligonucleotide
ctctctcatatccaaaaagggcgctgagtccagaggcgtcctagatattg

SEQ ID NO: 383368 - DNA, 58 bp, Artificial
  Synthetic oligonucleotide
ctctctcattggtgctggtccttcacgcgcctttgtttgagtggcctttaattcaaat

SEQ ID NO: 383369 - DNA, 55 bp, Artificial
  Synthetic oligonucleotide
ctctctccaaaacgttatatcacaacagcagagccagattgctgatttacaaaac

SEQ ID NO: 383370 - DNA, 55 bp, Artificial
  Synthetic oligonucleotide
ctctctccgcgccgtttgtgcagatctggaagggtcgagttccccgctccccaag

SEQ ID NO: 383371 - DNA, 55 bp, Artificial
  Synthetic oligonucleotide
ctctctcctgggtatgcgcaactaaatacctgcgcttgtgtgtttgttgagtctg

SEQ ID NO: 383372 - DNA, 57 bp, Artificial
  Synthetic oligonucleotide
ctctctcgggacgcttgtgatatccctgggcactccggaacgtgccggtataacagg

SEQ ID NO: 383373 - DNA, 60 bp, Artificial
  Synthetic oligonucleotide
ctctctcgtcatatggaggttcattcggtcatgtttcaacattactcgaccaactgaaca

SEQ ID NO: 383374 - DNA, 60 bp, Artificial
  Synthetic oligonucleotide
ctctctctagattcccagagtgaatcgagagaaaactggctctcccttagccatccgagt

SEQ ID NO: 383375 - DNA, 50 bp, Artificial
  Synthetic oligonucleotide
ctctctctccacaactaagccctttcaaaacatctcgagaatagcaattg

SEQ ID NO: 383376 - DNA, 59 bp, Artificial
  Synthetic oligonucleotide
ctctctctgccgagcatacggtcgggatccttcggtcgtcatccctttcgacccagctc

SEQ ID NO: 383377 - DNA, 57 bp, Artificial
  Synthetic oligonucleotide
ctctctctgggatatggatacccaataaattgggagcaccaaagggcaaatgggtaa

SEQ ID NO: 383378 - DNA, 57 bp, Artificial
  Synthetic oligonucleotide
ctctctgaaggctattcgcctgatacggttggttacgatctaatacgtgaattaatt

SEQ ID NO: 383379 - DNA, 55 bp, Artificial
  Synthetic oligonucleotide
ctctctgacactctcagtgaggtgacttgtttagtcttaagtaagtaatttgtac

SEQ ID NO: 383380 - DNA, 60 bp, Artificial
  Synthetic oligonucleotide
ctctctgatgcacatcgcaaatttgggtgctcagctgagaaatgttaggatgccgcgtgg

SEQ ID NO: 383381 - DNA, 59 bp, Artificial
  Synthetic oligonucleotide
ctctctgcaacgtatccggatttgcaatagtttccaaggacaatggaatcagaattggg

SEQ ID NO: 383382 - DNA, 60 bp, Artificial
  Synthetic oligonucleotide
ctctctgcagcctacttcgaccacatgagggcactaggcttctgtccaactggcccggac

SEQ ID NO: 383383 - DNA, 56 bp, Artificial
  Synthetic oligonucleotide
ctctctgcagctgtagctgagccctattacgtggatggcattcctgtctcgtggga

SEQ ID NO: 383384 - DNA, 55 bp, Artificial
  Synthetic oligonucleotide
ctctctgcttgggatgaaacatgaatagataaatagttatctggagcttgctccc

SEQ ID NO: 383385 - DNA, 58 bp, Artificial
  Synthetic oligonucleotide
ctctctggatattgggatgaaagtgagtcgaccttgatggggaaacaaggtcgaagaa

SEQ ID NO: 383386 - DNA, 59 bp, Artificial
  Synthetic oligonucleotide
ctctctggcccaaagttggtccgcttcgccgctccgcctgaatatcaaggtcgccacgc

SEQ ID NO: 383387 - DNA, 57 bp, Artificial
  Synthetic oligonucleotide
ctctctgggcccccacaatcgaagcagactctcccgggtctaacacgctggtcccca

SEQ ID NO: 383388 - DNA, 56 bp, Artificial
  Synthetic oligonucleotide
ctctctgggcggttggataaccaagaattttcttagacacccaaacaggatgtcta

SEQ ID NO: 383389 - DNA, 59 bp, Artificial
  Synthetic oligonucleotide
ctctctggtcggaatagatcctttccgtctgctccaaaacagtcaggtgtttagcctca

SEQ ID NO: 383390 - DNA, 60 bp, Artificial
  Synthetic oligonucleotide
ctctctggtcgggatagatcctttccgtctgcttcaaaacagccaggtcttcagtctcat

SEQ ID NO: 383391 - DNA, 57 bp, Artificial
  Synthetic oligonucleotide
ctctctgtgaacaaaaggctgcgatttcggccttccacttctccgtactgtttcacc

SEQ ID NO: 383392 - DNA, 55 bp, Artificial
  Synthetic oligonucleotide
ctctcttagtcgcctagctgactctgcaactcacagaactcaccttcgccgaccc

SEQ ID NO: 383393 - DNA, 60 bp, Artificial
  Synthetic oligonucleotide
ctctcttcaaaatgttatctcacagcagcaaaaccaaatagcagatcttcaacaatattg

SEQ ID NO: 383394 - DNA, 60 bp, Artificial
  Synthetic oligonucleotide
ctctcttcaacaaatctatcttttgtctagaatcatgtgtgagtagtaacccatataggg

SEQ ID NO: 383395 - DNA, 60 bp, Artificial
  Synthetic oligonucleotide
ctctcttcagaatgttatatcacaacaacaaagccaaattgctgatctacaacactactg

SEQ ID NO: 383396 - DNA, 57 bp, Artificial
  Synthetic oligonucleotide
ctctcttccaccacccacattccatgtgacctccgttccatcaaccctaccctccgc

SEQ ID NO: 383397 - DNA, 59 bp, Artificial
  Synthetic oligonucleotide
ctctcttcggagcaagagcccgtgataccaacggatcgagagggctttatctcgagttc

SEQ ID NO: 383398 - DNA, 55 bp, Artificial
  Synthetic oligonucleotide
ctctcttgccctgcgccgtttcgctcttgtttatggacttccctctccaactgcc

SEQ ID NO: 383399 - DNA, 58 bp, Artificial
  Synthetic oligonucleotide
ctctcttgttctgagcggaaaaatcttaagatagtcgtagagtctataaatgtcgtta

SEQ ID NO: 383400 - DNA, 55 bp, Artificial
  Synthetic oligonucleotide
ctctctttatggtggccccccccacgttgggatgtccccctctcacaacgctcac

SEQ ID NO: 383401 - DNA, 59 bp, Artificial
  Synthetic oligonucleotide
ctctctttccactaaaagttactgtcacactaaacagacgtatgtcagcttctggaatg

SEQ ID NO: 383402 - DNA, 55 bp, Artificial
  Synthetic oligonucleotide
ctctctttggagcctcagattcaaaagaagcttgtactttcgtgagaaccgccga

SEQ ID NO: 383403 - DNA, 60 bp, Artificial
  Synthetic oligonucleotide
ctctcttttagattggaaagtgctctcactttgcaggaaaagcatcctttgcacgccact

SEQ ID NO: 383404 - DNA, 60 bp, Artificial
  Synthetic oligonucleotide
ctctcttttgggcaacaattgaggcaagactttctataaccacaccagatgctaacctca

SEQ ID NO: 383405 - DNA, 60 bp, Artificial
  Synthetic oligonucleotide
ctctgaaacaggcatcttcaacataagttcacctacttgcttaataaatcgtgtccagag

SEQ ID NO: 383406 - DNA, 59 bp, Artificial
  Synthetic oligonucleotide
ctctgaaagtgttactgataccgtcaaagactttatgaaaattgatttatctcacgctc

SEQ ID NO: 383407 - DNA, 60 bp, Artificial
  Synthetic oligonucleotide
ctctgaaatggactcccttggtgcttctgaatgtgatagtcattttgtatatgtttcctg

SEQ ID NO: 383408 - DNA, 57 bp, Artificial
  Synthetic oligonucleotide
ctctgaaatgtatgattctgtcttagtgtcctactcatctgatttagtcatataccg

SEQ ID NO: 383409 - DNA, 54 bp, Artificial
  Synthetic oligonucleotide
ctctgaaccaacagaactgggaccctctagagtacgagaacctacgtgtttctt

SEQ ID NO: 383410 - DNA, 55 bp, Artificial
  Synthetic oligonucleotide
ctctgaaccattaatcgttcccgcaagtagttcttcttttgcggcgacctctgac

SEQ ID NO: 383411 - DNA, 55 bp, Artificial
  Synthetic oligonucleotide
ctctgaagacatgatgcaattctccaaaggtttaatggtggctgacaggtacatg

SEQ ID NO: 383412 - DNA, 57 bp, Artificial
  Synthetic oligonucleotide
ctctgaagcgaatttctggcaagtaagttttaagaagtagatggtaataccttatga

SEQ ID NO: 383413 - DNA, 60 bp, Artificial
  Synthetic oligonucleotide
ctctgaagtcgatggggtcactcgtatcacccactctgcgatacccatgcagggctggcc

SEQ ID NO: 383414 - DNA, 59 bp, Artificial
  Synthetic oligonucleotide
ctctgaagtctgaaagatcccgggaatgaacgtacttgtgaatgtgagactctagggga

SEQ ID NO: 383415 - DNA, 59 bp, Artificial
  Synthetic oligonucleotide
ctctgaatcaagtccctctggacgtgccttctgagattctcaatgagtcttcacccaaa

SEQ ID NO: 383416 - DNA, 55 bp, Artificial
  Synthetic oligonucleotide
ctctgaatcccacggtcattcaaactgtgtccaaaccgaagatacaaccattcag

SEQ ID NO: 383417 - DNA, 55 bp, Artificial
  Synthetic oligonucleotide
ctctgaatctatctatcataacaatgcagaccagtctatgtattgtattgcagat

SEQ ID NO: 383418 - DNA, 55 bp, Artificial
  Synthetic oligonucleotide
ctctgaatctcccagcaactttcataactactaacacccataggtttgggaagag

SEQ ID NO: 383419 - DNA, 55 bp, Artificial
  Synthetic oligonucleotide
ctctgaatgagctgcagtgagtagttccccggtgcgtgaatccattatcgcgaca

SEQ ID NO: 383420 - DNA, 54 bp, Artificial
  Synthetic oligonucleotide
ctctgacaaaactgtgctaatatctgatccggcccggacatctttgagttttgt

SEQ ID NO: 383421 - DNA, 56 bp, Artificial
  Synthetic oligonucleotide
ctctgacaactaattctggtggtagatcaacctccctccgccaggatcctaacctt

SEQ ID NO: 383422 - DNA, 56 bp, Artificial
  Synthetic oligonucleotide
ctctgacacgtggagataccttcgcaactgaatatgagcttgcagccatacctcct

SEQ ID NO: 383423 - DNA, 55 bp, Artificial
  Synthetic oligonucleotide
ctctgacagcctacggatcacacggccactcagcgtctgccagcctaagtgacgg

SEQ ID NO: 383424 - DNA, 55 bp, Artificial
  Synthetic oligonucleotide
ctctgaccccacgggacaatatccactttatgtcggtaatgatgctgcagcgctt

SEQ ID NO: 383425 - DNA, 57 bp, Artificial
  Synthetic oligonucleotide
ctctgaccgcagtcaatactgcctacggactcacgagggggtggtacggaggtggga

SEQ ID NO: 383426 - DNA, 55 bp, Artificial
  Synthetic oligonucleotide
ctctgacgtacaaggtcgctctggactaccacttcgttgccaccgctgctgcgtg

SEQ ID NO: 383427 - DNA, 55 bp, Artificial
  Synthetic oligonucleotide
ctctgacgtggcatccattagagggcaatggagggacaccacatcggagttcttc

SEQ ID NO: 383428 - DNA, 55 bp, Artificial
  Synthetic oligonucleotide
ctctgacgtgtggaagactattccgaccgctacaattagatttcctgctactggt

SEQ ID NO: 383429 - DNA, 57 bp, Artificial
  Synthetic oligonucleotide
ctctgactatcactggcagccgcgtcggttgggtgattgggtccaacctcaaccggg

SEQ ID NO: 383430 - DNA, 55 bp, Artificial
  Synthetic oligonucleotide
ctctgacttccccgaatccggaagagcaaggaacttccggcataactaacgcact

SEQ ID NO: 383431 - DNA, 60 bp, Artificial
  Synthetic oligonucleotide
ctctgagaagctgctaacatacagatgccccgctgacatttgctattggatgtctactat

SEQ ID NO: 383432 - DNA, 60 bp, Artificial
  Synthetic oligonucleotide
ctctgagaatccgagagttggaactgaaaccactataactatcgctgactatgatgtgac

SEQ ID NO: 383433 - DNA, 55 bp, Artificial
  Synthetic oligonucleotide
ctctgagaatcctctacgacgagtttaccaggtttatgaactattggactgttag

SEQ ID NO: 383434 - DNA, 56 bp, Artificial
  Synthetic oligonucleotide
ctctgagacaaaagttatacctacagatgtaaaaatacaggtacctcacaaatgtt

SEQ ID NO: 383435 - DNA, 60 bp, Artificial
  Synthetic oligonucleotide
ctctgagacactgggctcgaggttctaatgctgcttacttggatatagcgaggaaaacac

SEQ ID NO: 383436 - DNA, 55 bp, Artificial
  Synthetic oligonucleotide
ctctgagaccatgttgaagatactgacaattgacggtactacagggaaagatgga

SEQ ID NO: 383437 - DNA, 55 bp, Artificial
  Synthetic oligonucleotide
ctctgagactctctatgcacatttgctacatatcctaactatacctgcaaatcgc

SEQ ID NO: 383438 - DNA, 54 bp, Artificial
  Synthetic oligonucleotide
ctctgagacttgtgttactttaaaaggacctgactcagctgacaagaaattcct

SEQ ID NO: 383439 - DNA, 52 bp, Artificial
  Synthetic oligonucleotide
ctctgaggtttacaccccggaagcacctgaacaaccgactaacgaagggacg

SEQ ID NO: 383440 - DNA, 55 bp, Artificial
  Synthetic oligonucleotide
ctctgagtacactatactggccactgcttcccaaccagaaactgcccaatatgct

SEQ ID NO: 383441 - DNA, 55 bp, Artificial
  Synthetic oligonucleotide
ctctgagtcgaggctcgcgcttatgtattgtgcgggctcgtgttcttcggagggg

SEQ ID NO: 383442 - DNA, 55 bp, Artificial
  Synthetic oligonucleotide
ctctgagtgcttagacagtcatatacttgtcaggtctaccgggttcatgatatct

SEQ ID NO: 383443 - DNA, 55 bp, Artificial
  Synthetic oligonucleotide
ctctgataaagccttccaacctcctgaatgtccaatcgtcttgattgggactcac

SEQ ID NO: 383444 - DNA, 55 bp, Artificial
  Synthetic oligonucleotide
ctctgataagattaccttcctcaaatgagccatcttacctgacaagacagtctga

SEQ ID NO: 383445 - DNA, 55 bp, Artificial
  Synthetic oligonucleotide
ctctgataaggaatggttccatgattggcgcaacaacgagtttcctaagaaaccc

SEQ ID NO: 383446 - DNA, 60 bp, Artificial
  Synthetic oligonucleotide
ctctgatactatcctccggatcacccagggactcgatgatgcaaacaaacgaatcatcgc

SEQ ID NO: 383447 - DNA, 60 bp, Artificial
  Synthetic oligonucleotide
ctctgatagccatcatggcaggcggagcaatttggtactcgttgcaatctctatggtgta

SEQ ID NO: 383448 - DNA, 54 bp, Artificial
  Synthetic oligonucleotide
ctctgataggccataaccctgaccttgacaggtcctaaccccgggcccctaagc

SEQ ID NO: 383449 - DNA, 59 bp, Artificial
  Synthetic oligonucleotide
ctctgatattagcgctcaattaccctctgactttgttcagggcgttcagttaattctcc

SEQ ID NO: 383450 - DNA, 59 bp, Artificial
  Synthetic oligonucleotide
ctctgatcacacatcaatccgtgtcagcctacactttaggagttccgtacgggaaaaca

SEQ ID NO: 383451 - DNA, 60 bp, Artificial
  Synthetic oligonucleotide
ctctgatcagagaaaaccagatgctcttgcacaaaatatctaatttgactggaattgcat

SEQ ID NO: 383452 - DNA, 60 bp, Artificial
  Synthetic oligonucleotide
ctctgatctgcgtgcatttgtatcggccgatacagtagagcctataaatgcagtagcatt

SEQ ID NO: 383453 - DNA, 58 bp, Artificial
  Synthetic oligonucleotide
ctctgatgccgacggccagcttacctgtaaaaccaccatgggtaataagaccttctca

SEQ ID NO: 383454 - DNA, 55 bp, Artificial
  Synthetic oligonucleotide
ctctgatgctgggtcaatcaacaaaccagctgtgtccaaacttgagttgtctgct

SEQ ID NO: 383455 - DNA, 56 bp, Artificial
  Synthetic oligonucleotide
ctctgatggacgttcgagtcgcaaaccttataatacaatttccaaggaattgggtc

SEQ ID NO: 383456 - DNA, 60 bp, Artificial
  Synthetic oligonucleotide
ctctgatggagaagagttcaaccttaaagtgaggaacgagggtggtctggatgagtcaga

SEQ ID NO: 383457 - DNA, 60 bp, Artificial
  Synthetic oligonucleotide
ctctgatgggcttaagcctacagtacttctaacagcccatgactctccgggcattatttc

SEQ ID NO: 383458 - DNA, 55 bp, Artificial
  Synthetic oligonucleotide
ctctgattctgacgctacagcagtggataaaccaacgcgcccagatgtttcggtg

SEQ ID NO: 383459 - DNA, 59 bp, Artificial
  Synthetic oligonucleotide
ctctgattgcagcaatgttaagtcaacgaaccatgtcgctagatttcgtgaccactaat

SEQ ID NO: 383460 - DNA, 52 bp, Artificial
  Synthetic oligonucleotide
ctctgatttctacgataaccgacccagttgcgttaaaggggacctggtttcg

SEQ ID NO: 383461 - DNA, 60 bp, Artificial
  Synthetic oligonucleotide
ctctgattttacattcgaaacatgggatccacttgatactccatattcatccatacatca

SEQ ID NO: 383462 - DNA, 55 bp, Artificial
  Synthetic oligonucleotide
ctctgcaaccaaataccaacatttcgggtaagaaagagcttgttatgtatggcag

SEQ ID NO: 383463 - DNA, 55 bp, Artificial
  Synthetic oligonucleotide
ctctgcaagatcccaaagtgagaggcctttatctccctgctggtggctccagttc

SEQ ID NO: 383464 - DNA, 55 bp, Artificial
  Synthetic oligonucleotide
ctctgcaatggagactcacgaacttgtactcggtcacgcggctaggcgcagactc

SEQ ID NO: 383465 - DNA, 54 bp, Artificial
  Synthetic oligonucleotide
ctctgcaccaagaagggaaatgtgaatcgtgcgtctacaacatgatggggaaac

SEQ ID NO: 383466 - DNA, 55 bp, Artificial
  Synthetic oligonucleotide
ctctgcacgtccatctcaaaaccaacgtggaaacccagttcggacctctcacttg

SEQ ID NO: 383467 - DNA, 52 bp, Artificial
  Synthetic oligonucleotide
ctctgcagatcttgatgaacttcttgttcacaggagtggacaggttttgtaa

SEQ ID NO: 383468 - DNA, 55 bp, Artificial
  Synthetic oligonucleotide
ctctgcagctgcaacgtgtcctccccggtaacgggatccactagcctggccttct

SEQ ID NO: 383469 - DNA, 55 bp, Artificial
  Synthetic oligonucleotide
ctctgcaggcggcaacggtgtgggatactgctcatgcgtttcccgctcgatgctc

SEQ ID NO: 383470 - DNA, 60 bp, Artificial
  Synthetic oligonucleotide
ctctgcaggtcgagatgtcacgcgccgacgtgtatgcactgctcgtaaagggcacgtccc

SEQ ID NO: 383471 - DNA, 55 bp, Artificial
  Synthetic oligonucleotide
ctctgcagtcagattcgtagatccactcacaggagcgacattggatgagagtcct

SEQ ID NO: 383472 - DNA, 55 bp, Artificial
  Synthetic oligonucleotide
ctctgcagtcgatgtgtacgtaaatggtgcacccgcactcgcaatcaattcgtcg

SEQ ID NO: 383473 - DNA, 57 bp, Artificial
  Synthetic oligonucleotide
ctctgcagtttgccatgcagcaagagactaaattgtgctaaacaaagattatgaagc

SEQ ID NO: 383474 - DNA, 60 bp, Artificial
  Synthetic oligonucleotide
ctctgcatagattgaatgcatatgaccagagtggaagacttgttgctaaacttgttgcta

SEQ ID NO: 383475 - DNA, 60 bp, Artificial
  Synthetic oligonucleotide
ctctgcatccctgtgtgatagagtacctgacctagctctagcagaaatgaaaatggccct

SEQ ID NO: 383476 - DNA, 55 bp, Artificial
  Synthetic oligonucleotide
ctctgcatgacttgttcgatgagaaacagtgtcaggcacacacactcacttgcag

SEQ ID NO: 383477 - DNA, 60 bp, Artificial
  Synthetic oligonucleotide
ctctgcatgctcaacaatagtttctattatatgaagggaggtgtgaacaccttcctgatt

SEQ ID NO: 383478 - DNA, 60 bp, Artificial
  Synthetic oligonucleotide
ctctgcatggatgtatgaagctctgacaggaaatttacaagctgtggcaacaatgaagag

SEQ ID NO: 383479 - DNA, 60 bp, Artificial
  Synthetic oligonucleotide
ctctgcattcgcggagcctgttactttaaacaattctcctgtgcgctcattcgttcaatg

SEQ ID NO: 383480 - DNA, 55 bp, Artificial
  Synthetic oligonucleotide
ctctgcatttgacctgtcccgggtgtgctaggagaaatatacagcatgggagatc

SEQ ID NO: 383481 - DNA, 55 bp, Artificial
  Synthetic oligonucleotide
ctctgccaatgaaacggagggaactccgcttgataccaagatagcaagaaccaag

SEQ ID NO: 383482 - DNA, 55 bp, Artificial
  Synthetic oligonucleotide
ctctgccaccctggatgaatgacctacggaaagcggtcgatctaggtttgcaggg

SEQ ID NO: 383483 - DNA, 55 bp, Artificial
  Synthetic oligonucleotide
ctctgccactgagaacgcaacgactgtagttacacaacaacctagtgctgcacta

SEQ ID NO: 383484 - DNA, 55 bp, Artificial
  Synthetic oligonucleotide
ctctgccagtctctttgggcccccataaactctttaaagtgctttaaataatgcg

SEQ ID NO: 383485 - DNA, 60 bp, Artificial
  Synthetic oligonucleotide
ctctgccatactcagcagcctcactgtgacccagctcctaaggcggctacaccagtggat

SEQ ID NO: 383486 - DNA, 60 bp, Artificial
  Synthetic oligonucleotide
ctctgccatccgacgggaattacttccctcatcacaaatgtcatcagcaacagtttagga

SEQ ID NO: 383487 - DNA, 55 bp, Artificial
  Synthetic oligonucleotide
ctctgccatgcaaagtgggcattaatcctggaggtattgaatggactctgttggc

SEQ ID NO: 383488 - DNA, 60 bp, Artificial
  Synthetic oligonucleotide
ctctgcccaaggtcttacataagaggactactggactttcagcaatgtcaatgaccgacc

SEQ ID NO: 383489 - DNA, 55 bp, Artificial
  Synthetic oligonucleotide
ctctgccccctaatacgtttgggttaatactaggcagaggcagtaccacagtaaa

SEQ ID NO: 383490 - DNA, 57 bp, Artificial
  Synthetic oligonucleotide
ctctgcccgcattcccgtcgcgcccgcttctgccggcccgaccgagtatgttcctta

SEQ ID NO: 383491 - DNA, 55 bp, Artificial
  Synthetic oligonucleotide
ctctgcccggctgaggtcctcgggtctgagtttgaggaaacgacagtcgtctctg

SEQ ID NO: 383492 - DNA, 55 bp, Artificial
  Synthetic oligonucleotide
ctctgccgaaacaaatcagagcgaaagcggaaagcagaagcgatggattgggcgg

SEQ ID NO: 383493 - DNA, 55 bp, Artificial
  Synthetic oligonucleotide
ctctgcctgagttgcagtgagtagttcccctgtgcgagaatccatgattggcgca

SEQ ID NO: 383494 - DNA, 58 bp, Artificial
  Synthetic oligonucleotide
ctctgcctgccccagcaacctccgtcccccccgttgacacctcagccaccactgtctc

SEQ ID NO: 383495 - DNA, 60 bp, Artificial
  Synthetic oligonucleotide
ctctgcctttgcatatgtctgtactttcctgagtacgcatttgcattcatctgcaataga

SEQ ID NO: 383496 - DNA, 60 bp, Artificial
  Synthetic oligonucleotide
ctctgcgaccatcagcggagattgtggacccgtcgcaccagagaccatcagggctcttgg

SEQ ID NO: 383497 - DNA, 59 bp, Artificial
  Synthetic oligonucleotide
ctctgcgacccaatacgcgtttttgtcaaaggagagccgcacaagcagtccaaactcga

SEQ ID NO: 383498 - DNA, 58 bp, Artificial
  Synthetic oligonucleotide
ctctgcgacccagtgcgcttgtttgtaaagaacgagccacacccacggaagaaattgc

SEQ ID NO: 383499 - DNA, 52 bp, Artificial
  Synthetic oligonucleotide
ctctgcgagtgcgattgaagcggaggaagtgcacacgaagtggccactatgc

SEQ ID NO: 383500 - DNA, 55 bp, Artificial
  Synthetic oligonucleotide
ctctgcgagtttgcgcaccagctgagcggtgactatgacatcttgcgcgcagtag

SEQ ID NO: 383501 - DNA, 60 bp, Artificial
  Synthetic oligonucleotide
ctctgcgcatggagatgccaccatgcgctctcgggctcttctgtttctgctcctcgtgtt

SEQ ID NO: 383502 - DNA, 57 bp, Artificial
  Synthetic oligonucleotide
ctctgcgccccaacaaaaggctctagttgatcaagtgatcggaagtagaaacccagg

SEQ ID NO: 383503 - DNA, 55 bp, Artificial
  Synthetic oligonucleotide
ctctgcgcgtcgaccctggtgtcgacggccccctgcaatctaccctcttgggggt

SEQ ID NO: 383504 - DNA, 60 bp, Artificial
  Synthetic oligonucleotide
ctctgcgcttccgagatagtggagggcgaatcataacggttgaagagttgctagctggtg

SEQ ID NO: 383505 - DNA, 59 bp, Artificial
  Synthetic oligonucleotide
ctctgcgctttgcctactaatcaattactaacaacaacatctacctcatccctataccc

SEQ ID NO: 383506 - DNA, 55 bp, Artificial
  Synthetic oligonucleotide
ctctgcggagaggctggcagatcgagccctggagtcctcagcttagcaggtagag

SEQ ID NO: 383507 - DNA, 56 bp, Artificial
  Synthetic oligonucleotide
ctctgcggagtccgggcttactatccacccaactcctacatccccgcccaagtcca

SEQ ID NO: 383508 - DNA, 60 bp, Artificial
  Synthetic oligonucleotide
ctctgcggcaacgtcgttagctgtttggcaacctcctctagcacttctcccgtcgatctg

SEQ ID NO: 383509 - DNA, 60 bp, Artificial
  Synthetic oligonucleotide
ctctgcggcctgtcgagctgcaaagctccaggactgcacaatgcttgtgtgcggagacga

SEQ ID NO: 383510 - DNA, 56 bp, Artificial
  Synthetic oligonucleotide
ctctgctaacccatccacttacttgctttgtggaggtacttgggagttagtttcta

SEQ ID NO: 383511 - DNA, 60 bp, Artificial
  Synthetic oligonucleotide
ctctgctaccagatgctgaaagattcagttttccgagagtaattaactcagctgatggta

SEQ ID NO: 383512 - DNA, 55 bp, Artificial
  Synthetic oligonucleotide
ctctgctagatcccagagtgagggttcctgctggtggctccagttccggaacagt

SEQ ID NO: 383513 - DNA, 56 bp, Artificial
  Synthetic oligonucleotide
ctctgctataagacatgccctattaggacatagagttagtcctagttgtgaatatc

SEQ ID NO: 383514 - DNA, 60 bp, Artificial
  Synthetic oligonucleotide
ctctgctatgaggtatgctgacatatacgagcaaaattcaaaaacagctggacatgtaac

SEQ ID NO: 383515 - DNA, 51 bp, Artificial
  Synthetic oligonucleotide
ctctgctattcgccaaacgctggtacactaggatggcaacagccgttgtga

SEQ ID NO: 383516 - DNA, 60 bp, Artificial
  Synthetic oligonucleotide
ctctgctcaggttattctgctttgtgtgctacggatatgcgccgcgtgcagacgggacga

SEQ ID NO: 383517 - DNA, 60 bp, Artificial
  Synthetic oligonucleotide
ctctgctcgtttaccatacaattaacaacaagatggcacacggtgagccatactatagct

SEQ ID NO: 383518 - DNA, 55 bp, Artificial
  Synthetic oligonucleotide
ctctgctgaacatgatgcagaacggtcctctcgtctatgtggagacgtggcctaa

SEQ ID NO: 383519 - DNA, 52 bp, Artificial
  Synthetic oligonucleotide
ctctgctgagtagtcctatgatgggaggaaccttcacaatagcttacgtggc

SEQ ID NO: 383520 - DNA, 60 bp, Artificial
  Synthetic oligonucleotide
ctctgctgcattctataatagaatataggtatagctttggatagaaatgtatgatgtgac

SEQ ID NO: 383521 - DNA, 53 bp, Artificial
  Synthetic oligonucleotide
ctctgctggtttgctgactataccacatgagcgtttggcgtataagaacaatg

SEQ ID NO: 383522 - DNA, 57 bp, Artificial
  Synthetic oligonucleotide
ctctgcttaacttgacagggtttggcccgatttcatacgttcgagtggacgaagata

SEQ ID NO: 383523 - DNA, 51 bp, Artificial
  Synthetic oligonucleotide
ctctgcttggttgtttaggttctgactgtggcgaagttaccatggcagctc

SEQ ID NO: 383524 - DNA, 55 bp, Artificial
  Synthetic oligonucleotide
ctctgcttttgacgagaggaggaataaatacctggaagaacatcccagcgctggg

SEQ ID NO: 383525 - DNA, 57 bp, Artificial
  Synthetic oligonucleotide
ctctgcttttgcaaagagatccgttaccccttggtctcagatccgttctttagtcca

SEQ ID NO: 383526 - DNA, 55 bp, Artificial
  Synthetic oligonucleotide
ctctggaaacagtctgcattgtacccaaccatctgtcttagattggccactttta

SEQ ID NO: 383527 - DNA, 59 bp, Artificial
  Synthetic oligonucleotide
ctctggaacacaacagtggagaggccttgcaagatattttaagattcgcctgagaaaaa

SEQ ID NO: 383528 - DNA, 60 bp, Artificial
  Synthetic oligonucleotide
ctctggaagcttgacactccagccggctcgcatctccgcagtggcagtggagtacaaagt

SEQ ID NO: 383529 - DNA, 60 bp, Artificial
  Synthetic oligonucleotide
ctctggaatcacgcaataacgtggctactaggggtgatgcccaccgctagctgccacgtt

SEQ ID NO: 383530 - DNA, 60 bp, Artificial
  Synthetic oligonucleotide
ctctggaattataacatcagatgctccagttcacaattgtgacacaaggtgccaaacccc

SEQ ID NO: 383531 - DNA, 60 bp, Artificial
  Synthetic oligonucleotide
ctctggacaacacaccgtcaagtgcagagttgctgggtggtgattccgctaaagaatttg

SEQ ID NO: 383532 - DNA, 57 bp, Artificial
  Synthetic oligonucleotide
ctctggacagtttattcggattttaaaccgtactctgaattgctagccttatgcaaa

SEQ ID NO: 383533 - DNA, 60 bp, Artificial
  Synthetic oligonucleotide
ctctggacatggacgcacatctaatgggcttcctctcccatttaccgtagtcgacgtgcg

SEQ ID NO: 383534 - DNA, 60 bp, Artificial
  Synthetic oligonucleotide
ctctggactttcatgattccaatgtgaggaatttatatgagaaggtcagatcacaactga

SEQ ID NO: 383535 - DNA, 55 bp, Artificial
  Synthetic oligonucleotide
ctctggagaaccttgtgttactcaacgcggcgtctctggccgggacgcacggtct

SEQ ID NO: 383536 - DNA, 51 bp, Artificial
  Synthetic oligonucleotide
ctctggagaatcatttgcgcttgcatcatcactagttaatctagttgacac

SEQ ID NO: 383537 - DNA, 60 bp, Artificial
  Synthetic oligonucleotide
ctctggagatctcccatggaaagcatggattccacttctgaatgcacacggctttaaggg

SEQ ID NO: 383538 - DNA, 55 bp, Artificial
  Synthetic oligonucleotide
ctctggagcatatcgttgtctaacttcaacggtgctcggcctgacaggtggggtc

SEQ ID NO: 383539 - DNA, 55 bp, Artificial
  Synthetic oligonucleotide
ctctggagtatctaagggacattgggtgtgacttactgttgtggacttgcagaac

SEQ ID NO: 383540 - DNA, 60 bp, Artificial
  Synthetic oligonucleotide
ctctggagtttcttatggacaacaggaccgtgctgcactcccctctgcaccttctccaaa

SEQ ID NO: 383541 - DNA, 60 bp, Artificial
  Synthetic oligonucleotide
ctctggcagaggaagaccacacaaaatggcatcaagatgcccgatcattgcatctagaat

SEQ ID NO: 383542 - DNA, 60 bp, Artificial
  Synthetic oligonucleotide
ctctggcagtccgcattttcttagttagcgagcttaagagaggccgcaatacggcaggtg

SEQ ID NO: 383543 - DNA, 50 bp, Artificial
  Synthetic oligonucleotide
ctctggcatactggagtcaaatccagacggacagcttaataagcgcggtg

SEQ ID NO: 383544 - DNA, 55 bp, Artificial
  Synthetic oligonucleotide
ctctggccagccgattcaccttccagacttctttccagagattgtcttccaactc

SEQ ID NO: 383545 - DNA, 50 bp, Artificial
  Synthetic oligonucleotide
ctctggccgttcaaacacaacgagagccatcgcacagcgcttttctctca

SEQ ID NO: 383546 - DNA, 55 bp, Artificial
  Synthetic oligonucleotide
ctctggccttgaacgctgctctagaggtggtgtcactgtgtccaaggacgcggtc

SEQ ID NO: 383547 - DNA, 56 bp, Artificial
  Synthetic oligonucleotide
ctctggcgaaccggagtccgtgaactccgttgtggcgaacactaccaggcgctccg

SEQ ID NO: 383548 - DNA, 59 bp, Artificial
  Synthetic oligonucleotide
ctctggcggcaatatccagtggaagacccttgctaaaacttacactttaggattgtgca

SEQ ID NO: 383549 - DNA, 51 bp, Artificial
  Synthetic oligonucleotide
ctctggcgtccctgaatctagctcctgggtccccacgcaacacaaaagtct

SEQ ID NO: 383550 - DNA, 60 bp, Artificial
  Synthetic oligonucleotide
ctctggctaagggtgatcttactccgcttcgcgcgttgtatgagaacgtgctttctgtca

SEQ ID NO: 383551 - DNA, 60 bp, Artificial
  Synthetic oligonucleotide
ctctggctagtataggaacggcatttgagagatctatatccgagactagacatgtatacc

SEQ ID NO: 383552 - DNA, 60 bp, Artificial
  Synthetic oligonucleotide
ctctggctgcacgtacacaagtgcgttgcagccacattcgcatcactatacaacatctaa

SEQ ID NO: 383553 - DNA, 55 bp, Artificial
  Synthetic oligonucleotide
ctctggctgttcagccatataggggccacctcattcgcagtggacaggtcagtac

SEQ ID NO: 383554 - DNA, 60 bp, Artificial
  Synthetic oligonucleotide
ctctggcttagaacaaaatcaagcagctgagatgctatgtctgttgcgtctgtggggcca

SEQ ID NO: 383555 - DNA, 58 bp, Artificial
  Synthetic oligonucleotide
ctctggcttcctgccgtgcatgctgccaactgtctgcggttgccaactggcgccgcct

SEQ ID NO: 383556 - DNA, 55 bp, Artificial
  Synthetic oligonucleotide
ctctggcttttgagaggcctttacctgccaccataacatatcatgataagggtaa

SEQ ID NO: 383557 - DNA, 58 bp, Artificial
  Synthetic oligonucleotide
ctctgggacttgatcaaaggacgatgataagaatggacaattaaatacctctattggg

SEQ ID NO: 383558 - DNA, 60 bp, Artificial
  Synthetic oligonucleotide
ctctgggagaatggagcgagctctgtttggaatgcaacaactgccatcggactctgccac

SEQ ID NO: 383559 - DNA, 55 bp, Artificial
  Synthetic oligonucleotide
ctctgggagaatggctcaaaaggttggtggtggaaacttccagatgctttgaaaa

SEQ ID NO: 383560 - DNA, 57 bp, Artificial
  Synthetic oligonucleotide
ctctgggagctgcctacgatgagacaaaacggtactgggtctttcagggcaaacctg

SEQ ID NO: 383561 - DNA, 60 bp, Artificial
  Synthetic oligonucleotide
ctctgggagtgatggcccctgcaagattccgattgtctccgttgctagcctcaatgacat

SEQ ID NO: 383562 - DNA, 60 bp, Artificial
  Synthetic oligonucleotide
ctctgggatcgccatctgcagaactaaatgattaggacaattttgaacaatggatgatat

SEQ ID NO: 383563 - DNA, 54 bp, Artificial
  Synthetic oligonucleotide
ctctgggcccccatgaactctttaaagtgttttaggtaatgcgggtcgacgtca

SEQ ID NO: 383564 - DNA, 60 bp, Artificial
  Synthetic oligonucleotide
ctctgggccgccatgtatggctactctgactttatagagaccgagctaggccccttccaa

SEQ ID NO: 383565 - DNA, 60 bp, Artificial
  Synthetic oligonucleotide
ctctgggcctagagtgtgctattatggaggagtgtgggatgccgcagtggctcatccgct

SEQ ID NO: 383566 - DNA, 59 bp, Artificial
  Synthetic oligonucleotide
ctctggggagagaagggtggatcggatgggaagagcatatcctacgggaatccgtgatc

SEQ ID NO: 383567 - DNA, 55 bp, Artificial
  Synthetic oligonucleotide
ctctggggccctcgggatccaactgttctagttgcaaaaggtgatgctaatacct

SEQ ID NO: 383568 - DNA, 55 bp, Artificial
  Synthetic oligonucleotide
ctctgggggttacaaaggctgccttgactggtcgggatcctgacttacctccagg

SEQ ID NO: 383569 - DNA, 55 bp, Artificial
  Synthetic oligonucleotide
ctctggggtaccgatcctggaggcgttccataggtgcttataccgtacttctggg

SEQ ID NO: 383570 - DNA, 55 bp, Artificial
  Synthetic oligonucleotide
ctctggggtctgatgagtgttttgcaaggagcaggaaatactgcagctctcggag

SEQ ID NO: 383571 - DNA, 56 bp, Artificial
  Synthetic oligonucleotide
ctctggggtgaaaagggaggatcggatgggaagagtatatcccatgggaatccctg

SEQ ID NO: 383572 - DNA, 54 bp, Artificial
  Synthetic oligonucleotide
ctctgggtaactgcttttcggcgggaataagacgcacttttacataagaaggtc

SEQ ID NO: 383573 - DNA, 60 bp, Artificial
  Synthetic oligonucleotide
ctctggtaatactggagtgattaattacaatttttactccaattcatacacagatgcagt

SEQ ID NO: 383574 - DNA, 53 bp, Artificial
  Synthetic oligonucleotide
ctctggtattacggtacctttgtacgcctgttttacactcccttccctacgca

SEQ ID NO: 383575 - DNA, 59 bp, Artificial
  Synthetic oligonucleotide
ctctggtatttataccagttattatagatactgaagagaagcacaggaattaccttgct

SEQ ID NO: 383576 - DNA, 59 bp, Artificial
  Synthetic oligonucleotide
ctctggtcaacctatacaccgtgatatatgttcagcgtaattctcatacacggaaacga

SEQ ID NO: 383577 - DNA, 52 bp, Artificial
  Synthetic oligonucleotide
ctctggtcagtagcatgtgcggcgagttggcaatcccagagggcgggcgggg

SEQ ID NO: 383578 - DNA, 55 bp, Artificial
  Synthetic oligonucleotide
ctctggtcctataatgcagaacttcttgttgctctggagaatcaacatacagttg

SEQ ID NO: 383579 - DNA, 60 bp, Artificial
  Synthetic oligonucleotide
ctctggtcggaatagatcctttccgtctgcttcaaaacagtcaagtgttcagtctcatta

SEQ ID NO: 383580 - DNA, 60 bp, Artificial
  Synthetic oligonucleotide
ctctggtcggaatagatccttttcgtctgctgcagaacagccaggtcttcagtctcatta

SEQ ID NO: 383581 - DNA, 55 bp, Artificial
  Synthetic oligonucleotide
ctctggtcttacaatgcggaacttcttgttgccctagagaatcagcatacaatcg

SEQ ID NO: 383582 - DNA, 55 bp, Artificial
  Synthetic oligonucleotide
ctctggtcttacaatgcggagcttcttgtcgctctggagaaccaacatacaattg

SEQ ID NO: 383583 - DNA, 59 bp, Artificial
  Synthetic oligonucleotide
ctctggtgagtcttggaaggagtgcctgcttgtagccctgggtggttcgcaggcccctg

SEQ ID NO: 383584 - DNA, 56 bp, Artificial
  Synthetic oligonucleotide
ctctggtggatccagtactttatagcacgcctagaagccgagctgtatgtatgggt

SEQ ID NO: 383585 - DNA, 55 bp, Artificial
  Synthetic oligonucleotide
ctctggtggtaaagtttatctcgacaccaaggaaccttggcaggttgtgaagctg

SEQ ID NO: 383586 - DNA, 55 bp, Artificial
  Synthetic oligonucleotide
ctctggtggttatggttcttctgccctttcctcgcctttgagacttaagattgag

SEQ ID NO: 383587 - DNA, 54 bp, Artificial
  Synthetic oligonucleotide
ctctggtgtgtgcaagtggtggattatcgacattagacgaccatcacgtgcagg

SEQ ID NO: 383588 - DNA, 55 bp, Artificial
  Synthetic oligonucleotide
ctctggttattgtgattgaccgtaaacctcatcttaacggatctggacgtctaca

SEQ ID NO: 383589 - DNA, 55 bp, Artificial
  Synthetic oligonucleotide
ctctggttctggtgtatagctggtcctctgcgctgtatatcttgaaatagagggg

SEQ ID NO: 383590 - DNA, 55 bp, Artificial
  Synthetic oligonucleotide
ctctgtaaagtactggaagatcctccattgcatttctgccatcggatgcctccca

SEQ ID NO: 383591 - DNA, 56 bp, Artificial
  Synthetic oligonucleotide
ctctgtaacgtctacaaagcaatcgctaagtgtgacggtaagatactaacaccgct

SEQ ID NO: 383592 - DNA, 55 bp, Artificial
  Synthetic oligonucleotide
ctctgtaagttgcctgacggtagacatggtgtttactctggaaacgtctaatgtg

SEQ ID NO: 383593 - DNA, 51 bp, Artificial
  Synthetic oligonucleotide
ctctgtaatcccctgaacccatttgttagccataaagagatagagtcagta

SEQ ID NO: 383594 - DNA, 60 bp, Artificial
  Synthetic oligonucleotide
ctctgtaatgactcactaggatcaccagacaagtaagcagctgtgaactcttcatgcaac

SEQ ID NO: 383595 - DNA, 55 bp, Artificial
  Synthetic oligonucleotide
ctctgtaattgattgcaacgtagcagtcactcaggtcgttgacttcagtctagac

SEQ ID NO: 383596 - DNA, 59 bp, Artificial
  Synthetic oligonucleotide
ctctgtacgttgtcaacgtgtgactttgggtttcatagtcccgcacttccagcctgtca

SEQ ID NO: 383597 - DNA, 55 bp, Artificial
  Synthetic oligonucleotide
ctctgtaggtagtttgtccaattatgtcacaccacagaagtaaggttccttcaca

SEQ ID NO: 383598 - DNA, 55 bp, Artificial
  Synthetic oligonucleotide
ctctgtagtatagtttccatggaattgggtccttcaacgagaagaacgaagcgga

SEQ ID NO: 383599 - DNA, 55 bp, Artificial
  Synthetic oligonucleotide
ctctgtagtgactaccgtcaaagtcgtaatgcggccgccctaatagccggttgtg

SEQ ID NO: 383600 - DNA, 60 bp, Artificial
  Synthetic oligonucleotide
ctctgtatcgctaaggagactaacaacttggtcaactgtattgacaactatgctatagag

SEQ ID NO: 383601 - DNA, 55 bp, Artificial
  Synthetic oligonucleotide
ctctgtatctgcccttccctatcgaagccatgggaaagacttatagctccccgac

SEQ ID NO: 383602 - DNA, 60 bp, Artificial
  Synthetic oligonucleotide
ctctgtcaaatatgctagcaacaaccgggtttcactcacattccggctgcaatccaggga

SEQ ID NO: 383603 - DNA, 55 bp, Artificial
  Synthetic oligonucleotide
ctctgtcaacctatttgaggacagtcacaatgggaaactatgtagactgaaagga

SEQ ID NO: 383604 - DNA, 60 bp, Artificial
  Synthetic oligonucleotide
ctctgtcaatacgtttggactatctgtcttgtacttagagtggaacgagtcatgcaaaga

SEQ ID NO: 383605 - DNA, 55 bp, Artificial
  Synthetic oligonucleotide
ctctgtcactctaagtccagaaaccgtctcacatctccaggggttaatgccttcg

SEQ ID NO: 383606 - DNA, 60 bp, Artificial
  Synthetic oligonucleotide
ctctgtcagacttctacgcgtcacggagtgtttctgttcaccgacactcatggaactcat

SEQ ID NO: 383607 - DNA, 58 bp, Artificial
  Synthetic oligonucleotide
ctctgtccatacgaggcttttgtgcttagaaagccactttttttggacagtactgcca

SEQ ID NO: 383608 - DNA, 56 bp, Artificial
  Synthetic oligonucleotide
ctctgtcccggagatgtcgtatcccggcggtctcaccctagaggttttaatcttga

SEQ ID NO: 383609 - DNA, 55 bp, Artificial
  Synthetic oligonucleotide
ctctgtcccgttagtgggtgggctatatacagtaaggacaacggtataagaattg

SEQ ID NO: 383610 - DNA, 59 bp, Artificial
  Synthetic oligonucleotide
ctctgtccgacatcttcagcgtgccctataccaagtggggtaatacctggaatgttagc

SEQ ID NO: 383611 - DNA, 55 bp, Artificial
  Synthetic oligonucleotide
ctctgtcgaccgccacctacacggtagcttcttactttgaacggggcgtcgccaa

SEQ ID NO: 383612 - DNA, 60 bp, Artificial
  Synthetic oligonucleotide
ctctgtcgccgccactctggggttcggggcatacatgtccaaggcacatgggatcgaccc

SEQ ID NO: 383613 - DNA, 52 bp, Artificial
  Synthetic oligonucleotide
ctctgtcggcccggaaacccgggccgacagggcgccccccagtccgcggcag

SEQ ID NO: 383614 - DNA, 57 bp, Artificial
  Synthetic oligonucleotide
ctctgtctcactcaacgcctatcccacctcaacggaagactgtgctgttgaagttta

SEQ ID NO: 383615 - DNA, 55 bp, Artificial
  Synthetic oligonucleotide
ctctgtgacctggtctcagggtagtggaaggggaggtttgcccacacaaagttgg

SEQ ID NO: 383616 - DNA, 60 bp, Artificial
  Synthetic oligonucleotide
ctctgtgagacaagatgttgtggcaatgactgattggtcagggtacagcggaagtttcgt

SEQ ID NO: 383617 - DNA, 55 bp, Artificial
  Synthetic oligonucleotide
ctctgtgataccagcttatgtctttgctataatgctttatcgttcagttgatagg

SEQ ID NO: 383618 - DNA, 56 bp, Artificial
  Synthetic oligonucleotide
ctctgtgcccgcagaaattctgcggaagtcccggaggtttgctccggccctgcccg

SEQ ID NO: 383619 - DNA, 60 bp, Artificial
  Synthetic oligonucleotide
ctctgtggaatgacttagagcataagcataagctcagtcctgcagcagaggcagacatct

SEQ ID NO: 383620 - DNA, 60 bp, Artificial
  Synthetic oligonucleotide
ctctgtggataggcagcagccgttaccccatatgattttggagtatcggcctctatctgg

SEQ ID NO: 383621 - DNA, 60 bp, Artificial
  Synthetic oligonucleotide
ctctgtgtgcctctcgggcacatatgatatacttaggggtccaacgaccaacgagctccc

SEQ ID NO: 383622 - DNA, 54 bp, Artificial
  Synthetic oligonucleotide
ctctgtgtgtcaacccggatcatcttcgcgttaccaccgcgaagcagaatcgtg

SEQ ID NO: 383623 - DNA, 55 bp, Artificial
  Synthetic oligonucleotide
ctctgtgttcagggcgaagtttgtgtatagttattcctttggtatttccactcac

SEQ ID NO: 383624 - DNA, 56 bp, Artificial
  Synthetic oligonucleotide
ctctgttaactgaggggatgagtctaggtttaggatgactgaattgaaggttaact

SEQ ID NO: 383625 - DNA, 55 bp, Artificial
  Synthetic oligonucleotide
ctctgttacagtcgttggatacaagaaatagggtcatagaggttgataacccttc

SEQ ID NO: 383626 - DNA, 59 bp, Artificial
  Synthetic oligonucleotide
ctctgttaggagccgtggcgtgtctcctgaccaagtgggaaagtcacttcgatctgtta

SEQ ID NO: 383627 - DNA, 56 bp, Artificial
  Synthetic oligonucleotide
ctctgttaggtacagacgtggagcctaccacagtcaaccacgtggacaaacacgtc

SEQ ID NO: 383628 - DNA, 58 bp, Artificial
  Synthetic oligonucleotide
ctctgttccggacttctcgttagaccccaattacacaattgccgaagtgcatgttcgc

SEQ ID NO: 383629 - DNA, 59 bp, Artificial
  Synthetic oligonucleotide
ctctgttgaaggcaaaagttgcatcaataggtgtttttatgtggagttgataagaggaa

SEQ ID NO: 383630 - DNA, 51 bp, Artificial
  Synthetic oligonucleotide
ctctgttgacccttgccggcacgtaaagtcttacgcgtccgccgagctcaa

SEQ ID NO: 383631 - DNA, 59 bp, Artificial
  Synthetic oligonucleotide
ctctgttgagggtaaaggctgcatcaatagatgtttttatgtggagttgataaggggaa

SEQ ID NO: 383632 - DNA, 55 bp, Artificial
  Synthetic oligonucleotide
ctctgttgtatgacactctaccagagactgttagcgataatattactctacctga

SEQ ID NO: 383633 - DNA, 60 bp, Artificial
  Synthetic oligonucleotide
ctctgttgtcctctcccggaaatacacctcctttccatggctgctaggttgtgctgccaa

SEQ ID NO: 383634 - DNA, 55 bp, Artificial
  Synthetic oligonucleotide
ctctgtttacctgatgaggtgaccaaagagattccagtatcttcccttttgatgc

SEQ ID NO: 383635 - DNA, 52 bp, Artificial
  Synthetic oligonucleotide
ctctgtttatgatgaatattgttccaaccctgcttcactctttgctaaaggc

SEQ ID NO: 383636 - DNA, 53 bp, Artificial
  Synthetic oligonucleotide
ctctgtttcgacgatgggaaaccgtacgtcgttacgcggacagacgacacccg

SEQ ID NO: 383637 - DNA, 55 bp, Artificial
  Synthetic oligonucleotide
ctctgtttgaacgtttccaacgctgcttacgctcgaaggtcgtgttgccggtggg

SEQ ID NO: 383638 - DNA, 55 bp, Artificial
  Synthetic oligonucleotide
ctcttaaaacttgttgagatgcaagggcccaaaggacaagctaacatggaaatgg

SEQ ID NO: 383639 - DNA, 59 bp, Artificial
  Synthetic oligonucleotide
ctcttaaaccaatggttgagaatgcaaaaccaacacttcgtcaaatcatgcaccatttc

SEQ ID NO: 383640 - DNA, 50 bp, Artificial
  Synthetic oligonucleotide
ctcttaaagaaggtgcagagtgacgtttccgattatgccaagtcgagggg

SEQ ID NO: 383641 - DNA, 58 bp, Artificial
  Synthetic oligonucleotide
ctcttaaagatgctagggataaaatcgttgaaggtacactatattctaatgttagcga

SEQ ID NO: 383642 - DNA, 51 bp, Artificial
  Synthetic oligonucleotide
ctcttaaaggggtcgctctgaaaccctgtaaggtggtttataaggggacaa

SEQ ID NO: 383643 - DNA, 55 bp, Artificial
  Synthetic oligonucleotide
ctcttaacggatttgttatcaagacaagaacggatgataagagaagactcgtacc

SEQ ID NO: 383644 - DNA, 55 bp, Artificial
  Synthetic oligonucleotide
ctcttaagaaacgccaagtctgaggacgtaaacgagtccagatctggaagattag

SEQ ID NO: 383645 - DNA, 55 bp, Artificial
  Synthetic oligonucleotide
ctcttaagattgaacgtgtagaaaccgacattaacatggttggttcacctgccaa

SEQ ID NO: 383646 - DNA, 57 bp, Artificial
  Synthetic oligonucleotide
ctcttaagcctctttattgcttacgcttgtaagttcctctccaatggacaagtggaa

SEQ ID NO: 383647 - DNA, 53 bp, Artificial
  Synthetic oligonucleotide
ctcttaagttaaaatccccaggatacgaacacacgaggaaccttctacacaac

SEQ ID NO: 383648 - DNA, 50 bp, Artificial
  Synthetic oligonucleotide
ctcttaatttggctatacaacggctgcagaaccttactgttgaagacctc

SEQ ID NO: 383649 - DNA, 60 bp, Artificial
  Synthetic oligonucleotide
ctcttacaaatcacactcgcctaccaagctgctttcagttgcgcaggccccatcgcactt

SEQ ID NO: 383650 - DNA, 53 bp, Artificial
  Synthetic oligonucleotide
ctcttaccaatgctggcacaaataaactcatggaagctgtcggcctttctaag

SEQ ID NO: 383651 - DNA, 55 bp, Artificial
  Synthetic oligonucleotide
ctcttacctgtactggggtataggtgacacttgcgtcttgaggcatatggtcgcg

SEQ ID NO: 383652 - DNA, 57 bp, Artificial
  Synthetic oligonucleotide
ctcttacgaagtggatccacactgtaaattgtcaaccctatcctccacgattaacaa

SEQ ID NO: 383653 - DNA, 57 bp, Artificial
  Synthetic oligonucleotide
ctcttacgattgggcgcatggactggcacatatttgtacgaccacctgacccccctt

SEQ ID NO: 383654 - DNA, 51 bp, Artificial
  Synthetic oligonucleotide
ctcttacgttaaagacgcggggtgatgttcgtcgttttgtggggaggtctt

SEQ ID NO: 383655 - DNA, 55 bp, Artificial
  Synthetic oligonucleotide
ctcttactaactccgacaaaatctaaaccttatcaagctgtaaattgtaaggtgc

SEQ ID NO: 383656 - DNA, 56 bp, Artificial
  Synthetic oligonucleotide
ctcttactccgagtgcgtgagtgagttaaccgttatctcgttaactcgttctctta

SEQ ID NO: 383657 - DNA, 53 bp, Artificial
  Synthetic oligonucleotide
ctcttactgaaaagtttgttcgtgaaccggtttaggcaatcgtcattgttcgg

SEQ ID NO: 383658 - DNA, 59 bp, Artificial
  Synthetic oligonucleotide
ctcttactgaccctagattggagccacacaaatgggagaagtattgtgtccttgaaata

SEQ ID NO: 383659 - DNA, 55 bp, Artificial
  Synthetic oligonucleotide
ctcttacttcactgtctgaagttgtcttacagaatcgaagaggcctagacttgtt

SEQ ID NO: 383660 - DNA, 60 bp, Artificial
  Synthetic oligonucleotide
ctcttacttggcagctgctatgcctctgttcgagggggtttgtcctgaggactgggtcag

SEQ ID NO: 383661 - DNA, 54 bp, Artificial
  Synthetic oligonucleotide
ctcttagagtttcagcgtgattttccaacctaaatagaacttcatcgttgcgtt

SEQ ID NO: 383662 - DNA, 59 bp, Artificial
  Synthetic oligonucleotide
ctcttagctccctgaatgttcggatggaaatgtgctgacctagttggggaggtgaggtc

SEQ ID NO: 383663 - DNA, 59 bp, Artificial
  Synthetic oligonucleotide
ctcttaggagcaactttaaaaagatcagatggaagatcaacgacaatcttgagtttgcc

SEQ ID NO: 383664 - DNA, 60 bp, Artificial
  Synthetic oligonucleotide
ctcttaggcgcgaaatgattcttaggagtgctgaagggcgtgttggagagcagcccacta

SEQ ID NO: 383665 - DNA, 55 bp, Artificial
  Synthetic oligonucleotide
ctcttagggtaggttgaagccttacgtctatgatgaacttcagaccccatccgtt

SEQ ID NO: 383666 - DNA, 51 bp, Artificial
  Synthetic oligonucleotide
ctcttaggtctgctgtggttcacctcgccaggttgcaactaaccggcgcca

SEQ ID NO: 383667 - DNA, 60 bp, Artificial
  Synthetic oligonucleotide
ctcttagtgtgctggatgccacgacagaatctgttttgtgcgactctcattcagtcgatt

SEQ ID NO: 383668 - DNA, 55 bp, Artificial
  Synthetic oligonucleotide
ctcttatacagttaagtgatcctgttatacctctacgtggtgcattcatgaggcg

SEQ ID NO: 383669 - DNA, 60 bp, Artificial
  Synthetic oligonucleotide
ctcttatagagagatgccgctttgcgaagatgtcagtaggtgggcgaaacatacgcttct

SEQ ID NO: 383670 - DNA, 60 bp, Artificial
  Synthetic oligonucleotide
ctcttatagagttacatggggtttatgtaatcaggtattctcgacttcatagcttattca

SEQ ID NO: 383671 - DNA, 55 bp, Artificial
  Synthetic oligonucleotide
ctcttatataccgccaaggggccatccgcaataatattaccggatggccccgaaa

SEQ ID NO: 383672 - DNA, 58 bp, Artificial
  Synthetic oligonucleotide
ctcttatattgaccttgaatggcttaataagtatgagaggtattctaagtggccttgg

SEQ ID NO: 383673 - DNA, 55 bp, Artificial
  Synthetic oligonucleotide
ctcttatcaaagcttctgttctcttaaaagtccaatcctctggaccaacattagc

SEQ ID NO: 383674 - DNA, 59 bp, Artificial
  Synthetic oligonucleotide
ctcttatccaagaactagcactaaaactagatgtgagtgaagatgatcttaatatgacg

SEQ ID NO: 383675 - DNA, 60 bp, Artificial
  Synthetic oligonucleotide
ctcttatgagcagtcctatgattggaggcaccttttcaattgcatatgttgcaggtgcat

SEQ ID NO: 383676 - DNA, 60 bp, Artificial
  Synthetic oligonucleotide
ctcttatgggacgcaaatgcatacaagaagattggtgagatcgaagacggtgcatccgat

SEQ ID NO: 383677 - DNA, 60 bp, Artificial
  Synthetic oligonucleotide
ctcttatggggttttgctaaagagtgagcgagacagatatattagattagataagatagg

SEQ ID NO: 383678 - DNA, 55 bp, Artificial
  Synthetic oligonucleotide
ctcttattacattataaattcctatgacacctaacatatccggtacttaaggacc

SEQ ID NO: 383679 - DNA, 54 bp, Artificial
  Synthetic oligonucleotide
ctcttattacattattcagtccaacaacacctaatctatctaaatacagaagca

SEQ ID NO: 383680 - DNA, 55 bp, Artificial
  Synthetic oligonucleotide
ctcttattacccgagtgatcaccagtgtcgcgtgcttactgcgcatctactgatg

SEQ ID NO: 383681 - DNA, 60 bp, Artificial
  Synthetic oligonucleotide
ctcttattccaaccgctggttcaagatattatcagatgagttgtctattgagtggtaccc

SEQ ID NO: 383682 - DNA, 60 bp, Artificial
  Synthetic oligonucleotide
ctcttattgctggcaaggtctaatgctgttgcacacccagcggtgaccaaggggtctttg

SEQ ID NO: 383683 - DNA, 60 bp, Artificial
  Synthetic oligonucleotide
ctcttattgtgaacgtttgtataaaatgtcccgaaatgtcgcatacgcagccattacatg

SEQ ID NO: 383684 - DNA, 56 bp, Artificial
  Synthetic oligonucleotide
ctcttcaacgtagaggtaagctcatttaccgctgtgtttaatgttttattcgtgtc

SEQ ID NO: 383685 - DNA, 56 bp, Artificial
  Synthetic oligonucleotide
ctcttcaagatcacgtgtaaccacaccccctcgggtgagttcctccgccagttcta

SEQ ID NO: 383686 - DNA, 60 bp, Artificial
  Synthetic oligonucleotide
ctcttcaagtaaggacatgatttaatgttcgctacgtagagtaactgtctgaatgatgta

SEQ ID NO: 383687 - DNA, 58 bp, Artificial
  Synthetic oligonucleotide
ctcttcacgcggagttggtaagcaagttaggctcacgagtatttccattcatcgaagg

SEQ ID NO: 383688 - DNA, 58 bp, Artificial
  Synthetic oligonucleotide
ctcttcagacgtttacaatggggttggctatttcgctaattcgacttataatgatcta

SEQ ID NO: 383689 - DNA, 55 bp, Artificial
  Synthetic oligonucleotide
ctcttcagccagcccaagtgccaaatgttttgtggctcctggttctggtccagtg

SEQ ID NO: 383690 - DNA, 60 bp, Artificial
  Synthetic oligonucleotide
ctcttcaggcttagtagcaaaccttatatatgaccccagtaagtaatatacatcatctat

SEQ ID NO: 383691 - DNA, 60 bp, Artificial
  Synthetic oligonucleotide
ctcttcagttcatctcttgggtgaccccaatcaaatccctgccattgactttgagcatgc

SEQ ID NO: 383692 - DNA, 54 bp, Artificial
  Synthetic oligonucleotide
ctcttcataccgctaagctttcgcattaccttcgagaatgctcgaagtttcagt

SEQ ID NO: 383693 - DNA, 55 bp, Artificial
  Synthetic oligonucleotide
ctcttcatcagatacatagcgtatcccagttcttattttacttatcatgcttggc

SEQ ID NO: 383694 - DNA, 55 bp, Artificial
  Synthetic oligonucleotide
ctcttcattttgtcgatactttctattgcaagttaccgctcgtcacaggaactgg

SEQ ID NO: 383695 - DNA, 59 bp, Artificial
  Synthetic oligonucleotide
ctcttccaacccaacccattgcgacctcgcctgggtgcctgcgaattcgactgcgtctc

SEQ ID NO: 383696 - DNA, 51 bp, Artificial
  Synthetic oligonucleotide
ctcttccaaggtccaccagtgtatagggagatcaaaatcagtgttgcacca

SEQ ID NO: 383697 - DNA, 60 bp, Artificial
  Synthetic oligonucleotide
ctcttccatatcgtcaatcttgtcgaagactggggaccctgcaccgaacatggagaacat

SEQ ID NO: 383698 - DNA, 56 bp, Artificial
  Synthetic oligonucleotide
ctcttcccacccctcttatgttgaacagatccctatccaacgggaccaggaacagc

SEQ ID NO: 383699 - DNA, 60 bp, Artificial
  Synthetic oligonucleotide
ctcttcgagaacacacacgttagctacgcctgctggcaagaggaagagtcgcccacgact

SEQ ID NO: 383700 - DNA, 54 bp, Artificial
  Synthetic oligonucleotide
ctcttcgcaagagtgaacctaaccgttccaggtcatatataaagttaaaacgcc

SEQ ID NO: 383701 - DNA, 55 bp, Artificial
  Synthetic oligonucleotide
ctcttcgccagctgcttactctcgtgctcgctcaagcgaaacagaataacgtcct

SEQ ID NO: 383702 - DNA, 54 bp, Artificial
  Synthetic oligonucleotide
ctcttcggacctgccaaactgtatatcctatcgcctgatgttcttcgtgaattg

SEQ ID NO: 383703 - DNA, 56 bp, Artificial
  Synthetic oligonucleotide
ctcttcggtccctccttgaattccctggagtggaagtcttcacaggcggggagcac

SEQ ID NO: 383704 - DNA, 56 bp, Artificial
  Synthetic oligonucleotide
ctcttcgtaaagactatctggaaaggcgccctcttagcaaggaggacgtggaagaa

SEQ ID NO: 383705 - DNA, 55 bp, Artificial
  Synthetic oligonucleotide
ctcttcgtcaaattgctcctctaataaatgagagtacacttccaatgtgatacgc

SEQ ID NO: 383706 - DNA, 55 bp, Artificial
  Synthetic oligonucleotide
ctcttcgtgagttgcaacgactcggaacgaagaaaatccccgatgggggcgtgga

SEQ ID NO: 383707 - DNA, 58 bp, Artificial
  Synthetic oligonucleotide
ctcttcgtggacggagggcaggttggtactccagggatgggcatgattacaactatac

SEQ ID NO: 383708 - DNA, 60 bp, Artificial
  Synthetic oligonucleotide
ctcttctaatagaaggcacagcctcattgagccctggaatgatgatgggcatgtttaaca

SEQ ID NO: 383709 - DNA, 60 bp, Artificial
  Synthetic oligonucleotide
ctcttctacacaaaacatagtttattgcatatcacattttccacccactagtgcttgcat

SEQ ID NO: 383710 - DNA, 59 bp, Artificial
  Synthetic oligonucleotide
ctcttctcacgggaagtcccctgcggcacgcgtcatagacttcgtaggcgcgttatgaa

SEQ ID NO: 383711 - DNA, 55 bp, Artificial
  Synthetic oligonucleotide
ctcttctcagagattgagtccagcgaaagctgggaacctctttggagagagacat

SEQ ID NO: 383712 - DNA, 57 bp, Artificial
  Synthetic oligonucleotide
ctcttctcgcgtggtggattcgacattcagtaagtggtgggacaaccaattagtacg

SEQ ID NO: 383713 - DNA, 55 bp, Artificial
  Synthetic oligonucleotide
ctcttctctaactgtgagcgtaaggggttcaggaatgagaatacttgtgagaggc

SEQ ID NO: 383714 - DNA, 60 bp, Artificial
  Synthetic oligonucleotide
ctcttctcttgtatatggcatgcactcatgcctcaaatcccgtgtatgctactttgaaag

SEQ ID NO: 383715 - DNA, 58 bp, Artificial
  Synthetic oligonucleotide
ctcttctgaaatgtcgttgcccattaggttaatgggtcttgttatccgcatagaagcg

SEQ ID NO: 383716 - DNA, 60 bp, Artificial
  Synthetic oligonucleotide
ctcttctgcctaatggaagcactgtggaacactctgctggggagcctctgttctggactg

SEQ ID NO: 383717 - DNA, 52 bp, Artificial
  Synthetic oligonucleotide
ctcttcttagtccctaataggaggatccgaagggtacctccccctcaggaac

SEQ ID NO: 383718 - DNA, 56 bp, Artificial
  Synthetic oligonucleotide
ctcttcttgaagatatacatttacttgaaatgtcacccctttgttgttcttgtaag

SEQ ID NO: 383719 - DNA, 60 bp, Artificial
  Synthetic oligonucleotide
ctcttgaagacgtatactatgctgaatggcatcaaggaaatgctattgacgcgtcaagtt

SEQ ID NO: 383720 - DNA, 55 bp, Artificial
  Synthetic oligonucleotide
ctcttgaagaggttggcacgaggattaaacaaaccgatggctgcacactcaggca

SEQ ID NO: 383721 - DNA, 60 bp, Artificial
  Synthetic oligonucleotide
ctcttgaataatcaccccgttgcgctagttggagctcttccatttgttacagactcgtca

SEQ ID NO: 383722 - DNA, 58 bp, Artificial
  Synthetic oligonucleotide
ctcttgacatcgggatatttacgtgtggcctcggtcaaatgactgaagtcgcgtattc

SEQ ID NO: 383723 - DNA, 57 bp, Artificial
  Synthetic oligonucleotide
ctcttgacgggttatagcaaatgctattaaaatggttcgtgcagcaagacgaaaacg

SEQ ID NO: 383724 - DNA, 60 bp, Artificial
  Synthetic oligonucleotide
ctcttgacggtcatcaccgctgtcgctctggaataataacatccagtgtcttcagatatc

SEQ ID NO: 383725 - DNA, 55 bp, Artificial
  Synthetic oligonucleotide
ctcttgacttgtcatctgggctacgtccgagttaccaagaaatgaacgagagctc

SEQ ID NO: 383726 - DNA, 52 bp, Artificial
  Synthetic oligonucleotide
ctcttgaggaatacataggagaccaagcaatgttgagcctctggggatgctc

SEQ ID NO: 383727 - DNA, 53 bp, Artificial
  Synthetic oligonucleotide
ctcttgatccagtgtcaattgaatctcaactgtattacctaaagaggagtgat

SEQ ID NO: 383728 - DNA, 52 bp, Artificial
  Synthetic oligonucleotide
ctcttgattacaactcatttggtagagaagctggtcgattcaactatacacc

SEQ ID NO: 383729 - DNA, 55 bp, Artificial
  Synthetic oligonucleotide
ctcttgcagttctagtctatccgtagatttgaagctctctgcaaggtacccttgc

SEQ ID NO: 383730 - DNA, 55 bp, Artificial
  Synthetic oligonucleotide
ctcttgcattccaggagaacaatggagtgtaaccaacagatcaggagagtggcgg

SEQ ID NO: 383731 - DNA, 55 bp, Artificial
  Synthetic oligonucleotide
ctcttgcctgagcaagcgtcacagtaggccaaacaccaaacgcaagacgatcctc

SEQ ID NO: 383732 - DNA, 60 bp, Artificial
  Synthetic oligonucleotide
ctcttgcgagtgctaagttggcagctatattactctaaactgcctgaagtcgctaaatag

SEQ ID NO: 383733 - DNA, 60 bp, Artificial
  Synthetic oligonucleotide
ctcttgctaccaattggtagcagctctaaaactcttatgaattggtagttatggtagctc

SEQ ID NO: 383734 - DNA, 59 bp, Artificial
  Synthetic oligonucleotide
ctcttggacaagcaacagtatagttactttctgtggactagacaatgaacctggatcgg

SEQ ID NO: 383735 - DNA, 60 bp, Artificial
  Synthetic oligonucleotide
ctcttggactctctgcaatgtcaacgaccgaccttgaggcatacttcaaagactgtttgt

SEQ ID NO: 383736 - DNA, 55 bp, Artificial
  Synthetic oligonucleotide
ctcttggactgagatccaagtgaccgcataaatagttgtgtgaacccaatgacct

SEQ ID NO: 383737 - DNA, 56 bp, Artificial
  Synthetic oligonucleotide
ctcttggactgtcgcccttataatttcgtttaactggaccaacgacattgtgatat

SEQ ID NO: 383738 - DNA, 60 bp, Artificial
  Synthetic oligonucleotide
ctcttggagagagctagagatttcctattcttattatcaactctcttttgagactcctca

SEQ ID NO: 383739 - DNA, 55 bp, Artificial
  Synthetic oligonucleotide
ctcttggagagatgatcgataggatgtgctggactcgtggtccagagcacctgtc

SEQ ID NO: 383740 - DNA, 60 bp, Artificial
  Synthetic oligonucleotide
ctcttggagatgtgtcacagcacacaaattgggggaataaggatggtggacatccttagg

SEQ ID NO: 383741 - DNA, 55 bp, Artificial
  Synthetic oligonucleotide
ctcttggaggacgcctaccgcttcatagactctgctgctacacgttgtccgaggg

SEQ ID NO: 383742 - DNA, 60 bp, Artificial
  Synthetic oligonucleotide
ctcttggagtatttacttcagcagctggtctttctgaattacctagaggatcatacacaa

SEQ ID NO: 383743 - DNA, 55 bp, Artificial
  Synthetic oligonucleotide
ctcttggatgggcgatttccatcatcattaacctttgatcaggcagtgttgggaa

SEQ ID NO: 383744 - DNA, 53 bp, Artificial
  Synthetic oligonucleotide
ctcttggattcctagtagtttatacgggttagagctaaacccttattggacaa

SEQ ID NO: 383745 - DNA, 60 bp, Artificial
  Synthetic oligonucleotide
ctcttggctgttagatctagtgttagcttcaacatatattatagagattcgaggttgatc

SEQ ID NO: 383746 - DNA, 60 bp, Artificial
  Synthetic oligonucleotide
ctcttggcttgcctgtgctgcactttgattggaacctgagtagagtgggccttggagggt

SEQ ID NO: 383747 - DNA, 60 bp, Artificial
  Synthetic oligonucleotide
ctcttggcttgcctgtgtgccttcttgatagaggggggcgtcgagtgtgatgaagataac

SEQ ID NO: 383748 - DNA, 60 bp, Artificial
  Synthetic oligonucleotide
ctcttgggcttagatcaagatgcccacacaagtaattgtgtgggcctagagacctcgccc

SEQ ID NO: 383749 - DNA, 60 bp, Artificial
  Synthetic oligonucleotide
ctcttgggcttagatcaagatgtccacacaaataattgtgtggtcccagtgatctggccc

SEQ ID NO: 383750 - DNA, 55 bp, Artificial
  Synthetic oligonucleotide
ctcttggggacatgaagtgaaacaaatatacccagttgaaggtgactggagggga

SEQ ID NO: 383751 - DNA, 56 bp, Artificial
  Synthetic oligonucleotide
ctcttgggtatccttattgactacggggattgtttacttgagatattcttatggag

SEQ ID NO: 383752 - DNA, 60 bp, Artificial
  Synthetic oligonucleotide
ctcttggtcaatcagtccagcaaagctgggatgcatcatcgccctaggataactgctgga

SEQ ID NO: 383753 - DNA, 55 bp, Artificial
  Synthetic oligonucleotide
ctcttggttgacagttctgcttgacagaaattgatagttcaacagccaaatctga

SEQ ID NO: 383754 - DNA, 54 bp, Artificial
  Synthetic oligonucleotide
ctcttgtacccgcccttcaagctccttgcccaagtaacgttagaagtttgaaca

SEQ ID NO: 383755 - DNA, 52 bp, Artificial
  Synthetic oligonucleotide
ctcttgtagcaccaactttgtgtccccaacaaactttttctaggtttgttaa

SEQ ID NO: 383756 - DNA, 60 bp, Artificial
  Synthetic oligonucleotide
ctcttgtcatgaatctccactacgaccgatcctgttgcgtttataggcacctgttgccta

SEQ ID NO: 383757 - DNA, 55 bp, Artificial
  Synthetic oligonucleotide
ctcttgtgacaagccccttggtgaaagaacctctctctttttgacgtggttggaa

SEQ ID NO: 383758 - DNA, 55 bp, Artificial
  Synthetic oligonucleotide
ctcttgtgctaacaatacccagccgtggggagagatatgtactcagccaactttg

SEQ ID NO: 383759 - DNA, 60 bp, Artificial
  Synthetic oligonucleotide
ctcttgtggagatgcaatgctctcctcaggttgtggttgaaccgtatttggacgtggtag

SEQ ID NO: 383760 - DNA, 60 bp, Artificial
  Synthetic oligonucleotide
ctcttgtgtgaagaacatgaagtcgttaggacatgatttaggccttacatttgattctgg

SEQ ID NO: 383761 - DNA, 58 bp, Artificial
  Synthetic oligonucleotide
ctcttgtgttcatatgtacctagcttttgatcaaagtctccttgtattaataggtact

SEQ ID NO: 383762 - DNA, 55 bp, Artificial
  Synthetic oligonucleotide
ctcttgttaaacacctgtttgggaggcaatggttagttaggactgtgcaacatgc

SEQ ID NO: 383763 - DNA, 58 bp, Artificial
  Synthetic oligonucleotide
ctcttgttcagaagactgggtgtacggccaatggttttcaaggatattacatctgtct

SEQ ID NO: 383764 - DNA, 58 bp, Artificial
  Synthetic oligonucleotide
ctcttgttgcagtcagtcttattgccatcattaagggtgtagtaaacttgtacaaaag

SEQ ID NO: 383765 - DNA, 60 bp, Artificial
  Synthetic oligonucleotide
ctcttgttgcgttgtcacgccacaagaaagaattcgtgtattatacacgagcggcgactg

SEQ ID NO: 383766 - DNA, 55 bp, Artificial
  Synthetic oligonucleotide
ctctttaaaatgctttaggtagtgggggtcgacgtcatcaatcacgttgtaccaa

SEQ ID NO: 383767 - DNA, 60 bp, Artificial
  Synthetic oligonucleotide
ctctttaagatggaaatcagtaccagttatacttatatgctatctgataacatatatgta

SEQ ID NO: 383768 - DNA, 55 bp, Artificial
  Synthetic oligonucleotide
ctctttacacgtagaacgacccatcccggctaccatcacatatcataaaaaaggg

SEQ ID NO: 383769 - DNA, 57 bp, Artificial
  Synthetic oligonucleotide
ctctttacatgcaaaggggcttttcgtattaattaattatcatgcgcccatttttca

SEQ ID NO: 383770 - DNA, 60 bp, Artificial
  Synthetic oligonucleotide
ctctttacattttatgggctacgtcattggatgttatgggtcattgccacaagatcacat

SEQ ID NO: 383771 - DNA, 57 bp, Artificial
  Synthetic oligonucleotide
ctctttacgatttgtgtcgccatttcgtatattggaagacgggcctgattccagtat

SEQ ID NO: 383772 - DNA, 58 bp, Artificial
  Synthetic oligonucleotide
ctctttacgcggactccccgtatgtgccttctcatctaccggaccgtgtgcacttcgc

SEQ ID NO: 383773 - DNA, 55 bp, Artificial
  Synthetic oligonucleotide
ctctttacgtcacacttatcaatggagtctgcgcccggaatatgatcagcgagag

SEQ ID NO: 383774 - DNA, 52 bp, Artificial
  Synthetic oligonucleotide
ctctttactgcgtgtaatacgctggtgtctcattttatactagcgttgcagc

SEQ ID NO: 383775 - DNA, 56 bp, Artificial
  Synthetic oligonucleotide
ctctttagactctgtcgggaagtgtagaagttggggtcagattcattaagacggta

SEQ ID NO: 383776 - DNA, 60 bp, Artificial
  Synthetic oligonucleotide
ctctttagtcaagaggcctcattgagaactgtagatactgcccaatatgtcctacggttg

SEQ ID NO: 383777 - DNA, 58 bp, Artificial
  Synthetic oligonucleotide
ctctttagtgacggggctgcaagacgaggagcatattgcttatggaaagaccaccttt

SEQ ID NO: 383778 - DNA, 57 bp, Artificial
  Synthetic oligonucleotide
ctctttataacttgaatttggtcctggattgcagaggaagatagttggaattccacc

SEQ ID NO: 383779 - DNA, 56 bp, Artificial
  Synthetic oligonucleotide
ctctttatacattcttggacagttgtccttacaagttcgtttaactgggctatgga

SEQ ID NO: 383780 - DNA, 59 bp, Artificial
  Synthetic oligonucleotide
ctctttatagctggaattgtgtcctggattgcagaggaagatagcgggaattccacctt

SEQ ID NO: 383781 - DNA, 55 bp, Artificial
  Synthetic oligonucleotide
ctctttatatgatgatgttgggcctggattgcaaaggaagatacttgggatgcca

SEQ ID NO: 383782 - DNA, 51 bp, Artificial
  Synthetic oligonucleotide
ctctttatccttatactggctgcttatggtgacaattgagagattgttacc

SEQ ID NO: 383783 - DNA, 55 bp, Artificial
  Synthetic oligonucleotide
ctctttatgcaatcgggttcttgtatcttgagaacaagagagcgtacgaggcgtc

SEQ ID NO: 383784 - DNA, 53 bp, Artificial
  Synthetic oligonucleotide
ctctttatggttgcctggggtaaagaggcggtggacaatttccacctagggga

SEQ ID NO: 383785 - DNA, 52 bp, Artificial
  Synthetic oligonucleotide
ctctttattcaggtccctcaacttattgaggtcttcttccccccttttggtc

SEQ ID NO: 383786 - DNA, 60 bp, Artificial
  Synthetic oligonucleotide
ctctttcaagattataacaggtggatcaccctcgaggatatcaaatctcgatcatctcta

SEQ ID NO: 383787 - DNA, 50 bp, Artificial
  Synthetic oligonucleotide
ctctttcaatatcaccacaaacataaggggtaaggtgcagaaagaatatg

SEQ ID NO: 383788 - DNA, 60 bp, Artificial
  Synthetic oligonucleotide
ctctttcaatgcaaccacagaattaagagataagaaacataaagagtatgcactctttta

SEQ ID NO: 383789 - DNA, 56 bp, Artificial
  Synthetic oligonucleotide
ctctttcagtccagaccaaaggccctaccccagtctatcataaggttggaccgatg

SEQ ID NO: 383790 - DNA, 55 bp, Artificial
  Synthetic oligonucleotide
ctctttcagtgagataacatccatcatggggcatcgccgatggcaccaaatgcac

SEQ ID NO: 383791 - DNA, 55 bp, Artificial
  Synthetic oligonucleotide
ctctttccagacaatacggtttcctttcgtgacctggacaggcagctgcagcatc

SEQ ID NO: 383792 - DNA, 51 bp, Artificial
  Synthetic oligonucleotide
ctctttcccggaacctcttctcttatatagcggacacgtaggctccttacc

SEQ ID NO: 383793 - DNA, 54 bp, Artificial
  Synthetic oligonucleotide
ctctttcgaggcatacttgttcacttaagtactacactgttgtgatggatccct

SEQ ID NO: 383794 - DNA, 60 bp, Artificial
  Synthetic oligonucleotide
ctctttcgctgatctacgagggaacgctcaacgtatcgtatacgatgacgaattacagat

SEQ ID NO: 383795 - DNA, 59 bp, Artificial
  Synthetic oligonucleotide
ctctttcggagtgtggattcgcactcctccagcctatagaccaccaaatgcccctatct

SEQ ID NO: 383796 - DNA, 55 bp, Artificial
  Synthetic oligonucleotide
ctctttcgggtcaaaggtcgcgcatacgtcataagtcacatgtctaggggtccac

SEQ ID NO: 383797 - DNA, 53 bp, Artificial
  Synthetic oligonucleotide
ctctttcttactctgccgtcgcccaagctccgtctgtcgcctatgcacctcgt

SEQ ID NO: 383798 - DNA, 52 bp, Artificial
  Synthetic oligonucleotide
ctctttgaaacgtaaaagggctattccgtcagggtcttctactaaggtcaaa

SEQ ID NO: 383799 - DNA, 60 bp, Artificial
  Synthetic oligonucleotide
ctctttgaaccctgccccaatgtcagatatagatttgagactattgtctcgacagtttca

SEQ ID NO: 383800 - DNA, 55 bp, Artificial
  Synthetic oligonucleotide
ctctttgaacggcaagtaaaagctagggacaccagcagagacctctcccgaccct

SEQ ID NO: 383801 - DNA, 55 bp, Artificial
  Synthetic oligonucleotide
ctctttgaagcccaacctgtgatgcggagtcacctgggtctaatacgcttgggcc

SEQ ID NO: 383802 - DNA, 56 bp, Artificial
  Synthetic oligonucleotide
ctctttgacccaacaaacgaaatccgaattctcaaccacgaacaagcagacaacac

SEQ ID NO: 383803 - DNA, 54 bp, Artificial
  Synthetic oligonucleotide
ctctttgacgagtaccaaagacacttaaatttctggaccgttagcaaccaagac

SEQ ID NO: 383804 - DNA, 57 bp, Artificial
  Synthetic oligonucleotide
ctctttgacgtatacttcgaaggtgagttagacggcgcaccctatatgtttccagac

SEQ ID NO: 383805 - DNA, 53 bp, Artificial
  Synthetic oligonucleotide
ctctttgattcatcctcgatgaggtctgagctcataccctacagtccgacagg

SEQ ID NO: 383806 - DNA, 52 bp, Artificial
  Synthetic oligonucleotide
ctctttgattttccccgccacattagatacctctttatcgggaaccgatctg

SEQ ID NO: 383807 - DNA, 59 bp, Artificial
  Synthetic oligonucleotide
ctctttgcaaggcaaggaactcctaatgaagatcatgtcctagataccccgataggaac

SEQ ID NO: 383808 - DNA, 60 bp, Artificial
  Synthetic oligonucleotide
ctctttgcagagcaggacagcggacttgagctgactttaaacaatgaagctgaagatgtt

SEQ ID NO: 383809 - DNA, 55 bp, Artificial
  Synthetic oligonucleotide
ctctttgcatttgactacaccgggtacgatgcttctctcagcccagcttggtttg

SEQ ID NO: 383810 - DNA, 50 bp, Artificial
  Synthetic oligonucleotide
ctctttgcgaatctatgacgaggtttgattgacggtggagtagagtggtt

SEQ ID NO: 383811 - DNA, 55 bp, Artificial
  Synthetic oligonucleotide
ctctttggcagcaacaccagaacgataacggtaagtttcaatcgggcgcggtcac

SEQ ID NO: 383812 - DNA, 51 bp, Artificial
  Synthetic oligonucleotide
ctctttgggaacaagggtcgtttcttgatcacgtaatcaacttaatcgata

SEQ ID NO: 383813 - DNA, 54 bp, Artificial
  Synthetic oligonucleotide
ctctttgggaggttggataactaagaattttcttaggcaccctaataggatgtc

SEQ ID NO: 383814 - DNA, 55 bp, Artificial
  Synthetic oligonucleotide
ctctttggggatctgaatccccatttggagaaacagcgagctcggaagacggacg

SEQ ID NO: 383815 - DNA, 55 bp, Artificial
  Synthetic oligonucleotide
ctctttgtccaatctctctttccactccacaattctgctctgaatactttgagca

SEQ ID NO: 383816 - DNA, 55 bp, Artificial
  Synthetic oligonucleotide
ctcttttaatttcagtgtgataacgggtgaatatacggtgaagggtgaacagtgg

SEQ ID NO: 383817 - DNA, 51 bp, Artificial
  Synthetic oligonucleotide
ctcttttagctaacgaagctacccggcagtagcgctataagccaaggacgg

SEQ ID NO: 383818 - DNA, 58 bp, Artificial
  Synthetic oligonucleotide
ctcttttatagactggatatagtacaacttaatggggacaactctagtatgtatagat

SEQ ID NO: 383819 - DNA, 55 bp, Artificial
  Synthetic oligonucleotide
ctcttttcctcgattcgcagggatatgctgcatctaatatcggagtcaacatact

SEQ ID NO: 383820 - DNA, 55 bp, Artificial
  Synthetic oligonucleotide
ctcttttcttcgacaataaggttacgccttccggtgctcttcagaggtggcactc

SEQ ID NO: 383821 - DNA, 56 bp, Artificial
  Synthetic oligonucleotide
ctcttttgagactcctcactaaggtcgtcatagagtaccttactttttgaagtgga

SEQ ID NO: 383822 - DNA, 59 bp, Artificial
  Synthetic oligonucleotide
ctcttttgataaaattagtacaacatggtcatgggtggcttcacaaggtaatacacgca

SEQ ID NO: 383823 - DNA, 55 bp, Artificial
  Synthetic oligonucleotide
ctcttttgccgggtgatatcaatgctgtgaagctcactcttaaatgtggggatgg

SEQ ID NO: 383824 - DNA, 55 bp, Artificial
  Synthetic oligonucleotide
ctcttttgcgggtatctgccctttcgcggcctctatcgagtgtacgcctccggtt

SEQ ID NO: 383825 - DNA, 52 bp, Artificial
  Synthetic oligonucleotide
ctcttttgctcaagcgcccgtgatgctgtacggcactatggcacgctacatg

SEQ ID NO: 383826 - DNA, 56 bp, Artificial
  Synthetic oligonucleotide
ctcttttgctggacctatttcatgtgggggtgcacctatggcagcggaaaactgga

SEQ ID NO: 383827 - DNA, 60 bp, Artificial
  Synthetic oligonucleotide
ctcttttggcgccacgccaagagaggccaagtcccttgtacagacttgccatacctgtca

SEQ ID NO: 383828 - DNA, 55 bp, Artificial
  Synthetic oligonucleotide
ctcttttgtcctttgataacccggacagaaaggctgtacttttcgagctcaacgc

SEQ ID NO: 383829 - DNA, 55 bp, Artificial
  Synthetic oligonucleotide
ctctttttccagggcccctatgaggcgagtgctacaaaacctacaaagccaaata

SEQ ID NO: 383830 - DNA, 57 bp, Artificial
  Synthetic oligonucleotide
ctctttttgactgaccaatgatattgtatttgacgagcctagatattcgtaaacttg

SEQ ID NO: 383831 - DNA, 57 bp, Artificial
  Synthetic oligonucleotide
ctgaaaaaacttactgtcacactcttgttaacgggctgccgcttccagaacattaca

SEQ ID NO: 383832 - DNA, 56 bp, Artificial
  Synthetic oligonucleotide
ctgaaaaacgcattcatcccaaaacggtgcaacgttttaagataccacaggctcaa

SEQ ID NO: 383833 - DNA, 55 bp, Artificial
  Synthetic oligonucleotide
ctgaaaacaggaaagtatgcaagaatgaggggtacccatactaatgatgtaaagc

SEQ ID NO: 383834 - DNA, 55 bp, Artificial
  Synthetic oligonucleotide
ctgaaaacgattggtttttggtggaggcgacagattgtgaggaaacgttagagga

SEQ ID NO: 383835 - DNA, 58 bp, Artificial
  Synthetic oligonucleotide
ctgaaaagggagataacattccatggagctaaagaggttgcactcagttactcaaccg

SEQ ID NO: 383836 - DNA, 54 bp, Artificial
  Synthetic oligonucleotide
ctgaaaaggggggtcgtaagccagctcgtctcatcgtataccccgacctgggtg

SEQ ID NO: 383837 - DNA, 59 bp, Artificial
  Synthetic oligonucleotide
ctgaaaatatcaactctacttcagtggcgtgcaagccgtacttcacacggttaatagac

SEQ ID NO: 383838 - DNA, 60 bp, Artificial
  Synthetic oligonucleotide
ctgaaaatcgataatatcatcccagaagtcgccgtcaaatagtggtagagcgtcagatcc

SEQ ID NO: 383839 - DNA, 59 bp, Artificial
  Synthetic oligonucleotide
ctgaaaatctcagctcgcaccccaaggaaggttgtggctcagaggttaaaatagctcga

SEQ ID NO: 383840 - DNA, 55 bp, Artificial
  Synthetic oligonucleotide
ctgaaaatgcgttaacacgaggcattttaaacagagggtattggggagacgctgt

SEQ ID NO: 383841 - DNA, 55 bp, Artificial
  Synthetic oligonucleotide
ctgaaacacccatccgttctaagcacattcttgtgtccgagcggtatgtggaacc

SEQ ID NO: 383842 - DNA, 54 bp, Artificial
  Synthetic oligonucleotide
ctgaaacagggacttgagtacccagaaggctcaggcccgaaggcggttggaacg

SEQ ID NO: 383843 - DNA, 55 bp, Artificial
  Synthetic oligonucleotide
ctgaaacatcagctgatcgcttctacacccttgccagtgttacttggacttcctc

SEQ ID NO: 383844 - DNA, 55 bp, Artificial
  Synthetic oligonucleotide
ctgaaaccaacatttgctggcgtgctcctggtgtgtattctgttggtggcggaac

SEQ ID NO: 383845 - DNA, 58 bp, Artificial
  Synthetic oligonucleotide
ctgaaaccgttcacggttttaggtgtatgttagcagttaaacatctgcagctactaga

SEQ ID NO: 383846 - DNA, 55 bp, Artificial
  Synthetic oligonucleotide
ctgaaaccttactatcgggcgctaggggattgtttcgtccctgcgtgtgatgttg

SEQ ID NO: 383847 - DNA, 53 bp, Artificial
  Synthetic oligonucleotide
ctgaaacggacttaacgcaacaggacagcacccacgatgaaacttgccgcctt

SEQ ID NO: 383848 - DNA, 56 bp, Artificial
  Synthetic oligonucleotide
ctgaaacggggtcatgtgtctcgttttacggagatgatgaaccaggtgaagggtcc

SEQ ID NO: 383849 - DNA, 52 bp, Artificial
  Synthetic oligonucleotide
ctgaaactacttcatctgaagatgtcgacgcactacgattactatcacgttt

SEQ ID NO: 383850 - DNA, 56 bp, Artificial
  Synthetic oligonucleotide
ctgaaactcgtaatcgtaaacaaagagatccaagtgtagtgaatactgataccttg

SEQ ID NO: 383851 - DNA, 57 bp, Artificial
  Synthetic oligonucleotide
ctgaaactctccccattcgagggtgtctccgtccttgtcgatataggacttgacgtc

SEQ ID NO: 383852 - DNA, 55 bp, Artificial
  Synthetic oligonucleotide
ctgaaactgagtctgcaacattgtttcaagatattgcaacaccgaattcagtttg

SEQ ID NO: 383853 - DNA, 55 bp, Artificial
  Synthetic oligonucleotide
ctgaaactgcctttgctctacttactctgacctaaatcttgactgcgtgccgcca

SEQ ID NO: 383854 - DNA, 60 bp, Artificial
  Synthetic oligonucleotide
ctgaaagaaacgaacaagggcagacactttggagtaagacaaatgatgctggatcggaca

SEQ ID NO: 383855 - DNA, 55 bp, Artificial
  Synthetic oligonucleotide
ctgaaagaaatgttatacccagccatacgagaatagctgtgcaagaggctcttcc

SEQ ID NO: 383856 - DNA, 55 bp, Artificial
  Synthetic oligonucleotide
ctgaaagaagacctgaaatcactccacctaagatggttggcacaggctttcacac

SEQ ID NO: 383857 - DNA, 58 bp, Artificial
  Synthetic oligonucleotide
ctgaaagaagccatatcctggcctcttggagagccctccctagctttctttgacctaa

SEQ ID NO: 383858 - DNA, 56 bp, Artificial
  Synthetic oligonucleotide
ctgaaagaagctgtagtaatcaattgtacaagacccaacaacaatacaagaagagg

SEQ ID NO: 383859 - DNA, 56 bp, Artificial
  Synthetic oligonucleotide
ctgaaagaataaccagagacagcccaatttggtttcgggatttttgtagtatagca

SEQ ID NO: 383860 - DNA, 56 bp, Artificial
  Synthetic oligonucleotide
ctgaaagaatacggaatgacgtaaactatatactgaacatggatcgaaatttacct

SEQ ID NO: 383861 - DNA, 60 bp, Artificial
  Synthetic oligonucleotide
ctgaaagaatgatgcgtataaattggaagagatggtggcaagtcttttatacaatagttg

SEQ ID NO: 383862 - DNA, 55 bp, Artificial
  Synthetic oligonucleotide
ctgaaagatggattgcaggattcaaggacgaacatcctgtgaacgttctgactct

SEQ ID NO: 383863 - DNA, 55 bp, Artificial
  Synthetic oligonucleotide
ctgaaagcaacaaatataaaccttatgcaaccatagcatatggtactggacaatc

SEQ ID NO: 383864 - DNA, 55 bp, Artificial
  Synthetic oligonucleotide
ctgaaagcacttaattgggaagactggtcacatacaatttacaaggtcgggtcac

SEQ ID NO: 383865 - DNA, 60 bp, Artificial
  Synthetic oligonucleotide
ctgaaagctgacaccatttgtgtaggctatcatgctaacaattccacagacactgtcgac

SEQ ID NO: 383866 - DNA, 59 bp, Artificial
  Synthetic oligonucleotide
ctgaaagctgtgtgagcacgttgaacggaaattttgtgtacccatgttgttgtgtcacg

SEQ ID NO: 383867 - DNA, 52 bp, Artificial
  Synthetic oligonucleotide
ctgaaaggacatgcaggaaagaatgggctaagtggatacggtttctgcagtc

SEQ ID NO: 383868 - DNA, 57 bp, Artificial
  Synthetic oligonucleotide
ctgaaaggagagatcggagtcaacccttccgacctggtgatcaaacattaatcaatt

SEQ ID NO: 383869 - DNA, 55 bp, Artificial
  Synthetic oligonucleotide
ctgaaaggatagctaatcaagtaagttcaagcgtagccggatcccctagcctagt

SEQ ID NO: 383870 - DNA, 55 bp, Artificial
  Synthetic oligonucleotide
ctgaaaggcacactgcaagggatgtgaatcaaaacatgcacactcttttgggcat

SEQ ID NO: 383871 - DNA, 60 bp, Artificial
  Synthetic oligonucleotide
ctgaaagtatccggacgcatctgcatacgtgacaatgttcccacaggtgacaacacaatg

SEQ ID NO: 383872 - DNA, 55 bp, Artificial
  Synthetic oligonucleotide
ctgaaagtctccccattcgattgaatcaccgtctttgtccatgtacgacttgaca

SEQ ID NO: 383873 - DNA, 55 bp, Artificial
  Synthetic oligonucleotide
ctgaaagtgatcgctgaggaggcggtcgctgctggttttcaagctacgggaaagg

SEQ ID NO: 383874 - DNA, 49 bp, Artificial
  Synthetic oligonucleotide
ctgaaagttaaagcaaaaccccccgtcgtgaaggaaggaccttacgagg

SEQ ID NO: 383875 - DNA, 53 bp, Artificial
  Synthetic oligonucleotide
ctgaaagttacgcggatttaattttgcaagcctgccaattttacggggtgaaa

SEQ ID NO: 383876 - DNA, 60 bp, Artificial
  Synthetic oligonucleotide
ctgaaataatcacactgcatcctaggatcgaagaaggtttttttgacctgatgcatgtgc

SEQ ID NO: 383877 - DNA, 60 bp, Artificial
  Synthetic oligonucleotide
ctgaaataatcactgaaggtacttcagtgaaaaagcatttcatagtcgcaactaatatta

SEQ ID NO: 383878 - DNA, 60 bp, Artificial
  Synthetic oligonucleotide
ctgaaataatctcgcgcttcaagttatttttgattgatgtgccttttgctgacactatca

SEQ ID NO: 383879 - DNA, 60 bp, Artificial
  Synthetic oligonucleotide
ctgaaatactgctctcatattagaccactcgtcgaaatctgatagcttaacagatgtata

SEQ ID NO: 383880 - DNA, 55 bp, Artificial
  Synthetic oligonucleotide
ctgaaatcgttaacgcgactcagagggtagacgatgcgactgtagctataagggc

SEQ ID NO: 383881 - DNA, 60 bp, Artificial
  Synthetic oligonucleotide
ctgaaatctatggccctgccgcggacgtcaagcccgacattaagcctcgcgtgctcaagc

SEQ ID NO: 383882 - DNA, 50 bp, Artificial
  Synthetic oligonucleotide
ctgaaatgaatcttgttgcatggaattcggccatacagatacggaaaagg

SEQ ID NO: 383883 - DNA, 57 bp, Artificial
  Synthetic oligonucleotide
ctgaaatgagaggggagtcctccaaacctggtgtctccttgtcccgattagctggag

SEQ ID NO: 383884 - DNA, 55 bp, Artificial
  Synthetic oligonucleotide
ctgaaatggcagtttgatagaacattaggccttacacatgtagctctgcaaaagc

SEQ ID NO: 383885 - DNA, 60 bp, Artificial
  Synthetic oligonucleotide
ctgaaatgggccagcaaatattggagattggtattgaggagaatcgaagtttacagcaga

SEQ ID NO: 383886 - DNA, 54 bp, Artificial
  Synthetic oligonucleotide
ctgaaattactcacgccgctttgcctgtaccgtgaacggttttgaatcctactt

SEQ ID NO: 383887 - DNA, 58 bp, Artificial
  Synthetic oligonucleotide
ctgaaattgaagatctcattttcttagcacggtcagcacttatcctaagggggtcagt

SEQ ID NO: 383888 - DNA, 55 bp, Artificial
  Synthetic oligonucleotide
ctgaaatttcatgtaggtggacctaaggcaaggacctttgatgtgccagactatc

SEQ ID NO: 383889 - DNA, 60 bp, Artificial
  Synthetic oligonucleotide
ctgaacaaacggcatctagcaagttgtatgctatacctgagaaacatctagactcattaa

SEQ ID NO: 383890 - DNA, 55 bp, Artificial
  Synthetic oligonucleotide
ctgaacaagcaatttaggtcaggaccctcactggaaaatatgagttcaggagaga

SEQ ID NO: 383891 - DNA, 56 bp, Artificial
  Synthetic oligonucleotide
ctgaacaagcccgttgtaagtcctgattagtgcggaaatgttctggtctacgttgg

SEQ ID NO: 383892 - DNA, 59 bp, Artificial
  Synthetic oligonucleotide
ctgaacacctatctaggttatccagaatctacggggtgtgttatggagtatactgagga

SEQ ID NO: 383893 - DNA, 55 bp, Artificial
  Synthetic oligonucleotide
ctgaacaccttggagctcagaccttcaagtgacggacccgagtccatgtcagtgg

SEQ ID NO: 383894 - DNA, 52 bp, Artificial
  Synthetic oligonucleotide
ctgaacacgagccaaaggggaatactcgaagatgagcagatgtatcagaaat

SEQ ID NO: 383895 - DNA, 60 bp, Artificial
  Synthetic oligonucleotide
ctgaacactctatgactgaagaagcgagctgcaccattgcgggtagcgtaccaacatggg

SEQ ID NO: 383896 - DNA, 60 bp, Artificial
  Synthetic oligonucleotide
ctgaacagatatcatttgtatctcgtgataggctctttgacatgaaatatcacaagcttt

SEQ ID NO: 383897 - DNA, 52 bp, Artificial
  Synthetic oligonucleotide
ctgaacaggatcacattagaatagtttgtactaatcaattaccccgtcttag

SEQ ID NO: 383898 - DNA, 50 bp, Artificial
  Synthetic oligonucleotide
ctgaacaggtggagtcgtcatcctgaattgaagaagatgggataaacggt

SEQ ID NO: 383899 - DNA, 60 bp, Artificial
  Synthetic oligonucleotide
ctgaacatcaatggaccaacacgcactaagctggaacccagtgtattccatgacgtgttt

SEQ ID NO: 383900 - DNA, 60 bp, Artificial
  Synthetic oligonucleotide
ctgaacatctaggtcgagcaagtgatcattactttaagtataatgctaccacaggaatgg

SEQ ID NO: 383901 - DNA, 60 bp, Artificial
  Synthetic oligonucleotide
ctgaacatctgatggctgttcctttcgtcaatcgctctgtccccttccagatcagggggc

SEQ ID NO: 383902 - DNA, 59 bp, Artificial
  Synthetic oligonucleotide
ctgaacatggagaacaacacatcaggattcctaggacccctgctcgtgttacaggcggg

SEQ ID NO: 383903 - DNA, 55 bp, Artificial
  Synthetic oligonucleotide
ctgaacattgcacgcctcaccatacagcactcaggcaagctattttgtgctgggg

SEQ ID NO: 383904 - DNA, 55 bp, Artificial
  Synthetic oligonucleotide
ctgaaccaaaagctcgatcgggtagaagccttgatatctaaggtggaacgttggg

SEQ ID NO: 383905 - DNA, 60 bp, Artificial
  Synthetic oligonucleotide
ctgaaccaacagatgctgagctgcaagccgctattgatgaggcagtcgccgtcgtttacg

SEQ ID NO: 383906 - DNA, 60 bp, Artificial
  Synthetic oligonucleotide
ctgaaccacatggcagtttgtagctgtggtgcttttggccagcccgggctgcctgtgaag

SEQ ID NO: 383907 - DNA, 54 bp, Artificial
  Synthetic oligonucleotide
ctgaaccagtttgtgtgctaatacacggtacacccggttctgggaagtccctaa

SEQ ID NO: 383908 - DNA, 55 bp, Artificial
  Synthetic oligonucleotide
ctgaacccatgctaatagaccactcagacccaaacaaaggctttgtaccctactc

SEQ ID NO: 383909 - DNA, 57 bp, Artificial
  Synthetic oligonucleotide
ctgaaccgccttggttgtcccgctcacgtgtccaaatggtggtgtgatttccaccga

SEQ ID NO: 383910 - DNA, 53 bp, Artificial
  Synthetic oligonucleotide
ctgaaccgcgctattcccgcgttagcgctcaaaccttttctaaatcctttacc

SEQ ID NO: 383911 - DNA, 55 bp, Artificial
  Synthetic oligonucleotide
ctgaaccggattgagaccgagcggcagacgtcgtatgagaggaatggtgattgtg

SEQ ID NO: 383912 - DNA, 60 bp, Artificial
  Synthetic oligonucleotide
ctgaaccggcgttcaacgccttggcatatgaatcgttagctgactgctgacctcctctag

SEQ ID NO: 383913 - DNA, 53 bp, Artificial
  Synthetic oligonucleotide
ctgaaccgtctgcggtacaagggtaccgttaccataaacaacacccagcccga

SEQ ID NO: 383914 - DNA, 55 bp, Artificial
  Synthetic oligonucleotide
ctgaaccttgatgggaacctgagtagagtgggccgtagagggtgatgaaggtcgc

SEQ ID NO: 383915 - DNA, 58 bp, Artificial
  Synthetic oligonucleotide
ctgaacgaccctggagctccagtgcacttgtttgcgctgaggtttgtactcttgggct

SEQ ID NO: 383916 - DNA, 55 bp, Artificial
  Synthetic oligonucleotide
ctgaacgactggttgtatcggttaagtgtggtaaggcatgggaaacctggcggtg

SEQ ID NO: 383917 - DNA, 60 bp, Artificial
  Synthetic oligonucleotide
ctgaacgagacaggaggtaaagcgagggcgatctacggtgtgacgctatggcattacatt

SEQ ID NO: 383918 - DNA, 55 bp, Artificial
  Synthetic oligonucleotide
ctgaacgcaaagatcttccttggagtcttaggcatcatgagacttacaggtgagg

SEQ ID NO: 383919 - DNA, 55 bp, Artificial
  Synthetic oligonucleotide
ctgaacgcacccatgtagaaactgaccgctcaaaacaggaggttcaaaactcccg

SEQ ID NO: 383920 - DNA, 54 bp, Artificial
  Synthetic oligonucleotide
ctgaacgccttccacgtcatcccacaggcgggtaacgttggtttcagaaccacg

SEQ ID NO: 383921 - DNA, 59 bp, Artificial
  Synthetic oligonucleotide
ctgaacggaaagggtgtgtgatgcaagagaggtgagagtagccgaagtaagacccagga

SEQ ID NO: 383922 - DNA, 55 bp, Artificial
  Synthetic oligonucleotide
ctgaacggagatgatgtcttccttcattaggaacggcctgttgtggtgttctgtt

SEQ ID NO: 383923 - DNA, 55 bp, Artificial
  Synthetic oligonucleotide
ctgaacggctgtactgcggtgggcccatgacgaactcccgtggtcaatcatgtgg

SEQ ID NO: 383924 - DNA, 55 bp, Artificial
  Synthetic oligonucleotide
ctgaacgtatgtcgacgcagtctaaacctgtggcgttgcaggttcctgtctcgac

SEQ ID NO: 383925 - DNA, 55 bp, Artificial
  Synthetic oligonucleotide
ctgaacgtgccgttatccggccgtactgtaacgagacccattcttacagattcgc

SEQ ID NO: 383926 - DNA, 55 bp, Artificial
  Synthetic oligonucleotide
ctgaactacttcacgggtctgttccttaacagtcttatcttttatgtaggggtga

SEQ ID NO: 383927 - DNA, 60 bp, Artificial
  Synthetic oligonucleotide
ctgaactagctaacgaatacggtgtatctatttgccacatcatcagcgaaagtgttcgct

SEQ ID NO: 383928 - DNA, 52 bp, Artificial
  Synthetic oligonucleotide
ctgaactccgcagcctttaacgataacctttccggttcgtgggtctttctgg

SEQ ID NO: 383929 - DNA, 55 bp, Artificial
  Synthetic oligonucleotide
ctgaactgaatcttaaattggcgatgctccaagcgtctcctgccacatctagcag

SEQ ID NO: 383930 - DNA, 60 bp, Artificial
  Synthetic oligonucleotide
ctgaactgctgcctataaataataggcagggaaatggcatcgacaacagagcgggtgaaa

SEQ ID NO: 383931 - DNA, 59 bp, Artificial
  Synthetic oligonucleotide
ctgaactggtacaaccattatacaatttaatagcctcagcaaaaggcaaatatattgag

SEQ ID NO: 383932 - DNA, 55 bp, Artificial
  Synthetic oligonucleotide
ctgaactggttgtacaaattaggcaacacatatccgatgctaaatgttactatgc

SEQ ID NO: 383933 - DNA, 55 bp, Artificial
  Synthetic oligonucleotide
ctgaacttactggtgactctgctgctcttgcgggtgtttcacggaaacaactggc

SEQ ID NO: 383934 - DNA, 58 bp, Artificial
  Synthetic oligonucleotide
ctgaacttcgacagtccatatacgaaccgtgttgttgcccccactgtccgcgtcacca

SEQ ID NO: 383935 - DNA, 53 bp, Artificial
  Synthetic oligonucleotide
ctgaacttgtcttcatagagttcatcatgcttaaacttagacttgataatgca

SEQ ID NO: 383936 - DNA, 56 bp, Artificial
  Synthetic oligonucleotide
ctgaactttatcccggcgcctactacaggatcgggttgcactcgaataccctcatt

SEQ ID NO: 383937 - DNA, 60 bp, Artificial
  Synthetic oligonucleotide
ctgaactttgttaatagagcaaatcagcggttgaaccctatgcatcaactcttgcggcat

SEQ ID NO: 383938 - DNA, 55 bp, Artificial
  Synthetic oligonucleotide
ctgaacttttgggacgtggatctcaaagataggttttccctagacctgtctcagt

SEQ ID NO: 383939 - DNA, 56 bp, Artificial
  Synthetic oligonucleotide
ctgaagaaacgccaagtcggaggatgtaaacgagtccagatccggaagttgagaaa

SEQ ID NO: 383940 - DNA, 58 bp, Artificial
  Synthetic oligonucleotide
ctgaagaaattgaattgcaccctctagtggcctcacctaataacagtgacctttttga

SEQ ID NO: 383941 - DNA, 60 bp, Artificial
  Synthetic oligonucleotide
ctgaagaaccacacgaacagtgtcatgttctggttggtcagagaccgtagaccgtatggc

SEQ ID NO: 383942 - DNA, 54 bp, Artificial
  Synthetic oligonucleotide
ctgaagaaccacactaacagcgttatgttttggttggtacgagaccgtagaccg

SEQ ID NO: 383943 - DNA, 53 bp, Artificial
  Synthetic oligonucleotide
ctgaagaagccaactatttggcatcgtagacattaggacagcacatttgcgct

SEQ ID NO: 383944 - DNA, 59 bp, Artificial
  Synthetic oligonucleotide
ctgaagaatggttcaaactggctctctacccggagggagatgtacccgatatcgccaca

SEQ ID NO: 383945 - DNA, 59 bp, Artificial
  Synthetic oligonucleotide
ctgaagacaagcgaggctcccactgtcaatcccccgtcggtttgtgattccactgtcaa

SEQ ID NO: 383946 - DNA, 55 bp, Artificial
  Synthetic oligonucleotide
ctgaagaccaagtctttgcttagcactggtctggggaccggcaattgtgggctcc

SEQ ID NO: 383947 - DNA, 55 bp, Artificial
  Synthetic oligonucleotide
ctgaagacgctaaacggagttttctccggcgtacgggttgtccatccagctagcg

SEQ ID NO: 383948 - DNA, 60 bp, Artificial
  Synthetic oligonucleotide
ctgaagagaagagcaattgcaacaccagggatgcagatcagagggtttgtgtactttgtt

SEQ ID NO: 383949 - DNA, 60 bp, Artificial
  Synthetic oligonucleotide
ctgaagagagagtactgcctgaggatgtactcccagactccttcttttcatttagacatg

SEQ ID NO: 383950 - DNA, 60 bp, Artificial
  Synthetic oligonucleotide
ctgaagagagagtcgttcaatcaataattgaggcaattgccagatcaatagggaggtttt

SEQ ID NO: 383951 - DNA, 56 bp, Artificial
  Synthetic oligonucleotide
ctgaagagcatgggacgcgtgtagagattacaactagagtgtatcacaaagctaaa

SEQ ID NO: 383952 - DNA, 60 bp, Artificial
  Synthetic oligonucleotide
ctgaagagcgcatagataaatcgaaaggagtgtcatcgtcactatctaggacaattgcac

SEQ ID NO: 383953 - DNA, 55 bp, Artificial
  Synthetic oligonucleotide
ctgaagagctctgttcggtcttcaatgatcaacctccagagcttagtaaggcgtg

SEQ ID NO: 383954 - DNA, 50 bp, Artificial
  Synthetic oligonucleotide
ctgaagagggtcagtagggacaacgcactattcgccaccaataccttgtt

SEQ ID NO: 383955 - DNA, 51 bp, Artificial
  Synthetic oligonucleotide
ctgaagagtaaacggttattggagaccgagacccggttagatgggctattt

SEQ ID NO: 383956 - DNA, 55 bp, Artificial
  Synthetic oligonucleotide
ctgaagataagcggaggatacttgaagagagctgtttgcgcctttacactgggcg

SEQ ID NO: 383957 - DNA, 58 bp, Artificial
  Synthetic oligonucleotide
ctgaagatgggcactctaccctctattcggacgttgcgtttttatgtggttgtggcga

SEQ ID NO: 383958 - DNA, 59 bp, Artificial
  Synthetic oligonucleotide
ctgaagatgtttcggttgtgacggccgttgcagatgtcttgtcaacttcgtctatttgt

SEQ ID NO: 383959 - DNA, 53 bp, Artificial
  Synthetic oligonucleotide
ctgaagcaatatgatagtgacgagccagaatttaggtcgcttgcaagttggat

SEQ ID NO: 383960 - DNA, 56 bp, Artificial
  Synthetic oligonucleotide
ctgaagcaggattcggtcctttcccagctgagggccttaaccaaaattctaagctc

SEQ ID NO: 383961 - DNA, 60 bp, Artificial
  Synthetic oligonucleotide
ctgaagcatacaatggggtacccaaagagagattgggatgcaatgaaagacataccagag

SEQ ID NO: 383962 - DNA, 60 bp, Artificial
  Synthetic oligonucleotide
ctgaagcatacgccgcgacgaacgatccgcgtaacatcaccactatggcacctgagctta

SEQ ID NO: 383963 - DNA, 60 bp, Artificial
  Synthetic oligonucleotide
ctgaagccaaatgggacgtgccctgctttgaagaagcaacgagatggattacacaagatt

SEQ ID NO: 383964 - DNA, 60 bp, Artificial
  Synthetic oligonucleotide
ctgaagccatggaggttgctagtcaagctaggcagatggtgcaggcaatgagaaccattg

SEQ ID NO: 383965 - DNA, 55 bp, Artificial
  Synthetic oligonucleotide
ctgaagccgaattgcaactgctcacactcacaacctgaagcaaccaatacaagcc

SEQ ID NO: 383966 - DNA, 55 bp, Artificial
  Synthetic oligonucleotide
ctgaagcgtgcggctacagtgacagagtggcgcaactcacagttgggaactccac

SEQ ID NO: 383967 - DNA, 53 bp, Artificial
  Synthetic oligonucleotide
ctgaagctccgaatgctttgcattcagctttcctcccttttgcattgctatct

SEQ ID NO: 383968 - DNA, 51 bp, Artificial
  Synthetic oligonucleotide
ctgaagctcttcatatttcgaagactggtccctttcagcagtcttgactct

SEQ ID NO: 383969 - DNA, 55 bp, Artificial
  Synthetic oligonucleotide
ctgaagctgatgctatgcgctcggtgctgtccgagatcgcaaagcgtcctgctgc

SEQ ID NO: 383970 - DNA, 55 bp, Artificial
  Synthetic oligonucleotide
ctgaagcttcgtggcttggaaccgataatgctttgatgtacaacgccgttacggg

SEQ ID NO: 383971 - DNA, 60 bp, Artificial
  Synthetic oligonucleotide
ctgaaggaggagaaatagtattccaaaatgctgcttttactatgtggaaattgacatatc

SEQ ID NO: 383972 - DNA, 60 bp, Artificial
  Synthetic oligonucleotide
ctgaaggagttctctcctggtacactaactgcagtagagtgtatagactacctagacagg

SEQ ID NO: 383973 - DNA, 55 bp, Artificial
  Synthetic oligonucleotide
ctgaaggataactcaatattgtatattgatataagaaccgataggggcaatgctg

SEQ ID NO: 383974 - DNA, 55 bp, Artificial
  Synthetic oligonucleotide
ctgaaggattaggagtaagatttttacacaaatctcctaaagcttttcatatggt

SEQ ID NO: 383975 - DNA, 60 bp, Artificial
  Synthetic oligonucleotide
ctgaaggattgcagtgtggctggatggcttcttgggaacccaatgtgtgatgagttccta

SEQ ID NO: 383976 - DNA, 60 bp, Artificial
  Synthetic oligonucleotide
ctgaaggcaagctggttacagccctgatcaggagccccgctcgtgactctcgatcgacgc

SEQ ID NO: 383977 - DNA, 52 bp, Artificial
  Synthetic oligonucleotide
ctgaaggcgggacgactatcgatcctagcttctcacacggagcaatcaagtt

SEQ ID NO: 383978 - DNA, 55 bp, Artificial
  Synthetic oligonucleotide
ctgaaggcggggtgtaccaaatatggtcttctccggaggatgtttccaagatggc

SEQ ID NO: 383979 - DNA, 56 bp, Artificial
  Synthetic oligonucleotide
ctgaaggctacgaagcccccttggttaccggtcgtaagtctgcgccttctgtgcag

SEQ ID NO: 383980 - DNA, 57 bp, Artificial
  Synthetic oligonucleotide
ctgaaggctacgagcaaccattgagtggcggttacctcctcgaaacaagtaggatta

SEQ ID NO: 383981 - DNA, 55 bp, Artificial
  Synthetic oligonucleotide
ctgaagggcctgattcaaatccaggagctgagaagatttatctacaattacaagt

SEQ ID NO: 383982 - DNA, 60 bp, Artificial
  Synthetic oligonucleotide
ctgaagggcttgttgcatcggctccacaccttgagagggtcacagggttcaatcagattg

SEQ ID NO: 383983 - DNA, 53 bp, Artificial
  Synthetic oligonucleotide
ctgaaggggccggaactcagtgaagatgaggatgagagggcttatgctacgat

SEQ ID NO: 383984 - DNA, 57 bp, Artificial
  Synthetic oligonucleotide
ctgaagggggtgagccgtgtcgttctccacgtcccaatatttggatgacgggctcta

SEQ ID NO: 383985 - DNA, 59 bp, Artificial
  Synthetic oligonucleotide
ctgaagggtccttgagaatttacttagctgatctaggcgacaaggagttatctcctata

SEQ ID NO: 383986 - DNA, 50 bp, Artificial
  Synthetic oligonucleotide
ctgaagggtgcctcccctatgatctcaatggcatgctcaatgctattgga

SEQ ID NO: 383987 - DNA, 55 bp, Artificial
  Synthetic oligonucleotide
ctgaaggtaaagcaagctcattaattgacatgcgtattttaggtgacgacgttcg

SEQ ID NO: 383988 - DNA, 55 bp, Artificial
  Synthetic oligonucleotide
ctgaaggtctccagatacacattagcgtactcggatatcgttctacatgccgagc

SEQ ID NO: 383989 - DNA, 56 bp, Artificial
  Synthetic oligonucleotide
ctgaaggttgcgatacgaaccagctcaacctaacagtgggactaaggacggaagat

SEQ ID NO: 383990 - DNA, 60 bp, Artificial
  Synthetic oligonucleotide
ctgaagtacaagacgtgtatgaatctgtcatacgagatatggctgaaattgatgacactt

SEQ ID NO: 383991 - DNA, 55 bp, Artificial
  Synthetic oligonucleotide
ctgaagtactacgacatgtaagacttacacctcatgtgcccattccaagcaggaa

SEQ ID NO: 383992 - DNA, 56 bp, Artificial
  Synthetic oligonucleotide
ctgaagtcacagtgctcttaagttaaagtcccgaggatacgaacacacgaggaacc

SEQ ID NO: 383993 - DNA, 55 bp, Artificial
  Synthetic oligonucleotide
ctgaagtcactctggaacacaatagcggtactctggtgcgttcataacagattta

SEQ ID NO: 383994 - DNA, 60 bp, Artificial
  Synthetic oligonucleotide
ctgaagtcactgtacacgcgactgacagttctactcccaaccgtaagattattggtgaga

SEQ ID NO: 383995 - DNA, 55 bp, Artificial
  Synthetic oligonucleotide
ctgaagtcatagatgctgctccatgtgaatatgttgctaacatgttctcgtattg

SEQ ID NO: 383996 - DNA, 60 bp, Artificial
  Synthetic oligonucleotide
ctgaagtcatatgagcacaactggcttgctaaatgtgactttgcaacgcaagtcatgagg

SEQ ID NO: 383997 - DNA, 60 bp, Artificial
  Synthetic oligonucleotide
ctgaagtccgtctgccccacgcagagtacgtgacacaactacactgtgcactaggtgagg

SEQ ID NO: 383998 - DNA, 57 bp, Artificial
  Synthetic oligonucleotide
ctgaagtcgaatttccctggacttgatatcgtctttagagattcttgttattcttcc

SEQ ID NO: 383999 - DNA, 56 bp, Artificial
  Synthetic oligonucleotide
ctgaagtctgtgatcactctcgaattcattttgaccctcaatacaatcaaacatgg

SEQ ID NO: 384000 - DNA, 59 bp, Artificial
  Synthetic oligonucleotide
ctgaagtgggaactaatggatgaagactaccagggtaggctgtgcaatcctctgaaccc

SEQ ID NO: 384001 - DNA, 54 bp, Artificial
  Synthetic oligonucleotide
ctgaagtgggcaggaagtgctccggcgacctcctctggagggggtaagggaccg

SEQ ID NO: 384002 - DNA, 55 bp, Artificial
  Synthetic oligonucleotide
ctgaagtgggttacccttcacccccttaccatgctttgggtgcactcattcttgg

SEQ ID NO: 384003 - DNA, 52 bp, Artificial
  Synthetic oligonucleotide
ctgaagtggtgacctttgaggtggcgctaaagaaaagtggattcttaaaaag

SEQ ID NO: 384004 - DNA, 50 bp, Artificial
  Synthetic oligonucleotide
ctgaagtgtcaaacaacactgagggaaatggcacaataacactcccatgc

SEQ ID NO: 384005 - DNA, 55 bp, Artificial
  Synthetic oligonucleotide
ctgaagttaacatccccaccctcaagacattcctttgctgagttgacttcaattc

SEQ ID NO: 384006 - DNA, 51 bp, Artificial
  Synthetic oligonucleotide
ctgaagttagggaataccaggacggacgaaggagagcgactgctagcgatc

SEQ ID NO: 384007 - DNA, 60 bp, Artificial
  Synthetic oligonucleotide
ctgaagttcaaaacactctgtattcaacttctctcctattgcactgttgtctaagattgt

SEQ ID NO: 384008 - DNA, 55 bp, Artificial
  Synthetic oligonucleotide
ctgaagttctgcgattggtctagaaaagagtggtggtttcatcagtggcatagcg

SEQ ID NO: 384009 - DNA, 55 bp, Artificial
  Synthetic oligonucleotide
ctgaagttgagaagcaaattggcaacgtgataaactggaccagagactccataac

SEQ ID NO: 384010 - DNA, 55 bp, Artificial
  Synthetic oligonucleotide
ctgaagttgcctttaggcagttcagacctaattctgatgctcattccgcgattca

SEQ ID NO: 384011 - DNA, 60 bp, Artificial
  Synthetic oligonucleotide
ctgaagtttggtctacaaacatggtgtgttccattttcttatacaatacatgatcaactg

SEQ ID NO: 384012 - DNA, 55 bp, Artificial
  Synthetic oligonucleotide
ctgaataaaggttctggctctggaatcatcacatcagataccccagtccataatt

SEQ ID NO: 384013 - DNA, 55 bp, Artificial
  Synthetic oligonucleotide
ctgaataagcggaaggcgaaacgtcggggggggagttgctcttggatcattatgt

SEQ ID NO: 384014 - DNA, 58 bp, Artificial
  Synthetic oligonucleotide
ctgaatacataatgaagggagtgtacataaatacagctttgctcaatgcatcttgtgc

SEQ ID NO: 384015 - DNA, 55 bp, Artificial
  Synthetic oligonucleotide
ctgaatacatgaaaaagtttgtcgttgattcaattaacaattgcgtaaagttagg

SEQ ID NO: 384016 - DNA, 60 bp, Artificial
  Synthetic oligonucleotide
ctgaataccccgacattcaggcttacagaatctaatttggaagggcaacactacgctgca

SEQ ID NO: 384017 - DNA, 60 bp, Artificial
  Synthetic oligonucleotide
ctgaatagagtagaatttgtacatagttttctaggtgactatccagtgtgtgaaggtgat

SEQ ID NO: 384018 - DNA, 60 bp, Artificial
  Synthetic oligonucleotide
ctgaataggttcaaatgtttctccaatgctgttttccaactcagcgacggaacattgata

SEQ ID NO: 384019 - DNA, 55 bp, Artificial
  Synthetic oligonucleotide
ctgaatagttgagtctttagtaaattaaaggaccttccaatggatggtacattta

SEQ ID NO: 384020 - DNA, 60 bp, Artificial
  Synthetic oligonucleotide
ctgaatatacaccagagcttcatacagcaattagatcacgatttgatgagacacttttct

SEQ ID NO: 384021 - DNA, 60 bp, Artificial
  Synthetic oligonucleotide
ctgaatatcaaatactggagcttcatgcatcattaatatatcaattatctccgtcatgtc

SEQ ID NO: 384022 - DNA, 57 bp, Artificial
  Synthetic oligonucleotide
ctgaatatctcatgattggtctatctgagacaagatattgggctattgaaatcaagc

SEQ ID NO: 384023 - DNA, 60 bp, Artificial
  Synthetic oligonucleotide
ctgaatatggtcatttaatcacagggaagtcacatggcaggatactcaagaataatttgc

SEQ ID NO: 384024 - DNA, 55 bp, Artificial
  Synthetic oligonucleotide
ctgaatcacctctaaatttcaatggaacagccggtgccaaataccctggtatgaa

SEQ ID NO: 384025 - DNA, 60 bp, Artificial
  Synthetic oligonucleotide
ctgaatcatccttggccaagctgaggcagctgagtgattcctcaccaagctctgatgagc

SEQ ID NO: 384026 - DNA, 51 bp, Artificial
  Synthetic oligonucleotide
ctgaatccaaagggctccagacatgctaaatttttggccgagcaagggcac

SEQ ID NO: 384027 - DNA, 55 bp, Artificial
  Synthetic oligonucleotide
ctgaatccgtacacgagtgggtaaagggttggaaattcaatgcaaataacgtctg

SEQ ID NO: 384028 - DNA, 57 bp, Artificial
  Synthetic oligonucleotide
ctgaatcggacgtccggcaaccggtgacgtccgatgtagttgtcacttggcgggaga

SEQ ID NO: 384029 - DNA, 58 bp, Artificial
  Synthetic oligonucleotide
ctgaatcggacgtccggcagacggtggcgtccgatgtagttatcacctgacgggagag

SEQ ID NO: 384030 - DNA, 55 bp, Artificial
  Synthetic oligonucleotide
ctgaatctagggtttctggtccatgggtatttggtgaatttgtcccttctggttc

SEQ ID NO: 384031 - DNA, 60 bp, Artificial
  Synthetic oligonucleotide
ctgaatctcatgacttctactgtggatcatgtattgaagtgcgcgttaccggctgagagt

SEQ ID NO: 384032 - DNA, 56 bp, Artificial
  Synthetic oligonucleotide
ctgaatctccgggatctaatacacttgttcctagtctgttaagttctctatacggc

SEQ ID NO: 384033 - DNA, 50 bp, Artificial
  Synthetic oligonucleotide
ctgaatctcgttgcgacagcaggacaaagcgcgattcgtctgaatgtgtt

SEQ ID NO: 384034 - DNA, 56 bp, Artificial
  Synthetic oligonucleotide
ctgaatctgaagtcgccctagctgagtgccattataggtacttggttagcaatggt

SEQ ID NO: 384035 - DNA, 55 bp, Artificial
  Synthetic oligonucleotide
ctgaatctgtattgttattatgtcctgatccatgttgaacggtcgttgagcgtgg

SEQ ID NO: 384036 - DNA, 55 bp, Artificial
  Synthetic oligonucleotide
ctgaatcttggacagaagaggtacaccaaaaccacatattggtgggacggactcc

SEQ ID NO: 384037 - DNA, 55 bp, Artificial
  Synthetic oligonucleotide
ctgaatcttgggcagaagaagtacacaagaaccacatactggtgggatggactcc

SEQ ID NO: 384038 - DNA, 60 bp, Artificial
  Synthetic oligonucleotide
ctgaatcttgttaatcatttcatgggcgtcaaaccctacgacatagtgcacttctgtgac

SEQ ID NO: 384039 - DNA, 60 bp, Artificial
  Synthetic oligonucleotide
ctgaatgagattttcgaggatgtagacagccctgaaaacgtcaagatggtgaatcagcca

SEQ ID NO: 384040 - DNA, 60 bp, Artificial
  Synthetic oligonucleotide
ctgaatgagcttctcggaggctcctactggcagatcgagcactctgaggcgctcttccac

SEQ ID NO: 384041 - DNA, 55 bp, Artificial
  Synthetic oligonucleotide
ctgaatgatcatatacaagttgctgtagcccactattcagcccagttagctactc

SEQ ID NO: 384042 - DNA, 55 bp, Artificial
  Synthetic oligonucleotide
ctgaatgcacagatgagtgtcattgacgaacatgcagcagttctatgtgatagtg

SEQ ID NO: 384043 - DNA, 55 bp, Artificial
  Synthetic oligonucleotide
ctgaatgcactgtgaaacaagttcgaaccatgcaccagttcgagctaaatcctct

SEQ ID NO: 384044 - DNA, 55 bp, Artificial
  Synthetic oligonucleotide
ctgaatggaaacctgcttcaaaacctttggaacccttagccagaggctcagcttg

SEQ ID NO: 384045 - DNA, 60 bp, Artificial
  Synthetic oligonucleotide
ctgaatggaatccctccacttgaattgggagattgcagcatcgccggatggctacttggg

SEQ ID NO: 384046 - DNA, 60 bp, Artificial
  Synthetic oligonucleotide
ctgaatggacaaattatcaatacatatcaagctagatttggcactattatcgcaagaaat

SEQ ID NO: 384047 - DNA, 59 bp, Artificial
  Synthetic oligonucleotide
ctgaatggcaaactccctcctttcctcacattcatttacaggaggacattattaataga

SEQ ID NO: 384048 - DNA, 55 bp, Artificial
  Synthetic oligonucleotide
ctgaatgggacggagttgggagatgatgaagacgagacagcaacaggaatcatgt

SEQ ID NO: 384049 - DNA, 58 bp, Artificial
  Synthetic oligonucleotide
ctgaatggtgtttcatacactgttggcggtggtgcaaaaagaaagttcagattggctc

SEQ ID NO: 384050 - DNA, 56 bp, Artificial
  Synthetic oligonucleotide
ctgaatgtctcagacttactggataaccagttgtatggttgttctgtattttcctc

SEQ ID NO: 384051 - DNA, 55 bp, Artificial
  Synthetic oligonucleotide
ctgaatgtgcatgcgtgaatggttcttgctttacagtaatgaccgatggaccaag

SEQ ID NO: 384052 - DNA, 60 bp, Artificial
  Synthetic oligonucleotide
ctgaatgtggctaaccttaaccctgcagctagtgcatgtaatccaacatgttgctagtcg

SEQ ID NO: 384053 - DNA, 60 bp, Artificial
  Synthetic oligonucleotide
ctgaatgtggctaatcctaaccctgcagctgttgcacaagatccattgtgtatacagtcg

SEQ ID NO: 384054 - DNA, 55 bp, Artificial
  Synthetic oligonucleotide
ctgaatgtgtatgccacaatggaacctgtgtagcagtgatgaccgatgggtcagc

SEQ ID NO: 384055 - DNA, 60 bp, Artificial
  Synthetic oligonucleotide
ctgaatgttcacgctttctaacatcaattaaagcatgtgacatggcaatttgttatggtg

SEQ ID NO: 384056 - DNA, 50 bp, Artificial
  Synthetic oligonucleotide
ctgaattaatggaagcccatatttacaggcccaatccaaaagcttcaggt

SEQ ID NO: 384057 - DNA, 55 bp, Artificial
  Synthetic oligonucleotide
ctgaattagcctcacatgatgagtcaatcagactagttggctcagctggctcaac

SEQ ID NO: 384058 - DNA, 55 bp, Artificial
  Synthetic oligonucleotide
ctgaattagcgtttgatcatgaccatgtaatacgatgcttaatgttagcggccgc

SEQ ID NO: 384059 - DNA, 56 bp, Artificial
  Synthetic oligonucleotide
ctgaattatagcgttaagacattgcaaatattgaataaatctggtatagctgcgat

SEQ ID NO: 384060 - DNA, 55 bp, Artificial
  Synthetic oligonucleotide
ctgaattcagtgagattgaacaccaaattggtaacgtcatcaattggaccaagga

SEQ ID NO: 384061 - DNA, 59 bp, Artificial
  Synthetic oligonucleotide
ctgaattggccgatttaatattaaatgaatggttgtgcaatccaatggacataacgttg

SEQ ID NO: 384062 - DNA, 55 bp, Artificial
  Synthetic oligonucleotide
ctgaattggctggtttactatcaatgtcatcagcgtcgaatggtgaatcaagaca

SEQ ID NO: 384063 - DNA, 55 bp, Artificial
  Synthetic oligonucleotide
ctgaatttaacgccttagcatatgtgtcattagcagactgctgtcctcctctagc

SEQ ID NO: 384064 - DNA, 57 bp, Artificial
  Synthetic oligonucleotide
ctgacaaacaactgtgcaacttcgacctgttaaagttggccggagacgttgagtcca

SEQ ID NO: 384065 - DNA, 56 bp, Artificial
  Synthetic oligonucleotide
ctgacaaacaatgtcgacacgataatagtccacctcaaggaacctgtaaaaattaa

SEQ ID NO: 384066 - DNA, 60 bp, Artificial
  Synthetic oligonucleotide
ctgacaaacacgctcgaatggagtagcgttgatcgagatatcctggcggctatatattcg

SEQ ID NO: 384067 - DNA, 60 bp, Artificial
  Synthetic oligonucleotide
ctgacaaagagattctcacttggaatgctacagggacgaggaccattgaaactgttcatg

SEQ ID NO: 384068 - DNA, 60 bp, Artificial
  Synthetic oligonucleotide
ctgacaaatatgataaactagaccaatatgcaaatcatatgggtatttctagaagatcgc

SEQ ID NO: 384069 - DNA, 60 bp, Artificial
  Synthetic oligonucleotide
ctgacaaatattataaactagatcagtatgcaaatcacatgggcatttctagaagatcac

SEQ ID NO: 384070 - DNA, 59 bp, Artificial
  Synthetic oligonucleotide
ctgacaaatttttgtcatcaggaatgccaggtaaccgagacggaatgcctttgtccata

SEQ ID NO: 384071 - DNA, 60 bp, Artificial
  Synthetic oligonucleotide
ctgacaacctaccgtcacttgcccaatacttgatggctggaactatggatgccgtctcca

SEQ ID NO: 384072 - DNA, 51 bp, Artificial
  Synthetic oligonucleotide
ctgacaacctctacagcatggggccacttgataacctcgtaggtatgcagt

SEQ ID NO: 384073 - DNA, 60 bp, Artificial
  Synthetic oligonucleotide
ctgacaacgatttgtataccaggagaaaactgccatatcatttggtggcaatttctaggc

SEQ ID NO: 384074 - DNA, 57 bp, Artificial
  Synthetic oligonucleotide
ctgacaacgtggccgctaagccgctggtcttaacgttgcacccgcagttaaccaagc

SEQ ID NO: 384075 - DNA, 56 bp, Artificial
  Synthetic oligonucleotide
ctgacaacttcggcaacgcacgacctttcaccgcaccaaacccaagttacgctcaa

SEQ ID NO: 384076 - DNA, 60 bp, Artificial
  Synthetic oligonucleotide
ctgacaactttaatagtggtcccctatacagctgtcatatgacagctggcaaaggatcat

SEQ ID NO: 384077 - DNA, 59 bp, Artificial
  Synthetic oligonucleotide
ctgacaagtgtcctgcaattgaactaaagtctaccatcatagaagacgggaacatgatg

SEQ ID NO: 384078 - DNA, 58 bp, Artificial
  Synthetic oligonucleotide
ctgacaagttggaacaagtccggtctgatttcctcgcccaccccatcaattattgatc

SEQ ID NO: 384079 - DNA, 53 bp, Artificial
  Synthetic oligonucleotide
ctgacaataaagatagagaacagcctataggccttgtcttactaatggcaggt

SEQ ID NO: 384080 - DNA, 51 bp, Artificial
  Synthetic oligonucleotide
ctgacaatctttcatgcagttaccgttaagtgcaagtagtaacgcaaatac

SEQ ID NO: 384081 - DNA, 57 bp, Artificial
  Synthetic oligonucleotide
ctgacaatgaccatgagccccaaatatcccccgggggcttagagcctcccagtgaaa

SEQ ID NO: 384082 - DNA, 55 bp, Artificial
  Synthetic oligonucleotide
ctgacaatgtgaaggtaacgtagtcagagttccatattacgttgctaggttgtgt

SEQ ID NO: 384083 - DNA, 55 bp, Artificial
  Synthetic oligonucleotide
ctgacaatgtgcacacctggacggagcaatataaattccaaccagactccccttc

SEQ ID NO: 384084 - DNA, 55 bp, Artificial
  Synthetic oligonucleotide
ctgacaattctggatacagtcagaccacatggagggtttacttgagatcccacga

SEQ ID NO: 384085 - DNA, 60 bp, Artificial
  Synthetic oligonucleotide
ctgacacaagagaaatggacatccaagcagtcgcactcttgatattaaccagcacatgcg

SEQ ID NO: 384086 - DNA, 57 bp, Artificial
  Synthetic oligonucleotide
ctgacacaagccggcctaatgaccccggaagcggaaactgtgatgcaccaataaccg

SEQ ID NO: 384087 - DNA, 60 bp, Artificial
  Synthetic oligonucleotide
ctgacacagaaaggacattccgcagggactttccactggggcgttctatgagatgtggtc

SEQ ID NO: 384088 - DNA, 50 bp, Artificial
  Synthetic oligonucleotide
ctgacacagcacccatcagcaccaacgttaccatttacaccagacttttc

SEQ ID NO: 384089 - DNA, 60 bp, Artificial
  Synthetic oligonucleotide
ctgacacaggaaacagtagtcagaacagccaaaattaccctatagtgcagaacatccagg

SEQ ID NO: 384090 - DNA, 55 bp, Artificial
  Synthetic oligonucleotide
ctgacacatacattgcctggtgactttggtttggttgacaagaatgaatggccca

SEQ ID NO: 384091 - DNA, 55 bp, Artificial
  Synthetic oligonucleotide
ctgacacattgtacgactaatggaacgtggcccaattatatttcacgtatggagt

SEQ ID NO: 384092 - DNA, 60 bp, Artificial
  Synthetic oligonucleotide
ctgacacccagacaatgaacactatgctaggatcagtgacccgcatgtttacgcaatggc

SEQ ID NO: 384093 - DNA, 59 bp, Artificial
  Synthetic oligonucleotide
ctgacacccaggctggtaacccctgtgcccagaacatcgttgccttgttcaacattcaa

SEQ ID NO: 384094 - DNA, 60 bp, Artificial
  Synthetic oligonucleotide
ctgacaccctgcacggatttcgatgtatgctggcaataaagtacttacaatccttcgagt

SEQ ID NO: 384095 - DNA, 60 bp, Artificial
  Synthetic oligonucleotide
ctgacacctgccccgtcacgctcaattgtgacagaattgagaacaaggggaagatgtttg

SEQ ID NO: 384096 - DNA, 55 bp, Artificial
  Synthetic oligonucleotide
ctgacaccttagaaacagaccccgccagcatccccacaccaccagacgagcggtt

SEQ ID NO: 384097 - DNA, 53 bp, Artificial
  Synthetic oligonucleotide
ctgacacgcgccccgaccagggctctaagcggttgtggcatagtttccaatgt

SEQ ID NO: 384098 - DNA, 60 bp, Artificial
  Synthetic oligonucleotide
ctgacactaaggaatggttttgaagtgatgagatttgaaaacaacggacctgatgtgtgc

SEQ ID NO: 384099 - DNA, 60 bp, Artificial
  Synthetic oligonucleotide
ctgacactaccaatgctcaaaggtaagagtgtcgttaacctagatcacttgctatcttac

SEQ ID NO: 384100 - DNA, 52 bp, Artificial
  Synthetic oligonucleotide
ctgacactgatgatctacaagactgctgacaccgagctttgtacaagggact

SEQ ID NO: 384101 - DNA, 60 bp, Artificial
  Synthetic oligonucleotide
ctgacagagataccattgattctgctccggcgctcggacaagtcctccctcctgaggtcg

SEQ ID NO: 384102 - DNA, 56 bp, Artificial
  Synthetic oligonucleotide
ctgacagagtccaccgtgtcttcagccttggcagagctcgctacaaagactttcga

SEQ ID NO: 384103 - DNA, 60 bp, Artificial
  Synthetic oligonucleotide
ctgacagatacctggagcacaagcgacgacgattttcagagtgatggggggtacagaccc

SEQ ID NO: 384104 - DNA, 56 bp, Artificial
  Synthetic oligonucleotide
ctgacagccctccccgttctgtaagtccggttcgttctgagaccagtactctacaa

SEQ ID NO: 384105 - DNA, 59 bp, Artificial
  Synthetic oligonucleotide
ctgacagcctcaatttgatggtccatcgttcaatgcagagtttcctattgttgattcat

SEQ ID NO: 384106 - DNA, 55 bp, Artificial
  Synthetic oligonucleotide
ctgacagcctttacaacaatacccgtcttaatactcattgcctcacccagcccgc

SEQ ID NO: 384107 - DNA, 58 bp, Artificial
  Synthetic oligonucleotide
ctgacagcgagaggggtggaacttctgggacgcaacagcctcaggggactacagaagg

SEQ ID NO: 384108 - DNA, 57 bp, Artificial
  Synthetic oligonucleotide
ctgacagctaatgaatcaggaaggctaatagatttcctcaaagatgtgatggagtca

SEQ ID NO: 384109 - DNA, 55 bp, Artificial
  Synthetic oligonucleotide
ctgacagcttgtcagggagtaggaggaccaggacataaagcaaagctcatggtag

SEQ ID NO: 384110 - DNA, 60 bp, Artificial
  Synthetic oligonucleotide
ctgacaggattagattgcatgagaccttgcttttgggttgaactaatcagagggcggccc

SEQ ID NO: 384111 - DNA, 56 bp, Artificial
  Synthetic oligonucleotide
ctgacagggaagcagaagccctcaaaacaggaaaccttggctttaactgggattca

SEQ ID NO: 384112 - DNA, 59 bp, Artificial
  Synthetic oligonucleotide
ctgacagtcaattcgactgcttccggtgtatattacaccatgaaagtccgtgaactgtt

SEQ ID NO: 384113 - DNA, 55 bp, Artificial
  Synthetic oligonucleotide
ctgacagtcatgacaattggtgtaattgtgatttcccttttgctcacctcctggc

SEQ ID NO: 384114 - DNA, 56 bp, Artificial
  Synthetic oligonucleotide
ctgacagtgcgcatgcctcactgggccggagtgcgtcagaatgtgatgggttccaa

SEQ ID NO: 384115 - DNA, 59 bp, Artificial
  Synthetic oligonucleotide
ctgacagtgtggggacccgaacacacagacgatcctgacgtcttacgcctaatgaagtc

SEQ ID NO: 384116 - DNA, 60 bp, Artificial
  Synthetic oligonucleotide
ctgacatacggaaaaggcagtagtaatgtaaaggcaaatgtcgctgctgtattaggcatt

SEQ ID NO: 384117 - DNA, 55 bp, Artificial
  Synthetic oligonucleotide
ctgacatagcagctttttcagtggaccctcaactgtattgtgattacaacttagt

SEQ ID NO: 384118 - DNA, 55 bp, Artificial
  Synthetic oligonucleotide
ctgacatagctcctgatccggattttctggacattgttcgtttacataggcctgc

SEQ ID NO: 384119 - DNA, 59 bp, Artificial
  Synthetic oligonucleotide
ctgacatagtccattgccgcatggctgccccaagtcagcggaaggccgtcctctcaaca

SEQ ID NO: 384120 - DNA, 60 bp, Artificial
  Synthetic oligonucleotide
ctgacatatgggcatacaatgctgaattgcttgttctgttggaaaatcagaagacattag

SEQ ID NO: 384121 - DNA, 55 bp, Artificial
  Synthetic oligonucleotide
ctgacatcaattccccaccggcttatgaccgggaggcacgtagtgtccagctcga

SEQ ID NO: 384122 - DNA, 55 bp, Artificial
  Synthetic oligonucleotide
ctgacatcacccaaatgatgccagaaagctcttgtagcatggataaccaccagtc

SEQ ID NO: 384123 - DNA, 58 bp, Artificial
  Synthetic oligonucleotide
ctgacatccaatcggggccaatttcacaccagataattgtcaacaaccaaaactggtc

SEQ ID NO: 384124 - DNA, 55 bp, Artificial
  Synthetic oligonucleotide
ctgacatcggagaactctttcgtctacctgaacagtgtatatcgatgcgaagagg

SEQ ID NO: 384125 - DNA, 52 bp, Artificial
  Synthetic oligonucleotide
ctgacatctatgggttctcgggggcttcccttcctggaacgggtggtatttt

SEQ ID NO: 384126 - DNA, 55 bp, Artificial
  Synthetic oligonucleotide
ctgacatgacccccaacgcagagatgtcactgagaggaataagagttagcaagat

SEQ ID NO: 384127 - DNA, 60 bp, Artificial
  Synthetic oligonucleotide
ctgacatgccccacgcagtatgacggaagcgcagcttcccgtcttggataagccgcggag

SEQ ID NO: 384128 - DNA, 60 bp, Artificial
  Synthetic oligonucleotide
ctgacatggccaacttcgcactcagcgacccgaacgcccatcggatgcgaaactttcttg

SEQ ID NO: 384129 - DNA, 55 bp, Artificial
  Synthetic oligonucleotide
ctgacattccatgtgaaaatccggtggtaattatcaatttacatctggaataccc

SEQ ID NO: 384130 - DNA, 60 bp, Artificial
  Synthetic oligonucleotide
ctgacattgcttcttacaatctccgacagatgcccaatctgcaagtatcctctgccaaca

SEQ ID NO: 384131 - DNA, 55 bp, Artificial
  Synthetic oligonucleotide
ctgacattggattcactgaatcttttgttctaatgccctctcttcgtaccgctgc

SEQ ID NO: 384132 - DNA, 58 bp, Artificial
  Synthetic oligonucleotide
ctgacattgttcggttgacctacaacacgattcgtcccatcgacaactccaatggtga

SEQ ID NO: 384133 - DNA, 60 bp, Artificial
  Synthetic oligonucleotide
ctgacatttaataacacccagctcaccaagcgtcttcgggctgcctggttgaagtgcata

SEQ ID NO: 384134 - DNA, 57 bp, Artificial
  Synthetic oligonucleotide
ctgacatttctgctggtagtgcctcctgcaactggaagagcctgctcgctttcgcga

SEQ ID NO: 384135 - DNA, 60 bp, Artificial
  Synthetic oligonucleotide
ctgacattttctgaagcccatgaagaaatgtaactggggactttgtcaaatgctgataag

SEQ ID NO: 384136 - DNA, 60 bp, Artificial
  Synthetic oligonucleotide
ctgacattttgctcacgcttaacacccctgctaacgcttgctgcatccaaattttagact

SEQ ID NO: 384137 - DNA, 60 bp, Artificial
  Synthetic oligonucleotide
ctgaccaagacagatgttgaagcatctgaagaacttcatctttgggaacatcgcactgcg

SEQ ID NO: 384138 - DNA, 59 bp, Artificial
  Synthetic oligonucleotide
ctgaccaatgcttttgcatgtgaggagcttagttatttgtgtaaaacttggcgactaag

SEQ ID NO: 384139 - DNA, 51 bp, Artificial
  Synthetic oligonucleotide
ctgaccagaatttcgacaacattccctgaaaaggagaaattcagatcaatg

SEQ ID NO: 384140 - DNA, 55 bp, Artificial
  Synthetic oligonucleotide
ctgaccagacaagggatgaaacaagtattgaaagcttcttgggtagatcaggttg

SEQ ID NO: 384141 - DNA, 55 bp, Artificial
  Synthetic oligonucleotide
ctgaccatatgattgtatcctcatttaatgggcccttaatgtgaaactgagctat

SEQ ID NO: 384142 - DNA, 60 bp, Artificial
  Synthetic oligonucleotide
ctgaccattttaatgaacggagcatttcgagagcttcatcctttgggatatcgcattgtg

SEQ ID NO: 384143 - DNA, 55 bp, Artificial
  Synthetic oligonucleotide
ctgacccaaagaataacaacaacggggccatttgctattctaactggatcaaccc

SEQ ID NO: 384144 - DNA, 60 bp, Artificial
  Synthetic oligonucleotide
ctgacccaaggcgctttgctgaatgacaggcattctaatggaaccgtcaaggacaggagt

SEQ ID NO: 384145 - DNA, 58 bp, Artificial
  Synthetic oligonucleotide
ctgacccaaggtgctctattaaatgacaaacattcaaatgggaccgtcaaggacagaa

SEQ ID NO: 384146 - DNA, 55 bp, Artificial
  Synthetic oligonucleotide
ctgacccaccgaacaggcaagaggttctgcgtgaagtccgtttacgtattgggta

SEQ ID NO: 384147 - DNA, 55 bp, Artificial
  Synthetic oligonucleotide
ctgacccagagtttgaaggcatggtgtgaggacatgcaggtatataacaacacgg

SEQ ID NO: 384148 - DNA, 55 bp, Artificial
  Synthetic oligonucleotide
ctgacccatgtatgaggtggatcctctactcggcacatcttgaaatagaggggat

SEQ ID NO: 384149 - DNA, 56 bp, Artificial
  Synthetic oligonucleotide
ctgacccattgagcccaggcgaacgtggaattcaaacgaagttaagagaattagag

SEQ ID NO: 384150 - DNA, 57 bp, Artificial
  Synthetic oligonucleotide
ctgaccccacgaccgtcctagggattggcaccgtgttggaccaggcggagacagctg

SEQ ID NO: 384151 - DNA, 59 bp, Artificial
  Synthetic oligonucleotide
ctgaccccccccatcgagagaaccatctatcggatggtcgacttgcccgtgttgcagcc

SEQ ID NO: 384152 - DNA, 50 bp, Artificial
  Synthetic oligonucleotide
ctgaccccgtttatgggaaagtgttcaaccccccccgcaaccagttgccg

SEQ ID NO: 384153 - DNA, 51 bp, Artificial
  Synthetic oligonucleotide
ctgacccgaagtattttgatggctatgctggacagcctgtggtggttatgg

SEQ ID NO: 384154 - DNA, 60 bp, Artificial
  Synthetic oligonucleotide
ctgacccgagacttgagccacacaaatgggagaagtactgtgttcttgagataggggata

SEQ ID NO: 384155 - DNA, 59 bp, Artificial
  Synthetic oligonucleotide
ctgacccgcgcaggcagtagcaacaaacaaccgtaagtaggggtgcctgacatgggcca

SEQ ID NO: 384156 - DNA, 55 bp, Artificial
  Synthetic oligonucleotide
ctgaccctgaagataatcagacaggttatctcctaatgtggaacagtaatgcttg

SEQ ID NO: 384157 - DNA, 55 bp, Artificial
  Synthetic oligonucleotide
ctgaccctgaagtgggattcgaatcaacatcgagcgtgcaagcagcttcgcccct

SEQ ID NO: 384158 - DNA, 54 bp, Artificial
  Synthetic oligonucleotide
ctgaccgagggtgtcgacgtattcaccggggacgcaacgtatcccggagagtac

SEQ ID NO: 384159 - DNA, 58 bp, Artificial
  Synthetic oligonucleotide
ctgaccgcatgacgatccggggtgacggcgcgactggggaggtacacgaaggtggtga

SEQ ID NO: 384160 - DNA, 51 bp, Artificial
  Synthetic oligonucleotide
ctgaccgcgcggctgagtcgctcagcccccgactctcaagcctgctactca

SEQ ID NO: 384161 - DNA, 55 bp, Artificial
  Synthetic oligonucleotide
ctgaccgcgtgccagtaggattccactgtgtgtgtcgtagatagcagtacccacg

SEQ ID NO: 384162 - DNA, 55 bp, Artificial
  Synthetic oligonucleotide
ctgaccggattcataaagcctgacgactccaaggactcaatcttgagtgccgaac

SEQ ID NO: 384163 - DNA, 50 bp, Artificial
  Synthetic oligonucleotide
ctgaccgtggtatcttacgccggaactaaaaagaaccgggtccttgggtg

SEQ ID NO: 384164 - DNA, 55 bp, Artificial
  Synthetic oligonucleotide
ctgaccgtgtcctaaagatcgcacgtgaagttccacagaaccgcgcagttgtagc

SEQ ID NO: 384165 - DNA, 55 bp, Artificial
  Synthetic oligonucleotide
ctgacctagacggaaaaaccgaagagtatggaggcagggctctaaagcctactac

SEQ ID NO: 384166 - DNA, 60 bp, Artificial
  Synthetic oligonucleotide
ctgacctataatgttaacctacttccctgatgctacgctgctttgtacagacgatactga

SEQ ID NO: 384167 - DNA, 60 bp, Artificial
  Synthetic oligonucleotide
ctgacctcagcaacggtagttacaagatggaaagttgacatagctggcatattactacaa

SEQ ID NO: 384168 - DNA, 56 bp, Artificial
  Synthetic oligonucleotide
ctgacctcccggtgtggttggcctacaaggtggcgtccaatggcattcagtacacc

SEQ ID NO: 384169 - DNA, 60 bp, Artificial
  Synthetic oligonucleotide
ctgacctcctctagcagatctgccgtcgatctggaattctccccattcgattgtatctcc

SEQ ID NO: 384170 - DNA, 55 bp, Artificial
  Synthetic oligonucleotide
ctgacctcgccaccgtcattcgggcggccatggcttttgggcccttctgtgacgc

SEQ ID NO: 384171 - DNA, 57 bp, Artificial
  Synthetic oligonucleotide
ctgacctgaaggcaaatctctggactcccctccagtgccctttacatcctcaaaaac

SEQ ID NO: 384172 - DNA, 58 bp, Artificial
  Synthetic oligonucleotide
ctgacctgcttggggatactaggtcgaagaatcgttgatttgtgcagttgtatttccc

SEQ ID NO: 384173 - DNA, 58 bp, Artificial
  Synthetic oligonucleotide
ctgacctggttggggataccaggtcgaagaatctgttattcgtgcattggtacttgcc

SEQ ID NO: 384174 - DNA, 60 bp, Artificial
  Synthetic oligonucleotide
ctgacctgtctactcttacgcgtctggaggagctgctgttaggctcactgaggatcgtgt

SEQ ID NO: 384175 - DNA, 55 bp, Artificial
  Synthetic oligonucleotide
ctgaccttcaaattgaagagtgtatggtccccggaccactagtccccttcttcca

SEQ ID NO: 384176 - DNA, 57 bp, Artificial
  Synthetic oligonucleotide
ctgaccttcacagtgaccgggattttatagtgattcattgttattatcccgggtgga

SEQ ID NO: 384177 - DNA, 56 bp, Artificial
  Synthetic oligonucleotide
ctgaccttccagataaagggaaaccttttgactccagatttgttttgtgtagcaca

SEQ ID NO: 384178 - DNA, 50 bp, Artificial
  Synthetic oligonucleotide
ctgaccttggttgatatctgtttctggagtacactgttctacacagcttc

SEQ ID NO: 384179 - DNA, 56 bp, Artificial
  Synthetic oligonucleotide
ctgacgaaaaacgactttctaggtttactagtttgatcgcaagtctgtcattggcc

SEQ ID NO: 384180 - DNA, 49 bp, Artificial
  Synthetic oligonucleotide
ctgacgaagttaaacttttaatacgttccggaaaattaagaattgacgg

SEQ ID NO: 384181 - DNA, 60 bp, Artificial
  Synthetic oligonucleotide
ctgacgaatagtccgtagcggacgtaagcattgcgcgctacccgtgcaaggacttgcagc

SEQ ID NO: 384182 - DNA, 55 bp, Artificial
  Synthetic oligonucleotide
ctgacgaatcgtcggaatacgccggaatccgtcttccgtgtagtgtcgcgaagtg

SEQ ID NO: 384183 - DNA, 59 bp, Artificial
  Synthetic oligonucleotide
ctgacgaatgtgatccttacgtacctttgatgcgctatgctgcgagtgacttcagcgcg

SEQ ID NO: 384184 - DNA, 56 bp, Artificial
  Synthetic oligonucleotide
ctgacgaattctactatgccatcgttggacgggaaaagggcgagcaaggtactccc

SEQ ID NO: 384185 - DNA, 60 bp, Artificial
  Synthetic oligonucleotide
ctgacgacgccagatgttgtcggaatatgtaaaatcgtgtcatcaattggacgtcagatg

SEQ ID NO: 384186 - DNA, 57 bp, Artificial
  Synthetic oligonucleotide
ctgacgacgtcatccttcaacgaatggaaccggaaaccctaatccatctctgaggac

SEQ ID NO: 384187 - DNA, 54 bp, Artificial
  Synthetic oligonucleotide
ctgacgacgtgattgaccgtatcaagtcaaggagatcatataagcacaaagaga

SEQ ID NO: 384188 - DNA, 55 bp, Artificial
  Synthetic oligonucleotide
ctgacgagataagaaacaatagtataccaaagagaatgttagttggcgggaaaag

SEQ ID NO: 384189 - DNA, 60 bp, Artificial
  Synthetic oligonucleotide
ctgacgagcaagtcgcggagttcattcaactactctccgcgcaggtgcaagtaagtcctc

SEQ ID NO: 384190 - DNA, 60 bp, Artificial
  Synthetic oligonucleotide
ctgacgagtgtaaagtatatgacgactaagtggttatagcttatgacacttgttagagtg

SEQ ID NO: 384191 - DNA, 55 bp, Artificial
  Synthetic oligonucleotide
ctgacgatcacaccaaacaactgggtgcgaagcaactcacaaatgccgctgagag

SEQ ID NO: 384192 - DNA, 60 bp, Artificial
  Synthetic oligonucleotide
ctgacgatgcattgtttatctatggttatcttgaacctactgatgatggaactgaatggt

SEQ ID NO: 384193 - DNA, 59 bp, Artificial
  Synthetic oligonucleotide
ctgacgatggtgtctcagcacccattctaccaaacttccaccccaccccatgtatccat

SEQ ID NO: 384194 - DNA, 51 bp, Artificial
  Synthetic oligonucleotide
ctgacgatgtcgaatccgatttagtcagctcgaagtattgacgtttcgtag

SEQ ID NO: 384195 - DNA, 60 bp, Artificial
  Synthetic oligonucleotide
ctgacgcacccttacgtgctagacgcagggatccctttgagccaattaactgtgtgccca

SEQ ID NO: 384196 - DNA, 55 bp, Artificial
  Synthetic oligonucleotide
ctgacgcccctggcaccgctaccacagcatctgttcctgggaccactaccgacgg

SEQ ID NO: 384197 - DNA, 59 bp, Artificial
  Synthetic oligonucleotide
ctgacgctagcagactatgctcggaacagaagctggtcacctttaacagggggtaggaa

SEQ ID NO: 384198 - DNA, 60 bp, Artificial
  Synthetic oligonucleotide
ctgacgctatcaagaaagaggatgacactgtggtcgatgagtcttctccctttagcactc

SEQ ID NO: 384199 - DNA, 55 bp, Artificial
  Synthetic oligonucleotide
ctgacgctatgtctgatgctgcctcctcaattaacagatcgcgatcgactagatc

SEQ ID NO: 384200 - DNA, 58 bp, Artificial
  Synthetic oligonucleotide
ctgacggaaagattgccaggtggggtgagtttcaaattaccaatcgctggtaacatca

SEQ ID NO: 384201 - DNA, 60 bp, Artificial
  Synthetic oligonucleotide
ctgacggaattgaacatatatagttagctggcatacataagggatcggtatttctggctg

SEQ ID NO: 384202 - DNA, 56 bp, Artificial
  Synthetic oligonucleotide
ctgacgggggctggaaccgagggggagaactactttgacatgggagcggatttgca

SEQ ID NO: 384203 - DNA, 60 bp, Artificial
  Synthetic oligonucleotide
ctgacggtcagaatacatggctattcgatccagttatgctaagaccgcataatccacaaa

SEQ ID NO: 384204 - DNA, 60 bp, Artificial
  Synthetic oligonucleotide
ctgacggtcgtgtgccctcgctgcgtgtaactggacatggatgatacttcaggtacagag

SEQ ID NO: 384205 - DNA, 60 bp, Artificial
  Synthetic oligonucleotide
ctgacggtgctcaaacgaatccgggacaacctcgacgagccatgcaccttcatcctacaa

SEQ ID NO: 384206 - DNA, 51 bp, Artificial
  Synthetic oligonucleotide
ctgacggtggcaaggggtacatcccgcattcgtggcgccaagtaccggacg

SEQ ID NO: 384207 - DNA, 55 bp, Artificial
  Synthetic oligonucleotide
ctgacggtgtgtttagtgaacttccacaatcatggttagatgcttctgttgcagg

SEQ ID NO: 384208 - DNA, 54 bp, Artificial
  Synthetic oligonucleotide
ctgacgtaaggaatgttactaataccactagtaacagtggggaaacaataggga

SEQ ID NO: 384209 - DNA, 60 bp, Artificial
  Synthetic oligonucleotide
ctgacgtcaaaccgactgtcacagacacgttgcatgtggaaagagccgttccagctacga

SEQ ID NO: 384210 - DNA, 55 bp, Artificial
  Synthetic oligonucleotide
ctgacgtcgtggatggcgttaaccataaattagatgttacaacgacaacttgtac

SEQ ID NO: 384211 - DNA, 55 bp, Artificial
  Synthetic oligonucleotide
ctgacgtctcggattgtgacggttcggggattctacgcggcactgcgtcacgggt

SEQ ID NO: 384212 - DNA, 60 bp, Artificial
  Synthetic oligonucleotide
ctgacgtggtaaactatgtgagcatggagttctcccttactgacccgagactggagccac

SEQ ID NO: 384213 - DNA, 59 bp, Artificial
  Synthetic oligonucleotide
ctgacgtggtaaactttgtaagcatggagttttctctcaccgatccaagacttgagcca

SEQ ID NO: 384214 - DNA, 59 bp, Artificial
  Synthetic oligonucleotide
ctgacgtggtgaattttgtgagtatggagttttctctcaccgacccgaggctggagcca

SEQ ID NO: 384215 - DNA, 56 bp, Artificial
  Synthetic oligonucleotide
ctgacgttcagttgctaaagcgtcaacaagtggcaggtcatcagtgtagtcagcta

SEQ ID NO: 384216 - DNA, 55 bp, Artificial
  Synthetic oligonucleotide
ctgacgttgtaccatatcacgttgatcgctcgtatcaatcattggaataacttcc

SEQ ID NO: 384217 - DNA, 57 bp, Artificial
  Synthetic oligonucleotide
ctgacgttgtagatggggtcaatcataaattgaaagtgacgacagacacttgtacaa

SEQ ID NO: 384218 - DNA, 55 bp, Artificial
  Synthetic oligonucleotide
ctgacgttgttgcatatctgctggcgcttggttatgactccgccgctaccacatc

SEQ ID NO: 384219 - DNA, 57 bp, Artificial
  Synthetic oligonucleotide
ctgacgtttataatatcgaggaaagcgtgagtaccatccatggggtattaaagctca

SEQ ID NO: 384220 - DNA, 60 bp, Artificial
  Synthetic oligonucleotide
ctgactaaaatccagacgttgttcaaaccatcgtgaggtggtgaggcctctcatcattgc

SEQ ID NO: 384221 - DNA, 55 bp, Artificial
  Synthetic oligonucleotide
ctgactaaaggatggccaactggatctgtgtacttcaaagaatacactgacgtag

SEQ ID NO: 384222 - DNA, 55 bp, Artificial
  Synthetic oligonucleotide
ctgactaaccaaccatgtctggcaaccagtatactgaggaagttatggagggagt

SEQ ID NO: 384223 - DNA, 55 bp, Artificial
  Synthetic oligonucleotide
ctgactaagccaatggatacgacttttgatgacggctatatgtgtgtgtcgcatg

SEQ ID NO: 384224 - DNA, 50 bp, Artificial
  Synthetic oligonucleotide
ctgactaattaagaactaggtgaggcatctaatcatcctcagtagtggag

SEQ ID NO: 384225 - DNA, 59 bp, Artificial
  Synthetic oligonucleotide
ctgactacataacaaacttgggaaaagcatttggtgtgggctttacagaccagatatca

SEQ ID NO: 384226 - DNA, 55 bp, Artificial
  Synthetic oligonucleotide
ctgactagaaattcagcacgaccaagccatactttgaagagctcgtcattatgcc

SEQ ID NO: 384227 - DNA, 53 bp, Artificial
  Synthetic oligonucleotide
ctgactagggcccattgtactatgtgaaggacgtggctatttattgaccatgt

SEQ ID NO: 384228 - DNA, 57 bp, Artificial
  Synthetic oligonucleotide
ctgactatattaataacagtactgaaagtaagaaaaccaatgaaggcttgaacagta

SEQ ID NO: 384229 - DNA, 55 bp, Artificial
  Synthetic oligonucleotide
ctgactatctatcggatgaattagagacattaggagatgtcactcttttaacgtg

SEQ ID NO: 384230 - DNA, 55 bp, Artificial
  Synthetic oligonucleotide
ctgactatgtgcctctgcctccttcatatggtgccccactttgcataggctttga

SEQ ID NO: 384231 - DNA, 55 bp, Artificial
  Synthetic oligonucleotide
ctgactatgttatcatgtgtgtgatagtgagtgtatctttaggtttcgcaatcgc

SEQ ID NO: 384232 - DNA, 55 bp, Artificial
  Synthetic oligonucleotide
ctgactcatctctaaggaccaaggttggcactgtattctcaatgcaacagtttac

SEQ ID NO: 384233 - DNA, 60 bp, Artificial
  Synthetic oligonucleotide
ctgactccaccggatctgctgtcccaactgctcagcaagtggggtcacgccatcgatcag

SEQ ID NO: 384234 - DNA, 55 bp, Artificial
  Synthetic oligonucleotide
ctgactcccatgacagttggtgtaactgcgatactccttttgctcacctcttggc

SEQ ID NO: 384235 - DNA, 55 bp, Artificial
  Synthetic oligonucleotide
ctgactccggatgcccagagggagctaggtgttacgtgttcaacccagaggcagt

SEQ ID NO: 384236 - DNA, 55 bp, Artificial
  Synthetic oligonucleotide
ctgactcgaggaatgaaactaataccactatcagtaactgggaaaagatggacat

SEQ ID NO: 384237 - DNA, 51 bp, Artificial
  Synthetic oligonucleotide
ctgactcgtcagctgcttccgcactgggactcgccttgagttccccctgcc

SEQ ID NO: 384238 - DNA, 57 bp, Artificial
  Synthetic oligonucleotide
ctgactctacttgatcaaatagaacatcactcaaggaaattagtgagggtcatagga

SEQ ID NO: 384239 - DNA, 52 bp, Artificial
  Synthetic oligonucleotide
ctgactgaacggctctatgtcggtggtcctatgtataattcaaagggccagt

SEQ ID NO: 384240 - DNA, 60 bp, Artificial
  Synthetic oligonucleotide
ctgactgactcgagttggatagaacttgatgaaataggggaagatgttgctccgattgaa

SEQ ID NO: 384241 - DNA, 55 bp, Artificial
  Synthetic oligonucleotide
ctgactgatgcgcctataatatcagagctgctgtgcactgtatctacatgcacgc

SEQ ID NO: 384242 - DNA, 55 bp, Artificial
  Synthetic oligonucleotide
ctgactgattctgaaatgaacaaactattcgaaaagacgaggcggcaactgaggg

SEQ ID NO: 384243 - DNA, 55 bp, Artificial
  Synthetic oligonucleotide
ctgactgcagtgacgaggtacagctatggagtgcgacagcccggatatttgcctc

SEQ ID NO: 384244 - DNA, 57 bp, Artificial
  Synthetic oligonucleotide
ctgactgcatccttgtaaatttaagcaatggcatatttgtaataatagttgggcacc

SEQ ID NO: 384245 - DNA, 60 bp, Artificial
  Synthetic oligonucleotide
ctgactgcccagaacctaccggccagttacaactactgcaggctagtgagtcggagtctc

SEQ ID NO: 384246 - DNA, 55 bp, Artificial
  Synthetic oligonucleotide
ctgactgccggcttggcccacggcaagtaccgcggactctactggctcggagcca

SEQ ID NO: 384247 - DNA, 60 bp, Artificial
  Synthetic oligonucleotide
ctgactggagtggctacagtgggtccttcatggactactgggctgagggggaatgctacc

SEQ ID NO: 384248 - DNA, 55 bp, Artificial
  Synthetic oligonucleotide
ctgactgggagttcgtcaatacccctcctctagtaaaattgtggtaccagttaga

SEQ ID NO: 384249 - DNA, 55 bp, Artificial
  Synthetic oligonucleotide
ctgactgtccatttctgcctaaacctaaaacacaggctgaatcattcatggggac

SEQ ID NO: 384250 - DNA, 60 bp, Artificial
  Synthetic oligonucleotide
ctgactgtgaatgtgagaggatcaggaatgaggatactggtaaggggcaactctccagtg

SEQ ID NO: 384251 - DNA, 55 bp, Artificial
  Synthetic oligonucleotide
ctgacttaacccaggatggaaccaattttgactttatgttccagcctctgatgct

SEQ ID NO: 384252 - DNA, 60 bp, Artificial
  Synthetic oligonucleotide
ctgacttactgcctgagttaagtgctgcggcgtaagcgtcgttggctgattgctgacccc

SEQ ID NO: 384253 - DNA, 60 bp, Artificial
  Synthetic oligonucleotide
ctgacttcaaacttcttggaaccaaatatcgtagtggccacgttcatcgtgatacagatg

SEQ ID NO: 384254 - DNA, 55 bp, Artificial
  Synthetic oligonucleotide
ctgacttcaacaataagcttaagataacagactctttagaaattttgtttcaagg

SEQ ID NO: 384255 - DNA, 55 bp, Artificial
  Synthetic oligonucleotide
ctgacttcaagacctggctcaagtccaaactcgtgccgcagttaccgggagtccc

SEQ ID NO: 384256 - DNA, 59 bp, Artificial
  Synthetic oligonucleotide
ctgacttcacaaaggtatacctttctgctgcactcggggtgtcgcttgctctagttgtt

SEQ ID NO: 384257 - DNA, 60 bp, Artificial
  Synthetic oligonucleotide
ctgacttgagcacgaaaactagtgtcgaatacattattcacaaggtaggagctgatacat

SEQ ID NO: 384258 - DNA, 59 bp, Artificial
  Synthetic oligonucleotide
ctgacttggaaatagggcaacatagagcaaaagtagaggagttaagaggacatctatta

SEQ ID NO: 384259 - DNA, 55 bp, Artificial
  Synthetic oligonucleotide
ctgacttggcctggctggaagcacaagaggaaggggaagtaggctttccagttag

SEQ ID NO: 384260 - DNA, 60 bp, Artificial
  Synthetic oligonucleotide
ctgacttgggtctgtctgatatgcacgcatcaagtttcgctcagcggttgccagctctgt

SEQ ID NO: 384261 - DNA, 59 bp, Artificial
  Synthetic oligonucleotide
ctgacttggtcaagatcgacaactacttttattttctagcacacacttccagattcaac

SEQ ID NO: 384262 - DNA, 60 bp, Artificial
  Synthetic oligonucleotide
ctgacttggtgcctctgttcgaaaacactcacgtgagttatgcttgttggcaagaagagg

SEQ ID NO: 384263 - DNA, 55 bp, Artificial
  Synthetic oligonucleotide
ctgacttgtgtattccctatgtatctgacacaaactatgttatgactgattcgtc

SEQ ID NO: 384264 - DNA, 54 bp, Artificial
  Synthetic oligonucleotide
ctgactttatagtgttctttaacagaaagcctccctttaagctaaacaaataca

SEQ ID NO: 384265 - DNA, 54 bp, Artificial
  Synthetic oligonucleotide
ctgactttccgcctgattttcagaagggaccattggcaaatctgcacgatctca

SEQ ID NO: 384266 - DNA, 59 bp, Artificial
  Synthetic oligonucleotide
ctgactttctctagagttaccgtacccggatccatttcacacagtcatgcctacgtctc

SEQ ID NO: 384267 - DNA, 53 bp, Artificial
  Synthetic oligonucleotide
ctgagaaacgctaacaggtgggaatctctaaggcccgtcactgatctagtacc

SEQ ID NO: 384268 - DNA, 57 bp, Artificial
  Synthetic oligonucleotide
ctgagaaagatttcaatgtcagtttggaaaaggatgaaaacaaggaaaagcctgaca

SEQ ID NO: 384269 - DNA, 55 bp, Artificial
  Synthetic oligonucleotide
ctgagaaaggtggtttgaacacgaccttgcccttccacaatgtcagcaaatatgc

SEQ ID NO: 384270 - DNA, 60 bp, Artificial
  Synthetic oligonucleotide
ctgagaaatccccacgggtgaccgtgtctcagcctgcgtggcggccagcccagcttatgc

SEQ ID NO: 384271 - DNA, 60 bp, Artificial
  Synthetic oligonucleotide
ctgagaacacggagcgccacactgcaaacgatgttaaccataacactcatgcattcactg

SEQ ID NO: 384272 - DNA, 55 bp, Artificial
  Synthetic oligonucleotide
ctgagaacagaggtgcctagtccagaacagttgctaggttaccagagggctgcct

SEQ ID NO: 384273 - DNA, 55 bp, Artificial
  Synthetic oligonucleotide
ctgagaacgtgtttatacaacaaccgtttaaattgagaacattaaggaatgagta

SEQ ID NO: 384274 - DNA, 55 bp, Artificial
  Synthetic oligonucleotide
ctgagaacgttgtggtccatcaaccggctcattaaaactaccttgagtcatatcg

SEQ ID NO: 384275 - DNA, 54 bp, Artificial
  Synthetic oligonucleotide
ctgagaactcagtgaccgccgttacgcaacaacctatcgttacactagaacaga

SEQ ID NO: 384276 - DNA, 59 bp, Artificial
  Synthetic oligonucleotide
ctgagaactcttatcttcctgcttagaagaggagtctcctggacgcttccgcccgctcg

SEQ ID NO: 384277 - DNA, 55 bp, Artificial
  Synthetic oligonucleotide
ctgagaaggcactcgcaaagaatctgaggattctgaagcgaacacatcctggcac

SEQ ID NO: 384278 - DNA, 58 bp, Artificial
  Synthetic oligonucleotide
ctgagaagggcctacgtgtgatttctattgatatgtttaacggaatgctgggtgtttc

SEQ ID NO: 384279 - DNA, 55 bp, Artificial
  Synthetic oligonucleotide
ctgagaatctttatgtgattccgtctcaccgatccacacaacccatttactaagg

SEQ ID NO: 384280 - DNA, 60 bp, Artificial
  Synthetic oligonucleotide
ctgagaatgataagatgcacacattagcgcgtgcgctacagagggaagcggctgaaagga

SEQ ID NO: 384281 - DNA, 57 bp, Artificial
  Synthetic oligonucleotide
ctgagaatggcaacaggactaaggaacgtcccctctattcaatccagaggacttttc

SEQ ID NO: 384282 - DNA, 60 bp, Artificial
  Synthetic oligonucleotide
ctgagaattgaatctgcggtttgtgaatctgtacttgccgacgcaagcgagacaatgtta

SEQ ID NO: 384283 - DNA, 53 bp, Artificial
  Synthetic oligonucleotide
ctgagacacttcaacatatgctgcagtaccctgatgtacttgtccactgcctt

SEQ ID NO: 384284 - DNA, 58 bp, Artificial
  Synthetic oligonucleotide
ctgagacagaccgtatctgagggtataccgggcacccagccctacgacaggcagttcc

SEQ ID NO: 384285 - DNA, 55 bp, Artificial
  Synthetic oligonucleotide
ctgagacaggtatgatgcagggaattctccactatactagctctctattccatgc

SEQ ID NO: 384286 - DNA, 55 bp, Artificial
  Synthetic oligonucleotide
ctgagaccaacaccaggcgggaaagcctacatggatgtcataagccggagagacc

SEQ ID NO: 384287 - DNA, 51 bp, Artificial
  Synthetic oligonucleotide
ctgagacccccctgtccctttttgtagtacctgaccgaactccctaacaaa

SEQ ID NO: 384288 - DNA, 50 bp, Artificial
  Synthetic oligonucleotide
ctgagaccggtatcgccttatactcattgcatgacctttggccctcggac

SEQ ID NO: 384289 - DNA, 60 bp, Artificial
  Synthetic oligonucleotide
ctgagacgtcatctcaaacgcctgatgatactgctgatgtttgtggaaaggagcgagagg

SEQ ID NO: 384290 - DNA, 55 bp, Artificial
  Synthetic oligonucleotide
ctgagactaaaccaaccaacgctagacgtttagcttacactaacgctgtcgtgcg

SEQ ID NO: 384291 - DNA, 53 bp, Artificial
  Synthetic oligonucleotide
ctgagactaacaatgggcatgctttaaatcaggtgtaccaaattatgtacgta

SEQ ID NO: 384292 - DNA, 59 bp, Artificial
  Synthetic oligonucleotide
ctgagactaccgtagccacagcggtaaagtctcaacctgacgcggagggtctgtggctc

SEQ ID NO: 384293 - DNA, 58 bp, Artificial
  Synthetic oligonucleotide
ctgagactcgcaaccggactgagaaatgttccacagattgaaactagaggacttttcg

SEQ ID NO: 384294 - DNA, 57 bp, Artificial
  Synthetic oligonucleotide
ctgagactctagacaatgtaatggtgtctctaccaggattcccttctctaagctgat

SEQ ID NO: 384295 - DNA, 60 bp, Artificial
  Synthetic oligonucleotide
ctgagactctatataattgaaagcatgcggaggattaactaactgagaattcatttatag

SEQ ID NO: 384296 - DNA, 55 bp, Artificial
  Synthetic oligonucleotide
ctgagactgactccacgactggtctactggcgggtgctagtaacactcactttgc

SEQ ID NO: 384297 - DNA, 55 bp, Artificial
  Synthetic oligonucleotide
ctgagactgctgtttataaattacatgttactactactcttgctggacgtacaca

SEQ ID NO: 384298 - DNA, 57 bp, Artificial
  Synthetic oligonucleotide
ctgagagaggggtagaggttgtcaacgcaactgaaacagtggagcgaacaaaccttc

SEQ ID NO: 384299 - DNA, 51 bp, Artificial
  Synthetic oligonucleotide
ctgagagatcatggaactcaggctatgagtggatcactgacttcccaggta

SEQ ID NO: 384300 - DNA, 60 bp, Artificial
  Synthetic oligonucleotide
ctgagagattacgaaatgatccaaactatattttgaatatggatgttaatttgccaccta

SEQ ID NO: 384301 - DNA, 52 bp, Artificial
  Synthetic oligonucleotide
ctgagagcatgaactttgccaaaagtccagaaatagcagcgagaccagctgt

SEQ ID NO: 384302 - DNA, 57 bp, Artificial
  Synthetic oligonucleotide
ctgagagccccgcgaccggtgtatcggtattagagcacgtgggtggtccctctatta

SEQ ID NO: 384303 - DNA, 60 bp, Artificial
  Synthetic oligonucleotide
ctgagagctacgggtaaactgaagagtgacggacatcttgctgctaaacatggaaccact

SEQ ID NO: 384304 - DNA, 50 bp, Artificial
  Synthetic oligonucleotide
ctgagagctcacttgctaaagtgggggtttaccacccctgacaaaaaaca

SEQ ID NO: 384305 - DNA, 60 bp, Artificial
  Synthetic oligonucleotide
ctgagagctgtaattcctgccactactgctccagtacctcaaggatttctggtccaacac

SEQ ID NO: 384306 - DNA, 60 bp, Artificial
  Synthetic oligonucleotide
ctgagagcttcaaacaggtgagggaaagggataacatggcgagcatgacaattacgaggt

SEQ ID NO: 384307 - DNA, 59 bp, Artificial
  Synthetic oligonucleotide
ctgagaggaatgaacagggacaaaccctttggagcaaaacaaatgatgccggctcagac

SEQ ID NO: 384308 - DNA, 60 bp, Artificial
  Synthetic oligonucleotide
ctgagaggatcagtggcccataagtcctgcttgcctgcttgtgtgtacggacttgccgtg

SEQ ID NO: 384309 - DNA, 60 bp, Artificial
  Synthetic oligonucleotide
ctgagaggggtgagagtcagcaaaatgggagtagacgagtactcaagcacagagagagtg

SEQ ID NO: 384310 - DNA, 60 bp, Artificial
  Synthetic oligonucleotide
ctgagagtatcaagcttcatcagaggggcaagagtggttccaaggggacaactgtccacc

SEQ ID NO: 384311 - DNA, 55 bp, Artificial
  Synthetic oligonucleotide
ctgagagtatgtggtgtcaaagtgatagtgatgatcaatctgatgaggatcacga

SEQ ID NO: 384312 - DNA, 59 bp, Artificial
  Synthetic oligonucleotide
ctgagagtcatttgcctgctcttattgtaaggacaaattgtcgtggttttgtattacgc

SEQ ID NO: 384313 - DNA, 55 bp, Artificial
  Synthetic oligonucleotide
ctgagagtgatgaatttttaggtgaaggtgatccagtcaaccccaggatgcatga

SEQ ID NO: 384314 - DNA, 60 bp, Artificial
  Synthetic oligonucleotide
ctgagagtggctcagacgctgctgcctacgaacgttccgattggagaggtctcttgcccg

SEQ ID NO: 384315 - DNA, 57 bp, Artificial
  Synthetic oligonucleotide
ctgagagttgcggagaaagatctacgccggcacgttaagaatgtaccgacagtgctg

SEQ ID NO: 384316 - DNA, 51 bp, Artificial
  Synthetic oligonucleotide
ctgagagttgctcagtgagccctggaggtgctattgtactcagttcagctc

SEQ ID NO: 384317 - DNA, 59 bp, Artificial
  Synthetic oligonucleotide
ctgagagtttcaagcttcatcagggggacaagagtggtcccgagagggcaactatccac

SEQ ID NO: 384318 - DNA, 55 bp, Artificial
  Synthetic oligonucleotide
ctgagatacgtagtgttaaacacgtaatcgacagtattgcccttttaactcagcg

SEQ ID NO: 384319 - DNA, 55 bp, Artificial
  Synthetic oligonucleotide
ctgagatagaggaggagattccttcaaacgacaactatgacaacgctaggactag

SEQ ID NO: 384320 - DNA, 60 bp, Artificial
  Synthetic oligonucleotide
ctgagatagcaaaggatatatggcgagatctattaaatgatcgacacaattacttttctc

SEQ ID NO: 384321 - DNA, 60 bp, Artificial
  Synthetic oligonucleotide
ctgagatagtcttgaacaaactagccatacctaaccgaggagtaaatgcttggctcacag

SEQ ID NO: 384322 - DNA, 60 bp, Artificial
  Synthetic oligonucleotide
ctgagatataggccgctgcagtgggacactgaaaaacagtggagagtaaaagcagattac

SEQ ID NO: 384323 - DNA, 55 bp, Artificial
  Synthetic oligonucleotide
ctgagatcataaggatctgttccaccattgaagagctcagacggcagaagtagtg

SEQ ID NO: 384324 - DNA, 55 bp, Artificial
  Synthetic oligonucleotide
ctgagatcctttttgggcctcctcaactatgcccgtatttacatacccaacctgg

SEQ ID NO: 384325 - DNA, 60 bp, Artificial
  Synthetic oligonucleotide
ctgagatctataacgaaggaaggtttatgtttatgcagcacaagccgttagcggcagatc

SEQ ID NO: 384326 - DNA, 60 bp, Artificial
  Synthetic oligonucleotide
ctgagatctgtgtttatcacagcgctagtttcgaggacatcccacacactacttgggatg

SEQ ID NO: 384327 - DNA, 60 bp, Artificial
  Synthetic oligonucleotide
ctgagatgaactattaccttttagcgactttcatagactcagctgctataacaccgacaa

SEQ ID NO: 384328 - DNA, 57 bp, Artificial
  Synthetic oligonucleotide
ctgagatgttttctaatgtgtacatacctcttaagaatgtgtccgcttttggatttc

SEQ ID NO: 384329 - DNA, 60 bp, Artificial
  Synthetic oligonucleotide
ctgagattcatgactccatcagatggaccaaaaacccttcatgtatgcaggaacacgtgc

SEQ ID NO: 384330 - DNA, 55 bp, Artificial
  Synthetic oligonucleotide
ctgagattccagcagcttctgtccagaaagtgcaggccatatttgatggacatcc

SEQ ID NO: 384331 - DNA, 57 bp, Artificial
  Synthetic oligonucleotide
ctgagcaaaagcgagttgatagccaaattcacgggtctttcaatcccccaacgagcg

SEQ ID NO: 384332 - DNA, 60 bp, Artificial
  Synthetic oligonucleotide
ctgagcaaacatgtaagacaattgattctaatgattgtttggtaacaacttctgtgaagg

SEQ ID NO: 384333 - DNA, 55 bp, Artificial
  Synthetic oligonucleotide
ctgagcaaactatatttaaactggacgcccctgatgacaagactgttcatctgtt

SEQ ID NO: 384334 - DNA, 60 bp, Artificial
  Synthetic oligonucleotide
ctgagcaacaactcaacagagaaagtggacacaataattgagagtaatgtcacggttact

SEQ ID NO: 384335 - DNA, 55 bp, Artificial
  Synthetic oligonucleotide
ctgagcaacgtcgagaggctctcaacaatgggacccttctgtatcaggatgaccc

SEQ ID NO: 384336 - DNA, 53 bp, Artificial
  Synthetic oligonucleotide
ctgagcaactcactactgcgacaccataacatggtgtacgccacgacctccaa

SEQ ID NO: 384337 - DNA, 60 bp, Artificial
  Synthetic oligonucleotide
ctgagcacaagccttcagaaatcagatggatcaagttcatggactttatatctggtgcag

SEQ ID NO: 384338 - DNA, 55 bp, Artificial
  Synthetic oligonucleotide
ctgagcaccaattcatcagaaagggtcgacacgctccttgaaaatggggttccag

SEQ ID NO: 384339 - DNA, 60 bp, Artificial
  Synthetic oligonucleotide
ctgagcacccccaccaaaatggacatgctagcctttgtaagtgcatgtccagatttctca

SEQ ID NO: 384340 - DNA, 60 bp, Artificial
  Synthetic oligonucleotide
ctgagcacgaacgccagacacgcggaactggtcatacatattcgaatactgcagccactg

SEQ ID NO: 384341 - DNA, 55 bp, Artificial
  Synthetic oligonucleotide
ctgagcacgaagaagttccaaggcacagattggaacattaagccatctaatgtgg

SEQ ID NO: 384342 - DNA, 60 bp, Artificial
  Synthetic oligonucleotide
ctgagcagactattttcaagttagacgctccagatgataagaccgttcatctattggatc

SEQ ID NO: 384343 - DNA, 57 bp, Artificial
  Synthetic oligonucleotide
ctgagcagacttcccgggttcgccccgtagtgattatggtctctggcaggcccggga

SEQ ID NO: 384344 - DNA, 60 bp, Artificial
  Synthetic oligonucleotide
ctgagcagcagtgatgctctcccctgtgcgtgaatccatagttgcgacagttgacgtgga

SEQ ID NO: 384345 - DNA, 51 bp, Artificial
  Synthetic oligonucleotide
ctgagcaggtggacaccctgctctgtgacattggggagtcatcctctaatc

SEQ ID NO: 384346 - DNA, 58 bp, Artificial
  Synthetic oligonucleotide
ctgagcataaccgataaagggcatagtggagccccgtacattagtggcaaaaacgtca

SEQ ID NO: 384347 - DNA, 56 bp, Artificial
  Synthetic oligonucleotide
ctgagcatagccaccgcagggccaaccgcagcgagagatggaatacgtgatgcaat

SEQ ID NO: 384348 - DNA, 53 bp, Artificial
  Synthetic oligonucleotide
ctgagcatcacgagtatacttggcgtcgtactcaagggacgccaagtagcctc

SEQ ID NO: 384349 - DNA, 60 bp, Artificial
  Synthetic oligonucleotide
ctgagcattgaggacccaagtcatgagggggaggggataccactgtatgatgcaatcaaa

SEQ ID NO: 384350 - DNA, 60 bp, Artificial
  Synthetic oligonucleotide
ctgagcattgctcacctcaccatactgcactcaggcaagccattctctgctgggggaaat

SEQ ID NO: 384351 - DNA, 55 bp, Artificial
  Synthetic oligonucleotide
ctgagcattgttgtttaccttacatccttcgtggttccaatactcctgaaggccc

SEQ ID NO: 384352 - DNA, 51 bp, Artificial
  Synthetic oligonucleotide
ctgagccacgtgggcgcatgccagagccaggtttactggaggctgctgttg

SEQ ID NO: 384353 - DNA, 60 bp, Artificial
  Synthetic oligonucleotide
ctgagccacttccgaacgaagattgcgcgggacaggatcagcggacgagaggggatatgt

SEQ ID NO: 384354 - DNA, 55 bp, Artificial
  Synthetic oligonucleotide
ctgagccagaggagtattctgatgcagaattactacatgtagaagaactaccctt

SEQ ID NO: 384355 - DNA, 60 bp, Artificial
  Synthetic oligonucleotide
ctgagccctctaggcgcgcacgccgagacctagctcaggggattcgacctcgctccgtga

SEQ ID NO: 384356 - DNA, 60 bp, Artificial
  Synthetic oligonucleotide
ctgagccctgacagctaaggaccatcccttgtggtaaagcaccgatgactgatgatgtca

SEQ ID NO: 384357 - DNA, 55 bp, Artificial
  Synthetic oligonucleotide
ctgagccgaatcagcttcgattccagtcctctgtatcagatagtgaaagagaacg

SEQ ID NO: 384358 - DNA, 55 bp, Artificial
  Synthetic oligonucleotide
ctgagccgagggagcacaagaagcaacactggtaagaaagccgctgtggtgaatc

SEQ ID NO: 384359 - DNA, 50 bp, Artificial
  Synthetic oligonucleotide
ctgagcctaagggaattaggcccagtttcaaagattggggtagcattaaa

SEQ ID NO: 384360 - DNA, 58 bp, Artificial
  Synthetic oligonucleotide
ctgagcctactcctgcacctgtccccaaacgattctttgagtatatcggaactccaac

SEQ ID NO: 384361 - DNA, 57 bp, Artificial
  Synthetic oligonucleotide
ctgagcctcttatatcaacaagaccctcttggaatttttgccacagtgaatttaaaa

SEQ ID NO: 384362 - DNA, 59 bp, Artificial
  Synthetic oligonucleotide
ctgagcctgatagatcagcactccgagttattaaaactaactatctggggtgtaaagaa

SEQ ID NO: 384363 - DNA, 57 bp, Artificial
  Synthetic oligonucleotide
ctgagcgatgattttccgtctactacccactttagcccacctactcttcacgaactg

SEQ ID NO: 384364 - DNA, 58 bp, Artificial
  Synthetic oligonucleotide
ctgagcgattgtctttggatttggatcagtatcctttggggcgtaagttcctatttca

SEQ ID NO: 384365 - DNA, 55 bp, Artificial
  Synthetic oligonucleotide
ctgagcgcggcaagctgtatgtcgcgaagagatttgctgataatgccatcaaggc

SEQ ID NO: 384366 - DNA, 60 bp, Artificial
  Synthetic oligonucleotide
ctgagcgtcacactaccaacgacgtgagcgcggataggcactcttattctggagccgctc

SEQ ID NO: 384367 - DNA, 60 bp, Artificial
  Synthetic oligonucleotide
ctgagcgtgggatgagcgagagcgttttgagtggcattcttgtaataagaggggtgtaca

SEQ ID NO: 384368 - DNA, 55 bp, Artificial
  Synthetic oligonucleotide
ctgagctaaggcaattagctcaagctctcattgaccagaaggttaaggagatatc

SEQ ID NO: 384369 - DNA, 55 bp, Artificial
  Synthetic oligonucleotide
ctgagctaccatcttctgacaacgaagatgctactttagtagctagaggtggcag

SEQ ID NO: 384370 - DNA, 58 bp, Artificial
  Synthetic oligonucleotide
ctgagctagcgcggtagtgtattggtgagtccttctcccttagctacggtcccagccc

SEQ ID NO: 384371 - DNA, 59 bp, Artificial
  Synthetic oligonucleotide
ctgagctagcttgcttttgttatcctcatttggagaacgatagctataaatttattcct

SEQ ID NO: 384372 - DNA, 59 bp, Artificial
  Synthetic oligonucleotide
ctgagctccgtcgtcagtgagcttcgtagacggacgaagacttacgttaagcatgactt

SEQ ID NO: 384373 - DNA, 55 bp, Artificial
  Synthetic oligonucleotide
ctgagctcgattgtgattcgagtactttcttgtccgatgttgatggtacatctgg

SEQ ID NO: 384374 - DNA, 53 bp, Artificial
  Synthetic oligonucleotide
ctgagctcgtcaaaggaattgttggggttgaagtgtacaaggtggcaacgctg

SEQ ID NO: 384375 - DNA, 55 bp, Artificial
  Synthetic oligonucleotide
ctgagctgaaacctggtacaaaccaatttctaactactgacgatggcgtttcagc

SEQ ID NO: 384376 - DNA, 60 bp, Artificial
  Synthetic oligonucleotide
ctgagctgatggtctactgacctgatgatggagaggatccgaagaccttggagctgatgg

SEQ ID NO: 384377 - DNA, 60 bp, Artificial
  Synthetic oligonucleotide
ctgagctgattactaattattcaccatctagggaagataatttgcaacgcgtctttacag

SEQ ID NO: 384378 - DNA, 50 bp, Artificial
  Synthetic oligonucleotide
ctgagctgcacacgcgtgctacagataccgttagtttgggaaccactctt

SEQ ID NO: 384379 - DNA, 60 bp, Artificial
  Synthetic oligonucleotide
ctgagctggttcagagtttctcaacaggtgggatatgcgacagtcctcatcagatccttg

SEQ ID NO: 384380 - DNA, 59 bp, Artificial
  Synthetic oligonucleotide
ctgagctgttaggttgcccatgtagacaccagatgcccgtggcccctcagacctcatta

SEQ ID NO: 384381 - DNA, 55 bp, Artificial
  Synthetic oligonucleotide
ctgagcttaaaagtcctacaaagcgtcatttagttattgggacatctggtgatcc

SEQ ID NO: 384382 - DNA, 55 bp, Artificial
  Synthetic oligonucleotide
ctgagcttgtcagggctaattttcgtgaagagttggtgcgttggtatcggtatcg

SEQ ID NO: 384383 - DNA, 55 bp, Artificial
  Synthetic oligonucleotide
ctgagctttgagattgaaccctgtcgtgtatctgtgtaatttctcttacctgcga

SEQ ID NO: 384384 - DNA, 55 bp, Artificial
  Synthetic oligonucleotide
ctgagctttgtttgtctgcgttgcgttaagactgagaagctaaatcatggcggat

SEQ ID NO: 384385 - DNA, 55 bp, Artificial
  Synthetic oligonucleotide
ctgaggaaaattggagaagttatgatagaactcatggtgtagggtatagccacga

SEQ ID NO: 384386 - DNA, 60 bp, Artificial
  Synthetic oligonucleotide
ctgaggaactttatgagattacaggggtattcatatgttgatcgtcagggacatccagat

SEQ ID NO: 384387 - DNA, 60 bp, Artificial
  Synthetic oligonucleotide
ctgaggaagtaggatgcacctcaggacttagaattcggtttagtcatctatggtagtgac

SEQ ID NO: 384388 - DNA, 60 bp, Artificial
  Synthetic oligonucleotide
ctgaggaagtatcgaaaatggttgatcaaagctctttagatttgattgcttctagtcaag

SEQ ID NO: 384389 - DNA, 55 bp, Artificial
  Synthetic oligonucleotide
ctgaggacaaaagagttgtgcaaaatgataagaggtaacaggcctttaacagaag

SEQ ID NO: 384390 - DNA, 56 bp, Artificial
  Synthetic oligonucleotide
ctgaggacaatgggcactatgtctgttggacagaaggttcaatgctcttggacaat

SEQ ID NO: 384391 - DNA, 55 bp, Artificial
  Synthetic oligonucleotide
ctgaggacaggttggtataccaacgtttttacattagaggtgggtgatgtagaaa

SEQ ID NO: 384392 - DNA, 55 bp, Artificial
  Synthetic oligonucleotide
ctgaggacccacgtatcgattgggacggtaagacattcgtgtccgcatctccgaa

SEQ ID NO: 384393 - DNA, 60 bp, Artificial
  Synthetic oligonucleotide
ctgaggacgctcttacagctgtcatcactgccgcctaccttaccatctgccaccagcggt

SEQ ID NO: 384394 - DNA, 56 bp, Artificial
  Synthetic oligonucleotide
ctgaggactaccacgcccacgagattaggttctacgaagaccaatcccgcccgcca

SEQ ID NO: 384395 - DNA, 59 bp, Artificial
  Synthetic oligonucleotide
ctgaggagattaatttttccctcttaagcataaggatggctctcgagtccacgaggcaa

SEQ ID NO: 384396 - DNA, 57 bp, Artificial
  Synthetic oligonucleotide
ctgaggagcattagaaaccacccaccgggtgttttcaagtagcctagctaggccatc

SEQ ID NO: 384397 - DNA, 55 bp, Artificial
  Synthetic oligonucleotide
ctgaggagccgccacctgtattaatgaagactcactgcccattgggatcactggg

SEQ ID NO: 384398 - DNA, 55 bp, Artificial
  Synthetic oligonucleotide
ctgaggaggagggagtgttagtgccagagacctgcagtgtcagtcctggtggagc

SEQ ID NO: 384399 - DNA, 58 bp, Artificial
  Synthetic oligonucleotide
ctgaggagtcgtggatcgcaccgtctgagtgggaccgtaaccacgacatcaacctacc

SEQ ID NO: 384400 - DNA, 55 bp, Artificial
  Synthetic oligonucleotide
ctgaggagttagtacagaagggtctatgtgaccccatcagagtattcgtcaaggg

SEQ ID NO: 384401 - DNA, 55 bp, Artificial
  Synthetic oligonucleotide
ctgaggataaagtccagggttactatatctgtattgcaggagggaactcagcacc

SEQ ID NO: 384402 - DNA, 57 bp, Artificial
  Synthetic oligonucleotide
ctgaggataactctggtcgggagttgttcattggctccaacggtgacccgatggaaa

SEQ ID NO: 384403 - DNA, 60 bp, Artificial
  Synthetic oligonucleotide
ctgaggatatgacccgtaacggctggcatatcaagatggacgacaatgccctagcagcta

SEQ ID NO: 384404 - DNA, 60 bp, Artificial
  Synthetic oligonucleotide
ctgaggatcaatgatgagtccaaggatgaaatgatggagttgttcaataaagagcctagt

SEQ ID NO: 384405 - DNA, 54 bp, Artificial
  Synthetic oligonucleotide
ctgaggatcatagtttacttgctactcttgacgatccttatgtagaagactctg

SEQ ID NO: 384406 - DNA, 58 bp, Artificial
  Synthetic oligonucleotide
ctgaggatcgaataaagctagttgcttgctgaacacgctatgacaatcgtacgctatg

SEQ ID NO: 384407 - DNA, 57 bp, Artificial
  Synthetic oligonucleotide
ctgaggatgaacccctgggtttcaacttttgaccaagcattcgtggaagctcacaaa

SEQ ID NO: 384408 - DNA, 59 bp, Artificial
  Synthetic oligonucleotide
ctgaggatgatcagatagacagttctccacatttcgttgcaatctataacctcttgaac

SEQ ID NO: 384409 - DNA, 55 bp, Artificial
  Synthetic oligonucleotide
ctgaggcaacccattgatcgaatgtaggactataacgtgttagagacttaccaca

SEQ ID NO: 384410 - DNA, 60 bp, Artificial
  Synthetic oligonucleotide
ctgaggcaccctccactggactatgctctaagccccacacgagaggcgagcagtgttcag

SEQ ID NO: 384411 - DNA, 60 bp, Artificial
  Synthetic oligonucleotide
ctgaggcagacttgccacccgcagctgcggccctccaggctatagagaatgctgcgagaa

SEQ ID NO: 384412 - DNA, 60 bp, Artificial
  Synthetic oligonucleotide
ctgaggcagattagatctcaaaatccagttgtatttgactttcatcacaactccggagta

SEQ ID NO: 384413 - DNA, 60 bp, Artificial
  Synthetic oligonucleotide
ctgaggcatattgactggtcaatcgggtcctctcaaacttggctatgcaatcggggaatg

SEQ ID NO: 384414 - DNA, 55 bp, Artificial
  Synthetic oligonucleotide
ctgaggccaactccacgattggtctactagcgggtactagtaacactcactttgc

SEQ ID NO: 384415 - DNA, 60 bp, Artificial
  Synthetic oligonucleotide
ctgaggccaatgctaagaaatcaggatctgctagcattatcataaacctagtctcggcac

SEQ ID NO: 384416 - DNA, 55 bp, Artificial
  Synthetic oligonucleotide
ctgaggccgcgaatgagattgcgcgtgttaccggagagacttcaacttggggacc

SEQ ID NO: 384417 - DNA, 55 bp, Artificial
  Synthetic oligonucleotide
ctgaggcctacaagaaacacacacggctgaattttgacttggctttcaggcgcac

SEQ ID NO: 384418 - DNA, 55 bp, Artificial
  Synthetic oligonucleotide
ctgaggcgacgtttgctatagtgtcgaaacatcctgcgcgtgttggactaccacc

SEQ ID NO: 384419 - DNA, 60 bp, Artificial
  Synthetic oligonucleotide
ctgaggcgactgcaccagtggataagctcagattgtaccactccgtgctccgattcttgg

SEQ ID NO: 384420 - DNA, 60 bp, Artificial
  Synthetic oligonucleotide
ctgaggcgatcatcgtagcaatggtgttttcacaagaggactgcatgataaaggcagtcc

SEQ ID NO: 384421 - DNA, 53 bp, Artificial
  Synthetic oligonucleotide
ctgaggcgcctttgaaaccatctcctaggtttcttcggaaggacttcggtccg

SEQ ID NO: 384422 - DNA, 55 bp, Artificial
  Synthetic oligonucleotide
ctgaggcgcgtttgactaaagttagacggatcctcaggagacatcttaattaccg

SEQ ID NO: 384423 - DNA, 60 bp, Artificial
  Synthetic oligonucleotide
ctgaggcgtctacatcagtggataagctcggattgcaccactccatgttcaggttcctgg

SEQ ID NO: 384424 - DNA, 57 bp, Artificial
  Synthetic oligonucleotide
ctgaggcgtttcagaatggaacgattcctaaattactttggtattcacggagatgaa

SEQ ID NO: 384425 - DNA, 55 bp, Artificial
  Synthetic oligonucleotide
ctgaggctagatgacttttcttgcagtgctatagattcggttagaagtgcaggag

SEQ ID NO: 384426 - DNA, 60 bp, Artificial
  Synthetic oligonucleotide
ctgagggaacaattaaaaggggaatatgtcaagcagcctgatgtctcagcacagtgcgtt

SEQ ID NO: 384427 - DNA, 55 bp, Artificial
  Synthetic oligonucleotide
ctgagggacgaagtgtcgttttctgtcggcctccatagctatgttatggggtccc

SEQ ID NO: 384428 - DNA, 60 bp, Artificial
  Synthetic oligonucleotide
ctgagggagctatcgaatgggaacggatggtacatgaagacaacaacctaataattgata

SEQ ID NO: 384429 - DNA, 53 bp, Artificial
  Synthetic oligonucleotide
ctgagggatacagtaaatacgtaatcagaaagaacccaaacggacaaagggaa

SEQ ID NO: 384430 - DNA, 55 bp, Artificial
  Synthetic oligonucleotide
ctgagggatccaatgtctcatgacaatgcaggtcctcctcagtaccccaatcctt

SEQ ID NO: 384431 - DNA, 51 bp, Artificial
  Synthetic oligonucleotide
ctgagggcaatttcgcaatccttgatgagtacactttggataacaccacaa

SEQ ID NO: 384432 - DNA, 60 bp, Artificial
  Synthetic oligonucleotide
ctgagggccacacgacgacgatcgacaacctgccacattcgcggacatgccctcaacgtg

SEQ ID NO: 384433 - DNA, 59 bp, Artificial
  Synthetic oligonucleotide
ctgagggccgagagaccaaccgctagacaactacaaatgatggggacctctcctgcaac

SEQ ID NO: 384434 - DNA, 56 bp, Artificial
  Synthetic oligonucleotide
ctgagggggagttgggaagccctcaaatacttgtggagccttgtacaatattggag

SEQ ID NO: 384435 - DNA, 55 bp, Artificial
  Synthetic oligonucleotide
ctgaggggtacatcttacaaaaggactttagcagctcagatttgtcgaccctcct

SEQ ID NO: 384436 - DNA, 55 bp, Artificial
  Synthetic oligonucleotide
ctgaggggttagtcggcttgttcccgccattttgccccggtcatagctgggagtc

SEQ ID NO: 384437 - DNA, 60 bp, Artificial
  Synthetic oligonucleotide
ctgagggtagcggcgcctcaatgtcgctaattgaatcatatattccaggacccataatat

SEQ ID NO: 384438 - DNA, 55 bp, Artificial
  Synthetic oligonucleotide
ctgagggtaggagtcgaatattaagtaatcctgactcaattagccactgttttga

SEQ ID NO: 384439 - DNA, 53 bp, Artificial
  Synthetic oligonucleotide
ctgagggtagtagaaatgctctggaaaatgctccagagttagtttcaggaaac

SEQ ID NO: 384440 - DNA, 60 bp, Artificial
  Synthetic oligonucleotide
ctgagggtcactggattgacctaccagcctggagttgacgtcgctatggcagtcatgacc

SEQ ID NO: 384441 - DNA, 60 bp, Artificial
  Synthetic oligonucleotide
ctgagggtcatttcttgaatgatctagagagtgtgcgccgtcatttgcaaggtgagactg

SEQ ID NO: 384442 - DNA, 55 bp, Artificial
  Synthetic oligonucleotide
ctgagggtggtaacgtcgcagtccccgtacgtggtggtagcaaccaacgcgatag

SEQ ID NO: 384443 - DNA, 55 bp, Artificial
  Synthetic oligonucleotide
ctgaggtaatatgagcagccgcagtctaagtcaattcgtctcctgcggattagtt

SEQ ID NO: 384444 - DNA, 55 bp, Artificial
  Synthetic oligonucleotide
ctgaggtagcggcccaaagctggggacagctgatgggtagccctctttcctttcc

SEQ ID NO: 384445 - DNA, 55 bp, Artificial
  Synthetic oligonucleotide
ctgaggtctacgttcggtccatctttggtcctggtggttcaccatccctgttccc

SEQ ID NO: 384446 - DNA, 60 bp, Artificial
  Synthetic oligonucleotide
ctgaggtgacggtcagctgtggtattggccttgtagatgagggaagtgatcttgcatctt

SEQ ID NO: 384447 - DNA, 60 bp, Artificial
  Synthetic oligonucleotide
ctgaggtgcacacagcaagaggcgagagcggcgactggtgagtacgccaaattttgacta

SEQ ID NO: 384448 - DNA, 60 bp, Artificial
  Synthetic oligonucleotide
ctgaggtgcatagagggtgttatcgcacacttggtgtatttagataccgtagtagatgct

SEQ ID NO: 384449 - DNA, 54 bp, Artificial
  Synthetic oligonucleotide
ctgaggtggattcggttgttcctgtcaacaacacctctacgcacatggaaggaa

SEQ ID NO: 384450 - DNA, 59 bp, Artificial
  Synthetic oligonucleotide
ctgaggtgggattgaaaatggcagccacacccgccacaccttaactctgctgatttacc

SEQ ID NO: 384451 - DNA, 55 bp, Artificial
  Synthetic oligonucleotide
ctgaggtgtgtccatggcccaataggcttactaacagcaggagggagtggatatg

SEQ ID NO: 384452 - DNA, 55 bp, Artificial
  Synthetic oligonucleotide
ctgaggttataggcgtgacaagtttgatgaatgtgcactctaatgggcaagtaac

SEQ ID NO: 384453 - DNA, 55 bp, Artificial
  Synthetic oligonucleotide
ctgaggttcaacctctaagtgacgattttgagcagattagtgaccctaaaggcta

SEQ ID NO: 384454 - DNA, 55 bp, Artificial
  Synthetic oligonucleotide
ctgagtaacctacggtcacacacctgcacaccggtatcggttaaaacacaccctg

SEQ ID NO: 384455 - DNA, 57 bp, Artificial
  Synthetic oligonucleotide
ctgagtaaggttaatgcatccctccaaaatgccgttaagtacataaaggagagcaac

SEQ ID NO: 384456 - DNA, 60 bp, Artificial
  Synthetic oligonucleotide
ctgagtactcgaagtacgacagctttgtagcccagtcataaggcagagccttctgcacca

SEQ ID NO: 384457 - DNA, 58 bp, Artificial
  Synthetic oligonucleotide
ctgagtactctacactgtaccgccgatggcttgactcattttagtaaccctacctcag

SEQ ID NO: 384458 - DNA, 60 bp, Artificial
  Synthetic oligonucleotide
ctgagtagaggctttggatcaggaatcatcaactcaaatgcaccaatggatgaatgtgat

SEQ ID NO: 384459 - DNA, 56 bp, Artificial
  Synthetic oligonucleotide
ctgagtaggatggatccgcctacgtccctggtgacagggcggctccccttggttac

SEQ ID NO: 384460 - DNA, 57 bp, Artificial
  Synthetic oligonucleotide
ctgagtaggcacgaatctccgttggagaagcgagtcggtaaagcgtaccctctcctc

SEQ ID NO: 384461 - DNA, 55 bp, Artificial
  Synthetic oligonucleotide
ctgagtagtaatattagtcctcccattgttgttcatagcgttccaggtgcgggca

SEQ ID NO: 384462 - DNA, 55 bp, Artificial
  Synthetic oligonucleotide
ctgagtataagaggacatatgcctaaattaccacgtggtctgcgtttcggagccg

SEQ ID NO: 384463 - DNA, 55 bp, Artificial
  Synthetic oligonucleotide
ctgagtatatagaaaactggaatttgcagaatagaagacagaggacgggattcac

SEQ ID NO: 384464 - DNA, 60 bp, Artificial
  Synthetic oligonucleotide
ctgagtatgaccagactacctacggctcttctactaaccctatgtatgtttctgatactg

SEQ ID NO: 384465 - DNA, 60 bp, Artificial
  Synthetic oligonucleotide
ctgagtcatctgaaaagtttataccgaagagatcgtacagaatagttgatgaggataccg

SEQ ID NO: 384466 - DNA, 60 bp, Artificial
  Synthetic oligonucleotide
ctgagtcatgatgtggcgagcgtggcgagttaggcttatcccaccttacctttataatca

SEQ ID NO: 384467 - DNA, 52 bp, Artificial
  Synthetic oligonucleotide
ctgagtcatggcgcggtacgtctacgaatgcctgcaattcaaccagcagacc

SEQ ID NO: 384468 - DNA, 55 bp, Artificial
  Synthetic oligonucleotide
ctgagtccaattattatggagttatgggacacaataacaagtctcgatgatcccg

SEQ ID NO: 384469 - DNA, 55 bp, Artificial
  Synthetic oligonucleotide
ctgagtctcagagacgtattcaggtgcctcaatctaagtataataagcgtgtcac

SEQ ID NO: 384470 - DNA, 55 bp, Artificial
  Synthetic oligonucleotide
ctgagtctgacctagctgtgttttcagccagtgagcctagggtaccctcccacac

SEQ ID NO: 384471 - DNA, 60 bp, Artificial
  Synthetic oligonucleotide
ctgagtctgagctcttcaaatgggctcggtgcgagattcctctacagttttctgaaggat

SEQ ID NO: 384472 - DNA, 60 bp, Artificial
  Synthetic oligonucleotide
ctgagtgactatgcctgtgtgcatagtgcagaggtgcttgtactcatcccagatgctgtc

SEQ ID NO: 384473 - DNA, 60 bp, Artificial
  Synthetic oligonucleotide
ctgagtgcaatgtcaaaggtaggcgatgataacgatttcgagcatttatcaccaattgac

SEQ ID NO: 384474 - DNA, 60 bp, Artificial
  Synthetic oligonucleotide
ctgagtgccaccggttgctagtggatgaagctggtttgttacattacggtcagctgttgg

SEQ ID NO: 384475 - DNA, 60 bp, Artificial
  Synthetic oligonucleotide
ctgagtgcccgctgcacctgtgccacttggttgaagtcaatgctgtcagcaattagcttg

SEQ ID NO: 384476 - DNA, 58 bp, Artificial
  Synthetic oligonucleotide
ctgagtggtcttagaaatatcctgagtaattgaaacgaagcgagtaagcttaactcta

SEQ ID NO: 384477 - DNA, 60 bp, Artificial
  Synthetic oligonucleotide
ctgagtgtaaagttgagagagatcttaatttagcaaacaccatcatttcaattattgcta

SEQ ID NO: 384478 - DNA, 55 bp, Artificial
  Synthetic oligonucleotide
ctgagtgtgcctaaagttcagcccaaaacgttggaggcgattctagatactccaa

SEQ ID NO: 384479 - DNA, 60 bp, Artificial
  Synthetic oligonucleotide
ctgagtgtgtcaagcttcattagaggaacaagagtagtcccaagaggacaactgtccacc

SEQ ID NO: 384480 - DNA, 55 bp, Artificial
  Synthetic oligonucleotide
ctgagttaatgtatatattagggacctacggacaacaaaggattgatggtgagcc

SEQ ID NO: 384481 - DNA, 60 bp, Artificial
  Synthetic oligonucleotide
ctgagttactctcaaatagtcgatgccctgaatgctaagcgcaattacagtaatgaagca

SEQ ID NO: 384482 - DNA, 60 bp, Artificial
  Synthetic oligonucleotide
ctgagttagagaaaagatgtattgatttccatgctaagtgtgtcgataattcaaagaagg

SEQ ID NO: 384483 - DNA, 55 bp, Artificial
  Synthetic oligonucleotide
ctgagttagcagggctactttcaatgtcgtcagcatcaaatggtgagtcgcgaca

SEQ ID NO: 384484 - DNA, 55 bp, Artificial
  Synthetic oligonucleotide
ctgagttagctaattatcagcaggacacaatggacgcaattttgcttatcaaagg

SEQ ID NO: 384485 - DNA, 60 bp, Artificial
  Synthetic oligonucleotide
ctgagttccgaagagagtgtgacctccatatattacgcttcaggtggcaatcctaagata

SEQ ID NO: 384486 - DNA, 55 bp, Artificial
  Synthetic oligonucleotide
ctgagttcgttcagatggattggcgggcgtagttaacccaaaaaccatctactta

SEQ ID NO: 384487 - DNA, 60 bp, Artificial
  Synthetic oligonucleotide
ctgagttcttgcgagctactagctggtcaaatctgttgaacggaagaacaatctctgggg

SEQ ID NO: 384488 - DNA, 55 bp, Artificial
  Synthetic oligonucleotide
ctgagttgagttgcagtgatgctctcccctgtgcgaaaatccatagttacggcag

SEQ ID NO: 384489 - DNA, 57 bp, Artificial
  Synthetic oligonucleotide
ctgagttggcacgaacgttgcaagcccgcaccagtttcccgggcaggcgtaggcctc

SEQ ID NO: 384490 - DNA, 55 bp, Artificial
  Synthetic oligonucleotide
ctgagttggcggaagccaaacaaagactccttcgcgaaaggctacacgcggtagc

SEQ ID NO: 384491 - DNA, 50 bp, Artificial
  Synthetic oligonucleotide
ctgagttgtacaaagatgcaaccttttttaagccagatgtgctcaactgc

SEQ ID NO: 384492 - DNA, 57 bp, Artificial
  Synthetic oligonucleotide
ctgagttgttcgggttcctggtgtaatggtccatccaaataaggtcttcagttgcag

SEQ ID NO: 384493 - DNA, 60 bp, Artificial
  Synthetic oligonucleotide
ctgagtttatgccgctggtggtagacacgaacagagctgagtgtctaaccgcctgggcgg

SEQ ID NO: 384494 - DNA, 55 bp, Artificial
  Synthetic oligonucleotide
ctgagtttcgcatgcagcaccataagttgtcgggagaaattgagactcaaaccac

SEQ ID NO: 384495 - DNA, 60 bp, Artificial
  Synthetic oligonucleotide
ctgagtttgatcctggatctattcagagatatctcaaattactggtcaaggcctctggac

SEQ ID NO: 384496 - DNA, 60 bp, Artificial
  Synthetic oligonucleotide
ctgagtttggtgaacacatcttggggaacatctctggtggattatcaagcgccattgaag

SEQ ID NO: 384497 - DNA, 56 bp, Artificial
  Synthetic oligonucleotide
ctgagttttgataaactagaccaggatatccaggaggaggttagccttctccagtt

SEQ ID NO: 384498 - DNA, 52 bp, Artificial
  Synthetic oligonucleotide
ctgataaaaccccagacccgccaaagtctaaacgtaaacttgagccggagaa

SEQ ID NO: 384499 - DNA, 60 bp, Artificial
  Synthetic oligonucleotide
ctgataaacgcatgtaaagaactgacaaaccgttgagtagtgtgctgtatcctgaaataa

SEQ ID NO: 384500 - DNA, 60 bp, Artificial
  Synthetic oligonucleotide
ctgataaacttgtggatgagccacagaaaaagctggatgggttggttgacgtgataacag

SEQ ID NO: 384501 - DNA, 55 bp, Artificial
  Synthetic oligonucleotide
ctgataaatagtttatcagatgggcactggattttctgtaataggtctaaggctt

SEQ ID NO: 384502 - DNA, 55 bp, Artificial
  Synthetic oligonucleotide
ctgataactactttacgccacaagtttgcactagaatgttacttgttatcacacg

SEQ ID NO: 384503 - DNA, 60 bp, Artificial
  Synthetic oligonucleotide
ctgataagagcgacacgttcataatagtgcccataccaagagagacgaaatactcgtgat

SEQ ID NO: 384504 - DNA, 60 bp, Artificial
  Synthetic oligonucleotide
ctgataagcaggctcgcgacgagtttttcagttcatttgtgcacagcggaaacttgcata

SEQ ID NO: 384505 - DNA, 58 bp, Artificial
  Synthetic oligonucleotide
ctgataagcgcggggagttgggctacggcagatcaaatgcacaatcgggtgtgaagcc

SEQ ID NO: 384506 - DNA, 52 bp, Artificial
  Synthetic oligonucleotide
ctgataagctataaggtgacacataaggtggaacatcatctgcaaatattcg

SEQ ID NO: 384507 - DNA, 55 bp, Artificial
  Synthetic oligonucleotide
ctgataagcttggtgcctcagaaattctcgctcagggcgatagggctcaattgcc

SEQ ID NO: 384508 - DNA, 58 bp, Artificial
  Synthetic oligonucleotide
ctgataagttggagactataaattgcactaattgtaataaagccaatggtagtagcgg

SEQ ID NO: 384509 - DNA, 55 bp, Artificial
  Synthetic oligonucleotide
ctgataagtttcgttctttgtctggtggatccttaatgttgagtatgtttggacc

SEQ ID NO: 384510 - DNA, 57 bp, Artificial
  Synthetic oligonucleotide
ctgataataaggattcagaagaagcaatagggaaagtactattatttgcaggggtcc

SEQ ID NO: 384511 - DNA, 60 bp, Artificial
  Synthetic oligonucleotide
ctgataatgtccaatatgttgtacaatgtataggatcaaggacgtaccagatagaagata

SEQ ID NO: 384512 - DNA, 60 bp, Artificial
  Synthetic oligonucleotide
ctgatacaacattcctcccaaatatatcgtaggtaaattcttcgcatgctcagtatccca

SEQ ID NO: 384513 - DNA, 60 bp, Artificial
  Synthetic oligonucleotide
ctgatacaacgtctaccattgaaaatgttgacgatgtgggcattatgcaacagaagaaac

SEQ ID NO: 384514 - DNA, 60 bp, Artificial
  Synthetic oligonucleotide
ctgatacaattctcaattcggatcttgaggttgctggacacatttacgacatggctgatt

SEQ ID NO: 384515 - DNA, 56 bp, Artificial
  Synthetic oligonucleotide
ctgataccaaaaaagctaagaagcccattcatgtgggtgtggttattaataaaaca

SEQ ID NO: 384516 - DNA, 60 bp, Artificial
  Synthetic oligonucleotide
ctgatacctatgttccggcgcgcttcgtggtgaggtctgacttcccggtagtcacagctg

SEQ ID NO: 384517 - DNA, 60 bp, Artificial
  Synthetic oligonucleotide
ctgatacctgcaacctccccagtcacatgtgtggatatacggccaacagcgcagccgagt

SEQ ID NO: 384518 - DNA, 60 bp, Artificial
  Synthetic oligonucleotide
ctgatacgctcattgacttaacactcacatcttggttcatgccgctgacaacagactcac

SEQ ID NO: 384519 - DNA, 60 bp, Artificial
  Synthetic oligonucleotide
ctgatacggggacatttgaagaagttgcgacggctgagaaattagtaatcactgatgttg

SEQ ID NO: 384520 - DNA, 59 bp, Artificial
  Synthetic oligonucleotide
ctgatactaaaatactattcattgaagaagggaagatcattcatattagtcccttatcg

SEQ ID NO: 384521 - DNA, 55 bp, Artificial
  Synthetic oligonucleotide
ctgatactcatcccggtgagactctatgtaattgaaggcgttcggaggatttgct

SEQ ID NO: 384522 - DNA, 55 bp, Artificial
  Synthetic oligonucleotide
ctgatactgcgaccactctcgtgactccgggtggtggggctattcgtcctgctgg

SEQ ID NO: 384523 - DNA, 55 bp, Artificial
  Synthetic oligonucleotide
ctgatactttaatagtgatgcttattttatctaattgtgtagcgtggtcacaatg

SEQ ID NO: 384524 - DNA, 55 bp, Artificial
  Synthetic oligonucleotide
ctgatactttgcacatcacagattctcttaatgcggaccacatgggccttgtgcg

SEQ ID NO: 384525 - DNA, 54 bp, Artificial
  Synthetic oligonucleotide
ctgatagaggtttttttattactacattaccaacccgagttagactcgagatta

SEQ ID NO: 384526 - DNA, 59 bp, Artificial
  Synthetic oligonucleotide
ctgatagatctatgctcattagaaggagacgcgttgaacacgtttaaaacaaggaatcg

SEQ ID NO: 384527 - DNA, 60 bp, Artificial
  Synthetic oligonucleotide
ctgatagccgaattagcagctagagcgtcatctttgtgcggcaaacgagtaacgttaacc

SEQ ID NO: 384528 - DNA, 55 bp, Artificial
  Synthetic oligonucleotide
ctgatagcgaagcttgatgccacagtttttgctcagatagttaaattacgcaaag

SEQ ID NO: 384529 - DNA, 60 bp, Artificial
  Synthetic oligonucleotide
ctgatagcggttttttcagtagactgaactggttgtacaaatcaggaagcacatatccag

SEQ ID NO: 384530 - DNA, 60 bp, Artificial
  Synthetic oligonucleotide
ctgatagctgaaatacagaaacagggtaatggccaatggacataccaaatctatcaagaa

SEQ ID NO: 384531 - DNA, 55 bp, Artificial
  Synthetic oligonucleotide
ctgataggaaagccccatgtctatcggaaacacactacggttcaagagagggccc

SEQ ID NO: 384532 - DNA, 60 bp, Artificial
  Synthetic oligonucleotide
ctgataggaatgcttcaaactgttgcggatggtaaggcgcacttcactgagacgattaag

SEQ ID NO: 384533 - DNA, 59 bp, Artificial
  Synthetic oligonucleotide
ctgataggagcaaccactggcactacggccttagtggtaactcagaacctgagagggat

SEQ ID NO: 384534 - DNA, 59 bp, Artificial
  Synthetic oligonucleotide
ctgataggattatagaaataggacaaagaatttgtagaggtatcctcaacatacctaga

SEQ ID NO: 384535 - DNA, 54 bp, Artificial
  Synthetic oligonucleotide
ctgataggttcctgaagtgggccagtttaggggtgttctttggtgggttaggca

SEQ ID NO: 384536 - DNA, 57 bp, Artificial
  Synthetic oligonucleotide
ctgatagtaaagggattattgatcctaaggacggtaatgtatttgcaaatccccaga

SEQ ID NO: 384537 - DNA, 59 bp, Artificial
  Synthetic oligonucleotide
ctgatagtagcgcagtttaccggcgtgagaacactggtttttggaagcactggataaca

SEQ ID NO: 384538 - DNA, 55 bp, Artificial
  Synthetic oligonucleotide
ctgatagtatggcaggtagacaggatgagagttaaggcttggaatagtctggtaa

SEQ ID NO: 384539 - DNA, 60 bp, Artificial
  Synthetic oligonucleotide
ctgatagtgagtggaagggacgaacagtcaattgctgaagcgatcatagtagcaatggtg

SEQ ID NO: 384540 - DNA, 60 bp, Artificial
  Synthetic oligonucleotide
ctgatagtgtctggctgagagcacaagaggaagatgattcgggggtaggctttccagtca

SEQ ID NO: 384541 - DNA, 60 bp, Artificial
  Synthetic oligonucleotide
ctgatagtgtctggctgagcgcacaagaggacgaggaggtaggctttccagtcaggccac

SEQ ID NO: 384542 - DNA, 60 bp, Artificial
  Synthetic oligonucleotide
ctgatagttttgttggagaatcaaaagacattggacgagcatgatgcgaatgtcaggaat

SEQ ID NO: 384543 - DNA, 55 bp, Artificial
  Synthetic oligonucleotide
ctgatataggttatggaaacctaaacttccaaactttacagcaaagtagggctga

SEQ ID NO: 384544 - DNA, 55 bp, Artificial
  Synthetic oligonucleotide
ctgatatcaggaataccaatcttaagctcgatgggatcagaggacaggttgctag

SEQ ID NO: 384545 - DNA, 60 bp, Artificial
  Synthetic oligonucleotide
ctgatatccaggaaatacgacgttcaaagctccacgctgccggctgggctctatgccctg

SEQ ID NO: 384546 - DNA, 60 bp, Artificial
  Synthetic oligonucleotide
ctgatatccgtgcagttaaagtatccgttcattggacatctcagaagcccactgtggacg

SEQ ID NO: 384547 - DNA, 60 bp, Artificial
  Synthetic oligonucleotide
ctgatatgaccaattacacgcatatcccatctgattcatattaccaccaattcattgtca

SEQ ID NO: 384548 - DNA, 60 bp, Artificial
  Synthetic oligonucleotide
ctgatatgactcccagcacagaaatgtcattgagaggagtgagagtcagtaagatgggag

SEQ ID NO: 384549 - DNA, 60 bp, Artificial
  Synthetic oligonucleotide
ctgatatgctgttagagcctctcctaagcggtgatccgaggatgactcaactagcgattc

SEQ ID NO: 384550 - DNA, 56 bp, Artificial
  Synthetic oligonucleotide
ctgatatgggaaagctgctaagcttaaaggatgatctgcttaggtgtggaatttca

SEQ ID NO: 384551 - DNA, 60 bp, Artificial
  Synthetic oligonucleotide
ctgatatgtggcgaaaatactgtcagcagaaactatgccacacactcagacgataccaac

SEQ ID NO: 384552 - DNA, 55 bp, Artificial
  Synthetic oligonucleotide
ctgatatgtgtatgcgagccatcggctttgcctggtgcgcagcagcatgtgactc

SEQ ID NO: 384553 - DNA, 60 bp, Artificial
  Synthetic oligonucleotide
ctgatatgttataatagaccgcggaactcttcatggaatgatgtattggacacaacgtgg

SEQ ID NO: 384554 - DNA, 58 bp, Artificial
  Synthetic oligonucleotide
ctgatattaagactatcaatctacgctagtacattcaataggggcagactgaggatgg

SEQ ID NO: 384555 - DNA, 60 bp, Artificial
  Synthetic oligonucleotide
ctgatattcttcggcttaactgtactcttggagattgtactagagctaattgcaaagagg

SEQ ID NO: 384556 - DNA, 55 bp, Artificial
  Synthetic oligonucleotide
ctgatatttcagacctaatagatgatggagatgctgtacagggaaactcccgcga

SEQ ID NO: 384557 - DNA, 51 bp, Artificial
  Synthetic oligonucleotide
ctgatcaagaagctgtatcaaagcagtaagtttgatggatctcctctcatc

SEQ ID NO: 384558 - DNA, 60 bp, Artificial
  Synthetic oligonucleotide
ctgatcaagagtggggtcaatcaggcctgcaaagcttgggtgcatcatctgtctggggta

SEQ ID NO: 384559 - DNA, 60 bp, Artificial
  Synthetic oligonucleotide
ctgatcaatcatggaacaaacgcctacacagtgtccaactatcttggaacctggtatgac

SEQ ID NO: 384560 - DNA, 56 bp, Artificial
  Synthetic oligonucleotide
ctgatcaatgcttttggctacgacttttcgaagataaaccaatttatagaccaaaa

SEQ ID NO: 384561 - DNA, 60 bp, Artificial
  Synthetic oligonucleotide
ctgatcacaaacttatcgacttgggtcaattgggcattgctacatatggtggcgctggga

SEQ ID NO: 384562 - DNA, 55 bp, Artificial
  Synthetic oligonucleotide
ctgatcacagaaagagccctcggtgagaaattcgcaagcaagggagtccagatcc

SEQ ID NO: 384563 - DNA, 55 bp, Artificial
  Synthetic oligonucleotide
ctgatcacctttgtcaagttgcagggttactatcctagcgaagtcacagtgggcc

SEQ ID NO: 384564 - DNA, 60 bp, Artificial
  Synthetic oligonucleotide
ctgatcaggaactcaggcggggtggacatgatctcttggacctcggcggccacgggagtg

SEQ ID NO: 384565 - DNA, 58 bp, Artificial
  Synthetic oligonucleotide
ctgatcaggctcttcgatcaagcgccggaccaatgttttaaatacccgtgatatttaa

SEQ ID NO: 384566 - DNA, 55 bp, Artificial
  Synthetic oligonucleotide
ctgatcagtgagcctgtctggtgtttccttggtgattaagtgacataggtaggaa

SEQ ID NO: 384567 - DNA, 58 bp, Artificial
  Synthetic oligonucleotide
ctgatcagttccagatagttaataataacttgactctcaagacgactgtgtttgattc

SEQ ID NO: 384568 - DNA, 60 bp, Artificial
  Synthetic oligonucleotide
ctgatcagtttcttatacaggttgacaagagaatcatctatttgggccccatcaccactt

SEQ ID NO: 384569 - DNA, 60 bp, Artificial
  Synthetic oligonucleotide
ctgatcataacaagcaaccgcgagcctcgtgattggtacaagagcgagtttgacctttca

SEQ ID NO: 384570 - DNA, 55 bp, Artificial
  Synthetic oligonucleotide
ctgatcatcggtcaggatgtcaagtgcctgctgggccttacggtcactgaaacca

SEQ ID NO: 384571 - DNA, 60 bp, Artificial
  Synthetic oligonucleotide
ctgatcatgacaccagcagacaagggagagtgtttcaatgaggtgacatggaccaacgtc

SEQ ID NO: 384572 - DNA, 60 bp, Artificial
  Synthetic oligonucleotide
ctgatcatttatcagagcatttactgctttgttgatcagctgtatactcatctgagcctc

SEQ ID NO: 384573 - DNA, 60 bp, Artificial
  Synthetic oligonucleotide
ctgatccaaaacagcataaccatagagagaatggttctctcggcgttcgatgagaggaga

SEQ ID NO: 384574 - DNA, 60 bp, Artificial
  Synthetic oligonucleotide
ctgatccaagacttgaaccgcacaaatgggagaagtactgtatccttgagataggagaca

SEQ ID NO: 384575 - DNA, 51 bp, Artificial
  Synthetic oligonucleotide
ctgatccaagcgctgtgcccagaacaattgcaatcattgaccatttattag

SEQ ID NO: 384576 - DNA, 55 bp, Artificial
  Synthetic oligonucleotide
ctgatccaatcggccctggtgacaggtctgtccgccgcttcaaaccgtccgctac

SEQ ID NO: 384577 - DNA, 60 bp, Artificial
  Synthetic oligonucleotide
ctgatccacacaactcacatcatgtatccgagtgcaccctatggcctcaacaaggacggt

SEQ ID NO: 384578 - DNA, 55 bp, Artificial
  Synthetic oligonucleotide
ctgatccactagcagattatgagattgcacatctagattatctctcctaccaagc

SEQ ID NO: 384579 - DNA, 55 bp, Artificial
  Synthetic oligonucleotide
ctgatccagagataatcggggttagtttccaaaatgcgttgagtcatttggcagc

SEQ ID NO: 384580 - DNA, 60 bp, Artificial
  Synthetic oligonucleotide
ctgatcccaattctagaatagcagaacgacaggaaattgtcgacaataacaattggtcag

SEQ ID NO: 384581 - DNA, 55 bp, Artificial
  Synthetic oligonucleotide
ctgatcccataccctgggatgacagcagccttaggtggggaattaggtgtgtact

SEQ ID NO: 384582 - DNA, 60 bp, Artificial
  Synthetic oligonucleotide
ctgatccgactgcaatggttgaagtttatatcgaagaattaccaggtgggcggcgcaaca

SEQ ID NO: 384583 - DNA, 56 bp, Artificial
  Synthetic oligonucleotide
ctgatccgaggcttgaaccgcacaaatgggaaaagtactgtgtccttgaaataggg

SEQ ID NO: 384584 - DNA, 56 bp, Artificial
  Synthetic oligonucleotide
ctgatccgcaaatctgcaccactggcacgcatcaacgctgggccggaagtcagcgc

SEQ ID NO: 384585 - DNA, 57 bp, Artificial
  Synthetic oligonucleotide
ctgatccgcggtgcgtacccaaaggtccagactgcgagccgtgtcctccgttccctg

SEQ ID NO: 384586 - DNA, 57 bp, Artificial
  Synthetic oligonucleotide
ctgatcctgaaatgtgttcagttcttataaaatgtctgtccaaagctaagaacgaag

SEQ ID NO: 384587 - DNA, 55 bp, Artificial
  Synthetic oligonucleotide
ctgatcctgtattgggacagttacccccgccccttcccagtgcgtccaatcttcc

SEQ ID NO: 384588 - DNA, 55 bp, Artificial
  Synthetic oligonucleotide
ctgatcctgttgcgtttatgggtacctgttgcctatattctatgacgcaatggtc

SEQ ID NO: 384589 - DNA, 59 bp, Artificial
  Synthetic oligonucleotide
ctgatccttcaaccgcttactacgacattcgcgacccttcaaacgtacgtgcatatcac

SEQ ID NO: 384590 - DNA, 60 bp, Artificial
  Synthetic oligonucleotide
ctgatccttcgctgctctgtgagccctgtacgggtaacagcgcaacgttcgaacggactc

SEQ ID NO: 384591 - DNA, 55 bp, Artificial
  Synthetic oligonucleotide
ctgatcgaaccaaatgtacctcgagaattaagaacgtacactatatttggtcaac

SEQ ID NO: 384592 - DNA, 58 bp, Artificial
  Synthetic oligonucleotide
ctgatcgccccttggtatgcatacaaatttgtcagcacaaataataagggagccgttt

SEQ ID NO: 384593 - DNA, 57 bp, Artificial
  Synthetic oligonucleotide
ctgatcgccttggggtccctacttacacctggggggagaatgagtctgatgtcttcc

SEQ ID NO: 384594 - DNA, 55 bp, Artificial
  Synthetic oligonucleotide
ctgatcgctgccctttcctacctgagcctagagatcccaaagatgctgcatcagg

SEQ ID NO: 384595 - DNA, 60 bp, Artificial
  Synthetic oligonucleotide
ctgatcggaaaagtccacgacgcctgcagagattcgttgtccgtcatcctcttgtcgtgg

SEQ ID NO: 384596 - DNA, 51 bp, Artificial
  Synthetic oligonucleotide
ctgatctaattcagagtttgatttctccctgtcctgcctttttagtgctgt

SEQ ID NO: 384597 - DNA, 60 bp, Artificial
  Synthetic oligonucleotide
ctgatctacccccaccaatggatcaacctcaggaccaataactgtgctaccatagtagtg

SEQ ID NO: 384598 - DNA, 55 bp, Artificial
  Synthetic oligonucleotide
ctgatctatacctacttgacaccgttctttcggatcctaatgtgatacatggaac

SEQ ID NO: 384599 - DNA, 57 bp, Artificial
  Synthetic oligonucleotide
ctgatctatagctacacctagctcaaaggttagcctttccatgggtaggtttacatt

SEQ ID NO: 384600 - DNA, 60 bp, Artificial
  Synthetic oligonucleotide
ctgatctatcgtacacagtcggatatttgtgtgctggcattcccactgacactcctaggg

SEQ ID NO: 384601 - DNA, 55 bp, Artificial
  Synthetic oligonucleotide
ctgatctgaaagtttctccagatcagccatgttcgggtacttcactgtgtagagc

SEQ ID NO: 384602 - DNA, 60 bp, Artificial
  Synthetic oligonucleotide
ctgatctggtgaatgctactaatacggggaatgctactaataccactagtagtagctggg

SEQ ID NO: 384603 - DNA, 55 bp, Artificial
  Synthetic oligonucleotide
ctgatctgtcttcatccaactcagcgaaaccaacaaccttttattcgtcttctgg

SEQ ID NO: 384604 - DNA, 52 bp, Artificial
  Synthetic oligonucleotide
ctgatctgttgcgtttcgaatctaaaaatggtaagaacgtatcgttttgtcc

SEQ ID NO: 384605 - DNA, 60 bp, Artificial
  Synthetic oligonucleotide
ctgatcttatagcaaaaattccagactcagggcatatgataccggttctgaacaccggga

SEQ ID NO: 384606 - DNA, 58 bp, Artificial
  Synthetic oligonucleotide
ctgatcttcgcgttacagatacttcagatgagttttatactttaagttcgatgttaac

SEQ ID NO: 384607 - DNA, 60 bp, Artificial
  Synthetic oligonucleotide
ctgatcttgccaccgagctagccatctcattgtcccagaactgcaaagaagacacctatg

SEQ ID NO: 384608 - DNA, 60 bp, Artificial
  Synthetic oligonucleotide
ctgatgaaaatgtgctatccatagtctatttgctaataggatatctaagatatttaatag

SEQ ID NO: 384609 - DNA, 60 bp, Artificial
  Synthetic oligonucleotide
ctgatgaaagagttccggctagcattagagcggggcgtataaggctaagatttccgctga

SEQ ID NO: 384610 - DNA, 55 bp, Artificial
  Synthetic oligonucleotide
ctgatgaacatggatcagatagaacgcgcatcagatcaaactgcgcaaggagtta

SEQ ID NO: 384611 - DNA, 55 bp, Artificial
  Synthetic oligonucleotide
ctgatgaaccccgcaactatgaaggaggccactggaagtaacagctttggtccgc

SEQ ID NO: 384612 - DNA, 55 bp, Artificial
  Synthetic oligonucleotide
ctgatgaatgccgaaagcttacattaatatgtcgtgcgatggcacgaaaacacgc

SEQ ID NO: 384613 - DNA, 57 bp, Artificial
  Synthetic oligonucleotide
ctgatgaattggggctggccaatatgactgagggaaggtccaaaaaaccgaagacat

SEQ ID NO: 384614 - DNA, 50 bp, Artificial
  Synthetic oligonucleotide
ctgatgacacagcgctatctacaagggactttccgctggggactttccaa

SEQ ID NO: 384615 - DNA, 55 bp, Artificial
  Synthetic oligonucleotide
ctgatgacaccgagctttagactgctgacactgagctttctacaagggactttcc

SEQ ID NO: 384616 - DNA, 55 bp, Artificial
  Synthetic oligonucleotide
ctgatgacggaattttcgaaactctaccagtgagctctttaaactgccagcgggc

SEQ ID NO: 384617 - DNA, 55 bp, Artificial
  Synthetic oligonucleotide
ctgatgacggccacaccgccagggaccagtgatgaattcccacattcaaatggtg

SEQ ID NO: 384618 - DNA, 59 bp, Artificial
  Synthetic oligonucleotide
ctgatgacttcaacaagagggcactgcatgatcgggagagtgtcgcagcttcaatacaa

SEQ ID NO: 384619 - DNA, 60 bp, Artificial
  Synthetic oligonucleotide
ctgatgagagttccaacaaccttacctccttcgatgcaagagcactggacatgacgagcg

SEQ ID NO: 384620 - DNA, 60 bp, Artificial
  Synthetic oligonucleotide
ctgatgagctcttctgtcccgttgaagtcgaatggtagaaccatatgggcgtatgtgtat

SEQ ID NO: 384621 - DNA, 55 bp, Artificial
  Synthetic oligonucleotide
ctgatgaggagtacgttggttacttcgaacagtatctctgtcgagctatagagcc

SEQ ID NO: 384622 - DNA, 60 bp, Artificial
  Synthetic oligonucleotide
ctgatgaggcaaacaaatggatttcaatgggctcatcttgtactataaaggtatgtccac

SEQ ID NO: 384623 - DNA, 60 bp, Artificial
  Synthetic oligonucleotide
ctgatgaggccgccttccaccaagctactgtcagagacttggtgaccatgggaggcgtcg

SEQ ID NO: 384624 - DNA, 55 bp, Artificial
  Synthetic oligonucleotide
ctgatgaggttagtgaaatcggagctaggaaaacagcgaacgttacagttaatcc

SEQ ID NO: 384625 - DNA, 60 bp, Artificial
  Synthetic oligonucleotide
ctgatgatacaacagccattgctggagagtgtatacgcatcacatttatcgatgatgaag

SEQ ID NO: 384626 - DNA, 55 bp, Artificial
  Synthetic oligonucleotide
ctgatgatattcagctacaaccaagactactcgttaagtaatgaatcctcattgg

SEQ ID NO: 384627 - DNA, 57 bp, Artificial
  Synthetic oligonucleotide
ctgatgatctaccttcccttactgagttattttgcgacgaaacgctgcccccatccc

SEQ ID NO: 384628 - DNA, 51 bp, Artificial
  Synthetic oligonucleotide
ctgatgatctgagtgaaggttctactaacgtttattatactgatgctcgcg

SEQ ID NO: 384629 - DNA, 60 bp, Artificial
  Synthetic oligonucleotide
ctgatgatgcaaattccctatggttcattgacttatgatatagggggaaattttgcagcc

SEQ ID NO: 384630 - DNA, 50 bp, Artificial
  Synthetic oligonucleotide
ctgatgatggtgcactgcatggtatacttgtggcatttattgcggtgctt

SEQ ID NO: 384631 - DNA, 55 bp, Artificial
  Synthetic oligonucleotide
ctgatgatggtgtcgtatgctataatagtgattacgccactaagggctatatcgc

SEQ ID NO: 384632 - DNA, 60 bp, Artificial
  Synthetic oligonucleotide
ctgatgatgtgggaacggcagttatatcagactttaagatgcccacgaagtatcatttgg

SEQ ID NO: 384633 - DNA, 60 bp, Artificial
  Synthetic oligonucleotide
ctgatgatgtgttacaacagtggtatccgaggtaaagcagttgtcgacgcctatacagct

SEQ ID NO: 384634 - DNA, 60 bp, Artificial
  Synthetic oligonucleotide
ctgatgattatcatatggatttggtcctcgatatttctagtggtatatcacgtcctagcg

SEQ ID NO: 384635 - DNA, 60 bp, Artificial
  Synthetic oligonucleotide
ctgatgatttcgccctcatagtgaatgcaccagatcatgaggggatacaagctggggtag

SEQ ID NO: 384636 - DNA, 58 bp, Artificial
  Synthetic oligonucleotide
ctgatgatttgaagaatagtactaataccagtagtactaataccactagctggggagg

SEQ ID NO: 384637 - DNA, 60 bp, Artificial
  Synthetic oligonucleotide
ctgatgcaacgacaagctgaggtattacacaacttaatcagtcaaagcaataaccatgat

SEQ ID NO: 384638 - DNA, 60 bp, Artificial
  Synthetic oligonucleotide
ctgatgcaatgctggcaacacatgttatctgggatataggtttacaatcaacatgcaaac

SEQ ID NO: 384639 - DNA, 55 bp, Artificial
  Synthetic oligonucleotide
ctgatgcagatgatcattgttaggatgcctcttgttaaaccactagggagaagca

SEQ ID NO: 384640 - DNA, 53 bp, Artificial
  Synthetic oligonucleotide
ctgatgcagctagaagacaagagatattacaagctaaatcatactattataac

SEQ ID NO: 384641 - DNA, 55 bp, Artificial
  Synthetic oligonucleotide
ctgatgcagtcgattccagaagcattgaacatggctttcaatgttgctttagtga

SEQ ID NO: 384642 - DNA, 60 bp, Artificial
  Synthetic oligonucleotide
ctgatgcatctttagtctgttgttctaattctggagctggacatgttaatgggttccttg

SEQ ID NO: 384643 - DNA, 60 bp, Artificial
  Synthetic oligonucleotide
ctgatgccaaagacttcactaagaaggttagagacatcatagtgccagatctaggcgagt

SEQ ID NO: 384644 - DNA, 55 bp, Artificial
  Synthetic oligonucleotide
ctgatgccatagtctcggatgccgcagaggtttagagacttgtcctctattgtct

SEQ ID NO: 384645 - DNA, 55 bp, Artificial
  Synthetic oligonucleotide
ctgatgcctgttaccatagatgaagatagagatcctaatcatccatgccaagccc

SEQ ID NO: 384646 - DNA, 55 bp, Artificial
  Synthetic oligonucleotide
ctgatgcggagtcaacggtttcgaattattctactgacgtttccaatgccttacc

SEQ ID NO: 384647 - DNA, 53 bp, Artificial
  Synthetic oligonucleotide
ctgatgcgtcttcaaaagtagtgtgcgatatgatgcagggctcagatgacagt

SEQ ID NO: 384648 - DNA, 60 bp, Artificial
  Synthetic oligonucleotide
ctgatgcgtggtatttctattacactggaacaggaccagccgctgacctgaattggggtg

SEQ ID NO: 384649 - DNA, 60 bp, Artificial
  Synthetic oligonucleotide
ctgatgctaacttgaatggtactaatgtcactagtagtagcgggggaacaatgatggaga

SEQ ID NO: 384650 - DNA, 58 bp, Artificial
  Synthetic oligonucleotide
ctgatgctaataccactagtagtactaataccactaatggtactaatcccactattag

SEQ ID NO: 384651 - DNA, 55 bp, Artificial
  Synthetic oligonucleotide
ctgatgctaatgccattgacaaaccatcacatccggatacttcatcagacagatt

SEQ ID NO: 384652 - DNA, 60 bp, Artificial
  Synthetic oligonucleotide
ctgatgctagcgaggtgatgtgtgtatgcagagacaactggcatggttcaaatcgaccat

SEQ ID NO: 384653 - DNA, 55 bp, Artificial
  Synthetic oligonucleotide
ctgatgctcaggagaggaagtgccactacaggaagtataactgccgggactctgg

SEQ ID NO: 384654 - DNA, 57 bp, Artificial
  Synthetic oligonucleotide
ctgatgctcttccttctttggctcaatacctcatggctggaacgttggatgccgtct

SEQ ID NO: 384655 - DNA, 60 bp, Artificial
  Synthetic oligonucleotide
ctgatgctgtgcgcacaagtttgggtatcacaactgatgaggcatggatcgatgccctca

SEQ ID NO: 384656 - DNA, 55 bp, Artificial
  Synthetic oligonucleotide
ctgatgcttggaccttacggtataatacgaccggacaacgcgtgcgtccattggc

SEQ ID NO: 384657 - DNA, 60 bp, Artificial
  Synthetic oligonucleotide
ctgatgctttagcgtcatgcccttgcctgctacgctacactaacgtcttcaggggcacca

SEQ ID NO: 384658 - DNA, 50 bp, Artificial
  Synthetic oligonucleotide
ctgatggaaccttcaagcttgacgcccaagggaaaaggatcccaaagaag

SEQ ID NO: 384659 - DNA, 55 bp, Artificial
  Synthetic oligonucleotide
ctgatggaagctctaatgcagctgtcgcgacaacaatttccaaccatgccagttg

SEQ ID NO: 384660 - DNA, 60 bp, Artificial
  Synthetic oligonucleotide
ctgatggacaggaggatgatggggaacgtttcagaatattaagtgactgtcacgtctgtc

SEQ ID NO: 384661 - DNA, 51 bp, Artificial
  Synthetic oligonucleotide
ctgatggacataatatcaccaggggtggccttttacaattatttacacagg

SEQ ID NO: 384662 - DNA, 50 bp, Artificial
  Synthetic oligonucleotide
ctgatggagagatgtcattggagcggaggcttgatagtctccgagaattc

SEQ ID NO: 384663 - DNA, 59 bp, Artificial
  Synthetic oligonucleotide
ctgatggattatgttttcgcgaaatcaatgttggatgcacctcctccaccccgaaaatg

SEQ ID NO: 384664 - DNA, 58 bp, Artificial
  Synthetic oligonucleotide
ctgatggccgtaatgcaacgaaggcggtacaatcccactttccattcctttcacgtgc

SEQ ID NO: 384665 - DNA, 55 bp, Artificial
  Synthetic oligonucleotide
ctgatggcctcgaggctgcatatatattaacaagtataccagcattaggaggaac

SEQ ID NO: 384666 - DNA, 55 bp, Artificial
  Synthetic oligonucleotide
ctgatggcctcgcaaatcttaacactgtcacttgggttaagaccattggaagtac

SEQ ID NO: 384667 - DNA, 60 bp, Artificial
  Synthetic oligonucleotide
ctgatggcgtgcattaccatgaacatgcaacatgtacaaactctaactactgaaaagttg

SEQ ID NO: 384668 - DNA, 60 bp, Artificial
  Synthetic oligonucleotide
ctgatggctcaccgagggattcagcggtatgattgcatcacaccacttcatccctataga

SEQ ID NO: 384669 - DNA, 55 bp, Artificial
  Synthetic oligonucleotide
ctgatggctcattgactaacgatttctgggttcctgagacccaagtgtacataga

SEQ ID NO: 384670 - DNA, 60 bp, Artificial
  Synthetic oligonucleotide
ctgatggctcggccatcaaaagtcctgatcctacaaaaagcaataatgctggcatgggaa

SEQ ID NO: 384671 - DNA, 56 bp, Artificial
  Synthetic oligonucleotide
ctgatgggatggtgggtaacccgcagggtcaggccgcattattgagaccgggggaa

SEQ ID NO: 384672 - DNA, 60 bp, Artificial
  Synthetic oligonucleotide
ctgatgggcaacgcattgaggttcctaaagtatcaggcaatcaatatagggcctttagaa

SEQ ID NO: 384673 - DNA, 56 bp, Artificial
  Synthetic oligonucleotide
ctgatgggtctaacttatcgacgcagtggcctagtacacgatcaccaggggttgtt

SEQ ID NO: 384674 - DNA, 58 bp, Artificial
  Synthetic oligonucleotide
ctgatggtaggactaccggcgggcaaacaattgcccaggaagctgatcctattaacca

SEQ ID NO: 384675 - DNA, 60 bp, Artificial
  Synthetic oligonucleotide
ctgatggtatccagttcatgaccaatagacttaggtctcttggatggcttgagactcagt

SEQ ID NO: 384676 - DNA, 55 bp, Artificial
  Synthetic oligonucleotide
ctgatggtatctgcttcaggcctacattgtcgaaatcagttgaagatccaagact

SEQ ID NO: 384677 - DNA, 60 bp, Artificial
  Synthetic oligonucleotide
ctgatggtcctgtgaactacgatggtgcgactgtgacgccccccacgtcttggttgacag

SEQ ID NO: 384678 - DNA, 58 bp, Artificial
  Synthetic oligonucleotide
ctgatggttcaaacatatcaacacagtggcctagtagaaggaatgaaggcgttgttca

SEQ ID NO: 384679 - DNA, 60 bp, Artificial
  Synthetic oligonucleotide
ctgatggtttgtcaataatatcaggagcaggtagagaagataggactcaagactttgttc

SEQ ID NO: 384680 - DNA, 60 bp, Artificial
  Synthetic oligonucleotide
ctgatggttttgactcactacatggttcagcttccgttagaacgttcctcactgatgcat

SEQ ID NO: 384681 - DNA, 60 bp, Artificial
  Synthetic oligonucleotide
ctgatgtacgagagcgtgtgtcgactctccaaactgctgataataatcgacgagtgagag

SEQ ID NO: 384682 - DNA, 55 bp, Artificial
  Synthetic oligonucleotide
ctgatgtcaaacccgtcgtttccgacactctcaatgtcgacagacctgttcctgc

SEQ ID NO: 384683 - DNA, 55 bp, Artificial
  Synthetic oligonucleotide
ctgatgtcaagcctgttgttagcgacacactgaacattgacagaccggttccagc

SEQ ID NO: 384684 - DNA, 60 bp, Artificial
  Synthetic oligonucleotide
ctgatgtgacgtctgcggtatgggcgggcatatctacgtcgaatctgaaagtggcgcatg

SEQ ID NO: 384685 - DNA, 59 bp, Artificial
  Synthetic oligonucleotide
ctgatgtggatggcatggcctggtttaccccagtaggtcttgctgttgataccccttgg

SEQ ID NO: 384686 - DNA, 56 bp, Artificial
  Synthetic oligonucleotide
ctgatgtggtttccgggtttgatatcccgaagatcccgtccatagctcccaaagtg

SEQ ID NO: 384687 - DNA, 60 bp, Artificial
  Synthetic oligonucleotide
ctgatgtgtatgccgtcaaacaatttgtcacagcgcagaccaacaacaagcaccaggtta

SEQ ID NO: 384688 - DNA, 55 bp, Artificial
  Synthetic oligonucleotide
ctgatgtgtccctggatgcaccagtggctgaatcgcctgtgcaccctggagtgcc

SEQ ID NO: 384689 - DNA, 60 bp, Artificial
  Synthetic oligonucleotide
ctgatgtgtccgaggcataatgaattgggtgctctctaaaatctgaggaatggggatctt

SEQ ID NO: 384690 - DNA, 55 bp, Artificial
  Synthetic oligonucleotide
ctgatgtgttggtaaccattgcttgctctaactgtctgatgtatgatactaactc

SEQ ID NO: 384691 - DNA, 60 bp, Artificial
  Synthetic oligonucleotide
ctgatgttcatcactactcttggcataatctatatgatttataagctctttgcacaaact

SEQ ID NO: 384692 - DNA, 60 bp, Artificial
  Synthetic oligonucleotide
ctgatgttgggagactgatcttctctggtgaggcccttacctacaaggacattgtagtgt

SEQ ID NO: 384693 - DNA, 55 bp, Artificial
  Synthetic oligonucleotide
ctgatgttgtcgatggagtcaatcataaattagacgtaacgacgagtacgtgtac

SEQ ID NO: 384694 - DNA, 55 bp, Artificial
  Synthetic oligonucleotide
ctgatgtttccgctacaaagttcacgaagtttgaaggagggagtgttggattcag

SEQ ID NO: 384695 - DNA, 55 bp, Artificial
  Synthetic oligonucleotide
ctgatgtttcgcaatgggattcatcacaacacaatacacaaccattccgaaaagg

SEQ ID NO: 384696 - DNA, 55 bp, Artificial
  Synthetic oligonucleotide
ctgatgttttcagattgaagtaatattcaacatcaggttcccgtagaagagggag

SEQ ID NO: 384697 - DNA, 60 bp, Artificial
  Synthetic oligonucleotide
ctgattaaaatacgtattcatacattagctattgtccctatatcatatccttctgctacg

SEQ ID NO: 384698 - DNA, 60 bp, Artificial
  Synthetic oligonucleotide
ctgattaatactgctccacagaactgtctaaagaaaggaggttatgatgtgtctgtatgg

SEQ ID NO: 384699 - DNA, 58 bp, Artificial
  Synthetic oligonucleotide
ctgattaatggttatcaattcgttgatttacgtcccggacatccagattgcgctaccg

SEQ ID NO: 384700 - DNA, 55 bp, Artificial
  Synthetic oligonucleotide
ctgattacacttctggttgcccaaacttatgatgtgtttgttaatgccctgagtc

SEQ ID NO: 384701 - DNA, 58 bp, Artificial
  Synthetic oligonucleotide
ctgattacccttccgttcgacataaagcgctgcgagagccttgggatagggtctgtac

SEQ ID NO: 384702 - DNA, 55 bp, Artificial
  Synthetic oligonucleotide
ctgattacgaccggttcgaccttggaaagttcttccctgacagactccaacgtga

SEQ ID NO: 384703 - DNA, 60 bp, Artificial
  Synthetic oligonucleotide
ctgattagaggcatgggaccaattgatatcttttcttgctgcatcatatcaatgctacat

SEQ ID NO: 384704 - DNA, 54 bp, Artificial
  Synthetic oligonucleotide
ctgattatatagtggcattgtatgctttatccaatgacttcaattcaagacaag

SEQ ID NO: 384705 - DNA, 51 bp, Artificial
  Synthetic oligonucleotide
ctgattatcgatgatccggttaaacctgatgacgcctattccgaaacggtt

SEQ ID NO: 384706 - DNA, 58 bp, Artificial
  Synthetic oligonucleotide
ctgattatgggaatgatactaacaccaataatagtagtgctactaaccccactagtag

SEQ ID NO: 384707 - DNA, 60 bp, Artificial
  Synthetic oligonucleotide
ctgattatgtcaagaatgttactaatgccactagtactaatgccactagtagcgagggag

SEQ ID NO: 384708 - DNA, 55 bp, Artificial
  Synthetic oligonucleotide
ctgattattcccataattggatcagtgaattcctaaatacctacttggaccaggt

SEQ ID NO: 384709 - DNA, 56 bp, Artificial
  Synthetic oligonucleotide
ctgattatttaatagttctggatttctcacgtcccagacccttacgataccatccc

SEQ ID NO: 384710 - DNA, 55 bp, Artificial
  Synthetic oligonucleotide
ctgattcaacaggtagacctcagacacgagaaagagcaaatatagacttagacag

SEQ ID NO: 384711 - DNA, 59 bp, Artificial
  Synthetic oligonucleotide
ctgattcaacagttttgggatcctatgaaagcggtgaatcagttgaaaatagttcagat

SEQ ID NO: 384712 - DNA, 60 bp, Artificial
  Synthetic oligonucleotide
ctgattcaagttggatagaactcgatgaaataggggaggatgttgccccaatcgaacaca

SEQ ID NO: 384713 - DNA, 60 bp, Artificial
  Synthetic oligonucleotide
ctgattcagaggatggctgtggaacttttccagacaattttgagtgaaggggaagatgca

SEQ ID NO: 384714 - DNA, 55 bp, Artificial
  Synthetic oligonucleotide
ctgattcctgttgaccaacacacaaactttatggatcacatcgtcagactagccg

SEQ ID NO: 384715 - DNA, 59 bp, Artificial
  Synthetic oligonucleotide
ctgattcgactttaatggttggggatgttatgcgtcatgagtataatatattcggtttg

SEQ ID NO: 384716 - DNA, 60 bp, Artificial
  Synthetic oligonucleotide
ctgattctgacacaccatctaccacacatgggcatgatgccaagggttattttaagtggt

SEQ ID NO: 384717 - DNA, 55 bp, Artificial
  Synthetic oligonucleotide
ctgattctgaggaaatctttgattctctgaatatgaaggcagcagttggagcaca

SEQ ID NO: 384718 - DNA, 60 bp, Artificial
  Synthetic oligonucleotide
ctgattcttcttggagtctaactggctgggcaagtggtctgatctcatggttgggaggtt

SEQ ID NO: 384719 - DNA, 54 bp, Artificial
  Synthetic oligonucleotide
ctgattcttgaacttatcagatactgccatggatctgatatgttgaaagagtac

SEQ ID NO: 384720 - DNA, 57 bp, Artificial
  Synthetic oligonucleotide
ctgattgaacaaatggaagccttcattgaaccacggcctagcgtgtttaaatgcttt

SEQ ID NO: 384721 - DNA, 54 bp, Artificial
  Synthetic oligonucleotide
ctgattgacatggaaaacggggacataaattactcgaagaaaaggcttccttta

SEQ ID NO: 384722 - DNA, 55 bp, Artificial
  Synthetic oligonucleotide
ctgattgaggcctctagcttgaatgattcagtggccatgagaatggcgttcggga

SEQ ID NO: 384723 - DNA, 55 bp, Artificial
  Synthetic oligonucleotide
ctgattgatatcatagactcccacaccacactggagacatctgatgcatacctcc

SEQ ID NO: 384724 - DNA, 60 bp, Artificial
  Synthetic oligonucleotide
ctgattgcaaagtacaagcccactttgctatatctattcatggaggttatgatatgggct

SEQ ID NO: 384725 - DNA, 55 bp, Artificial
  Synthetic oligonucleotide
ctgattgcacgcaagacatgtggatccacggaacaacaactaagcatagttgctc

SEQ ID NO: 384726 - DNA, 60 bp, Artificial
  Synthetic oligonucleotide
ctgattgcagcgatgttgagtcagcgaactatgtcgttagactttgtgactaccaactac

SEQ ID NO: 384727 - DNA, 60 bp, Artificial
  Synthetic oligonucleotide
ctgattgccccacaatggggcaactgatctccttcattggggagatcccatcaattatcc

SEQ ID NO: 384728 - DNA, 60 bp, Artificial
  Synthetic oligonucleotide
ctgattgcgatattctagtaccacatgatctatcttcatgcatttattcctcaactggct

SEQ ID NO: 384729 - DNA, 54 bp, Artificial
  Synthetic oligonucleotide
ctgattgctggaggtttaatcctgggcatgcaaaatggatcttgtagatgcatg

SEQ ID NO: 384730 - DNA, 54 bp, Artificial
  Synthetic oligonucleotide
ctgattggaaggcctttaggttgatcaactaggggtgcctagaggagctcgctg

SEQ ID NO: 384731 - DNA, 60 bp, Artificial
  Synthetic oligonucleotide
ctgattggagttcgatcggagccctttgtgatagaaaatcctgcatcttatttgttgatt

SEQ ID NO: 384732 - DNA, 57 bp, Artificial
  Synthetic oligonucleotide
ctgattgggcaaggagacgtagtgttggtaatgaaacggaaacgggactcaagcata

SEQ ID NO: 384733 - DNA, 55 bp, Artificial
  Synthetic oligonucleotide
ctgattgggctgttcctgcagtagtagacatttcccctaccccagacgttgttat

SEQ ID NO: 384734 - DNA, 54 bp, Artificial
  Synthetic oligonucleotide
ctgattgggtcgggcgggtaatcaaatacacaatagctggggtaggtaagttta

SEQ ID NO: 384735 - DNA, 52 bp, Artificial
  Synthetic oligonucleotide
ctgattgggtggagaagaatactaccactgctactcctcccactttgaagct

SEQ ID NO: 384736 - DNA, 60 bp, Artificial
  Synthetic oligonucleotide
ctgattgtagctgtcttttccataattactaatgcgcagaactacggcatgaatttacca

SEQ ID NO: 384737 - DNA, 55 bp, Artificial
  Synthetic oligonucleotide
ctgattgtatgctgccacctccagaccttacatcgtgcggggacgttgagagtaa

SEQ ID NO: 384738 - DNA, 58 bp, Artificial
  Synthetic oligonucleotide
ctgattgtgtcaggccggtacccgtgtgtgagattaaaccgtttatcgatgtgcgact

SEQ ID NO: 384739 - DNA, 60 bp, Artificial
  Synthetic oligonucleotide
ctgatttaaatcataatctgcgtactacttgctatagagtagatcttggatacaaagttc

SEQ ID NO: 384740 - DNA, 56 bp, Artificial
  Synthetic oligonucleotide
ctgatttagaagcgcgtcgtttcctccaaacgctagtatttagaattcatggtagt

SEQ ID NO: 384741 - DNA, 57 bp, Artificial
  Synthetic oligonucleotide
ctgatttagacccagaggaaccgttaataacagaaagcttagaattgcaattggata

SEQ ID NO: 384742 - DNA, 60 bp, Artificial
  Synthetic oligonucleotide
ctgatttaggtgccccattggaactgcgagactgcaagattgaggcagtaatctatggga

SEQ ID NO: 384743 - DNA, 55 bp, Artificial
  Synthetic oligonucleotide
ctgatttcactgggcgacaatctccctgacagccgggaagacttggccggtggaa

SEQ ID NO: 384744 - DNA, 60 bp, Artificial
  Synthetic oligonucleotide
ctgatttcggcgccctgtggaaacgagccaagcgtgcagcctcgctgttcgtctcaaatc

SEQ ID NO: 384745 - DNA, 57 bp, Artificial
  Synthetic oligonucleotide
ctgatttcgtaactgagcaattctcgcttgctgggctaaccaatctgtaccttgggt

SEQ ID NO: 384746 - DNA, 55 bp, Artificial
  Synthetic oligonucleotide
ctgatttctccagcactgtactccaggactccggagcactcaaaagaaggtttcc

SEQ ID NO: 384747 - DNA, 56 bp, Artificial
  Synthetic oligonucleotide
ctgatttgaatttggggaatgctactagtaacagtactagtaacagtaataagaca

SEQ ID NO: 384748 - DNA, 60 bp, Artificial
  Synthetic oligonucleotide
ctgatttgtatcaccgggtagcgcctgagggcaataggcacgaagcgaagatttctcgac

SEQ ID NO: 384749 - DNA, 60 bp, Artificial
  Synthetic oligonucleotide
ctgatttgttagtgaccgatggacctgacaggacgtcaataagtacactgtatgatggaa

SEQ ID NO: 384750 - DNA, 55 bp, Artificial
  Synthetic oligonucleotide
ctgattttatggacattattcgtttacatagacctgctttaacatccaggcgtgg

SEQ ID NO: 384751 - DNA, 58 bp, Artificial
  Synthetic oligonucleotide
ctgcaaaagcagcatcgtactacgaagctgcaacatacctctggaatgagcaacaacc

SEQ ID NO: 384752 - DNA, 54 bp, Artificial
  Synthetic oligonucleotide
ctgcaaaaggccaccagacgcccatgctgtgcgtggcgcgcgagtttaactgtt

SEQ ID NO: 384753 - DNA, 56 bp, Artificial
  Synthetic oligonucleotide
ctgcaaaagtagactttctctctcctaaaactcatcggaactccgattccggcact

SEQ ID NO: 384754 - DNA, 55 bp, Artificial
  Synthetic oligonucleotide
ctgcaaacactactcttaaattgttgttagcctacacaccccctggaatacgtaa

SEQ ID NO: 384755 - DNA, 56 bp, Artificial
  Synthetic oligonucleotide
ctgcaaaccataaattgcaagaagtagttgtacaagttccgaataggattctagag

SEQ ID NO: 384756 - DNA, 54 bp, Artificial
  Synthetic oligonucleotide
ctgcaaaccctaatgaatttgataatcgtcgggaacgaaagggcttgtaattgg

SEQ ID NO: 384757 - DNA, 59 bp, Artificial
  Synthetic oligonucleotide
ctgcaaacggttcttgtgacccatccgttactcgccaggcatatgctgacgtgactttt

SEQ ID NO: 384758 - DNA, 59 bp, Artificial
  Synthetic oligonucleotide
ctgcaaactgatgttcatgctatacccagaacaattgcaatcatagacaaactgattga

SEQ ID NO: 384759 - DNA, 55 bp, Artificial
  Synthetic oligonucleotide
ctgcaaactttgttgcgtctcctagagtagcaaattgttgacgttggatattgtc

SEQ ID NO: 384760 - DNA, 60 bp, Artificial
  Synthetic oligonucleotide
ctgcaaagagtgcagaaagtgtgaacacggaaaactgcgacacaccaaaaaggagtgcga

SEQ ID NO: 384761 - DNA, 57 bp, Artificial
  Synthetic oligonucleotide
ctgcaaagcactggggccagccaaaggtaagaccgtggaaaagttgagacaacttga

SEQ ID NO: 384762 - DNA, 55 bp, Artificial
  Synthetic oligonucleotide
ctgcaaagcctccagaagagaggaaaacggcggtcgaccacagactggacaggga

SEQ ID NO: 384763 - DNA, 55 bp, Artificial
  Synthetic oligonucleotide
ctgcaaagctcttttctgttaaaacaatcctcaacattttggattaaaacacaag

SEQ ID NO: 384764 - DNA, 55 bp, Artificial
  Synthetic oligonucleotide
ctgcaaaggcctgccaaccttaggctgaaacagtgactaggccgaggaattgcga

SEQ ID NO: 384765 - DNA, 58 bp, Artificial
  Synthetic oligonucleotide
ctgcaaagtacgtgtattggatattaagcttcgtgggattcggtcgcagtaatgacct

SEQ ID NO: 384766 - DNA, 56 bp, Artificial
  Synthetic oligonucleotide
ctgcaaatcgacaagactttactcaagaccccggcaagttcacagaaccagtaaag

SEQ ID NO: 384767 - DNA, 55 bp, Artificial
  Synthetic oligonucleotide
ctgcaaatgttgttggtttgccgacacaaacttgattacatgtaacgaccactac

SEQ ID NO: 384768 - DNA, 54 bp, Artificial
  Synthetic oligonucleotide
ctgcaacaaacaggttatcgtgccctaaactacacacccttttcggtcgcaccc

SEQ ID NO: 384769 - DNA, 55 bp, Artificial
  Synthetic oligonucleotide
ctgcaacaagtttactacggatgagccagtgctacatggcaaggtcgggcagggc

SEQ ID NO: 384770 - DNA, 50 bp, Artificial
  Synthetic oligonucleotide
ctgcaacagctattgcttattcatttcagaattgggtaccagcatagcag

SEQ ID NO: 384771 - DNA, 60 bp, Artificial
  Synthetic oligonucleotide
ctgcaacattgggctttggtgcctacatgtccaaggcccacgggattgatcctaacatca

SEQ ID NO: 384772 - DNA, 55 bp, Artificial
  Synthetic oligonucleotide
ctgcaaccaagactggagtttccttcagtgaagttgtaggtcgctgatcaaaggt

SEQ ID NO: 384773 - DNA, 55 bp, Artificial
  Synthetic oligonucleotide
ctgcaaccaatgggagcggcgaatcatcaaatttaatgggtctgatcaccacgag

SEQ ID NO: 384774 - DNA, 55 bp, Artificial
  Synthetic oligonucleotide
ctgcaaccatgggagcgagaaagcaaagttccactgattaagcgtgcaactaggc

SEQ ID NO: 384775 - DNA, 59 bp, Artificial
  Synthetic oligonucleotide
ctgcaacccccagctccttagcgagacccaggtcatcggtaccttcgagctgcaaggtc

SEQ ID NO: 384776 - DNA, 54 bp, Artificial
  Synthetic oligonucleotide
ctgcaacccgcagaccccctttgtggcgccccatttcacgcggaacatgttcaa

SEQ ID NO: 384777 - DNA, 60 bp, Artificial
  Synthetic oligonucleotide
ctgcaacgatgcaaacttcaacgtcatgtgcgtcgccagccattgcagtactgacagcct

SEQ ID NO: 384778 - DNA, 56 bp, Artificial
  Synthetic oligonucleotide
ctgcaacggatgcacggacaccgttacgtgtcgtaacgtttcgtgacacgtaacga

SEQ ID NO: 384779 - DNA, 60 bp, Artificial
  Synthetic oligonucleotide
ctgcaactataacacctcaagctcctacgtcggaaatacagctgaccgactacggagctc

SEQ ID NO: 384780 - DNA, 57 bp, Artificial
  Synthetic oligonucleotide
ctgcaactgattacctgataggaaaagaccctgtcctggatataactaagaacaggg

SEQ ID NO: 384781 - DNA, 55 bp, Artificial
  Synthetic oligonucleotide
ctgcaactgcagaggttacagagcagatgggacgagaattggagctactaacgcc

SEQ ID NO: 384782 - DNA, 59 bp, Artificial
  Synthetic oligonucleotide
ctgcaactgctgcacatccttgggcgacgtcgtgcgaccagtcgggatgtcgatgagga

SEQ ID NO: 384783 - DNA, 55 bp, Artificial
  Synthetic oligonucleotide
ctgcaactgggctctagtaagtgttatgttggactcagcccgggaagcaccgatc

SEQ ID NO: 384784 - DNA, 55 bp, Artificial
  Synthetic oligonucleotide
ctgcaacttagactaagagaaaatgggcgacaatgtgagaaggcactgagagcct

SEQ ID NO: 384785 - DNA, 60 bp, Artificial
  Synthetic oligonucleotide
ctgcaagaataacgcaggcgctgctaggcggcatctggaggccaaggggttcccactcga

SEQ ID NO: 384786 - DNA, 55 bp, Artificial
  Synthetic oligonucleotide
ctgcaagaggaactactgagtctgtatgagcagaatagccaaagtcttgcagacc

SEQ ID NO: 384787 - DNA, 60 bp, Artificial
  Synthetic oligonucleotide
ctgcaagatattctttatatgaggaagcaggaccaggattgcagaggaagatagtgggaa

SEQ ID NO: 384788 - DNA, 58 bp, Artificial
  Synthetic oligonucleotide
ctgcaagatgtacccattcataaaaggaacagctaagttgaaaacagtacgtaagcta

SEQ ID NO: 384789 - DNA, 60 bp, Artificial
  Synthetic oligonucleotide
ctgcaagattccaacggaaagattctgagctcttatgtgaaaagcgtcgacgtgtttgct

SEQ ID NO: 384790 - DNA, 60 bp, Artificial
  Synthetic oligonucleotide
ctgcaagccaacactgtacatgatcgtaccaatccatgcatgcaacatgatgaagagctg

SEQ ID NO: 384791 - DNA, 60 bp, Artificial
  Synthetic oligonucleotide
ctgcaagcttgtcaatgagtccgatgggcattcggaaacaatacatggaattgggtttgg

SEQ ID NO: 384792 - DNA, 55 bp, Artificial
  Synthetic oligonucleotide
ctgcaaggatgttggattagatgccagcctcgcaaattgcggggacgattgtgtc

SEQ ID NO: 384793 - DNA, 60 bp, Artificial
  Synthetic oligonucleotide
ctgcaaggctgcacaaaggaatgtgacaggctgttacttgtgtaatgaaggagcgagagt

SEQ ID NO: 384794 - DNA, 55 bp, Artificial
  Synthetic oligonucleotide
ctgcaagtgaggattcagattctgcaccgacaagaagaaggcaccatggccttgg

SEQ ID NO: 384795 - DNA, 55 bp, Artificial
  Synthetic oligonucleotide
ctgcaagtgcttcgcatgtggggaaacagggcactttgcaagtgagtgtaagaac

SEQ ID NO: 384796 - DNA, 60 bp, Artificial
  Synthetic oligonucleotide
ctgcaagtgttttgcttgcggagatatcggtcacttcgcatcagagtgtccgaatcccaa

SEQ ID NO: 384797 - DNA, 60 bp, Artificial
  Synthetic oligonucleotide
ctgcaatacaagacaaaatggctgttccctctgttcttataaactcatatccccatgtaa

SEQ ID NO: 384798 - DNA, 58 bp, Artificial
  Synthetic oligonucleotide
ctgcaatacatcaaaactgtttaatgacacagcttccaataatggtaccatcactctc

SEQ ID NO: 384799 - DNA, 60 bp, Artificial
  Synthetic oligonucleotide
ctgcaatacatcagaactgtttaatgacacaggatccaatggcactatcactaatgacac

SEQ ID NO: 384800 - DNA, 59 bp, Artificial
  Synthetic oligonucleotide
ctgcaatacatcaggactgtttaatagtagcacgagccccgaaggagtgtttaacacga

SEQ ID NO: 384801 - DNA, 60 bp, Artificial
  Synthetic oligonucleotide
ctgcaatacatcaggactgtttaatgaaacaaggtttaataacacaacatccaatgacac

SEQ ID NO: 384802 - DNA, 60 bp, Artificial
  Synthetic oligonucleotide
ctgcaatacatcaggactgtttaatgacacaggactgaatggcactatcactactatcat

SEQ ID NO: 384803 - DNA, 60 bp, Artificial
  Synthetic oligonucleotide
ctgcaatacatcaggactgtttaatgacacaggatccaacaatgagactatcattctccc

SEQ ID NO: 384804 - DNA, 56 bp, Artificial
  Synthetic oligonucleotide
ctgcaatacatcaggactgtttaatgacagtatacccatatccaatgccagtgaca

SEQ ID NO: 384805 - DNA, 57 bp, Artificial
  Synthetic oligonucleotide
ctgcaataccacgggggttgagaagcccaagtttcttccggatctgtatgactataa

SEQ ID NO: 384806 - DNA, 58 bp, Artificial
  Synthetic oligonucleotide
ctgcaatacgatacaaagatgaactatttcctaatgcatgtaataaaggatgggtacc

SEQ ID NO: 384807 - DNA, 55 bp, Artificial
  Synthetic oligonucleotide
ctgcaatactaggaacttcacatgtcaactcaatggatcttagtacttcagctgg

SEQ ID NO: 384808 - DNA, 60 bp, Artificial
  Synthetic oligonucleotide
ctgcaatagataccaccttgtcaagggtctctcgcaattcgacaccctctgtctgacctt

SEQ ID NO: 384809 - DNA, 60 bp, Artificial
  Synthetic oligonucleotide
ctgcaatagcaagtaatggatgggggcatattgccgcgccatatagctttcaggcacgat

SEQ ID NO: 384810 - DNA, 55 bp, Artificial
  Synthetic oligonucleotide
ctgcaataggtcaagtatcaaggcccctgttcttgtacattaggaccaatgggac

SEQ ID NO: 384811 - DNA, 55 bp, Artificial
  Synthetic oligonucleotide
ctgcaatcagtaaaggcttttctgcgagagaggcccttgaaattatgacacggga

SEQ ID NO: 384812 - DNA, 60 bp, Artificial
  Synthetic oligonucleotide
ctgcaatgaaacagtcattagagaatacaatgagacggtaaggattgaaaggataacaca

SEQ ID NO: 384813 - DNA, 55 bp, Artificial
  Synthetic oligonucleotide
ctgcaatgacagcctaaacacagggttcatagctggcttgctctacgcccacaag

SEQ ID NO: 384814 - DNA, 55 bp, Artificial
  Synthetic oligonucleotide
ctgcaatgatagccttaacaccggctggatagcagggcttttctaccaccacaag

SEQ ID NO: 384815 - DNA, 55 bp, Artificial
  Synthetic oligonucleotide
ctgcaatgattccctccagacggggttcatagcgtcgctcttttacgcccacaca

SEQ ID NO: 384816 - DNA, 60 bp, Artificial
  Synthetic oligonucleotide
ctgcaatgccttacatctatgtgccaattaaagagggtcaaatcgtgaatccaacattta

SEQ ID NO: 384817 - DNA, 55 bp, Artificial
  Synthetic oligonucleotide
ctgcaattatccccaggcccataagacccaggtaccgacacttcaatttttggcc

SEQ ID NO: 384818 - DNA, 55 bp, Artificial
  Synthetic oligonucleotide
ctgcaatttgtgagtctgtactagctgatgcaagtgaaactctgttggcaaacgt

SEQ ID NO: 384819 - DNA, 55 bp, Artificial
  Synthetic oligonucleotide
ctgcaattttgggttagctattatccctgtggcgcctcttgactataacgcaggt

SEQ ID NO: 384820 - DNA, 60 bp, Artificial
  Synthetic oligonucleotide
ctgcacaaatgagaggtgttggattcgaaggatcaggtatgatagcaaagatcgacggca

SEQ ID NO: 384821 - DNA, 60 bp, Artificial
  Synthetic oligonucleotide
ctgcacaacacacggcgatggcactgtcatagacaggtttaatgggctgatcacccaagc

SEQ ID NO: 384822 - DNA, 55 bp, Artificial
  Synthetic oligonucleotide
ctgcacaactgatcaaaacatattcaaacccaaaacagcgtggagataagggaga

SEQ ID NO: 384823 - DNA, 60 bp, Artificial
  Synthetic oligonucleotide
ctgcacaagtcacctgtggcaaccaatgacaacgtcagaactttcgattcttttgtgatg

SEQ ID NO: 384824 - DNA, 60 bp, Artificial
  Synthetic oligonucleotide
ctgcacaatttcgccaggggacgtagcacagtgctcgagatagggccgtctctgcacagc

SEQ ID NO: 384825 - DNA, 50 bp, Artificial
  Synthetic oligonucleotide
ctgcacacatggaattttccctatgatagccacagctttgcacttaaatg

SEQ ID NO: 384826 - DNA, 55 bp, Artificial
  Synthetic oligonucleotide
ctgcacaccaacttgcggataaacataacgttttcgtaggctgccgccggaaggt

SEQ ID NO: 384827 - DNA, 55 bp, Artificial
  Synthetic oligonucleotide
ctgcacacgcaaaggcggactacaacacaatcgtggccgactcattgagaacagc

SEQ ID NO: 384828 - DNA, 60 bp, Artificial
  Synthetic oligonucleotide
ctgcacactagtagatgctctactaggggaccctcattgtgatgtattccaagatgaaac

SEQ ID NO: 384829 - DNA, 60 bp, Artificial
  Synthetic oligonucleotide
ctgcacactgatagatgctctcttgggggacccccactgcgatgttttccaagatgaaac

SEQ ID NO: 384830 - DNA, 51 bp, Artificial
  Synthetic oligonucleotide
ctgcacagaatgattttctcattagaggagctgttggctccggaaaatcaa

SEQ ID NO: 384831 - DNA, 60 bp, Artificial
  Synthetic oligonucleotide
ctgcacagagtagatgtgttaaagcgcttgatatgggggcctgtcctcaattagcacagc

SEQ ID NO: 384832 - DNA, 60 bp, Artificial
  Synthetic oligonucleotide
ctgcacagctaataaataggccgtctcctttgcatagagggcccactccattctcatcta

SEQ ID NO: 384833 - DNA, 60 bp, Artificial
  Synthetic oligonucleotide
ctgcacagtccactatgaaagctgatgagttaacaccaggtaggtttagaacaattgtct

SEQ ID NO: 384834 - DNA, 59 bp, Artificial
  Synthetic oligonucleotide
ctgcacatactacttgctcagtgaatggagtaaataattttagttataacggaggatct

SEQ ID NO: 384835 - DNA, 60 bp, Artificial
  Synthetic oligonucleotide
ctgcacatcaggagccatccaccaccatcattgtgccttatcctggaatgtcagcagcaa

SEQ ID NO: 384836 - DNA, 55 bp, Artificial
  Synthetic oligonucleotide
ctgcacatcctgctacaattcaaccacagaggattggaagccaggattttcagac

SEQ ID NO: 384837 - DNA, 55 bp, Artificial
  Synthetic oligonucleotide
ctgcacatcgggtccgtcaatgaacttgccccgtttctaacctatggggacgacg

SEQ ID NO: 384838 - DNA, 55 bp, Artificial
  Synthetic oligonucleotide
ctgcacatggagacacaccacaactagatctgaaggcaaggccaacctatggtgc

SEQ ID NO: 384839 - DNA, 55 bp, Artificial
  Synthetic oligonucleotide
ctgcacatggagacacaccacaattagacttgaaggccagaccaacttatggtgc

SEQ ID NO: 384840 - DNA, 60 bp, Artificial
  Synthetic oligonucleotide
ctgcacattgttcgacattctgtacaattatctcgtgcaacgtgatcttaatcaagaaag

SEQ ID NO: 384841 - DNA, 55 bp, Artificial
  Synthetic oligonucleotide
ctgcaccaactggaattgtgtcaccaatttgcgactgataatcaccgtaagcacg

SEQ ID NO: 384842 - DNA, 55 bp, Artificial
  Synthetic oligonucleotide
ctgcaccacaaacggaaagaatgatgcgcataaattggaaaagatggtggcaagt

SEQ ID NO: 384843 - DNA, 55 bp, Artificial
  Synthetic oligonucleotide
ctgcaccactaatagcagactcaagtcatggatcgtgtagttagcagagttgcgc

SEQ ID NO: 384844 - DNA, 60 bp, Artificial
  Synthetic oligonucleotide
ctgcaccactaatgtgccttggaactctagttggagcaatagatcttttgatgacatatg

SEQ ID NO: 384845 - DNA, 55 bp, Artificial
  Synthetic oligonucleotide
ctgcaccacttctgtgccctggaactcctcttggagtaatagatcttttgaagag

SEQ ID NO: 384846 - DNA, 51 bp, Artificial
  Synthetic oligonucleotide
ctgcaccattctagatataaagacaacgtgtcatatagaatgcacccactc

SEQ ID NO: 384847 - DNA, 60 bp, Artificial
  Synthetic oligonucleotide
ctgcaccccacaatcagggctctggttatggagggtgattctgtaatctttagaggactg

SEQ ID NO: 384848 - DNA, 60 bp, Artificial
  Synthetic oligonucleotide
ctgcaccgtatttgagaagttctaatcacgctcattatgtgacactttacggtagtctta

SEQ ID NO: 384849 - DNA, 55 bp, Artificial
  Synthetic oligonucleotide
ctgcacctatgggaacaccctttagtcctgtaactcctgctttacctacaggccc

SEQ ID NO: 384850 - DNA, 60 bp, Artificial
  Synthetic oligonucleotide
ctgcacctcgagtcgagtgagctgggcacggttggtagagcagtgctgcagcctgtgaac

SEQ ID NO: 384851 - DNA, 55 bp, Artificial
  Synthetic oligonucleotide
ctgcacgaagcaagagcccaactagttgaattcaacaatctctattcagaggaca

SEQ ID NO: 384852 - DNA, 55 bp, Artificial
  Synthetic oligonucleotide
ctgcacgcaggggtaccgtccggtacagccgtctgggtcagcgtgccacattaaa

SEQ ID NO: 384853 - DNA, 60 bp, Artificial
  Synthetic oligonucleotide
ctgcacgccactacgccattatttgcgaagcgcgaaaaagatcagtttcgagactgcatc

SEQ ID NO: 384854 - DNA, 56 bp, Artificial
  Synthetic oligonucleotide
ctgcacgccgtgctccagagtcacctgtcgtcaaaatgggagacaataaaccaggt

SEQ ID NO: 384855 - DNA, 55 bp, Artificial
  Synthetic oligonucleotide
ctgcacggtgcccatttctacctgaacagaaggaccctagagatgctgcattggc

SEQ ID NO: 384856 - DNA, 56 bp, Artificial
  Synthetic oligonucleotide
ctgcacgtacgcaggccctttcgggatttccagaatcctttttgcccaggagaaga

SEQ ID NO: 384857 - DNA, 60 bp, Artificial
  Synthetic oligonucleotide
ctgcacgtggtgcaattcattcacgtaagccataatgaagtatctcatcccttggaggta

SEQ ID NO: 384858 - DNA, 57 bp, Artificial
  Synthetic oligonucleotide
ctgcactaaccgaactagataacggtgcagtaggggtaaattctccgcattcggtgc

SEQ ID NO: 384859 - DNA, 60 bp, Artificial
  Synthetic oligonucleotide
ctgcactatcagtcctgggattgtgcactatcagttcactgccggggtcccaggctcggg

SEQ ID NO: 384860 - DNA, 60 bp, Artificial
  Synthetic oligonucleotide
ctgcactcatccaagggtaagttcagaggtgcacatcccattaggggacgctaggctagt

SEQ ID NO: 384861 - DNA, 59 bp, Artificial
  Synthetic oligonucleotide
ctgcactcatcctgagagggtcagtggcccacaagtcctgcctacctgcttgtgtgtat

SEQ ID NO: 384862 - DNA, 60 bp, Artificial
  Synthetic oligonucleotide
ctgcactcattctgagaggatcagtggcccacaagtcctgtttgcctgcttgtgtctatg

SEQ ID NO: 384863 - DNA, 60 bp, Artificial
  Synthetic oligonucleotide
ctgcactcctgagaagtctatgaaacctctcaactataaggatggcgaaaacgttgttga

SEQ ID NO: 384864 - DNA, 55 bp, Artificial
  Synthetic oligonucleotide
ctgcactctatcagggaattatctatacaatagtacaacaggaggattaatagta

SEQ ID NO: 384865 - DNA, 60 bp, Artificial
  Synthetic oligonucleotide
ctgcactgaacccttgcttagagcgctgattacctacataaaatcgcgcagatacacacg

SEQ ID NO: 384866 - DNA, 60 bp, Artificial
  Synthetic oligonucleotide
ctgcactgagcgcttctgtcgactcgaaacaagtcgatcgtccggcttccgaagatgcgg

SEQ ID NO: 384867 - DNA, 55 bp, Artificial
  Synthetic oligonucleotide
ctgcactgatgtttctacagcaattcatgcagatcaactcacaccagcttggcgc

SEQ ID NO: 384868 - DNA, 60 bp, Artificial
  Synthetic oligonucleotide
ctgcacttaaacctgcaggacgctatcagatccgcctactgttaccatttgtgtagttcg

SEQ ID NO: 384869 - DNA, 55 bp, Artificial
  Synthetic oligonucleotide
ctgcacttcaaatggttcaaaattaataggcatcagatttgctagtactgatggc

SEQ ID NO: 384870 - DNA, 55 bp, Artificial
  Synthetic oligonucleotide
ctgcacttccgatcctgccctacatggctaaccgcaacgctaatggacttatccc

SEQ ID NO: 384871 - DNA, 55 bp, Artificial
  Synthetic oligonucleotide
ctgcacttgccaccattggggaatctgacccagtaaatgctatagttgaacaagt

SEQ ID NO: 384872 - DNA, 56 bp, Artificial
  Synthetic oligonucleotide
ctgcactttctcatgcgggaaataatcgtaatcgggttattctccctaagcaaaat

SEQ ID NO: 384873 - DNA, 55 bp, Artificial
  Synthetic oligonucleotide
ctgcactttgatcggtacctgagtagagtggctcgttgagggtgacgaaggtcgc

SEQ ID NO: 384874 - DNA, 58 bp, Artificial
  Synthetic oligonucleotide
ctgcagaaaagaccagacgtcgatgtcactcttaagtgaataggcaacgagaaaaact

SEQ ID NO: 384875 - DNA, 60 bp, Artificial
  Synthetic oligonucleotide
ctgcagaacagcttttggatgatggacttaagggattagcatgcatggatatctcatacg

SEQ ID NO: 384876 - DNA, 55 bp, Artificial
  Synthetic oligonucleotide
ctgcagaaccgagcggctattgacttcttgctcctagctcacggccatggctgtg

SEQ ID NO: 384877 - DNA, 54 bp, Artificial
  Synthetic oligonucleotide
ctgcagaagaccaaccgacccaaccggacgttgccacgtgtcgtttttacacgc

SEQ ID NO: 384878 - DNA, 54 bp, Artificial
  Synthetic oligonucleotide
ctgcagaagattgctcccggactcccaagctgtcgagattgactagtttcatac

SEQ ID NO: 384879 - DNA, 60 bp, Artificial
  Synthetic oligonucleotide
ctgcagaagtgaactccatctacgacgtttgtgttctccaccctatattcaactcgccaa

SEQ ID NO: 384880 - DNA, 60 bp, Artificial
  Synthetic oligonucleotide
ctgcagaagtgaactccatttaccacgttagtgtcgtccactcggtacagcactctccat

SEQ ID NO: 384881 - DNA, 55 bp, Artificial
  Synthetic oligonucleotide
ctgcagaatattgtgaggtgtacagccaggagagccaaacgcagtgtcacagaca

SEQ ID NO: 384882 - DNA, 60 bp, Artificial
  Synthetic oligonucleotide
ctgcagaatgggacaggttacatccagtacatgcagggcctattccaccaggccagataa

SEQ ID NO: 384883 - DNA, 55 bp, Artificial
  Synthetic oligonucleotide
ctgcagaattgtttgcacaacaagaggctttcgctttccaggagcacatacgcac

SEQ ID NO: 384884 - DNA, 55 bp, Artificial
  Synthetic oligonucleotide
ctgcagacactgtctaaatctcctgctgtcagtctctgacagatgccctctctgc

SEQ ID NO: 384885 - DNA, 53 bp, Artificial
  Synthetic oligonucleotide
ctgcagaccatactgaggaggaagtagggtttccagttagaccagcagtaccc

SEQ ID NO: 384886 - DNA, 58 bp, Artificial
  Synthetic oligonucleotide
ctgcagacctagatcagtttcctttaggacgcaaatttttactacaagcaggattgaa

SEQ ID NO: 384887 - DNA, 60 bp, Artificial
  Synthetic oligonucleotide
ctgcagactgggacagattacatccagtgcatgcaggacctataccaccaggtcagatga

SEQ ID NO: 384888 - DNA, 60 bp, Artificial
  Synthetic oligonucleotide
ctgcagagaatatgagcttacaaacgtcaatggagattgtgaggttgacacagaattata

SEQ ID NO: 384889 - DNA, 55 bp, Artificial
  Synthetic oligonucleotide
ctgcagagatcaggggtggatcgtgcccgatactcccaccaacgtagagcgccac

SEQ ID NO: 384890 - DNA, 60 bp, Artificial
  Synthetic oligonucleotide
ctgcagagcacgataaacacctgtaactgttctatggcctgcgcttgagtgtcgatgtta

SEQ ID NO: 384891 - DNA, 51 bp, Artificial
  Synthetic oligonucleotide
ctgcagagcatgtttgaccttcctgcgaaaggcacacccgtcaacctcgct

SEQ ID NO: 384892 - DNA, 60 bp, Artificial
  Synthetic oligonucleotide
ctgcagaggagtacgtggagataaggcaagtgggggacttccactacgtgacgggcatga

SEQ ID NO: 384893 - DNA, 56 bp, Artificial
  Synthetic oligonucleotide
ctgcagagggggtgggaagccctcaaacttctggggaatctcgcgcagtattgggg

SEQ ID NO: 384894 - DNA, 55 bp, Artificial
  Synthetic oligonucleotide
ctgcagataagaggtgagattggaaccagtagagctagacgtgaagacgaggata

SEQ ID NO: 384895 - DNA, 55 bp, Artificial
  Synthetic oligonucleotide
ctgcagatacctctggggacttctatttacatccaagccttcgcaggcgaaaacg

SEQ ID NO: 384896 - DNA, 55 bp, Artificial
  Synthetic oligonucleotide
ctgcagatccgtatcgacaatcgttaacaaatacaaacgaggtatctacgcggag

SEQ ID NO: 384897 - DNA, 60 bp, Artificial
  Synthetic oligonucleotide
ctgcagatctcgccatctctacgcccgagtcgaaagtagacaggcatatcaaatcaggca

SEQ ID NO: 384898 - DNA, 60 bp, Artificial
  Synthetic oligonucleotide
ctgcagatcttcaagttatgaaggaaggtgtttatagagaactgggtctagatataggtc

SEQ ID NO: 384899 - DNA, 55 bp, Artificial
  Synthetic oligonucleotide
ctgcagatggcactagagagcattgctcaaactgcatatagtgcagaggagtgga

SEQ ID NO: 384900 - DNA, 60 bp, Artificial
  Synthetic oligonucleotide
ctgcagatggcctgtgaattagatcgtgattatttggatgcccgaggtgtgtcacctgaa

SEQ ID NO: 384901 - DNA, 60 bp, Artificial
  Synthetic oligonucleotide
ctgcagattgggatagggtacacccagtacatgcagggcctattccaccaggccaaatga

SEQ ID NO: 384902 - DNA, 60 bp, Artificial
  Synthetic oligonucleotide
ctgcagcacaacgccgtgggagagtcggcagacatgaaggacgaacagatgaatacatat

SEQ ID NO: 384903 - DNA, 55 bp, Artificial
  Synthetic oligonucleotide
ctgcagccaacaattgttcggattcattgacaccggcgaccccgtgcacatcatc

SEQ ID NO: 384904 - DNA, 55 bp, Artificial
  Synthetic oligonucleotide
ctgcagccacatgtcatgtcacggtcgaactttcaaaatcctttgtatcaacccc

SEQ ID NO: 384905 - DNA, 59 bp, Artificial
  Synthetic oligonucleotide
ctgcagcccccgagccatccccaatgccttatgtcccgtaccctcgctcaacagaggtg

SEQ ID NO: 384906 - DNA, 60 bp, Artificial
  Synthetic oligonucleotide
ctgcagccgtactaaaaacgaaactagacaaatcaacgcaaatttcacagcagacaatgc

SEQ ID NO: 384907 - DNA, 57 bp, Artificial
  Synthetic oligonucleotide
ctgcagcctgaatggaatagcccctttacaactagggaaatgcaacgtggcggggtg

SEQ ID NO: 384908 - DNA, 55 bp, Artificial
  Synthetic oligonucleotide
ctgcagcgcaccactgattagtggcattgctgtgctgcatgcaactgataagaac

SEQ ID NO: 384909 - DNA, 54 bp, Artificial
  Synthetic oligonucleotide
ctgcagcggaaccgactactttgggtgtccgtgtttccttttatacttacactg

SEQ ID NO: 384910 - DNA, 60 bp, Artificial
  Synthetic oligonucleotide
ctgcagcggaactgtgataacaaataatcacactacgatcaacaacataacaacggttgt

SEQ ID NO: 384911 - DNA, 55 bp, Artificial
  Synthetic oligonucleotide
ctgcagcggagaaggaaaaactcgtctggaaaaaactggacgaacaattggctgc

SEQ ID NO: 384912 - DNA, 56 bp, Artificial
  Synthetic oligonucleotide
ctgcagcggtatccactggtttctttggttagagaaccaggttgctgccgtttggt

SEQ ID NO: 384913 - DNA, 51 bp, Artificial
  Synthetic oligonucleotide
ctgcagcgtcgactgcgatcggttcttctcctcgagctgcgcccgatacgc

SEQ ID NO: 384914 - DNA, 56 bp, Artificial
  Synthetic oligonucleotide
ctgcagctactttcacctgtaatggccgacctagaatttgacggagtgcaatctga

SEQ ID NO: 384915 - DNA, 57 bp, Artificial
  Synthetic oligonucleotide
ctgcagctggggttttcccccgaagctacagcccttatgcataggttcgtggacctc

SEQ ID NO: 384916 - DNA, 55 bp, Artificial
  Synthetic oligonucleotide
ctgcagcttcgaacgtagagctaacctcctaccattgcacatggtacacgcacac

SEQ ID NO: 384917 - DNA, 55 bp, Artificial
  Synthetic oligonucleotide
ctgcaggaacagttaatcctttggcagacaacacatcctgcctcctacgcttggc

SEQ ID NO: 384918 - DNA, 60 bp, Artificial
  Synthetic oligonucleotide
ctgcaggaccatacgagcactcggtctggaagcagaagggtgcctcacaaggacctgaag

SEQ ID NO: 384919 - DNA, 60 bp, Artificial
  Synthetic oligonucleotide
ctgcaggactgcaaaattgcccctctaatggttgcatacatgctggaaagagagttggtc

SEQ ID NO: 384920 - DNA, 60 bp, Artificial
  Synthetic oligonucleotide
ctgcaggattcaggactagaagcaaacatagtaacagactcacaatatgcattaggaatt

SEQ ID NO: 384921 - DNA, 55 bp, Artificial
  Synthetic oligonucleotide
ctgcaggcatgatcattatgctgattccaacagtgatggcgttccatttaaccac

SEQ ID NO: 384922 - DNA, 56 bp, Artificial
  Synthetic oligonucleotide
ctgcaggcattcccgcatttcggaaatcgtaagtccggagttgttcaaccgatacc

SEQ ID NO: 384923 - DNA, 58 bp, Artificial
  Synthetic oligonucleotide
ctgcaggcctgcctaaacaaggcaaagcaaacagtaaaccgaatggtaacgtcgctgc

SEQ ID NO: 384924 - DNA, 55 bp, Artificial
  Synthetic oligonucleotide
ctgcaggcgagcattttaaccctacgaacatggctcacggtgcgcccaactctgc

SEQ ID NO: 384925 - DNA, 60 bp, Artificial
  Synthetic oligonucleotide
ctgcagggattggctattgaggatctaccagatcctccaaccagtgctccagagactctc

SEQ ID NO: 384926 - DNA, 60 bp, Artificial
  Synthetic oligonucleotide
ctgcagggttcactgctgggctttcctattctcagctcatgactctcaaagatgcaatgc

SEQ ID NO: 384927 - DNA, 60 bp, Artificial
  Synthetic oligonucleotide
ctgcaggtagtggatgatcttgacactaagctggatcaatactggacggccctgaatctg

SEQ ID NO: 384928 - DNA, 60 bp, Artificial
  Synthetic oligonucleotide
ctgcaggtgctttagtgggtttttcatctggtgtcagcgttaacgcatctaacaaccagc

SEQ ID NO: 384929 - DNA, 51 bp, Artificial
  Synthetic oligonucleotide
ctgcaggttctgctggactactgttaccgcacgcaggcgtctccactggcc

SEQ ID NO: 384930 - DNA, 59 bp, Artificial
  Synthetic oligonucleotide
ctgcagtaaacccaattttcaccgtatttcctgctatgcatttaagcaaattgtaatca

SEQ ID NO: 384931 - DNA, 55 bp, Artificial
  Synthetic oligonucleotide
ctgcagtaccacaacctaaatgctaatttggacaggatatttgccccaatccaag

SEQ ID NO: 384932 - DNA, 57 bp, Artificial
  Synthetic oligonucleotide
ctgcagtactaaagacaaaactggacaaatcaacacaaatttcacaaagtaccatac

SEQ ID NO: 384933 - DNA, 55 bp, Artificial
  Synthetic oligonucleotide
ctgcagtagctcctgatggttcggcagtaacaggttgtgatactattcgggcagt

SEQ ID NO: 384934 - DNA, 50 bp, Artificial
  Synthetic oligonucleotide
ctgcagtcatcgctgttgaaccgcatgttaatccagtagatagacaatac

SEQ ID NO: 384935 - DNA, 55 bp, Artificial
  Synthetic oligonucleotide
ctgcagtccctgcagaaatctgcttacagcaatgaggattggacgttgtcgcaga

SEQ ID NO: 384936 - DNA, 60 bp, Artificial
  Synthetic oligonucleotide
ctgcagtgagtaaaattgcccagactaaaccaacataacatcggctcttatacctgaaca

SEQ ID NO: 384937 - DNA, 60 bp, Artificial
  Synthetic oligonucleotide
ctgcagtgataagttcccctgtgcgtgaatccatggttgtggcagttgatgtgtacgtag

SEQ ID NO: 384938 - DNA, 55 bp, Artificial
  Synthetic oligonucleotide
ctgcagtgctagtagccatggtagcgtcgtcgtaatcgacagctgtgctaccgta

SEQ ID NO: 384939 - DNA, 55 bp, Artificial
  Synthetic oligonucleotide
ctgcagtggacaacaccagagcaacaaactttaacatatctatccataaaacctc

SEQ ID NO: 384940 - DNA, 60 bp, Artificial
  Synthetic oligonucleotide
ctgcagtggggtgttcggtgacaatccgcgtcccagagatggagagggcagctgtaatcc

SEQ ID NO: 384941 - DNA, 58 bp, Artificial
  Synthetic oligonucleotide
ctgcagtggtcactcccccgaactgccctaacgagtgtgcactagtgtgcttcgcttc

SEQ ID NO: 384942 - DNA, 60 bp, Artificial
  Synthetic oligonucleotide
ctgcagttacaatatatgtccctattgtgcgtctagactgacttcagatgggcttgctag

SEQ ID NO: 384943 - DNA, 60 bp, Artificial
  Synthetic oligonucleotide
ctgcagttagattcgtagacccactcacaggggcgacgctagatgataatccgttcacag

SEQ ID NO: 384944 - DNA, 60 bp, Artificial
  Synthetic oligonucleotide
ctgcagttcgattcgtagatccactcacaggagctacgttggacgacaacccgttcacag

SEQ ID NO: 384945 - DNA, 56 bp, Artificial
  Synthetic oligonucleotide
ctgcagttcgtttcgtggatccactcacaggagcgacgttggatgacaacccgctc

SEQ ID NO: 384946 - DNA, 60 bp, Artificial
  Synthetic oligonucleotide
ctgcagttctatgctcagtgtcgacggtggttgtctgccggctttcatctcgacccccgt

SEQ ID NO: 384947 - DNA, 60 bp, Artificial
  Synthetic oligonucleotide
ctgcataaggcctcgactgggaaggccttccctgtagggaagcgggctcctctgcagata

SEQ ID NO: 384948 - DNA, 55 bp, Artificial
  Synthetic oligonucleotide
ctgcataatcacggccagtattcttctatggtacgcacaaatacagccacactgg

SEQ ID NO: 384949 - DNA, 55 bp, Artificial
  Synthetic oligonucleotide
ctgcatacgccttaccctgacagtagttggttaagaacggtcaccacaacaaagg

SEQ ID NO: 384950 - DNA, 60 bp, Artificial
  Synthetic oligonucleotide
ctgcatatacaaattcaactagtggagaatcatttctaacttcaacgctatgtctgtact

SEQ ID NO: 384951 - DNA, 55 bp, Artificial
  Synthetic oligonucleotide
ctgcatatcatcagtggagaaccgaagaacaactgggtctttgacatcccaagag

SEQ ID NO: 384952 - DNA, 55 bp, Artificial
  Synthetic oligonucleotide
ctgcatatgctaaagatctcacaatcagggatacctagtggccagctaagagcct

SEQ ID NO: 384953 - DNA, 51 bp, Artificial
  Synthetic oligonucleotide
ctgcatatttggtcgcagtgctaaggctcgtgtgttcctccctcgtaaacg

SEQ ID NO: 384954 - DNA, 54 bp, Artificial
  Synthetic oligonucleotide
ctgcatcacccacaatcaacccaattgcttcaccacaattccctcaagtgctgg

SEQ ID NO: 384955 - DNA, 55 bp, Artificial
  Synthetic oligonucleotide
ctgcatcactagtactcacaactctttcttcaaccatgggttcgtgtgatctgct

SEQ ID NO: 384956 - DNA, 60 bp, Artificial
  Synthetic oligonucleotide
ctgcatccaacatgtagttggattttcttattttgtgtgctactcgcatacgtacagcgt

SEQ ID NO: 384957 - DNA, 55 bp, Artificial
  Synthetic oligonucleotide
ctgcatccaagcagacgagatctgcattgggtacctgagcaacaactcaacagag

SEQ ID NO: 384958 - DNA, 59 bp, Artificial
  Synthetic oligonucleotide
ctgcatccagtgccgcctagggatataccgactgaactgcgggtgtattggggaccacc

SEQ ID NO: 384959 - DNA, 60 bp, Artificial
  Synthetic oligonucleotide
ctgcatcccaacaacgagattctagccggcgcaatttctaacgcggtgctcaggtcggat

SEQ ID NO: 384960 - DNA, 60 bp, Artificial
  Synthetic oligonucleotide
ctgcatcctcaaccctattagagtgggcatgtcaatgaacgaagatgggcccttcatctt

SEQ ID NO: 384961 - DNA, 60 bp, Artificial
  Synthetic oligonucleotide
ctgcatcctcaccccgggtaccctcaggtgttgactctgatcagcccaatccatggctcc

SEQ ID NO: 384962 - DNA, 59 bp, Artificial
  Synthetic oligonucleotide
ctgcatcctcgcagacggaatatgaggctttcccattagcaccatcgcaaaacatgggt

SEQ ID NO: 384963 - DNA, 60 bp, Artificial
  Synthetic oligonucleotide
ctgcatcctgtgaccacgcttgcagaggggacgtacgaaacacccaacatcacagtccag

SEQ ID NO: 384964 - DNA, 55 bp, Artificial
  Synthetic oligonucleotide
ctgcatctgtctgacccactgggaattcgagattctgatggaaaatcaaggtcta

SEQ ID NO: 384965 - DNA, 60 bp, Artificial
  Synthetic oligonucleotide
ctgcatgaatggctcttgctttactataatgaccgatggaccaagtaatgggcaggcctc

SEQ ID NO: 384966 - DNA, 60 bp, Artificial
  Synthetic oligonucleotide
ctgcatgacattgacagaatctacagaaagtgcacttcaagcacattttgcaatctgcaa

SEQ ID NO: 384967 - DNA, 60 bp, Artificial
  Synthetic oligonucleotide
ctgcatgacgcaaatgtgaagaacctgtatgaaagagttaaatcacaactaagggacaat

SEQ ID NO: 384968 - DNA, 60 bp, Artificial
  Synthetic oligonucleotide
ctgcatgagtggatcaattccgattggtctactccgtgctctggttcttggttacgagac

SEQ ID NO: 384969 - DNA, 55 bp, Artificial
  Synthetic oligonucleotide
ctgcatggattcttcagaatgttgattcgtgtattaggttgcttgtaaacaacgg

SEQ ID NO: 384970 - DNA, 57 bp, Artificial
  Synthetic oligonucleotide
ctgcatggcatgcggttttgttaaataccaactcgtcatccggaaatggttccttta

SEQ ID NO: 384971 - DNA, 55 bp, Artificial
  Synthetic oligonucleotide
ctgcatgggatggacccatctatactggataactggaacttgactctgggacccc

SEQ ID NO: 384972 - DNA, 60 bp, Artificial
  Synthetic oligonucleotide
ctgcatggggatgtgaggtcgaagaatctattgttcctgcactggaacttcccttcgaac

SEQ ID NO: 384973 - DNA, 60 bp, Artificial
  Synthetic oligonucleotide
ctgcatgggtacacgcattgggtatcgatgcaggcgtgtcgatcatcctgagtgcctatg

SEQ ID NO: 384974 - DNA, 60 bp, Artificial
  Synthetic oligonucleotide
ctgcatgggtgaacaggcccatgtataggaagcccaggatctatcgcacaatgagaggcc

SEQ ID NO: 384975 - DNA, 52 bp, Artificial
  Synthetic oligonucleotide
ctgcattacatagatacggatcatcacgtcagagttctggtggttatgctgc

SEQ ID NO: 384976 - DNA, 54 bp, Artificial
  Synthetic oligonucleotide
ctgcattacggaagtctctagccgcctccgcgctactagcataaccgcgagcca

SEQ ID NO: 384977 - DNA, 60 bp, Artificial
  Synthetic oligonucleotide
ctgcattaggaacaaatagagcctattttataacacgtcaggcacaagtagatgaatcga

SEQ ID NO: 384978 - DNA, 60 bp, Artificial
  Synthetic oligonucleotide
ctgcattagtcctagatttaatattcctttatcaagtatgatagcatgtggaaaccaacc

SEQ ID NO: 384979 - DNA, 55 bp, Artificial
  Synthetic oligonucleotide
ctgcattcaatttcactacagacgccgatataactgagtcaggcagtagtgagac

SEQ ID NO: 384980 - DNA, 60 bp, Artificial
  Synthetic oligonucleotide
ctgcattcattgtcagatgggttcgtacggtgattcttttgaagggaaaatcttggatga

SEQ ID NO: 384981 - DNA, 58 bp, Artificial
  Synthetic oligonucleotide
ctgcattcgcaattgcatcccaaaaacctatactacttgggtcacgttccgcgacgaa

SEQ ID NO: 384982 - DNA, 54 bp, Artificial
  Synthetic oligonucleotide
ctgcattcgcccggactctatctcgtgtgtcaccactccgcattaatcctactc

SEQ ID NO: 384983 - DNA, 60 bp, Artificial
  Synthetic oligonucleotide
ctgcattctatcagtcatatcttcgaaggacacagtctatggggattcaactagaccaaa

SEQ ID NO: 384984 - DNA, 56 bp, Artificial
  Synthetic oligonucleotide
ctgcattctctcatcatttgatatgtcgtcagtatagtaattgtccctttcaatgc

SEQ ID NO: 384985 - DNA, 55 bp, Artificial
  Synthetic oligonucleotide
ctgcattcttcagtgcccaggacttcaaagctgaattcttatcctcgtcgagata

SEQ ID NO: 384986 - DNA, 55 bp, Artificial
  Synthetic oligonucleotide
ctgcattgactaattatttgaagggtgaagcagtgtgcccacacgcgggtggcgc

SEQ ID NO: 384987 - DNA, 60 bp, Artificial
  Synthetic oligonucleotide
ctgcattgagccagaccgttcgcggtcggattttttgcagtgtcagcacaagttcacctg

SEQ ID NO: 384988 - DNA, 59 bp, Artificial
  Synthetic oligonucleotide
ctgcattgaggatccgtgtagacgtttggcgtctctgtggaacttcgattgtaagttgt

SEQ ID NO: 384989 - DNA, 51 bp, Artificial
  Synthetic oligonucleotide
ctgcattggccaacaccatagaagtttttaggtcgaatagtctaacagcca

SEQ ID NO: 384990 - DNA, 60 bp, Artificial
  Synthetic oligonucleotide
ctgcattgtagggggaaactctgcacctatatatgtgccaacacttgatgactttagatc

SEQ ID NO: 384991 - DNA, 55 bp, Artificial
  Synthetic oligonucleotide
ctgcattgtcatatcgtttcctgatacggcgcagcatttcctgttgcagggcagg

SEQ ID NO: 384992 - DNA, 60 bp, Artificial
  Synthetic oligonucleotide
ctgcatttatagctaagagtgtgtaactctaggcattcttctcgacagtgaaatcaatac

SEQ ID NO: 384993 - DNA, 60 bp, Artificial
  Synthetic oligonucleotide
ctgcatttcaagcaaaatgaatgtagcatccccgcgaataatactgtcatagagaaagag

SEQ ID NO: 384994 - DNA, 60 bp, Artificial
  Synthetic oligonucleotide
ctgcatttcattgttatggtgcatgtcagaagtactcttatccatggcaaacatctaagt

SEQ ID NO: 384995 - DNA, 60 bp, Artificial
  Synthetic oligonucleotide
ctgccaaaagcatggagtatgatgctgttgcaacaacacactcttggatccccaagagga

SEQ ID NO: 384996 - DNA, 54 bp, Artificial
  Synthetic oligonucleotide
ctgccaaacccaccgctccacacgtcccattccagactcacctcaactatggcg

SEQ ID NO: 384997 - DNA, 60 bp, Artificial
  Synthetic oligonucleotide
ctgccaaattgaccagaatcatgaccaccacagacacaatgagagacctgggagatcaaa

SEQ ID NO: 384998 - DNA, 51 bp, Artificial
  Synthetic oligonucleotide
ctgccaaccgtccctgcgactggaaccctcaccacgatctacgaggggaat

SEQ ID NO: 384999 - DNA, 57 bp, Artificial
  Synthetic oligonucleotide
ctgccaacctggcagaggtccgcagttattgctatttggctaccgtcagcgatctct

SEQ ID NO: 385000 - DNA, 60 bp, Artificial
  Synthetic oligonucleotide
ctgccaacgctgacactatatattatgactattttcccctcgaggatagagctaagaagt

SEQ ID NO: 385001 - DNA, 55 bp, Artificial
  Synthetic oligonucleotide
ctgccaactggagtcttaggctcgagtgctgaacagatacaaacgtaccagaata

SEQ ID NO: 385002 - DNA, 55 bp, Artificial
  Synthetic oligonucleotide
ctgccaagactagcggatattgtcaacatcttgtcagttattacactactcaatg

SEQ ID NO: 385003 - DNA, 57 bp, Artificial
  Synthetic oligonucleotide
ctgccaagattggagcggaaatgttcgcccccgttgacgtacagaacctctacagct

SEQ ID NO: 385004 - DNA, 55 bp, Artificial
  Synthetic oligonucleotide
ctgccaatcgtattgtggttcaggtaatgctggacattatctctgcaccaaagtt

SEQ ID NO: 385005 - DNA, 56 bp, Artificial
  Synthetic oligonucleotide
ctgccaatgagcttttgtgccccaccgactgcttccgcaaacatccggaagctaca

SEQ ID NO: 385006 - DNA, 55 bp, Artificial
  Synthetic oligonucleotide
ctgccaatgctagagagataacacggcaggattggccccagatgcatggctagag

SEQ ID NO: 385007 - DNA, 58 bp, Artificial
  Synthetic oligonucleotide
ctgccaattggacgtcatccaaattatatggtaaggctcggataggaagttactatat

SEQ ID NO: 385008 - DNA, 58 bp, Artificial
  Synthetic oligonucleotide
ctgccacaaatattccatcctaagggtatgaatgcgaataaaccattgtccaaacgta

SEQ ID NO: 385009 - DNA, 55 bp, Artificial
  Synthetic oligonucleotide
ctgccacaaattttacctgtcgcattaaacgcgattctaacattaatccaaggtt

SEQ ID NO: 385010 - DNA, 55 bp, Artificial
  Synthetic oligonucleotide
ctgccacaacaggaggggccttacgccggtccgatggagagacaacaaccgctga

SEQ ID NO: 385011 - DNA, 60 bp, Artificial
  Synthetic oligonucleotide
ctgccacaaggtatgaatcaatattccctaggcatcaccacaatgataaagtgacctttt

SEQ ID NO: 385012 - DNA, 55 bp, Artificial
  Synthetic oligonucleotide
ctgccacactgggtgttcctctttccaaagtagctaacgcggttacgcagtacac

SEQ ID NO: 385013 - DNA, 60 bp, Artificial
  Synthetic oligonucleotide
ctgccacagctgagggaggtgaaatagtgtttcaaaatgccgcatttaccatgtggaagt

SEQ ID NO: 385014 - DNA, 55 bp, Artificial
  Synthetic oligonucleotide
ctgccacatgtgaccataaagtcctcagccggcctaccatacataggcaaaacca

SEQ ID NO: 385015 - DNA, 55 bp, Artificial
  Synthetic oligonucleotide
ctgccacccatcaccaaatctagttccgagaagcacgctcgcgcgctccttgggc

SEQ ID NO: 385016 - DNA, 55 bp, Artificial
  Synthetic oligonucleotide
ctgccacccattacgaatacgcgttttcgcgtcgacttgccatcctgcggctctg

SEQ ID NO: 385017 - DNA, 54 bp, Artificial
  Synthetic oligonucleotide
ctgccacccgaggtggcactcccaagaagcaaacgccgaccaagaaacggaaac

SEQ ID NO: 385018 - DNA, 60 bp, Artificial
  Synthetic oligonucleotide
ctgccacccggaccttctcacaactgcacaccgatcgtagcagaattacagcttgcccca

SEQ ID NO: 385019 - DNA, 60 bp, Artificial
  Synthetic oligonucleotide
ctgccacctccagaccttacatcgtgcggggacgttgagagtaatcctggacctatcata

SEQ ID NO: 385020 - DNA, 60 bp, Artificial
  Synthetic oligonucleotide
ctgccacgatcctgagaaatttgacatcatagaagctggtggctacacgaaaatgacaac

SEQ ID NO: 385021 - DNA, 60 bp, Artificial
  Synthetic oligonucleotide
ctgccacgttaagcgttcctcttcttgatgattctgccaccatgagtgacgtattcaaca

SEQ ID NO: 385022 - DNA, 60 bp, Artificial
  Synthetic oligonucleotide
ctgccactatattcgcagatattgccactcctcattcagtctgggtctttgcatgtgctc

SEQ ID NO: 385023 - DNA, 60 bp, Artificial
  Synthetic oligonucleotide
ctgccactctctttgtgcgcctataaggtgcttccaatgcttcatctttaagtaattggg

SEQ ID NO: 385024 - DNA, 60 bp, Artificial
  Synthetic oligonucleotide
ctgccactgcttctggtgcgagctgaaccgaaggcactcgctactgatatgagctggcgc

SEQ ID NO: 385025 - DNA, 58 bp, Artificial
  Synthetic oligonucleotide
ctgccactgtgaagaacgacctccgggatcgttaccaagttatgcacaggttccatac

SEQ ID NO: 385026 - DNA, 60 bp, Artificial
  Synthetic oligonucleotide
ctgccactgtggggctgagattactggacatgtcaaaaacgggacgatgaggatcgtcgg

SEQ ID NO: 385027 - DNA, 60 bp, Artificial
  Synthetic oligonucleotide
ctgccactgttgctgccttcctccacgtcgcggatgattttgacgtccgcctcccacagt

SEQ ID NO: 385028 - DNA, 51 bp, Artificial
  Synthetic oligonucleotide
ctgccacttctagttaaattgcggtcaagcgtaaaacaaaagccactaagg

SEQ ID NO: 385029 - DNA, 52 bp, Artificial
  Synthetic oligonucleotide
ctgccagaactacgattgttctaggtgataagggaaaatccgtatttcgtct

SEQ ID NO: 385030 - DNA, 55 bp, Artificial
  Synthetic oligonucleotide
ctgccagaaggtgactcaggtgctagagaatgtgcaatggtactgcaaagagcac

SEQ ID NO: 385031 - DNA, 60 bp, Artificial
  Synthetic oligonucleotide
ctgccagacatagatgcactagttgaacttgctgcctcaggggatccaacactgccagac

SEQ ID NO: 385032 - DNA, 55 bp, Artificial
  Synthetic oligonucleotide
ctgccagacggctggatatactgtggcgcagatggttcgcaatttgatagctcac

SEQ ID NO: 385033 - DNA, 60 bp, Artificial
  Synthetic oligonucleotide
ctgccagagttacccactctatagtcaaggccattccacgatgttagcatgatatgagac

SEQ ID NO: 385034 - DNA, 55 bp, Artificial
  Synthetic oligonucleotide
ctgccagatgacctgtacattaagggctctggtactagaacaaacccacatagcc

SEQ ID NO: 385035 - DNA, 55 bp, Artificial
  Synthetic oligonucleotide
ctgccagatgatctccactactgactttattgtccctatggcatctctagaagat

SEQ ID NO: 385036 - DNA, 60 bp, Artificial
  Synthetic oligonucleotide
ctgccagcatgggatggaggataatgaaagagaagtgctgatatggagatttgacagtag

SEQ ID NO: 385037 - DNA, 56 bp, Artificial
  Synthetic oligonucleotide
ctgccagcatgtatgaacaagttccatttgtaacattcgaaaactatggtaagatg

SEQ ID NO: 385038 - DNA, 55 bp, Artificial
  Synthetic oligonucleotide
ctgccagcggatcaacacctggtaacaggtgcccctggggccaaaagccacggtt

SEQ ID NO: 385039 - DNA, 55 bp, Artificial
  Synthetic oligonucleotide
ctgccaggcgcaagcgtgcatctgcaactgaattatataaaacatgcaaacaatc

SEQ ID NO: 385040 - DNA, 60 bp, Artificial
  Synthetic oligonucleotide
ctgccaggttcgggacagtttctcaccactgatgataggcaatcccccagtgcactacca

SEQ ID NO: 385041 - DNA, 58 bp, Artificial
  Synthetic oligonucleotide
ctgccagtacgaaatcgaatttatagaaccagtgaacccaactgtcaatgtgtaacca

SEQ ID NO: 385042 - DNA, 55 bp, Artificial
  Synthetic oligonucleotide
ctgccagtggaggaagattaggaacgctttctccgaaactgaagacgtcacaccg

SEQ ID NO: 385043 - DNA, 59 bp, Artificial
  Synthetic oligonucleotide
ctgccagtgtcgctcaagtccactgtcgtgttatcccaagccctcccctttatttgtga

SEQ ID NO: 385044 - DNA, 56 bp, Artificial
  Synthetic oligonucleotide
ctgccataaggagagccttactaggacataaagttaaccctaggtgtaactatcaa

SEQ ID NO: 385045 - DNA, 60 bp, Artificial
  Synthetic oligonucleotide
ctgccataaggagtgccatattaggacattacattagccctaggtgtaactaccaagcag

SEQ ID NO: 385046 - DNA, 55 bp, Artificial
  Synthetic oligonucleotide
ctgccatactttaatcgtgtcatgtactctgcgcttccgattctgccctacacgg

SEQ ID NO: 385047 - DNA, 55 bp, Artificial
  Synthetic oligonucleotide
ctgccataggtcaggtggcaaggcccatgtttctatacgtgaggacaaacgggac

SEQ ID NO: 385048 - DNA, 60 bp, Artificial
  Synthetic oligonucleotide
ctgccatatctacgtttgtaagctatcccagtctcggtaagactgaaccgaatcgtagca

SEQ ID NO: 385049 - DNA, 55 bp, Artificial
  Synthetic oligonucleotide
ctgccatcctccagcagaaccagagactgggtcaaccaacagaatctgaatttgg

SEQ ID NO: 385050 - DNA, 55 bp, Artificial
  Synthetic oligonucleotide
ctgccatcggttattgggttttggatcactctccagtacactaagagaggagggg

SEQ ID NO: 385051 - DNA, 60 bp, Artificial
  Synthetic oligonucleotide
ctgccatgagtggcgcagatgtcgagtcatacatatttccgcgtatccgggagattctga

SEQ ID NO: 385052 - DNA, 55 bp, Artificial
  Synthetic oligonucleotide
ctgccatgccttgtctttaagtgagtgcttcactcgtgataagtcatgtctttta

SEQ ID NO: 385053 - DNA, 55 bp, Artificial
  Synthetic oligonucleotide
ctgccatggatttagaattgccagtatcagcaaaattattacaccacccaactac

SEQ ID NO: 385054 - DNA, 60 bp, Artificial
  Synthetic oligonucleotide
ctgccatggcttgtgaattatgcaaagactgtcatactccaactaatttcaaaaagtgct

SEQ ID NO: 385055 - DNA, 55 bp, Artificial
  Synthetic oligonucleotide
ctgccatgggctggggatctaaggtgtcggtcaaggacttagccacccccgcggg

SEQ ID NO: 385056 - DNA, 60 bp, Artificial
  Synthetic oligonucleotide
ctgccatggtacatggcaacactctctcatatgcagttcgcactcaagacggaatgtcag

SEQ ID NO: 385057 - DNA, 55 bp, Artificial
  Synthetic oligonucleotide
ctgccatggttaaacaattcaacggtacaaaggatttagatcctaattgcgatcc

SEQ ID NO: 385058 - DNA, 59 bp, Artificial
  Synthetic oligonucleotide
ctgccatgtgccgttccgattttagtagcaggatagattcatttattcgagtgttaggg

SEQ ID NO: 385059 - DNA, 59 bp, Artificial
  Synthetic oligonucleotide
ctgccatgtgggagcttctaatcccttttctgtgctaacctgcaaaaaatgtgcttacc

SEQ ID NO: 385060 - DNA, 55 bp, Artificial
  Synthetic oligonucleotide
ctgccattagacgcaattttgcgcggtcggacaagtttcccgtcgacccagaaac

SEQ ID NO: 385061 - DNA, 54 bp, Artificial
  Synthetic oligonucleotide
ctgccattcaagccactaagatagcggttcaaatgaacgccgttgtggtgtgga

SEQ ID NO: 385062 - DNA, 55 bp, Artificial
  Synthetic oligonucleotide
ctgccattcaaggctctaatgttcctaactctgatgaggccgcccctagttttgt

SEQ ID NO: 385063 - DNA, 60 bp, Artificial
  Synthetic oligonucleotide
ctgccattgtggcggacatctgtccgtactctccccgaccttgttggtctgcgacgagtg

SEQ ID NO: 385064 - DNA, 55 bp, Artificial
  Synthetic oligonucleotide
ctgcccaagccagatacacagctttcgtctgcaatcgaacttccttttcagttcc

SEQ ID NO: 385065 - DNA, 55 bp, Artificial
  Synthetic oligonucleotide
ctgcccaagttctctcctgagtgcctgggtccaaaggaatgacttcacttctttg

SEQ ID NO: 385066 - DNA, 58 bp, Artificial
  Synthetic oligonucleotide
ctgcccacgtgcgacaaatagttaatgaatacggtcgtgggtagaagaacgatcaatg

SEQ ID NO: 385067 - DNA, 55 bp, Artificial
  Synthetic oligonucleotide
ctgcccatccggttcaggaatacgaggctaccattgaaacgcagatgttggagcg

SEQ ID NO: 385068 - DNA, 60 bp, Artificial
  Synthetic oligonucleotide
ctgcccatctccagtccccacagtatccacaacttctcgcttacttattcggccagctaa

SEQ ID NO: 385069 - DNA, 60 bp, Artificial
  Synthetic oligonucleotide
ctgcccattctgtggctgaaagatagcaacttccaccggatcattgtatctaccctcaat

SEQ ID NO: 385070 - DNA, 57 bp, Artificial
  Synthetic oligonucleotide
ctgccccacggactgcttccggaaacaccccgaggccacttacaccagatgcggctc

SEQ ID NO: 385071 - DNA, 58 bp, Artificial
  Synthetic oligonucleotide
ctgccccagtagttttccaggagactttcgagataaaccacatcctttatgctgagcg

SEQ ID NO: 385072 - DNA, 51 bp, Artificial
  Synthetic oligonucleotide
ctgcccccagggtggaaagtaataacaccccagggcatagagaaaactagt

SEQ ID NO: 385073 - DNA, 57 bp, Artificial
  Synthetic oligonucleotide
ctgcccccattgtccgcgtcacaaagggtcaggtatggaccaacagacctatgttcc

SEQ ID NO: 385074 - DNA, 54 bp, Artificial
  Synthetic oligonucleotide
ctgccccccccgagtattctgtcgatactccatccgaacaatcggatgttgaat

SEQ ID NO: 385075 - DNA, 52 bp, Artificial
  Synthetic oligonucleotide
ctgcccccgaaccctagtagggccagcacttccgagacacccattaaaaagg

SEQ ID NO: 385076 - DNA, 59 bp, Artificial
  Synthetic oligonucleotide
ctgcccccgcacccaattgatgtctaatgtcgttccaactagccttggacgctctctcc

SEQ ID NO: 385077 - DNA, 49 bp, Artificial
  Synthetic oligonucleotide
ctgccccctctcctcccaaaccgagccccttaccccccttgtatacccc

SEQ ID NO: 385078 - DNA, 55 bp, Artificial
  Synthetic oligonucleotide
ctgccccgaccgtccaagatatatttccgcacccggacactctgtccgctttccc

SEQ ID NO: 385079 - DNA, 55 bp, Artificial
  Synthetic oligonucleotide
ctgccccgtcagtattctagatatcaaacagggacctaaagagccattcagggat

SEQ ID NO: 385080 - DNA, 55 bp, Artificial
  Synthetic oligonucleotide
ctgcccctagtcggaatgtattggccatggattactctggatttgatgcttcaca

SEQ ID NO: 385081 - DNA, 58 bp, Artificial
  Synthetic oligonucleotide
ctgcccctggacccagctacctgcccctctacaaccagggtcttgagatccacgctga

SEQ ID NO: 385082 - DNA, 60 bp, Artificial
  Synthetic oligonucleotide
ctgcccctttcactcaatgtggctatcctgccttaatgcccttgtatgcatgtatacagg

SEQ ID NO: 385083 - DNA, 55 bp, Artificial
  Synthetic oligonucleotide
ctgcccgaaatatgtaaagcaagggtccctgatgttagcaactggaatgcgcaac

SEQ ID NO: 385084 - DNA, 54 bp, Artificial
  Synthetic oligonucleotide
ctgcccgagtggaaaagaaacgttgaaaacggacacgtggaataccttgcgaga

SEQ ID NO: 385085 - DNA, 50 bp, Artificial
  Synthetic oligonucleotide
ctgcccgataattggatttactgtgatgccgatggtacacggttcgacag

SEQ ID NO: 385086 - DNA, 55 bp, Artificial
  Synthetic oligonucleotide
ctgcccgatcaagtattactatatgatcatgtatccttacaggtataagcgtggt

SEQ ID NO: 385087 - DNA, 60 bp, Artificial
  Synthetic oligonucleotide
ctgcccgccacaaaagatgttgcgcgatttttcctcgcgcgacattactcgagaattatg

SEQ ID NO: 385088 - DNA, 55 bp, Artificial
  Synthetic oligonucleotide
ctgcccgctgccatagttcggaatcgtgcctgccccaacgccaaatacctcgtga

SEQ ID NO: 385089 - DNA, 60 bp, Artificial
  Synthetic oligonucleotide
ctgcccggcattctctaatggaatactcaaggcctaccatgagtataaaatctcaatggt

SEQ ID NO: 385090 - DNA, 54 bp, Artificial
  Synthetic oligonucleotide
ctgcccgggatcccattcgtatcctgtcaacgcgggtaccgtggggtctggcgg

SEQ ID NO: 385091 - DNA, 51 bp, Artificial
  Synthetic oligonucleotide
ctgcccggtaaaaccgtgaaaatatttaaccattggtaacttgtctccgaa

SEQ ID NO: 385092 - DNA, 55 bp, Artificial
  Synthetic oligonucleotide
ctgccctaacactatatatgaatttgccaatgttatttggtggtggagacccaaa

SEQ ID NO: 385093 - DNA, 54 bp, Artificial
  Synthetic oligonucleotide
ctgccctaacgaactaattttgtggcttgctaaccgcagcgtttgccaagtttt

SEQ ID NO: 385094 - DNA, 55 bp, Artificial
  Synthetic oligonucleotide
ctgccctacaatgcatgttgaaaagcgccgtggcacccaagaccaagcccgtaat

SEQ ID NO: 385095 - DNA, 58 bp, Artificial
  Synthetic oligonucleotide
ctgccctcaattgcaatgacagcttacagacgggtttcctcgcttccttgttttacac

SEQ ID NO: 385096 - DNA, 60 bp, Artificial
  Synthetic oligonucleotide
ctgccctccaccgcttcaaatcagcaagatacagtgaggggggttattcttccatatgcc

SEQ ID NO: 385097 - DNA, 57 bp, Artificial
  Synthetic oligonucleotide
ctgccctcgacccgttctcacgcactacgaccataacggcagggatcgttacaagac

SEQ ID NO: 385098 - DNA, 55 bp, Artificial
  Synthetic oligonucleotide
ctgccctcgtgcgggaagaggtggcaaccccacctactgaaaaggttctgcagcc

SEQ ID NO: 385099 - DNA, 59 bp, Artificial
  Synthetic oligonucleotide
ctgccctctacatgcgccgtcgtaggggtggcaacaacattcggcccggagtagcgcga

SEQ ID NO: 385100 - DNA, 60 bp, Artificial
  Synthetic oligonucleotide
ctgccctggcgtacatgtatgacttgctggatccgaacgtgacgtttgtcatagcttcag

SEQ ID NO: 385101 - DNA, 55 bp, Artificial
  Synthetic oligonucleotide
ctgcccttacacagacccgccaatgaccaacgtaatcccagtagggaaagactgg

SEQ ID NO: 385102 - DNA, 55 bp, Artificial
  Synthetic oligonucleotide
ctgccgaagggctggagcacggagaccgctcatcgctggatgttgtcaaacgcag

SEQ ID NO: 385103 - DNA, 60 bp, Artificial
  Synthetic oligonucleotide
ctgccgacgatcgatgttcttgatgctatgtaaggccaaccctctccagaaagacatagt

SEQ ID NO: 385104 - DNA, 59 bp, Artificial
  Synthetic oligonucleotide
ctgccgacgtggtggagacaccaggcgtgttgtggcgtcatcgaatcacgaacacttgt

SEQ ID NO: 385105 - DNA, 51 bp, Artificial
  Synthetic oligonucleotide
ctgccgagggtattcagcttgactatatcggggcattacttaatgtccctc

SEQ ID NO: 385106 - DNA, 59 bp, Artificial
  Synthetic oligonucleotide
ctgccgcaaaacacatgtccctagacaagagaaagcgtctagaggtaaagggcattgac

SEQ ID NO: 385107 - DNA, 58 bp, Artificial
  Synthetic oligonucleotide
ctgccgcaaaggaactgtcttcggattgcgatttggatttgacgcatggacttttaat

SEQ ID NO: 385108 - DNA, 55 bp, Artificial
  Synthetic oligonucleotide
ctgccgcaacagcacttgctaatacaattgaagtgttcagatcaaatggtctgac

SEQ ID NO: 385109 - DNA, 51 bp, Artificial
  Synthetic oligonucleotide
ctgccgcaagttgcggaggaatggttcttgatgaatcggtaagcgttacga

SEQ ID NO: 385110 - DNA, 55 bp, Artificial
  Synthetic oligonucleotide
ctgccgcacatgtgagctgcctccggtcacattccgtagtgggaccgattgctgg

SEQ ID NO: 385111 - DNA, 53 bp, Artificial
  Synthetic oligonucleotide
ctgccgcctatttaaccatctgccaccagaggtacctgcgcacccaggcaata

SEQ ID NO: 385112 - DNA, 50 bp, Artificial
  Synthetic oligonucleotide
ctgccgcgcaggactcctcctccgggtttttaggtccgggtaaccacgcc

SEQ ID NO: 385113 - DNA, 55 bp, Artificial
  Synthetic oligonucleotide
ctgccgcgggaataaatgttggaccgatatcaccagattatactcaacatatggc

SEQ ID NO: 385114 - DNA, 53 bp, Artificial
  Synthetic oligonucleotide
ctgccgcggttaccgggagtcccctttctctcatgccaacgtgggtacaaggg

SEQ ID NO: 385115 - DNA, 60 bp, Artificial
  Synthetic oligonucleotide
ctgccgctactgatagcggacctcacgaagtactgccgtttgaggtgtgggtgtttgata

SEQ ID NO: 385116 - DNA, 55 bp, Artificial
  Synthetic oligonucleotide
ctgccgctcacagctctccatacatacgatacgttcactcgcccaagaattacgc

SEQ ID NO: 385117 - DNA, 55 bp, Artificial
  Synthetic oligonucleotide
ctgccgctgtaactaatgggccaatcaccggtgatgcatacaacttcatccgtgg

SEQ ID NO: 385118 - DNA, 55 bp, Artificial
  Synthetic oligonucleotide
ctgccgcttataagcaaatcacctggggagccatagggtgcagctaccctcgggc

SEQ ID NO: 385119 - DNA, 60 bp, Artificial
  Synthetic oligonucleotide
ctgccggaaaagcactctcgcgagattttcaacaaggcgcatggcttttccaatgctatt

SEQ ID NO: 385120 - DNA, 58 bp, Artificial
  Synthetic oligonucleotide
ctgccggagaacacctggctcaagcgtaatgacaacctggcggatgttcccaacaaag

SEQ ID NO: 385121 - DNA, 55 bp, Artificial
  Synthetic oligonucleotide
ctgccggatggatagatttcactgacggtgttttaccatcacaagctggtttagc

SEQ ID NO: 385122 - DNA, 55 bp, Artificial
  Synthetic oligonucleotide
ctgccggcaacagctgcaatttctttctacgtatcgcaagacatccgctcccgaa

SEQ ID NO: 385123 - DNA, 60 bp, Artificial
  Synthetic oligonucleotide
ctgccggccaccaaaaatgtgaacttggtgatggccaattttcagctgtcgcattagacg

SEQ ID NO: 385124 - DNA, 60 bp, Artificial
  Synthetic oligonucleotide
ctgccggtctcactcacctgatgatttggcattccaacctgaatgatgccacatatcaga

SEQ ID NO: 385125 - DNA, 55 bp, Artificial
  Synthetic oligonucleotide
ctgccgtaccaaaagatttacgtaagttagctcctattgttagtatgtactcaag

SEQ ID NO: 385126 - DNA, 57 bp, Artificial
  Synthetic oligonucleotide
ctgccgtaggggtggtgtgtgccctagttggcggaatagccaacctcggagacactc

SEQ ID NO: 385127 - DNA, 55 bp, Artificial
  Synthetic oligonucleotide
ctgccgtcctgaacccagctaccctactaccagtcgagtcggaagccaccccagt

SEQ ID NO: 385128 - DNA, 50 bp, Artificial
  Synthetic oligonucleotide
ctgccgtcgattaacgaatgttaatgggggcgcctgcccagcatttcaca

SEQ ID NO: 385129 - DNA, 55 bp, Artificial
  Synthetic oligonucleotide
ctgccgtgaaggcactagcttttggacaagccactatactccccaatgtatgagc

SEQ ID NO: 385130 - DNA, 54 bp, Artificial
  Synthetic oligonucleotide
ctgccgtgaataatacgaagagattgagacaggatttagagagaataaacacct

SEQ ID NO: 385131 - DNA, 60 bp, Artificial
  Synthetic oligonucleotide
ctgccgtgggatgatctactgagactgtgtgatcgatatccattgactgtaaagactaaa

SEQ ID NO: 385132 - DNA, 56 bp, Artificial
  Synthetic oligonucleotide
ctgccgtgtgagggggttcatccatcttttattttctgttcggacgttaatgtagc

SEQ ID NO: 385133 - DNA, 53 bp, Artificial
  Synthetic oligonucleotide
ctgccgttcaaaataaactactagagtcctggttaaggttagaataaggatcg

SEQ ID NO: 385134 - DNA, 58 bp, Artificial
  Synthetic oligonucleotide
ctgccgttccgagattgaagcagatttcgaaaatgaggatgcctgttagtaaaggacg

SEQ ID NO: 385135 - DNA, 55 bp, Artificial
  Synthetic oligonucleotide
ctgccgttccttctcttcagctgagtcctggcgtcttgaatcccggtggcaaggc

SEQ ID NO: 385136 - DNA, 55 bp, Artificial
  Synthetic oligonucleotide
ctgcctaaggtgttaagatcggaactccaggtatatttggtgaatcgtgttcttg

SEQ ID NO: 385137 - DNA, 60 bp, Artificial
  Synthetic oligonucleotide
ctgcctaagtgcattatgaacgagatagggaatatgattgcaagactcatgaagactgat

SEQ ID NO: 385138 - DNA, 59 bp, Artificial
  Synthetic oligonucleotide
ctgcctactcagcgacaaagcttcaccgcagtcgtgggttcggtgcctattaaagtgtc

SEQ ID NO: 385139 - DNA, 55 bp, Artificial
  Synthetic oligonucleotide
ctgcctagaatagtgggagtgcgaaaccacaaaattcagatagggcaaatcaatg

SEQ ID NO: 385140 - DNA, 51 bp, Artificial
  Synthetic oligonucleotide
ctgcctagcaaccccggcctttattggccatctgatagggtgagcggtccc

SEQ ID NO: 385141 - DNA, 60 bp, Artificial
  Synthetic oligonucleotide
ctgcctagctatgccgagttatttggaccatattcttcggcgtatgttaatcagcacgtg

SEQ ID NO: 385142 - DNA, 53 bp, Artificial
  Synthetic oligonucleotide
ctgcctaggatcctatgggtttctcggaaatcggggacgtttctcgaaaacac

SEQ ID NO: 385143 - DNA, 60 bp, Artificial
  Synthetic oligonucleotide
ctgcctagtattttatggacccagcgacacagggaaatcattgttttgcatgagcctatt

SEQ ID NO: 385144 - DNA, 58 bp, Artificial
  Synthetic oligonucleotide
ctgcctataaggctactaggtttactacgtcaggcaagaattctggggatataagaga

SEQ ID NO: 385145 - DNA, 51 bp, Artificial
  Synthetic oligonucleotide
ctgcctatataaggcatggttgtatgactcttacactcatcggtagttcac

SEQ ID NO: 385146 - DNA, 55 bp, Artificial
  Synthetic oligonucleotide
ctgcctatctggtcagatttaaaggaacacccatccatcttcagccgagaggaaa

SEQ ID NO: 385147 - DNA, 55 bp, Artificial
  Synthetic oligonucleotide
ctgcctatgctttgcttgcagatgacctccctccaaccataaataatggaactcc

SEQ ID NO: 385148 - DNA, 56 bp, Artificial
  Synthetic oligonucleotide
ctgcctatggaaggtaaggtggggacaacctacctgtcaaaattccaggcatatcg

SEQ ID NO: 385149 - DNA, 55 bp, Artificial
  Synthetic oligonucleotide
ctgcctatggacgcccgtttcggggacacggttcgttatgttccgctcgtgttgc

SEQ ID NO: 385150 - DNA, 54 bp, Artificial
  Synthetic oligonucleotide
ctgcctcaacctgggtaaggaaaagctacactgccagcaaaactttccgctcaa

SEQ ID NO: 385151 - DNA, 60 bp, Artificial
  Synthetic oligonucleotide
ctgcctcaggggaccctacatcaccagacaatatagagtctccaaatgcgccatgggtgt

SEQ ID NO: 385152 - DNA, 51 bp, Artificial
  Synthetic oligonucleotide
ctgcctcataggactcaatcagtagacacaggtcctcctgagtcatgcgga

SEQ ID NO: 385153 - DNA, 60 bp, Artificial
  Synthetic oligonucleotide
ctgcctcatcggacttatccgttaccgccatctctgctatgttcgcggacggagcctcac

SEQ ID NO: 385154 - DNA, 55 bp, Artificial
  Synthetic oligonucleotide
ctgcctcccgacagaccctaccccgcaatctctatatttgaacatcactgaggag

SEQ ID NO: 385155 - DNA, 58 bp, Artificial
  Synthetic oligonucleotide
ctgcctcctcggtttcggaagttcacgctgagaagctgaagaccagggctgaccctta

SEQ ID NO: 385156 - DNA, 55 bp, Artificial
  Synthetic oligonucleotide
ctgcctcctggtcttggagtcaatactatgggctgccagtgcttcagaagtgccc

SEQ ID NO: 385157 - DNA, 55 bp, Artificial
  Synthetic oligonucleotide
ctgcctcgggtgtggagtcttgcccgttgttactccatgtggaagccaacacggt

SEQ ID NO: 385158 - DNA, 60 bp, Artificial
  Synthetic oligonucleotide
ctgcctctcatgccaggcgtccctttcctctcatgccagaggggttacaggggagagtgg

SEQ ID NO: 385159 - DNA, 55 bp, Artificial
  Synthetic oligonucleotide
ctgcctcttgtgaaggacacccattctagcccagctcacgctgtccgcccagacg

SEQ ID NO: 385160 - DNA, 59 bp, Artificial
  Synthetic oligonucleotide
ctgcctgaatgttcggatggtaatgtgccgatctgcatctggaatagaggtcgaagaac

SEQ ID NO: 385161 - DNA, 55 bp, Artificial
  Synthetic oligonucleotide
ctgcctgagagtattttcttatgtgggtctaagggatccgggtcttagactcgca

SEQ ID NO: 385162 - DNA, 55 bp, Artificial
  Synthetic oligonucleotide
ctgcctgaggatgtactcccagactccttcttttcatttagacatgctgatatct

SEQ ID NO: 385163 - DNA, 59 bp, Artificial
  Synthetic oligonucleotide
ctgcctgatgatattctcagtccaccaccaactcaactcggatcacgagccttttaggg

SEQ ID NO: 385164 - DNA, 60 bp, Artificial
  Synthetic oligonucleotide
ctgcctgcaagtactcaactgagacattaacagaaaaccttgacctcagaatcaagctcg

SEQ ID NO: 385165 - DNA, 60 bp, Artificial
  Synthetic oligonucleotide
ctgcctgcttgtgtgtacggacttgctgtggccagcggatacgactttgagagagaggga

SEQ ID NO: 385166 - DNA, 51 bp, Artificial
  Synthetic oligonucleotide
ctgcctggacacacaagatccgccgttctgaagagtttgacagtcttcgca

SEQ ID NO: 385167 - DNA, 55 bp, Artificial
  Synthetic oligonucleotide
ctgcctgggatcccctttgtatcctgccaacgcgggtatagaggggtctggcggg

SEQ ID NO: 385168 - DNA, 55 bp, Artificial
  Synthetic oligonucleotide
ctgcctgtgtgcatggacttgccgtagcaagtggatacgactttgagagggaggg

SEQ ID NO: 385169 - DNA, 54 bp, Artificial
  Synthetic oligonucleotide
ctgcctgttcatcttagtgtggctggatccgtgctcttaatcgaaccaacgcga

SEQ ID NO: 385170 - DNA, 51 bp, Artificial
  Synthetic oligonucleotide
ctgcctgttcccgccggagaccttttataatccgccccggggcgtcgattt

SEQ ID NO: 385171 - DNA, 60 bp, Artificial
  Synthetic oligonucleotide
ctgcctgttggtgagatgttgaacattgtccctagaagagttgctctttccgacgttgca

SEQ ID NO: 385172 - DNA, 60 bp, Artificial
  Synthetic oligonucleotide
ctgccttactgagttgggccatcgcgcttattcatacgcaggttgtcaaggactcaccac

SEQ ID NO: 385173 - DNA, 60 bp, Artificial
  Synthetic oligonucleotide
ctgccttcagaggattgatatcaactcctttaggaagcccccctatagtcagcaatagtg

SEQ ID NO: 385174 - DNA, 55 bp, Artificial
  Synthetic oligonucleotide
ctgccttgaaatcctgattaagtccacagcactggtcgagatcgttcgcaagaac

SEQ ID NO: 385175 - DNA, 55 bp, Artificial
  Synthetic oligonucleotide
ctgccttgaagtggagaaaagatataggtttccgtgtcaatgcaaacacagcagc

SEQ ID NO: 385176 - DNA, 59 bp, Artificial
  Synthetic oligonucleotide
ctgccttgaggtgggagctcatccgcgttcgattaatgacaaccccaatgttttgcacc

SEQ ID NO: 385177 - DNA, 57 bp, Artificial
  Synthetic oligonucleotide
ctgccttgctacagtgtggctagaattcctttgcctaatttaaatgaggacttaacc

SEQ ID NO: 385178 - DNA, 56 bp, Artificial
  Synthetic oligonucleotide
ctgcctttaatcctattgactctacattaacatttgaacctactagtaatgttccc

SEQ ID NO: 385179 - DNA, 56 bp, Artificial
  Synthetic oligonucleotide
ctgcctttctgccggggacactggtttggtagtttacagccccaagcgcgaattca

SEQ ID NO: 385180 - DNA, 60 bp, Artificial
  Synthetic oligonucleotide
ctgcgaaaccacaggccgagcatcctggaaaccatcctcgtcctgggactacatcacagt

SEQ ID NO: 385181 - DNA, 55 bp, Artificial
  Synthetic oligonucleotide
ctgcgaaaccagcagtggaggcatcagagggagtggcagcaaccccagccatagt

SEQ ID NO: 385182 - DNA, 60 bp, Artificial
  Synthetic oligonucleotide
ctgcgaaactgctgtacagacaaaggggataagcactatcgtcaccaaggatatgatggc

SEQ ID NO: 385183 - DNA, 59 bp, Artificial
  Synthetic oligonucleotide
ctgcgaaagacatcttaatgagttagtatacaaaacgctagatgataaagtaatccgtg

SEQ ID NO: 385184 - DNA, 58 bp, Artificial
  Synthetic oligonucleotide
ctgcgaaaggcacacccgtcaacctcgcagtgcaccgtgacgagcagctgatcgtact

SEQ ID NO: 385185 - DNA, 55 bp, Artificial
  Synthetic oligonucleotide
ctgcgaaaggtaaagggatacttacgtacaagatttgctcctttcggctcggcta

SEQ ID NO: 385186 - DNA, 53 bp, Artificial
  Synthetic oligonucleotide
ctgcgaaagtgccaacccacgtctttcccactcctaacccgactcccacctcg

SEQ ID NO: 385187 - DNA, 60 bp, Artificial
  Synthetic oligonucleotide
ctgcgaaatatgataaccatactgagaatgctttgttgttgtatatggcatgtactcatg

SEQ ID NO: 385188 - DNA, 60 bp, Artificial
  Synthetic oligonucleotide
ctgcgaaatcaacagtggattctacgaccaccgcaagctgacatcacaccgatgcaacca

SEQ ID NO: 385189 - DNA, 55 bp, Artificial
  Synthetic oligonucleotide
ctgcgaaatgtggctttcgagatcgggaggccctcactggaacccacgagtgcta

SEQ ID NO: 385190 - DNA, 57 bp, Artificial
  Synthetic oligonucleotide
ctgcgaacaatcaggctagttacaagattttcaagtcccacaggggaatggtaacaa

SEQ ID NO: 385191 - DNA, 60 bp, Artificial
  Synthetic oligonucleotide
ctgcgaacagtcaagctagttacaagattttcaagtctcgtgagggaatggtgacaaatg

SEQ ID NO: 385192 - DNA, 52 bp, Artificial
  Synthetic oligonucleotide
ctgcgaacagttctgaagcaatagtttcaggatctttccgagtgaaagcata

SEQ ID NO: 385193 - DNA, 53 bp, Artificial
  Synthetic oligonucleotide
ctgcgaacgcagcttcagcagttgctaaattgagacagttggagaagagagac

SEQ ID NO: 385194 - DNA, 52 bp, Artificial
  Synthetic oligonucleotide
ctgcgaactccccgcgcagtcaccggtacccgcacacgtgcgcttacaatgg

SEQ ID NO: 385195 - DNA, 57 bp, Artificial
  Synthetic oligonucleotide
ctgcgaagagtacctttgttattcgcggttctgagtttgttaagcttacgaatgaga

SEQ ID NO: 385196 - DNA, 60 bp, Artificial
  Synthetic oligonucleotide
ctgcgaagcgtgtgggtatggcgttgcctaagttcatcgcactggcatctgaccgtaaca

SEQ ID NO: 385197 - DNA, 60 bp, Artificial
  Synthetic oligonucleotide
ctgcgaagtgggggttcaagcactcaaaaagtgtgatggccaactcagcactgcacatga

SEQ ID NO: 385198 - DNA, 57 bp, Artificial
  Synthetic oligonucleotide
ctgcgacaagttctaaagtctcaaaagtatgaggagtcattacatgtcctaaataag

SEQ ID NO: 385199 - DNA, 52 bp, Artificial
  Synthetic oligonucleotide
ctgcgacaccgaactgcagtgacactataataacatacaataacactgtgat

SEQ ID NO: 385200 - DNA, 55 bp, Artificial
  Synthetic oligonucleotide
ctgcgacaggaatatgcgatggaagtaccacaatctttccatcattggatcacat

SEQ ID NO: 385201 - DNA, 55 bp, Artificial
  Synthetic oligonucleotide
ctgcgacagtgacagtaaaagctggcatcattggagctgagacatgttttatcat

SEQ ID NO: 385202 - DNA, 55 bp, Artificial
  Synthetic oligonucleotide
ctgcgacctcattttaaatttacgtttaggcttgttactcctatcctcgagtcca

SEQ ID NO: 385203 - DNA, 54 bp, Artificial
  Synthetic oligonucleotide
ctgcgaccttgggggagaagcggtgggtcaggtgttaggtagactaacggtggc

SEQ ID NO: 385204 - DNA, 60 bp, Artificial
  Synthetic oligonucleotide
ctgcgacgaaaaggatcattgtccacgattactggaatgtttggtgtgtcctgtcatgcc

SEQ ID NO: 385205 - DNA, 60 bp, Artificial
  Synthetic oligonucleotide
ctgcgacgagtatgttcagcagcgtaatacatacgagacgtatgataagatcgagagcag

SEQ ID NO: 385206 - DNA, 55 bp, Artificial
  Synthetic oligonucleotide
ctgcgacgagtgctatagtgggcaggttggcaatagaagctacaatgcgcgcacg

SEQ ID NO: 385207 - DNA, 55 bp, Artificial
  Synthetic oligonucleotide
ctgcgacgcaggttccatagagtgtgtggcaatcattcccggatctctgccaatg

SEQ ID NO: 385208 - DNA, 60 bp, Artificial
  Synthetic oligonucleotide
ctgcgacgcttggacctgattgacaagctagatattgtaggtcgcaacgagttgttccac

SEQ ID NO: 385209 - DNA, 55 bp, Artificial
  Synthetic oligonucleotide
ctgcgacggggccgaatggtccgtatttcgattctgcgggtgcagcttgcgcatc

SEQ ID NO: 385210 - DNA, 50 bp, Artificial
  Synthetic oligonucleotide
ctgcgacgtcgtgctgagctccacatcggtgtgctcggacaagtacacgg

SEQ ID NO: 385211 - DNA, 59 bp, Artificial
  Synthetic oligonucleotide
ctgcgacgttagcggatctagtgccaaacataaagagttatgcaaacctcttcctccac

SEQ ID NO: 385212 - DNA, 55 bp, Artificial
  Synthetic oligonucleotide
ctgcgactcacctcgcacttacgccatcgctcttcggtggcccagatggacttcc

SEQ ID NO: 385213 - DNA, 55 bp, Artificial
  Synthetic oligonucleotide
ctgcgagatctgtggtgaagtgctgccaaagaggctcacctttgagacgacccca

SEQ ID NO: 385214 - DNA, 51 bp, Artificial
  Synthetic oligonucleotide
ctgcgagccgctttgcgtgtacttcgcgtcggggtctttggccttgtcgtc

SEQ ID NO: 385215 - DNA, 60 bp, Artificial
  Synthetic oligonucleotide
ctgcgagccggagccagacgtgagcgtcctgacatccatgctgacagacccgtcccacgt

SEQ ID NO: 385216 - DNA, 60 bp, Artificial
  Synthetic oligonucleotide
ctgcgagcgatctgtaaatcaccttacaacgtttcaatttgctcgcgaatatggcttaag

SEQ ID NO: 385217 - DNA, 57 bp, Artificial
  Synthetic oligonucleotide
ctgcgagggagtcccagtgataagtatattgaggagaacggttaaaagtaagtcaga

SEQ ID NO: 385218 - DNA, 55 bp, Artificial
  Synthetic oligonucleotide
ctgcgaggggctttaccacagaccaggaacgggaaaacatttagtagctccatag

SEQ ID NO: 385219 - DNA, 55 bp, Artificial
  Synthetic oligonucleotide
ctgcgagtctagaaggaaatactacccagtatccttcgttggcccaacgttccag

SEQ ID NO: 385220 - DNA, 55 bp, Artificial
  Synthetic oligonucleotide
ctgcgagtcttcgtgttagccactgacgctgctattagaagtttccaagaactgc

SEQ ID NO: 385221 - DNA, 54 bp, Artificial
  Synthetic oligonucleotide
ctgcgagtgtcttatcagttcgttaatagaaattcaactggacagttagcgctt

SEQ ID NO: 385222 - DNA, 60 bp, Artificial
  Synthetic oligonucleotide
ctgcgatacatcaacactgtttaatgacaatgacacagtatccaatgacactatcactct

SEQ ID NO: 385223 - DNA, 58 bp, Artificial
  Synthetic oligonucleotide
ctgcgatagatctcgagactaaggaaaaatttggagtctacgacgtgtgccttaagaa

SEQ ID NO: 385224 - DNA, 55 bp, Artificial
  Synthetic oligonucleotide
ctgcgatattctaggactacgtgatcaattttcatacatctattcctcaactggc

SEQ ID NO: 385225 - DNA, 55 bp, Artificial
  Synthetic oligonucleotide
ctgcgatgactctttcatatccgcgaagtttcacgtgaggaccggctacccccgc

SEQ ID NO: 385226 - DNA, 55 bp, Artificial
  Synthetic oligonucleotide
ctgcgatgatagctgtatggagagcattagaaacaacacctatgatcatacacaa

SEQ ID NO: 385227 - DNA, 52 bp, Artificial
  Synthetic oligonucleotide
ctgcgatgctgatgggtcacagttcgatagttcactatcgccatacttgatt

SEQ ID NO: 385228 - DNA, 55 bp, Artificial
  Synthetic oligonucleotide
ctgcgcaaagcgccagtcgtacgctatggaatgcttgcagatccgcttatcgggc

SEQ ID NO: 385229 - DNA, 55 bp, Artificial
  Synthetic oligonucleotide
ctgcgcaacttgcacctcaagctacgcattatatgtgtaacagttgtatggttgc

SEQ ID NO: 385230 - DNA, 55 bp, Artificial
  Synthetic oligonucleotide
ctgcgcaagcatcatatttggtggccattgggggatactattagccgttgcttac

SEQ ID NO: 385231 - DNA, 58 bp, Artificial
  Synthetic oligonucleotide
ctgcgcaaggcccctgccacaattggggccctacacactaaagtcgcgcgtctttgta

SEQ ID NO: 385232 - DNA, 55 bp, Artificial
  Synthetic oligonucleotide
ctgcgcaatttgagagacaggagtctggcacgttatgcttttgacttttatgaag

SEQ ID NO: 385233 - DNA, 60 bp, Artificial
  Synthetic oligonucleotide
ctgcgcacgtctgggcttgacaagattggtgaggttaacaagaatgtgtactttattcca

SEQ ID NO: 385234 - DNA, 55 bp, Artificial
  Synthetic oligonucleotide
ctgcgcactcgtctgtgaaaccgccttctccggaaaccgcgagtaacacgcctcc

SEQ ID NO: 385235 - DNA, 60 bp, Artificial
  Synthetic oligonucleotide
ctgcgcagaatgggaacaacgtgttgacattatcacagacaggaaacaactttgagttgg

SEQ ID NO: 385236 - DNA, 55 bp, Artificial
  Synthetic oligonucleotide
ctgcgcagaattcgcctgcaagaaagaagctccagggcatgtcatacggaaagag

SEQ ID NO: 385237 - DNA, 55 bp, Artificial
  Synthetic oligonucleotide
ctgcgcaggtggctttcacctctcgacagcgcccctcaatcctgccttaggtgtg

SEQ ID NO: 385238 - DNA, 60 bp, Artificial
  Synthetic oligonucleotide
ctgcgcatgcgagggaatagtgtgtttggttcctctccaatctccatcatgactagcggc

SEQ ID NO: 385239 - DNA, 51 bp, Artificial
  Synthetic oligonucleotide
ctgcgccaagcagtgaataaacttatatccttgacttgtcattgcgcttgg

SEQ ID NO: 385240 - DNA, 58 bp, Artificial
  Synthetic oligonucleotide
ctgcgccatccctacaacatccgacttttattgcaagtcaaaggtgtcgtcctggtta

SEQ ID NO: 385241 - DNA, 60 bp, Artificial
  Synthetic oligonucleotide
ctgcgccctccaaaacggctgacagtattgaatccatcgcgctcgggcaagcacagcttg

SEQ ID NO: 385242 - DNA, 55 bp, Artificial
  Synthetic oligonucleotide
ctgcgccggcagtacaatttgtctacatctccgctcacgtcatctgttgcctctg

SEQ ID NO: 385243 - DNA, 60 bp, Artificial
  Synthetic oligonucleotide
ctgcgcctcgcatattgatcttaaatcaacatacagtaacgcaagatgtgactgctgggc

SEQ ID NO: 385244 - DNA, 55 bp, Artificial
  Synthetic oligonucleotide
ctgcgccttacgggacgcctctatctcttaaggtccttcatggtgacccttgaac

SEQ ID NO: 385245 - DNA, 60 bp, Artificial
  Synthetic oligonucleotide
ctgcgcgaaaatcaggcagctcatacccacttctgagctccacagacatcaacccgacga

SEQ ID NO: 385246 - DNA, 60 bp, Artificial
  Synthetic oligonucleotide
ctgcgcgaactagcgcgatatcagaagaatcgcacggagaacattaggagcggatctata

SEQ ID NO: 385247 - DNA, 55 bp, Artificial
  Synthetic oligonucleotide
ctgcgcgactatagcactccagaggtagatagcactctggatgagttctatagtg

SEQ ID NO: 385248 - DNA, 60 bp, Artificial
  Synthetic oligonucleotide
ctgcgcgtatacaagatggttcggctcacaatactactagaattggtacgacaaccatac

SEQ ID NO: 385249 - DNA, 60 bp, Artificial
  Synthetic oligonucleotide
ctgcgcgtcatgaagagcgcatgtgtcggctgagaagactcttgcaaagttccgattacg

SEQ ID NO: 385250 - DNA, 60 bp, Artificial
  Synthetic oligonucleotide
ctgcgcgttagcgcggaagatggtcggaggccattacgtgcaaatggttatcatcaagtt

SEQ ID NO: 385251 - DNA, 55 bp, Artificial
  Synthetic oligonucleotide
ctgcgctaccatactggctaagaacgcaattaatgttcgcatgccaagggatgag

SEQ ID NO: 385252 - DNA, 60 bp, Artificial
  Synthetic oligonucleotide
ctgcgctgctctctccacaccaattctggagtcttgctcttcggaattcaaaattccgaa

SEQ ID NO: 385253 - DNA, 55 bp, Artificial
  Synthetic oligonucleotide
ctgcgctggccgctttggaggataccgtcgactaccctgctcgtgctcatacttt

SEQ ID NO: 385254 - DNA, 55 bp, Artificial
  Synthetic oligonucleotide
ctgcggaaggtcaaaagagttgtagctagcttaatgagaggactgtcttccagga

SEQ ID NO: 385255 - DNA, 55 bp, Artificial
  Synthetic oligonucleotide
ctgcggaagtgatgacgcctagtgaaggatacacacagcatgtcgacgcagagag

SEQ ID NO: 385256 - DNA, 55 bp, Artificial
  Synthetic oligonucleotide
ctgcggacacactcagggcggcagaaactttgctctcaggagcgatgactacccc

SEQ ID NO: 385257 - DNA, 55 bp, Artificial
  Synthetic oligonucleotide
ctgcggactttaacctatacatgataccgtttagcatgatttctggtgatacgtc

SEQ ID NO: 385258 - DNA, 55 bp, Artificial
  Synthetic oligonucleotide
ctgcggagagtgcagtctgcgaaagtgccccaggtggactgggttaacaaaggca

SEQ ID NO: 385259 - DNA, 52 bp, Artificial
  Synthetic oligonucleotide
ctgcggagcaagtactcacaatccagtgggcagcttgtcgtaacgggtaact

SEQ ID NO: 385260 - DNA, 60 bp, Artificial
  Synthetic oligonucleotide
ctgcggagcgcctccttgtgccatcggaggagtgggcaacaacaccttgcactgccccac

SEQ ID NO: 385261 - DNA, 60 bp, Artificial
  Synthetic oligonucleotide
ctgcggaggaccttctaatcatttcccgctcaccctatacatgaattcctcagagatcgt

SEQ ID NO: 385262 - DNA, 60 bp, Artificial
  Synthetic oligonucleotide
ctgcggaggactcaatcaatgggaatacagcttgaccaaagaattatcttattgtatatg

SEQ ID NO: 385263 - DNA, 55 bp, Artificial
  Synthetic oligonucleotide
ctgcggaggagcacgacccgttggacgacattaacgggtttgtgaaattgccgag

SEQ ID NO: 385264 - DNA, 60 bp, Artificial
  Synthetic oligonucleotide
ctgcggaggatgtatgagatgttgaggtacaatgaggaaacagacttgattgtgaagatg

SEQ ID NO: 385265 - DNA, 57 bp, Artificial
  Synthetic oligonucleotide
ctgcggaggtaaaaatgccaggacggaaagccgttacattccttggcccacatcatc

SEQ ID NO: 385266 - DNA, 59 bp, Artificial
  Synthetic oligonucleotide
ctgcggaggtggacgaggtagatgcaggggtttctaattctattgaatgggtaaatgca

SEQ ID NO: 385267 - DNA, 54 bp, Artificial
  Synthetic oligonucleotide
ctgcggatatgtgaggaaatagtttttggctttaactgagaaagaaccctttcg

SEQ ID NO: 385268 - DNA, 53 bp, Artificial
  Synthetic oligonucleotide
ctgcggccaataaccagggtcaatacactattggcaattccatgtatttccca

SEQ ID NO: 385269 - DNA, 55 bp, Artificial
  Synthetic oligonucleotide
ctgcggccgttacgttatccatcatgacagaggtgctatcgtatatgttgatcct

SEQ ID NO: 385270 - DNA, 55 bp, Artificial
  Synthetic oligonucleotide
ctgcggcctgctgaccgaacacgccgcgcaccgatcgaaccagtcgtttgatatc

SEQ ID NO: 385271 - DNA, 60 bp, Artificial
  Synthetic oligonucleotide
ctgcggcgaaaagagaagagtggagcgcatgcgaaagctgctgagagaggaaagcgtaaa

SEQ ID NO: 385272 - DNA, 55 bp, Artificial
  Synthetic oligonucleotide
ctgcggcgattgacggaatagttcaaggtagcgttcactcaatcatgactgggga

SEQ ID NO: 385273 - DNA, 59 bp, Artificial
  Synthetic oligonucleotide
ctgcggctagcttcatacatccgtttagccaaccacaaacgaacaacatttgcacaacc

SEQ ID NO: 385274 - DNA, 55 bp, Artificial
  Synthetic oligonucleotide
ctgcgggaccctgtaatacgtcagtccctacatgccacctatttgagatgtgggc

SEQ ID NO: 385275 - DNA, 54 bp, Artificial
  Synthetic oligonucleotide
ctgcgggctttcacctagaccccagagtgctcgtctttgatgagtcagtgccct

SEQ ID NO: 385276 - DNA, 58 bp, Artificial
  Synthetic oligonucleotide
ctgcgggggcggtgtcttcgtctgcggaaacgccttcttggatacgtcatagctgaaa

SEQ ID NO: 385277 - DNA, 57 bp, Artificial
  Synthetic oligonucleotide
ctgcgggggcggtgtcttctactccggtaacgcctccttggatacgtcatatctgaa

SEQ ID NO: 385278 - DNA, 52 bp, Artificial
  Synthetic oligonucleotide
ctgcggggtctcctgacaagtagatggctgtgaattcttcatgaagctctcc

SEQ ID NO: 385279 - DNA, 55 bp, Artificial
  Synthetic oligonucleotide
ctgcgggtgggccaaccaacgatttgcatttcacgggttgcctccaacaagcccc

SEQ ID NO: 385280 - DNA, 55 bp, Artificial
  Synthetic oligonucleotide
ctgcgggtttggtacgtcggcagcacgacgaactacgaaatcggccgagtcactt

SEQ ID NO: 385281 - DNA, 60 bp, Artificial
  Synthetic oligonucleotide
ctgcggtaagataccatccttctagaagacataaatatatagtaataagaggcatagaac

SEQ ID NO: 385282 - DNA, 58 bp, Artificial
  Synthetic oligonucleotide
ctgcggtatacccaggttgacaaatgttcggcacccacatctgtcgaccaggacgaac

SEQ ID NO: 385283 - DNA, 60 bp, Artificial
  Synthetic oligonucleotide
ctgcggtatgacatcgaggtcttggacgagaatcatcagataatcaatcatgcacttcaa

SEQ ID NO: 385284 - DNA, 53 bp, Artificial
  Synthetic oligonucleotide
ctgcggtccgaaaagaggaagactcaaacttaccgtctggaaagaaaccatcg

SEQ ID NO: 385285 - DNA, 59 bp, Artificial
  Synthetic oligonucleotide
ctgcggtctagttgctaggtggcgcttagcaacctacttagcaacctcaggtagaggaa

SEQ ID NO: 385286 - DNA, 55 bp, Artificial
  Synthetic oligonucleotide
ctgcggtctgtgcaatggcagacgcagggctagagtttgtcgcggttatccatga

SEQ ID NO: 385287 - DNA, 60 bp, Artificial
  Synthetic oligonucleotide
ctgcggtgcagatcgccttaaacaaccgcgaaattatggaagcagttgagcatttaccat

SEQ ID NO: 385288 - DNA, 55 bp, Artificial
  Synthetic oligonucleotide
ctgcggtgtgtgaatctgtacttgctgacgcgagcgaaacaatgctagctaatgt

SEQ ID NO: 385289 - DNA, 60 bp, Artificial
  Synthetic oligonucleotide
ctgcggttccatacaggtccacaggaacttcgtgaaacatgggtcaagtgctggctacag

SEQ ID NO: 385290 - DNA, 53 bp, Artificial
  Synthetic oligonucleotide
ctgcggttctaggtttgaaacatctgatagaatgcgactacatagggaatcgg

SEQ ID NO: 385291 - DNA, 60 bp, Artificial
  Synthetic oligonucleotide
ctgcggttggttctcaatcgcaaatgtgcgtcgtcagcacgactgacagtgttactgttg

SEQ ID NO: 385292 - DNA, 55 bp, Artificial
  Synthetic oligonucleotide
ctgcggtttgtgaatctgtgcttgcggacgcttctgaaactttgttggcaaatgt

SEQ ID NO: 385293 - DNA, 55 bp, Artificial
  Synthetic oligonucleotide
ctgcgtaaataccgtcgaaaaaggtacgaacacatcaccactacctggtggacag

SEQ ID NO: 385294 - DNA, 55 bp, Artificial
  Synthetic oligonucleotide
ctgcgtaacaaacgtaccaccatcgccttactcagtcgagaagttcaagccagac

SEQ ID NO: 385295 - DNA, 55 bp, Artificial
  Synthetic oligonucleotide
ctgcgtaacgtttccccactgtaagcataatatgtacttagccccaaccacacgt

SEQ ID NO: 385296 - DNA, 55 bp, Artificial
  Synthetic oligonucleotide
ctgcgtaactttagattgtgtccaggctactttgagcaacttaacctatgtctcc

SEQ ID NO: 385297 - DNA, 60 bp, Artificial
  Synthetic oligonucleotide
ctgcgtaagctaagccaaccctactacacacaaggaccatcaggtcatgtacgtgtgagc

SEQ ID NO: 385298 - DNA, 60 bp, Artificial
  Synthetic oligonucleotide
ctgcgtaccatgtgcgagacttttgatttaacatcgtgccagcgtcaaaggctaacgcta

SEQ ID NO: 385299 - DNA, 57 bp, Artificial
  Synthetic oligonucleotide
ctgcgtacttggaaagtttttatggctggatacctggttgctccttcatggacttta

SEQ ID NO: 385300 - DNA, 60 bp, Artificial
  Synthetic oligonucleotide
ctgcgtatacttctatgaactatatctccaatacagggcaaggccgtataaagcattcac

SEQ ID NO: 385301 - DNA, 55 bp, Artificial
  Synthetic oligonucleotide
ctgcgtatgaaacaggcctaaggataagctctgtagtacaaggcgacaatgaagc

SEQ ID NO: 385302 - DNA, 57 bp, Artificial
  Synthetic oligonucleotide
ctgcgtcacgcctcacgtaaagctgtgcgtccacgccgaaaagatgtccaggctcgt

SEQ ID NO: 385303 - DNA, 55 bp, Artificial
  Synthetic oligonucleotide
ctgcgtcagattacagccacaagttatttcaactaccaacaaaatatgcggatag

SEQ ID NO: 385304 - DNA, 52 bp, Artificial
  Synthetic oligonucleotide
ctgcgtccaatcaatgaaatcacccttgatactcctatggagtataatcccc

SEQ ID NO: 385305 - DNA, 50 bp, Artificial
  Synthetic oligonucleotide
ctgcgtcccaggacgttggatgccggggaagactgctggtgttttgccac

SEQ ID NO: 385306 - DNA, 55 bp, Artificial
  Synthetic oligonucleotide
ctgcgtcccgccaggcagaggttatcgctcccgctgtccagaccaactggcaaaa

SEQ ID NO: 385307 - DNA, 55 bp, Artificial
  Synthetic oligonucleotide
ctgcgtcgttacaggttgctttagatactaacaacatactgccatatactccagc

SEQ ID NO: 385308 - DNA, 52 bp, Artificial
  Synthetic oligonucleotide
ctgcgtgaccaagcggatgcctcgccggtagtcgctcaggccgtagggtcaa

SEQ ID NO: 385309 - DNA, 55 bp, Artificial
  Synthetic oligonucleotide
ctgcgtgaccttagatgatggaactccagcaacaagtgaattgaaaacacccacc

SEQ ID NO: 385310 - DNA, 55 bp, Artificial
  Synthetic oligonucleotide
ctgcgtgacgtcggagaaagtctcttgctatatcaacgatcagctcatttataac

SEQ ID NO: 385311 - DNA, 55 bp, Artificial
  Synthetic oligonucleotide
ctgcgtgattgcctcaagtgcactgttatggatggccagtgtggaaccccattgg

SEQ ID NO: 385312 - DNA, 57 bp, Artificial
  Synthetic oligonucleotide
ctgcgtgccaaggtatctttacgtcaacctcgctgttgttccttgtgactgtacctt

SEQ ID NO: 385313 - DNA, 51 bp, Artificial
  Synthetic oligonucleotide
ctgcgtggaccccgccaaggggggtaagaaaccagctcgcctcatcgttta

SEQ ID NO: 385314 - DNA, 60 bp, Artificial
  Synthetic oligonucleotide
ctgcgtggctgcctgctcaccctttttgggtgagaagcctaattattgacaaggtgtgaa

SEQ ID NO: 385315 - DNA, 55 bp, Artificial
  Synthetic oligonucleotide
ctgcgtgtagtttgtacgcgtgtgcgcgttaacgggccctgtctcgtggaacggg

SEQ ID NO: 385316 - DNA, 55 bp, Artificial
  Synthetic oligonucleotide
ctgcgttaaggctatcgatcgaaccgttggggaagtggctacgcaggaagtccgg

SEQ ID NO: 385317 - DNA, 60 bp, Artificial
  Synthetic oligonucleotide
ctgcgttaatttgcttcgtcattaggctgacgaaaaattgcatgtcctggcgttactcat

SEQ ID NO: 385318 - DNA, 55 bp, Artificial
  Synthetic oligonucleotide
ctgcgttacggtagtgagtttacgtgtgttaggtctaagcagagtgggagcttgt

SEQ ID NO: 385319 - DNA, 60 bp, Artificial
  Synthetic oligonucleotide
ctgcgttagcagctgagtaatatgggaagctatggcaacaaccaacaaagctcaaagtga

SEQ ID NO: 385320 - DNA, 55 bp, Artificial
  Synthetic oligonucleotide
ctgcgttcatccctccggtgatggcatcaagttcttcgattccggtcttcagggt

SEQ ID NO: 385321 - DNA, 54 bp, Artificial
  Synthetic oligonucleotide
ctgcgttgacaaattacactacggagacaagcgctcaattcacttcgtcacaaa

SEQ ID NO: 385322 - DNA, 52 bp, Artificial
  Synthetic oligonucleotide
ctgcgttgcactccaaacttacgcttatgtgtacgcgggaaccgatggactg

SEQ ID NO: 385323 - DNA, 60 bp, Artificial
  Synthetic oligonucleotide
ctgcgttgccttatgaggtcatctcgaatgttctagacgtgtttcgaggtcgaatagcgg

SEQ ID NO: 385324 - DNA, 55 bp, Artificial
  Synthetic oligonucleotide
ctgcgttgtccagttcctttgaggttcctgcggacgtacttacgtctctaaggaa

SEQ ID NO: 385325 - DNA, 56 bp, Artificial
  Synthetic oligonucleotide
ctgcgtttaacacccgcaggcagccgcttttcgcataccttcgaccgaagggagag

SEQ ID NO: 385326 - DNA, 51 bp, Artificial
  Synthetic oligonucleotide
ctgcgtttacatcattgctgtgccctttacaagaggaatatcagatattgc

SEQ ID NO: 385327 - DNA, 57 bp, Artificial
  Synthetic oligonucleotide
ctgcgtttataacggttcgcctggtgaaaaaactgaatcttggtctattcgcgctca

SEQ ID NO: 385328 - DNA, 56 bp, Artificial
  Synthetic oligonucleotide
ctgcgtttgacccatcttatccgcccatgtgctaccttatggaggcatgtattcat

SEQ ID NO: 385329 - DNA, 60 bp, Artificial
  Synthetic oligonucleotide
ctgcgttttaaactcacaaagggcaagaaagcttgctacgctggagatgacttggcgcgc

SEQ ID NO: 385330 - DNA, 54 bp, Artificial
  Synthetic oligonucleotide
ctgcgttttaagggaactcttaagattgaacgtgtagaaaccgacattaacatg

SEQ ID NO: 385331 - DNA, 59 bp, Artificial
  Synthetic oligonucleotide
ctgctaaagactcttaagaaacgcgaggtctgaggatgtaaatgagtccagatccggaa

SEQ ID NO: 385332 - DNA, 54 bp, Artificial
  Synthetic oligonucleotide
ctgctaaataccatcaagaagattggggttttttagcacaggaaaaaggggcat

SEQ ID NO: 385333 - DNA, 55 bp, Artificial
  Synthetic oligonucleotide
ctgctaaatcgtctaaatcgcttctattaacacgcgactggcgattgacctctgc

SEQ ID NO: 385334 - DNA, 55 bp, Artificial
  Synthetic oligonucleotide
ctgctaactggttgggtggaacttatagtcgtccgtggaaagttgaaactcgtga

SEQ ID NO: 385335 - DNA, 60 bp, Artificial
  Synthetic oligonucleotide
ctgctaagagctcacggaatccaggccctctgccccatcgaatcaattggccaggaatac

SEQ ID NO: 385336 - DNA, 60 bp, Artificial
  Synthetic oligonucleotide
ctgctaaggcaacccgccagcagcctagcattgaaatagaagctagcctcagggaagccg

SEQ ID NO: 385337 - DNA, 60 bp, Artificial
  Synthetic oligonucleotide
ctgctaagtatgaaaatcatactgagaatgctttgctattgtatatggcatgtactcatg

SEQ ID NO: 385338 - DNA, 55 bp, Artificial
  Synthetic oligonucleotide
ctgctaagtttaggagatttacacaagcaatatatgatggcttatcagacaacaa

SEQ ID NO: 385339 - DNA, 57 bp, Artificial
  Synthetic oligonucleotide
ctgctaattcagaatgctaacccagattgcaagttagtacttaagggcttaggaatg

SEQ ID NO: 385340 - DNA, 55 bp, Artificial
  Synthetic oligonucleotide
ctgctacaaagggtaataatgacggaacaatcgtagtgcctgacactttgaaaga

SEQ ID NO: 385341 - DNA, 54 bp, Artificial
  Synthetic oligonucleotide
ctgctacaacgaacgtccggtaccttccactcctcctgtggaggagccccaagg

SEQ ID NO: 385342 - DNA, 59 bp, Artificial
  Synthetic oligonucleotide
ctgctacaactacggactactagatactgtatatacacagacaggacaagagatagcca

SEQ ID NO: 385343 - DNA, 56 bp, Artificial
  Synthetic oligonucleotide
ctgctacacaggaaaagataaagtgtgaaatagacacattacatgatctctcttgc

SEQ ID NO: 385344 - DNA, 60 bp, Artificial
  Synthetic oligonucleotide
ctgctacacctgtggtgcgcttgcgctgtagttactgtgacttctatggctgggtccccc

SEQ ID NO: 385345 - DNA, 56 bp, Artificial
  Synthetic oligonucleotide
ctgctacatatatatcaatacatggtgctgtctttgccacacatttcttatcgcat

SEQ ID NO: 385346 - DNA, 55 bp, Artificial
  Synthetic oligonucleotide
ctgctaccattcctctatattttcctggaattggtttatatctcggctttgcaat

SEQ ID NO: 385347 - DNA, 58 bp, Artificial
  Synthetic oligonucleotide
ctgctaccctcacacagcaggtattggggtgcgactcccccgtctattccggacgtca

SEQ ID NO: 385348 - DNA, 58 bp, Artificial
  Synthetic oligonucleotide
ctgctaccggtggtgcagacgaaaaagggctttattacaccactatgcacggtgacaa

SEQ ID NO: 385349 - DNA, 59 bp, Artificial
  Synthetic oligonucleotide
ctgctacctatgattattgttcgtgaaggattggatcacccggatcggtgggaatggct

SEQ ID NO: 385350 - DNA, 60 bp, Artificial
  Synthetic oligonucleotide
ctgctactatgagtctgagtagtcgttcttacgagttgatacaagagtttcgaaaatcca

SEQ ID NO: 385351 - DNA, 60 bp, Artificial
  Synthetic oligonucleotide
ctgctactcaagctggtgcccagagcccagctgacttctcaaatcctaatacagctcctt

SEQ ID NO: 385352 - DNA, 55 bp, Artificial
  Synthetic oligonucleotide
ctgctactgcatgtagtgacggacccggttggctaacactagggatcactggccc

SEQ ID NO: 385353 - DNA, 55 bp, Artificial
  Synthetic oligonucleotide
ctgctactggcgttgctagtactaccttaactaagtcaatgaacttccttgcaaa

SEQ ID NO: 385354 - DNA, 60 bp, Artificial
  Synthetic oligonucleotide
ctgctagaaacctatgaaggatgccaaactatcatagagaccttagctccattagaacca

SEQ ID NO: 385355 - DNA, 55 bp, Artificial
  Synthetic oligonucleotide
ctgctagacgtggaggaaatgacggaacaatcgtagtgcctgacactttgaaaga

SEQ ID NO: 385356 - DNA, 59 bp, Artificial
  Synthetic oligonucleotide
ctgctagacttggagagcgaacgtgagaaccttatgaaagggttaatggacaagcgaga

SEQ ID NO: 385357 - DNA, 55 bp, Artificial
  Synthetic oligonucleotide
ctgctagccttgaggtcatcaggccctaaagtcaatatagtaacagactctcaat

SEQ ID NO: 385358 - DNA, 55 bp, Artificial
  Synthetic oligonucleotide
ctgctagctgttctgttcgtcatgtttctgagcttgatcggattgctggcaattg

SEQ ID NO: 385359 - DNA, 55 bp, Artificial
  Synthetic oligonucleotide
ctgctaggtcttaccaaagaatccagatctttccagacacaatctggaatgtgtc

SEQ ID NO: 385360 - DNA, 57 bp, Artificial
  Synthetic oligonucleotide
ctgctagtaagaaacaaaccacaggtttcaatattatagcagctacttcttagtttg

SEQ ID NO: 385361 - DNA, 55 bp, Artificial
  Synthetic oligonucleotide
ctgctagtgtacacatggtagtggtttgccctcccagagatagttgtgcagctca

SEQ ID NO: 385362 - DNA, 50 bp, Artificial
  Synthetic oligonucleotide
ctgctagttatgagtagatatcaagaactcatgaccttacgggtgcgaag

SEQ ID NO: 385363 - DNA, 50 bp, Artificial
  Synthetic oligonucleotide
ctgctataagaaatgccatagtaggacgtatagttagacctaggtgtgat

SEQ ID NO: 385364 - DNA, 60 bp, Artificial
  Synthetic oligonucleotide
ctgctataagacatgccatactaggaagaatagttagtcctagttgtgaatatcacgcag

SEQ ID NO: 385365 - DNA, 59 bp, Artificial
  Synthetic oligonucleotide
ctgctataagacatgcccttttaggacgtgtagttagtcccagttgtgattatcaagta

SEQ ID NO: 385366 - DNA, 55 bp, Artificial
  Synthetic oligonucleotide
ctgctatagccccttcatacattggtgttactatcaagggtgataaagtgtcctc

SEQ ID NO: 385367 - DNA, 60 bp, Artificial
  Synthetic oligonucleotide
ctgctatcatttaactggtgctgacataatacgtgacatctgtattattcagtctgcaag

SEQ ID NO: 385368 - DNA, 60 bp, Artificial
  Synthetic oligonucleotide
ctgctatccatatgatgtaccagactatgcatcactcaggtctctagttgcttcctcagg

SEQ ID NO: 385369 - DNA, 55 bp, Artificial
  Synthetic oligonucleotide
ctgctatcccccaccacttcccccaacaccaagaacccaactctcatggacggtc

SEQ ID NO: 385370 - DNA, 55 bp, Artificial
  Synthetic oligonucleotide
ctgctatcggatgcctacctctgagtcaagcagataagtcttcactactcatgag

SEQ ID NO: 385371 - DNA, 55 bp, Artificial
  Synthetic oligonucleotide
ctgctatcttagacatggcacacttaccgcacccttcgacagcgtacatcaaagg

SEQ ID NO: 385372 - DNA, 51 bp, Artificial
  Synthetic oligonucleotide
ctgctatgagttccgtgacctcaaggttgcggcatttaaaggggatgactc

SEQ ID NO: 385373 - DNA, 60 bp, Artificial
  Synthetic oligonucleotide
ctgctatgattgtcagaatggtgtaaaaatttcagtcacctatgagtcatctgacagttg

SEQ ID NO: 385374 - DNA, 60 bp, Artificial
  Synthetic oligonucleotide
ctgctatggagatgataggctcttagcctacaatccatcctttgtcaactatgatcctca

SEQ ID NO: 385375 - DNA, 57 bp, Artificial
  Synthetic oligonucleotide
ctgctatggccgaagagttcacagagtgaacggtctgttcaaccccgataccccctg

SEQ ID NO: 385376 - DNA, 50 bp, Artificial
  Synthetic oligonucleotide
ctgctatgtattctggaaaaggtccactgaatgacttacgagttaaaatt

SEQ ID NO: 385377 - DNA, 55 bp, Artificial
  Synthetic oligonucleotide
ctgctattactctcggttccggtcttgttatgagtgccggaggtcaattgagcgt

SEQ ID NO: 385378 - DNA, 51 bp, Artificial
  Synthetic oligonucleotide
ctgctattattaatacaggtcccagagaacaaggcggaatacactggataa

SEQ ID NO: 385379 - DNA, 55 bp, Artificial
  Synthetic oligonucleotide
ctgctatttcgtacggcggacacgctaacgatcttgtgtacggcatgggtagcgc

SEQ ID NO: 385380 - DNA, 53 bp, Artificial
  Synthetic oligonucleotide
ctgctatttgcttcaggataaagaaaagattaggagtcttcttagccatttat

SEQ ID NO: 385381 - DNA, 59 bp, Artificial
  Synthetic oligonucleotide
ctgctatttggacctttattgcacaggaagatagtgggaattccacctttaatcatgac

SEQ ID NO: 385382 - DNA, 55 bp, Artificial
  Synthetic oligonucleotide
ctgctcaaaagggaaaaggacaattgacctcggtcaatgcggacttctggggaca

SEQ ID NO: 385383 - DNA, 55 bp, Artificial
  Synthetic oligonucleotide
ctgctcaacaagaaccacactgaaatgcccgggacggaacgcgttctgagcgccg

SEQ ID NO: 385384 - DNA, 60 bp, Artificial
  Synthetic oligonucleotide
ctgctcacatcttttctcataacgtgtttcattctcctttcgaggagattcattcatttc

SEQ ID NO: 385385 - DNA, 56 bp, Artificial
  Synthetic oligonucleotide
ctgctcacccccttaccttcctatgcacctgattcgacctctgggcctgccgagac

SEQ ID NO: 385386 - DNA, 60 bp, Artificial
  Synthetic oligonucleotide
ctgctcacctgccggtccgtgtgcacttcgcttcacctctgcacgtcgcatggagaccac

SEQ ID NO: 385387 - DNA, 60 bp, Artificial
  Synthetic oligonucleotide
ctgctcagattaaagccagacagatggtaagcccagtcatgagtgtaattggattccttg

SEQ ID NO: 385388 - DNA, 60 bp, Artificial
  Synthetic oligonucleotide
ctgctcaggaatcgctgccaacttagggagagctgtatatggaagacatgaaggttggtc

SEQ ID NO: 385389 - DNA, 55 bp, Artificial
  Synthetic oligonucleotide
ctgctcagggcccactacaatcagaggtcaattctcaaacatgtcgctgtccctg

SEQ ID NO: 385390 - DNA, 55 bp, Artificial
  Synthetic oligonucleotide
ctgctcatacaaagaatcgcggcactattataccaaacaatcatactagggagat

SEQ ID NO: 385391 - DNA, 60 bp, Artificial
  Synthetic oligonucleotide
ctgctcatgtggcttttacaaacaacctggcatcccaactcaatggaagagatagtccga

SEQ ID NO: 385392 - DNA, 60 bp, Artificial
  Synthetic oligonucleotide
ctgctcattaaaccactccgcccagattagaccgggtaatcgcagtctattcgtcatgcc

SEQ ID NO: 385393 - DNA, 60 bp, Artificial
  Synthetic oligonucleotide
ctgctccaaaacagccaagtattcagcctcattagaccaaatgagaatccagcacataag

SEQ ID NO: 385394 - DNA, 58 bp, Artificial
  Synthetic oligonucleotide
ctgctccaagttgatcccgcaacaatgtcccgcgttctacgagggaagacggagccaa

SEQ ID NO: 385395 - DNA, 60 bp, Artificial
  Synthetic oligonucleotide
ctgctccactcggctgaacttcgctgtgagcacaagctctaaatcaatccttatcttcga

SEQ ID NO: 385396 - DNA, 60 bp, Artificial
  Synthetic oligonucleotide
ctgctccatgatatgctacggggatgacagacttctttccatccgtaaagggtttgttga

SEQ ID NO: 385397 - DNA, 55 bp, Artificial
  Synthetic oligonucleotide
ctgctcccaggttatatagtagggcttttcagcaggttagggtcactgacccagc

SEQ ID NO: 385398 - DNA, 51 bp, Artificial
  Synthetic oligonucleotide
ctgctcccgaattacacccatttaacgtttatcttaggatttacgctgaat

SEQ ID NO: 385399 - DNA, 60 bp, Artificial
  Synthetic oligonucleotide
ctgctccgtggacgatatgctatggacacactgggccagaagtcaagccaggtctggtag

SEQ ID NO: 385400 - DNA, 55 bp, Artificial
  Synthetic oligonucleotide
ctgctcctcccaatagtcatgtacttatttctgcctataatttacgtgtcacgcc

SEQ ID NO: 385401 - DNA, 55 bp, Artificial
  Synthetic oligonucleotide
ctgctcctctacttcaggcttcaatgttgtcagcacaggtgagccaccattcctg

SEQ ID NO: 385402 - DNA, 60 bp, Artificial
  Synthetic oligonucleotide
ctgctccttcctggcagcgtgcaatgctactgaaaatctagatctgctggatccattaat

SEQ ID NO: 385403 - DNA, 58 bp, Artificial
  Synthetic oligonucleotide
ctgctcctttctacattctcgaaaatgcaaaccatgaggtgttacgtactggggagga

SEQ ID NO: 385404 - DNA, 55 bp, Artificial
  Synthetic oligonucleotide
ctgctcgaagacaaccataatgggaaactctgcagcctgaacgggatagctcccc

SEQ ID NO: 385405 - DNA, 55 bp, Artificial
  Synthetic oligonucleotide
ctgctcgatacgacctgaagtgagggcgtactgttcgtttactgattcccgcatg

SEQ ID NO: 385406 - DNA, 55 bp, Artificial
  Synthetic oligonucleotide
ctgctcgcaacatgtttggcactggttggccttcgtcctaggttttttggttcca

SEQ ID NO: 385407 - DNA, 55 bp, Artificial
  Synthetic oligonucleotide
ctgctcgctcctacaaaagactcctgctctttccagaccgcacttggaatgtgac

SEQ ID NO: 385408 - DNA, 55 bp, Artificial
  Synthetic oligonucleotide
ctgctcggaaagagtcttgtacactgcactatctagagcggttgacagcattcac

SEQ ID NO: 385409 - DNA, 55 bp, Artificial
  Synthetic oligonucleotide
ctgctcggggcttatccggtcctgtcctttctgcgctgtgttgctacgcgcatcg

SEQ ID NO: 385410 - DNA, 55 bp, Artificial
  Synthetic oligonucleotide
ctgctcgtctcgactacggtcaccccagagcaggtagcttccgtcatccatgggg

SEQ ID NO: 385411 - DNA, 59 bp, Artificial
  Synthetic oligonucleotide
ctgctcgttttactggagaatgaaagaactctggactttcatgattccaatgtgaggaa

SEQ ID NO: 385412 - DNA, 60 bp, Artificial
  Synthetic oligonucleotide
ctgctctcaatgtcatcagcgtcaaatggtgagtcacgacaattgaaattcggtcgaaag

SEQ ID NO: 385413 - DNA, 55 bp, Artificial
  Synthetic oligonucleotide
ctgctctgcctgttctgaaactgccttgtcagactcaaagatctcaaaatgttct

SEQ ID NO: 385414 - DNA, 60 bp, Artificial
  Synthetic oligonucleotide
ctgctctgcggaaagcgggtatcgatctcaatacccagcgactaaatcaagatcttgcgt

SEQ ID NO: 385415 - DNA, 58 bp, Artificial
  Synthetic oligonucleotide
ctgctctggaacccaatgggattgcgtataagggccaccttaagaaagtggtgctgga

SEQ ID NO: 385416 - DNA, 55 bp, Artificial
  Synthetic oligonucleotide
ctgctctgtattgctttgcgtacaatttaccagtcatgtctagtggcgtctccac

SEQ ID NO: 385417 - DNA, 60 bp, Artificial
  Synthetic oligonucleotide
ctgctctgtcatccctctcgcccgctcactgtggaagtcccgccaagacacgccacagga

SEQ ID NO: 385418 - DNA, 60 bp, Artificial
  Synthetic oligonucleotide
ctgctcttactgttgatgctgcctaatgcgcactgttctacccgtatagatttgagcaca

SEQ ID NO: 385419 - DNA, 55 bp, Artificial
  Synthetic oligonucleotide
ctgctcttagaacgaaggcatggtttgtgagaaacttactcttcatagtttatac

SEQ ID NO: 385420 - DNA, 56 bp, Artificial
  Synthetic oligonucleotide
ctgctcttattacattataaattccaactacacccagcatatttaggtaccgaagg

SEQ ID NO: 385421 - DNA, 55 bp, Artificial
  Synthetic oligonucleotide
ctgctcttattgtaaggacaaattgtcgtggttttgtattacgcgctccaattcc

SEQ ID NO: 385422 - DNA, 60 bp, Artificial
  Synthetic oligonucleotide
ctgctcttcgtgcacaaggtgcacagattgacacccctttcagctcgttttactggctct

SEQ ID NO: 385423 - DNA, 60 bp, Artificial
  Synthetic oligonucleotide
ctgctcttgagcccatgtgtgctcgcggacttgataccccacccagagattccgggaaat

SEQ ID NO: 385424 - DNA, 55 bp, Artificial
  Synthetic oligonucleotide
ctgctctttcaaaagatgaagcgggagagtaatccattcaaaggactgtcaactg

SEQ ID NO: 385425 - DNA, 56 bp, Artificial
  Synthetic oligonucleotide
ctgctctttcaatatgaccacagaattaagagacaagaaacagaaaatgcatgcac

SEQ ID NO: 385426 - DNA, 55 bp, Artificial
  Synthetic oligonucleotide
ctgctctttgcaacagaagggttgtcgggtccacccattggggagctgacctcgc

SEQ ID NO: 385427 - DNA, 60 bp, Artificial
  Synthetic oligonucleotide
ctgctgaaactgatgatttacacagagcgactgtcgatttagctcgtatgtcggaagaga

SEQ ID NO: 385428 - DNA, 60 bp, Artificial
  Synthetic oligonucleotide
ctgctgaaattggggcatcgtcaaacactagtgacgagagcatgattgaaacacgatgcg

SEQ ID NO: 385429 - DNA, 60 bp, Artificial
  Synthetic oligonucleotide
ctgctgaaggtaggccttggcgcatgcgcgatagggagacacctatcgggcggggaggga

SEQ ID NO: 385430 - DNA, 55 bp, Artificial
  Synthetic oligonucleotide
ctgctgacaaagaagtttctacagaggacttccgctggggactttccagaggagg

SEQ ID NO: 385431 - DNA, 55 bp, Artificial
  Synthetic oligonucleotide
ctgctgacacagaaactgctgacagagactttccgctggggactttccaggggag

SEQ ID NO: 385432 - DNA, 60 bp, Artificial
  Synthetic oligonucleotide
ctgctgacacagctgctgacacagaagggactttctgcctgggactttccactggggcgt

SEQ ID NO: 385433 - DNA, 60 bp, Artificial
  Synthetic oligonucleotide
ctgctgacactgcgaggacagcgaagactgctgacactgcggggactttccagcatggga

SEQ ID NO: 385434 - DNA, 60 bp, Artificial
  Synthetic oligonucleotide
ctgctgacagaagcaggcgcgtcaagagggactctgcgtcaaacctatacagacaatgtc

SEQ ID NO: 385435 - DNA, 60 bp, Artificial
  Synthetic oligonucleotide
ctgctgacatcgagacttctacaagggactttccagaactgctgacaagggactttccag

SEQ ID NO: 385436 - DNA, 60 bp, Artificial
  Synthetic oligonucleotide
ctgctgacctcctctagcagatcttccgtcgacttgaaaagtaccccagtcgatgtaatc

SEQ ID NO: 385437 - DNA, 58 bp, Artificial
  Synthetic oligonucleotide
ctgctgacggcccatccaggcacaaacctcctgattggacggcttttccatacacccc

SEQ ID NO: 385438 - DNA, 60 bp, Artificial
  Synthetic oligonucleotide
ctgctgactacgcgtcgcgcttgcacagtgtactgggtacggcaaatgccccactgagca

SEQ ID NO: 385439 - DNA, 55 bp, Artificial
  Synthetic oligonucleotide
ctgctgacttaatggaatacctaagctgtgctatcctttcaaataagacattacc

SEQ ID NO: 385440 - DNA, 53 bp, Artificial
  Synthetic oligonucleotide
ctgctgagaccgggattgctttgtattcactgcatgacctttggccctcggac

SEQ ID NO: 385441 - DNA, 55 bp, Artificial
  Synthetic oligonucleotide
ctgctgagagaatcaagaggagctcctacaatggagattgaggatcaggagtacc

SEQ ID NO: 385442 - DNA, 55 bp, Artificial
  Synthetic oligonucleotide
ctgctgagattctatggattgccagtttccagacatgcccgggagctccctcaac

SEQ ID NO: 385443 - DNA, 56 bp, Artificial
  Synthetic oligonucleotide
ctgctgagcaccccaatgaaatgggggaagaaactttatgagctctttgctgacga

SEQ ID NO: 385444 - DNA, 53 bp, Artificial
  Synthetic oligonucleotide
ctgctgaggttttagcacagattaatgcaatgaatcctgcattattggaggat

SEQ ID NO: 385445 - DNA, 60 bp, Artificial
  Synthetic oligonucleotide
ctgctgataacgggaacgattctgctgtagcaagctggtacactactattcaagtatact

SEQ ID NO: 385446 - DNA, 60 bp, Artificial
  Synthetic oligonucleotide
ctgctgatactgacgatctggttgccttctccggcgttgcacgagtacgattctctgaca

SEQ ID NO: 385447 - DNA, 60 bp, Artificial
  Synthetic oligonucleotide
ctgctgatgagtttaaggacaactagctgtgcaagtttcaatagatgatacgtcgaaagg

SEQ ID NO: 385448 - DNA, 56 bp, Artificial
  Synthetic oligonucleotide
ctgctgatgatggctcgacagctaccgaggacattgggcgcttgcaattacgccga

SEQ ID NO: 385449 - DNA, 55 bp, Artificial
  Synthetic oligonucleotide
ctgctgatgccgccctgaaaccggaggatttacagcgtctgccgtcgctgatggc

SEQ ID NO: 385450 - DNA, 60 bp, Artificial
  Synthetic oligonucleotide
ctgctgcaccacatcttgatagagtcactggctataatgttatcgacaatgataaagtat

SEQ ID NO: 385451 - DNA, 55 bp, Artificial
  Synthetic oligonucleotide
ctgctgcagtcaaggcggatgcttgtatgattgatggtggcaacatgttggaaac

SEQ ID NO: 385452 - DNA, 55 bp, Artificial
  Synthetic oligonucleotide
ctgctgcatgacagatatgagggtcaacaagctgacccttggagagagaccctgg

SEQ ID NO: 385453 - DNA, 55 bp, Artificial
  Synthetic oligonucleotide
ctgctgcccttactgtagatactgctcggccgacagaggtgctcaccagtctcat

SEQ ID NO: 385454 - DNA, 55 bp, Artificial
  Synthetic oligonucleotide
ctgctgcgagcaatagaggcgcaacagcatttgttgcaactctcagtttggggca

SEQ ID NO: 385455 - DNA, 60 bp, Artificial
  Synthetic oligonucleotide
ctgctgcgggaattaacctcggtcctatatcgccagattatcaacagcatatgggtacaa

SEQ ID NO: 385456 - DNA, 55 bp, Artificial
  Synthetic oligonucleotide
ctgctgcgtgtggatgaggccatcaataaaacctatacccgccggaatggtgcag

SEQ ID NO: 385457 - DNA, 60 bp, Artificial
  Synthetic oligonucleotide
ctgctgcgttacctaatgatgcaggtctgattcttgctgataaggctatgaagttagcta

SEQ ID NO: 385458 - DNA, 55 bp, Artificial
  Synthetic oligonucleotide
ctgctgctagtaattgaactgtttaagccggtgttgccatactctactagtctac

SEQ ID NO: 385459 - DNA, 55 bp, Artificial
  Synthetic oligonucleotide
ctgctgctagtcaagaaagtcttgaacaattgtttggcaacatccaatatctagc

SEQ ID NO: 385460 - DNA, 60 bp, Artificial
  Synthetic oligonucleotide
ctgctgctcacccgtttataaaatataacgaattgagcgaaactgtgaaatcatggatgc

SEQ ID NO: 385461 - DNA, 60 bp, Artificial
  Synthetic oligonucleotide
ctgctgctctcgtagtctgtgcatgacttagtgattcccctgtgcgtgaatccatgctgg

SEQ ID NO: 385462 - DNA, 60 bp, Artificial
  Synthetic oligonucleotide
ctgctggaaacctctacccactcgcatagcgactccagtcgagcccagcgcaccaccgga

SEQ ID NO: 385463 - DNA, 55 bp, Artificial
  Synthetic oligonucleotide
ctgctggaaactgcatacatcccctctatgtacgaccaacacaaaggaagggtcc

SEQ ID NO: 385464 - DNA, 54 bp, Artificial
  Synthetic oligonucleotide
ctgctggaaaggttctgtgtttctgtgcctggggtgatatgatacctgttagta

SEQ ID NO: 385465 - DNA, 55 bp, Artificial
  Synthetic oligonucleotide
ctgctggaaatgtgccacagcacacagattggaggaataaggatggtagacatcc

SEQ ID NO: 385466 - DNA, 58 bp, Artificial
  Synthetic oligonucleotide
ctgctggacacaacgcgttgaagactcatgcttatttcgatgatagttactatcaggg

SEQ ID NO: 385467 - DNA, 60 bp, Artificial
  Synthetic oligonucleotide
ctgctggacagggcgtgacttcaatgatattagccggcaattcctctctttgcccaataa

SEQ ID NO: 385468 - DNA, 59 bp, Artificial
  Synthetic oligonucleotide
ctgctggcactaccctccaagaccttgtggtattgtgtccgcaaagtacgtgtgcggcc

SEQ ID NO: 385469 - DNA, 59 bp, Artificial
  Synthetic oligonucleotide
ctgctggctctcagcgtggcactgttgcaggcggtgttaatactgaccgcctcacctct

SEQ ID NO: 385470 - DNA, 60 bp, Artificial
  Synthetic oligonucleotide
ctgctggggcgggctcccgagattgcttgctcggcctgcgatctggtcaacgtggacctg

SEQ ID NO: 385471 - DNA, 55 bp, Artificial
  Synthetic oligonucleotide
ctgctggggttggtgggttggtcctcccagggagggttgtctagacagaaactca

SEQ ID NO: 385472 - DNA, 59 bp, Artificial
  Synthetic oligonucleotide
ctgctggtaggagtgtgtggacattggaaatggatgctggagttttgactggcaggttg

SEQ ID NO: 385473 - DNA, 56 bp, Artificial
  Synthetic oligonucleotide
ctgctggtctgactcacatgatgatctggcattccaatttgaatgatgcaacttat

SEQ ID NO: 385474 - DNA, 60 bp, Artificial
  Synthetic oligonucleotide
ctgctggtgcaacctcacatcgacatgggtgacctacggaacgtgcaatcaagctggaga

SEQ ID NO: 385475 - DNA, 55 bp, Artificial
  Synthetic oligonucleotide
ctgctggtggacacatttgggtaacaagagaaccctatgtgtcatgtgacaccag

SEQ ID NO: 385476 - DNA, 60 bp, Artificial
  Synthetic oligonucleotide
ctgctgtaacagctggtgttacgatcttcaagattcataaatggataaaaagtcgtatgc

SEQ ID NO: 385477 - DNA, 60 bp, Artificial
  Synthetic oligonucleotide
ctgctgtagtggcgggaactagtactgagttgattggtaatttacaagcaatatatagta

SEQ ID NO: 385478 - DNA, 55 bp, Artificial
  Synthetic oligonucleotide
ctgctgtatcttgttctcatgggtcatgtgtctctagtcatcaagaacccagtac

SEQ ID NO: 385479 - DNA, 55 bp, Artificial
  Synthetic oligonucleotide
ctgctgtcacgcaactggttagggacaaacaggctgcccgaacttacatgaacat

SEQ ID NO: 385480 - DNA, 58 bp, Artificial
  Synthetic oligonucleotide
ctgctgtccagatagccgagtctttcacggacaaaggccgaaccacgtacgcagtggg

SEQ ID NO: 385481 - DNA, 55 bp, Artificial
  Synthetic oligonucleotide
ctgctgtcccaagtcctgagcaagtggggtctagccatcgatcagttggcagaga

SEQ ID NO: 385482 - DNA, 55 bp, Artificial
  Synthetic oligonucleotide
ctgctgtccgcaatccgacttcaatccgctcgtgcaaacgaggagatactacccg

SEQ ID NO: 385483 - DNA, 55 bp, Artificial
  Synthetic oligonucleotide
ctgctgtccggtctgcgcagccacctacaaatttgaccatggacggtgaactaga

SEQ ID NO: 385484 - DNA, 50 bp, Artificial
  Synthetic oligonucleotide
ctgctgtcctagcaactacaatggcgattcggaactagtaacagttcaag

SEQ ID NO: 385485 - DNA, 60 bp, Artificial
  Synthetic oligonucleotide
ctgctgtcttgagaggattccttattttgggcagagaagacaagagatatgggccagcat

SEQ ID NO: 385486 - DNA, 57 bp, Artificial
  Synthetic oligonucleotide
ctgctgtgaacggtcaaagaggcaggattgactattactggtctgttttaaaaccag

SEQ ID NO: 385487 - DNA, 55 bp, Artificial
  Synthetic oligonucleotide
ctgctgtgcgtatccgcgctagtgagttactgcgttgggaatttcctgacgagtt

SEQ ID NO: 385488 - DNA, 55 bp, Artificial
  Synthetic oligonucleotide
ctgctgtgctggcttactgtaccgaacgtctagcgcacagcatccttttaccaaa

SEQ ID NO: 385489 - DNA, 55 bp, Artificial
  Synthetic oligonucleotide
ctgctgtggacgtgcttttggcaaagctcctttagaccaaggaacatggaataga

SEQ ID NO: 385490 - DNA, 60 bp, Artificial
  Synthetic oligonucleotide
ctgctgtgtttccaaaacacttcagctcagcctcaattaacatccacctggtgagacagt

SEQ ID NO: 385491 - DNA, 51 bp, Artificial
  Synthetic oligonucleotide
ctgctgttaccgcttctgtatctttagcacaatccattcaagctgctcata

SEQ ID NO: 385492 - DNA, 58 bp, Artificial
  Synthetic oligonucleotide
ctgctgttaggcacatattttataagctacttagacacaggtgtggtaacaaccgaaa

SEQ ID NO: 385493 - DNA, 55 bp, Artificial
  Synthetic oligonucleotide
ctgctgttccgatattactcgtgggtccggattgacacatcgtgtcggcaaaagg

SEQ ID NO: 385494 - DNA, 60 bp, Artificial
  Synthetic oligonucleotide
ctgctgttgagcgccgcattactttcgactactcggtgtctgcaggtccagtttgttcaa

SEQ ID NO: 385495 - DNA, 59 bp, Artificial
  Synthetic oligonucleotide
ctgctgttgggaccaggattgcataggaagattgttggtatgccgcctttaatttgaac

SEQ ID NO: 385496 - DNA, 55 bp, Artificial
  Synthetic oligonucleotide
ctgctgtttcatgcaatgactaacaatccagtcaagaccataacagtagcattgc

SEQ ID NO: 385497 - DNA, 57 bp, Artificial
  Synthetic oligonucleotide
ctgctgtttgaatcaaccatttcacaaggttagaaatcattggaagggaaggtgcag

SEQ ID NO: 385498 - DNA, 55 bp, Artificial
  Synthetic oligonucleotide
ctgcttaacgattcctcacctggcacctacgagactcctcgtggtttctctcgcg

SEQ ID NO: 385499 - DNA, 55 bp, Artificial
  Synthetic oligonucleotide
ctgcttaacgctcaataaagcttgccattgagtgaattagcagtgtgtgctcatc

SEQ ID NO: 385500 - DNA, 55 bp, Artificial
  Synthetic oligonucleotide
ctgcttaagagaggcatatgtggtgatgagttttctatgtccctagatgtgtgta

SEQ ID NO: 385501 - DNA, 54 bp, Artificial
  Synthetic oligonucleotide
ctgcttaagattgaacctttaggatccaaccttttgaatttggcctgaccaaac

SEQ ID NO: 385502 - DNA, 60 bp, Artificial
  Synthetic oligonucleotide
ctgcttacacatcattgaatgtgctggctagatttactgatttggaactccatgggctaa

SEQ ID NO: 385503 - DNA, 52 bp, Artificial
  Synthetic oligonucleotide
ctgcttacacgctactctcaacagtggtggctctggcgggttgctctagttt

SEQ ID NO: 385504 - DNA, 55 bp, Artificial
  Synthetic oligonucleotide
ctgcttacataaagagtggccacattcaagaaactggcgatgtaatcctacctgg

SEQ ID NO: 385505 - DNA, 55 bp, Artificial
  Synthetic oligonucleotide
ctgcttactgagcagcgttactggtagcctcgtccggcggtggggataacccctc

SEQ ID NO: 385506 - DNA, 52 bp, Artificial
  Synthetic oligonucleotide
ctgcttacttgacgagtacacggcacagggagtgtctaacatagaaggctgg

SEQ ID NO: 385507 - DNA, 60 bp, Artificial
  Synthetic oligonucleotide
ctgcttaggctataaatctctaagcaaagctagacagatgtgtaaatcgaaaagctggtc

SEQ ID NO: 385508 - DNA, 60 bp, Artificial
  Synthetic oligonucleotide
ctgcttatgtcagtgcaggcagtctttcactacttgctgttcagtcccatcttaaagggc

SEQ ID NO: 385509 - DNA, 55 bp, Artificial
  Synthetic oligonucleotide
ctgcttcatgtactcggatttccactttattaatgaactgggtgagtcagtggtc

SEQ ID NO: 385510 - DNA, 52 bp, Artificial
  Synthetic oligonucleotide
ctgcttccagcattccgtgttagtaagatttgctccttacatgcgctatatt

SEQ ID NO: 385511 - DNA, 51 bp, Artificial
  Synthetic oligonucleotide
ctgcttccggatgcagcggaggagttggctagtcctatgaagtcagatgag

SEQ ID NO: 385512 - DNA, 51 bp, Artificial
  Synthetic oligonucleotide
ctgcttccgtaagcatccggaggctacatactctcgatgtggctccggtcc

SEQ ID NO: 385513 - DNA, 60 bp, Artificial
  Synthetic oligonucleotide
ctgcttcctagagttttgcaaaggcctataaagccagatgagatacaactctggaaagct

SEQ ID NO: 385514 - DNA, 60 bp, Artificial
  Synthetic oligonucleotide
ctgcttcctgatgaatatcaagttagtcattaaacttgttggtcttgactgtgacagctg

SEQ ID NO: 385515 - DNA, 60 bp, Artificial
  Synthetic oligonucleotide
ctgcttcgcgatacgatgctgcactttgatcggtacctgagtagagtggctcgttgaggg

SEQ ID NO: 385516 - DNA, 55 bp, Artificial
  Synthetic oligonucleotide
ctgcttctggaaaactcataacagagtggtgttgccgatcttgcacattaccacc

SEQ ID NO: 385517 - DNA, 55 bp, Artificial
  Synthetic oligonucleotide
ctgcttcttgctgttacggataacgaacttacgatgaccgaccttagcttcgcta

SEQ ID NO: 385518 - DNA, 54 bp, Artificial
  Synthetic oligonucleotide
ctgcttgaaaactataatctaacggttgaagttacggcggggaagaatacgata

SEQ ID NO: 385519 - DNA, 54 bp, Artificial
  Synthetic oligonucleotide
ctgcttgaaacaacggttttatagtaccaatcggatcgcccacggaagttatcg

SEQ ID NO: 385520 - DNA, 55 bp, Artificial
  Synthetic oligonucleotide
ctgcttgaaatgggagctaatggatgaagactacaagggaagactttgtaacccc

SEQ ID NO: 385521 - DNA, 55 bp, Artificial
  Synthetic oligonucleotide
ctgcttgaccatctagatgtcggtggtctattaagagcaaccttccctggaacgg

SEQ ID NO: 385522 - DNA, 60 bp, Artificial
  Synthetic oligonucleotide
ctgcttgacgtaagcaatgacgatcaatggagaaggtcgtaagcagtgacgtcaatgcgg

SEQ ID NO: 385523 - DNA, 53 bp, Artificial
  Synthetic oligonucleotide
ctgcttgcaatctaaagacctgtctaaacctatttaacaatactgatgcagta

SEQ ID NO: 385524 - DNA, 59 bp, Artificial
  Synthetic oligonucleotide
ctgcttgcccatgattcgttcggacctatagccagatagggtacccgtaacgatcttga

SEQ ID NO: 385525 - DNA, 59 bp, Artificial
  Synthetic oligonucleotide
ctgcttgcgaacaatgttggactccacgattgccccgatgagagactgagggatgcccg

SEQ ID NO: 385526 - DNA, 55 bp, Artificial
  Synthetic oligonucleotide
ctgcttggacctgaaagatgctttctttagcatcagattcgcccctgagagccag

SEQ ID NO: 385527 - DNA, 55 bp, Artificial
  Synthetic oligonucleotide
ctgcttggggtgagtccctatacatgagtcgcaggaggttcttgatcccctcttc

SEQ ID NO: 385528 - DNA, 56 bp, Artificial
  Synthetic oligonucleotide
ctgcttggtacatcaagggtcgggcggtccccttggccgcctattccctcactggc

SEQ ID NO: 385529 - DNA, 55 bp, Artificial
  Synthetic oligonucleotide
ctgcttggtttcaaacgaacatggtagttcctcccgatgctccaacgactgctta

SEQ ID NO: 385530 - DNA, 60 bp, Artificial
  Synthetic oligonucleotide
ctgcttgtgacactaatctcactgtctaccgttgctaaccgatacaccgtggtataatga

SEQ ID NO: 385531 - DNA, 58 bp, Artificial
  Synthetic oligonucleotide
ctgcttgttcgtaactgagtcttgtgtcacgtatagtgaccactacggtccccttggc

SEQ ID NO: 385532 - DNA, 51 bp, Artificial
  Synthetic oligonucleotide
ctgctttacaagacactaaaagtaatgttcctttggacatttgtaattcta

SEQ ID NO: 385533 - DNA, 55 bp, Artificial
  Synthetic oligonucleotide
ctgctttagctcaggaacacctgaagtgtttgtgacagattattggatggaggca

SEQ ID NO: 385534 - DNA, 59 bp, Artificial
  Synthetic oligonucleotide
ctgctttagtgtgtttaatttcatgcttatagtggcgacagtgtgttgtttgtcctttg

SEQ ID NO: 385535 - DNA, 60 bp, Artificial
  Synthetic oligonucleotide
ctgctttcagaagatcctcgctgttacttggcttaatcaagatagactccaacatattac

SEQ ID NO: 385536 - DNA, 60 bp, Artificial
  Synthetic oligonucleotide
ctgctttcaggagatcctcagagttgcttggctttattaagatagactctagcatgttac

SEQ ID NO: 385537 - DNA, 55 bp, Artificial
  Synthetic oligonucleotide
ctgctttcctgcagctaatactagatgagttcagttacaaggatgttcgagttag

SEQ ID NO: 385538 - DNA, 55 bp, Artificial
  Synthetic oligonucleotide
ctgctttcgcagaggttaagcgattagaagcagtggggttgctgagccctagcat

SEQ ID NO: 385539 - DNA, 60 bp, Artificial
  Synthetic oligonucleotide
ctgctttcgcctgaccacgtcttttgtcaatgaatatgaccccatggatgagcggcaacg

SEQ ID NO: 385540 - DNA, 60 bp, Artificial
  Synthetic oligonucleotide
ctgctttcgtgttgacatgcatacagcacacgggttactgtatgcatgtcaacaacgcac

SEQ ID NO: 385541 - DNA, 59 bp, Artificial
  Synthetic oligonucleotide
ctgctttcgttttatctggtgcgattccacatcaaagcaaggacgaaggctttgcctcg

SEQ ID NO: 385542 - DNA, 60 bp, Artificial
  Synthetic oligonucleotide
ctgctttgacgggttctctagctgcacgtttgcagctgagaccggtgttgctctttactc

SEQ ID NO: 385543 - DNA, 59 bp, Artificial
  Synthetic oligonucleotide
ctgctttgactggagttgtccaagcagatagccctcttctaagggattgaacccaccga

SEQ ID NO: 385544 - DNA, 55 bp, Artificial
  Synthetic oligonucleotide
ctgctttgcgaatcgaccgcaagtgcatgcaatctattgaggttaacagtccacc

SEQ ID NO: 385545 - DNA, 60 bp, Artificial
  Synthetic oligonucleotide
ctgctttggaatgcacttttgttcactgaatctgataacagcttttgggtgctttttgtg

SEQ ID NO: 385546 - DNA, 60 bp, Artificial
  Synthetic oligonucleotide
ctgctttggctttgggtgctcaaagattgtatcttacttctgaaggctcagcgaggtaga

SEQ ID NO: 385547 - DNA, 58 bp, Artificial
  Synthetic oligonucleotide
ctgctttggtgttagcttaaaagagctcactagaccatacaagagtagtaaaacatgc

SEQ ID NO: 385548 - DNA, 60 bp, Artificial
  Synthetic oligonucleotide
ctgctttgtgtctagacatgtaaaagtgtgcataattggtacagtttctaagttttctca

SEQ ID NO: 385549 - DNA, 60 bp, Artificial
  Synthetic oligonucleotide
ctggaaaaactcgagtcattgaagctagtagtgtgaatgatacagtggctttcagaatgg

SEQ ID NO: 385550 - DNA, 57 bp, Artificial
  Synthetic oligonucleotide
ctggaaaactaggagagcactttaataataacacaataatctttcaaccatcctcag

SEQ ID NO: 385551 - DNA, 60 bp, Artificial
  Synthetic oligonucleotide
ctggaaaaggccacatctcatcagattgacaaatcctttgacaatgcatagaactgagac

SEQ ID NO: 385552 - DNA, 52 bp, Artificial
  Synthetic oligonucleotide
ctggaaaatatgagagtgtaccccgaattcgagagctctctcaaacttgctc

SEQ ID NO: 385553 - DNA, 55 bp, Artificial
  Synthetic oligonucleotide
ctggaaacaccggtagaaccaccttacatataacagttaccatcgcaccagacaa

SEQ ID NO: 385554 - DNA, 57 bp, Artificial
  Synthetic oligonucleotide
ctggaaacaggaacaacccaattgataacaacgatcttaccatccaccggctgtcag

SEQ ID NO: 385555 - DNA, 55 bp, Artificial
  Synthetic oligonucleotide
ctggaaaccaactccaaagaagactaaagaaaggcgcgcaacatcacagcgtacg

SEQ ID NO: 385556 - DNA, 55 bp, Artificial
  Synthetic oligonucleotide
ctggaaaccctaattctgacaggtgaccccaatcagagcttccaccacgagccca

SEQ ID NO: 385557 - DNA, 55 bp, Artificial
  Synthetic oligonucleotide
ctggaaacctccggtacacaatgtcacggggatccaacgcatgtggtatgagtcc

SEQ ID NO: 385558 - DNA, 60 bp, Artificial
  Synthetic oligonucleotide
ctggaaacgacaatgatgcgagtggccaaataatgtatgcagggaaaatgacagactcca

SEQ ID NO: 385559 - DNA, 60 bp, Artificial
  Synthetic oligonucleotide
ctggaaacgaggtatgctgtcattcatcgctcaaatgcatgcaatgatgaacgatgtgtc

SEQ ID NO: 385560 - DNA, 55 bp, Artificial
  Synthetic oligonucleotide
ctggaaacgcgctgggaggttatttaagacattgtctacttgtggtaacaggtaa

SEQ ID NO: 385561 - DNA, 55 bp, Artificial
  Synthetic oligonucleotide
ctggaaacgtaggcggagtcaacttggtgaacggatgcggatacttcagcgctcc

SEQ ID NO: 385562 - DNA, 55 bp, Artificial
  Synthetic oligonucleotide
ctggaaaggcaacattatgcgaacacaagagtctgagtgcgtgtgtcaggatgag

SEQ ID NO: 385563 - DNA, 58 bp, Artificial
  Synthetic oligonucleotide
ctggaaagggctattcatatgcacttacttcttcctcccagtccgttgtcatcgaaac

SEQ ID NO: 385564 - DNA, 55 bp, Artificial
  Synthetic oligonucleotide
ctggaaaggtcatcactttcacacaggcggagaagtttgatttgcaaaaggctgg

SEQ ID NO: 385565 - DNA, 59 bp, Artificial
  Synthetic oligonucleotide
ctggaaaggtggtggttactccagattatatgaaagaggggtctaagattgatatgcaa

SEQ ID NO: 385566 - DNA, 55 bp, Artificial
  Synthetic oligonucleotide
ctggaaagtaaggaatggactccagatagtaaaggatggtggtggaaattaccag

SEQ ID NO: 385567 - DNA, 60 bp, Artificial
  Synthetic oligonucleotide
ctggaaagttcatgtaattttgatctacataccagtacatcatcacaacagtcattcaca

SEQ ID NO: 385568 - DNA, 60 bp, Artificial
  Synthetic oligonucleotide
ctggaaatagatgtcaatccgtgccagagtgggtggagctatcagtatctcagacaaacc

SEQ ID NO: 385569 - DNA, 55 bp, Artificial
  Synthetic oligonucleotide
ctggaaattttgaacgtggacccaggatcgcgacgcgtacctttgtattctactg

SEQ ID NO: 385570 - DNA, 57 bp, Artificial
  Synthetic oligonucleotide
ctggaacaacatgtccgaattcggaggagacctagaaggaataacgctatcagaacc

SEQ ID NO: 385571 - DNA, 60 bp, Artificial
  Synthetic oligonucleotide
ctggaacaattaagttcctagggcagataatttcacccaatcacctcacttatgatgcag

SEQ ID NO: 385572 - DNA, 57 bp, Artificial
  Synthetic oligonucleotide
ctggaacacaacatagaggagagtgcaggacaagggtacttttcaacctctgttaag

SEQ ID NO: 385573 - DNA, 56 bp, Artificial
  Synthetic oligonucleotide
ctggaacatggaaccagtaaaatcagtagaagggaagccaaaaagctagcagactt

SEQ ID NO: 385574 - DNA, 55 bp, Artificial
  Synthetic oligonucleotide
ctggaacatttatgaatgacgatagtcgaaaaggagggacccatggttcaggagg

SEQ ID NO: 385575 - DNA, 59 bp, Artificial
  Synthetic oligonucleotide
ctggaaccaacaggccagtattggttatctctccagatttgtcctacagagtcggatac

SEQ ID NO: 385576 - DNA, 60 bp, Artificial
  Synthetic oligonucleotide
ctggaaccactagatcatgcatgagaagtggaggaaacagtttctatgcggagctaaagt

SEQ ID NO: 385577 - DNA, 51 bp, Artificial
  Synthetic oligonucleotide
ctggaaccgaccggcggcacagtcgctgcacttgcaggtgttgcgcacgtg

SEQ ID NO: 385578 - DNA, 55 bp, Artificial
  Synthetic oligonucleotide
ctggaacctcaactcccaccatctcagcccccacccgaaccgaacgccgatccga

SEQ ID NO: 385579 - DNA, 60 bp, Artificial
  Synthetic oligonucleotide
ctggaacgacatggagcaatcacaagtagcaatacagcagctactaatgctgattgtgcc

SEQ ID NO: 385580 - DNA, 59 bp, Artificial
  Synthetic oligonucleotide
ctggaacggacagtagcttttcggtgaaacaagatatcgtagcaataactgattggtca

SEQ ID NO: 385581 - DNA, 56 bp, Artificial
  Synthetic oligonucleotide
ctggaactaagaagcaggtattgggccataagaaccagaagcggaggaaatactaa

SEQ ID NO: 385582 - DNA, 57 bp, Artificial
  Synthetic oligonucleotide
ctggaactactatagcatccgtatattataacactatcactaaccagaataagacgc

SEQ ID NO: 385583 - DNA, 60 bp, Artificial
  Synthetic oligonucleotide
ctggaactatatgttggtgaaggatcagcccccatcggattggcaagctatgggtttcca

SEQ ID NO: 385584 - DNA, 60 bp, Artificial
  Synthetic oligonucleotide
ctggaactccttacaacaaccgacacagatgcatcaagcactgtcgtcgtcgatgtcagc

SEQ ID NO: 385585 - DNA, 55 bp, Artificial
  Synthetic oligonucleotide
ctggaactctgcaagactttgcgaattggcaaggcccgattggcagaacgcccca

SEQ ID NO: 385586 - DNA, 55 bp, Artificial
  Synthetic oligonucleotide
ctggaacttcccttcgaactgtatgagcacatgcaaatgaggagtcccatcctcg

SEQ ID NO: 385587 - DNA, 60 bp, Artificial
  Synthetic oligonucleotide
ctggaacttttaagctgactgctaactcgatgaggcctgagtcaaaggcaatgttagaca

SEQ ID NO: 385588 - DNA, 56 bp, Artificial
  Synthetic oligonucleotide
ctggaagaaaatccctgaccttgaatctaatcaccgagatgggtaggctcccaacc

SEQ ID NO: 385589 - DNA, 56 bp, Artificial
  Synthetic oligonucleotide
ctggaagaacatcccagtgcagggaaggatccgaagaaaactggaggtccaattta

SEQ ID NO: 385590 - DNA, 60 bp, Artificial
  Synthetic oligonucleotide
ctggaagacatcctttagttcatggacatcagaagtcgaaaatataatggcggagccatg

SEQ ID NO: 385591 - DNA, 58 bp, Artificial
  Synthetic oligonucleotide
ctggaagagcatcccagtgctgggaaggaccctaagaaaactggaggtccaatctaca

SEQ ID NO: 385592 - DNA, 55 bp, Artificial
  Synthetic oligonucleotide
ctggaagagtctgcgaaagacgtcaatgcaaaatcttacgcacaatcattgagcg

SEQ ID NO: 385593 - DNA, 55 bp, Artificial
  Synthetic oligonucleotide
ctggaagatctattggtcccgtcgttattgggaaatctgtcgatcatgccgtcgg

SEQ ID NO: 385594 - DNA, 60 bp, Artificial
  Synthetic oligonucleotide
ctggaagcgcccagagggtatggatgtaggcagacttcctttgaatcacattccaggtcc

SEQ ID NO: 385595 - DNA, 56 bp, Artificial
  Synthetic oligonucleotide
ctggaagggttaaattactctaagaaaaggcaagagatccttgatctgtgggtcta

SEQ ID NO: 385596 - DNA, 55 bp, Artificial
  Synthetic oligonucleotide
ctggaaggtcaacaaccatgtggtgtacaacaaccaggaagccgctagatacgag

SEQ ID NO: 385597 - DNA, 60 bp, Artificial
  Synthetic oligonucleotide
ctggaaggtcaacaatcatgtggtctacaatcatcaagaggctggcaattacgagaatca

SEQ ID NO: 385598 - DNA, 55 bp, Artificial
  Synthetic oligonucleotide
ctggaaggtgaacaactacgttgtctacaaccaccaggaagctggcaaatacgag

SEQ ID NO: 385599 - DNA, 55 bp, Artificial
  Synthetic oligonucleotide
ctggaaggtggccagtaaaagtgatacatacagacaatggccccaatttcatcag

SEQ ID NO: 385600 - DNA, 55 bp, Artificial
  Synthetic oligonucleotide
ctggaagtaatcaatagttctatccagtacaggtttgggtgtgaagtaacgggag

SEQ ID NO: 385601 - DNA, 55 bp, Artificial
  Synthetic oligonucleotide
ctggaagttcctaccccacattgaatgtgacaatgcctaacaatgacaatttcga

SEQ ID NO: 385602 - DNA, 57 bp, Artificial
  Synthetic oligonucleotide
ctggaagttgatttaacaccacataacccactcaaggtttgtgacactaagttgaca

SEQ ID NO: 385603 - DNA, 55 bp, Artificial
  Synthetic oligonucleotide
ctggaataattgaaaccttcagttcagatgacatagaggatgagcactatgatga

SEQ ID NO: 385604 - DNA, 60 bp, Artificial
  Synthetic oligonucleotide
ctggaatactcaaggcctaccatgaatataagatcatcatggtccagctggagttcatct

SEQ ID NO: 385605 - DNA, 55 bp, Artificial
  Synthetic oligonucleotide
ctggaataggaacttttccggcaacttctcccggattatctgcaaggcgatttct

SEQ ID NO: 385606 - DNA, 60 bp, Artificial
  Synthetic oligonucleotide
ctggaatatctgatgatgcaaattccctacggatcattgacttatgacataggtgggaat

SEQ ID NO: 385607 - DNA, 52 bp, Artificial
  Synthetic oligonucleotide
ctggaatatgcaaccgaagaatcgttacctatgaaaataatacctgggtaaa

SEQ ID NO: 385608 - DNA, 55 bp, Artificial
  Synthetic oligonucleotide
ctggaatcgaaactcgaacattcaagggccacctgcattcggctttgatatccgg

SEQ ID NO: 385609 - DNA, 55 bp, Artificial
  Synthetic oligonucleotide
ctggaatgactacgacaccatcgtgtatggggatgacagattgacatcgtccccg

SEQ ID NO: 385610 - DNA, 55 bp, Artificial
  Synthetic oligonucleotide
ctggaatgagaatacttgtgagaggtaactctcctgcgttcaactataacaaggc

SEQ ID NO: 385611 - DNA, 60 bp, Artificial
  Synthetic oligonucleotide
ctggaatgagtgatctgacagatatccaagaggatataacccgccatgaacaacagcttg

SEQ ID NO: 385612 - DNA, 60 bp, Artificial
  Synthetic oligonucleotide
ctggaatgtttgtagagctgcagtaggagcttcaatgggatctgccaagataaacatgtc

SEQ ID NO: 385613 - DNA, 51 bp, Artificial
  Synthetic oligonucleotide
ctggaattaaatccgacggaaataaaaactataatggggatgccaatcacg

SEQ ID NO: 385614 - DNA, 59 bp, Artificial
  Synthetic oligonucleotide
ctggaattataactggctctgctgtagggtgtgatccagaaactttctggtcaaaaata

SEQ ID NO: 385615 - DNA, 55 bp, Artificial
  Synthetic oligonucleotide
ctggaattatacctatgaaaactgatctggaattagacttctctcttccgtcatc

SEQ ID NO: 385616 - DNA, 55 bp, Artificial
  Synthetic oligonucleotide
ctggaattcccactcagcccagcaaccatgtcatttagtgggttggtggatggga

SEQ ID NO: 385617 - DNA, 55 bp, Artificial
  Synthetic oligonucleotide
ctggaattctgttctcacatctttgagaaagaggacctcgccattccggtcaaca

SEQ ID NO: 385618 - DNA, 60 bp, Artificial
  Synthetic oligonucleotide
ctggaatttcccttcgaactggatgaggatatgcaggtgaggagtcccatcttcgtgtag

SEQ ID NO: 385619 - DNA, 54 bp, Artificial
  Synthetic oligonucleotide
ctggacaaatcatgcacaccaaatgatgctgcctgttgtgaggtcaaagatgac

SEQ ID NO: 385620 - DNA, 56 bp, Artificial
  Synthetic oligonucleotide
ctggacaacgcaagactgcaactgttctatctaccccggccacgtaacgggccacc

SEQ ID NO: 385621 - DNA, 60 bp, Artificial
  Synthetic oligonucleotide
ctggacacacgcacccagacctggatgtcggctgaaggagcttggagacaagtcgagaag

SEQ ID NO: 385622 - DNA, 57 bp, Artificial
  Synthetic oligonucleotide
ctggacacactgcttcaacccccagattcaagctatagtctcctccccctgtcataa

SEQ ID NO: 385623 - DNA, 55 bp, Artificial
  Synthetic oligonucleotide
ctggacacagacattgcaacactcttcttagctcaaggcagcccaatgtgggcac

SEQ ID NO: 385624 - DNA, 60 bp, Artificial
  Synthetic oligonucleotide
ctggacaccagggtgcatacactggcctgccaaacaaacgtcccaatgtgcccactatca

SEQ ID NO: 385625 - DNA, 55 bp, Artificial
  Synthetic oligonucleotide
ctggacaccaggtatgaccgcgcaagctttggccgttctagccacttttaccgcc

SEQ ID NO: 385626 - DNA, 53 bp, Artificial
  Synthetic oligonucleotide
ctggacaccgccaacgcactgcattgttacacgccggcctcggtaaagttctg

SEQ ID NO: 385627 - DNA, 55 bp, Artificial
  Synthetic oligonucleotide
ctggacacctacacaatgatctcctatggagacgacatcgtggtggctagtgact

SEQ ID NO: 385628 - DNA, 53 bp, Artificial
  Synthetic oligonucleotide
ctggacacctctagttttacctctatacagatgtcacctgcggacttggagga

SEQ ID NO: 385629 - DNA, 55 bp, Artificial
  Synthetic oligonucleotide
ctggacagacagagttatagaaataggacaagcagctggtagagctatccgtcat

SEQ ID NO: 385630 - DNA, 60 bp, Artificial
  Synthetic oligonucleotide
ctggacagagcaatacaaatttcaagcagactcccccaaaagactggcgacagccattgc

SEQ ID NO: 385631 - DNA, 60 bp, Artificial
  Synthetic oligonucleotide
ctggacagcctcaaacgaggacctagacctgtgtagatacctaggatgtactctatatgt

SEQ ID NO: 385632 - DNA, 55 bp, Artificial
  Synthetic oligonucleotide
ctggacagcgccgtattggcgagtccactgtaggcgagagtcccgttgctgtgac

SEQ ID NO: 385633 - DNA, 55 bp, Artificial
  Synthetic oligonucleotide
ctggacaggtagcttgcgtttcagttttatgttctgtggatcagccagcaccact

SEQ ID NO: 385634 - DNA, 57 bp, Artificial
  Synthetic oligonucleotide
ctggacagtacgctcttagtatcgacttgcaagctaccacatctggtacattgactg

SEQ ID NO: 385635 - DNA, 57 bp, Artificial
  Synthetic oligonucleotide
ctggacagtagagttggaacgcggtggagaaaaagatctcgatacgaacattgaagg

SEQ ID NO: 385636 - DNA, 60 bp, Artificial
  Synthetic oligonucleotide
ctggacagtggcaactcatcaaagcagcatatgaaatcatgtgttacccagacctagctg

SEQ ID NO: 385637 - DNA, 58 bp, Artificial
  Synthetic oligonucleotide
ctggacagttccagcccaatgtacaattgagagagaattaaactattgtaatttagtg

SEQ ID NO: 385638 - DNA, 59 bp, Artificial
  Synthetic oligonucleotide
ctggacataccacggaagctatgaagtgaaggccaccggttcagccagctcccttgtta

SEQ ID NO: 385639 - DNA, 57 bp, Artificial
  Synthetic oligonucleotide
ctggacatatttaaactatctacccttctttttgcaataaccacatcaatagcctgt

SEQ ID NO: 385640 - DNA, 55 bp, Artificial
  Synthetic oligonucleotide
ctggacatctcgagtttgctctttggtggtcattgagtgtcgaatttagtgtctg

SEQ ID NO: 385641 - DNA, 60 bp, Artificial
  Synthetic oligonucleotide
ctggacatgcataactggtgcccatagcatgttgaaagatgggcctatcaagaagtgtaa

SEQ ID NO: 385642 - DNA, 55 bp, Artificial
  Synthetic oligonucleotide
ctggaccaaagaatcatagtgctctttatggttgcctggggtaaagaggctgtgg

SEQ ID NO: 385643 - DNA, 55 bp, Artificial
  Synthetic oligonucleotide
ctggaccaacgacttgactggcttcgttaccacacttgtgaggctactggaactg

SEQ ID NO: 385644 - DNA, 60 bp, Artificial
  Synthetic oligonucleotide
ctggaccaagatattatcatgagtaagttcaacagtgtgttgagtactgttgctgtgccg

SEQ ID NO: 385645 - DNA, 55 bp, Artificial
  Synthetic oligonucleotide
ctggaccaagtgcgcaggaccacaaaacataccctggtcagacagacaaaccaac

SEQ ID NO: 385646 - DNA, 60 bp, Artificial
  Synthetic oligonucleotide
ctggaccaatagtgattcactgctctaaaatagtgagctggacgggaatattctgtacta

SEQ ID NO: 385647 - DNA, 55 bp, Artificial
  Synthetic oligonucleotide
ctggaccagagactccatcacagaagtatggtcttacaatgctgaacttctcgtg

SEQ ID NO: 385648 - DNA, 54 bp, Artificial
  Synthetic oligonucleotide
ctggaccagaggggaagtctgcggcttggagcatagggatcgcgcagaactgtc

SEQ ID NO: 385649 - DNA, 58 bp, Artificial
  Synthetic oligonucleotide
ctggaccagataaacatattcccgtcgaaaggtataacattctgaccaatcctgacgc

SEQ ID NO: 385650 - DNA, 58 bp, Artificial
  Synthetic oligonucleotide
ctggaccatatgcaatatttgaacgtcttccatgtgaaaaggactaccgtgtcaacgg

SEQ ID NO: 385651 - DNA, 60 bp, Artificial
  Synthetic oligonucleotide
ctggaccattagtggctgggggcttgctgatagcgtgctacgtcataactggcacgtcag

SEQ ID NO: 385652 - DNA, 55 bp, Artificial
  Synthetic oligonucleotide
ctggaccattcctagtagcttaccaagttggcggtaacacaggcctggtccacgt

SEQ ID NO: 385653 - DNA, 55 bp, Artificial
  Synthetic oligonucleotide
ctggacccaaattgcccagatctcgtcttgagcagtaataggtcttcagctgaag

SEQ ID NO: 385654 - DNA, 57 bp, Artificial
  Synthetic oligonucleotide
ctggacccactggggacccctggccgtacttagtgctctacagctgtaccgcattac

SEQ ID NO: 385655 - DNA, 55 bp, Artificial
  Synthetic oligonucleotide
ctggaccccacctgatgtttccaatttcatagcctccttgataggtgattttcag

SEQ ID NO: 385656 - DNA, 57 bp, Artificial
  Synthetic oligonucleotide
ctggaccctgtttaggtccaggattcaacaatcgtctaatgggcttgggcctctcaa

SEQ ID NO: 385657 - DNA, 56 bp, Artificial
  Synthetic oligonucleotide
ctggacctaagctagggccgacattgggaagccagagctaggttgcccacgactgg

SEQ ID NO: 385658 - DNA, 60 bp, Artificial
  Synthetic oligonucleotide
ctggacctatggattctggacactatcgcgtttataacccagtcacatctaagatgtttg

SEQ ID NO: 385659 - DNA, 55 bp, Artificial
  Synthetic oligonucleotide
ctggacctattttccatatgccattgagacctactgacacccaaaccgtgaacac

SEQ ID NO: 385660 - DNA, 55 bp, Artificial
  Synthetic oligonucleotide
ctggacctttgactttggattactcggtactactttacttaatctagatgcgaat

SEQ ID NO: 385661 - DNA, 55 bp, Artificial
  Synthetic oligonucleotide
ctggacgaacatccactttggaggcagatgttggaagcttacggacagaactagc

SEQ ID NO: 385662 - DNA, 56 bp, Artificial
  Synthetic oligonucleotide
ctggacgaacgtaaagttcaccagtcgcgcttaccagcgtgttacggccaggcata

SEQ ID NO: 385663 - DNA, 60 bp, Artificial
  Synthetic oligonucleotide
ctggacgaggtgctgcatataacgcgagactagctttccgatctgacttggcgtgatccg

SEQ ID NO: 385664 - DNA, 60 bp, Artificial
  Synthetic oligonucleotide
ctggacgcagatattattagtgttgtggatgctgattaaatttggtcagtgttttcgtta

SEQ ID NO: 385665 - DNA, 57 bp, Artificial
  Synthetic oligonucleotide
ctggacgccaagatggccaacgtgggtcactggataaggacctggagccggcttaac

SEQ ID NO: 385666 - DNA, 50 bp, Artificial
  Synthetic oligonucleotide
ctggacgggttttataaccgtccccggttcactcgtgtggggatttcgtc

SEQ ID NO: 385667 - DNA, 58 bp, Artificial
  Synthetic oligonucleotide
ctggacgtagaagctgtggacgccgcgctgttacgcctgaagattctcggcgcccccc

SEQ ID NO: 385668 - DNA, 55 bp, Artificial
  Synthetic oligonucleotide
ctggacgtgtctacgccacggaattcgtccaacatatattgagaaatcgctcccg

SEQ ID NO: 385669 - DNA, 60 bp, Artificial
  Synthetic oligonucleotide
ctggacgttgtaacgtaacttacgtagagcgtcattataatgatggcaagcttcaatggc

SEQ ID NO: 385670 - DNA, 53 bp, Artificial
  Synthetic oligonucleotide
ctggactacccgctactacattgttttaccccaatattatggtttttaggcac

SEQ ID NO: 385671 - DNA, 55 bp, Artificial
  Synthetic oligonucleotide
ctggactcaaccaacccctaatagttgctacatcgaagttaacggacacaccgct

SEQ ID NO: 385672 - DNA, 60 bp, Artificial
  Synthetic oligonucleotide
ctggactcccgactgagccaattgatcgtcttctcgagtgtgaaaagatgctacgcattg

SEQ ID NO: 385673 - DNA, 59 bp, Artificial
  Synthetic oligonucleotide
ctggactcggatcatgctgacggcgttcccgcagcagggaaggttggtcacgggatgag

SEQ ID NO: 385674 - DNA, 57 bp, Artificial
  Synthetic oligonucleotide
ctggactgagattctccgttaattttcaacggagaacgggtgatgccgtgacatatt

SEQ ID NO: 385675 - DNA, 55 bp, Artificial
  Synthetic oligonucleotide
ctggactgatgaatttgctccccatgctgcttacgctaggcaaatacccatacct

SEQ ID NO: 385676 - DNA, 60 bp, Artificial
  Synthetic oligonucleotide
ctggactgattgtccagatcgatcactcgtctacacaataccgcagtatactgtttggcg

SEQ ID NO: 385677 - DNA, 58 bp, Artificial
  Synthetic oligonucleotide
ctggactgcataagaccttgcttctgggttgaactgattaggggaaggcccaaggaga

SEQ ID NO: 385678 - DNA, 55 bp, Artificial
  Synthetic oligonucleotide
ctggactggccgagtgtcaactttgatgcagagacaggatatgttcgaatggtcc

SEQ ID NO: 385679 - DNA, 54 bp, Artificial
  Synthetic oligonucleotide
ctggactgtctaccacggggcgggaacgaggaccctcgcatcacccaagggtcc

SEQ ID NO: 385680 - DNA, 55 bp, Artificial
  Synthetic oligonucleotide
ctggactgttagaaacatcagaaggctgtagacaaatattgggacagctacaacc

SEQ ID NO: 385681 - DNA, 57 bp, Artificial
  Synthetic oligonucleotide
ctggacttggaagaagggcagggcttagcgcgactcggagccctaagtccggagcgc

SEQ ID NO: 385682 - DNA, 57 bp, Artificial
  Synthetic oligonucleotide
ctggactttccccggagttgtggaggctctcatactgcttgcagaactctttggagt

SEQ ID NO: 385683 - DNA, 55 bp, Artificial
  Synthetic oligonucleotide
ctggactttgcgccgcgcgagctgccttttgccgcgtaccttatcacggggaacg

SEQ ID NO: 385684 - DNA, 52 bp, Artificial
  Synthetic oligonucleotide
ctggacttttccctaacatcaagttcaaagtatacatatcgcagaaggctaa

SEQ ID NO: 385685 - DNA, 57 bp, Artificial
  Synthetic oligonucleotide
ctggagaaagattcctcaagatatggtcacagactgtagaggagattatatcctatg

SEQ ID NO: 385686 - DNA, 53 bp, Artificial
  Synthetic oligonucleotide
ctggagaaagcggtgtactctaggtatgaagtgcagggtatatcagttgctgt

SEQ ID NO: 385687 - DNA, 51 bp, Artificial
  Synthetic oligonucleotide
ctggagaaatgctcgattataacgtgggagggtcgcaaattgggattaacg

SEQ ID NO: 385688 - DNA, 55 bp, Artificial
  Synthetic oligonucleotide
ctggagaacaccaaggcggacctgtccacggtgttgtggagtgaacatgaggagg

SEQ ID NO: 385689 - DNA, 54 bp, Artificial
  Synthetic oligonucleotide
ctggagaacggcgatagggttagagcgaaaatggtgtgttgggacaacggtaaa

SEQ ID NO: 385690 - DNA, 55 bp, Artificial
  Synthetic oligonucleotide
ctggagaagcacatgcagatgaggttggccatcctcgtgaagctctctgcagatc

SEQ ID NO: 385691 - DNA, 55 bp, Artificial
  Synthetic oligonucleotide
ctggagacaaggagatttccgcacaggaccagaaatggctcttgcgtgcggcgca

SEQ ID NO: 385692 - DNA, 55 bp, Artificial
  Synthetic oligonucleotide
ctggagacactgcttctactgacactcctggcaacagtcacaggaggaatcttct

SEQ ID NO: 385693 - DNA, 55 bp, Artificial
  Synthetic oligonucleotide
ctggagacactggatagatacgcaaagcggtcattgtggcttacctcttgtttca

SEQ ID NO: 385694 - DNA, 55 bp, Artificial
  Synthetic oligonucleotide
ctggagacataaggagttctcaaggaatcgaaatacaggcgatggtcacggattg

SEQ ID NO: 385695 - DNA, 58 bp, Artificial
  Synthetic oligonucleotide
ctggagacgatatattatccttcaataccgaaactaatgagtggtcctatgtaggaac

SEQ ID NO: 385696 - DNA, 59 bp, Artificial
  Synthetic oligonucleotide
ctggagacgtcacaggacctgaagaaagctttcaactacgggaggctgatatccaggaa

SEQ ID NO: 385697 - DNA, 55 bp, Artificial
  Synthetic oligonucleotide
ctggagagaacatcttgagaaatggcgaaaatatatcgacatgacaatgaacgag

SEQ ID NO: 385698 - DNA, 55 bp, Artificial
  Synthetic oligonucleotide
ctggagagacgctcgcatgttcaaagaaggacgtgacataagagagttcgtggca

SEQ ID NO: 385699 - DNA, 53 bp, Artificial
  Synthetic oligonucleotide
ctggagagatccccttctacggcaaagccatccccattgacaccataaagggg

SEQ ID NO: 385700 - DNA, 55 bp, Artificial
  Synthetic oligonucleotide
ctggagagccaccacggaatccgcgagaaatcccaatatggctaggacgaaatgc

SEQ ID NO: 385701 - DNA, 55 bp, Artificial
  Synthetic oligonucleotide
ctggagaggcgaaaatggacggagaacaagaatcgcttacgaaagaatgtgcaac

SEQ ID NO: 385702 - DNA, 55 bp, Artificial
  Synthetic oligonucleotide
ctggagaggtgaaaatggtcggagaaccagaattgcctatgaaaggatgtgcaac

SEQ ID NO: 385703 - DNA, 58 bp, Artificial
  Synthetic oligonucleotide
ctggagagttggactctctagtgagagcttgtggggggcgtatagctaaactctaccg

SEQ ID NO: 385704 - DNA, 55 bp, Artificial
  Synthetic oligonucleotide
ctggagatacaccacctttataggatgttgcaaccacggttgctgtgtatgaccc

SEQ ID NO: 385705 - DNA, 55 bp, Artificial
  Synthetic oligonucleotide
ctggagatgaagatagctcgttgatgttgcgttgggtgtacgacaatgatcctcc

SEQ ID NO: 385706 - DNA, 60 bp, Artificial
  Synthetic oligonucleotide
ctggagcagtttcacttccagtgattgcaagacacacccttcttgcacgggtatcacagc

SEQ ID NO: 385707 - DNA, 60 bp, Artificial
  Synthetic oligonucleotide
ctggagccaaagaacatatgtcacatgaacaaattttcaccttactgatcacatctttga

SEQ ID NO: 385708 - DNA, 55 bp, Artificial
  Synthetic oligonucleotide
ctggagccaccatgccaactcaaccttctgacaatgtagagaccaggactactta

SEQ ID NO: 385709 - DNA, 55 bp, Artificial
  Synthetic oligonucleotide
ctggagccacttcctggtggtaagcagaaatccaagggtacggtggtacggtgga

SEQ ID NO: 385710 - DNA, 55 bp, Artificial
  Synthetic oligonucleotide
ctggagccatggtcttgtttgagggtatatgcccggaagactggactagttacgg

SEQ ID NO: 385711 - DNA, 55 bp, Artificial
  Synthetic oligonucleotide
ctggagcccaaatctctcaacattacgtcggatcctgcccgtggggatgcccagg

SEQ ID NO: 385712 - DNA, 59 bp, Artificial
  Synthetic oligonucleotide
ctggagccgccggagcagcagtgaaaggagtcggaacaatggtgatggaattgattcgg

SEQ ID NO: 385713 - DNA, 60 bp, Artificial
  Synthetic oligonucleotide
ctggagcgcaatacaacccgctgtgaaatacaagacgctatgacaactgtacgggtatct

SEQ ID NO: 385714 - DNA, 60 bp, Artificial
  Synthetic oligonucleotide
ctggagcggaggcattgattacgactgcgattcacattcatcgctggattagaggaagtg

SEQ ID NO: 385715 - DNA, 60 bp, Artificial
  Synthetic oligonucleotide
ctggagcggaggccttgattacaaccgcgattcacattcaccgctggatcagagggtgtg

SEQ ID NO: 385716 - DNA, 60 bp, Artificial
  Synthetic oligonucleotide
ctggagcggaggctttgattacaactgcaatccacattcatcgctggattagagggtgtg

SEQ ID NO: 385717 - DNA, 60 bp, Artificial
  Synthetic oligonucleotide
ctggagcgttcgctgctcctgcaagtatgacttattatgagcgtcacgcgtggatgtcca

SEQ ID NO: 385718 - DNA, 56 bp, Artificial
  Synthetic oligonucleotide
ctggagcgttcggtcccgggctcactcctccacacggaggtcttgtggggtggagc

SEQ ID NO: 385719 - DNA, 52 bp, Artificial
  Synthetic oligonucleotide
ctggagctacatgggttgatctggtactggaaggcgatagttgtgtgaccat

SEQ ID NO: 385720 - DNA, 60 bp, Artificial
  Synthetic oligonucleotide
ctggagctcaggatcaatctcaaaaggatataggtaatgcgatgtatttcccaactgtaa

SEQ ID NO: 385721 - DNA, 60 bp, Artificial
  Synthetic oligonucleotide
ctggagctgatccccaccatcacggatgcggggtcaaatgtgactgtgacaccggacgtc

SEQ ID NO: 385722 - DNA, 60 bp, Artificial
  Synthetic oligonucleotide
ctggagcttttctgcgtgggggcgcacgtcatcgcatgccaggaatgccagacgtagctg

SEQ ID NO: 385723 - DNA, 55 bp, Artificial
  Synthetic oligonucleotide
ctggaggaaacgctgatgtagtgcaatatggctcaaatatactagtttatgtcgc

SEQ ID NO: 385724 - DNA, 60 bp, Artificial
  Synthetic oligonucleotide
ctggaggaaattatgacttcagattaccagttggtgcatggccagtgatgactggtggcg

SEQ ID NO: 385725 - DNA, 50 bp, Artificial
  Synthetic oligonucleotide
ctggaggaccatgtgttgcattggaaatatatacgttatgagtgtgcatt

SEQ ID NO: 385726 - DNA, 55 bp, Artificial
  Synthetic oligonucleotide
ctggaggacctatatataggagagtagacggaaagtggatgagggaactcatcct

SEQ ID NO: 385727 - DNA, 58 bp, Artificial
  Synthetic oligonucleotide
ctggaggagcgttgcctgctttgcctcaaagtgttctgccgcgggtaccctcgccacc

SEQ ID NO: 385728 - DNA, 50 bp, Artificial
  Synthetic oligonucleotide
ctggaggccaatcgtgcagtgatagtcaagaccaagttattttcggcaac

SEQ ID NO: 385729 - DNA, 53 bp, Artificial
  Synthetic oligonucleotide
ctggaggcgtcattggcatcactagtgacttaaccccggttgtcacacgccac

SEQ ID NO: 385730 - DNA, 55 bp, Artificial
  Synthetic oligonucleotide
ctggaggcgttagatctaggcactagtgcaggttacccctacgtggcgatgggca

SEQ ID NO: 385731 - DNA, 60 bp, Artificial
  Synthetic oligonucleotide
ctggaggctatttgagacatcgataaaaccatgtgtcaagttgacacctctatgtgtggc

SEQ ID NO: 385732 - DNA, 55 bp, Artificial
  Synthetic oligonucleotide
ctggaggctggttcagattgaaccaactactcttctgtgggctaattcgtcgctc

SEQ ID NO: 385733 - DNA, 55 bp, Artificial
  Synthetic oligonucleotide
ctggagggactttccactagtgcatgcgcactagactggggacttttccagactg

SEQ ID NO: 385734 - DNA, 55 bp, Artificial
  Synthetic oligonucleotide
ctggagggatgtcccttacttgcaaaagcgggacgacctgtggtgcggctccctg

SEQ ID NO: 385735 - DNA, 56 bp, Artificial
  Synthetic oligonucleotide
ctggagggcaatttcgctagtgtccaacttccgcttcaggatttcgaaaacatccg

SEQ ID NO: 385736 - DNA, 53 bp, Artificial
  Synthetic oligonucleotide
ctggaggggatacgagcagtccgcctacgcgtgctacgtggaagaagaaaccg

SEQ ID NO: 385737 - DNA, 58 bp, Artificial
  Synthetic oligonucleotide
ctggagggttaaccaacgcggtacgcgaattctactatatgcaggagctcgctctatt

SEQ ID NO: 385738 - DNA, 60 bp, Artificial
  Synthetic oligonucleotide
ctggaggtgctgtcataatagacccagcagacttccatccagtgaaagccccatctcagg

SEQ ID NO: 385739 - DNA, 60 bp, Artificial
  Synthetic oligonucleotide
ctggaggttcgatagctcacttacaccttacctcatcaatgcagttctggcaattcgtag

SEQ ID NO: 385740 - DNA, 59 bp, Artificial
  Synthetic oligonucleotide
ctggaggttgacttggacacagagggcgggcgaaatgccgttctcgatttgcttctaga

SEQ ID NO: 385741 - DNA, 55 bp, Artificial
  Synthetic oligonucleotide
ctggaggttttcctccagatagtcaggaagaatgggcttgtgttaagcccaacaa

SEQ ID NO: 385742 - DNA, 60 bp, Artificial
  Synthetic oligonucleotide
ctggagtaagcaggagcgtcggcgttagcacgtagatcatcccctagctttatgaggcta

SEQ ID NO: 385743 - DNA, 57 bp, Artificial
  Synthetic oligonucleotide
ctggagtagaattgtttcagaatggtataagcatgttagatgttgcaagtattgctc

SEQ ID NO: 385744 - DNA, 50 bp, Artificial
  Synthetic oligonucleotide
ctggagtagcatcaataatcaccggaataattacaaggaagtagaggaca

SEQ ID NO: 385745 - DNA, 58 bp, Artificial
  Synthetic oligonucleotide
ctggagtaggaccagtctccagggagttagcagctagaggagggataccaagttccta

SEQ ID NO: 385746 - DNA, 57 bp, Artificial
  Synthetic oligonucleotide
ctggagtagtagtagagggaacgaataatacagatcgttggttagctacgatattaa

SEQ ID NO: 385747 - DNA, 55 bp, Artificial
  Synthetic oligonucleotide
ctggagtatcggcctcaacaagtagatttgtcaaacactcgagcaacgcaagaac

SEQ ID NO: 385748 - DNA, 57 bp, Artificial
  Synthetic oligonucleotide
ctggagtcaatagtcggcacacaccgatcccctaatttaacttacaacgaagcatgt

SEQ ID NO: 385749 - DNA, 55 bp, Artificial
  Synthetic oligonucleotide
ctggagtccatcttcgcaaacatcgcagttcaaggaacctcggagcaaacggaat

SEQ ID NO: 385750 - DNA, 55 bp, Artificial
  Synthetic oligonucleotide
ctggagtcccatttatactaaaagcctctaggactccaagggacacgtggtgcac

SEQ ID NO: 385751 - DNA, 52 bp, Artificial
  Synthetic oligonucleotide
ctggagtcgaacgtgtccaagttcgtggactcgtcttacgggaagagtctgc

SEQ ID NO: 385752 - DNA, 55 bp, Artificial
  Synthetic oligonucleotide
ctggagtcggggatctatcaggtccctgtgggcttaagcttcgacgcctgggagc

SEQ ID NO: 385753 - DNA, 55 bp, Artificial
  Synthetic oligonucleotide
ctggagtctcaattgacttggtcaatgggtacctaatgagagaatatgcctggta

SEQ ID NO: 385754 - DNA, 56 bp, Artificial
  Synthetic oligonucleotide
ctggagtctcgctcgaagcttgtttattgaacgactacttagaattacaggtaacc

SEQ ID NO: 385755 - DNA, 55 bp, Artificial
  Synthetic oligonucleotide
ctggagtcttagagttcggtgggctttacgatagggaattacagggtgtggtgat

SEQ ID NO: 385756 - DNA, 60 bp, Artificial
  Synthetic oligonucleotide
ctggagtgaccccgtgcagaactcgcgagctgcaatgggttacgcaatcgcgctggcagc

SEQ ID NO: 385757 - DNA, 60 bp, Artificial
  Synthetic oligonucleotide
ctggagtgaccgaattgagcaatggcttagtgaaccttgtaaactacttccagatacagc

SEQ ID NO: 385758 - DNA, 60 bp, Artificial
  Synthetic oligonucleotide
ctggagtgagggctatcaggactggtctcgacgaggccaaaccctggtacaagctcatca

SEQ ID NO: 385759 - DNA, 55 bp, Artificial
  Synthetic oligonucleotide
ctggagtgcaggaaattaaagaacagggtgttggattgatagcagagtgcagaac

SEQ ID NO: 385760 - DNA, 55 bp, Artificial
  Synthetic oligonucleotide
ctggagtgctagccttgagttatacaaaagagtccgcaagcacaaggaacatgct

SEQ ID NO: 385761 - DNA, 56 bp, Artificial
  Synthetic oligonucleotide
ctggagtggtctcgacttcaactttaagaggggacaatccattaatgaacaaccta

SEQ ID NO: 385762 - DNA, 60 bp, Artificial
  Synthetic oligonucleotide
ctggagtgtatacgtatgaagcctttcatcctgacattgtcttactgcctggctgtggag

SEQ ID NO: 385763 - DNA, 57 bp, Artificial
  Synthetic oligonucleotide
ctggagtgtctgacacaaacatccctaggctccttttaacctttaggatcgatttca

SEQ ID NO: 385764 - DNA, 55 bp, Artificial
  Synthetic oligonucleotide
ctggagtgttagaagtagctatgtaccgcgtgaaagagagcgggaaacggagaag

SEQ ID NO: 385765 - DNA, 55 bp, Artificial
  Synthetic oligonucleotide
ctggagttacattgtcgacacaatttactgactttgtatcactgaactcattgcg

SEQ ID NO: 385766 - DNA, 55 bp, Artificial
  Synthetic oligonucleotide
ctggagttcaacttgcgcgaccaacgatttagcagcctgaccacctggtgaatcg

SEQ ID NO: 385767 - DNA, 60 bp, Artificial
  Synthetic oligonucleotide
ctggagttgctcactcactagctgtagaattatgtgtgccaggtctccatggttgggcca

SEQ ID NO: 385768 - DNA, 60 bp, Artificial
  Synthetic oligonucleotide
ctggataactatccctcaatgttatctagagcggagaaagctaatagaaaatcatctagg

SEQ ID NO: 385769 - DNA, 54 bp, Artificial
  Synthetic oligonucleotide
ctggataagcacgtgcagatgaggttccccattctcgtgaagctctttgcagac

SEQ ID NO: 385770 - DNA, 60 bp, Artificial
  Synthetic oligonucleotide
ctggataagttatccatccatgttagatctgaaattgcttcatcgacggtataacaggta

SEQ ID NO: 385771 - DNA, 52 bp, Artificial
  Synthetic oligonucleotide
ctggataataagaaatagggagggaccgaaaacggtgcgaccgaatggggta

SEQ ID NO: 385772 - DNA, 55 bp, Artificial
  Synthetic oligonucleotide
ctggatacctaaggggtgtaatgagacgtgggcaagagtgaaacgttgtcctata

SEQ ID NO: 385773 - DNA, 55 bp, Artificial
  Synthetic oligonucleotide
ctggatacgctccagtaaattggggtcccggtgaaacgaatgactctactacaat

SEQ ID NO: 385774 - DNA, 55 bp, Artificial
  Synthetic oligonucleotide
ctggatacgctccagttaactggggtcctggtgagacaaacgactcaacaacggt

SEQ ID NO: 385775 - DNA, 60 bp, Artificial
  Synthetic oligonucleotide
ctggatagagctcgatgagattggagaagatgtggctccaattgaacacattgcaagcat

SEQ ID NO: 385776 - DNA, 55 bp, Artificial
  Synthetic oligonucleotide
ctggatagatcctgataagcatttattatacctgacacacatagaggcagggcta

SEQ ID NO: 385777 - DNA, 55 bp, Artificial
  Synthetic oligonucleotide
ctggatagttagggatcggcgtcctactggaacgccttatgattttcagcaggtc

SEQ ID NO: 385778 - DNA, 55 bp, Artificial
  Synthetic oligonucleotide
ctggatatactatacatgttcagtgcaatgcaaccaaatttcacagtggcacgtt

SEQ ID NO: 385779 - DNA, 55 bp, Artificial
  Synthetic oligonucleotide
ctggatatatatgcagcaaattccattcggacacacccaggccaagtgatccctc

SEQ ID NO: 385780 - DNA, 55 bp, Artificial
  Synthetic oligonucleotide
ctggatatcattatctctatcgaccagattactgacgggtcgtttcccggatgag

SEQ ID NO: 385781 - DNA, 58 bp, Artificial
  Synthetic oligonucleotide
ctggatatggaaaggcttacaccatattaaacgggagcttgatggagacaaatgtcca

SEQ ID NO: 385782 - DNA, 55 bp, Artificial
  Synthetic oligonucleotide
ctggatcaatcgaatctggtgtcaatgcgataatcgtgggatttaatacatggca

SEQ ID NO: 385783 - DNA, 58 bp, Artificial
  Synthetic oligonucleotide
ctggatcacccaagtccacggacacgtcaggagagtggtagaatgctggaaatacacc

SEQ ID NO: 385784 - DNA, 55 bp, Artificial
  Synthetic oligonucleotide
ctggatcaccgggtgcagattcacaagacattccttatgtacttggcggagctgg

SEQ ID NO: 385785 - DNA, 60 bp, Artificial
  Synthetic oligonucleotide
ctggatcactagacgctgtatacataaattcaactagtggagaatcatttctaacttcaa

SEQ ID NO: 385786 - DNA, 55 bp, Artificial
  Synthetic oligonucleotide
ctggatcagaaattcaggtagctggatttgattattcatgcgcttttaatgcccc

SEQ ID NO: 385787 - DNA, 60 bp, Artificial
  Synthetic oligonucleotide
ctggatcagggctgtctctgatgaggaccttgagtaaggctcctgggagtctcccgacac

SEQ ID NO: 385788 - DNA, 55 bp, Artificial
  Synthetic oligonucleotide
ctggatccgtggagcaacccagccccggtgctagctttgctttcccggtgaaggt

SEQ ID NO: 385789 - DNA, 54 bp, Artificial
  Synthetic oligonucleotide
ctggatcctcagggcatcttttagaagttctgtcaagttgcccaactcattcac

SEQ ID NO: 385790 - DNA, 60 bp, Artificial
  Synthetic oligonucleotide
ctggatcgattgcggaatcatccaatccgctcagatttttatatggtctgctggtgacgg

SEQ ID NO: 385791 - DNA, 59 bp, Artificial
  Synthetic oligonucleotide
ctggatcggctaacgagcagaccaaactctatggaagtggaaacaagttgataacagta

SEQ ID NO: 385792 - DNA, 55 bp, Artificial
  Synthetic oligonucleotide
ctggatcggctttgttaccaactggagaactggttagatatcgtaccaaagggtg

SEQ ID NO: 385793 - DNA, 57 bp, Artificial
  Synthetic oligonucleotide
ctggatcgggaaattggcctgatggttccaatattgggtttatgcccaagtaacaga

SEQ ID NO: 385794 - DNA, 55 bp, Artificial
  Synthetic oligonucleotide
ctggatcgttaagactctttccttctgaacgtgtgttgactacgaactctacatt

SEQ ID NO: 385795 - DNA, 60 bp, Artificial
  Synthetic oligonucleotide
ctggatctatggatacaccatatgcaaattctacagcgagtgaaacgtttctgacttcga

SEQ ID NO: 385796 - DNA, 55 bp, Artificial
  Synthetic oligonucleotide
ctggatctattcagagatatctcaaattactggtcaaggcctctggactctacag

SEQ ID NO: 385797 - DNA, 54 bp, Artificial
  Synthetic oligonucleotide
ctggatctcctaacgggagtagtacactattattacggtaattttgtacgccag

SEQ ID NO: 385798 - DNA, 55 bp, Artificial
  Synthetic oligonucleotide
ctggatctggaccatacacagccttaggcatatttgaaagatggtttgttctccc

SEQ ID NO: 385799 - DNA, 55 bp, Artificial
  Synthetic oligonucleotide
ctggatcttgcgctggatgcaagtggtgtcacagtacgaatagattcgcacctcc

SEQ ID NO: 385800 - DNA, 60 bp, Artificial
  Synthetic oligonucleotide
ctggatctttgtgcgaatagcctacctaaggcaccatcccgaataccgcaatagagatgt

SEQ ID NO: 385801 - DNA, 55 bp, Artificial
  Synthetic oligonucleotide
ctggatgaacagcagcttaacaaagacgatggttcaatcagtttcggactgagga

SEQ ID NO: 385802 - DNA, 59 bp, Artificial
  Synthetic oligonucleotide
ctggatgaaggactcaatcactacctctttaggctgccctcttaggttcttgttgatgg

SEQ ID NO: 385803 - DNA, 57 bp, Artificial
  Synthetic oligonucleotide
ctggatgcccacgactctccaggtttaatttctattgggcagttaagcccaaatctg

SEQ ID NO: 385804 - DNA, 55 bp, Artificial
  Synthetic oligonucleotide
ctggatggaaaagtcggaaatgcgactgagaacacggagcgccacaccgcagacg

SEQ ID NO: 385805 - DNA, 55 bp, Artificial
  Synthetic oligonucleotide
ctggatggatgagaatatcaagacgaagaatcacacaaatactgtgatgttcttc

SEQ ID NO: 385806 - DNA, 60 bp, Artificial
  Synthetic oligonucleotide
ctggatggggcttggcactaggccatacgcgcctgcgtggaacctttgtggctcctctac

SEQ ID NO: 385807 - DNA, 60 bp, Artificial
  Synthetic oligonucleotide
ctggatggtagtcttgtgcgcccagtcatggaagaacaacacttggctgaattgctgaag

SEQ ID NO: 385808 - DNA, 55 bp, Artificial
  Synthetic oligonucleotide
ctggatggtttaacctttctgcggagaactgtaacccgtgatccagctggttggt

SEQ ID NO: 385809 - DNA, 58 bp, Artificial
  Synthetic oligonucleotide
ctggatggtttggcaactttaatctaaagcaccgatattatgttgtgagacagtttag

SEQ ID NO: 385810 - DNA, 60 bp, Artificial
  Synthetic oligonucleotide
ctggatgtcgaggctcaggttccggataaggcgtggagcactgggtatgagtggatcacc

SEQ ID NO: 385811 - DNA, 60 bp, Artificial
  Synthetic oligonucleotide
ctggatgtgagcggtaccatcctcccatatgacacaaaccctgatctgtctacttcagtc

SEQ ID NO: 385812 - DNA, 55 bp, Artificial
  Synthetic oligonucleotide
ctggatgtggtacattcttgtcgttttgtacggtctggactctactcggtatatc

SEQ ID NO: 385813 - DNA, 55 bp, Artificial
  Synthetic oligonucleotide
ctggatgtggtgcgtagcaccattttcataacattagtttataacctacttgtgg

SEQ ID NO: 385814 - DNA, 60 bp, Artificial
  Synthetic oligonucleotide
ctggatgtgtcagtgggcctcgcctctctgaaccgtcaggctaacgtggagcgcttacag

SEQ ID NO: 385815 - DNA, 55 bp, Artificial
  Synthetic oligonucleotide
ctggatgttagaacggctcgcacgcaaaagcaaaccccgcatgtgcagcagagag

SEQ ID NO: 385816 - DNA, 55 bp, Artificial
  Synthetic oligonucleotide
ctggatgttatgggattatttccgtcactatatgcaagaacctgtgagtacccaa

SEQ ID NO: 385817 - DNA, 60 bp, Artificial
  Synthetic oligonucleotide
ctggatgttgctattttatcgcccagtgcatgactaatttgttagtaggtaaatggtatg

SEQ ID NO: 385818 - DNA, 51 bp, Artificial
  Synthetic oligonucleotide
ctggatgtttgattttaaaacgttctcttcagacaaggcatatggtgctcc

SEQ ID NO: 385819 - DNA, 59 bp, Artificial
  Synthetic oligonucleotide
ctggattaacacggaatctttatgagttgaagatagaatgcccacatacagtagggtta

SEQ ID NO: 385820 - DNA, 55 bp, Artificial
  Synthetic oligonucleotide
ctggattaactaacaggcgaatagaaacattatcctcctgatgagatgtcgcgga

SEQ ID NO: 385821 - DNA, 56 bp, Artificial
  Synthetic oligonucleotide
ctggattacacaccaccggatacttctacaaccgttttatcttccccatgctacta

SEQ ID NO: 385822 - DNA, 60 bp, Artificial
  Synthetic oligonucleotide
ctggattacgcaaggcctgatgggagttctgctactctggatgggaataaacgctagaga

SEQ ID NO: 385823 - DNA, 60 bp, Artificial
  Synthetic oligonucleotide
ctggattactaacacatcggaaatcatataatcgtctagtacaatataaagcaaaatgga

SEQ ID NO: 385824 - DNA, 55 bp, Artificial
  Synthetic oligonucleotide
ctggattagtgggagtagttaacctcacagatggggggacggacaccactgggta

SEQ ID NO: 385825 - DNA, 60 bp, Artificial
  Synthetic oligonucleotide
ctggattcatagaagggggatggcctggactgatcaatggatggtatgggttccaacaca

SEQ ID NO: 385826 - DNA, 55 bp, Artificial
  Synthetic oligonucleotide
ctggattcatagagaatggatggcaaggcctaattgacggttggtatgggttcag

SEQ ID NO: 385827 - DNA, 60 bp, Artificial
  Synthetic oligonucleotide
ctggattgacacggaatctctatgaattaaagatagaatgtccacatactgtgggtctag

SEQ ID NO: 385828 - DNA, 60 bp, Artificial
  Synthetic oligonucleotide
ctggattgtcggagggaagcgatgcagtaattcagccaccgatgactactagtgatcata

SEQ ID NO: 385829 - DNA, 60 bp, Artificial
  Synthetic oligonucleotide
ctggattgtttgcataacctacatcccaccacagagtcctgtacccagtgtactacacat

SEQ ID NO: 385830 - DNA, 56 bp, Artificial
  Synthetic oligonucleotide
ctggattttcatgactcaaacgtcaaaaacctttatgataaagtccgactacagct

SEQ ID NO: 385831 - DNA, 55 bp, Artificial
  Synthetic oligonucleotide
ctggcaaaagcacacccaaattctaacaggtcatgcttacgtgaacacaaccaca

SEQ ID NO: 385832 - DNA, 55 bp, Artificial
  Synthetic oligonucleotide
ctggcaacaccggtagtatcattaacaattactacatgcagcagtaccagaactc

SEQ ID NO: 385833 - DNA, 55 bp, Artificial
  Synthetic oligonucleotide
ctggcaacactggataacaacaaaggatggacaatgtggaagtccgctggtttca

SEQ ID NO: 385834 - DNA, 55 bp, Artificial
  Synthetic oligonucleotide
ctggcaaccagcgtgcaagccgattcgggatgtgcaattgacctacaacgacgtg

SEQ ID NO: 385835 - DNA, 51 bp, Artificial
  Synthetic oligonucleotide
ctggcaaccagggaactgtgcactggtctcttacaccctggatggcctacc

SEQ ID NO: 385836 - DNA, 60 bp, Artificial
  Synthetic oligonucleotide
ctggcaaccctgggtgtcatctggtgcttcgttgtccgaacttcgataagccgcatgatg

SEQ ID NO: 385837 - DNA, 60 bp, Artificial
  Synthetic oligonucleotide
ctggcaacggcacgatgaccaacatagctgaagagcagaccattaccgtgacatacaact

SEQ ID NO: 385838 - DNA, 59 bp, Artificial
  Synthetic oligonucleotide
ctggcaactagggtttgttcctacaccagacaacgctgtacaagatatttatagatata

SEQ ID NO: 385839 - DNA, 54 bp, Artificial
  Synthetic oligonucleotide
ctggcaagatccagtgccgttgcacagccagagttggtcatggggtccaggcta

SEQ ID NO: 385840 - DNA, 55 bp, Artificial
  Synthetic oligonucleotide
ctggcaagcacaaggtttcaagcctgagcacaaattcgctgcattcgacttcttc

SEQ ID NO: 385841 - DNA, 55 bp, Artificial
  Synthetic oligonucleotide
ctggcaaggctcaaatagaccagttatacaaataaatcccacaacgatgacgcac

SEQ ID NO: 385842 - DNA, 59 bp, Artificial
  Synthetic oligonucleotide
ctggcaaggtaattgggatgcatgtcggtgggaacggttcacacgggtttgcagcagcc

SEQ ID NO: 385843 - DNA, 55 bp, Artificial
  Synthetic oligonucleotide
ctggcaatactcagtagggattgtctggtccactagccctgcaaagctcgggtgc

SEQ ID NO: 385844 - DNA, 60 bp, Artificial
  Synthetic oligonucleotide
ctggcaatatcatggaataatgtggcagattctgcctcagctgtctggatgaggtccaca

SEQ ID NO: 385845 - DNA, 55 bp, Artificial
  Synthetic oligonucleotide
ctggcaatcatgatagctgggatctctctatggatgtgctccaacgggtctctgc

SEQ ID NO: 385846 - DNA, 55 bp, Artificial
  Synthetic oligonucleotide
ctggcaatgataacgtacatcacaaggaaccaaccagaatggtttcggaatgtct

SEQ ID NO: 385847 - DNA, 60 bp, Artificial
  Synthetic oligonucleotide
ctggcaatggttttgtgcctcatgtctgtggttctgaaccggacagtgcccgcagtcaca

SEQ ID NO: 385848 - DNA, 52 bp, Artificial
  Synthetic oligonucleotide
ctggcaattatccgcgtaccgttttcggtcgggtaaaaaaggcgccaagcta

SEQ ID NO: 385849 - DNA, 52 bp, Artificial
  Synthetic oligonucleotide
ctggcaattgaactcattaatactgtttgcggtaacgattatttcatatgtg

SEQ ID NO: 385850 - DNA, 55 bp, Artificial
  Synthetic oligonucleotide
ctggcaattgcaggcattagacttcatcgggcagccatctacaccgcggagatcc

SEQ ID NO: 385851 - DNA, 51 bp, Artificial
  Synthetic oligonucleotide
ctggcaattggagactggagacaatttatagtgtctccaaatggcattatc

SEQ ID NO: 385852 - DNA, 55 bp, Artificial
  Synthetic oligonucleotide
ctggcacaaacttcccgaactccaggaaggtcttatcaaccgttctctggaatcc

SEQ ID NO: 385853 - DNA, 60 bp, Artificial
  Synthetic oligonucleotide
ctggcacacgggacacggtgagacgcttgaactcatactgacgccaagcatcacatgcct

SEQ ID NO: 385854 - DNA, 55 bp, Artificial
  Synthetic oligonucleotide
ctggcacaggagaggcggttaccttaacgacataggttaaggatatgcctgcagt

SEQ ID NO: 385855 - DNA, 60 bp, Artificial
  Synthetic oligonucleotide
ctggcacatcacatactccggacacccaaccaataagaccagacatagagctacaatcct

SEQ ID NO: 385856 - DNA, 55 bp, Artificial
  Synthetic oligonucleotide
ctggcacctaacgccagaacagggatggctctctacctatgcagtagcaataagt

SEQ ID NO: 385857 - DNA, 56 bp, Artificial
  Synthetic oligonucleotide
ctggcacgggtcgttgagcctgccttagcttacctcccatacgctacaagtgccct

SEQ ID NO: 385858 - DNA, 57 bp, Artificial
  Synthetic oligonucleotide
ctggcactaccctccaaaaccttgcggtattgtgcccgcacaacacgtctgtggccc

SEQ ID NO: 385859 - DNA, 56 bp, Artificial
  Synthetic oligonucleotide
ctggcactaccctccaagaccttgtggtattgtgcccgcgaaaaaagtgtgtggcc

SEQ ID NO: 385860 - DNA, 59 bp, Artificial
  Synthetic oligonucleotide
ctggcactagtatcttcaactcaatgatcaacaacatcataatcaggacattaatgttg

SEQ ID NO: 385861 - DNA, 60 bp, Artificial
  Synthetic oligonucleotide
ctggcactcaggggaccactcgtgtgactctggtgctggaactgggaggatgcgtcacca

SEQ ID NO: 385862 - DNA, 57 bp, Artificial
  Synthetic oligonucleotide
ctggcacttaaagggcagggtggtccctgtggccacgtactctgttctcggcttgtg

SEQ ID NO: 385863 - DNA, 55 bp, Artificial
  Synthetic oligonucleotide
ctggcacttatgtgtatgaccatcttactccccttactgattgggcctgtgacgg

SEQ ID NO: 385864 - DNA, 57 bp, Artificial
  Synthetic oligonucleotide
ctggcagaaaacagggaaattctaaaagagccagtacacggagcatattacgaccca

SEQ ID NO: 385865 - DNA, 60 bp, Artificial
  Synthetic oligonucleotide
ctggcagaaccacgaactatatgggcctggcaaaccagccaggtctaatggctcttgtgg

SEQ ID NO: 385866 - DNA, 58 bp, Artificial
  Synthetic oligonucleotide
ctggcagaactacacaccagggccagggactaggtttccactgacctttggatggtgc

SEQ ID NO: 385867 - DNA, 59 bp, Artificial
  Synthetic oligonucleotide
ctggcagaactgactctgtttggtactgcccacctgaccccgatcacttcgatggctac

SEQ ID NO: 385868 - DNA, 54 bp, Artificial
  Synthetic oligonucleotide
ctggcagaattacacacaagggccaggggttaggtttccattaacctttggatg

SEQ ID NO: 385869 - DNA, 55 bp, Artificial
  Synthetic oligonucleotide
ctggcagacatctcgtcatttggacatgggctctattaatctaacaataactggt

SEQ ID NO: 385870 - DNA, 55 bp, Artificial
  Synthetic oligonucleotide
ctggcagagttctgaaaccagatactcctcaacttccatgctatggttcttatgc

SEQ ID NO: 385871 - DNA, 55 bp, Artificial
  Synthetic oligonucleotide
ctggcagatcataccatactccggtggcccacgcattctcactgaagaggatgtg

SEQ ID NO: 385872 - DNA, 55 bp, Artificial
  Synthetic oligonucleotide
ctggcagcaaatagggaagttatcgagtcaagtatgtcatactacagattgtatt

SEQ ID NO: 385873 - DNA, 60 bp, Artificial
  Synthetic oligonucleotide
ctggcaggtaacgttgatcgaaacgattgacgctgctaacatgtcttgttccctctccat

SEQ ID NO: 385874 - DNA, 55 bp, Artificial
  Synthetic oligonucleotide
ctggcaggtggcagggtcagtttgccacgttagactctttctcgcattaccgctt

SEQ ID NO: 385875 - DNA, 60 bp, Artificial
  Synthetic oligonucleotide
ctggcagtctttcagagcttagatgaacttctggggacagaccagctcttcaccagggtc

SEQ ID NO: 385876 - DNA, 55 bp, Artificial
  Synthetic oligonucleotide
ctggcagtgtcgcagtgcgtttgtgatcaagcttatcgatatcttgggttattga

SEQ ID NO: 385877 - DNA, 55 bp, Artificial
  Synthetic oligonucleotide
ctggcagttgacaggaggatcctcgttctagccgagttgtttcatgtgagagggg

SEQ ID NO: 385878 - DNA, 55 bp, Artificial
  Synthetic oligonucleotide
ctggcataaatgtgataatgagtgtatagagtctgtcaagaatggtacctatgac

SEQ ID NO: 385879 - DNA, 60 bp, Artificial
  Synthetic oligonucleotide
ctggcataaattggctagccacaaatatacactatttggatcccctacactgggctagat

SEQ ID NO: 385880 - DNA, 55 bp, Artificial
  Synthetic oligonucleotide
ctggcataactacacaccaggaccagggccccgatacccactgacctttgggtgg

SEQ ID NO: 385881 - DNA, 60 bp, Artificial
  Synthetic oligonucleotide
ctggcataactacacaccagggccagggatcagatatccactgacctttggttggtgctt

SEQ ID NO: 385882 - DNA, 60 bp, Artificial
  Synthetic oligonucleotide
ctggcatacatctccaaagatattgacaaaaagatatgggttaccattggcagtagctaa

SEQ ID NO: 385883 - DNA, 55 bp, Artificial
  Synthetic oligonucleotide
ctggcatacatgcttgagagagaactggttgcccgaagaaggttcctgccagtgg

SEQ ID NO: 385884 - DNA, 59 bp, Artificial
  Synthetic oligonucleotide
ctggcatacgatcaaaagctgttatacaaggactgcccacagttttaacaccaggttca

SEQ ID NO: 385885 - DNA, 55 bp, Artificial
  Synthetic oligonucleotide
ctggcatactgctcccactcgcgggccggatgctaactgccggcgttccgcgttg

SEQ ID NO: 385886 - DNA, 56 bp, Artificial
  Synthetic oligonucleotide
ctggcatatctcggagcgtccgctgcacatgctaagtccgatgaaccgaccatcct

SEQ ID NO: 385887 - DNA, 52 bp, Artificial
  Synthetic oligonucleotide
ctggcatatttaccgtattgtacctttcctgttagtttttccactagttgtt

SEQ ID NO: 385888 - DNA, 60 bp, Artificial
  Synthetic oligonucleotide
ctggcatcactattagagatgtgccacagcacacaaattggtgggataaggatggtggac

SEQ ID NO: 385889 - DNA, 60 bp, Artificial
  Synthetic oligonucleotide
ctggcatcattgttggagatgtgtcatagcacacaaattggcgggataaggatggtggac

SEQ ID NO: 385890 - DNA, 57 bp, Artificial
  Synthetic oligonucleotide
ctggcatcccgcaagggaagtaggggatgttgaccctctcatttcggacgcgaagac

SEQ ID NO: 385891 - DNA, 60 bp, Artificial
  Synthetic oligonucleotide
ctggcatgatcagtgcagttcgaaccagactttacgagccaaccatgagagagctctacc

SEQ ID NO: 385892 - DNA, 54 bp, Artificial
  Synthetic oligonucleotide
ctggcatgcggaaatgcgctctcagataccgtcctgtggagtgtcccgtccgca

SEQ ID NO: 385893 - DNA, 59 bp, Artificial
  Synthetic oligonucleotide
ctggcatggagccaaactgattattcagctttgatggatctgaaacatcccagattcta

SEQ ID NO: 385894 - DNA, 60 bp, Artificial
  Synthetic oligonucleotide
ctggcatggagccgcctaaaacacctgaggccgctgcccattgcatccatgctgagtggg

SEQ ID NO: 385895 - DNA, 60 bp, Artificial
  Synthetic oligonucleotide
ctggcatggctcgaatcggccatgggtatctttcaatcaaaatctggagtatcaactagg

SEQ ID NO: 385896 - DNA, 55 bp, Artificial
  Synthetic oligonucleotide
ctggcatgtaatacaacattttgtaagccaactgtctacatgattgtcccaattc

SEQ ID NO: 385897 - DNA, 60 bp, Artificial
  Synthetic oligonucleotide
ctggcatgttcgactcgtccgtcctctgtgagtgctatgacgcgggctgtgcttggtatg

SEQ ID NO: 385898 - DNA, 60 bp, Artificial
  Synthetic oligonucleotide
ctggcattccaatctgaatgatgccacatatcaaagaacaagagctctcgtgcgcactgg

SEQ ID NO: 385899 - DNA, 59 bp, Artificial
  Synthetic oligonucleotide
ctggcattgtcatgttttacttcatagtaagaacttacaacaagcaactggtaaatggc

SEQ ID NO: 385900 - DNA, 57 bp, Artificial
  Synthetic oligonucleotide
ctggcatttcggataattatgacttgtaacgttggtacgatgtattttactgctacc

SEQ ID NO: 385901 - DNA, 54 bp, Artificial
  Synthetic oligonucleotide
ctggccaaattggtcaatccggccggcttaaatagcatcctcttaagggggaaa

SEQ ID NO: 385902 - DNA, 55 bp, Artificial
  Synthetic oligonucleotide
ctggccaatctgctcagaatgatttctattctgcattaaaagaggggcgtatcac

SEQ ID NO: 385903 - DNA, 60 bp, Artificial
  Synthetic oligonucleotide
ctggccacaagctatgatctaaattacaaacgcatgttcaatgaaaacatcacgttagaa

SEQ ID NO: 385904 - DNA, 55 bp, Artificial
  Synthetic oligonucleotide
ctggccacacctgggagtcagccaaccccttctgtggggagagcaccctttacac

SEQ ID NO: 385905 - DNA, 55 bp, Artificial
  Synthetic oligonucleotide
ctggccacatgttggacatgtattccgtaatgctaactaatgataacacctccac

SEQ ID NO: 385906 - DNA, 54 bp, Artificial
  Synthetic oligonucleotide
ctggccacattgaaccgtactcaggaccaggcaataaccccgtcttccccgtta

SEQ ID NO: 385907 - DNA, 55 bp, Artificial
  Synthetic oligonucleotide
ctggccacctataaatgcagaccaaacaaattttaactggggattaagaggactc

SEQ ID NO: 385908 - DNA, 52 bp, Artificial
  Synthetic oligonucleotide
ctggccacgaactcagtctgtaaggtcacagcaggcctagcagctggccaga

SEQ ID NO: 385909 - DNA, 55 bp, Artificial
  Synthetic oligonucleotide
ctggccagaatttgacggtttatattaactgtattgtcaattcactcctgttgcg

SEQ ID NO: 385910 - DNA, 52 bp, Artificial
  Synthetic oligonucleotide
ctggccagacgcaagctgatcacacacacgctcaggcttaaggtgaggcctg

SEQ ID NO: 385911 - DNA, 55 bp, Artificial
  Synthetic oligonucleotide
ctggccagcacagtatccacgcaatgacgctgaggctctctactatggcgaccga

SEQ ID NO: 385912 - DNA, 59 bp, Artificial
  Synthetic oligonucleotide
ctggccagccgtttagatgcgttacaggagacgttactagtactgtatgaaacagatag

SEQ ID NO: 385913 - DNA, 55 bp, Artificial
  Synthetic oligonucleotide
ctggccagtgcaattggagggaacgttactgctggatacaaatacacccatcctg

SEQ ID NO: 385914 - DNA, 60 bp, Artificial
  Synthetic oligonucleotide
ctggccatgcgttgtagcgatgggcatgccagctcactcacagtgttgtcaggaaactgc

SEQ ID NO: 385915 - DNA, 56 bp, Artificial
  Synthetic oligonucleotide
ctggccattgaagaacatgtcaaccggtacatacccagccaccttcgcaacgtcaa

SEQ ID NO: 385916 - DNA, 57 bp, Artificial
  Synthetic oligonucleotide
ctggccattgcaatgggccttgtcttcatatgtgtgagaaatggaaacatgcggtgc

SEQ ID NO: 385917 - DNA, 55 bp, Artificial
  Synthetic oligonucleotide
ctggcccaacatataggtccattcctcaaaatggcatcgcatgtgtgttattggg

SEQ ID NO: 385918 - DNA, 55 bp, Artificial
  Synthetic oligonucleotide
ctggcccaagttcggccccgaagcagaactgaagagcctgcgactgcaggcttca

SEQ ID NO: 385919 - DNA, 60 bp, Artificial
  Synthetic oligonucleotide
ctggcccacattgttttgcctgtctgcatatgccaatcaccctcaattacaatacttatg

SEQ ID NO: 385920 - DNA, 57 bp, Artificial
  Synthetic oligonucleotide
ctggcccacttctgccgcaaatttcaacccctctatgctacggaagcgaagagggtg

SEQ ID NO: 385921 - DNA, 56 bp, Artificial
  Synthetic oligonucleotide
ctggcccagattctccccccagaggccaatccgatatactgggtaggcgcgattgg

SEQ ID NO: 385922 - DNA, 55 bp, Artificial
  Synthetic oligonucleotide
ctggccccacagatgattgctgccctgccaaacctgaggaagaagggatgatgat

SEQ ID NO: 385923 - DNA, 60 bp, Artificial
  Synthetic oligonucleotide
ctggccccttttgatctcaaggcaaaggagtacagggagcagtacactgatgttggacgc

SEQ ID NO: 385924 - DNA, 52 bp, Artificial
  Synthetic oligonucleotide
ctggcccgaaatcacggcatacgaaacgtgggtctagtttaccgggaacctg

SEQ ID NO: 385925 - DNA, 57 bp, Artificial
  Synthetic oligonucleotide
ctggccctactattagggggactcactatgggcggaattgccgctggaattggaaca

SEQ ID NO: 385926 - DNA, 58 bp, Artificial
  Synthetic oligonucleotide
ctggccctcccctcttgcacttctggcatcgacttggaaaagtccagcgtcaagaaat

SEQ ID NO: 385927 - DNA, 55 bp, Artificial
  Synthetic oligonucleotide
ctggccctgccgtggaaacataaaggggcacagaattggaacaatgctgaacggc

SEQ ID NO: 385928 - DNA, 55 bp, Artificial
  Synthetic oligonucleotide
ctggcccttttgaatatcattctcgaaacagggctcattgatctcctctcgtcga

SEQ ID NO: 385929 - DNA, 58 bp, Artificial
  Synthetic oligonucleotide
ctggccgagcgggggtaagaccatagcgatggggggagatgctaggagtggtaggaga

SEQ ID NO: 385930 - DNA, 50 bp, Artificial
  Synthetic oligonucleotide
ctggccgcgtcccggtgctacaacattcggagctcctgacattttgggta

SEQ ID NO: 385931 - DNA, 55 bp, Artificial
  Synthetic oligonucleotide
ctggccgctacaatatcaatggtccaacccagaccaaactcgaacccagcgtgtt

SEQ ID NO: 385932 - DNA, 60 bp, Artificial
  Synthetic oligonucleotide
ctggccgctggctgctatcccttttccgccttggctgtcagccatatggctgtccagctg

SEQ ID NO: 385933 - DNA, 55 bp, Artificial
  Synthetic oligonucleotide
ctggccggagagcaaagaagcgcctacgcttttctccgggctctccaagacagcc

SEQ ID NO: 385934 - DNA, 58 bp, Artificial
  Synthetic oligonucleotide
ctggccgtgatgggaagctcctacggattccagtactcaccaagacagcgggttgaat

SEQ ID NO: 385935 - DNA, 54 bp, Artificial
  Synthetic oligonucleotide
ctggccgttgagctacggacactggttccgtacctgtctcccctttagaagaaa

SEQ ID NO: 385936 - DNA, 53 bp, Artificial
  Synthetic oligonucleotide
ctggccgttgagctacggacactggttccgtacctgtctcccctttaggcggt

SEQ ID NO: 385937 - DNA, 60 bp, Artificial
  Synthetic oligonucleotide
ctggcctaactagagtgccgtacttcgtgcgcgctcaagggctcatccgtgtgtgcatgt

SEQ ID NO: 385938 - DNA, 55 bp, Artificial
  Synthetic oligonucleotide
ctggcctaatgacaagagcaatgtgtctgagacaatggactggactgaccttccg

SEQ ID NO: 385939 - DNA, 55 bp, Artificial
  Synthetic oligonucleotide
ctggcctacggggatgatgttatcgtgacataccctttccagttggacgcttcaa

SEQ ID NO: 385940 - DNA, 59 bp, Artificial
  Synthetic oligonucleotide
ctggcctactacatggcctaaacagatggctatttccactcttcagggtattggccaaa

SEQ ID NO: 385941 - DNA, 60 bp, Artificial
  Synthetic oligonucleotide
ctggcctatgattttagggccatacagaagcaccctgaagagttcaagcatgttactagt

SEQ ID NO: 385942 - DNA, 55 bp, Artificial
  Synthetic oligonucleotide
ctggcctattcatgctgcgctactagcacacgtgtattgtgctggatagtgttag

SEQ ID NO: 385943 - DNA, 60 bp, Artificial
  Synthetic oligonucleotide
ctggcctcctcttcgctattctgtgctgcactttgattggtacctgagtacaatggcctc

SEQ ID NO: 385944 - DNA, 55 bp, Artificial
  Synthetic oligonucleotide
ctggcctgaaccgcctcatagagtccgttgctgtttcttgtaccggcgacgaaga

SEQ ID NO: 385945 - DNA, 57 bp, Artificial
  Synthetic oligonucleotide
ctggcctgccaaacaaacgtcccaatgtgcccactatcaggacggcaaaggtacaag

SEQ ID NO: 385946 - DNA, 60 bp, Artificial
  Synthetic oligonucleotide
ctggccttcaagcggtcgtctaaatacgatcttgaatgtgcacagataccggtgcacatg

SEQ ID NO: 385947 - DNA, 55 bp, Artificial
  Synthetic oligonucleotide
ctggccttccagccaggctcactgaagagcaactccatcgcatttggaggggagg

SEQ ID NO: 385948 - DNA, 58 bp, Artificial
  Synthetic oligonucleotide
ctggccttgcaggtaggtatccctgtgttaactcaatctggtatgctttccgccctaa

SEQ ID NO: 385949 - DNA, 60 bp, Artificial
  Synthetic oligonucleotide
ctggcgaaagtcccgaacatgacaatccctatacatgatcttcaatatattatgtatccc

SEQ ID NO: 385950 - DNA, 60 bp, Artificial
  Synthetic oligonucleotide
ctggcgacagtggtccagcctgcgtggctgcctgcacactcctttggagtgtgaagccat

SEQ ID NO: 385951 - DNA, 59 bp, Artificial
  Synthetic oligonucleotide
ctggcgagagcagtagaatttagggaaatttggatagaagtatttcagggagtgacagc

SEQ ID NO: 385952 - DNA, 54 bp, Artificial
  Synthetic oligonucleotide
ctggcgatatgggagtatcaagcttttcgcccaagccttaaaccagctattcgg

SEQ ID NO: 385953 - DNA, 60 bp, Artificial
  Synthetic oligonucleotide
ctggcgatcgatatgttaggatgggaactgaaagcatgaattttgccaagagcccggaaa

SEQ ID NO: 385954 - DNA, 55 bp, Artificial
  Synthetic oligonucleotide
ctggcgatgctcataaacatacctgagaatgaggcgaaggattttacaaagagag

SEQ ID NO: 385955 - DNA, 55 bp, Artificial
  Synthetic oligonucleotide
ctggcgcacgctgtaatcacaactgtgattgacgtgttgtagcgtgtaatttagg

SEQ ID NO: 385956 - DNA, 56 bp, Artificial
  Synthetic oligonucleotide
ctggcgcatgcgccggcgtaagtacgtaactggttgggtaatgccaacgttttata

SEQ ID NO: 385957 - DNA, 55 bp, Artificial
  Synthetic oligonucleotide
ctggcgcattaaagagaagattcccatatatcatgcacattagagcagctaaagc

SEQ ID NO: 385958 - DNA, 56 bp, Artificial
  Synthetic oligonucleotide
ctggcgcattcattagctcaaacttgggctaactttaggggtacccaggataaggc

SEQ ID NO: 385959 - DNA, 51 bp, Artificial
  Synthetic oligonucleotide
ctggcgcgaatagcgatgtgactgccttcgcagacaacatactggtttatg

SEQ ID NO: 385960 - DNA, 55 bp, Artificial
  Synthetic oligonucleotide
ctggcgctcccacatgtcatgacacacggtggcattaaacttttcgggacacttg

SEQ ID NO: 385961 - DNA, 54 bp, Artificial
  Synthetic oligonucleotide
ctggcgctgctgaagtcgcgtttcaccttaccgggcgatacccgggaacgaaag

SEQ ID NO: 385962 - DNA, 55 bp, Artificial
  Synthetic oligonucleotide
ctggcgcttggtcttcggattcagtagggtaagtataggtcattacaccgatacc

SEQ ID NO: 385963 - DNA, 55 bp, Artificial
  Synthetic oligonucleotide
ctggcggaattcataacctcgttgcgaatgatgtcagcgcatttccgagagtagt

SEQ ID NO: 385964 - DNA, 60 bp, Artificial
  Synthetic oligonucleotide
ctggcggagtgttcactattgacgggaaaatcaagtgcgtaactgccgcacatgtcctta

SEQ ID NO: 385965 - DNA, 54 bp, Artificial
  Synthetic oligonucleotide
ctggcggagtgtttaccatcgacggaagaattaggtgcgtgactgccgcacatg

SEQ ID NO: 385966 - DNA, 55 bp, Artificial
  Synthetic oligonucleotide
ctggcggatcattgtagaatagcagtccacgtattactaattggtatgccaagcg

SEQ ID NO: 385967 - DNA, 60 bp, Artificial
  Synthetic oligonucleotide
ctggcggcaggcaaacaatggagaagatgcgaccgctggtctcacccatttgatgatctg

SEQ ID NO: 385968 - DNA, 51 bp, Artificial
  Synthetic oligonucleotide
ctggcggccgtcgcatacgagaaggtgcgacaggcagccgcagacccgagt

SEQ ID NO: 385969 - DNA, 55 bp, Artificial
  Synthetic oligonucleotide
ctggcggcgatagtgctgcgaagaacgatcagagcaatccggagacgcagggagc

SEQ ID NO: 385970 - DNA, 55 bp, Artificial
  Synthetic oligonucleotide
ctggcggctaatgctatttgctcggcagtcccgtcacattgggttccaacaagtc

SEQ ID NO: 385971 - DNA, 53 bp, Artificial
  Synthetic oligonucleotide
ctggcgggaggaaatgactgccgatcagttcttgcagctccgggatgaggctt

SEQ ID NO: 385972 - DNA, 60 bp, Artificial
  Synthetic oligonucleotide
ctggcggggagacggcatcatgcaaaccacttgcccatgtggagcacaaatcaccggaca

SEQ ID NO: 385973 - DNA, 60 bp, Artificial
  Synthetic oligonucleotide
ctggcgggttagagatatcgaactatggtggcacatataccgcacatacatccattgatt

SEQ ID NO: 385974 - DNA, 60 bp, Artificial
  Synthetic oligonucleotide
ctggcggtatgaaatttatcggcctaaagaaacaactcatgatgatggatatatttgtgt

SEQ ID NO: 385975 - DNA, 55 bp, Artificial
  Synthetic oligonucleotide
ctggcggtttggccaacactaccccactctacgataagtccagttcaggggagga

SEQ ID NO: 385976 - DNA, 53 bp, Artificial
  Synthetic oligonucleotide
ctggcgtaaagaactggttgacccgaactataagactaaccgtaaggccgtga

SEQ ID NO: 385977 - DNA, 55 bp, Artificial
  Synthetic oligonucleotide
ctggcgtacaacggctcggcccatggctcctgcgacccgaaactgcttccgtatt

SEQ ID NO: 385978 - DNA, 50 bp, Artificial
  Synthetic oligonucleotide
ctggcgtaggttcggttgtaaacgagttcaccggttggtccccaagggat

SEQ ID NO: 385979 - DNA, 55 bp, Artificial
  Synthetic oligonucleotide
ctggcgtatgatggttgcacgcagaccacccacggggactgtgggctaccgttgt

SEQ ID NO: 385980 - DNA, 60 bp, Artificial
  Synthetic oligonucleotide
ctggcgtcaggccaacaatggtgaagacgctactgctggtcttactcatatgatgatctg

SEQ ID NO: 385981 - DNA, 55 bp, Artificial
  Synthetic oligonucleotide
ctggcgtcattacctgacgtgtctggatattttgcagaagtgcttgagcgcatgc

SEQ ID NO: 385982 - DNA, 55 bp, Artificial
  Synthetic oligonucleotide
ctggcgtgctatgtgggtcgtaagagaactatctataccaaggcgatggagagct

SEQ ID NO: 385983 - DNA, 60 bp, Artificial
  Synthetic oligonucleotide
ctggcgtggtcgcgtgtatgcaatcccgatgttcaatccacaaggtaacgatatggtgaa

SEQ ID NO: 385984 - DNA, 60 bp, Artificial
  Synthetic oligonucleotide
ctggcgttcatgcagcaaaaacataagacacattctgggggcgattacggagtcccaaca

SEQ ID NO: 385985 - DNA, 55 bp, Artificial
  Synthetic oligonucleotide
ctggcgttgtaaccgacaacaaccttcgccacaaactcgtcgtattttcgagcat

SEQ ID NO: 385986 - DNA, 60 bp, Artificial
  Synthetic oligonucleotide
ctggcgtttgaatctgagagtgcaaattctattggttgtgaaacggcgtctgcggaagta

SEQ ID NO: 385987 - DNA, 52 bp, Artificial
  Synthetic oligonucleotide
ctggctaaacctgtatctacgggtgtttctattgcgttcgtgtctgaagccg

SEQ ID NO: 385988 - DNA, 55 bp, Artificial
  Synthetic oligonucleotide
ctggctaaagaggactactactcgcaaggaatggatcgcacgcagagaggtatcg

SEQ ID NO: 385989 - DNA, 60 bp, Artificial
  Synthetic oligonucleotide
ctggctaagcttctgctcgaacatggacggaaatgacaaggtaacctctgcagcatcgtt

SEQ ID NO: 385990 - DNA, 60 bp, Artificial
  Synthetic oligonucleotide
ctggctaagcttttgctcgaacatggatggaaacgttaatttgacctctgcagcatcgtt

SEQ ID NO: 385991 - DNA, 55 bp, Artificial
  Synthetic oligonucleotide
ctggctaagtacatagaattaccatcggatagcacaggcaatatgtacatagcga

SEQ ID NO: 385992 - DNA, 56 bp, Artificial
  Synthetic oligonucleotide
ctggctaagtgtttactcattgctagggaagtgttgcgacccgttaccagtaggaa

SEQ ID NO: 385993 - DNA, 60 bp, Artificial
  Synthetic oligonucleotide
ctggctaattttctgctcgaacatggacggaaatgacaaggtgacttctgcagcatcatt

SEQ ID NO: 385994 - DNA, 55 bp, Artificial
  Synthetic oligonucleotide
ctggctacaggaatgaggaacatccctgagaagacaaccagaggtctgtttggtg

SEQ ID NO: 385995 - DNA, 58 bp, Artificial
  Synthetic oligonucleotide
ctggctacaggtccacaaaaagaatgtggcattcccgggctggatgataactccgtta

SEQ ID NO: 385996 - DNA, 55 bp, Artificial
  Synthetic oligonucleotide
ctggctacaggtcgatccggggtcaatgttcagatcgatacatgccaattggact

SEQ ID NO: 385997 - DNA, 60 bp, Artificial
  Synthetic oligonucleotide
ctggctacgcccgagataccgttcacaactgaggcggctaatgagattgctcgtgttact

SEQ ID NO: 385998 - DNA, 60 bp, Artificial
  Synthetic oligonucleotide
ctggctactaccaatgatcatagtacgggagggattggaccgatcggagagatgggaatg

SEQ ID NO: 385999 - DNA, 59 bp, Artificial
  Synthetic oligonucleotide
ctggctactccctggcttcggaaaatgtgtataagcttttcacagacggcggtgctgcc

SEQ ID NO: 386000 - DNA, 55 bp, Artificial
  Synthetic oligonucleotide
ctggctactgatcgggccattcgagaatttcaatctttactgctagaggagttgc

SEQ ID NO: 386001 - DNA, 59 bp, Artificial
  Synthetic oligonucleotide
ctggctagctacccattccccattgattgctcggaattggcgagaactggtaaggagta

SEQ ID NO: 386002 - DNA, 57 bp, Artificial
  Synthetic oligonucleotide
ctggctaggactttccgtagtcctccagatgttacctaccgtatgcagcaaatttac

SEQ ID NO: 386003 - DNA, 55 bp, Artificial
  Synthetic oligonucleotide
ctggctataccggtggagccgtacggcttgaacatgaggatgtgatcgacccacc

SEQ ID NO: 386004 - DNA, 60 bp, Artificial
  Synthetic oligonucleotide
ctggctatactgcaagtcagtcaaagcagtaaccgaacgggacatctatgccaaaataag

SEQ ID NO: 386005 - DNA, 60 bp, Artificial
  Synthetic oligonucleotide
ctggctatagaaagatacctaagggatcaacagctcctagggctttggggctgctctgga

SEQ ID NO: 386006 - DNA, 55 bp, Artificial
  Synthetic oligonucleotide
ctggctatcggccaagaccttccaggaaatgacaacagcacagcaacgctgtgcc

SEQ ID NO: 386007 - DNA, 55 bp, Artificial
  Synthetic oligonucleotide
ctggctatcttattagacagaaaaccctatctacctgaaggtgtgaacacgcttc

SEQ ID NO: 386008 - DNA, 60 bp, Artificial
  Synthetic oligonucleotide
ctggctatcttcagtgacgctgacttgagtgcggctatcgacagtgtcttagatgaagag

SEQ ID NO: 386009 - DNA, 60 bp, Artificial
  Synthetic oligonucleotide
ctggctatggaaattagtccctgtaaatgtatcagatgaggcacaggaggatgaggagca

SEQ ID NO: 386010 - DNA, 54 bp, Artificial
  Synthetic oligonucleotide
ctggctatggtgttaaccagggagaagggactagaggttagaggagaccccgcg

SEQ ID NO: 386011 - DNA, 55 bp, Artificial
  Synthetic oligonucleotide
ctggctcagccagctctctcgtcaacggagtggtgaagctcatgagtaaaccttg

SEQ ID NO: 386012 - DNA, 58 bp, Artificial
  Synthetic oligonucleotide
ctggctcagtctcatcgtgtggtgctttactactatggtaacagggcacacaaaaacc

SEQ ID NO: 386013 - DNA, 60 bp, Artificial
  Synthetic oligonucleotide
ctggctccatagcctaggacaatatatctatgaaacttatggggatacctggacaggagt

SEQ ID NO: 386014 - DNA, 55 bp, Artificial
  Synthetic oligonucleotide
ctggctcccaccaaattagagctgccaacaaggtggtccccttttgtaacagcct

SEQ ID NO: 386015 - DNA, 57 bp, Artificial
  Synthetic oligonucleotide
ctggctccccggcgcttgagttcactatcgggtatgtcctgaatgtcgaacgggaca

SEQ ID NO: 386016 - DNA, 59 bp, Artificial
  Synthetic oligonucleotide
ctggctccctctttatattttgctacacctagtgggtccttagcatctagtgactccca

SEQ ID NO: 386017 - DNA, 54 bp, Artificial
  Synthetic oligonucleotide
ctggctcgactgcccgacaacgtaaccatctggagccgtccctaatgggatggc

SEQ ID NO: 386018 - DNA, 60 bp, Artificial
  Synthetic oligonucleotide
ctggctcgatatgcttttgacttttatgaggtcacatcccgaacatccgtccgagctcgc

SEQ ID NO: 386019 - DNA, 60 bp, Artificial
  Synthetic oligonucleotide
ctggctcggagccagtaatagtctattctataactctctccaggagagaaatttagtaca

SEQ ID NO: 386020 - DNA, 55 bp, Artificial
  Synthetic oligonucleotide
ctggctctctacccggagggagatgtacccgatatcgccacatctttaacacgtc

SEQ ID NO: 386021 - DNA, 55 bp, Artificial
  Synthetic oligonucleotide
ctggctctgggcagtttatgacaactgatgactttcaatcaccaagtgcattacc

SEQ ID NO: 386022 - DNA, 59 bp, Artificial
  Synthetic oligonucleotide
ctggctgaatttatgactttcatccacactaaagattttacgatgaatgagtgttacac

SEQ ID NO: 386023 - DNA, 55 bp, Artificial
  Synthetic oligonucleotide
ctggctgagggaagctgaaggcaattccgtagtgcttgactttcgctcctgctgc

SEQ ID NO: 386024 - DNA, 55 bp, Artificial
  Synthetic oligonucleotide
ctggctgattctgagactattgaacaggtagctgaatggatacttaatgtatgga

SEQ ID NO: 386025 - DNA, 57 bp, Artificial
  Synthetic oligonucleotide
ctggctgattttctgttcgaagattgaagggaacgtcaaagttacctctgaagcgtc

SEQ ID NO: 386026 - DNA, 60 bp, Artificial
  Synthetic oligonucleotide
ctggctgcaagccttaggacaatacatttatgagacttatggagacacttaggaaagagt

SEQ ID NO: 386027 - DNA, 55 bp, Artificial
  Synthetic oligonucleotide
ctggctggacagtttcaagccatcaaggccgcatacgatgtgctaactgtccccg

SEQ ID NO: 386028 - DNA, 60 bp, Artificial
  Synthetic oligonucleotide
ctggctggatcctgggaaatccaaagtgtgaatcactctccacagtaagctcatggtcct

SEQ ID NO: 386029 - DNA, 55 bp, Artificial
  Synthetic oligonucleotide
ctggctggggacgcccgtcgtctcgggttcgaacccatctctacgacgtacgata

SEQ ID NO: 386030 - DNA, 60 bp, Artificial
  Synthetic oligonucleotide
ctggctggggcttggcaataggccatcagcgcatgcgtggaacctttcaggctcctctgc

SEQ ID NO: 386031 - DNA, 57 bp, Artificial
  Synthetic oligonucleotide
ctggctgtcgtacctccattaggcagacaggaaccacccttctggggcctacgctac

SEQ ID NO: 386032 - DNA, 55 bp, Artificial
  Synthetic oligonucleotide
ctggctgtctccacacattcgacgagctgttcgatgctaggatccacagccacgg

SEQ ID NO: 386033 - DNA, 50 bp, Artificial
  Synthetic oligonucleotide
ctggctgtggtacataggaatatgtataatgatagtaggaggcttaatag

SEQ ID NO: 386034 - DNA, 55 bp, Artificial
  Synthetic oligonucleotide
ctggctgttactcagataaatgcccctaacactgggccaagcacagcctcagcgg

SEQ ID NO: 386035 - DNA, 55 bp, Artificial
  Synthetic oligonucleotide
ctggcttaacttcctccaggcggcatatcgcctagaacccggtccctccagttac

SEQ ID NO: 386036 - DNA, 60 bp, Artificial
  Synthetic oligonucleotide
ctggcttaatcctgctagtgtgtacatgcgcactactcatactgacttaggtgtctatct

SEQ ID NO: 386037 - DNA, 60 bp, Artificial
  Synthetic oligonucleotide
ctggcttacaccataggaacgacatatttccaaagagtcctgatctttatcttactgaca

SEQ ID NO: 386038 - DNA, 60 bp, Artificial
  Synthetic oligonucleotide
ctggcttaccagatgtactacctcagagtgaggggacgggatgcaatcctggaatatatg

SEQ ID NO: 386039 - DNA, 53 bp, Artificial
  Synthetic oligonucleotide
ctggcttactatgtggtacgtttgtatgggactcaccgaaggaaccggacttg

SEQ ID NO: 386040 - DNA, 55 bp, Artificial
  Synthetic oligonucleotide
ctggcttattccggtgtcaattttcgattttcgacacgcgcgcggtgtgtacccc

SEQ ID NO: 386041 - DNA, 56 bp, Artificial
  Synthetic oligonucleotide
ctggcttcccatactttgtattggactgccagtccctttgggcccccatgaattcc

SEQ ID NO: 386042 - DNA, 59 bp, Artificial
  Synthetic oligonucleotide
ctggcttgaaaagatcaaagtactggtcaatacatgggttctctcatggtggaatatta

SEQ ID NO: 386043 - DNA, 55 bp, Artificial
  Synthetic oligonucleotide
ctggcttgctaaatgtgactttgcaacgcaagtcatgaggataggccagggactt

SEQ ID NO: 386044 - DNA, 54 bp, Artificial
  Synthetic oligonucleotide
ctggcttgctcccatgctaccaacccagattatgctcctcttaacattcgagta

SEQ ID NO: 386045 - DNA, 55 bp, Artificial
  Synthetic oligonucleotide
ctggcttggtacataacctgattggaatgcttcagactattgctgatggtaaggc

SEQ ID NO: 386046 - DNA, 59 bp, Artificial
  Synthetic oligonucleotide
ctggcttgtatcagtcagatattggagtcggtgtggggctagggaggactcaccatggt

SEQ ID NO: 386047 - DNA, 55 bp, Artificial
  Synthetic oligonucleotide
ctggctttgcgtttgtggccgactatcccatgtaatatagtcaccgactccgcct

SEQ ID NO: 386048 - DNA, 55 bp, Artificial
  Synthetic oligonucleotide
ctgggaaagaattagtggcagaattaataaagacaggatcaggacaatgggccta

SEQ ID NO: 386049 - DNA, 53 bp, Artificial
  Synthetic oligonucleotide
ctgggaaaggcttttaccactaccctgaaaggtgcccagaggttagctgccct

SEQ ID NO: 386050 - DNA, 55 bp, Artificial
  Synthetic oligonucleotide
ctgggaaaggtggacatagtggatcctccttcaagtgctgtcatggtactgattg

SEQ ID NO: 386051 - DNA, 54 bp, Artificial
  Synthetic oligonucleotide
ctgggaaagttgaattagttaccccatggggtgtcaagtttgataatgttgccg

SEQ ID NO: 386052 - DNA, 56 bp, Artificial
  Synthetic oligonucleotide
ctgggaaatcatcatctatagttaaatgtactagactgatgaaagacaaattagaa

SEQ ID NO: 386053 - DNA, 55 bp, Artificial
  Synthetic oligonucleotide
ctgggaaatgggtcaagcacccagtccatataatactagggttgagtgcataggg

SEQ ID NO: 386054 - DNA, 55 bp, Artificial
  Synthetic oligonucleotide
ctgggaaattaacctgcaacctccaacatcctctgtgttagaggatatctatcgc

SEQ ID NO: 386055 - DNA, 55 bp, Artificial
  Synthetic oligonucleotide
ctgggaacagtttattggcgctatattcaagccattgtagtttggtcgcccattc

SEQ ID NO: 386056 - DNA, 55 bp, Artificial
  Synthetic oligonucleotide
ctgggaaccaagcaagatagcatggggctctttgaatttagtcgaggaacaacca

SEQ ID NO: 386057 - DNA, 50 bp, Artificial
  Synthetic oligonucleotide
ctgggaaccatttaggttaagatattgtgctccaccagggtttgccttac

SEQ ID NO: 386058 - DNA, 52 bp, Artificial
  Synthetic oligonucleotide
ctgggaacccccgtcgtaagattaactatggcgggggctttcatgggtggtg

SEQ ID NO: 386059 - DNA, 52 bp, Artificial
  Synthetic oligonucleotide
ctgggaacgtacggacaacagcgtatcgacggtgaacccgcggagacgaagg

SEQ ID NO: 386060 - DNA, 51 bp, Artificial
  Synthetic oligonucleotide
ctgggaagaggtttatggggactcaattttgggtcccccctctgggtcagg

SEQ ID NO: 386061 - DNA, 59 bp, Artificial
  Synthetic oligonucleotide
ctgggaaggtcatttgtatttccgatgtgacacgtgggaatggtatcacccatcgtgtg

SEQ ID NO: 386062 - DNA, 60 bp, Artificial
  Synthetic oligonucleotide
ctgggaataccttgcttggatcaaacacaatcctggtgctacaccaatgctctggggtta

SEQ ID NO: 386063 - DNA, 54 bp, Artificial
  Synthetic oligonucleotide
ctgggacaaaagagatacaccaaaacaacgtattggtgggacggacttcaatcc

SEQ ID NO: 386064 - DNA, 55 bp, Artificial
  Synthetic oligonucleotide
ctgggacaagtcaaaatgtcattccctgaaggaaaagatatcctgttcatgggta

SEQ ID NO: 386065 - DNA, 55 bp, Artificial
  Synthetic oligonucleotide
ctgggacaatgtgacctttctcaagagatcgtttgtccgcgacgagaggtttccc

SEQ ID NO: 386066 - DNA, 59 bp, Artificial
  Synthetic oligonucleotide
ctgggacatcctcttattctagacacctgtaccattgaaggactaatctatggcaaccc

SEQ ID NO: 386067 - DNA, 54 bp, Artificial
  Synthetic oligonucleotide
ctgggaccaagagtaccaccccaactgtcgcgattgtgttgatgacaggtgttt

SEQ ID NO: 386068 - DNA, 55 bp, Artificial
  Synthetic oligonucleotide
ctgggaccatagaatgtctgatacgcccattactttaacattccaggctcgcccc

SEQ ID NO: 386069 - DNA, 55 bp, Artificial
  Synthetic oligonucleotide
ctgggacccacaagaagacaggatcaaaatagacacctgtggaatatggcaaggg

SEQ ID NO: 386070 - DNA, 51 bp, Artificial
  Synthetic oligonucleotide
ctgggacgcagcagcctcaagggactgagactggggtgggaaggcctcaag

SEQ ID NO: 386071 - DNA, 55 bp, Artificial
  Synthetic oligonucleotide
ctgggacgccagctctggcggaaactgcctatggacgtcacaagctaccgtgtcc

SEQ ID NO: 386072 - DNA, 60 bp, Artificial
  Synthetic oligonucleotide
ctgggacgccttttcaaagacatggtgtgaagacctgcatgtgcttggttgtgagtcctc

SEQ ID NO: 386073 - DNA, 60 bp, Artificial
  Synthetic oligonucleotide
ctgggacgcttactgacagacatggtgtgaagatcctattgcgcttaactgtgagtcctc

SEQ ID NO: 386074 - DNA, 52 bp, Artificial
  Synthetic oligonucleotide
ctgggacgtaacgccaatgtgttaacggtgtgtcgtcacgtggagcctggcc

SEQ ID NO: 386075 - DNA, 51 bp, Artificial
  Synthetic oligonucleotide
ctgggactacaggagaggacttattacacagtcagctattaaaagaatttg

SEQ ID NO: 386076 - DNA, 55 bp, Artificial
  Synthetic oligonucleotide
ctgggactcagattgaacatgccgcttataagccattaatacctttcggcgtcac

SEQ ID NO: 386077 - DNA, 60 bp, Artificial
  Synthetic oligonucleotide
ctgggactgcagtcgagctgtgttctgtgtgtaccgtggataagccaaacccactaccgc

SEQ ID NO: 386078 - DNA, 55 bp, Artificial
  Synthetic oligonucleotide
ctgggactgtaacccgcaaacgcccttcgtggcaccccacttcacgcggaatatg

SEQ ID NO: 386079 - DNA, 57 bp, Artificial
  Synthetic oligonucleotide
ctgggacttttcaacacagttccaatgcaacagttggtcgactgctaaaaagtggga

SEQ ID NO: 386080 - DNA, 60 bp, Artificial
  Synthetic oligonucleotide
ctgggagactgagtctcccgggtctagtgtggctgtttgtagtctgtgtagccctgcgta

SEQ ID NO: 386081 - DNA, 55 bp, Artificial
  Synthetic oligonucleotide
ctgggagagtgtctttacaggcctcacccacatagatgctcacttcctgtcccag

SEQ ID NO: 386082 - DNA, 60 bp, Artificial
  Synthetic oligonucleotide
ctgggagatacgcaaactgtgcgtatactggtgatgtgcttggttcaactgaacccagtc

SEQ ID NO: 386083 - DNA, 59 bp, Artificial
  Synthetic oligonucleotide
ctgggagcaagagcagtacgttaccaatgagttcccagcattatttggaaacacacaat

SEQ ID NO: 386084 - DNA, 60 bp, Artificial
  Synthetic oligonucleotide
ctgggagcactgcaaggctccagcggaggctagagcctacgcgatgaaggaggacacccg

SEQ ID NO: 386085 - DNA, 55 bp, Artificial
  Synthetic oligonucleotide
ctgggagccctcggaactaggtatagcggcctgggagcccttgcctaggagtact

SEQ ID NO: 386086 - DNA, 55 bp, Artificial
  Synthetic oligonucleotide
ctgggagccctggtgctccgggagtgaagggattcgggttcctaaatggagacaa

SEQ ID NO: 386087 - DNA, 56 bp, Artificial
  Synthetic oligonucleotide
ctgggagccgacccgaaacttctggtaagtctgtaggtaccgatgagagtggcagt

SEQ ID NO: 386088 - DNA, 54 bp, Artificial
  Synthetic oligonucleotide
ctgggagcctataagttgcaatgtaaatatgggtacaataccagcaagaagggt

SEQ ID NO: 386089 - DNA, 55 bp, Artificial
  Synthetic oligonucleotide
ctgggagcctggtctgatgagcaaaacaaatgggcaagtgcgaaggaagcagtgg

SEQ ID NO: 386090 - DNA, 60 bp, Artificial
  Synthetic oligonucleotide
ctgggagctgtcaaagaagccagggtgaggagcaagaagggcttctccattggccacaac

SEQ ID NO: 386091 - DNA, 55 bp, Artificial
  Synthetic oligonucleotide
ctgggaggatctccaacaactgctgacgtggctctaccagacctttcgcaactgc

SEQ ID NO: 386092 - DNA, 59 bp, Artificial
  Synthetic oligonucleotide
ctgggaggccacaatccatggaagcagtacgcatggcgtagtggactagcggttagagg

SEQ ID NO: 386093 - DNA, 56 bp, Artificial
  Synthetic oligonucleotide
ctgggagggcttgagaccgtcgtatactgaggggatggacctcctgttgtttgccc

SEQ ID NO: 386094 - DNA, 59 bp, Artificial
  Synthetic oligonucleotide
ctgggagggtagggtacactacgctacgcagcagccttagctacgccggagcttagctc

SEQ ID NO: 386095 - DNA, 47 bp, Artificial
  Synthetic oligonucleotide
ctgggagggtaggtaccactcgctacgcagcagccttagctacgccg

SEQ ID NO: 386096 - DNA, 55 bp, Artificial
  Synthetic oligonucleotide
ctgggagggtaggtaccagccttagctacgccggagcttagctcgccccgttcta

SEQ ID NO: 386097 - DNA, 60 bp, Artificial
  Synthetic oligonucleotide
ctgggagggtcaatgctcaaatagccatgtaaacacactgaggcttcttgtcagaaatgc

SEQ ID NO: 386098 - DNA, 54 bp, Artificial
  Synthetic oligonucleotide
ctgggaggtacagttaggtatcccacatccagggggtttaaagcaaaagcaatc

SEQ ID NO: 386099 - DNA, 57 bp, Artificial
  Synthetic oligonucleotide
ctgggagtataccaaatccttgccatttatagtacggtatcgagcagtctggttttg

SEQ ID NO: 386100 - DNA, 60 bp, Artificial
  Synthetic oligonucleotide
ctgggagtatcggcaactgcggtattgcagccagagttaataagtggcgaaacagtgttc

SEQ ID NO: 386101 - DNA, 55 bp, Artificial
  Synthetic oligonucleotide
ctgggagtccgggagcccctggggtcaaaggattcggcttcctggatagtggcaa

SEQ ID NO: 386102 - DNA, 55 bp, Artificial
  Synthetic oligonucleotide
ctgggagtcgcaaacgcgattcagcagtcttacactaaggcagctgtccagaccc

SEQ ID NO: 386103 - DNA, 57 bp, Artificial
  Synthetic oligonucleotide
ctgggagtcggctaaaccattctgtggcgagagcacactttacacccgtacttggtc

SEQ ID NO: 386104 - DNA, 55 bp, Artificial
  Synthetic oligonucleotide
ctgggagtctgccaaccccttctgcggtgagggtaccttgtatacccgcacctgg

SEQ ID NO: 386105 - DNA, 55 bp, Artificial
  Synthetic oligonucleotide
ctgggataagcactggttttggcaacctgacaaaattgcatggggttcactcaac

SEQ ID NO: 386106 - DNA, 53 bp, Artificial
  Synthetic oligonucleotide
ctgggatactggaccggaggatacggccacctacagcgtcccggagaggatgg

SEQ ID NO: 386107 - DNA, 55 bp, Artificial
  Synthetic oligonucleotide
ctgggatatcccatttgctattaaggggctttggacattggtgtggggtggcacg

SEQ ID NO: 386108 - DNA, 55 bp, Artificial
  Synthetic oligonucleotide
ctgggatcttgtaaggcaggagcatgtactgctaaactatgccagaaggcagggc

SEQ ID NO: 386109 - DNA, 60 bp, Artificial
  Synthetic oligonucleotide
ctgggatgagtgacttgacagacattcaggaggatataacccgccatgaacaacaacttg

SEQ ID NO: 386110 - DNA, 55 bp, Artificial
  Synthetic oligonucleotide
ctgggatgattcacaagccttcaggaacatggtttatgtaaggtcattagctgct

SEQ ID NO: 386111 - DNA, 54 bp, Artificial
  Synthetic oligonucleotide
ctgggatgcaccatggaaattgtaccatacatttttcgtggttgtggcatcccg

SEQ ID NO: 386112 - DNA, 59 bp, Artificial
  Synthetic oligonucleotide
ctgggatgccaatcactgttactagcagcagggttttggggaaatttgaagactctcca

SEQ ID NO: 386113 - DNA, 55 bp, Artificial
  Synthetic oligonucleotide
ctgggatgtaataagtgttgacccaggagatcaagatggatcagacatctgctca

SEQ ID NO: 386114 - DNA, 60 bp, Artificial
  Synthetic oligonucleotide
ctgggatgtggatgcttccggaactatatcaaccgcaaagctcaaacgactcatggaagg

SEQ ID NO: 386115 - DNA, 55 bp, Artificial
  Synthetic oligonucleotide
ctgggatgttggattacagtccactatgtcaatggtagtcccttgggtgagtgct

SEQ ID NO: 386116 - DNA, 55 bp, Artificial
  Synthetic oligonucleotide
ctgggatgtttgacactgtcgtcctctgcgaggcctatgacaccggcctctcttg

SEQ ID NO: 386117 - DNA, 55 bp, Artificial
  Synthetic oligonucleotide
ctgggattaaggctcggattgtggattccatgggttcggtcgtgcatgaagagaa

SEQ ID NO: 386118 - DNA, 56 bp, Artificial
  Synthetic oligonucleotide
ctgggattactgctgcagttgggtcgacttaccttttcactaaaggtgtggagaaa

SEQ ID NO: 386119 - DNA, 53 bp, Artificial
  Synthetic oligonucleotide
ctgggattatgcactctaagtttgatgggacatcagaatacttaggaatttac

SEQ ID NO: 386120 - DNA, 55 bp, Artificial
  Synthetic oligonucleotide
ctgggattatgtagacaatcaagtgtgtgaaattctttacgggaaaagtcgcaag

SEQ ID NO: 386121 - DNA, 60 bp, Artificial
  Synthetic oligonucleotide
ctgggatttgctgctagaatcttccagcgatacgctgttgagacactggagttcgaaatt

SEQ ID NO: 386122 - DNA, 57 bp, Artificial
  Synthetic oligonucleotide
ctgggatttggggcgtacatgtctaaggcatacggcattgacccaaacattcggtca

SEQ ID NO: 386123 - DNA, 51 bp, Artificial
  Synthetic oligonucleotide
ctgggattttcattgcttccccctgttggtgattcgagtaaattcacaact

SEQ ID NO: 386124 - DNA, 51 bp, Artificial
  Synthetic oligonucleotide
ctgggcaaattcaaagatgtgtatggcattagctacatggagctggtgcga

SEQ ID NO: 386125 - DNA, 58 bp, Artificial
  Synthetic oligonucleotide
ctgggcaacagctacccaaaagttgagccccaccgtgaacctggtagcttcgtgctgc

SEQ ID NO: 386126 - DNA, 50 bp, Artificial
  Synthetic oligonucleotide
ctgggcaacccagcttccgcttatgtcgttcgacggcaagagtggccccg

SEQ ID NO: 386127 - DNA, 58 bp, Artificial
  Synthetic oligonucleotide
ctgggcaacctgtgacgtctgcgcactcgtctgtgaaaccgccttctccggaaaccgc

SEQ ID NO: 386128 - DNA, 53 bp, Artificial
  Synthetic oligonucleotide
ctgggcaacgttcgtcaaacgtttccctcacaatccccgagactgggacaggt

SEQ ID NO: 386129 - DNA, 60 bp, Artificial
  Synthetic oligonucleotide
ctgggcaagatattaaaccttccagcgcatatatcagcgatgtcattatcttacgagata

SEQ ID NO: 386130 - DNA, 55 bp, Artificial
  Synthetic oligonucleotide
ctgggcaagttaacacagaaggctcacgctttattgagatatcaacttcttacca

SEQ ID NO: 386131 - DNA, 60 bp, Artificial
  Synthetic oligonucleotide
ctgggcaataagaaccaggagcggaggaaacaccaaccaacagagagcatctgcaggaca

SEQ ID NO: 386132 - DNA, 60 bp, Artificial
  Synthetic oligonucleotide
ctgggcaataaggactagaagtggaggaaacaccaaccagcaaagagcatctgcgggaca

SEQ ID NO: 386133 - DNA, 55 bp, Artificial
  Synthetic oligonucleotide
ctgggcaatagtaggactgatagtagcactaatcctagcaatagttgtgtggact

SEQ ID NO: 386134 - DNA, 55 bp, Artificial
  Synthetic oligonucleotide
ctgggcacaaggttttaactgtcaatttaattggatcagcaatcttcaccgtgag

SEQ ID NO: 386135 - DNA, 52 bp, Artificial
  Synthetic oligonucleotide
ctgggcacacaattccggactcgactaagatcgtttcaacagacttatcatc

SEQ ID NO: 386136 - DNA, 52 bp, Artificial
  Synthetic oligonucleotide
ctgggcaccaaggtgcatacactggtttgccaaataaacgacctaatgtacc

SEQ ID NO: 386137 - DNA, 60 bp, Artificial
  Synthetic oligonucleotide
ctgggcacgaacgttagcatacctttcctcagtgcgacgcgtcgtttactcatcacacgc

SEQ ID NO: 386138 - DNA, 60 bp, Artificial
  Synthetic oligonucleotide
ctgggcacgattgagatacccttcggatcatacatgtgtagctggtttaccagtcgagga

SEQ ID NO: 386139 - DNA, 55 bp, Artificial
  Synthetic oligonucleotide
ctgggcacgtactcgtagtgctgtctaccgttatactcgacggctaaacgcaatt

SEQ ID NO: 386140 - DNA, 55 bp, Artificial
  Synthetic oligonucleotide
ctgggcagaattcaacgctttcgataggaatgccagtgcgacgcgccaagatcct

SEQ ID NO: 386141 - DNA, 60 bp, Artificial
  Synthetic oligonucleotide
ctgggcagcaagtgcagcagaaatcccccttgtccctctctggacagataatgctcatgg

SEQ ID NO: 386142 - DNA, 60 bp, Artificial
  Synthetic oligonucleotide
ctgggcagggcaagagtgtatgctctgagatgcttgctagaatgctttcctataccttgg

SEQ ID NO: 386143 - DNA, 52 bp, Artificial
  Synthetic oligonucleotide
ctgggcagtggcgtctatgagcttcgccgcagggtctacctcggtggtcagt

SEQ ID NO: 386144 - DNA, 57 bp, Artificial
  Synthetic oligonucleotide
ctgggcatcccgttgtgactgttcttaaagggggcgccaatcaactgaagtgcttaa

SEQ ID NO: 386145 - DNA, 57 bp, Artificial
  Synthetic oligonucleotide
ctgggccaacccctccacttcccaggaatgaagagagtccttcaagaaagagcgata

SEQ ID NO: 386146 - DNA, 54 bp, Artificial
  Synthetic oligonucleotide
ctgggccaacggtggcaagaccgagcctgaaccgcccaaggtgaaacgcttccc

SEQ ID NO: 386147 - DNA, 58 bp, Artificial
  Synthetic oligonucleotide
ctgggccagggataattgagagatactgggggtttgagatggccaaaatgccaggctt

SEQ ID NO: 386148 - DNA, 55 bp, Artificial
  Synthetic oligonucleotide
ctgggccaggtttactcagtgcacaacgagtaggtccagctgcttctgacacagc

SEQ ID NO: 386149 - DNA, 55 bp, Artificial
  Synthetic oligonucleotide
ctgggccagtcttacctagtagtagatctgatttagcagattatgggcatcatat

SEQ ID NO: 386150 - DNA, 53 bp, Artificial
  Synthetic oligonucleotide
ctgggccatgcttacttcctcgtgtttaggatttgtcctatttaaccacagtg

SEQ ID NO: 386151 - DNA, 52 bp, Artificial
  Synthetic oligonucleotide
ctgggcccctgcaaaacttgtggttgcaagtccccaagacactcgtggaaca

SEQ ID NO: 386152 - DNA, 55 bp, Artificial
  Synthetic oligonucleotide
ctgggccctacctctcttcagggacctccctgaatccacccgagtattatacaat

SEQ ID NO: 386153 - DNA, 55 bp, Artificial
  Synthetic oligonucleotide
ctgggcccttacattcagacgactcaagattatctaatggaaaacgattttggac

SEQ ID NO: 386154 - DNA, 60 bp, Artificial
  Synthetic oligonucleotide
ctgggccgctcacacgtgctattgcacgcgccgcctatgtgtaatccactttgcacgggt

SEQ ID NO: 386155 - DNA, 55 bp, Artificial
  Synthetic oligonucleotide
ctgggccgtgtacagcacgtggaccagctggcttgacctgatcgacgaatggctg

SEQ ID NO: 386156 - DNA, 60 bp, Artificial
  Synthetic oligonucleotide
ctgggcctctatgtcgtattgtgcattcacacctgttgtgttgtccggcttccgtagact

SEQ ID NO: 386157 - DNA, 55 bp, Artificial
  Synthetic oligonucleotide
ctgggcgaactttaatcttcaccccgtctgcagttggatcccttctcgaaggtgc

SEQ ID NO: 386158 - DNA, 51 bp, Artificial
  Synthetic oligonucleotide
ctgggcgaccttggaacgctatataaaccgaggtggcttagtattacccac

SEQ ID NO: 386159 - DNA, 50 bp, Artificial
  Synthetic oligonucleotide
ctgggcgaggttctaacgccgctacatcttcagaagctattggagaacct

SEQ ID NO: 386160 - DNA, 50 bp, Artificial
  Synthetic oligonucleotide
ctgggcgctctcttctattggctggcaaccaagcttggtttgttagtcac

SEQ ID NO: 386161 - DNA, 60 bp, Artificial
  Synthetic oligonucleotide
ctgggcggtattggggagtggccagccctcggatgctgcatataagcagctgcttgtcgc

SEQ ID NO: 386162 - DNA, 55 bp, Artificial
  Synthetic oligonucleotide
ctgggcggtgtatgaaactgccaaatatgagcttgatcaagtcgcacccacagct

SEQ ID NO: 386163 - DNA, 56 bp, Artificial
  Synthetic oligonucleotide
ctgggcgtttccttggaagcgactcgtcctagtcccgcacgggtcataggagagcc

SEQ ID NO: 386164 - DNA, 60 bp, Artificial
  Synthetic oligonucleotide
ctgggctaatgctggacctgatcagccgaggccctcacaagattccctctaattatcccg

SEQ ID NO: 386165 - DNA, 52 bp, Artificial
  Synthetic oligonucleotide
ctgggctacacatgcctgcgtacccacagaccctaacccacaagaaatacat

SEQ ID NO: 386166 - DNA, 55 bp, Artificial
  Synthetic oligonucleotide
ctgggctactcatgcctgtgtacccacaaaccccgacccacaagagatagccctg

SEQ ID NO: 386167 - DNA, 55 bp, Artificial
  Synthetic oligonucleotide
ctgggctgaagattctacaaagtgcaatcacagtgatgcaaagtactatgactgt

SEQ ID NO: 386168 - DNA, 51 bp, Artificial
  Synthetic oligonucleotide
ctgggctgataaagtgaaggcctttcttgaccagaaatgtcctttcttgaa

SEQ ID NO: 386169 - DNA, 55 bp, Artificial
  Synthetic oligonucleotide
ctgggctgcaggaacatattcggaggggtttgattatagcgagaccagagtaccg

SEQ ID NO: 386170 - DNA, 59 bp, Artificial
  Synthetic oligonucleotide
ctgggctgctggtctccgatggaggtcctaacttatataacattagaaatctccacacc

SEQ ID NO: 386171 - DNA, 55 bp, Artificial
  Synthetic oligonucleotide
ctgggctggtatctcaaagggttgtcaacactggaaggaggccttttctacgcgg

SEQ ID NO: 386172 - DNA, 58 bp, Artificial
  Synthetic oligonucleotide
ctgggctgtcgagggaggggcttctttatgaactggagagtatatcaagaaatgccct

SEQ ID NO: 386173 - DNA, 55 bp, Artificial
  Synthetic oligonucleotide
ctgggcttcttgttaggtgtaggatctgcaatagcaagtggtatagctgtatcca

SEQ ID NO: 386174 - DNA, 59 bp, Artificial
  Synthetic oligonucleotide
ctgggctttggcgcttatatgtccaaggcccacgggattgatcctaacatcaggactgg

SEQ ID NO: 386175 - DNA, 60 bp, Artificial
  Synthetic oligonucleotide
ctgggctttttgtgaggcctttcactctgcgcagcaaactggtatgttgcgtcatgatcc

SEQ ID NO: 386176 - DNA, 59 bp, Artificial
  Synthetic oligonucleotide
ctggggaaatactcgcactgtctgacgcaataccttaactctctcaaaattaggtgcca

SEQ ID NO: 386177 - DNA, 59 bp, Artificial
  Synthetic oligonucleotide
ctggggaatccatcactctggatcaaccgcagaacagaccaaattatacgggagtggaa

SEQ ID NO: 386178 - DNA, 60 bp, Artificial
  Synthetic oligonucleotide
ctggggaatccatcattctggatcaactgcagagcagaccaagttatatgggagtggaga

SEQ ID NO: 386179 - DNA, 59 bp, Artificial
  Synthetic oligonucleotide
ctggggaatgccataaccaacatgttggtgcatagaagattagttaatcgactcgggca

SEQ ID NO: 386180 - DNA, 60 bp, Artificial
  Synthetic oligonucleotide
ctggggaccggcaattgtgggctccctatgactgctgcttcgaacatgagacagtctagt

SEQ ID NO: 386181 - DNA, 60 bp, Artificial
  Synthetic oligonucleotide
ctggggactaaacacagcaatggaaccatcaaagacaggacaccatatagatcgctaatc

SEQ ID NO: 386182 - DNA, 60 bp, Artificial
  Synthetic oligonucleotide
ctggggactgtggtggtatcatcagatgccaacacggtgtcatgggccttgtcactgccg

SEQ ID NO: 386183 - DNA, 54 bp, Artificial
  Synthetic oligonucleotide
ctggggagaatcgaggattggggtgcgtagattccttgaagctagtttgcgtag

SEQ ID NO: 386184 - DNA, 57 bp, Artificial
  Synthetic oligonucleotide
ctggggagaattagagggcattccgaacgtggatagtctcctaaaagatcatcccga

SEQ ID NO: 386185 - DNA, 56 bp, Artificial
  Synthetic oligonucleotide
ctggggagattgaaaagacaacacaatgcacggttttttgtactttagcaggacca

SEQ ID NO: 386186 - DNA, 55 bp, Artificial
  Synthetic oligonucleotide
ctggggaggttgtggctcggagttcacggggctctaatccctctcctcctgctct

SEQ ID NO: 386187 - DNA, 60 bp, Artificial
  Synthetic oligonucleotide
ctggggagtccaggctgtgatcacttgaatggtgcagaatgggatgtcttcatagagcga

SEQ ID NO: 386188 - DNA, 50 bp, Artificial
  Synthetic oligonucleotide
ctggggagtgcatcacccatcaagcgataatgagcaaacggatctctaca

SEQ ID NO: 386189 - DNA, 60 bp, Artificial
  Synthetic oligonucleotide
ctggggagttgaacatatcgataacgtcatggggatgatcggaatattacctgacatgac

SEQ ID NO: 386190 - DNA, 59 bp, Artificial
  Synthetic oligonucleotide
ctggggattgacgagcgtatttatctgcgtacactccaacaccaattggatctttattc

SEQ ID NO: 386191 - DNA, 60 bp, Artificial
  Synthetic oligonucleotide
ctggggcaaagaggcagtcaatcactttcatttgggagacgatatggacccagaactcag

SEQ ID NO: 386192 - DNA, 55 bp, Artificial
  Synthetic oligonucleotide
ctggggcaagtagatgttagtgacctaggagaaggaattaaggactatgggagtg

SEQ ID NO: 386193 - DNA, 60 bp, Artificial
  Synthetic oligonucleotide
ctggggcaatctatgtggggagctacagggtggtgaataggcacttggcaacgcacaatg

SEQ ID NO: 386194 - DNA, 55 bp, Artificial
  Synthetic oligonucleotide
ctggggcacctcaacttaacccaattgatggaccattacctgagggtaatgaacc

SEQ ID NO: 386195 - DNA, 55 bp, Artificial
  Synthetic oligonucleotide
ctggggcagacttcctactttcagactcccagtaagcaaggtagattgggatgca

SEQ ID NO: 386196 - DNA, 60 bp, Artificial
  Synthetic oligonucleotide
ctggggcattaaacagctccaggcaagaatcctggctgtggaaagatacctaaaggatca

SEQ ID NO: 386197 - DNA, 53 bp, Artificial
  Synthetic oligonucleotide
ctggggcattcggtaatacccgtagatcaaattttgttggtacacgtaaagga

SEQ ID NO: 386198 - DNA, 60 bp, Artificial
  Synthetic oligonucleotide
ctggggccagggtgcagagcaatgggtctaatagatccagagcacgctttggcggcgagt

SEQ ID NO: 386199 - DNA, 60 bp, Artificial
  Synthetic oligonucleotide
ctggggcccaccagcgtggagttcctgtatgggaatacaggactggacttgtgctgcctg

SEQ ID NO: 386200 - DNA, 55 bp, Artificial
  Synthetic oligonucleotide
ctggggccctatcagtcacgccaacggaagtggccccgaccaacggccctactgc

SEQ ID NO: 386201 - DNA, 55 bp, Artificial
  Synthetic oligonucleotide
ctggggccctatcagtcatgccgacggaaacggttccgaccaacgcccctactgc

SEQ ID NO: 386202 - DNA, 54 bp, Artificial
  Synthetic oligonucleotide
ctggggccgcttggactgtctatgtgggaattgtgacaatgctgtcaccaatgc

SEQ ID NO: 386203 - DNA, 51 bp, Artificial
  Synthetic oligonucleotide
ctggggcctgcctacttccttaagatgtctctgctacgggtaccatatttt

SEQ ID NO: 386204 - DNA, 55 bp, Artificial
  Synthetic oligonucleotide
ctggggcgcatgagactggcctaaatgccagcggaaattccatcattcactacac

SEQ ID NO: 386205 - DNA, 56 bp, Artificial
  Synthetic oligonucleotide
ctggggcggggcttagtattacccccgcccaggatcagcggagtcatcacgtgacc

SEQ ID NO: 386206 - DNA, 54 bp, Artificial
  Synthetic oligonucleotide
ctggggcggggcttagtattacccccgccccaggttcagcggagtcatcacgtg

SEQ ID NO: 386207 - DNA, 53 bp, Artificial
  Synthetic oligonucleotide
ctggggcggggcttagtattacccccgccccaggttcagcggagtcatttaga

SEQ ID NO: 386208 - DNA, 55 bp, Artificial
  Synthetic oligonucleotide
ctggggcgtgaaattactgaatcagttccacttaatactatgagcgagtactacc

SEQ ID NO: 386209 - DNA, 58 bp, Artificial
  Synthetic oligonucleotide
ctggggctatccataacaaatgatgggacaaacaacatgatggggcctgctattattt

SEQ ID NO: 386210 - DNA, 55 bp, Artificial
  Synthetic oligonucleotide
ctggggctgttctttggacggcttggcattggtacgtcctctggcaccggtggtc

SEQ ID NO: 386211 - DNA, 60 bp, Artificial
  Synthetic oligonucleotide
ctggggctttggtagtgggcgtggtgtgcgctgctgtcttgaggcgccatgtaggaccat

SEQ ID NO: 386212 - DNA, 53 bp, Artificial
  Synthetic oligonucleotide
ctgggggatcccttacagagcacgtaccacagtaaaagggacaacgtggtgct

SEQ ID NO: 386213 - DNA, 58 bp, Artificial
  Synthetic oligonucleotide
ctgggggattacccgctgtacaacaggatccaagaagtcaaccagaagtgtgcacgct

SEQ ID NO: 386214 - DNA, 60 bp, Artificial
  Synthetic oligonucleotide
ctgggggattgaacccattgacaatgtgatggggatgattggaatactgcccgatatgac

SEQ ID NO: 386215 - DNA, 60 bp, Artificial
  Synthetic oligonucleotide
ctgggggctgacctcaacgcattgaacgatgtcacgaagttcactatactccatctgaca

SEQ ID NO: 386216 - DNA, 53 bp, Artificial
  Synthetic oligonucleotide
ctgggggcttatggcttccacgtcaaggccgttgtccggggcgttggtccggc

SEQ ID NO: 386217 - DNA, 60 bp, Artificial
  Synthetic oligonucleotide
ctggggggaactgatgactctagcatcctgggtgggtgataatttggaagatccagcgtc

SEQ ID NO: 386218 - DNA, 60 bp, Artificial
  Synthetic oligonucleotide
ctgggggggaacgccaggatgccacagaaatcagggcatctgtcggaagaatgattggtg

SEQ ID NO: 386219 - DNA, 60 bp, Artificial
  Synthetic oligonucleotide
ctggggggtgcaccatcctcctgacaccaatgagcaaaatactttgtatggttctggcga

SEQ ID NO: 386220 - DNA, 60 bp, Artificial
  Synthetic oligonucleotide
ctgggggtcagtatgcgtctaaggagcaggctatgatcaagcgtttctggaggattaaca

SEQ ID NO: 386221 - DNA, 50 bp, Artificial
  Synthetic oligonucleotide
ctgggggtctccggacggtgagcacgtctcgcggtgaagagggacggcct

SEQ ID NO: 386222 - DNA, 55 bp, Artificial
  Synthetic oligonucleotide
ctggggtaggccacctcgcaaattcctcacagacacgccattctatactcactgc

SEQ ID NO: 386223 - DNA, 58 bp, Artificial
  Synthetic oligonucleotide
ctggggtattccactatgggctagagtacttatcagaagcccatacgctgttccaaaa

SEQ ID NO: 386224 - DNA, 55 bp, Artificial
  Synthetic oligonucleotide
ctggggtcatcaacgggctgtccgatgtggcgaataagactcagggcctggcgga

SEQ ID NO: 386225 - DNA, 54 bp, Artificial
  Synthetic oligonucleotide
ctggggtcatgtcggagtaagggggtgcagtttttcagccaactggatgggggt

SEQ ID NO: 386226 - DNA, 55 bp, Artificial
  Synthetic oligonucleotide
ctggggtcgaccgctctggggagaaaagggaggatcggatgggaagagtatatcc

SEQ ID NO: 386227 - DNA, 55 bp, Artificial
  Synthetic oligonucleotide
ctggggtcggcaatgtacaaggcggatcatgagcgtgagaccgaactgacggact

SEQ ID NO: 386228 - DNA, 53 bp, Artificial
  Synthetic oligonucleotide
ctggggtgccacggggtcgagacgcgtgtatatatcgtccacggaataactac

SEQ ID NO: 386229 - DNA, 53 bp, Artificial
  Synthetic oligonucleotide
ctggggtggcggaggcttggaccgacttcttcgtgaagtcgagaggcggggtt

SEQ ID NO: 386230 - DNA, 53 bp, Artificial
  Synthetic oligonucleotide
ctggggtgggaaggtctcaaatacctggggaatctcctgttgtattgggttcg

SEQ ID NO: 386231 - DNA, 55 bp, Artificial
  Synthetic oligonucleotide
ctggggtggtaagtctgcttcaacacaattacagggtattcccctacaacatcga

SEQ ID NO: 386232 - DNA, 60 bp, Artificial
  Synthetic oligonucleotide
ctggggtgtgcaccatcctcctgacaccaatgagcaaaacaaattgtatggctctggtga

SEQ ID NO: 386233 - DNA, 55 bp, Artificial
  Synthetic oligonucleotide
ctggggttacgtaggacggtttggaccattgccggactcactaccacaatgtatc

SEQ ID NO: 386234 - DNA, 56 bp, Artificial
  Synthetic oligonucleotide
ctggggttagaagtcacgcccgtctaaaatcaattaaatcattggacgtgaatgac

SEQ ID NO: 386235 - DNA, 55 bp, Artificial
  Synthetic oligonucleotide
ctggggttgttcccactcaagggcccacgtggcggctagtactctggtatctcgg

SEQ ID NO: 386236 - DNA, 55 bp, Artificial
  Synthetic oligonucleotide
ctggggtttggagaattaagaattgggaaagtgcttcttctttagtcagggagca

SEQ ID NO: 386237 - DNA, 53 bp, Artificial
  Synthetic oligonucleotide
ctgggtaacagttctggcaagttaaccgctaacggaaatgtgtttagcctaag

SEQ ID NO: 386238 - DNA, 52 bp, Artificial
  Synthetic oligonucleotide
ctgggtaactaccgtattcggtgctagggaaccccttctggaggcactttta

SEQ ID NO: 386239 - DNA, 60 bp, Artificial
  Synthetic oligonucleotide
ctgggtaagttatggatggatgagaacatcaagacgaagaatcacacgaacacagtcatg

SEQ ID NO: 386240 - DNA, 55 bp, Artificial
  Synthetic oligonucleotide
ctgggtacccatacagcgccctaggcattaagaagagggacatccttgatccagc

SEQ ID NO: 386241 - DNA, 55 bp, Artificial
  Synthetic oligonucleotide
ctgggtacgctccggttaactggggacacggtgaattgtctgactcaacattagt

SEQ ID NO: 386242 - DNA, 56 bp, Artificial
  Synthetic oligonucleotide
ctgggtactgtgggggtgttctgtataaaattggacaagtacttgggatacatgta

SEQ ID NO: 386243 - DNA, 60 bp, Artificial
  Synthetic oligonucleotide
ctgggtagcagaaattcagccccagtggatagcggcctcaatcatactggagttctttct

SEQ ID NO: 386244 - DNA, 55 bp, Artificial
  Synthetic oligonucleotide
ctgggtagggaacttcaacaagtttgtgcatgtgccaagtcaagagggtgctaac

SEQ ID NO: 386245 - DNA, 60 bp, Artificial
  Synthetic oligonucleotide
ctgggtagggcaggctacactatacacgtgcagtgcaacgcatccaagttccaccaagga

SEQ ID NO: 386246 - DNA, 59 bp, Artificial
  Synthetic oligonucleotide
ctgggtaggtttagtggacatccccagtacttctgtgtgctgtgcggatgggaagacta

SEQ ID NO: 386247 - DNA, 58 bp, Artificial
  Synthetic oligonucleotide
ctgggtagtctcagtcttctgcccttacacagacccgccaatgaccaacgtaatccca

SEQ ID NO: 386248 - DNA, 58 bp, Artificial
  Synthetic oligonucleotide
ctgggtataagtagaactacaatggatagatatttaggtatactcaacgctaagtcta

SEQ ID NO: 386249 - DNA, 58 bp, Artificial
  Synthetic oligonucleotide
ctgggtatcaacaaaagaaggtgactgtggccttccactagtatcaactactgatggt

SEQ ID NO: 386250 - DNA, 60 bp, Artificial
  Synthetic oligonucleotide
ctgggtattgatgctgagtctatcactgggacaaactccatgatgttcttgcaggatccc

SEQ ID NO: 386251 - DNA, 54 bp, Artificial
  Synthetic oligonucleotide
ctgggtcaaccttcagactgaaaaatccgtgggcaaaggaaggaaactatcacc

SEQ ID NO: 386252 - DNA, 55 bp, Artificial
  Synthetic oligonucleotide
ctgggtcaatgcaattgggcctcaattttatgggcttttgttattgggcttcgtt

SEQ ID NO: 386253 - DNA, 56 bp, Artificial
  Synthetic oligonucleotide
ctgggtcaccgccgtgcggctaacggcggtcagtccatcgttccgttcttccgcca

SEQ ID NO: 386254 - DNA, 60 bp, Artificial
  Synthetic oligonucleotide
ctgggtcagacaggatatgattagcataatattagcccgccaaaagctgtggtttttatg

SEQ ID NO: 386255 - DNA, 55 bp, Artificial
  Synthetic oligonucleotide
ctgggtcagtagctgcccgtcaacaggagcgtgttgatggttcaaagacaagcgg

SEQ ID NO: 386256 - DNA, 55 bp, Artificial
  Synthetic oligonucleotide
ctgggtcagttgtacggttcattaaccatttgaatgtgcgagccttttcaacgtg

SEQ ID NO: 386257 - DNA, 56 bp, Artificial
  Synthetic oligonucleotide
ctgggtccaccacgtacgtcccaattacggtcacgatagccccaatgtgtgccgag

SEQ ID NO: 386258 - DNA, 53 bp, Artificial
  Synthetic oligonucleotide
ctgggtcccgaagttcgtaacgccatattcctgattcaacggggaaatactat

SEQ ID NO: 386259 - DNA, 54 bp, Artificial
  Synthetic oligonucleotide
ctgggtccctcaattttcgaccaaccaccaattcccgcctcctttccagtctca

SEQ ID NO: 386260 - DNA, 60 bp, Artificial
  Synthetic oligonucleotide
ctgggtccgatccacctagaacatatggccaattttcaaatctgctgtctggcgctgtga

SEQ ID NO: 386261 - DNA, 55 bp, Artificial
  Synthetic oligonucleotide
ctgggtccgtgggataggagctatgacactttacctattgtgtttcaaagcggga

SEQ ID NO: 386262 - DNA, 58 bp, Artificial
  Synthetic oligonucleotide
ctgggtcctcaagggtttgagatacggagtatgggacaccgacgctcaatccattgta

SEQ ID NO: 386263 - DNA, 60 bp, Artificial
  Synthetic oligonucleotide
ctgggtctaacgtgccaccgcagctagcgtctcgcatccacggttcgtcttgagctagga

SEQ ID NO: 386264 - DNA, 58 bp, Artificial
  Synthetic oligonucleotide
ctgggtctcccccagtctgttcataacatcaacccatgtcataccccagggcgcaaag

SEQ ID NO: 386265 - DNA, 57 bp, Artificial
  Synthetic oligonucleotide
ctgggtcttaaagacccttaagaaatgaccagtcagaggctgtgaggtcgtccagat

SEQ ID NO: 386266 - DNA, 60 bp, Artificial
  Synthetic oligonucleotide
ctgggtgacatgttacattttgacacccacccttatcacaaacctcaatagtatcatcat

SEQ ID NO: 386267 - DNA, 60 bp, Artificial
  Synthetic oligonucleotide
ctgggtgagttagtcgtgggtctctcatttgtgaggtcaattgttgtgttctcccatgct

SEQ ID NO: 386268 - DNA, 55 bp, Artificial
  Synthetic oligonucleotide
ctgggtgatcatcgagcccagtgtagtggagttagatatatacacaagtgccttg

SEQ ID NO: 386269 - DNA, 55 bp, Artificial
  Synthetic oligonucleotide
ctgggtgatctcctcgaattatttccacttttgcatcagtagccctgaacaacag

SEQ ID NO: 386270 - DNA, 55 bp, Artificial
  Synthetic oligonucleotide
ctgggtgatgatatggaccctgaacttagaacacttgcacaaagtctcattgacc

SEQ ID NO: 386271 - DNA, 60 bp, Artificial
  Synthetic oligonucleotide
ctgggtgcgcaacatctcgagagtcgtaaaagttcgaactcatcagcgtcgaataagttc

SEQ ID NO: 386272 - DNA, 60 bp, Artificial
  Synthetic oligonucleotide
ctgggtgcgcttaaatgggaatccttctcctactctctcgagccgatcgatttcacagtg

SEQ ID NO: 386273 - DNA, 60 bp, Artificial
  Synthetic oligonucleotide
ctgggtgcgcttcggaacaatggatgctgagaccccgcaggaacgctcagcagtctttgt

SEQ ID NO: 386274 - DNA, 55 bp, Artificial
  Synthetic oligonucleotide
ctgggtggagtcaacgaaggatccaggacggctctatcagtggtgacatggaacc

SEQ ID NO: 386275 - DNA, 60 bp, Artificial
  Synthetic oligonucleotide
ctgggtggcagacgggggatactgaaccatcgtcaactattgatccatggtccacgacat

SEQ ID NO: 386276 - DNA, 52 bp, Artificial
  Synthetic oligonucleotide
ctgggtgggaagtaatttggacgaccagggatccagggacttagtagtaagc

SEQ ID NO: 386277 - DNA, 60 bp, Artificial
  Synthetic oligonucleotide
ctgggtggtcgagtgggacagcttgagacaggacttgcaggattacgcgttgaccacgac

SEQ ID NO: 386278 - DNA, 56 bp, Artificial
  Synthetic oligonucleotide
ctgggtggtgagagattgtctcttcgttgttaaggctcgccaaggcggatcaacgg

SEQ ID NO: 386279 - DNA, 53 bp, Artificial
  Synthetic oligonucleotide
ctgggtgtgcgggctcttgcggatcaaccacttccgagcgtcgttaccccaga

SEQ ID NO: 386280 - DNA, 60 bp, Artificial
  Synthetic oligonucleotide
ctgggtgttccctgctagactctcaccagtacttggccggtactgggcagagtgactcca

SEQ ID NO: 386281 - DNA, 55 bp, Artificial
  Synthetic oligonucleotide
ctgggttaagcattggaagtataatactagtgggattagttggggctctctgaac

SEQ ID NO: 386282 - DNA, 56 bp, Artificial
  Synthetic oligonucleotide
ctgggttacaccggttggttcaatttatcgtgcttcccgtatcagacagcaatacc

SEQ ID NO: 386283 - DNA, 54 bp, Artificial
  Synthetic oligonucleotide
ctgggttaggtaagtttactaatcgtaaggtagctactaagttgattattgcac

SEQ ID NO: 386284 - DNA, 60 bp, Artificial
  Synthetic oligonucleotide
ctgggttatgatgaacctaggtctggtcagtatgtagaacattatactgctccaggaggg

SEQ ID NO: 386285 - DNA, 60 bp, Artificial
  Synthetic oligonucleotide
ctgggttccatggttgggctacagctgccctacttgtcacattctgctttggatgggttc

SEQ ID NO: 386286 - DNA, 55 bp, Artificial
  Synthetic oligonucleotide
ctgggttcttaacaacgttaatcaggtttatggaactttatggcgtcgtgcaatc

SEQ ID NO: 386287 - DNA, 52 bp, Artificial
  Synthetic oligonucleotide
ctgggttctttacctcaggttaaggctgtggactacctggagccgggtagtt

SEQ ID NO: 386288 - DNA, 50 bp, Artificial
  Synthetic oligonucleotide
ctgggttgagaacggtagcacgaccgattacgtgagaaggcatgttggaa

SEQ ID NO: 386289 - DNA, 56 bp, Artificial
  Synthetic oligonucleotide
ctgggttgtattaaggcctttcgggtcctagagggatctgaagacttttgcagcac

SEQ ID NO: 386290 - DNA, 55 bp, Artificial
  Synthetic oligonucleotide
ctgggttgtcaggttccccatgtacacacctgaggcctgcggcctctcggttctg

SEQ ID NO: 386291 - DNA, 56 bp, Artificial
  Synthetic oligonucleotide
ctgggttgtggttggaatttaaactgtgaacttcttattgaatatgtatggttcga

SEQ ID NO: 386292 - DNA, 53 bp, Artificial
  Synthetic oligonucleotide
ctgggtttactaccggaggaattggtattaccatgtaacttttgtagagcgcc

SEQ ID NO: 386293 - DNA, 55 bp, Artificial
  Synthetic oligonucleotide
ctgggtttcagttctaggcccaaattacatgttgggctatagcgcatagaggcgc

SEQ ID NO: 386294 - DNA, 53 bp, Artificial
  Synthetic oligonucleotide
ctgggtttcccacccatttggtgtgattggtggtttaaattccacgagtcttc

SEQ ID NO: 386295 - DNA, 57 bp, Artificial
  Synthetic oligonucleotide
ctgggtttggtccaatttcctatgtccgagtagacgaggatatgtggagtggagacg

SEQ ID NO: 386296 - DNA, 55 bp, Artificial
  Synthetic oligonucleotide
ctggtaaagaggagagagttaaatgagcccccgataggtaaatgagcccccaata

SEQ ID NO: 386297 - DNA, 55 bp, Artificial
  Synthetic oligonucleotide
ctggtaaagtaattggcattcacgtgggtggcaatggggcacaaggatttgctgc

SEQ ID NO: 386298 - DNA, 60 bp, Artificial
  Synthetic oligonucleotide
ctggtaaagtggcaggtagggcaccttcaactgaggcctctgatacagtgcaaggtattg

SEQ ID NO: 386299 - DNA, 59 bp, Artificial
  Synthetic oligonucleotide
ctggtaaatgcccaacatctataccagcagatacgaactggttaactttctcaagagaa

SEQ ID NO: 386300 - DNA, 57 bp, Artificial
  Synthetic oligonucleotide
ctggtaacaacagacatcattcaatttattctatcggtcaaagaggtgtaaaccaat

SEQ ID NO: 386301 - DNA, 56 bp, Artificial
  Synthetic oligonucleotide
ctggtaacacccgagatccttcctgggccgcaatattgcaaggcctcgaggaacct

SEQ ID NO: 386302 - DNA, 55 bp, Artificial
  Synthetic oligonucleotide
ctggtaaccagtgaaacacagctgtttaatagacccttttggttacatagggcac

SEQ ID NO: 386303 - DNA, 60 bp, Artificial
  Synthetic oligonucleotide
ctggtaacggccggaaagtcagacaagatctgcatcggataccatgccaacaattcaaca

SEQ ID NO: 386304 - DNA, 55 bp, Artificial
  Synthetic oligonucleotide
ctggtaacggtttacgagtaacgacaacctcacgtacagcttgacgtgttgtctg

SEQ ID NO: 386305 - DNA, 55 bp, Artificial
  Synthetic oligonucleotide
ctggtaagaaacgggactactgggcacaggctgatattgagagggagctagctcc

SEQ ID NO: 386306 - DNA, 55 bp, Artificial
  Synthetic oligonucleotide
ctggtaagagcctaacatgtaaaactcattaacggcctgataggggcaacaccct

SEQ ID NO: 386307 - DNA, 60 bp, Artificial
  Synthetic oligonucleotide
ctggtaagatagtcagtgatggtcatctcgctgccaaacatggtacgacctctcagtatt

SEQ ID NO: 386308 - DNA, 57 bp, Artificial
  Synthetic oligonucleotide
ctggtaaggttatatgtgtgaccgatgttacccgtggtaatggaattactcatcgtg

SEQ ID NO: 386309 - DNA, 55 bp, Artificial
  Synthetic oligonucleotide
ctggtaaggttatttgtatctcagatgtcactcgtggtggtgggctgacccaccg

SEQ ID NO: 386310 - DNA, 55 bp, Artificial
  Synthetic oligonucleotide
ctggtaaggttcatcaaccctgatacaggaagagtgctctttgaagctaaattgc

SEQ ID NO: 386311 - DNA, 55 bp, Artificial
  Synthetic oligonucleotide
ctggtaaggttgttcaaaaaactacacttatgccaaactggataggaacaatgta

SEQ ID NO: 386312 - DNA, 60 bp, Artificial
  Synthetic oligonucleotide
ctggtaatcagctgcatggtttacaagtgagacgaatggtgactgaattctgtgataggt

SEQ ID NO: 386313 - DNA, 55 bp, Artificial
  Synthetic oligonucleotide
ctggtaatcgctgttcggcaggcggaggctttgtttagagagctgcagaaagagc

SEQ ID NO: 386314 - DNA, 56 bp, Artificial
  Synthetic oligonucleotide
ctggtacaaaaaaagcacagtgtcgggagcatttacatatggcatgctcccggact

SEQ ID NO: 386315 - DNA, 55 bp, Artificial
  Synthetic oligonucleotide
ctggtacaacttaccacgcctgtaacaattaattgtaccagacctaacaacaata

SEQ ID NO: 386316 - DNA, 56 bp, Artificial
  Synthetic oligonucleotide
ctggtacacacgcgggtttgctgagtggtttcactgggtctatcgtcctttgtact

SEQ ID NO: 386317 - DNA, 56 bp, Artificial
  Synthetic oligonucleotide
ctggtacatcgggtcctctcatacttggccttgcaatccgggaatgggtccttatt

SEQ ID NO: 386318 - DNA, 60 bp, Artificial
  Synthetic oligonucleotide
ctggtacatgtcctgaggatgttattaataaggtagagcaaaaaacatgggctgatagga

SEQ ID NO: 386319 - DNA, 56 bp, Artificial
  Synthetic oligonucleotide
ctggtaccaaacaggcatagtagtccccccaggcacgcctaacaagtgtgtggtac

SEQ ID NO: 386320 - DNA, 56 bp, Artificial
  Synthetic oligonucleotide
ctggtaccaaaggtctaactcttatgagaaggcatgtgcaaaattccccttgtttc

SEQ ID NO: 386321 - DNA, 57 bp, Artificial
  Synthetic oligonucleotide
ctggtacctctgtcactctacctggtattactattggtactgatagttctttgcgtc

SEQ ID NO: 386322 - DNA, 55 bp, Artificial
  Synthetic oligonucleotide
ctggtacgcgcttctcgggaatgggctccaggtcaaacacattcatattcggacg

SEQ ID NO: 386323 - DNA, 60 bp, Artificial
  Synthetic oligonucleotide
ctggtacggaagtgtgagcaagcaaatatgaatccaactgactcccgtactgccatttca

SEQ ID NO: 386324 - DNA, 55 bp, Artificial
  Synthetic oligonucleotide
ctggtactagggcttctagtagcaatacttttagtgtagacggtctagtgggtgg

SEQ ID NO: 386325 - DNA, 57 bp, Artificial
  Synthetic oligonucleotide
ctggtactcaaacatatttataggccctaacagatttaacatacagtttagagcagc

SEQ ID NO: 386326 - DNA, 57 bp, Artificial
  Synthetic oligonucleotide
ctggtactttaagtagatatatgcgaaggatgtttgacaaattatgtacaaacccta

SEQ ID NO: 386327 - DNA, 58 bp, Artificial
  Synthetic oligonucleotide
ctggtagaatcacaaaatctcccggaactatgtcctagccctctgagactagttgacg

SEQ ID NO: 386328 - DNA, 55 bp, Artificial
  Synthetic oligonucleotide
ctggtagactctcttctctctcagtgctagcctctgctaagcagtctgagtacat

SEQ ID NO: 386329 - DNA, 57 bp, Artificial
  Synthetic oligonucleotide
ctggtagagaagggtctttgtgaccccgtgcgcttgtttgtcaagaacgagccacac

SEQ ID NO: 386330 - DNA, 55 bp, Artificial
  Synthetic oligonucleotide
ctggtagagctatcctcaacgtacctagaagaataagacagggttttgaaagggc

SEQ ID NO: 386331 - DNA, 56 bp, Artificial
  Synthetic oligonucleotide
ctggtagagtcgcaaaacctcccggaattatgtccgagccccctgagactagttga

SEQ ID NO: 386332 - DNA, 55 bp, Artificial
  Synthetic oligonucleotide
ctggtagcaaacaaccagcagtcttgagtgataatgatcccagacttgaggttaa

SEQ ID NO: 386333 - DNA, 60 bp, Artificial
  Synthetic oligonucleotide
ctggtagcagcaggtgccagatcgtcaaaccaaagcacctgagtggtgctggtatccgaa

SEQ ID NO: 386334 - DNA, 55 bp, Artificial
  Synthetic oligonucleotide
ctggtaggactgtactcccaccagtggttaaaacctatgaagagggaaatgctaa

SEQ ID NO: 386335 - DNA, 55 bp, Artificial
  Synthetic oligonucleotide
ctggtaggctttccaactcatagacacatacgtggtgaaccctgcccactacccc

SEQ ID NO: 386336 - DNA, 55 bp, Artificial
  Synthetic oligonucleotide
ctggtaggggcaccatgcccctcaacggaaccaactaccgaggagtactggaatg

SEQ ID NO: 386337 - DNA, 57 bp, Artificial
  Synthetic oligonucleotide
ctggtagggtgtgctgccaactggatcctgcgcgggacgtcctttgtctacgtcccg

SEQ ID NO: 386338 - DNA, 60 bp, Artificial
  Synthetic oligonucleotide
ctggtagtactccggtcgctccactaccttgagcgctgtagcattctgcgggatgttctc

SEQ ID NO: 386339 - DNA, 60 bp, Artificial
  Synthetic oligonucleotide
ctggtagtggccggtttaatcggcccatgtatatcactgagaaatgtttatgacatgaag

SEQ ID NO: 386340 - DNA, 60 bp, Artificial
  Synthetic oligonucleotide
ctggtagttgacatggtggcgaacattaagggcggcacgatggagactgagcaccagaac

SEQ ID NO: 386341 - DNA, 55 bp, Artificial
  Synthetic oligonucleotide
ctggtagttgtggagtagtgaccctagaaactaatccccagaagacctctcgctc

SEQ ID NO: 386342 - DNA, 60 bp, Artificial
  Synthetic oligonucleotide
ctggtagtttgttccactatgaaatatgcgttgatttgcacagcgccgattacgtgcagc

SEQ ID NO: 386343 - DNA, 58 bp, Artificial
  Synthetic oligonucleotide
ctggtataatgacacctgggcgagttatattccctttctatggaggtgtgatccccaa

SEQ ID NO: 386344 - DNA, 58 bp, Artificial
  Synthetic oligonucleotide
ctggtatacagcacgggggctagtacgccccgcgacctcgtaggcatatcaactgtgg

SEQ ID NO: 386345 - DNA, 59 bp, Artificial
  Synthetic oligonucleotide
ctggtatagtgaccggtagtgctgtagggtgcgaccctgatattttctggagtaagata

SEQ ID NO: 386346 - DNA, 57 bp, Artificial
  Synthetic oligonucleotide
ctggtatatatcccatactgttcatcgtcctttactggttacgtatccatgggtttg

SEQ ID NO: 386347 - DNA, 60 bp, Artificial
  Synthetic oligonucleotide
ctggtatcagggacaaatatataaacctacatgatagtagagctctagagaaggaacctg

SEQ ID NO: 386348 - DNA, 60 bp, Artificial
  Synthetic oligonucleotide
ctggtatcatgatgatatcataaacttgtactctgactctatcaaatcactgactcttga

SEQ ID NO: 386349 - DNA, 57 bp, Artificial
  Synthetic oligonucleotide
ctggtatccagtaaaacaggccacatctacgtaccagggagcgggtacgtagtgcaa

SEQ ID NO: 386350 - DNA, 55 bp, Artificial
  Synthetic oligonucleotide
ctggtatctatttgagggtatcagaattcataatcgtacgcttcaaactcctgga

SEQ ID NO: 386351 - DNA, 59 bp, Artificial
  Synthetic oligonucleotide
ctggtatctggaacacgccaaaactggtgagactagtgtccccaagtgttggcttgtca

SEQ ID NO: 386352 - DNA, 57 bp, Artificial
  Synthetic oligonucleotide
ctggtatgaactggtatcaaaacgaccccttaaatcaatcagagacgactacaacta

SEQ ID NO: 386353 - DNA, 60 bp, Artificial
  Synthetic oligonucleotide
ctggtatgacgtcgctctcttctacgtcgacgaagcgcactctcgactgctgcccgtatc

SEQ ID NO: 386354 - DNA, 54 bp, Artificial
  Synthetic oligonucleotide
ctggtatgatcttgcaattctagcacgtagagggcgactaaatagagggaataa

SEQ ID NO: 386355 - DNA, 55 bp, Artificial
  Synthetic oligonucleotide
ctggtatgcagtggcgagttagaagctccagtaggaggagggacttcagaggttg

SEQ ID NO: 386356 - DNA, 55 bp, Artificial
  Synthetic oligonucleotide
ctggtatggatgggataccgagctagtagatgccgaaggaacgccgtttacccta

SEQ ID NO: 386357 - DNA, 60 bp, Artificial
  Synthetic oligonucleotide
ctggtatgggaatccagaatgcaggagactcttgggccccaatttgcaacatcacataat

SEQ ID NO: 386358 - DNA, 55 bp, Artificial
  Synthetic oligonucleotide
ctggtatgtatgccatcgccactaaagagacgttaagtgtaataactgagcatgc

SEQ ID NO: 386359 - DNA, 52 bp, Artificial
  Synthetic oligonucleotide
ctggtattacggtacctttgtacgcctgttttatatcccctcccctgagtaa

SEQ ID NO: 386360 - DNA, 52 bp, Artificial
  Synthetic oligonucleotide
ctggtattccggtacctttgtgcgcctgttttatacatcctacccccgtaac

SEQ ID NO: 386361 - DNA, 51 bp, Artificial
  Synthetic oligonucleotide
ctggtattcgtggctcaatactttcgtggtcttgctaataagttcaagtcc

SEQ ID NO: 386362 - DNA, 50 bp, Artificial
  Synthetic oligonucleotide
ctggtattctgcccccactcgtggtcccgcggctaattgccgccgttctg

SEQ ID NO: 386363 - DNA, 60 bp, Artificial
  Synthetic oligonucleotide
ctggtattggcagtctgtatcgttagcacctccgcagtagagatggaaagcctaccagcc

SEQ ID NO: 386364 - DNA, 53 bp, Artificial
  Synthetic oligonucleotide
ctggtcaaaataccaacccatagacacattgtaggtaaaccttgcccaaaacc

SEQ ID NO: 386365 - DNA, 59 bp, Artificial
  Synthetic oligonucleotide
ctggtcaactacccgtataggctctggcattatccttgtaccatgaactacaccatatt

SEQ ID NO: 386366 - DNA, 55 bp, Artificial
  Synthetic oligonucleotide
ctggtcaatagctactcctagctcaaagttcagcctgtccaagggcaaattaaca

SEQ ID NO: 386367 - DNA, 60 bp, Artificial
  Synthetic oligonucleotide
ctggtcaatcggtgtctctcaaacttggctatgcaaatggtgtctggggtcttatttata

SEQ ID NO: 386368 - DNA, 55 bp, Artificial
  Synthetic oligonucleotide
ctggtcacaaattgcaccactcataactggtgtgaaaggagcagtccacaaaagc

SEQ ID NO: 386369 - DNA, 52 bp, Artificial
  Synthetic oligonucleotide
ctggtcacagaccgtggaggaaattatctcctatgtcacagttaacttctct

SEQ ID NO: 386370 - DNA, 55 bp, Artificial
  Synthetic oligonucleotide
ctggtcacctacaacagcgctggtagtagctcagctgctcagggtcccacaagcc

SEQ ID NO: 386371 - DNA, 55 bp, Artificial
  Synthetic oligonucleotide
ctggtcactgttgataatccctgtttgcccattacaggttgatgcgcaagcaacc

SEQ ID NO: 386372 - DNA, 55 bp, Artificial
  Synthetic oligonucleotide
ctggtcacttatgtgaaggatgaactcagatccaaaactaaagtggagcaaggca

SEQ ID NO: 386373 - DNA, 60 bp, Artificial
  Synthetic oligonucleotide
ctggtcagaaggctcggtgtggcggagggttatgtccgctgcgatgctggacccatctta

SEQ ID NO: 386374 - DNA, 50 bp, Artificial
  Synthetic oligonucleotide
ctggtcagccagtagtgataatggatgacttaggacagtctacatccgac

SEQ ID NO: 386375 - DNA, 60 bp, Artificial
  Synthetic oligonucleotide
ctggtcagccgtgtacagccgacagctcgagatgttcgttcccgttctcgagaacgagag

SEQ ID NO: 386376 - DNA, 55 bp, Artificial
  Synthetic oligonucleotide
ctggtcagctaatgtcccttgatatacccacagagcaaatgtgcttggaagatgc

SEQ ID NO: 386377 - DNA, 60 bp, Artificial
  Synthetic oligonucleotide
ctggtcaggatactcagggagtttcatcgactactgggatgaaagcaatgagtgctacaa

SEQ ID NO: 386378 - DNA, 57 bp, Artificial
  Synthetic oligonucleotide
ctggtcaggatatagtggttctttcacattgccggttgaactaacaaagaaaggatg

SEQ ID NO: 386379 - DNA, 55 bp, Artificial
  Synthetic oligonucleotide
ctggtcaggcttagtgttcctgtcatcggccttcctaaaccaccaatcatagtcg

SEQ ID NO: 386380 - DNA, 60 bp, Artificial
  Synthetic oligonucleotide
ctggtcattattatctacctgattcaacaggtagacctcagacacgagaaagagcaaata

SEQ ID NO: 386381 - DNA, 57 bp, Artificial
  Synthetic oligonucleotide
ctggtccaagataagtttcgtaatctcttgaaaggtaatcaaatcacaaccatcttc

SEQ ID NO: 386382 - DNA, 57 bp, Artificial
  Synthetic oligonucleotide
ctggtccactacgcctataggctctggcattatccttgcactgtcaactacacagta

SEQ ID NO: 386383 - DNA, 57 bp, Artificial
  Synthetic oligonucleotide
ctggtccacttggtgatagagtgtattatatttcgagttcggtgttagcggatgagt

SEQ ID NO: 386384 - DNA, 55 bp, Artificial
  Synthetic oligonucleotide
ctggtcccaaccaagtacgcgaaactgtttacccttaaacagctcactcgcatgc

SEQ ID NO: 386385 - DNA, 52 bp, Artificial
  Synthetic oligonucleotide
ctggtcccacctacagttgagtctaaaactaagaatttcacccttcccgttc

SEQ ID NO: 386386 - DNA, 53 bp, Artificial
  Synthetic oligonucleotide
ctggtccccattacaaaccccaggaaggtgactttattgtctccaaccagccc

SEQ ID NO: 386387 - DNA, 53 bp, Artificial
  Synthetic oligonucleotide
ctggtcccctcacctttcccactgacggcttctttgaggtcgttagttgggtc

SEQ ID NO: 386388 - DNA, 55 bp, Artificial
  Synthetic oligonucleotide
ctggtcccggagcattcgacgtaaacaccgggcccaactgggcaacgttcatcaa

SEQ ID NO: 386389 - DNA, 51 bp, Artificial
  Synthetic oligonucleotide
ctggtccgaaaggtgaccaaggtaatgacggactacccggtaaggacggag

SEQ ID NO: 386390 - DNA, 55 bp, Artificial
  Synthetic oligonucleotide
ctggtccgacaacagagaggcacgcatacaattgacctgggacggtagtgtaatc

SEQ ID NO: 386391 - DNA, 60 bp, Artificial
  Synthetic oligonucleotide
ctggtccggagtcaaggggcctatcgggcaggagcagctgagcggagggcctatgccgga

SEQ ID NO: 386392 - DNA, 55 bp, Artificial
  Synthetic oligonucleotide
ctggtccgtggtgcgtacccaaagatacagactgcaagtcgtgtcctccgctccc

SEQ ID NO: 386393 - DNA, 55 bp, Artificial
  Synthetic oligonucleotide
ctggtccgttaggtttcttgctggctcttcctaagatgagatcttgaaccagcct

SEQ ID NO: 386394 - DNA, 55 bp, Artificial
  Synthetic oligonucleotide
ctggtcctccagccattcggcactgaccgaccgcccgagattcggattcgtgatg

SEQ ID NO: 386395 - DNA, 55 bp, Artificial
  Synthetic oligonucleotide
ctggtccttccagaacacccctttgattcacctgacactttacgcaatcggcggg

SEQ ID NO: 386396 - DNA, 56 bp, Artificial
  Synthetic oligonucleotide
ctggtccttgcgactggacccagaaatgttcctcaaagagaaacaagaggactatt

SEQ ID NO: 386397 - DNA, 58 bp, Artificial
  Synthetic oligonucleotide
ctggtcgaaacttcagatattgccttggaattggatagggcgactttggatacatccg

SEQ ID NO: 386398 - DNA, 54 bp, Artificial
  Synthetic oligonucleotide
ctggtcgaagggaccaggaataagattccctaaatgctttgggttctgctttaa

SEQ ID NO: 386399 - DNA, 60 bp, Artificial
  Synthetic oligonucleotide
ctggtcgagtgcaacaaccactatctgtgtctcaactgtcttaccttacttctgagtgtc

SEQ ID NO: 386400 - DNA, 57 bp, Artificial
  Synthetic oligonucleotide
ctggtcgctcagttactaccccagtaatagacctggcagatggggctagaagttccc

SEQ ID NO: 386401 - DNA, 60 bp, Artificial
  Synthetic oligonucleotide
ctggtcggaatagaccctttcagactgcttcaaaacagccaagtatacagtctaatcaga

SEQ ID NO: 386402 - DNA, 55 bp, Artificial
  Synthetic oligonucleotide
ctggtcggagggtttcgagagattgacgttctgtggtaagagtcgtgaaacatag

SEQ ID NO: 386403 - DNA, 60 bp, Artificial
  Synthetic oligonucleotide
ctggtcggcaacaagcggttccacaagatagcaggccagtggaccggacattgcatgaac

SEQ ID NO: 386404 - DNA, 53 bp, Artificial
  Synthetic oligonucleotide
ctggtcgtccaactattaaccacccaacctttgtggggagtgaacgctgtaaa

SEQ ID NO: 386405 - DNA, 55 bp, Artificial
  Synthetic oligonucleotide
ctggtcgtccaccactccgaatgtgtatccgttctggttggacagttacgattac

SEQ ID NO: 386406 - DNA, 55 bp, Artificial
  Synthetic oligonucleotide
ctggtcgtgattgggacaagttttgggacctgatctggcgttgtgcccagactcg

SEQ ID NO: 386407 - DNA, 54 bp, Artificial
  Synthetic oligonucleotide
ctggtcgtgcactgtatattcctccttacgacttgctcctccatgaatggtatg

SEQ ID NO: 386408 - DNA, 59 bp, Artificial
  Synthetic oligonucleotide
ctggtcgtgcgattattgatggatttgtcggtgggcttaaaagcacatgggaagccgga

SEQ ID NO: 386409 - DNA, 60 bp, Artificial
  Synthetic oligonucleotide
ctggtcgtggcatgatggagctattcttccttttgacatcgataagatgtaatttacgaa

SEQ ID NO: 386410 - DNA, 55 bp, Artificial
  Synthetic oligonucleotide
ctggtcgtgtgcgtgcgcagtagcaagcgccggtagtcccacattttgcacagcc

SEQ ID NO: 386411 - DNA, 56 bp, Artificial
  Synthetic oligonucleotide
ctggtctaaaagatgatcttcttgaaaatttacaggcctatcagaaacgaatgggg

SEQ ID NO: 386412 - DNA, 55 bp, Artificial
  Synthetic oligonucleotide
ctggtctaaatgcaccaccgatgcacgtgaattgtcgaagtacgatcgttccaag

SEQ ID NO: 386413 - DNA, 58 bp, Artificial
  Synthetic oligonucleotide
ctggtctaagaaaaggcaagagatcctagatttgtgggtctatcacacacaaggtttc

SEQ ID NO: 386414 - DNA, 55 bp, Artificial
  Synthetic oligonucleotide
ctggtctaccgtaagcgaggaggccagtgaggacgtcgtctgctgctcgatgtcc

SEQ ID NO: 386415 - DNA, 55 bp, Artificial
  Synthetic oligonucleotide
ctggtctactgagtacaatgatgggtcactctttgccacgaacaccgatctgccg

SEQ ID NO: 386416 - DNA, 59 bp, Artificial
  Synthetic oligonucleotide
ctggtctagacagttgatataatcgcgttctgatagttacaggaccctgaccaaagttc

SEQ ID NO: 386417 - DNA, 53 bp, Artificial
  Synthetic oligonucleotide
ctggtctatgtattattcattccatcgagacgggacatagagaccttacccga

SEQ ID NO: 386418 - DNA, 60 bp, Artificial
  Synthetic oligonucleotide
ctggtctattccgaaaatgaataacactccagaaaactgctgtcagctgcacttgatgtg

SEQ ID NO: 386419 - DNA, 60 bp, Artificial
  Synthetic oligonucleotide
ctggtctcactcacttgatgatctggcattccaatctgaatgatgccacatatcagagaa

SEQ ID NO: 386420 - DNA, 59 bp, Artificial
  Synthetic oligonucleotide
ctggtctcagaagactttgagagacaaataagttattatgctaccacctggaccagtaa

SEQ ID NO: 386421 - DNA, 56 bp, Artificial
  Synthetic oligonucleotide
ctggtctcagtgttacagcaacccctttgattatatagtagtcgtaagggtagtgg

SEQ ID NO: 386422 - DNA, 55 bp, Artificial
  Synthetic oligonucleotide
ctggtctcatgccccgcgagggcgaagcgattcggttttgcttatgacgcgggtg

SEQ ID NO: 386423 - DNA, 55 bp, Artificial
  Synthetic oligonucleotide
ctggtctcattgcaaaatggcttctcaatagtttcattatatcgtgttcttctcc

SEQ ID NO: 386424 - DNA, 55 bp, Artificial
  Synthetic oligonucleotide
ctggtctccagaaccggagcgtgatcgcgatgcctgagtgggagttctgcgcgaa

SEQ ID NO: 386425 - DNA, 55 bp, Artificial
  Synthetic oligonucleotide
ctggtctcgatttcgtgctactataaacatagacacgtgtttagtggagctaggc

SEQ ID NO: 386426 - DNA, 55 bp, Artificial
  Synthetic oligonucleotide
ctggtctctcagtgtaattaacgcaatcatggtaacgattcatgagcggaagacc

SEQ ID NO: 386427 - DNA, 60 bp, Artificial
  Synthetic oligonucleotide
ctggtctcttcttggctattctgtgctggactttgatgggtacctgagtacagtggctcc

SEQ ID NO: 386428 - DNA, 55 bp, Artificial
  Synthetic oligonucleotide
ctggtctgcagatgaaattagggatgtggtgaatagcctccgagaacaagcctgg

SEQ ID NO: 386429 - DNA, 60 bp, Artificial
  Synthetic oligonucleotide
ctggtctgcgcaggtgttgatgattaggctcctcacggcatctctcaaccgcaacaagtt

SEQ ID NO: 386430 - DNA, 55 bp, Artificial
  Synthetic oligonucleotide
ctggtctggagatttaacagtagcctggcacgcacacacagagctcgagagctgc

SEQ ID NO: 386431 - DNA, 60 bp, Artificial
  Synthetic oligonucleotide
ctggtctggagatttgacagtagactggcattcacacacaaagctcgagagatgcatccg

SEQ ID NO: 386432 - DNA, 55 bp, Artificial
  Synthetic oligonucleotide
ctggtctggagatttgacagtagcctggcaagaagacacatagcccgagagcggc

SEQ ID NO: 386433 - DNA, 54 bp, Artificial
  Synthetic oligonucleotide
ctggtctggcgacaccccggtgttcaagagggtagcctgtaactctagcttgag

SEQ ID NO: 386434 - DNA, 55 bp, Artificial
  Synthetic oligonucleotide
ctggtctggttattctggcattttctctgttgaaggcaaaagctgcatcaatagg

SEQ ID NO: 386435 - DNA, 55 bp, Artificial
  Synthetic oligonucleotide
ctggtctgttttaaaaccaggggagaccttgaatgcggagtccaatggaaatcta

SEQ ID NO: 386436 - DNA, 51 bp, Artificial
  Synthetic oligonucleotide
ctggtctgttttacggccgggggaaaccttaaatgtggaatctaatgggaa

SEQ ID NO: 386437 - DNA, 52 bp, Artificial
  Synthetic oligonucleotide
ctggtctgttttgaaaccgggggaaaccttgaatgtggagtctaatggaaac

SEQ ID NO: 386438 - DNA, 51 bp, Artificial
  Synthetic oligonucleotide
ctggtcttacggtcccggtggggcaggctacatgctatgtgtttacactgg

SEQ ID NO: 386439 - DNA, 55 bp, Artificial
  Synthetic oligonucleotide
ctggtcttcaaaacttacgggactatgctagtgaacccagactataaagctatcc

SEQ ID NO: 386440 - DNA, 60 bp, Artificial
  Synthetic oligonucleotide
ctggtcttcaaatgagttatgaaagacaacaacaagcaatctgggttcacatttatgcga

SEQ ID NO: 386441 - DNA, 58 bp, Artificial
  Synthetic oligonucleotide
ctggtcttcccaagttcataccaatgtgcctatagatcaggacgggtgtccttatttg

SEQ ID NO: 386442 - DNA, 51 bp, Artificial
  Synthetic oligonucleotide
ctggtcttgagctgcacgagggtgggccacccgctctcgtcatttggaaca

SEQ ID NO: 386443 - DNA, 60 bp, Artificial
  Synthetic oligonucleotide
ctggtcttggaatggtagtagttctggctcgtatggtcgcaatgtaggctctaatactag

SEQ ID NO: 386444 - DNA, 55 bp, Artificial
  Synthetic oligonucleotide
ctggtcttggattcatacttccttgagcatctctatgcgtacaataaaggcgatc

SEQ ID NO: 386445 - DNA, 55 bp, Artificial
  Synthetic oligonucleotide
ctggtcttgtctaccgtctggcaactatggtggatataacccaccaggggacggg

SEQ ID NO: 386446 - DNA, 55 bp, Artificial
  Synthetic oligonucleotide
ctggtctttcacctagtaccagttaccttctaacacctgcttttctagagcagaa

SEQ ID NO: 386447 - DNA, 55 bp, Artificial
  Synthetic oligonucleotide
ctggtgaaaagatatgaaagctggatgaacacaggattcagtcatcacatcaacg

SEQ ID NO: 386448 - DNA, 53 bp, Artificial
  Synthetic oligonucleotide
ctggtgaacagcatcgccactgccaacgctgtgtcacaattgggctttccaac

SEQ ID NO: 386449 - DNA, 55 bp, Artificial
  Synthetic oligonucleotide
ctggtgaactataatggagcgacggctgtagcagcctccaatggtcccggcgcaa

SEQ ID NO: 386450 - DNA, 60 bp, Artificial
  Synthetic oligonucleotide
ctggtgaatgcatcatctgaagtaacaagcagttacaggccaccagagattgatatgaca

SEQ ID NO: 386451 - DNA, 55 bp, Artificial
  Synthetic oligonucleotide
ctggtgaatgtcttacttgcttgttgtatgttcgttgtgtattacctttgtgttc

SEQ ID NO: 386452 - DNA, 55 bp, Artificial
  Synthetic oligonucleotide
ctggtgacaacgccggctaccgccaacgtgcagagaagcaatatgacgccttgcg

SEQ ID NO: 386453 - DNA, 55 bp, Artificial
  Synthetic oligonucleotide
ctggtgacctcagcttctaaagcagccaaggcttcccctgtaagaatactttcca

SEQ ID NO: 386454 - DNA, 50 bp, Artificial
  Synthetic oligonucleotide
ctggtgacgaaactcagtgttacggtacatgggttcctattgggcttgct

SEQ ID NO: 386455 - DNA, 60 bp, Artificial
  Synthetic oligonucleotide
ctggtgacggacgaaagtccgatctccgatctgcttgcccatgattcgttcggacctata

SEQ ID NO: 386456 - DNA, 56 bp, Artificial
  Synthetic oligonucleotide
ctggtgactagggtcctctctaaacgaagcaaccatcaccgttacttcttctagaa

SEQ ID NO: 386457 - DNA, 60 bp, Artificial
  Synthetic oligonucleotide
ctggtgactatcctacgtgaggagttgcactcacgcctcaatccaaagcaacccatgcac

SEQ ID NO: 386458 - DNA, 52 bp, Artificial
  Synthetic oligonucleotide
ctggtgagaggccagccgtcgcttctgccgacggttctcgctccgttccaga

SEQ ID NO: 386459 - DNA, 60 bp, Artificial
  Synthetic oligonucleotide
ctggtgagcaaccagaaatgcccgattttacaatcgaagagttgccagaaagtgattctg

SEQ ID NO: 386460 - DNA, 60 bp, Artificial
  Synthetic oligonucleotide
ctggtgaggaatcaatgcgcttggtgaatgatgttggcgtcgatatcgtttgttcccggg

SEQ ID NO: 386461 - DNA, 55 bp, Artificial
  Synthetic oligonucleotide
ctggtgagtgttgggaagtgtcaaagaatggaagggactgggagactctaaaact

SEQ ID NO: 386462 - DNA, 55 bp, Artificial
  Synthetic oligonucleotide
ctggtgatacgtcaatcggagtatcatctattagagatctaaagccggtgtaaca

SEQ ID NO: 386463 - DNA, 60 bp, Artificial
  Synthetic oligonucleotide
ctggtgatagcggagagctttaagcaagggcgtccactcataccaaagggatatatcaag

SEQ ID NO: 386464 - DNA, 55 bp, Artificial
  Synthetic oligonucleotide
ctggtgatgaacctattattagtaccccgttgccaggggtccgtcgtgtggctgg

SEQ ID NO: 386465 - DNA, 59 bp, Artificial
  Synthetic oligonucleotide
ctggtgatgctccaccgcgactgggataagggcaccgcttacgtgaccgtcgagttcaa

SEQ ID NO: 386466 - DNA, 55 bp, Artificial
  Synthetic oligonucleotide
ctggtgatgtattggtttacggcaacagagaataccggattgaaaacatcctacg

SEQ ID NO: 386467 - DNA, 52 bp, Artificial
  Synthetic oligonucleotide
ctggtgattaaatggcttgcttttgggggtgagtctataaacgaccacgtga

SEQ ID NO: 386468 - DNA, 58 bp, Artificial
  Synthetic oligonucleotide
ctggtgattaacagtaatggaaatctaattgcccctcgaggttattttaagatgcgca

SEQ ID NO: 386469 - DNA, 52 bp, Artificial
  Synthetic oligonucleotide
ctggtgattttgtcgaacacaagtcaatccggaccagaatggaattgtcctc

SEQ ID NO: 386470 - DNA, 60 bp, Artificial
  Synthetic oligonucleotide
ctggtgcacaaaaaatgactcacaatggacagacagacaatctgtagtacccatagtaga

SEQ ID NO: 386471 - DNA, 60 bp, Artificial
  Synthetic oligonucleotide
ctggtgcacatgagactcgcatacgagccgaacagggtgctaatatccactataccaaca

SEQ ID NO: 386472 - DNA, 55 bp, Artificial
  Synthetic oligonucleotide
ctggtgccagttaaccaatcggcgctgataagcgcggggagttgggctacggcag

SEQ ID NO: 386473 - DNA, 55 bp, Artificial
  Synthetic oligonucleotide
ctggtgccatgagggagctgaatttgaatatgttccaagggatgcgcctcttggc

SEQ ID NO: 386474 - DNA, 59 bp, Artificial
  Synthetic oligonucleotide
ctggtgcctccatcgtttcggtgtctaagcgcatgtttctagagcgagaaacttgtttc

SEQ ID NO: 386475 - DNA, 50 bp, Artificial
  Synthetic oligonucleotide
ctggtgcgactactattgtcgctcatagcgcttcgtccgctcatgaaacc

SEQ ID NO: 386476 - DNA, 55 bp, Artificial
  Synthetic oligonucleotide
ctggtgcgagttacacgtttctgactaacgtcagaacgaatagcctcaacggact

SEQ ID NO: 386477 - DNA, 55 bp, Artificial
  Synthetic oligonucleotide
ctggtgcgagttgaaccgaaagcactcgctagtgatatgagttggcgccctcccg

SEQ ID NO: 386478 - DNA, 53 bp, Artificial
  Synthetic oligonucleotide
ctggtgcgatgaagtgagagctctagtaggacataagattaaattagacggag

SEQ ID NO: 386479 - DNA, 60 bp, Artificial
  Synthetic oligonucleotide
ctggtgcgcagcagcatgtgactcaacttttcacgacttttgtcgaaaagtgttcatata

SEQ ID NO: 386480 - DNA, 60 bp, Artificial
  Synthetic oligonucleotide
ctggtgcgctggcaaaagacatgcgattgaagggcatttggtgtaaatcactgctagcac

SEQ ID NO: 386481 - DNA, 52 bp, Artificial
  Synthetic oligonucleotide
ctggtgcggcactaaccgaaaccggtaacgtttggacgtggggtacacacga

SEQ ID NO: 386482 - DNA, 55 bp, Artificial
  Synthetic oligonucleotide
ctggtgcggtttaaatttggtcgattcagctcctaaaggattgttcaagacatcc

SEQ ID NO: 386483 - DNA, 55 bp, Artificial
  Synthetic oligonucleotide
ctggtgctagcaggagttttcgtcggtggtgtatggatggtgttttcgggtgcaa

SEQ ID NO: 386484 - DNA, 58 bp, Artificial
  Synthetic oligonucleotide
ctggtgctccagatataagtaacccaactattttgcctgatcctaataatcaaacaac

SEQ ID NO: 386485 - DNA, 54 bp, Artificial
  Synthetic oligonucleotide
ctggtgcttatcatttaggagtaccaataaacagttcgcccacatcttgagata

SEQ ID NO: 386486 - DNA, 60 bp, Artificial
  Synthetic oligonucleotide
ctggtgcttcacccttaataactacacagcagagcaaatagagcacttagagcttgtatt

SEQ ID NO: 386487 - DNA, 60 bp, Artificial
  Synthetic oligonucleotide
ctggtgcttcgtaatgaccagcaagataggacgttcattcaacaggagtcctatgaagcg

SEQ ID NO: 386488 - DNA, 55 bp, Artificial
  Synthetic oligonucleotide
ctggtggaatctcctgcaatattggattcaggaactaaggggtagtgctgttagt

SEQ ID NO: 386489 - DNA, 60 bp, Artificial
  Synthetic oligonucleotide
ctggtggaattacatacaacgcaatatacgaacaatcgtgcatatattctttaattggta

SEQ ID NO: 386490 - DNA, 55 bp, Artificial
  Synthetic oligonucleotide
ctggtggacaatctctccctgttcattgacgaaatggcgcatccgttacagccgg

SEQ ID NO: 386491 - DNA, 59 bp, Artificial
  Synthetic oligonucleotide
ctggtggacgtagattactctcaggtagaatggtgcagtccgacccacagacatggggt

SEQ ID NO: 386492 - DNA, 53 bp, Artificial
  Synthetic oligonucleotide
ctggtggagactatgactctggcgtgtcggcgagaaaccagggagcgacctac

SEQ ID NO: 386493 - DNA, 53 bp, Artificial
  Synthetic oligonucleotide
ctggtggagagaacgtaccacgggttttcggacccttccttcaggactgccaa

SEQ ID NO: 386494 - DNA, 50 bp, Artificial
  Synthetic oligonucleotide
ctggtggaggactgaaagcttgcttggtgttggatcccaacagactgatg

SEQ ID NO: 386495 - DNA, 57 bp, Artificial
  Synthetic oligonucleotide
ctggtggagtaatagtaccccggagttgctggcgtatcttcagtaatcttcactaaa

SEQ ID NO: 386496 - DNA, 60 bp, Artificial
  Synthetic oligonucleotide
ctggtggatcaggagtaccttacatagcattgcatatagtggatgaagacatgtcaggtc

SEQ ID NO: 386497 - DNA, 58 bp, Artificial
  Synthetic oligonucleotide
ctggtggatctcaacgtccacgtggtgtgcctaatgcacggcgcaacttgttttccgt

SEQ ID NO: 386498 - DNA, 56 bp, Artificial
  Synthetic oligonucleotide
ctggtggattaggttataaatggtcagaaatttcatttaagccagcaaactaccag

SEQ ID NO: 386499 - DNA, 56 bp, Artificial
  Synthetic oligonucleotide
ctggtggattattattaataaacgacactgaaattccaactgtaatagaaatacta

SEQ ID NO: 386500 - DNA, 50 bp, Artificial
  Synthetic oligonucleotide
ctggtggcagcgaagtagttaatgcgactccttctagcttaacgacgaga

SEQ ID NO: 386501 - DNA, 57 bp, Artificial
  Synthetic oligonucleotide
ctggtggcatcatgtctaaattgtttggaggcggtcaaaaagccgcctccggtggca

SEQ ID NO: 386502 - DNA, 51 bp, Artificial
  Synthetic oligonucleotide
ctggtggccacctcgcctcggaggggctcattggtccagcagagtcgacct

SEQ ID NO: 386503 - DNA, 58 bp, Artificial
  Synthetic oligonucleotide
ctggtggccagctgttttactcccgccccgttgtctcagccaatggcgagccgactgt

SEQ ID NO: 386504 - DNA, 60 bp, Artificial
  Synthetic oligonucleotide
ctggtgggacggactccagtcctctgatgactttgctctcatagtgaatgcaccaaatca

SEQ ID NO: 386505 - DNA, 55 bp, Artificial
  Synthetic oligonucleotide
ctggtgggcaacttttatatcatttgatgcgccaagttctaaaagagcgacaccg

SEQ ID NO: 386506 - DNA, 54 bp, Artificial
  Synthetic oligonucleotide
ctggtgggggatactaggtggccgatctattaagggagttactactccggatac

SEQ ID NO: 386507 - DNA, 60 bp, Artificial
  Synthetic oligonucleotide
ctggtggggttgttatccagagtggaggaggcacttattaggtgtggctattgcatgaga

SEQ ID NO: 386508 - DNA, 55 bp, Artificial
  Synthetic oligonucleotide
ctggtgggtctactttcctcatcactaatttccctcaaggggcgaacgagaactg

SEQ ID NO: 386509 - DNA, 53 bp, Artificial
  Synthetic oligonucleotide
ctggtggtaaatttagagatgatgccgagtttgcagaattgttgagtgcgcac

SEQ ID NO: 386510 - DNA, 55 bp, Artificial
  Synthetic oligonucleotide
ctggtggtaggaactcttcgccttacatggttgtcggtgttacccgtcacaggcg

SEQ ID NO: 386511 - DNA, 54 bp, Artificial
  Synthetic oligonucleotide
ctggtggtcaggctatgccttccacctatcgtattaggagggatgcgaatgaac

SEQ ID NO: 386512 - DNA, 60 bp, Artificial
  Synthetic oligonucleotide
ctggtggtcataccatcagggcgccctgagaaacagcgtcagttgttacgctatagtggt

SEQ ID NO: 386513 - DNA, 55 bp, Artificial
  Synthetic oligonucleotide
ctggtggtcttccgtcctttgatgaactatttggtgcaaggatccacagtcacgg

SEQ ID NO: 386514 - DNA, 60 bp, Artificial
  Synthetic oligonucleotide
ctggtggttattgcctaaccaaatggatgatccttgctgcagaactcaaatgttttggga

SEQ ID NO: 386515 - DNA, 60 bp, Artificial
  Synthetic oligonucleotide
ctggtggttctgagcagattaaggtttacatgaatgcatcgccaacctacgtacacgtgg

SEQ ID NO: 386516 - DNA, 53 bp, Artificial
  Synthetic oligonucleotide
ctggtgtaaaaaggacactaataactgggacttaccactaaactacagactag

SEQ ID NO: 386517 - DNA, 51 bp, Artificial
  Synthetic oligonucleotide
ctggtgtacgtctacctgccattttggagatccaggtgatgtcatgggacc

SEQ ID NO: 386518 - DNA, 55 bp, Artificial
  Synthetic oligonucleotide
ctggtgtagagctaggtccaagacccaagttcatccctccagtctcgatgcctgc

SEQ ID NO: 386519 - DNA, 54 bp, Artificial
  Synthetic oligonucleotide
ctggtgtaggagctaagtcaccgtcttacatctagagcctactcttcttaaact

SEQ ID NO: 386520 - DNA, 55 bp, Artificial
  Synthetic oligonucleotide
ctggtgtattatcatttggatctgagaggggatctggaactcaagttccacaagt

SEQ ID NO: 386521 - DNA, 59 bp, Artificial
  Synthetic oligonucleotide
ctggtgtattcccaacgctttcctcaggttgtggttgaactgtatttggatctgtatga

SEQ ID NO: 386522 - DNA, 60 bp, Artificial
  Synthetic oligonucleotide
ctggtgtcactacgctgttgtgcacaatgacgagcgtgtcaagatgggtaagaatccccg

SEQ ID NO: 386523 - DNA, 57 bp, Artificial
  Synthetic oligonucleotide
ctggtgtcctatagacgtccttgtcgtgtgtagtgcggtctggctaaccgtaacggc

SEQ ID NO: 386524 - DNA, 56 bp, Artificial
  Synthetic oligonucleotide
ctggtgtcttggtgtcctataaatactaaaagcctctggggactccataggacacg

SEQ ID NO: 386525 - DNA, 60 bp, Artificial
  Synthetic oligonucleotide
ctggtgtgacaaccaacaagtctacgtccaatatggaccatgcacgcggactaggcattc

SEQ ID NO: 386526 - DNA, 60 bp, Artificial
  Synthetic oligonucleotide
ctggtgtgggagtcctatgagagagatcttctagtttccactacgacagcccagggatgt

SEQ ID NO: 386527 - DNA, 58 bp, Artificial
  Synthetic oligonucleotide
ctggtgtgtcagcatagcacaccccaggtgtcataccctgaagtttagtaaggggggc

SEQ ID NO: 386528 - DNA, 53 bp, Artificial
  Synthetic oligonucleotide
ctggtgtgtccgtgaggtttccaggcccccggggtaatctcggcagtacgaat

SEQ ID NO: 386529 - DNA, 54 bp, Artificial
  Synthetic oligonucleotide
ctggtgttagtagaatagcaggtccccgcctatatagcaaagctgtcacacagg

SEQ ID NO: 386530 - DNA, 55 bp, Artificial
  Synthetic oligonucleotide
ctggtgttatcccatgacctaccgttgatttgtgaccttgaacctatgtagggcc

SEQ ID NO: 386531 - DNA, 60 bp, Artificial
  Synthetic oligonucleotide
ctggtgttcaagctctgcctacatttgaagagctgttcggatcatattctgctagttacg

SEQ ID NO: 386532 - DNA, 51 bp, Artificial
  Synthetic oligonucleotide
ctggtgttccttgatttcattgggggttcaaaaggtcgtggggctagtttt

SEQ ID NO: 386533 - DNA, 58 bp, Artificial
  Synthetic oligonucleotide
ctggtgttgaaacgcagagcaagcgagaaagatgggtttacgaaagctgtgaaggaaa

SEQ ID NO: 386534 - DNA, 55 bp, Artificial
  Synthetic oligonucleotide
ctggtgttggacacattctgctggggaatgatagtgtgcacgacgaggcggggca

SEQ ID NO: 386535 - DNA, 60 bp, Artificial
  Synthetic oligonucleotide
ctggtgttggtaatcaaatttactgtgcatcaacacatgcatattcatgggcaccaccct

SEQ ID NO: 386536 - DNA, 60 bp, Artificial
  Synthetic oligonucleotide
ctggtgtttccaattcgcgtgtaatgggtgagtgagcttatgtggtcgccaagacatgtg

SEQ ID NO: 386537 - DNA, 52 bp, Artificial
  Synthetic oligonucleotide
ctggttaaatgcactgtactttgaaaagcaaactctcatggattgggtagaa

SEQ ID NO: 386538 - DNA, 55 bp, Artificial
  Synthetic oligonucleotide
ctggttaaattttccgacaaatgcgacatacatctcgtggaaagaaacgaatcat

SEQ ID NO: 386539 - DNA, 52 bp, Artificial
  Synthetic oligonucleotide
ctggttaacacgtgaccgtagaccatatggaatccctatggatttcgggcaa

SEQ ID NO: 386540 - DNA, 59 bp, Artificial
  Synthetic oligonucleotide
ctggttaacatagtgcaggtgctatcccatgatagtcctttaactcaagggttgagttc

SEQ ID NO: 386541 - DNA, 55 bp, Artificial
  Synthetic oligonucleotide
ctggttaacggatgtgactgagagaagcgctatctttcggctgacttgtttcgca

SEQ ID NO: 386542 - DNA, 57 bp, Artificial
  Synthetic oligonucleotide
ctggttacagcgtgcccagggtcataataatggcatttgttggggcaaccaattgtt

SEQ ID NO: 386543 - DNA, 55 bp, Artificial
  Synthetic oligonucleotide
ctggttacctcgacccactgctatgagcaacaaagaatgaccattcgcggcggac

SEQ ID NO: 386544 - DNA, 55 bp, Artificial
  Synthetic oligonucleotide
ctggttacttaaagcctgatggcgtatttcaagattttgttagagatgaatggcg

SEQ ID NO: 386545 - DNA, 54 bp, Artificial
  Synthetic oligonucleotide
ctggttagttagggatcgccgcccagttacaacgccttatggttttggtgaggc

SEQ ID NO: 386546 - DNA, 60 bp, Artificial
  Synthetic oligonucleotide
ctggttatacggtgctcactccgaatcaaacaggagccgaaaatgtatgactgacttagc

SEQ ID NO: 386547 - DNA, 52 bp, Artificial
  Synthetic oligonucleotide
ctggttatactctttcagatttgcccgtatatgttactgtagctaaggtgca

SEQ ID NO: 386548 - DNA, 56 bp, Artificial
  Synthetic oligonucleotide
ctggttatagtcagacaacatggagaacatacttgaggtcacatgattttgaggca

SEQ ID NO: 386549 - DNA, 59 bp, Artificial
  Synthetic oligonucleotide
ctggttatgaatggttgattaggtagaattggttcatcactatcccaacctgttggctc

SEQ ID NO: 386550 - DNA, 51 bp, Artificial
  Synthetic oligonucleotide
ctggttatgacgggtggtgggcatgtaatactggattaaccccttgtgttt

SEQ ID NO: 386551 - DNA, 54 bp, Artificial
  Synthetic oligonucleotide
ctggttatgcaccagtaaattgggggcctggggaaacgaatgattccactactg

SEQ ID NO: 386552 - DNA, 60 bp, Artificial
  Synthetic oligonucleotide
ctggttatggatattctcggactttagaagctctaagatgacatacctgactctgatcac

SEQ ID NO: 386553 - DNA, 58 bp, Artificial
  Synthetic oligonucleotide
ctggttattgggcaatgtatatatactataacgagcctattctcactattacctgggg

SEQ ID NO: 386554 - DNA, 55 bp, Artificial
  Synthetic oligonucleotide
ctggttcaaatgctgacatggttcagcatggtcacaatgtattggtgtatgttgc

SEQ ID NO: 386555 - DNA, 60 bp, Artificial
  Synthetic oligonucleotide
ctggttcaccccgttatgcccatgaaagacatccatgagtccattagatggaccaaggat

SEQ ID NO: 386556 - DNA, 55 bp, Artificial
  Synthetic oligonucleotide
ctggttcagatgcggcacactatcgctggaaacaaggagtggcaaacatggttgt

SEQ ID NO: 386557 - DNA, 60 bp, Artificial
  Synthetic oligonucleotide
ctggttcagtctacaagagactgaatgggggaggcaagggctatgatgactggtgtcgtc

SEQ ID NO: 386558 - DNA, 55 bp, Artificial
  Synthetic oligonucleotide
ctggttcagtgatctctcactagagagattggagccttgtgatccgggacagggc

SEQ ID NO: 386559 - DNA, 55 bp, Artificial
  Synthetic oligonucleotide
ctggttccaaattacttcgtgtccgttgcggatgccaagcgaaaaccgtggcaag

SEQ ID NO: 386560 - DNA, 55 bp, Artificial
  Synthetic oligonucleotide
ctggttccagagactctcatgccgacactccgtatgcttcatcttatcaagaacg

SEQ ID NO: 386561 - DNA, 60 bp, Artificial
  Synthetic oligonucleotide
ctggttccagtggacggtctgcgacttctggaagtatcggtgctctgtcatcccgcacac

SEQ ID NO: 386562 - DNA, 60 bp, Artificial
  Synthetic oligonucleotide
ctggttccatgcttcaccttagcactgttactacacttaacagaatgtgctgactatatc

SEQ ID NO: 386563 - DNA, 53 bp, Artificial
  Synthetic oligonucleotide
ctggttcccgattaggaacgggtattaatatcgctctgtcccgctggaactat

SEQ ID NO: 386564 - DNA, 60 bp, Artificial
  Synthetic oligonucleotide
ctggttcgcaagactagattcctaccagtagctggcggaacaagcagcgtatacattgag

SEQ ID NO: 386565 - DNA, 57 bp, Artificial
  Synthetic oligonucleotide
ctggttcgcatttaataggcgttttgaaccaattgctaggtctgaattattgaatat

SEQ ID NO: 386566 - DNA, 60 bp, Artificial
  Synthetic oligonucleotide
ctggttcgtaagaccagattcctaccagtggctggtgggacaagcagcgtgtatatagaa

SEQ ID NO: 386567 - DNA, 59 bp, Artificial
  Synthetic oligonucleotide
ctggttctaagaacctaaaggccttagtagggacagtatgtgtcatctgctgctgtcac

SEQ ID NO: 386568 - DNA, 55 bp, Artificial
  Synthetic oligonucleotide
ctggttctagtaaacccacatcattactttgaggttcaattcctcttgctccctg

SEQ ID NO: 386569 - DNA, 55 bp, Artificial
  Synthetic oligonucleotide
ctggttctattcacgctcccactgtttcagactccaaagcattggccagaaggtt

SEQ ID NO: 386570 - DNA, 55 bp, Artificial
  Synthetic oligonucleotide
ctggttctcagaactgctgtgatgtaacaattagtagtcgtaagtaggtttctgg

SEQ ID NO: 386571 - DNA, 58 bp, Artificial
  Synthetic oligonucleotide
ctggttctcgagttacagggtgaagataaattgataagagtaacagaatatgagttag

SEQ ID NO: 386572 - DNA, 60 bp, Artificial
  Synthetic oligonucleotide
ctggttctggaattatgatgtcggatgctcaggttcacaattgtactacaaagtgccaaa

SEQ ID NO: 386573 - DNA, 55 bp, Artificial
  Synthetic oligonucleotide
ctggttctggtcatcgaggtcagctgcccgctcgtcctggttgagtgggatcaca

SEQ ID NO: 386574 - DNA, 60 bp, Artificial
  Synthetic oligonucleotide
ctggttgaaaccgactacagcaagttcgatggcacattcttgcgctttatgcgtgagtgc

SEQ ID NO: 386575 - DNA, 57 bp, Artificial
  Synthetic oligonucleotide
ctggttgaccaaatctaatggggatgcatacccactccaaaacctgacaaaggtcaa

SEQ ID NO: 386576 - DNA, 51 bp, Artificial
  Synthetic oligonucleotide
ctggttgacggtgttggcaacatcttctttcctgggctgtccgtctgtaag

SEQ ID NO: 386577 - DNA, 57 bp, Artificial
  Synthetic oligonucleotide
ctggttgatccgagataggaggcccaataaggatccattgacgtttacacaggcgtt

SEQ ID NO: 386578 - DNA, 55 bp, Artificial
  Synthetic oligonucleotide
ctggttgcaacctcattgaccatatagactcaccatcatcaatctgggtctttgc

SEQ ID NO: 386579 - DNA, 55 bp, Artificial
  Synthetic oligonucleotide
ctggttgccttctccggcgttgcacgagtacgattctctgacaagtagtcacgtt

SEQ ID NO: 386580 - DNA, 55 bp, Artificial
  Synthetic oligonucleotide
ctggttgctaattatgactgggtgcctacttcaacaacgaaagtctacaagcaag

SEQ ID NO: 386581 - DNA, 55 bp, Artificial
  Synthetic oligonucleotide
ctggttgctcgaagaagattcttgccagtggcaggagcaacatcagctgagttca

SEQ ID NO: 386582 - DNA, 55 bp, Artificial
  Synthetic oligonucleotide
ctggttggaatacccacccatcgacacctcaaaggcgaagcctgtcctttgcctc

SEQ ID NO: 386583 - DNA, 60 bp, Artificial
  Synthetic oligonucleotide
ctggttggaccgtgatgggcctatatttaggcccagtgtcataatcagtgccgggatcat

SEQ ID NO: 386584 - DNA, 60 bp, Artificial
  Synthetic oligonucleotide
ctggttggagttttactccaagacaccctataaagtgactgcagctgataagagtgagca

SEQ ID NO: 386585 - DNA, 53 bp, Artificial
  Synthetic oligonucleotide
ctggttggataagctagttggtcataattacccggtttatgttgaaccggttg

SEQ ID NO: 386586 - DNA, 56 bp, Artificial
  Synthetic oligonucleotide
ctggttggggaggcgaggtcgaagaatctattgttcttgcactggaactttccttc

SEQ ID NO: 386587 - DNA, 56 bp, Artificial
  Synthetic oligonucleotide
ctggttggggataccaggtcgaagaatctttgattcgtgcacctgtattttccttc

SEQ ID NO: 386588 - DNA, 58 bp, Artificial
  Synthetic oligonucleotide
ctggttggggatgtgaggtcgaagaatctattgtttctgcactggaatttaccttcga

SEQ ID NO: 386589 - DNA, 60 bp, Artificial
  Synthetic oligonucleotide
ctggttggggcttggcaataggccatcagcgcatgcgtggaacctttgtgtctcctctgc

SEQ ID NO: 386590 - DNA, 54 bp, Artificial
  Synthetic oligonucleotide
ctggttgggggctcaattgggaccttgggctctcccaatgggcccgagaagccc

SEQ ID NO: 386591 - DNA, 58 bp, Artificial
  Synthetic oligonucleotide
ctggttgggtcctggattaagcatacgcctaatgggcttgggcttctcaacagaccaa

SEQ ID NO: 386592 - DNA, 55 bp, Artificial
  Synthetic oligonucleotide
ctggttgggtctcaggactcttttcatggctaggtggaacttggatggctgttct

SEQ ID NO: 386593 - DNA, 55 bp, Artificial
  Synthetic oligonucleotide
ctggttggtcagagatcgtcgaccctatggcacgcctatggacttcggtcaggtg

SEQ ID NO: 386594 - DNA, 55 bp, Artificial
  Synthetic oligonucleotide
ctggttggtcagggaccgtagaccgtatggcacgccaatggatttcggtcaggtg

SEQ ID NO: 386595 - DNA, 58 bp, Artificial
  Synthetic oligonucleotide
ctggttggtgtatgatgcacagcctaccggaaataccccgacgacgaaggacatcttc

SEQ ID NO: 386596 - DNA, 55 bp, Artificial
  Synthetic oligonucleotide
ctggttgtccattataatcccatttccaacctctgttcacaagagattgagcttc

SEQ ID NO: 386597 - DNA, 55 bp, Artificial
  Synthetic oligonucleotide
ctggttgtctggtgtagcagtcaactggagcaagtggcggtgggtgagcttaagg

SEQ ID NO: 386598 - DNA, 60 bp, Artificial
  Synthetic oligonucleotide
ctggttgtcttcttggcaattctgtgttgcaccttgataggaacctgagtagagtggccc

SEQ ID NO: 386599 - DNA, 52 bp, Artificial
  Synthetic oligonucleotide
ctggttgtgcccactgtgggcacgacccgtgctattagcgcaaatctttttc

SEQ ID NO: 386600 - DNA, 55 bp, Artificial
  Synthetic oligonucleotide
ctggtttaaaggaaactggacagaagccatacaggaggtgaaagagaccattaaa

SEQ ID NO: 386601 - DNA, 57 bp, Artificial
  Synthetic oligonucleotide
ctggtttagtgctaccgtgacgcgccgacaacccgtatcgacgcctctcgaagcgcc

SEQ ID NO: 386602 - DNA, 55 bp, Artificial
  Synthetic oligonucleotide
ctggtttcagatggaggaccgaatttgtacaatatccgaaatctccacatcccgg

SEQ ID NO: 386603 - DNA, 58 bp, Artificial
  Synthetic oligonucleotide
ctggtttccatcggtcgagaaggggagcatgctcagattactatcgagaaagaaaagt

SEQ ID NO: 386604 - DNA, 55 bp, Artificial
  Synthetic oligonucleotide
ctggtttccctgcgcatattgtgtgaaaacgctcccagcaatgttaaacactttc

SEQ ID NO: 386605 - DNA, 54 bp, Artificial
  Synthetic oligonucleotide
ctggtttcctacaatagttccaacctcgtgacccagcgtttccaggggtggaca

SEQ ID NO: 386606 - DNA, 50 bp, Artificial
  Synthetic oligonucleotide
ctggtttcgagggggcgcgggcagtgccagctgagggtactcagtcaccc

SEQ ID NO: 386607 - DNA, 59 bp, Artificial
  Synthetic oligonucleotide
ctggtttcgatggagctactgttcagctgttaggggatcggccaacgaccggagctgtg

SEQ ID NO: 386608 - DNA, 55 bp, Artificial
  Synthetic oligonucleotide
ctggtttgaatgtaacccagttcaagactacatggggacattcatggtactagat

SEQ ID NO: 386609 - DNA, 60 bp, Artificial
  Synthetic oligonucleotide
ctggtttgataagaacaaagacttcatcaaactctgggacgcaaagtacatggatctcaa

SEQ ID NO: 386610 - DNA, 59 bp, Artificial
  Synthetic oligonucleotide
ctggtttgccgtggctagatccgcgattgtgagttgaggccttggccttatgaggcgtt

SEQ ID NO: 386611 - DNA, 55 bp, Artificial
  Synthetic oligonucleotide
ctggtttgcgctcactcgagttggaatatctgatgatgcaagttccgtacggctc

SEQ ID NO: 386612 - DNA, 59 bp, Artificial
  Synthetic oligonucleotide
ctggtttgtacatatttggcttatgagcaaagtttggatattgaggtgttgcccattgt

SEQ ID NO: 386613 - DNA, 59 bp, Artificial
  Synthetic oligonucleotide
ctggtttgtcctagctgaaaaaacatacgctcacactattgttaatgggcttccgctgc

SEQ ID NO: 386614 - DNA, 55 bp, Artificial
  Synthetic oligonucleotide
ctggtttgtggtctcgtgcacttaattcagttggtccatccaccgattggattac

SEQ ID NO: 386615 - DNA, 55 bp, Artificial
  Synthetic oligonucleotide
ctggttttaccactgaaacatgctagggtcagaggtataaaaccggaaatggcac

SEQ ID NO: 386616 - DNA, 55 bp, Artificial
  Synthetic oligonucleotide
ctggttttcgtatctttcctgattgaacccggcaaaagggagtgtgattcaaagc

SEQ ID NO: 386617 - DNA, 54 bp, Artificial
  Synthetic oligonucleotide
ctggttttgaatccccgttttctattttggggttgccagagatcgtggtgcgaa

SEQ ID NO: 386618 - DNA, 55 bp, Artificial
  Synthetic oligonucleotide
ctggttttgatgcgataggcataaaagaccttgagcctctaagtagaggtatgca

SEQ ID NO: 386619 - DNA, 55 bp, Artificial
  Synthetic oligonucleotide
ctgtaaaaaagtgtccgctcctacctgttcagtcgttatggtcgacggagtcgcc

SEQ ID NO: 386620 - DNA, 55 bp, Artificial
  Synthetic oligonucleotide
ctgtaaaagtaacatcagtaattagagacgatcacggaaaagtagcaaccaacgg

SEQ ID NO: 386621 - DNA, 59 bp, Artificial
  Synthetic oligonucleotide
ctgtaaacctttggactgagatccaaatgtccacataagtagttgtgtggtcccagaga

SEQ ID NO: 386622 - DNA, 59 bp, Artificial
  Synthetic oligonucleotide
ctgtaaacgagcaccagatcattgaagatactattgcaaaagctttctcgtgttatttt

SEQ ID NO: 386623 - DNA, 55 bp, Artificial
  Synthetic oligonucleotide
ctgtaaactaaggttctacagaagccccgtctgtgactttatagtacactacaac

SEQ ID NO: 386624 - DNA, 59 bp, Artificial
  Synthetic oligonucleotide
ctgtaaagaatactccacctataggattattaatatgatatgctgtactaaccggcaaa

SEQ ID NO: 386625 - DNA, 60 bp, Artificial
  Synthetic oligonucleotide
ctgtaaagactgagtatggggaattcacgatgcttggaatctatgacaggtgggcagtgc

SEQ ID NO: 386626 - DNA, 55 bp, Artificial
  Synthetic oligonucleotide
ctgtaaagcgttctgcaccatcctcctctacgtctgcccctgcctctaaacgcaa

SEQ ID NO: 386627 - DNA, 53 bp, Artificial
  Synthetic oligonucleotide
ctgtaaaggctgacactatcactgagcttttgatccgcatgaaacgcgcggag

SEQ ID NO: 386628 - DNA, 55 bp, Artificial
  Synthetic oligonucleotide
ctgtaaatcgggcaccctcgaggggatgtataaactagtaatcttgaacggtaca

SEQ ID NO: 386629 - DNA, 57 bp, Artificial
  Synthetic oligonucleotide
ctgtaaatgcaaaatgtacaccgttgctaaatgatgtgatgttagctatccatgtag

SEQ ID NO: 386630 - DNA, 51 bp, Artificial
  Synthetic oligonucleotide
ctgtaaattaaacccttcaataaaccgtttatgcgtaactgtatttccgtc

SEQ ID NO: 386631 - DNA, 51 bp, Artificial
  Synthetic oligonucleotide
ctgtaacacgccacctccagaatgtataaatgacttgttgaaatcagttga

SEQ ID NO: 386632 - DNA, 55 bp, Artificial
  Synthetic oligonucleotide
ctgtaacattgccggatgggtcttaggaaacccagaatgcgaatcattgctctcc

SEQ ID NO: 386633 - DNA, 54 bp, Artificial
  Synthetic oligonucleotide
ctgtaacgctgaagttgagttacactccttacgaacttgtggatgtagactggt

SEQ ID NO: 386634 - DNA, 57 bp, Artificial
  Synthetic oligonucleotide
ctgtaactcatcttggtggaattcgtaccgcagtttgtaaccgaagtggatatgtta

SEQ ID NO: 386635 - DNA, 55 bp, Artificial
  Synthetic oligonucleotide
ctgtaagaaattaggaccacgggagaatgttgcagttattcaagtaggtggttca

SEQ ID NO: 386636 - DNA, 57 bp, Artificial
  Synthetic oligonucleotide
ctgtaagaacctgaagtacaaccagcacgtagatcctcagaccatcactccgatcgg

SEQ ID NO: 386637 - DNA, 60 bp, Artificial
  Synthetic oligonucleotide
ctgtaagaagaatgctgtcaatgaatattgagggacgtgatgcagatgtcaaaggaaatc

SEQ ID NO: 386638 - DNA, 55 bp, Artificial
  Synthetic oligonucleotide
ctgtaagaccaagagtactcctatcatgttagggaaggatcagctcagtggtatc

SEQ ID NO: 386639 - DNA, 60 bp, Artificial
  Synthetic oligonucleotide
ctgtaagatcgctcctttgatggtggcatacatgttggaaagggaactggttcgcaagac

SEQ ID NO: 386640 - DNA, 59 bp, Artificial
  Synthetic oligonucleotide
ctgtaagcccctcagtcaagactctgattgatgtggacacaaccccggaggtagacacc

SEQ ID NO: 386641 - DNA, 57 bp, Artificial
  Synthetic oligonucleotide
ctgtaagcctttgtaccgcctccggttaccaatgtttcctcctgctcattgttgtga

SEQ ID NO: 386642 - DNA, 59 bp, Artificial
  Synthetic oligonucleotide
ctgtaaggtattatgatataggtccaccagtcattaatgcaaaacgtgatggggaagta

SEQ ID NO: 386643 - DNA, 55 bp, Artificial
  Synthetic oligonucleotide
ctgtaaggttcgtcagagacgtgctcagcttaaccagtggtatgtatctagtcag

SEQ ID NO: 386644 - DNA, 60 bp, Artificial
  Synthetic oligonucleotide
ctgtaagtgcggtacacgtggtccaattaaattgcatctggcgagtctagatatccacaa

SEQ ID NO: 386645 - DNA, 55 bp, Artificial
  Synthetic oligonucleotide
ctgtaagtggaagacagtaaaggaagactcacgatcgacggagcgaatctgtgcc

SEQ ID NO: 386646 - DNA, 54 bp, Artificial
  Synthetic oligonucleotide
ctgtaataaagactcctccactgagaaagaaaatgtctggtaccttcgggggaa

SEQ ID NO: 386647 - DNA, 58 bp, Artificial
  Synthetic oligonucleotide
ctgtaataaagagcagtaaataaagtgagtagtcatgtcttttgttgaccaccctcca

SEQ ID NO: 386648 - DNA, 53 bp, Artificial
  Synthetic oligonucleotide
ctgtaataacagaggctttcacctctaataccctgcttctatatagtggtctt

SEQ ID NO: 386649 - DNA, 55 bp, Artificial
  Synthetic oligonucleotide
ctgtaatacaacacaactgtctaatagtacttggcagaggtctgatggtacttgg

SEQ ID NO: 386650 - DNA, 56 bp, Artificial
  Synthetic oligonucleotide
ctgtaatacagcttccatggaattgggtcttttagcgagaaaaaggacgatgaaaa

SEQ ID NO: 386651 - DNA, 59 bp, Artificial
  Synthetic oligonucleotide
ctgtaatacatcatcactgtttacttggagtactaatgggtcaaatattacaggaagta

SEQ ID NO: 386652 - DNA, 60 bp, Artificial
  Synthetic oligonucleotide
ctgtaatatcacatggatttggtcattatagactagttccctatcagcaggtactaaatc

SEQ ID NO: 386653 - DNA, 60 bp, Artificial
  Synthetic oligonucleotide
ctgtaatatcttaatgcgtggatactcacgagaaacgagcctatgcatgtcacccaatgc

SEQ ID NO: 386654 - DNA, 57 bp, Artificial
  Synthetic oligonucleotide
ctgtaatcaacgttttgtgtctccttacaggacgccagctgatttggaggtcatcca

SEQ ID NO: 386655 - DNA, 60 bp, Artificial
  Synthetic oligonucleotide
ctgtaatcacacatggtaagggtcattatagaattgtaaagtactcatcagttgctaatc

SEQ ID NO: 386656 - DNA, 55 bp, Artificial
  Synthetic oligonucleotide
ctgtaatcatgttgagtctattcgacacattcagtgcgcgtaggcaggagaacat

SEQ ID NO: 386657 - DNA, 54 bp, Artificial
  Synthetic oligonucleotide
ctgtaatccattatggaggaatgccaacagatgtggtgaggtcatggagaaagc

SEQ ID NO: 386658 - DNA, 52 bp, Artificial
  Synthetic oligonucleotide
ctgtaatccctagggtctaagggttccgccggtcctagacggtggtcacgta

SEQ ID NO: 386659 - DNA, 55 bp, Artificial
  Synthetic oligonucleotide
ctgtaatccgatctggtggggttatttccaccccctatctcctaagtgcaagttg

SEQ ID NO: 386660 - DNA, 58 bp, Artificial
  Synthetic oligonucleotide
ctgtaatgacgattttccaaacgcccagctagaaggtgacaactttgcagagttagag

SEQ ID NO: 386661 - DNA, 60 bp, Artificial
  Synthetic oligonucleotide
ctgtaatgatactgacaataaagtacagggttattatctctgcattgtaggagctaactc

SEQ ID NO: 386662 - DNA, 55 bp, Artificial
  Synthetic oligonucleotide
ctgtaatgatggacccgctgttccaacgcatattcccgaaggtgagaatcgaccc

SEQ ID NO: 386663 - DNA, 56 bp, Artificial
  Synthetic oligonucleotide
ctgtaatgcgttttcaagaggcctctggttatccaacagtaggccttacggttctg

SEQ ID NO: 386664 - DNA, 59 bp, Artificial
  Synthetic oligonucleotide
ctgtaatgtagacatgtacccagagttctcaattgtttgtaggtttgatactcgcaccc

SEQ ID NO: 386665 - DNA, 55 bp, Artificial
  Synthetic oligonucleotide
ctgtaattccccatacctacacatgttatttaacacatgctcaacttcagcgtga

SEQ ID NO: 386666 - DNA, 50 bp, Artificial
  Synthetic oligonucleotide
ctgtaattgtacaaatgggacggataatacaaaaatgacatgccctaaga

SEQ ID NO: 386667 - DNA, 59 bp, Artificial
  Synthetic oligonucleotide
ctgtaatttgactcctgctttcaacaagaggacctttgaccacacacttatgagtatag

SEQ ID NO: 386668 - DNA, 55 bp, Artificial
  Synthetic oligonucleotide
ctgtacaaagaaacctcccatttgaaaagtcaactgtcatggcagcgttcactgg

SEQ ID NO: 386669 - DNA, 53 bp, Artificial
  Synthetic oligonucleotide
ctgtacaaatcaattgtaccagaccctccaacaatatgaggacacgtatgact

SEQ ID NO: 386670 - DNA, 60 bp, Artificial
  Synthetic oligonucleotide
ctgtacaaccctctctcttgtgataaagagcttaggttggcagcccagagaattcatcag

SEQ ID NO: 386671 - DNA, 60 bp, Artificial
  Synthetic oligonucleotide
ctgtacaagagacccggagcctaggcggctccaaattcagcgtttgcactgtcgtgtcca

SEQ ID NO: 386672 - DNA, 60 bp, Artificial
  Synthetic oligonucleotide
ctgtacaagctgttacccttatactagttattgtcactttagatgagcttgtgaggatga

SEQ ID NO: 386673 - DNA, 58 bp, Artificial
  Synthetic oligonucleotide
ctgtacaaggccgtgggagtttcactggtcggtgtctacctctataagtcgccaagca

SEQ ID NO: 386674 - DNA, 55 bp, Artificial
  Synthetic oligonucleotide
ctgtacaatgctaactctagcactcccaacatttgatgtctctaagatggtagat

SEQ ID NO: 386675 - DNA, 55 bp, Artificial
  Synthetic oligonucleotide
ctgtacaattatctcgtgcaacgtgatcttaatcaagaaagtggctttctgagct

SEQ ID NO: 386676 - DNA, 60 bp, Artificial
  Synthetic oligonucleotide
ctgtacacctttagacagaatatcttcacattctggcaccatctagtaaacacgggtcac

SEQ ID NO: 386677 - DNA, 59 bp, Artificial
  Synthetic oligonucleotide
ctgtacacggtcttaggtgtatgcttgccgtaaaatattgtcagttaatcgaacagaca

SEQ ID NO: 386678 - DNA, 55 bp, Artificial
  Synthetic oligonucleotide
ctgtacacgtcgattggtggaagcaaggtggtatgatcgtggtatgatcatgcct

SEQ ID NO: 386679 - DNA, 55 bp, Artificial
  Synthetic oligonucleotide
ctgtacactgcaaggaccctattctggtgaacccaaaccaaagacaaaaattcca

SEQ ID NO: 386680 - DNA, 56 bp, Artificial
  Synthetic oligonucleotide
ctgtacagattggtgtataacagggtatggaataagtccctccgtagcagaaagtt

SEQ ID NO: 386681 - DNA, 60 bp, Artificial
  Synthetic oligonucleotide
ctgtacagggaatcaatacatcatctcaagcgcaacaggattgattacctcctttctgca

SEQ ID NO: 386682 - DNA, 55 bp, Artificial
  Synthetic oligonucleotide
ctgtacagtacttggcactagcagcattaataacaccaaaacagataaagccacc

SEQ ID NO: 386683 - DNA, 60 bp, Artificial
  Synthetic oligonucleotide
ctgtacagtcttctgtacattggctggacctggtgctagttgtgaagcatactcagaaac

SEQ ID NO: 386684 - DNA, 55 bp, Artificial
  Synthetic oligonucleotide
ctgtaccaacttgagacactaccaagtggatactcatgctaacatggattcccgc

SEQ ID NO: 386685 - DNA, 55 bp, Artificial
  Synthetic oligonucleotide
ctgtaccaatggccgcttcttgggcactctactataatctgcgcggtctcaccac

SEQ ID NO: 386686 - DNA, 53 bp, Artificial
  Synthetic oligonucleotide
ctgtaccattaaccaggactaagttactaataaagccaaattgagtattgttg

SEQ ID NO: 386687 - DNA, 54 bp, Artificial
  Synthetic oligonucleotide
ctgtacccacggctgaaaacaagtgatccgttacccgcttaggtacttcgagaa

SEQ ID NO: 386688 - DNA, 55 bp, Artificial
  Synthetic oligonucleotide
ctgtacccagattggtggcgcaacaagaggaggtggttgtcactacggaggttcc

SEQ ID NO: 386689 - DNA, 60 bp, Artificial
  Synthetic oligonucleotide
ctgtaccctgaaataagtacatctggcataggtgtcaatgcatatccgtagagagtataa

SEQ ID NO: 386690 - DNA, 55 bp, Artificial
  Synthetic oligonucleotide
ctgtaccctgaggtacacctcgatagcccaatagtgactaacaagttggtcgcca

SEQ ID NO: 386691 - DNA, 55 bp, Artificial
  Synthetic oligonucleotide
ctgtaccctttctccatcactgccgctcgaaatttcccattctagatttagggtg

SEQ ID NO: 386692 - DNA, 55 bp, Artificial
  Synthetic oligonucleotide
ctgtaccctttgaaatcaacccaaccgtctgtccttgacatcacctcattgagga

SEQ ID NO: 386693 - DNA, 53 bp, Artificial
  Synthetic oligonucleotide
ctgtacctaaaggacgttggaaccactcctaattttcgaagtaagtctgataa

SEQ ID NO: 386694 - DNA, 55 bp, Artificial
  Synthetic oligonucleotide
ctgtacctacgggaggtttcttgccaatcctaggtccttcctgcgaggcgtgagc

SEQ ID NO: 386695 - DNA, 60 bp, Artificial
  Synthetic oligonucleotide
ctgtacctaggagtcatggttcaagcggactcgggatgtgtgatcaactggaagggcaga

SEQ ID NO: 386696 - DNA, 55 bp, Artificial
  Synthetic oligonucleotide
ctgtacctgagggcgtggtatactctgttggttataatgagaagggtctcggtcc

SEQ ID NO: 386697 - DNA, 55 bp, Artificial
  Synthetic oligonucleotide
ctgtacctggttaccaggcatgcagacgtcattcccgcccgtagacggggcgaca

SEQ ID NO: 386698 - DNA, 60 bp, Artificial
  Synthetic oligonucleotide
ctgtacctttggtatgtaccatcgtttatgatacttgcttatatatggatgttaatgctt

SEQ ID NO: 386699 - DNA, 56 bp, Artificial
  Synthetic oligonucleotide
ctgtacgacactctcagcacttcgttcgctgaacttggtctcaattacaactttga

SEQ ID NO: 386700 - DNA, 55 bp, Artificial
  Synthetic oligonucleotide
ctgtacgacctacaagtcaaccagtgtcataaccaggcagtgatctacgatcgga

SEQ ID NO: 386701 - DNA, 57 bp, Artificial
  Synthetic oligonucleotide
ctgtacgacgtcatttccaagctccccctggccgtgatgggaagctcctacggattc

SEQ ID NO: 386702 - DNA, 56 bp, Artificial
  Synthetic oligonucleotide
ctgtacgacgttgttagcaagctcccccaggccgtgatgggaagctcctacggatt

SEQ ID NO: 386703 - DNA, 58 bp, Artificial
  Synthetic oligonucleotide
ctgtacgcccgcctgttggccgggttagcatatactattgtagtacgcaaaccatctc

SEQ ID NO: 386704 - DNA, 55 bp, Artificial
  Synthetic oligonucleotide
ctgtacgctttgctttctgcaaaaggggttagggatttcttatcgttcttacagc

SEQ ID NO: 386705 - DNA, 55 bp, Artificial
  Synthetic oligonucleotide
ctgtacggcggtcctaaatagatgcaggattacactacatctaaagaccacgcat

SEQ ID NO: 386706 - DNA, 60 bp, Artificial
  Synthetic oligonucleotide
ctgtacggctacggtctacgcgcacaggctgtacccgacgctatgcacgtggctgctacg

SEQ ID NO: 386707 - DNA, 55 bp, Artificial
  Synthetic oligonucleotide
ctgtacgggatcaggaaaggcccatagaaagacacgtcatccgtgacagtggtgg

SEQ ID NO: 386708 - DNA, 55 bp, Artificial
  Synthetic oligonucleotide
ctgtacgggtatctgattgtttatcttaacgcttaagggccgcaggcccgtcaag

SEQ ID NO: 386709 - DNA, 55 bp, Artificial
  Synthetic oligonucleotide
ctgtacgtggatcaagatgtcacacgagctcaaatctacatgttcaagcccacca

SEQ ID NO: 386710 - DNA, 55 bp, Artificial
  Synthetic oligonucleotide
ctgtactacagcaatatctcactacgaatgccgttatagtaggggataaggcagc

SEQ ID NO: 386711 - DNA, 60 bp, Artificial
  Synthetic oligonucleotide
ctgtactacctggtgcttcaagctatgctgatatgaagcctcatgtacgttatgacatgt

SEQ ID NO: 386712 - DNA, 57 bp, Artificial
  Synthetic oligonucleotide
ctgtactactatggaaagtttgacatttactcgttgatggttggaaatagtactcag

SEQ ID NO: 386713 - DNA, 60 bp, Artificial
  Synthetic oligonucleotide
ctgtactagcaactttggaatcagagagtggtcatatttaattgaagacccatctgcacc

SEQ ID NO: 386714 - DNA, 52 bp, Artificial
  Synthetic oligonucleotide
ctgtactaggcatcctaactgattgtagatctacaattttactacctgcagg

SEQ ID NO: 386715 - DNA, 56 bp, Artificial
  Synthetic oligonucleotide
ctgtactaggtgtatccatattaaacctaggtcaaaggaaatacacaaagaccaca

SEQ ID NO: 386716 - DNA, 55 bp, Artificial
  Synthetic oligonucleotide
ctgtactcgattacgcagtgatcgattttcatacagctccgactgagtcttgccg

SEQ ID NO: 386717 - DNA, 57 bp, Artificial
  Synthetic oligonucleotide
ctgtactcgtctggggaagcctgatgtctgggcagcctgctagtcggctcggtatgc

SEQ ID NO: 386718 - DNA, 60 bp, Artificial
  Synthetic oligonucleotide
ctgtactcgtggaggtatcactggagacagtgcctccatttcattcgaagttgtatgtgc

SEQ ID NO: 386719 - DNA, 55 bp, Artificial
  Synthetic oligonucleotide
ctgtactctatcacgcaatgatcgatcttcatacatgaacgactcagccgtgcgc

SEQ ID NO: 386720 - DNA, 55 bp, Artificial
  Synthetic oligonucleotide
ctgtactctatgacgcagtggtcgattttcatacagctccgagtgagtcgggcgc

SEQ ID NO: 386721 - DNA, 59 bp, Artificial
  Synthetic oligonucleotide
ctgtactgaaaccaaagcatcgatgttttatctaacactgcaagctgattcaacactcg

SEQ ID NO: 386722 - DNA, 54 bp, Artificial
  Synthetic oligonucleotide
ctgtactgacatcacgactaatagaactagcagaaaccatactgacataaacag

SEQ ID NO: 386723 - DNA, 55 bp, Artificial
  Synthetic oligonucleotide
ctgtactggacaagtcagctgtgagattgtatgggaagtagaaagatacgcaaca

SEQ ID NO: 386724 - DNA, 51 bp, Artificial
  Synthetic oligonucleotide
ctgtactggctaacgggtatcgcacaggtaagtacaaggtaggccgtaagg

SEQ ID NO: 386725 - DNA, 52 bp, Artificial
  Synthetic oligonucleotide
ctgtactgtatcattacggtgatgccctgcaacctcccttgtgcaatggagg

SEQ ID NO: 386726 - DNA, 60 bp, Artificial
  Synthetic oligonucleotide
ctgtacttatgggttgggactatcctaagtgtgatcgtgctatgccaaacatactacgta

SEQ ID NO: 386727 - DNA, 58 bp, Artificial
  Synthetic oligonucleotide
ctgtacttggtcacgcggaacgctgatgtcatcccggcccgaagacgaggggacaagc

SEQ ID NO: 386728 - DNA, 55 bp, Artificial
  Synthetic oligonucleotide
ctgtacttgtggtcgttcttttagttgataagagaagaatacctactgagtagtt

SEQ ID NO: 386729 - DNA, 55 bp, Artificial
  Synthetic oligonucleotide
ctgtactttgatgggtacctgagtacagtggctctgagaggaagacgaattctgc

SEQ ID NO: 386730 - DNA, 55 bp, Artificial
  Synthetic oligonucleotide
ctgtagaaagtgcgatgaattctggccttgccgtgcagagacttacttatgaacg

SEQ ID NO: 386731 - DNA, 55 bp, Artificial
  Synthetic oligonucleotide
ctgtagaacaatctggaggagggggatggagcagtattgtatttagcttaggggc

SEQ ID NO: 386732 - DNA, 60 bp, Artificial
  Synthetic oligonucleotide
ctgtagaaccacaactatactgtgattataatattgtgttaatgaaatacgatgcaaact

SEQ ID NO: 386733 - DNA, 55 bp, Artificial
  Synthetic oligonucleotide
ctgtagaactgtgtgttcctggcttccatggttgggctacagctgctttgcttgt

SEQ ID NO: 386734 - DNA, 55 bp, Artificial
  Synthetic oligonucleotide
ctgtagaagcatgtggttactcagacagaatcattcagatcaccagaggtgattc

SEQ ID NO: 386735 - DNA, 60 bp, Artificial
  Synthetic oligonucleotide
ctgtagaagctagctgcccaataacaagctcgtgtacagtattccacgatagaatattaa

SEQ ID NO: 386736 - DNA, 59 bp, Artificial
  Synthetic oligonucleotide
ctgtagaataccaaacttcatcactagataaatagtacacttcgcagtttgcgtggaac

SEQ ID NO: 386737 - DNA, 56 bp, Artificial
  Synthetic oligonucleotide
ctgtagaatatggaattttcgtccagcgaggagctacgtacaccattaacgctgct

SEQ ID NO: 386738 - DNA, 60 bp, Artificial
  Synthetic oligonucleotide
ctgtagaccagcataaaatgacgagcgcatccatctggaccctaagacagggtgattacc

SEQ ID NO: 386739 - DNA, 60 bp, Artificial
  Synthetic oligonucleotide
ctgtagaccttgggactcagatccagatgtccgcacaaatagttatgtggtcccaaagat

SEQ ID NO: 386740 - DNA, 60 bp, Artificial
  Synthetic oligonucleotide
ctgtagactctacaaccctttcattcaatgggaagatagaattgcatttcatttagaaca

SEQ ID NO: 386741 - DNA, 60 bp, Artificial
  Synthetic oligonucleotide
ctgtagactgggcatacgcatacacagcattgcctaaagggttgtgggagcaaatcactg

SEQ ID NO: 386742 - DNA, 56 bp, Artificial
  Synthetic oligonucleotide
ctgtagagatctgttggattcattgctcccgggttttttgggcttgttatctgact

SEQ ID NO: 386743 - DNA, 58 bp, Artificial
  Synthetic oligonucleotide
ctgtagagcagaaactgtatttcaagaagtaggccatgtttgaagtatccccttagcc

SEQ ID NO: 386744 - DNA, 55 bp, Artificial
  Synthetic oligonucleotide
ctgtagagccatcagccccaccagaggagagcttcaggtttggggaggagaccac

SEQ ID NO: 386745 - DNA, 60 bp, Artificial
  Synthetic oligonucleotide
ctgtagagctggacctactcggatggtctgcaacttacagcaaagatcttgggatctatg

SEQ ID NO: 386746 - DNA, 58 bp, Artificial
  Synthetic oligonucleotide
ctgtagagtgttataagatcaattaccctgtccccgtgtattctaccactcgcagtaa

SEQ ID NO: 386747 - DNA, 60 bp, Artificial
  Synthetic oligonucleotide
ctgtagatacaagtgtatcagcccaagggatagcagacttggctctctctatggttagat

SEQ ID NO: 386748 - DNA, 57 bp, Artificial
  Synthetic oligonucleotide
ctgtagatataacatctgaaatgccagtaaatacaattggtgcttcctcagtaagtc

SEQ ID NO: 386749 - DNA, 52 bp, Artificial
  Synthetic oligonucleotide
ctgtagatgattcgaatatactaaaccaggttcgaagaaataaggctgcaag

SEQ ID NO: 386750 - DNA, 60 bp, Artificial
  Synthetic oligonucleotide
ctgtagcaaagtagtagtatcctcttgtacaagaatgatggagacacagacctctacatg

SEQ ID NO: 386751 - DNA, 59 bp, Artificial
  Synthetic oligonucleotide
ctgtagcagtatcatgcacaaatgagatgccattagcatccttgcatagagtatactgg

SEQ ID NO: 386752 - DNA, 60 bp, Artificial
  Synthetic oligonucleotide
ctgtagcgaaggcccttgagacaggtccatctcgatttcgagtatcagacccgaggtgca

SEQ ID NO: 386753 - DNA, 60 bp, Artificial
  Synthetic oligonucleotide
ctgtagctaccattgtctagtttgctttcagacaaaaggcttaggcatttactatggcag

SEQ ID NO: 386754 - DNA, 60 bp, Artificial
  Synthetic oligonucleotide
ctgtagctccgagatggcctgtctgaccactgcaatctcctttgcgcttatcctccgcgg

SEQ ID NO: 386755 - DNA, 55 bp, Artificial
  Synthetic oligonucleotide
ctgtagctcgatgcataataagaatatcttcacttttatcttctccggagtactc

SEQ ID NO: 386756 - DNA, 59 bp, Artificial
  Synthetic oligonucleotide
ctgtagctggagtcacgggctctggtgccactgccacgactggacgcaacacctcaaaa

SEQ ID NO: 386757 - DNA, 60 bp, Artificial
  Synthetic oligonucleotide
ctgtagctttggtaggagcattgccatttgtgacagattcatcagttatatcgctaattg

SEQ ID NO: 386758 - DNA, 55 bp, Artificial
  Synthetic oligonucleotide
ctgtaggaactgccagtatcaccgggataagtccggagacccgaacgcttcctgc

SEQ ID NO: 386759 - DNA, 58 bp, Artificial
  Synthetic oligonucleotide
ctgtaggacgcttcggtgacttccccgcatgttgccgctcgtccctttgctgactagc

SEQ ID NO: 386760 - DNA, 60 bp, Artificial
  Synthetic oligonucleotide
ctgtaggagacacgataagggctgctctgcggaaagcgggtatcgatctcaatacccagc

SEQ ID NO: 386761 - DNA, 60 bp, Artificial
  Synthetic oligonucleotide
ctgtaggtgataatactcgtggcactaacctcacaattactgtgtcctctgatgattccc

SEQ ID NO: 386762 - DNA, 58 bp, Artificial
  Synthetic oligonucleotide
ctgtaggtggcgaaccacttgaaatccagttcatatgtgaggatttcaaagcccccta

SEQ ID NO: 386763 - DNA, 55 bp, Artificial
  Synthetic oligonucleotide
ctgtaggtttgacacgcgagtgttaagcaaattaaatctccctggctgtaatggc

SEQ ID NO: 386764 - DNA, 55 bp, Artificial
  Synthetic oligonucleotide
ctgtagtaggtaagaggggtgcgatccggttatgctactcggaccagcatcatgc

SEQ ID NO: 386765 - DNA, 60 bp, Artificial
  Synthetic oligonucleotide
ctgtagtattgctttgtcacacagaggaatttgcttacgaggtaggagcgctacccatac

SEQ ID NO: 386766 - DNA, 60 bp, Artificial
  Synthetic oligonucleotide
ctgtagtccaggaatatggcaattagattgcacacatctagaagggaaagtcatcctggt

SEQ ID NO: 386767 - DNA, 60 bp, Artificial
  Synthetic oligonucleotide
ctgtagtcgtggctgacacgctcaactcttacaagagttgaagttgcctttgagagttac

SEQ ID NO: 386768 - DNA, 53 bp, Artificial
  Synthetic oligonucleotide
ctgtagtctcttagatttactttaaggaggtcaaatggctaacgtaattaaaa

SEQ ID NO: 386769 - DNA, 60 bp, Artificial
  Synthetic oligonucleotide
ctgtagtcttggagcttaattgcacctagattagatatcgcaaaattatcagtagtaggt

SEQ ID NO: 386770 - DNA, 55 bp, Artificial
  Synthetic oligonucleotide
ctgtagtgaagtgttcttccagagtcttgataaagagcattcagcagttctgttg

SEQ ID NO: 386771 - DNA, 60 bp, Artificial
  Synthetic oligonucleotide
ctgtagtgatgccagcccatggtccagccaggagcatggagtatgatgctgttgcaacta

SEQ ID NO: 386772 - DNA, 54 bp, Artificial
  Synthetic oligonucleotide
ctgtagtggagcgcgaataccagggccggcccttatcggttacttagttaatcc

SEQ ID NO: 386773 - DNA, 55 bp, Artificial
  Synthetic oligonucleotide
ctgtagtgtcctcgcactacaacaggaggttcaccccagaaattcgaaaaagacc

SEQ ID NO: 386774 - DNA, 55 bp, Artificial
  Synthetic oligonucleotide
ctgtagttgaaccaactgtgcagatgaacttgttccctaagatcacattcgaaag

SEQ ID NO: 386775 - DNA, 60 bp, Artificial
  Synthetic oligonucleotide
ctgtagttgaccctcatctggaatttgatgattgttctcccctgtgtgctctcgtggaca

SEQ ID NO: 386776 - DNA, 57 bp, Artificial
  Synthetic oligonucleotide
ctgtataaatctagcgccgactacgtttatctgcggcttcggacgctaggcgttcgt

SEQ ID NO: 386777 - DNA, 55 bp, Artificial
  Synthetic oligonucleotide
ctgtataaatgtacccgctttctacattgtaaccagtcgctctgcggagaggctg

SEQ ID NO: 386778 - DNA, 59 bp, Artificial
  Synthetic oligonucleotide
ctgtataagctttggccttagcttaatgtcagtagtagaacaatttactaatgtatgtc

SEQ ID NO: 386779 - DNA, 52 bp, Artificial
  Synthetic oligonucleotide
ctgtataaggctcagacatctcatcagacgtccgacgcaacgtgatacataa

SEQ ID NO: 386780 - DNA, 55 bp, Artificial
  Synthetic oligonucleotide
ctgtatactaagccaagtttaggcccgttatgcgataaatcctaggttggtggag

SEQ ID NO: 386781 - DNA, 60 bp, Artificial
  Synthetic oligonucleotide
ctgtatactttttcgagacgtatgaagaaaaaagcatcgcagacctgcagaagcttgatg

SEQ ID NO: 386782 - DNA, 55 bp, Artificial
  Synthetic oligonucleotide
ctgtataggctaggggccgtacaaaatgaggtcaccctcacacaccccgtaacca

SEQ ID NO: 386783 - DNA, 55 bp, Artificial
  Synthetic oligonucleotide
ctgtataggttccacatgggtggcatagaaggctggtgccaaaagatgtggacca

SEQ ID NO: 386784 - DNA, 60 bp, Artificial
  Synthetic oligonucleotide
ctgtatagtgcgagtagtcatgctagtaatcccgtgtatcagaccctgcgttgcagggct

SEQ ID NO: 386785 - DNA, 52 bp, Artificial
  Synthetic oligonucleotide
ctgtatatacaggtactgtggtacattggattgttataatcacacaaccagc

SEQ ID NO: 386786 - DNA, 58 bp, Artificial
  Synthetic oligonucleotide
ctgtatatactaagctttacacaactagtccaacaacaggggtgaatacaaagcacga

SEQ ID NO: 386787 - DNA, 59 bp, Artificial
  Synthetic oligonucleotide
ctgtatatattttaggcaagatatggatggacgagaatatcaagttgaagaaccatacg

SEQ ID NO: 386788 - DNA, 60 bp, Artificial
  Synthetic oligonucleotide
ctgtatcaaggttgctgtaatgagaactatcgctggctgataaagaatatcccagctgat

SEQ ID NO: 386789 - DNA, 57 bp, Artificial
  Synthetic oligonucleotide
ctgtatcaatcgaccaaacgactttgagggagatagcttcggtgtttataactcgaa

SEQ ID NO: 386790 - DNA, 60 bp, Artificial
  Synthetic oligonucleotide
ctgtatcaatgcgggagcctctccagcgattgagagtaggcttggggtcatcaacaaagt

SEQ ID NO: 386791 - DNA, 55 bp, Artificial
  Synthetic oligonucleotide
ctgtatccgaccacgataattgtggggcccctttgaatacagtcgctgagcacgt

SEQ ID NO: 386792 - DNA, 60 bp, Artificial
  Synthetic oligonucleotide
ctgtatccgcgatatcagaggtcaaactttcgatagtgtcacttttgttacagctaattc

SEQ ID NO: 386793 - DNA, 57 bp, Artificial
  Synthetic oligonucleotide
ctgtatcgcgtcctccaaccgaactgtttggcgatttaatctccaaacaatatacgc

SEQ ID NO: 386794 - DNA, 60 bp, Artificial
  Synthetic oligonucleotide
ctgtatctagttacatgtactagggctggagtcactggtgactctgcatccactggtttc

SEQ ID NO: 386795 - DNA, 60 bp, Artificial
  Synthetic oligonucleotide
ctgtatctccaaatagctttgcatcctgtaattttttggtctcataggctagggcaggga

SEQ ID NO: 386796 - DNA, 60 bp, Artificial
  Synthetic oligonucleotide
ctgtatctcgttgatttccgaggagctgacaagatcttctctgagtacagtagtaggatt

SEQ ID NO: 386797 - DNA, 55 bp, Artificial
  Synthetic oligonucleotide
ctgtatctggacggtgatgatgtcttggttcctcaggaatggccggttgtggtgc

SEQ ID NO: 386798 - DNA, 60 bp, Artificial
  Synthetic oligonucleotide
ctgtatcttctcctcgccttgagcctgatgtcggtagccatgtgcagaactcctttttcc

SEQ ID NO: 386799 - DNA, 55 bp, Artificial
  Synthetic oligonucleotide
ctgtatgaattcatcggtggtgcgagcgagtagcatacgaaatttcatgccgacc

SEQ ID NO: 386800 - DNA, 60 bp, Artificial
  Synthetic oligonucleotide
ctgtatgacaggagtcctgattgaagggaaatgctttgtcccagatcaaagtgtggtcag

SEQ ID NO: 386801 - DNA, 60 bp, Artificial
  Synthetic oligonucleotide
ctgtatgaccgtatgaggggtttaatgataacaatgggattcagcatacctcggatcgaa

SEQ ID NO: 386802 - DNA, 55 bp, Artificial
  Synthetic oligonucleotide
ctgtatgactgggccaatttcaatgtgcaacactcaagtgaggagctggcgacag

SEQ ID NO: 386803 - DNA, 60 bp, Artificial
  Synthetic oligonucleotide
ctgtatgagaaagtaagaagccagctaaggaacaatgccaaggaaattgggaatggctgc

SEQ ID NO: 386804 - DNA, 60 bp, Artificial
  Synthetic oligonucleotide
ctgtatgatggtgacgtgagtttgtcacaaatcagtgaggagttgagccatgctccaacc

SEQ ID NO: 386805 - DNA, 60 bp, Artificial
  Synthetic oligonucleotide
ctgtatgcaatggggtactacttccatctactcgtgaatttattcactccctgttccaca

SEQ ID NO: 386806 - DNA, 50 bp, Artificial
  Synthetic oligonucleotide
ctgtatgcatacacaggaccagcgccagtagcatacgggaccagaacaag

SEQ ID NO: 386807 - DNA, 50 bp, Artificial
  Synthetic oligonucleotide
ctgtatgcgaagagaaatattcgcacactgccaaataaccgtattttgaa

SEQ ID NO: 386808 - DNA, 55 bp, Artificial
  Synthetic oligonucleotide
ctgtatgcttaattgttagaggtgctcctggaactgggaagtcactagcaactgg

SEQ ID NO: 386809 - DNA, 60 bp, Artificial
  Synthetic oligonucleotide
ctgtatggctctggtgataggtacgttagaatggggactgaaagcatgaattttgccaag

SEQ ID NO: 386810 - DNA, 60 bp, Artificial
  Synthetic oligonucleotide
ctgtatgggccgattttgagctctcaagactggatgataatagctgtcatagtcccatca

SEQ ID NO: 386811 - DNA, 50 bp, Artificial
  Synthetic oligonucleotide
ctgtatggggggagcacagtcgtgttaacccctctcttgaagcacctaat

SEQ ID NO: 386812 - DNA, 58 bp, Artificial
  Synthetic oligonucleotide
ctgtatgggtggatctcgttctccaccgctgagtccgcatctgattggcccataccta

SEQ ID NO: 386813 - DNA, 60 bp, Artificial
  Synthetic oligonucleotide
ctgtatgtcaagtatgatggagacccatggattgacagtgatgcccttactcttagcgga

SEQ ID NO: 386814 - DNA, 60 bp, Artificial
  Synthetic oligonucleotide
ctgtatgtctgctcttgcatgggagtcccggtgcaggcaaatcagtagcaactaatctga

SEQ ID NO: 386815 - DNA, 55 bp, Artificial
  Synthetic oligonucleotide
ctgtatgtggtacactctggtcctcgtgtacggcaggtcctctacgttgtacatc

SEQ ID NO: 386816 - DNA, 58 bp, Artificial
  Synthetic oligonucleotide
ctgtatgttcggatggaaatgtgctgacctggttggggataccaagtcgaagaatcgt

SEQ ID NO: 386817 - DNA, 55 bp, Artificial
  Synthetic oligonucleotide
ctgtatgttggccctccacgggccgtcctattggggcctagaatatcgggctcct

SEQ ID NO: 386818 - DNA, 55 bp, Artificial
  Synthetic oligonucleotide
ctgtattaaatttgatccctgaaaccccaacttcattcttgatccatgatatggc

SEQ ID NO: 386819 - DNA, 60 bp, Artificial
  Synthetic oligonucleotide
ctgtattacacaccaatgcaatttgagtctgagtacacaaaaatgatgactgactgtgga

SEQ ID NO: 386820 - DNA, 58 bp, Artificial
  Synthetic oligonucleotide
ctgtattactttgactgtttttcagactctgctataagaaaggccttattaggacaca

SEQ ID NO: 386821 - DNA, 60 bp, Artificial
  Synthetic oligonucleotide
ctgtattcaacagcttgtatgcatctccacaactagagggattttcagctgagtcgagaa

SEQ ID NO: 386822 - DNA, 53 bp, Artificial
  Synthetic oligonucleotide
ctgtattcccgcgctaaaacacaactggaggatactaagggtgttaccgacgg

SEQ ID NO: 386823 - DNA, 55 bp, Artificial
  Synthetic oligonucleotide
ctgtattccgaaacgatttctaagcacgtctctgacggatcgtacgggaataggg

SEQ ID NO: 386824 - DNA, 60 bp, Artificial
  Synthetic oligonucleotide
ctgtattgccatcattagttccatttatgccatacaaagttaatgccatcatccctttga

SEQ ID NO: 386825 - DNA, 55 bp, Artificial
  Synthetic oligonucleotide
ctgtattgggtgtttccatcctgaatcttgggcagaagaaatacaccaagactgc

SEQ ID NO: 386826 - DNA, 60 bp, Artificial
  Synthetic oligonucleotide
ctgtatttggatctgtatgatgtcctgattggtgttgaatggtctctcgtggtgcttggt

SEQ ID NO: 386827 - DNA, 55 bp, Artificial
  Synthetic oligonucleotide
ctgtcaaaaatggtacctatgactatccaaaataccaggacgagagtaaattaaa

SEQ ID NO: 386828 - DNA, 53 bp, Artificial
  Synthetic oligonucleotide
ctgtcaaaacggaaacatccggtgccagatttgtatttagagaaaaaacaccc

SEQ ID NO: 386829 - DNA, 58 bp, Artificial
  Synthetic oligonucleotide
ctgtcaaaagagttaacagttgaaggtgaaccatcgcctatttcgcataaagataaca

SEQ ID NO: 386830 - DNA, 59 bp, Artificial
  Synthetic oligonucleotide
ctgtcaaacacggccatagtcgacgacagggaggatgtaaagagggctcagcctaccag

SEQ ID NO: 386831 - DNA, 55 bp, Artificial
  Synthetic oligonucleotide
ctgtcaaactttcagggcaaggtgctgatgacaatcaataacaccgacgtggctg

SEQ ID NO: 386832 - DNA, 54 bp, Artificial
  Synthetic oligonucleotide
ctgtcaaagattgttctccggactgttttctagcatgcgctacaaccataaacg

SEQ ID NO: 386833 - DNA, 55 bp, Artificial
  Synthetic oligonucleotide
ctgtcaaagcttaagcaagaacaccctagtgtcagcttcactaaagaggaggtct

SEQ ID NO: 386834 - DNA, 57 bp, Artificial
  Synthetic oligonucleotide
ctgtcaaagggcccttgtcgttgtatgggatcggtctgccttccccagtcgacatac

SEQ ID NO: 386835 - DNA, 60 bp, Artificial
  Synthetic oligonucleotide
ctgtcaaagtatcagccctagtactaactgctcttggaatgtacgcatctagatttagac

SEQ ID NO: 386836 - DNA, 57 bp, Artificial
  Synthetic oligonucleotide
ctgtcaaatctacacgccccgcaattgtgcttctgaagacccctggcgttgccagta

SEQ ID NO: 386837 - DNA, 54 bp, Artificial
  Synthetic oligonucleotide
ctgtcaacaatctaaatattgcgtataaatatctagcaacaggaaaagccaaag

SEQ ID NO: 386838 - DNA, 60 bp, Artificial
  Synthetic oligonucleotide
ctgtcaacaggctgcgtagtcatagtgggcagagttgtcttgtccgggaagccggcagtt

SEQ ID NO: 386839 - DNA, 60 bp, Artificial
  Synthetic oligonucleotide
ctgtcaaccaatcaaattgcatcctcaaacgttagataagtgttcatttgtctttatata

SEQ ID NO: 386840 - DNA, 52 bp, Artificial
  Synthetic oligonucleotide
ctgtcaaccccagggagttcttaaaatctatcgacctcggagggttacccga

SEQ ID NO: 386841 - DNA, 55 bp, Artificial
  Synthetic oligonucleotide
ctgtcaacccgtggaagacaaaccattaaggagaataaaggcacacggattagat

SEQ ID NO: 386842 - DNA, 59 bp, Artificial
  Synthetic oligonucleotide
ctgtcaaccgagtctatgacgtgcagtcccgcacacgcgggtggagcttccccatccct

SEQ ID NO: 386843 - DNA, 57 bp, Artificial
  Synthetic oligonucleotide
ctgtcaacggtacatctttgttcacgagtgtataattaaaaacgtcgaaattgtgca

SEQ ID NO: 386844 - DNA, 54 bp, Artificial
  Synthetic oligonucleotide
ctgtcaacgtacagtcaaggaaacttttggcccggtttggagaccagagagggc

SEQ ID NO: 386845 - DNA, 58 bp, Artificial
  Synthetic oligonucleotide
ctgtcaagaggtcgtagagttaagtgcagaggaactaaacaaatacttgcaggcaaaa

SEQ ID NO: 386846 - DNA, 55 bp, Artificial
  Synthetic oligonucleotide
ctgtcaagtaggtgactggtagatgaaagcaaaggttgagtacatcaaattgccc

SEQ ID NO: 386847 - DNA, 55 bp, Artificial
  Synthetic oligonucleotide
ctgtcaagtgaaccggtctgctgttgtgtggtctctacgctagctcatcgtccgt

SEQ ID NO: 386848 - DNA, 54 bp, Artificial
  Synthetic oligonucleotide
ctgtcaagtttaaaacctcccatacgtcagcccaattagtagaattacaagccc

SEQ ID NO: 386849 - DNA, 58 bp, Artificial
  Synthetic oligonucleotide
ctgtcaataacgcccctatgattttccttcgtatagagtgtatgttattctatccgct

SEQ ID NO: 386850 - DNA, 55 bp, Artificial
  Synthetic oligonucleotide
ctgtcaataacttctcaagttaatggtaaacgccttgtggacagcccgaactccc

SEQ ID NO: 386851 - DNA, 55 bp, Artificial
  Synthetic oligonucleotide
ctgtcaatcatgaagacaaccactattttgatactactgacccatgctgcggaca

SEQ ID NO: 386852 - DNA, 59 bp, Artificial
  Synthetic oligonucleotide
ctgtcaatcatgaagacaaccattattttgatactactgacccattgggtctacagtca

SEQ ID NO: 386853 - DNA, 59 bp, Artificial
  Synthetic oligonucleotide
ctgtcaatgatatacaacagttagtaggaaaattaaactgggctagccagatctaccca

SEQ ID NO: 386854 - DNA, 51 bp, Artificial
  Synthetic oligonucleotide
ctgtcaatgtgagaggatcgggaatgaggatacttgtaagaggcaattccc

SEQ ID NO: 386855 - DNA, 55 bp, Artificial
  Synthetic oligonucleotide
ctgtcacactgcctccccttcaacctgtacttcccctgtgaactgtgcaccatta

SEQ ID NO: 386856 - DNA, 55 bp, Artificial
  Synthetic oligonucleotide
ctgtcacagataggtcgatggcgcacaagtatgttgaccctggagtggttgaacg

SEQ ID NO: 386857 - DNA, 60 bp, Artificial
  Synthetic oligonucleotide
ctgtcacatgcaaatatgatatttggagcaagctcggtcggatttaagggcgttaatgtg

SEQ ID NO: 386858 - DNA, 55 bp, Artificial
  Synthetic oligonucleotide
ctgtcaccatgattataccgtggattagcaacacacactatcgaacacaggcaac

SEQ ID NO: 386859 - DNA, 55 bp, Artificial
  Synthetic oligonucleotide
ctgtcaccgaagtatcctctgttgcgtctactgaacccgactccagaacagcgac

SEQ ID NO: 386860 - DNA, 55 bp, Artificial
  Synthetic oligonucleotide
ctgtcacgaacacaattggcaaagctcaacaaatcgaattggataaggctgcact

SEQ ID NO: 386861 - DNA, 60 bp, Artificial
  Synthetic oligonucleotide
ctgtcacgatccgaccaatatgcagtacaccgtctcggtgcagctgcgtctgctctgcga

SEQ ID NO: 386862 - DNA, 55 bp, Artificial
  Synthetic oligonucleotide
ctgtcacgccaggcctctgttaaggttcgtaggtcatggactgaaaccaaaaaaa

SEQ ID NO: 386863 - DNA, 50 bp, Artificial
  Synthetic oligonucleotide
ctgtcacgtaacaacggagtgtccagcagtggcacgtcgtacgcacccga

SEQ ID NO: 386864 - DNA, 57 bp, Artificial
  Synthetic oligonucleotide
ctgtcacgtaaggcttctgtgaaagttagtaatcacaagtaaacaaagcacaatgtt

SEQ ID NO: 386865 - DNA, 60 bp, Artificial
  Synthetic oligonucleotide
ctgtcacgtacaaagccgcattcgactaccacttcagtgctaacgctggaccctgcgcat

SEQ ID NO: 386866 - DNA, 55 bp, Artificial
  Synthetic oligonucleotide
ctgtcacgtatctggacgtgacaacgcgtgacaggggtgaatttggcacatccag

SEQ ID NO: 386867 - DNA, 50 bp, Artificial
  Synthetic oligonucleotide
ctgtcacgttaaaattcaaacctccaccaaaactaacaacacaatggaga

SEQ ID NO: 386868 - DNA, 58 bp, Artificial
  Synthetic oligonucleotide
ctgtcactagtccagaaactgcagggggcttttctcgcacacctcactggccggggca

SEQ ID NO: 386869 - DNA, 56 bp, Artificial
  Synthetic oligonucleotide
ctgtcactatccaacctccccgatttccatccatcgttgaggaccttctacctgtg

SEQ ID NO: 386870 - DNA, 60 bp, Artificial
  Synthetic oligonucleotide
ctgtcactgatactatcgtgtagcacacagcaaggagaacgatatgtatacagttgggtt

SEQ ID NO: 386871 - DNA, 56 bp, Artificial
  Synthetic oligonucleotide
ctgtcactgcaactctggcattgttagggtgtgatggatcaccttggagataccta

SEQ ID NO: 386872 - DNA, 55 bp, Artificial
  Synthetic oligonucleotide
ctgtcacttttggaaacactggatcaccacaaaagacggtcaatgtggattgccc

SEQ ID NO: 386873 - DNA, 53 bp, Artificial
  Synthetic oligonucleotide
ctgtcagaacaacttcactttccattgtgtaaaaacacgccctttgcattcca

SEQ ID NO: 386874 - DNA, 60 bp, Artificial
  Synthetic oligonucleotide
ctgtcagaagctctcggtgaatggttgctcctcctatatgtattgccgctgccgctatat

SEQ ID NO: 386875 - DNA, 60 bp, Artificial
  Synthetic oligonucleotide
ctgtcagaatcttcctagtgagtgagctcaagagaggtcgtaatactgctggtggcacct

SEQ ID NO: 386876 - DNA, 58 bp, Artificial
  Synthetic oligonucleotide
ctgtcagacactttcctagaccatggggatacttggaggggagtagaagctctaataa

SEQ ID NO: 386877 - DNA, 53 bp, Artificial
  Synthetic oligonucleotide
ctgtcagacgtctccattagcgcttccacggaagatgtgtccggtccagttgt

SEQ ID NO: 386878 - DNA, 55 bp, Artificial
  Synthetic oligonucleotide
ctgtcagagtactattcaacgggaggcccgaggttacctgggtaggcagtataga

SEQ ID NO: 386879 - DNA, 55 bp, Artificial
  Synthetic oligonucleotide
ctgtcagatggctcgttggtaatgacaacaactgacactagattgtgtgcactcc

SEQ ID NO: 386880 - DNA, 60 bp, Artificial
  Synthetic oligonucleotide
ctgtcagatggtatccaccgtagatttcattccaccaatggcttctctcgaggagaaggg

SEQ ID NO: 386881 - DNA, 55 bp, Artificial
  Synthetic oligonucleotide
ctgtcagcttttgtgacgctaatcgagctagcgatggcacagtcgtcgggcgttg

SEQ ID NO: 386882 - DNA, 55 bp, Artificial
  Synthetic oligonucleotide
ctgtcaggagcaacatgggtggatgtggtactggagcatggaagctgcgtcacca

SEQ ID NO: 386883 - DNA, 60 bp, Artificial
  Synthetic oligonucleotide
ctgtcaggagcgctctcaagatatttgggcgctgctacacaagcgaactcctttactcca

SEQ ID NO: 386884 - DNA, 55 bp, Artificial
  Synthetic oligonucleotide
ctgtcaggccttggtctcaacgccgtggcttactacagaggcttggatgtctcgg

SEQ ID NO: 386885 - DNA, 53 bp, Artificial
  Synthetic oligonucleotide
ctgtcagggagaagcctcgacacgttcgagaagattaggctacgtccgaacgg

SEQ ID NO: 386886 - DNA, 55 bp, Artificial
  Synthetic oligonucleotide
ctgtcagtctagccacgtccgtttagatcaaaagtcacgtatactgcgacgttgt

SEQ ID NO: 386887 - DNA, 52 bp, Artificial
  Synthetic oligonucleotide
ctgtcagtgacacttgtgattgtaggaattgtaacactctacttaggagtga

SEQ ID NO: 386888 - DNA, 55 bp, Artificial
  Synthetic oligonucleotide
ctgtcagtgcaggtccggactttgagttcagaatgcccatcagcccatcgcgcca

SEQ ID NO: 386889 - DNA, 58 bp, Artificial
  Synthetic oligonucleotide
ctgtcatacttccagcatcgttgtgtaaaattacacctacaggattatatcctcgttt

SEQ ID NO: 386890 - DNA, 55 bp, Artificial
  Synthetic oligonucleotide
ctgtcatatgccttcatcctgcccaactcaacaacatagagcgccttctttccgt

SEQ ID NO: 386891 - DNA, 60 bp, Artificial
  Synthetic oligonucleotide
ctgtcatcaagaggttctggaagttgaatcatcatgtcacttataatcatcaggagcaag

SEQ ID NO: 386892 - DNA, 55 bp, Artificial
  Synthetic oligonucleotide
ctgtcatccactaacggtcagagtaattatttataagtgctaaagctggaaaccc

SEQ ID NO: 386893 - DNA, 55 bp, Artificial
  Synthetic oligonucleotide
ctgtcatccgccgcatcaacactgcgggcatgcaaagacctagggaactatgccc

SEQ ID NO: 386894 - DNA, 55 bp, Artificial
  Synthetic oligonucleotide
ctgtcatgagtgcgcacgtaatctactctaggtagtcaggtttatagtacgaagt

SEQ ID NO: 386895 - DNA, 60 bp, Artificial
  Synthetic oligonucleotide
ctgtcatgccgaactgtcaagatcagcagcagcaagtgaatatgtgtggaaggaagacac

SEQ ID NO: 386896 - DNA, 55 bp, Artificial
  Synthetic oligonucleotide
ctgtcatgctcaatggatcttaccgtgatatccgaattctagatggcaatggcgc

SEQ ID NO: 386897 - DNA, 55 bp, Artificial
  Synthetic oligonucleotide
ctgtcatggtgccaagggttctaccagcttgaaaatcactcataaagggtgatag

SEQ ID NO: 386898 - DNA, 56 bp, Artificial
  Synthetic oligonucleotide
ctgtcatgtgttctccgatttcttggcctatgttaactttcgccatgccagatgtt

SEQ ID NO: 386899 - DNA, 55 bp, Artificial
  Synthetic oligonucleotide
ctgtcattcttttgtcgtggatctccactaccaccgacccagttgcgttaatcgg

SEQ ID NO: 386900 - DNA, 51 bp, Artificial
  Synthetic oligonucleotide
ctgtcatttacctccccagatccttccgtgacacatcgccgttgcctgagc

SEQ ID NO: 386901 - DNA, 58 bp, Artificial
  Synthetic oligonucleotide
ctgtcatttgtgtggagaaaaacgttgaagacttcctccgctggaaccattgtgagta

SEQ ID NO: 386902 - DNA, 55 bp, Artificial
  Synthetic oligonucleotide
ctgtccaagaaactctcaagaactcagacctcaccatcgccactgtcgcagctgg

SEQ ID NO: 386903 - DNA, 60 bp, Artificial
  Synthetic oligonucleotide
ctgtccaagatagttgaaccggctttggccactctgccctatgccgccacagctctcaaa

SEQ ID NO: 386904 - DNA, 57 bp, Artificial
  Synthetic oligonucleotide
ctgtccaagcttttaacagcgggtctattaaagctctcattaccattaacatggatg

SEQ ID NO: 386905 - DNA, 58 bp, Artificial
  Synthetic oligonucleotide
ctgtccaattgattccgccggataacatgacacttggagcagaatcaaggctgtacgt

SEQ ID NO: 386906 - DNA, 60 bp, Artificial
  Synthetic oligonucleotide
ctgtccacagtgttgtggagtgaacatgaggaattgcggtcgtgggaagagtggaccaac

SEQ ID NO: 386907 - DNA, 55 bp, Artificial
  Synthetic oligonucleotide
ctgtccacgcgttcatatgcaaaacacgtgttctggtacgctccatttgggtgct

SEQ ID NO: 386908 - DNA, 55 bp, Artificial
  Synthetic oligonucleotide
ctgtccactcaatggctcaagttgatccaggtttaactgttcatttagcccctct

SEQ ID NO: 386909 - DNA, 55 bp, Artificial
  Synthetic oligonucleotide
ctgtccactcattgaagattagataacgcgtcggtgtatatatactctcgagcct

SEQ ID NO: 386910 - DNA, 55 bp, Artificial
  Synthetic oligonucleotide
ctgtccactcggcatttccaatggagcctcgggagtgacagttctaaagtcccgc

SEQ ID NO: 386911 - DNA, 57 bp, Artificial
  Synthetic oligonucleotide
ctgtccagatacgaccttgtggtggttaatatgggacaaccgtacaggttccatcac

SEQ ID NO: 386912 - DNA, 55 bp, Artificial
  Synthetic oligonucleotide
ctgtccagatcataaaattgctcccatttgctgctgcgcctccggaacaaagcag

SEQ ID NO: 386913 - DNA, 60 bp, Artificial
  Synthetic oligonucleotide
ctgtccagatgtcatgaccgatagtatcttttccaccgttgaaatatacaccctgtaatg

SEQ ID NO: 386914 - DNA, 55 bp, Artificial
  Synthetic oligonucleotide
ctgtccaggggtaaaggcagcaaccaacttgggagcatttaggcagcctcatggg

SEQ ID NO: 386915 - DNA, 55 bp, Artificial
  Synthetic oligonucleotide
ctgtccatatctagaccgctcgccacagcgtcgaagctagcgcagtctgcgtaga

SEQ ID NO: 386916 - DNA, 55 bp, Artificial
  Synthetic oligonucleotide
ctgtccatgttaccacaaaacacgagggaggaattcgcaaatctatcgatctgca

SEQ ID NO: 386917 - DNA, 55 bp, Artificial
  Synthetic oligonucleotide
ctgtccattgatgacgccgtcgcagggccctactgggctgacgtcaaagaggacg

SEQ ID NO: 386918 - DNA, 55 bp, Artificial
  Synthetic oligonucleotide
ctgtcccaatggactctatgcttagacataataattggagtttggtgatcatacc

SEQ ID NO: 386919 - DNA, 53 bp, Artificial
  Synthetic oligonucleotide
ctgtcccagactaagcaggcaggggacaacttcccttacctggtagcatacca

SEQ ID NO: 386920 - DNA, 55 bp, Artificial
  Synthetic oligonucleotide
ctgtcccagcaagaacacgctcctcacggacttgctggtgccctccgcttgtgtg

SEQ ID NO: 386921 - DNA, 60 bp, Artificial
  Synthetic oligonucleotide
ctgtcccagttgatgatagattcggtttccgagacagtcctttctgcatgtctctaccta

SEQ ID NO: 386922 - DNA, 51 bp, Artificial
  Synthetic oligonucleotide
ctgtccccgctcagatcactgccggatccacagtgcagtggattgagccgg

SEQ ID NO: 386923 - DNA, 57 bp, Artificial
  Synthetic oligonucleotide
ctgtcccgactgaggtcgtccgtcctcctgagcgagcctccgtcccggaccctcagc

SEQ ID NO: 386924 - DNA, 51 bp, Artificial
  Synthetic oligonucleotide
ctgtcccggcgttaaagggaggtaaccgcaagcatactaccgcctaccccg

SEQ ID NO: 386925 - DNA, 57 bp, Artificial
  Synthetic oligonucleotide
ctgtcccgtcagacctggatgctgacgccccagccctagaaccggccctagacgacg

SEQ ID NO: 386926 - DNA, 60 bp, Artificial
  Synthetic oligonucleotide
ctgtccctcactctgtgtgggtttttgcctgtgcaccagaccggtgtccaccaacagcac

SEQ ID NO: 386927 - DNA, 55 bp, Artificial
  Synthetic oligonucleotide
ctgtccctcgctaatgctcaactcgtatgttctgacattgattcactcaaccttc

SEQ ID NO: 386928 - DNA, 59 bp, Artificial
  Synthetic oligonucleotide
ctgtccctgaaggcggaatctctctatctccagatgacaccgagttgtcggttctgatt

SEQ ID NO: 386929 - DNA, 56 bp, Artificial
  Synthetic oligonucleotide
ctgtccctgatgggatgaactgggtttacaaaattagacgcactttaatatttcaa

SEQ ID NO: 386930 - DNA, 55 bp, Artificial
  Synthetic oligonucleotide
ctgtccctgccggataaacagcaggttcccgtctttaacggaagcaatcgcccca

SEQ ID NO: 386931 - DNA, 57 bp, Artificial
  Synthetic oligonucleotide
ctgtccctgtgaattgggtccctaccggaagaaccacgtggtccatccatgcaggaa

SEQ ID NO: 386932 - DNA, 55 bp, Artificial
  Synthetic oligonucleotide
ctgtccctgtttactcatacaggctagagtgagactaggcatagtcccaaactgg

SEQ ID NO: 386933 - DNA, 57 bp, Artificial
  Synthetic oligonucleotide
ctgtccgaaatacaattggattaattaccctctaacaccaggaaggtgccttgatga

SEQ ID NO: 386934 - DNA, 55 bp, Artificial
  Synthetic oligonucleotide
ctgtccgactgtcaccctcaatcactatactcaccggtctccaaggccgcgcagc

SEQ ID NO: 386935 - DNA, 55 bp, Artificial
  Synthetic oligonucleotide
ctgtccgagatgggcaaaatacgcttagatttaggtgatttaggtggctggataa

SEQ ID NO: 386936 - DNA, 54 bp, Artificial
  Synthetic oligonucleotide
ctgtccgaggcgtatgacgtacctccgcggtattagttataaggttacagtcgg

SEQ ID NO: 386937 - DNA, 55 bp, Artificial
  Synthetic oligonucleotide
ctgtccgatgagatgaaggcgttaccaacgaaaggttgtcatatcctgcatttgg

SEQ ID NO: 386938 - DNA, 55 bp, Artificial
  Synthetic oligonucleotide
ctgtccgcaacctgaacccggcagctttaaagagatgggatacctgcgacgcagg

SEQ ID NO: 386939 - DNA, 55 bp, Artificial
  Synthetic oligonucleotide
ctgtccgcagtaggccacaacgtttgtgccgtggatacggactccgccgtagttc

SEQ ID NO: 386940 - DNA, 56 bp, Artificial
  Synthetic oligonucleotide
ctgtccggatgggaggagcagttacacaccccaaatacgccggacaaggtggtgga

SEQ ID NO: 386941 - DNA, 55 bp, Artificial
  Synthetic oligonucleotide
ctgtccgtgcattaattacttcgcgtccgatgcatccaagctcctcggctaagct

SEQ ID NO: 386942 - DNA, 60 bp, Artificial
  Synthetic oligonucleotide
ctgtccgtgcattgatcacctcacgcccaatgcatccgagctcttcagctaagctcctga

SEQ ID NO: 386943 - DNA, 57 bp, Artificial
  Synthetic oligonucleotide
ctgtccgtgtcagtcgtattgggcaacgggcttccttgcaaacacgtagtggggctc

SEQ ID NO: 386944 - DNA, 57 bp, Artificial
  Synthetic oligonucleotide
ctgtccgttaccgccatctctgctatgtttgcggacggagcctcaccggtactggtt

SEQ ID NO: 386945 - DNA, 60 bp, Artificial
  Synthetic oligonucleotide
ctgtccgttagatacgacaatgaatggaattggctgctcaccggctagcacacaaacgta

SEQ ID NO: 386946 - DNA, 57 bp, Artificial
  Synthetic oligonucleotide
ctgtccgttatgcggtaatgatgaagcgacggtacacaggcaaaaagaccgcaaaaa

SEQ ID NO: 386947 - DNA, 60 bp, Artificial
  Synthetic oligonucleotide
ctgtcctactgcaagaccctgagccccgacgcgtactacagcgagcgtgtgttcaagttc

SEQ ID NO: 386948 - DNA, 55 bp, Artificial
  Synthetic oligonucleotide
ctgtcctataatctgtggaaaagccctgatgttcagtgataggcggacttcagtg

SEQ ID NO: 386949 - DNA, 58 bp, Artificial
  Synthetic oligonucleotide
ctgtcctctgcgtacaagatctcggaccattctgagacaaaagcccgggtccaggcta

SEQ ID NO: 386950 - DNA, 60 bp, Artificial
  Synthetic oligonucleotide
ctgtcctctgttcatccagcccaaccatactcgacaactacactcaatgtataaaaggct

SEQ ID NO: 386951 - DNA, 60 bp, Artificial
  Synthetic oligonucleotide
ctgtcctgtgatccacagggatgcaggatgtttgctctaagtcaaggcacaacactcaga

SEQ ID NO: 386952 - DNA, 60 bp, Artificial
  Synthetic oligonucleotide
ctgtccttgagtatttggtgtcttttggagtgtggattcgcactcctcctgcttacagac

SEQ ID NO: 386953 - DNA, 55 bp, Artificial
  Synthetic oligonucleotide
ctgtcgaaagaaatcgacaactggcagattacgctgacagggcaagagaggcggg

SEQ ID NO: 386954 - DNA, 54 bp, Artificial
  Synthetic oligonucleotide
ctgtcgaacgaaagctggttaagtacgcgaaaggtaaaccattagaggcggatc

SEQ ID NO: 386955 - DNA, 56 bp, Artificial
  Synthetic oligonucleotide
ctgtcgaagaagatagacgttactaaatacttcacagatgatatgaggtcaactac

SEQ ID NO: 386956 - DNA, 55 bp, Artificial
  Synthetic oligonucleotide
ctgtcgaagaagttggtatgataatcagtgatgcctgggaccaattccacatgcc

SEQ ID NO: 386957 - DNA, 58 bp, Artificial
  Synthetic oligonucleotide
ctgtcgacatcgagttggtccgtgtgcacccactaagtagtctggtcgggagaccagg

SEQ ID NO: 386958 - DNA, 58 bp, Artificial
  Synthetic oligonucleotide
ctgtcgacgtcgccgctacttgcgatacggtcggcacaatcggtaacgggtggcagcc

SEQ ID NO: 386959 - DNA, 58 bp, Artificial
  Synthetic oligonucleotide
ctgtcgacttgtggtatctgtgttgacccaatacccaatgtttccacgtttacatcga

SEQ ID NO: 386960 - DNA, 60 bp, Artificial
  Synthetic oligonucleotide
ctgtcgagaggagatccgcaatggacgacgataaaggtactgacacaactgatgctaaag

SEQ ID NO: 386961 - DNA, 55 bp, Artificial
  Synthetic oligonucleotide
ctgtcgaggacgtcggacctatctctgtgaagttcaagtctggcggaggacgtgg

SEQ ID NO: 386962 - DNA, 60 bp, Artificial
  Synthetic oligonucleotide
ctgtcgagtgattcaggaccgttgttatcagtgttcgcgttacaagaaatcatgcagaaa

SEQ ID NO: 386963 - DNA, 55 bp, Artificial
  Synthetic oligonucleotide
ctgtcgataaggatacgacaatgtttgacgtgaaagggtctacatcgctgtctaa

SEQ ID NO: 386964 - DNA, 51 bp, Artificial
  Synthetic oligonucleotide
ctgtcgatcccgctcctctgcgaccgctcaattggaattcaaggtatgatt

SEQ ID NO: 386965 - DNA, 55 bp, Artificial
  Synthetic oligonucleotide
ctgtcgatcctctaaccgctgccgagccaaaccatagcgaagcagaggatgtgga

SEQ ID NO: 386966 - DNA, 52 bp, Artificial
  Synthetic oligonucleotide
ctgtcgcaaccagtgggtatgcagcgaactactataatgcaaacagacatcg

SEQ ID NO: 386967 - DNA, 59 bp, Artificial
  Synthetic oligonucleotide
ctgtcgcagacggggatattccactggactttagtgcgttgaacgacatattaaatgaa

SEQ ID NO: 386968 - DNA, 55 bp, Artificial
  Synthetic oligonucleotide
ctgtcgcataggcctgggaatcccatgaatacaaaacaaaagcctcaggaggcct

SEQ ID NO: 386969 - DNA, 60 bp, Artificial
  Synthetic oligonucleotide
ctgtcgcatgttgcaccttggattccataatttggaatctagttgatctagtttaaataa

SEQ ID NO: 386970 - DNA, 55 bp, Artificial
  Synthetic oligonucleotide
ctgtcgccacagaaccaatttggtgcaggcattcgggtctcgctcaagggtcagg

SEQ ID NO: 386971 - DNA, 60 bp, Artificial
  Synthetic oligonucleotide
ctgtcgccgacgttttggaggcgcaacctgtgacgaccaatctgctaaaattcatgcgca

SEQ ID NO: 386972 - DNA, 60 bp, Artificial
  Synthetic oligonucleotide
ctgtcgcctcatctcttgtgcttgcaatagggcttgctgccttcatgttctgggccatgt

SEQ ID NO: 386973 - DNA, 60 bp, Artificial
  Synthetic oligonucleotide
ctgtcgctgcaattgtctgccaagcacttatgccatgttgtaggatcacgtgcacagtat

SEQ ID NO: 386974 - DNA, 60 bp, Artificial
  Synthetic oligonucleotide
ctgtcgcttgatttgagcttgacacgtaacgcgcttggcacctaaccgccgcgcttacca

SEQ ID NO: 386975 - DNA, 60 bp, Artificial
  Synthetic oligonucleotide
ctgtcggagacaccacacgtggaacaaacatgacaatcactgtatccaccaacgatgtcc

SEQ ID NO: 386976 - DNA, 52 bp, Artificial
  Synthetic oligonucleotide
ctgtcggagtgacctacggttacgcttcggctgaccgtttcctccccgggcc

SEQ ID NO: 386977 - DNA, 55 bp, Artificial
  Synthetic oligonucleotide
ctgtcggcccatccagacttggagatgctccctgtccctaggaaaccaacaatgg

SEQ ID NO: 386978 - DNA, 60 bp, Artificial
  Synthetic oligonucleotide
ctgtcggtaaatcactagggccacaagatgcagcaaaatatctcaaatccaactcagact

SEQ ID NO: 386979 - DNA, 57 bp, Artificial
  Synthetic oligonucleotide
ctgtcgtacctgcattgaaggaccgttactacattagacacgttacgaagcgtgtgg

SEQ ID NO: 386980 - DNA, 53 bp, Artificial
  Synthetic oligonucleotide
ctgtcgtcaaatttaggtccatttttggtgcccgtgaaatgtccgtatgagaa

SEQ ID NO: 386981 - DNA, 60 bp, Artificial
  Synthetic oligonucleotide
ctgtcgtcaagccgacgtacatccgagtcgctcgagagctccacggtccaatcataaacg

SEQ ID NO: 386982 - DNA, 60 bp, Artificial
  Synthetic oligonucleotide
ctgtcgtccaatcattttgcgcctgactagcctagatattagcaacaacttcgcgactaa

SEQ ID NO: 386983 - DNA, 50 bp, Artificial
  Synthetic oligonucleotide
ctgtcgtgcagccgccaaaactcccccgtgtcgtgtacgtacggtgcgta

SEQ ID NO: 386984 - DNA, 59 bp, Artificial
  Synthetic oligonucleotide
ctgtcgtggacctaactgcaactcttgacatgggatctcctcaccaaattgagtagtgt

SEQ ID NO: 386985 - DNA, 55 bp, Artificial
  Synthetic oligonucleotide
ctgtcgtgtatctgtgtaatcttttctaacctgtgaagcttcggagtccgggccg

SEQ ID NO: 386986 - DNA, 55 bp, Artificial
  Synthetic oligonucleotide
ctgtcgttacggtcacgtttgactcttccgacatacaggtaccctctggagctcg

SEQ ID NO: 386987 - DNA, 60 bp, Artificial
  Synthetic oligonucleotide
ctgtcgttcctgttagcaatgccaacggcgtcgctgagtggctttctaataactcgcgca

SEQ ID NO: 386988 - DNA, 58 bp, Artificial
  Synthetic oligonucleotide
ctgtcgttgatagtttagaatctgataatcgtagattaccattaagtgcttaccaagg

SEQ ID NO: 386989 - DNA, 54 bp, Artificial
  Synthetic oligonucleotide
ctgtcgttgtcggaaccaattatacactgaaaggtccagcgaagggtatgcttt

SEQ ID NO: 386990 - DNA, 56 bp, Artificial
  Synthetic oligonucleotide
ctgtctaaatagtgaacgaagtcttctaattgtattaatgtttacagggttgtctc

SEQ ID NO: 386991 - DNA, 60 bp, Artificial
  Synthetic oligonucleotide
ctgtctaaccatttaacttagatttctcctctgtatgatgtcttaacatcttgcggagtc

SEQ ID NO: 386992 - DNA, 60 bp, Artificial
  Synthetic oligonucleotide
ctgtctaagtgtgcaagactataataacatgatagaaagtatgtccaaattggataacac

SEQ ID NO: 386993 - DNA, 60 bp, Artificial
  Synthetic oligonucleotide
ctgtctacagaggtggatgttgattgaagctgagatgaaatgctttggcaacactgctgt

SEQ ID NO: 386994 - DNA, 55 bp, Artificial
  Synthetic oligonucleotide
ctgtctacagcaaactgtacatgcgcacagaggacggctggcagcttgcgaaggc

SEQ ID NO: 386995 - DNA, 51 bp, Artificial
  Synthetic oligonucleotide
ctgtctaccccgcatgcaggcgcgacccacccaccgacacaccccggtgga

SEQ ID NO: 386996 - DNA, 55 bp, Artificial
  Synthetic oligonucleotide
ctgtctacctcagaatgactttcgggcacctttacgaggtatttcatgccaaccc

SEQ ID NO: 386997 - DNA, 59 bp, Artificial
  Synthetic oligonucleotide
ctgtctagagagcctgccccttacagttttacccccaatgagacatgccacctacatag

SEQ ID NO: 386998 - DNA, 60 bp, Artificial
  Synthetic oligonucleotide
ctgtctagagtgactgctgctttagctggatacacctgccaggccacagaatatgttgaa

SEQ ID NO: 386999 - DNA, 58 bp, Artificial
  Synthetic oligonucleotide
ctgtctatatgttacttctactacattgtcgtctgtgacgatgtaggggcccggaacc

SEQ ID NO: 387000 - DNA, 55 bp, Artificial
  Synthetic oligonucleotide
ctgtctatccctgactcgtggatgactatggacttcgaccgtctgatacgagaca

SEQ ID NO: 387001 - DNA, 55 bp, Artificial
  Synthetic oligonucleotide
ctgtctcaaatctctgtaaggtgcttagagatgttcatggggtagatccagagtc

SEQ ID NO: 387002 - DNA, 55 bp, Artificial
  Synthetic oligonucleotide
ctgtctcacaacagtagtttagctttgtctgtcgaatatgtggatttgtgtgtcg

SEQ ID NO: 387003 - DNA, 60 bp, Artificial
  Synthetic oligonucleotide
ctgtctccaacagatgccccgtctgcaaataccccctgccaaccaagctcaggcttgaga

SEQ ID NO: 387004 - DNA, 58 bp, Artificial
  Synthetic oligonucleotide
ctgtctccccggactgagtatcaataggctgcttacgtggctgaaagagaaaacgttc

SEQ ID NO: 387005 - DNA, 53 bp, Artificial
  Synthetic oligonucleotide
ctgtctcccgtacccaacgtcggggtaggactggcagggggaaaccaggcatc

SEQ ID NO: 387006 - DNA, 58 bp, Artificial
  Synthetic oligonucleotide
ctgtctcgttaatgtccactccaactgagctccttgtggcccaagattcaccgggcct

SEQ ID NO: 387007 - DNA, 55 bp, Artificial
  Synthetic oligonucleotide
ctgtctcgtttcagttgacccccgaccagcaagctttgttacggcacaactttcc

SEQ ID NO: 387008 - DNA, 58 bp, Artificial
  Synthetic oligonucleotide
ctgtctctacccaaaccagtcaaacaagtgtagtaccaaacattggcagtagaccatg

SEQ ID NO: 387009 - DNA, 55 bp, Artificial
  Synthetic oligonucleotide
ctgtctctactacgaaattctttggacgaccaatataaatagtcggccacggcca

SEQ ID NO: 387010 - DNA, 60 bp, Artificial
  Synthetic oligonucleotide
ctgtctctcacctatctctgatcggaggtatccaacacggtcagacacgagagacactac

SEQ ID NO: 387011 - DNA, 55 bp, Artificial
  Synthetic oligonucleotide
ctgtctctgcttgtagcagaaatctcttctcagagatatacaggaaaccctgtga

SEQ ID NO: 387012 - DNA, 60 bp, Artificial
  Synthetic oligonucleotide
ctgtctcttgaccacgccctcgcggcctttgtcctgctggtcccgtggatcctgatattc

SEQ ID NO: 387013 - DNA, 55 bp, Artificial
  Synthetic oligonucleotide
ctgtctgaaggaggcgcgaccgcttacgttaaccgtggtggttacgtctatgacc

SEQ ID NO: 387014 - DNA, 59 bp, Artificial
  Synthetic oligonucleotide
ctgtctgactgtgtttctgtatttgtctgaaaatatgggccagactgttaccactccct

SEQ ID NO: 387015 - DNA, 55 bp, Artificial
  Synthetic oligonucleotide
ctgtctgagttcaaggccccaacaaagaaccacctcgtactcggtaacacaggcg

SEQ ID NO: 387016 - DNA, 51 bp, Artificial
  Synthetic oligonucleotide
ctgtctgcaatcggagtattggtggccaatatataggtgtactccaaatgg

SEQ ID NO: 387017 - DNA, 60 bp, Artificial
  Synthetic oligonucleotide
ctgtctgcatcagccatatagcccccgctgttcgatttacaaacacaggcacagtactga

SEQ ID NO: 387018 - DNA, 55 bp, Artificial
  Synthetic oligonucleotide
ctgtctggctaaagtctacgctaccaagccggcgtgtcccttctgtcgaagcttc

SEQ ID NO: 387019 - DNA, 56 bp, Artificial
  Synthetic oligonucleotide
ctgtctggctctcagccaagattactcagagagcaacaacagcactgcaacactgt

SEQ ID NO: 387020 - DNA, 55 bp, Artificial
  Synthetic oligonucleotide
ctgtctggtaccagcttacagctttctgccgggagtctactcagtcttttacttg

SEQ ID NO: 387021 - DNA, 55 bp, Artificial
  Synthetic oligonucleotide
ctgtctggtgctgcgttcactggggcggtcaccgttcctacgccttccactggtg

SEQ ID NO: 387022 - DNA, 56 bp, Artificial
  Synthetic oligonucleotide
ctgtctgtccagacggtttagatcgttctcgacttaaaggattccaaaagcgtcca

SEQ ID NO: 387023 - DNA, 59 bp, Artificial
  Synthetic oligonucleotide
ctgtctgttgaccgcctctcgccgatcttccgtccacctggaaagtgccccattcgcag

SEQ ID NO: 387024 - DNA, 55 bp, Artificial
  Synthetic oligonucleotide
ctgtcttactaacatgcgaaacctcgacggaaagcctataagtgagggcagcagt

SEQ ID NO: 387025 - DNA, 55 bp, Artificial
  Synthetic oligonucleotide
ctgtcttactcccaaaatacattgggctagatccaatctcacctggagacctgac

SEQ ID NO: 387026 - DNA, 60 bp, Artificial
  Synthetic oligonucleotide
ctgtcttcccagtttgcgtcaacgtcttcaggccttgcacagctatctacacaatgtaat

SEQ ID NO: 387027 - DNA, 55 bp, Artificial
  Synthetic oligonucleotide
ctgtcttcccctggaggcatgattgaattatttacctatttgcttgagaagcctg

SEQ ID NO: 387028 - DNA, 60 bp, Artificial
  Synthetic oligonucleotide
ctgtcttccgtccgaattatccatatcgccgatacttcggcagacggattggtcagcgtg

SEQ ID NO: 387029 - DNA, 55 bp, Artificial
  Synthetic oligonucleotide
ctgtcttcgacttcttgatcactcgtgatattgaagagaggttcctggatcgttg

SEQ ID NO: 387030 - DNA, 53 bp, Artificial
  Synthetic oligonucleotide
ctgtcttcgtcttcgccgttcggtgttggaccttgattggcacttgagaacaa

SEQ ID NO: 387031 - DNA, 58 bp, Artificial
  Synthetic oligonucleotide
ctgtcttgaggtttacttgccctcacgcggaacgtgcctcttacagcaccttaatatg

SEQ ID NO: 387032 - DNA, 55 bp, Artificial
  Synthetic oligonucleotide
ctgtcttgtcttgactgtggaggaggttttcattgagtttacaagggatagtgat

SEQ ID NO: 387033 - DNA, 60 bp, Artificial
  Synthetic oligonucleotide
ctgtcttgtttctgttgaacacacacccatgtttcaagcatgagtctatttcaataagca

SEQ ID NO: 387034 - DNA, 54 bp, Artificial
  Synthetic oligonucleotide
ctgtctttacttgatcatgaacttgatgattgtcaggaagagaagttacaggta

SEQ ID NO: 387035 - DNA, 55 bp, Artificial
  Synthetic oligonucleotide
ctgtgaaaaaaagacactgccgttaacatggacagggttcatcccattacctggg

SEQ ID NO: 387036 - DNA, 55 bp, Artificial
  Synthetic oligonucleotide
ctgtgaaaattggtagtggaatctctgctaaggatggaatcgcaacagacggtga

SEQ ID NO: 387037 - DNA, 57 bp, Artificial
  Synthetic oligonucleotide
ctgtgaaagcgcggggacccaggaggacgcggcaagcctacgagtcttcacggaggc

SEQ ID NO: 387038 - DNA, 56 bp, Artificial
  Synthetic oligonucleotide
ctgtgaacactctcgaaggtgagacgggggtagacgtagcgaacgcccgtaagatc

SEQ ID NO: 387039 - DNA, 52 bp, Artificial
  Synthetic oligonucleotide
ctgtgaacgggtgaacaacgagtcccggtgttggaccccggtcacgcctaac

SEQ ID NO: 387040 - DNA, 53 bp, Artificial
  Synthetic oligonucleotide
ctgtgaagaacgatctaagggatcgttaccaggtcatgcacaagttctacgcc

SEQ ID NO: 387041 - DNA, 55 bp, Artificial
  Synthetic oligonucleotide
ctgtgaagaacgatcttagagatcgttttcaagttatccgtcgttttacgtcaac

SEQ ID NO: 387042 - DNA, 60 bp, Artificial
  Synthetic oligonucleotide
ctgtgaagaacgatcttcgtgatcgttatcaggtcgtgcgtaagtttcatgccaccgtga

SEQ ID NO: 387043 - DNA, 55 bp, Artificial
  Synthetic oligonucleotide
ctgtgaagacagacatagaaagatagagcaatatgcctatctggaatggggctta

SEQ ID NO: 387044 - DNA, 60 bp, Artificial
  Synthetic oligonucleotide
ctgtgaagcttatgacacggggtgcgcatggtatgagctaactcctgcagagacaacggt

SEQ ID NO: 387045 - DNA, 55 bp, Artificial
  Synthetic oligonucleotide
ctgtgaaggaaacgggattaccagtattagcaaaattctgcgagacgttagttga

SEQ ID NO: 387046 - DNA, 60 bp, Artificial
  Synthetic oligonucleotide
ctgtgaaggcccatgtaaggtccagtcctatgagcagcgtcatgatatttcacatgttgg

SEQ ID NO: 387047 - DNA, 55 bp, Artificial
  Synthetic oligonucleotide
ctgtgaaggtaacaaatggatcataccagcggaatgtaaggttgagagggatctt

SEQ ID NO: 387048 - DNA, 60 bp, Artificial
  Synthetic oligonucleotide
ctgtgaaggttctgaaaatatcaatgatggcctcgagtttttatccgatgatcctatgaa

SEQ ID NO: 387049 - DNA, 60 bp, Artificial
  Synthetic oligonucleotide
ctgtgaagtagacagtatcccagttaagtgcaggcagggttattgcctaaaaatcactca

SEQ ID NO: 387050 - DNA, 55 bp, Artificial
  Synthetic oligonucleotide
ctgtgaagtggctcccacttgtggaataggattggccgccacttacgtggaggga

SEQ ID NO: 387051 - DNA, 60 bp, Artificial
  Synthetic oligonucleotide
ctgtgaatccccagagctctcctgaggttgtgattgaactggatctgcatttctatgtag

SEQ ID NO: 387052 - DNA, 56 bp, Artificial
  Synthetic oligonucleotide
ctgtgaatggtcagagaggcagaattgattatttctggtccgttttaaaaccaggg

SEQ ID NO: 387053 - DNA, 55 bp, Artificial
  Synthetic oligonucleotide
ctgtgaatgtccctagttccctccttaaagattgagtccagcggaagctggggat

SEQ ID NO: 387054 - DNA, 55 bp, Artificial
  Synthetic oligonucleotide
ctgtgaattagcgttcgtacctcattcgctggcatatattactcttcacagtagt

SEQ ID NO: 387055 - DNA, 60 bp, Artificial
  Synthetic oligonucleotide
ctgtgaattgtgccaagctgtgattacctcagtgttacatgtttcagacatgttttgagc

SEQ ID NO: 387056 - DNA, 59 bp, Artificial
  Synthetic oligonucleotide
ctgtgacaacaaccctacagttcacacaaatgaaccaacctagtctaggacatggtgaa

SEQ ID NO: 387057 - DNA, 58 bp, Artificial
  Synthetic oligonucleotide
ctgtgacaagaagactatccctcttacatggacaggttatcttcccattgcaggcgag

SEQ ID NO: 387058 - DNA, 56 bp, Artificial
  Synthetic oligonucleotide
ctgtgacaagttgagtggtactttaaccacgagtcgtcgttgagacgcctgttccc

SEQ ID NO: 387059 - DNA, 58 bp, Artificial
  Synthetic oligonucleotide
ctgtgacaatgttatttcatatggctacagtacagatgtgagtattaagggtaacaag

SEQ ID NO: 387060 - DNA, 60 bp, Artificial
  Synthetic oligonucleotide
ctgtgacacattaatgatgtgggaagctgtgtcttgtaagactgaaatagtaggaattgg

SEQ ID NO: 387061 - DNA, 55 bp, Artificial
  Synthetic oligonucleotide
ctgtgacagttgcatcaaacattatgcaatccaataatgcacaatgagggttggc

SEQ ID NO: 387062 - DNA, 55 bp, Artificial
  Synthetic oligonucleotide
ctgtgaccacccttaattatatcttgacccttaacgcagctaaacatgggttcgc

SEQ ID NO: 387063 - DNA, 58 bp, Artificial
  Synthetic oligonucleotide
ctgtgacccgaagccactgttccggagattcacccgtgtgtggtggtacactgacaag

SEQ ID NO: 387064 - DNA, 60 bp, Artificial
  Synthetic oligonucleotide
ctgtgaccgggtctgcagtagggtgcaatcctgatgtgttctggagcaaactaccgatcc

SEQ ID NO: 387065 - DNA, 59 bp, Artificial
  Synthetic oligonucleotide
ctgtgacgcatagttgttttgtcatgtctcgtaaaaaggaatactaatcgaggcgttca

SEQ ID NO: 387066 - DNA, 60 bp, Artificial
  Synthetic oligonucleotide
ctgtgacggagtagttaccgtcactacgtcccgatacgcctaccatgacgatgagtagca

SEQ ID NO: 387067 - DNA, 60 bp, Artificial
  Synthetic oligonucleotide
ctgtgacgtcacattactcgttatctatgcaaccgcatgtgacttgcaatatccgttcgg

SEQ ID NO: 387068 - DNA, 55 bp, Artificial
  Synthetic oligonucleotide
ctgtgactatgcggctggttgataatgagatcaacctgcaaccttgtaggttaac

SEQ ID NO: 387069 - DNA, 60 bp, Artificial
  Synthetic oligonucleotide
ctgtgactattatacccaattctcagataactcaggatacagtcagacaacatggagagt

SEQ ID NO: 387070 - DNA, 60 bp, Artificial
  Synthetic oligonucleotide
ctgtgactgagatgtctaaacgattacattatatcgttttccagcaaagatcacggaaac

SEQ ID NO: 387071 - DNA, 55 bp, Artificial
  Synthetic oligonucleotide
ctgtgactgtgaaagatagtacagagactgagtggcttccagtattggactttag

SEQ ID NO: 387072 - DNA, 51 bp, Artificial
  Synthetic oligonucleotide
ctgtgactttccaggacgctcacatcgatccctcgatacttactgttacgc

SEQ ID NO: 387073 - DNA, 60 bp, Artificial
  Synthetic oligonucleotide
ctgtgagacaactcctacaaatgcaatagatgctgaaatgcatgatcttaactgcagtta

SEQ ID NO: 387074 - DNA, 59 bp, Artificial
  Synthetic oligonucleotide
ctgtgagacatgggctaaagaggactaataacaagctaggccaaattcctgtaaatcac

SEQ ID NO: 387075 - DNA, 60 bp, Artificial
  Synthetic oligonucleotide
ctgtgagatcggccggtgtcatcaggcgttcgttcatactacgatccttaaatccgctgc

SEQ ID NO: 387076 - DNA, 53 bp, Artificial
  Synthetic oligonucleotide
ctgtgagccccgtccaaggacgttaaaagaagaagtcaggcccaaaagccacg

SEQ ID NO: 387077 - DNA, 57 bp, Artificial
  Synthetic oligonucleotide
ctgtgagccgcaatgtattaaccagttctacctctcctttaaggtaaggagtggcaa

SEQ ID NO: 387078 - DNA, 54 bp, Artificial
  Synthetic oligonucleotide
ctgtgaggaaaccaggtaaaagatcctagtgttctactggttgcaacaaagggt

SEQ ID NO: 387079 - DNA, 55 bp, Artificial
  Synthetic oligonucleotide
ctgtgaggacgttgccggaatgtgttgtttcaatctgagtgatcacagtgagtct

SEQ ID NO: 387080 - DNA, 51 bp, Artificial
  Synthetic oligonucleotide
ctgtgagggaaagaatgagacaaacccctatagcagcagacggggtgggag

SEQ ID NO: 387081 - DNA, 55 bp, Artificial
  Synthetic oligonucleotide
ctgtgagggacgagcttacttgccgcatcggttagggccgacccctccgatgttg

SEQ ID NO: 387082 - DNA, 55 bp, Artificial
  Synthetic oligonucleotide
ctgtgagggatgtcctacgccacagcactacaagcagtgttgcccaatgttatgt

SEQ ID NO: 387083 - DNA, 52 bp, Artificial
  Synthetic oligonucleotide
ctgtgaggggcggttgtacattgacttgcttcccgtggttcaacgggacttt

SEQ ID NO: 387084 - DNA, 55 bp, Artificial
  Synthetic oligonucleotide
ctgtgagtatgtctcgctacatcaatcgtgctgacgaggccctcgcctcacacga

SEQ ID NO: 387085 - DNA, 60 bp, Artificial
  Synthetic oligonucleotide
ctgtgagtctaagagtttcctgatatcatcagacccttgacagctgagcaccattccctg

SEQ ID NO: 387086 - DNA, 55 bp, Artificial
  Synthetic oligonucleotide
ctgtgagtgaaccttcattttccatatcacgaactagattaagtggtatctatgg

SEQ ID NO: 387087 - DNA, 53 bp, Artificial
  Synthetic oligonucleotide
ctgtgagtgcttgcacgacatcattgagtggggtctgtgactgtttagccatg

SEQ ID NO: 387088 - DNA, 55 bp, Artificial
  Synthetic oligonucleotide
ctgtgagtgtaaactccaaaatcggagctataattgtagcagccttagttttgag

SEQ ID NO: 387089 - DNA, 55 bp, Artificial
  Synthetic oligonucleotide
ctgtgagtgtggtttcacacgcatggtatccaatagaggaatcttcttactaccc

SEQ ID NO: 387090 - DNA, 57 bp, Artificial
  Synthetic oligonucleotide
ctgtgataatggaagattgtgtacagcccactgatcgtggaaaattccattttgttg

SEQ ID NO: 387091 - DNA, 52 bp, Artificial
  Synthetic oligonucleotide
ctgtgatatcgagtttgactcgaggttcatcgttatcgtattctacctcgag

SEQ ID NO: 387092 - DNA, 55 bp, Artificial
  Synthetic oligonucleotide
ctgtgatcaaatgatgctttcaactgatcgctttacgcgttcatctcctgcttgg

SEQ ID NO: 387093 - DNA, 60 bp, Artificial
  Synthetic oligonucleotide
ctgtgatcatttggaaattggagaagatgctgtgtactcaaggaatccatcagatccttt

SEQ ID NO: 387094 - DNA, 54 bp, Artificial
  Synthetic oligonucleotide
ctgtgatccgacctgtggttgtgttgataacccaagcctgtcccataaccgcct

SEQ ID NO: 387095 - DNA, 60 bp, Artificial
  Synthetic oligonucleotide
ctgtgatctcataaatcctatgtcccgtttgtccgaagagcatgttaggccgatctggga

SEQ ID NO: 387096 - DNA, 55 bp, Artificial
  Synthetic oligonucleotide
ctgtgatctggacccctacctcccgccagtatcgtgacctccgtcgctttctggg

SEQ ID NO: 387097 - DNA, 52 bp, Artificial
  Synthetic oligonucleotide
ctgtgatgactgatggcccgagcaatgggcaggcttcatacaggattttcag

SEQ ID NO: 387098 - DNA, 60 bp, Artificial
  Synthetic oligonucleotide
ctgtgatggatattactggagtacagtcaactttgagattccgtgttccttggatttcag

SEQ ID NO: 387099 - DNA, 60 bp, Artificial
  Synthetic oligonucleotide
ctgtgatgtattccaagatgaaacctgggacctttatgtggaacgcagtagcgccttcag

SEQ ID NO: 387100 - DNA, 58 bp, Artificial
  Synthetic oligonucleotide
ctgtgatgtcatacctacaaaacaagttcagagagcaaaagtggccagaacttttacg

SEQ ID NO: 387101 - DNA, 55 bp, Artificial
  Synthetic oligonucleotide
ctgtgatgtcgcttttacaacaaatgagttggtcgttgggtattcgaacgagaag

SEQ ID NO: 387102 - DNA, 55 bp, Artificial
  Synthetic oligonucleotide
ctgtgatgtctttcagtatgagaattgggacctcttcatagaaagaagcagcgct

SEQ ID NO: 387103 - DNA, 57 bp, Artificial
  Synthetic oligonucleotide
ctgtgattaagattgcgctgaccaggaggccccttggcatcaagaggctgacacgga

SEQ ID NO: 387104 - DNA, 59 bp, Artificial
  Synthetic oligonucleotide
ctgtgattacaatgtagtactaatgaaatatgacgcgaatctacaactagatatgtccg

SEQ ID NO: 387105 - DNA, 55 bp, Artificial
  Synthetic oligonucleotide
ctgtgattcgtgctctccggagattggcatgggatcacatttgcataagatgccg

SEQ ID NO: 387106 - DNA, 51 bp, Artificial
  Synthetic oligonucleotide
ctgtgcaacataggcacggcatttgctagtgatggcatcataaagtacaag

SEQ ID NO: 387107 - DNA, 60 bp, Artificial
  Synthetic oligonucleotide
ctgtgcaactcggatgtgacggttctacctctgtcagtctttgaaaaactggtgtgctct

SEQ ID NO: 387108 - DNA, 59 bp, Artificial
  Synthetic oligonucleotide
ctgtgcaagaatgtaattgctccatctatacaggccacgtcaccggccataggatggct

SEQ ID NO: 387109 - DNA, 55 bp, Artificial
  Synthetic oligonucleotide
ctgtgcaagtgaataaccagaaagtaatcagttttcattggcagatagacattgc

SEQ ID NO: 387110 - DNA, 55 bp, Artificial
  Synthetic oligonucleotide
ctgtgcaatagcagggctggtagtggcgctaatcatagcaatagttgtgtggact

SEQ ID NO: 387111 - DNA, 55 bp, Artificial
  Synthetic oligonucleotide
ctgtgcaattataataaacggatatagagaaagacacggtggtcaatggccgcca

SEQ ID NO: 387112 - DNA, 54 bp, Artificial
  Synthetic oligonucleotide
ctgtgcacaggatcatgccctgtcaatgtacctcataatacaggctggctcaca

SEQ ID NO: 387113 - DNA, 60 bp, Artificial
  Synthetic oligonucleotide
ctgtgcacagtgtttgtgcagagcagctaaagtgcgggaactacggcactggaactactc

SEQ ID NO: 387114 - DNA, 53 bp, Artificial
  Synthetic oligonucleotide
ctgtgcacgccccaccggtccctagcttgcaacccccagttgatgagcgaaac

SEQ ID NO: 387115 - DNA, 60 bp, Artificial
  Synthetic oligonucleotide
ctgtgcactaccattgcactaggtgcaacttcgctttcgactcactccgaatggtacgac

SEQ ID NO: 387116 - DNA, 53 bp, Artificial
  Synthetic oligonucleotide
ctgtgcagagaaagaaggataccctacttgaatgtaagaagttaaccctttat

SEQ ID NO: 387117 - DNA, 55 bp, Artificial
  Synthetic oligonucleotide
ctgtgcagctattttggaggttaacaacatcccatacaagaagtctagctttgcg

SEQ ID NO: 387118 - DNA, 60 bp, Artificial
  Synthetic oligonucleotide
ctgtgcaggcgactcacgtcgcagtcgtgctttatcagagtggagtaattaatggacccg

SEQ ID NO: 387119 - DNA, 55 bp, Artificial
  Synthetic oligonucleotide
ctgtgcaggctccttagaggaaccaaagcactaacagacatagtaccactaacca

SEQ ID NO: 387120 - DNA, 60 bp, Artificial
  Synthetic oligonucleotide
ctgtgcagtactccaattacttatccaccaagagtgataggcgacagcagattcttatct

SEQ ID NO: 387121 - DNA, 55 bp, Artificial
  Synthetic oligonucleotide
ctgtgcatgaatagtaggtcacattccggcgattcaatattaggcgtttcactca

SEQ ID NO: 387122 - DNA, 53 bp, Artificial
  Synthetic oligonucleotide
ctgtgccaaaactatgatcctcttctagtagggcaacatgtgttaaagtggat

SEQ ID NO: 387123 - DNA, 55 bp, Artificial
  Synthetic oligonucleotide
ctgtgccacgaattaaagctatcacgtccaaaatgagaatgcccaagagtaaagg

SEQ ID NO: 387124 - DNA, 55 bp, Artificial
  Synthetic oligonucleotide
ctgtgccacgctacccggttggctcggtactctgccggtggggttaggcctcctg

SEQ ID NO: 387125 - DNA, 55 bp, Artificial
  Synthetic oligonucleotide
ctgtgccatctcatcagcctcttgcaaatcggtggtatcttctcccctgcgtccc

SEQ ID NO: 387126 - DNA, 54 bp, Artificial
  Synthetic oligonucleotide
ctgtgccccccaaacccccaaacgtcaacagaccagtcaacactggaggtctta

SEQ ID NO: 387127 - DNA, 60 bp, Artificial
  Synthetic oligonucleotide
ctgtgcccgatatctctttatgtagatttatcggactgcgcgttgagtcatctgtgttga

SEQ ID NO: 387128 - DNA, 60 bp, Artificial
  Synthetic oligonucleotide
ctgtgcccgccatactgagcgtctcatgcagtacactacctacaagactagcagacctga

SEQ ID NO: 387129 - DNA, 60 bp, Artificial
  Synthetic oligonucleotide
ctgtgcccgcgtcagcctaccaagtacgcaactcctcgggcctctaccatgtcaccaatg

SEQ ID NO: 387130 - DNA, 55 bp, Artificial
  Synthetic oligonucleotide
ctgtgcccttctcaatggctccgccgttgaaatgaagagactgcaacaagatgtg

SEQ ID NO: 387131 - DNA, 60 bp, Artificial
  Synthetic oligonucleotide
ctgtgccgacttgacgcagaggtctacaaacaactcctcttaacctcatattgccagaac

SEQ ID NO: 387132 - DNA, 55 bp, Artificial
  Synthetic oligonucleotide
ctgtgcctaagagtatgttcagaacaggaaacatactataggtggcaaggagggg

SEQ ID NO: 387133 - DNA, 60 bp, Artificial
  Synthetic oligonucleotide
ctgtgccttctcatctgccggaccgtgtgcacttcgcttcacctctgcacgtcgcatgga

SEQ ID NO: 387134 - DNA, 55 bp, Artificial
  Synthetic oligonucleotide
ctgtgccttggaatagtacttggggtgctaatacctcctatgatgaaatctggaa

SEQ ID NO: 387135 - DNA, 54 bp, Artificial
  Synthetic oligonucleotide
ctgtgcgaccccctgttggaggtgaattggaggttaccgttggtactgaccctg

SEQ ID NO: 387136 - DNA, 55 bp, Artificial
  Synthetic oligonucleotide
ctgtgcgagaatccatggttgtggcagttgatagttaggtaataggagcatccgc

SEQ ID NO: 387137 - DNA, 55 bp, Artificial
  Synthetic oligonucleotide
ctgtgcgagggcagtcgctctcgtccatgagcgccatgatgattttggcctccag

SEQ ID NO: 387138 - DNA, 55 bp, Artificial
  Synthetic oligonucleotide
ctgtgcgcacaagagctgcagagaagatacgttttggtgtccacgatccatggtg

SEQ ID NO: 387139 - DNA, 60 bp, Artificial
  Synthetic oligonucleotide
ctgtgcgcatcacttgggagacattcacagcagacaccactagcggatacatttccatgg

SEQ ID NO: 387140 - DNA, 60 bp, Artificial
  Synthetic oligonucleotide
ctgtgcggagtgtgtttgtgacaggattggcaggtggaaagatgatacgtgtgctcatgt

SEQ ID NO: 387141 - DNA, 55 bp, Artificial
  Synthetic oligonucleotide
ctgtgcggatattttgggtgcaaaacgagtgctgtgccaaggagactcacaacag

SEQ ID NO: 387142 - DNA, 58 bp, Artificial
  Synthetic oligonucleotide
ctgtgcgggataggacttcaagtttcagcaattaaaggagcatggggttctggagttg

SEQ ID NO: 387143 - DNA, 57 bp, Artificial
  Synthetic oligonucleotide
ctgtgcgggatgaaacctctactgccctaggaatgccaggcaggtaccccaccttcg

SEQ ID NO: 387144 - DNA, 55 bp, Artificial
  Synthetic oligonucleotide
ctgtgcgtatactggtgatgtgcttggttcaactgaacccagtcgtggatcgtct

SEQ ID NO: 387145 - DNA, 51 bp, Artificial
  Synthetic oligonucleotide
ctgtgcgtgaatcaaagtatgccacagccatgcacgttggagctattgaag

SEQ ID NO: 387146 - DNA, 60 bp, Artificial
  Synthetic oligonucleotide
ctgtgcgtgaatccatgatctctgcagtcgatgtgtacgtaaatggtgcacccgcactcg

SEQ ID NO: 387147 - DNA, 60 bp, Artificial
  Synthetic oligonucleotide
ctgtgcgtgaatccatgtgatgcgcaggcaagtccaaaatagtaagagcaaccgcaggga

SEQ ID NO: 387148 - DNA, 60 bp, Artificial
  Synthetic oligonucleotide
ctgtgcgtgaatccgtgatcatggcagttgatcgatatataatacgaacaaccacacggc

SEQ ID NO: 387149 - DNA, 60 bp, Artificial
  Synthetic oligonucleotide
ctgtgctaactaccctttcatctgctagggattcatgtgacctatcatgagaaattgata

SEQ ID NO: 387150 - DNA, 55 bp, Artificial
  Synthetic oligonucleotide
ctgtgctacgaccggaatttgctatacatggggtaaatccaatgcctggcccgct

SEQ ID NO: 387151 - DNA, 57 bp, Artificial
  Synthetic oligonucleotide
ctgtgctactcgcgctccgttggttatcgtcggacaggagagactaacgacgttgga

SEQ ID NO: 387152 - DNA, 51 bp, Artificial
  Synthetic oligonucleotide
ctgtgctagtcgatcagcgagggtcatacgggaaatagtagcacgttatac

SEQ ID NO: 387153 - DNA, 54 bp, Artificial
  Synthetic oligonucleotide
ctgtgctgacccgtcactgcttatagcatcgtctccggctttagttgacaaacg

SEQ ID NO: 387154 - DNA, 55 bp, Artificial
  Synthetic oligonucleotide
ctgtgctgcactttgattggtacctgagtacaatggcctctcgagggtgacgaat

SEQ ID NO: 387155 - DNA, 60 bp, Artificial
  Synthetic oligonucleotide
ctgtgctggggtgagttaatgactctggcatcctgggtgggcagtaatttggaagatcca

SEQ ID NO: 387156 - DNA, 60 bp, Artificial
  Synthetic oligonucleotide
ctgtgctgtgcttggtatgtgaaaggtcgccttgtacctgtgtgtacctacatagcactg

SEQ ID NO: 387157 - DNA, 55 bp, Artificial
  Synthetic oligonucleotide
ctgtgctgttgttgaattctgcaatctagataattgcaagttcgcgatagtcggc

SEQ ID NO: 387158 - DNA, 60 bp, Artificial
  Synthetic oligonucleotide
ctgtgcttaatcatattcgcacataccagtcgaaagcgcttacttacgccaatgtattat

SEQ ID NO: 387159 - DNA, 58 bp, Artificial
  Synthetic oligonucleotide
ctgtgcttatacatggatcccctggtactggaaaatcgcttgcaacctctgtccttgc

SEQ ID NO: 387160 - DNA, 60 bp, Artificial
  Synthetic oligonucleotide
ctgtgcttatgaacctgactctggaaagttgagagtcgctatgggcgtgcacagtgtgta

SEQ ID NO: 387161 - DNA, 55 bp, Artificial
  Synthetic oligonucleotide
ctgtgcttattttgcatgagtaagctctgttgtcgggtattgaaggaaagtcatg

SEQ ID NO: 387162 - DNA, 55 bp, Artificial
  Synthetic oligonucleotide
ctgtgcttgagagtgcgcggtaaataaacattagacacgggttttgagcagcact

SEQ ID NO: 387163 - DNA, 60 bp, Artificial
  Synthetic oligonucleotide
ctgtgcttgggacatcatgcagtaccaaatggaacaatagtgaaaacaataacggatgat

SEQ ID NO: 387164 - DNA, 55 bp, Artificial
  Synthetic oligonucleotide
ctgtgcttggggcaccacgcagtaccaaatgggacaatagtgaagacgatcacgg

SEQ ID NO: 387165 - DNA, 60 bp, Artificial
  Synthetic oligonucleotide
ctgtgcttgtggcctacctattgttgtgcgtcagcttgacaatatgtctcttccaaggat

SEQ ID NO: 387166 - DNA, 53 bp, Artificial
  Synthetic oligonucleotide
ctgtgctttggccgggctttctacctgcctcgtggctgatgctatggcgcgag

SEQ ID NO: 387167 - DNA, 55 bp, Artificial
  Synthetic oligonucleotide
ctgtggaaaacactagagactgtcgaggcataagattctctggtggtatgtcttc

SEQ ID NO: 387168 - DNA, 55 bp, Artificial
  Synthetic oligonucleotide
ctgtggaaatcatcactaagaaatccacaaaattggactatgtcacaaggagtca

SEQ ID NO: 387169 - DNA, 53 bp, Artificial
  Synthetic oligonucleotide
ctgtggaaccaatcggagaaggtccaccagtcctggcacaagtggaagttcgc

SEQ ID NO: 387170 - DNA, 55 bp, Artificial
  Synthetic oligonucleotide
ctgtggaaccagcgcaacaagcgtattgtgtagtcacagtgtgtccgaagtgtag

SEQ ID NO: 387171 - DNA, 58 bp, Artificial
  Synthetic oligonucleotide
ctgtggaacgagggagttgaagacagtgatctgataattccgccaaccttgggagggc

SEQ ID NO: 387172 - DNA, 56 bp, Artificial
  Synthetic oligonucleotide
ctgtggaacttctgggacgcaggggttgggaagccctcaaatacttgtggaatctc

SEQ ID NO: 387173 - DNA, 59 bp, Artificial
  Synthetic oligonucleotide
ctgtggaagaattgtgtgcaaatcacaaggagcacacgcgcccaaccgactgttccggt

SEQ ID NO: 387174 - DNA, 60 bp, Artificial
  Synthetic oligonucleotide
ctgtggaagggaactgaaggactatctcagtcagatcatgcgatagctggtattcatctc

SEQ ID NO: 387175 - DNA, 58 bp, Artificial
  Synthetic oligonucleotide
ctgtggacaaagacacgactatgatagacgttgagggttctactttgttgtctaataa

SEQ ID NO: 387176 - DNA, 58 bp, Artificial
  Synthetic oligonucleotide
ctgtggacacagagcgaatggagctccgctgcggtgagggactagttgtttggaggga

SEQ ID NO: 387177 - DNA, 60 bp, Artificial
  Synthetic oligonucleotide
ctgtggacaccgccacattaaacgcgatgataacatcgcagataacatgaacgccattgc

SEQ ID NO: 387178 - DNA, 60 bp, Artificial
  Synthetic oligonucleotide
ctgtggacacggtatgagtgccaataactatgccataaggtctgacgacacggagagtat

SEQ ID NO: 387179 - DNA, 60 bp, Artificial
  Synthetic oligonucleotide
ctgtggacacttgttatccatttgatgtgccagactaccagagcctacggagtatcctag

SEQ ID NO: 387180 - DNA, 60 bp, Artificial
  Synthetic oligonucleotide
ctgtggaccatatgtctatgttccagggatccacatcaggaagacaagagaagaaccctg

SEQ ID NO: 387181 - DNA, 58 bp, Artificial
  Synthetic oligonucleotide
ctgtggacctggtggcctgaccttaccccagatttatgtatgttagcccaccatggac

SEQ ID NO: 387182 - DNA, 59 bp, Artificial
  Synthetic oligonucleotide
ctgtggacctggtggcctgacttaacccctgatctatcaagtttcaattgtgactactc

SEQ ID NO: 387183 - DNA, 60 bp, Artificial
  Synthetic oligonucleotide
ctgtggactacaaacattcaagactttcatgattctttttgttcgtgcacaacagcttat

SEQ ID NO: 387184 - DNA, 60 bp, Artificial
  Synthetic oligonucleotide
ctgtggactctatcctgcacagatcaaagccagacaaatgattagccctgtcatgaatgt

SEQ ID NO: 387185 - DNA, 60 bp, Artificial
  Synthetic oligonucleotide
ctgtggacttcaaatagcatagtagccctttgcggatccagggagcgattgggatcatgg

SEQ ID NO: 387186 - DNA, 60 bp, Artificial
  Synthetic oligonucleotide
ctgtggagacaacccaactgaaaagttgcctatgataggcttcggatttgatgctattat

SEQ ID NO: 387187 - DNA, 55 bp, Artificial
  Synthetic oligonucleotide
ctgtggaggagaaatgttcttctgcaatatcacaagaatagcagatgcatggaac

SEQ ID NO: 387188 - DNA, 55 bp, Artificial
  Synthetic oligonucleotide
ctgtggaggtgtagggtcctttggagtcatatcaatgactgtgttgtcccaggat

SEQ ID NO: 387189 - DNA, 58 bp, Artificial
  Synthetic oligonucleotide
ctgtggagtcgttgtcgaagtccgttggtgttgtcgatgggtccattcttatggactg

SEQ ID NO: 387190 - DNA, 59 bp, Artificial
  Synthetic oligonucleotide
ctgtggagttactctcatttttgccttctgatttctttccgtctgtacgagatcttcta

SEQ ID NO: 387191 - DNA, 60 bp, Artificial
  Synthetic oligonucleotide
ctgtggatagttgccacatacttctgcagtctctcttgaaccaagatgaggtctgagcta

SEQ ID NO: 387192 - DNA, 55 bp, Artificial
  Synthetic oligonucleotide
ctgtggatagttttaacttgcccttgaatttggcgaaatgggtcctttggtgcac

SEQ ID NO: 387193 - DNA, 60 bp, Artificial
  Synthetic oligonucleotide
ctgtggatatgtgaggaaataatttttggcattcactgaaatcgtataactgattggcat

SEQ ID NO: 387194 - DNA, 60 bp, Artificial
  Synthetic oligonucleotide
ctgtggatcgtccgatgcccgtgcggtctattcggacggccattcgttctgctttgcgtg

SEQ ID NO: 387195 - DNA, 60 bp, Artificial
  Synthetic oligonucleotide
ctgtggatgtctactcgaaacaagttgactcagactggggactcagcgattcaacaaacg

SEQ ID NO: 387196 - DNA, 57 bp, Artificial
  Synthetic oligonucleotide
ctgtggatgttgacgatggtcattttgtcaacatagaattggagtaaaaaactacct

SEQ ID NO: 387197 - DNA, 55 bp, Artificial
  Synthetic oligonucleotide
ctgtggattcaatctttgcttgaaggggcgatcgttatttattcccaattaacgt

SEQ ID NO: 387198 - DNA, 60 bp, Artificial
  Synthetic oligonucleotide
ctgtggattctcgatgggtcccatgttctccggctgcttgttgatccgtatgggtcaatg

SEQ ID NO: 387199 - DNA, 55 bp, Artificial
  Synthetic oligonucleotide
ctgtggatttcattcgccatatcatgcttcttaatttgcgttgttctattgggtt

SEQ ID NO: 387200 - DNA, 55 bp, Artificial
  Synthetic oligonucleotide
ctgtggatttgcaacaacacctgtatgtgagtatcaagggaataccatctcaggc

SEQ ID NO: 387201 - DNA, 60 bp, Artificial
  Synthetic oligonucleotide
ctgtggatttggactcaaagccaagtgctatccagccaccagtaagaaacggtggatcac

SEQ ID NO: 387202 - DNA, 54 bp, Artificial
  Synthetic oligonucleotide
ctgtggatttgttttggccacggtcaacaggttttcgaaagttttcagctcacc

SEQ ID NO: 387203 - DNA, 57 bp, Artificial
  Synthetic oligonucleotide
ctgtggcaaatggaacaaaagtgaacacactaacagagaggggggttgaagtagtga

SEQ ID NO: 387204 - DNA, 55 bp, Artificial
  Synthetic oligonucleotide
ctgtggcaacaagcataactaccctgatgagctgaacccattttcagagagcggc

SEQ ID NO: 387205 - DNA, 55 bp, Artificial
  Synthetic oligonucleotide
ctgtggcactgctgtttgaggaggcagggcaagtactcaaactagccctacgggc

SEQ ID NO: 387206 - DNA, 60 bp, Artificial
  Synthetic oligonucleotide
ctgtggccacgaatttgataggaagatcccttgctgagaaactcaacagctcagtgtatt

SEQ ID NO: 387207 - DNA, 54 bp, Artificial
  Synthetic oligonucleotide
ctgtggcgatgaaggggcgatcacacctccattctgttaagttaagagcaagga

SEQ ID NO: 387208 - DNA, 55 bp, Artificial
  Synthetic oligonucleotide
ctgtggcgccccaattctgggccctggtaaggcacctaaactcagcacgaagacc

SEQ ID NO: 387209 - DNA, 55 bp, Artificial
  Synthetic oligonucleotide
ctgtggcgcgcacttttaccgtggtgtcgatgtcaaaccgttttacatcaggaaa

SEQ ID NO: 387210 - DNA, 55 bp, Artificial
  Synthetic oligonucleotide
ctgtggcggctatcttcctcatagtgctgacgattttgtctacactgacgtggct

SEQ ID NO: 387211 - DNA, 55 bp, Artificial
  Synthetic oligonucleotide
ctgtggctcaatgggttggtacggcaattggtttctttgcaaactttggggcagc

SEQ ID NO: 387212 - DNA, 55 bp, Artificial
  Synthetic oligonucleotide
ctgtggctgctagaggaactggcgggtatcctatacggtgagtaagacctcgggg

SEQ ID NO: 387213 - DNA, 56 bp, Artificial
  Synthetic oligonucleotide
ctgtggcttatatgtgaccttttaaacataatacctaaactggcacatttacaacc

SEQ ID NO: 387214 - DNA, 55 bp, Artificial
  Synthetic oligonucleotide
ctgtggcttgtttgccggaggattctcggcgttttgttaagcggtgtttagacca

SEQ ID NO: 387215 - DNA, 55 bp, Artificial
  Synthetic oligonucleotide
ctgtgggaacagacccgttcaaaggctggactgttggtttcagatggagggccaa

SEQ ID NO: 387216 - DNA, 55 bp, Artificial
  Synthetic oligonucleotide
ctgtgggatgatccattgttaccacgtctacactcggcgagctcgcgtttaagag

SEQ ID NO: 387217 - DNA, 59 bp, Artificial
  Synthetic oligonucleotide
ctgtgggcacgacacaactgcattcactaggattacggattcccccctgacgtactcta

SEQ ID NO: 387218 - DNA, 60 bp, Artificial
  Synthetic oligonucleotide
ctgtgggcatgaattcaggtgacatatctactacattatcagattataatattttagatg

SEQ ID NO: 387219 - DNA, 55 bp, Artificial
  Synthetic oligonucleotide
ctgtgggcgaggatggtattgatgacccatttctttagcgtcctcatagccaggg

SEQ ID NO: 387220 - DNA, 52 bp, Artificial
  Synthetic oligonucleotide
ctgtgggctaaagcttaaagtcgactatcgtcctgtcgggctctacgccgga

SEQ ID NO: 387221 - DNA, 56 bp, Artificial
  Synthetic oligonucleotide
ctgtgggctctaccctgcacagattaaggcacggcagatgatcagtccagttatga

SEQ ID NO: 387222 - DNA, 54 bp, Artificial
  Synthetic oligonucleotide
ctgtgggcttttcgaactaagaaagtacactcattttaccgcccgccagggaca

SEQ ID NO: 387223 - DNA, 57 bp, Artificial
  Synthetic oligonucleotide
ctgtggggaattcagaaaaactaggtttggcaaggccttgtttattgatgttgctca

SEQ ID NO: 387224 - DNA, 51 bp, Artificial
  Synthetic oligonucleotide
ctgtgggggattcaccatcctaatgatgcagcagagcagacaaggatctat

SEQ ID NO: 387225 - DNA, 58 bp, Artificial
  Synthetic oligonucleotide
ctgtgggggtcacagtgagggaggttgatccttcggtcgacattagcgctagaggtgg

SEQ ID NO: 387226 - DNA, 60 bp, Artificial
  Synthetic oligonucleotide
ctgtggggttatcagtgcagctgcatgcacaaaccaaacaagggctgtcagttgtcctgc

SEQ ID NO: 387227 - DNA, 59 bp, Artificial
  Synthetic oligonucleotide
ctgtgggtactcgagacgatcttgctgagtggaaaattggatacgactttagtctacga

SEQ ID NO: 387228 - DNA, 55 bp, Artificial
  Synthetic oligonucleotide
ctgtgggtctaccacactcaaggcttcttccctgactggcataactacacaccag

SEQ ID NO: 387229 - DNA, 60 bp, Artificial
  Synthetic oligonucleotide
ctgtgggtgcatggccagttatgaatggaggtgccgtttcgttacattttgctggtgtta

SEQ ID NO: 387230 - DNA, 55 bp, Artificial
  Synthetic oligonucleotide
ctgtgggtggccctattatcaatgttgcaattcaagaaaatggagtgttacggtg

SEQ ID NO: 387231 - DNA, 60 bp, Artificial
  Synthetic oligonucleotide
ctgtgggtgtggcagacgatggtgtgactggcacagtggtcgttcgcaccatctcacacc

SEQ ID NO: 387232 - DNA, 60 bp, Artificial
  Synthetic oligonucleotide
ctgtgggttggtcttggccagacggtgctgagttgccattcactattgacaagtagtttg

SEQ ID NO: 387233 - DNA, 55 bp, Artificial
  Synthetic oligonucleotide
ctgtggtacattggattgttataatcacacaaccagccatctactgctgctacac

SEQ ID NO: 387234 - DNA, 51 bp, Artificial
  Synthetic oligonucleotide
ctgtggtaccattagaggtaatacctgagattgttggcgaccctacgcccc

SEQ ID NO: 387235 - DNA, 55 bp, Artificial
  Synthetic oligonucleotide
ctgtggtaccgaacgacatgttcataagggaatcattagttgcatgtcagctggc

SEQ ID NO: 387236 - DNA, 55 bp, Artificial
  Synthetic oligonucleotide
ctgtggtagataccacacgcagcaccaatatgactatttgtgccacgcaaacaga

SEQ ID NO: 387237 - DNA, 55 bp, Artificial
  Synthetic oligonucleotide
ctgtggtcggatgcagagatcttacgcccctcttccggattttcatgtctcgctc

SEQ ID NO: 387238 - DNA, 58 bp, Artificial
  Synthetic oligonucleotide
ctgtggtgaaaccatcaccctcccggcaactagtgcgagtggtagtattcttgcaaaa

SEQ ID NO: 387239 - DNA, 60 bp, Artificial
  Synthetic oligonucleotide
ctgtggtgcgacatgcagcactgtaccagagatccttctttcgctggagttttgatcact

SEQ ID NO: 387240 - DNA, 53 bp, Artificial
  Synthetic oligonucleotide
ctgtggtggggaccatccttgagcaagatgaccacaagttctatcactactct

SEQ ID NO: 387241 - DNA, 55 bp, Artificial
  Synthetic oligonucleotide
ctgtggtggttcaataaaagggccggctcctcggagcctccccgacagactcgtc

SEQ ID NO: 387242 - DNA, 55 bp, Artificial
  Synthetic oligonucleotide
ctgtggtgtatccaacaataacagccccggtagtaccaaactgcagtgacaccat

SEQ ID NO: 387243 - DNA, 58 bp, Artificial
  Synthetic oligonucleotide
ctgtggtgttacggcgtatcaagacgaaaagctcaggcttcagaaattgattcggaat

SEQ ID NO: 387244 - DNA, 55 bp, Artificial
  Synthetic oligonucleotide
ctgtggttgacgatattctagcaactacagtggtagatcttaacaatgcaacaga

SEQ ID NO: 387245 - DNA, 55 bp, Artificial
  Synthetic oligonucleotide
ctgtgtaaactcctcagaggaaccaaagcattaacagatgtagtaccactgactg

SEQ ID NO: 387246 - DNA, 60 bp, Artificial
  Synthetic oligonucleotide
ctgtgtaacccatcttagccaactcgtgagccacgctaactaagtcatcttctgactcta

SEQ ID NO: 387247 - DNA, 55 bp, Artificial
  Synthetic oligonucleotide
ctgtgtaaccgcaaggcttaaccacaaaccatatccgtgctaaagtgacgcttgc

SEQ ID NO: 387248 - DNA, 60 bp, Artificial
  Synthetic oligonucleotide
ctgtgtacgtaaactatggaaggtgcacacgtgctcgccattcaaagcgcagtcgtcgtt

SEQ ID NO: 387249 - DNA, 55 bp, Artificial
  Synthetic oligonucleotide
ctgtgtacgttctggtcaaaaagactagtatacccctgttggtgaaagtactata

SEQ ID NO: 387250 - DNA, 55 bp, Artificial
  Synthetic oligonucleotide
ctgtgtactgtctcgttgggtaatcagtttcaaactcaaaacgctaggactactg

SEQ ID NO: 387251 - DNA, 60 bp, Artificial
  Synthetic oligonucleotide
ctgtgtactttgggacccctagtgggtctcttgtatctagtgatggtcagctgttcaaca

SEQ ID NO: 387252 - DNA, 57 bp, Artificial
  Synthetic oligonucleotide
ctgtgtagagacgcgacctatctatcaactcggtagcggcagcgggaacacacttac

SEQ ID NO: 387253 - DNA, 58 bp, Artificial
  Synthetic oligonucleotide
ctgtgtagcgtgatttgtgaaagggctcagattttgagtgtcatcgaagactttcgtc

SEQ ID NO: 387254 - DNA, 52 bp, Artificial
  Synthetic oligonucleotide
ctgtgtaggaacacctctcggccgaaccaccgcgttctcctgacggagtacc

SEQ ID NO: 387255 - DNA, 55 bp, Artificial
  Synthetic oligonucleotide
ctgtgtatatgttgacagttttccatcctgaaactagaaatgccgagcttccacg

SEQ ID NO: 387256 - DNA, 50 bp, Artificial
  Synthetic oligonucleotide
ctgtgtatctccccttcgaacaattccctcttgagggtgatcccattcct

SEQ ID NO: 387257 - DNA, 56 bp, Artificial
  Synthetic oligonucleotide
ctgtgtatggcatggtgtacaacccccctaggacaaacttccctgggcggttcaca

SEQ ID NO: 387258 - DNA, 60 bp, Artificial
  Synthetic oligonucleotide
ctgtgtatgggaggactataacagggatctactggtcagcacaactacagctcatgggtg

SEQ ID NO: 387259 - DNA, 60 bp, Artificial
  Synthetic oligonucleotide
ctgtgtattcagatctactcgcattcgtgtcagctgatacagtagaacccattaatgctg

SEQ ID NO: 387260 - DNA, 57 bp, Artificial
  Synthetic oligonucleotide
ctgtgtcaaacgggactttccccagttctcgaccgacaatataatcagacagtgggc

SEQ ID NO: 387261 - DNA, 55 bp, Artificial
  Synthetic oligonucleotide
ctgtgtcactttaaactgtacagaggctaaggttaatgctaatgttactgttgac

SEQ ID NO: 387262 - DNA, 60 bp, Artificial
  Synthetic oligonucleotide
ctgtgtcatttaatgtggcataacggtagagatgtgtatactcaatttgaaaggaggata

SEQ ID NO: 387263 - DNA, 55 bp, Artificial
  Synthetic oligonucleotide
ctgtgtccacactgcgcctccagacattatggcaaataatccaggtagattgggg

SEQ ID NO: 387264 - DNA, 60 bp, Artificial
  Synthetic oligonucleotide
ctgtgtcctaacgcggatgcgggagagtcatttacttccatgtcacacgatttatacgat

SEQ ID NO: 387265 - DNA, 55 bp, Artificial
  Synthetic oligonucleotide
ctgtgtccttgaaataggagacatgctcctacggactgcaataggccaagtatca

SEQ ID NO: 387266 - DNA, 58 bp, Artificial
  Synthetic oligonucleotide
ctgtgtcgtgccactagttggtccggcgctagattcagcctgcgtcccacaattgtgg

SEQ ID NO: 387267 - DNA, 55 bp, Artificial
  Synthetic oligonucleotide
ctgtgtcgttttgtttgaagtccgtactcaaagcactatttaaacggtagactga

SEQ ID NO: 387268 - DNA, 55 bp, Artificial
  Synthetic oligonucleotide
ctgtgtctatggaacagacaatttggaggcattggacttgaacaccagtgcagga

SEQ ID NO: 387269 - DNA, 58 bp, Artificial
  Synthetic oligonucleotide
ctgtgtctcactaattggttaacgatttcgcggcgatttatcgtctcgaatctacaac

SEQ ID NO: 387270 - DNA, 55 bp, Artificial
  Synthetic oligonucleotide
ctgtgtctcgaatcgggcgtgagcaatttatgatgatgttcccgatacgggaagt

SEQ ID NO: 387271 - DNA, 50 bp, Artificial
  Synthetic oligonucleotide
ctgtgtctcgccccattcgccgcacatatccatacacgcgtgccacgccg

SEQ ID NO: 387272 - DNA, 58 bp, Artificial
  Synthetic oligonucleotide
ctgtgtctcgtttttgtgtctaagtccgtcggtctaactgtccttttgagtgcgcgca

SEQ ID NO: 387273 - DNA, 55 bp, Artificial
  Synthetic oligonucleotide
ctgtgtgaacttcttgacttagtatcgttgagaggaatcgagagattagtgcagt

SEQ ID NO: 387274 - DNA, 58 bp, Artificial
  Synthetic oligonucleotide
ctgtgtgacgggatggggcacaacgctaaacagtgtaggagacgggatagcaaccagg

SEQ ID NO: 387275 - DNA, 55 bp, Artificial
  Synthetic oligonucleotide
ctgtgtgatgaggcttttaccgtacattcggacaaggaagaaacgttctccatcc

SEQ ID NO: 387276 - DNA, 55 bp, Artificial
  Synthetic oligonucleotide
ctgtgtgatttatacatggtgtgagctgataggacttaaatgaattacctcctag

SEQ ID NO: 387277 - DNA, 55 bp, Artificial
  Synthetic oligonucleotide
ctgtgtgccttccgcttacgtgcgtccagctgtgctgccttgtcctccgtttgcc

SEQ ID NO: 387278 - DNA, 55 bp, Artificial
  Synthetic oligonucleotide
ctgtgtggggcgtgctagtggatagtcatgtatgtttgagatgggttgtaggccc

SEQ ID NO: 387279 - DNA, 54 bp, Artificial
  Synthetic oligonucleotide
ctgtgtggtttgttttacgaagaagggcttaggaatttcctatggcaggaagaa

SEQ ID NO: 387280 - DNA, 58 bp, Artificial
  Synthetic oligonucleotide
ctgtgtgtcatgtggcctgattgttttgaagtacccatacaaccgtacgtgtacgtaa

SEQ ID NO: 387281 - DNA, 59 bp, Artificial
  Synthetic oligonucleotide
ctgtgtgttcctgggttccatgggtgggccacagctgcattacttgttacattttgctt

SEQ ID NO: 387282 - DNA, 55 bp, Artificial
  Synthetic oligonucleotide
ctgtgtgttgaaatatcagctgacactctaattctgcgaccagaatctaaggaaa

SEQ ID NO: 387283 - DNA, 55 bp, Artificial
  Synthetic oligonucleotide
ctgtgttaactcaatctggcatgctttccgccctaacgtccggcgtgggtacggc

SEQ ID NO: 387284 - DNA, 58 bp, Artificial
  Synthetic oligonucleotide
ctgtgttaccggtcaattggtagagggattgtgttttatacctactcatacaatagca

SEQ ID NO: 387285 - DNA, 54 bp, Artificial
  Synthetic oligonucleotide
ctgtgttactttaaactgtacgaatgtaaccaataatggtaccagtgagggaac

SEQ ID NO: 387286 - DNA, 52 bp, Artificial
  Synthetic oligonucleotide
ctgtgttatgctcgtcaaggatagggttgatggacaacgccactgctggaat

SEQ ID NO: 387287 - DNA, 55 bp, Artificial
  Synthetic oligonucleotide
ctgtgttcctgctattggcgagcactgggccaaaggtaaatcttgtaagcctacc

SEQ ID NO: 387288 - DNA, 59 bp, Artificial
  Synthetic oligonucleotide
ctgtgttcggattctccgagtactgcagtaaagtaacaggagacacaaacatagaacac

SEQ ID NO: 387289 - DNA, 54 bp, Artificial
  Synthetic oligonucleotide
ctgtgttctaaatacccttaagaaacgaccagtctgaggccgtaaggtcgtcca

SEQ ID NO: 387290 - DNA, 52 bp, Artificial
  Synthetic oligonucleotide
ctgtgttctagaattgtaactgaagaacaccaaactcaagtcaatatcacca

SEQ ID NO: 387291 - DNA, 58 bp, Artificial
  Synthetic oligonucleotide
ctgtgttctcgtatagtcaccgaagagcacggatcccgtgttgatatttcaactaggg

SEQ ID NO: 387292 - DNA, 60 bp, Artificial
  Synthetic oligonucleotide
ctgtgttctgcccatgaagtataagttcagattcacatggggcggcaatatggtctccca

SEQ ID NO: 387293 - DNA, 60 bp, Artificial
  Synthetic oligonucleotide
ctgtgttggagcgttttggtatcagcgaagctgcatgttgagtgggttcttattaattgc

SEQ ID NO: 387294 - DNA, 60 bp, Artificial
  Synthetic oligonucleotide
ctgtgttgtcgctgttacagatggtcctgcggctaatagtgcagaccaccgaatttactg

SEQ ID NO: 387295 - DNA, 60 bp, Artificial
  Synthetic oligonucleotide
ctgtgtttactctcaaacctatgatgccgctagatggctaccagaacggttagtaagaca

SEQ ID NO: 387296 - DNA, 60 bp, Artificial
  Synthetic oligonucleotide
ctgtgtttactgtgaatggtatgcttaacgatgatttctgctgtgctggtaatacattga

SEQ ID NO: 387297 - DNA, 59 bp, Artificial
  Synthetic oligonucleotide
ctgtgtttgagataacaccgttctacacaagtcaagtggtgagatacgatggctcgatg

SEQ ID NO: 387298 - DNA, 55 bp, Artificial
  Synthetic oligonucleotide
ctgtgtttggctaagattcaactatgttcccaatatacagaacgaaaagggcggt

SEQ ID NO: 387299 - DNA, 60 bp, Artificial
  Synthetic oligonucleotide
ctgtgtttggctccacgttcgatccactggcgagtgttagtaacaccactgctgcttcgt

SEQ ID NO: 387300 - DNA, 54 bp, Artificial
  Synthetic oligonucleotide
ctgtgtttttgatccgcgtgacattttgatgggtaagactgctaaggataatgt

SEQ ID NO: 387301 - DNA, 60 bp, Artificial
  Synthetic oligonucleotide
ctgttaaatcatgtgatgaggattgctgtccggtcaattttaagaaatgctgtccactag

SEQ ID NO: 387302 - DNA, 53 bp, Artificial
  Synthetic oligonucleotide
ctgttaaccccaatttcatccccaatggttaacttaactcaagttattgatcc

SEQ ID NO: 387303 - DNA, 52 bp, Artificial
  Synthetic oligonucleotide
ctgttaacgaattccggtcggctgctacctgggtttagtccatccgctgtca

SEQ ID NO: 387304 - DNA, 50 bp, Artificial
  Synthetic oligonucleotide
ctgttaagctccggggcgctctctgctcacgtaacggccgtggctaagct

SEQ ID NO: 387305 - DNA, 60 bp, Artificial
  Synthetic oligonucleotide
ctgttaaggaggaagccgtaagcagcataatcgttgtgatatggcatactcgaatattaa

SEQ ID NO: 387306 - DNA, 56 bp, Artificial
  Synthetic oligonucleotide
ctgttaaggaggcaataacctgtcctttcatcgattggtgtacatccttttgttac

SEQ ID NO: 387307 - DNA, 56 bp, Artificial
  Synthetic oligonucleotide
ctgttaatcagtacaatagtgccgtgagtgctggttttgactcagtttccgcgcgt

SEQ ID NO: 387308 - DNA, 55 bp, Artificial
  Synthetic oligonucleotide
ctgttaatgagttaggtcccgcgctacttaggaagaatgtccacgtggcctacgc

SEQ ID NO: 387309 - DNA, 58 bp, Artificial
  Synthetic oligonucleotide
ctgttacaacacaaggtgtcaccacaaatatgctgtcacagtgtacagtgaaacaagc

SEQ ID NO: 387310 - DNA, 60 bp, Artificial
  Synthetic oligonucleotide
ctgttacacatgctcaagacatattggaaaagacacacaacgggaagctctgcagtctaa

SEQ ID NO: 387311 - DNA, 56 bp, Artificial
  Synthetic oligonucleotide
ctgttacagacattgggggcacccctatatagattatcggaagggtctgtcgaaac

SEQ ID NO: 387312 - DNA, 50 bp, Artificial
  Synthetic oligonucleotide
ctgttacatcagtcgttgacgcgtttgtttcttttggtgctgaggactac

SEQ ID NO: 387313 - DNA, 59 bp, Artificial
  Synthetic oligonucleotide
ctgttacatcttgaacaggaatacgagcgcggtactgtcggggctgagtatatacggga

SEQ ID NO: 387314 - DNA, 60 bp, Artificial
  Synthetic oligonucleotide
ctgttacatttaatgtgttttcaagtacattatacaatacatgatcaactgctctaatta

SEQ ID NO: 387315 - DNA, 59 bp, Artificial
  Synthetic oligonucleotide
ctgttacccccgacaccctgacgttagatgtgtctgcagagacaactggaaaggctcta

SEQ ID NO: 387316 - DNA, 56 bp, Artificial
  Synthetic oligonucleotide
ctgttaccccggactgagtatcaataagctgctaaagcggctgaaggagaaaacgt

SEQ ID NO: 387317 - DNA, 55 bp, Artificial
  Synthetic oligonucleotide
ctgttacccgcggtgaatctgtatggctcagaagcgtattctggagccgctcttt

SEQ ID NO: 387318 - DNA, 60 bp, Artificial
  Synthetic oligonucleotide
ctgttacccttgtaataccatggatcagcaacactcactacagagcgcatgcccgagatg

SEQ ID NO: 387319 - DNA, 55 bp, Artificial
  Synthetic oligonucleotide
ctgttaccttgttttgacttgcccgacgaaatagattcagctgatatgttctctg

SEQ ID NO: 387320 - DNA, 55 bp, Artificial
  Synthetic oligonucleotide
ctgttacgatttcgatgatttcaacagccaacattcaaaggaagccatgcaagca

SEQ ID NO: 387321 - DNA, 55 bp, Artificial
  Synthetic oligonucleotide
ctgttacgcggcgctggataggttcagtaggctgaaggacgaggtttctaccgcg

SEQ ID NO: 387322 - DNA, 60 bp, Artificial
  Synthetic oligonucleotide
ctgttacttgtgcagttgtatttcccttcgaattgtataagcacatggagatgaggctgc

SEQ ID NO: 387323 - DNA, 59 bp, Artificial
  Synthetic oligonucleotide
ctgttacttttgatagtaactcccaaaatgcagtgcggtatacctgttggtctcatgtg

SEQ ID NO: 387324 - DNA, 57 bp, Artificial
  Synthetic oligonucleotide
ctgttagaataaagccccccactctgttagaggacaagtggtacactcagcaggacc

SEQ ID NO: 387325 - DNA, 60 bp, Artificial
  Synthetic oligonucleotide
ctgttagacactttcctagaccatggctttctgccctaggacagtatatctatgacacct

SEQ ID NO: 387326 - DNA, 55 bp, Artificial
  Synthetic oligonucleotide
ctgttagagatatgacccaagggagctatagtaagacccccctgacttttaccaa

SEQ ID NO: 387327 - DNA, 55 bp, Artificial
  Synthetic oligonucleotide
ctgttagatcgtgaggaacttttagatcgtgaagggcttctagatcgtgagggac

SEQ ID NO: 387328 - DNA, 55 bp, Artificial
  Synthetic oligonucleotide
ctgttagccaacgcgcgcgacgagcagaacgaatttccatcgaaggtgtgaagcg

SEQ ID NO: 387329 - DNA, 55 bp, Artificial
  Synthetic oligonucleotide
ctgttagcgagggtgctactacgctgggagctatcaatgcaagcacgctctatca

SEQ ID NO: 387330 - DNA, 54 bp, Artificial
  Synthetic oligonucleotide
ctgttagctgtaaaatctgtgaaactcaatactgtaaaacatgttctgatcaac

SEQ ID NO: 387331 - DNA, 55 bp, Artificial
  Synthetic oligonucleotide
ctgttagctgtagctgtacccttaggttcatgcaatgcactaccagtgagatcgg

SEQ ID NO: 387332 - DNA, 60 bp, Artificial
  Synthetic oligonucleotide
ctgttagtcggcttagttctcatattagtaggcttaattgcatggaacatttgtatatgg

SEQ ID NO: 387333 - DNA, 55 bp, Artificial
  Synthetic oligonucleotide
ctgttagtggagatgactgcgtggtggctgctcctgatgcaaggttcggtgcggc

SEQ ID NO: 387334 - DNA, 56 bp, Artificial
  Synthetic oligonucleotide
ctgttagtggcggacactaccaaagtgtacgtgacaaaccctgacaatgtggggag

SEQ ID NO: 387335 - DNA, 59 bp, Artificial
  Synthetic oligonucleotide
ctgttagtggttcagcaaatccactagactggataagtcaaggtgtgccaagtgtcagc

SEQ ID NO: 387336 - DNA, 54 bp, Artificial
  Synthetic oligonucleotide
ctgttagttcctgtcgtgggactcttaaggtggcagaacgccaccgagaaaggt

SEQ ID NO: 387337 - DNA, 58 bp, Artificial
  Synthetic oligonucleotide
ctgttatacctctgcgacgtcacgccctccggtctaggtgatcgtatcgctttcccga

SEQ ID NO: 387338 - DNA, 55 bp, Artificial
  Synthetic oligonucleotide
ctgttatagatcggatcttggatacaaagtgctactaacatcgcaggaaaaggcg

SEQ ID NO: 387339 - DNA, 60 bp, Artificial
  Synthetic oligonucleotide
ctgttatcatttaacagagcaagagtgtctgaagattacaaaacaacctggaagtgctca

SEQ ID NO: 387340 - DNA, 55 bp, Artificial
  Synthetic oligonucleotide
ctgttatccagatgtacaccaatgtggaccaagaccttgtgggatggcccgctcc

SEQ ID NO: 387341 - DNA, 60 bp, Artificial
  Synthetic oligonucleotide
ctgttatcctcgatatcctgacgtcaggtgtatatgcagagacaactggaaaggctctaa

SEQ ID NO: 387342 - DNA, 50 bp, Artificial
  Synthetic oligonucleotide
ctgttatgagtttcgtgatctcaaagttgcggcatttaagggggatgact

SEQ ID NO: 387343 - DNA, 60 bp, Artificial
  Synthetic oligonucleotide
ctgttatgcctggctctagcctcaacaggacttttcaaccctatgatcctcgctgctgga

SEQ ID NO: 387344 - DNA, 60 bp, Artificial
  Synthetic oligonucleotide
ctgttatggcgcctgcacaaaatatgagtatccctggcatactgcaaagtgtcactatga

SEQ ID NO: 387345 - DNA, 60 bp, Artificial
  Synthetic oligonucleotide
ctgttattcagacggtttttgaggatcaaagagcgatcgatccgcttgacttttgtgcaa

SEQ ID NO: 387346 - DNA, 59 bp, Artificial
  Synthetic oligonucleotide
ctgttattgaagtccaaatgtccactgagataattatgtgggcctaaagaacgagccca

SEQ ID NO: 387347 - DNA, 57 bp, Artificial
  Synthetic oligonucleotide
ctgttattgatattccctttagaccccgcaggcctccattaggtcctataaatgctg

SEQ ID NO: 387348 - DNA, 56 bp, Artificial
  Synthetic oligonucleotide
ctgttattgggtaatgacggatggtcctgcgaacaatcaggctagttacaaaattt

SEQ ID NO: 387349 - DNA, 55 bp, Artificial
  Synthetic oligonucleotide
ctgttatttcacttcatcgatattttagaggggattttgtctttgaaataacaaa

SEQ ID NO: 387350 - DNA, 55 bp, Artificial
  Synthetic oligonucleotide
ctgttcaaactatggcattcgcctaggttcgacaggtggcgcggttttggacgtg

SEQ ID NO: 387351 - DNA, 60 bp, Artificial
  Synthetic oligonucleotide
ctgttcaagcacaccaactcccaaagagagacgctccagcagttagcaaaccccaggcga

SEQ ID NO: 387352 - DNA, 55 bp, Artificial
  Synthetic oligonucleotide
ctgttcaagttcaatctactacgctctattgagtggaggagccgtgtctgctggt

SEQ ID NO: 387353 - DNA, 60 bp, Artificial
  Synthetic oligonucleotide
ctgttcaatcttgctgacacgcttctcggtggtctaccgacagaattgatttcgtcggct

SEQ ID NO: 387354 - DNA, 55 bp, Artificial
  Synthetic oligonucleotide
ctgttcacctacacaagagccgttcgaactctcaggacctcagatcctgccgggt

SEQ ID NO: 387355 - DNA, 60 bp, Artificial
  Synthetic oligonucleotide
ctgttcacgcgttgatggggtttgtgtgtaatggcttgaaggaggtggcttcagtcatcg

SEQ ID NO: 387356 - DNA, 60 bp, Artificial
  Synthetic oligonucleotide
ctgttcactataagacaagaaatggcaagcagaggtctatgggattcctttcgtcagtcc

SEQ ID NO: 387357 - DNA, 55 bp, Artificial
  Synthetic oligonucleotide
ctgttcacttttgatgtgtaggatagcgcctacactacgaaactagggatagcgc

SEQ ID NO: 387358 - DNA, 60 bp, Artificial
  Synthetic oligonucleotide
ctgttcagacgcaggagtctttttctggcgcgaaagcaggtgattcatccgagcacgtat

SEQ ID NO: 387359 - DNA, 60 bp, Artificial
  Synthetic oligonucleotide
ctgttcagcagtgaaaccaagttgagctaaggcctcaatgccagaaatcccctctattgt

SEQ ID NO: 387360 - DNA, 55 bp, Artificial
  Synthetic oligonucleotide
ctgttcagccagaccatcacgagtatcgtctagcatttgttgtagttcaagaacc

SEQ ID NO: 387361 - DNA, 55 bp, Artificial
  Synthetic oligonucleotide
ctgttcagttaaggccatgttcgtatgagcaagcaaagaaacgtgctgaatcggc

SEQ ID NO: 387362 - DNA, 58 bp, Artificial
  Synthetic oligonucleotide
ctgttcatgaatagtatcggacaacgaccgaaagcgacgaggaatcttcactgtttac

SEQ ID NO: 387363 - DNA, 53 bp, Artificial
  Synthetic oligonucleotide
ctgttccccaacaacacccccctgctcgcatcgcccccctacccgtcggcgtc

SEQ ID NO: 387364 - DNA, 54 bp, Artificial
  Synthetic oligonucleotide
ctgttccccgccaattacgtaaaaccacaagctgacgtggctaacatgccggtg

SEQ ID NO: 387365 - DNA, 55 bp, Artificial
  Synthetic oligonucleotide
ctgttcccgagtattctgcaagcgtcaaccaagtcttttctagtccgcgcgtggc

SEQ ID NO: 387366 - DNA, 58 bp, Artificial
  Synthetic oligonucleotide
ctgttcccgcgatccagacttatcaaaatctggtggcggggatgttaggagagcttaa

SEQ ID NO: 387367 - DNA, 60 bp, Artificial
  Synthetic oligonucleotide
ctgttccctgctcaaataatgcacaggaacattataagtcctgtgatgggagtgattggg

SEQ ID NO: 387368 - DNA, 60 bp, Artificial
  Synthetic oligonucleotide
ctgttccggtccctgcccaatctacgtctgtcagtgatgatcgcgagctaacttggaaat

SEQ ID NO: 387369 - DNA, 50 bp, Artificial
  Synthetic oligonucleotide
ctgttcctactttcggaaggctcgtcacatactctagcttaagttcctca

SEQ ID NO: 387370 - DNA, 60 bp, Artificial
  Synthetic oligonucleotide
ctgttcctttacattcggatacatgacatatgtgcattttcaatccactaaccgtgtcgc

SEQ ID NO: 387371 - DNA, 60 bp, Artificial
  Synthetic oligonucleotide
ctgttcgatgtcctatacatggacaggtgccctgatcacaccatgcgctgcggaggagag

SEQ ID NO: 387372 - DNA, 59 bp, Artificial
  Synthetic oligonucleotide
ctgttcgcaacacactctacagattgtaggaccggatggtgattattacctaccctatc

SEQ ID NO: 387373 - DNA, 59 bp, Artificial
  Synthetic oligonucleotide
ctgttcgccacatggcgaatcacctataaggacacggtacaattgcgccggaagttaga

SEQ ID NO: 387374 - DNA, 55 bp, Artificial
  Synthetic oligonucleotide
ctgttcgcctacccctctctacgctccgagacactgaggagattgctatgaggtg

SEQ ID NO: 387375 - DNA, 54 bp, Artificial
  Synthetic oligonucleotide
ctgttcgcgaaacgcgctgtgactgaggtctggaaaccgtcacaggaggacatt

SEQ ID NO: 387376 - DNA, 55 bp, Artificial
  Synthetic oligonucleotide
ctgttcgcttgtagcagggacttacgacagggtaactggcaaatacgtgtccact

SEQ ID NO: 387377 - DNA, 59 bp, Artificial
  Synthetic oligonucleotide
ctgttcggagcaatagctgggttcatagagggaggttggccagggctagtggccggatg

SEQ ID NO: 387378 - DNA, 60 bp, Artificial
  Synthetic oligonucleotide
ctgttcgtaaatctgatttgatgaccgaagtggtgcaaactaatggaatatacggagtga

SEQ ID NO: 387379 - DNA, 57 bp, Artificial
  Synthetic oligonucleotide
ctgttcgtgaactggagggtcgtcgtaagcaggcacagggggatgataagccatccc

SEQ ID NO: 387380 - DNA, 56 bp, Artificial
  Synthetic oligonucleotide
ctgttcgttattggactgtgagtccgcatcttcgttaacgggccctatggtactcc

SEQ ID NO: 387381 - DNA, 55 bp, Artificial
  Synthetic oligonucleotide
ctgttctatacgccatacacagaagctgatcaggcaggttcgatcaagatttctg

SEQ ID NO: 387382 - DNA, 55 bp, Artificial
  Synthetic oligonucleotide
ctgttctattatactatgctaggcagaagggtgttataaggcttggataccaacc

SEQ ID NO: 387383 - DNA, 56 bp, Artificial
  Synthetic oligonucleotide
ctgttctcactgtagaaaactcggacggtcttaccaaaggtatgatcttctataac

SEQ ID NO: 387384 - DNA, 59 bp, Artificial
  Synthetic oligonucleotide
ctgttctcctagaaagatacaaacagatagattggaacacttggcaaggatttcctgtg

SEQ ID NO: 387385 - DNA, 55 bp, Artificial
  Synthetic oligonucleotide
ctgttctcgacctcactagctccattatataccgggtggaatgaataacatgtgc

SEQ ID NO: 387386 - DNA, 55 bp, Artificial
  Synthetic oligonucleotide
ctgttctcgtatcagcgagtagcgtaagttattcgcaggtgtgtggacacgtgtg

SEQ ID NO: 387387 - DNA, 55 bp, Artificial
  Synthetic oligonucleotide
ctgttctctgacagccttgttcattatctctaggttgcgtcgttgaccctcttgt

SEQ ID NO: 387388 - DNA, 58 bp, Artificial
  Synthetic oligonucleotide
ctgttctcttcgcagcttttgttcaaaatatgctccagtaatttggaattacgggata

SEQ ID NO: 387389 - DNA, 54 bp, Artificial
  Synthetic oligonucleotide
ctgttctcttgttaaaccttctaccagtcgctcagaaggtccaaaaccaagacc

SEQ ID NO: 387390 - DNA, 55 bp, Artificial
  Synthetic oligonucleotide
ctgttctgaagatcatgtctgcaggcagcaagttccttatgggctcttggtaaag

SEQ ID NO: 387391 - DNA, 55 bp, Artificial
  Synthetic oligonucleotide
ctgttctgagaggattcctcattctgggcaaagaagacaggagatatgggccagc

SEQ ID NO: 387392 - DNA, 57 bp, Artificial
  Synthetic oligonucleotide
ctgttctgcattctaaccgtgactttaagactatgccccgcgaagcagtcgagtttt

SEQ ID NO: 387393 - DNA, 55 bp, Artificial
  Synthetic oligonucleotide
ctgttcttaagtggcacgctgagaaaagaatatgggatacgaataatgctatcag

SEQ ID NO: 387394 - DNA, 55 bp, Artificial
  Synthetic oligonucleotide
ctgttcttccctaacgcatatccttacaagagcggggtagttgtcataaatgaga

SEQ ID NO: 387395 - DNA, 59 bp, Artificial
  Synthetic oligonucleotide
ctgttcttcgaaaatgtggagctccagttcaagtgtatcgtgcctcgcgagtgggagag

SEQ ID NO: 387396 - DNA, 56 bp, Artificial
  Synthetic oligonucleotide
ctgttctttggggccttatgtggtgtttgccgctgaggtactcaggggcatttagg

SEQ ID NO: 387397 - DNA, 60 bp, Artificial
  Synthetic oligonucleotide
ctgttgaaaaggagttgagccccaaggctgctcctcttgaggtggtgccaattgagaatg

SEQ ID NO: 387398 - DNA, 56 bp, Artificial
  Synthetic oligonucleotide
ctgttgaaatcactaatggtcgctccgaccctattgcccctcttattacttatccc

SEQ ID NO: 387399 - DNA, 55 bp, Artificial
  Synthetic oligonucleotide
ctgttgaagactgcgctactattcctactcacgctgtctcttctggcaacgatgt

SEQ ID NO: 387400 - DNA, 55 bp, Artificial
  Synthetic oligonucleotide
ctgttgaagcctgtggttattctgatcgcattatacagattaccagaggagactc

SEQ ID NO: 387401 - DNA, 51 bp, Artificial
  Synthetic oligonucleotide
ctgttgacaagggatggtggagataggaacagtagttatgagaccttcaga

SEQ ID NO: 387402 - DNA, 55 bp, Artificial
  Synthetic oligonucleotide
ctgttgaccaatcaacgattggagcaagcggagtgtatccctctcttatgtcaag

SEQ ID NO: 387403 - DNA, 55 bp, Artificial
  Synthetic oligonucleotide
ctgttgacccacttcttcggcgtcctcatagccagggatcagcttgaacaggccc

SEQ ID NO: 387404 - DNA, 60 bp, Artificial
  Synthetic oligonucleotide
ctgttgacctcctctagcagatcgtccatcgatctgaaactgaccccagtcgatgtaatc

SEQ ID NO: 387405 - DNA, 60 bp, Artificial
  Synthetic oligonucleotide
ctgttgacgccactgtacacggtggcaaccagagacggactcgccgcgtccacacggatg

SEQ ID NO: 387406 - DNA, 55 bp, Artificial
  Synthetic oligonucleotide
ctgttgacggatgtgttcgaatcattgataatgatacaggcaagtatgttggaat

SEQ ID NO: 387407 - DNA, 59 bp, Artificial
  Synthetic oligonucleotide
ctgttgagaagaagcacagggaattaccggttgacttctgctgtcacaagtttgaagag

SEQ ID NO: 387408 - DNA, 50 bp, Artificial
  Synthetic oligonucleotide
ctgttgagtggccatgctacgttgcagggttgcgagtttagtggcaagag

SEQ ID NO: 387409 - DNA, 57 bp, Artificial
  Synthetic oligonucleotide
ctgttgatctattcatgttcaatgatttacttaggctcatcaacccatcaaatacgc

SEQ ID NO: 387410 - DNA, 51 bp, Artificial
  Synthetic oligonucleotide
ctgttgatggccaacgcggaggctcttcagcagctggtagtattggtgggg

SEQ ID NO: 387411 - DNA, 60 bp, Artificial
  Synthetic oligonucleotide
ctgttgatgtcaaggaaatgctatctgacatgatcagacgcagaaatgtcttgctgaatg

SEQ ID NO: 387412 - DNA, 60 bp, Artificial
  Synthetic oligonucleotide
ctgttgcaagagtgccgatggttgacactttggcttggccaaacgtctaacaagtgagta

SEQ ID NO: 387413 - DNA, 60 bp, Artificial
  Synthetic oligonucleotide
ctgttgcaataatgtgcattgttaaaggcactgtcaacctatggaagtgtggtattgtcc

SEQ ID NO: 387414 - DNA, 60 bp, Artificial
  Synthetic oligonucleotide
ctgttgcactaccggagcggaggcatatttcacttataccataagcgggaatacaatcag

SEQ ID NO: 387415 - DNA, 59 bp, Artificial
  Synthetic oligonucleotide
ctgttgcatagatggatttcctgtagctattgggctttctaattaattgggccttggac

SEQ ID NO: 387416 - DNA, 58 bp, Artificial
  Synthetic oligonucleotide
ctgttgccacttatggcgatggactccccgcgctgaaccattagagcggcgaggctag

SEQ ID NO: 387417 - DNA, 59 bp, Artificial
  Synthetic oligonucleotide
ctgttgccagaatcatcaactcatcagaggttagtttcccaacaccaaccctgttcttc

SEQ ID NO: 387418 - DNA, 55 bp, Artificial
  Synthetic oligonucleotide
ctgttgcctgtaaaacatacagttgtgtgggatgttggtggaaactggttaacgc

SEQ ID NO: 387419 - DNA, 58 bp, Artificial
  Synthetic oligonucleotide
ctgttgcctgtactcaattacgcagtggtctatcttcatacagctgcgactgagcctc

SEQ ID NO: 387420 - DNA, 56 bp, Artificial
  Synthetic oligonucleotide
ctgttgcgaaacgaacagctctgattacattattaacggaaataacacctaattgg

SEQ ID NO: 387421 - DNA, 55 bp, Artificial
  Synthetic oligonucleotide
ctgttgcggatggtaaggcgcacttcactgagacgattaagcctgttcttgacct

SEQ ID NO: 387422 - DNA, 52 bp, Artificial
  Synthetic oligonucleotide
ctgttgctaaaactatgggcatgtcaacctctgaaatggtgactgcggttca

SEQ ID NO: 387423 - DNA, 60 bp, Artificial
  Synthetic oligonucleotide
ctgttgctaatggcttcgttataagtggtgcattaagtgtcatcggaacattactgcctg

SEQ ID NO: 387424 - DNA, 50 bp, Artificial
  Synthetic oligonucleotide
ctgttgctctatgtcatacacttggacgggggccttgatcacaccatgcg

SEQ ID NO: 387425 - DNA, 60 bp, Artificial
  Synthetic oligonucleotide
ctgttgctggatctcatcgtgtagtgccattgagctttcgatgagagccaacatcattat

SEQ ID NO: 387426 - DNA, 58 bp, Artificial
  Synthetic oligonucleotide
ctgttggacaagcaacagtttgagttgtataaaaggaccgacattgtggaggtggatc

SEQ ID NO: 387427 - DNA, 55 bp, Artificial
  Synthetic oligonucleotide
ctgttggatgtctgacaccgtgtccaaggcatcgacatttgtatcgtttgacctc

SEQ ID NO: 387428 - DNA, 59 bp, Artificial
  Synthetic oligonucleotide
ctgttggcactaccccccaaagccttgcggtatcgtgccagcacggaatgtatgtggcc

SEQ ID NO: 387429 - DNA, 60 bp, Artificial
  Synthetic oligonucleotide
ctgttggccctcgcggtgcgaagcctatgacatctgtacattgtgttccataccaacgtg

SEQ ID NO: 387430 - DNA, 60 bp, Artificial
  Synthetic oligonucleotide
ctgttggcgacagtatccctgaggatgtgaatggtgatcacagacgctttatagtacatc

SEQ ID NO: 387431 - DNA, 56 bp, Artificial
  Synthetic oligonucleotide
ctgttgggaccaggattgcagaggaagattgtcggtattccgcctttaatttgaac

SEQ ID NO: 387432 - DNA, 55 bp, Artificial
  Synthetic oligonucleotide
ctgttgggcatcgtttagggatttagagcgtgattcatgtaacggggtttacgct

SEQ ID NO: 387433 - DNA, 57 bp, Artificial
  Synthetic oligonucleotide
ctgttgggcgccagaagagccagcctgtcaagattttttaggagctatgatgcattt

SEQ ID NO: 387434 - DNA, 60 bp, Artificial
  Synthetic oligonucleotide
ctgttgggcgtgatgttcagcgctggtatactgctcccactcgcgggccggctgctaatt

SEQ ID NO: 387435 - DNA, 55 bp, Artificial
  Synthetic oligonucleotide
ctgttgggggacgcggcagttttttgactaatgccattttaggtaggtcaagtca

SEQ ID NO: 387436 - DNA, 53 bp, Artificial
  Synthetic oligonucleotide
ctgttgggtacacactttgggtacaccactttgggtacacgggtacataggag

SEQ ID NO: 387437 - DNA, 55 bp, Artificial
  Synthetic oligonucleotide
ctgttgggtggctctactcactaggaatcagacttgtatccaagcagtagccacc

SEQ ID NO: 387438 - DNA, 60 bp, Artificial
  Synthetic oligonucleotide
ctgttggtccggcctactcagctcactgcattggagttgctgacagggatttcattgagg

SEQ ID NO: 387439 - DNA, 60 bp, Artificial
  Synthetic oligonucleotide
ctgttggtccttcttgaaaacgaaaggacactagatctgcatgacgcgaatgtgaagagc

SEQ ID NO: 387440 - DNA, 59 bp, Artificial
  Synthetic oligonucleotide
ctgttggtgatcttgacgtcaacagaagcccgtcagtttccaattctgactgcggttcc

SEQ ID NO: 387441 - DNA, 55 bp, Artificial
  Synthetic oligonucleotide
ctgttgtagatgtttcgcctgcacgtccacctgtggttattgaacctgtgggtcc

SEQ ID NO: 387442 - DNA, 54 bp, Artificial
  Synthetic oligonucleotide
ctgttgtaggatttgcctacctatttagtaggaataagacgataacaacgttag

SEQ ID NO: 387443 - DNA, 59 bp, Artificial
  Synthetic oligonucleotide
ctgttgtatggacagaaagcatggacgtgccccttctacgtccattcctttgtgagtgg

SEQ ID NO: 387444 - DNA, 55 bp, Artificial
  Synthetic oligonucleotide
ctgttgtcagtgaccctgccgcgtcaccgtgtgtccactctgggctcgtctctct

SEQ ID NO: 387445 - DNA, 58 bp, Artificial
  Synthetic oligonucleotide
ctgttgtccccctcgagcggatctgccgtcgatctgaaattctccccagtcgacggtg

SEQ ID NO: 387446 - DNA, 60 bp, Artificial
  Synthetic oligonucleotide
ctgttgtccgaccaatcatagtgcgcctgaggagcttagatatctgtgttaatacgtggt

SEQ ID NO: 387447 - DNA, 58 bp, Artificial
  Synthetic oligonucleotide
ctgttgtgatcagtaccaatcacgacgtgtacaccgtggtcggtggaaacaccactac

SEQ ID NO: 387448 - DNA, 50 bp, Artificial
  Synthetic oligonucleotide
ctgttgtgggcagacagtttttaggtatactgccaccaaccgtacgagag

SEQ ID NO: 387449 - DNA, 55 bp, Artificial
  Synthetic oligonucleotide
ctgttgtggtggaagaccgccgctaccgcccgacaaatcttgaaccgggtgatgc

SEQ ID NO: 387450 - DNA, 53 bp, Artificial
  Synthetic oligonucleotide
ctgttgtgtgtatcgctctaggcacacgaacgtgctaccccacgtttagttca

SEQ ID NO: 387451 - DNA, 56 bp, Artificial
  Synthetic oligonucleotide
ctgttgttcaggaaaacgacccaagactttagagattgctttggactcaaacacga

SEQ ID NO: 387452 - DNA, 55 bp, Artificial
  Synthetic oligonucleotide
ctgttgttctcagtgctgcggtgtactttactacggaactctgccatccgacggg

SEQ ID NO: 387453 - DNA, 59 bp, Artificial
  Synthetic oligonucleotide
ctgttgttctgtgataacacccaaaactgggtgtttgtctttcagtctctcaagatcag

SEQ ID NO: 387454 - DNA, 55 bp, Artificial
  Synthetic oligonucleotide
ctgttgttgattgtggttggtagtcattggaaaggtgcctgtgcttggtgttgca

SEQ ID NO: 387455 - DNA, 55 bp, Artificial
  Synthetic oligonucleotide
ctgttgttgcctatggtgtttggccacaatacttgtctcctgatgatgctagtgc

SEQ ID NO: 387456 - DNA, 59 bp, Artificial
  Synthetic oligonucleotide
ctgttgttgtcaatccgttggctcaacgagttctacttgggatgaattgcttgctaggt

SEQ ID NO: 387457 - DNA, 57 bp, Artificial
  Synthetic oligonucleotide
ctgttgtttacgataactcaagctactccacagctggttacgattataaacaaatag

SEQ ID NO: 387458 - DNA, 58 bp, Artificial
  Synthetic oligonucleotide
ctgttgtttatccatttcagaattgggtgtcgacatagcagaataggcattacccgat

SEQ ID NO: 387459 - DNA, 52 bp, Artificial
  Synthetic oligonucleotide
ctgtttaaacttccccttagaggactcgcccgctgggacttccttgtcaccc

SEQ ID NO: 387460 - DNA, 59 bp, Artificial
  Synthetic oligonucleotide
ctgtttaatagcacttggaatcacactgacataaaggggtcaaatagcacggagtcaag

SEQ ID NO: 387461 - DNA, 59 bp, Artificial
  Synthetic oligonucleotide
ctgtttaatagtacatatactagcaacattacaggaaattcaagcatcacactcccatg

SEQ ID NO: 387462 - DNA, 54 bp, Artificial
  Synthetic oligonucleotide
ctgtttaatagtacttggaatagtactgaagggttaaatattacactcccatgc

SEQ ID NO: 387463 - DNA, 55 bp, Artificial
  Synthetic oligonucleotide
ctgtttacattactcaagcggagaaactagaacacggtaagactaggtacattta

SEQ ID NO: 387464 - DNA, 55 bp, Artificial
  Synthetic oligonucleotide
ctgtttaccagcaattttgtcttagcatccacaaactctaacacattgagtcctc

SEQ ID NO: 387465 - DNA, 49 bp, Artificial
  Synthetic oligonucleotide
ctgtttaccgttccgttttatatgaaccccgttccgttattagtcccca

SEQ ID NO: 387466 - DNA, 48 bp, Artificial
  Synthetic oligonucleotide
ctgtttaccgttccgttttatctttaccccgttccgttatttgagtac

SEQ ID NO: 387467 - DNA, 53 bp, Artificial
  Synthetic oligonucleotide
ctgtttacgaatggctagggatacagacttacacaaacagagaggtaatatta

SEQ ID NO: 387468 - DNA, 53 bp, Artificial
  Synthetic oligonucleotide
ctgtttacgccactcttaaaattaggatttacttctacgattctgtaacgaat

SEQ ID NO: 387469 - DNA, 55 bp, Artificial
  Synthetic oligonucleotide
ctgtttacgtctacgtgaccccacccaatttgactgatgtgaagccgacgaccgt

SEQ ID NO: 387470 - DNA, 50 bp, Artificial
  Synthetic oligonucleotide
ctgtttacgttagtaaggtttctgtgctggtgagcatacgacgatttcga

SEQ ID NO: 387471 - DNA, 55 bp, Artificial
  Synthetic oligonucleotide
ctgtttacttcaaaagttataccgacatagcgtctttctctgtagatccgcagct

SEQ ID NO: 387472 - DNA, 60 bp, Artificial
  Synthetic oligonucleotide
ctgtttatatcgtacgtatcaagcacagcataggtttcaaaactcatctggaatagtgaa

SEQ ID NO: 387473 - DNA, 57 bp, Artificial
  Synthetic oligonucleotide
ctgtttatccacagtccctaacaaaatgccatgaaggttttgatccaactatgccgg

SEQ ID NO: 387474 - DNA, 60 bp, Artificial
  Synthetic oligonucleotide
ctgtttatctttagacagacccgtgctaggcatcaccataatacgaggaaatctactgat

SEQ ID NO: 387475 - DNA, 58 bp, Artificial
  Synthetic oligonucleotide
ctgtttcaaaactggggagttgaacccattgacaatgtcatggggatgatcggaatat

SEQ ID NO: 387476 - DNA, 55 bp, Artificial
  Synthetic oligonucleotide
ctgtttcagtcacttgcgtgtggggctccgcatcttggtttgccaccactcgtgg

SEQ ID NO: 387477 - DNA, 50 bp, Artificial
  Synthetic oligonucleotide
ctgtttccccggtacccttgtatacgcttcacccgaggcgaaaaacgagg

SEQ ID NO: 387478 - DNA, 52 bp, Artificial
  Synthetic oligonucleotide
ctgtttccccggtccttacggatcgttacccgcccaggtcactacgagaagc

SEQ ID NO: 387479 - DNA, 59 bp, Artificial
  Synthetic oligonucleotide
ctgtttccgcgatttttcttcgattcggagcggctcatctcgacaagaggcggcactcc

SEQ ID NO: 387480 - DNA, 53 bp, Artificial
  Synthetic oligonucleotide
ctgtttcctaggttgcgagaattgttagacctcgaaaaggtcgtttattcgac

SEQ ID NO: 387481 - DNA, 56 bp, Artificial
  Synthetic oligonucleotide
ctgtttcgagattgatttgtccaaattcgacaagtctcaaggtgaatttcccttta

SEQ ID NO: 387482 - DNA, 58 bp, Artificial
  Synthetic oligonucleotide
ctgtttctgccacgtgtaaaagtgtatgctcgacatgaccgagtacgtgggttcggcg

SEQ ID NO: 387483 - DNA, 55 bp, Artificial
  Synthetic oligonucleotide
ctgtttctggagtaccctattctatacagcatcaatcttcctacatcttctgcac

SEQ ID NO: 387484 - DNA, 60 bp, Artificial
  Synthetic oligonucleotide
ctgtttgagctgactaagatagcagaatgtctatctacaactgtagattacttaattggc

SEQ ID NO: 387485 - DNA, 55 bp, Artificial
  Synthetic oligonucleotide
ctgtttgatctccgctaatacggtatcgatattctcacgcttgcgtaaaattcgc

SEQ ID NO: 387486 - DNA, 58 bp, Artificial
  Synthetic oligonucleotide
ctgtttgatctggccctcggaccagggctcaacccttacctcgcccacctctcagcca

SEQ ID NO: 387487 - DNA, 55 bp, Artificial
  Synthetic oligonucleotide
ctgtttgcccgtggtgagtccatgcaggacatgtatgacttactgccccaggagg

SEQ ID NO: 387488 - DNA, 58 bp, Artificial
  Synthetic oligonucleotide
ctgtttgcgagattcatctcttagtgttaggaaaggtaccaccgtcagtcctctagac

SEQ ID NO: 387489 - DNA, 55 bp, Artificial
  Synthetic oligonucleotide
ctgtttgctacaccctctgagcttgcatggaatggatgatgatcacagagaagtg

SEQ ID NO: 387490 - DNA, 60 bp, Artificial
  Synthetic oligonucleotide
ctgtttgctcacttcatgagctttgttgatcgattgaagtttttggaccgaatgactcag

SEQ ID NO: 387491 - DNA, 60 bp, Artificial
  Synthetic oligonucleotide
ctgtttgctggtgataatttgtctgccaatgtaaaatgtaagcctcaggcaaatgtaaaa

SEQ ID NO: 387492 - DNA, 55 bp, Artificial
  Synthetic oligonucleotide
ctgtttggaaaggatcttcactgtcggtgcccggaaagggatatccacggaatgt

SEQ ID NO: 387493 - DNA, 58 bp, Artificial
  Synthetic oligonucleotide
ctgtttggagtcgagactaatcgaaccactaagtaatactcaaggtcattcgctaaga

SEQ ID NO: 387494 - DNA, 60 bp, Artificial
  Synthetic oligonucleotide
ctgtttggcgctaggatccacagtcatggtaatttggcaatagttccatctctgaaggat

SEQ ID NO: 387495 - DNA, 53 bp, Artificial
  Synthetic oligonucleotide
ctgtttggcggttcaattggatcgacaccgagctacacgtacgcaaactaaaa

SEQ ID NO: 387496 - DNA, 55 bp, Artificial
  Synthetic oligonucleotide
ctgtttgggagttgactattagagtttggtctgagttaaacattggaactggtac

SEQ ID NO: 387497 - DNA, 54 bp, Artificial
  Synthetic oligonucleotide
ctgtttggggataccaggtcgaagaatcgttgatttttgcattggaattttcct

SEQ ID NO: 387498 - DNA, 59 bp, Artificial
  Synthetic oligonucleotide
ctgtttgtgacttccttcgaaggttaacgaatgttgcgcaggtctgtgtagatgttgtg

SEQ ID NO: 387499 - DNA, 60 bp, Artificial
  Synthetic oligonucleotide
ctgtttgtgatccgcacttgaccgggacctgggacactctcattgagcgagagaatgcca

SEQ ID NO: 387500 - DNA, 60 bp, Artificial
  Synthetic oligonucleotide
ctgtttgtggagtggagataagtgatcccacaagcgatcttggcaattatagcaataggt

SEQ ID NO: 387501 - DNA, 54 bp, Artificial
  Synthetic oligonucleotide
ctgttttaaaacattaatcgctgccatgcttagtcaacgtaccatgtctttaga

SEQ ID NO: 387502 - DNA, 55 bp, Artificial
  Synthetic oligonucleotide
ctgttttaatgtttgccttgattggcgaagctagacagagagcaagctatgagca

SEQ ID NO: 387503 - DNA, 53 bp, Artificial
  Synthetic oligonucleotide
ctgttttaggggaaacctctgaggggggtcctgtaactatttctgactctgac

SEQ ID NO: 387504 - DNA, 54 bp, Artificial
  Synthetic oligonucleotide
ctgttttataacccccccccagtgaaacttagaagcagcaaaccacgatcaata

SEQ ID NO: 387505 - DNA, 50 bp, Artificial
  Synthetic oligonucleotide
ctgttttatacaccctcccccctttttgtaacttagaagaaacaaacaca

SEQ ID NO: 387506 - DNA, 53 bp, Artificial
  Synthetic oligonucleotide
ctgttttatactcccttcccgtaacttagaagcacgaaaccaagttcaataga

SEQ ID NO: 387507 - DNA, 53 bp, Artificial
  Synthetic oligonucleotide
ctgttttatatacgtaatggcccttttattccttacccgtgcaagtaccgaga

SEQ ID NO: 387508 - DNA, 57 bp, Artificial
  Synthetic oligonucleotide
ctgttttatattgcgtttgaagtgtggtcccggtattaattcataatgcattcgtta

SEQ ID NO: 387509 - DNA, 55 bp, Artificial
  Synthetic oligonucleotide
ctgttttggacattgacctaactgattttgggcctagaacacgtggagacacctt

SEQ ID NO: 387510 - DNA, 60 bp, Artificial
  Synthetic oligonucleotide
ctgttttgtatcagggtgtaaggatttctgcctacgcatggctagagacactaacttaca

SEQ ID NO: 387511 - DNA, 50 bp, Artificial
  Synthetic oligonucleotide
ctgttttgtggtagtatgatggccacagggaaaattctacttagctactc

SEQ ID NO: 387512 - DNA, 58 bp, Artificial
  Synthetic oligonucleotide
ctgtttttctacaggaagccttgaacatagctttggtggctgttagccttatagctgt

SEQ ID NO: 387513 - DNA, 58 bp, Artificial
  Synthetic oligonucleotide
cttaaaaaactgccgctgaaagagtgtttatatgcttggaccaccatcggtggagcca

SEQ ID NO: 387514 - DNA, 51 bp, Artificial
  Synthetic oligonucleotide
cttaaaaagcctagtccactttttaagccggttagacttcaccgtagatac

SEQ ID NO: 387515 - DNA, 55 bp, Artificial
  Synthetic oligonucleotide
cttaaaaatctcccagtcggtggattcaaacgtgtgtagatccgaaaggatagga

SEQ ID NO: 387516 - DNA, 52 bp, Artificial
  Synthetic oligonucleotide
cttaaaacagtaatcgtagtgagctggaatagcgctgtccggaatcttaact

SEQ ID NO: 387517 - DNA, 59 bp, Artificial
  Synthetic oligonucleotide
cttaaaacattctacttaatctacatatttactgttctcgaaatgtatcaacagattga

SEQ ID NO: 387518 - DNA, 55 bp, Artificial
  Synthetic oligonucleotide
cttaaaactcgggttaatgaagagctcacccagatgaggactatggataatgatg

SEQ ID NO: 387519 - DNA, 55 bp, Artificial
  Synthetic oligonucleotide
cttaaaagcactaggaatgaggccataagagcattctcctgtgtggattgggtgc

SEQ ID NO: 387520 - DNA, 56 bp, Artificial
  Synthetic oligonucleotide
cttaaaaggtcaaccacacccttggatataagtgacctctccgagagccagaatcc

SEQ ID NO: 387521 - DNA, 55 bp, Artificial
  Synthetic oligonucleotide
cttaaaagtgttcctacgtgcggtgtcgtgtttagtgtagacgcgcgccaacagg

SEQ ID NO: 387522 - DNA, 55 bp, Artificial
  Synthetic oligonucleotide
cttaaaagtttgatggatggcatgaccggaatagtctcacacaactcaactcatg

SEQ ID NO: 387523 - DNA, 60 bp, Artificial
  Synthetic oligonucleotide
cttaaaatcctgcacttggcatgagtcgacacatggcacaactagccaaactaaggttgt

SEQ ID NO: 387524 - DNA, 60 bp, Artificial
  Synthetic oligonucleotide
cttaaaatgggaacctctggctggaactgctaagcatatcgaagaatgctcatgctacgg

SEQ ID NO: 387525 - DNA, 48 bp, Artificial
  Synthetic oligonucleotide
cttaaaattacagactcggggccccgggtcccaataggaccaaacccc

SEQ ID NO: 387526 - DNA, 55 bp, Artificial
  Synthetic oligonucleotide
cttaaaattagcaggcagatggccagtaacaacaatacatacagacaatggcagc

SEQ ID NO: 387527 - DNA, 60 bp, Artificial
  Synthetic oligonucleotide
cttaaacagtgcacaagacagatcctagaggtcacaatactaggtcttagagtcaaagat

SEQ ID NO: 387528 - DNA, 57 bp, Artificial
  Synthetic oligonucleotide
cttaaacattgcctttgaaaaggcattgattgcaacagctacatggtttcaatacta

SEQ ID NO: 387529 - DNA, 57 bp, Artificial
  Synthetic oligonucleotide
cttaaaccaaacgcgaagagtcacgcttggggagttgctgaggatgccaaccacaag

SEQ ID NO: 387530 - DNA, 55 bp, Artificial
  Synthetic oligonucleotide
cttaaaccgaagagtgacttcattggttgattatttgttctcacaactccattcg

SEQ ID NO: 387531 - DNA, 55 bp, Artificial
  Synthetic oligonucleotide
cttaaacctcagcttgtccttaaaagactgggccatctcaacaacaactgacgat

SEQ ID NO: 387532 - DNA, 55 bp, Artificial
  Synthetic oligonucleotide
cttaaacctgtcgcgtccgatttctctgacttcagattagcgtgcgccgcctggt

SEQ ID NO: 387533 - DNA, 54 bp, Artificial
  Synthetic oligonucleotide
cttaaacgacttacaagaactcgccggttgctacgctcgcccttggactagccg

SEQ ID NO: 387534 - DNA, 56 bp, Artificial
  Synthetic oligonucleotide
cttaaacgttccgggaccaggcgcctatagaatacaggacggacaagatgtcatag

SEQ ID NO: 387535 - DNA, 55 bp, Artificial
  Synthetic oligonucleotide
cttaaactaaccttctcgaaagagagagttgagggctctgctttgccctcactcc

SEQ ID NO: 387536 - DNA, 55 bp, Artificial
  Synthetic oligonucleotide
cttaaactaatgcgattattatacaagcttaaaactaatggttacatgcggttat

SEQ ID NO: 387537 - DNA, 55 bp, Artificial
  Synthetic oligonucleotide
cttaaagaattcgaattcagtggtaagctcttgaaagtgtctgcaactcctccag

SEQ ID NO: 387538 - DNA, 55 bp, Artificial
  Synthetic oligonucleotide
cttaaagagctcatgggacggcatagttacattctttagcggtatgggtcaatgg

SEQ ID NO: 387539 - DNA, 60 bp, Artificial
  Synthetic oligonucleotide
cttaaagagctggtgcataaaagagtaacctcaccagaggactggatgatgatgcagcca

SEQ ID NO: 387540 - DNA, 60 bp, Artificial
  Synthetic oligonucleotide
cttaaagatcgaggagactctaacgagtgagaacatttcgatctatgggaaggatcttca

SEQ ID NO: 387541 - DNA, 51 bp, Artificial
  Synthetic oligonucleotide
cttaaagcatttacgtgtatctaaagtattaggcacacccaagcaaaggct

SEQ ID NO: 387542 - DNA, 54 bp, Artificial
  Synthetic oligonucleotide
cttaaagcgtttatggaagcgaacggtaatcaccccgaacaaatctgccgatcc

SEQ ID NO: 387543 - DNA, 56 bp, Artificial
  Synthetic oligonucleotide
cttaaagcttaattaatggcttgtgggcctatatacttgcccaccaagtagtggga

SEQ ID NO: 387544 - DNA, 55 bp, Artificial
  Synthetic oligonucleotide
cttaaaggaaaattccaaacagcagcacagcgagcaatgatggaccaagtgcggg

SEQ ID NO: 387545 - DNA, 52 bp, Artificial
  Synthetic oligonucleotide
cttaaaggaccaaccgagaggttggcaatttgaaccaccttccgatttagat

SEQ ID NO: 387546 - DNA, 56 bp, Artificial
  Synthetic oligonucleotide
cttaaaggcctctgtgtagaattcctgatcatgacttctagtcatatcctgtacac

SEQ ID NO: 387547 - DNA, 55 bp, Artificial
  Synthetic oligonucleotide
cttaaagggaatacacttgttcttttccaaagagtcgaagcacatggagcagtgc

SEQ ID NO: 387548 - DNA, 60 bp, Artificial
  Synthetic oligonucleotide
cttaaagggattgttcaatgagcacgaactatggcgcaatgtgtggtcgagatcgaatga

SEQ ID NO: 387549 - DNA, 55 bp, Artificial
  Synthetic oligonucleotide
cttaaagtatcatgcggaccaaaatcgatacagtttcatgcttgcttcaatcagc

SEQ ID NO: 387550 - DNA, 50 bp, Artificial
  Synthetic oligonucleotide
cttaaagtggcgagtacgaccgcagagtattataaaaacgctcgattgcg

SEQ ID NO: 387551 - DNA, 55 bp, Artificial
  Synthetic oligonucleotide
cttaaagttgcggcgtttaagggggatgattccgttgtactctgtagtgattatc

SEQ ID NO: 387552 - DNA, 54 bp, Artificial
  Synthetic oligonucleotide
cttaaataagggatatatttagtgtatgtggagaataacaatttacgtggttta

SEQ ID NO: 387553 - DNA, 60 bp, Artificial
  Synthetic oligonucleotide
cttaaatatttcccattttgtaacatcttgatgcgaggctactcacgagagacgagccta

SEQ ID NO: 387554 - DNA, 60 bp, Artificial
  Synthetic oligonucleotide
cttaaatgctttgccagtacaccagttgatcaatccaatggcatgaacaaggcggaagct

SEQ ID NO: 387555 - DNA, 55 bp, Artificial
  Synthetic oligonucleotide
cttaacaaagtaagtggtgttgtagacaccaccctaaatctttattctgcgatgg

SEQ ID NO: 387556 - DNA, 58 bp, Artificial
  Synthetic oligonucleotide
cttaacaacacgcggccaccccacggtaactggttcggctgtacatggatgaatagca

SEQ ID NO: 387557 - DNA, 60 bp, Artificial
  Synthetic oligonucleotide
cttaacacatttaagtacagaatcgatcaacgtgagaacgtgcgcatggtgcttggttta

SEQ ID NO: 387558 - DNA, 60 bp, Artificial
  Synthetic oligonucleotide
cttaacaccgaggattatgatgaacaacgttgggagatgcttgtgaagtgtgtggacagt

SEQ ID NO: 387559 - DNA, 59 bp, Artificial
  Synthetic oligonucleotide
cttaacactacatggggtcgtgatgcatggacactgacagataccagctatgagagata

SEQ ID NO: 387560 - DNA, 56 bp, Artificial
  Synthetic oligonucleotide
cttaacagagtactcgctagcgacgtgcaatacttcagtttcaaatttacccccca

SEQ ID NO: 387561 - DNA, 55 bp, Artificial
  Synthetic oligonucleotide
cttaacagcagctgaagttacgcaacatggacggtttaggcagcgcgcgggacag

SEQ ID NO: 387562 - DNA, 60 bp, Artificial
  Synthetic oligonucleotide
cttaacagcgataagctatcttgcgtacacccattagctgaacaggttcttataatgact

SEQ ID NO: 387563 - DNA, 55 bp, Artificial
  Synthetic oligonucleotide
cttaacagctaataaaagtgtggttatgatcctagaagtcatcactgccgggatg

SEQ ID NO: 387564 - DNA, 60 bp, Artificial
  Synthetic oligonucleotide
cttaacagctatggtgctagtgacactccactatggatacatgctccctgggtggcaagc

SEQ ID NO: 387565 - DNA, 52 bp, Artificial
  Synthetic oligonucleotide
cttaacaggaaatcggacggatttgggagaagaagcgaaggagtgtgctgag

SEQ ID NO: 387566 - DNA, 57 bp, Artificial
  Synthetic oligonucleotide
cttaacagtattgagatacgctaatgaaattgaagggtatataaacaaagtatatag

SEQ ID NO: 387567 - DNA, 60 bp, Artificial
  Synthetic oligonucleotide
cttaacagtcaaggattcgtgctgcctcaagattgggatatattgacggacaccataagt

SEQ ID NO: 387568 - DNA, 55 bp, Artificial
  Synthetic oligonucleotide
cttaacataagcacccgcatacttctcagttttagtcgcttctttcttaggcggg

SEQ ID NO: 387569 - DNA, 52 bp, Artificial
  Synthetic oligonucleotide
cttaacattaagatgtccgggattatcgataagcgtgggtgtaatgttgttt

SEQ ID NO: 387570 - DNA, 55 bp, Artificial
  Synthetic oligonucleotide
cttaaccattgagttactgcttaccctgcacggaaagatcaagtctttggaggac

SEQ ID NO: 387571 - DNA, 55 bp, Artificial
  Synthetic oligonucleotide
cttaacccataccttgagcacctagcaaaactctatgttgcttggtcgggatctg

SEQ ID NO: 387572 - DNA, 60 bp, Artificial
  Synthetic oligonucleotide
cttaaccccacatctacaccatcgtccactagctggtcaggattgggtgcacgtaagcac

SEQ ID NO: 387573 - DNA, 55 bp, Artificial
  Synthetic oligonucleotide
cttaacccctgagcgcactgattgtaaccttgtgttcagccgtggggatgagctg

SEQ ID NO: 387574 - DNA, 51 bp, Artificial
  Synthetic oligonucleotide
cttaaccctaagggtaagtactcccgcagggcgtataccctccttagaggc

SEQ ID NO: 387575 - DNA, 54 bp, Artificial
  Synthetic oligonucleotide
cttaaccctgatactgtttctggtgtatgtgcacatagtgcgtcagcttgcccc

SEQ ID NO: 387576 - DNA, 51 bp, Artificial
  Synthetic oligonucleotide
cttaaccggtacacacggctttgccttgcggttagcggtacggggtacaaa

SEQ ID NO: 387577 - DNA, 54 bp, Artificial
  Synthetic oligonucleotide
cttaacctaaagagacgacagaggacggtggtaggtccggacaacgactatcac

SEQ ID NO: 387578 - DNA, 54 bp, Artificial
  Synthetic oligonucleotide
cttaacctgtggaaatattttgatgtgggaagctgttactgttaaaactgaggt

SEQ ID NO: 387579 - DNA, 59 bp, Artificial
  Synthetic oligonucleotide
cttaaccttagacatgatgatcgtaaaagttgttatatgctttgaccgtatgtaactca

SEQ ID NO: 387580 - DNA, 52 bp, Artificial
  Synthetic oligonucleotide
cttaacgaatttcctgaaaccgtacacggttttaggtgtatgctttcgatta

SEQ ID NO: 387581 - DNA, 54 bp, Artificial
  Synthetic oligonucleotide
cttaacgtactagtgcccggcgaagtgatatcaattgagtactcggagtatcca

SEQ ID NO: 387582 - DNA, 57 bp, Artificial
  Synthetic oligonucleotide
cttaacgtcatagaggcggccatcaagcggcgcgtcccctcgaaactggaatcggac

SEQ ID NO: 387583 - DNA, 55 bp, Artificial
  Synthetic oligonucleotide
cttaacgtcctccactatatcaacgcctcagcaaccttttccaggttccgcatgg

SEQ ID NO: 387584 - DNA, 59 bp, Artificial
  Synthetic oligonucleotide
cttaacgttacagaaacagcatgagaaagaacacaatccgctaccattattatcgaggc

SEQ ID NO: 387585 - DNA, 57 bp, Artificial
  Synthetic oligonucleotide
cttaactacaaataaagctcagccatactgttcaaggccgtgggagtttcactcgtc

SEQ ID NO: 387586 - DNA, 56 bp, Artificial
  Synthetic oligonucleotide
cttaactatacaggaccaacgaaagttggaaatgttagtgcgcagaggcctgggaa

SEQ ID NO: 387587 - DNA, 60 bp, Artificial
  Synthetic oligonucleotide
cttaactatcccacagatgatagcgacgactccacagacggtgaggaattagtattccga

SEQ ID NO: 387588 - DNA, 53 bp, Artificial
  Synthetic oligonucleotide
cttaactcccggttcgtccgtagcttctacgaggcaactaagaacaaccgtgc

SEQ ID NO: 387589 - DNA, 57 bp, Artificial
  Synthetic oligonucleotide
cttaactctacagaattattccgcgaattgcttgattttacagttgatatatacggg

SEQ ID NO: 387590 - DNA, 58 bp, Artificial
  Synthetic oligonucleotide
cttaactgatgaagtgctaggtttccgaagagaagcaagctcttggaactacttggga

SEQ ID NO: 387591 - DNA, 50 bp, Artificial
  Synthetic oligonucleotide
cttaagaaaatcgccccggtcttttgggtccaagtggaagaatactttag

SEQ ID NO: 387592 - DNA, 54 bp, Artificial
  Synthetic oligonucleotide
cttaagaaacctcaacgtctctctttcctcaagacgaaactcggtaatggagcc

SEQ ID NO: 387593 - DNA, 55 bp, Artificial
  Synthetic oligonucleotide
cttaagaaactgctgccgcgagcacattttgagcgcgctaaagggagcgatgctg

SEQ ID NO: 387594 - DNA, 56 bp, Artificial
  Synthetic oligonucleotide
cttaagaaatgaccagtctgaggctgtaaggtcgtccagattcggaaggttagaaa

SEQ ID NO: 387595 - DNA, 59 bp, Artificial
  Synthetic oligonucleotide
cttaagaacttcatatctaaatactcttaagaaatgaccagtctgaggctgtaatgtcg

SEQ ID NO: 387596 - DNA, 60 bp, Artificial
  Synthetic oligonucleotide
cttaagaagcgtgaaaagtatgtgatgcatggtaaggtacacacgcgtgaaactggcttg

SEQ ID NO: 387597 - DNA, 55 bp, Artificial
  Synthetic oligonucleotide
cttaagacatcaggacatagaaataattccatggttaaggaccactcgggactgg

SEQ ID NO: 387598 - DNA, 56 bp, Artificial
  Synthetic oligonucleotide
cttaagagaggccgcaacgcagcaggtgggacctccacttactacaacttggtagg

SEQ ID NO: 387599 - DNA, 55 bp, Artificial
  Synthetic oligonucleotide
cttaagagcatgtttggcggaaggacgcaagcaccaggactgaccggattgccta

SEQ ID NO: 387600 - DNA, 60 bp, Artificial
  Synthetic oligonucleotide
cttaagagtctgacaagcaaaatgcgcgtgccaagatacgagcaaagagtggctctaaac

SEQ ID NO: 387601 - DNA, 58 bp, Artificial
  Synthetic oligonucleotide
cttaagatataggatgcataaagggtattcacatttgtttaataatgtaacaactaca

SEQ ID NO: 387602 - DNA, 56 bp, Artificial
  Synthetic oligonucleotide
cttaagatcgagtctagatggaaaattctgaaaatgtccgtagtggtcggcaaaac

SEQ ID NO: 387603 - DNA, 56 bp, Artificial
  Synthetic oligonucleotide
cttaagatgaattttctcctgtgggtagtttttgaactggagaatatagacgttga

SEQ ID NO: 387604 - DNA, 60 bp, Artificial
  Synthetic oligonucleotide
cttaagattgaccccggcgagaggatggatccagcagtaagaatggttgcaggtgttgta

SEQ ID NO: 387605 - DNA, 55 bp, Artificial
  Synthetic oligonucleotide
cttaagattttcagctaagctgtactcttgtttcgattggttgcgacgtcaatcc

SEQ ID NO: 387606 - DNA, 59 bp, Artificial
  Synthetic oligonucleotide
cttaagcaagaagcagtaagacactttcctaggccctggttgcaccaattgggacagca

SEQ ID NO: 387607 - DNA, 54 bp, Artificial
  Synthetic oligonucleotide
cttaagcaagaggcttatagctagggggaggcccttggtgtaagtgtttacaaa

SEQ ID NO: 387608 - DNA, 53 bp, Artificial
  Synthetic oligonucleotide
cttaagcagtgcaccaagcagatcttggaagtcacaatactgggcctcagagc

SEQ ID NO: 387609 - DNA, 55 bp, Artificial
  Synthetic oligonucleotide
cttaagcatgctcgtctcggaaagaatatatcgaggcgttccgatcagcgtacgc

SEQ ID NO: 387610 - DNA, 57 bp, Artificial
  Synthetic oligonucleotide
cttaagcgggagcaggtgtatatgaagggtgtcggtttgcatttgggcaatattggg

SEQ ID NO: 387611 - DNA, 55 bp, Artificial
  Synthetic oligonucleotide
cttaagctacatttggggctgtagtgacccaacccaaaatgttggacagttgaaa

SEQ ID NO: 387612 - DNA, 55 bp, Artificial
  Synthetic oligonucleotide
cttaagcttcgtaacgcctatagaggggactataactagctacccagagagcaga

SEQ ID NO: 387613 - DNA, 52 bp, Artificial
  Synthetic oligonucleotide
cttaaggaagaacgtaaaaactctttacgcactccatttctccgaggagctt

SEQ ID NO: 387614 - DNA, 56 bp, Artificial
  Synthetic oligonucleotide
cttaaggaggatcatgctgacctgttcccgtttctgggggccattagacaccccga

SEQ ID NO: 387615 - DNA, 59 bp, Artificial
  Synthetic oligonucleotide
cttaaggattctgagattcctcgtcagtggggtcatgtgggttctatggtaactatgaa

SEQ ID NO: 387616 - DNA, 55 bp, Artificial
  Synthetic oligonucleotide
cttaaggcagtcagcaacgccctaaagaccggccgctacagaaacgaagccggac

SEQ ID NO: 387617 - DNA, 55 bp, Artificial
  Synthetic oligonucleotide
cttaaggcatcatcgatgacgatgtggagttaaagggtatttatcctttgaatct

SEQ ID NO: 387618 - DNA, 59 bp, Artificial
  Synthetic oligonucleotide
cttaaggcccccctgaatactttcttccactactgcatatggctgtctacacagggcac

SEQ ID NO: 387619 - DNA, 59 bp, Artificial
  Synthetic oligonucleotide
cttaaggctagccccggcgtgtgaattcacgttgggcaactagtggtgtcactgtgcgc

SEQ ID NO: 387620 - DNA, 58 bp, Artificial
  Synthetic oligonucleotide
cttaagggatgagtttaataaactatctcaagaaattgcagtttcgcagctaattgac

SEQ ID NO: 387621 - DNA, 55 bp, Artificial
  Synthetic oligonucleotide
cttaagggcgcaaatggcgaagtaccaaaatggcgatcaattaaggacgtgcagt

SEQ ID NO: 387622 - DNA, 50 bp, Artificial
  Synthetic oligonucleotide
cttaagggggagggtggtgtgaagcgtgagattgtccggtgggccgcggt

SEQ ID NO: 387623 - DNA, 57 bp, Artificial
  Synthetic oligonucleotide
cttaagggtttattcaatgagcacgaactgtggagaaatgtatggtccaggtctaac

SEQ ID NO: 387624 - DNA, 55 bp, Artificial
  Synthetic oligonucleotide
cttaagtacgtcgtctacaaaataacccctgatacccttggtgatgagtcgaagc

SEQ ID NO: 387625 - DNA, 55 bp, Artificial
  Synthetic oligonucleotide
cttaagtactcgtcgttctccggatgatgtgttaactgatagtgcgcgagcagct

SEQ ID NO: 387626 - DNA, 60 bp, Artificial
  Synthetic oligonucleotide
cttaagtattagtgctacactaatcacattagtgggtatcgcttatgcagggattgcaac

SEQ ID NO: 387627 - DNA, 60 bp, Artificial
  Synthetic oligonucleotide
cttaagtccgggtgagaacgacatggtgcatcgtctgaagaggttggaggatgagcagaa

SEQ ID NO: 387628 - DNA, 60 bp, Artificial
  Synthetic oligonucleotide
cttaagtcctaaagctgtcgcacagctcagtccgcgactcgaaagtataacgctgtcacc

SEQ ID NO: 387629 - DNA, 56 bp, Artificial
  Synthetic oligonucleotide
cttaagtctaaatgaccacataagtaattatgtggccctaatgacctagcccaaac

SEQ ID NO: 387630 - DNA, 55 bp, Artificial
  Synthetic oligonucleotide
cttaagtgagaatccatgtcaaatagatcttagcacatcttcaattgacggagcc

SEQ ID NO: 387631 - DNA, 54 bp, Artificial
  Synthetic oligonucleotide
cttaagtgatctacgggcagtcgcccgatcccacccagttttagtttcaggccc

SEQ ID NO: 387632 - DNA, 60 bp, Artificial
  Synthetic oligonucleotide
cttaagtggaacgatggtgctagagctgcccctcccgctgctgcccaatcatcttacatg

SEQ ID NO: 387633 - DNA, 58 bp, Artificial
  Synthetic oligonucleotide
cttaagtggattagaaatctcaccgactgtccattgtgggttactagttgttctgatg

SEQ ID NO: 387634 - DNA, 52 bp, Artificial
  Synthetic oligonucleotide
cttaagttactacgtaactttaatatttcgctccgttactcatatgggttgt

SEQ ID NO: 387635 - DNA, 53 bp, Artificial
  Synthetic oligonucleotide
cttaagttgtttgatgtgaaaatgggcaaaatttcaaaggctagaagtttaac

SEQ ID NO: 387636 - DNA, 60 bp, Artificial
  Synthetic oligonucleotide
cttaataattgaaagcgtgcataagagattgagttgacgaatgcatttgacgatcattta

SEQ ID NO: 387637 - DNA, 59 bp, Artificial
  Synthetic oligonucleotide
cttaatagcaccatggtacgcattcgcattgaacaaggggtctggttctggaattatgg

SEQ ID NO: 387638 - DNA, 57 bp, Artificial
  Synthetic oligonucleotide
cttaatagggttaagaatagtttttgctgtgctttctataataaatagagtcaggca

SEQ ID NO: 387639 - DNA, 55 bp, Artificial
  Synthetic oligonucleotide
cttaataggtacgaatgtagagaattcagtgtccggacacgtatataacgcattg

SEQ ID NO: 387640 - DNA, 52 bp, Artificial
  Synthetic oligonucleotide
cttaatagtagaccttcagaaaaaggagcaggcacaaatgtagaagaaccac

SEQ ID NO: 387641 - DNA, 55 bp, Artificial
  Synthetic oligonucleotide
cttaatagtatcttacccctttgaattagatccaggggtgttggcatcacatggg

SEQ ID NO: 387642 - DNA, 60 bp, Artificial
  Synthetic oligonucleotide
cttaatatatcaggcgtgttaagcgctagggttgtatcttctgatcaaccaatggataat

SEQ ID NO: 387643 - DNA, 59 bp, Artificial
  Synthetic oligonucleotide
cttaatatattgagggccgatgctttggaccctgaattgattgcctcggcatatgcgtc

SEQ ID NO: 387644 - DNA, 59 bp, Artificial
  Synthetic oligonucleotide
cttaatatattgagtgccgatgacttagatcctgagttgattgcctcggcatatgcgtc

SEQ ID NO: 387645 - DNA, 51 bp, Artificial
  Synthetic oligonucleotide
cttaatatcagccttggtcgcgaaggagctgatcattgcgtgacgattcca

SEQ ID NO: 387646 - DNA, 60 bp, Artificial
  Synthetic oligonucleotide
cttaatattaatgaatatggagcagatcgagcgagcttcagataaaattgctcaaggagt

SEQ ID NO: 387647 - DNA, 60 bp, Artificial
  Synthetic oligonucleotide
cttaatcagcatgtagctatatcaagctactcagactctataagtaagggtgtgatttca

SEQ ID NO: 387648 - DNA, 55 bp, Artificial
  Synthetic oligonucleotide
cttaatcgtttaggatgtcccgttcatataagtaaatggtggtgcgactttcacc

SEQ ID NO: 387649 - DNA, 60 bp, Artificial
  Synthetic oligonucleotide
cttaatcttgtgtcacgtatagtgacaataacacttccagttgcgttgtatggcacttgg

SEQ ID NO: 387650 - DNA, 55 bp, Artificial
  Synthetic oligonucleotide
cttaatctttacgatggttccaagataagctccatggtaccagatatcccacccc

SEQ ID NO: 387651 - DNA, 55 bp, Artificial
  Synthetic oligonucleotide
cttaatgaaccgactcgtgcgagtgcagctctaatgtctcttgtatccatgcccc

SEQ ID NO: 387652 - DNA, 60 bp, Artificial
  Synthetic oligonucleotide
cttaatgacaagcattccaatggcacaatgaaggaccgaagtccatataggactttgatg

SEQ ID NO: 387653 - DNA, 58 bp, Artificial
  Synthetic oligonucleotide
cttaatgactattcctttatgtttgtcacatagatgttcaaacctcttccaagtgagt

SEQ ID NO: 387654 - DNA, 58 bp, Artificial
  Synthetic oligonucleotide
cttaatgactctaagagcctctgacttacttcctgcgttaagtgctgcggcgtaaacg

SEQ ID NO: 387655 - DNA, 58 bp, Artificial
  Synthetic oligonucleotide
cttaatgagattccattcgatataaataaattcgctgaacttgtaacggactctccag

SEQ ID NO: 387656 - DNA, 60 bp, Artificial
  Synthetic oligonucleotide
cttaatgataacatagcggcacagatgagcagaccttaagttatacaaacccgctcgcac

SEQ ID NO: 387657 - DNA, 52 bp, Artificial
  Synthetic oligonucleotide
cttaatgattgttggttatgttaatcgcgaggtttatcataatcatgtcatc

SEQ ID NO: 387658 - DNA, 60 bp, Artificial
  Synthetic oligonucleotide
cttaatgcgtcagacccgtcatctttgcggttaatgacttccgctgatctatctacgctg

SEQ ID NO: 387659 - DNA, 57 bp, Artificial
  Synthetic oligonucleotide
cttaatgcgtttcagtcgagggtcaagatttacttcatacaccacgcctgcattaca

SEQ ID NO: 387660 - DNA, 57 bp, Artificial
  Synthetic oligonucleotide
cttaatggaacttggttttgtcagaataagtttgaggattgtgtatacgatcacagc

SEQ ID NO: 387661 - DNA, 60 bp, Artificial
  Synthetic oligonucleotide
cttaatggcgcaacacatgcagttcgtagctgcttgtgtaactgggagagtgccactcct

SEQ ID NO: 387662 - DNA, 57 bp, Artificial
  Synthetic oligonucleotide
cttaatggcggtgaagaaaaggcttaggttctcgaaaccacatgtcgagtgcgcaaa

SEQ ID NO: 387663 - DNA, 53 bp, Artificial
  Synthetic oligonucleotide
cttaatgtcagatgggaaaccactggcgcacaccccctgtggacctggtggcc

SEQ ID NO: 387664 - DNA, 52 bp, Artificial
  Synthetic oligonucleotide
cttaatgtcctcggacttagtcgtcaccccgtcgggtttcggtatgaacttg

SEQ ID NO: 387665 - DNA, 50 bp, Artificial
  Synthetic oligonucleotide
cttaattacatcgacactacactcgatagaattaccattactgcacacgg

SEQ ID NO: 387666 - DNA, 52 bp, Artificial
  Synthetic oligonucleotide
cttaattatgccagaaattatatccctaatcttggaaaaaccctaggacccc

SEQ ID NO: 387667 - DNA, 57 bp, Artificial
  Synthetic oligonucleotide
cttaattattctgagcgcgaatttccatttttcgaatcacataataagttcacattt

SEQ ID NO: 387668 - DNA, 59 bp, Artificial
  Synthetic oligonucleotide
cttaattattgcatggggaccattaaatagacttccgcaccaagttatgatccacaaca

SEQ ID NO: 387669 - DNA, 60 bp, Artificial
  Synthetic oligonucleotide
cttaattcagctgcgttctattacagagtctgaaatagcttagactaagactgattgatg

SEQ ID NO: 387670 - DNA, 57 bp, Artificial
  Synthetic oligonucleotide
cttaattcattacggttcagattcaatttgtctgtggaagagccaccgttttcaata

SEQ ID NO: 387671 - DNA, 55 bp, Artificial
  Synthetic oligonucleotide
cttaattccgtctggcttaaattcaagctttagagtacgatggttcactcttgcg

SEQ ID NO: 387672 - DNA, 59 bp, Artificial
  Synthetic oligonucleotide
cttaattcctctgactcctctaactctgtacgtgttgaggatgtaacgaacacagcgga

SEQ ID NO: 387673 - DNA, 56 bp, Artificial
  Synthetic oligonucleotide
cttaattccttgacattattacactgctttctgaaacatgctcctagtgacgccat

SEQ ID NO: 387674 - DNA, 57 bp, Artificial
  Synthetic oligonucleotide
cttaattctagcacagacagttttgtagcgggaataagtgtttaaatctctgtcctc

SEQ ID NO: 387675 - DNA, 58 bp, Artificial
  Synthetic oligonucleotide
cttaattctattgggcctgttagatgtggaggcggatctgtcatttttctatcccatt

SEQ ID NO: 387676 - DNA, 57 bp, Artificial
  Synthetic oligonucleotide
cttaattgcaggctgtgggctcaaattgaaggtcgattaccgccctattgggctgta

SEQ ID NO: 387677 - DNA, 57 bp, Artificial
  Synthetic oligonucleotide
cttaattgcccactcaggtttaaagagatcaaaatactggtcactacactcctataa

SEQ ID NO: 387678 - DNA, 60 bp, Artificial
  Synthetic oligonucleotide
cttaattggcgctgatattgacagtgacacaggacagtgcctttatacagtcacattcag

SEQ ID NO: 387679 - DNA, 60 bp, Artificial
  Synthetic oligonucleotide
cttaatttagtcctgtatgcggccactgtacgggctttgtacgcagcacttatgtgcgga

SEQ ID NO: 387680 - DNA, 58 bp, Artificial
  Synthetic oligonucleotide
cttaatttatgtatgattggatatggaagcgataaagtgagagaggtgatgaatgagg

SEQ ID NO: 387681 - DNA, 56 bp, Artificial
  Synthetic oligonucleotide
cttacaaaaaattcaaccttgtcgcaagagtgttatactctttgttgctagaatgt

SEQ ID NO: 387682 - DNA, 55 bp, Artificial
  Synthetic oligonucleotide
cttacaaaagtgtttgaaatcccagacgtcattgatccgtccatcatatactcag

SEQ ID NO: 387683 - DNA, 56 bp, Artificial
  Synthetic oligonucleotide
cttacaaaatgcggtaaacattatgtggattagagaccttttagtagtggaatcca

SEQ ID NO: 387684 - DNA, 55 bp, Artificial
  Synthetic oligonucleotide
cttacaaagccatcaattttccaccctacgcagggtatgacggagcagcgtactt

SEQ ID NO: 387685 - DNA, 55 bp, Artificial
  Synthetic oligonucleotide
cttacaaatttctggtcacattgacacgactgctctaaccagcataggtgccgta

SEQ ID NO: 387686 - DNA, 57 bp, Artificial
  Synthetic oligonucleotide
cttacaacaacactggaactcaaccaatcctttacttctggggtgtgcaccatcctc

SEQ ID NO: 387687 - DNA, 60 bp, Artificial
  Synthetic oligonucleotide
cttacaacatactgctggcttggactgacatttaatgttcaatcaaacacgtaagtgtga

SEQ ID NO: 387688 - DNA, 60 bp, Artificial
  Synthetic oligonucleotide
cttacaacatcacgagctcgaatcagtaccagtatttcgcagcgatgtgggcagagccca

SEQ ID NO: 387689 - DNA, 55 bp, Artificial
  Synthetic oligonucleotide
cttacaacattttgcagatacaggagtttcgggtatcgcaattggggtatcaaac

SEQ ID NO: 387690 - DNA, 55 bp, Artificial
  Synthetic oligonucleotide
cttacaacgatggtgttacatctcttataaacgctttaaggcaaattttggacac

SEQ ID NO: 387691 - DNA, 50 bp, Artificial
  Synthetic oligonucleotide
cttacaacgcggaacttcttgtcgcgctagagaatcaacacacaattgac

SEQ ID NO: 387692 - DNA, 59 bp, Artificial
  Synthetic oligonucleotide
cttacaacgtgtttttacagtagcttccattagaagcatgctgattaagtgaggactag

SEQ ID NO: 387693 - DNA, 56 bp, Artificial
  Synthetic oligonucleotide
cttacaactactatcatacgaagcaacagaaaacgaacttgttaagaaagctattc

SEQ ID NO: 387694 - DNA, 55 bp, Artificial
  Synthetic oligonucleotide
cttacaactatattcacaggaccctcatctttgagtatgagcagtatgaactccc

SEQ ID NO: 387695 - DNA, 55 bp, Artificial
  Synthetic oligonucleotide
cttacaagcggtcttttctttcacgggccctaaagttgtcgctgctagagccgac

SEQ ID NO: 387696 - DNA, 52 bp, Artificial
  Synthetic oligonucleotide
cttacaatacaacactgctaaacggaccagccttccagatggtatgccccat

SEQ ID NO: 387697 - DNA, 56 bp, Artificial
  Synthetic oligonucleotide
cttacaatatttggcattaacagcattagtagctccaaaaaagacaaagccaccgt

SEQ ID NO: 387698 - DNA, 60 bp, Artificial
  Synthetic oligonucleotide
cttacaatgcagatgatccatgtgccaaccagacgtacactttgcttgactccaaaacac

SEQ ID NO: 387699 - DNA, 56 bp, Artificial
  Synthetic oligonucleotide
cttacaattcctaattgtacaggtatttgtagtcacatcaagtttatggtttacac

SEQ ID NO: 387700 - DNA, 60 bp, Artificial
  Synthetic oligonucleotide
cttacaattcgagaatttggtggtcaaatccgtatccatgcttgcgcggcacgttgattg

SEQ ID NO: 387701 - DNA, 60 bp, Artificial
  Synthetic oligonucleotide
cttacacaaagacactgttcagtgtctatatgactagactaattaaaaatgcttgctttg

SEQ ID NO: 387702 - DNA, 55 bp, Artificial
  Synthetic oligonucleotide
cttacacacacgcccggttcgagatcccaaagaatgtggcgcaaatgtacgcggg

SEQ ID NO: 387703 - DNA, 54 bp, Artificial
  Synthetic oligonucleotide
cttacacaccgtcagcagatgagaacacttgttcctcacgatcggcatcacata

SEQ ID NO: 387704 - DNA, 60 bp, Artificial
  Synthetic oligonucleotide
cttacacactattgctatcctttactaacatcaggtactggtgttccaccatcagctcca

SEQ ID NO: 387705 - DNA, 50 bp, Artificial
  Synthetic oligonucleotide
cttacacaggcctgtccaaagacatcctttgaaccaattcccatacattt

SEQ ID NO: 387706 - DNA, 56 bp, Artificial
  Synthetic oligonucleotide
cttacacatcgatagtgaacacacaatccacccgaataacacacgggcgaacgtac

SEQ ID NO: 387707 - DNA, 55 bp, Artificial
  Synthetic oligonucleotide
cttacaccaacaccgtgtttaggaacacgctcttagagactcgaccctcctctcg

SEQ ID NO: 387708 - DNA, 55 bp, Artificial
  Synthetic oligonucleotide
cttacacccacacccgcttcaacattccagagggaacggcccaaatctacgctgg

SEQ ID NO: 387709 - DNA, 56 bp, Artificial
  Synthetic oligonucleotide
cttacacccggacggttccgtacaatagtatgtggcttatttcctacacagataca

SEQ ID NO: 387710 - DNA, 60 bp, Artificial
  Synthetic oligonucleotide
cttacacctaaagaaacaacacactgtttgaagacatgcgtcttccagggagatatgaga

SEQ ID NO: 387711 - DNA, 60 bp, Artificial
  Synthetic oligonucleotide
cttacacctgatgtatgtgccctggcggccggtcttgagtcctgggatatcccagaatcc

SEQ ID NO: 387712 - DNA, 59 bp, Artificial
  Synthetic oligonucleotide
cttacacgagcacggggggagatgtaaagacggagtttctgcatttgatcgatcacctc

SEQ ID NO: 387713 - DNA, 56 bp, Artificial
  Synthetic oligonucleotide
cttacacgcacagaaaaacgtatcgtctggaagacgctagctggtgacccttggat

SEQ ID NO: 387714 - DNA, 59 bp, Artificial
  Synthetic oligonucleotide
cttacacgtgacctctgaatgctccgcacatgttaggattctcttgccgacgagtgtct

SEQ ID NO: 387715 - DNA, 60 bp, Artificial
  Synthetic oligonucleotide
cttacacttttggaatgtagatttatcagaacgcctctctttagatttagatcaatatgc

SEQ ID NO: 387716 - DNA, 55 bp, Artificial
  Synthetic oligonucleotide
cttacagaccaccaaatgcccctatcttatcaacacttccggaaactactgttgt

SEQ ID NO: 387717 - DNA, 60 bp, Artificial
  Synthetic oligonucleotide
cttacagaggaatcagcaatagcctttgaatatgcattattagcatcagaaaatgcaaat

SEQ ID NO: 387718 - DNA, 60 bp, Artificial
  Synthetic oligonucleotide
cttacagcactcagattagctaatttagcgttcgtgatagccatcggtgctacaattgga

SEQ ID NO: 387719 - DNA, 55 bp, Artificial
  Synthetic oligonucleotide
cttacagcagagcatgtgattcagggatcggatgtagcaacactcaaaactggca

SEQ ID NO: 387720 - DNA, 59 bp, Artificial
  Synthetic oligonucleotide
cttacagccgatgctctttaagactagcatccctaaattatgcaaggccgagtcttaaa

SEQ ID NO: 387721 - DNA, 60 bp, Artificial
  Synthetic oligonucleotide
cttacagctaatcctacctgagggtggcactctgtgttatgtaatggaatgtgcaatctc

SEQ ID NO: 387722 - DNA, 60 bp, Artificial
  Synthetic oligonucleotide
cttacagctagaaagaatgatgagcagtgaagagctggaaagatccgttattgagagcgt

SEQ ID NO: 387723 - DNA, 56 bp, Artificial
  Synthetic oligonucleotide
cttacaggcaagccaaacttgtttactagatctcgagcaggacaagacgcaaagga

SEQ ID NO: 387724 - DNA, 55 bp, Artificial
  Synthetic oligonucleotide
cttacaggggatagctactaaagattataggggcgcagagattgctgatccagag

SEQ ID NO: 387725 - DNA, 60 bp, Artificial
  Synthetic oligonucleotide
cttacaggtacataaagtccaaaaatgatccttcagatgcattgatggtgaatcctggtg

SEQ ID NO: 387726 - DNA, 50 bp, Artificial
  Synthetic oligonucleotide
cttacagtgatgggttgacatacattgacgtgcttgagcgaattcggtcg

SEQ ID NO: 387727 - DNA, 55 bp, Artificial
  Synthetic oligonucleotide
cttacagtgggacaagcaaagcatgttcagattcattctacagaagcatgagatg

SEQ ID NO: 387728 - DNA, 55 bp, Artificial
  Synthetic oligonucleotide
cttacagttataggcgaaagcttgttaatcctgctaatcaagaagaaacactccc

SEQ ID NO: 387729 - DNA, 59 bp, Artificial
  Synthetic oligonucleotide
cttacagttgatggcagtacatgcgttattgatggccgtccttcgttctacgtgccccc

SEQ ID NO: 387730 - DNA, 57 bp, Artificial
  Synthetic oligonucleotide
cttacagtttgaagtgttatggtatacctccttagatagatcgctagacacggtccc

SEQ ID NO: 387731 - DNA, 59 bp, Artificial
  Synthetic oligonucleotide
cttacatccgttatatacaggtatggagcatcgctttcgtggaatccctcgtggtctta

SEQ ID NO: 387732 - DNA, 60 bp, Artificial
  Synthetic oligonucleotide
cttacatctgatggcgttgaggcgacacaagagcgctgggaggagtggaaatttgagact

SEQ ID NO: 387733 - DNA, 55 bp, Artificial
  Synthetic oligonucleotide
cttacatctgcattatccatgaacgactttacaacattttcccgattttctccac

SEQ ID NO: 387734 - DNA, 56 bp, Artificial
  Synthetic oligonucleotide
cttacatcttgtaccagcagaaatcaggcaactgtgacacatatggttctaacaca

SEQ ID NO: 387735 - DNA, 52 bp, Artificial
  Synthetic oligonucleotide
cttacatgaaaacctgaatcttgatcattgtcaacaaaagccattcgtgaat

SEQ ID NO: 387736 - DNA, 59 bp, Artificial
  Synthetic oligonucleotide
cttacatgtgaaacctgctctggttcgctctggcgaacctccaaagatcagaaccgtgt

SEQ ID NO: 387737 - DNA, 56 bp, Artificial
  Synthetic oligonucleotide
cttacattaatatgtcgtgcgatggcacgaaaaacacactagcaatacaggggggt

SEQ ID NO: 387738 - DNA, 56 bp, Artificial
  Synthetic oligonucleotide
cttacattagtttcatcgacggacggattcccatgtgcgttaatcacctgggttgg

SEQ ID NO: 387739 - DNA, 60 bp, Artificial
  Synthetic oligonucleotide
cttacattatgcatatccgggctgcaaaggcttacagtaaggctgggaagcttaatgtaa

SEQ ID NO: 387740 - DNA, 60 bp, Artificial
  Synthetic oligonucleotide
cttaccaacatgttagacctgtgctcaaggaatccctaatcaactgtccttatgcgctta

SEQ ID NO: 387741 - DNA, 55 bp, Artificial
  Synthetic oligonucleotide
cttaccaatatgcgaaaccttgacggaaagcccataagtgaaggtagcaacttgg

SEQ ID NO: 387742 - DNA, 60 bp, Artificial
  Synthetic oligonucleotide
cttaccaccagtggaagtctactttgtctacgtgttactatgctgcgttagcatttgcag

SEQ ID NO: 387743 - DNA, 55 bp, Artificial
  Synthetic oligonucleotide
cttaccaccttccgcctacttggtcgttagcgctgccttgggcactcctgttggg

SEQ ID NO: 387744 - DNA, 56 bp, Artificial
  Synthetic oligonucleotide
cttaccactatccgggaactgaaagaagagtcagtgaagaacaacaccggactcac

SEQ ID NO: 387745 - DNA, 55 bp, Artificial
  Synthetic oligonucleotide
cttaccagctgaagtgccagctgaacaagacacagaggaggagcttatccaaggc

SEQ ID NO: 387746 - DNA, 55 bp, Artificial
  Synthetic oligonucleotide
cttaccagtgcattaaaacgggagaggagttggagtcatgaccaatttagctacg

SEQ ID NO: 387747 - DNA, 52 bp, Artificial
  Synthetic oligonucleotide
cttaccataaagcaccggtgtgtgggtttcaacttaaaaccctctagtctta

SEQ ID NO: 387748 - DNA, 55 bp, Artificial
  Synthetic oligonucleotide
cttaccataacacctcgtcccttcgccggtcttttgatatataagagtggttcca

SEQ ID NO: 387749 - DNA, 55 bp, Artificial
  Synthetic oligonucleotide
cttaccatgttccagaggatagctcaatgggtgacacagcatatacaccggctcc

SEQ ID NO: 387750 - DNA, 58 bp, Artificial
  Synthetic oligonucleotide
cttaccattaatactgataagaaacttacagttgactttgacacaactcaggatcttc

SEQ ID NO: 387751 - DNA, 58 bp, Artificial
  Synthetic oligonucleotide
cttaccattgaaagactagcaactttgaaagcaactagcaactttgatgagaactggt

SEQ ID NO: 387752 - DNA, 58 bp, Artificial
  Synthetic oligonucleotide
cttaccattttaggaggaaccaaatatatgatgtactcacgtagcgagcgtagcaggg

SEQ ID NO: 387753 - DNA, 57 bp, Artificial
  Synthetic oligonucleotide
cttacccaaccggatgatgtttccgtcatgcttagaaacgcgtgaaggcgggtgcag

SEQ ID NO: 387754 - DNA, 60 bp, Artificial
  Synthetic oligonucleotide
cttacccaactacttaacgcggtcaatgccgcttcatagatctgagtcaaacctatcaga

SEQ ID NO: 387755 - DNA, 55 bp, Artificial
  Synthetic oligonucleotide
cttacccaatatgatgagcgtcttaataaacgcattggctctatgtcgtaaaccc

SEQ ID NO: 387756 - DNA, 53 bp, Artificial
  Synthetic oligonucleotide
cttaccccagaatattggctacgttacgcttatcgtcagggttgtggttaccc

SEQ ID NO: 387757 - DNA, 57 bp, Artificial
  Synthetic oligonucleotide
cttaccccgtaacatatctagaagaatgtgcataacggaccaataggtggtggcaac

SEQ ID NO: 387758 - DNA, 52 bp, Artificial
  Synthetic oligonucleotide
cttacccgacctggtagatgaacttacatcgggttacgcagataactcccgc

SEQ ID NO: 387759 - DNA, 56 bp, Artificial
  Synthetic oligonucleotide
cttacccgacgagaatgtgtcttcaatattggtaattagcgaagttaataaacaca

SEQ ID NO: 387760 - DNA, 57 bp, Artificial
  Synthetic oligonucleotide
cttacccgctggatggctccactacggactttaatattccgttcgagtatctggcgc

SEQ ID NO: 387761 - DNA, 54 bp, Artificial
  Synthetic oligonucleotide
cttacccgtcctcaagcaccgtgtacgtcaggaatgtttatgggcccgcgttgg

SEQ ID NO: 387762 - DNA, 54 bp, Artificial
  Synthetic oligonucleotide
cttaccctataaaaagtccttccttctatcaaaccaacagaatctatgtcttct

SEQ ID NO: 387763 - DNA, 55 bp, Artificial
  Synthetic oligonucleotide
cttaccctgaggtaagccgagtttcttacaaggactcgaggtactttatatcatc

SEQ ID NO: 387764 - DNA, 55 bp, Artificial
  Synthetic oligonucleotide
cttacccttacctccatctggggtgcgtggccatctgtgtgatacctcacggcag

SEQ ID NO: 387765 - DNA, 55 bp, Artificial
  Synthetic oligonucleotide
cttaccgcactaatgtcgcttacgaaatactacctaatttgcctactcgtttagc

SEQ ID NO: 387766 - DNA, 60 bp, Artificial
  Synthetic oligonucleotide
cttaccgcacttaggaatgcagcccccctcatcctcacactctactcctggaatcagtta

SEQ ID NO: 387767 - DNA, 55 bp, Artificial
  Synthetic oligonucleotide
cttaccgcattatcaacttcgtcattaaagcgtttcgaaacgcatgacttaaact

SEQ ID NO: 387768 - DNA, 53 bp, Artificial
  Synthetic oligonucleotide
cttaccggatggccctgacagacaactgctctaggtcttacaaagtcttgaaa

SEQ ID NO: 387769 - DNA, 57 bp, Artificial
  Synthetic oligonucleotide
cttaccggcacctatgtttataatcatctcactccccttcgggactgggcgcataac

SEQ ID NO: 387770 - DNA, 55 bp, Artificial
  Synthetic oligonucleotide
cttaccggctatgcacaatggtttaccgacgcatatctacaaccaccggtaaacg

SEQ ID NO: 387771 - DNA, 57 bp, Artificial
  Synthetic oligonucleotide
cttaccgtgtacagggcaattccctctctatgcaataccagacaaattaggcccttg

SEQ ID NO: 387772 - DNA, 57 bp, Artificial
  Synthetic oligonucleotide
cttacctactcaagactgggcgaattgtaaccccatcaggatgtgtgttcaatcttg

SEQ ID NO: 387773 - DNA, 59 bp, Artificial
  Synthetic oligonucleotide
cttacctagagatttgatgtacgctagcgaacaagctttacgacgagcgaccgagcaac

SEQ ID NO: 387774 - DNA, 55 bp, Artificial
  Synthetic oligonucleotide
cttacctcagttgattacatccccttcttgattataagatctcatctcgtatgcg

SEQ ID NO: 387775 - DNA, 55 bp, Artificial
  Synthetic oligonucleotide
cttacctgacggtcggatgtacagaagacactttgctggaataccttccggcttg

SEQ ID NO: 387776 - DNA, 55 bp, Artificial
  Synthetic oligonucleotide
cttacctgtacggcgcacgattgacgaatggcctgaagattggggtgcatcgcaa

SEQ ID NO: 387777 - DNA, 55 bp, Artificial
  Synthetic oligonucleotide
cttaccttcactgtttactcagatctacttgcattcgtatcggctgatacagtag

SEQ ID NO: 387778 - DNA, 57 bp, Artificial
  Synthetic oligonucleotide
cttaccttcttcctgttggagaacgacttccccacaggaccagagacactcaggcag

SEQ ID NO: 387779 - DNA, 60 bp, Artificial
  Synthetic oligonucleotide
cttacctttcagctatgatacaaacgagaaaggtggattatcatatgcgacgattaagta

SEQ ID NO: 387780 - DNA, 54 bp, Artificial
  Synthetic oligonucleotide
cttacctttcggtaagccaggttcttacaaggatctgaggtactttatatcacc

SEQ ID NO: 387781 - DNA, 52 bp, Artificial
  Synthetic oligonucleotide
cttacctttgtatgttaatgacttggtagatatatggtatgacggtaaactg

SEQ ID NO: 387782 - DNA, 60 bp, Artificial
  Synthetic oligonucleotide
cttacgaagactcatgcccattccgtaatgtaccacttggtcttgagtgcagttgatcca

SEQ ID NO: 387783 - DNA, 55 bp, Artificial
  Synthetic oligonucleotide
cttacgaagctgtcgtaagtaaacctgacaattcaggcaaccccccaccacctga

SEQ ID NO: 387784 - DNA, 59 bp, Artificial
  Synthetic oligonucleotide
cttacgaagtgcgtaacgtgtccgggatataccatgtcacgaacgactgctccaactca

SEQ ID NO: 387785 - DNA, 59 bp, Artificial
  Synthetic oligonucleotide
cttacgaatggagtaagcaacgtgtgaaaagcgcatactctagaataggtagtagatta

SEQ ID NO: 387786 - DNA, 60 bp, Artificial
  Synthetic oligonucleotide
cttacgacaatgactatcgaacaccactatccaattcctagcgatgaactttctgctaag

SEQ ID NO: 387787 - DNA, 58 bp, Artificial
  Synthetic oligonucleotide
cttacgactgcctaactcaccacaacttagaaatggttgcttatgaactcaggaataa

SEQ ID NO: 387788 - DNA, 52 bp, Artificial
  Synthetic oligonucleotide
cttacgagacccaacttcataataacaccgtgtccaacctagcgaggatatg

SEQ ID NO: 387789 - DNA, 59 bp, Artificial
  Synthetic oligonucleotide
cttacgagtacaagactcaacacatttcgatcgcaaaatagacatttactataacacca

SEQ ID NO: 387790 - DNA, 55 bp, Artificial
  Synthetic oligonucleotide
cttacgatcaattctcagctcagttaagaaactggcgcgaagctaggttaaacat

SEQ ID NO: 387791 - DNA, 60 bp, Artificial
  Synthetic oligonucleotide
cttacgcacatgcgcagcgctacatacgttattgtggtatcgattcgcgtgagttaatca

SEQ ID NO: 387792 - DNA, 55 bp, Artificial
  Synthetic oligonucleotide
cttacgccgatcacgccagaggagctgcgacgtcggcagagccttctcgagctct

SEQ ID NO: 387793 - DNA, 55 bp, Artificial
  Synthetic oligonucleotide
cttacgccgtgtacctgtggcgcgtctgacttgtacttagtcaccaggcatgcag

SEQ ID NO: 387794 - DNA, 56 bp, Artificial
  Synthetic oligonucleotide
cttacgcctaggggaaccgcttcgaacaggtgaattgataacgggcatagcaacag

SEQ ID NO: 387795 - DNA, 53 bp, Artificial
  Synthetic oligonucleotide
cttacggagacaaggcttatgttggcagtgtacaaggtacacttgaccgaaaa

SEQ ID NO: 387796 - DNA, 59 bp, Artificial
  Synthetic oligonucleotide
cttacggcagagacaagtagcattaggaaacatggagacaaaagaatcaaaggcaatac

SEQ ID NO: 387797 - DNA, 55 bp, Artificial
  Synthetic oligonucleotide
cttacggccaatgacttacatggcccgagaggtgcatccggagtactacaaagac

SEQ ID NO: 387798 - DNA, 55 bp, Artificial
  Synthetic oligonucleotide
cttacggcgtcgcacgaattacagcttgtggctggagatgttgttgtggcctgct

SEQ ID NO: 387799 - DNA, 57 bp, Artificial
  Synthetic oligonucleotide
cttacggctaaaatggtcagtcatgccccaaaggcatgccgacaccctacagggttg

SEQ ID NO: 387800 - DNA, 56 bp, Artificial
  Synthetic oligonucleotide
cttacggctaaaatggttcagtcgtggagaaatccacgccagtagacttacaagtc

SEQ ID NO: 387801 - DNA, 55 bp, Artificial
  Synthetic oligonucleotide
cttacgggcaatctccaaacattaaaaataagggtgcatgatgggtacgaggaat

SEQ ID NO: 387802 - DNA, 53 bp, Artificial
  Synthetic oligonucleotide
cttacggggagcaggacacacagttattaataaccggacaaccgacgtaaatc

SEQ ID NO: 387803 - DNA, 57 bp, Artificial
  Synthetic oligonucleotide
cttacgggttttgaatctcacttcctgaacgattgttcattctccaacggagcctca

SEQ ID NO: 387804 - DNA, 53 bp, Artificial
  Synthetic oligonucleotide
cttacggtaaaccgtacgtacatccttttcgttggtgagaggagccatttcac

SEQ ID NO: 387805 - DNA, 50 bp, Artificial
  Synthetic oligonucleotide
cttacggtctttaccacgatgagtagcatagaagtcctggcacagcttaa

SEQ ID NO: 387806 - DNA, 57 bp, Artificial
  Synthetic oligonucleotide
cttacggtgacgacatcacggtgtttgataagttgagggaatttgtagttgtgccta

SEQ ID NO: 387807 - DNA, 55 bp, Artificial
  Synthetic oligonucleotide
cttacggtgactccgttgcatttaagcgtgttgacatatccgatactgctctagt

SEQ ID NO: 387808 - DNA, 60 bp, Artificial
  Synthetic oligonucleotide
cttacgtagcaattgtcaacctaaatatgtgaaggattgtgcaaatatgctaaggctgta

SEQ ID NO: 387809 - DNA, 54 bp, Artificial
  Synthetic oligonucleotide
cttacgtagttttggatgagagcaaccccaccccgagctacaagcctgtaaccg

SEQ ID NO: 387810 - DNA, 55 bp, Artificial
  Synthetic oligonucleotide
cttacgtcatcttacccactctagaaggtgaagttaatggtagggttgaagctgt

SEQ ID NO: 387811 - DNA, 60 bp, Artificial
  Synthetic oligonucleotide
cttacgtctatatagattactgggatgattctcaagcgtttagaaatatggtgtatgtta

SEQ ID NO: 387812 - DNA, 60 bp, Artificial
  Synthetic oligonucleotide
cttacgtgaagaagtagtgcgattgataattgcattgacgggcgacaatggaacatcatt

SEQ ID NO: 387813 - DNA, 51 bp, Artificial
  Synthetic oligonucleotide
cttacgtgggttatagaagcggtacgaaaatttaaggttgtgttcgacgta

SEQ ID NO: 387814 - DNA, 60 bp, Artificial
  Synthetic oligonucleotide
cttacgtgtctgcgcgattatggacagctgttcggctggaattatgacatcgactggtct

SEQ ID NO: 387815 - DNA, 60 bp, Artificial
  Synthetic oligonucleotide
cttacgttcagttgattgtcccacgaaggaactacagagctagatctatcacgactaata

SEQ ID NO: 387816 - DNA, 54 bp, Artificial
  Synthetic oligonucleotide
cttacgtttggagtcatcgttcataaaataaaacggatcgctcaacgtccaccc

SEQ ID NO: 387817 - DNA, 60 bp, Artificial
  Synthetic oligonucleotide
cttactaaacgtcgacagtttctatctgtaatgatagtaaagcatagctatggttggcaa

SEQ ID NO: 387818 - DNA, 59 bp, Artificial
  Synthetic oligonucleotide
cttactaactgcgaggggagtacacactataaatacttaatcatccagaacacgacatg

SEQ ID NO: 387819 - DNA, 59 bp, Artificial
  Synthetic oligonucleotide
cttactacacaggggagcatgcaaaagccataggaaattgcccaatatgggtgaaaaca

SEQ ID NO: 387820 - DNA, 58 bp, Artificial
  Synthetic oligonucleotide
cttactaccatccagcagcactctaagatattttatgtcctccccctccgtggcaaac

SEQ ID NO: 387821 - DNA, 56 bp, Artificial
  Synthetic oligonucleotide
cttactacgtgtcttaccgttataacaagtctatggtactgaatacagactacaag

SEQ ID NO: 387822 - DNA, 60 bp, Artificial
  Synthetic oligonucleotide
cttactcaacccgtgtagctgtccccactgtccgcgtcacaaaatctcgcatgtgggcga

SEQ ID NO: 387823 - DNA, 57 bp, Artificial
  Synthetic oligonucleotide
cttactcaaggttccctactcaatgacaaacactctaacggcacagtgaaagaccga

SEQ ID NO: 387824 - DNA, 55 bp, Artificial
  Synthetic oligonucleotide
cttactcaatttccattaggacgcaaatttgttatgcaggctggattacgtccta

SEQ ID NO: 387825 - DNA, 53 bp, Artificial
  Synthetic oligonucleotide
cttactcaccctcccacaacccttctacgtgcagacccacggaatcccggacc

SEQ ID NO: 387826 - DNA, 55 bp, Artificial
  Synthetic oligonucleotide
cttactcacgttgtcggctaccgaagcagctgcaatacagtctctgaactcaagg

SEQ ID NO: 387827 - DNA, 59 bp, Artificial
  Synthetic oligonucleotide
cttactcattgttacgacgagatcgtcgctccaaatggatgtagttgaatacggattgg

SEQ ID NO: 387828 - DNA, 52 bp, Artificial
  Synthetic oligonucleotide
cttactcccctccttcgataccctccttgtggaccccctccggctgtccgtc

SEQ ID NO: 387829 - DNA, 55 bp, Artificial
  Synthetic oligonucleotide
cttactccctttccatacgtgactgggatgaggtcagaggtgataatgtgaagca

SEQ ID NO: 387830 - DNA, 55 bp, Artificial
  Synthetic oligonucleotide
cttactccggggtagtctccgtgtcttgccgacgcaaggaaacaggctccgattg

SEQ ID NO: 387831 - DNA, 58 bp, Artificial
  Synthetic oligonucleotide
cttactcctggataaacatgtgccgtgaacaacgggagatacgcaccacctcaatcgt

SEQ ID NO: 387832 - DNA, 60 bp, Artificial
  Synthetic oligonucleotide
cttactcggatgctgcttcgctcgctaagaggacaaacagtgatactataggagtgtcgc

SEQ ID NO: 387833 - DNA, 55 bp, Artificial
  Synthetic oligonucleotide
cttactcgtacaaagttcgctacacactggctgtgggcgacaacagagtgctaga

SEQ ID NO: 387834 - DNA, 53 bp, Artificial
  Synthetic oligonucleotide
cttactctaatgataccccgttcctcaatccaaacaccgagactgaacaatgt

SEQ ID NO: 387835 - DNA, 57 bp, Artificial
  Synthetic oligonucleotide
cttactctggtgcgcctaagcaggccctaaaaaaacccgtgctgagaacagccacag

SEQ ID NO: 387836 - DNA, 60 bp, Artificial
  Synthetic oligonucleotide
cttactctgttgagccaagtacagcctggtctggttcccatatgtactgatcgtgttgac

SEQ ID NO: 387837 - DNA, 60 bp, Artificial
  Synthetic oligonucleotide
cttactcttagtggtgtagacatgaaagtgatagctttaagacgcgacctggtctcatca

SEQ ID NO: 387838 - DNA, 54 bp, Artificial
  Synthetic oligonucleotide
cttactgacaaaaggaaaacctaattaccacagggccctattggccacaatcca

SEQ ID NO: 387839 - DNA, 58 bp, Artificial
  Synthetic oligonucleotide
cttactgagtatgcatgttaaaccaactatggatatggatactaaatttaagcaccct

SEQ ID NO: 387840 - DNA, 60 bp, Artificial
  Synthetic oligonucleotide
cttactgatggagtgtggagctcctagatctcaaggacaacggagtgacctgtctactgc

SEQ ID NO: 387841 - DNA, 60 bp, Artificial
  Synthetic oligonucleotide
cttactgatggcttgttgttctcgcctagccatctccagggacagtgtatggaggattga

SEQ ID NO: 387842 - DNA, 55 bp, Artificial
  Synthetic oligonucleotide
cttactgcatcacgtgagctgcagcttgtggctggagatgttgtcgtagcctgct

SEQ ID NO: 387843 - DNA, 60 bp, Artificial
  Synthetic oligonucleotide
cttactgcctgcgttaagtgctgcggcgtaagcgtcgttggctgtctgctgccctcctct

SEQ ID NO: 387844 - DNA, 58 bp, Artificial
  Synthetic oligonucleotide
cttactgcgaacaccaccttaaagtgacactgacactggtactcggtcactggtgacg

SEQ ID NO: 387845 - DNA, 55 bp, Artificial
  Synthetic oligonucleotide
cttactgctaagaacaacagcatcgtctttagttggacactgtatgttgccaagt

SEQ ID NO: 387846 - DNA, 58 bp, Artificial
  Synthetic oligonucleotide
cttactgctggcactaccccccaagaccctgtggtattgtgcccgcaaggagcgtgtg

SEQ ID NO: 387847 - DNA, 52 bp, Artificial
  Synthetic oligonucleotide
cttactggagactcatccgttataccggaatccggaaccagcagtcccagtg

SEQ ID NO: 387848 - DNA, 50 bp, Artificial
  Synthetic oligonucleotide
cttactggatcggtacaacacaccctcatatccagcccacttgaggagca

SEQ ID NO: 387849 - DNA, 57 bp, Artificial
  Synthetic oligonucleotide
cttactgggaaagcaagattcacaaagacaaagttaacctcagactggattgtagag

SEQ ID NO: 387850 - DNA, 55 bp, Artificial
  Synthetic oligonucleotide
cttacttaaaatacttcgaacaatggtgcctcccgaagaaatcgcctctgctagt

SEQ ID NO: 387851 - DNA, 55 bp, Artificial
  Synthetic oligonucleotide
cttacttagacagcatccaaatcccttcctggaaaatagactttgccaggggaga

SEQ ID NO: 387852 - DNA, 55 bp, Artificial
  Synthetic oligonucleotide
cttacttccgtttcaaagatgatgcgttagaaaaattgaacgtactttcactcta

SEQ ID NO: 387853 - DNA, 56 bp, Artificial
  Synthetic oligonucleotide
cttacttccttgtgaggggacccttccaggctcactggggggtcgatcttgcaata

SEQ ID NO: 387854 - DNA, 60 bp, Artificial
  Synthetic oligonucleotide
cttacttcgcagcatcaagtggttcagtatttgcgcaattcgtcccaacaccttccatag

SEQ ID NO: 387855 - DNA, 54 bp, Artificial
  Synthetic oligonucleotide
cttacttctagcacctctactcctccttttactaggagcctggggacgggagcg

SEQ ID NO: 387856 - DNA, 60 bp, Artificial
  Synthetic oligonucleotide
cttacttggcagctgctatgcatctcttcgagggggtctgtcccgaggactgggtcagtt

SEQ ID NO: 387857 - DNA, 55 bp, Artificial
  Synthetic oligonucleotide
cttacttggcgttaaggggttgtgaagttgtatgctggtagactataagtattta

SEQ ID NO: 387858 - DNA, 59 bp, Artificial
  Synthetic oligonucleotide
cttactttctcggctgaagatgagtcaggccttgaaaaagctgtttccgacgcactctc

SEQ ID NO: 387859 - DNA, 56 bp, Artificial
  Synthetic oligonucleotide
cttactttgtgagggcacacgcgctaatcaagatctgcagcttggtgcgaggggta

SEQ ID NO: 387860 - DNA, 53 bp, Artificial
  Synthetic oligonucleotide
cttagaaacgctatgtcaattggcactgttcgacgtaataatagaccatcaat

SEQ ID NO: 387861 - DNA, 50 bp, Artificial
  Synthetic oligonucleotide
cttagaaagattaggtcggggtctgaaaggtaatagagtcacattcatac

SEQ ID NO: 387862 - DNA, 54 bp, Artificial
  Synthetic oligonucleotide
cttagaacactccggtgttcctgttgacgaaccgcttttagtcacggatatccc

SEQ ID NO: 387863 - DNA, 59 bp, Artificial
  Synthetic oligonucleotide
cttagaactatggagcaatcaacatgtgacatatgactatataattccgaaaggaagag

SEQ ID NO: 387864 - DNA, 54 bp, Artificial
  Synthetic oligonucleotide
cttagaagaaagttatccgataggttcggaaaaatgggtacatctcataagacg

SEQ ID NO: 387865 - DNA, 55 bp, Artificial
  Synthetic oligonucleotide
cttagaagcaatcctgtgtgaaaagcatttctcaaacgtatgaactaagacagct

SEQ ID NO: 387866 - DNA, 55 bp, Artificial
  Synthetic oligonucleotide
cttagaagcaatggccttcctagaagaatcccatccagggatctttgagaactcg

SEQ ID NO: 387867 - DNA, 60 bp, Artificial
  Synthetic oligonucleotide
cttagaagcggcatcggaggaggtgcctttaatcggcgcaggtatggccacagctgtagc

SEQ ID NO: 387868 - DNA, 55 bp, Artificial
  Synthetic oligonucleotide
cttagaagctgccttgcatggtcctgagtattacaactacatttgttccaagttg

SEQ ID NO: 387869 - DNA, 55 bp, Artificial
  Synthetic oligonucleotide
cttagaagttatgcatacagaccaataggtggtgatcctccagatcactaacggt

SEQ ID NO: 387870 - DNA, 56 bp, Artificial
  Synthetic oligonucleotide
cttagaatacaaaaggatggcagcgtaaatgtgtacggtgagggggacattaaatg

SEQ ID NO: 387871 - DNA, 60 bp, Artificial
  Synthetic oligonucleotide
cttagaatgcattggcattaagcctacaaagcacactcccataatatacaagtatgatct

SEQ ID NO: 387872 - DNA, 53 bp, Artificial
  Synthetic oligonucleotide
cttagaatgggggccaaccctctttcagagggttgggcaagccttctgggacc

SEQ ID NO: 387873 - DNA, 60 bp, Artificial
  Synthetic oligonucleotide
cttagaattaattgtgtgggctgctagtgctgaaactcagaatcttaattctgggtggac

SEQ ID NO: 387874 - DNA, 55 bp, Artificial
  Synthetic oligonucleotide
cttagaattcaggagagaggaagtgataagaaccggttcaatcttgtgtaggtca

SEQ ID NO: 387875 - DNA, 51 bp, Artificial
  Synthetic oligonucleotide
cttagacaacttcatgtcatattcgcgttcagtatttgtgtacaatgcacg

SEQ ID NO: 387876 - DNA, 60 bp, Artificial
  Synthetic oligonucleotide
cttagacatgatgatcacagaagttattatatgctttgaccgtatgtaattcaaggtgca

SEQ ID NO: 387877 - DNA, 60 bp, Artificial
  Synthetic oligonucleotide
cttagacatggtggcagtttagatctagacctttcccgagagataagattcaaggtgaga

SEQ ID NO: 387878 - DNA, 55 bp, Artificial
  Synthetic oligonucleotide
cttagacatttccattgtgctgaagaacagggtataactgactatgtccacatgt

SEQ ID NO: 387879 - DNA, 57 bp, Artificial
  Synthetic oligonucleotide
cttagacctgattctcctccgaaggctatggtcacgactaattcgcgtgtaaagtac

SEQ ID NO: 387880 - DNA, 55 bp, Artificial
  Synthetic oligonucleotide
cttagacttaacagatgacgaagttaatgaactcgtgtttagattcagactggca

SEQ ID NO: 387881 - DNA, 58 bp, Artificial
  Synthetic oligonucleotide
cttagacttcggaggaagttgggtcacacactatcttcgcggacacaacgtacattgc

SEQ ID NO: 387882 - DNA, 55 bp, Artificial
  Synthetic oligonucleotide
cttagacttcggaggaagttgggtcacgcattacctccgcggacataacgtacgc

SEQ ID NO: 387883 - DNA, 60 bp, Artificial
  Synthetic oligonucleotide
cttagagaaccaagagggtctgacatagcagggacaacaagcacagtagatgaacagatc

SEQ ID NO: 387884 - DNA, 60 bp, Artificial
  Synthetic oligonucleotide
cttagagacgggttgattgtcttagagaattgtatcatgaacaagcagtgagcgtgaaca

SEQ ID NO: 387885 - DNA, 60 bp, Artificial
  Synthetic oligonucleotide
cttagagagcattgcccaacctctccgcgactctcttgaattatatccctgggcgatcaa

SEQ ID NO: 387886 - DNA, 60 bp, Artificial
  Synthetic oligonucleotide
cttagagatatggtgagtgggttttcaggtatacagtatgaaaagtggatcactgctgga

SEQ ID NO: 387887 - DNA, 53 bp, Artificial
  Synthetic oligonucleotide
cttagagatcgttttcaagttatccgtcgttttacgtcaactgttactggagg

SEQ ID NO: 387888 - DNA, 56 bp, Artificial
  Synthetic oligonucleotide
cttagagatggttaagaataggacagtgtatagttataagtacgagcctgttgggt

SEQ ID NO: 387889 - DNA, 60 bp, Artificial
  Synthetic oligonucleotide
cttagagatgtctgggcacaaggacacaggcgtactgtacttcgtgatttccaggcgggc

SEQ ID NO: 387890 - DNA, 60 bp, Artificial
  Synthetic oligonucleotide
cttagagcactaggaattgatgcagaccatggcgagttcacacgcgccgtcacaatgatc

SEQ ID NO: 387891 - DNA, 54 bp, Artificial
  Synthetic oligonucleotide
cttagagcatatgttgttatgggatgtgcgatctgacaaaacgggacatgacag

SEQ ID NO: 387892 - DNA, 50 bp, Artificial
  Synthetic oligonucleotide
cttagagccatggacgttacaggacacaagtcaagaactatggcttgcag

SEQ ID NO: 387893 - DNA, 55 bp, Artificial
  Synthetic oligonucleotide
cttagagcccttggaccttactactagtgcaggattcccttatgtgactatgggc

SEQ ID NO: 387894 - DNA, 52 bp, Artificial
  Synthetic oligonucleotide
cttagaggcctttaagagaatggacaccttttactttacagggaaggaccca

SEQ ID NO: 387895 - DNA, 59 bp, Artificial
  Synthetic oligonucleotide
cttagaggctatcgtaattgaccctagacgcacacctaacattgctagagagtttgaaa

SEQ ID NO: 387896 - DNA, 60 bp, Artificial
  Synthetic oligonucleotide
cttagagtctccggaacattgttcacctcatcatacagcactaaggcaagctattctgtg

SEQ ID NO: 387897 - DNA, 56 bp, Artificial
  Synthetic oligonucleotide
cttagagttggttcgttactcatcccaagttctagcacacatttaaagtttatgtc

SEQ ID NO: 387898 - DNA, 55 bp, Artificial
  Synthetic oligonucleotide
cttagagtttgaagccctaggatttctgaatgaagatcactggttctccagaggg

SEQ ID NO: 387899 - DNA, 60 bp, Artificial
  Synthetic oligonucleotide
cttagatattgcagcatttagtttaaagtatggcgtacatctcgatgagtttggcggatt

SEQ ID NO: 387900 - DNA, 58 bp, Artificial
  Synthetic oligonucleotide
cttagatccggaaacgtgtctgacgcgttgctgtccaaaactgcttcttctctcggct

SEQ ID NO: 387901 - DNA, 58 bp, Artificial
  Synthetic oligonucleotide
cttagatcgtactattgacgctattacgttgaaacctagaatcgacctccaagatgtg

SEQ ID NO: 387902 - DNA, 60 bp, Artificial
  Synthetic oligonucleotide
cttagatcttgttgctgaacactttaaagagaagaggatgaagtatctagagaatgacat

SEQ ID NO: 387903 - DNA, 60 bp, Artificial
  Synthetic oligonucleotide
cttagatgatttgtatacctcgtggcttgatgtcatatattatttccgagattcccgtgt

SEQ ID NO: 387904 - DNA, 55 bp, Artificial
  Synthetic oligonucleotide
cttagatgcgaacaagaagacgagttcgaatgccgcccagaagtgagtgactgaa

SEQ ID NO: 387905 - DNA, 56 bp, Artificial
  Synthetic oligonucleotide
cttagatgtattttaggatctccgtttgagactttaaccaagtctagcatccgtag

SEQ ID NO: 387906 - DNA, 60 bp, Artificial
  Synthetic oligonucleotide
cttagattactatacaacacagtagcaactctctattgtgtacatgaaaggatagaggta

SEQ ID NO: 387907 - DNA, 56 bp, Artificial
  Synthetic oligonucleotide
cttagattcacacccctacagacaattaatgaacaaaagacctataatagtaccaa

SEQ ID NO: 387908 - DNA, 55 bp, Artificial
  Synthetic oligonucleotide
cttagattcaggatgcaggcaaagcagcacatgaaagtgtgtaagcttgaagggg

SEQ ID NO: 387909 - DNA, 55 bp, Artificial
  Synthetic oligonucleotide
cttagattccgcgtttgattcaccttaaaatcgtcgtcagcctctataatctcgg

SEQ ID NO: 387910 - DNA, 58 bp, Artificial
  Synthetic oligonucleotide
cttagattgttgtcagtatacggatttgacttactgccaaggatgtctaatatatcac

SEQ ID NO: 387911 - DNA, 60 bp, Artificial
  Synthetic oligonucleotide
cttagcaaaattgaggatggggatatacgacaaatcgtgtgttcagatccgatatttgcg

SEQ ID NO: 387912 - DNA, 55 bp, Artificial
  Synthetic oligonucleotide
cttagcaatcctaccaacaacttcaattgaaacaccattggccacacactgatcc

SEQ ID NO: 387913 - DNA, 56 bp, Artificial
  Synthetic oligonucleotide
cttagcaatcttacgtaaagcagttgctatgcgtgtaggtattttaggtttaccaa

SEQ ID NO: 387914 - DNA, 60 bp, Artificial
  Synthetic oligonucleotide
cttagcacaaagaatatagctcctgctgatgttacttggtttgtgcagcatgaatggggg

SEQ ID NO: 387915 - DNA, 55 bp, Artificial
  Synthetic oligonucleotide
cttagcacgcgaccctagatttaagcatagagtgtatcagcaattgagtgccgtg

SEQ ID NO: 387916 - DNA, 51 bp, Artificial
  Synthetic oligonucleotide
cttagcactcgatatatgtggctataccgtgatagcaacacagtctgacga

SEQ ID NO: 387917 - DNA, 55 bp, Artificial
  Synthetic oligonucleotide
cttagcagccatggcaaggtgctcttgattgaaccaactagaccattggcagaga

SEQ ID NO: 387918 - DNA, 56 bp, Artificial
  Synthetic oligonucleotide
cttagcagtcttaaggaggatacagtcaataagagtctcacaggtaatgttgctag

SEQ ID NO: 387919 - DNA, 60 bp, Artificial
  Synthetic oligonucleotide
cttagcagtggccacggagcccatcatattctcccctatggagacgaaggtcatcacgtg

SEQ ID NO: 387920 - DNA, 51 bp, Artificial
  Synthetic oligonucleotide
cttagcagtggtgccatatttaatttgattcccttgcgagtctgttactac

SEQ ID NO: 387921 - DNA, 60 bp, Artificial
  Synthetic oligonucleotide
cttagcatacctcccatatgctacaagttccttgaagtcgttcgcacccacaagattaga

SEQ ID NO: 387922 - DNA, 60 bp, Artificial
  Synthetic oligonucleotide
cttagcatcagggatccagaggctgatcagctacctgggacttggactgtggatcctggg

SEQ ID NO: 387923 - DNA, 59 bp, Artificial
  Synthetic oligonucleotide
cttagccacggatcgcgacacaaggagccgccatacaaggagcgttgagttacgagtac

SEQ ID NO: 387924 - DNA, 60 bp, Artificial
  Synthetic oligonucleotide
cttagccatagtagaatctgtggcagataattggcttactccaacagattggaacacact

SEQ ID NO: 387925 - DNA, 57 bp, Artificial
  Synthetic oligonucleotide
cttagcccaagctttcataattggtcctcacataaatgcaacggtcggtcgccaacg

SEQ ID NO: 387926 - DNA, 60 bp, Artificial
  Synthetic oligonucleotide
cttagcccagcgatgtgttagagcacacttgagtggttaacgagtggtttatcataataa

SEQ ID NO: 387927 - DNA, 52 bp, Artificial
  Synthetic oligonucleotide
cttagcccctaagcaacctggtagtgggatgtggtccctgatgcgaagcagc

SEQ ID NO: 387928 - DNA, 59 bp, Artificial
  Synthetic oligonucleotide
cttagccctgtctggttcagagcattagaattggtccttagggagatagggtatagtga

SEQ ID NO: 387929 - DNA, 58 bp, Artificial
  Synthetic oligonucleotide
cttagcccttttatctttgagtaaactctcatcggtttaattatgcatctcaattgtc

SEQ ID NO: 387930 - DNA, 60 bp, Artificial
  Synthetic oligonucleotide
cttagccgccctacccacaagatgaatcaagacactcctctcgccaatctcaatggcccc

SEQ ID NO: 387931 - DNA, 58 bp, Artificial
  Synthetic oligonucleotide
cttagcgaagtgggtccgctgatgaacattcgtatcgcaaaccctgtagtacaacttc

SEQ ID NO: 387932 - DNA, 51 bp, Artificial
  Synthetic oligonucleotide
cttagcgaataataggctatgagcataagctaaggtgggattggaattacc

SEQ ID NO: 387933 - DNA, 60 bp, Artificial
  Synthetic oligonucleotide
cttagcgacgtgataagcgactatgtggatactgcagacatatttctcggtaaaagatcc

SEQ ID NO: 387934 - DNA, 56 bp, Artificial
  Synthetic oligonucleotide
cttagcgaggtgtgaagactggcgtaacgcaccaggagaccccggacttgtgtccg

SEQ ID NO: 387935 - DNA, 60 bp, Artificial
  Synthetic oligonucleotide
cttagcgatattgcggcctatcacgccgatggtgtgatagttggcttttggcgcgatcca

SEQ ID NO: 387936 - DNA, 55 bp, Artificial
  Synthetic oligonucleotide
cttagcgctctcgggacatgaatggctgggcgagccgatgagcgtgactcttccg

SEQ ID NO: 387937 - DNA, 57 bp, Artificial
  Synthetic oligonucleotide
cttagcgctgctaagagccaggaatacccctggccggtttggtctaactccttatga

SEQ ID NO: 387938 - DNA, 57 bp, Artificial
  Synthetic oligonucleotide
cttagcgtccgtctcccagggcaagcgtgttaccgtacgctcgcagacacaactccc

SEQ ID NO: 387939 - DNA, 58 bp, Artificial
  Synthetic oligonucleotide
cttagcgttatggtcaaaaataaatgtcagcatattttgacaactgacctgtcatttt

SEQ ID NO: 387940 - DNA, 60 bp, Artificial
  Synthetic oligonucleotide
cttagctacgacggagatgtcacttacccaattcgtaatgatcgatcgccttcacaagat

SEQ ID NO: 387941 - DNA, 56 bp, Artificial
  Synthetic oligonucleotide
cttagctacgccggagcttagctcgcccacgctttaatattaccgtgggcgagcgg

SEQ ID NO: 387942 - DNA, 55 bp, Artificial
  Synthetic oligonucleotide
cttagctatggaaatgtactggatttgaaccatctggatattgatgagcccacgg

SEQ ID NO: 387943 - DNA, 55 bp, Artificial
  Synthetic oligonucleotide
cttagctcaaatgctagtgaggcaaagcgcctcattagtactacctatccgcaat

SEQ ID NO: 387944 - DNA, 55 bp, Artificial
  Synthetic oligonucleotide
cttagctcacagctaagggtggcgcttaccataaagcgtagtgtttactctccac

SEQ ID NO: 387945 - DNA, 54 bp, Artificial
  Synthetic oligonucleotide
cttagctctatattttcgattttttgcatcttgttaattcgattcattgcattt

SEQ ID NO: 387946 - DNA, 55 bp, Artificial
  Synthetic oligonucleotide
cttagctgactggctacttaatgagtgggcttgtaatccaatggacataacgttg

SEQ ID NO: 387947 - DNA, 55 bp, Artificial
  Synthetic oligonucleotide
cttagctgatctaggtgacaaggagttatctcccatagatgggcagtgcgtttcg

SEQ ID NO: 387948 - DNA, 57 bp, Artificial
  Synthetic oligonucleotide
cttagctgatttggtagtgtctggggagtggaatctcccggataactgccgtggtgg

SEQ ID NO: 387949 - DNA, 55 bp, Artificial
  Synthetic oligonucleotide
cttagctggtgccgccatcggcagtgttggcctggggaaggtccttgtggacatc

SEQ ID NO: 387950 - DNA, 60 bp, Artificial
  Synthetic oligonucleotide
cttagcttacttggagtaaactgcaacgcacttcattccaactacgcaatggctctcacc

SEQ ID NO: 387951 - DNA, 53 bp, Artificial
  Synthetic oligonucleotide
cttaggaaacgctggttggacctcttttaaacagttcaaatatagacatctag

SEQ ID NO: 387952 - DNA, 55 bp, Artificial
  Synthetic oligonucleotide
cttaggaacaacctgcaagttcaacacttggggagactcaaacagatctggtaag

SEQ ID NO: 387953 - DNA, 53 bp, Artificial
  Synthetic oligonucleotide
cttaggaacactcattctaggagtaaacgacccactcccacctttgtgaaagt

SEQ ID NO: 387954 - DNA, 57 bp, Artificial
  Synthetic oligonucleotide
cttaggaagggctataggccagtattctcctcccctccctcttatactcaacagatc

SEQ ID NO: 387955 - DNA, 60 bp, Artificial
  Synthetic oligonucleotide
cttaggaatcccagaaaacactgggtgcgctctgatgatgtgctacaacagtggagtgcg

SEQ ID NO: 387956 - DNA, 55 bp, Artificial
  Synthetic oligonucleotide
cttaggaatcggacaagatggcttgtttggccaaggtacaattaaagcactacaa

SEQ ID NO: 387957 - DNA, 54 bp, Artificial
  Synthetic oligonucleotide
cttaggaatgttcctcaaagagagacaagaggtctatttggagcaatagcaggc

SEQ ID NO: 387958 - DNA, 55 bp, Artificial
  Synthetic oligonucleotide
cttaggaattagcctttcaaatatcccaactgcaatgagcacgatagcattgcat

SEQ ID NO: 387959 - DNA, 52 bp, Artificial
  Synthetic oligonucleotide
cttaggaattgctactaaaagtgctcttaacccacaagttcctttggggtct

SEQ ID NO: 387960 - DNA, 55 bp, Artificial
  Synthetic oligonucleotide
cttaggacaagggcagtgtctcgacttggatcgcttccctgtacatgttactagt

SEQ ID NO: 387961 - DNA, 55 bp, Artificial
  Synthetic oligonucleotide
cttaggacagcatatctatgacacctatggggacacttgggagggagtcgaggct

SEQ ID NO: 387962 - DNA, 57 bp, Artificial
  Synthetic oligonucleotide
cttaggaccggccgatagcctagaaagccaggggtggcgactccttgcacctatcac

SEQ ID NO: 387963 - DNA, 55 bp, Artificial
  Synthetic oligonucleotide
cttaggaggaactagattaagcctcctaacatatttgtccacataggctttagag

SEQ ID NO: 387964 - DNA, 55 bp, Artificial
  Synthetic oligonucleotide
cttaggaggcaattaaggtacactttgtggcgctttgaagcacaggaaggtaggc

SEQ ID NO: 387965 - DNA, 57 bp, Artificial
  Synthetic oligonucleotide
cttaggagtctcaatcctaaatctaggacagaagaagtacaccaaaacaacatactg

SEQ ID NO: 387966 - DNA, 57 bp, Artificial
  Synthetic oligonucleotide
cttaggagtctcaatcctgaatcttgggcaaaagaggtataccagaaccacgtactg

SEQ ID NO: 387967 - DNA, 60 bp, Artificial
  Synthetic oligonucleotide
cttaggatcgtggcagatcagcttgttattgagccctcccgaatcataataaagcgaccc

SEQ ID NO: 387968 - DNA, 60 bp, Artificial
  Synthetic oligonucleotide
cttaggcactgtcaataagtatctgaaactgcttatcaaagcttctggattgtacttttc

SEQ ID NO: 387969 - DNA, 60 bp, Artificial
  Synthetic oligonucleotide
cttaggcatttcctatggcaggaagaagcggagacagcgacgaagcactcctcctagcag

SEQ ID NO: 387970 - DNA, 58 bp, Artificial
  Synthetic oligonucleotide
cttaggcatttcctatggcaggaagaagcggagacagcgacgcgcaactccttacagc

SEQ ID NO: 387971 - DNA, 55 bp, Artificial
  Synthetic oligonucleotide
cttaggcttacttttcagtacttccctgagtaggctagtgatcaagctccgtgac

SEQ ID NO: 387972 - DNA, 56 bp, Artificial
  Synthetic oligonucleotide
cttagggaacatttatatcagtggggatttactacccctgataaaaagcatcagaa

SEQ ID NO: 387973 - DNA, 54 bp, Artificial
  Synthetic oligonucleotide
cttagggaagattactcgggcgctgaccagtacggtcgtaagaagtacgcaagg

SEQ ID NO: 387974 - DNA, 56 bp, Artificial
  Synthetic oligonucleotide
cttagggacaatcttgaacctgggacctttgatcttggggggctatatgaagcaat

SEQ ID NO: 387975 - DNA, 60 bp, Artificial
  Synthetic oligonucleotide
cttagggagtgtcccgaacaacggagatcttgttgagctggcgagagcctgtctcactat

SEQ ID NO: 387976 - DNA, 55 bp, Artificial
  Synthetic oligonucleotide
cttagggcaaacattacttggccttaaatgggattctgtgagaggggatccctcc

SEQ ID NO: 387977 - DNA, 59 bp, Artificial
  Synthetic oligonucleotide
cttaggggagccaaggcactaacagacatagtgccactgactgcagaggcagagttaga

SEQ ID NO: 387978 - DNA, 55 bp, Artificial
  Synthetic oligonucleotide
cttaggggatcgcaaatagagtacgacatgaaagccaccagagggcttgtggtgg

SEQ ID NO: 387979 - DNA, 53 bp, Artificial
  Synthetic oligonucleotide
cttaggggctaattccctaaggacgttaagagcctctgacttacttccagtgt

SEQ ID NO: 387980 - DNA, 57 bp, Artificial
  Synthetic oligonucleotide
cttagggggaccaaagcactaacagaagtggtaccattaacgagagaagcagagcta

SEQ ID NO: 387981 - DNA, 51 bp, Artificial
  Synthetic oligonucleotide
cttagggttgacgggggctcactaggtacaaacctaagtcctgacttaagg

SEQ ID NO: 387982 - DNA, 55 bp, Artificial
  Synthetic oligonucleotide
cttaggtaccgtacgcctggaaaaccgatcgatctcaatggttatgttggttcaa

SEQ ID NO: 387983 - DNA, 51 bp, Artificial
  Synthetic oligonucleotide
cttaggtagtttgctccaattagatttccaaaaccctagggtttttggcca

SEQ ID NO: 387984 - DNA, 60 bp, Artificial
  Synthetic oligonucleotide
cttaggtcacagtcagacaagctctacggctgaagacagtagcagtgtgagcgacactac

SEQ ID NO: 387985 - DNA, 60 bp, Artificial
  Synthetic oligonucleotide
cttaggtcattatacaacacaatagctgtgctctattgtgcacatcaaaggataaaggta

SEQ ID NO: 387986 - DNA, 59 bp, Artificial
  Synthetic oligonucleotide
cttaggtcattattcaatgcagtagcaactctctattgtgtacatgcagacatagaggt

SEQ ID NO: 387987 - DNA, 58 bp, Artificial
  Synthetic oligonucleotide
cttaggtcgaacattacggcacacaagagaccaagattcataataagaacgccaaaga

SEQ ID NO: 387988 - DNA, 56 bp, Artificial
  Synthetic oligonucleotide
cttaggttgcaatgtcggcattcccttattcccaccgaacggccatttccactgac

SEQ ID NO: 387989 - DNA, 56 bp, Artificial
  Synthetic oligonucleotide
cttagtaacgctatgaaagttgcgaagtgtttcgttcagcactccccccgtgtaga

SEQ ID NO: 387990 - DNA, 57 bp, Artificial
  Synthetic oligonucleotide
cttagtaagaagtaagtgcataaactacctctggaactggttataatcttgaaatga

SEQ ID NO: 387991 - DNA, 58 bp, Artificial
  Synthetic oligonucleotide
cttagtaagcatcacgagtctaacgccattctgataacggaatatgctggaccaatgc

SEQ ID NO: 387992 - DNA, 60 bp, Artificial
  Synthetic oligonucleotide
cttagtaagggtcatgcccacgttagggcagcagatttgctaacagcttacgagcagacg

SEQ ID NO: 387993 - DNA, 55 bp, Artificial
  Synthetic oligonucleotide
cttagtacttatgacttctaccctagtatcccagttgaataccaggcaactaggg

SEQ ID NO: 387994 - DNA, 55 bp, Artificial
  Synthetic oligonucleotide
cttagtagactccttactatatatcagagctgccctcctgcgtttggggcggttt

SEQ ID NO: 387995 - DNA, 59 bp, Artificial
  Synthetic oligonucleotide
cttagtaggggatgtagactcatacattaggaacaccgggcttactgcattcttcttga

SEQ ID NO: 387996 - DNA, 55 bp, Artificial
  Synthetic oligonucleotide
cttagtatcttctgaaacgaatactactgttactaatcctccgtcctctggtact

SEQ ID NO: 387997 - DNA, 55 bp, Artificial
  Synthetic oligonucleotide
cttagtattgtggttgagaaacaggaggggatgtacaaatcagcacctagacgcc

SEQ ID NO: 387998 - DNA, 60 bp, Artificial
  Synthetic oligonucleotide
cttagtcaggctatggtataacctagtatcagagcccatagaaggagcagaaacatacta

SEQ ID NO: 387999 - DNA, 58 bp, Artificial
  Synthetic oligonucleotide
cttagtcagtaagggcggaaaaggcagaagagacatactcagagtattgcgtgtgtcg

SEQ ID NO: 388000 - DNA, 60 bp, Artificial
  Synthetic oligonucleotide
cttagtccagtatatggatgacatcttaatagctagtgacaggacagacctggaacatga

SEQ ID NO: 388001 - DNA, 58 bp, Artificial
  Synthetic oligonucleotide
cttagtcgcccctccagtccagaaaacctcgaagtataactacgctgtctcatatgga

SEQ ID NO: 388002 - DNA, 54 bp, Artificial
  Synthetic oligonucleotide
cttagtcgggcaaattaaaaagttctgtgataactttggctataaagcctggat

SEQ ID NO: 388003 - DNA, 57 bp, Artificial
  Synthetic oligonucleotide
cttagtcgtgttggccagcgtgcgtcattacgcacccgtagtggtaagcgtattggg

SEQ ID NO: 388004 - DNA, 52 bp, Artificial
  Synthetic oligonucleotide
cttagtcgttctcctcatgtttgcgggggtggatgcttctacctacatttct

SEQ ID NO: 388005 - DNA, 54 bp, Artificial
  Synthetic oligonucleotide
cttagtctccaagtattatgttaaacatgtgggatcccctcgtaaacgaattcc

SEQ ID NO: 388006 - DNA, 53 bp, Artificial
  Synthetic oligonucleotide
cttagtcttgtgtgccgggctctcaatacctagggactcagcgaacttgacaa

SEQ ID NO: 388007 - DNA, 55 bp, Artificial
  Synthetic oligonucleotide
cttagtgactccccggtgcgtgaatccatgctggaacttgcagtcgttggtgatg

SEQ ID NO: 388008 - DNA, 55 bp, Artificial
  Synthetic oligonucleotide
cttagtgagatacctgggagggagttggaagttctaccgagaccccgacagagac

SEQ ID NO: 388009 - DNA, 50 bp, Artificial
  Synthetic oligonucleotide
cttagtgattgcataacgagttttcaggatcctttgcgtacaattccgaa

SEQ ID NO: 388010 - DNA, 56 bp, Artificial
  Synthetic oligonucleotide
cttagtgcaatggttaagatgtccacattaataaggtacaaattgcaacattgtct

SEQ ID NO: 388011 - DNA, 56 bp, Artificial
  Synthetic oligonucleotide
cttagtgggaatcaaactgccagaatgcttaaatacaattacccaactaaatctgg

SEQ ID NO: 388012 - DNA, 58 bp, Artificial
  Synthetic oligonucleotide
cttagtggtgtgcgctacagacgcgctatccactgggtacaccggaaactttgactcc

SEQ ID NO: 388013 - DNA, 55 bp, Artificial
  Synthetic oligonucleotide
cttagtggtgtgtttgatcgcttaacctggtttcgtcggaaactccataatattg

SEQ ID NO: 388014 - DNA, 60 bp, Artificial
  Synthetic oligonucleotide
cttagtgtgggcgagaatgagttatgtattagcgatctcagggcgaaagagcatagagaa

SEQ ID NO: 388015 - DNA, 53 bp, Artificial
  Synthetic oligonucleotide
cttagttaagcgatgacggtgtcagacaccagagcgggcgagtttcagattgt

SEQ ID NO: 388016 - DNA, 57 bp, Artificial
  Synthetic oligonucleotide
cttagttaagttgattgatcaatctcctcccttgtggaacgaaacgagcgcggataa

SEQ ID NO: 388017 - DNA, 56 bp, Artificial
  Synthetic oligonucleotide
cttagttagaaatcaacatgggatctttgttggagtcccgaatgtggacaaaatcc

SEQ ID NO: 388018 - DNA, 60 bp, Artificial
  Synthetic oligonucleotide
cttagttagcttaggtagatacatcagacctcttgaacagatagtctataaatcgccacg

SEQ ID NO: 388019 - DNA, 59 bp, Artificial
  Synthetic oligonucleotide
cttagttatcttctcctgctgtttcgcagaatgcgtgaagggttcctcgctgttaagcg

SEQ ID NO: 388020 - DNA, 59 bp, Artificial
  Synthetic oligonucleotide
cttagttcgatacattgatatagtgtcatgtcaaagaatagcacttaccgtttcaaaaa

SEQ ID NO: 388021 - DNA, 54 bp, Artificial
  Synthetic oligonucleotide
cttagttcggcgattttggaaggtcaacaaccacgtagtctacaaccaccagga

SEQ ID NO: 388022 - DNA, 55 bp, Artificial
  Synthetic oligonucleotide
cttagttgcacctgatggaacgatgcacccaaagataatggaacttctcaaagga

SEQ ID NO: 388023 - DNA, 54 bp, Artificial
  Synthetic oligonucleotide
cttagttgcactatgtggaagcccagtcccagttgggtccggttccttccccga

SEQ ID NO: 388024 - DNA, 55 bp, Artificial
  Synthetic oligonucleotide
cttagttggtcgcgtcagctccaatcctaaattgatcactctacaactcggcacg

SEQ ID NO: 388025 - DNA, 46 bp, Artificial
  Synthetic oligonucleotide
cttagtttctaaaagggtgtaaccgaaaacggtccaaccgaaaacg

SEQ ID NO: 388026 - DNA, 50 bp, Artificial
  Synthetic oligonucleotide
cttagtttttacgtatgcggaaggaggttttataccggaagatgggtaat

SEQ ID NO: 388027 - DNA, 56 bp, Artificial
  Synthetic oligonucleotide
cttataaacctattcaaatttcacgtggcttagaatcgaatacttggactgacgta

SEQ ID NO: 388028 - DNA, 59 bp, Artificial
  Synthetic oligonucleotide
cttataaatgcgggaacacgttccgcagtcacacaatcgctacgaacgacgctgtgcgg

SEQ ID NO: 388029 - DNA, 55 bp, Artificial
  Synthetic oligonucleotide
cttataacccaacacttcctgttgcaaagccaaaaggaactttcccagtcacaca

SEQ ID NO: 388030 - DNA, 56 bp, Artificial
  Synthetic oligonucleotide
cttataaccccaccagctctggcctagtcgagaggacaaacggtatcctcaagacc

SEQ ID NO: 388031 - DNA, 56 bp, Artificial
  Synthetic oligonucleotide
cttataacccttcagatccttgtggtaaccaagagtacactttgttggattctaga

SEQ ID NO: 388032 - DNA, 55 bp, Artificial
  Synthetic oligonucleotide
cttataactatagcttaaccccgtatgaggagaggcacgttcagtgactcgacga

SEQ ID NO: 388033 - DNA, 52 bp, Artificial
  Synthetic oligonucleotide
cttataaggcctttctaaatcaacaatattcgaccctttaccccgttgcacg

SEQ ID NO: 388034 - DNA, 51 bp, Artificial
  Synthetic oligonucleotide
cttataaggctcttactgaaggtggcaacggttctagtctcgttggagctg

SEQ ID NO: 388035 - DNA, 60 bp, Artificial
  Synthetic oligonucleotide
cttataatgaggcagtcagggccaagccaaagacactccagctgcttgatatacaagggc

SEQ ID NO: 388036 - DNA, 59 bp, Artificial
  Synthetic oligonucleotide
cttataattacctctaatagggagccgcgtgattggtataaatgtgagtttgatgtgtc

SEQ ID NO: 388037 - DNA, 60 bp, Artificial
  Synthetic oligonucleotide
cttataattatgagacactgatggcatgcattactatgaacatgcaacgcgttcaaacct

SEQ ID NO: 388038 - DNA, 56 bp, Artificial
  Synthetic oligonucleotide
cttatacaaagactaatcttacggtttgccatgtagcctcaataaatgttaacctc

SEQ ID NO: 388039 - DNA, 57 bp, Artificial
  Synthetic oligonucleotide
cttatacaaaggcaatggttcctcgtcgatagctggctcttttaaggtcacaattcg

SEQ ID NO: 388040 - DNA, 60 bp, Artificial
  Synthetic oligonucleotide
cttatacaatatccgaaatctccacattccggaagtctgcctgaaatgggagctaatgga

SEQ ID NO: 388041 - DNA, 58 bp, Artificial
  Synthetic oligonucleotide
cttatacaatatccggaatcttcacatcccggaagtctgcttaaagtgggagctaatg

SEQ ID NO: 388042 - DNA, 53 bp, Artificial
  Synthetic oligonucleotide
cttatacagagtgaggtggcagtttgagattcgcagatttgaaaccagttgac

SEQ ID NO: 388043 - DNA, 60 bp, Artificial
  Synthetic oligonucleotide
cttatacagcggcaacaccattgtaggtgttcacaccggcagtggccaagttggatacag

SEQ ID NO: 388044 - DNA, 57 bp, Artificial
  Synthetic oligonucleotide
cttatacgaggtagagttttgctctcacgttataagggaagatcgatgttggttggc

SEQ ID NO: 388045 - DNA, 55 bp, Artificial
  Synthetic oligonucleotide
cttatacgagtacccaacaataacagcgatccgaggacctacagccacactcggg

SEQ ID NO: 388046 - DNA, 55 bp, Artificial
  Synthetic oligonucleotide
cttatacgcgcttgtgtatcaagtgtattgtgtgcaagatgtgcggcatggacag

SEQ ID NO: 388047 - DNA, 60 bp, Artificial
  Synthetic oligonucleotide
cttatactaatacaccttacactggtgcacttgggcttcttgattttgcattagagcttg

SEQ ID NO: 388048 - DNA, 58 bp, Artificial
  Synthetic oligonucleotide
cttatactcaaactatattgtgaatagacttcgaggatttgaaactgacagagagttc

SEQ ID NO: 388049 - DNA, 55 bp, Artificial
  Synthetic oligonucleotide
cttatacttgtgattcgtgcgaagaattatgtcgaagcgtccagcagatatagtc

SEQ ID NO: 388050 - DNA, 57 bp, Artificial
  Synthetic oligonucleotide
cttatagaaccaaatgtgcctgagacgactagaaattacacattatttggggaaaca

SEQ ID NO: 388051 - DNA, 57 bp, Artificial
  Synthetic oligonucleotide
cttatagaatcaagcagaaagggattcttggatactcccagatcggagccggagttt

SEQ ID NO: 388052 - DNA, 55 bp, Artificial
  Synthetic oligonucleotide
cttatagacaccaagatagtgctaatatgcgttctttattggctactatggttgg

SEQ ID NO: 388053 - DNA, 60 bp, Artificial
  Synthetic oligonucleotide
cttatagacatcactttgaaagcaggaatccaagagtaagttcagaagtacacattccat

SEQ ID NO: 388054 - DNA, 51 bp, Artificial
  Synthetic oligonucleotide
cttatagaggcaaacctcacagttctcacgtcagaatagagagaactcgct

SEQ ID NO: 388055 - DNA, 60 bp, Artificial
  Synthetic oligonucleotide
cttatagcaatgcatgggtatgtagatgtggacacttggaataaatatatacctatcaac

SEQ ID NO: 388056 - DNA, 55 bp, Artificial
  Synthetic oligonucleotide
cttatagcgcattgtttgcgtacttgagtggcctagggtaatgagctggagagct

SEQ ID NO: 388057 - DNA, 53 bp, Artificial
  Synthetic oligonucleotide
cttataggcgaggtaggtgtggttgggaaagggcgtcacttccgcttttaagc

SEQ ID NO: 388058 - DNA, 53 bp, Artificial
  Synthetic oligonucleotide
cttataggtgcggaacaaagttaattcgggtagtttacagagggcctggacgc

SEQ ID NO: 388059 - DNA, 54 bp, Artificial
  Synthetic oligonucleotide
cttataggtggactcccctccttgttagaccccacgcagaggggtggcctaatc

SEQ ID NO: 388060 - DNA, 58 bp, Artificial
  Synthetic oligonucleotide
cttataggtgttggaatatccacagcaggacgtgggacgtggtctttagagactagta

SEQ ID NO: 388061 - DNA, 55 bp, Artificial
  Synthetic oligonucleotide
cttatagtatgttttgttatatgatccatggatacgcaagtctgatgcgtctggc

SEQ ID NO: 388062 - DNA, 55 bp, Artificial
  Synthetic oligonucleotide
cttatatacctgtaagacgtaaggctaagtctacctctggaactgattatgatcg

SEQ ID NO: 388063 - DNA, 55 bp, Artificial
  Synthetic oligonucleotide
cttatatatatgcacgtagcatatatataagtgtacgattctactacctcagaca

SEQ ID NO: 388064 - DNA, 60 bp, Artificial
  Synthetic oligonucleotide
cttatatatcaagaaagtgcttgaggacctggccatggatgaatatgtgacaagggttca

SEQ ID NO: 388065 - DNA, 55 bp, Artificial
  Synthetic oligonucleotide
cttatatatgctttctaccagagggcggcagactgtcaaggacaacaaagggacc

SEQ ID NO: 388066 - DNA, 60 bp, Artificial
  Synthetic oligonucleotide
cttatatatggctagtcagtccaacggacgcccaagccactataacgataggaagcgtca

SEQ ID NO: 388067 - DNA, 56 bp, Artificial
  Synthetic oligonucleotide
cttatatatttaaatcctttgtggttattgtttggatattcagtttacaaatctga

SEQ ID NO: 388068 - DNA, 54 bp, Artificial
  Synthetic oligonucleotide
cttatatcacttactaacgtgtttatattaatacttgtagtgtggtttgtaccg

SEQ ID NO: 388069 - DNA, 52 bp, Artificial
  Synthetic oligonucleotide
cttatatccgtaggcacgaaaaattgcgtgggattcgaattcccccggaacc

SEQ ID NO: 388070 - DNA, 59 bp, Artificial
  Synthetic oligonucleotide
cttatatctgccccaacaataacatcccaacatgtagaagacattccactagacacttt

SEQ ID NO: 388071 - DNA, 58 bp, Artificial
  Synthetic oligonucleotide
cttatatcttgtcgtacccctttgaaatgcgcatgtggtccccccgcactaatgaatg

SEQ ID NO: 388072 - DNA, 53 bp, Artificial
  Synthetic oligonucleotide
cttatatgaatgcctgtatggtgggaactggacgtgcataccaggagatagag

SEQ ID NO: 388073 - DNA, 60 bp, Artificial
  Synthetic oligonucleotide
cttatatgccctgaccctccgcggcagaggcatccagctcaacgaggacctacccctctc

SEQ ID NO: 388074 - DNA, 60 bp, Artificial
  Synthetic oligonucleotide
cttatatggggatcatgagtgtggcagtctactccaggatacggctctatacctagtaga

SEQ ID NO: 388075 - DNA, 50 bp, Artificial
  Synthetic oligonucleotide
cttatatttgaaggccttccactatacatgctcttatatggatacctatc

SEQ ID NO: 388076 - DNA, 55 bp, Artificial
  Synthetic oligonucleotide
cttatcaaacgggctgggcatgttggtgctccttggtgttggtgtagtgatgggt

SEQ ID NO: 388077 - DNA, 55 bp, Artificial
  Synthetic oligonucleotide
cttatcaaatatatcgggtagcggcgtaaccgtggaggataatcatgaaaacaaa

SEQ ID NO: 388078 - DNA, 57 bp, Artificial
  Synthetic oligonucleotide
cttatcaacactgtaccttacgaactcaacaagactaagcaatcattcggaccctcg

SEQ ID NO: 388079 - DNA, 59 bp, Artificial
  Synthetic oligonucleotide
cttatcaactgaccttcagcttatgaaagaaggagtatatagggaattaggcctagata

SEQ ID NO: 388080 - DNA, 53 bp, Artificial
  Synthetic oligonucleotide
cttatcacaaaactccaaggattatccatccgggagaaaggtgaagcaaaggt

SEQ ID NO: 388081 - DNA, 60 bp, Artificial
  Synthetic oligonucleotide
cttatcacgcttgctgatatccgtgaaagtggtggcgacccaatcaagttaaaccgcatc

SEQ ID NO: 388082 - DNA, 56 bp, Artificial
  Synthetic oligonucleotide
cttatcacggaaaagcggtttagtgaggccatgcgccaagtaaaggatatcctttc

SEQ ID NO: 388083 - DNA, 51 bp, Artificial
  Synthetic oligonucleotide
cttatcactccaatggacattgaggacaagagaatttagcaatccagacaa

SEQ ID NO: 388084 - DNA, 55 bp, Artificial
  Synthetic oligonucleotide
cttatcactcttaagtgagaaacatctccttaaaggaaataaatacctgggctac

SEQ ID NO: 388085 - DNA, 56 bp, Artificial
  Synthetic oligonucleotide
cttatcagcccactaagggctgtttcccgcaatctgatttcgttttttgctttgac

SEQ ID NO: 388086 - DNA, 53 bp, Artificial
  Synthetic oligonucleotide
cttatcaggagtgtttggcaagcgacctggccagaaggatccttaggtgggga

SEQ ID NO: 388087 - DNA, 55 bp, Artificial
  Synthetic oligonucleotide
cttatcatgccacctggaggcggtggtatgacactagtgatgagcgtgccctgca

SEQ ID NO: 388088 - DNA, 60 bp, Artificial
  Synthetic oligonucleotide
cttatcattcaagtcctctagaatcgatccacgttcattcgctgtctacatcgtcgcgac

SEQ ID NO: 388089 - DNA, 60 bp, Artificial
  Synthetic oligonucleotide
cttatccagataggacttgacatctgagcttgatttggcaccttgaatgttggggtggaa

SEQ ID NO: 388090 - DNA, 59 bp, Artificial
  Synthetic oligonucleotide
cttatccattgtcccaacgacaattcaagaggaagtctttcatgagaagagtaagataa

SEQ ID NO: 388091 - DNA, 53 bp, Artificial
  Synthetic oligonucleotide
cttatccgacgagcagtacgattggatcgtggcgtatgaacgacacatcactc

SEQ ID NO: 388092 - DNA, 54 bp, Artificial
  Synthetic oligonucleotide
cttatcctaagagtggggaagactatcttcacggttcccagattcaaaaggaac

SEQ ID NO: 388093 - DNA, 56 bp, Artificial
  Synthetic oligonucleotide
cttatcctctaaagccagaaaattcgctagagaacccaagacggcaaaattcttgc

SEQ ID NO: 388094 - DNA, 55 bp, Artificial
  Synthetic oligonucleotide
cttatcctgatgggtcaaaagtgtacgctggctccctctttgagtccgagtgcac

SEQ ID NO: 388095 - DNA, 55 bp, Artificial
  Synthetic oligonucleotide
cttatcctgctaaaacccgaactgggacggataacagggttcgttcatatatcaa

SEQ ID NO: 388096 - DNA, 56 bp, Artificial
  Synthetic oligonucleotide
cttatccttccttgttggaacttacagaaagagatttgattgttttatcaggacta

SEQ ID NO: 388097 - DNA, 60 bp, Artificial
  Synthetic oligonucleotide
cttatcgaaatcacgatgatatcctggacattaggatggtttaggctgtacttaccacaa

SEQ ID NO: 388098 - DNA, 55 bp, Artificial
  Synthetic oligonucleotide
cttatcgagctcccacgaccatcgtcttggcccagattctaagactatgatttat

SEQ ID NO: 388099 - DNA, 55 bp, Artificial
  Synthetic oligonucleotide
cttatcgattttgcttggggaaaatgttgcagactggcttgacgagtgcgattgc

SEQ ID NO: 388100 - DNA, 50 bp, Artificial
  Synthetic oligonucleotide
cttatcgctgggggcgcttgcagttgtgcacttctccacgggacgtgtgt

SEQ ID NO: 388101 - DNA, 59 bp, Artificial
  Synthetic oligonucleotide
cttatcggaacaatacgttggagatgatacattattttactgtaaattgcacacgactg

SEQ ID NO: 388102 - DNA, 58 bp, Artificial
  Synthetic oligonucleotide
cttatcggagcaatacgtgggggacgacacactgttttacacaaagctacacactaca

SEQ ID NO: 388103 - DNA, 54 bp, Artificial
  Synthetic oligonucleotide
cttatcggtcggtgtctggtgaacttaaccgaaacaataatgtacttccggaca

SEQ ID NO: 388104 - DNA, 56 bp, Artificial
  Synthetic oligonucleotide
cttatcgtattcccagacttgggggttcgtgtgtgcgagaaaatggccctttatga

SEQ ID NO: 388105 - DNA, 56 bp, Artificial
  Synthetic oligonucleotide
cttatcgtctccacttgtcaaacataagttactgtactactggaaactgaccggcc

SEQ ID NO: 388106 - DNA, 60 bp, Artificial
  Synthetic oligonucleotide
cttatcgtgcattgatgagtgtgccattaggatcttcacctaatgcttaccaggccaagt

SEQ ID NO: 388107 - DNA, 56 bp, Artificial
  Synthetic oligonucleotide
cttatcgtgttccccgacttgggggttcgtgtgtgcgagaaaatggctctctacga

SEQ ID NO: 388108 - DNA, 60 bp, Artificial
  Synthetic oligonucleotide
cttatcgttactagagcacattcagattgcaggcaacggttcgattgcaaggcgcatcga

SEQ ID NO: 388109 - DNA, 56 bp, Artificial
  Synthetic oligonucleotide
cttatctcaagattgtgtctattaccttctcaattggggggcttaaactttctctc

SEQ ID NO: 388110 - DNA, 54 bp, Artificial
  Synthetic oligonucleotide
cttatctcacccctcgccgttcgggttacccattcaacagaacatacaacggaa

SEQ ID NO: 388111 - DNA, 59 bp, Artificial
  Synthetic oligonucleotide
cttatctcgagtctgaatgggtgtacaacttccaacctgttcacacccaactcagccaa

SEQ ID NO: 388112 - DNA, 60 bp, Artificial
  Synthetic oligonucleotide
cttatctcggcgcggccgatatgatagagcaaggtctaccgttgctgccttcactgagaa

SEQ ID NO: 388113 - DNA, 55 bp, Artificial
  Synthetic oligonucleotide
cttatctctggcaaatgaaaactcactcattgcttttagaaacaaaaggtccgcc

SEQ ID NO: 388114 - DNA, 60 bp, Artificial
  Synthetic oligonucleotide
cttatctgaggatgtagggcgcttgttcgaaaatctcatgaaaggctcacatggtgcgag

SEQ ID NO: 388115 - DNA, 55 bp, Artificial
  Synthetic oligonucleotide
cttatctggccttccttcaccctacttcgtggtctcagggtccagctaggcaccc

SEQ ID NO: 388116 - DNA, 60 bp, Artificial
  Synthetic oligonucleotide
cttatgaaattgctattcactgctgcattcattggctgcgtgaacgttgcagcaacctcc

SEQ ID NO: 388117 - DNA, 60 bp, Artificial
  Synthetic oligonucleotide
cttatgaacagcgccacgatatctcacacgtgggtaaggtaatgtgtatatctgatgtca

SEQ ID NO: 388118 - DNA, 52 bp, Artificial
  Synthetic oligonucleotide
cttatgaagcgaataaaccattctcaaaaatagcgagagcaccttctcatgg

SEQ ID NO: 388119 - DNA, 60 bp, Artificial
  Synthetic oligonucleotide
cttatgaaggctgtgtccctcatgtgttaccatataaggccgtgacagcccatggctact

SEQ ID NO: 388120 - DNA, 60 bp, Artificial
  Synthetic oligonucleotide
cttatgaagtaggagctcaaggggacaacatttctagattggtgcatctggttacaggac

SEQ ID NO: 388121 - DNA, 55 bp, Artificial
  Synthetic oligonucleotide
cttatgaattaacaactatgtggcttacttcttctggtttggtgtctgaatggac

SEQ ID NO: 388122 - DNA, 59 bp, Artificial
  Synthetic oligonucleotide
cttatgacgctgttaccgatgcagtaagcgccccggttgaagcagcaggaaactacgcc

SEQ ID NO: 388123 - DNA, 60 bp, Artificial
  Synthetic oligonucleotide
cttatgactctcagcaagctgatgagaaaagatggttagtggctttatccaggtccagtg

SEQ ID NO: 388124 - DNA, 60 bp, Artificial
  Synthetic oligonucleotide
cttatgactgagacagccatggccatagatcagagatattcagaacttctaagccgagtc

SEQ ID NO: 388125 - DNA, 60 bp, Artificial
  Synthetic oligonucleotide
cttatgagatgggtggtgcgttttccagtgcattgattaaacataggataccaaattcaa

SEQ ID NO: 388126 - DNA, 60 bp, Artificial
  Synthetic oligonucleotide
cttatgaggcatatgttaagctaagagagttggtagatgaacataagatgaaggcattat

SEQ ID NO: 388127 - DNA, 58 bp, Artificial
  Synthetic oligonucleotide
cttatgatcataatgtttatagagatgaagcaatcagtaaccgattccaaatccaggg

SEQ ID NO: 388128 - DNA, 52 bp, Artificial
  Synthetic oligonucleotide
cttatgatgctagcctctcccctgtatggtttaagtgtctcaatttgctcct

SEQ ID NO: 388129 - DNA, 60 bp, Artificial
  Synthetic oligonucleotide
cttatgatgttgggatatgatttcggtgctgcatccacgctagctgggcgtatattactt

SEQ ID NO: 388130 - DNA, 60 bp, Artificial
  Synthetic oligonucleotide
cttatgattggtggagaatgagattttatgaccagtgtttcatttgtgacctttcatgat

SEQ ID NO: 388131 - DNA, 60 bp, Artificial
  Synthetic oligonucleotide
cttatgcaaccctcacgtgccaacgtcttcagtacatagtaagcctctacgtgcgtcgtg

SEQ ID NO: 388132 - DNA, 60 bp, Artificial
  Synthetic oligonucleotide
cttatgcagagtctatggttgctgctaaggggctggctcttgcaggtggtcgccgttacg

SEQ ID NO: 388133 - DNA, 57 bp, Artificial
  Synthetic oligonucleotide
cttatgccattcctcgaaacacacgtcgagtgcacaaaaggttccggtgcgaccaac

SEQ ID NO: 388134 - DNA, 57 bp, Artificial
  Synthetic oligonucleotide
cttatgccccaggttttctgtccgacggtgtgtgcaaggaacatcctaacttgttca

SEQ ID NO: 388135 - DNA, 53 bp, Artificial
  Synthetic oligonucleotide
cttatgcccgctaatcctacccgtgttaaaaggagggtaaatgtcgtgctagg

SEQ ID NO: 388136 - DNA, 59 bp, Artificial
  Synthetic oligonucleotide
cttatgccgctacttgtcggacaactctaccctacgatcagttattctctaaagagata

SEQ ID NO: 388137 - DNA, 60 bp, Artificial
  Synthetic oligonucleotide
cttatgctaattactcgcttagcctctatcggctgtacttatagcgatacattcctgcct

SEQ ID NO: 388138 - DNA, 58 bp, Artificial
  Synthetic oligonucleotide
cttatgctcgggtcgctatatgtgttaaccgtatttatggtgaaaacagcggcctgga

SEQ ID NO: 388139 - DNA, 55 bp, Artificial
  Synthetic oligonucleotide
cttatgctgtccgatgagatgagggcgttaccaacgaaaggttgtcatatcctgc

SEQ ID NO: 388140 - DNA, 60 bp, Artificial
  Synthetic oligonucleotide
cttatgcttaaggccacattattgtgcgttcttgctgcattggtttgttatatcgttatg

SEQ ID NO: 388141 - DNA, 54 bp, Artificial
  Synthetic oligonucleotide
cttatgcttactgagttcaatcgtttgtcgacgttactgagggatgctcataat

SEQ ID NO: 388142 - DNA, 58 bp, Artificial
  Synthetic oligonucleotide
cttatgcttattaacctgtggtagaggaaatattaaccataactatatactaacatca

SEQ ID NO: 388143 - DNA, 52 bp, Artificial
  Synthetic oligonucleotide
cttatggacaagaacactaggcaaagattcaccctggatgagatcacaaccc

SEQ ID NO: 388144 - DNA, 60 bp, Artificial
  Synthetic oligonucleotide
cttatggacatgggggactatgatcctggggattataataatctgtagtgctgaagaaaa

SEQ ID NO: 388145 - DNA, 60 bp, Artificial
  Synthetic oligonucleotide
cttatggagagaccctcagttgaagatacttatcgtatcagcctctaaggagcgtgcaga

SEQ ID NO: 388146 - DNA, 56 bp, Artificial
  Synthetic oligonucleotide
cttatggagagttatttgggctcgagcaaggatcatgttccaatctacgtgtccgt

SEQ ID NO: 388147 - DNA, 59 bp, Artificial
  Synthetic oligonucleotide
cttatggagatacctggacaggggtggaagccttaataagaatactgcaacaaatgctg

SEQ ID NO: 388148 - DNA, 55 bp, Artificial
  Synthetic oligonucleotide
cttatggagatagatatccccaccccttaccatgcgattggctggagatcggcgc

SEQ ID NO: 388149 - DNA, 55 bp, Artificial
  Synthetic oligonucleotide
cttatggagatggggcatcatgctccttgggatgttgatgatctgtaatgccacg

SEQ ID NO: 388150 - DNA, 55 bp, Artificial
  Synthetic oligonucleotide
cttatggatcactaactgttgggtatcacgtgctcaaggccggaactgtcaatca

SEQ ID NO: 388151 - DNA, 59 bp, Artificial
  Synthetic oligonucleotide
cttatggatgctttgaaattaagcattgaggacccaagtcatgagggagaggggatacc

SEQ ID NO: 388152 - DNA, 52 bp, Artificial
  Synthetic oligonucleotide
cttatggattgcctactatgatcacatgaatgcatagcatcctcatggaaaa

SEQ ID NO: 388153 - DNA, 58 bp, Artificial
  Synthetic oligonucleotide
cttatggcacgcccatggattttggccaggtatttaacatgttcgacaacgagcctag

SEQ ID NO: 388154 - DNA, 52 bp, Artificial
  Synthetic oligonucleotide
cttatggcatcgaacgatgtgtcatttatgccggtgttatgacgtataagat

SEQ ID NO: 388155 - DNA, 60 bp, Artificial
  Synthetic oligonucleotide
cttatggcccatacctgctcaaagaatttttaaagcgtattccgctcaagcccatgcaca

SEQ ID NO: 388156 - DNA, 57 bp, Artificial
  Synthetic oligonucleotide
cttatggcttcattctccaaactgttagtggtataggctctctaataactgtggggg

SEQ ID NO: 388157 - DNA, 60 bp, Artificial
  Synthetic oligonucleotide
cttatggggaaactgtcatagctgaaggtactttcaactcaacttcatcagacagtagtc

SEQ ID NO: 388158 - DNA, 60 bp, Artificial
  Synthetic oligonucleotide
cttatgggtcttccatcaactcagctgggaccactaaggcatgcatgagaaatggaggag

SEQ ID NO: 388159 - DNA, 56 bp, Artificial
  Synthetic oligonucleotide
cttatggtaatatattacttagtggtaaccaaacagcacggatgcttaaataccat

SEQ ID NO: 388160 - DNA, 57 bp, Artificial
  Synthetic oligonucleotide
cttatggtaatcctaaccaaggattgataagaggtgaagacgaagaaattgacaatg

SEQ ID NO: 388161 - DNA, 57 bp, Artificial
  Synthetic oligonucleotide
cttatggtagtatgactttgaatggtttatggttagatgacaaagtttattgtcctc

SEQ ID NO: 388162 - DNA, 60 bp, Artificial
  Synthetic oligonucleotide
cttatggtgacaatctaagattgttatcatatagctgttggattggccatccggtgattt

SEQ ID NO: 388163 - DNA, 57 bp, Artificial
  Synthetic oligonucleotide
cttatggtgatgacattgttgctgcctcagaccatgaacttgatcttgacagaatta

SEQ ID NO: 388164 - DNA, 60 bp, Artificial
  Synthetic oligonucleotide
cttatggtgccgtgaacagtagcctccctttccagaacgtgcatcctatcactattggag

SEQ ID NO: 388165 - DNA, 50 bp, Artificial
  Synthetic oligonucleotide
cttatggttagtatccagcaaagagtgattggctcaaacaagataagagc

SEQ ID NO: 388166 - DNA, 60 bp, Artificial
  Synthetic oligonucleotide
cttatgtaagtggtactgcagtaccactatttaaacgcagattgagaagattcgagcctc

SEQ ID NO: 388167 - DNA, 51 bp, Artificial
  Synthetic oligonucleotide
cttatgtaatgacacctttggaaatctgggcaataacagggctgatagtag

SEQ ID NO: 388168 - DNA, 50 bp, Artificial
  Synthetic oligonucleotide
cttatgtcaactcaccagattaagaagttaccaatccaccacgaatccta

SEQ ID NO: 388169 - DNA, 60 bp, Artificial
  Synthetic oligonucleotide
cttatgtctatgttgattattgggatgactcacaagcatttaggaacatggtatacgtca

SEQ ID NO: 388170 - DNA, 60 bp, Artificial
  Synthetic oligonucleotide
cttatgtctttagacatcaacacagagcaaatgtgtctggaggacgccatgtatggtaca

SEQ ID NO: 388171 - DNA, 52 bp, Artificial
  Synthetic oligonucleotide
cttatgtgactagtaatgggaagactaaacaaaaaaggttaggacctgttac

SEQ ID NO: 388172 - DNA, 55 bp, Artificial
  Synthetic oligonucleotide
cttatgtgcggggcggtatcctcgacgttttccatcctttgtgtaaggtgcgtgt

SEQ ID NO: 388173 - DNA, 55 bp, Artificial
  Synthetic oligonucleotide
cttatgtggagttcacgtctaagaagattgtcataacgagcaacacgcacccgga

SEQ ID NO: 388174 - DNA, 56 bp, Artificial
  Synthetic oligonucleotide
cttatgttccatacccccgttcaacggaggtgtatgttagatctatatttggccca

SEQ ID NO: 388175 - DNA, 55 bp, Artificial
  Synthetic oligonucleotide
cttatgttgtcaagcgtatgatgcatgaggtggttatgaatgtgggaccagctgg

SEQ ID NO: 388176 - DNA, 50 bp, Artificial
  Synthetic oligonucleotide
cttatgtttgtacatgacagagctgcaccgtttatgagaagttctcacgg

SEQ ID NO: 388177 - DNA, 59 bp, Artificial
  Synthetic oligonucleotide
cttattaacatagttaagtttgaacacgcttacgcattgcattatgtacaccataagcc

SEQ ID NO: 388178 - DNA, 60 bp, Artificial
  Synthetic oligonucleotide
cttattaatcccctgctatgtatcagcctctcctgtagtaacaagatgcttccatggagg

SEQ ID NO: 388179 - DNA, 55 bp, Artificial
  Synthetic oligonucleotide
cttattacaattcaagtgcttccaaccgtaacatgacgattaggtacggtaacaa

SEQ ID NO: 388180 - DNA, 50 bp, Artificial
  Synthetic oligonucleotide
cttattactaagggccaattcccagtcgcgtacggccaaagctcgttcat

SEQ ID NO: 388181 - DNA, 59 bp, Artificial
  Synthetic oligonucleotide
cttattagcattggacagttggaagaacttgtggaattggtttgacatatcaaattggc

SEQ ID NO: 388182 - DNA, 52 bp, Artificial
  Synthetic oligonucleotide
cttattatagcaaacgctgaaactacaatagtaagcgtccaagcattagcca

SEQ ID NO: 388183 - DNA, 56 bp, Artificial
  Synthetic oligonucleotide
cttattatcacgtctaaccgtgaaccccgcgagtggtataaatgtgaggtggattg

SEQ ID NO: 388184 - DNA, 56 bp, Artificial
  Synthetic oligonucleotide
cttattattcctcggatgttccccagccagggattgtcttcctcaagtctcttgag

SEQ ID NO: 388185 - DNA, 58 bp, Artificial
  Synthetic oligonucleotide
cttattcacaatcttccatatcgcttgaatttctggtagattaaccccaaacatgagt

SEQ ID NO: 388186 - DNA, 60 bp, Artificial
  Synthetic oligonucleotide
cttattcctcattaatgacatggggggaagatcaggtgatttgttggacagaagaacatc

SEQ ID NO: 388187 - DNA, 53 bp, Artificial
  Synthetic oligonucleotide
cttattcctcggtcctctccaacaaggtggtttaatttttaagcaatggtgta

SEQ ID NO: 388188 - DNA, 60 bp, Artificial
  Synthetic oligonucleotide
cttattcctctggctgcacttatcgtggtgacgcgtttactgaagtgcctgtgttgcgtg

SEQ ID NO: 388189 - DNA, 58 bp, Artificial
  Synthetic oligonucleotide
cttattcgaagctagcaaatatagaataggcaataactatactatgtactttaatact

SEQ ID NO: 388190 - DNA, 60 bp, Artificial
  Synthetic oligonucleotide
cttattcggtggtttgaatccccatcttgagaagcagcgagctcgaaagaccgatgaagc

SEQ ID NO: 388191 - DNA, 58 bp, Artificial
  Synthetic oligonucleotide
cttattcgtccgatgtgtagccttcgtcgtctgtatcgtcgtctccggttggctgccc

SEQ ID NO: 388192 - DNA, 60 bp, Artificial
  Synthetic oligonucleotide
cttattgaagcatctagcttgaatgactctgttgcaatgaggcagacatttggtaaccta

SEQ ID NO: 388193 - DNA, 60 bp, Artificial
  Synthetic oligonucleotide
cttattgaagcatctctgcatccatgctgagcatgatttgaggcggaattggggggaatc

SEQ ID NO: 388194 - DNA, 55 bp, Artificial
  Synthetic oligonucleotide
cttattgaccatatagactcaccatcatcaatttgggtcttcgcaggagcacccg

SEQ ID NO: 388195 - DNA, 60 bp, Artificial
  Synthetic oligonucleotide
cttattgatctaataggccatatgactcttagtgatttcacaaggttccccaatctgaaa

SEQ ID NO: 388196 - DNA, 52 bp, Artificial
  Synthetic oligonucleotide
cttattgcaattggattttcaaaacccacgcccttatggtgaagatgtggaa

SEQ ID NO: 388197 - DNA, 55 bp, Artificial
  Synthetic oligonucleotide
cttattgcctttgcttccagaggaaaccacgtcgcccctactcactacgtgacgg

SEQ ID NO: 388198 - DNA, 60 bp, Artificial
  Synthetic oligonucleotide
cttattgctaaggctgaaagtctcgttgtttctcgagaatattgctcgtcatgcaaacgt

SEQ ID NO: 388199 - DNA, 56 bp, Artificial
  Synthetic oligonucleotide
cttattgctggcactacgcgcctcaaccgtgtggtattgtacccgcgtcgacggtg

SEQ ID NO: 388200 - DNA, 53 bp, Artificial
  Synthetic oligonucleotide
cttattggagggttcgttcgttcgaaccagccaatcaggggagggggaagtga

SEQ ID NO: 388201 - DNA, 58 bp, Artificial
  Synthetic oligonucleotide
cttattggccatggtaaaaccagaagagataccacgagaaagagacaacagcggattc

SEQ ID NO: 388202 - DNA, 60 bp, Artificial
  Synthetic oligonucleotide
cttattgggggctaacaacaggagaacagtcttggcatctaggacatggagtatccatag

SEQ ID NO: 388203 - DNA, 51 bp, Artificial
  Synthetic oligonucleotide
cttattggttgcaaaaggcccagggacaaaacaatggcatttgctggcata

SEQ ID NO: 388204 - DNA, 55 bp, Artificial
  Synthetic oligonucleotide
cttattgtacaacgtcctgagggagataaaatcatccccccaaaggcggatagac

SEQ ID NO: 388205 - DNA, 53 bp, Artificial
  Synthetic oligonucleotide
cttattgtactacagggatactgacagaaggaaagtgttttgtccctgataag

SEQ ID NO: 388206 - DNA, 55 bp, Artificial
  Synthetic oligonucleotide
cttatttacaggagcctaaaagaccctgatgaccatcatgttcctgtggagtttc

SEQ ID NO: 388207 - DNA, 54 bp, Artificial
  Synthetic oligonucleotide
cttatttacgaaagaattgcacttcggtaagatctacgataatccgtttaagcc

SEQ ID NO: 388208 - DNA, 55 bp, Artificial
  Synthetic oligonucleotide
cttatttactatgcacttggcagctcgattcgaagcaatctgatgccactaatgc

SEQ ID NO: 388209 - DNA, 60 bp, Artificial
  Synthetic oligonucleotide
cttatttagtaggatatgcgttatcaaatagtcatcactcgattgactatcaatctagca

SEQ ID NO: 388210 - DNA, 59 bp, Artificial
  Synthetic oligonucleotide
cttatttcctacatcattaggtccttcaagcccctactgccatgcagttggtattttga

SEQ ID NO: 388211 - DNA, 54 bp, Artificial
  Synthetic oligonucleotide
cttatttcctggctaaacaaggccgaccacctccgctctctgacgtaaggggaa

SEQ ID NO: 388212 - DNA, 60 bp, Artificial
  Synthetic oligonucleotide
cttatttcgagcgtaggcgtgatcaaggaattctgaatttatatggcatacaggtagcgg

SEQ ID NO: 388213 - DNA, 56 bp, Artificial
  Synthetic oligonucleotide
cttatttgcaaatccctaagttcatctcatacacggaaaaaaataaactgttgctg

SEQ ID NO: 388214 - DNA, 52 bp, Artificial
  Synthetic oligonucleotide
cttatttggaaggtttaagtctgagaccaacttaccgtaggaagtttgagaa

SEQ ID NO: 388215 - DNA, 60 bp, Artificial
  Synthetic oligonucleotide
cttatttggacacccccagaccagatgatgggagcataacagggccttgcgaatctgatg

SEQ ID NO: 388216 - DNA, 54 bp, Artificial
  Synthetic oligonucleotide
cttatttggtattaaactcctgcgattgaatattataacaaaacgccaattgaa

SEQ ID NO: 388217 - DNA, 56 bp, Artificial
  Synthetic oligonucleotide
cttattttataagaaccaaattacttttggtcaatcaagaatgttcattccgcaca

SEQ ID NO: 388218 - DNA, 53 bp, Artificial
  Synthetic oligonucleotide
cttattttcaccaatgggtctgagatactccaaagaggtcagggaccgtcacg

SEQ ID NO: 388219 - DNA, 55 bp, Artificial
  Synthetic oligonucleotide
cttattttgctggtgtcctggtgtcccatttatactaaaagcctcttgggacacc

SEQ ID NO: 388220 - DNA, 58 bp, Artificial
  Synthetic oligonucleotide
cttatttttctgttgacgccctggtgaatgttcactttcctactgggaggtggatgca

SEQ ID NO: 388221 - DNA, 60 bp, Artificial
  Synthetic oligonucleotide
cttcaaaacagccaagtgttcagtctcattagaccaaatgagaatccggcacataagagt

SEQ ID NO: 388222 - DNA, 55 bp, Artificial
  Synthetic oligonucleotide
cttcaaaaccttcggttactttcttcgatgcgcctagcagcaccttagatgccac

SEQ ID NO: 388223 - DNA, 57 bp, Artificial
  Synthetic oligonucleotide
cttcaaaccggcgcaatgccgtgttcttcttggagttgtctgacaaggttgccacgg

SEQ ID NO: 388224 - DNA, 53 bp, Artificial
  Synthetic oligonucleotide
cttcaaacctgagacagtcactgcaggactggtagtagtgggtgcaatccgaa

SEQ ID NO: 388225 - DNA, 52 bp, Artificial
  Synthetic oligonucleotide
cttcaaactgtttggtattcaagctagtattatatgggatggggagcttatc

SEQ ID NO: 388226 - DNA, 55 bp, Artificial
  Synthetic oligonucleotide
cttcaaagaatgattagggatcgggctgaacataacgaaaggttcgtcactaggg

SEQ ID NO: 388227 - DNA, 60 bp, Artificial
  Synthetic oligonucleotide
cttcaaagatgatggctaatacgctacttcatcatttttacgaaagatatacttctaata

SEQ ID NO: 388228 - DNA, 60 bp, Artificial
  Synthetic oligonucleotide
cttcaaagcaagtggattgatctcacatctccactgacgtaagggatgacgcacaatccc

SEQ ID NO: 388229 - DNA, 57 bp, Artificial
  Synthetic oligonucleotide
cttcaaagccgttgaagtcgaatggaacgtgaatgtcttcgtacgtgtactggacga

SEQ ID NO: 388230 - DNA, 57 bp, Artificial
  Synthetic oligonucleotide
cttcaaagccgttgaagtcgaatgggacgtgcatgtttccgtacgtgtacttgacta

SEQ ID NO: 388231 - DNA, 60 bp, Artificial
  Synthetic oligonucleotide
cttcaaagcttaagctcactgttcccgcgctgtttcgacgcttctagctcacagcccgtg

SEQ ID NO: 388232 - DNA, 55 bp, Artificial
  Synthetic oligonucleotide
cttcaaagggtatgtggatggatacaagtctggtgtacgtgatcaggctacaaca

SEQ ID NO: 388233 - DNA, 58 bp, Artificial
  Synthetic oligonucleotide
cttcaaagtcattgaaggctggtccaaacctaactccaaattgcagataaataggcaa

SEQ ID NO: 388234 - DNA, 60 bp, Artificial
  Synthetic oligonucleotide
cttcaaagtgcggaagacacgagaatttagatatatgcatcgtgaggtgacgtttataca

SEQ ID NO: 388235 - DNA, 58 bp, Artificial
  Synthetic oligonucleotide
cttcaaatcttacattgattgctactgcttttggtcctaccggatacccacttcattc

SEQ ID NO: 388236 - DNA, 54 bp, Artificial
  Synthetic oligonucleotide
cttcaaattgtctcaattgcttaatgtggacgagatgtccgctgagcagaggag

SEQ ID NO: 388237 - DNA, 53 bp, Artificial
  Synthetic oligonucleotide
cttcaacaccgaccccggtaagggaatacctgatagatttgaaggcaaagtgg

SEQ ID NO: 388238 - DNA, 56 bp, Artificial
  Synthetic oligonucleotide
cttcaacagagggaacacaatgctagcatggacattataaaactaaagtcagtgtt

SEQ ID NO: 388239 - DNA, 60 bp, Artificial
  Synthetic oligonucleotide
cttcaacagattgagagcatgatcgaggccgagtcttctgtcaaagaaaaggacatgact

SEQ ID NO: 388240 - DNA, 55 bp, Artificial
  Synthetic oligonucleotide
cttcaacagatttgtcatcatggttgtgcgtgcaaccactcttgtctgcgctgtc

SEQ ID NO: 388241 - DNA, 55 bp, Artificial
  Synthetic oligonucleotide
cttcaaccatgcaattgatggagacgagcagggattgtctctattggtgcagaag

SEQ ID NO: 388242 - DNA, 55 bp, Artificial
  Synthetic oligonucleotide
cttcaacctactccaaagcccatccccggagcgttcaaccagatgtcccggttca

SEQ ID NO: 388243 - DNA, 58 bp, Artificial
  Synthetic oligonucleotide
cttcaacgggaaatttgacaagagctggaccatctgatgtttcacgtaaccttatcca

SEQ ID NO: 388244 - DNA, 54 bp, Artificial
  Synthetic oligonucleotide
cttcaacgtaagagaaacagttataagcaaaaattatgaaactaacgtcggcga

SEQ ID NO: 388245 - DNA, 56 bp, Artificial
  Synthetic oligonucleotide
cttcaacgtggctctttccgtactaaaagccttattcccacagagcgacgctacgc

SEQ ID NO: 388246 - DNA, 55 bp, Artificial
  Synthetic oligonucleotide
cttcaactccacgggaaactctcggagccagattaaagccgcgcttgacaacgcg

SEQ ID NO: 388247 - DNA, 60 bp, Artificial
  Synthetic oligonucleotide
cttcaactcccaccactcaatccgcgccatgcaaatactcttcgaggagactgcggcatt

SEQ ID NO: 388248 - DNA, 60 bp, Artificial
  Synthetic oligonucleotide
cttcaactgcttagcatgagggagaccatgataaaagcagggtccaatctagacaaactc

SEQ ID NO: 388249 - DNA, 60 bp, Artificial
  Synthetic oligonucleotide
cttcaactttggtgcagttcgagccacgaccatccacgagcttctcgtgcgcatgaagcg

SEQ ID NO: 388250 - DNA, 60 bp, Artificial
  Synthetic oligonucleotide
cttcaagaactgctttaatcatagagctgaacatggttggttttacttgaatggtctcaa

SEQ ID NO: 388251 - DNA, 60 bp, Artificial
  Synthetic oligonucleotide
cttcaagacatgaggaacacaattatggcttctaagactgtgggcactgctgatgagaag

SEQ ID NO: 388252 - DNA, 55 bp, Artificial
  Synthetic oligonucleotide
cttcaagaccgaaaccactgactatcccctgttctgcggctactacgtcggctca

SEQ ID NO: 388253 - DNA, 53 bp, Artificial
  Synthetic oligonucleotide
cttcaagaccttaagggttgacgtaggtgtgcggaaaataattgtggatggtt

SEQ ID NO: 388254 - DNA, 55 bp, Artificial
  Synthetic oligonucleotide
cttcaagaggatacgggtggtaaacttcggcaccgcgataactcgatctcagaag

SEQ ID NO: 388255 - DNA, 60 bp, Artificial
  Synthetic oligonucleotide
cttcaagatgcgcactgggaaaagctcaataatgaggtcagatgcacctattgacacctg

SEQ ID NO: 388256 - DNA, 55 bp, Artificial
  Synthetic oligonucleotide
cttcaagcactagctggttctatactgatgctaacttgcaactctacagtccaga

SEQ ID NO: 388257 - DNA, 55 bp, Artificial
  Synthetic oligonucleotide
cttcaagggcaactggtacatcaacccttaacacctagaaccttgaatgcatggg

SEQ ID NO: 388258 - DNA, 59 bp, Artificial
  Synthetic oligonucleotide
cttcaaggtgttgagtctcttcggagtgaaaattaatcatggagttctggctcaggttg

SEQ ID NO: 388259 - DNA, 57 bp, Artificial
  Synthetic oligonucleotide
cttcaagtactacagatgttactcactacggtggttacgaccgattttcgcgtgatg

SEQ ID NO: 388260 - DNA, 53 bp, Artificial
  Synthetic oligonucleotide
cttcaagtgcaagtggtacaactactgatgtacctcgtaagggattattcatg

SEQ ID NO: 388261 - DNA, 55 bp, Artificial
  Synthetic oligonucleotide
cttcaagttataccctgcgtcagtagcggctatctctgatgatgaccctatcgac

SEQ ID NO: 388262 - DNA, 53 bp, Artificial
  Synthetic oligonucleotide
cttcaataaagctgccattttagaagtaagctagtgtgtgttcccatctctcc

SEQ ID NO: 388263 - DNA, 55 bp, Artificial
  Synthetic oligonucleotide
cttcaataaagcttgccttgaatgcttacagcagtgtgtgcctatctattcagtg

SEQ ID NO: 388264 - DNA, 59 bp, Artificial
  Synthetic oligonucleotide
cttcaataagatgttaggcttaaccaagatacctatagctaactgcttaacagaattga

SEQ ID NO: 388265 - DNA, 52 bp, Artificial
  Synthetic oligonucleotide
cttcaatacactatagcacattccaaagaagaagctctttctggcgataaat

SEQ ID NO: 388266 - DNA, 55 bp, Artificial
  Synthetic oligonucleotide
cttcaatacagcctcattgatctgaggagcatactgtttgatcttggaaaccgga

SEQ ID NO: 388267 - DNA, 60 bp, Artificial
  Synthetic oligonucleotide
cttcaatacttcttggatgtcctgggatggttgtgatctagactattattgcaacatggg

SEQ ID NO: 388268 - DNA, 60 bp, Artificial
  Synthetic oligonucleotide
cttcaataggctatcattgcagtatgtacctttgtgtgcaactacagcgactggtcgtgt

SEQ ID NO: 388269 - DNA, 55 bp, Artificial
  Synthetic oligonucleotide
cttcaatagtgactgatttgagcaagtttaaccaagcctttagatacgagactac

SEQ ID NO: 388270 - DNA, 60 bp, Artificial
  Synthetic oligonucleotide
cttcaatataacttctccaatgtgtctagtgtcaaagcagaatcgttttagactaacaga

SEQ ID NO: 388271 - DNA, 55 bp, Artificial
  Synthetic oligonucleotide
cttcaatcaccgactgccgaggcgtgtgggtatagtgatagagtagcacaactta

SEQ ID NO: 388272 - DNA, 58 bp, Artificial
  Synthetic oligonucleotide
cttcaatcacgtattccctcgcacgtttcttcactttcgcaacaagatcgtcgtattc

SEQ ID NO: 388273 - DNA, 55 bp, Artificial
  Synthetic oligonucleotide
cttcaatcagcatatgtcttgtgtgcgattcttacatagaacgatactaccaggg

SEQ ID NO: 388274 - DNA, 52 bp, Artificial
  Synthetic oligonucleotide
cttcaatcgtgatttgcgggatgtgcgaaggtccgtcgagcttaaggctagc

SEQ ID NO: 388275 - DNA, 55 bp, Artificial
  Synthetic oligonucleotide
cttcaatctccccgattgagcagatcaagtcatgcccgggtaaacccaagagtgt

SEQ ID NO: 388276 - DNA, 55 bp, Artificial
  Synthetic oligonucleotide
cttcaatggagggaaaataagtgttcagtacaacctcagtcactcctttgctgtg

SEQ ID NO: 388277 - DNA, 55 bp, Artificial
  Synthetic oligonucleotide
cttcaatgtctgaaaggacaggaatccctcagatataggccgctgcaatgggacg

SEQ ID NO: 388278 - DNA, 60 bp, Artificial
  Synthetic oligonucleotide
cttcaattactgagtatgctgaacaaatatcagacgaatttgctaaggctcgaaaaccaa

SEQ ID NO: 388279 - DNA, 60 bp, Artificial
  Synthetic oligonucleotide
cttcaattagtagatccacatccataagatcaataggtaataacactacgatgcggatta

SEQ ID NO: 388280 - DNA, 55 bp, Artificial
  Synthetic oligonucleotide
cttcaattattgggtgagcattctggcgatgctacaattgtccagggtccagttg

SEQ ID NO: 388281 - DNA, 57 bp, Artificial
  Synthetic oligonucleotide
cttcaattgcgttctctggccggacgagactacggcgttgattgttgcccctttcag

SEQ ID NO: 388282 - DNA, 55 bp, Artificial
  Synthetic oligonucleotide
cttcaattgctcccactgatagtgtttcgtcctctggaaagaggtccaagccagg

SEQ ID NO: 388283 - DNA, 55 bp, Artificial
  Synthetic oligonucleotide
cttcaatttccacccataaccgtttccagtctcggttggcaagtcaccatgtttg

SEQ ID NO: 388284 - DNA, 57 bp, Artificial
  Synthetic oligonucleotide
cttcaatttgttcggggtagttccgatacagggtccgataaatagagctgttgcaca

SEQ ID NO: 388285 - DNA, 50 bp, Artificial
  Synthetic oligonucleotide
cttcacaagtttcaatgcgcttaggagaagagtcgggagttatatcgaca

SEQ ID NO: 388286 - DNA, 53 bp, Artificial
  Synthetic oligonucleotide
cttcacacttaccccggggtataagaccctcctcagtcggtgtctgtggtggt

SEQ ID NO: 388287 - DNA, 60 bp, Artificial
  Synthetic oligonucleotide
cttcacagacgtcccagatgaggcggctgaattactccgacaggagttcttggccaagat

SEQ ID NO: 388288 - DNA, 55 bp, Artificial
  Synthetic oligonucleotide
cttcacaggaattgtgaaactgctcaattctcgtcttaaagactgagtccagcgg

SEQ ID NO: 388289 - DNA, 50 bp, Artificial
  Synthetic oligonucleotide
cttcacagtccttatatgtttaatgccttcactcggccaggtagtgtccc

SEQ ID NO: 388290 - DNA, 55 bp, Artificial
  Synthetic oligonucleotide
cttcacagtgtgggttgtcctcctcatcattgagtcaatcttatgggctgctagt

SEQ ID NO: 388291 - DNA, 60 bp, Artificial
  Synthetic oligonucleotide
cttcacatcagatgtaaagctttgcagctcccttcttaatgcttgtgtccactgaaagct

SEQ ID NO: 388292 - DNA, 54 bp, Artificial
  Synthetic oligonucleotide
cttcacatctgatgtgaagctctgaagttccctcctcaatgcctgggtccactg

SEQ ID NO: 388293 - DNA, 55 bp, Artificial
  Synthetic oligonucleotide
cttcacattaatacaaatcaggaatccgctcgctttatatgtgcccataggctgg

SEQ ID NO: 388294 - DNA, 55 bp, Artificial
  Synthetic oligonucleotide
cttcaccaaaacacgtgcgaacactacaaacggtgtccaaacggccatccacaac

SEQ ID NO: 388295 - DNA, 55 bp, Artificial
  Synthetic oligonucleotide
cttcaccagatgtccttaatccatccatgagttttaaaagcaaccaccgaagtct

SEQ ID NO: 388296 - DNA, 60 bp, Artificial
  Synthetic oligonucleotide
cttcaccagattcgtttccatctggaaaattttcaacgaatgcgcaacatagctttatca

SEQ ID NO: 388297 - DNA, 59 bp, Artificial
  Synthetic oligonucleotide
cttcaccagtggatgcagctcccttcaggtgaagtacattcccgtaagtcgtcggataa

SEQ ID NO: 388298 - DNA, 55 bp, Artificial
  Synthetic oligonucleotide
cttcacccactattgagacacgaacgcgtcagtataccttacacgatctttgctc

SEQ ID NO: 388299 - DNA, 54 bp, Artificial
  Synthetic oligonucleotide
cttcaccccaggtacaaggcacacggttctattcttcgacccggttactggtga

SEQ ID NO: 388300 - DNA, 54 bp, Artificial
  Synthetic oligonucleotide
cttcacccccagccctgtggtggtgggaacgaccgacaaattgggcgcgcctac

SEQ ID NO: 388301 - DNA, 56 bp, Artificial
  Synthetic oligonucleotide
cttcacccgctccgtctctctcgggaggcttcgcggggtaggcgcctccactcgga

SEQ ID NO: 388302 - DNA, 55 bp, Artificial
  Synthetic oligonucleotide
cttcaccgagttcatctctaagaaacatctcggggacgtcctgttcgaaaactac

SEQ ID NO: 388303 - DNA, 59 bp, Artificial
  Synthetic oligonucleotide
cttcaccgatctgtctctctaccccgagatctacacctacaagatatcgggtcaaacac

SEQ ID NO: 388304 - DNA, 58 bp, Artificial
  Synthetic oligonucleotide
cttcaccgatttaaggccttactcatgcctgtcctcccaccaaggtatggtctcagac

SEQ ID NO: 388305 - DNA, 58 bp, Artificial
  Synthetic oligonucleotide
cttcaccgggacctctgcttctgtccatgctgtcgctggtgggttacgaggtttagaa

SEQ ID NO: 388306 - DNA, 59 bp, Artificial
  Synthetic oligonucleotide
cttcaccgttacggatcacggtgaccactggcacatcacgttctcaggacaccccacca

SEQ ID NO: 388307 - DNA, 54 bp, Artificial
  Synthetic oligonucleotide
cttcaccgttggtgcccggaaggggatgtccacggagtgtttcgccgtcgacaa

SEQ ID NO: 388308 - DNA, 55 bp, Artificial
  Synthetic oligonucleotide
cttcacctctgcacgtcgcatggagaccaccgtgaacgcccatcaggtgttgccc

SEQ ID NO: 388309 - DNA, 52 bp, Artificial
  Synthetic oligonucleotide
cttcaccttagggtgttgaaaggtgtccaacgaccgtgtaggaaaagaagag

SEQ ID NO: 388310 - DNA, 60 bp, Artificial
  Synthetic oligonucleotide
cttcacgacatgctagtagatcatgaatacgttccgaacaacgtaattcggcgcgtcatt

SEQ ID NO: 388311 - DNA, 59 bp, Artificial
  Synthetic oligonucleotide
cttcacgaccactctccctcagttgatgggtcagaatttgaccctattgactgttatag

SEQ ID NO: 388312 - DNA, 51 bp, Artificial
  Synthetic oligonucleotide
cttcacgcactgcggaaggaataagcactcaaaatgggtgatcacaacttg

SEQ ID NO: 388313 - DNA, 60 bp, Artificial
  Synthetic oligonucleotide
cttcacgccctggctcgcatggcacgtggctgcaaacactgcctgtgtgacggaccggaa

SEQ ID NO: 388314 - DNA, 54 bp, Artificial
  Synthetic oligonucleotide
cttcacgcgtggggaccgctgcagattggaagacagggataggggtcagcagag

SEQ ID NO: 388315 - DNA, 51 bp, Artificial
  Synthetic oligonucleotide
cttcacggagcggcgagaggtcatggttccacgaacacgctagggtcggat

SEQ ID NO: 388316 - DNA, 57 bp, Artificial
  Synthetic oligonucleotide
cttcacggcttaaagtccactatttctaatttgttacctgatttacatctagataca

SEQ ID NO: 388317 - DNA, 55 bp, Artificial
  Synthetic oligonucleotide
cttcacggtggctggaacgcgcccagtccgcagaaataccctctgacgctgagag

SEQ ID NO: 388318 - DNA, 60 bp, Artificial
  Synthetic oligonucleotide
cttcactaacaagataataacgatagtactcctaactatcgtgacggatgacaatgagac

SEQ ID NO: 388319 - DNA, 60 bp, Artificial
  Synthetic oligonucleotide
cttcactagaagaaatgatgacagcatgtcagggagtgggaggacctagccataaagcaa

SEQ ID NO: 388320 - DNA, 57 bp, Artificial
  Synthetic oligonucleotide
cttcactattaataaccctacctttgaagattactgtgccgtagttgagttctgcaa

SEQ ID NO: 388321 - DNA, 55 bp, Artificial
  Synthetic oligonucleotide
cttcactcaaggtccggttagagtccctggcaggtgtgggctacaggagcatgtg

SEQ ID NO: 388322 - DNA, 55 bp, Artificial
  Synthetic oligonucleotide
cttcactcctccatggtgatataaagaccacccacaaacttttcgggtgagcccc

SEQ ID NO: 388323 - DNA, 58 bp, Artificial
  Synthetic oligonucleotide
cttcactgatgagagaattgaatggagagaccctgatggtatgcttcgggatcatatt

SEQ ID NO: 388324 - DNA, 60 bp, Artificial
  Synthetic oligonucleotide
cttcactggctcatgcaccaatgcagttgggaggagtgggacaaacaattatggagtaaa

SEQ ID NO: 388325 - DNA, 55 bp, Artificial
  Synthetic oligonucleotide
cttcactgggctatgattaaaagttcttgggaaatcaaccagccgactacatgtc

SEQ ID NO: 388326 - DNA, 54 bp, Artificial
  Synthetic oligonucleotide
cttcactggttgtatgaaaaaatccttttctgggagtaataagctgtgtttcat

SEQ ID NO: 388327 - DNA, 53 bp, Artificial
  Synthetic oligonucleotide
cttcactgtttagctttgaaacctttgttaacgaatattacggtacagacttg

SEQ ID NO: 388328 - DNA, 55 bp, Artificial
  Synthetic oligonucleotide
cttcacttaaagtggaagatacatctagtagagaatgtgatacctgcttatggga

SEQ ID NO: 388329 - DNA, 56 bp, Artificial
  Synthetic oligonucleotide
cttcacttttcaatatggaggcaaagaacatggacccccccactccttacatatgt

SEQ ID NO: 388330 - DNA, 54 bp, Artificial
  Synthetic oligonucleotide
cttcagaaaaagggcctccagctggttcccggccacgtggatcttaaagggagc

SEQ ID NO: 388331 - DNA, 60 bp, Artificial
  Synthetic oligonucleotide
cttcagaagacgttgcttatctgaccggattcataaagcctgacgactccaaggactcaa

SEQ ID NO: 388332 - DNA, 53 bp, Artificial
  Synthetic oligonucleotide
cttcagaagcgcttatactcacatgtgtatagaagtgataaggttgattcaac

SEQ ID NO: 388333 - DNA, 55 bp, Artificial
  Synthetic oligonucleotide
cttcagacagcgagggagacacagaagtgttaatttaaacgcccacgcatttgtg

SEQ ID NO: 388334 - DNA, 60 bp, Artificial
  Synthetic oligonucleotide
cttcagaccccatccgttattgtatgtgatcgtcatttgtgcatccttgtgtcgaatgag

SEQ ID NO: 388335 - DNA, 52 bp, Artificial
  Synthetic oligonucleotide
cttcagaccggaagtggttaacggtctttagtattttcggtgcgtattagta

SEQ ID NO: 388336 - DNA, 60 bp, Artificial
  Synthetic oligonucleotide
cttcagacgaggcttatgagatcaatgcatcgtatcgtactgggtgtaaggcagtaatga

SEQ ID NO: 388337 - DNA, 58 bp, Artificial
  Synthetic oligonucleotide
cttcagacggcttgtgattttagggtacataacatgtgtaaagccttgattcagaaaa

SEQ ID NO: 388338 - DNA, 60 bp, Artificial
  Synthetic oligonucleotide
cttcagacgtcaattgctgagctccagccctggtgggaagtgactctcaacgcgctattg

SEQ ID NO: 388339 - DNA, 55 bp, Artificial
  Synthetic oligonucleotide
cttcagagcagaccagagccgacagccccaccagcagagagcttcaggttcgagg

SEQ ID NO: 388340 - DNA, 60 bp, Artificial
  Synthetic oligonucleotide
cttcagaggaagaaagcacccttatctcgcaagaagagacgccgacacaactactcagag

SEQ ID NO: 388341 - DNA, 60 bp, Artificial
  Synthetic oligonucleotide
cttcagaggctaataaatggatagcaatgggcacagattgtacagttaaagtatgcccac

SEQ ID NO: 388342 - DNA, 55 bp, Artificial
  Synthetic oligonucleotide
cttcagagggtaggacccctacgcagcacccttagtcacgtcggggcttagctcg

SEQ ID NO: 388343 - DNA, 59 bp, Artificial
  Synthetic oligonucleotide
cttcagagtcaccccttggaccatggatagggttgtggagagctacactgggtcccagc

SEQ ID NO: 388344 - DNA, 51 bp, Artificial
  Synthetic oligonucleotide
cttcagagtggcactccaccccccacaataatctaccctttccaaatcgag

SEQ ID NO: 388345 - DNA, 55 bp, Artificial
  Synthetic oligonucleotide
cttcagagtttatgtcgcgcgcatcatgaggaaaagggaattactcgttagcgtg

SEQ ID NO: 388346 - DNA, 55 bp, Artificial
  Synthetic oligonucleotide
cttcagataattacaacagtcgtggtttgtactgcaggctttggccttcggtact

SEQ ID NO: 388347 - DNA, 55 bp, Artificial
  Synthetic oligonucleotide
cttcagatcgaacagtttaacagctaatgaatcaggaaggctaatagatttcctc

SEQ ID NO: 388348 - DNA, 55 bp, Artificial
  Synthetic oligonucleotide
cttcagatctgatatcaaagacaccatcgttcaccttgaagacagagtctgtcct

SEQ ID NO: 388349 - DNA, 60 bp, Artificial
  Synthetic oligonucleotide
cttcagatgaagcaccttttgactgcaatgagcaaataatcagtaatttgaatagaattt

SEQ ID NO: 388350 - DNA, 55 bp, Artificial
  Synthetic oligonucleotide
cttcagattctagtgtcccaacagctttagtataatgagccatggtatatggttt

SEQ ID NO: 388351 - DNA, 60 bp, Artificial
  Synthetic oligonucleotide
cttcagcatcgctgctcgctcttaggcgcgagatgattcttaggagtgctgaagggcgtg

SEQ ID NO: 388352 - DNA, 57 bp, Artificial
  Synthetic oligonucleotide
cttcagccaaccgggtgtcagctccgattccggagcagccctttccaccccaactga

SEQ ID NO: 388353 - DNA, 57 bp, Artificial
  Synthetic oligonucleotide
cttcagcgaacagaaaagccccttctcggcgggagcaagaccatagcgatgggggga

SEQ ID NO: 388354 - DNA, 60 bp, Artificial
  Synthetic oligonucleotide
cttcagcgaacagaagagactcccctcgataggagcaagaccatagcgatggggggagat

SEQ ID NO: 388355 - DNA, 55 bp, Artificial
  Synthetic oligonucleotide
cttcagcgtcacgaacttccttgtgaatcgacttgaaggtgaatcccttacgggc

SEQ ID NO: 388356 - DNA, 57 bp, Artificial
  Synthetic oligonucleotide
cttcagctactatctaccctacaaccacttaccaaagaaatgtcttccaatgactcc

SEQ ID NO: 388357 - DNA, 60 bp, Artificial
  Synthetic oligonucleotide
cttcagctccattgtctgagaataggttaatccagctgacatgccctgtgcctgtgcaac

SEQ ID NO: 388358 - DNA, 60 bp, Artificial
  Synthetic oligonucleotide
cttcagctcgtgtcgttgacgtgcgcggttctcccgctatgtacgccaatgcggtatgcc

SEQ ID NO: 388359 - DNA, 55 bp, Artificial
  Synthetic oligonucleotide
cttcagctctagcgacagcacagacgcagacataacttaccctaacatggagggg

SEQ ID NO: 388360 - DNA, 55 bp, Artificial
  Synthetic oligonucleotide
cttcagcttccacactcacttcaaccccactactactctagtcgcacccaccgct

SEQ ID NO: 388361 - DNA, 55 bp, Artificial
  Synthetic oligonucleotide
cttcaggacactctcgactcaattgagaatcttgaagatgacacaaagtcagagc

SEQ ID NO: 388362 - DNA, 58 bp, Artificial
  Synthetic oligonucleotide
cttcaggcccgtggcacatccggtccgtggtggttcacagcgggcacccctcagtgta

SEQ ID NO: 388363 - DNA, 59 bp, Artificial
  Synthetic oligonucleotide
cttcaggcctcgttatgttgtgcatccacggttcgcctgttaattcctacaccaacaca

SEQ ID NO: 388364 - DNA, 52 bp, Artificial
  Synthetic oligonucleotide
cttcaggcgaaggtaagaaaccttgtccaaaaggaaaaactaactgcaggtg

SEQ ID NO: 388365 - DNA, 57 bp, Artificial
  Synthetic oligonucleotide
cttcaggcggaggagcgaaacctgtcagttgcgctgtgtgagcgacgcgaattgcaa

SEQ ID NO: 388366 - DNA, 55 bp, Artificial
  Synthetic oligonucleotide
cttcaggctgcagcgggacgtaacagcctggttaacgatttagcctctcgacgtg

SEQ ID NO: 388367 - DNA, 55 bp, Artificial
  Synthetic oligonucleotide
cttcagggacaaatggtacaccaggctatatcacctagaactttaaatgcctggg

SEQ ID NO: 388368 - DNA, 60 bp, Artificial
  Synthetic oligonucleotide
cttcagggcttcagctgatcaatgttacccaacacccagctagaatagcagaaacacctg

SEQ ID NO: 388369 - DNA, 59 bp, Artificial
  Synthetic oligonucleotide
cttcaggtaccacatggatgcagattacaccaggtgggactccacccagcagagagcca

SEQ ID NO: 388370 - DNA, 52 bp, Artificial
  Synthetic oligonucleotide
cttcaggtattatatcaccgtcttgttcgaagccataaaggtgcaaggccat

SEQ ID NO: 388371 - DNA, 55 bp, Artificial
  Synthetic oligonucleotide
cttcaggtccgaagttgaatggattattccgaactgggaacatgtcgaaaagaat

SEQ ID NO: 388372 - DNA, 60 bp, Artificial
  Synthetic oligonucleotide
cttcaggtgaagttacagcacagcaacgtgggaacccatcaggccagatatcaaccacca

SEQ ID NO: 388373 - DNA, 60 bp, Artificial
  Synthetic oligonucleotide
cttcaggtgaagttacagcgcaacagcgtggaaatccatcaggtcagatatcaaccacca

SEQ ID NO: 388374 - DNA, 60 bp, Artificial
  Synthetic oligonucleotide
cttcaggtggcaaggatcatcaaaatcctgtaccaaagcagtgagtagtgacaattaagt

SEQ ID NO: 388375 - DNA, 51 bp, Artificial
  Synthetic oligonucleotide
cttcaggttcgaggagacaacccccggtccgaagagggaaccggaggacaa

SEQ ID NO: 388376 - DNA, 59 bp, Artificial
  Synthetic oligonucleotide
cttcagtactttctgactagagcagaagcgcaactgcacgtgtgggttccccccctcaa

SEQ ID NO: 388377 - DNA, 54 bp, Artificial
  Synthetic oligonucleotide
cttcagtagaaaacactagagattgtctaggtaataagttctcaggaggtatgt

SEQ ID NO: 388378 - DNA, 54 bp, Artificial
  Synthetic oligonucleotide
cttcagtagatgcgttgagttttataactcaacccaccaagatttttacttacc

SEQ ID NO: 388379 - DNA, 60 bp, Artificial
  Synthetic oligonucleotide
cttcagtatcagccagctgaacacatcatctagtgagcagtatataattaatgtcccagt

SEQ ID NO: 388380 - DNA, 55 bp, Artificial
  Synthetic oligonucleotide
cttcagtcaaaggcaacatggcaaaagatgatgctcatgagcaaatttggacgcc

SEQ ID NO: 388381 - DNA, 57 bp, Artificial
  Synthetic oligonucleotide
cttcagtcacctctttatatggtgtatcaattttaagtataactgtaggagtcccta

SEQ ID NO: 388382 - DNA, 60 bp, Artificial
  Synthetic oligonucleotide
cttcagtctaattagatcaaatgagaatccagcacataaaagtcaattggtgtggatggc

SEQ ID NO: 388383 - DNA, 56 bp, Artificial
  Synthetic oligonucleotide
cttcagtgatattaaccggcaattcatctctttgtcccatccgtgggtgggctata

SEQ ID NO: 388384 - DNA, 60 bp, Artificial
  Synthetic oligonucleotide
cttcagtgatcaaatgcgaatatttttccgcaaactttcgatcaactcttgagttgaaga

SEQ ID NO: 388385 - DNA, 57 bp, Artificial
  Synthetic oligonucleotide
cttcagtgccggtggactgggttcctaccgggcgaacaacctggagcatccacgcta

SEQ ID NO: 388386 - DNA, 55 bp, Artificial
  Synthetic oligonucleotide
cttcagtgcctacctggacaggaacacctacgatacagaccactgaactgggacg

SEQ ID NO: 388387 - DNA, 55 bp, Artificial
  Synthetic oligonucleotide
cttcagtggcgtgcaagccgtacttcacacggttaatagacgctgcctacgacgc

SEQ ID NO: 388388 - DNA, 60 bp, Artificial
  Synthetic oligonucleotide
cttcagttacatcgttgtgtatgcttattggaaatgcaaccgtcatacccagtccacaaa

SEQ ID NO: 388389 - DNA, 55 bp, Artificial
  Synthetic oligonucleotide
cttcagttaggtctaagccaaaccactgtgcgaagcagtcaatgcagtagcaatc

SEQ ID NO: 388390 - DNA, 52 bp, Artificial
  Synthetic oligonucleotide
cttcagttccgataaaaaccctaatttcccgatgatcggagtcgaaattttc

SEQ ID NO: 388391 - DNA, 60 bp, Artificial
  Synthetic oligonucleotide
cttcagttggtatagttactcattcagggtacaatcgtgatcatatcaagggactcttgc

SEQ ID NO: 388392 - DNA, 57 bp, Artificial
  Synthetic oligonucleotide
cttcagttttcccttgaatttggcgaaatgtgttctctgatggacattcgtatcgga

SEQ ID NO: 388393 - DNA, 59 bp, Artificial
  Synthetic oligonucleotide
cttcataacctgggtcaatcgtcatcgattcattgttaagacaaattacaccaagatta

SEQ ID NO: 388394 - DNA, 53 bp, Artificial
  Synthetic oligonucleotide
cttcataagaggaaagaaagtggttccaagagggaagctttccacaagagggg

SEQ ID NO: 388395 - DNA, 55 bp, Artificial
  Synthetic oligonucleotide
cttcataatgatagtaggaggcttgataggtttaagaatagtttttactgtactt

SEQ ID NO: 388396 - DNA, 58 bp, Artificial
  Synthetic oligonucleotide
cttcataatgtactcctgtgctccttatataaatcgtgaacttttttgctgttccgga

SEQ ID NO: 388397 - DNA, 56 bp, Artificial
  Synthetic oligonucleotide
cttcatacttaccctgatggctcaaaggcgtatgccgtctccctttttgagtctga

SEQ ID NO: 388398 - DNA, 56 bp, Artificial
  Synthetic oligonucleotide
cttcatagacttaacagaaccatgggtagaaggttggggaaacgcattctactcaa

SEQ ID NO: 388399 - DNA, 60 bp, Artificial
  Synthetic oligonucleotide
cttcatagagcgacccaccgctgtagacacttgttacccatttgatgtaccagattatca

SEQ ID NO: 388400 - DNA, 50 bp, Artificial
  Synthetic oligonucleotide
cttcatagctcgcctactagaggctattgatgcggaaccagtgacggacc

SEQ ID NO: 388401 - DNA, 55 bp, Artificial
  Synthetic oligonucleotide
cttcatagtaagaacttacaacaagcaactggtaaatggctacgcagacaaatga

SEQ ID NO: 388402 - DNA, 60 bp, Artificial
  Synthetic oligonucleotide
cttcatatagagggtatgctggaatatttgggtatgcaataacaaaagatctgaagtcca

SEQ ID NO: 388403 - DNA, 54 bp, Artificial
  Synthetic oligonucleotide
cttcatatcttttaatttgcctagactttcggtatttgggataaagaatgttac

SEQ ID NO: 388404 - DNA, 60 bp, Artificial
  Synthetic oligonucleotide
cttcatatgccaaagaagtctctgttgtaaatagaaacatggcactgataccttggagag

SEQ ID NO: 388405 - DNA, 60 bp, Artificial
  Synthetic oligonucleotide
cttcatattctccatgatgcgaacgtcgactatgaacctgactccctccttgtttgttcc

SEQ ID NO: 388406 - DNA, 55 bp, Artificial
  Synthetic oligonucleotide
cttcatcaggtttctcagataaagcagagaccccaagcatcgcttctctatccag

SEQ ID NO: 388407 - DNA, 50 bp, Artificial
  Synthetic oligonucleotide
cttcatcagtaagcttacggacaacaatagtagtattggaatcttctggc

SEQ ID NO: 388408 - DNA, 55 bp, Artificial
  Synthetic oligonucleotide
cttcatcagtgggatacaatacttggcgggcctatcaacgctgcctggtaacccc

SEQ ID NO: 388409 - DNA, 58 bp, Artificial
  Synthetic oligonucleotide
cttcatcatccaaccactgaagttagatcagaattttatgcaatattggatgtatggg

SEQ ID NO: 388410 - DNA, 53 bp, Artificial
  Synthetic oligonucleotide
cttcatcatttccaaaccgggaatagagatgttgatcaactgggcctcagaag

SEQ ID NO: 388411 - DNA, 55 bp, Artificial
  Synthetic oligonucleotide
cttcatccattgctagtcccatttacattcccgttattccacccattacggaaga

SEQ ID NO: 388412 - DNA, 55 bp, Artificial
  Synthetic oligonucleotide
cttcatcccaccaatggcttccctcgaggagaaaggggtctctttcacatccaaa

SEQ ID NO: 388413 - DNA, 58 bp, Artificial
  Synthetic oligonucleotide
cttcatccggcaaattgcctcccattaagttttgtccattatgttcatgccccaatgc

SEQ ID NO: 388414 - DNA, 56 bp, Artificial
  Synthetic oligonucleotide
cttcatcctcgttcgcgaggattattgaaggtatcccattcgggatagtcttcttt

SEQ ID NO: 388415 - DNA, 56 bp, Artificial
  Synthetic oligonucleotide
cttcatccttgtttatgtcgcactgtgggtatgttaagaagatgtttcttgcagtt

SEQ ID NO: 388416 - DNA, 60 bp, Artificial
  Synthetic oligonucleotide
cttcatcgatgaaagaggtgaatcagtaattgtagaatctggcgatccaaatgcactact

SEQ ID NO: 388417 - DNA, 55 bp, Artificial
  Synthetic oligonucleotide
cttcatcgtactgcactttaggagtggactcgtcataatctaaccagttagggcg

SEQ ID NO: 388418 - DNA, 55 bp, Artificial
  Synthetic oligonucleotide
cttcatctagtattctcttggagcccatcaactcaagctcaagtgaatcaccaag

SEQ ID NO: 388419 - DNA, 53 bp, Artificial
  Synthetic oligonucleotide
cttcatcttatccgacattagtatcaccagtttcaacagagaaccaactatct

SEQ ID NO: 388420 - DNA, 60 bp, Artificial
  Synthetic oligonucleotide
cttcatgaaacgatgtgcgaggctctagcgatctcgggtcacgtaaacgagaggaactac

SEQ ID NO: 388421 - DNA, 60 bp, Artificial
  Synthetic oligonucleotide
cttcatgcaacggcaagatgtgcttgataagaatcatgtccccgacatcgataaactaat

SEQ ID NO: 388422 - DNA, 55 bp, Artificial
  Synthetic oligonucleotide
cttcatgcacggcaaagaaaagattgtggaatggagggatgttccgtacctcccc

SEQ ID NO: 388423 - DNA, 60 bp, Artificial
  Synthetic oligonucleotide
cttcatgcagctacgactgagcctagctgttaactgagccgccgtggacggaaattgcag

SEQ ID NO: 388424 - DNA, 54 bp, Artificial
  Synthetic oligonucleotide
cttcatgcagctgcgtgagagtcgggctcctaattgagacgccgttgacgggaa

SEQ ID NO: 388425 - DNA, 60 bp, Artificial
  Synthetic oligonucleotide
cttcatgcatgacataagtgacatcactccccatgaatctatagaaatgtctgttttagg

SEQ ID NO: 388426 - DNA, 60 bp, Artificial
  Synthetic oligonucleotide
cttcatgcgacattgcagcgacgtggtccctatcggccgcgttcgctggttctccgagac

SEQ ID NO: 388427 - DNA, 53 bp, Artificial
  Synthetic oligonucleotide
cttcatggaccccatgtcaatagccgctcgaggcataatggaacaccttcatg

SEQ ID NO: 388428 - DNA, 56 bp, Artificial
  Synthetic oligonucleotide
cttcatggactattgggctgagggggaatgctaccgagcgtgtttttacgtggagt

SEQ ID NO: 388429 - DNA, 60 bp, Artificial
  Synthetic oligonucleotide
cttcatggtcatcagtgaatctacttccttattcaggtctcttagtccagtgagatcact

SEQ ID NO: 388430 - DNA, 55 bp, Artificial
  Synthetic oligonucleotide
cttcatgtaagttgactgacccagatgcactggaaaggcgctttcctattcgcct

SEQ ID NO: 388431 - DNA, 60 bp, Artificial
  Synthetic oligonucleotide
cttcatgtacaatcaaagtatgtccacttaatacacaaactctaggaattggttgcttga

SEQ ID NO: 388432 - DNA, 60 bp, Artificial
  Synthetic oligonucleotide
cttcatgtattcggactttcactttattgatgaacggagtgaatcaataattgtagaatc

SEQ ID NO: 388433 - DNA, 55 bp, Artificial
  Synthetic oligonucleotide
cttcatgtcaccagacacgttggagcaagatgcagagtgtcaggcggtgctggat

SEQ ID NO: 388434 - DNA, 58 bp, Artificial
  Synthetic oligonucleotide
cttcattaaggattaccggtacacataccggtgccatagaggtgatacccagatacaa

SEQ ID NO: 388435 - DNA, 55 bp, Artificial
  Synthetic oligonucleotide
cttcattcgattccacactttctgggaaagtgattgagttggtcaaggcggttcg

SEQ ID NO: 388436 - DNA, 58 bp, Artificial
  Synthetic oligonucleotide
cttcattgatacccgtaaatactgcactgatggtttatcaccacgtgaaattcaaaag

SEQ ID NO: 388437 - DNA, 55 bp, Artificial
  Synthetic oligonucleotide
cttcattggactggcttttgctgtaaggctatttgtattgattgttgtttggcgg

SEQ ID NO: 388438 - DNA, 60 bp, Artificial
  Synthetic oligonucleotide
cttcatttaaggtgagctgctctatatccaatatgaccttagctattattgtataaacag

SEQ ID NO: 388439 - DNA, 58 bp, Artificial
  Synthetic oligonucleotide
cttcatttcgatcccttacactgtattattaaagtgcaaggtgacgattctatacttc

SEQ ID NO: 388440 - DNA, 54 bp, Artificial
  Synthetic oligonucleotide
cttcatttcggtcaagtcctggcagtggcagctatctgtaaggcaacggaagtt

SEQ ID NO: 388441 - DNA, 60 bp, Artificial
  Synthetic oligonucleotide
cttcatttgaggaggtcaatggcatccgaaagcctaaacatttgtatgtatccatgccta

SEQ ID NO: 388442 - DNA, 60 bp, Artificial
  Synthetic oligonucleotide
cttcatttgccaatggtgtcacaagggctggtcagtgtctggtccgtcgtgatgaacgtg

SEQ ID NO: 388443 - DNA, 53 bp, Artificial
  Synthetic oligonucleotide
cttccaaacaattcgagaagcggaaaggtgtgtcgaagaaattaacgctttag

SEQ ID NO: 388444 - DNA, 53 bp, Artificial
  Synthetic oligonucleotide
cttccaaacctctctacccaaagcaaaaacccggagactgggccgacttctgc

SEQ ID NO: 388445 - DNA, 56 bp, Artificial
  Synthetic oligonucleotide
cttccaaactgaaggatttcaccaagagtgtagaaaagacaactcttcttactcaa

SEQ ID NO: 388446 - DNA, 60 bp, Artificial
  Synthetic oligonucleotide
cttccaacacgattgttgtgcagaacagctttataggtggttcacattcaactcccgcta

SEQ ID NO: 388447 - DNA, 55 bp, Artificial
  Synthetic oligonucleotide
cttccaacacgctgttttgtgcagatttgctccgttcatgcgttatatcgagaag

SEQ ID NO: 388448 - DNA, 60 bp, Artificial
  Synthetic oligonucleotide
cttccaactcatgcgtactttgatgatacctattatcaagcgcttgaggaaaatgctgac

SEQ ID NO: 388449 - DNA, 54 bp, Artificial
  Synthetic oligonucleotide
cttccaactgggtttgacaagccatacgtccgccttgaggacgagacaccgcag

SEQ ID NO: 388450 - DNA, 52 bp, Artificial
  Synthetic oligonucleotide
cttccaaggtcgaaggagttttctcactcgttgtcgttgtggatcgaaaacc

SEQ ID NO: 388451 - DNA, 59 bp, Artificial
  Synthetic oligonucleotide
cttccaatcacaggttctatggatactgcatatgtaaactctacgcaacaagaaagttt

SEQ ID NO: 388452 - DNA, 55 bp, Artificial
  Synthetic oligonucleotide
cttccacaaaaatatccggattgccttctgggtacaacgtcattttcttcttgtc

SEQ ID NO: 388453 - DNA, 59 bp, Artificial
  Synthetic oligonucleotide
cttccacaacatacaccctcacaccattggggaatgccccaaatacgtgaaatcagata

SEQ ID NO: 388454 - DNA, 55 bp, Artificial
  Synthetic oligonucleotide
cttccacacccagtggatccatggtctcttcagagtctcagctgttcaacaagcc

SEQ ID NO: 388455 - DNA, 59 bp, Artificial
  Synthetic oligonucleotide
cttccacaggctgttcatccgattctcttgaaagagtctcctttctagtcgaagactta

SEQ ID NO: 388456 - DNA, 60 bp, Artificial
  Synthetic oligonucleotide
cttccaccactgctggtaagttgtcgtgtgacatgaaatcagtggttaattttgtcgata

SEQ ID NO: 388457 - DNA, 57 bp, Artificial
  Synthetic oligonucleotide
cttccacccagagttccttttccgtctttggaacacctgtgtagaacactggcatga

SEQ ID NO: 388458 - DNA, 58 bp, Artificial
  Synthetic oligonucleotide
cttccacgccaggcttacgaccgcctaatgctcccgtttgaggaggctgggtatgaga

SEQ ID NO: 388459 - DNA, 55 bp, Artificial
  Synthetic oligonucleotide
cttccacggagaagagtaagggatggatccagtagatcctagcctagagccctgg

SEQ ID NO: 388460 - DNA, 53 bp, Artificial
  Synthetic oligonucleotide
cttccactcccatgaagacgggtacacgttatgccgtgtgtacgaccccacaa

SEQ ID NO: 388461 - DNA, 60 bp, Artificial
  Synthetic oligonucleotide
cttccacttcattgacgagcggggcgaatcgataattgtagaatctggtgatccaaatgc

SEQ ID NO: 388462 - DNA, 56 bp, Artificial
  Synthetic oligonucleotide
cttccactttacaactctagagatgtgcggagaaatgctcacgttctggttcctaa

SEQ ID NO: 388463 - DNA, 55 bp, Artificial
  Synthetic oligonucleotide
cttccactttcaagattgtaaatttcgtgtctagtcattcctagcttgttcccaa

SEQ ID NO: 388464 - DNA, 55 bp, Artificial
  Synthetic oligonucleotide
cttccactttcactctaagagagttactgcacatggagacacaccacaattagat

SEQ ID NO: 388465 - DNA, 55 bp, Artificial
  Synthetic oligonucleotide
cttccagagaatggttctttggtaagagatcatcctcgtctgtttcttatgcggt

SEQ ID NO: 388466 - DNA, 60 bp, Artificial
  Synthetic oligonucleotide
cttccagagcatttcgcacacagaatgggagaatccatggacaatctgtacatgttgacc

SEQ ID NO: 388467 - DNA, 55 bp, Artificial
  Synthetic oligonucleotide
cttccagatgtgggtggatctataaatgctaattccctaatcagctatgtttgtc

SEQ ID NO: 388468 - DNA, 55 bp, Artificial
  Synthetic oligonucleotide
cttccagcagctccattgtgatgtgtggagttgattatgaagttgccgattggtc

SEQ ID NO: 388469 - DNA, 51 bp, Artificial
  Synthetic oligonucleotide
cttccagccccgaagtttcccgaggggtcggtaggcaataacgcggattgg

SEQ ID NO: 388470 - DNA, 59 bp, Artificial
  Synthetic oligonucleotide
cttccagccctgcttctatgttgaacttatacgggggaggctcaataagaatgatgacg

SEQ ID NO: 388471 - DNA, 51 bp, Artificial
  Synthetic oligonucleotide
cttccagcctagcggggtaacgaccaccaggcaaagcataactactatgac

SEQ ID NO: 388472 - DNA, 55 bp, Artificial
  Synthetic oligonucleotide
cttccagcctttcttatactgcattattgtggagctcaccttgtcttctagagcc

SEQ ID NO: 388473 - DNA, 55 bp, Artificial
  Synthetic oligonucleotide
cttccagcgatacgctgttgagacactggagttcgaaattcagccaatgtgcccc

SEQ ID NO: 388474 - DNA, 58 bp, Artificial
  Synthetic oligonucleotide
cttccagcgtaagtcggctggaggggttgcgtgaagcaagagcgaatatgtttaagga

SEQ ID NO: 388475 - DNA, 55 bp, Artificial
  Synthetic oligonucleotide
cttccagctccaggtgtgattcaattatcgctaggaaatcagccacctaataaca

SEQ ID NO: 388476 - DNA, 60 bp, Artificial
  Synthetic oligonucleotide
cttccagctggaccgtccgctgtccattgactacagccttggaactggagatgttgaccg

SEQ ID NO: 388477 - DNA, 56 bp, Artificial
  Synthetic oligonucleotide
cttccaggacccaaacttctagaccaaagggtaagagcatacagtggaggaacaga

SEQ ID NO: 388478 - DNA, 58 bp, Artificial
  Synthetic oligonucleotide
cttccaggatcgctttttgcgtttgactactcgggatatgacgctagtcttagcccag

SEQ ID NO: 388479 - DNA, 53 bp, Artificial
  Synthetic oligonucleotide
cttccaggccatgttgcggggcgggaactaagaaacccctacacgcaaagtag

SEQ ID NO: 388480 - DNA, 50 bp, Artificial
  Synthetic oligonucleotide
cttccagtatacctgacactaacttagctgccacgatcattgttcactcg

SEQ ID NO: 388481 - DNA, 57 bp, Artificial
  Synthetic oligonucleotide
cttccagtgatcactaacaacgtctcgacaagcattcttggtaatgtaacggtgaag

SEQ ID NO: 388482 - DNA, 60 bp, Artificial
  Synthetic oligonucleotide
cttccataatgatggatcctatgatgcttgtcgctactaaaggtttcatgccccgtttga

SEQ ID NO: 388483 - DNA, 55 bp, Artificial
  Synthetic oligonucleotide
cttccatcctttacatcaaccacatcctctaatgtgatcttgtcctgacccgtgg

SEQ ID NO: 388484 - DNA, 60 bp, Artificial
  Synthetic oligonucleotide
cttccatgactgatcctgcgttgagaaccttggcgtacgtgtcgttggcagattgctgac

SEQ ID NO: 388485 - DNA, 60 bp, Artificial
  Synthetic oligonucleotide
cttccatgctaatcctggtatcctcaccggctcagctgtgggctgtaacccagatacatt

SEQ ID NO: 388486 - DNA, 59 bp, Artificial
  Synthetic oligonucleotide
cttccatggcactattcttcctggaacaatggctacttccatttgtcaaaatatagaac

SEQ ID NO: 388487 - DNA, 55 bp, Artificial
  Synthetic oligonucleotide
cttccatgtaatcttcaaactcttcagacctaatgtcaaagactccatcattcgc

SEQ ID NO: 388488 - DNA, 58 bp, Artificial
  Synthetic oligonucleotide
cttccatgttacgcttcgtagtagccataccataaagggctcctttctatgtggatcc

SEQ ID NO: 388489 - DNA, 60 bp, Artificial
  Synthetic oligonucleotide
cttccattagacgctggttgctcaaggctcgttgtgcactggaatggacggtctcaatca

SEQ ID NO: 388490 - DNA, 53 bp, Artificial
  Synthetic oligonucleotide
cttccattgctgatgttctcacacaccagtaacatatgtaatgagagtcaaat

SEQ ID NO: 388491 - DNA, 56 bp, Artificial
  Synthetic oligonucleotide
cttcccaaaccacacatggcaaggagatgtcacccaccttaagcacaaacggaccc

SEQ ID NO: 388492 - DNA, 55 bp, Artificial
  Synthetic oligonucleotide
cttcccaaaggtactcctgtgggagacgttcaagctaaggccaaccttgagtgga

SEQ ID NO: 388493 - DNA, 52 bp, Artificial
  Synthetic oligonucleotide
cttcccaactgtttcacagtttctctttgagctggggaagcaaccaaggggc

SEQ ID NO: 388494 - DNA, 57 bp, Artificial
  Synthetic oligonucleotide
cttcccaagacattggggaaacgtgcacgtcgcgcgtgtacgtttcatgcaacaacc

SEQ ID NO: 388495 - DNA, 55 bp, Artificial
  Synthetic oligonucleotide
cttcccaagcataaacaaggcctatatgtttgagcccgagggtcctaaacccata

SEQ ID NO: 388496 - DNA, 58 bp, Artificial
  Synthetic oligonucleotide
cttcccaagctctcgcgaggtacgggtgcttgcgtttgaaagagtgcacgcgggcgcg

SEQ ID NO: 388497 - DNA, 56 bp, Artificial
  Synthetic oligonucleotide
cttcccacaaggggaggccagggaatttccttcagaacagaccagagccaatagcc

SEQ ID NO: 388498 - DNA, 55 bp, Artificial
  Synthetic oligonucleotide
cttcccaccctttgcacagaggttacgatttagaaatccaatagtgggtgaatca

SEQ ID NO: 388499 - DNA, 57 bp, Artificial
  Synthetic oligonucleotide
cttcccagggaagaatataatattcgaagttgcttcactacagtgtgttagacttct

SEQ ID NO: 388500 - DNA, 50 bp, Artificial
  Synthetic oligonucleotide
cttcccaggtttcgggcaaagccttctctacgggtaccctgtctacgttt

SEQ ID NO: 388501 - DNA, 55 bp, Artificial
  Synthetic oligonucleotide
cttcccagtacaccaggcggaacgtcttatgctgctatgcggttggggcggaccg

SEQ ID NO: 388502 - DNA, 60 bp, Artificial
  Synthetic oligonucleotide
cttcccagtagcgattcacggagagagaggttacgctgagaccactggtgactacagaaa

SEQ ID NO: 388503 - DNA, 54 bp, Artificial
  Synthetic oligonucleotide
cttcccagtcataacctacaaatcgtaaggaggtaggttatgactgtaactaaa

SEQ ID NO: 388504 - DNA, 55 bp, Artificial
  Synthetic oligonucleotide
cttcccagtctagggtatctgactttaaaagacccaggtgtacatacgtgctttg

SEQ ID NO: 388505 - DNA, 55 bp, Artificial
  Synthetic oligonucleotide
cttcccagtgggatgacccttggggagaggttctagtatggaagtttgatccaac

SEQ ID NO: 388506 - DNA, 60 bp, Artificial
  Synthetic oligonucleotide
cttcccattgcagccgggctattcaagcgtgttcagccgcacacttctgggggagatcct

SEQ ID NO: 388507 - DNA, 59 bp, Artificial
  Synthetic oligonucleotide
cttccccaatgtaacttagaagtaaaactagaaagatcaatagcaagcacagtatgcca

SEQ ID NO: 388508 - DNA, 55 bp, Artificial
  Synthetic oligonucleotide
cttccccatcaatgcctataccacgggcccctgtacccctcttcctgcgccgaac

SEQ ID NO: 388509 - DNA, 51 bp, Artificial
  Synthetic oligonucleotide
cttccccattaacgcctacaccacgggcccctgtaccccccttcctgcgcc

SEQ ID NO: 388510 - DNA, 50 bp, Artificial
  Synthetic oligonucleotide
cttcccccagtaacttagaagtaataaaccaagttcaatagaagggggta

SEQ ID NO: 388511 - DNA, 50 bp, Artificial
  Synthetic oligonucleotide
cttcccccctgggaactggtcgtccttaccgcccgccccgaagacggctg

SEQ ID NO: 388512 - DNA, 53 bp, Artificial
  Synthetic oligonucleotide
cttccccgcaacttagaagcatacaattcaagctcaataggagggggtgcaag

SEQ ID NO: 388513 - DNA, 52 bp, Artificial
  Synthetic oligonucleotide
cttccccggtagaaatataagctttaattcaagctcaggaggggacctagaa

SEQ ID NO: 388514 - DNA, 55 bp, Artificial
  Synthetic oligonucleotide
cttccccggtttctcgcacgtagaatgcgagacattgtcccatgaagacccgctc

SEQ ID NO: 388515 - DNA, 51 bp, Artificial
  Synthetic oligonucleotide
cttccccgtaacttagaagtacaaaactcaagttcaacagaagggggtaca

SEQ ID NO: 388516 - DNA, 57 bp, Artificial
  Synthetic oligonucleotide
cttccccgtacaacaagtaggcggcaattatacccatgtgccgctgagtcctcgaac

SEQ ID NO: 388517 - DNA, 55 bp, Artificial
  Synthetic oligonucleotide
cttccccttaatcaaccctatccacaccccactgactgactcctttggattttga

SEQ ID NO: 388518 - DNA, 58 bp, Artificial
  Synthetic oligonucleotide
cttcccgaagcagacttgaggattcaacgtggcagggaggagaggtcaaaagtggcaa

SEQ ID NO: 388519 - DNA, 51 bp, Artificial
  Synthetic oligonucleotide
cttcccgaaggaatttcgaaaaagtcgagggctttttaaatacatctcggc

SEQ ID NO: 388520 - DNA, 55 bp, Artificial
  Synthetic oligonucleotide
cttcccgatatgaccccaaacactgaagtgtcactacgaggaataagagtcagca

SEQ ID NO: 388521 - DNA, 55 bp, Artificial
  Synthetic oligonucleotide
cttcccgctttagtgtctttccaaccgacatatgattgtcccatgaagacgattg

SEQ ID NO: 388522 - DNA, 55 bp, Artificial
  Synthetic oligonucleotide
cttcccgggataatccagtttcctcacgagcaacgctcgtaaactggaacattcc

SEQ ID NO: 388523 - DNA, 60 bp, Artificial
  Synthetic oligonucleotide
cttcccggggtacttcattagcaccagtgatctgctgaacggatacacactgcatctctc

SEQ ID NO: 388524 - DNA, 53 bp, Artificial
  Synthetic oligonucleotide
cttcccgtacttggtgttgctttgccagtctctttgggcccccataaattctt

SEQ ID NO: 388525 - DNA, 53 bp, Artificial
  Synthetic oligonucleotide
cttcccgtactttgtgttgctttgccagtccctttgggcccccatgaactcct

SEQ ID NO: 388526 - DNA, 53 bp, Artificial
  Synthetic oligonucleotide
cttcccgtcttggataagccgcggagcacgtcattgtctacgtgactattcga

SEQ ID NO: 388527 - DNA, 52 bp, Artificial
  Synthetic oligonucleotide
cttccctaataaagcaataacatttaactcctcctcaggaggggacctagaa

SEQ ID NO: 388528 - DNA, 54 bp, Artificial
  Synthetic oligonucleotide
cttccctaatagaacaataatatttgcaccaccctcaggaggggacctggaagt

SEQ ID NO: 388529 - DNA, 51 bp, Artificial
  Synthetic oligonucleotide
cttccctaatgacacaatagaatttaaaccacacgcaggaggggatctaga

SEQ ID NO: 388530 - DNA, 50 bp, Artificial
  Synthetic oligonucleotide
cttccctacggcgctaacaaagaaggcattgtttgggtcgcaactgaggg

SEQ ID NO: 388531 - DNA, 50 bp, Artificial
  Synthetic oligonucleotide
cttccctactaacaatagaagtgaaataccagtagagatgtgcggaatac

SEQ ID NO: 388532 - DNA, 59 bp, Artificial
  Synthetic oligonucleotide
cttccctcgtaatactccccacctgcgatgccgatggacctggatcgattgccgaatcg

SEQ ID NO: 388533 - DNA, 57 bp, Artificial
  Synthetic oligonucleotide
cttccctgactgtaaccagccttctacgcaaattgcacgagtggatcaacactgatt

SEQ ID NO: 388534 - DNA, 55 bp, Artificial
  Synthetic oligonucleotide
cttccctgagtaggctagtgatcaagctccgtgacagtacgagtctacgttcgaa

SEQ ID NO: 388535 - DNA, 55 bp, Artificial
  Synthetic oligonucleotide
cttccctgattggcaaaattacacaccggaaccaggacctagatacccactgaca

SEQ ID NO: 388536 - DNA, 55 bp, Artificial
  Synthetic oligonucleotide
cttccctgccgacattcgcgacgagccgctgatacatgacgtgccgctcgaacag

SEQ ID NO: 388537 - DNA, 55 bp, Artificial
  Synthetic oligonucleotide
cttcccttcagcatcaacgattcgaaactgttccactactacccaccgttacagt

SEQ ID NO: 388538 - DNA, 54 bp, Artificial
  Synthetic oligonucleotide
cttcccttgtctatctaggtattccttttgcagcatctcagttatcatgttatc

SEQ ID NO: 388539 - DNA, 52 bp, Artificial
  Synthetic oligonucleotide
cttccgaaaccaagttaaaatacgccgcagagtggatataaacccgggccac

SEQ ID NO: 388540 - DNA, 60 bp, Artificial
  Synthetic oligonucleotide
cttccgaaatagtcgtcaacccattcttgcataacaaccggaacattgatgaatgatgac

SEQ ID NO: 388541 - DNA, 55 bp, Artificial
  Synthetic oligonucleotide
cttccgaaatggaccgcgctaaggtcacagagggaggcctggccgtacttaacgc

SEQ ID NO: 388542 - DNA, 60 bp, Artificial
  Synthetic oligonucleotide
cttccgaactgacaacttgcgcacggagcattacagattgtactcataagagtaaggtct

SEQ ID NO: 388543 - DNA, 57 bp, Artificial
  Synthetic oligonucleotide
cttccgaagaatgaacgggctcatatttacgggcggaggaatagactatacacagtg

SEQ ID NO: 388544 - DNA, 55 bp, Artificial
  Synthetic oligonucleotide
cttccgaatggaagccctctaagaaccaacgagctgtcccttgcttacttcaaaa

SEQ ID NO: 388545 - DNA, 54 bp, Artificial
  Synthetic oligonucleotide
cttccgactcaggaattgaagatctatgtggaaaccaagtaaaagaacctaaag

SEQ ID NO: 388546 - DNA, 59 bp, Artificial
  Synthetic oligonucleotide
cttccgaggcacctccactatgagtgcctcgagtggggattactctgcggcacccaccc

SEQ ID NO: 388547 - DNA, 58 bp, Artificial
  Synthetic oligonucleotide
cttccgataagataccaaaccccagccattagggctgagcacactgggcgagaaatcg

SEQ ID NO: 388548 - DNA, 55 bp, Artificial
  Synthetic oligonucleotide
cttccgatcccagagagagagcaaccctggtcctgaagggtaaaaagaagctttc

SEQ ID NO: 388549 - DNA, 55 bp, Artificial
  Synthetic oligonucleotide
cttccgattccctcgatgtgggatagtaagaactgggatggagttcttgagatgt

SEQ ID NO: 388550 - DNA, 50 bp, Artificial
  Synthetic oligonucleotide
cttccgattggatatacaataccaccataaacagccatgatattaccacg

SEQ ID NO: 388551 - DNA, 60 bp, Artificial
  Synthetic oligonucleotide
cttccgcatgcctactatggatttgccacgaagtacggggcgtgatgctccaattcccat

SEQ ID NO: 388552 - DNA, 60 bp, Artificial
  Synthetic oligonucleotide
cttccgcccagaggttttctggaatcatcctattcaacgtgttatacataatgagctaga

SEQ ID NO: 388553 - DNA, 60 bp, Artificial
  Synthetic oligonucleotide
cttccgccccaagccatcctcatgaaggtctgcaaaacaccatttgccactgtaccacaa

SEQ ID NO: 388554 - DNA, 55 bp, Artificial
  Synthetic oligonucleotide
cttccgcctcatttaaactaaccaatccccacgcctctcgcttctgtgcgcgcgc

SEQ ID NO: 388555 - DNA, 55 bp, Artificial
  Synthetic oligonucleotide
cttccgcggacctagggctaatgaacgagtatgtatggttggttcaaacttccag

SEQ ID NO: 388556 - DNA, 57 bp, Artificial
  Synthetic oligonucleotide
cttccgctattccgtctctgacgctttctctagtggcaataaattctctttccccac

SEQ ID NO: 388557 - DNA, 55 bp, Artificial
  Synthetic oligonucleotide
cttccgctcacccactgctcgaggacatcttctcttcctccgcgattcttcttcg

SEQ ID NO: 388558 - DNA, 55 bp, Artificial
  Synthetic oligonucleotide
cttccgctgcgaggggatttcttcgatcagatcccggctggcaccaagtgcgagg

SEQ ID NO: 388559 - DNA, 53 bp, Artificial
  Synthetic oligonucleotide
cttccgctggggactttccagaggaggtgtggccggggcggagttggggagtg

SEQ ID NO: 388560 - DNA, 56 bp, Artificial
  Synthetic oligonucleotide
cttccggagacttgtgttgttagacgacgatgcaggtcccctagaagaagaactcc

SEQ ID NO: 388561 - DNA, 55 bp, Artificial
  Synthetic oligonucleotide
cttccggatcgcacaattcacaatcccaccaaagaaagattggtctggggcttgg

SEQ ID NO: 388562 - DNA, 55 bp, Artificial
  Synthetic oligonucleotide
cttccggcaataacggacgtgctgtcatcccttgacgtatcatctggatacgagg

SEQ ID NO: 388563 - DNA, 60 bp, Artificial
  Synthetic oligonucleotide
cttccggcatgttcgactcgtctgtcttctgcgagtgctatgacgcgggttgcgcttggt

SEQ ID NO: 388564 - DNA, 53 bp, Artificial
  Synthetic oligonucleotide
cttccggcttgtccaaaatggccgccaaaaacatccgggtcaaagttcgccgc

SEQ ID NO: 388565 - DNA, 58 bp, Artificial
  Synthetic oligonucleotide
cttccgggaacaagcacaagaccaattatagcaatgacccaaaacagattattgcgac

SEQ ID NO: 388566 - DNA, 60 bp, Artificial
  Synthetic oligonucleotide
cttccggtagctgcgtcacactttaagagtgtgcatactgagccgaagctcagcttcggt

SEQ ID NO: 388567 - DNA, 54 bp, Artificial
  Synthetic oligonucleotide
cttccggtcaccaatttgcgacacgcgcggcggtgtgtacccctgggagggtag

SEQ ID NO: 388568 - DNA, 55 bp, Artificial
  Synthetic oligonucleotide
cttccggtgggtacctcactcttgctatttgggagagccccagggtgcccaaatg

SEQ ID NO: 388569 - DNA, 52 bp, Artificial
  Synthetic oligonucleotide
cttccgtaccaaaggtgatacttgtgaggttgtctagaacttcactaagttt

SEQ ID NO: 388570 - DNA, 60 bp, Artificial
  Synthetic oligonucleotide
cttccgtacgcgatcttctagataccgcctcagctctgtatcgggaagccttagagtctc

SEQ ID NO: 388571 - DNA, 54 bp, Artificial
  Synthetic oligonucleotide
cttccgtagaaggggacgtagagcgcgcccctaccgcattagcgcgtggaaccc

SEQ ID NO: 388572 - DNA, 54 bp, Artificial
  Synthetic oligonucleotide
cttccgtagagggggacgtagagcgcgcccctaccgcattactgcttggaaccc

SEQ ID NO: 388573 - DNA, 55 bp, Artificial
  Synthetic oligonucleotide
cttccgtagcaatcgtttggaatttcgatcgacagccccgtgggaactagcgcgt

SEQ ID NO: 388574 - DNA, 55 bp, Artificial
  Synthetic oligonucleotide
cttccgtagccgaaaatatccacttggaccatgtctgagttttcagttgcaccac

SEQ ID NO: 388575 - DNA, 57 bp, Artificial
  Synthetic oligonucleotide
cttccgtccgaacgatcaaggtgattacgacactgtcgacgtcacccaatcgtcgta

SEQ ID NO: 388576 - DNA, 55 bp, Artificial
  Synthetic oligonucleotide
cttccgtcctttctcactactgaaatcaagtacaagcgaaatttgagcaacgttc

SEQ ID NO: 388577 - DNA, 56 bp, Artificial
  Synthetic oligonucleotide
cttccgtcgacttgaaatgtaccccagtcgacgtaatcaccgtccttctcgatgta

SEQ ID NO: 388578 - DNA, 54 bp, Artificial
  Synthetic oligonucleotide
cttccgtcgcgaggaataccctcttgacgaggggacggtggtagttgcgatccc

SEQ ID NO: 388579 - DNA, 56 bp, Artificial
  Synthetic oligonucleotide
cttccgtcgggtgcggctaattgtttggcggacattggggcctattcatctgtgtt

SEQ ID NO: 388580 - DNA, 56 bp, Artificial
  Synthetic oligonucleotide
cttccgtgggactgtctcccggcctcggcacctcctgaactgctccttccagggta

SEQ ID NO: 388581 - DNA, 58 bp, Artificial
  Synthetic oligonucleotide
cttccgtgttggcgttaatatatatggttactaacagacagcttccaggaagtcagga

SEQ ID NO: 388582 - DNA, 60 bp, Artificial
  Synthetic oligonucleotide
cttccgttactggagagtcagattgccaccattgagcaaagtgcaccctctcagagtgat

SEQ ID NO: 388583 - DNA, 53 bp, Artificial
  Synthetic oligonucleotide
cttccgtttaacggatcggttcacattccggcggttaactacaacagacatct

SEQ ID NO: 388584 - DNA, 55 bp, Artificial
  Synthetic oligonucleotide
cttcctaaaacacctgctggagttagatttttagacgatattggaaacgaatata

SEQ ID NO: 388585 - DNA, 60 bp, Artificial
  Synthetic oligonucleotide
cttcctaaaccaccaatcatagtcgctctctatcagttctgcagtaacaccattgtacgc

SEQ ID NO: 388586 - DNA, 60 bp, Artificial
  Synthetic oligonucleotide
cttcctaagataatctcatttcgtcgtctgtaatcgctgatttcagtgaattcaacctag

SEQ ID NO: 388587 - DNA, 55 bp, Artificial
  Synthetic oligonucleotide
cttcctaagtggccaggacaagctcacggataatgaggttgcggaggtccagacc

SEQ ID NO: 388588 - DNA, 59 bp, Artificial
  Synthetic oligonucleotide
cttcctaatagatcctatcacaactgaagatgtatattctattgctattcatagttgta

SEQ ID NO: 388589 - DNA, 60 bp, Artificial
  Synthetic oligonucleotide
cttcctaatctagtccatgatattgtgttctcacacttggccactagtacagatgttaga

SEQ ID NO: 388590 - DNA, 55 bp, Artificial
  Synthetic oligonucleotide
cttcctaccctactcctacctccaactccgctggctaaatctgctggctgcctga

SEQ ID NO: 388591 - DNA, 55 bp, Artificial
  Synthetic oligonucleotide
cttcctactcggcttcttcgagatggaacgaatcaaagacagatacgggagtgtg

SEQ ID NO: 388592 - DNA, 57 bp, Artificial
  Synthetic oligonucleotide
cttcctagaatgagcactacaacgcggggtcttgctggtaggggttctgttcaagtc

SEQ ID NO: 388593 - DNA, 58 bp, Artificial
  Synthetic oligonucleotide
cttcctagaatgagtactacaacgcggggacttgctggaagaggttctgttcaggtgc

SEQ ID NO: 388594 - DNA, 60 bp, Artificial
  Synthetic oligonucleotide
cttcctagagcacagagcagacatcacaaccctaggacctagtgacatgtacgtccacac

SEQ ID NO: 388595 - DNA, 60 bp, Artificial
  Synthetic oligonucleotide
cttcctagcggacatcgtgctacaacattcattaacacagtattaaattggtgttacaca

SEQ ID NO: 388596 - DNA, 54 bp, Artificial
  Synthetic oligonucleotide
cttcctagtcgttacaaggttaattgcaaaaaacccttgtatctgattataatg

SEQ ID NO: 388597 - DNA, 55 bp, Artificial
  Synthetic oligonucleotide
cttcctagtgttttaacaaggggtgatcccagattggcaggcacagttcatgctg

SEQ ID NO: 388598 - DNA, 55 bp, Artificial
  Synthetic oligonucleotide
cttcctatcagaaattggaacttcgattttgggctactcggaacaacgctcctga

SEQ ID NO: 388599 - DNA, 55 bp, Artificial
  Synthetic oligonucleotide
cttcctcacgagcggagactctcagacgttctcatacacttttgacttggcatcg

SEQ ID NO: 388600 - DNA, 60 bp, Artificial
  Synthetic oligonucleotide
cttcctcagattgcagtcaacctctcaaattgccatgttgtaatcaattcacatgtctgt

SEQ ID NO: 388601 - DNA, 60 bp, Artificial
  Synthetic oligonucleotide
cttcctcaggaaccctagagttcatcacagaaggattcacatggacaggagtcactcaga

SEQ ID NO: 388602 - DNA, 51 bp, Artificial
  Synthetic oligonucleotide
cttcctcccatgcgtgtgaccccgaagcccctcatcggctgaagcagggct

SEQ ID NO: 388603 - DNA, 55 bp, Artificial
  Synthetic oligonucleotide
cttcctcgagggtatttggatcttagcatcatcgccgatccatcgattgaattcg

SEQ ID NO: 388604 - DNA, 57 bp, Artificial
  Synthetic oligonucleotide
cttcctcgctggtggggaggtgggccatcaccgcccctctgtgataccccgtggcaa

SEQ ID NO: 388605 - DNA, 60 bp, Artificial
  Synthetic oligonucleotide
cttcctctctaggaacctatgattcagactctatcacagaatcagagggttatgatctag

SEQ ID NO: 388606 - DNA, 60 bp, Artificial
  Synthetic oligonucleotide
cttcctcttttagagtatataagtaagtgcgcagacgaatggctgagtttatgccgctgg

SEQ ID NO: 388607 - DNA, 60 bp, Artificial
  Synthetic oligonucleotide
cttcctgaacacatagatgaattggtgtctaaagccatgtgtgattttatgtcgcaattt

SEQ ID NO: 388608 - DNA, 54 bp, Artificial
  Synthetic oligonucleotide
cttcctgacagtggggggccgctcatcgacctacttacagaagaccccccgcct

SEQ ID NO: 388609 - DNA, 59 bp, Artificial
  Synthetic oligonucleotide
cttcctgacgccgtttgcggtagaaggagaagaacgcgcatcaatcgcagcaaccgatt

SEQ ID NO: 388610 - DNA, 59 bp, Artificial
  Synthetic oligonucleotide
cttcctgccgctgattactcgggaacttgctatcgttaaatcagaaatcgtgactactg

SEQ ID NO: 388611 - DNA, 60 bp, Artificial
  Synthetic oligonucleotide
cttcctgcgccaaaattctttcgtctcgataagcgaactatcgctgaactgactagactc

SEQ ID NO: 388612 - DNA, 58 bp, Artificial
  Synthetic oligonucleotide
cttcctgcttgtacgttcatgcttacctcaaaagtgctagaaatgaagcagttagggt

SEQ ID NO: 388613 - DNA, 55 bp, Artificial
  Synthetic oligonucleotide
cttcctggatttcaggcaagagataacacgtgagtgcgacacaggagtaatgggg

SEQ ID NO: 388614 - DNA, 54 bp, Artificial
  Synthetic oligonucleotide
cttcctgggttagtagattaactatagtagaacatcagttagcttcagcagaca

SEQ ID NO: 388615 - DNA, 54 bp, Artificial
  Synthetic oligonucleotide
cttccttccttttaggaatgttggaatagttgtccccacctatagttctatgct

SEQ ID NO: 388616 - DNA, 56 bp, Artificial
  Synthetic oligonucleotide
cttccttcgaagtttaatagtaattaaccatggataccagccaacatatgaatacc

SEQ ID NO: 388617 - DNA, 56 bp, Artificial
  Synthetic oligonucleotide
cttccttctatcaaaccaacagaatctatgtcttcttgtaaccctataagatttgg

SEQ ID NO: 388618 - DNA, 55 bp, Artificial
  Synthetic oligonucleotide
cttccttgaggactctcgcgtcatccatatcacctcaacagataagaatatggac

SEQ ID NO: 388619 - DNA, 60 bp, Artificial
  Synthetic oligonucleotide
cttccttgctatggttccattagaatccttacaaacctgaatcgcatttgctgcatgctt

SEQ ID NO: 388620 - DNA, 52 bp, Artificial
  Synthetic oligonucleotide
cttccttgtgctgagtcctgcgcacattgcaaagttgaacaaactactcact

SEQ ID NO: 388621 - DNA, 55 bp, Artificial
  Synthetic oligonucleotide
cttccttgttggttatggccgaggcaatgctaccacagcgatctcgggcatctat

SEQ ID NO: 388622 - DNA, 60 bp, Artificial
  Synthetic oligonucleotide
cttcctttatctatttgatgaacatgttagcctggagaggccaaaagtcatgctctttga

SEQ ID NO: 388623 - DNA, 57 bp, Artificial
  Synthetic oligonucleotide
cttcctttcctaacattcatttacaagaggacattattgatcggtgtcaacaatttg

SEQ ID NO: 388624 - DNA, 55 bp, Artificial
  Synthetic oligonucleotide
cttcgaaactgtggttgatatcaatttattgaccacattgccagacgttatttcc

SEQ ID NO: 388625 - DNA, 54 bp, Artificial
  Synthetic oligonucleotide
cttcgaaagacagcttttacacaatccttggtcttaggaataacgataaacctg

SEQ ID NO: 388626 - DNA, 57 bp, Artificial
  Synthetic oligonucleotide
cttcgaaagatcgaccattatggctgcgtttaaggggaataccgagggcagaacatc

SEQ ID NO: 388627 - DNA, 60 bp, Artificial
  Synthetic oligonucleotide
cttcgaactgcataagcacgtggagatgatgttccccattttcgtgcagttctctgcaga

SEQ ID NO: 388628 - DNA, 55 bp, Artificial
  Synthetic oligonucleotide
cttcgaactggagcaacacatgtaaatgaggctgcccatcttcgtggagctctcg

SEQ ID NO: 388629 - DNA, 55 bp, Artificial
  Synthetic oligonucleotide
cttcgaactttgtataatacataacagggtgagttccagccctcataaagctctc

SEQ ID NO: 388630 - DNA, 58 bp, Artificial
  Synthetic oligonucleotide
cttcgaagaccctcgaggctatcctctcctttgcacgccgtgggaccatacaggagaa

SEQ ID NO: 388631 - DNA, 55 bp, Artificial
  Synthetic oligonucleotide
cttcgaagaggaaactgtcccggagactataaggacacatctaggtgtgacaact

SEQ ID NO: 388632 - DNA, 51 bp, Artificial
  Synthetic oligonucleotide
cttcgaagataactgctcaagcgtagggtgtgtttgtcctaaatacttagc

SEQ ID NO: 388633 - DNA, 55 bp, Artificial
  Synthetic oligonucleotide
cttcgaaggacacagtctatggggattcaactagaccaaaggataatcatcctct

SEQ ID NO: 388634 - DNA, 60 bp, Artificial
  Synthetic oligonucleotide
cttcgaaggaccatcaatcccttctggtggtatggatttgtctgagttgatgaaatctac

SEQ ID NO: 388635 - DNA, 54 bp, Artificial
  Synthetic oligonucleotide
cttcgaaggtgtcgtacattagttatcctcctcttagtcggtcggaatttggta

SEQ ID NO: 388636 - DNA, 55 bp, Artificial
  Synthetic oligonucleotide
cttcgaatcaaatatagaaggaaaataacgacatggcgccgctattcgcacaggc

SEQ ID NO: 388637 - DNA, 60 bp, Artificial
  Synthetic oligonucleotide
cttcgaatctcacttttacagtttattcagaccttctcgcattcgtgtcagctgatacag

SEQ ID NO: 388638 - DNA, 59 bp, Artificial
  Synthetic oligonucleotide
cttcgaatcttacttttacggtttattcagatcttctcgcgttcgtatcagctgacaca

SEQ ID NO: 388639 - DNA, 60 bp, Artificial
  Synthetic oligonucleotide
cttcgacagcccgtatgctgtccgtgcagctgtccctattgtccgcgccacaaaggcaag

SEQ ID NO: 388640 - DNA, 59 bp, Artificial
  Synthetic oligonucleotide
cttcgaccaagtgtacacgttcttccaactatacaagctcacatgcgtaattaccagtc

SEQ ID NO: 388641 - DNA, 56 bp, Artificial
  Synthetic oligonucleotide
cttcgacccacgtatatcccgcaacactaagaaagtcaacccagaattcatggttg

SEQ ID NO: 388642 - DNA, 56 bp, Artificial
  Synthetic oligonucleotide
cttcgacctctgtaccattcatacggtttttgaaatggagccattcgcccggagac

SEQ ID NO: 388643 - DNA, 53 bp, Artificial
  Synthetic oligonucleotide
cttcgacggaccttgggagtttggcaagtgcctggagcctggacaacgccgcg

SEQ ID NO: 388644 - DNA, 58 bp, Artificial
  Synthetic oligonucleotide
cttcgacgtgcacgataggtgcacctagacgtctaagtatagcgtcctttaattctaa

SEQ ID NO: 388645 - DNA, 58 bp, Artificial
  Synthetic oligonucleotide
cttcgactcgtgccggctcatctcggcaagagggggcggacctcagtgctcttactct

SEQ ID NO: 388646 - DNA, 55 bp, Artificial
  Synthetic oligonucleotide
cttcgactctgactacgctgtttcctctctttgggcggcgtctccgggcgcaagg

SEQ ID NO: 388647 - DNA, 60 bp, Artificial
  Synthetic oligonucleotide
cttcgactggagtatgcaattcgaggattgtggtgtgaagttgaagagaagcctcaatgg

SEQ ID NO: 388648 - DNA, 59 bp, Artificial
  Synthetic oligonucleotide
cttcgagaaacccagtagcgccattgaagctgcagagtgtttcgctccacacttccccc

SEQ ID NO: 388649 - DNA, 55 bp, Artificial
  Synthetic oligonucleotide
cttcgagaaacctagtagcaccatcgaaactgcagagtgtttcgctcagcacttt

SEQ ID NO: 388650 - DNA, 55 bp, Artificial
  Synthetic oligonucleotide
cttcgagaaagcttagagatagacaccccagcaagccacttgcccggtcagcccc

SEQ ID NO: 388651 - DNA, 60 bp, Artificial
  Synthetic oligonucleotide
cttcgagacaatacagtgagcggtgcagatgtataatcaatatgcgcgcgcatgatttag

SEQ ID NO: 388652 - DNA, 57 bp, Artificial
  Synthetic oligonucleotide
cttcgagataccaagctacagatcactttacctacgttgggtgaacgccgtgtgcgg

SEQ ID NO: 388653 - DNA, 56 bp, Artificial
  Synthetic oligonucleotide
cttcgagtatctcgaagtggtttgcggcgttgactcgtccgttgcgcgtgtttttc

SEQ ID NO: 388654 - DNA, 57 bp, Artificial
  Synthetic oligonucleotide
cttcgataactcagataatgcaaccgaggttttcagttaacaggtctaccataattg

SEQ ID NO: 388655 - DNA, 60 bp, Artificial
  Synthetic oligonucleotide
cttcgataatgagttgacgacttggcgtaatactgtggttgatctggttctacgcatcat

SEQ ID NO: 388656 - DNA, 56 bp, Artificial
  Synthetic oligonucleotide
cttcgatatacaaattaccaatgaagacccaacaagttcagtgggtcgtcaaacta

SEQ ID NO: 388657 - DNA, 55 bp, Artificial
  Synthetic oligonucleotide
cttcgatgctgaattcacattcgtcgtagccaaacccaacggtgagctagtcccc

SEQ ID NO: 388658 - DNA, 60 bp, Artificial
  Synthetic oligonucleotide
cttcgattcgtcgcaataatatatctacatacatctgggtattgacgaagcagctatatc

SEQ ID NO: 388659 - DNA, 55 bp, Artificial
  Synthetic oligonucleotide
cttcgcaaacatttattgtggcagtaggtggagtagtagcggcaattggacctgc

SEQ ID NO: 388660 - DNA, 57 bp, Artificial
  Synthetic oligonucleotide
cttcgcaactaccgccgtacttgacgcaaccgcgttgcaattccagggagttcaata

SEQ ID NO: 388661 - DNA, 55 bp, Artificial
  Synthetic oligonucleotide
cttcgcaagacaagatagtatttaatgacaagagtgtagcatccatactacccac

SEQ ID NO: 388662 - DNA, 55 bp, Artificial
  Synthetic oligonucleotide
cttcgcacgtcgcatggagaccaccgtgaacgttcaccaactctcgcccaaggtc

SEQ ID NO: 388663 - DNA, 60 bp, Artificial
  Synthetic oligonucleotide
cttcgcactaaataaggggtcagactcagggattataacatcagatgctccagttcataa

SEQ ID NO: 388664 - DNA, 55 bp, Artificial
  Synthetic oligonucleotide
cttcgcaggagataatgggcttattctaagatgtggaggaactcccagctctaga

SEQ ID NO: 388665 - DNA, 60 bp, Artificial
  Synthetic oligonucleotide
cttcgcagtaagtagctttactcctaataggctctctgtgttcaatgcaagattcagggt

SEQ ID NO: 388666 - DNA, 60 bp, Artificial
  Synthetic oligonucleotide
cttcgcatatttcgaagtggtttgcagcgttgactcgtccgctgcgtgtgtttttctcca

SEQ ID NO: 388667 - DNA, 55 bp, Artificial
  Synthetic oligonucleotide
cttcgcatccccaactcttagaatgcgcaatctcagcacattcggctctagcccg

SEQ ID NO: 388668 - DNA, 60 bp, Artificial
  Synthetic oligonucleotide
cttcgcatcgcgaggcaatcacgtgtctcctacgcactacgtccctgagtccgacgcggc

SEQ ID NO: 388669 - DNA, 55 bp, Artificial
  Synthetic oligonucleotide
cttcgcattcactctaaaagctccgcttctaggcatgcttgcttccgtacaggga

SEQ ID NO: 388670 - DNA, 55 bp, Artificial
  Synthetic oligonucleotide
cttcgccagaatattgagtgggaaacgtggcaaggagagaaggtgtcaaaacgtg

SEQ ID NO: 388671 - DNA, 59 bp, Artificial
  Synthetic oligonucleotide
cttcgccagtaaactgttgcatgatgattatccatgtttccccatcagttatgaagtgg

SEQ ID NO: 388672 - DNA, 55 bp, Artificial
  Synthetic oligonucleotide
cttcgccataacctggaagcgcgtcttgatgcagaagtggatgccattctggatg

SEQ ID NO: 388673 - DNA, 51 bp, Artificial
  Synthetic oligonucleotide
cttcgccccattcttttacccaacaaaagtgggaagaaggggaacagtgcc

SEQ ID NO: 388674 - DNA, 51 bp, Artificial
  Synthetic oligonucleotide
cttcgcccgtagaattaattatggcgcgcctgtggaattcgcgatgacaca

SEQ ID NO: 388675 - DNA, 58 bp, Artificial
  Synthetic oligonucleotide
cttcgccgatgtcgaacgtacggagaagactcagcttcgcaacccctatggcactacc

SEQ ID NO: 388676 - DNA, 55 bp, Artificial
  Synthetic oligonucleotide
cttcgccttcgaatcacttcgaatggtgcgacctgtgaaccatgattgtgacgga

SEQ ID NO: 388677 - DNA, 53 bp, Artificial
  Synthetic oligonucleotide
cttcgccttcgtacggacaatcttgagcgcttttctaccgtccgggcgaacgt

SEQ ID NO: 388678 - DNA, 54 bp, Artificial
  Synthetic oligonucleotide
cttcgcgaaaggctacacgcggtagccaacagacaaaacatcccctaccttggg

SEQ ID NO: 388679 - DNA, 58 bp, Artificial
  Synthetic oligonucleotide
cttcgcgaagtgggtcctctgatgaacattcgtgtcgctaaccctgtaatatagtttc

SEQ ID NO: 388680 - DNA, 55 bp, Artificial
  Synthetic oligonucleotide
cttcgcgaggcacgctaattttaggtatcacatggatgcagactacactagatgg

SEQ ID NO: 388681 - DNA, 55 bp, Artificial
  Synthetic oligonucleotide
cttcgcgtcgtacccaataagggcaaatggtttggaaagaaggccgtctcacaga

SEQ ID NO: 388682 - DNA, 54 bp, Artificial
  Synthetic oligonucleotide
cttcgctaactcagggcgggagccgaaggtgagtgaaaccaccgaagtctaggg

SEQ ID NO: 388683 - DNA, 53 bp, Artificial
  Synthetic oligonucleotide
cttcgctaagtggatgcaagagggtaaggtaattattatccgggttccgaacg

SEQ ID NO: 388684 - DNA, 59 bp, Artificial
  Synthetic oligonucleotide
cttcgctagtaagaccttgtgtaaggaatgcctctttaatgagaagcacgagtctaatg

SEQ ID NO: 388685 - DNA, 54 bp, Artificial
  Synthetic oligonucleotide
cttcgctatagatttgggaaacataaacacttgtacctaaacgtgtcgtccacc

SEQ ID NO: 388686 - DNA, 54 bp, Artificial
  Synthetic oligonucleotide
cttcgctgctttccacttttcggaagacctgttaatagggagcgagtacggacg

SEQ ID NO: 388687 - DNA, 55 bp, Artificial
  Synthetic oligonucleotide
cttcgctggcctcaatcagcgcacaagcagggactttgttcacgttgccaaaggg

SEQ ID NO: 388688 - DNA, 60 bp, Artificial
  Synthetic oligonucleotide
cttcgcttcacatcaccttaaagcttctcgaatcccaatgttggtgccttcaactatgaa

SEQ ID NO: 388689 - DNA, 58 bp, Artificial
  Synthetic oligonucleotide
cttcgcttcacctctgcacgtcgcatggagaccaccgtgaacgccccccggaacctgc

SEQ ID NO: 388690 - DNA, 59 bp, Artificial
  Synthetic oligonucleotide
cttcgcttcaccttcgcacgtcgcatggagaccaccgtgaacgttcaccaactctcgcc

SEQ ID NO: 388691 - DNA, 55 bp, Artificial
  Synthetic oligonucleotide
cttcgcttccctgtgctgtactttgattggtacctgagtacaacggttgggtgag

SEQ ID NO: 388692 - DNA, 60 bp, Artificial
  Synthetic oligonucleotide
cttcgctttgctaagacgcagtaccatcaatgcaggttgctggtgcaatatctcccctat

SEQ ID NO: 388693 - DNA, 57 bp, Artificial
  Synthetic oligonucleotide
cttcggaacaccgtgggtaaaccgcagtacaatgagggctccaagcctctcactggc

SEQ ID NO: 388694 - DNA, 54 bp, Artificial
  Synthetic oligonucleotide
cttcggacggacttttcacccttctgttcgataatgaatggtacccaactgacc

SEQ ID NO: 388695 - DNA, 55 bp, Artificial
  Synthetic oligonucleotide
cttcggacggtttgacaaacaccgacagtcgtggatgtttagacgtgtctcgagg

SEQ ID NO: 388696 - DNA, 60 bp, Artificial
  Synthetic oligonucleotide
cttcggacttactgccgctgttaagcgctttggcgtaagcatcattcgcggattgttgac

SEQ ID NO: 388697 - DNA, 55 bp, Artificial
  Synthetic oligonucleotide
cttcggaggaaattcccttctaagccaaccctgtcagccttctaatcaagaccga

SEQ ID NO: 388698 - DNA, 57 bp, Artificial
  Synthetic oligonucleotide
cttcggaggaagttgggtcacacattacctccgcggacataacgtacactgctgttc

SEQ ID NO: 388699 - DNA, 54 bp, Artificial
  Synthetic oligonucleotide
cttcggaggttcctaccgggacggaactaagagcatccactacaattcgcctag

SEQ ID NO: 388700 - DNA, 57 bp, Artificial
  Synthetic oligonucleotide
cttcggaggttcgcagacagtcttaaatccgccgtagaaggactaggtgattgcgtc

SEQ ID NO: 388701 - DNA, 55 bp, Artificial
  Synthetic oligonucleotide
cttcggatgcacaactatttaataagccatactggttacaacgtgcacagggtca

SEQ ID NO: 388702 - DNA, 55 bp, Artificial
  Synthetic oligonucleotide
cttcggcaccaagtattgtattttgcactatgtgggatccattgttaaacgagtt

SEQ ID NO: 388703 - DNA, 56 bp, Artificial
  Synthetic oligonucleotide
cttcggcacgcttagttagttagaaccctttgcccactcctccatggtgatataaa

SEQ ID NO: 388704 - DNA, 55 bp, Artificial
  Synthetic oligonucleotide
cttcggccattaacattccaaagttgtcggctaccgggccagttcgtatgacgaa

SEQ ID NO: 388705 - DNA, 56 bp, Artificial
  Synthetic oligonucleotide
cttcgggaaccaatcaaacatcgatccaagagactccttggatctcgacccccctc

SEQ ID NO: 388706 - DNA, 55 bp, Artificial
  Synthetic oligonucleotide
cttcgggcacttcaatggacgacattgctcgtggactattgcatcgagactggcg

SEQ ID NO: 388707 - DNA, 54 bp, Artificial
  Synthetic oligonucleotide
cttcgggccagggttcacccctccccatgggggactgttgaggtggagccctca

SEQ ID NO: 388708 - DNA, 59 bp, Artificial
  Synthetic oligonucleotide
cttcggggaagagcgctttggcgctgtattcaaactgttggagacggattgcccagtca

SEQ ID NO: 388709 - DNA, 58 bp, Artificial
  Synthetic oligonucleotide
cttcggggagtctctctgttgagggctttcgagttctcccttgaggctcccacagata

SEQ ID NO: 388710 - DNA, 53 bp, Artificial
  Synthetic oligonucleotide
cttcggggctacggaattcgtgagattcttggtgactcgatgagagcagagtt

SEQ ID NO: 388711 - DNA, 51 bp, Artificial
  Synthetic oligonucleotide
cttcggggctccatgggttggcgctaacatcgacctattgggccgatatga

SEQ ID NO: 388712 - DNA, 60 bp, Artificial
  Synthetic oligonucleotide
cttcggggttaatgatcaacgtgcgcagcacctcttttgcaagaaggtgccacgcaagat

SEQ ID NO: 388713 - DNA, 54 bp, Artificial
  Synthetic oligonucleotide
cttcgggtgtgattgttctcttagggttgacaaagaaacctaactcactcttgg

SEQ ID NO: 388714 - DNA, 54 bp, Artificial
  Synthetic oligonucleotide
cttcgggttcggggaggagataaccccctctccgaagcaggagatggaagacaa

SEQ ID NO: 388715 - DNA, 55 bp, Artificial
  Synthetic oligonucleotide
cttcgggttcggtcttggaggacacctaccgctacattaattctgtagcgaccaa

SEQ ID NO: 388716 - DNA, 55 bp, Artificial
  Synthetic oligonucleotide
cttcggtattggtgcattcgacaacgaccctgattatgcaatgacgtttgctaaa

SEQ ID NO: 388717 - DNA, 60 bp, Artificial
  Synthetic oligonucleotide
cttcggtcaggtgctgacaccgtaccacaaagatcgcaccggctctgcgataaccataga

SEQ ID NO: 388718 - DNA, 56 bp, Artificial
  Synthetic oligonucleotide
cttcggtgacgagtccttcgaagtgtcgaaaacggatgttgtcggagtagagaaca

SEQ ID NO: 388719 - DNA, 50 bp, Artificial
  Synthetic oligonucleotide
cttcggtgctgttgttctccgcatgctcattagaaaggcggttgacggat

SEQ ID NO: 388720 - DNA, 55 bp, Artificial
  Synthetic oligonucleotide
cttcggttgtgcagagagttgccattaattggttgcaagaggaacaactgggcac

SEQ ID NO: 388721 - DNA, 54 bp, Artificial
  Synthetic oligonucleotide
cttcggtttacaaaaaccgtttttggacacatggcacgtgtgcagttgaagcac

SEQ ID NO: 388722 - DNA, 57 bp, Artificial
  Synthetic oligonucleotide
cttcgtacacttcctgggcgggcttataagactaatataagtagctgcacttccgaa

SEQ ID NO: 388723 - DNA, 55 bp, Artificial
  Synthetic oligonucleotide
cttcgtacatgaccttgaatatgttcttgatgctctcttctagcccgttgaagtc

SEQ ID NO: 388724 - DNA, 60 bp, Artificial
  Synthetic oligonucleotide
cttcgtactcaggccatatctaaaggcatgcgccgactagaagtcgagcacgcccagaag

SEQ ID NO: 388725 - DNA, 58 bp, Artificial
  Synthetic oligonucleotide
cttcgtatcgatgagtgcatgattcccggacctctggtcccgtttttccaatctcttg

SEQ ID NO: 388726 - DNA, 56 bp, Artificial
  Synthetic oligonucleotide
cttcgtatcgtgtttgaggaatctctagtgttattgttagttatgtttaacttcga

SEQ ID NO: 388727 - DNA, 55 bp, Artificial
  Synthetic oligonucleotide
cttcgtatctcgttgccttcgcgtccagtgaaacccgctcgttcacccagtaccg

SEQ ID NO: 388728 - DNA, 55 bp, Artificial
  Synthetic oligonucleotide
cttcgtatgtgtgcggataatatcctagctgaaatgcataagctacgtgaagtac

SEQ ID NO: 388729 - DNA, 57 bp, Artificial
  Synthetic oligonucleotide
cttcgtatgttcagcccagcggaatattctaagtggctttacaagccaattttccga

SEQ ID NO: 388730 - DNA, 55 bp, Artificial
  Synthetic oligonucleotide
cttcgtcaaactggcaggaacggttgtagacttgggatgtgggcgtggtggctgg

SEQ ID NO: 388731 - DNA, 56 bp, Artificial
  Synthetic oligonucleotide
cttcgtcagtatgatcctggggttagcaaacctggtgttgtacttccgttggatgg

SEQ ID NO: 388732 - DNA, 59 bp, Artificial
  Synthetic oligonucleotide
cttcgtcattacggtagaggtgatgattacgttcaagagagattagaatcgttattcaa

SEQ ID NO: 388733 - DNA, 59 bp, Artificial
  Synthetic oligonucleotide
cttcgtcctggcgtcgactaatgccggatccatcaacgcaccaacggtttcagatagtc

SEQ ID NO: 388734 - DNA, 53 bp, Artificial
  Synthetic oligonucleotide
cttcgtcgaatctattcgatcgagggtaatcataaacggtgtgacagcgaggt

SEQ ID NO: 388735 - DNA, 55 bp, Artificial
  Synthetic oligonucleotide
cttcgtcggcgaattggcgccctcctccgtctgaatctccgcctcctcatgacct

SEQ ID NO: 388736 - DNA, 51 bp, Artificial
  Synthetic oligonucleotide
cttcgtctagcgttgaagtatctacgtcgacggaagctatgaaaactccca

SEQ ID NO: 388737 - DNA, 55 bp, Artificial
  Synthetic oligonucleotide
cttcgtctcccgtcaaactaccagcggaactacgctatccggtagctacaggtgc

SEQ ID NO: 388738 - DNA, 54 bp, Artificial
  Synthetic oligonucleotide
cttcgtcttcccttaggtttaggatgtaacgagcgacgtcgtccatatttcgta

SEQ ID NO: 388739 - DNA, 53 bp, Artificial
  Synthetic oligonucleotide
cttcgtgactaaaccgtacaagtcaacacagggcaaccgcgcccggttttatc

SEQ ID NO: 388740 - DNA, 60 bp, Artificial
  Synthetic oligonucleotide
cttcgtgagaagctcgtgcacggtaatacactgatattaccaagagtgcgggtatcgcct

SEQ ID NO: 388741 - DNA, 55 bp, Artificial
  Synthetic oligonucleotide
cttcgtgagaatgcacgtgcatctgaataaatgttcagattatcgttacgcctct

SEQ ID NO: 388742 - DNA, 60 bp, Artificial
  Synthetic oligonucleotide
cttcgtgatggaatacaattcagagttcttcttccactcacagcatgtgaggccaactat

SEQ ID NO: 388743 - DNA, 60 bp, Artificial
  Synthetic oligonucleotide
cttcgtgcacagggtgcacagattgatactgtcttcagctcatactactggctttacaag

SEQ ID NO: 388744 - DNA, 60 bp, Artificial
  Synthetic oligonucleotide
cttcgtgcgcgctcaagggctcattcgtgcatgcatgttggtgcggaaggctgctggggg

SEQ ID NO: 388745 - DNA, 52 bp, Artificial
  Synthetic oligonucleotide
cttcgtggctgttctcccttcccgttggcccgctcagacccaggtatctgct

SEQ ID NO: 388746 - DNA, 55 bp, Artificial
  Synthetic oligonucleotide
cttcgtggtatcagttacaaggtcacagttggcgcccttgtcgccaacgagggct

SEQ ID NO: 388747 - DNA, 55 bp, Artificial
  Synthetic oligonucleotide
cttcgtggtggagtcatcaattaagtagagggtttacaatcccacactacagaac

SEQ ID NO: 388748 - DNA, 55 bp, Artificial
  Synthetic oligonucleotide
cttcgtggttccgatactcctaaaggctctttacatgctaacaacaagggggaga

SEQ ID NO: 388749 - DNA, 60 bp, Artificial
  Synthetic oligonucleotide
cttcgtgtcctgccagcgcgggtacaagggggtctggcgaggggatggcattatgcacac

SEQ ID NO: 388750 - DNA, 54 bp, Artificial
  Synthetic oligonucleotide
cttcgtgttccgggctgaatcggatggtcccagtaaccccgatgtcgtgacggg

SEQ ID NO: 388751 - DNA, 51 bp, Artificial
  Synthetic oligonucleotide
cttcgttcaacgtatcgaacgcgaaattaccgcccgtaccttcgaggtact

SEQ ID NO: 388752 - DNA, 55 bp, Artificial
  Synthetic oligonucleotide
cttcgttctgccgcccggagacttctacgcagcatacagagtggcgaacttcccc

SEQ ID NO: 388753 - DNA, 58 bp, Artificial
  Synthetic oligonucleotide
cttcgttcttatcttcgtctaaatactctttatagctcgaatttggcccaggattgca

SEQ ID NO: 388754 - DNA, 51 bp, Artificial
  Synthetic oligonucleotide
cttcgttgaacgtatgatgtaagcacaccgcgcgtttataatagtaaagtt

SEQ ID NO: 388755 - DNA, 55 bp, Artificial
  Synthetic oligonucleotide
cttcgttggacgcatcatctaaataagtagaacgttgattttcagagcgtcatgg

SEQ ID NO: 388756 - DNA, 57 bp, Artificial
  Synthetic oligonucleotide
cttcgtttcaagggtattgtgaaagtggaacgggttcatgcagggatgaacattgac

SEQ ID NO: 388757 - DNA, 50 bp, Artificial
  Synthetic oligonucleotide
cttcgtttcagatttgtcatcctttttcgaggttacgactaaattcagag

SEQ ID NO: 388758 - DNA, 55 bp, Artificial
  Synthetic oligonucleotide
cttcgttttgacactgggacaggtttttgtaatggtcttgcaagagcccctctac

SEQ ID NO: 388759 - DNA, 60 bp, Artificial
  Synthetic oligonucleotide
cttctaacggcccatgattcattagggcctattgaacatggagcatatctcatggatctg

SEQ ID NO: 388760 - DNA, 54 bp, Artificial
  Synthetic oligonucleotide
cttctaagaagtggttcagaatactcaaaattcgggtataatgttgttacactt

SEQ ID NO: 388761 - DNA, 55 bp, Artificial
  Synthetic oligonucleotide
cttctaagcctgcgcgtgaaaccccttatgagagagacgaaaacaaaacaactcg

SEQ ID NO: 388762 - DNA, 60 bp, Artificial
  Synthetic oligonucleotide
cttctaagcgatctcatcggagttgtccgccgtaccaactatgtcgaagcgaccagcaga

SEQ ID NO: 388763 - DNA, 58 bp, Artificial
  Synthetic oligonucleotide
cttctaatcctgtgtacgctacgttgaaaatacgtatctatttttatgactctgtatc

SEQ ID NO: 388764 - DNA, 60 bp, Artificial
  Synthetic oligonucleotide
cttctaatttcccaatcgatgagtgtttttctaatgatgtagatcgcgaagctattcatc

SEQ ID NO: 388765 - DNA, 60 bp, Artificial
  Synthetic oligonucleotide
cttctacaaatatcgcaatagaaaaactgaatgacagaatttctcatgatgagcaagcca

SEQ ID NO: 388766 - DNA, 55 bp, Artificial
  Synthetic oligonucleotide
cttctacacgttgatgcatgaggagcctggcagcagggcaatgaagatggccgag

SEQ ID NO: 388767 - DNA, 59 bp, Artificial
  Synthetic oligonucleotide
cttctacgcttgaactaatgggcattcaatatgattataatgaagtgtatactagggtc

SEQ ID NO: 388768 - DNA, 60 bp, Artificial
  Synthetic oligonucleotide
cttctacgcttggaccttcacgaaggagactatccagagtggctgcagctccttggagaa

SEQ ID NO: 388769 - DNA, 55 bp, Artificial
  Synthetic oligonucleotide
cttctacggcgtagggatttcagacgatacaatcgtttggtcatgggaggatgaa

SEQ ID NO: 388770 - DNA, 50 bp, Artificial
  Synthetic oligonucleotide
cttctactattagcagacgtctgagactaaaagaaatcgctacacaaact

SEQ ID NO: 388771 - DNA, 60 bp, Artificial
  Synthetic oligonucleotide
cttctactcaaaatgagactcgatggtaccaaggctacagagggcttcagaattgtacac

SEQ ID NO: 388772 - DNA, 53 bp, Artificial
  Synthetic oligonucleotide
cttctacttttatctacacttgccgatgtttacactgttttaaggccggagtt

SEQ ID NO: 388773 - DNA, 54 bp, Artificial
  Synthetic oligonucleotide
cttctagaaaacaagcataacgggaaactatgtaaactaagaggagtagcccca

SEQ ID NO: 388774 - DNA, 59 bp, Artificial
  Synthetic oligonucleotide
cttctagaactcctgtaatcttaatagtgtgtgcgcctaaaggaagtatgaaatctaca

SEQ ID NO: 388775 - DNA, 55 bp, Artificial
  Synthetic oligonucleotide
cttctagaagacagacataacggaaaactgtgtaaactagggggcatagccccat

SEQ ID NO: 388776 - DNA, 58 bp, Artificial
  Synthetic oligonucleotide
cttctagaagtatagttcataccaaagcacaggccaatgaagacattgtagtatcaaa

SEQ ID NO: 388777 - DNA, 60 bp, Artificial
  Synthetic oligonucleotide
cttctagaatatatggataggaaacacacatgccagctctgctatctaaaacactcgaaa

SEQ ID NO: 388778 - DNA, 60 bp, Artificial
  Synthetic oligonucleotide
cttctagagagattgatcccttttatctaccttatgatgacctcgatgttgattacaccg

SEQ ID NO: 388779 - DNA, 58 bp, Artificial
  Synthetic oligonucleotide
cttctagcaacttcaaccatttggctatactacgaaatccgactgatcaagctttaac

SEQ ID NO: 388780 - DNA, 59 bp, Artificial
  Synthetic oligonucleotide
cttctaggatcactagatcacagtaatcatgttctcgcagcccaatcgctttgagtaaa

SEQ ID NO: 388781 - DNA, 55 bp, Artificial
  Synthetic oligonucleotide
cttctagggacggtggcatctctcctagagacgtgggaagtgcagttcagacagt

SEQ ID NO: 388782 - DNA, 56 bp, Artificial
  Synthetic oligonucleotide
cttctatagtattcactagttcgggtgtgttatcgaccacccctagtgtgcagttt

SEQ ID NO: 388783 - DNA, 55 bp, Artificial
  Synthetic oligonucleotide
cttctatgaagggttcaatggcaagaggtgagttgcaattcgctggtttgactgg

SEQ ID NO: 388784 - DNA, 55 bp, Artificial
  Synthetic oligonucleotide
cttctatgatggatggtcacacttttcacaaaacggggtgtatgggtacaacgcg

SEQ ID NO: 388785 - DNA, 60 bp, Artificial
  Synthetic oligonucleotide
cttctatggctggctgcccttctgtgagctgcttcgtgtgaccgaccggtacccgcataa

SEQ ID NO: 388786 - DNA, 55 bp, Artificial
  Synthetic oligonucleotide
cttctatggggtaccatattcagaaattacgcgaacctttaaaagtgataaatca

SEQ ID NO: 388787 - DNA, 60 bp, Artificial
  Synthetic oligonucleotide
cttctatgggtgatctcatgaagatctttgaaaaggaacctagcaagtcttggatatgtt

SEQ ID NO: 388788 - DNA, 54 bp, Artificial
  Synthetic oligonucleotide
cttctatgtcctggtcatgaatgcttgggtttattgggatgatcctctttctgc

SEQ ID NO: 388789 - DNA, 60 bp, Artificial
  Synthetic oligonucleotide
cttctattacacgaatatgttagaggcgccaccggagatagatcgtgtagttcagtacac

SEQ ID NO: 388790 - DNA, 55 bp, Artificial
  Synthetic oligonucleotide
cttctattattctcggtcaaatggtgtttgaatctagcggaaagaatcccggcgg

SEQ ID NO: 388791 - DNA, 60 bp, Artificial
  Synthetic oligonucleotide
cttctattgcttcgcatatgggttaccagtcatggctgagggcgtgtctccaagtctctt

SEQ ID NO: 388792 - DNA, 60 bp, Artificial
  Synthetic oligonucleotide
cttctattgtacagcttgtagaggattccagtgttattgaggccggggctactgtgccta

SEQ ID NO: 388793 - DNA, 55 bp, Artificial
  Synthetic oligonucleotide
cttctcaacgttggatgatatgagcgagtaccttacggaaggtcttgttaacgac

SEQ ID NO: 388794 - DNA, 60 bp, Artificial
  Synthetic oligonucleotide
cttctcaccctccaccctgcaccaagtgcccagagcttagggagcaaatcacgagactgt

SEQ ID NO: 388795 - DNA, 59 bp, Artificial
  Synthetic oligonucleotide
cttctcactgtcacccccgtactgctacgtgagacgacatacaagggcgaagtcgttga

SEQ ID NO: 388796 - DNA, 52 bp, Artificial
  Synthetic oligonucleotide
cttctcagaatgaaggcacacgttgaccctgaaccacaccacgaggggttaa

SEQ ID NO: 388797 - DNA, 55 bp, Artificial
  Synthetic oligonucleotide
cttctcaggatatagtttatcggattcatcctgcccagacgagtccaacgagtcc

SEQ ID NO: 388798 - DNA, 59 bp, Artificial
  Synthetic oligonucleotide
cttctcaggtacgggacagagcttccaaacggcgctggcacgatagaaaagtcgcttgc

SEQ ID NO: 388799 - DNA, 58 bp, Artificial
  Synthetic oligonucleotide
cttctcagtagatcacaattgtgaaaccattgctaaagatattttcggtacccatacc

SEQ ID NO: 388800 - DNA, 55 bp, Artificial
  Synthetic oligonucleotide
cttctcatcatgattatcccaacagtgatggcattccacctgactacacgcaacg

SEQ ID NO: 388801 - DNA, 58 bp, Artificial
  Synthetic oligonucleotide
cttctccaaaatggcgcgacccgctgtacaaattgctctgaacaaccgtgaaataatg

SEQ ID NO: 388802 - DNA, 60 bp, Artificial
  Synthetic oligonucleotide
cttctccaacagcgtccaagaccataagaggcacctgcagaggtttttcgaagtatgcac

SEQ ID NO: 388803 - DNA, 52 bp, Artificial
  Synthetic oligonucleotide
cttctccacactccttccccccgcgggcccccccataaagcagagaacccca

SEQ ID NO: 388804 - DNA, 55 bp, Artificial
  Synthetic oligonucleotide
cttctccacgttaaagatggacgaattgctttcaagtacacccactccttcagga

SEQ ID NO: 388805 - DNA, 60 bp, Artificial
  Synthetic oligonucleotide
cttctccagaggatgtgttcaggaattggtgcgtcaagagagtttatattgggctcctct

SEQ ID NO: 388806 - DNA, 60 bp, Artificial
  Synthetic oligonucleotide
cttctccagtgtctactactaggagatagaggggatgccaggaacctgaatgagcttaaa

SEQ ID NO: 388807 - DNA, 57 bp, Artificial
  Synthetic oligonucleotide
cttctccatgttcctggctttctttaaggttatcaaggatcttggtcataagttcat

SEQ ID NO: 388808 - DNA, 58 bp, Artificial
  Synthetic oligonucleotide
cttctcccccggcgacataacatagaccaagcaatttgcctcgaaatactccagttgc

SEQ ID NO: 388809 - DNA, 57 bp, Artificial
  Synthetic oligonucleotide
cttctcccggtctcttgatgatatagcccataattttctctgggctagtgatgctca

SEQ ID NO: 388810 - DNA, 60 bp, Artificial
  Synthetic oligonucleotide
cttctcccttgtgagtccaacagcttccttatgtcatcaacaccttggcaggtgagcacc

SEQ ID NO: 388811 - DNA, 58 bp, Artificial
  Synthetic oligonucleotide
cttctccgaatctcggaggatttggcctgtacaacccaccaccacaggtcttcatcaa

SEQ ID NO: 388812 - DNA, 55 bp, Artificial
  Synthetic oligonucleotide
cttctcctccttccgaagccgctctttctctccccgccgatcttccccagcccaa

SEQ ID NO: 388813 - DNA, 59 bp, Artificial
  Synthetic oligonucleotide
cttctcctcgtggttggcgcacggagacgctgttcagttcaggagtgccggttggaaga

SEQ ID NO: 388814 - DNA, 55 bp, Artificial
  Synthetic oligonucleotide
cttctcctggagattcccaaattgtaccattattgcatgagatagatacatgttg

SEQ ID NO: 388815 - DNA, 60 bp, Artificial
  Synthetic oligonucleotide
cttctcgagctttgcacatgtttctgggtgatcctcaatctattcttaagcaaaccactc

SEQ ID NO: 388816 - DNA, 55 bp, Artificial
  Synthetic oligonucleotide
cttctcgcaaattctagtcttaaccaagaaatcgtatataactacggaaatggcg

SEQ ID NO: 388817 - DNA, 55 bp, Artificial
  Synthetic oligonucleotide
cttctcgccttcaactcacacttgtgagagattgattcaagacgcaacttcacac

SEQ ID NO: 388818 - DNA, 60 bp, Artificial
  Synthetic oligonucleotide
cttctcgcgatgcaatagtttcgagaatatgcctgttcataggctcacaatattccgcca

SEQ ID NO: 388819 - DNA, 55 bp, Artificial
  Synthetic oligonucleotide
cttctcggacgcaattgtcgtaaatctaacactgattgaatgttgcgtggaacca

SEQ ID NO: 388820 - DNA, 60 bp, Artificial
  Synthetic oligonucleotide
cttctcgggcccccatcgttctgggctccggcgagctcaatgctccacaggtctcaactc

SEQ ID NO: 388821 - DNA, 55 bp, Artificial
  Synthetic oligonucleotide
cttctcgtcttttcttagtttaaaattcctatggcaacgtcctcgttcaacatca

SEQ ID NO: 388822 - DNA, 58 bp, Artificial
  Synthetic oligonucleotide
cttctcgtgtttatggggtctccccagggctagttcataacctgattggtatgctaca

SEQ ID NO: 388823 - DNA, 55 bp, Artificial
  Synthetic oligonucleotide
cttctcgttagaccccaattacacaattgccgaagtgcatgttcgcctcacgggg

SEQ ID NO: 388824 - DNA, 56 bp, Artificial
  Synthetic oligonucleotide
cttctctattcgtcctggcgtcaactaacgcagggtctatcaacgccccaaccgtg

SEQ ID NO: 388825 - DNA, 55 bp, Artificial
  Synthetic oligonucleotide
cttctctcagcatcctcacaagctcaacagaagcaaagcatgtgttcagccctgg

SEQ ID NO: 388826 - DNA, 53 bp, Artificial
  Synthetic oligonucleotide
cttctctccactgtctcatcaactgtcggatctctgctccagaaccccactgt

SEQ ID NO: 388827 - DNA, 54 bp, Artificial
  Synthetic oligonucleotide
cttctctctgtagttgtttggcgggtctcccgcctgacaagaactaacttaccc

SEQ ID NO: 388828 - DNA, 57 bp, Artificial
  Synthetic oligonucleotide
cttctctgccaaaaagatggaaacggttatggaaagaggtattgctgcaaaagctct

SEQ ID NO: 388829 - DNA, 60 bp, Artificial
  Synthetic oligonucleotide
cttctctggacctcaaccgggaaggagcagcgattgacatcacctggccggctggtactc

SEQ ID NO: 388830 - DNA, 56 bp, Artificial
  Synthetic oligonucleotide
cttctctggctcgaactttcgaccatccaagggccctccttctccctcaccgtcac

SEQ ID NO: 388831 - DNA, 55 bp, Artificial
  Synthetic oligonucleotide
cttctctgggaccgcttggagccagtggatcgactccgttaggggttatagggac

SEQ ID NO: 388832 - DNA, 55 bp, Artificial
  Synthetic oligonucleotide
cttctctgggctcgtacctatgcggaactatccgcaggtggtgtgggctaagcag

SEQ ID NO: 388833 - DNA, 54 bp, Artificial
  Synthetic oligonucleotide
cttctctggggtgctgatctctcaacagttataagggctgctagagcctttgga

SEQ ID NO: 388834 - DNA, 56 bp, Artificial
  Synthetic oligonucleotide
cttctctggggttcggacctggcgaccatgattcggtgcgcccgagcattcggagg

SEQ ID NO: 388835 - DNA, 55 bp, Artificial
  Synthetic oligonucleotide
cttctctggtcatgtggatgctgtcaaccctttgtttggctgctacagtatcaac

SEQ ID NO: 388836 - DNA, 55 bp, Artificial
  Synthetic oligonucleotide
cttctctgtaataacacctctaaggtgtcgtatcttacgtacccggcgaagtcta

SEQ ID NO: 388837 - DNA, 55 bp, Artificial
  Synthetic oligonucleotide
cttctctgtagcgaaagctgtgagtgaacagattgagggccgactgtcctatgcc

SEQ ID NO: 388838 - DNA, 58 bp, Artificial
  Synthetic oligonucleotide
cttctctttaataatccgcattgcctcttccttcgaggaagcatttagggcctctgcg

SEQ ID NO: 388839 - DNA, 55 bp, Artificial
  Synthetic oligonucleotide
cttctgaaaaggagtattaacggtttgatatccgattctcttgttataagaaaca

SEQ ID NO: 388840 - DNA, 50 bp, Artificial
  Synthetic oligonucleotide
cttctgaaccgtggacactaggagatgtaagtgctgaactgttacacaca

SEQ ID NO: 388841 - DNA, 55 bp, Artificial
  Synthetic oligonucleotide
cttctgaacgacgcaaagacattgaagatgtgcaagggtacgttagatcacaggt

SEQ ID NO: 388842 - DNA, 57 bp, Artificial
  Synthetic oligonucleotide
cttctgaagagacgtgttcctttctcagatgttctaaggtgtaccgtttcggtgcta

SEQ ID NO: 388843 - DNA, 56 bp, Artificial
  Synthetic oligonucleotide
cttctgaagttagagcgtgaggtgcttcttgtttggatactttcgttacaacggta

SEQ ID NO: 388844 - DNA, 60 bp, Artificial
  Synthetic oligonucleotide
cttctgaatagactgaacatcaactcagtgaaactttcttcggggtacaaagacatcata

SEQ ID NO: 388845 - DNA, 56 bp, Artificial
  Synthetic oligonucleotide
cttctgaccactcaaggcgcgtctgttacgcctctggtaacttcggttgccgaccc

SEQ ID NO: 388846 - DNA, 55 bp, Artificial
  Synthetic oligonucleotide
cttctgaccctcttgcaatggatcctgtagcaggttcttcgacagcagtcgcgac

SEQ ID NO: 388847 - DNA, 55 bp, Artificial
  Synthetic oligonucleotide
cttctgacctctatcgctccccagctcggagtttccgaagccgtcctctggtcct

SEQ ID NO: 388848 - DNA, 60 bp, Artificial
  Synthetic oligonucleotide
cttctgacgatattctatccaggctagttattgagcagagcgctcacttaagcaactgga

SEQ ID NO: 388849 - DNA, 59 bp, Artificial
  Synthetic oligonucleotide
cttctgagagatcgatcggtgaagtatgcgtaaaaagcaacgatgccccactagtttaa

SEQ ID NO: 388850 - DNA, 55 bp, Artificial
  Synthetic oligonucleotide
cttctgaggagatggtggcgcttgacggatcttgggtccgaagtgaggagcacga

SEQ ID NO: 388851 - DNA, 51 bp, Artificial
  Synthetic oligonucleotide
cttctgaggcccagttgtttaataaaccttactggttacaaaaggcccagg

SEQ ID NO: 388852 - DNA, 60 bp, Artificial
  Synthetic oligonucleotide
cttctgagttgtttcaatcagctgaagagtatactgattcgttaatggatcccgccatac

SEQ ID NO: 388853 - DNA, 55 bp, Artificial
  Synthetic oligonucleotide
cttctgcaatgggaactatcatgcaagtggctttatcagctataggacctgcagc

SEQ ID NO: 388854 - DNA, 57 bp, Artificial
  Synthetic oligonucleotide
cttctgcccctaggatccccaacactgcttgggtggcccgaggatacaagataggag

SEQ ID NO: 388855 - DNA, 55 bp, Artificial
  Synthetic oligonucleotide
cttctgccctagcgtgcacgctgcattcctaccggtagtcgagctggatgctcgt

SEQ ID NO: 388856 - DNA, 55 bp, Artificial
  Synthetic oligonucleotide
cttctgccgattatattggttaggggcaacgtgcatggtttgccaagtgggcgtg

SEQ ID NO: 388857 - DNA, 60 bp, Artificial
  Synthetic oligonucleotide
cttctgccgattcaactcaggcataaacactcatgatgaccacacaaggcagatgggcta

SEQ ID NO: 388858 - DNA, 55 bp, Artificial
  Synthetic oligonucleotide
cttctgcctcgttacctgcttctgccagcgtctcacctaaatcaccaacttcaga

SEQ ID NO: 388859 - DNA, 60 bp, Artificial
  Synthetic oligonucleotide
cttctgcctggtgaagggtacagcctcgatcaagcataatgtgatcaaggggtgtactga

SEQ ID NO: 388860 - DNA, 55 bp, Artificial
  Synthetic oligonucleotide
cttctgcgtcaaattcctccgtggtgatgaaacctaattcagacgtactcaacct

SEQ ID NO: 388861 - DNA, 55 bp, Artificial
  Synthetic oligonucleotide
cttctgctttgttaactttaaatggcttatcctcatccgtttcctccttgcttga

SEQ ID NO: 388862 - DNA, 57 bp, Artificial
  Synthetic oligonucleotide
cttctggactatcaaggtatgttgcccgtttgtcctctaattccaggaaacagcacc

SEQ ID NO: 388863 - DNA, 55 bp, Artificial
  Synthetic oligonucleotide
cttctggaggcccatgattctccagccttaatttctattgggcccgaaggcccaa

SEQ ID NO: 388864 - DNA, 60 bp, Artificial
  Synthetic oligonucleotide
cttctggagtaacgttatcaactcagttcacagattatgtatctctcaattcactgagat

SEQ ID NO: 388865 - DNA, 59 bp, Artificial
  Synthetic oligonucleotide
cttctggctgcaattcccgacgatgcacgtacagttgaagttcactgtcacatgcgttg

SEQ ID NO: 388866 - DNA, 56 bp, Artificial
  Synthetic oligonucleotide
cttctggcttaggtagagccattaaggcgttaggaggacatactattactaagtgg

SEQ ID NO: 388867 - DNA, 58 bp, Artificial
  Synthetic oligonucleotide
cttctgggacacatcattctcaagggactgatgcgggggtgggaaggcctcaaatctt

SEQ ID NO: 388868 - DNA, 57 bp, Artificial
  Synthetic oligonucleotide
cttctgggacgcagggggagggaagtcctccgatattggtggagtctcctgcagtat

SEQ ID NO: 388869 - DNA, 60 bp, Artificial
  Synthetic oligonucleotide
cttctgggataaaatcctgtattggatatatgtctatgttacagtttatatgattagttg

SEQ ID NO: 388870 - DNA, 55 bp, Artificial
  Synthetic oligonucleotide
cttctgggcaccaacttattatgactactttcacataattactgtcttggccgcg

SEQ ID NO: 388871 - DNA, 55 bp, Artificial
  Synthetic oligonucleotide
cttctggggctcggcaactccatcccgttatatctgctcttctgcttatggtggt

SEQ ID NO: 388872 - DNA, 55 bp, Artificial
  Synthetic oligonucleotide
cttctggtagagatttccagctgcgttgcccagttgagcctgtgaaacaagtcac

SEQ ID NO: 388873 - DNA, 50 bp, Artificial
  Synthetic oligonucleotide
cttctggtagtgctcccgtgcaagaatttccaattcaaattgatgattct

SEQ ID NO: 388874 - DNA, 58 bp, Artificial
  Synthetic oligonucleotide
cttctggtcggcttgggggcctcccagtctgagaaatagcgacgaatcaccttgacga

SEQ ID NO: 388875 - DNA, 60 bp, Artificial
  Synthetic oligonucleotide
cttctggtctggtgatgctttgcattcacggctctcctgtcaattcttataccaacacac

SEQ ID NO: 388876 - DNA, 60 bp, Artificial
  Synthetic oligonucleotide
cttctgtagcaatgtaaatagttgccagtttctggctgaaacaaagcaagttcgacagga

SEQ ID NO: 388877 - DNA, 57 bp, Artificial
  Synthetic oligonucleotide
cttctgtcttcaggtagttagaagtgtaaacgtcgaaaccgtagatgttcgcaatga

SEQ ID NO: 388878 - DNA, 57 bp, Artificial
  Synthetic oligonucleotide
cttctgtgaagaagaagaggccaagattcggcaaaggattttcaggccaacaaggaa

SEQ ID NO: 388879 - DNA, 55 bp, Artificial
  Synthetic oligonucleotide
cttctgtggcgaaggttgtcaatacagatgattatgtaacacgtacaggcatata

SEQ ID NO: 388880 - DNA, 60 bp, Artificial
  Synthetic oligonucleotide
cttctgttacacaaatttgaacacaagattaacactgaaggaatcattgttgtgcacgga

SEQ ID NO: 388881 - DNA, 58 bp, Artificial
  Synthetic oligonucleotide
cttctgttactggttattctttttctcttgcgggtatagctgatggattcaggaagag

SEQ ID NO: 388882 - DNA, 57 bp, Artificial
  Synthetic oligonucleotide
cttctgttcccccggaccgagtatcaatagactgcttgcgcggttgaaggagaaagc

SEQ ID NO: 388883 - DNA, 55 bp, Artificial
  Synthetic oligonucleotide
cttctgttgccccggtgaaattgcataagctgtccccacggctgaaggcgattga

SEQ ID NO: 388884 - DNA, 54 bp, Artificial
  Synthetic oligonucleotide
cttctgttgctcgcggcttatgacctatcttcgtgggattagttataaagtgac

SEQ ID NO: 388885 - DNA, 56 bp, Artificial
  Synthetic oligonucleotide
cttctgttggactgactttaactcaactagattgttcactgcctggtttaggtccc

SEQ ID NO: 388886 - DNA, 51 bp, Artificial
  Synthetic oligonucleotide
cttctgttgtttatggtaaatcaagagaattctttgaagctagtgatacta

SEQ ID NO: 388887 - DNA, 58 bp, Artificial
  Synthetic oligonucleotide
cttctgtttccccggtgagtgtggatatgctttacccaaggcagaaactaatctcatc

SEQ ID NO: 388888 - DNA, 60 bp, Artificial
  Synthetic oligonucleotide
cttcttaagtgagatagaactagcagtaccagggttgctttcactaagcaacttgacagc

SEQ ID NO: 388889 - DNA, 60 bp, Artificial
  Synthetic oligonucleotide
cttcttaatgcagtccctgcagatctcttgtactgtcaagtgccaaactccctcaccgcc

SEQ ID NO: 388890 - DNA, 60 bp, Artificial
  Synthetic oligonucleotide
cttcttacatttgatgagttattcggtgctaggatccacagccatggtaatctcgcgata

SEQ ID NO: 388891 - DNA, 57 bp, Artificial
  Synthetic oligonucleotide
cttcttacgccgtgcaatagtcggtgaccagtttggctggtatgggcgtctcgaccg

SEQ ID NO: 388892 - DNA, 55 bp, Artificial
  Synthetic oligonucleotide
cttcttagaggaaccaaagcactaacagacatagtaccactgactgaggaagcag

SEQ ID NO: 388893 - DNA, 54 bp, Artificial
  Synthetic oligonucleotide
cttcttagcctctgtcgaggagccgcctttcgctggattgcgaggaggtagcaa

SEQ ID NO: 388894 - DNA, 55 bp, Artificial
  Synthetic oligonucleotide
cttcttagtccgtgacagaaggccttatggtactccacaagatttcggtcaggtc

SEQ ID NO: 388895 - DNA, 53 bp, Artificial
  Synthetic oligonucleotide
cttcttatcgatgtgagaagtctgtcagggatattcggtgccatcggcgctga

SEQ ID NO: 388896 - DNA, 55 bp, Artificial
  Synthetic oligonucleotide
cttcttcagaaaggggagtccacaatggtccacaaggagcccgaggtcaacccag

SEQ ID NO: 388897 - DNA, 59 bp, Artificial
  Synthetic oligonucleotide
cttcttcagacacccctggagaagctatatagtaacatgggaccaagacataccctgta

SEQ ID NO: 388898 - DNA, 55 bp, Artificial
  Synthetic oligonucleotide
cttcttcgatcaggacagtgtcgatgaacgtgttgataggcatcatcgcattgtg

SEQ ID NO: 388899 - DNA, 52 bp, Artificial
  Synthetic oligonucleotide
cttcttcgcaatttggtgcagtatcttctgtggaacttgagtagagtggccc

SEQ ID NO: 388900 - DNA, 60 bp, Artificial
  Synthetic oligonucleotide
cttcttctactcactcctacgagaaatctatcgaacataggaatagcaagtacacgtctg

SEQ ID NO: 388901 - DNA, 55 bp, Artificial
  Synthetic oligonucleotide
cttcttctcaaccctcatggacgctcttttaccggagtttctcgcccacaagctt

SEQ ID NO: 388902 - DNA, 56 bp, Artificial
  Synthetic oligonucleotide
cttcttctgctgcctgggacgtacacttacgaatggtctttcagaaaagacgttaa

SEQ ID NO: 388903 - DNA, 54 bp, Artificial
  Synthetic oligonucleotide
cttcttcttacaagtcaccgctttttggcatcgacttgctagaagttttgaaga

SEQ ID NO: 388904 - DNA, 59 bp, Artificial
  Synthetic oligonucleotide
cttcttgaaagacgagatccgtccgatggagaaagtacgtgccggcaagacacgcattg

SEQ ID NO: 388905 - DNA, 55 bp, Artificial
  Synthetic oligonucleotide
cttcttgaacagcttgctaacctcactattcagcatttgccaacacctccttcac

SEQ ID NO: 388906 - DNA, 55 bp, Artificial
  Synthetic oligonucleotide
cttcttgacccaaaccaacaggtcctatcctacttcaagaacgacacaggctgtg

SEQ ID NO: 388907 - DNA, 60 bp, Artificial
  Synthetic oligonucleotide
cttcttgagcttacctgagatgtatgagtactttgactaagaatccagaccaaccatcca

SEQ ID NO: 388908 - DNA, 60 bp, Artificial
  Synthetic oligonucleotide
cttcttgatgattctgccaccatgagtgacatattcaacagtccacaggcgcgaagcaag

SEQ ID NO: 388909 - DNA, 60 bp, Artificial
  Synthetic oligonucleotide
cttcttgcaataatcagccttgttaaaagtgatcagatttgcattggttaccatgcaaac

SEQ ID NO: 388910 - DNA, 59 bp, Artificial
  Synthetic oligonucleotide
cttcttgcacccggtgacgtgatcaagcgttcatccgaggagttaaaacagaggcagat

SEQ ID NO: 388911 - DNA, 60 bp, Artificial
  Synthetic oligonucleotide
cttcttgcagtagtcagtcttgtcagaagtgaccagatttgcattggttaccatgcaaac

SEQ ID NO: 388912 - DNA, 55 bp, Artificial
  Synthetic oligonucleotide
cttcttgccttgctccgaaatggatgctcggcatacaaagggtggaaggagcccc

SEQ ID NO: 388913 - DNA, 57 bp, Artificial
  Synthetic oligonucleotide
cttcttgcgacctcccgaggaatacggacgtcaaccgtcttaataatgtcagctagc

SEQ ID NO: 388914 - DNA, 50 bp, Artificial
  Synthetic oligonucleotide
cttcttggctaaaacgaagtagaatccttgaagttattggatggcagggt

SEQ ID NO: 388915 - DNA, 60 bp, Artificial
  Synthetic oligonucleotide
cttcttggctatcttgtgttggaccttgattgatacttgcgaacagtggctcgtagaggg

SEQ ID NO: 388916 - DNA, 55 bp, Artificial
  Synthetic oligonucleotide
cttcttgggatcaaaggatccccacccaaagtgttctttaaaagtgatcttctgc

SEQ ID NO: 388917 - DNA, 55 bp, Artificial
  Synthetic oligonucleotide
cttcttggtctgaattagagccctaaatcaatagccaacaccagatggactaagc

SEQ ID NO: 388918 - DNA, 58 bp, Artificial
  Synthetic oligonucleotide
cttcttgtgtcgggatatcttttagaaggatctaaactaaaagcttccatatcagcta

SEQ ID NO: 388919 - DNA, 55 bp, Artificial
  Synthetic oligonucleotide
cttctttaacactgccgacgtaatagaacttcttactatctagcagcttaacctc

SEQ ID NO: 388920 - DNA, 55 bp, Artificial
  Synthetic oligonucleotide
cttctttaactcagagattcacggagtcaaccgaatgactcaagttccacaaagg

SEQ ID NO: 388921 - DNA, 50 bp, Artificial
  Synthetic oligonucleotide
cttctttaagataacgtgcatagtcctggaaagcgttacggactacttcc

SEQ ID NO: 388922 - DNA, 55 bp, Artificial
  Synthetic oligonucleotide
cttctttcatggtggtctgacttaagcaacattctatggcttttgcaaacggcat

SEQ ID NO: 388923 - DNA, 55 bp, Artificial
  Synthetic oligonucleotide
cttctttgccaccttccggcgcttcccgtacttgggattgactatgtagtctgtt

SEQ ID NO: 388924 - DNA, 55 bp, Artificial
  Synthetic oligonucleotide
cttcttttccagctgttcgtactgctgcaccttctattgctcggagagcgacccc

SEQ ID NO: 388925 - DNA, 60 bp, Artificial
  Synthetic oligonucleotide
cttcttttgaagctgcagttgttgccgccacttcaacactagaattgatgggtattcaat

SEQ ID NO: 388926 - DNA, 59 bp, Artificial
  Synthetic oligonucleotide
cttctttttaatctgagctttgtttgtctgcgttgcgttaagactgagaagctaaatca

SEQ ID NO: 388927 - DNA, 53 bp, Artificial
  Synthetic oligonucleotide
cttgaaaaaccttcccgtatgtttgttttcagtatacactttctttgagtgtc

SEQ ID NO: 388928 - DNA, 53 bp, Artificial
  Synthetic oligonucleotide
cttgaaaaattgccgaggttttctgagtcttaagaggtgtaaaattcgccaaa

SEQ ID NO: 388929 - DNA, 57 bp, Artificial
  Synthetic oligonucleotide
cttgaaaacgatgcctgaattggaaaccatgaatcttaacggactctggagagaaaa

SEQ ID NO: 388930 - DNA, 59 bp, Artificial
  Synthetic oligonucleotide
cttgaaaagacaaactgtgacgtgattcttacgagagagaatagagtgcgaacgaggga

SEQ ID NO: 388931 - DNA, 55 bp, Artificial
  Synthetic oligonucleotide
cttgaaaagatatcactttgcgcaatgaccagtaaagcctaggatccccggtgcg

SEQ ID NO: 388932 - DNA, 60 bp, Artificial
  Synthetic oligonucleotide
cttgaaaataccgaggagcatgtgcatcccacaagggtcatatgtaagtactaaatcgct

SEQ ID NO: 388933 - DNA, 60 bp, Artificial
  Synthetic oligonucleotide
cttgaaacagtatggtgagacctttggatggaattatgatattgatttcaatgggacaac

SEQ ID NO: 388934 - DNA, 57 bp, Artificial
  Synthetic oligonucleotide
cttgaaacgattgaggttgtgcaacaaacaagagtggacaaattgacccaaggccgc

SEQ ID NO: 388935 - DNA, 60 bp, Artificial
  Synthetic oligonucleotide
cttgaaactgaggaggtttatcagcctggaagatggtttatgcgagcagctcaagttgtt

SEQ ID NO: 388936 - DNA, 55 bp, Artificial
  Synthetic oligonucleotide
cttgaaactgccctagctctgcttgctctgaccttacctttgactgcgtgccgcc

SEQ ID NO: 388937 - DNA, 51 bp, Artificial
  Synthetic oligonucleotide
cttgaaagaagcaactaattcttttgtgtatagagaaacgaaatatggctg

SEQ ID NO: 388938 - DNA, 55 bp, Artificial
  Synthetic oligonucleotide
cttgaaagccatctttgatggtggtataacattatggcatgttaacgatgttggt

SEQ ID NO: 388939 - DNA, 54 bp, Artificial
  Synthetic oligonucleotide
cttgaaagccttatacatgctttccacccggggtagacaaacagtaaaggagaa

SEQ ID NO: 388940 - DNA, 54 bp, Artificial
  Synthetic oligonucleotide
cttgaaaggctactggacgaggctaaagaccccccagtagttttgttgcgcggc

SEQ ID NO: 388941 - DNA, 60 bp, Artificial
  Synthetic oligonucleotide
cttgaaagtcaagaagagtctgggaatgttcatctcagatgtaccaggtgagaggaaccc

SEQ ID NO: 388942 - DNA, 55 bp, Artificial
  Synthetic oligonucleotide
cttgaaatagaggggattggtaatctcccaaataaagacgccattcgctgcttga

SEQ ID NO: 388943 - DNA, 58 bp, Artificial
  Synthetic oligonucleotide
cttgaaatattccagtaaagtatcctatgatatcatacacaggccctataaaaaggaa

SEQ ID NO: 388944 - DNA, 55 bp, Artificial
  Synthetic oligonucleotide
cttgaaatcacacagcactatttcgaaactgcaactaccttcgtcacgagaggct

SEQ ID NO: 388945 - DNA, 52 bp, Artificial
  Synthetic oligonucleotide
cttgaaatgggaaggttcgagttgacgggacggcgtctcgggaaagttgagg

SEQ ID NO: 388946 - DNA, 57 bp, Artificial
  Synthetic oligonucleotide
cttgaaattaattctagtggacagctaactgttagatcgacatccccgaatttgagg

SEQ ID NO: 388947 - DNA, 59 bp, Artificial
  Synthetic oligonucleotide
cttgaacaccattacattgcccaccaacgaggacttatttttaagcgcgcctgacatga

SEQ ID NO: 388948 - DNA, 57 bp, Artificial
  Synthetic oligonucleotide
cttgaacaccgtggaaggcctgttacgtgcacttgggtggaaataccaccatctgtc

SEQ ID NO: 388949 - DNA, 59 bp, Artificial
  Synthetic oligonucleotide
cttgaacccttggtggtaaattcaagtatgcggttagcctcatcaagctcgatacctgc

SEQ ID NO: 388950 - DNA, 55 bp, Artificial
  Synthetic oligonucleotide
cttgaaccgtgtgttggacactattgcttcgagacccgtctttaaggaaggttca

SEQ ID NO: 388951 - DNA, 58 bp, Artificial
  Synthetic oligonucleotide
cttgaacctcttaccaatgatacagcatttacatatgatacgtttctttctttaggaa

SEQ ID NO: 388952 - DNA, 60 bp, Artificial
  Synthetic oligonucleotide
cttgaacctgacaacctgagtttgcaagataacatgcataagtatcaccaactattggca

SEQ ID NO: 388953 - DNA, 55 bp, Artificial
  Synthetic oligonucleotide
cttgaacgggattcatgtaatggcgtttacggtaacataaccaagaacgctctgt

SEQ ID NO: 388954 - DNA, 54 bp, Artificial
  Synthetic oligonucleotide
cttgaactatgatggagtcgtcctccttcaatttcacatcaatgatgaactcca

SEQ ID NO: 388955 - DNA, 60 bp, Artificial
  Synthetic oligonucleotide
cttgaactgatgggtattcaatatgattataatgaggtgtatactagagtcaaaagtaaa

SEQ ID NO: 388956 - DNA, 55 bp, Artificial
  Synthetic oligonucleotide
cttgaactttcaggactgtcgacgtccgaccttgaggcatacttcaaagaccgtg

SEQ ID NO: 388957 - DNA, 60 bp, Artificial
  Synthetic oligonucleotide
cttgaagattatgcttatcctccaaagcaagaaaattcgctagagaacccaggacagcaa

SEQ ID NO: 388958 - DNA, 50 bp, Artificial
  Synthetic oligonucleotide
cttgaagcactgtttcagggaccaccagtgtacagagaaatcaagatcag

SEQ ID NO: 388959 - DNA, 51 bp, Artificial
  Synthetic oligonucleotide
cttgaagcacttgaccttggtacaagtgccggctatccatacgtggccatg

SEQ ID NO: 388960 - DNA, 55 bp, Artificial
  Synthetic oligonucleotide
cttgaagccaacgcggaaatgggtcgtggtcgcggagggtgtcagaagcttctgg

SEQ ID NO: 388961 - DNA, 55 bp, Artificial
  Synthetic oligonucleotide
cttgaagcccatgactcaccaggcctgatctcaattgggcctctaagcccaagtc

SEQ ID NO: 388962 - DNA, 55 bp, Artificial
  Synthetic oligonucleotide
cttgaagcgcgagtaatagctggagatgaatcttttacagacccaacgcaagata

SEQ ID NO: 388963 - DNA, 57 bp, Artificial
  Synthetic oligonucleotide
cttgaagctttaacaatacaatctgaaacgcagtttctagccggtataaattcacaa

SEQ ID NO: 388964 - DNA, 57 bp, Artificial
  Synthetic oligonucleotide
cttgaaggaatcgatgacaagaagatccacccgagagtaatgatgaggttcaaagtg

SEQ ID NO: 388965 - DNA, 55 bp, Artificial
  Synthetic oligonucleotide
cttgaaggaggcacacttaatgagtaaatttgatcatccccacattctgaagcta

SEQ ID NO: 388966 - DNA, 60 bp, Artificial
  Synthetic oligonucleotide
cttgaaggagttaccaagtctcaggctgacactatgacaattttcaagctccccatattc

SEQ ID NO: 388967 - DNA, 59 bp, Artificial
  Synthetic oligonucleotide
cttgaaggcctctgcggcctgtcgagctgcaaagctccaggactgcacaatgctcgtga

SEQ ID NO: 388968 - DNA, 53 bp, Artificial
  Synthetic oligonucleotide
cttgaagggactacatacctctctaacaggcgttttaattgttggtcaacgtt

SEQ ID NO: 388969 - DNA, 59 bp, Artificial
  Synthetic oligonucleotide
cttgaagtctgtgactacccttaattatatcttgactctcaatacagctaaacatgggt

SEQ ID NO: 388970 - DNA, 59 bp, Artificial
  Synthetic oligonucleotide
cttgaagtggatacatcctgctcccaaacaacaacaggctccaagattactagcttccc

SEQ ID NO: 388971 - DNA, 57 bp, Artificial
  Synthetic oligonucleotide
cttgaagttgtgaatgaccggaccgttgtcattttggacaatcagggacaacgaaga

SEQ ID NO: 388972 - DNA, 60 bp, Artificial
  Synthetic oligonucleotide
cttgaatactacattgccattccacaatgtaagtaagtatgcatttggaaactgcccaaa

SEQ ID NO: 388973 - DNA, 50 bp, Artificial
  Synthetic oligonucleotide
cttgaatactttcctctattatataatatggatctctagttaaggcactg

SEQ ID NO: 388974 - DNA, 60 bp, Artificial
  Synthetic oligonucleotide
cttgaatatggagcatgccccaataatatgatgggtactttctcggtgcgaactgtgggg

SEQ ID NO: 388975 - DNA, 58 bp, Artificial
  Synthetic oligonucleotide
cttgaatcatacaatgggacgcctaaatatggacctctcctaaatatacccagcttta

SEQ ID NO: 388976 - DNA, 60 bp, Artificial
  Synthetic oligonucleotide
cttgaatctcgcaccatcaggcgggtacaacctgacaatgctgatgtgaccagtctgaat

SEQ ID NO: 388977 - DNA, 60 bp, Artificial
  Synthetic oligonucleotide
cttgaatctggatcactttcgggagtgtctggctcgtcattctcacatctatgctgatgg

SEQ ID NO: 388978 - DNA, 55 bp, Artificial
  Synthetic oligonucleotide
cttgaatcttacacaacaatataatgcacctcatagtttagcaggagctctgcga

SEQ ID NO: 388979 - DNA, 60 bp, Artificial
  Synthetic oligonucleotide
cttgaatgacgccacgtatcagagaactagagccctagtgcgcactgggatggaccccag

SEQ ID NO: 388980 - DNA, 55 bp, Artificial
  Synthetic oligonucleotide
cttgaatggcttaataagtatgagaggtattctaagtggccttggtgggtgtggc

SEQ ID NO: 388981 - DNA, 60 bp, Artificial
  Synthetic oligonucleotide
cttgaatggtatgtcatctatgacattgtaagttgcgttagcaactaagttgaggaagtc

SEQ ID NO: 388982 - DNA, 60 bp, Artificial
  Synthetic oligonucleotide
cttgaattggatgatgtgatcccaactgatacctaccaagtgtcaggagagcatttaatc

SEQ ID NO: 388983 - DNA, 51 bp, Artificial
  Synthetic oligonucleotide
cttgaatttagaaatttgacccccgggaacactaacacccgagtgtcccga

SEQ ID NO: 388984 - DNA, 51 bp, Artificial
  Synthetic oligonucleotide
cttgacaagttagagcgtgctgtaactactatctccgaaaatagtaataag

SEQ ID NO: 388985 - DNA, 51 bp, Artificial
  Synthetic oligonucleotide
cttgacaatgacaatgtgacaatctgaacaacgaatctcaactttagtgcc

SEQ ID NO: 388986 - DNA, 55 bp, Artificial
  Synthetic oligonucleotide
cttgacaatgccacttggggccgaataacttttggcccagttgaaagagtaagaa

SEQ ID NO: 388987 - DNA, 60 bp, Artificial
  Synthetic oligonucleotide
cttgacaatgcccaatgcatgttcagtcaacaattcccaccattacatcagtatggggag

SEQ ID NO: 388988 - DNA, 59 bp, Artificial
  Synthetic oligonucleotide
cttgacacaaaattcgcacaaactcgagttttgttgtccaaggctatggctggtggtga

SEQ ID NO: 388989 - DNA, 60 bp, Artificial
  Synthetic oligonucleotide
cttgacacaaggcagtgtgaggacaccccaacaagtcatttcggacattcaatggaacac

SEQ ID NO: 388990 - DNA, 60 bp, Artificial
  Synthetic oligonucleotide
cttgacacagataaccggtgtgtgcgctacaacaaacaatcagtttcttatggagagcga

SEQ ID NO: 388991 - DNA, 55 bp, Artificial
  Synthetic oligonucleotide
cttgacaccaacctgaacaacttttaccagtacgcccggccggagataactgcga

SEQ ID NO: 388992 - DNA, 55 bp, Artificial
  Synthetic oligonucleotide
cttgacaccacccgagggtcaggccggattagggctcgcaccctcacatgaaccc

SEQ ID NO: 388993 - DNA, 60 bp, Artificial
  Synthetic oligonucleotide
cttgacacctggtaatactaatacgcgtgtctctcgttattcgagtagcgcgcgacacaa

SEQ ID NO: 388994 - DNA, 57 bp, Artificial
  Synthetic oligonucleotide
cttgacagaaggaaattgtttatggtgccttaaaacattagattacatgtttgagga

SEQ ID NO: 388995 - DNA, 56 bp, Artificial
  Synthetic oligonucleotide
cttgacagacattcaggaggatataacccgccatgaacaacagcttgttgttgcca

SEQ ID NO: 388996 - DNA, 58 bp, Artificial
  Synthetic oligonucleotide
cttgacagctgttattaagaactattaattttgtcgtatcatcttaccgacgtacaca

SEQ ID NO: 388997 - DNA, 60 bp, Artificial
  Synthetic oligonucleotide
cttgacaggcgctcatcctgttctatgtagtttagacataggctccttaactctgaaatg

SEQ ID NO: 388998 - DNA, 60 bp, Artificial
  Synthetic oligonucleotide
cttgacagttcacccagcccctcgatcaccaaagctactatcatgccgtctgctatcgtt

SEQ ID NO: 388999 - DNA, 60 bp, Artificial
  Synthetic oligonucleotide
cttgacatctgagcttgatttagctccctgaatgttcggatggaaatgtactgacctggt

SEQ ID NO: 389000 - DNA, 55 bp, Artificial
  Synthetic oligonucleotide
cttgacattacattaaactcgccgctattttcgggtaaattattgctacctcgta

SEQ ID NO: 389001 - DNA, 55 bp, Artificial
  Synthetic oligonucleotide
cttgacattccagttgaagttggagttggacgcactggctgatcaacgttcggaa

SEQ ID NO: 389002 - DNA, 55 bp, Artificial
  Synthetic oligonucleotide
cttgacattgcgtagttcaggtgaggctgtcaatgagtgtaggaccttcagggga

SEQ ID NO: 389003 - DNA, 58 bp, Artificial
  Synthetic oligonucleotide
cttgaccacatggaagtacttccagtcagtccaaaaaaaggtgaacatgtcttatgac

SEQ ID NO: 389004 - DNA, 57 bp, Artificial
  Synthetic oligonucleotide
cttgaccacggctcaaaagagggcagcgcgactggcgaccggaatttctgacggtcc

SEQ ID NO: 389005 - DNA, 55 bp, Artificial
  Synthetic oligonucleotide
cttgaccatgtctaggataatatacttagacccttcattgggaggagtgtcaggg

SEQ ID NO: 389006 - DNA, 59 bp, Artificial
  Synthetic oligonucleotide
cttgaccctactgcggctatcgtatcgtctgatactactgcttaagtggtgattactgt

SEQ ID NO: 389007 - DNA, 60 bp, Artificial
  Synthetic oligonucleotide
cttgaccctgatatattagcacacttgaatgcaatggatcccaccattctggacaattgg

SEQ ID NO: 389008 - DNA, 51 bp, Artificial
  Synthetic oligonucleotide
cttgaccggcccccccacctttacacccactgtggaaaaagcccagccgac

SEQ ID NO: 389009 - DNA, 55 bp, Artificial
  Synthetic oligonucleotide
cttgacctcaatcaaagcttgtgacaaggcaatctgttatggtgcagagagtgtg

SEQ ID NO: 389010 - DNA, 60 bp, Artificial
  Synthetic oligonucleotide
cttgacgaggagagcagagcaagaatcaagaccagactattcaccatcaggcaggaaatg

SEQ ID NO: 389011 - DNA, 59 bp, Artificial
  Synthetic oligonucleotide
cttgacgatatagtgagagaggtcaaaggaatccccggagtgacaagaatggctcggga

SEQ ID NO: 389012 - DNA, 58 bp, Artificial
  Synthetic oligonucleotide
cttgacgatccagtgaggtacaaacacacctgggggtttgaatcggatacagcgtatc

SEQ ID NO: 389013 - DNA, 60 bp, Artificial
  Synthetic oligonucleotide
cttgacgatgagcagagtaatgacgtgaatgtctggcccgatgcatgggatggagttaca

SEQ ID NO: 389014 - DNA, 55 bp, Artificial
  Synthetic oligonucleotide
cttgacgctcaggatcagcgatactcacttgaacttcatcccatcgagcatgatc

SEQ ID NO: 389015 - DNA, 52 bp, Artificial
  Synthetic oligonucleotide
cttgacggaaaagttaccacatccggtacccttggtgatttcctcacgaaac

SEQ ID NO: 389016 - DNA, 57 bp, Artificial
  Synthetic oligonucleotide
cttgacggggaccaaattattgatctaacctctctacctagtgataatttgcaggtc

SEQ ID NO: 389017 - DNA, 60 bp, Artificial
  Synthetic oligonucleotide
cttgacgtccgcgacatcatgcggcacgagggccagaaggacagcattgaactatacctt

SEQ ID NO: 389018 - DNA, 60 bp, Artificial
  Synthetic oligonucleotide
cttgacgtcggagctggatttagctccctgtatgtttggtcggaaatgtgctgaccagct

SEQ ID NO: 389019 - DNA, 60 bp, Artificial
  Synthetic oligonucleotide
cttgacgtgttgcgcaattatctttgtgctttagcatctgtgcttcatgaattgcggcac

SEQ ID NO: 389020 - DNA, 55 bp, Artificial
  Synthetic oligonucleotide
cttgactagatcgtccgtagtaatttgtgcatcgtctattctgcatccgcttcgt

SEQ ID NO: 389021 - DNA, 55 bp, Artificial
  Synthetic oligonucleotide
cttgactccaacatgcaggctgctgagcacgtcaaggctgctgccaaggtgttca

SEQ ID NO: 389022 - DNA, 60 bp, Artificial
  Synthetic oligonucleotide
cttgactgcagatgttctggcacatttacacgttatgaatcccagaatattagaggagtg

SEQ ID NO: 389023 - DNA, 56 bp, Artificial
  Synthetic oligonucleotide
cttgactggatttgacttctaatgggccaatttaatgggttggaagtgattgggcc

SEQ ID NO: 389024 - DNA, 54 bp, Artificial
  Synthetic oligonucleotide
cttgactgggacggtctgcgtatagtgggctcaactgcggcggtcagaaaccta

SEQ ID NO: 389025 - DNA, 55 bp, Artificial
  Synthetic oligonucleotide
cttgactggtctgagttcgataaacgagctctacacgaagtgatagatgacgtcc

SEQ ID NO: 389026 - DNA, 60 bp, Artificial
  Synthetic oligonucleotide
cttgactgtgcccgcgtcagcctatcaagtacgcaactcctcgggcctttaccatgtcac

SEQ ID NO: 389027 - DNA, 59 bp, Artificial
  Synthetic oligonucleotide
cttgacttagaagcccagaatctagttcaaaagcagggtattgtacctgaggatgtgat

SEQ ID NO: 389028 - DNA, 60 bp, Artificial
  Synthetic oligonucleotide
cttgacttccaccacgcctacgcactcggagacaaagtctatgacatcttcactgaagag

SEQ ID NO: 389029 - DNA, 55 bp, Artificial
  Synthetic oligonucleotide
cttgacttctgggagggcgtcttcacaggcctcactcacatcgacgcccacttcc

SEQ ID NO: 389030 - DNA, 55 bp, Artificial
  Synthetic oligonucleotide
cttgagaaaagacgtgcacagatatcggcattgctggcgatgttacagaaaccgg

SEQ ID NO: 389031 - DNA, 55 bp, Artificial
  Synthetic oligonucleotide
cttgagaagacccataacggaaagctatgcaaactaaacggaatccctccacttg

SEQ ID NO: 389032 - DNA, 53 bp, Artificial
  Synthetic oligonucleotide
cttgagaagggatacacatctgacgctcggcctagcattcagggtgggaccct

SEQ ID NO: 389033 - DNA, 55 bp, Artificial
  Synthetic oligonucleotide
cttgagaagtgtaatgaaatcagagttatgacggttaacatcatagtcatgggac

SEQ ID NO: 389034 - DNA, 60 bp, Artificial
  Synthetic oligonucleotide
cttgagaatgttagccacgagtcaatcagagaaagatgccgggtggatctcaacttctac

SEQ ID NO: 389035 - DNA, 53 bp, Artificial
  Synthetic oligonucleotide
cttgagaatttgtatgctgaaatagtgtacacacccatattggcacctgatgg

SEQ ID NO: 389036 - DNA, 56 bp, Artificial
  Synthetic oligonucleotide
cttgagacgatggaagttgtccaacaaacaagagtggacaaattgacccaaggccg

SEQ ID NO: 389037 - DNA, 55 bp, Artificial
  Synthetic oligonucleotide
cttgagagatataacttgggacctatagtgaacttagtcctgaggagattgaggg

SEQ ID NO: 389038 - DNA, 60 bp, Artificial
  Synthetic oligonucleotide
cttgagagtgaaataggttcagcggcgatcgatggattagtacagggaagcgtacattca

SEQ ID NO: 389039 - DNA, 60 bp, Artificial
  Synthetic oligonucleotide
cttgagatgaccttctcaggatatagtttatcggattcatcctgcccagacgagtccaac

SEQ ID NO: 389040 - DNA, 53 bp, Artificial
  Synthetic oligonucleotide
cttgagatgatacccattacttacggtaacaagttcccttactgtaagccact

SEQ ID NO: 389041 - DNA, 55 bp, Artificial
  Synthetic oligonucleotide
cttgagattccctagcaagttgtttccaacataccagagtttggatcggtgggac

SEQ ID NO: 389042 - DNA, 55 bp, Artificial
  Synthetic oligonucleotide
cttgagcagccggttgtgtttcaacgcgacctttggtgtttaccacgatgactac

SEQ ID NO: 389043 - DNA, 60 bp, Artificial
  Synthetic oligonucleotide
cttgagcatccaagtctctcgccagttgtgcgaagacacaatggatgcagccgcgcacgg

SEQ ID NO: 389044 - DNA, 55 bp, Artificial
  Synthetic oligonucleotide
cttgagcatgataggtggcgtggagagaaagatggctccaataggtgcgcgagag

SEQ ID NO: 389045 - DNA, 60 bp, Artificial
  Synthetic oligonucleotide
cttgagcatgattggcggtgtggagagaaagatggctccaattggcgcgcgggagagcgc

SEQ ID NO: 389046 - DNA, 55 bp, Artificial
  Synthetic oligonucleotide
cttgagcattgcccctataatgttctcaaataagatggcaagattgggaaaaggg

SEQ ID NO: 389047 - DNA, 57 bp, Artificial
  Synthetic oligonucleotide
cttgagccaagttccgagcgaggagacgcggggggaggatcagctcccgagagggga

SEQ ID NO: 389048 - DNA, 60 bp, Artificial
  Synthetic oligonucleotide
cttgagccacacaaatgggagagatactgtgttcttgagataggagatatgcttctaagg

SEQ ID NO: 389049 - DNA, 60 bp, Artificial
  Synthetic oligonucleotide
cttgagccacacaattgggagaagtactgtgttctagaaatcggagacatgctcctaaga

SEQ ID NO: 389050 - DNA, 55 bp, Artificial
  Synthetic oligonucleotide
cttgagccgatttgcatccgtgaatgtttgtgcaccagagaggttcagcaagtac

SEQ ID NO: 389051 - DNA, 60 bp, Artificial
  Synthetic oligonucleotide
cttgagccgcagaagccatggacgtttaagaaggcctgtgagagtctagataagaacacc

SEQ ID NO: 389052 - DNA, 50 bp, Artificial
  Synthetic oligonucleotide
cttgagcctataaaatggcctctaatagtaatgttgaagaatatctactt

SEQ ID NO: 389053 - DNA, 55 bp, Artificial
  Synthetic oligonucleotide
cttgagcggcggctgcggaccttagtgctggctccgaccaaggtggtgctgacag

SEQ ID NO: 389054 - DNA, 55 bp, Artificial
  Synthetic oligonucleotide
cttgagcggttaagtttccaccaataattgaaagatgactacgccagccaacacc

SEQ ID NO: 389055 - DNA, 55 bp, Artificial
  Synthetic oligonucleotide
cttgagcgtggttctctgccgcgtaccgagttcactggtgaaaccgaatatgcgg

SEQ ID NO: 389056 - DNA, 55 bp, Artificial
  Synthetic oligonucleotide
cttgagcgtttcataggtctttctaaagcatctgacgctaagacttctgttggtg

SEQ ID NO: 389057 - DNA, 55 bp, Artificial
  Synthetic oligonucleotide
cttgagcgttttaccgatcaaaggcagagacattatcatcataaagatgccaaag

SEQ ID NO: 389058 - DNA, 57 bp, Artificial
  Synthetic oligonucleotide
cttgagctctgtcctattgagtcttaataaatggtttaaagtttgggacagcctgga

SEQ ID NO: 389059 - DNA, 55 bp, Artificial
  Synthetic oligonucleotide
cttgagctggggcactattagcctctctcttgatgccgaggggatcacagggaca

SEQ ID NO: 389060 - DNA, 55 bp, Artificial
  Synthetic oligonucleotide
cttgagcttgaccagtttcccttgggtaggaagtttttgctacaacatcgtacac

SEQ ID NO: 389061 - DNA, 58 bp, Artificial
  Synthetic oligonucleotide
cttgaggacagtcacaatgggaaactatgtagattgaaaggaatagccccactacaat

SEQ ID NO: 389062 - DNA, 55 bp, Artificial
  Synthetic oligonucleotide
cttgaggagaactcaatcaatggggatacagcttgaccaaagaatcatcctccta

SEQ ID NO: 389063 - DNA, 53 bp, Artificial
  Synthetic oligonucleotide
cttgaggatattgagctgcagcccctggtatcatcctctgctgtgcctacgga

SEQ ID NO: 389064 - DNA, 60 bp, Artificial
  Synthetic oligonucleotide
cttgaggatgaacaaatgtaccagaagtgctgcaatctattcgagaaattcttccctagc

SEQ ID NO: 389065 - DNA, 52 bp, Artificial
  Synthetic oligonucleotide
cttgaggcactagttaactgtggaccgtttgtaccccgagaccaaacttccc

SEQ ID NO: 389066 - DNA, 55 bp, Artificial
  Synthetic oligonucleotide
cttgaggcagtgaggttccagagcgaatcggagatggctcgtggtcttagactaa

SEQ ID NO: 389067 - DNA, 55 bp, Artificial
  Synthetic oligonucleotide
cttgaggcataccacaactacgaagaagcatgggacgtcttctcccttgtggaag

SEQ ID NO: 389068 - DNA, 55 bp, Artificial
  Synthetic oligonucleotide
cttgaggccgcatctctatctttaattgtctcagcaatcgacgcattaacagggt

SEQ ID NO: 389069 - DNA, 53 bp, Artificial
  Synthetic oligonucleotide
cttgaggccttggacttgacaactagtgctggttatccttatgtagctatagg

SEQ ID NO: 389070 - DNA, 60 bp, Artificial
  Synthetic oligonucleotide
cttgaggcgatgtagggccagccatcacctgaaagacacaatttgtacaagaggttttca

SEQ ID NO: 389071 - DNA, 54 bp, Artificial
  Synthetic oligonucleotide
cttgagggaagcaaccctaactctactgagtacaggttaataaattgtaatacc

SEQ ID NO: 389072 - DNA, 58 bp, Artificial
  Synthetic oligonucleotide
cttgagggctctctgagtcgtcacacatccctccagagtgtcaacttggacccccccc

SEQ ID NO: 389073 - DNA, 60 bp, Artificial
  Synthetic oligonucleotide
cttgagggtgtctgggaccgtcaacgtcagtcaatccggtggtgatgacaatatgggaga

SEQ ID NO: 389074 - DNA, 60 bp, Artificial
  Synthetic oligonucleotide
cttgagtagcgtccagtgacgtcaggtgtgctttatgcaactttgcaggcgccgactcct

SEQ ID NO: 389075 - DNA, 55 bp, Artificial
  Synthetic oligonucleotide
cttgagtcaattggagtgtgcgtgggtgctttacacagggcaacaacaacgagga

SEQ ID NO: 389076 - DNA, 50 bp, Artificial
  Synthetic oligonucleotide
cttgagtccgggtgaaaggggcatgcaagcgaaaattaaggagctagagg

SEQ ID NO: 389077 - DNA, 50 bp, Artificial
  Synthetic oligonucleotide
cttgagtctggccccgtggactcgcatgacgtccccgggagtgagttcgg

SEQ ID NO: 389078 - DNA, 55 bp, Artificial
  Synthetic oligonucleotide
cttgagtcttgcacgatacgcttttgacttctatgaagtcacatcgcgcacccct

SEQ ID NO: 389079 - DNA, 55 bp, Artificial
  Synthetic oligonucleotide
cttgagtgccgaactcttgaaagcgcaggttacatccgaggtgctacgtgtgcgt

SEQ ID NO: 389080 - DNA, 57 bp, Artificial
  Synthetic oligonucleotide
cttgagtggcctagggtaatgagctggagagctaaaacctcaacgattggtcatcgt

SEQ ID NO: 389081 - DNA, 55 bp, Artificial
  Synthetic oligonucleotide
cttgagtggttgtaattgaagtaggagcgacaagtgttcctctgatagggatagc

SEQ ID NO: 389082 - DNA, 58 bp, Artificial
  Synthetic oligonucleotide
cttgagttccgataagattacatttcaattccggccgccattggacttgtccataaga

SEQ ID NO: 389083 - DNA, 58 bp, Artificial
  Synthetic oligonucleotide
cttgagttctgcttcaattagcatccacctggttaaacaataaccacctggtgtttca

SEQ ID NO: 389084 - DNA, 55 bp, Artificial
  Synthetic oligonucleotide
cttgagttgtaacaggttgtttagtagtagctggcttttgagttgtagtagctgg

SEQ ID NO: 389085 - DNA, 60 bp, Artificial
  Synthetic oligonucleotide
cttgagtttcgtccattacaagatattggtgcgcgagtgaaagatccatttactcgacaa

SEQ ID NO: 389086 - DNA, 59 bp, Artificial
  Synthetic oligonucleotide
cttgataacccagcctatcctgtgccccaatcaacaggagttactcacccactgtacac

SEQ ID NO: 389087 - DNA, 60 bp, Artificial
  Synthetic oligonucleotide
cttgataaccggccaaccgtagcgagggatcattatgttggtccagatgcacctctcgaa

SEQ ID NO: 389088 - DNA, 55 bp, Artificial
  Synthetic oligonucleotide
cttgataatctctcattgtccaccaggtactttgatactaaatctttgacgcagg

SEQ ID NO: 389089 - DNA, 55 bp, Artificial
  Synthetic oligonucleotide
cttgataatcttgttctctccaccaatgagtctgcaatcagcagctacaaccctg

SEQ ID NO: 389090 - DNA, 55 bp, Artificial
  Synthetic oligonucleotide
cttgatacagtattagaatctagctgcgtagtagtacctatttgatctgccggga

SEQ ID NO: 389091 - DNA, 60 bp, Artificial
  Synthetic oligonucleotide
cttgatacgacaccatgacataccacgattacgctcttaaggacaatgctgtcctcgaga

SEQ ID NO: 389092 - DNA, 60 bp, Artificial
  Synthetic oligonucleotide
cttgatagaaccagtttcccgatccaggcagaacagtggcgttatcctcaggcaggagga

SEQ ID NO: 389093 - DNA, 60 bp, Artificial
  Synthetic oligonucleotide
cttgatagaggggggctgtgagggtgatgaagaccgcattcttgagagtccagtttttga

SEQ ID NO: 389094 - DNA, 55 bp, Artificial
  Synthetic oligonucleotide
cttgatagtaggacctttactactggctgaaccggacagcttagcagagatctgg

SEQ ID NO: 389095 - DNA, 55 bp, Artificial
  Synthetic oligonucleotide
cttgatagtcacgcagttctcggatctgttatacgacagcctcccttgatacgcc

SEQ ID NO: 389096 - DNA, 60 bp, Artificial
  Synthetic oligonucleotide
cttgatagttgatcgatgtgtcatacaagatgcgatctactatcaacgcaacctttcaat

SEQ ID NO: 389097 - DNA, 60 bp, Artificial
  Synthetic oligonucleotide
cttgatataacagctgatccaactacagcgccacagactgagaggatgatgcgtattaat

SEQ ID NO: 389098 - DNA, 54 bp, Artificial
  Synthetic oligonucleotide
cttgatataacatctgatccgacgaccaatccacaaactgaacggatgatgcga

SEQ ID NO: 389099 - DNA, 60 bp, Artificial
  Synthetic oligonucleotide
cttgatataacattacgcgcttatgatgatagaaaatcgacgaaaagcgctcgagggata

SEQ ID NO: 389100 - DNA, 60 bp, Artificial
  Synthetic oligonucleotide
cttgatattaactacaaagtccacttttgttccatcagtccaactttctgcatcatgttc

SEQ ID NO: 389101 - DNA, 58 bp, Artificial
  Synthetic oligonucleotide
cttgatcaaaggattatccttctatacatgttagaatggggtaaagaaatggtggatc

SEQ ID NO: 389102 - DNA, 55 bp, Artificial
  Synthetic oligonucleotide
cttgatcaaatagaacatcactcaaggaaattagtgagggtcataggaatggaac

SEQ ID NO: 389103 - DNA, 60 bp, Artificial
  Synthetic oligonucleotide
cttgatcaattatcagtgccacacattcctcagtgcatttgtctgcacactactaattgt

SEQ ID NO: 389104 - DNA, 56 bp, Artificial
  Synthetic oligonucleotide
cttgatcactacggatttgaaaggaccactgaaaagatcgtaccaggacaacccat

SEQ ID NO: 389105 - DNA, 60 bp, Artificial
  Synthetic oligonucleotide
cttgatccacaatatcaccacggtcgtgagcatttaacttactgtcatccatccattgat

SEQ ID NO: 389106 - DNA, 60 bp, Artificial
  Synthetic oligonucleotide
cttgatccatgatggtaaccgtgctgttgtgacttacgagggcgatactagtgcaggcta

SEQ ID NO: 389107 - DNA, 55 bp, Artificial
  Synthetic oligonucleotide
cttgatccggtagtcttcaaaattcagtgtctgtgggttcggtgtattcgttagg

SEQ ID NO: 389108 - DNA, 55 bp, Artificial
  Synthetic oligonucleotide
cttgatcctgatatccctcacgtcactgaagttcgccgaaaacgaatttcagatc

SEQ ID NO: 389109 - DNA, 59 bp, Artificial
  Synthetic oligonucleotide
cttgatcgccgtaatctattaacgctctacgatgttttaatacagattgatgtaatcta

SEQ ID NO: 389110 - DNA, 55 bp, Artificial
  Synthetic oligonucleotide
cttgatcgtgttagtggctacttagttactgacaagtattccccagtcaccagtg

SEQ ID NO: 389111 - DNA, 55 bp, Artificial
  Synthetic oligonucleotide
cttgatgaagcgaagcgaaggtttaaagtacgagcccaaaggtttagaacacaca

SEQ ID NO: 389112 - DNA, 55 bp, Artificial
  Synthetic oligonucleotide
cttgatgacgcaagtacggcttttcacaagtctctagcgatgttgaaaggtgaaa

SEQ ID NO: 389113 - DNA, 60 bp, Artificial
  Synthetic oligonucleotide
cttgatgacttggaccttaacattagagcagaagccggatagctctctccttaggtgttg

SEQ ID NO: 389114 - DNA, 55 bp, Artificial
  Synthetic oligonucleotide
cttgatgatcatattttcctctccgatgagcccaactcaattatgaataggtacc

SEQ ID NO: 389115 - DNA, 55 bp, Artificial
  Synthetic oligonucleotide
cttgatgctatccttactggggaggcttttgctgctgtaagtactgaggcagcct

SEQ ID NO: 389116 - DNA, 55 bp, Artificial
  Synthetic oligonucleotide
cttgatgctgagcacggaggccctgtgcgctggtcaaaaggacacggtagtccgt

SEQ ID NO: 389117 - DNA, 60 bp, Artificial
  Synthetic oligonucleotide
cttgatggagcccacacgtgcgcagcagattgcaggagtagtctcaagcataggtggagt

SEQ ID NO: 389118 - DNA, 60 bp, Artificial
  Synthetic oligonucleotide
cttgatggatcggcatataattgttccgagagctgcacatgaaatcttagaccatagcat

SEQ ID NO: 389119 - DNA, 60 bp, Artificial
  Synthetic oligonucleotide
cttgatgggaaaaattgcacactgatagatgctctattgggagaccctcattgcgatgac

SEQ ID NO: 389120 - DNA, 60 bp, Artificial
  Synthetic oligonucleotide
cttgatggggaaaactgcacactgatagatgctctcttgggagaccctcattgtgatagt

SEQ ID NO: 389121 - DNA, 60 bp, Artificial
  Synthetic oligonucleotide
cttgatggtgatagactggctgataggaaaattgctgagctgttctccacaaaaacacac

SEQ ID NO: 389122 - DNA, 58 bp, Artificial
  Synthetic oligonucleotide
cttgatggttatggcgaatcgtttatccgtgaaaatccaaacgccacgttgatggaca

SEQ ID NO: 389123 - DNA, 60 bp, Artificial
  Synthetic oligonucleotide
cttgatgtgatctactatttccgagattcccgtgtttgtgaaaaagtcgcagaattgtgc

SEQ ID NO: 389124 - DNA, 60 bp, Artificial
  Synthetic oligonucleotide
cttgatgttgggcctcacagaggctgaaaaagtaaagatatgccttcaaaagcaagtgaa

SEQ ID NO: 389125 - DNA, 60 bp, Artificial
  Synthetic oligonucleotide
cttgattaccttacgcgaagtcaattgcaggtgctccacaatcttggaagcccacgcaac

SEQ ID NO: 389126 - DNA, 55 bp, Artificial
  Synthetic oligonucleotide
cttgattagactgtaatagtcaggagggaagaggggagaagcaagcttgcggttc

SEQ ID NO: 389127 - DNA, 56 bp, Artificial
  Synthetic oligonucleotide
cttgattctcaactcttcctcaaacacggtaaaggtgaccagaccgagccttggcc

SEQ ID NO: 389128 - DNA, 60 bp, Artificial
  Synthetic oligonucleotide
cttgattctgtcaatgtatttcatccttatcacggaatccaatctactccaagtgaactc

SEQ ID NO: 389129 - DNA, 55 bp, Artificial
  Synthetic oligonucleotide
cttgattgaaatacctgtactcagtaccccgatcgaaccgattacaatcaaaccc

SEQ ID NO: 389130 - DNA, 58 bp, Artificial
  Synthetic oligonucleotide
cttgattgcaacgtcgccaaactctacaatttggttataactcaggctattgcgccta

SEQ ID NO: 389131 - DNA, 59 bp, Artificial
  Synthetic oligonucleotide
cttgattggccaaataaaagcttatttggcgaccccacaacacgagatgtgatggacga

SEQ ID NO: 389132 - DNA, 60 bp, Artificial
  Synthetic oligonucleotide
cttgattgttgtacatactgtgttcctctcaatacatcgtataatacataatcaactgcc

SEQ ID NO: 389133 - DNA, 53 bp, Artificial
  Synthetic oligonucleotide
cttgatttactttggcagacattcaagctactcttgcgtgtctataacggttg

SEQ ID NO: 389134 - DNA, 55 bp, Artificial
  Synthetic oligonucleotide
cttgatttctctttaacatccagttccaagtatacataccgtaggaagttaacaa

SEQ ID NO: 389135 - DNA, 60 bp, Artificial
  Synthetic oligonucleotide
cttgatttgtggctcgaatcggagcactatgaaccacaggtacttcgcaatggttgcgtg

SEQ ID NO: 389136 - DNA, 56 bp, Artificial
  Synthetic oligonucleotide
cttgcaaaaggggatctggtaacagtttcttcagtagactgaactggttgtacgaa

SEQ ID NO: 389137 - DNA, 60 bp, Artificial
  Synthetic oligonucleotide
cttgcaaataacatatcatgctcatgattagaatttccagcaaatccatttccgtttgag

SEQ ID NO: 389138 - DNA, 52 bp, Artificial
  Synthetic oligonucleotide
cttgcaacctaccgaaccgtccccgaggtatacaagctgggaacatgtcgaa

SEQ ID NO: 389139 - DNA, 59 bp, Artificial
  Synthetic oligonucleotide
cttgcaacgacttctccgtgaggctacttaaagacacacccttcatatcgcagcaaaac

SEQ ID NO: 389140 - DNA, 60 bp, Artificial
  Synthetic oligonucleotide
cttgcaactttggatctcgtgtgtgcttgaaaatcaaatcaagcggaaatggagagttct

SEQ ID NO: 389141 - DNA, 52 bp, Artificial
  Synthetic oligonucleotide
cttgcaagcatgattgggcctaaacctacccttgaggacattgtcctagatt

SEQ ID NO: 389142 - DNA, 55 bp, Artificial
  Synthetic oligonucleotide
cttgcaagccatgtgttttaccccacgcctagtggctccatggtaacatcagaag

SEQ ID NO: 389143 - DNA, 58 bp, Artificial
  Synthetic oligonucleotide
cttgcaagcccttgctacgagacgaggtgtcatttagagtaggactacacgattaccc

SEQ ID NO: 389144 - DNA, 60 bp, Artificial
  Synthetic oligonucleotide
cttgcaagcctttgctacgagatgaggtgtcgttcagagtgggactacatgagtacccgg

SEQ ID NO: 389145 - DNA, 58 bp, Artificial
  Synthetic oligonucleotide
cttgcaagcctttgttgcgggaggaggtgtcattcagagtaggactccacgagtaccc

SEQ ID NO: 389146 - DNA, 55 bp, Artificial
  Synthetic oligonucleotide
cttgcaagtacactgaatgcacaaatgagtgtcattgacgaacatgcagcagtcc

SEQ ID NO: 389147 - DNA, 59 bp, Artificial
  Synthetic oligonucleotide
cttgcaagtttgggttatgaatgctgaacagccgcaccccttccacactattcgcgtcc

SEQ ID NO: 389148 - DNA, 55 bp, Artificial
  Synthetic oligonucleotide
cttgcaatattggacgttgtggcctttacataatgattacactcaagcagatact

SEQ ID NO: 389149 - DNA, 57 bp, Artificial
  Synthetic oligonucleotide
cttgcaatggttagggtacacgctacaccctgataagtggagtctacaaaaggttca

SEQ ID NO: 389150 - DNA, 51 bp, Artificial
  Synthetic oligonucleotide
cttgcaattccccaagccgaatcccgtgaccgataccgttccggttcccgg

SEQ ID NO: 389151 - DNA, 52 bp, Artificial
  Synthetic oligonucleotide
cttgcacaccatgtggcatgtaacaagaggagccgccctcagtgtggagggg

SEQ ID NO: 389152 - DNA, 57 bp, Artificial
  Synthetic oligonucleotide
cttgcacaccccggcacgacgccttgcgttgtcgagatcgactgtccagccgatcaa

SEQ ID NO: 389153 - DNA, 59 bp, Artificial
  Synthetic oligonucleotide
cttgcacagaattgaccttggtcctcccatatcattggagaggttggacgtagggacaa

SEQ ID NO: 389154 - DNA, 55 bp, Artificial
  Synthetic oligonucleotide
cttgcacagactttggtggacacaaaggttaaagagatatcaaaccaagaaccac

SEQ ID NO: 389155 - DNA, 53 bp, Artificial
  Synthetic oligonucleotide
cttgcacaggccgtagtcgcaaagatacacgcgatcccgcgccccaaagtata

SEQ ID NO: 389156 - DNA, 57 bp, Artificial
  Synthetic oligonucleotide
cttgcacccccaaccgtctgccattgtggcggacatctgtccgtactctccccgacc

SEQ ID NO: 389157 - DNA, 55 bp, Artificial
  Synthetic oligonucleotide
cttgcaccgatactaaacctgttggagcatattggtgtacacttggtcctgtggc

SEQ ID NO: 389158 - DNA, 58 bp, Artificial
  Synthetic oligonucleotide
cttgcaccggtgcttcctacgcccggttggaagagacgtccagcgctggtattctgcc

SEQ ID NO: 389159 - DNA, 55 bp, Artificial
  Synthetic oligonucleotide
cttgcacgtgtgattggtcacgtaggccaaaacgtgaggctagtcacgtaggcca

SEQ ID NO: 389160 - DNA, 60 bp, Artificial
  Synthetic oligonucleotide
cttgcactcaatagtgttggcaattacattgaacaaaacatgatcagcagctctaattac

SEQ ID NO: 389161 - DNA, 60 bp, Artificial
  Synthetic oligonucleotide
cttgcagaaggagtgagcaatgactgtgtttcaaggacccagctaatcaaaacagaagtt

SEQ ID NO: 389162 - DNA, 60 bp, Artificial
  Synthetic oligonucleotide
cttgcagagtatgtgaagacggcgattaaaccgttatatgagatcttcgatggcttcact

SEQ ID NO: 389163 - DNA, 60 bp, Artificial
  Synthetic oligonucleotide
cttgcagatgatcccagcgctgcctgagggagccgttaatcatccgatctgtcacaccgg

SEQ ID NO: 389164 - DNA, 60 bp, Artificial
  Synthetic oligonucleotide
cttgcagcaccatgctcattctgtctaatttttgcaactgatgacgtcttcattgagttt

SEQ ID NO: 389165 - DNA, 55 bp, Artificial
  Synthetic oligonucleotide
cttgcagcagagtaatcttcccactaagagatgaatctcatttggaagtacaagg

SEQ ID NO: 389166 - DNA, 58 bp, Artificial
  Synthetic oligonucleotide
cttgcagctttacatacccacatatcagcccactagcacaaaaccaagtgttaacttt

SEQ ID NO: 389167 - DNA, 55 bp, Artificial
  Synthetic oligonucleotide
cttgcaggaagataatcagaagatcaatagttgcatcaaacccactagagctagc

SEQ ID NO: 389168 - DNA, 54 bp, Artificial
  Synthetic oligonucleotide
cttgcaggaatacactcaaccgagtgtaatgctgcaagcgaaaaactccagatt

SEQ ID NO: 389169 - DNA, 59 bp, Artificial
  Synthetic oligonucleotide
cttgcaggggaagtctgaaagtggcagaacgccaccatgaacgctttgtactactgaat

SEQ ID NO: 389170 - DNA, 55 bp, Artificial
  Synthetic oligonucleotide
cttgcaggtttggaagtagtacctcttcgatgcaagtttaagttagtcgatggtg

SEQ ID NO: 389171 - DNA, 52 bp, Artificial
  Synthetic oligonucleotide
cttgcagtccatttgcaatgcctataaatccagatatgcaaagaatcacaca

SEQ ID NO: 389172 - DNA, 60 bp, Artificial
  Synthetic oligonucleotide
cttgcagtgggtcatatctgccttaagggcggtcaggcatatggctcataggccaggtaa

SEQ ID NO: 389173 - DNA, 60 bp, Artificial
  Synthetic oligonucleotide
cttgcagttggaacagcatgcaccgtggctggaactgcgcttgtggtgatgtactatagg

SEQ ID NO: 389174 - DNA, 60 bp, Artificial
  Synthetic oligonucleotide
cttgcagtttgtatctagtagtattcggaagatgattgataatttactcggctatcgcga

SEQ ID NO: 389175 - DNA, 51 bp, Artificial
  Synthetic oligonucleotide
cttgcataggaaatacaagcatggaggggtgtaataacactatcatacttc

SEQ ID NO: 389176 - DNA, 59 bp, Artificial
  Synthetic oligonucleotide
cttgcatatcaactggaacatttatgaatgacgatagtcgaaaaggagggacccatggt

SEQ ID NO: 389177 - DNA, 55 bp, Artificial
  Synthetic oligonucleotide
cttgcatatgtcaggacaagagtatccatcgagcttccaataattgcattgcgcc

SEQ ID NO: 389178 - DNA, 60 bp, Artificial
  Synthetic oligonucleotide
cttgcatattctagaagacctgctgatgggcacactggagatagtgtgtcctaactgtgc

SEQ ID NO: 389179 - DNA, 60 bp, Artificial
  Synthetic oligonucleotide
cttgcatcaggatattataaacagatgtgaacaatttgtgggccctctcactataaatga

SEQ ID NO: 389180 - DNA, 60 bp, Artificial
  Synthetic oligonucleotide
cttgcatcctgcagaagtgtaccccgtccacgacattcgtgtcgtctaccctgtacataa

SEQ ID NO: 389181 - DNA, 57 bp, Artificial
  Synthetic oligonucleotide
cttgcatctcatctggaacgaacgtgaaggaagagagttgaaacggaggaacccatg

SEQ ID NO: 389182 - DNA, 55 bp, Artificial
  Synthetic oligonucleotide
cttgcatcttacagcgatataagcgactgggacagtgaggagagtccggataccg

SEQ ID NO: 389183 - DNA, 55 bp, Artificial
  Synthetic oligonucleotide
cttgcatcttgactcttaatacggaacctcactgtttggctaagtttcgtggacc

SEQ ID NO: 389184 - DNA, 55 bp, Artificial
  Synthetic oligonucleotide
cttgcatgactcgtggataaaagttgatgagaggctcaataaaatgttgaaagga

SEQ ID NO: 389185 - DNA, 60 bp, Artificial
  Synthetic oligonucleotide
cttgcatgcgcttaactggcgaaccagggacctatgatgacaatactgactacaaccttg

SEQ ID NO: 389186 - DNA, 58 bp, Artificial
  Synthetic oligonucleotide
cttgcattattggtgggtgcacctaacgatgcgggaagccgaactccctctataaata

SEQ ID NO: 389187 - DNA, 60 bp, Artificial
  Synthetic oligonucleotide
cttgcattggtctatcaaagctagagacaacctcactttttgaggatgatcttagagacg

SEQ ID NO: 389188 - DNA, 55 bp, Artificial
  Synthetic oligonucleotide
cttgcatttatagggccacctgatactggcaaatctttattcactaatagcctga

SEQ ID NO: 389189 - DNA, 53 bp, Artificial
  Synthetic oligonucleotide
cttgccaatcacgtctcacccatagaggcgcgggcagcacaacttgcgtcggc

SEQ ID NO: 389190 - DNA, 55 bp, Artificial
  Synthetic oligonucleotide
cttgccacctgtagtgcttgtcccgatatgtctgttaggatgctgcgggatagcc

SEQ ID NO: 389191 - DNA, 60 bp, Artificial
  Synthetic oligonucleotide
cttgccagctgcatgggtctcatttacaacaggatggggacagtgaccacagaagtggct

SEQ ID NO: 389192 - DNA, 56 bp, Artificial
  Synthetic oligonucleotide
cttgccagttagaaattggacatttgactttggaacactcggaacgaccttactga

SEQ ID NO: 389193 - DNA, 60 bp, Artificial
  Synthetic oligonucleotide
cttgccagttttgctcatcggagctgccctctacgcatacttgtggttcacaagaccgga

SEQ ID NO: 389194 - DNA, 60 bp, Artificial
  Synthetic oligonucleotide
cttgccatcaacagctagatacataagacctaatctactacaagataggttgaatttaca

SEQ ID NO: 389195 - DNA, 56 bp, Artificial
  Synthetic oligonucleotide
cttgccatgagttatacaccgcactcgagcggaagttgggagaaaaaccaacctgg

SEQ ID NO: 389196 - DNA, 55 bp, Artificial
  Synthetic oligonucleotide
cttgccattacgtcgtcattgaaagatcgttactacattcgtcatgtgttcaaga

SEQ ID NO: 389197 - DNA, 55 bp, Artificial
  Synthetic oligonucleotide
cttgcccatttctgccgcaaatttcaaccattatatgcgacagaagctaaaaggg

SEQ ID NO: 389198 - DNA, 53 bp, Artificial
  Synthetic oligonucleotide
cttgccccatatcaattagactagagatgtgtgaaggcacaatcccaagatca

SEQ ID NO: 389199 - DNA, 60 bp, Artificial
  Synthetic oligonucleotide
cttgcccccattgtccgcgtcacaaaacaacaggcatggacaaacaggcctatgcacagg

SEQ ID NO: 389200 - DNA, 58 bp, Artificial
  Synthetic oligonucleotide
cttgcccctgaactcgagatgtgcgccgttcgtgtgtacttggccgccgcttccaccc

SEQ ID NO: 389201 - DNA, 55 bp, Artificial
  Synthetic oligonucleotide
cttgcccgaattcgtaaatgatgatggcgtctaaggacgctacaccaagcgcaga

SEQ ID NO: 389202 - DNA, 52 bp, Artificial
  Synthetic oligonucleotide
cttgcccgtgtctaaagcgggtttttggaccgacatgcagtccttttacgac

SEQ ID NO: 389203 - DNA, 55 bp, Artificial
  Synthetic oligonucleotide
cttgccctagctgcggtcacccctggtctgataatcttggcagtgggactctaca

SEQ ID NO: 389204 - DNA, 56 bp, Artificial
  Synthetic oligonucleotide
cttgccctccaaggaacagctgtcttctaaaccggtggacacgtccggctacaaga

SEQ ID NO: 389205 - DNA, 58 bp, Artificial
  Synthetic oligonucleotide
cttgccgacagattgcagcagggaagaacatccgggcaggaccgggatcctacagggg

SEQ ID NO: 389206 - DNA, 60 bp, Artificial
  Synthetic oligonucleotide
cttgccgttcaaacctgctcaagatcagtgagtacggtgctgagttggagtatatgcgct

SEQ ID NO: 389207 - DNA, 60 bp, Artificial
  Synthetic oligonucleotide
cttgcctactataacaatccgaagggagataggtttgtgctggcattactatcaggccac

SEQ ID NO: 389208 - DNA, 55 bp, Artificial
  Synthetic oligonucleotide
cttgcctatcaaccctccaaagaatgaggacccagacctccgatgggccccaagc

SEQ ID NO: 389209 - DNA, 59 bp, Artificial
  Synthetic oligonucleotide
cttgcctcagcatacaattgtttttatgatggttactcacatgataacaaggacacacc

SEQ ID NO: 389210 - DNA, 56 bp, Artificial
  Synthetic oligonucleotide
cttgcctccacaaggcgtggccccattcaaggaactggaggtgcaaccccacgtgg

SEQ ID NO: 389211 - DNA, 60 bp, Artificial
  Synthetic oligonucleotide
cttgcctcgtatgtatgtgaggttatacctcgtatttactatttcagtgtatgtacttca

SEQ ID NO: 389212 - DNA, 55 bp, Artificial
  Synthetic oligonucleotide
cttgcctctattacatgacaaagtgatggatatagtcacaacgcatactaaagga

SEQ ID NO: 389213 - DNA, 60 bp, Artificial
  Synthetic oligonucleotide
cttgcctctcatctgggacgatatcagaaccctggttgtgtggatctaccggacattagt

SEQ ID NO: 389214 - DNA, 55 bp, Artificial
  Synthetic oligonucleotide
cttgcctgaatatggaacccttgggctagaatgctcaccacggacaggtttggac

SEQ ID NO: 389215 - DNA, 59 bp, Artificial
  Synthetic oligonucleotide
cttgcctgatattcaggcaggtgcaaaccttatgtggaatttcgaggctaagcttttta

SEQ ID NO: 389216 - DNA, 53 bp, Artificial
  Synthetic oligonucleotide
cttgccttaggtagtgccatggtttggttctacacttatactacgggtgattg

SEQ ID NO: 389217 - DNA, 60 bp, Artificial
  Synthetic oligonucleotide
cttgcgaaagatagcaggaattcatgttgcaggtgacgcccatggacgagcttattcaga

SEQ ID NO: 389218 - DNA, 55 bp, Artificial
  Synthetic oligonucleotide
cttgcgaacatgttatttaccttcttgaagtatgatttgaaaggtaacgaggcca

SEQ ID NO: 389219 - DNA, 60 bp, Artificial
  Synthetic oligonucleotide
cttgcgacatcagaaggatttcctcacattttgtctcgagcacacggtgagaaaggcaag

SEQ ID NO: 389220 - DNA, 55 bp, Artificial
  Synthetic oligonucleotide
cttgcgactaatgacatagctgcctcaacgatgggagctcttgcgaacactgccc

SEQ ID NO: 389221 - DNA, 60 bp, Artificial
  Synthetic oligonucleotide
cttgcgactcaaactgtgaagtaatgatacctaaaggcactggagatatcctagtggact

SEQ ID NO: 389222 - DNA, 60 bp, Artificial
  Synthetic oligonucleotide
cttgcgagaaattgctagcgttgctaccgcaaccatatggtggtaagctgtatgaaatga

SEQ ID NO: 389223 - DNA, 60 bp, Artificial
  Synthetic oligonucleotide
cttgcgaggacgcttcttgattgttatcaaagagaggacttgtgagtttggcgaagactg

SEQ ID NO: 389224 - DNA, 54 bp, Artificial
  Synthetic oligonucleotide
cttgcgcactaacaacagcgctacgattgtcatgccatatataaacagcgtgcc

SEQ ID NO: 389225 - DNA, 59 bp, Artificial
  Synthetic oligonucleotide
cttgcgcatttatactgttttaagaaagatatcaacataggcatagttgcttacagtgg

SEQ ID NO: 389226 - DNA, 55 bp, Artificial
  Synthetic oligonucleotide
cttgcgcggaaagtatcggtctccactagtttgttgtcccaactcactttgattg

SEQ ID NO: 389227 - DNA, 60 bp, Artificial
  Synthetic oligonucleotide
cttgcgctcactactaaatgactgacgggatgtacgatgagaacttcgatactaaagcgc

SEQ ID NO: 389228 - DNA, 55 bp, Artificial
  Synthetic oligonucleotide
cttgcgctcccactggccatagtccacatgggagaagtccacatcgttatgggag

SEQ ID NO: 389229 - DNA, 55 bp, Artificial
  Synthetic oligonucleotide
cttgcggagagtcgtaacgatagccttccagaagcgacccgtatctcgattacgg

SEQ ID NO: 389230 - DNA, 60 bp, Artificial
  Synthetic oligonucleotide
cttgcggatgcaaatgaaactttattggcgaatgttaccgcagtacgtcaagagtatgct

SEQ ID NO: 389231 - DNA, 60 bp, Artificial
  Synthetic oligonucleotide
cttgcggatgcaaatgacactctattggcgaatgtgaccgcagtgcgtcaagagtacgcc

SEQ ID NO: 389232 - DNA, 58 bp, Artificial
  Synthetic oligonucleotide
cttgcggatggaacaacctatggggttgaccttttatgtagcaagtttgcgcatcatt

SEQ ID NO: 389233 - DNA, 55 bp, Artificial
  Synthetic oligonucleotide
cttgcggcacgtcagcacgtaagtgttaactttgagtgagtgacttgagcatcct

SEQ ID NO: 389234 - DNA, 52 bp, Artificial
  Synthetic oligonucleotide
cttgcggcgattactcaacaagatctgccttgggagtttaggcattagttac

SEQ ID NO: 389235 - DNA, 55 bp, Artificial
  Synthetic oligonucleotide
cttgcgggcccatttaaaggtggagccttgaaaggagggccactaaaggcagcac

SEQ ID NO: 389236 - DNA, 58 bp, Artificial
  Synthetic oligonucleotide
cttgcggggttatggtttcgagacgtgcaattacgtcactgacgaaactgacatattc

SEQ ID NO: 389237 - DNA, 60 bp, Artificial
  Synthetic oligonucleotide
cttgcggtgaggttgtggattaatgagaaacaatccatagccatgatagcatcgctacta

SEQ ID NO: 389238 - DNA, 53 bp, Artificial
  Synthetic oligonucleotide
cttgcggtgtggacacgaaagtgtaccgcggggaacaccgctgggttaaggag

SEQ ID NO: 389239 - DNA, 54 bp, Artificial
  Synthetic oligonucleotide
cttgcgtctcatgcgtggtaactagttcgatatagtccagtgcctcgcggtcac

SEQ ID NO: 389240 - DNA, 55 bp, Artificial
  Synthetic oligonucleotide
cttgcgtgagcctttggccgcttttcctttgcgattgtactttgtttttccgctc

SEQ ID NO: 389241 - DNA, 54 bp, Artificial
  Synthetic oligonucleotide
cttgcgtgcgtggtaattatttccgttgtcccaggggtggggggagttcatctg

SEQ ID NO: 389242 - DNA, 60 bp, Artificial
  Synthetic oligonucleotide
cttgcgtgctctggacgccactttagtggtgggccagatgtcccgagttagtgcgccacg

SEQ ID NO: 389243 - DNA, 57 bp, Artificial
  Synthetic oligonucleotide
cttgcgtggtccgctacattttcaaagacgagctatactaggtgcgctaaagtttgg

SEQ ID NO: 389244 - DNA, 54 bp, Artificial
  Synthetic oligonucleotide
cttgcgttgcgatcgacaaatcaccggctggacattcgattggccccggcgtct

SEQ ID NO: 389245 - DNA, 55 bp, Artificial
  Synthetic oligonucleotide
cttgcgttttcagaagttaataagctacacccgattgtatagaaatcacaacgtg

SEQ ID NO: 389246 - DNA, 55 bp, Artificial
  Synthetic oligonucleotide
cttgcgttttgccccgagaactgcttttaggagttcctcagaattgctgggctta

SEQ ID NO: 389247 - DNA, 60 bp, Artificial
  Synthetic oligonucleotide
cttgctaatacaattgaagtgttcagatcaaatgatctgacctccaatgagtcagggaga

SEQ ID NO: 389248 - DNA, 59 bp, Artificial
  Synthetic oligonucleotide
cttgctacaaatggctttcagttagcgacacgtttggatagatatccgacaaataagac

SEQ ID NO: 389249 - DNA, 53 bp, Artificial
  Synthetic oligonucleotide
cttgctacacaagtacctcaaatcgggaggtgttaggcaacggaacactgaag

SEQ ID NO: 389250 - DNA, 55 bp, Artificial
  Synthetic oligonucleotide
cttgctacatggctgtaacttcactcatggggcagaaacagagaacacactttcc

SEQ ID NO: 389251 - DNA, 60 bp, Artificial
  Synthetic oligonucleotide
cttgctacgaagatcttctctcatcggacatctggatgagactcactaggccactcagga

SEQ ID NO: 389252 - DNA, 55 bp, Artificial
  Synthetic oligonucleotide
cttgctacgggaatgaggagcatccttgagaaggcaaccagaggactatttggtg

SEQ ID NO: 389253 - DNA, 55 bp, Artificial
  Synthetic oligonucleotide
cttgctacgtataatcactttctagcagccgctgatacggttaagagtcggtgcc

SEQ ID NO: 389254 - DNA, 60 bp, Artificial
  Synthetic oligonucleotide
cttgctagaccccatgagcctgcatggaatggaggatgcacacggagaagtattaatatg

SEQ ID NO: 389255 - DNA, 55 bp, Artificial
  Synthetic oligonucleotide
cttgctagtcacactagccatccttactgcgcttcgattgtgtgcgtactgctgc

SEQ ID NO: 389256 - DNA, 60 bp, Artificial
  Synthetic oligonucleotide
cttgctatgacctatttgacacacacatagacgttgtcgcccatattcgtgctatggttc

SEQ ID NO: 389257 - DNA, 60 bp, Artificial
  Synthetic oligonucleotide
cttgctatgagtgatagtcgtatttcgctactaaatgcacaggtcgcaaaaataagacag

SEQ ID NO: 389258 - DNA, 60 bp, Artificial
  Synthetic oligonucleotide
cttgctatgatagctggcttagttggtttggctctagccgttgttatgctattatgtatg

SEQ ID NO: 389259 - DNA, 55 bp, Artificial
  Synthetic oligonucleotide
cttgctatgtggtttggtgtacaaccttttcgtatttcaaatcttcgcgaaatgt

SEQ ID NO: 389260 - DNA, 60 bp, Artificial
  Synthetic oligonucleotide
cttgctatttatagtacggtatcgagcagtctagttttggtaggactgatcatggcaata

SEQ ID NO: 389261 - DNA, 55 bp, Artificial
  Synthetic oligonucleotide
cttgctcaaggtttcgcgcacgaagggcacctatcaccgcgacagctacgtcgac

SEQ ID NO: 389262 - DNA, 59 bp, Artificial
  Synthetic oligonucleotide
cttgctcaccaagtatgggctttatccatcatgtgggatccacttttgaacgagtttcc

SEQ ID NO: 389263 - DNA, 58 bp, Artificial
  Synthetic oligonucleotide
cttgctcacgtcagccaatcagttcttccgtttgggccagaacagtcgaaccaaggtc

SEQ ID NO: 389264 - DNA, 60 bp, Artificial
  Synthetic oligonucleotide
cttgctcagagttcgcgcctctggcccccttttcgattgcgcattattcaccacaattga

SEQ ID NO: 389265 - DNA, 55 bp, Artificial
  Synthetic oligonucleotide
cttgctcagcatgccggacgtgtttggagctattttcggccgatgtagccgtcag

SEQ ID NO: 389266 - DNA, 59 bp, Artificial
  Synthetic oligonucleotide
cttgctccaagttccaaatggtgcggaaccttttccgcgccatgataatgatgacttag

SEQ ID NO: 389267 - DNA, 60 bp, Artificial
  Synthetic oligonucleotide
cttgctcctgccgattgtagcctgccttcgtattgtggtcaggtccattggtcaaccttc

SEQ ID NO: 389268 - DNA, 60 bp, Artificial
  Synthetic oligonucleotide
cttgctcgactaagtctacattccatgccgtccctgtgcatatatgggacaggcttatgc

SEQ ID NO: 389269 - DNA, 55 bp, Artificial
  Synthetic oligonucleotide
cttgctcggagttgattaccgcacggttcgtagtaaaatcaacggtgttacagat

SEQ ID NO: 389270 - DNA, 52 bp, Artificial
  Synthetic oligonucleotide
cttgctcggctgggctcatgtttctcttcatcagctttatgtagatcgcact

SEQ ID NO: 389271 - DNA, 55 bp, Artificial
  Synthetic oligonucleotide
cttgctctaacctggcctataagtggctggacaacattcagtctcagctcgagat

SEQ ID NO: 389272 - DNA, 55 bp, Artificial
  Synthetic oligonucleotide
cttgctctcttcggaagttctttaacgagaacgtgcagtggctgtcatagacagc

SEQ ID NO: 389273 - DNA, 60 bp, Artificial
  Synthetic oligonucleotide
cttgctctgctactgagcatgcgcccagtatctttcccctcccacttgctgcctgtgtat

SEQ ID NO: 389274 - DNA, 55 bp, Artificial
  Synthetic oligonucleotide
cttgctctgctatctatatttgctgagaaccctgcagctatgctaagatctctcc

SEQ ID NO: 389275 - DNA, 55 bp, Artificial
  Synthetic oligonucleotide
cttgctcttaattctgcacgcatggcccaatctggtccccgtccagaacccgttg

SEQ ID NO: 389276 - DNA, 60 bp, Artificial
  Synthetic oligonucleotide
cttgctgaattgcaagttggaggacttagttaaggcgcagcaatttgcttctgatgagca

SEQ ID NO: 389277 - DNA, 59 bp, Artificial
  Synthetic oligonucleotide
cttgctgagcgatcaccctacgtccatggttggattagggagcactttagctgcccccc

SEQ ID NO: 389278 - DNA, 55 bp, Artificial
  Synthetic oligonucleotide
cttgctgagtttagacaactgtctacttagctcctagttatattgatctaggtac

SEQ ID NO: 389279 - DNA, 60 bp, Artificial
  Synthetic oligonucleotide
cttgctgataatcgctaccgatgctagtaatggccattggggagcagttatgacagcagt

SEQ ID NO: 389280 - DNA, 55 bp, Artificial
  Synthetic oligonucleotide
cttgctgcaactctcagtttggggcattaaacagctccaagcaagagtccttgct

SEQ ID NO: 389281 - DNA, 59 bp, Artificial
  Synthetic oligonucleotide
cttgctgcaatcaaaaagaggctccgatttgctagcgttgcagaaaactacaacaaatt

SEQ ID NO: 389282 - DNA, 57 bp, Artificial
  Synthetic oligonucleotide
cttgctgcacgggaacaccctcctgtgacagccctcttcagggggattaggggtcta

SEQ ID NO: 389283 - DNA, 60 bp, Artificial
  Synthetic oligonucleotide
cttgctgctgctcaaagtagatgtgtcaaagcaatggaccttggtgcatcaccacaagtt

SEQ ID NO: 389284 - DNA, 55 bp, Artificial
  Synthetic oligonucleotide
cttgctgcttttttagaaaggaaacattccatggaagtgattcagaaggaaggtt

SEQ ID NO: 389285 - DNA, 50 bp, Artificial
  Synthetic oligonucleotide
cttgctggaaaggctaggcctaggcaagtagtgagtgaaagtccttgact

SEQ ID NO: 389286 - DNA, 57 bp, Artificial
  Synthetic oligonucleotide
cttgctggacaagaagccgtatttacctgagggtgtgaacacgttaccatcgtttgc

SEQ ID NO: 389287 - DNA, 59 bp, Artificial
  Synthetic oligonucleotide
cttgctggctggagcttttacatttggcgttttccctgactggatagctaagcagactt

SEQ ID NO: 389288 - DNA, 60 bp, Artificial
  Synthetic oligonucleotide
cttgctgtggtaagcctcacgcctaaacccggctgcaccattgtgatcacagggcactcc

SEQ ID NO: 389289 - DNA, 60 bp, Artificial
  Synthetic oligonucleotide
cttgctgttcggaaattgcacaagctacaccaaggagaagcaatgagacttggtgaaaag

SEQ ID NO: 389290 - DNA, 57 bp, Artificial
  Synthetic oligonucleotide
cttgcttcgttgaaatttagctagaagcaatgagaccttagaaaactgacttttgaa

SEQ ID NO: 389291 - DNA, 53 bp, Artificial
  Synthetic oligonucleotide
cttgcttctttctatttgagaaaggactacatggtaatctcacagaagaggct

SEQ ID NO: 389292 - DNA, 57 bp, Artificial
  Synthetic oligonucleotide
cttgcttgacatggactacgtgatgagttgggacctcatgagccgggaagtcttaga

SEQ ID NO: 389293 - DNA, 60 bp, Artificial
  Synthetic oligonucleotide
cttgctttctgattcataagaagtgaccttatatttgtgcatgcgttttggagggatgtg

SEQ ID NO: 389294 - DNA, 60 bp, Artificial
  Synthetic oligonucleotide
cttgctttgctactaacacaactaatgttccatggctcgtgcacgtagaacaaagcgtgc

SEQ ID NO: 389295 - DNA, 59 bp, Artificial
  Synthetic oligonucleotide
cttgctttgcttacgctgatcagcccaaataaagtgtggtaaacgcaagtaacgtctgc

SEQ ID NO: 389296 - DNA, 57 bp, Artificial
  Synthetic oligonucleotide
cttgctttgtgtaagcaagccgttgggaacacaaaattgtgaggagttcgaatctcc

SEQ ID NO: 389297 - DNA, 60 bp, Artificial
  Synthetic oligonucleotide
cttgcttttacgtagaattgatcagaggcaggccaaaggagagtagtgtattgtggacat

SEQ ID NO: 389298 - DNA, 51 bp, Artificial
  Synthetic oligonucleotide
cttggaaaagtcccccgtcaacagattccccgcccttttccatgtaagctt

SEQ ID NO: 389299 - DNA, 56 bp, Artificial
  Synthetic oligonucleotide
cttggaaagtcaaattttcacaagacactcgaagcgttagaatggaaggtcattaa

SEQ ID NO: 389300 - DNA, 54 bp, Artificial
  Synthetic oligonucleotide
cttggaaatagagcaccaaggagggctgcatctacaactggagggactcgtaga

SEQ ID NO: 389301 - DNA, 58 bp, Artificial
  Synthetic oligonucleotide
cttggaaatattgaatcctagaactgtaattatagtggaccatctaggccaacggaga

SEQ ID NO: 389302 - DNA, 60 bp, Artificial
  Synthetic oligonucleotide
cttggaaatccaatgtgtgatgaattcctgaatgtaccggaatggtcatacattgtagaa

SEQ ID NO: 389303 - DNA, 54 bp, Artificial
  Synthetic oligonucleotide
cttggaaatggagcgagtttacggtaatggtatagtcgtggacgttcccacttc

SEQ ID NO: 389304 - DNA, 57 bp, Artificial
  Synthetic oligonucleotide
cttggaacaagagtaactacaataaggcctacactgcctataagcagtttaggtcca

SEQ ID NO: 389305 - DNA, 58 bp, Artificial
  Synthetic oligonucleotide
cttggaacatttgacactgctcaaataataaaactcctccctttcgccgctgctcctc

SEQ ID NO: 389306 - DNA, 55 bp, Artificial
  Synthetic oligonucleotide
cttggaacccgctgttttgcgccggagtgatgggcgtttgttagatggtgttgtg

SEQ ID NO: 389307 - DNA, 60 bp, Artificial
  Synthetic oligonucleotide
cttggaaccctcgtgccttccgcgtgctctctctcttcaaatcacagaaatgccttcgat

SEQ ID NO: 389308 - DNA, 55 bp, Artificial
  Synthetic oligonucleotide
cttggaagacgctgaagtggagcttccaagcaatttcaaatccatgggctatgtg

SEQ ID NO: 389309 - DNA, 53 bp, Artificial
  Synthetic oligonucleotide
cttggaagacgtggttaaatgaaaaccttataacacagaagtggggtgagtcg

SEQ ID NO: 389310 - DNA, 55 bp, Artificial
  Synthetic oligonucleotide
cttggaagaggtcagttactgagcaatgttttcgtatgggtagggaccctctacg

SEQ ID NO: 389311 - DNA, 58 bp, Artificial
  Synthetic oligonucleotide
cttggaagagttgagggtgtctttgtgtgacgttgcttgttcgctcggaaactgtgct

SEQ ID NO: 389312 - DNA, 60 bp, Artificial
  Synthetic oligonucleotide
cttggaagcactcattgtcgtgatggttgtctgacccttgagtgggtcttgaatgtggtc

SEQ ID NO: 389313 - DNA, 55 bp, Artificial
  Synthetic oligonucleotide
cttggaaggtacagatgacggctggattcgctacctgtatgttggcgtgccagtc

SEQ ID NO: 389314 - DNA, 54 bp, Artificial
  Synthetic oligonucleotide
cttggaataagaactggttttggcaacccgagaggattgcatggggttctttaa

SEQ ID NO: 389315 - DNA, 55 bp, Artificial
  Synthetic oligonucleotide
cttggaatcagtataatgcaggtaattggactaacattaaaccgtaagtaaatta

SEQ ID NO: 389316 - DNA, 59 bp, Artificial
  Synthetic oligonucleotide
cttggaatggcccagtttctccgagtcattgatcgataccgcgttcaattggccactaa

SEQ ID NO: 389317 - DNA, 55 bp, Artificial
  Synthetic oligonucleotide
cttggaattattacaggaccacctcaatgtgatcaatttctcgagttcacagccg

SEQ ID NO: 389318 - DNA, 55 bp, Artificial
  Synthetic oligonucleotide
cttggaattcttgcgtcgcactaagtttcacttgagtgtcacatgtgtgtcgggg

SEQ ID NO: 389319 - DNA, 55 bp, Artificial
  Synthetic oligonucleotide
cttggaattggatttctcactaccatcatctgcaagttacacatacagaagacag

SEQ ID NO: 389320 - DNA, 55 bp, Artificial
  Synthetic oligonucleotide
cttggacaaagcctggaacacaagagagctaacctactcctgcctcccaccgtgg

SEQ ID NO: 389321 - DNA, 60 bp, Artificial
  Synthetic oligonucleotide
cttggacaaatgacactaacagcacgcaggggtcaaatgacacaacgcccattattctcc

SEQ ID NO: 389322 - DNA, 55 bp, Artificial
  Synthetic oligonucleotide
cttggacaattcctttacatctgatgcggacagcgaggttgggacatctgcaacc

SEQ ID NO: 389323 - DNA, 53 bp, Artificial
  Synthetic oligonucleotide
cttggacagaggtcacagtgtgtctcctgataacggacccaacaggagtgaac

SEQ ID NO: 389324 - DNA, 56 bp, Artificial
  Synthetic oligonucleotide
cttggacagtcccatttaacaccacaggattttagttcagtgcgctttgtaatggg

SEQ ID NO: 389325 - DNA, 60 bp, Artificial
  Synthetic oligonucleotide
cttggacatcagaagtggagaatatcatggcgcagccatgtcatcggagaataatttggg

SEQ ID NO: 389326 - DNA, 60 bp, Artificial
  Synthetic oligonucleotide
cttggacatccattccaaccttggctgctcagtttccatttaatgcttcagattcggttg

SEQ ID NO: 389327 - DNA, 60 bp, Artificial
  Synthetic oligonucleotide
cttggaccagcaacagctcagatggctcttcagctattcatcaaggactataggtacaca

SEQ ID NO: 389328 - DNA, 57 bp, Artificial
  Synthetic oligonucleotide
cttggaccaggatcaccagtgggttgctgcgttggttttagtggcatgtgccgtgaa

SEQ ID NO: 389329 - DNA, 60 bp, Artificial
  Synthetic oligonucleotide
cttggaccagtatgccaacgaatactacatcaacatgggcctcaactctttactgctcaa

SEQ ID NO: 389330 - DNA, 57 bp, Artificial
  Synthetic oligonucleotide
cttggacccctgcatgggtcctgctctttgcaacagaagggttgtcgggtccaccca

SEQ ID NO: 389331 - DNA, 54 bp, Artificial
  Synthetic oligonucleotide
cttggaccgaaggaagaaggcgggaacgggttctaccggatcactgagcggaca

SEQ ID NO: 389332 - DNA, 60 bp, Artificial
  Synthetic oligonucleotide
cttggaccgctgtcctgactaattcgttcaactggcccattgacattgtgatgttgggct

SEQ ID NO: 389333 - DNA, 55 bp, Artificial
  Synthetic oligonucleotide
cttggaccggggtgactcaaaatggagggagtggtgcttgtaagagaggacctgc

SEQ ID NO: 389334 - DNA, 59 bp, Artificial
  Synthetic oligonucleotide
cttggaccgttgtccgaactagctcgttcaactggcccattgacattgtgatgttggac

SEQ ID NO: 389335 - DNA, 56 bp, Artificial
  Synthetic oligonucleotide
cttggaccgttgtcctgactaactcgtttaattggcccaatgacattgttatattg

SEQ ID NO: 389336 - DNA, 60 bp, Artificial
  Synthetic oligonucleotide
cttggacgaagcatggaacgaattaagttggtcggagcgctgtgctataagatactactc

SEQ ID NO: 389337 - DNA, 60 bp, Artificial
  Synthetic oligonucleotide
cttggacgctctctgccgaacgtctgtgacgacgaggttgctcagcagtctggcgccgtg

SEQ ID NO: 389338 - DNA, 55 bp, Artificial
  Synthetic oligonucleotide
cttggacggcttattcgactcggagagtaccactgggactcccttggcgactccc

SEQ ID NO: 389339 - DNA, 55 bp, Artificial
  Synthetic oligonucleotide
cttggactgtaacgaggaatgtgtgtcataggtttgtcgttaaaaagtcttggtc

SEQ ID NO: 389340 - DNA, 59 bp, Artificial
  Synthetic oligonucleotide
cttggactgtgatgacgtcgtggttcgtcgagaacggtctctcgtggtgctgggttatc

SEQ ID NO: 389341 - DNA, 58 bp, Artificial
  Synthetic oligonucleotide
cttggactgttgtcctaaccagctcgtttaattgggccatactcatagttatgttgga

SEQ ID NO: 389342 - DNA, 59 bp, Artificial
  Synthetic oligonucleotide
cttggacttgacaataattataactggggctactgatgttgatggaatggcttggttta

SEQ ID NO: 389343 - DNA, 55 bp, Artificial
  Synthetic oligonucleotide
cttggagaaactatattgtgacttgggatcaggacattccgtgtaaacccctacc

SEQ ID NO: 389344 - DNA, 60 bp, Artificial
  Synthetic oligonucleotide
cttggagaagaagcactatctctccaaagacaaacagaaagtttggccatattatgcaat

SEQ ID NO: 389345 - DNA, 55 bp, Artificial
  Synthetic oligonucleotide
cttggagactctccacttgggagtcatccttgctcaagaccgcctccattcttgt

SEQ ID NO: 389346 - DNA, 55 bp, Artificial
  Synthetic oligonucleotide
cttggagatcatactgcacaacttgcagaagttgcagctgtggaatttgcatgca

SEQ ID NO: 389347 - DNA, 60 bp, Artificial
  Synthetic oligonucleotide
cttggagatggtctctggaagacttcccttgattgcagacacattcattagaacaattat

SEQ ID NO: 389348 - DNA, 60 bp, Artificial
  Synthetic oligonucleotide
cttggagattgctcctttgcagggtggatattgggaaatcccatgtgtgatgacctaatt

SEQ ID NO: 389349 - DNA, 60 bp, Artificial
  Synthetic oligonucleotide
cttggagcgcaagtaggtactcagaaatttatgcatactatgatatcccgtgtgcaagac

SEQ ID NO: 389350 - DNA, 58 bp, Artificial
  Synthetic oligonucleotide
cttggagcgccaggggcctcgtgctctccgtgggatgctcttcccgattccgaccaac

SEQ ID NO: 389351 - DNA, 56 bp, Artificial
  Synthetic oligonucleotide
cttggagcgtgggctagggtgagcgaagcaccacaacgacaacgaaggggcgggaa

SEQ ID NO: 389352 - DNA, 55 bp, Artificial
  Synthetic oligonucleotide
cttggaggagtgttcttgttatgtggacattgacgtatactgtgtatgtagagac

SEQ ID NO: 389353 - DNA, 59 bp, Artificial
  Synthetic oligonucleotide
cttggaggataattcattaatacaaccattattgggaagagataacatgattaagttca

SEQ ID NO: 389354 - DNA, 58 bp, Artificial
  Synthetic oligonucleotide
cttggaggcatgttgactatttttgagacccgattgaccgctcttacaactctcccca

SEQ ID NO: 389355 - DNA, 54 bp, Artificial
  Synthetic oligonucleotide
cttggaggccaaggggttcccacttgacgagttcctagccgagtggtcagagct

SEQ ID NO: 389356 - DNA, 60 bp, Artificial
  Synthetic oligonucleotide
cttggagtcaggcgattttgatccatataaagagatggagtatctgacgacccttgagta

SEQ ID NO: 389357 - DNA, 51 bp, Artificial
  Synthetic oligonucleotide
cttggagtctaaaacgacgtggtttggatggcatttttgtaaataagggag

SEQ ID NO: 389358 - DNA, 58 bp, Artificial
  Synthetic oligonucleotide
cttggatactgttgcgagtatgaaatcttcaagtacgtggtgcggtgttaggtttcca

SEQ ID NO: 389359 - DNA, 60 bp, Artificial
  Synthetic oligonucleotide
cttggatatgtgggacaccataagttttgagagcactggtaatctagttgcaccagagta

SEQ ID NO: 389360 - DNA, 59 bp, Artificial
  Synthetic oligonucleotide
cttggatcacacaagggctaatgggggccctactactctggatgggcgtcaacgcacga

SEQ ID NO: 389361 - DNA, 60 bp, Artificial
  Synthetic oligonucleotide
cttggatgaattacagttgagaagattatctgtgggcttacgattgatcgctaacccacg

SEQ ID NO: 389362 - DNA, 55 bp, Artificial
  Synthetic oligonucleotide
cttggatgacggtgatctcgaacaataaatgattgaaatgtagccatgtctctca

SEQ ID NO: 389363 - DNA, 55 bp, Artificial
  Synthetic oligonucleotide
cttggatggggggaactcctggttggggagaaccataagcaaagattcaaggtca

SEQ ID NO: 389364 - DNA, 60 bp, Artificial
  Synthetic oligonucleotide
cttggatgtcccaatatcccattattaggcagaatggccatctacatttgcagaatgtcc

SEQ ID NO: 389365 - DNA, 59 bp, Artificial
  Synthetic oligonucleotide
cttggatgtcctgggatggttgtgacttagactactactgcaacatgggggactggcct

SEQ ID NO: 389366 - DNA, 58 bp, Artificial
  Synthetic oligonucleotide
cttggattatatggatcgtattcccttggccacttctgaagggtttcctcacatcctg

SEQ ID NO: 389367 - DNA, 55 bp, Artificial
  Synthetic oligonucleotide
cttggattcgtccaggttctatataacgatgacccaagctgataaggcctcactg

SEQ ID NO: 389368 - DNA, 60 bp, Artificial
  Synthetic oligonucleotide
cttggattgatataattggtgtttttaacgaccaccatgtcatccgatgcgttgccgcga

SEQ ID NO: 389369 - DNA, 55 bp, Artificial
  Synthetic oligonucleotide
cttggattgtgtatggttcgtaagatatatgattatagtattgcgagctggagtg

SEQ ID NO: 389370 - DNA, 51 bp, Artificial
  Synthetic oligonucleotide
cttggatttgacgtgttgtgggatagtatggtcgggaaacaatgtgtcaac

SEQ ID NO: 389371 - DNA, 51 bp, Artificial
  Synthetic oligonucleotide
cttggattttcgcagtgcgatctgccatctgaccggttttgtcttttaaaa

SEQ ID NO: 389372 - DNA, 55 bp, Artificial
  Synthetic oligonucleotide
cttggcacaaatttacaaccaaattcttgaagaggacaaaagacgtagacaggtg

SEQ ID NO: 389373 - DNA, 55 bp, Artificial
  Synthetic oligonucleotide
cttggcaccacaattcagcaagcataggggaaaacgccatagtgaggggtgcgag

SEQ ID NO: 389374 - DNA, 56 bp, Artificial
  Synthetic oligonucleotide
cttggcacgtagtatgcaccgcggcataagatcaactccgtctggtgcatggcgtc

SEQ ID NO: 389375 - DNA, 55 bp, Artificial
  Synthetic oligonucleotide
cttggcacgttattgaaggtgaaattcgccgcataggttcttatggctcgttaaa

SEQ ID NO: 389376 - DNA, 55 bp, Artificial
  Synthetic oligonucleotide
cttggcagagttggtcgttgtaaacctgggtttgcgcttaggattggacacacgg

SEQ ID NO: 389377 - DNA, 55 bp, Artificial
  Synthetic oligonucleotide
cttggcagggattaaacacttgggcagctcggttaaggttaggcacttggcaggg

SEQ ID NO: 389378 - DNA, 55 bp, Artificial
  Synthetic oligonucleotide
cttggcatcctcttgtaacggtattgacctgtatagtccgcttgccgagtgacga

SEQ ID NO: 389379 - DNA, 60 bp, Artificial
  Synthetic oligonucleotide
cttggcatccttgggttaccatcaaacccatctgtcaaccgagtctatgacgtgcagtcc

SEQ ID NO: 389380 - DNA, 58 bp, Artificial
  Synthetic oligonucleotide
cttggcatggactgaggaccgctatactaaacagaacaacgcttccaaatatgttacc

SEQ ID NO: 389381 - DNA, 59 bp, Artificial
  Synthetic oligonucleotide
cttggccaacctgtgttgcgccttgattggtggtggagaacaggggttctgtgagcgtg

SEQ ID NO: 389382 - DNA, 58 bp, Artificial
  Synthetic oligonucleotide
cttggccaacctgtgttgtgctttgatcgatggtggagaacaacggttcagtgagtgt

SEQ ID NO: 389383 - DNA, 56 bp, Artificial
  Synthetic oligonucleotide
cttggccaacgctttagaagagaagcgtataaggataatgagtggtacgtttctgt

SEQ ID NO: 389384 - DNA, 60 bp, Artificial
  Synthetic oligonucleotide
cttggccaatagcttgtgcctcttatgctggaaaaatagataatcattacccacctgata

SEQ ID NO: 389385 - DNA, 54 bp, Artificial
  Synthetic oligonucleotide
cttggccaattagttgatttaaccgggctactagcttataactacgaaacacta

SEQ ID NO: 389386 - DNA, 60 bp, Artificial
  Synthetic oligonucleotide
cttggccatacggccgctgttagtcagattggggtcgtaatccatgaagtcatgtggagt

SEQ ID NO: 389387 - DNA, 59 bp, Artificial
  Synthetic oligonucleotide
cttggccattcagtcgacctacccagtattcgacgaagaaaagatgcttgtcccagcaa

SEQ ID NO: 389388 - DNA, 60 bp, Artificial
  Synthetic oligonucleotide
cttggccccaggctgagggcgattatgaattgatgttacgcgtgacggcgacgcgaactg

SEQ ID NO: 389389 - DNA, 51 bp, Artificial
  Synthetic oligonucleotide
cttggccccgtcttcagaccctcggttggcggaaattcaatcccaggtaac

SEQ ID NO: 389390 - DNA, 55 bp, Artificial
  Synthetic oligonucleotide
cttggccgagactacccaggccgacttatgtatcccctatgttgcagatacaaac

SEQ ID NO: 389391 - DNA, 51 bp, Artificial
  Synthetic oligonucleotide
cttggcctaggaccaaagaagccaatgccaaactcatcgagtacatacgag

SEQ ID NO: 389392 - DNA, 60 bp, Artificial
  Synthetic oligonucleotide
cttggcctatgccgaaactggaggaccagccttgagcctgtctgtgattctcgcttccca

SEQ ID NO: 389393 - DNA, 58 bp, Artificial
  Synthetic oligonucleotide
cttggcgaaatatgtgttaaagatgacatatctattgttaagagtactactgttttta

SEQ ID NO: 389394 - DNA, 50 bp, Artificial
  Synthetic oligonucleotide
cttggcgaatattctttctagatttgagcggatgttatgattatgcagga

SEQ ID NO: 389395 - DNA, 56 bp, Artificial
  Synthetic oligonucleotide
cttggcgaatctaccctccccccatacaaaaagatagctcgtataattacactgta

SEQ ID NO: 389396 - DNA, 60 bp, Artificial
  Synthetic oligonucleotide
cttggcgacatggacgcaattgcgatccttgtgactacgcccaccggtgccgtcaacacg

SEQ ID NO: 389397 - DNA, 55 bp, Artificial
  Synthetic oligonucleotide
cttggcgaggcattggcacatattggggagtgtgcaggaagcgatggggcgtacc

SEQ ID NO: 389398 - DNA, 55 bp, Artificial
  Synthetic oligonucleotide
cttggcgcgcaagcccagatggaggtgagaacgcccaacttccactcgttcgttg

SEQ ID NO: 389399 - DNA, 60 bp, Artificial
  Synthetic oligonucleotide
cttggcgctaatgtttcctgggcagattatacttgatctaaagattgatcccggtgagag

SEQ ID NO: 389400 - DNA, 58 bp, Artificial
  Synthetic oligonucleotide
cttggcgctctcggtgcgtgacctgcccgggggtgcagcgttcgacgcaaacgcggtc

SEQ ID NO: 389401 - DNA, 58 bp, Artificial
  Synthetic oligonucleotide
cttggcgctgcaattcctactttaggtaagtcactcgcagcagaggccggctatggct

SEQ ID NO: 389402 - DNA, 60 bp, Artificial
  Synthetic oligonucleotide
cttggcggatgatcaggctacggcagaggatcaaccgactcagccagatgtagcgacttg

SEQ ID NO: 389403 - DNA, 55 bp, Artificial
  Synthetic oligonucleotide
cttggcggcacatttatttggtgccctactgcaatgaaccttgtcgcgcagtctc

SEQ ID NO: 389404 - DNA, 55 bp, Artificial
  Synthetic oligonucleotide
cttggcggtgcttgggtctagttatctcctaagagacgctctaacacgtgtgccg

SEQ ID NO: 389405 - DNA, 55 bp, Artificial
  Synthetic oligonucleotide
cttggcgtataggaaatctactcatgccgaggacagttctctatttcctctatct

SEQ ID NO: 389406 - DNA, 60 bp, Artificial
  Synthetic oligonucleotide
cttggcgtcacaaccgctgagctgttgaagcattttgcacttctggatgcttacactggt

SEQ ID NO: 389407 - DNA, 59 bp, Artificial
  Synthetic oligonucleotide
cttggcgtggatgggtgcgcaccgccctgtacaaccgagcagccgaccataggggccgc

SEQ ID NO: 389408 - DNA, 60 bp, Artificial
  Synthetic oligonucleotide
cttggcgttcttcagattcactgcaattgctccgactcgtgcggtgctggacaggtggag

SEQ ID NO: 389409 - DNA, 60 bp, Artificial
  Synthetic oligonucleotide
cttggctaacctcaagttacgcatcgctaacgctatcggacttgacacggctggtatgct

SEQ ID NO: 389410 - DNA, 59 bp, Artificial
  Synthetic oligonucleotide
cttggctaggcaaaagatctccacaggtaattatattaccacacttggagaagtcacac

SEQ ID NO: 389411 - DNA, 55 bp, Artificial
  Synthetic oligonucleotide
cttggctagtgaatagggactggtatcatgacctacaccttccttacaccgtggg

SEQ ID NO: 389412 - DNA, 55 bp, Artificial
  Synthetic oligonucleotide
cttggctatgcaatcggggaatgggtccttatttatagttgaggacctaaatggc

SEQ ID NO: 389413 - DNA, 60 bp, Artificial
  Synthetic oligonucleotide
cttggctattctgtgctggactttgatgggtacctgagtacagtggctctgagaggaaga

SEQ ID NO: 389414 - DNA, 60 bp, Artificial
  Synthetic oligonucleotide
cttggctccccatcgtttcacaactttacatctctgtactgtggaatgttatgattatcc

SEQ ID NO: 389415 - DNA, 60 bp, Artificial
  Synthetic oligonucleotide
cttggctctcgaacagacgtttcaattcctgggctatgtttaaggatctagatcatgact

SEQ ID NO: 389416 - DNA, 60 bp, Artificial
  Synthetic oligonucleotide
cttggctcttccgatgctctgctctacctagcaggtgtcgcttggtaccagtgtctctta

SEQ ID NO: 389417 - DNA, 55 bp, Artificial
  Synthetic oligonucleotide
cttggctgaacataggcttgaggcgatttgtgcagctatgatagagtcctggggt

SEQ ID NO: 389418 - DNA, 55 bp, Artificial
  Synthetic oligonucleotide
cttggctgcagtacctcgtcagcacagtgactggaatcttcctgataagggtgct

SEQ ID NO: 389419 - DNA, 59 bp, Artificial
  Synthetic oligonucleotide
cttggctgcatcatcactagcctcacaggccgggacaaaaaccaggtcgagggagaggt

SEQ ID NO: 389420 - DNA, 57 bp, Artificial
  Synthetic oligonucleotide
cttggctggaagtaaataaaatgctgtgttttactgtgctacgccgtgggagtttca

SEQ ID NO: 389421 - DNA, 56 bp, Artificial
  Synthetic oligonucleotide
cttggctgggttcttagagggcctgccgtttgcaagaaggttaccgaacatgagaa

SEQ ID NO: 389422 - DNA, 55 bp, Artificial
  Synthetic oligonucleotide
cttggctggttgcggttccactcctacccgaacacagtcgcagacaacatacccc

SEQ ID NO: 389423 - DNA, 60 bp, Artificial
  Synthetic oligonucleotide
cttggcttcctgccattgccgtgtccgggcaatcagccatatccgggcaatctgcccggt

SEQ ID NO: 389424 - DNA, 57 bp, Artificial
  Synthetic oligonucleotide
cttggcttgaactctaaaacaaggagggcgcatgttgaccaagtcaattggagaaaa

SEQ ID NO: 389425 - DNA, 56 bp, Artificial
  Synthetic oligonucleotide
cttggcttgcatactcagtggcttttgcttccgaaacattctgaacccgaggatgt

SEQ ID NO: 389426 - DNA, 60 bp, Artificial
  Synthetic oligonucleotide
cttggcttgcctgtgtgccttcttgatagagggtggagtcgagagtgatgaagattgcat

SEQ ID NO: 389427 - DNA, 57 bp, Artificial
  Synthetic oligonucleotide
cttggcttggaaacatggaccagtagttcaagaaatttataatgagtatcatggtag

SEQ ID NO: 389428 - DNA, 55 bp, Artificial
  Synthetic oligonucleotide
cttggcttttgacggcggttggttgtagtggcatttatctcaccaccaagcggct

SEQ ID NO: 389429 - DNA, 60 bp, Artificial
  Synthetic oligonucleotide
cttgggaaacatccagctatgatctagaataaaagtggctcatactgcttcaagtagtgt

SEQ ID NO: 389430 - DNA, 55 bp, Artificial
  Synthetic oligonucleotide
cttgggaacaagagctacagcaaacctcgacaaggcatggggacgaatctttctg

SEQ ID NO: 389431 - DNA, 55 bp, Artificial
  Synthetic oligonucleotide
cttgggaacaagatctacaaacctcgaaaaggcatggggacaaatctttctgtcc

SEQ ID NO: 389432 - DNA, 55 bp, Artificial
  Synthetic oligonucleotide
cttgggaaccagacaagtttgcatagcatggtccagctcaagttgccatgatgga

SEQ ID NO: 389433 - DNA, 60 bp, Artificial
  Synthetic oligonucleotide
cttgggaacccaatgtgtgatgatttgattgggaagacatcatggtcttacatagtagag

SEQ ID NO: 389434 - DNA, 59 bp, Artificial
  Synthetic oligonucleotide
cttgggaaccgcaagtggatcccatctgaggacacatggtttgacgggctcaattacaa

SEQ ID NO: 389435 - DNA, 55 bp, Artificial
  Synthetic oligonucleotide
cttgggaacctgggaagatttgcgctgcatttggagacccgatccagtctagggg

SEQ ID NO: 389436 - DNA, 55 bp, Artificial
  Synthetic oligonucleotide
cttgggaagatatactaccaatatcaagaggttagttcaaccgaatgatgtcggt

SEQ ID NO: 389437 - DNA, 57 bp, Artificial
  Synthetic oligonucleotide
cttgggaagatcactgccagttttctcgcccatctcctattggttacttaggactat

SEQ ID NO: 389438 - DNA, 55 bp, Artificial
  Synthetic oligonucleotide
cttgggaatactggcatgatgaacaagggatgtcaccaagctatgtaaaatacag

SEQ ID NO: 389439 - DNA, 56 bp, Artificial
  Synthetic oligonucleotide
cttgggaattttgttcagacagatagaaagtccctactacagactttggtgttgtc

SEQ ID NO: 389440 - DNA, 56 bp, Artificial
  Synthetic oligonucleotide
cttgggacaatctccaaacctacgccctcttgacagcctcttacaggcctcccgtg

SEQ ID NO: 389441 - DNA, 56 bp, Artificial
  Synthetic oligonucleotide
cttgggacagcaagcagaagtcaaatagcacggagtcagatgacactataactctc

SEQ ID NO: 389442 - DNA, 58 bp, Artificial
  Synthetic oligonucleotide
cttgggaccatattcagctcggacagcattactacctatccaattgatccccgaaacg

SEQ ID NO: 389443 - DNA, 55 bp, Artificial
  Synthetic oligonucleotide
cttgggaccgccttcggaacgggtttcacaacccagattaatgagcaaattgcac

SEQ ID NO: 389444 - DNA, 57 bp, Artificial
  Synthetic oligonucleotide
cttgggacggacctaagatatggggattgcgactataccgtacaggatatgacccta

SEQ ID NO: 389445 - DNA, 52 bp, Artificial
  Synthetic oligonucleotide
cttgggactttccaggaaggtgtgcccggggcgggactggggagtggcgacc

SEQ ID NO: 389446 - DNA, 53 bp, Artificial
  Synthetic oligonucleotide
cttgggaggctttggaagcttaggacttgactgtgaaccaaggacaggccttg

SEQ ID NO: 389447 - DNA, 51 bp, Artificial
  Synthetic oligonucleotide
cttgggagggctggctacacagtacacgtacagtgtaatgcttcaaagttt

SEQ ID NO: 389448 - DNA, 55 bp, Artificial
  Synthetic oligonucleotide
cttgggagtttaatagtacttggaatgctaccaataacagtacaggaaatgacac

SEQ ID NO: 389449 - DNA, 55 bp, Artificial
  Synthetic oligonucleotide
cttgggataccacatactgttacgactttaaggcaagcccgggctacactgtgcg

SEQ ID NO: 389450 - DNA, 58 bp, Artificial
  Synthetic oligonucleotide
cttgggatcaagatataccatgcaggccactaccttatcaaaacctgcatccactcct

SEQ ID NO: 389451 - DNA, 52 bp, Artificial
  Synthetic oligonucleotide
cttgggatgatccggattttcgaaagaaacgtagtgaaaatcaaaagaaaag

SEQ ID NO: 389452 - DNA, 60 bp, Artificial
  Synthetic oligonucleotide
cttgggatgctgatgatatgtagtgttacaggaaagtcgtgggtcacagtttattatggg

SEQ ID NO: 389453 - DNA, 60 bp, Artificial
  Synthetic oligonucleotide
cttgggcaaggaaccacgctggacaacaaacattcaaatggcacaatacatgatagaatc

SEQ ID NO: 389454 - DNA, 58 bp, Artificial
  Synthetic oligonucleotide
cttgggcaattgcgcctaaagacgctcctggaacgggccccagatgccccgcactatc

SEQ ID NO: 389455 - DNA, 54 bp, Artificial
  Synthetic oligonucleotide
cttgggcaccaagtagtgtagttcgtactatgtgggatcctttgttaaacgagt

SEQ ID NO: 389456 - DNA, 54 bp, Artificial
  Synthetic oligonucleotide
cttgggcagtgcgttttcttaataggggttgggcttcgctctccccgaaacaga

SEQ ID NO: 389457 - DNA, 59 bp, Artificial
  Synthetic oligonucleotide
cttgggccaagacgctgtttaagcaccttcattctaaggatgaggatttccaggacatc

SEQ ID NO: 389458 - DNA, 54 bp, Artificial
  Synthetic oligonucleotide
cttgggccgacgatgggcaaaaaactcggcccagatgagaaaaggtgataaggg

SEQ ID NO: 389459 - DNA, 55 bp, Artificial
  Synthetic oligonucleotide
cttgggcctcatccctccaatagccaagctgcttctgaaggccccaagcgtccca

SEQ ID NO: 389460 - DNA, 50 bp, Artificial
  Synthetic oligonucleotide
cttgggcctgggtagtcttcagtttacatccacaaccctttaatgtgtct

SEQ ID NO: 389461 - DNA, 53 bp, Artificial
  Synthetic oligonucleotide
cttgggcctgtaccgcccgcttctccgcctgttgtaccgaccgaccacggggc

SEQ ID NO: 389462 - DNA, 55 bp, Artificial
  Synthetic oligonucleotide
cttgggcgagctatattctcatcggcagctattcctttaagtaactgaaatgccg

SEQ ID NO: 389463 - DNA, 55 bp, Artificial
  Synthetic oligonucleotide
cttgggcgccgaggaactattaaaactagaagtggtttgcaaattggtcaggctg

SEQ ID NO: 389464 - DNA, 55 bp, Artificial
  Synthetic oligonucleotide
cttgggcgtgttggtcgaaacaaacccgggcacatactgcgaatcggatcaacac

SEQ ID NO: 389465 - DNA, 54 bp, Artificial
  Synthetic oligonucleotide
cttgggctaagatctatatgaccacatagataattatgtgggcctaaggaccta

SEQ ID NO: 389466 - DNA, 60 bp, Artificial
  Synthetic oligonucleotide
cttgggctatgcaacctgtgtccgtttatgggatggatctatctgtctcatgaccgctaa

SEQ ID NO: 389467 - DNA, 59 bp, Artificial
  Synthetic oligonucleotide
cttgggctcgaccttattacaggttggcgggaatccctcacagaatcatgaggtccagc

SEQ ID NO: 389468 - DNA, 55 bp, Artificial
  Synthetic oligonucleotide
cttgggctgggaataatacttggaatagtagtgctgaaaggtcagatgacactgg

SEQ ID NO: 389469 - DNA, 54 bp, Artificial
  Synthetic oligonucleotide
cttggggacaagaacctattatggagaaacgaactggcatcggaccctgggaaa

SEQ ID NO: 389470 - DNA, 58 bp, Artificial
  Synthetic oligonucleotide
cttggggacactactgattcgactttcgggttggtctctgttcagattgccaattata

SEQ ID NO: 389471 - DNA, 60 bp, Artificial
  Synthetic oligonucleotide
cttggggacccatgccagagtgattacgactcagagaaagatcgaaatattcttggtgca

SEQ ID NO: 389472 - DNA, 55 bp, Artificial
  Synthetic oligonucleotide
cttggggaccctctacagagtgattatgatagtatgaacgacaggcacgttttcc

SEQ ID NO: 389473 - DNA, 50 bp, Artificial
  Synthetic oligonucleotide
cttggggacgacgtaccggcttatgtttatgccactgaggatgaggatct

SEQ ID NO: 389474 - DNA, 54 bp, Artificial
  Synthetic oligonucleotide
cttggggagagattaacaaggcaggtaaatctgggtaccctctcttggccacgg

SEQ ID NO: 389475 - DNA, 59 bp, Artificial
  Synthetic oligonucleotide
cttggggagcctcctggaagcttgggacaacataactgagtctattggtctgacgtctg

SEQ ID NO: 389476 - DNA, 55 bp, Artificial
  Synthetic oligonucleotide
cttggggataacgctatcagcggaggctccaacgagggttccacggacaccacgt

SEQ ID NO: 389477 - DNA, 55 bp, Artificial
  Synthetic oligonucleotide
cttggggatctaccgtccccttctgcgtctcccgttccgaccatcgacagggcgc

SEQ ID NO: 389478 - DNA, 56 bp, Artificial
  Synthetic oligonucleotide
cttggggatctatcgtccccttctctgcctgtcgttccgaccgaccacggggcgca

SEQ ID NO: 389479 - DNA, 50 bp, Artificial
  Synthetic oligonucleotide
cttggggatgacccttgcgtacaaccacggctatgacaaggctaacacta

SEQ ID NO: 389480 - DNA, 52 bp, Artificial
  Synthetic oligonucleotide
cttggggcaggaaaccggttaggttgggccacgcttacgctgttcactttta

SEQ ID NO: 389481 - DNA, 59 bp, Artificial
  Synthetic oligonucleotide
cttggggcgctgatacagtcgcgtgcggtgacataatcgctggactcccggtttcagct

SEQ ID NO: 389482 - DNA, 53 bp, Artificial
  Synthetic oligonucleotide
cttggggcggaaccaagtgcgccccctccaccgaacaactctacaccttacga

SEQ ID NO: 389483 - DNA, 53 bp, Artificial
  Synthetic oligonucleotide
cttggggctctaccgcccgctcctccgtctgccgtaccgaccgaccacggggc

SEQ ID NO: 389484 - DNA, 60 bp, Artificial
  Synthetic oligonucleotide
cttgggggaccatacagtgcttgccagacaatgatgattatcaggaaataacgttaaatg

SEQ ID NO: 389485 - DNA, 56 bp, Artificial
  Synthetic oligonucleotide
cttgggggagcatgttgttgaaaagggaacttatgagggaggccatgggataggga

SEQ ID NO: 389486 - DNA, 53 bp, Artificial
  Synthetic oligonucleotide
cttgggggatcttcactgaaaaggtcttcacggttaaacccgtgaagatgaag

SEQ ID NO: 389487 - DNA, 56 bp, Artificial
  Synthetic oligonucleotide
cttgggggcgaagttggtttcagaatgaacagagacgacttacgtcaagttggagc

SEQ ID NO: 389488 - DNA, 57 bp, Artificial
  Synthetic oligonucleotide
cttgggggcgcgatcacagttgaagaggtagagcacctcggggctttcacccgagga

SEQ ID NO: 389489 - DNA, 59 bp, Artificial
  Synthetic oligonucleotide
cttggggggctatatgaatcaattgaggagtgcctgattaatgatccctgggttttgct

SEQ ID NO: 389490 - DNA, 55 bp, Artificial
  Synthetic oligonucleotide
cttgggggtaacttaactatgcgcgttacagctcttataacgcttaacaagtata

SEQ ID NO: 389491 - DNA, 60 bp, Artificial
  Synthetic oligonucleotide
cttggggtacccccattgagagcttggagacatcgggctagagcagtgcgcgccaagctc

SEQ ID NO: 389492 - DNA, 54 bp, Artificial
  Synthetic oligonucleotide
cttggggtggtacgtggtcttgacacgaggggcgtattgaaactggtcttggcc

SEQ ID NO: 389493 - DNA, 55 bp, Artificial
  Synthetic oligonucleotide
cttgggtaaggacccagtgttgactattccacttaatccaattacactcatgggg

SEQ ID NO: 389494 - DNA, 53 bp, Artificial
  Synthetic oligonucleotide
cttgggtacagtgacaccagtaagacagcaacggggcaccggtaacccctccg

SEQ ID NO: 389495 - DNA, 55 bp, Artificial
  Synthetic oligonucleotide
cttgggtaccaagaccacccagagcactaccatacacttccataggaaaaaccaa

SEQ ID NO: 389496 - DNA, 51 bp, Artificial
  Synthetic oligonucleotide
cttgggtacctggtcacaaaggaatatatggcaatcaattggcagatgagg

SEQ ID NO: 389497 - DNA, 55 bp, Artificial
  Synthetic oligonucleotide
cttgggtatccaacgaacaacgagctcccaaatcatctgacaggcgatttcagga

SEQ ID NO: 389498 - DNA, 54 bp, Artificial
  Synthetic oligonucleotide
cttgggtattgacatgcaagcccccatttacactactaacggaaaactgggact

SEQ ID NO: 389499 - DNA, 55 bp, Artificial
  Synthetic oligonucleotide
cttgggtcactccaaacgcgtgggacaatctgcagaccttgtctgtcaatgcccc

SEQ ID NO: 389500 - DNA, 60 bp, Artificial
  Synthetic oligonucleotide
cttgggtcggacctactgctagaagttatccccttgcgaaatatgaaagagcaatgagca

SEQ ID NO: 389501 - DNA, 57 bp, Artificial
  Synthetic oligonucleotide
cttgggtcgtgcactggcacctatcaatcaggctcgcctgtctggtaagcagaaggg

SEQ ID NO: 389502 - DNA, 53 bp, Artificial
  Synthetic oligonucleotide
cttgggtcttaaatacggttaagaaacgaccagtctgagggcgtaagctcgtc

SEQ ID NO: 389503 - DNA, 60 bp, Artificial
  Synthetic oligonucleotide
cttgggtgcagctgtgaaggcaggagcttgcatgctggatggtggcaatatgttggagac

SEQ ID NO: 389504 - DNA, 55 bp, Artificial
  Synthetic oligonucleotide
cttgggttaaggcaaacaattttgtgggtgaatgcactgaatcggattatgaggc

SEQ ID NO: 389505 - DNA, 60 bp, Artificial
  Synthetic oligonucleotide
cttgggttacatggatgtattttggcttgttctggatcagtagttgcaacagctcgagac

SEQ ID NO: 389506 - DNA, 55 bp, Artificial
  Synthetic oligonucleotide
cttgggttagagactgcacagggaagattaaggattttttggagcgaaatcgggc

SEQ ID NO: 389507 - DNA, 55 bp, Artificial
  Synthetic oligonucleotide
cttgggttatgaatgttcatagaaacaaaccagaattgggacagccttcccaaaa

SEQ ID NO: 389508 - DNA, 58 bp, Artificial
  Synthetic oligonucleotide
cttgggttcttaggaacagcaggaagcactatgggcgcggcgtcaataacgctgacgg

SEQ ID NO: 389509 - DNA, 60 bp, Artificial
  Synthetic oligonucleotide
cttgggttcttgggaacagcaggaagcactatgggcgcagcatcactaacgctgacggta

SEQ ID NO: 389510 - DNA, 52 bp, Artificial
  Synthetic oligonucleotide
cttggtaacaaggacccacggggccaaaagccacgtcctaactgacccgtca

SEQ ID NO: 389511 - DNA, 51 bp, Artificial
  Synthetic oligonucleotide
cttggtaacaattcaagcgtttgcaatagatcctaggcatcagtataccat

SEQ ID NO: 389512 - DNA, 60 bp, Artificial
  Synthetic oligonucleotide
cttggtaacacacgatatagacgcagaattgcttaacaacggtgatgactgtgtactcat

SEQ ID NO: 389513 - DNA, 51 bp, Artificial
  Synthetic oligonucleotide
cttggtaagacggagcccaataggtctaggtcatatattaagttgaaacgt

SEQ ID NO: 389514 - DNA, 51 bp, Artificial
  Synthetic oligonucleotide
cttggtacaacggattttactggtggtgggctatctaggggtaattctgtt

SEQ ID NO: 389515 - DNA, 57 bp, Artificial
  Synthetic oligonucleotide
cttggtacgagcttacgcctgctgagactacggtaagactccgggcttatttcaaca

SEQ ID NO: 389516 - DNA, 55 bp, Artificial
  Synthetic oligonucleotide
cttggtactcagaagggttctggacagatgttaccccagactgtgcagacaccct

SEQ ID NO: 389517 - DNA, 57 bp, Artificial
  Synthetic oligonucleotide
cttggtactcagatcttagatagttatagtgttattttaagtacttgtgatggttta

SEQ ID NO: 389518 - DNA, 51 bp, Artificial
  Synthetic oligonucleotide
cttggtactgtgggggattcaccatcctaatgatgaggcagagcagacagg

SEQ ID NO: 389519 - DNA, 60 bp, Artificial
  Synthetic oligonucleotide
cttggtagcatgttaggtgtggatttcatgtcaaaagaccccttcacatatttgtatgaa

SEQ ID NO: 389520 - DNA, 55 bp, Artificial
  Synthetic oligonucleotide
cttggtaggagatcctataccaggcacagagaccttttacacagatggatcatgc

SEQ ID NO: 389521 - DNA, 60 bp, Artificial
  Synthetic oligonucleotide
cttggtaggcctacctatgctgaaacacctgcaggctatataagggttagcagacttggc

SEQ ID NO: 389522 - DNA, 60 bp, Artificial
  Synthetic oligonucleotide
cttggtaggtggaccggcacttacatctatgatcatctcacccctatgtcggactgggct

SEQ ID NO: 389523 - DNA, 52 bp, Artificial
  Synthetic oligonucleotide
cttggtataagtacaggtaagggtaccggtggtcctacaggctatattcctt

SEQ ID NO: 389524 - DNA, 55 bp, Artificial
  Synthetic oligonucleotide
cttggtatagcaaatacactccgtgcacgatactcccaggattacacaggcgaaa

SEQ ID NO: 389525 - DNA, 54 bp, Artificial
  Synthetic oligonucleotide
cttggtatagggaccggatccggtaggggaggagctactggatatatccctctc

SEQ ID NO: 389526 - DNA, 56 bp, Artificial
  Synthetic oligonucleotide
cttggtatgtgaagcattttttaaccatcttcgtgactaaaccgaacaagtcaaca

SEQ ID NO: 389527 - DNA, 55 bp, Artificial
  Synthetic oligonucleotide
cttggtcaaccctgcacccctcgattatgtgaacttcgaggcttgctccaggagg

SEQ ID NO: 389528 - DNA, 60 bp, Artificial
  Synthetic oligonucleotide
cttggtcaatcggtactcaacaaacttggctatgcaatcggtgaatggtactcactatat

SEQ ID NO: 389529 - DNA, 56 bp, Artificial
  Synthetic oligonucleotide
cttggtcagcgtaggtgttttctatctggcctatagtttgttcttgaaggactgca

SEQ ID NO: 389530 - DNA, 58 bp, Artificial
  Synthetic oligonucleotide
cttggtcagcgtgtcaagaaccgggaaaggtttgaaactcgattgcgacatgaggcta

SEQ ID NO: 389531 - DNA, 60 bp, Artificial
  Synthetic oligonucleotide
cttggtcattgaccactcaggtaatctgctgctctgtatgtttattgttagcttgttaag

SEQ ID NO: 389532 - DNA, 55 bp, Artificial
  Synthetic oligonucleotide
cttggtccaccgtcagcagttcggaggacgtcgtgtgctgctcaatgtcctactc

SEQ ID NO: 389533 - DNA, 50 bp, Artificial
  Synthetic oligonucleotide
cttggtcccgtctggcttgacgcgtgcgtaggtccgctcatagaccagcc

SEQ ID NO: 389534 - DNA, 54 bp, Artificial
  Synthetic oligonucleotide
cttggtccctggggctatcttcttaagggtggtttctggctagttcgcaagatt

SEQ ID NO: 389535 - DNA, 55 bp, Artificial
  Synthetic oligonucleotide
cttggtcgcaaaggtacagtccttgaggcagcacaacccggatccgatttcgtcg

SEQ ID NO: 389536 - DNA, 60 bp, Artificial
  Synthetic oligonucleotide
cttggtcgtagctgtagctggcttcgcaattcacagtatacaggcgcccctctttctgcg

SEQ ID NO: 389537 - DNA, 55 bp, Artificial
  Synthetic oligonucleotide
cttggtctgaatgccgtagcctactacagaggcttagacgtttcggtgattccca

SEQ ID NO: 389538 - DNA, 55 bp, Artificial
  Synthetic oligonucleotide
cttggtcttgacgctaactcagtcgcacccgctatgtgggacctcgctcgagcct

SEQ ID NO: 389539 - DNA, 53 bp, Artificial
  Synthetic oligonucleotide
cttggtctttttacagatgaatacgtggttaccgaataatgacaaggtttacc

SEQ ID NO: 389540 - DNA, 58 bp, Artificial
  Synthetic oligonucleotide
cttggtgaaagggctagttgacagtgtcagtgaaagcttcttccccggcctatctgtc

SEQ ID NO: 389541 - DNA, 54 bp, Artificial
  Synthetic oligonucleotide
cttggtgaaatgaatcggggaatgggtccttatttatagcagagtccgttaggg

SEQ ID NO: 389542 - DNA, 52 bp, Artificial
  Synthetic oligonucleotide
cttggtgaccaaggtgtgggcctataaatgcacgtgcatctgcatttatcgc

SEQ ID NO: 389543 - DNA, 55 bp, Artificial
  Synthetic oligonucleotide
cttggtgagactttagctgaggacacatttaacatactcgactatgctggtcttg

SEQ ID NO: 389544 - DNA, 60 bp, Artificial
  Synthetic oligonucleotide
cttggtgagattgggtacatataagcttcgaagatgtctatggggttattggtcatcatt

SEQ ID NO: 389545 - DNA, 60 bp, Artificial
  Synthetic oligonucleotide
cttggtgagttcacagctcgtgcactcgcttgggatgaaaattgcgctgtaggatgtaat

SEQ ID NO: 389546 - DNA, 60 bp, Artificial
  Synthetic oligonucleotide
cttggtgagttggctgcaagtctttcatttgtgaggtcaattgttgtgttctcccatgct

SEQ ID NO: 389547 - DNA, 60 bp, Artificial
  Synthetic oligonucleotide
cttggtgataatctgtgcggatctggcaccacagcttcgcacctatttcactgagagaaa

SEQ ID NO: 389548 - DNA, 59 bp, Artificial
  Synthetic oligonucleotide
cttggtgataccgagcaagtgcctttcatatctaggttgccggagtttaaagtgcaata

SEQ ID NO: 389549 - DNA, 59 bp, Artificial
  Synthetic oligonucleotide
cttggtgatgagtcgaagcctaccaattttagagaagctatggctatgcccggtgcccg

SEQ ID NO: 389550 - DNA, 60 bp, Artificial
  Synthetic oligonucleotide
cttggtgatgatgtttccgtccttagatatatagtcaaggacttgttcagaatttctagc

SEQ ID NO: 389551 - DNA, 54 bp, Artificial
  Synthetic oligonucleotide
cttggtgattggttgtcaggtaacaacgcactttctccacagaacgggtatagc

SEQ ID NO: 389552 - DNA, 52 bp, Artificial
  Synthetic oligonucleotide
cttggtgcaactggggtcctctgtcagggcataaaagaggcacagaagggct

SEQ ID NO: 389553 - DNA, 51 bp, Artificial
  Synthetic oligonucleotide
cttggtgcatgttaagtcgatgcaggagcacgagtttatcgatcgcctcag

SEQ ID NO: 389554 - DNA, 60 bp, Artificial
  Synthetic oligonucleotide
cttggtgcccaagaccacccagagctgttcaatactcacatacacataccaccaactaca

SEQ ID NO: 389555 - DNA, 53 bp, Artificial
  Synthetic oligonucleotide
cttggtgccgtcttgtgtttctacggtcatcgaaatacgaggcgccaacgaat

SEQ ID NO: 389556 - DNA, 52 bp, Artificial
  Synthetic oligonucleotide
cttggtgcgagtatcagtaaggtcagtgttatttaagcacaaaactaagtga

SEQ ID NO: 389557 - DNA, 55 bp, Artificial
  Synthetic oligonucleotide
cttggtggcaaggaccccagagtcaagggtggcccctcgctgcagcaagtcatga

SEQ ID NO: 389558 - DNA, 53 bp, Artificial
  Synthetic oligonucleotide
cttggtgggctaggttataaatggtcagaaatttcgtttaaagcggctaatta

SEQ ID NO: 389559 - DNA, 55 bp, Artificial
  Synthetic oligonucleotide
cttggtggtacttcatgcaaggctgacggtaacaggtttaaaatttacagagtta

SEQ ID NO: 389560 - DNA, 58 bp, Artificial
  Synthetic oligonucleotide
cttggtgtaaggttcatgtgccaacgccctgtgcgggatgaaacctctactgccctag

SEQ ID NO: 389561 - DNA, 53 bp, Artificial
  Synthetic oligonucleotide
cttggtgtcgaagcgttttccgtgggctaaagtggttggtttggtgtactcac

SEQ ID NO: 389562 - DNA, 60 bp, Artificial
  Synthetic oligonucleotide
cttggtgttgatgttctaaacaccatgtctctgggtagcacagctctgagcaccagtgtg

SEQ ID NO: 389563 - DNA, 58 bp, Artificial
  Synthetic oligonucleotide
cttggtgttttgtctcccagcagccggcgtcctctcaatagggatgaccggccttctc

SEQ ID NO: 389564 - DNA, 55 bp, Artificial
  Synthetic oligonucleotide
cttggttacgatactcaattactatatggtcaaccttcatgcattttcccagcat

SEQ ID NO: 389565 - DNA, 53 bp, Artificial
  Synthetic oligonucleotide
cttggttaggcgtttctggaaggttaacaaccatgttgtgtacaaccatcagg

SEQ ID NO: 389566 - DNA, 54 bp, Artificial
  Synthetic oligonucleotide
cttggttcaagccggcctagactcggtaaaactcgtcgaagctaacttggccca

SEQ ID NO: 389567 - DNA, 60 bp, Artificial
  Synthetic oligonucleotide
cttggttcatcatacctttatattgttatcacactttacatacaagtattgcagcagtat

SEQ ID NO: 389568 - DNA, 50 bp, Artificial
  Synthetic oligonucleotide
cttggttcgctgggacgtgtttcgttgtcacccgtttacattcaggtttc

SEQ ID NO: 389569 - DNA, 60 bp, Artificial
  Synthetic oligonucleotide
cttggttctaagagatgggttgatggtctttgagaattccagcatgaacagcccatgtgc

SEQ ID NO: 389570 - DNA, 60 bp, Artificial
  Synthetic oligonucleotide
cttggttggtctgtgggactcctcttatgaggctgtatacacagatgcataatcccagag

SEQ ID NO: 389571 - DNA, 49 bp, Artificial
  Synthetic oligonucleotide
cttggtttagtggagtttaaactcgagggctcttcctcgttaaaaaggg

SEQ ID NO: 389572 - DNA, 51 bp, Artificial
  Synthetic oligonucleotide
cttggtttcgtgtatttaacagagttaatacaggttttacgtatacggaaa

SEQ ID NO: 389573 - DNA, 60 bp, Artificial
  Synthetic oligonucleotide
cttgtaaacatctgtcgatgtcttgaagcagaaatcctgaggagtgtttagtagggtcaa

SEQ ID NO: 389574 - DNA, 55 bp, Artificial
  Synthetic oligonucleotide
cttgtaaatacagcagtattggtgttggagtgtgctggttggtgtacgatgcgca

SEQ ID NO: 389575 - DNA, 54 bp, Artificial
  Synthetic oligonucleotide
cttgtaacaaagggagggaaagtatgggaggacagacaccatgggaagtattta

SEQ ID NO: 389576 - DNA, 56 bp, Artificial
  Synthetic oligonucleotide
cttgtaacacactacacactcgttttgtattcgagaagtagttgcaacaacggtcc

SEQ ID NO: 389577 - DNA, 54 bp, Artificial
  Synthetic oligonucleotide
cttgtaaccacaacacatacctacatgaataggcttttcgatgattgtagaaga

SEQ ID NO: 389578 - DNA, 57 bp, Artificial
  Synthetic oligonucleotide
cttgtaaggggcaattctcctgcattcaactacaacaagacaacgaaaagactaaca

SEQ ID NO: 389579 - DNA, 60 bp, Artificial
  Synthetic oligonucleotide
cttgtaaggtccagtcgtatgaacaccgtcacgacatctcacatgtcggcaaggtaatgt

SEQ ID NO: 389580 - DNA, 55 bp, Artificial
  Synthetic oligonucleotide
cttgtaagtcggacgagtcttaaacgtgaatttcttgtaagccgccatgtaatcc

SEQ ID NO: 389581 - DNA, 54 bp, Artificial
  Synthetic oligonucleotide
cttgtaataaggccgtctttaacaacaagcgattccaaggagacgtaggcggac

SEQ ID NO: 389582 - DNA, 51 bp, Artificial
  Synthetic oligonucleotide
cttgtaatcagacagcatgccagcctactgtttttctaataggcccaatac

SEQ ID NO: 389583 - DNA, 60 bp, Artificial
  Synthetic oligonucleotide
cttgtaatgagcttgatgatctaccatgtggaccaggattgggagtcacttaaacagtat

SEQ ID NO: 389584 - DNA, 60 bp, Artificial
  Synthetic oligonucleotide
cttgtaatgcagcacgtggtttagaatggattggacaaaagatatctaaattcatagatt

SEQ ID NO: 389585 - DNA, 56 bp, Artificial
  Synthetic oligonucleotide
cttgtaattcgatctccggtgagaatggcagaggaaaatccgtccgtattccgacg

SEQ ID NO: 389586 - DNA, 58 bp, Artificial
  Synthetic oligonucleotide
cttgtacaaacgcgatctacgcaggttcccgcaactgacacgaaccgtgcaacttgaa

SEQ ID NO: 389587 - DNA, 56 bp, Artificial
  Synthetic oligonucleotide
cttgtacaactcgcctgaacttaaggctagggtgcgtctcggtaaggatcgttggc

SEQ ID NO: 389588 - DNA, 56 bp, Artificial
  Synthetic oligonucleotide
cttgtacacaaccccgtcacgttgggtgactctgtcgatccacgcctggaaaccga

SEQ ID NO: 389589 - DNA, 60 bp, Artificial
  Synthetic oligonucleotide
cttgtacagtagtaatgactgatggaagtgcatcaggacgagctgacactaaaatattgt

SEQ ID NO: 389590 - DNA, 55 bp, Artificial
  Synthetic oligonucleotide
cttgtacagttgcctgatctctaacggtatcgattcgatcctctggacggacccg

SEQ ID NO: 389591 - DNA, 60 bp, Artificial
  Synthetic oligonucleotide
cttgtacatcgtgggattgatccgatcctgtgtggaacggaactaggatcaccactagtg

SEQ ID NO: 389592 - DNA, 60 bp, Artificial
  Synthetic oligonucleotide
cttgtacatggcatgtacgcatgcctctaatcctgtgtatgctactttgaaatgtaggag

SEQ ID NO: 389593 - DNA, 60 bp, Artificial
  Synthetic oligonucleotide
cttgtacccctacatcatcaaatattgcaagctttatcctgaccgggcatagagtactcg

SEQ ID NO: 389594 - DNA, 53 bp, Artificial
  Synthetic oligonucleotide
cttgtacctatttaggtaacactattgtcactctcgcggccctttgttacgtt

SEQ ID NO: 389595 - DNA, 57 bp, Artificial
  Synthetic oligonucleotide
cttgtacgatggaaggatccacttaccaatctgtggtatggaccagaccctgtattg

SEQ ID NO: 389596 - DNA, 56 bp, Artificial
  Synthetic oligonucleotide
cttgtacgcaagcaaaaacccctacacattagtatcaacaaaggaatggagcaaaa

SEQ ID NO: 389597 - DNA, 59 bp, Artificial
  Synthetic oligonucleotide
cttgtacgccagtcaacatggcgttgaattttacaacagggtatataagttggctgaga

SEQ ID NO: 389598 - DNA, 51 bp, Artificial
  Synthetic oligonucleotide
cttgtacggcgcatatacgtcacgcggcgtctttcactgcgattatgacgc

SEQ ID NO: 389599 - DNA, 57 bp, Artificial
  Synthetic oligonucleotide
cttgtacgtaaagacctatgccccggagttcaagcatccagagaaacttgacggtca

SEQ ID NO: 389600 - DNA, 57 bp, Artificial
  Synthetic oligonucleotide
cttgtacgtaggacactgaccgtataagtggaggttcgccagtcccttcagcaagga

SEQ ID NO: 389601 - DNA, 54 bp, Artificial
  Synthetic oligonucleotide
cttgtactattgtgctttgccagcacatactagcgtgtaaaggcatctggttgt

SEQ ID NO: 389602 - DNA, 60 bp, Artificial
  Synthetic oligonucleotide
cttgtactgggtctcttttgctagaccagatttgagcccgggagctctctgactagcaga

SEQ ID NO: 389603 - DNA, 57 bp, Artificial
  Synthetic oligonucleotide
cttgtactgtcaaagtgtgcccattaaatacgcaaactttaggaattggatgtcaaa

SEQ ID NO: 389604 - DNA, 56 bp, Artificial
  Synthetic oligonucleotide
cttgtacttccacaagttctgcacgggattgggagtgaagaccgagtggaagaacg

SEQ ID NO: 389605 - DNA, 60 bp, Artificial
  Synthetic oligonucleotide
cttgtagaacagcttttattatggagctaaacataggtggactcatctttatggtctcca

SEQ ID NO: 389606 - DNA, 59 bp, Artificial
  Synthetic oligonucleotide
cttgtagaatataatcaaactgatgttaccataaaattcggtaatcacagtggtggaga

SEQ ID NO: 389607 - DNA, 51 bp, Artificial
  Synthetic oligonucleotide
cttgtagataagttactccatgatggcactcccaatgtcgtaaagcgcctt

SEQ ID NO: 389608 - DNA, 60 bp, Artificial
  Synthetic oligonucleotide
cttgtagatctgttctctaaacgaactttaaaatctgtgtagctgtcgctcggctgcatg

SEQ ID NO: 389609 - DNA, 55 bp, Artificial
  Synthetic oligonucleotide
cttgtagcaagcatgatagagaaggaactttactccaattatggcatggtcatga

SEQ ID NO: 389610 - DNA, 55 bp, Artificial
  Synthetic oligonucleotide
cttgtagcaagcgcgttgcagcgttctgtagcaaatggggagtgctgtgggcacc

SEQ ID NO: 389611 - DNA, 55 bp, Artificial
  Synthetic oligonucleotide
cttgtagctgatgcaaatgtctatatgggtattcctctatcacgttgttccccac

SEQ ID NO: 389612 - DNA, 57 bp, Artificial
  Synthetic oligonucleotide
cttgtaggagacaatcttgtgtgtaaaatagcagacttcggtctcgcaaggttaata

SEQ ID NO: 389613 - DNA, 55 bp, Artificial
  Synthetic oligonucleotide
cttgtaggtgcgttgaggtgttacgcatattgcctaatccttgcgttgtatgatc

SEQ ID NO: 389614 - DNA, 55 bp, Artificial
  Synthetic oligonucleotide
cttgtaggttcaaagcttggggagtggccaacgatgctagatgtcgcgacatgtg

SEQ ID NO: 389615 - DNA, 55 bp, Artificial
  Synthetic oligonucleotide
cttgtaggttcatacgtatggcaacggttttcattggcactagatttgagatccg

SEQ ID NO: 389616 - DNA, 60 bp, Artificial
  Synthetic oligonucleotide
cttgtagtgggatccatccggttctgacgctgttgagccacaatgccgcagactggttcg

SEQ ID NO: 389617 - DNA, 55 bp, Artificial
  Synthetic oligonucleotide
cttgtagttatgtcttttgaggtatgacaaactcgttctcaagccggcttacagc

SEQ ID NO: 389618 - DNA, 54 bp, Artificial
  Synthetic oligonucleotide
cttgtataatgtgggatccattgcttaacgaatttcctgaaaccgttcacggtt

SEQ ID NO: 389619 - DNA, 55 bp, Artificial
  Synthetic oligonucleotide
cttgtatacataagtaatagagtgagcgcgactaccgactttcggactttctgcc

SEQ ID NO: 389620 - DNA, 55 bp, Artificial
  Synthetic oligonucleotide
cttgtatatgaatgctctagattgggaagaagaaaagacaattctggcactgtgg

SEQ ID NO: 389621 - DNA, 59 bp, Artificial
  Synthetic oligonucleotide
cttgtatatgcagacaacatatacattgtccactcaaacacgtggtactcaattgacct

SEQ ID NO: 389622 - DNA, 55 bp, Artificial
  Synthetic oligonucleotide
cttgtatcagaagaaacctactatatacatggttggttcagccccttcatactgg

SEQ ID NO: 389623 - DNA, 56 bp, Artificial
  Synthetic oligonucleotide
cttgtatcagacctaacaacaatacaaggaaaagtgtacgtataggaccaggacaa

SEQ ID NO: 389624 - DNA, 57 bp, Artificial
  Synthetic oligonucleotide
cttgtatcgaggcggttgagtcgggtctcgttacagtacactttcgatctgacgtgt

SEQ ID NO: 389625 - DNA, 56 bp, Artificial
  Synthetic oligonucleotide
cttgtatcgcagaaaattgtcgcggatgaagtaaaggccggggtaagtatcacctc

SEQ ID NO: 389626 - DNA, 58 bp, Artificial
  Synthetic oligonucleotide
cttgtatcggtttagccgctctgacaccctgggctatcgttcccgccgctcttggcta

SEQ ID NO: 389627 - DNA, 56 bp, Artificial
  Synthetic oligonucleotide
cttgtatctctgtcaagttagccaatctcaaattctgaccgtttttttccggttgc

SEQ ID NO: 389628 - DNA, 55 bp, Artificial
  Synthetic oligonucleotide
cttgtatggtgagtatgtcgttgttggatagaaatggtctctcgtggtgttggga

SEQ ID NO: 389629 - DNA, 55 bp, Artificial
  Synthetic oligonucleotide
cttgtatgtcaaatctgatgccgaccattttgattgatctgctgataagaatgcc

SEQ ID NO: 389630 - DNA, 60 bp, Artificial
  Synthetic oligonucleotide
cttgtattcactggcaacccggcgagttgctgtgtgagaacttggcagtagaacaggggc

SEQ ID NO: 389631 - DNA, 60 bp, Artificial
  Synthetic oligonucleotide
cttgtatttacctcctgctcagcccgttgcaagagtgtattctactgatgaatatgttat

SEQ ID NO: 389632 - DNA, 59 bp, Artificial
  Synthetic oligonucleotide
cttgtcaaccaaccggcaactgctcctagagtccccccacgccgaattgtatcagctca

SEQ ID NO: 389633 - DNA, 60 bp, Artificial
  Synthetic oligonucleotide
cttgtcaatgccccatcatgtagaatcgagatagccccctcccatccgaatacggaccgc

SEQ ID NO: 389634 - DNA, 56 bp, Artificial
  Synthetic oligonucleotide
cttgtcacaataaaagtaggaggccaaataaaggaggccctcttagacacaggagc

SEQ ID NO: 389635 - DNA, 55 bp, Artificial
  Synthetic oligonucleotide
cttgtcacatcacaagcagttaaacttcggtcattatctcatcgacgaccgcacg

SEQ ID NO: 389636 - DNA, 59 bp, Artificial
  Synthetic oligonucleotide
cttgtcacatggtacagtaccatgttcgtagaaagacccagcttctttctgtatgtact

SEQ ID NO: 389637 - DNA, 55 bp, Artificial
  Synthetic oligonucleotide
cttgtcacatttgtcccaaatgtataatggctgggttggaaatatgagagttagg

SEQ ID NO: 389638 - DNA, 54 bp, Artificial
  Synthetic oligonucleotide
cttgtcaccaaggacagtgggtcaatgccctaaatacgtgaacaaaaagagttt

SEQ ID NO: 389639 - DNA, 55 bp, Artificial
  Synthetic oligonucleotide
cttgtcaccgcacaataggttatgcttaccatccatattttcttctgtgaaagtc

SEQ ID NO: 389640 - DNA, 58 bp, Artificial
  Synthetic oligonucleotide
cttgtcacggtggtggccgttgtgttgcgtcccagggtatcgtgcagacctgggagaa

SEQ ID NO: 389641 - DNA, 60 bp, Artificial
  Synthetic oligonucleotide
cttgtcacttcatacggaatcatatatttgcagtgctgactgtgtcataacggttgacaa

SEQ ID NO: 389642 - DNA, 50 bp, Artificial
  Synthetic oligonucleotide
cttgtcactttcgcctgctagtgacccaaggctcagctatactatgctgg

SEQ ID NO: 389643 - DNA, 60 bp, Artificial
  Synthetic oligonucleotide
cttgtcagcactgtccatctcaatacatctcgacaacagcttgagcccttccatcaagac

SEQ ID NO: 389644 - DNA, 56 bp, Artificial
  Synthetic oligonucleotide
cttgtcatacttgaagattttatcaagtcttagcttatcattagtgaactctatga

SEQ ID NO: 389645 - DNA, 55 bp, Artificial
  Synthetic oligonucleotide
cttgtcatgaatctccactatgactgctccagtggcgttgataggcacctgttgc

SEQ ID NO: 389646 - DNA, 59 bp, Artificial
  Synthetic oligonucleotide
cttgtcccagatcaagagagtcttttctttagaagacccagcctctggatccacgagaa

SEQ ID NO: 389647 - DNA, 53 bp, Artificial
  Synthetic oligonucleotide
cttgtccccccttctgttgaatctaagactaaagcttttacactcccaattct

SEQ ID NO: 389648 - DNA, 60 bp, Artificial
  Synthetic oligonucleotide
cttgtcctcatacttagttatgctgaagtccgctgggaaattctctctagatctgaactt

SEQ ID NO: 389649 - DNA, 56 bp, Artificial
  Synthetic oligonucleotide
cttgtcgaatgactccagtgtaaaaggcgacacatatgcctgaacaggctctgtga

SEQ ID NO: 389650 - DNA, 59 bp, Artificial
  Synthetic oligonucleotide
cttgtcgaattaatgtacgcattaacgagattcactgaatccctaacagtttactcagc

SEQ ID NO: 389651 - DNA, 55 bp, Artificial
  Synthetic oligonucleotide
cttgtcgagtatcgtcctccatttgcatactgacgtgtcctgttgtctccgtgaa

SEQ ID NO: 389652 - DNA, 60 bp, Artificial
  Synthetic oligonucleotide
cttgtcgcaataaaagtaggaggccagacaaaggaggctctcctagacacaggagcagac

SEQ ID NO: 389653 - DNA, 55 bp, Artificial
  Synthetic oligonucleotide
cttgtcgcagcagctttcgcgacttaataagacgttatcagctggtcgtccaacc

SEQ ID NO: 389654 - DNA, 55 bp, Artificial
  Synthetic oligonucleotide
cttgtcgcagtctggataatagttcgccatcgttcatcagatttctttggcgaga

SEQ ID NO: 389655 - DNA, 60 bp, Artificial
  Synthetic oligonucleotide
cttgtcgctcatcgcaaagatgcgaccgaccgttttgaccatgatcttccaacaacacaa

SEQ ID NO: 389656 - DNA, 58 bp, Artificial
  Synthetic oligonucleotide
cttgtcggccaaccgttcaccttttctccaaggcgccactggacgacacaaggctgca

SEQ ID NO: 389657 - DNA, 55 bp, Artificial
  Synthetic oligonucleotide
cttgtcgggtttaagatcatgtgcggcgagaccccttctgccgaggacatggtta

SEQ ID NO: 389658 - DNA, 59 bp, Artificial
  Synthetic oligonucleotide
cttgtcgtccagcgctattctttctgttggggcgtaacgcattgatgtggttcttccga

SEQ ID NO: 389659 - DNA, 56 bp, Artificial
  Synthetic oligonucleotide
cttgtctacgatggtgtgagcctaatattaagaaagccttgagctggcctcttggg

SEQ ID NO: 389660 - DNA, 51 bp, Artificial
  Synthetic oligonucleotide
cttgtctcaataaaagtagagggtcagacaaaggaagctcttttagacaca

SEQ ID NO: 389661 - DNA, 57 bp, Artificial
  Synthetic oligonucleotide
cttgtctcaataaaggtagggggtcaggtaagggaggctctcttagatacaggagca

SEQ ID NO: 389662 - DNA, 51 bp, Artificial
  Synthetic oligonucleotide
cttgtctcaataagagtagggggccaaacaaaagaggctctcctagacaca

SEQ ID NO: 389663 - DNA, 51 bp, Artificial
  Synthetic oligonucleotide
cttgtctcagttgaacactattgttcacgacaggaggaggattgaagtgat

SEQ ID NO: 389664 - DNA, 55 bp, Artificial
  Synthetic oligonucleotide
cttgtctcccccaattcccaccccctcatccaggttctacgttgctgatcccgcg

SEQ ID NO: 389665 - DNA, 56 bp, Artificial
  Synthetic oligonucleotide
cttgtctctattgaaaaggtctaagaagaattcctcgttaaactcaccattcttga

SEQ ID NO: 389666 - DNA, 60 bp, Artificial
  Synthetic oligonucleotide
cttgtctctctcgaagctgtatgtagactgatcatttttaacgagtatcattcactttta

SEQ ID NO: 389667 - DNA, 50 bp, Artificial
  Synthetic oligonucleotide
cttgtctcttcacatacccaagatacgctttcatatcagtggtgtagaac

SEQ ID NO: 389668 - DNA, 60 bp, Artificial
  Synthetic oligonucleotide
cttgtctgatattttcttgcgcaccggagttgttgccgcatgttgttatgagctgacaaa

SEQ ID NO: 389669 - DNA, 53 bp, Artificial
  Synthetic oligonucleotide
cttgtctggaactactccggtggtgtttaacaagtgtttcaccggtgggtctc

SEQ ID NO: 389670 - DNA, 55 bp, Artificial
  Synthetic oligonucleotide
cttgtctggcagtttgactcccacctggcatattcatatgaggccttcaaaaggt

SEQ ID NO: 389671 - DNA, 56 bp, Artificial
  Synthetic oligonucleotide
cttgtctgtggcccgagttgggctattgatccgtcgacgttgggcgttacggggca

SEQ ID NO: 389672 - DNA, 55 bp, Artificial
  Synthetic oligonucleotide
cttgtgaaccaggtgattgtggtgggaaactcctgtgtaaacatggggttatagg

SEQ ID NO: 389673 - DNA, 52 bp, Artificial
  Synthetic oligonucleotide
cttgtgaacctctccaaagcgctagatttcccggtggcaatccacagtgaga

SEQ ID NO: 389674 - DNA, 56 bp, Artificial
  Synthetic oligonucleotide
cttgtgaactttggaccctcagatctatttgtacacatggatgatctagtatatag

SEQ ID NO: 389675 - DNA, 60 bp, Artificial
  Synthetic oligonucleotide
cttgtgaagcccatgcgagacttccttctaatgtcagtccaagcaatctatcattatctg

SEQ ID NO: 389676 - DNA, 57 bp, Artificial
  Synthetic oligonucleotide
cttgtgaaggttgagggatttgcgtaggttgtggttgaatctcagctgaactttgag

SEQ ID NO: 389677 - DNA, 58 bp, Artificial
  Synthetic oligonucleotide
cttgtgaatcgtgagtcactttgggtgcttattaacttacaagaaacatcttctggtc

SEQ ID NO: 389678 - DNA, 60 bp, Artificial
  Synthetic oligonucleotide
cttgtgacaccttgtgcggcagaagaatcgaagctgccaattagccccctgagcaactcg

SEQ ID NO: 389679 - DNA, 60 bp, Artificial
  Synthetic oligonucleotide
cttgtgaccgagacccgatgtagggccatccatcaccagaaaggcagagtttgtaaagca

SEQ ID NO: 389680 - DNA, 58 bp, Artificial
  Synthetic oligonucleotide
cttgtgaggggcgatcaacaaacgtattacctacacactactctagaatccacaaaga

SEQ ID NO: 389681 - DNA, 57 bp, Artificial
  Synthetic oligonucleotide
cttgtgagtcgggttgtaacggggcatggcttaactaaggggactatagcatgtata

SEQ ID NO: 389682 - DNA, 55 bp, Artificial
  Synthetic oligonucleotide
cttgtgagtcttggctcttccatctacacatagaaacatgagagtatcatacaag

SEQ ID NO: 389683 - DNA, 56 bp, Artificial
  Synthetic oligonucleotide
cttgtgatatccttttcacccaactgctgcacatacagagccatcgtaacctgata

SEQ ID NO: 389684 - DNA, 60 bp, Artificial
  Synthetic oligonucleotide
cttgtgatctgctattgggagggaaggaatggtcctacattgtcgaaaggtcatcggctg

SEQ ID NO: 389685 - DNA, 60 bp, Artificial
  Synthetic oligonucleotide
cttgtgatgatgcggttgtcattatgttaatcatcctattaacataatcagtgaaggaaa

SEQ ID NO: 389686 - DNA, 60 bp, Artificial
  Synthetic oligonucleotide
cttgtgatgccgatggacctggatcgattgccgaatcgtccagtccactcaggtttttgt

SEQ ID NO: 389687 - DNA, 60 bp, Artificial
  Synthetic oligonucleotide
cttgtgatggagatgagcggcctctgttagtgaaagggaccctgatagctattgacccat

SEQ ID NO: 389688 - DNA, 60 bp, Artificial
  Synthetic oligonucleotide
cttgtgcacagtgtaggcagcacatccaaactttaagctgggaagaatatagacaattta

SEQ ID NO: 389689 - DNA, 60 bp, Artificial
  Synthetic oligonucleotide
cttgtgcactcaaattacttccagtagaaggacatgacttgcttttgattcaaatgccta

SEQ ID NO: 389690 - DNA, 60 bp, Artificial
  Synthetic oligonucleotide
cttgtgccaagcttgactatggtcatgcgtgtgctgggtttgattatatgataaggccag

SEQ ID NO: 389691 - DNA, 60 bp, Artificial
  Synthetic oligonucleotide
cttgtgcgactcacacagagcgctcttctagctactggtgaaaactttcggacacgcatg

SEQ ID NO: 389692 - DNA, 59 bp, Artificial
  Synthetic oligonucleotide
cttgtgcgagagggtctctgtgaccctattcgagtgtttgtcaaaggtgaaccgcacaa

SEQ ID NO: 389693 - DNA, 57 bp, Artificial
  Synthetic oligonucleotide
cttgtgctagtttcaccgaccgcacccatatcacactgtcattgcaacaagttactt

SEQ ID NO: 389694 - DNA, 60 bp, Artificial
  Synthetic oligonucleotide
cttgtgctatttgcttgttcgctctaactagatctacattgccacacgtgggtgataatt

SEQ ID NO: 389695 - DNA, 60 bp, Artificial
  Synthetic oligonucleotide
cttgtgctgatgctaacataactttacatgagggcgtgcgtcaattaatttcccagtgtg

SEQ ID NO: 389696 - DNA, 55 bp, Artificial
  Synthetic oligonucleotide
cttgtgctgtatgccgagtctcccaccatgccaaactaccactggtgggttgagc

SEQ ID NO: 389697 - DNA, 57 bp, Artificial
  Synthetic oligonucleotide
cttgtgcttcaggtctggactcaaccaacccctaatagttgctacatcgaagttaac

SEQ ID NO: 389698 - DNA, 55 bp, Artificial
  Synthetic oligonucleotide
cttgtgcttgtggtaacaatcatagcagtcattagcacttccttagtgaggactg

SEQ ID NO: 389699 - DNA, 55 bp, Artificial
  Synthetic oligonucleotide
cttgtgcttttattcggaggaatccccaacagagtacacatgtattagcccaaat

SEQ ID NO: 389700 - DNA, 51 bp, Artificial
  Synthetic oligonucleotide
cttgtggaggagcttggatgttatattcctggttcacaactgagatgaata

SEQ ID NO: 389701 - DNA, 55 bp, Artificial
  Synthetic oligonucleotide
cttgtggatacactgtcatacggtcatcgactgttaaacgcctacgaaacgccag

SEQ ID NO: 389702 - DNA, 55 bp, Artificial
  Synthetic oligonucleotide
cttgtggcccaagattcaccgggccttagttcgattgccgaatggagggctgacc

SEQ ID NO: 389703 - DNA, 60 bp, Artificial
  Synthetic oligonucleotide
cttgtgggaagtgttcatgggagatggtgatgtcgccgctttgagtttaaacatgctacg

SEQ ID NO: 389704 - DNA, 57 bp, Artificial
  Synthetic oligonucleotide
cttgtgggcgaataatccaaccatacgtcctttgttgcatgccgtgttccaggcgtt

SEQ ID NO: 389705 - DNA, 55 bp, Artificial
  Synthetic oligonucleotide
cttgtgggtggagcccaaggttacatttcggcatgccgttggtgggttcccaatc

SEQ ID NO: 389706 - DNA, 60 bp, Artificial
  Synthetic oligonucleotide
cttgtgggtgtctctgatggcaccctggtatcatataaaaccttagtgtcagcactcggg

SEQ ID NO: 389707 - DNA, 55 bp, Artificial
  Synthetic oligonucleotide
cttgtggtagacatatagcgagcataacacgcacagcatgggcaataatggaggg

SEQ ID NO: 389708 - DNA, 55 bp, Artificial
  Synthetic oligonucleotide
cttgtggtattgcctcttgtggctctacctgggtactccctgggtggtcctggct

SEQ ID NO: 389709 - DNA, 55 bp, Artificial
  Synthetic oligonucleotide
cttgtggtattgtgcccgcacagaacgtctgtggcccggtattctgcttcacccc

SEQ ID NO: 389710 - DNA, 60 bp, Artificial
  Synthetic oligonucleotide
cttgtggtcattcaatgaacatcagcttacaacatctacaaaacccccttgcttgagagt

SEQ ID NO: 389711 - DNA, 60 bp, Artificial
  Synthetic oligonucleotide
cttgtggtgtcaatctgctttggtgcagttctctggccagaagcaagttgcactactggt

SEQ ID NO: 389712 - DNA, 60 bp, Artificial
  Synthetic oligonucleotide
cttgtgtcaaataagcttacaagcaccatatttaccatcaacaatagcttcagaccaata

SEQ ID NO: 389713 - DNA, 51 bp, Artificial
  Synthetic oligonucleotide
cttgtgtcgctcatggtggagggggggcctgctgcatacagatgggggtat

SEQ ID NO: 389714 - DNA, 59 bp, Artificial
  Synthetic oligonucleotide
cttgtgtctgcacaggaacccctttttgatgtgtacgcagatttggaggacgcccctga

SEQ ID NO: 389715 - DNA, 60 bp, Artificial
  Synthetic oligonucleotide
cttgtgtgactctgttttgcagttcgtctctaaatgatttgaacattctccctactgcgg

SEQ ID NO: 389716 - DNA, 60 bp, Artificial
  Synthetic oligonucleotide
cttgtgtgcgacaagaggccgtccgaattctcatctagcgatcccattgtcccttacgga

SEQ ID NO: 389717 - DNA, 54 bp, Artificial
  Synthetic oligonucleotide
cttgtgtgcgtacgcgttggaaggggttaaatgcgggacgcagttcgactttta

SEQ ID NO: 389718 - DNA, 60 bp, Artificial
  Synthetic oligonucleotide
cttgtgtgtacggacctgctgtggccagtggatatgattttgagagggaagggtactctc

SEQ ID NO: 389719 - DNA, 59 bp, Artificial
  Synthetic oligonucleotide
cttgtgtgtacggacttgctgtagccagcggatacgattttgaaagagagggatactcc

SEQ ID NO: 389720 - DNA, 59 bp, Artificial
  Synthetic oligonucleotide
cttgtgtgtttagtagacgtttgagtcgagtcatggacaaatccgaatcaaccagtgcc

SEQ ID NO: 389721 - DNA, 55 bp, Artificial
  Synthetic oligonucleotide
cttgtgttggaccttgattggtacttgaatagagaggctctgtgagtgtgacgaa

SEQ ID NO: 389722 - DNA, 55 bp, Artificial
  Synthetic oligonucleotide
cttgtgttggggtttatggctctggttactgggagccagtgaatggacccgagga

SEQ ID NO: 389723 - DNA, 57 bp, Artificial
  Synthetic oligonucleotide
cttgttaaagcctactaggcataagtcgtcaggcagaaaatttcgtgttatctacga

SEQ ID NO: 389724 - DNA, 51 bp, Artificial
  Synthetic oligonucleotide
cttgttaaggttgaggtagtacctcaacttccgaagagcaggatagcgcct

SEQ ID NO: 389725 - DNA, 59 bp, Artificial
  Synthetic oligonucleotide
cttgttactagaattcggacagtgagtcttgtcgatacacaggttgctttaacacttgc

SEQ ID NO: 389726 - DNA, 59 bp, Artificial
  Synthetic oligonucleotide
cttgttagatagattagacgccacaaatgtaaatcaatggaaatcacttattaaccata

SEQ ID NO: 389727 - DNA, 60 bp, Artificial
  Synthetic oligonucleotide
cttgttagattatgtacatggttatgcaatgattttggcatcatgtaaattgctaaatac

SEQ ID NO: 389728 - DNA, 57 bp, Artificial
  Synthetic oligonucleotide
cttgttagcaaaatctgtgttcaacagtctatatgcgtctccacagctcgagggatt

SEQ ID NO: 389729 - DNA, 55 bp, Artificial
  Synthetic oligonucleotide
cttgttagcaaaatctgtgtttaacagtttatatgcatctccacaactcgaaggg

SEQ ID NO: 389730 - DNA, 55 bp, Artificial
  Synthetic oligonucleotide
cttgttagcaaagtccgttttcaacagtctatatgcatctccacagcttgagggg

SEQ ID NO: 389731 - DNA, 55 bp, Artificial
  Synthetic oligonucleotide
cttgttatcaggagatgttgagactaaccctggacccgttcaatcgcgccccgtg

SEQ ID NO: 389732 - DNA, 60 bp, Artificial
  Synthetic oligonucleotide
cttgttatcatggtttacaacgagctcataaacccttatgagcaatctgaacccaagtca

SEQ ID NO: 389733 - DNA, 57 bp, Artificial
  Synthetic oligonucleotide
cttgttatcctacctttagacaggtagaagattgtgggagatgggcgcgagaaactc

SEQ ID NO: 389734 - DNA, 55 bp, Artificial
  Synthetic oligonucleotide
cttgttatggggagcagacttgggcacggtagttcgggccgcacgggcttttggc

SEQ ID NO: 389735 - DNA, 54 bp, Artificial
  Synthetic oligonucleotide
cttgttcacctctctttttaacatggaagccaaagttatggagccctccgtccc

SEQ ID NO: 389736 - DNA, 60 bp, Artificial
  Synthetic oligonucleotide
cttgttcagaatggtatgccattaaaagatggagcgaatctgtatgtttataagcgtgtt

SEQ ID NO: 389737 - DNA, 60 bp, Artificial
  Synthetic oligonucleotide
cttgttcagcagtaagtctcacatctatgattgaaatatccctcctggcatgcatttcca

SEQ ID NO: 389738 - DNA, 58 bp, Artificial
  Synthetic oligonucleotide
cttgttcccaagacaggtcatcaggattccacaactttaccgagagacgagttcatta

SEQ ID NO: 389739 - DNA, 60 bp, Artificial
  Synthetic oligonucleotide
cttgttcccatgtgggacaattgtgctaccgccaagatgcgtttctctgaagacgtagga

SEQ ID NO: 389740 - DNA, 57 bp, Artificial
  Synthetic oligonucleotide
cttgttccttaaagtgcccatacctggggtgccaatcatggacctgcccctatacag

SEQ ID NO: 389741 - DNA, 56 bp, Artificial
  Synthetic oligonucleotide
cttgttcgtaaattacaagtatccagattggagacacacatgacttgctaactttg

SEQ ID NO: 389742 - DNA, 51 bp, Artificial
  Synthetic oligonucleotide
cttgttcgtgatcgacgaccggtagataaaccacaggattttggtgaggta

SEQ ID NO: 389743 - DNA, 55 bp, Artificial
  Synthetic oligonucleotide
cttgttcgtgcaaacaatgagctgggtgatgtgtcactgaaggttaacattgtct

SEQ ID NO: 389744 - DNA, 52 bp, Artificial
  Synthetic oligonucleotide
cttgttctttacctttcttcccttctactcgttaccctcttctgagcctaac

SEQ ID NO: 389745 - DNA, 60 bp, Artificial
  Synthetic oligonucleotide
cttgttgaaattacctcctgagtttgtggagatgtggtttacctcccatgagagatctca

SEQ ID NO: 389746 - DNA, 57 bp, Artificial
  Synthetic oligonucleotide
cttgttgaaccgaacgtatcaaatacgcagagagagtacgttttagatggacagacg

SEQ ID NO: 389747 - DNA, 60 bp, Artificial
  Synthetic oligonucleotide
cttgttgaagatctaatgtgcgaagtaacagaacaaggaatgacacacgagacatggcta

SEQ ID NO: 389748 - DNA, 55 bp, Artificial
  Synthetic oligonucleotide
cttgttgacagacgcacctatcgaagaccaaccacccgtctctcggtacattgcc

SEQ ID NO: 389749 - DNA, 59 bp, Artificial
  Synthetic oligonucleotide
cttgttgactaagttaggtgtagggaacaaccagctcagctcattgattggtagcggct

SEQ ID NO: 389750 - DNA, 55 bp, Artificial
  Synthetic oligonucleotide
cttgttgagcctgaaggtgtgatcatctgtcttgagaagagcgttgaggactttt

SEQ ID NO: 389751 - DNA, 55 bp, Artificial
  Synthetic oligonucleotide
cttgttgattccttttacaatcgctctcatactactcgtatcccgcaagccacac

SEQ ID NO: 389752 - DNA, 55 bp, Artificial
  Synthetic oligonucleotide
cttgttgcccctgacgaaatgcttcgaagttccagacctgttagacccatccgtg

SEQ ID NO: 389753 - DNA, 56 bp, Artificial
  Synthetic oligonucleotide
cttgttgctacttacggattacagcaagattcaatactgtgggtgaaggtatatag

SEQ ID NO: 389754 - DNA, 60 bp, Artificial
  Synthetic oligonucleotide
cttgttggaatgcacagacagcttgggacactgtgacctttcatgtccctgacgttatta

SEQ ID NO: 389755 - DNA, 59 bp, Artificial
  Synthetic oligonucleotide
cttgttggggataccagatcgaagaatcgttgattcttgcattggaatttgccctcgaa

SEQ ID NO: 389756 - DNA, 55 bp, Artificial
  Synthetic oligonucleotide
cttgttggtcaacgtttatggatattgaccgtgactcatgtaacggtgtctatgc

SEQ ID NO: 389757 - DNA, 60 bp, Artificial
  Synthetic oligonucleotide
cttgttgtcccgcctaaactaacttgctgactcacacatcctgcagtgcagctaaacaat

SEQ ID NO: 389758 - DNA, 60 bp, Artificial
  Synthetic oligonucleotide
cttgttgttgtgtcacgcatgatgacgggaaggccttctattctgagcttaaaagtccta

SEQ ID NO: 389759 - DNA, 55 bp, Artificial
  Synthetic oligonucleotide
cttgtttacctctggaggagagaacatacgggcttaactccaacctttgggagca

SEQ ID NO: 389760 - DNA, 51 bp, Artificial
  Synthetic oligonucleotide
cttgtttccctggacaatcactgcaccaacctttgcacgaacacccacaga

SEQ ID NO: 389761 - DNA, 60 bp, Artificial
  Synthetic oligonucleotide
cttgtttcgcatacaacttaccagtaatggctagtaatgtcacgacaagtataatcgcaa

SEQ ID NO: 389762 - DNA, 58 bp, Artificial
  Synthetic oligonucleotide
cttgtttctgggtagagttaatcagagggcaacccaaggagagcacaatctggactag

SEQ ID NO: 389763 - DNA, 57 bp, Artificial
  Synthetic oligonucleotide
cttgtttctgggttgaactgatcaggggacggcccaaccacaatacgatctggacta

SEQ ID NO: 389764 - DNA, 60 bp, Artificial
  Synthetic oligonucleotide
cttgtttgaaattggagatgtctgactcatcgtacatcaattccagtgtatccctgacta

SEQ ID NO: 389765 - DNA, 55 bp, Artificial
  Synthetic oligonucleotide
cttgtttgggaagatagctctcgcgacttgctcgtgtcatctaccaccgcccaag

SEQ ID NO: 389766 - DNA, 58 bp, Artificial
  Synthetic oligonucleotide
cttgtttggtgtctccctctgtcaatcgcatgtcgtgaatctcaatgaccacatgacc

SEQ ID NO: 389767 - DNA, 51 bp, Artificial
  Synthetic oligonucleotide
cttgtttgtacaggatagcaatggcggtcgcgcatactaccagtattttgc

SEQ ID NO: 389768 - DNA, 59 bp, Artificial
  Synthetic oligonucleotide
cttgttttgcgtgttgtgtcccttgttctaggctttctgctaggtatgaggctgaacgc

SEQ ID NO: 389769 - DNA, 55 bp, Artificial
  Synthetic oligonucleotide
cttgttttgtcaagacaaagttagagtagtgcctatacgaacggcgacgcaagaa

SEQ ID NO: 389770 - DNA, 58 bp, Artificial
  Synthetic oligonucleotide
cttgtttttatgtggagctgattagagggaggcctaaagaaagcagcgtactgtggac

SEQ ID NO: 389771 - DNA, 51 bp, Artificial
  Synthetic oligonucleotide
ctttaaaaccccaacccgttgagttgaggtactcatggaaatcctggggga

SEQ ID NO: 389772 - DNA, 53 bp, Artificial
  Synthetic oligonucleotide
ctttaaacgagccctcggggcgcggcctaagcagccgcccccgagggagatac

SEQ ID NO: 389773 - DNA, 51 bp, Artificial
  Synthetic oligonucleotide
ctttaaactgtgttaatgtaagttgcaccaacagcactgggagaaattgct

SEQ ID NO: 389774 - DNA, 55 bp, Artificial
  Synthetic oligonucleotide
ctttaaaggactattcgtcatccgtagaaacgctccaagacgcaatagcggatcc

SEQ ID NO: 389775 - DNA, 57 bp, Artificial
  Synthetic oligonucleotide
ctttaaaggtaggtcctgacataaccagcctccaacagtccaacaggacacatggat

SEQ ID NO: 389776 - DNA, 50 bp, Artificial
  Synthetic oligonucleotide
ctttaaagtctacggcaatatctgctatagggaagggagaaccagtgcag

SEQ ID NO: 389777 - DNA, 57 bp, Artificial
  Synthetic oligonucleotide
ctttaaagtcttgtcgcagcaactttcgcgacttaacaagacattagcaactggtcg

SEQ ID NO: 389778 - DNA, 55 bp, Artificial
  Synthetic oligonucleotide
ctttaaagtgtttcaggtaatgcggatctacgtcatcaatgacgttgtaccacgc

SEQ ID NO: 389779 - DNA, 56 bp, Artificial
  Synthetic oligonucleotide
ctttaaagtgtttgaggaaatgcgggtcgacgtcatcaatgacgttataccaggcg

SEQ ID NO: 389780 - DNA, 56 bp, Artificial
  Synthetic oligonucleotide
ctttaaatctatccctggccgcttggccagtgagggccaccgcgtctgaccccggc

SEQ ID NO: 389781 - DNA, 52 bp, Artificial
  Synthetic oligonucleotide
ctttaaatgggggttacttgctggaatgtggcaagattaccctagtcggtgg

SEQ ID NO: 389782 - DNA, 55 bp, Artificial
  Synthetic oligonucleotide
ctttaaattgtaccgatgctcaagtcaatcagacttggaacaatgtcaccaaggc

SEQ ID NO: 389783 - DNA, 59 bp, Artificial
  Synthetic oligonucleotide
ctttaaattttagcgatggcgtgacacggtcacaccctgaattgacagggtacagatca

SEQ ID NO: 389784 - DNA, 57 bp, Artificial
  Synthetic oligonucleotide
ctttaacactgtgctattgttaatactttgtgtcatcaacaacatcttaagggttaa

SEQ ID NO: 389785 - DNA, 55 bp, Artificial
  Synthetic oligonucleotide
ctttaacagaactatgtatagtgcgctacccattctgccttacacggctaaccgc

SEQ ID NO: 389786 - DNA, 55 bp, Artificial
  Synthetic oligonucleotide
ctttaacagcaataagaaacgtatcactgactgcaaagagagggtttcctcgaac

SEQ ID NO: 389787 - DNA, 55 bp, Artificial
  Synthetic oligonucleotide
ctttaacatccctgattatagaccacagcagctatgtgaaccacggattgacaac

SEQ ID NO: 389788 - DNA, 60 bp, Artificial
  Synthetic oligonucleotide
ctttaacatgcagcgcgcccgtagacgtcctagagcatctgtacaagatatataccgttc

SEQ ID NO: 389789 - DNA, 54 bp, Artificial
  Synthetic oligonucleotide
ctttaaccagaagaatccacatgtgttttacttgtaccgggcggttagccaggc

SEQ ID NO: 389790 - DNA, 53 bp, Artificial
  Synthetic oligonucleotide
ctttaaccatctaacaaagtagttggcctaggccgtccacatgtcagcgcagt

SEQ ID NO: 389791 - DNA, 57 bp, Artificial
  Synthetic oligonucleotide
ctttaaccctattagagtgggtatgtcaatgaacgaggatgggcccttcatcttcgc

SEQ ID NO: 389792 - DNA, 59 bp, Artificial
  Synthetic oligonucleotide
ctttaacgaacgctcgtctctataggcctgactacagtgaggatttcaatttctcactg

SEQ ID NO: 389793 - DNA, 56 bp, Artificial
  Synthetic oligonucleotide
ctttaacgtgggattagcgaacgacatatattttgcggtcaccaaatatcgcacac

SEQ ID NO: 389794 - DNA, 57 bp, Artificial
  Synthetic oligonucleotide
ctttaactggggactcagagcactttgtatactgagagataacatgctattaggaac

SEQ ID NO: 389795 - DNA, 55 bp, Artificial
  Synthetic oligonucleotide
ctttaagacggaagaccttggtgagggtggccgttccccagtataggcatgcgtg

SEQ ID NO: 389796 - DNA, 59 bp, Artificial
  Synthetic oligonucleotide
ctttaagactagttccgcacaagcgtataggtcaaggaactttctgattactgcacaca

SEQ ID NO: 389797 - DNA, 56 bp, Artificial
  Synthetic oligonucleotide
ctttaagataagtgacgagaacatctttaaccaatttgttttgaatcgtgatctga

SEQ ID NO: 389798 - DNA, 55 bp, Artificial
  Synthetic oligonucleotide
ctttaagcccccttgaatgctttcctctattatatggtatggatccctagttaag

SEQ ID NO: 389799 - DNA, 55 bp, Artificial
  Synthetic oligonucleotide
ctttaagctcaactttcaataaagcgatgcctacaatgcacactggtcggtgtcc

SEQ ID NO: 389800 - DNA, 54 bp, Artificial
  Synthetic oligonucleotide
ctttaagctcacctcccttcctgtgctaatacgcctccctttccggacaacgcc

SEQ ID NO: 389801 - DNA, 58 bp, Artificial
  Synthetic oligonucleotide
ctttaaggaacatccaatacgtctgaccactgagaacgtcactcagtatgttaccaaa

SEQ ID NO: 389802 - DNA, 50 bp, Artificial
  Synthetic oligonucleotide
ctttaaggaactggtacttgaaatcgatgtcatcacaggccccctgttcc

SEQ ID NO: 389803 - DNA, 57 bp, Artificial
  Synthetic oligonucleotide
ctttaaggacctatcctacagatttagctccagacgtctcactatgcaggtttttag

SEQ ID NO: 389804 - DNA, 58 bp, Artificial
  Synthetic oligonucleotide
ctttaagggtgatgattcggtggtcctctgtagtgactaccgacagagtcgtaatgcg

SEQ ID NO: 389805 - DNA, 56 bp, Artificial
  Synthetic oligonucleotide
ctttaagtaagttcaaggaagatgtagaatctgctttacacgtgttcaaaacaaca

SEQ ID NO: 389806 - DNA, 54 bp, Artificial
  Synthetic oligonucleotide
ctttaagtagtggttatggttatttaccagtggtatcacaaacagataccctgg

SEQ ID NO: 389807 - DNA, 51 bp, Artificial
  Synthetic oligonucleotide
ctttaagtccctactatattacattgtactagcgtaggccacgtaggcccg

SEQ ID NO: 389808 - DNA, 57 bp, Artificial
  Synthetic oligonucleotide
ctttaagtctttgcgaccgtgtgtatctactaagcgccttatatcatctgaaccttg

SEQ ID NO: 389809 - DNA, 53 bp, Artificial
  Synthetic oligonucleotide
ctttaagtgtgcttgcccctccagggttaattttaaggttggtgatagccaac

SEQ ID NO: 389810 - DNA, 58 bp, Artificial
  Synthetic oligonucleotide
ctttaatagttgaacctgtatcgaagagtgttgtcgacaaagtgtgtgacattttgtc

SEQ ID NO: 389811 - DNA, 56 bp, Artificial
  Synthetic oligonucleotide
ctttaatataaaatggggggcaagtggtcaaaaagcagcatagtaggatggccggc

SEQ ID NO: 389812 - DNA, 56 bp, Artificial
  Synthetic oligonucleotide
ctttaatcattaacccccaataagaaatgttgggcctcaatcactattcctgatag

SEQ ID NO: 389813 - DNA, 54 bp, Artificial
  Synthetic oligonucleotide
ctttaatccggaccacatcgacttggttatgcttgggaagttgttattaccaac

SEQ ID NO: 389814 - DNA, 60 bp, Artificial
  Synthetic oligonucleotide
ctttaatctaatactaatgaacatggatcaaattgaacgtgcctcagataaaattgctca

SEQ ID NO: 389815 - DNA, 60 bp, Artificial
  Synthetic oligonucleotide
ctttaatgcgcaagatgccacgattgcacgtacagataccactatattgctgcgaacgat

SEQ ID NO: 389816 - DNA, 57 bp, Artificial
  Synthetic oligonucleotide
ctttaatgtcccatcatgtataaacttaacttagtataagtaattgtacagagccag

SEQ ID NO: 389817 - DNA, 60 bp, Artificial
  Synthetic oligonucleotide
ctttaattgcaagctgtctgagtgggtcataccaggattgccagtacacaacagagattg

SEQ ID NO: 389818 - DNA, 53 bp, Artificial
  Synthetic oligonucleotide
ctttaatttcaatggggcttttgtagctccagaccgtgtaagcttctttaaag

SEQ ID NO: 389819 - DNA, 53 bp, Artificial
  Synthetic oligonucleotide
ctttaatttgaaccggctttccatatttacagttggactgccagtccctttgg

SEQ ID NO: 389820 - DNA, 52 bp, Artificial
  Synthetic oligonucleotide
ctttaatttgaacgggtttcccgtatttcgtgtttgattgccagtccctctg

SEQ ID NO: 389821 - DNA, 55 bp, Artificial
  Synthetic oligonucleotide
ctttaatttgaactggcttcccgtatttgcaatttgattgccagtccttttgggc

SEQ ID NO: 389822 - DNA, 53 bp, Artificial
  Synthetic oligonucleotide
ctttaattttgcatgggcttcccgtagtatttgaaagccagtccctttgggcc

SEQ ID NO: 389823 - DNA, 55 bp, Artificial
  Synthetic oligonucleotide
ctttacaaacaagtgtagacaatgcacttgtgggcagtatgaagatgcagctgga

SEQ ID NO: 389824 - DNA, 58 bp, Artificial
  Synthetic oligonucleotide
ctttacaaaggtagcagtggtttaacattcatgcaaaatgaagagttattcatcgtta

SEQ ID NO: 389825 - DNA, 50 bp, Artificial
  Synthetic oligonucleotide
ctttacaacggtgagaaaaagaccttctattctaggcccaacaaccacga

SEQ ID NO: 389826 - DNA, 60 bp, Artificial
  Synthetic oligonucleotide
ctttacaagtggccagctagctatcactgaaaagacagcaagacaatggtgtctcgatgc

SEQ ID NO: 389827 - DNA, 58 bp, Artificial
  Synthetic oligonucleotide
ctttacaatcacccacagtggaagcttgtggttactcagacaggattatacaaataac

SEQ ID NO: 389828 - DNA, 55 bp, Artificial
  Synthetic oligonucleotide
ctttacaatctggtagtgttcgccgttaaatatgagcgtcacttgcgtcaccacg

SEQ ID NO: 389829 - DNA, 55 bp, Artificial
  Synthetic oligonucleotide
ctttacaatggtgtaatggtaacctttccgacaattgttatcaatccgtgaggaa

SEQ ID NO: 389830 - DNA, 58 bp, Artificial
  Synthetic oligonucleotide
ctttacaattattgtaagagtgtgtaaagaccagtgtgcccttaggctccagtatata

SEQ ID NO: 389831 - DNA, 60 bp, Artificial
  Synthetic oligonucleotide
ctttacacaaagtgataagttgacaatgctcagtagaggttatcaggatgtgaatacagt

SEQ ID NO: 389832 - DNA, 54 bp, Artificial
  Synthetic oligonucleotide
ctttacacccgtacttggtcggaggttgatgccgtctctagcccagcccggccc

SEQ ID NO: 389833 - DNA, 55 bp, Artificial
  Synthetic oligonucleotide
ctttacacgcagattgactcacttagtatgaacgggcaaacatcacagagtaggc

SEQ ID NO: 389834 - DNA, 51 bp, Artificial
  Synthetic oligonucleotide
ctttacactaagcattgttgcccactactctgtgggaaagcggtaaagttg

SEQ ID NO: 389835 - DNA, 57 bp, Artificial
  Synthetic oligonucleotide
ctttacacttcagtaggggctgtacccgggcggtcccactcttcacaggaatctgca

SEQ ID NO: 389836 - DNA, 58 bp, Artificial
  Synthetic oligonucleotide
ctttacacttgctgaatcgggcaaaggaattttgagcgacactgtaggcgcgtaatta

SEQ ID NO: 389837 - DNA, 59 bp, Artificial
  Synthetic oligonucleotide
ctttacagccctgtatccgtggacacctcagccctggatctttaccgccgagatctagc

SEQ ID NO: 389838 - DNA, 50 bp, Artificial
  Synthetic oligonucleotide
ctttacagctaccggtcaatccacaagtagtgtgggatgtaccgcgcagt

SEQ ID NO: 389839 - DNA, 55 bp, Artificial
  Synthetic oligonucleotide
ctttacagctgctgtcaccagcccactaaccactagccaaaccctcctcttcaat

SEQ ID NO: 389840 - DNA, 60 bp, Artificial
  Synthetic oligonucleotide
ctttacagtatgggtaaccctgctaatcattgaatcaatcatgtgggcagctagtgcatc

SEQ ID NO: 389841 - DNA, 53 bp, Artificial
  Synthetic oligonucleotide
ctttacattaacatgtcaagtctccctaacggagtgttcaacattcctgacct

SEQ ID NO: 389842 - DNA, 55 bp, Artificial
  Synthetic oligonucleotide
ctttacattatcaggaagatggccagttacagtactacatacagacaatggcagc

SEQ ID NO: 389843 - DNA, 60 bp, Artificial
  Synthetic oligonucleotide
ctttacattcgagacgtgggatccgttagacactccatattctacaacgcatcataagga

SEQ ID NO: 389844 - DNA, 55 bp, Artificial
  Synthetic oligonucleotide
ctttacattctccctttgctcaactgcaaaagaggcaggatttcaacatccggcc

SEQ ID NO: 389845 - DNA, 52 bp, Artificial
  Synthetic oligonucleotide
ctttaccaccttacttcacgaaccaaagttgttggtactccagttaccttca

SEQ ID NO: 389846 - DNA, 55 bp, Artificial
  Synthetic oligonucleotide
ctttaccagatgcagttgatccccagactgaagctcttgtctgaatgatcgactc

SEQ ID NO: 389847 - DNA, 55 bp, Artificial
  Synthetic oligonucleotide
ctttaccagcgctgcagttaaagcagcctgttggtgggccaatgtccagcaggaa

SEQ ID NO: 389848 - DNA, 55 bp, Artificial
  Synthetic oligonucleotide
ctttaccgaagtttcgcgtaaacgaaagcggaataacgagcggatcagatgcggc

SEQ ID NO: 389849 - DNA, 55 bp, Artificial
  Synthetic oligonucleotide
ctttaccgcattatgtctcgtgttagaaatactttggaaaagatcagagaccctc

SEQ ID NO: 389850 - DNA, 55 bp, Artificial
  Synthetic oligonucleotide
ctttacctaatgaacaggtacaacaaatcgcagaaggcgtctccaacttgacaga

SEQ ID NO: 389851 - DNA, 55 bp, Artificial
  Synthetic oligonucleotide
ctttacctactcaaagatcttgagcgaactatcactgcgccagatcccgagtgaa

SEQ ID NO: 389852 - DNA, 58 bp, Artificial
  Synthetic oligonucleotide
ctttacctactccagacctcgctcttgcacgtcccttactttgtgagggcccatgcac

SEQ ID NO: 389853 - DNA, 58 bp, Artificial
  Synthetic oligonucleotide
ctttacctcctatgggctgatctgtatggatttggatctaaattggattatcctttac

SEQ ID NO: 389854 - DNA, 60 bp, Artificial
  Synthetic oligonucleotide
ctttacctgcgttgggtgaacgccgtgtgcggtgacgcataatccctcagagatcacaat

SEQ ID NO: 389855 - DNA, 60 bp, Artificial
  Synthetic oligonucleotide
ctttacctgctttggctttgggtgctcaaagattgtatcttacttctgaaggctcagcga

SEQ ID NO: 389856 - DNA, 57 bp, Artificial
  Synthetic oligonucleotide
ctttacctttgggtgctgagagatcttatcttagttctgaaggcaagacgcgggagg

SEQ ID NO: 389857 - DNA, 52 bp, Artificial
  Synthetic oligonucleotide
ctttacgaccagttgtagaacacgcacaaccgaccttgcgacaaataatggc

SEQ ID NO: 389858 - DNA, 57 bp, Artificial
  Synthetic oligonucleotide
ctttacgagatttcaccctggcgatgcgaaaaaacgacagaaagccgacgatacaca

SEQ ID NO: 389859 - DNA, 60 bp, Artificial
  Synthetic oligonucleotide
ctttacgatgggcacaagccgacaattgatatatgaagcgtctctcgcaacatacaaaac

SEQ ID NO: 389860 - DNA, 54 bp, Artificial
  Synthetic oligonucleotide
ctttacgcaatcctgcgtaaatgctggtatagggtgtacttcggatttccgagc

SEQ ID NO: 389861 - DNA, 50 bp, Artificial
  Synthetic oligonucleotide
ctttacgcatcaacatcagagcacgtgaacgtgctactgacgcgtacgga

SEQ ID NO: 389862 - DNA, 56 bp, Artificial
  Synthetic oligonucleotide
ctttacgcgtacgcccgactaactgtagatgacaccttcgaactcatggacgaaaa

SEQ ID NO: 389863 - DNA, 51 bp, Artificial
  Synthetic oligonucleotide
ctttacgcttaggataaagataacaacgtacctcggattccctaaggtact

SEQ ID NO: 389864 - DNA, 54 bp, Artificial
  Synthetic oligonucleotide
ctttacgttagaaataacactgtactatcgtatttagcgaacttggtaatcaag

SEQ ID NO: 389865 - DNA, 55 bp, Artificial
  Synthetic oligonucleotide
ctttactaacatcaggtactggtgttccaccatcagctccaaggtcttcggatcc

SEQ ID NO: 389866 - DNA, 55 bp, Artificial
  Synthetic oligonucleotide
ctttactagcttcgaaccactagacggacgatctgttgtgtggccgtgctacgat

SEQ ID NO: 389867 - DNA, 55 bp, Artificial
  Synthetic oligonucleotide
ctttactatcttgttacaaagaagaagcacgatgctaatgacaaccccacgtctc

SEQ ID NO: 389868 - DNA, 60 bp, Artificial
  Synthetic oligonucleotide
ctttactatgacggctgataagtcgtgcgtggagcactcagaaaattcgctaaaccaata

SEQ ID NO: 389869 - DNA, 60 bp, Artificial
  Synthetic oligonucleotide
ctttactatgtatgataatgagcccactacagctaagatccgaatggatctgagagatag

SEQ ID NO: 389870 - DNA, 52 bp, Artificial
  Synthetic oligonucleotide
ctttactcgtaaccgggttatgagtcaagggtggatttcgaatcccctcgcc

SEQ ID NO: 389871 - DNA, 60 bp, Artificial
  Synthetic oligonucleotide
ctttactctggtagatatgttctatcaagattggattcctactctaatattagtagattc

SEQ ID NO: 389872 - DNA, 59 bp, Artificial
  Synthetic oligonucleotide
ctttactgactttatagatgactgtgcaaaggaatttagcgaggaaacgcatacaagcc

SEQ ID NO: 389873 - DNA, 58 bp, Artificial
  Synthetic oligonucleotide
ctttactgtcccaactgaccacgatgcacagaccggctggatacctgtccaaaacctc

SEQ ID NO: 389874 - DNA, 56 bp, Artificial
  Synthetic oligonucleotide
ctttactgtctatactatcgtattcgtatgacaagtataacgcagtagaacggaag

SEQ ID NO: 389875 - DNA, 60 bp, Artificial
  Synthetic oligonucleotide
ctttactgtgtaaagcagccccagagctgtgagcccttgaaccacatcatttagactctc

SEQ ID NO: 389876 - DNA, 51 bp, Artificial
  Synthetic oligonucleotide
ctttactgtgtgcgttggcccggaggcctctagctcagtagggtgtacggc

SEQ ID NO: 389877 - DNA, 54 bp, Artificial
  Synthetic oligonucleotide
ctttacttaatgtacacttcccgaacggacggtggatgcattctgtccccgcgg

SEQ ID NO: 389878 - DNA, 51 bp, Artificial
  Synthetic oligonucleotide
ctttacttgaaaccgttgctcaaattaaacacatctcagacacggcccaat

SEQ ID NO: 389879 - DNA, 54 bp, Artificial
  Synthetic oligonucleotide
ctttacttgagacctggaaggcaccagattatgaccctccggtagtgtccgggt

SEQ ID NO: 389880 - DNA, 55 bp, Artificial
  Synthetic oligonucleotide
ctttagacagagagcactgtggataagtgaggaaatagttctttgactgaactct

SEQ ID NO: 389881 - DNA, 58 bp, Artificial
  Synthetic oligonucleotide
ctttagacaggtagaagattgtgggagatgggcgcgagaagctccgtcttgagaggga

SEQ ID NO: 389882 - DNA, 60 bp, Artificial
  Synthetic oligonucleotide
ctttagacatttgtactactgtttgcaagtatcctgactatttgcaaatggctgctgagc

SEQ ID NO: 389883 - DNA, 60 bp, Artificial
  Synthetic oligonucleotide
ctttagagagctcaaccgttatggcagctttcagtgggaacaatgagggacgcacatcag

SEQ ID NO: 389884 - DNA, 60 bp, Artificial
  Synthetic oligonucleotide
ctttagagattatgtagatcggttctataaaactctaagagccgagcaagcttcacagga

SEQ ID NO: 389885 - DNA, 55 bp, Artificial
  Synthetic oligonucleotide
ctttagagcacacattcggagaagcgtacacaaagagaggcaaagtcaagggaag

SEQ ID NO: 389886 - DNA, 55 bp, Artificial
  Synthetic oligonucleotide
ctttagaggtcctggcaatgtctcttggggcatcgagctcacattgaccaacaac

SEQ ID NO: 389887 - DNA, 56 bp, Artificial
  Synthetic oligonucleotide
ctttagatacggtctgaagagagggccctctacggaaggagtgccggagtctatga

SEQ ID NO: 389888 - DNA, 60 bp, Artificial
  Synthetic oligonucleotide
ctttagatcagggagtcttgctttggaggcactctcaaaaatgatgcagtccataagtgc

SEQ ID NO: 389889 - DNA, 57 bp, Artificial
  Synthetic oligonucleotide
ctttagatgtggccaatgatataacacgtggtgggtcattttagacgcttttatcct

SEQ ID NO: 389890 - DNA, 55 bp, Artificial
  Synthetic oligonucleotide
ctttagattcggcgctcttatcagaccctggcgctttaactaaagaggtttcata

SEQ ID NO: 389891 - DNA, 59 bp, Artificial
  Synthetic oligonucleotide
ctttagattggctcaaggtcgggcacatactcaataaagggagtggtgagtatgtgact

SEQ ID NO: 389892 - DNA, 55 bp, Artificial
  Synthetic oligonucleotide
ctttagattgtaccaacgctaatttgaccaatgtaagtaacaaaggcaatgtccc

SEQ ID NO: 389893 - DNA, 54 bp, Artificial
  Synthetic oligonucleotide
ctttagcccacggcccaggcccatgttttgcttattgggccgacttttgaccca

SEQ ID NO: 389894 - DNA, 54 bp, Artificial
  Synthetic oligonucleotide
ctttagccgcgaactatacgttagtttacaattccagcccctttatagcgcgga

SEQ ID NO: 389895 - DNA, 59 bp, Artificial
  Synthetic oligonucleotide
ctttagcggacagtatcttaatcgtatttcgtggcccgatgatggtacgttgcgtgcca

SEQ ID NO: 389896 - DNA, 58 bp, Artificial
  Synthetic oligonucleotide
ctttagcgtttgggagtctcgaaacatctcagtgtgtgttgagtgggaagagcccgaa

SEQ ID NO: 389897 - DNA, 58 bp, Artificial
  Synthetic oligonucleotide
ctttagctaagttgagacaattaagcgattcttccccaagttcagatgagcttctact

SEQ ID NO: 389898 - DNA, 55 bp, Artificial
  Synthetic oligonucleotide
ctttagcttcggaaagcgtgtttaagctctttactgacggcctctccgccgtgct

SEQ ID NO: 389899 - DNA, 57 bp, Artificial
  Synthetic oligonucleotide
ctttagctttggaggcttcactttcaaaagaacaagtggatcatccgtcaagaaaga

SEQ ID NO: 389900 - DNA, 54 bp, Artificial
  Synthetic oligonucleotide
ctttaggaagctacctatgggagtgggccttagcccgtttctcttggctcagtt

SEQ ID NO: 389901 - DNA, 55 bp, Artificial
  Synthetic oligonucleotide
ctttaggcgatggcactaatgtagacgttaaggacgcaacaggcttatttgctgg

SEQ ID NO: 389902 - DNA, 53 bp, Artificial
  Synthetic oligonucleotide
ctttaggggctagttccctaattacattaagagcttccgacttacttcctgtg

SEQ ID NO: 389903 - DNA, 55 bp, Artificial
  Synthetic oligonucleotide
ctttagggtcggggtgattatgatcagagactaagagcgcgaaggcctatcagtg

SEQ ID NO: 389904 - DNA, 55 bp, Artificial
  Synthetic oligonucleotide
ctttaggtacagggtgacgacctacaaaggatggtgcggctcggccctggtctgt

SEQ ID NO: 389905 - DNA, 59 bp, Artificial
  Synthetic oligonucleotide
ctttaggtcaactaagtgtcaaactctgtcccacacaaggatgggtcagattgtgacaa

SEQ ID NO: 389906 - DNA, 51 bp, Artificial
  Synthetic oligonucleotide
ctttaggtggaagtggcctaacaacctggcgctgtctactgggctaatcag

SEQ ID NO: 389907 - DNA, 54 bp, Artificial
  Synthetic oligonucleotide
ctttagtaaatagggttaggcagggatattcacctctgtcgtttcagaccctcc

SEQ ID NO: 389908 - DNA, 56 bp, Artificial
  Synthetic oligonucleotide
ctttagtaactctatcaagatcgagtataatatacccacagtcgtgcaagtaatcc

SEQ ID NO: 389909 - DNA, 53 bp, Artificial
  Synthetic oligonucleotide
ctttagtacgcgtcaaccactttgtcaaaatggtatccaaaggttctggtaac

SEQ ID NO: 389910 - DNA, 55 bp, Artificial
  Synthetic oligonucleotide
ctttagtatacctgtgggtgcatggccagttatgaatggaggtgccgtttcgttg

SEQ ID NO: 389911 - DNA, 59 bp, Artificial
  Synthetic oligonucleotide
ctttagtatcaacgcattcgtcgtggcattggaacgtccttcataccttccattacaga

SEQ ID NO: 389912 - DNA, 55 bp, Artificial
  Synthetic oligonucleotide
ctttagtatggagctgcccagcttcggagtatctgggattaatgaatctgccgac

SEQ ID NO: 389913 - DNA, 55 bp, Artificial
  Synthetic oligonucleotide
ctttagtattttcggtgcgtattagtatacgtgtaagtgtctgtctgtacatatt

SEQ ID NO: 389914 - DNA, 55 bp, Artificial
  Synthetic oligonucleotide
ctttagtcacaattctttgtgttataacagcaccccagtggagcacaatcagaat

SEQ ID NO: 389915 - DNA, 60 bp, Artificial
  Synthetic oligonucleotide
ctttagtcactgatcctaatgctccgtgccaagcctttatggttgtcgctaatgccatgg

SEQ ID NO: 389916 - DNA, 53 bp, Artificial
  Synthetic oligonucleotide
ctttagtcataagccagatactgtatgatatgggctcaggtctcgttaagaac

SEQ ID NO: 389917 - DNA, 60 bp, Artificial
  Synthetic oligonucleotide
ctttagtgacaatgccatgatggcctactgttttgatatgtccaccgctgagctagctat

SEQ ID NO: 389918 - DNA, 55 bp, Artificial
  Synthetic oligonucleotide
ctttagtgagcgactgtttccttgaattttacagcgagttcatgatgggctacag

SEQ ID NO: 389919 - DNA, 60 bp, Artificial
  Synthetic oligonucleotide
ctttagtgatcaaatcgagcaggaagcagacaatatgatcacagaaatgctgagaaagga

SEQ ID NO: 389920 - DNA, 53 bp, Artificial
  Synthetic oligonucleotide
ctttagtgctttcgttgcgtattagtatataggtatatgtgagtctgtacata

SEQ ID NO: 389921 - DNA, 55 bp, Artificial
  Synthetic oligonucleotide
ctttagtggcgccattttcaaagtccataccgttgcgtctatttctagacccgtc

SEQ ID NO: 389922 - DNA, 55 bp, Artificial
  Synthetic oligonucleotide
ctttagtgggaccctcagatattccagtcacatggtatgatagcactggattaca

SEQ ID NO: 389923 - DNA, 56 bp, Artificial
  Synthetic oligonucleotide
ctttagtgtctttccaaccgacatatgattgtcccatgaagacgattgggaatcgg

SEQ ID NO: 389924 - DNA, 60 bp, Artificial
  Synthetic oligonucleotide
ctttataacgacaatgctttactcggtagtgcatcaataaagataatgttaggcgatcta

SEQ ID NO: 389925 - DNA, 56 bp, Artificial
  Synthetic oligonucleotide
ctttataagcggatatcaaaacatttggtcacatttaaaggtcagccttataattg

SEQ ID NO: 389926 - DNA, 59 bp, Artificial
  Synthetic oligonucleotide
ctttataatcgtatctgtaggtcaaggcataacgtcacaaatacagccgattggtcaac

SEQ ID NO: 389927 - DNA, 57 bp, Artificial
  Synthetic oligonucleotide
ctttatacacggtattctataccgttggataaagcttatcgcactctatcttgaatt

SEQ ID NO: 389928 - DNA, 57 bp, Artificial
  Synthetic oligonucleotide
ctttatacagaatcagcaactcctaaacctatggggctgtaagggaagactaatctg

SEQ ID NO: 389929 - DNA, 53 bp, Artificial
  Synthetic oligonucleotide
ctttataccaggggaagttaaaaacttggtggagttatgccaagttgatacca

SEQ ID NO: 389930 - DNA, 55 bp, Artificial
  Synthetic oligonucleotide
ctttatacgatgacgtaggaccaggattgcagaggaagatagtgggtattccacc

SEQ ID NO: 389931 - DNA, 60 bp, Artificial
  Synthetic oligonucleotide
ctttatacggatgtaatgcgctatgtccttgggagtcagcatctgtgtgagtggttccta

SEQ ID NO: 389932 - DNA, 49 bp, Artificial
  Synthetic oligonucleotide
ctttatacgtaaataaagggttcacccggttttctgagcatttccgggt

SEQ ID NO: 389933 - DNA, 58 bp, Artificial
  Synthetic oligonucleotide
ctttatagaagaagaatgagggttctcaacatactagttcgctggtatgtcctattcc

SEQ ID NO: 389934 - DNA, 55 bp, Artificial
  Synthetic oligonucleotide
ctttatagatgacacatgtggaagtgtgcagacaggggacgaggcacctggggcg

SEQ ID NO: 389935 - DNA, 55 bp, Artificial
  Synthetic oligonucleotide
ctttatagatggagttcaagcggcatttgagactcggaaaccttttctgaaggga

SEQ ID NO: 389936 - DNA, 57 bp, Artificial
  Synthetic oligonucleotide
ctttatagccgccgtaagtgggctaggcctaatgttctattgggccgctatgagaaa

SEQ ID NO: 389937 - DNA, 56 bp, Artificial
  Synthetic oligonucleotide
ctttatagctggaattgggccctggattgcaaaggaagattgttgggatcccgcct

SEQ ID NO: 389938 - DNA, 55 bp, Artificial
  Synthetic oligonucleotide
ctttatagctggctccctctcctggattgcagagcacgattgttggtatcccacc

SEQ ID NO: 389939 - DNA, 56 bp, Artificial
  Synthetic oligonucleotide
ctttatagtgtactttactgtagtaggactaacctatctgttctcaagaaataaga

SEQ ID NO: 389940 - DNA, 56 bp, Artificial
  Synthetic oligonucleotide
ctttatatgcataggcaaagaactgacctgacgacagactcaggcttgatgtgtca

SEQ ID NO: 389941 - DNA, 60 bp, Artificial
  Synthetic oligonucleotide
ctttatatggaccctatggtgatacttgcggaataatgctgctgtacgcacgaagcgcag

SEQ ID NO: 389942 - DNA, 56 bp, Artificial
  Synthetic oligonucleotide
ctttatattaaaattagcaggaaggtggccagtaaaagtactacatacagacaatg

SEQ ID NO: 389943 - DNA, 52 bp, Artificial
  Synthetic oligonucleotide
ctttatattgtaggtgctccttcccagaaatctgatgtatatgtaaatgggt

SEQ ID NO: 389944 - DNA, 55 bp, Artificial
  Synthetic oligonucleotide
ctttatcaattcggtactaaatagagcctacttgttaccttacatcggtactatc

SEQ ID NO: 389945 - DNA, 60 bp, Artificial
  Synthetic oligonucleotide
ctttatcacggtcctgctactcgtgatgcttcctctggatggaacaattcgtggcttagg

SEQ ID NO: 389946 - DNA, 55 bp, Artificial
  Synthetic oligonucleotide
ctttatcacgttgtcaagcaaccggatgcccgtcatattaaacgtacgcatactg

SEQ ID NO: 389947 - DNA, 59 bp, Artificial
  Synthetic oligonucleotide
ctttatcagaggacattgtcctaatgggatcaatggtgtgtactacataaacgacaagg

SEQ ID NO: 389948 - DNA, 59 bp, Artificial
  Synthetic oligonucleotide
ctttatcatgacgatatgtatatccctaaacttgaagaggaacgcatcgtttcaattct

SEQ ID NO: 389949 - DNA, 59 bp, Artificial
  Synthetic oligonucleotide
ctttatcatggagctgaacgttgttggctttacttgaatagtttcaagcatgtttcctc

SEQ ID NO: 389950 - DNA, 58 bp, Artificial
  Synthetic oligonucleotide
ctttatccggatttagaatcattgaagcttgaaagctagttgtcggtttacgcatgtg

SEQ ID NO: 389951 - DNA, 57 bp, Artificial
  Synthetic oligonucleotide
ctttatcctaaggtttcaattacgaatccttggcattggtctgatctagattcaaaa

SEQ ID NO: 389952 - DNA, 52 bp, Artificial
  Synthetic oligonucleotide
ctttatcctgttcgttcttatttacgtcaaagaataaaaccaaaatcgataa

SEQ ID NO: 389953 - DNA, 54 bp, Artificial
  Synthetic oligonucleotide
ctttatcgacggggcttacacctttgcctttgataagtccaccgattttgagtg

SEQ ID NO: 389954 - DNA, 60 bp, Artificial
  Synthetic oligonucleotide
ctttatctaattgtgcctgtgcatgcctgtaacatgatgaagagctgcctaatagcatta

SEQ ID NO: 389955 - DNA, 58 bp, Artificial
  Synthetic oligonucleotide
ctttatctatacgaccattttggtagtttatctgcggatactatctacagtcgtatcg

SEQ ID NO: 389956 - DNA, 55 bp, Artificial
  Synthetic oligonucleotide
ctttatctgcgttacacctttaccctataatgctactgagaactgggaaagaacc

SEQ ID NO: 389957 - DNA, 53 bp, Artificial
  Synthetic oligonucleotide
ctttatgaaacgggagcagatgatctgcaatcccaaataagacattgggaatt

SEQ ID NO: 389958 - DNA, 60 bp, Artificial
  Synthetic oligonucleotide
ctttatgatgcatatcctgctgagactattgcaatgacactggtgaagatggcatatagg

SEQ ID NO: 389959 - DNA, 55 bp, Artificial
  Synthetic oligonucleotide
ctttatgattaacagtctccacagaaactcttgtaagcttcgcatgcatcgagcc

SEQ ID NO: 389960 - DNA, 55 bp, Artificial
  Synthetic oligonucleotide
ctttatgcgagcgtggtatgcatatagagaatcttgacaggctagtatcgcagtt

SEQ ID NO: 389961 - DNA, 55 bp, Artificial
  Synthetic oligonucleotide
ctttatgctgccccactgaatccccttctaccccttcaggatggtaccaacaccc

SEQ ID NO: 389962 - DNA, 55 bp, Artificial
  Synthetic oligonucleotide
ctttatgctgcgcagagaacaggtgtacctgaaatctgttggcatgcaatatggc

SEQ ID NO: 389963 - DNA, 58 bp, Artificial
  Synthetic oligonucleotide
ctttatgcttatattatccaagttcagtcacgactgaaataactgaccccgactggac

SEQ ID NO: 389964 - DNA, 60 bp, Artificial
  Synthetic oligonucleotide
ctttatgtcattcaaccacatgcgctcctcagcgcctaattacttcaaatttgaattata

SEQ ID NO: 389965 - DNA, 55 bp, Artificial
  Synthetic oligonucleotide
ctttatgttggagcagtaccctgagagttctctcctcaggctctgtgtccacaag

SEQ ID NO: 389966 - DNA, 57 bp, Artificial
  Synthetic oligonucleotide
ctttattaaacagactccgaggtgctcttggacactgagggggtgaacagcaacgaa

SEQ ID NO: 389967 - DNA, 55 bp, Artificial
  Synthetic oligonucleotide
ctttattacgagaaggaaataggctgcttattgagagcccattctattgaagctt

SEQ ID NO: 389968 - DNA, 54 bp, Artificial
  Synthetic oligonucleotide
ctttattccaagttactaaagtagacgacagggattgtctaaaagcaagaagaa

SEQ ID NO: 389969 - DNA, 57 bp, Artificial
  Synthetic oligonucleotide
ctttattcgggtatgtggggtatcaagccttgtcaaagaggcatgtcccaatggtta

SEQ ID NO: 389970 - DNA, 56 bp, Artificial
  Synthetic oligonucleotide
ctttattctgggttcacacctaggacgatggtctgccccgacgctctgaaccgacg

SEQ ID NO: 389971 - DNA, 54 bp, Artificial
  Synthetic oligonucleotide
ctttattgacaaccgcgtatggttcccagtctacggaggactcaaacctaattc

SEQ ID NO: 389972 - DNA, 59 bp, Artificial
  Synthetic oligonucleotide
ctttattgaggggggatggacaggaatgattgatggatggtacggttatcatcaccaaa

SEQ ID NO: 389973 - DNA, 59 bp, Artificial
  Synthetic oligonucleotide
ctttattggctaatgagatccaagcacctgctgttacccgattgggcattaaatatgac

SEQ ID NO: 389974 - DNA, 60 bp, Artificial
  Synthetic oligonucleotide
ctttattgtgagggtcagtggcttgctaaatgtgaaccagaccacttgcctaaagacata

SEQ ID NO: 389975 - DNA, 55 bp, Artificial
  Synthetic oligonucleotide
ctttatttagacagactgaaggattggtttgtggatactttactagtagttcgaa

SEQ ID NO: 389976 - DNA, 54 bp, Artificial
  Synthetic oligonucleotide
ctttatttccgtacacttccacgtgtcgctttaatttaaatttgccatgactct

SEQ ID NO: 389977 - DNA, 57 bp, Artificial
  Synthetic oligonucleotide
ctttcaaaacatctcgagaatatcaataggggactgtcccaagtatgtcaaacaggg

SEQ ID NO: 389978 - DNA, 55 bp, Artificial
  Synthetic oligonucleotide
ctttcaaaagtccggcagggacctgatgagccttaccaggacttcgtggcacggc

SEQ ID NO: 389979 - DNA, 51 bp, Artificial
  Synthetic oligonucleotide
ctttcaacaaagcacgctgggtcctgaccgctgtaccttctgcgacgggac

SEQ ID NO: 389980 - DNA, 55 bp, Artificial
  Synthetic oligonucleotide
ctttcaaccaatcagtcaatatggacacgaaattgtacccctggatgttaacccc

SEQ ID NO: 389981 - DNA, 59 bp, Artificial
  Synthetic oligonucleotide
ctttcaacgcaggacgcgttacatgtcaggctgagtgcgacaatttccgtttcttggaa

SEQ ID NO: 389982 - DNA, 53 bp, Artificial
  Synthetic oligonucleotide
ctttcaactgtgcacttaaagaattttcctatgcgggaaagcttatcaaagtg

SEQ ID NO: 389983 - DNA, 56 bp, Artificial
  Synthetic oligonucleotide
ctttcaagccttcactgccgctatgcccagtccaagggttcttccctttccacaag

SEQ ID NO: 389984 - DNA, 60 bp, Artificial
  Synthetic oligonucleotide
ctttcaatacgagaagaagatctctatatgggaggagaccgacaacatcaaagcgactat

SEQ ID NO: 389985 - DNA, 59 bp, Artificial
  Synthetic oligonucleotide
ctttcaatatcacaaggtcttaccaccattgaagagttctttctatgtgaagttcaaca

SEQ ID NO: 389986 - DNA, 53 bp, Artificial
  Synthetic oligonucleotide
ctttcaatatcaccacaagcataagagataaggtgcagaaagaatatgcacac

SEQ ID NO: 389987 - DNA, 60 bp, Artificial
  Synthetic oligonucleotide
ctttcaatatccccacaagtgtaaaagataagatgcagaaacaatatgctctcttctata

SEQ ID NO: 389988 - DNA, 60 bp, Artificial
  Synthetic oligonucleotide
ctttcaatatgctgaaacgcgagagaaaccgcgtgtcaactgtacaacagctgacaaaga

SEQ ID NO: 389989 - DNA, 56 bp, Artificial
  Synthetic oligonucleotide
ctttcaatgtgaccacagtattaagggataggaaacagcaagtatattcacttttt

SEQ ID NO: 389990 - DNA, 54 bp, Artificial
  Synthetic oligonucleotide
ctttcacaagttctattaaactttgatccaaaactgtctcggaaagacttcaaa

SEQ ID NO: 389991 - DNA, 60 bp, Artificial
  Synthetic oligonucleotide
ctttcacaatgccttttgtttcaactgatgagtgggagtccataggggatgatggcataa

SEQ ID NO: 389992 - DNA, 55 bp, Artificial
  Synthetic oligonucleotide
ctttcacacggacgagcgatgggtacaatggatgatgaaagattcaatggacgcg

SEQ ID NO: 389993 - DNA, 55 bp, Artificial
  Synthetic oligonucleotide
ctttcacagaagagagagaacgacgtctcctacccttgattgaccattttctagg

SEQ ID NO: 389994 - DNA, 56 bp, Artificial
  Synthetic oligonucleotide
ctttcacagctgcgccaatcgacacattattggcaggcaaagtttgtgttgatgat

SEQ ID NO: 389995 - DNA, 60 bp, Artificial
  Synthetic oligonucleotide
ctttcacagtacccccactccaggggaagcatcaacccaggaaagcatcatagtgtctca

SEQ ID NO: 389996 - DNA, 55 bp, Artificial
  Synthetic oligonucleotide
ctttcacatcccaaaccctcactataccgtttgcaccttgttggggtctcctcat

SEQ ID NO: 389997 - DNA, 53 bp, Artificial
  Synthetic oligonucleotide
ctttcacattccaaccacacataccacagctgcaagtcagacttccacatttg

SEQ ID NO: 389998 - DNA, 60 bp, Artificial
  Synthetic oligonucleotide
ctttcacccgatgtgataatacggagcgtcagagacgcgaaagatttggagacgcagatt

SEQ ID NO: 389999 - DNA, 57 bp, Artificial
  Synthetic oligonucleotide
ctttcaccgtcccgataacaatgactagtaaacagtgcctggttccatgtttctggc

SEQ ID NO: 390000 - DNA, 55 bp, Artificial
  Synthetic oligonucleotide
ctttcaccgtttatcatgtctgaactagttaaattcgacggctcaatgcaccctc

SEQ ID NO: 390001 - DNA, 55 bp, Artificial
  Synthetic oligonucleotide
ctttcacgaggtggccagtagcggatgtgtcgatcttcttcgaagagtaacaccc

SEQ ID NO: 390002 - DNA, 59 bp, Artificial
  Synthetic oligonucleotide
ctttcacgcagtgcatcttatgcgcacacttcctttgggttctctcgaccctaactttg

SEQ ID NO: 390003 - DNA, 53 bp, Artificial
  Synthetic oligonucleotide
ctttcacgtgccggcccccgtcttcagtttcggagccccgattctgttggccg

SEQ ID NO: 390004 - DNA, 55 bp, Artificial
  Synthetic oligonucleotide
ctttcacgtgccggcccccgtctttagcttcggatcaccgatcctgctagccggg

SEQ ID NO: 390005 - DNA, 53 bp, Artificial
  Synthetic oligonucleotide
ctttcactctaaatgtttagagaactcaaaacgaggattatctttgaaaaacg

SEQ ID NO: 390006 - DNA, 55 bp, Artificial
  Synthetic oligonucleotide
ctttcactctcagtgcttcattagtgaaaccaagccttgatctactcctatgttc

SEQ ID NO: 390007 - DNA, 59 bp, Artificial
  Synthetic oligonucleotide
ctttcactctttcgttgaaggaataacatctagctacttgcagactcccgcttgttgga

SEQ ID NO: 390008 - DNA, 55 bp, Artificial
  Synthetic oligonucleotide
ctttcacttcattgatgagcggggcgagtcagtaattgtcgaatctggcgaccca

SEQ ID NO: 390009 - DNA, 55 bp, Artificial
  Synthetic oligonucleotide
ctttcacttcgtagctcatttggactcaatcacttgctacgacgacctcctaggc

SEQ ID NO: 390010 - DNA, 54 bp, Artificial
  Synthetic oligonucleotide
ctttcactttcaaaatggctccggcgccttttttcaaacgcggtgacgcagaag

SEQ ID NO: 390011 - DNA, 60 bp, Artificial
  Synthetic oligonucleotide
ctttcagaacggttaagatcgaagagcatgtgggtaatgattcagtgttcaagacaaagc

SEQ ID NO: 390012 - DNA, 55 bp, Artificial
  Synthetic oligonucleotide
ctttcagacagctcatgacttgggtagagacagtgataagtgcggtgcggcgggg

SEQ ID NO: 390013 - DNA, 59 bp, Artificial
  Synthetic oligonucleotide
ctttcagacttacctggtttaggttattttgatgatctagcagcagcacaaagtaggtg

SEQ ID NO: 390014 - DNA, 50 bp, Artificial
  Synthetic oligonucleotide
ctttcagagactatgtagataggttctacaaaactctcagagcggaacaa

SEQ ID NO: 390015 - DNA, 60 bp, Artificial
  Synthetic oligonucleotide
ctttcagatgcagtcaagtcactaacagctccttccggtactatcagcctagtggacggt

SEQ ID NO: 390016 - DNA, 57 bp, Artificial
  Synthetic oligonucleotide
ctttcagcaatcggtcatgacaaatgtacatagattgtggtagttatagaaccttac

SEQ ID NO: 390017 - DNA, 60 bp, Artificial
  Synthetic oligonucleotide
ctttcagcactatcacgatcacgtggtctggagcaacagacgtatgacaatcaaaggcta

SEQ ID NO: 390018 - DNA, 55 bp, Artificial
  Synthetic oligonucleotide
ctttcagcctaaaagcggaaagaaatgggcagattactccgaggaggaagacttc

SEQ ID NO: 390019 - DNA, 53 bp, Artificial
  Synthetic oligonucleotide
ctttcagctccctgaatgttcggatggaaatgtgctgacctgtttgtggcgac

SEQ ID NO: 390020 - DNA, 53 bp, Artificial
  Synthetic oligonucleotide
ctttcagctgccttgacaactatgtcactgcaagggccaggtgctacaaattt

SEQ ID NO: 390021 - DNA, 60 bp, Artificial
  Synthetic oligonucleotide
ctttcagctttgcagagtgcctcttacagcagatgtaatggctcatttgaatgtcatgaa

SEQ ID NO: 390022 - DNA, 55 bp, Artificial
  Synthetic oligonucleotide
ctttcaggaagcatgttagaaggttgaatgggtcaccgattgccatcagggaaga

SEQ ID NO: 390023 - DNA, 52 bp, Artificial
  Synthetic oligonucleotide
ctttcagggggtgaaaacatggtaatgcccaagcctcctatagattttctag

SEQ ID NO: 390024 - DNA, 57 bp, Artificial
  Synthetic oligonucleotide
ctttcaggtaccatatattgaaagacaagccaatgatggttggttcagaaagtttaa

SEQ ID NO: 390025 - DNA, 60 bp, Artificial
  Synthetic oligonucleotide
ctttcaggtatggcacaatagtgtcaagatttaaggattgtgcagcattggctacatttg

SEQ ID NO: 390026 - DNA, 55 bp, Artificial
  Synthetic oligonucleotide
ctttcagtaaccgaatgactgagaggttcttagctaagccatcagcttgcttatc

SEQ ID NO: 390027 - DNA, 50 bp, Artificial
  Synthetic oligonucleotide
ctttcagtcaccgtgcgctatgcctgagtttgatgtcactccttgcatgg

SEQ ID NO: 390028 - DNA, 59 bp, Artificial
  Synthetic oligonucleotide
ctttcagtccgtagcgctgacccacacatagtaacctcagtaaataatctgatatcccg

SEQ ID NO: 390029 - DNA, 56 bp, Artificial
  Synthetic oligonucleotide
ctttcagtcggctttttgattactggtggacttgtgttgacaatgacactgggggt

SEQ ID NO: 390030 - DNA, 58 bp, Artificial
  Synthetic oligonucleotide
ctttcatcaggaccaatgaaattgcgtctttaaagcctagatatttgcgaaagacttg

SEQ ID NO: 390031 - DNA, 55 bp, Artificial
  Synthetic oligonucleotide
ctttcatccgcctggatggggatgtaaagttttccggaggcttggttagcgcgtc

SEQ ID NO: 390032 - DNA, 60 bp, Artificial
  Synthetic oligonucleotide
ctttcatcgatctcagggacttccatgttgcagacactcaaggaatcacagattacgtac

SEQ ID NO: 390033 - DNA, 55 bp, Artificial
  Synthetic oligonucleotide
ctttcatcttggcagacgtgagcggctgcgtcaggaggttttgcaccgtgtcgcc

SEQ ID NO: 390034 - DNA, 60 bp, Artificial
  Synthetic oligonucleotide
ctttcatgaatagattgcgctcaggaagtagttttatgttttcaacaacttctcgcgaca

SEQ ID NO: 390035 - DNA, 50 bp, Artificial
  Synthetic oligonucleotide
ctttcattaacgggtaccaaaagttaaagtggtaatcgtcacccggagta

SEQ ID NO: 390036 - DNA, 60 bp, Artificial
  Synthetic oligonucleotide
ctttcattggcacttaagatgtcagaaatgcattagacccatagaggaggttactctgga

SEQ ID NO: 390037 - DNA, 60 bp, Artificial
  Synthetic oligonucleotide
ctttcatttgtgagatcaattgttgtattctcccatgctctcccaacaactgatgttctg

SEQ ID NO: 390038 - DNA, 59 bp, Artificial
  Synthetic oligonucleotide
ctttccaaatacaacgtggttttattcgattctacatgtgtatttgatgccagatcacg

SEQ ID NO: 390039 - DNA, 58 bp, Artificial
  Synthetic oligonucleotide
ctttccaaatgtcagtttgaccatgtgaacacccttcatttccttgtgagaagtaaga

SEQ ID NO: 390040 - DNA, 60 bp, Artificial
  Synthetic oligonucleotide
ctttccaacaatgtggtaacacgcgataagacatgggagatttggaacgatgtagaagca

SEQ ID NO: 390041 - DNA, 58 bp, Artificial
  Synthetic oligonucleotide
ctttccaagcaatgattagagccagttgggctaaagcccaatctggttctaaataggc

SEQ ID NO: 390042 - DNA, 56 bp, Artificial
  Synthetic oligonucleotide
ctttccaagcatatggctcctcagcttaggacactatatcgaaacttatggggata

SEQ ID NO: 390043 - DNA, 60 bp, Artificial
  Synthetic oligonucleotide
ctttccacaaaaacccaggtgtgctgactggatcggctgtaggatgcgatcctgatgtct

SEQ ID NO: 390044 - DNA, 55 bp, Artificial
  Synthetic oligonucleotide
ctttccacacagaaacgaatggagacaaagggtacttagctaagaatttacgaga

SEQ ID NO: 390045 - DNA, 60 bp, Artificial
  Synthetic oligonucleotide
ctttccacgattgggcgtaagatgctaaatacgcatgaggagccgaaagatgaaatggac

SEQ ID NO: 390046 - DNA, 56 bp, Artificial
  Synthetic oligonucleotide
ctttccacgtggcgagtccctaggggagttgtcagaatacgccgaagcacacaaat

SEQ ID NO: 390047 - DNA, 55 bp, Artificial
  Synthetic oligonucleotide
ctttccactgaggcgttccaggaggtgtggtctaggcaggacaaaggagtggtca

SEQ ID NO: 390048 - DNA, 59 bp, Artificial
  Synthetic oligonucleotide
ctttccagcccgtaaaccccgagcgcgcagcgatcgtcaccgcagcaaacgcgcgtgtg

SEQ ID NO: 390049 - DNA, 55 bp, Artificial
  Synthetic oligonucleotide
ctttccaggagacgtggcctgagtgactaagccccgctggggactttccgaagag

SEQ ID NO: 390050 - DNA, 55 bp, Artificial
  Synthetic oligonucleotide
ctttccagtgcagacttacagtaaacgctaaacctaggtttgcaggtttcacaag

SEQ ID NO: 390051 - DNA, 60 bp, Artificial
  Synthetic oligonucleotide
ctttccatggctgctcgcctgtgttgccaactggatcctacgcgggacgtccttctgcta

SEQ ID NO: 390052 - DNA, 57 bp, Artificial
  Synthetic oligonucleotide
ctttcccaaaataccccttattctgtgtctggaaggcgtgtgggagtgcgctgaaga

SEQ ID NO: 390053 - DNA, 50 bp, Artificial
  Synthetic oligonucleotide
ctttcccaagtaactttagaagaaataaactaatgttcaacaggaggggg

SEQ ID NO: 390054 - DNA, 55 bp, Artificial
  Synthetic oligonucleotide
ctttcccagctaacgagcgtcaaaagtacttggcagccattccttacggggatac

SEQ ID NO: 390055 - DNA, 60 bp, Artificial
  Synthetic oligonucleotide
ctttcccagtacgcacggctgggtattaaatgtgagcgagcagaggagttcgacttctgc

SEQ ID NO: 390056 - DNA, 50 bp, Artificial
  Synthetic oligonucleotide
ctttccccgatatgtattgttctcctgtacaagaataggcccgtacacgt

SEQ ID NO: 390057 - DNA, 59 bp, Artificial
  Synthetic oligonucleotide
ctttcccggcgtgtgagaccgagcagaactcaatcgttcataagagttctccgagccga

SEQ ID NO: 390058 - DNA, 60 bp, Artificial
  Synthetic oligonucleotide
ctttcccgttagcatggctagcgatgagattgtccgtaatctgatctcccgtgaggaggt

SEQ ID NO: 390059 - DNA, 55 bp, Artificial
  Synthetic oligonucleotide
ctttccgaggaggccaagctgtgttccgatgcgcatataatggttgcaatcacaa

SEQ ID NO: 390060 - DNA, 52 bp, Artificial
  Synthetic oligonucleotide
ctttccgctggggactttccagggaggcgtggcctggggaactttccgctgg

SEQ ID NO: 390061 - DNA, 56 bp, Artificial
  Synthetic oligonucleotide
ctttccgctggggactttccaggggaggcgtgacatgggcgggacatgggagtggc

SEQ ID NO: 390062 - DNA, 53 bp, Artificial
  Synthetic oligonucleotide
ctttccggcactaatggggagttcctacgcaacaacgggactggaccgaacaa

SEQ ID NO: 390063 - DNA, 60 bp, Artificial
  Synthetic oligonucleotide
ctttccgtcagaacaaaccagacactccattagaagatctggtgaagtctgttgcgacga

SEQ ID NO: 390064 - DNA, 57 bp, Artificial
  Synthetic oligonucleotide
ctttccgtcaggtctgtgaggcttttgctccggaggcaagagacgggctggtcaaac

SEQ ID NO: 390065 - DNA, 51 bp, Artificial
  Synthetic oligonucleotide
ctttccgtcgattcgagacctcctagataccgctgctgcactgtatcggga

SEQ ID NO: 390066 - DNA, 60 bp, Artificial
  Synthetic oligonucleotide
ctttccgtcgattcgagatctccttgacaccgcctctgctctgtatcgagaggctttaga

SEQ ID NO: 390067 - DNA, 56 bp, Artificial
  Synthetic oligonucleotide
ctttccgtcggttcgcgatctccttgacacagcttcagcgctttaccgggaagcct

SEQ ID NO: 390068 - DNA, 59 bp, Artificial
  Synthetic oligonucleotide
ctttccgtctgcttcaaaacagccaggtcttcagtcttattagaccaaatgagaatcca

SEQ ID NO: 390069 - DNA, 52 bp, Artificial
  Synthetic oligonucleotide
ctttccgtctgtaacaaagtgaaaggtctaaaagttttcaacaccaggagaa

SEQ ID NO: 390070 - DNA, 57 bp, Artificial
  Synthetic oligonucleotide
ctttcctaataatgatggccgtcacttccccgaccgtactaatcgcaatgtataaca

SEQ ID NO: 390071 - DNA, 58 bp, Artificial
  Synthetic oligonucleotide
ctttcctcgttatgagttgaagttcactcagaacgtggacggcccgcacaatatggcc

SEQ ID NO: 390072 - DNA, 55 bp, Artificial
  Synthetic oligonucleotide
ctttcctgaagaagatttactatctcacaccagctctcgagtgtatcgacatacc

SEQ ID NO: 390073 - DNA, 60 bp, Artificial
  Synthetic oligonucleotide
ctttcctgaagtcaatttggacaactacaatttgcctggacctagcaatgtgcagcaaac

SEQ ID NO: 390074 - DNA, 60 bp, Artificial
  Synthetic oligonucleotide
ctttcctggcgacctgcattaacggcgcgtgttggactgtctaccatggtgccggcgcaa

SEQ ID NO: 390075 - DNA, 59 bp, Artificial
  Synthetic oligonucleotide
ctttcctggcgtcctgcgttaacggcgtgtgttggactgtcttccatggcgccggctca

SEQ ID NO: 390076 - DNA, 56 bp, Artificial
  Synthetic oligonucleotide
ctttccttacctgccactgcgggaagtgtccctgccagcgcgaaaaggaggaggtg

SEQ ID NO: 390077 - DNA, 60 bp, Artificial
  Synthetic oligonucleotide
ctttccttgatgtcatgcctggtattctcattgctaagttataaccatcttccctagata

SEQ ID NO: 390078 - DNA, 54 bp, Artificial
  Synthetic oligonucleotide
ctttcgaaattggacggaaggcttttcgctaagcaagattctggtcggtcgtac

SEQ ID NO: 390079 - DNA, 55 bp, Artificial
  Synthetic oligonucleotide
ctttcgaatttcaggtgcctcattactcgaggtatcctctcttacctaacaccgc

SEQ ID NO: 390080 - DNA, 58 bp, Artificial
  Synthetic oligonucleotide
ctttcgagactaatagaattcaatcaaacgagtacgagatcaatcgtgaaatttctaa

SEQ ID NO: 390081 - DNA, 60 bp, Artificial
  Synthetic oligonucleotide
ctttcgagagagcaaccattatggcggcattcacaggaaacactgagggcaggacttcag

SEQ ID NO: 390082 - DNA, 60 bp, Artificial
  Synthetic oligonucleotide
ctttcgagagagcgaccatcatggcagcatttacagggaacactgaaggcagaacatctg

SEQ ID NO: 390083 - DNA, 60 bp, Artificial
  Synthetic oligonucleotide
ctttcgagccaagggacccctgcatagaaaacgtcactcttgtgatgcaaaaacaatgca

SEQ ID NO: 390084 - DNA, 60 bp, Artificial
  Synthetic oligonucleotide
ctttcgagtatgtagcacacacagctgaagcttactcggacgttaccgatgttatcatcg

SEQ ID NO: 390085 - DNA, 51 bp, Artificial
  Synthetic oligonucleotide
ctttcgatagtgtgactttcgttacagctaattcaaaacccatcgatcgtg

SEQ ID NO: 390086 - DNA, 60 bp, Artificial
  Synthetic oligonucleotide
ctttcgatgctgtcagttgataagtacaggcatatgattaagtcgcaattgaaacctccc

SEQ ID NO: 390087 - DNA, 56 bp, Artificial
  Synthetic oligonucleotide
ctttcgcagataatgttaccttcagacctggaggaggagatatgagggacaattgg

SEQ ID NO: 390088 - DNA, 56 bp, Artificial
  Synthetic oligonucleotide
ctttcgcgacaaccctattcggctaaccacagagaacgttacgcaatacgtgacaa

SEQ ID NO: 390089 - DNA, 58 bp, Artificial
  Synthetic oligonucleotide
ctttcgcgacttgtcgctccaacctccttaagattagtgagtacggtgctgaattgga

SEQ ID NO: 390090 - DNA, 51 bp, Artificial
  Synthetic oligonucleotide
ctttcgcgtgccattgttcgtttaggttaaagatttcgttacgaacttcat

SEQ ID NO: 390091 - DNA, 55 bp, Artificial
  Synthetic oligonucleotide
ctttcgctagagggatcgttagggataattattgtgagtgacggctcagtggtga

SEQ ID NO: 390092 - DNA, 60 bp, Artificial
  Synthetic oligonucleotide
ctttcgctgaatggttgaaattgcagaatccagatgttattggtaagctggccaattttg

SEQ ID NO: 390093 - DNA, 60 bp, Artificial
  Synthetic oligonucleotide
ctttcgctttgttagcacaacatggtcatggataggagatgcatcaaatgatcgcatagg

SEQ ID NO: 390094 - DNA, 55 bp, Artificial
  Synthetic oligonucleotide
ctttcggaactccccaagattttggtcaggtgtttaacatgtatgataacgagcc

SEQ ID NO: 390095 - DNA, 57 bp, Artificial
  Synthetic oligonucleotide
ctttcggaagagaaactgttcttgagtatttggtgtctttcggagtgtggattcgca

SEQ ID NO: 390096 - DNA, 58 bp, Artificial
  Synthetic oligonucleotide
ctttcggacattgaatccgcactaacgtatggttatccgactgagaaattagtacagc

SEQ ID NO: 390097 - DNA, 54 bp, Artificial
  Synthetic oligonucleotide
ctttcggattggactctacgatctttggggccctacaatagtggtcgaattaac

SEQ ID NO: 390098 - DNA, 55 bp, Artificial
  Synthetic oligonucleotide
ctttcggccaagacctctcaggaaacgataacagcacagcaacactgtgtctggg

SEQ ID NO: 390099 - DNA, 56 bp, Artificial
  Synthetic oligonucleotide
ctttcggcctcttttcttcgcactcttcttcgttgcactcttctagatgtctagtt

SEQ ID NO: 390100 - DNA, 51 bp, Artificial
  Synthetic oligonucleotide
ctttcggcgaccgtgtaacccacgggggcgcaccacaggtatgatctacac

SEQ ID NO: 390101 - DNA, 55 bp, Artificial
  Synthetic oligonucleotide
ctttcggcggtcgatctaaatcgaaagtagcacttctgctgcctgcagcgaggct

SEQ ID NO: 390102 - DNA, 60 bp, Artificial
  Synthetic oligonucleotide
ctttcgggtgtgaagccaaatactggacaaggtgcgaagagccccgtgtgctcatcttga

SEQ ID NO: 390103 - DNA, 60 bp, Artificial
  Synthetic oligonucleotide
ctttcggtaagcacataccactctacgctacggctgctttctatcccgatgagacggcgc

SEQ ID NO: 390104 - DNA, 56 bp, Artificial
  Synthetic oligonucleotide
ctttcggtgctaattctttcaatactttcaacgcatcttccttattccctgtattg

SEQ ID NO: 390105 - DNA, 57 bp, Artificial
  Synthetic oligonucleotide
ctttcggttttaggcttggatacaataccatcacgatttcgctgcttggtaatagta

SEQ ID NO: 390106 - DNA, 54 bp, Artificial
  Synthetic oligonucleotide
ctttcgtaacaactccttacaagaccctgccgggaaatgtcaatgctgtaccta

SEQ ID NO: 390107 - DNA, 54 bp, Artificial
  Synthetic oligonucleotide
ctttcgtacactcatacgtgttaacccccgcccagctagggggactgagcaacc

SEQ ID NO: 390108 - DNA, 53 bp, Artificial
  Synthetic oligonucleotide
ctttcgtagtacaaagatcttgcctagcgcagccccatttttccccggaaaac

SEQ ID NO: 390109 - DNA, 52 bp, Artificial
  Synthetic oligonucleotide
ctttcgtcaacgtacagcaagcattagcctctataggcccgtgggcgcgtac

SEQ ID NO: 390110 - DNA, 53 bp, Artificial
  Synthetic oligonucleotide
ctttcgtcacctttaacgaggagtgctcttttgacggaggggaagaatgggac

SEQ ID NO: 390111 - DNA, 55 bp, Artificial
  Synthetic oligonucleotide
ctttcgtcgaatcaattcgttcgagagtgatcattaacggggttactgctaggtc

SEQ ID NO: 390112 - DNA, 55 bp, Artificial
  Synthetic oligonucleotide
ctttcgtcgatgaatctgagtgtgacgactggcgaccggtagatacctctgatgg

SEQ ID NO: 390113 - DNA, 55 bp, Artificial
  Synthetic oligonucleotide
ctttcgtggactgatgaaggattgtcaggactagtagctgcccaagatcctcccc

SEQ ID NO: 390114 - DNA, 55 bp, Artificial
  Synthetic oligonucleotide
ctttcgttagagagcgagctggcacgcgtggagggaatcgagttactttcgatcc

SEQ ID NO: 390115 - DNA, 60 bp, Artificial
  Synthetic oligonucleotide
ctttcgttatatttgaatatgagcaaacatagtgtggttataccatcgtttgtggcatag

SEQ ID NO: 390116 - DNA, 56 bp, Artificial
  Synthetic oligonucleotide
ctttcgttcatgcaatttagcgtagcatgagcaacattgctggggcctataattat

SEQ ID NO: 390117 - DNA, 56 bp, Artificial
  Synthetic oligonucleotide
ctttctaatctacggcctagggctaagttcctctattcggtatcatgcctttacga

SEQ ID NO: 390118 - DNA, 59 bp, Artificial
  Synthetic oligonucleotide
ctttctaccggagtttgggagcccacgggcatctggaacatggagcatgtgaatctacc

SEQ ID NO: 390119 - DNA, 59 bp, Artificial
  Synthetic oligonucleotide
ctttctagcgactagcgtgcaagctgattcgggatgtgcaattgatctacagcgacgtg

SEQ ID NO: 390120 - DNA, 55 bp, Artificial
  Synthetic oligonucleotide
ctttctaggctgctcggtctccattaacaggcatactactgttaaagaaccctcc

SEQ ID NO: 390121 - DNA, 57 bp, Artificial
  Synthetic oligonucleotide
ctttctagtgcagtttcgacgtgttttttcttgccatcgactgtgattttcaattac

SEQ ID NO: 390122 - DNA, 53 bp, Artificial
  Synthetic oligonucleotide
ctttctattatagagtgtagatatatcctaaagtagaattgtatgatgtgccc

SEQ ID NO: 390123 - DNA, 53 bp, Artificial
  Synthetic oligonucleotide
ctttctattatagagtgtagggcctccctaaaagagaattgtatgatgtgacc

SEQ ID NO: 390124 - DNA, 58 bp, Artificial
  Synthetic oligonucleotide
ctttctcagaaacattagtgttaggtgcaatggagtcttctacaactaataggccctc

SEQ ID NO: 390125 - DNA, 55 bp, Artificial
  Synthetic oligonucleotide
ctttctcatggatgcttctccgcgagatagcgtttagttgtttacctgagtcgtg

SEQ ID NO: 390126 - DNA, 55 bp, Artificial
  Synthetic oligonucleotide
ctttctccacaaagagagcagccatcttagatatgtggatgtataatacacaagg

SEQ ID NO: 390127 - DNA, 57 bp, Artificial
  Synthetic oligonucleotide
ctttctccgctctcagcgacgaagataagggtgactactcggtgggaaggctggttg

SEQ ID NO: 390128 - DNA, 50 bp, Artificial
  Synthetic oligonucleotide
ctttctccgggagaccagacgcgccctgaggccaccatcccgtgacagga

SEQ ID NO: 390129 - DNA, 55 bp, Artificial
  Synthetic oligonucleotide
ctttctccgttctgtaatgccgaggtaatcatgccgattgtcgtaactcaagcgc

SEQ ID NO: 390130 - DNA, 55 bp, Artificial
  Synthetic oligonucleotide
ctttctcctacaatggatacacctatggcatagaacgatgtgtaatatacgctgg

SEQ ID NO: 390131 - DNA, 55 bp, Artificial
  Synthetic oligonucleotide
ctttctcctcctggctggcaggtcttgcgccatgtatggccttagtggacctgac

SEQ ID NO: 390132 - DNA, 60 bp, Artificial
  Synthetic oligonucleotide
ctttctcgaacagaaagggggtagagggtctagcatgagctcatcaggggggtctgcatc

SEQ ID NO: 390133 - DNA, 54 bp, Artificial
  Synthetic oligonucleotide
ctttctcgcatatcgtagtgacaatcgtgaacatacgtgttataccggattgga

SEQ ID NO: 390134 - DNA, 60 bp, Artificial
  Synthetic oligonucleotide
ctttctcgtctagctgactctgccactcaccggactcatcttaaacgcaatgctgtcact

SEQ ID NO: 390135 - DNA, 55 bp, Artificial
  Synthetic oligonucleotide
ctttctctcgtagtgttcttttactggaaggagtatcccaatctcagcttgttga

SEQ ID NO: 390136 - DNA, 55 bp, Artificial
  Synthetic oligonucleotide
ctttctgacattgtctctcacgtgggtactattccactaaccgaccattgggtgg

SEQ ID NO: 390137 - DNA, 55 bp, Artificial
  Synthetic oligonucleotide
ctttctgaccctcactatgcccacaccctagttgcaggtttgggtcgttactttg

SEQ ID NO: 390138 - DNA, 51 bp, Artificial
  Synthetic oligonucleotide
ctttctgagaggaaagtctatgggaattcagagcggagtacaggttgatgt

SEQ ID NO: 390139 - DNA, 57 bp, Artificial
  Synthetic oligonucleotide
ctttctgatggcaccctgttagcccaaactgtcccaggggttcagaagagtggatcg

SEQ ID NO: 390140 - DNA, 60 bp, Artificial
  Synthetic oligonucleotide
ctttctggaaaatctattggtaggaatgaattgtatgtttcaccagatgcagaagcgttc

SEQ ID NO: 390141 - DNA, 55 bp, Artificial
  Synthetic oligonucleotide
ctttctggggaaacaagctgttgcctgatacctgcagtggtatccactggtttct

SEQ ID NO: 390142 - DNA, 55 bp, Artificial
  Synthetic oligonucleotide
ctttctgtacgttggcctgacctgaattgagagtagcttgtcgagctaagaactc

SEQ ID NO: 390143 - DNA, 58 bp, Artificial
  Synthetic oligonucleotide
ctttctgtactaaaagccttgtttccacagagcgatgccactcggaaactgacggtca

SEQ ID NO: 390144 - DNA, 58 bp, Artificial
  Synthetic oligonucleotide
ctttctgtgaacccaccaccattgcggccacttcatgcgatacgagaaaggaaatggt

SEQ ID NO: 390145 - DNA, 54 bp, Artificial
  Synthetic oligonucleotide
ctttcttaaaaagaggatttagacaagatgaaaaacatcacttcttaatacacc

SEQ ID NO: 390146 - DNA, 57 bp, Artificial
  Synthetic oligonucleotide
ctttcttcctcagtcaattgtgtcggattgtgattattaccaatcaaaaagcgcggt

SEQ ID NO: 390147 - DNA, 60 bp, Artificial
  Synthetic oligonucleotide
ctttcttctcatgccaacgtgggtacaagggagtctggcggggggacggcatcatgcaga

SEQ ID NO: 390148 - DNA, 55 bp, Artificial
  Synthetic oligonucleotide
ctttcttgaacatgtgcgtaatgtgagaccagatcttgaggaaactctcttgtac

SEQ ID NO: 390149 - DNA, 55 bp, Artificial
  Synthetic oligonucleotide
ctttcttgatgtataaatatcactgcatttcgctctgtattcagtcgctctgcgg

SEQ ID NO: 390150 - DNA, 60 bp, Artificial
  Synthetic oligonucleotide
ctttctttgtattgctggctttcatgcaacaaaaacataagacgcactctggtggcgatt

SEQ ID NO: 390151 - DNA, 51 bp, Artificial
  Synthetic oligonucleotide
ctttgaaaaattgtccacacctgtcagattggacgaaatagattcgaaatt

SEQ ID NO: 390152 - DNA, 55 bp, Artificial
  Synthetic oligonucleotide
ctttgaaaatcacgagaactcctccccagcaactgtgggttgcagcttggttccc

SEQ ID NO: 390153 - DNA, 51 bp, Artificial
  Synthetic oligonucleotide
ctttgaaacacccgtacaacttaaaagtgttcctacgtgcggtgtcgtgtt

SEQ ID NO: 390154 - DNA, 50 bp, Artificial
  Synthetic oligonucleotide
ctttgaaaccgtctcctaggtttcttcggaaggacttcggtccgtgtact

SEQ ID NO: 390155 - DNA, 59 bp, Artificial
  Synthetic oligonucleotide
ctttgaaagcagacatccaagagtaagttcagaagtacatatcccactagaggaagatg

SEQ ID NO: 390156 - DNA, 55 bp, Artificial
  Synthetic oligonucleotide
ctttgaaccaaggaccagtctagaaacaagcttagacaccttatactcgtaatcc

SEQ ID NO: 390157 - DNA, 60 bp, Artificial
  Synthetic oligonucleotide
ctttgaacgtcaaaccgctgcagcttttgcagaactccccaatgatgattcattcacaga

SEQ ID NO: 390158 - DNA, 57 bp, Artificial
  Synthetic oligonucleotide
ctttgaagattgcaaagatgtcagcgatttgagacagtatgacagcgatgagcctga

SEQ ID NO: 390159 - DNA, 60 bp, Artificial
  Synthetic oligonucleotide
ctttgaagtacggccatccagacatggagctcaatagttgtcattttaatcaaggacaat

SEQ ID NO: 390160 - DNA, 59 bp, Artificial
  Synthetic oligonucleotide
ctttgaagttggggagtgttccatggaacagttccaacaggtatctaacgatctgcata

SEQ ID NO: 390161 - DNA, 51 bp, Artificial
  Synthetic oligonucleotide
ctttgaatcccaacaagggtggtttgaagggctgtttaacaagtccccttg

SEQ ID NO: 390162 - DNA, 50 bp, Artificial
  Synthetic oligonucleotide
ctttgaatctactatggtatcggtttttcaggagcgccctcttggggggc

SEQ ID NO: 390163 - DNA, 55 bp, Artificial
  Synthetic oligonucleotide
ctttgaatgccaacaagctgtaaaatctcagacctccttgtcagttgtgtggtag

SEQ ID NO: 390164 - DNA, 60 bp, Artificial
  Synthetic oligonucleotide
ctttgaatggcgcacggaagatatacttgattgcgttttgaatatgacctgagtaactag

SEQ ID NO: 390165 - DNA, 60 bp, Artificial
  Synthetic oligonucleotide
ctttgacacaagcaggatggagagcaatcctcaattgtgtaccaaatctaaggtgaacat

SEQ ID NO: 390166 - DNA, 55 bp, Artificial
  Synthetic oligonucleotide
ctttgacattaaatatgccattatcatcgcaccacttctattaacgccggcaaca

SEQ ID NO: 390167 - DNA, 59 bp, Artificial
  Synthetic oligonucleotide
ctttgacattagtggtactctatatgttcagtctcccaccagttcaaactgtggacctg

SEQ ID NO: 390168 - DNA, 52 bp, Artificial
  Synthetic oligonucleotide
ctttgaccccttcattctgtgatttcccaggtcccgaccattcggccgcgac

SEQ ID NO: 390169 - DNA, 59 bp, Artificial
  Synthetic oligonucleotide
ctttgaccgtatgcaactcaaggtgcaaaagtgcaactctgtatcccgcagtcgtttct

SEQ ID NO: 390170 - DNA, 55 bp, Artificial
  Synthetic oligonucleotide
ctttgacctactgcgctgactactcgcggtgggactccaccttgccacgctggct

SEQ ID NO: 390171 - DNA, 60 bp, Artificial
  Synthetic oligonucleotide
ctttgacctgtgattcggcttctctctgattccatgtgctcacggcggactcggttattc

SEQ ID NO: 390172 - DNA, 60 bp, Artificial
  Synthetic oligonucleotide
ctttgacggaagggtatctgcctggtgtcaagagaacgtgatgaacgctgtttatcacag

SEQ ID NO: 390173 - DNA, 56 bp, Artificial
  Synthetic oligonucleotide
ctttgactagacatgttgattctttggtttactccgtgcttactagtaggaggtac

SEQ ID NO: 390174 - DNA, 54 bp, Artificial
  Synthetic oligonucleotide
ctttgactcggtcattgactgtaacgttgccgttacccaaacggttgacttcag

SEQ ID NO: 390175 - DNA, 60 bp, Artificial
  Synthetic oligonucleotide
ctttgagaacagttttgcagacatcctgcaaaactcagcccgctggatctccacactggg

SEQ ID NO: 390176 - DNA, 58 bp, Artificial
  Synthetic oligonucleotide
ctttgagaaggctcgcgctgagcaaacctcccgggtccgtcccgtggtgatcatggtc

SEQ ID NO: 390177 - DNA, 58 bp, Artificial
  Synthetic oligonucleotide
ctttgagaagtttggcctagatataacattttgcgagcacgagatgagactagttgtg

SEQ ID NO: 390178 - DNA, 60 bp, Artificial
  Synthetic oligonucleotide
ctttgagaatttacctagctgatataggcgacaaggagttatctcctatagatggacagt

SEQ ID NO: 390179 - DNA, 55 bp, Artificial
  Synthetic oligonucleotide
ctttgagagtggcgatatgcatgaggtacgtgaaagactgtgccgttggatcgat

SEQ ID NO: 390180 - DNA, 58 bp, Artificial
  Synthetic oligonucleotide
ctttgagcccggaagaatttctggcgtgctatgtgggtcgtaagagaactatctatac

SEQ ID NO: 390181 - DNA, 53 bp, Artificial
  Synthetic oligonucleotide
ctttgagcgttcccgccgtagacgcttggaacgttcccgccgtgaggttcggc

SEQ ID NO: 390182 - DNA, 55 bp, Artificial
  Synthetic oligonucleotide
ctttgagcttgcatgcgatagtgggaacctttggctctgggaagagtacgctgtt

SEQ ID NO: 390183 - DNA, 55 bp, Artificial
  Synthetic oligonucleotide
ctttgaggaacaagtattatgagcccagggacagctatttccaacaatatatgct

SEQ ID NO: 390184 - DNA, 60 bp, Artificial
  Synthetic oligonucleotide
ctttgaggattgcaaagacgttagtgacctgaaacaatatgatagtgatgaaccggagcc

SEQ ID NO: 390185 - DNA, 55 bp, Artificial
  Synthetic oligonucleotide
ctttgaggctgtttctcacttgaagtaacttggtggcgcttatggcaggtttggc

SEQ ID NO: 390186 - DNA, 59 bp, Artificial
  Synthetic oligonucleotide
ctttgagggtgtagaattccgcattttttgaagcccacacctttagcgatgcattatca

SEQ ID NO: 390187 - DNA, 60 bp, Artificial
  Synthetic oligonucleotide
ctttgagtagtatagtgttgtcgtgtcgcattgctccgttgatacgtaatgatagcgtta

SEQ ID NO: 390188 - DNA, 54 bp, Artificial
  Synthetic oligonucleotide
ctttgagtagtggagcttttaaattgggcctatgtagaataaatatatattggg

SEQ ID NO: 390189 - DNA, 59 bp, Artificial
  Synthetic oligonucleotide
ctttgagtgaagagccaagtacatcggggtggaaggatccagtaagacagagatttcca

SEQ ID NO: 390190 - DNA, 52 bp, Artificial
  Synthetic oligonucleotide
ctttgagttgcgtctcccggttgacccccgcacacagaccacatctgccggg

SEQ ID NO: 390191 - DNA, 57 bp, Artificial
  Synthetic oligonucleotide
ctttgataatacaggactaggaacgaatttatgtttaggttatgcgatttgcaatgg

SEQ ID NO: 390192 - DNA, 60 bp, Artificial
  Synthetic oligonucleotide
ctttgataatgagttgacgacttggcgtaacaccgtggtcgatctagtcctgcgcataat

SEQ ID NO: 390193 - DNA, 60 bp, Artificial
  Synthetic oligonucleotide
ctttgatagagatccaatgctagcagagatattcgataaagtagccgcaaaagaaaagag

SEQ ID NO: 390194 - DNA, 59 bp, Artificial
  Synthetic oligonucleotide
ctttgatagaggggggctgtgagggtgacgaagagcgcattcttaatggtccagttgtg

SEQ ID NO: 390195 - DNA, 52 bp, Artificial
  Synthetic oligonucleotide
ctttgataggatcagacttaagcaaagtgatgtagactggtacagggacccc

SEQ ID NO: 390196 - DNA, 58 bp, Artificial
  Synthetic oligonucleotide
ctttgatatgctccaacagggcaaaaacaaagtgaatcgttacccgcaagatgcctac

SEQ ID NO: 390197 - DNA, 53 bp, Artificial
  Synthetic oligonucleotide
ctttgatattgaaggaacattagatagaggtccttcatttaaaccttatggag

SEQ ID NO: 390198 - DNA, 54 bp, Artificial
  Synthetic oligonucleotide
ctttgatccccaaaaggaacaaccagattccgcaggactttggttttgggatgc

SEQ ID NO: 390199 - DNA, 55 bp, Artificial
  Synthetic oligonucleotide
ctttgatctcagctacaacaagcatgacccgtggaaaactgctgtgttgttacac

SEQ ID NO: 390200 - DNA, 60 bp, Artificial
  Synthetic oligonucleotide
ctttgatgaatgtgcactctaatggtcaagcaactcatgacaatggtgcaggaaagccag

SEQ ID NO: 390201 - DNA, 53 bp, Artificial
  Synthetic oligonucleotide
ctttgatgcacatatgtgggctgtcgatgcctttatgccactcatgccacatt

SEQ ID NO: 390202 - DNA, 55 bp, Artificial
  Synthetic oligonucleotide
ctttgatgcgtctcaggatcatttcattctggcgtttgaactgcaaattatgagg

SEQ ID NO: 390203 - DNA, 57 bp, Artificial
  Synthetic oligonucleotide
ctttgatgctccccttagtaacaatcctctcccttggacagaacattggttgtcgtc

SEQ ID NO: 390204 - DNA, 60 bp, Artificial
  Synthetic oligonucleotide
ctttgatggcggggtacaaaagaatatacgagtaacgaaatcatctcagatggagatcta

SEQ ID NO: 390205 - DNA, 54 bp, Artificial
  Synthetic oligonucleotide
ctttgattgggcaattatgtagatattacactcagtggtcaggttccttagaga

SEQ ID NO: 390206 - DNA, 60 bp, Artificial
  Synthetic oligonucleotide
ctttgattggtacctgagtacagcggatatgagagggtgatgaaggtcgcattctttaat

SEQ ID NO: 390207 - DNA, 59 bp, Artificial
  Synthetic oligonucleotide
ctttgatttgaaaactaatggagaattctgttgcttcaggagcacaaagatccttccta

SEQ ID NO: 390208 - DNA, 55 bp, Artificial
  Synthetic oligonucleotide
ctttgcaaaaccccaaataggtagactccggaccagagcctggtccaagcccaca

SEQ ID NO: 390209 - DNA, 54 bp, Artificial
  Synthetic oligonucleotide
ctttgcaaactcctaagccgtcactcgttggtacatcgaagcagtggcaatatc

SEQ ID NO: 390210 - DNA, 57 bp, Artificial
  Synthetic oligonucleotide
ctttgcaacagaagggttgtcgggtccacccattggggagctgacctcgcagtcacc

SEQ ID NO: 390211 - DNA, 57 bp, Artificial
  Synthetic oligonucleotide
ctttgcacaggatccgtccaagttcaccgaacccataaaggatgttcttatcaagac

SEQ ID NO: 390212 - DNA, 52 bp, Artificial
  Synthetic oligonucleotide
ctttgcacctattcaaaacaacagtaaactctttgatttctgaccagttgtt

SEQ ID NO: 390213 - DNA, 55 bp, Artificial
  Synthetic oligonucleotide
ctttgcactagggttaagggtcattatcttatagttgcactacaggggatcggga

SEQ ID NO: 390214 - DNA, 59 bp, Artificial
  Synthetic oligonucleotide
ctttgcacttctcagcactatgtgtttctaacgcggttttgcttcgtagcataaacgcc

SEQ ID NO: 390215 - DNA, 59 bp, Artificial
  Synthetic oligonucleotide
ctttgcagagagttatactcctaccagccaggatatggacctgtttcaaacattaacaa

SEQ ID NO: 390216 - DNA, 54 bp, Artificial
  Synthetic oligonucleotide
ctttgcagatcgcgaatgctgtatccgacttgatgaattatgtgaggactaagg

SEQ ID NO: 390217 - DNA, 60 bp, Artificial
  Synthetic oligonucleotide
ctttgcagatgattctttccaggagaacaggatctatatgcatcctgctgtgttgacagc

SEQ ID NO: 390218 - DNA, 51 bp, Artificial
  Synthetic oligonucleotide
ctttgcagtaaaatggggaacaaatggtcaaaaggctggcctgctgtaaga

SEQ ID NO: 390219 - DNA, 58 bp, Artificial
  Synthetic oligonucleotide
ctttgcagtaaaatggggggcaagtggtcaaaaagctgtatagttggatggcctgctg

SEQ ID NO: 390220 - DNA, 60 bp, Artificial
  Synthetic oligonucleotide
ctttgcatataacttgccagtgatgacaggaggtgtttcaactagtctaattggtaattg

SEQ ID NO: 390221 - DNA, 60 bp, Artificial
  Synthetic oligonucleotide
ctttgccaagagtagccacggatgctacaccaacacatggcgcaatatcccatatcaccg

SEQ ID NO: 390222 - DNA, 57 bp, Artificial
  Synthetic oligonucleotide
ctttgccactcactcggacgacatgataagcaaaggaccgtacggggggggcatgac

SEQ ID NO: 390223 - DNA, 54 bp, Artificial
  Synthetic oligonucleotide
ctttgccagagaatgtgcagtatataatacaatgtataggatcaagaacttacc

SEQ ID NO: 390224 - DNA, 56 bp, Artificial
  Synthetic oligonucleotide
ctttgccataaaatggggggcaagtggtcaaaaagcagcttggtgggatggccaaa

SEQ ID NO: 390225 - DNA, 53 bp, Artificial
  Synthetic oligonucleotide
ctttgccataccgatcatccttaaggctctttatatgttgtcaactagaggcc

SEQ ID NO: 390226 - DNA, 55 bp, Artificial
  Synthetic oligonucleotide
ctttgcccaacagaaccaagtcatatattaagctgaaacgactacggttcaaggg

SEQ ID NO: 390227 - DNA, 55 bp, Artificial
  Synthetic oligonucleotide
ctttgcccactcctccatggtgatataaagaccacccacttccttcgggtgagcc

SEQ ID NO: 390228 - DNA, 60 bp, Artificial
  Synthetic oligonucleotide
ctttgcccaggatgatgacagcaccaatacattggctaagattgctaattaaatgggtat

SEQ ID NO: 390229 - DNA, 58 bp, Artificial
  Synthetic oligonucleotide
ctttgccctaatgccacttacaccgccccgtgatttcacgaaagtttacatcgctgca

SEQ ID NO: 390230 - DNA, 60 bp, Artificial
  Synthetic oligonucleotide
ctttgcccttgtgtctagttatttatggatatgtctgacacatctctgatattgtacgac

SEQ ID NO: 390231 - DNA, 60 bp, Artificial
  Synthetic oligonucleotide
ctttgcccttgtgtttagatatttatggatatgtctgacacatctctgaatatgtacgat

SEQ ID NO: 390232 - DNA, 55 bp, Artificial
  Synthetic oligonucleotide
ctttgccgccctgacgacaaactcgcaaaacgtgctgggcgtcattctaagcatc

SEQ ID NO: 390233 - DNA, 60 bp, Artificial
  Synthetic oligonucleotide
ctttgccgcgggtaccctctgcagctccgtcatcctctggactgccgtggagtcgcgtcg

SEQ ID NO: 390234 - DNA, 59 bp, Artificial
  Synthetic oligonucleotide
ctttgcctcaggtgaggaatggaatgacatacacaagctcaatggacaaaaaaaccgtc

SEQ ID NO: 390235 - DNA, 60 bp, Artificial
  Synthetic oligonucleotide
ctttgcctcatgaaacttattgcaatgatatggacatattagaaccgattataggagata

SEQ ID NO: 390236 - DNA, 60 bp, Artificial
  Synthetic oligonucleotide
ctttgcctcctttgcatatctgtgcaatagtaggactggtagtggcactaatcctagcaa

SEQ ID NO: 390237 - DNA, 55 bp, Artificial
  Synthetic oligonucleotide
ctttgcgaattatttcgatcgaatcgaacccacaagtggatatgataagtacgta

SEQ ID NO: 390238 - DNA, 60 bp, Artificial
  Synthetic oligonucleotide
ctttgcgattgcagctagcggaagtggggatgttgggactgtagtagctggtacgtctct

SEQ ID NO: 390239 - DNA, 58 bp, Artificial
  Synthetic oligonucleotide
ctttgcgcaagatatttcgacgcgtaacctaaacggctgcactcaataatatccccgc

SEQ ID NO: 390240 - DNA, 59 bp, Artificial
  Synthetic oligonucleotide
ctttgcgcacgctggcccaacagggggccgccctggcactctcggtgcgtgacctgccc

SEQ ID NO: 390241 - DNA, 55 bp, Artificial
  Synthetic oligonucleotide
ctttgcgccagcacattggttcgcttcataatagaacggtggcaagttctgtgca

SEQ ID NO: 390242 - DNA, 60 bp, Artificial
  Synthetic oligonucleotide
ctttgcggccatgcggtggacttatcatgccacctggaggcggtggtatgacactagtga

SEQ ID NO: 390243 - DNA, 55 bp, Artificial
  Synthetic oligonucleotide
ctttgcggcccgagttgtttgcgtacgtaactagcgaagaagatgtgtggaccgc

SEQ ID NO: 390244 - DNA, 57 bp, Artificial
  Synthetic oligonucleotide
ctttgcgggcacattgtgtgccccctttgttgccagagggcaaactgcgggccctgt

SEQ ID NO: 390245 - DNA, 56 bp, Artificial
  Synthetic oligonucleotide
ctttgcgggtccagccttgtcctggtgtcttgggctccccttcgtgagcatgatcc

SEQ ID NO: 390246 - DNA, 54 bp, Artificial
  Synthetic oligonucleotide
ctttgcgtaatgcgtatgcgcctaggggtttgtggaggggtccctcgacaagag

SEQ ID NO: 390247 - DNA, 50 bp, Artificial
  Synthetic oligonucleotide
ctttgctactatggtgaggctgtggtgccttttcaaatgacaagttggcc

SEQ ID NO: 390248 - DNA, 60 bp, Artificial
  Synthetic oligonucleotide
ctttgctataacatgggaggcaagtggtcaaaaggttgcatgtcaggatggcctgcagta

SEQ ID NO: 390249 - DNA, 55 bp, Artificial
  Synthetic oligonucleotide
ctttgctatgatccctgtgagactctagctaaatatcccagcagagagagggcgc

SEQ ID NO: 390250 - DNA, 58 bp, Artificial
  Synthetic oligonucleotide
ctttgctcacattgaactataaaacatcggtaggtgccattaggtttaatactggaca

SEQ ID NO: 390251 - DNA, 55 bp, Artificial
  Synthetic oligonucleotide
ctttgctcggacaggaaatggcgattaccccggctcctgttaccatcgttccgtc

SEQ ID NO: 390252 - DNA, 60 bp, Artificial
  Synthetic oligonucleotide
ctttgctgacgtgcgcgacctcttgtggttggaagatgacgcaatggaacagggcgttag

SEQ ID NO: 390253 - DNA, 56 bp, Artificial
  Synthetic oligonucleotide
ctttgctgttacgaaatataactcgaaattcccaaccaattatatcaacacactaa

SEQ ID NO: 390254 - DNA, 55 bp, Artificial
  Synthetic oligonucleotide
ctttgcttcgacttcaaactccagtcgagtgcggaagttgagtccaggagtctcc

SEQ ID NO: 390255 - DNA, 52 bp, Artificial
  Synthetic oligonucleotide
ctttgcttctgcgtgtaacgacttttcagtacgattgctacgcgacaccccg

SEQ ID NO: 390256 - DNA, 57 bp, Artificial
  Synthetic oligonucleotide
ctttgcttttaatgtctccaaggtcatcttgtgtttcccagtgcaggttctgtaaaa

SEQ ID NO: 390257 - DNA, 53 bp, Artificial
  Synthetic oligonucleotide
ctttggaaagtccgtacgggatcctaggatataaatacaaggccggtgtagta

SEQ ID NO: 390258 - DNA, 59 bp, Artificial
  Synthetic oligonucleotide
ctttggaagccaaagaatgaaggtccagactggcagacccttgataatgcacagggttc

SEQ ID NO: 390259 - DNA, 55 bp, Artificial
  Synthetic oligonucleotide
ctttggaagggagggatattcccttgttgggatagatcctttccgtctgctccaa

SEQ ID NO: 390260 - DNA, 53 bp, Artificial
  Synthetic oligonucleotide
ctttggaattttcagattgaacccggaaaaagggagtgtgatttaaagcgcac

SEQ ID NO: 390261 - DNA, 60 bp, Artificial
  Synthetic oligonucleotide
ctttggacattgctaacttctgaaaaatccaggccatgcaagagtgcctgtgcatccttg

SEQ ID NO: 390262 - DNA, 60 bp, Artificial
  Synthetic oligonucleotide
ctttggactaggtgcgctgtttcttgggtttcttggtgcagcagggagcactatgggcgc

SEQ ID NO: 390263 - DNA, 50 bp, Artificial
  Synthetic oligonucleotide
ctttggagatcgtattaaaccgtggattgtcacgctttgctctgcgaccg

SEQ ID NO: 390264 - DNA, 55 bp, Artificial
  Synthetic oligonucleotide
ctttggagctgtgccacatgacacctcccagcttgacagtgctgtcagaaactgt

SEQ ID NO: 390265 - DNA, 57 bp, Artificial
  Synthetic oligonucleotide
ctttggaggcttcactttcaaaagaacaagtggatcgtctgtcaagagggaagaaga

SEQ ID NO: 390266 - DNA, 60 bp, Artificial
  Synthetic oligonucleotide
ctttggatcacgtgccctcgggacttggtgtcaccagcagcgtcaggcctgaaagcttat

SEQ ID NO: 390267 - DNA, 60 bp, Artificial
  Synthetic oligonucleotide
ctttggatcccacttttgagactgctttatatgacgcgctgttagctctcgatcctccct

SEQ ID NO: 390268 - DNA, 55 bp, Artificial
  Synthetic oligonucleotide
ctttggatccccagcctttatgatgtcaagagcctctcgtacacctcctgcattg

SEQ ID NO: 390269 - DNA, 55 bp, Artificial
  Synthetic oligonucleotide
ctttggatggaaagaacgacaccacgttgcttgaacagcgaaaggatggaggctc

SEQ ID NO: 390270 - DNA, 60 bp, Artificial
  Synthetic oligonucleotide
ctttggatgttcagtgggatgttgtctactcagctagatgctatgccatttggaagcatg

SEQ ID NO: 390271 - DNA, 60 bp, Artificial
  Synthetic oligonucleotide
ctttggcaacactgctgttgctaagtgcaacctaaaccatgattctgagttttgcgacat

SEQ ID NO: 390272 - DNA, 58 bp, Artificial
  Synthetic oligonucleotide
ctttggcagatctccatttttgtaattaggtgagtaatggctgcttgacagatgtggg

SEQ ID NO: 390273 - DNA, 60 bp, Artificial
  Synthetic oligonucleotide
ctttggcagattcatgcaagtttaccaccgcaatcctgggactatcacaggttgcgcagt

SEQ ID NO: 390274 - DNA, 55 bp, Artificial
  Synthetic oligonucleotide
ctttggcagcgaccaatgatgacagtaaaggtgcagggacaagtctgtcaggccc

SEQ ID NO: 390275 - DNA, 50 bp, Artificial
  Synthetic oligonucleotide
ctttggccaacctcccccaagcggtgactcgggccattccacaggggtgg

SEQ ID NO: 390276 - DNA, 55 bp, Artificial
  Synthetic oligonucleotide
ctttggcgaaactggtgtcatctccaatgtcaatcttagtcgctttagtggacat

SEQ ID NO: 390277 - DNA, 55 bp, Artificial
  Synthetic oligonucleotide
ctttggctcaagtcttactttcgttacgagtccgatgtaagaatggtgttacaaa

SEQ ID NO: 390278 - DNA, 60 bp, Artificial
  Synthetic oligonucleotide
ctttggctgagtcattcgaagtcgtaatgaatgagcactttaatggtgctagcaccataa

SEQ ID NO: 390279 - DNA, 56 bp, Artificial
  Synthetic oligonucleotide
ctttgggactccaggcacttttcccaaggcattggcccacatacgtccaatatccg

SEQ ID NO: 390280 - DNA, 56 bp, Artificial
  Synthetic oligonucleotide
ctttgggactccatgcacatttgtcaaggtaatggcccaccacttaccattacccg

SEQ ID NO: 390281 - DNA, 55 bp, Artificial
  Synthetic oligonucleotide
ctttgggattgggcagacacttggacaaccgacgggacttatgaaggtctaactg

SEQ ID NO: 390282 - DNA, 60 bp, Artificial
  Synthetic oligonucleotide
ctttgggcagagccctagcaagctatgggtacgcgtgcgagccctcatatcatgcatcat

SEQ ID NO: 390283 - DNA, 55 bp, Artificial
  Synthetic oligonucleotide
ctttgggcgaactgatgacttatgttagttcgaaagaatacaccatgaatgagtg

SEQ ID NO: 390284 - DNA, 55 bp, Artificial
  Synthetic oligonucleotide
ctttgggcttcaggagtgtctcgactggctacgatatgcacacattgttgtccac

SEQ ID NO: 390285 - DNA, 56 bp, Artificial
  Synthetic oligonucleotide
ctttggggaaaacatgttctaccatttcttaggcaggtcagggtacacagtacatg

SEQ ID NO: 390286 - DNA, 55 bp, Artificial
  Synthetic oligonucleotide
ctttggggcagctggtacatcactcaaagggttaatcactagtgcatggaatggc

SEQ ID NO: 390287 - DNA, 55 bp, Artificial
  Synthetic oligonucleotide
ctttggggccgagatttgctttcccaaatgaaaattatgatgtgcagtcctaatg

SEQ ID NO: 390288 - DNA, 55 bp, Artificial
  Synthetic oligonucleotide
ctttggggcttaaatctaaatgaccgcataagtaattatgaggccctaatgacct

SEQ ID NO: 390289 - DNA, 52 bp, Artificial
  Synthetic oligonucleotide
ctttgggggaccagaccctgtataatcctgaaaaggagcgtttggtttgggc

SEQ ID NO: 390290 - DNA, 60 bp, Artificial
  Synthetic oligonucleotide
ctttgggggatgaaagatggaagtatctgcgcagcagactgcaggtgtttacatttaaca

SEQ ID NO: 390291 - DNA, 57 bp, Artificial
  Synthetic oligonucleotide
ctttggggggggaatgactacagacaaatttactctaagaatactgtatgatgagta

SEQ ID NO: 390292 - DNA, 54 bp, Artificial
  Synthetic oligonucleotide
ctttgggtaggcttaatccggcaactactttagttgcttcaggggctcctgtag

SEQ ID NO: 390293 - DNA, 55 bp, Artificial
  Synthetic oligonucleotide
ctttgggtagtatgttattgtgaatgaatgtgatgtctttgccttgtagaggctc

SEQ ID NO: 390294 - DNA, 55 bp, Artificial
  Synthetic oligonucleotide
ctttgggtcgtatctaatgttcgacacactacatgtatcgccgatgttacaccac

SEQ ID NO: 390295 - DNA, 54 bp, Artificial
  Synthetic oligonucleotide
ctttgggtgcttattaacttacaagaaacatcttctggtcgacgtgaacccaac

SEQ ID NO: 390296 - DNA, 55 bp, Artificial
  Synthetic oligonucleotide
ctttgggttaagcattagcaatgtagcaattgcgattgtagtagggataacactt

SEQ ID NO: 390297 - DNA, 57 bp, Artificial
  Synthetic oligonucleotide
ctttggtaaggtgaccaaacaggaggtgcgtcaattcttcaggtggtcccaggatca

SEQ ID NO: 390298 - DNA, 55 bp, Artificial
  Synthetic oligonucleotide
ctttggtagacactaatggcacgtaggcgtacagagtgtggaacacgtgcccacc

SEQ ID NO: 390299 - DNA, 55 bp, Artificial
  Synthetic oligonucleotide
ctttggtagagcttggtatgtgacttctcatgattttaacaatggagatacctgg

SEQ ID NO: 390300 - DNA, 56 bp, Artificial
  Synthetic oligonucleotide
ctttggtctatcgtgaccctacgaacaaacaattccacacctactctgtccgcgat

SEQ ID NO: 390301 - DNA, 55 bp, Artificial
  Synthetic oligonucleotide
ctttggtgacaaccttactacgctaaactagccgtttcataatgactcgcaaggc

SEQ ID NO: 390302 - DNA, 54 bp, Artificial
  Synthetic oligonucleotide
ctttggtgactatggccatgatggcctattgttgcgatatgaacaccgtggact

SEQ ID NO: 390303 - DNA, 57 bp, Artificial
  Synthetic oligonucleotide
ctttggtggaaattgccccaaacatgaattctcgatttaaattgctatgtactacta

SEQ ID NO: 390304 - DNA, 60 bp, Artificial
  Synthetic oligonucleotide
ctttggtggatacatatcatttagaatgaattctgagactatctcaggattgtaatatgt

SEQ ID NO: 390305 - DNA, 51 bp, Artificial
  Synthetic oligonucleotide
ctttggtgggttcacttttaaaagaacaagcgggtcctcagttaaaagaga

SEQ ID NO: 390306 - DNA, 55 bp, Artificial
  Synthetic oligonucleotide
ctttggtggtatattcaacgctgtaaaaggagttgtgtctagtgttttcagtgct

SEQ ID NO: 390307 - DNA, 54 bp, Artificial
  Synthetic oligonucleotide
ctttggttatctctaaaagccattttctaggttttgaaggtgaaagcatccctc

SEQ ID NO: 390308 - DNA, 56 bp, Artificial
  Synthetic oligonucleotide
ctttggttattatgctttacggttttcattgttgatggtatttgtggcctgcggtc

SEQ ID NO: 390309 - DNA, 58 bp, Artificial
  Synthetic oligonucleotide
ctttggttgagtctgtcactcgtgagcttcctttacggatatgtccgagttcggctag

SEQ ID NO: 390310 - DNA, 55 bp, Artificial
  Synthetic oligonucleotide
ctttggttgcaccctatgagtaacttttgtgtgatgttgtttgctacgtgcttag

SEQ ID NO: 390311 - DNA, 51 bp, Artificial
  Synthetic oligonucleotide
ctttgtaaaacgacgcgccagtgcgcacagtggatcctaggcgtaataacc

SEQ ID NO: 390312 - DNA, 52 bp, Artificial
  Synthetic oligonucleotide
ctttgtaacaaagtttgctatgatgctgtgtgagttcacatcaccgaaatgg

SEQ ID NO: 390313 - DNA, 58 bp, Artificial
  Synthetic oligonucleotide
ctttgtaaggggcgatatgtttcaggacccagctgaaagaccttacaaactgcatgat

SEQ ID NO: 390314 - DNA, 55 bp, Artificial
  Synthetic oligonucleotide
ctttgtacaagtccattacgtactggaagagagaagaatggaactcagactcatg

SEQ ID NO: 390315 - DNA, 51 bp, Artificial
  Synthetic oligonucleotide
ctttgtactcgcgatagacataacagtcaaaacggtcagactaatttgaag

SEQ ID NO: 390316 - DNA, 59 bp, Artificial
  Synthetic oligonucleotide
ctttgtagccgaagcaggaccaagtggaactcaaccagtcgaaacagcacaacaatctc

SEQ ID NO: 390317 - DNA, 55 bp, Artificial
  Synthetic oligonucleotide
ctttgtagcgcaggcaccatcctgcgcccgggaaaattaccaactgacagcgcag

SEQ ID NO: 390318 - DNA, 55 bp, Artificial
  Synthetic oligonucleotide
ctttgtaggaaggtatttagtagtgactgatgggacacgtgtaatgacaaatctg

SEQ ID NO: 390319 - DNA, 60 bp, Artificial
  Synthetic oligonucleotide
ctttgtaggacatttgtctattgaaggcatcaaagaagcagatataaccccagcacatgg

SEQ ID NO: 390320 - DNA, 58 bp, Artificial
  Synthetic oligonucleotide
ctttgtaggatcactaatgcgcaagtttcctagtgcgaaagtactgcttagtagttta

SEQ ID NO: 390321 - DNA, 59 bp, Artificial
  Synthetic oligonucleotide
ctttgtataagatattctcatagggattcctatcccccacttgatcggacacaaacatg

SEQ ID NO: 390322 - DNA, 55 bp, Artificial
  Synthetic oligonucleotide
ctttgtatacgtctaaatctacgactccgctttgacctgtagtaggtgtactgac

SEQ ID NO: 390323 - DNA, 57 bp, Artificial
  Synthetic oligonucleotide
ctttgtatccctgttacgtggaagcaactaagagacatacttcgatgttggaacagt

SEQ ID NO: 390324 - DNA, 60 bp, Artificial
  Synthetic oligonucleotide
ctttgtatctgcagataggcgtgccccagtatccattgtatgctgaatactccacatata

SEQ ID NO: 390325 - DNA, 59 bp, Artificial
  Synthetic oligonucleotide
ctttgtatgcctatggcgcctaaaccctcggggtatttatgtcattctgcagaaatgac

SEQ ID NO: 390326 - DNA, 55 bp, Artificial
  Synthetic oligonucleotide
ctttgtatggcgggagcctttagtcgttgtggtcctcaaccacaattcgaaataa

SEQ ID NO: 390327 - DNA, 60 bp, Artificial
  Synthetic oligonucleotide
ctttgtattcgcacgatggtcttttctcacatttgcagcatgctgtggtagtttctgaag

SEQ ID NO: 390328 - DNA, 55 bp, Artificial
  Synthetic oligonucleotide
ctttgtcaaaggagagccgcacaagcagtccaaactcgatgaggggcgctaccgc

SEQ ID NO: 390329 - DNA, 60 bp, Artificial
  Synthetic oligonucleotide
ctttgtcacctcagcagaagtctaaacgaaggctctttgcagagcaggacagcgggctcg

SEQ ID NO: 390330 - DNA, 53 bp, Artificial
  Synthetic oligonucleotide
ctttgtcagtatacttatgcgctagcaagcggcatcgcgcaaaatatgtcatc

SEQ ID NO: 390331 - DNA, 54 bp, Artificial
  Synthetic oligonucleotide
ctttgtccacgtttatcacctacccaagtattgttaagactgaacccaatcgga

SEQ ID NO: 390332 - DNA, 56 bp, Artificial
  Synthetic oligonucleotide
ctttgtccatggaccaactactgtggagtcgcacggaaactactctacgcagattg

SEQ ID NO: 390333 - DNA, 60 bp, Artificial
  Synthetic oligonucleotide
ctttgtccatgtaggttttgacatcgcttgagcttttagctccctgaatgttcggatgga

SEQ ID NO: 390334 - DNA, 52 bp, Artificial
  Synthetic oligonucleotide
ctttgtcccctcatgcttgagctcaagaagatgccatctggtaggaggatgc

SEQ ID NO: 390335 - DNA, 58 bp, Artificial
  Synthetic oligonucleotide
ctttgtcgaaacactagcgagaagtatttgtgagaagcttgaacagtctgggcttccg

SEQ ID NO: 390336 - DNA, 59 bp, Artificial
  Synthetic oligonucleotide
ctttgtctctacgtatttgttattaacaactgcaccggagtaatgctccattattcagc

SEQ ID NO: 390337 - DNA, 60 bp, Artificial
  Synthetic oligonucleotide
ctttgtctgaagtcactaacctgtctcctgacatcgtgcaggcaaattccatgttctcat

SEQ ID NO: 390338 - DNA, 55 bp, Artificial
  Synthetic oligonucleotide
ctttgtgaatgacgtccctatggcagtacgactgaaccatttacgtaatggaaac

SEQ ID NO: 390339 - DNA, 58 bp, Artificial
  Synthetic oligonucleotide
ctttgtgagtatggaattttctcttactgacccgagactggagccacacaagtgggaa

SEQ ID NO: 390340 - DNA, 55 bp, Artificial
  Synthetic oligonucleotide
ctttgtgatgtgcctttggactactacggcttcagacttgctcaccaagttcttt

SEQ ID NO: 390341 - DNA, 55 bp, Artificial
  Synthetic oligonucleotide
ctttgtgattggtgatccctgtcaaagtgattatgactcagagaaagatagatca

SEQ ID NO: 390342 - DNA, 52 bp, Artificial
  Synthetic oligonucleotide
ctttgtgcaagagaggggcattgtcatgttcagtgtttccatgttcaactcc

SEQ ID NO: 390343 - DNA, 60 bp, Artificial
  Synthetic oligonucleotide
ctttgtgcattgagggtgtctggatcaaaacacgtagtgaaggtgtagtgtgtgtcccca

SEQ ID NO: 390344 - DNA, 57 bp, Artificial
  Synthetic oligonucleotide
ctttgtgcgaattacatggaccttggtcgagaaaagtccaaggtgttgtctcttcca

SEQ ID NO: 390345 - DNA, 60 bp, Artificial
  Synthetic oligonucleotide
ctttgtgcgcgctcacgggctcattcgtctatgcatgctggtgcggaaagtcgctggggg

SEQ ID NO: 390346 - DNA, 60 bp, Artificial
  Synthetic oligonucleotide
ctttgtgctattctaagcaccactgggatgatgagacttaccgccttgatggtggattgc

SEQ ID NO: 390347 - DNA, 55 bp, Artificial
  Synthetic oligonucleotide
ctttgtggaaaccacctgcacgtgggccatatcccgaagattccttgaacggtga

SEQ ID NO: 390348 - DNA, 60 bp, Artificial
  Synthetic oligonucleotide
ctttgtgggccttgtttggtgcatcctacttgtattagaacttgtcatatgggctgcaag

SEQ ID NO: 390349 - DNA, 55 bp, Artificial
  Synthetic oligonucleotide
ctttgtggtggggtgatgctcgcagcccagatgttcattgtctcgccacagcgcc

SEQ ID NO: 390350 - DNA, 55 bp, Artificial
  Synthetic oligonucleotide
ctttgtgtcacatgacggaacaatgcatccggttgtccatgaaactctcaagcgc

SEQ ID NO: 390351 - DNA, 55 bp, Artificial
  Synthetic oligonucleotide
ctttgtgtcatatgcgcttgataaactatactggtctcatgacttatcaagtgga

SEQ ID NO: 390352 - DNA, 53 bp, Artificial
  Synthetic oligonucleotide
ctttgtgtggcacaaaagaccagtggccacgcaacatggcacggttgcaatgg

SEQ ID NO: 390353 - DNA, 58 bp, Artificial
  Synthetic oligonucleotide
ctttgtgtgtcgacgaacgttcgtggacagaggctggggcaatggttgtgggctattc

SEQ ID NO: 390354 - DNA, 55 bp, Artificial
  Synthetic oligonucleotide
ctttgttaaacgaaacaacatttagaacatcagactcattcaagtctttaacaat

SEQ ID NO: 390355 - DNA, 55 bp, Artificial
  Synthetic oligonucleotide
ctttgttaaggactggtcaaacaaagctttgaaggttgacttaatgccacataac

SEQ ID NO: 390356 - DNA, 56 bp, Artificial
  Synthetic oligonucleotide
ctttgttaattcttgggtagaacccaaagatctcgctagatacccagaacagacag

SEQ ID NO: 390357 - DNA, 53 bp, Artificial
  Synthetic oligonucleotide
ctttgttatggcccataatacagccctatctacgtttattaacttccctccgt

SEQ ID NO: 390358 - DNA, 56 bp, Artificial
  Synthetic oligonucleotide
ctttgttctcctcatagaaagaggcaaagctgaagccttgggtttggtcatctgta

SEQ ID NO: 390359 - DNA, 55 bp, Artificial
  Synthetic oligonucleotide
ctttgttgagactttagctagaagcatttgcgaaaagcttgaacagtccggactc

SEQ ID NO: 390360 - DNA, 54 bp, Artificial
  Synthetic oligonucleotide
ctttgttgtacgtatgtatttgtgataacaaggctactcaattttcgtttaatt

SEQ ID NO: 390361 - DNA, 58 bp, Artificial
  Synthetic oligonucleotide
ctttgttgtcccgatacttctgaaagctctatatatgttgacaacaagggggaggcaa

SEQ ID NO: 390362 - DNA, 60 bp, Artificial
  Synthetic oligonucleotide
ctttgtttagtcatacaagcgattgtcagtgcagggacagatccaaattgattattcagc

SEQ ID NO: 390363 - DNA, 53 bp, Artificial
  Synthetic oligonucleotide
ctttgtttccgctggatacgtaagcaatatacccggcttcgttcttcgggtaa

SEQ ID NO: 390364 - DNA, 55 bp, Artificial
  Synthetic oligonucleotide
cttttaaataatcaaccggtagcattggttggagcacttccatttattactgatt

SEQ ID NO: 390365 - DNA, 52 bp, Artificial
  Synthetic oligonucleotide
cttttaacaacaacaaaaggaagtctccagaacaagccaggtaccccgtcaa

SEQ ID NO: 390366 - DNA, 49 bp, Artificial
  Synthetic oligonucleotide
cttttaacaatcatagttttataaaagggtgtaaccgaagcggttttaa

SEQ ID NO: 390367 - DNA, 54 bp, Artificial
  Synthetic oligonucleotide
cttttaacggcacgacaacgatcaatagtttagttagccctacgttagacagcc

SEQ ID NO: 390368 - DNA, 55 bp, Artificial
  Synthetic oligonucleotide
cttttaactcaacgctttaagcgttaaatctttgggtcaattcgatcatggctaa

SEQ ID NO: 390369 - DNA, 60 bp, Artificial
  Synthetic oligonucleotide
cttttaagagaccttgaatatggatttagagcaactttagccagcataggagaatcagat

SEQ ID NO: 390370 - DNA, 55 bp, Artificial
  Synthetic oligonucleotide
cttttaagatcaactttgattgctattggacagtctaaagaaattgaaaccacga

SEQ ID NO: 390371 - DNA, 59 bp, Artificial
  Synthetic oligonucleotide
cttttaatctcaaaagtggaaggcaatttcaaaattcttggcatgcacattgctggtaa

SEQ ID NO: 390372 - DNA, 56 bp, Artificial
  Synthetic oligonucleotide
cttttaattacatcaagcgtcaagaattcctcccgcttgcagcgaatccttaaagg

SEQ ID NO: 390373 - DNA, 53 bp, Artificial
  Synthetic oligonucleotide
cttttacaaatatgatacgcatgcccgctaatatgatgaatacacgtgatcag

SEQ ID NO: 390374 - DNA, 55 bp, Artificial
  Synthetic oligonucleotide
cttttacaaatgtgtgcttttagaaagatagtgaagggccagagtgagaggttct

SEQ ID NO: 390375 - DNA, 53 bp, Artificial
  Synthetic oligonucleotide
cttttacaagaggattgagctgcccttgggttttactccttgaacccttcgga

SEQ ID NO: 390376 - DNA, 55 bp, Artificial
  Synthetic oligonucleotide
cttttacagtttattcagaccttctcgcattcgtgtcagctgatacagtagaacc

SEQ ID NO: 390377 - DNA, 53 bp, Artificial
  Synthetic oligonucleotide
cttttacccgaattttcaatgggaacgcgaaatgcggcgtatacaagaagaag

SEQ ID NO: 390378 - DNA, 53 bp, Artificial
  Synthetic oligonucleotide
cttttacgtggagttgataaggggaagggaacaggagactaaagtatggtgga

SEQ ID NO: 390379 - DNA, 53 bp, Artificial
  Synthetic oligonucleotide
cttttactacagccctccggtccggctattccaccacaaacctcgtccttggc

SEQ ID NO: 390380 - DNA, 55 bp, Artificial
  Synthetic oligonucleotide
cttttactgagtacaatatatccggcattacggtgaaaacctccgaccgagagtg

SEQ ID NO: 390381 - DNA, 57 bp, Artificial
  Synthetic oligonucleotide
cttttactggctgatgttagatcccaatgatactgttactttcagttttaatggggc

SEQ ID NO: 390382 - DNA, 51 bp, Artificial
  Synthetic oligonucleotide
cttttagaagacagacataacgggaaactatgtaaactaaaaggggtagcc

SEQ ID NO: 390383 - DNA, 59 bp, Artificial
  Synthetic oligonucleotide
cttttagaggtaaaccatattcttgggaacacagacagctagagcaacataatgggcaa

SEQ ID NO: 390384 - DNA, 52 bp, Artificial
  Synthetic oligonucleotide
cttttagagttccaaacaatgtactctatgtgctttttgtccttggctcgct

SEQ ID NO: 390385 - DNA, 55 bp, Artificial
  Synthetic oligonucleotide
cttttagcaagttgtgattgggacaagttacccatgtagactccctgggagcctg

SEQ ID NO: 390386 - DNA, 60 bp, Artificial
  Synthetic oligonucleotide
cttttagcttcaaagttgattgctagtagtagagagtcagacgaaagtaattcagatgta

SEQ ID NO: 390387 - DNA, 55 bp, Artificial
  Synthetic oligonucleotide
cttttagtggcgatagtgtgttgtttgtcctttggacacacttgccttgtcggac

SEQ ID NO: 390388 - DNA, 54 bp, Artificial
  Synthetic oligonucleotide
cttttagttgctgtacgtctattaacgactgtaatggataaccttaacgacgaa

SEQ ID NO: 390389 - DNA, 59 bp, Artificial
  Synthetic oligonucleotide
cttttagtttattactgttggatgtcggataatatgtccaaggcatcgacatttgtatc

SEQ ID NO: 390390 - DNA, 52 bp, Artificial
  Synthetic oligonucleotide
cttttataccgaaacctttgtatcggcgtatggtgaggaagggcctcccgga

SEQ ID NO: 390391 - DNA, 55 bp, Artificial
  Synthetic oligonucleotide
cttttataggtaatacctttattatcgcagcgtgtgtagctagtatgttgccgtt

SEQ ID NO: 390392 - DNA, 58 bp, Artificial
  Synthetic oligonucleotide
cttttatcagaggattgaaaatgcaaaatattattagagcttgcccttatgtggctgg

SEQ ID NO: 390393 - DNA, 55 bp, Artificial
  Synthetic oligonucleotide
cttttatcgcttatcatctacccgcagacagtacgcctattatgcgacccacgcg

SEQ ID NO: 390394 - DNA, 56 bp, Artificial
  Synthetic oligonucleotide
cttttatcggaatttgctatggatgacaaagaagggaacttcctatcctaaactca

SEQ ID NO: 390395 - DNA, 55 bp, Artificial
  Synthetic oligonucleotide
cttttatctgttcgaagttcttagtttctgttgatttagcggatgggggtcgaga

SEQ ID NO: 390396 - DNA, 53 bp, Artificial
  Synthetic oligonucleotide
cttttatgaagactacagacgtagaaaaaacatttggactaaatctaactgtc

SEQ ID NO: 390397 - DNA, 60 bp, Artificial
  Synthetic oligonucleotide
cttttatgaagtcacatcacgaacaccagtgagggctagggaagcgcacatacaaatgaa

SEQ ID NO: 390398 - DNA, 56 bp, Artificial
  Synthetic oligonucleotide
cttttatgcagacaaagcacaagttacacaatcttgtttgttagttagaggacacc

SEQ ID NO: 390399 - DNA, 60 bp, Artificial
  Synthetic oligonucleotide
cttttatgcttatactgctggcgctaacgactcagcagaatcagtaagtatacacatgac

SEQ ID NO: 390400 - DNA, 53 bp, Artificial
  Synthetic oligonucleotide
cttttatgtgtcgtgacatcccagaaaaacttcatctggacatgtgggatgtg

SEQ ID NO: 390401 - DNA, 54 bp, Artificial
  Synthetic oligonucleotide
cttttattgctgttttcggtaggtattacacagtaaactaaatctggtagtgag

SEQ ID NO: 390402 - DNA, 59 bp, Artificial
  Synthetic oligonucleotide
cttttattgtacctcctatggatgatttaatcgtagatacatatgcgtttgctgttcct

SEQ ID NO: 390403 - DNA, 55 bp, Artificial
  Synthetic oligonucleotide
cttttcaactctagtgaggttgtgattaattctaagctctcgaaatctggaactg

SEQ ID NO: 390404 - DNA, 56 bp, Artificial
  Synthetic oligonucleotide
cttttcacctcccacgccaggcctacaaccgcctgatgctcccgtttgaggaggcc

SEQ ID NO: 390405 - DNA, 55 bp, Artificial
  Synthetic oligonucleotide
cttttcacgataggttagttactgagtacaagcaatctgttgagatgcccggtct

SEQ ID NO: 390406 - DNA, 59 bp, Artificial
  Synthetic oligonucleotide
cttttcaggcaagcaggtatccttattagacccgtatgatttaactgagcttgagagta

SEQ ID NO: 390407 - DNA, 57 bp, Artificial
  Synthetic oligonucleotide
cttttccaaaactggggaattgaatccatcgacaatgtgatgggaatgatcggaatt

SEQ ID NO: 390408 - DNA, 57 bp, Artificial
  Synthetic oligonucleotide
cttttccagcacagttcttcaggattctggggcactaaagaggagattcccttacat

SEQ ID NO: 390409 - DNA, 55 bp, Artificial
  Synthetic oligonucleotide
cttttccagggacccgtatacaaagacattgagattgatgtttgcaatactcctc

SEQ ID NO: 390410 - DNA, 55 bp, Artificial
  Synthetic oligonucleotide
cttttcccactgaagaaggccccacaagccgatcttaaagtgaattgttacgcgc

SEQ ID NO: 390411 - DNA, 55 bp, Artificial
  Synthetic oligonucleotide
cttttccctgagttgaaatggggcgcaacgcctgatactatcaacggcttgccag

SEQ ID NO: 390412 - DNA, 55 bp, Artificial
  Synthetic oligonucleotide
cttttccgaaacacaaggtcagataattacctccaaatccactatagagtgcaac

SEQ ID NO: 390413 - DNA, 55 bp, Artificial
  Synthetic oligonucleotide
cttttccgatacagttactcagatgcttaaggagacagccgatgcgcacaagctg

SEQ ID NO: 390414 - DNA, 53 bp, Artificial
  Synthetic oligonucleotide
cttttccgctactaattcaacaccaaccacccctctcgttacttaccaagtca

SEQ ID NO: 390415 - DNA, 59 bp, Artificial
  Synthetic oligonucleotide
cttttccgtggtgtgtacaggacaagtgtggatagcgaggagttctacaaggctatgga

SEQ ID NO: 390416 - DNA, 60 bp, Artificial
  Synthetic oligonucleotide
cttttcgcttgacctgtagagttgacttgatcaagctggagaagttatcaggagtgactc

SEQ ID NO: 390417 - DNA, 55 bp, Artificial
  Synthetic oligonucleotide
cttttcggcactgtctcctggaacgctaatgccggccccgggacgatcctcacag

SEQ ID NO: 390418 - DNA, 60 bp, Artificial
  Synthetic oligonucleotide
cttttcgtgcctagccatgttgagaccgctccagtatgccaaacgtgagcgccttcttgg

SEQ ID NO: 390419 - DNA, 54 bp, Artificial
  Synthetic oligonucleotide
cttttctaccaacagattttaacacgactaacgctataataacttcatacgacg

SEQ ID NO: 390420 - DNA, 57 bp, Artificial
  Synthetic oligonucleotide
cttttctatccttcgtggtgagacttcaacgataattaaactacaaccatattcgca

SEQ ID NO: 390421 - DNA, 60 bp, Artificial
  Synthetic oligonucleotide
cttttctcatactcagccccgcacatcttatgcagctagaaaccacactacgctgcgaga

SEQ ID NO: 390422 - DNA, 51 bp, Artificial
  Synthetic oligonucleotide
cttttctcgggataccggagtctattatcggactcatccagaactctcgaa

SEQ ID NO: 390423 - DNA, 60 bp, Artificial
  Synthetic oligonucleotide
cttttctctcgagctcctcaagctcttttcttccagagacccactgctcgaggatgtctt

SEQ ID NO: 390424 - DNA, 55 bp, Artificial
  Synthetic oligonucleotide
cttttctgaagatcgaataaagttagttgcttgctgaacacgctatgccaatcgt

SEQ ID NO: 390425 - DNA, 55 bp, Artificial
  Synthetic oligonucleotide
cttttctgattaatagcggcctgctgtgtccaatctatcattcctacaccccttc

SEQ ID NO: 390426 - DNA, 60 bp, Artificial
  Synthetic oligonucleotide
cttttcttctaagtggtggatggaatgatgaggtgtctatgaaagtggagcccattgacg

SEQ ID NO: 390427 - DNA, 55 bp, Artificial
  Synthetic oligonucleotide
cttttcttgatggctgcgagttgactggaaaacgcctgtctgagggtgttttcag

SEQ ID NO: 390428 - DNA, 57 bp, Artificial
  Synthetic oligonucleotide
cttttctttcacaggctcctggcgtttcatggttcctacatccagcttatgggggta

SEQ ID NO: 390429 - DNA, 60 bp, Artificial
  Synthetic oligonucleotide
cttttgaacaaagtcgttgggctcaatgctgcgagaatgccattaatgtatctaagatga

SEQ ID NO: 390430 - DNA, 59 bp, Artificial
  Synthetic oligonucleotide
cttttgaacaatggctccagtgcatggaggactcagcctttaaggctgaggttaaagcc

SEQ ID NO: 390431 - DNA, 54 bp, Artificial
  Synthetic oligonucleotide
cttttgaacgagtttcccgaaactgtacacggtcttaggtgtatgcttgccgta

SEQ ID NO: 390432 - DNA, 55 bp, Artificial
  Synthetic oligonucleotide
cttttgaactctttgtcctgcacttggatagtatcaaagagggccatacagttgt

SEQ ID NO: 390433 - DNA, 52 bp, Artificial
  Synthetic oligonucleotide
cttttgacactgccctctctggggaggcacttgatgtcagaacagtgattag

SEQ ID NO: 390434 - DNA, 57 bp, Artificial
  Synthetic oligonucleotide
cttttgacatatccaaactcttcaaacttcgacttcatccaaactagtgattttctg

SEQ ID NO: 390435 - DNA, 53 bp, Artificial
  Synthetic oligonucleotide
cttttgacgaaaggagaaataaataccttgaagaacatcccagtgcggggaaa

SEQ ID NO: 390436 - DNA, 58 bp, Artificial
  Synthetic oligonucleotide
cttttgactgtcccaattgctctgttcatctctataaagtgttgaatctacttttaaa

SEQ ID NO: 390437 - DNA, 60 bp, Artificial
  Synthetic oligonucleotide
cttttgacttccagtcattcgccgaatctgctgaatactcagtaggagcagtttctaaga

SEQ ID NO: 390438 - DNA, 54 bp, Artificial
  Synthetic oligonucleotide
cttttgagaacctaccccaaattcatagtagagacacttactcttgtgggtctt

SEQ ID NO: 390439 - DNA, 60 bp, Artificial
  Synthetic oligonucleotide
cttttgagcaagagacgagaggctggtggttttgaactggacactgtgcttgatactcat

SEQ ID NO: 390440 - DNA, 60 bp, Artificial
  Synthetic oligonucleotide
cttttgagccccttgtggctgagccggacgatgttgagatctccacggccgcagaagtta

SEQ ID NO: 390441 - DNA, 55 bp, Artificial
  Synthetic oligonucleotide
cttttgaggcaactcttctcggccgtatggtcggccataaccaactactctttac

SEQ ID NO: 390442 - DNA, 50 bp, Artificial
  Synthetic oligonucleotide
cttttgagttccccgagtttactctccaatgtagacacagctgcccgtct

SEQ ID NO: 390443 - DNA, 55 bp, Artificial
  Synthetic oligonucleotide
cttttgataacgtgtattctgggaacagaagaatgattggactagctaaagtggt

SEQ ID NO: 390444 - DNA, 60 bp, Artificial
  Synthetic oligonucleotide
cttttgatcccgaagatagcctgtgacagttgcatcaaacattatgcaatccaataatgc

SEQ ID NO: 390445 - DNA, 60 bp, Artificial
  Synthetic oligonucleotide
cttttgattaacgtatttgatcgtcatattgtttatgaatgttctgaattcatatgatca

SEQ ID NO: 390446 - DNA, 60 bp, Artificial
  Synthetic oligonucleotide
cttttgcaaaggtcccgggtgcatgcttaagcagctaagagattctaagtgcgcctgtat

SEQ ID NO: 390447 - DNA, 58 bp, Artificial
  Synthetic oligonucleotide
cttttgcaagagaaagaacaagctcatggggttgtgaagaatttggctgtcttgctat

SEQ ID NO: 390448 - DNA, 55 bp, Artificial
  Synthetic oligonucleotide
cttttgcacattagctggccctggggcaagttgtgaggcttactctgaaagcggt

SEQ ID NO: 390449 - DNA, 56 bp, Artificial
  Synthetic oligonucleotide
cttttgcacctgaaacaagtcgctactgtggagttcttattaggtgcggacgggaa

SEQ ID NO: 390450 - DNA, 55 bp, Artificial
  Synthetic oligonucleotide
cttttgcagatatccgtaccttaagtaggcccattttttcagagcaggaaggccg

SEQ ID NO: 390451 - DNA, 54 bp, Artificial
  Synthetic oligonucleotide
cttttgccagattagctgaaaattaaactaactctttgaggttgcaccggtctt

SEQ ID NO: 390452 - DNA, 60 bp, Artificial
  Synthetic oligonucleotide
cttttgccctcttcccaatgtgtatgtgcctccaactcacaatgttctgctggatggaga

SEQ ID NO: 390453 - DNA, 55 bp, Artificial
  Synthetic oligonucleotide
cttttgcgcagatctgtccgtctctagtgccaactttatccccacggagacagcc

SEQ ID NO: 390454 - DNA, 57 bp, Artificial
  Synthetic oligonucleotide
cttttgcgctggggtaaactgctgataacgtaggagaagagagttgttcagggctta

SEQ ID NO: 390455 - DNA, 58 bp, Artificial
  Synthetic oligonucleotide
cttttgctataagatgggtaacaagtggtcaaagagttggcctgcagtaagggacaga

SEQ ID NO: 390456 - DNA, 56 bp, Artificial
  Synthetic oligonucleotide
cttttgctataagatgggtggcaagtggtcaaaacgtagtatgagtggatggcctg

SEQ ID NO: 390457 - DNA, 55 bp, Artificial
  Synthetic oligonucleotide
cttttgctattgaggatgttgaagacgttatcagtagcgaagatgtcgaagatac

SEQ ID NO: 390458 - DNA, 54 bp, Artificial
  Synthetic oligonucleotide
cttttgctgtacggggtactggtgatgaacctattattagtaccccgttgccag

SEQ ID NO: 390459 - DNA, 55 bp, Artificial
  Synthetic oligonucleotide
cttttgcttcgtcgggcactggcactgaacccataagtagtacccctgtacctgg

SEQ ID NO: 390460 - DNA, 57 bp, Artificial
  Synthetic oligonucleotide
cttttggagccttctcccttaatatattgagggcctcatgttttgaccctgaattga

SEQ ID NO: 390461 - DNA, 56 bp, Artificial
  Synthetic oligonucleotide
cttttggagtgtggattcgcactcctcccccttacagaccaccaaatgcccctatc

SEQ ID NO: 390462 - DNA, 60 bp, Artificial
  Synthetic oligonucleotide
cttttggcaacatggtcaaacataccctagattctctctaccattcttgagtatagcatc

SEQ ID NO: 390463 - DNA, 57 bp, Artificial
  Synthetic oligonucleotide
cttttggcaagttgtgactgggacaaattgcccatgtaaaccccttgagagcctgtc

SEQ ID NO: 390464 - DNA, 55 bp, Artificial
  Synthetic oligonucleotide
cttttggcgctgttaaagccatggaggaccctcagttggcgaggaaaacacctgg

SEQ ID NO: 390465 - DNA, 55 bp, Artificial
  Synthetic oligonucleotide
cttttggctatgtacatagaaagaaaagcatccaacaaccagctgattgagaacg

SEQ ID NO: 390466 - DNA, 55 bp, Artificial
  Synthetic oligonucleotide
cttttggctcgccgtgctacgatataggtgggaattttacttcccatcttctaaa

SEQ ID NO: 390467 - DNA, 50 bp, Artificial
  Synthetic oligonucleotide
cttttggcttcgaaataaaggacaagaaatgtgatgtcccttgtattggg

SEQ ID NO: 390468 - DNA, 51 bp, Artificial
  Synthetic oligonucleotide
cttttggggaacgaaaaccctagatctatacccgcccaccaccccaattgc

SEQ ID NO: 390469 - DNA, 57 bp, Artificial
  Synthetic oligonucleotide
cttttggtctccctgggggcaatcagtttctggatgtgctctaatgggtctttacag

SEQ ID NO: 390470 - DNA, 55 bp, Artificial
  Synthetic oligonucleotide
cttttggttagcgctgcgcgagtgtggtctgaacaatctgtggagtgggtgaccc

SEQ ID NO: 390471 - DNA, 58 bp, Artificial
  Synthetic oligonucleotide
cttttgtaatcaccagcagacaagtcaaggtagggacacaattaggccaagatgcccc

SEQ ID NO: 390472 - DNA, 55 bp, Artificial
  Synthetic oligonucleotide
cttttgtagcgcgttaactaccattggactgttagtattggcagtttcgacaacc

SEQ ID NO: 390473 - DNA, 57 bp, Artificial
  Synthetic oligonucleotide
cttttgtagcgtgcgctagcccgctggcttcccgaccgacctcaatccaagcgagtt

SEQ ID NO: 390474 - DNA, 60 bp, Artificial
  Synthetic oligonucleotide
cttttgtcagtgatgtcgaatctctgccctctggcatacctagtgaaccaaaaccatcta

SEQ ID NO: 390475 - DNA, 58 bp, Artificial
  Synthetic oligonucleotide
cttttgtccacccacctacagctggactcacagcaccgcgtggccattttagctagtt

SEQ ID NO: 390476 - DNA, 59 bp, Artificial
  Synthetic oligonucleotide
cttttgtccagctttaactgttctagtctgtctgaattgctgttccggagtattcagtc

SEQ ID NO: 390477 - DNA, 55 bp, Artificial
  Synthetic oligonucleotide
cttttgtcgatgcacaaggttctaaaactaacgctgacgtcgtccagtttggctc

SEQ ID NO: 390478 - DNA, 60 bp, Artificial
  Synthetic oligonucleotide
cttttgtctcactgatgacgtgacgactgaggatggtagggccgtcgcgcatggtaatcc

SEQ ID NO: 390479 - DNA, 60 bp, Artificial
  Synthetic oligonucleotide
cttttgtgatgcccttaaagagacctgcattttcaaccctatcagagtgggcatgtcaat

SEQ ID NO: 390480 - DNA, 57 bp, Artificial
  Synthetic oligonucleotide
cttttgtgggtgttaacaggtatgaccagtacgtgctccacaaaccatggacgctcg

SEQ ID NO: 390481 - DNA, 56 bp, Artificial
  Synthetic oligonucleotide
cttttgtggtacccttatctttagtcgttcaatcagaagcgctcctcagcgctatg

SEQ ID NO: 390482 - DNA, 55 bp, Artificial
  Synthetic oligonucleotide
cttttgtgtcccattcgtaagcataagcgttcataaatacataccagagaaaccc

SEQ ID NO: 390483 - DNA, 51 bp, Artificial
  Synthetic oligonucleotide
cttttgttgcttcacctgagtctttccaggcttccgacgtcgcgaagcgct

SEQ ID NO: 390484 - DNA, 49 bp, Artificial
  Synthetic oligonucleotide
ctttttacccctggttacctccaactcctattgtaaactttcaccttaa

SEQ ID NO: 390485 - DNA, 53 bp, Artificial
  Synthetic oligonucleotide
ctttttaggtatcaggaagaaagactaactaactttcaaccagattatccagt

SEQ ID NO: 390486 - DNA, 51 bp, Artificial
  Synthetic oligonucleotide
ctttttaggtcgctctagtttggttacacgctttaccattaacaatggagg

SEQ ID NO: 390487 - DNA, 52 bp, Artificial
  Synthetic oligonucleotide
ctttttagtacaccctgttatgcccatgaaggacatacatgagtcaattaga

SEQ ID NO: 390488 - DNA, 58 bp, Artificial
  Synthetic oligonucleotide
ctttttagtcgtcaacgaccaaattgggttagagatgctcagcgctggggatggagag

SEQ ID NO: 390489 - DNA, 56 bp, Artificial
  Synthetic oligonucleotide
ctttttatgcctatggagcttaaaaccctcgtggtatttgtgtcatttcagagaaa

SEQ ID NO: 390490 - DNA, 60 bp, Artificial
  Synthetic oligonucleotide
ctttttcagcagggttcaagcgcagtcgccgagatacagaagcactccaatccagccaag

SEQ ID NO: 390491 - DNA, 59 bp, Artificial
  Synthetic oligonucleotide
ctttttccggtgggcttccgatcacgtgactgacgtggctcatgagttctacgtcagaa

SEQ ID NO: 390492 - DNA, 59 bp, Artificial
  Synthetic oligonucleotide
ctttttgcggctgacttgaaatgctttggaaacacagccattgccaaatgtaacctgaa

SEQ ID NO: 390493 - DNA, 60 bp, Artificial
  Synthetic oligonucleotide
ctttttgcggctgctctgacgttgttaggcatttctgtgtccttgcttctcgccttgcta

SEQ ID NO: 390494 - DNA, 60 bp, Artificial
  Synthetic oligonucleotide
ctttttggcatctgactgtccatttctgcctaaacctaaaacacaggctgaatcattcat

SEQ ID NO: 390495 - DNA, 59 bp, Artificial
  Synthetic oligonucleotide
cttttttgccaactgatttcgaaacgaatgagtcaataatcacgtcatatgatggttgt

SEQ ID NO: 390496 - DNA, 52 bp, Artificial
  Synthetic oligonucleotide
cttttttggaggataacaacttaacttgactgcgaacagttttttagcaggg

SEQ ID NO: 390497 - DNA, 52 bp, Artificial
  Synthetic oligonucleotide
cttttttgtgggccccgcgcacgttctttttgtcgtccaatagaattgggcc

SEQ ID NO: 390498 - DNA, 56 bp, Artificial
  Synthetic oligonucleotide
cttttttttatactgcctatgtggttattacacagtcttactcttaatactataca

SEQ ID NO: 390499 - DNA, 55 bp, Artificial
  Synthetic oligonucleotide
gaaaaaaactgccgaattggagtcggtgagtataaatctatgtcgaataagacaa

SEQ ID NO: 390500 - DNA, 58 bp, Artificial
  Synthetic oligonucleotide
gaaaaaacttatactgcctcccaatccattggatgaacttatacctctatggtctcaa

SEQ ID NO: 390501 - DNA, 56 bp, Artificial
  Synthetic oligonucleotide
gaaaaaagggcagtaggattgggaatgctattcttgggggttctaagtgcagcagg

SEQ ID NO: 390502 - DNA, 58 bp, Artificial
  Synthetic oligonucleotide
gaaaaaagggtctgactatgttggggatgtgtccagtacctgcatgcagtgtaagtgc

SEQ ID NO: 390503 - DNA, 54 bp, Artificial
  Synthetic oligonucleotide
gaaaaaatggactagtatttacgggaggaggttgtgactggactcaatggagtt

SEQ ID NO: 390504 - DNA, 59 bp, Artificial
  Synthetic oligonucleotide
gaaaaacaacttggtgtagtcaaacggattacaattatctaatcatacagaatcgcaca

SEQ ID NO: 390505 - DNA, 55 bp, Artificial
  Synthetic oligonucleotide
gaaaaacaattaacagagaccgtcaagataaaggtttcggatcctctgacgccta

SEQ ID NO: 390506 - DNA, 58 bp, Artificial
  Synthetic oligonucleotide
gaaaaacagagaacaccccaagataaccaattgacctacgttgtcatagccatcctca

SEQ ID NO: 390507 - DNA, 60 bp, Artificial
  Synthetic oligonucleotide
gaaaaacctacatttcattgtagtccccctatctgtttgcatggctgcaaatcaggatgg

SEQ ID NO: 390508 - DNA, 49 bp, Artificial
  Synthetic oligonucleotide
gaaaaacctagggaggtaaattccaagttgaaaggggtagaaagatacc

SEQ ID NO: 390509 - DNA, 59 bp, Artificial
  Synthetic oligonucleotide
gaaaaacctccagactagagtcactgccatcgagaaatatctaaaggaccaggcacggc

SEQ ID NO: 390510 - DNA, 55 bp, Artificial
  Synthetic oligonucleotide
gaaaaacctgaatgacaattacggaataaccagagaacaagctttcaatttatta

SEQ ID NO: 390511 - DNA, 54 bp, Artificial
  Synthetic oligonucleotide
gaaaaactatccccgctggtcggtgggccgatacccaatcggtctatggaggga

SEQ ID NO: 390512 - DNA, 59 bp, Artificial
  Synthetic oligonucleotide
gaaaaactcatatgatcctgcacttggtttctttctaatggataacccaaaatgtgctg

SEQ ID NO: 390513 - DNA, 54 bp, Artificial
  Synthetic oligonucleotide
gaaaaactctgacgtactaactgctgtgtcgtacgtggctagtagcgtagcccg

SEQ ID NO: 390514 - DNA, 58 bp, Artificial
  Synthetic oligonucleotide
gaaaaagactggcacctgggtcatggggtctccatagaatggaggctaagaaagtata

SEQ ID NO: 390515 - DNA, 58 bp, Artificial
  Synthetic oligonucleotide
gaaaaagagaggtctgtttggagcaatagcaggattcatagaaggggggtggcaagga

SEQ ID NO: 390516 - DNA, 59 bp, Artificial
  Synthetic oligonucleotide
gaaaaagggactgctcgtatgagccggtgattccgttatcattcttgctgcgtataacg

SEQ ID NO: 390517 - DNA, 59 bp, Artificial
  Synthetic oligonucleotide
gaaaaagggctccaggatcttgccccactatacgcactagaggccaaacaagtgcgtga

SEQ ID NO: 390518 - DNA, 59 bp, Artificial
  Synthetic oligonucleotide
gaaaaaggtctgctcacacaaatgatgtaagacagttaacagaagtggtgcaaaaaata

SEQ ID NO: 390519 - DNA, 51 bp, Artificial
  Synthetic oligonucleotide
gaaaaagtcccaggttccccaaatgaccaggaaataccccaagcctagatt

SEQ ID NO: 390520 - DNA, 52 bp, Artificial
  Synthetic oligonucleotide
gaaaaagtcgaaaggttgaaacacgggaccttcggccctgttcacttcagaa

SEQ ID NO: 390521 - DNA, 56 bp, Artificial
  Synthetic oligonucleotide
gaaaaagtggcagagacgtggcggtcgttcatgaaaattgctcggttaaacaatta

SEQ ID NO: 390522 - DNA, 50 bp, Artificial
  Synthetic oligonucleotide
gaaaaataaagaaatgacgaagccaacccaagtattagttagatccgtca

SEQ ID NO: 390523 - DNA, 52 bp, Artificial
  Synthetic oligonucleotide
gaaaaatacctcaatacttaaagggactcttgggaggcattttgggaatagg

SEQ ID NO: 390524 - DNA, 58 bp, Artificial
  Synthetic oligonucleotide
gaaaaatcaaccgttatggcagcattcactgggaatacggagggaagaacctcagaca

SEQ ID NO: 390525 - DNA, 53 bp, Artificial
  Synthetic oligonucleotide
gaaaaatcttggaaaggaacaggacccaacgggggtagagcctggggatcatc

SEQ ID NO: 390526 - DNA, 54 bp, Artificial
  Synthetic oligonucleotide
gaaaaatgaaccactggagtttcaggtataccctccagaaccaactaacttgtg

SEQ ID NO: 390527 - DNA, 57 bp, Artificial
  Synthetic oligonucleotide
gaaaaatggttcgtacccaaatctgagcaagtcctatgtgaacaacaaagagaaaga

SEQ ID NO: 390528 - DNA, 60 bp, Artificial
  Synthetic oligonucleotide
gaaaaatgtgtatgacgtcgccatttctgatatggatcaaagcataggatctagcgttgc

SEQ ID NO: 390529 - DNA, 60 bp, Artificial
  Synthetic oligonucleotide
gaaaaatgttaaatccggctacatctcatgtaacaatgcctcaatatgatgtttagaaaa

SEQ ID NO: 390530 - DNA, 60 bp, Artificial
  Synthetic oligonucleotide
gaaaaatgttctccgagctaagttatgagagcgtgaggacacatactaaagtgcagatgt

SEQ ID NO: 390531 - DNA, 57 bp, Artificial
  Synthetic oligonucleotide
gaaaaattccggagaagctgctagtggataaggtgagagggaaactgggtgattgta

SEQ ID NO: 390532 - DNA, 60 bp, Artificial
  Synthetic oligonucleotide
gaaaaattggctgcgcagctgaaggcttaccgagtatgaagctgccaataagaagctata

SEQ ID NO: 390533 - DNA, 54 bp, Artificial
  Synthetic oligonucleotide
gaaaaattgtccgttccaggcaaatcggttgactggttgtcagaccggcccgag

SEQ ID NO: 390534 - DNA, 60 bp, Artificial
  Synthetic oligonucleotide
gaaaaatttagagacatcaggaagtacataccagaatctgaggatgactatccagagtgc

SEQ ID NO: 390535 - DNA, 56 bp, Artificial
  Synthetic oligonucleotide
gaaaaatttgacgtttcacctgaactgatcacacatgtgatagagggcattttttc

SEQ ID NO: 390536 - DNA, 56 bp, Artificial
  Synthetic oligonucleotide
gaaaacaaaacataacacataatatcaaaagtgaccaaacacaacataaccacgtg

SEQ ID NO: 390537 - DNA, 54 bp, Artificial
  Synthetic oligonucleotide
gaaaacaaacagaccagaactagcacagatcaccacaatctgccctagtatagg

SEQ ID NO: 390538 - DNA, 60 bp, Artificial
  Synthetic oligonucleotide
gaaaacaaacagaccgtatcagaagagtacttcatggcccgcagctttgatgaggttcga

SEQ ID NO: 390539 - DNA, 52 bp, Artificial
  Synthetic oligonucleotide
gaaaacaaacatacacgaaccgaacgtcaacaaacatacacggccctaaaag

SEQ ID NO: 390540 - DNA, 58 bp, Artificial
  Synthetic oligonucleotide
gaaaacaaaccaaacgcaccagtcaagcccctagcgaactcgaatctgcctgcccagc

SEQ ID NO: 390541 - DNA, 58 bp, Artificial
  Synthetic oligonucleotide
gaaaacaacattgctacctaactggatcggctcaatgtaccaaggtgcccgaaatatg

SEQ ID NO: 390542 - DNA, 55 bp, Artificial
  Synthetic oligonucleotide
gaaaacaactatatcttgtattcggatcatgcaaaccaactggtgtctggggttt

SEQ ID NO: 390543 - DNA, 54 bp, Artificial
  Synthetic oligonucleotide
gaaaacaagaactggaacggacaaccgcgttcgttcctatatcaagctaaagag

SEQ ID NO: 390544 - DNA, 54 bp, Artificial
  Synthetic oligonucleotide
gaaaacaagacgagacgaacctaaacagaacgagccatccgcagaaaaactaaa

SEQ ID NO: 390545 - DNA, 60 bp, Artificial
  Synthetic oligonucleotide
gaaaacaattcgcagacaaaatggagatttatagatgttagtaagcagtcaccggatgct

SEQ ID NO: 390546 - DNA, 55 bp, Artificial
  Synthetic oligonucleotide
gaaaacacatgtccgacaccgcaaccccagaaggcactcccgccgcgacgacccc

SEQ ID NO: 390547 - DNA, 53 bp, Artificial
  Synthetic oligonucleotide
gaaaacaccggaaacggtgaagttcacaatcttgttccacctagaccggacac

SEQ ID NO: 390548 - DNA, 60 bp, Artificial
  Synthetic oligonucleotide
gaaaacactgcaaaggtgctgtgtggacttgctctacatcagatgatgctaggaaatgga

SEQ ID NO: 390549 - DNA, 57 bp, Artificial
  Synthetic oligonucleotide
gaaaacactggtgtattcccaacgctttcctcaggttgtagttgaattgcacttgta

SEQ ID NO: 390550 - DNA, 57 bp, Artificial
  Synthetic oligonucleotide
gaaaacacttgtgtattcccagagcttttcgtaggttgtagttgaaatggatcctga

SEQ ID NO: 390551 - DNA, 55 bp, Artificial
  Synthetic oligonucleotide
gaaaacagacttgagatgggtaagtgtcaaaatggtctcgtcattttgaaactta

SEQ ID NO: 390552 - DNA, 55 bp, Artificial
  Synthetic oligonucleotide
gaaaacagagcttaacggtttctgggacacgggagctcagataacatgcatacca

SEQ ID NO: 390553 - DNA, 55 bp, Artificial
  Synthetic oligonucleotide
gaaaacagagtaccagcaacaagcgcattacaacaacaagtaccctttacaatcg

SEQ ID NO: 390554 - DNA, 60 bp, Artificial
  Synthetic oligonucleotide
gaaaacagatgaagttggcttttattttgtcatctaccaaagggatagtgtatcatctgc

SEQ ID NO: 390555 - DNA, 51 bp, Artificial
  Synthetic oligonucleotide
gaaaacagatggcaggtgctgatagtgtggcaagtggacagacagaaggtg

SEQ ID NO: 390556 - DNA, 60 bp, Artificial
  Synthetic oligonucleotide
gaaaacataacatcccacgatcccatgtccgtacaactgtgcgacgcagtcacatcgttg

SEQ ID NO: 390557 - DNA, 60 bp, Artificial
  Synthetic oligonucleotide
gaaaacatagtctgccacaatgctggttggtatcaaatgggagctaccttaatgagtccc

SEQ ID NO: 390558 - DNA, 60 bp, Artificial
  Synthetic oligonucleotide
gaaaacatatctcaatacgtgtctgtgaacgtaccagatgattggtcgttcgcgaactgg

SEQ ID NO: 390559 - DNA, 60 bp, Artificial
  Synthetic oligonucleotide
gaaaacatcagaacgcatttgtcaaggagtgttactatcatattcaccaatgccattaac

SEQ ID NO: 390560 - DNA, 55 bp, Artificial
  Synthetic oligonucleotide
gaaaacatcccctatcttggggattgtatgttctatgatgcacctggcatcagtc

SEQ ID NO: 390561 - DNA, 55 bp, Artificial
  Synthetic oligonucleotide
gaaaacatccgcgtgccattctatgtgaaggacattcctgaaaatctacatgaca

SEQ ID NO: 390562 - DNA, 55 bp, Artificial
  Synthetic oligonucleotide
gaaaacatccggaagccacttacgccaaatgtgggtctggcccatggcttacccc

SEQ ID NO: 390563 - DNA, 57 bp, Artificial
  Synthetic oligonucleotide
gaaaacatttgtgtatccccaaagcctcccgcaggttgtagttgaactgtatctgaa

SEQ ID NO: 390564 - DNA, 56 bp, Artificial
  Synthetic oligonucleotide
gaaaaccaatcaccctctgaaaaaaacttcctagagaggttctttgccatctcatc

SEQ ID NO: 390565 - DNA, 56 bp, Artificial
  Synthetic oligonucleotide
gaaaaccacaaagagctgatgcatatcaagaatgagatattaccgagatttaagaa

SEQ ID NO: 390566 - DNA, 53 bp, Artificial
  Synthetic oligonucleotide
gaaaaccacaagtggagggaaagagtgtgactctcaattttgcctctgcatat

SEQ ID NO: 390567 - DNA, 60 bp, Artificial
  Synthetic oligonucleotide
gaaaaccatactgagaatgctttgttattgtatatggcatgtactcatgcatcaaatcct

SEQ ID NO: 390568 - DNA, 54 bp, Artificial
  Synthetic oligonucleotide
gaaaaccatttgccaacaagccgcagacactgttctagccaaaaggaggttaga

SEQ ID NO: 390569 - DNA, 59 bp, Artificial
  Synthetic oligonucleotide
gaaaacccagaatgtacagaatgtatagaagtctagacgtgccaaggggctgtgaaggc

SEQ ID NO: 390570 - DNA, 55 bp, Artificial
  Synthetic oligonucleotide
gaaaaccccgacgcctcccccaaggagacgccggacagtgggtctgagtgagagc

SEQ ID NO: 390571 - DNA, 56 bp, Artificial
  Synthetic oligonucleotide
gaaaacccctgtaaaattggcttgcagacatcttctattgaaggggcatggggttc

SEQ ID NO: 390572 - DNA, 54 bp, Artificial
  Synthetic oligonucleotide
gaaaacccgagccaaaaggaacgctgtttggattcaaagatccttacaagatcc

SEQ ID NO: 390573 - DNA, 52 bp, Artificial
  Synthetic oligonucleotide
gaaaacccggccatgcgcgtgttcccgttagcaaatcccccgaaggttcgac

SEQ ID NO: 390574 - DNA, 51 bp, Artificial
  Synthetic oligonucleotide
gaaaacccggtagaaaccgggttgtcaatatgctaaaacgcggtgtatccc

SEQ ID NO: 390575 - DNA, 60 bp, Artificial
  Synthetic oligonucleotide
gaaaaccctagcactaagatagaagaccatatttcatattatggggctgtcaggacagaa

SEQ ID NO: 390576 - DNA, 56 bp, Artificial
  Synthetic oligonucleotide
gaaaaccgaatacggtgagttcactatgctgggcatttatgacaggtgggccgttt

SEQ ID NO: 390577 - DNA, 59 bp, Artificial
  Synthetic oligonucleotide
gaaaacctccgatcgagagtggactacagctgaggcgttgcgtatcgcaaggtacaaac

SEQ ID NO: 390578 - DNA, 57 bp, Artificial
  Synthetic oligonucleotide
gaaaaccttcagagtcaccccttggaccatggatagggttgtggagagctacactgg

SEQ ID NO: 390579 - DNA, 55 bp, Artificial
  Synthetic oligonucleotide
gaaaacgaaaccctgcatagatattggcgagctggctcctttacacactctgcgg

SEQ ID NO: 390580 - DNA, 54 bp, Artificial
  Synthetic oligonucleotide
gaaaacgaccataaccttacttcacccataagtcaataggaggtgtagtggaac

SEQ ID NO: 390581 - DNA, 55 bp, Artificial
  Synthetic oligonucleotide
gaaaacgaggatgattacccagattgtaatttagctttatctgcaaaccaaccag

SEQ ID NO: 390582 - DNA, 60 bp, Artificial
  Synthetic oligonucleotide
gaaaacgatgacgcattgaggctacttgaggaacttgcccgaagtcaattgccatcacga

SEQ ID NO: 390583 - DNA, 55 bp, Artificial
  Synthetic oligonucleotide
gaaaacgcccacgactctcccaccaggggcgtggattgacagcacacggggcggt

SEQ ID NO: 390584 - DNA, 55 bp, Artificial
  Synthetic oligonucleotide
gaaaacgccggactggtcgaggatttcgacacgttcaaagaggagctgtatgtgg

SEQ ID NO: 390585 - DNA, 57 bp, Artificial
  Synthetic oligonucleotide
gaaaacgggactctagcatacttaccgacagccagacagcgaccaaaagaattcgga

SEQ ID NO: 390586 - DNA, 55 bp, Artificial
  Synthetic oligonucleotide
gaaaacgtactgagggtgatgcgaaagcttctgctatgtattctggaaaaggtcc

SEQ ID NO: 390587 - DNA, 60 bp, Artificial
  Synthetic oligonucleotide
gaaaacgtcaacagtggcgtcaccattggtggagaggacaacagctcgccgctattcgta

SEQ ID NO: 390588 - DNA, 54 bp, Artificial
  Synthetic oligonucleotide
gaaaacgttccaacgcagaccgaccacgggactttgcccataagaaacagtatc

SEQ ID NO: 390589 - DNA, 60 bp, Artificial
  Synthetic oligonucleotide
gaaaactaatgagtggtctacagtcatagacaaatgcattcacatatgcttgatcaaaaa

SEQ ID NO: 390590 - DNA, 60 bp, Artificial
  Synthetic oligonucleotide
gaaaactacaagctttattgcttttagatagagttcctgctctgcaagaggtggatgaca

SEQ ID NO: 390591 - DNA, 59 bp, Artificial
  Synthetic oligonucleotide
gaaaactacagccattaagaaactatttcaacccgcgacagatctcatcgtgactgcca

SEQ ID NO: 390592 - DNA, 55 bp, Artificial
  Synthetic oligonucleotide
gaaaactaccgatctgggtgaagactctgtagtttccgggtcacgctatccatct

SEQ ID NO: 390593 - DNA, 56 bp, Artificial
  Synthetic oligonucleotide
gaaaactagaatgttccaagaggtgacttggagtcgtgtggaaagagctacgaccc

SEQ ID NO: 390594 - DNA, 55 bp, Artificial
  Synthetic oligonucleotide
gaaaactaggtaacgaattatatatatcacccgaattagaaaacttatggcctca

SEQ ID NO: 390595 - DNA, 60 bp, Artificial
  Synthetic oligonucleotide
gaaaactagtgtcgaatacattattcacaaggtaggagctgacacatgtgcattggttca

SEQ ID NO: 390596 - DNA, 57 bp, Artificial
  Synthetic oligonucleotide
gaaaactatcggtcccaggacaggtatgacttccatctattctattccaaaagttgc

SEQ ID NO: 390597 - DNA, 55 bp, Artificial
  Synthetic oligonucleotide
gaaaactatgctacctgtgagccccgtccaaggacgttaaaagaagtcaggccac

SEQ ID NO: 390598 - DNA, 52 bp, Artificial
  Synthetic oligonucleotide
gaaaactcgacgattcccaaagttccgactggacaggaaatgggtggtgacg

SEQ ID NO: 390599 - DNA, 59 bp, Artificial
  Synthetic oligonucleotide
gaaaactcgtgtcttcactgctgcccccataacaagtctaattgcgatgaaatactacg

SEQ ID NO: 390600 - DNA, 54 bp, Artificial
  Synthetic oligonucleotide
gaaaactctactccaagtatcaaggaccactctcctttaccccaaaatggaata

SEQ ID NO: 390601 - DNA, 52 bp, Artificial
  Synthetic oligonucleotide
gaaaactcttccgaaaccgaaactgactgaaactacctcgaccgaccttaga

SEQ ID NO: 390602 - DNA, 55 bp, Artificial
  Synthetic oligonucleotide
gaaaactgagcatgtcattgttttccgggtaactttgtaacctttccctcagctg

SEQ ID NO: 390603 - DNA, 60 bp, Artificial
  Synthetic oligonucleotide
gaaaactgcgtttgctgttgcccagttcttgagtgctccttgctctggcttgtccagcca

SEQ ID NO: 390604 - DNA, 52 bp, Artificial
  Synthetic oligonucleotide
gaaaacttcgtgagaccctcatggctgggaaagggcaccagccgtgtagtaa

SEQ ID NO: 390605 - DNA, 55 bp, Artificial
  Synthetic oligonucleotide
gaaaacttgacagcagcaagaaggaagagttgtcattgttatatgagcacttgtc

SEQ ID NO: 390606 - DNA, 53 bp, Artificial
  Synthetic oligonucleotide
gaaaacttgacgaactggctagacgaaatagaaatggacgaaaaactaagtcc

SEQ ID NO: 390607 - DNA, 55 bp, Artificial
  Synthetic oligonucleotide
gaaaactttgcgatggcgcaaggtaattcgcaacaaacccaagcaggtgtgaccg

SEQ ID NO: 390608 - DNA, 54 bp, Artificial
  Synthetic oligonucleotide
gaaaagaacggtatgaatccgagtagacatttaacccaatggataattccaacg

SEQ ID NO: 390609 - DNA, 50 bp, Artificial
  Synthetic oligonucleotide
gaaaagaagagccacaaaataccgaaaaccaagactttacagacgttatg

SEQ ID NO: 390610 - DNA, 58 bp, Artificial
  Synthetic oligonucleotide
gaaaagaagctgtattactctactatgctagggagaaaggtgttacaaggcttggata

SEQ ID NO: 390611 - DNA, 51 bp, Artificial
  Synthetic oligonucleotide
gaaaagaaggcgttggaccaaccgccccatgtggaggaaacctcggtttta

SEQ ID NO: 390612 - DNA, 56 bp, Artificial
  Synthetic oligonucleotide
gaaaagacacaaacatggaactaatcgggcaactacccgcctcgtattcactccta

SEQ ID NO: 390613 - DNA, 55 bp, Artificial
  Synthetic oligonucleotide
gaaaagacacctctatctcagatgaccttcagttatgaggacaatctggtaagag

SEQ ID NO: 390614 - DNA, 57 bp, Artificial
  Synthetic oligonucleotide
gaaaagaccaggaggcaactgagggaaaatgccgaagacatgggcaatggttgtttc

SEQ ID NO: 390615 - DNA, 60 bp, Artificial
  Synthetic oligonucleotide
gaaaagacgatatggacctcaagtagctccattgtgatgtgtggagtagaacatgagatt

SEQ ID NO: 390616 - DNA, 55 bp, Artificial
  Synthetic oligonucleotide
gaaaagacgcgccctgccccgcaatcgacgtggcgcactggtgactgttggatta

SEQ ID NO: 390617 - DNA, 60 bp, Artificial
  Synthetic oligonucleotide
gaaaagactatggactaaccatgaccccagctgacaagtcagccacatttgaaacggtca

SEQ ID NO: 390618 - DNA, 55 bp, Artificial
  Synthetic oligonucleotide
gaaaagacttagacgttcaacatgtcattgtcggcagtgacaatagcgacgaata

SEQ ID NO: 390619 - DNA, 59 bp, Artificial
  Synthetic oligonucleotide
gaaaagagcgagcctcccgattacgagattgccaggacctatcaagtttggagtcatcc

SEQ ID NO: 390620 - DNA, 56 bp, Artificial
  Synthetic oligonucleotide
gaaaagagtctcggcctgatcgatgtggattgcagcagcgcaaacaccacttcaga

SEQ ID NO: 390621 - DNA, 60 bp, Artificial
  Synthetic oligonucleotide
gaaaagataaggccactcctaatagatggcacggcctcattgagtcctggaatgatgatg

SEQ ID NO: 390622 - DNA, 60 bp, Artificial
  Synthetic oligonucleotide
gaaaagatagtcacacgcgaaatgttgcgttattatatgaagactgacatctttgatggc

SEQ ID NO: 390623 - DNA, 56 bp, Artificial
  Synthetic oligonucleotide
gaaaagatcaagcattgttttcgaaaacttcctgttaatagacctattgattggaa

SEQ ID NO: 390624 - DNA, 55 bp, Artificial
  Synthetic oligonucleotide
gaaaagatgatgaaacgtgaggccccatggcgtacgaatgctgggacctccaagg

SEQ ID NO: 390625 - DNA, 58 bp, Artificial
  Synthetic oligonucleotide
gaaaagatggggctatactctaaatttcatgggatatgttattggtagttggggatca

SEQ ID NO: 390626 - DNA, 50 bp, Artificial
  Synthetic oligonucleotide
gaaaagatgtgggccaatcattcagaaaggtctgacattgactggaaact

SEQ ID NO: 390627 - DNA, 58 bp, Artificial
  Synthetic oligonucleotide
gaaaagcaagtgagagtcctcaaggcgcgtacaaacggacctaaagtcaatgacacaa

SEQ ID NO: 390628 - DNA, 56 bp, Artificial
  Synthetic oligonucleotide
gaaaagcaatctctgtaacaaatacagggccaccccatttgttatcacttttatgg

SEQ ID NO: 390629 - DNA, 60 bp, Artificial
  Synthetic oligonucleotide
gaaaagcacgaagcctacaagacaaatctcgtgactgtcttacgtgaactgttcatgtgg

SEQ ID NO: 390630 - DNA, 55 bp, Artificial
  Synthetic oligonucleotide
gaaaagcactagttctattgttttctagatttcgtggccaacccacagaggtcta

SEQ ID NO: 390631 - DNA, 51 bp, Artificial
  Synthetic oligonucleotide
gaaaagcatgttcacgcttaaggttacggggggtgagtttggcgaggcttg

SEQ ID NO: 390632 - DNA, 60 bp, Artificial
  Synthetic oligonucleotide
gaaaagccaattgtttgaagcattcggacctgcagagacagcaccatccattctaacagt

SEQ ID NO: 390633 - DNA, 60 bp, Artificial
  Synthetic oligonucleotide
gaaaagcccacctggcaatagaagtgcatttagcattgaaaagtttatatgcaagtgtgt

SEQ ID NO: 390634 - DNA, 54 bp, Artificial
  Synthetic oligonucleotide
gaaaagccgaaattggccggtccttggcacgccactctggcgtatcccctcaga

SEQ ID NO: 390635 - DNA, 60 bp, Artificial
  Synthetic oligonucleotide
gaaaagcgcagaaatgctagagtcgagttccttcacgaataatgctggagtaggtagaga

SEQ ID NO: 390636 - DNA, 57 bp, Artificial
  Synthetic oligonucleotide
gaaaagcgcatgtttgctgacgtgcgcaagaagagtaatggcacgttcgttctgaag

SEQ ID NO: 390637 - DNA, 60 bp, Artificial
  Synthetic oligonucleotide
gaaaagctaatgtccatcgcactgctggcagtgcactccggcccggatgtgtatgacgaa

SEQ ID NO: 390638 - DNA, 58 bp, Artificial
  Synthetic oligonucleotide
gaaaagctcgcgaaactgtcaaccgccgagaggcgtgaatatgaactaataaagaaca

SEQ ID NO: 390639 - DNA, 52 bp, Artificial
  Synthetic oligonucleotide
gaaaagcttgttgggccacccataacagtccattatgtctaagcgcgatggt

SEQ ID NO: 390640 - DNA, 53 bp, Artificial
  Synthetic oligonucleotide
gaaaaggaaaagttgtgggtctttacggtaatggtgttgtcacaaggagtgga

SEQ ID NO: 390641 - DNA, 56 bp, Artificial
  Synthetic oligonucleotide
gaaaaggactagtcgagggtgtggtcatctccaaggaaggttctgaatcatgcatc

SEQ ID NO: 390642 - DNA, 60 bp, Artificial
  Synthetic oligonucleotide
gaaaaggagcctgggttccctgagcgttgccgagccagccatgattgccgagtgcaagac

SEQ ID NO: 390643 - DNA, 57 bp, Artificial
  Synthetic oligonucleotide
gaaaaggaggcgttgaagttttggatacagtaccactcactgaggaaacacagtaca

SEQ ID NO: 390644 - DNA, 55 bp, Artificial
  Synthetic oligonucleotide
gaaaaggatctgttacctgcaagcctaacaatatggttccctttgtttcaggcca

SEQ ID NO: 390645 - DNA, 56 bp, Artificial
  Synthetic oligonucleotide
gaaaaggcataagtatgtcatttcttctgataaaccacctcttagtgcacgttatg

SEQ ID NO: 390646 - DNA, 55 bp, Artificial
  Synthetic oligonucleotide
gaaaaggcatgctactgcaaatcctatggtgagcactggtttgaggctgccaaac

SEQ ID NO: 390647 - DNA, 53 bp, Artificial
  Synthetic oligonucleotide
gaaaaggcatggggacaaatctttctgtccccaatcccctgggattcttcccc

SEQ ID NO: 390648 - DNA, 54 bp, Artificial
  Synthetic oligonucleotide
gaaaaggcccggaacgactttgcaaaagagtgtaagctgggattgtacactaat

SEQ ID NO: 390649 - DNA, 60 bp, Artificial
  Synthetic oligonucleotide
gaaaaggcgtctaatcaattgaggcttgcagtcacgggtttgaatcatgtcgatccagcc

SEQ ID NO: 390650 - DNA, 56 bp, Artificial
  Synthetic oligonucleotide
gaaaagggaaaatttcccctttttcagtcgtatgctcatcatagaactctactaga

SEQ ID NO: 390651 - DNA, 53 bp, Artificial
  Synthetic oligonucleotide
gaaaagggaaagtggacaacaaacacagaaactggagcaccccagcttaaccc

SEQ ID NO: 390652 - DNA, 53 bp, Artificial
  Synthetic oligonucleotide
gaaaagggacgggacgctagtgaaactggacaaaggattgtactccggttggc

SEQ ID NO: 390653 - DNA, 55 bp, Artificial
  Synthetic oligonucleotide
gaaaagggacttaattaataagcaaaccaaagatgttactaaactcaaagcagca

SEQ ID NO: 390654 - DNA, 60 bp, Artificial
  Synthetic oligonucleotide
gaaaagggcaacagccatactcagaaaagcaaccaggagattgattcaactgatagtgag

SEQ ID NO: 390655 - DNA, 55 bp, Artificial
  Synthetic oligonucleotide
gaaaagggcataaaccccaactacctcctggcttggaagcaggtgttggcagaac

SEQ ID NO: 390656 - DNA, 53 bp, Artificial
  Synthetic oligonucleotide
gaaaaggggaagtagacaacaaacacaaggactggagcaccccaactcaaccc

SEQ ID NO: 390657 - DNA, 55 bp, Artificial
  Synthetic oligonucleotide
gaaaaggttgacacaattctagagagaaatgtcactgtgactcacgctcagaaca

SEQ ID NO: 390658 - DNA, 51 bp, Artificial
  Synthetic oligonucleotide
gaaaagtaaccaaaacgactcggccaaccccaagatcactcaaatcccagt

SEQ ID NO: 390659 - DNA, 57 bp, Artificial
  Synthetic oligonucleotide
gaaaagtagtttggaatcgctgccgtaattgcatcaactaggaggtttgcaacaaaa

SEQ ID NO: 390660 - DNA, 52 bp, Artificial
  Synthetic oligonucleotide
gaaaagtatgacacagtctttagatcctgggactacagaaggggtagcctta

SEQ ID NO: 390661 - DNA, 55 bp, Artificial
  Synthetic oligonucleotide
gaaaagtatgctaaaggggttagctttgcatcagtaatgtattcatgggtgaaga

SEQ ID NO: 390662 - DNA, 56 bp, Artificial
  Synthetic oligonucleotide
gaaaagtattataaatctcgcgggaagtggtgggatggctataatgggcaggatgt

SEQ ID NO: 390663 - DNA, 53 bp, Artificial
  Synthetic oligonucleotide
gaaaagtcgggatattaaagccttcgaaaatgaaattgggcgaaggcggatta

SEQ ID NO: 390664 - DNA, 55 bp, Artificial
  Synthetic oligonucleotide
gaaaagtgcgggtggcgaggtcttggcggtcgagcgtccataaattaagaggatc

SEQ ID NO: 390665 - DNA, 55 bp, Artificial
  Synthetic oligonucleotide
gaaaagttaggggcacctgttggacatgtatcatcggatgcgtatgggagatggt

SEQ ID NO: 390666 - DNA, 59 bp, Artificial
  Synthetic oligonucleotide
gaaaagttctccttctcgagccaacgagaccacttgctgagaacgttagcaaacagctc

SEQ ID NO: 390667 - DNA, 54 bp, Artificial
  Synthetic oligonucleotide
gaaaataaaagcaaccgaaatgaaggcaagactattagtcttgttatgtgcact

SEQ ID NO: 390668 - DNA, 55 bp, Artificial
  Synthetic oligonucleotide
gaaaataagtggttaggtattgacttcctagccgaagcacaactgtcacaaagcc

SEQ ID NO: 390669 - DNA, 50 bp, Artificial
  Synthetic oligonucleotide
gaaaatacaccagccggatttgattacagacgtcggtgaaaatgagtttc

SEQ ID NO: 390670 - DNA, 57 bp, Artificial
  Synthetic oligonucleotide
gaaaatacggtatcaatcagtgatttcgtctataagcaaataagatgtgaaggagcg

SEQ ID NO: 390671 - DNA, 60 bp, Artificial
  Synthetic oligonucleotide
gaaaatactttgtatatgactcacacaagagcagacaaagacgctttgatgaagatacct

SEQ ID NO: 390672 - DNA, 55 bp, Artificial
  Synthetic oligonucleotide
gaaaatagccatgttgttgcttcgtaccactgcacattacctacgtgcatcgcgt

SEQ ID NO: 390673 - DNA, 54 bp, Artificial
  Synthetic oligonucleotide
gaaaatagcccactaaatagttatagaccattccatcaaaataaggacaccgtt

SEQ ID NO: 390674 - DNA, 60 bp, Artificial
  Synthetic oligonucleotide
gaaaatagctcatatgtcgccacatgtgaaggctgccctaagggcatcatccgtgttgat

SEQ ID NO: 390675 - DNA, 55 bp, Artificial
  Synthetic oligonucleotide
gaaaatagggagcgcagcgacaatgtttgaggaaagttaataagggaagatgata

SEQ ID NO: 390676 - DNA, 54 bp, Artificial
  Synthetic oligonucleotide
gaaaatagtactaacatgacaaatatcactggagaagttatctcacttccatgc

SEQ ID NO: 390677 - DNA, 55 bp, Artificial
  Synthetic oligonucleotide
gaaaatagtgctaacatcttgggtccttttccgtcattttcaggctacaccgcct

SEQ ID NO: 390678 - DNA, 54 bp, Artificial
  Synthetic oligonucleotide
gaaaatatactaccttaaaggacattgtgttagacctaagtcctgaccctgtag

SEQ ID NO: 390679 - DNA, 60 bp, Artificial
  Synthetic oligonucleotide
gaaaatatccaattgcaattgcttctgcgcatttatcgtttgttcaatggacacagattt

SEQ ID NO: 390680 - DNA, 60 bp, Artificial
  Synthetic oligonucleotide
gaaaatatcttccacctttaggacatacaacatgttcttggagatcatgataactagcat

SEQ ID NO: 390681 - DNA, 60 bp, Artificial
  Synthetic oligonucleotide
gaaaatatgcaacaatcctcacaggatccttgatggaagggactgcacactagtagatgc

SEQ ID NO: 390682 - DNA, 51 bp, Artificial
  Synthetic oligonucleotide
gaaaatatggaagcgcagcggacaagatcccaaaacagaaagaaacggaga

SEQ ID NO: 390683 - DNA, 57 bp, Artificial
  Synthetic oligonucleotide
gaaaatattttacatgagtggggaagaaagtaatttggacatcttagatagctttga

SEQ ID NO: 390684 - DNA, 60 bp, Artificial
  Synthetic oligonucleotide
gaaaatcaagaattggaaggcgtttcattcgatgaactagttgcattgagagaggagaat

SEQ ID NO: 390685 - DNA, 60 bp, Artificial
  Synthetic oligonucleotide
gaaaatcaatggagcgcttatggtttgtgttgcccaagaacaagaagtgcagatagcgta

SEQ ID NO: 390686 - DNA, 55 bp, Artificial
  Synthetic oligonucleotide
gaaaatcaggctgcgtttgtgacaatctggtatacaagttatgggcaacgggatg

SEQ ID NO: 390687 - DNA, 55 bp, Artificial
  Synthetic oligonucleotide
gaaaatccactgacatatcccataaagccggggcacctagaagatttggatcttg

SEQ ID NO: 390688 - DNA, 53 bp, Artificial
  Synthetic oligonucleotide
gaaaatccggacttcaaacgacgccatgtcggaatccaaccacagttgaccct

SEQ ID NO: 390689 - DNA, 60 bp, Artificial
  Synthetic oligonucleotide
gaaaatcggaaagcaaggaatgttctaagcattgcagaagtactatgttcgtgcaacagt

SEQ ID NO: 390690 - DNA, 52 bp, Artificial
  Synthetic oligonucleotide
gaaaatcggtaacacgttactattagaagtaacagctttaaccctatggtta

SEQ ID NO: 390691 - DNA, 60 bp, Artificial
  Synthetic oligonucleotide
gaaaatcgtgaaactgaagtcatagatgccgctccatgcgaatatgttgctaacatgttc

SEQ ID NO: 390692 - DNA, 58 bp, Artificial
  Synthetic oligonucleotide
gaaaatcgtgtgtaggcgtagcggctacttgagtgccagcggattacccctagtggta

SEQ ID NO: 390693 - DNA, 60 bp, Artificial
  Synthetic oligonucleotide
gaaaatctgtttgtgcgtaacgatatgggtccctcggcagtgactagcgatgattgttcg

SEQ ID NO: 390694 - DNA, 55 bp, Artificial
  Synthetic oligonucleotide
gaaaatgaagttgttcgggttgttattaggaccgtgattcgaattgtctgctatc

SEQ ID NO: 390695 - DNA, 54 bp, Artificial
  Synthetic oligonucleotide
gaaaatgagtttacgaatttgaatcttcaattttcggaccccaatagacagaaa

SEQ ID NO: 390696 - DNA, 55 bp, Artificial
  Synthetic oligonucleotide
gaaaatgcagattggaaaacgtggaggaagattgtggaagaacagaccgctaaca

SEQ ID NO: 390697 - DNA, 60 bp, Artificial
  Synthetic oligonucleotide
gaaaatgctttgtaccagaccagagtgttgtgagcattataaaacatggcatatttgata

SEQ ID NO: 390698 - DNA, 51 bp, Artificial
  Synthetic oligonucleotide
gaaaatggaacgaagctgtcgaaatgttatttaattatctagaaccagtgg

SEQ ID NO: 390699 - DNA, 55 bp, Artificial
  Synthetic oligonucleotide
gaaaatggcggctcagagggttacgggagcttaacctcgcaacatttgtctggtg

SEQ ID NO: 390700 - DNA, 55 bp, Artificial
  Synthetic oligonucleotide
gaaaatggggtggggcccttatgcaagggtgatggcctataccttagtagtgcag

SEQ ID NO: 390701 - DNA, 57 bp, Artificial
  Synthetic oligonucleotide
gaaaatgtacgtaatgtcggttcagtatttcttaattcacgctacattgtcgttgac

SEQ ID NO: 390702 - DNA, 52 bp, Artificial
  Synthetic oligonucleotide
gaaaatgtgtacatattccatggtatttcagggcaacagataggtactcctt

SEQ ID NO: 390703 - DNA, 52 bp, Artificial
  Synthetic oligonucleotide
gaaaattacgtatttccgcttccgggacacgtccgcttaaaagcggaagtga

SEQ ID NO: 390704 - DNA, 55 bp, Artificial
  Synthetic oligonucleotide
gaaaattagtgtagacgtgttccggctgcactctaaacaatatgccgtcgtttag

SEQ ID NO: 390705 - DNA, 55 bp, Artificial
  Synthetic oligonucleotide
gaaaattgcgattttctgaagcgttcgttcaagatgagcccggatggcacttggc

SEQ ID NO: 390706 - DNA, 59 bp, Artificial
  Synthetic oligonucleotide
gaaaattggatctcagagttccgatggggtgaccctcgcataatccaagtaacagcagg

SEQ ID NO: 390707 - DNA, 59 bp, Artificial
  Synthetic oligonucleotide
gaaaattgtggtgaggtgcaggtcctatctaccgccacgcagtccttcctgggtactgc

SEQ ID NO: 390708 - DNA, 55 bp, Artificial
  Synthetic oligonucleotide
gaaaatttacaatagaggttcgatggacactttaattctgatctcgagtggagtc

SEQ ID NO: 390709 - DNA, 56 bp, Artificial
  Synthetic oligonucleotide
gaaaatttactgtgacagaaatttgaacgctcccaacactgaggtcggcaaaagct

SEQ ID NO: 390710 - DNA, 54 bp, Artificial
  Synthetic oligonucleotide
gaaaatttcgcacaggcatgtctcgaattccagccacgtgttcttcaggtcttc

SEQ ID NO: 390711 - DNA, 54 bp, Artificial
  Synthetic oligonucleotide
gaaaatttctttgtagcaacaatagcttctgaaatcctagaacaattttttagt

SEQ ID NO: 390712 - DNA, 53 bp, Artificial
  Synthetic oligonucleotide
gaaaattttaggcgaagaatatactggaaacgtgacagagggtaacgaagaaa

SEQ ID NO: 390713 - DNA, 57 bp, Artificial
  Synthetic oligonucleotide
gaaaattttcgatatagtatgcttttacctgaattctctatgggaacgaggaatgcc

SEQ ID NO: 390714 - DNA, 57 bp, Artificial
  Synthetic oligonucleotide
gaaacaaaaagtgtacaaacatcgtaaaatatgtgaagatgagacgggaataactca

SEQ ID NO: 390715 - DNA, 52 bp, Artificial
  Synthetic oligonucleotide
gaaacaaaactgttccaaacatcttatctcgggttaaataacaactacacgg

SEQ ID NO: 390716 - DNA, 59 bp, Artificial
  Synthetic oligonucleotide
gaaacaaactttcccgatacaacagaagagtcagcacaacaaatctgttgtacaagaga

SEQ ID NO: 390717 - DNA, 58 bp, Artificial
  Synthetic oligonucleotide
gaaacaacagaaggctgtagacaaatactagggcagctacaaccatcccttcaaacag

SEQ ID NO: 390718 - DNA, 59 bp, Artificial
  Synthetic oligonucleotide
gaaacaacaggtacatgattatatttatctaggaacaggaatgatacattggaaagtat

SEQ ID NO: 390719 - DNA, 55 bp, Artificial
  Synthetic oligonucleotide
gaaacaacccactataccagacgtagttcttgagctgcaagagcttgtccaaccc

SEQ ID NO: 390720 - DNA, 57 bp, Artificial
  Synthetic oligonucleotide
gaaacaacgagctcgtcggacggacgaagctcgtgactattgtatcaaagaggaaac

SEQ ID NO: 390721 - DNA, 60 bp, Artificial
  Synthetic oligonucleotide
gaaacaacgtactggcccagcggacacatacagacaatgcctcggtacagcaaacctatc

SEQ ID NO: 390722 - DNA, 60 bp, Artificial
  Synthetic oligonucleotide
gaaacaagaattacgaattctctctccgcatggatggacgccttggccactcgatggacc

SEQ ID NO: 390723 - DNA, 56 bp, Artificial
  Synthetic oligonucleotide
gaaacaagaggacccttagaaaggacatcagctcctcttatgagagatatctccag

SEQ ID NO: 390724 - DNA, 55 bp, Artificial
  Synthetic oligonucleotide
gaaacaagcgatgttccgtctttgaagcaatctaattataaagttggttcgtcca

SEQ ID NO: 390725 - DNA, 57 bp, Artificial
  Synthetic oligonucleotide
gaaacaagctggggctgtaacccaccagattgcccaggagtagggacaggttgtaca

SEQ ID NO: 390726 - DNA, 58 bp, Artificial
  Synthetic oligonucleotide
gaaacaagggaggatgtagtttacaagtgcaggctaatagagcatgaggaaaggatag

SEQ ID NO: 390727 - DNA, 60 bp, Artificial
  Synthetic oligonucleotide
gaaacaaggtcgaagaatctctgattcgtgcattggtagttcccttcgaactgcaatagc

SEQ ID NO: 390728 - DNA, 56 bp, Artificial
  Synthetic oligonucleotide
gaaacaagttctggtttcagtacaacacaaaagcagacacccaggtggccaaacaa

SEQ ID NO: 390729 - DNA, 55 bp, Artificial
  Synthetic oligonucleotide
gaaacaagttggggttgcaatcctgcagactgcccaggggttggaacaggctgta

SEQ ID NO: 390730 - DNA, 55 bp, Artificial
  Synthetic oligonucleotide
gaaacaagtttgcggtgtttttctgaggtaatgtaatatcacacttaacgagtaa

SEQ ID NO: 390731 - DNA, 60 bp, Artificial
  Synthetic oligonucleotide
gaaacaatgaaggaggcactatctaacaaaatggagatattgagtgaccacatagtgatt

SEQ ID NO: 390732 - DNA, 57 bp, Artificial
  Synthetic oligonucleotide
gaaacaatgccccacgaaacacattcacctgccccctttggatcaggcgacaagagg

SEQ ID NO: 390733 - DNA, 55 bp, Artificial
  Synthetic oligonucleotide
gaaacaatggaatggactgacttaccgctcgtacgcgatattgtcatggaacccc

SEQ ID NO: 390734 - DNA, 60 bp, Artificial
  Synthetic oligonucleotide
gaaacaatggaggttgttcagcaaacaagagtggacaaactgacacaaggcagacagacc

SEQ ID NO: 390735 - DNA, 52 bp, Artificial
  Synthetic oligonucleotide
gaaacacagaaggacggactacgatcaaagaaaccccaacggataagaaacc

SEQ ID NO: 390736 - DNA, 55 bp, Artificial
  Synthetic oligonucleotide
gaaacacagacaggacagatggcctatccttgatatcaggggcaggacgagaaga

SEQ ID NO: 390737 - DNA, 57 bp, Artificial
  Synthetic oligonucleotide
gaaacacataagttagatttgactcaaatcccttgacgaattcgaaacgagatgttc

SEQ ID NO: 390738 - DNA, 56 bp, Artificial
  Synthetic oligonucleotide
gaaacaccaccttaacaacttggaatgtgtgggttctatcaatttactgcaaatcg

SEQ ID NO: 390739 - DNA, 60 bp, Artificial
  Synthetic oligonucleotide
gaaacacccaccatggcttggattagatgcatgctagatatgcatagagcactcaacttt

SEQ ID NO: 390740 - DNA, 55 bp, Artificial
  Synthetic oligonucleotide
gaaacacctatacgttccaaacacattcttgtgtctgaacagtacgggcaacctt

SEQ ID NO: 390741 - DNA, 57 bp, Artificial
  Synthetic oligonucleotide
gaaacacctgaagagacgaccgctcccatcatgacacaaggtcccctttacaacgat

SEQ ID NO: 390742 - DNA, 55 bp, Artificial
  Synthetic oligonucleotide
gaaacacgaaagacactatcacgaacacacaactgtgagagctccgatcagctcc

SEQ ID NO: 390743 - DNA, 55 bp, Artificial
  Synthetic oligonucleotide
gaaacacgtgttcctcagtctcacattgaatatccagatatcgagatgcacctca

SEQ ID NO: 390744 - DNA, 60 bp, Artificial
  Synthetic oligonucleotide
gaaacactaaccagcagagagcatctgcaggacaaatcagcgtacagcccacattctctg

SEQ ID NO: 390745 - DNA, 55 bp, Artificial
  Synthetic oligonucleotide
gaaacactatcgcgtcggaggaacagaatgggaggacactcatggagccagcaac

SEQ ID NO: 390746 - DNA, 54 bp, Artificial
  Synthetic oligonucleotide
gaaacactcaaatggaacaatacacgatagatcccagtaccgtgccctgataag

SEQ ID NO: 390747 - DNA, 60 bp, Artificial
  Synthetic oligonucleotide
gaaacactgaaggcagaacttcagacatgagaactgagatcataaggatgatggaaaatg

SEQ ID NO: 390748 - DNA, 59 bp, Artificial
  Synthetic oligonucleotide
gaaacacttagtatcagcagggccccaaagtatacaatggaggacatatattcaaaaca

SEQ ID NO: 390749 - DNA, 55 bp, Artificial
  Synthetic oligonucleotide
gaaacagacatttcgggctgggattggtcagtacaacagtgggagttggattcgg

SEQ ID NO: 390750 - DNA, 52 bp, Artificial
  Synthetic oligonucleotide
gaaacagagactgaacagctgcaccaaggaggaattctttgtctacagacgc

SEQ ID NO: 390751 - DNA, 60 bp, Artificial
  Synthetic oligonucleotide
gaaacagatagtcacaacattggcgacccatagttcgagttgagctgtgtacgtggaaaa

SEQ ID NO: 390752 - DNA, 55 bp, Artificial
  Synthetic oligonucleotide
gaaacagatattcaacgtgttcaccagtctaattgtacctcaaccaaatgctccg

SEQ ID NO: 390753 - DNA, 55 bp, Artificial
  Synthetic oligonucleotide
gaaacagcagcaaaagttgcgaatgaaatttccacatcatcagaggttgagttct

SEQ ID NO: 390754 - DNA, 58 bp, Artificial
  Synthetic oligonucleotide
gaaacaggacaagaatttagggtgcaaactatgaaatggtatgcgatgtttgccccga

SEQ ID NO: 390755 - DNA, 55 bp, Artificial
  Synthetic oligonucleotide
gaaacaggatatgtgtgcagcaagtttcactcagacactcccagaccagctgacc

SEQ ID NO: 390756 - DNA, 60 bp, Artificial
  Synthetic oligonucleotide
gaaacaggatcgagaatttaattgcacagtgcagactgtaattgtctgattgagatgtga

SEQ ID NO: 390757 - DNA, 55 bp, Artificial
  Synthetic oligonucleotide
gaaacaggatttacagatccaagtctgtttatgaccccagctggaacacacacca

SEQ ID NO: 390758 - DNA, 55 bp, Artificial
  Synthetic oligonucleotide
gaaacaggccagcatcaatttccatgcagatgatgaggcactgatactgaaggat

SEQ ID NO: 390759 - DNA, 55 bp, Artificial
  Synthetic oligonucleotide
gaaacaggcggcctgggctatgtttgcttataccttataacatttaaggcagcta

SEQ ID NO: 390760 - DNA, 57 bp, Artificial
  Synthetic oligonucleotide
gaaacagtcagttgcttataactgctggcacatcagtgacggaagacctagaaatac

SEQ ID NO: 390761 - DNA, 57 bp, Artificial
  Synthetic oligonucleotide
gaaacagtgtctaaaaattacagtttcaaatccgcaagatatacaaatttcggcaca

SEQ ID NO: 390762 - DNA, 55 bp, Artificial
  Synthetic oligonucleotide
gaaacagttacgattcaacctgatgaaattaaaatggtaagcacagggctagctg

SEQ ID NO: 390763 - DNA, 55 bp, Artificial
  Synthetic oligonucleotide
gaaacagttatgtttaacaaagtggccgttttaatctgtgaagcacttaattcac

SEQ ID NO: 390764 - DNA, 55 bp, Artificial
  Synthetic oligonucleotide
gaaacagttcacccatgtaatgtcttttgtgtgttatctggcccaggggcatcat

SEQ ID NO: 390765 - DNA, 60 bp, Artificial
  Synthetic oligonucleotide
gaaacatactggcgcgtaacgccatacatctcagctatctccgtctgagtgaacccttta

SEQ ID NO: 390766 - DNA, 58 bp, Artificial
  Synthetic oligonucleotide
gaaacatatgaactttctaaaacgtgttgaaagacttttcatatgggatgtgtcctca

SEQ ID NO: 390767 - DNA, 58 bp, Artificial
  Synthetic oligonucleotide
gaaacatcagacggctgtaaaagaatactggaacagttacaaccatcccttcagacag

SEQ ID NO: 390768 - DNA, 60 bp, Artificial
  Synthetic oligonucleotide
gaaacatccctgagaagatcaagatgagagggattgttcaccaagaggacgctctgaagc

SEQ ID NO: 390769 - DNA, 59 bp, Artificial
  Synthetic oligonucleotide
gaaacatctggagtgcgccctatccaacacacctactactatcaatggtgtcgtccccc

SEQ ID NO: 390770 - DNA, 60 bp, Artificial
  Synthetic oligonucleotide
gaaacatgtccgggatttcaaatctgctcacgctagtaaaggcccagcttctgtagcttc

SEQ ID NO: 390771 - DNA, 54 bp, Artificial
  Synthetic oligonucleotide
gaaacatgtgcattaaatgtccataattgtaaatggtgtcagattaccagctgc

SEQ ID NO: 390772 - DNA, 51 bp, Artificial
  Synthetic oligonucleotide
gaaacatgttattgtagcccagcgggtcccatagtccaaggataagatcgg

SEQ ID NO: 390773 - DNA, 60 bp, Artificial
  Synthetic oligonucleotide
gaaacattcaaagcagatacagacgtgtagcgtaatagatgttcgcgcttcagagttgat

SEQ ID NO: 390774 - DNA, 55 bp, Artificial
  Synthetic oligonucleotide
gaaacattctgaggactcaagaatcagaatgtgtgtgccacaatggcacatgtgc

SEQ ID NO: 390775 - DNA, 59 bp, Artificial
  Synthetic oligonucleotide
gaaacattggcaaggagcatttgtgagaagcttgaacaatctgggctcccggttggagg

SEQ ID NO: 390776 - DNA, 55 bp, Artificial
  Synthetic oligonucleotide
gaaacatttaatgatgcacaactggcattgatggattcagaggggtccacacagg

SEQ ID NO: 390777 - DNA, 55 bp, Artificial
  Synthetic oligonucleotide
gaaaccaaattggcacagaaggtagttaaagagctgcctgtggagagtgaatttc

SEQ ID NO: 390778 - DNA, 55 bp, Artificial
  Synthetic oligonucleotide
gaaaccaatagtgtttggcgcgctcaaatgtgctgacagctccagaagtgcgcgc

SEQ ID NO: 390779 - DNA, 55 bp, Artificial
  Synthetic oligonucleotide
gaaaccacatgttgcaccttcattaatggcaaagcaccatgcttcctcacagccc

SEQ ID NO: 390780 - DNA, 60 bp, Artificial
  Synthetic oligonucleotide
gaaaccaccctattttgtgcatcagatgctaaagcatacgatgtagaagtacataatgtc

SEQ ID NO: 390781 - DNA, 56 bp, Artificial
  Synthetic oligonucleotide
gaaaccaccggagtcaaggggcaattcgggcggctgcagtctagcggaacgggcaa

SEQ ID NO: 390782 - DNA, 56 bp, Artificial
  Synthetic oligonucleotide
gaaaccacctccagaggaccccttcagcgaacagaagacgctcacggacggtagga

SEQ ID NO: 390783 - DNA, 60 bp, Artificial
  Synthetic oligonucleotide
gaaaccactacgctacgcagcagccttagctacgccggagcttagctcgcccacgttcta

SEQ ID NO: 390784 - DNA, 59 bp, Artificial
  Synthetic oligonucleotide
gaaaccactatgcggtccccggtcttcacagacaactcatctccaccggctgtaccgca

SEQ ID NO: 390785 - DNA, 55 bp, Artificial
  Synthetic oligonucleotide
gaaaccactgcctaaatgagtccgtaagcatttcagagtaacgtacactagtaag

SEQ ID NO: 390786 - DNA, 55 bp, Artificial
  Synthetic oligonucleotide
gaaaccagaggagatcatgatgtttctgccgcatgttgtggacaggtgcataagc

SEQ ID NO: 390787 - DNA, 55 bp, Artificial
  Synthetic oligonucleotide
gaaaccagagttctagatgcatgtgcacttagagacttgacagacacaaacctag

SEQ ID NO: 390788 - DNA, 55 bp, Artificial
  Synthetic oligonucleotide
gaaaccaggaatataacatgtgaaacagactttgggatctccgctaatagaggag

SEQ ID NO: 390789 - DNA, 57 bp, Artificial
  Synthetic oligonucleotide
gaaaccagggaccgactgtgcgaagcgcattcgtacggttgactcgtacctgttgaa

SEQ ID NO: 390790 - DNA, 56 bp, Artificial
  Synthetic oligonucleotide
gaaaccagggaggaaagctacagaagacttcaggaggaacctgagagcgggcttgg

SEQ ID NO: 390791 - DNA, 50 bp, Artificial
  Synthetic oligonucleotide
gaaaccagtagtccaaaggtgcttttcgactcagaacagtgttgtctgag

SEQ ID NO: 390792 - DNA, 58 bp, Artificial
  Synthetic oligonucleotide
gaaaccagttgaagataattctctggcttttgagaggcctttacctgccaccataaca

SEQ ID NO: 390793 - DNA, 58 bp, Artificial
  Synthetic oligonucleotide
gaaaccataggggcgccgggttcgttttgcagccatagccaaactgcacgagtggagc

SEQ ID NO: 390794 - DNA, 55 bp, Artificial
  Synthetic oligonucleotide
gaaaccatcgggcgtcactttgggaagagtgggacagatcacaccatgatcagag

SEQ ID NO: 390795 - DNA, 55 bp, Artificial
  Synthetic oligonucleotide
gaaaccatgaagacctggtcacggtaactgctacactggctctcattggctgcac

SEQ ID NO: 390796 - DNA, 57 bp, Artificial
  Synthetic oligonucleotide
gaaaccattacacacaacgccttctcgcaagcgcaagacaagccaccgaaaggtggt

SEQ ID NO: 390797 - DNA, 55 bp, Artificial
  Synthetic oligonucleotide
gaaacccaaatttctcccggatctgtatgactacaaggaaaaccgattcattgaa

SEQ ID NO: 390798 - DNA, 55 bp, Artificial
  Synthetic oligonucleotide
gaaacccacgatatagatcttgaggttaccaattgtgatcttgatttatccgtct

SEQ ID NO: 390799 - DNA, 58 bp, Artificial
  Synthetic oligonucleotide
gaaacccagggaacattactggaacatgcctactgtcgccaaattcggttaatgagca

SEQ ID NO: 390800 - DNA, 54 bp, Artificial
  Synthetic oligonucleotide
gaaaccccatacgagagagacgaaaacaaaacgactcgtcgtcagaaatcacgt

SEQ ID NO: 390801 - DNA, 59 bp, Artificial
  Synthetic oligonucleotide
gaaaccccatgcggacatgtcgatggccgctaaggttaagcgcgtgaatacgtggctta

SEQ ID NO: 390802 - DNA, 56 bp, Artificial
  Synthetic oligonucleotide
gaaacccctcagtattcgaatgtagaggaggctctaggacatcggctgagggggac

SEQ ID NO: 390803 - DNA, 50 bp, Artificial
  Synthetic oligonucleotide
gaaacccctgcaggttacgtgagagttagtcgtcttggtaaacgaggaac

SEQ ID NO: 390804 - DNA, 55 bp, Artificial
  Synthetic oligonucleotide
gaaacccctggtatcaacttcaatacatctagatacggtcggggtaacagtgcag

SEQ ID NO: 390805 - DNA, 55 bp, Artificial
  Synthetic oligonucleotide
gaaacccgctatcacgcaattccacacatgagatgtactgggtcagtcatgcgtc

SEQ ID NO: 390806 - DNA, 54 bp, Artificial
  Synthetic oligonucleotide
gaaacccgtgcaaagacaaccaagtatccggtccccgtcgacagcctagggatg

SEQ ID NO: 390807 - DNA, 53 bp, Artificial
  Synthetic oligonucleotide
gaaaccctcctttgtgacattggggaatcctcgccttcttccgtgaccgaggg

SEQ ID NO: 390808 - DNA, 56 bp, Artificial
  Synthetic oligonucleotide
gaaaccgaaacgccagtctcctctacaatagtaatgcaaccgttaattgaaatcga

SEQ ID NO: 390809 - DNA, 60 bp, Artificial
  Synthetic oligonucleotide
gaaaccgccaccgtcgtctgtcgaggacatgttcacgtcactcaatcgatgtatccggcg

SEQ ID NO: 390810 - DNA, 56 bp, Artificial
  Synthetic oligonucleotide
gaaaccgcgagtaacacgcctccttctggttgctgagcgacgtacctaaaaataga

SEQ ID NO: 390811 - DNA, 54 bp, Artificial
  Synthetic oligonucleotide
gaaaccgcgtatcaaccccccaagggttggtgaagagattctcaatcggactgt

SEQ ID NO: 390812 - DNA, 59 bp, Artificial
  Synthetic oligonucleotide
gaaaccggtcccctgcgactataaattgtctcacaagtgcgattcatttatggatccac

SEQ ID NO: 390813 - DNA, 54 bp, Artificial
  Synthetic oligonucleotide
gaaaccggttgaagacaattcgttgaagtacgaacgacctctttgtgccactat

SEQ ID NO: 390814 - DNA, 52 bp, Artificial
  Synthetic oligonucleotide
gaaaccgtacatggtttccgttgtatgttagccgtaaagtatttacagttag

SEQ ID NO: 390815 - DNA, 51 bp, Artificial
  Synthetic oligonucleotide
gaaaccgtcaatttcgagattcgatgcggatctgtagccccaccgtgctcg

SEQ ID NO: 390816 - DNA, 60 bp, Artificial
  Synthetic oligonucleotide
gaaaccgtctgccatcgctagcctgccgaagtcgcaattgaacagcatagaatcttcgca

SEQ ID NO: 390817 - DNA, 51 bp, Artificial
  Synthetic oligonucleotide
gaaacctaatcactggacagcgatggtacgagtaaatcatcaacagtacca

SEQ ID NO: 390818 - DNA, 55 bp, Artificial
  Synthetic oligonucleotide
gaaacctaatccaaaatgcacatgctgtggaaagaattctattggctgctacgga

SEQ ID NO: 390819 - DNA, 55 bp, Artificial
  Synthetic oligonucleotide
gaaacctaatgtcccaactattaggactgcaaaggtgcaaggaccaggtttcgac

SEQ ID NO: 390820 - DNA, 58 bp, Artificial
  Synthetic oligonucleotide
gaaacctagagaacgagcgaagaagaggactcgtgcggaatcaatcgacaaacctcaa

SEQ ID NO: 390821 - DNA, 54 bp, Artificial
  Synthetic oligonucleotide
gaaacctagtgaagggtcctctgggatgtgctcagcacctggcctaagctaagt

SEQ ID NO: 390822 - DNA, 55 bp, Artificial
  Synthetic oligonucleotide
gaaacctatggaaatacttgggcaggagtcgaagcaataataagaatcttgcaac

SEQ ID NO: 390823 - DNA, 52 bp, Artificial
  Synthetic oligonucleotide
gaaacctccccttgaggatgttttgcatctcgaaagggctttgcctgcgact

SEQ ID NO: 390824 - DNA, 55 bp, Artificial
  Synthetic oligonucleotide
gaaacctcgtcctgagcaacgtgacagtgtaatctctttcgatgttggcttggcg

SEQ ID NO: 390825 - DNA, 56 bp, Artificial
  Synthetic oligonucleotide
gaaacctcttaaggtgaaagccaagctgccacagcaagaggggccttacgccggtc

SEQ ID NO: 390826 - DNA, 59 bp, Artificial
  Synthetic oligonucleotide
gaaacctggatgggtgttcaagactccatcgcatagtgaagtaggccacagttatgcag

SEQ ID NO: 390827 - DNA, 55 bp, Artificial
  Synthetic oligonucleotide
gaaacctggttgattttacagtcaccagacaaccttacagaaagccgggccacag

SEQ ID NO: 390828 - DNA, 56 bp, Artificial
  Synthetic oligonucleotide
gaaaccttcccagaattgaagcctggagagtcaagacacacctctgatcatatgtc

SEQ ID NO: 390829 - DNA, 55 bp, Artificial
  Synthetic oligonucleotide
gaaaccttgcggccgtgtctgactgggtaatgagcaccgtacctgtcgcgccgcc

SEQ ID NO: 390830 - DNA, 55 bp, Artificial
  Synthetic oligonucleotide
gaaacctttcttatcgttcgagttaattactgagaaagaaccatcaactacgaca

SEQ ID NO: 390831 - DNA, 59 bp, Artificial
  Synthetic oligonucleotide
gaaacgaaaacgtactaaatagaatgttgtttacaatactgcatttctgagccatgtga

SEQ ID NO: 390832 - DNA, 55 bp, Artificial
  Synthetic oligonucleotide
gaaacgacactacgaaacctttctccatttcagcacacaccgatcctaacgatgg

SEQ ID NO: 390833 - DNA, 56 bp, Artificial
  Synthetic oligonucleotide
gaaacgactacggttcaagggtattgtgaaagtggaacgggttcatgcagaggtga

SEQ ID NO: 390834 - DNA, 51 bp, Artificial
  Synthetic oligonucleotide
gaaacgacttcgtttcaaagggactgtcaagattgatcgtgttcaaccaga

SEQ ID NO: 390835 - DNA, 55 bp, Artificial
  Synthetic oligonucleotide
gaaacgagatatcaattaacggttgccaaggatggtccaatcgagctataccatc

SEQ ID NO: 390836 - DNA, 53 bp, Artificial
  Synthetic oligonucleotide
gaaacgagcaacacagaaaacatatttcttgcaggtgagaacctggggtcaac

SEQ ID NO: 390837 - DNA, 54 bp, Artificial
  Synthetic oligonucleotide
gaaacgaggtcatccgcaccagggttaggcaaactccaaaagggccaaagacgc

SEQ ID NO: 390838 - DNA, 59 bp, Artificial
  Synthetic oligonucleotide
gaaacgatcattaatgcaactgatccattcagtgtagaatcgttatgcatctattttcc

SEQ ID NO: 390839 - DNA, 59 bp, Artificial
  Synthetic oligonucleotide
gaaacgatctcatgcgtaccaatggccacagttctaaatataaacggagcgttggtaga

SEQ ID NO: 390840 - DNA, 55 bp, Artificial
  Synthetic oligonucleotide
gaaacgatcttttaaaatgaatccagatggcacatggcgctgccctatgtctaag

SEQ ID NO: 390841 - DNA, 59 bp, Artificial
  Synthetic oligonucleotide
gaaacgcaaacctgtgagtggaaatccactcggagagaacagacaaatcacctccagag

SEQ ID NO: 390842 - DNA, 60 bp, Artificial
  Synthetic oligonucleotide
gaaacgcagtttgataatatcgctgttgcacatacagatcatctatcggtagtatacgct

SEQ ID NO: 390843 - DNA, 60 bp, Artificial
  Synthetic oligonucleotide
gaaacgcatgacttaaatctgggaagagtaaaagctgatatttttgagcttggacatcac

SEQ ID NO: 390844 - DNA, 60 bp, Artificial
  Synthetic oligonucleotide
gaaacgcattgcgttcacgcacttctggtttgcgatctctcgaccatcgccattgatgcc

SEQ ID NO: 390845 - DNA, 55 bp, Artificial
  Synthetic oligonucleotide
gaaacgccaagtctgaggttgtaagtgagtccagatctggaagtccagataacac

SEQ ID NO: 390846 - DNA, 60 bp, Artificial
  Synthetic oligonucleotide
gaaacgccatgcataactggcaccaccattgagcgaacaggacatggggcccggcgtcga

SEQ ID NO: 390847 - DNA, 55 bp, Artificial
  Synthetic oligonucleotide
gaaacgccgtggtgcgctgattgacttcgagaacggcacagtcggacccgaggtc

SEQ ID NO: 390848 - DNA, 54 bp, Artificial
  Synthetic oligonucleotide
gaaacgcgactgcaaacccagaattccgagccagccgtgcctgtaataaagtac

SEQ ID NO: 390849 - DNA, 60 bp, Artificial
  Synthetic oligonucleotide
gaaacgcgctccgcaagcgaggcaggcacgtacgtcgatggtgggttcaattagcaatgc

SEQ ID NO: 390850 - DNA, 60 bp, Artificial
  Synthetic oligonucleotide
gaaacgcgtctatgcaagaggtattggactgtgatttgtctgagcagactattaatcccc

SEQ ID NO: 390851 - DNA, 52 bp, Artificial
  Synthetic oligonucleotide
gaaacgctcgttgttaatagccaagctcgcgggtcaaatcttgacgcgtgac

SEQ ID NO: 390852 - DNA, 53 bp, Artificial
  Synthetic oligonucleotide
gaaacgctgtatcccgcgttaagcggcctgtatgacaacgtattccttttggt

SEQ ID NO: 390853 - DNA, 60 bp, Artificial
  Synthetic oligonucleotide
gaaacgcttaggaggcatgttgactaagatagaggacccgattgaccgctcttgcaactc

SEQ ID NO: 390854 - DNA, 52 bp, Artificial
  Synthetic oligonucleotide
gaaacgcttgcgtttcaaaggaacggttaagattgaacgtgtacacactgat

SEQ ID NO: 390855 - DNA, 50 bp, Artificial
  Synthetic oligonucleotide
gaaacggagaaccccttaagtacgtcgtctacaaaataacccctgatacc

SEQ ID NO: 390856 - DNA, 59 bp, Artificial
  Synthetic oligonucleotide
gaaacggggtcattcaggatagcatatccttaactaagagtatgcttgcgatgagtcaa

SEQ ID NO: 390857 - DNA, 52 bp, Artificial
  Synthetic oligonucleotide
gaaacggtctctatacgttttatgcggaatatccagctaatggccctctagc

SEQ ID NO: 390858 - DNA, 60 bp, Artificial
  Synthetic oligonucleotide
gaaacggtttcacagaatatcacgtacgtggaccgggttatgtctgcaatgctggagaca

SEQ ID NO: 390859 - DNA, 52 bp, Artificial
  Synthetic oligonucleotide
gaaacggtttttcgagtacgtaggaacgccctatgttgtcatacaaactagg

SEQ ID NO: 390860 - DNA, 49 bp, Artificial
  Synthetic oligonucleotide
gaaacgtaaacctttcggcgtaataccgtaggtaaggcgtttgttgtag

SEQ ID NO: 390861 - DNA, 54 bp, Artificial
  Synthetic oligonucleotide
gaaacgtaggggagaaccaaaagaaagcgatgtggcgcagtttaatctttccac

SEQ ID NO: 390862 - DNA, 57 bp, Artificial
  Synthetic oligonucleotide
gaaacgtattgacgtgtgactccgtacatttccgcgatctccgattgattgaacccc

SEQ ID NO: 390863 - DNA, 60 bp, Artificial
  Synthetic oligonucleotide
gaaacgtcgcatgtgtctgcctgggtatgacaccatatacctagattcgaagtttgtgag

SEQ ID NO: 390864 - DNA, 50 bp, Artificial
  Synthetic oligonucleotide
gaaacgtctaaacgcgcttaaaaagttcggtaaacaagcggcggcaaccg

SEQ ID NO: 390865 - DNA, 52 bp, Artificial
  Synthetic oligonucleotide
gaaacgtctcatgggatgcatcccactgaagaaacttaacggctggctgttc

SEQ ID NO: 390866 - DNA, 55 bp, Artificial
  Synthetic oligonucleotide
gaaacgtctggtatgacgccattacacgtatctattatatcgcatactaacgtcg

SEQ ID NO: 390867 - DNA, 55 bp, Artificial
  Synthetic oligonucleotide
gaaacgtgctttgagacaggtttcagtatgtgatcaagaggttaggcactcttgt

SEQ ID NO: 390868 - DNA, 52 bp, Artificial
  Synthetic oligonucleotide
gaaacgtggtgtggggcccgtgagggggagtcgttgggccgttactgctcac

SEQ ID NO: 390869 - DNA, 55 bp, Artificial
  Synthetic oligonucleotide
gaaacgtgtttgtgaagactgcgaacaggtttatgcatattctgaaatgaacctg

SEQ ID NO: 390870 - DNA, 52 bp, Artificial
  Synthetic oligonucleotide
gaaacgtttaagaaatttaacgaaggtctgtacgataatttggacaaccaca

SEQ ID NO: 390871 - DNA, 54 bp, Artificial
  Synthetic oligonucleotide
gaaacgtttaatatgatgactttaatcggattttattagcgcctcgattgctct

SEQ ID NO: 390872 - DNA, 51 bp, Artificial
  Synthetic oligonucleotide
gaaacgtttgttttgtgccgtgtcatcatgtggttgcgtgtgtttggtgtg

SEQ ID NO: 390873 - DNA, 59 bp, Artificial
  Synthetic oligonucleotide
gaaactaacatcactcggcttaaacgccgtcgcattctacagaggtgtcgatgtgtccg

SEQ ID NO: 390874 - DNA, 59 bp, Artificial
  Synthetic oligonucleotide
gaaactaagtattgaagacccgagtcatgagggggaggggataccgctatatgatgcaa

SEQ ID NO: 390875 - DNA, 55 bp, Artificial
  Synthetic oligonucleotide
gaaactacgtgtgccaaggtgacgacgggttaatgattatcgatgggaacactgc

SEQ ID NO: 390876 - DNA, 60 bp, Artificial
  Synthetic oligonucleotide
gaaactactgctccgcaaggacgagttttcgcacaagaggacattgctgagatagaaaag

SEQ ID NO: 390877 - DNA, 60 bp, Artificial
  Synthetic oligonucleotide
gaaactacttcacagcagaagtgtcccattgcagggccactgagtacataatgaagggag

SEQ ID NO: 390878 - DNA, 55 bp, Artificial
  Synthetic oligonucleotide
gaaactagcccgccgtggtatcgtagttcctaagcctatcgtcagccgactcatc

SEQ ID NO: 390879 - DNA, 59 bp, Artificial
  Synthetic oligonucleotide
gaaactagccttgcgggtgtctcatccgtagtgaatgaggtgcagggattacgtaactc

SEQ ID NO: 390880 - DNA, 58 bp, Artificial
  Synthetic oligonucleotide
gaaactagctgtgcttcacttactgctatgactaatttggttaattcgttagttcctg

SEQ ID NO: 390881 - DNA, 52 bp, Artificial
  Synthetic oligonucleotide
gaaactaggaagtacattattcgtacgactaaagttaagggtataacattta

SEQ ID NO: 390882 - DNA, 56 bp, Artificial
  Synthetic oligonucleotide
gaaactaggacgtatacgatgtttggatcaagtaaacaggtgttagtgtcgaacgc

SEQ ID NO: 390883 - DNA, 55 bp, Artificial
  Synthetic oligonucleotide
gaaactatcatgtaagcagtgccggcagcacattaagcacctcagttgggaggag

SEQ ID NO: 390884 - DNA, 51 bp, Artificial
  Synthetic oligonucleotide
gaaactattatgcaaacactcaaaagatcaaatctgaagtcagaggaatac

SEQ ID NO: 390885 - DNA, 55 bp, Artificial
  Synthetic oligonucleotide
gaaactattctcatcatttggcgattattccagtagactagtacggtttgacgtg

SEQ ID NO: 390886 - DNA, 55 bp, Artificial
  Synthetic oligonucleotide
gaaactatttggccgcaactgccacacatgacaactgggccagtgatagactgcc

SEQ ID NO: 390887 - DNA, 57 bp, Artificial
  Synthetic oligonucleotide
gaaactcaaatacttcaaagggacgtccttctcattaaaaggataatgaagcgctgc

SEQ ID NO: 390888 - DNA, 54 bp, Artificial
  Synthetic oligonucleotide
gaaactcactactgcagatttaaaacctttattcgacacccttaaaggagactc

SEQ ID NO: 390889 - DNA, 55 bp, Artificial
  Synthetic oligonucleotide
gaaactccaatgttcaataaggtggcggtgttaatctgtgaagcgttaaattcaa

SEQ ID NO: 390890 - DNA, 56 bp, Artificial
  Synthetic oligonucleotide
gaaactccctgttaacagacccattgattggaaagtgtgtcaacggattgtgggtc

SEQ ID NO: 390891 - DNA, 60 bp, Artificial
  Synthetic oligonucleotide
gaaactccgagtgcaacgtcaggtcaatacacaacaaccaactatgaagctatagtaatg

SEQ ID NO: 390892 - DNA, 60 bp, Artificial
  Synthetic oligonucleotide
gaaactcctgttcctactgatttcccttttgatctgcttgattatcttagccatgctatt

SEQ ID NO: 390893 - DNA, 59 bp, Artificial
  Synthetic oligonucleotide
gaaactcctttactctgagggtgagaagattcgaagacgttgccaatttgaagcatcaa

SEQ ID NO: 390894 - DNA, 51 bp, Artificial
  Synthetic oligonucleotide
gaaactcgccttccagtgtggcggcgtgagagtcagagcccagggaccgaa

SEQ ID NO: 390895 - DNA, 55 bp, Artificial
  Synthetic oligonucleotide
gaaactcgcgccgtagaagagggatgttgggacgcggaatgcgacgctacaggcg

SEQ ID NO: 390896 - DNA, 57 bp, Artificial
  Synthetic oligonucleotide
gaaactcgggttctaagatttgatgttcatatatcgattcgtacatgaaatgatctc

SEQ ID NO: 390897 - DNA, 55 bp, Artificial
  Synthetic oligonucleotide
gaaactctcctagtgcagaatgctaacccagattgtaagcagatcctgaaagcac

SEQ ID NO: 390898 - DNA, 60 bp, Artificial
  Synthetic oligonucleotide
gaaactgaaaagagagataacattccatggagctaaggaggttgcactcagctactcaac

SEQ ID NO: 390899 - DNA, 52 bp, Artificial
  Synthetic oligonucleotide
gaaactgaagaagagtcgcgtccatcggcttccgaagtagctaatgcaacac

SEQ ID NO: 390900 - DNA, 60 bp, Artificial
  Synthetic oligonucleotide
gaaactgaaggactatctcagtcagatcatgcgacagctggtattcatctctatgagatt

SEQ ID NO: 390901 - DNA, 55 bp, Artificial
  Synthetic oligonucleotide
gaaactgacctggtacgctacaaaggccttcgccaggaagatgagttcccgtggg

SEQ ID NO: 390902 - DNA, 54 bp, Artificial
  Synthetic oligonucleotide
gaaactgagaacggaggtacccagtcctgaacagttactaggttaccagagggc

SEQ ID NO: 390903 - DNA, 50 bp, Artificial
  Synthetic oligonucleotide
gaaactgagactacgtttaacatcggtcgcgctgctgaaattactaggga

SEQ ID NO: 390904 - DNA, 55 bp, Artificial
  Synthetic oligonucleotide
gaaactgagactatgtgcctccacgacgatgagtcatgtcgctacgaggggcaag

SEQ ID NO: 390905 - DNA, 55 bp, Artificial
  Synthetic oligonucleotide
gaaactgagcgtctttgttgggctttgcgtggtatagaggttggtagaggacagc

SEQ ID NO: 390906 - DNA, 57 bp, Artificial
  Synthetic oligonucleotide
gaaactgagttcgaaatcttcgactccgatcgtcatcactacccaccggtacgtgta

SEQ ID NO: 390907 - DNA, 55 bp, Artificial
  Synthetic oligonucleotide
gaaactgcaaaggaactagagtcacacaggaaaagttgcccaataggttcatgtc

SEQ ID NO: 390908 - DNA, 60 bp, Artificial
  Synthetic oligonucleotide
gaaactgcacattaatagatgcaatgctaggagatccccactgtgatgtttttcagtatg

SEQ ID NO: 390909 - DNA, 57 bp, Artificial
  Synthetic oligonucleotide
gaaactgcactgcccagcaagagatgtctgtgaaactcatcactgcttcttttgtgt

SEQ ID NO: 390910 - DNA, 60 bp, Artificial
  Synthetic oligonucleotide
gaaactgcagacgctgtgccatttaaaattgctggagccccaattgaccttcctcagaac

SEQ ID NO: 390911 - DNA, 60 bp, Artificial
  Synthetic oligonucleotide
gaaactgcagtacgatctcagttaggtcatgagacagctggtactcgtccctttgcgact

SEQ ID NO: 390912 - DNA, 57 bp, Artificial
  Synthetic oligonucleotide
gaaactgcccaaagtatgttggagtaaagagtctcaaactggcagttggtctaagga

SEQ ID NO: 390913 - DNA, 58 bp, Artificial
  Synthetic oligonucleotide
gaaactgcccctttcgttaaggtcgtagaacaccacactctgatgacaactcacaaga

SEQ ID NO: 390914 - DNA, 55 bp, Artificial
  Synthetic oligonucleotide
gaaactgccttcgctctgtttgctttgacctaaatcttgactgcgtgccgccact

SEQ ID NO: 390915 - DNA, 57 bp, Artificial
  Synthetic oligonucleotide
gaaactgcgaatatcgagaaaatctgcacccaagggaaaaggccaacagacctggga

SEQ ID NO: 390916 - DNA, 60 bp, Artificial
  Synthetic oligonucleotide
gaaactgctcttttaatatgaccacagaactaatagataagaagcagaaggtctatgcac

SEQ ID NO: 390917 - DNA, 57 bp, Artificial
  Synthetic oligonucleotide
gaaactgctgacaggacggttagggtaagccgtttaggacagagaggcacaataaga

SEQ ID NO: 390918 - DNA, 55 bp, Artificial
  Synthetic oligonucleotide
gaaactggaagatatcaaaccggaacaagcgaagaagcagactaagctatttaga

SEQ ID NO: 390919 - DNA, 59 bp, Artificial
  Synthetic oligonucleotide
gaaactggagaattttggcgtgtatcaaatccttgccatttatagtacggtatcgagca

SEQ ID NO: 390920 - DNA, 60 bp, Artificial
  Synthetic oligonucleotide
gaaactggagcaccccaacttaacccaattgatggaccactgcctgaggataatgagcca

SEQ ID NO: 390921 - DNA, 51 bp, Artificial
  Synthetic oligonucleotide
gaaactgggaactaatcattcagtgggggatttagttacggtttttacgct

SEQ ID NO: 390922 - DNA, 55 bp, Artificial
  Synthetic oligonucleotide
gaaactggtgggagtacttaattgggcagctcaattgtatgatggtattaggaca

SEQ ID NO: 390923 - DNA, 58 bp, Artificial
  Synthetic oligonucleotide
gaaactgtgataggatacacaagtgcaccagtacagtttggtaaacttttggggcaca

SEQ ID NO: 390924 - DNA, 55 bp, Artificial
  Synthetic oligonucleotide
gaaacttaaacgctgatcactcattcactactaagtctgacgggatctctcgcca

SEQ ID NO: 390925 - DNA, 60 bp, Artificial
  Synthetic oligonucleotide
gaaacttacaagatactcaccatttattcgactgttgcctcatctcttgtgcttgcagtg

SEQ ID NO: 390926 - DNA, 55 bp, Artificial
  Synthetic oligonucleotide
gaaacttacagttgactttgacacaactcaggatcttccagcagacactttcagt

SEQ ID NO: 390927 - DNA, 55 bp, Artificial
  Synthetic oligonucleotide
gaaacttagatacgtctctcctcgtctcactagttcccttattgatacgttcggg

SEQ ID NO: 390928 - DNA, 54 bp, Artificial
  Synthetic oligonucleotide
gaaacttatgcccccgccccctttggtgccggtgacaaacgctatcacttcacc

SEQ ID NO: 390929 - DNA, 55 bp, Artificial
  Synthetic oligonucleotide
gaaacttgaacgaagaatgttgaggacagtgaatattttcttgcttctcgtcctg

SEQ ID NO: 390930 - DNA, 54 bp, Artificial
  Synthetic oligonucleotide
gaaacttgcgaatagtttacgctcaacaccttcaatcagtacgctctcaacacg

SEQ ID NO: 390931 - DNA, 59 bp, Artificial
  Synthetic oligonucleotide
gaaacttgcgcattttgtagacattgaacttgactcttcaaacgcggaatcttctctct

SEQ ID NO: 390932 - DNA, 55 bp, Artificial
  Synthetic oligonucleotide
gaaacttgggctccgtccttaattgcgacaccatcttggaccctagcagtcatag

SEQ ID NO: 390933 - DNA, 60 bp, Artificial
  Synthetic oligonucleotide
gaaacttgtgtctatagacacacagtggcccaccttgatggaattcgaagatgacctgcg

SEQ ID NO: 390934 - DNA, 60 bp, Artificial
  Synthetic oligonucleotide
gaaactttcctcagcaagctccacaggaaacacagtagggaggtgaaacatcaggccgca

SEQ ID NO: 390935 - DNA, 55 bp, Artificial
  Synthetic oligonucleotide
gaaactttgaacaacagctgtgtggaaacctggatattgtgtgtccagcctgtgc

SEQ ID NO: 390936 - DNA, 57 bp, Artificial
  Synthetic oligonucleotide
gaaactttgaagactcatgctcatagatttttaagcgagcaacgctttgaacgcgaa

SEQ ID NO: 390937 - DNA, 60 bp, Artificial
  Synthetic oligonucleotide
gaaactttgcagtcttaaaggagtgaggcccctcattctgaaggattgcagtgtagctgg

SEQ ID NO: 390938 - DNA, 60 bp, Artificial
  Synthetic oligonucleotide
gaaacttttgggatacccgtgagtgctagcgatagtgcgcaaacaaccgccatcttcaca

SEQ ID NO: 390939 - DNA, 55 bp, Artificial
  Synthetic oligonucleotide
gaaagaaaagtcggatctatggttcatgtcaacacaaggcataaggtgcgaaggg

SEQ ID NO: 390940 - DNA, 57 bp, Artificial
  Synthetic oligonucleotide
gaaagaacccccagtcgatgaaatctccgtccttctcgatataggacttaacatcag

SEQ ID NO: 390941 - DNA, 60 bp, Artificial
  Synthetic oligonucleotide
gaaagaacctatgcattgtcagagcgatggatgtgggatacatgtgcgatgatactatca

SEQ ID NO: 390942 - DNA, 54 bp, Artificial
  Synthetic oligonucleotide
gaaagaacctcttgggatcagcataaaaggaacaaacttcacctttacgagagt

SEQ ID NO: 390943 - DNA, 52 bp, Artificial
  Synthetic oligonucleotide
gaaagaacggaaatccgtatttttgtctataaatagacgcgtcgggagacgg

SEQ ID NO: 390944 - DNA, 50 bp, Artificial
  Synthetic oligonucleotide
gaaagaacgtgagtgggccaaataaatgggccgttgaattgggcttttta

SEQ ID NO: 390945 - DNA, 54 bp, Artificial
  Synthetic oligonucleotide
gaaagaacgttagtgggccgagtgattgggcctttgaattgggctttttattca

SEQ ID NO: 390946 - DNA, 55 bp, Artificial
  Synthetic oligonucleotide
gaaagaacttcgattagtgtagatcctcctgcgtacgcgctgggttttctttacc

SEQ ID NO: 390947 - DNA, 58 bp, Artificial
  Synthetic oligonucleotide
gaaagaagatcctatttgttctatgtccagatgagttatatcgtctactctgaacaag

SEQ ID NO: 390948 - DNA, 55 bp, Artificial
  Synthetic oligonucleotide
gaaagaagattgtgcagggccttgttaagagatattctcttaaggaggggaaccc

SEQ ID NO: 390949 - DNA, 58 bp, Artificial
  Synthetic oligonucleotide
gaaagaaggtggaaatgattttcactacgtgcatgcaagcgcctttgttaaactagtc

SEQ ID NO: 390950 - DNA, 51 bp, Artificial
  Synthetic oligonucleotide
gaaagaatcacaaggtatctttgacaaagaatggtacgatgggtttgtcac

SEQ ID NO: 390951 - DNA, 56 bp, Artificial
  Synthetic oligonucleotide
gaaagaatcattttatatgtcaataggagcatggacagggacaagagattactgtc

SEQ ID NO: 390952 - DNA, 60 bp, Artificial
  Synthetic oligonucleotide
gaaagaatgagacgagcagagccacgagatgagccagcagcagagggggtgggagcagca

SEQ ID NO: 390953 - DNA, 55 bp, Artificial
  Synthetic oligonucleotide
gaaagaatgtgtaacattctcaaagggaaatttcaaacagctgcccagagagcaa

SEQ ID NO: 390954 - DNA, 55 bp, Artificial
  Synthetic oligonucleotide
gaaagaattccttggattgtcagaaaactactgcaagtgtcagagtctaccggtg

SEQ ID NO: 390955 - DNA, 52 bp, Artificial
  Synthetic oligonucleotide
gaaagaatttacaaagacagagcaggatgcggcgattttgtatgcatcgcaa

SEQ ID NO: 390956 - DNA, 51 bp, Artificial
  Synthetic oligonucleotide
gaaagacaaaattaaagaggatgtagagtatttttcgaaatgtaacgaaca

SEQ ID NO: 390957 - DNA, 52 bp, Artificial
  Synthetic oligonucleotide
gaaagacaggcgggttttttaggatttggcccctggggaaagaagcctcgca

SEQ ID NO: 390958 - DNA, 60 bp, Artificial
  Synthetic oligonucleotide
gaaagacagtcaaaggatggtgctggatatacttaagtctaagaatagtgctgcctgcaa

SEQ ID NO: 390959 - DNA, 60 bp, Artificial
  Synthetic oligonucleotide
gaaagaccgacagtatggactataccgggctccacttgtggagactagtatatactcatg

SEQ ID NO: 390960 - DNA, 51 bp, Artificial
  Synthetic oligonucleotide
gaaagaccgtcgatcccgaccgaagggcctgcgcccggtacggtcgcttgt

SEQ ID NO: 390961 - DNA, 50 bp, Artificial
  Synthetic oligonucleotide
gaaagaccgtttctacatacgacacgtgttcaaacgtgtgttgtccgttg

SEQ ID NO: 390962 - DNA, 55 bp, Artificial
  Synthetic oligonucleotide
gaaagacgaccgcacacgcggtgtacaaaccggagtttgagcctgctgtgttgtc

SEQ ID NO: 390963 - DNA, 57 bp, Artificial
  Synthetic oligonucleotide
gaaagacgagcttcgcgaaggaattaatcaggtatggatggttttatacagccggag

SEQ ID NO: 390964 - DNA, 53 bp, Artificial
  Synthetic oligonucleotide
gaaagacgcgcaaaagtggaggaacgtttgggacggaatggtgtggtacttta

SEQ ID NO: 390965 - DNA, 60 bp, Artificial
  Synthetic oligonucleotide
gaaagacgtcccggacaatcaagcatcattatgcgagatacgtaccggattggcagatag

SEQ ID NO: 390966 - DNA, 51 bp, Artificial
  Synthetic oligonucleotide
gaaagacgtttgcttagggaggtactgtgtggggataggagaaggattact

SEQ ID NO: 390967 - DNA, 56 bp, Artificial
  Synthetic oligonucleotide
gaaagactactgtacctgagctgtgaaaggttgttttacggcaagaagggactgtg

SEQ ID NO: 390968 - DNA, 60 bp, Artificial
  Synthetic oligonucleotide
gaaagactcgaggcattgaggcatgcaactttgactacacagttgcgttccgcatggtta

SEQ ID NO: 390969 - DNA, 53 bp, Artificial
  Synthetic oligonucleotide
gaaagactctaaagagtccacgtatcgccaaacttaaccagccctcaacccgg

SEQ ID NO: 390970 - DNA, 56 bp, Artificial
  Synthetic oligonucleotide
gaaagactctaagggtggaactgtaaaagtaacatcagtaattagagacgatcacg

SEQ ID NO: 390971 - DNA, 58 bp, Artificial
  Synthetic oligonucleotide
gaaagagaactggttcgcaagaccaggttcttaccagtcgctggcgggacaagcagcg

SEQ ID NO: 390972 - DNA, 57 bp, Artificial
  Synthetic oligonucleotide
gaaagagaagtgttgctgcgagaggtcttggtggtcgagaatcctgtacaaaaaaaa

SEQ ID NO: 390973 - DNA, 57 bp, Artificial
  Synthetic oligonucleotide
gaaagagatagaactttaattccaatagtatgtgacattaagtctaagcttaaactg

SEQ ID NO: 390974 - DNA, 58 bp, Artificial
  Synthetic oligonucleotide
gaaagagatcattcctctcttcattgaggctgtggagcgtatctctccttatgaggcg

SEQ ID NO: 390975 - DNA, 60 bp, Artificial
  Synthetic oligonucleotide
gaaagagattatcagtatgaaacaagttggggctgtaacccatcagactgccctggagta

SEQ ID NO: 390976 - DNA, 55 bp, Artificial
  Synthetic oligonucleotide
gaaagagcgtacaacccaaccctccctgtgacaaagccaaagggtgcattcccag

SEQ ID NO: 390977 - DNA, 60 bp, Artificial
  Synthetic oligonucleotide
gaaagagctaaaattcgtgacaaagaggatgcatgcgctgaactatataccaatttgtca

SEQ ID NO: 390978 - DNA, 55 bp, Artificial
  Synthetic oligonucleotide
gaaagaggaattgagtctgttctcaccgcgctcacagagtaccttaaaccactca

SEQ ID NO: 390979 - DNA, 60 bp, Artificial
  Synthetic oligonucleotide
gaaagaggaggtggtgtaaatctttgtcctgcacgaacacgtgataacatccattgttca

SEQ ID NO: 390980 - DNA, 59 bp, Artificial
  Synthetic oligonucleotide
gaaagaggcaaattaaagagaagagcaattgcaacacccgggatgcaaatcagaggatt

SEQ ID NO: 390981 - DNA, 56 bp, Artificial
  Synthetic oligonucleotide
gaaagaggcgcaaatacttcttgacaacataacaaccttgcgggggcccgtggcca

SEQ ID NO: 390982 - DNA, 50 bp, Artificial
  Synthetic oligonucleotide
gaaagagggaatagttcccgtttcgtgcgcggacggttatggcaacatgg

SEQ ID NO: 390983 - DNA, 52 bp, Artificial
  Synthetic oligonucleotide
gaaagagtacatcgatagacaaggaaagaccccactaggcttggttgacttg

SEQ ID NO: 390984 - DNA, 55 bp, Artificial
  Synthetic oligonucleotide
gaaagagtcatgcgattcaaaatttaattcagactgagttcaaaggttcacaggg

SEQ ID NO: 390985 - DNA, 60 bp, Artificial
  Synthetic oligonucleotide
gaaagagtggagtcagtcaagaaacggttaagtctatgaagggcacatattatgtgctaa

SEQ ID NO: 390986 - DNA, 55 bp, Artificial
  Synthetic oligonucleotide
gaaagataactcggctcgatttgcgtctgaacttagttatagccgcccaatgtcg

SEQ ID NO: 390987 - DNA, 53 bp, Artificial
  Synthetic oligonucleotide
gaaagataatccatgaatggtgctgcagatcttgtacgctaccccccctacgt

SEQ ID NO: 390988 - DNA, 56 bp, Artificial
  Synthetic oligonucleotide
gaaagatagtctaatggttgattttgaaggagtgacgattttatctaatagacgtt

SEQ ID NO: 390989 - DNA, 60 bp, Artificial
  Synthetic oligonucleotide
gaaagatcaaccgttatggcagctttcagcgggaacaatgagggacgaacatcagacatg

SEQ ID NO: 390990 - DNA, 60 bp, Artificial
  Synthetic oligonucleotide
gaaagatgatgttggtcactctggtaaaatgttatgtatctccgatattactcgtggtaa

SEQ ID NO: 390991 - DNA, 55 bp, Artificial
  Synthetic oligonucleotide
gaaagatgtaatcgtagtaaggcatgagtctaataacagtactagttccaggaag

SEQ ID NO: 390992 - DNA, 60 bp, Artificial
  Synthetic oligonucleotide
gaaagatgtcgagcggatcgctcacaaccagtcggttgatgtcaagaagagacgttgggt

SEQ ID NO: 390993 - DNA, 55 bp, Artificial
  Synthetic oligonucleotide
gaaagattacatggccttcagattatacctagaggaatttggacacaagtcaggc

SEQ ID NO: 390994 - DNA, 59 bp, Artificial
  Synthetic oligonucleotide
gaaagatttccctgtctttccacagaaattgcatttccgagctcctacacagaatgaaa

SEQ ID NO: 390995 - DNA, 60 bp, Artificial
  Synthetic oligonucleotide
gaaagatttgatccttctatatattgcttcactgaagttgattataatggaagtatagta

SEQ ID NO: 390996 - DNA, 55 bp, Artificial
  Synthetic oligonucleotide
gaaagcaaactggtgctaacccagggacactagataatagtggcaaaggtcctcc

SEQ ID NO: 390997 - DNA, 54 bp, Artificial
  Synthetic oligonucleotide
gaaagcaaagaaagcaacggggctagccagtgggtgttccgcctcccgagaggg

SEQ ID NO: 390998 - DNA, 60 bp, Artificial
  Synthetic oligonucleotide
gaaagcaaccagaaggctgatccaattgatagtgagtgggagagacgagcagtcaatcgc

SEQ ID NO: 390999 - DNA, 55 bp, Artificial
  Synthetic oligonucleotide
gaaagcaaccctctaattgaaaatgatgcatgttctgttgctctagctcgggcac

SEQ ID NO: 391000 - DNA, 54 bp, Artificial
  Synthetic oligonucleotide
gaaagcaacggggctagcgagtggatgttcctccccccgaaggtcccgagtgag

SEQ ID NO: 391001 - DNA, 58 bp, Artificial
  Synthetic oligonucleotide
gaaagcacagcccttagttgtggaagtttcacgttcccaactgttgcggcttcataca

SEQ ID NO: 391002 - DNA, 55 bp, Artificial
  Synthetic oligonucleotide
gaaagcacgctattttgacaggtctaaccttcgtcaagctgaaatcaccgctgag

SEQ ID NO: 391003 - DNA, 56 bp, Artificial
  Synthetic oligonucleotide
gaaagcactcctaaagggttatttaaaacaactaagcttgtgcaggatctaataga

SEQ ID NO: 391004 - DNA, 60 bp, Artificial
  Synthetic oligonucleotide
gaaagcactctaactcacatgggtcactaagggtggctaggccacgtgtgaactgtgcgt

SEQ ID NO: 391005 - DNA, 57 bp, Artificial
  Synthetic oligonucleotide
gaaagcagaagaacttacaccaggtcggttccgcacaatagtctgtggcttattccc

SEQ ID NO: 391006 - DNA, 55 bp, Artificial
  Synthetic oligonucleotide
gaaagcagacatccaaaagtaagctcagaagtacacataccattaggggaggcca

SEQ ID NO: 391007 - DNA, 60 bp, Artificial
  Synthetic oligonucleotide
gaaagcagagaagatatcgacgtctaagggtgacccagcacctagggtgatacagcctcg

SEQ ID NO: 391008 - DNA, 55 bp, Artificial
  Synthetic oligonucleotide
gaaagcagccagcatgttttgcgagccagagctgttttggcttgtcaccagctgg

SEQ ID NO: 391009 - DNA, 54 bp, Artificial
  Synthetic oligonucleotide
gaaagcagtctcctttccagaatgcctacaacgtcaaaggcaacgccaccagtg

SEQ ID NO: 391010 - DNA, 60 bp, Artificial
  Synthetic oligonucleotide
gaaagcatccatgcgagaaacctctccctatgatgctagatattattgccgcgagcactc

SEQ ID NO: 391011 - DNA, 60 bp, Artificial
  Synthetic oligonucleotide
gaaagccaaagcacctgttcttgtcaatgcccaatgcacaatctagtatgaaggcagatg

SEQ ID NO: 391012 - DNA, 55 bp, Artificial
  Synthetic oligonucleotide
gaaagccaagaacggattctactttctccgtcacttatgttgagccgaaagctcg

SEQ ID NO: 391013 - DNA, 55 bp, Artificial
  Synthetic oligonucleotide
gaaagccaagaccgagtcagggttcgacccgcgtatttccactcctagcggcacc

SEQ ID NO: 391014 - DNA, 60 bp, Artificial
  Synthetic oligonucleotide
gaaagccatggaagaatcctgaagaccgatttgaacagtggcaactgtgtagtacaatgt

SEQ ID NO: 391015 - DNA, 60 bp, Artificial
  Synthetic oligonucleotide
gaaagccatggaagaatcttgaagaccgatttaaatagtggcaactgcatggtgcaatgc

SEQ ID NO: 391016 - DNA, 56 bp, Artificial
  Synthetic oligonucleotide
gaaagccatggaagggtactgaagactgatttaagcagtggtaactgcgtagtgca

SEQ ID NO: 391017 - DNA, 56 bp, Artificial
  Synthetic oligonucleotide
gaaagccattctccgaagaagaggaacccacctatactggttctgaatccgggctc

SEQ ID NO: 391018 - DNA, 57 bp, Artificial
  Synthetic oligonucleotide
gaaagcccaagatgtaccgggtgtacagaagcccagatgttccgaggggatgtgaag

SEQ ID NO: 391019 - DNA, 60 bp, Artificial
  Synthetic oligonucleotide
gaaagcccaggatgtacaggatgtatcgaagcccagatgtccctaagggctgcgaaggcc

SEQ ID NO: 391020 - DNA, 60 bp, Artificial
  Synthetic oligonucleotide
gaaagcccatgatgtacaggctgttcagaagccctgatgttccacggggctgtgaaggcc

SEQ ID NO: 391021 - DNA, 54 bp, Artificial
  Synthetic oligonucleotide
gaaagcccatgttttgtaccagttatcgttataaacctcactaggcaaaacctc

SEQ ID NO: 391022 - DNA, 55 bp, Artificial
  Synthetic oligonucleotide
gaaagccccaaacttcatttcacatgcctcactggaaataacaaggagcttgctg

SEQ ID NO: 391023 - DNA, 58 bp, Artificial
  Synthetic oligonucleotide
gaaagcccggggccgagatagcctacaaaatagtcagaaacgaagcactgctgatggt

SEQ ID NO: 391024 - DNA, 57 bp, Artificial
  Synthetic oligonucleotide
gaaagccctgaatacgctctaggacaatatttcgacacgcgtatacaactttatggg

SEQ ID NO: 391025 - DNA, 55 bp, Artificial
  Synthetic oligonucleotide
gaaagccgtatacttcacagaacggagtaccgacttccagcttctttacacaatc

SEQ ID NO: 391026 - DNA, 58 bp, Artificial
  Synthetic oligonucleotide
gaaagcctgaactggggtaatgccccagagatggctcctgcgacggcgaagcgtcccc

SEQ ID NO: 391027 - DNA, 55 bp, Artificial
  Synthetic oligonucleotide
gaaagccttgaagttccctggtcttgcattgttgttctgatctgagggtgggtcc

SEQ ID NO: 391028 - DNA, 58 bp, Artificial
  Synthetic oligonucleotide
gaaagcgaagcgcgacttcccgggacaacctgacatgtggaagagcgcttatagtccc

SEQ ID NO: 391029 - DNA, 60 bp, Artificial
  Synthetic oligonucleotide
gaaagcgatggacgaggagaaggagatatgtggaatcgaagacaaaaagatacatccgaa

SEQ ID NO: 391030 - DNA, 55 bp, Artificial
  Synthetic oligonucleotide
gaaagcgcaaacattatggcgttgtgcgaaggggacaatgttctaaggcggctaa

SEQ ID NO: 391031 - DNA, 60 bp, Artificial
  Synthetic oligonucleotide
gaaagcgcaggaacccaagaggatgaggcgagcctacgagtcttcacggaggctatgact

SEQ ID NO: 391032 - DNA, 55 bp, Artificial
  Synthetic oligonucleotide
gaaagcgcctagcgtactatctaaggagctacatgagtttgtcacaagtcagacg

SEQ ID NO: 391033 - DNA, 60 bp, Artificial
  Synthetic oligonucleotide
gaaagcggatttcacggctcgctatttatagtggagccaatatcactccctgctgtggag

SEQ ID NO: 391034 - DNA, 60 bp, Artificial
  Synthetic oligonucleotide
gaaagcggccactgtgtagcccattttctggcgcttggttcagccagtatggtctcaccg

SEQ ID NO: 391035 - DNA, 52 bp, Artificial
  Synthetic oligonucleotide
gaaagcggggtttggcgtgagtagcaaaatagcactgctcgacacgcatctt

SEQ ID NO: 391036 - DNA, 50 bp, Artificial
  Synthetic oligonucleotide
gaaagctaaaaaagataacgtaaatatgggtggaggtgtaagaaggaaag

SEQ ID NO: 391037 - DNA, 52 bp, Artificial
  Synthetic oligonucleotide
gaaagctaaggattggttttatagacatcattttgaaagcactcatccaaag

SEQ ID NO: 391038 - DNA, 58 bp, Artificial
  Synthetic oligonucleotide
gaaagctatgcaaactaaacggaatccctccacttgaactaggggactgtagcattgc

SEQ ID NO: 391039 - DNA, 60 bp, Artificial
  Synthetic oligonucleotide
gaaagctgacactatctgtgtgggctaccatgcaaacaactctacagacactgttgacac

SEQ ID NO: 391040 - DNA, 55 bp, Artificial
  Synthetic oligonucleotide
gaaagctgcagaggcctaacggccaccaaacaaaagactccaggactcaacatcc

SEQ ID NO: 391041 - DNA, 53 bp, Artificial
  Synthetic oligonucleotide
gaaagctgcgaaaagagcattttgcaaagtcaaaggagaatggggaaagtttt

SEQ ID NO: 391042 - DNA, 55 bp, Artificial
  Synthetic oligonucleotide
gaaagcttaagagggagataacattccatggggccaaagaaatagcactcagtta

SEQ ID NO: 391043 - DNA, 59 bp, Artificial
  Synthetic oligonucleotide
gaaagcttaggcgctaatcaccttttcatagtgcagaaagctaaactcctaacgccaca

SEQ ID NO: 391044 - DNA, 59 bp, Artificial
  Synthetic oligonucleotide
gaaagctttccaccagaggagttcaaattgcttccaatgaaaacatggagactatggaa

SEQ ID NO: 391045 - DNA, 55 bp, Artificial
  Synthetic oligonucleotide
gaaaggaaactgttattgggtaatgacggatggtcctgcgaacaatcaggctagt

SEQ ID NO: 391046 - DNA, 60 bp, Artificial
  Synthetic oligonucleotide
gaaaggaacaggtcagcagaatagagaatcctgcaggaaagaaggcaacttactgatgga

SEQ ID NO: 391047 - DNA, 57 bp, Artificial
  Synthetic oligonucleotide
gaaaggaacagtaacatggtcgggcaaatacccaacaatagatcacttattagacca

SEQ ID NO: 391048 - DNA, 52 bp, Artificial
  Synthetic oligonucleotide
gaaaggaaccaatatatgaaataccatcaagtagagaagcctgggaatcaaa

SEQ ID NO: 391049 - DNA, 55 bp, Artificial
  Synthetic oligonucleotide
gaaaggacacgagagaaaagtgcaggatacgtgaccatgcatcgtcccggacaac

SEQ ID NO: 391050 - DNA, 53 bp, Artificial
  Synthetic oligonucleotide
gaaaggaccaactcaggtactgtggaaaggggaaggagccaattgtggtaaag

SEQ ID NO: 391051 - DNA, 60 bp, Artificial
  Synthetic oligonucleotide
gaaaggagcctatgttgaatttgtgtcaaccgctatatatgtcacctctaacaagcatgt

SEQ ID NO: 391052 - DNA, 53 bp, Artificial
  Synthetic oligonucleotide
gaaaggaggaacaaatacctggaagagcaccccagtgcgggaaaggaccctaa

SEQ ID NO: 391053 - DNA, 47 bp, Artificial
  Synthetic oligonucleotide
gaaaggagggcccgccccaagcggtaactacgcccctttaaaggggg

SEQ ID NO: 391054 - DNA, 51 bp, Artificial
  Synthetic oligonucleotide
gaaaggagggcccgcctcgagcggtaaccacgccccattaaaggggggcaa

SEQ ID NO: 391055 - DNA, 60 bp, Artificial
  Synthetic oligonucleotide
gaaaggagttggaacaatggtgatggagttgattcggatgatcaaacgagggatcaacga

SEQ ID NO: 391056 - DNA, 60 bp, Artificial
  Synthetic oligonucleotide
gaaaggagttgggacaatggtgatggaattgatccggatgatcaaacgaggaattaatga

SEQ ID NO: 391057 - DNA, 58 bp, Artificial
  Synthetic oligonucleotide
gaaaggatacagagacttggtagagtggggagacacaaacctggatttgcgcttagag

SEQ ID NO: 391058 - DNA, 55 bp, Artificial
  Synthetic oligonucleotide
gaaaggatatttcacttttctgtcaaatggtttctaccgttgaattcatcgcacc

SEQ ID NO: 391059 - DNA, 60 bp, Artificial
  Synthetic oligonucleotide
gaaaggatctggtaagcgtgtcttgcaagaagctttacttgtcgagagatataatgattt

SEQ ID NO: 391060 - DNA, 60 bp, Artificial
  Synthetic oligonucleotide
gaaaggatctgttctgactattcgcctcagaatagaaactcagatggaacctccggttgc

SEQ ID NO: 391061 - DNA, 55 bp, Artificial
  Synthetic oligonucleotide
gaaaggatggtgctggtagcccctgacaaaggtaccgcacggtttgtcgaggccg

SEQ ID NO: 391062 - DNA, 58 bp, Artificial
  Synthetic oligonucleotide
gaaaggattgggaactggaacgggagaggaaagatgcagtggcagaggacctagcaaa

SEQ ID NO: 391063 - DNA, 57 bp, Artificial
  Synthetic oligonucleotide
gaaaggcacgtgacgaagacaaatggattgaataaacatttgacgtccggtagcttc

SEQ ID NO: 391064 - DNA, 57 bp, Artificial
  Synthetic oligonucleotide
gaaaggcagggtatgttacagacagaggaaggcagaaagttgttactataactgaaa

SEQ ID NO: 391065 - DNA, 60 bp, Artificial
  Synthetic oligonucleotide
gaaaggcagtgtagcttgattgaagcgggcacaaggttcaatttaggtcctgtgaccatc

SEQ ID NO: 391066 - DNA, 60 bp, Artificial
  Synthetic oligonucleotide
gaaaggcatggttatatcgagtataccggtaccacagctagcgtgtgtagtaattggcaa

SEQ ID NO: 391067 - DNA, 60 bp, Artificial
  Synthetic oligonucleotide
gaaaggctgaccctgagtatgtgttttctccagggataattcctgagtcaaatcacagtg

SEQ ID NO: 391068 - DNA, 60 bp, Artificial
  Synthetic oligonucleotide
gaaaggctgggcctttgatgatggaaacgacgtgtggatgggaagaacgatcagcgagaa

SEQ ID NO: 391069 - DNA, 50 bp, Artificial
  Synthetic oligonucleotide
gaaagggataaaaactccatggggatactttaactttaacgcgtacgact

SEQ ID NO: 391070 - DNA, 60 bp, Artificial
  Synthetic oligonucleotide
gaaagggctactgctatgttagagtatgccgcttatgagaaacagctgcatgacaccacc

SEQ ID NO: 391071 - DNA, 57 bp, Artificial
  Synthetic oligonucleotide
gaaagggctttgctataagatgggtggcaaatggtcaaaacgtagcatgggtggatg

SEQ ID NO: 391072 - DNA, 56 bp, Artificial
  Synthetic oligonucleotide
gaaaggggagcagtccaccctcaatcgacgctaaagctcccacacaagagagggga

SEQ ID NO: 391073 - DNA, 57 bp, Artificial
  Synthetic oligonucleotide
gaaaggggtcggaacaatggtgatggaattgatccggatgatcaaacgggggatcaa

SEQ ID NO: 391074 - DNA, 55 bp, Artificial
  Synthetic oligonucleotide
gaaagggtatgacttcatactcgctacgtagagtaactgtttgaatgatgtagtg

SEQ ID NO: 391075 - DNA, 51 bp, Artificial
  Synthetic oligonucleotide
gaaagggtctttgccgatagttgacgtggtgcggtactgttgcgccgcgta

SEQ ID NO: 391076 - DNA, 55 bp, Artificial
  Synthetic oligonucleotide
gaaaggtagcaaaaggagtcgtgaagtagatatcagtcgcattaaaggatgtgag

SEQ ID NO: 391077 - DNA, 59 bp, Artificial
  Synthetic oligonucleotide
gaaaggtagtccgataattgatattcttgttaagatggagtatgtaggcaaacatctag

SEQ ID NO: 391078 - DNA, 57 bp, Artificial
  Synthetic oligonucleotide
gaaaggtatagtgtgtgacttgaattatcctatctcaactggcacgtatgatctcgt

SEQ ID NO: 391079 - DNA, 56 bp, Artificial
  Synthetic oligonucleotide
gaaaggtatttcctgcgtttgttcatttcgcttccggacttcgtcgagagaacatc

SEQ ID NO: 391080 - DNA, 59 bp, Artificial
  Synthetic oligonucleotide
gaaaggtctcaatttacaacgtcacagtgacaaagaaggctcctaacagtgatggatta

SEQ ID NO: 391081 - DNA, 52 bp, Artificial
  Synthetic oligonucleotide
gaaaggtctttagtttgcccgccaccctgggaatctatgaccgcctggtcag

SEQ ID NO: 391082 - DNA, 55 bp, Artificial
  Synthetic oligonucleotide
gaaaggtctttgctataagatgggtggcaagtggtcaaagcggcttacgggtgga

SEQ ID NO: 391083 - DNA, 57 bp, Artificial
  Synthetic oligonucleotide
gaaaggtgaaattgagaagagtgccttctaccgacggatcaatgtgtacaagtttta

SEQ ID NO: 391084 - DNA, 57 bp, Artificial
  Synthetic oligonucleotide
gaaaggtgaatcctcaaagtgcgtggccgaagaagaggaggactactacgacttcga

SEQ ID NO: 391085 - DNA, 60 bp, Artificial
  Synthetic oligonucleotide
gaaaggtgatacctacaaaggagttgctagttgctgcctatcttggtccagatgctgatc

SEQ ID NO: 391086 - DNA, 60 bp, Artificial
  Synthetic oligonucleotide
gaaaggtgcatgaagagagggcaaagcaaaactgtagtggcaagtgctagatacacattc

SEQ ID NO: 391087 - DNA, 56 bp, Artificial
  Synthetic oligonucleotide
gaaaggtgccttcgctgatttaaaaggcgacttaccaacggcggttgtagctgatc

SEQ ID NO: 391088 - DNA, 54 bp, Artificial
  Synthetic oligonucleotide
gaaaggtggatccatcaacaccaaactcccttttcagaatctttccccaagaac

SEQ ID NO: 391089 - DNA, 55 bp, Artificial
  Synthetic oligonucleotide
gaaaggtggtccaggccacgaggagccgcaattagtgcaaagctatggctggaac

SEQ ID NO: 391090 - DNA, 58 bp, Artificial
  Synthetic oligonucleotide
gaaaggtggtgtcttatcaaaatagtagaagccacttttggctgagccccctggcaga

SEQ ID NO: 391091 - DNA, 60 bp, Artificial
  Synthetic oligonucleotide
gaaaggtgtatcaaagcatcattctgtggggatgatagtcttgtgttgatgcccaagggt

SEQ ID NO: 391092 - DNA, 53 bp, Artificial
  Synthetic oligonucleotide
gaaaggttaattttcgagacaccaataggtaaatggggtaccgattgagatac

SEQ ID NO: 391093 - DNA, 56 bp, Artificial
  Synthetic oligonucleotide
gaaaggttactcggttgaacagattggaagacatattgagaacgcgttccgatcgt

SEQ ID NO: 391094 - DNA, 58 bp, Artificial
  Synthetic oligonucleotide
gaaaggttccaacaggccttggatgaggattagcaatgagactatactagaaacaggg

SEQ ID NO: 391095 - DNA, 57 bp, Artificial
  Synthetic oligonucleotide
gaaaggttccttagggaagccactgatattgcacttacatcttaataacgggtgctg

SEQ ID NO: 391096 - DNA, 52 bp, Artificial
  Synthetic oligonucleotide
gaaaggttgagcccagatctgcatgagggtatggaagatcatacttatacgc

SEQ ID NO: 391097 - DNA, 55 bp, Artificial
  Synthetic oligonucleotide
gaaaggttggggtactttactgtatagagtaaccccaggtctgtgagcgcctgaa

SEQ ID NO: 391098 - DNA, 60 bp, Artificial
  Synthetic oligonucleotide
gaaagtaagccaattcctatcatcggatcatttagtgatcgcgcaattagagtctcatgc

SEQ ID NO: 391099 - DNA, 55 bp, Artificial
  Synthetic oligonucleotide
gaaagtaaggttacgtgatctggatttaaggcgaactgttagtatgagcagccac

SEQ ID NO: 391100 - DNA, 60 bp, Artificial
  Synthetic oligonucleotide
gaaagtaatggctacaattgattcatttcaatcctccaatactagtaccatgcattttac

SEQ ID NO: 391101 - DNA, 51 bp, Artificial
  Synthetic oligonucleotide
gaaagtacatgtccccaagcccagataaagaattaagcccgagattagcat

SEQ ID NO: 391102 - DNA, 59 bp, Artificial
  Synthetic oligonucleotide
gaaagtacgcgacagacgtatatgcatacggagacgtttcaaagtggacgatacgacaa

SEQ ID NO: 391103 - DNA, 57 bp, Artificial
  Synthetic oligonucleotide
gaaagtacgcttccgagctccaacacaaaatgagagaatttgtctagttggaacaaa

SEQ ID NO: 391104 - DNA, 51 bp, Artificial
  Synthetic oligonucleotide
gaaagtactgtttctagatggaatagatagggctcaagaagagcatgaaag

SEQ ID NO: 391105 - DNA, 59 bp, Artificial
  Synthetic oligonucleotide
gaaagtagaaagtctggcatcctggattgggactgtgtgtccaaatcccttccatgtag

SEQ ID NO: 391106 - DNA, 55 bp, Artificial
  Synthetic oligonucleotide
gaaagtagccatcatccatcatctcccagagcgagtcgtagatcttgtcatgagg

SEQ ID NO: 391107 - DNA, 58 bp, Artificial
  Synthetic oligonucleotide
gaaagtagttcaatcagtcgaattgaatgcccctaattatcactacgaggagtgttcc

SEQ ID NO: 391108 - DNA, 60 bp, Artificial
  Synthetic oligonucleotide
gaaagtatgcaggaccttactggcaaggtctgtattcaatagcctgtacgcatccccaca

SEQ ID NO: 391109 - DNA, 60 bp, Artificial
  Synthetic oligonucleotide
gaaagtcagtggcttccgcgagaatagtgggcaattcctctctctgccccatcagtgggt

SEQ ID NO: 391110 - DNA, 53 bp, Artificial
  Synthetic oligonucleotide
gaaagtcataaatttatgaactttacgatatgtactaattttagaaccaaaaa

SEQ ID NO: 391111 - DNA, 55 bp, Artificial
  Synthetic oligonucleotide
gaaagtcataccacgacttccattgttctctgatggtcctgatctactcaaccct

SEQ ID NO: 391112 - DNA, 51 bp, Artificial
  Synthetic oligonucleotide
gaaagtccaggatccattattaggccttgtaacaccatggaaacaagatat

SEQ ID NO: 391113 - DNA, 57 bp, Artificial
  Synthetic oligonucleotide
gaaagtcgaaccgctacctgcaaggcttgctagtttattccttaacgcatcgtgtat

SEQ ID NO: 391114 - DNA, 55 bp, Artificial
  Synthetic oligonucleotide
gaaagtcgatggaagaacaatgaaagttggaaaggttgaaataatcacatctggc

SEQ ID NO: 391115 - DNA, 53 bp, Artificial
  Synthetic oligonucleotide
gaaagtctaaaaccatgtgtaaagctaacccctctctgtgttactttaaaatg

SEQ ID NO: 391116 - DNA, 55 bp, Artificial
  Synthetic oligonucleotide
gaaagtctagatcaagaggcggagcaacagaccttttacaacatacaattgccct

SEQ ID NO: 391117 - DNA, 56 bp, Artificial
  Synthetic oligonucleotide
gaaagtgaagtcatcccagggccttctaccatggcctttgggggacgtggtgcgtg

SEQ ID NO: 391118 - DNA, 60 bp, Artificial
  Synthetic oligonucleotide
gaaagtgacaatctcagatgttgtcgtcagtaatgagaagcaggcagtcccttcagaaac

SEQ ID NO: 391119 - DNA, 55 bp, Artificial
  Synthetic oligonucleotide
gaaagtgagaggcaaaagactaatgctatcacggcttcgggggagagtgcattta

SEQ ID NO: 391120 - DNA, 55 bp, Artificial
  Synthetic oligonucleotide
gaaagtgcccctttctttagtgagagagcactttggataagtgaggaaatagttt

SEQ ID NO: 391121 - DNA, 55 bp, Artificial
  Synthetic oligonucleotide
gaaagtgccgcgcttacgaaagcggctttggcaagattttttgttactgagaccg

SEQ ID NO: 391122 - DNA, 57 bp, Artificial
  Synthetic oligonucleotide
gaaagtgcctaacaccatacgccttgacgccaggagcggtggtaccgttgacactgg

SEQ ID NO: 391123 - DNA, 59 bp, Artificial
  Synthetic oligonucleotide
gaaagtgcctcttccttagtgagagagcagttgggatatgtgaggaaataatttttggc

SEQ ID NO: 391124 - DNA, 60 bp, Artificial
  Synthetic oligonucleotide
gaaagtgcgctccaggaccagggtggtcgtgtgaatttccgccacatatgtaatagattg

SEQ ID NO: 391125 - DNA, 58 bp, Artificial
  Synthetic oligonucleotide
gaaagtgcggactattttattgatctggatcatgctagacttcggcagtctgatctta

SEQ ID NO: 391126 - DNA, 57 bp, Artificial
  Synthetic oligonucleotide
gaaagtgcgtcgccgtctgaacttcgacagccccgggttatcctctgcacgtgcccc

SEQ ID NO: 391127 - DNA, 57 bp, Artificial
  Synthetic oligonucleotide
gaaagtggacacaataattgagagtaatgtcacggttactagctcggttgaactggt

SEQ ID NO: 391128 - DNA, 60 bp, Artificial
  Synthetic oligonucleotide
gaaagtggctacagacaagtggacgagacctcttgtaacagagacggtgtggctatagta

SEQ ID NO: 391129 - DNA, 60 bp, Artificial
  Synthetic oligonucleotide
gaaagtggtaacacgatatgtatacttaacagtcaaggattcgtgctgcctcaagattgg

SEQ ID NO: 391130 - DNA, 52 bp, Artificial
  Synthetic oligonucleotide
gaaagtggttgtgcagttacctcagatggctgtcaagaacggttatacgggt

SEQ ID NO: 391131 - DNA, 54 bp, Artificial
  Synthetic oligonucleotide
gaaagtgtaacactatcacggggccaaaacactataaaaatcacaggaagggga

SEQ ID NO: 391132 - DNA, 55 bp, Artificial
  Synthetic oligonucleotide
gaaagtgtacgacgcccgctctattggaccagccccgccaagtggttcaattcgc

SEQ ID NO: 391133 - DNA, 50 bp, Artificial
  Synthetic oligonucleotide
gaaagtgtccccacaattggaccctgataatcgaatgatatcatacagaa

SEQ ID NO: 391134 - DNA, 52 bp, Artificial
  Synthetic oligonucleotide
gaaagtgtctcctctttggttaaggagcacttggggtacgtcaagaaataat

SEQ ID NO: 391135 - DNA, 57 bp, Artificial
  Synthetic oligonucleotide
gaaagtgtgaagcaagcggttattctaaatgtcttaggagggggagatacgattgcg

SEQ ID NO: 391136 - DNA, 60 bp, Artificial
  Synthetic oligonucleotide
gaaagtgtgcagaaccttgttagcaaagtccgttttcaacagtctatatgcatctccaca

SEQ ID NO: 391137 - DNA, 60 bp, Artificial
  Synthetic oligonucleotide
gaaagtgtgcaggaccttactggcgaagtctgtatttaacagcttatatgcatccccaca

SEQ ID NO: 391138 - DNA, 55 bp, Artificial
  Synthetic oligonucleotide
gaaagttaacgaatgtggctcaggtctgtgtggatgttgtttcgcaggtttatgg

SEQ ID NO: 391139 - DNA, 55 bp, Artificial
  Synthetic oligonucleotide
gaaagttaagaagtagaccatgacagatagcgcacgcaaagaatacttaagccga

SEQ ID NO: 391140 - DNA, 50 bp, Artificial
  Synthetic oligonucleotide
gaaagttagagagaagtcgcacactctctctctagacaccgaatcggagt

SEQ ID NO: 391141 - DNA, 55 bp, Artificial
  Synthetic oligonucleotide
gaaagttagtaatcacaagtaaacaaagcacaatgttttggcttgtcaccagctg

SEQ ID NO: 391142 - DNA, 58 bp, Artificial
  Synthetic oligonucleotide
gaaagttatcgaatctcgtatctagttcccacccatggattacgagattagtcgctaa

SEQ ID NO: 391143 - DNA, 60 bp, Artificial
  Synthetic oligonucleotide
gaaagttcatggcccaatcatgaaacaaacaggggtgtgactgcagcatgcccctatgct

SEQ ID NO: 391144 - DNA, 56 bp, Artificial
  Synthetic oligonucleotide
gaaagttgcttaatgctattcgagattctgaagaaggacaatttctgattgcatcc

SEQ ID NO: 391145 - DNA, 53 bp, Artificial
  Synthetic oligonucleotide
gaaagttggaaggtgaggtccctaacttggacttaaacaagttcacttcatta

SEQ ID NO: 391146 - DNA, 55 bp, Artificial
  Synthetic oligonucleotide
gaaagttggcggctataaaagctaaatctcctcgagcagtgcagttaagacaagg

SEQ ID NO: 391147 - DNA, 54 bp, Artificial
  Synthetic oligonucleotide
gaaagtttgtaggcagtccggcagttagtccgttgggaaactacaatccctgtg

SEQ ID NO: 391148 - DNA, 56 bp, Artificial
  Synthetic oligonucleotide
gaaataacagcgtaaacaaattgttagtagctactccgtgaaaagagagtggctag

SEQ ID NO: 391149 - DNA, 55 bp, Artificial
  Synthetic oligonucleotide
gaaataacatggtgaggccacacctgctacaaatctgagcaagcagatctcgagg

SEQ ID NO: 391150 - DNA, 57 bp, Artificial
  Synthetic oligonucleotide
gaaataacattccatggggcaaaagaagtggcactcagttattcaaccggtgcactt

SEQ ID NO: 391151 - DNA, 58 bp, Artificial
  Synthetic oligonucleotide
gaaataaccgaacatgggaatatccggtcgttcatacgcttatcatttacattactga

SEQ ID NO: 391152 - DNA, 55 bp, Artificial
  Synthetic oligonucleotide
gaaataacgaacagagcaggagacctagcagttgaagtctccccaggttgctgga

SEQ ID NO: 391153 - DNA, 57 bp, Artificial
  Synthetic oligonucleotide
gaaataacgtggctactaggggcgatacccaccgctagctgccacgttagtggctcc

SEQ ID NO: 391154 - DNA, 57 bp, Artificial
  Synthetic oligonucleotide
gaaataactacttctttatacaggacatttcgtactattgcaacccaactgcttgga

SEQ ID NO: 391155 - DNA, 57 bp, Artificial
  Synthetic oligonucleotide
gaaataagatgaaccagtatgaatggttgtcttactgctgggcaaataatgtcacta

SEQ ID NO: 391156 - DNA, 53 bp, Artificial
  Synthetic oligonucleotide
gaaataaggcgaatgcgttacagtatgaaacgttgttgaactatttagtatct

SEQ ID NO: 391157 - DNA, 55 bp, Artificial
  Synthetic oligonucleotide
gaaataagtcagttttgccaataacacttaggtcagggagagtgtttcactcccg

SEQ ID NO: 391158 - DNA, 54 bp, Artificial
  Synthetic oligonucleotide
gaaataatagtcctcgtacttacgatgttacattggttgactattccccaaaaa

SEQ ID NO: 391159 - DNA, 59 bp, Artificial
  Synthetic oligonucleotide
gaaatacaagacgctatgacaaatgtacgggtatctgattaggtatcctaacgatctag

SEQ ID NO: 391160 - DNA, 55 bp, Artificial
  Synthetic oligonucleotide
gaaatacaagtccaggtgtttcctgtgggtacgcgatgagcctcccccacgttaa

SEQ ID NO: 391161 - DNA, 60 bp, Artificial
  Synthetic oligonucleotide
gaaatacaatcatggcatctaagacagttggaacatctgaggagaagctgcgaaagaaat

SEQ ID NO: 391162 - DNA, 55 bp, Artificial
  Synthetic oligonucleotide
gaaatacagaaacaggagtgtggccaatggtcatatcaaatttaccaagaaccat

SEQ ID NO: 391163 - DNA, 53 bp, Artificial
  Synthetic oligonucleotide
gaaatacagaccccattagagttctgaccaatcaaaccatatatttgggtggg

SEQ ID NO: 391164 - DNA, 60 bp, Artificial
  Synthetic oligonucleotide
gaaatacaggggatttgccatatcccaggtatatacgccactcgtcgcttgagctgcagt

SEQ ID NO: 391165 - DNA, 52 bp, Artificial
  Synthetic oligonucleotide
gaaataccaacaaccggacccaccttcataccaaaatggggtggccaaataa

SEQ ID NO: 391166 - DNA, 60 bp, Artificial
  Synthetic oligonucleotide
gaaataccaatcaacagagggcatccgcgggccagatcagtgtgcaacctacattctcag

SEQ ID NO: 391167 - DNA, 60 bp, Artificial
  Synthetic oligonucleotide
gaaataccatcagtcatggaagagaaactccagaaactgctttactcagagggtgagaag

SEQ ID NO: 391168 - DNA, 59 bp, Artificial
  Synthetic oligonucleotide
gaaatacccactttggatgttacacctctaaatgtagatagatcgctgactccaaaaca

SEQ ID NO: 391169 - DNA, 60 bp, Artificial
  Synthetic oligonucleotide
gaaataccgccactatatatggaatatgcggaaatcgggactaggtttgatgatgagcca

SEQ ID NO: 391170 - DNA, 56 bp, Artificial
  Synthetic oligonucleotide
gaaatacctcttggagacccacgggaccaagaccagtacatacatagaaaatgctt

SEQ ID NO: 391171 - DNA, 60 bp, Artificial
  Synthetic oligonucleotide
gaaataccttataccatggaatcagcgaatgagattgcgaggatgagtggagagacagga

SEQ ID NO: 391172 - DNA, 60 bp, Artificial
  Synthetic oligonucleotide
gaaatacgaaaaccatactgagaatgcgttattattgtacatggcatgtacgcatgcatc

SEQ ID NO: 391173 - DNA, 55 bp, Artificial
  Synthetic oligonucleotide
gaaatacgacatccaaagctccacactaccggccggtctctatgctctgaacggg

SEQ ID NO: 391174 - DNA, 56 bp, Artificial
  Synthetic oligonucleotide
gaaatacggaggagccctggtgaggaatccactctcacggaattccacacatgaaa

SEQ ID NO: 391175 - DNA, 51 bp, Artificial
  Synthetic oligonucleotide
gaaatacgtatcaaatgtcgcagaagagaaaggcacccaagttccagactg

SEQ ID NO: 391176 - DNA, 53 bp, Artificial
  Synthetic oligonucleotide
gaaatactcgcggtaatacgcagtatccaaagttttccagtttacttaactcc

SEQ ID NO: 391177 - DNA, 60 bp, Artificial
  Synthetic oligonucleotide
gaaatactctgtgatgcagagcgacgagcaaatgtgattgatcgccaggctatccgttgg

SEQ ID NO: 391178 - DNA, 56 bp, Artificial
  Synthetic oligonucleotide
gaaatagatcggtgtatggctaaattgatgggccagacatgcgtatgtacttgttc

SEQ ID NO: 391179 - DNA, 60 bp, Artificial
  Synthetic oligonucleotide
gaaatagatgtgaacccgtgccagagtggttggagctatcagtatctcagacaaaccaac

SEQ ID NO: 391180 - DNA, 55 bp, Artificial
  Synthetic oligonucleotide
gaaatagctgcgaccgacacagtaagagcgttaatttgtgtgttcatatcgttaa

SEQ ID NO: 391181 - DNA, 55 bp, Artificial
  Synthetic oligonucleotide
gaaatagggaacggcactagaacttctttttgttatagctcaaggaccagcttgg

SEQ ID NO: 391182 - DNA, 60 bp, Artificial
  Synthetic oligonucleotide
gaaataggggacatgctcctcagaaccgctgtgggccaggtgtcaagacccatgttccta

SEQ ID NO: 391183 - DNA, 60 bp, Artificial
  Synthetic oligonucleotide
gaaataggttacataaatgtgatagcacgtgctagtcgcgtgctagtatttgggtgttgt

SEQ ID NO: 391184 - DNA, 56 bp, Artificial
  Synthetic oligonucleotide
gaaatagtaagttaatctataggttagctcattttacggctgcgatgcatgcaaac

SEQ ID NO: 391185 - DNA, 53 bp, Artificial
  Synthetic oligonucleotide
gaaatagtcgaggatttgtgccctggcatcgtcgttgagattaaaacgatgga

SEQ ID NO: 391186 - DNA, 51 bp, Artificial
  Synthetic oligonucleotide
gaaatagtgaacgcgtaatctacccgagttccttctgagttgatagtcgtc

SEQ ID NO: 391187 - DNA, 56 bp, Artificial
  Synthetic oligonucleotide
gaaatagtgactgaggcttcagaaaagtttataccaaatagagcgtaccgtgtaat

SEQ ID NO: 391188 - DNA, 59 bp, Artificial
  Synthetic oligonucleotide
gaaatataaactagaaacgggagtccgacctggctataatggacagaggagctggatga

SEQ ID NO: 391189 - DNA, 54 bp, Artificial
  Synthetic oligonucleotide
gaaatatagatatccgtgttgttgtgtcacagccgatgatgggacgccattaac

SEQ ID NO: 391190 - DNA, 55 bp, Artificial
  Synthetic oligonucleotide
gaaatataggtcgcattcgccactacaagactccctgcactagagtagcgcctag

SEQ ID NO: 391191 - DNA, 55 bp, Artificial
  Synthetic oligonucleotide
gaaatatcaccaccaacttggtagacctgaaataacctcgcccagtagtagcgcc

SEQ ID NO: 391192 - DNA, 56 bp, Artificial
  Synthetic oligonucleotide
gaaatatcaggaaggttttcactcctttgtttagttccgactaacgatgattatca

SEQ ID NO: 391193 - DNA, 53 bp, Artificial
  Synthetic oligonucleotide
gaaatatccctcggggttaaaagggttgagcaatttccaagctgcagagattg

SEQ ID NO: 391194 - DNA, 60 bp, Artificial
  Synthetic oligonucleotide
gaaatatgagaatcatactgagaatgcgttgttgttgtatatggcatgtacacatgcctc

SEQ ID NO: 391195 - DNA, 60 bp, Artificial
  Synthetic oligonucleotide
gaaatatgatgcaaacttacagcttgatatgtccgagctcgcggatttgatccttaatga

SEQ ID NO: 391196 - DNA, 55 bp, Artificial
  Synthetic oligonucleotide
gaaatatgatgctacgctacagctagatatgtcagagctcgcagatttgatactg

SEQ ID NO: 391197 - DNA, 55 bp, Artificial
  Synthetic oligonucleotide
gaaatatgcgttgatttgcacagcgccgattacgtgcagcatctcttcccgctac

SEQ ID NO: 391198 - DNA, 58 bp, Artificial
  Synthetic oligonucleotide
gaaatatggtttatgtacgttctttagctgcaaatttgaattcagtaatgtgtacagg

SEQ ID NO: 391199 - DNA, 60 bp, Artificial
  Synthetic oligonucleotide
gaaatattccacaagtgtgatgacgactgtatggctagtattaggaataactcctatgat

SEQ ID NO: 391200 - DNA, 58 bp, Artificial
  Synthetic oligonucleotide
gaaatattgcaaacgatagtctccaccactgacaaatatactgttagatcggttaacc

SEQ ID NO: 391201 - DNA, 55 bp, Artificial
  Synthetic oligonucleotide
gaaatattgcaatggcatatttgtaataagagaggtgtacaccgattggagctct

SEQ ID NO: 391202 - DNA, 58 bp, Artificial
  Synthetic oligonucleotide
gaaatattggcgaggagcatttgtgaaaaacttgaacaatctgggctcccagtaggag

SEQ ID NO: 391203 - DNA, 56 bp, Artificial
  Synthetic oligonucleotide
gaaatcaaacggagggattatcccttcgtggccataagggatgatgaacttgttct

SEQ ID NO: 391204 - DNA, 58 bp, Artificial
  Synthetic oligonucleotide
gaaatcaacctttgctcgagacctgtatgcaagtgggaccctaatttctatacacgtg

SEQ ID NO: 391205 - DNA, 55 bp, Artificial
  Synthetic oligonucleotide
gaaatcaacgatttctttagcagtctgtattcggcatctgagtccggtgagaccg

SEQ ID NO: 391206 - DNA, 51 bp, Artificial
  Synthetic oligonucleotide
gaaatcaacgccgggtaaggtttggtttcgcaatacgcgaattaacgaact

SEQ ID NO: 391207 - DNA, 55 bp, Artificial
  Synthetic oligonucleotide
gaaatcaagtgaccacctgggccctgtatggagtagcaccttgaacattctccag

SEQ ID NO: 391208 - DNA, 57 bp, Artificial
  Synthetic oligonucleotide
gaaatcaatagggtggcgtcatgcctcaggaagcttggggtaccacccttacgagtc

SEQ ID NO: 391209 - DNA, 55 bp, Artificial
  Synthetic oligonucleotide
gaaatcaatgtgcttctccctcaagccgcagttaatctctcaaactgtcacgttg

SEQ ID NO: 391210 - DNA, 55 bp, Artificial
  Synthetic oligonucleotide
gaaatcacaaacaaattgttggtttccatgttgctggaagcaaaggaagactggg

SEQ ID NO: 391211 - DNA, 54 bp, Artificial
  Synthetic oligonucleotide
gaaatcacagttactcgagtttagaaagctgaatgctgatcactcgtttgccac

SEQ ID NO: 391212 - DNA, 58 bp, Artificial
  Synthetic oligonucleotide
gaaatcacatcacgtttgggcaatcacgaatgtttattccacatattacacttagttt

SEQ ID NO: 391213 - DNA, 54 bp, Artificial
  Synthetic oligonucleotide
gaaatcacctccagaggaccccttaagcgaacaaaggagtctcctacggaatag

SEQ ID NO: 391214 - DNA, 55 bp, Artificial
  Synthetic oligonucleotide
gaaatcacgcaacgtgagatctgtaaagacgccagacatttaatactacgatgct

SEQ ID NO: 391215 - DNA, 60 bp, Artificial
  Synthetic oligonucleotide
gaaatcacgtgtgtgtgcagagataattggcatggctcgaatcggccgtgggtatctttc

SEQ ID NO: 391216 - DNA, 55 bp, Artificial
  Synthetic oligonucleotide
gaaatcactaatttaaaatcccaactccaacagcaagccctgccagtcgtgcctg

SEQ ID NO: 391217 - DNA, 51 bp, Artificial
  Synthetic oligonucleotide
gaaatcagagataacgagctcaactatacgtgtaacggagatgatcttttg

SEQ ID NO: 391218 - DNA, 55 bp, Artificial
  Synthetic oligonucleotide
gaaatcagcatgagcgctgagttcctagaagggatcccaactttggtgccctcgg

SEQ ID NO: 391219 - DNA, 60 bp, Artificial
  Synthetic oligonucleotide
gaaatcagccggctgcaactgctttggccaacactatagaggtattcagatcgaatgatc

SEQ ID NO: 391220 - DNA, 55 bp, Artificial
  Synthetic oligonucleotide
gaaatcagtatggaaagacccattgtacagaaccaacaagttgctattcgaccta

SEQ ID NO: 391221 - DNA, 55 bp, Artificial
  Synthetic oligonucleotide
gaaatcagttttaatagttattggtcacttaaaagaaatcgagactactgccacc

SEQ ID NO: 391222 - DNA, 60 bp, Artificial
  Synthetic oligonucleotide
gaaatcatatcacgtttggacaatcgcgaatgtttataccacatattacgcttagtttca

SEQ ID NO: 391223 - DNA, 55 bp, Artificial
  Synthetic oligonucleotide
gaaatcatctcctagatttcttcggaagggcttcgtgagaagctcgtgcacggta

SEQ ID NO: 391224 - DNA, 55 bp, Artificial
  Synthetic oligonucleotide
gaaatcattgggtacggcttatgcggctaatgatcgtgatgccatgaagcaattg

SEQ ID NO: 391225 - DNA, 59 bp, Artificial
  Synthetic oligonucleotide
gaaatccaagtgtccactaagataattatggactcctaatgaacgagcccacattgtct

SEQ ID NO: 391226 - DNA, 59 bp, Artificial
  Synthetic oligonucleotide
gaaatccacgccagcagacttacaagtctctgaggtgcctttgaaaccatctcctaggt

SEQ ID NO: 391227 - DNA, 53 bp, Artificial
  Synthetic oligonucleotide
gaaatccacgccggaggtttacaaacctctgaggcgcctttgaaaccgactcc

SEQ ID NO: 391228 - DNA, 60 bp, Artificial
  Synthetic oligonucleotide
gaaatccagagtgtgaatcactctccacagcaagctcatggtcctacattgtggaaacac

SEQ ID NO: 391229 - DNA, 55 bp, Artificial
  Synthetic oligonucleotide
gaaatccatcggactttacattctaagttttgcattaccgattatccttaaagcc

SEQ ID NO: 391230 - DNA, 55 bp, Artificial
  Synthetic oligonucleotide
gaaatcccgacgcgacgcttacgcgaggagcgcgttgtacatatagacgcctgga

SEQ ID NO: 391231 - DNA, 53 bp, Artificial
  Synthetic oligonucleotide
gaaatcccttatgataaacagggaaggtggaagaaggttgaggaatggggagt

SEQ ID NO: 391232 - DNA, 56 bp, Artificial
  Synthetic oligonucleotide
gaaatccgcatggtaggagcgtcctacatggaccgaagccccggaggccctatacc

SEQ ID NO: 391233 - DNA, 57 bp, Artificial
  Synthetic oligonucleotide
gaaatccgtctatgtgttggggaagatatggatggacgaaaacatcaagactaaaaa

SEQ ID NO: 391234 - DNA, 60 bp, Artificial
  Synthetic oligonucleotide
gaaatcctagacttagcaatgcgtttcggatatgctccttcttatgaggcgattgtgacg

SEQ ID NO: 391235 - DNA, 60 bp, Artificial
  Synthetic oligonucleotide
gaaatcctgtttcaggcagagattcatgaagcgtgtggcgacgagagcagaggcagaaag

SEQ ID NO: 391236 - DNA, 57 bp, Artificial
  Synthetic oligonucleotide
gaaatccttgacctcggggtttatcacacacaaggaatcttccctgactggcagaat

SEQ ID NO: 391237 - DNA, 59 bp, Artificial
  Synthetic oligonucleotide
gaaatcgaacccctttcacgctgcgaaatcatcattaaatcaggtgctcaaaatgaaac

SEQ ID NO: 391238 - DNA, 55 bp, Artificial
  Synthetic oligonucleotide
gaaatcgaacgacgacgcctccatagctctgtttgcaccttacgattgtcagttc

SEQ ID NO: 391239 - DNA, 58 bp, Artificial
  Synthetic oligonucleotide
gaaatcgaatttatagaaccagtgaacccaactgtcaatgtgtaaccacacaacgatg

SEQ ID NO: 391240 - DNA, 60 bp, Artificial
  Synthetic oligonucleotide
gaaatcgaccggccctcaccggatgatacagctgccccactacatacatatgtgtagcca

SEQ ID NO: 391241 - DNA, 55 bp, Artificial
  Synthetic oligonucleotide
gaaatcgagggtaagagttggtctgaatgggttaaatctgaggcttacctgtttc

SEQ ID NO: 391242 - DNA, 58 bp, Artificial
  Synthetic oligonucleotide
gaaatcgagtcaatatctaatgataacgatgtgtccgttcctgccgtagtatcccaac

SEQ ID NO: 391243 - DNA, 58 bp, Artificial
  Synthetic oligonucleotide
gaaatcggactaataggtgaatatttgaacattagcagttggttggagactactacat

SEQ ID NO: 391244 - DNA, 55 bp, Artificial
  Synthetic oligonucleotide
gaaatcggggaaatgattgccagagttatgcgagcaagtgatgagtctaggactc

SEQ ID NO: 391245 - DNA, 58 bp, Artificial
  Synthetic oligonucleotide
gaaatcgtagaatgtatcaatgaccagcttaagaatgagaacgatactaaaacctctc

SEQ ID NO: 391246 - DNA, 56 bp, Artificial
  Synthetic oligonucleotide
gaaatcgtcatgcacgttgacgttattcattccccccctaaataccgcggcttcgc

SEQ ID NO: 391247 - DNA, 55 bp, Artificial
  Synthetic oligonucleotide
gaaatcgtgagaaacttgcctgccaggttggaattaacccttacagcatggagtg

SEQ ID NO: 391248 - DNA, 56 bp, Artificial
  Synthetic oligonucleotide
gaaatcgtgtacgttgcctcgcgctttccattttaattgagcgcttttttgaagtc

SEQ ID NO: 391249 - DNA, 60 bp, Artificial
  Synthetic oligonucleotide
gaaatcgtttgagtcaacttgcaatgatactgagaataaagtacaggggtattacatctg

SEQ ID NO: 391250 - DNA, 58 bp, Artificial
  Synthetic oligonucleotide
gaaatcgtttttctttaaaacgatcttcgtccaatttgtccatactatgctatatgca

SEQ ID NO: 391251 - DNA, 57 bp, Artificial
  Synthetic oligonucleotide
gaaatctagctgtggtgccttctttgaaagaccgattttacatacgccacgttttga

SEQ ID NO: 391252 - DNA, 60 bp, Artificial
  Synthetic oligonucleotide
gaaatctcaatcaccaggttgcatcttacatcaatgggactgtgtttttatacagcggca

SEQ ID NO: 391253 - DNA, 55 bp, Artificial
  Synthetic oligonucleotide
gaaatctcacggaaggaaaataatgtgcagcaaactactcatgattaccatgcag

SEQ ID NO: 391254 - DNA, 56 bp, Artificial
  Synthetic oligonucleotide
gaaatctcatttattcactggggtcgaccgctctggggagaaaagggaggatcgga

SEQ ID NO: 391255 - DNA, 55 bp, Artificial
  Synthetic oligonucleotide
gaaatctccagtcggctggtgacgattcatgagtgtaacaataacaccaagccat

SEQ ID NO: 391256 - DNA, 59 bp, Artificial
  Synthetic oligonucleotide
gaaatctcctaggtggaggcattttgacttggtcaatcaggtcctctcaaacttggcta

SEQ ID NO: 391257 - DNA, 58 bp, Artificial
  Synthetic oligonucleotide
gaaatctctatgagcaatcattagacgagtaaagaacaagatccgcaaagcccccccc

SEQ ID NO: 391258 - DNA, 57 bp, Artificial
  Synthetic oligonucleotide
gaaatctgcaaacatgtacactgtccatttagctactcaagataatcatgcacaaga

SEQ ID NO: 391259 - DNA, 55 bp, Artificial
  Synthetic oligonucleotide
gaaatctgcatgatcaagtacgtagagcgctaaagaccaatgcaattgatgaagg

SEQ ID NO: 391260 - DNA, 50 bp, Artificial
  Synthetic oligonucleotide
gaaatctgcctactaattattggcaaagcagttagactaactcacacaac

SEQ ID NO: 391261 - DNA, 60 bp, Artificial
  Synthetic oligonucleotide
gaaatctgtcttcttcataaacctatcagcaaccatgaggcctttagcaatctgcatcat

SEQ ID NO: 391262 - DNA, 53 bp, Artificial
  Synthetic oligonucleotide
gaaatcttaaaatcgcagttgggaccggtgctttgcgcgcgcgagttgcggta

SEQ ID NO: 391263 - DNA, 55 bp, Artificial
  Synthetic oligonucleotide
gaaatcttctcccagtcaactggcttctccaactgtgtgcaaactgaggaccccg

SEQ ID NO: 391264 - DNA, 60 bp, Artificial
  Synthetic oligonucleotide
gaaatcttgaggcataagacgggcttgatacgtgctatgtatctgaacggcttcgtcacg

SEQ ID NO: 391265 - DNA, 60 bp, Artificial
  Synthetic oligonucleotide
gaaatcttgatggatatcaacaaatcaatttagaagagttaatgagaactggagactatg

SEQ ID NO: 391266 - DNA, 60 bp, Artificial
  Synthetic oligonucleotide
gaaatctttcgcgtcgtccaatgatattgcgtctgaccagcctagatatttgcaaaaaac

SEQ ID NO: 391267 - DNA, 60 bp, Artificial
  Synthetic oligonucleotide
gaaatgaactcacaacaacactcttgggttgtcctcgcatattcctgttgatgaccctag

SEQ ID NO: 391268 - DNA, 58 bp, Artificial
  Synthetic oligonucleotide
gaaatgaagccggactaagtggcctcgtcctcctagccaccgcccgcagccgactaca

SEQ ID NO: 391269 - DNA, 51 bp, Artificial
  Synthetic oligonucleotide
gaaatgaaggaatgacttgtggagagccaaggctcggcgtaggttgtggtt

SEQ ID NO: 391270 - DNA, 55 bp, Artificial
  Synthetic oligonucleotide
gaaatgacaccatggatgggaataatactatgaatgatactaccatacttccgtg

SEQ ID NO: 391271 - DNA, 56 bp, Artificial
  Synthetic oligonucleotide
gaaatgacactagattattaccgtaaaattggcgaagtattaagtgcgatttggaa

SEQ ID NO: 391272 - DNA, 59 bp, Artificial
  Synthetic oligonucleotide
gaaatgacatatgagaagcacaacgggaggtttcaaactaccacagtcctgtttgtgcg

SEQ ID NO: 391273 - DNA, 55 bp, Artificial
  Synthetic oligonucleotide
gaaatgactttcaaactggaggaattggcaatttacctattagaaattggacatt

SEQ ID NO: 391274 - DNA, 58 bp, Artificial
  Synthetic oligonucleotide
gaaatgagagtgattagtaaagtcttgccgttcacatgtttatttgacggtaccaggc

SEQ ID NO: 391275 - DNA, 58 bp, Artificial
  Synthetic oligonucleotide
gaaatgatactgacgtggtaaactttgtgagtatggaattttctctcactgacccaag

SEQ ID NO: 391276 - DNA, 60 bp, Artificial
  Synthetic oligonucleotide
gaaatgatactgcataaattagccataccacaccaatttgtcgggcaatggatatcagtg

SEQ ID NO: 391277 - DNA, 55 bp, Artificial
  Synthetic oligonucleotide
gaaatgatcttcgagtagacggtgccagcgtgcgcattgacagcgttaacttgta

SEQ ID NO: 391278 - DNA, 60 bp, Artificial
  Synthetic oligonucleotide
gaaatgatgaggagtctgaaaagaactcttttgtctgctataagcacaaagggcagtatg

SEQ ID NO: 391279 - DNA, 59 bp, Artificial
  Synthetic oligonucleotide
gaaatgatttcgtccaatcattgattgacattggggtttcattataactgaatggcatc

SEQ ID NO: 391280 - DNA, 60 bp, Artificial
  Synthetic oligonucleotide
gaaatgcactaaaactagtgaacgattctgaactgcaggtgcatgtgttacgaggtccga

SEQ ID NO: 391281 - DNA, 55 bp, Artificial
  Synthetic oligonucleotide
gaaatgcacttggaaattgccccaagtacataaaatcagggcagcttaagttggc

SEQ ID NO: 391282 - DNA, 59 bp, Artificial
  Synthetic oligonucleotide
gaaatgcagattaacgctgactaagcaagtatcagccatgttgggtgttgctgaacggt

SEQ ID NO: 391283 - DNA, 60 bp, Artificial
  Synthetic oligonucleotide
gaaatgcagtacaatagagacataattatcaggtttagatttgagaatgtgataataaaa

SEQ ID NO: 391284 - DNA, 60 bp, Artificial
  Synthetic oligonucleotide
gaaatgcagtacaatagggacatcaccatcagattcaaatttgctaatcgaataataaaa

SEQ ID NO: 391285 - DNA, 60 bp, Artificial
  Synthetic oligonucleotide
gaaatgcattagacggtaaccctatatgtatcgattgtaaacatagagcaccaatacaaa

SEQ ID NO: 391286 - DNA, 60 bp, Artificial
  Synthetic oligonucleotide
gaaatgccacctccagtcgaaacctcagaagacacttgtgacagctgctactctgagtgc

SEQ ID NO: 391287 - DNA, 55 bp, Artificial
  Synthetic oligonucleotide
gaaatgccatgtctgaggttgtaaaggagtccaaatccggaagatcaggaaacac

SEQ ID NO: 391288 - DNA, 56 bp, Artificial
  Synthetic oligonucleotide
gaaatgcctaagcgggatgccccgtggcgttctatggcggggacctctaaggtgtc

SEQ ID NO: 391289 - DNA, 55 bp, Artificial
  Synthetic oligonucleotide
gaaatgcctctgtgcttcaagagccccctctgctccgggagcgtaaagcaacctc

SEQ ID NO: 391290 - DNA, 60 bp, Artificial
  Synthetic oligonucleotide
gaaatgcctgatttaccaggtgtgatgaggtcaaattatgatgttcgcgaacttcggcaa

SEQ ID NO: 391291 - DNA, 59 bp, Artificial
  Synthetic oligonucleotide
gaaatgccttgtggagacccagtgctctcctcaggttgtggttgaaccttatttggaca

SEQ ID NO: 391292 - DNA, 60 bp, Artificial
  Synthetic oligonucleotide
gaaatgcgactttatccatcacgaatggtcttatgttggctcagttcgtaagaactggag

SEQ ID NO: 391293 - DNA, 58 bp, Artificial
  Synthetic oligonucleotide
gaaatgcgatctattcctaaccatcatttagttggtgggacgtctgcccacgtcttaa

SEQ ID NO: 391294 - DNA, 55 bp, Artificial
  Synthetic oligonucleotide
gaaatgcgggaccattaaaagattatgcgggagatggtacaatgatgggaaacat

SEQ ID NO: 391295 - DNA, 60 bp, Artificial
  Synthetic oligonucleotide
gaaatgcgtcatttgatgaacgtttgcatctgacaccttgtagtataacttccaaggaat

SEQ ID NO: 391296 - DNA, 60 bp, Artificial
  Synthetic oligonucleotide
gaaatgctcgctgctgtccctttatctgtggtaaagctgtcatttttagagatcgtaata

SEQ ID NO: 391297 - DNA, 52 bp, Artificial
  Synthetic oligonucleotide
gaaatgctgctagagggtaaataccgtgacttggtcttaatttgcagcgacg

SEQ ID NO: 391298 - DNA, 59 bp, Artificial
  Synthetic oligonucleotide
gaaatgctggaccgcgcgataaacctgcttgacggttatctgggagataccgatccaaa

SEQ ID NO: 391299 - DNA, 60 bp, Artificial
  Synthetic oligonucleotide
gaaatgctgggcctaggaagagtggtattatacccgatcgcctagataaggtgtatgaga

SEQ ID NO: 391300 - DNA, 60 bp, Artificial
  Synthetic oligonucleotide
gaaatgctttagatagtgggggtctacatcatcaacgacgttgtaccatgcgccattgct

SEQ ID NO: 391301 - DNA, 57 bp, Artificial
  Synthetic oligonucleotide
gaaatggaccccgtagatcctaacttagagccctggaaccatccaggatgtcagcct

SEQ ID NO: 391302 - DNA, 55 bp, Artificial
  Synthetic oligonucleotide
gaaatggccaaaatgccaggctttgacttgcattgccgctttaatgaggaaggtg

SEQ ID NO: 391303 - DNA, 60 bp, Artificial
  Synthetic oligonucleotide
gaaatggctacactttcgagcttgagtcgcttattttcgcggcgctcgcaagaagtgtgt

SEQ ID NO: 391304 - DNA, 60 bp, Artificial
  Synthetic oligonucleotide
gaaatggctaggcaagaatggatgagccttcctgacactgagaaatcttcagattacgat

SEQ ID NO: 391305 - DNA, 60 bp, Artificial
  Synthetic oligonucleotide
gaaatggctataacaggggctcctgggatagatgcaatcaatatggattcttcccctgga

SEQ ID NO: 391306 - DNA, 60 bp, Artificial
  Synthetic oligonucleotide
gaaatggctccgcaggtgaataactatgaatgtatgctaagaagggtttgcaacgaagaa

SEQ ID NO: 391307 - DNA, 58 bp, Artificial
  Synthetic oligonucleotide
gaaatggctgggtacaaaacagtaaagagcagatcaaaaggcaagttgtggtcgataa

SEQ ID NO: 391308 - DNA, 60 bp, Artificial
  Synthetic oligonucleotide
gaaatgggaaaatcaagtgggacatagaagaattactccacataagattgctactggcac

SEQ ID NO: 391309 - DNA, 55 bp, Artificial
  Synthetic oligonucleotide
gaaatgggcacttggtgagaatatggcgccagagaaagtggattttgaggattgt

SEQ ID NO: 391310 - DNA, 55 bp, Artificial
  Synthetic oligonucleotide
gaaatggggaaccatgctccttgggatattgatgatctgtagtgctactaaagag

SEQ ID NO: 391311 - DNA, 55 bp, Artificial
  Synthetic oligonucleotide
gaaatgggtgcatgctttggggttattcctgttgcaagcccagaagatgcaatcc

SEQ ID NO: 391312 - DNA, 55 bp, Artificial
  Synthetic oligonucleotide
gaaatggtcacacttttggatcaacaccaatacatgtcatgacaacagggtatgc

SEQ ID NO: 391313 - DNA, 60 bp, Artificial
  Synthetic oligonucleotide
gaaatggtcattcacgcaagcctgcgcgtcactcgacaagacaacttccagtggccatcc

SEQ ID NO: 391314 - DNA, 55 bp, Artificial
  Synthetic oligonucleotide
gaaatggtgcagtgggcatacgaccacgacctggaggatgacagtgagatagcct

SEQ ID NO: 391315 - DNA, 55 bp, Artificial
  Synthetic oligonucleotide
gaaatggttgaggaacaatcacatgagaggtgggtgtatgatgcacttcatggga

SEQ ID NO: 391316 - DNA, 55 bp, Artificial
  Synthetic oligonucleotide
gaaatgtaattgctgtggcttagcttatcatccatttacaaactgtggctcccat

SEQ ID NO: 391317 - DNA, 54 bp, Artificial
  Synthetic oligonucleotide
gaaatgtaccccgttgacgacgttcgtatcgtcaaccctgtatagaaccttcca

SEQ ID NO: 391318 - DNA, 60 bp, Artificial
  Synthetic oligonucleotide
gaaatgtagctcggaaccttgttgaatgactccagtgtaaaaggcgacatatatgcctga

SEQ ID NO: 391319 - DNA, 59 bp, Artificial
  Synthetic oligonucleotide
gaaatgtatagagaatacactatgttaattagagacgaagttgtaaaaatgctagagga

SEQ ID NO: 391320 - DNA, 50 bp, Artificial
  Synthetic oligonucleotide
gaaatgtatggtcttggctttggtgcgtatataatagtgaaccatcactt

SEQ ID NO: 391321 - DNA, 55 bp, Artificial
  Synthetic oligonucleotide
gaaatgtcaacactaattgagcaaatggaagccttcattgagcctagacctagtg

SEQ ID NO: 391322 - DNA, 60 bp, Artificial
  Synthetic oligonucleotide
gaaatgtcatgcgttgcgcaagatatacttagtaaacactctgtgtttcaaagcacaagg

SEQ ID NO: 391323 - DNA, 57 bp, Artificial
  Synthetic oligonucleotide
gaaatgtccaccattattaataacctccaataccaatcctgtggaagacgataggtg

SEQ ID NO: 391324 - DNA, 55 bp, Artificial
  Synthetic oligonucleotide
gaaatgtcccaaaaaggtgtatgcagcttaatttaaccagtaacggaaaatatgc

SEQ ID NO: 391325 - DNA, 60 bp, Artificial
  Synthetic oligonucleotide
gaaatgtgacgagctcgccacaaagttgtcaggcctcggagtcaatgctgtagcgtacta

SEQ ID NO: 391326 - DNA, 60 bp, Artificial
  Synthetic oligonucleotide
gaaatgtgacgagcttgctgcaaagttgtcggccctcggagttaatgccgtggcgtacta

SEQ ID NO: 391327 - DNA, 60 bp, Artificial
  Synthetic oligonucleotide
gaaatgtgccgtcgagtgatggaagcggtcggaacgtgcggctttacaggattcagtgga

SEQ ID NO: 391328 - DNA, 60 bp, Artificial
  Synthetic oligonucleotide
gaaatgtggcgctattcttactagactttacagtcgcaaaatgccgcgacacagttatga

SEQ ID NO: 391329 - DNA, 55 bp, Artificial
  Synthetic oligonucleotide
gaaatgtggtaccagtcgcactatcagctcgggaagtagtagcgcaacgagtgag

SEQ ID NO: 391330 - DNA, 55 bp, Artificial
  Synthetic oligonucleotide
gaaatgtgtatgccttatactctcagaaaatttggcagattgggaattgacgatg

SEQ ID NO: 391331 - DNA, 59 bp, Artificial
  Synthetic oligonucleotide
gaaatgtgtcctctgatgaacgttggtatctgaaactctataatagagtttccacggta

SEQ ID NO: 391332 - DNA, 58 bp, Artificial
  Synthetic oligonucleotide
gaaatgttccacagattgaaactagaggacttttcggagctatagcgggctttattga

SEQ ID NO: 391333 - DNA, 60 bp, Artificial
  Synthetic oligonucleotide
gaaatgttcgatgagttagctcaatgtaatctacctacaattgaattaattacaagagaa

SEQ ID NO: 391334 - DNA, 56 bp, Artificial
  Synthetic oligonucleotide
gaaattaactaaaagagatttgatttggcttgatgataatggaatgtttttgggtc

SEQ ID NO: 391335 - DNA, 56 bp, Artificial
  Synthetic oligonucleotide
gaaattaatgaaattggatcattgaaatcgcaggatgtcactatcaatcctggtcc

SEQ ID NO: 391336 - DNA, 60 bp, Artificial
  Synthetic oligonucleotide
gaaattaatggccctgaatcagtgctagtcaacacataccaatggatcattaggaattgg

SEQ ID NO: 391337 - DNA, 55 bp, Artificial
  Synthetic oligonucleotide
gaaattacaacgcatacatgaaaatcaatatgggcctgaatttgtcatgacccac

SEQ ID NO: 391338 - DNA, 60 bp, Artificial
  Synthetic oligonucleotide
gaaattaccagagttgattagtgtgtgcaataggttctaccatattagagattgcaattg

SEQ ID NO: 391339 - DNA, 57 bp, Artificial
  Synthetic oligonucleotide
gaaattacgtcacgacggttggacgtaacgtgcatttgtatctttgtgtcgatagga

SEQ ID NO: 391340 - DNA, 53 bp, Artificial
  Synthetic oligonucleotide
gaaattacgttccaagctccggtttctgcaacttcgttccaagttccaacgcc

SEQ ID NO: 391341 - DNA, 49 bp, Artificial
  Synthetic oligonucleotide
gaaattactttaattccttcaattccacctggtggggtattaaaagttt

SEQ ID NO: 391342 - DNA, 60 bp, Artificial
  Synthetic oligonucleotide
gaaattagatattgagcggattgtgtcaatattggagtgggatcgatcaactgagatttc

SEQ ID NO: 391343 - DNA, 54 bp, Artificial
  Synthetic oligonucleotide
gaaattagctttcaacacagccagttgcttgctgttagccgtttctacttcgga

SEQ ID NO: 391344 - DNA, 55 bp, Artificial
  Synthetic oligonucleotide
gaaattaggcccatagagaaaatccatgaagcaaagacacgcatagtggatgtac

SEQ ID NO: 391345 - DNA, 58 bp, Artificial
  Synthetic oligonucleotide
gaaattagggcatctgtcgggaggatggttgggggaatcggaagattctacatacaga

SEQ ID NO: 391346 - DNA, 60 bp, Artificial
  Synthetic oligonucleotide
gaaattagtccctgtaaatgtatcagatgaggcacaggaggatgagaggcattatttaat

SEQ ID NO: 391347 - DNA, 60 bp, Artificial
  Synthetic oligonucleotide
gaaattataaccagaaatgttaatagagctttcgtccttagtcacaatctgcaagcattc

SEQ ID NO: 391348 - DNA, 58 bp, Artificial
  Synthetic oligonucleotide
gaaattatcaggagtgaccctaattgtctctagcatgttgccaccgtcaagcatcgag

SEQ ID NO: 391349 - DNA, 59 bp, Artificial
  Synthetic oligonucleotide
gaaattatgaagaccgatgtgtttattatgagttgttgtatctgggttgaaccctgata

SEQ ID NO: 391350 - DNA, 55 bp, Artificial
  Synthetic oligonucleotide
gaaattatgaccttttgaacgcggaagagtttaaaccacatcacgtgactgacgg

SEQ ID NO: 391351 - DNA, 60 bp, Artificial
  Synthetic oligonucleotide
gaaattcaacgagactaaacatgcatggcttgtaatcatttttcgatctgatcctgcgca

SEQ ID NO: 391352 - DNA, 60 bp, Artificial
  Synthetic oligonucleotide
gaaattcacatggaaaatcgattgcaacacacgcggcaatgagatcactcaaggcgattc

SEQ ID NO: 391353 - DNA, 58 bp, Artificial
  Synthetic oligonucleotide
gaaattcacgaatcaataagatggacaaaagatccaagaaacacccaggatcacgtac

SEQ ID NO: 391354 - DNA, 50 bp, Artificial
  Synthetic oligonucleotide
gaaattcacgcaccccggctcgacaggtgtgtggtcagcgacgctgtggc

SEQ ID NO: 391355 - DNA, 52 bp, Artificial
  Synthetic oligonucleotide
gaaattcaggtagtgaggttcaggtggttctaaccaagacatactctttagg

SEQ ID NO: 391356 - DNA, 60 bp, Artificial
  Synthetic oligonucleotide
gaaattccagcagtctctgttcagaaagtacaggccatatttgatgggcatccatccgat

SEQ ID NO: 391357 - DNA, 50 bp, Artificial
  Synthetic oligonucleotide
gaaattccagccttaacagcggtggaaacggggcacacctcacaagtgga

SEQ ID NO: 391358 - DNA, 52 bp, Artificial
  Synthetic oligonucleotide
gaaattccatcaaatcgaaaaggaattctcaggagtagaagggagaattcag

SEQ ID NO: 391359 - DNA, 60 bp, Artificial
  Synthetic oligonucleotide
gaaattcctgatgccatgtgtgaggacacaatgattgtttgggaggcctataggctggaa

SEQ ID NO: 391360 - DNA, 60 bp, Artificial
  Synthetic oligonucleotide
gaaattcgacattctgaacgctttgtattctaaggctatataccacattactgctacaaa

SEQ ID NO: 391361 - DNA, 60 bp, Artificial
  Synthetic oligonucleotide
gaaattcgtggagtgatgactcattaacgactatcgctgattctgattcggaaagttccg

SEQ ID NO: 391362 - DNA, 60 bp, Artificial
  Synthetic oligonucleotide
gaaattcgttgtcgcttccggtgatgattcattgataggtactgtggaggaattgccaag

SEQ ID NO: 391363 - DNA, 57 bp, Artificial
  Synthetic oligonucleotide
gaaattctagtaagacaagaacttcttcagggtcactatcaaccaattcgcttaatc

SEQ ID NO: 391364 - DNA, 59 bp, Artificial
  Synthetic oligonucleotide
gaaattgaagggtatataaacaaagtatatagcataacttatgctgacgatcctaatta

SEQ ID NO: 391365 - DNA, 56 bp, Artificial
  Synthetic oligonucleotide
gaaattgaattttttaatgcctatttgcagggtaagaatcccccactatctgaata

SEQ ID NO: 391366 - DNA, 55 bp, Artificial
  Synthetic oligonucleotide
gaaattgagaggataactaatacccctctgtggaatatcatagtccgatgctgga

SEQ ID NO: 391367 - DNA, 60 bp, Artificial
  Synthetic oligonucleotide
gaaattgcacagggcatctgggttgtgtccaggttataaaagtctcagggctgcaagagt

SEQ ID NO: 391368 - DNA, 53 bp, Artificial
  Synthetic oligonucleotide
gaaattgcagaattgaaggcacctaaaacaactgccaagaagtaggtgaatgt

SEQ ID NO: 391369 - DNA, 56 bp, Artificial
  Synthetic oligonucleotide
gaaattgcctaagtggtccccgatataaaaagctgctgttttatattgtgtttgaa

SEQ ID NO: 391370 - DNA, 56 bp, Artificial
  Synthetic oligonucleotide
gaaattgcgcctggcgagcctagatatttgaaacaacttagtgcgcaagttgtgag

SEQ ID NO: 391371 - DNA, 55 bp, Artificial
  Synthetic oligonucleotide
gaaattgctcctgctgtacctgggttgctttctccaagcagctttacagtgctgg

SEQ ID NO: 391372 - DNA, 55 bp, Artificial
  Synthetic oligonucleotide
gaaattgctgtcctatggcccccgttgctgcaccccatctggggtgcagcaacga

SEQ ID NO: 391373 - DNA, 60 bp, Artificial
  Synthetic oligonucleotide
gaaattggaagactccgcatccgatgcggcgaaatcctctctcttaatcattgcgtcaag

SEQ ID NO: 391374 - DNA, 51 bp, Artificial
  Synthetic oligonucleotide
gaaattggacactcctcggattccctctcagaaagctggttgctgccagtc

SEQ ID NO: 391375 - DNA, 55 bp, Artificial
  Synthetic oligonucleotide
gaaattggacatttgactttggtctactaggtactacgcttttaaatctcgatgc

SEQ ID NO: 391376 - DNA, 60 bp, Artificial
  Synthetic oligonucleotide
gaaattggacgtcctgcattgaagcctatggatgagattaggccggatttgacgaatatc

SEQ ID NO: 391377 - DNA, 55 bp, Artificial
  Synthetic oligonucleotide
gaaattggcaaagtcttagtgataccatcttactcagtcttaaggcgcaggtggc

SEQ ID NO: 391378 - DNA, 52 bp, Artificial
  Synthetic oligonucleotide
gaaattggctacctgggccctgctaccggcaacagagactttcaaagactgc

SEQ ID NO: 391379 - DNA, 53 bp, Artificial
  Synthetic oligonucleotide
gaaattggcttgaactgttttaaatgacaaattgaattgatgttaattggcaa

SEQ ID NO: 391380 - DNA, 55 bp, Artificial
  Synthetic oligonucleotide
gaaattgggaactaatcactcagtgggagatttagtcacagtctttacgcttatg

SEQ ID NO: 391381 - DNA, 58 bp, Artificial
  Synthetic oligonucleotide
gaaattggtagaggagggatatccatgccgactttcgacattgtaagaaaaagtgata

SEQ ID NO: 391382 - DNA, 51 bp, Artificial
  Synthetic oligonucleotide
gaaattggtatatacttaagagatagaggatagctctgcgcagctataccc

SEQ ID NO: 391383 - DNA, 55 bp, Artificial
  Synthetic oligonucleotide
gaaattggttaagcaaaacgtcatgggagtggcaaccaagcctcatttcggtcac

SEQ ID NO: 391384 - DNA, 54 bp, Artificial
  Synthetic oligonucleotide
gaaattggttatgccagccagattttatcctaaggttaccaaatattttcctac

SEQ ID NO: 391385 - DNA, 51 bp, Artificial
  Synthetic oligonucleotide
gaaattgtaaaaaattaggaccaagggaaaacgtagcagttatacaggttg

SEQ ID NO: 391386 - DNA, 60 bp, Artificial
  Synthetic oligonucleotide
gaaattgtggctgatgttccacaaattgttagtgatgacgtcgaagagcaagtcgtagct

SEQ ID NO: 391387 - DNA, 60 bp, Artificial
  Synthetic oligonucleotide
gaaattgtgtttcgctgcattatgagaggtaacaatcctactattagagatatagagtta

SEQ ID NO: 391388 - DNA, 52 bp, Artificial
  Synthetic oligonucleotide
gaaatttagggcacacacgaactctcagttcttgcccgcacggtagtccgat

SEQ ID NO: 391389 - DNA, 59 bp, Artificial
  Synthetic oligonucleotide
gaaatttattacaagactctacagctggttatttgagaagtctggtcgtgattacatcc

SEQ ID NO: 391390 - DNA, 60 bp, Artificial
  Synthetic oligonucleotide
gaaatttccacagatatcgaccatggattgtctcagtgcgattgaagctggatgtgtcga

SEQ ID NO: 391391 - DNA, 56 bp, Artificial
  Synthetic oligonucleotide
gaaatttcctatatggtccccagtagttaaggctgctggtcatattgcgtttaaag

SEQ ID NO: 391392 - DNA, 59 bp, Artificial
  Synthetic oligonucleotide
gaaatttcgacgtagataaattctacaaactagcttctcaatctcccgttatatctgca

SEQ ID NO: 391393 - DNA, 58 bp, Artificial
  Synthetic oligonucleotide
gaaatttgagttcattgctgaggaattccaatggaacacagtcaaacaaaatgggaaa

SEQ ID NO: 391394 - DNA, 55 bp, Artificial
  Synthetic oligonucleotide
gaaatttgatagcaccatggtacgctttcgcactgaataaaggttctggctctgg

SEQ ID NO: 391395 - DNA, 59 bp, Artificial
  Synthetic oligonucleotide
gaaatttgtgaaggtcagagggcgttggcgcaccctgtgcaccctctgcacagaatctg

SEQ ID NO: 391396 - DNA, 60 bp, Artificial
  Synthetic oligonucleotide
gaaatttgttagatggtaatcctatgagtattgacagaaagcataaagcattgacattaa

SEQ ID NO: 391397 - DNA, 60 bp, Artificial
  Synthetic oligonucleotide
gaaatttgttgctacatatggattcaagcccgaagactattcatacgtgcgatatttgga

SEQ ID NO: 391398 - DNA, 52 bp, Artificial
  Synthetic oligonucleotide
gaaattttcaaagtctttcggcaataagggtggaaatttcaaagagggtcga

SEQ ID NO: 391399 - DNA, 53 bp, Artificial
  Synthetic oligonucleotide
gaaattttctacataagactatcaagctttaaaaagtgaattaatactactac

SEQ ID NO: 391400 - DNA, 58 bp, Artificial
  Synthetic oligonucleotide
gaaattttcttgcaaacgcaccacaagcaggcagcaagtcgcaaagggccaagtacgg

SEQ ID NO: 391401 - DNA, 60 bp, Artificial
  Synthetic oligonucleotide
gaacaaaacaaactgactgggtgggccagtatgacatatcagaaccctacaagctagaca

SEQ ID NO: 391402 - DNA, 59 bp, Artificial
  Synthetic oligonucleotide
gaacaaaagcctatgcaaagttgaaggatgggtagtggtagctaaggacaatgctataa

SEQ ID NO: 391403 - DNA, 60 bp, Artificial
  Synthetic oligonucleotide
gaacaaacaacactctaccagaattcgaacacttatgtgtctgtaggaacatcaacactg

SEQ ID NO: 391404 - DNA, 60 bp, Artificial
  Synthetic oligonucleotide
gaacaaacacaaaaggtgatgacctgatccctacatgcaattgcacacaagctacatatt

SEQ ID NO: 391405 - DNA, 60 bp, Artificial
  Synthetic oligonucleotide
gaacaaacacaaaaggtgatgattatattccaacatgtgattgtacagaagccacatatt

SEQ ID NO: 391406 - DNA, 59 bp, Artificial
  Synthetic oligonucleotide
gaacaaacacaaaatagtttccatatgcacatttgatgcgcaaggaaaaaaatcgtgag

SEQ ID NO: 391407 - DNA, 59 bp, Artificial
  Synthetic oligonucleotide
gaacaaacacagtgtagcggaaacatccataaccaacttctatgcccgtgctggattag

SEQ ID NO: 391408 - DNA, 54 bp, Artificial
  Synthetic oligonucleotide
gaacaaaccaacctatataagaacaaccccggaagagtgactgtctctacccaa

SEQ ID NO: 391409 - DNA, 55 bp, Artificial
  Synthetic oligonucleotide
gaacaaacgtccccagaatctgctcaaaagggaaaaggacagttgacctcggtca

SEQ ID NO: 391410 - DNA, 52 bp, Artificial
  Synthetic oligonucleotide
gaacaaacgttttaccggtttgtaaattggaattctcgaattcgccagtcgc

SEQ ID NO: 391411 - DNA, 55 bp, Artificial
  Synthetic oligonucleotide
gaacaaactattttgccgtttacaggaacagcaatggacctcccgacaccaatcc

SEQ ID NO: 391412 - DNA, 55 bp, Artificial
  Synthetic oligonucleotide
gaacaaactgagggagattttgaaggtcccatactgcagctacacaagattctgg

SEQ ID NO: 391413 - DNA, 54 bp, Artificial
  Synthetic oligonucleotide
gaacaaactgtgtatgaaaggaagaagatacaaggacctggggaactgccaccc

SEQ ID NO: 391414 - DNA, 60 bp, Artificial
  Synthetic oligonucleotide
gaacaaagaggagtcccctgagagaaatgcaagcattggaatgtacaagaagatactgga

SEQ ID NO: 391415 - DNA, 57 bp, Artificial
  Synthetic oligonucleotide
gaacaaagaggataaggagaaacataatctactctaagaggtgtaaatatctccctc

SEQ ID NO: 391416 - DNA, 55 bp, Artificial
  Synthetic oligonucleotide
gaacaaataatagtgacaagggagccgtatgtgtcatgtgatccattaggatgta

SEQ ID NO: 391417 - DNA, 55 bp, Artificial
  Synthetic oligonucleotide
gaacaaatacctggaagaacatcccagtgcggggaaggacccgaagaagactgga

SEQ ID NO: 391418 - DNA, 55 bp, Artificial
  Synthetic oligonucleotide
gaacaaatatgcgtattgttcgaaggaaggggactttccaatatgcgcctaaaac

SEQ ID NO: 391419 - DNA, 55 bp, Artificial
  Synthetic oligonucleotide
gaacaaatattgttctcacacaagcccgtaatagacttttctggcatcagggaca

SEQ ID NO: 391420 - DNA, 55 bp, Artificial
  Synthetic oligonucleotide
gaacaaatcagagacatggcctataggagagtcccccaaaggagtggaagagggc

SEQ ID NO: 391421 - DNA, 60 bp, Artificial
  Synthetic oligonucleotide
gaacaaatcaggaattgcagctgttgagatccagtctctagaggaactgtttactctaat

SEQ ID NO: 391422 - DNA, 54 bp, Artificial
  Synthetic oligonucleotide
gaacaaatcattgttaccagggaaccatatgtatcatgcgacccaacagaatgc

SEQ ID NO: 391423 - DNA, 55 bp, Artificial
  Synthetic oligonucleotide
gaacaaatccaagtcacacaatgggttcatatgagttaattcaagcagtgacgga

SEQ ID NO: 391424 - DNA, 60 bp, Artificial
  Synthetic oligonucleotide
gaacaaatgcatacagatataatcagtttatgggatcaaagcctaaagccatgtgtaaag

SEQ ID NO: 391425 - DNA, 55 bp, Artificial
  Synthetic oligonucleotide
gaacaaatgtattctatcatgccatgagcgatcgtctcctaactgtaggacaccc

SEQ ID NO: 391426 - DNA, 60 bp, Artificial
  Synthetic oligonucleotide
gaacaaattacagtagagaatacttcacagacgcaatggaggtttgttgatgtatctaaa

SEQ ID NO: 391427 - DNA, 53 bp, Artificial
  Synthetic oligonucleotide
gaacaaattcagtggacacacaggcagcaaaaccctataccagtaggaaatat

SEQ ID NO: 391428 - DNA, 55 bp, Artificial
  Synthetic oligonucleotide
gaacaaattcataaggctatgcatcctgaacttcaataccaccccttagccctgc

SEQ ID NO: 391429 - DNA, 60 bp, Artificial
  Synthetic oligonucleotide
gaacaaattgacactgagtgtgtccgtagcccgcaacctcatcagcactgctttcagata

SEQ ID NO: 391430 - DNA, 55 bp, Artificial
  Synthetic oligonucleotide
gaacaaatttctttgtatggactatccattttattctctaggtgaccgtcccgtc

SEQ ID NO: 391431 - DNA, 60 bp, Artificial
  Synthetic oligonucleotide
gaacaacaaattgggaatgtcattaactggacacgagactcaatgactgagatatggtcg

SEQ ID NO: 391432 - DNA, 57 bp, Artificial
  Synthetic oligonucleotide
gaacaacactaaacaacgggcattcaaatgacacagtacatgataggaccccttacc

SEQ ID NO: 391433 - DNA, 60 bp, Artificial
  Synthetic oligonucleotide
gaacaacacttatgatcacagcaaatacagagaagaagcaatgcaaaataggatacagat

SEQ ID NO: 391434 - DNA, 60 bp, Artificial
  Synthetic oligonucleotide
gaacaacagattcaccatttattcgatttacacgctcagtgttatttactgactcagtac

SEQ ID NO: 391435 - DNA, 60 bp, Artificial
  Synthetic oligonucleotide
gaacaacagcactggatccaattcccctgtcaccctgggtgattggggagcagggccaga

SEQ ID NO: 391436 - DNA, 55 bp, Artificial
  Synthetic oligonucleotide
gaacaacagttgtcatcacagaaaattgtgggacaagaggcccgtcactgaggac

SEQ ID NO: 391437 - DNA, 57 bp, Artificial
  Synthetic oligonucleotide
gaacaaccatgagctaacttctggaaagctagatttaggtgaaagaaccttgaatta

SEQ ID NO: 391438 - DNA, 56 bp, Artificial
  Synthetic oligonucleotide
gaacaaccccaactgtaccttccaggtactgcgcaagaattaccacccagtcatag

SEQ ID NO: 391439 - DNA, 52 bp, Artificial
  Synthetic oligonucleotide
gaacaacgattggttgattagtgccaatatgcagtccaacaagtacggtgag

SEQ ID NO: 391440 - DNA, 58 bp, Artificial
  Synthetic oligonucleotide
gaacaacgcagagactccccgcgccggaaacatcctttcgacacaactcggctcattg

SEQ ID NO: 391441 - DNA, 55 bp, Artificial
  Synthetic oligonucleotide
gaacaacgcttccaaatatgttacctccaatctttccgccgaatgatcgggacag

SEQ ID NO: 391442 - DNA, 55 bp, Artificial
  Synthetic oligonucleotide
gaacaacgtattactcaacctttcacagaagagagagaacgacgtctcctaccct

SEQ ID NO: 391443 - DNA, 60 bp, Artificial
  Synthetic oligonucleotide
gaacaacgttcagatctgcttactcgctgtcatagcagataaactagaagagctgataca

SEQ ID NO: 391444 - DNA, 53 bp, Artificial
  Synthetic oligonucleotide
gaacaactactgtattcgatggacgactccatgataagaacatatggatatac

SEQ ID NO: 391445 - DNA, 56 bp, Artificial
  Synthetic oligonucleotide
gaacaactatatgccagacatttctttgtcagagcaggcaccatgggagatgctct

SEQ ID NO: 391446 - DNA, 60 bp, Artificial
  Synthetic oligonucleotide
gaacaactgacgatgaagtatatatacaaagagcatttatgtcattgtctagtcaaaagt

SEQ ID NO: 391447 - DNA, 60 bp, Artificial
  Synthetic oligonucleotide
gaacaactgagacccgtgatgctgcactggaactatggggagaccgacccgcactgtgct

SEQ ID NO: 391448 - DNA, 55 bp, Artificial
  Synthetic oligonucleotide
gaacaactttcaataccacattcagcagttagcaagtggatgtcagtgcgtgaat

SEQ ID NO: 391449 - DNA, 60 bp, Artificial
  Synthetic oligonucleotide
gaacaagaataaggggacacaatgatcctgatgacacagctgtcatcaaggaactaactc

SEQ ID NO: 391450 - DNA, 55 bp, Artificial
  Synthetic oligonucleotide
gaacaagacctaccacataggaagagaaaggtgaccaagccaataaggccacatg

SEQ ID NO: 391451 - DNA, 55 bp, Artificial
  Synthetic oligonucleotide
gaacaagagctacagcacccctcgtagcaccacacctcggaaaggcatggggacg

SEQ ID NO: 391452 - DNA, 55 bp, Artificial
  Synthetic oligonucleotide
gaacaagagctacatcaagggaggttggttagccaaacctcgcaaaggcatgggg

SEQ ID NO: 391453 - DNA, 55 bp, Artificial
  Synthetic oligonucleotide
gaacaagagttattcccaattctaagcgcacacggcctgaccgtacactcacccg

SEQ ID NO: 391454 - DNA, 59 bp, Artificial
  Synthetic oligonucleotide
gaacaagatggctagattgggtaaaggatacatgtttgagagtaaaaacatgaagctta

SEQ ID NO: 391455 - DNA, 58 bp, Artificial
  Synthetic oligonucleotide
gaacaagatgtattgaataaacggatcttttcaactgacgagggacctgagtcatact

SEQ ID NO: 391456 - DNA, 55 bp, Artificial
  Synthetic oligonucleotide
gaacaagattttaagcaagctacacgtagtatcacaaagaatgtctacttcaccg

SEQ ID NO: 391457 - DNA, 58 bp, Artificial
  Synthetic oligonucleotide
gaacaagcaaatcaagaagcgcaagaagctttaaaatcatacattgatgctcaagatg

SEQ ID NO: 391458 - DNA, 59 bp, Artificial
  Synthetic oligonucleotide
gaacaagccaatggggatgtgaagagtttggatgcttagcaataaacgaaggatgtctt

SEQ ID NO: 391459 - DNA, 54 bp, Artificial
  Synthetic oligonucleotide
gaacaaggaaatagaacaaggtacggtagaaaagagcgagcctcccgatacgag

SEQ ID NO: 391460 - DNA, 53 bp, Artificial
  Synthetic oligonucleotide
gaacaaggacctcgcgaactacggcgcgtacaccgtggtgaacgacgccacgg

SEQ ID NO: 391461 - DNA, 50 bp, Artificial
  Synthetic oligonucleotide
gaacaaggacgcttaaagtgtagtgaaaatattcctttctaacccatgca

SEQ ID NO: 391462 - DNA, 55 bp, Artificial
  Synthetic oligonucleotide
gaacaaggatatatcctcatacctaggaggcacataagaagagttccagagccct

SEQ ID NO: 391463 - DNA, 55 bp, Artificial
  Synthetic oligonucleotide
gaacaaggctatgccgtaccatacgtcggacaaaacaaagacgatgttaagcaac

SEQ ID NO: 391464 - DNA, 59 bp, Artificial
  Synthetic oligonucleotide
gaacaagggatgtcaacaagttacacaaagtatagatatttgtgcttaatgcagaaagc

SEQ ID NO: 391465 - DNA, 51 bp, Artificial
  Synthetic oligonucleotide
gaacaaggtcatagacagtatcatgagaattgctaggtgtcctttcactct

SEQ ID NO: 391466 - DNA, 51 bp, Artificial
  Synthetic oligonucleotide
gaacaaggttatcccctgtgcttaccagttcgacggaagttttcccacccc

SEQ ID NO: 391467 - DNA, 57 bp, Artificial
  Synthetic oligonucleotide
gaacaagtacattgcgacacaagcaccgttgaaaaatacggtggatgattttttaca

SEQ ID NO: 391468 - DNA, 55 bp, Artificial
  Synthetic oligonucleotide
gaacaagtattctcagcatcacaggcattgcaaccaaaaggccaatataatggcc

SEQ ID NO: 391469 - DNA, 59 bp, Artificial
  Synthetic oligonucleotide
gaacaagtcccagcgctcactgctgtggaaacgggacacacatcacaagtggaacccag

SEQ ID NO: 391470 - DNA, 60 bp, Artificial
  Synthetic oligonucleotide
gaacaagtccggcctgatttcctcgcccaccccatcaattattgatcgtctcggtgatga

SEQ ID NO: 391471 - DNA, 59 bp, Artificial
  Synthetic oligonucleotide
gaacaagtggatcgtcagtcaagagagaagaagaagtgcttacgggcaaccttcaaaca

SEQ ID NO: 391472 - DNA, 55 bp, Artificial
  Synthetic oligonucleotide
gaacaagttcgagaggtatcaggatatgaatatcaaggtgtatgagtcttccaat

SEQ ID NO: 391473 - DNA, 55 bp, Artificial
  Synthetic oligonucleotide
gaacaataaagaggacctaccataacactaatgtagaagaccttttaatattatg

SEQ ID NO: 391474 - DNA, 57 bp, Artificial
  Synthetic oligonucleotide
gaacaatacagaaccattgtgtgatgtcaagggttttgcacccttttccaaagacaa

SEQ ID NO: 391475 - DNA, 57 bp, Artificial
  Synthetic oligonucleotide
gaacaatagaatttgaatcaccctcagggggggatctagaagttacaacacatagct

SEQ ID NO: 391476 - DNA, 59 bp, Artificial
  Synthetic oligonucleotide
gaacaatagcctgttacaccctatatgccaacatggaatggatgatcctgagagagaag

SEQ ID NO: 391477 - DNA, 60 bp, Artificial
  Synthetic oligonucleotide
gaacaatcagagttctattttcctagagctccattaaattccaatgctatgttgtccact

SEQ ID NO: 391478 - DNA, 59 bp, Artificial
  Synthetic oligonucleotide
gaacaatccatattcagttgggtaatgtatggatacgccagggatctttttcctcagta

SEQ ID NO: 391479 - DNA, 60 bp, Artificial
  Synthetic oligonucleotide
gaacaatggaatataatgagctggcagagtagggtccatgtcccgagttagtgcgccacg

SEQ ID NO: 391480 - DNA, 59 bp, Artificial
  Synthetic oligonucleotide
gaacaatggactttatcatttatagattcttattggttatagtcgtacttgcaccgctc

SEQ ID NO: 391481 - DNA, 60 bp, Artificial
  Synthetic oligonucleotide
gaacaatggatgctgagaccccgcaggaacgctcagcagtctttgtgaatgaggatgagt

SEQ ID NO: 391482 - DNA, 55 bp, Artificial
  Synthetic oligonucleotide
gaacaatggggaagaagcaactgctggcctcactcatctgatgatctggcactcc

SEQ ID NO: 391483 - DNA, 60 bp, Artificial
  Synthetic oligonucleotide
gaacaatgtgctcgtatagctgatgttaaccgacagcaaggtatacagacctcctatgaa

SEQ ID NO: 391484 - DNA, 59 bp, Artificial
  Synthetic oligonucleotide
gaacaatgttccgattgaaccattgaggttgcagtcgaaggagaatcgtggtgtgttac

SEQ ID NO: 391485 - DNA, 60 bp, Artificial
  Synthetic oligonucleotide
gaacaattcaatctgtactatgattgaattgtctctggtgattttcacgtcgatggtaaa

SEQ ID NO: 391486 - DNA, 58 bp, Artificial
  Synthetic oligonucleotide
gaacacaaaggtcaagatggtacggagtcagacaccagggagcttaagagagtcaaac

SEQ ID NO: 391487 - DNA, 50 bp, Artificial
  Synthetic oligonucleotide
gaacacaaccataagtgagaattctccatgcatacgcgcagacaactgct

SEQ ID NO: 391488 - DNA, 60 bp, Artificial
  Synthetic oligonucleotide
gaacacaagagtctgaatgtacctgtgtaaatggttcatgttttaccataatgaccgatg

SEQ ID NO: 391489 - DNA, 60 bp, Artificial
  Synthetic oligonucleotide
gaacacaatcaatgggaatacaactggaccagagaatcattgttctcttcatggttgctt

SEQ ID NO: 391490 - DNA, 58 bp, Artificial
  Synthetic oligonucleotide
gaacacacaaaccgagctggcaatctcagtcatccacggagcaggcggttcaggcaaa

SEQ ID NO: 391491 - DNA, 59 bp, Artificial
  Synthetic oligonucleotide
gaacacacaattcgaagctgtcgaccacgaattttcaaatctggaaagaaggattgaca

SEQ ID NO: 391492 - DNA, 60 bp, Artificial
  Synthetic oligonucleotide
gaacacacagaagattacgtgtgcaagagaggtttcagtgataggggatggggtaatggc

SEQ ID NO: 391493 - DNA, 54 bp, Artificial
  Synthetic oligonucleotide
gaacacacatgctactcaggattggatgtcacagaatgtggcgaagttgccgca

SEQ ID NO: 391494 - DNA, 53 bp, Artificial
  Synthetic oligonucleotide
gaacacaccctatggaataacagtcttgaatcacatgggtagtatggctttca

SEQ ID NO: 391495 - DNA, 57 bp, Artificial
  Synthetic oligonucleotide
gaacacactagctgacagaatactcaaatgggttagctcattcctatactttggcac

SEQ ID NO: 391496 - DNA, 55 bp, Artificial
  Synthetic oligonucleotide
gaacacagaacataaggcttacttggacaaaactggtgcttatcctgtggagtgt

SEQ ID NO: 391497 - DNA, 60 bp, Artificial
  Synthetic oligonucleotide
gaacacagagaggcatacagttgaggatgttaacacccgagttcactcactctcgggtgc

SEQ ID NO: 391498 - DNA, 60 bp, Artificial
  Synthetic oligonucleotide
gaacacagagatgtcactaagaggagtgagggtcagtaagatgggggtggatgaatattc

SEQ ID NO: 391499 - DNA, 50 bp, Artificial
  Synthetic oligonucleotide
gaacacagtaactgtgacagtgcacctgtcctacacctaaaaggtcaatc

SEQ ID NO: 391500 - DNA, 52 bp, Artificial
  Synthetic oligonucleotide
gaacacatccacctactcgttacctcccgacccatcccactttgacggatac

SEQ ID NO: 391501 - DNA, 55 bp, Artificial
  Synthetic oligonucleotide
gaacacatgaatccagagaaacttggagacatcgtggtgtactcgaacagagctg

SEQ ID NO: 391502 - DNA, 58 bp, Artificial
  Synthetic oligonucleotide
gaacacattgatgatcgacatcgaaggaacgacgacgttttctaataggcgttacaat

SEQ ID NO: 391503 - DNA, 60 bp, Artificial
  Synthetic oligonucleotide
gaacacattgcaagcatgagaaggaattatttcacagcggaagtgtctcattgcagggca

SEQ ID NO: 391504 - DNA, 54 bp, Artificial
  Synthetic oligonucleotide
gaacaccaaatgctcggtttaccccactcaataaccttaggttctctatacaat

SEQ ID NO: 391505 - DNA, 55 bp, Artificial
  Synthetic oligonucleotide
gaacaccacatgggaggaccactgtgtgttctcgaggccatcacccatgggcttt

SEQ ID NO: 391506 - DNA, 51 bp, Artificial
  Synthetic oligonucleotide
gaacaccacatgggctcaacattgcacatacagtcctctaccctccatcag

SEQ ID NO: 391507 - DNA, 58 bp, Artificial
  Synthetic oligonucleotide
gaacacccaccgagacggtactgcaagaatatacacagagtccggagatcaaagttcc

SEQ ID NO: 391508 - DNA, 50 bp, Artificial
  Synthetic oligonucleotide
gaacacccatagagccatacgtacctgataacgacaagctaaccagggta

SEQ ID NO: 391509 - DNA, 51 bp, Artificial
  Synthetic oligonucleotide
gaacacccgcagcctaggtcaatcctccgcctgcgaaggttcttcttcttg

SEQ ID NO: 391510 - DNA, 54 bp, Artificial
  Synthetic oligonucleotide
gaacacccgcgtgacaggggggacacaggcctataccaccagtaggcttacgtc

SEQ ID NO: 391511 - DNA, 50 bp, Artificial
  Synthetic oligonucleotide
gaacacccggccgcaaccctgggagacgtcccggggactccaggggccgt

SEQ ID NO: 391512 - DNA, 58 bp, Artificial
  Synthetic oligonucleotide
gaacacccgtgtgtgcggtttgcggccgtgactggagcgtagcgacacattactttcg

SEQ ID NO: 391513 - DNA, 60 bp, Artificial
  Synthetic oligonucleotide
gaacaccctgactggacagctgctgtttgagtgcaagctctacagcgagggttacatcgc

SEQ ID NO: 391514 - DNA, 56 bp, Artificial
  Synthetic oligonucleotide
gaacaccggggggtgatccaccaggagatgaagcggagaacccacctccagaggac

SEQ ID NO: 391515 - DNA, 55 bp, Artificial
  Synthetic oligonucleotide
gaacaccgttcacctggaacacccggatgctaggggttcttagtactatgtcaag

SEQ ID NO: 391516 - DNA, 54 bp, Artificial
  Synthetic oligonucleotide
gaacacctatgcaacagggggggcgcaggggcgtgagacctacaggcttacgtc

SEQ ID NO: 391517 - DNA, 58 bp, Artificial
  Synthetic oligonucleotide
gaacacctgattttcctgagtatcgaggacagcatccacctattttttcggtgaacac

SEQ ID NO: 391518 - DNA, 60 bp, Artificial
  Synthetic oligonucleotide
gaacaccttacacaacatgtttcggacgctcactgatggcatcgtaccagtcattgattg

SEQ ID NO: 391519 - DNA, 59 bp, Artificial
  Synthetic oligonucleotide
gaacaccttcatatcgtacgtcagaatgggttgctgcacgaaagtgatgaaccacgagc

SEQ ID NO: 391520 - DNA, 56 bp, Artificial
  Synthetic oligonucleotide
gaacaccttgtctctccctcgtccgctgtttcgacagccaccgtttcctggacttc

SEQ ID NO: 391521 - DNA, 55 bp, Artificial
  Synthetic oligonucleotide
gaacacgaaattcaatcagaaattatgttggcattgtcgcgagctgactgcacga

SEQ ID NO: 391522 - DNA, 58 bp, Artificial
  Synthetic oligonucleotide
gaacacgacctatatacagtacgggcaaaatgacccgtctgtatgggcgtccatgcgt

SEQ ID NO: 391523 - DNA, 55 bp, Artificial
  Synthetic oligonucleotide
gaacacgaggacaaggttgtagagagtccctacgaagggagtagtccacctactg

SEQ ID NO: 391524 - DNA, 55 bp, Artificial
  Synthetic oligonucleotide
gaacacgagggtgtccacagtgaggcctagcttgcccataagcagtgtacatccc

SEQ ID NO: 391525 - DNA, 55 bp, Artificial
  Synthetic oligonucleotide
gaacacgcagccgacaggaagaacatgagggtctcgacacaaggttcgttcatga

SEQ ID NO: 391526 - DNA, 60 bp, Artificial
  Synthetic oligonucleotide
gaacacgcatactgctcatacattgccaaagttctcggttctgaacacactcttccagcc

SEQ ID NO: 391527 - DNA, 58 bp, Artificial
  Synthetic oligonucleotide
gaacacgccgacgaaagagagagcacgccgtgaccacactcaccgcttccgaccggga

SEQ ID NO: 391528 - DNA, 60 bp, Artificial
  Synthetic oligonucleotide
gaacacgctagatggcgttggcacaacccaattaacagttgcctggagacagcataatag

SEQ ID NO: 391529 - DNA, 55 bp, Artificial
  Synthetic oligonucleotide
gaacacgctgggctcgtaatggaagctagaagcgcattagctgagatatatggcg

SEQ ID NO: 391530 - DNA, 59 bp, Artificial
  Synthetic oligonucleotide
gaacacggacgtgtcttcatttgtgcaataccctgttcgtggaatcaacggtgatggac

SEQ ID NO: 391531 - DNA, 58 bp, Artificial
  Synthetic oligonucleotide
gaacacggagaggcatacgaccgaggacgttaatcggaacatgcataacttactgggc

SEQ ID NO: 391532 - DNA, 55 bp, Artificial
  Synthetic oligonucleotide
gaacacgggatatacaatggcatatttggcgacactgaattggccactgctctcg

SEQ ID NO: 391533 - DNA, 50 bp, Artificial
  Synthetic oligonucleotide
gaacacgtccgatagactggagattacgaacacgagacttactcggggaa

SEQ ID NO: 391534 - DNA, 60 bp, Artificial
  Synthetic oligonucleotide
gaacactaagggaacatcttcctttggaacctatgaatctgattctatcacagaatcaga

SEQ ID NO: 391535 - DNA, 55 bp, Artificial
  Synthetic oligonucleotide
gaacactagccgagcatacgtaagttgcaagcgtcggaagtctagtcttacacat

SEQ ID NO: 391536 - DNA, 59 bp, Artificial
  Synthetic oligonucleotide
gaacactagtcagagagggatacttgaggacgagcaaatgtaccaaaaatgctgtaacc

SEQ ID NO: 391537 - DNA, 56 bp, Artificial
  Synthetic oligonucleotide
gaacactagttggagtaataaatcttatgaggaaatttgggataacatgacctggc

SEQ ID NO: 391538 - DNA, 60 bp, Artificial
  Synthetic oligonucleotide
gaacactattaaatcgtatcttgtagacatcagtcgatgtcttgaagcagaaatcctgag

SEQ ID NO: 391539 - DNA, 52 bp, Artificial
  Synthetic oligonucleotide
gaacactcaagaacatgtaagatcactgtgcgaattggcttggcacaacggt

SEQ ID NO: 391540 - DNA, 59 bp, Artificial
  Synthetic oligonucleotide
gaacactccgtctttttcgatatatgatttggcgtcggaggaggagcgcgcagtttcaa

SEQ ID NO: 391541 - DNA, 60 bp, Artificial
  Synthetic oligonucleotide
gaacactcgaattctaatactcacccttacggcagtcatccacacaaatgcagacaaaat

SEQ ID NO: 391542 - DNA, 55 bp, Artificial
  Synthetic oligonucleotide
gaacactctgtctcaattattcctgactaaagggtggccaactggatcagtctac

SEQ ID NO: 391543 - DNA, 60 bp, Artificial
  Synthetic oligonucleotide
gaacactcttcaattccttgtgagaagtaagacacatctcaattttgagaggtctctgaa

SEQ ID NO: 391544 - DNA, 58 bp, Artificial
  Synthetic oligonucleotide
gaacactgaaagactatttcgggctcagttcagggcaacagtggaaggacactgactt

SEQ ID NO: 391545 - DNA, 60 bp, Artificial
  Synthetic oligonucleotide
gaacactgctgtcagttacgcctgctggcaagaagaggagtctccgactacgaagcgtcg

SEQ ID NO: 391546 - DNA, 59 bp, Artificial
  Synthetic oligonucleotide
gaacactggaggaaatgccattcgatatagagaaattcgcggacttagttaccaactca

SEQ ID NO: 391547 - DNA, 54 bp, Artificial
  Synthetic oligonucleotide
gaacactgggatgctgctaagacatgtgctgacagaccattaaataaaggtgac

SEQ ID NO: 391548 - DNA, 55 bp, Artificial
  Synthetic oligonucleotide
gaacactgtggaaatagaggaccatctcttagaaccacaacagtcacaggaaaga

SEQ ID NO: 391549 - DNA, 60 bp, Artificial
  Synthetic oligonucleotide
gaacacttaagcaataatggctggtgctctttttggtgcaattggaggtggcctgatggg

SEQ ID NO: 391550 - DNA, 55 bp, Artificial
  Synthetic oligonucleotide
gaacacttccctaataaaaccataacatttgcaccatcatcaggaggggatctag

SEQ ID NO: 391551 - DNA, 55 bp, Artificial
  Synthetic oligonucleotide
gaacacttccctgagagaaacataagctttcaaccatcctcaggaggggatctag

SEQ ID NO: 391552 - DNA, 55 bp, Artificial
  Synthetic oligonucleotide
gaacacttccgctggaccgagttatcaagggaagaaacgcgacctctgtgcccac

SEQ ID NO: 391553 - DNA, 55 bp, Artificial
  Synthetic oligonucleotide
gaacacttcggagagatcagaagggaagctatactcgctgacgcaatatgctcgc

SEQ ID NO: 391554 - DNA, 56 bp, Artificial
  Synthetic oligonucleotide
gaacacttggggtatttcgatataaaagtagatgttatgtgggtttggtatggtgc

SEQ ID NO: 391555 - DNA, 58 bp, Artificial
  Synthetic oligonucleotide
gaacactttaaagagaagaggatgaagtatctagagaatgacattctagattcacagc

SEQ ID NO: 391556 - DNA, 57 bp, Artificial
  Synthetic oligonucleotide
gaacagaagagcttaaatcactctataatacaatagcagtcctctattgcgtacatc

SEQ ID NO: 391557 - DNA, 58 bp, Artificial
  Synthetic oligonucleotide
gaacagaagtccgagcattaaaataatagcgtgactgaacccattaacatcaaactta

SEQ ID NO: 391558 - DNA, 60 bp, Artificial
  Synthetic oligonucleotide
gaacagaatggtactagccagtactacggccaaagccatggagcaaatggcagggtcaag

SEQ ID NO: 391559 - DNA, 58 bp, Artificial
  Synthetic oligonucleotide
gaacagacccactcaaaggcagggctactggtttcagatggagggccaaacttataca

SEQ ID NO: 391560 - DNA, 51 bp, Artificial
  Synthetic oligonucleotide
gaacagacctggagcgcagtagcgtcgtttgttgaaacttggcaggttaaa

SEQ ID NO: 391561 - DNA, 55 bp, Artificial
  Synthetic oligonucleotide
gaacagactatacagctgcaggatctagtaccagatctacaaagcgtaggagagt

SEQ ID NO: 391562 - DNA, 51 bp, Artificial
  Synthetic oligonucleotide
gaacagacttgtatattggagatggcgttttcaagactacacttttaggag

SEQ ID NO: 391563 - DNA, 56 bp, Artificial
  Synthetic oligonucleotide
gaacagagaaattctgaaagaaccagtgcatggagtatattatgatccatcaaaag

SEQ ID NO: 391564 - DNA, 60 bp, Artificial
  Synthetic oligonucleotide
gaacagagagatgatgttaagcacactggtagggtccgatgtgtcagtgaggttactcgt

SEQ ID NO: 391565 - DNA, 60 bp, Artificial
  Synthetic oligonucleotide
gaacagaggcacgacatatcccatgttggtaaagtattatgtgtcagtgatgtcactcgt

SEQ ID NO: 391566 - DNA, 55 bp, Artificial
  Synthetic oligonucleotide
gaacagagtgcaccgtcacaaagtgatcaagagcagctcttttccaacgtgcagt

SEQ ID NO: 391567 - DNA, 57 bp, Artificial
  Synthetic oligonucleotide
gaacagataaaactctaccaaaactcgaacacttacgtgtcagtgggaacatcaaca

SEQ ID NO: 391568 - DNA, 60 bp, Artificial
  Synthetic oligonucleotide
gaacagatagaagtatcccatccgctgtaatctggggttgcccaaatgatgatcctgcaa

SEQ ID NO: 391569 - DNA, 60 bp, Artificial
  Synthetic oligonucleotide
gaacagatagcgagttcttcagactctgtaaggaatatttccacgcaaacgtcagctatt

SEQ ID NO: 391570 - DNA, 60 bp, Artificial
  Synthetic oligonucleotide
gaacagataggattatagaattaatacaagggctttgtagagctatcctcaacataccta

SEQ ID NO: 391571 - DNA, 58 bp, Artificial
  Synthetic oligonucleotide
gaacagatcaacattggataactaaaaccaacataactgactatctactacctggatg

SEQ ID NO: 391572 - DNA, 55 bp, Artificial
  Synthetic oligonucleotide
gaacagatcacatttgggcagtcaagaatgtttattcctcatgtaacgttgagtt

SEQ ID NO: 391573 - DNA, 60 bp, Artificial
  Synthetic oligonucleotide
gaacagatcgaacgagcttcagataaaattgctcaaggagtaataattgcttatagagat

SEQ ID NO: 391574 - DNA, 60 bp, Artificial
  Synthetic oligonucleotide
gaacagatcgcaaccagctcatgataacttgatgggtacgatgtggctaaatgcaggatc

SEQ ID NO: 391575 - DNA, 60 bp, Artificial
  Synthetic oligonucleotide
gaacagatctcaaccggcgcatgataacttgatgggtacgatgtggctgaacgcgggatc

SEQ ID NO: 391576 - DNA, 60 bp, Artificial
  Synthetic oligonucleotide
gaacagatggagactgatggggaacgccagaatgcaactgagatcagggcatccgtcggg

SEQ ID NO: 391577 - DNA, 60 bp, Artificial
  Synthetic oligonucleotide
gaacagattatacgatcacttttcaacggcgctgtatcttgtggcatgctctatgtatca

SEQ ID NO: 391578 - DNA, 55 bp, Artificial
  Synthetic oligonucleotide
gaacagattgctgactcccagcacaggtctcataggcaaatggtggcaacaacca

SEQ ID NO: 391579 - DNA, 55 bp, Artificial
  Synthetic oligonucleotide
gaacagattgtcgaagagagatatggagcatcagctagattggacaatgcagtgg

SEQ ID NO: 391580 - DNA, 57 bp, Artificial
  Synthetic oligonucleotide
gaacagccgcacggtagatcaacacgacgacgtctggtccccttcttggctaacctg

SEQ ID NO: 391581 - DNA, 60 bp, Artificial
  Synthetic oligonucleotide
gaacagccggggtggaatctgcagtattgaggggattcctaattctaggcagagaggaca

SEQ ID NO: 391582 - DNA, 53 bp, Artificial
  Synthetic oligonucleotide
gaacagccggtagtggtaaataacgtacaccctttggagaaggagtattccat

SEQ ID NO: 391583 - DNA, 53 bp, Artificial
  Synthetic oligonucleotide
gaacagcgaaaggatggaggctcatctacgagtgatcaggaacgaaactcaaa

SEQ ID NO: 391584 - DNA, 60 bp, Artificial
  Synthetic oligonucleotide
gaacagcgtcatgatatagcccatgtaggtaaggtcatttgtgtctctgatgtaacacgt

SEQ ID NO: 391585 - DNA, 60 bp, Artificial
  Synthetic oligonucleotide
gaacagcgtgatgatatcaagcatacgggtattgtccgatgtgtgtccgatgttactaag

SEQ ID NO: 391586 - DNA, 57 bp, Artificial
  Synthetic oligonucleotide
gaacagctaatactaagagaaggaactattacccattatataccaagaatcacggta

SEQ ID NO: 391587 - DNA, 60 bp, Artificial
  Synthetic oligonucleotide
gaacagctacagtccaagggcccagtttagacttcgctttgtctctcttgagacgcaata

SEQ ID NO: 391588 - DNA, 60 bp, Artificial
  Synthetic oligonucleotide
gaacagctagacaaaattgccagactcactctcataagcccctatacaaagcctcaacta

SEQ ID NO: 391589 - DNA, 53 bp, Artificial
  Synthetic oligonucleotide
gaacagctgcactaaggaagaattctttgtctacaggcgcgccggcattttgg

SEQ ID NO: 391590 - DNA, 55 bp, Artificial
  Synthetic oligonucleotide
gaacagctttccgaggtcttatatccactcaattgggcactccaccgacggtaag

SEQ ID NO: 391591 - DNA, 60 bp, Artificial
  Synthetic oligonucleotide
gaacaggaaaatgtcacaatgtgagcacagttcattgcacacatggtattatgccagcag

SEQ ID NO: 391592 - DNA, 56 bp, Artificial
  Synthetic oligonucleotide
gaacaggaagttagagatcttgtacatagtcatgggtttgataatcccatgtttga

SEQ ID NO: 391593 - DNA, 55 bp, Artificial
  Synthetic oligonucleotide
gaacaggacacaagctccttagacgtccaaataacatattggacattgattagac

SEQ ID NO: 391594 - DNA, 52 bp, Artificial
  Synthetic oligonucleotide
gaacaggacagaaccccaaaagtattagccggtaactcctccctttgcccca

SEQ ID NO: 391595 - DNA, 57 bp, Artificial
  Synthetic oligonucleotide
gaacaggacagtaaatgtataaaggaccatattaactattggaactgtatacgactg

SEQ ID NO: 391596 - DNA, 55 bp, Artificial
  Synthetic oligonucleotide
gaacaggaccatgcacaaatgtcagcacagtacaatgtactcatggaattagacc

SEQ ID NO: 391597 - DNA, 52 bp, Artificial
  Synthetic oligonucleotide
gaacaggagatagaaaggcttatacaatccatggtgatacaagaaactggta

SEQ ID NO: 391598 - DNA, 58 bp, Artificial
  Synthetic oligonucleotide
gaacaggagcttactgttacacagtttaatgcacctaatcttggcggaggtactcagg

SEQ ID NO: 391599 - DNA, 55 bp, Artificial
  Synthetic oligonucleotide
gaacaggatcaaacaacttaacctcttatcccatgcttacagaaaacataccgcc

SEQ ID NO: 391600 - DNA, 60 bp, Artificial
  Synthetic oligonucleotide
gaacaggatctacatgcatcccgctgtgctgacagccggaagaatcagtgaaatgggtgt

SEQ ID NO: 391601 - DNA, 59 bp, Artificial
  Synthetic oligonucleotide
gaacaggatggtactggctagtactacggctaaagccatggaacaggtggcagggtcga

SEQ ID NO: 391602 - DNA, 60 bp, Artificial
  Synthetic oligonucleotide
gaacaggcagcggaggccatggaggttgccagtcaggctaggcagatggtgcatgcgatg

SEQ ID NO: 391603 - DNA, 55 bp, Artificial
  Synthetic oligonucleotide
gaacaggccagactaataaagcaagctgaaaacgattctcagactctggggccta

SEQ ID NO: 391604 - DNA, 53 bp, Artificial
  Synthetic oligonucleotide
gaacaggcgttggttaagaaatttgtcagggttaacaattatgttgtttacaa

SEQ ID NO: 391605 - DNA, 55 bp, Artificial
  Synthetic oligonucleotide
gaacaggctaacgcccaacacgtttctcattattctggccgtagtggtaatcgtg

SEQ ID NO: 391606 - DNA, 55 bp, Artificial
  Synthetic oligonucleotide
gaacagggaagttaactcgtgcacaacgaagggctgcggcccgtaagaacaagcg

SEQ ID NO: 391607 - DNA, 55 bp, Artificial
  Synthetic oligonucleotide
gaacagggagaaattcagtggatgagaccaagcaaagatgcaggctaccccatga

SEQ ID NO: 391608 - DNA, 55 bp, Artificial
  Synthetic oligonucleotide
gaacagggatcaggaaaaccttttacacgacgaccaagcgggcgtcaattgcgcg

SEQ ID NO: 391609 - DNA, 55 bp, Artificial
  Synthetic oligonucleotide
gaacagggcccaagattgacgaggatcgttacgtgaagggtgccagaggtgctct

SEQ ID NO: 391610 - DNA, 55 bp, Artificial
  Synthetic oligonucleotide
gaacagggcggtggggccatgcgtggcttctggaatgcgctcgtcatctggggct

SEQ ID NO: 391611 - DNA, 60 bp, Artificial
  Synthetic oligonucleotide
gaacagggcttgctttacatgccgcaggagcttactacatcggacagtgtgctaacattt

SEQ ID NO: 391612 - DNA, 56 bp, Artificial
  Synthetic oligonucleotide
gaacaggggcccattcctacggcacccagagaaaattcgcttatgtttctctcaac

SEQ ID NO: 391613 - DNA, 59 bp, Artificial
  Synthetic oligonucleotide
gaacaggtatcttatatctgatggtgttctttatgagattcatggtggaaccccctccg

SEQ ID NO: 391614 - DNA, 60 bp, Artificial
  Synthetic oligonucleotide
gaacagtaaatgtgacaatggatgacattagcgaaagctttgtgatacttgaacgtgagt

SEQ ID NO: 391615 - DNA, 55 bp, Artificial
  Synthetic oligonucleotide
gaacagtacactgcaagggcaatgtaatagaagtaattggacaggatgccactgc

SEQ ID NO: 391616 - DNA, 60 bp, Artificial
  Synthetic oligonucleotide
gaacagtacaggctggttatggcagattttttagagtccactgcagacaaagaagaatta

SEQ ID NO: 391617 - DNA, 58 bp, Artificial
  Synthetic oligonucleotide
gaacagtacattgcatacaatactagaagacccaggaatggcgtattttccttatatt

SEQ ID NO: 391618 - DNA, 55 bp, Artificial
  Synthetic oligonucleotide
gaacagtactcagagtcgtggcacgaagacaaagaacatccctaccggacatggc

SEQ ID NO: 391619 - DNA, 58 bp, Artificial
  Synthetic oligonucleotide
gaacagtagcggacgcttcaacgcaaatatctagcgttagcagaagtttgcggttacg

SEQ ID NO: 391620 - DNA, 55 bp, Artificial
  Synthetic oligonucleotide
gaacagtagctggctttgctgaaaggcaattcgagttgcggcaaactgggccggc

SEQ ID NO: 391621 - DNA, 56 bp, Artificial
  Synthetic oligonucleotide
gaacagtatacttcataccttacaactttaattgcaggctcaacaaggtacacaac

SEQ ID NO: 391622 - DNA, 55 bp, Artificial
  Synthetic oligonucleotide
gaacagtatgagcaacctctacccaccataatcgatcaaggcttgtgtgacgtgc

SEQ ID NO: 391623 - DNA, 58 bp, Artificial
  Synthetic oligonucleotide
gaacagtattaacttgtatgtaactacgcacaccaatagttacaatgagtacgttcgc

SEQ ID NO: 391624 - DNA, 59 bp, Artificial
  Synthetic oligonucleotide
gaacagtcacgatctgttttcgatcactaaatctttgttagctcccaccggaaccatca

SEQ ID NO: 391625 - DNA, 59 bp, Artificial
  Synthetic oligonucleotide
gaacagtcggtcaatgccccaaatatgtaaagaagaggagtctactacttgcaacagga

SEQ ID NO: 391626 - DNA, 57 bp, Artificial
  Synthetic oligonucleotide
gaacagtctggactccctgttggggggaatgagaagaaggctaaattggcaaatgtc

SEQ ID NO: 391627 - DNA, 60 bp, Artificial
  Synthetic oligonucleotide
gaacagtgccacattatcgacttgggggaaagtttgtagaattcacgagagagaatgcag

SEQ ID NO: 391628 - DNA, 50 bp, Artificial
  Synthetic oligonucleotide
gaacagttctggcataagcatatgtggaacttcataagcggcatacaata

SEQ ID NO: 391629 - DNA, 55 bp, Artificial
  Synthetic oligonucleotide
gaacagttcttgaattactgtttagacttcctctatgatgctatcccaacatcct

SEQ ID NO: 391630 - DNA, 51 bp, Artificial
  Synthetic oligonucleotide
gaacagttgtcaagaaattcagaggcaacaacagcggacaaccatccacag

SEQ ID NO: 391631 - DNA, 59 bp, Artificial
  Synthetic oligonucleotide
gaacataaaatagtacgtaatggtataccgcatcctacatttgctggtgcgtatagtct

SEQ ID NO: 391632 - DNA, 55 bp, Artificial
  Synthetic oligonucleotide
gaacataacaattctatagccaatgagtctgagaggaaagcatgggaagatggcg

SEQ ID NO: 391633 - DNA, 60 bp, Artificial
  Synthetic oligonucleotide
gaacataattgctgagcttgaaatctcacggaaggaaaacaatgtgcagcaaactactca

SEQ ID NO: 391634 - DNA, 55 bp, Artificial
  Synthetic oligonucleotide
gaacataccatggacatccggcgtacagtttaggtacacagatcctgacacatac

SEQ ID NO: 391635 - DNA, 55 bp, Artificial
  Synthetic oligonucleotide
gaacatacgttcctgaatcatttggtacaggggatgtcattgtgtatgcaggcgg

SEQ ID NO: 391636 - DNA, 60 bp, Artificial
  Synthetic oligonucleotide
gaacatactcaaggcctgccgcgtatatgagctcctctcgcttgctgcagacggcatagg

SEQ ID NO: 391637 - DNA, 60 bp, Artificial
  Synthetic oligonucleotide
gaacatagagtgggaccagcgccgtttatctatagaaatgtacattaacacacgcagttc

SEQ ID NO: 391638 - DNA, 60 bp, Artificial
  Synthetic oligonucleotide
gaacatagcagattactataacatgaagtcaaaggcgtttgtatataaagaccatggaac

SEQ ID NO: 391639 - DNA, 60 bp, Artificial
  Synthetic oligonucleotide
gaacatagcttatgcttctgtcacagataggtcgatggcgcacaagtatgttgaccctgg

SEQ ID NO: 391640 - DNA, 58 bp, Artificial
  Synthetic oligonucleotide
gaacataggaacagggtagaaaagcttagagagcacttatatcagtggggattcacta

SEQ ID NO: 391641 - DNA, 60 bp, Artificial
  Synthetic oligonucleotide
gaacatagtaacagactcacaatatgcattaggaatcattcaagcacagccagataagag

SEQ ID NO: 391642 - DNA, 60 bp, Artificial
  Synthetic oligonucleotide
gaacatagtcccacagtaagttgtcacatcctgttagtcccaggtcagaagagtccacag

SEQ ID NO: 391643 - DNA, 60 bp, Artificial
  Synthetic oligonucleotide
gaacatagtcgactgcaataagttcatcaagggtctccgtgtatccacggaatggatgaa

SEQ ID NO: 391644 - DNA, 55 bp, Artificial
  Synthetic oligonucleotide
gaacatagttggtattgcagaccaagaggtgattcaccaaagtttggatgacatt

SEQ ID NO: 391645 - DNA, 60 bp, Artificial
  Synthetic oligonucleotide
gaacatatatcaaggtcaccacagtaattaatttaattggtagtatgagcacgctaaggc

SEQ ID NO: 391646 - DNA, 60 bp, Artificial
  Synthetic oligonucleotide
gaacatatgcactatatcatatctcaattacggaacatatcagcacacaattgcccatta

SEQ ID NO: 391647 - DNA, 60 bp, Artificial
  Synthetic oligonucleotide
gaacatatgcgcagcttggtgaccattcattctggactctgctagaattggactgtggtg

SEQ ID NO: 391648 - DNA, 50 bp, Artificial
  Synthetic oligonucleotide
gaacatattagggtttgcatacaggagagagagaatggcatttaggtcat

SEQ ID NO: 391649 - DNA, 54 bp, Artificial
  Synthetic oligonucleotide
gaacatcaaccagttggttttacagtgaccgttagggtttacatgaagcctaaa

SEQ ID NO: 391650 - DNA, 55 bp, Artificial
  Synthetic oligonucleotide
gaacatcaattttatgcctacataagctttcgcaattttagaaaaaactccttgt

SEQ ID NO: 391651 - DNA, 55 bp, Artificial
  Synthetic oligonucleotide
gaacatcacttaaacagtgcacgagacagatcctagaggttacaatactgggtct

SEQ ID NO: 391652 - DNA, 60 bp, Artificial
  Synthetic oligonucleotide
gaacatcagcaactgaggtgcataactgtaaatggtgctcaatcaataacggttatattg

SEQ ID NO: 391653 - DNA, 55 bp, Artificial
  Synthetic oligonucleotide
gaacatcataccctagaatgcatttggcacaaccacaaattccagacgaaaccgg

SEQ ID NO: 391654 - DNA, 53 bp, Artificial
  Synthetic oligonucleotide
gaacatcatgatgctgagtgcttaggcactggagaccattggtctcatagcta

SEQ ID NO: 391655 - DNA, 60 bp, Artificial
  Synthetic oligonucleotide
gaacatcattgtcaaaagggcttgaatcaaggattgcagcgctcgagaagacgtcccaaa

SEQ ID NO: 391656 - DNA, 59 bp, Artificial
  Synthetic oligonucleotide
gaacatccacaaggttgatcaactctccgtcgtctggttgtcctcttggctattcggtg

SEQ ID NO: 391657 - DNA, 57 bp, Artificial
  Synthetic oligonucleotide
gaacatccatatcgggggttttatggaccgtctaccatggagctggcaacaagaccc

SEQ ID NO: 391658 - DNA, 59 bp, Artificial
  Synthetic oligonucleotide
gaacatccatctcgggggtcctgtggactgtttatcacggagctggcaacaagacccta

SEQ ID NO: 391659 - DNA, 58 bp, Artificial
  Synthetic oligonucleotide
gaacatcctcccaaacgctcatatagtccgcctcgttgcagaacttagccacccgttc

SEQ ID NO: 391660 - DNA, 55 bp, Artificial
  Synthetic oligonucleotide
gaacatcctctcacagacatgcgactagtgatggaacagttattcaaagctcgcg

SEQ ID NO: 391661 - DNA, 60 bp, Artificial
  Synthetic oligonucleotide
gaacatcgcgccttcatacatgtagtgaacaacagcgttagagtacatgtaatccgactg

SEQ ID NO: 391662 - DNA, 55 bp, Artificial
  Synthetic oligonucleotide
gaacatcggtttcgtctcttcggccctcgggcacgaaccgaacatacttatcaca

SEQ ID NO: 391663 - DNA, 55 bp, Artificial
  Synthetic oligonucleotide
gaacatctacgtggttcctcgcgagtggcagacgcataatttcttggagtgcgct

SEQ ID NO: 391664 - DNA, 55 bp, Artificial
  Synthetic oligonucleotide
gaacatctattccaaaggtgtctggattgcagtatagagtatttagggttaggct

SEQ ID NO: 391665 - DNA, 60 bp, Artificial
  Synthetic oligonucleotide
gaacatctgacatgaggactgaaatcataaggatgatggaaagtgccagaccagaagatg

SEQ ID NO: 391666 - DNA, 59 bp, Artificial
  Synthetic oligonucleotide
gaacatctggcttgagaacttcgtgagtgaggcaaagcatgtcatacacactcaccgca

SEQ ID NO: 391667 - DNA, 56 bp, Artificial
  Synthetic oligonucleotide
gaacatctggtacaggctttgtttcatccacccaactcacgtcccacccccaagaa

SEQ ID NO: 391668 - DNA, 55 bp, Artificial
  Synthetic oligonucleotide
gaacatcttggcgtattcgagtacgggtggggatgctaagacggagttccttcat

SEQ ID NO: 391669 - DNA, 59 bp, Artificial
  Synthetic oligonucleotide
gaacatgaagagttgcggtcgtgggaagagtggaccaacatcgacatccagcccgcacg

SEQ ID NO: 391670 - DNA, 59 bp, Artificial
  Synthetic oligonucleotide
gaacatgaatcccggagcaagtttctatgaaagccctttggatgttggaaattcatcaa

SEQ ID NO: 391671 - DNA, 60 bp, Artificial
  Synthetic oligonucleotide
gaacatgatcaggcacatttgctgtctacaagcacacacccaaatccactgtttcagggt

SEQ ID NO: 391672 - DNA, 55 bp, Artificial
  Synthetic oligonucleotide
gaacatgcaaagcgctagtgtcagcactttgcggttgggactttccgccagggac

SEQ ID NO: 391673 - DNA, 57 bp, Artificial
  Synthetic oligonucleotide
gaacatgcaccaattgaattgatatatgcgtgtcgatcagctaaagaatttgctatg

SEQ ID NO: 391674 - DNA, 60 bp, Artificial
  Synthetic oligonucleotide
gaacatgcatcgtgatcgttatcaagtcttacggaagtggcatgcgaccgtgacgggagg

SEQ ID NO: 391675 - DNA, 55 bp, Artificial
  Synthetic oligonucleotide
gaacatgcctctgctgcaattcggaatgctcaggcatccggtgaggggctgaccc

SEQ ID NO: 391676 - DNA, 60 bp, Artificial
  Synthetic oligonucleotide
gaacatgctattcacgtttttgcggtatgatttaaacgggcaggagagcatttgcttcgc

SEQ ID NO: 391677 - DNA, 55 bp, Artificial
  Synthetic oligonucleotide
gaacatggaatagtttagtgaagcaccacatgtatgtctcaaagaaagctaaggg

SEQ ID NO: 391678 - DNA, 60 bp, Artificial
  Synthetic oligonucleotide
gaacatggatcagatagaacgcgcatcagataaaattgcgcaaggtgttattattgcgta

SEQ ID NO: 391679 - DNA, 59 bp, Artificial
  Synthetic oligonucleotide
gaacatggcaaggccagagttcgtgctttggagactcggcactttggatcgcggaaact

SEQ ID NO: 391680 - DNA, 60 bp, Artificial
  Synthetic oligonucleotide
gaacatggcagccaagaggaggagcgtgcaggaggggatggggaggaatcgcagtatcgc

SEQ ID NO: 391681 - DNA, 60 bp, Artificial
  Synthetic oligonucleotide
gaacatgggacactctaatagagagagataattctattgcctactgttatccgggtgcca

SEQ ID NO: 391682 - DNA, 52 bp, Artificial
  Synthetic oligonucleotide
gaacatgttacactacttaagatggcttacctagaaaattatgaaaatgcac

SEQ ID NO: 391683 - DNA, 55 bp, Artificial
  Synthetic oligonucleotide
gaacatgttcagctcaaaacgatcggggaggtgggcttacgtccacgcgaccacg

SEQ ID NO: 391684 - DNA, 56 bp, Artificial
  Synthetic oligonucleotide
gaacattaggggtattcagatacaagagcaggtgttatgtaggactggtttggggt

SEQ ID NO: 391685 - DNA, 52 bp, Artificial
  Synthetic oligonucleotide
gaacattatccctttttcgttaccggagccgtttctttgtaggctttatctg

SEQ ID NO: 391686 - DNA, 55 bp, Artificial
  Synthetic oligonucleotide
gaacattattatatattaaccagctatattttgagttaactcttgcatgatccac

SEQ ID NO: 391687 - DNA, 55 bp, Artificial
  Synthetic oligonucleotide
gaacattcacggaacttatattaagaaggccagacagggtcagagaggtagaggc

SEQ ID NO: 391688 - DNA, 60 bp, Artificial
  Synthetic oligonucleotide
gaacattcaggcctatccacgatagtagatgatatactcgcttctacaatagttgatcca

SEQ ID NO: 391689 - DNA, 60 bp, Artificial
  Synthetic oligonucleotide
gaacattcatcacactcccacttagccgcttcagctgggcagcatgcttggataacttac

SEQ ID NO: 391690 - DNA, 54 bp, Artificial
  Synthetic oligonucleotide
gaacattccctggtgtcattcgttgaaccactaattcggatcttgctaatgggg

SEQ ID NO: 391691 - DNA, 50 bp, Artificial
  Synthetic oligonucleotide
gaacattcgcggcccgttgtacccgcaaccctttccggttttgtaccagt

SEQ ID NO: 391692 - DNA, 55 bp, Artificial
  Synthetic oligonucleotide
gaacattgaatcttgctcaactaaatgccagtccgaaattggagggatcaacact

SEQ ID NO: 391693 - DNA, 54 bp, Artificial
  Synthetic oligonucleotide
gaacattgggcttcacgggagttgagtgggggaggagtcgaagggattccccta

SEQ ID NO: 391694 - DNA, 59 bp, Artificial
  Synthetic oligonucleotide
gaacattgtggacgtacagtacttgtacgggatggggtcaagcatcgtgtcctgggcca

SEQ ID NO: 391695 - DNA, 57 bp, Artificial
  Synthetic oligonucleotide
gaacattgttcaagcggacaaggggccgcgatcgtcagttaggggtgaataatccca

SEQ ID NO: 391696 - DNA, 52 bp, Artificial
  Synthetic oligonucleotide
gaacatttcacaacaatccactcgatttacttgaagcccaaatttcaagcaa

SEQ ID NO: 391697 - DNA, 56 bp, Artificial
  Synthetic oligonucleotide
gaacattttcactatacagtgactgacataaaagatctgactaaattaggggccac

SEQ ID NO: 391698 - DNA, 57 bp, Artificial
  Synthetic oligonucleotide
gaacattttcattacacagtgactgacataaaggacctaactaagttgggagccact

SEQ ID NO: 391699 - DNA, 55 bp, Artificial
  Synthetic oligonucleotide
gaaccaaacaagtgtgcatagcatggtccagctcaagctgccatgatgggaaggc

SEQ ID NO: 391700 - DNA, 57 bp, Artificial
  Synthetic oligonucleotide
gaaccaaacctatgtgataatcctaagtcgcaacttaactcaagttcactcttaata

SEQ ID NO: 391701 - DNA, 55 bp, Artificial
  Synthetic oligonucleotide
gaaccaaacttatcagcagagcagcgtacatacaggatatatgatgaggacgttg

SEQ ID NO: 391702 - DNA, 57 bp, Artificial
  Synthetic oligonucleotide
gaaccaaagagaggcgcaattcacaacaaccaattgttctcgaatgggactccacgg

SEQ ID NO: 391703 - DNA, 52 bp, Artificial
  Synthetic oligonucleotide
gaaccaaagcgttatcgggtacgaaccgaagcgttggtgtgtacgaactaag

SEQ ID NO: 391704 - DNA, 56 bp, Artificial
  Synthetic oligonucleotide
gaaccaaaggaagtgactgcagcaatgtgagaggttgagctgccgtcgactgtctt

SEQ ID NO: 391705 - DNA, 56 bp, Artificial
  Synthetic oligonucleotide
gaaccaaatggtgctataagatttacaatgggttaccaacatggacaattaaccac

SEQ ID NO: 391706 - DNA, 60 bp, Artificial
  Synthetic oligonucleotide
gaaccaacagatgtccctagaagtagtaccccaagagcatttgcaagagcatatgctcga

SEQ ID NO: 391707 - DNA, 59 bp, Artificial
  Synthetic oligonucleotide
gaaccaacatacaattgatctaactgactcagaaatgaacaaactgtttgaaagaacaa

SEQ ID NO: 391708 - DNA, 50 bp, Artificial
  Synthetic oligonucleotide
gaaccaaccactatcccaccaacgtcaccgatcctacaagcaactccaac

SEQ ID NO: 391709 - DNA, 59 bp, Artificial
  Synthetic oligonucleotide
gaaccaaccataatagaaaggaacatagtgcatttgaatagtactaccatagagaagga

SEQ ID NO: 391710 - DNA, 56 bp, Artificial
  Synthetic oligonucleotide
gaaccaaccgaaggtgatcagttatgagactatgatgaaagggcatgcagtatttt

SEQ ID NO: 391711 - DNA, 54 bp, Artificial
  Synthetic oligonucleotide
gaaccaagaagtttgtcgcgaaccagtccattagtttggttaagatgtgtttac

SEQ ID NO: 391712 - DNA, 60 bp, Artificial
  Synthetic oligonucleotide
gaaccaagacagctgccaatttatagagcaaatggcgaaaaagagttgcgtaacagatgg

SEQ ID NO: 391713 - DNA, 55 bp, Artificial
  Synthetic oligonucleotide
gaaccaagatatcgtgatgtttttaagttagtaactgagaatcgtaagtatgttt

SEQ ID NO: 391714 - DNA, 53 bp, Artificial
  Synthetic oligonucleotide
gaaccaagcccaacaatgcctccgccacgatacttctccaacgtatcttcaca

SEQ ID NO: 391715 - DNA, 58 bp, Artificial
  Synthetic oligonucleotide
gaaccaagtggagggtgaggtccagatcgtgtcaactgctgctcagaccttcctggca

SEQ ID NO: 391716 - DNA, 55 bp, Artificial
  Synthetic oligonucleotide
gaaccaagtggccaaactgcagattggtatactattggagtctatgtgataggct

SEQ ID NO: 391717 - DNA, 55 bp, Artificial
  Synthetic oligonucleotide
gaaccaatacttgatgggccttatcaaccaacaacatttaagcctgatatcaact

SEQ ID NO: 391718 - DNA, 56 bp, Artificial
  Synthetic oligonucleotide
gaaccaatatcgcttactttgaagaggttatttaatccgtggtttgctattgctcc

SEQ ID NO: 391719 - DNA, 58 bp, Artificial
  Synthetic oligonucleotide
gaaccaatattgccaatttttgcttacatatgaaatggaatgggatgttattaaaaga

SEQ ID NO: 391720 - DNA, 60 bp, Artificial
  Synthetic oligonucleotide
gaaccaatcataatagagaggaacataacagagatagtgtatttgaataatactaccata

SEQ ID NO: 391721 - DNA, 54 bp, Artificial
  Synthetic oligonucleotide
gaaccaatgaaactggaggaagctgtgtacggtaccgaagggttggaggccctc

SEQ ID NO: 391722 - DNA, 57 bp, Artificial
  Synthetic oligonucleotide
gaaccaatgttgtacaaagccttaggcaggctttataagcacccctgtatagcaaag

SEQ ID NO: 391723 - DNA, 59 bp, Artificial
  Synthetic oligonucleotide
gaaccacaagcaccacaacgcgaggaggatccagaagagggtcctgctcccaaacaagc

SEQ ID NO: 391724 - DNA, 55 bp, Artificial
  Synthetic oligonucleotide
gaaccacacactgtgacctccacaagccaattgtgctgctacgcttgtaaaccgc

SEQ ID NO: 391725 - DNA, 58 bp, Artificial
  Synthetic oligonucleotide
gaaccacaccttctgcgaaagcttcaatactccacgaagtcagacctgttacatccgg

SEQ ID NO: 391726 - DNA, 57 bp, Artificial
  Synthetic oligonucleotide
gaaccacacgaacagtgtcatgttctggttggtcagggaccgtagaccgtatggtac

SEQ ID NO: 391727 - DNA, 55 bp, Artificial
  Synthetic oligonucleotide
gaaccacacgtgtagttgtcgtcaggttcacggtgcattacatcgtacagtgcgg

SEQ ID NO: 391728 - DNA, 57 bp, Artificial
  Synthetic oligonucleotide
gaaccacactaacagtgttatgttctggttaataagggataggagaccatatggtac

SEQ ID NO: 391729 - DNA, 50 bp, Artificial
  Synthetic oligonucleotide
gaaccacagctataatagccaactctggaaccagcatagaccctatcaca

SEQ ID NO: 391730 - DNA, 55 bp, Artificial
  Synthetic oligonucleotide
gaaccacaggatagcgcctgtggaaaatttgtgaatctagggatagcgccctaga

SEQ ID NO: 391731 - DNA, 60 bp, Artificial
  Synthetic oligonucleotide
gaaccacatagtttctggagatgccctgcaggggaaccgtatctcagcccggatcctgaa

SEQ ID NO: 391732 - DNA, 55 bp, Artificial
  Synthetic oligonucleotide
gaaccacatcctatccgaaaatgaagttaaactgaccatcatgacaggagagatt

SEQ ID NO: 391733 - DNA, 56 bp, Artificial
  Synthetic oligonucleotide
gaaccaccaataaacggctggaatgaatatcgtggtacctatcgaacacgaaacag

SEQ ID NO: 391734 - DNA, 55 bp, Artificial
  Synthetic oligonucleotide
gaaccacctaagttgcgaagtacagctgcagctttgtattggtacagaaccggta

SEQ ID NO: 391735 - DNA, 55 bp, Artificial
  Synthetic oligonucleotide
gaaccacggcacttactgtggcgccccaatcttgggaccagggaaatctcccaag

SEQ ID NO: 391736 - DNA, 52 bp, Artificial
  Synthetic oligonucleotide
gaaccactaggaaatgtctgtaaagagaccctagcttctcaagaagcaacac

SEQ ID NO: 391737 - DNA, 55 bp, Artificial
  Synthetic oligonucleotide
gaaccactcaggggatcagccaggcatattgaggaatgctcttgttatggacacg

SEQ ID NO: 391738 - DNA, 58 bp, Artificial
  Synthetic oligonucleotide
gaaccactcccaaaataatcatccgcccactcctgcatctcctcgggaacggccgtga

SEQ ID NO: 391739 - DNA, 57 bp, Artificial
  Synthetic oligonucleotide
gaaccactgtacaatctgttgaagtttgtggtaggtatgtctttcagtgatttcaaa

SEQ ID NO: 391740 - DNA, 59 bp, Artificial
  Synthetic oligonucleotide
gaaccacttatgggtgcgtatcaaccaagccgattgaacaaagacgcattcaaacgaga

SEQ ID NO: 391741 - DNA, 55 bp, Artificial
  Synthetic oligonucleotide
gaaccagaacaagcgtgaaatcgccctatggagggctgtaccatccaaacccggt

SEQ ID NO: 391742 - DNA, 52 bp, Artificial
  Synthetic oligonucleotide
gaaccagaagctcgattggtagtgaagattccagacctcgccatagatttcg

SEQ ID NO: 391743 - DNA, 60 bp, Artificial
  Synthetic oligonucleotide
gaaccagaagtggaggaaacaccaatcaacagcgagcgtctgcggggcaaatcagcgtgc

SEQ ID NO: 391744 - DNA, 53 bp, Artificial
  Synthetic oligonucleotide
gaaccagaattcgctttaaagacgacagctcatttgaggatgtgaatggaatc

SEQ ID NO: 391745 - DNA, 55 bp, Artificial
  Synthetic oligonucleotide
gaaccagagaaactgcaaagtatcatggcagattcatttggagccgaagtgactg

SEQ ID NO: 391746 - DNA, 60 bp, Artificial
  Synthetic oligonucleotide
gaaccagagtggtcccaagagggcaactgtccaccagaggagtacagattgcctcaaatg

SEQ ID NO: 391747 - DNA, 55 bp, Artificial
  Synthetic oligonucleotide
gaaccagattaaggcagcagtcttctatctgaatgcacgtccaaaaccaggcgca

SEQ ID NO: 391748 - DNA, 56 bp, Artificial
  Synthetic oligonucleotide
gaaccagcactaaagattatagtaagtgcttttagcaaagtagtgacatgggttac

SEQ ID NO: 391749 - DNA, 56 bp, Artificial
  Synthetic oligonucleotide
gaaccagcctaccttggtggtaaggaccccagagtcaagggtggcccttcattgca

SEQ ID NO: 391750 - DNA, 57 bp, Artificial
  Synthetic oligonucleotide
gaaccagctctcaaaacaggttcagaaggacttagatctttgtttaacaccatagta

SEQ ID NO: 391751 - DNA, 57 bp, Artificial
  Synthetic oligonucleotide
gaaccagctgcccttcatccaaaagatccccgcttggaggttcctcttgaagaagcc

SEQ ID NO: 391752 - DNA, 58 bp, Artificial
  Synthetic oligonucleotide
gaaccagctgtcctaactgatagagatcctcgattaaccactgactttaataaggctt

SEQ ID NO: 391753 - DNA, 57 bp, Artificial
  Synthetic oligonucleotide
gaaccaggaagtattcccacggtaagaaccgcagataacttaggaccagatcagaca

SEQ ID NO: 391754 - DNA, 55 bp, Artificial
  Synthetic oligonucleotide
gaaccaggataaggtttaaggatgattcttcctttgaagaggtcaatgggatacg

SEQ ID NO: 391755 - DNA, 55 bp, Artificial
  Synthetic oligonucleotide
gaaccaggcttccaggcaccttcccgtgcgccaccaaggttgctggatgaaggga

SEQ ID NO: 391756 - DNA, 51 bp, Artificial
  Synthetic oligonucleotide
gaaccagggtccgtaggacgggagccatgccgccgaggaggcgtatagccc

SEQ ID NO: 391757 - DNA, 55 bp, Artificial
  Synthetic oligonucleotide
gaaccagggtgacttctggaaagacagacggctgatggaaagacatcacaatagc

SEQ ID NO: 391758 - DNA, 54 bp, Artificial
  Synthetic oligonucleotide
gaaccaggtacaggcaaatcaatcgctacatccatattagcaagaatgataacc

SEQ ID NO: 391759 - DNA, 55 bp, Artificial
  Synthetic oligonucleotide
gaaccagtgaaacatgatgatcacctattacaagactctgaattagctggcttgc

SEQ ID NO: 391760 - DNA, 50 bp, Artificial
  Synthetic oligonucleotide
gaaccagtgaacgagtcatctgcgtattgggacgcaagtttagatcatct

SEQ ID NO: 391761 - DNA, 55 bp, Artificial
  Synthetic oligonucleotide
gaaccagtgagagacttggtggctaaggacgtaatcacttacaaggcgttcgaga

SEQ ID NO: 391762 - DNA, 50 bp, Artificial
  Synthetic oligonucleotide
gaaccagtgatgatagtagtctgagtcggagtacggttctcagtaagaat

SEQ ID NO: 391763 - DNA, 60 bp, Artificial
  Synthetic oligonucleotide
gaaccatacgaacactgtgatgttttatcttgttcgtgacagaaggccctatggtactgc

SEQ ID NO: 391764 - DNA, 58 bp, Artificial
  Synthetic oligonucleotide
gaaccatatcggaactctctaaatagagttagtgtagataaagatggatttccaacat

SEQ ID NO: 391765 - DNA, 58 bp, Artificial
  Synthetic oligonucleotide
gaaccatcaaagacagaacaccttataggtcactgattcggtttccaatagggacagc

SEQ ID NO: 391766 - DNA, 50 bp, Artificial
  Synthetic oligonucleotide
gaaccatcctaaccatgggtgtagtatgggaatcgtgtatggggatgatt

SEQ ID NO: 391767 - DNA, 55 bp, Artificial
  Synthetic oligonucleotide
gaaccatgactacctctgcggtacatgattctcactctttgaggaaaggcgagcg

SEQ ID NO: 391768 - DNA, 55 bp, Artificial
  Synthetic oligonucleotide
gaaccatgagagtgaatgttttgagacggtatctcttcagtcagaaacagatgcc

SEQ ID NO: 391769 - DNA, 55 bp, Artificial
  Synthetic oligonucleotide
gaaccatgagggtgtattagcacctaagacttatgcctgtagagctacttgctcg

SEQ ID NO: 391770 - DNA, 50 bp, Artificial
  Synthetic oligonucleotide
gaaccatgcctacgtaatacctgcatgttcgctgcaatccccatgtcaca

SEQ ID NO: 391771 - DNA, 60 bp, Artificial
  Synthetic oligonucleotide
gaaccatggattccaccgtgaactttgtaccctggcatgctaagcgacagctgggcatga

SEQ ID NO: 391772 - DNA, 54 bp, Artificial
  Synthetic oligonucleotide
gaaccatgttgtgatcaatgggattactatgaggagtggtagtccaattgatct

SEQ ID NO: 391773 - DNA, 57 bp, Artificial
  Synthetic oligonucleotide
gaaccattaaagacagaagcccctatcgaaccctaatgagctgtcctattggtgaag

SEQ ID NO: 391774 - DNA, 56 bp, Artificial
  Synthetic oligonucleotide
gaaccattaattggtagatacgattgggttttttctgcggatgttaccagtatgta

SEQ ID NO: 391775 - DNA, 56 bp, Artificial
  Synthetic oligonucleotide
gaaccattaccaccaggcgtgtacgagccagcctaccttggaggtcgtgaccctag

SEQ ID NO: 391776 - DNA, 52 bp, Artificial
  Synthetic oligonucleotide
gaaccattccggtagtaataaatcaaaacgctgacacccagatgggtgaggg

SEQ ID NO: 391777 - DNA, 55 bp, Artificial
  Synthetic oligonucleotide
gaaccattctgtaggaaggctaggtaactcggttgggagttatcgaaactggctc

SEQ ID NO: 391778 - DNA, 53 bp, Artificial
  Synthetic oligonucleotide
gaaccattgagatttctctggtcattacccggtgatggttactagaggggggc

SEQ ID NO: 391779 - DNA, 55 bp, Artificial
  Synthetic oligonucleotide
gaaccattgaggttgcagtcgaaggagaatcgtggtgtgttacgaaccatggctg

SEQ ID NO: 391780 - DNA, 57 bp, Artificial
  Synthetic oligonucleotide
gaaccattgcaattttggcctactggttgtgcctattagcccgttagacttcgacca

SEQ ID NO: 391781 - DNA, 56 bp, Artificial
  Synthetic oligonucleotide
gaaccattggagcaatccaacgttaatactacgttaagtattagtgcttacagggc

SEQ ID NO: 391782 - DNA, 55 bp, Artificial
  Synthetic oligonucleotide
gaaccatttatgcttggatggaaagtcaggcaaacgttgtcaatgtgtacgtgaa

SEQ ID NO: 391783 - DNA, 54 bp, Artificial
  Synthetic oligonucleotide
gaacccaaaggaggattacctagtacggtacttgttcagaggaatagggactgc

SEQ ID NO: 391784 - DNA, 55 bp, Artificial
  Synthetic oligonucleotide
gaacccaacagaggaacaagccgtggatatatgcaaagcggcaatgggcttgagg

SEQ ID NO: 391785 - DNA, 59 bp, Artificial
  Synthetic oligonucleotide
gaacccaagcagacttggcggaaggccctccggtcaaggagtgcgctgtgacttgcagg

SEQ ID NO: 391786 - DNA, 55 bp, Artificial
  Synthetic oligonucleotide
gaacccaattacaccgattataacagatttgttcgaagtgcaatttaaaactgtc

SEQ ID NO: 391787 - DNA, 54 bp, Artificial
  Synthetic oligonucleotide
gaacccaccagccaacaaggcaacagcaccggggttgataaccccgtgaacaac

SEQ ID NO: 391788 - DNA, 55 bp, Artificial
  Synthetic oligonucleotide
gaacccacggcgttaatgggtacctgctgtctgtattctatgacgcagtggtcga

SEQ ID NO: 391789 - DNA, 55 bp, Artificial
  Synthetic oligonucleotide
gaacccagaggctgttaacatatctggtactaaaggagctatggtgcatctccag

SEQ ID NO: 391790 - DNA, 55 bp, Artificial
  Synthetic oligonucleotide
gaacccagcaattgaacctgtgaaagagttccgcttcaagccattttcgtgtgtg

SEQ ID NO: 391791 - DNA, 55 bp, Artificial
  Synthetic oligonucleotide
gaacccagcctgccagcggcaagcaatgcttgaaatagatgtgaacccgtgccag

SEQ ID NO: 391792 - DNA, 55 bp, Artificial
  Synthetic oligonucleotide
gaacccagcgctaaaacagtatggttcgtttgctggcgctagtgaagagggtgct

SEQ ID NO: 391793 - DNA, 60 bp, Artificial
  Synthetic oligonucleotide
gaacccaggaaatgctgagattgaagatctcatctttctggcacgatccgcacttattct

SEQ ID NO: 391794 - DNA, 51 bp, Artificial
  Synthetic oligonucleotide
gaacccaggaacccactcatacacaattgagtgtgttcgacaagcctaaag

SEQ ID NO: 391795 - DNA, 55 bp, Artificial
  Synthetic oligonucleotide
gaacccataagtagtacacctatgcctggtgtacgccgtcttgcagggccccgcc

SEQ ID NO: 391796 - DNA, 60 bp, Artificial
  Synthetic oligonucleotide
gaacccatagaaccacatccaatcacagttgagtgcgtaagcaagctacagggcgacttc

SEQ ID NO: 391797 - DNA, 60 bp, Artificial
  Synthetic oligonucleotide
gaacccatgatggccgtatggtatcctgaatttggctttggctagagctggtgaccgtgt

SEQ ID NO: 391798 - DNA, 60 bp, Artificial
  Synthetic oligonucleotide
gaacccatgcagccgtaggagatggcgcagggtagtgttgagatgctttgggatgcctgt

SEQ ID NO: 391799 - DNA, 60 bp, Artificial
  Synthetic oligonucleotide
gaacccatgccaaatgctgtctcacctggtgatttttattatgcaccggatagcacacag

SEQ ID NO: 391800 - DNA, 59 bp, Artificial
  Synthetic oligonucleotide
gaacccattagctcttgtaataactgaacaagcaatttaaatcaggaatcgcactggaa

SEQ ID NO: 391801 - DNA, 60 bp, Artificial
  Synthetic oligonucleotide
gaacccattgacaatgtcatgggaatgatcggaatattacctgacatgacccccagcaca

SEQ ID NO: 391802 - DNA, 55 bp, Artificial
  Synthetic oligonucleotide
gaacccatttgtaaggtgcagacacaagaatctgcagtacacattgccagatctc

SEQ ID NO: 391803 - DNA, 55 bp, Artificial
  Synthetic oligonucleotide
gaaccccagaaaacagtgggagagaactctacataaacacatactatctgaagag

SEQ ID NO: 391804 - DNA, 55 bp, Artificial
  Synthetic oligonucleotide
gaaccccagcaagaagaacgaggcgctttggtaccttcacatctggagccacatc

SEQ ID NO: 391805 - DNA, 60 bp, Artificial
  Synthetic oligonucleotide
gaaccccatgtgtgatgaattcctcaatgtgcctgaatggtcttatatagtggagaagga

SEQ ID NO: 391806 - DNA, 57 bp, Artificial
  Synthetic oligonucleotide
gaaccccattagtccgtatactgagtttgcaactatcttatacgtgtattgcataga

SEQ ID NO: 391807 - DNA, 57 bp, Artificial
  Synthetic oligonucleotide
gaaccccattttagtatcccctcccattaccgagtatgctgaacaaatatcagacga

SEQ ID NO: 391808 - DNA, 58 bp, Artificial
  Synthetic oligonucleotide
gaacccccccgttggtgaatcttcgtacatgaccttgaatatgttcttgatgctctct

SEQ ID NO: 391809 - DNA, 58 bp, Artificial
  Synthetic oligonucleotide
gaaccccggccatggagtgaatggacgaacgtggacatccagccagcgaggtcctggg

SEQ ID NO: 391810 - DNA, 55 bp, Artificial
  Synthetic oligonucleotide
gaaccccgggactgcagccaatcccgtcgtaggctacggagagttcagcgagaag

SEQ ID NO: 391811 - DNA, 53 bp, Artificial
  Synthetic oligonucleotide
gaaccccgtctccttcctcttcatgaaaccagccaaactccggttcttccacc

SEQ ID NO: 391812 - DNA, 59 bp, Artificial
  Synthetic oligonucleotide
gaacccctagtccttccgtccatgacccaactcacatctcgctcgcatccgaaatcgag

SEQ ID NO: 391813 - DNA, 59 bp, Artificial
  Synthetic oligonucleotide
gaacccctcagtcgcgacagtgcgggccatgggcccgtacatggagcggctggcgggga

SEQ ID NO: 391814 - DNA, 58 bp, Artificial
  Synthetic oligonucleotide
gaaccccttagttatcttgggttcgaccatgtgcatgtactcgtatttgccaatgtcc

SEQ ID NO: 391815 - DNA, 60 bp, Artificial
  Synthetic oligonucleotide
gaacccgactgcatgcacgaaggacgcatgcgacccttctgtgacgcgttccggttctcg

SEQ ID NO: 391816 - DNA, 54 bp, Artificial
  Synthetic oligonucleotide
gaacccgtatggcgtcgtgcttgttacggatgcagtaacgggtaacggtgtaac

SEQ ID NO: 391817 - DNA, 57 bp, Artificial
  Synthetic oligonucleotide
gaacccgtccgttgctgccaccttaggcttcggggcgtatatgtctaaagcacatgg

SEQ ID NO: 391818 - DNA, 55 bp, Artificial
  Synthetic oligonucleotide
gaacccgtcgcgtttataggaacttgttgtctgtattctataacgcaatgatcga

SEQ ID NO: 391819 - DNA, 54 bp, Artificial
  Synthetic oligonucleotide
gaacccgtgagtggaaccttattcctttattggggagtacactcgaggagtgga

SEQ ID NO: 391820 - DNA, 55 bp, Artificial
  Synthetic oligonucleotide
gaaccctagtgtacccgcctgaactgctatgcggctcaacttctagcttgtaccc

SEQ ID NO: 391821 - DNA, 60 bp, Artificial
  Synthetic oligonucleotide
gaaccctattcaatatgattattcttatcacgagataaccaaccagcactcgctacgcct

SEQ ID NO: 391822 - DNA, 54 bp, Artificial
  Synthetic oligonucleotide
gaaccctcaagaaggttttatcggacgtcgagacaacccacacaaatcttatcc

SEQ ID NO: 391823 - DNA, 58 bp, Artificial
  Synthetic oligonucleotide
gaaccctccattcacagactctgtactaacaggtcctatgttacatcccggggtgcta

SEQ ID NO: 391824 - DNA, 58 bp, Artificial
  Synthetic oligonucleotide
gaaccctctatagaactttcaatctcgttcacacacgtggcggccatccgttataata

SEQ ID NO: 391825 - DNA, 56 bp, Artificial
  Synthetic oligonucleotide
gaaccctctttctgactcaaggggccttgttgaatgacaaacattccaatggaacc

SEQ ID NO: 391826 - DNA, 55 bp, Artificial
  Synthetic oligonucleotide
gaaccctgatccgtaatgcaatcttttaggtagcctgctcctataacttacgatg

SEQ ID NO: 391827 - DNA, 58 bp, Artificial
  Synthetic oligonucleotide
gaaccctgccccagatattcctagagttgacacatctgttgtgacaacaagtcgtggc

SEQ ID NO: 391828 - DNA, 55 bp, Artificial
  Synthetic oligonucleotide
gaaccctgtgctcccttcacatccttagataacaatcttgtcatgtcgtttagga

SEQ ID NO: 391829 - DNA, 55 bp, Artificial
  Synthetic oligonucleotide
gaaccctgttcagaatattgcctctcacatgtcgtcaatcttctcgaggactggg

SEQ ID NO: 391830 - DNA, 57 bp, Artificial
  Synthetic oligonucleotide
gaacccttcgggtgtggggtctatatgggaaccataccagctaggcgtctcaagatc

SEQ ID NO: 391831 - DNA, 55 bp, Artificial
  Synthetic oligonucleotide
gaacccttggcgtatgacctggctagaagaaatctgtcaagcggctaccaagtct

SEQ ID NO: 391832 - DNA, 55 bp, Artificial
  Synthetic oligonucleotide
gaaccctttgcaacaggatacaacatcaaagacaagttaaagaagagccgcccgc

SEQ ID NO: 391833 - DNA, 54 bp, Artificial
  Synthetic oligonucleotide
gaaccgaaacagggctgttacagaacattgtcccttttccgttatagaagcagg

SEQ ID NO: 391834 - DNA, 57 bp, Artificial
  Synthetic oligonucleotide
gaaccgaaggctattcagagcgctattattgcagcatacgtggaagctttcggttat

SEQ ID NO: 391835 - DNA, 55 bp, Artificial
  Synthetic oligonucleotide
gaaccgagagcatctcagatgaaggagatctcccaaacgccggtggactccggga

SEQ ID NO: 391836 - DNA, 60 bp, Artificial
  Synthetic oligonucleotide
gaaccgagcactgcaacggtgaagaacatgcatcgtgatcgataccaagtgctgcgcaaa

SEQ ID NO: 391837 - DNA, 54 bp, Artificial
  Synthetic oligonucleotide
gaaccgataaccggagggagcccagatcctggcgtaaaggggtttgcattcttg

SEQ ID NO: 391838 - DNA, 60 bp, Artificial
  Synthetic oligonucleotide
gaaccgattgagaaaggcaatctgcctcccatgaaggacgcaagtaatagctcacaatcg

SEQ ID NO: 391839 - DNA, 59 bp, Artificial
  Synthetic oligonucleotide
gaaccgcacaagcgaccgaggtgacccaaccgcagacatccgactccctagacagatcc

SEQ ID NO: 391840 - DNA, 55 bp, Artificial
  Synthetic oligonucleotide
gaaccgcacgttaacccagtagatagacaatatatgatatttggtgaaagcaaac

SEQ ID NO: 391841 - DNA, 56 bp, Artificial
  Synthetic oligonucleotide
gaaccgcatattactgctaactctttagaatgggtagacccagatagttctttaaa

SEQ ID NO: 391842 - DNA, 60 bp, Artificial
  Synthetic oligonucleotide
gaaccgctccattctcaacacgagtcaaaggggaatccttgaagatgaacagatgtatca

SEQ ID NO: 391843 - DNA, 59 bp, Artificial
  Synthetic oligonucleotide
gaaccggaaaccctaatgcatctcggatgactctggttaagccctctagtagtatgtca

SEQ ID NO: 391844 - DNA, 59 bp, Artificial
  Synthetic oligonucleotide
gaaccggatttggatgtggtagatcctcgtgttggtgtagattatgtcctctacgctgg

SEQ ID NO: 391845 - DNA, 55 bp, Artificial
  Synthetic oligonucleotide
gaaccggggctgcaatagccgtagaatggaacaatgtatcattgcaatgagtctc

SEQ ID NO: 391846 - DNA, 54 bp, Artificial
  Synthetic oligonucleotide
gaaccgggtagcacttgtcggattgcgtggactcctttgattgagtggagattg

SEQ ID NO: 391847 - DNA, 58 bp, Artificial
  Synthetic oligonucleotide
gaaccggtgtgatgtggctggtgtatgacaccactcccggcggacaagcgccgacccc

SEQ ID NO: 391848 - DNA, 57 bp, Artificial
  Synthetic oligonucleotide
gaaccgtacccagtaacagtcgaatgtgtgagcaagttacagggtgacttcgtccac

SEQ ID NO: 391849 - DNA, 55 bp, Artificial
  Synthetic oligonucleotide
gaaccgtatctgcatggtgatgatgtcgtggttccttaggaatggccggttgtgg

SEQ ID NO: 391850 - DNA, 55 bp, Artificial
  Synthetic oligonucleotide
gaaccgtccattattgaacctccacaggccggggacctttcaggccatgtattca

SEQ ID NO: 391851 - DNA, 55 bp, Artificial
  Synthetic oligonucleotide
gaaccgtccggcccgtgagccgaatctttccgacgtggcgcgggaaccgctcgca

SEQ ID NO: 391852 - DNA, 54 bp, Artificial
  Synthetic oligonucleotide
gaaccgtcgttaccactaccacagtttcggacagcggtggcaacaacgaggacc

SEQ ID NO: 391853 - DNA, 56 bp, Artificial
  Synthetic oligonucleotide
gaaccgtcttcggtccagacaaatagagtctcgtcccacgcgcaccgggagcggta

SEQ ID NO: 391854 - DNA, 55 bp, Artificial
  Synthetic oligonucleotide
gaaccgtgaaaattgaacgtgtccatgcggatgtgaacatggacggcgtatgtgg

SEQ ID NO: 391855 - DNA, 54 bp, Artificial
  Synthetic oligonucleotide
gaaccgtgggagaaaacacgaccaaacttgcaaaatgaacaaatccgaagagag

SEQ ID NO: 391856 - DNA, 55 bp, Artificial
  Synthetic oligonucleotide
gaaccgtggtcccgatcctctggatttgaaccaccgcctatctgtgaggcgggtg

SEQ ID NO: 391857 - DNA, 55 bp, Artificial
  Synthetic oligonucleotide
gaaccgtgttcgagtgtctgagttggtagtattgctctaaactacctgaagtcac

SEQ ID NO: 391858 - DNA, 51 bp, Artificial
  Synthetic oligonucleotide
gaaccgtgttggtttgaggaaaccttctctttggaccgagacgttcaagtt

SEQ ID NO: 391859 - DNA, 56 bp, Artificial
  Synthetic oligonucleotide
gaaccgtgtttttcctgccgactctgcgaagttttattactcctatgagtttgata

SEQ ID NO: 391860 - DNA, 55 bp, Artificial
  Synthetic oligonucleotide
gaaccgttaagattgaacgtgtgcatgctgacgtgaacatggacggggtctgtcc

SEQ ID NO: 391861 - DNA, 58 bp, Artificial
  Synthetic oligonucleotide
gaaccgttccattctcaatactagccaaaggggaattcttgaggacgagcagatgtac

SEQ ID NO: 391862 - DNA, 55 bp, Artificial
  Synthetic oligonucleotide
gaaccgtttcaatccttggtacccaaagctgtcagaggccaatacagtgggtttg

SEQ ID NO: 391863 - DNA, 55 bp, Artificial
  Synthetic oligonucleotide
gaaccgtttcagtctcttgtccctaaagcagccagaggccaatacagcgggttcg

SEQ ID NO: 391864 - DNA, 54 bp, Artificial
  Synthetic oligonucleotide
gaaccgttttctgataaagagcgttccgagttgtccgaactcaaacggacagac

SEQ ID NO: 391865 - DNA, 55 bp, Artificial
  Synthetic oligonucleotide
gaacctaacaacacttggtcgtaggcatgcatattgtgcttcaatatacccgagt

SEQ ID NO: 391866 - DNA, 56 bp, Artificial
  Synthetic oligonucleotide
gaacctaagattacgtcgcaacgcatacatgaaaaccaatatggcccggaattcgt

SEQ ID NO: 391867 - DNA, 50 bp, Artificial
  Synthetic oligonucleotide
gaacctaaggacctttttcgttacgatcgggatactatacgaacccgcct

SEQ ID NO: 391868 - DNA, 55 bp, Artificial
  Synthetic oligonucleotide
gaacctaatactactcgacgtagcttctatgtacccgcgttccatcgaactgcta

SEQ ID NO: 391869 - DNA, 55 bp, Artificial
  Synthetic oligonucleotide
gaacctacacgcgtgactattggagatatgccctcaacactacctacggggactg

SEQ ID NO: 391870 - DNA, 58 bp, Artificial
  Synthetic oligonucleotide
gaacctacactggtggggaaaatgtaccccctgtgctgcacattactaatactgcaac

SEQ ID NO: 391871 - DNA, 54 bp, Artificial
  Synthetic oligonucleotide
gaacctacgagtcttcacggaggctatgactaggtactctgccccccccgggga

SEQ ID NO: 391872 - DNA, 55 bp, Artificial
  Synthetic oligonucleotide
gaacctacgggcagtggtgagggttgggctatcggagcaagcaacatcatcggct

SEQ ID NO: 391873 - DNA, 59 bp, Artificial
  Synthetic oligonucleotide
gaacctactggcctctatggcaacgtgtccaagaatgcacttatagtttattatgtttg

SEQ ID NO: 391874 - DNA, 55 bp, Artificial
  Synthetic oligonucleotide
gaacctagagaatctacagtataatcatgcatggtaaagtaccaacgctgcaaga

SEQ ID NO: 391875 - DNA, 53 bp, Artificial
  Synthetic oligonucleotide
gaacctagatgcaagggtgacctcgctgtagcaagacttaagattaaggacat

SEQ ID NO: 391876 - DNA, 60 bp, Artificial
  Synthetic oligonucleotide
gaacctagcgccatacgcatttgacttctacgaaataacatcagagacgcctaacagagc

SEQ ID NO: 391877 - DNA, 59 bp, Artificial
  Synthetic oligonucleotide
gaacctaggcaactaccagtatacagagcaaacggagagaaagaactacgcaacagatg

SEQ ID NO: 391878 - DNA, 59 bp, Artificial
  Synthetic oligonucleotide
gaacctataccgagttagaggtaagagtacctgatccgtagtggatcgtcagggcagca

SEQ ID NO: 391879 - DNA, 60 bp, Artificial
  Synthetic oligonucleotide
gaacctataggcctggagctcctcctggcaccagaggcctcgctgtggggcacaggggcc

SEQ ID NO: 391880 - DNA, 56 bp, Artificial
  Synthetic oligonucleotide
gaacctatatggggaatatcttaaattaactcagtagagctacgttccatgtactc

SEQ ID NO: 391881 - DNA, 59 bp, Artificial
  Synthetic oligonucleotide
gaacctatcaaattgaagatgacggctcaaagtcagccatatctcgactaatatcaaag

SEQ ID NO: 391882 - DNA, 55 bp, Artificial
  Synthetic oligonucleotide
gaacctatcagctatggtgtatatcaccccgtcagacaattgtcttaggaagtac

SEQ ID NO: 391883 - DNA, 55 bp, Artificial
  Synthetic oligonucleotide
gaacctatgattcagactctatcacagaatcagagggttatgatctagctgcaag

SEQ ID NO: 391884 - DNA, 54 bp, Artificial
  Synthetic oligonucleotide
gaacctcatttacttaaacttagaactgtgaaacatccaattactaaagacaaa

SEQ ID NO: 391885 - DNA, 55 bp, Artificial
  Synthetic oligonucleotide
gaacctccaattccccaggcgatccactattcaagtgggagggatctatgcccag

SEQ ID NO: 391886 - DNA, 59 bp, Artificial
  Synthetic oligonucleotide
gaacctccatgagaaagtcagaagaatgctaaaggacaatgccaaagatgaggggaacg

SEQ ID NO: 391887 - DNA, 60 bp, Artificial
  Synthetic oligonucleotide
gaacctcccagaagagtacagacttcctgctataatgatgtcatcctcttatgtgaagtt

SEQ ID NO: 391888 - DNA, 55 bp, Artificial
  Synthetic oligonucleotide
gaacctccccactccggctgtagtaactcaagccaaagaggatgctacgaagcac

SEQ ID NO: 391889 - DNA, 55 bp, Artificial
  Synthetic oligonucleotide
gaacctccccttccgcacctccctccagtttcatggcgggagctgagttggcagt

SEQ ID NO: 391890 - DNA, 58 bp, Artificial
  Synthetic oligonucleotide
gaacctcgcagccagcattgaaggagttacacaaaaagtgccaagcgtatacatgcat

SEQ ID NO: 391891 - DNA, 60 bp, Artificial
  Synthetic oligonucleotide
gaacctcgttatgtccactaacctggctgcgttgcgcaagcaattacttggtgaggagtg

SEQ ID NO: 391892 - DNA, 55 bp, Artificial
  Synthetic oligonucleotide
gaacctctctccgcatgacgacgtgtcaggttggttgcacgaatgttcaccgttc

SEQ ID NO: 391893 - DNA, 59 bp, Artificial
  Synthetic oligonucleotide
gaacctctcttactctgactaaccaaccatgtctggcaaccagtatactgaggaagtta

SEQ ID NO: 391894 - DNA, 54 bp, Artificial
  Synthetic oligonucleotide
gaacctctgaaccgtcagatcgaaacggcgtggtccagctggagccacgctgat

SEQ ID NO: 391895 - DNA, 60 bp, Artificial
  Synthetic oligonucleotide
gaacctctgggagtcacgaattaacgtggctactaggggcgatgcgccgctagctgccac

SEQ ID NO: 391896 - DNA, 55 bp, Artificial
  Synthetic oligonucleotide
gaacctctgtgactgaccaggtacgccaatagaaaatagtatcccggagggctac

SEQ ID NO: 391897 - DNA, 59 bp, Artificial
  Synthetic oligonucleotide
gaacctcttgatttggctatacggcggctgcagaaccttgctatcgaagaccttccaaa

SEQ ID NO: 391898 - DNA, 60 bp, Artificial
  Synthetic oligonucleotide
gaacctgacgatgcctccagactactgcacaccatcctttccaaggctgagcttaccact

SEQ ID NO: 391899 - DNA, 54 bp, Artificial
  Synthetic oligonucleotide
gaacctgagagccttcacggaggctatgaccaggtactccgccccccccgggga

SEQ ID NO: 391900 - DNA, 60 bp, Artificial
  Synthetic oligonucleotide
gaacctgagaggatagtttccatcttagagtgggataggagcaaggaaattatgcaccgc

SEQ ID NO: 391901 - DNA, 55 bp, Artificial
  Synthetic oligonucleotide
gaacctgaggaattgaatcttagtaagtttatgatggttctccctggagctgcca

SEQ ID NO: 391902 - DNA, 55 bp, Artificial
  Synthetic oligonucleotide
gaacctgagtagagtgggccctcgagggtgatgaaggttgcattctttaaagccc

SEQ ID NO: 391903 - DNA, 60 bp, Artificial
  Synthetic oligonucleotide
gaacctgagtagagtggttctgtgagggtgatgaagattgcattctttaatgcccaggcc

SEQ ID NO: 391904 - DNA, 60 bp, Artificial
  Synthetic oligonucleotide
gaacctgatcgtcttaccggtaggcgtctaatccacgctgatgtagccgcagacaggtga

SEQ ID NO: 391905 - DNA, 60 bp, Artificial
  Synthetic oligonucleotide
gaacctgatgcaactcttgaactctctcaagatcccgacttacgtcgatactatgataac

SEQ ID NO: 391906 - DNA, 56 bp, Artificial
  Synthetic oligonucleotide
gaacctggaagcaatgggctacaattccctggaccttcttggaaaatattgggcta

SEQ ID NO: 391907 - DNA, 56 bp, Artificial
  Synthetic oligonucleotide
gaacctggaagtagctgacccgcgtggcttgtcacgtgagtgcacgtcacggcggc

SEQ ID NO: 391908 - DNA, 57 bp, Artificial
  Synthetic oligonucleotide
gaacctggagtcggaggttctaactggtttatccgtctgaattaagacatgtatatg

SEQ ID NO: 391909 - DNA, 53 bp, Artificial
  Synthetic oligonucleotide
gaacctggatcagcctacctacgtgttttccacagtggaccggtcgcagatca

SEQ ID NO: 391910 - DNA, 55 bp, Artificial
  Synthetic oligonucleotide
gaacctgggacctgatgcttgaaagactaattcattacctgtttaccaacgaagc

SEQ ID NO: 391911 - DNA, 55 bp, Artificial
  Synthetic oligonucleotide
gaacctgtacggtagtaatgacggatggaagtgcgtcaggaaaagctgacactag

SEQ ID NO: 391912 - DNA, 55 bp, Artificial
  Synthetic oligonucleotide
gaacctgtatgaaagagttaaatcacaactaagggacaatgccaatgatctgggg

SEQ ID NO: 391913 - DNA, 55 bp, Artificial
  Synthetic oligonucleotide
gaacctgtgcagtagtaatgactgatggaagtgcatcaggaagggctgacactag

SEQ ID NO: 391914 - DNA, 55 bp, Artificial
  Synthetic oligonucleotide
gaacctgttcagctccgccggtggacaggaagccttcacgggcattttcgatgac

SEQ ID NO: 391915 - DNA, 59 bp, Artificial
  Synthetic oligonucleotide
gaaccttaatgagctgtcctattggtgagtctccctctccatacaattcaaggtttgag

SEQ ID NO: 391916 - DNA, 52 bp, Artificial
  Synthetic oligonucleotide
gaaccttacaccaacattgcaacccaattaaaggggctaaaggcaatttccg

SEQ ID NO: 391917 - DNA, 55 bp, Artificial
  Synthetic oligonucleotide
gaaccttagacaaagtgttgttggtgatcttaaacttcttactgatgggaagttg

SEQ ID NO: 391918 - DNA, 56 bp, Artificial
  Synthetic oligonucleotide
gaaccttcgcccgcaccttgtatgataggcttaggtacgaagtacctcctgtgtac

SEQ ID NO: 391919 - DNA, 59 bp, Artificial
  Synthetic oligonucleotide
gaaccttgaagcacgtttggatagtctgcgggactatttgcgaaagcgccgtggagcca

SEQ ID NO: 391920 - DNA, 59 bp, Artificial
  Synthetic oligonucleotide
gaaccttgagtcagatatccttaccggcttttctgtctgaagcaaggcatgtaaatgca

SEQ ID NO: 391921 - DNA, 60 bp, Artificial
  Synthetic oligonucleotide
gaaccttgagtcagtgattcttaccggcttatctgtctggactaatgcatgtaaatgcat

SEQ ID NO: 391922 - DNA, 59 bp, Artificial
  Synthetic oligonucleotide
gaaccttgagtcagtgattcttaccggtttgtccgtctggactaatgcatgtaggtgaa

SEQ ID NO: 391923 - DNA, 55 bp, Artificial
  Synthetic oligonucleotide
gaaccttgcgaggcattgaagatgctgtgatagacatggaggtgctgtccagtac

SEQ ID NO: 391924 - DNA, 57 bp, Artificial
  Synthetic oligonucleotide
gaacctttcaagcgttgatgttctgtcagtctgctattctcgttctgaataaataac

SEQ ID NO: 391925 - DNA, 55 bp, Artificial
  Synthetic oligonucleotide
gaacctttcccgaaaccacgcccaaatcaattaccaagagcacaattgtgcctag

SEQ ID NO: 391926 - DNA, 55 bp, Artificial
  Synthetic oligonucleotide
gaacgaaaactgatcaactacgctaaaggtaaaccattagaggctgatttaacag

SEQ ID NO: 391927 - DNA, 54 bp, Artificial
  Synthetic oligonucleotide
gaacgaaaggactctagatttccatgactttaacgtaagaaatttatatgaaaa

SEQ ID NO: 391928 - DNA, 54 bp, Artificial
  Synthetic oligonucleotide
gaacgaaagtgttccagccttgctgggccggatgagcttggtagcccaatctga

SEQ ID NO: 391929 - DNA, 51 bp, Artificial
  Synthetic oligonucleotide
gaacgaactgtaacaacgtggctggcgtatacattcgtcaatgaagacgtg

SEQ ID NO: 391930 - DNA, 57 bp, Artificial
  Synthetic oligonucleotide
gaacgaagcatagcaatggaactaataaggatagaactccttacaggtccttaatta

SEQ ID NO: 391931 - DNA, 60 bp, Artificial
  Synthetic oligonucleotide
gaacgaaggagcgtgttaagatcggttgaggagtcaagatacatcatacacatcattcgc

SEQ ID NO: 391932 - DNA, 55 bp, Artificial
  Synthetic oligonucleotide
gaacgaagttatttcgagggcaaaggagatcgatactggagcagttccactaccg

SEQ ID NO: 391933 - DNA, 53 bp, Artificial
  Synthetic oligonucleotide
gaacgaatcatctagtcagtggtaataagttctctccaaatttcgggatcgct

SEQ ID NO: 391934 - DNA, 54 bp, Artificial
  Synthetic oligonucleotide
gaacgaatcctaattcgacactaggtggtaacccctcgctattagtcggaatag

SEQ ID NO: 391935 - DNA, 60 bp, Artificial
  Synthetic oligonucleotide
gaacgaatctgttactttgcttgcagtgcacgcaaccactttccacgtcaccaatccagg

SEQ ID NO: 391936 - DNA, 60 bp, Artificial
  Synthetic oligonucleotide
gaacgaattatctaaacatagtgcagtgcatactggcttattgaatatgttgtgcaaaat

SEQ ID NO: 391937 - DNA, 51 bp, Artificial
  Synthetic oligonucleotide
gaacgacactgaattacctaaccattcgcatttagcgacttacaattctct

SEQ ID NO: 391938 - DNA, 59 bp, Artificial
  Synthetic oligonucleotide
gaacgacattccatacctaggaaagagagaggacatctggtgtggaagccttatcggaa

SEQ ID NO: 391939 - DNA, 53 bp, Artificial
  Synthetic oligonucleotide
gaacgaccaacaagttgggcgcgcctacctacaactggggcgaaaatgaaacg

SEQ ID NO: 391940 - DNA, 55 bp, Artificial
  Synthetic oligonucleotide
gaacgaccaacaagttgggcgcgcctacctacaactggggtagtaatgactcgga

SEQ ID NO: 391941 - DNA, 57 bp, Artificial
  Synthetic oligonucleotide
gaacgaccaatatatttacatgggagaacccttagagaatgatgaagactgtgctca

SEQ ID NO: 391942 - DNA, 57 bp, Artificial
  Synthetic oligonucleotide
gaacgaccaggctctcatagcacatctagagcctgcccacgtcgtgttctcgtcaca

SEQ ID NO: 391943 - DNA, 53 bp, Artificial
  Synthetic oligonucleotide
gaacgaccgacaagttgggcgcgcctacctacaattggggtagcagtgataag

SEQ ID NO: 391944 - DNA, 55 bp, Artificial
  Synthetic oligonucleotide
gaacgaccgataggtcgggcgtgcctacctacacatggggtgagcgtgatacgga

SEQ ID NO: 391945 - DNA, 60 bp, Artificial
  Synthetic oligonucleotide
gaacgacgctgttcggtattaccttatcatctcgcaatgtaccgccgaggcgtgcaccca

SEQ ID NO: 391946 - DNA, 50 bp, Artificial
  Synthetic oligonucleotide
gaacgacgtgagattcaacgaattaaagcacgcaaatagccgtgaggttt

SEQ ID NO: 391947 - DNA, 54 bp, Artificial
  Synthetic oligonucleotide
gaacgacgttaagagagaaacactaatgaagataggtagtttgttcccacaagt

SEQ ID NO: 391948 - DNA, 52 bp, Artificial
  Synthetic oligonucleotide
gaacgactttcccaaaacagtgcatggtttccgatgtatgcttgcaattaag

SEQ ID NO: 391949 - DNA, 55 bp, Artificial
  Synthetic oligonucleotide
gaacgagaccgatgatgttatactattagtgagggtgagagctactgttattgac

SEQ ID NO: 391950 - DNA, 52 bp, Artificial
  Synthetic oligonucleotide
gaacgagagccgttatttcgtcgagcctcacctcctggtgggagccgtcacg

SEQ ID NO: 391951 - DNA, 58 bp, Artificial
  Synthetic oligonucleotide
gaacgagagcgaatctgtccgagaccttcagacctggaggaggagatatgagggacaa

SEQ ID NO: 391952 - DNA, 58 bp, Artificial
  Synthetic oligonucleotide
gaacgagattaccagtatgaaacaagttggggttgcaatcctgcagactgcccagggg

SEQ ID NO: 391953 - DNA, 55 bp, Artificial
  Synthetic oligonucleotide
gaacgagcaaccatgaccaatggcaagtactcgtacacggttcaaccaggacctg

SEQ ID NO: 391954 - DNA, 55 bp, Artificial
  Synthetic oligonucleotide
gaacgagcaatatgtcaaagaaaaggcggatcatttcgagcaagtattgccaatc

SEQ ID NO: 391955 - DNA, 55 bp, Artificial
  Synthetic oligonucleotide
gaacgagcacgtgtgcgtgaatgccaaggatcatgagaaagatcttctcgctcgt

SEQ ID NO: 391956 - DNA, 59 bp, Artificial
  Synthetic oligonucleotide
gaacgagcccacattgtccttcctgtacgactctcaccctctatgacaatacttatggg

SEQ ID NO: 391957 - DNA, 55 bp, Artificial
  Synthetic oligonucleotide
gaacgagcgatagcaggtatgtatgcgcttaattatggcggaacgattcggatgg

SEQ ID NO: 391958 - DNA, 60 bp, Artificial
  Synthetic oligonucleotide
gaacgagctctatccgtttgcctccctcagatccctctttaagacagaccaatagtcaca

SEQ ID NO: 391959 - DNA, 60 bp, Artificial
  Synthetic oligonucleotide
gaacgagctctggcgaataatgcccgcgcagcaccaaagagttctgggatgactttccgc

SEQ ID NO: 391960 - DNA, 51 bp, Artificial
  Synthetic oligonucleotide
gaacgagctgtttaaaatggatgtaacaacgagctatacgtacatgctatc

SEQ ID NO: 391961 - DNA, 55 bp, Artificial
  Synthetic oligonucleotide
gaacgagcttgcgcgtggtacgggtatgttaaatacggcctccttcgagactgtt

SEQ ID NO: 391962 - DNA, 60 bp, Artificial
  Synthetic oligonucleotide
gaacgaggatgggcccttcatcttcgcgagacacgccaacttcaggtaccacatggatgc

SEQ ID NO: 391963 - DNA, 51 bp, Artificial
  Synthetic oligonucleotide
gaacgaggccatggcaagaccgcgatggcgtgtgttcctcccgagtctcag

SEQ ID NO: 391964 - DNA, 56 bp, Artificial
  Synthetic oligonucleotide
gaacgagtatacctagaatttcaacgtgacccattaagattcatgcaattcgcagg

SEQ ID NO: 391965 - DNA, 58 bp, Artificial
  Synthetic oligonucleotide
gaacgagttagaaacggaacatatgatcataaagaattcgaggaggaatcaaaaatca

SEQ ID NO: 391966 - DNA, 55 bp, Artificial
  Synthetic oligonucleotide
gaacgagttcctactgacgtggctatggatggttcgattcccaacacggaagggg

SEQ ID NO: 391967 - DNA, 53 bp, Artificial
  Synthetic oligonucleotide
gaacgagttgtacacaattagaggtccccctgaggctaaatctacagaagtcg

SEQ ID NO: 391968 - DNA, 57 bp, Artificial
  Synthetic oligonucleotide
gaacgagtttttagaatggcctcgtcctttgcgactattgacgctcagtgtttcagg

SEQ ID NO: 391969 - DNA, 52 bp, Artificial
  Synthetic oligonucleotide
gaacgataagtccggtttaccctttagatgttaccggtaatatgagactaac

SEQ ID NO: 391970 - DNA, 52 bp, Artificial
  Synthetic oligonucleotide
gaacgatacagcaagaaatttgaatcgtacagacctcaacatcacactccac

SEQ ID NO: 391971 - DNA, 50 bp, Artificial
  Synthetic oligonucleotide
gaacgataggcacgtcttcctcggttatgaatcggacatttgtaatctac

SEQ ID NO: 391972 - DNA, 53 bp, Artificial
  Synthetic oligonucleotide
gaacgatatcaatcagacatccgtcaaaatctacagtagttggatgctcgtaa

SEQ ID NO: 391973 - DNA, 57 bp, Artificial
  Synthetic oligonucleotide
gaacgatatgcgtgatcgttttcaggttttacggaagttctcatcaactgttactgg

SEQ ID NO: 391974 - DNA, 58 bp, Artificial
  Synthetic oligonucleotide
gaacgatctaaccgcgggggtgcacatcttctgcgacgggagccatcagtacccgtac

SEQ ID NO: 391975 - DNA, 55 bp, Artificial
  Synthetic oligonucleotide
gaacgatcttcgtgatcgttatcaggtcatgcgtaagtttcaggccacagttacc

SEQ ID NO: 391976 - DNA, 53 bp, Artificial
  Synthetic oligonucleotide
gaacgatgaagaatagtagtgaaggttgcagttgcattggacgggaatagtaa

SEQ ID NO: 391977 - DNA, 55 bp, Artificial
  Synthetic oligonucleotide
gaacgatgcagcaggccccaattgtattgacgccggcagagttgacgatgttccc

SEQ ID NO: 391978 - DNA, 60 bp, Artificial
  Synthetic oligonucleotide
gaacgatgctattcatttacgtcaagtcgactctacgatttataaaaccatgcatggaca

SEQ ID NO: 391979 - DNA, 57 bp, Artificial
  Synthetic oligonucleotide
gaacgatggtaatggaactaattcgaatgataaagcggggaatcaatgatcgaaact

SEQ ID NO: 391980 - DNA, 60 bp, Artificial
  Synthetic oligonucleotide
gaacgatgtgagacatatatattctagaatgaatgctaaagttaaagcattggtatctac

SEQ ID NO: 391981 - DNA, 59 bp, Artificial
  Synthetic oligonucleotide
gaacgattaaaacttcagtacgattcattagaagtaagtcatactagatcgataaatca

SEQ ID NO: 391982 - DNA, 60 bp, Artificial
  Synthetic oligonucleotide
gaacgattcttcattaagacattaccaatcaacagaactatctcatttgaaccatgaaca

SEQ ID NO: 391983 - DNA, 55 bp, Artificial
  Synthetic oligonucleotide
gaacgcaatattcacaagcaatgcgtggtgtgcaaccagcacaaaagcggaaatc

SEQ ID NO: 391984 - DNA, 60 bp, Artificial
  Synthetic oligonucleotide
gaacgcacgtggagccgaccacctgctcacagtagacggcgcttccaccatcctcaccaa

SEQ ID NO: 391985 - DNA, 55 bp, Artificial
  Synthetic oligonucleotide
gaacgcagactagacttcataaacgatctcacagaactcgactttagtaattacg

SEQ ID NO: 391986 - DNA, 55 bp, Artificial
  Synthetic oligonucleotide
gaacgcagtccatgatcaacaaaccacatatgtgaaattgctgtcctatggcccc

SEQ ID NO: 391987 - DNA, 60 bp, Artificial
  Synthetic oligonucleotide
gaacgcagtctccagaaagagctggggatttcgcgtgagggagtggctgaacagacggag

SEQ ID NO: 391988 - DNA, 59 bp, Artificial
  Synthetic oligonucleotide
gaacgcatctttaaatttcggttcagctcctgtcggtggtttagctgtcataccttgca

SEQ ID NO: 391989 - DNA, 55 bp, Artificial
  Synthetic oligonucleotide
gaacgcatggtcgtccgttcctgcgggcatcgctgcatgggtacacgcattgggt

SEQ ID NO: 391990 - DNA, 56 bp, Artificial
  Synthetic oligonucleotide
gaacgcattggggaaaagtgaattccagatctacaagaaaagtggaatccaggaag

SEQ ID NO: 391991 - DNA, 55 bp, Artificial
  Synthetic oligonucleotide
gaacgccaatgtattcggagctcaagagcccgactaagaggcatctcgtagttgg

SEQ ID NO: 391992 - DNA, 60 bp, Artificial
  Synthetic oligonucleotide
gaacgccacgttaatgattctgatatgtgtatgcgagccatcggctttgcctggtgcgca

SEQ ID NO: 391993 - DNA, 60 bp, Artificial
  Synthetic oligonucleotide
gaacgccagaatgccactgagatcagagcctctgtcggaagaatggttggtggaatcggg

SEQ ID NO: 391994 - DNA, 60 bp, Artificial
  Synthetic oligonucleotide
gaacgccagaatgctactgagatcagggcatctgttggaagaatggttagtggcattggg

SEQ ID NO: 391995 - DNA, 58 bp, Artificial
  Synthetic oligonucleotide
gaacgcccagtctgtacgatgggcaccaagcaagacgcaaactgtgacgcgcagtcag

SEQ ID NO: 391996 - DNA, 53 bp, Artificial
  Synthetic oligonucleotide
gaacgccctattagtttactactgctggatgtccgatgctatgtctaaggcgt

SEQ ID NO: 391997 - DNA, 58 bp, Artificial
  Synthetic oligonucleotide
gaacgccctcctagtttattactgttggatgtcggataccatgtccaaggcgtcgaca

SEQ ID NO: 391998 - DNA, 60 bp, Artificial
  Synthetic oligonucleotide
gaacgccctcgtgagacctaggagactttactaccagcaagagattggcactggattgca

SEQ ID NO: 391999 - DNA, 59 bp, Artificial
  Synthetic oligonucleotide
gaacgccctgttagtttattactgctggatgtcggatacgcctgcgaaggcatccactt

SEQ ID NO: 392000 - DNA, 55 bp, Artificial
  Synthetic oligonucleotide
gaacgccctgttagtttattattgttggatgtcggactcgtcgtccaaggcatcg

SEQ ID NO: 392001 - DNA, 60 bp, Artificial
  Synthetic oligonucleotide
gaacgccgaccgcaccttatccgacgagcagtacgattggatcgtggcgtatgaacgaca

SEQ ID NO: 392002 - DNA, 59 bp, Artificial
  Synthetic oligonucleotide
gaacgcctaaatgaagaaattgataggcgggtagaagctgcactagaagataggggtga

SEQ ID NO: 392003 - DNA, 55 bp, Artificial
  Synthetic oligonucleotide
gaacgcctgcagattgtcaacaacacggaaggtgactggtggctggctcattccc

SEQ ID NO: 392004 - DNA, 55 bp, Artificial
  Synthetic oligonucleotide
gaacgccttttgaatagactattgcaagaatactcctgggaagcaactatggcat

SEQ ID NO: 392005 - DNA, 55 bp, Artificial
  Synthetic oligonucleotide
gaacgcgcatcagataaaattgcgcaaggggttattattgcgtaccgcgatatgc

SEQ ID NO: 392006 - DNA, 55 bp, Artificial
  Synthetic oligonucleotide
gaacgcgccagaactattctgacgtttaaccaacccctgctgccatttgcatccc

SEQ ID NO: 392007 - DNA, 57 bp, Artificial
  Synthetic oligonucleotide
gaacgcgcccacgctgttttgcccgtcctactatcaccctctaatactattcctatg

SEQ ID NO: 392008 - DNA, 51 bp, Artificial
  Synthetic oligonucleotide
gaacgcgctgtctcttgaccacgccctcgcggcctttgtcctgctggttcc

SEQ ID NO: 392009 - DNA, 50 bp, Artificial
  Synthetic oligonucleotide
gaacgcggcttggtctatgccctcaactccagagctgcataagagaagat

SEQ ID NO: 392010 - DNA, 60 bp, Artificial
  Synthetic oligonucleotide
gaacgcgggctgagtcctacgagatgatactggcgcctatcccatgtggggaatcgcacc

SEQ ID NO: 392011 - DNA, 57 bp, Artificial
  Synthetic oligonucleotide
gaacgcgggggaccagtggagccatgggatgccctttcccatgttcgaatccatccc

SEQ ID NO: 392012 - DNA, 53 bp, Artificial
  Synthetic oligonucleotide
gaacgcgggtcgtagttcaacttttactagttttatcatgtagtagtcgaagg

SEQ ID NO: 392013 - DNA, 55 bp, Artificial
  Synthetic oligonucleotide
gaacgctaataagccaattaagaagactcaagccatgcaactgtacctatactgc

SEQ ID NO: 392014 - DNA, 55 bp, Artificial
  Synthetic oligonucleotide
gaacgctatcctggcagttcagcgtgagcaagtcaaagtgctaggtgtcggcaca

SEQ ID NO: 392015 - DNA, 55 bp, Artificial
  Synthetic oligonucleotide
gaacgctcggtgatgcatgtacctgtaacaccccgaagcttcaccccattgacgc

SEQ ID NO: 392016 - DNA, 60 bp, Artificial
  Synthetic oligonucleotide
gaacgctcgtctctataggcctaactacagtgaggatttcaatttctcactgggcgagtc

SEQ ID NO: 392017 - DNA, 60 bp, Artificial
  Synthetic oligonucleotide
gaacgctctacgtaagtatgcttgcactttcgaggagttgcacttgtgtatggctaggtt

SEQ ID NO: 392018 - DNA, 56 bp, Artificial
  Synthetic oligonucleotide
gaacgctctttgtaacaaggacaacaagaattctatttataacgtaactcaattga

SEQ ID NO: 392019 - DNA, 60 bp, Artificial
  Synthetic oligonucleotide
gaacgctgcagccatagcatggatgatcgttcgagcgatcacatttcccacaacttctac

SEQ ID NO: 392020 - DNA, 52 bp, Artificial
  Synthetic oligonucleotide
gaacgctgccatatcagctttatggaggaaagctcatggtgctgcagctcag

SEQ ID NO: 392021 - DNA, 55 bp, Artificial
  Synthetic oligonucleotide
gaacgcttcgcgtcgaggaggctctctggttacgtgagtgtcagacgatgacagg

SEQ ID NO: 392022 - DNA, 60 bp, Artificial
  Synthetic oligonucleotide
gaacggaacaatacagaagattggaatatgggacggagaagaggagttccatgtgagatg

SEQ ID NO: 392023 - DNA, 57 bp, Artificial
  Synthetic oligonucleotide
gaacggacaccactaatctgtcacgggagattaacgagcgcctgtcacgtttataac

SEQ ID NO: 392024 - DNA, 55 bp, Artificial
  Synthetic oligonucleotide
gaacggaccttggatgcaggtaccactagaagtgaagagagaagcttgcccaggg

SEQ ID NO: 392025 - DNA, 55 bp, Artificial
  Synthetic oligonucleotide
gaacggacggttcgtgtccttccctaagatcgggagtagcagggcataggttgga

SEQ ID NO: 392026 - DNA, 57 bp, Artificial
  Synthetic oligonucleotide
gaacggactcgccgcgagggtggttttgcacaatcgatcactgacttggtttcgtcc

SEQ ID NO: 392027 - DNA, 60 bp, Artificial
  Synthetic oligonucleotide
gaacggactgccaggcgatcgtatccttctacgagaaaatggctaacaacaagccatcac

SEQ ID NO: 392028 - DNA, 59 bp, Artificial
  Synthetic oligonucleotide
gaacggactgctttgagttatgatggggctcttcggagaaggtacctgggcgctatgga

SEQ ID NO: 392029 - DNA, 55 bp, Artificial
  Synthetic oligonucleotide
gaacggagaacacacagaattcgtgaggcaattcgccagagtccattcatgggga

SEQ ID NO: 392030 - DNA, 60 bp, Artificial
  Synthetic oligonucleotide
gaacggagaagatgcttgcaggatctgcagagaggcaaagctgaaggttggagtgaacgg

SEQ ID NO: 392031 - DNA, 55 bp, Artificial
  Synthetic oligonucleotide
gaacggagtttcggtacgtagtgaatgggatgtacccatcgagatgctttgcgac

SEQ ID NO: 392032 - DNA, 55 bp, Artificial
  Synthetic oligonucleotide
gaacggcctcacagccagtgaatctggacgactcatagacttcctcaaggatgtt

SEQ ID NO: 392033 - DNA, 60 bp, Artificial
  Synthetic oligonucleotide
gaacggcgacgactgcactgcatagctggctactggagagggagctgtcaatactgctgg

SEQ ID NO: 392034 - DNA, 60 bp, Artificial
  Synthetic oligonucleotide
gaacgggcgaagcaaccaaggatgtgttacaacatttggctcaaagctttgcatacatgg

SEQ ID NO: 392035 - DNA, 50 bp, Artificial
  Synthetic oligonucleotide
gaacggggctgtaggcgcgtcaaagcgggcggtaggccgtgggcggtaca

SEQ ID NO: 392036 - DNA, 54 bp, Artificial
  Synthetic oligonucleotide
gaacggggttatctagtatttgcatcaacggggagggaatgaccttccccacta

SEQ ID NO: 392037 - DNA, 54 bp, Artificial
  Synthetic oligonucleotide
gaacgggtccaatccgatctgaacatggacggttattcccctaaggccgaggga

SEQ ID NO: 392038 - DNA, 57 bp, Artificial
  Synthetic oligonucleotide
gaacgggttacgctgggctggtgcatagcaattaaccgctcaggctttttggtttga

SEQ ID NO: 392039 - DNA, 51 bp, Artificial
  Synthetic oligonucleotide
gaacggtaaattcagagactgcgctttccattctggctttaatgaggatcc

SEQ ID NO: 392040 - DNA, 53 bp, Artificial
  Synthetic oligonucleotide
gaacggtaaccactggagtgatattaaacggagattgtagtttgtaaagaacc

SEQ ID NO: 392041 - DNA, 59 bp, Artificial
  Synthetic oligonucleotide
gaacggtcagatttgattgcttagcatcgaaggaaggaatctttttgggaccacagaca

SEQ ID NO: 392042 - DNA, 50 bp, Artificial
  Synthetic oligonucleotide
gaacggtccagatcaaaatttataagtccctaaaatggtggtcgtccgtc

SEQ ID NO: 392043 - DNA, 56 bp, Artificial
  Synthetic oligonucleotide
gaacggtcccagccacgcggaagacgccagcccatccccaaagatcggcgttccgc

SEQ ID NO: 392044 - DNA, 60 bp, Artificial
  Synthetic oligonucleotide
gaacggtcctctcaactacgtctccgctttcgagaggtgcacgatgttatggatgtagtc

SEQ ID NO: 392045 - DNA, 58 bp, Artificial
  Synthetic oligonucleotide
gaacggtcgatagttatttgatgctcaaatcctggttttcggctgagcgtctattgtt

SEQ ID NO: 392046 - DNA, 52 bp, Artificial
  Synthetic oligonucleotide
gaacggtcggtcgactggtaaacgtcccaaactagtaataacgaagttgtca

SEQ ID NO: 392047 - DNA, 58 bp, Artificial
  Synthetic oligonucleotide
gaacggtgagccctctgtcaaactctatacctctgttgaagccgcccaattagaccaa

SEQ ID NO: 392048 - DNA, 60 bp, Artificial
  Synthetic oligonucleotide
gaacggtgcaagatgtgatcgcatatcagtggttttcatcatcatataacattgagacac

SEQ ID NO: 392049 - DNA, 59 bp, Artificial
  Synthetic oligonucleotide
gaacggtgtactagacttgtctaggctggagctccctaggctgtttaatgtcacaatac

SEQ ID NO: 392050 - DNA, 55 bp, Artificial
  Synthetic oligonucleotide
gaacggttggacacaaacgagtaaagagcaggttaggaagcaagtagttgttgat

SEQ ID NO: 392051 - DNA, 55 bp, Artificial
  Synthetic oligonucleotide
gaacggtttgtacgctgaaaacgaagagccgcgagcagacttattctacctcacg

SEQ ID NO: 392052 - DNA, 56 bp, Artificial
  Synthetic oligonucleotide
gaacgtaaccaccggcccggggatgagttgtacctgaccgagccagctatagcttg

SEQ ID NO: 392053 - DNA, 55 bp, Artificial
  Synthetic oligonucleotide
gaacgtaatatctgccaacatgtccatattgagaggtgtatccgttattcggttg

SEQ ID NO: 392054 - DNA, 60 bp, Artificial
  Synthetic oligonucleotide
gaacgtacctaatttagcgcattgtactgatataccagccgtagtggctgaggtggttga

SEQ ID NO: 392055 - DNA, 55 bp, Artificial
  Synthetic oligonucleotide
gaacgtatagagtaattgacgatgatactgtgtttgaagcaggaacagatgggag

SEQ ID NO: 392056 - DNA, 55 bp, Artificial
  Synthetic oligonucleotide
gaacgtatgctactgcatagccgaaacactccaatcgttcgcggcggttcgcttg

SEQ ID NO: 392057 - DNA, 54 bp, Artificial
  Synthetic oligonucleotide
gaacgtccgaagacgttaaactacgcttgaaccgtgttcgagtgtctgagttgg

SEQ ID NO: 392058 - DNA, 54 bp, Artificial
  Synthetic oligonucleotide
gaacgtcctactgacccgcacggaggaccgtatcgtgtggaaaacactagccgg

SEQ ID NO: 392059 - DNA, 59 bp, Artificial
  Synthetic oligonucleotide
gaacgtcgagtcaacgagaggtctacagccgagagggagcatggaacgtcttcgcggga

SEQ ID NO: 392060 - DNA, 56 bp, Artificial
  Synthetic oligonucleotide
gaacgtcggacctagaaatgagtcaatgttcacgttcttaaattttccatcgatta

SEQ ID NO: 392061 - DNA, 55 bp, Artificial
  Synthetic oligonucleotide
gaacgtcttccatgtgaaaaggactaccgtgtcaacgggctccttcatcactttg

SEQ ID NO: 392062 - DNA, 60 bp, Artificial
  Synthetic oligonucleotide
gaacgtcttcgcgggacacagcggagatggaggccagaccgggatcctcgtcgcagtcga

SEQ ID NO: 392063 - DNA, 53 bp, Artificial
  Synthetic oligonucleotide
gaacgtgaaatagttaagaattgccacctactggggcaattaagcattgctct

SEQ ID NO: 392064 - DNA, 60 bp, Artificial
  Synthetic oligonucleotide
gaacgtgacatcatggttgtggagtctagagcacaaggagtggacactattgctagatgt

SEQ ID NO: 392065 - DNA, 58 bp, Artificial
  Synthetic oligonucleotide
gaacgtgacttacagtcaaaaattggatcagtcgtttcatcgatagaatggtatttac

SEQ ID NO: 392066 - DNA, 55 bp, Artificial
  Synthetic oligonucleotide
gaacgtgagaatatcacgattgacagctcgactcacgtgaagtttaccgaagacc

SEQ ID NO: 392067 - DNA, 60 bp, Artificial
  Synthetic oligonucleotide
gaacgtgagtatattgagttgtaccttacaagacatgtccataaaatattgaataataca

SEQ ID NO: 392068 - DNA, 53 bp, Artificial
  Synthetic oligonucleotide
gaacgtggaaacaagacagcaaggggtggtggttcagacgaaacaatggcagt

SEQ ID NO: 392069 - DNA, 59 bp, Artificial
  Synthetic oligonucleotide
gaacgtggacttgactggtttgagaacaacagagagatggtaaaaatctgggacactga

SEQ ID NO: 392070 - DNA, 55 bp, Artificial
  Synthetic oligonucleotide
gaacgtggatggttggatcgcatcctcggacatatatttgaactttgtgggatgg

SEQ ID NO: 392071 - DNA, 55 bp, Artificial
  Synthetic oligonucleotide
gaacgtggtgacactgaggtagacggctatgagctatttacgattccattctgat

SEQ ID NO: 392072 - DNA, 56 bp, Artificial
  Synthetic oligonucleotide
gaacgtggttttaagtgaaggcatgttgtctttacagacagccacttttgaggaag

SEQ ID NO: 392073 - DNA, 55 bp, Artificial
  Synthetic oligonucleotide
gaacgtgtccctaacagctattgccaaccaagccacagtgttaatgggtcttggg

SEQ ID NO: 392074 - DNA, 58 bp, Artificial
  Synthetic oligonucleotide
gaacgtgtcgatataaacagtcagaccgaataggtccatgaggtcctggagacggttc

SEQ ID NO: 392075 - DNA, 60 bp, Artificial
  Synthetic oligonucleotide
gaacgtgtgacaatggcatgtgaagaggagtatacacaaagaagtgctatacaagcatgc

SEQ ID NO: 392076 - DNA, 60 bp, Artificial
  Synthetic oligonucleotide
gaacgtgtgatcaagagtgagataattagagttgggaacggcagcttgaatagaaactct

SEQ ID NO: 392077 - DNA, 55 bp, Artificial
  Synthetic oligonucleotide
gaacgtgttcagtctgatatgaacatggatggtgctattccgaaggtcgaaggag

SEQ ID NO: 392078 - DNA, 58 bp, Artificial
  Synthetic oligonucleotide
gaacgttaccctgtgcgcgtacggtgccattgttgcggcatacttgtctacggcgact

SEQ ID NO: 392079 - DNA, 53 bp, Artificial
  Synthetic oligonucleotide
gaacgttcaactatttgatatgacatacatctctcgtcgtatcgaacgtgtaa

SEQ ID NO: 392080 - DNA, 57 bp, Artificial
  Synthetic oligonucleotide
gaacgttcccaaaccaagttttcaagagctcgggctcaagtggttcatgctgcggtc

SEQ ID NO: 392081 - DNA, 54 bp, Artificial
  Synthetic oligonucleotide
gaacgttcccctccgaccaaacgtcgtctaccacgttcttcagagcccaatcgc

SEQ ID NO: 392082 - DNA, 55 bp, Artificial
  Synthetic oligonucleotide
gaacgttcgtgaggctggtcgcccgaactctgtttccgacgttgcgtccccgcga

SEQ ID NO: 392083 - DNA, 55 bp, Artificial
  Synthetic oligonucleotide
gaacgttgctgacctcagagaagtctagtccattcaaaaggctcgttgcgtcttt

SEQ ID NO: 392084 - DNA, 50 bp, Artificial
  Synthetic oligonucleotide
gaacgttgtggcgggtctgtggaggtccctgttgtatgggtgccgggagt

SEQ ID NO: 392085 - DNA, 57 bp, Artificial
  Synthetic oligonucleotide
gaacgtttacagctgcaccattagacaccttgctaggtgggaaggtttgtgtcgacg

SEQ ID NO: 392086 - DNA, 59 bp, Artificial
  Synthetic oligonucleotide
gaacgttttagacatcacagctgacccaacgactgcgccacagatagagagaatgatgc

SEQ ID NO: 392087 - DNA, 55 bp, Artificial
  Synthetic oligonucleotide
gaacgttttggtgttgtacggctcaagtttcaccgcaaatgtgtcatccgggttg

SEQ ID NO: 392088 - DNA, 54 bp, Artificial
  Synthetic oligonucleotide
gaactaaaagcactagttcaaggagcggttttgagatgatttgggacccaaacg

SEQ ID NO: 392089 - DNA, 59 bp, Artificial
  Synthetic oligonucleotide
gaactaaacaaggatgtactttgcgtacatacaggtttcatgtcagaaggacaccacga

SEQ ID NO: 392090 - DNA, 52 bp, Artificial
  Synthetic oligonucleotide
gaactaaacccttccataacttccgagtctctgttcccaccaccgaccttcg

SEQ ID NO: 392091 - DNA, 52 bp, Artificial
  Synthetic oligonucleotide
gaactaaatttctaaatcaagttaaaccctatagtatagaatttgaccagtt

SEQ ID NO: 392092 - DNA, 54 bp, Artificial
  Synthetic oligonucleotide
gaactaacgtgtacttctctgtcggttcgacactctaccctgagaatagagcgg

SEQ ID NO: 392093 - DNA, 60 bp, Artificial
  Synthetic oligonucleotide
gaactaataagagggagacccaaagagaacacaatctggactagcgggagcagcatatcc

SEQ ID NO: 392094 - DNA, 51 bp, Artificial
  Synthetic oligonucleotide
gaactaatcaaataagtgaacgttctgattctcaaatacgtataccaccaa

SEQ ID NO: 392095 - DNA, 52 bp, Artificial
  Synthetic oligonucleotide
gaactaatctggcaagataccacgtcggtaactcttgtcgtatcacagaaag

SEQ ID NO: 392096 - DNA, 55 bp, Artificial
  Synthetic oligonucleotide
gaactaattcggatgataaagcggggaatcaatgatcgaaacttttggagaggcg

SEQ ID NO: 392097 - DNA, 53 bp, Artificial
  Synthetic oligonucleotide
gaactacaaaattccgattaaacgtcacccgcaggcaacgggtgaggttggta

SEQ ID NO: 392098 - DNA, 55 bp, Artificial
  Synthetic oligonucleotide
gaactacaaccaggataccatgtatgtgtgctcccgacctcgaggtttctgggcg

SEQ ID NO: 392099 - DNA, 60 bp, Artificial
  Synthetic oligonucleotide
gaactacaagcacagctgcaacccaaacactcaacactaccaaccaaactagctatgtga

SEQ ID NO: 392100 - DNA, 55 bp, Artificial
  Synthetic oligonucleotide
gaactacaccatttactgctgtgaagaatgccctggaggcaagctggttacagcc

SEQ ID NO: 392101 - DNA, 55 bp, Artificial
  Synthetic oligonucleotide
gaactacacctacctcaatgcaagaaaactaggagaggatgtaccggcatacgtg

SEQ ID NO: 392102 - DNA, 55 bp, Artificial
  Synthetic oligonucleotide
gaactacagaagcaggggcaaggccaatggacatatcaaatatatcaggaaccac

SEQ ID NO: 392103 - DNA, 60 bp, Artificial
  Synthetic oligonucleotide
gaactacccagctttggagtgtctgggattaacgaatccgctgacatgagcattggagtt

SEQ ID NO: 392104 - DNA, 59 bp, Artificial
  Synthetic oligonucleotide
gaactacggaataatatgagctggcaacgtagggtccatgtcccgagttagtgcgccac

SEQ ID NO: 392105 - DNA, 54 bp, Artificial
  Synthetic oligonucleotide
gaactacggttcataagctcgggtaggccgtcaacctaccgccgtatcgtattg

SEQ ID NO: 392106 - DNA, 54 bp, Artificial
  Synthetic oligonucleotide
gaactactcccatcgacgtttgcgttagaaacaaaataaggcgaccgcctgtaa

SEQ ID NO: 392107 - DNA, 56 bp, Artificial
  Synthetic oligonucleotide
gaactactcccatcgacgtttgcgttagaaacaggcgaccgactgtaaatgcgccc

SEQ ID NO: 392108 - DNA, 59 bp, Artificial
  Synthetic oligonucleotide
gaactactcccttctgaaacagctttcgccctcgactggtgtattgcctcattcgataa

SEQ ID NO: 392109 - DNA, 60 bp, Artificial
  Synthetic oligonucleotide
gaactacttctgatcctgaaatgtgttcagttcttataaaatgtctgtccaaagctaaga

SEQ ID NO: 392110 - DNA, 55 bp, Artificial
  Synthetic oligonucleotide
gaactagatacaataatacagacgctacgacaacgcccggtgatagccagagccc

SEQ ID NO: 392111 - DNA, 55 bp, Artificial
  Synthetic oligonucleotide
gaactagcagaatactggcgagcattagtgatcaacgacaatgagcaagaggatg

SEQ ID NO: 392112 - DNA, 60 bp, Artificial
  Synthetic oligonucleotide
gaactagccactgtgcgtgagtattgctacgaagcaaccttgaacacgctgtcaacagtg

SEQ ID NO: 392113 - DNA, 51 bp, Artificial
  Synthetic oligonucleotide
gaactagggagcatgcgaggacggacacacgagggaaggatgtatgtgcgt

SEQ ID NO: 392114 - DNA, 55 bp, Artificial
  Synthetic oligonucleotide
gaactaggtggtattgtgcaacgaacttggaaaggcaaacgatcaaccgatgata

SEQ ID NO: 392115 - DNA, 58 bp, Artificial
  Synthetic oligonucleotide
gaactagtaaaaatggcagcaatgagaggatatctagcgccggaagtggtaccgttcc

SEQ ID NO: 392116 - DNA, 60 bp, Artificial
  Synthetic oligonucleotide
gaactagtactccagctcgggttttagactcagctgtgaaacgagtcagaggcctataca

SEQ ID NO: 392117 - DNA, 60 bp, Artificial
  Synthetic oligonucleotide
gaactagtgccttacattattcctccactgagaatgaactgaacggcatagcaagtggtg

SEQ ID NO: 392118 - DNA, 60 bp, Artificial
  Synthetic oligonucleotide
gaactatagtgaaataaactgccacatacttgccagtgtccagtctctctgagtcatttg

SEQ ID NO: 392119 - DNA, 55 bp, Artificial
  Synthetic oligonucleotide
gaactatcatctacttcatgccctagacggtcagtagaagtccatggcggcactt

SEQ ID NO: 392120 - DNA, 57 bp, Artificial
  Synthetic oligonucleotide
gaactatcctagcctattaagctagggagcgggaagatgagtcgaccacaaaggacc

SEQ ID NO: 392121 - DNA, 58 bp, Artificial
  Synthetic oligonucleotide
gaactatgctaacctcaggtcaactgtcaccagctgactataatgtggttactgatat

SEQ ID NO: 392122 - DNA, 57 bp, Artificial
  Synthetic oligonucleotide
gaactatggttaggctttataactacatcatcaccaggacgaaagttagaagaaaca

SEQ ID NO: 392123 - DNA, 60 bp, Artificial
  Synthetic oligonucleotide
gaactatgtcgctcgactttgtaactactaactacatgtcattaatctcaggtatgtggt

SEQ ID NO: 392124 - DNA, 57 bp, Artificial
  Synthetic oligonucleotide
gaactatgtgaatgcgtttgccatcatgtgtgccactactggcatgcatgctgggaa

SEQ ID NO: 392125 - DNA, 57 bp, Artificial
  Synthetic oligonucleotide
gaactattacaaagaacctttagagctattatccacatacctacacgaatcagacag

SEQ ID NO: 392126 - DNA, 55 bp, Artificial
  Synthetic oligonucleotide
gaactattatcagatcctatcggatggatgacccttcactgagccttgatgcata

SEQ ID NO: 392127 - DNA, 55 bp, Artificial
  Synthetic oligonucleotide
gaactattggtatttagcagctgtcattgtaacaggcatctactttgtgattgct

SEQ ID NO: 392128 - DNA, 56 bp, Artificial
  Synthetic oligonucleotide
gaactatttccttaaatagtagagtcattggtctaagcaatgggttttaatcgatc

SEQ ID NO: 392129 - DNA, 56 bp, Artificial
  Synthetic oligonucleotide
gaactatttgcaggtgcaaccgtcgcgatgcacttttgcgccgagccgttgcacgt

SEQ ID NO: 392130 - DNA, 59 bp, Artificial
  Synthetic oligonucleotide
gaactatttggtgcaaggatccatagccatggtactcttaacatagtaccttctttgaa

SEQ ID NO: 392131 - DNA, 57 bp, Artificial
  Synthetic oligonucleotide
gaactatttggttgttgggtataaacagagttttagaggcttagcatatgcttggct

SEQ ID NO: 392132 - DNA, 59 bp, Artificial
  Synthetic oligonucleotide
gaactcaaatcgtttcagtcgcagtctgacttaccgtgaaacacatcgtgtctgttccc

SEQ ID NO: 392133 - DNA, 60 bp, Artificial
  Synthetic oligonucleotide
gaactcaagtcagttccaccaggctctgttagatccgagggtgaggcctgctggtggctc

SEQ ID NO: 392134 - DNA, 55 bp, Artificial
  Synthetic oligonucleotide
gaactcaagtggatgttgaagacctgattgacattgtcttgacggatcttaagag

SEQ ID NO: 392135 - DNA, 55 bp, Artificial
  Synthetic oligonucleotide
gaactcacaccatcggagactaccgtcaggcttagagcgtacttcaacacgcctg

SEQ ID NO: 392136 - DNA, 55 bp, Artificial
  Synthetic oligonucleotide
gaactcaccagtcaggaaaggcagtgtagcttggttgaggcgggcacaaggttca

SEQ ID NO: 392137 - DNA, 60 bp, Artificial
  Synthetic oligonucleotide
gaactcaccgtcttaaggaaatggtccaaatatcgctgaaatggctcgcactagctaata

SEQ ID NO: 392138 - DNA, 55 bp, Artificial
  Synthetic oligonucleotide
gaactcacgatacaactggcggtgttgacttggcaattgacgtggaacgaaccag

SEQ ID NO: 392139 - DNA, 55 bp, Artificial
  Synthetic oligonucleotide
gaactcagagacagctttaatttatgccaaacatttgatgttttgctctctacaa

SEQ ID NO: 392140 - DNA, 55 bp, Artificial
  Synthetic oligonucleotide
gaactcagattgaccctgtgtataggatgatgtgaatgattctccacaggctaac

SEQ ID NO: 392141 - DNA, 60 bp, Artificial
  Synthetic oligonucleotide
gaactcagcttttgaagtatctctcacagcctctgcagggtcaggtgaaacttcatcctc

SEQ ID NO: 392142 - DNA, 52 bp, Artificial
  Synthetic oligonucleotide
gaactcaggatttgcaaagggggtgttagtccaaaaactgggaccctggaaa

SEQ ID NO: 392143 - DNA, 55 bp, Artificial
  Synthetic oligonucleotide
gaactcaggcctatagagaaaattcaagagaacaagacgagatcatttacagcag

SEQ ID NO: 392144 - DNA, 55 bp, Artificial
  Synthetic oligonucleotide
gaactcaggctacttctctgccaaatgttatccaaggacatctaactcgggactt

SEQ ID NO: 392145 - DNA, 55 bp, Artificial
  Synthetic oligonucleotide
gaactcagtgaaatgtacgggtggaagttacgatttcagtatacctgtaggtgca

SEQ ID NO: 392146 - DNA, 51 bp, Artificial
  Synthetic oligonucleotide
gaactcatccatgttctgtaggatgcgttggaagtctaggatacccgaacg

SEQ ID NO: 392147 - DNA, 55 bp, Artificial
  Synthetic oligonucleotide
gaactcatgagctttgactacacagacccaaccttccgtaattaccccttcccgc

SEQ ID NO: 392148 - DNA, 59 bp, Artificial
  Synthetic oligonucleotide
gaactcatgcaattgaattctgacaccactgatttcggtaagatcagtgttcttcctgg

SEQ ID NO: 392149 - DNA, 54 bp, Artificial
  Synthetic oligonucleotide
gaactcatgggtattcaatatgattataatgaagtttatactagagttaagagc

SEQ ID NO: 392150 - DNA, 55 bp, Artificial
  Synthetic oligonucleotide
gaactcattgacgtacgccccgtgggacccaggccgtccaaaagcatactcgtgt

SEQ ID NO: 392151 - DNA, 57 bp, Artificial
  Synthetic oligonucleotide
gaactccacaaccgaaccgcacaagcgaccgaggtgacccaaccgcaggcatccgac

SEQ ID NO: 392152 - DNA, 58 bp, Artificial
  Synthetic oligonucleotide
gaactccgacggtttcagtctcaacggactgcacacaacgttcgattcgattcggagc

SEQ ID NO: 392153 - DNA, 60 bp, Artificial
  Synthetic oligonucleotide
gaactcctcatggaatttgaagaggcacacgccacaaaacaatctgtcgtggctcttggg

SEQ ID NO: 392154 - DNA, 54 bp, Artificial
  Synthetic oligonucleotide
gaactcctccataaatgcaatgactcttgcatggagacaataagaaatggaacg

SEQ ID NO: 392155 - DNA, 60 bp, Artificial
  Synthetic oligonucleotide
gaactcctcttgtatatacgaggctagtaaggtaaagtgatatgccctggacgcatgtat

SEQ ID NO: 392156 - DNA, 60 bp, Artificial
  Synthetic oligonucleotide
gaactcgaagtgaatagtatgccgagtaaaacagagaggtatgttcacactggtatacaa

SEQ ID NO: 392157 - DNA, 60 bp, Artificial
  Synthetic oligonucleotide
gaactcgactcatgtaacgcaaatgggtgtgaacacaacacagaggacaaatccgtagaa

SEQ ID NO: 392158 - DNA, 55 bp, Artificial
  Synthetic oligonucleotide
gaactcgcctccgttgcacggcctcgggcttttctccgagagacgtgcgtctgct

SEQ ID NO: 392159 - DNA, 55 bp, Artificial
  Synthetic oligonucleotide
gaactcgcggctccgagtaagccaaccgttgagccagcacgcgagactaggaaaa

SEQ ID NO: 392160 - DNA, 54 bp, Artificial
  Synthetic oligonucleotide
gaactcggtaaaccggtcaatcctaaacctgtaaaacacattagcgaagctcac

SEQ ID NO: 392161 - DNA, 60 bp, Artificial
  Synthetic oligonucleotide
gaactcgtcttgagattgagatcagtctctcttccgaatgttatattgttcaatggactc

SEQ ID NO: 392162 - DNA, 58 bp, Artificial
  Synthetic oligonucleotide
gaactcgtgttaatcctcgatcgctatatgtttgccgcctacttccaataaaatagat

SEQ ID NO: 392163 - DNA, 55 bp, Artificial
  Synthetic oligonucleotide
gaactctaaccacacatacgaaggtacaactggcacaattaacgacccaatcgtg

SEQ ID NO: 392164 - DNA, 51 bp, Artificial
  Synthetic oligonucleotide
gaactctaaccattgcatcgagtcttcggaaagtcatatcattgactccaa

SEQ ID NO: 392165 - DNA, 60 bp, Artificial
  Synthetic oligonucleotide
gaactctacagagaccagaagagagcattaggatagatgatctggagttatatgaggaga

SEQ ID NO: 392166 - DNA, 57 bp, Artificial
  Synthetic oligonucleotide
gaactctagctggagtaataaatctcaggaggagatttgggacaacatgacctggat

SEQ ID NO: 392167 - DNA, 55 bp, Artificial
  Synthetic oligonucleotide
gaactctagttggagtaacaaatctcaagaagagatctggaataacatgacatgg

SEQ ID NO: 392168 - DNA, 55 bp, Artificial
  Synthetic oligonucleotide
gaactctattacagaaaagaaaaccatgtaagccaaagacctgtgacctagttgt

SEQ ID NO: 392169 - DNA, 55 bp, Artificial
  Synthetic oligonucleotide
gaactctattttggaaagctgggatgatagaacgggctatcacatgagttctgat

SEQ ID NO: 392170 - DNA, 55 bp, Artificial
  Synthetic oligonucleotide
gaactctcaatgaaaagctccagagtgtctcaagacttgcccacttctcaggacg

SEQ ID NO: 392171 - DNA, 55 bp, Artificial
  Synthetic oligonucleotide
gaactctccttacctggcggactgaaggacttcttccttggaatgtatgtacctt

SEQ ID NO: 392172 - DNA, 60 bp, Artificial
  Synthetic oligonucleotide
gaactctcgtttgtatgtggttgtgattattgatcgtgtcaaatttatgttctttcatta

SEQ ID NO: 392173 - DNA, 58 bp, Artificial
  Synthetic oligonucleotide
gaactctctacataccctgatatatttcttcttgctgggtgtttctaggtttatgagt

SEQ ID NO: 392174 - DNA, 51 bp, Artificial
  Synthetic oligonucleotide
gaactcttagtagcactttagcgacacgtggcggccatccgatataatatt

SEQ ID NO: 392175 - DNA, 59 bp, Artificial
  Synthetic oligonucleotide
gaactctttatagctggaattgggcccaggattgcataggaagatcgtgggaatgcccc

SEQ ID NO: 392176 - DNA, 55 bp, Artificial
  Synthetic oligonucleotide
gaactctttgcgaaattcaaacaaacgctccaccatggcactcaaccaagcaccg

SEQ ID NO: 392177 - DNA, 55 bp, Artificial
  Synthetic oligonucleotide
gaactctttgtggtttaccatagaaatatgggcgatcaaatgtttgcaacattgg

SEQ ID NO: 392178 - DNA, 60 bp, Artificial
  Synthetic oligonucleotide
gaactgaaacacctattgagcagcacaaaccattttgagaaaatccgaatcatccccaga

SEQ ID NO: 392179 - DNA, 58 bp, Artificial
  Synthetic oligonucleotide
gaactgaaacacctgttgagcagtacaaaccactttgagaaaattcaaatcatcccca

SEQ ID NO: 392180 - DNA, 58 bp, Artificial
  Synthetic oligonucleotide
gaactgaataagcgcatgaagatggggttcaccattctcgtgacgttcctcacagacc

SEQ ID NO: 392181 - DNA, 60 bp, Artificial
  Synthetic oligonucleotide
gaactgaatatccatgttctgttcctaagtgagagggggtttctgagggttgcacacaca

SEQ ID NO: 392182 - DNA, 55 bp, Artificial
  Synthetic oligonucleotide
gaactgacaccagcggagaccaccgttcggctgcgcgcctacctaaataccccag

SEQ ID NO: 392183 - DNA, 55 bp, Artificial
  Synthetic oligonucleotide
gaactgacaccaggtcggttccgtacaatagtttgtgggttgtttccgacacaga

SEQ ID NO: 392184 - DNA, 55 bp, Artificial
  Synthetic oligonucleotide
gaactgacatctattaccatgcaactagtgatcgattactaactgtaggccaccc

SEQ ID NO: 392185 - DNA, 60 bp, Artificial
  Synthetic oligonucleotide
gaactgacatggcagagaggataatatccgacaataataaggggtttcagaatgatagga

SEQ ID NO: 392186 - DNA, 59 bp, Artificial
  Synthetic oligonucleotide
gaactgagaagcaggtactgggccataaggaccaggagtggaggaaacactaatcaaca

SEQ ID NO: 392187 - DNA, 60 bp, Artificial
  Synthetic oligonucleotide
gaactgagatcataaggatgatggaaaacgccagacctgaagacgtgtctttccaggggc

SEQ ID NO: 392188 - DNA, 59 bp, Artificial
  Synthetic oligonucleotide
gaactgagcttttctagagaagtggttggtccagttgatggttttgcttctatgggctg

SEQ ID NO: 392189 - DNA, 59 bp, Artificial
  Synthetic oligonucleotide
gaactgagttatggtaactgtgataccaaatgtcagaccccagtgggtgctataaattc

SEQ ID NO: 392190 - DNA, 57 bp, Artificial
  Synthetic oligonucleotide
gaactgataatatagacgagggtctagaattcctttctgacgacccaatggcattca

SEQ ID NO: 392191 - DNA, 52 bp, Artificial
  Synthetic oligonucleotide
gaactgataggtatcacatctcaggtcgcactccgaaccctccgaattccaa

SEQ ID NO: 392192 - DNA, 55 bp, Artificial
  Synthetic oligonucleotide
gaactgatccgccattgccttcttctccggcgtatcgatatatcccgtcatgtcg

SEQ ID NO: 392193 - DNA, 57 bp, Artificial
  Synthetic oligonucleotide
gaactgatgaatccctctccacgcagatatcgctctcgtcattcccgtcgttcctaa

SEQ ID NO: 392194 - DNA, 60 bp, Artificial
  Synthetic oligonucleotide
gaactgatgggacattgccttagacatatctatgatgaatataagcatgagcatgtaaac

SEQ ID NO: 392195 - DNA, 57 bp, Artificial
  Synthetic oligonucleotide
gaactgcaaaccttgccagtaggcggtaccaacaaattcaagtgagcgacccgctct

SEQ ID NO: 392196 - DNA, 55 bp, Artificial
  Synthetic oligonucleotide
gaactgcaatgatagccttaacaccggttggatagcagggctcttctattcccac

SEQ ID NO: 392197 - DNA, 52 bp, Artificial
  Synthetic oligonucleotide
gaactgcaattattaggtcagcattcgggtgatgcaaccattgtacagggtc

SEQ ID NO: 392198 - DNA, 57 bp, Artificial
  Synthetic oligonucleotide
gaactgcacaagcacatggaggtgaggttccccatcctcgtgcagttctttggctat

SEQ ID NO: 392199 - DNA, 60 bp, Artificial
  Synthetic oligonucleotide
gaactgcaccaacaatgtcattggattgcgcgaacgtatcaaatgttcaggctgtgaacc

SEQ ID NO: 392200 - DNA, 54 bp, Artificial
  Synthetic oligonucleotide
gaactgcacgcagctgcctccgcagctgccgtagcctgagggcacacctaccga

SEQ ID NO: 392201 - DNA, 60 bp, Artificial
  Synthetic oligonucleotide
gaactgcagccgtattgttatcacgtcgtggttcgtgttgaacggccggctgtgatggct

SEQ ID NO: 392202 - DNA, 55 bp, Artificial
  Synthetic oligonucleotide
gaactgccataggtcaaatggcaaggcctatgtttctatatgtgagaacaaacgg

SEQ ID NO: 392203 - DNA, 54 bp, Artificial
  Synthetic oligonucleotide
gaactgccccaaatacgttggagtaaagagtcttaaactggctgtcggtccgag

SEQ ID NO: 392204 - DNA, 60 bp, Artificial
  Synthetic oligonucleotide
gaactgcctagaatgcatgagttcagtgtttcttacttgaaggaggcttgcaatcatgct

SEQ ID NO: 392205 - DNA, 58 bp, Artificial
  Synthetic oligonucleotide
gaactgcgagaccaagcgctataaccctactgtcgccgaggtgggtcctaagaatcat

SEQ ID NO: 392206 - DNA, 60 bp, Artificial
  Synthetic oligonucleotide
gaactgcgatgccacatgtcagactattgaaggagtcctaaggactaacaaaacatttca

SEQ ID NO: 392207 - DNA, 55 bp, Artificial
  Synthetic oligonucleotide
gaactgcggtagcgagcaccacgactgcgcgcagaagcacccgcactgcggaatc

SEQ ID NO: 392208 - DNA, 60 bp, Artificial
  Synthetic oligonucleotide
gaactgctagagatgtaccaccacgtgagtgtggtgaaattgtccgagtctgaggcccct

SEQ ID NO: 392209 - DNA, 60 bp, Artificial
  Synthetic oligonucleotide
gaactgctccatgatatgctacggagatgacagacttctttccattcgcaaagggtttgt

SEQ ID NO: 392210 - DNA, 58 bp, Artificial
  Synthetic oligonucleotide
gaactgctcccatcgacgtttgcgtaggcgaccgactgtaaatgcgccctgccgaggg

SEQ ID NO: 392211 - DNA, 60 bp, Artificial
  Synthetic oligonucleotide
gaactgctgacaccagaactgctgacaccgagctttctacaagggactttacgctgggga

SEQ ID NO: 392212 - DNA, 60 bp, Artificial
  Synthetic oligonucleotide
gaactgcttggtataatcatgggcctattaataatggagtgttttatttagacagataca

SEQ ID NO: 392213 - DNA, 53 bp, Artificial
  Synthetic oligonucleotide
gaactggaataaatctggttatcaggaatagtattaggaccgttaaaaagagg

SEQ ID NO: 392214 - DNA, 55 bp, Artificial
  Synthetic oligonucleotide
gaactggacagtggtcgggggacttagagtaccagaccccaactctaagctggcg

SEQ ID NO: 392215 - DNA, 59 bp, Artificial
  Synthetic oligonucleotide
gaactggaccgaattgatcaccaattactcaccatctagagaggataacctacaacgtg

SEQ ID NO: 392216 - DNA, 54 bp, Artificial
  Synthetic oligonucleotide
gaactggactcccggtcgatttaattcgaccgggtctagaacggaacagtggca

SEQ ID NO: 392217 - DNA, 60 bp, Artificial
  Synthetic oligonucleotide
gaactggagatcttgtggatgttagctgaatgtaaaccttaatagattcatcacctctca

SEQ ID NO: 392218 - DNA, 55 bp, Artificial
  Synthetic oligonucleotide
gaactggcaatagacggtgagctggacgttacgagtccaagtggtagcgccgggg

SEQ ID NO: 392219 - DNA, 60 bp, Artificial
  Synthetic oligonucleotide
gaactggcatgttcaatcaagcaggctttgagactgctagtggacttgtttggaccacaa

SEQ ID NO: 392220 - DNA, 55 bp, Artificial
  Synthetic oligonucleotide
gaactggctacacaaaccggaagggatgtgtagttctacagagtataaaccaggg

SEQ ID NO: 392221 - DNA, 56 bp, Artificial
  Synthetic oligonucleotide
gaactggcttcccgtacttacagttggattgccagtccttctgggcccccatgaat

SEQ ID NO: 392222 - DNA, 58 bp, Artificial
  Synthetic oligonucleotide
gaactggcttgccgtacttggtattgctttgccagtctctctgggcccccataaactc

SEQ ID NO: 392223 - DNA, 55 bp, Artificial
  Synthetic oligonucleotide
gaactgggccaagagaaggaaggagacgaactgagccagcagcagagggagtagg

SEQ ID NO: 392224 - DNA, 60 bp, Artificial
  Synthetic oligonucleotide
gaactggggaattgaacctattgataatgtcatggggatgatcggaatattacctgacat

SEQ ID NO: 392225 - DNA, 55 bp, Artificial
  Synthetic oligonucleotide
gaactggggactatggtcaaattactactatgctattaaacaatcaacctgtagc

SEQ ID NO: 392226 - DNA, 60 bp, Artificial
  Synthetic oligonucleotide
gaactgggtgagtcagtgatcatagagtctggtgatccaaatgctcttttgaagcacaga

SEQ ID NO: 392227 - DNA, 55 bp, Artificial
  Synthetic oligonucleotide
gaactggtaaattaagtgttcgatattgtcttctgcaactaccttatcagcgtac

SEQ ID NO: 392228 - DNA, 56 bp, Artificial
  Synthetic oligonucleotide
gaactggtagaatcacaaaacctcccggaattatgcccgagccctctgagactagt

SEQ ID NO: 392229 - DNA, 59 bp, Artificial
  Synthetic oligonucleotide
gaactggtagttctctggtcttcaatgagtcttttgttagtaagactcataattggcta

SEQ ID NO: 392230 - DNA, 55 bp, Artificial
  Synthetic oligonucleotide
gaactggtatcggagtaggtacaggcacactgtctcgactgaactcacgacaccg

SEQ ID NO: 392231 - DNA, 60 bp, Artificial
  Synthetic oligonucleotide
gaactggtattatagacatcattatgagagcactcatccaagagtaagctcagaagtaca

SEQ ID NO: 392232 - DNA, 60 bp, Artificial
  Synthetic oligonucleotide
gaactggtgcgcaagaccagattcctcccagtggctggtggaacaagcagtgtgtacatc

SEQ ID NO: 392233 - DNA, 55 bp, Artificial
  Synthetic oligonucleotide
gaactggtggagtcacaaaacttcccggaactctgtccaagccccctcaggctgg

SEQ ID NO: 392234 - DNA, 55 bp, Artificial
  Synthetic oligonucleotide
gaactggttgatcttctaaccgatgatgtgtccatcaaattagatgaaaccggga

SEQ ID NO: 392235 - DNA, 54 bp, Artificial
  Synthetic oligonucleotide
gaactggtttcccgtacttggtgtttgactgccagtccctttgggcccccatga

SEQ ID NO: 392236 - DNA, 54 bp, Artificial
  Synthetic oligonucleotide
gaactggttttccgtatttggtgttgctttgccagtccctttgggcccccatga

SEQ ID NO: 392237 - DNA, 55 bp, Artificial
  Synthetic oligonucleotide
gaactgtacaatacaagatcgacgaagcagcaattcgaaaattggtacaatgcag

SEQ ID NO: 392238 - DNA, 60 bp, Artificial
  Synthetic oligonucleotide
gaactgtacacgcacccaccagagcacggagctgaacaaccttgtcacgtgtacgctcac

SEQ ID NO: 392239 - DNA, 55 bp, Artificial
  Synthetic oligonucleotide
gaactgtactgatttcaactgtaccggaaagtgcaataaaggcactgaaggaaac

SEQ ID NO: 392240 - DNA, 55 bp, Artificial
  Synthetic oligonucleotide
gaactgtaggtaggaggacacataaaactaattcaatcgaagcaggttggagtgg

SEQ ID NO: 392241 - DNA, 60 bp, Artificial
  Synthetic oligonucleotide
gaactgtatctgtattgttatcacgtcctgatccctgttgaatgattgttgatcgtggtt

SEQ ID NO: 392242 - DNA, 60 bp, Artificial
  Synthetic oligonucleotide
gaactgtatttggatggtgattatgtcttctttcatgagaaatggacggttctggtgatt

SEQ ID NO: 392243 - DNA, 60 bp, Artificial
  Synthetic oligonucleotide
gaactgtcaattcgtatgatgaggattatctctcaggggagacgaggagcccggaggcag

SEQ ID NO: 392244 - DNA, 57 bp, Artificial
  Synthetic oligonucleotide
gaactgtctagcgactgggcgggtgccggaggatcccagatccggagtcaaggggcc

SEQ ID NO: 392245 - DNA, 55 bp, Artificial
  Synthetic oligonucleotide
gaactgtcttcacagctttaactggtccaattggcattgtattaggtgtattggc

SEQ ID NO: 392246 - DNA, 60 bp, Artificial
  Synthetic oligonucleotide
gaactgttagtagagataataatactgccactctgttagatgcttatcaaagagaagtaa

SEQ ID NO: 392247 - DNA, 55 bp, Artificial
  Synthetic oligonucleotide
gaactgtttatgcactgtacaagttgatgtgtatagcacaaggcccttacactgg

SEQ ID NO: 392248 - DNA, 55 bp, Artificial
  Synthetic oligonucleotide
gaacttaagctatccaatgggaggtatccattgtgggcgtcatttaaagacgctg

SEQ ID NO: 392249 - DNA, 53 bp, Artificial
  Synthetic oligonucleotide
gaacttaatatgagaacattggacgctaggggtatttcagtagaacgtgcctt

SEQ ID NO: 392250 - DNA, 59 bp, Artificial
  Synthetic oligonucleotide
gaacttaatctcaaagtatgaatcattacaatttgttgtccatcagtccaaagattcct

SEQ ID NO: 392251 - DNA, 55 bp, Artificial
  Synthetic oligonucleotide
gaacttacacctatgtaagagccaaaatgagaatgaatttgtatcggcaacggag

SEQ ID NO: 392252 - DNA, 54 bp, Artificial
  Synthetic oligonucleotide
gaacttaccccgcgaaacaattgacttacgagaacgtactatcctttgtggaga

SEQ ID NO: 392253 - DNA, 55 bp, Artificial
  Synthetic oligonucleotide
gaacttacgtaaggtaccagcatacctaccaggcaaagttgacggagcgctcact

SEQ ID NO: 392254 - DNA, 60 bp, Artificial
  Synthetic oligonucleotide
gaacttacgtgctggtggtctccctgttcacaccatacataattcaccaacttcagacca

SEQ ID NO: 392255 - DNA, 60 bp, Artificial
  Synthetic oligonucleotide
gaacttagcggagaggccatagccccggttggagtgctcagagtgattgtatcacgcgta

SEQ ID NO: 392256 - DNA, 58 bp, Artificial
  Synthetic oligonucleotide
gaacttaggatacagcactctttaatgaatctgtactgaaatagtgtttactaaatcc

SEQ ID NO: 392257 - DNA, 55 bp, Artificial
  Synthetic oligonucleotide
gaacttaggcaggagggacgatccgacatctctcattccggctaatcctaatcga

SEQ ID NO: 392258 - DNA, 50 bp, Artificial
  Synthetic oligonucleotide
gaacttatctcatcaccatccgagcggttaccacagcaaccaatcctgta

SEQ ID NO: 392259 - DNA, 52 bp, Artificial
  Synthetic oligonucleotide
gaacttatgaattaacaacaatgtggctaacttcttatggattggttatgga

SEQ ID NO: 392260 - DNA, 60 bp, Artificial
  Synthetic oligonucleotide
gaacttatgaccatgatgtatacagagatgaagcattaaacaaccggttccagatcaaag

SEQ ID NO: 392261 - DNA, 55 bp, Artificial
  Synthetic oligonucleotide
gaacttattgcattgaagcctcgatatcaaatataaccacggcaacgagatgtcc

SEQ ID NO: 392262 - DNA, 50 bp, Artificial
  Synthetic oligonucleotide
gaacttattggaaacaacattttgccgcaaggcatccattagccagcgga

SEQ ID NO: 392263 - DNA, 54 bp, Artificial
  Synthetic oligonucleotide
gaacttattggatctggagactccgaccttaaggggtcaaaggtaggacaggga

SEQ ID NO: 392264 - DNA, 57 bp, Artificial
  Synthetic oligonucleotide
gaacttcaatgcagatcgtggttgtaacgtgggttgtgacgactccgtggcgcatga

SEQ ID NO: 392265 - DNA, 60 bp, Artificial
  Synthetic oligonucleotide
gaacttcagacatgagaactgagatcataaggatgatggaaaatgccaaacctgaagatg

SEQ ID NO: 392266 - DNA, 58 bp, Artificial
  Synthetic oligonucleotide
gaacttcaggagaggttacggggccgccccgcttgcacacactctccagtgcaagcgg

SEQ ID NO: 392267 - DNA, 51 bp, Artificial
  Synthetic oligonucleotide
gaacttcatctttgggaacatcgcactgcggatatgttaagaagatatttc

SEQ ID NO: 392268 - DNA, 55 bp, Artificial
  Synthetic oligonucleotide
gaacttccaatctaatgagtgggttgtggacacaatggatgaggctgatgtcaca

SEQ ID NO: 392269 - DNA, 55 bp, Artificial
  Synthetic oligonucleotide
gaacttccagggcaaagtgatgatgacagtcaatgcaaccgatgtcactgacgtg

SEQ ID NO: 392270 - DNA, 57 bp, Artificial
  Synthetic oligonucleotide
gaacttccatatgttttaggtggtggtcaagtatctgtgccaggacatctaccggga

SEQ ID NO: 392271 - DNA, 60 bp, Artificial
  Synthetic oligonucleotide
gaacttcgacagcccctaccgcagcagtgctgctgccccaactgtcctagtcacaaacaa

SEQ ID NO: 392272 - DNA, 60 bp, Artificial
  Synthetic oligonucleotide
gaacttcgcatagtagtactgtaggcagtatcacaatacggttagtagacacctatagtg

SEQ ID NO: 392273 - DNA, 55 bp, Artificial
  Synthetic oligonucleotide
gaacttctacgttccgtatgcgtcatcgtaacgtggttaatattcctgcccgtgg

SEQ ID NO: 392274 - DNA, 54 bp, Artificial
  Synthetic oligonucleotide
gaacttctcttcggggacctaatccttctgtgtccggagtgccgaagagcacat

SEQ ID NO: 392275 - DNA, 55 bp, Artificial
  Synthetic oligonucleotide
gaacttctgctcccgggtctagtgagagcgctgaagtcggagaccaggaagcccg

SEQ ID NO: 392276 - DNA, 54 bp, Artificial
  Synthetic oligonucleotide
gaacttctttactgtcgttgacctccccccattcccccaatttgcgacattagc

SEQ ID NO: 392277 - DNA, 55 bp, Artificial
  Synthetic oligonucleotide
gaacttgaaatagacgctgtagctaaagatttcggatacgtgacgacgaaagacg

SEQ ID NO: 392278 - DNA, 60 bp, Artificial
  Synthetic oligonucleotide
gaacttgaagcaggagtcgcaacagggacatcagatgttgaatgtcttttgaggaagaca

SEQ ID NO: 392279 - DNA, 60 bp, Artificial
  Synthetic oligonucleotide
gaacttgaccctacaggcaaatgtgctagatatttcttcgctgaagataaagaatactgt

SEQ ID NO: 392280 - DNA, 55 bp, Artificial
  Synthetic oligonucleotide
gaacttgagtaacttcgccagaacgtctgttcacctggagccatgttcggattac

SEQ ID NO: 392281 - DNA, 55 bp, Artificial
  Synthetic oligonucleotide
gaacttgcagtacgctctccgttcactaaagtcctcaacggtacgaccaactacc

SEQ ID NO: 392282 - DNA, 60 bp, Artificial
  Synthetic oligonucleotide
gaacttgtgatccgaacagatagtcaagctattgtgagcttctacaagaagagcagtgat

SEQ ID NO: 392283 - DNA, 58 bp, Artificial
  Synthetic oligonucleotide
gaacttgtgccctgtcagattcagggaggataagttacactgtggagtttagtttgcc

SEQ ID NO: 392284 - DNA, 52 bp, Artificial
  Synthetic oligonucleotide
gaacttgtggaactggttgcgattgttaacccgtctgcgctaagctcgcccg

SEQ ID NO: 392285 - DNA, 52 bp, Artificial
  Synthetic oligonucleotide
gaacttgtgggtcacagtctatgatggggtacctgtgtggagagaagcaagc

SEQ ID NO: 392286 - DNA, 54 bp, Artificial
  Synthetic oligonucleotide
gaacttgtttaacgctactctcaccaacggtaaatatttcattcacccgaaggc

SEQ ID NO: 392287 - DNA, 57 bp, Artificial
  Synthetic oligonucleotide
gaactttaacgaatgccttctgcggttagtgaaacgcgtggcattcgctactttgga

SEQ ID NO: 392288 - DNA, 56 bp, Artificial
  Synthetic oligonucleotide
gaactttaatgctaagcagaccctgagtagcgatactcgggctaagctgtatgctc

SEQ ID NO: 392289 - DNA, 55 bp, Artificial
  Synthetic oligonucleotide
gaactttagtgggaaatctcttaatctttccacaccagttcattaacctcagaac

SEQ ID NO: 392290 - DNA, 60 bp, Artificial
  Synthetic oligonucleotide
gaactttatagctcctgaatatgcatacaagatagttaaaaagggagattcagcaatcat

SEQ ID NO: 392291 - DNA, 59 bp, Artificial
  Synthetic oligonucleotide
gaactttcactgctcaagatttaaatggagttcttatggagcgttggattcttggtgag

SEQ ID NO: 392292 - DNA, 54 bp, Artificial
  Synthetic oligonucleotide
gaactttcattttcctgcttcgccacgtaagtctcataaacccgatcggggtgt

SEQ ID NO: 392293 - DNA, 55 bp, Artificial
  Synthetic oligonucleotide
gaactttcggtgtattgcgcttgtgtggaacttacgtgtgcatgcccgcacacta

SEQ ID NO: 392294 - DNA, 60 bp, Artificial
  Synthetic oligonucleotide
gaactttctcaattgcatatgttgctggagcttacattgaaaaggttgggaatatgcaaa

SEQ ID NO: 392295 - DNA, 56 bp, Artificial
  Synthetic oligonucleotide
gaactttgacacaacagaccttcaacactctgcttaaaactctcacaaagaatatg

SEQ ID NO: 392296 - DNA, 54 bp, Artificial
  Synthetic oligonucleotide
gaactttgaccgaagttgtggggaaaactggatcggttgagaggcacacgtttg

SEQ ID NO: 392297 - DNA, 60 bp, Artificial
  Synthetic oligonucleotide
gaactttgacgcatcactgtcaccaatgtggtttaaggccctggacaagctactgcaacg

SEQ ID NO: 392298 - DNA, 55 bp, Artificial
  Synthetic oligonucleotide
gaactttgagaccgcgccagtgactgaaactaggggaaaaattacccactcacac

SEQ ID NO: 392299 - DNA, 53 bp, Artificial
  Synthetic oligonucleotide
gaactttgagggacccggcctagtggaagttcaagagagtgaatactacccca

SEQ ID NO: 392300 - DNA, 50 bp, Artificial
  Synthetic oligonucleotide
gaactttgatccttgggttggagatactttgtagtgctgcagaccacttg

SEQ ID NO: 392301 - DNA, 54 bp, Artificial
  Synthetic oligonucleotide
gaactttgggtactatttttgaagcaggacctacaggttggccttatgtagcgg

SEQ ID NO: 392302 - DNA, 56 bp, Artificial
  Synthetic oligonucleotide
gaactttgtcaatagggcaaaccagcgactaaatcccatgcatcaactcttgagac

SEQ ID NO: 392303 - DNA, 55 bp, Artificial
  Synthetic oligonucleotide
gaactttgtcctaaactggtagaatacaggagttggtcgaaaccgcagtgtcaga

SEQ ID NO: 392304 - DNA, 59 bp, Artificial
  Synthetic oligonucleotide
gaactttgtgtgggcatgtcaccattgaagatagggcttaccatgtttacacctcccca

SEQ ID NO: 392305 - DNA, 53 bp, Artificial
  Synthetic oligonucleotide
gaacttttagttcgctcacacatttctaaccccaagaagcttaaagtacgccc

SEQ ID NO: 392306 - DNA, 55 bp, Artificial
  Synthetic oligonucleotide
gaacttttcccacctgtcgcttgctaaacgtggggctgaatgttggtgtaaagag

SEQ ID NO: 392307 - DNA, 53 bp, Artificial
  Synthetic oligonucleotide
gaacttttgcgcgaacattatgtcgagttgtttcaccgtaacctttggggtcc

SEQ ID NO: 392308 - DNA, 60 bp, Artificial
  Synthetic oligonucleotide
gaactttttaaaacgtgttgaaagactcttcatatgggatgtgtcatcagatcgatcgca

SEQ ID NO: 392309 - DNA, 60 bp, Artificial
  Synthetic oligonucleotide
gaagaaaacttgctcatcgaaaagcgtcagtagtgctgttgatttgtggaaatgaatcgc

SEQ ID NO: 392310 - DNA, 58 bp, Artificial
  Synthetic oligonucleotide
gaagaaaatccccgatggaggtgtggacgattcttatttgagggctcattttatgcag

SEQ ID NO: 392311 - DNA, 52 bp, Artificial
  Synthetic oligonucleotide
gaagaaaatgggacgtccaagcaagttaaccgtaagcctcgaaaaggccaaa

SEQ ID NO: 392312 - DNA, 60 bp, Artificial
  Synthetic oligonucleotide
gaagaaacgattgaagatgacatccgaactgtatggccacatctgaccagatattggtta

SEQ ID NO: 392313 - DNA, 59 bp, Artificial
  Synthetic oligonucleotide
gaagaaagactttccgggcttgtgccacatattaatcatctcaggacctatccttaatg

SEQ ID NO: 392314 - DNA, 55 bp, Artificial
  Synthetic oligonucleotide
gaagaaagagaagtactgaggtggcagtttgacagtgccctagcacgaagacaca

SEQ ID NO: 392315 - DNA, 60 bp, Artificial
  Synthetic oligonucleotide
gaagaaagtcataaacgcattgagcgggattgatttatcacatatgaggagcccgaagat

SEQ ID NO: 392316 - DNA, 57 bp, Artificial
  Synthetic oligonucleotide
gaagaaagttagggagggatactcaccattgtcattgcagatccgccccccagcccc

SEQ ID NO: 392317 - DNA, 54 bp, Artificial
  Synthetic oligonucleotide
gaagaaagttgtatccctggtattgtaaacctccttacaggtactttgaagcac

SEQ ID NO: 392318 - DNA, 51 bp, Artificial
  Synthetic oligonucleotide
gaagaaatactaaacaaacaacaaatccccgagggggtaggattgtttaga

SEQ ID NO: 392319 - DNA, 55 bp, Artificial
  Synthetic oligonucleotide
gaagaaatcatccaatcatctccagcactggaccctcaacatccaagaatacacc

SEQ ID NO: 392320 - DNA, 55 bp, Artificial
  Synthetic oligonucleotide
gaagaaatgctcacagcctgtcaaggagtgggaggaccctctcataaggcaaaga

SEQ ID NO: 392321 - DNA, 58 bp, Artificial
  Synthetic oligonucleotide
gaagaaatggagtagtggccccatgtgggtctcatctccattttagctaatttaattc

SEQ ID NO: 392322 - DNA, 59 bp, Artificial
  Synthetic oligonucleotide
gaagaaatggggcaagcgaaacacgctgtggctgttcggacctgcgaccaccggcaaga

SEQ ID NO: 392323 - DNA, 54 bp, Artificial
  Synthetic oligonucleotide
gaagaaattcgaaaacgtttagggggagccatttggtgacactcagactttcaa

SEQ ID NO: 392324 - DNA, 55 bp, Artificial
  Synthetic oligonucleotide
gaagaaattctcaattcgaaactgcatcccgcgcacctactctacctgggctacg

SEQ ID NO: 392325 - DNA, 56 bp, Artificial
  Synthetic oligonucleotide
gaagaaattctcggttcgtaactgcatcccgcgcacctacgctacctgggtcactt

SEQ ID NO: 392326 - DNA, 54 bp, Artificial
  Synthetic oligonucleotide
gaagaaattggctcgaactattttagacttacagttaagaactgaaccccacca

SEQ ID NO: 392327 - DNA, 57 bp, Artificial
  Synthetic oligonucleotide
gaagaaatttgccccagaagtagtggctttgttccaagccttatcagaaggatgtat

SEQ ID NO: 392328 - DNA, 60 bp, Artificial
  Synthetic oligonucleotide
gaagaacaataaaatagatcgggctgcctgtaaggagcctgatatgaatatgtaccttca

SEQ ID NO: 392329 - DNA, 59 bp, Artificial
  Synthetic oligonucleotide
gaagaacacattctaccctggtgtttcatagggaacagacctgttctatactgcctgtg

SEQ ID NO: 392330 - DNA, 55 bp, Artificial
  Synthetic oligonucleotide
gaagaacacgttgcacatgatacaaactcatgggaatatgataagcagtctgcgg

SEQ ID NO: 392331 - DNA, 57 bp, Artificial
  Synthetic oligonucleotide
gaagaacatctagacgcggtttcacatgcgttttggaattttcggattccgatacga

SEQ ID NO: 392332 - DNA, 60 bp, Artificial
  Synthetic oligonucleotide
gaagaacatgcatcgtgatcgataccaagtcctgcgcaaatggcatgccactgtgacggg

SEQ ID NO: 392333 - DNA, 57 bp, Artificial
  Synthetic oligonucleotide
gaagaacattccctctacaatgttgtcatttagaaaccaacctggcaatcccagtgg

SEQ ID NO: 392334 - DNA, 55 bp, Artificial
  Synthetic oligonucleotide
gaagaacattcctgatgacatatcttccccagacaatgaatttgtccctgctccc

SEQ ID NO: 392335 - DNA, 58 bp, Artificial
  Synthetic oligonucleotide
gaagaaccatcattttcaattatgagaaccagagttagtggattgtatggattgccag

SEQ ID NO: 392336 - DNA, 60 bp, Artificial
  Synthetic oligonucleotide
gaagaacccaattcacctaagataagagtgtacaatactgttatatcatacattgagagc

SEQ ID NO: 392337 - DNA, 56 bp, Artificial
  Synthetic oligonucleotide
gaagaacccagtggccagactgcagattggaaagcaattggtgcctatatcttagg

SEQ ID NO: 392338 - DNA, 53 bp, Artificial
  Synthetic oligonucleotide
gaagaaccttgggaaagaacaagatccgacaggtgttgaaccaggggaccatt

SEQ ID NO: 392339 - DNA, 52 bp, Artificial
  Synthetic oligonucleotide
gaagaacgaagtctgtgttacttaacgaccttattttaggcgttgaccttta

SEQ ID NO: 392340 - DNA, 56 bp, Artificial
  Synthetic oligonucleotide
gaagaacgcgacgttaataagttacgcttgggtgtccgagcgtgacagcacatgtc

SEQ ID NO: 392341 - DNA, 56 bp, Artificial
  Synthetic oligonucleotide
gaagaacggtgttttctttaacgtcgacttccagcgtcgtactggagacgcgctca

SEQ ID NO: 392342 - DNA, 60 bp, Artificial
  Synthetic oligonucleotide
gaagaacgttgttgatgagttagctaacaactacaccagcaataacccaatctggatata

SEQ ID NO: 392343 - DNA, 59 bp, Artificial
  Synthetic oligonucleotide
gaagaactatgtcgaagcgtcctgcagatatagggattttcactcccgtctccaaagta

SEQ ID NO: 392344 - DNA, 57 bp, Artificial
  Synthetic oligonucleotide
gaagaactcctaaggacggtcagactcatcaggttcctccaccaaagcagtaagtag

SEQ ID NO: 392345 - DNA, 57 bp, Artificial
  Synthetic oligonucleotide
gaagaacttagatcattatttaacacagtagcaaccatctattgtgtgcaccaaagg

SEQ ID NO: 392346 - DNA, 52 bp, Artificial
  Synthetic oligonucleotide
gaagaactttgctactctcagtcctgacgtgtacatcatacaatgagtggta

SEQ ID NO: 392347 - DNA, 55 bp, Artificial
  Synthetic oligonucleotide
gaagaagaacgcagtcataggtagaacggagaaaggggaattcaccatgctgggt

SEQ ID NO: 392348 - DNA, 55 bp, Artificial
  Synthetic oligonucleotide
gaagaagaagaccattagattgggctttaatcattaaagcccaataagtaaatgt

SEQ ID NO: 392349 - DNA, 60 bp, Artificial
  Synthetic oligonucleotide
gaagaagaagtattcttcgagagctcactgggagagggcgagaggatctgacgaagataa

SEQ ID NO: 392350 - DNA, 60 bp, Artificial
  Synthetic oligonucleotide
gaagaagactacagcatggcatataggtcatctagtaagggacataacagaaagtttaat

SEQ ID NO: 392351 - DNA, 60 bp, Artificial
  Synthetic oligonucleotide
gaagaagacttctgcagctggtctgaagaagtctgcaaccaaggccgagaggccctcact

SEQ ID NO: 392352 - DNA, 60 bp, Artificial
  Synthetic oligonucleotide
gaagaagagcacaattctgaatactgcagttcctataggatcttgcgttagtaaatgcca

SEQ ID NO: 392353 - DNA, 55 bp, Artificial
  Synthetic oligonucleotide
gaagaagagccaagttatgacagtgtgctctggggaatatcgcaggaaagttccg

SEQ ID NO: 392354 - DNA, 59 bp, Artificial
  Synthetic oligonucleotide
gaagaagagtactgctgaatttcacctatttgtgccacgtcatgatctgctaaacggaa

SEQ ID NO: 392355 - DNA, 58 bp, Artificial
  Synthetic oligonucleotide
gaagaagagtgtattcgacttattgataagattcaaagaacgtacttcactcctagtg

SEQ ID NO: 392356 - DNA, 57 bp, Artificial
  Synthetic oligonucleotide
gaagaagcaaacttttaataaagtgaagtggtatttgggtgcccgctgccacatcga

SEQ ID NO: 392357 - DNA, 60 bp, Artificial
  Synthetic oligonucleotide
gaagaagcaagtcatcatagactgctggcattgttaggttgacaatgcttatgtacacag

SEQ ID NO: 392358 - DNA, 54 bp, Artificial
  Synthetic oligonucleotide
gaagaagcatacttagaggtccaagggtattggaatctgaccccggaaagggga

SEQ ID NO: 392359 - DNA, 55 bp, Artificial
  Synthetic oligonucleotide
gaagaagccattggtgctaatagggaaagggtcgtgcgcatcagcacgcttcccg

SEQ ID NO: 392360 - DNA, 60 bp, Artificial
  Synthetic oligonucleotide
gaagaagccggagtcagttgtgtagacaggttttgcactctgagcgagtacgtggatgtg

SEQ ID NO: 392361 - DNA, 60 bp, Artificial
  Synthetic oligonucleotide
gaagaagcggagacaacgacgaaacgctcctccaagcagtgaggatcatcaaaatcctat

SEQ ID NO: 392362 - DNA, 60 bp, Artificial
  Synthetic oligonucleotide
gaagaagcggagacagcgacgaagcgctcctcacggtgatcagagtcatcaagatcctat

SEQ ID NO: 392363 - DNA, 57 bp, Artificial
  Synthetic oligonucleotide
gaagaaggacattatgccaatgagtgtccaaacagaagtaagaaccctgaaagggta

SEQ ID NO: 392364 - DNA, 60 bp, Artificial
  Synthetic oligonucleotide
gaagaagggagcaggctcagagcttgcaaggtcttgccgcacaaactgacatgacgtttg

SEQ ID NO: 392365 - DNA, 60 bp, Artificial
  Synthetic oligonucleotide
gaagaagggctaattcatctggactgataagagccactatggacaatgtgagaacggtag

SEQ ID NO: 392366 - DNA, 55 bp, Artificial
  Synthetic oligonucleotide
gaagaaggtaaagtaatcaagcgtgctacaggcgggcgcaatgtcacgttaggcg

SEQ ID NO: 392367 - DNA, 57 bp, Artificial
  Synthetic oligonucleotide
gaagaaggtaattaacgcattaagcgggatagatctaacacatcttcgtacgccgaa

SEQ ID NO: 392368 - DNA, 55 bp, Artificial
  Synthetic oligonucleotide
gaagaaggtacagggattgctgcagacaaagaatcgacccagaaagcaatagacc

SEQ ID NO: 392369 - DNA, 55 bp, Artificial
  Synthetic oligonucleotide
gaagaaggtatacagactttagaatatggcgatgagagaatcgatccggtagctt

SEQ ID NO: 392370 - DNA, 53 bp, Artificial
  Synthetic oligonucleotide
gaagaaggtatgctgaacctggcttgtgcgacgtttgaccaaattcttgagtg

SEQ ID NO: 392371 - DNA, 57 bp, Artificial
  Synthetic oligonucleotide
gaagaaggtcaatgtcttaaaagagcggttgactggagaggtgtcttttgaagaggc

SEQ ID NO: 392372 - DNA, 58 bp, Artificial
  Synthetic oligonucleotide
gaagaagtgcacaagcgagaggatgtgcaaactgtattctttaagaaaaccaaaaaga

SEQ ID NO: 392373 - DNA, 55 bp, Artificial
  Synthetic oligonucleotide
gaagaagttctctgttacagtttcaggtggtccatacagccacaaggaacaggct

SEQ ID NO: 392374 - DNA, 55 bp, Artificial
  Synthetic oligonucleotide
gaagaagttgtgtgaggtgttcccagatttaagtctcgaattcaccgactcttct

SEQ ID NO: 392375 - DNA, 56 bp, Artificial
  Synthetic oligonucleotide
gaagaagtttggaacgctctgaatgttatgttagttcatatgcgtgcatatgggca

SEQ ID NO: 392376 - DNA, 51 bp, Artificial
  Synthetic oligonucleotide
gaagaagttttcggggaaccaacggtgtttaaggggtataacatgtgtcaa

SEQ ID NO: 392377 - DNA, 58 bp, Artificial
  Synthetic oligonucleotide
gaagaataacatagtatccagggggatagctttgactgaaaaagcgaaattgaattca

SEQ ID NO: 392378 - DNA, 60 bp, Artificial
  Synthetic oligonucleotide
gaagaataatgcgcagcggatagtttacgatgatgaattgcaaatgcatatacttagagg

SEQ ID NO: 392379 - DNA, 53 bp, Artificial
  Synthetic oligonucleotide
gaagaataccgtatcacagttgttcttgacgaaaggttggcctacgggttcag

SEQ ID NO: 392380 - DNA, 54 bp, Artificial
  Synthetic oligonucleotide
gaagaatataagctggcttttattttacagctatgctcagtgcaactcacctct

SEQ ID NO: 392381 - DNA, 60 bp, Artificial
  Synthetic oligonucleotide
gaagaatcacacgaacagtgtgatgttttggttagttcgagaccgtagaccatatggcac

SEQ ID NO: 392382 - DNA, 59 bp, Artificial
  Synthetic oligonucleotide
gaagaatcacacgaacagtgtgatgtttttcctcgtaagggatcgtaggcctgttgata

SEQ ID NO: 392383 - DNA, 58 bp, Artificial
  Synthetic oligonucleotide
gaagaatccaagctgaatagaaatgaaatcaaaggagtgaaattgagcaatatggggg

SEQ ID NO: 392384 - DNA, 60 bp, Artificial
  Synthetic oligonucleotide
gaagaatcctgaagactgatttatatagtggtaactgcgtagtgcaatgtccgacagaaa

SEQ ID NO: 392385 - DNA, 56 bp, Artificial
  Synthetic oligonucleotide
gaagaatcgggggttgattggtctatcgtatcgcttaagggccgcaggcccgttga

SEQ ID NO: 392386 - DNA, 55 bp, Artificial
  Synthetic oligonucleotide
gaagaatcgtcggcagacaaccaagggagcacaccctatcaatggttgtagatcc

SEQ ID NO: 392387 - DNA, 60 bp, Artificial
  Synthetic oligonucleotide
gaagaatcgttgattcgtgcagacgtatttgccttcgaactggataagcacgtggagatg

SEQ ID NO: 392388 - DNA, 60 bp, Artificial
  Synthetic oligonucleotide
gaagaatcgttgattcttgcactggaacttgccttcgaactggataagcacgtggagatg

SEQ ID NO: 392389 - DNA, 60 bp, Artificial
  Synthetic oligonucleotide
gaagaatcgttgatttgtgcattggtattttccctcgaactggatgagcacgtggagatg

SEQ ID NO: 392390 - DNA, 60 bp, Artificial
  Synthetic oligonucleotide
gaagaatctggggatccttgactccaacatgcaggctgctgagcacgtcaaggctgctgc

SEQ ID NO: 392391 - DNA, 55 bp, Artificial
  Synthetic oligonucleotide
gaagaatcttttaatcctacggaaatatcacacgtcatcctggcttcttacatgc

SEQ ID NO: 392392 - DNA, 60 bp, Artificial
  Synthetic oligonucleotide
gaagaatgaaccagtacgtactgagagtatgtggtgtcaaagtgatagtgatgatcaatc

SEQ ID NO: 392393 - DNA, 59 bp, Artificial
  Synthetic oligonucleotide
gaagaatgcggcatgccccagtggttaattaggttgtatcatctggttcggtcagcctg

SEQ ID NO: 392394 - DNA, 60 bp, Artificial
  Synthetic oligonucleotide
gaagaatggaactcagactcatgataatcataaggtagtgctgtcatcatacgcagcaac

SEQ ID NO: 392395 - DNA, 58 bp, Artificial
  Synthetic oligonucleotide
gaagaatggcagatgctgtgtcccggaaaaagatggatactaaacctactgacccaac

SEQ ID NO: 392396 - DNA, 60 bp, Artificial
  Synthetic oligonucleotide
gaagaatgggacgcatgctaaagccgttgagagaggaggacgcaagcagaggaagaaagc

SEQ ID NO: 392397 - DNA, 60 bp, Artificial
  Synthetic oligonucleotide
gaagaatgtgcgatcatttctcaggagggctgtttgccttaatcattttgatggacttga

SEQ ID NO: 392398 - DNA, 55 bp, Artificial
  Synthetic oligonucleotide
gaagaatgttcttgttatggtcataatcaaagagtgacttgtgtctgcagagaca

SEQ ID NO: 392399 - DNA, 53 bp, Artificial
  Synthetic oligonucleotide
gaagaattagacagggtttagaaagggctttgttataaatgggaagcaggtgg

SEQ ID NO: 392400 - DNA, 58 bp, Artificial
  Synthetic oligonucleotide
gaagaattcttcggagttcgtaccagtacttcacatagtgaagtgataagactggtgg

SEQ ID NO: 392401 - DNA, 57 bp, Artificial
  Synthetic oligonucleotide
gaagaattgatattcataaagtatctgactgaaagtgttccgccgtcaaaaacgaaa

SEQ ID NO: 392402 - DNA, 55 bp, Artificial
  Synthetic oligonucleotide
gaagaattgcttgctgttccaacgtggtgttggatggtttgaaggaccaggacgg

SEQ ID NO: 392403 - DNA, 58 bp, Artificial
  Synthetic oligonucleotide
gaagaatttaaacgacaattatggtataacgcgatctcaagcgttagacttaatcaga

SEQ ID NO: 392404 - DNA, 56 bp, Artificial
  Synthetic oligonucleotide
gaagacaaaacaatatgcacttttctatagacctgatgtagtacagattgataatg

SEQ ID NO: 392405 - DNA, 58 bp, Artificial
  Synthetic oligonucleotide
gaagacaaacgcaggagacaagtggttgacgttatgtcagccattttccagggaccaa

SEQ ID NO: 392406 - DNA, 55 bp, Artificial
  Synthetic oligonucleotide
gaagacaaacttgctgatgatccgcttcttggcttactaccaccgtgtgacccag

SEQ ID NO: 392407 - DNA, 55 bp, Artificial
  Synthetic oligonucleotide
gaagacaacttggactaaatttagatccccagcattgtataacctgggcctcagc

SEQ ID NO: 392408 - DNA, 60 bp, Artificial
  Synthetic oligonucleotide
gaagacaagaaaatgttggaattagcgagagcgttgcagcgtgagtcggagtcgagaagt

SEQ ID NO: 392409 - DNA, 60 bp, Artificial
  Synthetic oligonucleotide
gaagacaagataataatcagatctgagaatctcacaaacaatgccaaaaccataatagtg

SEQ ID NO: 392410 - DNA, 58 bp, Artificial
  Synthetic oligonucleotide
gaagacaagccaattgaaatgggcacttggtgaaaacatggcgccagaaaaggtagac

SEQ ID NO: 392411 - DNA, 56 bp, Artificial
  Synthetic oligonucleotide
gaagacaatgaggcaatatttccctggtttcgaaaaatctaccattttggtcttga

SEQ ID NO: 392412 - DNA, 55 bp, Artificial
  Synthetic oligonucleotide
gaagacaatgtagttgcccaattcgggttcagacagtgcgtttgacgaatatagt

SEQ ID NO: 392413 - DNA, 55 bp, Artificial
  Synthetic oligonucleotide
gaagacacgcttacaccggatgacagatctgtcgttagcggcctagcgcggtatc

SEQ ID NO: 392414 - DNA, 60 bp, Artificial
  Synthetic oligonucleotide
gaagacactgaacggcacactgcacgtgatgttaatagaaacatgcacaccctgttaggt

SEQ ID NO: 392415 - DNA, 55 bp, Artificial
  Synthetic oligonucleotide
gaagacacttcaccatcaaggcatgtaccagagtgttgatttcaaatgcccagca

SEQ ID NO: 392416 - DNA, 58 bp, Artificial
  Synthetic oligonucleotide
gaagacagaattgaaacaacagtggttggagtcactattattaattcacaaggatctg

SEQ ID NO: 392417 - DNA, 60 bp, Artificial
  Synthetic oligonucleotide
gaagacagccataatgggaagctctgcagcctaaacgggatagctcccctacaactggga

SEQ ID NO: 392418 - DNA, 60 bp, Artificial
  Synthetic oligonucleotide
gaagacaggcttgtgtgcagattgatgatttgtcagctggtaaaactgatccatctttag

SEQ ID NO: 392419 - DNA, 55 bp, Artificial
  Synthetic oligonucleotide
gaagacaggtaaggagtacggtctgactatgacccctgctgacaaatcaccctgc

SEQ ID NO: 392420 - DNA, 60 bp, Artificial
  Synthetic oligonucleotide
gaagacaggtgattattcagcaattacaaacgcattactccgtgatactccaatcatact

SEQ ID NO: 392421 - DNA, 54 bp, Artificial
  Synthetic oligonucleotide
gaagacagtaacgtactaacccaagctagagttggagtttcaagaaaagtagac

SEQ ID NO: 392422 - DNA, 60 bp, Artificial
  Synthetic oligonucleotide
gaagacagtacctatcacatggacaggctacctaccaatatcaggtgagatggaaaaagt

SEQ ID NO: 392423 - DNA, 50 bp, Artificial
  Synthetic oligonucleotide
gaagacataaccttattaagatacctgaatcagatatgatcgacgtacca

SEQ ID NO: 392424 - DNA, 60 bp, Artificial
  Synthetic oligonucleotide
gaagacatacacgatgatatatttttcgtggatagtgacgtcgtagttgagaatatgcca

SEQ ID NO: 392425 - DNA, 60 bp, Artificial
  Synthetic oligonucleotide
gaagacatcaatggcataaggagaccaaagcatctatatgtttctatgcctactgctcaa

SEQ ID NO: 392426 - DNA, 54 bp, Artificial
  Synthetic oligonucleotide
gaagacatcgtgttaacgtgtttccgaggttgggttaagcagttacaacttgac

SEQ ID NO: 392427 - DNA, 55 bp, Artificial
  Synthetic oligonucleotide
gaagacattgctatggctttcgtcttagggaccgcctgcacttccttaatcggaa

SEQ ID NO: 392428 - DNA, 60 bp, Artificial
  Synthetic oligonucleotide
gaagaccaacatcgaatgccaatttggccctctcacgtgcatgcgcatcaccggtgaacc

SEQ ID NO: 392429 - DNA, 60 bp, Artificial
  Synthetic oligonucleotide
gaagaccagtcgacattgttctgccagtagttgtgtcgtccgaggcttctagcccaggat

SEQ ID NO: 392430 - DNA, 60 bp, Artificial
  Synthetic oligonucleotide
gaagaccatagacttgggaaggtatcttatgatagttgagatcaatcctggtcgagcatt

SEQ ID NO: 392431 - DNA, 56 bp, Artificial
  Synthetic oligonucleotide
gaagaccccgatggaaacacgtttctatccgcttgacagcctgcgtaccgtaacgc

SEQ ID NO: 392432 - DNA, 53 bp, Artificial
  Synthetic oligonucleotide
gaagacccggttcaccagctaacgttcagatcgtaaagatcgtttttccgctt

SEQ ID NO: 392433 - DNA, 55 bp, Artificial
  Synthetic oligonucleotide
gaagaccgatttaaatagtggcaactgcatggtgcaatgccaaactgagaaaggt

SEQ ID NO: 392434 - DNA, 55 bp, Artificial
  Synthetic oligonucleotide
gaagacctaaagcgctcgccccttgaccttagcggtactgaacgcctagagctta

SEQ ID NO: 392435 - DNA, 51 bp, Artificial
  Synthetic oligonucleotide
gaagacctactgagactggtactaaaggtctaactcttatgagaaggcatg

SEQ ID NO: 392436 - DNA, 55 bp, Artificial
  Synthetic oligonucleotide
gaagacctatcggaaaacgacacaatcaacacaagaacccagcaactcagtgcca

SEQ ID NO: 392437 - DNA, 56 bp, Artificial
  Synthetic oligonucleotide
gaagacctctgcaccctggtaaagaccctgtgtggtcttagagatctaatcccctt

SEQ ID NO: 392438 - DNA, 56 bp, Artificial
  Synthetic oligonucleotide
gaagacctgaggtcacctggataggttcggatacttgtgaacgatttataaccgat

SEQ ID NO: 392439 - DNA, 57 bp, Artificial
  Synthetic oligonucleotide
gaagacctgctaaagacagttcgactaatcaagtttctctaccaaagcagtaagtag

SEQ ID NO: 392440 - DNA, 60 bp, Artificial
  Synthetic oligonucleotide
gaagacctgctgttgggcacattaaaaattgtgtgcccactgtgtaccaccacagcggtg

SEQ ID NO: 392441 - DNA, 56 bp, Artificial
  Synthetic oligonucleotide
gaagacctggatacaagacgcaaaaccaagggccatgggacgaaggtagagttgaa

SEQ ID NO: 392442 - DNA, 60 bp, Artificial
  Synthetic oligonucleotide
gaagacctggattatggtgagtgtgcgtatgtcactgatcctgactcaatattcgattcc

SEQ ID NO: 392443 - DNA, 56 bp, Artificial
  Synthetic oligonucleotide
gaagacctgttactaccccatatggatttggagagttattcaacatgtacgacaac

SEQ ID NO: 392444 - DNA, 60 bp, Artificial
  Synthetic oligonucleotide
gaagaccttagagatgggttgattgtcttggagaattgaatcatgaacaaacaatgagca

SEQ ID NO: 392445 - DNA, 60 bp, Artificial
  Synthetic oligonucleotide
gaagaccttggtaattgtctcaataagtctgactcaagctgggctgttcattggttctca

SEQ ID NO: 392446 - DNA, 53 bp, Artificial
  Synthetic oligonucleotide
gaagacgacaagtacatatatggacgcgtaaatttattcgatctagatgcatc

SEQ ID NO: 392447 - DNA, 55 bp, Artificial
  Synthetic oligonucleotide
gaagacgacagttgatggtgactatgcggaatggggaacattgttatcggacacc

SEQ ID NO: 392448 - DNA, 60 bp, Artificial
  Synthetic oligonucleotide
gaagacgcagaacaacaggtcttctcatcatgattatcccaacagtgatggcattccacc

SEQ ID NO: 392449 - DNA, 60 bp, Artificial
  Synthetic oligonucleotide
gaagacgcagtgtatcgcgacagaaagtttgattcgaacgatgaggatgggtttacgctg

SEQ ID NO: 392450 - DNA, 55 bp, Artificial
  Synthetic oligonucleotide
gaagacgcttatgtatgcagaacatcagactacgcagggtgggcaaggactgaag

SEQ ID NO: 392451 - DNA, 54 bp, Artificial
  Synthetic oligonucleotide
gaagacggaaaacaaacctgtatgggttcattataaaaggaaggtctcacttgc

SEQ ID NO: 392452 - DNA, 55 bp, Artificial
  Synthetic oligonucleotide
gaagacggattcctagatgtctggacttataatgctgaacttctggttctcatgg

SEQ ID NO: 392453 - DNA, 51 bp, Artificial
  Synthetic oligonucleotide
gaagacggcatacgggacggagaccccagggcgcggtgatctagcggccat

SEQ ID NO: 392454 - DNA, 50 bp, Artificial
  Synthetic oligonucleotide
gaagacggccgcccaatttcttccggggagggaagggcctcgctaggtag

SEQ ID NO: 392455 - DNA, 57 bp, Artificial
  Synthetic oligonucleotide
gaagacgggaaggggtgctttgagatatatcatacttgtgacgattcgtgcatggag

SEQ ID NO: 392456 - DNA, 55 bp, Artificial
  Synthetic oligonucleotide
gaagacgtcacactcccggtcgcgaaccttcacgcccagcgggacagcatggatg

SEQ ID NO: 392457 - DNA, 55 bp, Artificial
  Synthetic oligonucleotide
gaagacgtgaccctcgaggcaccggacacgcacttagtatacaaggtggcacccg

SEQ ID NO: 392458 - DNA, 51 bp, Artificial
  Synthetic oligonucleotide
gaagactaatcaacaatttgaattaatagacaatgagttcactgaagtgga

SEQ ID NO: 392459 - DNA, 55 bp, Artificial
  Synthetic oligonucleotide
gaagactacccagaagacattagtagaggatacccacccgactacgatttcggag

SEQ ID NO: 392460 - DNA, 55 bp, Artificial
  Synthetic oligonucleotide
gaagactactctaagttgtataagggcaggagagcaaccatctaccaaaatgcgt

SEQ ID NO: 392461 - DNA, 54 bp, Artificial
  Synthetic oligonucleotide
gaagactacttggactgttagaggtccgaatgtgccgccccgaatacccaaggg

SEQ ID NO: 392462 - DNA, 52 bp, Artificial
  Synthetic oligonucleotide
gaagactatggcatgcctgagatgtacgagtatcaggaaagcgccgtggagg

SEQ ID NO: 392463 - DNA, 59 bp, Artificial
  Synthetic oligonucleotide
gaagactcatctaacatgtttgttgttggtgattcaactttcttccttggaatgggatc

SEQ ID NO: 392464 - DNA, 59 bp, Artificial
  Synthetic oligonucleotide
gaagactcatcttctcaggagacgcactaacctacaaagacctagtcgtttgtatggac

SEQ ID NO: 392465 - DNA, 51 bp, Artificial
  Synthetic oligonucleotide
gaagactgaaaaccgttaaattcaaaattgaaaagggcgggcaaaatggcg

SEQ ID NO: 392466 - DNA, 55 bp, Artificial
  Synthetic oligonucleotide
gaagactgaatacactgaagacgttgacgatgagatgtatagagaatataccatg

SEQ ID NO: 392467 - DNA, 54 bp, Artificial
  Synthetic oligonucleotide
gaagactgcaaaaaaggaacacagaagctcttacaggagttaagtaagttgggg

SEQ ID NO: 392468 - DNA, 60 bp, Artificial
  Synthetic oligonucleotide
gaagactgcgtcatagcagcatcatcggcggtgtctaactacacaccaccagaggatacg

SEQ ID NO: 392469 - DNA, 60 bp, Artificial
  Synthetic oligonucleotide
gaagactgctcattaaagcagatattaatggagggaaacgttaatcaaattctgagtgaa

SEQ ID NO: 392470 - DNA, 55 bp, Artificial
  Synthetic oligonucleotide
gaagactggcggtcgtgttacacccgccgtactgcggctccgcaagcctgaaaag

SEQ ID NO: 392471 - DNA, 60 bp, Artificial
  Synthetic oligonucleotide
gaagactgggggccctgctatgagcatggacaacattacatcaggactcctaggacccct

SEQ ID NO: 392472 - DNA, 60 bp, Artificial
  Synthetic oligonucleotide
gaagacttaaatgctatgtcggatgattctgtcagaaccgtctttgtagagttgatcagg

SEQ ID NO: 392473 - DNA, 53 bp, Artificial
  Synthetic oligonucleotide
gaagacttcaaaaagggacttcgcaagcctctacgcaagtcgaagttcattac

SEQ ID NO: 392474 - DNA, 55 bp, Artificial
  Synthetic oligonucleotide
gaagacttcgacaaggtccattcagttcttggacatcacctcaagatctgggccg

SEQ ID NO: 392475 - DNA, 59 bp, Artificial
  Synthetic oligonucleotide
gaagagaaacagttgtagagtatttggtgtctttcggagtgtggattcgcactcctcca

SEQ ID NO: 392476 - DNA, 60 bp, Artificial
  Synthetic oligonucleotide
gaagagaagacgtctgaagaaccagcgagtgtcgggatcaccatagagggggtcatgagt

SEQ ID NO: 392477 - DNA, 59 bp, Artificial
  Synthetic oligonucleotide
gaagagaatccacaagaagaatttactcatccgaggattgattcacagtttaaattcaa

SEQ ID NO: 392478 - DNA, 57 bp, Artificial
  Synthetic oligonucleotide
gaagagacaacaatatggacctctagcagctccattgtgatgtgtggagtagaccat

SEQ ID NO: 392479 - DNA, 57 bp, Artificial
  Synthetic oligonucleotide
gaagagacctgggactaatagcccagataaactttagaaatgcctggcagtataaaa

SEQ ID NO: 392480 - DNA, 60 bp, Artificial
  Synthetic oligonucleotide
gaagagacgggtactgcgatcgatcgacgaaagtagatggatccttcatctgatcagaat

SEQ ID NO: 392481 - DNA, 58 bp, Artificial
  Synthetic oligonucleotide
gaagagactgagtaagatatgagaactgctagggtttgaaggtatatattggtaaagt

SEQ ID NO: 392482 - DNA, 60 bp, Artificial
  Synthetic oligonucleotide
gaagagacttcgtcctcttcaggtgcacagataactttgcacggctctaattcaagtaag

SEQ ID NO: 392483 - DNA, 52 bp, Artificial
  Synthetic oligonucleotide
gaagagagacttccctggtcaaccagacatgtggaaggatgcctttaaacca

SEQ ID NO: 392484 - DNA, 55 bp, Artificial
  Synthetic oligonucleotide
gaagagagcgttatctcaagcacgagcagtggatcatctcaagaagaagggacgc

SEQ ID NO: 392485 - DNA, 59 bp, Artificial
  Synthetic oligonucleotide
gaagagaggttgtacttgaatatttggtctctttcggagtgtggattcgcactcctcca

SEQ ID NO: 392486 - DNA, 54 bp, Artificial
  Synthetic oligonucleotide
gaagagagtagcacaagtcgaagaacgtactaaaactcccaaggaacagttcct

SEQ ID NO: 392487 - DNA, 60 bp, Artificial
  Synthetic oligonucleotide
gaagagatagacggtgtgaaactagaatcaatgggagttcaccagattttggcgatctac

SEQ ID NO: 392488 - DNA, 55 bp, Artificial
  Synthetic oligonucleotide
gaagagatcacctgcatttctgcctgacactcgtaagatagttggagttctggac

SEQ ID NO: 392489 - DNA, 55 bp, Artificial
  Synthetic oligonucleotide
gaagagatgcaatgttaggtacccatgtagtgtgggatgttggcttgcagtcaac

SEQ ID NO: 392490 - DNA, 60 bp, Artificial
  Synthetic oligonucleotide
gaagagatgcgattatccgatcctaagctctatcgtcgctgcctggcgactagggttaat

SEQ ID NO: 392491 - DNA, 55 bp, Artificial
  Synthetic oligonucleotide
gaagagatggagatgggaatatatcaaattactggggtgcggatacacaaggcga

SEQ ID NO: 392492 - DNA, 60 bp, Artificial
  Synthetic oligonucleotide
gaagagattaccaggtatgagtaacgttgatgttctcactacccatgaagcacaagggaa

SEQ ID NO: 392493 - DNA, 60 bp, Artificial
  Synthetic oligonucleotide
gaagagcaaacgttcgttgatgcccaatcaacgagctcaggcggtagcaacgtgaaagac

SEQ ID NO: 392494 - DNA, 55 bp, Artificial
  Synthetic oligonucleotide
gaagagcacacaggttactggtgaagccagtaaaggaaaggaaagcgccagtggt

SEQ ID NO: 392495 - DNA, 58 bp, Artificial
  Synthetic oligonucleotide
gaagagcatcccagtgcgggaaaggacccaaagaagactggaggcccaatctatcgaa

SEQ ID NO: 392496 - DNA, 58 bp, Artificial
  Synthetic oligonucleotide
gaagagcatgagagatatcacagcaattggagagcaatggctagtgattttaacatac

SEQ ID NO: 392497 - DNA, 60 bp, Artificial
  Synthetic oligonucleotide
gaagagcatggaactctcttgaggtggaagactatggatttggcatgttcacgaccaaca

SEQ ID NO: 392498 - DNA, 59 bp, Artificial
  Synthetic oligonucleotide
gaagagccaacaaaaccgaggtcttgacgcctcaatggtatgataagtatagtgaaata

SEQ ID NO: 392499 - DNA, 60 bp, Artificial
  Synthetic oligonucleotide
gaagagccaataagggcattccgattgattgagttggctaaagaggcaatgtatgatcga

SEQ ID NO: 392500 - DNA, 55 bp, Artificial
  Synthetic oligonucleotide
gaagagcctaacacacctcgacttcgcaaccagttgtatcattctccatgaccgg

SEQ ID NO: 392501 - DNA, 60 bp, Artificial
  Synthetic oligonucleotide
gaagagctatatttctagttcctgttcataccacagctcactctcatctggtccaaagta

SEQ ID NO: 392502 - DNA, 55 bp, Artificial
  Synthetic oligonucleotide
gaagagctctattcccaaccaacttttgacactcacttttgtcgttagagttacg

SEQ ID NO: 392503 - DNA, 59 bp, Artificial
  Synthetic oligonucleotide
gaagagctctccgtatcggatgcactgagctctgcccttgggcctatcgccgagacgtt

SEQ ID NO: 392504 - DNA, 56 bp, Artificial
  Synthetic oligonucleotide
gaagagctctgggttcacctctcttgtgaaacttccgaaggaacctgtacattact

SEQ ID NO: 392505 - DNA, 58 bp, Artificial
  Synthetic oligonucleotide
gaagagctgagacattccgtccgctaattcattctctgggagaattccctgccttcat

SEQ ID NO: 392506 - DNA, 60 bp, Artificial
  Synthetic oligonucleotide
gaagagctgtctaattgcattagggccatacagagtgcaggtagtatatgagaggaccta

SEQ ID NO: 392507 - DNA, 51 bp, Artificial
  Synthetic oligonucleotide
gaagagcttaggtcactatttaatacagtagtaaccctctattgggtacat

SEQ ID NO: 392508 - DNA, 57 bp, Artificial
  Synthetic oligonucleotide
gaagaggaagtgcttacaggcaacctccaaacactgaaagtaagagtacatgagggg

SEQ ID NO: 392509 - DNA, 60 bp, Artificial
  Synthetic oligonucleotide
gaagaggaatacaacaaatttctagctaaaatcagaagcgtgccaatcggaagagcatta

SEQ ID NO: 392510 - DNA, 52 bp, Artificial
  Synthetic oligonucleotide
gaagaggacaactgcactggactatactcaaatactttgcgaaatgctatcc

SEQ ID NO: 392511 - DNA, 60 bp, Artificial
  Synthetic oligonucleotide
gaagaggacatcgaaggaaagatgaagaggtgtggtgtacagctgctcgaagattaccgc

SEQ ID NO: 392512 - DNA, 55 bp, Artificial
  Synthetic oligonucleotide
gaagaggacgtgcttgaagcccaggttgatatgtttcccttgcacaatgcggtgg

SEQ ID NO: 392513 - DNA, 55 bp, Artificial
  Synthetic oligonucleotide
gaagaggcaggtcccctaaaggaagaactccctcgcctcgcagacaaaggtctaa

SEQ ID NO: 392514 - DNA, 50 bp, Artificial
  Synthetic oligonucleotide
gaagaggcgctcgatgttggccttaacattatgataactgacgataaacg

SEQ ID NO: 392515 - DNA, 59 bp, Artificial
  Synthetic oligonucleotide
gaagagggagattcaatatataagtgggatttggttccgatagagcgagatgtaaacac

SEQ ID NO: 392516 - DNA, 52 bp, Artificial
  Synthetic oligonucleotide
gaagagggatgttgggacgcggaatgcgacgctacaggcgacggcgtgctat

SEQ ID NO: 392517 - DNA, 57 bp, Artificial
  Synthetic oligonucleotide
gaagagggctatgctgagtctaattgacggaaagggaccgatacgttttgtgttggc

SEQ ID NO: 392518 - DNA, 57 bp, Artificial
  Synthetic oligonucleotide
gaagaggtaagagcgatggcctattaggcacaggggttagcgctgctatggagatca

SEQ ID NO: 392519 - DNA, 55 bp, Artificial
  Synthetic oligonucleotide
gaagaggttatagttcctaaagtatctcctaatcagtaccgggtattccgcttgc

SEQ ID NO: 392520 - DNA, 55 bp, Artificial
  Synthetic oligonucleotide
gaagaggttatttaatccgtggtttgctattgctcctttgattcaggatcatcca

SEQ ID NO: 392521 - DNA, 59 bp, Artificial
  Synthetic oligonucleotide
gaagaggttgttgggtgtttgaggtcgaacactctgcaattcgtgcactggaacttgcc

SEQ ID NO: 392522 - DNA, 60 bp, Artificial
  Synthetic oligonucleotide
gaagagtacactcagagttatctccagtctctgctgaagaagtgggaaggagacatagat

SEQ ID NO: 392523 - DNA, 56 bp, Artificial
  Synthetic oligonucleotide
gaagagtacttttcagagaacggttacatctttatgccctctaaatcaaatccaga

SEQ ID NO: 392524 - DNA, 55 bp, Artificial
  Synthetic oligonucleotide
gaagagtagaaagctattgagtaaactccatagactacggcgatagtgcagatgc

SEQ ID NO: 392525 - DNA, 55 bp, Artificial
  Synthetic oligonucleotide
gaagagtatatcctatgggaatccctggcttccccttatgtccagtccctccccg

SEQ ID NO: 392526 - DNA, 55 bp, Artificial
  Synthetic oligonucleotide
gaagagtatggaggcagggctctaaagcctactactaacatgaaaccctgttacg

SEQ ID NO: 392527 - DNA, 56 bp, Artificial
  Synthetic oligonucleotide
gaagagtctagattaaataggaacgaaatcaaaggagtaaaattgagcaacatggg

SEQ ID NO: 392528 - DNA, 60 bp, Artificial
  Synthetic oligonucleotide
gaagagtgaacccgttgctgatatgttatatcgtttatcgcatgagaattggagtattca

SEQ ID NO: 392529 - DNA, 58 bp, Artificial
  Synthetic oligonucleotide
gaagagtgctgcaacaataggagcacattctcagagatcagacaccgattggccgttg

SEQ ID NO: 392530 - DNA, 56 bp, Artificial
  Synthetic oligonucleotide
gaagagtggagcaggttagggtaaccaatcaggcacagtttcttgaaaacgcggga

SEQ ID NO: 392531 - DNA, 57 bp, Artificial
  Synthetic oligonucleotide
gaagagttctggggcggaattctaaaggctattcacaatagtcatgagtatatctgt

SEQ ID NO: 392532 - DNA, 55 bp, Artificial
  Synthetic oligonucleotide
gaagagttgtggtttatgtcccatagaggtttgctgattgagggtatgtacgtgc

SEQ ID NO: 392533 - DNA, 51 bp, Artificial
  Synthetic oligonucleotide
gaagagtttggttgcctggctgtaagtgatgggtgtgtatttgggtcgtgc

SEQ ID NO: 392534 - DNA, 53 bp, Artificial
  Synthetic oligonucleotide
gaagataaccatgactaaaaaaccaggagggcccggtaagaaccgggctatca

SEQ ID NO: 392535 - DNA, 55 bp, Artificial
  Synthetic oligonucleotide
gaagataagggtgcatgagggatatgaggagttcacaatggttgggaaaagggca

SEQ ID NO: 392536 - DNA, 60 bp, Artificial
  Synthetic oligonucleotide
gaagatacagcacttggaggagtgttcttgttatgtggacattgacgtatactgtgtatg

SEQ ID NO: 392537 - DNA, 53 bp, Artificial
  Synthetic oligonucleotide
gaagatacagctcgcacggccaacctagcattagagatcgatgctgctacaga

SEQ ID NO: 392538 - DNA, 55 bp, Artificial
  Synthetic oligonucleotide
gaagatacaggggcgactagtccatggtcaatctggtatgttgctcactggggcc

SEQ ID NO: 392539 - DNA, 57 bp, Artificial
  Synthetic oligonucleotide
gaagatacccacctcataatcaacctaacactaaggttttagacgatatagaatgta

SEQ ID NO: 392540 - DNA, 55 bp, Artificial
  Synthetic oligonucleotide
gaagatacccgagaggacacttcaatttctctgatctacgattcccacgtgaaac

SEQ ID NO: 392541 - DNA, 56 bp, Artificial
  Synthetic oligonucleotide
gaagatacctgaagatatagctggggcattgagattcatagaggaacagaattcgt

SEQ ID NO: 392542 - DNA, 59 bp, Artificial
  Synthetic oligonucleotide
gaagatacgcaatactttgcgtatcgtagtacatgtaccctcatacggcgaacttacac

SEQ ID NO: 392543 - DNA, 60 bp, Artificial
  Synthetic oligonucleotide
gaagatacgcaattccttgcgtatcgtagtacatgatcctatcatactgcgtatttacat

SEQ ID NO: 392544 - DNA, 57 bp, Artificial
  Synthetic oligonucleotide
gaagatacttggttggtcgctcatgtgcaaccccagcattagacctggcagatgagg

SEQ ID NO: 392545 - DNA, 60 bp, Artificial
  Synthetic oligonucleotide
gaagatagacttgtcgcagttagatgaatcaaattacataagggaagaggacctccagtg

SEQ ID NO: 392546 - DNA, 60 bp, Artificial
  Synthetic oligonucleotide
gaagatagaggtcttttatatggtcctgaatatgtacatcacagatatcaagaatcatgt

SEQ ID NO: 392547 - DNA, 55 bp, Artificial
  Synthetic oligonucleotide
gaagatagccctggtgcacaagagggaattggataactatgagagtttgcccatc

SEQ ID NO: 392548 - DNA, 52 bp, Artificial
  Synthetic oligonucleotide
gaagatagtgggaattccccctttaatttgaatgggcttcccgtactttgtg

SEQ ID NO: 392549 - DNA, 55 bp, Artificial
  Synthetic oligonucleotide
gaagatagttgttaattcatctggcacgattctcacttgccaccctcgattatgc

SEQ ID NO: 392550 - DNA, 56 bp, Artificial
  Synthetic oligonucleotide
gaagatataaatagaaccttcaaaccaatgatagggccaaggccccttgtcaatgg

SEQ ID NO: 392551 - DNA, 56 bp, Artificial
  Synthetic oligonucleotide
gaagatataaatcgaactttcaagccggtgatagggccaaggccccttgtcaatgg

SEQ ID NO: 392552 - DNA, 50 bp, Artificial
  Synthetic oligonucleotide
gaagatataattgctctttgccatcagggcattaacaacaagttgtcggc

SEQ ID NO: 392553 - DNA, 59 bp, Artificial
  Synthetic oligonucleotide
gaagatatcggtcaacagaaggatttgtcagcactaaagttatgtattgaagtttggag

SEQ ID NO: 392554 - DNA, 55 bp, Artificial
  Synthetic oligonucleotide
gaagatatgactccgagacatggtggcggaacgggtgagctggcagtcgcattat

SEQ ID NO: 392555 - DNA, 53 bp, Artificial
  Synthetic oligonucleotide
gaagatatttcttcatttgccctaccaaaaggtaggatgcccctttaagggag

SEQ ID NO: 392556 - DNA, 56 bp, Artificial
  Synthetic oligonucleotide
gaagatcaactctccgcctgcgaactggttttttcttggctattttgtgttggacc

SEQ ID NO: 392557 - DNA, 50 bp, Artificial
  Synthetic oligonucleotide
gaagatcaagagtatcataaagatgcgtagcacgacgcgcatcattgatg

SEQ ID NO: 392558 - DNA, 60 bp, Artificial
  Synthetic oligonucleotide
gaagatcaagtcatgtggcaggatgttgtggacagtctttaagtcagggagcctcgcctt

SEQ ID NO: 392559 - DNA, 60 bp, Artificial
  Synthetic oligonucleotide
gaagatcaatatgccaatgtcagtgaagacctgtgatgaggagtgtagcccagtcaactt

SEQ ID NO: 392560 - DNA, 55 bp, Artificial
  Synthetic oligonucleotide
gaagatcatccaggacactactgtccaatattgtccattcattcagcagggatga

SEQ ID NO: 392561 - DNA, 59 bp, Artificial
  Synthetic oligonucleotide
gaagatcccacatccagggaccttgtagtcagttatgtcaatactcatatgggcttaaa

SEQ ID NO: 392562 - DNA, 59 bp, Artificial
  Synthetic oligonucleotide
gaagatcccagacgataagatacagcatttggaagaatgttcatgttacacagatgttg

SEQ ID NO: 392563 - DNA, 55 bp, Artificial
  Synthetic oligonucleotide
gaagatcccctttaaggatggttcaaagattatcatcaccgtcttgtggaacttg

SEQ ID NO: 392564 - DNA, 54 bp, Artificial
  Synthetic oligonucleotide
gaagatcgtccgcgtaagctctccgtccgtgcgtgtcagtctccgttcggcgtg

SEQ ID NO: 392565 - DNA, 60 bp, Artificial
  Synthetic oligonucleotide
gaagatctgagagtatcaagcttcatccgaggaacaagagtggtcccgagaggacagctg

SEQ ID NO: 392566 - DNA, 55 bp, Artificial
  Synthetic oligonucleotide
gaagatctgagagtgtcaagctttatcagaggaaccagagtggtcccaagagggc

SEQ ID NO: 392567 - DNA, 56 bp, Artificial
  Synthetic oligonucleotide
gaagatctgctacaaaagggagtggtaatatttaatgagcttgaaggaggatatca

SEQ ID NO: 392568 - DNA, 59 bp, Artificial
  Synthetic oligonucleotide
gaagatcttaggaacaaaactggaggctcttctatcgtagtaaacccaagtgatgcatc

SEQ ID NO: 392569 - DNA, 60 bp, Artificial
  Synthetic oligonucleotide
gaagatgacaatgaggcgagacgcacacatcttattattaccctttcgactcaacatgga

SEQ ID NO: 392570 - DNA, 50 bp, Artificial
  Synthetic oligonucleotide
gaagatgacagcttacaacattatggaactaagcgtcactcaggacgtta

SEQ ID NO: 392571 - DNA, 51 bp, Artificial
  Synthetic oligonucleotide
gaagatgactttgtcacttcagaatttctcaatccggaagaccaaatgaca

SEQ ID NO: 392572 - DNA, 60 bp, Artificial
  Synthetic oligonucleotide
gaagatgatatcccgatcgaaacattgattcgttactgcgactcgctgacgacatttgtt

SEQ ID NO: 392573 - DNA, 60 bp, Artificial
  Synthetic oligonucleotide
gaagatgattcgtgagtactccatgccgaaagctaaccacttcaatgtactagatgagta

SEQ ID NO: 392574 - DNA, 55 bp, Artificial
  Synthetic oligonucleotide
gaagatgcaaacaacatcaacagatcattatcgatacagccaacagctaaagtac

SEQ ID NO: 392575 - DNA, 53 bp, Artificial
  Synthetic oligonucleotide
gaagatgccaacaaaccactcagacaaggtgctctcatatctctcttatgctc

SEQ ID NO: 392576 - DNA, 56 bp, Artificial
  Synthetic oligonucleotide
gaagatgcggccatggccaacgcgagctacatgcttgccatgcatcgcacctgcaa

SEQ ID NO: 392577 - DNA, 55 bp, Artificial
  Synthetic oligonucleotide
gaagatgcttatgatttggttgacactacccaaacctccctggagttgacggttg

SEQ ID NO: 392578 - DNA, 60 bp, Artificial
  Synthetic oligonucleotide
gaagatggaaccaaacgcagatagggctgttagtgaaccaatcacatgatgtcgcccaga

SEQ ID NO: 392579 - DNA, 50 bp, Artificial
  Synthetic oligonucleotide
gaagatggcgggttataagtaggaaactgtgaatcaggcacatcatacat

SEQ ID NO: 392580 - DNA, 60 bp, Artificial
  Synthetic oligonucleotide
gaagatgggtttctagatgtatggacttacaatgcagaacttctggtgctcatggaaaac

SEQ ID NO: 392581 - DNA, 55 bp, Artificial
  Synthetic oligonucleotide
gaagatggttgtattctctactatcgcgtattgtgaagttttgagtttcctcgtc

SEQ ID NO: 392582 - DNA, 60 bp, Artificial
  Synthetic oligonucleotide
gaagatggtttatgcgagcagctcaggttgttacaccagtggtttgtggaccagatatgg

SEQ ID NO: 392583 - DNA, 55 bp, Artificial
  Synthetic oligonucleotide
gaagatgtactcacactcatgacgcttccaactcaaagtcagttacttcggtact

SEQ ID NO: 392584 - DNA, 55 bp, Artificial
  Synthetic oligonucleotide
gaagatgtcaccataattggccgtggtggcgtgaaacgtgaactcatccgaaaag

SEQ ID NO: 392585 - DNA, 60 bp, Artificial
  Synthetic oligonucleotide
gaagatgtcggttggaatgcaaactcttttaagcttgacatacatcattatacactcaca

SEQ ID NO: 392586 - DNA, 60 bp, Artificial
  Synthetic oligonucleotide
gaagatgtctatgagtcaattcgatggacaaaagacccccgaaacacacaagaccatgtg

SEQ ID NO: 392587 - DNA, 60 bp, Artificial
  Synthetic oligonucleotide
gaagatgtgccgccgagtgttgtggttctataccacgactctgtcaggcttggcctggga

SEQ ID NO: 392588 - DNA, 60 bp, Artificial
  Synthetic oligonucleotide
gaagatgtgttgccagactcattgttttctttccgccatgtcgatattcttcttaagcgt

SEQ ID NO: 392589 - DNA, 60 bp, Artificial
  Synthetic oligonucleotide
gaagatgtttctctactgcaaaagcctcaaggaagtatcaaccagagacctctatgccaa

SEQ ID NO: 392590 - DNA, 58 bp, Artificial
  Synthetic oligonucleotide
gaagattatagcttgagcgaagtccggtctatactagccgcccgcaagggaaaaatga

SEQ ID NO: 392591 - DNA, 59 bp, Artificial
  Synthetic oligonucleotide
gaagattatcaggggagactgtgtaatccactaaatccttttgtcagccacaaagagat

SEQ ID NO: 392592 - DNA, 56 bp, Artificial
  Synthetic oligonucleotide
gaagattatgacggcgctacggctgtgacgttctacgggaaacggacgtttctgtc

SEQ ID NO: 392593 - DNA, 60 bp, Artificial
  Synthetic oligonucleotide
gaagattcattgcggaaatgagacagcgtgtgcaagctgacagaaacgtcgttaattatc

SEQ ID NO: 392594 - DNA, 60 bp, Artificial
  Synthetic oligonucleotide
gaagattccagcatagattcttaaattgttatgccatgtattgcagtgaatgtgacatgt

SEQ ID NO: 392595 - DNA, 54 bp, Artificial
  Synthetic oligonucleotide
gaagattcgtagggggtcgcacccgtctgtggttgaggtggagaaaaccaacgc

SEQ ID NO: 392596 - DNA, 60 bp, Artificial
  Synthetic oligonucleotide
gaagattctacatacagatgtgcactgaactcaaactaagtgacaacgaggggaggctga

SEQ ID NO: 392597 - DNA, 54 bp, Artificial
  Synthetic oligonucleotide
gaagattctatagctggttaattgagaagaacccatacgctgacttggcatctg

SEQ ID NO: 392598 - DNA, 58 bp, Artificial
  Synthetic oligonucleotide
gaagattctcccgtgataacgtacataccttgcaccaatcgcgatgagtaggaaattg

SEQ ID NO: 392599 - DNA, 57 bp, Artificial
  Synthetic oligonucleotide
gaagattctggatcccgactggcacattcaaggtgcaatatgggctctaaaccttct

SEQ ID NO: 392600 - DNA, 59 bp, Artificial
  Synthetic oligonucleotide
gaagattctgggtcccggttggcgcctccaaggtgcaagatgggctccagatcttctac

SEQ ID NO: 392601 - DNA, 55 bp, Artificial
  Synthetic oligonucleotide
gaagattgaagcagttcgttgatgcgaaccccgacaattttaccacgttgaaggc

SEQ ID NO: 392602 - DNA, 55 bp, Artificial
  Synthetic oligonucleotide
gaagattgacatctcgattgtggtacgcgcccacacactgcgctagggaatcggc

SEQ ID NO: 392603 - DNA, 60 bp, Artificial
  Synthetic oligonucleotide
gaagattgattcaactgatagtgagtggaagagacgaacaatcgatagtcgaagcaatag

SEQ ID NO: 392604 - DNA, 55 bp, Artificial
  Synthetic oligonucleotide
gaagattggccagtggataaagcactcatcttcatgaagtcccaactttgcacca

SEQ ID NO: 392605 - DNA, 52 bp, Artificial
  Synthetic oligonucleotide
gaagattgtgggtatcccgcctttaatttgaacgggcttcccgtatttagta

SEQ ID NO: 392606 - DNA, 60 bp, Artificial
  Synthetic oligonucleotide
gaagattgtgggtggcaagagtacctggatgttgtatccgatccagagtctataaatcat

SEQ ID NO: 392607 - DNA, 55 bp, Artificial
  Synthetic oligonucleotide
gaagatttatggaacactaacagtgcatatatgaagactatcaagaggggtactg

SEQ ID NO: 392608 - DNA, 54 bp, Artificial
  Synthetic oligonucleotide
gaagatttccagaataggctggttttggccgacgatttgggtgtttttccgaga

SEQ ID NO: 392609 - DNA, 60 bp, Artificial
  Synthetic oligonucleotide
gaagatttccatgtccagctaactatagaatatgcgatgttaagcaaatactgtgactat

SEQ ID NO: 392610 - DNA, 60 bp, Artificial
  Synthetic oligonucleotide
gaagatttcccttatcccatagacatttacgaggcattgtccagatctctgtacggccag

SEQ ID NO: 392611 - DNA, 55 bp, Artificial
  Synthetic oligonucleotide
gaagatttcttacctaatatggtggcttgggatgctattgatggtgacatatcag

SEQ ID NO: 392612 - DNA, 55 bp, Artificial
  Synthetic oligonucleotide
gaagatttgcccaatttagctaaccagataaatcaggactttggtatggaggcaa

SEQ ID NO: 392613 - DNA, 60 bp, Artificial
  Synthetic oligonucleotide
gaagcaaaactattcgtattattctgtacattcactgcgctgaaagctgacaccatctgt

SEQ ID NO: 392614 - DNA, 60 bp, Artificial
  Synthetic oligonucleotide
gaagcaaaagcgtgcaagggagaggcgtagagcgcagcaaccaattatactaaagtggga

SEQ ID NO: 392615 - DNA, 55 bp, Artificial
  Synthetic oligonucleotide
gaagcaaaagctgaatgatggattaatcgtaaggactcagaagggttttgagcgg

SEQ ID NO: 392616 - DNA, 55 bp, Artificial
  Synthetic oligonucleotide
gaagcaaaatcatacgaaccatgttatgttcttcctcgttcgagatagaaggcct

SEQ ID NO: 392617 - DNA, 51 bp, Artificial
  Synthetic oligonucleotide
gaagcaaaggcggaaagcgaatcaccggcctcaaccccggtacgttgcaat

SEQ ID NO: 392618 - DNA, 60 bp, Artificial
  Synthetic oligonucleotide
gaagcaaattggtaatgtgataaattggaccagagactccatgacagaagtgtggtccta

SEQ ID NO: 392619 - DNA, 55 bp, Artificial
  Synthetic oligonucleotide
gaagcaaccgccttcaatgctaccgacaacctactatcaaagtcaagggtggtag

SEQ ID NO: 392620 - DNA, 55 bp, Artificial
  Synthetic oligonucleotide
gaagcaacggggagcatttatccctggctactatatataacagaatcactcacga

SEQ ID NO: 392621 - DNA, 60 bp, Artificial
  Synthetic oligonucleotide
gaagcaacgttgcaggtagatgggcaacatggcggttcacagaacagtgtgtgtagtagc

SEQ ID NO: 392622 - DNA, 55 bp, Artificial
  Synthetic oligonucleotide
gaagcaactcgcttctcaattttaaagcacgctattctcaagcacggttcagtcg

SEQ ID NO: 392623 - DNA, 55 bp, Artificial
  Synthetic oligonucleotide
gaagcaagccatagtaaacctcgtcaggctcgagcgtattgtactaaagagcact

SEQ ID NO: 392624 - DNA, 60 bp, Artificial
  Synthetic oligonucleotide
gaagcaataattcagccactataattgtcccatatgtgaatgctgttcctatggattcca

SEQ ID NO: 392625 - DNA, 55 bp, Artificial
  Synthetic oligonucleotide
gaagcaataggtaacctccacactgctgctaggtcgtatgcaatagacatgaagc

SEQ ID NO: 392626 - DNA, 60 bp, Artificial
  Synthetic oligonucleotide
gaagcaatcaccaaagcttatgttgctcaacagggtatcacagacccaaaagataaggcc

SEQ ID NO: 392627 - DNA, 60 bp, Artificial
  Synthetic oligonucleotide
gaagcaatctgcattggttaattcggaaagagttagactggatgattctctttctgcaat

SEQ ID NO: 392628 - DNA, 55 bp, Artificial
  Synthetic oligonucleotide
gaagcaatcttaagctttgttcgcccaggcacacaggctgagaagctcctgtccg

SEQ ID NO: 392629 - DNA, 55 bp, Artificial
  Synthetic oligonucleotide
gaagcaatggctttccttgaggagtcccaccccggtatctttgaaaactcgtgtc

SEQ ID NO: 392630 - DNA, 60 bp, Artificial
  Synthetic oligonucleotide
gaagcaatgttagggacacacgtggtgtgggatgtaggtttacaatctacagtgtcattg

SEQ ID NO: 392631 - DNA, 55 bp, Artificial
  Synthetic oligonucleotide
gaagcacaagacgtcatcatggaggttgtgttcccaaatgaggtgggagccagaa

SEQ ID NO: 392632 - DNA, 55 bp, Artificial
  Synthetic oligonucleotide
gaagcacacgaatgggtcaagcactggaagtataacactggcgccatcagttggg

SEQ ID NO: 392633 - DNA, 60 bp, Artificial
  Synthetic oligonucleotide
gaagcacatagttcggctttgtattatccatgcaaacgaagataagtgtactgatttaga

SEQ ID NO: 392634 - DNA, 60 bp, Artificial
  Synthetic oligonucleotide
gaagcacatatccagtgttgaatgtgactatgccaaacaatgacaactttgacaaactat

SEQ ID NO: 392635 - DNA, 55 bp, Artificial
  Synthetic oligonucleotide
gaagcacattggggacgtactcttcgagaactacaagagagccatgtgtctccca

SEQ ID NO: 392636 - DNA, 55 bp, Artificial
  Synthetic oligonucleotide
gaagcacattgtaacattagtgcagacaaatggaaggaaactttacaaagggtca

SEQ ID NO: 392637 - DNA, 60 bp, Artificial
  Synthetic oligonucleotide
gaagcaccatcatggaaatatagagtacgtcgccaatccagccgcgctgcaatattaccg

SEQ ID NO: 392638 - DNA, 54 bp, Artificial
  Synthetic oligonucleotide
gaagcaccccgaggccacttacaccaagtgtggttcggggccttggttgacgcc

SEQ ID NO: 392639 - DNA, 60 bp, Artificial
  Synthetic oligonucleotide
gaagcacccgcattgcggcatctgtggcgaacccatcgactacgagctcccgcatctcga

SEQ ID NO: 392640 - DNA, 57 bp, Artificial
  Synthetic oligonucleotide
gaagcaccgctagctactagccttcgtcgcaagacaggtcggtacaaagtggcgtgg

SEQ ID NO: 392641 - DNA, 60 bp, Artificial
  Synthetic oligonucleotide
gaagcaccggcacccatcctctgcgatatatcatggttttgctctcccgtatttcggtgc

SEQ ID NO: 392642 - DNA, 55 bp, Artificial
  Synthetic oligonucleotide
gaagcacgctaaatcccggcaagcacctttatgaccgcctcacctaccacccacg

SEQ ID NO: 392643 - DNA, 55 bp, Artificial
  Synthetic oligonucleotide
gaagcacggtggtcagctctggacttataatggagagactccaaatgcaatcacg

SEQ ID NO: 392644 - DNA, 60 bp, Artificial
  Synthetic oligonucleotide
gaagcacgttcacatcactaatgcacgcgcggcgtatgattagatcaaaaactgtgcacc

SEQ ID NO: 392645 - DNA, 60 bp, Artificial
  Synthetic oligonucleotide
gaagcactgaattcaatcaaagttactcaatctgatgttgcgaatgtgctctcaaaagta

SEQ ID NO: 392646 - DNA, 60 bp, Artificial
  Synthetic oligonucleotide
gaagcactgccagaacgagatacaatcatcactttatgggttaagttgctgacattagct

SEQ ID NO: 392647 - DNA, 55 bp, Artificial
  Synthetic oligonucleotide
gaagcacttcaatagatatgcttcgatggctatccaacaatatttgagggtcggc

SEQ ID NO: 392648 - DNA, 55 bp, Artificial
  Synthetic oligonucleotide
gaagcagaagcgtcaacaattccctttacagcagcgtcgaattgtgcttgattgg

SEQ ID NO: 392649 - DNA, 60 bp, Artificial
  Synthetic oligonucleotide
gaagcagaagttatcccagcagaaacaggacaagaaactgcatacttcatattaaaatta

SEQ ID NO: 392650 - DNA, 60 bp, Artificial
  Synthetic oligonucleotide
gaagcagacaatatgatcacagaaatgttgaggaaggattacataaaaaggcagggcagc

SEQ ID NO: 392651 - DNA, 60 bp, Artificial
  Synthetic oligonucleotide
gaagcagactcacccgggtccaatacggttgtacccagcctgctcagatgtctatatgga

SEQ ID NO: 392652 - DNA, 60 bp, Artificial
  Synthetic oligonucleotide
gaagcagactctcccgggtctaagacgctggtccctagccggctcagatgcctgtatgga

SEQ ID NO: 392653 - DNA, 59 bp, Artificial
  Synthetic oligonucleotide
gaagcagactctcccgggtctaatacgctggagcccagcctacttaggtgtctgtatgg

SEQ ID NO: 392654 - DNA, 60 bp, Artificial
  Synthetic oligonucleotide
gaagcagactctcctgggtctagaacgctggtcccgagcctacttaggtgcctgtatgga

SEQ ID NO: 392655 - DNA, 60 bp, Artificial
  Synthetic oligonucleotide
gaagcagaggctaaacaagagaagctatctaataagagcattgacactgaacacaatgac

SEQ ID NO: 392656 - DNA, 55 bp, Artificial
  Synthetic oligonucleotide
gaagcagatggacctgttaaggacccagtttataatatgaatggtacactactgg

SEQ ID NO: 392657 - DNA, 59 bp, Artificial
  Synthetic oligonucleotide
gaagcagcaaggaggtaatggcaacgaatccattaagttgtcatcgtcgggacccactc

SEQ ID NO: 392658 - DNA, 51 bp, Artificial
  Synthetic oligonucleotide
gaagcagccaatgcggttgtgtgttatgctgagtggcctgaatacttgcca

SEQ ID NO: 392659 - DNA, 60 bp, Artificial
  Synthetic oligonucleotide
gaagcagccctgcaccacaaaacttgctttcatgggtgacactctccatttttggagccc

SEQ ID NO: 392660 - DNA, 55 bp, Artificial
  Synthetic oligonucleotide
gaagcagcgttattggcctttccaaaattcgtttgccaacattctgatttagtta

SEQ ID NO: 392661 - DNA, 55 bp, Artificial
  Synthetic oligonucleotide
gaagcagctgccacaggaagcagcagcacggttagccaaaattaccctatagtgc

SEQ ID NO: 392662 - DNA, 55 bp, Artificial
  Synthetic oligonucleotide
gaagcaggacaccgcatcggtgcgagaacggaccgtggagatcacaacccagacg

SEQ ID NO: 392663 - DNA, 59 bp, Artificial
  Synthetic oligonucleotide
gaagcaggcgacttatttgtctagcttgctttccaatccttctggggcaaaatccagaa

SEQ ID NO: 392664 - DNA, 55 bp, Artificial
  Synthetic oligonucleotide
gaagcagggagaaggttgagcagggtaaatcccgcttgattgaagcttccagtct

SEQ ID NO: 392665 - DNA, 55 bp, Artificial
  Synthetic oligonucleotide
gaagcaggtataaagttcggagacggtgatgtgtttacagctgtgaaccttttgc

SEQ ID NO: 392666 - DNA, 55 bp, Artificial
  Synthetic oligonucleotide
gaagcaggtccttatgtacctaaattatcagatgaaacattcagtaactgggaac

SEQ ID NO: 392667 - DNA, 60 bp, Artificial
  Synthetic oligonucleotide
gaagcagtaagacattttcctagacagtggcttcatgatttaggacagcacatttataac

SEQ ID NO: 392668 - DNA, 55 bp, Artificial
  Synthetic oligonucleotide
gaagcagtacgtgaaagagtgtttgttgatgggaagctcccgggtgaccctaaat

SEQ ID NO: 392669 - DNA, 57 bp, Artificial
  Synthetic oligonucleotide
gaagcagttgacagtttccacctaggtgatgatatggacccggagcttcggggtctg

SEQ ID NO: 392670 - DNA, 55 bp, Artificial
  Synthetic oligonucleotide
gaagcataggttgacacaactacgtgatgtcatcaagtcaagctacccacgcttt

SEQ ID NO: 392671 - DNA, 60 bp, Artificial
  Synthetic oligonucleotide
gaagcatataacaattgcactggaggccaagaagttagagacctactttgtgtgcaatct

SEQ ID NO: 392672 - DNA, 60 bp, Artificial
  Synthetic oligonucleotide
gaagcatatgtggaacttcattagtgggatacaatacttggcgggcctgtcaacgctgcc

SEQ ID NO: 392673 - DNA, 56 bp, Artificial
  Synthetic oligonucleotide
gaagcatcggacccaaccaaattgaggctaagaagacctacgtttctagttgtgaa

SEQ ID NO: 392674 - DNA, 55 bp, Artificial
  Synthetic oligonucleotide
gaagcatcgggagaaggggtcattatgaaggagcgccagataactccggatgtat

SEQ ID NO: 392675 - DNA, 51 bp, Artificial
  Synthetic oligonucleotide
gaagcatctagtctgaatgattcagtggcaatgagacaaacatttggcaac

SEQ ID NO: 392676 - DNA, 53 bp, Artificial
  Synthetic oligonucleotide
gaagcatgaatctgtagtgctctccccaaacgtgatggatgagggggctatag

SEQ ID NO: 392677 - DNA, 60 bp, Artificial
  Synthetic oligonucleotide
gaagcatgctcatcaagtgaggactgagctaactactcggtatctaaccttgacgaacat

SEQ ID NO: 392678 - DNA, 55 bp, Artificial
  Synthetic oligonucleotide
gaagcatgctcttgctttctcgagctggagtgattacgttctgatgaaggtgaac

SEQ ID NO: 392679 - DNA, 60 bp, Artificial
  Synthetic oligonucleotide
gaagcatggatcgcaagtatttacatatggaggtgaaacaccgaacgctgcaaccgttgg

SEQ ID NO: 392680 - DNA, 57 bp, Artificial
  Synthetic oligonucleotide
gaagcatgggctaaactgttgggtggagatcctacagactttgttgcctggtgttat

SEQ ID NO: 392681 - DNA, 50 bp, Artificial
  Synthetic oligonucleotide
gaagcatgtggatcaagaggttcgatatgatgagctaacattgatctggt

SEQ ID NO: 392682 - DNA, 56 bp, Artificial
  Synthetic oligonucleotide
gaagcattcgaccaagatgttagcattcagcgagggcttctggtaaataagcatag

SEQ ID NO: 392683 - DNA, 55 bp, Artificial
  Synthetic oligonucleotide
gaagcattctcagggatctttagatcaccacatggggaggaccatgatttggctg

SEQ ID NO: 392684 - DNA, 55 bp, Artificial
  Synthetic oligonucleotide
gaagccaaccactgtcagaaatatcctatgtctcgtaaaccaagaaactttctgt

SEQ ID NO: 392685 - DNA, 57 bp, Artificial
  Synthetic oligonucleotide
gaagccacaagtgtcgttacccgcattggtactacacagagcctagtaccactctag

SEQ ID NO: 392686 - DNA, 55 bp, Artificial
  Synthetic oligonucleotide
gaagccacgtgcagttctgttctaaacgacaccacaagagttattattacgcacg

SEQ ID NO: 392687 - DNA, 55 bp, Artificial
  Synthetic oligonucleotide
gaagccagcaaaccataattcctaacatcgggtccaggccttgggtcagaggcca

SEQ ID NO: 392688 - DNA, 55 bp, Artificial
  Synthetic oligonucleotide
gaagccagctagtgtagctatgattggtttaggtagtgctgctacatttgcgaat

SEQ ID NO: 392689 - DNA, 56 bp, Artificial
  Synthetic oligonucleotide
gaagccaggaacaccagcccaggaagctgaattcttaaggaggaacaaaatatact

SEQ ID NO: 392690 - DNA, 55 bp, Artificial
  Synthetic oligonucleotide
gaagccagggcaatgaaggaaagactacgtatgtgaagggactcatacagaaggg

SEQ ID NO: 392691 - DNA, 51 bp, Artificial
  Synthetic oligonucleotide
gaagccaggttttaattcgtggaaacgtctacctccattaaatgaacctag

SEQ ID NO: 392692 - DNA, 53 bp, Artificial
  Synthetic oligonucleotide
gaagccagtcaaagctacccaacacggcccggcagttatcgttaaagcggagc

SEQ ID NO: 392693 - DNA, 60 bp, Artificial
  Synthetic oligonucleotide
gaagccagtgcagattggacaccggtagtcccggcagtcatcgaacgagcactgccgggg

SEQ ID NO: 392694 - DNA, 55 bp, Artificial
  Synthetic oligonucleotide
gaagccatatacttatcatgggtgccagcccataagggtataggaggaaatgagg

SEQ ID NO: 392695 - DNA, 55 bp, Artificial
  Synthetic oligonucleotide
gaagccatgacaacacgatcggaaatgaacaaggaactcatagcggaaggttatg

SEQ ID NO: 392696 - DNA, 60 bp, Artificial
  Synthetic oligonucleotide
gaagccatgagttccttgaatgcaaccctactctcaacatcaggtacaactcagtttgag

SEQ ID NO: 392697 - DNA, 55 bp, Artificial
  Synthetic oligonucleotide
gaagccattacaaatggttttctcatgatcgtactcgcttctatgttggtactca

SEQ ID NO: 392698 - DNA, 53 bp, Artificial
  Synthetic oligonucleotide
gaagcccacaatgacaagcgggctgactcagcgtatgtgtgcaagcagggcgt

SEQ ID NO: 392699 - DNA, 60 bp, Artificial
  Synthetic oligonucleotide
gaagcccacaatttgagtgctgtgttatcagcttcgtccaagtattctttataagaggac

SEQ ID NO: 392700 - DNA, 53 bp, Artificial
  Synthetic oligonucleotide
gaagcccacgattcacctggtcttaattcaattgggccgggtaacccaactct

SEQ ID NO: 392701 - DNA, 59 bp, Artificial
  Synthetic oligonucleotide
gaagcccagaatgttccgaatgtacagaagccctgatatccctaagggctgtgaaggcc

SEQ ID NO: 392702 - DNA, 60 bp, Artificial
  Synthetic oligonucleotide
gaagcccatgattctccaggcccaagctcaattggacatttagacccaattctagacatc

SEQ ID NO: 392703 - DNA, 55 bp, Artificial
  Synthetic oligonucleotide
gaagcccggtgcaagtcgttcgacgtgagcgtccacccgttcacggtgtacaacc

SEQ ID NO: 392704 - DNA, 54 bp, Artificial
  Synthetic oligonucleotide
gaagccctaagcttctggcccaagtagattttcctgttcgtgttggaccgacga

SEQ ID NO: 392705 - DNA, 60 bp, Artificial
  Synthetic oligonucleotide
gaagccctgatgtgcccaggggatgtgaaggcccatgtaaggtacagtcatttgaaaaga

SEQ ID NO: 392706 - DNA, 59 bp, Artificial
  Synthetic oligonucleotide
gaagccgaagatgagaagcaatttgatatacttaataaggcggtggcctcttacaataa

SEQ ID NO: 392707 - DNA, 60 bp, Artificial
  Synthetic oligonucleotide
gaagccgattggcgattcaaactgtcgcgtgacaatttatgtggaccatgctattataag

SEQ ID NO: 392708 - DNA, 55 bp, Artificial
  Synthetic oligonucleotide
gaagccgcacatgtcaaaacggcaacttcacgtagtaccaaaagagcggtctcgt

SEQ ID NO: 392709 - DNA, 51 bp, Artificial
  Synthetic oligonucleotide
gaagccgcatttcggctcgcacttcatcagcacttgcgcgggatgcgtaag

SEQ ID NO: 392710 - DNA, 60 bp, Artificial
  Synthetic oligonucleotide
gaagccgcccagatgatacgacgacgtgctaatgaagcagacaagacgagaagggcggac

SEQ ID NO: 392711 - DNA, 56 bp, Artificial
  Synthetic oligonucleotide
gaagccgcgtatttaccggatgtaccgatcacccgatgtgcccaaagggtgcgaag

SEQ ID NO: 392712 - DNA, 60 bp, Artificial
  Synthetic oligonucleotide
gaagccggactgagtggcctcgtccttctagccacagccagaagccgactgcaagacgca

SEQ ID NO: 392713 - DNA, 55 bp, Artificial
  Synthetic oligonucleotide
gaagcctaaatacacatcgacgaaaaccggagctgaccacattccaagctggact

SEQ ID NO: 392714 - DNA, 55 bp, Artificial
  Synthetic oligonucleotide
gaagcctaaatttcttccggatctgtatgattacaaggggaaccgatttattgaa

SEQ ID NO: 392715 - DNA, 55 bp, Artificial
  Synthetic oligonucleotide
gaagcctatggatgagattaggccggatttgacgaatatcttcaccatgccgaca

SEQ ID NO: 392716 - DNA, 60 bp, Artificial
  Synthetic oligonucleotide
gaagcctcagctcgatctgttgagtttgaaaagcgagtcaacgctaaaactgacattgcc

SEQ ID NO: 392717 - DNA, 55 bp, Artificial
  Synthetic oligonucleotide
gaagcctcattctttccgaattggtatttcggcataccgagctggaattccactc

SEQ ID NO: 392718 - DNA, 55 bp, Artificial
  Synthetic oligonucleotide
gaagcctccttcacatgatatgcagcatctttgaatccaagcctagacctactcc

SEQ ID NO: 392719 - DNA, 55 bp, Artificial
  Synthetic oligonucleotide
gaagcctctaattttaagagattgtagtgtagctggatggctcctcgggaaccca

SEQ ID NO: 392720 - DNA, 56 bp, Artificial
  Synthetic oligonucleotide
gaagcctctactgggatattattgtcacaagttggggtcgacgtcgcaacccgagt

SEQ ID NO: 392721 - DNA, 58 bp, Artificial
  Synthetic oligonucleotide
gaagcctgacgaagtgaaaccaaggcaatagaaagctgtcttgtgggactccctctac

SEQ ID NO: 392722 - DNA, 55 bp, Artificial
  Synthetic oligonucleotide
gaagcctgatttacaatctgccatggccaaactgagccaggtctgcaaggatcca

SEQ ID NO: 392723 - DNA, 60 bp, Artificial
  Synthetic oligonucleotide
gaagcctgcgaccttacaccatcgcactcagcccggtccaaatacgggtatggtgcacag

SEQ ID NO: 392724 - DNA, 60 bp, Artificial
  Synthetic oligonucleotide
gaagcctggcatctacagatttgtggcaccgggagagcgcccttccggcatgttcgactc

SEQ ID NO: 392725 - DNA, 56 bp, Artificial
  Synthetic oligonucleotide
gaagccttaaaagtccatagaaaatgcttaaattgtgctggttacaagactctgac

SEQ ID NO: 392726 - DNA, 59 bp, Artificial
  Synthetic oligonucleotide
gaagccttagagtctccggaacattgttcccctcaccatacagcactaaggcaagctat

SEQ ID NO: 392727 - DNA, 60 bp, Artificial
  Synthetic oligonucleotide
gaagccttagagtctcctgagcattgcacacctcaccatactgcactcaggcaagccata

SEQ ID NO: 392728 - DNA, 60 bp, Artificial
  Synthetic oligonucleotide
gaagccttcctttcgagagagcaaccatcatggcggcattcacagggaacactgaaggca

SEQ ID NO: 392729 - DNA, 58 bp, Artificial
  Synthetic oligonucleotide
gaagccttcgctctcctctgcaacaacccccacgggaccacgctcttcgccccacaca

SEQ ID NO: 392730 - DNA, 55 bp, Artificial
  Synthetic oligonucleotide
gaagccttctacacacctttggcagaccagtttcgtgaactgttagttggggttg

SEQ ID NO: 392731 - DNA, 55 bp, Artificial
  Synthetic oligonucleotide
gaagccttgatatctaaggtagaacgttgggttcattcatgacctatcaggctac

SEQ ID NO: 392732 - DNA, 55 bp, Artificial
  Synthetic oligonucleotide
gaagcctttcatcctgacattgtcttactgcctggctgtggagtggactttaccg

SEQ ID NO: 392733 - DNA, 60 bp, Artificial
  Synthetic oligonucleotide
gaagcgaactattaaggaagacgcgatgtatcgcgacagaaagtttgattcgaatgatga

SEQ ID NO: 392734 - DNA, 60 bp, Artificial
  Synthetic oligonucleotide
gaagcgaaggagcccttgacaggttcgatacttgagatgtgggacggtgagatctaccat

SEQ ID NO: 392735 - DNA, 55 bp, Artificial
  Synthetic oligonucleotide
gaagcgacaaaacgcgcgaacataagagcatatgtgtataaacctggcggcgatg

SEQ ID NO: 392736 - DNA, 55 bp, Artificial
  Synthetic oligonucleotide
gaagcgacggcgtgcaatggcttggatcccctcactagagacgtgtcctgtagct

SEQ ID NO: 392737 - DNA, 60 bp, Artificial
  Synthetic oligonucleotide
gaagcgagaaagtaatccgttcaaagggctgtcaactgatagaaagatggatgaggtctc

SEQ ID NO: 392738 - DNA, 59 bp, Artificial
  Synthetic oligonucleotide
gaagcgagaaatctattttcgtatgaatcaaaggaggattatggagtcatctttccgga

SEQ ID NO: 392739 - DNA, 54 bp, Artificial
  Synthetic oligonucleotide
gaagcgaggaggaaagcaaagaaagcaacggggctagtcggtgggtgttccgcc

SEQ ID NO: 392740 - DNA, 59 bp, Artificial
  Synthetic oligonucleotide
gaagcgaggtactcctctgcgggggaccccggcatcgcgtcgtagtacttcactgatgc

SEQ ID NO: 392741 - DNA, 60 bp, Artificial
  Synthetic oligonucleotide
gaagcgattggacacgggagatagactgagaacccgtgcacaaatggtagaattatacta

SEQ ID NO: 392742 - DNA, 56 bp, Artificial
  Synthetic oligonucleotide
gaagcgcaactgcacgtgtgggtcccccccctcaatgtccgaggggggcgaggcgc

SEQ ID NO: 392743 - DNA, 55 bp, Artificial
  Synthetic oligonucleotide
gaagcgcagattctacttgataacatcactacagtgagaggaccagttgccactt

SEQ ID NO: 392744 - DNA, 55 bp, Artificial
  Synthetic oligonucleotide
gaagcgcagcccaagattgcacgcgagatgcttaagtactacgctaatactacgg

SEQ ID NO: 392745 - DNA, 55 bp, Artificial
  Synthetic oligonucleotide
gaagcgcatgaacaagttcggcgttcatcagtagaatgtcaatacgcagagcctc

SEQ ID NO: 392746 - DNA, 52 bp, Artificial
  Synthetic oligonucleotide
gaagcgcccccggtatttgcattattcggtgaccccatacaatcgagcacaa

SEQ ID NO: 392747 - DNA, 52 bp, Artificial
  Synthetic oligonucleotide
gaagcgcgaaagctaaagttttcgcatttatcgtgaaacgctttcgcgtttt

SEQ ID NO: 392748 - DNA, 54 bp, Artificial
  Synthetic oligonucleotide
gaagcgcgaattgccaataccataaacccgaacgtttcatttggaacgttcctg

SEQ ID NO: 392749 - DNA, 55 bp, Artificial
  Synthetic oligonucleotide
gaagcgcgcttttaagcgcctgaaggacaactttgagatagtcgctctgtgtttg

SEQ ID NO: 392750 - DNA, 60 bp, Artificial
  Synthetic oligonucleotide
gaagcgcgtacgcgtagtacctgacgagtctgaagagattcagatggatgaaagtcagag

SEQ ID NO: 392751 - DNA, 60 bp, Artificial
  Synthetic oligonucleotide
gaagcgcgtcaaaccaagggctgctgttgacggtgttggcctggtgagctgtacctcatt

SEQ ID NO: 392752 - DNA, 51 bp, Artificial
  Synthetic oligonucleotide
gaagcgcgtttaggggaactattgtgcccaggtttaagggtccagtctaca

SEQ ID NO: 392753 - DNA, 57 bp, Artificial
  Synthetic oligonucleotide
gaagcgctacatgtgcattatattggtatagaacaggtttgtctaatattagtgagg

SEQ ID NO: 392754 - DNA, 59 bp, Artificial
  Synthetic oligonucleotide
gaagcgctaccagtggcggatgtccaagaggttaaactcatttctgagaacataccagt

SEQ ID NO: 392755 - DNA, 56 bp, Artificial
  Synthetic oligonucleotide
gaagcgctatataactttcaactatcacagctccgaaaagaactagacgcgtatat

SEQ ID NO: 392756 - DNA, 60 bp, Artificial
  Synthetic oligonucleotide
gaagcgctcgttctggctgactccttcataagagacctcggaaaagccgcaacatcagct

SEQ ID NO: 392757 - DNA, 60 bp, Artificial
  Synthetic oligonucleotide
gaagcggaagcgccgacgaggaactcctcagagcagtaaggatcatcaaaatcttacacg

SEQ ID NO: 392758 - DNA, 60 bp, Artificial
  Synthetic oligonucleotide
gaagcggaccaacaacgccagattgcatccggtaatgaatcagacacggcatggaatcgc

SEQ ID NO: 392759 - DNA, 60 bp, Artificial
  Synthetic oligonucleotide
gaagcggagacagcgacgcagaactcctccaagcagtgagaataatcaagtttctctatc

SEQ ID NO: 392760 - DNA, 55 bp, Artificial
  Synthetic oligonucleotide
gaagcggagacagcgacgcagcactcctccaagcagtgagggccatcaagatcat

SEQ ID NO: 392761 - DNA, 58 bp, Artificial
  Synthetic oligonucleotide
gaagcggagtcaacgacgaaaaactcctaacagcagtaaggattatcaagatcctata

SEQ ID NO: 392762 - DNA, 50 bp, Artificial
  Synthetic oligonucleotide
gaagcggccacaaatattttgaccggtccgtcgaaattaacaccgaggtc

SEQ ID NO: 392763 - DNA, 56 bp, Artificial
  Synthetic oligonucleotide
gaagcggggatggccgtacgttaatgaattttgcgaaacgatcaccagagcgtttc

SEQ ID NO: 392764 - DNA, 54 bp, Artificial
  Synthetic oligonucleotide
gaagcgggtttgaactccgttgttatattggctaacgagcgtcacaaaatacgt

SEQ ID NO: 392765 - DNA, 60 bp, Artificial
  Synthetic oligonucleotide
gaagcggtatcgtgaactgatgcgagtggagaatcagaattatgaagcattcaaggacat

SEQ ID NO: 392766 - DNA, 55 bp, Artificial
  Synthetic oligonucleotide
gaagcggtgctagcaaacacttacgccaatgcgataaatgtgtattgcgatacgg

SEQ ID NO: 392767 - DNA, 60 bp, Artificial
  Synthetic oligonucleotide
gaagcgtatcactgactgcaaggagagggtctcctctagccggaatcatgacctcaaagg

SEQ ID NO: 392768 - DNA, 60 bp, Artificial
  Synthetic oligonucleotide
gaagcgtatctgtggactacgatgttcatcctgtcctagatgcactgttagccggttttg

SEQ ID NO: 392769 - DNA, 50 bp, Artificial
  Synthetic oligonucleotide
gaagcgtcacaatgatgtgaactatcgtgtgaactgttctattggtgctg

SEQ ID NO: 392770 - DNA, 55 bp, Artificial
  Synthetic oligonucleotide
gaagcgtgaggccaccggttggaatccggttggggacacattaaggctgatggcg

SEQ ID NO: 392771 - DNA, 55 bp, Artificial
  Synthetic oligonucleotide
gaagcgtgtgagcatgactgggtacctataaaagacctttgtgtgtataacactc

SEQ ID NO: 392772 - DNA, 56 bp, Artificial
  Synthetic oligonucleotide
gaagcgttaaacatgtactgcgaccatggctacggcccgtgcaaactgtgcgcgca

SEQ ID NO: 392773 - DNA, 55 bp, Artificial
  Synthetic oligonucleotide
gaagcgttaagcgaactaggaggagccgatcaatatggttcgatcagtgaagccc

SEQ ID NO: 392774 - DNA, 59 bp, Artificial
  Synthetic oligonucleotide
gaagcgttaataagaattctgcaacaattactgtttactcattacagatttgggtgtca

SEQ ID NO: 392775 - DNA, 53 bp, Artificial
  Synthetic oligonucleotide
gaagcgtttgacacaagataggttaacacacacactcgacatatatagattca

SEQ ID NO: 392776 - DNA, 50 bp, Artificial
  Synthetic oligonucleotide
gaagctaaatctatgatggcagggttgatagacttcacaccgatctccag

SEQ ID NO: 392777 - DNA, 55 bp, Artificial
  Synthetic oligonucleotide
gaagctaataggaaaggataaaatctacctgtcatgggtaccagcacacaaaggg

SEQ ID NO: 392778 - DNA, 58 bp, Artificial
  Synthetic oligonucleotide
gaagctaattattcatgtgcaaatggtacacaaccatatggagaaatatgtactcagc

SEQ ID NO: 392779 - DNA, 60 bp, Artificial
  Synthetic oligonucleotide
gaagctactattatgagaccagctgaggttggttatagtgcaccatattattcttttgag

SEQ ID NO: 392780 - DNA, 55 bp, Artificial
  Synthetic oligonucleotide
gaagctactcaaagcacctcaagacccggcttgagtccaacaactatgaggaagt

SEQ ID NO: 392781 - DNA, 58 bp, Artificial
  Synthetic oligonucleotide
gaagctagaattagtcacagataataaagtaggtgacgattcggttgaagttttgaga

SEQ ID NO: 392782 - DNA, 56 bp, Artificial
  Synthetic oligonucleotide
gaagctagcgatccgcccgtaatttgcttgaaaggggggcacaaccagcttaagtg

SEQ ID NO: 392783 - DNA, 57 bp, Artificial
  Synthetic oligonucleotide
gaagctaggacagaaataaacgataatgagtggacaagtacgttgtcgcagctgttc

SEQ ID NO: 392784 - DNA, 55 bp, Artificial
  Synthetic oligonucleotide
gaagctaggtataggctcatcaaatctctatacgtactgggtggaacgcgaggag

SEQ ID NO: 392785 - DNA, 60 bp, Artificial
  Synthetic oligonucleotide
gaagctatatgagaggccactgtcccataggaataactggtgtccattacattaatgaca

SEQ ID NO: 392786 - DNA, 60 bp, Artificial
  Synthetic oligonucleotide
gaagctatctaataagagcattgacactgaacacaatgacaaaagacgctgaaagaggca

SEQ ID NO: 392787 - DNA, 55 bp, Artificial
  Synthetic oligonucleotide
gaagctatggcccgtcacgggatgacacgtctatacgctgcactccatcttcccc

SEQ ID NO: 392788 - DNA, 60 bp, Artificial
  Synthetic oligonucleotide
gaagctattggtaccccccagtacgtcacaataactgccaatgtgagcgatgatgcgtat

SEQ ID NO: 392789 - DNA, 55 bp, Artificial
  Synthetic oligonucleotide
gaagctcaagaaagacttccgaaggaatgaaagggtttgtgcatatgcgagtgga

SEQ ID NO: 392790 - DNA, 51 bp, Artificial
  Synthetic oligonucleotide
gaagctcaatcataaccgagactacggtccactagctctagaagactctac

SEQ ID NO: 392791 - DNA, 59 bp, Artificial
  Synthetic oligonucleotide
gaagctcacccacaggtaggaacacctcacacgcttgaaaggctagccttctttgcgta

SEQ ID NO: 392792 - DNA, 60 bp, Artificial
  Synthetic oligonucleotide
gaagctcactgatttctacaacaacatccaagtatctatcctcaccaaaggatatgacga

SEQ ID NO: 392793 - DNA, 55 bp, Artificial
  Synthetic oligonucleotide
gaagctcagaattcagatgtggtccgcctattcgagtatgcggcactcgaagtgc

SEQ ID NO: 392794 - DNA, 58 bp, Artificial
  Synthetic oligonucleotide
gaagctcagggtgctactttcacggagaccacaattatagccacggccgacgctaggg

SEQ ID NO: 392795 - DNA, 60 bp, Artificial
  Synthetic oligonucleotide
gaagctcataaaccctagcaacaccttagacttatctggtcttgagaccacaggagatgg

SEQ ID NO: 392796 - DNA, 60 bp, Artificial
  Synthetic oligonucleotide
gaagctcatgcggccttcaattaccacctagaggcataccctaaatcaaggttgtgcaag

SEQ ID NO: 392797 - DNA, 51 bp, Artificial
  Synthetic oligonucleotide
gaagctcattaagagtaccgtcgaagctaagtcgaaggaccccgcatacaa

SEQ ID NO: 392798 - DNA, 59 bp, Artificial
  Synthetic oligonucleotide
gaagctccctcctgaactggttacgctgcatccaagagtagaagaaggcttcttcgacc

SEQ ID NO: 392799 - DNA, 53 bp, Artificial
  Synthetic oligonucleotide
gaagctcctgaacatataaccctgtgacaggggttaggcacgttttcacttac

SEQ ID NO: 392800 - DNA, 55 bp, Artificial
  Synthetic oligonucleotide
gaagctcgcatcctctcacgggatccattcctactgccccagggagttgcgaagc

SEQ ID NO: 392801 - DNA, 55 bp, Artificial
  Synthetic oligonucleotide
gaagctcggaaagctttgaaattatccaaccctcggcctgttgtgttagagccgg

SEQ ID NO: 392802 - DNA, 55 bp, Artificial
  Synthetic oligonucleotide
gaagctcgtgcccctgataccttacccggtatgactagacgtgctgccgtaaact

SEQ ID NO: 392803 - DNA, 53 bp, Artificial
  Synthetic oligonucleotide
gaagctcgtggtatggatttttggcggttggctaacttccctggtaaatggtt

SEQ ID NO: 392804 - DNA, 60 bp, Artificial
  Synthetic oligonucleotide
gaagctgaaaagtagtggagatctatgttgcatctgatcggaaaagtccacgacgcctgc

SEQ ID NO: 392805 - DNA, 55 bp, Artificial
  Synthetic oligonucleotide
gaagctgacagttgactttgtgcttcaaagcaatgaggttgccccaacagtccca

SEQ ID NO: 392806 - DNA, 54 bp, Artificial
  Synthetic oligonucleotide
gaagctgatagtaccccagaagctaaagccaactacccaagaaaacccctagta

SEQ ID NO: 392807 - DNA, 59 bp, Artificial
  Synthetic oligonucleotide
gaagctgatcgaggttttttcattacgacactaccaacaagatgtcgtcttgagattat

SEQ ID NO: 392808 - DNA, 60 bp, Artificial
  Synthetic oligonucleotide
gaagctgcagagtgggataggctacatccacaacaggcaggacctattccaccaggccag

SEQ ID NO: 392809 - DNA, 59 bp, Artificial
  Synthetic oligonucleotide
gaagctgcatctcaaattcccgtcgatgaaatacctgacgacactgcagaatcgtcaga

SEQ ID NO: 392810 - DNA, 51 bp, Artificial
  Synthetic oligonucleotide
gaagctgcccgcaactcatgccgttgttacctcgggtccattgactatgga

SEQ ID NO: 392811 - DNA, 60 bp, Artificial
  Synthetic oligonucleotide
gaagctgcctctctcagtaagggtgtgggtgagaatggctaatttatcaggatgggtaaa

SEQ ID NO: 392812 - DNA, 60 bp, Artificial
  Synthetic oligonucleotide
gaagctgctaagtacgagaaccatactgaaaacgcattattgttgtatatggcatgtaca

SEQ ID NO: 392813 - DNA, 55 bp, Artificial
  Synthetic oligonucleotide
gaagctggaagcctgaccaagaacgattggtttcgtcccggtgacttcagtggct

SEQ ID NO: 392814 - DNA, 55 bp, Artificial
  Synthetic oligonucleotide
gaagctggaatatcaccatatctccgggcctcggcatttcctgatccggcgatgg

SEQ ID NO: 392815 - DNA, 55 bp, Artificial
  Synthetic oligonucleotide
gaagctggaggaaatatgttggtacaacacttgaagatttgggcggacaggtacc

SEQ ID NO: 392816 - DNA, 51 bp, Artificial
  Synthetic oligonucleotide
gaagctggtaactttggtcaacaagttaatcaatttaaagcaatttgttct

SEQ ID NO: 392817 - DNA, 55 bp, Artificial
  Synthetic oligonucleotide
gaagctggtcaggaccctctgctcaatattcttattgaggaagagggccctgagg

SEQ ID NO: 392818 - DNA, 55 bp, Artificial
  Synthetic oligonucleotide
gaagctggttgacaaggttagaattgggttgaactcggagtcgtcagacgccgag

SEQ ID NO: 392819 - DNA, 59 bp, Artificial
  Synthetic oligonucleotide
gaagctgtacaactacaagaactcagaaactcaattggatggctagaacggttaggtca

SEQ ID NO: 392820 - DNA, 59 bp, Artificial
  Synthetic oligonucleotide
gaagctgtacccatagataaaaggatagtgtcaattgttggctacaatccaccttatgt

SEQ ID NO: 392821 - DNA, 59 bp, Artificial
  Synthetic oligonucleotide
gaagctgtagtcgcacaaggtgtaccaacctttgacatacctggctcaggccagttttg

SEQ ID NO: 392822 - DNA, 60 bp, Artificial
  Synthetic oligonucleotide
gaagctgtcagacattttcccagggtatggctccatagcttagggcaatttatttatgac

SEQ ID NO: 392823 - DNA, 60 bp, Artificial
  Synthetic oligonucleotide
gaagctgtcgctacccgatttggtggccagcttcgtacggtgcattgtgacggatggaga

SEQ ID NO: 392824 - DNA, 60 bp, Artificial
  Synthetic oligonucleotide
gaagctgtgtcagtgaaaggaggatacaagcagaagtggagtactagaggtgatggactc

SEQ ID NO: 392825 - DNA, 60 bp, Artificial
  Synthetic oligonucleotide
gaagctgttagacacttccctaggatatggctccatggcttaggacaacatatctatgaa

SEQ ID NO: 392826 - DNA, 54 bp, Artificial
  Synthetic oligonucleotide
gaagcttaaagaagagactcaagttcatgaatgtacattccccggaactgatgc

SEQ ID NO: 392827 - DNA, 59 bp, Artificial
  Synthetic oligonucleotide
gaagcttaaatatgaggcaggcttaacctatattgaacaagagttgcataagttcttcc

SEQ ID NO: 392828 - DNA, 60 bp, Artificial
  Synthetic oligonucleotide
gaagcttacaatgatgaggaactattagacagtttagttgaagatttcagtatttcacat

SEQ ID NO: 392829 - DNA, 55 bp, Artificial
  Synthetic oligonucleotide
gaagcttacgaaatacgtgttgctaagaagttcgaaaagtcgtgtgcttgaaccc

SEQ ID NO: 392830 - DNA, 59 bp, Artificial
  Synthetic oligonucleotide
gaagcttactctgaaactgggatcttcaatataagctcacctacttgtttaatcaatcg

SEQ ID NO: 392831 - DNA, 54 bp, Artificial
  Synthetic oligonucleotide
gaagcttagtacaaccggtcaatagattgcacagtaaaccaactgggcactgac

SEQ ID NO: 392832 - DNA, 57 bp, Artificial
  Synthetic oligonucleotide
gaagcttagttgggctgggccagaattttttctgggccggaatgagagagcgcaaac

SEQ ID NO: 392833 - DNA, 55 bp, Artificial
  Synthetic oligonucleotide
gaagcttcaggaacggatgacggctaggcaagtcgttattgcgagagagatctgg

SEQ ID NO: 392834 - DNA, 60 bp, Artificial
  Synthetic oligonucleotide
gaagcttccttgttcatctcgacatcaatgagcttgatatcccttctattctgtgagtct

SEQ ID NO: 392835 - DNA, 60 bp, Artificial
  Synthetic oligonucleotide
gaagcttcgaactcgtcggaacaatgaacaaaggactcatagacaagcacacaattgttg

SEQ ID NO: 392836 - DNA, 55 bp, Artificial
  Synthetic oligonucleotide
gaagcttcgcaatctcccaacgtcgttccgtaaataaacacgatgacacgaatgc

SEQ ID NO: 392837 - DNA, 55 bp, Artificial
  Synthetic oligonucleotide
gaagcttcgcatctttgtgaaagccacgcaatttggtattagaaccctacaggac

SEQ ID NO: 392838 - DNA, 52 bp, Artificial
  Synthetic oligonucleotide
gaagcttgggttcgctactcgtcagctttgcggcaattagttggagggccgg

SEQ ID NO: 392839 - DNA, 55 bp, Artificial
  Synthetic oligonucleotide
gaagcttgtgggttctccgataggctaaagcaaatcactatcggggactctacaa

SEQ ID NO: 392840 - DNA, 54 bp, Artificial
  Synthetic oligonucleotide
gaagcttgtttatcgaacgactacttagagttacaggtaaccggataggtgacc

SEQ ID NO: 392841 - DNA, 56 bp, Artificial
  Synthetic oligonucleotide
gaaggaaaacagcgtccttcacggtttcctcggagaagaccatcttgaccatggga

SEQ ID NO: 392842 - DNA, 57 bp, Artificial
  Synthetic oligonucleotide
gaaggaaaactaacgccatactggggtagtgtgaaggaagaccgcataagctatgga

SEQ ID NO: 392843 - DNA, 60 bp, Artificial
  Synthetic oligonucleotide
gaaggaaaagtcatcctggtagcagtccatgtagccagtggctacatagaagcagaagtt

SEQ ID NO: 392844 - DNA, 55 bp, Artificial
  Synthetic oligonucleotide
gaaggaaaatgttttgtcccagatcagagtgtggttagtattatcaagcatggga

SEQ ID NO: 392845 - DNA, 55 bp, Artificial
  Synthetic oligonucleotide
gaaggaaactcccgtgaagcccgactgggtcaggattggcaatgactggcacagg

SEQ ID NO: 392846 - DNA, 60 bp, Artificial
  Synthetic oligonucleotide
gaaggaaacttttgaccacacacttatgagcatagtcacaagtctgcacctcagcatcag

SEQ ID NO: 392847 - DNA, 55 bp, Artificial
  Synthetic oligonucleotide
gaaggaaagacgcaagaaagtaaccgataaagctgagccagagcttcggagagcc

SEQ ID NO: 392848 - DNA, 55 bp, Artificial
  Synthetic oligonucleotide
gaaggaaataatcaccctgaagtgatcctggttgccagcatgatagagaaagagc

SEQ ID NO: 392849 - DNA, 55 bp, Artificial
  Synthetic oligonucleotide
gaaggaaatactaccctgtgtcgtttgtgggacctaccttccaatacatggaggc

SEQ ID NO: 392850 - DNA, 60 bp, Artificial
  Synthetic oligonucleotide
gaaggaaattgcagtactatctcagttaggtcatgagaaagttgatactcatcacgctga

SEQ ID NO: 392851 - DNA, 60 bp, Artificial
  Synthetic oligonucleotide
gaaggaacactggattatactaatgcacagggacagagacatttgaggtataatgtagac

SEQ ID NO: 392852 - DNA, 55 bp, Artificial
  Synthetic oligonucleotide
gaaggaacagatgcaccatgcaagatccccttttcgtcccaagatgagaagggag

SEQ ID NO: 392853 - DNA, 53 bp, Artificial
  Synthetic oligonucleotide
gaaggaacagtacggtgaaacttggcacgggaacggagagcacccgtaccgga

SEQ ID NO: 392854 - DNA, 60 bp, Artificial
  Synthetic oligonucleotide
gaaggaacctccattcctttggatgggatatgaactccatcctgataggtggacagtcca

SEQ ID NO: 392855 - DNA, 60 bp, Artificial
  Synthetic oligonucleotide
gaaggaagaatccaggaccttgagaaatatgttgaggacactaagatagatctatggtct

SEQ ID NO: 392856 - DNA, 60 bp, Artificial
  Synthetic oligonucleotide
gaaggaagggtgttgctgtggcaacaagcataactaccctgatgagctgaacccattttc

SEQ ID NO: 392857 - DNA, 55 bp, Artificial
  Synthetic oligonucleotide
gaaggaaggttggtggtatacagctggagggaaagcgacagatatgctttacagc

SEQ ID NO: 392858 - DNA, 55 bp, Artificial
  Synthetic oligonucleotide
gaaggaagtactacccagtatccttcgttggcccaacgttccaatacatggaggc

SEQ ID NO: 392859 - DNA, 57 bp, Artificial
  Synthetic oligonucleotide
gaaggaataaatacttagaagagcatcccagtgcagggaaggatcccaagaaaactg

SEQ ID NO: 392860 - DNA, 55 bp, Artificial
  Synthetic oligonucleotide
gaaggaataccaccaggatcagtcaaactgtttataaatgatgctgcagcaacag

SEQ ID NO: 392861 - DNA, 58 bp, Artificial
  Synthetic oligonucleotide
gaaggaatggcgaaaagtggtggaagggcaaactgctgacaatttacatattgcatat

SEQ ID NO: 392862 - DNA, 55 bp, Artificial
  Synthetic oligonucleotide
gaaggaatgggcgatagatattggccttgtattctcgaaaagccaactgtgcacc

SEQ ID NO: 392863 - DNA, 60 bp, Artificial
  Synthetic oligonucleotide
gaaggaattacttcacagcagaggtgtctcattgcagagccacagaatacataatgaagg

SEQ ID NO: 392864 - DNA, 53 bp, Artificial
  Synthetic oligonucleotide
gaaggaattatggataggaggggatagattccagtatcagtataaaccctcat

SEQ ID NO: 392865 - DNA, 51 bp, Artificial
  Synthetic oligonucleotide
gaaggacaatgctaaagacgaagggaatggttgttttactttctatcacaa

SEQ ID NO: 392866 - DNA, 55 bp, Artificial
  Synthetic oligonucleotide
gaaggacactatgctaacgcatgtcctaacaaagaaaagatagactctaaacaag

SEQ ID NO: 392867 - DNA, 54 bp, Artificial
  Synthetic oligonucleotide
gaaggacatacagcaatgggagccctcaagaggatggaacgactggacacaggt

SEQ ID NO: 392868 - DNA, 59 bp, Artificial
  Synthetic oligonucleotide
gaaggacatcactatctcgattaagaacgagagtggtttccctcagcgtcccgatgtta

SEQ ID NO: 392869 - DNA, 53 bp, Artificial
  Synthetic oligonucleotide
gaaggacatctccttgttctgtcagatggtctctactgtggaattcatacccc

SEQ ID NO: 392870 - DNA, 60 bp, Artificial
  Synthetic oligonucleotide
gaaggacatggaccaacaggcccatgtatcgcaagccgagactatacagaatgtacagaa

SEQ ID NO: 392871 - DNA, 52 bp, Artificial
  Synthetic oligonucleotide
gaaggaccccattccggattcagggacggcggggcgtcaaatttcaacaagt

SEQ ID NO: 392872 - DNA, 52 bp, Artificial
  Synthetic oligonucleotide
gaaggacccgaagaaaactggaggtccaatttatcgaaggagagacgggaaa

SEQ ID NO: 392873 - DNA, 55 bp, Artificial
  Synthetic oligonucleotide
gaaggaccgaagtccctatagaactctaatgagtgtagaaatagggcagtcaccc

SEQ ID NO: 392874 - DNA, 59 bp, Artificial
  Synthetic oligonucleotide
gaaggaccttgtaaggtccaatcctttgaacagagacatgacataacacatactgggaa

SEQ ID NO: 392875 - DNA, 54 bp, Artificial
  Synthetic oligonucleotide
gaaggacgaaagatcaaaattcagggtaagtattatcctactcccacccgagcg

SEQ ID NO: 392876 - DNA, 55 bp, Artificial
  Synthetic oligonucleotide
gaaggacgatcttatgatcagcaagtttacgctaggcactaaatcagtgtcgcag

SEQ ID NO: 392877 - DNA, 54 bp, Artificial
  Synthetic oligonucleotide
gaaggacgattgcccgtttgcccttatactggagcgaatggcagaattaatgct

SEQ ID NO: 392878 - DNA, 60 bp, Artificial
  Synthetic oligonucleotide
gaaggacgcgtaaacactgagcgtcacactaccaacgacgtgagcgcggataggcactct

SEQ ID NO: 392879 - DNA, 59 bp, Artificial
  Synthetic oligonucleotide
gaaggacgtgctcaagataacttcaacatcacggactatcagacttacatcccgacctt

SEQ ID NO: 392880 - DNA, 60 bp, Artificial
  Synthetic oligonucleotide
gaaggactagatcacgcggatcggtgggaatggcttattgattacatggataggaagcat

SEQ ID NO: 392881 - DNA, 58 bp, Artificial
  Synthetic oligonucleotide
gaaggactggggttgagctctcagttcatcgcaaaaatccccgaactcgcaattccaa

SEQ ID NO: 392882 - DNA, 53 bp, Artificial
  Synthetic oligonucleotide
gaaggacttagacgtcacagtcttgtttaaggattgggttgcaaattacccgg

SEQ ID NO: 392883 - DNA, 56 bp, Artificial
  Synthetic oligonucleotide
gaaggactttacgaagagagttcgcgatcttgtcggttcaaagcttggggagtggc

SEQ ID NO: 392884 - DNA, 59 bp, Artificial
  Synthetic oligonucleotide
gaaggagagcgagttataatggttggaatgttgtatcaaaccaatagtacgcacactac

SEQ ID NO: 392885 - DNA, 60 bp, Artificial
  Synthetic oligonucleotide
gaaggagataacaactgcctgttgcatcccatatgtcagcatgggatggaagatgaggac

SEQ ID NO: 392886 - DNA, 55 bp, Artificial
  Synthetic oligonucleotide
gaaggagatagcactaaggcagcatgaagtgctaaagacaagcattgcaaatgag

SEQ ID NO: 392887 - DNA, 57 bp, Artificial
  Synthetic oligonucleotide
gaaggagatatagaacacaagtagaccctgtccaagcagaccaactaattcatctgc

SEQ ID NO: 392888 - DNA, 59 bp, Artificial
  Synthetic oligonucleotide
gaaggagcaaccccacaagatctaaatacaatgctaaacatagttgggggacatcaggc

SEQ ID NO: 392889 - DNA, 59 bp, Artificial
  Synthetic oligonucleotide
gaaggagcagccacagtttaggtctatcctcttgcgacgaatcctggactttgcaattt

SEQ ID NO: 392890 - DNA, 60 bp, Artificial
  Synthetic oligonucleotide
gaaggagcagctgactcctcgtgccatgtcaatgtattctgatgatggtcccattcgacg

SEQ ID NO: 392891 - DNA, 55 bp, Artificial
  Synthetic oligonucleotide
gaaggagccccaacgacgaactgtggcagcacaccatttggtgacgggaagctgg

SEQ ID NO: 392892 - DNA, 55 bp, Artificial
  Synthetic oligonucleotide
gaaggagctcgtttggttcgatatcgctaacacaaactacaacatcacgcgtccc

SEQ ID NO: 392893 - DNA, 60 bp, Artificial
  Synthetic oligonucleotide
gaaggaggagaactcctgctaaatcaattagcaggccgcatgattccgaaagggactgta

SEQ ID NO: 392894 - DNA, 60 bp, Artificial
  Synthetic oligonucleotide
gaaggaggatggcctggtctgattaatggatggtatggtttccagcatcagaacgaacaa

SEQ ID NO: 392895 - DNA, 54 bp, Artificial
  Synthetic oligonucleotide
gaaggaggcgggctccccgatccgaggggcccgaccaccaagtttggagagcac

SEQ ID NO: 392896 - DNA, 55 bp, Artificial
  Synthetic oligonucleotide
gaaggagggaatgtcattaaggaatggtgttgccgtcactgcaaactgcctcccc

SEQ ID NO: 392897 - DNA, 60 bp, Artificial
  Synthetic oligonucleotide
gaaggagggactgtcaattccaagcattggacgatttgtatcagtcgtggcttgatgtga

SEQ ID NO: 392898 - DNA, 60 bp, Artificial
  Synthetic oligonucleotide
gaaggaggggagatcctgctaaatcaattagcaggccgcatgatcccaaaaggggctgta

SEQ ID NO: 392899 - DNA, 60 bp, Artificial
  Synthetic oligonucleotide
gaaggaggtggagagcaagacaacgacagatccatacgattagtcagcggattcttgaca

SEQ ID NO: 392900 - DNA, 60 bp, Artificial
  Synthetic oligonucleotide
gaaggagtatggtatgtcatatgtagtagaactcacatatgcttccttatttgctgtcat

SEQ ID NO: 392901 - DNA, 58 bp, Artificial
  Synthetic oligonucleotide
gaaggagtattgagttgccttgaaagggttgactatgataaggcattcgggaggtatc

SEQ ID NO: 392902 - DNA, 60 bp, Artificial
  Synthetic oligonucleotide
gaaggagtcaatgatagcattgttgtagttcatctcctccattattagatcatctgtcga

SEQ ID NO: 392903 - DNA, 55 bp, Artificial
  Synthetic oligonucleotide
gaaggagtctaatgaacctgccctatgccatcttggatctccgcactaacacaga

SEQ ID NO: 392904 - DNA, 59 bp, Artificial
  Synthetic oligonucleotide
gaaggagtgtaccatggagtgaccaaacctaaacaggttatcaaattggatgctgatcc

SEQ ID NO: 392905 - DNA, 55 bp, Artificial
  Synthetic oligonucleotide
gaaggagttttaccttcagaatcactacgacgctgttgaagctggccttaactcg

SEQ ID NO: 392906 - DNA, 52 bp, Artificial
  Synthetic oligonucleotide
gaaggagttttttctatcgttgtagtcgtggatcgtaaaccccacttgggtc

SEQ ID NO: 392907 - DNA, 55 bp, Artificial
  Synthetic oligonucleotide
gaaggatacaacgctagggagattaaacgtaaggttgaagcatatgctcctaaag

SEQ ID NO: 392908 - DNA, 55 bp, Artificial
  Synthetic oligonucleotide
gaaggatacatccaaatcaaactcactgccgaaatattcctcgggaccctctcta

SEQ ID NO: 392909 - DNA, 59 bp, Artificial
  Synthetic oligonucleotide
gaaggataccatcaaactttacctcccatacaagatttcggactgtgtgatgtgcaaac

SEQ ID NO: 392910 - DNA, 55 bp, Artificial
  Synthetic oligonucleotide
gaaggatacgttaatggttgacgtggaagggtccactacgctctctaacagacgc

SEQ ID NO: 392911 - DNA, 53 bp, Artificial
  Synthetic oligonucleotide
gaaggatactcccccgatacggttggctacgatttaatacgtgagttaatttc

SEQ ID NO: 392912 - DNA, 60 bp, Artificial
  Synthetic oligonucleotide
gaaggatatgaggaattcacaatggttgggcgaagagcaacagctatcctaaggaaagca

SEQ ID NO: 392913 - DNA, 55 bp, Artificial
  Synthetic oligonucleotide
gaaggatcaggcgcgagcgtgtccaccatagagcagacttcatcgcacaaccagg

SEQ ID NO: 392914 - DNA, 60 bp, Artificial
  Synthetic oligonucleotide
gaaggatcttcatcgtgcgtaaatttgccgtatagacttgtaaattgcattgatttgtac

SEQ ID NO: 392915 - DNA, 55 bp, Artificial
  Synthetic oligonucleotide
gaaggatgaacggttcatgagtttgtcaaacgccatgcctcaagcgagtggtggg

SEQ ID NO: 392916 - DNA, 52 bp, Artificial
  Synthetic oligonucleotide
gaaggatggaatttttttggacaatattaaagccgaacgattcaatcttttt

SEQ ID NO: 392917 - DNA, 51 bp, Artificial
  Synthetic oligonucleotide
gaaggatgtggttgaagtgtacagcaggcagtgcttgtgaatttaaaataa

SEQ ID NO: 392918 - DNA, 55 bp, Artificial
  Synthetic oligonucleotide
gaaggattaataaattgcacatcagcaagtgtctgactcacggggtctacatttt

SEQ ID NO: 392919 - DNA, 55 bp, Artificial
  Synthetic oligonucleotide
gaaggattctacgatgattgaccttgaaggaacgacatcttttactaataggcgt

SEQ ID NO: 392920 - DNA, 58 bp, Artificial
  Synthetic oligonucleotide
gaaggattgattattattgggcggtattgaaaccaggtcagacattgcgagtaaaatc

SEQ ID NO: 392921 - DNA, 55 bp, Artificial
  Synthetic oligonucleotide
gaaggattttcagcggagtcaagaaaactgctccttgttgttcaggctcttaggg

SEQ ID NO: 392922 - DNA, 59 bp, Artificial
  Synthetic oligonucleotide
gaaggcaaaagctgcatcaataggtgtttttatgtggagttaataagaggaaggccaca

SEQ ID NO: 392923 - DNA, 58 bp, Artificial
  Synthetic oligonucleotide
gaaggcaaatcaacgtttgccagagatctgtatagaactgggtcttggttttatacac

SEQ ID NO: 392924 - DNA, 60 bp, Artificial
  Synthetic oligonucleotide
gaaggcaactatctaatggatgtgatagggtatgttaagagcgcatcatattcagcagtg

SEQ ID NO: 392925 - DNA, 59 bp, Artificial
  Synthetic oligonucleotide
gaaggcacctcagtttaccatgcttttgaaaccttgcaacagcagtgcaagaaagaagt

SEQ ID NO: 392926 - DNA, 53 bp, Artificial
  Synthetic oligonucleotide
gaaggcagacgtaaaacccaagttagataacacacccttgtcgaagtacgtaa

SEQ ID NO: 392927 - DNA, 60 bp, Artificial
  Synthetic oligonucleotide
gaaggcagagatcaactctggaagggacctggtgagctattgtggaaaggggaaggagca

SEQ ID NO: 392928 - DNA, 60 bp, Artificial
  Synthetic oligonucleotide
gaaggcagcggagcgttttgctgaaagcgagatcggtgcggcgacaatagatgggttggt

SEQ ID NO: 392929 - DNA, 52 bp, Artificial
  Synthetic oligonucleotide
gaaggcagggggtcgtcgctaacgacccatatgtacagtgcagagcgcgcac

SEQ ID NO: 392930 - DNA, 55 bp, Artificial
  Synthetic oligonucleotide
gaaggcagttgtgccgccagtggaagggtcctatccggatttccggctcagccca

SEQ ID NO: 392931 - DNA, 58 bp, Artificial
  Synthetic oligonucleotide
gaaggcattatgagcaactacagctaggagcaaggacgaacccgactacgggtgtcgg

SEQ ID NO: 392932 - DNA, 60 bp, Artificial
  Synthetic oligonucleotide
gaaggcattgcgtttgaacgatcacattaaaattacacgagattttttgcctgctgacac

SEQ ID NO: 392933 - DNA, 56 bp, Artificial
  Synthetic oligonucleotide
gaaggccaaagtgaattacacgagaagtccgctcttctgtggctggcgcatgagcc

SEQ ID NO: 392934 - DNA, 60 bp, Artificial
  Synthetic oligonucleotide
gaaggccagtgacgtattgccccatagctcttccccccttattgggatcatgaatgtgga

SEQ ID NO: 392935 - DNA, 60 bp, Artificial
  Synthetic oligonucleotide
gaaggcccatgtaaggtccaatcttatgagcaacgcgatgatattaagcatactggtgtt

SEQ ID NO: 392936 - DNA, 60 bp, Artificial
  Synthetic oligonucleotide
gaaggccgagaggccctcactacagatccaaacactcttgcatgcagggacgtcaatgat

SEQ ID NO: 392937 - DNA, 55 bp, Artificial
  Synthetic oligonucleotide
gaaggccgcgcatctttcggcatttcttgcgcaaaaggagatagcttccgagttc

SEQ ID NO: 392938 - DNA, 55 bp, Artificial
  Synthetic oligonucleotide
gaaggcctagaagctttagatctccatacaagtgcagggtatccatacacagcat

SEQ ID NO: 392939 - DNA, 55 bp, Artificial
  Synthetic oligonucleotide
gaaggcctatttgccttttacgtgcagtggattgacctaggcgctccctggttag

SEQ ID NO: 392940 - DNA, 55 bp, Artificial
  Synthetic oligonucleotide
gaaggccttccctgtagggaagcgggctcctctgcagatacggtcctatgcatgg

SEQ ID NO: 392941 - DNA, 60 bp, Artificial
  Synthetic oligonucleotide
gaaggcgaacgccatctagtgagcaaactatatactgatgacatgcggccagaaacggtt

SEQ ID NO: 392942 - DNA, 55 bp, Artificial
  Synthetic oligonucleotide
gaaggcgaagaaagacccataagttacaatgatcagattcgcgattacaggcgaa

SEQ ID NO: 392943 - DNA, 60 bp, Artificial
  Synthetic oligonucleotide
gaaggcgaggggataccgctgtatgatgcgatcaaatgcatgaagacctttttcggctgg

SEQ ID NO: 392944 - DNA, 60 bp, Artificial
  Synthetic oligonucleotide
gaaggcgatgaatagctggagaacttctttcagtgcttggacatcagaagtggagaatat

SEQ ID NO: 392945 - DNA, 54 bp, Artificial
  Synthetic oligonucleotide
gaaggcgccattacagatttgctaaaacatttaaccgtttttttacatgtaaca

SEQ ID NO: 392946 - DNA, 49 bp, Artificial
  Synthetic oligonucleotide
gaaggcggggggccggaggccccccggtggcccccctccaagtagtgga

SEQ ID NO: 392947 - DNA, 58 bp, Artificial
  Synthetic oligonucleotide
gaaggcgggtatcttatataaaagagagacgacacgtagcgcctcattttgcgggtca

SEQ ID NO: 392948 - DNA, 56 bp, Artificial
  Synthetic oligonucleotide
gaaggcggtgacaataagggaacctactgtggtgcaccaatcctaggtccaggaag

SEQ ID NO: 392949 - DNA, 55 bp, Artificial
  Synthetic oligonucleotide
gaaggctaaacacaatgcctattctgatggagtgctttatccaaagcttacaata

SEQ ID NO: 392950 - DNA, 55 bp, Artificial
  Synthetic oligonucleotide
gaaggctaatgtactgattgggcaaggggacgtagtgttggtaatgaaacggaaa

SEQ ID NO: 392951 - DNA, 55 bp, Artificial
  Synthetic oligonucleotide
gaaggctatagctggtgttaccgcgttgacgcaatccctttcaacagtgagcact

SEQ ID NO: 392952 - DNA, 55 bp, Artificial
  Synthetic oligonucleotide
gaaggctatagggctgtcagcttgggttcctgtgagtggttcgaccacgtggtat

SEQ ID NO: 392953 - DNA, 60 bp, Artificial
  Synthetic oligonucleotide
gaaggctcgcgctgagcagacatctcgggtccgccccgtggtgatcatggtctctggcag

SEQ ID NO: 392954 - DNA, 55 bp, Artificial
  Synthetic oligonucleotide
gaaggctgagggatgacagcggtagccaagagcgtcatgtcatatcaggtggaaa

SEQ ID NO: 392955 - DNA, 53 bp, Artificial
  Synthetic oligonucleotide
gaaggctggcgttttatataagagggaaactacccgtagcgcctcattttttg

SEQ ID NO: 392956 - DNA, 55 bp, Artificial
  Synthetic oligonucleotide
gaaggctgtaaacaaataatagcacagctacaaccagctattaagacaggaacag

SEQ ID NO: 392957 - DNA, 53 bp, Artificial
  Synthetic oligonucleotide
gaaggctgtatcgcaccgccttacccacaagacgggctgcctaaacgtgcact

SEQ ID NO: 392958 - DNA, 60 bp, Artificial
  Synthetic oligonucleotide
gaaggctgtgtccctcatgtgctaccatataaggccgtgacagcccatggctactgtggc

SEQ ID NO: 392959 - DNA, 57 bp, Artificial
  Synthetic oligonucleotide
gaaggcttcaaccgttcagttttgcactcgtgattcttataaaggtagagtccgtgc

SEQ ID NO: 392960 - DNA, 59 bp, Artificial
  Synthetic oligonucleotide
gaaggcttgcagcaaagagtgggcgactgttcttaggaactgagctcagtgaaaagtta

SEQ ID NO: 392961 - DNA, 60 bp, Artificial
  Synthetic oligonucleotide
gaagggaaaacaatcatagtggcagtccatgtggccagtggctatatagaagcagaagtt

SEQ ID NO: 392962 - DNA, 56 bp, Artificial
  Synthetic oligonucleotide
gaagggaacacatctggttttagtaagcctacatcatagttttgaggttcaattcc

SEQ ID NO: 392963 - DNA, 60 bp, Artificial
  Synthetic oligonucleotide
gaagggaacgtcagagtgacctccgcagcgtcgttcgtgagagcgtactctacgcgctcc

SEQ ID NO: 392964 - DNA, 54 bp, Artificial
  Synthetic oligonucleotide
gaagggaactaatgcatgggttaataaagacctaggggagggtttctctattca

SEQ ID NO: 392965 - DNA, 55 bp, Artificial
  Synthetic oligonucleotide
gaagggaacttaccaatacagtatcagaaatttatgcctactctaccagctaatg

SEQ ID NO: 392966 - DNA, 52 bp, Artificial
  Synthetic oligonucleotide
gaagggaacttttctaattggtgcagttcaaaagggggggaatggtcagtgg

SEQ ID NO: 392967 - DNA, 60 bp, Artificial
  Synthetic oligonucleotide
gaagggaaggagatgatgtgtgctatcctgggaaattcacaaatgaggagtcattaaggc

SEQ ID NO: 392968 - DNA, 57 bp, Artificial
  Synthetic oligonucleotide
gaagggaagttgtatgacgcacgctccaaagttactcagggtgttttgaactcgatg

SEQ ID NO: 392969 - DNA, 55 bp, Artificial
  Synthetic oligonucleotide
gaagggaataactaatgagacaaaagaacgccctacgtgggcattttatcgcacc

SEQ ID NO: 392970 - DNA, 55 bp, Artificial
  Synthetic oligonucleotide
gaagggacaagatctcatcgctacccaagcggcccatggacgaaacgatcgatga

SEQ ID NO: 392971 - DNA, 53 bp, Artificial
  Synthetic oligonucleotide
gaagggactacttggtttagcggcgtgcttccgttgggggtcttcacacgtgt

SEQ ID NO: 392972 - DNA, 52 bp, Artificial
  Synthetic oligonucleotide
gaagggactttccgcggggactttccactagggcgttccaggaggcgtggtc

SEQ ID NO: 392973 - DNA, 54 bp, Artificial
  Synthetic oligonucleotide
gaagggagaaactttgttctgctggtttaatcaaaactgttggaaacgattatc

SEQ ID NO: 392974 - DNA, 60 bp, Artificial
  Synthetic oligonucleotide
gaagggagattggacatcgcagaatatagcgtttgctgttgcccaattcttgagtgctcc

SEQ ID NO: 392975 - DNA, 55 bp, Artificial
  Synthetic oligonucleotide
gaagggaggcggaaaacaaatctatatgggttcattgtaaaaggaagatctcatc

SEQ ID NO: 392976 - DNA, 60 bp, Artificial
  Synthetic oligonucleotide
gaagggaggctgatacaaaacagcataacaatagagagaatggttctctcggcgtttgat

SEQ ID NO: 392977 - DNA, 55 bp, Artificial
  Synthetic oligonucleotide
gaagggagtgtacataaacacagccctgttgaatgcatcctgtgcagcaatggat

SEQ ID NO: 392978 - DNA, 56 bp, Artificial
  Synthetic oligonucleotide
gaagggatagagaatgtttggtcactcacattgacctcgcatgcagaattgatata

SEQ ID NO: 392979 - DNA, 60 bp, Artificial
  Synthetic oligonucleotide
gaagggattctgacaaagacagggtgcacggagaatgcattgcaaggttattatgtgtgt

SEQ ID NO: 392980 - DNA, 60 bp, Artificial
  Synthetic oligonucleotide
gaagggcaagtcatgattatggtgtcaagctcatcagaatgggagaatcagctcgttagt

SEQ ID NO: 392981 - DNA, 51 bp, Artificial
  Synthetic oligonucleotide
gaagggcaatcaagtacgaattgtgagatagggtcggattatatcccggcc

SEQ ID NO: 392982 - DNA, 55 bp, Artificial
  Synthetic oligonucleotide
gaagggcagctaatagaagctctgctagatacaggagctgatgatacagtaatag

SEQ ID NO: 392983 - DNA, 54 bp, Artificial
  Synthetic oligonucleotide
gaagggcagtgcccttactgcatgactcttacagaagcaacagagagtgccctc

SEQ ID NO: 392984 - DNA, 55 bp, Artificial
  Synthetic oligonucleotide
gaagggccaattgctgctctgcgcttcgtatctcggcttctcagtggcgcagccg

SEQ ID NO: 392985 - DNA, 54 bp, Artificial
  Synthetic oligonucleotide
gaagggccattttgtgccagtagaccagaacgggaatctgtttagggttggaac

SEQ ID NO: 392986 - DNA, 50 bp, Artificial
  Synthetic oligonucleotide
gaagggccttgtacgacttttcataatagattaatgattacctctacaaa

SEQ ID NO: 392987 - DNA, 59 bp, Artificial
  Synthetic oligonucleotide
gaagggcgacactggcgctcagggtccgacaggagccacaggcgcacaggggccgtcag

SEQ ID NO: 392988 - DNA, 57 bp, Artificial
  Synthetic oligonucleotide
gaagggctcgaggtcacgtggggtaacaatgagccgtacaagtattggccgcagtta

SEQ ID NO: 392989 - DNA, 60 bp, Artificial
  Synthetic oligonucleotide
gaagggctctaataggcctattatagatataagtatggcagattatagcattgattccag

SEQ ID NO: 392990 - DNA, 56 bp, Artificial
  Synthetic oligonucleotide
gaaggggaccaggaagaattgtcagcacttgtggagatggggcatcatgctccttg

SEQ ID NO: 392991 - DNA, 55 bp, Artificial
  Synthetic oligonucleotide
gaaggggaggtacaggtggtctccacggctacccagtccttcctagcgacctcca

SEQ ID NO: 392992 - DNA, 55 bp, Artificial
  Synthetic oligonucleotide
gaaggggagtcgattgaaaagaaggctgtcacaaaggcttgtgttagcatgagcg

SEQ ID NO: 392993 - DNA, 50 bp, Artificial
  Synthetic oligonucleotide
gaaggggcaacacgaggcagcaattgacttctttgaggggatggtcagtg

SEQ ID NO: 392994 - DNA, 55 bp, Artificial
  Synthetic oligonucleotide
gaaggggctgcattactgttaaaggatgctcaagagctttggaattgtctaagtt

SEQ ID NO: 392995 - DNA, 53 bp, Artificial
  Synthetic oligonucleotide
gaaggggcttgagtggttcgagaagaattcaggaaccatcaaatcctgggatg

SEQ ID NO: 392996 - DNA, 54 bp, Artificial
  Synthetic oligonucleotide
gaagggggaggtctactgttcaaaaaatgggtgcgtcgccctgtggcggagaat

SEQ ID NO: 392997 - DNA, 54 bp, Artificial
  Synthetic oligonucleotide
gaaggggggtggcgcccccctttataggcatggagaccaggccacgccacaacc

SEQ ID NO: 392998 - DNA, 55 bp, Artificial
  Synthetic oligonucleotide
gaaggggtactctagatgagttactctagttgaggctcctccaaaacctgctcat

SEQ ID NO: 392999 - DNA, 55 bp, Artificial
  Synthetic oligonucleotide
gaaggggtaggtcggtagtcccggaagtacctcacgtgagcgtcgcacagcacga

SEQ ID NO: 393000 - DNA, 55 bp, Artificial
  Synthetic oligonucleotide
gaaggggtatccttcttaagccgaaaagtccgtgagcactgccatgcccgtgacg

SEQ ID NO: 393001 - DNA, 54 bp, Artificial
  Synthetic oligonucleotide
gaaggggttcttgaaggaccaaccgagaggttggcaatttgaaccaccatccga

SEQ ID NO: 393002 - DNA, 55 bp, Artificial
  Synthetic oligonucleotide
gaagggtcctattggtggctatccctattggccctattggcctggggagcaaacg

SEQ ID NO: 393003 - DNA, 55 bp, Artificial
  Synthetic oligonucleotide
gaagggtctatcccttatgatattaatactatgctgaatgccattggtggacatc

SEQ ID NO: 393004 - DNA, 56 bp, Artificial
  Synthetic oligonucleotide
gaagggtctgtacgtcgttccgcaccaaattcgcatggaagtgtggtccggtctgg

SEQ ID NO: 393005 - DNA, 55 bp, Artificial
  Synthetic oligonucleotide
gaagggtgaaacagacaatgattcaaggattctgggactacttcttgatatggat

SEQ ID NO: 393006 - DNA, 55 bp, Artificial
  Synthetic oligonucleotide
gaagggtgactactactttactacggctcccattgaggttgtagccgcacctaag

SEQ ID NO: 393007 - DNA, 60 bp, Artificial
  Synthetic oligonucleotide
gaagggtgattgcccacctatagaacttgtaaacacatacattgaggatggggatatgtg

SEQ ID NO: 393008 - DNA, 58 bp, Artificial
  Synthetic oligonucleotide
gaagggttaaaaatagagactctgataggtaaattggtctccgatatatcggagatca

SEQ ID NO: 393009 - DNA, 55 bp, Artificial
  Synthetic oligonucleotide
gaagggttaaatttatacggatggaaactgctgtgtgttgatcctaaaaatacgc

SEQ ID NO: 393010 - DNA, 58 bp, Artificial
  Synthetic oligonucleotide
gaagggttccaggagagccacaaacatgcagtgcggggttgttctcctggtcggatta

SEQ ID NO: 393011 - DNA, 52 bp, Artificial
  Synthetic oligonucleotide
gaagggttgaacacccgccaggaaacgtgggccattgaccgttatggaaaac

SEQ ID NO: 393012 - DNA, 55 bp, Artificial
  Synthetic oligonucleotide
gaagggttgagaaagcgatggggagccagacacttcttgacggccggagcattcc

SEQ ID NO: 393013 - DNA, 54 bp, Artificial
  Synthetic oligonucleotide
gaagggttggttgttggagttttcacgtgagacgttggtgcaacgtaactgcgt

SEQ ID NO: 393014 - DNA, 54 bp, Artificial
  Synthetic oligonucleotide
gaagggttgttcctttaaccctgtatggaaagtacctgatatttcggatactca

SEQ ID NO: 393015 - DNA, 55 bp, Artificial
  Synthetic oligonucleotide
gaagggtttggggatctcctatggcaggaagaagcgacgaagacctgcgagagct

SEQ ID NO: 393016 - DNA, 55 bp, Artificial
  Synthetic oligonucleotide
gaaggtaaacagttgaagcgtgtaggagttgctgaattgttggagctcttccgtg

SEQ ID NO: 393017 - DNA, 55 bp, Artificial
  Synthetic oligonucleotide
gaaggtaagtcaccaggtactggattgtcttacaagagtcaacggtaaattaggc

SEQ ID NO: 393018 - DNA, 55 bp, Artificial
  Synthetic oligonucleotide
gaaggtaatgagacactgttacaacagttagaaccagctctcaagacagggtcag

SEQ ID NO: 393019 - DNA, 55 bp, Artificial
  Synthetic oligonucleotide
gaaggtacattcaccatcgaatttaagggtcaggtaacctcttttctaatgactg

SEQ ID NO: 393020 - DNA, 55 bp, Artificial
  Synthetic oligonucleotide
gaaggtactatgtaccatcctaaccaagcaaggtggaaagagaggttgtatttgg

SEQ ID NO: 393021 - DNA, 55 bp, Artificial
  Synthetic oligonucleotide
gaaggtagatctcacaccacacaacccgttacttgcatgtgagagacatagcaca

SEQ ID NO: 393022 - DNA, 55 bp, Artificial
  Synthetic oligonucleotide
gaaggtagcgaatcttccttgtctccaacctgctagcggcctagcaagtgaatgc

SEQ ID NO: 393023 - DNA, 50 bp, Artificial
  Synthetic oligonucleotide
gaaggtaggcgtgtgggtgaatatggtacgcgcggagaactagatagaca

SEQ ID NO: 393024 - DNA, 60 bp, Artificial
  Synthetic oligonucleotide
gaaggtatcaactgacaaggaacatagcgagcttgagatcaatgtgctcatacctcaggt

SEQ ID NO: 393025 - DNA, 59 bp, Artificial
  Synthetic oligonucleotide
gaaggtatcactttagtttacctgtaggtgcatggccagttatgaatggaggcgctgtt

SEQ ID NO: 393026 - DNA, 55 bp, Artificial
  Synthetic oligonucleotide
gaaggtatcgaaaagcgagaatggtatgcaccttatttcgagagagtggcaaccc

SEQ ID NO: 393027 - DNA, 57 bp, Artificial
  Synthetic oligonucleotide
gaaggtatgattcaacgcttgactcgagtatactgcctcggggaccaatatctaagt

SEQ ID NO: 393028 - DNA, 59 bp, Artificial
  Synthetic oligonucleotide
gaaggtatggatattcccttgccagacatcaatttgactggacgtgaacgccctgtcgt

SEQ ID NO: 393029 - DNA, 56 bp, Artificial
  Synthetic oligonucleotide
gaaggtatggtcgccccttggcaccatggtctctaccatcagcacagcactctcaa

SEQ ID NO: 393030 - DNA, 55 bp, Artificial
  Synthetic oligonucleotide
gaaggtattgaacttgatgaagcagtagggattatggcaggtcaagttgtctata

SEQ ID NO: 393031 - DNA, 60 bp, Artificial
  Synthetic oligonucleotide
gaaggtcaacaatcatgtggtgtacaaccaccaagaggctggcaagtacgagaatcacac

SEQ ID NO: 393032 - DNA, 55 bp, Artificial
  Synthetic oligonucleotide
gaaggtcaagataaattgccaggttgctcccacttgcgggattggattggcagtt

SEQ ID NO: 393033 - DNA, 60 bp, Artificial
  Synthetic oligonucleotide
gaaggtcactaaatcatgctctgtccttaatgtttttagacgagatgtcattacctgagc

SEQ ID NO: 393034 - DNA, 60 bp, Artificial
  Synthetic oligonucleotide
gaaggtcagccaggtggtgcacgcctaattgaacaggtgctaggcatgcatcatattaaa

SEQ ID NO: 393035 - DNA, 60 bp, Artificial
  Synthetic oligonucleotide
gaaggtccatgtaaggtccagtcatatgatatgaacagcgtgatgatgtgaagcatactg

SEQ ID NO: 393036 - DNA, 54 bp, Artificial
  Synthetic oligonucleotide
gaaggtcctatgaggcctttctttcccagtgtcgggtggatattcctacctggg

SEQ ID NO: 393037 - DNA, 55 bp, Artificial
  Synthetic oligonucleotide
gaaggtcctcactgttgcttggcttgattagaatggactccaacatgttccctcc

SEQ ID NO: 393038 - DNA, 51 bp, Artificial
  Synthetic oligonucleotide
gaaggtctacacatacgcacctccgaacaaacgggagaaccgcactgcttc

SEQ ID NO: 393039 - DNA, 57 bp, Artificial
  Synthetic oligonucleotide
gaaggtctctaaacttaaaattcacccattctggcatgaagctgttatcataatcac

SEQ ID NO: 393040 - DNA, 52 bp, Artificial
  Synthetic oligonucleotide
gaaggtcttgattgaactcgaacccccgtttggtgactcttacatcgtggtg

SEQ ID NO: 393041 - DNA, 56 bp, Artificial
  Synthetic oligonucleotide
gaaggtgaagggcactggtcagatatagtaaagtttattagataccaaaatataaa

SEQ ID NO: 393042 - DNA, 53 bp, Artificial
  Synthetic oligonucleotide
gaaggtgagaaaacgacgatgtgcgtgagacatgaaccagactcagtgctaca

SEQ ID NO: 393043 - DNA, 54 bp, Artificial
  Synthetic oligonucleotide
gaaggtgagattaaacggatgcactcactcctggatcggatttctcagccgcac

SEQ ID NO: 393044 - DNA, 57 bp, Artificial
  Synthetic oligonucleotide
gaaggtgagtgtaaaccaccgaaatcaaggggcaattcgggctaggatcagtctagc

SEQ ID NO: 393045 - DNA, 57 bp, Artificial
  Synthetic oligonucleotide
gaaggtgatgtttaatacactacatgcgtcttggcttacgtgagccaatgccgcgac

SEQ ID NO: 393046 - DNA, 55 bp, Artificial
  Synthetic oligonucleotide
gaaggtgccacctggttggtgattgcactggaaatagatgtcaaagctggactga

SEQ ID NO: 393047 - DNA, 59 bp, Artificial
  Synthetic oligonucleotide
gaaggtgctactcatgcactcgggatggtgcacggcccccgtacgaaaaaagtgctgcc

SEQ ID NO: 393048 - DNA, 56 bp, Artificial
  Synthetic oligonucleotide
gaaggtggatgccagaataagctttgcaatctattatgagcccaccgttgtgttgc

SEQ ID NO: 393049 - DNA, 60 bp, Artificial
  Synthetic oligonucleotide
gaaggtggccaaggccttctcagctctggaagcacggtgcgctgctagagtttcaaggat

SEQ ID NO: 393050 - DNA, 55 bp, Artificial
  Synthetic oligonucleotide
gaaggtggcggaacgccactgtgatagattcgtagttttgaatcagtcgtccata

SEQ ID NO: 393051 - DNA, 60 bp, Artificial
  Synthetic oligonucleotide
gaaggtggggactatagggacagagtcctgctttatgatcaagtctcctaatggccagaa

SEQ ID NO: 393052 - DNA, 54 bp, Artificial
  Synthetic oligonucleotide
gaaggtgggttctttccattttcagcatgtggcggagtgatttacagaacctca

SEQ ID NO: 393053 - DNA, 55 bp, Artificial
  Synthetic oligonucleotide
gaaggtggtactctcgaacaatgtctaaaactaaaaggatggggatgggactgta

SEQ ID NO: 393054 - DNA, 57 bp, Artificial
  Synthetic oligonucleotide
gaaggtggtagcgtatggagtgcaggtcgttaatgcgctggcccagggtattaggtt

SEQ ID NO: 393055 - DNA, 55 bp, Artificial
  Synthetic oligonucleotide
gaaggtgtaacatacaaaactgcctacatgccactttaaaatgtctgtatttgcc

SEQ ID NO: 393056 - DNA, 59 bp, Artificial
  Synthetic oligonucleotide
gaaggtgtatccttcttaagcaggaaagtccgcgaaatgtgccatgcacgtgacgaact

SEQ ID NO: 393057 - DNA, 55 bp, Artificial
  Synthetic oligonucleotide
gaaggtgtcttgacaagagtaatctgatcgtcactagaggtatatgacacaggga

SEQ ID NO: 393058 - DNA, 60 bp, Artificial
  Synthetic oligonucleotide
gaaggtgtgaacacgcttcctgggttctctgagctatttggcccttatgcatctgcgtat

SEQ ID NO: 393059 - DNA, 60 bp, Artificial
  Synthetic oligonucleotide
gaaggtgtgataagtacgaccatacagaacttgacaccacagaatattagtgcatctgaa

SEQ ID NO: 393060 - DNA, 60 bp, Artificial
  Synthetic oligonucleotide
gaaggtgtgcagaaccttactggcaaaatctgtgttcaacagcttatatgcatctccaca

SEQ ID NO: 393061 - DNA, 56 bp, Artificial
  Synthetic oligonucleotide
gaaggtgtgctgaatgaagtactagtggtacctaatattagagagagccatccaag

SEQ ID NO: 393062 - DNA, 57 bp, Artificial
  Synthetic oligonucleotide
gaaggtgtgtcaacgaattgtgggtcttttaggatttgctgctcctttcacacaatg

SEQ ID NO: 393063 - DNA, 55 bp, Artificial
  Synthetic oligonucleotide
gaaggttacacctttgccattcttgtaggtgatagtcatttagtgcagtctggtg

SEQ ID NO: 393064 - DNA, 57 bp, Artificial
  Synthetic oligonucleotide
gaaggttagtggctttgacgcagattcaccttttaccatcaataacaacttggtgga

SEQ ID NO: 393065 - DNA, 55 bp, Artificial
  Synthetic oligonucleotide
gaaggttcaaaggaaccagcagtactcaattcaaaagatcctagactcaagactg

SEQ ID NO: 393066 - DNA, 60 bp, Artificial
  Synthetic oligonucleotide
gaaggttcacacctgaaatagcagctagacctaaagtaagaggacaagcaggcagactga

SEQ ID NO: 393067 - DNA, 57 bp, Artificial
  Synthetic oligonucleotide
gaaggttgcgtctctacacgaggcgtaacctgggagggcgctattatagcgcctagt

SEQ ID NO: 393068 - DNA, 59 bp, Artificial
  Synthetic oligonucleotide
gaaggttggacaaggacccgagcaaatgtatataccaactgctcgatctgaatcctttg

SEQ ID NO: 393069 - DNA, 55 bp, Artificial
  Synthetic oligonucleotide
gaaggttgtaaacaattaatgggacagatacaaccagctcttcagacaggatcag

SEQ ID NO: 393070 - DNA, 55 bp, Artificial
  Synthetic oligonucleotide
gaaggttgtaagcaaatcatacaacaactacaaccctcgattcagacaggatcgg

SEQ ID NO: 393071 - DNA, 60 bp, Artificial
  Synthetic oligonucleotide
gaaggttgtgtcccccatgtgttgccatataaggctgcgacagcccatggctactgtggt

SEQ ID NO: 393072 - DNA, 52 bp, Artificial
  Synthetic oligonucleotide
gaaggtttaaattgcaaaagaaagccacctttggaggaggaccgtaccacgc

SEQ ID NO: 393073 - DNA, 55 bp, Artificial
  Synthetic oligonucleotide
gaaggtttagactgaaaagagatttcctcgacctcatatctaaagggatggcccc

SEQ ID NO: 393074 - DNA, 55 bp, Artificial
  Synthetic oligonucleotide
gaaggtttctcagctgaatcaaggaaactgcttcttattgttcaggctcttaggg

SEQ ID NO: 393075 - DNA, 59 bp, Artificial
  Synthetic oligonucleotide
gaaggtttgaaagagtcgaagcgcccgccaatctgcaattggcaatcactaacctccaa

SEQ ID NO: 393076 - DNA, 50 bp, Artificial
  Synthetic oligonucleotide
gaaggtttgccttaggcttcaagagtatggacgactcgatggatttggac

SEQ ID NO: 393077 - DNA, 55 bp, Artificial
  Synthetic oligonucleotide
gaagtaaaaaactgttcttttaagatgaccacagaactaagagataagaggaaga

SEQ ID NO: 393078 - DNA, 55 bp, Artificial
  Synthetic oligonucleotide
gaagtaaacgcaagaattgaaccatttttgaagacaacaccacgccccctgagat

SEQ ID NO: 393079 - DNA, 52 bp, Artificial
  Synthetic oligonucleotide
gaagtaaacgcaagaattgaaccctttttgaaaacaacaccacgcccactta

SEQ ID NO: 393080 - DNA, 55 bp, Artificial
  Synthetic oligonucleotide
gaagtaaagaacgcaattcaatttgtgtggccttttgccggttatttcactcgcg

SEQ ID NO: 393081 - DNA, 60 bp, Artificial
  Synthetic oligonucleotide
gaagtaaatgcaaggatagagccatttctgaggacgacaccacgccctctcagattgccg

SEQ ID NO: 393082 - DNA, 55 bp, Artificial
  Synthetic oligonucleotide
gaagtaaatgccagaatcgaaccattttcaaagacaacaccccgaccactcaaaa

SEQ ID NO: 393083 - DNA, 57 bp, Artificial
  Synthetic oligonucleotide
gaagtaaatgccagaatcgagccatttttaaagacaacaccccggccactcaggata

SEQ ID NO: 393084 - DNA, 60 bp, Artificial
  Synthetic oligonucleotide
gaagtaacaacatcacagtttcacactgtgaattggttgctaatgttaccaataccacag

SEQ ID NO: 393085 - DNA, 59 bp, Artificial
  Synthetic oligonucleotide
gaagtaacatacagaagctttatattgattgaggaaaatagcaactcttgtggtgggta

SEQ ID NO: 393086 - DNA, 51 bp, Artificial
  Synthetic oligonucleotide
gaagtaacattcttgggcttctctataactcaaacaggaagaggattaacc

SEQ ID NO: 393087 - DNA, 59 bp, Artificial
  Synthetic oligonucleotide
gaagtaactaagcagatggtacaagatgtatcaaatgatgttagagatacttatgcacg

SEQ ID NO: 393088 - DNA, 56 bp, Artificial
  Synthetic oligonucleotide
gaagtaactcaagttactaatcaagaacaagttaatatcacagtgctaaaccgtag

SEQ ID NO: 393089 - DNA, 55 bp, Artificial
  Synthetic oligonucleotide
gaagtaactgcgatgtaatttcaaaaggagacaacatccttgtttatgtggcgag

SEQ ID NO: 393090 - DNA, 51 bp, Artificial
  Synthetic oligonucleotide
gaagtaacttagaagctgtaaatcaacgatcaatagtaggtgtgacacacc

SEQ ID NO: 393091 - DNA, 52 bp, Artificial
  Synthetic oligonucleotide
gaagtaatcaatagtggtatcaaggacaggtttgggggtaaaataacgggag

SEQ ID NO: 393092 - DNA, 55 bp, Artificial
  Synthetic oligonucleotide
gaagtaatcactatggttatttagttggtcgtgtaggcaacgatgcttggggaac

SEQ ID NO: 393093 - DNA, 60 bp, Artificial
  Synthetic oligonucleotide
gaagtaatgaggaagtcggtgatcgctacagcttgggtaggccgtgctcctctatatgat

SEQ ID NO: 393094 - DNA, 54 bp, Artificial
  Synthetic oligonucleotide
gaagtacaaacggccagtttgacgatcacactttcagctgaacttctgtcgcgc

SEQ ID NO: 393095 - DNA, 55 bp, Artificial
  Synthetic oligonucleotide
gaagtacaccatcaaggaaatgacacaatcgatgcaggaggaagcactaagaagg

SEQ ID NO: 393096 - DNA, 60 bp, Artificial
  Synthetic oligonucleotide
gaagtacacctcctttccatggctgctaggatgtgctgcaaactggatcctgcgcgggac

SEQ ID NO: 393097 - DNA, 54 bp, Artificial
  Synthetic oligonucleotide
gaagtacactaagtgttcccctgatggctctaacgtcggtcagactctaccggg

SEQ ID NO: 393098 - DNA, 55 bp, Artificial
  Synthetic oligonucleotide
gaagtacagcataagatggaattacaaagcttgaactgcttagctaaagctacta

SEQ ID NO: 393099 - DNA, 53 bp, Artificial
  Synthetic oligonucleotide
gaagtacatcgggccacctgcctgggtactgggggcgctgggaattgtattcc

SEQ ID NO: 393100 - DNA, 54 bp, Artificial
  Synthetic oligonucleotide
gaagtaccgttgcacgtacacttgcaacgctattaaatatacctgaaaatcaaa

SEQ ID NO: 393101 - DNA, 60 bp, Artificial
  Synthetic oligonucleotide
gaagtacgagaatcacacggagaacgccttgttattgtatatggcatgcactcatgcgtc

SEQ ID NO: 393102 - DNA, 58 bp, Artificial
  Synthetic oligonucleotide
gaagtacgtagacaaactaactactatttatgatatattcatgtccatgttaacgagg

SEQ ID NO: 393103 - DNA, 55 bp, Artificial
  Synthetic oligonucleotide
gaagtagaagaggggaatacccttgccctgtttaatagccaggagcaagaggaag

SEQ ID NO: 393104 - DNA, 59 bp, Artificial
  Synthetic oligonucleotide
gaagtagatttgatccaaccaagatgaggttccctccttgcttggcaggtcagcgtggg

SEQ ID NO: 393105 - DNA, 55 bp, Artificial
  Synthetic oligonucleotide
gaagtagcacaaggagcttggagagctattctccacatacctaggagactcagac

SEQ ID NO: 393106 - DNA, 55 bp, Artificial
  Synthetic oligonucleotide
gaagtagcattggcaaagcctttacaaccaccctcaaaggagcgcagagactagc

SEQ ID NO: 393107 - DNA, 56 bp, Artificial
  Synthetic oligonucleotide
gaagtagctctttaggctctccccggcgattcgggagtatttgccccatatgttcg

SEQ ID NO: 393108 - DNA, 55 bp, Artificial
  Synthetic oligonucleotide
gaagtagctttacagctttcaatgcaggagcgtgccagactagtaccagcagagg

SEQ ID NO: 393109 - DNA, 55 bp, Artificial
  Synthetic oligonucleotide
gaagtaggagtctttattatgaaacccgcttaccgcttgactcatccgattctcg

SEQ ID NO: 393110 - DNA, 56 bp, Artificial
  Synthetic oligonucleotide
gaagtaggcaatggagttttccggattatggcaagaggactgttagggaaatacca

SEQ ID NO: 393111 - DNA, 58 bp, Artificial
  Synthetic oligonucleotide
gaagtaggtaatttcgatcacatgactaggctacgtgagttggatccctaccaactaa

SEQ ID NO: 393112 - DNA, 55 bp, Artificial
  Synthetic oligonucleotide
gaagtaggttgggaaaataccgagacacatactagacattactttgagattaagt

SEQ ID NO: 393113 - DNA, 58 bp, Artificial
  Synthetic oligonucleotide
gaagtagtacaaagaatttgtagagctatcctcaacatacctagaagaataagacagg

SEQ ID NO: 393114 - DNA, 60 bp, Artificial
  Synthetic oligonucleotide
gaagtataagttatattgcaatcaatccctgcagcacactgagaacacccagagcatatc

SEQ ID NO: 393115 - DNA, 59 bp, Artificial
  Synthetic oligonucleotide
gaagtatagcccaatggatcgtgaagaatttgacaagcaaatcaaagagttactggacc

SEQ ID NO: 393116 - DNA, 60 bp, Artificial
  Synthetic oligonucleotide
gaagtatagggtcaatcctagtaataatgctctgttcacatggcttcagggacaagcgca

SEQ ID NO: 393117 - DNA, 55 bp, Artificial
  Synthetic oligonucleotide
gaagtatatggggttctacaaacctagcaagctaaacagagaagcttacacacag

SEQ ID NO: 393118 - DNA, 60 bp, Artificial
  Synthetic oligonucleotide
gaagtatcaatctgatatcattcgaggtgctaagggtgggtcgattatgatgatgaaccc

SEQ ID NO: 393119 - DNA, 55 bp, Artificial
  Synthetic oligonucleotide
gaagtatcaccaccagtgatataacgcacaagcaattcttgttccccggagctgg

SEQ ID NO: 393120 - DNA, 60 bp, Artificial
  Synthetic oligonucleotide
gaagtatctcacgcctgccgttaaggtgcagatggctgctcgcgcgttgggcctgtcccc

SEQ ID NO: 393121 - DNA, 55 bp, Artificial
  Synthetic oligonucleotide
gaagtatctctcacagcctctgcagggtcaggtgaaacttcatcctcagaccaca

SEQ ID NO: 393122 - DNA, 58 bp, Artificial
  Synthetic oligonucleotide
gaagtatgagatggctgacacacaagaacggttcttaccctattcaagacgcccaata

SEQ ID NO: 393123 - DNA, 60 bp, Artificial
  Synthetic oligonucleotide
gaagtatgaggctccgacagttgaccgggattgcgggagtcttatagtcgcacaggtgga

SEQ ID NO: 393124 - DNA, 60 bp, Artificial
  Synthetic oligonucleotide
gaagtatgatgtcaggaaaactcatgcaatatgttttgctggtgatgacatgtgcgccaa

SEQ ID NO: 393125 - DNA, 60 bp, Artificial
  Synthetic oligonucleotide
gaagtatggattgaactcagtagtcagtgagcttcgtaggcggacaaagacgtatgttaa

SEQ ID NO: 393126 - DNA, 55 bp, Artificial
  Synthetic oligonucleotide
gaagtatgggttagataagcttttgcagagtctgatggaggatatctactgtcat

SEQ ID NO: 393127 - DNA, 52 bp, Artificial
  Synthetic oligonucleotide
gaagtatgttttgtctgtgtttgagtcttctcggtctactactatgttggcc

SEQ ID NO: 393128 - DNA, 55 bp, Artificial
  Synthetic oligonucleotide
gaagtattaatgtggaagtttgacagccgtctggcactgaaacacagagcccaag

SEQ ID NO: 393129 - DNA, 59 bp, Artificial
  Synthetic oligonucleotide
gaagtattcacatcaaatggatggggtgctgtaaattcaggagtaggagtaaccgctgc

SEQ ID NO: 393130 - DNA, 55 bp, Artificial
  Synthetic oligonucleotide
gaagtattgaaattagtgcatccactctcggtgccattcttgagaaatttatcgg

SEQ ID NO: 393131 - DNA, 55 bp, Artificial
  Synthetic oligonucleotide
gaagtcaaagctctggtccaacaattacggccagcatcccgaatctctcgggacg

SEQ ID NO: 393132 - DNA, 56 bp, Artificial
  Synthetic oligonucleotide
gaagtcaacttttgggtcatcaccgattacagtcatgactagtggattcgctttac

SEQ ID NO: 393133 - DNA, 51 bp, Artificial
  Synthetic oligonucleotide
gaagtcacgagttgcgacctcgatatgtccacatttaatgattggacaaaa

SEQ ID NO: 393134 - DNA, 60 bp, Artificial
  Synthetic oligonucleotide
gaagtcacgcctgatagaggccagtagcttgaatgattctgtttatcttagaatgacctt

SEQ ID NO: 393135 - DNA, 60 bp, Artificial
  Synthetic oligonucleotide
gaagtcactcagagcctctacatgtgccaagtctagaagatatccgttcagcagaggttg

SEQ ID NO: 393136 - DNA, 53 bp, Artificial
  Synthetic oligonucleotide
gaagtcactgacacgagcgcgggatgcaattttaatttcccgagagtcttgtc

SEQ ID NO: 393137 - DNA, 58 bp, Artificial
  Synthetic oligonucleotide
gaagtcactgctctcttagacacaggagcagatgactcagtaatacagggtttagaat

SEQ ID NO: 393138 - DNA, 58 bp, Artificial
  Synthetic oligonucleotide
gaagtcagccaggtgtcccttcgactacacttctctaagtgcggttcctccatgaccc

SEQ ID NO: 393139 - DNA, 57 bp, Artificial
  Synthetic oligonucleotide
gaagtcagccttttgcatgggcttgctaaagtttatgcaggggagggtaattagctt

SEQ ID NO: 393140 - DNA, 59 bp, Artificial
  Synthetic oligonucleotide
gaagtcagcgacagaccaagcgattcgtccccactcaattacctaaacgaccaatgcaa

SEQ ID NO: 393141 - DNA, 56 bp, Artificial
  Synthetic oligonucleotide
gaagtcaggtcggattaagccatagtacggaaaaaactatgctacctgtgagcccc

SEQ ID NO: 393142 - DNA, 50 bp, Artificial
  Synthetic oligonucleotide
gaagtcatgttctatgttgagtctgtgttctgactcaacaggagtggata

SEQ ID NO: 393143 - DNA, 55 bp, Artificial
  Synthetic oligonucleotide
gaagtcattaaacagagttattctctgatgaacgggttgtccatccagctaacgg

SEQ ID NO: 393144 - DNA, 58 bp, Artificial
  Synthetic oligonucleotide
gaagtcattgtaatggctaacttcctgccgaaggaaggaatcttttctgaagatcgaa

SEQ ID NO: 393145 - DNA, 55 bp, Artificial
  Synthetic oligonucleotide
gaagtccactatgtatgtcgcagacccctttaaccctccacatagcaatgcacgt

SEQ ID NO: 393146 - DNA, 60 bp, Artificial
  Synthetic oligonucleotide
gaagtccagacgcatactctgctaatggtgggtggcgctcacaaagacaggctgcggtaa

SEQ ID NO: 393147 - DNA, 60 bp, Artificial
  Synthetic oligonucleotide
gaagtccagatgtccctagaggatgtgaaggcccatgtaaggtccagtcgtttgagtcca

SEQ ID NO: 393148 - DNA, 55 bp, Artificial
  Synthetic oligonucleotide
gaagtccagcccattcaacagactagttgcatctttgatgacagctgccttcacg

SEQ ID NO: 393149 - DNA, 58 bp, Artificial
  Synthetic oligonucleotide
gaagtccatacatcaatcgttcgctctattacattatctaatacatgataaaccgctc

SEQ ID NO: 393150 - DNA, 57 bp, Artificial
  Synthetic oligonucleotide
gaagtccatctgtataaggagtatggcttaaatgggtatttgtcagattcttaagag

SEQ ID NO: 393151 - DNA, 55 bp, Artificial
  Synthetic oligonucleotide
gaagtcccaccaaaggctcaagaaaggcctttgcctttcccagaccagactgccc

SEQ ID NO: 393152 - DNA, 60 bp, Artificial
  Synthetic oligonucleotide
gaagtccctcttgtaggatcgggaatggcgacggctattgcaacaggtagagcgattgag

SEQ ID NO: 393153 - DNA, 55 bp, Artificial
  Synthetic oligonucleotide
gaagtccgaacttgaatcgttcacagatcccatcagccagctcgtcgaggagtgc

SEQ ID NO: 393154 - DNA, 55 bp, Artificial
  Synthetic oligonucleotide
gaagtccgcaacgtcatgagattacggggatatagtcatgtggatcgaacgaggc

SEQ ID NO: 393155 - DNA, 55 bp, Artificial
  Synthetic oligonucleotide
gaagtccggatgttccaaggggatgtgagggtccctgtaaggtacagtcttttga

SEQ ID NO: 393156 - DNA, 53 bp, Artificial
  Synthetic oligonucleotide
gaagtccgtgttaggcgtcaaccaccagagggttgcctcggtcggaaaaggct

SEQ ID NO: 393157 - DNA, 56 bp, Artificial
  Synthetic oligonucleotide
gaagtcctagtgctccgggagtaaaaggattcgggttcttgaatggagacaacaca

SEQ ID NO: 393158 - DNA, 54 bp, Artificial
  Synthetic oligonucleotide
gaagtccttgtactatggggtgttcatcacccgtctaacataagggaccaaagg

SEQ ID NO: 393159 - DNA, 56 bp, Artificial
  Synthetic oligonucleotide
gaagtccttgtgctatggggtgttcaccacccgtctaacatagaggaccaaaaagc

SEQ ID NO: 393160 - DNA, 55 bp, Artificial
  Synthetic oligonucleotide
gaagtcgaactcttctttggtgtgattaggtgtggtgtaactttgttacgtatcc

SEQ ID NO: 393161 - DNA, 53 bp, Artificial
  Synthetic oligonucleotide
gaagtcgaagtaaaggtagtagatccttttctaattagcgataaacaacgccg

SEQ ID NO: 393162 - DNA, 57 bp, Artificial
  Synthetic oligonucleotide
gaagtcgaagtggatgattcgtttgttgaagaaaaaatggaagttgacacaattgat

SEQ ID NO: 393163 - DNA, 60 bp, Artificial
  Synthetic oligonucleotide
gaagtcgaatggaacgtgcatgtctccgtacgtgtacttgacgatcccttcatacttgat

SEQ ID NO: 393164 - DNA, 55 bp, Artificial
  Synthetic oligonucleotide
gaagtcgaccacattttagaactatcggaacgtccagatttagcgtatgacctga

SEQ ID NO: 393165 - DNA, 60 bp, Artificial
  Synthetic oligonucleotide
gaagtcgactgcttctactctttgaaatacatcgtacaacacatattcgcaaccgcgtaa

SEQ ID NO: 393166 - DNA, 59 bp, Artificial
  Synthetic oligonucleotide
gaagtcgaggtgaccactcaagtaattatgtgggcctaaagcacgtgcccacatcgtct

SEQ ID NO: 393167 - DNA, 58 bp, Artificial
  Synthetic oligonucleotide
gaagtcgatatttggtgacctgaaaccccacctggagaaacagcgagctcgtaagaca

SEQ ID NO: 393168 - DNA, 54 bp, Artificial
  Synthetic oligonucleotide
gaagtcgggcttacataaaattgaataggcttcgttacaaggggactgttaata

SEQ ID NO: 393169 - DNA, 59 bp, Artificial
  Synthetic oligonucleotide
gaagtcgtgcaaccagaaaacttggaatacaccattgtgataacacctcactcagggga

SEQ ID NO: 393170 - DNA, 58 bp, Artificial
  Synthetic oligonucleotide
gaagtcgtgtaccacacattgtacgcaaagatctttcaaagtatactatgttagacct

SEQ ID NO: 393171 - DNA, 53 bp, Artificial
  Synthetic oligonucleotide
gaagtcgttaaaagatagtaggttccctttttctgttgcgtggatagaagagt

SEQ ID NO: 393172 - DNA, 55 bp, Artificial
  Synthetic oligonucleotide
gaagtcgtttccttacttcagtgttctgagagattacctgcgtttgcagatgcct

SEQ ID NO: 393173 - DNA, 58 bp, Artificial
  Synthetic oligonucleotide
gaagtcgttttcccaaatgaagtgggtgccagaatattaacgtcagagtcacaactga

SEQ ID NO: 393174 - DNA, 56 bp, Artificial
  Synthetic oligonucleotide
gaagtcgtttttgtatcggtgtacaccgattcattctctatccccctatcggtgta

SEQ ID NO: 393175 - DNA, 53 bp, Artificial
  Synthetic oligonucleotide
gaagtctacctacggtaccgaactgccactaacttaccaacagacggatctaa

SEQ ID NO: 393176 - DNA, 55 bp, Artificial
  Synthetic oligonucleotide
gaagtctacgtccaatatggacggtgcacgcggaccaggcattccaagcgaagca

SEQ ID NO: 393177 - DNA, 54 bp, Artificial
  Synthetic oligonucleotide
gaagtctaggtgtccacttaaataattatgtgggcctagtgctcgagcccacat

SEQ ID NO: 393178 - DNA, 55 bp, Artificial
  Synthetic oligonucleotide
gaagtctatcgagtttttgttcaacggaactcaaagctacaagaaccttaagaga

SEQ ID NO: 393179 - DNA, 51 bp, Artificial
  Synthetic oligonucleotide
gaagtctctatcgttgattagcgacacgtggcggccatccgatataatatt

SEQ ID NO: 393180 - DNA, 55 bp, Artificial
  Synthetic oligonucleotide
gaagtctgaattagttaatggggaggatggtgtctattgcgtgacaccgcactct

SEQ ID NO: 393181 - DNA, 54 bp, Artificial
  Synthetic oligonucleotide
gaagtctgggatgtagtcactgaaagggtcgaatacatcgaagtcctgagacat

SEQ ID NO: 393182 - DNA, 56 bp, Artificial
  Synthetic oligonucleotide
gaagtctggtgcagaacggcggaactacttatactacgcctccaactgccgttaac

SEQ ID NO: 393183 - DNA, 59 bp, Artificial
  Synthetic oligonucleotide
gaagtctgttattttccaggacgtgacggctagtgtccagatactagaagtccgtgctg

SEQ ID NO: 393184 - DNA, 55 bp, Artificial
  Synthetic oligonucleotide
gaagtcttgactttggccacaggaccagccatgaccttgtgggagggcaacccgg

SEQ ID NO: 393185 - DNA, 55 bp, Artificial
  Synthetic oligonucleotide
gaagtcttgcagtgtgagtgcaactcctttaggttgtgatatgctgtgctctaag

SEQ ID NO: 393186 - DNA, 57 bp, Artificial
  Synthetic oligonucleotide
gaagtgaaaatcacaaggttgctcgttaaatattcactttgaaagaagcacccattg

SEQ ID NO: 393187 - DNA, 55 bp, Artificial
  Synthetic oligonucleotide
gaagtgaaatctgattaatttcgcgttagtcataccgcgtaatatttgccgaggg

SEQ ID NO: 393188 - DNA, 55 bp, Artificial
  Synthetic oligonucleotide
gaagtgaagattgatcccggtattttccctgatagtccaacagaagggaacccag

SEQ ID NO: 393189 - DNA, 59 bp, Artificial
  Synthetic oligonucleotide
gaagtgaatgccagaatcgagccatttttgaaaacaacaccacgccctctcagattacc

SEQ ID NO: 393190 - DNA, 60 bp, Artificial
  Synthetic oligonucleotide
gaagtgaatgccagaattgaaccattcttgagggaaacaccacgctctctcagattacct

SEQ ID NO: 393191 - DNA, 59 bp, Artificial
  Synthetic oligonucleotide
gaagtgaatgccagaattgaaccatttacaaagacaacaccaaggccactcagactacc

SEQ ID NO: 393192 - DNA, 59 bp, Artificial
  Synthetic oligonucleotide
gaagtgaatgccaggattgaaccattcttgaagacaacaccacgccctcttagattacc

SEQ ID NO: 393193 - DNA, 60 bp, Artificial
  Synthetic oligonucleotide
gaagtgaatgcgtgcagcacaactgcacatggagtcccactagtaaggtttaacccagac

SEQ ID NO: 393194 - DNA, 57 bp, Artificial
  Synthetic oligonucleotide
gaagtgaattatacaaatataaagtagtacaaattgagccactaggagtagcaccca

SEQ ID NO: 393195 - DNA, 60 bp, Artificial
  Synthetic oligonucleotide
gaagtgacagactcctacaagacagatctcggccggttggacgcaagcagggctgctaag

SEQ ID NO: 393196 - DNA, 55 bp, Artificial
  Synthetic oligonucleotide
gaagtgacatatataagtgaatcacacccaatagacaaggccaaatgccatgagc

SEQ ID NO: 393197 - DNA, 55 bp, Artificial
  Synthetic oligonucleotide
gaagtgaccctaagtccacacacctccggtgctcacgggctgttggtccgctggt

SEQ ID NO: 393198 - DNA, 59 bp, Artificial
  Synthetic oligonucleotide
gaagtgacctaccgatgcacaaagaacacggccatgggctcaaccagttcttacaccaa

SEQ ID NO: 393199 - DNA, 55 bp, Artificial
  Synthetic oligonucleotide
gaagtgacggccagaattgagccctttcttaaaacaacaccacgtcctctaagat

SEQ ID NO: 393200 - DNA, 60 bp, Artificial
  Synthetic oligonucleotide
gaagtgacttaaatattgaatcttgctcaactaaatgccagtctgaaattggatggatca

SEQ ID NO: 393201 - DNA, 60 bp, Artificial
  Synthetic oligonucleotide
gaagtgagagttagaagagccattccaagatttgaccggacagtattcattatactctta

SEQ ID NO: 393202 - DNA, 52 bp, Artificial
  Synthetic oligonucleotide
gaagtgaggggaaggttgaatgttaccgtacattatacccggtccccttata

SEQ ID NO: 393203 - DNA, 55 bp, Artificial
  Synthetic oligonucleotide
gaagtgagtaatgcccgccgcaggaatcacacgcggcttcgcagatgcgccagtc

SEQ ID NO: 393204 - DNA, 58 bp, Artificial
  Synthetic oligonucleotide
gaagtgagtcgtgtccctcactctagatttaacgttggcacgtttccgtcaattgcta

SEQ ID NO: 393205 - DNA, 55 bp, Artificial
  Synthetic oligonucleotide
gaagtgatgaacttggagccagaatggaatgataatgtccacggagttggtgtgc

SEQ ID NO: 393206 - DNA, 59 bp, Artificial
  Synthetic oligonucleotide
gaagtgcaaccagcagcccctatacctagacgggtagcgactagcacatctaggttttc

SEQ ID NO: 393207 - DNA, 50 bp, Artificial
  Synthetic oligonucleotide
gaagtgcaatcatcacatacagaagattatacatctctcctcttcacacc

SEQ ID NO: 393208 - DNA, 55 bp, Artificial
  Synthetic oligonucleotide
gaagtgcaatgttcgtgccatttccagacgtattgcaaaatacagctgttggctc

SEQ ID NO: 393209 - DNA, 60 bp, Artificial
  Synthetic oligonucleotide
gaagtgccaatcgacacaacgtcatcggctgagtaaacgctcatggattatgggagtacc

SEQ ID NO: 393210 - DNA, 60 bp, Artificial
  Synthetic oligonucleotide
gaagtgccctatgggcttcgcatatgacacccgctgctttgactcaacagtcactgagag

SEQ ID NO: 393211 - DNA, 60 bp, Artificial
  Synthetic oligonucleotide
gaagtgccgagcatgggggtgattggcggtgtgcatggcaattgcggcagaactgtggtt

SEQ ID NO: 393212 - DNA, 60 bp, Artificial
  Synthetic oligonucleotide
gaagtgcctacagactttgaggccatgatggtatttctcatgtcctgtaggatggagaag

SEQ ID NO: 393213 - DNA, 60 bp, Artificial
  Synthetic oligonucleotide
gaagtgcctgtaattgtgaaagagcttcgtctttagttaatgaacaatgaggatatgtaa

SEQ ID NO: 393214 - DNA, 53 bp, Artificial
  Synthetic oligonucleotide
gaagtgcgactaaacgctggacaaagcgcgaacgtatgctaagattgcgcgac

SEQ ID NO: 393215 - DNA, 60 bp, Artificial
  Synthetic oligonucleotide
gaagtgcgccaatcggaagagctctattgctcccagagtactcaacactgtaccgccgtt

SEQ ID NO: 393216 - DNA, 59 bp, Artificial
  Synthetic oligonucleotide
gaagtgcggacgcttcgcgtcctcacttcttttgagaagattgcgtaatccaacgatcc

SEQ ID NO: 393217 - DNA, 53 bp, Artificial
  Synthetic oligonucleotide
gaagtgcgttcggcaactggtttggggattaaaacctatgagcctaaacctac

SEQ ID NO: 393218 - DNA, 55 bp, Artificial
  Synthetic oligonucleotide
gaagtgctaggcagagaccattcgccttcagttccaacatcagcagaacttctgg

SEQ ID NO: 393219 - DNA, 55 bp, Artificial
  Synthetic oligonucleotide
gaagtgctcagcatatagaggaatgttcctgttatccccgatacccaaatgtcag

SEQ ID NO: 393220 - DNA, 55 bp, Artificial
  Synthetic oligonucleotide
gaagtgctgctgccttggaaccggagtttaaggcttcggcacatgcgtcattagc

SEQ ID NO: 393221 - DNA, 55 bp, Artificial
  Synthetic oligonucleotide
gaagtgctggtctggagatttgacagccgcctggcattggaacacaaagctcgca

SEQ ID NO: 393222 - DNA, 60 bp, Artificial
  Synthetic oligonucleotide
gaagtggaaacaaattgataacagtaggaagctcgaaataccagcaatcattcactccga

SEQ ID NO: 393223 - DNA, 57 bp, Artificial
  Synthetic oligonucleotide
gaagtggaaatttatagatttggctaaagctgacgttaatgggacgtttacacagca

SEQ ID NO: 393224 - DNA, 58 bp, Artificial
  Synthetic oligonucleotide
gaagtggaacctgtggctgagtatgacagtggttacacctggacctcttacaccctct

SEQ ID NO: 393225 - DNA, 60 bp, Artificial
  Synthetic oligonucleotide
gaagtggaagaggctaatgagggagagaacaacagcctgttacaccctatatgccagcat

SEQ ID NO: 393226 - DNA, 57 bp, Artificial
  Synthetic oligonucleotide
gaagtggacccagatgacgttaataaaaacacactacaagccaggcaacaaacagtg

SEQ ID NO: 393227 - DNA, 54 bp, Artificial
  Synthetic oligonucleotide
gaagtggagaaaacacagttcccaaaaggagctgtgtgctataatggcaccaac

SEQ ID NO: 393228 - DNA, 60 bp, Artificial
  Synthetic oligonucleotide
gaagtggagaaagctcaataatgaggtcagatgcacccattgatagctgcaattctgaat

SEQ ID NO: 393229 - DNA, 60 bp, Artificial
  Synthetic oligonucleotide
gaagtggaggaaacactaatcaacagagggcttctgcaggccaaatcagcatacaaccta

SEQ ID NO: 393230 - DNA, 60 bp, Artificial
  Synthetic oligonucleotide
gaagtggaggcactggatctggcactcaaggcaatgggggtcagacgggatcccaaggaa

SEQ ID NO: 393231 - DNA, 56 bp, Artificial
  Synthetic oligonucleotide
gaagtggagtactagaggtgatgggctcccaaaagatacccgaatttcagactcct

SEQ ID NO: 393232 - DNA, 51 bp, Artificial
  Synthetic oligonucleotide
gaagtggatacacggttcatgtccagtgcaacgccagcaagtttcatcagg

SEQ ID NO: 393233 - DNA, 55 bp, Artificial
  Synthetic oligonucleotide
gaagtggatagtctttcactaggactgctatgcatatcaataatgatcgaagagg

SEQ ID NO: 393234 - DNA, 60 bp, Artificial
  Synthetic oligonucleotide
gaagtggatgacaattggagtaacggggcctgataccaaagcggttgcagtagtgcatta

SEQ ID NO: 393235 - DNA, 55 bp, Artificial
  Synthetic oligonucleotide
gaagtggcacagaaaggcctggcggcaacttatacactcccagttgttgtctcgg

SEQ ID NO: 393236 - DNA, 50 bp, Artificial
  Synthetic oligonucleotide
gaagtggccccgaacaccgcccctactgttggcactaccccccaaaacct

SEQ ID NO: 393237 - DNA, 54 bp, Artificial
  Synthetic oligonucleotide
gaagtggccccgaccaacgcccctactgctggcactaccccccaagaccctgcg

SEQ ID NO: 393238 - DNA, 54 bp, Artificial
  Synthetic oligonucleotide
gaagtggcgtttcagtaggaaaccattgctgtacaaggctccccggccggtccg

SEQ ID NO: 393239 - DNA, 60 bp, Artificial
  Synthetic oligonucleotide
gaagtggcttttggcctagtgtgcgccacttgtgagcagattgctgactcacagcaccgg

SEQ ID NO: 393240 - DNA, 55 bp, Artificial
  Synthetic oligonucleotide
gaagtgggagcaacagttcgatcacttagtagacacaatagtggtcgacttgcgc

SEQ ID NO: 393241 - DNA, 55 bp, Artificial
  Synthetic oligonucleotide
gaagtgggcactcggtgagggtatggcaccagagaaagtagactttgatgattgc

SEQ ID NO: 393242 - DNA, 58 bp, Artificial
  Synthetic oligonucleotide
gaagtgggccatagatgacagaatggacatccaaccgcttaaagtaactttagaccat

SEQ ID NO: 393243 - DNA, 52 bp, Artificial
  Synthetic oligonucleotide
gaagtgggggtaacgattacggacgggagtgacaaaactgctgagggcattt

SEQ ID NO: 393244 - DNA, 60 bp, Artificial
  Synthetic oligonucleotide
gaagtgggtccgctgatgaacattcgtatcgcacaccctgtagtacaacttccatggaat

SEQ ID NO: 393245 - DNA, 60 bp, Artificial
  Synthetic oligonucleotide
gaagtggtggaagactggagacgctaccactaagccagactgggtcactaagagcattga

SEQ ID NO: 393246 - DNA, 57 bp, Artificial
  Synthetic oligonucleotide
gaagtggtggcaagtattctatactgtagttgattacgtaaatcagataattcaggc

SEQ ID NO: 393247 - DNA, 55 bp, Artificial
  Synthetic oligonucleotide
gaagtggttatacagttcatgttcaatgcaacgcctcaaagtttcaccaaggcac

SEQ ID NO: 393248 - DNA, 57 bp, Artificial
  Synthetic oligonucleotide
gaagtggttcgatgcatacatagtgcttattgttctatataataagtaaagctcgcg

SEQ ID NO: 393249 - DNA, 55 bp, Artificial
  Synthetic oligonucleotide
gaagtgtaaacgtcgaaaccgtagatgttcgcaatgaacgacataccagttgcga

SEQ ID NO: 393250 - DNA, 55 bp, Artificial
  Synthetic oligonucleotide
gaagtgtaccaggccagggaatgtaaccctaaagggattaaacatggcagcagga

SEQ ID NO: 393251 - DNA, 60 bp, Artificial
  Synthetic oligonucleotide
gaagtgtatgaggtttgctgcgctgaaccatggttcaagactcacctccctcgtagtgag

SEQ ID NO: 393252 - DNA, 57 bp, Artificial
  Synthetic oligonucleotide
gaagtgtcaaacaccccagggagctataaacagtagtcttcctttccagaatgtaca

SEQ ID NO: 393253 - DNA, 60 bp, Artificial
  Synthetic oligonucleotide
gaagtgtccacggatatgggcaacaactacggcatcgcgtcaggtggtatgagcctcaat

SEQ ID NO: 393254 - DNA, 60 bp, Artificial
  Synthetic oligonucleotide
gaagtgttaaagtggaagtttgacagctccctagcacgcagacatctgacccgtgagaaa

SEQ ID NO: 393255 - DNA, 60 bp, Artificial
  Synthetic oligonucleotide
gaagtgttaaagtggaagtttgacagtcagctagcacgcagacacatggcccgcgagtta

SEQ ID NO: 393256 - DNA, 60 bp, Artificial
  Synthetic oligonucleotide
gaagtgttagtgtggagatttgacagccgcctagcatttcatcacatggcccgagagatg

SEQ ID NO: 393257 - DNA, 60 bp, Artificial
  Synthetic oligonucleotide
gaagtgttcagatcaaatggcctcacggccaatgagtctggaaggctgatagacttcctc

SEQ ID NO: 393258 - DNA, 54 bp, Artificial
  Synthetic oligonucleotide
gaagtgttcagtggacttgaaggagtttccgacaccgtcgcaaacctaaagtcc

SEQ ID NO: 393259 - DNA, 52 bp, Artificial
  Synthetic oligonucleotide
gaagtgttcctgctgcagtatattggtttaacaatgggactaggcagggtgt

SEQ ID NO: 393260 - DNA, 60 bp, Artificial
  Synthetic oligonucleotide
gaagtgttgacacactcgccaacacatggggcagcttatcagcttttttcaggagattcc

SEQ ID NO: 393261 - DNA, 59 bp, Artificial
  Synthetic oligonucleotide
gaagtgttgctttgctttcaaaaccagcaaatgcaatttatggaggattgatttacttg

SEQ ID NO: 393262 - DNA, 55 bp, Artificial
  Synthetic oligonucleotide
gaagtgttggactcagtttactctagcagacctgacctccaggaccagccttggg

SEQ ID NO: 393263 - DNA, 60 bp, Artificial
  Synthetic oligonucleotide
gaagtgtttgaagttgacgatcctgatgtgactctcaataatgttcaggatattgatgta

SEQ ID NO: 393264 - DNA, 58 bp, Artificial
  Synthetic oligonucleotide
gaagttaaatgccctggaccgagattgcgaggagttacggcgcaagcaagacacccta

SEQ ID NO: 393265 - DNA, 51 bp, Artificial
  Synthetic oligonucleotide
gaagttaacatccaaggatgaggtgaatgtcagactgtgtcatgacatact

SEQ ID NO: 393266 - DNA, 60 bp, Artificial
  Synthetic oligonucleotide
gaagttaagttggtgtgtccagggtgtcgagagaagcttcgccatgtctgatgacaaagg

SEQ ID NO: 393267 - DNA, 60 bp, Artificial
  Synthetic oligonucleotide
gaagttaatactaaaggccacatgatgtcagaaaagttcgcacttgttctgctcgtcgct

SEQ ID NO: 393268 - DNA, 60 bp, Artificial
  Synthetic oligonucleotide
gaagttaatgagcgaatcactaaactggatgaaggaggcagtaaagctttcctgtccatg

SEQ ID NO: 393269 - DNA, 50 bp, Artificial
  Synthetic oligonucleotide
gaagttacgcccagaattcgaggtatcccgccatgagcggccacatttca

SEQ ID NO: 393270 - DNA, 60 bp, Artificial
  Synthetic oligonucleotide
gaagttagatatgatggagacgaaaccaaatccatgtgttatgtacactggagagacata

SEQ ID NO: 393271 - DNA, 51 bp, Artificial
  Synthetic oligonucleotide
gaagttatggcggttctggtgcgagtgttagtggctccgtccagacagttg

SEQ ID NO: 393272 - DNA, 50 bp, Artificial
  Synthetic oligonucleotide
gaagttattgtgtgattctgataagagtgaatttagttactaaacagatg

SEQ ID NO: 393273 - DNA, 60 bp, Artificial
  Synthetic oligonucleotide
gaagttcaagagagtgaatattaccccaaaaggtaccagtcgcatgtgctgctagccgcg

SEQ ID NO: 393274 - DNA, 59 bp, Artificial
  Synthetic oligonucleotide
gaagttcattacacgcctttacagttggctctttgagaagtctggccgtgattacatcc

SEQ ID NO: 393275 - DNA, 60 bp, Artificial
  Synthetic oligonucleotide
gaagttccactcaatgctggagaagtggcgcttctatctcgtgccgcagaagtatcagga

SEQ ID NO: 393276 - DNA, 54 bp, Artificial
  Synthetic oligonucleotide
gaagttcccatagggtcgaaaaccgtttggaaagtgcaccctagaagcgctcta

SEQ ID NO: 393277 - DNA, 54 bp, Artificial
  Synthetic oligonucleotide
gaagttccccgtgtgttagtgtagactttccacggcgtgttaattcatgcccct

SEQ ID NO: 393278 - DNA, 55 bp, Artificial
  Synthetic oligonucleotide
gaagttcctgcgttgacagcggttgaaacaggtgctaccagccaagtaacccctg

SEQ ID NO: 393279 - DNA, 55 bp, Artificial
  Synthetic oligonucleotide
gaagttcggatcgagaatagcaattctttgaaaggctaacggtgtttctttcacc

SEQ ID NO: 393280 - DNA, 60 bp, Artificial
  Synthetic oligonucleotide
gaagttctctgaaaaagaggaagtcgctctgattggcgcatacagcatccctcatttaca

SEQ ID NO: 393281 - DNA, 57 bp, Artificial
  Synthetic oligonucleotide
gaagttctggatctagaagatgacagtcaagtagatctagctgaactcacggatttc

SEQ ID NO: 393282 - DNA, 55 bp, Artificial
  Synthetic oligonucleotide
gaagttgaaaaggtcgatcacccaactctgcaatttgtacatattcgtccaagtc

SEQ ID NO: 393283 - DNA, 55 bp, Artificial
  Synthetic oligonucleotide
gaagttgaagtaggctttgtggagacccaacgctctccgtaggttgtggttgaac

SEQ ID NO: 393284 - DNA, 55 bp, Artificial
  Synthetic oligonucleotide
gaagttgaagttaggaaatcgtatggacctaaagcggcacgtcgggaggagctag

SEQ ID NO: 393285 - DNA, 59 bp, Artificial
  Synthetic oligonucleotide
gaagttgaatagatcgctctctttagtagatatgcatattttgctatcttgtgttgacg

SEQ ID NO: 393286 - DNA, 58 bp, Artificial
  Synthetic oligonucleotide
gaagttgactatccgtgggaaggcttgactcaacttatacaagtcagggctggcgaag

SEQ ID NO: 393287 - DNA, 59 bp, Artificial
  Synthetic oligonucleotide
gaagttgagaaaacatttgtgaatccccagcgccttcctgaggttgtgattgaatcgaa

SEQ ID NO: 393288 - DNA, 60 bp, Artificial
  Synthetic oligonucleotide
gaagttgagagacaaattaacacatgtccctacactggatacaaaggcagagtgtttcaa

SEQ ID NO: 393289 - DNA, 60 bp, Artificial
  Synthetic oligonucleotide
gaagttgagaggaattcattgccctagtggaatggaaatcacagaagactgcattaattg

SEQ ID NO: 393290 - DNA, 59 bp, Artificial
  Synthetic oligonucleotide
gaagttgaggactatgggtttggaattttcacgacaaacatatggctgaaattgcgtga

SEQ ID NO: 393291 - DNA, 51 bp, Artificial
  Synthetic oligonucleotide
gaagttgatagggaagcaaggttgtctggtgacccatggttgaaaacaaaa

SEQ ID NO: 393292 - DNA, 58 bp, Artificial
  Synthetic oligonucleotide
gaagttgattgatcccaatagaatgacagttagaaatcttgaaaaccaattcgtttga

SEQ ID NO: 393293 - DNA, 55 bp, Artificial
  Synthetic oligonucleotide
gaagttgcaacttattcaattgccggtcaggttgagggcaaagttccgcacactg

SEQ ID NO: 393294 - DNA, 55 bp, Artificial
  Synthetic oligonucleotide
gaagttgcagtccaactcgctttggcccttaaaactatgtataagggttctgtta

SEQ ID NO: 393295 - DNA, 59 bp, Artificial
  Synthetic oligonucleotide
gaagttgcattcgagtcaaaggcgctacttaagggagtgcgagattttaatccaatctc

SEQ ID NO: 393296 - DNA, 55 bp, Artificial
  Synthetic oligonucleotide
gaagttgccagtccagagtcaagtgaaggcgaggaacaatggacggataaaggaa

SEQ ID NO: 393297 - DNA, 55 bp, Artificial
  Synthetic oligonucleotide
gaagttgcgacggctgagaaattagtaatcactgatgttgtagacggagtcaatc

SEQ ID NO: 393298 - DNA, 55 bp, Artificial
  Synthetic oligonucleotide
gaagttgcgcgcgggaagcgtcatacgcaaatgaggcggaagtcgtcatcggcaa

SEQ ID NO: 393299 - DNA, 60 bp, Artificial
  Synthetic oligonucleotide
gaagttgcggtcgagtttgtagagcatgatggcgtcattcaccctgtgatagtaataccg

SEQ ID NO: 393300 - DNA, 60 bp, Artificial
  Synthetic oligonucleotide
gaagttgctaaggcatgggatccaaacctgccattgttcagattggaagctgatgacgga

SEQ ID NO: 393301 - DNA, 52 bp, Artificial
  Synthetic oligonucleotide
gaagttgctctcgaagttgttccatcgccgaaggttggccggtgcatgtgcc

SEQ ID NO: 393302 - DNA, 53 bp, Artificial
  Synthetic oligonucleotide
gaagttgctgaaacgggactttccgactggggactttccagggaggtgtggtc

SEQ ID NO: 393303 - DNA, 55 bp, Artificial
  Synthetic oligonucleotide
gaagttggcgcgtatccctacacggtgcagtactaccagggacgtgagttcactg

SEQ ID NO: 393304 - DNA, 55 bp, Artificial
  Synthetic oligonucleotide
gaagttggcgtgttggatgccaaggaactggtggataaagatggcacaaaccttg

SEQ ID NO: 393305 - DNA, 57 bp, Artificial
  Synthetic oligonucleotide
gaagttgtaaaacatcctcctcatccttcggaaagatgagtgagtaattcacaaccc

SEQ ID NO: 393306 - DNA, 59 bp, Artificial
  Synthetic oligonucleotide
gaagttgtattttgttagcaatgacgaacattgttttataatgcctctagagtcttgtc

SEQ ID NO: 393307 - DNA, 55 bp, Artificial
  Synthetic oligonucleotide
gaagttgtgcggtgatgtcgaatccaaccctggacccactacctggtcttcgctc

SEQ ID NO: 393308 - DNA, 55 bp, Artificial
  Synthetic oligonucleotide
gaagttgtgtaaggatgctagtgatatcctacagacaggcactatccaaggagat

SEQ ID NO: 393309 - DNA, 52 bp, Artificial
  Synthetic oligonucleotide
gaagttgttgggcctttataaattaaagagtattcggcccactatctttaat

SEQ ID NO: 393310 - DNA, 52 bp, Artificial
  Synthetic oligonucleotide
gaagtttaaagattgtggggcgtttccttactacactcattattttaactgg

SEQ ID NO: 393311 - DNA, 60 bp, Artificial
  Synthetic oligonucleotide
gaagtttacatacaacgtattgtgcaatgcattccatagtacatgatttattgctctaat

SEQ ID NO: 393312 - DNA, 55 bp, Artificial
  Synthetic oligonucleotide
gaagtttacccgatggatgggtatattgtcatgcagatggctcacagtttgatag

SEQ ID NO: 393313 - DNA, 55 bp, Artificial
  Synthetic oligonucleotide
gaagtttaggttaagctactgtgcaacgttgttgttggcgtgcggcccacacgca

SEQ ID NO: 393314 - DNA, 55 bp, Artificial
  Synthetic oligonucleotide
gaagtttatggagacgacgctaacttagagcattatttcggttccgcatacacag

SEQ ID NO: 393315 - DNA, 60 bp, Artificial
  Synthetic oligonucleotide
gaagtttattggacaggacatgagctgttctgagagtgtgctaacgatgctagctggtgt

SEQ ID NO: 393316 - DNA, 54 bp, Artificial
  Synthetic oligonucleotide
gaagtttcagagcacattcgaatgatgttcgaaagccgttttctcagtccttat

SEQ ID NO: 393317 - DNA, 53 bp, Artificial
  Synthetic oligonucleotide
gaagtttcgacggacaatcaaccggaacgaacgcccgacgaagataacgcgaa

SEQ ID NO: 393318 - DNA, 55 bp, Artificial
  Synthetic oligonucleotide
gaagtttgacaatgtaacgcccttatgcatccccgcaatacttaagccaacgtcg

SEQ ID NO: 393319 - DNA, 55 bp, Artificial
  Synthetic oligonucleotide
gaagtttgacagcagcctagcgcgcagccacatagcccgcgagctacatccggac

SEQ ID NO: 393320 - DNA, 55 bp, Artificial
  Synthetic oligonucleotide
gaagtttgacagccaactagcacacagacacagggcccgcgagctacatccggag

SEQ ID NO: 393321 - DNA, 58 bp, Artificial
  Synthetic oligonucleotide
gaagtttgacagccgcctagcactgaaacacctggcccgagagaaacatccggagtac

SEQ ID NO: 393322 - DNA, 57 bp, Artificial
  Synthetic oligonucleotide
gaagtttgcccagctgcggacgtccatgccgcctcttgtgcgcgtgaaccccacagc

SEQ ID NO: 393323 - DNA, 60 bp, Artificial
  Synthetic oligonucleotide
gaagtttggatccacaaacatgtgggatccattattgcacgaatttccagaaagcgttca

SEQ ID NO: 393324 - DNA, 50 bp, Artificial
  Synthetic oligonucleotide
gaagtttgtccagggaatgggtattaataatgaacacattggtgatacca

SEQ ID NO: 393325 - DNA, 60 bp, Artificial
  Synthetic oligonucleotide
gaagttttcgacgtggtcagagtgcatcagccacatcgcggcatcatcgagacagtctac

SEQ ID NO: 393326 - DNA, 55 bp, Artificial
  Synthetic oligonucleotide
gaagttttgaggttatgttctcgagcatgatacttaggagtgttgaaggcaagct

SEQ ID NO: 393327 - DNA, 59 bp, Artificial
  Synthetic oligonucleotide
gaagtttttatagctagtcccctcacctggattgcacagcacgattgacgggattccac

SEQ ID NO: 393328 - DNA, 58 bp, Artificial
  Synthetic oligonucleotide
gaataaaaaccagactgttcactataagacaagaaatggcaagcaggggcttatggga

SEQ ID NO: 393329 - DNA, 60 bp, Artificial
  Synthetic oligonucleotide
gaataaaacaatagcctttgatcgatcctcaggaggggatccagaaattgtaatgcacag

SEQ ID NO: 393330 - DNA, 55 bp, Artificial
  Synthetic oligonucleotide
gaataaaagaactacggaacctgatgtcgcagtctcgcactcgcgagatagtgac

SEQ ID NO: 393331 - DNA, 58 bp, Artificial
  Synthetic oligonucleotide
gaataaaagtggttccgagaggccaattgtccaccagaggagttcagatagcctcaaa

SEQ ID NO: 393332 - DNA, 54 bp, Artificial
  Synthetic oligonucleotide
gaataaaccaaataggaggggttctaaagctaaggcaagaagcaccaagacgaa

SEQ ID NO: 393333 - DNA, 57 bp, Artificial
  Synthetic oligonucleotide
gaataaacgtgggttgtcattcactccacgtcgatattattcacgttacaatgtgtt

SEQ ID NO: 393334 - DNA, 52 bp, Artificial
  Synthetic oligonucleotide
gaataaactaaataaagtccctattcaagctctcgatttctgcttaagtgcg

SEQ ID NO: 393335 - DNA, 55 bp, Artificial
  Synthetic oligonucleotide
gaataaagcgcttgagcaggttctccgtggtccgcgtgtcgtttccaaacagggc

SEQ ID NO: 393336 - DNA, 52 bp, Artificial
  Synthetic oligonucleotide
gaataaagggtttgctgtcacgaaggtggatggtcggacaatgaagctacac

SEQ ID NO: 393337 - DNA, 60 bp, Artificial
  Synthetic oligonucleotide
gaataaatggatatcaatgggctcgtcttgcacagtaaaagtatgtccattaaacacaca

SEQ ID NO: 393338 - DNA, 60 bp, Artificial
  Synthetic oligonucleotide
gaataaattcatcgaagccgcagtcaacacgatcaggactggcgaagacctagttccgaa

SEQ ID NO: 393339 - DNA, 58 bp, Artificial
  Synthetic oligonucleotide
gaataacacagtaaaagaccggagtccctatcgggcattgatgagtgttccattagga

SEQ ID NO: 393340 - DNA, 55 bp, Artificial
  Synthetic oligonucleotide
gaataacagtcctagatataggggatgcctattttagtatacctctggatccaga

SEQ ID NO: 393341 - DNA, 60 bp, Artificial
  Synthetic oligonucleotide
gaataacatacatgctaaagatgaagtaagtagttatctcatacctctaacagccaacag

SEQ ID NO: 393342 - DNA, 60 bp, Artificial
  Synthetic oligonucleotide
gaataacatcaatgcggtagccctgttacttggtctagcatgcgctgtgttccactggtc

SEQ ID NO: 393343 - DNA, 53 bp, Artificial
  Synthetic oligonucleotide
gaataacccccgggagttatatttatgcccctacacctagtgggtctatggta

SEQ ID NO: 393344 - DNA, 55 bp, Artificial
  Synthetic oligonucleotide
gaataacgtttccgtcgaaagtctctcaccacagaatatggcagttccaaatccc

SEQ ID NO: 393345 - DNA, 51 bp, Artificial
  Synthetic oligonucleotide
gaataacttgaatttcgcagatacctacgtatatacatggaaccaacagta

SEQ ID NO: 393346 - DNA, 57 bp, Artificial
  Synthetic oligonucleotide
gaataacttgtgggttacagtatattatggggtaccggtgtgggaagatgcagatac

SEQ ID NO: 393347 - DNA, 57 bp, Artificial
  Synthetic oligonucleotide
gaataagacaaattgtaaacttgtggcaggaagtaggaaaagcaatgtatgcccctc

SEQ ID NO: 393348 - DNA, 55 bp, Artificial
  Synthetic oligonucleotide
gaataagacagggcttcgaaagggctatgctataaaatgggtggcaagtggttag

SEQ ID NO: 393349 - DNA, 55 bp, Artificial
  Synthetic oligonucleotide
gaataagacagtacaagagatgagaataggtccgatggcctggtacagcatggcc

SEQ ID NO: 393350 - DNA, 60 bp, Artificial
  Synthetic oligonucleotide
gaataagacagtggagatgggggaacccatcggcgtggagctctcgagcgactcggatgt

SEQ ID NO: 393351 - DNA, 60 bp, Artificial
  Synthetic oligonucleotide
gaataagaccgggcccatcattctcacctacgggcgtctcagcgcctcaacgcatgagtg

SEQ ID NO: 393352 - DNA, 59 bp, Artificial
  Synthetic oligonucleotide
gaataagactaactatagattaataaattgtaatacctcagccattacacaggcgtgtc

SEQ ID NO: 393353 - DNA, 59 bp, Artificial
  Synthetic oligonucleotide
gaataagactagctttaggttgatacattgtaacacctcaaccattacacaggcctgtc

SEQ ID NO: 393354 - DNA, 60 bp, Artificial
  Synthetic oligonucleotide
gaataagatgctgcaaatgccacaaaccattgtctcctgtggaaaaaaccaaccacattg

SEQ ID NO: 393355 - DNA, 55 bp, Artificial
  Synthetic oligonucleotide
gaataagcacatggagatgaggttccccatcttcgtgaagttctctggttacacg

SEQ ID NO: 393356 - DNA, 58 bp, Artificial
  Synthetic oligonucleotide
gaataagccttatagacctctcagaaccatggctagaagggtggggaaatgcatttta

SEQ ID NO: 393357 - DNA, 55 bp, Artificial
  Synthetic oligonucleotide
gaataagcttgtaggtgcgttgaggtgttacgcatattgcctaatccttgcgttg

SEQ ID NO: 393358 - DNA, 55 bp, Artificial
  Synthetic oligonucleotide
gaataaggacggagtggctagcggctacgtacgataggggcaggattagagcgct

SEQ ID NO: 393359 - DNA, 55 bp, Artificial
  Synthetic oligonucleotide
gaataaggagaagggtttctttgactcatttctgtaagccagtacctcaggatcc

SEQ ID NO: 393360 - DNA, 56 bp, Artificial
  Synthetic oligonucleotide
gaataaggaggatcctcttcttggaaagggtagaggaagcccaagaggaccatgaa

SEQ ID NO: 393361 - DNA, 60 bp, Artificial
  Synthetic oligonucleotide
gaataagggatctgactcaggaattataacttcagatgctccagttcacaattgcgacac

SEQ ID NO: 393362 - DNA, 59 bp, Artificial
  Synthetic oligonucleotide
gaataaggtcatggccacccagctcacaacgagagctagaagggcaactcgggtttctc

SEQ ID NO: 393363 - DNA, 56 bp, Artificial
  Synthetic oligonucleotide
gaataaggtcgtttgtggaaagtgaatcaccggttgatccagctctttcaaaccca

SEQ ID NO: 393364 - DNA, 55 bp, Artificial
  Synthetic oligonucleotide
gaataaggtggttcgcgtccaaaggccaaccccaagaggcacggtgatggacatc

SEQ ID NO: 393365 - DNA, 59 bp, Artificial
  Synthetic oligonucleotide
gaataagtacaaggataggaccaggacaagtgttctatagaacaggagccataacagga

SEQ ID NO: 393366 - DNA, 57 bp, Artificial
  Synthetic oligonucleotide
gaataatacaaacagatggttagcgacgattttactggagcctaacgtacagtcagt

SEQ ID NO: 393367 - DNA, 55 bp, Artificial
  Synthetic oligonucleotide
gaataatccctagggaccttaccttactgaggaaggatggctcgtgagttaaatc

SEQ ID NO: 393368 - DNA, 55 bp, Artificial
  Synthetic oligonucleotide
gaataatctaccgcaggtcaaccacaaagacagcgatagaacgaacaataacgtt

SEQ ID NO: 393369 - DNA, 50 bp, Artificial
  Synthetic oligonucleotide
gaataatctcgctgcaggggcgactttctcttgtcaaggattagtgacgg

SEQ ID NO: 393370 - DNA, 51 bp, Artificial
  Synthetic oligonucleotide
gaataatgactagagataaggaggaagccagaaaatgtatgccagtcatca

SEQ ID NO: 393371 - DNA, 60 bp, Artificial
  Synthetic oligonucleotide
gaataatgtgactgatgtgcaaggtgtaagccggttgctcataccagtaaaagctcagga

SEQ ID NO: 393372 - DNA, 55 bp, Artificial
  Synthetic oligonucleotide
gaataattgtagtagcaatagttgtgaagagtttcgggggtttagctggttagaa

SEQ ID NO: 393373 - DNA, 55 bp, Artificial
  Synthetic oligonucleotide
gaataatttgcagtcaaaatgctagggcatctcacagggtaggtgcattgataac

SEQ ID NO: 393374 - DNA, 55 bp, Artificial
  Synthetic oligonucleotide
gaataatttgcccatgggacagtgtgtgactgaatgtcaattgaacgagggtgta

SEQ ID NO: 393375 - DNA, 53 bp, Artificial
  Synthetic oligonucleotide
gaatacaaaaaaacagttggaacaaaacaagacgttatggtgtcaaaacctga

SEQ ID NO: 393376 - DNA, 57 bp, Artificial
  Synthetic oligonucleotide
gaatacaaggttgtacttagtctcaatcccggaactcagcagggtaaagggatcaca

SEQ ID NO: 393377 - DNA, 58 bp, Artificial
  Synthetic oligonucleotide
gaatacaagtacaatattttaagccgtcgattctccaataagatgtttgcttctcgcc

SEQ ID NO: 393378 - DNA, 55 bp, Artificial
  Synthetic oligonucleotide
gaatacaattattaacaacatagtgatcagggcagcgctacacttaacctattcc

SEQ ID NO: 393379 - DNA, 55 bp, Artificial
  Synthetic oligonucleotide
gaatacaatttgatccgttttgtggacccgcttacaggtgcaactttggatgagc

SEQ ID NO: 393380 - DNA, 56 bp, Artificial
  Synthetic oligonucleotide
gaatacaccgagtgcccctacaacaagtcgttgggggtctgccccatccgaacgca

SEQ ID NO: 393381 - DNA, 60 bp, Artificial
  Synthetic oligonucleotide
gaatacacgaggtcattataatttttcatttatatgtcaaaatgcagctacagatgatga

SEQ ID NO: 393382 - DNA, 55 bp, Artificial
  Synthetic oligonucleotide
gaatacactctgctgttaaaatctaagtggccggataaataattatgtgggccca

SEQ ID NO: 393383 - DNA, 55 bp, Artificial
  Synthetic oligonucleotide
gaatacagaataggcatgtactccccaatattcctcagtccttatagaacaagcc

SEQ ID NO: 393384 - DNA, 58 bp, Artificial
  Synthetic oligonucleotide
gaatacagatagacccagtgaaattgagtagtgggtacaaagacataatcttatggtt

SEQ ID NO: 393385 - DNA, 55 bp, Artificial
  Synthetic oligonucleotide
gaatacagcaacagagtacgctacggctacaccaattaaactaggaagagcatta

SEQ ID NO: 393386 - DNA, 58 bp, Artificial
  Synthetic oligonucleotide
gaatacaggagttggtcgaaaccgcagtgtcagattacagggtttgctcctttctcca

SEQ ID NO: 393387 - DNA, 58 bp, Artificial
  Synthetic oligonucleotide
gaatacagggggttactgctaactgtccaggtaggagatcttcgtggaaagctcgaca

SEQ ID NO: 393388 - DNA, 60 bp, Artificial
  Synthetic oligonucleotide
gaatacataatgaagggagtatacataaacacagctttactcaacgcttcttgtgcagcc

SEQ ID NO: 393389 - DNA, 60 bp, Artificial
  Synthetic oligonucleotide
gaatacattttcgaccccccatcattacccacacgcatatataattcagtgcatgactgg

SEQ ID NO: 393390 - DNA, 52 bp, Artificial
  Synthetic oligonucleotide
gaataccaacgttgtgtaccgaatggtctcggttttaaagtacggaagacac

SEQ ID NO: 393391 - DNA, 55 bp, Artificial
  Synthetic oligonucleotide
gaataccacatataggaccagggagagcattttatacagcacacataagaggaga

SEQ ID NO: 393392 - DNA, 53 bp, Artificial
  Synthetic oligonucleotide
gaatacccccttcaaccaatagtggaaaacgcaaaacccactttgcgtcagat

SEQ ID NO: 393393 - DNA, 56 bp, Artificial
  Synthetic oligonucleotide
gaatacccgttggaggacgtgcgccaattccgacgagacgcggtctatttcacgaa

SEQ ID NO: 393394 - DNA, 59 bp, Artificial
  Synthetic oligonucleotide
gaataccctactagaccgtctacccagcgtgtctgagagttgcgtagccatacgtatag

SEQ ID NO: 393395 - DNA, 53 bp, Artificial
  Synthetic oligonucleotide
gaatacccttaagaaaagaccagtcggagggtgtaaggtcgtccagattcgga

SEQ ID NO: 393396 - DNA, 57 bp, Artificial
  Synthetic oligonucleotide
gaataccgaaggagttaatccgaaatacaagatggaaccgcactaccggagatatca

SEQ ID NO: 393397 - DNA, 59 bp, Artificial
  Synthetic oligonucleotide
gaataccgtctacgtgccgcgccgtctaggtgacattgtaactaacaatgtcaactgtg

SEQ ID NO: 393398 - DNA, 51 bp, Artificial
  Synthetic oligonucleotide
gaatacctgattagtgacagatggttcggcacacagaagagcaagatagga

SEQ ID NO: 393399 - DNA, 54 bp, Artificial
  Synthetic oligonucleotide
gaataccttccggcttgtttattacccaactcttagactcctggtataattata

SEQ ID NO: 393400 - DNA, 55 bp, Artificial
  Synthetic oligonucleotide
gaataccttggctggtgagaaagctccttcaagtatcagagtcaacaggaatggc

SEQ ID NO: 393401 - DNA, 55 bp, Artificial
  Synthetic oligonucleotide
gaatacgaaatcgtcattgttgatgattcctgtgttttctcatcagtggagaagg

SEQ ID NO: 393402 - DNA, 54 bp, Artificial
  Synthetic oligonucleotide
gaatacgaatgaccgggttttcgaccggtttcattcttctctcgttcggctgtg

SEQ ID NO: 393403 - DNA, 55 bp, Artificial
  Synthetic oligonucleotide
gaatacgacatggcctaatcactgctcttattcaccgatgtccactgtaaggatg

SEQ ID NO: 393404 - DNA, 55 bp, Artificial
  Synthetic oligonucleotide
gaatacgactgtgcgctactgccatccatcaacgctattacgacgatccctacac

SEQ ID NO: 393405 - DNA, 57 bp, Artificial
  Synthetic oligonucleotide
gaatacgactttgccgtcggagcgtgcctcggtggtgaatttcgctgccggtagggc

SEQ ID NO: 393406 - DNA, 60 bp, Artificial
  Synthetic oligonucleotide
gaatacgatactgtagtgttgtacggacaatttggctctgatgttgaatttgctggccaa

SEQ ID NO: 393407 - DNA, 54 bp, Artificial
  Synthetic oligonucleotide
gaatacgatgttaaagttccacatttgacactaggagtattatttatatctgat

SEQ ID NO: 393408 - DNA, 50 bp, Artificial
  Synthetic oligonucleotide
gaatacgcaaacattgggaataggatgtacaaccacaaatacagcgacat

SEQ ID NO: 393409 - DNA, 55 bp, Artificial
  Synthetic oligonucleotide
gaatacgcaaacgttaggaattgggtgcctaactactgatacgagtacatttgag

SEQ ID NO: 393410 - DNA, 50 bp, Artificial
  Synthetic oligonucleotide
gaatacgcatggagagactttttaaatgaagtacagtgtgatgtactaac

SEQ ID NO: 393411 - DNA, 55 bp, Artificial
  Synthetic oligonucleotide
gaatacgcctcataacttgggattccgggttatgtacatctttcgaacttgtccc

SEQ ID NO: 393412 - DNA, 58 bp, Artificial
  Synthetic oligonucleotide
gaatacgcgataccagttggaccagtttttccaccaggtatgaattggactgatttga

SEQ ID NO: 393413 - DNA, 57 bp, Artificial
  Synthetic oligonucleotide
gaatacggactgatcatgacaccagcagacaagggggagtgctttaatgaagtgaca

SEQ ID NO: 393414 - DNA, 58 bp, Artificial
  Synthetic oligonucleotide
gaatacggagaccgaacacgttatagagtccatcatccctctagtgaagaaggaatac

SEQ ID NO: 393415 - DNA, 60 bp, Artificial
  Synthetic oligonucleotide
gaatacggatgaactagtagaggccttcaacaagctgagagtgactccaggacatctgaa

SEQ ID NO: 393416 - DNA, 55 bp, Artificial
  Synthetic oligonucleotide
gaatacgggacataaccctgtggtgatgcatctacatgtagaggatggatgttgt

SEQ ID NO: 393417 - DNA, 55 bp, Artificial
  Synthetic oligonucleotide
gaatacgtgcgcgattggatgcgcaaaccaaaggctaaaagctaatgctgggcgc

SEQ ID NO: 393418 - DNA, 55 bp, Artificial
  Synthetic oligonucleotide
gaatactaaactttgttatcggcgctcgtggtatcggtaaatcatacgctatgaa

SEQ ID NO: 393419 - DNA, 57 bp, Artificial
  Synthetic oligonucleotide
gaatactaatgtggccaccggtgggtcaacggtcaattatacgaccatcaactatta

SEQ ID NO: 393420 - DNA, 58 bp, Artificial
  Synthetic oligonucleotide
gaatactacaacaagcctatctcaacgatacctgattctatgaaggcttggaaaaaac

SEQ ID NO: 393421 - DNA, 53 bp, Artificial
  Synthetic oligonucleotide
gaatactacgaaatatcaggaaggttttcgctcatttttttagttccaactaa

SEQ ID NO: 393422 - DNA, 59 bp, Artificial
  Synthetic oligonucleotide
gaatactattgacaagagatggtggtgctaataatacggttaatgagaccttcagacct

SEQ ID NO: 393423 - DNA, 51 bp, Artificial
  Synthetic oligonucleotide
gaatactcaagctctgcactggcgtaccacatctgttctattctgtgaaga

SEQ ID NO: 393424 - DNA, 57 bp, Artificial
  Synthetic oligonucleotide
gaatactctaggattgagcgaacctaatcaagtgtttttcacttatatgggtactcc

SEQ ID NO: 393425 - DNA, 58 bp, Artificial
  Synthetic oligonucleotide
gaatactgtcctgctggttctcacaaacgccgtcaaagggaactcgtaattcgatctc

SEQ ID NO: 393426 - DNA, 60 bp, Artificial
  Synthetic oligonucleotide
gaatacttacccctattgagaccaacaacgcaatgagtcaatcattgactgaacataaaa

SEQ ID NO: 393427 - DNA, 55 bp, Artificial
  Synthetic oligonucleotide
gaatacttcgcgggacgataatgtttgacggagctatgctattcgacaggcaagg

SEQ ID NO: 393428 - DNA, 57 bp, Artificial
  Synthetic oligonucleotide
gaatacttgaagacgagcaaatgtatcaaaaatgctgtaacctatttgaaaagttct

SEQ ID NO: 393429 - DNA, 54 bp, Artificial
  Synthetic oligonucleotide
gaatacttgggtccacaagatgccactgctgtagataagcctacacaacctgat

SEQ ID NO: 393430 - DNA, 58 bp, Artificial
  Synthetic oligonucleotide
gaatacttgtacacactcttaggtctaaccacctcacgcacgtaggggataacacaca

SEQ ID NO: 393431 - DNA, 55 bp, Artificial
  Synthetic oligonucleotide
gaatactttgcctattgtgggagatcgggagcatgcgttaccccatggtggactc

SEQ ID NO: 393432 - DNA, 56 bp, Artificial
  Synthetic oligonucleotide
gaatagaacatatatctattggcatggcagagataataggactatcatcagcttaa

SEQ ID NO: 393433 - DNA, 60 bp, Artificial
  Synthetic oligonucleotide
gaatagaagacaaagtgattcatccgcgagtgatgatgaggtttaaaattcctagaacgc

SEQ ID NO: 393434 - DNA, 60 bp, Artificial
  Synthetic oligonucleotide
gaatagacactgtcgcacctccgttagtagtgcaggaatcgcagggatctaggtcactgc

SEQ ID NO: 393435 - DNA, 60 bp, Artificial
  Synthetic oligonucleotide
gaatagagacggccattgcatggttacacacccaccagatgttgggtcaatcaaatgggt

SEQ ID NO: 393436 - DNA, 55 bp, Artificial
  Synthetic oligonucleotide
gaatagagagccaagcgcccctgcgattaattgaggcggtcaaggcagcatatac

SEQ ID NO: 393437 - DNA, 56 bp, Artificial
  Synthetic oligonucleotide
gaatagagcccggactgttgccggtgtgtcgattcttagtacaatgactaatcgtc

SEQ ID NO: 393438 - DNA, 55 bp, Artificial
  Synthetic oligonucleotide
gaatagaggagctagatggtgaaggtaataagactcatagatacacaggagaagg

SEQ ID NO: 393439 - DNA, 55 bp, Artificial
  Synthetic oligonucleotide
gaatagagttaggcagggttactcacctttgtcgttgcagacccttatcccaagc

SEQ ID NO: 393440 - DNA, 54 bp, Artificial
  Synthetic oligonucleotide
gaatagataaagctcaagaggagcatgagaaatatcgcagcaattggagagcaa

SEQ ID NO: 393441 - DNA, 60 bp, Artificial
  Synthetic oligonucleotide
gaatagatcacaaccagctcacgataatttgatgggtacgatgtggttgaacgcgggatc

SEQ ID NO: 393442 - DNA, 58 bp, Artificial
  Synthetic oligonucleotide
gaatagatcagaccatcacaatggattagaggcagtgtcggttctaaggtctctatat

SEQ ID NO: 393443 - DNA, 58 bp, Artificial
  Synthetic oligonucleotide
gaatagatctactttagctaaactcgtgtcgtcgccaatgtcaattttagttgcgtta

SEQ ID NO: 393444 - DNA, 60 bp, Artificial
  Synthetic oligonucleotide
gaatagattgggaagcaaactcgttaagatcatattataacttcgatctacaagctagaa

SEQ ID NO: 393445 - DNA, 60 bp, Artificial
  Synthetic oligonucleotide
gaatagcaacgtttgtggatggatgagtgttcgtgactataagcggcagggttgcaatct

SEQ ID NO: 393446 - DNA, 56 bp, Artificial
  Synthetic oligonucleotide
gaatagccccactacaattgggtaattgcagcgttgccgggtggatcttaggaaac

SEQ ID NO: 393447 - DNA, 60 bp, Artificial
  Synthetic oligonucleotide
gaatagcccctgactggcttcttcctcttattctaggcctctatggtgacatctctccta

SEQ ID NO: 393448 - DNA, 51 bp, Artificial
  Synthetic oligonucleotide
gaatagccgtctatacggccatccgtccttcaagtttgctcttgcgcaaga

SEQ ID NO: 393449 - DNA, 55 bp, Artificial
  Synthetic oligonucleotide
gaatagcctcttggtcgaagactatggagtggggatgttccacacaggggtgtgg

SEQ ID NO: 393450 - DNA, 59 bp, Artificial
  Synthetic oligonucleotide
gaatagcgatatcactttcgtagccagcgtctttacaggagccctagccacattcggtt

SEQ ID NO: 393451 - DNA, 57 bp, Artificial
  Synthetic oligonucleotide
gaatagcgcattatgaatggtccagttgtgtaaagctcggttttcttctttaccgag

SEQ ID NO: 393452 - DNA, 60 bp, Artificial
  Synthetic oligonucleotide
gaatagcgggggatgaatttacgatgtcgatagatgtagcaacgcaagctatggtcgaca

SEQ ID NO: 393453 - DNA, 60 bp, Artificial
  Synthetic oligonucleotide
gaatagctaagtgcgagtcagagttccacgctaacaatgcaaggccaaacggtttggatg

SEQ ID NO: 393454 - DNA, 55 bp, Artificial
  Synthetic oligonucleotide
gaatagctgaaaaggtgcatagtcctggagtggtttcgtcattaagcaccgggaa

SEQ ID NO: 393455 - DNA, 53 bp, Artificial
  Synthetic oligonucleotide
gaatagctgaattcaggtaaacaaagtagaaagtcgttctttcaaaacgaccg

SEQ ID NO: 393456 - DNA, 55 bp, Artificial
  Synthetic oligonucleotide
gaataggaaatttgccaatcagaaactggacttttgattttggattacttggtac

SEQ ID NO: 393457 - DNA, 55 bp, Artificial
  Synthetic oligonucleotide
gaataggaatggaccaacaacaagcacagttcactacccaaaggtatataaaact

SEQ ID NO: 393458 - DNA, 56 bp, Artificial
  Synthetic oligonucleotide
gaataggacggccaacaacgaaaccttcagacctggaggaggaaatatgagggaca

SEQ ID NO: 393459 - DNA, 58 bp, Artificial
  Synthetic oligonucleotide
gaataggactcatatatagttggttcacacaatcagttgagactgtgtctcaccaagg

SEQ ID NO: 393460 - DNA, 59 bp, Artificial
  Synthetic oligonucleotide
gaataggccagcgtctttgagtatctggtcacgcacggctgacttcttaccgcgcctct

SEQ ID NO: 393461 - DNA, 60 bp, Artificial
  Synthetic oligonucleotide
gaataggctacgtcttttcttcaatgacgtcctcaaagtgaagatggaagctgatgctct

SEQ ID NO: 393462 - DNA, 55 bp, Artificial
  Synthetic oligonucleotide
gaatagggaaagcagggtatgttactgacagaggaaggcagaaaactgtctctct

SEQ ID NO: 393463 - DNA, 55 bp, Artificial
  Synthetic oligonucleotide
gaatagggaagccggctacggccaccatgaattgacatggttccagtccggaaag

SEQ ID NO: 393464 - DNA, 55 bp, Artificial
  Synthetic oligonucleotide
gaatagggtgtggatccaagaaaacccgtggatggaagacaaaactccagtggaa

SEQ ID NO: 393465 - DNA, 55 bp, Artificial
  Synthetic oligonucleotide
gaataggtaacgtcacggtgcaagttatcgctactaacaatgatctgggacccat

SEQ ID NO: 393466 - DNA, 58 bp, Artificial
  Synthetic oligonucleotide
gaataggttatatggtgactcttgataccgtttactggaaatttggttacgcatcaga

SEQ ID NO: 393467 - DNA, 60 bp, Artificial
  Synthetic oligonucleotide
gaatagtacttggaataatactagagagtcagataacaatacagaagagatcatactccc

SEQ ID NO: 393468 - DNA, 55 bp, Artificial
  Synthetic oligonucleotide
gaatagtctttacagtactttccatagtgaatagagttaggaagggatactcacc

SEQ ID NO: 393469 - DNA, 60 bp, Artificial
  Synthetic oligonucleotide
gaatagtgtaaagaatgggacatatgattatcccaagtatgaagaggaatctaaactgaa

SEQ ID NO: 393470 - DNA, 55 bp, Artificial
  Synthetic oligonucleotide
gaatagtgtgttgagatcaatgaaggtcgtaggtccgcgtgacgcaaaacctatg

SEQ ID NO: 393471 - DNA, 55 bp, Artificial
  Synthetic oligonucleotide
gaatagtgttgttgcaatatgacgagtttgattggcccattgtggacaaatcctc

SEQ ID NO: 393472 - DNA, 54 bp, Artificial
  Synthetic oligonucleotide
gaatagttaaaaatggagacaccgataggtaaattgtactccaatatattgggg

SEQ ID NO: 393473 - DNA, 57 bp, Artificial
  Synthetic oligonucleotide
gaatagttcctgtagcgtgtgtggacggttacggcaacatggtaaccacagacccga

SEQ ID NO: 393474 - DNA, 57 bp, Artificial
  Synthetic oligonucleotide
gaatagtttgttcacttctccatgagatttcaggttttgcgatttttgaacttggtg

SEQ ID NO: 393475 - DNA, 58 bp, Artificial
  Synthetic oligonucleotide
gaatataaccatagacatagtgttggggccacccttgaggcgctatttcagggcccgc

SEQ ID NO: 393476 - DNA, 52 bp, Artificial
  Synthetic oligonucleotide
gaatataccggcagttctgattcgagtctagcggagatacatgctaccacgt

SEQ ID NO: 393477 - DNA, 60 bp, Artificial
  Synthetic oligonucleotide
gaatatactcttttgacgagtggtgaaatattattactgcagaagatcactaatagtcgg

SEQ ID NO: 393478 - DNA, 59 bp, Artificial
  Synthetic oligonucleotide
gaatatagatcttacattgtaacatgggaccaagacataccctgtaaacctctaccata

SEQ ID NO: 393479 - DNA, 55 bp, Artificial
  Synthetic oligonucleotide
gaatatatcaagactaggaccaatgattgggactttgtggtcacgacagacattt

SEQ ID NO: 393480 - DNA, 50 bp, Artificial
  Synthetic oligonucleotide
gaatatcaagagagacaggggaggaccccactgacacttgtggacctctg

SEQ ID NO: 393481 - DNA, 60 bp, Artificial
  Synthetic oligonucleotide
gaatatcaatgttcgcaacctgaatgtgaggactatttggaaagataccggtggtggcaa

SEQ ID NO: 393482 - DNA, 57 bp, Artificial
  Synthetic oligonucleotide
gaatatcacataaattacgtagtaagaatgccaacatcataacaaatccggaaaact

SEQ ID NO: 393483 - DNA, 60 bp, Artificial
  Synthetic oligonucleotide
gaatatcacgcctttctggccggcattggtatgtccgacgctgaagcccatcgcattgct

SEQ ID NO: 393484 - DNA, 56 bp, Artificial
  Synthetic oligonucleotide
gaatatcatcagcccagacagccataaagcatggttgtccacccagtctagcatgg

SEQ ID NO: 393485 - DNA, 60 bp, Artificial
  Synthetic oligonucleotide
gaatatccacgaggtactgatgcatggcgtatcggtcgaaaagactgagcgctttctccg

SEQ ID NO: 393486 - DNA, 60 bp, Artificial
  Synthetic oligonucleotide
gaatatcggatctagacccagggtaagggatgtctccagcagaataagcatctattggac

SEQ ID NO: 393487 - DNA, 60 bp, Artificial
  Synthetic oligonucleotide
gaatatctaaccgcatattgtgtgaattgtttaaacgtggcaatatcatgccggttgctg

SEQ ID NO: 393488 - DNA, 57 bp, Artificial
  Synthetic oligonucleotide
gaatatctagatgaattaacagtgacgtcatgttcagtcgaccgaattggaaaccct

SEQ ID NO: 393489 - DNA, 54 bp, Artificial
  Synthetic oligonucleotide
gaatatctggttcttcatatggggacaccacaacccaaaccgtcgaaaatccga

SEQ ID NO: 393490 - DNA, 58 bp, Artificial
  Synthetic oligonucleotide
gaatatgaaagatctgtataaacagaccttcaaaccttgtgtcaaattaacacctgta

SEQ ID NO: 393491 - DNA, 60 bp, Artificial
  Synthetic oligonucleotide
gaatatgacgaatggagagagcacaatgcaaccagaaaattggatttgtccgtggaagat

SEQ ID NO: 393492 - DNA, 60 bp, Artificial
  Synthetic oligonucleotide
gaatatgatggcaccttccctgtttcgcccttagactattcaagctgcctctgttgactg

SEQ ID NO: 393493 - DNA, 59 bp, Artificial
  Synthetic oligonucleotide
gaatatgccacctttcgagaagtttgacaatgtaacgcccttatgcatccccgcaatac

SEQ ID NO: 393494 - DNA, 60 bp, Artificial
  Synthetic oligonucleotide
gaatatgcgacagtcctcaccaaatccttgatggagaaaactgcacactaatagatgctc

SEQ ID NO: 393495 - DNA, 59 bp, Artificial
  Synthetic oligonucleotide
gaatatgctacggtggtttagataccaagaagatcaggtgtcgatggttcgagtggccc

SEQ ID NO: 393496 - DNA, 60 bp, Artificial
  Synthetic oligonucleotide
gaatatggaacaactgacgatgaggtatacatacagagagcattcatgtcattatctagc

SEQ ID NO: 393497 - DNA, 51 bp, Artificial
  Synthetic oligonucleotide
gaatatggcccttgatttgtggctcgagtctgagcactatgaaccacaggt

SEQ ID NO: 393498 - DNA, 51 bp, Artificial
  Synthetic oligonucleotide
gaatatggccgttcatggtgagccattccgccatcccttgccgagtcagcg

SEQ ID NO: 393499 - DNA, 60 bp, Artificial
  Synthetic oligonucleotide
gaatatgggacaactgacgacgaagtatacatacaaagagcgttcatgtctttatctagt

SEQ ID NO: 393500 - DNA, 52 bp, Artificial
  Synthetic oligonucleotide
gaatatgggacagaccccccagaggcaacctaagagacacccccttttaccc

SEQ ID NO: 393501 - DNA, 60 bp, Artificial
  Synthetic oligonucleotide
gaatatgtagttgcattgtacgcgctgtctaacgattttaacaatagagaagacgtaata

SEQ ID NO: 393502 - DNA, 60 bp, Artificial
  Synthetic oligonucleotide
gaatatgtatgagacaaagcttacccaatatgatgagcgtcttaataaacgcattggctc

SEQ ID NO: 393503 - DNA, 58 bp, Artificial
  Synthetic oligonucleotide
gaatatgtctacaaacccgacttctatcattacgatgtttatgattacgaaatgggtg

SEQ ID NO: 393504 - DNA, 58 bp, Artificial
  Synthetic oligonucleotide
gaatatgttaccgtttcatatggtccgattcgctcgtataaatcaggtaataaatgaa

SEQ ID NO: 393505 - DNA, 50 bp, Artificial
  Synthetic oligonucleotide
gaatattaactgacgaagttaaacttttaatacgttccggaaaattaaga

SEQ ID NO: 393506 - DNA, 60 bp, Artificial
  Synthetic oligonucleotide
gaatattactcttcactcttacgcaatatctacctctgccccagctagacaacatgtctc

SEQ ID NO: 393507 - DNA, 56 bp, Artificial
  Synthetic oligonucleotide
gaatattcagaaatccgtagttggtagaggcggaagacttgtaaatttcaatattg

SEQ ID NO: 393508 - DNA, 55 bp, Artificial
  Synthetic oligonucleotide
gaatattcagcatattccgagtaaaatggtgtccaaccgcaaagttcgcagttat

SEQ ID NO: 393509 - DNA, 55 bp, Artificial
  Synthetic oligonucleotide
gaatattccatctactcagacgcgttgaacgcgaagcatggtcagggcacactgg

SEQ ID NO: 393510 - DNA, 58 bp, Artificial
  Synthetic oligonucleotide
gaatattgctaagaacgcaatattagttagttatgcgtttgttgggatggactcttta

SEQ ID NO: 393511 - DNA, 55 bp, Artificial
  Synthetic oligonucleotide
gaatattggaagtaagttgtgtcgaggatattcccctttgcagacccttacccca

SEQ ID NO: 393512 - DNA, 58 bp, Artificial
  Synthetic oligonucleotide
gaatatttggaagcaagtcaatacaataactggattgcttatgtaacaacagctggtg

SEQ ID NO: 393513 - DNA, 56 bp, Artificial
  Synthetic oligonucleotide
gaatcaaaactaggctgtttactataaggcaagaaatggctagtaggggtctatgg

SEQ ID NO: 393514 - DNA, 55 bp, Artificial
  Synthetic oligonucleotide
gaatcaaaatcacttcttagaggcctgagagactataatccaattgctcaagctg

SEQ ID NO: 393515 - DNA, 54 bp, Artificial
  Synthetic oligonucleotide
gaatcaaacaactttgacgtttaaaggtaaaccatattcttgggaacacagaca

SEQ ID NO: 393516 - DNA, 55 bp, Artificial
  Synthetic oligonucleotide
gaatcaaatacagccggtgtcccgactgggcgtaccattcgatatacagcataac

SEQ ID NO: 393517 - DNA, 60 bp, Artificial
  Synthetic oligonucleotide
gaatcaacaagaatttaccagattctggcgatctattcaactgtcgccagctcattgata

SEQ ID NO: 393518 - DNA, 55 bp, Artificial
  Synthetic oligonucleotide
gaatcaacacctgcattagagaccctacgctacacaaattttaagaataggcgtg

SEQ ID NO: 393519 - DNA, 55 bp, Artificial
  Synthetic oligonucleotide
gaatcaacccgcattctcgccgaacacatgccggtcatcgggttcgactcgttcc

SEQ ID NO: 393520 - DNA, 60 bp, Artificial
  Synthetic oligonucleotide
gaatcaagacctctaacggcattcacatgtccacaaggtcactacgaatggaatgtggtc

SEQ ID NO: 393521 - DNA, 60 bp, Artificial
  Synthetic oligonucleotide
gaatcaagcgccggacaatacggaagcagctgagcaactcggtcgtaagatgggatgctt

SEQ ID NO: 393522 - DNA, 56 bp, Artificial
  Synthetic oligonucleotide
gaatcaagtcccacagagtccaaacgaaagcgacgacggtcctcgtccaggcaaaa

SEQ ID NO: 393523 - DNA, 60 bp, Artificial
  Synthetic oligonucleotide
gaatcaagtcgttcagcagaactgaattgatcgcacctacttcttggggagaagtgaatg

SEQ ID NO: 393524 - DNA, 60 bp, Artificial
  Synthetic oligonucleotide
gaatcaagtgggataatcagtacctagagcgcctcagtcattcaagagcaaatcgaacta

SEQ ID NO: 393525 - DNA, 56 bp, Artificial
  Synthetic oligonucleotide
gaatcaagtttcggacgcggagaatgaccgtttgggcacgggggtagctccgcata

SEQ ID NO: 393526 - DNA, 55 bp, Artificial
  Synthetic oligonucleotide
gaatcaatacaacccaagcgacactcgcaacaactggaagagagcaacgatcagg

SEQ ID NO: 393527 - DNA, 57 bp, Artificial
  Synthetic oligonucleotide
gaatcaataggaacttaccaaatactgtcaatttattcaacagtggcgagttcccta

SEQ ID NO: 393528 - DNA, 50 bp, Artificial
  Synthetic oligonucleotide
gaatcaatcgacacgaccctagccgtgtataaaagtctaggctttaaagt

SEQ ID NO: 393529 - DNA, 54 bp, Artificial
  Synthetic oligonucleotide
gaatcacaaagaaatggaattgcaccacaatcagattcactcagaaagttgtca

SEQ ID NO: 393530 - DNA, 57 bp, Artificial
  Synthetic oligonucleotide
gaatcacaacgaaatgggatagcaccacaatctgaagcactaagaaagctgtcgggc

SEQ ID NO: 393531 - DNA, 59 bp, Artificial
  Synthetic oligonucleotide
gaatcacacgaatagtgtgatgttcttcctagttagggatcgtagacctgttgataaac

SEQ ID NO: 393532 - DNA, 53 bp, Artificial
  Synthetic oligonucleotide
gaatcacacggtctccactaatcacatacgaatctgtaaaagaattcatacat

SEQ ID NO: 393533 - DNA, 58 bp, Artificial
  Synthetic oligonucleotide
gaatcaccgaccgtcaagacagtattctaggagccgcacatggaaacctagtctacgg

SEQ ID NO: 393534 - DNA, 60 bp, Artificial
  Synthetic oligonucleotide
gaatcaccttcgactatcaaactcataggtctcaatggccgcgcagctgaacctctccca

SEQ ID NO: 393535 - DNA, 53 bp, Artificial
  Synthetic oligonucleotide
gaatcacgtttacacgtttagggattccttgccctatagttttgggtcacgta

SEQ ID NO: 393536 - DNA, 53 bp, Artificial
  Synthetic oligonucleotide
gaatcactaaagtccagggtaaatgaaaaatataataattgggtgttaaaggc

SEQ ID NO: 393537 - DNA, 60 bp, Artificial
  Synthetic oligonucleotide
gaatcactcctcgcactatgtacggatcttatgaagtcaggtcttatgaaacagatcatg

SEQ ID NO: 393538 - DNA, 60 bp, Artificial
  Synthetic oligonucleotide
gaatcacttccaaacatccgctatcataatcattcaaatgatcatagatatagagaccaa

SEQ ID NO: 393539 - DNA, 55 bp, Artificial
  Synthetic oligonucleotide
gaatcacttggaagaacacgaacgtgatatttgcgaagacgcatattcagtgcgt

SEQ ID NO: 393540 - DNA, 60 bp, Artificial
  Synthetic oligonucleotide
gaatcagaatgcgtttgcatcaacggaacttgtacagtagtaatgactgatggaagtgca

SEQ ID NO: 393541 - DNA, 55 bp, Artificial
  Synthetic oligonucleotide
gaatcagacttgctgataatcgctaccgatgctagtaatggccattggggagcag

SEQ ID NO: 393542 - DNA, 55 bp, Artificial
  Synthetic oligonucleotide
gaatcagaggggatgcaggaggaagcgatacaggagatagctggcatgagcgcgg

SEQ ID NO: 393543 - DNA, 60 bp, Artificial
  Synthetic oligonucleotide
gaatcagataattctcgacttaaaagctgacccaaatcacgcaattgatccagtaattcg

SEQ ID NO: 393544 - DNA, 55 bp, Artificial
  Synthetic oligonucleotide
gaatcagatggttggattaagaagtttacagagatgtgcaacgcagctaggggtt

SEQ ID NO: 393545 - DNA, 56 bp, Artificial
  Synthetic oligonucleotide
gaatcagcacactatcgatctagccgattcagaaatgaacagctgtttcgaaagag

SEQ ID NO: 393546 - DNA, 54 bp, Artificial
  Synthetic oligonucleotide
gaatcagcagagtcatggcagatatgcaaaagcattaggtcctgggcagatgac

SEQ ID NO: 393547 - DNA, 55 bp, Artificial
  Synthetic oligonucleotide
gaatcagcaggttgtagcatgattgacaacattgactctccatcgtcaatctggg

SEQ ID NO: 393548 - DNA, 60 bp, Artificial
  Synthetic oligonucleotide
gaatcagccggctgcaactgcgttagctaatactatagaggtcttcagatcgaacggtct

SEQ ID NO: 393549 - DNA, 55 bp, Artificial
  Synthetic oligonucleotide
gaatcaggatacatttgggcaagaataattcctcaagagacagcagatatgacag

SEQ ID NO: 393550 - DNA, 55 bp, Artificial
  Synthetic oligonucleotide
gaatcaggcctgatcgtagtatcagaggatcaaaattcacagacaagaacccagg

SEQ ID NO: 393551 - DNA, 53 bp, Artificial
  Synthetic oligonucleotide
gaatcaggcgctaggttgcagacgccgtgtgtgactgtgggcgggccaaccta

SEQ ID NO: 393552 - DNA, 60 bp, Artificial
  Synthetic oligonucleotide
gaatcagggccattcatgatggtatgcagtggaagggttgggtcgatcattttaagactc

SEQ ID NO: 393553 - DNA, 60 bp, Artificial
  Synthetic oligonucleotide
gaatcaggtaggagtgggagcattcgggcccatctctccacctctaagagacagtcatcc

SEQ ID NO: 393554 - DNA, 60 bp, Artificial
  Synthetic oligonucleotide
gaatcagtgctagcagacgctactgaaacaatgcttgcaaacgtgaccgctgttagacaa

SEQ ID NO: 393555 - DNA, 59 bp, Artificial
  Synthetic oligonucleotide
gaatcagttacattgcgaataatacactactcaagtactggtgacaaattcttcaactc

SEQ ID NO: 393556 - DNA, 53 bp, Artificial
  Synthetic oligonucleotide
gaatcataagtgggaatctgccaaccccttttgtggcgagagcacactttaca

SEQ ID NO: 393557 - DNA, 59 bp, Artificial
  Synthetic oligonucleotide
gaatcatacgaatactgttatcctttggattgttagagataggcgtcctgcaggtaccc

SEQ ID NO: 393558 - DNA, 60 bp, Artificial
  Synthetic oligonucleotide
gaatcatacggagaatgcgttattgttgtatatggcatgtacacatgcctctaaccctgt

SEQ ID NO: 393559 - DNA, 51 bp, Artificial
  Synthetic oligonucleotide
gaatcatatggtgaatcggttaaacaggctgtgctattaaacgtgctaggt

SEQ ID NO: 393560 - DNA, 55 bp, Artificial
  Synthetic oligonucleotide
gaatcatattattgctggaaacaataggggagaaggataaacgtgtcgaaccggc

SEQ ID NO: 393561 - DNA, 60 bp, Artificial
  Synthetic oligonucleotide
gaatcatcaagtttctctaccaaagcagtaagtaatacatgtaatgcaatccctagaaat

SEQ ID NO: 393562 - DNA, 59 bp, Artificial
  Synthetic oligonucleotide
gaatcatctcaacgaatccgtgggtgaccaataagcaactgagcgtgtaccaacagggt

SEQ ID NO: 393563 - DNA, 60 bp, Artificial
  Synthetic oligonucleotide
gaatcatgatgatgtggagaaacttattggtcaattattcccaatgaaaactatatgtac

SEQ ID NO: 393564 - DNA, 60 bp, Artificial
  Synthetic oligonucleotide
gaatcatgcgttttgagtgtttatattgccgaattgatacaggttgaattgttacatggc

SEQ ID NO: 393565 - DNA, 55 bp, Artificial
  Synthetic oligonucleotide
gaatcatggacaggaaacgaaagcatttgggaagaactaacatggcaggaatggg

SEQ ID NO: 393566 - DNA, 55 bp, Artificial
  Synthetic oligonucleotide
gaatcattattcaaagggtgggtcagttaatctactgtgggtgggtttagttcca

SEQ ID NO: 393567 - DNA, 60 bp, Artificial
  Synthetic oligonucleotide
gaatcatttgaggcttcactgcagacccttcgtgattacggtcttagtaaaaatgcagac

SEQ ID NO: 393568 - DNA, 52 bp, Artificial
  Synthetic oligonucleotide
gaatccaaacacaacggttacgacgaaccaagggagtactactactaccaag

SEQ ID NO: 393569 - DNA, 60 bp, Artificial
  Synthetic oligonucleotide
gaatccaaatcagaagataataaccattggttcggtctgtgtgacaattgggatagccag

SEQ ID NO: 393570 - DNA, 55 bp, Artificial
  Synthetic oligonucleotide
gaatccaaatcagaagataatatgcatttcagctacaggcatgacactatcggta

SEQ ID NO: 393571 - DNA, 57 bp, Artificial
  Synthetic oligonucleotide
gaatccaagagaaccagggcaaacatagtagtaccagattactggtccaagtacgga

SEQ ID NO: 393572 - DNA, 60 bp, Artificial
  Synthetic oligonucleotide
gaatccaagttctatgctttaatcatgatagcggcgtcggacacacagcagggaagagtg

SEQ ID NO: 393573 - DNA, 57 bp, Artificial
  Synthetic oligonucleotide
gaatccaatatcgagttctggacccaatactgccgtttctacgtaaacgccactcac

SEQ ID NO: 393574 - DNA, 57 bp, Artificial
  Synthetic oligonucleotide
gaatccaatgagccccggtacctgacaaaattccttcggaaagtgtctcagccgtga

SEQ ID NO: 393575 - DNA, 60 bp, Artificial
  Synthetic oligonucleotide
gaatccacacgtagcgcctcattttgtgggtcaccatattcttgggaacaagagctacag

SEQ ID NO: 393576 - DNA, 60 bp, Artificial
  Synthetic oligonucleotide
gaatccacagattcgatcagaactggtaattagcagataccgctattcacgtcgacacat

SEQ ID NO: 393577 - DNA, 55 bp, Artificial
  Synthetic oligonucleotide
gaatccacatcggcggtaatggtaggcaaggcttctgtgctgctctgaagagagg

SEQ ID NO: 393578 - DNA, 55 bp, Artificial
  Synthetic oligonucleotide
gaatccagaagcggttttgagatggtctgggatgctaatgggtgggtatcgacag

SEQ ID NO: 393579 - DNA, 50 bp, Artificial
  Synthetic oligonucleotide
gaatccagcaactgatcataggataacatattcctcttgagacattcaag

SEQ ID NO: 393580 - DNA, 60 bp, Artificial
  Synthetic oligonucleotide
gaatccagccggggatgacatgacactgttctgccaaatggtttctagtgttacatttat

SEQ ID NO: 393581 - DNA, 60 bp, Artificial
  Synthetic oligonucleotide
gaatccagtatgagaagtggatagcagctggcttggttatgccagattttaaggttgtaa

SEQ ID NO: 393582 - DNA, 60 bp, Artificial
  Synthetic oligonucleotide
gaatccataattgtgacaggctagtgctatgaaatatgaacatccacaaggtagatcaac

SEQ ID NO: 393583 - DNA, 52 bp, Artificial
  Synthetic oligonucleotide
gaatccatgcgaagcgcactcaattgcaaagtaatatgtgcacccgcaagga

SEQ ID NO: 393584 - DNA, 58 bp, Artificial
  Synthetic oligonucleotide
gaatccatgtcccgtgcagcctatgtggaagtagatggagcacccgcactctatatca

SEQ ID NO: 393585 - DNA, 59 bp, Artificial
  Synthetic oligonucleotide
gaatccccagcattaaaccattataccatacatgggacaactatcaagaatggctggtt

SEQ ID NO: 393586 - DNA, 60 bp, Artificial
  Synthetic oligonucleotide
gaatccccgttgcgacttactgcttggtgatcaatggtggtcatatatagtggaaagacc

SEQ ID NO: 393587 - DNA, 55 bp, Artificial
  Synthetic oligonucleotide
gaatcccctgctaaggtaccatttcttggcaccgtcgaaaggtgccactgggtct

SEQ ID NO: 393588 - DNA, 60 bp, Artificial
  Synthetic oligonucleotide
gaatcccgacattgtgttgacgagtaacagaagctcatcagatgagttgaaggaagcgtt

SEQ ID NO: 393589 - DNA, 60 bp, Artificial
  Synthetic oligonucleotide
gaatccctatccttggtttcacataattcgttcaagactgtaccgagcattgacgagcta

SEQ ID NO: 393590 - DNA, 55 bp, Artificial
  Synthetic oligonucleotide
gaatccctctactgtagctattctccttaaatggattggtggtaagttccaggat

SEQ ID NO: 393591 - DNA, 50 bp, Artificial
  Synthetic oligonucleotide
gaatccctgacgttttcggcagcccattcttcaagttgctctggaacttg

SEQ ID NO: 393592 - DNA, 60 bp, Artificial
  Synthetic oligonucleotide
gaatcccttgcgcggcccagcattacgttacagggcttacagaggcagccccggatgcaa

SEQ ID NO: 393593 - DNA, 53 bp, Artificial
  Synthetic oligonucleotide
gaatccctttcggaacgtttaagtgcgttacaggacaaaatactagaccacta

SEQ ID NO: 393594 - DNA, 60 bp, Artificial
  Synthetic oligonucleotide
gaatccgaaatgacccagctggactcatatgcaagctccgcgccgtaaggcaagctgaac

SEQ ID NO: 393595 - DNA, 51 bp, Artificial
  Synthetic oligonucleotide
gaatccgaagggagaaagtgggcctgttgggcgcaatccgtaacgtgtatg

SEQ ID NO: 393596 - DNA, 53 bp, Artificial
  Synthetic oligonucleotide
gaatccgagtcaaaaacagaggactcgaacggacggacaccggtgaacttagg

SEQ ID NO: 393597 - DNA, 60 bp, Artificial
  Synthetic oligonucleotide
gaatccgagtctccttccgctctcggcagaggtgtgaaggatagtaagtctgtatccgcg

SEQ ID NO: 393598 - DNA, 55 bp, Artificial
  Synthetic oligonucleotide
gaatccgagtggtggcgcactcgcagttctctcaaagttcttagaagctgtggtt

SEQ ID NO: 393599 - DNA, 55 bp, Artificial
  Synthetic oligonucleotide
gaatccgatgaacgtctccgatattaccgaaggtaactcggcgattatcgatcct

SEQ ID NO: 393600 - DNA, 58 bp, Artificial
  Synthetic oligonucleotide
gaatccgattcgagattactgcaggtctgaaattgttaggcaaattacttattacgat

SEQ ID NO: 393601 - DNA, 58 bp, Artificial
  Synthetic oligonucleotide
gaatccgcctattagtacaaacgagacaacagtataaggagaaactatatgcctgtaa

SEQ ID NO: 393602 - DNA, 55 bp, Artificial
  Synthetic oligonucleotide
gaatccggtaaatggaagacggttaccaagtgttcaggacacgatgataatacgt

SEQ ID NO: 393603 - DNA, 55 bp, Artificial
  Synthetic oligonucleotide
gaatccggtttgtccggggttcgcatggctctcctcgggcaggcctgatgggttt

SEQ ID NO: 393604 - DNA, 55 bp, Artificial
  Synthetic oligonucleotide
gaatccgtaatcatggcagttgatcgatatataatatgtacacccacacgggaga

SEQ ID NO: 393605 - DNA, 55 bp, Artificial
  Synthetic oligonucleotide
gaatccgtcgcctaagttcgattccaccatctgggtatctcttaggcgtttgccc

SEQ ID NO: 393606 - DNA, 55 bp, Artificial
  Synthetic oligonucleotide
gaatccgtgtaagagtgcctggagttatcaatttctacgacagtctaaaggagtg

SEQ ID NO: 393607 - DNA, 55 bp, Artificial
  Synthetic oligonucleotide
gaatccgtgtatggcatgcctaggttgaaggaaaacgtccgtcaccgttatcgtg

SEQ ID NO: 393608 - DNA, 55 bp, Artificial
  Synthetic oligonucleotide
gaatccgtgttttcccagaaccctccctccagtcctgcggcgggagctgagttgg

SEQ ID NO: 393609 - DNA, 52 bp, Artificial
  Synthetic oligonucleotide
gaatcctaaagctcccgtccatatctccgatggaggaggaccacaagataag

SEQ ID NO: 393610 - DNA, 58 bp, Artificial
  Synthetic oligonucleotide
gaatcctagggcctatattcatattgtgtcgccccgtaaggcccttgctagtgaaatg

SEQ ID NO: 393611 - DNA, 55 bp, Artificial
  Synthetic oligonucleotide
gaatcctatctatccaagttcagatatgggtcacagtagcaaaggccatgactgc

SEQ ID NO: 393612 - DNA, 57 bp, Artificial
  Synthetic oligonucleotide
gaatcctatctctcagcgtatgctaggcttaaatactactcaggcactggtagtgag

SEQ ID NO: 393613 - DNA, 60 bp, Artificial
  Synthetic oligonucleotide
gaatcctgattgtttttgctacctcttatgatatagcgtctctcctttccgtcattaata

SEQ ID NO: 393614 - DNA, 52 bp, Artificial
  Synthetic oligonucleotide
gaatcctgcctggattcgaccgtccgatcatgtacaaggttcacatctgcat

SEQ ID NO: 393615 - DNA, 60 bp, Artificial
  Synthetic oligonucleotide
gaatcctggaaatgctgaaatcgaggaccttatatttctggctcgatctgcacttatcct

SEQ ID NO: 393616 - DNA, 58 bp, Artificial
  Synthetic oligonucleotide
gaatcctggatacaatatctgcgtaacgcttaaaggtgacacttagcgagggggaatc

SEQ ID NO: 393617 - DNA, 60 bp, Artificial
  Synthetic oligonucleotide
gaatcctgggaatgctgaaattgaagatctcatctttctggcacggtctgcactcattct

SEQ ID NO: 393618 - DNA, 55 bp, Artificial
  Synthetic oligonucleotide
gaatcctggtaaacaggcttgacaggtttgggtggttccagaccgatgtattacc

SEQ ID NO: 393619 - DNA, 56 bp, Artificial
  Synthetic oligonucleotide
gaatccttccacgtgcccactcgtcggaactttctgcccccgggcatggcttccaa

SEQ ID NO: 393620 - DNA, 54 bp, Artificial
  Synthetic oligonucleotide
gaatccttctgtactgtatagagctcctagatcaggtgaggaggttattctcag

SEQ ID NO: 393621 - DNA, 54 bp, Artificial
  Synthetic oligonucleotide
gaatcgaaaaaacatagttgtcatatattagtaacggtttattcttttggctaa

SEQ ID NO: 393622 - DNA, 55 bp, Artificial
  Synthetic oligonucleotide
gaatcgaaatccgacctccctcggctttatagacgacgtaagtgggctgggccca

SEQ ID NO: 393623 - DNA, 55 bp, Artificial
  Synthetic oligonucleotide
gaatcgaaggcccttcaccgcctccttttgtctggcaagacccctcttcccgagc

SEQ ID NO: 393624 - DNA, 54 bp, Artificial
  Synthetic oligonucleotide
gaatcgaccagcacgcattggttgttgggcgtgtacgtaaactcggccgactgc

SEQ ID NO: 393625 - DNA, 60 bp, Artificial
  Synthetic oligonucleotide
gaatcgacgtagtagattgaatttgcgtcgttgcgcaaatcgatatcacgttgttgaggc

SEQ ID NO: 393626 - DNA, 60 bp, Artificial
  Synthetic oligonucleotide
gaatcgagaatgtcttcttcacaagaattggagatcttgttgagaatagctgaatatgga

SEQ ID NO: 393627 - DNA, 59 bp, Artificial
  Synthetic oligonucleotide
gaatcgagtctcaagttcgcgagccgttgactctagaggaaggcgaggactttcttcaa

SEQ ID NO: 393628 - DNA, 60 bp, Artificial
  Synthetic oligonucleotide
gaatcgatgaacggctaccttatcaaacgccacgagtcttgtgctatctgtgaaacgggc

SEQ ID NO: 393629 - DNA, 55 bp, Artificial
  Synthetic oligonucleotide
gaatcgatggacggagaccgaatttgtaatcagtgacgatcttagagacgtgtca

SEQ ID NO: 393630 - DNA, 60 bp, Artificial
  Synthetic oligonucleotide
gaatcgcaacgaaatggaatagctccacaatctgaagcactaagaaagttgtcaggtatt

SEQ ID NO: 393631 - DNA, 54 bp, Artificial
  Synthetic oligonucleotide
gaatcgcaacttgagttatggcggacgtccgctagatgcagggattccggccgg

SEQ ID NO: 393632 - DNA, 52 bp, Artificial
  Synthetic oligonucleotide
gaatcgctcaactctccagaagctgtacaacgtcgtatcgattttgcttaca

SEQ ID NO: 393633 - DNA, 50 bp, Artificial
  Synthetic oligonucleotide
gaatcgctgacgcctggtcaaatcgaagcatacattttcgccaagaagcc

SEQ ID NO: 393634 - DNA, 57 bp, Artificial
  Synthetic oligonucleotide
gaatcggaaccccactgcggcttgtgtctttaaagtgttggctccatatagaccgga

SEQ ID NO: 393635 - DNA, 60 bp, Artificial
  Synthetic oligonucleotide
gaatcggaagattctacatacagatgtgcactgaactcaagctcagtgacaatgagggac

SEQ ID NO: 393636 - DNA, 60 bp, Artificial
  Synthetic oligonucleotide
gaatcggaaggaagaaagattctgcaagatcatgaacaaggcccctctcgatctaaggga

SEQ ID NO: 393637 - DNA, 55 bp, Artificial
  Synthetic oligonucleotide
gaatcggacgactttccccataacgctggagacatcctggaaggggaaagaggta

SEQ ID NO: 393638 - DNA, 60 bp, Artificial
  Synthetic oligonucleotide
gaatcggagatgtttgtcaccaaatttgccactgcaaggacaatgaggacagtggccttg

SEQ ID NO: 393639 - DNA, 53 bp, Artificial
  Synthetic oligonucleotide
gaatcggagcccgacgaccacggtcgagttgcccccggaacaaggctcaccat

SEQ ID NO: 393640 - DNA, 60 bp, Artificial
  Synthetic oligonucleotide
gaatcggagtgcgtatgccacaaagggatctgtccagtagtcatgacagatggcccagca

SEQ ID NO: 393641 - DNA, 60 bp, Artificial
  Synthetic oligonucleotide
gaatcggatccaagtggagaagattcagatgaatatcagtaaaatagtttatgcataagg

SEQ ID NO: 393642 - DNA, 55 bp, Artificial
  Synthetic oligonucleotide
gaatcggatccgtaggaatacggagcggaggtatggacggtgacggattcgtttc

SEQ ID NO: 393643 - DNA, 60 bp, Artificial
  Synthetic oligonucleotide
gaatcggcagctacagcaaaatcgcacagttccacattataggaccacaggtatattcct

SEQ ID NO: 393644 - DNA, 51 bp, Artificial
  Synthetic oligonucleotide
gaatcgggcgagtgagggagctggcacgtgggtgtggagtccagttggttc

SEQ ID NO: 393645 - DNA, 51 bp, Artificial
  Synthetic oligonucleotide
gaatcgggggttgattgggctatcttaacgattaagggccgaaggcccgtt

SEQ ID NO: 393646 - DNA, 56 bp, Artificial
  Synthetic oligonucleotide
gaatcggtgaaactagaaaaccttggtgtgtatcaaattcttgccatttatagtac

SEQ ID NO: 393647 - DNA, 51 bp, Artificial
  Synthetic oligonucleotide
gaatcggtttgtgtatagataatgttcccaaatacgggtctgatggttacg

SEQ ID NO: 393648 - DNA, 59 bp, Artificial
  Synthetic oligonucleotide
gaatcgtaggcgacgccagacacgaatgtcaagtaacgctgtacacaaagtgcgaaaaa

SEQ ID NO: 393649 - DNA, 55 bp, Artificial
  Synthetic oligonucleotide
gaatcgtatcttataaacatctgtcgatgtcttgaagcagaaatcctgaggagtg

SEQ ID NO: 393650 - DNA, 56 bp, Artificial
  Synthetic oligonucleotide
gaatcgtatgagtgttcgtcgtttggaaaaccaattcgtttagagcgcacccgcat

SEQ ID NO: 393651 - DNA, 60 bp, Artificial
  Synthetic oligonucleotide
gaatcgtctaccaccatatcttcccttcagcatcaacgattcgaaactgttccactacta

SEQ ID NO: 393652 - DNA, 55 bp, Artificial
  Synthetic oligonucleotide
gaatcgtctttagcagaccatgttattgtgtttgaaggctctggaggacagttgg

SEQ ID NO: 393653 - DNA, 55 bp, Artificial
  Synthetic oligonucleotide
gaatcgtgattactttgatgtcgaggttaatccgcagatgctacaggtggcttac

SEQ ID NO: 393654 - DNA, 55 bp, Artificial
  Synthetic oligonucleotide
gaatcgttgttgtactactatttgccttcgccgactcattccatgggctggcaac

SEQ ID NO: 393655 - DNA, 60 bp, Artificial
  Synthetic oligonucleotide
gaatctaaaaacagggaagtatgcaagacaaaggtctgctcacactaatgatgtaagaca

SEQ ID NO: 393656 - DNA, 60 bp, Artificial
  Synthetic oligonucleotide
gaatctaaagtcgtatattgtcaagaaatgaccagaagtccgatcagtttgtgcttgttg

SEQ ID NO: 393657 - DNA, 57 bp, Artificial
  Synthetic oligonucleotide
gaatctaattgccccaagaggacattataagctaaacaatcagaagaaaagtacaat

SEQ ID NO: 393658 - DNA, 57 bp, Artificial
  Synthetic oligonucleotide
gaatctacagagtggttcgccaatagttatgatatgagtgtttactttaatatgacc

SEQ ID NO: 393659 - DNA, 58 bp, Artificial
  Synthetic oligonucleotide
gaatctacgtattcacctgatacactcggttacgatcttatccgagatttaatttctg

SEQ ID NO: 393660 - DNA, 60 bp, Artificial
  Synthetic oligonucleotide
gaatctaggcacgatgtctctcatattggcaaagtcatgtgtgttagtgatgttacccga

SEQ ID NO: 393661 - DNA, 51 bp, Artificial
  Synthetic oligonucleotide
gaatctaggtggcactcccaccaagaggatgctcatgtacaatttccccac

SEQ ID NO: 393662 - DNA, 54 bp, Artificial
  Synthetic oligonucleotide
gaatctagtgttattaactcaggggctggtgttcccaattttactgggtcaggg

SEQ ID NO: 393663 - DNA, 60 bp, Artificial
  Synthetic oligonucleotide
gaatctatcagatggacaaaagatcccaaaaatactcaagatcatgtcagatcattgtgc

SEQ ID NO: 393664 - DNA, 57 bp, Artificial
  Synthetic oligonucleotide
gaatctatcggacccaatgcaagtgtacgacacggatctttttatagttcgtggaaa

SEQ ID NO: 393665 - DNA, 52 bp, Artificial
  Synthetic oligonucleotide
gaatctatgacaggtgggcagtgctaccccggcatgccaaacctgggcccac

SEQ ID NO: 393666 - DNA, 60 bp, Artificial
  Synthetic oligonucleotide
gaatctcaaaacagggaaatatgctaggcaaagagcctcccacacaaatgagataagaca

SEQ ID NO: 393667 - DNA, 55 bp, Artificial
  Synthetic oligonucleotide
gaatctcagattgaccctcgcgatctgctcaatcctattctctttcacggttgcc

SEQ ID NO: 393668 - DNA, 55 bp, Artificial
  Synthetic oligonucleotide
gaatctcattagcaacatgaagaacggttttgatggtatcacttcccaactctcc

SEQ ID NO: 393669 - DNA, 53 bp, Artificial
  Synthetic oligonucleotide
gaatctccaaccccaggtaggcgaagtttcgacctgccaaaccggcttcctgt

SEQ ID NO: 393670 - DNA, 60 bp, Artificial
  Synthetic oligonucleotide
gaatctcccgaaatccaatgtgttgagattagcgagtaaggagcagaagggcttcttatc

SEQ ID NO: 393671 - DNA, 56 bp, Artificial
  Synthetic oligonucleotide
gaatctccgatgcgttgcgctccacactctaccccgagtgtagcttaggccgatga

SEQ ID NO: 393672 - DNA, 60 bp, Artificial
  Synthetic oligonucleotide
gaatctccgcctcctcatgacctaatttgtgcgtacgtcacttccgtggctccaagtcgc

SEQ ID NO: 393673 - DNA, 60 bp, Artificial
  Synthetic oligonucleotide
gaatctcggtacgatagatctgtctagcgcttccgatacgttaagcattgaactcgtgcg

SEQ ID NO: 393674 - DNA, 55 bp, Artificial
  Synthetic oligonucleotide
gaatctcgtagtcgatcagtatgtgcggcaattttgtgcgccatgtgggtatgaa

SEQ ID NO: 393675 - DNA, 60 bp, Artificial
  Synthetic oligonucleotide
gaatctctgatgttgaactagtgagtatgtccaaacttcactcagttcgacgtcaacaga

SEQ ID NO: 393676 - DNA, 53 bp, Artificial
  Synthetic oligonucleotide
gaatctgaaggcggtagcacactgtcctagtcaactcgtgacaaagcatacag

SEQ ID NO: 393677 - DNA, 60 bp, Artificial
  Synthetic oligonucleotide
gaatctgaccgcattgaatactcctgttgccaaccttctacgcacagctgcttggaaaag

SEQ ID NO: 393678 - DNA, 58 bp, Artificial
  Synthetic oligonucleotide
gaatctgacggaagattatacgcagcttcgttgaagcttcgtggtaggtccccaaata

SEQ ID NO: 393679 - DNA, 60 bp, Artificial
  Synthetic oligonucleotide
gaatctgacggaagattgtacgcaccttctctgaagcttcgttgtaggccccattatatg

SEQ ID NO: 393680 - DNA, 60 bp, Artificial
  Synthetic oligonucleotide
gaatctgatgagccgcgtgctaaggaaatcggtcctaatcggggacctgagtgagtcatg

SEQ ID NO: 393681 - DNA, 60 bp, Artificial
  Synthetic oligonucleotide
gaatctgatggggacaaagggcgtggaggcatcaagggaggatttgttcatcaaagaatg

SEQ ID NO: 393682 - DNA, 60 bp, Artificial
  Synthetic oligonucleotide
gaatctgcaggaactggagccaccagggtacgagatatgtcctgaagtcaagatgaacac

SEQ ID NO: 393683 - DNA, 54 bp, Artificial
  Synthetic oligonucleotide
gaatctgctataaggcatgccatattaggacgcatagttagacctaggtgcaat

SEQ ID NO: 393684 - DNA, 51 bp, Artificial
  Synthetic oligonucleotide
gaatctggacagctattatgtcgtgaggcatgttgaacggcatgctgtcgt

SEQ ID NO: 393685 - DNA, 55 bp, Artificial
  Synthetic oligonucleotide
gaatctggaccaaatcgctccgatgaggtttgtattagatctaggaggaaagagc

SEQ ID NO: 393686 - DNA, 60 bp, Artificial
  Synthetic oligonucleotide
gaatctggagttggcaaatctacggtcgcccaactattgatgagtgactgccttgttgcc

SEQ ID NO: 393687 - DNA, 60 bp, Artificial
  Synthetic oligonucleotide
gaatctggcaaagagaattgccgcctcccttggagatgagacctcagtcggcatcatacc

SEQ ID NO: 393688 - DNA, 55 bp, Artificial
  Synthetic oligonucleotide
gaatctgggagtgtcaccattagattggttgacttgataagcgcttcgtcggttg

SEQ ID NO: 393689 - DNA, 60 bp, Artificial
  Synthetic oligonucleotide
gaatctggtatgggataagtccaatgttatcggcgggactcacgcgaatcaacgtgcagg

SEQ ID NO: 393690 - DNA, 55 bp, Artificial
  Synthetic oligonucleotide
gaatctgtatgacaaggtcagaatgcaactgagagacaatgccaaggaaataggg

SEQ ID NO: 393691 - DNA, 55 bp, Artificial
  Synthetic oligonucleotide
gaatctgtcgcgtacattcagcctgggacccgttgatcaaagtcctttgctggcc

SEQ ID NO: 393692 - DNA, 60 bp, Artificial
  Synthetic oligonucleotide
gaatctgttattcgtgcattggtacttgccctcgaactggatgagcacgtgaagatgagg

SEQ ID NO: 393693 - DNA, 55 bp, Artificial
  Synthetic oligonucleotide
gaatctgttcttagcaaatggaggcattcatccagcaatctcctgtccacctcgc

SEQ ID NO: 393694 - DNA, 52 bp, Artificial
  Synthetic oligonucleotide
gaatctgtttatgcgtctgagttatccgtgatgaaggtagatatgcgacact

SEQ ID NO: 393695 - DNA, 60 bp, Artificial
  Synthetic oligonucleotide
gaatcttactttgttgtccctgattctaagttctttcatcttggcagagagagtaacgca

SEQ ID NO: 393696 - DNA, 57 bp, Artificial
  Synthetic oligonucleotide
gaatcttagcgtatattacagggatactattaacaagagatgggggtgaaggaaaca

SEQ ID NO: 393697 - DNA, 60 bp, Artificial
  Synthetic oligonucleotide
gaatcttatctgaatggaaatgatgtcgtggctcattagaaatggcctctggctgtgttc

SEQ ID NO: 393698 - DNA, 53 bp, Artificial
  Synthetic oligonucleotide
gaatcttcaagaatcattcaaggtgttccaatacttgagccaaatgtgcttgc

SEQ ID NO: 393699 - DNA, 59 bp, Artificial
  Synthetic oligonucleotide
gaatcttcccttcgaaagggcaaccattatggcagtgttcacagggaacactgagggca

SEQ ID NO: 393700 - DNA, 59 bp, Artificial
  Synthetic oligonucleotide
gaatcttcgcaatacgttttaacggcttcgaagattaatcaaaatgcgcgcagtgagtc

SEQ ID NO: 393701 - DNA, 55 bp, Artificial
  Synthetic oligonucleotide
gaatcttcgtttactgaacagctatttgccaccactttcacaatcgcaggtccgc

SEQ ID NO: 393702 - DNA, 59 bp, Artificial
  Synthetic oligonucleotide
gaatcttgcgcaatattggggtcaggaacgaaagaatagtgctattagtttgcttaata

SEQ ID NO: 393703 - DNA, 56 bp, Artificial
  Synthetic oligonucleotide
gaatcttggagtaatgcgactacgaccgcgaataataaaagtagattatcaaatgc

SEQ ID NO: 393704 - DNA, 59 bp, Artificial
  Synthetic oligonucleotide
gaatcttgtcaatggttctgtgcaaactaccgcccagcaggtacttcgccccgctacag

SEQ ID NO: 393705 - DNA, 54 bp, Artificial
  Synthetic oligonucleotide
gaatcttgttcgaaattatcgtaagagggaactttctgtttgggatgtcgattg

SEQ ID NO: 393706 - DNA, 57 bp, Artificial
  Synthetic oligonucleotide
gaatctttgccaatttgcacatgtgaattaactgaactgttaccacttaaccagtac

SEQ ID NO: 393707 - DNA, 60 bp, Artificial
  Synthetic oligonucleotide
gaatgaaaatcagaaccctaggatgttcctagcaatgataacatacataacaagaaatca

SEQ ID NO: 393708 - DNA, 60 bp, Artificial
  Synthetic oligonucleotide
gaatgaaatagtggatgtgatgtgccatgccactctgacccatagactgatgtcaccgaa

SEQ ID NO: 393709 - DNA, 59 bp, Artificial
  Synthetic oligonucleotide
gaatgaacaaggacaaaccctctggagcaaaacaaacgatgccggctcagaccgagtga

SEQ ID NO: 393710 - DNA, 60 bp, Artificial
  Synthetic oligonucleotide
gaatgaacaatatcaagggacgttgttattccattagcgacttgacaccaggatatagag

SEQ ID NO: 393711 - DNA, 54 bp, Artificial
  Synthetic oligonucleotide
gaatgaaccggctaaattttatgaaaccgtcatcaagaaagttagacatttaag

SEQ ID NO: 393712 - DNA, 55 bp, Artificial
  Synthetic oligonucleotide
gaatgaacggacgatgacaccagtaggcttcgagcacactcgtaaattcatctgc

SEQ ID NO: 393713 - DNA, 60 bp, Artificial
  Synthetic oligonucleotide
gaatgaacggcgccgccccaatgattagagatgagactggcatgatggtgccttttgagg

SEQ ID NO: 393714 - DNA, 59 bp, Artificial
  Synthetic oligonucleotide
gaatgaactgggtgttccatttcacttgggaaccaaacaagtttgcatagcatggtcca

SEQ ID NO: 393715 - DNA, 54 bp, Artificial
  Synthetic oligonucleotide
gaatgaagaaaggcacccccgtcgttggtgtgattaacaacgccgacgtcggga

SEQ ID NO: 393716 - DNA, 60 bp, Artificial
  Synthetic oligonucleotide
gaatgaagtatcactttggaacaaccacactcgagcaaggctggacatccatgatgagac

SEQ ID NO: 393717 - DNA, 55 bp, Artificial
  Synthetic oligonucleotide
gaatgaagttcagggtggtacttttccagaggtaaatctactgagaataaggcag

SEQ ID NO: 393718 - DNA, 60 bp, Artificial
  Synthetic oligonucleotide
gaatgacaaacgattgaagtctgtgggtgaccattgtgagtggtcgaagaaatacatgag

SEQ ID NO: 393719 - DNA, 50 bp, Artificial
  Synthetic oligonucleotide
gaatgacaattatggtatcacacgtgaacaagcttttaatttactgaaat

SEQ ID NO: 393720 - DNA, 60 bp, Artificial
  Synthetic oligonucleotide
gaatgacactgaaagtgttgtgcattatgtgccaaatgaaactccattgtcaccctttgt

SEQ ID NO: 393721 - DNA, 55 bp, Artificial
  Synthetic oligonucleotide
gaatgacactgtgtatttccgcatggtgtttgggaatctatacagtactttccac

SEQ ID NO: 393722 - DNA, 60 bp, Artificial
  Synthetic oligonucleotide
gaatgacatgccaggtgggtactgtcttgaggaatggatgcttattgcagcaaaactcaa

SEQ ID NO: 393723 - DNA, 55 bp, Artificial
  Synthetic oligonucleotide
gaatgaccgcttctatccggatacggacgctccatatgtgcacttcccgcgcgga

SEQ ID NO: 393724 - DNA, 56 bp, Artificial
  Synthetic oligonucleotide
gaatgaccttgttacattgggaactgataatcttaatcacatgacatcagacatcc

SEQ ID NO: 393725 - DNA, 55 bp, Artificial
  Synthetic oligonucleotide
gaatgacgaacgcgagtctttgaataacgtccttgtgtggttgaagaccctcacc

SEQ ID NO: 393726 - DNA, 58 bp, Artificial
  Synthetic oligonucleotide
gaatgacgaccagaacccgaacagagcaagtacctcgcgcaactagcacccgacccag

SEQ ID NO: 393727 - DNA, 60 bp, Artificial
  Synthetic oligonucleotide
gaatgacgacgagaaataatgtaaatctatgttacatctaattgggaaggtccatgacgc

SEQ ID NO: 393728 - DNA, 60 bp, Artificial
  Synthetic oligonucleotide
gaatgacggctcatttgattgaataaacatctaatagagtcctcatttcgattgtttaga

SEQ ID NO: 393729 - DNA, 60 bp, Artificial
  Synthetic oligonucleotide
gaatgacgtaatgtgttctggcggagattatagctttgcgctacctgccggacagtggcc

SEQ ID NO: 393730 - DNA, 60 bp, Artificial
  Synthetic oligonucleotide
gaatgactcagctagtgagactaactatagattaataaactgcaatacctcagccataac

SEQ ID NO: 393731 - DNA, 55 bp, Artificial
  Synthetic oligonucleotide
gaatgactcgactgtggtgcaacctgtattggatggaccgtatcaaccggcgtcg

SEQ ID NO: 393732 - DNA, 57 bp, Artificial
  Synthetic oligonucleotide
gaatgacttctatgacgaaccggatgactggtactctgagggagtcattgatggtgt

SEQ ID NO: 393733 - DNA, 60 bp, Artificial
  Synthetic oligonucleotide
gaatgagacgaactaggccaacaaatgagccagcagcagagggggtgggagcagtatctc

SEQ ID NO: 393734 - DNA, 60 bp, Artificial
  Synthetic oligonucleotide
gaatgagacttttattcagagtaatacgccgatagatagagcgttagcagttcctgatca

SEQ ID NO: 393735 - DNA, 58 bp, Artificial
  Synthetic oligonucleotide
gaatgagcaacttgtaattaacttctattggcaaatagatatcgctctgtacactcac

SEQ ID NO: 393736 - DNA, 60 bp, Artificial
  Synthetic oligonucleotide
gaatgagcaagggcaaacattatggagtaaagtgaatgatgccggatcagaccgagtgat

SEQ ID NO: 393737 - DNA, 55 bp, Artificial
  Synthetic oligonucleotide
gaatgagcagctttgttacgttgatttgggtaatgaatatccggtgcttgtcaag

SEQ ID NO: 393738 - DNA, 55 bp, Artificial
  Synthetic oligonucleotide
gaatgaggattcgcttcaaggatgacagctcgtttgaggatgtgaacgggatccg

SEQ ID NO: 393739 - DNA, 59 bp, Artificial
  Synthetic oligonucleotide
gaatgaggctcgctcgggtgaaatctatttatagaatggcgtgactggcgttgttttac

SEQ ID NO: 393740 - DNA, 59 bp, Artificial
  Synthetic oligonucleotide
gaatgaggggcccaaaatacttatggaggtgagctatgcccttgtgtataccatcggct

SEQ ID NO: 393741 - DNA, 57 bp, Artificial
  Synthetic oligonucleotide
gaatgagtatggaatctgatatgtagtataactcacatatgcttccttagttgctgt

SEQ ID NO: 393742 - DNA, 57 bp, Artificial
  Synthetic oligonucleotide
gaatgagtatggaatttgatatgtagtataactcatatatgcttccttagttgctgt

SEQ ID NO: 393743 - DNA, 60 bp, Artificial
  Synthetic oligonucleotide
gaatgagtccaaattataggtttaggcagagcatgtggataggaattgtctcctattctg

SEQ ID NO: 393744 - DNA, 57 bp, Artificial
  Synthetic oligonucleotide
gaatgagtcttcgaatgggcttaggttttccaacggaccagaagtcgacacaatcag

SEQ ID NO: 393745 - DNA, 57 bp, Artificial
  Synthetic oligonucleotide
gaatgataatagcaaaccaactcttatggataaagtattacaggtgtcaagtcagcc

SEQ ID NO: 393746 - DNA, 60 bp, Artificial
  Synthetic oligonucleotide
gaatgatacaatgtctctggtgaacatcatacaacgtggtaaattgactaagtactccaa

SEQ ID NO: 393747 - DNA, 60 bp, Artificial
  Synthetic oligonucleotide
gaatgatatatagcattcatgctcgagatgttcagataacccatagtgctcaaagctaag

SEQ ID NO: 393748 - DNA, 55 bp, Artificial
  Synthetic oligonucleotide
gaatgatatatcagtctctttcccctaatgatttgttggctccatctaagcaacc

SEQ ID NO: 393749 - DNA, 55 bp, Artificial
  Synthetic oligonucleotide
gaatgatatgagtatccaactgcgcaatgtgcgcagagcgatggcgagctgaacg

SEQ ID NO: 393750 - DNA, 59 bp, Artificial
  Synthetic oligonucleotide
gaatgatcaagtaccattatccaacgaaagctggatattgtgggggtgtcttgtacaaa

SEQ ID NO: 393751 - DNA, 60 bp, Artificial
  Synthetic oligonucleotide
gaatgatcacttttcttactgtccaggagtgaaggcagcaaccaacttgggggcatacag

SEQ ID NO: 393752 - DNA, 60 bp, Artificial
  Synthetic oligonucleotide
gaatgatcctatattggtagcctgtgccaacaatattttgctatctatgcatggcctgca

SEQ ID NO: 393753 - DNA, 55 bp, Artificial
  Synthetic oligonucleotide
gaatgatcggaatattacctgatatgacaccaagtactgaaatgtcgctgagggg

SEQ ID NO: 393754 - DNA, 57 bp, Artificial
  Synthetic oligonucleotide
gaatgatgacaacggaaatggaggaacccatggttccggcgctttgacgaagatccg

SEQ ID NO: 393755 - DNA, 55 bp, Artificial
  Synthetic oligonucleotide
gaatgatgcaatccttcacactgactaccatgaaaattggatctcagagttccga

SEQ ID NO: 393756 - DNA, 60 bp, Artificial
  Synthetic oligonucleotide
gaatgatgccacctatcagagaacaagagcgcttgtccgcactgggatggatcccagaat

SEQ ID NO: 393757 - DNA, 56 bp, Artificial
  Synthetic oligonucleotide
gaatgatgcgaataaactggaaaaaatggtggcaggtgttttataccgtagtagat

SEQ ID NO: 393758 - DNA, 55 bp, Artificial
  Synthetic oligonucleotide
gaatgatggaggaagccgcgaagcaacctgctctgattaattcgggaagagtcag

SEQ ID NO: 393759 - DNA, 59 bp, Artificial
  Synthetic oligonucleotide
gaatgatgttatgggatggaaacaacgtacggaagcacctaggaagcagtcgggagtga

SEQ ID NO: 393760 - DNA, 55 bp, Artificial
  Synthetic oligonucleotide
gaatgatgttgtagtttcttccatgtatcaactcatgtgctacacctaataggcg

SEQ ID NO: 393761 - DNA, 60 bp, Artificial
  Synthetic oligonucleotide
gaatgattctgggtgagaggacatatgtctgcttagctcttcgaattgaatttgagataa

SEQ ID NO: 393762 - DNA, 52 bp, Artificial
  Synthetic oligonucleotide
gaatgattgatggctggtacggataccatcacagcaatgatcagggatcagg

SEQ ID NO: 393763 - DNA, 55 bp, Artificial
  Synthetic oligonucleotide
gaatgattgggatattacacgacatgacaccaagtactgagatgtcgctgagggg

SEQ ID NO: 393764 - DNA, 56 bp, Artificial
  Synthetic oligonucleotide
gaatgatttttacctggttgctaattatgactgggtgcctacttcaacaacgaaag

SEQ ID NO: 393765 - DNA, 60 bp, Artificial
  Synthetic oligonucleotide
gaatgcaaaaatccgatctgcaacagttacccaccagtctacagtgctctgatctccatt

SEQ ID NO: 393766 - DNA, 60 bp, Artificial
  Synthetic oligonucleotide
gaatgcaacaggaatcagatgctctttacattcctccaggaccaatcaagagacctcgca

SEQ ID NO: 393767 - DNA, 52 bp, Artificial
  Synthetic oligonucleotide
gaatgcaaccttaaagggcagatttctacaattcacaatatacccgaaatat

SEQ ID NO: 393768 - DNA, 55 bp, Artificial
  Synthetic oligonucleotide
gaatgcaacgaatgcattaccgaatcggagacccacaaagaccaatgcagatagc

SEQ ID NO: 393769 - DNA, 55 bp, Artificial
  Synthetic oligonucleotide
gaatgcaattggtgagggtgacaaatcgcctctgctggactcgctctcatttctg

SEQ ID NO: 393770 - DNA, 60 bp, Artificial
  Synthetic oligonucleotide
gaatgcacaactagtgtcgaacgtcttgcgcaaagtctagagatgaactgacttagatga

SEQ ID NO: 393771 - DNA, 55 bp, Artificial
  Synthetic oligonucleotide
gaatgcacaagggcaaatgatacatcagtccatgtcacccagaaccttgaacgca

SEQ ID NO: 393772 - DNA, 55 bp, Artificial
  Synthetic oligonucleotide
gaatgcacactctgtagccatggagttgcgggctaggtacggagtccagcccgcc

SEQ ID NO: 393773 - DNA, 60 bp, Artificial
  Synthetic oligonucleotide
gaatgcaccaaatcatgagggaatacaagcaggagtggatagattctacagaacctgcaa

SEQ ID NO: 393774 - DNA, 60 bp, Artificial
  Synthetic oligonucleotide
gaatgcactcaacctgcaacaagattgcttagctgacgactacctacaatacagtgagga

SEQ ID NO: 393775 - DNA, 60 bp, Artificial
  Synthetic oligonucleotide
gaatgcagagttgtgagcggaaaactggttatgggtctggacaagatgagcagagtagcg

SEQ ID NO: 393776 - DNA, 55 bp, Artificial
  Synthetic oligonucleotide
gaatgcagcatcccctcgaataatcaagtagaaaaggaaatttgtcctaaagcgg

SEQ ID NO: 393777 - DNA, 60 bp, Artificial
  Synthetic oligonucleotide
gaatgcaggacaattccggtgcacatgcaagaggctttaaacgtcaggcgaaattcgatt

SEQ ID NO: 393778 - DNA, 60 bp, Artificial
  Synthetic oligonucleotide
gaatgcaggctgcggagtattctactcttgccctgacttcgctaaatatataaaagacct

SEQ ID NO: 393779 - DNA, 60 bp, Artificial
  Synthetic oligonucleotide
gaatgcagtggtaacgcctttcttaaacgagtttcaaccatcagtcctgacacatgaagc

SEQ ID NO: 393780 - DNA, 50 bp, Artificial
  Synthetic oligonucleotide
gaatgcatatgacacatagtgtcagttttgtggttaaaattttcctaacc

SEQ ID NO: 393781 - DNA, 60 bp, Artificial
  Synthetic oligonucleotide
gaatgcatcctgtgcagcaatggatgaattccaattgattccaatgataagtaagtgcag

SEQ ID NO: 393782 - DNA, 55 bp, Artificial
  Synthetic oligonucleotide
gaatgcattaataactgtacgaattaacaatacgtttaaggatgaaccaaaggtg

SEQ ID NO: 393783 - DNA, 60 bp, Artificial
  Synthetic oligonucleotide
gaatgcattatcaggctataccataaccccttgtagtataaaatggcaggctagagtgta

SEQ ID NO: 393784 - DNA, 53 bp, Artificial
  Synthetic oligonucleotide
gaatgccaaaggacttcccgcctttccatagcagagcaagattcagagctatg

SEQ ID NO: 393785 - DNA, 55 bp, Artificial
  Synthetic oligonucleotide
gaatgccacagagacggtggaaactgcgaatatcaagaaaatatgcactcaaggg

SEQ ID NO: 393786 - DNA, 60 bp, Artificial
  Synthetic oligonucleotide
gaatgccactttatatacctcgcgttatctaatcgagaaggcgccgagaggctgtggcat

SEQ ID NO: 393787 - DNA, 60 bp, Artificial
  Synthetic oligonucleotide
gaatgccagaaacgtaaagataagagaactccaaagaagagcatatacaccatcgacgcg

SEQ ID NO: 393788 - DNA, 55 bp, Artificial
  Synthetic oligonucleotide
gaatgccaggcaatccgactgatcttactgttgtagcaacgtatgggcacgaacg

SEQ ID NO: 393789 - DNA, 60 bp, Artificial
  Synthetic oligonucleotide
gaatgccatatcagatttaacaagtagcatgtcagacgcagcttcctcaattagtagatc

SEQ ID NO: 393790 - DNA, 54 bp, Artificial
  Synthetic oligonucleotide
gaatgcccaaggtttttcggttattaaacaaagatttcattctgttgaacagta

SEQ ID NO: 393791 - DNA, 57 bp, Artificial
  Synthetic oligonucleotide
gaatgcccaggacggaccgcggggaggtggagatgccatgccgacccgaagaggaaa

SEQ ID NO: 393792 - DNA, 60 bp, Artificial
  Synthetic oligonucleotide
gaatgccccagagattcgggcatctgtcgggaggatggttggaggaatcggaagattcta

SEQ ID NO: 393793 - DNA, 60 bp, Artificial
  Synthetic oligonucleotide
gaatgccgatgacctagagagaatcatattattgctggaaacaataggggagaaggataa

SEQ ID NO: 393794 - DNA, 57 bp, Artificial
  Synthetic oligonucleotide
gaatgccgctctttggacagtaattcgttttatactatcagttgtttatcactttgc

SEQ ID NO: 393795 - DNA, 50 bp, Artificial
  Synthetic oligonucleotide
gaatgccgttatagtaggggataaggcagcttatcgcgttgagcgtaaaa

SEQ ID NO: 393796 - DNA, 51 bp, Artificial
  Synthetic oligonucleotide
gaatgcctagagaggcagaaatacctgatagatacaatcttgaaagttcag

SEQ ID NO: 393797 - DNA, 55 bp, Artificial
  Synthetic oligonucleotide
gaatgcctataaagtatgcttgagtgtgttacgctccttttgttccgaagatttc

SEQ ID NO: 393798 - DNA, 59 bp, Artificial
  Synthetic oligonucleotide
gaatgcctataattgaaatattatagatgcctaattttcctctcttgaggaaaattaga

SEQ ID NO: 393799 - DNA, 59 bp, Artificial
  Synthetic oligonucleotide
gaatgcctggacacgtttttgggaatgatgagcttatgacgaaattactcaatatttag

SEQ ID NO: 393800 - DNA, 55 bp, Artificial
  Synthetic oligonucleotide
gaatgcgaaatgtagtgtcgtaggacatataagcccagctatacaatccgctttg

SEQ ID NO: 393801 - DNA, 60 bp, Artificial
  Synthetic oligonucleotide
gaatgcgatatttgttgacgcggattcagatgttgtgattcagaatgtgattttgacgac

SEQ ID NO: 393802 - DNA, 60 bp, Artificial
  Synthetic oligonucleotide
gaatgcgcgcagtgagtccgaggaaattattgttgagagccctcctatcgtaatcgggag

SEQ ID NO: 393803 - DNA, 60 bp, Artificial
  Synthetic oligonucleotide
gaatgcggataatcctaactgcagagcagatacccacaaaccagtgggcagtctgtcgta

SEQ ID NO: 393804 - DNA, 60 bp, Artificial
  Synthetic oligonucleotide
gaatgcggctaatcccaactgcggagcacgcaccctcaaaccagagggcagcgtgtcgta

SEQ ID NO: 393805 - DNA, 60 bp, Artificial
  Synthetic oligonucleotide
gaatgcggctaatcccaactgcggagcatacactctcaagccagagggtagtgtgtcgta

SEQ ID NO: 393806 - DNA, 60 bp, Artificial
  Synthetic oligonucleotide
gaatgcggctaatcctaactgcggagcacgcaccctcaacccagagggtggcgtgtcgta

SEQ ID NO: 393807 - DNA, 60 bp, Artificial
  Synthetic oligonucleotide
gaatgcggctaatcctaactgcggagcagacacccacaaaccagtgggcagcctgtcgta

SEQ ID NO: 393808 - DNA, 60 bp, Artificial
  Synthetic oligonucleotide
gaatgcggctaatcctaactgcggagcaggtgctcacagaccagtgagtagcctgtcgta

SEQ ID NO: 393809 - DNA, 60 bp, Artificial
  Synthetic oligonucleotide
gaatgcggctaatcctaactgcggagcatgtacctccaatccaggaggtggcgtgtcgta

SEQ ID NO: 393810 - DNA, 60 bp, Artificial
  Synthetic oligonucleotide
gaatgcgtgatttctaacagtgagtctttatctactgtcacgcgttctcttcaagctccg

SEQ ID NO: 393811 - DNA, 60 bp, Artificial
  Synthetic oligonucleotide
gaatgcgtggaatgaacaagtttggatcaagtaatatcactgtgatgacaagcggatttg

SEQ ID NO: 393812 - DNA, 56 bp, Artificial
  Synthetic oligonucleotide
gaatgcgtgttaggacctgatcgattaattaatccgcctaattcgcgatcgcatgc

SEQ ID NO: 393813 - DNA, 60 bp, Artificial
  Synthetic oligonucleotide
gaatgcgttattgttgtatatggcatgtacgcatgcctctaatccagtgtatgctacgct

SEQ ID NO: 393814 - DNA, 52 bp, Artificial
  Synthetic oligonucleotide
gaatgctaaccctgtaaagaacaagtaggtaacctaaagccggtaacactaa

SEQ ID NO: 393815 - DNA, 60 bp, Artificial
  Synthetic oligonucleotide
gaatgctatgcgcactgcccacactgagggctggtacgttgtattcgatactcttactct

SEQ ID NO: 393816 - DNA, 57 bp, Artificial
  Synthetic oligonucleotide
gaatgctattcttgtcagttatgcttttgtatcagagcattcaatgtcttgtaagcc

SEQ ID NO: 393817 - DNA, 60 bp, Artificial
  Synthetic oligonucleotide
gaatgctattgacagacttgagtatcatgacgtggctaatgttgccgatcatcagggagc

SEQ ID NO: 393818 - DNA, 55 bp, Artificial
  Synthetic oligonucleotide
gaatgctcaaatttccagaatacatcgtcgagacaggcgcaatgtcaaccttgcg

SEQ ID NO: 393819 - DNA, 55 bp, Artificial
  Synthetic oligonucleotide
gaatgctcagctgaattatgaggcttcagcagttgaacaagcacgtgtgattgtc

SEQ ID NO: 393820 - DNA, 50 bp, Artificial
  Synthetic oligonucleotide
gaatgctccatcgcaccataccttacgcccattagggttgtcatcaactg

SEQ ID NO: 393821 - DNA, 55 bp, Artificial
  Synthetic oligonucleotide
gaatgctccattgtggctgaggaagaacatcacactactgaaggaaaacacctac

SEQ ID NO: 393822 - DNA, 51 bp, Artificial
  Synthetic oligonucleotide
gaatgctccggctcgcatgtcaataccctttatgagtgtgggcaacgccta

SEQ ID NO: 393823 - DNA, 52 bp, Artificial
  Synthetic oligonucleotide
gaatgctccgttttctacagctcgatagcaaccatcgtcgtcgtaagttgag

SEQ ID NO: 393824 - DNA, 59 bp, Artificial
  Synthetic oligonucleotide
gaatgctcgaagtttcagtcggttccttgagcagcttcccgacattttaggtgcgtatc

SEQ ID NO: 393825 - DNA, 60 bp, Artificial
  Synthetic oligonucleotide
gaatgctgaaattgaagatctcatctttcttgcacggtctgctctcattctgaggggatc

SEQ ID NO: 393826 - DNA, 60 bp, Artificial
  Synthetic oligonucleotide
gaatgctgatgcatatgtttcagttggatcatcaaaatacaaccggagattcacacctga

SEQ ID NO: 393827 - DNA, 56 bp, Artificial
  Synthetic oligonucleotide
gaatgctgcccctccacgtacatcagtcccagaagtttgtcaacgtgcatcgaaaa

SEQ ID NO: 393828 - DNA, 59 bp, Artificial
  Synthetic oligonucleotide
gaatgctgcttacataaggatggccttgggtaacgcgtattacgacaaaatactatcac

SEQ ID NO: 393829 - DNA, 60 bp, Artificial
  Synthetic oligonucleotide
gaatgctggagcgaggggagatgtgcagcagatatttcaaggtcgtaatgatcccatgat

SEQ ID NO: 393830 - DNA, 60 bp, Artificial
  Synthetic oligonucleotide
gaatgctggctaatcagaggaaagtcagcattttccggcccaggctaagagaaacacaat

SEQ ID NO: 393831 - DNA, 55 bp, Artificial
  Synthetic oligonucleotide
gaatgcttaccagcccatctcaaccgccaacgcccacgctagcggcagcactacc

SEQ ID NO: 393832 - DNA, 55 bp, Artificial
  Synthetic oligonucleotide
gaatgcttatcggatagctgtcggaatggcctcggaaagcttgttgggatagctg

SEQ ID NO: 393833 - DNA, 57 bp, Artificial
  Synthetic oligonucleotide
gaatgcttcaatcctatcactgggagtcctggtgcaccaggaataaaaggtttcggg

SEQ ID NO: 393834 - DNA, 55 bp, Artificial
  Synthetic oligonucleotide
gaatgcttccggaagaggttcgatatagactacaaattgagcgcgagaaaattac

SEQ ID NO: 393835 - DNA, 57 bp, Artificial
  Synthetic oligonucleotide
gaatggaaagcgtatcggagatacgtttgacgtcaatagccttattgaagcaccccg

SEQ ID NO: 393836 - DNA, 54 bp, Artificial
  Synthetic oligonucleotide
gaatggaaccctagtaggtaaccttttaattttcccacatcagttcatcaatct

SEQ ID NO: 393837 - DNA, 60 bp, Artificial
  Synthetic oligonucleotide
gaatggaactctccaactagactggtttcaacaggttgccgttgtcatgcagaagtacac

SEQ ID NO: 393838 - DNA, 57 bp, Artificial
  Synthetic oligonucleotide
gaatggaacttaagattgagccgtttgacctcagtaaaggtatcactttccttgcgc

SEQ ID NO: 393839 - DNA, 55 bp, Artificial
  Synthetic oligonucleotide
gaatggaagacacagagagagaagtgttagtgtggaagtatgacgccagcctagc

SEQ ID NO: 393840 - DNA, 55 bp, Artificial
  Synthetic oligonucleotide
gaatggaagctaagaggatataacacacaagtagatcctgaccaggcagaccaac

SEQ ID NO: 393841 - DNA, 60 bp, Artificial
  Synthetic oligonucleotide
gaatggaagtaacaacgagttatacgtacatgttatctgatgaggtgtatgtagcaaata

SEQ ID NO: 393842 - DNA, 55 bp, Artificial
  Synthetic oligonucleotide
gaatggaatagatccgagaactaacgcctcaagagtattttgggatgactgggag

SEQ ID NO: 393843 - DNA, 60 bp, Artificial
  Synthetic oligonucleotide
gaatggacccaatgtggctcataacagagtgcttgcggagaaagattactactgcttact

SEQ ID NO: 393844 - DNA, 54 bp, Artificial
  Synthetic oligonucleotide
gaatggacgacggcgtaaaatagcacattacgcccgtttcgtcgtgtttcacgt

SEQ ID NO: 393845 - DNA, 60 bp, Artificial
  Synthetic oligonucleotide
gaatggagaaatcaccacacccaaaatggtcgctgaactacatggcgccgtgtatatcaa

SEQ ID NO: 393846 - DNA, 55 bp, Artificial
  Synthetic oligonucleotide
gaatggagcaacaaagactattgttatggtttatggaggtgactctgtgggtcgg

SEQ ID NO: 393847 - DNA, 55 bp, Artificial
  Synthetic oligonucleotide
gaatggaggacccggagaaagaagtgttagtgtggagatttgacagccgcctagc

SEQ ID NO: 393848 - DNA, 55 bp, Artificial
  Synthetic oligonucleotide
gaatggaggctaagaaggtacagaacacaagtagaccctggcctggcagaccgac

SEQ ID NO: 393849 - DNA, 60 bp, Artificial
  Synthetic oligonucleotide
gaatggagggatacagtggatggacgtatcagaaggaactgtgatgaatgaggccgtgaa

SEQ ID NO: 393850 - DNA, 53 bp, Artificial
  Synthetic oligonucleotide
gaatggatcacagaatacatcgggaagacggtttggtttgtgcctagcgtcaa

SEQ ID NO: 393851 - DNA, 60 bp, Artificial
  Synthetic oligonucleotide
gaatggatcaccgagcgcatgcgggcacttgcaaccgttctgcaacgagctcatcccctc

SEQ ID NO: 393852 - DNA, 58 bp, Artificial
  Synthetic oligonucleotide
gaatggatgtgttcatagggcagcttcttccggacctggtcgcagggcggccgacctt

SEQ ID NO: 393853 - DNA, 58 bp, Artificial
  Synthetic oligonucleotide
gaatggattactactgggctgtccttaaacctggacaaactgtcaagatacagaccaa

SEQ ID NO: 393854 - DNA, 55 bp, Artificial
  Synthetic oligonucleotide
gaatggattgatggtttggtgcattgagaatggaacttcaccaaatataagtgga

SEQ ID NO: 393855 - DNA, 56 bp, Artificial
  Synthetic oligonucleotide
gaatggcaaacaaaagagttaagcgtgccaacccctatgatctgtacaggacttgc

SEQ ID NO: 393856 - DNA, 55 bp, Artificial
  Synthetic oligonucleotide
gaatggcaagctgcacgcagagagttcgtcaacgcacacgatatgactgcagagg

SEQ ID NO: 393857 - DNA, 55 bp, Artificial
  Synthetic oligonucleotide
gaatggcacaagtgatgagaggaaaactgaaacagtgtggagagcagttgaattg

SEQ ID NO: 393858 - DNA, 53 bp, Artificial
  Synthetic oligonucleotide
gaatggcacgtgggttaatggccacacagggtcagataatgacaatataactc

SEQ ID NO: 393859 - DNA, 53 bp, Artificial
  Synthetic oligonucleotide
gaatggcactgggttcaccaagacgtgcggggtccccccgtgtaacatcgggg

SEQ ID NO: 393860 - DNA, 55 bp, Artificial
  Synthetic oligonucleotide
gaatggcagtggagttactgcagacgcatgtcgtgcgcaggcaatgaagtttaca

SEQ ID NO: 393861 - DNA, 60 bp, Artificial
  Synthetic oligonucleotide
gaatggcatgctcaacgatgatttttgctgtgctggcaatacattgatgcctcctttctt

SEQ ID NO: 393862 - DNA, 55 bp, Artificial
  Synthetic oligonucleotide
gaatggccagctgtcgaccccttaccgcttttgcccagggctggggccctatccg

SEQ ID NO: 393863 - DNA, 60 bp, Artificial
  Synthetic oligonucleotide
gaatggccagctgtcgacctctcaccgactttgaccagggctggggccctatcagtcata

SEQ ID NO: 393864 - DNA, 58 bp, Artificial
  Synthetic oligonucleotide
gaatggccagctgtcggtcccttaccgactttgcccagggctggggccacatcaagta

SEQ ID NO: 393865 - DNA, 57 bp, Artificial
  Synthetic oligonucleotide
gaatggccgggtgaagaagccggcaaacacggtcatcccattcaaggagtataagga

SEQ ID NO: 393866 - DNA, 58 bp, Artificial
  Synthetic oligonucleotide
gaatggcgcgcaatgttaggaatgcgacaagggcgcggggttgtccgtgacgacctca

SEQ ID NO: 393867 - DNA, 60 bp, Artificial
  Synthetic oligonucleotide
gaatggcgctcccatcatcacgaacggtgtcccatctctcacttcaggtggtggcggaac

SEQ ID NO: 393868 - DNA, 55 bp, Artificial
  Synthetic oligonucleotide
gaatggctacttcatttcgatacggtcacggtggctcttacaaatcggcttgcgc

SEQ ID NO: 393869 - DNA, 60 bp, Artificial
  Synthetic oligonucleotide
gaatgggaaactatgaaagataaaccatatcatttagcagcatggataaattcgagcatt

SEQ ID NO: 393870 - DNA, 55 bp, Artificial
  Synthetic oligonucleotide
gaatgggaaacttgtgggtcacagtttattatggggtaccagtgtggaaagaagc

SEQ ID NO: 393871 - DNA, 57 bp, Artificial
  Synthetic oligonucleotide
gaatgggaaatctatagtaggggtgcataaagggcacgtgtacggagacgattccaa

SEQ ID NO: 393872 - DNA, 56 bp, Artificial
  Synthetic oligonucleotide
gaatgggacattgtttgtctcggaaaagcaaagaaacctggtatactggtatgaag

SEQ ID NO: 393873 - DNA, 56 bp, Artificial
  Synthetic oligonucleotide
gaatgggagagaggtgatgagattatgcgaacgcggagtgctcttaatgctgctta

SEQ ID NO: 393874 - DNA, 60 bp, Artificial
  Synthetic oligonucleotide
gaatgggagagttgtgaatcaaacaatcatggttgtacccctgtataatactgatgtgca

SEQ ID NO: 393875 - DNA, 60 bp, Artificial
  Synthetic oligonucleotide
gaatgggagcttgcatttcaccacgccattctgacacagagtgcaggtcaacacccaaca

SEQ ID NO: 393876 - DNA, 55 bp, Artificial
  Synthetic oligonucleotide
gaatgggaggacatggaccataaccaaattggaaagcatagggtcccatcacctc

SEQ ID NO: 393877 - DNA, 60 bp, Artificial
  Synthetic oligonucleotide
gaatgggagttgcactcttcacaggacaaatattgaaaggccagattatagtggatttta

SEQ ID NO: 393878 - DNA, 55 bp, Artificial
  Synthetic oligonucleotide
gaatgggatcgatcgagtgaaccagctcatagattggaggctatttgcgcagcaa

SEQ ID NO: 393879 - DNA, 60 bp, Artificial
  Synthetic oligonucleotide
gaatgggatggttacgggccattttgcgattcttaggtgccggaatggtgatgactgcga

SEQ ID NO: 393880 - DNA, 60 bp, Artificial
  Synthetic oligonucleotide
gaatgggcacccacgcgaccatgaaaattcagggtcgcactgttggtggacagatgggca

SEQ ID NO: 393881 - DNA, 60 bp, Artificial
  Synthetic oligonucleotide
gaatgggctatactaccttgcacctactctgacatgccggctttatctaccggtctctta

SEQ ID NO: 393882 - DNA, 55 bp, Artificial
  Synthetic oligonucleotide
gaatggggaaaagagatggttgaccactttcacctgggtgatgacatggatccgg

SEQ ID NO: 393883 - DNA, 52 bp, Artificial
  Synthetic oligonucleotide
gaatggggatcagtctccatagcgatagacgaggtaaatgacggagcgtata

SEQ ID NO: 393884 - DNA, 57 bp, Artificial
  Synthetic oligonucleotide
gaatgggggaaagagatggtagatcacttccacctaggtgatgacatggaccctgag

SEQ ID NO: 393885 - DNA, 50 bp, Artificial
  Synthetic oligonucleotide
gaatgggggactaccaccttaagtcagcactcaggtcgtacacagatatg

SEQ ID NO: 393886 - DNA, 57 bp, Artificial
  Synthetic oligonucleotide
gaatgggggtctcggaaccgagatcatgcacattttcttcgcccccacgcttggaat

SEQ ID NO: 393887 - DNA, 55 bp, Artificial
  Synthetic oligonucleotide
gaatggggtccccactttaatttgaaactgcccaatcacgttgtgtctcacgagt

SEQ ID NO: 393888 - DNA, 60 bp, Artificial
  Synthetic oligonucleotide
gaatgggtcctcaacggaagttccaattacagtttcagtggcacctatgtcatgctcatt

SEQ ID NO: 393889 - DNA, 55 bp, Artificial
  Synthetic oligonucleotide
gaatgggtcttgagggtagttggcatactttaagaggtctaatgttctcttctga

SEQ ID NO: 393890 - DNA, 60 bp, Artificial
  Synthetic oligonucleotide
gaatgggtgtgacttgggacaatgcactgactcactttgttggcaagccactccacaaat

SEQ ID NO: 393891 - DNA, 56 bp, Artificial
  Synthetic oligonucleotide
gaatgggttaacaggcctatgtataggaagcccagaatctaccgcacgttaaggac

SEQ ID NO: 393892 - DNA, 60 bp, Artificial
  Synthetic oligonucleotide
gaatggtacatgaaatcaatggaattgcctgatgaagttaagacggatattgaacaacag

SEQ ID NO: 393893 - DNA, 60 bp, Artificial
  Synthetic oligonucleotide
gaatggtccgatcatcctcgatatctccatgcattcaatctggcacgcttacaaaatgcg

SEQ ID NO: 393894 - DNA, 59 bp, Artificial
  Synthetic oligonucleotide
gaatggtcctacatcgttgaaagaccatcagctgtaaatggaacgtgttatcctgggaa

SEQ ID NO: 393895 - DNA, 55 bp, Artificial
  Synthetic oligonucleotide
gaatggtctagtcgaaggtgctaaactttatagtgagttggcacctcatagctac

SEQ ID NO: 393896 - DNA, 55 bp, Artificial
  Synthetic oligonucleotide
gaatggtctcttccggagctttaattggataattcggtatcgttgaggtacaacc

SEQ ID NO: 393897 - DNA, 58 bp, Artificial
  Synthetic oligonucleotide
gaatggtcttacatagtggagaaggccaatccaaccaatgacctctgttacccaggga

SEQ ID NO: 393898 - DNA, 55 bp, Artificial
  Synthetic oligonucleotide
gaatggtgatgttaagtgccttcctgaactgattaaagcatacgacatgggtaag

SEQ ID NO: 393899 - DNA, 56 bp, Artificial
  Synthetic oligonucleotide
gaatggtgctagccagcactacggctaaagccatggaacagatggcagggtcgagt

SEQ ID NO: 393900 - DNA, 55 bp, Artificial
  Synthetic oligonucleotide
gaatggtgggggtgtgagactttcagagtgatagtcgggtacctggtaaaaagaa

SEQ ID NO: 393901 - DNA, 51 bp, Artificial
  Synthetic oligonucleotide
gaatggtggtaagatgtaccaacatgttaacggccatgcgaaaggtaggga

SEQ ID NO: 393902 - DNA, 50 bp, Artificial
  Synthetic oligonucleotide
gaatggtgtcgatcaaagtgtctttagctgatttcattgttaagactgag

SEQ ID NO: 393903 - DNA, 55 bp, Artificial
  Synthetic oligonucleotide
gaatggttatggtgccatactcacacgcaggcactttgcgttcatggagggggcg

SEQ ID NO: 393904 - DNA, 55 bp, Artificial
  Synthetic oligonucleotide
gaatggttatgtaatccaatggacgtgaccttatattattatcaacagaccgacg

SEQ ID NO: 393905 - DNA, 60 bp, Artificial
  Synthetic oligonucleotide
gaatggttcagaaatgttctgagcatcgcacccataatgttttcaaacaagatggcgaga

SEQ ID NO: 393906 - DNA, 54 bp, Artificial
  Synthetic oligonucleotide
gaatggttccgtgttttacctggagttgactgatttaaggggtgacgtaatgta

SEQ ID NO: 393907 - DNA, 60 bp, Artificial
  Synthetic oligonucleotide
gaatggttctagccagcactacagctaaggctatggagcaaatggctggatcgagtgagc

SEQ ID NO: 393908 - DNA, 53 bp, Artificial
  Synthetic oligonucleotide
gaatggttctatgtcatccaagttcgccgcaagctaacgtctctggagtattg

SEQ ID NO: 393909 - DNA, 59 bp, Artificial
  Synthetic oligonucleotide
gaatggttgatcaccccagtgggtagatccaaaactggtgaggtgcaatatgtttcggc

SEQ ID NO: 393910 - DNA, 55 bp, Artificial
  Synthetic oligonucleotide
gaatggttgtgtttacatttgaacagccatttccatttgatcagaacggtaatcc

SEQ ID NO: 393911 - DNA, 55 bp, Artificial
  Synthetic oligonucleotide
gaatgtacaagttcttctctattggtgcgaatccagcgcgtgttgagttcgttcc

SEQ ID NO: 393912 - DNA, 50 bp, Artificial
  Synthetic oligonucleotide
gaatgtacctgcagtatcaggtagagggctgtttggtgctatagctggat

SEQ ID NO: 393913 - DNA, 55 bp, Artificial
  Synthetic oligonucleotide
gaatgtactagaatcgtccaacattttgtgtcgggccatccggtattcgtcactg

SEQ ID NO: 393914 - DNA, 55 bp, Artificial
  Synthetic oligonucleotide
gaatgtacttgggaatccaacgaacgacgagctcccagatcatctgacaggcgat

SEQ ID NO: 393915 - DNA, 60 bp, Artificial
  Synthetic oligonucleotide
gaatgtatagaagtcctgatgtccctaagggatgtgagggtccatgtaaagtgcaatctt

SEQ ID NO: 393916 - DNA, 57 bp, Artificial
  Synthetic oligonucleotide
gaatgtatagccctgtcagtattttggatataagacaagggccaaaggaacccttca

SEQ ID NO: 393917 - DNA, 58 bp, Artificial
  Synthetic oligonucleotide
gaatgtatgtaaaagttgtccgcattgttaactaagcacaagagacatatcgatacag

SEQ ID NO: 393918 - DNA, 60 bp, Artificial
  Synthetic oligonucleotide
gaatgtatgtagggggggttgagcacaggctcacggccgcatgcaacttcactcgtgggg

SEQ ID NO: 393919 - DNA, 59 bp, Artificial
  Synthetic oligonucleotide
gaatgtcacgacctccccggtctcaagagtagctgttaaatcgtcagccccgcgcacaa

SEQ ID NO: 393920 - DNA, 57 bp, Artificial
  Synthetic oligonucleotide
gaatgtcactccactaattgccaatcttgggacagtggcaccatctcaacagagttc

SEQ ID NO: 393921 - DNA, 60 bp, Artificial
  Synthetic oligonucleotide
gaatgtcactgtgactcatgccaaggacatccttgagaagacccataacggaaagctatg

SEQ ID NO: 393922 - DNA, 60 bp, Artificial
  Synthetic oligonucleotide
gaatgtcatgatcatactttcgtgctcaaatatcactatacttgctgtgctctcaatcgt

SEQ ID NO: 393923 - DNA, 59 bp, Artificial
  Synthetic oligonucleotide
gaatgtcatttttaccagcacctttacagcaagagtatgcacttagatatttttctaaa

SEQ ID NO: 393924 - DNA, 54 bp, Artificial
  Synthetic oligonucleotide
gaatgtccggagagagaatactattgacgtcacgtggtgtgagatcagctacgg

SEQ ID NO: 393925 - DNA, 53 bp, Artificial
  Synthetic oligonucleotide
gaatgtcctactccttttacacgtgctatgcctgatgagtataaacatgacac

SEQ ID NO: 393926 - DNA, 60 bp, Artificial
  Synthetic oligonucleotide
gaatgtccttgatgtcaattctattgacctggaagaaccaagtggacaaaccgctgactg

SEQ ID NO: 393927 - DNA, 60 bp, Artificial
  Synthetic oligonucleotide
gaatgtcgaagagcaagcagttgatccaagtctaactgatgctcttaactcactatcagt

SEQ ID NO: 393928 - DNA, 56 bp, Artificial
  Synthetic oligonucleotide
gaatgtcgctttaacttacctaattaacactccaaagctcggcgaatcacttgtaa

SEQ ID NO: 393929 - DNA, 53 bp, Artificial
  Synthetic oligonucleotide
gaatgtcgtttgtgttaccacaacgatgacacgtcgcgctgtgactttcatcg

SEQ ID NO: 393930 - DNA, 60 bp, Artificial
  Synthetic oligonucleotide
gaatgtcttgcgtactgctgcttggaaatctggaactattcatgttcaacttaatgttag

SEQ ID NO: 393931 - DNA, 60 bp, Artificial
  Synthetic oligonucleotide
gaatgtgacagtgacacactcagtggagctcctagaaaaccagaaggagaatagattctg

SEQ ID NO: 393932 - DNA, 60 bp, Artificial
  Synthetic oligonucleotide
gaatgtgacctacactggaacaagcaaagcatgttcagattcattctacaggagtatgag

SEQ ID NO: 393933 - DNA, 55 bp, Artificial
  Synthetic oligonucleotide
gaatgtgacttacagtgggacaagcaaagcatgttcgaattcattctacaggagc

SEQ ID NO: 393934 - DNA, 57 bp, Artificial
  Synthetic oligonucleotide
gaatgtgagccctctatggataggagaatgtcccaaatatgtgaaaagtgaaagttt

SEQ ID NO: 393935 - DNA, 60 bp, Artificial
  Synthetic oligonucleotide
gaatgtgatcactctaatgaacagtacattgcatacaatactagaagacccaggaatggc

SEQ ID NO: 393936 - DNA, 50 bp, Artificial
  Synthetic oligonucleotide
gaatgtgattaacaaccctaaccagatatctattgtgccgtttctgggtt

SEQ ID NO: 393937 - DNA, 54 bp, Artificial
  Synthetic oligonucleotide
gaatgtgcaaagtaccccactagcaggccctatggcggcgtgtggcctcctgat

SEQ ID NO: 393938 - DNA, 55 bp, Artificial
  Synthetic oligonucleotide
gaatgtgcacgcacaattgtctgctagtccattccatctaaacccaactcttatg

SEQ ID NO: 393939 - DNA, 60 bp, Artificial
  Synthetic oligonucleotide
gaatgtgcataaagctacggaagactgcttatcgcacagccatatgaaatcatataggta

SEQ ID NO: 393940 - DNA, 55 bp, Artificial
  Synthetic oligonucleotide
gaatgtgccagcgcctgacaaccgcgagagcctactcgaacagaggctcaccagg

SEQ ID NO: 393941 - DNA, 60 bp, Artificial
  Synthetic oligonucleotide
gaatgtgctagctcatgctgtcacgcacacatccacctatactcctacaccctactatga

SEQ ID NO: 393942 - DNA, 60 bp, Artificial
  Synthetic oligonucleotide
gaatgtgctgaggagcgacggtaagagcgggccaagtgcgagaataatggagatagggac

SEQ ID NO: 393943 - DNA, 60 bp, Artificial
  Synthetic oligonucleotide
gaatgtggaacccattgtgtgtgtggtgctagatatgaaacatctgatagaatgaagttg

SEQ ID NO: 393944 - DNA, 55 bp, Artificial
  Synthetic oligonucleotide
gaatgtggaatccaatgggaatttaatagctccttggtatgcttacaagttcact

SEQ ID NO: 393945 - DNA, 60 bp, Artificial
  Synthetic oligonucleotide
gaatgtggacatcttcactgtctcgcacactaaagtagacaacctatttggaagagcctg

SEQ ID NO: 393946 - DNA, 60 bp, Artificial
  Synthetic oligonucleotide
gaatgtggcagggagcaggacaagcaatgtatgctcctcccatcagtggaataattaatt

SEQ ID NO: 393947 - DNA, 60 bp, Artificial
  Synthetic oligonucleotide
gaatgtggccgtaatacaagttggtggtgctgacatccttgatataacatctgatcctac

SEQ ID NO: 393948 - DNA, 59 bp, Artificial
  Synthetic oligonucleotide
gaatgtggggccatccttgagaagagcgtggagggctactacacagggagggagttcag

SEQ ID NO: 393949 - DNA, 55 bp, Artificial
  Synthetic oligonucleotide
gaatgtgggttacccagtattcacacaccaagcaaaactaaactccaacccagtg

SEQ ID NO: 393950 - DNA, 56 bp, Artificial
  Synthetic oligonucleotide
gaatgtggtcaagggattctcgccacgtcgaaaggcctcaatgcgcaaatttgtcc

SEQ ID NO: 393951 - DNA, 56 bp, Artificial
  Synthetic oligonucleotide
gaatgtggttaaagtcgtgaagttttatgtttccacgacaccacttcctggtgtga

SEQ ID NO: 393952 - DNA, 60 bp, Artificial
  Synthetic oligonucleotide
gaatgtgtcgcctgtgccagggtaataggtagtcccgtgcgaaaatccgtgatggcattc

SEQ ID NO: 393953 - DNA, 59 bp, Artificial
  Synthetic oligonucleotide
gaatgtgtgagagaagttagcaaggtcctacgtctaaccataagaacggcgataggcgc

SEQ ID NO: 393954 - DNA, 57 bp, Artificial
  Synthetic oligonucleotide
gaatgtgtgcttcgaaagtatagatattctcctcaaacgggtggaataggttttcat

SEQ ID NO: 393955 - DNA, 56 bp, Artificial
  Synthetic oligonucleotide
gaatgtgtgtgatgacgaaagatggaaaacgtcaataacggaaatttttaattgtc

SEQ ID NO: 393956 - DNA, 57 bp, Artificial
  Synthetic oligonucleotide
gaatgtgttcatacaacaaccgtttaaattaaaagcatcaaggaatgagtatgtggt

SEQ ID NO: 393957 - DNA, 59 bp, Artificial
  Synthetic oligonucleotide
gaatgtgttgacactttggctttctttaaactgccaaaggagttgcagagtgtgaagcc

SEQ ID NO: 393958 - DNA, 54 bp, Artificial
  Synthetic oligonucleotide
gaatgtgttggggaacacattcttttcttcggtttctctaagagagaccaaaaa

SEQ ID NO: 393959 - DNA, 60 bp, Artificial
  Synthetic oligonucleotide
gaatgtgtttgcattaatgggacttgtactgtagtaatgactgatggaagtgcttcagga

SEQ ID NO: 393960 - DNA, 53 bp, Artificial
  Synthetic oligonucleotide
gaatgttcatgaaatcagtttgtgattcgttgaacttttcactccggagaata

SEQ ID NO: 393961 - DNA, 60 bp, Artificial
  Synthetic oligonucleotide
gaatgttcattgcagatgacccagagtgcaatgaagcatcacttgttatacattcaaata

SEQ ID NO: 393962 - DNA, 58 bp, Artificial
  Synthetic oligonucleotide
gaatgttcccctctgtaattagaccagactgaaactgattgtattctagattagcctg

SEQ ID NO: 393963 - DNA, 60 bp, Artificial
  Synthetic oligonucleotide
gaatgttcctagccatgatcacatacataaccagaaatcagcccgaatggttcagaaatg

SEQ ID NO: 393964 - DNA, 60 bp, Artificial
  Synthetic oligonucleotide
gaatgttcctgttatcctcgatacccaaatgtcagatgtgtatgcagagacaactggaag

SEQ ID NO: 393965 - DNA, 57 bp, Artificial
  Synthetic oligonucleotide
gaatgttcggcgggaaccatcctttgggagcccctgtttacatcttagatggcagaa

SEQ ID NO: 393966 - DNA, 60 bp, Artificial
  Synthetic oligonucleotide
gaatgttcttagcagaacatatgccacattcgggaggggaataagattgaaccatgatct

SEQ ID NO: 393967 - DNA, 55 bp, Artificial
  Synthetic oligonucleotide
gaatgttcttggagcacctacccagctggctttacgagacgacgatacttcgacc

SEQ ID NO: 393968 - DNA, 58 bp, Artificial
  Synthetic oligonucleotide
gaatgttgccagtcaaaacatgtgagataatcccccgaatttttgtggcggcagagaa

SEQ ID NO: 393969 - DNA, 53 bp, Artificial
  Synthetic oligonucleotide
gaatgttggaacatctggaactcatactgtgccacgaattaaagccatcacgt

SEQ ID NO: 393970 - DNA, 55 bp, Artificial
  Synthetic oligonucleotide
gaatgttgtcaacttactgaattgaccttttgtcacggatgctcactagctcatg

SEQ ID NO: 393971 - DNA, 54 bp, Artificial
  Synthetic oligonucleotide
gaatgttgttggtctcgctaatttattgaaaaacagagatggttttcaagatgt

SEQ ID NO: 393972 - DNA, 60 bp, Artificial
  Synthetic oligonucleotide
gaatgtttacggactaatgtatcgtgctcacgatttgtgaatgtactagcttctgcgtct

SEQ ID NO: 393973 - DNA, 55 bp, Artificial
  Synthetic oligonucleotide
gaatgtttcagagacaatgatgatctggattcaatgacctttactattgactggc

SEQ ID NO: 393974 - DNA, 60 bp, Artificial
  Synthetic oligonucleotide
gaatgtttcgtgtcaaacgtcgacgcaatgcgtgcgtgttagtatccatactgcgtaacg

SEQ ID NO: 393975 - DNA, 59 bp, Artificial
  Synthetic oligonucleotide
gaatgttttctctaggaagaagctggaaagatctttgaaggtaactggaatgtctgata

SEQ ID NO: 393976 - DNA, 50 bp, Artificial
  Synthetic oligonucleotide
gaatgttttgccgttccctggtactcagttgacgcgagagactgttttac

SEQ ID NO: 393977 - DNA, 53 bp, Artificial
  Synthetic oligonucleotide
gaattaaataggtaaatccggtctaacaagctcggtccatttcgtggaattaa

SEQ ID NO: 393978 - DNA, 57 bp, Artificial
  Synthetic oligonucleotide
gaattaacaatacggatggatacatcaaggaagatgcgttattttagagagttttta

SEQ ID NO: 393979 - DNA, 53 bp, Artificial
  Synthetic oligonucleotide
gaattaacccctggccggtttagaacaatagtatgtggcctgtttccaaccca

SEQ ID NO: 393980 - DNA, 57 bp, Artificial
  Synthetic oligonucleotide
gaattaacgaagtgtgcctttatacggggtagcagactgattagcgttaagcggcaa

SEQ ID NO: 393981 - DNA, 59 bp, Artificial
  Synthetic oligonucleotide
gaattaacggtggccacagaacccatcgtattctccgcgatggagacgaaggtcatcac

SEQ ID NO: 393982 - DNA, 60 bp, Artificial
  Synthetic oligonucleotide
gaattaagaatgtgggatcctctggtacatccatttcctgaaagcttacacggcttcaga

SEQ ID NO: 393983 - DNA, 50 bp, Artificial
  Synthetic oligonucleotide
gaattaagcaggaatttggcattccctacaatccccagagtcaaggagta

SEQ ID NO: 393984 - DNA, 60 bp, Artificial
  Synthetic oligonucleotide
gaattaagccagtggtatcaactcaattgctgttaaatggcagtctagcagaagacaaga

SEQ ID NO: 393985 - DNA, 55 bp, Artificial
  Synthetic oligonucleotide
gaattaaggttctgggtgacaaaattgatgtcccactcttcctacgaaacgcgtg

SEQ ID NO: 393986 - DNA, 54 bp, Artificial
  Synthetic oligonucleotide
gaattaagtttcttataatagggagtgacgaaaatgttgacgccaagggaacag

SEQ ID NO: 393987 - DNA, 60 bp, Artificial
  Synthetic oligonucleotide
gaattaatatatgcatgccgatcagctaaagaatttgccatattacaagatgacttaaca

SEQ ID NO: 393988 - DNA, 60 bp, Artificial
  Synthetic oligonucleotide
gaattaatcacggaggctaaggacggagcttgcgcgctatacgcgtgtggcagtgaggcc

SEQ ID NO: 393989 - DNA, 60 bp, Artificial
  Synthetic oligonucleotide
gaattaatgcactaatcagggtataactggagccatataattataagtacatatcatcgt

SEQ ID NO: 393990 - DNA, 55 bp, Artificial
  Synthetic oligonucleotide
gaattacaagagccagttctggctaatgccactggcagacaccaggctagcactg

SEQ ID NO: 393991 - DNA, 55 bp, Artificial
  Synthetic oligonucleotide
gaattacacgagtgcaacgattgttacgttaatgttgtcatgcaatatgacaagc

SEQ ID NO: 393992 - DNA, 56 bp, Artificial
  Synthetic oligonucleotide
gaattacactttaagcgattattacgcttcaatgtatcgttccgctcctttagaat

SEQ ID NO: 393993 - DNA, 55 bp, Artificial
  Synthetic oligonucleotide
gaattaccacttcaaatcactcgagacagatttcgaccacaaagtaaagctcagg

SEQ ID NO: 393994 - DNA, 60 bp, Artificial
  Synthetic oligonucleotide
gaattaccacttggagcgcaagtaggtactcagaaatttatgcataccatgatatcccgt

SEQ ID NO: 393995 - DNA, 60 bp, Artificial
  Synthetic oligonucleotide
gaattaccatctgcaacacagcttacacaaccacggccatcgacattgtcacaacagtct

SEQ ID NO: 393996 - DNA, 60 bp, Artificial
  Synthetic oligonucleotide
gaattacccagctttggggtgtccggaatcaatgaatcggcagacatgagcattggagtt

SEQ ID NO: 393997 - DNA, 57 bp, Artificial
  Synthetic oligonucleotide
gaattacgaacgattggacccgagtttacatgaggggagggagcatgagacatacac

SEQ ID NO: 393998 - DNA, 56 bp, Artificial
  Synthetic oligonucleotide
gaattacgattggataccaacttcaaccacaaaagtatataagcaagtaccgcaac

SEQ ID NO: 393999 - DNA, 55 bp, Artificial
  Synthetic oligonucleotide
gaattacgcaaggagttatatacctcaaatggggaaattgctcggtcccctgtac

SEQ ID NO: 394000 - DNA, 58 bp, Artificial
  Synthetic oligonucleotide
gaattacggacggtggaattagaatggaaacagataatatggcttctacgcctgatat

SEQ ID NO: 394001 - DNA, 58 bp, Artificial
  Synthetic oligonucleotide
gaattacggagtccgcaattacaaggtggaaagatggttgaacaggcatacaatacgc

SEQ ID NO: 394002 - DNA, 56 bp, Artificial
  Synthetic oligonucleotide
gaattactaacgaacggttctgcgcaagtctaatccgctccggaaattgttgacta

SEQ ID NO: 394003 - DNA, 60 bp, Artificial
  Synthetic oligonucleotide
gaattactataacatagatttatactgtaatcatatgggcatttcaagacgatcacattc

SEQ ID NO: 394004 - DNA, 55 bp, Artificial
  Synthetic oligonucleotide
gaattactccccacgcgcacgcatcggcccaacaacgaacagggccacggaatgg

SEQ ID NO: 394005 - DNA, 55 bp, Artificial
  Synthetic oligonucleotide
gaattacttatccttatttcaaactttccagatacactactcaattccaaaatac

SEQ ID NO: 394006 - DNA, 51 bp, Artificial
  Synthetic oligonucleotide
gaattagaaccaccctgtaagtttatggtcgacacccctaaaggtccggct

SEQ ID NO: 394007 - DNA, 55 bp, Artificial
  Synthetic oligonucleotide
gaattagccctaggtgtaactatcaagcaggacacaaccaggtaggatccctaca

SEQ ID NO: 394008 - DNA, 60 bp, Artificial
  Synthetic oligonucleotide
gaattagccgatcttatactgaacgaatggctgtgcaatcccatggacataacgttgtat

SEQ ID NO: 394009 - DNA, 60 bp, Artificial
  Synthetic oligonucleotide
gaattaggcaacggatgctttgaattctaccacaagtgtgacaatgaatgcatggaaagt

SEQ ID NO: 394010 - DNA, 52 bp, Artificial
  Synthetic oligonucleotide
gaattaggcctttgtggcctaaggacgaatggtttagggacgcccaacaagg

SEQ ID NO: 394011 - DNA, 59 bp, Artificial
  Synthetic oligonucleotide
gaattagggagcttatcagcatcccttattgcaattacacaaagttttggtatgtcaac

SEQ ID NO: 394012 - DNA, 56 bp, Artificial
  Synthetic oligonucleotide
gaattagggctggcaattatacatttattcctactccgaaaattatatgtgcatat

SEQ ID NO: 394013 - DNA, 54 bp, Artificial
  Synthetic oligonucleotide
gaattagggttccgtggcatttttgtaaatatagcccaggacaccagggggagc

SEQ ID NO: 394014 - DNA, 55 bp, Artificial
  Synthetic oligonucleotide
gaattaggtatcaatataatgtattacctcaaggatggaaggggtctccagcaat

SEQ ID NO: 394015 - DNA, 55 bp, Artificial
  Synthetic oligonucleotide
gaattaggtgaatcagtactacgtggatcaagcactgactatctagacacgggga

SEQ ID NO: 394016 - DNA, 55 bp, Artificial
  Synthetic oligonucleotide
gaattagtcattggtaattcaatgccaacctccactgggtgggttaaggttgagg

SEQ ID NO: 394017 - DNA, 55 bp, Artificial
  Synthetic oligonucleotide
gaattatatgaaggctgttaagatgtggaagccttactatgacaagtcgatgaac

SEQ ID NO: 394018 - DNA, 60 bp, Artificial
  Synthetic oligonucleotide
gaattatatggcagaattggtatgcattcacatcttctattagacacgggactactcttg

SEQ ID NO: 394019 - DNA, 55 bp, Artificial
  Synthetic oligonucleotide
gaattatattgtcacagcaggccatgttgtcaccggtagtgaatgggcaacagct

SEQ ID NO: 394020 - DNA, 56 bp, Artificial
  Synthetic oligonucleotide
gaattatcaggttcggttgacttaactcgtatcagcaaggctgtagcaaaaaggtt

SEQ ID NO: 394021 - DNA, 60 bp, Artificial
  Synthetic oligonucleotide
gaattatcagtcttcgaacgacattgctcaagctctacaattgaaggggaaatacgatat

SEQ ID NO: 394022 - DNA, 56 bp, Artificial
  Synthetic oligonucleotide
gaattatgaaactccaatgtttaataaagtggcggtgttaatttgtgaagcgttga

SEQ ID NO: 394023 - DNA, 60 bp, Artificial
  Synthetic oligonucleotide
gaattatgatgtcggatgctcaggttcacaattgtactacaaagtgccaaactcctcatg

SEQ ID NO: 394024 - DNA, 53 bp, Artificial
  Synthetic oligonucleotide
gaattattactcagagggtgggtcagttaatccgttgtgggtgggtttagttc

SEQ ID NO: 394025 - DNA, 50 bp, Artificial
  Synthetic oligonucleotide
gaattattactcagagggtgggttagttaacccgttgtgggtgggtttag

SEQ ID NO: 394026 - DNA, 53 bp, Artificial
  Synthetic oligonucleotide
gaattattggcgaaagtgtacgatgggaggagctttggtcatttccttaagtc

SEQ ID NO: 394027 - DNA, 53 bp, Artificial
  Synthetic oligonucleotide
gaattatttgggtttatggcccaaatggaggagaaggaaaaaccacttatgcc

SEQ ID NO: 394028 - DNA, 57 bp, Artificial
  Synthetic oligonucleotide
gaattcaaactaagaaggaagtctctattaagactacacttaaagagctggtacata

SEQ ID NO: 394029 - DNA, 60 bp, Artificial
  Synthetic oligonucleotide
gaattcaacaaggcatgtgaattgaccgattcgagctggatagaacttgatgaaatagga

SEQ ID NO: 394030 - DNA, 58 bp, Artificial
  Synthetic oligonucleotide
gaattcaatagcgaataaagctttaatacagacagttctcggaaaacttatgacagat

SEQ ID NO: 394031 - DNA, 57 bp, Artificial
  Synthetic oligonucleotide
gaattcaattaaggttactcaatctgatgttgcaaacgtcctttcaagagtagtttc

SEQ ID NO: 394032 - DNA, 60 bp, Artificial
  Synthetic oligonucleotide
gaattcaattatcgctgttgaaataggcataaagtataggcataggcataaattgacgtc

SEQ ID NO: 394033 - DNA, 60 bp, Artificial
  Synthetic oligonucleotide
gaattcactagagaaacagctgcaaaggtagcaaatcaaattgccatctccacctcaccc

SEQ ID NO: 394034 - DNA, 50 bp, Artificial
  Synthetic oligonucleotide
gaattcactgaggtcgaaaagcaaattggtaatgtgataaactggaccag

SEQ ID NO: 394035 - DNA, 60 bp, Artificial
  Synthetic oligonucleotide
gaattcatgatcgacatgctggtgttaaggataccttttaaaagctctcttgtgtcggag

SEQ ID NO: 394036 - DNA, 59 bp, Artificial
  Synthetic oligonucleotide
gaattcattgccgaggaattccaatggagcactgtgaagcagaacgggaaatccggggc

SEQ ID NO: 394037 - DNA, 54 bp, Artificial
  Synthetic oligonucleotide
gaattcattggtccacgtcacttccttgacgctttcctgggcggggaaaagggc

SEQ ID NO: 394038 - DNA, 58 bp, Artificial
  Synthetic oligonucleotide
gaattccagttgggctttccagaccacatggtacttggaaattgccatagataatccc

SEQ ID NO: 394039 - DNA, 60 bp, Artificial
  Synthetic oligonucleotide
gaattcccctgtgcgtgaatccatgatctctgcagtttatgtctacgtaagctgtgcaat

SEQ ID NO: 394040 - DNA, 58 bp, Artificial
  Synthetic oligonucleotide
gaattccgacagacactccacgggttcaggacagtagtttcactggttcctgcactaa

SEQ ID NO: 394041 - DNA, 55 bp, Artificial
  Synthetic oligonucleotide
gaattccgtcatatacttaactcatccttatcgtacgctgaacgttcaataacgg

SEQ ID NO: 394042 - DNA, 58 bp, Artificial
  Synthetic oligonucleotide
gaattcctacccatagacatattgtcggtgagggctgtcccaaaccacataggctaaa

SEQ ID NO: 394043 - DNA, 59 bp, Artificial
  Synthetic oligonucleotide
gaattcctcaacaacacggaacctctctgtgatgtatcgggatttgccattgtttccaa

SEQ ID NO: 394044 - DNA, 56 bp, Artificial
  Synthetic oligonucleotide
gaattcctggttgggaaggaccataagcaaagactcaaggtcgggatacgaaatgc

SEQ ID NO: 394045 - DNA, 58 bp, Artificial
  Synthetic oligonucleotide
gaattcctgtttgctcacttcatgagctttgttgaccgattgaagtttttggaccgaa

SEQ ID NO: 394046 - DNA, 60 bp, Artificial
  Synthetic oligonucleotide
gaattccttgaaatgttttacatagtgaggatcaacatcgtctattatgttataccaggc

SEQ ID NO: 394047 - DNA, 59 bp, Artificial
  Synthetic oligonucleotide
gaattcgaagtactgcaactgcaatgtttttctatagaaaggcgttagcaaatataggc

SEQ ID NO: 394048 - DNA, 55 bp, Artificial
  Synthetic oligonucleotide
gaattcgagccatttcagtctctagtccctaaggccattagaggccaatacagtg

SEQ ID NO: 394049 - DNA, 58 bp, Artificial
  Synthetic oligonucleotide
gaattcgctacaacctggcacaaagacccagagcatccataccgaacttggacctatc

SEQ ID NO: 394050 - DNA, 60 bp, Artificial
  Synthetic oligonucleotide
gaattcggaaaccaaagcatctttatatctctatgccaacagcacaatccaccatgaaag

SEQ ID NO: 394051 - DNA, 53 bp, Artificial
  Synthetic oligonucleotide
gaattcggcggggtcgatccagcgtcgtgagcggtctttcatgggcaataaaa

SEQ ID NO: 394052 - DNA, 56 bp, Artificial
  Synthetic oligonucleotide
gaattcgggaatcaccaacttgggaaccggtatatcgggtaggatgtcactccaca

SEQ ID NO: 394053 - DNA, 60 bp, Artificial
  Synthetic oligonucleotide
gaattcgtaatgctcacatcaggccgtggtggctgatgctgtttgtatcagccgcccaaa

SEQ ID NO: 394054 - DNA, 60 bp, Artificial
  Synthetic oligonucleotide
gaattcgtacgcgccaatatcacttgagaagaggcgtgcgcaaatatcagctttattgac

SEQ ID NO: 394055 - DNA, 60 bp, Artificial
  Synthetic oligonucleotide
gaattcgttggctgtgttgtatgccaagaacattgtggtgaagcgttgggtaggacctga

SEQ ID NO: 394056 - DNA, 58 bp, Artificial
  Synthetic oligonucleotide
gaattctacaatgtgatccgatatgcagtccgccaatgttacccaccggacccgggta

SEQ ID NO: 394057 - DNA, 60 bp, Artificial
  Synthetic oligonucleotide
gaattctactcacagtcaaatcaattactgtcttatggtgatgttacacgttttctatct

SEQ ID NO: 394058 - DNA, 57 bp, Artificial
  Synthetic oligonucleotide
gaattctattacgatgttgtcttctgttagtccgtctagtcttcctattaatgtgta

SEQ ID NO: 394059 - DNA, 54 bp, Artificial
  Synthetic oligonucleotide
gaattctattctgaccattttgaagaccaggtacaagttgaaatggcaccaatc

SEQ ID NO: 394060 - DNA, 55 bp, Artificial
  Synthetic oligonucleotide
gaattctcacggctcaaccatcgaaacggtgaagtaatcattacagcgggttctc

SEQ ID NO: 394061 - DNA, 55 bp, Artificial
  Synthetic oligonucleotide
gaattctcgtctgaatcaccggtaaccagtttgaaacaactaggtcgtggtctag

SEQ ID NO: 394062 - DNA, 60 bp, Artificial
  Synthetic oligonucleotide
gaattctctaagagtgaattagagaaatgcgttcgtccatttgtcgaaagatcgatcaaa

SEQ ID NO: 394063 - DNA, 56 bp, Artificial
  Synthetic oligonucleotide
gaattctctgccgtcgaaaaattgtccacgagacgtacagtctaagtaaatacgtg

SEQ ID NO: 394064 - DNA, 56 bp, Artificial
  Synthetic oligonucleotide
gaattctctgtaacgagaccaccctaatagtgacctactatggtttttggattcac

SEQ ID NO: 394065 - DNA, 50 bp, Artificial
  Synthetic oligonucleotide
gaattctgaaacgtatcggctgatcaaccgagtcatcaacgcacatgatg

SEQ ID NO: 394066 - DNA, 51 bp, Artificial
  Synthetic oligonucleotide
gaattctgaaagcctattggtcctccgtaaagcgggcaccgtattaatatt

SEQ ID NO: 394067 - DNA, 50 bp, Artificial
  Synthetic oligonucleotide
gaattctgcactgagtgacatccacaccatggcgcttcaaggcaccaaac

SEQ ID NO: 394068 - DNA, 60 bp, Artificial
  Synthetic oligonucleotide
gaattctgctgtcaagtcatgaatcttgaggacacatggttacaaaggcggctggtcacg

SEQ ID NO: 394069 - DNA, 55 bp, Artificial
  Synthetic oligonucleotide
gaattctgttcacacattttcagaaatccgaccctcgccgttccggttaatacca

SEQ ID NO: 394070 - DNA, 60 bp, Artificial
  Synthetic oligonucleotide
gaattcttagcatttacagtacagtggcggccagtctttgcttggcaatcctgattgctg

SEQ ID NO: 394071 - DNA, 52 bp, Artificial
  Synthetic oligonucleotide
gaattcttagtagggacctgacactcgcagtcccctctggtaatgtttgttc

SEQ ID NO: 394072 - DNA, 60 bp, Artificial
  Synthetic oligonucleotide
gaattcttcacgtacataaggttcgatttagagctcacatttgtcattacgagtacacag

SEQ ID NO: 394073 - DNA, 58 bp, Artificial
  Synthetic oligonucleotide
gaattcttctactgtaattcagcagaattgtttaatagtacttggaatggtactgaag

SEQ ID NO: 394074 - DNA, 59 bp, Artificial
  Synthetic oligonucleotide
gaattcttgcaattaggatagccattaaggtataccaatgtgttaaattcacaaatcaa

SEQ ID NO: 394075 - DNA, 58 bp, Artificial
  Synthetic oligonucleotide
gaattgaaaggtacgtccgtctatgaccacctcactccactgcgggactgggcccaca

SEQ ID NO: 394076 - DNA, 55 bp, Artificial
  Synthetic oligonucleotide
gaattgaacagtcacgtttgcatggtgtgtatgcgcgcctttatgtcgcctgaac

SEQ ID NO: 394077 - DNA, 57 bp, Artificial
  Synthetic oligonucleotide
gaattgaacagttaattctacaatgtaagttgtgagaacgctattgaggatgtgacc

SEQ ID NO: 394078 - DNA, 59 bp, Artificial
  Synthetic oligonucleotide
gaattgaacgtctgttcgcgctacaaatacgcttgctgcccctgtcacttgacaaattt

SEQ ID NO: 394079 - DNA, 60 bp, Artificial
  Synthetic oligonucleotide
gaattgaagaatggctcggtgcaccctgcaaattcatggcggagtctcttattgccggga

SEQ ID NO: 394080 - DNA, 58 bp, Artificial
  Synthetic oligonucleotide
gaattgaagattgaatgtcctcatactgtaggtttaggtcaaggccttgtaataggga

SEQ ID NO: 394081 - DNA, 60 bp, Artificial
  Synthetic oligonucleotide
gaattgaatcgcaacaaatggatgtgctatgatcctccaaaatctgtgtctgatcgcaac

SEQ ID NO: 394082 - DNA, 55 bp, Artificial
  Synthetic oligonucleotide
gaattgaatcggcgtccctcaactttctctatgtaattggcgtctggcgtcccat

SEQ ID NO: 394083 - DNA, 59 bp, Artificial
  Synthetic oligonucleotide
gaattgacctgaagaaatatgatactactgaagcccttgggaaagtttgctctgttctc

SEQ ID NO: 394084 - DNA, 58 bp, Artificial
  Synthetic oligonucleotide
gaattgactactattggtcagtattaaaaccaggtcaaacgttgcgagtgagatccaa

SEQ ID NO: 394085 - DNA, 60 bp, Artificial
  Synthetic oligonucleotide
gaattgagaaagcatcgaaagctgtgaccagcgttgccgataaggctaatgacaccctcg

SEQ ID NO: 394086 - DNA, 55 bp, Artificial
  Synthetic oligonucleotide
gaattgagatcattgtgcgcagacgatcattatcttacatcgaaagaaagatcgg

SEQ ID NO: 394087 - DNA, 60 bp, Artificial
  Synthetic oligonucleotide
gaattgagcaatcttgcgaaaggggagaaggctaatgtgttgatagggcaaggagacgta

SEQ ID NO: 394088 - DNA, 53 bp, Artificial
  Synthetic oligonucleotide
gaattgaggagggctgtgcaatgttggtcggtcataccggcgcacattgtgga

SEQ ID NO: 394089 - DNA, 59 bp, Artificial
  Synthetic oligonucleotide
gaattgagtcgtgagtgtcgtaacatgagtcaatgatactagtcctgcctgttacaggg

SEQ ID NO: 394090 - DNA, 60 bp, Artificial
  Synthetic oligonucleotide
gaattgatcccacctacttcctggggggaagtacttgacggtgcgacatctgcttgcaga

SEQ ID NO: 394091 - DNA, 60 bp, Artificial
  Synthetic oligonucleotide
gaattgatctctcgcatctacgaaccccaaagatagagccgacaatggtcgcgaccactc

SEQ ID NO: 394092 - DNA, 60 bp, Artificial
  Synthetic oligonucleotide
gaattgatggagcgattagctccgtatgcagaaggagcgtgaggctctaggttccgagag

SEQ ID NO: 394093 - DNA, 55 bp, Artificial
  Synthetic oligonucleotide
gaattgatttaacgcacctacgtacaccaaggattgagccaagcgtagtatccac

SEQ ID NO: 394094 - DNA, 53 bp, Artificial
  Synthetic oligonucleotide
gaattgcaaacctttgcagattctggacatgttcacacaatagttgatgattt

SEQ ID NO: 394095 - DNA, 56 bp, Artificial
  Synthetic oligonucleotide
gaattgcaacacaacatggttacccataaattgaggaaatttccaataaactcgat

SEQ ID NO: 394096 - DNA, 55 bp, Artificial
  Synthetic oligonucleotide
gaattgcacagcttcgttctaatattgttgtatcaactaaaatcgcggctgaaag

SEQ ID NO: 394097 - DNA, 60 bp, Artificial
  Synthetic oligonucleotide
gaattgcagtctaaaacagatcatggtacttgattcaagagcggcagaaattttgggaag

SEQ ID NO: 394098 - DNA, 60 bp, Artificial
  Synthetic oligonucleotide
gaattgcatccagagcgttacttcgacgacaagccgttctggagagatccggacgaggag

SEQ ID NO: 394099 - DNA, 57 bp, Artificial
  Synthetic oligonucleotide
gaattgccaatttaggtttgaacatcggactccattataaggtaggctatacaccag

SEQ ID NO: 394100 - DNA, 60 bp, Artificial
  Synthetic oligonucleotide
gaattgcccagcttcggagtgtctggaatcaatgaatcggctgacatgagcattggggtt

SEQ ID NO: 394101 - DNA, 55 bp, Artificial
  Synthetic oligonucleotide
gaattgcctaacggagacacgcgagtcatgcagcctggcgagtcgtattgcttgg

SEQ ID NO: 394102 - DNA, 55 bp, Artificial
  Synthetic oligonucleotide
gaattgcggtatattcaataccatacttcattttgagctaaccgctagccagacg

SEQ ID NO: 394103 - DNA, 55 bp, Artificial
  Synthetic oligonucleotide
gaattgctcagcatgacgggcgtgtttggagctattttcgggcgacttagccttc

SEQ ID NO: 394104 - DNA, 50 bp, Artificial
  Synthetic oligonucleotide
gaattgctctccctttcactaattctcacatcatcagagagcttacccat

SEQ ID NO: 394105 - DNA, 55 bp, Artificial
  Synthetic oligonucleotide
gaattgctgcaagagatccgcaaattttatttgtggctcctaaacaaggatgagt

SEQ ID NO: 394106 - DNA, 60 bp, Artificial
  Synthetic oligonucleotide
gaattggaatactctcaggagatcacctgggatgatgacacggagtttgtcggactgcag

SEQ ID NO: 394107 - DNA, 52 bp, Artificial
  Synthetic oligonucleotide
gaattggactagacacatggctgcaaatgatatccagattggggctctaaat

SEQ ID NO: 394108 - DNA, 56 bp, Artificial
  Synthetic oligonucleotide
gaattggactgatttgatcactaactattcaccatctagagaagataacttgcagc

SEQ ID NO: 394109 - DNA, 60 bp, Artificial
  Synthetic oligonucleotide
gaattggatgagggcatgcaagtgaggttccccattctgatgcagctctcgacagatttt

SEQ ID NO: 394110 - DNA, 60 bp, Artificial
  Synthetic oligonucleotide
gaattggattatttcagggtgaagtaccttgaatcatctgtcaattcagagcatatcttc

SEQ ID NO: 394111 - DNA, 60 bp, Artificial
  Synthetic oligonucleotide
gaattggcaacagcagggatagggatgtcagataaaaatctgttaaagcgtgcacttata

SEQ ID NO: 394112 - DNA, 54 bp, Artificial
  Synthetic oligonucleotide
gaattggcaatttacctattagaaattggacatttgactttggtttactaggta

SEQ ID NO: 394113 - DNA, 53 bp, Artificial
  Synthetic oligonucleotide
gaattggcgggaactaaaggggcggagaaatctctaaaacgcccactgggtga

SEQ ID NO: 394114 - DNA, 56 bp, Artificial
  Synthetic oligonucleotide
gaattggcgtaccttaacttagactactacaagtgggtagacacatcgcagttaaa

SEQ ID NO: 394115 - DNA, 54 bp, Artificial
  Synthetic oligonucleotide
gaattggctaaaagaaaaagtgtttccatctaaaactgaccccactctacagtg

SEQ ID NO: 394116 - DNA, 55 bp, Artificial
  Synthetic oligonucleotide
gaattggcttcccgtactttgtgttgctttgccagtccctctgggccccaaagaa

SEQ ID NO: 394117 - DNA, 56 bp, Artificial
  Synthetic oligonucleotide
gaattgggattctaagtctagtcaacagagtattcacggttattctacttctgaag

SEQ ID NO: 394118 - DNA, 58 bp, Artificial
  Synthetic oligonucleotide
gaattgggcaatacagattatgataagccacccaataataagtacgatttcaaaaaca

SEQ ID NO: 394119 - DNA, 56 bp, Artificial
  Synthetic oligonucleotide
gaattgggcaatactgattatgacaaaccgcccaataattcttacgactttaaaga

SEQ ID NO: 394120 - DNA, 60 bp, Artificial
  Synthetic oligonucleotide
gaattggggaatgggtctcaatatatagtagagtccattatagaatctatttgccacgtg

SEQ ID NO: 394121 - DNA, 59 bp, Artificial
  Synthetic oligonucleotide
gaattgggtgccaacatagcagaataggcattagtctacgaagaagactaagaggaagg

SEQ ID NO: 394122 - DNA, 55 bp, Artificial
  Synthetic oligonucleotide
gaattggtacaaagagacacaaggctgaaggactctacgttccactggcacctcc

SEQ ID NO: 394123 - DNA, 59 bp, Artificial
  Synthetic oligonucleotide
gaattggtattcaaatttggtatacctaggctagtagcaaaacagatagtagacacatg

SEQ ID NO: 394124 - DNA, 60 bp, Artificial
  Synthetic oligonucleotide
gaattggtcaggatacagcggagctttcaccatcccaatcacaatgactagtaaacaatg

SEQ ID NO: 394125 - DNA, 58 bp, Artificial
  Synthetic oligonucleotide
gaattggtccgcaaaacgaggttcctcccagtggctggtggaacgagcagtgtctata

SEQ ID NO: 394126 - DNA, 55 bp, Artificial
  Synthetic oligonucleotide
gaattggtgcattcagcgcacaagaaactgacttttgactctgacacagcatggg

SEQ ID NO: 394127 - DNA, 56 bp, Artificial
  Synthetic oligonucleotide
gaattggtgcgtacgtttaaaagtgatagtacatgttgcaatgattggatatgtgc

SEQ ID NO: 394128 - DNA, 60 bp, Artificial
  Synthetic oligonucleotide
gaattggttaggagattgaacgccgtcctcctacccaatgtgcatacactatttgacatg

SEQ ID NO: 394129 - DNA, 57 bp, Artificial
  Synthetic oligonucleotide
gaattggttccggaaatatattggagattgcaccatctatgccgccagggtttttct

SEQ ID NO: 394130 - DNA, 60 bp, Artificial
  Synthetic oligonucleotide
gaattggttcgcaagacgagattcctaccagtagcaggcggaacaagcagtgtgtacatc

SEQ ID NO: 394131 - DNA, 55 bp, Artificial
  Synthetic oligonucleotide
gaattggtttaacgtttaaggtcaattcggtcaatacctaatgatatctgtcatt

SEQ ID NO: 394132 - DNA, 60 bp, Artificial
  Synthetic oligonucleotide
gaattgtaatttgataggcatctcgttgttcgtcagcctgtattcgcaactctttgtttc

SEQ ID NO: 394133 - DNA, 60 bp, Artificial
  Synthetic oligonucleotide
gaattgtaggataatctcggttaggtcatgggaaagctgatattcatcccggtgagactc

SEQ ID NO: 394134 - DNA, 60 bp, Artificial
  Synthetic oligonucleotide
gaattgtatagacaagaaagaggaattgagtctgttctcaccgcgctcacagagtacctt

SEQ ID NO: 394135 - DNA, 55 bp, Artificial
  Synthetic oligonucleotide
gaattgtcatactcaatacgcacaccggataagggtgtgttctcagtatcttatc

SEQ ID NO: 394136 - DNA, 60 bp, Artificial
  Synthetic oligonucleotide
gaattgtctctatcctagagtgggacaggagcaaagagcttatgcatcgcactgaggcga

SEQ ID NO: 394137 - DNA, 60 bp, Artificial
  Synthetic oligonucleotide
gaattgtctgattcaacattagttcaaccgacgttagacggcccatatcagccaaccaca

SEQ ID NO: 394138 - DNA, 60 bp, Artificial
  Synthetic oligonucleotide
gaattgtgagatagtgtcggactatattccggccggtcaagactggagcagagatatgga

SEQ ID NO: 394139 - DNA, 55 bp, Artificial
  Synthetic oligonucleotide
gaattgtggccatccttgagtgggacaaatctaagcttccagaacatcgattgga

SEQ ID NO: 394140 - DNA, 55 bp, Artificial
  Synthetic oligonucleotide
gaattgtgggtcttttgggattcgctgctcctttcacacaatgtggttatcctgc

SEQ ID NO: 394141 - DNA, 56 bp, Artificial
  Synthetic oligonucleotide
gaattgtgtgctgtttttagggccgaccctggtaggaatggaccgtggcagtcgac

SEQ ID NO: 394142 - DNA, 60 bp, Artificial
  Synthetic oligonucleotide
gaattgttatattcgatagtctgcacagacataagacccgaagccgtagttggcgagtta

SEQ ID NO: 394143 - DNA, 50 bp, Artificial
  Synthetic oligonucleotide
gaattgttgggaacctgtgtataacaccggtttaccgtcaactcgttata

SEQ ID NO: 394144 - DNA, 50 bp, Artificial
  Synthetic oligonucleotide
gaattgtttgcacaacaagaggctttggccgtccaagagcacattcgcgc

SEQ ID NO: 394145 - DNA, 55 bp, Artificial
  Synthetic oligonucleotide
gaatttaaacgataactatggaataactaaacaacaggcatataatttattacga

SEQ ID NO: 394146 - DNA, 52 bp, Artificial
  Synthetic oligonucleotide
gaatttaaattcgaaatctcgcaactcgcaaagaatcgtgcgttccggtctt

SEQ ID NO: 394147 - DNA, 55 bp, Artificial
  Synthetic oligonucleotide
gaatttaatatgccacaagatggtaaatcggctgctactaacgtagtttctgtag

SEQ ID NO: 394148 - DNA, 60 bp, Artificial
  Synthetic oligonucleotide
gaatttacactgcatctgaggagcaccagtcccaatgtggtagtggcagaaactagcata

SEQ ID NO: 394149 - DNA, 59 bp, Artificial
  Synthetic oligonucleotide
gaatttacagctgagtgatagatccgaattgtatcggtggttagataaggttcagtttc

SEQ ID NO: 394150 - DNA, 60 bp, Artificial
  Synthetic oligonucleotide
gaatttacatatcgccccccgccaggattgcttctgtgacaataacttcacgcattacaa

SEQ ID NO: 394151 - DNA, 60 bp, Artificial
  Synthetic oligonucleotide
gaatttacccctcattcatgtctcgtgtcatctataaacattatcgtagtcttatatcag

SEQ ID NO: 394152 - DNA, 55 bp, Artificial
  Synthetic oligonucleotide
gaatttagcataggttctcgtgaatatatggtgagacgaggtatcaaaccctcgt

SEQ ID NO: 394153 - DNA, 55 bp, Artificial
  Synthetic oligonucleotide
gaatttagggcgtggccaacgctgattggccgttgcaacgaccgttagtgacgtc

SEQ ID NO: 394154 - DNA, 55 bp, Artificial
  Synthetic oligonucleotide
gaatttagtagtacagacccaagagtggactcgggaaagtggccaaaatatactg

SEQ ID NO: 394155 - DNA, 58 bp, Artificial
  Synthetic oligonucleotide
gaatttattaggttgtcctgtttacatatctaaatggtggtgtgaatttcatagatat

SEQ ID NO: 394156 - DNA, 51 bp, Artificial
  Synthetic oligonucleotide
gaatttattctgatgtgagtcctttcaggaaggcctctgaccttatgattc

SEQ ID NO: 394157 - DNA, 56 bp, Artificial
  Synthetic oligonucleotide
gaatttcaaattgacggcacaaaatggcgcgaccttctgaaaaaagccgataacga

SEQ ID NO: 394158 - DNA, 54 bp, Artificial
  Synthetic oligonucleotide
gaatttcaccggaaatggttattttgtcgccataatagctaatataaaattggg

SEQ ID NO: 394159 - DNA, 55 bp, Artificial
  Synthetic oligonucleotide
gaatttcatgagagtgatgtatcacgtggtgaactttggcgtgaattacggagac

SEQ ID NO: 394160 - DNA, 60 bp, Artificial
  Synthetic oligonucleotide
gaatttcatggtccatctcggattgatcaaaagaaaagtaggcagaatgtactctgttga

SEQ ID NO: 394161 - DNA, 54 bp, Artificial
  Synthetic oligonucleotide
gaatttcccgcgcgtgaaaagtattataaatctcgcgggaagtggtgggacggc

SEQ ID NO: 394162 - DNA, 50 bp, Artificial
  Synthetic oligonucleotide
gaatttcctaaacaaggaatgcatatggactgttaacccaatgtcagggg

SEQ ID NO: 394163 - DNA, 60 bp, Artificial
  Synthetic oligonucleotide
gaatttcctctacgagatgcctgtcattctctcctatggaggaatgaacacacctgaggc

SEQ ID NO: 394164 - DNA, 52 bp, Artificial
  Synthetic oligonucleotide
gaatttcctggcttcaggctttgtcatcccaacatcaatcagcttgatgtcc

SEQ ID NO: 394165 - DNA, 56 bp, Artificial
  Synthetic oligonucleotide
gaatttctacgaaaaaatgtcgacgtgaaaatgcgcgacttaaacttatacgatca

SEQ ID NO: 394166 - DNA, 60 bp, Artificial
  Synthetic oligonucleotide
gaatttctcccagcccaaattcctatgggcaatcttgatcaatctgaactatctgattta

SEQ ID NO: 394167 - DNA, 57 bp, Artificial
  Synthetic oligonucleotide
gaatttgacaaaggtgaacaacggtgattatgcaagactttacatatggggggttca

SEQ ID NO: 394168 - DNA, 53 bp, Artificial
  Synthetic oligonucleotide
gaatttgacaaggcaagcgaaatcatcttagaactcgcaagatggttcaaaaa

SEQ ID NO: 394169 - DNA, 55 bp, Artificial
  Synthetic oligonucleotide
gaatttgatcgttctgtctatgatgatatctatggatacactcggcgccctacag

SEQ ID NO: 394170 - DNA, 52 bp, Artificial
  Synthetic oligonucleotide
gaatttgcattgtactgctgtttgtgatctaattttggtcattttgctttag

SEQ ID NO: 394171 - DNA, 57 bp, Artificial
  Synthetic oligonucleotide
gaatttgcgagaaatatacgcggtgattttacaacgaaatctaactatactgctttg

SEQ ID NO: 394172 - DNA, 54 bp, Artificial
  Synthetic oligonucleotide
gaatttggaaaagagccatggtcattggttgacaccagtacagagacttataaa

SEQ ID NO: 394173 - DNA, 55 bp, Artificial
  Synthetic oligonucleotide
gaatttggataactacaatttgcctggacctagcaatgtgcagcagacggaggcc

SEQ ID NO: 394174 - DNA, 55 bp, Artificial
  Synthetic oligonucleotide
gaatttggatctagtgaaccaagtcatgagtcaggaagaggatactccgactaac

SEQ ID NO: 394175 - DNA, 60 bp, Artificial
  Synthetic oligonucleotide
gaatttggatgacgttgtagccgatgtagactccagcgatattgctgagtttttgaatga

SEQ ID NO: 394176 - DNA, 55 bp, Artificial
  Synthetic oligonucleotide
gaatttgggaaagtgcttcctctttagttagagagcagtgtgggtatgtgagaga

SEQ ID NO: 394177 - DNA, 58 bp, Artificial
  Synthetic oligonucleotide
gaatttggggttgctctggaaaactcatttgcaccactactgtaccttggaatgctag

SEQ ID NO: 394178 - DNA, 60 bp, Artificial
  Synthetic oligonucleotide
gaatttggttgccattggatatccacgaatgatggcgattgtggcaatccactagttagt

SEQ ID NO: 394179 - DNA, 55 bp, Artificial
  Synthetic oligonucleotide
gaatttgtagagctatcctcaacatacctagaagaattagacagggactcgaagt

SEQ ID NO: 394180 - DNA, 51 bp, Artificial
  Synthetic oligonucleotide
gaatttgtagtgctaatgttacaatgaggcttcacgggaatatatatcccc

SEQ ID NO: 394181 - DNA, 59 bp, Artificial
  Synthetic oligonucleotide
gaatttgtattgggccataatatagcaacgtcgacctatattagctaccctagtatgag

SEQ ID NO: 394182 - DNA, 58 bp, Artificial
  Synthetic oligonucleotide
gaatttgtcaagggcaagtacatcatggctttcaacccaccctggggagatattaaca

SEQ ID NO: 394183 - DNA, 55 bp, Artificial
  Synthetic oligonucleotide
gaatttgtgtcaaccgctatatatgtcacctctaacaagcatgtgtggcaatggt

SEQ ID NO: 394184 - DNA, 55 bp, Artificial
  Synthetic oligonucleotide
gaatttgttagccgcttaaacatattttatcatgcaggaacaggacgacagctac

SEQ ID NO: 394185 - DNA, 58 bp, Artificial
  Synthetic oligonucleotide
gaattttactaaacagactccgagttgccattagacactgtagctgtaaatcagtaac

SEQ ID NO: 394186 - DNA, 56 bp, Artificial
  Synthetic oligonucleotide
gaattttactataacatggggggcaagtggtcaaaatccatagttgggtggcctga

SEQ ID NO: 394187 - DNA, 55 bp, Artificial
  Synthetic oligonucleotide
gaattttatagacgttattaccccgctttacagagagagatagacgttcatgcat

SEQ ID NO: 394188 - DNA, 59 bp, Artificial
  Synthetic oligonucleotide
gaattttattcacaatcgaaccagctcttatcatatggcgatgttacacgtttcctttc

SEQ ID NO: 394189 - DNA, 58 bp, Artificial
  Synthetic oligonucleotide
gaattttccttcgaactgaataagcacgtgaagatgaggttgcccatcttcgtgtaat

SEQ ID NO: 394190 - DNA, 55 bp, Artificial
  Synthetic oligonucleotide
gaattttctctcactgatccgaggctagaaccacacaaatgggaaaagtactgcg

SEQ ID NO: 394191 - DNA, 55 bp, Artificial
  Synthetic oligonucleotide
gaattttctcttacagacccgaggctggaaccacacaaatgggagaagtactgtg

SEQ ID NO: 394192 - DNA, 55 bp, Artificial
  Synthetic oligonucleotide
gaattttctgtaaaggtgctgactttcaacaaccctactattgtagtagttggac

SEQ ID NO: 394193 - DNA, 55 bp, Artificial
  Synthetic oligonucleotide
gaattttgaagacggtgtgctgaaataggtttcgcgccatttcgcgtgtgttgcc

SEQ ID NO: 394194 - DNA, 55 bp, Artificial
  Synthetic oligonucleotide
gaattttgcagagagctgtagaacaaggaattagacaattcgtgataactcctga

SEQ ID NO: 394195 - DNA, 58 bp, Artificial
  Synthetic oligonucleotide
gaattttggccttacaccaccgccttctggtaccttagaggacacatatcgctatgta

SEQ ID NO: 394196 - DNA, 56 bp, Artificial
  Synthetic oligonucleotide
gaattttgggagagcgtctttacgggcctcacccatatagacggccacttcctatc

SEQ ID NO: 394197 - DNA, 55 bp, Artificial
  Synthetic oligonucleotide
gaattttggtcaggggtggtctcccttcggggtgtgccgcaacgagcatgttgaa

SEQ ID NO: 394198 - DNA, 59 bp, Artificial
  Synthetic oligonucleotide
gaattttgtatgatgagtacaaaaggtttatgaactactggacagcatctaacgaagac

SEQ ID NO: 394199 - DNA, 59 bp, Artificial
  Synthetic oligonucleotide
gaatttttcgagaacaaatcagagacatggcccataggagagtctcccaagggagtaga

SEQ ID NO: 394200 - DNA, 58 bp, Artificial
  Synthetic oligonucleotide
gaatttttctattgtaatacatcaggcctgtttaatggtacatatatgcctaatggta

SEQ ID NO: 394201 - DNA, 57 bp, Artificial
  Synthetic oligonucleotide
gaatttttgtaagcagggagttgtgatagataatgagtatccagacaatcagatggg

SEQ ID NO: 394202 - DNA, 58 bp, Artificial
  Synthetic oligonucleotide
gaattttttgaagaggagagtgggagaaaggcgatccttaatcagaataagatgtcta

SEQ ID NO: 394203 - DNA, 59 bp, Artificial
  Synthetic oligonucleotide
gacaaaaaagagcagcctttggactaggtgcgctgtttcttgggtttcttggagcagca

SEQ ID NO: 394204 - DNA, 60 bp, Artificial
  Synthetic oligonucleotide
gacaaaaaccactgtggaccatatggccataatcaagaagtacacatcgggaagacagga

SEQ ID NO: 394205 - DNA, 60 bp, Artificial
  Synthetic oligonucleotide
gacaaaaaccattcaacgccggaggactggctctcatccagtggatgcattgagtggatt

SEQ ID NO: 394206 - DNA, 58 bp, Artificial
  Synthetic oligonucleotide
gacaaaaagttgtctccataactgacacaacaaatcagaagaccgaattacaagcaat

SEQ ID NO: 394207 - DNA, 54 bp, Artificial
  Synthetic oligonucleotide
gacaaaacactaattcgatttatgttagtctttcaatagctagtacaaagccat

SEQ ID NO: 394208 - DNA, 59 bp, Artificial
  Synthetic oligonucleotide
gacaaaaggtcgtctccctaactgacacaacaaatcagaggactgagttacaagcaata

SEQ ID NO: 394209 - DNA, 60 bp, Artificial
  Synthetic oligonucleotide
gacaaaagtaactctacaatcatcgcctctgtacacacagtatccgtacctgtcaaacaa

SEQ ID NO: 394210 - DNA, 55 bp, Artificial
  Synthetic oligonucleotide
gacaaaagtaagtggcgaatgctaatagacttaagagccttaaacaaggccacac

SEQ ID NO: 394211 - DNA, 51 bp, Artificial
  Synthetic oligonucleotide
gacaaaagtacccccctgtaccctccccgccatgtttttttctccgatcta

SEQ ID NO: 394212 - DNA, 56 bp, Artificial
  Synthetic oligonucleotide
gacaaaatcttacataactactcggttagagtaggagagtaatatcaactcttacg

SEQ ID NO: 394213 - DNA, 58 bp, Artificial
  Synthetic oligonucleotide
gacaaaatgaacacacagttcgaagctgtcgaccacgaattttcaaatttggagagaa

SEQ ID NO: 394214 - DNA, 57 bp, Artificial
  Synthetic oligonucleotide
gacaaaatgcgagtagaccaggcgatgcaccagaaaccgggtgtactttccgtcgcg

SEQ ID NO: 394215 - DNA, 52 bp, Artificial
  Synthetic oligonucleotide
gacaaacaaaatggtggagacggctaaatgtatactggggggatctgctgta

SEQ ID NO: 394216 - DNA, 59 bp, Artificial
  Synthetic oligonucleotide
gacaaacagaacaacaagactagtccctccactacggagcctggcacatccaaccgaga

SEQ ID NO: 394217 - DNA, 58 bp, Artificial
  Synthetic oligonucleotide
gacaaacaggccgatgaacagaaaacccaagatgtacaggatgtatagaagtcccgac

SEQ ID NO: 394218 - DNA, 60 bp, Artificial
  Synthetic oligonucleotide
gacaaacagtagtggggcatgcaatgcaagagacacagtttagcctttctaccttagtac

SEQ ID NO: 394219 - DNA, 60 bp, Artificial
  Synthetic oligonucleotide
gacaaacataacaccaaaagtcagttaaaatgttgaatgacagaattgctgtaacatgct

SEQ ID NO: 394220 - DNA, 60 bp, Artificial
  Synthetic oligonucleotide
gacaaacatatggctgaaattgcgtgactcctacacccaaatgtgtgaccaccggctaat

SEQ ID NO: 394221 - DNA, 60 bp, Artificial
  Synthetic oligonucleotide
gacaaacattccaatggaaccattaaagacagaagcccacatcgaaccctgatgagctgt

SEQ ID NO: 394222 - DNA, 54 bp, Artificial
  Synthetic oligonucleotide
gacaaacattggttttgggaaccaagtaagatcgcatggggctctttgaatcta

SEQ ID NO: 394223 - DNA, 60 bp, Artificial
  Synthetic oligonucleotide
gacaaaccaaccactgttgaacaagcaatgatgtctacttatgctatatgggatttagga

SEQ ID NO: 394224 - DNA, 55 bp, Artificial
  Synthetic oligonucleotide
gacaaaccaactcatccagatgtttcatccaacagattctatacgttggatagca

SEQ ID NO: 394225 - DNA, 60 bp, Artificial
  Synthetic oligonucleotide
gacaaaccagcagcgacatctagtggcagaaattccccagtgcaacaagtagctggcaat

SEQ ID NO: 394226 - DNA, 56 bp, Artificial
  Synthetic oligonucleotide
gacaaacccacaaggcccgatgtctccgtcaataggttttacacacttagtgctaa

SEQ ID NO: 394227 - DNA, 60 bp, Artificial
  Synthetic oligonucleotide
gacaaacccgacctacccatggataatgctctatccatagccctatggacaatcaaccac

SEQ ID NO: 394228 - DNA, 51 bp, Artificial
  Synthetic oligonucleotide
gacaaacccgttgaatcctaccagcattcgtattccgagaggaactaaatt

SEQ ID NO: 394229 - DNA, 55 bp, Artificial
  Synthetic oligonucleotide
gacaaaccctcgcggccagacacctcttctaatagattttacactctggagagca

SEQ ID NO: 394230 - DNA, 59 bp, Artificial
  Synthetic oligonucleotide
gacaaaccgtcatagagtacttggtgtctttcggagtgtggattcgcactcctccagct

SEQ ID NO: 394231 - DNA, 50 bp, Artificial
  Synthetic oligonucleotide
gacaaacctcgctcttaaagaaaaattgatcctgaaccgcgtaaagtttt

SEQ ID NO: 394232 - DNA, 55 bp, Artificial
  Synthetic oligonucleotide
gacaaacgcagccctgtaaccggcgctgtaaatagcgtctaatacagccggagtg

SEQ ID NO: 394233 - DNA, 55 bp, Artificial
  Synthetic oligonucleotide
gacaaacgccgcagaaatgtggttgatgttatgattgctatctttcagggaccta

SEQ ID NO: 394234 - DNA, 55 bp, Artificial
  Synthetic oligonucleotide
gacaaacgtagtacactgctgccgttcattttgacacgtaatatgcccgccaagg

SEQ ID NO: 394235 - DNA, 54 bp, Artificial
  Synthetic oligonucleotide
gacaaacgttttaccggtttgtaaataggagcacacaagctcgctagtcgcccc

SEQ ID NO: 394236 - DNA, 55 bp, Artificial
  Synthetic oligonucleotide
gacaaactatacatctggggagttcaccacccgagcacaaatcaagaacaaaccg

SEQ ID NO: 394237 - DNA, 55 bp, Artificial
  Synthetic oligonucleotide
gacaaactatgattcgggtgaggaatctaaggcaccggagtcttgtgctgagctt

SEQ ID NO: 394238 - DNA, 55 bp, Artificial
  Synthetic oligonucleotide
gacaaactattttgagcaaccagtcagtaatggtctcggcaactgtatggtggct

SEQ ID NO: 394239 - DNA, 55 bp, Artificial
  Synthetic oligonucleotide
gacaaactcaagcaagacaagggttggtcatggatgttcgtgtccacgactgagc

SEQ ID NO: 394240 - DNA, 54 bp, Artificial
  Synthetic oligonucleotide
gacaaactccgccacttcaaggagcggacgccagtggtcgatgtatgcatcgca

SEQ ID NO: 394241 - DNA, 55 bp, Artificial
  Synthetic oligonucleotide
gacaaactgtcatccacaaatcaattgagatcagttggactgaatctcgaaggga

SEQ ID NO: 394242 - DNA, 55 bp, Artificial
  Synthetic oligonucleotide
gacaaagaacaacgaatgggattttgttgtgactactgatatatcagagatgggg

SEQ ID NO: 394243 - DNA, 55 bp, Artificial
  Synthetic oligonucleotide
gacaaagaaccacacaaacacggtcatgttttggttagttcgtgatcgtcgacct

SEQ ID NO: 394244 - DNA, 55 bp, Artificial
  Synthetic oligonucleotide
gacaaagacacatttctgtccgtgtaaaatgcaaagtgccacggatgaatctgtc

SEQ ID NO: 394245 - DNA, 55 bp, Artificial
  Synthetic oligonucleotide
gacaaagacatgtccaccaatctaaagcgtcgctcaaagcttaattgtttcgtgg

SEQ ID NO: 394246 - DNA, 59 bp, Artificial
  Synthetic oligonucleotide
gacaaagaccaactgccttgctacagtgtggctagaattcctttgcctaatttaaatga

SEQ ID NO: 394247 - DNA, 53 bp, Artificial
  Synthetic oligonucleotide
gacaaagacgaattagaactcactgaactatcagtagtaaaaacgactaacga

SEQ ID NO: 394248 - DNA, 55 bp, Artificial
  Synthetic oligonucleotide
gacaaagagcatctccagtaccatgtctgagacaagtgcaacatatccggttgac

SEQ ID NO: 394249 - DNA, 55 bp, Artificial
  Synthetic oligonucleotide
gacaaagatcagcacatactaatgatatcagacagctagttgaagtggtgcaaaa

SEQ ID NO: 394250 - DNA, 55 bp, Artificial
  Synthetic oligonucleotide
gacaaagatctcctcagctaagtgaacactcctcacgcctcagctcgcgatctcc

SEQ ID NO: 394251 - DNA, 55 bp, Artificial
  Synthetic oligonucleotide
gacaaagcatgtcgtaaaaggtaaatgccactacttcgaacagtacatatcccag

SEQ ID NO: 394252 - DNA, 57 bp, Artificial
  Synthetic oligonucleotide
gacaaagccacctttacctagtgttaggaaactcacagaggacagatggaacgagcc

SEQ ID NO: 394253 - DNA, 60 bp, Artificial
  Synthetic oligonucleotide
gacaaagctggttcgtgatgagcagattggtcggattggggatcattactatacaacaaa

SEQ ID NO: 394254 - DNA, 58 bp, Artificial
  Synthetic oligonucleotide
gacaaagcttcagagggttatgcgtggctgaaattcttagggtcatcaaagtctccta

SEQ ID NO: 394255 - DNA, 60 bp, Artificial
  Synthetic oligonucleotide
gacaaagcttgctcaacgcgtaactaagacatcacgtgttgagaacgcttttgcgtggaa

SEQ ID NO: 394256 - DNA, 60 bp, Artificial
  Synthetic oligonucleotide
gacaaaggcaagaaaccagcatatctcataaaatcaaagatacccattctgctcaatttg

SEQ ID NO: 394257 - DNA, 53 bp, Artificial
  Synthetic oligonucleotide
gacaaaggccttgtccacaagagcggtaagaaaaagggccagccctttactcg

SEQ ID NO: 394258 - DNA, 59 bp, Artificial
  Synthetic oligonucleotide
gacaaaggctgcaatttaaccaagtcagaaacggaaacagttctcaagcacctgcgaca

SEQ ID NO: 394259 - DNA, 55 bp, Artificial
  Synthetic oligonucleotide
gacaaagtaaggcaagactccgttgttcactagcactactccaacgttgcctcgg

SEQ ID NO: 394260 - DNA, 60 bp, Artificial
  Synthetic oligonucleotide
gacaaagtacacaatgggatcaggcagcagttttatactctaattatatcgtaaacagac

SEQ ID NO: 394261 - DNA, 51 bp, Artificial
  Synthetic oligonucleotide
gacaaatacagatatttaacatcactggctactcgttgcccagatcaaaca

SEQ ID NO: 394262 - DNA, 60 bp, Artificial
  Synthetic oligonucleotide
gacaaatacagctggccaatcatattgcgtctgacgagtctgcatattaacgacttcctc

SEQ ID NO: 394263 - DNA, 56 bp, Artificial
  Synthetic oligonucleotide
gacaaatacgggctcaaccttcccatggtcacttacgtgaaggatgagctccgctc

SEQ ID NO: 394264 - DNA, 60 bp, Artificial
  Synthetic oligonucleotide
gacaaatcatacttgatcttaagattgaccctggtgaaaggatggatccagcagtaagga

SEQ ID NO: 394265 - DNA, 53 bp, Artificial
  Synthetic oligonucleotide
gacaaatccaatcgcaccaattgccacacccaaagcccagggtccagcatctc

SEQ ID NO: 394266 - DNA, 56 bp, Artificial
  Synthetic oligonucleotide
gacaaatctttcgtagtggagatgagtctatgaaacttaaaaacgatctagaggta

SEQ ID NO: 394267 - DNA, 55 bp, Artificial
  Synthetic oligonucleotide
gacaaatgaaagagaagtgtcttttcagggaggtcacattgaagagtgctcttgc

SEQ ID NO: 394268 - DNA, 55 bp, Artificial
  Synthetic oligonucleotide
gacaaatgacgagttaaagaaagagaatgagatgtggcttcttcctctaccgacg

SEQ ID NO: 394269 - DNA, 60 bp, Artificial
  Synthetic oligonucleotide
gacaaatggctgcctttgtatctacttggtttatacagagtgggcagaacacaaatgcct

SEQ ID NO: 394270 - DNA, 55 bp, Artificial
  Synthetic oligonucleotide
gacaaatgggcaagtttgtggagttggtttgacatatcaaactggctatggtaca

SEQ ID NO: 394271 - DNA, 54 bp, Artificial
  Synthetic oligonucleotide
gacaaatgtacgaggaaacgtctagttatcaacagtcccaacacagcacacagg

SEQ ID NO: 394272 - DNA, 57 bp, Artificial
  Synthetic oligonucleotide
gacaaattctccgcggttgagctagtttacctagttagctatatggagttcttagcc

SEQ ID NO: 394273 - DNA, 55 bp, Artificial
  Synthetic oligonucleotide
gacaaattgcatcagccccacaatgagttacataaccatcatcgtcatttcatcc

SEQ ID NO: 394274 - DNA, 60 bp, Artificial
  Synthetic oligonucleotide
gacaaattggcactaaatgctttgtccatatacttgacttgctcatcatacttcttaagt

SEQ ID NO: 394275 - DNA, 55 bp, Artificial
  Synthetic oligonucleotide
gacaacaaaaggtactgttctaaggcaggcgagatatttgagacgggtgatcctc

SEQ ID NO: 394276 - DNA, 57 bp, Artificial
  Synthetic oligonucleotide
gacaacaaacacagaaactggagcaccccagcttaacccgattgatggaccactacc

SEQ ID NO: 394277 - DNA, 58 bp, Artificial
  Synthetic oligonucleotide
gacaacaaagggactaggatcaggtttaaagatgactcatcctttgaagaggtcaatg

SEQ ID NO: 394278 - DNA, 60 bp, Artificial
  Synthetic oligonucleotide
gacaacaaatccttatgaacatgttcttgttcgacttggaagagctcatctcggtacaag

SEQ ID NO: 394279 - DNA, 55 bp, Artificial
  Synthetic oligonucleotide
gacaacaacacaggcggttgagttgaataaaactgagtacaatgtgatttatgcc

SEQ ID NO: 394280 - DNA, 58 bp, Artificial
  Synthetic oligonucleotide
gacaacaacagattacttattgtgattaccaacgatcatggggtttgtatatacttcc

SEQ ID NO: 394281 - DNA, 60 bp, Artificial
  Synthetic oligonucleotide
gacaacaaccacaattgttgccactcgtcatgaagcgtcggtgtatttgtcaaaagcgac

SEQ ID NO: 394282 - DNA, 60 bp, Artificial
  Synthetic oligonucleotide
gacaacaactgcattgaaagcataagaaacgggacatatgaccatgatatttacagagac

SEQ ID NO: 394283 - DNA, 59 bp, Artificial
  Synthetic oligonucleotide
gacaacaaggctatagatatgtcaatcattccacctgtgattcgaagtataaagtgcga

SEQ ID NO: 394284 - DNA, 56 bp, Artificial
  Synthetic oligonucleotide
gacaacaatcaggggcggtttacgtgggcaattacaggctggtaaacagacacctg

SEQ ID NO: 394285 - DNA, 60 bp, Artificial
  Synthetic oligonucleotide
gacaacacaagtggacacaatactagagaagaatgttacagtgacacactcagtggagct

SEQ ID NO: 394286 - DNA, 57 bp, Artificial
  Synthetic oligonucleotide
gacaacacacgtaacacaaattttagtatatcagttagttcagaaaacactgaggta

SEQ ID NO: 394287 - DNA, 60 bp, Artificial
  Synthetic oligonucleotide
gacaacaccaaatggaatgaaaatcagaaccctaggatgtttctggcaatgataacatac

SEQ ID NO: 394288 - DNA, 55 bp, Artificial
  Synthetic oligonucleotide
gacaacaccacgcccacttaagctaccggatgggcctccctgctctcaacggtcc

SEQ ID NO: 394289 - DNA, 55 bp, Artificial
  Synthetic oligonucleotide
gacaacacccggaattggatcagcgaagctcagaattcagatgtggtccgtctat

SEQ ID NO: 394290 - DNA, 54 bp, Artificial
  Synthetic oligonucleotide
gacaacacgcgaaacaccaattttagtatttcagtttacactgaaaatggggaa

SEQ ID NO: 394291 - DNA, 56 bp, Artificial
  Synthetic oligonucleotide
gacaacactgaaaaggaccagtactcgctacccggtatacagaccatcctaaagcg

SEQ ID NO: 394292 - DNA, 60 bp, Artificial
  Synthetic oligonucleotide
gacaacagagaatagacatctagtagagtgggagtatatgaatccatgtcctaacacaca

SEQ ID NO: 394293 - DNA, 59 bp, Artificial
  Synthetic oligonucleotide
gacaacagagtatttatcgtttaagcaagctatgcactatatgggctttaattcatacg

SEQ ID NO: 394294 - DNA, 55 bp, Artificial
  Synthetic oligonucleotide
gacaacagcagcccacgcacttgcaaagaaactgtctgatcaggatccatctatc

SEQ ID NO: 394295 - DNA, 60 bp, Artificial
  Synthetic oligonucleotide
gacaacaggattgaaagagtgacatgttccatgttcagaacatgttaacattaatccacc

SEQ ID NO: 394296 - DNA, 53 bp, Artificial
  Synthetic oligonucleotide
gacaacaggcttctttcgaccctaccaggactggaacaggaaacccctcccca

SEQ ID NO: 394297 - DNA, 60 bp, Artificial
  Synthetic oligonucleotide
gacaacagtggttggagtcactattatcaattcacaaggatctgttggaacaacctactg

SEQ ID NO: 394298 - DNA, 60 bp, Artificial
  Synthetic oligonucleotide
gacaacagtttccagcaatgccagtcgactacaaaagatcaatacaacgtggaatattac

SEQ ID NO: 394299 - DNA, 57 bp, Artificial
  Synthetic oligonucleotide
gacaacagttttcatcattacgcagagcattatataatagaaggctaactgagcaag

SEQ ID NO: 394300 - DNA, 60 bp, Artificial
  Synthetic oligonucleotide
gacaacatatactggacccagatctgtgctaccagaccaacctattggaccatcatcata

SEQ ID NO: 394301 - DNA, 55 bp, Artificial
  Synthetic oligonucleotide
gacaacatcccctgagcctacctcttctggctgctccccagactccgacgctgag

SEQ ID NO: 394302 - DNA, 60 bp, Artificial
  Synthetic oligonucleotide
gacaacatgagagtcgcgatcgaccactactctggtcaattgttatcattagatatcccc

SEQ ID NO: 394303 - DNA, 60 bp, Artificial
  Synthetic oligonucleotide
gacaacatgcaaacatcagacggtctcaaatggatggctactctccctagtggacaccgt

SEQ ID NO: 394304 - DNA, 55 bp, Artificial
  Synthetic oligonucleotide
gacaacattgcaaggctttacctacaaacatctatatactgctcggttagagatg

SEQ ID NO: 394305 - DNA, 58 bp, Artificial
  Synthetic oligonucleotide
gacaacatttctgtggataacaagcaaactcagttatgtattattggttgtacacctc

SEQ ID NO: 394306 - DNA, 52 bp, Artificial
  Synthetic oligonucleotide
gacaacccaacactcttcgaaatcctcccaaaactcagaccctttaaccacg

SEQ ID NO: 394307 - DNA, 52 bp, Artificial
  Synthetic oligonucleotide
gacaaccccaacgttttgcaccgttgctttctgaaaccccgtggtcgcgacg

SEQ ID NO: 394308 - DNA, 55 bp, Artificial
  Synthetic oligonucleotide
gacaaccccgatttcggagtgaatggtggtaatccactagttgtaacattttcta

SEQ ID NO: 394309 - DNA, 57 bp, Artificial
  Synthetic oligonucleotide
gacaaccccgtcgcctcgccaatgtacttggtactcactcatccaaaacctcaggtg

SEQ ID NO: 394310 - DNA, 57 bp, Artificial
  Synthetic oligonucleotide
gacaaccctaatcctaccgctaaccgcgtttgcaaaagtaatcgtactgatatcagc

SEQ ID NO: 394311 - DNA, 52 bp, Artificial
  Synthetic oligonucleotide
gacaaccgaacaacttcacgtcaacccgtgctgcgcccaggttcctcccgtg

SEQ ID NO: 394312 - DNA, 56 bp, Artificial
  Synthetic oligonucleotide
gacaaccgagttcccatgtgcataaactctaggggttggatgtacttgagggttaa

SEQ ID NO: 394313 - DNA, 60 bp, Artificial
  Synthetic oligonucleotide
gacaaccgcattcgaaggtatgcgtggtgatttcatgggcattcgtaatgcttgggaatc

SEQ ID NO: 394314 - DNA, 55 bp, Artificial
  Synthetic oligonucleotide
gacaaccttcgtcgataccacgacattcgttccggtgaatgcggcttggaccaac

SEQ ID NO: 394315 - DNA, 58 bp, Artificial
  Synthetic oligonucleotide
gacaacgaacccgtatgagcatgtgttggttcgacttggtagggcgcatttagggaca

SEQ ID NO: 394316 - DNA, 52 bp, Artificial
  Synthetic oligonucleotide
gacaacgaatgtatagagtctgtcaaaaatggtacatatgactaccctaaat

SEQ ID NO: 394317 - DNA, 55 bp, Artificial
  Synthetic oligonucleotide
gacaacgacagatccatacgattagtcagcggattcttgacacttgcctgggaag

SEQ ID NO: 394318 - DNA, 55 bp, Artificial
  Synthetic oligonucleotide
gacaacgaggttcccagaagcagggttccaagtgtacataaatgacgcggcactg

SEQ ID NO: 394319 - DNA, 57 bp, Artificial
  Synthetic oligonucleotide
gacaacgatcacgtatcctcttgacggatcgaacaaagacttcccgatccctttcga

SEQ ID NO: 394320 - DNA, 55 bp, Artificial
  Synthetic oligonucleotide
gacaacgatctctggatgtgttaggctcccctcactttcaatcggtgaagcgatc

SEQ ID NO: 394321 - DNA, 58 bp, Artificial
  Synthetic oligonucleotide
gacaacgatgcagttattcccaaactaggatcgggcttacaatttgaccctaatggca

SEQ ID NO: 394322 - DNA, 60 bp, Artificial
  Synthetic oligonucleotide
gacaacgcaataaggataggagaggacgctcatgtactagtcacaagggagccctacttg

SEQ ID NO: 394323 - DNA, 60 bp, Artificial
  Synthetic oligonucleotide
gacaacgccacgcccactcagattacctgatgggcctccctgctctcagcgatcgaaatt

SEQ ID NO: 394324 - DNA, 60 bp, Artificial
  Synthetic oligonucleotide
gacaacggcacgtatgttgtgcaggccgagttccatacctatggtgacctgttctcatac

SEQ ID NO: 394325 - DNA, 55 bp, Artificial
  Synthetic oligonucleotide
gacaacggccataaccttaaagacctgtttcacgcttcagtaaccacatccatca

SEQ ID NO: 394326 - DNA, 57 bp, Artificial
  Synthetic oligonucleotide
gacaacgggcacgccgtttcaggggccgtacgtgatgccgcacgtcgtttgatcgac

SEQ ID NO: 394327 - DNA, 50 bp, Artificial
  Synthetic oligonucleotide
gacaacgggtctactattttaggaaagctccgatgggagtcggtcttagc

SEQ ID NO: 394328 - DNA, 55 bp, Artificial
  Synthetic oligonucleotide
gacaacgtaaacgaagtttattcgctcacaggagcccatttcagcgacgaaaaga

SEQ ID NO: 394329 - DNA, 54 bp, Artificial
  Synthetic oligonucleotide
gacaacgtagtaattttagtaagctttgtaagcatattcccaggtttactccta

SEQ ID NO: 394330 - DNA, 55 bp, Artificial
  Synthetic oligonucleotide
gacaacgtccaactaaatggaaaggatgttcgctggaacaactataccaaaccaa

SEQ ID NO: 394331 - DNA, 55 bp, Artificial
  Synthetic oligonucleotide
gacaacgtcgctaagagggatcacactaacatcattacttactggttgatccgag

SEQ ID NO: 394332 - DNA, 55 bp, Artificial
  Synthetic oligonucleotide
gacaacgtcgttatatagcgacaggagaggtagacaaggcaggtaatagaataag

SEQ ID NO: 394333 - DNA, 59 bp, Artificial
  Synthetic oligonucleotide
gacaacgtctaccattgaaaacgttaatgatgtgggaatcatgcaacagaagaaaccgc

SEQ ID NO: 394334 - DNA, 55 bp, Artificial
  Synthetic oligonucleotide
gacaacgtgatgttaaatttgaggtcactggattacaccctaatgacaataactt

SEQ ID NO: 394335 - DNA, 57 bp, Artificial
  Synthetic oligonucleotide
gacaacgttttccaacaagcgtttcaattgctggtctgcgtttaatgatcttgaacg

SEQ ID NO: 394336 - DNA, 50 bp, Artificial
  Synthetic oligonucleotide
gacaactacaagagaggactagataccaagaaccaacttatgtcttacat

SEQ ID NO: 394337 - DNA, 59 bp, Artificial
  Synthetic oligonucleotide
gacaactacacgccaggaccagggatcagatttccactgactttcgggtggtgcttcaa

SEQ ID NO: 394338 - DNA, 51 bp, Artificial
  Synthetic oligonucleotide
gacaactacatctgggatgggccggatagctctttggatttaacgcgccaa

SEQ ID NO: 394339 - DNA, 58 bp, Artificial
  Synthetic oligonucleotide
gacaactaccacatgtactattcgaaattgtaagaagttaggtccaagagagaatgtg

SEQ ID NO: 394340 - DNA, 55 bp, Artificial
  Synthetic oligonucleotide
gacaactaccatggttgcaaaactccctaaatttgtcaggaattctccacaagcc

SEQ ID NO: 394341 - DNA, 54 bp, Artificial
  Synthetic oligonucleotide
gacaactaggggacatacgacaaataatatatatgcggtcaaagacaggtgtcg

SEQ ID NO: 394342 - DNA, 58 bp, Artificial
  Synthetic oligonucleotide
gacaactcgacaggccgctaacactttccttggggctatccaccttggcccacgcatc

SEQ ID NO: 394343 - DNA, 55 bp, Artificial
  Synthetic oligonucleotide
gacaactcgggtcctgactccactgtgattttgcccctccgagccataggacccc

SEQ ID NO: 394344 - DNA, 55 bp, Artificial
  Synthetic oligonucleotide
gacaactctacagaaactaggtacaattgttcatttaacatgacagggggtttta

SEQ ID NO: 394345 - DNA, 55 bp, Artificial
  Synthetic oligonucleotide
gacaactctgcagacgttcatgtcttcggtcagatctcttggaaccgtaacgagt

SEQ ID NO: 394346 - DNA, 55 bp, Artificial
  Synthetic oligonucleotide
gacaactgacggtaacagcattgctaacgcattcgtttcatatttggccaaccgc

SEQ ID NO: 394347 - DNA, 60 bp, Artificial
  Synthetic oligonucleotide
gacaactgatgatgaagtgtatatacaaagagcattcatgtcattatcaagtcagagatc

SEQ ID NO: 394348 - DNA, 58 bp, Artificial
  Synthetic oligonucleotide
gacaactgatgggcttttactctgggaattgggagactggatacaatttatagtgtct

SEQ ID NO: 394349 - DNA, 50 bp, Artificial
  Synthetic oligonucleotide
gacaactggaaaggctcaaataggcccgtcgtagacataaggatgaaaga

SEQ ID NO: 394350 - DNA, 60 bp, Artificial
  Synthetic oligonucleotide
gacaactggaaaggctctaacagaccatggatgcgcgtaaacaatgaaactatattggaa

SEQ ID NO: 394351 - DNA, 55 bp, Artificial
  Synthetic oligonucleotide
gacaactggggaacatacttggtaatgctgcaaatgcattttccactatggctcc

SEQ ID NO: 394352 - DNA, 53 bp, Artificial
  Synthetic oligonucleotide
gacaactggtgagggcggtcgatggtgcgaagtaaattagaaaggggggcgtt

SEQ ID NO: 394353 - DNA, 55 bp, Artificial
  Synthetic oligonucleotide
gacaactgtttacctgcgagcgatgggtgcatttgaatcattacgcgttcccctc

SEQ ID NO: 394354 - DNA, 60 bp, Artificial
  Synthetic oligonucleotide
gacaacttatatttgtcagctgttgatgtctgtggcatgtttactaacaggtctggttcc

SEQ ID NO: 394355 - DNA, 59 bp, Artificial
  Synthetic oligonucleotide
gacaacttgaaaggattgcgcacttccgattcgtattcgattaacagagtattatagtc

SEQ ID NO: 394356 - DNA, 60 bp, Artificial
  Synthetic oligonucleotide
gacaacttgcagatctggtggcagctcaaaaactggctacaagaccagttgatccaacag

SEQ ID NO: 394357 - DNA, 54 bp, Artificial
  Synthetic oligonucleotide
gacaacttttgtcaacgaataaactttatgcggtaatgaaaagtggtggaagag

SEQ ID NO: 394358 - DNA, 55 bp, Artificial
  Synthetic oligonucleotide
gacaagaaaacacccgaagaaaagatcgacgacaccgtagttgttgacaagacag

SEQ ID NO: 394359 - DNA, 55 bp, Artificial
  Synthetic oligonucleotide
gacaagaagggaattgtcctcgttgatcttgacgtttatggtaaactccatcccc

SEQ ID NO: 394360 - DNA, 60 bp, Artificial
  Synthetic oligonucleotide
gacaagaagggatgtgttgccatgtcaagttggagtgaatccatactctcgggaatggag

SEQ ID NO: 394361 - DNA, 59 bp, Artificial
  Synthetic oligonucleotide
gacaagaatacgcgataccagttggaccagtctttccgccaggtatgaattggactgat

SEQ ID NO: 394362 - DNA, 57 bp, Artificial
  Synthetic oligonucleotide
gacaagaatatgacagctgtcatatcaactaaaaagcatagcttgccgagcacgcta

SEQ ID NO: 394363 - DNA, 55 bp, Artificial
  Synthetic oligonucleotide
gacaagaatcatgtggcagacattgataaactaattgactatgcagcctctggag

SEQ ID NO: 394364 - DNA, 58 bp, Artificial
  Synthetic oligonucleotide
gacaagaatcggaaatttccaaggttctatgtcaatgtgaggatgggagagtttgacc

SEQ ID NO: 394365 - DNA, 60 bp, Artificial
  Synthetic oligonucleotide
gacaagacacaataatgtatcactaatgattattccaattgccccactcattgttcccac

SEQ ID NO: 394366 - DNA, 55 bp, Artificial
  Synthetic oligonucleotide
gacaagacatactaaaagcttcaaatattactctgtggttctcgatcctctcgtc

SEQ ID NO: 394367 - DNA, 60 bp, Artificial
  Synthetic oligonucleotide
gacaagacgtacaacgttgcgttgtccggctgatgtcactttcttcttgaatcagaagta

SEQ ID NO: 394368 - DNA, 58 bp, Artificial
  Synthetic oligonucleotide
gacaagactggcgtctcatcaatgaaataaaagggatggtccaaaaactccctgatct

SEQ ID NO: 394369 - DNA, 56 bp, Artificial
  Synthetic oligonucleotide
gacaagactggttttgttagagtgccaatcaaacattatgactgtacaatgctaac

SEQ ID NO: 394370 - DNA, 56 bp, Artificial
  Synthetic oligonucleotide
gacaagagaatcagaagggggatccgaacgaactctatccgtttgcctccctcaaa

SEQ ID NO: 394371 - DNA, 60 bp, Artificial
  Synthetic oligonucleotide
gacaagagatatggaccagcactaagcatcaacgaattgagcaatcttgcgaagggggag

SEQ ID NO: 394372 - DNA, 55 bp, Artificial
  Synthetic oligonucleotide
gacaagagatggtggtgcaattaatagtagccagaatgagaccttcagacctgga

SEQ ID NO: 394373 - DNA, 60 bp, Artificial
  Synthetic oligonucleotide
gacaagagcggagctgactcactacctgagaaacaaattgtcacacccatcgttgacgcg

SEQ ID NO: 394374 - DNA, 55 bp, Artificial
  Synthetic oligonucleotide
gacaagataagacgacgggtggaccttctaagagaagagtacaagaagacctggt

SEQ ID NO: 394375 - DNA, 55 bp, Artificial
  Synthetic oligonucleotide
gacaagatctgcattgggtaccatgcaaacaattcaacaacgcaagtggacacga

SEQ ID NO: 394376 - DNA, 58 bp, Artificial
  Synthetic oligonucleotide
gacaagatcttgaacgtcaactaggtgatttaagggaggaattcaattccttatcaca

SEQ ID NO: 394377 - DNA, 55 bp, Artificial
  Synthetic oligonucleotide
gacaagatgccagaggtggcaggccacttccgacttaccgaagagaagagaaagc

SEQ ID NO: 394378 - DNA, 59 bp, Artificial
  Synthetic oligonucleotide
gacaagatggatcaaactaagagataatcttcttaaagatggatacaagcctacctttg

SEQ ID NO: 394379 - DNA, 60 bp, Artificial
  Synthetic oligonucleotide
gacaagatgttgtggcaatgactgattggtcaggatatagcggaagtttcgttcaacatc

SEQ ID NO: 394380 - DNA, 55 bp, Artificial
  Synthetic oligonucleotide
gacaagattaggctaaaggagcatcgcgagaaacgtatgggctaccttgttagtg

SEQ ID NO: 394381 - DNA, 55 bp, Artificial
  Synthetic oligonucleotide
gacaagattcctataacaaaagtgagcttgaaaccaggatgctcaggacctagag

SEQ ID NO: 394382 - DNA, 58 bp, Artificial
  Synthetic oligonucleotide
gacaagcaaaggtcacgttctaaatctagagaacgtagtgactccaaatctagggaca

SEQ ID NO: 394383 - DNA, 58 bp, Artificial
  Synthetic oligonucleotide
gacaagcaatagtatagttactttctgtggactagacaatgaacctggatcgggaaat

SEQ ID NO: 394384 - DNA, 53 bp, Artificial
  Synthetic oligonucleotide
gacaagcacactgtaacattagtggacaagattggaacagaaccttaacacgg

SEQ ID NO: 394385 - DNA, 57 bp, Artificial
  Synthetic oligonucleotide
gacaagcacattgtaacattagtctaaaagactggaacaccactttaatccaggtag

SEQ ID NO: 394386 - DNA, 58 bp, Artificial
  Synthetic oligonucleotide
gacaagcacattgtaaccttagtagagcaaaatggaatgacactttaaaccagatagt

SEQ ID NO: 394387 - DNA, 54 bp, Artificial
  Synthetic oligonucleotide
gacaagcacattgtaatcttagtagcacaatatggaatgacactttaggacaga

SEQ ID NO: 394388 - DNA, 55 bp, Artificial
  Synthetic oligonucleotide
gacaagcagccaatggcttcgactagtaatttgccaaaggctctctgtgcaccaa

SEQ ID NO: 394389 - DNA, 58 bp, Artificial
  Synthetic oligonucleotide
gacaagcagtgagtcagtagtcttatttgggcaaagtaaggaaccctggttcgcttga

SEQ ID NO: 394390 - DNA, 58 bp, Artificial
  Synthetic oligonucleotide
gacaagcatgaatgggcggtagaccattttatgcctctcatgccaaggttttctagtg

SEQ ID NO: 394391 - DNA, 55 bp, Artificial
  Synthetic oligonucleotide
gacaagccatattaggacatatagttattcataggtgtgactatccagaaggaca

SEQ ID NO: 394392 - DNA, 52 bp, Artificial
  Synthetic oligonucleotide
gacaagccccaaatcgtagggcgtgtctacgccgtgttctgcgttgacctga

SEQ ID NO: 394393 - DNA, 55 bp, Artificial
  Synthetic oligonucleotide
gacaagcccctgtaacaattaccacctctgaaaaggcctcctctcgccctccctc

SEQ ID NO: 394394 - DNA, 60 bp, Artificial
  Synthetic oligonucleotide
gacaagccctgggtgccactcacaagagtgccgtcaaggatgttagtgctgacgggagac

SEQ ID NO: 394395 - DNA, 55 bp, Artificial
  Synthetic oligonucleotide
gacaagcctaagaatctgaatacacctgaaggcgctattgaatgggaacgaatgg

SEQ ID NO: 394396 - DNA, 55 bp, Artificial
  Synthetic oligonucleotide
gacaagcgactggctctggacgaatcacaaattagcaaacaatcgatcacgagtc

SEQ ID NO: 394397 - DNA, 57 bp, Artificial
  Synthetic oligonucleotide
gacaagctaagattgtacccagaaatattaacttgtgattcttcttgggtgattatt

SEQ ID NO: 394398 - DNA, 57 bp, Artificial
  Synthetic oligonucleotide
gacaagctcattgtaaccttagtagagcagattggaataacactttagcaaagatag

SEQ ID NO: 394399 - DNA, 60 bp, Artificial
  Synthetic oligonucleotide
gacaagctcgtggcccaatcatgaaacaaccaaaggtgtaacggcagcatgcccctatgc

SEQ ID NO: 394400 - DNA, 55 bp, Artificial
  Synthetic oligonucleotide
gacaagctgactttagagcacgaatgcttacaaattgtgactaaggacgagagct

SEQ ID NO: 394401 - DNA, 60 bp, Artificial
  Synthetic oligonucleotide
gacaagctgcgtgtgttgtcagtgtcaccaaaatattcggatctcttgacctatgttgac

SEQ ID NO: 394402 - DNA, 60 bp, Artificial
  Synthetic oligonucleotide
gacaagcttatagtgaattcatgaacagcttggtctatccttcgactccagagctgcata

SEQ ID NO: 394403 - DNA, 56 bp, Artificial
  Synthetic oligonucleotide
gacaaggaaaccttaacttccctcagatcaccctttggcagcgaccccttgtctca

SEQ ID NO: 394404 - DNA, 60 bp, Artificial
  Synthetic oligonucleotide
gacaaggaagcagccatcaggatatttgtattagcacatcaattagagagggataaattg

SEQ ID NO: 394405 - DNA, 54 bp, Artificial
  Synthetic oligonucleotide
gacaaggaccaaaggaaccctttagagactatgtagatcggttctataaaactc

SEQ ID NO: 394406 - DNA, 55 bp, Artificial
  Synthetic oligonucleotide
gacaaggatatgaaacttcttgtcgagggaagacatcttgagtgtgctcacagag

SEQ ID NO: 394407 - DNA, 50 bp, Artificial
  Synthetic oligonucleotide
gacaagggctcttgtccgaactggaatggaccccagaatgtgctctctaa

SEQ ID NO: 394408 - DNA, 55 bp, Artificial
  Synthetic oligonucleotide
gacaaggggattgttcggggccatagctggttttatagaaggaggatggacaggc

SEQ ID NO: 394409 - DNA, 55 bp, Artificial
  Synthetic oligonucleotide
gacaaggggcacagtagttatgagtcatgcttattggagtgctaatctacgcccg

SEQ ID NO: 394410 - DNA, 57 bp, Artificial
  Synthetic oligonucleotide
gacaaggggcagattctggaccgtgttggacgatgaacgtgactttttatctgttaa

SEQ ID NO: 394411 - DNA, 55 bp, Artificial
  Synthetic oligonucleotide
gacaaggtgaaccatttatacagtctcacgtctctttattgcatacgctccgcta

SEQ ID NO: 394412 - DNA, 58 bp, Artificial
  Synthetic oligonucleotide
gacaaggttcattggtcgttttcggcgaactatattgaacgatgaagacaagagctaa

SEQ ID NO: 394413 - DNA, 51 bp, Artificial
  Synthetic oligonucleotide
gacaagtacccgatggtcaagaccgcaaaggctggctcaccggactacaac

SEQ ID NO: 394414 - DNA, 52 bp, Artificial
  Synthetic oligonucleotide
gacaagtagtcacgttaagtaaactttacgcgaaatttggagggacggctac

SEQ ID NO: 394415 - DNA, 55 bp, Artificial
  Synthetic oligonucleotide
gacaagtataggtacatagactctcttgctaccagatgtcccagcaaggttcccc

SEQ ID NO: 394416 - DNA, 56 bp, Artificial
  Synthetic oligonucleotide
gacaagtatgactactcagagactttgctctatcagtttgatcttaatgttgatcg

SEQ ID NO: 394417 - DNA, 60 bp, Artificial
  Synthetic oligonucleotide
gacaagtattccccagtcaccagtgaatactgtaagatgattgagaggtgctatatgcct

SEQ ID NO: 394418 - DNA, 60 bp, Artificial
  Synthetic oligonucleotide
gacaagtcaatcgtgtcaacttggtacactattactaaagtctggaagatgtactatgtc

SEQ ID NO: 394419 - DNA, 55 bp, Artificial
  Synthetic oligonucleotide
gacaagtctcaaggtgaattccatctaatgattcaggaacacattttgaatggtc

SEQ ID NO: 394420 - DNA, 59 bp, Artificial
  Synthetic oligonucleotide
gacaagtgccccaagcattttcccaacccggcatacaagattcagattcggtatctgaa

SEQ ID NO: 394421 - DNA, 60 bp, Artificial
  Synthetic oligonucleotide
gacaagtggacagtgcagcccatccaattgcctaacaaagaagtgtggacagtaaatgat

SEQ ID NO: 394422 - DNA, 60 bp, Artificial
  Synthetic oligonucleotide
gacaagttcaacggcagatctcagttaacgctcgatgttcgtgtattcccagatacaaat

SEQ ID NO: 394423 - DNA, 55 bp, Artificial
  Synthetic oligonucleotide
gacaagttcaagatggctgatggctacacggcgcagattcatagcgcgcgggagg

SEQ ID NO: 394424 - DNA, 60 bp, Artificial
  Synthetic oligonucleotide
gacaagttcacagcttggtacaacccagatatgatgtacggtgcttggtactatagccat

SEQ ID NO: 394425 - DNA, 55 bp, Artificial
  Synthetic oligonucleotide
gacaagttggatgccgctgcaactaattgcgcgagatgtatgcgcaatggtggtg

SEQ ID NO: 394426 - DNA, 55 bp, Artificial
  Synthetic oligonucleotide
gacaagttggggttgtaacccacctgattgcccaggggtagggacaggatgtaca

SEQ ID NO: 394427 - DNA, 60 bp, Artificial
  Synthetic oligonucleotide
gacaataacagctatatattgataaattgcaataccacaaccataacacaagcctgtcca

SEQ ID NO: 394428 - DNA, 55 bp, Artificial
  Synthetic oligonucleotide
gacaataatcaccttcaacaggtcaagtcaacgagtgaaaatcacatggggtcgg

SEQ ID NO: 394429 - DNA, 55 bp, Artificial
  Synthetic oligonucleotide
gacaataatttctgtgcaccccttgtgaatttactgcagagcttattctggagtg

SEQ ID NO: 394430 - DNA, 55 bp, Artificial
  Synthetic oligonucleotide
gacaatagcactgtcaacacaaatatcacagagtcaaatgatactataaccctcc

SEQ ID NO: 394431 - DNA, 59 bp, Artificial
  Synthetic oligonucleotide
gacaatataatcaaccctataagaacttctgtgataaatttgagtaagctcaggctaag

SEQ ID NO: 394432 - DNA, 55 bp, Artificial
  Synthetic oligonucleotide
gacaatatacactgtgagttgacaatacatagtactgtagaagctagctgcccaa

SEQ ID NO: 394433 - DNA, 56 bp, Artificial
  Synthetic oligonucleotide
gacaatatacggaatcgaggcggagcttaactatatcgataacccgcggttcccca

SEQ ID NO: 394434 - DNA, 55 bp, Artificial
  Synthetic oligonucleotide
gacaatatatactagaactcttagtagcacttaagcgacacgtggcggccatccg

SEQ ID NO: 394435 - DNA, 53 bp, Artificial
  Synthetic oligonucleotide
gacaatatcagcaaggccttagagtctgtgcaagagcaactgctgactctgta

SEQ ID NO: 394436 - DNA, 60 bp, Artificial
  Synthetic oligonucleotide
gacaatatgcgcgtaagcaaatctgtgaaacactcgagggttcagaacgtctggtgcaca

SEQ ID NO: 394437 - DNA, 60 bp, Artificial
  Synthetic oligonucleotide
gacaatattagaaatggtcatgttattaatcaactgatggaagctctaatgcagctgtca

SEQ ID NO: 394438 - DNA, 57 bp, Artificial
  Synthetic oligonucleotide
gacaatattcaccgcttcccctccggcggccaatataaagacggtactaagcagata

SEQ ID NO: 394439 - DNA, 56 bp, Artificial
  Synthetic oligonucleotide
gacaatcacgaatgtttattcctcacattacacttagttttagtaatagacggacg

SEQ ID NO: 394440 - DNA, 55 bp, Artificial
  Synthetic oligonucleotide
gacaatcacggaactgaactaacttccggctgtatggaacgttgagagtgaattg

SEQ ID NO: 394441 - DNA, 58 bp, Artificial
  Synthetic oligonucleotide
gacaatcatcaagggataccggtaggcggtccctctatgggctacctcatgtcctacc

SEQ ID NO: 394442 - DNA, 52 bp, Artificial
  Synthetic oligonucleotide
gacaatcattcagtgtagacacatgctgtgaccattgtaaccgtcgagttag

SEQ ID NO: 394443 - DNA, 58 bp, Artificial
  Synthetic oligonucleotide
gacaatccaattagatacatatcgaccccggatgagggaaaggcgttagagcgactta

SEQ ID NO: 394444 - DNA, 60 bp, Artificial
  Synthetic oligonucleotide
gacaatccatgcaaagttgggttacagacatcggctattgaaggagcatggggttcaggt

SEQ ID NO: 394445 - DNA, 60 bp, Artificial
  Synthetic oligonucleotide
gacaatcgatgtgttacatacgcaaaaacaagcatcagttttggggaacgcattcagcgc

SEQ ID NO: 394446 - DNA, 55 bp, Artificial
  Synthetic oligonucleotide
gacaatcgccccacgtaattatgaccaagtgttgtaaattcggacagccttgcaa

SEQ ID NO: 394447 - DNA, 60 bp, Artificial
  Synthetic oligonucleotide
gacaatcgtattaaacactgactggagtggctacagtgggtccttcatggactattgggc

SEQ ID NO: 394448 - DNA, 60 bp, Artificial
  Synthetic oligonucleotide
gacaatctcatctgaggggagatactgatgttgtaacagttgtgactttcgaatttagta

SEQ ID NO: 394449 - DNA, 55 bp, Artificial
  Synthetic oligonucleotide
gacaatctcgtgtaatatattctctccggagttatggtttcgaccgaaaagttgt

SEQ ID NO: 394450 - DNA, 55 bp, Artificial
  Synthetic oligonucleotide
gacaatctctttccgaattccaaaatgcctcgctctgcccgaggcgacctttctt

SEQ ID NO: 394451 - DNA, 55 bp, Artificial
  Synthetic oligonucleotide
gacaatcttatggaggacagacatagtccaatatcgctaatacaagtaatgcgca

SEQ ID NO: 394452 - DNA, 60 bp, Artificial
  Synthetic oligonucleotide
gacaatcttgccaatctagctttggacactcgcagtatttgcgatgctatatcttcgtcg

SEQ ID NO: 394453 - DNA, 58 bp, Artificial
  Synthetic oligonucleotide
gacaatgaacctggatcgggaaattggcctgatggttccaacattgggtttatgccca

SEQ ID NO: 394454 - DNA, 60 bp, Artificial
  Synthetic oligonucleotide
gacaatgaatgcatagagtctgtcaaaaatggtacctatgactatcccaaataccaggat

SEQ ID NO: 394455 - DNA, 60 bp, Artificial
  Synthetic oligonucleotide
gacaatgaatgcatagagtctgtcaagaatggtacttataactatcccaaataccaaggt

SEQ ID NO: 394456 - DNA, 60 bp, Artificial
  Synthetic oligonucleotide
gacaatgaatgcatggaaagtgttagaaatggaacgtatgactatccacaatactcagaa

SEQ ID NO: 394457 - DNA, 50 bp, Artificial
  Synthetic oligonucleotide
gacaatgaatggaatcggctgctcaccagctagtaccgaaacatatgaag

SEQ ID NO: 394458 - DNA, 55 bp, Artificial
  Synthetic oligonucleotide
gacaatgaccggcgatatttaccgtaacgcgccgattaacgattgcaacgaacta

SEQ ID NO: 394459 - DNA, 50 bp, Artificial
  Synthetic oligonucleotide
gacaatgactgcaccaacttttgccctaacacctacagagcactcagcga

SEQ ID NO: 394460 - DNA, 55 bp, Artificial
  Synthetic oligonucleotide
gacaatgagtatccagacaatcagatgggttgttacaacatagacgaacatccac

SEQ ID NO: 394461 - DNA, 55 bp, Artificial
  Synthetic oligonucleotide
gacaatgcaaactttagtctcccagagtcagggccaactgaagtgtatgatgttg

SEQ ID NO: 394462 - DNA, 55 bp, Artificial
  Synthetic oligonucleotide
gacaatgcaaaggttatgtagtcagatttccaaattacgttgccaggttgggtgg

SEQ ID NO: 394463 - DNA, 60 bp, Artificial
  Synthetic oligonucleotide
gacaatgcacccatcatcaatagggacgcaacaaaactctatacccaaagtcatcgaagg

SEQ ID NO: 394464 - DNA, 55 bp, Artificial
  Synthetic oligonucleotide
gacaatgcatcagtctttcagggaaatcacctggaggtcttccaggcattagaga

SEQ ID NO: 394465 - DNA, 60 bp, Artificial
  Synthetic oligonucleotide
gacaatgcatgtaattgactcatttggatccctcactacaggttatcatgtcttaaaggc

SEQ ID NO: 394466 - DNA, 53 bp, Artificial
  Synthetic oligonucleotide
gacaatgcatgtaattgattcgtttgggtcattaacagttggataccatgtgc

SEQ ID NO: 394467 - DNA, 55 bp, Artificial
  Synthetic oligonucleotide
gacaatgcgagaatgtccctacgtcaggttttgaaaggtccaaaatttcaggccc

SEQ ID NO: 394468 - DNA, 60 bp, Artificial
  Synthetic oligonucleotide
gacaatgctctgaggctagctgaaaacaaagatgtcttagtaacaagagaaccctacatc

SEQ ID NO: 394469 - DNA, 51 bp, Artificial
  Synthetic oligonucleotide
gacaatggagctgtggctgtactaaaatacaacggaataataactggaacc

SEQ ID NO: 394470 - DNA, 54 bp, Artificial
  Synthetic oligonucleotide
gacaatggataccggcaggtattggagttacaggcgttataattgcagttatcg

SEQ ID NO: 394471 - DNA, 60 bp, Artificial
  Synthetic oligonucleotide
gacaatggatctgctctgactgaagctataaatagccttccaagtcaccctctgattgcc

SEQ ID NO: 394472 - DNA, 55 bp, Artificial
  Synthetic oligonucleotide
gacaatggccctggatacacctcatctaactttcgtgccttctgttctaaattac

SEQ ID NO: 394473 - DNA, 60 bp, Artificial
  Synthetic oligonucleotide
gacaatggctggatcaagtagcaaacagacgaactctacgctgcgtcgattctgttggac

SEQ ID NO: 394474 - DNA, 55 bp, Artificial
  Synthetic oligonucleotide
gacaatgggccaaactttgtctcagcagaaatgcaggccatggtatggtggctca

SEQ ID NO: 394475 - DNA, 60 bp, Artificial
  Synthetic oligonucleotide
gacaatggggctgttgctgtattgaaatacaatggcataataccagacactatcaaaagt

SEQ ID NO: 394476 - DNA, 60 bp, Artificial
  Synthetic oligonucleotide
gacaatggtatgattggaaatgtatccaaagattcataggccatctcaattttgttttac

SEQ ID NO: 394477 - DNA, 55 bp, Artificial
  Synthetic oligonucleotide
gacaatgtaaaggttatgtagtcagaattccaaattacttggccagcactcgtgg

SEQ ID NO: 394478 - DNA, 55 bp, Artificial
  Synthetic oligonucleotide
gacaatgtagtgaaggacgcactgcggctgcagatgctagctgacacatgccccg

SEQ ID NO: 394479 - DNA, 60 bp, Artificial
  Synthetic oligonucleotide
gacaatgtatatacaccataacaagtctattctcactgctacctggggtagcacactcta

SEQ ID NO: 394480 - DNA, 51 bp, Artificial
  Synthetic oligonucleotide
gacaatgtccctaatggttcggaagagactgtcggtggtcccctcaatttt

SEQ ID NO: 394481 - DNA, 60 bp, Artificial
  Synthetic oligonucleotide
gacaatgtggactcttcttctcattattgaatccatcctctgggcagcaagtgcagcaga

SEQ ID NO: 394482 - DNA, 60 bp, Artificial
  Synthetic oligonucleotide
gacaatgttatgcttgattgggctctctgagctccaacaattgacgcagaatctcccggg

SEQ ID NO: 394483 - DNA, 55 bp, Artificial
  Synthetic oligonucleotide
gacaatgttatgggaatgattgggatactacctgatttaaccccaagcactgaga

SEQ ID NO: 394484 - DNA, 55 bp, Artificial
  Synthetic oligonucleotide
gacaatgtttaatcccgatcatgcttatacgcatatcatcttctggagaggatgg

SEQ ID NO: 394485 - DNA, 55 bp, Artificial
  Synthetic oligonucleotide
gacaattacggatgaccaaattgaggtgaccaatgccactgaactggtccagagc

SEQ ID NO: 394486 - DNA, 60 bp, Artificial
  Synthetic oligonucleotide
gacaattaggagaactaagagatgaatttaacaatttatcacaacaaatcgctatgtcac

SEQ ID NO: 394487 - DNA, 55 bp, Artificial
  Synthetic oligonucleotide
gacaattaggagccttcctcaccaaggtgcctctaaaacgactagaagaacttct

SEQ ID NO: 394488 - DNA, 55 bp, Artificial
  Synthetic oligonucleotide
gacaattatgccattgaggtctcttacgcgtacaagctgggtgagttagctctgt

SEQ ID NO: 394489 - DNA, 55 bp, Artificial
  Synthetic oligonucleotide
gacaattatgggataactagagagcaagcatttaatctgttacggtcaaacccca

SEQ ID NO: 394490 - DNA, 53 bp, Artificial
  Synthetic oligonucleotide
gacaattcaaacgaactcaacaacaaaccacccttcgaccaaacgaactccaa

SEQ ID NO: 394491 - DNA, 60 bp, Artificial
  Synthetic oligonucleotide
gacaattcaagaggcatgaattatgaaactccaatgtttaataaggtggcaatgttgatt

SEQ ID NO: 394492 - DNA, 52 bp, Artificial
  Synthetic oligonucleotide
gacaattcattgccgattgttcatgccttgctacgtggaccatttaaattcc

SEQ ID NO: 394493 - DNA, 54 bp, Artificial
  Synthetic oligonucleotide
gacaattctattacttgtatggaccgttggtcgtcaggacctagttcgctagat

SEQ ID NO: 394494 - DNA, 53 bp, Artificial
  Synthetic oligonucleotide
gacaattctcaaatgggccgtatttagttaaaaacactattaagttgaaacaa

SEQ ID NO: 394495 - DNA, 55 bp, Artificial
  Synthetic oligonucleotide
gacaattctggcatataaaggatccaagaatgtatggatcaaggacagtggtggc

SEQ ID NO: 394496 - DNA, 55 bp, Artificial
  Synthetic oligonucleotide
gacaattctgtcgtcctctcgcgaaactatacatcgtttccatggctgctaggct

SEQ ID NO: 394497 - DNA, 59 bp, Artificial
  Synthetic oligonucleotide
gacaattgatattcatctctttggagactcaacataattaaaagccgatacctccctat

SEQ ID NO: 394498 - DNA, 59 bp, Artificial
  Synthetic oligonucleotide
gacaattggaagggctccaataggcccgttctatatataaatatggcagattatagtat

SEQ ID NO: 394499 - DNA, 59 bp, Artificial
  Synthetic oligonucleotide
gacaattggaataacgggccctgacgccaaagcagtggcagtggtgcattatgggggaa

SEQ ID NO: 394500 - DNA, 59 bp, Artificial
  Synthetic oligonucleotide
gacaattggggttttagcgacgcctgaaataccttacacaatggaatcagcgaatgaga

SEQ ID NO: 394501 - DNA, 52 bp, Artificial
  Synthetic oligonucleotide
gacaatttaatatcagtgtcggatgcaataagctcaaagtttgacggaaatt

SEQ ID NO: 394502 - DNA, 60 bp, Artificial
  Synthetic oligonucleotide
gacaatttgaattggtcaggatacagtgggtccttcactctgccagtagaattgtctggg

SEQ ID NO: 394503 - DNA, 55 bp, Artificial
  Synthetic oligonucleotide
gacaatttgcattcatggatgcgttcagtacacctattacacacacgctcggacg

SEQ ID NO: 394504 - DNA, 56 bp, Artificial
  Synthetic oligonucleotide
gacaatttgtccacaccacaaacatggcagcccgacttccaatcgacgcctttggc

SEQ ID NO: 394505 - DNA, 53 bp, Artificial
  Synthetic oligonucleotide
gacaattttacctgtgtcaactcgccctgtttaacgggggccccatctacctc

SEQ ID NO: 394506 - DNA, 55 bp, Artificial
  Synthetic oligonucleotide
gacacaaaatacacgtgatcggaatacgtgcgtgacaaatagacgtatagagcgg

SEQ ID NO: 394507 - DNA, 56 bp, Artificial
  Synthetic oligonucleotide
gacacaaaattccttctcaagagcatatacaaaccagatctcctagagcgaatcat

SEQ ID NO: 394508 - DNA, 51 bp, Artificial
  Synthetic oligonucleotide
gacacaaaccacttaaatctggaaacctgacgttcggttctagtggtctga

SEQ ID NO: 394509 - DNA, 52 bp, Artificial
  Synthetic oligonucleotide
gacacaaatggggtttcacgtttggagaacatttgttacgtttcaaacgtct

SEQ ID NO: 394510 - DNA, 60 bp, Artificial
  Synthetic oligonucleotide
gacacaacaattgagaagatatctcacctcaatcttgagcgccaattgaaatggtcagaa

SEQ ID NO: 394511 - DNA, 55 bp, Artificial
  Synthetic oligonucleotide
gacacaaccctgggacagcacctccatatcaagggacagtacctcaagtctgtcc

SEQ ID NO: 394512 - DNA, 55 bp, Artificial
  Synthetic oligonucleotide
gacacaacgcaagccttgaagctgcgtcaatgtcggaatgtcgacgttcaaacga

SEQ ID NO: 394513 - DNA, 60 bp, Artificial
  Synthetic oligonucleotide
gacacaacgtgtcgtcatagctctgctagtcttagcagttggtccagcctattctgcaca

SEQ ID NO: 394514 - DNA, 55 bp, Artificial
  Synthetic oligonucleotide
gacacaactcaggaccttccagcggacacttttagtaatgatgtgacattcgatc

SEQ ID NO: 394515 - DNA, 60 bp, Artificial
  Synthetic oligonucleotide
gacacaagataatcttgtatcaccttaagcctcacacaagtgagagaattacacgcacag

SEQ ID NO: 394516 - DNA, 60 bp, Artificial
  Synthetic oligonucleotide
gacacaagctacgaccagatctatgccggatatgcgcacaccacgaacaagcgttacctc

SEQ ID NO: 394517 - DNA, 55 bp, Artificial
  Synthetic oligonucleotide
gacacaaggctataggtacagtgttaataggacctacgcctgtcaacataattgg

SEQ ID NO: 394518 - DNA, 52 bp, Artificial
  Synthetic oligonucleotide
gacacaaggctggaaaggctctgaggattggcataactgagaagggattagt

SEQ ID NO: 394519 - DNA, 59 bp, Artificial
  Synthetic oligonucleotide
gacacaaggtcaaattactatctcaaaaccagtggttgaacttggcttgcctagcattc

SEQ ID NO: 394520 - DNA, 60 bp, Artificial
  Synthetic oligonucleotide
gacacaagttgcaaatctcgagataaatgctctacctttcagagcttacaatcttatcta

SEQ ID NO: 394521 - DNA, 60 bp, Artificial
  Synthetic oligonucleotide
gacacaataatggaaaagaacgttactgttacacatgctcaagacatactggagaagaca

SEQ ID NO: 394522 - DNA, 55 bp, Artificial
  Synthetic oligonucleotide
gacacaatcctgcatgaacgagcgcaagagaatggcagaccaagagcggagaacg

SEQ ID NO: 394523 - DNA, 55 bp, Artificial
  Synthetic oligonucleotide
gacacaatggattgctgcaatcgctagaggtcacaactctggtgtatgcctactg

SEQ ID NO: 394524 - DNA, 50 bp, Artificial
  Synthetic oligonucleotide
gacacacaaacgttattcgacgggaaaccgccgtaacgtacagggatgag

SEQ ID NO: 394525 - DNA, 60 bp, Artificial
  Synthetic oligonucleotide
gacacacaagccacgctctcagaactccgcctgcttgagggcccagacgagtggcttttg

SEQ ID NO: 394526 - DNA, 55 bp, Artificial
  Synthetic oligonucleotide
gacacacaatattggatcacacgatctcatagcttggcagcgatcacatcaatgt

SEQ ID NO: 394527 - DNA, 58 bp, Artificial
  Synthetic oligonucleotide
gacacacacggttcctcgggccctagaaagcctcgctcaatacaaatcattgacccga

SEQ ID NO: 394528 - DNA, 57 bp, Artificial
  Synthetic oligonucleotide
gacacaccacctctacaactcagtcgagtgtgggggtcacctacgggtattcaactg

SEQ ID NO: 394529 - DNA, 55 bp, Artificial
  Synthetic oligonucleotide
gacacaccagccgacctgattcccggtgatgtttacagccagttggcggagcacg

SEQ ID NO: 394530 - DNA, 56 bp, Artificial
  Synthetic oligonucleotide
gacacacccccccgcaaatccaagcgaccccgaatcaacctgcgattaacgagctc

SEQ ID NO: 394531 - DNA, 52 bp, Artificial
  Synthetic oligonucleotide
gacacaccggacatgtacttcatcggaccgtggtcgcagttctccgtctggc

SEQ ID NO: 394532 - DNA, 59 bp, Artificial
  Synthetic oligonucleotide
gacacacctacgtcatatgtcacgtggggaggccctactgcgcaaacgcggaagtaggc

SEQ ID NO: 394533 - DNA, 60 bp, Artificial
  Synthetic oligonucleotide
gacacacctatcaccaatcatagcaggatgtcctactgggaatcattcggagttgaccct

SEQ ID NO: 394534 - DNA, 57 bp, Artificial
  Synthetic oligonucleotide
gacacacctcaaaaactaccagtagtagacattcccttatgggccgccctgctaggc

SEQ ID NO: 394535 - DNA, 50 bp, Artificial
  Synthetic oligonucleotide
gacacacgaatagaaggaccatgggagtatggaaaatacattaagaaggg

SEQ ID NO: 394536 - DNA, 57 bp, Artificial
  Synthetic oligonucleotide
gacacacggaatcaaggatccaattacttatttgggcgacaagattgctaaattcct

SEQ ID NO: 394537 - DNA, 57 bp, Artificial
  Synthetic oligonucleotide
gacacacgggaaaagggattgaggaagttcctgaattcatagccacggaggcagctt

SEQ ID NO: 394538 - DNA, 55 bp, Artificial
  Synthetic oligonucleotide
gacacacgtcatagaccagctaactattgacgtcatacaggagacggcatttgac

SEQ ID NO: 394539 - DNA, 55 bp, Artificial
  Synthetic oligonucleotide
gacacactacagattagtgcaccaagacgaatacaccagtgctggcaatgtgaca

SEQ ID NO: 394540 - DNA, 60 bp, Artificial
  Synthetic oligonucleotide
gacacactagcaatgtacaacctgaggatatgattgaaactagatatgttcagacatcac

SEQ ID NO: 394541 - DNA, 55 bp, Artificial
  Synthetic oligonucleotide
gacacactagtggaatacaacccgaggacaccatagaaacaagatttgtgcagac

SEQ ID NO: 394542 - DNA, 60 bp, Artificial
  Synthetic oligonucleotide
gacacactgctctttcttgggccccttgagcagggcggtattattctgaagcagtggtgt

SEQ ID NO: 394543 - DNA, 55 bp, Artificial
  Synthetic oligonucleotide
gacacactttcgtcagatacaaaactgcaggctgcaatgaaatacggagcaagac

SEQ ID NO: 394544 - DNA, 50 bp, Artificial
  Synthetic oligonucleotide
gacacagaaaatcctagcttttatttaggagaacaaacaaaggatgagag

SEQ ID NO: 394545 - DNA, 54 bp, Artificial
  Synthetic oligonucleotide
gacacagacatgcaagtccttttgtgatcctcaaatcaagtagggcttattctg

SEQ ID NO: 394546 - DNA, 60 bp, Artificial
  Synthetic oligonucleotide
gacacagactttataatagtgtatgacatacaacctccttttacaattaacaagcacaca

SEQ ID NO: 394547 - DNA, 55 bp, Artificial
  Synthetic oligonucleotide
gacacagaggaactatccacgcttgtggagatggggaaccacaatcttggctttg

SEQ ID NO: 394548 - DNA, 60 bp, Artificial
  Synthetic oligonucleotide
gacacagatggcacccgtggaatcagaacagtccagcctccaacgttcttaaagcgagta

SEQ ID NO: 394549 - DNA, 60 bp, Artificial
  Synthetic oligonucleotide
gacacagcagttgtgtgaggccctaaatgtctcttggaagctccattgtgcataccgacc

SEQ ID NO: 394550 - DNA, 55 bp, Artificial
  Synthetic oligonucleotide
gacacagcatgggtcctcgctgctagaaaagctaaattggtgtattcacaaaggg

SEQ ID NO: 394551 - DNA, 55 bp, Artificial
  Synthetic oligonucleotide
gacacagcggagatggaggccagaccgggatcctcgtcgcagtcgaccgagtcct

SEQ ID NO: 394552 - DNA, 60 bp, Artificial
  Synthetic oligonucleotide
gacacagctgaaccagtatcggacgctgagtcaatccctgatccacctcctagatcctgg

SEQ ID NO: 394553 - DNA, 59 bp, Artificial
  Synthetic oligonucleotide
gacacagctgtttattttgggatgcaagccccctataggtgaacattggtccaagggca

SEQ ID NO: 394554 - DNA, 60 bp, Artificial
  Synthetic oligonucleotide
gacacaggaatctgagtgtgtctgcataaatggttcttgctttactataatgaccgatgg

SEQ ID NO: 394555 - DNA, 58 bp, Artificial
  Synthetic oligonucleotide
gacacaggatatggggctatggactttaaattgttgcaggataacaaaagtgaagtac

SEQ ID NO: 394556 - DNA, 60 bp, Artificial
  Synthetic oligonucleotide
gacacagggttggacccagtgtcttctggtgtagcgtgtactagcgtcgagccaatggac

SEQ ID NO: 394557 - DNA, 58 bp, Artificial
  Synthetic oligonucleotide
gacacagggtttggaaacatgaattttagagccctgcaagctacaaaatctggagccc

SEQ ID NO: 394558 - DNA, 54 bp, Artificial
  Synthetic oligonucleotide
gacacaggtcgtggagttggttaaaacaacgttcaccgcccaaggtccaacaga

SEQ ID NO: 394559 - DNA, 59 bp, Artificial
  Synthetic oligonucleotide
gacacagtaatcaatgatatataccccacgccctacccgctacgctcgtcagtccccca

SEQ ID NO: 394560 - DNA, 59 bp, Artificial
  Synthetic oligonucleotide
gacacagtaggtaccgcggccattgacctggctcgcgcctacgctgacgtcggggcgtc

SEQ ID NO: 394561 - DNA, 55 bp, Artificial
  Synthetic oligonucleotide
gacacagtcttcacaaggcgaatatggaacgtttaccgggcaaggtcggtgccag

SEQ ID NO: 394562 - DNA, 60 bp, Artificial
  Synthetic oligonucleotide
gacacagtgaccttgctttaccactcatctgaactatccaatagaatcggattctacgtt

SEQ ID NO: 394563 - DNA, 55 bp, Artificial
  Synthetic oligonucleotide
gacacagtggttatggaggtgtcatacacgggaagcgacaagccatgtcggatcc

SEQ ID NO: 394564 - DNA, 58 bp, Artificial
  Synthetic oligonucleotide
gacacagttcgtacgggtctggcccgacagctccccgttcaggatctcgataaccaca

SEQ ID NO: 394565 - DNA, 60 bp, Artificial
  Synthetic oligonucleotide
gacacagttgaacgctcagtgctgtacgagccggtggtagttcgcgaaagcgtggcaccg

SEQ ID NO: 394566 - DNA, 55 bp, Artificial
  Synthetic oligonucleotide
gacacagttgaatgcagggaacacggcaagtgtgaaggaaagaatcatcgatgcg

SEQ ID NO: 394567 - DNA, 55 bp, Artificial
  Synthetic oligonucleotide
gacacagttgacatcaagcaggatcaacctcgtccaactcacccagcccaatgtg

SEQ ID NO: 394568 - DNA, 55 bp, Artificial
  Synthetic oligonucleotide
gacacataacaagcgtagtgtcctcgacgattgccatcctcgtgtgaattccggg

SEQ ID NO: 394569 - DNA, 60 bp, Artificial
  Synthetic oligonucleotide
gacacataccaaagagttgctccacacagagcacaatggaatgctgtgtgccacaaatct

SEQ ID NO: 394570 - DNA, 58 bp, Artificial
  Synthetic oligonucleotide
gacacatacttcactctctcatcaaacgggagtccggatccccgagacactccgttac

SEQ ID NO: 394571 - DNA, 60 bp, Artificial
  Synthetic oligonucleotide
gacacatagttactcctaggtgtgactattcagcagggcataataaggtaggatctctac

SEQ ID NO: 394572 - DNA, 55 bp, Artificial
  Synthetic oligonucleotide
gacacatatgagcacagacaacaattcattaggactatgaaattaccacctacag

SEQ ID NO: 394573 - DNA, 58 bp, Artificial
  Synthetic oligonucleotide
gacacatcaaaggaggctcatgtcccaaaccacaccggctcaccagtaagggtatttg

SEQ ID NO: 394574 - DNA, 55 bp, Artificial
  Synthetic oligonucleotide
gacacatctatagcggatgcccagggaggtggggtctcattaagcaatggaaccc

SEQ ID NO: 394575 - DNA, 60 bp, Artificial
  Synthetic oligonucleotide
gacacatctttgcaggatcgggccattgcacatccagcattgcactcacgaggctaagag

SEQ ID NO: 394576 - DNA, 60 bp, Artificial
  Synthetic oligonucleotide
gacacatgcattaaaatagttgtggcagtgctactatttgttatccgtactgtccaaaaa

SEQ ID NO: 394577 - DNA, 55 bp, Artificial
  Synthetic oligonucleotide
gacacatgctttgtttcatgaagtcgcaaaattggacgtggtcaaactgttgtac

SEQ ID NO: 394578 - DNA, 55 bp, Artificial
  Synthetic oligonucleotide
gacacatggaatggtttcacggaagagacgcaccctaaaatgcctatctataggg

SEQ ID NO: 394579 - DNA, 55 bp, Artificial
  Synthetic oligonucleotide
gacacatggtaattctgactgatgtagttgttgattataacatcgtcaccttgtc

SEQ ID NO: 394580 - DNA, 52 bp, Artificial
  Synthetic oligonucleotide
gacacatgtgaaaatgtgcaggcaggggaagaggcaccgagggcgttgtttc

SEQ ID NO: 394581 - DNA, 57 bp, Artificial
  Synthetic oligonucleotide
gacacattaaaagattgtacttgggagttccattccagaaagtctaaatatatttca

SEQ ID NO: 394582 - DNA, 56 bp, Artificial
  Synthetic oligonucleotide
gacacattaggttacgacctaatacgtgatctcatcttggtgattcgtgctaggga

SEQ ID NO: 394583 - DNA, 56 bp, Artificial
  Synthetic oligonucleotide
gacacattcaacatgaacttaaattttgcactcaataacaccttttcaccagtgcc

SEQ ID NO: 394584 - DNA, 55 bp, Artificial
  Synthetic oligonucleotide
gacacattccgaaaattcggattcctgctcaaggtagaggacccggtttacgagc

SEQ ID NO: 394585 - DNA, 60 bp, Artificial
  Synthetic oligonucleotide
gacacattgtccaaatgactaccagtcagctcattacctcaacaatgacgggaaaatggc

SEQ ID NO: 394586 - DNA, 55 bp, Artificial
  Synthetic oligonucleotide
gacaccaaaatagggttgctggacgatgctacacagcagtgttgggtatatatgg

SEQ ID NO: 394587 - DNA, 55 bp, Artificial
  Synthetic oligonucleotide
gacaccaactctacaaagactgctgacaccaagatatctgcaagggactttccgc

SEQ ID NO: 394588 - DNA, 51 bp, Artificial
  Synthetic oligonucleotide
gacaccaatgggtaaattgtactccgatatatcggagatcaattggaaccc

SEQ ID NO: 394589 - DNA, 51 bp, Artificial
  Synthetic oligonucleotide
gacaccaattggtttgggcaccgatatactggtgcctaatgggttccctgt

SEQ ID NO: 394590 - DNA, 58 bp, Artificial
  Synthetic oligonucleotide
gacaccacccgcgcaggtgtggacaccaattcggccctataccatcccaaatggatcg

SEQ ID NO: 394591 - DNA, 55 bp, Artificial
  Synthetic oligonucleotide
gacaccaccttggtttggtgtccatccctggaatgtggcgggctttccaggggtg

SEQ ID NO: 394592 - DNA, 56 bp, Artificial
  Synthetic oligonucleotide
gacaccagacccgagggcctggccggagagcaaagaagcgcctacgcttttctccg

SEQ ID NO: 394593 - DNA, 59 bp, Artificial
  Synthetic oligonucleotide
gacaccagacgaaagagccatctcagcaaaatttccccgttttaaagatgcatcgcact

SEQ ID NO: 394594 - DNA, 55 bp, Artificial
  Synthetic oligonucleotide
gacaccaggattgagccaccatcggaatcgacatggcgtgttcaacgctctcaaa

SEQ ID NO: 394595 - DNA, 50 bp, Artificial
  Synthetic oligonucleotide
gacaccatattatcagttgggtcaaccacacttgcaggtattataaactt

SEQ ID NO: 394596 - DNA, 60 bp, Artificial
  Synthetic oligonucleotide
gacaccattgctcggtgcagctgtcaaactggagtgtattattgcaactctcgcaggaaa

SEQ ID NO: 394597 - DNA, 55 bp, Artificial
  Synthetic oligonucleotide
gacacccaaatcatgagagaaattgggtctataaccttagagaagttggcaacac

SEQ ID NO: 394598 - DNA, 51 bp, Artificial
  Synthetic oligonucleotide
gacacccaaatctatactcatgatgatactaaagacagttacgagaatgca

SEQ ID NO: 394599 - DNA, 60 bp, Artificial
  Synthetic oligonucleotide
gacacccaacattcaccgtgcatacactcggggtccctgacaaggtgagtatcagaacta

SEQ ID NO: 394600 - DNA, 55 bp, Artificial
  Synthetic oligonucleotide
gacacccacaatcactaaacttattggtcaattgggccgcgcagcggcactgacg

SEQ ID NO: 394601 - DNA, 57 bp, Artificial
  Synthetic oligonucleotide
gacacccatactactatcttaagtggaaggacgaggcaaataggtattgtgggagcg

SEQ ID NO: 394602 - DNA, 53 bp, Artificial
  Synthetic oligonucleotide
gacaccccatcccaacccgccggtttgcgggagggcccgtgattaatctgacg

SEQ ID NO: 394603 - DNA, 60 bp, Artificial
  Synthetic oligonucleotide
gacaccccgactgtagtcattcatattgcagacacatctggggattattatttgcatccc

SEQ ID NO: 394604 - DNA, 60 bp, Artificial
  Synthetic oligonucleotide
gacacccctcggggtgatgaggtcaaaggaactcaagaatccatggcccatactgttgca

SEQ ID NO: 394605 - DNA, 52 bp, Artificial
  Synthetic oligonucleotide
gacacccgtccacggcttatatggtaaagagaaggcatatgggaggaaatac

SEQ ID NO: 394606 - DNA, 54 bp, Artificial
  Synthetic oligonucleotide
gacaccctagtgttccttggtcccatggaagggggaggtctaatattcaaagat

SEQ ID NO: 394607 - DNA, 55 bp, Artificial
  Synthetic oligonucleotide
gacaccctataagtatggttgcactatcacctcttggcgctttggtggcttgcta

SEQ ID NO: 394608 - DNA, 55 bp, Artificial
  Synthetic oligonucleotide
gacaccctgttgtatacctaactgacgttttacaaaggatttggtaatggcattg

SEQ ID NO: 394609 - DNA, 60 bp, Artificial
  Synthetic oligonucleotide
gacaccgaaatggacgatatgtgggaacgcagcgcattatgctgtacgcttagagaaaag

SEQ ID NO: 394610 - DNA, 58 bp, Artificial
  Synthetic oligonucleotide
gacaccgacaatcacttccacccgtctcctcttattggcggattcgggtgcaagcacc

SEQ ID NO: 394611 - DNA, 55 bp, Artificial
  Synthetic oligonucleotide
gacaccgaggttccttctgcgtgcgctatctgatagtcttcggctctcttgctcc

SEQ ID NO: 394612 - DNA, 50 bp, Artificial
  Synthetic oligonucleotide
gacaccgagttttctacaagggactttccgttggggactttccaggggag

SEQ ID NO: 394613 - DNA, 60 bp, Artificial
  Synthetic oligonucleotide
gacaccgataatgaactcagtaacagttcgacaagatctcgaaagacagcttggagaact

SEQ ID NO: 394614 - DNA, 56 bp, Artificial
  Synthetic oligonucleotide
gacaccgataggtaaattgtactccaatatattggagtacaattggggaccaataa

SEQ ID NO: 394615 - DNA, 54 bp, Artificial
  Synthetic oligonucleotide
gacaccgatccgtgggccccgatccagtttatcggataggcaacctccgaaggg

SEQ ID NO: 394616 - DNA, 57 bp, Artificial
  Synthetic oligonucleotide
gacaccgcaaaatcttcaagtgacggagtactttctagtatggctgtcacttttaaa

SEQ ID NO: 394617 - DNA, 55 bp, Artificial
  Synthetic oligonucleotide
gacaccgcaaagggtcgggagagtgtggccttgctcttcagagagggcagacctc

SEQ ID NO: 394618 - DNA, 60 bp, Artificial
  Synthetic oligonucleotide
gacaccgccaagatcttagctaaacagcagactattgctaaatctcctggacgtcttgac

SEQ ID NO: 394619 - DNA, 60 bp, Artificial
  Synthetic oligonucleotide
gacaccgccatgaccatgctaacacctgacatttctgccggtagcgcctcctgcaactgg

SEQ ID NO: 394620 - DNA, 55 bp, Artificial
  Synthetic oligonucleotide
gacaccgcccacaataacacgagtgagctgctcttcgccgcccttttagagcgca

SEQ ID NO: 394621 - DNA, 60 bp, Artificial
  Synthetic oligonucleotide
gacaccgcctcagctctgtatcgagaagcctatcgccgcgtcgcagaagatctcaatctc

SEQ ID NO: 394622 - DNA, 60 bp, Artificial
  Synthetic oligonucleotide
gacaccgcctcagctctgtatcgagaagccttagagtcgcccgggcattgctcacctcac

SEQ ID NO: 394623 - DNA, 60 bp, Artificial
  Synthetic oligonucleotide
gacaccgcctcgagaagccttagagtcgcccgagcattgctcacctcaccatactgcact

SEQ ID NO: 394624 - DNA, 50 bp, Artificial
  Synthetic oligonucleotide
gacaccgcgggtgccgccaagcgggttactgcgaacttaccaacattcca

SEQ ID NO: 394625 - DNA, 56 bp, Artificial
  Synthetic oligonucleotide
gacaccggacaaagcttttgggcacttagagaagttggaacttcccactgaccaca

SEQ ID NO: 394626 - DNA, 55 bp, Artificial
  Synthetic oligonucleotide
gacaccggttaagagtgtgaggatttcaaaagtcgataaggttttagctcgcgag

SEQ ID NO: 394627 - DNA, 53 bp, Artificial
  Synthetic oligonucleotide
gacaccgtcaaattgacatggttgactcacaataactgtaaattaaaacagag

SEQ ID NO: 394628 - DNA, 55 bp, Artificial
  Synthetic oligonucleotide
gacaccgtcaagccgtgctgccaaccagccgtgctgctgaatcgccacattcgac

SEQ ID NO: 394629 - DNA, 60 bp, Artificial
  Synthetic oligonucleotide
gacacctacacaagagccattgcgcagaaatgcaacattaatacgtctgatcaagccgta

SEQ ID NO: 394630 - DNA, 58 bp, Artificial
  Synthetic oligonucleotide
gacacctaccagcactacattaaaatcttggaaccgtatctacaggagtggaatatta

SEQ ID NO: 394631 - DNA, 60 bp, Artificial
  Synthetic oligonucleotide
gacacctatcctcagacgcttatggaagatggttagcgaaaaatagagatgtagaagagc

SEQ ID NO: 394632 - DNA, 55 bp, Artificial
  Synthetic oligonucleotide
gacacctatcgctttgttacctccgcggccatcacatgtcaaaagaatgcacccc

SEQ ID NO: 394633 - DNA, 55 bp, Artificial
  Synthetic oligonucleotide
gacacctcagagtggaggtcttaattggggcaccgattcaagggtagctggagac

SEQ ID NO: 394634 - DNA, 55 bp, Artificial
  Synthetic oligonucleotide
gacacctccttttataaccctgatacacaacgattagtatgggcatgtgtaggcc

SEQ ID NO: 394635 - DNA, 53 bp, Artificial
  Synthetic oligonucleotide
gacacctctcgtcatcgagtttgctgaatgtccagggaccacagtgacccagg

SEQ ID NO: 394636 - DNA, 60 bp, Artificial
  Synthetic oligonucleotide
gacacctctgtgcgatcagtccataccgtacagggcctcgagtacttggttgtctgcggg

SEQ ID NO: 394637 - DNA, 55 bp, Artificial
  Synthetic oligonucleotide
gacacctcttacctacccttccggtgctcctgtcaactctgacatcctcactctc

SEQ ID NO: 394638 - DNA, 55 bp, Artificial
  Synthetic oligonucleotide
gacacctgatgaagtaaatcgatgcctagctccgaaacttttggagtggtctccg

SEQ ID NO: 394639 - DNA, 60 bp, Artificial
  Synthetic oligonucleotide
gacacctgcaccattgaagggttggtgtatggcaatccttcctgtgatttgctactggga

SEQ ID NO: 394640 - DNA, 58 bp, Artificial
  Synthetic oligonucleotide
gacacctggaagaaaatcattactgctaatatgttgccacctggtaacccaactacta

SEQ ID NO: 394641 - DNA, 51 bp, Artificial
  Synthetic oligonucleotide
gacacctggaccgaatacgcgcgtccaagtcgaagcagctcgcccgtattc

SEQ ID NO: 394642 - DNA, 54 bp, Artificial
  Synthetic oligonucleotide
gacacctggatgtataatacacagggtgtctttccagactggcagaactacacc

SEQ ID NO: 394643 - DNA, 56 bp, Artificial
  Synthetic oligonucleotide
gacacctgttgcgtaccccccagcccaaaatatagccagcccaagttacaatccaa

SEQ ID NO: 394644 - DNA, 55 bp, Artificial
  Synthetic oligonucleotide
gacaccttaacgaaccttgtggcgcgtggcttagttgatgaagtcattcatttat

SEQ ID NO: 394645 - DNA, 60 bp, Artificial
  Synthetic oligonucleotide
gacaccttacatcgcagaaagtgcattaaagaaattatacacagacaaggatgtcaggat

SEQ ID NO: 394646 - DNA, 58 bp, Artificial
  Synthetic oligonucleotide
gacaccttcaagaaattggattatgacagtgtcacatttctgaaaagaggattcaaac

SEQ ID NO: 394647 - DNA, 50 bp, Artificial
  Synthetic oligonucleotide
gacaccttccgagcccgccgacgttaccagatattgccccgagtcttcga

SEQ ID NO: 394648 - DNA, 55 bp, Artificial
  Synthetic oligonucleotide
gacaccttctatggttgaaaagctacctaaatttgtcaggaattctccacaagcc

SEQ ID NO: 394649 - DNA, 55 bp, Artificial
  Synthetic oligonucleotide
gacacgaaacaaacaaatttaagcgcgttgacatcaacatagaacgacactggtt

SEQ ID NO: 394650 - DNA, 57 bp, Artificial
  Synthetic oligonucleotide
gacacgaaatgtcaaacccctcatggagccttaaacagcagcctcccctttcagaac

SEQ ID NO: 394651 - DNA, 60 bp, Artificial
  Synthetic oligonucleotide
gacacgaacactattgaatcgtatcttataaacatctgtcgatgtcttgaagcagaaatc

SEQ ID NO: 394652 - DNA, 55 bp, Artificial
  Synthetic oligonucleotide
gacacgacaggtaggcgtctgtactatgcgccctgtctccacgcaacaccgcctc

SEQ ID NO: 394653 - DNA, 55 bp, Artificial
  Synthetic oligonucleotide
gacacgacattaaggccgatcaatgtacgcgcaagagatgtgtagtgtcgtcgcg

SEQ ID NO: 394654 - DNA, 55 bp, Artificial
  Synthetic oligonucleotide
gacacgagaacccaaagggtccagcttatgctatcgacctatgcaatgaactacc

SEQ ID NO: 394655 - DNA, 55 bp, Artificial
  Synthetic oligonucleotide
gacacgagcctactgagtgtggaccttgatgaagacacactctcccagtacgacg

SEQ ID NO: 394656 - DNA, 55 bp, Artificial
  Synthetic oligonucleotide
gacacgagcggtcaaacctaatgcaagaagtcatcataaacggatcgcagcagct

SEQ ID NO: 394657 - DNA, 56 bp, Artificial
  Synthetic oligonucleotide
gacacgagtgctgttccgttgcttggataacatgttgggtcagttgtcacatgagg

SEQ ID NO: 394658 - DNA, 55 bp, Artificial
  Synthetic oligonucleotide
gacacgatgacatgaaccccagcgaacgttgaccgaattccttgtgtcagtaacg

SEQ ID NO: 394659 - DNA, 55 bp, Artificial
  Synthetic oligonucleotide
gacacgatggtttcacaacaccagttatcgaccaagcgctcggtgtcctcgaatc

SEQ ID NO: 394660 - DNA, 55 bp, Artificial
  Synthetic oligonucleotide
gacacgcacgaatgggatacgctttctcagcgagcccgaaaccgcattgcgatgc

SEQ ID NO: 394661 - DNA, 55 bp, Artificial
  Synthetic oligonucleotide
gacacgcagttgcgttgatggttgtatcaatcacatataagtgttgaactcgtgt

SEQ ID NO: 394662 - DNA, 51 bp, Artificial
  Synthetic oligonucleotide
gacacgcgagactcgtcgtatgcgcgggagccattcacgggtggaacacgt

SEQ ID NO: 394663 - DNA, 53 bp, Artificial
  Synthetic oligonucleotide
gacacgcggaagcgtttgggtgtgtaatgaagcgagagcgctctaagtggcat

SEQ ID NO: 394664 - DNA, 59 bp, Artificial
  Synthetic oligonucleotide
gacacgcgtcacgcgggtcgccatttggcgccacattcggcgcgtcatttgggtcgtta

SEQ ID NO: 394665 - DNA, 51 bp, Artificial
  Synthetic oligonucleotide
gacacgctagatctgttgatcatatggagttagatccattctgtttgcata

SEQ ID NO: 394666 - DNA, 59 bp, Artificial
  Synthetic oligonucleotide
gacacgcttagatatattactgagtgtgaagttgatacgttaaggtcggtgtacgatca

SEQ ID NO: 394667 - DNA, 60 bp, Artificial
  Synthetic oligonucleotide
gacacggaagacgtcgtgtgctgctcaatgtcttacacctggacaggcgcacttgtcacc

SEQ ID NO: 394668 - DNA, 60 bp, Artificial
  Synthetic oligonucleotide
gacacggagtttgttacgtccgattctgaattctgcagatgcgccttgatgacttccgct

SEQ ID NO: 394669 - DNA, 55 bp, Artificial
  Synthetic oligonucleotide
gacacggctgtggctcgtaaagcgggcgtaagatcagcttggacggaacgcgaag

SEQ ID NO: 394670 - DNA, 55 bp, Artificial
  Synthetic oligonucleotide
gacacggggttagtatagaatggcagtataaagggtataaaacacagattgaccc

SEQ ID NO: 394671 - DNA, 60 bp, Artificial
  Synthetic oligonucleotide
gacacggtatgatgggactataccaaagccattattctggaggatcagacagattaggtt

SEQ ID NO: 394672 - DNA, 60 bp, Artificial
  Synthetic oligonucleotide
gacacggttgaacctattagcgcagttgcttttgataatatgcgcattatgaacgaactg

SEQ ID NO: 394673 - DNA, 55 bp, Artificial
  Synthetic oligonucleotide
gacacggttttgcctcaccaggcgattgtggtggtatcctcagatgtcaacacgg

SEQ ID NO: 394674 - DNA, 58 bp, Artificial
  Synthetic oligonucleotide
gacacgtactttcacagcagcaccactcgaaactttacttggtgggaaggtctgtgta

SEQ ID NO: 394675 - DNA, 57 bp, Artificial
  Synthetic oligonucleotide
gacacgtaggaggagaaaatattaatcctgacgctgaagtaaacttggcagatttcc

SEQ ID NO: 394676 - DNA, 55 bp, Artificial
  Synthetic oligonucleotide
gacacgtagtaaccaggatttagaacttgtaagatactttagatgctcctttagg

SEQ ID NO: 394677 - DNA, 60 bp, Artificial
  Synthetic oligonucleotide
gacacgtatttgcctgattacaataatgaagtcgttagataacaatccattaagcaagac

SEQ ID NO: 394678 - DNA, 50 bp, Artificial
  Synthetic oligonucleotide
gacacgtcatacaacacagatcgagatcggagtctagtattgaatctttc

SEQ ID NO: 394679 - DNA, 54 bp, Artificial
  Synthetic oligonucleotide
gacacgtcatccgtgacagtggtggagttgcgagtactgccaagaaacgaaaac

SEQ ID NO: 394680 - DNA, 60 bp, Artificial
  Synthetic oligonucleotide
gacacgtccatcaggcgaacaaagtaattgcaaacacagtggaaatctacgatctgatga

SEQ ID NO: 394681 - DNA, 56 bp, Artificial
  Synthetic oligonucleotide
gacacgtgagtgtttatcctccgtgtacctaagaatactctcgacttgtacgggaa

SEQ ID NO: 394682 - DNA, 55 bp, Artificial
  Synthetic oligonucleotide
gacacgtgatggagcaattaacaatacagagacattcagacctggaggaggagat

SEQ ID NO: 394683 - DNA, 55 bp, Artificial
  Synthetic oligonucleotide
gacacgtgatggtggtatcacaaatggcacagagacattcagacctgaaggagga

SEQ ID NO: 394684 - DNA, 55 bp, Artificial
  Synthetic oligonucleotide
gacacgtggaacggtttcacggaagagacacatcccaaaatgcctatctacaggg

SEQ ID NO: 394685 - DNA, 55 bp, Artificial
  Synthetic oligonucleotide
gacacgtggcggccatccgctataatattaccggatggccgcgcgatttttttta

SEQ ID NO: 394686 - DNA, 55 bp, Artificial
  Synthetic oligonucleotide
gacacgtggtccaaaacacactgatccaactgaagtccgtctgccccacgcagag

SEQ ID NO: 394687 - DNA, 56 bp, Artificial
  Synthetic oligonucleotide
gacacgttagcccgactaactaaaccaaattacattctttcaaatcatgaaacatg

SEQ ID NO: 394688 - DNA, 57 bp, Artificial
  Synthetic oligonucleotide
gacacgttttgtatttatccttctacgcctattgcctggattttgatgctgggttaa

SEQ ID NO: 394689 - DNA, 55 bp, Artificial
  Synthetic oligonucleotide
gacactaaacacaatgaccaaagatgctgaaagaggcaaattaaagaggagagca

SEQ ID NO: 394690 - DNA, 55 bp, Artificial
  Synthetic oligonucleotide
gacactaaattgtgggagaaatcgtccaagggatggtactggaaattcccggatg

SEQ ID NO: 394691 - DNA, 60 bp, Artificial
  Synthetic oligonucleotide
gacactaatggcatgcattacgatgaacatgcggcatgttcaaactttaacaacggagaa

SEQ ID NO: 394692 - DNA, 55 bp, Artificial
  Synthetic oligonucleotide
gacactacagactaaataatcagaagaagagcacaattctgaacaccccagtccc

SEQ ID NO: 394693 - DNA, 53 bp, Artificial
  Synthetic oligonucleotide
gacactacagcttctcccccgattcatacaaatttagcgttatgggtgttacg

SEQ ID NO: 394694 - DNA, 55 bp, Artificial
  Synthetic oligonucleotide
gacactacaggctcagatcgatcattggcagctattgcgtcaagaagcagtgatg

SEQ ID NO: 394695 - DNA, 58 bp, Artificial
  Synthetic oligonucleotide
gacactagactccgccgtggcgactaggtacgaggtggataacatcgcacccgtattg

SEQ ID NO: 394696 - DNA, 60 bp, Artificial
  Synthetic oligonucleotide
gacactagcagtctgtgttgttagcacctcagcagtagagatggaaagcctaccagctgg

SEQ ID NO: 394697 - DNA, 55 bp, Artificial
  Synthetic oligonucleotide
gacactagtagagcctggagatacaataacattcgaagcaactggaaatctagtg

SEQ ID NO: 394698 - DNA, 55 bp, Artificial
  Synthetic oligonucleotide
gacactatcaggatagtcgatgattgcacgtttcaattggcatctgcacttacgc

SEQ ID NO: 394699 - DNA, 60 bp, Artificial
  Synthetic oligonucleotide
gacactatcatacatgatctacgcaaagttacaccgaacgttaacgttcattcaactagc

SEQ ID NO: 394700 - DNA, 57 bp, Artificial
  Synthetic oligonucleotide
gacactatccgtagtaagtctactaataggattggccaatttgggactgaacattgg

SEQ ID NO: 394701 - DNA, 60 bp, Artificial
  Synthetic oligonucleotide
gacactatctgtagtaagtctgctaataggactggccaacttgggtctgaatattgggct

SEQ ID NO: 394702 - DNA, 52 bp, Artificial
  Synthetic oligonucleotide
gacactatgtctaaggcgtctagttatgtatcttttgatctcgattatatcg

SEQ ID NO: 394703 - DNA, 60 bp, Artificial
  Synthetic oligonucleotide
gacactattagaccaaggagacaccataacatttgaagccactggaaatttgatagcacc

SEQ ID NO: 394704 - DNA, 55 bp, Artificial
  Synthetic oligonucleotide
gacactattgtgtatggtgatgataggctctctacctatcgcactttaccagctg

SEQ ID NO: 394705 - DNA, 55 bp, Artificial
  Synthetic oligonucleotide
gacactcaactgctctgcagaatcgctggaagccccgaattggctagacgccaga

SEQ ID NO: 394706 - DNA, 55 bp, Artificial
  Synthetic oligonucleotide
gacactcaagcttcagggcctgtccataccaccaaaccacaagctctaggtgccg

SEQ ID NO: 394707 - DNA, 59 bp, Artificial
  Synthetic oligonucleotide
gacactcaaggggacatcctacaaaatgtgcactgacaaaatgtcctttgtcaagaacc

SEQ ID NO: 394708 - DNA, 60 bp, Artificial
  Synthetic oligonucleotide
gacactcataagttcaaatgaattggagactggagacaatatatagtatgtctccaaatg

SEQ ID NO: 394709 - DNA, 55 bp, Artificial
  Synthetic oligonucleotide
gacactcatgtcaacttcgctctttccgcctcgttttaacaacttataaccaaac

SEQ ID NO: 394710 - DNA, 57 bp, Artificial
  Synthetic oligonucleotide
gacactccaagaggagaagatagtcagttcacaggatcctgcactagccccgtggga

SEQ ID NO: 394711 - DNA, 60 bp, Artificial
  Synthetic oligonucleotide
gacactccaagaggagaggatagccagttcatggggtcatgcactaatcctatgggaaac

SEQ ID NO: 394712 - DNA, 55 bp, Artificial
  Synthetic oligonucleotide
gacactcccttcattgaacaaactgccgaattgcagggagacagggtagcgactg

SEQ ID NO: 394713 - DNA, 55 bp, Artificial
  Synthetic oligonucleotide
gacactccttcagtacaattgcaccgtcagcagaatctgtggagctagtcccaac

SEQ ID NO: 394714 - DNA, 57 bp, Artificial
  Synthetic oligonucleotide
gacactcgaagatcggagttacctcgaatcttagtcgaccacgcaacgaaaacattc

SEQ ID NO: 394715 - DNA, 53 bp, Artificial
  Synthetic oligonucleotide
gacactcgggatctgagaaggggaccggggcttctataaaagcgcccggttta

SEQ ID NO: 394716 - DNA, 58 bp, Artificial
  Synthetic oligonucleotide
gacactctaatcaaacaattgtgaagtcctttgacattagtggtactctttacgttca

SEQ ID NO: 394717 - DNA, 56 bp, Artificial
  Synthetic oligonucleotide
gacactctactatttctggggcccatggaaggaggtggtataatctttaaacactg

SEQ ID NO: 394718 - DNA, 60 bp, Artificial
  Synthetic oligonucleotide
gacactctatgtcttcctggagtcagcatataaacaaagccctcagtttctagtttatgc

SEQ ID NO: 394719 - DNA, 54 bp, Artificial
  Synthetic oligonucleotide
gacactctatttatgaaaatgcctaaagagtctgtcatcgatatcctgggccaa

SEQ ID NO: 394720 - DNA, 55 bp, Artificial
  Synthetic oligonucleotide
gacactctcctgcctctcactggtggttcctctgctcccatcctcacaccagaag

SEQ ID NO: 394721 - DNA, 60 bp, Artificial
  Synthetic oligonucleotide
gacactgaaagttcacatgctgctacagctgttgttacacaggatgttagagataatgta

SEQ ID NO: 394722 - DNA, 60 bp, Artificial
  Synthetic oligonucleotide
gacactgaacacaatgacaaaggatgcagaaagaggcaaattgaaaaggagggcaattgc

SEQ ID NO: 394723 - DNA, 55 bp, Artificial
  Synthetic oligonucleotide
gacactgaacacaatgacagaagacgcagaaagaggcgaattgaagaggcgggca

SEQ ID NO: 394724 - DNA, 55 bp, Artificial
  Synthetic oligonucleotide
gacactgaatacaatgacaaaagacgccgaaagaggcaaactaaagaggagagca

SEQ ID NO: 394725 - DNA, 55 bp, Artificial
  Synthetic oligonucleotide
gacactgaatggaaatcagtatatttcaggaggagattctagtgttttgggtact

SEQ ID NO: 394726 - DNA, 51 bp, Artificial
  Synthetic oligonucleotide
gacactgacctcggtgcagttggcttgttttacaagcctagggacaagctt

SEQ ID NO: 394727 - DNA, 60 bp, Artificial
  Synthetic oligonucleotide
gacactgatcaattcgatcgcatgctgttttctggggatgactccctagccttttctttg

SEQ ID NO: 394728 - DNA, 60 bp, Artificial
  Synthetic oligonucleotide
gacactgcatatattaattctacacaagaagaaatgtttcttacgtctactctatgttta

SEQ ID NO: 394729 - DNA, 60 bp, Artificial
  Synthetic oligonucleotide
gacactgccaaagtcaccacatgacatagactttggacatcacagcagatttggaccatt

SEQ ID NO: 394730 - DNA, 55 bp, Artificial
  Synthetic oligonucleotide
gacactgccggtaacccagagtattccttctctaatagacattggaaggcgtttt

SEQ ID NO: 394731 - DNA, 55 bp, Artificial
  Synthetic oligonucleotide
gacactgcggaacgtaacgttggatcattgaccactgagctatctacacttacac

SEQ ID NO: 394732 - DNA, 60 bp, Artificial
  Synthetic oligonucleotide
gacactggatggatgagacgtccttttcagacgagcatgtcgtcacacagtttgtaaccc

SEQ ID NO: 394733 - DNA, 60 bp, Artificial
  Synthetic oligonucleotide
gacactggggatgtggtgactaaaatggcatactacaggcggcgcaatgttctcgttaag

SEQ ID NO: 394734 - DNA, 54 bp, Artificial
  Synthetic oligonucleotide
gacactgggtgggaatcagtactccgtggggatactttaactttaacgagtaca

SEQ ID NO: 394735 - DNA, 60 bp, Artificial
  Synthetic oligonucleotide
gacactgtcgacacagtgctagagaagaatgtaactgtgactcactcagttaatttactc

SEQ ID NO: 394736 - DNA, 55 bp, Artificial
  Synthetic oligonucleotide
gacactgtctccacactacaagttatggctggctaggggattatggtgggttcag

SEQ ID NO: 394737 - DNA, 60 bp, Artificial
  Synthetic oligonucleotide
gacactgttgtaagactaatagctacattattacaggtgcatgaaaatcatatattgtca

SEQ ID NO: 394738 - DNA, 55 bp, Artificial
  Synthetic oligonucleotide
gacactgtttgctccaccctgcccagattgaatgggaaagcgacccttggaaaga

SEQ ID NO: 394739 - DNA, 60 bp, Artificial
  Synthetic oligonucleotide
gacacttagtggctggcgtagactgctggtgcgcgaactcatagagttcgcgtaggtgca

SEQ ID NO: 394740 - DNA, 55 bp, Artificial
  Synthetic oligonucleotide
gacacttattgccgtaaagtcggcgttctatgagggccttccgaagataggcgta

SEQ ID NO: 394741 - DNA, 53 bp, Artificial
  Synthetic oligonucleotide
gacacttcacgttgggacgtgattcgagatgtcgcaaacagcaacaactacga

SEQ ID NO: 394742 - DNA, 55 bp, Artificial
  Synthetic oligonucleotide
gacacttcagtgtttaaaagggtggcctgtaactctagtttgagtctgtcatctc

SEQ ID NO: 394743 - DNA, 55 bp, Artificial
  Synthetic oligonucleotide
gacacttgctcgcgtgccagtctaaccccaacacttataagagaactgataccac

SEQ ID NO: 394744 - DNA, 60 bp, Artificial
  Synthetic oligonucleotide
gacacttggccacacttacagactggcagaattgcgtgtgggaggattacaacagggacc

SEQ ID NO: 394745 - DNA, 54 bp, Artificial
  Synthetic oligonucleotide
gacacttgtggctcggggctgcagtgcagattgcgcgaagttgtcacgctgaag

SEQ ID NO: 394746 - DNA, 55 bp, Artificial
  Synthetic oligonucleotide
gacactttgaacaatgtcaacggacgcgttgttattttgactagagacacatccg

SEQ ID NO: 394747 - DNA, 59 bp, Artificial
  Synthetic oligonucleotide
gacactttgttaattgtacgacatcagtaggttacatgagttgcattattcctatatgc

SEQ ID NO: 394748 - DNA, 60 bp, Artificial
  Synthetic oligonucleotide
gacacttttgaccacaccattatgagcataataagcagtttacatcttagtgttaggggc

SEQ ID NO: 394749 - DNA, 53 bp, Artificial
  Synthetic oligonucleotide
gacagaaaaccccaacgaaaagacaataataggggctttgtacttcctggcta

SEQ ID NO: 394750 - DNA, 55 bp, Artificial
  Synthetic oligonucleotide
gacagaacaatgttcatcatcctcctattgctacctttagccctatcctgctctg

SEQ ID NO: 394751 - DNA, 55 bp, Artificial
  Synthetic oligonucleotide
gacagaacaccctatagatcactgatcaggttcccaataggaacagccccagtac

SEQ ID NO: 394752 - DNA, 60 bp, Artificial
  Synthetic oligonucleotide
gacagaacatatgacgagcagatgtgtacagagaccactaagacataacataactgtagg

SEQ ID NO: 394753 - DNA, 60 bp, Artificial
  Synthetic oligonucleotide
gacagaagaacacaggtcagatactcactggatatgttggtcactgaaatgttcagagag

SEQ ID NO: 394754 - DNA, 55 bp, Artificial
  Synthetic oligonucleotide
gacagaagaatactcggctgaggtgtctaggctcaagcaaacactaacagcccgg

SEQ ID NO: 394755 - DNA, 55 bp, Artificial
  Synthetic oligonucleotide
gacagaagcgtttgtaacttgttcgttggttggcagcggttgtttcatcccgaag

SEQ ID NO: 394756 - DNA, 50 bp, Artificial
  Synthetic oligonucleotide
gacagaaggcagcacacacaaatcccctacagaaattagtagaagctatt

SEQ ID NO: 394757 - DNA, 55 bp, Artificial
  Synthetic oligonucleotide
gacagaagggatacaacgggcaatgtttcaaaggggggtgaacagaagtctacac

SEQ ID NO: 394758 - DNA, 60 bp, Artificial
  Synthetic oligonucleotide
gacagaataccggaaattacaagacaaacatcgcggatagaatagagcagattttcgaga

SEQ ID NO: 394759 - DNA, 57 bp, Artificial
  Synthetic oligonucleotide
gacagaatgagacttagaacatggacaagcctagttaaacatcatatctttacaacc

SEQ ID NO: 394760 - DNA, 57 bp, Artificial
  Synthetic oligonucleotide
gacagaatgcatcttgtataggcataaagattttctggccggtgactcctgacttac

SEQ ID NO: 394761 - DNA, 52 bp, Artificial
  Synthetic oligonucleotide
gacagaatgtaaagcatctcgttgtaagactaagaacctcgtcggtgataat

SEQ ID NO: 394762 - DNA, 55 bp, Artificial
  Synthetic oligonucleotide
gacagaattacgtttcgatcgggagaaatcatcgattggtattaggagatgagcc

SEQ ID NO: 394763 - DNA, 50 bp, Artificial
  Synthetic oligonucleotide
gacagaatttcatggagcaaatagacaaccagatcattcgagaactcagt

SEQ ID NO: 394764 - DNA, 55 bp, Artificial
  Synthetic oligonucleotide
gacagacaaccaccatttatattagataagcttacatatccactatgtcacccac

SEQ ID NO: 394765 - DNA, 55 bp, Artificial
  Synthetic oligonucleotide
gacagacaacccagtgatgaaaattggttgaattgtgatggcaccctccttggga

SEQ ID NO: 394766 - DNA, 54 bp, Artificial
  Synthetic oligonucleotide
gacagacaccgataggtaaattgggtaccgataggtaaattgggtaccgatata

SEQ ID NO: 394767 - DNA, 56 bp, Artificial
  Synthetic oligonucleotide
gacagacattgtaaggtgcggtatgtttcaggacccagccgaaagaccctacaaac

SEQ ID NO: 394768 - DNA, 54 bp, Artificial
  Synthetic oligonucleotide
gacagaccaagtccgcgccagccggggatctcgtgcccgtagtaggggttaact

SEQ ID NO: 394769 - DNA, 59 bp, Artificial
  Synthetic oligonucleotide
gacagaccgttgttaagcggactgggtgcttctagtattggtgatgtggctagtgagtt

SEQ ID NO: 394770 - DNA, 59 bp, Artificial
  Synthetic oligonucleotide
gacagacctgttcctgctactatcaccttccacgccaaagggatcacctcccagttctc

SEQ ID NO: 394771 - DNA, 59 bp, Artificial
  Synthetic oligonucleotide
gacagacgccctaatgacgggctttaccggcgactttgactcagtgatcgactgtaata

SEQ ID NO: 394772 - DNA, 60 bp, Artificial
  Synthetic oligonucleotide
gacagacgctactgaggcacgtatgaacggtgttgtggcagacgaatctttcaaatgcat

SEQ ID NO: 394773 - DNA, 57 bp, Artificial
  Synthetic oligonucleotide
gacagacggtcgccaacaacccgaagatcgagcagtcgcttcttaaagaaacacttg

SEQ ID NO: 394774 - DNA, 59 bp, Artificial
  Synthetic oligonucleotide
gacagactacggtgatggggccgcctcgtgcgagcctatcgttaggtgtgtttcggatg

SEQ ID NO: 394775 - DNA, 55 bp, Artificial
  Synthetic oligonucleotide
gacagactagaagctatggcaagactcaggaatgaggaaagcgaaaagatggcaa

SEQ ID NO: 394776 - DNA, 57 bp, Artificial
  Synthetic oligonucleotide
gacagactattggcaagccacctggcttcctgagtgggagtttgttaatacccctcc

SEQ ID NO: 394777 - DNA, 60 bp, Artificial
  Synthetic oligonucleotide
gacagactcatccggaaaggatacccctggaggctattgtctagaagagtggatgctcgt

SEQ ID NO: 394778 - DNA, 55 bp, Artificial
  Synthetic oligonucleotide
gacagactccgaaatgaacaaactcttcgaaagagttaggcgccaactaagagag

SEQ ID NO: 394779 - DNA, 55 bp, Artificial
  Synthetic oligonucleotide
gacagactccgaaatgaacaaactctttgaacgagttaggcgacagttacgggag

SEQ ID NO: 394780 - DNA, 60 bp, Artificial
  Synthetic oligonucleotide
gacagactgaagttatagccagagatgttaatagagctctcatccttagtcacaatttgc

SEQ ID NO: 394781 - DNA, 55 bp, Artificial
  Synthetic oligonucleotide
gacagacttgtatccacagaacgtaaggatatcgttaaagtcagaattgcgcttg

SEQ ID NO: 394782 - DNA, 55 bp, Artificial
  Synthetic oligonucleotide
gacagactttttgatcttgtgcagggggccttcctaaccttaaatgctaccaacc

SEQ ID NO: 394783 - DNA, 60 bp, Artificial
  Synthetic oligonucleotide
gacagagacgtggatgtcatcggagggggcatggaaacatgcccagagagtggagagctg

SEQ ID NO: 394784 - DNA, 60 bp, Artificial
  Synthetic oligonucleotide
gacagagagctatactcgaaagagtacggctattctaacgccatccagactgaagacccg

SEQ ID NO: 394785 - DNA, 55 bp, Artificial
  Synthetic oligonucleotide
gacagagatatgctgagctcatccatggcgaacttgtttagcaactttgtctcag

SEQ ID NO: 394786 - DNA, 55 bp, Artificial
  Synthetic oligonucleotide
gacagagcaagtcaattcttcacgtagtgtagtattgtttaagacagaaagtggt

SEQ ID NO: 394787 - DNA, 60 bp, Artificial
  Synthetic oligonucleotide
gacagagcagacttggctgaacataggcttgaggcgatttgtgcagctatgatagagtcc

SEQ ID NO: 394788 - DNA, 55 bp, Artificial
  Synthetic oligonucleotide
gacagagccgctctaagttcctacggacattcaaacgaaggtcctccatgggcag

SEQ ID NO: 394789 - DNA, 57 bp, Artificial
  Synthetic oligonucleotide
gacagagcgaaatcgggggaactacattaacgccaattatgtagatggcttcgaacg

SEQ ID NO: 394790 - DNA, 55 bp, Artificial
  Synthetic oligonucleotide
gacagagcgaggaacattcacggattgtttacaatatgcaatgctgcagtcacgc

SEQ ID NO: 394791 - DNA, 55 bp, Artificial
  Synthetic oligonucleotide
gacagagcgaggcaccaggagaatgggctcgaatccgtgttcgtccgcatgtggc

SEQ ID NO: 394792 - DNA, 60 bp, Artificial
  Synthetic oligonucleotide
gacagaggcaaagatcatgttagacaacatacacatgcccaatgggctggtggcccagct

SEQ ID NO: 394793 - DNA, 60 bp, Artificial
  Synthetic oligonucleotide
gacagaggtctcgactactattgcaaatacaactagtgcaactagttcaataacgacaca

SEQ ID NO: 394794 - DNA, 60 bp, Artificial
  Synthetic oligonucleotide
gacagagtaataacactcaaagcaggaaatacaattgtcaattctcaggcttctgaaggt

SEQ ID NO: 394795 - DNA, 58 bp, Artificial
  Synthetic oligonucleotide
gacagagtgactggtcaagggctaaaagactactctcgcgttacatatgcattccatc

SEQ ID NO: 394796 - DNA, 60 bp, Artificial
  Synthetic oligonucleotide
gacagagtgatggtatcacctctggctgtgacgtggtggaacagaaatggaccaacgaca

SEQ ID NO: 394797 - DNA, 55 bp, Artificial
  Synthetic oligonucleotide
gacagagtgttcaacgtttatgactgcaattaaggcatgtgactctgcaatgtgt

SEQ ID NO: 394798 - DNA, 60 bp, Artificial
  Synthetic oligonucleotide
gacagagttatagaattaggacaaagaattggtagagctatttgcaacatacctagaaga

SEQ ID NO: 394799 - DNA, 55 bp, Artificial
  Synthetic oligonucleotide
gacagataaaagagacctggacactctgggagctgcctacgatgagacaaaacgg

SEQ ID NO: 394800 - DNA, 58 bp, Artificial
  Synthetic oligonucleotide
gacagatccagagctgtgctagtgatgttaggcctgtagggattgcttttcagttcac

SEQ ID NO: 394801 - DNA, 55 bp, Artificial
  Synthetic oligonucleotide
gacagatccgtgagattagtgagcggattcttgagtcttgtttgggacgacctgc

SEQ ID NO: 394802 - DNA, 55 bp, Artificial
  Synthetic oligonucleotide
gacagatctgattaatagcatggtcagttacaatatcccggctcagttgtccatg

SEQ ID NO: 394803 - DNA, 55 bp, Artificial
  Synthetic oligonucleotide
gacagatgaacaagtatgccttgaagttgggcactgcaattatgagatgctgagg

SEQ ID NO: 394804 - DNA, 60 bp, Artificial
  Synthetic oligonucleotide
gacagatgcattctcaatctcaaagtcacagattagatttcctaaatcatcattgaatat

SEQ ID NO: 394805 - DNA, 51 bp, Artificial
  Synthetic oligonucleotide
gacagatggcgcaaagaaagagccggagcccctgaggactccggctccgat

SEQ ID NO: 394806 - DNA, 60 bp, Artificial
  Synthetic oligonucleotide
gacagatggtgatatcaggttaattgtccacgtctattgtttgagtagctacagttaacg

SEQ ID NO: 394807 - DNA, 57 bp, Artificial
  Synthetic oligonucleotide
gacagatgtgtacgcctacggggatgtttcaaagtggacgatacgacaattacgagg

SEQ ID NO: 394808 - DNA, 59 bp, Artificial
  Synthetic oligonucleotide
gacagattgaatttacatgacaattttgaatccttatgggacacgataacaacttcaaa

SEQ ID NO: 394809 - DNA, 52 bp, Artificial
  Synthetic oligonucleotide
gacagattgctgcatttagtctaaactaaacgaatatggccactgttaattg

SEQ ID NO: 394810 - DNA, 60 bp, Artificial
  Synthetic oligonucleotide
gacagattgcttcaggtcttctatcagacactaatgtggttcgttcagagagctatttat

SEQ ID NO: 394811 - DNA, 55 bp, Artificial
  Synthetic oligonucleotide
gacagattggcaaaggcctggacccgtccagagaaccgccaagtcagtaacgtgc

SEQ ID NO: 394812 - DNA, 60 bp, Artificial
  Synthetic oligonucleotide
gacagcaaacattaaaatgctgtataaatcagatacaatgattatctattccaaagcaac

SEQ ID NO: 394813 - DNA, 55 bp, Artificial
  Synthetic oligonucleotide
gacagcaaagaattacttatcgcagatagcttttacagagaagagtacgctttgt

SEQ ID NO: 394814 - DNA, 60 bp, Artificial
  Synthetic oligonucleotide
gacagcaataatcagagacctgaagttcacttgagagaggttagagttaggagagccttg

SEQ ID NO: 394815 - DNA, 60 bp, Artificial
  Synthetic oligonucleotide
gacagcaatgaatgcttaacagacctagataggcttgttaggctcacattaccagggaaa

SEQ ID NO: 394816 - DNA, 60 bp, Artificial
  Synthetic oligonucleotide
gacagcaatggtggcaccacttacgtgccaataacagtcacggtagcaccaatgtgcgca

SEQ ID NO: 394817 - DNA, 55 bp, Artificial
  Synthetic oligonucleotide
gacagcacaaatgtcagaatgctgaagtatgtccctcctaagagaaatactcctg

SEQ ID NO: 394818 - DNA, 55 bp, Artificial
  Synthetic oligonucleotide
gacagcacactgagggttggcgtgcaagccgatccgtgcacttgcactactccgg

SEQ ID NO: 394819 - DNA, 58 bp, Artificial
  Synthetic oligonucleotide
gacagcaccgtctaatggtatggcttggtctaaaagtcagttttgtacggcacactgt

SEQ ID NO: 394820 - DNA, 55 bp, Artificial
  Synthetic oligonucleotide
gacagcagacatgattatgcacatccccgggtgcgtgccctgcgttcgggaggac

SEQ ID NO: 394821 - DNA, 60 bp, Artificial
  Synthetic oligonucleotide
gacagcagatagatagaaggcagagaatgatagccggcataaataatgaagcgttattag

SEQ ID NO: 394822 - DNA, 57 bp, Artificial
  Synthetic oligonucleotide
gacagcagatgcagaaccttttcggatccggatttccaataacggtatccccacgaa

SEQ ID NO: 394823 - DNA, 55 bp, Artificial
  Synthetic oligonucleotide
gacagcagatggagaactgatgtctttcaatcctgtcaccagctcaacgccacaa

SEQ ID NO: 394824 - DNA, 60 bp, Artificial
  Synthetic oligonucleotide
gacagcagcctagcacgcagacacatggcccgcgagctatatccggagtattacaagaac

SEQ ID NO: 394825 - DNA, 55 bp, Artificial
  Synthetic oligonucleotide
gacagcagcttagcacgtcaccacaaggcccgagagctgcatccggagtactaca

SEQ ID NO: 394826 - DNA, 58 bp, Artificial
  Synthetic oligonucleotide
gacagcagggagcctacactggacttcccaccaagcggcccaatgtccctaccattag

SEQ ID NO: 394827 - DNA, 55 bp, Artificial
  Synthetic oligonucleotide
gacagcagggcgcatacactgggttgccaaacaagaaacctaacgtcccaaccat

SEQ ID NO: 394828 - DNA, 55 bp, Artificial
  Synthetic oligonucleotide
gacagcagtagtggcagccatcaaggctgtttcataagggccaccggggagtcaa

SEQ ID NO: 394829 - DNA, 59 bp, Artificial
  Synthetic oligonucleotide
gacagcagtcgtccagggatggacgcaatcacaaagttgtgtgcacgaaagtcgggttt

SEQ ID NO: 394830 - DNA, 55 bp, Artificial
  Synthetic oligonucleotide
gacagcagttaccgaaagcttgaagacccttgaaggaagtattactagcttgcaa

SEQ ID NO: 394831 - DNA, 60 bp, Artificial
  Synthetic oligonucleotide
gacagcatacgtttgtatttgaatcaactgatgtatcatcggtattaccactattaacat

SEQ ID NO: 394832 - DNA, 60 bp, Artificial
  Synthetic oligonucleotide
gacagcatatctatgcaacctatggggacacttggacaggggttgaggctctgataagaa

SEQ ID NO: 394833 - DNA, 55 bp, Artificial
  Synthetic oligonucleotide
gacagcatggagtcaacagtcacccgcccagagagcgtcggacaccaggctgcat

SEQ ID NO: 394834 - DNA, 60 bp, Artificial
  Synthetic oligonucleotide
gacagcattcgtgaactggcaactggaaatttaatcgtttcaatggaccttgcgagcttc

SEQ ID NO: 394835 - DNA, 60 bp, Artificial
  Synthetic oligonucleotide
gacagccaaaattatcctatagtgcagaaccttcaggggcaaatggtacatcagcccata

SEQ ID NO: 394836 - DNA, 54 bp, Artificial
  Synthetic oligonucleotide
gacagccaaagatgaccctgtatatatttgggcaccaggaattatcatggaggg

SEQ ID NO: 394837 - DNA, 60 bp, Artificial
  Synthetic oligonucleotide
gacagccacctagcacaccgccatatggcccgtgagctacatccggagtattacaagaac

SEQ ID NO: 394838 - DNA, 55 bp, Artificial
  Synthetic oligonucleotide
gacagccacctggcactaaaacacagagcccgagagatgcatccggagtactaca

SEQ ID NO: 394839 - DNA, 55 bp, Artificial
  Synthetic oligonucleotide
gacagccatcctagggacatcccatgttaactctatggacttaagtacatcagct

SEQ ID NO: 394840 - DNA, 55 bp, Artificial
  Synthetic oligonucleotide
gacagccatgacagccccgcgacacgagctgcgatggaatcccggcaaagtctca

SEQ ID NO: 394841 - DNA, 55 bp, Artificial
  Synthetic oligonucleotide
gacagcccacaatttggcctatctgaacacccgtgagggcacgctcagcgaggcg

SEQ ID NO: 394842 - DNA, 58 bp, Artificial
  Synthetic oligonucleotide
gacagcccatacacgaaccgtgttgttgcccccactgtccgcgtcaccagaagcaaaa

SEQ ID NO: 394843 - DNA, 58 bp, Artificial
  Synthetic oligonucleotide
gacagcccatacaggaaccgtgcaactgcccccactgtccacgtcacaaatcgaaaac

SEQ ID NO: 394844 - DNA, 56 bp, Artificial
  Synthetic oligonucleotide
gacagcccatataccaaccgtgttgctgtccccattgcccccgccacaaacaggcg

SEQ ID NO: 394845 - DNA, 51 bp, Artificial
  Synthetic oligonucleotide
gacagccccaccagcagagagcttcagctttggggaggagacaaacccctc

SEQ ID NO: 394846 - DNA, 60 bp, Artificial
  Synthetic oligonucleotide
gacagcccggatatttgcctctttctttgctcctggtgtagccgcagcacaggccttaag

SEQ ID NO: 394847 - DNA, 60 bp, Artificial
  Synthetic oligonucleotide
gacagcccttacacacgtcgtgctgctgtccccactgtccgcgtcaccagaagacaaata

SEQ ID NO: 394848 - DNA, 56 bp, Artificial
  Synthetic oligonucleotide
gacagcccttatacgagccgtgcagctgtccccactgtcctaggcacaagcaaacg

SEQ ID NO: 394849 - DNA, 55 bp, Artificial
  Synthetic oligonucleotide
gacagccgagagagaataaccaaacttactaggtgatagtatagcttggaatccc

SEQ ID NO: 394850 - DNA, 60 bp, Artificial
  Synthetic oligonucleotide
gacagccgcctagcattccatcacgtggcccgagagctgcatccggattactacaaggac

SEQ ID NO: 394851 - DNA, 55 bp, Artificial
  Synthetic oligonucleotide
gacagccgcctagcgttccacaagaactgctgacaccgagctttctacaagggac

SEQ ID NO: 394852 - DNA, 55 bp, Artificial
  Synthetic oligonucleotide
gacagccgctaactatcctgacctcccacccagttgaggcacttgtccgacagcc

SEQ ID NO: 394853 - DNA, 60 bp, Artificial
  Synthetic oligonucleotide
gacagccgtctaagttagttgggagagatcaaataagcagacgtcaaagggctgtagcag

SEQ ID NO: 394854 - DNA, 60 bp, Artificial
  Synthetic oligonucleotide
gacagcctactcccatctctccacctctaagagacactcatcctcaggccatgcagtgga

SEQ ID NO: 394855 - DNA, 55 bp, Artificial
  Synthetic oligonucleotide
gacagcctcctggcatggagacacgtagccagagagagacatccggagtactacc

SEQ ID NO: 394856 - DNA, 60 bp, Artificial
  Synthetic oligonucleotide
gacagcctgcaaaggcagtgtaggcgggctcttgtattccgtgtgatagctggttggacc

SEQ ID NO: 394857 - DNA, 55 bp, Artificial
  Synthetic oligonucleotide
gacagcctggtgatgggaactgcttctaccacagtatagctgagttaaccatgcc

SEQ ID NO: 394858 - DNA, 60 bp, Artificial
  Synthetic oligonucleotide
gacagccttagcgctgacaagatcactgcggggacgctgaatgcggatcacgtaagagtg

SEQ ID NO: 394859 - DNA, 56 bp, Artificial
  Synthetic oligonucleotide
gacagcgaccaaaaggattcggatggccatcaattagtgtcgaatagtttaaaaac

SEQ ID NO: 394860 - DNA, 60 bp, Artificial
  Synthetic oligonucleotide
gacagcgacgaagaactcctcagaacagtcagactcatcaagctgatctatcaaagcagt

SEQ ID NO: 394861 - DNA, 60 bp, Artificial
  Synthetic oligonucleotide
gacagcgacgaagcactcctcagagcagtgaggatcatcaaactcttatatcaaagcagt

SEQ ID NO: 394862 - DNA, 60 bp, Artificial
  Synthetic oligonucleotide
gacagcgatgaggctccttctcttgcgactaatgatatagctgcctcaacgatgggagct

SEQ ID NO: 394863 - DNA, 55 bp, Artificial
  Synthetic oligonucleotide
gacagcgattcgaaggcgaggggtcaactacgcaaccaccgccgggtggtctagt

SEQ ID NO: 394864 - DNA, 57 bp, Artificial
  Synthetic oligonucleotide
gacagcgcaaagatcaatgtatatcatagacacgtggaagaatataaactagcattc

SEQ ID NO: 394865 - DNA, 55 bp, Artificial
  Synthetic oligonucleotide
gacagcgccactccctggctctggcggtgaagtcattaaccctactgttcctcct

SEQ ID NO: 394866 - DNA, 57 bp, Artificial
  Synthetic oligonucleotide
gacagcgggagttcaaaatacacgactgtggaaggctcttcaccaactccaaccatt

SEQ ID NO: 394867 - DNA, 55 bp, Artificial
  Synthetic oligonucleotide
gacagcgggctagaggaacctgacagttttgaattgacccttctgcacaagaatg

SEQ ID NO: 394868 - DNA, 58 bp, Artificial
  Synthetic oligonucleotide
gacagcggttatttaaacgagtgcggggctctagtgcagctcgactagagcccttaaa

SEQ ID NO: 394869 - DNA, 55 bp, Artificial
  Synthetic oligonucleotide
gacagctaaagaagaagtccgtacagtatcgtcgaccggcgctcgcaagggtaca

SEQ ID NO: 394870 - DNA, 60 bp, Artificial
  Synthetic oligonucleotide
gacagctatgcacaagtacgaacatccacaaggttgatcaactctccgtcgtctggttgt

SEQ ID NO: 394871 - DNA, 53 bp, Artificial
  Synthetic oligonucleotide
gacagctcaagttcatcacatgcattgtttaatgcgatgagacaatgtgagaa

SEQ ID NO: 394872 - DNA, 55 bp, Artificial
  Synthetic oligonucleotide
gacagctccctagcacggagacatgtagcccgagagatgcacccagagttctaca

SEQ ID NO: 394873 - DNA, 55 bp, Artificial
  Synthetic oligonucleotide
gacagctcgaggcgtcagcaaaatagtgcctattagcacaagagcgatgaaacac

SEQ ID NO: 394874 - DNA, 55 bp, Artificial
  Synthetic oligonucleotide
gacagctgcccaaagggcaatgatggatcaggtgagagaaagtcggaacccaggg

SEQ ID NO: 394875 - DNA, 55 bp, Artificial
  Synthetic oligonucleotide
gacagctgtcatgtctaagtacaaaggaaatgtccatattgaaatgagtgagaac

SEQ ID NO: 394876 - DNA, 60 bp, Artificial
  Synthetic oligonucleotide
gacagctgttctgcataatatatatactgacgacgtgggtaattttcgaccaagttacag

SEQ ID NO: 394877 - DNA, 60 bp, Artificial
  Synthetic oligonucleotide
gacagcttagagacgtatcatgagcagctaactgctgaatatgccttcctcaccaggtac

SEQ ID NO: 394878 - DNA, 55 bp, Artificial
  Synthetic oligonucleotide
gacagcttgagttttccctgtatacggcagaagtggactccgttgatgacgttgg

SEQ ID NO: 394879 - DNA, 55 bp, Artificial
  Synthetic oligonucleotide
gacagcttgctgctgaaaacaagtacgggttgatggacacaatgagagtcggaag

SEQ ID NO: 394880 - DNA, 59 bp, Artificial
  Synthetic oligonucleotide
gacagctttgagagctccatctttcgaacaaaactgctccgtggaaatccaactgggaa

SEQ ID NO: 394881 - DNA, 59 bp, Artificial
  Synthetic oligonucleotide
gacaggaacaacgcttctatcatcacaaccaagacagatgaccaagactacggctggta

SEQ ID NO: 394882 - DNA, 60 bp, Artificial
  Synthetic oligonucleotide
gacaggaacccatgttcaggtggatgagattctcagatttgagcacgtgggagggcgatc

SEQ ID NO: 394883 - DNA, 60 bp, Artificial
  Synthetic oligonucleotide
gacaggacaatcggaagacgtctctgcgcaagccaagacagccacgcaattacaacttga

SEQ ID NO: 394884 - DNA, 55 bp, Artificial
  Synthetic oligonucleotide
gacaggacaccatataggtctctaatccaattcccaataggaacagccccagtac

SEQ ID NO: 394885 - DNA, 60 bp, Artificial
  Synthetic oligonucleotide
gacaggacatgagctgctctgagggtgtgctcacaatgctagctggtgtcacgaataagg

SEQ ID NO: 394886 - DNA, 60 bp, Artificial
  Synthetic oligonucleotide
gacaggaccattagtggctggagggctcctcactgtgtgctacgtgctcactggacgatc

SEQ ID NO: 394887 - DNA, 55 bp, Artificial
  Synthetic oligonucleotide
gacaggactgtgttcataattcttctactgatcccactggctttgtcatgctcag

SEQ ID NO: 394888 - DNA, 52 bp, Artificial
  Synthetic oligonucleotide
gacaggagaaaaagattggcatttgggtcatggggtctctgtagaatggaga

SEQ ID NO: 394889 - DNA, 57 bp, Artificial
  Synthetic oligonucleotide
gacaggagaagttcaaatcccaatagaacaaacagatggtagtgttttcttagccac

SEQ ID NO: 394890 - DNA, 57 bp, Artificial
  Synthetic oligonucleotide
gacaggagaggattctcttgaagtcaaagaaacttacgactatcaggactacatcaa

SEQ ID NO: 394891 - DNA, 50 bp, Artificial
  Synthetic oligonucleotide
gacaggagcccacgagactagtctaaacgctagtgggagctccattatac

SEQ ID NO: 394892 - DNA, 51 bp, Artificial
  Synthetic oligonucleotide
gacaggaggcagcacagtacatatcatcagtatattctaatgctacctcct

SEQ ID NO: 394893 - DNA, 60 bp, Artificial
  Synthetic oligonucleotide
gacaggaggcatggaactgacaagggaccccactgtctccgagcatgcatctttggttgg

SEQ ID NO: 394894 - DNA, 55 bp, Artificial
  Synthetic oligonucleotide
gacaggagtccctataggactctaatgagtgtagagatagggcagtcacccaatg

SEQ ID NO: 394895 - DNA, 60 bp, Artificial
  Synthetic oligonucleotide
gacaggatacccggtatggcatgtctttagatacctagatatgatggaggataaaacaag

SEQ ID NO: 394896 - DNA, 56 bp, Artificial
  Synthetic oligonucleotide
gacaggatcagaagaacttaaatccttatttaatacaatagcaaccctttggtgcg

SEQ ID NO: 394897 - DNA, 56 bp, Artificial
  Synthetic oligonucleotide
gacaggatcagaagaagttagatcattatataatacagtagtaaccttctggtgcg

SEQ ID NO: 394898 - DNA, 60 bp, Artificial
  Synthetic oligonucleotide
gacaggatctattcctacgcgctcaacactatagggacattcgagaatagaacgtttgag

SEQ ID NO: 394899 - DNA, 52 bp, Artificial
  Synthetic oligonucleotide
gacaggatcttacccaacaattcgactgtgctcaacgactatgacagtttca

SEQ ID NO: 394900 - DNA, 60 bp, Artificial
  Synthetic oligonucleotide
gacaggatgatacatctgcactacttcacctgttttacagattcagcaatcaggaaagcc

SEQ ID NO: 394901 - DNA, 60 bp, Artificial
  Synthetic oligonucleotide
gacaggatggcacacggtgagccatactatagttctaaacctgacaaagatatcaacttt

SEQ ID NO: 394902 - DNA, 57 bp, Artificial
  Synthetic oligonucleotide
gacaggatgtacatagctaaggaaggattttgttatcttaacatcttcttggcaatg

SEQ ID NO: 394903 - DNA, 55 bp, Artificial
  Synthetic oligonucleotide
gacaggatgtccatccgagacttccaaccaatctcatcttgttggatcagtcgtg

SEQ ID NO: 394904 - DNA, 53 bp, Artificial
  Synthetic oligonucleotide
gacaggattcgtcaaagaacaggtatatgcctaaaccatcactagacatcact

SEQ ID NO: 394905 - DNA, 55 bp, Artificial
  Synthetic oligonucleotide
gacaggcacaagcaaaagattattgcacccgcaaagcagctgttgaacttcgacc

SEQ ID NO: 394906 - DNA, 58 bp, Artificial
  Synthetic oligonucleotide
gacaggcacgtacgtttatgaccatcttactccactgcgggactgggcccacgagggc

SEQ ID NO: 394907 - DNA, 55 bp, Artificial
  Synthetic oligonucleotide
gacaggcagacccgaaattgtgtggagagtgtaaccaaccctactgtgggagagt

SEQ ID NO: 394908 - DNA, 54 bp, Artificial
  Synthetic oligonucleotide
gacaggcatcttacagctctgcgtgagaaggcgtgttgcaagcaggagcgtgat

SEQ ID NO: 394909 - DNA, 59 bp, Artificial
  Synthetic oligonucleotide
gacaggccaagtagcggagctctgtaagtaagatgggcgacgcacttggagccggggcg

SEQ ID NO: 394910 - DNA, 53 bp, Artificial
  Synthetic oligonucleotide
gacaggcctgttcccgcgactataactttccacgctaaaggggtcacttccca

SEQ ID NO: 394911 - DNA, 55 bp, Artificial
  Synthetic oligonucleotide
gacaggcgctgaagccaacctactaattacaaggagtattacttcccggttatcc

SEQ ID NO: 394912 - DNA, 53 bp, Artificial
  Synthetic oligonucleotide
gacaggcgtactttaaacaattaaccagtgaaggtccacagcatacaagcagt

SEQ ID NO: 394913 - DNA, 57 bp, Artificial
  Synthetic oligonucleotide
gacaggctaacccagtcactgaaccacctctttacagccatggactcgacggatgca

SEQ ID NO: 394914 - DNA, 58 bp, Artificial
  Synthetic oligonucleotide
gacaggctaatcacgcgtgcagacttctactcccttttccaccctttcaccggcactg

SEQ ID NO: 394915 - DNA, 60 bp, Artificial
  Synthetic oligonucleotide
gacaggctcaaacgccgatatgcttcaacatgggaataacttgcttgtgtatgttgcaag

SEQ ID NO: 394916 - DNA, 55 bp, Artificial
  Synthetic oligonucleotide
gacaggctgaggctcatggccatcagtggagacgattgcgtggtgcgagcttgcg

SEQ ID NO: 394917 - DNA, 50 bp, Artificial
  Synthetic oligonucleotide
gacaggctgcgcgtcaagtgcacgctacccaccagcgtggaggtacacgt

SEQ ID NO: 394918 - DNA, 55 bp, Artificial
  Synthetic oligonucleotide
gacagggaataatagtagtagtacagggtcaaatgagacaatcacacttccatgc

SEQ ID NO: 394919 - DNA, 57 bp, Artificial
  Synthetic oligonucleotide
gacagggaccgatggttcctacccgctgactgcgtgtccatacatcccggtacgaat

SEQ ID NO: 394920 - DNA, 56 bp, Artificial
  Synthetic oligonucleotide
gacagggagtaaattggatgcatgggaacgaattaggttaaggccaggatctaaaa

SEQ ID NO: 394921 - DNA, 55 bp, Artificial
  Synthetic oligonucleotide
gacagggatcactggtttgagttgaaactgacactacatcaaacgtggcctgcaa

SEQ ID NO: 394922 - DNA, 54 bp, Artificial
  Synthetic oligonucleotide
gacagggcaaaaagggaagccgggcaccgcccacgtggaatcgaccacgtcacc

SEQ ID NO: 394923 - DNA, 56 bp, Artificial
  Synthetic oligonucleotide
gacagggctttgaaagggctttgatataaaatgggtggcaagtggtcaaaactgag

SEQ ID NO: 394924 - DNA, 60 bp, Artificial
  Synthetic oligonucleotide
gacaggggatttgttacgtcccagatatagacgccattcgcctgctgagcagcagtgatg

SEQ ID NO: 394925 - DNA, 55 bp, Artificial
  Synthetic oligonucleotide
gacaggggcggttttggcgaacgtgccgcaaagtaagcagcgcctgaaactggaa

SEQ ID NO: 394926 - DNA, 59 bp, Artificial
  Synthetic oligonucleotide
gacaggggttcagtcactacaactaagccctttcagaacatctcgagaatatcaatcgg

SEQ ID NO: 394927 - DNA, 60 bp, Artificial
  Synthetic oligonucleotide
gacagggtgcttactcggttcgacatgtctctggcagcgaaacacatgtcaaacaccttt

SEQ ID NO: 394928 - DNA, 55 bp, Artificial
  Synthetic oligonucleotide
gacagggtggcgcagctaaaactgggcaatacctccataaccactcaagaagctg

SEQ ID NO: 394929 - DNA, 58 bp, Artificial
  Synthetic oligonucleotide
gacagggtgtgacttcaataatactagccggcaattcctctctttgtccaataagtgg

SEQ ID NO: 394930 - DNA, 60 bp, Artificial
  Synthetic oligonucleotide
gacagggttacaggctataatcaaatagattctgataaagtttatgatgacggtgcaccg

SEQ ID NO: 394931 - DNA, 58 bp, Artificial
  Synthetic oligonucleotide
gacagggtttttgtcagaatatcatcttcaggtttaatctatccagcttagtaccgag

SEQ ID NO: 394932 - DNA, 60 bp, Artificial
  Synthetic oligonucleotide
gacaggtagaataatctttgaaacaggcgagtcctgcggggatgtgttgccacacgataa

SEQ ID NO: 394933 - DNA, 60 bp, Artificial
  Synthetic oligonucleotide
gacaggtcgacctgtgagagtcctgcggctaagcgcagttctcggattcgggcgcccacg

SEQ ID NO: 394934 - DNA, 60 bp, Artificial
  Synthetic oligonucleotide
gacaggtcgtgcaaggtgtgatatggctgttactggtaactggggcacaaggccggctag

SEQ ID NO: 394935 - DNA, 55 bp, Artificial
  Synthetic oligonucleotide
gacaggtgccccagtgtgcgtaaccttcttccgtctccggacggtagtgattggt

SEQ ID NO: 394936 - DNA, 51 bp, Artificial
  Synthetic oligonucleotide
gacaggtggaactttgcggtattctgtcttcggattgctgttagcgaagat

SEQ ID NO: 394937 - DNA, 57 bp, Artificial
  Synthetic oligonucleotide
gacaggtgggccgttttacctcgtcatgctaaacctggaccaactattctgatgaat

SEQ ID NO: 394938 - DNA, 58 bp, Artificial
  Synthetic oligonucleotide
gacaggtgttgaggaccgtgaggtacctgacgagttaatatccgttgacccgcatgaa

SEQ ID NO: 394939 - DNA, 54 bp, Artificial
  Synthetic oligonucleotide
gacaggttgtatcgtttgcaaactctaaaagtcatttctggttacaacctttaa

SEQ ID NO: 394940 - DNA, 52 bp, Artificial
  Synthetic oligonucleotide
gacagtaatgaaatccaacaatggcgtttggatattgagcgactttctaaac

SEQ ID NO: 394941 - DNA, 55 bp, Artificial
  Synthetic oligonucleotide
gacagtactctcagtctggcgcaacagtcggcgatggtgaaatcggtagagcggg

SEQ ID NO: 394942 - DNA, 60 bp, Artificial
  Synthetic oligonucleotide
gacagtactgtgcatactatgccaagcacgtttggaatcttatgctgcaaactcagaaac

SEQ ID NO: 394943 - DNA, 60 bp, Artificial
  Synthetic oligonucleotide
gacagtacttgaaaggaatatcgtctacgatattatacatagcctcttcgtcataagagg

SEQ ID NO: 394944 - DNA, 60 bp, Artificial
  Synthetic oligonucleotide
gacagtagcctagcacggagacacattgcccgagagctgcatccggagtattataaagac

SEQ ID NO: 394945 - DNA, 60 bp, Artificial
  Synthetic oligonucleotide
gacagtatcatcagtaattcagtaggtcaaactagattctcaggacttcttattgtgaaa

SEQ ID NO: 394946 - DNA, 60 bp, Artificial
  Synthetic oligonucleotide
gacagtatgaaattttcagtgatgccatggaccaactgactaatagtttgatcacgaact

SEQ ID NO: 394947 - DNA, 55 bp, Artificial
  Synthetic oligonucleotide
gacagtatgacagtgatgaaccagagtctaggtcactagcaagctggatccagag

SEQ ID NO: 394948 - DNA, 51 bp, Artificial
  Synthetic oligonucleotide
gacagtattgtctgaagtggtgctagagaggaccgagttagagatctcgta

SEQ ID NO: 394949 - DNA, 60 bp, Artificial
  Synthetic oligonucleotide
gacagtcaagaatgttcatccctcacataacactaagctttagtaatgagaagacggtga

SEQ ID NO: 394950 - DNA, 60 bp, Artificial
  Synthetic oligonucleotide
gacagtcaatgacatccaaaagctagtgggtgtcctaaattgggcagcacaaatctaccc

SEQ ID NO: 394951 - DNA, 55 bp, Artificial
  Synthetic oligonucleotide
gacagtcacaaggtaagctgagttgggtgcttgggtcgttcggcgcaactaggaa

SEQ ID NO: 394952 - DNA, 50 bp, Artificial
  Synthetic oligonucleotide
gacagtcagacacactccggtaaattcctggctagggaacatcatacttt

SEQ ID NO: 394953 - DNA, 55 bp, Artificial
  Synthetic oligonucleotide
gacagtcagacagcgaccaaaagaattcgaatggccaccaattagtgtaaaactg

SEQ ID NO: 394954 - DNA, 60 bp, Artificial
  Synthetic oligonucleotide
gacagtcagactgatcaagtttctctatcaaagcagtaagtactccatgtaatgcagtct

SEQ ID NO: 394955 - DNA, 60 bp, Artificial
  Synthetic oligonucleotide
gacagtcatgtacgataaaagtgtgtccattgaatactcaaacactaggaataggatgtc

SEQ ID NO: 394956 - DNA, 50 bp, Artificial
  Synthetic oligonucleotide
gacagtcctcaatacctggacatatctaacctaggcgtagatcaaatgat

SEQ ID NO: 394957 - DNA, 55 bp, Artificial
  Synthetic oligonucleotide
gacagtcgcctggctctaaaacacagagcccaagagctgcctccggggttctaca

SEQ ID NO: 394958 - DNA, 60 bp, Artificial
  Synthetic oligonucleotide
gacagtcggcatgacaaagttctatggaggatggaatagattgctcacagcgctgccaga

SEQ ID NO: 394959 - DNA, 54 bp, Artificial
  Synthetic oligonucleotide
gacagtctacctgcgtacaccgttctcggccggtaacgctaccacgtaaaaagc

SEQ ID NO: 394960 - DNA, 60 bp, Artificial
  Synthetic oligonucleotide
gacagtctcaagtgagttggtgtgtagggagggtgactctttctggacctcagattactc

SEQ ID NO: 394961 - DNA, 60 bp, Artificial
  Synthetic oligonucleotide
gacagtgaagatgggggaatccgtcggagtgttcctctctggcgactcgtatatatgtgg

SEQ ID NO: 394962 - DNA, 55 bp, Artificial
  Synthetic oligonucleotide
gacagtgcagacaaaagtggctgtatacacaactatgacgacagatctgttgaaa

SEQ ID NO: 394963 - DNA, 50 bp, Artificial
  Synthetic oligonucleotide
gacagtggaaaccacaacagtaacagttcagctacgcctatagtgcaatt

SEQ ID NO: 394964 - DNA, 55 bp, Artificial
  Synthetic oligonucleotide
gacagtggagaagcaattgaattaggggttttgggagagcattcaggtgatgcat

SEQ ID NO: 394965 - DNA, 57 bp, Artificial
  Synthetic oligonucleotide
gacagtggcagcccccgtacaccagacgctgttacatagtgggatacctcccgctga

SEQ ID NO: 394966 - DNA, 60 bp, Artificial
  Synthetic oligonucleotide
gacagtggccagtgatgaagggaggagcggtaatgttacacgcagcaggagtaacattat

SEQ ID NO: 394967 - DNA, 60 bp, Artificial
  Synthetic oligonucleotide
gacagtggccgcggctcgaccctcacacaacactgcagatagggggcgcaattgggatcg

SEQ ID NO: 394968 - DNA, 55 bp, Artificial
  Synthetic oligonucleotide
gacagtgggaaaagtatgctttgcatgagcttaatcgagttcttagaaggacgag

SEQ ID NO: 394969 - DNA, 58 bp, Artificial
  Synthetic oligonucleotide
gacagtgggagcccggaatggtatatctacagagtgcttagccgtggacagtttgagt

SEQ ID NO: 394970 - DNA, 55 bp, Artificial
  Synthetic oligonucleotide
gacagtgggcagcgtggtaattgtcgggagggtcgttctatcgggccaacccgcc

SEQ ID NO: 394971 - DNA, 58 bp, Artificial
  Synthetic oligonucleotide
gacagtggtacaccctagtctcggaacccctagaaaatgcagtcacctattatgtaga

SEQ ID NO: 394972 - DNA, 55 bp, Artificial
  Synthetic oligonucleotide
gacagtggtccatttgtatggatgtgtggggccgaggcctccccgaaagttggtg

SEQ ID NO: 394973 - DNA, 60 bp, Artificial
  Synthetic oligonucleotide
gacagtggtccccgcgcacttgtattggttggccagtcatattcacgcgtgaaagtctag

SEQ ID NO: 394974 - DNA, 59 bp, Artificial
  Synthetic oligonucleotide
gacagtgtcctggtatttgagcttacggacattgtccactgccgtatggccgcccccac

SEQ ID NO: 394975 - DNA, 51 bp, Artificial
  Synthetic oligonucleotide
gacagtgtcgtggcgtacgtggggaaggcgactgacgagtacacggcgtgt

SEQ ID NO: 394976 - DNA, 60 bp, Artificial
  Synthetic oligonucleotide
gacagtgtggcgcccatactgaggtgtctaactgggattgtattcgtactgagaggatat

SEQ ID NO: 394977 - DNA, 60 bp, Artificial
  Synthetic oligonucleotide
gacagtgtggtgtgctgctccatgtcatactcctggaccggggctctaataactccctgt

SEQ ID NO: 394978 - DNA, 60 bp, Artificial
  Synthetic oligonucleotide
gacagtgttatgtttgattgggctctctgagccccgataattgacgctgaatctcccggg

SEQ ID NO: 394979 - DNA, 52 bp, Artificial
  Synthetic oligonucleotide
gacagttaaacaagataaccgcgatcgatcccaagttattcgtaagtttcat

SEQ ID NO: 394980 - DNA, 55 bp, Artificial
  Synthetic oligonucleotide
gacagttaactagcacgcagacatatagcccgtgagctacatccggagtattaca

SEQ ID NO: 394981 - DNA, 60 bp, Artificial
  Synthetic oligonucleotide
gacagttaagctgaagaactctacgcttagcgcagatgaattgtctctggccaccatcgc

SEQ ID NO: 394982 - DNA, 55 bp, Artificial
  Synthetic oligonucleotide
gacagttaagggaaccagcagggagtgacatagcagggacaacaagcactcccgc

SEQ ID NO: 394983 - DNA, 55 bp, Artificial
  Synthetic oligonucleotide
gacagttaggaatctcgagaaccaattcgtttgaaagcaagcgccgcattacact

SEQ ID NO: 394984 - DNA, 60 bp, Artificial
  Synthetic oligonucleotide
gacagttcaagacataagagctttcacacggacgagcgatgggtacaatggatgatgaaa

SEQ ID NO: 394985 - DNA, 58 bp, Artificial
  Synthetic oligonucleotide
gacagttcactgtaggacgggatctagtagggggcacagaagacacaagaggtaatta

SEQ ID NO: 394986 - DNA, 59 bp, Artificial
  Synthetic oligonucleotide
gacagttccctagcacgaagacacctagcccgagagctacatccggagtactacaaaga

SEQ ID NO: 394987 - DNA, 58 bp, Artificial
  Synthetic oligonucleotide
gacagttcctatgtagcagtgggttcagaaacttacaacagaagattcaccccagaaa

SEQ ID NO: 394988 - DNA, 52 bp, Artificial
  Synthetic oligonucleotide
gacagttctatttcgacccgaacagcaactacccgaacggtacgacccgggc

SEQ ID NO: 394989 - DNA, 59 bp, Artificial
  Synthetic oligonucleotide
gacagttctgctcctacttcgctaaagtcgtctggaaccaccttctgacccacgcaaca

SEQ ID NO: 394990 - DNA, 50 bp, Artificial
  Synthetic oligonucleotide
gacagttgaagcttgtggctattcagataggttgatacagataacccgtg

SEQ ID NO: 394991 - DNA, 60 bp, Artificial
  Synthetic oligonucleotide
gacagttgagccaggcttttgtacgccgacaagttgcaggatctcagaccttcttgtcag

SEQ ID NO: 394992 - DNA, 55 bp, Artificial
  Synthetic oligonucleotide
gacagttgctcttcagtccgctagaggtgaaggcgctcagacgaggaacgccaag

SEQ ID NO: 394993 - DNA, 55 bp, Artificial
  Synthetic oligonucleotide
gacagttgtcatgagtggactgatggtttggtgtattgaaaacggttgctcaccg

SEQ ID NO: 394994 - DNA, 55 bp, Artificial
  Synthetic oligonucleotide
gacagttgtcatgagtggtctcatggtatggtgcatcgaaaatggttgctcacca

SEQ ID NO: 394995 - DNA, 55 bp, Artificial
  Synthetic oligonucleotide
gacagtttcgttgcccagtcgtaaggcagcgatgcctggaccagagaaaggtact

SEQ ID NO: 394996 - DNA, 55 bp, Artificial
  Synthetic oligonucleotide
gacagtttctgcgaattgtgcacgtttgcccacatgacggccggattgaagcccc

SEQ ID NO: 394997 - DNA, 55 bp, Artificial
  Synthetic oligonucleotide
gacagttttgtggcccagtcatagggcagtgcactctgcaccattgaaaggtact

SEQ ID NO: 394998 - DNA, 55 bp, Artificial
  Synthetic oligonucleotide
gacagtttttaagaagtttagaggcaataacagtgggcaaccttcaacagttgtg

SEQ ID NO: 394999 - DNA, 57 bp, Artificial
  Synthetic oligonucleotide
gacataaacaaattctgtaccagtcaacggcaattcaactcaagtgccgtgttctct

SEQ ID NO: 395000 - DNA, 50 bp, Artificial
  Synthetic oligonucleotide
gacataaagcagcccatcccaccgtctgcttggactggtactgtcggtaa

SEQ ID NO: 395001 - DNA, 55 bp, Artificial
  Synthetic oligonucleotide
gacataaatttgtcagtggtagtgaaagctgaggtcaaccccaaagtgcgaggga

SEQ ID NO: 395002 - DNA, 60 bp, Artificial
  Synthetic oligonucleotide
gacataacatcagagtgtcttggtattgttagtcacattataaaacatcgtagagaagag

SEQ ID NO: 395003 - DNA, 50 bp, Artificial
  Synthetic oligonucleotide
gacataacatgggaaactgatgcagccataactggaaccagccaacgcct

SEQ ID NO: 395004 - DNA, 55 bp, Artificial
  Synthetic oligonucleotide
gacataacgggaaactatgtaaactaggggggatagccccattgcatctgggtaa

SEQ ID NO: 395005 - DNA, 58 bp, Artificial
  Synthetic oligonucleotide
gacataactacagaaccagacataatagaaataagtagtggtagtaatactcctgcag

SEQ ID NO: 395006 - DNA, 54 bp, Artificial
  Synthetic oligonucleotide
gacataagacaagcatattgtactatcaatggatcagaatggaataacacttta

SEQ ID NO: 395007 - DNA, 53 bp, Artificial
  Synthetic oligonucleotide
gacataaggtacacccatcgttaggtctagtatctaccttagacatagcacgt

SEQ ID NO: 395008 - DNA, 60 bp, Artificial
  Synthetic oligonucleotide
gacataataaaagaggacgtggctgaatggagagccgtaggatcgtctttgagatccgat

SEQ ID NO: 395009 - DNA, 58 bp, Artificial
  Synthetic oligonucleotide
gacataataaggtaggatctctacaatatttggcactgaaagcactagtagccccaaa

SEQ ID NO: 395010 - DNA, 60 bp, Artificial
  Synthetic oligonucleotide
gacataataattagatctgaaaatctgacagacaatgtgaaaacaataatagtacatctt

SEQ ID NO: 395011 - DNA, 55 bp, Artificial
  Synthetic oligonucleotide
gacataataccgtccgtgtcagcagtatgtgaccatccgatccgtgaatgctggg

SEQ ID NO: 395012 - DNA, 52 bp, Artificial
  Synthetic oligonucleotide
gacataatacgtgacatctgtattattcagtctgcaagggttgctaagctag

SEQ ID NO: 395013 - DNA, 60 bp, Artificial
  Synthetic oligonucleotide
gacataataggagatataagacaagcacattgtaacattagcagagagcaatggaacaaa

SEQ ID NO: 395014 - DNA, 58 bp, Artificial
  Synthetic oligonucleotide
gacataatcgttatctatccctcacgtatcccagtatcgtttggtccgacgtaatcaa

SEQ ID NO: 395015 - DNA, 52 bp, Artificial
  Synthetic oligonucleotide
gacataatgattagaactgaaaacatcatagacaataccaagatcataatag

SEQ ID NO: 395016 - DNA, 55 bp, Artificial
  Synthetic oligonucleotide
gacataattgctgacatttgtgtggtccaggctgccagagttacccactctatag

SEQ ID NO: 395017 - DNA, 51 bp, Artificial
  Synthetic oligonucleotide
gacatacaagtgacgagttattgttaatgtcatggccgttagtcaccgccc

SEQ ID NO: 395018 - DNA, 59 bp, Artificial
  Synthetic oligonucleotide
gacatacacaatggcggcaagtagccggtctacccgaggtagaaagcagcgcggacgta

SEQ ID NO: 395019 - DNA, 56 bp, Artificial
  Synthetic oligonucleotide
gacatacagaagttagtgggaaaattgaattgggcaagtcagatttacccagggat

SEQ ID NO: 395020 - DNA, 59 bp, Artificial
  Synthetic oligonucleotide
gacatacagacagacaacgataaccgaccaccacaagcagcggccaaacgacgacgacc

SEQ ID NO: 395021 - DNA, 60 bp, Artificial
  Synthetic oligonucleotide
gacatacaggtaccctctggagctcgacacagcaaataatagagtgcaggtggcagatcg

SEQ ID NO: 395022 - DNA, 60 bp, Artificial
  Synthetic oligonucleotide
gacataccacgactgtttatgtatgcacgcaagtgccccttaacaaatccctatacacac

SEQ ID NO: 395023 - DNA, 59 bp, Artificial
  Synthetic oligonucleotide
gacataccacgactgtttatgtatgcacgcgagtgcccttttaaaacctctacaatata

SEQ ID NO: 395024 - DNA, 60 bp, Artificial
  Synthetic oligonucleotide
gacataccatagagaattccacagcaaatgtgtccctggcagctatagccaaccaggcag

SEQ ID NO: 395025 - DNA, 57 bp, Artificial
  Synthetic oligonucleotide
gacatacccagctatacctaaggacacgtattttatggttgtaacaatgggaggtgc

SEQ ID NO: 395026 - DNA, 50 bp, Artificial
  Synthetic oligonucleotide
gacatacctgtaaccactggccctgacatagttttacctactgcatcccc

SEQ ID NO: 395027 - DNA, 55 bp, Artificial
  Synthetic oligonucleotide
gacataccttgtaaacctctaccttatactaacttacatcccatggtcatgctac

SEQ ID NO: 395028 - DNA, 60 bp, Artificial
  Synthetic oligonucleotide
gacatacgatctgtccgttgcgaatcgaacagctctaattacattgttaagactaatgac

SEQ ID NO: 395029 - DNA, 58 bp, Artificial
  Synthetic oligonucleotide
gacatacgattgtgtgccgttcaatttacctcgggtgtggagtcttgcacgttgttac

SEQ ID NO: 395030 - DNA, 60 bp, Artificial
  Synthetic oligonucleotide
gacatacgccgcgttctttgaaatggcgtctggcatgacgaatcgttctgctgcggttgg

SEQ ID NO: 395031 - DNA, 55 bp, Artificial
  Synthetic oligonucleotide
gacatactgaaaagggactactagaaattccaagcatgattgctacagaagcagc

SEQ ID NO: 395032 - DNA, 59 bp, Artificial
  Synthetic oligonucleotide
gacatactggtgggacggacttcaatcctccgacgactttgctctaatagtgaatgccc

SEQ ID NO: 395033 - DNA, 60 bp, Artificial
  Synthetic oligonucleotide
gacatactgtggcacctgcggtcgtggaatcaggattgtggtcctctgcacacaggacgg

SEQ ID NO: 395034 - DNA, 51 bp, Artificial
  Synthetic oligonucleotide
gacatactgtgtttcagggcagttggttgagggtgtctgtttcaatccaat

SEQ ID NO: 395035 - DNA, 55 bp, Artificial
  Synthetic oligonucleotide
gacatacttcctcaaacatatcggggtatgtctctctgaacttgggaattacgta

SEQ ID NO: 395036 - DNA, 51 bp, Artificial
  Synthetic oligonucleotide
gacatagaaacgaccagttagacaccgtaagacgagtgttagaagcactat

SEQ ID NO: 395037 - DNA, 60 bp, Artificial
  Synthetic oligonucleotide
gacatagaacgtgatcttgatagccgtgctggagcgtttcaaatctcattgtcacctttt

SEQ ID NO: 395038 - DNA, 55 bp, Artificial
  Synthetic oligonucleotide
gacatagaagaattactccacataagattgctactggcactctcaatcccaagcc

SEQ ID NO: 395039 - DNA, 52 bp, Artificial
  Synthetic oligonucleotide
gacatagaagcaacagagatgtatcccgacacggagacacctttcaggatga

SEQ ID NO: 395040 - DNA, 55 bp, Artificial
  Synthetic oligonucleotide
gacatagagcatgagcgaatcccttccgcttccaagctcccggtctaaggctcag

SEQ ID NO: 395041 - DNA, 60 bp, Artificial
  Synthetic oligonucleotide
gacatagatctaggggattctcgtgtggttatccaggactacgataaccagcatgaacaa

SEQ ID NO: 395042 - DNA, 59 bp, Artificial
  Synthetic oligonucleotide
gacatagcagcctgtgcccttcggaattggatggactctaccgacttttccgaggaaca

SEQ ID NO: 395043 - DNA, 60 bp, Artificial
  Synthetic oligonucleotide
gacatagccaaatgtgaagcaacatttgtcaacttaacaggttgctattcttgtaactat

SEQ ID NO: 395044 - DNA, 60 bp, Artificial
  Synthetic oligonucleotide
gacatagccgtggagcatgagacatgtcaaggcttgatggatggggcttgcttcgagctt

SEQ ID NO: 395045 - DNA, 50 bp, Artificial
  Synthetic oligonucleotide
gacataggagttccacttctcgccttggggtgctattctcaggtgaaccc

SEQ ID NO: 395046 - DNA, 55 bp, Artificial
  Synthetic oligonucleotide
gacataggggaatcatcaccaaatcccacggtagaagcgggacgaacactcaggg

SEQ ID NO: 395047 - DNA, 60 bp, Artificial
  Synthetic oligonucleotide
gacatagtcgaaatcattccagacgtaagtccgacgaaaccttatgaagccgtcatatca

SEQ ID NO: 395048 - DNA, 55 bp, Artificial
  Synthetic oligonucleotide
gacatagtgtggctcaggtatatgcagacactcaggtgtacacacacgataactc

SEQ ID NO: 395049 - DNA, 55 bp, Artificial
  Synthetic oligonucleotide
gacatagtgtggctcaggtatatgcggacactcaaatatatactcacgatgaaac

SEQ ID NO: 395050 - DNA, 60 bp, Artificial
  Synthetic oligonucleotide
gacatagtgtgtatggttgagcgcactttggctgaatcattcgaagtcgtaatgaatgag

SEQ ID NO: 395051 - DNA, 55 bp, Artificial
  Synthetic oligonucleotide
gacatagtgttggagttaacaccacaacctgaaattgacttgcaatgctacgagc

SEQ ID NO: 395052 - DNA, 51 bp, Artificial
  Synthetic oligonucleotide
gacatagttaaaacagtagtgcaagttaggcatcttgaaaatttgctttgc

SEQ ID NO: 395053 - DNA, 59 bp, Artificial
  Synthetic oligonucleotide
gacatagtttgtagagcacattctcgtaaggatttctctgcccaggggtgggactaaca

SEQ ID NO: 395054 - DNA, 55 bp, Artificial
  Synthetic oligonucleotide
gacatatacaaacacaacgcgattaaaactctctcagctttcaacaactctcttg

SEQ ID NO: 395055 - DNA, 56 bp, Artificial
  Synthetic oligonucleotide
gacatatacgatgactaaagttttcattaataagagaatcgttgagcgggtaaggg

SEQ ID NO: 395056 - DNA, 57 bp, Artificial
  Synthetic oligonucleotide
gacatatagcgaaacgggtagtgacatcttataccaaccacctaattgtagtgttac

SEQ ID NO: 395057 - DNA, 60 bp, Artificial
  Synthetic oligonucleotide
gacatatatcacgagaagccagttatatatatgataggatcagcgccatcatattggata

SEQ ID NO: 395058 - DNA, 55 bp, Artificial
  Synthetic oligonucleotide
gacatatcattgctataacgaaatgctacgcatgttagttgcggcagggaaggac

SEQ ID NO: 395059 - DNA, 57 bp, Artificial
  Synthetic oligonucleotide
gacatatctttcgaagacgacatccatttgtcgatcgccaacgacctttttagggcg

SEQ ID NO: 395060 - DNA, 55 bp, Artificial
  Synthetic oligonucleotide
gacatatctttctcagatttgcgtggaaatgcgcaacggattgtctatgatgatg

SEQ ID NO: 395061 - DNA, 60 bp, Artificial
  Synthetic oligonucleotide
gacatatgataaattaggatggatcatagtataggcatcgacgcttaccgtgtacaactc

SEQ ID NO: 395062 - DNA, 55 bp, Artificial
  Synthetic oligonucleotide
gacatatggacgtgcggccacaagcgattctcatgcatgtaccaaggccagtgtg

SEQ ID NO: 395063 - DNA, 50 bp, Artificial
  Synthetic oligonucleotide
gacatatgggagaagttacgcgattgggtttacggaaatacatttgacag

SEQ ID NO: 395064 - DNA, 55 bp, Artificial
  Synthetic oligonucleotide
gacatatgggcaaggtaatctgtttgtctgacgttacccgtggtattgggcttac

SEQ ID NO: 395065 - DNA, 60 bp, Artificial
  Synthetic oligonucleotide
gacatatgggcatgagcgcgacatgacgcgcgcctttattggatctgcttccacattctt

SEQ ID NO: 395066 - DNA, 54 bp, Artificial
  Synthetic oligonucleotide
gacatatggggtaacatttgcgtcgttaacgcgggtgtttaagagtgataaaac

SEQ ID NO: 395067 - DNA, 60 bp, Artificial
  Synthetic oligonucleotide
gacatatgtgcattttcaatccactaaccgtgtcgcacttaccctgggggctgttgtcgc

SEQ ID NO: 395068 - DNA, 53 bp, Artificial
  Synthetic oligonucleotide
gacatattatgaagaatcccctggcccatgtcaatcactgacatcacgtgact

SEQ ID NO: 395069 - DNA, 55 bp, Artificial
  Synthetic oligonucleotide
gacatattgcagaggatgcgccctataccatgtatgtcagtggtgcagccagtat

SEQ ID NO: 395070 - DNA, 60 bp, Artificial
  Synthetic oligonucleotide
gacatattggccgcgcagcgcaacacccactgaaacacaggaggatagactacgatcaaa

SEQ ID NO: 395071 - DNA, 53 bp, Artificial
  Synthetic oligonucleotide
gacatattgggggttctttggaagttatagtaccgacaaattgataagtcggt

SEQ ID NO: 395072 - DNA, 60 bp, Artificial
  Synthetic oligonucleotide
gacatcaaacacaccgagaaggtaatcatcattgacggtctcttgacggctgacgttctg

SEQ ID NO: 395073 - DNA, 57 bp, Artificial
  Synthetic oligonucleotide
gacatcaaacagggaccaaaagagccttttaaggactatgtggatagattctacaaa

SEQ ID NO: 395074 - DNA, 50 bp, Artificial
  Synthetic oligonucleotide
gacatcaaatagtgccagcactggaaatatccagggccaaggcccacgtt

SEQ ID NO: 395075 - DNA, 60 bp, Artificial
  Synthetic oligonucleotide
gacatcaaatctcacttttactgtctattcggacttacttgcattcgtgtcagctgatac

SEQ ID NO: 395076 - DNA, 59 bp, Artificial
  Synthetic oligonucleotide
gacatcaacgagacatatacgaaatgggcttcagattcacgaggaaaacttattactgg

SEQ ID NO: 395077 - DNA, 55 bp, Artificial
  Synthetic oligonucleotide
gacatcaagcaggatcaacctcgtccaactcacccagcccaatgtgaaccaagca

SEQ ID NO: 395078 - DNA, 51 bp, Artificial
  Synthetic oligonucleotide
gacatcaagccctggccgttccgatcggcaatgaaattgaagtaatatacg

SEQ ID NO: 395079 - DNA, 60 bp, Artificial
  Synthetic oligonucleotide
gacatcaatacttcaatgggcaacaagataatcatgacaggactcatgcatttgtacttc

SEQ ID NO: 395080 - DNA, 60 bp, Artificial
  Synthetic oligonucleotide
gacatcacagaatattgcgttcttaacagcccagttcttaagcgcctcttgttctggctt

SEQ ID NO: 395081 - DNA, 60 bp, Artificial
  Synthetic oligonucleotide
gacatcacagcagatttggaccattctgcgtaaaaaacgaaccactagaattccaactga

SEQ ID NO: 395082 - DNA, 60 bp, Artificial
  Synthetic oligonucleotide
gacatcagacggtttctctgaccctactcaaccaaattatttagtgacatgcgatatccg

SEQ ID NO: 395083 - DNA, 60 bp, Artificial
  Synthetic oligonucleotide
gacatcagatgttgaatgtcttcttaggaagacaaccgtgttgagggagaatctaacaga

SEQ ID NO: 395084 - DNA, 53 bp, Artificial
  Synthetic oligonucleotide
gacatcaggcggggatggagcatctaagcatgaccggggcagtgcgcggatgc

SEQ ID NO: 395085 - DNA, 55 bp, Artificial
  Synthetic oligonucleotide
gacatcataatgtgtgatgagtgccattcaactgactcgactaccatcttgggca

SEQ ID NO: 395086 - DNA, 60 bp, Artificial
  Synthetic oligonucleotide
gacatcatcatatcagggtatgggtgcatttatgggtgggaattattactcaacgggtgg

SEQ ID NO: 395087 - DNA, 57 bp, Artificial
  Synthetic oligonucleotide
gacatcatgggaattccttattgcaactacagtagatattggtatctaaatcacact

SEQ ID NO: 395088 - DNA, 60 bp, Artificial
  Synthetic oligonucleotide
gacatcatggtgcgcctctcccctgagccagacttggctcgggttgtcatggatgatctc

SEQ ID NO: 395089 - DNA, 55 bp, Artificial
  Synthetic oligonucleotide
gacatcatttcgtgtgaatggaatgctgaagcaaagaggaggggcgtcgctctcg

SEQ ID NO: 395090 - DNA, 55 bp, Artificial
  Synthetic oligonucleotide
gacatcattttcttatgggggatccatcatccgcccgacacaaaagagcaaacga

SEQ ID NO: 395091 - DNA, 60 bp, Artificial
  Synthetic oligonucleotide
gacatccaatagtatagtagcgctttgtggatccaaggagcgattgggatcgtggtcatg

SEQ ID NO: 395092 - DNA, 55 bp, Artificial
  Synthetic oligonucleotide
gacatccagatccgatcaagtgtcctccttcaggtacgcttccatgagcgtgggc

SEQ ID NO: 395093 - DNA, 51 bp, Artificial
  Synthetic oligonucleotide
gacatccaggggtcatttcgccgtagatcatatcaaatacaagggttacac

SEQ ID NO: 395094 - DNA, 60 bp, Artificial
  Synthetic oligonucleotide
gacatccatgaatccatcaggtggaccaaggacccgaagaacacccaagatcatgtgcgc

SEQ ID NO: 395095 - DNA, 56 bp, Artificial
  Synthetic oligonucleotide
gacatcccacactttcacaactccgttcgtcccgactctccctgccttttgaatac

SEQ ID NO: 395096 - DNA, 56 bp, Artificial
  Synthetic oligonucleotide
gacatcccagaagttggcggagaaccactacaccctaccccctgactccttgctgg

SEQ ID NO: 395097 - DNA, 60 bp, Artificial
  Synthetic oligonucleotide
gacatcccatacaatcaagttcacatatcgagggcgagcgacccaaagattgaagggtgt

SEQ ID NO: 395098 - DNA, 51 bp, Artificial
  Synthetic oligonucleotide
gacatcccggggatcgggtgtcgcgcgggttaaaccgacagtaatcaggca

SEQ ID NO: 395099 - DNA, 58 bp, Artificial
  Synthetic oligonucleotide
gacatccctcccttgttagatttggctgcataccttaagaagccgagagagggagccg

SEQ ID NO: 395100 - DNA, 57 bp, Artificial
  Synthetic oligonucleotide
gacatccctttcaagttagaacttaagctatccaatgggaggtatccattgtgggcg

SEQ ID NO: 395101 - DNA, 60 bp, Artificial
  Synthetic oligonucleotide
gacatccggaagcacttcatggatgcagaacaccacaaggagctagacacaatttatgaa

SEQ ID NO: 395102 - DNA, 60 bp, Artificial
  Synthetic oligonucleotide
gacatcctatcagtatggttgcactgtctcctcttggggctttggttgcttgctacaagg

SEQ ID NO: 395103 - DNA, 55 bp, Artificial
  Synthetic oligonucleotide
gacatcctcaagtaggacctctcccacaaggggtgcttagaaacccctcagggtc

SEQ ID NO: 395104 - DNA, 55 bp, Artificial
  Synthetic oligonucleotide
gacatcgaggacagcgcatatattggatagagcctgtagcgactttctaacgagt

SEQ ID NO: 395105 - DNA, 55 bp, Artificial
  Synthetic oligonucleotide
gacatcgcaagaaaagagatgagatgcggaagtggcatcttcgtgcacaacgacg

SEQ ID NO: 395106 - DNA, 55 bp, Artificial
  Synthetic oligonucleotide
gacatcgcaagtcgttccagtattatactgttgctcctcacgactgtgatgacca

SEQ ID NO: 395107 - DNA, 58 bp, Artificial
  Synthetic oligonucleotide
gacatcgccaacggcccaagggccatcgatacgagtatcgtccttgtggcaatatgct

SEQ ID NO: 395108 - DNA, 60 bp, Artificial
  Synthetic oligonucleotide
gacatcggacaccatagagaaatcaaggccgttgatcagactcacggcatccttgacaac

SEQ ID NO: 395109 - DNA, 56 bp, Artificial
  Synthetic oligonucleotide
gacatcgggtttgtgcctaatgagatccctaaggttaacttagattggtatcccga

SEQ ID NO: 395110 - DNA, 60 bp, Artificial
  Synthetic oligonucleotide
gacatcgtcaatggtgctctggggagtccaggctgtgatcatttgaatggtgcagaatgg

SEQ ID NO: 395111 - DNA, 56 bp, Artificial
  Synthetic oligonucleotide
gacatcgtgaacccttacgatggctgggcctgcaagatcaactacatggagcgcct

SEQ ID NO: 395112 - DNA, 55 bp, Artificial
  Synthetic oligonucleotide
gacatcgtgcgaggaaatgacaatgcttttaattcaacctggatttggacttagc

SEQ ID NO: 395113 - DNA, 55 bp, Artificial
  Synthetic oligonucleotide
gacatctaccatcaggctatctggcattcagacgtcgcagccggcgttgtcaacg

SEQ ID NO: 395114 - DNA, 51 bp, Artificial
  Synthetic oligonucleotide
gacatctagcatacttgtgtagtttggcagagatagctaaagagggaccaa

SEQ ID NO: 395115 - DNA, 55 bp, Artificial
  Synthetic oligonucleotide
gacatctaggccagagcagagccatcgcaagggaggattttcctcgggtactgac

SEQ ID NO: 395116 - DNA, 55 bp, Artificial
  Synthetic oligonucleotide
gacatctatctctcatcagtgtgcggtggtgtgtcggatggtgtagtctggtacc

SEQ ID NO: 395117 - DNA, 55 bp, Artificial
  Synthetic oligonucleotide
gacatctatttaagcgtaataatggaactctcacgattcgctcgcgacatggaga

SEQ ID NO: 395118 - DNA, 57 bp, Artificial
  Synthetic oligonucleotide
gacatctcaagcgaactaggaaaagtcaaccagagtctttcaaatgtagaggacctt

SEQ ID NO: 395119 - DNA, 60 bp, Artificial
  Synthetic oligonucleotide
gacatctcaagtgcaaagtccgtatggagaaattgagaatcaagggaatgtcatacacga

SEQ ID NO: 395120 - DNA, 55 bp, Artificial
  Synthetic oligonucleotide
gacatctcatattagacgtacttaccacaaggagttggttgcgctaactcgcgga

SEQ ID NO: 395121 - DNA, 58 bp, Artificial
  Synthetic oligonucleotide
gacatctccaccaattaaaagagctcttcagagcttaattgttatgtggtcccctatt

SEQ ID NO: 395122 - DNA, 53 bp, Artificial
  Synthetic oligonucleotide
gacatctcctagtattgtgacatgtatggatgttgtgtatgcaactagttctc

SEQ ID NO: 395123 - DNA, 55 bp, Artificial
  Synthetic oligonucleotide
gacatctcctggtacaatctatgtttacaagtcttgtcagagcctctttccactg

SEQ ID NO: 395124 - DNA, 55 bp, Artificial
  Synthetic oligonucleotide
gacatctcgattggcctcatcaaagtgtacgtggccagcgagtttgtagtcgatc

SEQ ID NO: 395125 - DNA, 55 bp, Artificial
  Synthetic oligonucleotide
gacatctctactgctggtctggaatggaggctcccaacaaactctcctacggttt

SEQ ID NO: 395126 - DNA, 60 bp, Artificial
  Synthetic oligonucleotide
gacatctgaatgagattttgagagacgaatcaggatgctatattgacgagtgggcaatag

SEQ ID NO: 395127 - DNA, 55 bp, Artificial
  Synthetic oligonucleotide
gacatctgagggattgtcaaccgacaccggtgagatccacgtcacaccgtcaggg

SEQ ID NO: 395128 - DNA, 55 bp, Artificial
  Synthetic oligonucleotide
gacatctgcaagtcccctgtacaaatctgaaattgaatccattaacgacaagctc

SEQ ID NO: 395129 - DNA, 55 bp, Artificial
  Synthetic oligonucleotide
gacatctggggtaaaacccgtcgtccagaaggaacaccaggcatgtacaaggcat

SEQ ID NO: 395130 - DNA, 59 bp, Artificial
  Synthetic oligonucleotide
gacatctgtagctataaccggatcactaagactattcccgtcagaacgagtactaacta

SEQ ID NO: 395131 - DNA, 55 bp, Artificial
  Synthetic oligonucleotide
gacatctgtaggagattgtgcctatatagggccttacgaggacttagccagtaga

SEQ ID NO: 395132 - DNA, 57 bp, Artificial
  Synthetic oligonucleotide
gacatctgttgggaaggttatcggtattcacattggtggcaatggtagacagggttt

SEQ ID NO: 395133 - DNA, 55 bp, Artificial
  Synthetic oligonucleotide
gacatcttctctaactgcctcgtcccagacattgtattttccgttctcgatgccc

SEQ ID NO: 395134 - DNA, 55 bp, Artificial
  Synthetic oligonucleotide
gacatcttgataagaggagcagtcggatcgggtaaatctactggcctgccgtttc

SEQ ID NO: 395135 - DNA, 55 bp, Artificial
  Synthetic oligonucleotide
gacatcttggcagctcagtttgctatgttgtccaccgctatgtctgtcaagaggc

SEQ ID NO: 395136 - DNA, 60 bp, Artificial
  Synthetic oligonucleotide
gacatcttggctgactgttgtgaacagacggaacttaccaaaagcgtcgtactcacattg

SEQ ID NO: 395137 - DNA, 60 bp, Artificial
  Synthetic oligonucleotide
gacatcttggtactcagtcattgattactcaatgtttacgcgaacagcattagttggatt

SEQ ID NO: 395138 - DNA, 53 bp, Artificial
  Synthetic oligonucleotide
gacatgaaaccaaagatggacacatcaagctactcagcttatgatccaccagc

SEQ ID NO: 395139 - DNA, 60 bp, Artificial
  Synthetic oligonucleotide
gacatgaaattattttgtcagatggtatctacagtagagttcattccaccaatggccagc

SEQ ID NO: 395140 - DNA, 53 bp, Artificial
  Synthetic oligonucleotide
gacatgaaccgaatggtggatactgatctactgctggacgtgagtggtatgcc

SEQ ID NO: 395141 - DNA, 56 bp, Artificial
  Synthetic oligonucleotide
gacatgaactactgggatgacacagatattgtacatgcaatatcaatatgtactgc

SEQ ID NO: 395142 - DNA, 55 bp, Artificial
  Synthetic oligonucleotide
gacatgaagtttattcaccatactctcaataggagccactagttgagcctgtgtg

SEQ ID NO: 395143 - DNA, 59 bp, Artificial
  Synthetic oligonucleotide
gacatgaatgattgtttcgtaactcgccatgtcaaaatatgtatcattggtactgtgtc

SEQ ID NO: 395144 - DNA, 60 bp, Artificial
  Synthetic oligonucleotide
gacatgaatgggagaaactgatcctcaaagattttggggtacagtcgcctcacagattga

SEQ ID NO: 395145 - DNA, 50 bp, Artificial
  Synthetic oligonucleotide
gacatgacacaaggggttgtgaccggggtggacacgtacgcgggtgctta

SEQ ID NO: 395146 - DNA, 60 bp, Artificial
  Synthetic oligonucleotide
gacatgacagcgcgaaatatggagcccagcatgtatgccagtaaccggcctttcattaac

SEQ ID NO: 395147 - DNA, 55 bp, Artificial
  Synthetic oligonucleotide
gacatgaccaattatatcatgctccgttacaaatgtctcatttcggcagtacacg

SEQ ID NO: 395148 - DNA, 60 bp, Artificial
  Synthetic oligonucleotide
gacatgactccaagcacagagatgtcaatgagaggaataagagtcagcaaaatgggcgta

SEQ ID NO: 395149 - DNA, 60 bp, Artificial
  Synthetic oligonucleotide
gacatgactgaggcagccttccgcctcgtaagtaattgtgttgctcctctcgcgcgtgaa

SEQ ID NO: 395150 - DNA, 54 bp, Artificial
  Synthetic oligonucleotide
gacatgagcaattgcttaacatgcagcaactggcagttttccatagtgaacaga

SEQ ID NO: 395151 - DNA, 60 bp, Artificial
  Synthetic oligonucleotide
gacatgagcggttgctcataggccccgctcactgacgagactacctaaattcgccactct

SEQ ID NO: 395152 - DNA, 51 bp, Artificial
  Synthetic oligonucleotide
gacatgaggaaggacaccgtggcacgaaggttattgtggaagtcgagaact

SEQ ID NO: 395153 - DNA, 55 bp, Artificial
  Synthetic oligonucleotide
gacatgaggcacgtccagaacgcgtttaccgaggagatccagttacactccctct

SEQ ID NO: 395154 - DNA, 60 bp, Artificial
  Synthetic oligonucleotide
gacatgagggcgggacgcataatcgcgtgggatgggcaagccgcactacaaattcacaac

SEQ ID NO: 395155 - DNA, 52 bp, Artificial
  Synthetic oligonucleotide
gacatgagtgctcacgttcctagctacattccgaacggtgtgttctctatac

SEQ ID NO: 395156 - DNA, 55 bp, Artificial
  Synthetic oligonucleotide
gacatgatgatcgacgatggggcccaatgagcacccggatcaccattctcccatc

SEQ ID NO: 395157 - DNA, 60 bp, Artificial
  Synthetic oligonucleotide
gacatgatgtctctcatgttggtaaggttatttgtatatccgacgtcactcgtggtaatg

SEQ ID NO: 395158 - DNA, 60 bp, Artificial
  Synthetic oligonucleotide
gacatgattgaaacaagatacgtacaaacatcacaaactcttgatgagatgagtgtagag

SEQ ID NO: 395159 - DNA, 60 bp, Artificial
  Synthetic oligonucleotide
gacatgattggcatctagacccaccatttctgtgtaggaaccgtacaaagacagaaggct

SEQ ID NO: 395160 - DNA, 50 bp, Artificial
  Synthetic oligonucleotide
gacatgcaaagccaggcaaaactatttggatggagggtaagcaagtgact

SEQ ID NO: 395161 - DNA, 60 bp, Artificial
  Synthetic oligonucleotide
gacatgcagacacttcaggctgcagcgggacgtaacagcctggttaacgatttagcctct

SEQ ID NO: 395162 - DNA, 51 bp, Artificial
  Synthetic oligonucleotide
gacatgcagagactgctccaatctgctaagtacacatactacacaaggagt

SEQ ID NO: 395163 - DNA, 55 bp, Artificial
  Synthetic oligonucleotide
gacatgcagctcttcatagtcaaacttgacagtcgatcgtcggcttccaacgaaa

SEQ ID NO: 395164 - DNA, 60 bp, Artificial
  Synthetic oligonucleotide
gacatgcagtgatgggttcccctgtgcgtgaatccatgattggcgcagttgatgtgaacg

SEQ ID NO: 395165 - DNA, 55 bp, Artificial
  Synthetic oligonucleotide
gacatgccatattaggacgtatagttaggcccacgtgtgaatatccagcaggaca

SEQ ID NO: 395166 - DNA, 56 bp, Artificial
  Synthetic oligonucleotide
gacatgccctacctagctccacacatacccgttagtctgtggtttaagtggtaccc

SEQ ID NO: 395167 - DNA, 60 bp, Artificial
  Synthetic oligonucleotide
gacatgccgcggatgcgaggtgactaacgcacacatagtgagcagctcttagccaggcac

SEQ ID NO: 395168 - DNA, 57 bp, Artificial
  Synthetic oligonucleotide
gacatgcgacgtcccgctgttacgcgtttaacgaatagtcataacaagaccgacgag

SEQ ID NO: 395169 - DNA, 54 bp, Artificial
  Synthetic oligonucleotide
gacatgcggagcaccaccttgccgcattaggagggactacaacagcactctcga

SEQ ID NO: 395170 - DNA, 60 bp, Artificial
  Synthetic oligonucleotide
gacatgcggttattagagtttctctcaagcctggagtgccttataatgcagatgacccat

SEQ ID NO: 395171 - DNA, 55 bp, Artificial
  Synthetic oligonucleotide
gacatgctcagggatctaaacgaagaagccagaaggcactttggaatgaacatgc

SEQ ID NO: 395172 - DNA, 60 bp, Artificial
  Synthetic oligonucleotide
gacatgctgcacaaactgggtgggagctatatttcgagccagagaagaactgctggaggc

SEQ ID NO: 395173 - DNA, 55 bp, Artificial
  Synthetic oligonucleotide
gacatgctgcgtctaattgattacaacaaggccgctttaagtaagttcaaggaag

SEQ ID NO: 395174 - DNA, 56 bp, Artificial
  Synthetic oligonucleotide
gacatgctggtaactgagatgtttagggaatacaatcacaggcacagtgttgggac

SEQ ID NO: 395175 - DNA, 55 bp, Artificial
  Synthetic oligonucleotide
gacatgctggtacgccatggaaatcaggcctgtgagtgagagagaagaaaccctg

SEQ ID NO: 395176 - DNA, 56 bp, Artificial
  Synthetic oligonucleotide
gacatgcttcacaaatgtcttataattggaaaagtctcactactgaaaaacgtccc

SEQ ID NO: 395177 - DNA, 52 bp, Artificial
  Synthetic oligonucleotide
gacatggaacaggccggactatgaaccacccactgtcctaggttgtgccttc

SEQ ID NO: 395178 - DNA, 53 bp, Artificial
  Synthetic oligonucleotide
gacatggaacgtatcccaaaagaccaacacgtatttatcacgggacaaacggg

SEQ ID NO: 395179 - DNA, 60 bp, Artificial
  Synthetic oligonucleotide
gacatggaagctatagcaatagagggtattaaatatggtctaaccataacccctgctgac

SEQ ID NO: 395180 - DNA, 56 bp, Artificial
  Synthetic oligonucleotide
gacatggaatggtacttggattaacgggtcaactaaagctgagaatgacacaattg

SEQ ID NO: 395181 - DNA, 51 bp, Artificial
  Synthetic oligonucleotide
gacatggacaggagaaccgttatggttgcaactctatgggctaacagacta

SEQ ID NO: 395182 - DNA, 57 bp, Artificial
  Synthetic oligonucleotide
gacatggactgggtttgtgaaacggagtcccctggatcgagggaagcttcaggtagc

SEQ ID NO: 395183 - DNA, 59 bp, Artificial
  Synthetic oligonucleotide
gacatggaggttctgtattcattgtcaaaaactcttaaagatgctagggataagattgt

SEQ ID NO: 395184 - DNA, 55 bp, Artificial
  Synthetic oligonucleotide
gacatggatttaaagagactcaaaagtgatgccaccaaagtaaaactgtcgtctg

SEQ ID NO: 395185 - DNA, 60 bp, Artificial
  Synthetic oligonucleotide
gacatggccacccaaacacatagtagatctggtaggggatacatggcacaagcttccgat

SEQ ID NO: 395186 - DNA, 60 bp, Artificial
  Synthetic oligonucleotide
gacatggctcacggagtgtattcaggataatttacaggttgtcgcaaaatgtccaggcca

SEQ ID NO: 395187 - DNA, 58 bp, Artificial
  Synthetic oligonucleotide
gacatgggagtgtgacttactatggcccgttcgtgtttgcggatgaccacgttggagg

SEQ ID NO: 395188 - DNA, 60 bp, Artificial
  Synthetic oligonucleotide
gacatggtcaatcctgagacactttcccaggagcattgataatttttgatcgacggttga

SEQ ID NO: 395189 - DNA, 60 bp, Artificial
  Synthetic oligonucleotide
gacatggtcatctgatgtcctggtgatactgcaaggtttgaagatccagcaagtgtcatg

SEQ ID NO: 395190 - DNA, 60 bp, Artificial
  Synthetic oligonucleotide
gacatggtgaaattcggtgaagagctgcgagaccatacgctgatttctaacgaagcgtgg

SEQ ID NO: 395191 - DNA, 60 bp, Artificial
  Synthetic oligonucleotide
gacatggtgcgaagagtctattgagctagttagtagtcctccggcccctgaatgcggcta

SEQ ID NO: 395192 - DNA, 55 bp, Artificial
  Synthetic oligonucleotide
gacatgtaacgttgggtcgaatgataactctaactgcaggccatgttgccacaga

SEQ ID NO: 395193 - DNA, 50 bp, Artificial
  Synthetic oligonucleotide
gacatgtaatctaatctgtttatgtaatctaatctatttgtgtaatccaa

SEQ ID NO: 395194 - DNA, 55 bp, Artificial
  Synthetic oligonucleotide
gacatgtaccatgagaaaccagtcatatatatgataggatcagcgccctcatatt

SEQ ID NO: 395195 - DNA, 60 bp, Artificial
  Synthetic oligonucleotide
gacatgtagaatgggcaacgaaagaattagacagatttggattgggatcacaactcttgg

SEQ ID NO: 395196 - DNA, 60 bp, Artificial
  Synthetic oligonucleotide
gacatgtatgctcagcttacatgtactttactacagcattagggaacacctgaatgtatg

SEQ ID NO: 395197 - DNA, 60 bp, Artificial
  Synthetic oligonucleotide
gacatgtcaagttgataataatctgtttgtatgggagatctgtctgaatgctttttacaa

SEQ ID NO: 395198 - DNA, 55 bp, Artificial
  Synthetic oligonucleotide
gacatgtcctgtcacatgtagagtttaacctaactaggatgtttgacaatctgcc

SEQ ID NO: 395199 - DNA, 60 bp, Artificial
  Synthetic oligonucleotide
gacatgtgacatgtcaacacctacgtaattcaggtacactcacactgtaataaccaattg

SEQ ID NO: 395200 - DNA, 55 bp, Artificial
  Synthetic oligonucleotide
gacatgtgagaaggtcccaaacccaactgcacccctcccactcgaaatcagttgt

SEQ ID NO: 395201 - DNA, 56 bp, Artificial
  Synthetic oligonucleotide
gacatgtgaggcgaccgaaactgaaagacagcgagggggtgggaggtagtccctcg

SEQ ID NO: 395202 - DNA, 60 bp, Artificial
  Synthetic oligonucleotide
gacatgtgcgaagttctcatgctcagggaagataacaggcaatctggtccaaattgagaa

SEQ ID NO: 395203 - DNA, 60 bp, Artificial
  Synthetic oligonucleotide
gacatgtggtttggctcacacgagatatcgcatatcagggacggaccctgcggtgtcggg

SEQ ID NO: 395204 - DNA, 55 bp, Artificial
  Synthetic oligonucleotide
gacatgttaaggaagaggcagctgacagtccttgacctccaccccggagcgggaa

SEQ ID NO: 395205 - DNA, 54 bp, Artificial
  Synthetic oligonucleotide
gacatgttcggccaccccatcccaaaaactaccctggtgcccgaacaacaacca

SEQ ID NO: 395206 - DNA, 55 bp, Artificial
  Synthetic oligonucleotide
gacatgttgaacgcggctgagatcaatatggaattcgagcaggttgagcctccag

SEQ ID NO: 395207 - DNA, 60 bp, Artificial
  Synthetic oligonucleotide
gacatgttgatcgcctaagtattcggttgcagatcggtaacgggcagtgttgctacggcg

SEQ ID NO: 395208 - DNA, 60 bp, Artificial
  Synthetic oligonucleotide
gacatgttttgaagcgtgtattgtcagtggagaaagatagtgtaatggtagacctggaag

SEQ ID NO: 395209 - DNA, 60 bp, Artificial
  Synthetic oligonucleotide
gacatgtttttctcccggattgaacatctgtattcagcgattagagtaggcacagttgtc

SEQ ID NO: 395210 - DNA, 60 bp, Artificial
  Synthetic oligonucleotide
gacattaaacaggaatcagccggctgcaactgcattagctaatactatagaggtcttcag

SEQ ID NO: 395211 - DNA, 55 bp, Artificial
  Synthetic oligonucleotide
gacattaaagcgttagccgcagagcaggtgtataaaatcgtcaaagttcccagta

SEQ ID NO: 395212 - DNA, 55 bp, Artificial
  Synthetic oligonucleotide
gacattaacaatctatctgtagcgacgctatacgcgggcgttcgtgtcctaccaa

SEQ ID NO: 395213 - DNA, 55 bp, Artificial
  Synthetic oligonucleotide
gacattaagagcttctgacttactgccgctgttaagcgctttcgcgtaagcatca

SEQ ID NO: 395214 - DNA, 50 bp, Artificial
  Synthetic oligonucleotide
gacattaaggtcactttgtgctgagatgagcgacggctttactgtgacgt

SEQ ID NO: 395215 - DNA, 59 bp, Artificial
  Synthetic oligonucleotide
gacattacaaagaggtgctacataataggctacattcctgccataatatgcggggcggg

SEQ ID NO: 395216 - DNA, 60 bp, Artificial
  Synthetic oligonucleotide
gacattacagacgtgcagaacaggcacgtatgaccatgtcacaatggattgcatacaggg

SEQ ID NO: 395217 - DNA, 58 bp, Artificial
  Synthetic oligonucleotide
gacattagaaagtacataccagaaggagaggatgattatccggaatgtaatttagctt

SEQ ID NO: 395218 - DNA, 60 bp, Artificial
  Synthetic oligonucleotide
gacattagcccacgccgtatggcgttgagacttaagcgcgatagcgttttgcgcgaagac

SEQ ID NO: 395219 - DNA, 57 bp, Artificial
  Synthetic oligonucleotide
gacattagttgacaccagtatagaaacttttagaagcgctccagacggtcactttaa

SEQ ID NO: 395220 - DNA, 55 bp, Artificial
  Synthetic oligonucleotide
gacattatgagagatgtatgtctgcccttcctagctcgggagaacctctcaaacc

SEQ ID NO: 395221 - DNA, 55 bp, Artificial
  Synthetic oligonucleotide
gacattattcagtgatcaaagttgatggcagaacgatgaagcaggacacaagtgg

SEQ ID NO: 395222 - DNA, 57 bp, Artificial
  Synthetic oligonucleotide
gacattatttacacactctttggaaggcggggatcttatataaaagagagtccacac

SEQ ID NO: 395223 - DNA, 55 bp, Artificial
  Synthetic oligonucleotide
gacattattttgttcgaggtggtgcagtgggcgacgctattccagatggtactgt

SEQ ID NO: 395224 - DNA, 55 bp, Artificial
  Synthetic oligonucleotide
gacattcatttgcgggaggacattatcgataggtgtcaacaatatgtgggccctc

SEQ ID NO: 395225 - DNA, 55 bp, Artificial
  Synthetic oligonucleotide
gacattccaaaactgcccaaaattgcaaaccttgtatgcgaccttagttctcccc

SEQ ID NO: 395226 - DNA, 52 bp, Artificial
  Synthetic oligonucleotide
gacattccaaccgttactttgtcttaaccctagtctctatccaatcttccca

SEQ ID NO: 395227 - DNA, 51 bp, Artificial
  Synthetic oligonucleotide
gacattccacgaaccgtcatcttcagcactacatacttcatactcgctatc

SEQ ID NO: 395228 - DNA, 58 bp, Artificial
  Synthetic oligonucleotide
gacattccactagaccaccctcagcgtgttagtttgccgcacattgcaacggatccag

SEQ ID NO: 395229 - DNA, 55 bp, Artificial
  Synthetic oligonucleotide
gacattccgttttgcgacaaacatctaagcatcggcataggaatagacactcctt

SEQ ID NO: 395230 - DNA, 58 bp, Artificial
  Synthetic oligonucleotide
gacattcgaagaggctcatgggttagcttgggtttataaaccgacagcataacaatta

SEQ ID NO: 395231 - DNA, 57 bp, Artificial
  Synthetic oligonucleotide
gacattcgcgctgcacgagaactcgaatacctccaaccccccggccgcgggctatac

SEQ ID NO: 395232 - DNA, 52 bp, Artificial
  Synthetic oligonucleotide
gacattctcagtcggcctcactaccttcgcagtgggatcacagttgccctgc

SEQ ID NO: 395233 - DNA, 55 bp, Artificial
  Synthetic oligonucleotide
gacattgaagcggtggttgattttggcttgaaggtgagtgctgtgattgacactg

SEQ ID NO: 395234 - DNA, 59 bp, Artificial
  Synthetic oligonucleotide
gacattgacaataggagtattgcctacaacaaaattagtgttagctatggtgaaagaat

SEQ ID NO: 395235 - DNA, 55 bp, Artificial
  Synthetic oligonucleotide
gacattgaccactgggattcctacacaaatcaaccagtggtatgctgggaagact

SEQ ID NO: 395236 - DNA, 55 bp, Artificial
  Synthetic oligonucleotide
gacattgaggagccttctacaagcacaccaaagtcaccgctgcacggggtgacgt

SEQ ID NO: 395237 - DNA, 60 bp, Artificial
  Synthetic oligonucleotide
gacattgaggatgagagggttaagcaagtttggatcgagcaacatagttgttatgacgag

SEQ ID NO: 395238 - DNA, 60 bp, Artificial
  Synthetic oligonucleotide
gacattgagtattgtaacaaaccatgccatatcacaatttgagaaactgcagatggcctg

SEQ ID NO: 395239 - DNA, 60 bp, Artificial
  Synthetic oligonucleotide
gacattgcatagactgctcacgcggttgaaagcgatcgatccgttatccgctcgtgtact

SEQ ID NO: 395240 - DNA, 54 bp, Artificial
  Synthetic oligonucleotide
gacattgccaccggaagactggtaagtaatgcccccgaagactatttcaacttt

SEQ ID NO: 395241 - DNA, 56 bp, Artificial
  Synthetic oligonucleotide
gacattgccggccacatcaaaaatggttcgatgaggatcgtcgggccaaggacttg

SEQ ID NO: 395242 - DNA, 55 bp, Artificial
  Synthetic oligonucleotide
gacattggaagagtttagtttcagtgtaccgactgaagaattgactctaaattgg

SEQ ID NO: 395243 - DNA, 58 bp, Artificial
  Synthetic oligonucleotide
gacattggacggactctatatcacaactcatagggggatcatagctgcagggactgcc

SEQ ID NO: 395244 - DNA, 55 bp, Artificial
  Synthetic oligonucleotide
gacattggattctctattcttatgtaatcccagatggatcaaggctagtcatacc

SEQ ID NO: 395245 - DNA, 60 bp, Artificial
  Synthetic oligonucleotide
gacattggggattgatacttggaaaaagttcaatgagcagcaaaggattagatgtgctag

SEQ ID NO: 395246 - DNA, 57 bp, Artificial
  Synthetic oligonucleotide
gacattggggcaagtcccaatggttggcaccactaaggtttataatctaaacagcac

SEQ ID NO: 395247 - DNA, 52 bp, Artificial
  Synthetic oligonucleotide
gacattgggttgtttgcgtttcggcgattgtcatgcgtttgcgagcggcccg

SEQ ID NO: 395248 - DNA, 59 bp, Artificial
  Synthetic oligonucleotide
gacattggtcatatagttatgcagtacatgtacgttccacccggtgcccctctacccac

SEQ ID NO: 395249 - DNA, 60 bp, Artificial
  Synthetic oligonucleotide
gacattggttatgagattaatcaattcacaaggtctctcacacatccggttgttgcagaa

SEQ ID NO: 395250 - DNA, 55 bp, Artificial
  Synthetic oligonucleotide
gacattgtagcaataactgattggtcaggatatagtgggagttttgttcaacacc

SEQ ID NO: 395251 - DNA, 60 bp, Artificial
  Synthetic oligonucleotide
gacattgtagcctctgagcacctgctgcaccaatcccttgtcggcaagcagtctccattc

SEQ ID NO: 395252 - DNA, 50 bp, Artificial
  Synthetic oligonucleotide
gacattgtggcttgcctcttgtaagcacagttgatggtgcgattctgggg

SEQ ID NO: 395253 - DNA, 60 bp, Artificial
  Synthetic oligonucleotide
gacattgtgtctacagagactttccaatcatatatcatcaaacatgctctttcacctgat

SEQ ID NO: 395254 - DNA, 60 bp, Artificial
  Synthetic oligonucleotide
gacattgttcgtgatgacggtgcaataccactatcactccacaagatactcaaggactac

SEQ ID NO: 395255 - DNA, 60 bp, Artificial
  Synthetic oligonucleotide
gacattgttgcctcggagcatctgctgcatcagtcacttgtcggaaagaggtcccctttt

SEQ ID NO: 395256 - DNA, 55 bp, Artificial
  Synthetic oligonucleotide
gacatttactacgccaggttggttccggaatttatagcataccgggccacgatgt

SEQ ID NO: 395257 - DNA, 55 bp, Artificial
  Synthetic oligonucleotide
gacatttccgaaatgggagcaaacttccgagccgacagggtaatagacccaagac

SEQ ID NO: 395258 - DNA, 55 bp, Artificial
  Synthetic oligonucleotide
gacatttcgacgtcaatcctacaaatgggatcctatcatatctgacatttgggag

SEQ ID NO: 395259 - DNA, 55 bp, Artificial
  Synthetic oligonucleotide
gacatttctgcaaatgcggaatcaattccagtgattagccaacaaacatgcatta

SEQ ID NO: 395260 - DNA, 55 bp, Artificial
  Synthetic oligonucleotide
gacatttgactttggaacactcggaacgaccttactgaacttggacgcgaattac

SEQ ID NO: 395261 - DNA, 60 bp, Artificial
  Synthetic oligonucleotide
gacatttgctatcatcaatgttcgagagatactgtaatgcaccgataagacagtaattac

SEQ ID NO: 395262 - DNA, 58 bp, Artificial
  Synthetic oligonucleotide
gacatttggcggaaggactattttcaagggcctcagttctgatcaagctggggaggag

SEQ ID NO: 395263 - DNA, 54 bp, Artificial
  Synthetic oligonucleotide
gacatttgtcaaccatcagaatgggaaatcgagtttccacgtatagtcctcaat

SEQ ID NO: 395264 - DNA, 55 bp, Artificial
  Synthetic oligonucleotide
gacatttgttatgcatccagtgacttattcttacaatccgcatctcaaggcctac

SEQ ID NO: 395265 - DNA, 60 bp, Artificial
  Synthetic oligonucleotide
gacatttgttcatcgaaagaagagagaacgaggcgatgataccacagcgcgtgacgtctt

SEQ ID NO: 395266 - DNA, 55 bp, Artificial
  Synthetic oligonucleotide
gacattttagacgtgctaattcggtgctacctgtgtcacaaaccgctgtgtgaag

SEQ ID NO: 395267 - DNA, 55 bp, Artificial
  Synthetic oligonucleotide
gacattttggccgcgcagcggaacacacactgaaacacagaaggagggactacga

SEQ ID NO: 395268 - DNA, 60 bp, Artificial
  Synthetic oligonucleotide
gacattttgtcatggcacagctgttgttcaggaaaacgactcaagacttccgagattgct

SEQ ID NO: 395269 - DNA, 60 bp, Artificial
  Synthetic oligonucleotide
gacattttgtcctgaagactgagactgcgtcttgttttctgccgtgcttttgctcaactc

SEQ ID NO: 395270 - DNA, 57 bp, Artificial
  Synthetic oligonucleotide
gacattttgtcctttaccaaagagacacagtgtcaagtgctctagaaggggacttgg

SEQ ID NO: 395271 - DNA, 60 bp, Artificial
  Synthetic oligonucleotide
gacattttgtgtcacgagcgttcaccctacgttcagcatcatgtttggctatatgcaact

SEQ ID NO: 395272 - DNA, 53 bp, Artificial
  Synthetic oligonucleotide
gacatttttgtcataagagaaccattcatttcatgctctcacttggagtgcag

SEQ ID NO: 395273 - DNA, 58 bp, Artificial
  Synthetic oligonucleotide
gacattttttcagcaggccgcaagagacccaggagggacaccgaggtgtaccactcca

SEQ ID NO: 395274 - DNA, 53 bp, Artificial
  Synthetic oligonucleotide
gacatttttttaatagggcgggaacggttggagaggacattccacaggatttg

SEQ ID NO: 395275 - DNA, 54 bp, Artificial
  Synthetic oligonucleotide
gaccaaaagaattcggatggccatcaattagtgtcgaatagtttaaaaacgacc

SEQ ID NO: 395276 - DNA, 55 bp, Artificial
  Synthetic oligonucleotide
gaccaaaaggtccgttttccagtccagaggacctcactgccgagaggtgtcccga

SEQ ID NO: 395277 - DNA, 55 bp, Artificial
  Synthetic oligonucleotide
gaccaaaagtacacacagttttcgttgtagtccttggacaatatatttattgtcg

SEQ ID NO: 395278 - DNA, 53 bp, Artificial
  Synthetic oligonucleotide
gaccaaaatccgggactcgttacatctggtgaagtgtcccacccccgccgtta

SEQ ID NO: 395279 - DNA, 57 bp, Artificial
  Synthetic oligonucleotide
gaccaaacagttgggtggcttaacacattggtcggtgctagggcgattaccttgcgc

SEQ ID NO: 395280 - DNA, 55 bp, Artificial
  Synthetic oligonucleotide
gaccaaactagagatgaaatgagtatagagagtttcttgggtagatctgcttgcg

SEQ ID NO: 395281 - DNA, 57 bp, Artificial
  Synthetic oligonucleotide
gaccaaactaggagccacttatgacagtacaaagaaatattgggtctatcaaggaaa

SEQ ID NO: 395282 - DNA, 54 bp, Artificial
  Synthetic oligonucleotide
gaccaaactttatgggagtggagctaaactgataacagtaggaagctccaaata

SEQ ID NO: 395283 - DNA, 56 bp, Artificial
  Synthetic oligonucleotide
gaccaaagacatgttattcagtccgtattatggggagaatgtaatggtgttcgggt

SEQ ID NO: 395284 - DNA, 60 bp, Artificial
  Synthetic oligonucleotide
gaccaaagctatcacaaacccacacacaccgctctatcatctgagcacacagcttttctc

SEQ ID NO: 395285 - DNA, 55 bp, Artificial
  Synthetic oligonucleotide
gaccaaaggaaccttttagagattatgtagatcggttctataaaactctaagagc

SEQ ID NO: 395286 - DNA, 55 bp, Artificial
  Synthetic oligonucleotide
gaccaaagggctctgcacaataaattcgtggcatatattcgggaaggacaatgct

SEQ ID NO: 395287 - DNA, 55 bp, Artificial
  Synthetic oligonucleotide
gaccaaagtaaaatagacttagtagacgcagcagtaaacgccctagcagtctacg

SEQ ID NO: 395288 - DNA, 55 bp, Artificial
  Synthetic oligonucleotide
gaccaaagtaaatcggaggatcatgtctctgataatgaatccttcactacgtgtg

SEQ ID NO: 395289 - DNA, 55 bp, Artificial
  Synthetic oligonucleotide
gaccaaagttgaaacagtggccattatccagagaaaagatagaggctcttacaca

SEQ ID NO: 395290 - DNA, 53 bp, Artificial
  Synthetic oligonucleotide
gaccaaataacgttgaagtagagtttctattaaacgggcagataataaatact

SEQ ID NO: 395291 - DNA, 52 bp, Artificial
  Synthetic oligonucleotide
gaccaaatacaagacatatgggcatataacgcagaactgctagtactgcttg

SEQ ID NO: 395292 - DNA, 60 bp, Artificial
  Synthetic oligonucleotide
gaccaaatacaagacgtgtgggcatataatgcagagttgctagtactacttgaaaatcag

SEQ ID NO: 395293 - DNA, 50 bp, Artificial
  Synthetic oligonucleotide
gaccaaatacggacaatcatttctgtctttattcgctatcagagagtggg

SEQ ID NO: 395294 - DNA, 55 bp, Artificial
  Synthetic oligonucleotide
gaccaaatcattgggacccatagatcaccaaacttgacctatgctgctgcggtcg

SEQ ID NO: 395295 - DNA, 58 bp, Artificial
  Synthetic oligonucleotide
gaccaacaacagtgccacgcttgtgttgccatatcttaacatcacaccagcgtgtcta

SEQ ID NO: 395296 - DNA, 53 bp, Artificial
  Synthetic oligonucleotide
gaccaacaactagtacagttcattacccaaaggtatataaaacttatttcgaa

SEQ ID NO: 395297 - DNA, 58 bp, Artificial
  Synthetic oligonucleotide
gaccaacaatccgtgtgccaagacaattgttaagttgtttgagattcagaaaacagga

SEQ ID NO: 395298 - DNA, 55 bp, Artificial
  Synthetic oligonucleotide
gaccaacacttactggagggtatttgcatgacaatgttcctaagtgggagtatgc

SEQ ID NO: 395299 - DNA, 59 bp, Artificial
  Synthetic oligonucleotide
gaccaacagggcacttaccatgggcactatggactgcccatgggcccgttggattcgtc

SEQ ID NO: 395300 - DNA, 55 bp, Artificial
  Synthetic oligonucleotide
gaccaaccaagtcaattacttggcaggagtgatcgccaaccctcgaggtgggcag

SEQ ID NO: 395301 - DNA, 50 bp, Artificial
  Synthetic oligonucleotide
gaccaaccccacccgtcggaccggactacagcaaggtcgcgtcaaagctc

SEQ ID NO: 395302 - DNA, 58 bp, Artificial
  Synthetic oligonucleotide
gaccaaccctatccacaccccactgactgactcctttggatcttgacctcggaatgcc

SEQ ID NO: 395303 - DNA, 55 bp, Artificial
  Synthetic oligonucleotide
gaccaaccgagaggttggcaatgggaagcccctccgaacacaacttttgatgact

SEQ ID NO: 395304 - DNA, 52 bp, Artificial
  Synthetic oligonucleotide
gaccaacctatggtgcaggtgagatcactgtattggtggaggttgctgacat

SEQ ID NO: 395305 - DNA, 56 bp, Artificial
  Synthetic oligonucleotide
gaccaacgaataatatggcagaattggtatgcatttacgtcttcaatgaaacaagg

SEQ ID NO: 395306 - DNA, 60 bp, Artificial
  Synthetic oligonucleotide
gaccaacggcccaaatatgattcaattcgcaccattcttcttgcccagtggtgatgcgtc

SEQ ID NO: 395307 - DNA, 55 bp, Artificial
  Synthetic oligonucleotide
gaccaacgtcccaactttggataagggtgcggccgttgaagagtgtgaagcagga

SEQ ID NO: 395308 - DNA, 55 bp, Artificial
  Synthetic oligonucleotide
gaccaactaccaggagcaggatcagtactatttgaagaaccgatgattacaccag

SEQ ID NO: 395309 - DNA, 59 bp, Artificial
  Synthetic oligonucleotide
gaccaactcacaatcagacaatgaataccatgttagggtctgttacccggatgtttaca

SEQ ID NO: 395310 - DNA, 52 bp, Artificial
  Synthetic oligonucleotide
gaccaactcccatttgcagcagtccaacagaaaggacaaaggaggacaatca

SEQ ID NO: 395311 - DNA, 60 bp, Artificial
  Synthetic oligonucleotide
gaccaactccggcattgccatgtacgacaattggtcccatgcgtggcgatgtgaagaaat

SEQ ID NO: 395312 - DNA, 52 bp, Artificial
  Synthetic oligonucleotide
gaccaacttaagcccttcaccgcccctagaggaaagccacctaaaccctctg

SEQ ID NO: 395313 - DNA, 50 bp, Artificial
  Synthetic oligonucleotide
gaccaacttcaagggtgcctgcttcgacaaaggagcaatcacgggcgggg

SEQ ID NO: 395314 - DNA, 55 bp, Artificial
  Synthetic oligonucleotide
gaccaactttaaattcgatccagctcataccagggctcctcgctctacatctgcc

SEQ ID NO: 395315 - DNA, 55 bp, Artificial
  Synthetic oligonucleotide
gaccaagaaattaagaagcacttcgaagcttcaatgaaacccgttcaaggctaaa

SEQ ID NO: 395316 - DNA, 57 bp, Artificial
  Synthetic oligonucleotide
gaccaagaatccagaccaaaccatccaacgccatgtctgttaacagggggaagaatg

SEQ ID NO: 395317 - DNA, 55 bp, Artificial
  Synthetic oligonucleotide
gaccaagacaacagccaaggaagtggctctgttaagaacctattgcattgaagcc

SEQ ID NO: 395318 - DNA, 56 bp, Artificial
  Synthetic oligonucleotide
gaccaagacaagctgctggctagaatcagttaagggttttttctatgggctaaaaa

SEQ ID NO: 395319 - DNA, 60 bp, Artificial
  Synthetic oligonucleotide
gaccaagacatggaaccaggtgacaagttcagtggcctatttatcctcactgtcttgtta

SEQ ID NO: 395320 - DNA, 60 bp, Artificial
  Synthetic oligonucleotide
gaccaagagaagagtgaattcttgaaggaggcacacttaatgagtaaatttgatcatccc

SEQ ID NO: 395321 - DNA, 52 bp, Artificial
  Synthetic oligonucleotide
gaccaagagcaacaatcaaatctgcaggaccaagtgacatgtatgtacatgt

SEQ ID NO: 395322 - DNA, 60 bp, Artificial
  Synthetic oligonucleotide
gaccaagagtatgctagcgatgagtcaactgtcttttaacagcaataagaaacgtatcac

SEQ ID NO: 395323 - DNA, 55 bp, Artificial
  Synthetic oligonucleotide
gaccaagcacgggaggtgacttagaggtaacaaaccttcacctcatctgtggagg

SEQ ID NO: 395324 - DNA, 58 bp, Artificial
  Synthetic oligonucleotide
gaccaagccttttgctgttccaggcttatgacgtatctccgtggcattagttataagg

SEQ ID NO: 395325 - DNA, 50 bp, Artificial
  Synthetic oligonucleotide
gaccaagcgacatgtatgtccatgctggtaacttgatatatagaaacctt

SEQ ID NO: 395326 - DNA, 55 bp, Artificial
  Synthetic oligonucleotide
gaccaagcggcccgggaggcagccataaagacgcctccagatacatccactctcc

SEQ ID NO: 395327 - DNA, 55 bp, Artificial
  Synthetic oligonucleotide
gaccaaggagacaccataacgtttgaagccaccgggaatttgatagcaccatggt

SEQ ID NO: 395328 - DNA, 55 bp, Artificial
  Synthetic oligonucleotide
gaccaaggagatttgacgaaacttgaaccgaaatttgttaaatgcccatgttgtg

SEQ ID NO: 395329 - DNA, 55 bp, Artificial
  Synthetic oligonucleotide
gaccaaggagtaagacttcaccctttggcccgaacagccaaagtgcgtaatgagg

SEQ ID NO: 395330 - DNA, 55 bp, Artificial
  Synthetic oligonucleotide
gaccaaggatggtattgtcagaatacagggtcaactgtttactacccaaatgaga

SEQ ID NO: 395331 - DNA, 55 bp, Artificial
  Synthetic oligonucleotide
gaccaaggattgtgcaaatgttagcggacaatttatgcaatgtttctgattgcgt

SEQ ID NO: 395332 - DNA, 57 bp, Artificial
  Synthetic oligonucleotide
gaccaagggaaaacgtagcagttatacaggttggtgggccaaaatgtgcttgacata

SEQ ID NO: 395333 - DNA, 56 bp, Artificial
  Synthetic oligonucleotide
gaccaagggaaaacgtagcagttatacaggttggtggttcagacgtacttgacata

SEQ ID NO: 395334 - DNA, 59 bp, Artificial
  Synthetic oligonucleotide
gaccaaggtgcgacgccggtgatccccattactattaccctggcccctatgtgctctga

SEQ ID NO: 395335 - DNA, 53 bp, Artificial
  Synthetic oligonucleotide
gaccaaggttggggccctctgacatacgcgtccatgaaagggtcgtctgagga

SEQ ID NO: 395336 - DNA, 55 bp, Artificial
  Synthetic oligonucleotide
gaccaagtagaagtggtcgccgcacaagaactggtggaatcacagaatttcccgg

SEQ ID NO: 395337 - DNA, 58 bp, Artificial
  Synthetic oligonucleotide
gaccaagtaggattccctgtcacaccaagagtaccattaagaccaatgacattcaaat

SEQ ID NO: 395338 - DNA, 55 bp, Artificial
  Synthetic oligonucleotide
gaccaagtcactcgtatgagggtagttaatgccttagtagcatctcatcccggcc

SEQ ID NO: 395339 - DNA, 55 bp, Artificial
  Synthetic oligonucleotide
gaccaagtttcccatgttgagcagttgcacctttctggtggcagcgtgcaatcac

SEQ ID NO: 395340 - DNA, 55 bp, Artificial
  Synthetic oligonucleotide
gaccaataaacctatcggagggaagtaattgcgaggattgtgtatagccgtcctc

SEQ ID NO: 395341 - DNA, 55 bp, Artificial
  Synthetic oligonucleotide
gaccaataattcagctactatagtggtaccttatataaactgtgttcccatggac

SEQ ID NO: 395342 - DNA, 55 bp, Artificial
  Synthetic oligonucleotide
gaccaatacctttcacatatacgcgagcgtctgcatattacgaatgttcccgacc

SEQ ID NO: 395343 - DNA, 55 bp, Artificial
  Synthetic oligonucleotide
gaccaatacgtcggttgccaactacacatcgatgaataggatcagaagtcttgct

SEQ ID NO: 395344 - DNA, 55 bp, Artificial
  Synthetic oligonucleotide
gaccaatagacaagtcatagttgacaataacaactggtctggttattctggcatc

SEQ ID NO: 395345 - DNA, 55 bp, Artificial
  Synthetic oligonucleotide
gaccaataggtggcaattaaccaaattgctaaaggtcaagcacttctgtttcccc

SEQ ID NO: 395346 - DNA, 51 bp, Artificial
  Synthetic oligonucleotide
gaccaatatggagaatccatggttgaaaatggttacacaataggtgaactc

SEQ ID NO: 395347 - DNA, 57 bp, Artificial
  Synthetic oligonucleotide
gaccaatattgtgttgatcaaagaagaagacaagacattcacgaacctttcaaaacc

SEQ ID NO: 395348 - DNA, 55 bp, Artificial
  Synthetic oligonucleotide
gaccaatcacatcattgctgacgaggctatataactttggggcctacttggctga

SEQ ID NO: 395349 - DNA, 59 bp, Artificial
  Synthetic oligonucleotide
gaccaatcccgtccatgccctagattctcatggactaacagaagcaagtgtccgggggc

SEQ ID NO: 395350 - DNA, 55 bp, Artificial
  Synthetic oligonucleotide
gaccaatcgaaacgccatctcgcagtttgactacgattggttcgtgacgggcgcc

SEQ ID NO: 395351 - DNA, 60 bp, Artificial
  Synthetic oligonucleotide
gaccaatctagtaccattcctgacatgtagtgatgtcttcctaacgatcttgcccattgg

SEQ ID NO: 395352 - DNA, 50 bp, Artificial
  Synthetic oligonucleotide
gaccaatcttctgccagtggtcattcttgaatggtcacactttctctgcg

SEQ ID NO: 395353 - DNA, 55 bp, Artificial
  Synthetic oligonucleotide
gaccaatgaatcgagagagaagatcttggcactcgattcgcagctggacatcgct

SEQ ID NO: 395354 - DNA, 55 bp, Artificial
  Synthetic oligonucleotide
gaccaatgaatctgttgctaattactctaatatgtcagccataaggagccttgca

SEQ ID NO: 395355 - DNA, 60 bp, Artificial
  Synthetic oligonucleotide
gaccaatgagtacttgtcattatcgatcgtttgtaatccgatggcgatcgatttgcgttc

SEQ ID NO: 395356 - DNA, 59 bp, Artificial
  Synthetic oligonucleotide
gaccaattaccgataacaccaattatgatagtgacgagacatatgtcgcttcgacgaat

SEQ ID NO: 395357 - DNA, 55 bp, Artificial
  Synthetic oligonucleotide
gaccaattccctcttggaagaaaattcatagcacagaaccaaggcggtggttcca

SEQ ID NO: 395358 - DNA, 58 bp, Artificial
  Synthetic oligonucleotide
gaccaattcgaaaagcttttattctcgggcgatgattctctaggattttcagtgcttc

SEQ ID NO: 395359 - DNA, 57 bp, Artificial
  Synthetic oligonucleotide
gaccaattgaaatgggagcctatcggtaactatcaagacttagatgttttaggtcta

SEQ ID NO: 395360 - DNA, 55 bp, Artificial
  Synthetic oligonucleotide
gaccaattggagacaattaacaactcggctggtcatttgctagacatactcaagg

SEQ ID NO: 395361 - DNA, 60 bp, Artificial
  Synthetic oligonucleotide
gaccacaaacacttgtgcaaatgcgacattcaatagccggcaacaaggaatggcaaacat

SEQ ID NO: 395362 - DNA, 55 bp, Artificial
  Synthetic oligonucleotide
gaccacaacgtatgctgataatggttggaattcaggtacatttgcaccattgcca

SEQ ID NO: 395363 - DNA, 53 bp, Artificial
  Synthetic oligonucleotide
gaccacacaaatagttatgtgggcctaatgacctagcccacatggtcttgccc

SEQ ID NO: 395364 - DNA, 55 bp, Artificial
  Synthetic oligonucleotide
gaccacacacttatgagcatagtcacaagtctgcacctcagcatcagaggaagca

SEQ ID NO: 395365 - DNA, 60 bp, Artificial
  Synthetic oligonucleotide
gaccacagaagtggctcttggcctagtatgtgccacttgtgaacagattgctgatgccca

SEQ ID NO: 395366 - DNA, 58 bp, Artificial
  Synthetic oligonucleotide
gaccacagagattgaatcaagttagacttctcagtctatttaaagctcctagtaaagt

SEQ ID NO: 395367 - DNA, 55 bp, Artificial
  Synthetic oligonucleotide
gaccacagatgccatcttgcacgctccggggtgtgttccttgcgttcgcgagggt

SEQ ID NO: 395368 - DNA, 55 bp, Artificial
  Synthetic oligonucleotide
gaccacagcaggagcaggtgtcaaatgggattatgatcaaccagggtgatgcacc

SEQ ID NO: 395369 - DNA, 55 bp, Artificial
  Synthetic oligonucleotide
gaccacaggaggctctccaagaagccgccggtcctgctctcatcccagtaatcgc

SEQ ID NO: 395370 - DNA, 57 bp, Artificial
  Synthetic oligonucleotide
gaccacagtaatgcttacccaagtatgttcccgaaacttagccaactgaccacagta

SEQ ID NO: 395371 - DNA, 55 bp, Artificial
  Synthetic oligonucleotide
gaccacattggcaacgaaccgattcagaagattaagttggtccgtgatgagcagg

SEQ ID NO: 395372 - DNA, 60 bp, Artificial
  Synthetic oligonucleotide
gaccacattttgcttcggttggatactaatcccttctatcacactagctatactgattgt

SEQ ID NO: 395373 - DNA, 53 bp, Artificial
  Synthetic oligonucleotide
gaccaccaagtaggtttcatacactctgtgcggtgttcaggtagcactatatt

SEQ ID NO: 395374 - DNA, 57 bp, Artificial
  Synthetic oligonucleotide
gaccaccaggttctactaatatttcaatcagctaagtaattaaatgatcatgccagc

SEQ ID NO: 395375 - DNA, 51 bp, Artificial
  Synthetic oligonucleotide
gaccaccattgcacccggtagtatccacggtcctcctctggcccgtccttt

SEQ ID NO: 395376 - DNA, 55 bp, Artificial
  Synthetic oligonucleotide
gaccacccatcttaattagcggcaagacaatacagcggtacacaatacgtgtcat

SEQ ID NO: 395377 - DNA, 55 bp, Artificial
  Synthetic oligonucleotide
gaccaccgaggtggcgtttggcctggtatgcgccacgtgtgagcagattgctgac

SEQ ID NO: 395378 - DNA, 58 bp, Artificial
  Synthetic oligonucleotide
gaccaccgtgaacgccctctcagtcttgcccaaggtcttatataagaggactcttgga

SEQ ID NO: 395379 - DNA, 53 bp, Artificial
  Synthetic oligonucleotide
gaccacgaaacccgagatcacttctccccatccccccccaggacaaaccaata

SEQ ID NO: 395380 - DNA, 55 bp, Artificial
  Synthetic oligonucleotide
gaccacgaaggaagactgattcaaaatagcattacaatagagagaatggttctct

SEQ ID NO: 395381 - DNA, 60 bp, Artificial
  Synthetic oligonucleotide
gaccacgaagggaggctgatccaaaacagcataaccatagagagaatggttctatcagcg

SEQ ID NO: 395382 - DNA, 55 bp, Artificial
  Synthetic oligonucleotide
gaccacgagaccagaatccttgacgagtaccagttaggcacggaatccgacttga

SEQ ID NO: 395383 - DNA, 60 bp, Artificial
  Synthetic oligonucleotide
gaccacgatgcagttgatttcgcattgattaaagtgcctcccgccgtctggtctaagttg

SEQ ID NO: 395384 - DNA, 56 bp, Artificial
  Synthetic oligonucleotide
gaccacgcaaccgcaaccacgtttactctaagcaccaacgcttccccgatttgtca

SEQ ID NO: 395385 - DNA, 58 bp, Artificial
  Synthetic oligonucleotide
gaccacggggcgcacctctctgtacgcggtctccccgtctgtgccatctcgtctcccg

SEQ ID NO: 395386 - DNA, 54 bp, Artificial
  Synthetic oligonucleotide
gaccacgggtttctacaggccctatcaagagtggaatagaaagcctttaccaac

SEQ ID NO: 395387 - DNA, 55 bp, Artificial
  Synthetic oligonucleotide
gaccacggtcaattactggatctgaactatgtaatgctggtgtgacggctagccg

SEQ ID NO: 395388 - DNA, 55 bp, Artificial
  Synthetic oligonucleotide
gaccacggttgccaacaaccgtatcacggagcggggatacgaaagataccgtatc

SEQ ID NO: 395389 - DNA, 55 bp, Artificial
  Synthetic oligonucleotide
gaccacgtacggcgtggtgggcaaacgcgactatggcaaagtggaccagttggtc

SEQ ID NO: 395390 - DNA, 55 bp, Artificial
  Synthetic oligonucleotide
gaccactaacttaaatgtcaagggcgatgagcgctggctttatctgcacagcagg

SEQ ID NO: 395391 - DNA, 54 bp, Artificial
  Synthetic oligonucleotide
gaccactaacttacagtgggtgatagctgcttatggaccctccgaaactatgta

SEQ ID NO: 395392 - DNA, 55 bp, Artificial
  Synthetic oligonucleotide
gaccactacctttgcaggcactgtttaaaccttctgctgtcagtatccgacaggt

SEQ ID NO: 395393 - DNA, 57 bp, Artificial
  Synthetic oligonucleotide
gaccactagtcccactgaatcgactacgtggcagtcgagcactcaccgcgagagcac

SEQ ID NO: 395394 - DNA, 52 bp, Artificial
  Synthetic oligonucleotide
gaccactcaaggtccgaatgggtggtttcccctccgccccgccaaggtccaa

SEQ ID NO: 395395 - DNA, 55 bp, Artificial
  Synthetic oligonucleotide
gaccactcagaaagcaacaacagcactgcaacactgtgcttgggacatcacgcag

SEQ ID NO: 395396 - DNA, 50 bp, Artificial
  Synthetic oligonucleotide
gaccactcatctcatgtctacaggtactgattatggtgggaagcagactt

SEQ ID NO: 395397 - DNA, 53 bp, Artificial
  Synthetic oligonucleotide
gaccactccagtacaaagacctcaagatagatatcaaaaccacccccccacca

SEQ ID NO: 395398 - DNA, 52 bp, Artificial
  Synthetic oligonucleotide
gaccactcgaagggtcgtccgtacggcacgacctcccacatcgcacgcgcga

SEQ ID NO: 395399 - DNA, 58 bp, Artificial
  Synthetic oligonucleotide
gaccactgaagagcgtcatgttccggggtggtattgtaaatcacccagtcgtagcagg

SEQ ID NO: 395400 - DNA, 57 bp, Artificial
  Synthetic oligonucleotide
gaccactgatgatggcgtttcagcacctattctaccaaatttccaccccaccccttg

SEQ ID NO: 395401 - DNA, 57 bp, Artificial
  Synthetic oligonucleotide
gaccactggcgaatctgccgaccccgtcaccactaccgttgagaactacggaggaga

SEQ ID NO: 395402 - DNA, 55 bp, Artificial
  Synthetic oligonucleotide
gaccacttaaataattgtgggtccctaatgcacgtgcccacattgtcttccccgt

SEQ ID NO: 395403 - DNA, 55 bp, Artificial
  Synthetic oligonucleotide
gaccacttagagctgtaccatacacaactgtaaactcaaccaattatatgcctca

SEQ ID NO: 395404 - DNA, 53 bp, Artificial
  Synthetic oligonucleotide
gaccacttcaatataaggacctcaaaatagacattaagaccacccccccaccg

SEQ ID NO: 395405 - DNA, 57 bp, Artificial
  Synthetic oligonucleotide
gaccactttatctggtcttcaaaacttacgggactatgctagtgaacccagactata

SEQ ID NO: 395406 - DNA, 60 bp, Artificial
  Synthetic oligonucleotide
gaccactttgtctcagtgatctcagggctgaatcttgtttacggactgttgatcagagac

SEQ ID NO: 395407 - DNA, 59 bp, Artificial
  Synthetic oligonucleotide
gaccagaaatctatgtccctttctgtgtaggccttgctcagaatttctattttgggaga

SEQ ID NO: 395408 - DNA, 55 bp, Artificial
  Synthetic oligonucleotide
gaccagaatgcaggccagacgagaaacgtgatgcagataatgtttaacaacgctt

SEQ ID NO: 395409 - DNA, 55 bp, Artificial
  Synthetic oligonucleotide
gaccagaatggacgactggctgttcgcataggcagattacgtctcgatcaggagg

SEQ ID NO: 395410 - DNA, 55 bp, Artificial
  Synthetic oligonucleotide
gaccagacaaagtatgaggcttacgtggtatgtggtcctttccgaactggacagg

SEQ ID NO: 395411 - DNA, 59 bp, Artificial
  Synthetic oligonucleotide
gaccagacaatttatctcatgttataacaccgtccgctttagatgtgttgattcgggcg

SEQ ID NO: 395412 - DNA, 57 bp, Artificial
  Synthetic oligonucleotide
gaccagacactacacaattacttgcggacgctgtaatctcatcaaggctacacccgc

SEQ ID NO: 395413 - DNA, 55 bp, Artificial
  Synthetic oligonucleotide
gaccagacggttcgggagagagcgtcggacgaagataccgacagtggtagaccag

SEQ ID NO: 395414 - DNA, 60 bp, Artificial
  Synthetic oligonucleotide
gaccagaggattatagtgctattcatggttgcctggggtaaagaggcagtggataacttc

SEQ ID NO: 395415 - DNA, 60 bp, Artificial
  Synthetic oligonucleotide
gaccagagggaaactatgcccaaactgtctcaactgcacagatctggacgtggccttggg

SEQ ID NO: 395416 - DNA, 53 bp, Artificial
  Synthetic oligonucleotide
gaccagagtagaagcgcaactgcacgtgtgggtcccccccctcaacgttcggg

SEQ ID NO: 395417 - DNA, 60 bp, Artificial
  Synthetic oligonucleotide
gaccagagttaatgaaatcacagttcgtaattatgaggagtcaaatcacataattaatcc

SEQ ID NO: 395418 - DNA, 55 bp, Artificial
  Synthetic oligonucleotide
gaccagatcaatgggaaattgaaccgagtaatcgagaagacaaatgaaaagtttc

SEQ ID NO: 395419 - DNA, 60 bp, Artificial
  Synthetic oligonucleotide
gaccagatcgaagaatctataattcgtgcattggaatttgccttcgaactgtatgagcac

SEQ ID NO: 395420 - DNA, 60 bp, Artificial
  Synthetic oligonucleotide
gaccagatgaggtactcaaagcagaggacctcgactcagatggtatcatcactaggagtg

SEQ ID NO: 395421 - DNA, 60 bp, Artificial
  Synthetic oligonucleotide
gaccagatttgatgatggttcaaggagattctctcattaatagaacagagcatatggtat

SEQ ID NO: 395422 - DNA, 60 bp, Artificial
  Synthetic oligonucleotide
gaccagcagctacattagaggaaatgatgacagcatgtcagggagtgggaggacccagcc

SEQ ID NO: 395423 - DNA, 60 bp, Artificial
  Synthetic oligonucleotide
gaccagcatcgctcctgtggaaaggtgagggggcggtagtcattcaggatcagggagaaa

SEQ ID NO: 395424 - DNA, 60 bp, Artificial
  Synthetic oligonucleotide
gaccagcattaagcatcaatgaactgagcaatcttacgaaaggggagaaagctaatgtat

SEQ ID NO: 395425 - DNA, 60 bp, Artificial
  Synthetic oligonucleotide
gaccagcattgagcatcaacgaattgagcaatcttgcgaagggggagaaagctaatgtgt

SEQ ID NO: 395426 - DNA, 59 bp, Artificial
  Synthetic oligonucleotide
gaccagcatttcaatgctatcacattaaatacaatcacgttgtattacaaaactttccg

SEQ ID NO: 395427 - DNA, 55 bp, Artificial
  Synthetic oligonucleotide
gaccagccaaacttctgtggaaaggagaaggggcagtggtaatccaagataacgg

SEQ ID NO: 395428 - DNA, 59 bp, Artificial
  Synthetic oligonucleotide
gaccagccctccgacaacggcgacacagggtccgacgttgaatcgtgctcctccatgcc

SEQ ID NO: 395429 - DNA, 56 bp, Artificial
  Synthetic oligonucleotide
gaccagcggagccatgggatgctcttcccgattcccgtccatccctaccccccgag

SEQ ID NO: 395430 - DNA, 51 bp, Artificial
  Synthetic oligonucleotide
gaccagctagtctggtttacctcactcgggacgcttgcgatatccctgagc

SEQ ID NO: 395431 - DNA, 60 bp, Artificial
  Synthetic oligonucleotide
gaccagctcattaccacagtgtagcatacttgtgcaagaaacttggtatggttactcctc

SEQ ID NO: 395432 - DNA, 55 bp, Artificial
  Synthetic oligonucleotide
gaccaggagcacctggctaaatttaacgacgcagtcaagccgtactacagcaacc

SEQ ID NO: 395433 - DNA, 50 bp, Artificial
  Synthetic oligonucleotide
gaccaggagcggcttgtatgggcctgtgtagggctagagattggccgtgg

SEQ ID NO: 395434 - DNA, 53 bp, Artificial
  Synthetic oligonucleotide
gaccaggcaaaaccaactcctgcccctcggacagtcaaaccaaaaacttgccc

SEQ ID NO: 395435 - DNA, 60 bp, Artificial
  Synthetic oligonucleotide
gaccaggcacaataacctgtctcttatggtaattccaattgtaaacatcactgcaacaag

SEQ ID NO: 395436 - DNA, 55 bp, Artificial
  Synthetic oligonucleotide
gaccaggccttgggaagtttgccctgctaacaacaggaactgaggatgagcattg

SEQ ID NO: 395437 - DNA, 56 bp, Artificial
  Synthetic oligonucleotide
gaccaggctactgcggaagaccaaccaacacaacctgacgtggcaacgtgtaggtt

SEQ ID NO: 395438 - DNA, 56 bp, Artificial
  Synthetic oligonucleotide
gaccaggctgtcacttcccgagttggtcgtgcgctgacatccttacaggtagaacc

SEQ ID NO: 395439 - DNA, 56 bp, Artificial
  Synthetic oligonucleotide
gaccagggcaagcaatatatacaacaggagccataataggagatataagacaagca

SEQ ID NO: 395440 - DNA, 56 bp, Artificial
  Synthetic oligonucleotide
gaccaggggccacagagggagccgtccaatgaatggacactagaactgttagaaga

SEQ ID NO: 395441 - DNA, 49 bp, Artificial
  Synthetic oligonucleotide
gaccaggtactccgccccccccggggatcccccacaaccggagtacgac

SEQ ID NO: 395442 - DNA, 56 bp, Artificial
  Synthetic oligonucleotide
gaccaggtactcggctcctccgggggatgaaccgcacccagaatacgacctggagc

SEQ ID NO: 395443 - DNA, 55 bp, Artificial
  Synthetic oligonucleotide
gaccaggtagaagttgtcactgcccaggaattagtggaatcgcaacacctaccgg

SEQ ID NO: 395444 - DNA, 60 bp, Artificial
  Synthetic oligonucleotide
gaccaggtgagcttgactgaactacccgccaatcaacacgtcgtgaccgtgcacaccgtg

SEQ ID NO: 395445 - DNA, 55 bp, Artificial
  Synthetic oligonucleotide
gaccaggtttggacagcatcggtgcgagcctttgtgaggttgataatttcaacac

SEQ ID NO: 395446 - DNA, 55 bp, Artificial
  Synthetic oligonucleotide
gaccagtacaccagacacctaaacaggtggtcgtaccccaacgaccagctagacc

SEQ ID NO: 395447 - DNA, 58 bp, Artificial
  Synthetic oligonucleotide
gaccagtagtaacaactcaactgctgttgaatggtagtttagcagacgaagaggtagt

SEQ ID NO: 395448 - DNA, 60 bp, Artificial
  Synthetic oligonucleotide
gaccagtcactcagatgtacaccagcgcagaaggggacctcgtgggatggcctagtcccc

SEQ ID NO: 395449 - DNA, 54 bp, Artificial
  Synthetic oligonucleotide
gaccagtcctatactgggttcccgggaatcatggaccaacacccaatcaccggt

SEQ ID NO: 395450 - DNA, 59 bp, Artificial
  Synthetic oligonucleotide
gaccagtcggagactgtaaggtcgtccagatgtggaagttgagaaaacatttgtgaatc

SEQ ID NO: 395451 - DNA, 56 bp, Artificial
  Synthetic oligonucleotide
gaccagtctcaagatggggccatgttgcaatttgaggtgatgaaagcaaggcacca

SEQ ID NO: 395452 - DNA, 60 bp, Artificial
  Synthetic oligonucleotide
gaccagtctcacaagacttagaggcacatggagcagtcaccactaggcacacaccacaga

SEQ ID NO: 395453 - DNA, 60 bp, Artificial
  Synthetic oligonucleotide
gaccagtgaaattcaaacatgggatatctctctcacccaattctctgatcagtttcttat

SEQ ID NO: 395454 - DNA, 55 bp, Artificial
  Synthetic oligonucleotide
gaccagttacaacagttaaaacgaaagtatattgctagtcctgctaaagctgtac

SEQ ID NO: 395455 - DNA, 55 bp, Artificial
  Synthetic oligonucleotide
gaccagttacagtcaactctcaagacaggatcagaagaacttcaatcattacata

SEQ ID NO: 395456 - DNA, 55 bp, Artificial
  Synthetic oligonucleotide
gaccagttctctcgggacctcctcgtttctgcactgctgcgtttggcccagcagc

SEQ ID NO: 395457 - DNA, 55 bp, Artificial
  Synthetic oligonucleotide
gaccataaacttcttggggatgttattgccatcgacgaagcttgcagaagtatcg

SEQ ID NO: 395458 - DNA, 59 bp, Artificial
  Synthetic oligonucleotide
gaccataatatagtactcctgcttgaggacacgtagtaaaaggtccagtatatcgtgta

SEQ ID NO: 395459 - DNA, 55 bp, Artificial
  Synthetic oligonucleotide
gaccataattgctttgagctacattttctgtctggttttcagccaagaccttcca

SEQ ID NO: 395460 - DNA, 55 bp, Artificial
  Synthetic oligonucleotide
gaccatactcagttccctgacaatcaccagcctactccgtaaacttcacgagtgg

SEQ ID NO: 395461 - DNA, 57 bp, Artificial
  Synthetic oligonucleotide
gaccatagagtcagcattacaactcagcgctaggcttgagtctgttgaagttaactc

SEQ ID NO: 395462 - DNA, 55 bp, Artificial
  Synthetic oligonucleotide
gaccatagcgataggaagagatgctaggagttgggagagaccgaagcgaggagga

SEQ ID NO: 395463 - DNA, 55 bp, Artificial
  Synthetic oligonucleotide
gaccataggtacgcactcagatgacatcctatgactagcgggcgttaccgaagcg

SEQ ID NO: 395464 - DNA, 55 bp, Artificial
  Synthetic oligonucleotide
gaccatatcgaattaccctctgaggcttgtattattgacagggaagtatcaccag

SEQ ID NO: 395465 - DNA, 55 bp, Artificial
  Synthetic oligonucleotide
gaccatattgatggattgctcagagaagcacaagaacaacaggagagaaatgtgc

SEQ ID NO: 395466 - DNA, 57 bp, Artificial
  Synthetic oligonucleotide
gaccatatttagttaaagacacaatcaaacttaaacaagagagatggcttggtaaga

SEQ ID NO: 395467 - DNA, 55 bp, Artificial
  Synthetic oligonucleotide
gaccatcaaatataacagcaggataccaaggcaatgaagactcacctttgcagcc

SEQ ID NO: 395468 - DNA, 59 bp, Artificial
  Synthetic oligonucleotide
gaccatcaaatgcccctatcttatcaacacttccggagacttgtgttattagacaacga

SEQ ID NO: 395469 - DNA, 57 bp, Artificial
  Synthetic oligonucleotide
gaccatcaacccaatctccaaacctttgcacggtaaggtcttgaccttcactcagtc

SEQ ID NO: 395470 - DNA, 55 bp, Artificial
  Synthetic oligonucleotide
gaccatcactaactcaatcgacgtgcccgctggcatgaatgcattctcagtggga

SEQ ID NO: 395471 - DNA, 60 bp, Artificial
  Synthetic oligonucleotide
gaccatcaggacgtagtcatcattgatgacttctatgggtggctgcccttctgtgagctg

SEQ ID NO: 395472 - DNA, 55 bp, Artificial
  Synthetic oligonucleotide
gaccatcatgcaccaattcaccgttaacggcgcgaaagcccagaactacacggtg

SEQ ID NO: 395473 - DNA, 55 bp, Artificial
  Synthetic oligonucleotide
gaccatccacacacgtgcggccaactatcaagtcgctaaaacgcttcgcatgtgt

SEQ ID NO: 395474 - DNA, 55 bp, Artificial
  Synthetic oligonucleotide
gaccatccatctcgatgcgccacacgggcatatcgccaaatcggacacccaaacc

SEQ ID NO: 395475 - DNA, 60 bp, Artificial
  Synthetic oligonucleotide
gaccatcccttgtggaagagcacctataactgatgaagtcaacccaggttgcgcattaaa

SEQ ID NO: 395476 - DNA, 55 bp, Artificial
  Synthetic oligonucleotide
gaccatccgccactggcttaagaaccaggtcccttagccgttagactaaaagcaa

SEQ ID NO: 395477 - DNA, 55 bp, Artificial
  Synthetic oligonucleotide
gaccatcctgtatcagttcacaattgcatggagatcccggttaagaactttggtg

SEQ ID NO: 395478 - DNA, 55 bp, Artificial
  Synthetic oligonucleotide
gaccatccttgagaacaactactgcctcaggaaaactcataactgagtggtgctg

SEQ ID NO: 395479 - DNA, 57 bp, Artificial
  Synthetic oligonucleotide
gaccatcgtcccgatttcgcacaactcgctcgccagaacgacactgatggcgttgtg

SEQ ID NO: 395480 - DNA, 55 bp, Artificial
  Synthetic oligonucleotide
gaccatctagcactgattggaacatgatgcaatccagaagagcacagtgaggctc

SEQ ID NO: 395481 - DNA, 55 bp, Artificial
  Synthetic oligonucleotide
gaccatctagctatcattattcgcttcaaggctggcttaatcggtcaggttcacg

SEQ ID NO: 395482 - DNA, 56 bp, Artificial
  Synthetic oligonucleotide
gaccatctattacaagattctgaattagctggcttgttatcaatgtcttcagcatc

SEQ ID NO: 395483 - DNA, 57 bp, Artificial
  Synthetic oligonucleotide
gaccatgaaagctcttcacccgtagggcttactgggtaaagtacatagtcatcttcg

SEQ ID NO: 395484 - DNA, 60 bp, Artificial
  Synthetic oligonucleotide
gaccatgaagagtggagtagatgtgtactacagggcttcagaagcgagtgacactttgct

SEQ ID NO: 395485 - DNA, 55 bp, Artificial
  Synthetic oligonucleotide
gaccatgattcatgtaatggtgtttatggcaatattagcaagaacgcgctgttag

SEQ ID NO: 395486 - DNA, 60 bp, Artificial
  Synthetic oligonucleotide
gaccatgcaagacctgcacgactcctgctcaagggaactctacggttccctcttgttgct

SEQ ID NO: 395487 - DNA, 55 bp, Artificial
  Synthetic oligonucleotide
gaccatgcacgactcttacaaacaccgcgctatgcttcccaactacaaaacgcga

SEQ ID NO: 395488 - DNA, 55 bp, Artificial
  Synthetic oligonucleotide
gaccatgcggcccaccacattaaaccgtctcctcatacaggctgtggcactaacc

SEQ ID NO: 395489 - DNA, 60 bp, Artificial
  Synthetic oligonucleotide
gaccatgctggttctacactgaaggcggcttactcagaaaggctaccagatacgtttcag

SEQ ID NO: 395490 - DNA, 59 bp, Artificial
  Synthetic oligonucleotide
gaccatgctgtagctcttaaggtgcatactgcgtccctgaaggttaacctaaggataac

SEQ ID NO: 395491 - DNA, 55 bp, Artificial
  Synthetic oligonucleotide
gaccatggaccttgctcagcttaaagctttctaccaggacttgacagacaaggag

SEQ ID NO: 395492 - DNA, 55 bp, Artificial
  Synthetic oligonucleotide
gaccatggatatatattataagagagtcaggccttttagactgcccctggttcag

SEQ ID NO: 395493 - DNA, 55 bp, Artificial
  Synthetic oligonucleotide
gaccatggtagagtatttagctacacacctcatacaggatatgtagaacttagtc

SEQ ID NO: 395494 - DNA, 57 bp, Artificial
  Synthetic oligonucleotide
gaccatgtcaggtcgatactaagggttgagctccctaatgggtgtactgtacctacc

SEQ ID NO: 395495 - DNA, 60 bp, Artificial
  Synthetic oligonucleotide
gaccatgttgtcaaaatgatatgccgctgcgtaatcaagcaggaggaatgcggctctaca

SEQ ID NO: 395496 - DNA, 55 bp, Artificial
  Synthetic oligonucleotide
gaccatgttgtcgctagatttaccagggtatttatagaggatgtggctcctgggc

SEQ ID NO: 395497 - DNA, 60 bp, Artificial
  Synthetic oligonucleotide
gaccattaactgcataaacctgaaagtgtcaactgacaaagaacatagtgagcttgaggt

SEQ ID NO: 395498 - DNA, 55 bp, Artificial
  Synthetic oligonucleotide
gaccattacaacagttacagcagtacggcagcagaagcttgtcacagcggtacgt

SEQ ID NO: 395499 - DNA, 59 bp, Artificial
  Synthetic oligonucleotide
gaccattacaagtctttactatcttgttacaaagaagaagcacgatgctaatgacaacc

SEQ ID NO: 395500 - DNA, 55 bp, Artificial
  Synthetic oligonucleotide
gaccattaccagcccatcatccgagatgatgtttacgtcggtcgtcgtaacgcct

SEQ ID NO: 395501 - DNA, 58 bp, Artificial
  Synthetic oligonucleotide
gaccattatggcggcatttacaggaaacactgaaggcagaacatccgacatgagaacc

SEQ ID NO: 395502 - DNA, 59 bp, Artificial
  Synthetic oligonucleotide
gaccattctgaggctgtaatgtcgtccaaattcggaagttgagaaaacatttgtgaatc

SEQ ID NO: 395503 - DNA, 55 bp, Artificial
  Synthetic oligonucleotide
gaccattgaggagtcattcataactgtctctgtctgttcaaacacagtaaacact

SEQ ID NO: 395504 - DNA, 60 bp, Artificial
  Synthetic oligonucleotide
gaccattgcaagttcttttaagggtgcctttgcatcgagagctagtggagttccctcaca

SEQ ID NO: 395505 - DNA, 55 bp, Artificial
  Synthetic oligonucleotide
gaccattgcccctgctgtccagaccaactggcaaaagctcgagaccttctgggcg

SEQ ID NO: 395506 - DNA, 60 bp, Artificial
  Synthetic oligonucleotide
gaccattggagaggccttcgagtggctagacaggactatagaagccttaaacagagaggc

SEQ ID NO: 395507 - DNA, 55 bp, Artificial
  Synthetic oligonucleotide
gaccattggcaacatttgcgaaaggaggcagtattattatttgttgctagacaaa

SEQ ID NO: 395508 - DNA, 55 bp, Artificial
  Synthetic oligonucleotide
gaccattgtaacaccccacggccctgaatcaaatgacacagataggtaccagcct

SEQ ID NO: 395509 - DNA, 51 bp, Artificial
  Synthetic oligonucleotide
gaccattgtagggcatgccaaatcacttgtgagccaaaggatgtaaaagtc

SEQ ID NO: 395510 - DNA, 56 bp, Artificial
  Synthetic oligonucleotide
gaccatttatctcaaccgcttttaaggtatatttctaggagcggatgttcctagta

SEQ ID NO: 395511 - DNA, 55 bp, Artificial
  Synthetic oligonucleotide
gaccatttccacctaggagatgatatggacccagaactgagaggcttagcacaag

SEQ ID NO: 395512 - DNA, 55 bp, Artificial
  Synthetic oligonucleotide
gaccatttcgatggctacaaacaacaagccgtcgtaattatggacgacctatgcc

SEQ ID NO: 395513 - DNA, 55 bp, Artificial
  Synthetic oligonucleotide
gaccatttgacccaggatgagaccagaccttctcaaagagtccagtgcttcgggt

SEQ ID NO: 395514 - DNA, 60 bp, Artificial
  Synthetic oligonucleotide
gaccattttagaggtcaacaatgtacccacgaatgccactagcttaatggagagactgcg

SEQ ID NO: 395515 - DNA, 55 bp, Artificial
  Synthetic oligonucleotide
gacccaaaagagcaatccagtttattcccctagtcataggattaggtataactac

SEQ ID NO: 395516 - DNA, 52 bp, Artificial
  Synthetic oligonucleotide
gacccaaacaaacgttctcttgagcgttggggtactacgaaacaaggcgtaa

SEQ ID NO: 395517 - DNA, 55 bp, Artificial
  Synthetic oligonucleotide
gacccaaaccaacaggtcctatcctacttcaagaacgacacaggctgcgtctggg

SEQ ID NO: 395518 - DNA, 58 bp, Artificial
  Synthetic oligonucleotide
gacccaaacgcacacaggatgaagaatttcctagccaacgctccccaggccgggagca

SEQ ID NO: 395519 - DNA, 60 bp, Artificial
  Synthetic oligonucleotide
gacccaaagcacgcgttgcagcatccatgaggggggatatggcgaacattttcactagtc

SEQ ID NO: 395520 - DNA, 51 bp, Artificial
  Synthetic oligonucleotide
gacccaaatgactcatcagcctggggcgaagatatagcaattgggttcata

SEQ ID NO: 395521 - DNA, 52 bp, Artificial
  Synthetic oligonucleotide
gacccaaatgcgttgttaaaacaccgatttgaaataattgaagggagggacc

SEQ ID NO: 395522 - DNA, 55 bp, Artificial
  Synthetic oligonucleotide
gacccaacaacaatttgtgctggaattaggcaccgggtcaaatgctgatgcaacc

SEQ ID NO: 395523 - DNA, 55 bp, Artificial
  Synthetic oligonucleotide
gacccaacacatactttcctcgaactcgtgtcttctaccagtcgttagtcgacgg

SEQ ID NO: 395524 - DNA, 50 bp, Artificial
  Synthetic oligonucleotide
gacccaacactgcaatacgggcaccatcccatttactatgacacacaccc

SEQ ID NO: 395525 - DNA, 60 bp, Artificial
  Synthetic oligonucleotide
gacccaacatcagttgcggtgcaatctgtggacctttgacatggaggttcgcagccatga

SEQ ID NO: 395526 - DNA, 53 bp, Artificial
  Synthetic oligonucleotide
gacccaaccgcttacgggccggttcagaccttcgcacaactctaccccgcgaa

SEQ ID NO: 395527 - DNA, 60 bp, Artificial
  Synthetic oligonucleotide
gacccaacctcaaggggccagcagttgtggaatgcttgcttgtacgctagtcaacatggc

SEQ ID NO: 395528 - DNA, 58 bp, Artificial
  Synthetic oligonucleotide
gacccaactacattggcttcagagacaactttgtcggtcttatgtattacaacagtac

SEQ ID NO: 395529 - DNA, 56 bp, Artificial
  Synthetic oligonucleotide
gacccaactgattggactagtcttgtcgtcaattatggcgttagggactactgtaa

SEQ ID NO: 395530 - DNA, 54 bp, Artificial
  Synthetic oligonucleotide
gacccaactgggcagtatcctagacgtttaggaaatgatactaacgtactaaac

SEQ ID NO: 395531 - DNA, 60 bp, Artificial
  Synthetic oligonucleotide
gacccaagacatacgctgcttggtgcatgaaagtgcgcgaacagtgtctcaagtctgggt

SEQ ID NO: 395532 - DNA, 56 bp, Artificial
  Synthetic oligonucleotide
gacccaagagttgggcccctcctagtactctgcctacttctattactgatcctgtt

SEQ ID NO: 395533 - DNA, 57 bp, Artificial
  Synthetic oligonucleotide
gacccaagcaagtttactgagcctgtgaaggacgtgatggttaaatcattacccgcc

SEQ ID NO: 395534 - DNA, 55 bp, Artificial
  Synthetic oligonucleotide
gacccaagggaagtagaagaggctaacgaaggagaaaacaacagtctgctacacc

SEQ ID NO: 395535 - DNA, 55 bp, Artificial
  Synthetic oligonucleotide
gacccaagggacgtagaagaggccaacaaaggagaagacaactgcttgctacacc

SEQ ID NO: 395536 - DNA, 56 bp, Artificial
  Synthetic oligonucleotide
gacccaagtctcccatacatttgtagcaaatttttattggagtctgaattcgggga

SEQ ID NO: 395537 - DNA, 51 bp, Artificial
  Synthetic oligonucleotide
gacccaatcgaattgcaaagactgactttggcgcgattttacgacattcgt

SEQ ID NO: 395538 - DNA, 60 bp, Artificial
  Synthetic oligonucleotide
gacccaatgacagcagcgaaggttatagtcgcggtcatgagcaataagagcggtctgact

SEQ ID NO: 395539 - DNA, 55 bp, Artificial
  Synthetic oligonucleotide
gacccaatgtgggaacaattgtgttgtggtccttgcgtgtgcctgtatgaggatc

SEQ ID NO: 395540 - DNA, 55 bp, Artificial
  Synthetic oligonucleotide
gacccaattcttatgggttgggattacccaaagtgtgatagggcaatgcctaatt

SEQ ID NO: 395541 - DNA, 53 bp, Artificial
  Synthetic oligonucleotide
gacccacaacccggagacatagtacaaataaaatctaccaaactaggtttgaa

SEQ ID NO: 395542 - DNA, 50 bp, Artificial
  Synthetic oligonucleotide
gacccacagagtgggtaagcgtttctgtgtgaagtcattgtatttcgtag

SEQ ID NO: 395543 - DNA, 57 bp, Artificial
  Synthetic oligonucleotide
gacccacctcactcccgctgtcaagctcgcgaacgactacaccgctttcgaccagtc

SEQ ID NO: 395544 - DNA, 59 bp, Artificial
  Synthetic oligonucleotide
gacccacctgagaagtggtcgttcgcacaagcttgcgcgtcccttgacaagaccacttc

SEQ ID NO: 395545 - DNA, 54 bp, Artificial
  Synthetic oligonucleotide
gacccacgtccgagtcaatcaacgagatgacgctttcaatatcgtgctttgtaa

SEQ ID NO: 395546 - DNA, 54 bp, Artificial
  Synthetic oligonucleotide
gacccacgtgtgcttaattgtgagtcctccggcccccgaatgcggctaacctaa

SEQ ID NO: 395547 - DNA, 52 bp, Artificial
  Synthetic oligonucleotide
gacccactactcctagatttgaagttatttttacaacagaggtactaaagcg

SEQ ID NO: 395548 - DNA, 58 bp, Artificial
  Synthetic oligonucleotide
gacccactctcaggcccggttccgctttgagtatgaagcggggatctcgcaggaatat

SEQ ID NO: 395549 - DNA, 55 bp, Artificial
  Synthetic oligonucleotide
gacccactgctcgagaacctcttctcttcccccgcggttcttcttcgattcggac

SEQ ID NO: 395550 - DNA, 56 bp, Artificial
  Synthetic oligonucleotide
gacccacttccagttgacagagccgctctaagttcctacggacattcaaacgaagg

SEQ ID NO: 395551 - DNA, 55 bp, Artificial
  Synthetic oligonucleotide
gacccactttgacacgagtgctctcaataagacgcgttccgatcattataagggg

SEQ ID NO: 395552 - DNA, 55 bp, Artificial
  Synthetic oligonucleotide
gacccagaaccggagccagaaccacaaccagaccctgagcacaatccatccgacc

SEQ ID NO: 395553 - DNA, 55 bp, Artificial
  Synthetic oligonucleotide
gacccagaagcaaccacaacaggagaccagggtacaaaactcagaaccaaggccc

SEQ ID NO: 395554 - DNA, 60 bp, Artificial
  Synthetic oligonucleotide
gacccagaaggagagactctgatctggcgctttgacagcagcctagcgagacggcacata

SEQ ID NO: 395555 - DNA, 55 bp, Artificial
  Synthetic oligonucleotide
gacccagaaggtggtcattttcatactactaatgctggtcactccatccatgaca

SEQ ID NO: 395556 - DNA, 55 bp, Artificial
  Synthetic oligonucleotide
gacccagaatataagaccggttcagagtgtagcctcaagtaggagacacaagaga

SEQ ID NO: 395557 - DNA, 55 bp, Artificial
  Synthetic oligonucleotide
gacccagaatcccttgtgaatactcctaaggttgaagcttttgcttccgccgatt

SEQ ID NO: 395558 - DNA, 54 bp, Artificial
  Synthetic oligonucleotide
gacccagacactgtacaggaaaggccagaaactagcagtgatcaagaacgtaga

SEQ ID NO: 395559 - DNA, 60 bp, Artificial
  Synthetic oligonucleotide
gacccagagaaagaagtgttagtatggaagtttgacagccgcctagcatttcatcacata

SEQ ID NO: 395560 - DNA, 60 bp, Artificial
  Synthetic oligonucleotide
gacccagagaaggtagagagagccactgaaggagagaacaccagcttgttacaccctata

SEQ ID NO: 395561 - DNA, 55 bp, Artificial
  Synthetic oligonucleotide
gacccagagcgacaaatcgaggaggaggagagatatcgcgcagctaaagaggctt

SEQ ID NO: 395562 - DNA, 60 bp, Artificial
  Synthetic oligonucleotide
gacccagatcactttgatgagtacaaacaacaggtcgtcactgttatggacgacttctgt

SEQ ID NO: 395563 - DNA, 51 bp, Artificial
  Synthetic oligonucleotide
gacccagattatcggcaccttcgagttgcagggtcccagcagtgaaggcga

SEQ ID NO: 395564 - DNA, 55 bp, Artificial
  Synthetic oligonucleotide
gacccagccagtatagccgcacgaggatatattgctaccaaggtggaattagggg

SEQ ID NO: 395565 - DNA, 55 bp, Artificial
  Synthetic oligonucleotide
gacccagctcctgaggcgattacaccagtggttgagttcggagagcaccactcca

SEQ ID NO: 395566 - DNA, 55 bp, Artificial
  Synthetic oligonucleotide
gacccagctggttggtttggaaagttagatcaaagctcaatactaaggcagatgt

SEQ ID NO: 395567 - DNA, 57 bp, Artificial
  Synthetic oligonucleotide
gacccagctgttcgagttatatgtgcttgtaacgcagtaacacttgtgaacccttac

SEQ ID NO: 395568 - DNA, 55 bp, Artificial
  Synthetic oligonucleotide
gacccagcttaggatctacatccctcgctatggtacatgtgccacaaccgactcc

SEQ ID NO: 395569 - DNA, 57 bp, Artificial
  Synthetic oligonucleotide
gacccaggagcccctattactagggacgctctgccacagcgcatatctgaggcttgg

SEQ ID NO: 395570 - DNA, 59 bp, Artificial
  Synthetic oligonucleotide
gacccaggaggggcagtaatggtgaatagccgtgagcagtgaagcactaagaaccgtac

SEQ ID NO: 395571 - DNA, 55 bp, Artificial
  Synthetic oligonucleotide
gacccaggggaagtagaagagaccagcgaaggagagaacaactgtttgatgcacc

SEQ ID NO: 395572 - DNA, 60 bp, Artificial
  Synthetic oligonucleotide
gacccaggtgacattatgtcaactacctctgggatgcgttgccctgaacacacaggttcc

SEQ ID NO: 395573 - DNA, 55 bp, Artificial
  Synthetic oligonucleotide
gacccagtaggtaccatcctcgcgtttcaacctgacacctaccttatcctttgct

SEQ ID NO: 395574 - DNA, 56 bp, Artificial
  Synthetic oligonucleotide
gacccagtgttgcgtgaccgagtcgtacgtggtaccaacgcttggcgacgattaac

SEQ ID NO: 395575 - DNA, 57 bp, Artificial
  Synthetic oligonucleotide
gacccagttgtcaattaacctgaatgaaacccgcaggctcctgtctatggccctaaa

SEQ ID NO: 395576 - DNA, 60 bp, Artificial
  Synthetic oligonucleotide
gacccatacaatgaatgggcactagagcttttagaggagcttaagaatgaatctgttaga

SEQ ID NO: 395577 - DNA, 57 bp, Artificial
  Synthetic oligonucleotide
gacccatactttttccaaatgacaaacactaatcctgatcaaaaatgtataactgcc

SEQ ID NO: 395578 - DNA, 55 bp, Artificial
  Synthetic oligonucleotide
gacccataggatgcttaagatcaagttaggaccaatagaatacgtttgcttggta

SEQ ID NO: 395579 - DNA, 60 bp, Artificial
  Synthetic oligonucleotide
gacccatcaaaagatctgatagctgaactacaaaaacaagggtatgatcaatggacagat

SEQ ID NO: 395580 - DNA, 55 bp, Artificial
  Synthetic oligonucleotide
gacccatcaatcggaagcccaggtggtatcggatgtatagaagcccagatgttcc

SEQ ID NO: 395581 - DNA, 60 bp, Artificial
  Synthetic oligonucleotide
gacccatcactataggagcaagattgaggcaggaatccgacacctatttggggattacac

SEQ ID NO: 395582 - DNA, 56 bp, Artificial
  Synthetic oligonucleotide
gacccatccatctacctccccacattccggttgactacaagaaagattttttgatc

SEQ ID NO: 395583 - DNA, 53 bp, Artificial
  Synthetic oligonucleotide
gacccatcccgcttaacccaggtgcttaaagagtatggtcttcggcccacacg

SEQ ID NO: 395584 - DNA, 51 bp, Artificial
  Synthetic oligonucleotide
gacccatcgaaggacttaatagctgagattcagaaacaggggcaggaccaa

SEQ ID NO: 395585 - DNA, 55 bp, Artificial
  Synthetic oligonucleotide
gacccatcggcgctgctacctctggtagggtcgctaaaactaaacgccttaacga

SEQ ID NO: 395586 - DNA, 55 bp, Artificial
  Synthetic oligonucleotide
gacccatcgggtcctccctgagctcatccgtcaatgtgtggagcggcgattgcga

SEQ ID NO: 395587 - DNA, 56 bp, Artificial
  Synthetic oligonucleotide
gacccatcgtgcctaggttttcgaaccgaggcgactcgactattgtacgcaatacc

SEQ ID NO: 395588 - DNA, 53 bp, Artificial
  Synthetic oligonucleotide
gacccatggtttgaccgaacggccttagaccggttggcgcggtaaaccataca

SEQ ID NO: 395589 - DNA, 55 bp, Artificial
  Synthetic oligonucleotide
gacccatgtgatcctggttggtatgtggtaaactctcgtaggggagttgcacctc

SEQ ID NO: 395590 - DNA, 55 bp, Artificial
  Synthetic oligonucleotide
gacccattgattggaaagtatgtcaaagaatttcgggtcttctgggctttgctgc

SEQ ID NO: 395591 - DNA, 54 bp, Artificial
  Synthetic oligonucleotide
gacccattgcagaacccacttccggatactttatacggttttaggtgtatgtta

SEQ ID NO: 395592 - DNA, 55 bp, Artificial
  Synthetic oligonucleotide
gacccatttgacgtctgggatggcgtcaaggcaacctacatcccgattggtgtgc

SEQ ID NO: 395593 - DNA, 58 bp, Artificial
  Synthetic oligonucleotide
gaccccaaacactgcataattaaagtacaaggcgatgattcaatcattcgacttaacg

SEQ ID NO: 395594 - DNA, 60 bp, Artificial
  Synthetic oligonucleotide
gaccccaagaaccagatcatgctacgagtaagtatgctaagtctgctagaatatttaaac

SEQ ID NO: 395595 - DNA, 55 bp, Artificial
  Synthetic oligonucleotide
gaccccacatggcatgccttgcgtacggcgattttgaatcgaacagcgttgcccg

SEQ ID NO: 395596 - DNA, 60 bp, Artificial
  Synthetic oligonucleotide
gaccccaccatgcacgagagtccccaagacgagatcaaacataagggacgccgacatggc

SEQ ID NO: 395597 - DNA, 55 bp, Artificial
  Synthetic oligonucleotide
gaccccacctcgcgcggccaacaactttggaatgcatgtttatatgctagtcaac

SEQ ID NO: 395598 - DNA, 54 bp, Artificial
  Synthetic oligonucleotide
gaccccacgttcgaggaattcttagaatacttaggtaagcacacacctgagctg

SEQ ID NO: 395599 - DNA, 55 bp, Artificial
  Synthetic oligonucleotide
gaccccactatgtgttactttaaattgcactgacttgaagaatggtactaatggg

SEQ ID NO: 395600 - DNA, 55 bp, Artificial
  Synthetic oligonucleotide
gaccccactctgtgtcaccctagactgtagacaacctcagattaacgatactggt

SEQ ID NO: 395601 - DNA, 55 bp, Artificial
  Synthetic oligonucleotide
gaccccactgctgacgcctcggagtcaagtgacgacgaggaggacacttgctgcc

SEQ ID NO: 395602 - DNA, 50 bp, Artificial
  Synthetic oligonucleotide
gaccccagataactgtgtcacactcacgttaatgagccagtgttttgcaa

SEQ ID NO: 395603 - DNA, 55 bp, Artificial
  Synthetic oligonucleotide
gaccccagctacagttgcgaaagtgattcagaggccacccactctgactacagcg

SEQ ID NO: 395604 - DNA, 55 bp, Artificial
  Synthetic oligonucleotide
gaccccagcttccagcccacctatgaaatacccggtaccggtgacatccctagaa

SEQ ID NO: 395605 - DNA, 55 bp, Artificial
  Synthetic oligonucleotide
gaccccagtcaaaccaacatcaaaacgcgccggtgccttctaccgtcgcgtcatg

SEQ ID NO: 395606 - DNA, 57 bp, Artificial
  Synthetic oligonucleotide
gaccccagtgggtactatcaataccaggatgcctttccactatgtccatccttttac

SEQ ID NO: 395607 - DNA, 55 bp, Artificial
  Synthetic oligonucleotide
gaccccatcacaggttacacagttgatgcagaccctttggagtcagtgcacacag

SEQ ID NO: 395608 - DNA, 55 bp, Artificial
  Synthetic oligonucleotide
gaccccatcggttctgggcaatcctggccttctggggctgctctttcaaagcccg

SEQ ID NO: 395609 - DNA, 53 bp, Artificial
  Synthetic oligonucleotide
gaccccatctctctcaccaccccgatctctgggaccctaacccccctaggcca

SEQ ID NO: 395610 - DNA, 55 bp, Artificial
  Synthetic oligonucleotide
gaccccatgttcaatcagacatgggccacctttgcgatgaacattgccccagccc

SEQ ID NO: 395611 - DNA, 54 bp, Artificial
  Synthetic oligonucleotide
gacccccaatgggcaggtctgaaaggcccaaatcctgtcccgctactgctgagg

SEQ ID NO: 395612 - DNA, 52 bp, Artificial
  Synthetic oligonucleotide
gacccccactgttgacatcaatgtttccttggccccctgcaatgttgagtac

SEQ ID NO: 395613 - DNA, 56 bp, Artificial
  Synthetic oligonucleotide
gaccccccactacaaccgtattcgagaaagtgccacttatatatataccgaggatg

SEQ ID NO: 395614 - DNA, 53 bp, Artificial
  Synthetic oligonucleotide
gaccccccctcgacccgaatcgctcgcgcgattcggacctgcggcctcggggg

SEQ ID NO: 395615 - DNA, 55 bp, Artificial
  Synthetic oligonucleotide
gacccccgacagccgtttggatcagcgctcgcgtctcgtttgggttcaattccct

SEQ ID NO: 395616 - DNA, 54 bp, Artificial
  Synthetic oligonucleotide
gacccccgataaattaaggggccgcaatgctggttggtactccaaagatgggag

SEQ ID NO: 395617 - DNA, 51 bp, Artificial
  Synthetic oligonucleotide
gacccccgcaaggagcttggttcggctgcacttggatgaacgggactgggt

SEQ ID NO: 395618 - DNA, 59 bp, Artificial
  Synthetic oligonucleotide
gacccccgctcgtgctgacacgcttgcgcgtgtcagaccacttcgggctcgcgggggtc

SEQ ID NO: 395619 - DNA, 56 bp, Artificial
  Synthetic oligonucleotide
gaccccctcccgttacctctgccccgctgaatgatcacgcaattgtaattaatcca

SEQ ID NO: 395620 - DNA, 58 bp, Artificial
  Synthetic oligonucleotide
gaccccctgaggagatactacaagcgttgccgtttgattatcagacgagtgagaaagg

SEQ ID NO: 395621 - DNA, 59 bp, Artificial
  Synthetic oligonucleotide
gacccccttccgatgacacttctgaggagatggtggcgcttgacggatcttgggtccga

SEQ ID NO: 395622 - DNA, 58 bp, Artificial
  Synthetic oligonucleotide
gaccccgatgatgttaacaagagtacattgcaaagcaggcgggcagcagtgtcaacat

SEQ ID NO: 395623 - DNA, 57 bp, Artificial
  Synthetic oligonucleotide
gaccccgcggtttgaagtgcacggcccagcctggctgaagctgtaggtcaggggaag

SEQ ID NO: 395624 - DNA, 55 bp, Artificial
  Synthetic oligonucleotide
gaccccgctctgtgtcactttaaactgtagcaatgcaaatgtcagcgcaagtagc

SEQ ID NO: 395625 - DNA, 53 bp, Artificial
  Synthetic oligonucleotide
gaccccggagccctacagctacccgtcgctccgggacagggacatacccctcc

SEQ ID NO: 395626 - DNA, 58 bp, Artificial
  Synthetic oligonucleotide
gaccccggggattattggtatcatgcaacgcttccgaatgggtggagtagaatcgcta

SEQ ID NO: 395627 - DNA, 55 bp, Artificial
  Synthetic oligonucleotide
gaccccgtggaaaagaagatgcggcccaaactctttcgaagctgtagaaggagtg

SEQ ID NO: 395628 - DNA, 54 bp, Artificial
  Synthetic oligonucleotide
gaccccgtggtaataacacacaacggcccaaacacgcggaagctgtaacgcgtg

SEQ ID NO: 395629 - DNA, 52 bp, Artificial
  Synthetic oligonucleotide
gacccctaagtacgcgtggtcgaaatcgcctttcggtttcgaaagtgcaagg

SEQ ID NO: 395630 - DNA, 53 bp, Artificial
  Synthetic oligonucleotide
gacccctacagggagggtgtaagcaatctgtttttagtggtaggacaacgtgt

SEQ ID NO: 395631 - DNA, 53 bp, Artificial
  Synthetic oligonucleotide
gacccctatgcaaaattaagtttttgggaggtagatctcagagaaaagttttc

SEQ ID NO: 395632 - DNA, 55 bp, Artificial
  Synthetic oligonucleotide
gacccctatggggttttcttatgataccagatgttttgactcgacggtcacagag

SEQ ID NO: 395633 - DNA, 60 bp, Artificial
  Synthetic oligonucleotide
gacccctgaactcgagagcgccgtaagagccatggaagcagctgccaatgtggacccact

SEQ ID NO: 395634 - DNA, 54 bp, Artificial
  Synthetic oligonucleotide
gacccctgatggggaaataggggctgtcaccctcgactacccaactggaacctc

SEQ ID NO: 395635 - DNA, 55 bp, Artificial
  Synthetic oligonucleotide
gacccctgcgacctcgaggcaatgactactatgatgaaccagacgactggtactc

SEQ ID NO: 395636 - DNA, 52 bp, Artificial
  Synthetic oligonucleotide
gacccctggattttccaaaattttgtccaatgcccccttggtgagttttcca

SEQ ID NO: 395637 - DNA, 58 bp, Artificial
  Synthetic oligonucleotide
gacccctgtgctatacagtgcccttacctgggatgccagtcgtggacgtgtccctaca

SEQ ID NO: 395638 - DNA, 55 bp, Artificial
  Synthetic oligonucleotide
gaccccttagtaatattggcaatagtaggactgatagtagcattcatcttagcag

SEQ ID NO: 395639 - DNA, 55 bp, Artificial
  Synthetic oligonucleotide
gaccccttccctgattcgaactctccagtagatgacatggaaatcatggttcccg

SEQ ID NO: 395640 - DNA, 55 bp, Artificial
  Synthetic oligonucleotide
gaccccttccgtctgctccagaacagccaggtattcagcctcatcagacccaatg

SEQ ID NO: 395641 - DNA, 49 bp, Artificial
  Synthetic oligonucleotide
gacccctttggaggtgggtttagtactttaatgtttaacctaagaatac

SEQ ID NO: 395642 - DNA, 60 bp, Artificial
  Synthetic oligonucleotide
gacccgaaacatctggagtgccccctatccaacacacctattgctatcaatggtgtcgtc

SEQ ID NO: 395643 - DNA, 55 bp, Artificial
  Synthetic oligonucleotide
gacccgaaacctagagaattgtattgacaattatgccatagaggtttcatgcgcc

SEQ ID NO: 395644 - DNA, 54 bp, Artificial
  Synthetic oligonucleotide
gacccgaaatacgtcaacgaaggctacacgttccacgcctgggacttccgtaga

SEQ ID NO: 395645 - DNA, 51 bp, Artificial
  Synthetic oligonucleotide
gacccgaagacggctgaccccgtatacgggaaagtgttcaacccccccaga

SEQ ID NO: 395646 - DNA, 55 bp, Artificial
  Synthetic oligonucleotide
gacccgaagagcaagaatcgtagaagggttgccacttttatcacgactgacctgc

SEQ ID NO: 395647 - DNA, 55 bp, Artificial
  Synthetic oligonucleotide
gacccgaagaggaaagaagaacgcgagacgcgaacctgtgagtggacacccgctt

SEQ ID NO: 395648 - DNA, 55 bp, Artificial
  Synthetic oligonucleotide
gacccgaatgaagtccgcattgaaattaacgggaatggtgcgtccagaccagcgg

SEQ ID NO: 395649 - DNA, 52 bp, Artificial
  Synthetic oligonucleotide
gacccgaattagtccggttgcgttagaattacctcggataacttccacggta

SEQ ID NO: 395650 - DNA, 51 bp, Artificial
  Synthetic oligonucleotide
gacccgacaggtccttaatgtggggccccgagtccctataggacccaaccc

SEQ ID NO: 395651 - DNA, 55 bp, Artificial
  Synthetic oligonucleotide
gacccgacggtaccttcagtggttagtccgcggaagtatgccgcatcgacgacgg

SEQ ID NO: 395652 - DNA, 60 bp, Artificial
  Synthetic oligonucleotide
gacccgaggagaccgttgcaacttggaggacagggatagatcagagcttagcccgctgct

SEQ ID NO: 395653 - DNA, 55 bp, Artificial
  Synthetic oligonucleotide
gacccgaggatccctcgcatgcgcaccgataatctgattggtgtttaacttctct

SEQ ID NO: 395654 - DNA, 55 bp, Artificial
  Synthetic oligonucleotide
gacccgagggcgccgtactttgcgcagctcgagaagggccgggagaacttccacg

SEQ ID NO: 395655 - DNA, 56 bp, Artificial
  Synthetic oligonucleotide
gacccgagtccaaaaacgacgtatcatctttcagagacgcgttcctatacacggtg

SEQ ID NO: 395656 - DNA, 55 bp, Artificial
  Synthetic oligonucleotide
gacccgagtgctaggtggtatggtgggcaggtacattagtttcgtggacacatgg

SEQ ID NO: 395657 - DNA, 60 bp, Artificial
  Synthetic oligonucleotide
gacccgatacatgtccaaacattataatttccatgcaaagcagttatctcttatggatcc

SEQ ID NO: 395658 - DNA, 58 bp, Artificial
  Synthetic oligonucleotide
gacccgcattggagggcgcgtgtggtcccggacagggaatgaaatgactgagggccaa

SEQ ID NO: 395659 - DNA, 55 bp, Artificial
  Synthetic oligonucleotide
gacccgccgcccaagttcgagcatgggcccagttccgagcgaagggatcgcgggg

SEQ ID NO: 395660 - DNA, 57 bp, Artificial
  Synthetic oligonucleotide
gacccgccgtccagaagcaatccaagtataactacgccgcttcatacggagcctgga

SEQ ID NO: 395661 - DNA, 60 bp, Artificial
  Synthetic oligonucleotide
gacccgcgtctctcgccagagcgcttctgatagtcagcgaacaactcttgacggtatgtt

SEQ ID NO: 395662 - DNA, 54 bp, Artificial
  Synthetic oligonucleotide
gacccgctaaaaggccgcgcttatagaagagagttggttacaccaccccgagat

SEQ ID NO: 395663 - DNA, 60 bp, Artificial
  Synthetic oligonucleotide
gacccggaaacaacaagtgcaacgagtgattgaagcatttgcgagtagtgatgctgtgac

SEQ ID NO: 395664 - DNA, 53 bp, Artificial
  Synthetic oligonucleotide
gacccggaaaccacatattggaaaccacctagaaacaagtggtgggatggtta

SEQ ID NO: 395665 - DNA, 55 bp, Artificial
  Synthetic oligonucleotide
gacccggacttttggacctatccacttgagcgacgctctgatgactctcgccggg

SEQ ID NO: 395666 - DNA, 60 bp, Artificial
  Synthetic oligonucleotide
gacccggagagagaagtgctgatgtggaagtttgacagccgcttagcattccatcacatg

SEQ ID NO: 395667 - DNA, 60 bp, Artificial
  Synthetic oligonucleotide
gacccggaggcaactgagacctgatgaggaccaggtcaccattgttggcaggagtggagt

SEQ ID NO: 395668 - DNA, 55 bp, Artificial
  Synthetic oligonucleotide
gacccggattcgatttaaggatgatagctcgttcgaggatgttaacggtatccgg

SEQ ID NO: 395669 - DNA, 55 bp, Artificial
  Synthetic oligonucleotide
gacccggcgggataacatccatcacagggtctattactttcgatgcgaggaaagg

SEQ ID NO: 395670 - DNA, 60 bp, Artificial
  Synthetic oligonucleotide
gacccggtgattacagccgacctttagatatctgacgaacatatgtttgctctcgatcta

SEQ ID NO: 395671 - DNA, 60 bp, Artificial
  Synthetic oligonucleotide
gacccggtgtggacctactgtccacctcagtgacgcccctatctaagcatgaattgacaa

SEQ ID NO: 395672 - DNA, 55 bp, Artificial
  Synthetic oligonucleotide
gacccgtcattgtgacgcgtgggttgaggaaccgtgaatttgtcattcatggtgc

SEQ ID NO: 395673 - DNA, 59 bp, Artificial
  Synthetic oligonucleotide
gacccgtctctttatgaatgcgaagctctctatatagttcaggatactccttggtcccc

SEQ ID NO: 395674 - DNA, 60 bp, Artificial
  Synthetic oligonucleotide
gacccgtgccaaggcggcaatggcttggggcgatgctaatctctggactcgcgaggtgtc

SEQ ID NO: 395675 - DNA, 50 bp, Artificial
  Synthetic oligonucleotide
gacccgtgctcggtggaccccatcacgaatcaacctataaacgcgcggct

SEQ ID NO: 395676 - DNA, 53 bp, Artificial
  Synthetic oligonucleotide
gacccgtggtggaactgacgagttcggaacacccggccgcaaccctgggagac

SEQ ID NO: 395677 - DNA, 55 bp, Artificial
  Synthetic oligonucleotide
gacccgtgtaattttaactgtaatcatggaagatctcaccagtctcatgcaatct

SEQ ID NO: 395678 - DNA, 53 bp, Artificial
  Synthetic oligonucleotide
gacccgttctccaccctggcaccacgacgggggactcaacccctgctaagcag

SEQ ID NO: 395679 - DNA, 53 bp, Artificial
  Synthetic oligonucleotide
gaccctaacatcaggactggggtaaggaccattaccacgggcgcccccattac

SEQ ID NO: 395680 - DNA, 55 bp, Artificial
  Synthetic oligonucleotide
gaccctaagacccgtttagtttggatctaccccgctgagatgttggcgattgaag

SEQ ID NO: 395681 - DNA, 55 bp, Artificial
  Synthetic oligonucleotide
gaccctaaggtagcgaatcgtcttgcagaatatttaacgcaagataaaacgaaat

SEQ ID NO: 395682 - DNA, 58 bp, Artificial
  Synthetic oligonucleotide
gaccctaataaatttgccttacctgacacatctatatatgaccccactacgcaacgcc

SEQ ID NO: 395683 - DNA, 57 bp, Artificial
  Synthetic oligonucleotide
gaccctaatacgctgaaatgctttcgtaatcgctctaaaaccaaatatagagattta

SEQ ID NO: 395684 - DNA, 60 bp, Artificial
  Synthetic oligonucleotide
gaccctaatattagatgtttataaaggcatagatctggattcattgagaataatagcata

SEQ ID NO: 395685 - DNA, 54 bp, Artificial
  Synthetic oligonucleotide
gaccctaatgcccctaataaactgtgttacccaggggaattggacaacaatgga

SEQ ID NO: 395686 - DNA, 56 bp, Artificial
  Synthetic oligonucleotide
gaccctaatggaatagggttgtaccacgaggccgtctttgatcacagttaccgtga

SEQ ID NO: 395687 - DNA, 53 bp, Artificial
  Synthetic oligonucleotide
gaccctaatttcggtcgcaaggtacgtaattatcgccagattaactcgttccg

SEQ ID NO: 395688 - DNA, 60 bp, Artificial
  Synthetic oligonucleotide
gaccctacagctacagatgcaaaacaacaccacagacatggatatgaaaagcctgaagaa

SEQ ID NO: 395689 - DNA, 59 bp, Artificial
  Synthetic oligonucleotide
gaccctaccttcaccattgagacgacgaccgtgcctcaagacgcggtgtcggcctcgca

SEQ ID NO: 395690 - DNA, 60 bp, Artificial
  Synthetic oligonucleotide
gaccctagactcgaagaaccagttgactgtctgattaagaaatctgctacaaagtatcga

SEQ ID NO: 395691 - DNA, 55 bp, Artificial
  Synthetic oligonucleotide
gaccctagataacgaggaaaacctttaatttcgctctaagattagagctatccac

SEQ ID NO: 395692 - DNA, 56 bp, Artificial
  Synthetic oligonucleotide
gaccctagcactgtctggttgaacctaagcgaggcccccatttcggagaagctaac

SEQ ID NO: 395693 - DNA, 53 bp, Artificial
  Synthetic oligonucleotide
gaccctagcagcacccctatatcccttgactagggaaggaattccctttgaat

SEQ ID NO: 395694 - DNA, 60 bp, Artificial
  Synthetic oligonucleotide
gaccctagctatctctgtagctgccctggtatacagcatgggggctagtacgccccgcga

SEQ ID NO: 395695 - DNA, 55 bp, Artificial
  Synthetic oligonucleotide
gaccctatcaccacactataaagtgttcctcgctaggctcatatggtggtcacaa

SEQ ID NO: 395696 - DNA, 57 bp, Artificial
  Synthetic oligonucleotide
gaccctatcacccattggagccacggacaaaatcggtggcccctctcatgcccccaa

SEQ ID NO: 395697 - DNA, 55 bp, Artificial
  Synthetic oligonucleotide
gaccctattcatgtttagacactcaccaaggtcctattcaggactatgtgacaca

SEQ ID NO: 395698 - DNA, 55 bp, Artificial
  Synthetic oligonucleotide
gaccctcaatatcccgtttgggagttgactattagagtttggtctgagttaaaca

SEQ ID NO: 395699 - DNA, 56 bp, Artificial
  Synthetic oligonucleotide
gaccctcaattctgtgaaattgatgaaagttttccttacagaggagggccatacgg

SEQ ID NO: 395700 - DNA, 60 bp, Artificial
  Synthetic oligonucleotide
gaccctcactactggttccctcatcgcccgagcatcagggttactccatgagaggctaga

SEQ ID NO: 395701 - DNA, 55 bp, Artificial
  Synthetic oligonucleotide
gaccctcaggatgttattggaggacatgtccttgtacgggaccaaacgaaacgcg

SEQ ID NO: 395702 - DNA, 55 bp, Artificial
  Synthetic oligonucleotide
gaccctcatctggaatttgatgattgttctcccctgtgcactctggtggacgtag

SEQ ID NO: 395703 - DNA, 60 bp, Artificial
  Synthetic oligonucleotide
gaccctcattgtgatgtgtttcaggatgaaacatgggatctttatgtagagcgcagcaat

SEQ ID NO: 395704 - DNA, 60 bp, Artificial
  Synthetic oligonucleotide
gaccctccaataagcgatgccgactagatcgagatcaaaagctaatcaacggaggagaag

SEQ ID NO: 395705 - DNA, 55 bp, Artificial
  Synthetic oligonucleotide
gaccctccagcatagccatgcttatgtggccatctcccgcgccactaaccccaaa

SEQ ID NO: 395706 - DNA, 50 bp, Artificial
  Synthetic oligonucleotide
gaccctcccctgattttgacttcacatatctggtaccaccaacagtggag

SEQ ID NO: 395707 - DNA, 57 bp, Artificial
  Synthetic oligonucleotide
gaccctccctccattttctgaggcgggagctgagttggtagtatcgctataaactac

SEQ ID NO: 395708 - DNA, 46 bp, Artificial
  Synthetic oligonucleotide
gaccctcccttttacccctggttaccacccgaaccccgagtaaact

SEQ ID NO: 395709 - DNA, 55 bp, Artificial
  Synthetic oligonucleotide
gaccctcctcctgtggatctaccagacctgtcaaaacttcggctggctcctctgg

SEQ ID NO: 395710 - DNA, 57 bp, Artificial
  Synthetic oligonucleotide
gaccctcgaattgaaattgaggtggctttcgtgcagacgttttagaaagtatcagaa

SEQ ID NO: 395711 - DNA, 53 bp, Artificial
  Synthetic oligonucleotide
gaccctcgcatgttcagaggtcaatttgacatcaacaaccttaatatctctcc

SEQ ID NO: 395712 - DNA, 51 bp, Artificial
  Synthetic oligonucleotide
gaccctcgctattacgccggtccgcaaaacatgagccaagtggcgggcaga

SEQ ID NO: 395713 - DNA, 54 bp, Artificial
  Synthetic oligonucleotide
gaccctcgggtcataaaagacctcgacaactacaaagggtgtctggcaaaactg

SEQ ID NO: 395714 - DNA, 55 bp, Artificial
  Synthetic oligonucleotide
gaccctcgtgatcaagaacaatatatacatagaaaatgctaccaagaattcgcgc

SEQ ID NO: 395715 - DNA, 60 bp, Artificial
  Synthetic oligonucleotide
gaccctctatcaaagcagtaagtaccaatagtagatgtaatgataaatttactggcaaga

SEQ ID NO: 395716 - DNA, 59 bp, Artificial
  Synthetic oligonucleotide
gaccctctatgtccacccaagtttttgctgttgggtcaatctgtagcatggagtcttta

SEQ ID NO: 395717 - DNA, 56 bp, Artificial
  Synthetic oligonucleotide
gaccctgaaactgaattggtcatgcctggtttttatactaacgaggcatttcaccc

SEQ ID NO: 395718 - DNA, 55 bp, Artificial
  Synthetic oligonucleotide
gaccctgacgcctgtttcttcgatccctgcgccacaggcagctcgtgtgaagcag

SEQ ID NO: 395719 - DNA, 55 bp, Artificial
  Synthetic oligonucleotide
gaccctgacgcgtacactaagatgtacggccctttggttggatacgaccctcgga

SEQ ID NO: 395720 - DNA, 55 bp, Artificial
  Synthetic oligonucleotide
gaccctgacttgaacactgtccttatcacaatcgtaactggaattgttctctacg

SEQ ID NO: 395721 - DNA, 55 bp, Artificial
  Synthetic oligonucleotide
gaccctgagtacaaaggacggttactgcatcctcaaaatccctttgtaggacatt

SEQ ID NO: 395722 - DNA, 60 bp, Artificial
  Synthetic oligonucleotide
gaccctgagttgattgcctcggcatatgcgtcgttggcagattggcaacctcctctagct

SEQ ID NO: 395723 - DNA, 57 bp, Artificial
  Synthetic oligonucleotide
gaccctgataactattggggaatcagggccggcgtcaacgcacatccagtcggttac

SEQ ID NO: 395724 - DNA, 52 bp, Artificial
  Synthetic oligonucleotide
gaccctgataccaacaggaaccttggggagttcaaactataccctggaggtt

SEQ ID NO: 395725 - DNA, 60 bp, Artificial
  Synthetic oligonucleotide
gaccctgatacttatactagtgctgggtatctatcatgctggtatcagacatcactcata

SEQ ID NO: 395726 - DNA, 60 bp, Artificial
  Synthetic oligonucleotide
gaccctgatccaatacatggatgacatcttaatagctagtgatagaacagatttagaaca

SEQ ID NO: 395727 - DNA, 55 bp, Artificial
  Synthetic oligonucleotide
gaccctgcagaatcttttgagctgcaggcacttggcaatgtatccagtgctgaac

SEQ ID NO: 395728 - DNA, 60 bp, Artificial
  Synthetic oligonucleotide
gaccctgcattttgccaccttacaggcatatactcacctccctggctaacaccaggtaga

SEQ ID NO: 395729 - DNA, 60 bp, Artificial
  Synthetic oligonucleotide
gaccctgccgaacctgcacgactcttgctcaaggaacctctatgtttccctcatgttgct

SEQ ID NO: 395730 - DNA, 55 bp, Artificial
  Synthetic oligonucleotide
gaccctgcgctgcaaaagggcgcatcggacagggtgcttgccgtggaccctgcct

SEQ ID NO: 395731 - DNA, 55 bp, Artificial
  Synthetic oligonucleotide
gaccctggctccatagtctaggacagtatatctattacacttatggggatactag

SEQ ID NO: 395732 - DNA, 55 bp, Artificial
  Synthetic oligonucleotide
gaccctgtgcgagttctcgaagcgctgaaacatttgacctgacgcacaaagcccg

SEQ ID NO: 395733 - DNA, 60 bp, Artificial
  Synthetic oligonucleotide
gaccctgtgttaggcgacgattgtcatatgagccagtggagagaccgttggtccataatg

SEQ ID NO: 395734 - DNA, 54 bp, Artificial
  Synthetic oligonucleotide
gaccctgttgggcgtattaaccgcattgctcaccgctttcctaacgccggtccc

SEQ ID NO: 395735 - DNA, 60 bp, Artificial
  Synthetic oligonucleotide
gacccttaacacagctaaacatgggttcgcaagtgtccacacagcgctccggctctcacg

SEQ ID NO: 395736 - DNA, 50 bp, Artificial
  Synthetic oligonucleotide
gacccttccctaaaggaaatcgtcttcctggaccactccagcagtcaatt

SEQ ID NO: 395737 - DNA, 55 bp, Artificial
  Synthetic oligonucleotide
gacccttcgaacatctccagagaagttagtgtcagacaagtggtttggcactcag

SEQ ID NO: 395738 - DNA, 55 bp, Artificial
  Synthetic oligonucleotide
gacccttcgacacgtgtcgcacctacagcagtccgtgttcaaatgacgcgtccca

SEQ ID NO: 395739 - DNA, 54 bp, Artificial
  Synthetic oligonucleotide
gacccttcgagactgatgatagaatggttaacaacgggaaacagacccagccga

SEQ ID NO: 395740 - DNA, 60 bp, Artificial
  Synthetic oligonucleotide
gacccttgaactgcaagtcatgctggcagaaactcgacagtctagtcaggtgtcatgatc

SEQ ID NO: 395741 - DNA, 60 bp, Artificial
  Synthetic oligonucleotide
gacccttgaggaggccgtttatggcattgagaagctggatggtcttgatttggccacttc

SEQ ID NO: 395742 - DNA, 56 bp, Artificial
  Synthetic oligonucleotide
gacccttgatctgtgatcgtgacgctatatatggccacccctctccagacaaacaa

SEQ ID NO: 395743 - DNA, 53 bp, Artificial
  Synthetic oligonucleotide
gacccttgcgtcaacttccagatcctggggccccagtacaaaaaacaccttag

SEQ ID NO: 395744 - DNA, 55 bp, Artificial
  Synthetic oligonucleotide
gacccttggaacaatcgagcggttcatgggtacattaaaacgtcagcggagtctc

SEQ ID NO: 395745 - DNA, 54 bp, Artificial
  Synthetic oligonucleotide
gacccttggggttactacttccgtgaatgtgtatcgttcgtagctagtcgttta

SEQ ID NO: 395746 - DNA, 52 bp, Artificial
  Synthetic oligonucleotide
gaccctttcacgtggaccccttagagttgtaagctcttaaaagggctaggag

SEQ ID NO: 395747 - DNA, 60 bp, Artificial
  Synthetic oligonucleotide
gaccctttcagactgcttcaaaacagccaagtatacagcctaatcagaccaaatgagaat

SEQ ID NO: 395748 - DNA, 60 bp, Artificial
  Synthetic oligonucleotide
gaccctttcatcaaccgcttgcaaagctacgcgactctctcctctcgcctgatgcatcta

SEQ ID NO: 395749 - DNA, 55 bp, Artificial
  Synthetic oligonucleotide
gaccctttccgtctgctccaaaacagtcaagtctttagtcttatcagaccaaacg

SEQ ID NO: 395750 - DNA, 52 bp, Artificial
  Synthetic oligonucleotide
gaccctttctgaatattgtacaacccataaccgcgtggattatgtaataacg

SEQ ID NO: 395751 - DNA, 58 bp, Artificial
  Synthetic oligonucleotide
gaccctttgcgtacctggaggaagctccacttgacgacgcgcgatccaacaataccat

SEQ ID NO: 395752 - DNA, 55 bp, Artificial
  Synthetic oligonucleotide
gaccctttgggattggttcaaacctgaattgttatggaagacacttagtacctgc

SEQ ID NO: 395753 - DNA, 54 bp, Artificial
  Synthetic oligonucleotide
gacccttttggtggttttacattctggggtgtggatctgactgaacggttctct

SEQ ID NO: 395754 - DNA, 53 bp, Artificial
  Synthetic oligonucleotide
gaccgaaaggtaaccaaggatggcctgtttctcgctgtcaactagacaacatg

SEQ ID NO: 395755 - DNA, 55 bp, Artificial
  Synthetic oligonucleotide
gaccgaaatgctaataacgaaagatttgcaaacttggggagtgagatcactgggg

SEQ ID NO: 395756 - DNA, 56 bp, Artificial
  Synthetic oligonucleotide
gaccgaaatttctggagaggtgaaaatggtcggagaaccagaattgcctatgaaag

SEQ ID NO: 395757 - DNA, 55 bp, Artificial
  Synthetic oligonucleotide
gaccgaacagacctaaacggtaacgcgagagacgcatccgcgagagacgggaaca

SEQ ID NO: 395758 - DNA, 55 bp, Artificial
  Synthetic oligonucleotide
gaccgaacctcaacgaatggttgacatagcaccaggtccatttgcagttagtgcg

SEQ ID NO: 395759 - DNA, 60 bp, Artificial
  Synthetic oligonucleotide
gaccgaacgcattagatatcactgctgatccaacaacagtcccacaagttcaaagaatca

SEQ ID NO: 395760 - DNA, 60 bp, Artificial
  Synthetic oligonucleotide
gaccgaagatccagatgaaggaacagcgggagtggagtctgctgtcctgcggggattcct

SEQ ID NO: 395761 - DNA, 55 bp, Artificial
  Synthetic oligonucleotide
gaccgaagatggatatgtcacgttacagtggtgtaacggtggactttccgacaac

SEQ ID NO: 395762 - DNA, 55 bp, Artificial
  Synthetic oligonucleotide
gaccgaattaggaatgaaattggagctttcgttgattctttagatgaacgcttgg

SEQ ID NO: 395763 - DNA, 55 bp, Artificial
  Synthetic oligonucleotide
gaccgacaaagcgggcgcacctacctacaactggggtgagaatgatacggacgtc

SEQ ID NO: 395764 - DNA, 55 bp, Artificial
  Synthetic oligonucleotide
gaccgacacagcgatctcaaaatttcgctcgtcgtggaggcatggcccctcgacc

SEQ ID NO: 395765 - DNA, 53 bp, Artificial
  Synthetic oligonucleotide
gaccgacaggcttctagctaagctgtcctacatgcgctcaggcttgggatgtg

SEQ ID NO: 395766 - DNA, 51 bp, Artificial
  Synthetic oligonucleotide
gaccgaccgccaacttgctataatcgtaatcctgacttgaccctaaccatg

SEQ ID NO: 395767 - DNA, 60 bp, Artificial
  Synthetic oligonucleotide
gaccgacgagcaatcagtaaagggtcgacagcgaagaggactgagctgtacaaactacta

SEQ ID NO: 395768 - DNA, 55 bp, Artificial
  Synthetic oligonucleotide
gaccgacgtacataagaaacaattgcattccgaattgggctcttaaagttggaca

SEQ ID NO: 395769 - DNA, 58 bp, Artificial
  Synthetic oligonucleotide
gaccgagagcccatcgagggaatctggacgagtgacgggcgccgagaaaccagaggct

SEQ ID NO: 395770 - DNA, 56 bp, Artificial
  Synthetic oligonucleotide
gaccgagcaacctaggatgcccagaacagaaggaatgaccccgtaccagttttctg

SEQ ID NO: 395771 - DNA, 57 bp, Artificial
  Synthetic oligonucleotide
gaccgagcgaggccttttggcgttggacgtggtgtgtactttgcgtcacctcgtgct

SEQ ID NO: 395772 - DNA, 53 bp, Artificial
  Synthetic oligonucleotide
gaccgagcgtgagtacgtaccccatccgggagttgctgcacacgttaaagacg

SEQ ID NO: 395773 - DNA, 58 bp, Artificial
  Synthetic oligonucleotide
gaccgagcttagactttgccttatccctcctaaggcgcaacattagacaggtgcaaac

SEQ ID NO: 395774 - DNA, 55 bp, Artificial
  Synthetic oligonucleotide
gaccgaggacgttaatcggaacatgcacaacctacttggcgttaaggggttgtga

SEQ ID NO: 395775 - DNA, 56 bp, Artificial
  Synthetic oligonucleotide
gaccgaggggaaaggagtctttgacgaagctaagaagaccgtggaggctctcaatg

SEQ ID NO: 395776 - DNA, 55 bp, Artificial
  Synthetic oligonucleotide
gaccgagtggcagttcaaggattattcacagcaacctggtatgctcaacctcatc

SEQ ID NO: 395777 - DNA, 50 bp, Artificial
  Synthetic oligonucleotide
gaccgatatagagagctagacgaagaaggtccaggagaaatcctttggta

SEQ ID NO: 395778 - DNA, 55 bp, Artificial
  Synthetic oligonucleotide
gaccgatcacgggcgagtaaagtgtgccgtttcgtgacattacagccggattcac

SEQ ID NO: 395779 - DNA, 55 bp, Artificial
  Synthetic oligonucleotide
gaccgatccaacgagccctggcccatttcaagactcctccgctaagtgtctcagc

SEQ ID NO: 395780 - DNA, 55 bp, Artificial
  Synthetic oligonucleotide
gaccgatgctcgctagtcactaactgtgtaataaagggaagagaggttcgtaagg

SEQ ID NO: 395781 - DNA, 58 bp, Artificial
  Synthetic oligonucleotide
gaccgattagaggcgttttatgataatcccaatgctttgcgtgactattttcgtggta

SEQ ID NO: 395782 - DNA, 60 bp, Artificial
  Synthetic oligonucleotide
gaccgattcaatctggatagagctcgatgagattggagaagatgtggctccaattgaaca

SEQ ID NO: 395783 - DNA, 60 bp, Artificial
  Synthetic oligonucleotide
gaccgattcgagctggatagaacttgatgaaataggagaagacgttgctccgattgagca

SEQ ID NO: 395784 - DNA, 57 bp, Artificial
  Synthetic oligonucleotide
gaccgattgaagcttaaggtatatgttaaagattcattgtcagttaaaatctttaga

SEQ ID NO: 395785 - DNA, 55 bp, Artificial
  Synthetic oligonucleotide
gaccgatttagccattatctggacgaacggacgcggcgatattgcgcaggatggt

SEQ ID NO: 395786 - DNA, 52 bp, Artificial
  Synthetic oligonucleotide
gaccgatttccaaaggtttatagacaaaaactgtcacgatgaatacgtcgtt

SEQ ID NO: 395787 - DNA, 55 bp, Artificial
  Synthetic oligonucleotide
gaccgatttgggtctcattttagacgcaattgcgaatgacattcaatatggtgga

SEQ ID NO: 395788 - DNA, 57 bp, Artificial
  Synthetic oligonucleotide
gaccgatttgtgtggcgcggaggtagggtgccagggtgatttgtgcacgacacgaca

SEQ ID NO: 395789 - DNA, 55 bp, Artificial
  Synthetic oligonucleotide
gaccgcaacagatgccgtgggtagaacggaacacaatttggaatgaaagaaggcg

SEQ ID NO: 395790 - DNA, 55 bp, Artificial
  Synthetic oligonucleotide
gaccgcaaccggtcgtgaagaccacttggaccgtgaggggtccgaatgtgcctcc

SEQ ID NO: 395791 - DNA, 55 bp, Artificial
  Synthetic oligonucleotide
gaccgcaacgacctcgcaattgctcacatctccggaagcctgaaggcgatggcga

SEQ ID NO: 395792 - DNA, 55 bp, Artificial
  Synthetic oligonucleotide
gaccgcaatgattgttcaactcttaaggaaattctccttacatatgctgagtgtg

SEQ ID NO: 395793 - DNA, 59 bp, Artificial
  Synthetic oligonucleotide
gaccgcagccaacccagtggttggctacggggaattcagcgagaagattcctctgactc

SEQ ID NO: 395794 - DNA, 55 bp, Artificial
  Synthetic oligonucleotide
gaccgcatagataattatgcgtgcctaaagacctagcccacaatgttttgcccgt

SEQ ID NO: 395795 - DNA, 55 bp, Artificial
  Synthetic oligonucleotide
gaccgcatgcctcctggctttcagccgtcaaaacaccttttccgtattataggtg

SEQ ID NO: 395796 - DNA, 55 bp, Artificial
  Synthetic oligonucleotide
gaccgcatgtccactgtcaccccggcaggaaaggaaccaccatctctcgtgaccc

SEQ ID NO: 395797 - DNA, 60 bp, Artificial
  Synthetic oligonucleotide
gaccgcattcactcgtgatgcgcctatggccttcacccctgaatctcgtactcagtttct

SEQ ID NO: 395798 - DNA, 55 bp, Artificial
  Synthetic oligonucleotide
gaccgccacttacacagtagcttcttactttgagcggggtatcgctaattatgac

SEQ ID NO: 395799 - DNA, 55 bp, Artificial
  Synthetic oligonucleotide
gaccgcccacggcatttgcaggcgtatccggagacagttcgtggggttatgacgc

SEQ ID NO: 395800 - DNA, 59 bp, Artificial
  Synthetic oligonucleotide
gaccgcccccatctctggctcgcggtccctctgtcccgaggcggcggcacttgtgccgc

SEQ ID NO: 395801 - DNA, 52 bp, Artificial
  Synthetic oligonucleotide
gaccgcccgcctacgtttattagctcgcactcgtttcgcccccctcttttcc

SEQ ID NO: 395802 - DNA, 60 bp, Artificial
  Synthetic oligonucleotide
gaccgccgagcatcgtgcgatgattcagaacgcattggatggatcaataatcgaaaatgg

SEQ ID NO: 395803 - DNA, 60 bp, Artificial
  Synthetic oligonucleotide
gaccgccgcgggcgcatgccttggaagattatgctgaccctcctcgctgtacaattgaag

SEQ ID NO: 395804 - DNA, 55 bp, Artificial
  Synthetic oligonucleotide
gaccgcctacggttgtaggatgaacccggcaaagcagtcaatcgggtttaggagc

SEQ ID NO: 395805 - DNA, 53 bp, Artificial
  Synthetic oligonucleotide
gaccgcctagggctgttgcggcttcctgtagatcacgtagggtttgcgcttta

SEQ ID NO: 395806 - DNA, 56 bp, Artificial
  Synthetic oligonucleotide
gaccgcctcaaaactcttgacgggtggctgtcacatttagtgtgccaccccctcag

SEQ ID NO: 395807 - DNA, 60 bp, Artificial
  Synthetic oligonucleotide
gaccgcctcaacctggtcatgcgggtccagcgagagggctacgccacagcccgctccgtg

SEQ ID NO: 395808 - DNA, 55 bp, Artificial
  Synthetic oligonucleotide
gaccgcgagagcggccgactcaacagattctccccagagagcccgtgatcatcca

SEQ ID NO: 395809 - DNA, 57 bp, Artificial
  Synthetic oligonucleotide
gaccgcgataaaaagggcttttgtgttcgagagcgatttgatcgtaactgccaacaa

SEQ ID NO: 395810 - DNA, 60 bp, Artificial
  Synthetic oligonucleotide
gaccgcgtcatctttcgttttcgcgacgaagctactattgcatatgagcattctttccgt

SEQ ID NO: 395811 - DNA, 58 bp, Artificial
  Synthetic oligonucleotide
gaccgcgtcccgggggcactccgcgcccgaatgcaaactggcagagtactctgaacag

SEQ ID NO: 395812 - DNA, 60 bp, Artificial
  Synthetic oligonucleotide
gaccgcgtgccagtaggactcaccctgtatagtgtacatagtagatagctaatcagtgcc

SEQ ID NO: 395813 - DNA, 55 bp, Artificial
  Synthetic oligonucleotide
gaccgcgtgccagtaggattccactgtgtttgtagatagcagtacccacgttttg

SEQ ID NO: 395814 - DNA, 60 bp, Artificial
  Synthetic oligonucleotide
gaccgcgtgcttcgcgattcttaatgaattacggtcagatcctcagatggtccaaactct

SEQ ID NO: 395815 - DNA, 55 bp, Artificial
  Synthetic oligonucleotide
gaccgcgtgtgggcgtgcacattcctacatagattatcttcctgtgttggcgggg

SEQ ID NO: 395816 - DNA, 60 bp, Artificial
  Synthetic oligonucleotide
gaccgcgttgcgtatccctaggtggcatcgagattcctctgctacccaccagcgtggact

SEQ ID NO: 395817 - DNA, 59 bp, Artificial
  Synthetic oligonucleotide
gaccgctattatgaagaagtggcggttgcccgggcaacagaggaggacttctgtgaaga

SEQ ID NO: 395818 - DNA, 59 bp, Artificial
  Synthetic oligonucleotide
gaccgctcaactcgcgcattttagcttccaaacgctcatccccactattatgggccaag

SEQ ID NO: 395819 - DNA, 59 bp, Artificial
  Synthetic oligonucleotide
gaccgctcccatgctaaactctccaaacattgaggcgtgtggttatagcgacagggtaa

SEQ ID NO: 395820 - DNA, 60 bp, Artificial
  Synthetic oligonucleotide
gaccgctcccggtacacatcctctgccaactgatacaaaacaccgcagcgtgccagctgc

SEQ ID NO: 395821 - DNA, 55 bp, Artificial
  Synthetic oligonucleotide
gaccgctgatgtattagaggcggcgtctgaagaggtgcctttaattggagcaggt

SEQ ID NO: 395822 - DNA, 54 bp, Artificial
  Synthetic oligonucleotide
gaccgctgccgactgccgagttctccccccgaagcccttcttatatgggccggg

SEQ ID NO: 395823 - DNA, 55 bp, Artificial
  Synthetic oligonucleotide
gaccgctgcttaacgctcaataaagcctgcctgagagtgttaacagtgtgtgccc

SEQ ID NO: 395824 - DNA, 53 bp, Artificial
  Synthetic oligonucleotide
gaccgcttagacggaaagttgtgtgggccaactaaagcctacgaattcttaac

SEQ ID NO: 395825 - DNA, 53 bp, Artificial
  Synthetic oligonucleotide
gaccgcttagtgggttacgcgaacgtatcgaaaaggatgagttggacgaaaaa

SEQ ID NO: 395826 - DNA, 55 bp, Artificial
  Synthetic oligonucleotide
gaccgcttgatttaggtccctcaaccgcttcaaatcactatcatcccttctctcc

SEQ ID NO: 395827 - DNA, 54 bp, Artificial
  Synthetic oligonucleotide
gaccgctttttgagggttcgagatcaacggggaaatatacttttatctcctgag

SEQ ID NO: 395828 - DNA, 55 bp, Artificial
  Synthetic oligonucleotide
gaccggaaagcttttgaagatgcttcggggttggtatgggaagaggctgctgcag

SEQ ID NO: 395829 - DNA, 52 bp, Artificial
  Synthetic oligonucleotide
gaccggaagttcatgtatggtgctccccgaatcaactagtcaatgtgcataa

SEQ ID NO: 395830 - DNA, 55 bp, Artificial
  Synthetic oligonucleotide
gaccggacgcgtcggaaggacggtaaacgcgtctgtctttattcgcagcgacgcg

SEQ ID NO: 395831 - DNA, 58 bp, Artificial
  Synthetic oligonucleotide
gaccggagagtgactggtggagctgttttccgcccgaattatccatatcgccgatact

SEQ ID NO: 395832 - DNA, 55 bp, Artificial
  Synthetic oligonucleotide
gaccggagcgcagttcaattccctgatagaacagactaccgccttcaatacgcac

SEQ ID NO: 395833 - DNA, 55 bp, Artificial
  Synthetic oligonucleotide
gaccggagttcgatatacatggtgtaaatccaatacagggcccgcttacgcgagc

SEQ ID NO: 395834 - DNA, 60 bp, Artificial
  Synthetic oligonucleotide
gaccggatccatctaatacgtagtagctattctgatcctcacagtcatgaggtttatctt

SEQ ID NO: 395835 - DNA, 58 bp, Artificial
  Synthetic oligonucleotide
gaccggcacaactcctgtggaaaggtgagggggcagtagtcatacaagataaaggaga

SEQ ID NO: 395836 - DNA, 55 bp, Artificial
  Synthetic oligonucleotide
gaccggccggtagtacctcaccctttccgagtcggtgacacagtgtgggtccgca

SEQ ID NO: 395837 - DNA, 55 bp, Artificial
  Synthetic oligonucleotide
gaccggcgaaatgtgaagcgagttgcaatgtttgaaggattagatctcccagatg

SEQ ID NO: 395838 - DNA, 55 bp, Artificial
  Synthetic oligonucleotide
gaccggcgagaagcattgacaaatgctatatcatgtgtcagaacgattatgaatc

SEQ ID NO: 395839 - DNA, 55 bp, Artificial
  Synthetic oligonucleotide
gaccggcgcatttaaaatatgtacgctatcatcctaacacagttgttactgcagg

SEQ ID NO: 395840 - DNA, 57 bp, Artificial
  Synthetic oligonucleotide
gaccggctcgtggcatttgctgtcgttttggatcgggggcacactcaaaactctagg

SEQ ID NO: 395841 - DNA, 55 bp, Artificial
  Synthetic oligonucleotide
gaccgggatcgctctctactccttgcatgacctttggccagctgatgtcgctgag

SEQ ID NO: 395842 - DNA, 58 bp, Artificial
  Synthetic oligonucleotide
gaccgggctatacagcgtctgcaaggacttactatccaggagcttcccgaccctccaa

SEQ ID NO: 395843 - DNA, 57 bp, Artificial
  Synthetic oligonucleotide
gaccggggaaatactggaacatatcagttacactactaattgtaaggcagctactaa

SEQ ID NO: 395844 - DNA, 55 bp, Artificial
  Synthetic oligonucleotide
gaccggggtgagaacaattaccacaggcagccccatcacgtactctacctacggc

SEQ ID NO: 395845 - DNA, 56 bp, Artificial
  Synthetic oligonucleotide
gaccggggtttcttctcgtacgtgtagttacgagtcaagttgtcagtgtcagccac

SEQ ID NO: 395846 - DNA, 55 bp, Artificial
  Synthetic oligonucleotide
gaccggtcaatcggtgtctctcaactctgtctatgtaattggtgtctggggtctt

SEQ ID NO: 395847 - DNA, 59 bp, Artificial
  Synthetic oligonucleotide
gaccgtaaggctactacatcaggccgtacactctggctgggtggtacagacgtagctaa

SEQ ID NO: 395848 - DNA, 55 bp, Artificial
  Synthetic oligonucleotide
gaccgtacacgtgcgctcaatccggccatcgcagaactttcccgagacaccggag

SEQ ID NO: 395849 - DNA, 53 bp, Artificial
  Synthetic oligonucleotide
gaccgtaccacaactcagactacgttgcaatggctctcacatacagaacgccc

SEQ ID NO: 395850 - DNA, 57 bp, Artificial
  Synthetic oligonucleotide
gaccgtagataggccgtccactgctggacgctcacaacccgcacattgcatctgacc

SEQ ID NO: 395851 - DNA, 57 bp, Artificial
  Synthetic oligonucleotide
gaccgtagtccttacaagctcgtttaattgtgccaaggacatagttatattcgactg

SEQ ID NO: 395852 - DNA, 55 bp, Artificial
  Synthetic oligonucleotide
gaccgtatctagttaaagatacgattaaactcaaacaagagagatggcttggtaa

SEQ ID NO: 395853 - DNA, 55 bp, Artificial
  Synthetic oligonucleotide
gaccgtattcatcggcgtatgttaatatgcatctattggacagccataagcaacg

SEQ ID NO: 395854 - DNA, 60 bp, Artificial
  Synthetic oligonucleotide
gaccgtattgctggcactacgcacctagaccttgtagtgttgtcccggcatcaagtgtct

SEQ ID NO: 395855 - DNA, 55 bp, Artificial
  Synthetic oligonucleotide
gaccgtcaccctgggaaataccgcatgccgcgtttattatcgtacacacagtgag

SEQ ID NO: 395856 - DNA, 55 bp, Artificial
  Synthetic oligonucleotide
gaccgtcactctgcaaagatgggaacggcttcctctatcgttcagacgatcaacg

SEQ ID NO: 395857 - DNA, 55 bp, Artificial
  Synthetic oligonucleotide
gaccgtcccgacgtgtcgcaaacggctgcactgcaaggtgaaaccgggcatatga

SEQ ID NO: 395858 - DNA, 52 bp, Artificial
  Synthetic oligonucleotide
gaccgtccttctgttggcgcgcgtgtaagtagctgttgtgcaccgcggttgc

SEQ ID NO: 395859 - DNA, 55 bp, Artificial
  Synthetic oligonucleotide
gaccgtcgataagaaggcggatcgaattttcttcgattttgaaaatgcacccaat

SEQ ID NO: 395860 - DNA, 57 bp, Artificial
  Synthetic oligonucleotide
gaccgtcgctcgttcaacaaggccctcgtaatattcctcgacgacaccgactgccag

SEQ ID NO: 395861 - DNA, 53 bp, Artificial
  Synthetic oligonucleotide
gaccgtcggggaggattggtgtgagcagagtgtccagacccacgtctattggg

SEQ ID NO: 395862 - DNA, 55 bp, Artificial
  Synthetic oligonucleotide
gaccgtcggtctttaccttggagagactgataaacgctaaagcacaactcatggt

SEQ ID NO: 395863 - DNA, 55 bp, Artificial
  Synthetic oligonucleotide
gaccgtctggcaactctccgtagccggcgtgtcgtgcgatgtcaccactgaacac

SEQ ID NO: 395864 - DNA, 55 bp, Artificial
  Synthetic oligonucleotide
gaccgtgaacacccttaccaatcattcaactaccacggatcgtttgtcactgacg

SEQ ID NO: 395865 - DNA, 58 bp, Artificial
  Synthetic oligonucleotide
gaccgtgactgctgcttatattctgcattacctgattcctaaaaaacaaccggaatta

SEQ ID NO: 395866 - DNA, 56 bp, Artificial
  Synthetic oligonucleotide
gaccgtgatacatgtaacggcgtttacgcaaacataagcaagaacgccctgttagt

SEQ ID NO: 395867 - DNA, 50 bp, Artificial
  Synthetic oligonucleotide
gaccgtgcaaccctcctctccactctcgtaaaccaaggaatgacaatgac

SEQ ID NO: 395868 - DNA, 59 bp, Artificial
  Synthetic oligonucleotide
gaccgtgcagtaattacgtacgagggggattccagtgccgggtacaatcatgatgtgtc

SEQ ID NO: 395869 - DNA, 58 bp, Artificial
  Synthetic oligonucleotide
gaccgtgctagagctaaatcgtatttctaccagaggatttaggtcgataataactgta

SEQ ID NO: 395870 - DNA, 55 bp, Artificial
  Synthetic oligonucleotide
gaccgtggatgttgtagaagagttgattttaaacgttaatgttgcccttatggaa

SEQ ID NO: 395871 - DNA, 57 bp, Artificial
  Synthetic oligonucleotide
gaccgtgggagttccaggggctccggagattaccctctcattcctgctctcctaatc

SEQ ID NO: 395872 - DNA, 59 bp, Artificial
  Synthetic oligonucleotide
gaccgtgggtaaggggtcaatctggcagaataagcatctattggacaatagtcaagccg

SEQ ID NO: 395873 - DNA, 55 bp, Artificial
  Synthetic oligonucleotide
gaccgtggtagtggtcatgctgacactggcaagcggtatgatgcgtcacacctcc

SEQ ID NO: 395874 - DNA, 55 bp, Artificial
  Synthetic oligonucleotide
gaccgtgtagagcaggccaagatctgtgagtgcctgtacaacatcattgagtggg

SEQ ID NO: 395875 - DNA, 60 bp, Artificial
  Synthetic oligonucleotide
gaccgtgtccatttctggctgatactctatgagccctggggcgactttgcatgaaggtga

SEQ ID NO: 395876 - DNA, 60 bp, Artificial
  Synthetic oligonucleotide
gaccgtgttatacaaattcatggccaagaatactatatacttggactctagtcactatat

SEQ ID NO: 395877 - DNA, 55 bp, Artificial
  Synthetic oligonucleotide
gaccgtgttattcaagatgccttactgtcccgtgaggctgtgttgattccacccc

SEQ ID NO: 395878 - DNA, 51 bp, Artificial
  Synthetic oligonucleotide
gaccgttaacggtacaaaaacagtttcgactaggggatccatcaagggtat

SEQ ID NO: 395879 - DNA, 53 bp, Artificial
  Synthetic oligonucleotide
gaccgttaaggtgttccgccgtggtaaagtactacctcgtgtgtaccgcttga

SEQ ID NO: 395880 - DNA, 55 bp, Artificial
  Synthetic oligonucleotide
gaccgttaatgacgttgtttcacatgttagagtattgtctaaggcttttcaggat

SEQ ID NO: 395881 - DNA, 55 bp, Artificial
  Synthetic oligonucleotide
gaccgttacccacacaaagtgccagttaagggcgccttcgtggagtttaccagca

SEQ ID NO: 395882 - DNA, 52 bp, Artificial
  Synthetic oligonucleotide
gaccgttacgactgccggaagttcaacaacccttgacgtaacgggcaagtac

SEQ ID NO: 395883 - DNA, 56 bp, Artificial
  Synthetic oligonucleotide
gaccgttatgttacacgcaccaacctattttattacggtggcagctccagacttct

SEQ ID NO: 395884 - DNA, 55 bp, Artificial
  Synthetic oligonucleotide
gaccgttcaagtaatccagttaagcgtggcattgcattgattaattcagtaggaa

SEQ ID NO: 395885 - DNA, 52 bp, Artificial
  Synthetic oligonucleotide
gaccgttccgtgcactcggtgactcgggagacgttgactcggaccgacagca

SEQ ID NO: 395886 - DNA, 55 bp, Artificial
  Synthetic oligonucleotide
gaccgttcgtacatggacatattcgtcttttccgcaaaaagaccgtctttgccat

SEQ ID NO: 395887 - DNA, 56 bp, Artificial
  Synthetic oligonucleotide
gaccgttcttttccggttgtctaggaccagcaactggtttccttgtcagatcaata

SEQ ID NO: 395888 - DNA, 60 bp, Artificial
  Synthetic oligonucleotide
gaccgttgatagtaattgtagtaaactgagctttcgaccgattctattctcttcatcatg

SEQ ID NO: 395889 - DNA, 55 bp, Artificial
  Synthetic oligonucleotide
gaccgttgcctttgcctaggttcgggtcatagacgattgggctttcgccacggaa

SEQ ID NO: 395890 - DNA, 54 bp, Artificial
  Synthetic oligonucleotide
gaccgttgtcgcactctgtgttgacctgttatcggagagcggagagttagtgat

SEQ ID NO: 395891 - DNA, 55 bp, Artificial
  Synthetic oligonucleotide
gaccgtttaaatgtgtgccaggacaaaatactgtctctgtatgaagcagacagag

SEQ ID NO: 395892 - DNA, 51 bp, Artificial
  Synthetic oligonucleotide
gaccgtttatgcgatccctaacttctggcctgaagatcctaactggaaagg

SEQ ID NO: 395893 - DNA, 52 bp, Artificial
  Synthetic oligonucleotide
gaccgtttttgccatttggtgtacaactttaaatgcctaaggccgcgaaacc

SEQ ID NO: 395894 - DNA, 60 bp, Artificial
  Synthetic oligonucleotide
gacctaaacatttatatgtgtccatgcctacagcacagtccacaatgaaagctgaagagt

SEQ ID NO: 395895 - DNA, 57 bp, Artificial
  Synthetic oligonucleotide
gacctaaagggttatagctatacaggatttagtcatgaatcaagggggtggccagct

SEQ ID NO: 395896 - DNA, 60 bp, Artificial
  Synthetic oligonucleotide
gacctaacatgtctacctccgtacacttatatatatgcacgtagcatatatataagtgta

SEQ ID NO: 395897 - DNA, 55 bp, Artificial
  Synthetic oligonucleotide
gacctaacctatgggtggatcgttggatcgccccagctttatgttggagcggctc

SEQ ID NO: 395898 - DNA, 55 bp, Artificial
  Synthetic oligonucleotide
gacctaaggtgatgagacagttgctgttagatgaaccttacctgttgattctatc

SEQ ID NO: 395899 - DNA, 58 bp, Artificial
  Synthetic oligonucleotide
gacctaataacaatgcctcggcagtggtctggtacaatgggaggccagtcaccgaaat

SEQ ID NO: 395900 - DNA, 55 bp, Artificial
  Synthetic oligonucleotide
gacctaatccattgtttggagtcaaaggttacagttattcgtcgttgccttatca

SEQ ID NO: 395901 - DNA, 60 bp, Artificial
  Synthetic oligonucleotide
gacctaatgagagatatttgttgttattgtgtggttgtgagtgatccattaatatgtgac

SEQ ID NO: 395902 - DNA, 55 bp, Artificial
  Synthetic oligonucleotide
gacctaatggcaagtgatacagcgatagacttgcctgacagggaagcagaagccc

SEQ ID NO: 395903 - DNA, 60 bp, Artificial
  Synthetic oligonucleotide
gacctaattaataggagaacaaccagggtgcaggggcagccaatgtatggaatgaatgct

SEQ ID NO: 395904 - DNA, 57 bp, Artificial
  Synthetic oligonucleotide
gacctaatttactacaagacagactgaatttgcacgataattttgaatccttgtggg

SEQ ID NO: 395905 - DNA, 56 bp, Artificial
  Synthetic oligonucleotide
gacctacaaatcaagtgtcctgattgcggtgaactgattaagttcacgttaaaccg

SEQ ID NO: 395906 - DNA, 55 bp, Artificial
  Synthetic oligonucleotide
gacctacaacgacgtgaattgaaatgtggaggaggcatcttcgtgtacaacgacg

SEQ ID NO: 395907 - DNA, 58 bp, Artificial
  Synthetic oligonucleotide
gacctacacctcttcgagaaaagcgctcttcgagtactccctcggcagactattctgt

SEQ ID NO: 395908 - DNA, 52 bp, Artificial
  Synthetic oligonucleotide
gacctacaggtctaccacatcggaaacttgttaaaaggagacaaggtaaacg

SEQ ID NO: 395909 - DNA, 53 bp, Artificial
  Synthetic oligonucleotide
gacctacatgttgatagcagaggccctcgtacggaccaagcaacgcatacacg

SEQ ID NO: 395910 - DNA, 60 bp, Artificial
  Synthetic oligonucleotide
gacctaccaatatttcgagcactgatgcatagcgtctatacggattatttcgatccacga

SEQ ID NO: 395911 - DNA, 56 bp, Artificial
  Synthetic oligonucleotide
gacctaccataacactaatgtagaagaccttttaatattatggggaattcatcacc

SEQ ID NO: 395912 - DNA, 59 bp, Artificial
  Synthetic oligonucleotide
gacctacccttaaccattacctgctcaagaatgagtttccagccatcttgagtggagaa

SEQ ID NO: 395913 - DNA, 57 bp, Artificial
  Synthetic oligonucleotide
gacctacctctcgaagccaatcaacatgttaaagaacggagagtaccgccagtcacc

SEQ ID NO: 395914 - DNA, 51 bp, Artificial
  Synthetic oligonucleotide
gacctacgccccttctataccggttggggcccgtccaaaatgaaacctgct

SEQ ID NO: 395915 - DNA, 53 bp, Artificial
  Synthetic oligonucleotide
gacctacggccagggcagtgggaacgcctttaccttcctaaacaaccacctca

SEQ ID NO: 395916 - DNA, 55 bp, Artificial
  Synthetic oligonucleotide
gacctacgtgctgtttaatccaacgcataacttgcattggtccaggcactatagc

SEQ ID NO: 395917 - DNA, 53 bp, Artificial
  Synthetic oligonucleotide
gacctacgtggcccactctgaaggcaaggccgcagtaatgaccatggcctacg

SEQ ID NO: 395918 - DNA, 55 bp, Artificial
  Synthetic oligonucleotide
gacctacgtttgacgactctttcactccggtgtattagtgcccgctgaagagcgt

SEQ ID NO: 395919 - DNA, 53 bp, Artificial
  Synthetic oligonucleotide
gacctactacagagtcttcgcctgcaagtgggttgagttgacctatcaagatc

SEQ ID NO: 395920 - DNA, 54 bp, Artificial
  Synthetic oligonucleotide
gacctactatgaaatcatgcgacttcgagagataacgcttggatcgccttcgga

SEQ ID NO: 395921 - DNA, 53 bp, Artificial
  Synthetic oligonucleotide
gacctactattgcaagtgtacttgtgagcattaaagttgcttctattatgact

SEQ ID NO: 395922 - DNA, 54 bp, Artificial
  Synthetic oligonucleotide
gacctactcacggggaccacttcctcaacgcccacgtggaacccaaagatgtac

SEQ ID NO: 395923 - DNA, 55 bp, Artificial
  Synthetic oligonucleotide
gacctactcggatggtctgcaacttacagcaaagatcttgggatctatgtgccgg

SEQ ID NO: 395924 - DNA, 55 bp, Artificial
  Synthetic oligonucleotide
gacctactggcggagaaggaaaatccacgtttgctcgtgatctgtttaggagtgg

SEQ ID NO: 395925 - DNA, 55 bp, Artificial
  Synthetic oligonucleotide
gacctactgttgctgaaacaccacaagcgtatttaagagtaagcagattaggacg

SEQ ID NO: 395926 - DNA, 55 bp, Artificial
  Synthetic oligonucleotide
gacctacttgtgagtactaccacggcacaagggtgtgacattatcgctaggtgtc

SEQ ID NO: 395927 - DNA, 56 bp, Artificial
  Synthetic oligonucleotide
gacctactttgtaaccatagacgggagagtaggcactgaaaacccgacagtgcaaa

SEQ ID NO: 395928 - DNA, 60 bp, Artificial
  Synthetic oligonucleotide
gacctagacctcatgagatacgtaggagtgagattcaaggcctacagacaccccacaaca

SEQ ID NO: 395929 - DNA, 60 bp, Artificial
  Synthetic oligonucleotide
gacctagacctttcacggtctagagcactcagcatgtctggagctatgaagcgtaagcgt

SEQ ID NO: 395930 - DNA, 58 bp, Artificial
  Synthetic oligonucleotide
gacctagagaagtagagtctgatcctaaaaacttattgaaaacctcatgcagttctaa

SEQ ID NO: 395931 - DNA, 60 bp, Artificial
  Synthetic oligonucleotide
gacctagattatggtcaatgcccgaataatatgatgggcacttttagcattaggacagta

SEQ ID NO: 395932 - DNA, 60 bp, Artificial
  Synthetic oligonucleotide
gacctagccatttaccattactctgaagacatgatgcaattctccaaaggtttgatggtg

SEQ ID NO: 395933 - DNA, 55 bp, Artificial
  Synthetic oligonucleotide
gacctagcctctaccagtaaagtgaccaacaaccaactagctcataacctcgcag

SEQ ID NO: 395934 - DNA, 58 bp, Artificial
  Synthetic oligonucleotide
gacctagcgacatacgggtttggccaccagaacaaagcagtttacacagcagggtata

SEQ ID NO: 395935 - DNA, 55 bp, Artificial
  Synthetic oligonucleotide
gacctagcggcccgactggtcgagtctttcgacaagaccgatatctacgttgggg

SEQ ID NO: 395936 - DNA, 55 bp, Artificial
  Synthetic oligonucleotide
gacctagctatcttcaagagttacgagcttaatttggaatcgtatcctacgctgg

SEQ ID NO: 395937 - DNA, 60 bp, Artificial
  Synthetic oligonucleotide
gacctaggtgctagaatgcacgttatattggttcgacatattcttggcaagccgaagtga

SEQ ID NO: 395938 - DNA, 50 bp, Artificial
  Synthetic oligonucleotide
gacctataggtcccctgacgttcctaaaggttgtgaagggccttgtaagg

SEQ ID NO: 395939 - DNA, 59 bp, Artificial
  Synthetic oligonucleotide
gacctatatctcctatcctaatctgggcaagactgaacccaatcgaaccaggtcgtaca

SEQ ID NO: 395940 - DNA, 55 bp, Artificial
  Synthetic oligonucleotide
gacctatcgctgcatactgaatcatatgtttgcagcgcagattgtacaataggtg

SEQ ID NO: 395941 - DNA, 52 bp, Artificial
  Synthetic oligonucleotide
gacctatcggtaagcttgcttttaagcaagaacccggtaaggtaagagtatt

SEQ ID NO: 395942 - DNA, 53 bp, Artificial
  Synthetic oligonucleotide
gacctatcgttgtcctaaagcagttgccgatttatttggcgtgaaaaccttca

SEQ ID NO: 395943 - DNA, 55 bp, Artificial
  Synthetic oligonucleotide
gacctatctgaaggctctcaaatagtctacgtcattccggatatgatgactacta

SEQ ID NO: 395944 - DNA, 50 bp, Artificial
  Synthetic oligonucleotide
gacctatctggaaggtgcctacaccagtaactcaacgaccgatgcacatg

SEQ ID NO: 395945 - DNA, 55 bp, Artificial
  Synthetic oligonucleotide
gacctatgaaaaggccctaatcggaggaacagggagcatagtaatcttcgacgat

SEQ ID NO: 395946 - DNA, 55 bp, Artificial
  Synthetic oligonucleotide
gacctatgcgcgtgtactttgagctcacaaagttattgcgtttaacatggtcttc

SEQ ID NO: 395947 - DNA, 56 bp, Artificial
  Synthetic oligonucleotide
gacctatgtggttaaatgggctctaattgtggatcaggttcctggtgaaaccctag

SEQ ID NO: 395948 - DNA, 56 bp, Artificial
  Synthetic oligonucleotide
gacctattctttcacaacccagctctagatgtattatacgccaccctagttcttcc

SEQ ID NO: 395949 - DNA, 56 bp, Artificial
  Synthetic oligonucleotide
gacctattgaaaaagttaatcaattgaaaacacgagtattctcaaatggaccaatg

SEQ ID NO: 395950 - DNA, 60 bp, Artificial
  Synthetic oligonucleotide
gacctattgaggaaataatctccacggtggccagcaacgcactagcactaagtcagccca

SEQ ID NO: 395951 - DNA, 55 bp, Artificial
  Synthetic oligonucleotide
gacctattgcttggtaatcgaagctggtcatatatagtggagagacctacagctc

SEQ ID NO: 395952 - DNA, 55 bp, Artificial
  Synthetic oligonucleotide
gacctattgctttatgcaaaactacctgagtatgtcagaacacaagtagaagcct

SEQ ID NO: 395953 - DNA, 55 bp, Artificial
  Synthetic oligonucleotide
gacctatttgggaaagtgctgttaattcataccagcatcatataaccacccctac

SEQ ID NO: 395954 - DNA, 60 bp, Artificial
  Synthetic oligonucleotide
gacctcaaatggatgctgtcaatttgaaagcaatggttagctactgtaaaccaggaacac

SEQ ID NO: 395955 - DNA, 55 bp, Artificial
  Synthetic oligonucleotide
gacctcaaattcggaaaccccagtgaagccctcctccaggcgtgctggagcattc

SEQ ID NO: 395956 - DNA, 55 bp, Artificial
  Synthetic oligonucleotide
gacctcaacccacacaaggacaactggccggactccaacaaggtgggagcgggag

SEQ ID NO: 395957 - DNA, 60 bp, Artificial
  Synthetic oligonucleotide
gacctcaagcagctccattgtgatgtgtggagtagatcatgagattgccgattggtcatg

SEQ ID NO: 395958 - DNA, 55 bp, Artificial
  Synthetic oligonucleotide
gacctcaagttacagtgtcgccactccctcattcctaccgaaagaccgttcccac

SEQ ID NO: 395959 - DNA, 60 bp, Artificial
  Synthetic oligonucleotide
gacctcaattggaggagggctctctgcgagcgcaatcgaagcagaggaagttcgcacaaa

SEQ ID NO: 395960 - DNA, 60 bp, Artificial
  Synthetic oligonucleotide
gacctcacacttcacgtccgcgcgagctacccagtcagcccatggctctggcgcgacact

SEQ ID NO: 395961 - DNA, 60 bp, Artificial
  Synthetic oligonucleotide
gacctcacagatcacatgtatgagtggtcaaaggaggaccccgatgcaatcaaatttggc

SEQ ID NO: 395962 - DNA, 56 bp, Artificial
  Synthetic oligonucleotide
gacctcacagatgtacacgttagtgtgaccactcacacgaaccccacatttacaga

SEQ ID NO: 395963 - DNA, 55 bp, Artificial
  Synthetic oligonucleotide
gacctcaccaaaactacgataaccacccttgtgaagatcatctgtgctatggtcc

SEQ ID NO: 395964 - DNA, 55 bp, Artificial
  Synthetic oligonucleotide
gacctcacggacatgcgccctcgtattctcgcattcgccaacaactcttcgaacc

SEQ ID NO: 395965 - DNA, 55 bp, Artificial
  Synthetic oligonucleotide
gacctcagacagagccagagaagcggttgctcagatgaaagcggcagccctcgct

SEQ ID NO: 395966 - DNA, 55 bp, Artificial
  Synthetic oligonucleotide
gacctcagtccttagaatcttatatgggctttaagacggtatctatatacagtcg

SEQ ID NO: 395967 - DNA, 59 bp, Artificial
  Synthetic oligonucleotide
gacctcatatgatttggaagatgtaattaatcaactcttaagggtcttacagaacaatg

SEQ ID NO: 395968 - DNA, 55 bp, Artificial
  Synthetic oligonucleotide
gacctcatcaatacatatgcccgagggtctgatgagggcaaccggcacaccagcg

SEQ ID NO: 395969 - DNA, 52 bp, Artificial
  Synthetic oligonucleotide
gacctcatcattgctgtgacaacattgaaaggcacctctaccagcttatgaa

SEQ ID NO: 395970 - DNA, 55 bp, Artificial
  Synthetic oligonucleotide
gacctccaaacacttttctgcagtacgcaaggcttaacacaatcagcagcatgca

SEQ ID NO: 395971 - DNA, 60 bp, Artificial
  Synthetic oligonucleotide
gacctccacaggcatatcctatccaagtagtaaatggagcaccacaatacgtagcccttg

SEQ ID NO: 395972 - DNA, 55 bp, Artificial
  Synthetic oligonucleotide
gacctccagctaagtacgattatagattcataacttgcgacacggcgatgactac

SEQ ID NO: 395973 - DNA, 53 bp, Artificial
  Synthetic oligonucleotide
gacctcccataccccccaggcgcgtggggaccgctacccaccacacacctccc

SEQ ID NO: 395974 - DNA, 55 bp, Artificial
  Synthetic oligonucleotide
gacctcccgattatttgtgaccttgatccaatatatggccaaccctctccggaca

SEQ ID NO: 395975 - DNA, 60 bp, Artificial
  Synthetic oligonucleotide
gacctccgcaagagtcacgcctagcggcattgttggagccgcgtattatagagccactgt

SEQ ID NO: 395976 - DNA, 56 bp, Artificial
  Synthetic oligonucleotide
gacctccgccatacgctctgttccggggaggcgatgcgggatactttatcccgttc

SEQ ID NO: 395977 - DNA, 60 bp, Artificial
  Synthetic oligonucleotide
gacctccggtgggccccaagctggctgatcaactacaccggagacctgagcacagacaag

SEQ ID NO: 395978 - DNA, 56 bp, Artificial
  Synthetic oligonucleotide
gacctccggtgggcccccagctggttgatcaactataccggagaccagagtaccga

SEQ ID NO: 395979 - DNA, 60 bp, Artificial
  Synthetic oligonucleotide
gacctcctcaaggcagtcagatacatcaagatcttgtaccaaagcagtaagtattgttaa

SEQ ID NO: 395980 - DNA, 55 bp, Artificial
  Synthetic oligonucleotide
gacctcctccacccttcgggaaatgagccttgtgttattcaattgcagcagcccc

SEQ ID NO: 395981 - DNA, 55 bp, Artificial
  Synthetic oligonucleotide
gacctcctcttaagtgtaccggaatggtcctacatagtggagaaggagaacccga

SEQ ID NO: 395982 - DNA, 55 bp, Artificial
  Synthetic oligonucleotide
gacctccttgagcaccttcctggggaccctaattttgaggattcatttcagcaca

SEQ ID NO: 395983 - DNA, 56 bp, Artificial
  Synthetic oligonucleotide
gacctccttgtcagttgtgtggtagagaggttgccttgatactgccctgttgtgtt

SEQ ID NO: 395984 - DNA, 55 bp, Artificial
  Synthetic oligonucleotide
gacctccttgtgagcaccaccaccgcacacggatgtgacaccatagccaggtgcc

SEQ ID NO: 395985 - DNA, 50 bp, Artificial
  Synthetic oligonucleotide
gacctcgaaaacagttgcgaggttgccactgaagacgtgattgaggtaga

SEQ ID NO: 395986 - DNA, 60 bp, Artificial
  Synthetic oligonucleotide
gacctcgaggtttctgggcgaatctgttgcagatcctgcgtgacatcactggtgtcaccg

SEQ ID NO: 395987 - DNA, 58 bp, Artificial
  Synthetic oligonucleotide
gacctcgcttccctctacaacatagagggttgtgtatctagcgtgccttggacagggt

SEQ ID NO: 395988 - DNA, 60 bp, Artificial
  Synthetic oligonucleotide
gacctcgcttgaccgcaaactcccgtcgaagctggagccgtgtgcaaaacaggatgtagc

SEQ ID NO: 395989 - DNA, 56 bp, Artificial
  Synthetic oligonucleotide
gacctcggagtcttgataattgttgatcgagggttgaaggaaacagcagggtaacg

SEQ ID NO: 395990 - DNA, 50 bp, Artificial
  Synthetic oligonucleotide
gacctcggatcctcgaagaggatctgaattacaggatggtgttttccata

SEQ ID NO: 395991 - DNA, 55 bp, Artificial
  Synthetic oligonucleotide
gacctcgggtccctgctatgaaggcctctttgagtccagtgtgcggatttacgcg

SEQ ID NO: 395992 - DNA, 51 bp, Artificial
  Synthetic oligonucleotide
gacctctacaacgagtgtctcaatatagatcttcctgaaacagaaaaagat

SEQ ID NO: 395993 - DNA, 60 bp, Artificial
  Synthetic oligonucleotide
gacctctcagtgaggggttgatagtcttagagaactgaatcatgaacaagcagtgagctt

SEQ ID NO: 395994 - DNA, 59 bp, Artificial
  Synthetic oligonucleotide
gacctctcgcgacctcaattccgctacgtttcctgccttccaagccatgtgcgcccagt

SEQ ID NO: 395995 - DNA, 55 bp, Artificial
  Synthetic oligonucleotide
gacctctctggcaaagaacacctctgctgggatggatgtacatttccaggttcgg

SEQ ID NO: 395996 - DNA, 55 bp, Artificial
  Synthetic oligonucleotide
gacctctggctgtcgtacctctattaggcagacaggaaccacccttttggggcct

SEQ ID NO: 395997 - DNA, 57 bp, Artificial
  Synthetic oligonucleotide
gacctctgtgactggctaggtacgtcaatacgggttaagcatcctggaggggtactc

SEQ ID NO: 395998 - DNA, 60 bp, Artificial
  Synthetic oligonucleotide
gacctctgtgtcgcgaaatcttagttttccgagagagcaacttctgcagtacacagctgc

SEQ ID NO: 395999 - DNA, 55 bp, Artificial
  Synthetic oligonucleotide
gacctctgttctattggcttgcacactgtgaaggaatgtaagattggtaccacca

SEQ ID NO: 396000 - DNA, 58 bp, Artificial
  Synthetic oligonucleotide
gacctctttatcgaatcttccgacacgcatccgtggtacacactgaaaggtcgtgtgt

SEQ ID NO: 396001 - DNA, 60 bp, Artificial
  Synthetic oligonucleotide
gacctgaaactgaccccagtcgatgtaatcaccgtccttctcgatataggacttgacatc

SEQ ID NO: 396002 - DNA, 58 bp, Artificial
  Synthetic oligonucleotide
gacctgaaatacttcaatgaatcaacgagagagaaaatcgagaaaataagacctctac

SEQ ID NO: 396003 - DNA, 60 bp, Artificial
  Synthetic oligonucleotide
gacctgaacatacacaaccaataagagacagaatgttgaacattaagttagtatgtaagc

SEQ ID NO: 396004 - DNA, 59 bp, Artificial
  Synthetic oligonucleotide
gacctgaagatccaaccgagtttcaatgggcgttatctgcaggttaatgttcgtcttga

SEQ ID NO: 396005 - DNA, 55 bp, Artificial
  Synthetic oligonucleotide
gacctgaatccccacctggagaaacaacgtgcgcgtaagaccgacgaagctcggg

SEQ ID NO: 396006 - DNA, 60 bp, Artificial
  Synthetic oligonucleotide
gacctgaatccgcatctggagaaacaacgcgctcggaagacggatgaggccagagactat

SEQ ID NO: 396007 - DNA, 57 bp, Artificial
  Synthetic oligonucleotide
gacctgaatcgctggaagtcaccgtggggatccctgatactccggttcagttaacac

SEQ ID NO: 396008 - DNA, 54 bp, Artificial
  Synthetic oligonucleotide
gacctgacggctacgagcgacccccgctatgctcagactgcgggttgatagggt

SEQ ID NO: 396009 - DNA, 56 bp, Artificial
  Synthetic oligonucleotide
gacctgagaccagtggataagtactggtttctaatgggccctgcaggggcggaagt

SEQ ID NO: 396010 - DNA, 56 bp, Artificial
  Synthetic oligonucleotide
gacctgaggagaatctcacgcgaatttgacgggataggatacaagatcttgggtga

SEQ ID NO: 396011 - DNA, 55 bp, Artificial
  Synthetic oligonucleotide
gacctgaggagggtctacttatgtaagtctgaagtcagacattcggtcaaatcga

SEQ ID NO: 396012 - DNA, 60 bp, Artificial
  Synthetic oligonucleotide
gacctgatattatgcagttgcccttccaactcactacaatcttctatccaagaaatcata

SEQ ID NO: 396013 - DNA, 55 bp, Artificial
  Synthetic oligonucleotide
gacctgatctgccttgcatgctagcacgatacaaacttgctgctctatagcgctt

SEQ ID NO: 396014 - DNA, 56 bp, Artificial
  Synthetic oligonucleotide
gacctgatcttctaattccggccttaatggtcctagcaagggtgcacctccgtttc

SEQ ID NO: 396015 - DNA, 57 bp, Artificial
  Synthetic oligonucleotide
gacctgatctttatgtttccctcactagggcgaccaaaagtttgactattctgagtc

SEQ ID NO: 396016 - DNA, 60 bp, Artificial
  Synthetic oligonucleotide
gacctgatgtcgcaatcccgcgctcgcgagatactcacaaagaccactgtagatcacatg

SEQ ID NO: 396017 - DNA, 55 bp, Artificial
  Synthetic oligonucleotide
gacctgcaaacactttcaagacctgaatttacattgcataatgagcacattcgct

SEQ ID NO: 396018 - DNA, 52 bp, Artificial
  Synthetic oligonucleotide
gacctgcaacctactagctggcgcactgtttctcaccgctgcccctgggacg

SEQ ID NO: 396019 - DNA, 55 bp, Artificial
  Synthetic oligonucleotide
gacctgcaactcaacagtgaccagcttgattgctaacattgacgtagacgtaggt

SEQ ID NO: 396020 - DNA, 55 bp, Artificial
  Synthetic oligonucleotide
gacctgcacatcgcaccgcttacagctaatcctacctgagggtggcactctgtgt

SEQ ID NO: 396021 - DNA, 60 bp, Artificial
  Synthetic oligonucleotide
gacctgcatcgtaatttattcatggataatctgtccagatctgacaggtctctcatccta

SEQ ID NO: 396022 - DNA, 55 bp, Artificial
  Synthetic oligonucleotide
gacctgcatgagggtaagtacaccgtaggcccttggacagacaaactaaggcagc

SEQ ID NO: 396023 - DNA, 55 bp, Artificial
  Synthetic oligonucleotide
gacctgcgatacccagtccgaaattgaggatattggctgggctaaaacgcaggcg

SEQ ID NO: 396024 - DNA, 55 bp, Artificial
  Synthetic oligonucleotide
gacctgcggtccacccagggtgcatacagtgggactcctgttccgaaaccacgga

SEQ ID NO: 396025 - DNA, 55 bp, Artificial
  Synthetic oligonucleotide
gacctgctctctgacgaaaaccgcgtccatgacggtaagtgtgagatttcttatg

SEQ ID NO: 396026 - DNA, 54 bp, Artificial
  Synthetic oligonucleotide
gacctgctgatactcacaggggaccctaggcaatccgaacacttcgaatcggct

SEQ ID NO: 396027 - DNA, 55 bp, Artificial
  Synthetic oligonucleotide
gacctgcttatgggcacgctgaacattgtgtgtcctaactgtgcgggccgcgcat

SEQ ID NO: 396028 - DNA, 55 bp, Artificial
  Synthetic oligonucleotide
gacctgctttacatcgacgacacgccgggattatctctggctcaaatcatcagcg

SEQ ID NO: 396029 - DNA, 57 bp, Artificial
  Synthetic oligonucleotide
gacctggaacactacaagctaaattactgtctattgcccagttggcttttcacctcc

SEQ ID NO: 396030 - DNA, 52 bp, Artificial
  Synthetic oligonucleotide
gacctggaaggatcgacaccgttatctacaaggcgttataactgttggtcca

SEQ ID NO: 396031 - DNA, 60 bp, Artificial
  Synthetic oligonucleotide
gacctggaggtcgtcactagcacttgggtgctagtaggcggagtccttgcagctctggcc

SEQ ID NO: 396032 - DNA, 60 bp, Artificial
  Synthetic oligonucleotide
gacctggcacataacagcgtagagctggataaagtgcagatgatgattccgttcagtgag

SEQ ID NO: 396033 - DNA, 58 bp, Artificial
  Synthetic oligonucleotide
gacctggcccaaagtgtcttccctgtacgactctctccctctaccacaatactcatgg

SEQ ID NO: 396034 - DNA, 58 bp, Artificial
  Synthetic oligonucleotide
gacctggcccacattgtcttcccagttctactctctccctctattactatactgaccg

SEQ ID NO: 396035 - DNA, 60 bp, Artificial
  Synthetic oligonucleotide
gacctggcctgaaaagctctcgagtgtctttccaattgatgagtggggttatcactccta

SEQ ID NO: 396036 - DNA, 58 bp, Artificial
  Synthetic oligonucleotide
gacctgggcaatgcaattgggccttaattttatgggccgctattattgggctctgtta

SEQ ID NO: 396037 - DNA, 55 bp, Artificial
  Synthetic oligonucleotide
gacctgggtctcccgaactggggagagtatgtattactgagtgcagggaccctga

SEQ ID NO: 396038 - DNA, 59 bp, Artificial
  Synthetic oligonucleotide
gacctgggtgtacgcgtgtgcgagaaaatggctctgtacgacgtagttagcaagctccc

SEQ ID NO: 396039 - DNA, 59 bp, Artificial
  Synthetic oligonucleotide
gacctgggtgtgcgcgtatgcgagaagatggccctgtacgacgtggttagcaaactccc

SEQ ID NO: 396040 - DNA, 55 bp, Artificial
  Synthetic oligonucleotide
gacctggtgccaaagtcacacgtatctgcttggctctcatgggctacacccaagt

SEQ ID NO: 396041 - DNA, 56 bp, Artificial
  Synthetic oligonucleotide
gacctggttctaaacacgggggggggtctgctgataatgttagctaccagtatata

SEQ ID NO: 396042 - DNA, 60 bp, Artificial
  Synthetic oligonucleotide
gacctggttgcatcagtcagtgatgcacaacttgcaatctccagattggaaaactctgtc

SEQ ID NO: 396043 - DNA, 55 bp, Artificial
  Synthetic oligonucleotide
gacctgtacccagatgaattgaacttcgtttactcttttggtgagcactttaaga

SEQ ID NO: 396044 - DNA, 60 bp, Artificial
  Synthetic oligonucleotide
gacctgtactgacatagtgaacattgctttcgcactatcgacgaaagttagtactccaga

SEQ ID NO: 396045 - DNA, 56 bp, Artificial
  Synthetic oligonucleotide
gacctgtcattgagtcccaccaagacggtaaaattgtgaagccccttgttgaatcc

SEQ ID NO: 396046 - DNA, 51 bp, Artificial
  Synthetic oligonucleotide
gacctgtcgactttgtgcaagcggtgatgtctttaatggaagcgttatccc

SEQ ID NO: 396047 - DNA, 55 bp, Artificial
  Synthetic oligonucleotide
gacctgtcgagataagcgccctggcgagttagtcttgaacagtgacggagccagg

SEQ ID NO: 396048 - DNA, 55 bp, Artificial
  Synthetic oligonucleotide
gacctgtgggagtggatcatgcgccaagtgcgcatggttatctctagggtccggg

SEQ ID NO: 396049 - DNA, 55 bp, Artificial
  Synthetic oligonucleotide
gacctgttactggtaccctaccatgcagcaaataattggagtcagacaacacatg

SEQ ID NO: 396050 - DNA, 57 bp, Artificial
  Synthetic oligonucleotide
gacctgttcctctcctgcccgaagctcgagaaactgtatgcctccctcgtcgtcccc

SEQ ID NO: 396051 - DNA, 55 bp, Artificial
  Synthetic oligonucleotide
gacctgttctaaacaccaggtctctactcaagactggtctgggggttggaatttg

SEQ ID NO: 396052 - DNA, 60 bp, Artificial
  Synthetic oligonucleotide
gacctgttttagtggatggcaagtaccgaatggtgcgaaaccttcatcagagcatgtcta

SEQ ID NO: 396053 - DNA, 56 bp, Artificial
  Synthetic oligonucleotide
gaccttaaaccagtatccagctctaacggcagagattttcaacgtgtatagtttca

SEQ ID NO: 396054 - DNA, 59 bp, Artificial
  Synthetic oligonucleotide
gaccttaacgtttgagaggcctaccgaagcaaatgtcgcacttgcattgcaaccgacaa

SEQ ID NO: 396055 - DNA, 55 bp, Artificial
  Synthetic oligonucleotide
gaccttaatatcaactagaattgaggtgtcctccttcaaacgtacgttgatgatg

SEQ ID NO: 396056 - DNA, 50 bp, Artificial
  Synthetic oligonucleotide
gaccttacgccagcgaagcctcttaatgtgtcctttcaattgtcaccgga

SEQ ID NO: 396057 - DNA, 55 bp, Artificial
  Synthetic oligonucleotide
gaccttacggtcataccccagacactcgtgcctgggccggtaaagctccacgaca

SEQ ID NO: 396058 - DNA, 56 bp, Artificial
  Synthetic oligonucleotide
gaccttaggttctggtaatgacgaggcgacccgtcgtaccttagctatcgctaagc

SEQ ID NO: 396059 - DNA, 54 bp, Artificial
  Synthetic oligonucleotide
gaccttattgagtggatttcgcgctacaggcccggcgttacctccgaagtgcaa

SEQ ID NO: 396060 - DNA, 55 bp, Artificial
  Synthetic oligonucleotide
gaccttcaagacagtatacctgtcactcctaattcacctctaactccatcagatg

SEQ ID NO: 396061 - DNA, 60 bp, Artificial
  Synthetic oligonucleotide
gaccttcagcccatatgagaagcacaccttttcggtggctggacgcattagtggcctaaa

SEQ ID NO: 396062 - DNA, 51 bp, Artificial
  Synthetic oligonucleotide
gaccttcatccattccgcgtattcttgcgcggctactttcggatttagtcc

SEQ ID NO: 396063 - DNA, 57 bp, Artificial
  Synthetic oligonucleotide
gaccttcatcggttcgagtgatttttgacgagtgtttcttacaacacgctggttgcg

SEQ ID NO: 396064 - DNA, 60 bp, Artificial
  Synthetic oligonucleotide
gaccttccaccacgcgtgcctggcaaagcagtggaactcgacctactcggctggtcagcc

SEQ ID NO: 396065 - DNA, 60 bp, Artificial
  Synthetic oligonucleotide
gaccttccacgatagattggtgaccgagtacaaagcctcggtggatatgcctgcacttga

SEQ ID NO: 396066 - DNA, 60 bp, Artificial
  Synthetic oligonucleotide
gaccttccagcctgggcattcgccgcatttgcggacccactgcaaggtggaagtggtgaa

SEQ ID NO: 396067 - DNA, 58 bp, Artificial
  Synthetic oligonucleotide
gaccttcccataggaaatcctaaaactcaacatgaatatatacaaagtagatgcttcc

SEQ ID NO: 396068 - DNA, 49 bp, Artificial
  Synthetic oligonucleotide
gaccttccccattaacgcctacactacgggcccctgtaccccccttccc

SEQ ID NO: 396069 - DNA, 56 bp, Artificial
  Synthetic oligonucleotide
gaccttctactctaacaaaacgtaaaggatggtgcttagattgttgtcaacacacg

SEQ ID NO: 396070 - DNA, 60 bp, Artificial
  Synthetic oligonucleotide
gaccttctgatgtagttaatcctctcatgcaaagtggagataagcacgtgacactcagcg

SEQ ID NO: 396071 - DNA, 55 bp, Artificial
  Synthetic oligonucleotide
gaccttctgggtcatcgggaatagatcccactccgcccatccgtagagccaggcc

SEQ ID NO: 396072 - DNA, 55 bp, Artificial
  Synthetic oligonucleotide
gaccttgaaagactatacggccggaatcaaaacatgtctttggtatcaaaggaaa

SEQ ID NO: 396073 - DNA, 55 bp, Artificial
  Synthetic oligonucleotide
gaccttgaaggatccagttgcctttctaatcggcgttttaattgttggtccacat

SEQ ID NO: 396074 - DNA, 58 bp, Artificial
  Synthetic oligonucleotide
gaccttgaatggacttgattcgctcagggtcttctaaacctttgaagatgtactctgt

SEQ ID NO: 396075 - DNA, 59 bp, Artificial
  Synthetic oligonucleotide
gaccttgacctcttccagacactgacaaactgtacattttctaaagagtatgcctggaa

SEQ ID NO: 396076 - DNA, 59 bp, Artificial
  Synthetic oligonucleotide
gaccttgagaaatatgtcgaagacaccaaaatagatctgtggtcttacaatgcggaact

SEQ ID NO: 396077 - DNA, 55 bp, Artificial
  Synthetic oligonucleotide
gaccttgcaactactcctggtacatctgtagataggttttacacctttgacagct

SEQ ID NO: 396078 - DNA, 56 bp, Artificial
  Synthetic oligonucleotide
gaccttgcaagaacttctgtgctcttttgctagggttcacaagtatgaggatcatg

SEQ ID NO: 396079 - DNA, 52 bp, Artificial
  Synthetic oligonucleotide
gaccttgcagatcccaaatgtttgccgtacattcggacgcatgccaaccggt

SEQ ID NO: 396080 - DNA, 53 bp, Artificial
  Synthetic oligonucleotide
gaccttgcatccggtgccgttgtactccgcgtgtgttgaccgcgcatttgcta

SEQ ID NO: 396081 - DNA, 55 bp, Artificial
  Synthetic oligonucleotide
gaccttgcctaacgtccgcgtgtactatgttgagatgtcggatggacagcgtcgc

SEQ ID NO: 396082 - DNA, 58 bp, Artificial
  Synthetic oligonucleotide
gaccttgcttctgggttgaactaatcagagggagacccaaagagaacacaatctggac

SEQ ID NO: 396083 - DNA, 59 bp, Artificial
  Synthetic oligonucleotide
gaccttggataacaaatccgggctatcgtataaatccagacgcccgttgcagagcacag

SEQ ID NO: 396084 - DNA, 56 bp, Artificial
  Synthetic oligonucleotide
gaccttgggaagatttagtattgaatagggtccatgtaaatcccattgtataccca

SEQ ID NO: 396085 - DNA, 57 bp, Artificial
  Synthetic oligonucleotide
gaccttgtctacgagccggagggcaacccagccgccaactacacgcagccgcgttcg

SEQ ID NO: 396086 - DNA, 52 bp, Artificial
  Synthetic oligonucleotide
gaccttgtgacattgtcccggcatcaagtgtctgcggccctgtgtactgctt

SEQ ID NO: 396087 - DNA, 56 bp, Artificial
  Synthetic oligonucleotide
gaccttgttgcatttgacttcaagaagctacagctaacctggaagaaggggtaccc

SEQ ID NO: 396088 - DNA, 56 bp, Artificial
  Synthetic oligonucleotide
gaccttgttggtgatgacaatttggacagtgttaacactctaacaaaagaagggtg

SEQ ID NO: 396089 - DNA, 55 bp, Artificial
  Synthetic oligonucleotide
gacctttacaatccttcaccagaggataagcctatcatcgaatgcgatgcatcag

SEQ ID NO: 396090 - DNA, 51 bp, Artificial
  Synthetic oligonucleotide
gacctttacctccttctgagggttactcttacgtattggtagtagtggatt

SEQ ID NO: 396091 - DNA, 56 bp, Artificial
  Synthetic oligonucleotide
gacctttacctggtcacgaggcacgccgatgtcattcccgtacgccggcgaggcga

SEQ ID NO: 396092 - DNA, 52 bp, Artificial
  Synthetic oligonucleotide
gacctttcaaaagtgcattggaggtatacctgtataatattataaagacact

SEQ ID NO: 396093 - DNA, 55 bp, Artificial
  Synthetic oligonucleotide
gacctttcatctgtgaagatccagaaggcatggaagccacattagtaatacactc

SEQ ID NO: 396094 - DNA, 51 bp, Artificial
  Synthetic oligonucleotide
gacctttcggcctcaatggaacgttgttccctcgactgcatgtctccagag

SEQ ID NO: 396095 - DNA, 55 bp, Artificial
  Synthetic oligonucleotide
gacctttcgtctttctaaagggaattctaataatcaggtgcctgttcaggaagta

SEQ ID NO: 396096 - DNA, 57 bp, Artificial
  Synthetic oligonucleotide
gacctttggaagatccccaattatgggtcaagtattacggaggcaacacatctagcc

SEQ ID NO: 396097 - DNA, 57 bp, Artificial
  Synthetic oligonucleotide
gacctttggatggtgcttcaagctagtaccagtagacccagaggaggtagaaagggc

SEQ ID NO: 396098 - DNA, 57 bp, Artificial
  Synthetic oligonucleotide
gacctttggatggtgcttcaagctagtaccagttgacccaagggaagtagaagaggc

SEQ ID NO: 396099 - DNA, 55 bp, Artificial
  Synthetic oligonucleotide
gacctttgggtggcccttcaaactagaaccaatagatccagcagaggtagaggag

SEQ ID NO: 396100 - DNA, 55 bp, Artificial
  Synthetic oligonucleotide
gaccttttacaacatacaattgccctgtactagttgtgagcgacatatgcgacta

SEQ ID NO: 396101 - DNA, 55 bp, Artificial
  Synthetic oligonucleotide
gaccttttctcatctggatgaattatatttctcataatcctcttacacagcagtg

SEQ ID NO: 396102 - DNA, 51 bp, Artificial
  Synthetic oligonucleotide
gaccttttgatacatttaattgataagcagcagcagcgttgcgtaaagaac

SEQ ID NO: 396103 - DNA, 57 bp, Artificial
  Synthetic oligonucleotide
gacctttttgaagggtctctttcgtgaatcatgcggtgctttccaatttgacacatt

SEQ ID NO: 396104 - DNA, 58 bp, Artificial
  Synthetic oligonucleotide
gacgaaaactgaacatgaattgtatacagtagaccagttacgcgcagtagttaatagt

SEQ ID NO: 396105 - DNA, 55 bp, Artificial
  Synthetic oligonucleotide
gacgaaaatagcacgatgaaaccaagagaaatcgctgacagattgatggatatgg

SEQ ID NO: 396106 - DNA, 50 bp, Artificial
  Synthetic oligonucleotide
gacgaaacatttacaacaggaagatcaccatacagaccaccagacacaca

SEQ ID NO: 396107 - DNA, 55 bp, Artificial
  Synthetic oligonucleotide
gacgaaagaagagtccaaacaactgcttgaagtgttgaaaacgaaagaagagcac

SEQ ID NO: 396108 - DNA, 55 bp, Artificial
  Synthetic oligonucleotide
gacgaaagaaggaaggcggaagacaaatctatatgggttcattgtaaaggggaga

SEQ ID NO: 396109 - DNA, 55 bp, Artificial
  Synthetic oligonucleotide
gacgaaagacaatatttccccggacttgactcaattagatggaaccaaagcgccc

SEQ ID NO: 396110 - DNA, 55 bp, Artificial
  Synthetic oligonucleotide
gacgaaagagttttacgatgaggtagtaaatgaggtctttctaacgtataagtca

SEQ ID NO: 396111 - DNA, 60 bp, Artificial
  Synthetic oligonucleotide
gacgaaagtctgcgacatggagtgcagtatgcggagtacgacttctctggtgataccatc

SEQ ID NO: 396112 - DNA, 55 bp, Artificial
  Synthetic oligonucleotide
gacgaaagtgttcttggatttccgagacacccctacaaccctgtgcgacagtggc

SEQ ID NO: 396113 - DNA, 56 bp, Artificial
  Synthetic oligonucleotide
gacgaaataaattagggttccgtggcatttttgcaaatatgagccaggacaccagg

SEQ ID NO: 396114 - DNA, 54 bp, Artificial
  Synthetic oligonucleotide
gacgaaataacacctggccgttttaggacaattgtttgtggattattcccggca

SEQ ID NO: 396115 - DNA, 55 bp, Artificial
  Synthetic oligonucleotide
gacgaaatacacttctgcaacactatgaccgacgaaaaacaattttgggcgaaag

SEQ ID NO: 396116 - DNA, 56 bp, Artificial
  Synthetic oligonucleotide
gacgaaatacgtatcaggatacgtatgagtacatatgtttcatacattatggatgg

SEQ ID NO: 396117 - DNA, 55 bp, Artificial
  Synthetic oligonucleotide
gacgaaatagctagagagtcgcaacgaaatgggatagctccacaatctgaagcac

SEQ ID NO: 396118 - DNA, 60 bp, Artificial
  Synthetic oligonucleotide
gacgaaattacgagtgaacacacattgtacttcgtgtgccctagcaagatcacacagatt

SEQ ID NO: 396119 - DNA, 55 bp, Artificial
  Synthetic oligonucleotide
gacgaaattaggcccatagaaaagattcatgaagcaaagactagaattgtggacg

SEQ ID NO: 396120 - DNA, 55 bp, Artificial
  Synthetic oligonucleotide
gacgaaattttcggtgcaaggatccacagtcatggtaatctcagtgtaatccctg

SEQ ID NO: 396121 - DNA, 59 bp, Artificial
  Synthetic oligonucleotide
gacgaacaaataagattcgtggccgacaggtgggggtccaccatgtgaaggcatcttca

SEQ ID NO: 396122 - DNA, 55 bp, Artificial
  Synthetic oligonucleotide
gacgaacaatcaatcgctgaacaggtcattgtagcaatggtgttctcacaggagg

SEQ ID NO: 396123 - DNA, 57 bp, Artificial
  Synthetic oligonucleotide
gacgaacaatccttgtcggctcctcagaggactgggcccagttctaccgcccaactc

SEQ ID NO: 396124 - DNA, 59 bp, Artificial
  Synthetic oligonucleotide
gacgaacagatgtatcaaaagtgttgcaatctattcgagaaattcttccctagtagttc

SEQ ID NO: 396125 - DNA, 55 bp, Artificial
  Synthetic oligonucleotide
gacgaacatccactctggagacagatgttggaggaatccgcgctgaactgtccgc

SEQ ID NO: 396126 - DNA, 60 bp, Artificial
  Synthetic oligonucleotide
gacgaaccacactgatgaactgtgcccaagccccttgaagcttgtcgacgggcaagactg

SEQ ID NO: 396127 - DNA, 55 bp, Artificial
  Synthetic oligonucleotide
gacgaaccatatatgagggagccgtgaagtccttggaagggctaggggtccaacg

SEQ ID NO: 396128 - DNA, 55 bp, Artificial
  Synthetic oligonucleotide
gacgaaccccaccttcccatgactcaggccctttctcgagccctctggactcaca

SEQ ID NO: 396129 - DNA, 52 bp, Artificial
  Synthetic oligonucleotide
gacgaaccggtctcggaccctggtaaacaggtacctagcgtaatagaaggtc

SEQ ID NO: 396130 - DNA, 59 bp, Artificial
  Synthetic oligonucleotide
gacgaacggcaattgttacacgacacgatggtaagcgtcgacaacatcaatctaataag

SEQ ID NO: 396131 - DNA, 55 bp, Artificial
  Synthetic oligonucleotide
gacgaactctcgagacagtatgtgcgggtaacaatatatacgtactaacaggtaa

SEQ ID NO: 396132 - DNA, 57 bp, Artificial
  Synthetic oligonucleotide
gacgaactggtggtgtgactttcatcggtcaatcctttctaggtggaccctcaggcc

SEQ ID NO: 396133 - DNA, 52 bp, Artificial
  Synthetic oligonucleotide
gacgaactggtggtgtgactttcatcgtcaatcctttctagtggaccctcag

SEQ ID NO: 396134 - DNA, 58 bp, Artificial
  Synthetic oligonucleotide
gacgaagacaaagaagtgctggtctggaggtttgacagtagcctggcacgtaaacacc

SEQ ID NO: 396135 - DNA, 60 bp, Artificial
  Synthetic oligonucleotide
gacgaagacagagaagtactggtctggagatttaacagtagcctggcacgcacacacaga

SEQ ID NO: 396136 - DNA, 59 bp, Artificial
  Synthetic oligonucleotide
gacgaagacaggttgcacggagaatgcattgcagggttattatgtgtgttttttaggga

SEQ ID NO: 396137 - DNA, 55 bp, Artificial
  Synthetic oligonucleotide
gacgaagacatgtacgcgtgcatctgctgcggggcgccgttcgaacacgttgacc

SEQ ID NO: 396138 - DNA, 60 bp, Artificial
  Synthetic oligonucleotide
gacgaagataataagagttgacggagatgacaattacgcagtattgcagttcaatacaga

SEQ ID NO: 396139 - DNA, 60 bp, Artificial
  Synthetic oligonucleotide
gacgaagatagagaagtgctggtctggagatttgacagtcgcctggcattcagacacgta

SEQ ID NO: 396140 - DNA, 55 bp, Artificial
  Synthetic oligonucleotide
gacgaagatgccagtaaatactgaagcgaacagacaagagtggcttttagaagga

SEQ ID NO: 396141 - DNA, 55 bp, Artificial
  Synthetic oligonucleotide
gacgaagcacacggttaaggggaagtgccaaatgttcgacttgtacctcaagttg

SEQ ID NO: 396142 - DNA, 59 bp, Artificial
  Synthetic oligonucleotide
gacgaagcattaaacaaccggttccagatcaaaggtgttgagctgaagtcaggatacaa

SEQ ID NO: 396143 - DNA, 55 bp, Artificial
  Synthetic oligonucleotide
gacgaagctggttcaatcggaactaacgatgatccaaaactctatcctatccgct

SEQ ID NO: 396144 - DNA, 60 bp, Artificial
  Synthetic oligonucleotide
gacgaaggccgctgagtatctagccaagcgcctggccaatgagattagaccaggtgggaa

SEQ ID NO: 396145 - DNA, 55 bp, Artificial
  Synthetic oligonucleotide
gacgaaggccgtggtctggaggtacgcttaccgccccctactgacagtagcgtcc

SEQ ID NO: 396146 - DNA, 59 bp, Artificial
  Synthetic oligonucleotide
gacgaagggaggcactatttaggattgtcgcatcaactgtcaataaatacggagttcca

SEQ ID NO: 396147 - DNA, 57 bp, Artificial
  Synthetic oligonucleotide
gacgaaggtctcacaagaagaatcgacgggaacgaggtcacaaaagtcccagcgaga

SEQ ID NO: 396148 - DNA, 59 bp, Artificial
  Synthetic oligonucleotide
gacgaagtaagaaactgttcttttaatatgaccacagaactaagagataagcagcagaa

SEQ ID NO: 396149 - DNA, 60 bp, Artificial
  Synthetic oligonucleotide
gacgaagtatacatacaaagagcgttcatgtctttatctagtcagaagtcaggaatagct

SEQ ID NO: 396150 - DNA, 60 bp, Artificial
  Synthetic oligonucleotide
gacgaagtatgcatcagttgaggtaaggccatatagtgacttttatataatttcaagatc

SEQ ID NO: 396151 - DNA, 51 bp, Artificial
  Synthetic oligonucleotide
gacgaagtatttgaggctggaactgatggcttgttttacgcatataaagtt

SEQ ID NO: 396152 - DNA, 53 bp, Artificial
  Synthetic oligonucleotide
gacgaagtctttgcgaaagcgaataaggggggagccacgccgaaattaatatt

SEQ ID NO: 396153 - DNA, 55 bp, Artificial
  Synthetic oligonucleotide
gacgaagtgcactggtttgattctctgaaagaggcgtgcgggagagcatggcgga

SEQ ID NO: 396154 - DNA, 55 bp, Artificial
  Synthetic oligonucleotide
gacgaagttagacttttaatgcgtactggtaaactaagaattgatggtggctacg

SEQ ID NO: 396155 - DNA, 55 bp, Artificial
  Synthetic oligonucleotide
gacgaatacaaagcagccagaaactggtggacaaaatctaactccttactaccac

SEQ ID NO: 396156 - DNA, 55 bp, Artificial
  Synthetic oligonucleotide
gacgaatatcgcgaaaaggaaataaaagcgagaaattccgatgagactctatccg

SEQ ID NO: 396157 - DNA, 55 bp, Artificial
  Synthetic oligonucleotide
gacgaatatttccttacacaacgtaagacatttggcgagttcatccgaatgcacg

SEQ ID NO: 396158 - DNA, 57 bp, Artificial
  Synthetic oligonucleotide
gacgaatccaagttttaaccagaagcttacgattaacgccattccagcaaggatgag

SEQ ID NO: 396159 - DNA, 55 bp, Artificial
  Synthetic oligonucleotide
gacgaatccttatcgctctttgtgctcgctccatccgtgaagcttcgcaaccggt

SEQ ID NO: 396160 - DNA, 60 bp, Artificial
  Synthetic oligonucleotide
gacgaatgccatgttacggacagtgcaactatagctttcaattgtgcacttaaggagtat

SEQ ID NO: 396161 - DNA, 58 bp, Artificial
  Synthetic oligonucleotide
gacgaatgcgaggattgatcaaaacgcgcgcagtgagtccgaggaattgattgttgaa

SEQ ID NO: 396162 - DNA, 59 bp, Artificial
  Synthetic oligonucleotide
gacgaatgtgacattccatcggggaaacgtgtttcacactggatgaatcgtcttaccaa

SEQ ID NO: 396163 - DNA, 55 bp, Artificial
  Synthetic oligonucleotide
gacgaattacagatgcatatactacgtgggccgctccattttcagaggcgagcaa

SEQ ID NO: 396164 - DNA, 51 bp, Artificial
  Synthetic oligonucleotide
gacgaattactaacacgttgttattacatacgaccactgaatcagccgtgc

SEQ ID NO: 396165 - DNA, 55 bp, Artificial
  Synthetic oligonucleotide
gacgaattgcgtctcatttatttctataactgcaatacgtttgaccaaagcagga

SEQ ID NO: 396166 - DNA, 54 bp, Artificial
  Synthetic oligonucleotide
gacgaattggttagtagagtagaatcgcttgtaaccaacgacttaaaccgaggc

SEQ ID NO: 396167 - DNA, 54 bp, Artificial
  Synthetic oligonucleotide
gacgaattgtgaagtgataataacgaaaaacgggagagtgaaacataaagaggt

SEQ ID NO: 396168 - DNA, 53 bp, Artificial
  Synthetic oligonucleotide
gacgaatttaagaatagggtgttatcgtcactaaacgggaatatagtgttctt

SEQ ID NO: 396169 - DNA, 60 bp, Artificial
  Synthetic oligonucleotide
gacgaatttcgatcacagtcagtgctacgacaccaagacgcatgaggactcgaaagaggg

SEQ ID NO: 396170 - DNA, 57 bp, Artificial
  Synthetic oligonucleotide
gacgacaaagttccgtagcttgcgacgagctgtttgtgttaggggcacaaatgaagt

SEQ ID NO: 396171 - DNA, 53 bp, Artificial
  Synthetic oligonucleotide
gacgacaaatgttacggttaatcccggaccctttgcgcagacggggtacgcac

SEQ ID NO: 396172 - DNA, 55 bp, Artificial
  Synthetic oligonucleotide
gacgacaactcgaaagttgtcgaagtaaccgagattatagaggaagacggtaaga

SEQ ID NO: 396173 - DNA, 56 bp, Artificial
  Synthetic oligonucleotide
gacgacaaggggcagacatattttacgacatcgggagtgtttgtggggagactttc

SEQ ID NO: 396174 - DNA, 59 bp, Artificial
  Synthetic oligonucleotide
gacgacaattggagtaacgggccctgattccaaagcagtggcagtggtgcattatgggg

SEQ ID NO: 396175 - DNA, 59 bp, Artificial
  Synthetic oligonucleotide
gacgacaccacgccctctcaaattaccagatgggcctccttgctctcaacgatcgaaat

SEQ ID NO: 396176 - DNA, 58 bp, Artificial
  Synthetic oligonucleotide
gacgacacttgtatggatacgactaagcgattcgaacttggacgtaaaccgctgtcac

SEQ ID NO: 396177 - DNA, 57 bp, Artificial
  Synthetic oligonucleotide
gacgacagaaagtcgtccaagcatgcctccgataaactcaggaaaaccgagtgttac

SEQ ID NO: 396178 - DNA, 60 bp, Artificial
  Synthetic oligonucleotide
gacgacagaggcagtgaagtacttgagtattgacttcacgaccactctccctcagttgat

SEQ ID NO: 396179 - DNA, 55 bp, Artificial
  Synthetic oligonucleotide
gacgacatcgtggttgcaagtgattacgacctggactttgaggctctcaagcccc

SEQ ID NO: 396180 - DNA, 59 bp, Artificial
  Synthetic oligonucleotide
gacgacattgaatatctcacattgaggcattttgggagagccataccatcgttatggaa

SEQ ID NO: 396181 - DNA, 55 bp, Artificial
  Synthetic oligonucleotide
gacgaccaacctcttacagatgaaccctaaaatggagagtgtttgcctaccggac

SEQ ID NO: 396182 - DNA, 55 bp, Artificial
  Synthetic oligonucleotide
gacgaccatccgtcgctctacatcatgctaaaagaacccgaattaagggcagaga

SEQ ID NO: 396183 - DNA, 55 bp, Artificial
  Synthetic oligonucleotide
gacgaccattacaaactgtgaagatggttgatgactccatgatgaaggcccaacg

SEQ ID NO: 396184 - DNA, 55 bp, Artificial
  Synthetic oligonucleotide
gacgacccagcatccagggaattagtagtcggctatgttgatgttaatatgggcc

SEQ ID NO: 396185 - DNA, 53 bp, Artificial
  Synthetic oligonucleotide
gacgacccatctcggggccgtttgggactctaccgtccccttcttcacctgcc

SEQ ID NO: 396186 - DNA, 52 bp, Artificial
  Synthetic oligonucleotide
gacgacccctcccggggccgcttgggcctgtaccgcccgcttctccgcctgt

SEQ ID NO: 396187 - DNA, 56 bp, Artificial
  Synthetic oligonucleotide
gacgacccctctcggggccgactggggctctaccgtccgcttctccgtctgctgta

SEQ ID NO: 396188 - DNA, 54 bp, Artificial
  Synthetic oligonucleotide
gacgaccctctactacccttgaaccaggtcctcctgtacgtcccgcaggggctg

SEQ ID NO: 396189 - DNA, 55 bp, Artificial
  Synthetic oligonucleotide
gacgaccgaaacacctttatgtgtctatgcctactgctcagtccactatgaaagc

SEQ ID NO: 396190 - DNA, 55 bp, Artificial
  Synthetic oligonucleotide
gacgaccgaggaggactcgacgttattctcagaaaccccgctcgacgtagaattc

SEQ ID NO: 396191 - DNA, 58 bp, Artificial
  Synthetic oligonucleotide
gacgacctagtcgttatcgctgagagcggaggcgtagaggaggacaaacgagctctcg

SEQ ID NO: 396192 - DNA, 55 bp, Artificial
  Synthetic oligonucleotide
gacgaccttggcagaccttggacacaaagtgtacacctattcaggctgccagggg

SEQ ID NO: 396193 - DNA, 55 bp, Artificial
  Synthetic oligonucleotide
gacgacgaaacttttactgctttgcatactttagcaagtagaacgaattccgttg

SEQ ID NO: 396194 - DNA, 55 bp, Artificial
  Synthetic oligonucleotide
gacgacgaaggatcttggatcctgtacgccccacctatcccaaaggacagcttgt

SEQ ID NO: 396195 - DNA, 51 bp, Artificial
  Synthetic oligonucleotide
gacgacgactctggaacctaacacccaccgactctagcaattccagtgact

SEQ ID NO: 396196 - DNA, 55 bp, Artificial
  Synthetic oligonucleotide
gacgacgcatggcaatacgttcagaactcctatttctttgaacttcctgacgctt

SEQ ID NO: 396197 - DNA, 60 bp, Artificial
  Synthetic oligonucleotide
gacgacgccctatttagaaggagatgtgctatcgagtgattcaggtccgttgttatcagt

SEQ ID NO: 396198 - DNA, 60 bp, Artificial
  Synthetic oligonucleotide
gacgacggaagacaaatctgtatggtttcatcataaagggacggtctcatctgaggaatg

SEQ ID NO: 396199 - DNA, 58 bp, Artificial
  Synthetic oligonucleotide
gacgacggtatgggagggactagtgatatgcgttctcggtctctgttaacaccacgga

SEQ ID NO: 396200 - DNA, 56 bp, Artificial
  Synthetic oligonucleotide
gacgacgtacccttaatcttatacccatccggcaccagatggcttacgtcgcgacc

SEQ ID NO: 396201 - DNA, 55 bp, Artificial
  Synthetic oligonucleotide
gacgactcaggtcatcaaaccccacaaatttgcgctccactacacctcaagacgc

SEQ ID NO: 396202 - DNA, 60 bp, Artificial
  Synthetic oligonucleotide
gacgactcgatgcatttataattggaactcacctgtgcaaccaaatggcctgcgtatatt

SEQ ID NO: 396203 - DNA, 54 bp, Artificial
  Synthetic oligonucleotide
gacgactctttcgaacagacgttttagttgttggtcatcgtttaaggacgttga

SEQ ID NO: 396204 - DNA, 60 bp, Artificial
  Synthetic oligonucleotide
gacgactgacgacgaagtatacatacaaagagcgttcatgtctttatcgagtcagaggtc

SEQ ID NO: 396205 - DNA, 60 bp, Artificial
  Synthetic oligonucleotide
gacgactgaggatggcagggccgttacgcatggtaatcccatgcaggaatttcctcatgg

SEQ ID NO: 396206 - DNA, 60 bp, Artificial
  Synthetic oligonucleotide
gacgactgatcacggcatccagcgcagtagttaatccagccacagtggcgcagaatgagc

SEQ ID NO: 396207 - DNA, 60 bp, Artificial
  Synthetic oligonucleotide
gacgactgccatgcgagcgtggtatgttgcaaacttgtacagattatgtggatacgactt

SEQ ID NO: 396208 - DNA, 55 bp, Artificial
  Synthetic oligonucleotide
gacgactgcgataagaagctaatcgtcgcgacaccccaagagcgctctgttccac

SEQ ID NO: 396209 - DNA, 55 bp, Artificial
  Synthetic oligonucleotide
gacgactggttttatatactattcagaggggtcaggtaagaacgtgtgttctaag

SEQ ID NO: 396210 - DNA, 58 bp, Artificial
  Synthetic oligonucleotide
gacgacttagtcgttatctgtgaaagtgcgggggttcaggaggacgcggcgagcctga

SEQ ID NO: 396211 - DNA, 57 bp, Artificial
  Synthetic oligonucleotide
gacgacttcgaacgaggccctctctgcagtcgacccttccgaatttgtcgaactcag

SEQ ID NO: 396212 - DNA, 52 bp, Artificial
  Synthetic oligonucleotide
gacgacttcgatgtagctgctagggctgctgaggcaaaccctattgtggacc

SEQ ID NO: 396213 - DNA, 55 bp, Artificial
  Synthetic oligonucleotide
gacgacttgaatgcggaacaactggttcaacacggactttgcgacccgataaggg

SEQ ID NO: 396214 - DNA, 56 bp, Artificial
  Synthetic oligonucleotide
gacgacttgcggaaacacggttacccaccgcatgtacaagcgaccgaagaagactg

SEQ ID NO: 396215 - DNA, 52 bp, Artificial
  Synthetic oligonucleotide
gacgacttggccgacgttgccgttaactgggttaccgagggtgttaactcag

SEQ ID NO: 396216 - DNA, 55 bp, Artificial
  Synthetic oligonucleotide
gacgagaaagattcctcaaatcaatcagaactactccccgtttaaggatggtgtg

SEQ ID NO: 396217 - DNA, 56 bp, Artificial
  Synthetic oligonucleotide
gacgagaacatgaggtacaagaaggatacgaatctcgttatgtttttccttgttcg

SEQ ID NO: 396218 - DNA, 55 bp, Artificial
  Synthetic oligonucleotide
gacgagaaggtgataatactggactcttttgagccacgtgtggctgaaccagatg

SEQ ID NO: 396219 - DNA, 60 bp, Artificial
  Synthetic oligonucleotide
gacgagaatatcaagttgaagaatcacacgaacagtgtgatgttttggttagtcagagat

SEQ ID NO: 396220 - DNA, 55 bp, Artificial
  Synthetic oligonucleotide
gacgagacacaagggcactttccgctatgagcattgtggtgtgttaaacggcgat

SEQ ID NO: 396221 - DNA, 55 bp, Artificial
  Synthetic oligonucleotide
gacgagagaacgagagcggatctcttttacttgacaaatatccggaatgctgcgt

SEQ ID NO: 396222 - DNA, 60 bp, Artificial
  Synthetic oligonucleotide
gacgagagggcagagctgtgtccagtcgtacaagaaacagcggagacgcgtgacacagct

SEQ ID NO: 396223 - DNA, 55 bp, Artificial
  Synthetic oligonucleotide
gacgagagtcaccccgacccttccctcatacaaatagacgttcaagcccgcgctt

SEQ ID NO: 396224 - DNA, 55 bp, Artificial
  Synthetic oligonucleotide
gacgagataaacgccatcttggatgaaaatgaagtggatctcacagtggttgtcc

SEQ ID NO: 396225 - DNA, 59 bp, Artificial
  Synthetic oligonucleotide
gacgagatactcggctccccccggagacgccccgcagccagcatatgacctggaactaa

SEQ ID NO: 396226 - DNA, 55 bp, Artificial
  Synthetic oligonucleotide
gacgagcaaaaggtgatgttggtcgagtattatgcgcttttgcgagagatttgcg

SEQ ID NO: 396227 - DNA, 52 bp, Artificial
  Synthetic oligonucleotide
gacgagcagctctctttttagagagggggagttaggacatttttgtcttaac

SEQ ID NO: 396228 - DNA, 60 bp, Artificial
  Synthetic oligonucleotide
gacgagcaggtgaagctctacaagaaccccgacagtctctcgtcggtcacaacggatgaa

SEQ ID NO: 396229 - DNA, 55 bp, Artificial
  Synthetic oligonucleotide
gacgagcatcgaccttctcacgaagcagggtcttctttccacttccgggcttggc

SEQ ID NO: 396230 - DNA, 59 bp, Artificial
  Synthetic oligonucleotide
gacgagcatggggagacactagtttggcggtttgaccccatgctggcctatagttacaa

SEQ ID NO: 396231 - DNA, 60 bp, Artificial
  Synthetic oligonucleotide
gacgagcctatgtatgacaccctatgcgctattcgaactaagcgaaaccacttatgcttc

SEQ ID NO: 396232 - DNA, 55 bp, Artificial
  Synthetic oligonucleotide
gacgagcgcatccatctggaccctaagacagggtgattacccgaagggttctatg

SEQ ID NO: 396233 - DNA, 55 bp, Artificial
  Synthetic oligonucleotide
gacgagcggggcgaatcaataattgtagaatccggtgacccaaatgcactactga

SEQ ID NO: 396234 - DNA, 58 bp, Artificial
  Synthetic oligonucleotide
gacgagcgtgtcgagtctcaggctaacgctcacgtgacgtctttcgggtcccggctat

SEQ ID NO: 396235 - DNA, 57 bp, Artificial
  Synthetic oligonucleotide
gacgagctcagtaatacttcattttggacccggccacgataaccaactttgtgtctg

SEQ ID NO: 396236 - DNA, 55 bp, Artificial
  Synthetic oligonucleotide
gacgaggagggtcaaggtctagctcctaccgtggcatctctcctggcgatgtggg

SEQ ID NO: 396237 - DNA, 52 bp, Artificial
  Synthetic oligonucleotide
gacgaggaggtcattcgagataaagaagttgtgggaacaaacccgttcaaaa

SEQ ID NO: 396238 - DNA, 55 bp, Artificial
  Synthetic oligonucleotide
gacgaggagtccttctctgatgcacaagagcattcgtttcatagaaatttcgagg

SEQ ID NO: 396239 - DNA, 55 bp, Artificial
  Synthetic oligonucleotide
gacgaggataaatgaatgtcagccatgcactatgactgcttgaacccttggtggt

SEQ ID NO: 396240 - DNA, 53 bp, Artificial
  Synthetic oligonucleotide
gacgaggcactcttctgggagacaattgaggccaggcttagaatcacaacctc

SEQ ID NO: 396241 - DNA, 55 bp, Artificial
  Synthetic oligonucleotide
gacgaggcagcctttattagtgcgtggcaggacgcatggttagctattcaaccag

SEQ ID NO: 396242 - DNA, 60 bp, Artificial
  Synthetic oligonucleotide
gacgaggccgctcggtctcatgatctcgcctatcagtcctatctcgatgctggtgtaaac

SEQ ID NO: 396243 - DNA, 55 bp, Artificial
  Synthetic oligonucleotide
gacgaggctatgtagttctgaccggcccaggaccctgtctcttcggagacgggag

SEQ ID NO: 396244 - DNA, 55 bp, Artificial
  Synthetic oligonucleotide
gacgagggacatgcagtaggaatgctggtgtcagtgctccattcgggtggacggg

SEQ ID NO: 396245 - DNA, 55 bp, Artificial
  Synthetic oligonucleotide
gacgagggagagcaatttatgcaacagatagaataataggagatataagacaagc

SEQ ID NO: 396246 - DNA, 60 bp, Artificial
  Synthetic oligonucleotide
gacgaggtgtcaggaggagcaaactttttgtcaagacttatagcagccatcttagaattg

SEQ ID NO: 396247 - DNA, 54 bp, Artificial
  Synthetic oligonucleotide
gacgaggttaagttccctccgtacacacctggtagcccacctccttctgtcctc

SEQ ID NO: 396248 - DNA, 52 bp, Artificial
  Synthetic oligonucleotide
gacgaggttcttatcgaccgctttgtcatgagtaccaccggcgagtgctatc

SEQ ID NO: 396249 - DNA, 55 bp, Artificial
  Synthetic oligonucleotide
gacgagtacagtaggttggaattcgggacattgactgtgtgtgatgtgaggtcca

SEQ ID NO: 396250 - DNA, 57 bp, Artificial
  Synthetic oligonucleotide
gacgagtactatcgaacctgagagagagcacatctgctagatcacaaatagattacc

SEQ ID NO: 396251 - DNA, 53 bp, Artificial
  Synthetic oligonucleotide
gacgagtaggaggtaatgctataactccatttgctgacgcgtgggacgcgaac

SEQ ID NO: 396252 - DNA, 60 bp, Artificial
  Synthetic oligonucleotide
gacgagtatttgcgagagtactcaggcattcgctggttgcacactttcaaggagtataga

SEQ ID NO: 396253 - DNA, 57 bp, Artificial
  Synthetic oligonucleotide
gacgagtcaatataatttgaacaacttgtagcgctaagttgttgggttgtctataaa

SEQ ID NO: 396254 - DNA, 58 bp, Artificial
  Synthetic oligonucleotide
gacgagtcaccaaggtctctactctcccccctgcccagtgaactagggtgaagatggc

SEQ ID NO: 396255 - DNA, 52 bp, Artificial
  Synthetic oligonucleotide
gacgagtcacccaatataactgcatttcggtgtcccataaatggaactgttc

SEQ ID NO: 396256 - DNA, 51 bp, Artificial
  Synthetic oligonucleotide
gacgagtcgcccgcgacggacttactgatactcaaggcgggtgtcaacgct

SEQ ID NO: 396257 - DNA, 54 bp, Artificial
  Synthetic oligonucleotide
gacgagtctgacaaccggcaacccatatcaacggtagaaccggttgttcgaccc

SEQ ID NO: 396258 - DNA, 53 bp, Artificial
  Synthetic oligonucleotide
gacgagtgaggcttatcccggggaattcgacttatcgtccccacatagcagag

SEQ ID NO: 396259 - DNA, 57 bp, Artificial
  Synthetic oligonucleotide
gacgagtgccttacgtgggcgctgagtcagcccgtcaacccgacgggcatttggggc

SEQ ID NO: 396260 - DNA, 60 bp, Artificial
  Synthetic oligonucleotide
gacgagttacttcattagagaatcgagatttgcctagattgttttacctcgctgataaga

SEQ ID NO: 396261 - DNA, 55 bp, Artificial
  Synthetic oligonucleotide
gacgagttcagctaactctccgagggtaggatcatctccatgtttacccacccac

SEQ ID NO: 396262 - DNA, 53 bp, Artificial
  Synthetic oligonucleotide
gacgagttctgaacgagattcggaccacgctgttgggtgaattcacgaagatg

SEQ ID NO: 396263 - DNA, 60 bp, Artificial
  Synthetic oligonucleotide
gacgagtttgacgttgacacacagggcaaatttgtggagaccatgatcggcatagtcaac

SEQ ID NO: 396264 - DNA, 52 bp, Artificial
  Synthetic oligonucleotide
gacgagttttacaggcagatgcaatactatcgttagctgcgatggttacgtt

SEQ ID NO: 396265 - DNA, 57 bp, Artificial
  Synthetic oligonucleotide
gacgataatgaacgcgcttctttttggagtgaaaatctcgtaggagcctgtgggcgg

SEQ ID NO: 396266 - DNA, 50 bp, Artificial
  Synthetic oligonucleotide
gacgatacagattggttcgctggtaatgagtgggcggaaggggcgttttg

SEQ ID NO: 396267 - DNA, 60 bp, Artificial
  Synthetic oligonucleotide
gacgatacgacaactacgaggtcatgggttcattttcataagtacacacaagagtgtgca

SEQ ID NO: 396268 - DNA, 55 bp, Artificial
  Synthetic oligonucleotide
gacgatagagacaaagcactagccgatgttaagacgaaaatatcggtatactgca

SEQ ID NO: 396269 - DNA, 59 bp, Artificial
  Synthetic oligonucleotide
gacgatatggctaacggaagatacactccaggcataattccacctgtgaacgctgataa

SEQ ID NO: 396270 - DNA, 59 bp, Artificial
  Synthetic oligonucleotide
gacgatcattcgtagccaagggttcagtaagaaggattcggttattgtctgagtcaatc

SEQ ID NO: 396271 - DNA, 55 bp, Artificial
  Synthetic oligonucleotide
gacgatcctattatgcatttggttgattccaaaacaccaatcaagcggggttcgc

SEQ ID NO: 396272 - DNA, 55 bp, Artificial
  Synthetic oligonucleotide
gacgatcctgatgtgactctcaataatgttcaggatattgatgtaccaactgttg

SEQ ID NO: 396273 - DNA, 55 bp, Artificial
  Synthetic oligonucleotide
gacgatcctgctgctagggacctagtggttaactatgtcaatactcacatgggcc

SEQ ID NO: 396274 - DNA, 60 bp, Artificial
  Synthetic oligonucleotide
gacgatcgaggctttgtctgacatatggacgtgcggccacaagcgattctcatgcatgta

SEQ ID NO: 396275 - DNA, 60 bp, Artificial
  Synthetic oligonucleotide
gacgatctactcgattaatttatcagtgctagtaccgcagctcattgttaccctacctct

SEQ ID NO: 396276 - DNA, 50 bp, Artificial
  Synthetic oligonucleotide
gacgatctgtttgggtgcaatctgtacagcaatgggagccttgatatctc

SEQ ID NO: 396277 - DNA, 60 bp, Artificial
  Synthetic oligonucleotide
gacgatcttaactccgtcgatcctcacttccttgtagtctcggatatcttcgacgtgcga

SEQ ID NO: 396278 - DNA, 58 bp, Artificial
  Synthetic oligonucleotide
gacgatcttggacataggcagcgcaccggctcgtagaatgttttccgagcaccagtat

SEQ ID NO: 396279 - DNA, 55 bp, Artificial
  Synthetic oligonucleotide
gacgatgaagaatacaaacaactctggacacgtacaaggggacaatataaagaca

SEQ ID NO: 396280 - DNA, 60 bp, Artificial
  Synthetic oligonucleotide
gacgatgaccataagtgtgagtcaaatttgagtgtcgctaagtgtggagaggttgccggt

SEQ ID NO: 396281 - DNA, 60 bp, Artificial
  Synthetic oligonucleotide
gacgatgatctaacatccatggctagtaaggagagtactgcaagcgtaaatttagcaccc

SEQ ID NO: 396282 - DNA, 55 bp, Artificial
  Synthetic oligonucleotide
gacgatgattttgaatgcctgcgtagtacgcccttacagcaaatctatgagggcg

SEQ ID NO: 396283 - DNA, 55 bp, Artificial
  Synthetic oligonucleotide
gacgatgcacaaaaggactccatctatgcttctgctctagtggaggcaaccaagt

SEQ ID NO: 396284 - DNA, 55 bp, Artificial
  Synthetic oligonucleotide
gacgatgccgttgtgtgctataatagtaattacgcggcacagggtctagtagcta

SEQ ID NO: 396285 - DNA, 60 bp, Artificial
  Synthetic oligonucleotide
gacgatgctccctcaaagcttagataacgctcccgcacactataagtactttgcgcacta

SEQ ID NO: 396286 - DNA, 58 bp, Artificial
  Synthetic oligonucleotide
gacgatgctgtctcatagcttagataacgctccttcggctataagtacttgcgcgcta

SEQ ID NO: 396287 - DNA, 53 bp, Artificial
  Synthetic oligonucleotide
gacgatgctttgggagtcgtctgccgtgttctcctcgacgttacggcggagct

SEQ ID NO: 396288 - DNA, 59 bp, Artificial
  Synthetic oligonucleotide
gacgatggggaacagacacgatgtgtttcacggtaaagtcagactgcgactgaaacgat

SEQ ID NO: 396289 - DNA, 58 bp, Artificial
  Synthetic oligonucleotide
gacgatggtaatggaactaattcggatgataaagcgaggcattaatgaccggaacttc

SEQ ID NO: 396290 - DNA, 55 bp, Artificial
  Synthetic oligonucleotide
gacgatggtatttctggtacagcttggttagaacgtcatgcgatgcaactaatat

SEQ ID NO: 396291 - DNA, 60 bp, Artificial
  Synthetic oligonucleotide
gacgatgtacataaagttcatattgtagataattttggcacgatgactgcgtatagaatc

SEQ ID NO: 396292 - DNA, 55 bp, Artificial
  Synthetic oligonucleotide
gacgatgtatgttgactctatacaggcggccttaaaagctctggagaagtgggag

SEQ ID NO: 396293 - DNA, 59 bp, Artificial
  Synthetic oligonucleotide
gacgatgtgccaccaaaaggagcctcctatggaggcaacctcactaacctcaccttcac

SEQ ID NO: 396294 - DNA, 56 bp, Artificial
  Synthetic oligonucleotide
gacgattaacaacgttaagtcgtttatgagctcgaacaactgggtcttgttcatta

SEQ ID NO: 396295 - DNA, 50 bp, Artificial
  Synthetic oligonucleotide
gacgattcccaaagtttcaactggacaggaaatgggcgcacacggtgacg

SEQ ID NO: 396296 - DNA, 56 bp, Artificial
  Synthetic oligonucleotide
gacgattccgacctctatttgcgacacgcagggcggtgtgtacccctgggagggta

SEQ ID NO: 396297 - DNA, 58 bp, Artificial
  Synthetic oligonucleotide
gacgattctcccatacaccttaacaggcttttaatagctgttgtgcctgccgtaggaa

SEQ ID NO: 396298 - DNA, 55 bp, Artificial
  Synthetic oligonucleotide
gacgattgatttctcttcccgatgatactccatgatgtactactggatgctgttc

SEQ ID NO: 396299 - DNA, 55 bp, Artificial
  Synthetic oligonucleotide
gacgattggcaagtacgccaagtcagagtttgacaaatgacaactcactcaccat

SEQ ID NO: 396300 - DNA, 55 bp, Artificial
  Synthetic oligonucleotide
gacgatttcaccttgacaagcccgtacttaggccactgtccgtattgcctccacg

SEQ ID NO: 396301 - DNA, 55 bp, Artificial
  Synthetic oligonucleotide
gacgatttgggctcgattaggccgtacgtttgtagcgatggcactttggacattg

SEQ ID NO: 396302 - DNA, 60 bp, Artificial
  Synthetic oligonucleotide
gacgatttgtcaagtgttatacagagtacaataacaaatgctgtgtcacaatcagtaggt

SEQ ID NO: 396303 - DNA, 60 bp, Artificial
  Synthetic oligonucleotide
gacgattttgaggcttggttaacgccccttctctctgcactcgctgatcagttactcaga

SEQ ID NO: 396304 - DNA, 55 bp, Artificial
  Synthetic oligonucleotide
gacgcaaaccaaacaaagatgttcccgctagtatcaatcatgttaacgatagtgg

SEQ ID NO: 396305 - DNA, 55 bp, Artificial
  Synthetic oligonucleotide
gacgcaaacctcactgtggtggttgatgggagagacccacaggactaccgcgggg

SEQ ID NO: 396306 - DNA, 56 bp, Artificial
  Synthetic oligonucleotide
gacgcaaacgggcaagccctacggacttatatagatcatgcttacaagggggggat

SEQ ID NO: 396307 - DNA, 55 bp, Artificial
  Synthetic oligonucleotide
gacgcaaactgatactttaagctttgatgacatctctgcagctgtattgaagacg

SEQ ID NO: 396308 - DNA, 59 bp, Artificial
  Synthetic oligonucleotide
gacgcaacaagacagacaacccggtcacgaagctcccagcgcgtggaccggtgaagcaa

SEQ ID NO: 396309 - DNA, 55 bp, Artificial
  Synthetic oligonucleotide
gacgcaacaatggcgtactaagggttcagtcgagacatggtgaatacgttcttcc

SEQ ID NO: 396310 - DNA, 60 bp, Artificial
  Synthetic oligonucleotide
gacgcaacaatgtcagcactaccaaactaccccacaatgatgtccacagacttatatgaa

SEQ ID NO: 396311 - DNA, 52 bp, Artificial
  Synthetic oligonucleotide
gacgcaagaggggcaatgcgcgacgtggcactttagcttagaaacctgtact

SEQ ID NO: 396312 - DNA, 57 bp, Artificial
  Synthetic oligonucleotide
gacgcaaggaaacaggctccgattgtgttgtctcattacttgcggccatctccattc

SEQ ID NO: 396313 - DNA, 57 bp, Artificial
  Synthetic oligonucleotide
gacgcaaggacatgggggattcccatgccaaataggggggcctattaaccacacatg

SEQ ID NO: 396314 - DNA, 60 bp, Artificial
  Synthetic oligonucleotide
gacgcaatatgggctccaaaccttctaccaggatcccagcacccccgatgctgatcactc

SEQ ID NO: 396315 - DNA, 60 bp, Artificial
  Synthetic oligonucleotide
gacgcaatcaaacctctcgtcgaaactgctggtatgtctgttcttactcaatctccaaac

SEQ ID NO: 396316 - DNA, 60 bp, Artificial
  Synthetic oligonucleotide
gacgcaatcaattcgtgatgagctcttagggatgattagaccgtatggcgatcggattcg

SEQ ID NO: 396317 - DNA, 55 bp, Artificial
  Synthetic oligonucleotide
gacgcaatcacagtattcccagatcttgaaggatttggctggcctgagaggggaa

SEQ ID NO: 396318 - DNA, 60 bp, Artificial
  Synthetic oligonucleotide
gacgcaatgaacatcatgtttgaggaggtgtttcgcacagactttggcttccacccaaac

SEQ ID NO: 396319 - DNA, 57 bp, Artificial
  Synthetic oligonucleotide
gacgcaattggctcgaactattctagaggttaagtatatacctcaaccccaccagga

SEQ ID NO: 396320 - DNA, 58 bp, Artificial
  Synthetic oligonucleotide
gacgcacaaacagaaacaaccgattcgaccgttaatgtggaaacatccagtgacgctg

SEQ ID NO: 396321 - DNA, 55 bp, Artificial
  Synthetic oligonucleotide
gacgcacaaagctgtacaatacttctcactctgatagtcgcgaatctctcgcccg

SEQ ID NO: 396322 - DNA, 60 bp, Artificial
  Synthetic oligonucleotide
gacgcacaccaggagttccatgcgtaggtacttgcgtgactacaattatcagcttgacat

SEQ ID NO: 396323 - DNA, 55 bp, Artificial
  Synthetic oligonucleotide
gacgcacacctgagttcgagtgccgcgatcaatcatgattcgtggggagtgcagt

SEQ ID NO: 396324 - DNA, 55 bp, Artificial
  Synthetic oligonucleotide
gacgcaccaataacaggaggaaacccagatcctggagtcaaggggtttgcattcc

SEQ ID NO: 396325 - DNA, 60 bp, Artificial
  Synthetic oligonucleotide
gacgcaccactgctcagccttatttacactggtgatggatccataggtcattgggctgcc

SEQ ID NO: 396326 - DNA, 57 bp, Artificial
  Synthetic oligonucleotide
gacgcaccagataatgtacatcccccctggtggtcctatacctgaaagcgttaccag

SEQ ID NO: 396327 - DNA, 59 bp, Artificial
  Synthetic oligonucleotide
gacgcacccccttcagcgaacagaagagcgtcagacgcgtcaggagtaagagatagggg

SEQ ID NO: 396328 - DNA, 55 bp, Artificial
  Synthetic oligonucleotide
gacgcacgaagtactcaagatcatgtgcgctccctctgcttattagcatggcaca

SEQ ID NO: 396329 - DNA, 55 bp, Artificial
  Synthetic oligonucleotide
gacgcacgcaatacccaagaccacgtgcgctccctgtgtctgttggcatggcaca

SEQ ID NO: 396330 - DNA, 60 bp, Artificial
  Synthetic oligonucleotide
gacgcacgcatgttcaaagagggacgtgacatcaaagagttcgtggcgtacgcgtctggg

SEQ ID NO: 396331 - DNA, 60 bp, Artificial
  Synthetic oligonucleotide
gacgcacgcgctttgttcagttagattgagaatatatggtgactttgattacgcagttga

SEQ ID NO: 396332 - DNA, 55 bp, Artificial
  Synthetic oligonucleotide
gacgcactaacctacaaagacctagtcgtttgtatggacggtgacaccatgcctg

SEQ ID NO: 396333 - DNA, 59 bp, Artificial
  Synthetic oligonucleotide
gacgcactagagcgtttcgggatcgccaccagtccgttcgccgcccgcttacacacgca

SEQ ID NO: 396334 - DNA, 50 bp, Artificial
  Synthetic oligonucleotide
gacgcacttgcagtgctggggctccttctcgcagaccaagcagggcaggc

SEQ ID NO: 396335 - DNA, 55 bp, Artificial
  Synthetic oligonucleotide
gacgcagaacactgggcaacttgagcacgtacgcgttaatattgcgcataccgtt

SEQ ID NO: 396336 - DNA, 60 bp, Artificial
  Synthetic oligonucleotide
gacgcagaagatcaaccttctatattagaacaaagtgtgaaaacattcttgagcaagtat

SEQ ID NO: 396337 - DNA, 55 bp, Artificial
  Synthetic oligonucleotide
gacgcagacaggttgtggatgtgatggcagcaatatttcagggtccaatatcact

SEQ ID NO: 396338 - DNA, 60 bp, Artificial
  Synthetic oligonucleotide
gacgcagactgttcccaagcaagtgctgtcccctttgacgatcaatgagggcgcgttaac

SEQ ID NO: 396339 - DNA, 56 bp, Artificial
  Synthetic oligonucleotide
gacgcagatttcactccaggccaaaccaacatacaaacgacaaatcaaaggagagt

SEQ ID NO: 396340 - DNA, 60 bp, Artificial
  Synthetic oligonucleotide
gacgcagcagccttagctacgccggagcttagctcgcccacgttctaatattggaccact

SEQ ID NO: 396341 - DNA, 60 bp, Artificial
  Synthetic oligonucleotide
gacgcagcatcttcagtcagtagatcagcttcagttagatcaattagcagtaatgcagca

SEQ ID NO: 396342 - DNA, 55 bp, Artificial
  Synthetic oligonucleotide
gacgcagccgtacatcactcaggaagcgccggaccacatgacggagattctcgac

SEQ ID NO: 396343 - DNA, 55 bp, Artificial
  Synthetic oligonucleotide
gacgcagctgctcgcgtcactaccatacttagcagtctcactgtgacccagctcc

SEQ ID NO: 396344 - DNA, 60 bp, Artificial
  Synthetic oligonucleotide
gacgcagggagctaatgaggtcagcggtacagcagaatcgacaaacgtaggaggaactca

SEQ ID NO: 396345 - DNA, 59 bp, Artificial
  Synthetic oligonucleotide
gacgcaggtggtgatgtggtatccactttacgttctaaaaaccacaatgtccacatctg

SEQ ID NO: 396346 - DNA, 60 bp, Artificial
  Synthetic oligonucleotide
gacgcagtgatgttctccccggtgcgtgaatccattatccgcgcagttgatgtggaggta

SEQ ID NO: 396347 - DNA, 55 bp, Artificial
  Synthetic oligonucleotide
gacgcatacaaaggattcgtggagaaaatacgcagtgttagcgctggacgcatgc

SEQ ID NO: 396348 - DNA, 60 bp, Artificial
  Synthetic oligonucleotide
gacgcatagcacgatagaacaactcaaagtgttctatgagatgaagtacaagaaatctgg

SEQ ID NO: 396349 - DNA, 60 bp, Artificial
  Synthetic oligonucleotide
gacgcatagttagccctaggtgtgactatcaagcaggacatactaaggtaggatccctac

SEQ ID NO: 396350 - DNA, 55 bp, Artificial
  Synthetic oligonucleotide
gacgcatattgggaatttgttatccaatctcttatttatgcgcccattcaacgcg

SEQ ID NO: 396351 - DNA, 55 bp, Artificial
  Synthetic oligonucleotide
gacgcatcagctctttcagctcgcggtctttctctttaatcgtcttgcgcaggtg

SEQ ID NO: 396352 - DNA, 55 bp, Artificial
  Synthetic oligonucleotide
gacgcatcgtttaaatttgccagcatacacgaagttgattcatgaactgaggacc

SEQ ID NO: 396353 - DNA, 58 bp, Artificial
  Synthetic oligonucleotide
gacgcatctttgtcgtttgactacgttagttcaaccgattatggataatattcagtta

SEQ ID NO: 396354 - DNA, 60 bp, Artificial
  Synthetic oligonucleotide
gacgcatgacacgattaccgccttatcgactggagtttcaacataccatcatcatcttgc

SEQ ID NO: 396355 - DNA, 55 bp, Artificial
  Synthetic oligonucleotide
gacgcatgctttacgagagaaaagtttgagcatgaagttggtttgcgctgggttg

SEQ ID NO: 396356 - DNA, 60 bp, Artificial
  Synthetic oligonucleotide
gacgcattaattggcacctgttgcctatactctattacgcaatgatcgatcttcatgcag

SEQ ID NO: 396357 - DNA, 55 bp, Artificial
  Synthetic oligonucleotide
gacgcattactagcagctctacagaacgcaggctacacaaatgttgtcgcaaggg

SEQ ID NO: 396358 - DNA, 60 bp, Artificial
  Synthetic oligonucleotide
gacgcattcaataacttgattgccatgtcttatagcggttggctcccgtatttagagaga

SEQ ID NO: 396359 - DNA, 59 bp, Artificial
  Synthetic oligonucleotide
gacgcattgtcgaattaactgtgagaagtatctaatgcaaacattatacgtacaaagag

SEQ ID NO: 396360 - DNA, 56 bp, Artificial
  Synthetic oligonucleotide
gacgccaacaaggtgggagcgggagcattcgggccgggattcactcctccccatgg

SEQ ID NO: 396361 - DNA, 57 bp, Artificial
  Synthetic oligonucleotide
gacgccaacacggagtgtaacattgcctacacccacaccaggttcgacatcccggaa

SEQ ID NO: 396362 - DNA, 55 bp, Artificial
  Synthetic oligonucleotide
gacgccaactcaccaatgccgcggagcgttttgaagctatctaccccagacaccg

SEQ ID NO: 396363 - DNA, 60 bp, Artificial
  Synthetic oligonucleotide
gacgccaagcatcacatgcctcgttcaccatacgattgtgctgacgatccatgcccttgg

SEQ ID NO: 396364 - DNA, 55 bp, Artificial
  Synthetic oligonucleotide
gacgccaatggggctgttctctaagatcgtccgccaaacgcctcgcctcgcccta

SEQ ID NO: 396365 - DNA, 60 bp, Artificial
  Synthetic oligonucleotide
gacgccacaatcaagacagggtgagaagacctgagtgtgctacagatgagtcctccggcc

SEQ ID NO: 396366 - DNA, 52 bp, Artificial
  Synthetic oligonucleotide
gacgccactagccccgtatcgttgattacacacgtagcgcaatttctaaacc

SEQ ID NO: 396367 - DNA, 59 bp, Artificial
  Synthetic oligonucleotide
gacgccagcagaacttttcgttcagtctttgcctaaagaatatgcggaagcatgtttta

SEQ ID NO: 396368 - DNA, 55 bp, Artificial
  Synthetic oligonucleotide
gacgccagtcttagcccggtgtggtttagagcactagaaatagtcctgcgggaaa

SEQ ID NO: 396369 - DNA, 55 bp, Artificial
  Synthetic oligonucleotide
gacgccagtgtgtatgaccccaagtctgaaagactagtgtggctgctcaggggct

SEQ ID NO: 396370 - DNA, 60 bp, Artificial
  Synthetic oligonucleotide
gacgccatcatggtatacgatggatcatcaatctccacaactgagcaagtcactagaatt

SEQ ID NO: 396371 - DNA, 55 bp, Artificial
  Synthetic oligonucleotide
gacgccatccgagctaatgacacctctgagtgggcctgcacttatgcccgcgttg

SEQ ID NO: 396372 - DNA, 58 bp, Artificial
  Synthetic oligonucleotide
gacgccattgatggtgaataccgcttgagaggagaagcgaggaaaactttcgtggacc

SEQ ID NO: 396373 - DNA, 55 bp, Artificial
  Synthetic oligonucleotide
gacgcccaatacacaaataacaggggaaagagcattcttttcgtgtggggcatac

SEQ ID NO: 396374 - DNA, 55 bp, Artificial
  Synthetic oligonucleotide
gacgcccgctaagagagaccagattgacgaacccatactcaggaacgcaaatcac

SEQ ID NO: 396375 - DNA, 54 bp, Artificial
  Synthetic oligonucleotide
gacgcccgtcgagatgtttaagcgtcacgtgaccgtagcgtcggctacggacgt

SEQ ID NO: 396376 - DNA, 58 bp, Artificial
  Synthetic oligonucleotide
gacgccctatctcaccaaggcctacgttatctcaggtccggcaacgaacttgctgttc

SEQ ID NO: 396377 - DNA, 57 bp, Artificial
  Synthetic oligonucleotide
gacgccctcagcacacttccctctaactttgaaaacgcaagcagtccaggccaaaaa

SEQ ID NO: 396378 - DNA, 55 bp, Artificial
  Synthetic oligonucleotide
gacgccctgaggcccaacaacatcatgataaactgcgagaaaacgccccaggacc

SEQ ID NO: 396379 - DNA, 55 bp, Artificial
  Synthetic oligonucleotide
gacgcccttagtcccagtagcagttcagtagtgccattggctgaggctggtccag

SEQ ID NO: 396380 - DNA, 56 bp, Artificial
  Synthetic oligonucleotide
gacgccctttgaaagtggtgcatttacattcgattttatacattgttctacagttt

SEQ ID NO: 396381 - DNA, 55 bp, Artificial
  Synthetic oligonucleotide
gacgccgaaggagaccgacacgaagatggaggcaccggaggtggagacgctactt

SEQ ID NO: 396382 - DNA, 59 bp, Artificial
  Synthetic oligonucleotide
gacgccgactgctcaacaactaaatgacgttaggaaaatatatcttgcacttatgttcc

SEQ ID NO: 396383 - DNA, 55 bp, Artificial
  Synthetic oligonucleotide
gacgccgctgtggtatcagacgtacccatatgttcgaacgccccaaagggtgggc

SEQ ID NO: 396384 - DNA, 58 bp, Artificial
  Synthetic oligonucleotide
gacgccggtgatccccattactattaccctggcccctatgtgctctgagtttgccggc

SEQ ID NO: 396385 - DNA, 60 bp, Artificial
  Synthetic oligonucleotide
gacgccgtacttcgtgcgagcgcacatccttttgcgcgcttgcttgtttgtgcgcggtgt

SEQ ID NO: 396386 - DNA, 57 bp, Artificial
  Synthetic oligonucleotide
gacgccgtataggagtccgtatgtcgctcgtgtaacaccatatgtgtaccgtaaaac

SEQ ID NO: 396387 - DNA, 55 bp, Artificial
  Synthetic oligonucleotide
gacgccgtatttagaaggggatgtgttatcaagcgactcagggccactgctttcc

SEQ ID NO: 396388 - DNA, 60 bp, Artificial
  Synthetic oligonucleotide
gacgccgtcgaaggaaattgtagtacgatctcagttaggtcatgggaaagctgatactca

SEQ ID NO: 396389 - DNA, 55 bp, Artificial
  Synthetic oligonucleotide
gacgcctatagcttattcggttacagtcaggcaagatctggaacggcaattaggt

SEQ ID NO: 396390 - DNA, 55 bp, Artificial
  Synthetic oligonucleotide
gacgcctcagtagagttgcccatcactgtgactattgctcccatgtgttgtgaat

SEQ ID NO: 396391 - DNA, 55 bp, Artificial
  Synthetic oligonucleotide
gacgcctccaattactgcaaccatcaccacttatggagacggtcttccagctctc

SEQ ID NO: 396392 - DNA, 60 bp, Artificial
  Synthetic oligonucleotide
gacgcctgagataccgttcacgaccgaagccgcgaatgagattgcgcgtgttaccggaga

SEQ ID NO: 396393 - DNA, 60 bp, Artificial
  Synthetic oligonucleotide
gacgcctgaggataaattgcaggaagaggcaccctataattggctgggatatcaacttag

SEQ ID NO: 396394 - DNA, 55 bp, Artificial
  Synthetic oligonucleotide
gacgcctgcaatcggagtaatggagtacaatatatagtgaggggtgtaatggcat

SEQ ID NO: 396395 - DNA, 55 bp, Artificial
  Synthetic oligonucleotide
gacgcctggagctcaaaagctatagacgccatcgtaccgctctcacttcgcatcg

SEQ ID NO: 396396 - DNA, 55 bp, Artificial
  Synthetic oligonucleotide
gacgccttagtggttgtccaactacgcgacactgcgacagactccgttctgaacg

SEQ ID NO: 396397 - DNA, 60 bp, Artificial
  Synthetic oligonucleotide
gacgccttctgggatgctcacacataactacaagcggaagtgcggacccatcaagccact

SEQ ID NO: 396398 - DNA, 54 bp, Artificial
  Synthetic oligonucleotide
gacgcgaacgcaatggctatgaggtgcctgttgcatgagtgcgattactccggc

SEQ ID NO: 396399 - DNA, 55 bp, Artificial
  Synthetic oligonucleotide
gacgcgactgcggcagctgacaagttcaacaaggagccggctcagtggcttaggc

SEQ ID NO: 396400 - DNA, 55 bp, Artificial
  Synthetic oligonucleotide
gacgcgacttcaggagttagtagaagaactctgtttctgtatctatcaacgctgg

SEQ ID NO: 396401 - DNA, 55 bp, Artificial
  Synthetic oligonucleotide
gacgcgagaggatacaaaggatatcgggcggcttaatcttgctatgatggaactg

SEQ ID NO: 396402 - DNA, 55 bp, Artificial
  Synthetic oligonucleotide
gacgcgatagcagcaagagccttgtccgttgtacgggcatgcgtcacagtgacag

SEQ ID NO: 396403 - DNA, 55 bp, Artificial
  Synthetic oligonucleotide
gacgcgatagctttcggtgtgatgatatattaaagattgtcgctagcccgcagcc

SEQ ID NO: 396404 - DNA, 57 bp, Artificial
  Synthetic oligonucleotide
gacgcgatcagtcgaacggtttgattcaattgtcgatacgatttttgaagttattaa

SEQ ID NO: 396405 - DNA, 55 bp, Artificial
  Synthetic oligonucleotide
gacgcgatgtgttcttaattcacatagcacagctgagaccactcttgacagcttc

SEQ ID NO: 396406 - DNA, 55 bp, Artificial
  Synthetic oligonucleotide
gacgcgattttccgtccgttgagcgggtgtaataccggcgaggtcttcttgcacg

SEQ ID NO: 396407 - DNA, 55 bp, Artificial
  Synthetic oligonucleotide
gacgcgcagagagagggcgtcgaggaagaaaagacgtctgaggagccggcaagca

SEQ ID NO: 396408 - DNA, 60 bp, Artificial
  Synthetic oligonucleotide
gacgcgcagatacaatttgggtgttggccttgagactaccagctaatccacgtgtaatct

SEQ ID NO: 396409 - DNA, 55 bp, Artificial
  Synthetic oligonucleotide
gacgcgccgaaaattgagacaccccctatggctgcgcccccccttggcagccccc

SEQ ID NO: 396410 - DNA, 55 bp, Artificial
  Synthetic oligonucleotide
gacgcgcgacccgtaactctgcaccatattgacttacatgtgaaacctgctctgg

SEQ ID NO: 396411 - DNA, 51 bp, Artificial
  Synthetic oligonucleotide
gacgcgcgagtgtgcgtgtctctcgttcgcgggcccgcctttgtggacgcg

SEQ ID NO: 396412 - DNA, 60 bp, Artificial
  Synthetic oligonucleotide
gacgcgcggactcgacttgctgtagtgcacaacagcgagaggcgaggcggtacggtgagt

SEQ ID NO: 396413 - DNA, 51 bp, Artificial
  Synthetic oligonucleotide
gacgcgcgtcccatccacgcgtttgaatcaacaagctcacgtggcgtcact

SEQ ID NO: 396414 - DNA, 50 bp, Artificial
  Synthetic oligonucleotide
gacgcgcttcgcgccagggggacggtagcgggtcgaaaaacagcacctct

SEQ ID NO: 396415 - DNA, 55 bp, Artificial
  Synthetic oligonucleotide
gacgcgctttatgaagcggaatactaggtagtttccttgtcttgtgggcgtttcg

SEQ ID NO: 396416 - DNA, 55 bp, Artificial
  Synthetic oligonucleotide
gacgcggaatgcgacgctacaggcgacggcgtgctatccgcaagcaattgcgggg

SEQ ID NO: 396417 - DNA, 60 bp, Artificial
  Synthetic oligonucleotide
gacgcggaggatgtcgtgtgctgctcaatgtcttattcctggacaggcgcactcgtcacc

SEQ ID NO: 396418 - DNA, 55 bp, Artificial
  Synthetic oligonucleotide
gacgcggatgagtatactcgtgacgaagcatatgagtgtattattgatagtgtag

SEQ ID NO: 396419 - DNA, 55 bp, Artificial
  Synthetic oligonucleotide
gacgcggattcagatgttgtgattcagaatgtgattttgacgacgaacgagtacg

SEQ ID NO: 396420 - DNA, 60 bp, Artificial
  Synthetic oligonucleotide
gacgcggcactagatcagttaagtactgaatattcagatgatgtggacgatgagatgtat

SEQ ID NO: 396421 - DNA, 60 bp, Artificial
  Synthetic oligonucleotide
gacgcgtaatgatctagaactgtgacccaatagtcttgaaccatctacagggcgtcttgt

SEQ ID NO: 396422 - DNA, 55 bp, Artificial
  Synthetic oligonucleotide
gacgcgtagagaccaggtggccgaattgcacgatatcatagcctggacgtgcgta

SEQ ID NO: 396423 - DNA, 52 bp, Artificial
  Synthetic oligonucleotide
gacgcgtgcatagactacaaagaagcgtcgcagttgtcgctgaaggggaaat

SEQ ID NO: 396424 - DNA, 55 bp, Artificial
  Synthetic oligonucleotide
gacgcgttacatgtcaggctgagtgcgacaatttccgtttcttggaaatgctcgc

SEQ ID NO: 396425 - DNA, 55 bp, Artificial
  Synthetic oligonucleotide
gacgcgttcaagacggcttttgatctcgacggtgctctcctggacgggttggccc

SEQ ID NO: 396426 - DNA, 60 bp, Artificial
  Synthetic oligonucleotide
gacgcgtttatgataatgccgtcgaggagctgaatgctcgctcgagacgccctaaggttc

SEQ ID NO: 396427 - DNA, 55 bp, Artificial
  Synthetic oligonucleotide
gacgctaaaatgaatactaaaggcgttaatagcggaattgatggcatgaagtcac

SEQ ID NO: 396428 - DNA, 55 bp, Artificial
  Synthetic oligonucleotide
gacgctaaacgtgggattagtgccagaatcgtggactccatggcctcggtagtac

SEQ ID NO: 396429 - DNA, 60 bp, Artificial
  Synthetic oligonucleotide
gacgctaagactaatagtctcaagccaattgaaacctcagagtaatgtacacgcaatttg

SEQ ID NO: 396430 - DNA, 51 bp, Artificial
  Synthetic oligonucleotide
gacgctaagactgagcaatcaaaagtcacggagagcaaaggttcttcacca

SEQ ID NO: 396431 - DNA, 55 bp, Artificial
  Synthetic oligonucleotide
gacgctaaggcgtctcatgatatgtagaagggtggctctacattcccgtatgggg

SEQ ID NO: 396432 - DNA, 55 bp, Artificial
  Synthetic oligonucleotide
gacgctaagtctctcaacatccgggatagtcctcagtcttcaaacacagcgactc

SEQ ID NO: 396433 - DNA, 55 bp, Artificial
  Synthetic oligonucleotide
gacgctacacatatatacaagtcgacgagggaaccgaatacctagaatacgaccc

SEQ ID NO: 396434 - DNA, 59 bp, Artificial
  Synthetic oligonucleotide
gacgctacttctatgtatcctgataagatgagaaatagaaaaatggcatacggaaaacc

SEQ ID NO: 396435 - DNA, 60 bp, Artificial
  Synthetic oligonucleotide
gacgctagaacccatgtgtctgggggctcggctgctcaaaccactagcggcctggttagc

SEQ ID NO: 396436 - DNA, 52 bp, Artificial
  Synthetic oligonucleotide
gacgctagaggtcttatccagtcctctcgtgcgcatgcaattgtcgcactta

SEQ ID NO: 396437 - DNA, 60 bp, Artificial
  Synthetic oligonucleotide
gacgctagttgtgaacaaggtgcgaagagcctattgagctacatgagagtcctccggccc

SEQ ID NO: 396438 - DNA, 50 bp, Artificial
  Synthetic oligonucleotide
gacgctatcacggccttagtcgattcgatgcaacctggcgagccgcccga

SEQ ID NO: 396439 - DNA, 55 bp, Artificial
  Synthetic oligonucleotide
gacgctatggatgccagggagcctgcgattggctctattttggagcaggatgacc

SEQ ID NO: 396440 - DNA, 55 bp, Artificial
  Synthetic oligonucleotide
gacgctatggcatgtactagcggtattttcttagtaagaacacccaccgagacgg

SEQ ID NO: 396441 - DNA, 56 bp, Artificial
  Synthetic oligonucleotide
gacgctattagtgacctattagctagcgttgatagtgaagaggtccgccaatactg

SEQ ID NO: 396442 - DNA, 55 bp, Artificial
  Synthetic oligonucleotide
gacgctattggtcgagagcattggggagcacttcacgacttaggttatctgccag

SEQ ID NO: 396443 - DNA, 53 bp, Artificial
  Synthetic oligonucleotide
gacgctatttatccgggcggtatacccaaaaggggtgagaacgttccagagtg

SEQ ID NO: 396444 - DNA, 60 bp, Artificial
  Synthetic oligonucleotide
gacgctccatctctctcgttcaacgagagagttcaatacgcatgctggcaacatgagaga

SEQ ID NO: 396445 - DNA, 60 bp, Artificial
  Synthetic oligonucleotide
gacgctcctcgacagggacccagatgatcgcactatcatctgggtatatggacccattgg

SEQ ID NO: 396446 - DNA, 56 bp, Artificial
  Synthetic oligonucleotide
gacgctcctggagagggacccagacgaccgcactatcctctgggtttacggaccta

SEQ ID NO: 396447 - DNA, 55 bp, Artificial
  Synthetic oligonucleotide
gacgctgacaaccgtcctttacttgtcatgcgctctaatctctgggcatctggct

SEQ ID NO: 396448 - DNA, 55 bp, Artificial
  Synthetic oligonucleotide
gacgctgacggctctcgtttcgatagttcgttaacaccttacttactaaatgccg

SEQ ID NO: 396449 - DNA, 55 bp, Artificial
  Synthetic oligonucleotide
gacgctgactgtttagtcgcgtcaaacggtaccagaataacacgagcggtagagt

SEQ ID NO: 396450 - DNA, 60 bp, Artificial
  Synthetic oligonucleotide
gacgctgagcagaaacaagtgatgtctgtagatacagacccctcaggtgcgttgattacc

SEQ ID NO: 396451 - DNA, 60 bp, Artificial
  Synthetic oligonucleotide
gacgctgaggagcagcagacgattcagacgtccatttgtgagacgaagaccgttttcggt

SEQ ID NO: 396452 - DNA, 55 bp, Artificial
  Synthetic oligonucleotide
gacgctgatggctggaggttcgatagctcacttacaccttacctcatcaatgcag

SEQ ID NO: 396453 - DNA, 57 bp, Artificial
  Synthetic oligonucleotide
gacgctgccaggtggttcaaggaggtcgatttttcaaagttcgacaagtcacaaggc

SEQ ID NO: 396454 - DNA, 55 bp, Artificial
  Synthetic oligonucleotide
gacgctggaacacgatattgttttgatgttctggacggtaagattgtagctggtt

SEQ ID NO: 396455 - DNA, 57 bp, Artificial
  Synthetic oligonucleotide
gacgctggaataccaacttctgtgaatgaacttcgtgaatattctaattgtaaatgg

SEQ ID NO: 396456 - DNA, 55 bp, Artificial
  Synthetic oligonucleotide
gacgctggatcagacagagtgatggtgtcttctctagctgtaacttggtggaaca

SEQ ID NO: 396457 - DNA, 60 bp, Artificial
  Synthetic oligonucleotide
gacgctgggatggagtgacggcgtatcaaatggcgtttatggagcggaacactcggatga

SEQ ID NO: 396458 - DNA, 55 bp, Artificial
  Synthetic oligonucleotide
gacgctggggttagatctgtggagtcttttaggcagatatctgatgtcgtgctta

SEQ ID NO: 396459 - DNA, 55 bp, Artificial
  Synthetic oligonucleotide
gacgctgtcgcttttgccactgtggagagactgataaatgatggtgagaccatcc

SEQ ID NO: 396460 - DNA, 60 bp, Artificial
  Synthetic oligonucleotide
gacgctgtcttctccagtccctccagcaaatcgagagcatgattgaagccgagtcctctg

SEQ ID NO: 396461 - DNA, 55 bp, Artificial
  Synthetic oligonucleotide
gacgctgtgtcacgaggccaacagctatggaatgcttgcttgtatgctagtcaac

SEQ ID NO: 396462 - DNA, 55 bp, Artificial
  Synthetic oligonucleotide
gacgcttaagagcggatgagctaaaattgaggaagtggtttatcagctactacgc

SEQ ID NO: 396463 - DNA, 60 bp, Artificial
  Synthetic oligonucleotide
gacgcttcaggagcagcggtgtcaagcggcgtggctgcggatacaggacaacccgtgact

SEQ ID NO: 396464 - DNA, 55 bp, Artificial
  Synthetic oligonucleotide
gacgcttctcgtttcggatgcgcccacgagcgactcctctctagcacagatcacg

SEQ ID NO: 396465 - DNA, 60 bp, Artificial
  Synthetic oligonucleotide
gacgcttctctgcatacactttcggacttgaagattgcgagagcatcactggtgtccgga

SEQ ID NO: 396466 - DNA, 55 bp, Artificial
  Synthetic oligonucleotide
gacgctttcaaaaggtacgatgaagaacccaatgctgtctcgtgttcatcgacct

SEQ ID NO: 396467 - DNA, 54 bp, Artificial
  Synthetic oligonucleotide
gacgctttgctgacgatgtctccgctatccgctggcgaggtaacagtaaagggt

SEQ ID NO: 396468 - DNA, 58 bp, Artificial
  Synthetic oligonucleotide
gacgctttttggactgactattggcaggcgtcctggattcctgagtgggaatttatta

SEQ ID NO: 396469 - DNA, 55 bp, Artificial
  Synthetic oligonucleotide
gacggaaaaccgcgcccttactatcacaccaccctacacgcaagagcacatgttg

SEQ ID NO: 396470 - DNA, 60 bp, Artificial
  Synthetic oligonucleotide
gacggaaaatggataagagagctgattctgtacgacaaagaagagatcaggaggatctgg

SEQ ID NO: 396471 - DNA, 55 bp, Artificial
  Synthetic oligonucleotide
gacggaacaatcgtagtgcctgacactttgaaagattctaagggtggaactgtaa

SEQ ID NO: 396472 - DNA, 54 bp, Artificial
  Synthetic oligonucleotide
gacggaacagtctcaggggactgcagaggggttgggaagttcttaagtacttgg

SEQ ID NO: 396473 - DNA, 55 bp, Artificial
  Synthetic oligonucleotide
gacggaaccactgtggaagtcaggctacgcctgtaattcatttacaaggtgaccc

SEQ ID NO: 396474 - DNA, 57 bp, Artificial
  Synthetic oligonucleotide
gacggaaccccctacatacctatagagtgcagaatgaaatggtacccctgtatgttc

SEQ ID NO: 396475 - DNA, 53 bp, Artificial
  Synthetic oligonucleotide
gacggaacggtctcaaccgtcccaaaaggtgttttggactcctggacacctgc

SEQ ID NO: 396476 - DNA, 58 bp, Artificial
  Synthetic oligonucleotide
gacggaagcggcgaatgaaatagctcgcgtgactggggagacctcgacatgggggccg

SEQ ID NO: 396477 - DNA, 55 bp, Artificial
  Synthetic oligonucleotide
gacggaatactcaagtcctaccatcgttacaagatcacaagtatccgagttgagt

SEQ ID NO: 396478 - DNA, 60 bp, Artificial
  Synthetic oligonucleotide
gacggaatcaacaggaattagcaacacacgcgccagagattgatggaactataccagaag

SEQ ID NO: 396479 - DNA, 57 bp, Artificial
  Synthetic oligonucleotide
gacggaatcgactagttagtgttagagttgaaactcctcacggatacgaatacataa

SEQ ID NO: 396480 - DNA, 60 bp, Artificial
  Synthetic oligonucleotide
gacggaatcgtagtgcatcctgagacaagtgtggttgttaccagatctggtcagacggtg

SEQ ID NO: 396481 - DNA, 60 bp, Artificial
  Synthetic oligonucleotide
gacggaattctcagacatcttcgaagacctaccaatagataccaaactagaggtgacatc

SEQ ID NO: 396482 - DNA, 55 bp, Artificial
  Synthetic oligonucleotide
gacggaccatgcaagattcccatctcttctgttaccaatctaaatgacttgactc

SEQ ID NO: 396483 - DNA, 58 bp, Artificial
  Synthetic oligonucleotide
gacggacgggggagcgccgtttttctcattcccagctctactaatgcactgtcaatta

SEQ ID NO: 396484 - DNA, 55 bp, Artificial
  Synthetic oligonucleotide
gacggacgtccgccagtctatcttgatgacgctgttaccgcgttcaaccttttct

SEQ ID NO: 396485 - DNA, 52 bp, Artificial
  Synthetic oligonucleotide
gacggacttcgaccctagaaaccccaattacgcagaaaccgtagcaaacaac

SEQ ID NO: 396486 - DNA, 56 bp, Artificial
  Synthetic oligonucleotide
gacggactttgttcttgataggacaaggttaggcgtgggatcaaagaacgatccca

SEQ ID NO: 396487 - DNA, 55 bp, Artificial
  Synthetic oligonucleotide
gacggagaaattaaaagaacacttccctgagagaaacataagctttcaaccatcc

SEQ ID NO: 396488 - DNA, 56 bp, Artificial
  Synthetic oligonucleotide
gacggagacaaggcatgacgagcccgtactaccgaacgcgattgcaggaaccgaca

SEQ ID NO: 396489 - DNA, 53 bp, Artificial
  Synthetic oligonucleotide
gacggagatagtgtggtgtgctgctctatgtcatattcttggactggggccct

SEQ ID NO: 396490 - DNA, 60 bp, Artificial
  Synthetic oligonucleotide
gacggagccatgctacaatttgaggtgctcaaagctaagcaccactgcatcccagaggag

SEQ ID NO: 396491 - DNA, 60 bp, Artificial
  Synthetic oligonucleotide
gacggagctgaaagagtcgagtattggacagattcagacgtaacatactacgaatatcaa

SEQ ID NO: 396492 - DNA, 50 bp, Artificial
  Synthetic oligonucleotide
gacggagcttctcgtgtctgtgctttacaagacatgagttgtgaaactga

SEQ ID NO: 396493 - DNA, 57 bp, Artificial
  Synthetic oligonucleotide
gacggaggccgtcatggtaaaagagtatcgaaataagatcgacgcattaaaagaggc

SEQ ID NO: 396494 - DNA, 53 bp, Artificial
  Synthetic oligonucleotide
gacggagtaaaggggttttcatacaggtatggtaatggtgtttggataggaag

SEQ ID NO: 396495 - DNA, 55 bp, Artificial
  Synthetic oligonucleotide
gacggagtaagttacaacaaggtctggcataaggctactggtgatgtgacatatg

SEQ ID NO: 396496 - DNA, 55 bp, Artificial
  Synthetic oligonucleotide
gacggagtagaacagactccaactggaacagcagtcgcatttagacaaataactc

SEQ ID NO: 396497 - DNA, 57 bp, Artificial
  Synthetic oligonucleotide
gacggagtcagggtttgagtgggggaaaccaaatgtgccatgtattgtctttaagca

SEQ ID NO: 396498 - DNA, 56 bp, Artificial
  Synthetic oligonucleotide
gacggagtgcataaccctcacatcgccaatcctacgttgtttaacgacacgtaccc

SEQ ID NO: 396499 - DNA, 55 bp, Artificial
  Synthetic oligonucleotide
gacggagtgtttattgacaaagctcctattgagaaccttttgaattggcacttac

SEQ ID NO: 396500 - DNA, 55 bp, Artificial
  Synthetic oligonucleotide
gacggagttctgacactaaattgtgttgctccccttacaaccgctaatggcgccc

SEQ ID NO: 396501 - DNA, 59 bp, Artificial
  Synthetic oligonucleotide
gacggataaaatatatttgttcagtctcgtcgaagatggactacgttgtggacgtgcag

SEQ ID NO: 396502 - DNA, 55 bp, Artificial
  Synthetic oligonucleotide
gacggatattgagttcatcaaacccagtgtcaaattgacatgctacgacgagtac

SEQ ID NO: 396503 - DNA, 55 bp, Artificial
  Synthetic oligonucleotide
gacggatcaagaggtccatagtgaaggagtgatatcgacgtgcttacgaaacggc

SEQ ID NO: 396504 - DNA, 60 bp, Artificial
  Synthetic oligonucleotide
gacggatcagttgtatctctataatagggttgacttgcaggctagaaatcgggggcaagc

SEQ ID NO: 396505 - DNA, 60 bp, Artificial
  Synthetic oligonucleotide
gacggatcgctaacgcgaactggatgtcagtgtcaaaagccttgtgcgccatggatactt

SEQ ID NO: 396506 - DNA, 60 bp, Artificial
  Synthetic oligonucleotide
gacggatctaacgcattctgtcctaagcatcccaaagtgaagatcgtgcacgaatcgaac

SEQ ID NO: 396507 - DNA, 55 bp, Artificial
  Synthetic oligonucleotide
gacggatgattggttgcggtacatcagcagtaggaggcagggcttaggtggtgtg

SEQ ID NO: 396508 - DNA, 59 bp, Artificial
  Synthetic oligonucleotide
gacggatgccaacgcatcctagaagtaatctgccccttggaagaaactgggagcgaggc

SEQ ID NO: 396509 - DNA, 57 bp, Artificial
  Synthetic oligonucleotide
gacggatgccgagagcaaggaaacttacttccgaggggagatgtcgaatcaattccc

SEQ ID NO: 396510 - DNA, 59 bp, Artificial
  Synthetic oligonucleotide
gacggatgtataacaggagtttacactgatgcatatccgctaaacccatcggggagtgt

SEQ ID NO: 396511 - DNA, 58 bp, Artificial
  Synthetic oligonucleotide
gacggatgtttaggcatttttggattgtcaatatcgctagcttcaaaaccaactggta

SEQ ID NO: 396512 - DNA, 55 bp, Artificial
  Synthetic oligonucleotide
gacggattcggacagggttcttgctcagtttgacttgtctttggcagcgaagcac

SEQ ID NO: 396513 - DNA, 55 bp, Artificial
  Synthetic oligonucleotide
gacggatttaaaatgcagttgttggcacaggctttaaagccccaaagagcactac

SEQ ID NO: 396514 - DNA, 60 bp, Artificial
  Synthetic oligonucleotide
gacggattttgttggctcgacgtctttgctgatgccaacagaagaataccagagtgggta

SEQ ID NO: 396515 - DNA, 55 bp, Artificial
  Synthetic oligonucleotide
gacggcaacacttgccctgatcgggtgccacgggagcccttgggcctgggttaag

SEQ ID NO: 396516 - DNA, 55 bp, Artificial
  Synthetic oligonucleotide
gacggcacaccttattcgacagctacaatccaatctgctgtaggccgtctcacac

SEQ ID NO: 396517 - DNA, 60 bp, Artificial
  Synthetic oligonucleotide
gacggcacgcttgcaagttacatgcacgccgtaaagcccctagaggaggatggtcttctg

SEQ ID NO: 396518 - DNA, 55 bp, Artificial
  Synthetic oligonucleotide
gacggcacttgactaaagtcggcaggcttgtaatatgacgtgtacactgcaatcg

SEQ ID NO: 396519 - DNA, 55 bp, Artificial
  Synthetic oligonucleotide
gacggcagactctgctttaatgcatggtttaccgcaatgtaagcgcttattggtc

SEQ ID NO: 396520 - DNA, 57 bp, Artificial
  Synthetic oligonucleotide
gacggcatcatgcataccacctgcccatgtggagcacagatcaccggacatgtcaaa

SEQ ID NO: 396521 - DNA, 55 bp, Artificial
  Synthetic oligonucleotide
gacggcattctctctaccatcgaccccaacgtcaaacactcccccggtcaatccc

SEQ ID NO: 396522 - DNA, 60 bp, Artificial
  Synthetic oligonucleotide
gacggccatctccaagtccctctggaccatgaatcatcttaacattcttccctcgtgtca

SEQ ID NO: 396523 - DNA, 53 bp, Artificial
  Synthetic oligonucleotide
gacggccgatggatcagagtgtggcatcgacctaacgtgtaccgcggcggacg

SEQ ID NO: 396524 - DNA, 55 bp, Artificial
  Synthetic oligonucleotide
gacggccgattgattccccaagtgagagtaattgatccaggattcggggatcgga

SEQ ID NO: 396525 - DNA, 50 bp, Artificial
  Synthetic oligonucleotide
gacggcctactacaacaagagaaggacaccatcacacatgggaccctcag

SEQ ID NO: 396526 - DNA, 55 bp, Artificial
  Synthetic oligonucleotide
gacggcctcatcagacctccctctcagcgtgagattcaagcgcactccacggcga

SEQ ID NO: 396527 - DNA, 55 bp, Artificial
  Synthetic oligonucleotide
gacggcgccaggtattgtctcaacacctgaagcaccctatccgggctcactgatg

SEQ ID NO: 396528 - DNA, 54 bp, Artificial
  Synthetic oligonucleotide
gacggcggacgtgcatgcaccaatgtacgcacattcgctggcgtccagcggagg

SEQ ID NO: 396529 - DNA, 60 bp, Artificial
  Synthetic oligonucleotide
gacggcgtatgcgtttaacagtatccagcacgttaatagcatccgtcgcatgccatttct

SEQ ID NO: 396530 - DNA, 58 bp, Artificial
  Synthetic oligonucleotide
gacggcgtgcacgtttaactattcagagacactacctaataagtattatgagccaagg

SEQ ID NO: 396531 - DNA, 52 bp, Artificial
  Synthetic oligonucleotide
gacggcgtgccccagtacgagtggttccccctaaggctgcccgagggtaact

SEQ ID NO: 396532 - DNA, 58 bp, Artificial
  Synthetic oligonucleotide
gacggctaatgagttgtctcgactagtaaattcacccactgttagagagtatgttaag

SEQ ID NO: 396533 - DNA, 60 bp, Artificial
  Synthetic oligonucleotide
gacggctacacaaagtatttgctgaagatcacacacgttcaattaaagacaatcaatcat

SEQ ID NO: 396534 - DNA, 55 bp, Artificial
  Synthetic oligonucleotide
gacggctacatgaacagaatgcccgccaacgtgtttgtacagtcgtggttcgaac

SEQ ID NO: 396535 - DNA, 55 bp, Artificial
  Synthetic oligonucleotide
gacggctcggctattcgtagcccagatcctactaagagtcataatgctggaatgg

SEQ ID NO: 396536 - DNA, 55 bp, Artificial
  Synthetic oligonucleotide
gacggctgctatggcagctatttctgccgcatatgtgtgttccaaggccgtagaa

SEQ ID NO: 396537 - DNA, 50 bp, Artificial
  Synthetic oligonucleotide
gacggctggtctggcttatgtgagaatcatggagtgtgccctctacttgc

SEQ ID NO: 396538 - DNA, 58 bp, Artificial
  Synthetic oligonucleotide
gacggcttcacagagcaacttttgtgcccctcttgtgaaattagaggataacttgctt

SEQ ID NO: 396539 - DNA, 53 bp, Artificial
  Synthetic oligonucleotide
gacggcttgtaggaagtcgtccaacgcaaaggttatgtagtcggccttaaaaa

SEQ ID NO: 396540 - DNA, 55 bp, Artificial
  Synthetic oligonucleotide
gacggctttgaactgcaacgaaagtcttaacaccggctgggtagcagggctcttc

SEQ ID NO: 396541 - DNA, 57 bp, Artificial
  Synthetic oligonucleotide
gacgggaaattctgtcaaggtgatagctggaaacggtatgtggtttaatagccagaa

SEQ ID NO: 396542 - DNA, 58 bp, Artificial
  Synthetic oligonucleotide
gacgggaagtcacgaaaggagtgccccttctctaacagagtgtggaactcattccaga

SEQ ID NO: 396543 - DNA, 55 bp, Artificial
  Synthetic oligonucleotide
gacgggaatccaccgaacagattggggtcagccctgaagaagttggaagacgatc

SEQ ID NO: 396544 - DNA, 60 bp, Artificial
  Synthetic oligonucleotide
gacgggacatcacgtgcatctaacaaatgcacgtgagaaggcagtagcttgcagcgaaag

SEQ ID NO: 396545 - DNA, 55 bp, Artificial
  Synthetic oligonucleotide
gacgggactttacgtttattgcattgatgtatttcaatggacttggctgttctac

SEQ ID NO: 396546 - DNA, 59 bp, Artificial
  Synthetic oligonucleotide
gacgggagctaagttccctgccgtacaaggcgtgatagaggagttctcacgcgacagag

SEQ ID NO: 396547 - DNA, 57 bp, Artificial
  Synthetic oligonucleotide
gacgggagggcctcagctatctgtggaatcttctgttatactggggtcgggaactaa

SEQ ID NO: 396548 - DNA, 55 bp, Artificial
  Synthetic oligonucleotide
gacgggagtctaaacaacgaacgtctgaaccaggcagctactcgaatgatttcga

SEQ ID NO: 396549 - DNA, 56 bp, Artificial
  Synthetic oligonucleotide
gacgggatgacattgataaaatcccaactaatgctcttgagattaagaagactttc

SEQ ID NO: 396550 - DNA, 60 bp, Artificial
  Synthetic oligonucleotide
gacgggatgcaatcctggaatatatgcactccgtgttgcgacgcatccctggccttgtgt

SEQ ID NO: 396551 - DNA, 56 bp, Artificial
  Synthetic oligonucleotide
gacgggcaactatgggaacgcccaacagaatcgatcctaggcggactcttcggtac

SEQ ID NO: 396552 - DNA, 60 bp, Artificial
  Synthetic oligonucleotide
gacgggcatacgtgcattgttgcatgccaaatcttgacgtccgcgacatcatgcggcacg

SEQ ID NO: 396553 - DNA, 55 bp, Artificial
  Synthetic oligonucleotide
gacgggcatgactgctgacaatcttaagtgcccatgtcaagtcccatcgcccgag

SEQ ID NO: 396554 - DNA, 55 bp, Artificial
  Synthetic oligonucleotide
gacgggccgattccattgtacagaccgtttaataacgtgccgattacctggcagc

SEQ ID NO: 396555 - DNA, 51 bp, Artificial
  Synthetic oligonucleotide
gacgggccggggagattgatccccggccctaccggatcaaactgaattgcg

SEQ ID NO: 396556 - DNA, 54 bp, Artificial
  Synthetic oligonucleotide
gacgggcgacagtttacggttcccgcattcgactttcgggccagcaggtattac

SEQ ID NO: 396557 - DNA, 55 bp, Artificial
  Synthetic oligonucleotide
gacgggcgagtcgtatggggagagcgtaaaacaggcggtaattctaaatgtagtg

SEQ ID NO: 396558 - DNA, 57 bp, Artificial
  Synthetic oligonucleotide
gacggggattgaaaaaacagggatccgcacattaatgatctgtttaatcaattgttg

SEQ ID NO: 396559 - DNA, 53 bp, Artificial
  Synthetic oligonucleotide
gacggggccccacaaagagagcctggggacgagtgggtgagagaaatactgga

SEQ ID NO: 396560 - DNA, 55 bp, Artificial
  Synthetic oligonucleotide
gacggggccgagacttttatcgttggcactcactccgctggaggtaatggagttg

SEQ ID NO: 396561 - DNA, 52 bp, Artificial
  Synthetic oligonucleotide
gacgggggctttttggaaaggacgctattaagcgagtgtcagaaaaaccgac

SEQ ID NO: 396562 - DNA, 51 bp, Artificial
  Synthetic oligonucleotide
gacgggggtcgctccagacgcggaccccgtttacacccccccgcgagtctc

SEQ ID NO: 396563 - DNA, 59 bp, Artificial
  Synthetic oligonucleotide
gacggggtacaggttgcagagtatgcggctcttaatgagttcggccacatgagaacccc

SEQ ID NO: 396564 - DNA, 60 bp, Artificial
  Synthetic oligonucleotide
gacgggtacattaggtacaaggttgatggatgtaggatgagtggagacgtgaacactgca

SEQ ID NO: 396565 - DNA, 59 bp, Artificial
  Synthetic oligonucleotide
gacgggtcatgggtctccatccaaaatcacgaagaggccaagtggtgccctcccgatca

SEQ ID NO: 396566 - DNA, 60 bp, Artificial
  Synthetic oligonucleotide
gacgggtggtcacacttctcacaatcgggtgtgtatgggttcactacactcaataacatg

SEQ ID NO: 396567 - DNA, 48 bp, Artificial
  Synthetic oligonucleotide
gacgggtggtcccacttttctcaaactggggtttacgggtttaacacc

SEQ ID NO: 396568 - DNA, 54 bp, Artificial
  Synthetic oligonucleotide
gacgggtgtatcctcctaaagagggcgactaggaaccaaccagaagtcctcaaa

SEQ ID NO: 396569 - DNA, 56 bp, Artificial
  Synthetic oligonucleotide
gacgggttcctgtgggacgatgtggacagcagcgtgttctccccccgaccgggtgc

SEQ ID NO: 396570 - DNA, 57 bp, Artificial
  Synthetic oligonucleotide
gacgggttctagatatttgtgacaacttccgcgcgaagttgttgggtgtcgattata

SEQ ID NO: 396571 - DNA, 55 bp, Artificial
  Synthetic oligonucleotide
gacgggttgagagctttgcaggctccagttccattacctgtggtaccagtaccac

SEQ ID NO: 396572 - DNA, 57 bp, Artificial
  Synthetic oligonucleotide
gacgggttgatagcacgatgggatcaatggtagaaccgacggtcaactcccgtggtg

SEQ ID NO: 396573 - DNA, 51 bp, Artificial
  Synthetic oligonucleotide
gacgggtttcaatgtctacgatcataaatgtcaacactcatccacaaggca

SEQ ID NO: 396574 - DNA, 59 bp, Artificial
  Synthetic oligonucleotide
gacggtaaatggtggtgactctgtaagatactcagtgcccacccgtctatcatttccca

SEQ ID NO: 396575 - DNA, 56 bp, Artificial
  Synthetic oligonucleotide
gacggtaaccccttgtgccatcaacccagtccttcacatcttgatcctcaatagcc

SEQ ID NO: 396576 - DNA, 55 bp, Artificial
  Synthetic oligonucleotide
gacggtaactgtcagcgattcggtgtaaatgcgattggtagtggcggatcacgtg

SEQ ID NO: 396577 - DNA, 60 bp, Artificial
  Synthetic oligonucleotide
gacggtaagaagggtgaaggtaacaactttcatcgtgcgaaaagcattgcaaatgctgca

SEQ ID NO: 396578 - DNA, 53 bp, Artificial
  Synthetic oligonucleotide
gacggtaagttaaaagtttactcgtcgggcatcgttagacatcgcctctgtga

SEQ ID NO: 396579 - DNA, 59 bp, Artificial
  Synthetic oligonucleotide
gacggtacagacccacactttgataaagggtatagtgcaacagcaggacaacctgctaa

SEQ ID NO: 396580 - DNA, 60 bp, Artificial
  Synthetic oligonucleotide
gacggtacagtctcggtctttgttggctgggatagtgcagcaacaggctaatctgttgag

SEQ ID NO: 396581 - DNA, 53 bp, Artificial
  Synthetic oligonucleotide
gacggtacggactgagctacagtgaagcctagcagtacggaaggacgggtagc

SEQ ID NO: 396582 - DNA, 57 bp, Artificial
  Synthetic oligonucleotide
gacggtacttttacgtatcctcaacccacacacacactgggttggtgatgtgttatc

SEQ ID NO: 396583 - DNA, 50 bp, Artificial
  Synthetic oligonucleotide
gacggtagcgtactgcgcgcacggattattctgcggctgtaaagacccga

SEQ ID NO: 396584 - DNA, 57 bp, Artificial
  Synthetic oligonucleotide
gacggtatttagatactatactacggctactagtgattcgaacgacatcctttataa

SEQ ID NO: 396585 - DNA, 55 bp, Artificial
  Synthetic oligonucleotide
gacggtcaagaatacaagatatttgatggagcattaaatggttacccactagatg

SEQ ID NO: 396586 - DNA, 60 bp, Artificial
  Synthetic oligonucleotide
gacggtcctgagatctcatatcttcttacttagaagaggagtctcctggacgctcccgcc

SEQ ID NO: 396587 - DNA, 55 bp, Artificial
  Synthetic oligonucleotide
gacggtcgagaagctgatccgtgaccggggctatgacctggcatcgtatccgcac

SEQ ID NO: 396588 - DNA, 55 bp, Artificial
  Synthetic oligonucleotide
gacggtgaacgccagatttggatcgaacctgatattcaattggattggactaagg

SEQ ID NO: 396589 - DNA, 55 bp, Artificial
  Synthetic oligonucleotide
gacggtgaagattgaacgtgtgcaatcggatatgaacatggacgggactctcccc

SEQ ID NO: 396590 - DNA, 55 bp, Artificial
  Synthetic oligonucleotide
gacggtgaatgcaattcagaagctagtaggagtattgaattgggcaagtcagttg

SEQ ID NO: 396591 - DNA, 55 bp, Artificial
  Synthetic oligonucleotide
gacggtgacatgtgtgatatagggtttggagctatgaactttaatgcactccagc

SEQ ID NO: 396592 - DNA, 55 bp, Artificial
  Synthetic oligonucleotide
gacggtgagctctttgcatttgattacactggttatgatgctagcttgagccctg

SEQ ID NO: 396593 - DNA, 55 bp, Artificial
  Synthetic oligonucleotide
gacggtgatacaattccgcgtttgcgggatcgtctttaatgttagcgttacgatc

SEQ ID NO: 396594 - DNA, 55 bp, Artificial
  Synthetic oligonucleotide
gacggtgattcgcaatggggaatttcaaaagtcatgagtattgacttgaacagac

SEQ ID NO: 396595 - DNA, 59 bp, Artificial
  Synthetic oligonucleotide
gacggtgcagagggcttggtcgcatcggttcgtggtgaagaggaagtggtgcgtgaacc

SEQ ID NO: 396596 - DNA, 59 bp, Artificial
  Synthetic oligonucleotide
gacggtgctacgcttgaccttccggcgttatctatgagacgcgtttatgattcggtatg

SEQ ID NO: 396597 - DNA, 57 bp, Artificial
  Synthetic oligonucleotide
gacggtgctgagttgccattcaccattgacaagtagtttgtccaaaaaactccttgt

SEQ ID NO: 396598 - DNA, 55 bp, Artificial
  Synthetic oligonucleotide
gacggtggggttcctgaagcagggagtgagtttggacttggccggcctgagtcac

SEQ ID NO: 396599 - DNA, 53 bp, Artificial
  Synthetic oligonucleotide
gacggtgtaaatcataagttaaatgtaacaatcgagacatgtacaatacgcaa

SEQ ID NO: 396600 - DNA, 56 bp, Artificial
  Synthetic oligonucleotide
gacggtgtcatttagttggagaatgtcaagggaatagatgtcagagttggagtgat

SEQ ID NO: 396601 - DNA, 60 bp, Artificial
  Synthetic oligonucleotide
gacggtgtctccgtccttatccagataggacttgacatctgagcttgatttggcaccttg

SEQ ID NO: 396602 - DNA, 58 bp, Artificial
  Synthetic oligonucleotide
gacggtgtgaaactagaatcaatgggagtttaccagattttggcgatctactccacag

SEQ ID NO: 396603 - DNA, 55 bp, Artificial
  Synthetic oligonucleotide
gacggttagatgtattattaccttgtgctatgctgagaaagttcacttcgctggt

SEQ ID NO: 396604 - DNA, 55 bp, Artificial
  Synthetic oligonucleotide
gacggttcaggacaattgcatgtggactcttccctgcacaagtgaaagccaggaa

SEQ ID NO: 396605 - DNA, 54 bp, Artificial
  Synthetic oligonucleotide
gacggttctcggcatcggagccggagaacaggcctccgtctccgtaagcgccaa

SEQ ID NO: 396606 - DNA, 59 bp, Artificial
  Synthetic oligonucleotide
gacggttctgccccctcacgaccaccctgctcaactcactgttcggcaccaacatcgta

SEQ ID NO: 396607 - DNA, 59 bp, Artificial
  Synthetic oligonucleotide
gacggttgatagacaaaaacctccagatgtcgatagaattctattcttcgataacaaga

SEQ ID NO: 396608 - DNA, 55 bp, Artificial
  Synthetic oligonucleotide
gacggttgcgcagtgggccgatactcaccgcgtcttgtcaacgaagggatcagcg

SEQ ID NO: 396609 - DNA, 53 bp, Artificial
  Synthetic oligonucleotide
gacggttggaccaaaacaagcaaaactgtcgtcaaaaaagtggaggtcctcaa

SEQ ID NO: 396610 - DNA, 50 bp, Artificial
  Synthetic oligonucleotide
gacggtttgggtcgaagtttgactctgtagatgtgtgtgatagggaagtt

SEQ ID NO: 396611 - DNA, 58 bp, Artificial
  Synthetic oligonucleotide
gacggtttgtacacgttctccgccttaatgagcaaatgcgtcacctcacccacgcatt

SEQ ID NO: 396612 - DNA, 59 bp, Artificial
  Synthetic oligonucleotide
gacggtttgtcgtgtgtacctggactctcgctaaatgctggcgtcgccaggttaatcaa

SEQ ID NO: 396613 - DNA, 55 bp, Artificial
  Synthetic oligonucleotide
gacgtaaacgcatgaccttttcgcaggagtttctcacagactttagacgagcgga

SEQ ID NO: 396614 - DNA, 55 bp, Artificial
  Synthetic oligonucleotide
gacgtaaatctacgccagtctgggaatcggccgtctacgatctctacgggtatgg

SEQ ID NO: 396615 - DNA, 55 bp, Artificial
  Synthetic oligonucleotide
gacgtaactacactgtgggaacttctcccactcctgtccgttgttggccttctgc

SEQ ID NO: 396616 - DNA, 55 bp, Artificial
  Synthetic oligonucleotide
gacgtaactcacacggagtttggcttcacaccggtactgtcaaaagaacgactat

SEQ ID NO: 396617 - DNA, 60 bp, Artificial
  Synthetic oligonucleotide
gacgtaagcaatgacgattgaggaggcattgacgtcagggatgaccgcagcggagagtac

SEQ ID NO: 396618 - DNA, 54 bp, Artificial
  Synthetic oligonucleotide
gacgtaagtcaacaagaacatctccgttggagttagttctacgtaaacgaatac

SEQ ID NO: 396619 - DNA, 60 bp, Artificial
  Synthetic oligonucleotide
gacgtaatcaagtgtttaagcgcacagcatctgggagacgtaatgatgccaaacgtcgat

SEQ ID NO: 396620 - DNA, 55 bp, Artificial
  Synthetic oligonucleotide
gacgtaatcacccagtggcaaacccactctcctaactcgccattggaatacctag

SEQ ID NO: 396621 - DNA, 55 bp, Artificial
  Synthetic oligonucleotide
gacgtaatcatctgtgatgagtgccactctacggatcctaccaccgtcctgggca

SEQ ID NO: 396622 - DNA, 60 bp, Artificial
  Synthetic oligonucleotide
gacgtaatgccattcttattcacgtactatcagctggcagcaaaatccggtaggatgtgg

SEQ ID NO: 396623 - DNA, 55 bp, Artificial
  Synthetic oligonucleotide
gacgtacaaaagcactgatgtgcccaaaggttgtgaaggcccatgtaaggtccag

SEQ ID NO: 396624 - DNA, 56 bp, Artificial
  Synthetic oligonucleotide
gacgtacaaacgccccttagcgcagtgaacttagtttcacaccaactatttagtca

SEQ ID NO: 396625 - DNA, 57 bp, Artificial
  Synthetic oligonucleotide
gacgtacagcgtttcttcaaatctcaagacgccggttccactccattatgttgagga

SEQ ID NO: 396626 - DNA, 50 bp, Artificial
  Synthetic oligonucleotide
gacgtacagcttcgaagaaggttgctagtctggtatttaatgagcaagct

SEQ ID NO: 396627 - DNA, 57 bp, Artificial
  Synthetic oligonucleotide
gacgtacaggatgttcccgggaggttctatggtagatcctcattcatacacgaccgt

SEQ ID NO: 396628 - DNA, 55 bp, Artificial
  Synthetic oligonucleotide
gacgtacagggtctctcctacacccacgcctcgcgttctgagagcctcggtatgc

SEQ ID NO: 396629 - DNA, 51 bp, Artificial
  Synthetic oligonucleotide
gacgtacagttagctgaacgtgtaaacttagccattgcgcctaatacagta

SEQ ID NO: 396630 - DNA, 50 bp, Artificial
  Synthetic oligonucleotide
gacgtacataaggagtttggtacaatatgctacgaatattacatgaatac

SEQ ID NO: 396631 - DNA, 55 bp, Artificial
  Synthetic oligonucleotide
gacgtacatttcgtacatccgcaagagagagccttggctcctgagcctccaatgg

SEQ ID NO: 396632 - DNA, 54 bp, Artificial
  Synthetic oligonucleotide
gacgtaccatacacgctgaccgtttgttatttgaccgtcgtcggtaggttgtct

SEQ ID NO: 396633 - DNA, 58 bp, Artificial
  Synthetic oligonucleotide
gacgtacctgggatgagagacacaaggttcttaaattgtcctcattcgctactccctc

SEQ ID NO: 396634 - DNA, 55 bp, Artificial
  Synthetic oligonucleotide
gacgtactaaaatgcgccgactatcttctaatcgatgatctagtcgctgactgtg

SEQ ID NO: 396635 - DNA, 55 bp, Artificial
  Synthetic oligonucleotide
gacgtactcgcattatctgttaggcccaatctttccgtggacgtcaaacgcatcg

SEQ ID NO: 396636 - DNA, 55 bp, Artificial
  Synthetic oligonucleotide
gacgtactctaaacgaggcgtacaaggaatttcttaacctatcgattggtagcac

SEQ ID NO: 396637 - DNA, 54 bp, Artificial
  Synthetic oligonucleotide
gacgtactctgttgacacctgagtgcgtggcggctgcaggagaaggctattcat

SEQ ID NO: 396638 - DNA, 56 bp, Artificial
  Synthetic oligonucleotide
gacgtactggtaatcaatagtaatgggaacctaatcgctcctcggggctacttcaa

SEQ ID NO: 396639 - DNA, 58 bp, Artificial
  Synthetic oligonucleotide
gacgtactgtgctcgcacgtaaggaccatcgtcgattccgtggaaaagaaagcggtca

SEQ ID NO: 396640 - DNA, 57 bp, Artificial
  Synthetic oligonucleotide
gacgtacttgaatacgtttggaaaatgcgctattccgacttaccgactgtgagacaa

SEQ ID NO: 396641 - DNA, 60 bp, Artificial
  Synthetic oligonucleotide
gacgtactttccgcgaggcgtatagggaatttttcatgcttgcatcgaatgtggctggac

SEQ ID NO: 396642 - DNA, 60 bp, Artificial
  Synthetic oligonucleotide
gacgtagaagtgtcatctgggtccagcaagagactcagttttgtcaaaaccaatcccatg

SEQ ID NO: 396643 - DNA, 60 bp, Artificial
  Synthetic oligonucleotide
gacgtagacagacaattctggtttgcgtggagaatagcaatatgctcctgcaagaaagac

SEQ ID NO: 396644 - DNA, 60 bp, Artificial
  Synthetic oligonucleotide
gacgtagacggtcctgctgacgtagacggtcctgctgacgtagatggtcctgccgacgta

SEQ ID NO: 396645 - DNA, 55 bp, Artificial
  Synthetic oligonucleotide
gacgtagatcattactcggattcagagattgcgctaaaacttttcggtggtttca

SEQ ID NO: 396646 - DNA, 54 bp, Artificial
  Synthetic oligonucleotide
gacgtagatggtcgaagtttcctgttcgaggtaataaaccgtataggtatcgta

SEQ ID NO: 396647 - DNA, 55 bp, Artificial
  Synthetic oligonucleotide
gacgtagcagcatggtctaattcaagaattgttatgcaggcggttttcgcacgtg

SEQ ID NO: 396648 - DNA, 55 bp, Artificial
  Synthetic oligonucleotide
gacgtaggatatgacatgtacacagatactgtgttgagtccaagtttcccagggg

SEQ ID NO: 396649 - DNA, 55 bp, Artificial
  Synthetic oligonucleotide
gacgtagtatgtgacttctacttcatagtttaatgcgtctggtgcaggatggagg

SEQ ID NO: 396650 - DNA, 60 bp, Artificial
  Synthetic oligonucleotide
gacgtagtggtctgcgcgaccgacgcactcatgactggctacactggggactttgactcg

SEQ ID NO: 396651 - DNA, 57 bp, Artificial
  Synthetic oligonucleotide
gacgtataatttcaagacaggtattcaggataacggttcctggaatacgttgtatga

SEQ ID NO: 396652 - DNA, 59 bp, Artificial
  Synthetic oligonucleotide
gacgtatagctgcccctagattgtatcaaagggcctttcagcaggtaaaggtcactgac

SEQ ID NO: 396653 - DNA, 60 bp, Artificial
  Synthetic oligonucleotide
gacgtatcacaatggtaccccaaagcgcttgaactcaatatgcttctctaatcaggtgat

SEQ ID NO: 396654 - DNA, 57 bp, Artificial
  Synthetic oligonucleotide
gacgtatcagcgtacaggcgtcccgatctcgcttagtgctcgtccattagccgtcgc

SEQ ID NO: 396655 - DNA, 60 bp, Artificial
  Synthetic oligonucleotide
gacgtatccgatgctggttcggtaaacaccggcggctcaactgagtcgctgcaattggag

SEQ ID NO: 396656 - DNA, 54 bp, Artificial
  Synthetic oligonucleotide
gacgtatctccctagctaatgctcaactcgtccagatagcacgagtcgtacacc

SEQ ID NO: 396657 - DNA, 60 bp, Artificial
  Synthetic oligonucleotide
gacgtatgaaggtgatactagtgcaggttacaaccatgacgtctccatactccgtgcgtg

SEQ ID NO: 396658 - DNA, 60 bp, Artificial
  Synthetic oligonucleotide
gacgtatgagctacgtgttacatataatagtagagtcaatgctgttgccaatcttgtggc

SEQ ID NO: 396659 - DNA, 60 bp, Artificial
  Synthetic oligonucleotide
gacgtatgagggtgatactagtgctggttacaaccacgatgtctccaacttgcgctcctg

SEQ ID NO: 396660 - DNA, 60 bp, Artificial
  Synthetic oligonucleotide
gacgtatgatcgacgacagatccatgtacgttaccttagatggagtaagctggtataggt

SEQ ID NO: 396661 - DNA, 55 bp, Artificial
  Synthetic oligonucleotide
gacgtatgcagtcacatcgtttacacaatagtcagactgtagttctatcatgctt

SEQ ID NO: 396662 - DNA, 60 bp, Artificial
  Synthetic oligonucleotide
gacgtatgtgtatggtatgttgcagcgtatacctgttagtaccggttgattcgttgagta

SEQ ID NO: 396663 - DNA, 55 bp, Artificial
  Synthetic oligonucleotide
gacgtatttgaacatcagtgtcactaatttggcggctgaacaggacagaacccca

SEQ ID NO: 396664 - DNA, 55 bp, Artificial
  Synthetic oligonucleotide
gacgtcaaatatgagttgtttatcgctagagacatgagtgcgaaagaggctcagt

SEQ ID NO: 396665 - DNA, 55 bp, Artificial
  Synthetic oligonucleotide
gacgtcaatcatcagtgatggctcgggagaatttggttgccattggatatccacg

SEQ ID NO: 396666 - DNA, 55 bp, Artificial
  Synthetic oligonucleotide
gacgtcaatgccggaactagtggaaccttcactgttccgaggataaagtcattta

SEQ ID NO: 396667 - DNA, 56 bp, Artificial
  Synthetic oligonucleotide
gacgtcaccacaaaactaaactgagcacaaaactagccggacaaacgtaagttgca

SEQ ID NO: 396668 - DNA, 60 bp, Artificial
  Synthetic oligonucleotide
gacgtcaccatttccggcactcgtcggtctgtgaagctggagactgctcacgcgtcggct

SEQ ID NO: 396669 - DNA, 55 bp, Artificial
  Synthetic oligonucleotide
gacgtcacccgataaaccggttatatcatgttgctaggcgcggagtggggagcca

SEQ ID NO: 396670 - DNA, 60 bp, Artificial
  Synthetic oligonucleotide
gacgtcaccgatgataatgatccagaacttgaaccaaggtgagatcgtgtacaccacgac

SEQ ID NO: 396671 - DNA, 55 bp, Artificial
  Synthetic oligonucleotide
gacgtcaccttaaacaagctgatgactgcgattgcaacacactgtgcgattccgt

SEQ ID NO: 396672 - DNA, 57 bp, Artificial
  Synthetic oligonucleotide
gacgtcacggtatacccgctcccggatggggctaactcgttgactccgtgcacttgc

SEQ ID NO: 396673 - DNA, 56 bp, Artificial
  Synthetic oligonucleotide
gacgtcactcgtggtaatgggcttacacatcgtgtaggaaagaggttttgtgtaaa

SEQ ID NO: 396674 - DNA, 60 bp, Artificial
  Synthetic oligonucleotide
gacgtcacttaatgataccattacaacagcgtctccgtcgtcagtgatgtacgccgtcga

SEQ ID NO: 396675 - DNA, 58 bp, Artificial
  Synthetic oligonucleotide
gacgtcagtccaacaaatgggatcctatcatatctgacatttgggagtctgggattga

SEQ ID NO: 396676 - DNA, 57 bp, Artificial
  Synthetic oligonucleotide
gacgtcagttgctatcactggatcattaagacttttcccttcggaacgtgtattaac

SEQ ID NO: 396677 - DNA, 60 bp, Artificial
  Synthetic oligonucleotide
gacgtcatcaatgacgttaaaccaggcgtcattgctgtatacccttgggctcagatctag

SEQ ID NO: 396678 - DNA, 60 bp, Artificial
  Synthetic oligonucleotide
gacgtcatcaatgacgttgtaccaggcttcattggagtagacctttgggcttagatcaag

SEQ ID NO: 396679 - DNA, 60 bp, Artificial
  Synthetic oligonucleotide
gacgtcatctatgatgttgaaccaggcctcattattgtacacctttgggctaaggtctag

SEQ ID NO: 396680 - DNA, 54 bp, Artificial
  Synthetic oligonucleotide
gacgtcatgtagggcggtatgtagtatgcttgccccgtctcgtagaggtgcccg

SEQ ID NO: 396681 - DNA, 60 bp, Artificial
  Synthetic oligonucleotide
gacgtcattaattcctgggcaggagatatattaagaactcaggagtcttcctgcacttgc

SEQ ID NO: 396682 - DNA, 57 bp, Artificial
  Synthetic oligonucleotide
gacgtcattgagcccaaaccgcagtccaaacccccctatagacgtctatgactgcgg

SEQ ID NO: 396683 - DNA, 53 bp, Artificial
  Synthetic oligonucleotide
gacgtccaaaacatctgtatgtgtctatgccaacagcccagtctaccatgaag

SEQ ID NO: 396684 - DNA, 55 bp, Artificial
  Synthetic oligonucleotide
gacgtccactccatgtggaaatcttggttcgacttcactcactatgagccgacca

SEQ ID NO: 396685 - DNA, 53 bp, Artificial
  Synthetic oligonucleotide
gacgtccagccgacaaccgagtacgagcacctaatcgcggtggcctggcacgc

SEQ ID NO: 396686 - DNA, 59 bp, Artificial
  Synthetic oligonucleotide
gacgtccagtacctctacggtgttggatctgcagtggtatcttgcgcccttaagtggga

SEQ ID NO: 396687 - DNA, 55 bp, Artificial
  Synthetic oligonucleotide
gacgtccatgctcactgatccctctcatataacggcggaagcagccgggaggagg

SEQ ID NO: 396688 - DNA, 57 bp, Artificial
  Synthetic oligonucleotide
gacgtccccgtggttaccgtgacaagctccacgctagtcacagcggacaactacagg

SEQ ID NO: 396689 - DNA, 55 bp, Artificial
  Synthetic oligonucleotide
gacgtcccctcattctggacacctgtaccattgaagggctgatctatggcaaccc

SEQ ID NO: 396690 - DNA, 54 bp, Artificial
  Synthetic oligonucleotide
gacgtccgaacacgtaaatgtccttttgacccgtaccgagaaacgcattgtctg

SEQ ID NO: 396691 - DNA, 60 bp, Artificial
  Synthetic oligonucleotide
gacgtccggatgcttccgaaggaagctatgattgcttcgaggcgaagcaaaacatttata

SEQ ID NO: 396692 - DNA, 55 bp, Artificial
  Synthetic oligonucleotide
gacgtccttgaaatatacctgggaaagcaatctgtaagactttccgatatccggg

SEQ ID NO: 396693 - DNA, 55 bp, Artificial
  Synthetic oligonucleotide
gacgtcgaagaggtcgatctgtcaagcccactgatgagcccaagatgtcggccca

SEQ ID NO: 396694 - DNA, 55 bp, Artificial
  Synthetic oligonucleotide
gacgtcgccaggggctgtgaaggcccatgtaaggtccagtctttcgaacagcgcc

SEQ ID NO: 396695 - DNA, 55 bp, Artificial
  Synthetic oligonucleotide
gacgtcgcttccactccctcaacttctctcaactccactccaactcctgccgtag

SEQ ID NO: 396696 - DNA, 56 bp, Artificial
  Synthetic oligonucleotide
gacgtcggtcgctattactgggtcattaagacttttcccttcagaacgcgtgttga

SEQ ID NO: 396697 - DNA, 53 bp, Artificial
  Synthetic oligonucleotide
gacgtcggttcgaggctactcacggcacaatagccgggtcgcggaaaatacga

SEQ ID NO: 396698 - DNA, 58 bp, Artificial
  Synthetic oligonucleotide
gacgtcgtagatggagtaaactataagataaatgttactactactacatgtacaatta

SEQ ID NO: 396699 - DNA, 54 bp, Artificial
  Synthetic oligonucleotide
gacgtcgtcgctcagtataaagtcggaaatcatcgttagaaacggtgtcatgtc

SEQ ID NO: 396700 - DNA, 58 bp, Artificial
  Synthetic oligonucleotide
gacgtcgtctacgggccaccggggtgtggcaagagtagatgggccaatgaacagcctg

SEQ ID NO: 396701 - DNA, 55 bp, Artificial
  Synthetic oligonucleotide
gacgtcgtctttgtttgattttgtacccccagacaccttgtattgtccggattca

SEQ ID NO: 396702 - DNA, 60 bp, Artificial
  Synthetic oligonucleotide
gacgtcgtgtgctgctcaatgtcttacacctggacaggcgcactcattaccccgtgcgcc

SEQ ID NO: 396703 - DNA, 55 bp, Artificial
  Synthetic oligonucleotide
gacgtctaacaaatccgtaagcgaaatgactgttgacgtctccgttgccggtgtc

SEQ ID NO: 396704 - DNA, 55 bp, Artificial
  Synthetic oligonucleotide
gacgtctaagggtgacccagctcctagggtgattcagcctcgaaaccctaggtac

SEQ ID NO: 396705 - DNA, 60 bp, Artificial
  Synthetic oligonucleotide
gacgtctagatcgtgccaacctcattggcggcgaagttagcgccatggtagagtgcatgg

SEQ ID NO: 396706 - DNA, 60 bp, Artificial
  Synthetic oligonucleotide
gacgtctcccaatgggattcatctcaacataatacgcagccatttaggaaagggataata

SEQ ID NO: 396707 - DNA, 60 bp, Artificial
  Synthetic oligonucleotide
gacgtctccgtctttctccatgtatgttttaacgtctgagcagcttttagctgcctgaat

SEQ ID NO: 396708 - DNA, 60 bp, Artificial
  Synthetic oligonucleotide
gacgtctgaacttgatttagctccctgaatgttcggatggaaatgtgctgacctggttga

SEQ ID NO: 396709 - DNA, 55 bp, Artificial
  Synthetic oligonucleotide
gacgtctgaggagccagcaagcgtcgggatcactatagaaggggtcatgagtcaa

SEQ ID NO: 396710 - DNA, 51 bp, Artificial
  Synthetic oligonucleotide
gacgtctgattgtttagggatagatactgcgaacatgtttacttcgttaaa

SEQ ID NO: 396711 - DNA, 57 bp, Artificial
  Synthetic oligonucleotide
gacgtctgttatcgcgcacgacaaggacgcttactgaggagaattggaactgtagga

SEQ ID NO: 396712 - DNA, 60 bp, Artificial
  Synthetic oligonucleotide
gacgtcttcatgattcctcagtacggctacctgactctcaacaatggcagtcagtctgtg

SEQ ID NO: 396713 - DNA, 60 bp, Artificial
  Synthetic oligonucleotide
gacgtgaacatatcagggcatctactttcgttggccattgctgctcactttgtcgcatca

SEQ ID NO: 396714 - DNA, 57 bp, Artificial
  Synthetic oligonucleotide
gacgtgaataaacttaggatgactttatcttctaaaggaatcgaccaaaagatgaga

SEQ ID NO: 396715 - DNA, 53 bp, Artificial
  Synthetic oligonucleotide
gacgtgacacgtgggaacggtataactcaccgtgttggtaagcgtttttgtgt

SEQ ID NO: 396716 - DNA, 55 bp, Artificial
  Synthetic oligonucleotide
gacgtgatgcaatggaactagttaaacgcggtgaccttagtcagtgttcgtttgg

SEQ ID NO: 396717 - DNA, 55 bp, Artificial
  Synthetic oligonucleotide
gacgtgatggggataggtatgttttgggtcttttcaagttcttaatgtctcttag

SEQ ID NO: 396718 - DNA, 60 bp, Artificial
  Synthetic oligonucleotide
gacgtgatgtgtagaatgtgccgcgatgacagaggactaggaaggttcaatatgctgaaa

SEQ ID NO: 396719 - DNA, 53 bp, Artificial
  Synthetic oligonucleotide
gacgtgcaaccgacgcatgtcattgaccttatgcagactcaccaatacggcct

SEQ ID NO: 396720 - DNA, 59 bp, Artificial
  Synthetic oligonucleotide
gacgtgcaatacctgtacggtgtagggtcggcatttgtctccttcgcagtcaagtggga

SEQ ID NO: 396721 - DNA, 55 bp, Artificial
  Synthetic oligonucleotide
gacgtgcaatgaatcttgatattatcactcctatacatgcaccgtatttagcttc

SEQ ID NO: 396722 - DNA, 55 bp, Artificial
  Synthetic oligonucleotide
gacgtgcagatactgaattgcttagcgtcgatgcatcaggcgccaatagtccaag

SEQ ID NO: 396723 - DNA, 60 bp, Artificial
  Synthetic oligonucleotide
gacgtgcagtttggagagtggtgggatcagcaagtggcagccggtgcaacaataccacac

SEQ ID NO: 396724 - DNA, 55 bp, Artificial
  Synthetic oligonucleotide
gacgtgcatatagtaggcgtacaggtgctttacgaaggttgtaccaccgcctcac

SEQ ID NO: 396725 - DNA, 59 bp, Artificial
  Synthetic oligonucleotide
gacgtgcatcactacacgatatgttggtagttcgtgggtcattaagctgtcgcaatagg

SEQ ID NO: 396726 - DNA, 60 bp, Artificial
  Synthetic oligonucleotide
gacgtgcatcactacacgatatgttggtatttcttgggtcattaagctgcctcaagagtg

SEQ ID NO: 396727 - DNA, 55 bp, Artificial
  Synthetic oligonucleotide
gacgtgccagcagggtggtgactgtatcccagatgtggtcgctaagtacgaacat

SEQ ID NO: 396728 - DNA, 60 bp, Artificial
  Synthetic oligonucleotide
gacgtgccatagacgtaggcctcgtttcatctggtgaggaacagatgatgcctgatttta

SEQ ID NO: 396729 - DNA, 55 bp, Artificial
  Synthetic oligonucleotide
gacgtgcccagatagcgatagcaccgtttacgttgtcgtactgtgtttgcttatc

SEQ ID NO: 396730 - DNA, 54 bp, Artificial
  Synthetic oligonucleotide
gacgtgcccgtgttttatagtggtacaatcggagataaaccatacgtcggagtc

SEQ ID NO: 396731 - DNA, 50 bp, Artificial
  Synthetic oligonucleotide
gacgtgcggcactctgctcgcccattattacgcacaaattgaaatctcaa

SEQ ID NO: 396732 - DNA, 55 bp, Artificial
  Synthetic oligonucleotide
gacgtgcgtctcatgatcgttggtcagaaatggctcggcgcggagctactgaaac

SEQ ID NO: 396733 - DNA, 59 bp, Artificial
  Synthetic oligonucleotide
gacgtgctcgatgatagaatgatttcaatcctatgtcggtacgtttcccttaagtatct

SEQ ID NO: 396734 - DNA, 59 bp, Artificial
  Synthetic oligonucleotide
gacgtgctcgcgttgccacctgagaaatttagccaggctaccggctgtatcggcaaagt

SEQ ID NO: 396735 - DNA, 55 bp, Artificial
  Synthetic oligonucleotide
gacgtgctgataccaaagcgcttcaggccagccaaggatccccttgacaacccgc

SEQ ID NO: 396736 - DNA, 60 bp, Artificial
  Synthetic oligonucleotide
gacgtgctgcgtccaattgtggatcgtgtggcccatgtttccccaggctgtaataacatg

SEQ ID NO: 396737 - DNA, 56 bp, Artificial
  Synthetic oligonucleotide
gacgtgctggtaatcaacagtaatggaaacctaatcgctcctcggggttacttcaa

SEQ ID NO: 396738 - DNA, 55 bp, Artificial
  Synthetic oligonucleotide
gacgtgcttggacaggtcggccgatgtatcggaaacccagattttaccgggtcag

SEQ ID NO: 396739 - DNA, 55 bp, Artificial
  Synthetic oligonucleotide
gacgtgctttccgctatcgtcgaccttgccgtggctgcggtagggagtattgccg

SEQ ID NO: 396740 - DNA, 53 bp, Artificial
  Synthetic oligonucleotide
gacgtggaaaagcgtttagtgacaggggcaaagaaacttgattgttgggttcg

SEQ ID NO: 396741 - DNA, 55 bp, Artificial
  Synthetic oligonucleotide
gacgtggaaggatccattcctctctctaaccggcgtattaattgttgggccacgt

SEQ ID NO: 396742 - DNA, 55 bp, Artificial
  Synthetic oligonucleotide
gacgtggagttgggttgcccaacttctgggatgttggctcaagccggtctgaagg

SEQ ID NO: 396743 - DNA, 55 bp, Artificial
  Synthetic oligonucleotide
gacgtggcaacatccggttttaatttaccctttcatcatggcgggttacacgatg

SEQ ID NO: 396744 - DNA, 58 bp, Artificial
  Synthetic oligonucleotide
gacgtggcgggtcgactagtcagcgacgaggtaactcaagatatacaatgtttaggcg

SEQ ID NO: 396745 - DNA, 57 bp, Artificial
  Synthetic oligonucleotide
gacgtggctggtcgtctaatcagcgacgaggttatacacgtaatcccgtgtttaagc

SEQ ID NO: 396746 - DNA, 55 bp, Artificial
  Synthetic oligonucleotide
gacgtggggacccgcgcgtcaaccatatggcttctttctagaaacggaggagacg

SEQ ID NO: 396747 - DNA, 50 bp, Artificial
  Synthetic oligonucleotide
gacgtggggccccaacgacccccggcgtagatcccgcaatttgggtaaag

SEQ ID NO: 396748 - DNA, 60 bp, Artificial
  Synthetic oligonucleotide
gacgtgggtctgcagtcctcatgcgtgctatgcatcccttggatcagccagactcactac

SEQ ID NO: 396749 - DNA, 56 bp, Artificial
  Synthetic oligonucleotide
gacgtggtcaagagacaacaagaaatgttgcgactgaccgtctggggaacgaaaaa

SEQ ID NO: 396750 - DNA, 60 bp, Artificial
  Synthetic oligonucleotide
gacgtggtcacatatggagcacagactgtggctatagggttgtcgtcgggtggtgcgcct

SEQ ID NO: 396751 - DNA, 54 bp, Artificial
  Synthetic oligonucleotide
gacgtggttgaggcattataattgtcgtttcggtttggtgacaaccaaacttgc

SEQ ID NO: 396752 - DNA, 60 bp, Artificial
  Synthetic oligonucleotide
gacgtggttgatggcgtaaatcacaaactagatgttactactgcgacttgtactatcaga

SEQ ID NO: 396753 - DNA, 59 bp, Artificial
  Synthetic oligonucleotide
gacgtgtacctgcagggtcccatttgggccaaaattcctcacacagatggacactttca

SEQ ID NO: 396754 - DNA, 60 bp, Artificial
  Synthetic oligonucleotide
gacgtgtacttcattgacccgacgcgtaccattaggcagtatgacttgttgtcatcaggg

SEQ ID NO: 396755 - DNA, 52 bp, Artificial
  Synthetic oligonucleotide
gacgtgtagcctcgcgggtttatcatcatgcccttgtagttgtaggtcgacg

SEQ ID NO: 396756 - DNA, 56 bp, Artificial
  Synthetic oligonucleotide
gacgtgtatcttactccattgtgaaagtatataaccagtgttttgtaaagcttcgg

SEQ ID NO: 396757 - DNA, 56 bp, Artificial
  Synthetic oligonucleotide
gacgtgtattggctcgagaacggtactttccattaatcagctatgggaaagtaccg

SEQ ID NO: 396758 - DNA, 60 bp, Artificial
  Synthetic oligonucleotide
gacgtgtcagacgttgaacgcaatcctggagagagttccaagcaattggtctccaggatc

SEQ ID NO: 396759 - DNA, 60 bp, Artificial
  Synthetic oligonucleotide
gacgtgtccgtttatgccgcggtacaatcgcgagatgatcttcggattatacacgtttgc

SEQ ID NO: 396760 - DNA, 60 bp, Artificial
  Synthetic oligonucleotide
gacgtgtcgcgtgttacgcgggtggatgacggtgagctgtctctactctcggtgccggat

SEQ ID NO: 396761 - DNA, 55 bp, Artificial
  Synthetic oligonucleotide
gacgtgtcttgcattgcggtcgagagaaaacttcagcacttgcgtgacacgttac

SEQ ID NO: 396762 - DNA, 60 bp, Artificial
  Synthetic oligonucleotide
gacgtgtgaagacagggatgccctatgtgacattcagcacgcctgaggctaaccttaaga

SEQ ID NO: 396763 - DNA, 60 bp, Artificial
  Synthetic oligonucleotide
gacgtgtggtgagatagtcgtcacatagatgagtcggaattccaggataaccttgggcct

SEQ ID NO: 396764 - DNA, 55 bp, Artificial
  Synthetic oligonucleotide
gacgtgttcaggtgcgggataaatggtctcagtctgtctggctaggcggacggtg

SEQ ID NO: 396765 - DNA, 54 bp, Artificial
  Synthetic oligonucleotide
gacgtgttggacgaattccttgctggccccaaccccgaagtccgaatagccaaa

SEQ ID NO: 396766 - DNA, 57 bp, Artificial
  Synthetic oligonucleotide
gacgtgtttccttattctctctgaatagaaccccatcgtgtaaatgttcgtaatctg

SEQ ID NO: 396767 - DNA, 55 bp, Artificial
  Synthetic oligonucleotide
gacgttacaaattaaactgatgtagtactatgtgtttttggggccgtcatgttcc

SEQ ID NO: 396768 - DNA, 55 bp, Artificial
  Synthetic oligonucleotide
gacgttacggtcgtacccgtagaggcactggtagatggttgccggcgcaacaact

SEQ ID NO: 396769 - DNA, 59 bp, Artificial
  Synthetic oligonucleotide
gacgttacttgtcacctgtgttgagaactgctatgcctaataaaaggcaaagtagtcaa

SEQ ID NO: 396770 - DNA, 55 bp, Artificial
  Synthetic oligonucleotide
gacgttaggaaaatttacttagctctgatgtttccaggacaaatcatactcgatc

SEQ ID NO: 396771 - DNA, 52 bp, Artificial
  Synthetic oligonucleotide
gacgttagtacagctgcgcggatgcaacagcgcagagtcatttcattgatgg

SEQ ID NO: 396772 - DNA, 57 bp, Artificial
  Synthetic oligonucleotide
gacgttataccaagcgtcgttactgtacacctttgggctaagatctaaatgcccaca

SEQ ID NO: 396773 - DNA, 57 bp, Artificial
  Synthetic oligonucleotide
gacgttataccaggcatcattactgtacacttttggactcaggtcgagatgaccgca

SEQ ID NO: 396774 - DNA, 59 bp, Artificial
  Synthetic oligonucleotide
gacgttataccaggcgtcgttattgtagaccttgggactcaggtccagatgtccgcata

SEQ ID NO: 396775 - DNA, 57 bp, Artificial
  Synthetic oligonucleotide
gacgttatacttaccctgggcattgtggctcgagacggtcaccgcgcgtttgacgga

SEQ ID NO: 396776 - DNA, 58 bp, Artificial
  Synthetic oligonucleotide
gacgttcaaaagataatcgatggtgtgaaagagttagcttcagaaacaatctataaag

SEQ ID NO: 396777 - DNA, 60 bp, Artificial
  Synthetic oligonucleotide
gacgttcacatatgtacaccatgtgttgatgtccgcgactccaaacgtcatatggacgtg

SEQ ID NO: 396778 - DNA, 55 bp, Artificial
  Synthetic oligonucleotide
gacgttcacctaggttcaggaacaagagcggtgctgacgaagaaagtgaagacca

SEQ ID NO: 396779 - DNA, 60 bp, Artificial
  Synthetic oligonucleotide
gacgttccaaccacgtcttcaaagcaagtggattgatctcacatctccactgacgtaagg

SEQ ID NO: 396780 - DNA, 60 bp, Artificial
  Synthetic oligonucleotide
gacgttccagctacgataacatttcatggtaaaggagtgactagctgcttctcaccattt

SEQ ID NO: 396781 - DNA, 54 bp, Artificial
  Synthetic oligonucleotide
gacgttcccacttcggacattactgttgaagaaccggacgaattaatatcccca

SEQ ID NO: 396782 - DNA, 58 bp, Artificial
  Synthetic oligonucleotide
gacgttccgttggaggtgcctgacaaggcttggcagcagtggtcgaagcgttggaggg

SEQ ID NO: 396783 - DNA, 55 bp, Artificial
  Synthetic oligonucleotide
gacgttcgcagctcaattactacgttgagagcaccaaaagctcattacacggtag

SEQ ID NO: 396784 - DNA, 55 bp, Artificial
  Synthetic oligonucleotide
gacgttcgtttaatttctatgaagtggaataggagtaaagatacctcggtgtctc

SEQ ID NO: 396785 - DNA, 57 bp, Artificial
  Synthetic oligonucleotide
gacgttctcgaaggctaaatccacgtttagtggatgaagcgaatttaccatacttca

SEQ ID NO: 396786 - DNA, 60 bp, Artificial
  Synthetic oligonucleotide
gacgttcttaatggtgtcatctcaaacgctaggaatggctgtgtgccccttagtgttgtg

SEQ ID NO: 396787 - DNA, 55 bp, Artificial
  Synthetic oligonucleotide
gacgttgaagaatttaaacgacaattatggtataacgcgatctcaagcgttagac

SEQ ID NO: 396788 - DNA, 58 bp, Artificial
  Synthetic oligonucleotide
gacgttgaagagctcatagaagtggaaacacaagagcgtgtttatataaatccaaaac

SEQ ID NO: 396789 - DNA, 55 bp, Artificial
  Synthetic oligonucleotide
gacgttgaaggagcacatgttgttggctctaacgtcggtacaaatgtcccattgc

SEQ ID NO: 396790 - DNA, 55 bp, Artificial
  Synthetic oligonucleotide
gacgttgaatatcctctggttcgaagcgtattatacctacgtcatcaaggcccac

SEQ ID NO: 396791 - DNA, 55 bp, Artificial
  Synthetic oligonucleotide
gacgttgacgcagtgaacgatccagttctcagcgccgacttcaaccccgagaggg

SEQ ID NO: 396792 - DNA, 58 bp, Artificial
  Synthetic oligonucleotide
gacgttgactattacgtggatatgcacgaattggttggccttggcgttccgatcctgt

SEQ ID NO: 396793 - DNA, 55 bp, Artificial
  Synthetic oligonucleotide
gacgttgagttcaaccacagggaaatagccgatctcaaccaattgacttctcggc

SEQ ID NO: 396794 - DNA, 59 bp, Artificial
  Synthetic oligonucleotide
gacgttgattaaacgaccgaagtcttcgatgtctgttcgccttcgcacccttgcattca

SEQ ID NO: 396795 - DNA, 59 bp, Artificial
  Synthetic oligonucleotide
gacgttgcatgcaaaattagtataacttcgaacggtgtttatcaatgcccgatagtgtc

SEQ ID NO: 396796 - DNA, 55 bp, Artificial
  Synthetic oligonucleotide
gacgttgccttctccagtccctccagcagattgagagtatgattgaagcagagtc

SEQ ID NO: 396797 - DNA, 60 bp, Artificial
  Synthetic oligonucleotide
gacgttgctccaattgagcacattgcaagtatgagaaggaactatttcacagcggaagta

SEQ ID NO: 396798 - DNA, 54 bp, Artificial
  Synthetic oligonucleotide
gacgttgctcgctacgtgactgagcaccatacgcgtgttcattgcatcgcccct

SEQ ID NO: 396799 - DNA, 60 bp, Artificial
  Synthetic oligonucleotide
gacgttgcttctgctctaggaatggctggagttcttgactatgctcctggtctacaaggt

SEQ ID NO: 396800 - DNA, 55 bp, Artificial
  Synthetic oligonucleotide
gacgttgcttgactctacctgcgttttcaactctacgcaggaagtggttggactc

SEQ ID NO: 396801 - DNA, 57 bp, Artificial
  Synthetic oligonucleotide
gacgttggaaatgatctttggatgggacggacaatcaaaaaagattcacgctcaggg

SEQ ID NO: 396802 - DNA, 55 bp, Artificial
  Synthetic oligonucleotide
gacgttggattacaatctacagtatctctagttgtcccatgggttagtgccagcc

SEQ ID NO: 396803 - DNA, 58 bp, Artificial
  Synthetic oligonucleotide
gacgttggctcgactcattttagcaaccctacctcagtcgaattggattgggtcatac

SEQ ID NO: 396804 - DNA, 60 bp, Artificial
  Synthetic oligonucleotide
gacgttggtgtagacatcgtgtgttctcgtggccctatcagctcttcggtttggtcacgc

SEQ ID NO: 396805 - DNA, 60 bp, Artificial
  Synthetic oligonucleotide
gacgttgtagatggcgtaaatcacaagttgaatgtaacaacagctacttgcactatacgc

SEQ ID NO: 396806 - DNA, 55 bp, Artificial
  Synthetic oligonucleotide
gacgttgtaggaaattacactcgccgtgttgataactcatttgaacctaagactt

SEQ ID NO: 396807 - DNA, 55 bp, Artificial
  Synthetic oligonucleotide
gacgtttaaagctgaggagagaaaagaatttgcgaagagtttgtgggtagacgac

SEQ ID NO: 396808 - DNA, 60 bp, Artificial
  Synthetic oligonucleotide
gacgtttaacatcgaagaaggagctacactggttcctgatgtgtactctcagttgattcc

SEQ ID NO: 396809 - DNA, 53 bp, Artificial
  Synthetic oligonucleotide
gacgtttattagattctcttggatttcactttccttcattttactggaaaggt

SEQ ID NO: 396810 - DNA, 55 bp, Artificial
  Synthetic oligonucleotide
gacgtttcggtaataccaacatccggagacgtcgtagtctgcgcaacagacgctc

SEQ ID NO: 396811 - DNA, 53 bp, Artificial
  Synthetic oligonucleotide
gacgtttcggtcagaatcgtttcctaatccgaagtgtacgtcgtccgacacgt

SEQ ID NO: 396812 - DNA, 57 bp, Artificial
  Synthetic oligonucleotide
gacgtttctccatcaggagttggccgattcatttatcgcgagctacccgagttaagt

SEQ ID NO: 396813 - DNA, 58 bp, Artificial
  Synthetic oligonucleotide
gacgtttctgccgacagatttcgaacttaaagattcggtaattacatcatatgatggt

SEQ ID NO: 396814 - DNA, 55 bp, Artificial
  Synthetic oligonucleotide
gacgtttgacagcaaactagcattttaccacgtagccaaagagctgcatccggag

SEQ ID NO: 396815 - DNA, 57 bp, Artificial
  Synthetic oligonucleotide
gacgtttgatccgtctctaacgtttgggactcatactgggttcgctacggcagagcg

SEQ ID NO: 396816 - DNA, 54 bp, Artificial
  Synthetic oligonucleotide
gacgtttgcaaccctaaagctggaggatacctcggcggacaagcggagcacgaa

SEQ ID NO: 396817 - DNA, 54 bp, Artificial
  Synthetic oligonucleotide
gacgtttggatgtttcctaaccaaatttgggacagatacccaataaccagagaa

SEQ ID NO: 396818 - DNA, 55 bp, Artificial
  Synthetic oligonucleotide
gacgtttgtgacttatacaaattcgtaggttacgaaactgccgcctttgacagac

SEQ ID NO: 396819 - DNA, 55 bp, Artificial
  Synthetic oligonucleotide
gacgtttgtgtgtacacatacgaaagcttcttactcaatcacaagcacaagttgg

SEQ ID NO: 396820 - DNA, 55 bp, Artificial
  Synthetic oligonucleotide
gacgttttaacggagtgagaataatgtatctaacggacgatgacccagatcccga

SEQ ID NO: 396821 - DNA, 55 bp, Artificial
  Synthetic oligonucleotide
gacgttttacgtgttggtcttcatttaatgaccacgaaagagattcatgtaacgg

SEQ ID NO: 396822 - DNA, 55 bp, Artificial
  Synthetic oligonucleotide
gacgttttccgaattgctggaacataacaacatgaacgtcactgagtggaagagg

SEQ ID NO: 396823 - DNA, 50 bp, Artificial
  Synthetic oligonucleotide
gacgttttggaaaggccaccgcggatttttgcggtaaacagggttttgat

SEQ ID NO: 396824 - DNA, 53 bp, Artificial
  Synthetic oligonucleotide
gactaaaagcccaattgaattccgccgctgagaactcagtgaccgccgttacg

SEQ ID NO: 396825 - DNA, 55 bp, Artificial
  Synthetic oligonucleotide
gactaaaatatggaaggcatggaatagcaaacaaagttcagtttggtacccttac

SEQ ID NO: 396826 - DNA, 55 bp, Artificial
  Synthetic oligonucleotide
gactaaaattcctattataagacgggccgcaagattaagagatgtcatttcatgg

SEQ ID NO: 396827 - DNA, 58 bp, Artificial
  Synthetic oligonucleotide
gactaaaattgatcgatccactcaaatatctccaaacacattaccagatatagtcact

SEQ ID NO: 396828 - DNA, 60 bp, Artificial
  Synthetic oligonucleotide
gactaaacacagcaatggaaccatcaaagacagaacaccttatagatcactgattcggtt

SEQ ID NO: 396829 - DNA, 56 bp, Artificial
  Synthetic oligonucleotide
gactaaacctggagcccagacgccgtttgaagctagaagtaccgcttaggcaggag

SEQ ID NO: 396830 - DNA, 56 bp, Artificial
  Synthetic oligonucleotide
gactaaacgttgcatggtcgtaaaacatgcccggcttaccgtgagccgcctttgaa

SEQ ID NO: 396831 - DNA, 55 bp, Artificial
  Synthetic oligonucleotide
gactaaaggtttgacgacaaacacatacccggttagcatgaactggttgcaaggc

SEQ ID NO: 396832 - DNA, 55 bp, Artificial
  Synthetic oligonucleotide
gactaaagtcggatggcttgtaatatgacgtgtaaactgtaatgggaggagcgaa

SEQ ID NO: 396833 - DNA, 58 bp, Artificial
  Synthetic oligonucleotide
gactaaagtggaacaaggaaagtcaaggttgattgaagcttccagtcttaatgattca

SEQ ID NO: 396834 - DNA, 60 bp, Artificial
  Synthetic oligonucleotide
gactaaatctagctaaataagtcgacccagaagctgtcatcgatatcgtccagacttgga

SEQ ID NO: 396835 - DNA, 51 bp, Artificial
  Synthetic oligonucleotide
gactaacaaataaaggaacctggaccctataaaaggggagagcgacctaaa

SEQ ID NO: 396836 - DNA, 60 bp, Artificial
  Synthetic oligonucleotide
gactaacacattagaactatcatcaacgattaaccaacgttataagtatgacacagcagg

SEQ ID NO: 396837 - DNA, 60 bp, Artificial
  Synthetic oligonucleotide
gactaacatactaacatagtgtaagttgtaatcaatctgctaattctgcttaacacaggg

SEQ ID NO: 396838 - DNA, 55 bp, Artificial
  Synthetic oligonucleotide
gactaacattggggctaggtggtcattagatgttatggatactgtaaatccattt

SEQ ID NO: 396839 - DNA, 55 bp, Artificial
  Synthetic oligonucleotide
gactaaccgctgaaattacagtcggcgcagaatacgcgatatacgtcgagtacgg

SEQ ID NO: 396840 - DNA, 60 bp, Artificial
  Synthetic oligonucleotide
gactaacgtttcaaatgatgtgtcaaatgtgactaattcggtaaatgatatttcgacaca

SEQ ID NO: 396841 - DNA, 55 bp, Artificial
  Synthetic oligonucleotide
gactaactggatgggaagacttagaccaggattccatagaaaccgaagaaataac

SEQ ID NO: 396842 - DNA, 55 bp, Artificial
  Synthetic oligonucleotide
gactaacttgtatcattgacccagatttaagatctgctgtgtcgtttggttgctc

SEQ ID NO: 396843 - DNA, 57 bp, Artificial
  Synthetic oligonucleotide
gactaagaaatctctttctgcggtgaagtccttgttcggggatctcaatccccatct

SEQ ID NO: 396844 - DNA, 59 bp, Artificial
  Synthetic oligonucleotide
gactaagagaaataggggcacctgaggacactctaatgcaatcccctgaaattagctaa

SEQ ID NO: 396845 - DNA, 55 bp, Artificial
  Synthetic oligonucleotide
gactaagcagatgatccaagacgtatcgaacgatgtaagagaaacttatgcacgc

SEQ ID NO: 396846 - DNA, 60 bp, Artificial
  Synthetic oligonucleotide
gactaagcatgaaggtatatgtgtcccctaagagacacaccgtatatagctaataatcta

SEQ ID NO: 396847 - DNA, 60 bp, Artificial
  Synthetic oligonucleotide
gactaagcctctatgcgaggtaaactcatggcacattctgtcaaaagacaatgcaataag

SEQ ID NO: 396848 - DNA, 59 bp, Artificial
  Synthetic oligonucleotide
gactaagcggagaaatggatgggcttcacaacgaaatactcgagctagacgagaaggtg

SEQ ID NO: 396849 - DNA, 60 bp, Artificial
  Synthetic oligonucleotide
gactaagcggagcaatggatgaactccacaacgaaatactcgagctggatgagaaggtgg

SEQ ID NO: 396850 - DNA, 55 bp, Artificial
  Synthetic oligonucleotide
gactaagtaggactactcatttactatattccgggaagatgcccgatgctggtag

SEQ ID NO: 396851 - DNA, 60 bp, Artificial
  Synthetic oligonucleotide
gactaagtctacatttcatgccgtccctgtgcatatctgggacaggctcatgctttttgg

SEQ ID NO: 396852 - DNA, 55 bp, Artificial
  Synthetic oligonucleotide
gactaagtctgggtttatagagagcgaattcgaagaagttaaaatcgcttcgaat

SEQ ID NO: 396853 - DNA, 57 bp, Artificial
  Synthetic oligonucleotide
gactaagtgtgaataccctgcaggacatagtcaggtagggacactacaatttttagc

SEQ ID NO: 396854 - DNA, 58 bp, Artificial
  Synthetic oligonucleotide
gactaatagctttatcatagactccgactagacatttgtcggctcaaatgataattaa

SEQ ID NO: 396855 - DNA, 55 bp, Artificial
  Synthetic oligonucleotide
gactaatagtacttgggatggtactacagaaaatgacaatatcacgctcccttgc

SEQ ID NO: 396856 - DNA, 55 bp, Artificial
  Synthetic oligonucleotide
gactaatatattatcaagatgcagatgagctgtggcataaaacacatggacaggt

SEQ ID NO: 396857 - DNA, 55 bp, Artificial
  Synthetic oligonucleotide
gactaatctatggcaacccttcttgtgatctactgttgggaggaagagaatggtc

SEQ ID NO: 396858 - DNA, 60 bp, Artificial
  Synthetic oligonucleotide
gactaatctgctgaccgtcactctgcaaagatgggaacggcttcctctatcgttcagacg

SEQ ID NO: 396859 - DNA, 56 bp, Artificial
  Synthetic oligonucleotide
gactaatcttgttactccacccaacacaccttccacagctagaatgttgtgcttcg

SEQ ID NO: 396860 - DNA, 60 bp, Artificial
  Synthetic oligonucleotide
gactaatgaagcagtgtctacattggggaatggagttcgagtgttagcaactgcagtgag

SEQ ID NO: 396861 - DNA, 57 bp, Artificial
  Synthetic oligonucleotide
gactaatgaattgcagaagggtgaattagagcaatatgcgtgttatcatcgcaattg

SEQ ID NO: 396862 - DNA, 55 bp, Artificial
  Synthetic oligonucleotide
gactaatgcgttagtctgtacggatatcgtgccgataggcgtgggttcgagcccc

SEQ ID NO: 396863 - DNA, 51 bp, Artificial
  Synthetic oligonucleotide
gactaatgctcgcattatgacttctaatgtgctagactacacaagtaacct

SEQ ID NO: 396864 - DNA, 59 bp, Artificial
  Synthetic oligonucleotide
gactaatggtcagttatttacgaatgatattttatatgatgggaatattgaaggtgtaa

SEQ ID NO: 396865 - DNA, 60 bp, Artificial
  Synthetic oligonucleotide
gactaatgtaggactaatcatgtatctcctataagcggaacattactgtgaaactgagct

SEQ ID NO: 396866 - DNA, 60 bp, Artificial
  Synthetic oligonucleotide
gactaatgtgtcttcacagatccgtggccaagaccgggagtgggaacagccagacaacgc

SEQ ID NO: 396867 - DNA, 58 bp, Artificial
  Synthetic oligonucleotide
gactaattccgctcccggaaatggctcgtatgatatatcttgatgaagagggttcgtt

SEQ ID NO: 396868 - DNA, 58 bp, Artificial
  Synthetic oligonucleotide
gactaattcttccgtcctgatcatctggtgagtgaagtctttgaacatattccttaac

SEQ ID NO: 396869 - DNA, 57 bp, Artificial
  Synthetic oligonucleotide
gactacaaagagaaccgattcgtagaaattggagtgacacggagggaggttcatatg

SEQ ID NO: 396870 - DNA, 58 bp, Artificial
  Synthetic oligonucleotide
gactacaaatctgctacattcgggtaagggacctgatttaggtccatgtcacaatttg

SEQ ID NO: 396871 - DNA, 60 bp, Artificial
  Synthetic oligonucleotide
gactacaaattatatgtcactcatatctggtatgtggttattaacagttataccaaacga

SEQ ID NO: 396872 - DNA, 60 bp, Artificial
  Synthetic oligonucleotide
gactacaacccagcacaggttgacatatcaaacactcgcgcaacacagagccaatttgat

SEQ ID NO: 396873 - DNA, 56 bp, Artificial
  Synthetic oligonucleotide
gactacaaccgttaacacgacaaatttaacacaacacccctcagcaccaacaatgc

SEQ ID NO: 396874 - DNA, 55 bp, Artificial
  Synthetic oligonucleotide
gactacaactgcaaagtatttggcggcgtttaccctttcatgtggggtggagcgc

SEQ ID NO: 396875 - DNA, 57 bp, Artificial
  Synthetic oligonucleotide
gactacaaggaaaaccgattcactgaaattggtgtgacacggagggaagttcacata

SEQ ID NO: 396876 - DNA, 55 bp, Artificial
  Synthetic oligonucleotide
gactacaagtgcggtaaaatatgcgttgaaccttatgtaggctctatttcagtgg

SEQ ID NO: 396877 - DNA, 58 bp, Artificial
  Synthetic oligonucleotide
gactacaatgtaggtggacgaaatcgattggttagtgttagagttgacactccttatg

SEQ ID NO: 396878 - DNA, 55 bp, Artificial
  Synthetic oligonucleotide
gactacacacaacaaaacattgcaatcttgcaacaggcacgagcgcaactccttg

SEQ ID NO: 396879 - DNA, 60 bp, Artificial
  Synthetic oligonucleotide
gactacacatgcgtcctcctcactcaagatagtatgctagttgatgaacgaagatgggtg

SEQ ID NO: 396880 - DNA, 60 bp, Artificial
  Synthetic oligonucleotide
gactacacatggcaatctggcactaatgcatctgttttctggcagcatggtcaaccttat

SEQ ID NO: 396881 - DNA, 54 bp, Artificial
  Synthetic oligonucleotide
gactacaccaagtatttatacctgtagactactcctttgtacaaggaaaaggtc

SEQ ID NO: 396882 - DNA, 60 bp, Artificial
  Synthetic oligonucleotide
gactacaccgcaaatccaaaagaagcgctgaactgcaagcactctactggcctcgcgacc

SEQ ID NO: 396883 - DNA, 55 bp, Artificial
  Synthetic oligonucleotide
gactacactaagagtgtcggaggggagtggttatatgctaaaccgctgaaggccg

SEQ ID NO: 396884 - DNA, 55 bp, Artificial
  Synthetic oligonucleotide
gactacactcacgttagaccaatggtcacttacggagtaccagctacattcggac

SEQ ID NO: 396885 - DNA, 60 bp, Artificial
  Synthetic oligonucleotide
gactacactcttgatgaagaaagtagagcgaggatcaaaaccagactattcaccataaga

SEQ ID NO: 396886 - DNA, 55 bp, Artificial
  Synthetic oligonucleotide
gactacagaaggggacaacttaaagaaacagctcttaaaagaatgctccaacacc

SEQ ID NO: 396887 - DNA, 50 bp, Artificial
  Synthetic oligonucleotide
gactacagcacaggtattgtgagcacgcgaacgaagatgaacggctgtac

SEQ ID NO: 396888 - DNA, 60 bp, Artificial
  Synthetic oligonucleotide
gactacagcatggcatattgggcatttagttagggatattactgagagcttgattgcaca

SEQ ID NO: 396889 - DNA, 58 bp, Artificial
  Synthetic oligonucleotide
gactacagctgcttatgaactgaacattattggggcttgtaaataccgaaactcttag

SEQ ID NO: 396890 - DNA, 60 bp, Artificial
  Synthetic oligonucleotide
gactacagctgcttgtaaaccgagcactcccggaaggctatacatgctaagactcttgtg

SEQ ID NO: 396891 - DNA, 55 bp, Artificial
  Synthetic oligonucleotide
gactacagtagcatctcaacattagtatgtagactaaccaatgaatcagatgggc

SEQ ID NO: 396892 - DNA, 59 bp, Artificial
  Synthetic oligonucleotide
gactacagtagtaggagtctttggggttccgggatcaggcaagtctgctattatcaaga

SEQ ID NO: 396893 - DNA, 56 bp, Artificial
  Synthetic oligonucleotide
gactacagtcgatcattgtccgatcatactttgttttcgaacaaatcgcggccaac

SEQ ID NO: 396894 - DNA, 55 bp, Artificial
  Synthetic oligonucleotide
gactacataaccaatctgggcagagcatttggcacaggctttacagatcacatta

SEQ ID NO: 396895 - DNA, 59 bp, Artificial
  Synthetic oligonucleotide
gactacatactctacagattcctgctctttattgtaattatcacaccatttgtgaattc

SEQ ID NO: 396896 - DNA, 60 bp, Artificial
  Synthetic oligonucleotide
gactacatagaagcctcggatcatctgcgcgaactagcgcgatatcagaagaatcgcaca

SEQ ID NO: 396897 - DNA, 60 bp, Artificial
  Synthetic oligonucleotide
gactacatctcttccaattgctagattgtcaaatcgtgtgtttagagataaattatttcc

SEQ ID NO: 396898 - DNA, 60 bp, Artificial
  Synthetic oligonucleotide
gactacatctgaaaccagactgcaactgctcacactcacaacctgaagcaaccaatgcaa

SEQ ID NO: 396899 - DNA, 54 bp, Artificial
  Synthetic oligonucleotide
gactacatgacagaccaaggggagccaatcgggcctttgaaacagatgttggag

SEQ ID NO: 396900 - DNA, 59 bp, Artificial
  Synthetic oligonucleotide
gactacatggtacttcaatccagtgattctcagaccaaataacgttgaggtagagtttc

SEQ ID NO: 396901 - DNA, 54 bp, Artificial
  Synthetic oligonucleotide
gactacattatgtcgttcatcgatactatcgcaacagtggaatacccaaagcgt

SEQ ID NO: 396902 - DNA, 55 bp, Artificial
  Synthetic oligonucleotide
gactacattgcccgaatccgtaaatctgactacattgccggagttcacgccaaca

SEQ ID NO: 396903 - DNA, 56 bp, Artificial
  Synthetic oligonucleotide
gactaccaccaatcctgtgtgagaaagacaaagggttactaattgaatacaaccta

SEQ ID NO: 396904 - DNA, 50 bp, Artificial
  Synthetic oligonucleotide
gactaccacggggcaaaaacatccaatagaggaattcatagccccagaag

SEQ ID NO: 396905 - DNA, 59 bp, Artificial
  Synthetic oligonucleotide
gactaccagaagataacggtagatgcgagtttaatggtcgagccgaactacacgagtca

SEQ ID NO: 396906 - DNA, 60 bp, Artificial
  Synthetic oligonucleotide
gactaccagcatgggaccatgcaaaacctgcacgattcctgctcaaggagcctctttgtt

SEQ ID NO: 396907 - DNA, 53 bp, Artificial
  Synthetic oligonucleotide
gactaccaggatgactacactcctcagagacctgtcagacccacgccacttcc

SEQ ID NO: 396908 - DNA, 55 bp, Artificial
  Synthetic oligonucleotide
gactaccaggcctgcaaatttctacaaacaccagcaagttataggctagaagaag

SEQ ID NO: 396909 - DNA, 52 bp, Artificial
  Synthetic oligonucleotide
gactaccatcggctatagatggaggagattgacatttaactgagtcgcaaat

SEQ ID NO: 396910 - DNA, 60 bp, Artificial
  Synthetic oligonucleotide
gactaccatgataaccgtaccgtcaggtggggtctgtgacctcatcaacacatatgcccg

SEQ ID NO: 396911 - DNA, 59 bp, Artificial
  Synthetic oligonucleotide
gactacccatggaaaagcgaggtaacttcatagtggggcagaactgctcattagtaatc

SEQ ID NO: 396912 - DNA, 57 bp, Artificial
  Synthetic oligonucleotide
gactaccctaccatctccctcaacacctactgttacatccattcaacgtttctagta

SEQ ID NO: 396913 - DNA, 55 bp, Artificial
  Synthetic oligonucleotide
gactaccgtagatcagtgcaacgaggaatattgctactcgccaacagagttggac

SEQ ID NO: 396914 - DNA, 56 bp, Artificial
  Synthetic oligonucleotide
gactaccgtgaggttgcgtgcttacctgaacacccccgggctccctgtctgtcaag

SEQ ID NO: 396915 - DNA, 58 bp, Artificial
  Synthetic oligonucleotide
gactacctccacaggggccataaaactcaaaatctggccagtgtcgaaccatctagag

SEQ ID NO: 396916 - DNA, 55 bp, Artificial
  Synthetic oligonucleotide
gactacctgatgatctacccctcggaccgtaaggacgttgagcgtgacatgtcac

SEQ ID NO: 396917 - DNA, 51 bp, Artificial
  Synthetic oligonucleotide
gactacctgcgctttctggggggcactatgtacttcatgcagcccagagag

SEQ ID NO: 396918 - DNA, 58 bp, Artificial
  Synthetic oligonucleotide
gactacctgtgtaattcccaccacctgtacagagacaagcactacttcgtgcggggtg

SEQ ID NO: 396919 - DNA, 57 bp, Artificial
  Synthetic oligonucleotide
gactacgaaccacctgtggtccatggctgtccacttccgccctcacagtctcctccc

SEQ ID NO: 396920 - DNA, 60 bp, Artificial
  Synthetic oligonucleotide
gactacgacagcgtgtatatcggcagcgacaaggtgtggccggacatcacgttcccctac

SEQ ID NO: 396921 - DNA, 50 bp, Artificial
  Synthetic oligonucleotide
gactacgactgctgctacacgtttcatgaaagaccttcactttactggga

SEQ ID NO: 396922 - DNA, 54 bp, Artificial
  Synthetic oligonucleotide
gactacgccacacgtcgtaacgctagcatggtacccgctgtcacacgcggactg

SEQ ID NO: 396923 - DNA, 57 bp, Artificial
  Synthetic oligonucleotide
gactacgtatatgcgttcgattggtccgggtttgatgcctccgttcaagaatgggaa

SEQ ID NO: 396924 - DNA, 51 bp, Artificial
  Synthetic oligonucleotide
gactacgtatgggtcgtccaccaacccaatgtatgtctcggacaccgttac

SEQ ID NO: 396925 - DNA, 58 bp, Artificial
  Synthetic oligonucleotide
gactacgtcgcgaaaatgtgcaacgcgttggggtgtgagtacttagttgtacgtcatg

SEQ ID NO: 396926 - DNA, 55 bp, Artificial
  Synthetic oligonucleotide
gactacgtcggggaagagactgagttccccacctaggtgtaggattatagatatg

SEQ ID NO: 396927 - DNA, 55 bp, Artificial
  Synthetic oligonucleotide
gactacgttctacgagcgtgctaccgagaccagtcgctggaaggtcacgggcacg

SEQ ID NO: 396928 - DNA, 54 bp, Artificial
  Synthetic oligonucleotide
gactacgttttgcaacgggaagaaactacgagtagagtacaacctggatccctc

SEQ ID NO: 396929 - DNA, 53 bp, Artificial
  Synthetic oligonucleotide
gactactaatgtatgtaagtgaaggcgaactcctccgaatgtttagagattat

SEQ ID NO: 396930 - DNA, 55 bp, Artificial
  Synthetic oligonucleotide
gactactacacattctccatagaacactcttcaagcgaaagtaatgtaactactt

SEQ ID NO: 396931 - DNA, 60 bp, Artificial
  Synthetic oligonucleotide
gactactacatgtgaggtggactatgggaagttgtgtggtcacgcaatgtggttctcaac

SEQ ID NO: 396932 - DNA, 55 bp, Artificial
  Synthetic oligonucleotide
gactactacccatttcccgaggtagtgtgtccatatccagtcagaactctgaacc

SEQ ID NO: 396933 - DNA, 55 bp, Artificial
  Synthetic oligonucleotide
gactactatcattaatccgtgtatacattggcgataaatgcgtctaaggagagag

SEQ ID NO: 396934 - DNA, 60 bp, Artificial
  Synthetic oligonucleotide
gactactatccagagaggtatcaatcgcatgtgctcctaggaattggattcgctgaacct

SEQ ID NO: 396935 - DNA, 55 bp, Artificial
  Synthetic oligonucleotide
gactactattgacacgtgatggaagtaacgatactgggccagagatattcagacc

SEQ ID NO: 396936 - DNA, 50 bp, Artificial
  Synthetic oligonucleotide
gactactattgacacgtgatggagggggaggcacaaatagcacaagtaat

SEQ ID NO: 396937 - DNA, 51 bp, Artificial
  Synthetic oligonucleotide
gactactcctgtttcgactctactctcccctcctgcgctttcgacctaatc

SEQ ID NO: 396938 - DNA, 60 bp, Artificial
  Synthetic oligonucleotide
gactactgagaagagtgaataatttgacaagagactgctttgcttttattgcttactggg

SEQ ID NO: 396939 - DNA, 60 bp, Artificial
  Synthetic oligonucleotide
gactactgcaatgagtgctcgtttgccgactcaggtgagcgccccctctgaggtttacac

SEQ ID NO: 396940 - DNA, 59 bp, Artificial
  Synthetic oligonucleotide
gactactgccacgataactcttctaccagatgcagaaaggttcagttttccgagagtta

SEQ ID NO: 396941 - DNA, 60 bp, Artificial
  Synthetic oligonucleotide
gactactggaatgatgatagtgaatgctacaacccgtgcttttacgtggagctaattaga

SEQ ID NO: 396942 - DNA, 60 bp, Artificial
  Synthetic oligonucleotide
gactactgggacgattcacaagcatttagaaacatggtaaatgtacgctcgttggcagcc

SEQ ID NO: 396943 - DNA, 60 bp, Artificial
  Synthetic oligonucleotide
gactactgtgtgatcttaacgtgattacgatcagaccaagaacagaagtgatacttaaag

SEQ ID NO: 396944 - DNA, 50 bp, Artificial
  Synthetic oligonucleotide
gactacttaagcgatagcgctttcgacgaagatgaaatgttacggcaagc

SEQ ID NO: 396945 - DNA, 56 bp, Artificial
  Synthetic oligonucleotide
gactacttagtacgatacctgttcagaggaatagggaccgcgtcctcctcttggta

SEQ ID NO: 396946 - DNA, 58 bp, Artificial
  Synthetic oligonucleotide
gactacttattgggggcttatgcctggggaaagagaagaacaattaggacatggagca

SEQ ID NO: 396947 - DNA, 55 bp, Artificial
  Synthetic oligonucleotide
gactacttctctctgaatcgtgagacgggagattcgatatataagtgggatgtgg

SEQ ID NO: 396948 - DNA, 53 bp, Artificial
  Synthetic oligonucleotide
gactacttggaacaactttgttgaacctagatgctaattatgttgaaacggca

SEQ ID NO: 396949 - DNA, 60 bp, Artificial
  Synthetic oligonucleotide
gactacttggataccatcaatggatgaacacggatatagatccagaagctatacgagaat

SEQ ID NO: 396950 - DNA, 55 bp, Artificial
  Synthetic oligonucleotide
gactactttcacataattactgtcttggctgcgttttctaggttgcactgccaat

SEQ ID NO: 396951 - DNA, 57 bp, Artificial
  Synthetic oligonucleotide
gactagaaggcacctctattttcgatccagttctttgtgaattgggttatcgctggt

SEQ ID NO: 396952 - DNA, 55 bp, Artificial
  Synthetic oligonucleotide
gactagaatctatagaagagaagttgagcatgatattaggactgcttcgtacact

SEQ ID NO: 396953 - DNA, 60 bp, Artificial
  Synthetic oligonucleotide
gactagacacaacaatctgtctttaatggtgattccaattgtaaatattactgcaacaag

SEQ ID NO: 396954 - DNA, 59 bp, Artificial
  Synthetic oligonucleotide
gactagacagggcaggtgggtatatattctcgtcggacactggtccaggccatttacaa

SEQ ID NO: 396955 - DNA, 55 bp, Artificial
  Synthetic oligonucleotide
gactagaccaatgattacattggacatttctgcaaatgcggaatcaattccagtg

SEQ ID NO: 396956 - DNA, 60 bp, Artificial
  Synthetic oligonucleotide
gactagacgttgcccacagtggagtcagcaaagcatctaacagcgatctcgttggtgcta

SEQ ID NO: 396957 - DNA, 60 bp, Artificial
  Synthetic oligonucleotide
gactagactaaccatctggtatccaatcttaattggcatgtagctataccaagtcattca

SEQ ID NO: 396958 - DNA, 60 bp, Artificial
  Synthetic oligonucleotide
gactagactctctcgtcttacggatcagccgcacaacaatcgcgatatagaacttaaccg

SEQ ID NO: 396959 - DNA, 55 bp, Artificial
  Synthetic oligonucleotide
gactagacttgataaatcataaatgcttgtgcaatggccacagatggatccttca

SEQ ID NO: 396960 - DNA, 60 bp, Artificial
  Synthetic oligonucleotide
gactagagccctgggagcatccagggagtcagcctaaaactgcttgtacaaattgctatt

SEQ ID NO: 396961 - DNA, 55 bp, Artificial
  Synthetic oligonucleotide
gactagaggggaagcgcatttgcacatgtgggttccccccctcaacgtccgaggg

SEQ ID NO: 396962 - DNA, 55 bp, Artificial
  Synthetic oligonucleotide
gactagaggttagaggagaccccgcgtaaaaaagcgcacggcccaacttggctga

SEQ ID NO: 396963 - DNA, 55 bp, Artificial
  Synthetic oligonucleotide
gactagagtttcgaaagtgttatctaaggttgacaccaatgtcaaacccgacttg

SEQ ID NO: 396964 - DNA, 55 bp, Artificial
  Synthetic oligonucleotide
gactagatctggaacgagtaaagcatgcaatgcatcaacaggtggccaatccttc

SEQ ID NO: 396965 - DNA, 57 bp, Artificial
  Synthetic oligonucleotide
gactagatggatcaagttaagagataaccttctgaaagatggttataagcctacctt

SEQ ID NO: 396966 - DNA, 60 bp, Artificial
  Synthetic oligonucleotide
gactagatggtcacctcggtaggaccgagatgccgcgcattagaggaaattcctgtgcgc

SEQ ID NO: 396967 - DNA, 51 bp, Artificial
  Synthetic oligonucleotide
gactagcaagatttactcttgttaggtgatcaaaaccggtcattgggagac

SEQ ID NO: 396968 - DNA, 58 bp, Artificial
  Synthetic oligonucleotide
gactagcacattgtaatattagtagaaaagattggaatgacactttataccaggtagt

SEQ ID NO: 396969 - DNA, 55 bp, Artificial
  Synthetic oligonucleotide
gactagcccggtcgtggtcgtggatcagtacccgacgaaggcgttgtggactagg

SEQ ID NO: 396970 - DNA, 60 bp, Artificial
  Synthetic oligonucleotide
gactagcggatggttcattacaacaggagacataaatactagaagagtagcatcagggac

SEQ ID NO: 396971 - DNA, 56 bp, Artificial
  Synthetic oligonucleotide
gactagcggttagaggagacccctcccttacaaatcgcagcaacaatgggggccca

SEQ ID NO: 396972 - DNA, 54 bp, Artificial
  Synthetic oligonucleotide
gactagctaccttttcgacacgcctgttatagttagacccaacgggtactttga

SEQ ID NO: 396973 - DNA, 60 bp, Artificial
  Synthetic oligonucleotide
gactagctccaataatccgagaatgaacaaacatgcttgcttgacaagcctgtttagata

SEQ ID NO: 396974 - DNA, 59 bp, Artificial
  Synthetic oligonucleotide
gactagctggcttttaaggctggtatgagcaagcttccttttgttgtagagcctcgtct

SEQ ID NO: 396975 - DNA, 58 bp, Artificial
  Synthetic oligonucleotide
gactagcttcctggctatcagagaacagaggggggcctgttcctagtgagaaggtcat

SEQ ID NO: 396976 - DNA, 60 bp, Artificial
  Synthetic oligonucleotide
gactagcttttcgatctgacttggcgtgatccgtgacatgcgtagtgtgacacctgcccc

SEQ ID NO: 396977 - DNA, 58 bp, Artificial
  Synthetic oligonucleotide
gactaggaacataagcctaaagggtatgtctggagaattacaagaagatggtcactta

SEQ ID NO: 396978 - DNA, 59 bp, Artificial
  Synthetic oligonucleotide
gactaggaattagcctgatagactttaaagaaccatggctagaaggcttcggaaatgca

SEQ ID NO: 396979 - DNA, 51 bp, Artificial
  Synthetic oligonucleotide
gactaggattaattctaaacctagagaaactgttaggggaaacacccttac

SEQ ID NO: 396980 - DNA, 55 bp, Artificial
  Synthetic oligonucleotide
gactaggcacgcgcaaaggtgtggccttatataggtctgaccttgagttcatatt

SEQ ID NO: 396981 - DNA, 55 bp, Artificial
  Synthetic oligonucleotide
gactaggccaaagggcttctatgcaaacaagaagtggattagtaataggagaaaa

SEQ ID NO: 396982 - DNA, 60 bp, Artificial
  Synthetic oligonucleotide
gactaggctaactacctggtatccgatcttaattaacatgtagctataccaagtcaatca

SEQ ID NO: 396983 - DNA, 52 bp, Artificial
  Synthetic oligonucleotide
gactagggtccggccggaccaatcccacacctgagccccctcagtgccttac

SEQ ID NO: 396984 - DNA, 53 bp, Artificial
  Synthetic oligonucleotide
gactaggtaccatcgaaacgaattaaaagtcctatttctctggtaacatcccc

SEQ ID NO: 396985 - DNA, 52 bp, Artificial
  Synthetic oligonucleotide
gactaggtcgatgtttgattctagtgaagtgtgcgaaaattcagctattgtc

SEQ ID NO: 396986 - DNA, 60 bp, Artificial
  Synthetic oligonucleotide
gactagtaacaatgaaacaaatctgactagtaaaaatgaatcagacatcgaacttccatg

SEQ ID NO: 396987 - DNA, 57 bp, Artificial
  Synthetic oligonucleotide
gactagtaacagtcccatgaacaatttactgagaacagccacgtggaaaagcgggac

SEQ ID NO: 396988 - DNA, 52 bp, Artificial
  Synthetic oligonucleotide
gactagtaatgtgtcaactagtattatcggaaattgtactgtgaaacaagca

SEQ ID NO: 396989 - DNA, 55 bp, Artificial
  Synthetic oligonucleotide
gactagtagcacaatactgtttcctgtggagcagatcggaacacttccttcaacc

SEQ ID NO: 396990 - DNA, 56 bp, Artificial
  Synthetic oligonucleotide
gactagtcgcagtggaaaaggcgacccccgcacacagggaagccctttccgatgcc

SEQ ID NO: 396991 - DNA, 55 bp, Artificial
  Synthetic oligonucleotide
gactagtcgtgctggatgaagcgaaacgaaggtttaaagtacgagcccaaagatt

SEQ ID NO: 396992 - DNA, 55 bp, Artificial
  Synthetic oligonucleotide
gactagtctagaaccgtggaaagactttaaagagtccacgcattgccaaacttaa

SEQ ID NO: 396993 - DNA, 53 bp, Artificial
  Synthetic oligonucleotide
gactagtctaggagacgataaatcctatgtgggtgagtcccactctggcgaga

SEQ ID NO: 396994 - DNA, 55 bp, Artificial
  Synthetic oligonucleotide
gactagtcttatagttcggaatttctggttgtacatccagtgctttgtcgaggca

SEQ ID NO: 396995 - DNA, 54 bp, Artificial
  Synthetic oligonucleotide
gactagtgacaaacccttcggaacgctgtacgtgttggagttgcccaaagatca

SEQ ID NO: 396996 - DNA, 59 bp, Artificial
  Synthetic oligonucleotide
gactagtggtgctaagtccttgtacgggcacgtgagctcgatactttccacctctagcg

SEQ ID NO: 396997 - DNA, 55 bp, Artificial
  Synthetic oligonucleotide
gactagtgtactgcagggcattgtcaacacagcaaggagagacaaagcactctta

SEQ ID NO: 396998 - DNA, 60 bp, Artificial
  Synthetic oligonucleotide
gactagttacactagcacctccataacctcagtcgatggatggttgacagtttggcagct

SEQ ID NO: 396999 - DNA, 59 bp, Artificial
  Synthetic oligonucleotide
gactagttgcaggctggtacgggtttcagcactcaaatgatcaaggggttggaatagcc

SEQ ID NO: 397000 - DNA, 60 bp, Artificial
  Synthetic oligonucleotide
gactagttgctggctggtatggtttccagcattcaaatgaccaaggggttggaatggctg

SEQ ID NO: 397001 - DNA, 53 bp, Artificial
  Synthetic oligonucleotide
gactataaaacaaaaggtacctacggtttatatgacagtcacggatatttaaa

SEQ ID NO: 397002 - DNA, 58 bp, Artificial
  Synthetic oligonucleotide
gactataaagctatccaacatctgtcaagagcgttcccttcggtcacagggtttataa

SEQ ID NO: 397003 - DNA, 56 bp, Artificial
  Synthetic oligonucleotide
gactataaattgtctcacaagtgcgattcatctatggatcctcagagtgcggtcta

SEQ ID NO: 397004 - DNA, 55 bp, Artificial
  Synthetic oligonucleotide
gactataagcacttgaaattcaacactctctccaaattagggagatttgctgtca

SEQ ID NO: 397005 - DNA, 53 bp, Artificial
  Synthetic oligonucleotide
gactataatgttgtaacaaaccttatggtttgcgttaaacccgatatcttcct

SEQ ID NO: 397006 - DNA, 55 bp, Artificial
  Synthetic oligonucleotide
gactatacatgcatcctgcagttctgactcctggtcgaatgagtgaaatgggtgc

SEQ ID NO: 397007 - DNA, 55 bp, Artificial
  Synthetic oligonucleotide
gactatacctctggtggccctcacactcacatcttacctgggcttgacacaacct

SEQ ID NO: 397008 - DNA, 58 bp, Artificial
  Synthetic oligonucleotide
gactatacgtcttggatcaaatccttggtacgcaaaatcattaacccagctttcaatg

SEQ ID NO: 397009 - DNA, 53 bp, Artificial
  Synthetic oligonucleotide
gactatacgttgaaaggggttgtagtgacaaaaaatgtgattgacgactttag

SEQ ID NO: 397010 - DNA, 52 bp, Artificial
  Synthetic oligonucleotide
gactatactatgtacaccaacagcctagcacaacactacgtgcctggtggag

SEQ ID NO: 397011 - DNA, 51 bp, Artificial
  Synthetic oligonucleotide
gactatactcgacgaggtgtattaacgtaatgaatgttattgtcgacttag

SEQ ID NO: 397012 - DNA, 55 bp, Artificial
  Synthetic oligonucleotide
gactatagcataatcgtgaagccggtaagtggaaagtttgagagtgtaacggaga

SEQ ID NO: 397013 - DNA, 59 bp, Artificial
  Synthetic oligonucleotide
gactatagcatatatagagtatagaaaattggtaagacaaagacaaatagacaggttaa

SEQ ID NO: 397014 - DNA, 60 bp, Artificial
  Synthetic oligonucleotide
gactatagcattgattccagttatgtatgctcagggctcgttggtgacacacccagaaat

SEQ ID NO: 397015 - DNA, 57 bp, Artificial
  Synthetic oligonucleotide
gactataggctaattaattgtaatgtctcaaccattaaacaggcttgtccaaaggtg

SEQ ID NO: 397016 - DNA, 54 bp, Artificial
  Synthetic oligonucleotide
gactatataacggggttaggagttcaagttactatcgaacacatagacggaaag

SEQ ID NO: 397017 - DNA, 58 bp, Artificial
  Synthetic oligonucleotide
gactatatattacctggatggaaactaacgtatgtagactataatggaaagaatacac

SEQ ID NO: 397018 - DNA, 60 bp, Artificial
  Synthetic oligonucleotide
gactatatcaagcttgtaaagcgcaggaaattataaaaatggactatgatgtacattggg

SEQ ID NO: 397019 - DNA, 57 bp, Artificial
  Synthetic oligonucleotide
gactatatggtccgggggttgcaaactatccccgatacagactagacacattgacgt

SEQ ID NO: 397020 - DNA, 55 bp, Artificial
  Synthetic oligonucleotide
gactatattcatcataggactgccacttccggaatacaaggaccccttccttgac

SEQ ID NO: 397021 - DNA, 59 bp, Artificial
  Synthetic oligonucleotide
gactatattgatccaataacccaagaagcttggaagccgattcaatttctgagttcaaa

SEQ ID NO: 397022 - DNA, 50 bp, Artificial
  Synthetic oligonucleotide
gactatatttgcttttcaatctaactttttacacgtattcaacatacacc

SEQ ID NO: 397023 - DNA, 55 bp, Artificial
  Synthetic oligonucleotide
gactatcacgcctgtgatctatactggcccaatccgtgtgagacagatggcgaac

SEQ ID NO: 397024 - DNA, 60 bp, Artificial
  Synthetic oligonucleotide
gactatcaggtccatgagctatcagctggcctattgttaagccatcattatggaaatccg

SEQ ID NO: 397025 - DNA, 55 bp, Artificial
  Synthetic oligonucleotide
gactatcatccaactcttacacatacgattacgatgctacccttcgctctcactc

SEQ ID NO: 397026 - DNA, 57 bp, Artificial
  Synthetic oligonucleotide
gactatccacaacctgaaacaatctctaatctgtataaggcaggggattacttaatc

SEQ ID NO: 397027 - DNA, 60 bp, Artificial
  Synthetic oligonucleotide
gactatcctagtccctgcaacggtgactggttacatgacatctgggactgggtctgtatc

SEQ ID NO: 397028 - DNA, 51 bp, Artificial
  Synthetic oligonucleotide
gactatcgcgtggtgatcgatagcttccgtaacctggtattcgggattaca

SEQ ID NO: 397029 - DNA, 60 bp, Artificial
  Synthetic oligonucleotide
gactatctacatacttaagaacttcatatctaaatactcttaagaaatgaccagtctgag

SEQ ID NO: 397030 - DNA, 59 bp, Artificial
  Synthetic oligonucleotide
gactatctactacctggatggaaattaacatatgtaggatataatggagaaaacacgcg

SEQ ID NO: 397031 - DNA, 60 bp, Artificial
  Synthetic oligonucleotide
gactatctattaccaggatggaaattaacatatgtgggctataatggaaaggacacgcga

SEQ ID NO: 397032 - DNA, 60 bp, Artificial
  Synthetic oligonucleotide
gactatcttctccacacgtcttacggcgtcgcacgaattacagcttgtggctggagatgt

SEQ ID NO: 397033 - DNA, 60 bp, Artificial
  Synthetic oligonucleotide
gactatgaagggagattgattcagaacagcataacaatagagagaatggttctctctgca

SEQ ID NO: 397034 - DNA, 60 bp, Artificial
  Synthetic oligonucleotide
gactatgaatattgcactggctatgctaccaatgtgttcgctccgacaccaggtggttat

SEQ ID NO: 397035 - DNA, 60 bp, Artificial
  Synthetic oligonucleotide
gactatgacccagggcagtttggatcacctaactttatgtgcagcagttgattcagacat

SEQ ID NO: 397036 - DNA, 55 bp, Artificial
  Synthetic oligonucleotide
gactatgaggcagtagtcagcatcaactacaatagcgctcaatacaagacggtga

SEQ ID NO: 397037 - DNA, 55 bp, Artificial
  Synthetic oligonucleotide
gactatgattataaatatcgactcaacttcagaaggcaccccaataacaagagga

SEQ ID NO: 397038 - DNA, 56 bp, Artificial
  Synthetic oligonucleotide
gactatgcaccctattgtgattttgagaaagaatatcctgagtgcacacaattcgc

SEQ ID NO: 397039 - DNA, 55 bp, Artificial
  Synthetic oligonucleotide
gactatgccaggacaactgccaaaggtaatagtgtcgcgcttaattacacccacg

SEQ ID NO: 397040 - DNA, 55 bp, Artificial
  Synthetic oligonucleotide
gactatgcggacgctattcccagtgatgaaactgagatgagcgctctcaaaggat

SEQ ID NO: 397041 - DNA, 60 bp, Artificial
  Synthetic oligonucleotide
gactatgctattgagtatcaatcattgaacgcgtacgtaacgatgagactgagagctata

SEQ ID NO: 397042 - DNA, 60 bp, Artificial
  Synthetic oligonucleotide
gactatgctgcctctggtgaccctacatcacctgatgacattgaatcccctaatgcaccg

SEQ ID NO: 397043 - DNA, 57 bp, Artificial
  Synthetic oligonucleotide
gactatgctggtctttgggttgtcttccacaaactcaattaagaatttgacaagtgg

SEQ ID NO: 397044 - DNA, 58 bp, Artificial
  Synthetic oligonucleotide
gactatggagaatgccgtaaattttattaaggaggctgttgagttggataagatagtg

SEQ ID NO: 397045 - DNA, 55 bp, Artificial
  Synthetic oligonucleotide
gactatggtggaatgcccacttatgacggtgtcaaaggaaagattaaggtaacgt

SEQ ID NO: 397046 - DNA, 56 bp, Artificial
  Synthetic oligonucleotide
gactatgtaattcgattctttattaatgctgtgtgcttgcatgttatgcttttaaa

SEQ ID NO: 397047 - DNA, 51 bp, Artificial
  Synthetic oligonucleotide
gactatgtgaagcgatgaacgctcacggaaccactatcttgaagggaacga

SEQ ID NO: 397048 - DNA, 55 bp, Artificial
  Synthetic oligonucleotide
gactatgttcctatacactctggcgttctttggcgcgctatcgggcgtccagctt

SEQ ID NO: 397049 - DNA, 60 bp, Artificial
  Synthetic oligonucleotide
gactatgttgcaggtgctatcgacgcagttggaattgtcttatcggttggccttggcgga

SEQ ID NO: 397050 - DNA, 59 bp, Artificial
  Synthetic oligonucleotide
gactattaaacctgtgcttgacctaacaaactccatcatacagcgggtggaatgaataa

SEQ ID NO: 397051 - DNA, 54 bp, Artificial
  Synthetic oligonucleotide
gactattaaagcatggtccagacacttataacagcaatctagcagcatttgagc

SEQ ID NO: 397052 - DNA, 55 bp, Artificial
  Synthetic oligonucleotide
gactattacccagcacgataccagacacacatgttactcggacatggatttgcag

SEQ ID NO: 397053 - DNA, 60 bp, Artificial
  Synthetic oligonucleotide
gactattatgcagttaattgaacaagtgcaattgtcaatgacaaatttgaggttgacctg

SEQ ID NO: 397054 - DNA, 59 bp, Artificial
  Synthetic oligonucleotide
gactattatgtcttcacagttaaggagaagtcatggctagtaaacagggattggtttca

SEQ ID NO: 397055 - DNA, 55 bp, Artificial
  Synthetic oligonucleotide
gactattcgcctcagaatagaaactcagatggaacctccggttgctataggacca

SEQ ID NO: 397056 - DNA, 58 bp, Artificial
  Synthetic oligonucleotide
gactattctcgcttgataccatgtcatggtttccaacaagcgacgtttcccgtggacc

SEQ ID NO: 397057 - DNA, 51 bp, Artificial
  Synthetic oligonucleotide
gactattctgagctagtctgggttattctcgggggtcgtaagaccttacta

SEQ ID NO: 397058 - DNA, 60 bp, Artificial
  Synthetic oligonucleotide
gactattgcatcatttatgcaagagactgttatgctgtatggcaccatggcacgctacct

SEQ ID NO: 397059 - DNA, 55 bp, Artificial
  Synthetic oligonucleotide
gactattgcttctctgaactttgttgacgtcacccgtctccgtgatgcgtcggat

SEQ ID NO: 397060 - DNA, 59 bp, Artificial
  Synthetic oligonucleotide
gactattgggacgattcgcaagcatttagaaatatggtgtacgtccgttcgttggcagc

SEQ ID NO: 397061 - DNA, 57 bp, Artificial
  Synthetic oligonucleotide
gactattgtactaagacaatggcagccggacgttatgaaaaagtgctttattactgg

SEQ ID NO: 397062 - DNA, 59 bp, Artificial
  Synthetic oligonucleotide
gactatttaattgcaagagaactaatagtactatcatattcaaatagatcaactttagc

SEQ ID NO: 397063 - DNA, 60 bp, Artificial
  Synthetic oligonucleotide
gactatttacccaagacatagggccaatgacactgtcaccttcataatggctgtcaagaa

SEQ ID NO: 397064 - DNA, 56 bp, Artificial
  Synthetic oligonucleotide
gactatttataatgtaaacaactctttgagctcgatcgttaatggctctttgcctc

SEQ ID NO: 397065 - DNA, 58 bp, Artificial
  Synthetic oligonucleotide
gactatttattaccaggatggaaactgacgtatgttggatataacggaaatgacacaa

SEQ ID NO: 397066 - DNA, 60 bp, Artificial
  Synthetic oligonucleotide
gactatttgacgcaaatctgcattggaagccaaaaaattattatactggtgtgtcgctgt

SEQ ID NO: 397067 - DNA, 58 bp, Artificial
  Synthetic oligonucleotide
gactatttggggccatagctggattcatagagggagtttggtcagggctagttgccgg

SEQ ID NO: 397068 - DNA, 60 bp, Artificial
  Synthetic oligonucleotide
gactatttggtcaaaacatgtactatcattcaatgggtcgttctggttacatcgtgcatg

SEQ ID NO: 397069 - DNA, 54 bp, Artificial
  Synthetic oligonucleotide
gactcaaaaaaaagccagctatgctacaattgctacacagttaagaagtataga

SEQ ID NO: 397070 - DNA, 56 bp, Artificial
  Synthetic oligonucleotide
gactcaaaatgagcaagtgttcaggttccagcagcgtccagactctcgaggatctg

SEQ ID NO: 397071 - DNA, 58 bp, Artificial
  Synthetic oligonucleotide
gactcaaacacgacattaattcaaatcgatgaatatacgttaggctgtcgttggattt

SEQ ID NO: 397072 - DNA, 58 bp, Artificial
  Synthetic oligonucleotide
gactcaaacgataacttcgttatggcttatcgataagttcgctatggctcacggattt

SEQ ID NO: 397073 - DNA, 60 bp, Artificial
  Synthetic oligonucleotide
gactcaaagcgttgcaggcgaccgcggtgatcgagtgtcaaatcggggacatcatccgta

SEQ ID NO: 397074 - DNA, 55 bp, Artificial
  Synthetic oligonucleotide
gactcaacaggtggtctttccctaacgaccaactggacctagctcgctacagggg

SEQ ID NO: 397075 - DNA, 60 bp, Artificial
  Synthetic oligonucleotide
gactcaacagtcactgagcgcgacatacgcactgagcatgacatctaccagagctgccaa

SEQ ID NO: 397076 - DNA, 58 bp, Artificial
  Synthetic oligonucleotide
gactcaaccttcgctattaaccacgatttgtaaccacgctgatggatgtcctaagtta

SEQ ID NO: 397077 - DNA, 60 bp, Artificial
  Synthetic oligonucleotide
gactcaactaatggcacaccatatacaaacgcagtgggttttatgcctaatctactggcc

SEQ ID NO: 397078 - DNA, 54 bp, Artificial
  Synthetic oligonucleotide
gactcaactcttgggcatacaggtaaatttaccctcagtcgggaaccttaacaa

SEQ ID NO: 397079 - DNA, 55 bp, Artificial
  Synthetic oligonucleotide
gactcaagaatgtacaactagaggcagcatacactactacatcatgtatcactca

SEQ ID NO: 397080 - DNA, 50 bp, Artificial
  Synthetic oligonucleotide
gactcaagcaactccccctgttagagagtcaaatcgccacaattgagcaa

SEQ ID NO: 397081 - DNA, 55 bp, Artificial
  Synthetic oligonucleotide
gactcaagcacttgtgtcgcctcgcctcacacaagacgcacaaggtcaatagtgg

SEQ ID NO: 397082 - DNA, 55 bp, Artificial
  Synthetic oligonucleotide
gactcaagcagagaacccaaaccaacaatgccttactggtgtcctatgctccaat

SEQ ID NO: 397083 - DNA, 55 bp, Artificial
  Synthetic oligonucleotide
gactcaaggaggtgaaatggcgcttaataaactctcgcaaccagtgcaacatccc

SEQ ID NO: 397084 - DNA, 60 bp, Artificial
  Synthetic oligonucleotide
gactcaatcaaaattgcttcaacagatttgtcatcatggttgtgcgtgcaaccactcttg

SEQ ID NO: 397085 - DNA, 55 bp, Artificial
  Synthetic oligonucleotide
gactcaatccgtgtcttacaatgcgtatgacacctctgatccgtccaatcctcgc

SEQ ID NO: 397086 - DNA, 60 bp, Artificial
  Synthetic oligonucleotide
gactcaatctccacaatatacacaatgccccaaggattatcccgacgcaagccatgtttc

SEQ ID NO: 397087 - DNA, 60 bp, Artificial
  Synthetic oligonucleotide
gactcaatggcacggccctcgagcctagtagagtcactagaggaggaagacgacccgcag

SEQ ID NO: 397088 - DNA, 53 bp, Artificial
  Synthetic oligonucleotide
gactcacagactcatacaagcagaaactaatggatctacagcctccgactacc

SEQ ID NO: 397089 - DNA, 55 bp, Artificial
  Synthetic oligonucleotide
gactcacagcactaacaagcaatttgttaaagtcatattccagaagtcgttctcc

SEQ ID NO: 397090 - DNA, 60 bp, Artificial
  Synthetic oligonucleotide
gactcacagggaggagctgcttacccatggaatgcagccaaaccatgacctcaggaagga

SEQ ID NO: 397091 - DNA, 60 bp, Artificial
  Synthetic oligonucleotide
gactcacaggggaatgcagccaaaccatgacctcaggaaggaaagtgcatgactcacagg

SEQ ID NO: 397092 - DNA, 55 bp, Artificial
  Synthetic oligonucleotide
gactcacagtagtttggcacaaccacttttgttattggctgcttgcctttgtacc

SEQ ID NO: 397093 - DNA, 55 bp, Artificial
  Synthetic oligonucleotide
gactcaccaactaattggttccatgacgattgagcccttcaaatatataaatcga

SEQ ID NO: 397094 - DNA, 52 bp, Artificial
  Synthetic oligonucleotide
gactcacccgttcccataggctgcatggtggaggtgggttgtccgtcaggtc

SEQ ID NO: 397095 - DNA, 60 bp, Artificial
  Synthetic oligonucleotide
gactcaccgcacgtcttggtcgcgctatcaagacacacttgtagactgacgtactacact

SEQ ID NO: 397096 - DNA, 59 bp, Artificial
  Synthetic oligonucleotide
gactcacctggcctcagttcaattgggcctgtaagcccaacccttgacattgaattgga

SEQ ID NO: 397097 - DNA, 60 bp, Artificial
  Synthetic oligonucleotide
gactcactaattggacataaatggtgcaacctttcagatgctcacaagaaagacacttat

SEQ ID NO: 397098 - DNA, 60 bp, Artificial
  Synthetic oligonucleotide
gactcactcctgaggagagtaataagaaggattatgcatccttgcaggccacattagcgg

SEQ ID NO: 397099 - DNA, 60 bp, Artificial
  Synthetic oligonucleotide
gactcactggatttcactgcgcgactcgtccgcttgacaggagaagctacggccttaaag

SEQ ID NO: 397100 - DNA, 55 bp, Artificial
  Synthetic oligonucleotide
gactcactgtcagatccagcgtcgtctgtatcaagaagttcatcagttagatcac

SEQ ID NO: 397101 - DNA, 60 bp, Artificial
  Synthetic oligonucleotide
gactcacttgccatcgttagcgatcgttttggtcagtattcatttgtcaatgaaggcatg

SEQ ID NO: 397102 - DNA, 60 bp, Artificial
  Synthetic oligonucleotide
gactcagaaagaatggcacctgtgcctgtggcttctttaagtcaataaacaggtccactg

SEQ ID NO: 397103 - DNA, 59 bp, Artificial
  Synthetic oligonucleotide
gactcagaaaggttctttgacagatcctcagctttgaccactagtcttttaatgcccac

SEQ ID NO: 397104 - DNA, 60 bp, Artificial
  Synthetic oligonucleotide
gactcagatctaaatggccacacaggtaattgtgtggtcccaaagacctggcccacattg

SEQ ID NO: 397105 - DNA, 60 bp, Artificial
  Synthetic oligonucleotide
gactcagatctagatgaccgcacagataattatgtggtcccagtgatctggcccacattg

SEQ ID NO: 397106 - DNA, 55 bp, Artificial
  Synthetic oligonucleotide
gactcagcaatagctaaggcagagaaacgactagatattgctattatgcctagac

SEQ ID NO: 397107 - DNA, 60 bp, Artificial
  Synthetic oligonucleotide
gactcagccctatgtgcccctactattgatgccgagtcacctggatccagtacagtggac

SEQ ID NO: 397108 - DNA, 60 bp, Artificial
  Synthetic oligonucleotide
gactcagcgtggttagtgcatgcaaggtggcttacactctacaaactgatcctacatcac

SEQ ID NO: 397109 - DNA, 58 bp, Artificial
  Synthetic oligonucleotide
gactcagcttaattacatccataaagaatcagactcttggttaaagaagtttactgaa

SEQ ID NO: 397110 - DNA, 60 bp, Artificial
  Synthetic oligonucleotide
gactcagcttcaatataccagcgtggatcacatgcgtttccacgtcctaagggagagctc

SEQ ID NO: 397111 - DNA, 58 bp, Artificial
  Synthetic oligonucleotide
gactcagcttctaatcccagtgtatttttccaacccaagagtggattcccacgcttca

SEQ ID NO: 397112 - DNA, 55 bp, Artificial
  Synthetic oligonucleotide
gactcaggactattccaccgacatgatgactaaggcggacgtggtggacccagca

SEQ ID NO: 397113 - DNA, 60 bp, Artificial
  Synthetic oligonucleotide
gactcaggatgtcagtcagatgaagagggattcagagtaggagtctagatggaacgaaga

SEQ ID NO: 397114 - DNA, 60 bp, Artificial
  Synthetic oligonucleotide
gactcagggagccttactgaatgacaagcactccaatgggactgtcaaagacagaagccc

SEQ ID NO: 397115 - DNA, 60 bp, Artificial
  Synthetic oligonucleotide
gactcagggtcgaccttaactggtttatactctgtcgagtttgggcagatagcagagcca

SEQ ID NO: 397116 - DNA, 60 bp, Artificial
  Synthetic oligonucleotide
gactcagtaatcgactgtaatacatgtgtcacccaaacagtcgatttcagcttggaccct

SEQ ID NO: 397117 - DNA, 55 bp, Artificial
  Synthetic oligonucleotide
gactcagtggaacccggcagtagttaagaggtgcaacattaagggcggacttcca

SEQ ID NO: 397118 - DNA, 60 bp, Artificial
  Synthetic oligonucleotide
gactcagttataacttactcagaacaaaagctatggtttcctacagttgcatggcaacta

SEQ ID NO: 397119 - DNA, 55 bp, Artificial
  Synthetic oligonucleotide
gactcatacggtaaatccatatcctacatcaaccaaaggggtgacctgacacggc

SEQ ID NO: 397120 - DNA, 60 bp, Artificial
  Synthetic oligonucleotide
gactcatacgttcaaataccagatggcaatgttattaagaaaatacagtatggagctgta

SEQ ID NO: 397121 - DNA, 54 bp, Artificial
  Synthetic oligonucleotide
gactcatatatatttaacgacttaacagtaaccgctccgaccctcaacgaaagg

SEQ ID NO: 397122 - DNA, 60 bp, Artificial
  Synthetic oligonucleotide
gactcatatgccctaacaggagacgaccacaaggtttggggagcaacacaccatacatac

SEQ ID NO: 397123 - DNA, 60 bp, Artificial
  Synthetic oligonucleotide
gactcatcaagttcctctatcaaagcagtaagtagtacatgtcatgcaaccgctaatcat

SEQ ID NO: 397124 - DNA, 55 bp, Artificial
  Synthetic oligonucleotide
gactcatcaatgctgagccctatgacactgctacatcaggagaacctcttgagat

SEQ ID NO: 397125 - DNA, 60 bp, Artificial
  Synthetic oligonucleotide
gactcatctgacagcgagtatagtggctccagaagtaacatacaactagtgacggcggac

SEQ ID NO: 397126 - DNA, 60 bp, Artificial
  Synthetic oligonucleotide
gactcatgagttggtttggagggcctcttaaaaccatactcctcatatgcctgtatgttg

SEQ ID NO: 397127 - DNA, 55 bp, Artificial
  Synthetic oligonucleotide
gactcatgctttcctaagaccggaactctccttccggcactttcacccgcctgcc

SEQ ID NO: 397128 - DNA, 60 bp, Artificial
  Synthetic oligonucleotide
gactcatggatcacataatggaactagatacaataatacagacgctacgacaacgcccgg

SEQ ID NO: 397129 - DNA, 55 bp, Artificial
  Synthetic oligonucleotide
gactcatggcgttaaacagttacaaccatatgggtcagggtattcaccatgcaac

SEQ ID NO: 397130 - DNA, 60 bp, Artificial
  Synthetic oligonucleotide
gactcatggctcaggggacaagtccaacatgcggaagctctccaagaacaactggaatgg

SEQ ID NO: 397131 - DNA, 60 bp, Artificial
  Synthetic oligonucleotide
gactcatgtgcgatatgtttcgagagttacgattaccagcgagatatctcacgcgctgtt

SEQ ID NO: 397132 - DNA, 55 bp, Artificial
  Synthetic oligonucleotide
gactcatgtggtcaatcgtttcctttaccacacctgtttgtttggaaggggtgca

SEQ ID NO: 397133 - DNA, 60 bp, Artificial
  Synthetic oligonucleotide
gactcattagtcattagaaacagtctgaagcaactagccaggattccctactgcaactac

SEQ ID NO: 397134 - DNA, 60 bp, Artificial
  Synthetic oligonucleotide
gactcattctctagttcatttgctgaacttgggcttaagtatgatttcactcaaaggcac

SEQ ID NO: 397135 - DNA, 59 bp, Artificial
  Synthetic oligonucleotide
gactcattgcaacatagtgtttgaattaaacaaacacgcgtcgttgaatttcgcgatcc

SEQ ID NO: 397136 - DNA, 51 bp, Artificial
  Synthetic oligonucleotide
gactcatttagcgacataatgccaaagagatctaagacgtgtaagagagta

SEQ ID NO: 397137 - DNA, 58 bp, Artificial
  Synthetic oligonucleotide
gactccaaccagtcttggattgaggatatctctttcgtacactcatacgtcttaaccc

SEQ ID NO: 397138 - DNA, 58 bp, Artificial
  Synthetic oligonucleotide
gactccaactatgttaaccaagttcgtggtcttatagccacagcgattttaatagctg

SEQ ID NO: 397139 - DNA, 60 bp, Artificial
  Synthetic oligonucleotide
gactccaatcacgattatgacaagtgggtacgcactgcattatcttgcgaataatgcaca

SEQ ID NO: 397140 - DNA, 60 bp, Artificial
  Synthetic oligonucleotide
gactccaatcctctgatgactttgctcttatagtgaatgctccgaatcatgagggcatac

SEQ ID NO: 397141 - DNA, 58 bp, Artificial
  Synthetic oligonucleotide
gactccacccaagactccggtgctgcgtattatggggccacttccatcaacgatttcg

SEQ ID NO: 397142 - DNA, 55 bp, Artificial
  Synthetic oligonucleotide
gactccaccccttctgttcagcccgggtctctggataccgactaactggaggatc

SEQ ID NO: 397143 - DNA, 60 bp, Artificial
  Synthetic oligonucleotide
gactccactaatggagtcaggttggtcagatacagctcatggtgttggcgagattccaat

SEQ ID NO: 397144 - DNA, 55 bp, Artificial
  Synthetic oligonucleotide
gactccactatgtattgcaatgaggtgtaataagaatgaaacagacaaatgggga

SEQ ID NO: 397145 - DNA, 59 bp, Artificial
  Synthetic oligonucleotide
gactccacttacacaattcaaggacttagattgtctaacgtgaggtatgaagcaagacc

SEQ ID NO: 397146 - DNA, 59 bp, Artificial
  Synthetic oligonucleotide
gactccagaatgatggagttgagaactcagagcttttccaactggttaagagacatttg

SEQ ID NO: 397147 - DNA, 60 bp, Artificial
  Synthetic oligonucleotide
gactccagcactcttgaactgagaagcagatattgggctataaggaccaggagtggagga

SEQ ID NO: 397148 - DNA, 60 bp, Artificial
  Synthetic oligonucleotide
gactccaggatcagcacaatttcttaccactgatgatgcacaatcaccctcagctttgcc

SEQ ID NO: 397149 - DNA, 55 bp, Artificial
  Synthetic oligonucleotide
gactccagtgtggttacatcaggtgcacctaggcctacgtttactggcacgtctg

SEQ ID NO: 397150 - DNA, 60 bp, Artificial
  Synthetic oligonucleotide
gactccatgtcagactcataccccttgcaggaaaagcgaatattctggggtcagtggtgt

SEQ ID NO: 397151 - DNA, 60 bp, Artificial
  Synthetic oligonucleotide
gactccatgtgtcgccagcacacgttgacgactacgaggagtgcactcaccaacccgctt

SEQ ID NO: 397152 - DNA, 55 bp, Artificial
  Synthetic oligonucleotide
gactccatttggacaacagcgcgtttttaaagagaaagtggacacgagaacccaa

SEQ ID NO: 397153 - DNA, 56 bp, Artificial
  Synthetic oligonucleotide
gactcccaagccgatgttacctgtgttccgaaaagcttgcttcaaggagaagaacc

SEQ ID NO: 397154 - DNA, 51 bp, Artificial
  Synthetic oligonucleotide
gactcccaatatgtgttgggaatcataaattcccaaccagaccaaagtgag

SEQ ID NO: 397155 - DNA, 54 bp, Artificial
  Synthetic oligonucleotide
gactccccaagcaacgtcaatggaggacccggagtgaagggatttggtttcaaa

SEQ ID NO: 397156 - DNA, 58 bp, Artificial
  Synthetic oligonucleotide
gactccccagactcggtagaacaatagaacatgagctcataggtcatttactgtagcc

SEQ ID NO: 397157 - DNA, 55 bp, Artificial
  Synthetic oligonucleotide
gactcccctgtgcgaggcacgaccgggtgcgattctacgagacgacaccatgagc

SEQ ID NO: 397158 - DNA, 60 bp, Artificial
  Synthetic oligonucleotide
gactccctaaccagtcaaatgactgctagcgacatcattactaatcagcgtcatatgcaa

SEQ ID NO: 397159 - DNA, 54 bp, Artificial
  Synthetic oligonucleotide
gactccgaacggacaaacaccggagtcccgtccggaatccaagcggagtccaga

SEQ ID NO: 397160 - DNA, 55 bp, Artificial
  Synthetic oligonucleotide
gactccgagaatacacaggtgagtcgagcctacgtgatgagatcggacgactgtg

SEQ ID NO: 397161 - DNA, 60 bp, Artificial
  Synthetic oligonucleotide
gactccgagacatcgggctatttatccagagggctggatgctgagatacgcgtaaacaag

SEQ ID NO: 397162 - DNA, 60 bp, Artificial
  Synthetic oligonucleotide
gactccgatgtgttaccagaatccgacgatgcgcttagttcggtcgtggtggattgactc

SEQ ID NO: 397163 - DNA, 55 bp, Artificial
  Synthetic oligonucleotide
gactccgccgggtgcgtggcggaagggtatctcgccgaagggtggttatcaatca

SEQ ID NO: 397164 - DNA, 59 bp, Artificial
  Synthetic oligonucleotide
gactccgctctctgggcccccacaatcgaagcagaatcccctgggtctagaacgctggc

SEQ ID NO: 397165 - DNA, 55 bp, Artificial
  Synthetic oligonucleotide
gactccggtacaggtattaatattaacagcactcaaggggaggctcccttgggga

SEQ ID NO: 397166 - DNA, 52 bp, Artificial
  Synthetic oligonucleotide
gactccggtcgttctagtgacgaacgacccccaatacgtccaacgtgcccac

SEQ ID NO: 397167 - DNA, 55 bp, Artificial
  Synthetic oligonucleotide
gactccgtcaggctaggcctgggaactagggtgcgaactcccacaggtcgtgatc

SEQ ID NO: 397168 - DNA, 56 bp, Artificial
  Synthetic oligonucleotide
gactccgtcgtggagtcctttgaggaagctacatccgttgtcgggtgtattataaa

SEQ ID NO: 397169 - DNA, 56 bp, Artificial
  Synthetic oligonucleotide
gactcctagtttccaagcgatgtaccccgctccccctatggcttacagagacccaa

SEQ ID NO: 397170 - DNA, 60 bp, Artificial
  Synthetic oligonucleotide
gactcctcaagagattcctcagccccagtggactcccgaagaagatcaaaaagcacgcga

SEQ ID NO: 397171 - DNA, 55 bp, Artificial
  Synthetic oligonucleotide
gactcctcacttcttgagtatgcatccaaatgtttatctgactcatcacagagca

SEQ ID NO: 397172 - DNA, 56 bp, Artificial
  Synthetic oligonucleotide
gactcctcaggccaattttcaccctctcccccgtcgtgcttgacacggccccctgc

SEQ ID NO: 397173 - DNA, 60 bp, Artificial
  Synthetic oligonucleotide
gactcctctctagcacagatcacgagcacacgagcgcgccacttgaaggagatagagtcc

SEQ ID NO: 397174 - DNA, 51 bp, Artificial
  Synthetic oligonucleotide
gactccttacacaatctggggcaagtagatgttagtgacctaggagaagga

SEQ ID NO: 397175 - DNA, 55 bp, Artificial
  Synthetic oligonucleotide
gactccttcgaatcctctcccttttgggagttggaggaagactgggttgcaccaa

SEQ ID NO: 397176 - DNA, 55 bp, Artificial
  Synthetic oligonucleotide
gactccttctacagataggaggtacataaattgtcatgtatcttttggcttgagc

SEQ ID NO: 397177 - DNA, 55 bp, Artificial
  Synthetic oligonucleotide
gactccttggtcttactatagatcagtctacagttggtgcaagtggcgtctatcc

SEQ ID NO: 397178 - DNA, 55 bp, Artificial
  Synthetic oligonucleotide
gactccttggtttctacccggaatattcgtgtctgcgttggcatcgatcctctgg

SEQ ID NO: 397179 - DNA, 51 bp, Artificial
  Synthetic oligonucleotide
gactccttgtttttgtcgttagaacgacgtcggcaaatgaaacgggttcgg

SEQ ID NO: 397180 - DNA, 53 bp, Artificial
  Synthetic oligonucleotide
gactcgaaaatgggaatattagcacgcgcattgcagcgggaggcttcagagag

SEQ ID NO: 397181 - DNA, 57 bp, Artificial
  Synthetic oligonucleotide
gactcgaacattcccacatgggccaaccatttgatacggccgaatcttgagagtaca

SEQ ID NO: 397182 - DNA, 60 bp, Artificial
  Synthetic oligonucleotide
gactcgaccatacttgcacatccgatctgccagtggaagcttgtgggcatgttgcagcct

SEQ ID NO: 397183 - DNA, 57 bp, Artificial
  Synthetic oligonucleotide
gactcgacccatcgtaccaaagttttctaacagaggtgactcgactattgttcgcaa

SEQ ID NO: 397184 - DNA, 55 bp, Artificial
  Synthetic oligonucleotide
gactcgagcgagatgtctccggcatatcggctagcgttagcggaatcgattcgcg

SEQ ID NO: 397185 - DNA, 60 bp, Artificial
  Synthetic oligonucleotide
gactcgaggagagcgttgtgatctggaggatagggataggtcagagcttagcccgctgct

SEQ ID NO: 397186 - DNA, 60 bp, Artificial
  Synthetic oligonucleotide
gactcgatctatccgtcgggctcagtgatgtgctcggaccttccgtgcttgtgaaggcga

SEQ ID NO: 397187 - DNA, 55 bp, Artificial
  Synthetic oligonucleotide
gactcgatggtaccaaggctacagagggcttcagaattgtacacagtcctcttgt

SEQ ID NO: 397188 - DNA, 55 bp, Artificial
  Synthetic oligonucleotide
gactcgcaaggcattgcgttttaaatcaccgtttcgactcccctcccaatccgtg

SEQ ID NO: 397189 - DNA, 56 bp, Artificial
  Synthetic oligonucleotide
gactcgcaagtgtctttaggttcggcaggtaataggtggactacggtgtacgcgac

SEQ ID NO: 397190 - DNA, 55 bp, Artificial
  Synthetic oligonucleotide
gactcgccactggtagacggtagctgctcggaaggtgagtagtggcgacgtttgg

SEQ ID NO: 397191 - DNA, 59 bp, Artificial
  Synthetic oligonucleotide
gactcgccatcatttctaggctgtaggataataaatggacgccagctcgtccctaaccg

SEQ ID NO: 397192 - DNA, 58 bp, Artificial
  Synthetic oligonucleotide
gactcgccgcggattagtctccgttaggcgtggcatcaggggaaatgaagtcgaccta

SEQ ID NO: 397193 - DNA, 60 bp, Artificial
  Synthetic oligonucleotide
gactcgcgatcaggctatgagacctttaaggtcattgatggttgggctactgctaattct

SEQ ID NO: 397194 - DNA, 60 bp, Artificial
  Synthetic oligonucleotide
gactcgcgcggcgccatattgcgacggcagtataatctgtccacgtccccgcttacgtca

SEQ ID NO: 397195 - DNA, 57 bp, Artificial
  Synthetic oligonucleotide
gactcgctaactctttccgttcgtgaaatgtggatgtcgcgtatttctcagatgaac

SEQ ID NO: 397196 - DNA, 55 bp, Artificial
  Synthetic oligonucleotide
gactcgctctggcaactctctctggtgtatcggaacccaatatatagggagaccc

SEQ ID NO: 397197 - DNA, 60 bp, Artificial
  Synthetic oligonucleotide
gactcgctgagcggaatccgacgtgccttatcgcgtttgtgcaacttgataagatacatc

SEQ ID NO: 397198 - DNA, 60 bp, Artificial
  Synthetic oligonucleotide
gactcgctgcgtgatgaagcgccccggacgggaccttactatcgatatgacttgaatctg

SEQ ID NO: 397199 - DNA, 59 bp, Artificial
  Synthetic oligonucleotide
gactcggaaaacacacagatgagtgaggcctacgtggagcgcgctgacgtgtgcaaaca

SEQ ID NO: 397200 - DNA, 57 bp, Artificial
  Synthetic oligonucleotide
gactcggacgcgactcgtgagtggacacctcgttctttattggggggtgcactctag

SEQ ID NO: 397201 - DNA, 55 bp, Artificial
  Synthetic oligonucleotide
gactcggaggacttcattattgagtacggaacaactgatgacgaagtatacatac

SEQ ID NO: 397202 - DNA, 60 bp, Artificial
  Synthetic oligonucleotide
gactcggaggactttattatagagtatgggacaactgacgatgaagtatacatacaaaga

SEQ ID NO: 397203 - DNA, 56 bp, Artificial
  Synthetic oligonucleotide
gactcggcacgtaccgatatgtcacccccggtgaaagaccgtctgggatgtttgac

SEQ ID NO: 397204 - DNA, 55 bp, Artificial
  Synthetic oligonucleotide
gactcgggatgctttccctctctaaaactcttttacttgacattatcttggtcct

SEQ ID NO: 397205 - DNA, 55 bp, Artificial
  Synthetic oligonucleotide
gactcggtcgctactggcacagaccgtttaaagtgtcaccacaacatgaactgag

SEQ ID NO: 397206 - DNA, 57 bp, Artificial
  Synthetic oligonucleotide
gactcggtgatagattgtaacacatctgtcatccagacagtcgacttcagcttggat

SEQ ID NO: 397207 - DNA, 58 bp, Artificial
  Synthetic oligonucleotide
gactcggtggtggtagactcactttcgctactactagtggtgtcataggcgttagcgt

SEQ ID NO: 397208 - DNA, 57 bp, Artificial
  Synthetic oligonucleotide
gactcgtaacaaggaagaattatggttcacgtctcacagaggagtcttaaagggtga

SEQ ID NO: 397209 - DNA, 60 bp, Artificial
  Synthetic oligonucleotide
gactcgtacaatttagatcttttgatctccaatgttgggagacgggatgatattatatct

SEQ ID NO: 397210 - DNA, 55 bp, Artificial
  Synthetic oligonucleotide
gactcgtacacaggtgaggaggttgctattgcggatgagttcaacacttgtggcg

SEQ ID NO: 397211 - DNA, 60 bp, Artificial
  Synthetic oligonucleotide
gactcgtcactgcagctgagtgcacaaacaaagggcgggctgtgcatacaacttgtactg

SEQ ID NO: 397212 - DNA, 55 bp, Artificial
  Synthetic oligonucleotide
gactcgtcctgatgatcttctcgaggccttgacagctttagggaaggggaccgcc

SEQ ID NO: 397213 - DNA, 58 bp, Artificial
  Synthetic oligonucleotide
gactcgtggacgaacgatgagaaaagggcatcacgttacacaaactatatttgtggaa

SEQ ID NO: 397214 - DNA, 58 bp, Artificial
  Synthetic oligonucleotide
gactcgtgtcattgaagctagcagtgtaaatgacaccgttttgtttagatcagtctat

SEQ ID NO: 397215 - DNA, 57 bp, Artificial
  Synthetic oligonucleotide
gactcgttagtgcaagcgggtgacgctctgttaatgtcggtcgacgagggcgagttt

SEQ ID NO: 397216 - DNA, 60 bp, Artificial
  Synthetic oligonucleotide
gactcgttatccgtcatgcgcttgtcgtgaatctccactatgacggaccctgtggcgtta

SEQ ID NO: 397217 - DNA, 60 bp, Artificial
  Synthetic oligonucleotide
gactcgttgtccgtcattctcttgtcatgaatctccactatgactgctccagtggcgttg

SEQ ID NO: 397218 - DNA, 54 bp, Artificial
  Synthetic oligonucleotide
gactctaaaacttggttgacgaggcatattggtgtcccttaaacctctacggaa

SEQ ID NO: 397219 - DNA, 60 bp, Artificial
  Synthetic oligonucleotide
gactctaagagcctctgacttactgcctgcgttaagtgccgcggcgtaagcgtcgttggc

SEQ ID NO: 397220 - DNA, 55 bp, Artificial
  Synthetic oligonucleotide
gactctaatgaagcatcgtgctgagatggagagtcatcctcagggccctctaggc

SEQ ID NO: 397221 - DNA, 54 bp, Artificial
  Synthetic oligonucleotide
gactctacacaaaaactagatatgtctgaattggccgatcttatattgaatgaa

SEQ ID NO: 397222 - DNA, 58 bp, Artificial
  Synthetic oligonucleotide
gactctacaggcgaagtcccagccaccggccaactcaatcttatcccacagggagtaa

SEQ ID NO: 397223 - DNA, 59 bp, Artificial
  Synthetic oligonucleotide
gactctacggaaatggagtagtcactaaatcaggtgattacgtcagtgctataacgcaa

SEQ ID NO: 397224 - DNA, 60 bp, Artificial
  Synthetic oligonucleotide
gactctacggagtgatgtctgtagttgtagtccgcgataaatcgccaaagatttattcag

SEQ ID NO: 397225 - DNA, 57 bp, Artificial
  Synthetic oligonucleotide
gactctacgttagttcaaccaactttagatggtccgtatcagccaactacattcaac

SEQ ID NO: 397226 - DNA, 58 bp, Artificial
  Synthetic oligonucleotide
gactctagagatttgctcgtaccgagatcgacaatttagatctgctcttttggctcga

SEQ ID NO: 397227 - DNA, 60 bp, Artificial
  Synthetic oligonucleotide
gactctagtgattataaggtatacttgcgccacgtagaggaatttgacatttcagttata

SEQ ID NO: 397228 - DNA, 60 bp, Artificial
  Synthetic oligonucleotide
gactctagttcgctcttgagtatgagagcaagatcccgaagatatactaagaactacaaa

SEQ ID NO: 397229 - DNA, 60 bp, Artificial
  Synthetic oligonucleotide
gactctatatagatcacctagtaagaaaaggcataagtatgtcatttcttctgataaacc

SEQ ID NO: 397230 - DNA, 55 bp, Artificial
  Synthetic oligonucleotide
gactctatcaagttgctagaagccctgtgcagtgagagaatgatctcactaggtc

SEQ ID NO: 397231 - DNA, 60 bp, Artificial
  Synthetic oligonucleotide
gactctatgcatacaactgactgttttatcgctttggtgcacgctatcagagagatcaga

SEQ ID NO: 397232 - DNA, 56 bp, Artificial
  Synthetic oligonucleotide
gactctatgcttcttgaatctagtagaggtaatttggaattagttgttgtgaaatt

SEQ ID NO: 397233 - DNA, 56 bp, Artificial
  Synthetic oligonucleotide
gactctcaagacaactatctttgatccaatcaactccagaataagtacgattgaac

SEQ ID NO: 397234 - DNA, 60 bp, Artificial
  Synthetic oligonucleotide
gactctcaagggcctgctttgcctatagaaggccttaattaccacatgttcgctgtgggc

SEQ ID NO: 397235 - DNA, 55 bp, Artificial
  Synthetic oligonucleotide
gactctcacgcagatgcctaacgtgcggttatacgtaggtgtgtttccgtcggtc

SEQ ID NO: 397236 - DNA, 60 bp, Artificial
  Synthetic oligonucleotide
gactctcataattctttagaaggctgtggtgattggtatattgtgcatgaagcggagtgc

SEQ ID NO: 397237 - DNA, 55 bp, Artificial
  Synthetic oligonucleotide
gactctctaaaactctaaagcaattggggactggggtcctatatatactagaacc

SEQ ID NO: 397238 - DNA, 56 bp, Artificial
  Synthetic oligonucleotide
gactctctactcgcctcctttggcaccctcactctctgggtggtggccccccttgt

SEQ ID NO: 397239 - DNA, 60 bp, Artificial
  Synthetic oligonucleotide
gactctctagtggagataaagcgcactgacgtagaagggaactgggctttgacaggaggc

SEQ ID NO: 397240 - DNA, 60 bp, Artificial
  Synthetic oligonucleotide
gactctctggagcagaacaaatgatgctggatcagacagagtgatagtgtcacctctggc

SEQ ID NO: 397241 - DNA, 60 bp, Artificial
  Synthetic oligonucleotide
gactctgacaccaatgccaaccagtaccaacttaacccacaggcttgatgatggattaac

SEQ ID NO: 397242 - DNA, 60 bp, Artificial
  Synthetic oligonucleotide
gactctgagtattacgctaggcaatatcgccgtgcttatggtaatgagataggcgggctt

SEQ ID NO: 397243 - DNA, 60 bp, Artificial
  Synthetic oligonucleotide
gactctgataccccaattccaacgaccatcatggctaagaatgaggtcttctgcgtagat

SEQ ID NO: 397244 - DNA, 53 bp, Artificial
  Synthetic oligonucleotide
gactctgattttgatgagggtttcacgttggctaatatctcagtacgtacttt

SEQ ID NO: 397245 - DNA, 60 bp, Artificial
  Synthetic oligonucleotide
gactctgcacagggtagtgagtatgattatgtcatatacacacagacttctgatacacag

SEQ ID NO: 397246 - DNA, 55 bp, Artificial
  Synthetic oligonucleotide
gactctgccataagaaaagccctcttaggatataaagttagccctaggtgtaact

SEQ ID NO: 397247 - DNA, 54 bp, Artificial
  Synthetic oligonucleotide
gactctgctataagaaatgccctattaggacgtagagtcagtcctagttgtgac

SEQ ID NO: 397248 - DNA, 55 bp, Artificial
  Synthetic oligonucleotide
gactctggaaagttgagagtcgctatgggcgtgcacagtgtgtacgatatgacac

SEQ ID NO: 397249 - DNA, 55 bp, Artificial
  Synthetic oligonucleotide
gactctggagaattatctcttgtatagggtgttacctagttatctagacgctacc

SEQ ID NO: 397250 - DNA, 55 bp, Artificial
  Synthetic oligonucleotide
gactctggctcgtgctaaactgactgccaactatgttccatctagtgaccgtgtg

SEQ ID NO: 397251 - DNA, 54 bp, Artificial
  Synthetic oligonucleotide
gactctgtcatagactgcaatgttgcggtcactcaggtagtcgacttcagccta

SEQ ID NO: 397252 - DNA, 60 bp, Artificial
  Synthetic oligonucleotide
gactctgttggctaaatctgtgttcaacagtttgtatgcatctccacaacttgagggatt

SEQ ID NO: 397253 - DNA, 55 bp, Artificial
  Synthetic oligonucleotide
gactcttaatcgttctgaacactttcttgaaagttgcggctgaccaccgtacagg

SEQ ID NO: 397254 - DNA, 60 bp, Artificial
  Synthetic oligonucleotide
gactcttacgactgttcaagttcaatctactacgctctattgagtggaggagccgtgtct

SEQ ID NO: 397255 - DNA, 59 bp, Artificial
  Synthetic oligonucleotide
gactcttagtgatttcacaaggttccccaatctgaaagaagccatatcctggcctcttg

SEQ ID NO: 397256 - DNA, 60 bp, Artificial
  Synthetic oligonucleotide
gactcttcaatgaaaacagactgtggcgcaatatatggtccaagagcaacgatggtatgg

SEQ ID NO: 397257 - DNA, 55 bp, Artificial
  Synthetic oligonucleotide
gactcttccgactgagcccttacgccgtaggatccagcgctaccacgggaaggac

SEQ ID NO: 397258 - DNA, 50 bp, Artificial
  Synthetic oligonucleotide
gactcttctattgtgtctatgatagaagaaacaagttttattgagtcagg

SEQ ID NO: 397259 - DNA, 60 bp, Artificial
  Synthetic oligonucleotide
gactcttctcgcccacggagctcgtgcatctcacgaattacttcctgctcctggggcggc

SEQ ID NO: 397260 - DNA, 55 bp, Artificial
  Synthetic oligonucleotide
gactcttgctaacgcgactgctgtgcaacagcaggtgttagaggcgtcctatgcc

SEQ ID NO: 397261 - DNA, 60 bp, Artificial
  Synthetic oligonucleotide
gactcttggcggaccagtcgcctttctgggagggatacactcgagccctctccatcatat

SEQ ID NO: 397262 - DNA, 52 bp, Artificial
  Synthetic oligonucleotide
gactcttgtcatagttgtggtttcacccctgcaatttggcactggagctcca

SEQ ID NO: 397263 - DNA, 59 bp, Artificial
  Synthetic oligonucleotide
gactcttgttagagtggccattccgcagttgaaaaattcttgggagataaaacatgtga

SEQ ID NO: 397264 - DNA, 59 bp, Artificial
  Synthetic oligonucleotide
gactcttgttcaaaaaaatggctgcacagctaataacttccaagggtattatatctgtc

SEQ ID NO: 397265 - DNA, 55 bp, Artificial
  Synthetic oligonucleotide
gactctttcggctcactcacaacaggatatcatgtcctaaaggctggcactgtta

SEQ ID NO: 397266 - DNA, 56 bp, Artificial
  Synthetic oligonucleotide
gactctttcgtccgaagggggatgttccaaccaactaggcgtgggcaaatcatata

SEQ ID NO: 397267 - DNA, 60 bp, Artificial
  Synthetic oligonucleotide
gactcttttgttgttgtcaactctggctgatgtctatactgtactgcgaccggagtttgc

SEQ ID NO: 397268 - DNA, 51 bp, Artificial
  Synthetic oligonucleotide
gactgaaaatcgatccggtcaaactgagtagtggctacaaagatgtgatac

SEQ ID NO: 397269 - DNA, 60 bp, Artificial
  Synthetic oligonucleotide
gactgaaacttgcagcagctaggcgtgacactgttacagacttgcttgcagacttcgtgg

SEQ ID NO: 397270 - DNA, 54 bp, Artificial
  Synthetic oligonucleotide
gactgaaagcgacgtttgagctaaaacgcgttttccttcgcctatataaaccga

SEQ ID NO: 397271 - DNA, 55 bp, Artificial
  Synthetic oligonucleotide
gactgaaaggctcactccgatggcagtaagtggggatgattgcgtggtcaagccc

SEQ ID NO: 397272 - DNA, 60 bp, Artificial
  Synthetic oligonucleotide
gactgaaataccatatgctcacagcgattggaaaatgcgggtcagcatgttacgatgaca

SEQ ID NO: 397273 - DNA, 60 bp, Artificial
  Synthetic oligonucleotide
gactgaaattatagccagatatgttgatactagactgctgctcagtgatgacccctaaga

SEQ ID NO: 397274 - DNA, 59 bp, Artificial
  Synthetic oligonucleotide
gactgaaattggtgggtcccagctattgggaatggatgaaatcttgagaaattgggcta

SEQ ID NO: 397275 - DNA, 56 bp, Artificial
  Synthetic oligonucleotide
gactgaaccagttacctatgcgattcgttacaaaaattaggactatgtcgtggggc

SEQ ID NO: 397276 - DNA, 59 bp, Artificial
  Synthetic oligonucleotide
gactgaactacgtgctttgtacgtggatattaatactagatatattgtccttagggata

SEQ ID NO: 397277 - DNA, 60 bp, Artificial
  Synthetic oligonucleotide
gactgaactggttcagagttcctcaacagggaaaatatgcaacaatcctcacagaattct

SEQ ID NO: 397278 - DNA, 60 bp, Artificial
  Synthetic oligonucleotide
gactgaactggttgaccaaatcaggaagcacatatccagtgctgaacgtgactatgccaa

SEQ ID NO: 397279 - DNA, 60 bp, Artificial
  Synthetic oligonucleotide
gactgaagcaccactcttgccgagcaatctaggaaccagaatcactgattatgccaagac

SEQ ID NO: 397280 - DNA, 55 bp, Artificial
  Synthetic oligonucleotide
gactgaagcgtcagtcgttaaacggagacggtctcctgagatcgcaacgacgccc

SEQ ID NO: 397281 - DNA, 60 bp, Artificial
  Synthetic oligonucleotide
gactgaagctaagtctgccttgaaagatggatctaaaatcaagcacgcagtatctagagg

SEQ ID NO: 397282 - DNA, 60 bp, Artificial
  Synthetic oligonucleotide
gactgaagtttacatacaaagtatggtgcaatgcattccatagtacatgatttattgctc

SEQ ID NO: 397283 - DNA, 56 bp, Artificial
  Synthetic oligonucleotide
gactgaagtttagtggggtcctcgaattcagcaaatttgaagccttcacctcaacc

SEQ ID NO: 397284 - DNA, 55 bp, Artificial
  Synthetic oligonucleotide
gactgaatccaacctagttcaattaatagacaactatcctcaagtgtttgactcg

SEQ ID NO: 397285 - DNA, 60 bp, Artificial
  Synthetic oligonucleotide
gactgaatccatagataaactatttaaatgtttggagcctgttgacataaatgaagtaga

SEQ ID NO: 397286 - DNA, 55 bp, Artificial
  Synthetic oligonucleotide
gactgaatcctgcggatcaggtttacgtgccgatggagaccataacccgtgtagg

SEQ ID NO: 397287 - DNA, 57 bp, Artificial
  Synthetic oligonucleotide
gactgaatgcctagaagggactaaggcactccttaagactctgggcaataaggggta

SEQ ID NO: 397288 - DNA, 60 bp, Artificial
  Synthetic oligonucleotide
gactgaattggctgactaaatctggtagtgcttatccattgctgaacgtgaccatgccga

SEQ ID NO: 397289 - DNA, 55 bp, Artificial
  Synthetic oligonucleotide
gactgacaaggcccagccccagcacgtcatgtggtaccaggatacctacgcaact

SEQ ID NO: 397290 - DNA, 60 bp, Artificial
  Synthetic oligonucleotide
gactgacaatgaagtctttaggctgaagatactccggtacttagtgctagacgctgaaat

SEQ ID NO: 397291 - DNA, 60 bp, Artificial
  Synthetic oligonucleotide
gactgacaattacaccagctgataaatctgatacttttaagaagcttgattacaatagtg

SEQ ID NO: 397292 - DNA, 56 bp, Artificial
  Synthetic oligonucleotide
gactgacaattctgtcgtgctctcccgcaagtatacctcgttcccatggctgctag

SEQ ID NO: 397293 - DNA, 55 bp, Artificial
  Synthetic oligonucleotide
gactgacacaccttacgaattaatcaacatctactgggcgggcgtaaacaaaaac

SEQ ID NO: 397294 - DNA, 60 bp, Artificial
  Synthetic oligonucleotide
gactgacatagccatgagcggacccttcagctaccctgacgaactgaaaaacactactat

SEQ ID NO: 397295 - DNA, 60 bp, Artificial
  Synthetic oligonucleotide
gactgaccaatttgacccaaacagcacaactgtttctcgcattgttacatatagcacttt

SEQ ID NO: 397296 - DNA, 55 bp, Artificial
  Synthetic oligonucleotide
gactgacccagatagcccaaggcgcttcggtgctgccggcgattctgggagaact

SEQ ID NO: 397297 - DNA, 58 bp, Artificial
  Synthetic oligonucleotide
gactgaccgtctggggaacgaaaaacctccaggcaagagtcactgctatcgagaagta

SEQ ID NO: 397298 - DNA, 59 bp, Artificial
  Synthetic oligonucleotide
gactgacctcttcttggctattcggtgttgcactttgattggtacctgagtacaatggt

SEQ ID NO: 397299 - DNA, 55 bp, Artificial
  Synthetic oligonucleotide
gactgacgaaaagaaagttccatccaaaccagcacgcccggcccgtaagccacgc

SEQ ID NO: 397300 - DNA, 58 bp, Artificial
  Synthetic oligonucleotide
gactgacgaacttgaagcaactcgagaaatacaagacgttgagtggggtaatgaggta

SEQ ID NO: 397301 - DNA, 55 bp, Artificial
  Synthetic oligonucleotide
gactgacttgcaaaagtattgtcttaactggagatatcagacggttaagctattc

SEQ ID NO: 397302 - DNA, 59 bp, Artificial
  Synthetic oligonucleotide
gactgactttccggaaagatttgacaaacgctggattgttcatagagaaggaatcctgc

SEQ ID NO: 397303 - DNA, 60 bp, Artificial
  Synthetic oligonucleotide
gactgagcgcgcttaagaaaatgctgccccgagctcattttgagcgcgctagagggagcg

SEQ ID NO: 397304 - DNA, 58 bp, Artificial
  Synthetic oligonucleotide
gactgaggaatttgactagtccagctaaacagggcctaccagtaatgaatgtacctgg

SEQ ID NO: 397305 - DNA, 55 bp, Artificial
  Synthetic oligonucleotide
gactgagggtgcactcactacaccatacatagctctcaagggctcagttattgct

SEQ ID NO: 397306 - DNA, 56 bp, Artificial
  Synthetic oligonucleotide
gactgaggtattcgtattctcagttgacaaccttaaagccaactcttccggggcaa

SEQ ID NO: 397307 - DNA, 51 bp, Artificial
  Synthetic oligonucleotide
gactgaggtctaaatgaccacataggtagttatgtggacctagtgacctgg

SEQ ID NO: 397308 - DNA, 55 bp, Artificial
  Synthetic oligonucleotide
gactgagtatcaataggccactcacgtggccgaaggagaaaacgtccgttacccg

SEQ ID NO: 397309 - DNA, 60 bp, Artificial
  Synthetic oligonucleotide
gactgagtctagctgtcaactgagccgccgtggacggaaattgcagtattatctcagtta

SEQ ID NO: 397310 - DNA, 60 bp, Artificial
  Synthetic oligonucleotide
gactgagtctgtgcatgtgataggaggtactacttatctcctagaacgtgagctcttaaa

SEQ ID NO: 397311 - DNA, 60 bp, Artificial
  Synthetic oligonucleotide
gactgagtgcctctgcccttatgaagccctagtactcagaaggcccttgttcctggacag

SEQ ID NO: 397312 - DNA, 56 bp, Artificial
  Synthetic oligonucleotide
gactgagttacaaacatatcgtttatgtaggtgacccacaacaactaccggcacct

SEQ ID NO: 397313 - DNA, 55 bp, Artificial
  Synthetic oligonucleotide
gactgagttgggttactacgaaatgttaacttatggtcactcccgaggtcagcca

SEQ ID NO: 397314 - DNA, 55 bp, Artificial
  Synthetic oligonucleotide
gactgataaacagctctgtaacctctcctcagagtttgatgcaagcatgccaagt

SEQ ID NO: 397315 - DNA, 50 bp, Artificial
  Synthetic oligonucleotide
gactgatacagcacatggatctgggataatacctatgaaaactgaccttg

SEQ ID NO: 397316 - DNA, 55 bp, Artificial
  Synthetic oligonucleotide
gactgatactaggggaattaatccaacgctgcaaaactcttctggctacgcgtcc

SEQ ID NO: 397317 - DNA, 60 bp, Artificial
  Synthetic oligonucleotide
gactgatcctgagatgaattattaccttttagcgaccttcatagattcggctgctataac

SEQ ID NO: 397318 - DNA, 55 bp, Artificial
  Synthetic oligonucleotide
gactgatctgatcactaattattcaccatctagggaggataacttgcagcgtgtc

SEQ ID NO: 397319 - DNA, 60 bp, Artificial
  Synthetic oligonucleotide
gactgatgtatatgcatacggagatgtatcaaagtggacgatacggcaactacggggtca

SEQ ID NO: 397320 - DNA, 59 bp, Artificial
  Synthetic oligonucleotide
gactgatgtttaattcatagtacaggctggatattcaaggttatatcaatttatccccg

SEQ ID NO: 397321 - DNA, 55 bp, Artificial
  Synthetic oligonucleotide
gactgattccggtgtcaattttcgacacgcgcggcggtatgtacccctgggaggg

SEQ ID NO: 397322 - DNA, 60 bp, Artificial
  Synthetic oligonucleotide
gactgattctagttggatagaacttgacgagataggggaggatgtcgccccgatcgaaca

SEQ ID NO: 397323 - DNA, 55 bp, Artificial
  Synthetic oligonucleotide
gactgatttatatagtggtaactgcgtagtgcaatgtccgacagaaagaggtggc

SEQ ID NO: 397324 - DNA, 60 bp, Artificial
  Synthetic oligonucleotide
gactgatttgagcagtggcgactgcgtagtgcagtgtcagactgagaaaggtggtctaaa

SEQ ID NO: 397325 - DNA, 60 bp, Artificial
  Synthetic oligonucleotide
gactgcaaaattgaagcagtaatctatggaaatcccaagtgtgacatccatctaaaggat

SEQ ID NO: 397326 - DNA, 55 bp, Artificial
  Synthetic oligonucleotide
gactgcaaacataaagctccctttcagataaaatgtccacccctgatggtcacaa

SEQ ID NO: 397327 - DNA, 60 bp, Artificial
  Synthetic oligonucleotide
gactgcaacacatgtgtcacccagacagtcgatttcagccttgaccctaccttcaccatt

SEQ ID NO: 397328 - DNA, 51 bp, Artificial
  Synthetic oligonucleotide
gactgcaactgttccatctactcgggccatatcacaggtcatagaatggcg

SEQ ID NO: 397329 - DNA, 59 bp, Artificial
  Synthetic oligonucleotide
gactgcacgctggagggattctacagagagtgggacctgcaggtaacgccaaacgtgtt

SEQ ID NO: 397330 - DNA, 57 bp, Artificial
  Synthetic oligonucleotide
gactgcactagaggatgtgaaatcaactttagtcgaaaccgaattgaaattcttaag

SEQ ID NO: 397331 - DNA, 60 bp, Artificial
  Synthetic oligonucleotide
gactgcagactggctaagtattgttgtctacctaacatcctttgttgtgccaatacttct

SEQ ID NO: 397332 - DNA, 55 bp, Artificial
  Synthetic oligonucleotide
gactgcagagtgcttctactatacgtagtgttgcatatgttgctaaccctactga

SEQ ID NO: 397333 - DNA, 51 bp, Artificial
  Synthetic oligonucleotide
gactgcagccagtcttcatcctcgtttacgaggataatacatggaatcccg

SEQ ID NO: 397334 - DNA, 58 bp, Artificial
  Synthetic oligonucleotide
gactgcagcgtagacgctttgtccaaaatgccctaaatgggaatggtgacccaaacaa

SEQ ID NO: 397335 - DNA, 60 bp, Artificial
  Synthetic oligonucleotide
gactgcagtagctcttgctccagaggttaagatcccaaactttgtcaggaaagctctcct

SEQ ID NO: 397336 - DNA, 55 bp, Artificial
  Synthetic oligonucleotide
gactgcatcggtgcgagcctttgttatgttcataatctcaacactccacaagtgc

SEQ ID NO: 397337 - DNA, 60 bp, Artificial
  Synthetic oligonucleotide
gactgccaacacaccagcattgcaggcagccgaaacaggagccacgtcaaacgcagatga

SEQ ID NO: 397338 - DNA, 55 bp, Artificial
  Synthetic oligonucleotide
gactgccaagggagtgtttacaggactcatccagaaaggacaaagcctgcatgcg

SEQ ID NO: 397339 - DNA, 60 bp, Artificial
  Synthetic oligonucleotide
gactgccacactagctctcatcggttgcacctcatcaccttggcgttggcttaagcagaa

SEQ ID NO: 397340 - DNA, 55 bp, Artificial
  Synthetic oligonucleotide
gactgccagctgcccaacaagattcagccgccctcgaccaacatgctggcgtgat

SEQ ID NO: 397341 - DNA, 57 bp, Artificial
  Synthetic oligonucleotide
gactgccattccgcagtaaatttaaacaagcggtaattactgaccctatgcaagtac

SEQ ID NO: 397342 - DNA, 55 bp, Artificial
  Synthetic oligonucleotide
gactgcccacactaatgatgtaaaacagttaacagaggttgtgcagaaaatatcc

SEQ ID NO: 397343 - DNA, 60 bp, Artificial
  Synthetic oligonucleotide
gactgcccacttcactgttgcttgtctcactgacaagtgaggacatctcgtcagaagcta

SEQ ID NO: 397344 - DNA, 51 bp, Artificial
  Synthetic oligonucleotide
gactgccctaaaaggggtcaccctgaaaccctgcaaggtggtttacaaggg

SEQ ID NO: 397345 - DNA, 58 bp, Artificial
  Synthetic oligonucleotide
gactgccctaaactgtaatgattccctccagactgggttcattgccgcgttgttctac

SEQ ID NO: 397346 - DNA, 58 bp, Artificial
  Synthetic oligonucleotide
gactgccctaagtatgtgaatgttaaatccctaaagcttgctaccgggctcagaaatg

SEQ ID NO: 397347 - DNA, 55 bp, Artificial
  Synthetic oligonucleotide
gactgccctagagtttgatctatctgatgactgttgtcagtcaccactatgcaac

SEQ ID NO: 397348 - DNA, 55 bp, Artificial
  Synthetic oligonucleotide
gactgccctccgtccaaccgtcgcaagacaggttttccagccagcctacgccccc

SEQ ID NO: 397349 - DNA, 59 bp, Artificial
  Synthetic oligonucleotide
gactgccctgaactgcaatgactcccttcaaactgggttcattactgcgctgttctaca

SEQ ID NO: 397350 - DNA, 60 bp, Artificial
  Synthetic oligonucleotide
gactgccctgaactgcaatgagtccctcaacaccgggtttcttgccgcgctgttctacgc

SEQ ID NO: 397351 - DNA, 57 bp, Artificial
  Synthetic oligonucleotide
gactgccggctgatcttgggcgggagccgaaggtgagtgaaaccaccgaagtctagg

SEQ ID NO: 397352 - DNA, 54 bp, Artificial
  Synthetic oligonucleotide
gactgccgggtatattgccgggcgcgtaggtaacaaagaaggggattacgaata

SEQ ID NO: 397353 - DNA, 51 bp, Artificial
  Synthetic oligonucleotide
gactgccgtgggttggaatcacccgcagttcacgaactggggatgggtcaa

SEQ ID NO: 397354 - DNA, 60 bp, Artificial
  Synthetic oligonucleotide
gactgccgtgtacgagaaatgctcgttgacgattccggctgataatcaatggcgattcat

SEQ ID NO: 397355 - DNA, 60 bp, Artificial
  Synthetic oligonucleotide
gactgcctctatctgtggtgatgattcgaatatctacatgccgtctgaccaagagtcacg

SEQ ID NO: 397356 - DNA, 55 bp, Artificial
  Synthetic oligonucleotide
gactgcctggggctagtgaccaccacacagaaattacaagcgctatacagaagac

SEQ ID NO: 397357 - DNA, 60 bp, Artificial
  Synthetic oligonucleotide
gactgccttaaggatatggggctctttggtcagaacatgtatcatcattctatgggaaga

SEQ ID NO: 397358 - DNA, 60 bp, Artificial
  Synthetic oligonucleotide
gactgccttgaactgtaacgactccctccagactgggttcattgcctcgctgttctacgc

SEQ ID NO: 397359 - DNA, 60 bp, Artificial
  Synthetic oligonucleotide
gactgcgaatggatagaaaacaacatcacattcagcatgcctcagatgatgtacaatcca

SEQ ID NO: 397360 - DNA, 60 bp, Artificial
  Synthetic oligonucleotide
gactgcgatgtctgaaaagtgggtgagtcaacaggacgtgagtttgtcactctgcgagct

SEQ ID NO: 397361 - DNA, 55 bp, Artificial
  Synthetic oligonucleotide
gactgcgcaatggaagggcaatccgaagatggatgaatatttacgacctaaaaca

SEQ ID NO: 397362 - DNA, 52 bp, Artificial
  Synthetic oligonucleotide
gactgcgcaggcagtcggaggaccgcacccaccgtggcaagatgaacttctc

SEQ ID NO: 397363 - DNA, 60 bp, Artificial
  Synthetic oligonucleotide
gactgcgcccttccacaagagttcatctcgtggttcgcgagcaacgcattcacggtgcag

SEQ ID NO: 397364 - DNA, 60 bp, Artificial
  Synthetic oligonucleotide
gactgcgctgagtcctgtcgttggtttcaaggaggtgcatgaaaaatgggttgctagtct

SEQ ID NO: 397365 - DNA, 60 bp, Artificial
  Synthetic oligonucleotide
gactgcgggtttagacccatcactagtgaggttgggagtacaaatatgccttcatgcagc

SEQ ID NO: 397366 - DNA, 60 bp, Artificial
  Synthetic oligonucleotide
gactgcgtatgagtacgaagtcaccatttgcatacacaaagttgggagccattgtaggat

SEQ ID NO: 397367 - DNA, 54 bp, Artificial
  Synthetic oligonucleotide
gactgcgttttaagggtactgtgaagattgaacgtgttgtgtcggaaatgaaca

SEQ ID NO: 397368 - DNA, 60 bp, Artificial
  Synthetic oligonucleotide
gactgctactgaatttagtaaacgtagcggagcgacgtatgtgtctaatgcatcaactgg

SEQ ID NO: 397369 - DNA, 57 bp, Artificial
  Synthetic oligonucleotide
gactgctaggcttggaaaagatagtgttcctattaagagtaagttgataaatttggc

SEQ ID NO: 397370 - DNA, 55 bp, Artificial
  Synthetic oligonucleotide
gactgctatcaaatgaaggtatgctgcctattggtctagtcgataccctggtacg

SEQ ID NO: 397371 - DNA, 60 bp, Artificial
  Synthetic oligonucleotide
gactgctattaacaagagatggtggtagtaaccagagcaataccgagatcttcagacctg

SEQ ID NO: 397372 - DNA, 59 bp, Artificial
  Synthetic oligonucleotide
gactgctcacgcggttgaaagcgatcgatccgttatccgcttgtgtacttcgaaaagcc

SEQ ID NO: 397373 - DNA, 55 bp, Artificial
  Synthetic oligonucleotide
gactgctcacggtattcatactcgccttttaatccaataggccaccgatctcggg

SEQ ID NO: 397374 - DNA, 60 bp, Artificial
  Synthetic oligonucleotide
gactgctcaggaggccgtcagcactatttggaggtgaacatcgttgatatccactgccct

SEQ ID NO: 397375 - DNA, 55 bp, Artificial
  Synthetic oligonucleotide
gactgctgacacagtacaaagactgttgacatagaagggactttccgcctgggac

SEQ ID NO: 397376 - DNA, 55 bp, Artificial
  Synthetic oligonucleotide
gactgctgacactctacaaaagactgctgacacagaagggactttccgttgggac

SEQ ID NO: 397377 - DNA, 55 bp, Artificial
  Synthetic oligonucleotide
gactgctgacactgaagtttgctgcaagggactttccgctggggctttccccggg

SEQ ID NO: 397378 - DNA, 55 bp, Artificial
  Synthetic oligonucleotide
gactgctgacactgatgtacacactgtggacactgatgttactacaagggacttt

SEQ ID NO: 397379 - DNA, 60 bp, Artificial
  Synthetic oligonucleotide
gactgctgacgtcccctttgataagttatcacgtgcagttaacgctccgctgtctatggg

SEQ ID NO: 397380 - DNA, 60 bp, Artificial
  Synthetic oligonucleotide
gactgctgctttccaaccttgtgatgtcaatgtcaggattggtaatgcacgctgttgccc

SEQ ID NO: 397381 - DNA, 55 bp, Artificial
  Synthetic oligonucleotide
gactgctggtgctatggagtgcccaacgtgtatgtcacatacggacgttgcaaac

SEQ ID NO: 397382 - DNA, 55 bp, Artificial
  Synthetic oligonucleotide
gactgctgtagaatgtttgcaaacggtgacgacttactcttggcagtgcatccgg

SEQ ID NO: 397383 - DNA, 60 bp, Artificial
  Synthetic oligonucleotide
gactgcttacttctttgcgcattgccttgtaggcatacactgtcttgagagcaagcttca

SEQ ID NO: 397384 - DNA, 55 bp, Artificial
  Synthetic oligonucleotide
gactgcttcaaaacagccaagtgtacagcctaatcagaccaaatgagaatccagc

SEQ ID NO: 397385 - DNA, 54 bp, Artificial
  Synthetic oligonucleotide
gactgcttccgaaaacaccccgacgccacttacgccaaatgcggctcggggcct

SEQ ID NO: 397386 - DNA, 55 bp, Artificial
  Synthetic oligonucleotide
gactgcttggtacaactctattaaatctagacgctaactacgttgaaacggcacg

SEQ ID NO: 397387 - DNA, 55 bp, Artificial
  Synthetic oligonucleotide
gactgcttgtacctcatgctattgtaaaaggtgttgctatcattgcccgctgtgc

SEQ ID NO: 397388 - DNA, 60 bp, Artificial
  Synthetic oligonucleotide
gactggaaccaacaggccagtattggtgatttcttcagatttgtcttacagagtaggata

SEQ ID NO: 397389 - DNA, 55 bp, Artificial
  Synthetic oligonucleotide
gactggaactttgaacgcgacaattacacgagcgattacacacaatacgacaaat

SEQ ID NO: 397390 - DNA, 59 bp, Artificial
  Synthetic oligonucleotide
gactggaagtctaaggttcagcttcatgttttgcggcacagcaaacacgacattaaaac

SEQ ID NO: 397391 - DNA, 55 bp, Artificial
  Synthetic oligonucleotide
gactggacaagaccttcttatactaatactatcatcaatgactgtgtggactgtc

SEQ ID NO: 397392 - DNA, 55 bp, Artificial
  Synthetic oligonucleotide
gactggaccagctacggaatcctgattgcacgaaaaggggacaagatcactccag

SEQ ID NO: 397393 - DNA, 51 bp, Artificial
  Synthetic oligonucleotide
gactggacccgctatgatggaactataccaccagcactcttcaagcacatc

SEQ ID NO: 397394 - DNA, 60 bp, Artificial
  Synthetic oligonucleotide
gactggacgtctatccttgagcctcgcttagaaggtgatgacgtaatgggaatcattggg

SEQ ID NO: 397395 - DNA, 55 bp, Artificial
  Synthetic oligonucleotide
gactggactacttcagacatcgttgaaaaggttgagttaatggatgctcagtttg

SEQ ID NO: 397396 - DNA, 60 bp, Artificial
  Synthetic oligonucleotide
gactggactgcataaggccttgcttctgggttgagttaatcagaggacaacctaaggaga

SEQ ID NO: 397397 - DNA, 51 bp, Artificial
  Synthetic oligonucleotide
gactggagatcacctagacataaacacttatcgtggttatgctcaggagcg

SEQ ID NO: 397398 - DNA, 55 bp, Artificial
  Synthetic oligonucleotide
gactggagcatctctcgtgccaaatctggtgtgagtcgtgctaacatctacactg

SEQ ID NO: 397399 - DNA, 55 bp, Artificial
  Synthetic oligonucleotide
gactggagcgtattcactagtgagataggagaggtcgatatactagatgcggggc

SEQ ID NO: 397400 - DNA, 55 bp, Artificial
  Synthetic oligonucleotide
gactggagctgtcggtaacctctcgtactttaacgataaggctaagggcccgctg

SEQ ID NO: 397401 - DNA, 52 bp, Artificial
  Synthetic oligonucleotide
gactggagtgaagcgaaggtcgatttccattgtgacacgggacaagcgaagt

SEQ ID NO: 397402 - DNA, 52 bp, Artificial
  Synthetic oligonucleotide
gactggagtggttacagtggatctttcatggactattgggctgaaggggact

SEQ ID NO: 397403 - DNA, 60 bp, Artificial
  Synthetic oligonucleotide
gactggatacaagatcatagattgcgttctggtgagggattgcgtattactagggtaaca

SEQ ID NO: 397404 - DNA, 58 bp, Artificial
  Synthetic oligonucleotide
gactggattgtatgagaccttgcttttgggttgaactaatcagaggacgacccaaaga

SEQ ID NO: 397405 - DNA, 59 bp, Artificial
  Synthetic oligonucleotide
gactggcaaagttcctcagagagaacggctataaggttttgcagccgcggtctctgccc

SEQ ID NO: 397406 - DNA, 55 bp, Artificial
  Synthetic oligonucleotide
gactggcagaacatgcgtcttgtaaccaatgtacccaaatttccaatgctggaca

SEQ ID NO: 397407 - DNA, 55 bp, Artificial
  Synthetic oligonucleotide
gactggccgcaagatcgaaggagcctgacccatgcccgagtacgcacctcactac

SEQ ID NO: 397408 - DNA, 55 bp, Artificial
  Synthetic oligonucleotide
gactggccgcaattggaagaaggtgtacgcctcaaaaaagacggcctcgacaatt

SEQ ID NO: 397409 - DNA, 53 bp, Artificial
  Synthetic oligonucleotide
gactggcgaggtgacgcaatcaatatgattggcgtagctcgcacgtacatgcg

SEQ ID NO: 397410 - DNA, 58 bp, Artificial
  Synthetic oligonucleotide
gactggctgaacccgtatattggcttaattccaatatagcactacctatctggagttt

SEQ ID NO: 397411 - DNA, 50 bp, Artificial
  Synthetic oligonucleotide
gactggcttgatgagttgtgtcaaaggcaccgaggggaaaaactatcgga

SEQ ID NO: 397412 - DNA, 55 bp, Artificial
  Synthetic oligonucleotide
gactggcttgcagctctggatgagggttactgatcgcgtctaggcacaccctgcc

SEQ ID NO: 397413 - DNA, 60 bp, Artificial
  Synthetic oligonucleotide
gactgggaagtggcttaccctcagatgctgcatataagcagctgctttgcgcctgtactg

SEQ ID NO: 397414 - DNA, 55 bp, Artificial
  Synthetic oligonucleotide
gactgggaatcaaaaccaacctgaaacatgcaaccagagcgtcattacctatgag

SEQ ID NO: 397415 - DNA, 60 bp, Artificial
  Synthetic oligonucleotide
gactgggagtaatgtcatgctggccgtctgtaagcgcatgtgctttagggcaactgtgga

SEQ ID NO: 397416 - DNA, 60 bp, Artificial
  Synthetic oligonucleotide
gactgggcagccagccagtggcagttaatagtgaaaccccgcccatgaaattctcaaata

SEQ ID NO: 397417 - DNA, 55 bp, Artificial
  Synthetic oligonucleotide
gactgggccctgtttgctccaactatagatgcagactctcccggatctaggacgc

SEQ ID NO: 397418 - DNA, 55 bp, Artificial
  Synthetic oligonucleotide
gactgggcggctgcacttgttgatggacgtggagcatcccgtcgcaatgttcaca

SEQ ID NO: 397419 - DNA, 60 bp, Artificial
  Synthetic oligonucleotide
gactgggcttcatatcaaagctgtcattggactctataagctctttggcctagatggcct

SEQ ID NO: 397420 - DNA, 55 bp, Artificial
  Synthetic oligonucleotide
gactggggaaccagagcactatgcatactaagacaaaacatgaaactaggcccac

SEQ ID NO: 397421 - DNA, 59 bp, Artificial
  Synthetic oligonucleotide
gactggggaccctgcgttgaacatggagaacatcacatcaggattcctaagacccctac

SEQ ID NO: 397422 - DNA, 59 bp, Artificial
  Synthetic oligonucleotide
gactggggaccctgtaccgaacatggagaacatcacatcaggattcctaggacccctgc

SEQ ID NO: 397423 - DNA, 51 bp, Artificial
  Synthetic oligonucleotide
gactggggcctcctctggctggcatccacctaaggctcaaaggtttatccg

SEQ ID NO: 397424 - DNA, 55 bp, Artificial
  Synthetic oligonucleotide
gactggggcgacagaaatccagatgtcaggaacgacgacaatcttcgcaggacac

SEQ ID NO: 397425 - DNA, 55 bp, Artificial
  Synthetic oligonucleotide
gactggggtaagaaccatcaccacaggcagctccatcacgtactccacctatggc

SEQ ID NO: 397426 - DNA, 55 bp, Artificial
  Synthetic oligonucleotide
gactggggtatacaaatgaagaaatggcgtctgccttgggattaagtggtgcaga

SEQ ID NO: 397427 - DNA, 57 bp, Artificial
  Synthetic oligonucleotide
gactggggtcacccagaatggaggaagtaattcttgcaagagggggcctgataacag

SEQ ID NO: 397428 - DNA, 51 bp, Artificial
  Synthetic oligonucleotide
gactgggtgttgtcactgtcctggttcctggcctcttgagtgtggtcctga

SEQ ID NO: 397429 - DNA, 55 bp, Artificial
  Synthetic oligonucleotide
gactgggttaccaaagccgcgaggtgatccacgtaagccctcagaaccgtctcgg

SEQ ID NO: 397430 - DNA, 57 bp, Artificial
  Synthetic oligonucleotide
gactggtaaaactcttatgatgcgtctcataactggtaattttaagtgtgttggtaa

SEQ ID NO: 397431 - DNA, 58 bp, Artificial
  Synthetic oligonucleotide
gactggtaaacatcctaaggtgatgattcaatcaatttataatagtgttaaatcttta

SEQ ID NO: 397432 - DNA, 55 bp, Artificial
  Synthetic oligonucleotide
gactggtacttagtttctggagacaggctaaggatgcccttcaggtaccccgagg

SEQ ID NO: 397433 - DNA, 60 bp, Artificial
  Synthetic oligonucleotide
gactggtagcaaatacctaaactacagaacaggaatatacagtgccatattcctttcagc

SEQ ID NO: 397434 - DNA, 60 bp, Artificial
  Synthetic oligonucleotide
gactggtatattggggagccacgtgtatgcatgatagtgtctcagatgtgtataaatatc

SEQ ID NO: 397435 - DNA, 60 bp, Artificial
  Synthetic oligonucleotide
gactggtatgtctaatattagtgaagtgtatggagacactccggattggatagtaagaca

SEQ ID NO: 397436 - DNA, 55 bp, Artificial
  Synthetic oligonucleotide
gactggtcaggatggttctcttggctcaaatatataccctggatagtagtatgca

SEQ ID NO: 397437 - DNA, 58 bp, Artificial
  Synthetic oligonucleotide
gactggtccaggtgtccacaaaggtaattgtgtgggcctattgaactggcccatattg

SEQ ID NO: 397438 - DNA, 50 bp, Artificial
  Synthetic oligonucleotide
gactggtcgcggcaagaaacacacagccttctctagtaaaggtctcagtg

SEQ ID NO: 397439 - DNA, 60 bp, Artificial
  Synthetic oligonucleotide
gactggtctagttgtgagccacgtgtatgcatgctaaagtctctgatgtgtataaatatc

SEQ ID NO: 397440 - DNA, 60 bp, Artificial
  Synthetic oligonucleotide
gactggtgataacatctcgtatgaacataggcagtggtcgataccaataatattatacgc

SEQ ID NO: 397441 - DNA, 50 bp, Artificial
  Synthetic oligonucleotide
gactggtggagcttcttatactcttgccgtggttcaggcgtctgtgtgga

SEQ ID NO: 397442 - DNA, 56 bp, Artificial
  Synthetic oligonucleotide
gactggttcgatttcgtgaccgcttattgcaaaacacaaccacggtgattcgaacc

SEQ ID NO: 397443 - DNA, 60 bp, Artificial
  Synthetic oligonucleotide
gactggttgacaagctgagaggccggcgcgctaccttctactccaggaatgcggcgatca

SEQ ID NO: 397444 - DNA, 50 bp, Artificial
  Synthetic oligonucleotide
gactggtttcccactggtagaacgacttggtctgtgcatgccaatcatga

SEQ ID NO: 397445 - DNA, 60 bp, Artificial
  Synthetic oligonucleotide
gactgtaaagattcaatggtctcaagaccccacaatgctatacaataaaatggagtttga

SEQ ID NO: 397446 - DNA, 58 bp, Artificial
  Synthetic oligonucleotide
gactgtaaatgacaaatttatcttagacaatgaacaagtcatgaccacaactatgcgg

SEQ ID NO: 397447 - DNA, 58 bp, Artificial
  Synthetic oligonucleotide
gactgtaacggttgcttcgtctaatgggtggcatattccgtattgcgtacgtatatcg

SEQ ID NO: 397448 - DNA, 57 bp, Artificial
  Synthetic oligonucleotide
gactgtaagttctttcaattaaacacgcagactcgaagatggtttttcgaagcttgc

SEQ ID NO: 397449 - DNA, 58 bp, Artificial
  Synthetic oligonucleotide
gactgtaataaattcacaacaggcgagacaatagcgcacggtaaagttgggcagggga

SEQ ID NO: 397450 - DNA, 60 bp, Artificial
  Synthetic oligonucleotide
gactgtaatacatgtgtcacccagacagtcgacttcagcttggaccctaccttcaccatt

SEQ ID NO: 397451 - DNA, 60 bp, Artificial
  Synthetic oligonucleotide
gactgtacacgtgactgctacgtcattggcgccatcttgtgtcacaagatggcggtgcac

SEQ ID NO: 397452 - DNA, 60 bp, Artificial
  Synthetic oligonucleotide
gactgtacagacacgagttcagcgactacattgttcactacagtctagaaacacccatgg

SEQ ID NO: 397453 - DNA, 55 bp, Artificial
  Synthetic oligonucleotide
gactgtacatctgtgtgggagtcctaaacctgcacacatagaggttcaagtgcac

SEQ ID NO: 397454 - DNA, 55 bp, Artificial
  Synthetic oligonucleotide
gactgtacatgaggctcagggtgtatcagtcgaccatgttgtcctcgttagactg

SEQ ID NO: 397455 - DNA, 55 bp, Artificial
  Synthetic oligonucleotide
gactgtaccactccacttgcgcgagctgcttgggagacagctcgccatacccctg

SEQ ID NO: 397456 - DNA, 53 bp, Artificial
  Synthetic oligonucleotide
gactgtaccgcgctctgcgacaatcccacggccacgtacttttacgtcggcga

SEQ ID NO: 397457 - DNA, 60 bp, Artificial
  Synthetic oligonucleotide
gactgtacttcaatatttggtctcttttggagtgtggattcgcactcctccagcctatag

SEQ ID NO: 397458 - DNA, 54 bp, Artificial
  Synthetic oligonucleotide
gactgtagcatctaccatgttacaaaacgaggctctcaaaattatgtcctatcc

SEQ ID NO: 397459 - DNA, 56 bp, Artificial
  Synthetic oligonucleotide
gactgtagtaacggtagcatcgtgtatgaggccggggatgttatcctccacttgcc

SEQ ID NO: 397460 - DNA, 55 bp, Artificial
  Synthetic oligonucleotide
gactgtatcacaaatgttcccaaacttccgtggagatatcatcgacaaatttggc

SEQ ID NO: 397461 - DNA, 60 bp, Artificial
  Synthetic oligonucleotide
gactgtatgaatagatgtgagcaaaattactggttaacatatgaagaccttgtaaatggg

SEQ ID NO: 397462 - DNA, 57 bp, Artificial
  Synthetic oligonucleotide
gactgtcaacgatgttacttaccctacgactctgacaactaaagtggcaacggttga

SEQ ID NO: 397463 - DNA, 59 bp, Artificial
  Synthetic oligonucleotide
gactgtcaactgatagaaaaatggatgaagtctcgcaaattggaatttaattcgctttc

SEQ ID NO: 397464 - DNA, 59 bp, Artificial
  Synthetic oligonucleotide
gactgtcaactgatagaaagatggatgaggtttctcaaataggaatttaattcgttatc

SEQ ID NO: 397465 - DNA, 59 bp, Artificial
  Synthetic oligonucleotide
gactgtcaatgacatacagaagttagtgggaaaactaaactgggcaagccagatttatc

SEQ ID NO: 397466 - DNA, 60 bp, Artificial
  Synthetic oligonucleotide
gactgtcaatgacatacagaagttagtgggaaaattgaattgggcaagtcagatctaccc

SEQ ID NO: 397467 - DNA, 60 bp, Artificial
  Synthetic oligonucleotide
gactgtcaggacagagaacaaatgcctaccctggaaaatgactatgtagagttataggaa

SEQ ID NO: 397468 - DNA, 60 bp, Artificial
  Synthetic oligonucleotide
gactgtccagacttatggcaaccaaagaactgctatcttcaaagctttggtgaaagccaa

SEQ ID NO: 397469 - DNA, 59 bp, Artificial
  Synthetic oligonucleotide
gactgtccagctgtcaacccctcagcgctttcgctcagggctggggccctatccggtac

SEQ ID NO: 397470 - DNA, 51 bp, Artificial
  Synthetic oligonucleotide
gactgtcctaggtaccaaggttggtggaagagaagcaaatcttgtagcgag

SEQ ID NO: 397471 - DNA, 55 bp, Artificial
  Synthetic oligonucleotide
gactgtccttccgaacctggaccttcaggcgaccggacctggctcctggacactt

SEQ ID NO: 397472 - DNA, 57 bp, Artificial
  Synthetic oligonucleotide
gactgtcgaaattcgaacgaggtacgcttcgcgctggattgaagggagtaggaggaa

SEQ ID NO: 397473 - DNA, 56 bp, Artificial
  Synthetic oligonucleotide
gactgtcgacattgggagctttagagaggggattattgagagcggacctgaccccc

SEQ ID NO: 397474 - DNA, 60 bp, Artificial
  Synthetic oligonucleotide
gactgtcgggtccatgagctattagttcacctatagtgataccatcattatgcaaatctg

SEQ ID NO: 397475 - DNA, 60 bp, Artificial
  Synthetic oligonucleotide
gactgtcgtccctatcgctgaggaacgtcgatccagggctgttcaacataccttccttga

SEQ ID NO: 397476 - DNA, 60 bp, Artificial
  Synthetic oligonucleotide
gactgtctatagggaagaaactgaggaaaccacaaatgtggagctgtgtctgacctttgc

SEQ ID NO: 397477 - DNA, 60 bp, Artificial
  Synthetic oligonucleotide
gactgtctcagctaatagagaaaggcagaatgataagaacaggagttttgcgatcaagtc

SEQ ID NO: 397478 - DNA, 51 bp, Artificial
  Synthetic oligonucleotide
gactgtctccggcctttctcacccgtttgaatctttgcctactcattactc

SEQ ID NO: 397479 - DNA, 56 bp, Artificial
  Synthetic oligonucleotide
gactgtctgggcggtctcgttctagtcacgggttccggcgggctctccaaccgtca

SEQ ID NO: 397480 - DNA, 55 bp, Artificial
  Synthetic oligonucleotide
gactgtgaattttgcgaggacttttgcaaccggctttaggttgtcaagacttcta

SEQ ID NO: 397481 - DNA, 51 bp, Artificial
  Synthetic oligonucleotide
gactgtgaccgttaaggtcggtagttctggaagtgcttgagtgactgtgtc

SEQ ID NO: 397482 - DNA, 60 bp, Artificial
  Synthetic oligonucleotide
gactgtgatcgcatacatcctatgtcccgttggcctgatgagcatggtaggccgatttgt

SEQ ID NO: 397483 - DNA, 60 bp, Artificial
  Synthetic oligonucleotide
gactgtgatgattacccgttcttagcacgcgaccctagatttaagcatagagtgtatcag

SEQ ID NO: 397484 - DNA, 60 bp, Artificial
  Synthetic oligonucleotide
gactgtgcatgagtctcagggtatttctgaagaccacgttactttggtaagattgaagag

SEQ ID NO: 397485 - DNA, 57 bp, Artificial
  Synthetic oligonucleotide
gactgtgccgctgcgagttccaggaaatactgcgttgccttggcaatgtcgttgcgc

SEQ ID NO: 397486 - DNA, 55 bp, Artificial
  Synthetic oligonucleotide
gactgtgctagacaagaatgtgtccgggaagataacggaccttcaagacgtcatg

SEQ ID NO: 397487 - DNA, 55 bp, Artificial
  Synthetic oligonucleotide
gactgtgctggatttgcaccctggttcagggaaaaccaggaaaattctgccacaa

SEQ ID NO: 397488 - DNA, 54 bp, Artificial
  Synthetic oligonucleotide
gactgtggtgttccggtgagtcaacttctaatctgcccgcatcagtggatcaac

SEQ ID NO: 397489 - DNA, 55 bp, Artificial
  Synthetic oligonucleotide
gactgtgtaaagtaagccaaggtctgtgagtgcctgcacaacatcattgagtggg

SEQ ID NO: 397490 - DNA, 60 bp, Artificial
  Synthetic oligonucleotide
gactgtgtcaacgtcggcgctaaagagggcaactggctggttaacgcagacagactggtg

SEQ ID NO: 397491 - DNA, 55 bp, Artificial
  Synthetic oligonucleotide
gactgtgtccttctcaatggtgggtctcttttccaacaatccacatgacctacct

SEQ ID NO: 397492 - DNA, 55 bp, Artificial
  Synthetic oligonucleotide
gactgtgtcgtcaacaccctttcggcccgccagcctaggacaatggcggatgggt

SEQ ID NO: 397493 - DNA, 55 bp, Artificial
  Synthetic oligonucleotide
gactgtgtctgaacgtgcctgacacagaatcacccgggtctaggactggtgtgct

SEQ ID NO: 397494 - DNA, 55 bp, Artificial
  Synthetic oligonucleotide
gactgtgtggcaatactccaatttggcctctccacccaattcaccacctcaagca

SEQ ID NO: 397495 - DNA, 60 bp, Artificial
  Synthetic oligonucleotide
gactgtgtgtgttcgcacggtgacctgccaggcaaacaaaagcagcggggaccaggcagg

SEQ ID NO: 397496 - DNA, 55 bp, Artificial
  Synthetic oligonucleotide
gactgtgtgttggaggcaatggctttccttgaggagtcccaccccggtatctttg

SEQ ID NO: 397497 - DNA, 55 bp, Artificial
  Synthetic oligonucleotide
gactgtgtgtttaaagactgggaggagtttggggaggagattaggttaatgatct

SEQ ID NO: 397498 - DNA, 56 bp, Artificial
  Synthetic oligonucleotide
gactgttaggtttaacagtagaccagtcaacaattggagcaagtggagtttatcct

SEQ ID NO: 397499 - DNA, 51 bp, Artificial
  Synthetic oligonucleotide
gactgttcaataagcaaactgtgagcgtagaaactaatagaactcgttgag

SEQ ID NO: 397500 - DNA, 53 bp, Artificial
  Synthetic oligonucleotide
gactgttcggttatgacgcttcactggcagctgagttaggcaagatggttgct

SEQ ID NO: 397501 - DNA, 60 bp, Artificial
  Synthetic oligonucleotide
gactgttctgcgcaacatcaaagaagttgtagatacctcattctcagaagaatcatcata

SEQ ID NO: 397502 - DNA, 60 bp, Artificial
  Synthetic oligonucleotide
gactgttgaggggcaaaattcgatctccatcgaaatcttgaggcataagacgggcttgat

SEQ ID NO: 397503 - DNA, 59 bp, Artificial
  Synthetic oligonucleotide
gactgttgatgggtacgttactttacagtggaaggatggttccatcactgaagaatgcc

SEQ ID NO: 397504 - DNA, 56 bp, Artificial
  Synthetic oligonucleotide
gactgttggcattaccacggctactgtgtaacgtctacgaaaagtgaagtagccca

SEQ ID NO: 397505 - DNA, 55 bp, Artificial
  Synthetic oligonucleotide
gactgttgggatacgcgttcctggtggctgttcaacttcgcagtgcgctgctacg

SEQ ID NO: 397506 - DNA, 55 bp, Artificial
  Synthetic oligonucleotide
gactgttggtgacgagggatcagagcgccgcggtcaagcaagtctactggtcacc

SEQ ID NO: 397507 - DNA, 56 bp, Artificial
  Synthetic oligonucleotide
gactgttggtttcttgtgacttgcatcactagttttaaataggtcacaaaggttcg

SEQ ID NO: 397508 - DNA, 55 bp, Artificial
  Synthetic oligonucleotide
gactgttgtacgaattgttttacgcactaattgggctgctaaactagactcccct

SEQ ID NO: 397509 - DNA, 55 bp, Artificial
  Synthetic oligonucleotide
gactgttgtcactcccttaagtctgaccctagatcactggaaggatgtcgagcgg

SEQ ID NO: 397510 - DNA, 60 bp, Artificial
  Synthetic oligonucleotide
gactgttgtgagcaaacggaactcactaaaagtgtcgtgctcacgctgaagtcccatccc

SEQ ID NO: 397511 - DNA, 56 bp, Artificial
  Synthetic oligonucleotide
gactgttgtgtaaatatctttgggtacccaggctataaataacacgtcacgaggcg

SEQ ID NO: 397512 - DNA, 59 bp, Artificial
  Synthetic oligonucleotide
gactgtttaacctaatagctcttccaattatttgtcttagagatgcttcattccatgtc

SEQ ID NO: 397513 - DNA, 50 bp, Artificial
  Synthetic oligonucleotide
gactgtttaataacaatgcagctaacacaacaaccatcaacatcccatgc

SEQ ID NO: 397514 - DNA, 55 bp, Artificial
  Synthetic oligonucleotide
gactgtttgagctacaacctgaacctgcttgactagattgcgcggcgatttattc

SEQ ID NO: 397515 - DNA, 52 bp, Artificial
  Synthetic oligonucleotide
gacttaaacagggaactgcaagccctgcgttctgactatctctccaggcgcc

SEQ ID NO: 397516 - DNA, 54 bp, Artificial
  Synthetic oligonucleotide
gacttaaagaagactgttactcctcaaaactttacacctggttgttatcggaca

SEQ ID NO: 397517 - DNA, 50 bp, Artificial
  Synthetic oligonucleotide
gacttaaatactagtgctggatatccatatgtcagtttaggaatcaataa

SEQ ID NO: 397518 - DNA, 59 bp, Artificial
  Synthetic oligonucleotide
gacttaacaaggaactgttaagaacagtggaaggctgtcagaagattctgtcagtctgt

SEQ ID NO: 397519 - DNA, 53 bp, Artificial
  Synthetic oligonucleotide
gacttaacagggttggtccaattggaaagacctctccttaaagcctgggtcca

SEQ ID NO: 397520 - DNA, 55 bp, Artificial
  Synthetic oligonucleotide
gacttaaccccgtatccgcagtattcgacaacgtatcccgcagtcgtgtcacccg

SEQ ID NO: 397521 - DNA, 56 bp, Artificial
  Synthetic oligonucleotide
gacttaagtccaagtggccgcacaagtaattgtgtggtcccaaagaacgcgcccac

SEQ ID NO: 397522 - DNA, 55 bp, Artificial
  Synthetic oligonucleotide
gacttaatagcggaaatacagaaacaagggcaaggacaatggacataccaaattt

SEQ ID NO: 397523 - DNA, 52 bp, Artificial
  Synthetic oligonucleotide
gacttaatcaacggcaaaataactcctgttggtgatgacaattggaatacgc

SEQ ID NO: 397524 - DNA, 58 bp, Artificial
  Synthetic oligonucleotide
gacttaatctccgccaatccctcagtcccaagcctccagcctgttgactccgatttcc

SEQ ID NO: 397525 - DNA, 60 bp, Artificial
  Synthetic oligonucleotide
gacttaatgagatgacattgtccaagtaccgccatgacacaaaatgcgagcaacatgtca

SEQ ID NO: 397526 - DNA, 58 bp, Artificial
  Synthetic oligonucleotide
gacttaatgatggtaaatttccacggttcagttacacaatacgtgattccagaatggc

SEQ ID NO: 397527 - DNA, 54 bp, Artificial
  Synthetic oligonucleotide
gacttacaaaggcgaggacaaaggccgtgtggacggtccttgggagtggggcac

SEQ ID NO: 397528 - DNA, 60 bp, Artificial
  Synthetic oligonucleotide
gacttacaacaaccaagcgaagtgtatcctgaagaacaggtgcgaccagaatcatcaact

SEQ ID NO: 397529 - DNA, 60 bp, Artificial
  Synthetic oligonucleotide
gacttacaatcatcaggaagctgctaagtatgataatcacactgagaatgctttgttgtt

SEQ ID NO: 397530 - DNA, 56 bp, Artificial
  Synthetic oligonucleotide
gacttacagatctaccacattggcaacttgttaaaaggggatagggtaaatgggca

SEQ ID NO: 397531 - DNA, 57 bp, Artificial
  Synthetic oligonucleotide
gacttacccggagtgcaacctttcatggatatgtactacgctaccgtccctcgcgcc

SEQ ID NO: 397532 - DNA, 60 bp, Artificial
  Synthetic oligonucleotide
gacttaccgatgtgccagcactcaccaaatctacgttcccgcaatccgacgtgaagcttg

SEQ ID NO: 397533 - DNA, 60 bp, Artificial
  Synthetic oligonucleotide
gacttaccgctcgtatgcgatattgtcatggaaccccagggaaacgcctcttcatctgac

SEQ ID NO: 397534 - DNA, 53 bp, Artificial
  Synthetic oligonucleotide
gacttacggccctaacaaccaaatttagactaattacacctaacatatcgagg

SEQ ID NO: 397535 - DNA, 59 bp, Artificial
  Synthetic oligonucleotide
gacttacggtcctcgggaaagatgcaggtgcattaattgaagacccggatgaaggcaca

SEQ ID NO: 397536 - DNA, 53 bp, Artificial
  Synthetic oligonucleotide
gacttacggttatgtctcggccgaccgtttcctccctgggcctaacacgagcg

SEQ ID NO: 397537 - DNA, 58 bp, Artificial
  Synthetic oligonucleotide
gacttacggttctttatgtatgatgtgctacctatacttgactctacgccggtagtta

SEQ ID NO: 397538 - DNA, 57 bp, Artificial
  Synthetic oligonucleotide
gacttactacgagagtatggcctctacagtccatactacctaaaccccacaaggata

SEQ ID NO: 397539 - DNA, 52 bp, Artificial
  Synthetic oligonucleotide
gacttactggtcaaaacgtaccctacgcgagagagaagcgagcatcaaaaag

SEQ ID NO: 397540 - DNA, 53 bp, Artificial
  Synthetic oligonucleotide
gacttacttggagaaagggaatcctattttattcccgattgccgagacaaaac

SEQ ID NO: 397541 - DNA, 54 bp, Artificial
  Synthetic oligonucleotide
gacttactttccagcttcagatagagtagtttacgttaaagaatttatggtaaa

SEQ ID NO: 397542 - DNA, 60 bp, Artificial
  Synthetic oligonucleotide
gacttagacaaatatgacgctatgaaaagccatgaaagagtgacttggaatgattggcaa

SEQ ID NO: 397543 - DNA, 55 bp, Artificial
  Synthetic oligonucleotide
gacttagacacatatggagcacttacaagcagcaacttaggtcccgctaatgctg

SEQ ID NO: 397544 - DNA, 55 bp, Artificial
  Synthetic oligonucleotide
gacttagataaacatggagcacttacaagtaacaacacagccgccactaatgctg

SEQ ID NO: 397545 - DNA, 55 bp, Artificial
  Synthetic oligonucleotide
gacttagataaatatggggcacttacaagcagtaacacagctcataataatgctg

SEQ ID NO: 397546 - DNA, 50 bp, Artificial
  Synthetic oligonucleotide
gacttagatggtatggtgaccaagcagtgaacaaagctattccgaaatat

SEQ ID NO: 397547 - DNA, 55 bp, Artificial
  Synthetic oligonucleotide
gacttagggtttacatgaggtaacacatcaattattgagattctagccatgtctc

SEQ ID NO: 397548 - DNA, 55 bp, Artificial
  Synthetic oligonucleotide
gacttaggtaattgccatccgatagggatggtaatagggactccagcctgtgacc

SEQ ID NO: 397549 - DNA, 51 bp, Artificial
  Synthetic oligonucleotide
gacttaggttcagaaggagtacaattggtattaatacattcttgtactgtt

SEQ ID NO: 397550 - DNA, 55 bp, Artificial
  Synthetic oligonucleotide
gacttagtagataatatgagacccgtgccagatgtgccagcttatgtgacacttg

SEQ ID NO: 397551 - DNA, 58 bp, Artificial
  Synthetic oligonucleotide
gacttagtcttgtgtcacgtatggtgactataactgatccagtggcgttaaacgggac

SEQ ID NO: 397552 - DNA, 60 bp, Artificial
  Synthetic oligonucleotide
gacttagttcggactatttgcctgctagtgggcatatctcacaatttgtgagataaacgg

SEQ ID NO: 397553 - DNA, 55 bp, Artificial
  Synthetic oligonucleotide
gacttagtttagctcattgctaagcatcgaagcagaacttcagttgcttactttg

SEQ ID NO: 397554 - DNA, 51 bp, Artificial
  Synthetic oligonucleotide
gacttagtttcagaccgagatatgacattgtcccaccagttataaccgatc

SEQ ID NO: 397555 - DNA, 60 bp, Artificial
  Synthetic oligonucleotide
gacttatcacagatgtactctcctgtctttgagtacctatcaggtgacagacaagtagag

SEQ ID NO: 397556 - DNA, 54 bp, Artificial
  Synthetic oligonucleotide
gacttatcgtccccacatagcagactcccggaccccctttcaaagtgaccgagg

SEQ ID NO: 397557 - DNA, 55 bp, Artificial
  Synthetic oligonucleotide
gacttatgccctctgtgcttcaaaattgggaaataggtgtgcagcctcctacctc

SEQ ID NO: 397558 - DNA, 60 bp, Artificial
  Synthetic oligonucleotide
gacttatgttattaactggttctttcaaagaacagtctgatcgtgttcatgaaatggcta

SEQ ID NO: 397559 - DNA, 60 bp, Artificial
  Synthetic oligonucleotide
gacttatttatgcattatggcttaatctaggatgtaatttgttatctggagaataggtta

SEQ ID NO: 397560 - DNA, 60 bp, Artificial
  Synthetic oligonucleotide
gacttcaaaggacattgagaaccatgtcctaaaatccttgaatgcgcaagcatccatgtc

SEQ ID NO: 397561 - DNA, 60 bp, Artificial
  Synthetic oligonucleotide
gacttcaacgcagttgattacagtgtgctctacaatgcaggagagcagttggttcaacaa

SEQ ID NO: 397562 - DNA, 60 bp, Artificial
  Synthetic oligonucleotide
gacttcacagagggaggctacatcagtatgttttaccagaccagggtggttgtgcctgca

SEQ ID NO: 397563 - DNA, 60 bp, Artificial
  Synthetic oligonucleotide
gacttcacatcattaggtctcctgtaacaatgtatgtatctttgtgattccggttggtag

SEQ ID NO: 397564 - DNA, 55 bp, Artificial
  Synthetic oligonucleotide
gacttcacatttccttcccgccccaccacgcagtggacatgtccgagttttcctt

SEQ ID NO: 397565 - DNA, 56 bp, Artificial
  Synthetic oligonucleotide
gacttcacctggagttcttcaattcgctctcgacgagttgtttccctaccataact

SEQ ID NO: 397566 - DNA, 55 bp, Artificial
  Synthetic oligonucleotide
gacttcactaagaaggttagagacatcatagtgccagatctaggtgagtggccaa

SEQ ID NO: 397567 - DNA, 60 bp, Artificial
  Synthetic oligonucleotide
gacttcactcaggagatatgaagacgtcttgatccaggaagacagggtcatctagtgtga

SEQ ID NO: 397568 - DNA, 58 bp, Artificial
  Synthetic oligonucleotide
gacttcactgctctcgtgttgcggaataaggtgcttatcgggttctttgtggcgactt

SEQ ID NO: 397569 - DNA, 60 bp, Artificial
  Synthetic oligonucleotide
gacttcagaaataggataatatgtaatacagttaatgtgtaatcaatacgaataccatgg

SEQ ID NO: 397570 - DNA, 55 bp, Artificial
  Synthetic oligonucleotide
gacttcagacaggagtcaacacacgagtgtgacacaggagtgatgggagccgctg

SEQ ID NO: 397571 - DNA, 58 bp, Artificial
  Synthetic oligonucleotide
gacttcagccttgaccctaccttcaccatcgagactaccacgcttccccaagatgccg

SEQ ID NO: 397572 - DNA, 59 bp, Artificial
  Synthetic oligonucleotide
gacttcagccttgaccctaccttcaccattgagacaaccacgctcccccaggatgctgt

SEQ ID NO: 397573 - DNA, 52 bp, Artificial
  Synthetic oligonucleotide
gacttcagcgtatcacacggagtgctagacatgggacttgtggaaacagggg

SEQ ID NO: 397574 - DNA, 55 bp, Artificial
  Synthetic oligonucleotide
gacttcagctacagtgagatacactccataatggctgcccaaaagggcaaggccc

SEQ ID NO: 397575 - DNA, 57 bp, Artificial
  Synthetic oligonucleotide
gacttcagggcgctactacttctattctcgccacgttgctttccttggtcggtgaat

SEQ ID NO: 397576 - DNA, 51 bp, Artificial
  Synthetic oligonucleotide
gacttcagtcttaggcccaacggtttcatgggtaatccaatgcccaaaaat

SEQ ID NO: 397577 - DNA, 60 bp, Artificial
  Synthetic oligonucleotide
gacttcagttaattctgcagaagccagcactggtgcaggaggggggggcagtaatcctgt

SEQ ID NO: 397578 - DNA, 57 bp, Artificial
  Synthetic oligonucleotide
gacttcagttacatcgctatgcatgctcattggaaatgcaactgttatacctagtcc

SEQ ID NO: 397579 - DNA, 60 bp, Artificial
  Synthetic oligonucleotide
gacttcatatcgagtgtaacgagggctgtggaacttctggggcgcagcagtctcaagggt

SEQ ID NO: 397580 - DNA, 55 bp, Artificial
  Synthetic oligonucleotide
gacttcatattaattgcagcgaggactgtgaacaggggactaacggaagggtgga

SEQ ID NO: 397581 - DNA, 55 bp, Artificial
  Synthetic oligonucleotide
gacttcatattggtgatagcgagggcagcggaacttctgggacgcagcagtctcc

SEQ ID NO: 397582 - DNA, 60 bp, Artificial
  Synthetic oligonucleotide
gacttcatcatggcactcacaacagggaagggtacttcaacaagcttatgcatgtgccaa

SEQ ID NO: 397583 - DNA, 51 bp, Artificial
  Synthetic oligonucleotide
gacttcatgatctgtataacagaccaataacctactatttcgggaagaaag

SEQ ID NO: 397584 - DNA, 59 bp, Artificial
  Synthetic oligonucleotide
gacttcattatctacaggtttcttttaatcatggttgtactgtcaccattccttaatgc

SEQ ID NO: 397585 - DNA, 53 bp, Artificial
  Synthetic oligonucleotide
gacttccaaggtactttaatgtgaccctgaggaaaaggctagtgaagaacccc

SEQ ID NO: 397586 - DNA, 58 bp, Artificial
  Synthetic oligonucleotide
gacttccagttgatcccaatgataagcaagtgtaggaccaaagaagggaggcggaaga

SEQ ID NO: 397587 - DNA, 60 bp, Artificial
  Synthetic oligonucleotide
gacttccatgattctaatgtcaagaacctgtatgataaagtcagaatgcagctgagagac

SEQ ID NO: 397588 - DNA, 60 bp, Artificial
  Synthetic oligonucleotide
gacttccattggctactccttgatcccaatgacacagtgacttttactttcaatggagca

SEQ ID NO: 397589 - DNA, 55 bp, Artificial
  Synthetic oligonucleotide
gacttccattttgcggttgaaatgcttatttgggaacgtttaggtttggatgatg

SEQ ID NO: 397590 - DNA, 56 bp, Artificial
  Synthetic oligonucleotide
gacttcccaatatggttagcaacatggggatggattagttggttactaaaatccaa

SEQ ID NO: 397591 - DNA, 54 bp, Artificial
  Synthetic oligonucleotide
gacttccccacaggaccggagacactcaggcaagtccgcgaggccatagccaca

SEQ ID NO: 397592 - DNA, 55 bp, Artificial
  Synthetic oligonucleotide
gacttccctggtcaaccagatatgtggaaggacgccttcaaagcggacttttcgc

SEQ ID NO: 397593 - DNA, 55 bp, Artificial
  Synthetic oligonucleotide
gacttccggatgggcctccttgttttcagcggtccaaattccttctgatggatgc

SEQ ID NO: 397594 - DNA, 55 bp, Artificial
  Synthetic oligonucleotide
gacttccgtgacgctgtatacgatgggcgagttctatttccgcactacaagacgc

SEQ ID NO: 397595 - DNA, 60 bp, Artificial
  Synthetic oligonucleotide
gacttcgacatatacggagtcacttactctatcactccactggacttgccacggatcatc

SEQ ID NO: 397596 - DNA, 59 bp, Artificial
  Synthetic oligonucleotide
gacttcgacatgtacggagtcacttactctatcactccgctggacctaccagcaatcat

SEQ ID NO: 397597 - DNA, 55 bp, Artificial
  Synthetic oligonucleotide
gacttcgccaggcgcactacgtcgaatgacgtcaaaggacatcccggaaacggca

SEQ ID NO: 397598 - DNA, 54 bp, Artificial
  Synthetic oligonucleotide
gacttcggaccgttcatttggtacaacgcttttgttccgctcgacgttactgaa

SEQ ID NO: 397599 - DNA, 55 bp, Artificial
  Synthetic oligonucleotide
gacttcggtccgtgtacttctagcacaagatgctagtttcagggtacgggcaccc

SEQ ID NO: 397600 - DNA, 55 bp, Artificial
  Synthetic oligonucleotide
gacttcgtagtcataaagccaggtgcattatgcattatagacacccctgaaggga

SEQ ID NO: 397601 - DNA, 52 bp, Artificial
  Synthetic oligonucleotide
gacttcgtgggaaagacccccctatgagccaagattcagtcaaggtgcctat

SEQ ID NO: 397602 - DNA, 55 bp, Artificial
  Synthetic oligonucleotide
gacttctaatgcggagtcgactgtttcgaattattcaactgaccaatctgatgcc

SEQ ID NO: 397603 - DNA, 53 bp, Artificial
  Synthetic oligonucleotide
gacttctaccagaagtacaccccgttggttgttaccccagctaacaagggctc

SEQ ID NO: 397604 - DNA, 55 bp, Artificial
  Synthetic oligonucleotide
gacttctatccttcagtccgggatctcctagataccgcctcagctctgtttcggg

SEQ ID NO: 397605 - DNA, 54 bp, Artificial
  Synthetic oligonucleotide
gacttctcaccgaagtactgtgtacacgaggtcggaaaggcgttgctgcgacca

SEQ ID NO: 397606 - DNA, 55 bp, Artificial
  Synthetic oligonucleotide
gacttctccactatctcacctagagagaggtcttatcatatagggactgcacagg

SEQ ID NO: 397607 - DNA, 59 bp, Artificial
  Synthetic oligonucleotide
gacttctctataggtaatcccagctcgacgccacaacgtcacaacgtcacccctgccgc

SEQ ID NO: 397608 - DNA, 57 bp, Artificial
  Synthetic oligonucleotide
gacttctctctaaaaatgcccatttctcctgccccttggagccctcaaggcgtagaa

SEQ ID NO: 397609 - DNA, 55 bp, Artificial
  Synthetic oligonucleotide
gacttctgccatagacttaacagatattgatagagccgttgagatgatgaggaaa

SEQ ID NO: 397610 - DNA, 55 bp, Artificial
  Synthetic oligonucleotide
gacttctggcagactacacagggcatgcatgaaatagccgaatcattaagagctg

SEQ ID NO: 397611 - DNA, 50 bp, Artificial
  Synthetic oligonucleotide
gacttctggtttaggagagtatcgcgctgttgtctcacaacagtatgcca

SEQ ID NO: 397612 - DNA, 58 bp, Artificial
  Synthetic oligonucleotide
gacttctgtacccctggtaatgatgacgtgtaggggtgtcccgatgtaatataacata

SEQ ID NO: 397613 - DNA, 60 bp, Artificial
  Synthetic oligonucleotide
gacttcttaatgctgtccctgcagatctcttgtattgtcaggtgccaaactctctcactt

SEQ ID NO: 397614 - DNA, 52 bp, Artificial
  Synthetic oligonucleotide
gacttcttagtggtagtgtcgcgctcgacccacctcggaagggacagcatga

SEQ ID NO: 397615 - DNA, 53 bp, Artificial
  Synthetic oligonucleotide
gacttcttgaatggcattctaggaaataatgtgaactctggtcccaccctttc

SEQ ID NO: 397616 - DNA, 58 bp, Artificial
  Synthetic oligonucleotide
gacttctttagtgggatattcggaggaatcaaagacacgatagacagagttctaggcg

SEQ ID NO: 397617 - DNA, 59 bp, Artificial
  Synthetic oligonucleotide
gacttctttccgtcggtacgagatcttctagataccgcctcagctctatatcgggaagc

SEQ ID NO: 397618 - DNA, 55 bp, Artificial
  Synthetic oligonucleotide
gacttctttccttcggttcgagatctcctagacactgccttagctctgtatcggg

SEQ ID NO: 397619 - DNA, 60 bp, Artificial
  Synthetic oligonucleotide
gacttgaactcgactatccaatacactagccatacaactcctaatggacatacaagttag

SEQ ID NO: 397620 - DNA, 55 bp, Artificial
  Synthetic oligonucleotide
gacttgaacttgccttggacagattttaaatacccctatgttactacaacaatag

SEQ ID NO: 397621 - DNA, 55 bp, Artificial
  Synthetic oligonucleotide
gacttgaagccctggacttacataccagtgcaggatacccttacaccactatggg

SEQ ID NO: 397622 - DNA, 55 bp, Artificial
  Synthetic oligonucleotide
gacttgaatgtgaaatacccggctgcgtgtgtacattggcgtctccactagccgt

SEQ ID NO: 397623 - DNA, 55 bp, Artificial
  Synthetic oligonucleotide
gacttgaattggacctctctagtaattgggccttactgattcgtatatggcccag

SEQ ID NO: 397624 - DNA, 51 bp, Artificial
  Synthetic oligonucleotide
gacttgacgtggtaccaattgatggtgctaatgggtcaagggattataggc

SEQ ID NO: 397625 - DNA, 60 bp, Artificial
  Synthetic oligonucleotide
gacttgactacttttgatatttgcgatcccgttctctatgtagagatagtggatcggtat

SEQ ID NO: 397626 - DNA, 55 bp, Artificial
  Synthetic oligonucleotide
gacttgacttgaattgcttgatactttggttttggttttgacctggcttggattt

SEQ ID NO: 397627 - DNA, 60 bp, Artificial
  Synthetic oligonucleotide
gacttgaggtctgcagtgtcctacggctgttccatgatgcatgcccaagaagacagcggt

SEQ ID NO: 397628 - DNA, 55 bp, Artificial
  Synthetic oligonucleotide
gacttgaggttgagactcggcgggcctctccgcgagccgcagggttgatcctgtg

SEQ ID NO: 397629 - DNA, 60 bp, Artificial
  Synthetic oligonucleotide
gacttgatcgtcgggggcaatgccttccagggaggtcacatgatctttgatctgggcgac

SEQ ID NO: 397630 - DNA, 55 bp, Artificial
  Synthetic oligonucleotide
gacttgatgaccgaagtcgtgcaaacaaatggactctacggagtgatgtctgtag

SEQ ID NO: 397631 - DNA, 55 bp, Artificial
  Synthetic oligonucleotide
gacttgatgtagtaccacttaatggggaggagagcaactctagtggagagtatag

SEQ ID NO: 397632 - DNA, 60 bp, Artificial
  Synthetic oligonucleotide
gacttgcaacaggtctcttatgttcctcaccataaggtaggatgggcttggtggacttgc

SEQ ID NO: 397633 - DNA, 57 bp, Artificial
  Synthetic oligonucleotide
gacttgcaactagaagcactaacaatacagtcagaaacgcaatttttaacaggcata

SEQ ID NO: 397634 - DNA, 60 bp, Artificial
  Synthetic oligonucleotide
gacttgcagcccgaggcacgcgcggcaatacggtcactcacccagcgcctatactgtgga

SEQ ID NO: 397635 - DNA, 56 bp, Artificial
  Synthetic oligonucleotide
gacttgcagtgggacttagaaacacaccttctattgaacccaaagggctattcgga

SEQ ID NO: 397636 - DNA, 57 bp, Artificial
  Synthetic oligonucleotide
gacttgccgcggcgtgcccgcccatccaggtacccgctgccccgaactggtgagccc

SEQ ID NO: 397637 - DNA, 55 bp, Artificial
  Synthetic oligonucleotide
gacttgcgccgataacttatggataccggatgtagcaggatcgcccatgctagct

SEQ ID NO: 397638 - DNA, 52 bp, Artificial
  Synthetic oligonucleotide
gacttgctagaagacaaccaatcaccaatccccacaaccatcatggcgaaaa

SEQ ID NO: 397639 - DNA, 55 bp, Artificial
  Synthetic oligonucleotide
gacttggacaaatagtggttttaaggcatggcgaagaatagcaaatatagatgac

SEQ ID NO: 397640 - DNA, 58 bp, Artificial
  Synthetic oligonucleotide
gacttggacaacttcccagaaccgtcggctgatgaactgttgagagaaggaacaattg

SEQ ID NO: 397641 - DNA, 56 bp, Artificial
  Synthetic oligonucleotide
gacttggacacccggtggtttcaagaactatgccccgggtgcgcaactcaatggcc

SEQ ID NO: 397642 - DNA, 59 bp, Artificial
  Synthetic oligonucleotide
gacttggagcgaaaatccacttccagagtatttgctgaaactactcttctccggatcca

SEQ ID NO: 397643 - DNA, 58 bp, Artificial
  Synthetic oligonucleotide
gacttggatatgggactagtggttgctgcatacctcatggcttgctcaaaggtagaac

SEQ ID NO: 397644 - DNA, 57 bp, Artificial
  Synthetic oligonucleotide
gacttggatccgatgggttccactaactacggcaagttaaccaatgtgtctgttgta

SEQ ID NO: 397645 - DNA, 55 bp, Artificial
  Synthetic oligonucleotide
gacttggcaaggacaacgaacggcggcagtggcacgagcggacgaacctccagca

SEQ ID NO: 397646 - DNA, 55 bp, Artificial
  Synthetic oligonucleotide
gacttggcagcagcacaaagtaggtgtgtaaaggcacttgatttgggcgcttcac

SEQ ID NO: 397647 - DNA, 55 bp, Artificial
  Synthetic oligonucleotide
gacttggcatgatgcattatcgagaccaggaaatgatgattgtccgtggggtcac

SEQ ID NO: 397648 - DNA, 55 bp, Artificial
  Synthetic oligonucleotide
gacttggcgaggtggctaactttggtgatgacgcagagtagttcttcacactagg

SEQ ID NO: 397649 - DNA, 60 bp, Artificial
  Synthetic oligonucleotide
gacttggcgcgcgattctatggcatttggtgccgatttaatggcgcaatatcaagataat

SEQ ID NO: 397650 - DNA, 55 bp, Artificial
  Synthetic oligonucleotide
gacttggcgtaacaccgtggtcgatctagtcctgcgcataatcgacagtggccgg

SEQ ID NO: 397651 - DNA, 60 bp, Artificial
  Synthetic oligonucleotide
gacttggctctagtgcttacatggcatatcgatagaaacttgtgcgtgcctgaaactttg

SEQ ID NO: 397652 - DNA, 60 bp, Artificial
  Synthetic oligonucleotide
gacttgggctctgagacacccaggattcacggtaatagccctctttctagcacatgccat

SEQ ID NO: 397653 - DNA, 59 bp, Artificial
  Synthetic oligonucleotide
gacttgggctttgcgacacccaggatttacggtgatagcccttttcttggcacatgcca

SEQ ID NO: 397654 - DNA, 55 bp, Artificial
  Synthetic oligonucleotide
gacttggtcaatcggtacccagcactagtcctatggcaattggtgaacggtaccc

SEQ ID NO: 397655 - DNA, 59 bp, Artificial
  Synthetic oligonucleotide
gacttggtgtcaactgcgtttagtcccatggtccaagagctcgcccgcaaggtcattaa

SEQ ID NO: 397656 - DNA, 55 bp, Artificial
  Synthetic oligonucleotide
gacttggtgttcgagcagtccgcgactctccaaatacgcggcggctgggcttcct

SEQ ID NO: 397657 - DNA, 59 bp, Artificial
  Synthetic oligonucleotide
gacttggttccattgttcgagaacactgctgtcagctacgcttgctggcaggaagagga

SEQ ID NO: 397658 - DNA, 53 bp, Artificial
  Synthetic oligonucleotide
gacttgtaagccgatattgcgcgaggcgcagcctaacgcaaatcaaccgcaac

SEQ ID NO: 397659 - DNA, 60 bp, Artificial
  Synthetic oligonucleotide
gacttgtacaaatttgccctatccaaggagcacaccagcatgcttcaagcttacggcata

SEQ ID NO: 397660 - DNA, 57 bp, Artificial
  Synthetic oligonucleotide
gacttgtagaagtccaggagagtgagtactaccccagaagataccagtcccatgtac

SEQ ID NO: 397661 - DNA, 59 bp, Artificial
  Synthetic oligonucleotide
gacttgtataatgcttatttgcaagatcccactaatatgcaaatttggaataattgcgg

SEQ ID NO: 397662 - DNA, 55 bp, Artificial
  Synthetic oligonucleotide
gacttgtctaagaaagatcgagaagcattatacttgacacttcgtcaatctatgc

SEQ ID NO: 397663 - DNA, 55 bp, Artificial
  Synthetic oligonucleotide
gacttgtctcagatgtactcccctgtcttcgagtacttatcaggtgacagacaag

SEQ ID NO: 397664 - DNA, 55 bp, Artificial
  Synthetic oligonucleotide
gacttgtggaatcggttgctgcacttgacacctgacggccttttcgacgcctcgc

SEQ ID NO: 397665 - DNA, 55 bp, Artificial
  Synthetic oligonucleotide
gacttgtggatcagtagaacaacaattaaatataactgcacccaaggactcgcgc

SEQ ID NO: 397666 - DNA, 60 bp, Artificial
  Synthetic oligonucleotide
gacttgtggttggagaatggaaagtacgcgacggatgtttatgcatatggagacgtatca

SEQ ID NO: 397667 - DNA, 58 bp, Artificial
  Synthetic oligonucleotide
gacttgtgtgccgggggatgcactacgatatgtagctgggcccgttgagtcttgtgag

SEQ ID NO: 397668 - DNA, 55 bp, Artificial
  Synthetic oligonucleotide
gacttgtgtgttatatcacgtgacatcatgtgactgcgtacgtgactagataagg

SEQ ID NO: 397669 - DNA, 50 bp, Artificial
  Synthetic oligonucleotide
gacttgttcgaggccatgcgaggggcttatggtgaagatccagcatggaa

SEQ ID NO: 397670 - DNA, 58 bp, Artificial
  Synthetic oligonucleotide
gacttgtttgccctggcaatgaccagggttgctgagcacaacgacattgccgttgatg

SEQ ID NO: 397671 - DNA, 57 bp, Artificial
  Synthetic oligonucleotide
gactttaaacaagaggcgttaaaatatgggactggtttgcaatgggatgtacatgtg

SEQ ID NO: 397672 - DNA, 55 bp, Artificial
  Synthetic oligonucleotide
gactttaaagaaccatggctagaaggcttcggaaatgcattttacagcacactag

SEQ ID NO: 397673 - DNA, 55 bp, Artificial
  Synthetic oligonucleotide
gactttaataagctgaagattaaacagagtgatgttgattggtacagggatcccg

SEQ ID NO: 397674 - DNA, 55 bp, Artificial
  Synthetic oligonucleotide
gactttacacttcacgaaaacggatactgcactgattgtggtggttaccttgctc

SEQ ID NO: 397675 - DNA, 51 bp, Artificial
  Synthetic oligonucleotide
gactttactacaccgtcctcgcctgattcggttgttacggaaagctcttct

SEQ ID NO: 397676 - DNA, 55 bp, Artificial
  Synthetic oligonucleotide
gactttagagtgctgaatcaggcatttgcgttgaccaacagagtgtcaatgccga

SEQ ID NO: 397677 - DNA, 56 bp, Artificial
  Synthetic oligonucleotide
gactttagcagctgatcactttaccaccttacttcacgaaccaaagttgttggtac

SEQ ID NO: 397678 - DNA, 60 bp, Artificial
  Synthetic oligonucleotide
gactttagctatctctgtagccgccctggtatacagcatgggggctagcacaccgagcga

SEQ ID NO: 397679 - DNA, 55 bp, Artificial
  Synthetic oligonucleotide
gactttagctctctttccatgtggtcaaattacatgcaagaagtgtgttgagaac

SEQ ID NO: 397680 - DNA, 55 bp, Artificial
  Synthetic oligonucleotide
gactttagtatacctgtaggtgcatggccagtcatgaatggaggcgctgtttcgt

SEQ ID NO: 397681 - DNA, 59 bp, Artificial
  Synthetic oligonucleotide
gactttagtccagaagactgattgtaatgcaaatggttttcagggctattatatttgtc

SEQ ID NO: 397682 - DNA, 55 bp, Artificial
  Synthetic oligonucleotide
gactttagtgttaggttgctccgtgacacgacacacatatcgcaaacagccatac

SEQ ID NO: 397683 - DNA, 57 bp, Artificial
  Synthetic oligonucleotide
gactttatatacttcgtcacgaagtagttgagcgcgtcaaaatgtggaatccgttag

SEQ ID NO: 397684 - DNA, 60 bp, Artificial
  Synthetic oligonucleotide
gactttatgtgtgttggatggtcaagcacaacttgccatgatgggattgctaggatgact

SEQ ID NO: 397685 - DNA, 55 bp, Artificial
  Synthetic oligonucleotide
gactttattacagatacttctacaaccccagtaccatctataccctctacatcct

SEQ ID NO: 397686 - DNA, 56 bp, Artificial
  Synthetic oligonucleotide
gactttcaacaaatgaaaacactgtgtagtgagattagtttggttactttggaaca

SEQ ID NO: 397687 - DNA, 58 bp, Artificial
  Synthetic oligonucleotide
gactttcaatccgccagttagttactggatgctacttgcaccaacaaacgctggggta

SEQ ID NO: 397688 - DNA, 58 bp, Artificial
  Synthetic oligonucleotide
gactttcacgtccgcacctatcgacactttgcttggtgcgaaaattgtggtggacgac

SEQ ID NO: 397689 - DNA, 60 bp, Artificial
  Synthetic oligonucleotide
gactttcagcgagtacaagagactagcaagctttatgagaggattatcggtagtaccgag

SEQ ID NO: 397690 - DNA, 58 bp, Artificial
  Synthetic oligonucleotide
gactttcagtattgtcaacatccggaatcgaaacatacttcaaagactgtgtatttaa

SEQ ID NO: 397691 - DNA, 60 bp, Artificial
  Synthetic oligonucleotide
gactttcatattcttgtggatctgagcctaagctgatagtgattaagggaacattagttt

SEQ ID NO: 397692 - DNA, 53 bp, Artificial
  Synthetic oligonucleotide
gactttccactggggcgttccagtaggtggggtctgggcgggactggggagtg

SEQ ID NO: 397693 - DNA, 54 bp, Artificial
  Synthetic oligonucleotide
gactttccagaaggcgcggcctgagtgactaagccccgttggggactttccgaa

SEQ ID NO: 397694 - DNA, 55 bp, Artificial
  Synthetic oligonucleotide
gactttccagagggcggtacaggggcgggagcatgggagtggtaaccctcagatg

SEQ ID NO: 397695 - DNA, 59 bp, Artificial
  Synthetic oligonucleotide
gactttccagggagaattcgcctgggcgggactagggagtggcgagccctcagatgctg

SEQ ID NO: 397696 - DNA, 57 bp, Artificial
  Synthetic oligonucleotide
gactttcccaaatcgttgcatggtttccgttgtatgcttgccataaagtatttacaa

SEQ ID NO: 397697 - DNA, 51 bp, Artificial
  Synthetic oligonucleotide
gactttccccaggcgtgggcagaaacaggaggtatgggaatggctcattgt

SEQ ID NO: 397698 - DNA, 53 bp, Artificial
  Synthetic oligonucleotide
gactttccgctggggactttccagggagaattcgcctgggcgggactagggag

SEQ ID NO: 397699 - DNA, 52 bp, Artificial
  Synthetic oligonucleotide
gactttccggggaggtgtggtttgggcggagttggggagtggcaaaccctca

SEQ ID NO: 397700 - DNA, 55 bp, Artificial
  Synthetic oligonucleotide
gactttcctttcacctgaaggaaaggctttccccatgatctcggaagctgtccct

SEQ ID NO: 397701 - DNA, 54 bp, Artificial
  Synthetic oligonucleotide
gactttcgacaatgtttatttctgtcgtttaactcgtacctcaacgagtcttac

SEQ ID NO: 397702 - DNA, 60 bp, Artificial
  Synthetic oligonucleotide
gactttcgagcacataatttacatatgatttgtccgtggcaaaacgaacagctctaatta

SEQ ID NO: 397703 - DNA, 58 bp, Artificial
  Synthetic oligonucleotide
gactttcggaagtacgctaggagttatgctttgcgttagagagaatgttatccctggc

SEQ ID NO: 397704 - DNA, 60 bp, Artificial
  Synthetic oligonucleotide
gactttcgtagagcttgtatcagcatattgtataatggcttatgtactacttacttagat

SEQ ID NO: 397705 - DNA, 53 bp, Artificial
  Synthetic oligonucleotide
gactttcgtgtttcacgtcggcacctgatttaatttaacgaaagcgtttttgc

SEQ ID NO: 397706 - DNA, 60 bp, Artificial
  Synthetic oligonucleotide
gactttcgttcacccacctacagctggactcactacaccgcgtggccactatagctggat

SEQ ID NO: 397707 - DNA, 54 bp, Artificial
  Synthetic oligonucleotide
gactttctcatcctgactagagtactctaaaagtttaaacagaaggtccctaaa

SEQ ID NO: 397708 - DNA, 55 bp, Artificial
  Synthetic oligonucleotide
gactttctgcctgggactttccactggggcgttccaggaggtgtggtctgggcgg

SEQ ID NO: 397709 - DNA, 54 bp, Artificial
  Synthetic oligonucleotide
gactttctgctgacacagaagggactttccgtttggggcgttccaggaggggtg

SEQ ID NO: 397710 - DNA, 57 bp, Artificial
  Synthetic oligonucleotide
gactttctgctgacacagaagggacttttcgtggggactttccactgaggcgttcta

SEQ ID NO: 397711 - DNA, 56 bp, Artificial
  Synthetic oligonucleotide
gactttgaaagagagggatactccctagtcggaattgaccctttccgtctgctcca

SEQ ID NO: 397712 - DNA, 60 bp, Artificial
  Synthetic oligonucleotide
gactttgaaggctgtgacacaggccactagggcatcgtgtctgacctctgatgcgataac

SEQ ID NO: 397713 - DNA, 60 bp, Artificial
  Synthetic oligonucleotide
gactttgacaactgcagagacataagcgatttgaagcaatatgatagtgacgaacctgaa

SEQ ID NO: 397714 - DNA, 60 bp, Artificial
  Synthetic oligonucleotide
gactttgactcagtgatagactgcaatacgtctgtcatacaaacagttgacttcagccta

SEQ ID NO: 397715 - DNA, 59 bp, Artificial
  Synthetic oligonucleotide
gactttgatgagtgtcgaagtagggcaatcacctaacgtgtatcaagctaggtttgaag

SEQ ID NO: 397716 - DNA, 60 bp, Artificial
  Synthetic oligonucleotide
gactttgatgggcaattgagtacagtggttcctcgagggtgatgaagactgcattcttaa

SEQ ID NO: 397717 - DNA, 55 bp, Artificial
  Synthetic oligonucleotide
gactttgattgcggcaatgttgagtcaacgcactatgtcactagatttcgtgact

SEQ ID NO: 397718 - DNA, 55 bp, Artificial
  Synthetic oligonucleotide
gactttgcaaaggttccgctcgttaacatcggtgccagtatagggaacttgcggt

SEQ ID NO: 397719 - DNA, 60 bp, Artificial
  Synthetic oligonucleotide
gactttgccacatgagtacaaaggtagagttgaaggattgctgttattgcatggcggatt

SEQ ID NO: 397720 - DNA, 59 bp, Artificial
  Synthetic oligonucleotide
gactttgcccccgagacagctagcacgctatacctaattttacactatgcaatccccca

SEQ ID NO: 397721 - DNA, 55 bp, Artificial
  Synthetic oligonucleotide
gactttgctcttatagtgaatgctccgaatcatgagggcatacaagcaggagtag

SEQ ID NO: 397722 - DNA, 56 bp, Artificial
  Synthetic oligonucleotide
gactttgcttggtgctttgaagaggctcaacagtctgacttggtttagtctctgag

SEQ ID NO: 397723 - DNA, 56 bp, Artificial
  Synthetic oligonucleotide
gactttggagcaaaagacatccccctcaaaacacaagaggaaacggagcaaacatc

SEQ ID NO: 397724 - DNA, 55 bp, Artificial
  Synthetic oligonucleotide
gactttggagtacttaatgaattcggcagcacagtagaccgtgacgccttttcag

SEQ ID NO: 397725 - DNA, 53 bp, Artificial
  Synthetic oligonucleotide
gactttgggggccgtttttgtggcccgacctgaggaagggagtcgatgtggaa

SEQ ID NO: 397726 - DNA, 56 bp, Artificial
  Synthetic oligonucleotide
gactttgtagaggatgttttcgtaagggtttctatctccaacttgatccgagacaa

SEQ ID NO: 397727 - DNA, 60 bp, Artificial
  Synthetic oligonucleotide
gactttgtccggcctacagccatttactactatggaagcactgaccgtctgctcactgta

SEQ ID NO: 397728 - DNA, 60 bp, Artificial
  Synthetic oligonucleotide
gactttgtctcgtgtgtcgccactacgtattaatcccactctaatcgctaacgccatgtc

SEQ ID NO: 397729 - DNA, 55 bp, Artificial
  Synthetic oligonucleotide
gactttgttcggtcacctgttgcgcggacggaggagacttggggtttgctcggtg

SEQ ID NO: 397730 - DNA, 60 bp, Artificial
  Synthetic oligonucleotide
gactttgttggcgcagcaatttgaacgtgagatcaacgctgcggttgcaagggatgactg

SEQ ID NO: 397731 - DNA, 54 bp, Artificial
  Synthetic oligonucleotide
gacttttacctagttgccaattatgattgggtacctacttcaaccacaaaagta

SEQ ID NO: 397732 - DNA, 55 bp, Artificial
  Synthetic oligonucleotide
gacttttatgagatgacttcaaagactcctaaacgagcgaaagaagcacacatgc

SEQ ID NO: 397733 - DNA, 50 bp, Artificial
  Synthetic oligonucleotide
gacttttcgtcctcatccagacgcttggtcatctcataagcgtcggaata

SEQ ID NO: 397734 - DNA, 60 bp, Artificial
  Synthetic oligonucleotide
gacttttgagtctgatagaattattttgccactcgacataatagatgaccacttctcgaa

SEQ ID NO: 397735 - DNA, 55 bp, Artificial
  Synthetic oligonucleotide
gacttttgatccagtggctttacagggatattaccctgcaggaggtattttggcc

SEQ ID NO: 397736 - DNA, 53 bp, Artificial
  Synthetic oligonucleotide
gacttttgatttcttgtgtatcgttaaagcgtgcctatgcgtgaatcggcaga

SEQ ID NO: 397737 - DNA, 55 bp, Artificial
  Synthetic oligonucleotide
gacttttgcttaagaatggcaagagatactaatctacatacccaggttggtgcca

SEQ ID NO: 397738 - DNA, 55 bp, Artificial
  Synthetic oligonucleotide
gacttttggctggataagtacggccaaagctgttgacaggttgtatggggccggg

SEQ ID NO: 397739 - DNA, 60 bp, Artificial
  Synthetic oligonucleotide
gactttttgttgaggggaccatttgaagcgaagtgggtcattgagatgcagatcacagaa

SEQ ID NO: 397740 - DNA, 57 bp, Artificial
  Synthetic oligonucleotide
gacttttttaccaaccgacttcgatacaactaatgctatagtaacttcatatgatgg

SEQ ID NO: 397741 - DNA, 59 bp, Artificial
  Synthetic oligonucleotide
gacttttttgccgacggattttgagacgaatggatcaataattacttcatatgatggat

SEQ ID NO: 397742 - DNA, 58 bp, Artificial
  Synthetic oligonucleotide
gagaaaaaaacaaaccagtctagcacagattaacacaatctgccctagcttacaggct

SEQ ID NO: 397743 - DNA, 52 bp, Artificial
  Synthetic oligonucleotide
gagaaaaacggatgggcttcttggtctcagaacaatttactgatgagcactc

SEQ ID NO: 397744 - DNA, 54 bp, Artificial
  Synthetic oligonucleotide
gagaaaaactacatcattgagggaaacctacggttccacaaaatagcggattac

SEQ ID NO: 397745 - DNA, 54 bp, Artificial
  Synthetic oligonucleotide
gagaaaaatatttataccaaacctgtggcctcagactattgggatggttacagt

SEQ ID NO: 397746 - DNA, 55 bp, Artificial
  Synthetic oligonucleotide
gagaaaaatctcaagctagacacatacatcgtgcatgttggcaggctctcgacag

SEQ ID NO: 397747 - DNA, 55 bp, Artificial
  Synthetic oligonucleotide
gagaaaacacgagagttgaaatccatatgtccactcaagtaattatgtgggccta

SEQ ID NO: 397748 - DNA, 55 bp, Artificial
  Synthetic oligonucleotide
gagaaaagaagactgcaattgattatgccagctaggttttatccaaaggttacca

SEQ ID NO: 397749 - DNA, 51 bp, Artificial
  Synthetic oligonucleotide
gagaaaagcaatacatatagagctggaggcttattcacccatttatggaca

SEQ ID NO: 397750 - DNA, 53 bp, Artificial
  Synthetic oligonucleotide
gagaaaagcatactttaatcagttaaccagtgaaggaccacaaaacacaaaca

SEQ ID NO: 397751 - DNA, 55 bp, Artificial
  Synthetic oligonucleotide
gagaaaaggagaatgtgcaccgtctggatgaattgttgcccaatgtcaccggtgg

SEQ ID NO: 397752 - DNA, 55 bp, Artificial
  Synthetic oligonucleotide
gagaaaagttttcgaggaaagacgagaagcgaattctctgaatggctagaaaacc

SEQ ID NO: 397753 - DNA, 55 bp, Artificial
  Synthetic oligonucleotide
gagaaaataggggaccatcaaactgtggtatgtccaacaataacagccccggtag

SEQ ID NO: 397754 - DNA, 54 bp, Artificial
  Synthetic oligonucleotide
gagaaaatatggaaaggcagtttgtacaagtttgataccacaaaaaatccccaa

SEQ ID NO: 397755 - DNA, 55 bp, Artificial
  Synthetic oligonucleotide
gagaaaatattcgctggccctgcgatgggaccgtcggcccaacttgcgctgtccc

SEQ ID NO: 397756 - DNA, 52 bp, Artificial
  Synthetic oligonucleotide
gagaaaatctggattctgactaaaattctagtccggatagccgcaagttacc

SEQ ID NO: 397757 - DNA, 55 bp, Artificial
  Synthetic oligonucleotide
gagaaaatcttatcgttcagatccaaatggccgcaaagataattgtgaggaccca

SEQ ID NO: 397758 - DNA, 60 bp, Artificial
  Synthetic oligonucleotide
gagaaaatgctgggtactagagaacgcaagcttacgtatggctgcttgtgggcgtttcgc

SEQ ID NO: 397759 - DNA, 60 bp, Artificial
  Synthetic oligonucleotide
gagaaaatgtacatttacaatggaatggagcaagtcggtcgtgtgagaggtacactaatg

SEQ ID NO: 397760 - DNA, 58 bp, Artificial
  Synthetic oligonucleotide
gagaaacaaacaggaacattaccattcaaaatctgtaactcaaaaatcgatgccactc

SEQ ID NO: 397761 - DNA, 60 bp, Artificial
  Synthetic oligonucleotide
gagaaacaatccatagctatgatagcatcgctactatcagctttagccctacgagtgtca

SEQ ID NO: 397762 - DNA, 55 bp, Artificial
  Synthetic oligonucleotide
gagaaacacaccacgccctctaagattacctgatggacctccctgttctcaacgg

SEQ ID NO: 397763 - DNA, 55 bp, Artificial
  Synthetic oligonucleotide
gagaaacaggaggtacaacattggaggctgcctagaggcactattccaaggccca

SEQ ID NO: 397764 - DNA, 59 bp, Artificial
  Synthetic oligonucleotide
gagaaacatctacacaacataccacgttagagcttaacgtgatggccggatagacgacc

SEQ ID NO: 397765 - DNA, 55 bp, Artificial
  Synthetic oligonucleotide
gagaaaccaacatgtgtgtggattgaaggcaataactattatcctagcagatacc

SEQ ID NO: 397766 - DNA, 59 bp, Artificial
  Synthetic oligonucleotide
gagaaaccgaaatttctcccagatctatatgactacaagggaaacagattcattgagat

SEQ ID NO: 397767 - DNA, 57 bp, Artificial
  Synthetic oligonucleotide
gagaaacctctggagtcctctagaccgcaaggaggaaattaccagcagggggtgatc

SEQ ID NO: 397768 - DNA, 58 bp, Artificial
  Synthetic oligonucleotide
gagaaaccttgaatgtggaatccaatgggaatttagtagctccttggtatgcttacaa

SEQ ID NO: 397769 - DNA, 57 bp, Artificial
  Synthetic oligonucleotide
gagaaacgtccctgtgctgaaccgttgaacgtatcgttcgcttgtaccgcagaacaa

SEQ ID NO: 397770 - DNA, 58 bp, Artificial
  Synthetic oligonucleotide
gagaaacgtcgacgtggggacccgcacgccaaccatatggcttcttcctagagacaga

SEQ ID NO: 397771 - DNA, 60 bp, Artificial
  Synthetic oligonucleotide
gagaaactacagctcactcagtgaacaccagggtattacagactatgtcacacaactggg

SEQ ID NO: 397772 - DNA, 54 bp, Artificial
  Synthetic oligonucleotide
gagaaactactggttggtgttgaccgcccgatcccgctacgaggtggaccaccc

SEQ ID NO: 397773 - DNA, 60 bp, Artificial
  Synthetic oligonucleotide
gagaaactgcagggtatcatggcagattcatttggtgctgaagtgactggttcgcgcaag

SEQ ID NO: 397774 - DNA, 55 bp, Artificial
  Synthetic oligonucleotide
gagaaacttacgcacggatgaacgccaaggttaaagctctggtatccacggtagg

SEQ ID NO: 397775 - DNA, 55 bp, Artificial
  Synthetic oligonucleotide
gagaaacttgtgtgaaatcaagggagtctgcaatgagctttgcatcattgaggac

SEQ ID NO: 397776 - DNA, 57 bp, Artificial
  Synthetic oligonucleotide
gagaaactttacatggcgtgtgagttagatcgcgattatttggacgcaaggggcgtt

SEQ ID NO: 397777 - DNA, 58 bp, Artificial
  Synthetic oligonucleotide
gagaaagaaagactagtatggggtattagaggccttgaagtagagagaggtcagcctc

SEQ ID NO: 397778 - DNA, 55 bp, Artificial
  Synthetic oligonucleotide
gagaaagacaaagggttactaattgaatacaacctaaccaacattgcatctcgcg

SEQ ID NO: 397779 - DNA, 55 bp, Artificial
  Synthetic oligonucleotide
gagaaagagaccgcgacttaccatgtatctcgtgcggaacgctcacgtctgctca

SEQ ID NO: 397780 - DNA, 60 bp, Artificial
  Synthetic oligonucleotide
gagaaagagatgatagaatataggcttaaatcttatgattggtggagaatgagattctat

SEQ ID NO: 397781 - DNA, 58 bp, Artificial
  Synthetic oligonucleotide
gagaaagataaaaggcgatacggtgttcgatatgactgagtgagctaaaaacttaaca

SEQ ID NO: 397782 - DNA, 60 bp, Artificial
  Synthetic oligonucleotide
gagaaagataaatgggctggatccatgcaattgggccttaatttgaatgggcttggacca

SEQ ID NO: 397783 - DNA, 52 bp, Artificial
  Synthetic oligonucleotide
gagaaagatggtacaaaccagtgacagattcgtagatgttccagatttctgt

SEQ ID NO: 397784 - DNA, 59 bp, Artificial
  Synthetic oligonucleotide
gagaaagcaatccgtttaagggactgtcaactgatagaaagatggatgaggtttctcaa

SEQ ID NO: 397785 - DNA, 60 bp, Artificial
  Synthetic oligonucleotide
gagaaagcaggagtcctgggaatgctgaaattgaagatctcatttttctggcacggtctg

SEQ ID NO: 397786 - DNA, 55 bp, Artificial
  Synthetic oligonucleotide
gagaaagcagtcaatcagcaccatgggtttatggaggtggctagtagtggccagt

SEQ ID NO: 397787 - DNA, 55 bp, Artificial
  Synthetic oligonucleotide
gagaaagcatttctgcagtatcgtgatgcaggagtgcatgttgctggatccgtaa

SEQ ID NO: 397788 - DNA, 57 bp, Artificial
  Synthetic oligonucleotide
gagaaagccacgctaccgaaatagcgtggcttcgagggactgaggtcttagcgcttg

SEQ ID NO: 397789 - DNA, 60 bp, Artificial
  Synthetic oligonucleotide
gagaaagccggaatcctggaaatgctgaaatagaagaccttatatttctggctcgatctg

SEQ ID NO: 397790 - DNA, 55 bp, Artificial
  Synthetic oligonucleotide
gagaaagcgaaattgaactcgtatgcacccgtatatttagagaaacgtcgcgctc

SEQ ID NO: 397791 - DNA, 55 bp, Artificial
  Synthetic oligonucleotide
gagaaagcgatcgaaaacaaattgttagacatcgttggtatgaacctgaggagac

SEQ ID NO: 397792 - DNA, 57 bp, Artificial
  Synthetic oligonucleotide
gagaaagctaatgtattgatagggcaaggagacgtagtgttggtaatgaaacggaaa

SEQ ID NO: 397793 - DNA, 51 bp, Artificial
  Synthetic oligonucleotide
gagaaagctgtggaagggtacaacgggtttacggtcccacaaaaaccgcca

SEQ ID NO: 397794 - DNA, 57 bp, Artificial
  Synthetic oligonucleotide
gagaaaggaataaaccccaattacctcctggcttggaagcaagtgctagcagaactc

SEQ ID NO: 397795 - DNA, 55 bp, Artificial
  Synthetic oligonucleotide
gagaaaggatggaactcttgtagcaaacgttcaagaaataaccgtggatgccagc

SEQ ID NO: 397796 - DNA, 55 bp, Artificial
  Synthetic oligonucleotide
gagaaaggatttgtctcgccaataggaaaagtcattgatctagggtgtgggcgtg

SEQ ID NO: 397797 - DNA, 55 bp, Artificial
  Synthetic oligonucleotide
gagaaagtctcctgcgagaaggtctcctgcgagaaggtctcctgcgagaaggtct

SEQ ID NO: 397798 - DNA, 60 bp, Artificial
  Synthetic oligonucleotide
gagaaagtggggtactttcacttgcatcgtgtcaacatgatgtgacacaccctcatatag

SEQ ID NO: 397799 - DNA, 58 bp, Artificial
  Synthetic oligonucleotide
gagaaagttcacttcgctggttttaccgctccagtgtgtgagagtggagaagtaatta

SEQ ID NO: 397800 - DNA, 54 bp, Artificial
  Synthetic oligonucleotide
gagaaataaatcccggattcccaaaatacccctaaatatgtgtctggaaggcgc

SEQ ID NO: 397801 - DNA, 57 bp, Artificial
  Synthetic oligonucleotide
gagaaataatgaagttctatagaaaatttaggatagcaattgtacggccaaacacgc

SEQ ID NO: 397802 - DNA, 58 bp, Artificial
  Synthetic oligonucleotide
gagaaataattagacctagttgtgagtatcccgcaggacataataaggtaggatctct

SEQ ID NO: 397803 - DNA, 56 bp, Artificial
  Synthetic oligonucleotide
gagaaatccacacggagaaagaagacaaaccacctccagaggaccccttcagcgaa

SEQ ID NO: 397804 - DNA, 55 bp, Artificial
  Synthetic oligonucleotide
gagaaatccttgggagataaatacttgctgtgttgtttactcgttgtctcctgcg

SEQ ID NO: 397805 - DNA, 60 bp, Artificial
  Synthetic oligonucleotide
gagaaatcgcaccaaggcatacatgcctaggtatggattacaacgtaacttgactgatat

SEQ ID NO: 397806 - DNA, 55 bp, Artificial
  Synthetic oligonucleotide
gagaaatcgtataaagctatggtaggtctaggatagaaaaaaaacggccaagctc

SEQ ID NO: 397807 - DNA, 51 bp, Artificial
  Synthetic oligonucleotide
gagaaatctcttagaactcaagaaaccaagaattgttcagtggggctctgc

SEQ ID NO: 397808 - DNA, 55 bp, Artificial
  Synthetic oligonucleotide
gagaaatctgcgccggcattcggcgctacccctcttactaccaatccatccaacc

SEQ ID NO: 397809 - DNA, 57 bp, Artificial
  Synthetic oligonucleotide
gagaaatgattggtaatcagcctaatgttaataaccttgatgtaaatttggaggagt

SEQ ID NO: 397810 - DNA, 60 bp, Artificial
  Synthetic oligonucleotide
gagaaatgcacatgtttttgatggattctcaatagagtccgactacactgctttcgattc

SEQ ID NO: 397811 - DNA, 55 bp, Artificial
  Synthetic oligonucleotide
gagaaatgcagaggcaccatacatgccgaggtatggtttgcttcgaaacttacgg

SEQ ID NO: 397812 - DNA, 60 bp, Artificial
  Synthetic oligonucleotide
gagaaatgcctatgcacctcgtggtctatggaggggaccttccaccagagccaactacac

SEQ ID NO: 397813 - DNA, 60 bp, Artificial
  Synthetic oligonucleotide
gagaaatgctcttggagattgcccaaagtacataaagtctggacagctgaagcttgcaac

SEQ ID NO: 397814 - DNA, 59 bp, Artificial
  Synthetic oligonucleotide
gagaaatggaggaaatagcttttatgcagaactcaaatggctagtgtcaaagagtaagg

SEQ ID NO: 397815 - DNA, 60 bp, Artificial
  Synthetic oligonucleotide
gagaaatggaggagatagtttctatgcagaggtcaaatggctagtatcaaaggataaggg

SEQ ID NO: 397816 - DNA, 55 bp, Artificial
  Synthetic oligonucleotide
gagaaatggatacctgttgttgaaggctctccaggactagtagtgatgcatgctg

SEQ ID NO: 397817 - DNA, 55 bp, Artificial
  Synthetic oligonucleotide
gagaaattaggattaactggatgggaagacttagatcaggattccatagaaaccg

SEQ ID NO: 397818 - DNA, 60 bp, Artificial
  Synthetic oligonucleotide
gagaaattcctctggggtctgacacgcttatggagctcgctaatcttggcgagtttctcc

SEQ ID NO: 397819 - DNA, 57 bp, Artificial
  Synthetic oligonucleotide
gagaaattggatacctatagaaagtctactgtctgaagaaaagactattcttaaaga

SEQ ID NO: 397820 - DNA, 60 bp, Artificial
  Synthetic oligonucleotide
gagaaatttataccaatgcgaacctatagagtgatggataatgataccgcatttgagact

SEQ ID NO: 397821 - DNA, 59 bp, Artificial
  Synthetic oligonucleotide
gagaacaacagcttattacaccctatgtgccaacatggagcagaggactctgagagaga

SEQ ID NO: 397822 - DNA, 59 bp, Artificial
  Synthetic oligonucleotide
gagaacaacatacctattaacattctcagaacgggagataactttcatacaggcttgta

SEQ ID NO: 397823 - DNA, 55 bp, Artificial
  Synthetic oligonucleotide
gagaacaacatatataaagaaggacagagcaaatgcctactgactgacatgcccc

SEQ ID NO: 397824 - DNA, 55 bp, Artificial
  Synthetic oligonucleotide
gagaacaagcaaatggacacgcttatggattacatgtaaaagacaaatggacggg

SEQ ID NO: 397825 - DNA, 60 bp, Artificial
  Synthetic oligonucleotide
gagaacaatcagccccagattgaggagtggatttgaaatgctgaagatacctaatgctgg

SEQ ID NO: 397826 - DNA, 57 bp, Artificial
  Synthetic oligonucleotide
gagaacaccaaggtactttctattctaccaacccagacacaacagtccccatctatg

SEQ ID NO: 397827 - DNA, 55 bp, Artificial
  Synthetic oligonucleotide
gagaacacccacgttagttacgcttgctggcaggaggaggaatctccgactacca

SEQ ID NO: 397828 - DNA, 54 bp, Artificial
  Synthetic oligonucleotide
gagaacaccggagagttcacgcacagtgacatggtgaactacgctaacggtaag

SEQ ID NO: 397829 - DNA, 60 bp, Artificial
  Synthetic oligonucleotide
gagaacacgtctagcgccaaagaacacatgcgttgccaatataacaataccgagattagg

SEQ ID NO: 397830 - DNA, 60 bp, Artificial
  Synthetic oligonucleotide
gagaacagaatggtactggctagtactacggctaaagccatggagcaaatgccaggatca

SEQ ID NO: 397831 - DNA, 55 bp, Artificial
  Synthetic oligonucleotide
gagaacagcaccttaagaccaataggaggtgacatgacaaacatttggaggagtg

SEQ ID NO: 397832 - DNA, 55 bp, Artificial
  Synthetic oligonucleotide
gagaacagcatagtgagagaggtccagtcaataactttggaacggctagctactc

SEQ ID NO: 397833 - DNA, 59 bp, Artificial
  Synthetic oligonucleotide
gagaacaggatggtactggccagtaccacggctaaagccatggagcaaatggcggggtc

SEQ ID NO: 397834 - DNA, 56 bp, Artificial
  Synthetic oligonucleotide
gagaacagggcccttgtgttcccacggtagcgtagcgaatcgtgtgggccctgtta

SEQ ID NO: 397835 - DNA, 60 bp, Artificial
  Synthetic oligonucleotide
gagaacatatgttcccacttcctttcgtatatgctctcaaccccatgagaataggaagag

SEQ ID NO: 397836 - DNA, 59 bp, Artificial
  Synthetic oligonucleotide
gagaacatcaagctcaagaaccacacgaacagtgttatgttctggttggtcagggaccg

SEQ ID NO: 397837 - DNA, 59 bp, Artificial
  Synthetic oligonucleotide
gagaacatcatgggccttgtgtgaagctttaactctagccacaggaccaataacaacac

SEQ ID NO: 397838 - DNA, 60 bp, Artificial
  Synthetic oligonucleotide
gagaacatggaaacaatggattccagcacccttgaactgaggagcagatactgggcaata

SEQ ID NO: 397839 - DNA, 50 bp, Artificial
  Synthetic oligonucleotide
gagaacatgtcggagctacaagctgcggatctacatcatgcccaacgtcg

SEQ ID NO: 397840 - DNA, 55 bp, Artificial
  Synthetic oligonucleotide
gagaacattaagaagacgaatcacactaacaatgtcatgttctacttggtccgtg

SEQ ID NO: 397841 - DNA, 55 bp, Artificial
  Synthetic oligonucleotide
gagaaccaagtccccgagtgggcgcaacggatcgtccgtagctctcgcaacgaga

SEQ ID NO: 397842 - DNA, 55 bp, Artificial
  Synthetic oligonucleotide
gagaaccagtttggtccagaatttgtcttgagtcaaaactcagcgttgtccacgt

SEQ ID NO: 397843 - DNA, 60 bp, Artificial
  Synthetic oligonucleotide
gagaaccataccgaaaatgctttgttgttgtatatggcatgtactcatgcctctaatcct

SEQ ID NO: 397844 - DNA, 60 bp, Artificial
  Synthetic oligonucleotide
gagaaccatgatgtggaatcacctagtacgaatagaaacatttcatgcagcacaggaggt

SEQ ID NO: 397845 - DNA, 55 bp, Artificial
  Synthetic oligonucleotide
gagaacccagcacataagagccaattagtgtggatggcatgtcattcagcagcgt

SEQ ID NO: 397846 - DNA, 55 bp, Artificial
  Synthetic oligonucleotide
gagaacccattagacccagaaaagtctaaaggattgttaactgctagcattaagc

SEQ ID NO: 397847 - DNA, 55 bp, Artificial
  Synthetic oligonucleotide
gagaacccggcgcacaagagtcaattggtgtggatggcatgccattctgcagcat

SEQ ID NO: 397848 - DNA, 51 bp, Artificial
  Synthetic oligonucleotide
gagaaccctcccgactccgacacgcccacccttcccccgtaggccctcgtc

SEQ ID NO: 397849 - DNA, 59 bp, Artificial
  Synthetic oligonucleotide
gagaaccgaagaacaactgggtctttgacatcccaagagtagcgtctgagtatgtgaat

SEQ ID NO: 397850 - DNA, 56 bp, Artificial
  Synthetic oligonucleotide
gagaaccgaggggaagtgacatagcaggaactactagtacccctcaagaacaaata

SEQ ID NO: 397851 - DNA, 54 bp, Artificial
  Synthetic oligonucleotide
gagaaccggcgtgttcttctccggggaccctgctcttctcaacggtggtcccaa

SEQ ID NO: 397852 - DNA, 55 bp, Artificial
  Synthetic oligonucleotide
gagaacctacatggaacttgggtacaagacttccacatatgctggctgtcaggga

SEQ ID NO: 397853 - DNA, 60 bp, Artificial
  Synthetic oligonucleotide
gagaacctctatagggtcgctgaacccattcttatgctattagtacgtgcgatgagagct

SEQ ID NO: 397854 - DNA, 53 bp, Artificial
  Synthetic oligonucleotide
gagaacctgaatgcggcgtctatcctggtccagaaccgttcaaagattgatga

SEQ ID NO: 397855 - DNA, 55 bp, Artificial
  Synthetic oligonucleotide
gagaacctggcacatttaagttaacctcaagcatgttacgggcagaatctaaggc

SEQ ID NO: 397856 - DNA, 60 bp, Artificial
  Synthetic oligonucleotide
gagaaccttatgtgtcatgcgatcctagcaggtgttaccagtttgcgctcggacagggga

SEQ ID NO: 397857 - DNA, 60 bp, Artificial
  Synthetic oligonucleotide
gagaaccttgagcgccacatgatgaccatgaccggaggagtcagggttccagtggaccag

SEQ ID NO: 397858 - DNA, 57 bp, Artificial
  Synthetic oligonucleotide
gagaacgaattcagcggcttggaagggtaggtcgcatacagaagggtaccgcacttc

SEQ ID NO: 397859 - DNA, 55 bp, Artificial
  Synthetic oligonucleotide
gagaacgactatgaggggtatttttttcatggcgtgtcttgttgataagaaacct

SEQ ID NO: 397860 - DNA, 55 bp, Artificial
  Synthetic oligonucleotide
gagaacgattgatgtctatgagtcaaagacgggaaagacatggtacggcataaac

SEQ ID NO: 397861 - DNA, 60 bp, Artificial
  Synthetic oligonucleotide
gagaacgcaaaattatggcatgtatttaccaataacgggatcactagacgctgcatatac

SEQ ID NO: 397862 - DNA, 55 bp, Artificial
  Synthetic oligonucleotide
gagaacgcccgacgtgccagaggctgtgaagggccttgcaaggtccagtcctttg

SEQ ID NO: 397863 - DNA, 58 bp, Artificial
  Synthetic oligonucleotide
gagaacgcttttgcgtggaaaggtctggcggtcatacgtggtcctgattgcgggggca

SEQ ID NO: 397864 - DNA, 55 bp, Artificial
  Synthetic oligonucleotide
gagaacgtcaacaacatgcctcagacaatcaaccgccaacgtaacattttgttta

SEQ ID NO: 397865 - DNA, 56 bp, Artificial
  Synthetic oligonucleotide
gagaacgtctaacgatcggctattatcaggaggtcagcggttacgtgctctgcgca

SEQ ID NO: 397866 - DNA, 53 bp, Artificial
  Synthetic oligonucleotide
gagaacgtctatgctgatattagagacatccaagagcgctttagtgatgtccg

SEQ ID NO: 397867 - DNA, 60 bp, Artificial
  Synthetic oligonucleotide
gagaacgtgcagttagattcggacaactatccacagtacgccctgaatctgtccaagatg

SEQ ID NO: 397868 - DNA, 55 bp, Artificial
  Synthetic oligonucleotide
gagaacgtggagatgcggttccccattctcatgtaactctctgcagatcttgatg

SEQ ID NO: 397869 - DNA, 55 bp, Artificial
  Synthetic oligonucleotide
gagaacgtggattacaaggtttacaaggcttgcaaggggcacgaggtgaacaagg

SEQ ID NO: 397870 - DNA, 58 bp, Artificial
  Synthetic oligonucleotide
gagaacgtgtctacaagtcacgtcctcctggtggtgctgagcaaatggtgacacctga

SEQ ID NO: 397871 - DNA, 55 bp, Artificial
  Synthetic oligonucleotide
gagaacgtgttcaaaatctgggtatgaccgaaggtcaaggtagacggtcaacaat

SEQ ID NO: 397872 - DNA, 54 bp, Artificial
  Synthetic oligonucleotide
gagaacgtgttcaaattcgtggtatgaccgaaggtcaaggtaaccggtcaacat

SEQ ID NO: 397873 - DNA, 59 bp, Artificial
  Synthetic oligonucleotide
gagaacgttctctcttcccccgcggcttttcttcgaatcagctcggctcatctcgacaa

SEQ ID NO: 397874 - DNA, 58 bp, Artificial
  Synthetic oligonucleotide
gagaactaaatatacatgttctattcttgtcaggcaaaggctttttgagggttgtaca

SEQ ID NO: 397875 - DNA, 55 bp, Artificial
  Synthetic oligonucleotide
gagaactagaacgattcgcagttaatcccggcctattagaaacagcagaaggctg

SEQ ID NO: 397876 - DNA, 55 bp, Artificial
  Synthetic oligonucleotide
gagaactatccagagaaccccacatggtgtccgaggccttcttgatcgtagctca

SEQ ID NO: 397877 - DNA, 60 bp, Artificial
  Synthetic oligonucleotide
gagaactcaatcatgaacagcccatgagcatcagcaatagtggctccagctccattcgga

SEQ ID NO: 397878 - DNA, 58 bp, Artificial
  Synthetic oligonucleotide
gagaactctcgcttcagttaccaactacaaagagctggttctaacaaatcccgactgc

SEQ ID NO: 397879 - DNA, 60 bp, Artificial
  Synthetic oligonucleotide
gagaactcttaggccggtgtggaaggacgcacgcatgttcaaagagggacgtgacatcaa

SEQ ID NO: 397880 - DNA, 53 bp, Artificial
  Synthetic oligonucleotide
gagaactgtacaatgtggggttacgccgaccccgattccaaaaagttatgttc

SEQ ID NO: 397881 - DNA, 58 bp, Artificial
  Synthetic oligonucleotide
gagaactgtacatggaaccgttcggtatctggaagtagtgagactattaacaggtgta

SEQ ID NO: 397882 - DNA, 52 bp, Artificial
  Synthetic oligonucleotide
gagaactgtgcagtgaaggctgtatttgatacttcctttgtgaatctcactc

SEQ ID NO: 397883 - DNA, 57 bp, Artificial
  Synthetic oligonucleotide
gagaacttacaattttatgaacacatggtgaagtcggacgtgaaaccttctgtgacc

SEQ ID NO: 397884 - DNA, 55 bp, Artificial
  Synthetic oligonucleotide
gagaacttaggactagtaaacatcagtcagcgaccagatggtttgatagaccatg

SEQ ID NO: 397885 - DNA, 56 bp, Artificial
  Synthetic oligonucleotide
gagaacttatggaaggcaagaagtaaacacacactgctaggttcaaaggaactaaa

SEQ ID NO: 397886 - DNA, 56 bp, Artificial
  Synthetic oligonucleotide
gagaacttgtgaagatgatgagaccgggtcaagaattggacaagcaggactcctat

SEQ ID NO: 397887 - DNA, 55 bp, Artificial
  Synthetic oligonucleotide
gagaactttaacttgaacctcacacgacaaggctagcgcggccatccatctaaca

SEQ ID NO: 397888 - DNA, 55 bp, Artificial
  Synthetic oligonucleotide
gagaactttgaggacacgtgcattaagaagctcgatgctctaaagtgggatagcc

SEQ ID NO: 397889 - DNA, 57 bp, Artificial
  Synthetic oligonucleotide
gagaagaaaaaagagaggactatttggagctatagcaggttttatagagggaggatg

SEQ ID NO: 397890 - DNA, 54 bp, Artificial
  Synthetic oligonucleotide
gagaagaactgcataagcagataactctccttgaatctcagattaatatcacgc

SEQ ID NO: 397891 - DNA, 60 bp, Artificial
  Synthetic oligonucleotide
gagaagaagatgagtaactacatacagttcaagtccaaatgccgtattgaacctgtatgc

SEQ ID NO: 397892 - DNA, 60 bp, Artificial
  Synthetic oligonucleotide
gagaagaagggcttaatcttactagataacttcacatcccattgtcttacatgcatttgc

SEQ ID NO: 397893 - DNA, 55 bp, Artificial
  Synthetic oligonucleotide
gagaagaatcccaccatcctgacggacttggttggggtggtggaacagattctac

SEQ ID NO: 397894 - DNA, 54 bp, Artificial
  Synthetic oligonucleotide
gagaagaatcccgctcttagaatgaaatggatgatggcgatgaaatacccgatc

SEQ ID NO: 397895 - DNA, 55 bp, Artificial
  Synthetic oligonucleotide
gagaagaatcttgtgagacttgcaattatgagtgtgcagaagatggtgttaaagt

SEQ ID NO: 397896 - DNA, 50 bp, Artificial
  Synthetic oligonucleotide
gagaagacaagatatccttgacctatggatctaccatacacaaggctacc

SEQ ID NO: 397897 - DNA, 55 bp, Artificial
  Synthetic oligonucleotide
gagaagacatccagatttgcaaatggttgaaaccatcaataggtacatatcaagc

SEQ ID NO: 397898 - DNA, 55 bp, Artificial
  Synthetic oligonucleotide
gagaagaccaagtgatgttagtgcctgcacaacattgttcattgtttcccctccc

SEQ ID NO: 397899 - DNA, 60 bp, Artificial
  Synthetic oligonucleotide
gagaagagcaacagccattctcaggaaggcgactagaagattgattcaactaatagtaag

SEQ ID NO: 397900 - DNA, 60 bp, Artificial
  Synthetic oligonucleotide
gagaagagcagtgaatatcgcctcacatcctgaaattgtgcctctcaaaccagttacata

SEQ ID NO: 397901 - DNA, 60 bp, Artificial
  Synthetic oligonucleotide
gagaagagctactctcaagcgaagctttaagcgaggcttcagaagagcctacactccaaa

SEQ ID NO: 397902 - DNA, 58 bp, Artificial
  Synthetic oligonucleotide
gagaagaggagatctacctgtctggctatcctacaaggttgcctcagaaggctaccag

SEQ ID NO: 397903 - DNA, 55 bp, Artificial
  Synthetic oligonucleotide
gagaagaggatggtggagacacaggaaacattaacacaacgtttcaatgcactac

SEQ ID NO: 397904 - DNA, 60 bp, Artificial
  Synthetic oligonucleotide
gagaagagtccattccaagtgaaggagtgtatcatggtgtgactaagccaaagcaagtaa

SEQ ID NO: 397905 - DNA, 58 bp, Artificial
  Synthetic oligonucleotide
gagaagagttcaataacttatcacaagagatagctgtgtcacagttaattgacttagc

SEQ ID NO: 397906 - DNA, 59 bp, Artificial
  Synthetic oligonucleotide
gagaagagttcatcaaatgctgtggatttactttggggatcggaggtgcttggtttcaa

SEQ ID NO: 397907 - DNA, 60 bp, Artificial
  Synthetic oligonucleotide
gagaagagtttaacgcactctcgcaagaaattgcattgtcgcaactgatcgatctagcaa

SEQ ID NO: 397908 - DNA, 55 bp, Artificial
  Synthetic oligonucleotide
gagaagatacttgcaaataaaacgaggacatttactgctgcgccactagacactc

SEQ ID NO: 397909 - DNA, 55 bp, Artificial
  Synthetic oligonucleotide
gagaagatctctacgtgcttagctagatagtgcaatggctgataaaactgaaact

SEQ ID NO: 397910 - DNA, 60 bp, Artificial
  Synthetic oligonucleotide
gagaagatgcgtatgatccagcgtgagggcatgttgtttggtgatatcttgacgtttacg

SEQ ID NO: 397911 - DNA, 55 bp, Artificial
  Synthetic oligonucleotide
gagaagatgctgtgtactcaaggaatccatcagatcctttctggagtggatatag

SEQ ID NO: 397912 - DNA, 55 bp, Artificial
  Synthetic oligonucleotide
gagaagatgtgtgagctttcatgaagcatttgaaatagcagaaggccatgaaagc

SEQ ID NO: 397913 - DNA, 52 bp, Artificial
  Synthetic oligonucleotide
gagaagatgttgtattagcacattacttctatatttaatcctcttctcaggg

SEQ ID NO: 397914 - DNA, 60 bp, Artificial
  Synthetic oligonucleotide
gagaagattatatgggcatttgccttgtcataatggggagtgttcttctggcagtctcct

SEQ ID NO: 397915 - DNA, 60 bp, Artificial
  Synthetic oligonucleotide
gagaagcaaagataaaagaccaagagatctgcatatcttatcgtacactccttcagattc

SEQ ID NO: 397916 - DNA, 60 bp, Artificial
  Synthetic oligonucleotide
gagaagccaataatatacatgataggatcagcaccttcgtattggatacgtgacgtaaaa

SEQ ID NO: 397917 - DNA, 55 bp, Artificial
  Synthetic oligonucleotide
gagaagccagttatatatatgataggatcagcgccatcatattggatacatgacg

SEQ ID NO: 397918 - DNA, 55 bp, Artificial
  Synthetic oligonucleotide
gagaagccggtcttcttccggaatccgacgatgacgattcgctcacgatgctgag

SEQ ID NO: 397919 - DNA, 50 bp, Artificial
  Synthetic oligonucleotide
gagaagcctcagacttctgcagagtattgaacacgctacgggagcatgat

SEQ ID NO: 397920 - DNA, 60 bp, Artificial
  Synthetic oligonucleotide
gagaagcctcagtgccgacgaggagtccgcaggtgggaggatcagccaccggagagggac

SEQ ID NO: 397921 - DNA, 55 bp, Artificial
  Synthetic oligonucleotide
gagaagcgcacatgcaaatgaaagcagcagcagttagaggtaagtcgaaccggtt

SEQ ID NO: 397922 - DNA, 60 bp, Artificial
  Synthetic oligonucleotide
gagaagcggacacatagttgggccccacttgctgtgatccatgttgtagctaagattccc

SEQ ID NO: 397923 - DNA, 60 bp, Artificial
  Synthetic oligonucleotide
gagaagcgtaactatgtacgatcggtatacgaggcgagatacattatatctaggataagg

SEQ ID NO: 397924 - DNA, 57 bp, Artificial
  Synthetic oligonucleotide
gagaagcgttgagtaaagcttagtctaaacacagtataacgtttgcgttgattagcg

SEQ ID NO: 397925 - DNA, 55 bp, Artificial
  Synthetic oligonucleotide
gagaagctactactgcatatgctggtatgagcaacctccaagaagtacaagaagg

SEQ ID NO: 397926 - DNA, 55 bp, Artificial
  Synthetic oligonucleotide
gagaagctatagcacacaaatagaacctggcctggcagatcagctaattcatctg

SEQ ID NO: 397927 - DNA, 59 bp, Artificial
  Synthetic oligonucleotide
gagaagctcacggtcaacaagaaggcctaccaccccggttatgacctgcacgctcgtgc

SEQ ID NO: 397928 - DNA, 60 bp, Artificial
  Synthetic oligonucleotide
gagaagctcccccctggagcttgggagcctgcctatcttggctctaaagatgagagagtg

SEQ ID NO: 397929 - DNA, 58 bp, Artificial
  Synthetic oligonucleotide
gagaagctgcgtgttaagaccgagtggcttaacaccaccgatggtactatcgggtctg

SEQ ID NO: 397930 - DNA, 59 bp, Artificial
  Synthetic oligonucleotide
gagaagctggacctgggagttgacgtggatattgaaccaattctctacgtcaaggaaga

SEQ ID NO: 397931 - DNA, 60 bp, Artificial
  Synthetic oligonucleotide
gagaagcttgaacaatctgggctcccagtcggaggcaatgagaaaaaggctaaactagca

SEQ ID NO: 397932 - DNA, 60 bp, Artificial
  Synthetic oligonucleotide
gagaaggaacgtcaggaacacgcgctcaaacagttggagatactgcgactgaagcgggag

SEQ ID NO: 397933 - DNA, 59 bp, Artificial
  Synthetic oligonucleotide
gagaaggaactatttcacagcggaagtgtctcattgcagggctactgagtatataatga

SEQ ID NO: 397934 - DNA, 54 bp, Artificial
  Synthetic oligonucleotide
gagaaggacaagagtttcggtcaaaggttaattatccctgtacccgtgtctgaa

SEQ ID NO: 397935 - DNA, 51 bp, Artificial
  Synthetic oligonucleotide
gagaaggagtacaattgttgttgatacattcatgtaccgttgatcgcacaa

SEQ ID NO: 397936 - DNA, 59 bp, Artificial
  Synthetic oligonucleotide
gagaaggatacacaagtatttgcctctttgtactaggaagcatcttatttatagtctct

SEQ ID NO: 397937 - DNA, 60 bp, Artificial
  Synthetic oligonucleotide
gagaaggattgagaacttcgctatgcctcaaggtaattcgcagcaaacgctagccggcgt

SEQ ID NO: 397938 - DNA, 55 bp, Artificial
  Synthetic oligonucleotide
gagaaggcaccagaaagtgacgtgcagattaaatcagaaattagtaggttaagtg

SEQ ID NO: 397939 - DNA, 59 bp, Artificial
  Synthetic oligonucleotide
gagaaggcagaacttttgagtaagccccagttcaagaacatggaggttgctactatcca

SEQ ID NO: 397940 - DNA, 55 bp, Artificial
  Synthetic oligonucleotide
gagaaggcatcctgatcttcagatgatagagaccataaataggtacatatctagt

SEQ ID NO: 397941 - DNA, 55 bp, Artificial
  Synthetic oligonucleotide
gagaaggctactgtggtaaatggggttgtgaaaccaccggacaggcttactggaa

SEQ ID NO: 397942 - DNA, 60 bp, Artificial
  Synthetic oligonucleotide
gagaagggaagatcgttcatatcagcccattatcaggaagtgctcagcatatagaagaat

SEQ ID NO: 397943 - DNA, 56 bp, Artificial
  Synthetic oligonucleotide
gagaagggaggtcgcaagtcagctcgccttatcgtattcccagacttgggggttcg

SEQ ID NO: 397944 - DNA, 60 bp, Artificial
  Synthetic oligonucleotide
gagaagggccaggacggttccgctgtgttagagcttgatctctgtagccgtgatgtttca

SEQ ID NO: 397945 - DNA, 57 bp, Artificial
  Synthetic oligonucleotide
gagaagggtactctctggttggaatagatcctttccgtctgcttcaaaacagccagg

SEQ ID NO: 397946 - DNA, 55 bp, Artificial
  Synthetic oligonucleotide
gagaaggtgactgccgtgtccgaagacgacgctatagaactcacagaagaggttg

SEQ ID NO: 397947 - DNA, 55 bp, Artificial
  Synthetic oligonucleotide
gagaaggtgccagacgacaagatacagcacttggaagagtgttcatgttacacag

SEQ ID NO: 397948 - DNA, 60 bp, Artificial
  Synthetic oligonucleotide
gagaaggtggatgatctaagagctgatacaataagctcacaaatagagcttgcagtcttg

SEQ ID NO: 397949 - DNA, 55 bp, Artificial
  Synthetic oligonucleotide
gagaaggttgacacaattctagagcaaaatgtcactgtgactcatgccaaggaca

SEQ ID NO: 397950 - DNA, 56 bp, Artificial
  Synthetic oligonucleotide
gagaagtaacaaacatatacaggacatcttgtgtagatagtgatcactgtcaagag

SEQ ID NO: 397951 - DNA, 55 bp, Artificial
  Synthetic oligonucleotide
gagaagtactggtctggagatttgacagtagcctggcacgcacacacagagctcg

SEQ ID NO: 397952 - DNA, 60 bp, Artificial
  Synthetic oligonucleotide
gagaagtagccaccagagaaactccagagacttccacacttctgatagaaaactcagccc

SEQ ID NO: 397953 - DNA, 55 bp, Artificial
  Synthetic oligonucleotide
gagaagtatcattgtaccaagtacaacggaattacctcgaacggactcagcgccg

SEQ ID NO: 397954 - DNA, 60 bp, Artificial
  Synthetic oligonucleotide
gagaagtattacagtggaagtttgatagcagcctagcacgcagacacctggcccgcgagc

SEQ ID NO: 397955 - DNA, 60 bp, Artificial
  Synthetic oligonucleotide
gagaagtcaagcccattcaaaaggctggtagcatctttaatcacggcagctttaacattc

SEQ ID NO: 397956 - DNA, 57 bp, Artificial
  Synthetic oligonucleotide
gagaagtcagcggactataatcccgaacattggatctagaccctgggtaaggggcca

SEQ ID NO: 397957 - DNA, 55 bp, Artificial
  Synthetic oligonucleotide
gagaagtcgaattccggtgaggaatcaatgcgcttggtcaatgacgttggcgtcg

SEQ ID NO: 397958 - DNA, 57 bp, Artificial
  Synthetic oligonucleotide
gagaagtcgctagctgaaaagaatccaccacaacactggcagaaacgagggtttaag

SEQ ID NO: 397959 - DNA, 60 bp, Artificial
  Synthetic oligonucleotide
gagaagtcgtcacagcacaagccaagtcggcagttcagattcagttcgagaaaataatag

SEQ ID NO: 397960 - DNA, 55 bp, Artificial
  Synthetic oligonucleotide
gagaagtctagtaccgtcatgaaagttgctaagcgttacgctccccagtaacccc

SEQ ID NO: 397961 - DNA, 54 bp, Artificial
  Synthetic oligonucleotide
gagaagtgaattgtataagtataaagtagtagagattaaaccactaggagtagc

SEQ ID NO: 397962 - DNA, 58 bp, Artificial
  Synthetic oligonucleotide
gagaagtgcgtcatcttagatgcccctggtttgttacgtgaggtcggtatatcagatg

SEQ ID NO: 397963 - DNA, 60 bp, Artificial
  Synthetic oligonucleotide
gagaagtgtcgcgatttatttgtgggcattcaggaggccgtagagagatacgtgaaatcg

SEQ ID NO: 397964 - DNA, 58 bp, Artificial
  Synthetic oligonucleotide
gagaagtgttgcgtttacgaggcatagaaagctgctgatagttcgtatccccgtttgt

SEQ ID NO: 397965 - DNA, 56 bp, Artificial
  Synthetic oligonucleotide
gagaagttccaaaaggaccctccgtttcaatggatgggctatgaattgtggccaac

SEQ ID NO: 397966 - DNA, 53 bp, Artificial
  Synthetic oligonucleotide
gagaagttccttactgggttctctctcaaacccaggcgagagaaactccagca

SEQ ID NO: 397967 - DNA, 55 bp, Artificial
  Synthetic oligonucleotide
gagaagtttaggcagaaacatgaccacgccactgcgcgctgcgagccggttgtga

SEQ ID NO: 397968 - DNA, 60 bp, Artificial
  Synthetic oligonucleotide
gagaagtttataccaaatagaacgtatagagtaattgacgatgatactgtgtttgaagca

SEQ ID NO: 397969 - DNA, 53 bp, Artificial
  Synthetic oligonucleotide
gagaataacaaatggattataccagcagagtgtaaaattgaaagggaccttaa

SEQ ID NO: 397970 - DNA, 50 bp, Artificial
  Synthetic oligonucleotide
gagaataagctcagaagtacacattccactaggggaggcgaaattggtaa

SEQ ID NO: 397971 - DNA, 55 bp, Artificial
  Synthetic oligonucleotide
gagaatacaatgagacggtaaggattgaaaggataacacaatggcacaataccaa

SEQ ID NO: 397972 - DNA, 54 bp, Artificial
  Synthetic oligonucleotide
gagaataccactgggactcccttggcgactccctcccttccgacggaatgccct

SEQ ID NO: 397973 - DNA, 56 bp, Artificial
  Synthetic oligonucleotide
gagaatactcctaaaaggcttatttctgaaccccaacttccacaataggtatctgc

SEQ ID NO: 397974 - DNA, 54 bp, Artificial
  Synthetic oligonucleotide
gagaatacttgtaagaggtaactcccctgtgtttaactataacaaggcaactaa

SEQ ID NO: 397975 - DNA, 60 bp, Artificial
  Synthetic oligonucleotide
gagaataggcttatctaccagagagtgatgatcgagataatggacaaggactgcgtcagg

SEQ ID NO: 397976 - DNA, 59 bp, Artificial
  Synthetic oligonucleotide
gagaatagggagattctaaaagagccagtacatggggtatactatgacccatcaaaaga

SEQ ID NO: 397977 - DNA, 60 bp, Artificial
  Synthetic oligonucleotide
gagaatatacaaaaactggactgttatagcctagctgcaacagaccaatcagatggaatg

SEQ ID NO: 397978 - DNA, 57 bp, Artificial
  Synthetic oligonucleotide
gagaatatactctaatttgttgacctcgagcgtataatgacataatgtccacgttac

SEQ ID NO: 397979 - DNA, 56 bp, Artificial
  Synthetic oligonucleotide
gagaatatcaaaagagagatgtaagctgaacacggacgagatgataagtgaaccag

SEQ ID NO: 397980 - DNA, 55 bp, Artificial
  Synthetic oligonucleotide
gagaatatgaagcatgcccattttaaggctatgacaagttgcactggcctcaact

SEQ ID NO: 397981 - DNA, 55 bp, Artificial
  Synthetic oligonucleotide
gagaatcaaaaccctcggatgtttctggcaatgataacatatatcacaagaaacc

SEQ ID NO: 397982 - DNA, 60 bp, Artificial
  Synthetic oligonucleotide
gagaatcaccaggaactcaaagaacgacgagtcaagcctccacgttgattccgcaacaga

SEQ ID NO: 397983 - DNA, 58 bp, Artificial
  Synthetic oligonucleotide
gagaatcacgggggaggagatctacattttgaatgctccggcggggaggaaccaatca

SEQ ID NO: 397984 - DNA, 60 bp, Artificial
  Synthetic oligonucleotide
gagaatcactgggcctaaaacatgcagcaatgtctggcacgggaccttccccataaacgc

SEQ ID NO: 397985 - DNA, 58 bp, Artificial
  Synthetic oligonucleotide
gagaatcagccatcagtagctataggcccccagaagttgaaatgggcggtgtagcacc

SEQ ID NO: 397986 - DNA, 60 bp, Artificial
  Synthetic oligonucleotide
gagaatcagtagtatggaatcagtctgcagtgaacattcgccgtgtgaacacggtaatct

SEQ ID NO: 397987 - DNA, 60 bp, Artificial
  Synthetic oligonucleotide
gagaatcatactgagaacgccctcttattgtatatggcatgtacgcatgcatctaaccct

SEQ ID NO: 397988 - DNA, 60 bp, Artificial
  Synthetic oligonucleotide
gagaatcatactgagaacgctcttatgttgtatatggcatgcactcatgcctctaacccc

SEQ ID NO: 397989 - DNA, 57 bp, Artificial
  Synthetic oligonucleotide
gagaatcatcaggatgtactttttcattcaaaagaactactcttaaaagctgtttta

SEQ ID NO: 397990 - DNA, 55 bp, Artificial
  Synthetic oligonucleotide
gagaatccaggacttggagaagtatgtagaagacaccaaaatagacctatggtcc

SEQ ID NO: 397991 - DNA, 60 bp, Artificial
  Synthetic oligonucleotide
gagaatccaggtggttactgtttgacaaggtggatgataatcgctgcagaccttaagtgc

SEQ ID NO: 397992 - DNA, 60 bp, Artificial
  Synthetic oligonucleotide
gagaatccgggtggctattgcttgaccaactggatgattcttgctgcagagcttaagtgt

SEQ ID NO: 397993 - DNA, 54 bp, Artificial
  Synthetic oligonucleotide
gagaatccttaagattctcaaactataagcaaactagaatgcatgatcctactg

SEQ ID NO: 397994 - DNA, 60 bp, Artificial
  Synthetic oligonucleotide
gagaatctaactcgactgcatgattaataacatcgaactcgcttatatactacactatcg

SEQ ID NO: 397995 - DNA, 52 bp, Artificial
  Synthetic oligonucleotide
gagaatctatttgttaaacggtggcgtttttgtaataagaaggggtactcca

SEQ ID NO: 397996 - DNA, 60 bp, Artificial
  Synthetic oligonucleotide
gagaatctcagcgaccgtttcaatgctctgcaagatcagctaatgaacatttatgagact

SEQ ID NO: 397997 - DNA, 50 bp, Artificial
  Synthetic oligonucleotide
gagaatctcgtgtggttattcaggattatgataaccaacatgaacaagac

SEQ ID NO: 397998 - DNA, 60 bp, Artificial
  Synthetic oligonucleotide
gagaatcttgttgctgcttacaagaatgtgcttgtagatggcgtgtttaactatgttgtg

SEQ ID NO: 397999 - DNA, 55 bp, Artificial
  Synthetic oligonucleotide
gagaatgaacccttccgtggcatttttgtaataagggatgttcccccaattgctc

SEQ ID NO: 398000 - DNA, 60 bp, Artificial
  Synthetic oligonucleotide
gagaatgacagactccattaaatcatggagaaaggacatactaagaacccaggagtctga

SEQ ID NO: 398001 - DNA, 60 bp, Artificial
  Synthetic oligonucleotide
gagaatgacagactccattaaatcgtggagaaaggacatattgaggactcaggagtccga

SEQ ID NO: 398002 - DNA, 60 bp, Artificial
  Synthetic oligonucleotide
gagaatgagaggacacttgatttccatgactctaatgtgaagaatctgtacgataaggtc

SEQ ID NO: 398003 - DNA, 58 bp, Artificial
  Synthetic oligonucleotide
gagaatgaggcgtaccctaaccctgaacgtgtccaggtgagcggctactacgccttca

SEQ ID NO: 398004 - DNA, 55 bp, Artificial
  Synthetic oligonucleotide
gagaatgagtgatataccgccaccattaagcaactcagcatcattgccggaagac

SEQ ID NO: 398005 - DNA, 55 bp, Artificial
  Synthetic oligonucleotide
gagaatgcagctggtcaccgtgtatgtatttcaacttacactactaatcttggat

SEQ ID NO: 398006 - DNA, 55 bp, Artificial
  Synthetic oligonucleotide
gagaatgcaggcgaatcgctctatcagctgatcgtttagcaaaatctcgcgagaa

SEQ ID NO: 398007 - DNA, 53 bp, Artificial
  Synthetic oligonucleotide
gagaatgccattgcccactgttatccaggggcaaccataaatgaagaagcatt

SEQ ID NO: 398008 - DNA, 60 bp, Artificial
  Synthetic oligonucleotide
gagaatgcctgaacacttcatggggaaaacttgggaggcattggacacgatgtatgttgt

SEQ ID NO: 398009 - DNA, 57 bp, Artificial
  Synthetic oligonucleotide
gagaatgccttgctagtagccttgtttggctacgtagggtaccaggccctctcaaaa

SEQ ID NO: 398010 - DNA, 52 bp, Artificial
  Synthetic oligonucleotide
gagaatgcggaagtacagataccgtactccatattggaagatggagttcttt

SEQ ID NO: 398011 - DNA, 60 bp, Artificial
  Synthetic oligonucleotide
gagaatggaaaattcacaggcttaggtatatatgacaaaaccatgattataccaacacat

SEQ ID NO: 398012 - DNA, 60 bp, Artificial
  Synthetic oligonucleotide
gagaatggaattctagcaggacaaggatttcttctgggtcactatcaaccaaatcgctca

SEQ ID NO: 398013 - DNA, 60 bp, Artificial
  Synthetic oligonucleotide
gagaatggcatcaaaaatggtgtgcagattgctggacacttatagtaataagaaatacgc

SEQ ID NO: 398014 - DNA, 60 bp, Artificial
  Synthetic oligonucleotide
gagaatggccttaaagcacatactatgtctgccagagcaaccggaattgcctacgcatcc

SEQ ID NO: 398015 - DNA, 58 bp, Artificial
  Synthetic oligonucleotide
gagaatgggggtccacatacattgtgatggtaagacgaggatccctttctatgttaat

SEQ ID NO: 398016 - DNA, 55 bp, Artificial
  Synthetic oligonucleotide
gagaatggtctgaacaagtcgggcaatctcaaggttttaaagattttgtcagcta

SEQ ID NO: 398017 - DNA, 60 bp, Artificial
  Synthetic oligonucleotide
gagaatggtgctctctgcttttgacgagaggaggaataaatacctggaagaacatcccag

SEQ ID NO: 398018 - DNA, 55 bp, Artificial
  Synthetic oligonucleotide
gagaatgtgggcatattcaagatcctttagaatgatggatgatgtaaatacactt

SEQ ID NO: 398019 - DNA, 55 bp, Artificial
  Synthetic oligonucleotide
gagaatgtgtttatacaaccttcttttaaattaaaagcgtcgcctactgattata

SEQ ID NO: 398020 - DNA, 57 bp, Artificial
  Synthetic oligonucleotide
gagaattaacacccctctgagatggatggaaacttgtttatactttcgctatagctt

SEQ ID NO: 398021 - DNA, 60 bp, Artificial
  Synthetic oligonucleotide
gagaattaggacgctctgcaaagggcatcatggatctcaatacagttctcaatacaggag

SEQ ID NO: 398022 - DNA, 58 bp, Artificial
  Synthetic oligonucleotide
gagaattagtgaaagggagagcaattcggaagctcttagtaaggccctgtctttgaca

SEQ ID NO: 398023 - DNA, 60 bp, Artificial
  Synthetic oligonucleotide
gagaattatggacattacgcaatcgctcaaaatgggcactaagctggctgcgccgactgt

SEQ ID NO: 398024 - DNA, 55 bp, Artificial
  Synthetic oligonucleotide
gagaattccacacaagatgacgagttcttatcctacttcaaactcagatatgggg

SEQ ID NO: 398025 - DNA, 55 bp, Artificial
  Synthetic oligonucleotide
gagaattcctgagacacatggcatcagggctcggaagcaatgtaaggggcctgtg

SEQ ID NO: 398026 - DNA, 57 bp, Artificial
  Synthetic oligonucleotide
gagaattcgcggtattattgagaggaggtcaaataacacgtttgacgtgaataatag

SEQ ID NO: 398027 - DNA, 60 bp, Artificial
  Synthetic oligonucleotide
gagaattctgatggagtagattcagcatatataactgctagtatgccagctttaagcgga

SEQ ID NO: 398028 - DNA, 55 bp, Artificial
  Synthetic oligonucleotide
gagaattgccgcctcccttggagatgagacctcagtcggcatcataccgcgtgcc

SEQ ID NO: 398029 - DNA, 60 bp, Artificial
  Synthetic oligonucleotide
gagaattggatgtgaagaaagacctgaacatacacaaccaataagagacagaatgttgaa

SEQ ID NO: 398030 - DNA, 60 bp, Artificial
  Synthetic oligonucleotide
gagaattgggacctcttcattgaaagaagcagtgctttcagcaattgctacccatatgac

SEQ ID NO: 398031 - DNA, 54 bp, Artificial
  Synthetic oligonucleotide
gagaatttcgatgttaattacgttcaaacgggtaaccacgaggtgctaattgac

SEQ ID NO: 398032 - DNA, 59 bp, Artificial
  Synthetic oligonucleotide
gagaattttcacccggacgtatttcaaggaccatgatgcatagcgctctcctaaaggaa

SEQ ID NO: 398033 - DNA, 55 bp, Artificial
  Synthetic oligonucleotide
gagaattttcgcccgtcacatgcgagctgcaataagtcgcggggcaataagcctc

SEQ ID NO: 398034 - DNA, 60 bp, Artificial
  Synthetic oligonucleotide
gagacaaatgaacgcgcactatcagtcggtcaggacgcttatcacatgcgcccacaccaa

SEQ ID NO: 398035 - DNA, 55 bp, Artificial
  Synthetic oligonucleotide
gagacaacagagtgtactggtatcaaggagcgacgccgaacgcatcagagagcta

SEQ ID NO: 398036 - DNA, 60 bp, Artificial
  Synthetic oligonucleotide
gagacaaccaaaggtgtcacagctgcatgctcttacttgggagctagcagcttttatcgg

SEQ ID NO: 398037 - DNA, 55 bp, Artificial
  Synthetic oligonucleotide
gagacaaccatgaggtctccggtgttcacagacaactcctccccaccagcggtgc

SEQ ID NO: 398038 - DNA, 60 bp, Artificial
  Synthetic oligonucleotide
gagacaacgcaaggattgtgaccgtgagaaaccatactggttagtgagtggtggcgcctg

SEQ ID NO: 398039 - DNA, 60 bp, Artificial
  Synthetic oligonucleotide
gagacaacgctaatgatctaggaaatgggtgctttgagttttggcataaatgtgacaatg

SEQ ID NO: 398040 - DNA, 58 bp, Artificial
  Synthetic oligonucleotide
gagacaacggagacaacccgacagagcggagcagcttcttttgcctagagtactttcc

SEQ ID NO: 398041 - DNA, 60 bp, Artificial
  Synthetic oligonucleotide
gagacaactaaaggtgttacagccgcatgctcttactctggagccagcagtttttatcgg

SEQ ID NO: 398042 - DNA, 55 bp, Artificial
  Synthetic oligonucleotide
gagacaactctccctgttcagaagcaggagtcgaaggacagggaaacacctttaa

SEQ ID NO: 398043 - DNA, 58 bp, Artificial
  Synthetic oligonucleotide
gagacaactggactggaaccaacaggccagtactgattatttccccagatttatccta

SEQ ID NO: 398044 - DNA, 58 bp, Artificial
  Synthetic oligonucleotide
gagacaagcactacctacaatgtaccgggtagcactttttggaagcactggattgaaa

SEQ ID NO: 398045 - DNA, 53 bp, Artificial
  Synthetic oligonucleotide
gagacaaggaacttacaagacacaaatagatcctgagatggcagacaagctaa

SEQ ID NO: 398046 - DNA, 60 bp, Artificial
  Synthetic oligonucleotide
gagacaaggtgcacttgcagggatggagccaaaggaatttcaagccctcaggcaacattc

SEQ ID NO: 398047 - DNA, 60 bp, Artificial
  Synthetic oligonucleotide
gagacaagtcagttctctatttttggggtgtgcaccatcctactgacacaactgagcaaa

SEQ ID NO: 398048 - DNA, 50 bp, Artificial
  Synthetic oligonucleotide
gagacaagtccgtgagatttgtgagcggattcttgccacttatctgggaa

SEQ ID NO: 398049 - DNA, 56 bp, Artificial
  Synthetic oligonucleotide
gagacaagtctgagactccaagcggcacgctggcttaaacgagctgagtcagcgga

SEQ ID NO: 398050 - DNA, 60 bp, Artificial
  Synthetic oligonucleotide
gagacaatagattctagcacactcgaactgagaagcagatattgggcaataaggaccaga

SEQ ID NO: 398051 - DNA, 60 bp, Artificial
  Synthetic oligonucleotide
gagacaatgaacgtcaaaatcaatggtgattacgttactgttaatggagttgatctacca

SEQ ID NO: 398052 - DNA, 58 bp, Artificial
  Synthetic oligonucleotide
gagacaatgtgggtcccgcataagaattggactggaaataacgtgaatgggccgaatg

SEQ ID NO: 398053 - DNA, 60 bp, Artificial
  Synthetic oligonucleotide
gagacaattaagagtattgcagatatggcgaccggtgtagtcagttcagttgattcaact

SEQ ID NO: 398054 - DNA, 50 bp, Artificial
  Synthetic oligonucleotide
gagacaattgcagaagtgaaccctgccccagatattcctagagttgacac

SEQ ID NO: 398055 - DNA, 55 bp, Artificial
  Synthetic oligonucleotide
gagacacaagaaagccacttacgagccagatgtagacctcggaagcggaacccgc

SEQ ID NO: 398056 - DNA, 55 bp, Artificial
  Synthetic oligonucleotide
gagacacaatggctctgttcaactttcagccgagcggcgactggttgaacgacgg

SEQ ID NO: 398057 - DNA, 55 bp, Artificial
  Synthetic oligonucleotide
gagacacacagtagaagatgtcaatagagacatgcactctctcctgggtatgcgc

SEQ ID NO: 398058 - DNA, 58 bp, Artificial
  Synthetic oligonucleotide
gagacacacccaatcagaggtatcgccccgcctctcagtgttgggaaaagccaaagac

SEQ ID NO: 398059 - DNA, 55 bp, Artificial
  Synthetic oligonucleotide
gagacacaccgaacacgggaacccctagcatcaatgagacaaactccacaaccac

SEQ ID NO: 398060 - DNA, 55 bp, Artificial
  Synthetic oligonucleotide
gagacacagtgtcaagtgctcttgagggtgacttagtgctccgtgtctcagcacg

SEQ ID NO: 398061 - DNA, 55 bp, Artificial
  Synthetic oligonucleotide
gagacacatactaaaacaagagacctcatcatacaacttagaggtctccgactca

SEQ ID NO: 398062 - DNA, 55 bp, Artificial
  Synthetic oligonucleotide
gagacacatggcattagggctcggaagcaatgtaaggggcctgtgtggacttgtg

SEQ ID NO: 398063 - DNA, 55 bp, Artificial
  Synthetic oligonucleotide
gagacacattcccttcttattcctgtcaccagctctacaccgcagaccggatttc

SEQ ID NO: 398064 - DNA, 58 bp, Artificial
  Synthetic oligonucleotide
gagacaccaaatgcaaggacggaccaatattcaacaactaattacagggacgttgaga

SEQ ID NO: 398065 - DNA, 60 bp, Artificial
  Synthetic oligonucleotide
gagacacccatgcagtaggaaatgacatacccaaccatggagtgacagccacgataaccc

SEQ ID NO: 398066 - DNA, 60 bp, Artificial
  Synthetic oligonucleotide
gagacaccgacttctgacgaaccagacgcacactccgatgctggctcatatagctccatg

SEQ ID NO: 398067 - DNA, 59 bp, Artificial
  Synthetic oligonucleotide
gagacacctatgtttaataaggtggctattttaatttgcgaggcattgaattcaatcaa

SEQ ID NO: 398068 - DNA, 55 bp, Artificial
  Synthetic oligonucleotide
gagacacctgctccggagtacatcaatgaccttttacaatcagttgacagtcaag

SEQ ID NO: 398069 - DNA, 51 bp, Artificial
  Synthetic oligonucleotide
gagacacgatcccatctgttccgagaaagcagtactcacctgaagtaagta

SEQ ID NO: 398070 - DNA, 58 bp, Artificial
  Synthetic oligonucleotide
gagacacgcaggcaaaccaagactccacccagggcggcaacctccagtggatcgcggt

SEQ ID NO: 398071 - DNA, 60 bp, Artificial
  Synthetic oligonucleotide
gagacactaaccacatctcacaaagaactttgtttgcgcgtgcacaaggcattgaggaga

SEQ ID NO: 398072 - DNA, 60 bp, Artificial
  Synthetic oligonucleotide
gagacactaatggcatgtattacaatgaatatgcagcatgttcaaactttaacaacggag

SEQ ID NO: 398073 - DNA, 56 bp, Artificial
  Synthetic oligonucleotide
gagacagaagcacacaccttattacatgaatgtttgaattcggttcacttagtatc

SEQ ID NO: 398074 - DNA, 56 bp, Artificial
  Synthetic oligonucleotide
gagacagaatgagacgcgctgagccaggagcagagagattaggagcagcaacgaga

SEQ ID NO: 398075 - DNA, 60 bp, Artificial
  Synthetic oligonucleotide
gagacagaggaaacgtatcagcctggtcgttggtttatgcgagctgcgcaggctgtaacc

SEQ ID NO: 398076 - DNA, 58 bp, Artificial
  Synthetic oligonucleotide
gagacagcattcctcaactacctaatggaagtagtgccaatccactccgctaaaaggt

SEQ ID NO: 398077 - DNA, 55 bp, Artificial
  Synthetic oligonucleotide
gagacagcgttaaggaaactctacacagatattaatacacaaccaagtgaattgc

SEQ ID NO: 398078 - DNA, 60 bp, Artificial
  Synthetic oligonucleotide
gagacagctagacacactccagtcaactcctggctaggcaacatcattatgtatgcaccc

SEQ ID NO: 398079 - DNA, 55 bp, Artificial
  Synthetic oligonucleotide
gagacagctgatattcgtctctatgagactcaatgtaattaaacgcatttggagg

SEQ ID NO: 398080 - DNA, 52 bp, Artificial
  Synthetic oligonucleotide
gagacagcttgtcctccttgcacaaccagggtacctgagtgggggggttgaa

SEQ ID NO: 398081 - DNA, 54 bp, Artificial
  Synthetic oligonucleotide
gagacaggaccatggcctggacagtagtgaacagtatatgcaacaccacagggg

SEQ ID NO: 398082 - DNA, 58 bp, Artificial
  Synthetic oligonucleotide
gagacaggggtggaatacttcatgtctaggtatgctaaatttagccagattgaactaa

SEQ ID NO: 398083 - DNA, 58 bp, Artificial
  Synthetic oligonucleotide
gagacaggtagccctctgccaggtggacactgtctagaaagatggctcatctttgcgt

SEQ ID NO: 398084 - DNA, 55 bp, Artificial
  Synthetic oligonucleotide
gagacagtcagctcctcgttgggattgagaccagacggagtcttccaaatcggag

SEQ ID NO: 398085 - DNA, 60 bp, Artificial
  Synthetic oligonucleotide
gagacagtcaggatagagaagataactcaatggcacaatactagtgtagtcgaatatgtg

SEQ ID NO: 398086 - DNA, 55 bp, Artificial
  Synthetic oligonucleotide
gagacagtgttagtaatataacaggaatactcgaaaacgtactgtctaacgcgta

SEQ ID NO: 398087 - DNA, 58 bp, Artificial
  Synthetic oligonucleotide
gagacagttaaagctaagcgtcgcggagcgattagaaaacgtaaagcgattagctcaa

SEQ ID NO: 398088 - DNA, 55 bp, Artificial
  Synthetic oligonucleotide
gagacagttgatattcatcacggttagattctacataattgaacgctgttggtgg

SEQ ID NO: 398089 - DNA, 50 bp, Artificial
  Synthetic oligonucleotide
gagacatccacaaatagttaggaagcatgagtagttcaagtagcgaaacc

SEQ ID NO: 398090 - DNA, 52 bp, Artificial
  Synthetic oligonucleotide
gagacatccagagatactcgactgtggatctaaagaggactgtaagctcact

SEQ ID NO: 398091 - DNA, 60 bp, Artificial
  Synthetic oligonucleotide
gagacatccatgtgggcgtggcatctgtaagaccaggttttgccggccacaaatgaaaaa

SEQ ID NO: 398092 - DNA, 59 bp, Artificial
  Synthetic oligonucleotide
gagacatcgacctcggaagaagacgaaacactcacgacggaggagaaactactccagca

SEQ ID NO: 398093 - DNA, 55 bp, Artificial
  Synthetic oligonucleotide
gagacatcgttcttgaggagcaacccacaccagttgacaacctctggtgtgatga

SEQ ID NO: 398094 - DNA, 51 bp, Artificial
  Synthetic oligonucleotide
gagacatgaacgtgacggagtcaaatgtaatgaataaacatttgacgtccg

SEQ ID NO: 398095 - DNA, 55 bp, Artificial
  Synthetic oligonucleotide
gagacatgaaggtgatgcattaatggcggcagagttatttgtcaccgacgcggtg

SEQ ID NO: 398096 - DNA, 55 bp, Artificial
  Synthetic oligonucleotide
gagacatgcagttagagagagatgaaatgtatggctacgttaacatagctcgtaa

SEQ ID NO: 398097 - DNA, 58 bp, Artificial
  Synthetic oligonucleotide
gagacatggaaatcgacacgacttttcatgtacggaaaggtaatgctattagacggac

SEQ ID NO: 398098 - DNA, 50 bp, Artificial
  Synthetic oligonucleotide
gagacatgtgtatacctgaatactcaggaaaaaactgctttgatatctct

SEQ ID NO: 398099 - DNA, 52 bp, Artificial
  Synthetic oligonucleotide
gagacattagcaaggagtatttgtgagaaacttgagcaatcaggactgccag

SEQ ID NO: 398100 - DNA, 55 bp, Artificial
  Synthetic oligonucleotide
gagacattgctcttccatggagacgggttgcttctgcctggtgaagggtacagcc

SEQ ID NO: 398101 - DNA, 57 bp, Artificial
  Synthetic oligonucleotide
gagacattgcttccaaacaggataagtacccaaccataaattattttgcaacaccaa

SEQ ID NO: 398102 - DNA, 60 bp, Artificial
  Synthetic oligonucleotide
gagaccaacagtgaccatggaccttgctcagcttaaagctttctaccaggacttgacaga

SEQ ID NO: 398103 - DNA, 60 bp, Artificial
  Synthetic oligonucleotide
gagaccaaccacacagggacatattgttctctgaacggaatcagtccagtgcatctgggg

SEQ ID NO: 398104 - DNA, 56 bp, Artificial
  Synthetic oligonucleotide
gagaccaactcctctacagaggaaaccaaacaacatacaacctaaatgcagacgtt

SEQ ID NO: 398105 - DNA, 51 bp, Artificial
  Synthetic oligonucleotide
gagaccaaggaatgcccgactcagaatcgcgcttggaatagcttagaagtg

SEQ ID NO: 398106 - DNA, 60 bp, Artificial
  Synthetic oligonucleotide
gagaccacaatatgaagtaattgagggaatgccaagaaccatagcatggatggtccagag

SEQ ID NO: 398107 - DNA, 55 bp, Artificial
  Synthetic oligonucleotide
gagaccacagcccgtggctgtcattttcaagggagccccgggtattggcaaaacc

SEQ ID NO: 398108 - DNA, 55 bp, Artificial
  Synthetic oligonucleotide
gagaccacagtcaggctacgagcatacatgaacaccccgggactccccgtgtgcc

SEQ ID NO: 398109 - DNA, 55 bp, Artificial
  Synthetic oligonucleotide
gagaccaccaaatatgacaccagcggtagcggcgttatttccaaatgcgcagcca

SEQ ID NO: 398110 - DNA, 60 bp, Artificial
  Synthetic oligonucleotide
gagaccacccaggctgacctatgcatcccctatgttgcagacacaaactatgttaaaacc

SEQ ID NO: 398111 - DNA, 60 bp, Artificial
  Synthetic oligonucleotide
gagaccacgattggcaactttttcagtcgagcaggactagtgagtattattaccatgccc

SEQ ID NO: 398112 - DNA, 59 bp, Artificial
  Synthetic oligonucleotide
gagaccactaaatatgaccccgtcagtcgcagcacttttccctaacgcacagccatttg

SEQ ID NO: 398113 - DNA, 59 bp, Artificial
  Synthetic oligonucleotide
gagaccactcgatagccgtaactatgctttcagtaggaggcatcctaattttcctttca

SEQ ID NO: 398114 - DNA, 54 bp, Artificial
  Synthetic oligonucleotide
gagaccactgtccggctacgcgcatacctcaacacgcctgggctccctgtatgt

SEQ ID NO: 398115 - DNA, 50 bp, Artificial
  Synthetic oligonucleotide
gagaccagacgcgccctgaggccaccatcccgtgacaggaagatctcccc

SEQ ID NO: 398116 - DNA, 60 bp, Artificial
  Synthetic oligonucleotide
gagaccagagtatcgtagatgcaatggcagaaagtagcttgatagatcctttcgctacac

SEQ ID NO: 398117 - DNA, 52 bp, Artificial
  Synthetic oligonucleotide
gagaccagatggtttcgtcgggtatacggaaacggtttgttttctgttccga

SEQ ID NO: 398118 - DNA, 55 bp, Artificial
  Synthetic oligonucleotide
gagaccagcactctacaaggcggttccctgggtggtggttcgctaaggggtggca

SEQ ID NO: 398119 - DNA, 55 bp, Artificial
  Synthetic oligonucleotide
gagaccagcgtgggatctcaagagctgcagatcgacgggatctgagaagcgttga

SEQ ID NO: 398120 - DNA, 60 bp, Artificial
  Synthetic oligonucleotide
gagaccaggaagaattatcgacacttgtggatgtggggcaccatgctccttggaatatta

SEQ ID NO: 398121 - DNA, 51 bp, Artificial
  Synthetic oligonucleotide
gagaccaggaggaactatcagcacttatggagatggggtatcatgctcctt

SEQ ID NO: 398122 - DNA, 55 bp, Artificial
  Synthetic oligonucleotide
gagaccagttgtgtacttcatcatgtctatgtcctttgtcagaccacgctccttc

SEQ ID NO: 398123 - DNA, 60 bp, Artificial
  Synthetic oligonucleotide
gagaccataccacactgcaactgtacatcaggtgtctattactctagttactacagaaaa

SEQ ID NO: 398124 - DNA, 55 bp, Artificial
  Synthetic oligonucleotide
gagaccatataccccaggcatagagctagtgataccgtcactttcctaatggccg

SEQ ID NO: 398125 - DNA, 52 bp, Artificial
  Synthetic oligonucleotide
gagaccatgccgctcaaacacctggagtcgatgaccaaggtggtccagcagt

SEQ ID NO: 398126 - DNA, 60 bp, Artificial
  Synthetic oligonucleotide
gagaccatgcgtgacagaatgtcgtgggacgaatcaaacctccgcgtcatggatcggctt

SEQ ID NO: 398127 - DNA, 55 bp, Artificial
  Synthetic oligonucleotide
gagaccatggtaaagagccacgtgagtgccggcagaggggacggcgtcgacaact

SEQ ID NO: 398128 - DNA, 60 bp, Artificial
  Synthetic oligonucleotide
gagacccaagcagcgatggtgctctcatcgattgactcactagcaaactgaatcgcaatc

SEQ ID NO: 398129 - DNA, 59 bp, Artificial
  Synthetic oligonucleotide
gagacccaatccgtagggctacactctcaaaatagggctgattcaatttgtcttactga

SEQ ID NO: 398130 - DNA, 56 bp, Artificial
  Synthetic oligonucleotide
gagacccaattgggtaccgatatatcggtactcaataacggattggtactcaataa

SEQ ID NO: 398131 - DNA, 55 bp, Artificial
  Synthetic oligonucleotide
gagacccacgaatcatccctaagcattcgaaccacaaccaaggagggcacagtgg

SEQ ID NO: 398132 - DNA, 55 bp, Artificial
  Synthetic oligonucleotide
gagacccacggctcgaagttgatctcagtacatctgtgttaagcaagtacaaagg

SEQ ID NO: 398133 - DNA, 55 bp, Artificial
  Synthetic oligonucleotide
gagacccagcaaggagccagggcgctcgcagctatgagaatcaacgggacaggga

SEQ ID NO: 398134 - DNA, 55 bp, Artificial
  Synthetic oligonucleotide
gagaccccaagagaaagtgcttgctaataaaacgagatcattcacggcagctccc

SEQ ID NO: 398135 - DNA, 55 bp, Artificial
  Synthetic oligonucleotide
gagaccccctcgaccccctgatggagaccgtgggatgcgcttgttcgcgcgtgtg

SEQ ID NO: 398136 - DNA, 54 bp, Artificial
  Synthetic oligonucleotide
gagacccgaacccgtggtggtttgcctccgtggcaaatcaggccagggtaagag

SEQ ID NO: 398137 - DNA, 59 bp, Artificial
  Synthetic oligonucleotide
gagacccgaacttctgttggacgtgtggccgcaagtgcggttcgcaggcccaccgctga

SEQ ID NO: 398138 - DNA, 55 bp, Artificial
  Synthetic oligonucleotide
gagacccgaccacacctatttctcgagcggcctgggaaaccgcccgacacactcc

SEQ ID NO: 398139 - DNA, 51 bp, Artificial
  Synthetic oligonucleotide
gagacccttaagatggtcggtaatcgccttggtggtcttgttcgcgtggct

SEQ ID NO: 398140 - DNA, 55 bp, Artificial
  Synthetic oligonucleotide
gagaccctttaatatctggactaagaacagcacaattggccactggatcccacta

SEQ ID NO: 398141 - DNA, 60 bp, Artificial
  Synthetic oligonucleotide
gagaccgagcaatggcctggacagtagtaaatagtatctgcaacaccacaggggtagaga

SEQ ID NO: 398142 - DNA, 57 bp, Artificial
  Synthetic oligonucleotide
gagaccgagtgttgttaggcctccccctgttgatccacaggcggagggtggtatcca

SEQ ID NO: 398143 - DNA, 55 bp, Artificial
  Synthetic oligonucleotide
gagaccgatgatacccgcccaaggaaacatgatgcccggggtataacacctcgcg

SEQ ID NO: 398144 - DNA, 60 bp, Artificial
  Synthetic oligonucleotide
gagaccgcgcgaacacgggccatgcgttcctcattggctggcctgtacgtcattgggttg

SEQ ID NO: 398145 - DNA, 60 bp, Artificial
  Synthetic oligonucleotide
gagaccgctttgtgccactattacctatcacaaaaaaggtatagtgatgcagtcatctcc

SEQ ID NO: 398146 - DNA, 60 bp, Artificial
  Synthetic oligonucleotide
gagaccggacaatggcctggacagtggtgaatagtatctgccacaccacaggggtcgaga

SEQ ID NO: 398147 - DNA, 55 bp, Artificial
  Synthetic oligonucleotide
gagaccggagaggtggtccaggttccatattccggtggaacaacccatattcacg

SEQ ID NO: 398148 - DNA, 52 bp, Artificial
  Synthetic oligonucleotide
gagaccggctgcgggtacggtacacgtgccatactctcaggcaccatccggc

SEQ ID NO: 398149 - DNA, 60 bp, Artificial
  Synthetic oligonucleotide
gagaccgtacagtggcctggacagtggtgaatagcatctgtaacaccacaggagttgaga

SEQ ID NO: 398150 - DNA, 54 bp, Artificial
  Synthetic oligonucleotide
gagaccgtcgtcctacagggactcctcaggattttggcgaggtttttaatatgt

SEQ ID NO: 398151 - DNA, 53 bp, Artificial
  Synthetic oligonucleotide
gagaccgtctcagacgaagttcccgggtatgtgttttgtcccgtggaaagacc

SEQ ID NO: 398152 - DNA, 52 bp, Artificial
  Synthetic oligonucleotide
gagaccgttggacttcgagagaagtgccggcttgcaaacaggacccggctta

SEQ ID NO: 398153 - DNA, 55 bp, Artificial
  Synthetic oligonucleotide
gagacctaaacaaagcaatgtgttatgtgcaatggaaagagatcattgtgcagaa

SEQ ID NO: 398154 - DNA, 55 bp, Artificial
  Synthetic oligonucleotide
gagacctaagactgcgtcggaaccttagattcacgagccgcgtgattaattgggt

SEQ ID NO: 398155 - DNA, 55 bp, Artificial
  Synthetic oligonucleotide
gagacctacagcttctgtgtcctgagtgccgcggtaactgcaaacatggcggatc

SEQ ID NO: 398156 - DNA, 60 bp, Artificial
  Synthetic oligonucleotide
gagacctaccagtctggttggcctacaaagtggcagctgaaggcatcaactatgcagaca

SEQ ID NO: 398157 - DNA, 55 bp, Artificial
  Synthetic oligonucleotide
gagacctactggtctgtgagagtggtgctcaaggtactgacactattgccaggtg

SEQ ID NO: 398158 - DNA, 54 bp, Artificial
  Synthetic oligonucleotide
gagacctagcccaaactgttttacctatcctacttgggccttctataactatac

SEQ ID NO: 398159 - DNA, 55 bp, Artificial
  Synthetic oligonucleotide
gagacctagctaaagcatactcaaatgcaaacccagagactaagagatttatcgc

SEQ ID NO: 398160 - DNA, 51 bp, Artificial
  Synthetic oligonucleotide
gagacctcaataaaaccatgtgttaaattaaccccactgtgtgtgacaatg

SEQ ID NO: 398161 - DNA, 55 bp, Artificial
  Synthetic oligonucleotide
gagacctcaggttgtggttgaattggatctgtatcgttattatgtcctggtccat

SEQ ID NO: 398162 - DNA, 57 bp, Artificial
  Synthetic oligonucleotide
gagacctcgtttctgacaacgatatttcgctagttaaatcagcactaataattagac

SEQ ID NO: 398163 - DNA, 55 bp, Artificial
  Synthetic oligonucleotide
gagacctgagttcgcaatccacggcgtgaatccaatgcctggcccgcttacacgt

SEQ ID NO: 398164 - DNA, 60 bp, Artificial
  Synthetic oligonucleotide
gagacctgcaaagcttgtgcccaagtcaatgccagcaagtctgccgtcaagcaaggaact

SEQ ID NO: 398165 - DNA, 55 bp, Artificial
  Synthetic oligonucleotide
gagacctgcatcctcaatcctatcagagtgggcatgtcgatgaatgaggatggac

SEQ ID NO: 398166 - DNA, 60 bp, Artificial
  Synthetic oligonucleotide
gagacctgcgacgcaaagaaagaggtgagccacggatcaaagcagtggtgaaaggagatc

SEQ ID NO: 398167 - DNA, 60 bp, Artificial
  Synthetic oligonucleotide
gagacctggaaaaacatggagcactcacaagtagcaatacgtcagctaataatgctgatt

SEQ ID NO: 398168 - DNA, 55 bp, Artificial
  Synthetic oligonucleotide
gagacctggcaacattggtataggagaacagatgaattgcaggcaaatataagtg

SEQ ID NO: 398169 - DNA, 60 bp, Artificial
  Synthetic oligonucleotide
gagacctggcccacatcgtctttcctgttctgctatcaccctcgatgataatactattag

SEQ ID NO: 398170 - DNA, 55 bp, Artificial
  Synthetic oligonucleotide
gagacctgggacggtcaggacattcctcctgtggggattgccatagagtggttgt

SEQ ID NO: 398171 - DNA, 60 bp, Artificial
  Synthetic oligonucleotide
gagacctggtcgtatacttcattgggcgatgattaagagttcatgggatatacatcaacc

SEQ ID NO: 398172 - DNA, 60 bp, Artificial
  Synthetic oligonucleotide
gagacctgtatcaacctgctggtggctccagttcagaaacagtgaaccctgttccgacta

SEQ ID NO: 398173 - DNA, 55 bp, Artificial
  Synthetic oligonucleotide
gagaccttcaaggtcattggtggttggtccacacctaactccaaatcgcaggtca

SEQ ID NO: 398174 - DNA, 55 bp, Artificial
  Synthetic oligonucleotide
gagaccttcagggttattggtggctggaccacacctaattccaagtcacaggtca

SEQ ID NO: 398175 - DNA, 60 bp, Artificial
  Synthetic oligonucleotide
gagaccttccaaccggggagatggtttatgcgcgccgctcaagcggtgactgcagtagtg

SEQ ID NO: 398176 - DNA, 60 bp, Artificial
  Synthetic oligonucleotide
gagaccttgtgcgcgactggaggcaagacatgaccgttggggaatttgtggagctacgcg

SEQ ID NO: 398177 - DNA, 60 bp, Artificial
  Synthetic oligonucleotide
gagacgaacagtcaattgctgaagcaataattgtggccatggtattttcacaggaggatt

SEQ ID NO: 398178 - DNA, 55 bp, Artificial
  Synthetic oligonucleotide
gagacgaactgtggctggtattgtatcggagcttcggggaagagcgctttggcgc

SEQ ID NO: 398179 - DNA, 55 bp, Artificial
  Synthetic oligonucleotide
gagacgaagcaatcaacaatagattccagatacaaggggttaaattgacccaagg

SEQ ID NO: 398180 - DNA, 55 bp, Artificial
  Synthetic oligonucleotide
gagacgaagcattaaacaaccgactccatatcaaaggggttgagctgaagtcagg

SEQ ID NO: 398181 - DNA, 55 bp, Artificial
  Synthetic oligonucleotide
gagacgaatctatcgtctcgcaaaccgtcactacagctcctgttacatcagtcga

SEQ ID NO: 398182 - DNA, 60 bp, Artificial
  Synthetic oligonucleotide
gagacgaatttaataatttgtcgcaacaaatagcaatgtcacaattgatagacttagcgc

SEQ ID NO: 398183 - DNA, 55 bp, Artificial
  Synthetic oligonucleotide
gagacgactcttgggtggggtcacgttgtagtattcgataaacttggggtcattg

SEQ ID NO: 398184 - DNA, 60 bp, Artificial
  Synthetic oligonucleotide
gagacgagccatacatgctagttcttagtgttctgtcgcccagcattcttatggcactat

SEQ ID NO: 398185 - DNA, 60 bp, Artificial
  Synthetic oligonucleotide
gagacgatttgctaatagctgtgaacccagaacgtgagagcctattggacacactgtcga

SEQ ID NO: 398186 - DNA, 57 bp, Artificial
  Synthetic oligonucleotide
gagacgcaaacccgtgagtggatacccgctttattcactggggtcgacagctctggg

SEQ ID NO: 398187 - DNA, 60 bp, Artificial
  Synthetic oligonucleotide
gagacgcaacaggtgacacagcctttgtcagcaacgctgacagcaattatctatacgcca

SEQ ID NO: 398188 - DNA, 60 bp, Artificial
  Synthetic oligonucleotide
gagacgcaagcagacaaacgcgcaattggatctgaaacaaagatggcattcttctccaaa

SEQ ID NO: 398189 - DNA, 60 bp, Artificial
  Synthetic oligonucleotide
gagacgcacgggaccagaccagaccccacggaccagcctctcccagatgctgactacact

SEQ ID NO: 398190 - DNA, 56 bp, Artificial
  Synthetic oligonucleotide
gagacgcactcagtcaatgggaatacaactggatcagaggattattctgctgttca

SEQ ID NO: 398191 - DNA, 60 bp, Artificial
  Synthetic oligonucleotide
gagacgcagtgatgcttccccctgtgcgtgaatccattatccgcgcagtttatgtggagg

SEQ ID NO: 398192 - DNA, 60 bp, Artificial
  Synthetic oligonucleotide
gagacgcagtgatgggttccgcggtgcgtaaatccatcttcacggcagcttatgctgacg

SEQ ID NO: 398193 - DNA, 55 bp, Artificial
  Synthetic oligonucleotide
gagacgcctcgcagttcagacgtgactgttgatcccgctcctctgcgaccgctca

SEQ ID NO: 398194 - DNA, 50 bp, Artificial
  Synthetic oligonucleotide
gagacgcgaatccgtgagtggaaaacctttttattcactggggtcgacaa

SEQ ID NO: 398195 - DNA, 55 bp, Artificial
  Synthetic oligonucleotide
gagacgcgtactgtctacaatcacaactcaattgctgaaactggtgttgaatcat

SEQ ID NO: 398196 - DNA, 55 bp, Artificial
  Synthetic oligonucleotide
gagacgctagacatgaacaaggtgtgaagagtctattgagctgctatagagtcct

SEQ ID NO: 398197 - DNA, 59 bp, Artificial
  Synthetic oligonucleotide
gagacgcttatataagattccttgtgtgacgtatgtgtacccagggaccaattgaaagc

SEQ ID NO: 398198 - DNA, 60 bp, Artificial
  Synthetic oligonucleotide
gagacggaatgcctctgtccatacgaagctcttgtgctcaggaaacctcttttcttagac

SEQ ID NO: 398199 - DNA, 54 bp, Artificial
  Synthetic oligonucleotide
gagacggagacaccaaatatcggttaatccaccgtcttgtagctatagcattct

SEQ ID NO: 398200 - DNA, 59 bp, Artificial
  Synthetic oligonucleotide
gagacggagatcacacaaccagtcgttggagtacaggttctcgccaagacgaacggaga

SEQ ID NO: 398201 - DNA, 55 bp, Artificial
  Synthetic oligonucleotide
gagacggagcgctgcagtttaacattcaagcgggaggcgggctctctcttcaggg

SEQ ID NO: 398202 - DNA, 60 bp, Artificial
  Synthetic oligonucleotide
gagacggatgagctggtacttcatgtcgacgttgagcaccaacgcattcccacgtcaggg

SEQ ID NO: 398203 - DNA, 55 bp, Artificial
  Synthetic oligonucleotide
gagacggccgataccattctacactctccggggtgtgttccttgcgttcgcgagg

SEQ ID NO: 398204 - DNA, 56 bp, Artificial
  Synthetic oligonucleotide
gagacggtgaacctgtgagtggaaacccgctttattcactggggacgacaactctg

SEQ ID NO: 398205 - DNA, 59 bp, Artificial
  Synthetic oligonucleotide
gagacgtaaatgctttcggtgggccggatgctaatataactattctaagagacacttca

SEQ ID NO: 398206 - DNA, 50 bp, Artificial
  Synthetic oligonucleotide
gagacgtactgccctcggcccctcttggctgttcacccgagtgcggctag

SEQ ID NO: 398207 - DNA, 58 bp, Artificial
  Synthetic oligonucleotide
gagacgtagaccgatttgactccctatcagctcaaacacgttcccccatcactagagt

SEQ ID NO: 398208 - DNA, 60 bp, Artificial
  Synthetic oligonucleotide
gagacgtcgccatgggcagaagcaaacttaactatacccactgatcgcatcaagagattc

SEQ ID NO: 398209 - DNA, 60 bp, Artificial
  Synthetic oligonucleotide
gagacgtgacgtgcgaatctcagcggagtggctcccaactctcgccacaatatgtaggaa

SEQ ID NO: 398210 - DNA, 60 bp, Artificial
  Synthetic oligonucleotide
gagacgtgcaacacgcaagacaaaggctagagatggctcttaaagtgagcaaagccgcag

SEQ ID NO: 398211 - DNA, 57 bp, Artificial
  Synthetic oligonucleotide
gagacgtggaagaaccttaatcctctacgactatgcgttagccgtattggacgctgg

SEQ ID NO: 398212 - DNA, 60 bp, Artificial
  Synthetic oligonucleotide
gagacgtgggatccgttagatacaccatattctgatttacatcataaagaattattctac

SEQ ID NO: 398213 - DNA, 59 bp, Artificial
  Synthetic oligonucleotide
gagacgttcgttcaggccgcactagcatgttgtaccggacaagatgcgcccctaaatgg

SEQ ID NO: 398214 - DNA, 58 bp, Artificial
  Synthetic oligonucleotide
gagacgtttcagaacaatgtcgttaattatcaacacattggtatgaaacgttattgta

SEQ ID NO: 398215 - DNA, 55 bp, Artificial
  Synthetic oligonucleotide
gagactaaaggaattatgacggctgctgacattcagacaactcataacgtccact

SEQ ID NO: 398216 - DNA, 59 bp, Artificial
  Synthetic oligonucleotide
gagactaactcgtttaggattactcgatcaagatgctttttgtttatataagcgcgatg

SEQ ID NO: 398217 - DNA, 52 bp, Artificial
  Synthetic oligonucleotide
gagactaattatcatgaatggtttttaacaagtctaattgacctccatatac

SEQ ID NO: 398218 - DNA, 60 bp, Artificial
  Synthetic oligonucleotide
gagactacagaggcgatgcaggggatagcctttgctggtgcacctatgtatagctcgttc

SEQ ID NO: 398219 - DNA, 55 bp, Artificial
  Synthetic oligonucleotide
gagactacgtctgctccgctcgatgagattggagcgacgttttacaagtcagggg

SEQ ID NO: 398220 - DNA, 55 bp, Artificial
  Synthetic oligonucleotide
gagactagaaccggtgttctcaacccttctggagccctaccctctgtgcctggac

SEQ ID NO: 398221 - DNA, 59 bp, Artificial
  Synthetic oligonucleotide
gagactagggtatggtggacctcaaacagtattgtcgtattttgtggcacttcaggcac

SEQ ID NO: 398222 - DNA, 55 bp, Artificial
  Synthetic oligonucleotide
gagactagggttatgcaggcagagcggttcttcaaaacccacttgttcgactggg

SEQ ID NO: 398223 - DNA, 55 bp, Artificial
  Synthetic oligonucleotide
gagactagtaggaatagtatcagatataggctgataagttgtaacacctcaacca

SEQ ID NO: 398224 - DNA, 53 bp, Artificial
  Synthetic oligonucleotide
gagactagtggtgccaccaccgttggttttagggagaagaccctcccggggca

SEQ ID NO: 398225 - DNA, 60 bp, Artificial
  Synthetic oligonucleotide
gagactatatggacgtagcatgtacaccaaacggagcaatcgaagctgttcagttctggg

SEQ ID NO: 398226 - DNA, 57 bp, Artificial
  Synthetic oligonucleotide
gagactatcgtaagatcttaaggtttcataatcgtatgcaaaaactataaaccataa

SEQ ID NO: 398227 - DNA, 60 bp, Artificial
  Synthetic oligonucleotide
gagactatgtagacaggttctataaaactctaagggctgagcaagcctcacaagaggtaa

SEQ ID NO: 398228 - DNA, 56 bp, Artificial
  Synthetic oligonucleotide
gagactattattcttactagcgatgtatgagctaggtaagtatgtaactgagcaag

SEQ ID NO: 398229 - DNA, 55 bp, Artificial
  Synthetic oligonucleotide
gagactcaagttcatgaatgtaaattccccggaactgatgccagagaactgtctc

SEQ ID NO: 398230 - DNA, 59 bp, Artificial
  Synthetic oligonucleotide
gagactcacaaacgcttggcgcttgacagggcttcttcgaatcggagatttgctaatta

SEQ ID NO: 398231 - DNA, 51 bp, Artificial
  Synthetic oligonucleotide
gagactcaccattggcgaactaaatgccaggattgactcctagagctgacc

SEQ ID NO: 398232 - DNA, 60 bp, Artificial
  Synthetic oligonucleotide
gagactcagattgacgtagggatcatagaattgcattctccagcaacgactaagtcacgc

SEQ ID NO: 398233 - DNA, 55 bp, Artificial
  Synthetic oligonucleotide
gagactcaggacacaaccaaaatggaggaatgcctagacaaatacggcatagacc

SEQ ID NO: 398234 - DNA, 60 bp, Artificial
  Synthetic oligonucleotide
gagactcaggtaaccgtggagaatactggaaatggggatagcaatggcagtgtttgtagc

SEQ ID NO: 398235 - DNA, 55 bp, Artificial
  Synthetic oligonucleotide
gagactccaaatggcataattgtaattaccacgaaagttccaatcaatatcccgg

SEQ ID NO: 398236 - DNA, 52 bp, Artificial
  Synthetic oligonucleotide
gagactcccctttcttacaacagcagttagctgactattatgacatcagatc

SEQ ID NO: 398237 - DNA, 55 bp, Artificial
  Synthetic oligonucleotide
gagactccgagattagatgtagatcctttgccagatttggatgatcatgattacc

SEQ ID NO: 398238 - DNA, 58 bp, Artificial
  Synthetic oligonucleotide
gagactcgcggcaaagtgtatatcatgagtccaacaatgaagcatacattgcctcctt

SEQ ID NO: 398239 - DNA, 60 bp, Artificial
  Synthetic oligonucleotide
gagactcggcactttggattgcggaaacttgcatggcaacattgactttttcaaatgtga

SEQ ID NO: 398240 - DNA, 55 bp, Artificial
  Synthetic oligonucleotide
gagactcgggcgtttgccacagtgtgctatgcctagagacctgtagggttgagtt

SEQ ID NO: 398241 - DNA, 55 bp, Artificial
  Synthetic oligonucleotide
gagactctaacgagtgagaacatttcgatctatgggaaggatcttcattgtcccc

SEQ ID NO: 398242 - DNA, 60 bp, Artificial
  Synthetic oligonucleotide
gagactctctgtttggggcataagacagctccgagctcgcctgctagccatagaaactta

SEQ ID NO: 398243 - DNA, 55 bp, Artificial
  Synthetic oligonucleotide
gagactctctttgacgagtgggtaaaacacagatgtacctggagtagatcgaaca

SEQ ID NO: 398244 - DNA, 60 bp, Artificial
  Synthetic oligonucleotide
gagactctgacgtacaagatagccttggactaccattttgtgctgtcctcggctgcctgt

SEQ ID NO: 398245 - DNA, 60 bp, Artificial
  Synthetic oligonucleotide
gagactctgataggtaaatgtgtcaccgatatatcggtgatcaattggtgatcaataata

SEQ ID NO: 398246 - DNA, 55 bp, Artificial
  Synthetic oligonucleotide
gagactctggagaaccttaaggttagattcacacgcccgtgatagggtccattcg

SEQ ID NO: 398247 - DNA, 60 bp, Artificial
  Synthetic oligonucleotide
gagactcttgaatgctgttgatgtggatatagtatatagcaatgtcccaacaggcctcac

SEQ ID NO: 398248 - DNA, 55 bp, Artificial
  Synthetic oligonucleotide
gagactgaaactgctacttcagtcatgtttcctcagttttccctgagcacacgtg

SEQ ID NO: 398249 - DNA, 57 bp, Artificial
  Synthetic oligonucleotide
gagactgagttaagatttatgtgtggtcaaaagaaacttcaaggtattaacattaca

SEQ ID NO: 398250 - DNA, 56 bp, Artificial
  Synthetic oligonucleotide
gagactgatttgttgttgagtcgtattcctaaaaaatcgtgggtctacgatattgg

SEQ ID NO: 398251 - DNA, 59 bp, Artificial
  Synthetic oligonucleotide
gagactgcgggggcgagactggttgtgctcgcaaccgccactcctccgggctccgtcac

SEQ ID NO: 398252 - DNA, 55 bp, Artificial
  Synthetic oligonucleotide
gagactgctctggtaaatcttctcggaggaatgcccactgtggatttagtctcga

SEQ ID NO: 398253 - DNA, 60 bp, Artificial
  Synthetic oligonucleotide
gagactgctttatatgacgcgctgttagctctcgatcctccctttgacattgataagctg

SEQ ID NO: 398254 - DNA, 59 bp, Artificial
  Synthetic oligonucleotide
gagactggagacaatatatagtatgtctccaaatggcatttcggtaatttagaagatcc

SEQ ID NO: 398255 - DNA, 56 bp, Artificial
  Synthetic oligonucleotide
gagactggcctcggctctcctgttgggggccgctgggactgccctggggactcccg

SEQ ID NO: 398256 - DNA, 60 bp, Artificial
  Synthetic oligonucleotide
gagactggctcgagggtcaccaccctcgttagctagttcttcggctagccagttgtctgc

SEQ ID NO: 398257 - DNA, 60 bp, Artificial
  Synthetic oligonucleotide
gagactgtatgacacctctgtgcgatcagtccataccgtacagggcctcgagtacttggt

SEQ ID NO: 398258 - DNA, 55 bp, Artificial
  Synthetic oligonucleotide
gagactgtctcagtattacggtaatgtcacttgcagtaagcaacatccatctcac

SEQ ID NO: 398259 - DNA, 60 bp, Artificial
  Synthetic oligonucleotide
gagactgtgcatctctgatttggagactactggagatactgggacaatacagcctcaggg

SEQ ID NO: 398260 - DNA, 55 bp, Artificial
  Synthetic oligonucleotide
gagacttaacaaaaggagctacctaataagggctctaacattgaacacaatgacg

SEQ ID NO: 398261 - DNA, 54 bp, Artificial
  Synthetic oligonucleotide
gagacttacaggtctaccacatcggaaacttactaaaaggagacaaagtgaacg

SEQ ID NO: 398262 - DNA, 51 bp, Artificial
  Synthetic oligonucleotide
gagacttactaagttgcaagcctaaaagacagtgtctggttatatatgggc

SEQ ID NO: 398263 - DNA, 60 bp, Artificial
  Synthetic oligonucleotide
gagacttatagcatcatcgaaaggagtagtctctagcttgtgaatacgattcatcttcat

SEQ ID NO: 398264 - DNA, 51 bp, Artificial
  Synthetic oligonucleotide
gagacttattggtcagcaccacaacagcacatggatgcgacactattgcca

SEQ ID NO: 398265 - DNA, 60 bp, Artificial
  Synthetic oligonucleotide
gagacttcacattgattgcagcgagagcagtggaacttctgggacgcagcagtctcaggg

SEQ ID NO: 398266 - DNA, 55 bp, Artificial
  Synthetic oligonucleotide
gagacttccaagaagctgagggtctcgacatgtattacgatctagaaacgggacg

SEQ ID NO: 398267 - DNA, 55 bp, Artificial
  Synthetic oligonucleotide
gagacttcggctcttcgtgtaccttatgtcggatcaaccactgaggaaaggacag

SEQ ID NO: 398268 - DNA, 57 bp, Artificial
  Synthetic oligonucleotide
gagacttctagaacaacagaaaactgagcatgtcattgttttccgggtaactttgta

SEQ ID NO: 398269 - DNA, 60 bp, Artificial
  Synthetic oligonucleotide
gagacttgatgggagtgccatactgcaattactcgaaattctggtatctagagcatgcaa

SEQ ID NO: 398270 - DNA, 55 bp, Artificial
  Synthetic oligonucleotide
gagacttgtcaactatgatctgttgcagtacgagacactgactagaactctcagg

SEQ ID NO: 398271 - DNA, 54 bp, Artificial
  Synthetic oligonucleotide
gagacttgtcgcagctgggtggcccaaaacgaaagtatttaacccctagtccaa

SEQ ID NO: 398272 - DNA, 53 bp, Artificial
  Synthetic oligonucleotide
gagactttactgttttagaaggcgacgtgttttcaatgaaccctaggattcta

SEQ ID NO: 398273 - DNA, 55 bp, Artificial
  Synthetic oligonucleotide
gagactttgtgccgtagtcatgacatgcgtcaagatatatccaataaagtatgcc

SEQ ID NO: 398274 - DNA, 60 bp, Artificial
  Synthetic oligonucleotide
gagacttttcaacctgggagatggtttatgcgtgccgctcaagcagtgacagcggtagtg

SEQ ID NO: 398275 - DNA, 55 bp, Artificial
  Synthetic oligonucleotide
gagagaaatggcgaaccggaaaatgattgtgggggtggtggacacggaagggaca

SEQ ID NO: 398276 - DNA, 55 bp, Artificial
  Synthetic oligonucleotide
gagagaacaaagtgatcgtttgactatcagcttgaaacaacttgacgacgcttat

SEQ ID NO: 398277 - DNA, 60 bp, Artificial
  Synthetic oligonucleotide
gagagaacaacagcttgttacatcctatgagccaacatggaacagatgacccggagagag

SEQ ID NO: 398278 - DNA, 58 bp, Artificial
  Synthetic oligonucleotide
gagagaacaactgcttactacaccctataagcctacatgggatggaggacccggagaa

SEQ ID NO: 398279 - DNA, 60 bp, Artificial
  Synthetic oligonucleotide
gagagaacaccagcttgttacaccctatgagcctgcatgggatggagaacccggagagag

SEQ ID NO: 398280 - DNA, 55 bp, Artificial
  Synthetic oligonucleotide
gagagaacaggaatcagttgggatcttggcgtagaagatgcctctgaatctaagc

SEQ ID NO: 398281 - DNA, 55 bp, Artificial
  Synthetic oligonucleotide
gagagaacatactgtgtttcagggcagcttgttgaaggtgtctgcttcaacccaa

SEQ ID NO: 398282 - DNA, 55 bp, Artificial
  Synthetic oligonucleotide
gagagaacatgacttcatctctcaaacggtaagcagtttacaccaagctgcgtgt

SEQ ID NO: 398283 - DNA, 51 bp, Artificial
  Synthetic oligonucleotide
gagagaaccaaaagtctagggaatcaatgacaagggttaagatacgaggat

SEQ ID NO: 398284 - DNA, 52 bp, Artificial
  Synthetic oligonucleotide
gagagaaccaccccccttatgcaaaagaaggtaggccagattttactgattg

SEQ ID NO: 398285 - DNA, 59 bp, Artificial
  Synthetic oligonucleotide
gagagaaccagacaaatattacctttagtgcagaggtggcagaactataccgattagaa

SEQ ID NO: 398286 - DNA, 60 bp, Artificial
  Synthetic oligonucleotide
gagagaaccttatgtgtcatgcgatcctggtaaatgttatcagtttgcactcgggcaggg

SEQ ID NO: 398287 - DNA, 55 bp, Artificial
  Synthetic oligonucleotide
gagagaacgataattgatatatttacgatttgcagataccgttcacctctagtgg

SEQ ID NO: 398288 - DNA, 53 bp, Artificial
  Synthetic oligonucleotide
gagagaacgttgagttcctttcccccgacggtcaaatgggcagaatgttcggt

SEQ ID NO: 398289 - DNA, 55 bp, Artificial
  Synthetic oligonucleotide
gagagaacttcatgtaacccctgacagctgtcaacctaatcctgaccgtgagaac

SEQ ID NO: 398290 - DNA, 55 bp, Artificial
  Synthetic oligonucleotide
gagagaacttgttcggaaaacgagatttctcccagttgctggcgggacaagcagt

SEQ ID NO: 398291 - DNA, 54 bp, Artificial
  Synthetic oligonucleotide
gagagaagaatagaaaatttgaacaagatgttggaagacgggtttctagatgtt

SEQ ID NO: 398292 - DNA, 60 bp, Artificial
  Synthetic oligonucleotide
gagagaagaattcaatgcactatcacaagaaattgcaatgtcacaattgattgacttagc

SEQ ID NO: 398293 - DNA, 60 bp, Artificial
  Synthetic oligonucleotide
gagagaagcagttagacattttcctagggcatggctccatagcttagggcaatatatata

SEQ ID NO: 398294 - DNA, 59 bp, Artificial
  Synthetic oligonucleotide
gagagaagcatccggagtactacaaagactgctgacactgggctttctacaagggactt

SEQ ID NO: 398295 - DNA, 55 bp, Artificial
  Synthetic oligonucleotide
gagagaagctattggtgacatccaccgattgccatttactcctgtctatcggtga

SEQ ID NO: 398296 - DNA, 60 bp, Artificial
  Synthetic oligonucleotide
gagagaaggctaatgtgctgattgggcaaggagacatagtgttggtaatgaaacggaaac

SEQ ID NO: 398297 - DNA, 56 bp, Artificial
  Synthetic oligonucleotide
gagagaagggtggtaacacaaggcccacaggaagaatttggacgtagtctactcaa

SEQ ID NO: 398298 - DNA, 59 bp, Artificial
  Synthetic oligonucleotide
gagagaagttcgtaaaggccaatctgttttgaggcagtataagacagagattaggattg

SEQ ID NO: 398299 - DNA, 55 bp, Artificial
  Synthetic oligonucleotide
gagagaatcagtcctgccgacatctaaggagcggtcttggttcagactaacgcgg

SEQ ID NO: 398300 - DNA, 55 bp, Artificial
  Synthetic oligonucleotide
gagagaatggttctctctgcatttgatgaaaggaggaacaaatacctggaagagc

SEQ ID NO: 398301 - DNA, 58 bp, Artificial
  Synthetic oligonucleotide
gagagaatttccgtttggctagcggttagctccttttgatgtatggtattgaatatac

SEQ ID NO: 398302 - DNA, 60 bp, Artificial
  Synthetic oligonucleotide
gagagacaaataagttattatgccactacctggactagcaaagatctattagaggtcctg

SEQ ID NO: 398303 - DNA, 55 bp, Artificial
  Synthetic oligonucleotide
gagagaccaaaacagggaaagcaggatatgttactgacagaggaagacagaaagc

SEQ ID NO: 398304 - DNA, 55 bp, Artificial
  Synthetic oligonucleotide
gagagaccaaatagagaacatagcaaaactagaatgggttttcagctctgttgca

SEQ ID NO: 398305 - DNA, 60 bp, Artificial
  Synthetic oligonucleotide
gagagaccaggtcgaataggcgttggttcgtgcactggaatttgccttcgaattgcagaa

SEQ ID NO: 398306 - DNA, 57 bp, Artificial
  Synthetic oligonucleotide
gagagacccgaaatcctttatatcgagaaaggacatcggcagcagttattttccttc

SEQ ID NO: 398307 - DNA, 55 bp, Artificial
  Synthetic oligonucleotide
gagagaccgtgatgattggcaattctatccaaatgccaacgttccagctcacttc

SEQ ID NO: 398308 - DNA, 55 bp, Artificial
  Synthetic oligonucleotide
gagagaccttttaaagagaatcccgaagaaaacatgtatatgcatagtaggcccc

SEQ ID NO: 398309 - DNA, 57 bp, Artificial
  Synthetic oligonucleotide
gagagacgccttcgtggttagttcaacctctccggaacaatgaacaactctcaaatc

SEQ ID NO: 398310 - DNA, 57 bp, Artificial
  Synthetic oligonucleotide
gagagacggaagacaggtgttttcacggtggcagagttcggggttggcctgagaaca

SEQ ID NO: 398311 - DNA, 60 bp, Artificial
  Synthetic oligonucleotide
gagagactacaatccgatcgcaagttcgatatgccagttgaacaattcgtccggcactcg

SEQ ID NO: 398312 - DNA, 55 bp, Artificial
  Synthetic oligonucleotide
gagagactacgtggagcaactagggaatgcatttgggtcgggttttaccaaccag

SEQ ID NO: 398313 - DNA, 51 bp, Artificial
  Synthetic oligonucleotide
gagagactcaacagcttcttgactcatgggctctccagaaaagctaagacc

SEQ ID NO: 398314 - DNA, 60 bp, Artificial
  Synthetic oligonucleotide
gagagactcaacttttcattggcatctgaggtgtcaaaaatgtataaggcctattgagga

SEQ ID NO: 398315 - DNA, 55 bp, Artificial
  Synthetic oligonucleotide
gagagactccacgtttcactggcaccttcgatgcaacagatgtgtaaggcccatt

SEQ ID NO: 398316 - DNA, 60 bp, Artificial
  Synthetic oligonucleotide
gagagactgatgaatccggaaacgaggatgtcagccctcctatcacttcaggggttcaga

SEQ ID NO: 398317 - DNA, 53 bp, Artificial
  Synthetic oligonucleotide
gagagacttcgtcttgattgcagcgaggactgtgggaactctgggacacaggg

SEQ ID NO: 398318 - DNA, 60 bp, Artificial
  Synthetic oligonucleotide
gagagactttgaaaatcagaaccaatgggaatttgattgcacctgaatttggatatctac

SEQ ID NO: 398319 - DNA, 55 bp, Artificial
  Synthetic oligonucleotide
gagagactttgtattgattctgggacacagcagtctcaagggactgagactgggg

SEQ ID NO: 398320 - DNA, 55 bp, Artificial
  Synthetic oligonucleotide
gagagagaatcatttcaaggttccctctcagctctaaacatttaaggggtatcgc

SEQ ID NO: 398321 - DNA, 55 bp, Artificial
  Synthetic oligonucleotide
gagagagaatgtcataaggaaaggatgctcgattcagaagaagtttaggcaggcg

SEQ ID NO: 398322 - DNA, 52 bp, Artificial
  Synthetic oligonucleotide
gagagagagaattctattgcctactgttatccgggcactactgtgaatgagg

SEQ ID NO: 398323 - DNA, 52 bp, Artificial
  Synthetic oligonucleotide
gagagagaggtcgcgaagatttcaacacccaaggaattattggaacgtttgg

SEQ ID NO: 398324 - DNA, 50 bp, Artificial
  Synthetic oligonucleotide
gagagagagtttgaactgaggcagactggaccagctgtggaagttaatgt

SEQ ID NO: 398325 - DNA, 55 bp, Artificial
  Synthetic oligonucleotide
gagagagataattcccggaactaagtgcactgagatttctactgggcccgaaaat

SEQ ID NO: 398326 - DNA, 60 bp, Artificial
  Synthetic oligonucleotide
gagagagcaaccattatggcagcattcactgggaacacagagggaagaacatcagacatg

SEQ ID NO: 398327 - DNA, 60 bp, Artificial
  Synthetic oligonucleotide
gagagagcagtgaaccaggccacaaacttaatcaatacaattctaatgtttataaccaca

SEQ ID NO: 398328 - DNA, 55 bp, Artificial
  Synthetic oligonucleotide
gagagagctggtattcatctctatgtgattctatatagttaaatgcgctcggagg

SEQ ID NO: 398329 - DNA, 57 bp, Artificial
  Synthetic oligonucleotide
gagagaggaaagccgatgctaaaatcaacgaagttgtatttttttagcaatgacgaa

SEQ ID NO: 398330 - DNA, 59 bp, Artificial
  Synthetic oligonucleotide
gagagaggaatagtacaagagcgattaagaaaattcaaagggagcgcagtcgatagaaa

SEQ ID NO: 398331 - DNA, 60 bp, Artificial
  Synthetic oligonucleotide
gagagaggacccctatggcttcaacagtagtcatagggagatctttccctgcaatccact

SEQ ID NO: 398332 - DNA, 55 bp, Artificial
  Synthetic oligonucleotide
gagagaggagaatcaataattgtagaatccggagacccgaatgctctcttgaagc

SEQ ID NO: 398333 - DNA, 54 bp, Artificial
  Synthetic oligonucleotide
gagagagtattctacgttgagggacccaatgggctccaagacgcccctaaaccc

SEQ ID NO: 398334 - DNA, 53 bp, Artificial
  Synthetic oligonucleotide
gagagataacagagtatactggtaccaaggaacgacaccgaacgcatcagaaa

SEQ ID NO: 398335 - DNA, 55 bp, Artificial
  Synthetic oligonucleotide
gagagataacagggtgtattggtatcaaggagctacgccgaacgcatcagagagc

SEQ ID NO: 398336 - DNA, 55 bp, Artificial
  Synthetic oligonucleotide
gagagatactgtgttcttgagataggagatatgcttctaaggagtgcaataggcc

SEQ ID NO: 398337 - DNA, 55 bp, Artificial
  Synthetic oligonucleotide
gagagatatggcacacacactcataatgattgggtccaacgcttctgacaggatg

SEQ ID NO: 398338 - DNA, 55 bp, Artificial
  Synthetic oligonucleotide
gagagatcattcataatcggaagatttctcacgcaaatccctcaacttttgcacc

SEQ ID NO: 398339 - DNA, 55 bp, Artificial
  Synthetic oligonucleotide
gagagatccatccaatgcgttcaatggtgtgaagttggaaggtgacgctcgtcag

SEQ ID NO: 398340 - DNA, 60 bp, Artificial
  Synthetic oligonucleotide
gagagatccatgggacgctctaattttgacatggtgcgaagagcctattgagctagttgg

SEQ ID NO: 398341 - DNA, 55 bp, Artificial
  Synthetic oligonucleotide
gagagatcctcaagctgttggatcagaacgacaagcaaaagtaacaagtgacatc

SEQ ID NO: 398342 - DNA, 55 bp, Artificial
  Synthetic oligonucleotide
gagagatcttatcttagtcctgaaggcaagacgcgggaggtccacggaggagctg

SEQ ID NO: 398343 - DNA, 50 bp, Artificial
  Synthetic oligonucleotide
gagagatcttctagctgctgatgcacgtgttgttaagcgtgcatttactt

SEQ ID NO: 398344 - DNA, 53 bp, Artificial
  Synthetic oligonucleotide
gagagatgagcctcgtcttgttcaactgtagtagccctaagagtgagatgcag

SEQ ID NO: 398345 - DNA, 53 bp, Artificial
  Synthetic oligonucleotide
gagagatgcatccttatgcaaagacagagaatctcacaggctgagaggaagca

SEQ ID NO: 398346 - DNA, 55 bp, Artificial
  Synthetic oligonucleotide
gagagatggaataataaggtgggtagcagagttaatggctatagcctttgtatta

SEQ ID NO: 398347 - DNA, 57 bp, Artificial
  Synthetic oligonucleotide
gagagatgggtgcgagagcgtcggtattaagcgggggaaaattagattcatgggaaa

SEQ ID NO: 398348 - DNA, 57 bp, Artificial
  Synthetic oligonucleotide
gagagatggtattagctcacccactgctaggatatttagtcaaaaatgcagcacctt

SEQ ID NO: 398349 - DNA, 55 bp, Artificial
  Synthetic oligonucleotide
gagagatggtcgaggagcagtcacacgagaagtgggtgtatgatgcgcttcatgg

SEQ ID NO: 398350 - DNA, 53 bp, Artificial
  Synthetic oligonucleotide
gagagatggtggctggatctagcctaccagatagtttaagattatatgtttat

SEQ ID NO: 398351 - DNA, 55 bp, Artificial
  Synthetic oligonucleotide
gagagatggtggtgataatagtacgaccagcgaaaccttcagacctggaggaggg

SEQ ID NO: 398352 - DNA, 55 bp, Artificial
  Synthetic oligonucleotide
gagagatgtctaaaggacaatgtcgcgatcaggatagagcaccttgcatacaatc

SEQ ID NO: 398353 - DNA, 56 bp, Artificial
  Synthetic oligonucleotide
gagagatgttctgagctgatggcaaccagaggacaatttacaactaatgtggcaaa

SEQ ID NO: 398354 - DNA, 55 bp, Artificial
  Synthetic oligonucleotide
gagagatgttttgccttgccaggtaggtatcaatccttatagcatggaatggtcc

SEQ ID NO: 398355 - DNA, 57 bp, Artificial
  Synthetic oligonucleotide
gagagattcgaaatattccctaaagaaagctcatggcccaaacacagcgtaaacaaa

SEQ ID NO: 398356 - DNA, 57 bp, Artificial
  Synthetic oligonucleotide
gagagattctatggtaaagtggagaaaaccgagtaccagaaggatctagagtcaagg

SEQ ID NO: 398357 - DNA, 60 bp, Artificial
  Synthetic oligonucleotide
gagagattgtattgctagagtccatcaaaaacttaagaatttaggctcaattaatcaggc

SEQ ID NO: 398358 - DNA, 55 bp, Artificial
  Synthetic oligonucleotide
gagagatttacttgtgtcaaccaccaccgcacacggttgtgacaccatcgccagg

SEQ ID NO: 398359 - DNA, 60 bp, Artificial
  Synthetic oligonucleotide
gagagcaaaatgctcacatgcaagaaataggattggtagtgggaagaatgtgttaacagg

SEQ ID NO: 398360 - DNA, 60 bp, Artificial
  Synthetic oligonucleotide
gagagcaaatggcagtggaagacgacatgataggataagatcctacaacatgtcattaag

SEQ ID NO: 398361 - DNA, 60 bp, Artificial
  Synthetic oligonucleotide
gagagcaacagtgtcagcagacccactagcatctctgttggagatgtgccacagcacaca

SEQ ID NO: 398362 - DNA, 59 bp, Artificial
  Synthetic oligonucleotide
gagagcaaccaacgcacaaggaatatctagaatacgttggtaaggtcaatccagagctt

SEQ ID NO: 398363 - DNA, 55 bp, Artificial
  Synthetic oligonucleotide
gagagcaagaaggagagtagattctgcagagtcttgaataaagcgccactggatc

SEQ ID NO: 398364 - DNA, 55 bp, Artificial
  Synthetic oligonucleotide
gagagcaagacaacaccagctcgattcgattagtcaacggattcttagcacttat

SEQ ID NO: 398365 - DNA, 57 bp, Artificial
  Synthetic oligonucleotide
gagagcaatgatcgcggcaactgatgcggaggagccggcgaaagcgtataaattagt

SEQ ID NO: 398366 - DNA, 57 bp, Artificial
  Synthetic oligonucleotide
gagagcaatgttatgccagacacttttttgtaagaggtggcaacgtaggagatgaca

SEQ ID NO: 398367 - DNA, 60 bp, Artificial
  Synthetic oligonucleotide
gagagcacaaatgactctgtagtttcgaatctgttagacgattccgaaagtataattcag

SEQ ID NO: 398368 - DNA, 60 bp, Artificial
  Synthetic oligonucleotide
gagagcacatctggttctagtaaatccacatcatagctttgaggttcaattcctcttgct

SEQ ID NO: 398369 - DNA, 55 bp, Artificial
  Synthetic oligonucleotide
gagagcacatgacaatttgtcgagactacggcaactgtcacgggagagaggagcc

SEQ ID NO: 398370 - DNA, 55 bp, Artificial
  Synthetic oligonucleotide
gagagcacatggaataaacagaactgattgtgtaaacacagttgatggtttcatc

SEQ ID NO: 398371 - DNA, 60 bp, Artificial
  Synthetic oligonucleotide
gagagcacattatcctatgtgcatgactggaaaaatctgggctcattccttactgaatcc

SEQ ID NO: 398372 - DNA, 59 bp, Artificial
  Synthetic oligonucleotide
gagagcactactaattccattagtcccgccgctgcactacttaataggttaagacctca

SEQ ID NO: 398373 - DNA, 60 bp, Artificial
  Synthetic oligonucleotide
gagagcagcggaacttctgggacgcagcagtctcaggggactacagaaggggtgggaagc

SEQ ID NO: 398374 - DNA, 55 bp, Artificial
  Synthetic oligonucleotide
gagagcagtgctgcccagagatatggtgttcagaacatcgacacctagagtcgtt

SEQ ID NO: 398375 - DNA, 60 bp, Artificial
  Synthetic oligonucleotide
gagagcagtggaacttctgggacgcagcagtctcaagggactgcagagggggtggaagcc

SEQ ID NO: 398376 - DNA, 60 bp, Artificial
  Synthetic oligonucleotide
gagagcagttgacggacctactcgattcgcagcggggctgctatgctcacggggatttac

SEQ ID NO: 398377 - DNA, 60 bp, Artificial
  Synthetic oligonucleotide
gagagcagttgagctcagtgtcatcatttgaaaggtttgagatattccctaaggcaagtt

SEQ ID NO: 398378 - DNA, 60 bp, Artificial
  Synthetic oligonucleotide
gagagcatcgcgcagctgcttgacatcactctaccaggtagcccacccggtgaggatgac

SEQ ID NO: 398379 - DNA, 56 bp, Artificial
  Synthetic oligonucleotide
gagagcatggcaggacacagacttcggaaaaattagactaccaaaaacaggccacg

SEQ ID NO: 398380 - DNA, 60 bp, Artificial
  Synthetic oligonucleotide
gagagcattcggaatggaacttatgatcatgacatttacagagatgaagcaatcagcaac

SEQ ID NO: 398381 - DNA, 60 bp, Artificial
  Synthetic oligonucleotide
gagagcatttcatgaactaagaaccggggctgcaatagccgtagaatggaacaatgtatc

SEQ ID NO: 398382 - DNA, 58 bp, Artificial
  Synthetic oligonucleotide
gagagccaacgctctcctgaggttgtggttgaaccgtatctggacgtggtacacccgc

SEQ ID NO: 398383 - DNA, 58 bp, Artificial
  Synthetic oligonucleotide
gagagccaatctccaaacaatatacgcgtaaggaaatctgtgaaactcaacaggggtc

SEQ ID NO: 398384 - DNA, 60 bp, Artificial
  Synthetic oligonucleotide
gagagccacggaagaatcctgaagactgatttaaacagtggtaactgtgtagtgcaatgt

SEQ ID NO: 398385 - DNA, 60 bp, Artificial
  Synthetic oligonucleotide
gagagccagaaatctgagggaggcggaccagccgattgtcaacgtggcgcaggaagccga

SEQ ID NO: 398386 - DNA, 55 bp, Artificial
  Synthetic oligonucleotide
gagagccagaagtcgcccttgatgtagaaacgggaatggacgttaataaagttta

SEQ ID NO: 398387 - DNA, 55 bp, Artificial
  Synthetic oligonucleotide
gagagcccgtgtgtaccttaccaccagtgtcacacacgagaagtcgattggaccg

SEQ ID NO: 398388 - DNA, 51 bp, Artificial
  Synthetic oligonucleotide
gagagccctggtagtcatccgactgtcccgcgtcaccgatgctacgacttc

SEQ ID NO: 398389 - DNA, 59 bp, Artificial
  Synthetic oligonucleotide
gagagccgataaacgatagcggacatggggattcactggaagaaagtagttctgacctg

SEQ ID NO: 398390 - DNA, 60 bp, Artificial
  Synthetic oligonucleotide
gagagccggcaaactttgagtatgtgagaggattcgtgcaaggcaggcacaaatgtcaac

SEQ ID NO: 398391 - DNA, 60 bp, Artificial
  Synthetic oligonucleotide
gagagccgggtacacgatacacgtgcagtgcaacgcatccaaatttcaccaagggtgcct

SEQ ID NO: 398392 - DNA, 60 bp, Artificial
  Synthetic oligonucleotide
gagagccgtacgtcaggtcggtactaacatcaagttagatggccgtctgtcgtatccagc

SEQ ID NO: 398393 - DNA, 55 bp, Artificial
  Synthetic oligonucleotide
gagagccgtttatttcatgctctcacttggaatgcaggactttctttctaactca

SEQ ID NO: 398394 - DNA, 60 bp, Artificial
  Synthetic oligonucleotide
gagagcctagtaggtcctgggtctgctgctcccccctgcctgtgcaatacacagaagtgc

SEQ ID NO: 398395 - DNA, 55 bp, Artificial
  Synthetic oligonucleotide
gagagcctcgaattgctcgcttcttggcaaccttgtgttgcgactttgatcgacg

SEQ ID NO: 398396 - DNA, 53 bp, Artificial
  Synthetic oligonucleotide
gagagcgagaacaaggagaccttcagacctggaggaggaaatatgagggacaa

SEQ ID NO: 398397 - DNA, 55 bp, Artificial
  Synthetic oligonucleotide
gagagcgatgtagtccgcttgttgcacggactccgacgtgtgctgatgcgcgcac

SEQ ID NO: 398398 - DNA, 55 bp, Artificial
  Synthetic oligonucleotide
gagagcgccagaatgccactgaaatcagagcgtctgttggaagaatggtcggtgg

SEQ ID NO: 398399 - DNA, 60 bp, Artificial
  Synthetic oligonucleotide
gagagcgcgtgcggaaagatggaaaagcttaccgtcctcaattacacattgaatgtgatc

SEQ ID NO: 398400 - DNA, 57 bp, Artificial
  Synthetic oligonucleotide
gagagcgctgccggcccccgaggtccgcagggaaacgcgcacagagaacccgggcgc

SEQ ID NO: 398401 - DNA, 55 bp, Artificial
  Synthetic oligonucleotide
gagagcgcttcacgacgttattaaccaactacctgaggccgtgatgggagccgct

SEQ ID NO: 398402 - DNA, 60 bp, Artificial
  Synthetic oligonucleotide
gagagcggccactttctttagtggcagccatgtgggatccattggtgaacgactttccca

SEQ ID NO: 398403 - DNA, 55 bp, Artificial
  Synthetic oligonucleotide
gagagcgggaagtgacagtacgatcaacagtacgcgtcgctcgtctctctcctgc

SEQ ID NO: 398404 - DNA, 52 bp, Artificial
  Synthetic oligonucleotide
gagagcgtaaatgttcccagggacactcttgaaggcacacgtctcgcgcgta

SEQ ID NO: 398405 - DNA, 53 bp, Artificial
  Synthetic oligonucleotide
gagagcgtcaatattaagcgggggaaaattagattcatgggaaaaaattcggt

SEQ ID NO: 398406 - DNA, 57 bp, Artificial
  Synthetic oligonucleotide
gagagcgtttacactgacatgtacaggggtaatatgttcggttccggctgggtacaa

SEQ ID NO: 398407 - DNA, 55 bp, Artificial
  Synthetic oligonucleotide
gagagctaacacatcaaattcgtaggttttaccaatgggttcttgaacaagctcc

SEQ ID NO: 398408 - DNA, 60 bp, Artificial
  Synthetic oligonucleotide
gagagctatagacccgaatcttcgtttactgaacagctatttgccaccactttcacaatc

SEQ ID NO: 398409 - DNA, 55 bp, Artificial
  Synthetic oligonucleotide
gagagctcaataaacgaactcaagacttctgggaggtccaattaggaatacctca

SEQ ID NO: 398410 - DNA, 53 bp, Artificial
  Synthetic oligonucleotide
gagagctcacccaacgttccctttatctccccgccctttgtctcctccgacgg

SEQ ID NO: 398411 - DNA, 56 bp, Artificial
  Synthetic oligonucleotide
gagagctctattccataccgagcctcaagtgactggttggacgtagctgattatgc

SEQ ID NO: 398412 - DNA, 57 bp, Artificial
  Synthetic oligonucleotide
gagagctgcagattgtttactagaattagcccggttccacaagaatcgtgttgagtc

SEQ ID NO: 398413 - DNA, 60 bp, Artificial
  Synthetic oligonucleotide
gagagctgcatccggagtactacgagaactgatgacaccgagctttccacaactgctgac

SEQ ID NO: 398414 - DNA, 55 bp, Artificial
  Synthetic oligonucleotide
gagagctgccagtcgccaaaggagttttgtgcgccaatgtccacagaggacggcc

SEQ ID NO: 398415 - DNA, 60 bp, Artificial
  Synthetic oligonucleotide
gagagctgtgagttaccacctgagaaaggttgcgtattgtataaggattatctcaccact

SEQ ID NO: 398416 - DNA, 60 bp, Artificial
  Synthetic oligonucleotide
gagagcttaagtgcggagatggtatcttcatattcagagactctgatgactggttgaaca

SEQ ID NO: 398417 - DNA, 56 bp, Artificial
  Synthetic oligonucleotide
gagagcttggaacgttcctttagattcaccgaaagcgaactagcgcgaaatgtttg

SEQ ID NO: 398418 - DNA, 60 bp, Artificial
  Synthetic oligonucleotide
gagagctttagcgtgggaatttgcccctgactggcaatcaggtttcatgccctctccgtg

SEQ ID NO: 398419 - DNA, 60 bp, Artificial
  Synthetic oligonucleotide
gagaggaaatggccactaaagcggattatacccttgatgaagagagcagggcgagaatca

SEQ ID NO: 398420 - DNA, 55 bp, Artificial
  Synthetic oligonucleotide
gagaggaacagattgaatatccgctgaagccaattgtcgaaaatgctaaaccaac

SEQ ID NO: 398421 - DNA, 58 bp, Artificial
  Synthetic oligonucleotide
gagaggaatagtaccgaagaaacttacgcgcctggagtgcacaatcaaattcgcttag

SEQ ID NO: 398422 - DNA, 60 bp, Artificial
  Synthetic oligonucleotide
gagaggaatgaactatgaaacgtcaatgttcaacaaggtggcgttactgatttgtgaagc

SEQ ID NO: 398423 - DNA, 55 bp, Artificial
  Synthetic oligonucleotide
gagaggaatgagcaaggacaaaccctatggagcagaacaagcgatgccggatcag

SEQ ID NO: 398424 - DNA, 59 bp, Artificial
  Synthetic oligonucleotide
gagaggaatggccaacaattacgaacaatcaaggaacgaagatttatattgcaccgaga

SEQ ID NO: 398425 - DNA, 53 bp, Artificial
  Synthetic oligonucleotide
gagaggaccacctctggccaaacccagaaaactgtaccgtttttctggatttg

SEQ ID NO: 398426 - DNA, 52 bp, Artificial
  Synthetic oligonucleotide
gagaggacgatatattcttcgataatactggagagaatggaaatcccgtgga

SEQ ID NO: 398427 - DNA, 55 bp, Artificial
  Synthetic oligonucleotide
gagaggactagatggctagctttacgcctatcgtccccgttcgtagcaaccggcc

SEQ ID NO: 398428 - DNA, 55 bp, Artificial
  Synthetic oligonucleotide
gagaggaggactaagtggcccacgttttgtatcgcttctacagcgcgacagggca

SEQ ID NO: 398429 - DNA, 55 bp, Artificial
  Synthetic oligonucleotide
gagaggagggatgccatcgggatgttctggcacttctatcttcaacagtatgatc

SEQ ID NO: 398430 - DNA, 60 bp, Artificial
  Synthetic oligonucleotide
gagaggagtcttctcaagggttgtactggcattcggtcatccactctctttgcagggctt

SEQ ID NO: 398431 - DNA, 55 bp, Artificial
  Synthetic oligonucleotide
gagaggataccaaatggacgacgacatgaatcagacaaaagtcacagcagctgac

SEQ ID NO: 398432 - DNA, 55 bp, Artificial
  Synthetic oligonucleotide
gagaggatcagagctttgcggaagcaatacagcgaaacctggcatatggacgagg

SEQ ID NO: 398433 - DNA, 60 bp, Artificial
  Synthetic oligonucleotide
gagaggatcagtgcgctgcgggaacagtatggtgagacctggcacatggacagagagcac

SEQ ID NO: 398434 - DNA, 60 bp, Artificial
  Synthetic oligonucleotide
gagaggatggtttagatgacgcattaaagaagtttgtgcgattgactccagatgaaagga

SEQ ID NO: 398435 - DNA, 60 bp, Artificial
  Synthetic oligonucleotide
gagaggatgtagctccaattgaacacattgcaagcatgagaaggaattatttcacagcag

SEQ ID NO: 398436 - DNA, 58 bp, Artificial
  Synthetic oligonucleotide
gagaggatgtcaaggcagcagacttacttggagaaagggaatcctattttattcccga

SEQ ID NO: 398437 - DNA, 55 bp, Artificial
  Synthetic oligonucleotide
gagaggatttatcttcaatgaggagcgaaattgttatgatgcgcccttggacatc

SEQ ID NO: 398438 - DNA, 55 bp, Artificial
  Synthetic oligonucleotide
gagaggcaattttaagggtccaaagaaaatcattaagtgtttcaactgtggcaaa

SEQ ID NO: 398439 - DNA, 55 bp, Artificial
  Synthetic oligonucleotide
gagaggcaattttaggggcccgagaagaattaagtgtttcaactgtggcaaagaa

SEQ ID NO: 398440 - DNA, 60 bp, Artificial
  Synthetic oligonucleotide
gagaggcacactgcaagggacgtaaatcagaatatgcacactttgttgggtatgggtcca

SEQ ID NO: 398441 - DNA, 55 bp, Artificial
  Synthetic oligonucleotide
gagaggccaaaagagatggaaggaatttgctatccaggatcaattgaaaaccagg

SEQ ID NO: 398442 - DNA, 55 bp, Artificial
  Synthetic oligonucleotide
gagaggcccatttgaagccaagtgggcaatccagctagaaatcacagacatcacg

SEQ ID NO: 398443 - DNA, 55 bp, Artificial
  Synthetic oligonucleotide
gagaggcgactgaggagggcagggtggggttgatcaacgccggagtgatcctcat

SEQ ID NO: 398444 - DNA, 58 bp, Artificial
  Synthetic oligonucleotide
gagaggcggcatagtattacccgcctctcatccctcacctttcatcccggtcccacca

SEQ ID NO: 398445 - DNA, 60 bp, Artificial
  Synthetic oligonucleotide
gagaggcggtgaagcaaactacgaagcatatatcgggtatttatagacttatagcgcagc

SEQ ID NO: 398446 - DNA, 58 bp, Artificial
  Synthetic oligonucleotide
gagaggcgtagagcgcagcaaccaattatactaaagtgggagcccaaaccgagcggag

SEQ ID NO: 398447 - DNA, 59 bp, Artificial
  Synthetic oligonucleotide
gagaggcgtagagcgcagcaaccaattatactaaagtgggagcccaaattgagcgggac

SEQ ID NO: 398448 - DNA, 60 bp, Artificial
  Synthetic oligonucleotide
gagaggctgataatagactctattggagccttacaaacacgatggacaagatgtaggtgg

SEQ ID NO: 398449 - DNA, 55 bp, Artificial
  Synthetic oligonucleotide
gagaggctgcgactacgaaagtagagttaaagcttctatccaaaggaaaatcgag

SEQ ID NO: 398450 - DNA, 59 bp, Artificial
  Synthetic oligonucleotide
gagaggcttgagtcaattggcgtgtgcgtaggtgctttacacagggcgacaacaacgcg

SEQ ID NO: 398451 - DNA, 54 bp, Artificial
  Synthetic oligonucleotide
gagaggctttatgttgggggccctcttaccaattcaaggggggagaactgcggc

SEQ ID NO: 398452 - DNA, 60 bp, Artificial
  Synthetic oligonucleotide
gagagggaactaaagcatatcgcgaggatatgcgatgtaggggtgagatggaccccgaga

SEQ ID NO: 398453 - DNA, 55 bp, Artificial
  Synthetic oligonucleotide
gagagggaagccaggtatctgcgtattctacacacgagagccctgccgacgtctg

SEQ ID NO: 398454 - DNA, 55 bp, Artificial
  Synthetic oligonucleotide
gagagggaatccaggagtaaaagggtgggcctttgacaatgggaatgatgtttgg

SEQ ID NO: 398455 - DNA, 55 bp, Artificial
  Synthetic oligonucleotide
gagagggacagggaccgcagaagacaaagagaaatgagcaagctcttggccactg

SEQ ID NO: 398456 - DNA, 56 bp, Artificial
  Synthetic oligonucleotide
gagagggaccctgtgaaccaggtgattgtggaggtaaactattatgtaaacatggg

SEQ ID NO: 398457 - DNA, 55 bp, Artificial
  Synthetic oligonucleotide
gagagggaggtagatccagaactagaaaggagagtggcactcaggatcgcacagg

SEQ ID NO: 398458 - DNA, 57 bp, Artificial
  Synthetic oligonucleotide
gagagggatactctctagtcggaattgaccctttccgtctgctccaaaacagtcaag

SEQ ID NO: 398459 - DNA, 60 bp, Artificial
  Synthetic oligonucleotide
gagagggatggcatgcaggaagaagccatacaggaaatagccgggatgactgcggatgtg

SEQ ID NO: 398460 - DNA, 60 bp, Artificial
  Synthetic oligonucleotide
gagagggattatgctccaacaaacagaaataaatgagcaaaccttcaggatgctgaagtt

SEQ ID NO: 398461 - DNA, 59 bp, Artificial
  Synthetic oligonucleotide
gagagggctaacaataggactgagaacaactctagtgaggagtatagattaataaattg

SEQ ID NO: 398462 - DNA, 54 bp, Artificial
  Synthetic oligonucleotide
gagagggctaaccccgacagaaagtccgtcagggccagctacaagggcgttacc

SEQ ID NO: 398463 - DNA, 50 bp, Artificial
  Synthetic oligonucleotide
gagagggctactgagggagagaacaacagcctattacaccctatatgcca

SEQ ID NO: 398464 - DNA, 60 bp, Artificial
  Synthetic oligonucleotide
gagaggggacgagcagtgcgcctcacaacggaacccctgagcacgggagggagcacgcag

SEQ ID NO: 398465 - DNA, 54 bp, Artificial
  Synthetic oligonucleotide
gagaggggctccaagcaaagagaggaggaatcccggggaaaaattctcccaaga

SEQ ID NO: 398466 - DNA, 55 bp, Artificial
  Synthetic oligonucleotide
gagagggggtccgaggaggtatcaaagagtccatgtccccagttggaccggacaa

SEQ ID NO: 398467 - DNA, 52 bp, Artificial
  Synthetic oligonucleotide
gagagggtagccaggcctgcatccttaagacctcggtggcataaaccaactc

SEQ ID NO: 398468 - DNA, 55 bp, Artificial
  Synthetic oligonucleotide
gagagggttatgtgcggtggcacgagactttgctggatggccagccatggtgtgc

SEQ ID NO: 398469 - DNA, 55 bp, Artificial
  Synthetic oligonucleotide
gagagggtttgagcgatctttctgacggttcggcagttgttgagctcgaagccaa

SEQ ID NO: 398470 - DNA, 55 bp, Artificial
  Synthetic oligonucleotide
gagaggtaaatcgcctaagaagctttatctatagggactatgtcctagatcacga

SEQ ID NO: 398471 - DNA, 55 bp, Artificial
  Synthetic oligonucleotide
gagaggtaatgactatgtggtcattggagtccacacggctgccgcacgtggggaa

SEQ ID NO: 398472 - DNA, 55 bp, Artificial
  Synthetic oligonucleotide
gagaggtaccgcatcccactaacccccaatgtacaagaaacacaagtctttggct

SEQ ID NO: 398473 - DNA, 55 bp, Artificial
  Synthetic oligonucleotide
gagaggtaggtcaatattaactcctagaaagttcacaactagtggtagtcttagg

SEQ ID NO: 398474 - DNA, 55 bp, Artificial
  Synthetic oligonucleotide
gagaggtatactgtgtcgacgtgatacagagcaaattcgcacatcatttggtgtg

SEQ ID NO: 398475 - DNA, 59 bp, Artificial
  Synthetic oligonucleotide
gagaggtcaaaggaatccccggagtgacaagaatggctcgggatggcatgaagttgccc

SEQ ID NO: 398476 - DNA, 55 bp, Artificial
  Synthetic oligonucleotide
gagaggtcaatcctggcacattgttagacgtcgtatagtgcagatggtttgcgac

SEQ ID NO: 398477 - DNA, 54 bp, Artificial
  Synthetic oligonucleotide
gagaggtccgttacactttcaaaggcgcgcgattttaggtgcacttaaatttgg

SEQ ID NO: 398478 - DNA, 56 bp, Artificial
  Synthetic oligonucleotide
gagaggtcttatacagtattgggttctagaactaaagaagagtgctattagtttgc

SEQ ID NO: 398479 - DNA, 51 bp, Artificial
  Synthetic oligonucleotide
gagaggtgaaattcattgtcgcaactaatatcatcgaaaatggtgttaccc

SEQ ID NO: 398480 - DNA, 60 bp, Artificial
  Synthetic oligonucleotide
gagaggtgacgacgacagaggcagtgaagtacttgagtattgacttcacgaccactctcc

SEQ ID NO: 398481 - DNA, 55 bp, Artificial
  Synthetic oligonucleotide
gagaggtggtcggcctgtatggcaatggagtcttgcatggcgatacctactgcag

SEQ ID NO: 398482 - DNA, 55 bp, Artificial
  Synthetic oligonucleotide
gagaggttcaacgtgtcatattcaacgccactattatttgaaatgtgttgtatgg

SEQ ID NO: 398483 - DNA, 52 bp, Artificial
  Synthetic oligonucleotide
gagaggttcccctaaggagaactcctggggctttctcgcggccctcggggcc

SEQ ID NO: 398484 - DNA, 56 bp, Artificial
  Synthetic oligonucleotide
gagaggttgaatcggcatctctggcgtacattcaatagatatatgattgatgatct

SEQ ID NO: 398485 - DNA, 60 bp, Artificial
  Synthetic oligonucleotide
gagaggttgcgagctgcccttgagaggcagtcttgtgctagggcttttgccctagaaact

SEQ ID NO: 398486 - DNA, 60 bp, Artificial
  Synthetic oligonucleotide
gagaggttgtgcattgcgaaagagaccaacaatctggcaaattgcatagataactatgct

SEQ ID NO: 398487 - DNA, 55 bp, Artificial
  Synthetic oligonucleotide
gagagtaaagaagaagctgagcgcaaatacgaggcacaagttaaaagaggtgcag

SEQ ID NO: 398488 - DNA, 55 bp, Artificial
  Synthetic oligonucleotide
gagagtaagttaatcctgcagcaaagcctgcagactgtaatgacttgttggaccc

SEQ ID NO: 398489 - DNA, 55 bp, Artificial
  Synthetic oligonucleotide
gagagtaatatcgatcgagcacttgagaaagagcgagcaacatacaagcgaacaa

SEQ ID NO: 398490 - DNA, 58 bp, Artificial
  Synthetic oligonucleotide
gagagtaatttagctgttgtcaaacagttttcgttacgcaacaatcacagatacgacg

SEQ ID NO: 398491 - DNA, 60 bp, Artificial
  Synthetic oligonucleotide
gagagtacactagtcatgagacggcacctgctaactgctcctccggatcccaacataagc

SEQ ID NO: 398492 - DNA, 60 bp, Artificial
  Synthetic oligonucleotide
gagagtacccatgggcttctcatatgacacccgttgctttgactctacagtaactgagag

SEQ ID NO: 398493 - DNA, 52 bp, Artificial
  Synthetic oligonucleotide
gagagtactacccagtaacattgacaggaccaactttccagtacatggaggc

SEQ ID NO: 398494 - DNA, 60 bp, Artificial
  Synthetic oligonucleotide
gagagtacttaatgcatgtttcagtgtgaagagagttccaggtaaatcgtcatcaataat

SEQ ID NO: 398495 - DNA, 50 bp, Artificial
  Synthetic oligonucleotide
gagagtagaatatcatttgcactgtactttgagccggatgtgattctgcc

SEQ ID NO: 398496 - DNA, 55 bp, Artificial
  Synthetic oligonucleotide
gagagtagcactaaccttcggcactgagagcaaaacacagactgaaccaagatcg

SEQ ID NO: 398497 - DNA, 55 bp, Artificial
  Synthetic oligonucleotide
gagagtaggtaattaggtaaagtggtgataaaggggtagtacgcacgctagtctc

SEQ ID NO: 398498 - DNA, 50 bp, Artificial
  Synthetic oligonucleotide
gagagtagtttttctttaagctatgtagcattatgttgtgtggtgtgctt

SEQ ID NO: 398499 - DNA, 55 bp, Artificial
  Synthetic oligonucleotide
gagagtatgaactgtggaagattggagacggacggtggggaatggaattgaggag

SEQ ID NO: 398500 - DNA, 60 bp, Artificial
  Synthetic oligonucleotide
gagagtatgatgtaatttgatactcataagtgattggtgagcactatggtttatcatgag

SEQ ID NO: 398501 - DNA, 57 bp, Artificial
  Synthetic oligonucleotide
gagagtatgatgtgtcaaaagccgacatacctttccaaatgagcctcaaagagatca

SEQ ID NO: 398502 - DNA, 51 bp, Artificial
  Synthetic oligonucleotide
gagagtcacaacgaaatggaatcgcaccgcaatctgaagcgcttagaaaat

SEQ ID NO: 398503 - DNA, 60 bp, Artificial
  Synthetic oligonucleotide
gagagtcacaactcatccgctggcataaataccatatgcgtgaggaaccaggttctgaga

SEQ ID NO: 398504 - DNA, 50 bp, Artificial
  Synthetic oligonucleotide
gagagtcagaatggtaacactaatgctattgcacgactgcgcatttgcca

SEQ ID NO: 398505 - DNA, 55 bp, Artificial
  Synthetic oligonucleotide
gagagtcagattgccaccattgagcaaagtgcaccctctcagagtgatcaagagc

SEQ ID NO: 398506 - DNA, 55 bp, Artificial
  Synthetic oligonucleotide
gagagtcatcatcatgcaagagaatgccgacagggctacgcaaatgacagctctg

SEQ ID NO: 398507 - DNA, 55 bp, Artificial
  Synthetic oligonucleotide
gagagtcctccggcccctgaatgcggctaatcccaaccacggagcaggtgattgc

SEQ ID NO: 398508 - DNA, 60 bp, Artificial
  Synthetic oligonucleotide
gagagtcctctcctgagtgactgagtccagcgaaaggagtgcaccacctgatcagacatg

SEQ ID NO: 398509 - DNA, 58 bp, Artificial
  Synthetic oligonucleotide
gagagtctctatcgatggtacgtgtttttagcttcttaattgggcgagaccatcttcc

SEQ ID NO: 398510 - DNA, 56 bp, Artificial
  Synthetic oligonucleotide
gagagtctgtatcagaagcccatacacagaaccacagcttacaggcaacacagatg

SEQ ID NO: 398511 - DNA, 59 bp, Artificial
  Synthetic oligonucleotide
gagagtcttagtagatagggaggttaagcagccattgcttgtaccagagcagaactgtg

SEQ ID NO: 398512 - DNA, 55 bp, Artificial
  Synthetic oligonucleotide
gagagtgaacggctggctcggataaccggagaacaactgttgtggtaccacctgc

SEQ ID NO: 398513 - DNA, 55 bp, Artificial
  Synthetic oligonucleotide
gagagtgacttctagacacactctaggaggtgatcgtagttggcatgagagagac

SEQ ID NO: 398514 - DNA, 60 bp, Artificial
  Synthetic oligonucleotide
gagagtgatagagatcaggaagaattggcagcgttggtggaaatggggcatgatgctcct

SEQ ID NO: 398515 - DNA, 58 bp, Artificial
  Synthetic oligonucleotide
gagagtgatggggacacggaggaattatcaaccatggtgggcatggggcgtcttaggc

SEQ ID NO: 398516 - DNA, 55 bp, Artificial
  Synthetic oligonucleotide
gagagtgcattggtaccgaccaaagtaaccaatgtactcaaataatgaatcaatc

SEQ ID NO: 398517 - DNA, 55 bp, Artificial
  Synthetic oligonucleotide
gagagtgcttaacctggtggaaaactggctaggcagcaacacccagttctgcgtg

SEQ ID NO: 398518 - DNA, 59 bp, Artificial
  Synthetic oligonucleotide
gagagtggagccccaccgaccgacttgcaaaagatggtcatgggcaacacaaagcctgt

SEQ ID NO: 398519 - DNA, 58 bp, Artificial
  Synthetic oligonucleotide
gagagtggatagttatgtctttaactgggaagaaaagtgcctgctaatgactctgatc

SEQ ID NO: 398520 - DNA, 60 bp, Artificial
  Synthetic oligonucleotide
gagagtggcctgagtactgccctgacacagatgcaactgccgtggataaaccaactcgcc

SEQ ID NO: 398521 - DNA, 54 bp, Artificial
  Synthetic oligonucleotide
gagagtggggcaagcaatgtatgcccctcccattgcaggagaaattacatgtag

SEQ ID NO: 398522 - DNA, 55 bp, Artificial
  Synthetic oligonucleotide
gagagtggttgttaatattgatcgcttcttaagagttagggaccaacgaggaaac

SEQ ID NO: 398523 - DNA, 60 bp, Artificial
  Synthetic oligonucleotide
gagagtgtctagcttcatcagaggaaccagagtggtcccaagagggcaactgtccaccag

SEQ ID NO: 398524 - DNA, 56 bp, Artificial
  Synthetic oligonucleotide
gagagtgttagtaaacggaacattcctcaaacatcccaatggatataagtccttat

SEQ ID NO: 398525 - DNA, 58 bp, Artificial
  Synthetic oligonucleotide
gagagttaatcaatccaaccacttatggaattggtatgacctatcactgttataacga

SEQ ID NO: 398526 - DNA, 55 bp, Artificial
  Synthetic oligonucleotide
gagagttaattatattctcattattggtgtcttggtcttgtgtgaggttacgggg

SEQ ID NO: 398527 - DNA, 55 bp, Artificial
  Synthetic oligonucleotide
gagagttcaaacaaattcagttcatcagatttccgataaggtgaagaagatgggg

SEQ ID NO: 398528 - DNA, 60 bp, Artificial
  Synthetic oligonucleotide
gagagttcaacaattcagactcaaattctgccaatcattaccaccccaggcactctggag

SEQ ID NO: 398529 - DNA, 56 bp, Artificial
  Synthetic oligonucleotide
gagagttcactatgttaggagtccacgacaacgtggctattttaccaacccacgct

SEQ ID NO: 398530 - DNA, 60 bp, Artificial
  Synthetic oligonucleotide
gagagttccgcaccttcgaaaaggctttggtgcagccgtcatcacgcgtcgtcattatgg

SEQ ID NO: 398531 - DNA, 58 bp, Artificial
  Synthetic oligonucleotide
gagagttgatacacccggcaacgttcggtattggtatgaactattattgctataacga

SEQ ID NO: 398532 - DNA, 55 bp, Artificial
  Synthetic oligonucleotide
gagagttgttagtgaatggaatggggtcactaataactggaaccaactgtttaaa

SEQ ID NO: 398533 - DNA, 55 bp, Artificial
  Synthetic oligonucleotide
gagagtttagaccaccacgtggagttaaaccgatccgtacaactaagataatcgc

SEQ ID NO: 398534 - DNA, 53 bp, Artificial
  Synthetic oligonucleotide
gagataaacggatgcgattaaatgttcgcgtcgaacgttatttgtactgtcta

SEQ ID NO: 398535 - DNA, 60 bp, Artificial
  Synthetic oligonucleotide
gagataaatcagcgtacgcactatgtacattcgcatatgtgcacaatgagtcatctgatc

SEQ ID NO: 398536 - DNA, 51 bp, Artificial
  Synthetic oligonucleotide
gagataacaccctcccagaaacaggagcagaaagacaaggagctgtatcct

SEQ ID NO: 398537 - DNA, 52 bp, Artificial
  Synthetic oligonucleotide
gagataacactggtaccatgcatagctgcagagagtgacagcattgggcatg

SEQ ID NO: 398538 - DNA, 55 bp, Artificial
  Synthetic oligonucleotide
gagataacatgtggtatgaaggccattccgaaaataataatcccgctaagggtac

SEQ ID NO: 398539 - DNA, 55 bp, Artificial
  Synthetic oligonucleotide
gagataactactctggtaactttatcgacggggcttacacctttgcctttgataa

SEQ ID NO: 398540 - DNA, 60 bp, Artificial
  Synthetic oligonucleotide
gagataactcaagctcactgcttgttcatgatccaattctcaaagactatcaacccctca

SEQ ID NO: 398541 - DNA, 55 bp, Artificial
  Synthetic oligonucleotide
gagataactggtattcatctctatgagactctatgtaattaaaagcactcggagg

SEQ ID NO: 398542 - DNA, 55 bp, Artificial
  Synthetic oligonucleotide
gagataagaaccaacctccagtactcagagcaaaacgtagactaaacatgtctca

SEQ ID NO: 398543 - DNA, 55 bp, Artificial
  Synthetic oligonucleotide
gagataagggcgaaaatcgttaggaggaagatacttcaactggttgcagagaact

SEQ ID NO: 398544 - DNA, 60 bp, Artificial
  Synthetic oligonucleotide
gagataataagaccatcaacgcctgaactcgtgaacgcttgctcgagctatggcattcgc

SEQ ID NO: 398545 - DNA, 60 bp, Artificial
  Synthetic oligonucleotide
gagataatgcggatctacgtcatcgatgacgttataccatgcatcattggagtatatcct

SEQ ID NO: 398546 - DNA, 55 bp, Artificial
  Synthetic oligonucleotide
gagataatgtataacccatgtaaggtgtttgctcttgtactacacctgtgctgtt

SEQ ID NO: 398547 - DNA, 60 bp, Artificial
  Synthetic oligonucleotide
gagataattggcatggctcaaatagaccatggttatctttcaatcaaaatctggagtatc

SEQ ID NO: 398548 - DNA, 53 bp, Artificial
  Synthetic oligonucleotide
gagatacatcatcatggaaggtttcgtatccttgccagaattgccaaagccgc

SEQ ID NO: 398549 - DNA, 60 bp, Artificial
  Synthetic oligonucleotide
gagataccagtatctactgtaattgcagtatgggatccccataatgtctcgcaaatggtt

SEQ ID NO: 398550 - DNA, 55 bp, Artificial
  Synthetic oligonucleotide
gagatacccttcggatcatacatgtgtagctggtttaccagtcgaggattgcggt

SEQ ID NO: 398551 - DNA, 60 bp, Artificial
  Synthetic oligonucleotide
gagatacgagaagtccagaagctgtttacacaaggatcatgatgaacggagggcggttaa

SEQ ID NO: 398552 - DNA, 55 bp, Artificial
  Synthetic oligonucleotide
gagatacgcattgcttggtcgagcagcagttgctttgacgggaaagagtggatgc

SEQ ID NO: 398553 - DNA, 54 bp, Artificial
  Synthetic oligonucleotide
gagatacggaccgatcagcactgggtaaccaagacaaatatagaggattatcta

SEQ ID NO: 398554 - DNA, 59 bp, Artificial
  Synthetic oligonucleotide
gagatacggttctagagtatttggtgtcttttggagtgtggattcgcactcctccagct

SEQ ID NO: 398555 - DNA, 55 bp, Artificial
  Synthetic oligonucleotide
gagatactcagcaagtttagcgcgcaccctctcggtattgataccgaagcagctg

SEQ ID NO: 398556 - DNA, 59 bp, Artificial
  Synthetic oligonucleotide
gagatactctttataactgctgtttggtcccggattgcagaggaagatggtgggaattc

SEQ ID NO: 398557 - DNA, 55 bp, Artificial
  Synthetic oligonucleotide
gagatactgttacccattgcgaccctgagaacgagttcaacagaatctcacgccc

SEQ ID NO: 398558 - DNA, 55 bp, Artificial
  Synthetic oligonucleotide
gagatacttctaatcagccctagggttcttcttgcggaagactggagagacaaag

SEQ ID NO: 398559 - DNA, 55 bp, Artificial
  Synthetic oligonucleotide
gagatacttggctatgcaataagtccttacgatacgtctaaggacggtctaatcg

SEQ ID NO: 398560 - DNA, 55 bp, Artificial
  Synthetic oligonucleotide
gagatagagctggcagttccagggttgctctcactgagcagcttgacagcttgct

SEQ ID NO: 398561 - DNA, 50 bp, Artificial
  Synthetic oligonucleotide
gagatagagtgataggtcttagaaatcaatgccttacgcgtaataaattt

SEQ ID NO: 398562 - DNA, 55 bp, Artificial
  Synthetic oligonucleotide
gagatagatacgcggactggacaatatattttcaacggcggacaacggaccgagc

SEQ ID NO: 398563 - DNA, 60 bp, Artificial
  Synthetic oligonucleotide
gagatagatctgacaaagggcagccaattggtgtttgtcgtaccagacaccatgatgact

SEQ ID NO: 398564 - DNA, 53 bp, Artificial
  Synthetic oligonucleotide
gagatagctctaaatattcacaacctaacctgcactttatgaaagtgtccata

SEQ ID NO: 398565 - DNA, 55 bp, Artificial
  Synthetic oligonucleotide
gagatagctgggatgaccgccgatgtgttggaggcggcgtcggaagaagttcctc

SEQ ID NO: 398566 - DNA, 59 bp, Artificial
  Synthetic oligonucleotide
gagataggaaacaggaagtacatgcacttttttatagacttgatgtagtaccacttcag

SEQ ID NO: 398567 - DNA, 55 bp, Artificial
  Synthetic oligonucleotide
gagatagggaatagtctttatacatttgaaggtacacagtgtgagatgactaagc

SEQ ID NO: 398568 - DNA, 60 bp, Artificial
  Synthetic oligonucleotide
gagatagggcccaaagtatcactgattgacacatccagtaccattactatcccagctaac

SEQ ID NO: 398569 - DNA, 59 bp, Artificial
  Synthetic oligonucleotide
gagataggttgaacatacctgagaactgggttgagttaattaatgacaatccagaggtc

SEQ ID NO: 398570 - DNA, 55 bp, Artificial
  Synthetic oligonucleotide
gagatagtaaagtactagccatgagtgcagcttcatacttactaaacgtcgacag

SEQ ID NO: 398571 - DNA, 51 bp, Artificial
  Synthetic oligonucleotide
gagatagtaaggttagaagtaataatttgaacagaggggtccgtccaaagt

SEQ ID NO: 398572 - DNA, 60 bp, Artificial
  Synthetic oligonucleotide
gagatagtagccagctgtgataaatgtcagctaaaaggagaagccatgcatggacaagta

SEQ ID NO: 398573 - DNA, 55 bp, Artificial
  Synthetic oligonucleotide
gagatagtagcggcatgtcccaaatgccaaataagaggagaacctaagcatggac

SEQ ID NO: 398574 - DNA, 54 bp, Artificial
  Synthetic oligonucleotide
gagatagtcataggagtaggtttagtctagtttaccagaagaaagttgttgtta

SEQ ID NO: 398575 - DNA, 59 bp, Artificial
  Synthetic oligonucleotide
gagatagtgcatcagatattgcggtctacgcagttaaagtgacagaccagctcaaaata

SEQ ID NO: 398576 - DNA, 59 bp, Artificial
  Synthetic oligonucleotide
gagatagtgtatttgaataatactaccttagagaaagagatttgccctaaagcagtaga

SEQ ID NO: 398577 - DNA, 55 bp, Artificial
  Synthetic oligonucleotide
gagatagtgtttgaaagaatgacagcaggggttctttgggtatagaaaactttgg

SEQ ID NO: 398578 - DNA, 52 bp, Artificial
  Synthetic oligonucleotide
gagatataagacaagcacattgcaaccttcttagagcaaaatggaatgacac

SEQ ID NO: 398579 - DNA, 60 bp, Artificial
  Synthetic oligonucleotide
gagatataagacgagcacattgtaacattagtagcacaaaatggaataacactttaggac

SEQ ID NO: 398580 - DNA, 60 bp, Artificial
  Synthetic oligonucleotide
gagatatacaggaaaccctgtgatatgcatgggacaccatgctgtttccaatgggacaat

SEQ ID NO: 398581 - DNA, 59 bp, Artificial
  Synthetic oligonucleotide
gagatatatcgtaaggatcaaacaccaaatagccgggtgatcaattatatcttcgaccg

SEQ ID NO: 398582 - DNA, 55 bp, Artificial
  Synthetic oligonucleotide
gagatatcattcgaacttcgtgtagaggaacatgtttctgctatcaatgcgttgt

SEQ ID NO: 398583 - DNA, 60 bp, Artificial
  Synthetic oligonucleotide
gagatatccacactagtcaagagttctatagacccaggagaagatagcttgttcttaggg

SEQ ID NO: 398584 - DNA, 55 bp, Artificial
  Synthetic oligonucleotide
gagatatctagtgttgttgtgtggttgtgagtgatccattattatgtgattgtgc

SEQ ID NO: 398585 - DNA, 55 bp, Artificial
  Synthetic oligonucleotide
gagatatgccccaaattagtggaatacaggaattggtcaaagccacaatgtaaaa

SEQ ID NO: 398586 - DNA, 52 bp, Artificial
  Synthetic oligonucleotide
gagatatggagataagtataagtaacagcaacaattgtaatcaagagtgcga

SEQ ID NO: 398587 - DNA, 60 bp, Artificial
  Synthetic oligonucleotide
gagatatggcccagcattaagcatcaatgaactgagcaatcttgcaaagggagagaaggc

SEQ ID NO: 398588 - DNA, 57 bp, Artificial
  Synthetic oligonucleotide
gagatatggtgtccgagcaattcactgacgatcacaccaaacaactgggtgcgaagc

SEQ ID NO: 398589 - DNA, 60 bp, Artificial
  Synthetic oligonucleotide
gagatattagacaagcacattgtaacattagtgaagcaaaatggaataacactttaggac

SEQ ID NO: 398590 - DNA, 60 bp, Artificial
  Synthetic oligonucleotide
gagatattcaacgtctatagcttcagagatcatacttggcatggactaagaaccgctata

SEQ ID NO: 398591 - DNA, 51 bp, Artificial
  Synthetic oligonucleotide
gagatattcgcgaatccatggaatcgggtgcttagtagattctaacacgat

SEQ ID NO: 398592 - DNA, 59 bp, Artificial
  Synthetic oligonucleotide
gagatcaaacttggagtggggtgtaatggtctacgattattcagaactggaacgtgatc

SEQ ID NO: 398593 - DNA, 60 bp, Artificial
  Synthetic oligonucleotide
gagatcaagaaatgagggagttgctgtcaggactggactatgaagctagatgcatatcac

SEQ ID NO: 398594 - DNA, 55 bp, Artificial
  Synthetic oligonucleotide
gagatcaagaggaattagtctagtgggcttcttgtcatccacataccctccaact

SEQ ID NO: 398595 - DNA, 60 bp, Artificial
  Synthetic oligonucleotide
gagatcaatggtcctgagtcagtgttggtcaatacttatcagtggatcatcaggaactgg

SEQ ID NO: 398596 - DNA, 55 bp, Artificial
  Synthetic oligonucleotide
gagatcaatgtacttctccctcaagtcgcagtcaacctctcaaactgccacgcac

SEQ ID NO: 398597 - DNA, 55 bp, Artificial
  Synthetic oligonucleotide
gagatcaccgctcatacaaacacccaagtgtttcattgtaacgttcatgccgtga

SEQ ID NO: 398598 - DNA, 57 bp, Artificial
  Synthetic oligonucleotide
gagatcaccggtcttcactgataattcaaccccaccggccgtaccgcagacctacca

SEQ ID NO: 398599 - DNA, 55 bp, Artificial
  Synthetic oligonucleotide
gagatcacgaccacccatccgatcaccaaatacatcatgacctgtatgtcggctg

SEQ ID NO: 398600 - DNA, 51 bp, Artificial
  Synthetic oligonucleotide
gagatcactagaacatttaattgtccagtcgaacgttatttcgaacacgag

SEQ ID NO: 398601 - DNA, 59 bp, Artificial
  Synthetic oligonucleotide
gagatcactattagtacgcaaaagcgcagtttctatgaaaacctccatactatcgttaa

SEQ ID NO: 398602 - DNA, 60 bp, Artificial
  Synthetic oligonucleotide
gagatcactcatttgctgccctatatagactattactgcatgtggtcttatagggtacca

SEQ ID NO: 398603 - DNA, 60 bp, Artificial
  Synthetic oligonucleotide
gagatcacttaccaacgcgatggcaagctgtatacctttcaagtctatggaaccttcacc

SEQ ID NO: 398604 - DNA, 59 bp, Artificial
  Synthetic oligonucleotide
gagatcacttcgtcccataacctggagagtttgctgcgatcccctcctgacaggtggct

SEQ ID NO: 398605 - DNA, 60 bp, Artificial
  Synthetic oligonucleotide
gagatcagaaggatttggcgtcaagcgaacaacggagaagatgcaactgccggtcttacc

SEQ ID NO: 398606 - DNA, 60 bp, Artificial
  Synthetic oligonucleotide
gagatcagacgaatttggcgtcaagctaataatggggaggacgcaactgccggtctcacc

SEQ ID NO: 398607 - DNA, 50 bp, Artificial
  Synthetic oligonucleotide
gagatcagagctatggatccatagcttctttgacagtttatccccatggt

SEQ ID NO: 398608 - DNA, 60 bp, Artificial
  Synthetic oligonucleotide
gagatcagaggggaaatgtgctcttatctccggaggaagttagtgagacacaggggacag

SEQ ID NO: 398609 - DNA, 60 bp, Artificial
  Synthetic oligonucleotide
gagatcagatctggggatcccttgtagtgaccaaagattttgtctattctcagagcgcca

SEQ ID NO: 398610 - DNA, 55 bp, Artificial
  Synthetic oligonucleotide
gagatcagatgcacctattgatacctgtatttctgaatgcataactccaaatgga

SEQ ID NO: 398611 - DNA, 57 bp, Artificial
  Synthetic oligonucleotide
gagatcagctcatgttcgtagaatacgcgccgccccttcccctggtttctatccccc

SEQ ID NO: 398612 - DNA, 55 bp, Artificial
  Synthetic oligonucleotide
gagatcagtctctcttccgaatgttatattgttcaatggactctccttcgaagaa

SEQ ID NO: 398613 - DNA, 53 bp, Artificial
  Synthetic oligonucleotide
gagatcataaggatgatcaagttgtactgcatgagcattacagtgtgatcagg

SEQ ID NO: 398614 - DNA, 60 bp, Artificial
  Synthetic oligonucleotide
gagatcataaggatgatggaaagtgccagaccagaagatgtgtctttccaggggcgggga

SEQ ID NO: 398615 - DNA, 60 bp, Artificial
  Synthetic oligonucleotide
gagatcatacaacattagaacacttcgcgtagaagaagctctctggttgcgtgagtgtca

SEQ ID NO: 398616 - DNA, 55 bp, Artificial
  Synthetic oligonucleotide
gagatcatcccggttttttcttagttctacccacttctcgaggacatcttccctc

SEQ ID NO: 398617 - DNA, 60 bp, Artificial
  Synthetic oligonucleotide
gagatcatctgaagcgttatgtgagagcaatctccgaccaaactgtcgattatggcctgg

SEQ ID NO: 398618 - DNA, 60 bp, Artificial
  Synthetic oligonucleotide
gagatcatgtggcatgtatggtctcagtgggcctgacatctacaaaggtgtttaccagtt

SEQ ID NO: 398619 - DNA, 60 bp, Artificial
  Synthetic oligonucleotide
gagatcattagctgcggacttaaatgaagtgacatgtgcagggggtacttataatttcca

SEQ ID NO: 398620 - DNA, 60 bp, Artificial
  Synthetic oligonucleotide
gagatccaaatgtccgcacagataattatgtagtcctaatgacctggcccacatagtctt

SEQ ID NO: 398621 - DNA, 55 bp, Artificial
  Synthetic oligonucleotide
gagatccacgtcacaccgtcagggatggacaatcccgacaaccgtggtattgtgg

SEQ ID NO: 398622 - DNA, 60 bp, Artificial
  Synthetic oligonucleotide
gagatccaggatggaaagacctagcgagggaagcgacgaaacgtgcgaatattagagcat

SEQ ID NO: 398623 - DNA, 55 bp, Artificial
  Synthetic oligonucleotide
gagatccagtggagaactcctgccccttgcggtgagaatgggaacccacgccacc

SEQ ID NO: 398624 - DNA, 55 bp, Artificial
  Synthetic oligonucleotide
gagatcccacggggttgagctcccgaaccaccagtgattcttgtagtggctattg

SEQ ID NO: 398625 - DNA, 60 bp, Artificial
  Synthetic oligonucleotide
gagatccctgcgtacgataccgctgttgtagtggagagagtggcaattccttgcataagc

SEQ ID NO: 398626 - DNA, 55 bp, Artificial
  Synthetic oligonucleotide
gagatccgaaaccttaaggtattgggtgacgacagcgcttttcgttccagtgacg

SEQ ID NO: 398627 - DNA, 60 bp, Artificial
  Synthetic oligonucleotide
gagatccgatttgtgagtgaaactctcttcctaccagtttgccaatgccgagtgccaacc

SEQ ID NO: 398628 - DNA, 55 bp, Artificial
  Synthetic oligonucleotide
gagatccggccccttatgtacacgcacaacgctacatacgctattgtggtattga

SEQ ID NO: 398629 - DNA, 59 bp, Artificial
  Synthetic oligonucleotide
gagatccttctaatctgaggaggtatcaactcgtccttactaaatctggtaagcaactg

SEQ ID NO: 398630 - DNA, 60 bp, Artificial
  Synthetic oligonucleotide
gagatcgaaaacattctgcgcagaacaactagtcccgttgttgtgacgaactggcagcct

SEQ ID NO: 398631 - DNA, 56 bp, Artificial
  Synthetic oligonucleotide
gagatcgaaatggtcaatactcgaaatttacgtgctattggtacgtatttgaattg

SEQ ID NO: 398632 - DNA, 55 bp, Artificial
  Synthetic oligonucleotide
gagatcgacaactgggcctctaccaactttggaggagatgttgctaccaggtgtg

SEQ ID NO: 398633 - DNA, 60 bp, Artificial
  Synthetic oligonucleotide
gagatcgataccaagttcttcgtaaatttcaagctaccgtgactggaggtcagtatgcaa

SEQ ID NO: 398634 - DNA, 59 bp, Artificial
  Synthetic oligonucleotide
gagatcgattcatcacgtggttcgggatgttgattatactggttttatatgttatcctt

SEQ ID NO: 398635 - DNA, 55 bp, Artificial
  Synthetic oligonucleotide
gagatcgcaatgctagctcagttctaccacactaaagctagagatcccactcccg

SEQ ID NO: 398636 - DNA, 55 bp, Artificial
  Synthetic oligonucleotide
gagatcgctgttatctcggtacctcacgaagcctctccagtcgagctgacccaag

SEQ ID NO: 398637 - DNA, 55 bp, Artificial
  Synthetic oligonucleotide
gagatcggaattggatgtcagatgactgctttgctgatgacatcctgagcttgcc

SEQ ID NO: 398638 - DNA, 54 bp, Artificial
  Synthetic oligonucleotide
gagatcgtaacatggcctggacagtggtgaacagtatctgcaacaccacagggg

SEQ ID NO: 398639 - DNA, 60 bp, Artificial
  Synthetic oligonucleotide
gagatcgtcagattcgtcctatttctattatagagtgtagaagaagactactccagaatt

SEQ ID NO: 398640 - DNA, 51 bp, Artificial
  Synthetic oligonucleotide
gagatcgtgcaacctcgtctggaggtcaaccccgatgttatctacgcctct

SEQ ID NO: 398641 - DNA, 60 bp, Artificial
  Synthetic oligonucleotide
gagatcgtgcagtaatcacgtatgagggggactctagtgccgggtacaaccatgatgtgt

SEQ ID NO: 398642 - DNA, 56 bp, Artificial
  Synthetic oligonucleotide
gagatcgtgccgattgcatctcctacctacttttcatgagttgaccaacttaccgt

SEQ ID NO: 398643 - DNA, 58 bp, Artificial
  Synthetic oligonucleotide
gagatcgttatccgcaagatgcctacacaaagcctagtacctcctttgacggtatttg

SEQ ID NO: 398644 - DNA, 60 bp, Artificial
  Synthetic oligonucleotide
gagatctaggttatgatgatgaggctgtcagtcttatcgagggcataaatcactcacacc

SEQ ID NO: 398645 - DNA, 54 bp, Artificial
  Synthetic oligonucleotide
gagatctcaaatgcagcgccaaaccatttgtagaacaaatcgcgcgcgatgctc

SEQ ID NO: 398646 - DNA, 60 bp, Artificial
  Synthetic oligonucleotide
gagatctccaacaaacttagcactctcaagatcagtgaacccaagtcggcgatcattaag

SEQ ID NO: 398647 - DNA, 60 bp, Artificial
  Synthetic oligonucleotide
gagatctctctgtagtatattgtaaagaattgtccaatttaagatcagctaagagcgcat

SEQ ID NO: 398648 - DNA, 55 bp, Artificial
  Synthetic oligonucleotide
gagatctctggtgatcagtgcatctctaggggagattagcaggtctgaagatgac

SEQ ID NO: 398649 - DNA, 60 bp, Artificial
  Synthetic oligonucleotide
gagatctctgtgtatgttagcatggcattctggagagaaagaatacgataagtttgtgca

SEQ ID NO: 398650 - DNA, 60 bp, Artificial
  Synthetic oligonucleotide
gagatctgcgacgtagagagaaaggtgaagcgcggactaaggcagtgatgaaaggggatc

SEQ ID NO: 398651 - DNA, 55 bp, Artificial
  Synthetic oligonucleotide
gagatctgcggcgaaaagaaaagagtggggcgcacgctagggccgctgagaaagg

SEQ ID NO: 398652 - DNA, 55 bp, Artificial
  Synthetic oligonucleotide
gagatctgctactatgaccccgaaagccataaggtactttgcgccaggtgtttca

SEQ ID NO: 398653 - DNA, 60 bp, Artificial
  Synthetic oligonucleotide
gagatctgctcatactaatgatataaaagagttagctgcagtggtacaaaaggtggcaac

SEQ ID NO: 398654 - DNA, 60 bp, Artificial
  Synthetic oligonucleotide
gagatctggtcatacaatgccgaactgctagtagcaatggagaatcagcatacaattgac

SEQ ID NO: 398655 - DNA, 55 bp, Artificial
  Synthetic oligonucleotide
gagatcttaccacaccatcataagtttgatgattcgttctttcaaactatggtgg

SEQ ID NO: 398656 - DNA, 55 bp, Artificial
  Synthetic oligonucleotide
gagatcttacgcccctcttccggattttcatgtctcgctcgggcctcccctagct

SEQ ID NO: 398657 - DNA, 60 bp, Artificial
  Synthetic oligonucleotide
gagatcttcagcatatgcagtgatgggtttgtgagagggctacaaacaagagatcagcta

SEQ ID NO: 398658 - DNA, 55 bp, Artificial
  Synthetic oligonucleotide
gagatcttccaaagcactactcaacccaagtttactttgtgataaccagttagac

SEQ ID NO: 398659 - DNA, 57 bp, Artificial
  Synthetic oligonucleotide
gagatcttgggaggagttcctgtttacatacattgaaccgcccccattgtcttggct

SEQ ID NO: 398660 - DNA, 54 bp, Artificial
  Synthetic oligonucleotide
gagatgaaaccccacctctcgtctaagaataaggtgctggacttctgtctagta

SEQ ID NO: 398661 - DNA, 60 bp, Artificial
  Synthetic oligonucleotide
gagatgaaatctccctgatgaacgtgtccgcagccgacgattagcgccccgtccgagctg

SEQ ID NO: 398662 - DNA, 58 bp, Artificial
  Synthetic oligonucleotide
gagatgaaattcgaaacttgtatgagagattttgcaaggaagttcgtattcaagaagg

SEQ ID NO: 398663 - DNA, 60 bp, Artificial
  Synthetic oligonucleotide
gagatgaaccatattctgacatggattcactggagcgcatatgccgtgctgcgtggccaa

SEQ ID NO: 398664 - DNA, 60 bp, Artificial
  Synthetic oligonucleotide
gagatgaagagacgcacgtctctgaaacaaatgagagctttaattcctggtgcccatctc

SEQ ID NO: 398665 - DNA, 55 bp, Artificial
  Synthetic oligonucleotide
gagatgaagcaggggttgcactccgcagagccagggatctatactcggggagtcc

SEQ ID NO: 398666 - DNA, 55 bp, Artificial
  Synthetic oligonucleotide
gagatgaccgaatgtatggaaagaaagtatctctggctttcaagaaggaaggatc

SEQ ID NO: 398667 - DNA, 60 bp, Artificial
  Synthetic oligonucleotide
gagatgacctgactctgtccaggatcacagctgcattagcaggttacacttgccaggcaa

SEQ ID NO: 398668 - DNA, 55 bp, Artificial
  Synthetic oligonucleotide
gagatgacggagcaacaccagaaggcaatgaattatctgcatgagcgagagcgcg

SEQ ID NO: 398669 - DNA, 60 bp, Artificial
  Synthetic oligonucleotide
gagatgactcgtttcatttagtaaggcatttttggagaggagagtgcagacattgttgca

SEQ ID NO: 398670 - DNA, 60 bp, Artificial
  Synthetic oligonucleotide
gagatgagagtctgaatgatctatggcttgaaaatgggaaatatgcaacggatgtatacg

SEQ ID NO: 398671 - DNA, 55 bp, Artificial
  Synthetic oligonucleotide
gagatgagcaatcagatgaggctaaacggttgaaaagactgctaactggacccaa

SEQ ID NO: 398672 - DNA, 55 bp, Artificial
  Synthetic oligonucleotide
gagatgaggtcccagcacaaatcatcgaagtagaacgcagtctccagaaagagct

SEQ ID NO: 398673 - DNA, 51 bp, Artificial
  Synthetic oligonucleotide
gagatgatatggatcctgagttgagaacactagcacagagtctgattgatt

SEQ ID NO: 398674 - DNA, 59 bp, Artificial
  Synthetic oligonucleotide
gagatgatgcttaaatatgcaaaacgtgaacgagaatattcagaattctattctcaggc

SEQ ID NO: 398675 - DNA, 60 bp, Artificial
  Synthetic oligonucleotide
gagatgatgttattgctagttacccacataagattgatccgggtctactggcagaagcag

SEQ ID NO: 398676 - DNA, 60 bp, Artificial
  Synthetic oligonucleotide
gagatgattcgagcggtggtgaatgctttcgagccccagggagcccttgagagactgccc

SEQ ID NO: 398677 - DNA, 55 bp, Artificial
  Synthetic oligonucleotide
gagatgattgagagttgtcaaggagttgtgtatgatgcctgtggtaaaactgtat

SEQ ID NO: 398678 - DNA, 58 bp, Artificial
  Synthetic oligonucleotide
gagatgattgagcatggggatattccttatttacatggtcacggcgctgacagattaa

SEQ ID NO: 398679 - DNA, 60 bp, Artificial
  Synthetic oligonucleotide
gagatgcagaaaccaccctattctgtgcatcagatgctaaggcatatgatacagaagtgc

SEQ ID NO: 398680 - DNA, 60 bp, Artificial
  Synthetic oligonucleotide
gagatgcagagaccaccctattctgtgcatcagatgctaaggcatactctactgaaaaac

SEQ ID NO: 398681 - DNA, 60 bp, Artificial
  Synthetic oligonucleotide
gagatgcctccactaaccggaagatagtggatagtagtaggtgtctgcagatctacgaat

SEQ ID NO: 398682 - DNA, 55 bp, Artificial
  Synthetic oligonucleotide
gagatgcctggtgggaccctgtcctaacaccgattcaccacttcacagagcccgg

SEQ ID NO: 398683 - DNA, 60 bp, Artificial
  Synthetic oligonucleotide
gagatgcgctaataccacgtatcaaacgaagacttacatcgacgaaacaagagcaacatt

SEQ ID NO: 398684 - DNA, 60 bp, Artificial
  Synthetic oligonucleotide
gagatgcggataccattctattttgtgcatctgatgctagaacatatagtactgaaaaac

SEQ ID NO: 398685 - DNA, 55 bp, Artificial
  Synthetic oligonucleotide
gagatgctacaaaaggaatacatagatagacagggcaaaactccactggggttag

SEQ ID NO: 398686 - DNA, 58 bp, Artificial
  Synthetic oligonucleotide
gagatgctcctaccgtgaaatctgaaagttaacgggaggcattatgctagaattttta

SEQ ID NO: 398687 - DNA, 55 bp, Artificial
  Synthetic oligonucleotide
gagatgctgatacttataacgctaattccgataggacgctgtgtgcgcttctgtc

SEQ ID NO: 398688 - DNA, 55 bp, Artificial
  Synthetic oligonucleotide
gagatgctgcagtcgggttgggacgtgggtggtccgcctgatgttgggctagatg

SEQ ID NO: 398689 - DNA, 59 bp, Artificial
  Synthetic oligonucleotide
gagatgctgggaccacatcacaagaaagagaccccttgcgtcgcatgtcagtcttcagg

SEQ ID NO: 398690 - DNA, 55 bp, Artificial
  Synthetic oligonucleotide
gagatgctgtctgacatgattaggagaaggaaccaaattctaaacaggggtggtg

SEQ ID NO: 398691 - DNA, 55 bp, Artificial
  Synthetic oligonucleotide
gagatggaatactggaagcacaccaatcacggaaaggatgctggtaatgagctgg

SEQ ID NO: 398692 - DNA, 55 bp, Artificial
  Synthetic oligonucleotide
gagatggacactatcgcagcaagggcgctcaccgtaatgcgggcatgtgccacct

SEQ ID NO: 398693 - DNA, 55 bp, Artificial
  Synthetic oligonucleotide
gagatggacactatcgctgcaagagcactcactgtgatgcgggcatgtgccacgt

SEQ ID NO: 398694 - DNA, 60 bp, Artificial
  Synthetic oligonucleotide
gagatggagaacaagttacggcacatactacttgttcagttaatggtgtgaataacttca

SEQ ID NO: 398695 - DNA, 55 bp, Artificial
  Synthetic oligonucleotide
gagatggagatccagaaccatacagcctattgtgacaaggtgcgcactccgcttg

SEQ ID NO: 398696 - DNA, 55 bp, Artificial
  Synthetic oligonucleotide
gagatggatacaggcacactaacgagaaatggcgatctcatttacagcccagtgg

SEQ ID NO: 398697 - DNA, 55 bp, Artificial
  Synthetic oligonucleotide
gagatggccaaggactggtggcacgcccaggcggcagctgcgcagtgagcggtca

SEQ ID NO: 398698 - DNA, 60 bp, Artificial
  Synthetic oligonucleotide
gagatggcctgtctgaccactgcaatctcctttgcgcttatcctccgcggctcttccata

SEQ ID NO: 398699 - DNA, 55 bp, Artificial
  Synthetic oligonucleotide
gagatggcggtaccaatgggaacaacaccgagactttcagacctggaggaggaga

SEQ ID NO: 398700 - DNA, 55 bp, Artificial
  Synthetic oligonucleotide
gagatggcgtcatcgccctattcgtgcgaaacgacgtccgcttgcgcagaaggtc

SEQ ID NO: 398701 - DNA, 56 bp, Artificial
  Synthetic oligonucleotide
gagatggctacctacttcctaacaaggagcaactgcttcaaagaatcggaggtaag

SEQ ID NO: 398702 - DNA, 50 bp, Artificial
  Synthetic oligonucleotide
gagatggctggaggacaaaaaaccaaatgtaactctttggcgtactttaa

SEQ ID NO: 398703 - DNA, 56 bp, Artificial
  Synthetic oligonucleotide
gagatgggagtaataaggagaataatactaacagtagtgaaatttttagaccagaa

SEQ ID NO: 398704 - DNA, 55 bp, Artificial
  Synthetic oligonucleotide
gagatggggcacgatgctccttggaatgttgatgatctgtagggctgtagaagac

SEQ ID NO: 398705 - DNA, 60 bp, Artificial
  Synthetic oligonucleotide
gagatggggtatcttgttcttagggatattgatgatctgtagtgctgcagacaaattgtg

SEQ ID NO: 398706 - DNA, 60 bp, Artificial
  Synthetic oligonucleotide
gagatggggtgttctcagccgaccatcagtatactgctgtaatattatggcgtggatggg

SEQ ID NO: 398707 - DNA, 58 bp, Artificial
  Synthetic oligonucleotide
gagatgggtgcgagagcgtcagtattaactgggggaaaattagatgcatgggaaaaaa

SEQ ID NO: 398708 - DNA, 60 bp, Artificial
  Synthetic oligonucleotide
gagatggtaaaagtagtaacagtacagatgaaatcttcagacctggaggaggagatatga

SEQ ID NO: 398709 - DNA, 59 bp, Artificial
  Synthetic oligonucleotide
gagatggtagggtttgatgtcaaaaacaagcactgcctcgaaattgatctgtctaagtt

SEQ ID NO: 398710 - DNA, 60 bp, Artificial
  Synthetic oligonucleotide
gagatggtcttgacgtactgtgatatcatagagggtaggttaatgactgaaactgctatg

SEQ ID NO: 398711 - DNA, 55 bp, Artificial
  Synthetic oligonucleotide
gagatggtggtaacaatgagaccgagaccgagactttcagacctggaggaggaga

SEQ ID NO: 398712 - DNA, 55 bp, Artificial
  Synthetic oligonucleotide
gagatggtggtaaggacacgaacgggactgagatcttcagacctggaggaggaga

SEQ ID NO: 398713 - DNA, 55 bp, Artificial
  Synthetic oligonucleotide
gagatggtggtaataacacaaatgagactgagaccttcagacctggaggaggaga

SEQ ID NO: 398714 - DNA, 55 bp, Artificial
  Synthetic oligonucleotide
gagatggtggtaatcaagagaacaagaccgagatcttcagacctggaggaggaga

SEQ ID NO: 398715 - DNA, 55 bp, Artificial
  Synthetic oligonucleotide
gagatggtggtacaaatgtaactaatgacaccgaggtcttcagacctggaggagg

SEQ ID NO: 398716 - DNA, 55 bp, Artificial
  Synthetic oligonucleotide
gagatggtggtactaatgagaacaataccaccgagatcttcagacctggaggagg

SEQ ID NO: 398717 - DNA, 55 bp, Artificial
  Synthetic oligonucleotide
gagatggtggtagtaaccagagcaataccgagatcttcagacctggaggaggaga

SEQ ID NO: 398718 - DNA, 60 bp, Artificial
  Synthetic oligonucleotide
gagatggtggtataaacaatagtggtacggagaccttcagacctggaggaggagatatga

SEQ ID NO: 398719 - DNA, 55 bp, Artificial
  Synthetic oligonucleotide
gagatggtggtattaacaacagtaccaatgagaccttcagacctggaggaggaga

SEQ ID NO: 398720 - DNA, 55 bp, Artificial
  Synthetic oligonucleotide
gagatggtggtattaatgagaatgggaccgagatcttcagacctggaggaggaga

SEQ ID NO: 398721 - DNA, 55 bp, Artificial
  Synthetic oligonucleotide
gagatggtggtgaaaacaatactgggtccgagaccttcagacctgtaggaggaga

SEQ ID NO: 398722 - DNA, 55 bp, Artificial
  Synthetic oligonucleotide
gagatggtggtgtcaataatagtcagaatgagaccttcagacctggaggaggaga

SEQ ID NO: 398723 - DNA, 55 bp, Artificial
  Synthetic oligonucleotide
gagatggtggttataccagttctggcaatgcgaccttcagacctggcggaggaga

SEQ ID NO: 398724 - DNA, 60 bp, Artificial
  Synthetic oligonucleotide
gagatggtgtcaactccaacatgtcggcttctgaatgcagagttggaatggccaaagttt

SEQ ID NO: 398725 - DNA, 55 bp, Artificial
  Synthetic oligonucleotide
gagatggttcatgcgtgccgctcaagcagtaactgcggtagtgtgtggtccggat

SEQ ID NO: 398726 - DNA, 56 bp, Artificial
  Synthetic oligonucleotide
gagatggttgggaagtgtaatatacctaggaggcttgggtattggtactgggagag

SEQ ID NO: 398727 - DNA, 55 bp, Artificial
  Synthetic oligonucleotide
gagatggttgtttatacggtacaaaatataaaaccagaactgtacccatggtcca

SEQ ID NO: 398728 - DNA, 55 bp, Artificial
  Synthetic oligonucleotide
gagatgtaaagacggagtttctgcatttgatcgatcacctctaaagggtccaggg

SEQ ID NO: 398729 - DNA, 58 bp, Artificial
  Synthetic oligonucleotide
gagatgtacggtaaggccctcaatgctatgaggagctactccggacagagtccgattc

SEQ ID NO: 398730 - DNA, 57 bp, Artificial
  Synthetic oligonucleotide
gagatgtattaatagtatggggagttcaccaccctgcaactctaaaggaacaccaag

SEQ ID NO: 398731 - DNA, 58 bp, Artificial
  Synthetic oligonucleotide
gagatgtcaatgggatcgcaaatgctaaggtattatgatgccgcattaattatgtaca

SEQ ID NO: 398732 - DNA, 59 bp, Artificial
  Synthetic oligonucleotide
gagatgtccaccagcacattaaattggaccattttccctccattgaagaagtccgacaa

SEQ ID NO: 398733 - DNA, 60 bp, Artificial
  Synthetic oligonucleotide
gagatgtccagtccctctcttaagtggtgcttcactctgaattactcctccgcggcagag

SEQ ID NO: 398734 - DNA, 51 bp, Artificial
  Synthetic oligonucleotide
gagatgtctagtaaaatgattgaatgatcgaaatatggtatataatctgat

SEQ ID NO: 398735 - DNA, 55 bp, Artificial
  Synthetic oligonucleotide
gagatgtgaattgcattaaacgcatgtcacgaatattgtccattaggacctccaa

SEQ ID NO: 398736 - DNA, 50 bp, Artificial
  Synthetic oligonucleotide
gagatgtgatgacaaaaatttcaatggtacaggactttgtaccaatgtgt

SEQ ID NO: 398737 - DNA, 60 bp, Artificial
  Synthetic oligonucleotide
gagatgtgcactacccataatcatgcattacacaggccaacatttcggccaggagcatat

SEQ ID NO: 398738 - DNA, 52 bp, Artificial
  Synthetic oligonucleotide
gagatgtggtttatttcctaccatataaacctatcttccgtatttgatggtg

SEQ ID NO: 398739 - DNA, 50 bp, Artificial
  Synthetic oligonucleotide
gagatgttagaagttgccccgttaattgaatctgtttatgcgtcggagtt

SEQ ID NO: 398740 - DNA, 60 bp, Artificial
  Synthetic oligonucleotide
gagatgttcacattctatcctacactgcaggtgacaatgacctcagtagcgcatgtttaa

SEQ ID NO: 398741 - DNA, 60 bp, Artificial
  Synthetic oligonucleotide
gagatgttgctctagacatagggactccagatcgatataccgtctcagttataacattac

SEQ ID NO: 398742 - DNA, 54 bp, Artificial
  Synthetic oligonucleotide
gagatgttgtgtaattgtatatcatcagatcccgatatagtccctatggcccac

SEQ ID NO: 398743 - DNA, 56 bp, Artificial
  Synthetic oligonucleotide
gagatgtttaaggatagattaatagttagtaataagtacgagcctcttatggcccc

SEQ ID NO: 398744 - DNA, 60 bp, Artificial
  Synthetic oligonucleotide
gagatgtttcattccaggatctaagtgataacccatgtaaggtagaccttcatacacagt

SEQ ID NO: 398745 - DNA, 59 bp, Artificial
  Synthetic oligonucleotide
gagattaaacgcaactggctccaaggtaatttcaattacactagtagttatgtgcatag

SEQ ID NO: 398746 - DNA, 56 bp, Artificial
  Synthetic oligonucleotide
gagattaaatgtacaagacctggcaataatacaagaaagagtgtgagaataggacc

SEQ ID NO: 398747 - DNA, 60 bp, Artificial
  Synthetic oligonucleotide
gagattaacagacatgataaaagatcaggattgttccatgttggtgagattgactttcaa

SEQ ID NO: 398748 - DNA, 55 bp, Artificial
  Synthetic oligonucleotide
gagattaactggtgagggacccaccttcgacgctaacacagagtgcaacatcgct

SEQ ID NO: 398749 - DNA, 60 bp, Artificial
  Synthetic oligonucleotide
gagattaccagcagagtctacatcaaatccattacggtcccaagcagtaataactgtagg

SEQ ID NO: 398750 - DNA, 60 bp, Artificial
  Synthetic oligonucleotide
gagattaccggaagggcctccttgctctcagcggtcgaaatttctgctgatggatgctct

SEQ ID NO: 398751 - DNA, 59 bp, Artificial
  Synthetic oligonucleotide
gagattacgtgtataacatgtatcgcttcctgagcataggtggatatccccactgcggc

SEQ ID NO: 398752 - DNA, 60 bp, Artificial
  Synthetic oligonucleotide
gagattagagctttacagcgtttcttatgatatagacgcttacctgtattgttatcggga

SEQ ID NO: 398753 - DNA, 58 bp, Artificial
  Synthetic oligonucleotide
gagattagggtaggtagggcaataccaagattctctacaacagccttcatcatagttt

SEQ ID NO: 398754 - DNA, 58 bp, Artificial
  Synthetic oligonucleotide
gagattatagagcagatggggtcgtatccttatctttctggatttattaacgaataag

SEQ ID NO: 398755 - DNA, 55 bp, Artificial
  Synthetic oligonucleotide
gagattatagtggtatttctactttgatctgccaactcacgaattcttcagatgg

SEQ ID NO: 398756 - DNA, 55 bp, Artificial
  Synthetic oligonucleotide
gagattatctatacaaactctccggtgcatcacggaagataggagtgagggtaca

SEQ ID NO: 398757 - DNA, 56 bp, Artificial
  Synthetic oligonucleotide
gagattatgaaattgaagtacaaagtcctttgggactaattccctaatgacattaa

SEQ ID NO: 398758 - DNA, 60 bp, Artificial
  Synthetic oligonucleotide
gagattattcaagcacaccaaaacttcatggaatcacagtttgggtcctggacgcagatg

SEQ ID NO: 398759 - DNA, 53 bp, Artificial
  Synthetic oligonucleotide
gagattattcggatagacgtcccactactgctgacgaaggcgtacatttgttc

SEQ ID NO: 398760 - DNA, 58 bp, Artificial
  Synthetic oligonucleotide
gagattatttacatactctttggaaggctggtattctatataagagagaaaccacacg

SEQ ID NO: 398761 - DNA, 55 bp, Artificial
  Synthetic oligonucleotide
gagattcaaaagaagtacggctggtcatactcaacatggcgtagaagacgtgagg

SEQ ID NO: 398762 - DNA, 52 bp, Artificial
  Synthetic oligonucleotide
gagattcagatttcgtgtggactttcactgcccacagtatgaacaggacact

SEQ ID NO: 398763 - DNA, 60 bp, Artificial
  Synthetic oligonucleotide
gagattcatcagagagttagggaccttgcacctggaacggtatcagcattagaatgcata

SEQ ID NO: 398764 - DNA, 58 bp, Artificial
  Synthetic oligonucleotide
gagattcatggtaaagacctggtttacatgcctgatggagtgaggtcagaaagttaca

SEQ ID NO: 398765 - DNA, 60 bp, Artificial
  Synthetic oligonucleotide
gagattccagcattcctcgctaaagcacttgcgctccctgctatagcgacaatggagcgc

SEQ ID NO: 398766 - DNA, 58 bp, Artificial
  Synthetic oligonucleotide
gagattcctcggtctcttagataccggggcagacaaaacttgcatagcaggtaaggat

SEQ ID NO: 398767 - DNA, 56 bp, Artificial
  Synthetic oligonucleotide
gagattcctgttggattacaagtagtacgtcatatgattaccagatctgtatatca

SEQ ID NO: 398768 - DNA, 55 bp, Artificial
  Synthetic oligonucleotide
gagattcgatggtttgtcatcgcatcctaacgtacggcaaatattttgagacgtt

SEQ ID NO: 398769 - DNA, 53 bp, Artificial
  Synthetic oligonucleotide
gagattcgggatttaatcttaccgcacgggcttagacggttagcggttctact

SEQ ID NO: 398770 - DNA, 55 bp, Artificial
  Synthetic oligonucleotide
gagattcggtaaacatgctggtcagaggtttacgacggggagtcgaaaacacctg

SEQ ID NO: 398771 - DNA, 60 bp, Artificial
  Synthetic oligonucleotide
gagattcttcatttcatacattaatggtaactctctagcatccagcaactttgttaatgt

SEQ ID NO: 398772 - DNA, 60 bp, Artificial
  Synthetic oligonucleotide
gagattgaaatgttggagcgtgttctatctgctcccgtaatcgatgctgagtcccctggg

SEQ ID NO: 398773 - DNA, 58 bp, Artificial
  Synthetic oligonucleotide
gagattgacgcctttactagataaaactttgctttcaattgcgagtgtagcacgaaaa

SEQ ID NO: 398774 - DNA, 52 bp, Artificial
  Synthetic oligonucleotide
gagattgactggagaggggccaacatttgacgccaacactgaatgcaacatc

SEQ ID NO: 398775 - DNA, 60 bp, Artificial
  Synthetic oligonucleotide
gagattgagagatctgcggcgaaaagagaagaatgggacgcatgctaaagccgttgagag

SEQ ID NO: 398776 - DNA, 54 bp, Artificial
  Synthetic oligonucleotide
gagattgaggaagcaatcttagctgaaccttggtttaaaactcacctacccctt

SEQ ID NO: 398777 - DNA, 60 bp, Artificial
  Synthetic oligonucleotide
gagattgagtccgtaaataatgctgtggtaatgccagctcatggtccagccaagagcatg

SEQ ID NO: 398778 - DNA, 55 bp, Artificial
  Synthetic oligonucleotide
gagattgagttttagatggattctattacaattaccgtagggaacttaaccattc

SEQ ID NO: 398779 - DNA, 60 bp, Artificial
  Synthetic oligonucleotide
gagattgatacactgcacgacttatcatgcaaattccttcccctttatgccagtgaagct

SEQ ID NO: 398780 - DNA, 60 bp, Artificial
  Synthetic oligonucleotide
gagattgatcaaagagagaaatctgatcatcactagaggtataagcatctatcgtaccac

SEQ ID NO: 398781 - DNA, 53 bp, Artificial
  Synthetic oligonucleotide
gagattgcatatacactgtgtcaggcgtcagccaataggccatgggagcatga

SEQ ID NO: 398782 - DNA, 60 bp, Artificial
  Synthetic oligonucleotide
gagattgccagcgattaatggcatgtcgcttaaagtctgtaaacatagcttcatcactgt

SEQ ID NO: 398783 - DNA, 60 bp, Artificial
  Synthetic oligonucleotide
gagattgcgaggatgagtggagagacaggaacgtggggaccagatcgccaaccattcggc

SEQ ID NO: 398784 - DNA, 55 bp, Artificial
  Synthetic oligonucleotide
gagattgcggggatgaccgcagatgtgttagaggcggcatcggaggaggtccctc

SEQ ID NO: 398785 - DNA, 60 bp, Artificial
  Synthetic oligonucleotide
gagattgctattgagcccagaagagatgttaagtttgtaaatgcaggcccaactgatcta

SEQ ID NO: 398786 - DNA, 50 bp, Artificial
  Synthetic oligonucleotide
gagattgctggtatcccgggggggttccccctgtcccccccctatatggg

SEQ ID NO: 398787 - DNA, 55 bp, Artificial
  Synthetic oligonucleotide
gagattggaaccgcagattactcattggatgtttacgactttgttttacgacttt

SEQ ID NO: 398788 - DNA, 55 bp, Artificial
  Synthetic oligonucleotide
gagattggagcggatgttatgattctgaaggacataatcttttggctgttcctcc

SEQ ID NO: 398789 - DNA, 56 bp, Artificial
  Synthetic oligonucleotide
gagattggcatcacaccagggattacccacgatgttaacacccggtagtaaccagt

SEQ ID NO: 398790 - DNA, 56 bp, Artificial
  Synthetic oligonucleotide
gagattggcctttctggagttagatttgcctgaaggagctcttaggtacgggcccc

SEQ ID NO: 398791 - DNA, 57 bp, Artificial
  Synthetic oligonucleotide
gagattggggctcacccaagatctattaatgacaaccccaatgttttgcaccggtgt

SEQ ID NO: 398792 - DNA, 60 bp, Artificial
  Synthetic oligonucleotide
gagattgtggcacaccctattttgactcatgccgtcggttggttggtttacatgcagcca

SEQ ID NO: 398793 - DNA, 55 bp, Artificial
  Synthetic oligonucleotide
gagattgtgtgtcctagctgtgctggcagagcatagctgcaatggaccctgaagg

SEQ ID NO: 398794 - DNA, 60 bp, Artificial
  Synthetic oligonucleotide
gagattgtgtgtgagagacctaacaataatacaagaacaagtgtgaggataggaccagga

SEQ ID NO: 398795 - DNA, 60 bp, Artificial
  Synthetic oligonucleotide
gagattgttgattgacttaccccgattgcttcagacaattctacttgagtaatgttgttc

SEQ ID NO: 398796 - DNA, 59 bp, Artificial
  Synthetic oligonucleotide
gagattgtttctactcagcgaagccgaggatttacttgacgaatctcctgtggacttgg

SEQ ID NO: 398797 - DNA, 50 bp, Artificial
  Synthetic oligonucleotide
gagatttaagggtgacttttaactttggcatagattgtgcacgtttagaa

SEQ ID NO: 398798 - DNA, 57 bp, Artificial
  Synthetic oligonucleotide
gagatttacaatgaaactgtaaggctggaaactataacaattcctatcaacaacacc

SEQ ID NO: 398799 - DNA, 55 bp, Artificial
  Synthetic oligonucleotide
gagatttaccttacaaaactcctcaagacaccaagtccgcaatccacgcggcttg

SEQ ID NO: 398800 - DNA, 57 bp, Artificial
  Synthetic oligonucleotide
gagatttacggcaagttccgtgaagcaaactccgaggagtatgacgaaagtctgaaa

SEQ ID NO: 398801 - DNA, 60 bp, Artificial
  Synthetic oligonucleotide
gagatttatagaatgatgaatgctggatttacatgcaaaggtccatcaatagtagaatgt

SEQ ID NO: 398802 - DNA, 55 bp, Artificial
  Synthetic oligonucleotide
gagatttcaaacaactccacccagtgggttttgattctcattgctacgtttttga

SEQ ID NO: 398803 - DNA, 59 bp, Artificial
  Synthetic oligonucleotide
gagatttcatccctatggggggacaccggcaagacggaggctgaacttcgagacagcta

SEQ ID NO: 398804 - DNA, 60 bp, Artificial
  Synthetic oligonucleotide
gagatttcctgtggatcgagtgtttgaatggatccctcaaatcgaattgggagctaacga

SEQ ID NO: 398805 - DNA, 55 bp, Artificial
  Synthetic oligonucleotide
gagatttgacagcagcctagcatttcatcacagagccaaagagctgcatccggag

SEQ ID NO: 398806 - DNA, 55 bp, Artificial
  Synthetic oligonucleotide
gagatttgacagtagactggcatttacacacaaagctcgagagctgtatccggag

SEQ ID NO: 398807 - DNA, 55 bp, Artificial
  Synthetic oligonucleotide
gagatttgacagtctcctggcattcaaacacacagctcgagagctgcatccggag

SEQ ID NO: 398808 - DNA, 58 bp, Artificial
  Synthetic oligonucleotide
gagatttgccccgaagcagtggaatatagaaattggtcaaaaccgcagtgtcaaatta

SEQ ID NO: 398809 - DNA, 55 bp, Artificial
  Synthetic oligonucleotide
gagatttgctagatgctatcgagttagcatggaatgcatctgacgttaataccgc

SEQ ID NO: 398810 - DNA, 55 bp, Artificial
  Synthetic oligonucleotide
gagatttgtcctaaagcagtagactacaggaattggtcaaaaccgcaatgtcaga

SEQ ID NO: 398811 - DNA, 54 bp, Artificial
  Synthetic oligonucleotide
gagattttatcctctggggagtaactgaggtgataccccacccgggatacaatt

SEQ ID NO: 398812 - DNA, 56 bp, Artificial
  Synthetic oligonucleotide
gagattttcctgcaaacttacaaaagtacgtcttgtggttctacgtgcagaaagac

SEQ ID NO: 398813 - DNA, 55 bp, Artificial
  Synthetic oligonucleotide
gagattttcgtgaggcaatatcagccatgcagttctgggaagctgactacagtgg

SEQ ID NO: 398814 - DNA, 60 bp, Artificial
  Synthetic oligonucleotide
gagattttggacatgtgagcaacgaaaatgtcatgcatggtggtgggatgaccaccttga

SEQ ID NO: 398815 - DNA, 52 bp, Artificial
  Synthetic oligonucleotide
gagcaaaacatggacagggacgtccaagggatggtggtggaaattaccagat

SEQ ID NO: 398816 - DNA, 55 bp, Artificial
  Synthetic oligonucleotide
gagcaaacaccgtattgaaccagtatgtatgctcattcatgggtcaccagggacg

SEQ ID NO: 398817 - DNA, 60 bp, Artificial
  Synthetic oligonucleotide
gagcaaaccttcaggatgctaaagatactacagaggagagtggaacagtcagaaaggatg

SEQ ID NO: 398818 - DNA, 59 bp, Artificial
  Synthetic oligonucleotide
gagcaaacgctatgaactcgagattggaaccaggataggtgacggacaaaggagttgga

SEQ ID NO: 398819 - DNA, 59 bp, Artificial
  Synthetic oligonucleotide
gagcaaacggaaagattgagagatctgcggcgaaaagaaaagagtggggcgcacgctag

SEQ ID NO: 398820 - DNA, 60 bp, Artificial
  Synthetic oligonucleotide
gagcaaacggaactcactaaaagtgtcgtgctcacactgaagtcccaccccatgaccata

SEQ ID NO: 398821 - DNA, 54 bp, Artificial
  Synthetic oligonucleotide
gagcaaacggctactggtaaagacatatcaaaaccgttaatggctgatgctttg

SEQ ID NO: 398822 - DNA, 59 bp, Artificial
  Synthetic oligonucleotide
gagcaaacgtacttcatttcgatgaagcgctaatggctcatgcaggaactgtttatttt

SEQ ID NO: 398823 - DNA, 55 bp, Artificial
  Synthetic oligonucleotide
gagcaaactgtggattggttcaggctttcttatcgagtgctgtacttacaggagg

SEQ ID NO: 398824 - DNA, 60 bp, Artificial
  Synthetic oligonucleotide
gagcaaagcccgtacaccatggagagcactgcccgtatatacataaaaccgaagcatgtt

SEQ ID NO: 398825 - DNA, 60 bp, Artificial
  Synthetic oligonucleotide
gagcaaatacaatcctgctgacggcccatccaggcacaaaccgcctgattggacggctgt

SEQ ID NO: 398826 - DNA, 58 bp, Artificial
  Synthetic oligonucleotide
gagcaaatacttgtgttcaaagatcctaactgacacaagtcggcctaatgaccccgga

SEQ ID NO: 398827 - DNA, 60 bp, Artificial
  Synthetic oligonucleotide
gagcaaatcgggcagcttggtgcttctgaaggtgacaagctggtagttgagagtgctgat

SEQ ID NO: 398828 - DNA, 58 bp, Artificial
  Synthetic oligonucleotide
gagcaaatgacactttgtgtaccctattattctgaggttccattaagatgtgttaaag

SEQ ID NO: 398829 - DNA, 60 bp, Artificial
  Synthetic oligonucleotide
gagcaaatgcagcgcaagttagtctagatatagttcataggcgcgacgacaaagagttct

SEQ ID NO: 398830 - DNA, 60 bp, Artificial
  Synthetic oligonucleotide
gagcaaatgggtgtgattatgaatggttttatggtttggtgtatcgacaatggtacatct

SEQ ID NO: 398831 - DNA, 60 bp, Artificial
  Synthetic oligonucleotide
gagcaaatggtacccttggagtccatgcacgattagaaatatagtggatgattgggcaca

SEQ ID NO: 398832 - DNA, 60 bp, Artificial
  Synthetic oligonucleotide
gagcaacaacagtactgcaacactgtgcttagggcatcatgcggtaccgaacgggacaat

SEQ ID NO: 398833 - DNA, 57 bp, Artificial
  Synthetic oligonucleotide
gagcaacaagcacgtctatttaagaacacaacatcaacgataatgaactgaatatcg

SEQ ID NO: 398834 - DNA, 55 bp, Artificial
  Synthetic oligonucleotide
gagcaacacaaggtaggagcggaatcggatttctttgctggggttcagaatcacc

SEQ ID NO: 398835 - DNA, 53 bp, Artificial
  Synthetic oligonucleotide
gagcaacagatcaaatttgtgtgtcagcgagttgatttagatatcactgtgta

SEQ ID NO: 398836 - DNA, 60 bp, Artificial
  Synthetic oligonucleotide
gagcaaccatcagctccaatctgtgagtgtaaactccaaaatcggagctataattgtagc

SEQ ID NO: 398837 - DNA, 55 bp, Artificial
  Synthetic oligonucleotide
gagcaaccattgagtggcggttacctcctcgaaacaagtaggattaccacacgtg

SEQ ID NO: 398838 - DNA, 55 bp, Artificial
  Synthetic oligonucleotide
gagcaaccgcaaggaagatctatcctacgcctgcgaactggtctcttcttggcta

SEQ ID NO: 398839 - DNA, 59 bp, Artificial
  Synthetic oligonucleotide
gagcaaccgcagtccaggtcaattcgtctacgacgaattactttcttcgagtgccgatg

SEQ ID NO: 398840 - DNA, 60 bp, Artificial
  Synthetic oligonucleotide
gagcaacgttgacgtgctcactactcatgaagcacaagggaaaacgcgtgacaatgttat

SEQ ID NO: 398841 - DNA, 60 bp, Artificial
  Synthetic oligonucleotide
gagcaactactccaattcttgggaaaatgccggctgtgttctctggcatgttgactggaa

SEQ ID NO: 398842 - DNA, 60 bp, Artificial
  Synthetic oligonucleotide
gagcaactggtgcttacccatacttgcgcctacaccactgagtggccggaacctaagaga

SEQ ID NO: 398843 - DNA, 55 bp, Artificial
  Synthetic oligonucleotide
gagcaacttccaccgggtcctctggcctcccttctatgtccatccacgtcttggc

SEQ ID NO: 398844 - DNA, 57 bp, Artificial
  Synthetic oligonucleotide
gagcaactttagtcattaaagtgcaagtgaattcccaacctttccagcaaggacgat

SEQ ID NO: 398845 - DNA, 60 bp, Artificial
  Synthetic oligonucleotide
gagcaagaatcatcgatacaaggatatgacatgaccaaagcttgttttaagggagacaga

SEQ ID NO: 398846 - DNA, 53 bp, Artificial
  Synthetic oligonucleotide
gagcaagaatgcgcccaattacgttgtaccctcagagattgcagttggggcca

SEQ ID NO: 398847 - DNA, 60 bp, Artificial
  Synthetic oligonucleotide
gagcaagacatgtcccgcccttcacgtgagctgtcctggtgagtagacaacccacacctc

SEQ ID NO: 398848 - DNA, 60 bp, Artificial
  Synthetic oligonucleotide
gagcaagaccagctgccgcagcacagggtttaccagtttatgttacaccaggatctggac

SEQ ID NO: 398849 - DNA, 55 bp, Artificial
  Synthetic oligonucleotide
gagcaagactctccatgcacaactcgggtttaagaagaccttatgttacccactg

SEQ ID NO: 398850 - DNA, 60 bp, Artificial
  Synthetic oligonucleotide
gagcaagagagcacacaagtgtatgatgatggtgcacctcaatgtggaatttcttgctgg

SEQ ID NO: 398851 - DNA, 59 bp, Artificial
  Synthetic oligonucleotide
gagcaagaggctcctggtccactagggacgtttgtgcaagtaggcacgtcagggtaaga

SEQ ID NO: 398852 - DNA, 55 bp, Artificial
  Synthetic oligonucleotide
gagcaagagtgtctgaagattacaaaacaacctggaagtgctcatgttatcaaga

SEQ ID NO: 398853 - DNA, 60 bp, Artificial
  Synthetic oligonucleotide
gagcaagatatgagacttcagataggatgaagttgcatagagcttcaggattatgtcctg

SEQ ID NO: 398854 - DNA, 57 bp, Artificial
  Synthetic oligonucleotide
gagcaagattacttgcaagcttgtcgtgcatggttagcttatgctttggaccaatat

SEQ ID NO: 398855 - DNA, 60 bp, Artificial
  Synthetic oligonucleotide
gagcaagattccagtcatgcttgacggtcacctcattgctttcgactacagtggatatga

SEQ ID NO: 398856 - DNA, 55 bp, Artificial
  Synthetic oligonucleotide
gagcaagcactcctgtctccccggtgcggttgtataaactgttcccacggttgaa

SEQ ID NO: 398857 - DNA, 58 bp, Artificial
  Synthetic oligonucleotide
gagcaagcaggggtttcaataacttaactaaagggctctgtactataaattcatggca

SEQ ID NO: 398858 - DNA, 55 bp, Artificial
  Synthetic oligonucleotide
gagcaagcatgtcatgtcgaataggttgacggtctcagcgaaaacgaacggaaac

SEQ ID NO: 398859 - DNA, 55 bp, Artificial
  Synthetic oligonucleotide
gagcaagcctgtaagaccgtggattccaatgattgtctagtcaccacatctacca

SEQ ID NO: 398860 - DNA, 60 bp, Artificial
  Synthetic oligonucleotide
gagcaagcggtcacaaaccagtggctagcatgtcgtaatgcgcaagtctgtggcggaacc

SEQ ID NO: 398861 - DNA, 55 bp, Artificial
  Synthetic oligonucleotide
gagcaagcttttcagtagattgattcgacatctgatttcttttactaacgctgct

SEQ ID NO: 398862 - DNA, 60 bp, Artificial
  Synthetic oligonucleotide
gagcaaggacaaactttatggagtaaaatgaatgacgccggatcagaccgagtgatggta

SEQ ID NO: 398863 - DNA, 55 bp, Artificial
  Synthetic oligonucleotide
gagcaaggagaggaaggaatggaaccagtagaccctagactagagccctggaagc

SEQ ID NO: 398864 - DNA, 60 bp, Artificial
  Synthetic oligonucleotide
gagcaaggataaatagccatggaaacctagctgtgatgccttctttgaaagatagatttt

SEQ ID NO: 398865 - DNA, 55 bp, Artificial
  Synthetic oligonucleotide
gagcaaggcctaccgttactacctcctttgaggaatgcttatgcgcctcggggtt

SEQ ID NO: 398866 - DNA, 55 bp, Artificial
  Synthetic oligonucleotide
gagcaagggctacagcatgggacgttgctcatcaaaacctcgcaaagccatgggc

SEQ ID NO: 398867 - DNA, 55 bp, Artificial
  Synthetic oligonucleotide
gagcaagggtgtctgaagaaggatatttatcctgtagcaaaacctataagtgccc

SEQ ID NO: 398868 - DNA, 54 bp, Artificial
  Synthetic oligonucleotide
gagcaagggtttgtgggtcagccccaccgagtttgttacgttcggcgagccgga

SEQ ID NO: 398869 - DNA, 55 bp, Artificial
  Synthetic oligonucleotide
gagcaagtatatattatgatgacggctaatgatgatgtagaggcgccaagtgact

SEQ ID NO: 398870 - DNA, 55 bp, Artificial
  Synthetic oligonucleotide
gagcaagtcaatcaaactcggagcttagtgttattcaaaacagaggctggttttg

SEQ ID NO: 398871 - DNA, 55 bp, Artificial
  Synthetic oligonucleotide
gagcaagtgctaagacagtataacctcctaaaagaagtggaacggtacgataaag

SEQ ID NO: 398872 - DNA, 60 bp, Artificial
  Synthetic oligonucleotide
gagcaagttatattgcactttgccagaaaacatggcataaggcgcttgggaatgacatat

SEQ ID NO: 398873 - DNA, 55 bp, Artificial
  Synthetic oligonucleotide
gagcaagttcaaggcgtgcgacatatggtgttgttcaagacggagtctgggtttg

SEQ ID NO: 398874 - DNA, 60 bp, Artificial
  Synthetic oligonucleotide
gagcaataaacgttcaatctactttcaaacctactgtgtcaactgcaaacatagcactta

SEQ ID NO: 398875 - DNA, 60 bp, Artificial
  Synthetic oligonucleotide
gagcaataaatgtccagtcaacctttaaaccaacagtatcgactgcgaacatagcactca

SEQ ID NO: 398876 - DNA, 58 bp, Artificial
  Synthetic oligonucleotide
gagcaataagccaccccaggagtggtacaaggaggactgtgacccgaagccactgttc

SEQ ID NO: 398877 - DNA, 56 bp, Artificial
  Synthetic oligonucleotide
gagcaataagccccccgagacctggtacaaggaggactgtgacccgaagccactgt

SEQ ID NO: 398878 - DNA, 60 bp, Artificial
  Synthetic oligonucleotide
gagcaatagctggtttcatagagggcggatggcaaggaatgattgatggctggtatgggt

SEQ ID NO: 398879 - DNA, 58 bp, Artificial
  Synthetic oligonucleotide
gagcaatatgggggtttaccaaatacttgctatatatgctacggtggcaggttccttg

SEQ ID NO: 398880 - DNA, 60 bp, Artificial
  Synthetic oligonucleotide
gagcaatatgggggtttatcaaatccttgccatctatgctacagtagcaggttccctgtc

SEQ ID NO: 398881 - DNA, 55 bp, Artificial
  Synthetic oligonucleotide
gagcaatcaactgaatatgggtcggaccatacctcactataggacagaaggccac

SEQ ID NO: 398882 - DNA, 60 bp, Artificial
  Synthetic oligonucleotide
gagcaatcaatgtagacatctttactgttagtcatactaagatagataacatctttggcc

SEQ ID NO: 398883 - DNA, 51 bp, Artificial
  Synthetic oligonucleotide
gagcaatcaccaaatattctcccagagtacagccccactaagttaatgcac

SEQ ID NO: 398884 - DNA, 55 bp, Artificial
  Synthetic oligonucleotide
gagcaatgcatcaggcaataaaccttccagtttggtttgaggtggttggcctgct

SEQ ID NO: 398885 - DNA, 55 bp, Artificial
  Synthetic oligonucleotide
gagcaatggcggttaagtgacctaacatttagcatgtacatgtgtccacctaggg

SEQ ID NO: 398886 - DNA, 55 bp, Artificial
  Synthetic oligonucleotide
gagcaatggctagtgagtttaatttgccacctgtagtagcaagggaagtagtagc

SEQ ID NO: 398887 - DNA, 57 bp, Artificial
  Synthetic oligonucleotide
gagcaatgttggctcttactcaccatatgattgttcaattcgccgcagcctccgtag

SEQ ID NO: 398888 - DNA, 59 bp, Artificial
  Synthetic oligonucleotide
gagcaattacatgtagatcaaacattacagggatattattaacaagagatggtgggaat

SEQ ID NO: 398889 - DNA, 60 bp, Artificial
  Synthetic oligonucleotide
gagcaattcatagattatgctaagagtttggatgttctaagagtttagtgtcctcttagg

SEQ ID NO: 398890 - DNA, 55 bp, Artificial
  Synthetic oligonucleotide
gagcaattcgcagattacatccccaaaagatatgcggttagcgaatccaacagct

SEQ ID NO: 398891 - DNA, 55 bp, Artificial
  Synthetic oligonucleotide
gagcaattgaaataggaaataggcaagaagcgaatggtgctacacatgccttaag

SEQ ID NO: 398892 - DNA, 60 bp, Artificial
  Synthetic oligonucleotide
gagcaattgcaacacccgggatgcaaatcagaggattcgtgtattttgtcgaaacactag

SEQ ID NO: 398893 - DNA, 55 bp, Artificial
  Synthetic oligonucleotide
gagcaattgcagctcccgttagcattaccaagcgtgtgcgaggaatgaggccttc

SEQ ID NO: 398894 - DNA, 59 bp, Artificial
  Synthetic oligonucleotide
gagcaattgccaccccaggaatgcaaatacggggattcgtatatttcgttgagacacta

SEQ ID NO: 398895 - DNA, 58 bp, Artificial
  Synthetic oligonucleotide
gagcaattggaacgtatgtatatttgtgactgtaacgatttaaacgactcaatggatc

SEQ ID NO: 398896 - DNA, 59 bp, Artificial
  Synthetic oligonucleotide
gagcacaaatagggtcgcgctcactatgggagcagtggttgcacttctttggggagtgt

SEQ ID NO: 398897 - DNA, 60 bp, Artificial
  Synthetic oligonucleotide
gagcacaacatgcttatgcgctgtactgtgcatttgggagctcgtcgtggcatgttttct

SEQ ID NO: 398898 - DNA, 55 bp, Artificial
  Synthetic oligonucleotide
gagcacaactaagacggccttagggttttacgacgtaggctgcgtatcccatgcc

SEQ ID NO: 398899 - DNA, 55 bp, Artificial
  Synthetic oligonucleotide
gagcacaactccgagaacttgaaggaagaatccttaaacagatccttgatagagg

SEQ ID NO: 398900 - DNA, 52 bp, Artificial
  Synthetic oligonucleotide
gagcacaagtaaaccgtgttgtggatgccactctgacaggacgtatgagttt

SEQ ID NO: 398901 - DNA, 55 bp, Artificial
  Synthetic oligonucleotide
gagcacaagtctcataagtaactgtacagtgcaacaagctcgcaccatggcactc

SEQ ID NO: 398902 - DNA, 60 bp, Artificial
  Synthetic oligonucleotide
gagcacaattctgaacactgcaattcccataggctcatgtgtcagcaagtgtcacacaga

SEQ ID NO: 398903 - DNA, 55 bp, Artificial
  Synthetic oligonucleotide
gagcacacaaggcctcaatcctcactacaaacaaaagctaacaaaagatggggcc

SEQ ID NO: 398904 - DNA, 55 bp, Artificial
  Synthetic oligonucleotide
gagcacacatgtgaaacggatcttgatgttgaggagtgtggtgaggtcgcagcct

SEQ ID NO: 398905 - DNA, 55 bp, Artificial
  Synthetic oligonucleotide
gagcacacttgctactggtaaagcccaaggaataaggtctgcgcttttcaactcc

SEQ ID NO: 398906 - DNA, 60 bp, Artificial
  Synthetic oligonucleotide
gagcacagagagagtggtggtgagcattgaccgctttctaagggttcgggatcaacgagg

SEQ ID NO: 398907 - DNA, 60 bp, Artificial
  Synthetic oligonucleotide
gagcacagccgaagatccactgccgacaacatgaccttggcacactccggttcaaataag

SEQ ID NO: 398908 - DNA, 55 bp, Artificial
  Synthetic oligonucleotide
gagcacagtgccttccgtgccccaaagtctcagttatatctaagagaagcttaac

SEQ ID NO: 398909 - DNA, 55 bp, Artificial
  Synthetic oligonucleotide
gagcacagtggtctactactggtgcagcacatacaggtggaagtacaacgtttgt

SEQ ID NO: 398910 - DNA, 59 bp, Artificial
  Synthetic oligonucleotide
gagcacatcattctggagacttggggtagagtatgctcaggctcagggaagtagtatca

SEQ ID NO: 398911 - DNA, 60 bp, Artificial
  Synthetic oligonucleotide
gagcacatgtcaggctgtgttcacttttacaacacgcctccatccattgaaccgaggcag

SEQ ID NO: 398912 - DNA, 60 bp, Artificial
  Synthetic oligonucleotide
gagcacattcagcgaagatcagagatctgtgggagaaggattgcgacgtcaggaatcaca

SEQ ID NO: 398913 - DNA, 55 bp, Artificial
  Synthetic oligonucleotide
gagcacattcaggcacagatgcagcccacgctagacaacatgttggattggcaca

SEQ ID NO: 398914 - DNA, 60 bp, Artificial
  Synthetic oligonucleotide
gagcacattgcaagtatgaggagaaactatttcacagcagaggtgtcccattgcagagca

SEQ ID NO: 398915 - DNA, 55 bp, Artificial
  Synthetic oligonucleotide
gagcacattgtaatgtcagtagagtagactggtataaaaccttacaacaggtagc

SEQ ID NO: 398916 - DNA, 56 bp, Artificial
  Synthetic oligonucleotide
gagcaccacaaccaaatcaacatcatacattagtatatggaaaaagctaccatttc

SEQ ID NO: 398917 - DNA, 60 bp, Artificial
  Synthetic oligonucleotide
gagcaccacagagtcaacacatgctgggttgccaacagctgaaccctttaaatcctattt

SEQ ID NO: 398918 - DNA, 60 bp, Artificial
  Synthetic oligonucleotide
gagcaccagatcgctgtccaccaacatgtcttttcattgcaggtattgctgagcttgggg

SEQ ID NO: 398919 - DNA, 57 bp, Artificial
  Synthetic oligonucleotide
gagcaccagctccgtacgcctttactttgaacgaggaaactcatctacatgaagagc

SEQ ID NO: 398920 - DNA, 55 bp, Artificial
  Synthetic oligonucleotide
gagcaccataattacagcatttaaggaggacagagcttactctccagaggtggcc

SEQ ID NO: 398921 - DNA, 53 bp, Artificial
  Synthetic oligonucleotide
gagcacccacacgataggggggacggcaagccacagtactagagggctcacat

SEQ ID NO: 398922 - DNA, 60 bp, Artificial
  Synthetic oligonucleotide
gagcacccacagtttagatcaaccctcttacgccggatggctctacgcttagcagctctg

SEQ ID NO: 398923 - DNA, 60 bp, Artificial
  Synthetic oligonucleotide
gagcaccccacgctattgacaacaagggcgctcggaagtcaagcacaaccgactaggcaa

SEQ ID NO: 398924 - DNA, 55 bp, Artificial
  Synthetic oligonucleotide
gagcaccctattctgtcaccctcgcagcattaaactggttggaggttgcctgcaa

SEQ ID NO: 398925 - DNA, 58 bp, Artificial
  Synthetic oligonucleotide
gagcacccttgaatactaatgctatgatgtcatcagaaacaatgatggacagaattgc

SEQ ID NO: 398926 - DNA, 55 bp, Artificial
  Synthetic oligonucleotide
gagcaccgaatcctggccgaagctgtaatgaacctggcatacaaacacaaagtgg

SEQ ID NO: 398927 - DNA, 55 bp, Artificial
  Synthetic oligonucleotide
gagcacctccatttcttattggcacatgctccttattcggaacactatcaaactc

SEQ ID NO: 398928 - DNA, 55 bp, Artificial
  Synthetic oligonucleotide
gagcacgagacatgtcaatcgtatcgccaggcatactttcaatgtagtaatagac

SEQ ID NO: 398929 - DNA, 55 bp, Artificial
  Synthetic oligonucleotide
gagcacgatgcaatttggcttaatatagtcggcgttaacttcgtgcaaattggcg

SEQ ID NO: 398930 - DNA, 55 bp, Artificial
  Synthetic oligonucleotide
gagcacgcattcttggcgtgcccttttctcaacggaggcgtgatcgggtccgaac

SEQ ID NO: 398931 - DNA, 55 bp, Artificial
  Synthetic oligonucleotide
gagcacggaacgcactaatcggtgagtcagttgagaggttaccagtcacagaggc

SEQ ID NO: 398932 - DNA, 56 bp, Artificial
  Synthetic oligonucleotide
gagcacggccgatttagacttgtcgaccaaactgctgattgagagataaaggatga

SEQ ID NO: 398933 - DNA, 54 bp, Artificial
  Synthetic oligonucleotide
gagcacggggggtaataatagtcccccgtgcttacgtggcgcactaactcggga

SEQ ID NO: 398934 - DNA, 51 bp, Artificial
  Synthetic oligonucleotide
gagcacgtaaacatatttgaagtaggtggtcccgcaacagatgatgggaga

SEQ ID NO: 398935 - DNA, 55 bp, Artificial
  Synthetic oligonucleotide
gagcacgtagcacgagcgactacacaacagagaacctgagtgtgttgcacagtgc

SEQ ID NO: 398936 - DNA, 55 bp, Artificial
  Synthetic oligonucleotide
gagcacgtcagagaagttcatcttcgcgaatgggcagtcagaccgcgataccatg

SEQ ID NO: 398937 - DNA, 60 bp, Artificial
  Synthetic oligonucleotide
gagcacgtgcacgtgcattgaagtaccccgtgtcccgtagactttcatacgagcgtattg

SEQ ID NO: 398938 - DNA, 55 bp, Artificial
  Synthetic oligonucleotide
gagcacgtgggccggagtagacactagcaggggagttacgaaagcttgcccctac

SEQ ID NO: 398939 - DNA, 55 bp, Artificial
  Synthetic oligonucleotide
gagcacgttcacatggatggctgttcagctctacgacatgccgactgcctctgtc

SEQ ID NO: 398940 - DNA, 55 bp, Artificial
  Synthetic oligonucleotide
gagcactaacatggtagtacgtaggcgcatcaagcgagctaaccccacacaatta

SEQ ID NO: 398941 - DNA, 57 bp, Artificial
  Synthetic oligonucleotide
gagcactaataggtgtaagaattgtcatgatagtacttaacctagtaaaaaacatta

SEQ ID NO: 398942 - DNA, 52 bp, Artificial
  Synthetic oligonucleotide
gagcactagtttatcagccgtatgtattaccaatcactcttaactctaacat

SEQ ID NO: 398943 - DNA, 60 bp, Artificial
  Synthetic oligonucleotide
gagcactataccttgtatgtgctcctggtggtggtgttactgtaagagttggcggtagat

SEQ ID NO: 398944 - DNA, 60 bp, Artificial
  Synthetic oligonucleotide
gagcactatgcatactaagacaaaacatgaaactaggcccacaaccaatagacgatgaaa

SEQ ID NO: 398945 - DNA, 55 bp, Artificial
  Synthetic oligonucleotide
gagcactattttagtcggaggatgcggcgttttaacgttatccatggactggttc

SEQ ID NO: 398946 - DNA, 55 bp, Artificial
  Synthetic oligonucleotide
gagcactcaacaatgtatatcatgccgcacataccagttggattcgtggcttggc

SEQ ID NO: 398947 - DNA, 55 bp, Artificial
  Synthetic oligonucleotide
gagcactcaccacttcagccctggtcaccaagggtctccaaggatctgaaagccc

SEQ ID NO: 398948 - DNA, 55 bp, Artificial
  Synthetic oligonucleotide
gagcactcagataaatcgggcgtgtcagattgcacaaattcggttgtgtcttcgt

SEQ ID NO: 398949 - DNA, 55 bp, Artificial
  Synthetic oligonucleotide
gagcactcagtcggcaattgatcaaataacagggaagttaaaccggctcatagag

SEQ ID NO: 398950 - DNA, 59 bp, Artificial
  Synthetic oligonucleotide
gagcactccggcccaaatggttgagtagcattcagagggaggagtccacacggagttgg

SEQ ID NO: 398951 - DNA, 60 bp, Artificial
  Synthetic oligonucleotide
gagcactcctagttgctgtcctgccagagtacgtcattgggacagtggcgggcggtacag

SEQ ID NO: 398952 - DNA, 60 bp, Artificial
  Synthetic oligonucleotide
gagcactgaaagcacaagcatgaacacaatagttatacgatttaccatcgttggtggtgt

SEQ ID NO: 398953 - DNA, 60 bp, Artificial
  Synthetic oligonucleotide
gagcactgcggggattctctaaaccgaaaggcaccgccgcacatgtcaattccatctcaa

SEQ ID NO: 398954 - DNA, 60 bp, Artificial
  Synthetic oligonucleotide
gagcactggtaatttaattgcaccagaatacggattcaaaatatcgaagagaggaagctc

SEQ ID NO: 398955 - DNA, 60 bp, Artificial
  Synthetic oligonucleotide
gagcactgttgctcagcctaccagctttgatattgcaaccgctgattttattccggttga

SEQ ID NO: 398956 - DNA, 58 bp, Artificial
  Synthetic oligonucleotide
gagcacttttgtcgtcatagctgattatggtatcttgatctatgacgtcaacttggtc

SEQ ID NO: 398957 - DNA, 60 bp, Artificial
  Synthetic oligonucleotide
gagcagaaagattttacaagtttgatgaatgaagtctgtggagttatgagagaacacgtt

SEQ ID NO: 398958 - DNA, 55 bp, Artificial
  Synthetic oligonucleotide
gagcagaaatactgccgggagccacactactggaacctacgctaccggaggctca

SEQ ID NO: 398959 - DNA, 55 bp, Artificial
  Synthetic oligonucleotide
gagcagaagacagtggaaatgacagtgaaggggatacagaagaattggcaacact

SEQ ID NO: 398960 - DNA, 60 bp, Artificial
  Synthetic oligonucleotide
gagcagaagacagtggcaatgagagcgaaggggatacagatgaacttgcactgcttattg

SEQ ID NO: 398961 - DNA, 60 bp, Artificial
  Synthetic oligonucleotide
gagcagaagacagtggcaatgagagtgatggggatgcagaggaattggcagcactggggg

SEQ ID NO: 398962 - DNA, 55 bp, Artificial
  Synthetic oligonucleotide
gagcagaagtcaagttctagaattattgcagatgttcggtaaagtgcaaaggtcg

SEQ ID NO: 398963 - DNA, 55 bp, Artificial
  Synthetic oligonucleotide
gagcagacggagtaaaggggttttcatacagatatggcaatggtgtttggatagg

SEQ ID NO: 398964 - DNA, 55 bp, Artificial
  Synthetic oligonucleotide
gagcagacggatctatccaacacacgttcaacgcgaaagcagtttgacacatggt

SEQ ID NO: 398965 - DNA, 55 bp, Artificial
  Synthetic oligonucleotide
gagcagagacgtggcgacttccggttttaacttaccttatcatggcaggtcatac

SEQ ID NO: 398966 - DNA, 60 bp, Artificial
  Synthetic oligonucleotide
gagcagagggatgatgttaaacatactggtattgttcgttgtgttagtgatgttacgcgt

SEQ ID NO: 398967 - DNA, 60 bp, Artificial
  Synthetic oligonucleotide
gagcagatcaaaaggcaagttgtgatcgataacttaaattggtcaggatacagtggttct

SEQ ID NO: 398968 - DNA, 57 bp, Artificial
  Synthetic oligonucleotide
gagcagatgatacagtactagaagacataaatttgacaggaaaatggaaaccaaaag

SEQ ID NO: 398969 - DNA, 55 bp, Artificial
  Synthetic oligonucleotide
gagcagatgcataaagacataatcagtctatgggatcaaagcttaaagccatgtg

SEQ ID NO: 398970 - DNA, 58 bp, Artificial
  Synthetic oligonucleotide
gagcagatggggtcgtatccttatctttctggatttattaacgaataagtatatagtc

SEQ ID NO: 398971 - DNA, 55 bp, Artificial
  Synthetic oligonucleotide
gagcagatggtctcatatgctggaggtgattataatggagttggatatttcgcta

SEQ ID NO: 398972 - DNA, 55 bp, Artificial
  Synthetic oligonucleotide
gagcagattaaggtttacatgaatgcatcgccaacctacgtacacgtggcagggg

SEQ ID NO: 398973 - DNA, 59 bp, Artificial
  Synthetic oligonucleotide
gagcagattgggtgaaactaacactataacaacgcgcagtggtaccactataggtcaaa

SEQ ID NO: 398974 - DNA, 57 bp, Artificial
  Synthetic oligonucleotide
gagcagcacaaaccactttaagaaaattcagataattcctaggagttcttggtccaa

SEQ ID NO: 398975 - DNA, 60 bp, Artificial
  Synthetic oligonucleotide
gagcagcactgggcaaccaaacccagagtgggctgatatagatgtgagaacgcggtcgga

SEQ ID NO: 398976 - DNA, 60 bp, Artificial
  Synthetic oligonucleotide
gagcagcagcgaatcggagagcaactccgatacctacttcaacagatgttcaaaactcag

SEQ ID NO: 398977 - DNA, 60 bp, Artificial
  Synthetic oligonucleotide
gagcagcatgggggtttaccaaattcttgccatttatgctacagttgcaggttctctgtc

SEQ ID NO: 398978 - DNA, 60 bp, Artificial
  Synthetic oligonucleotide
gagcagccacacggtagatcaactcgtcgacgcctggtccctctcttggctagcctgtgt

SEQ ID NO: 398979 - DNA, 60 bp, Artificial
  Synthetic oligonucleotide
gagcagccacagtttaggtctatccttctacgtcgaggtgctctcttcgcaatcctgtgc

SEQ ID NO: 398980 - DNA, 54 bp, Artificial
  Synthetic oligonucleotide
gagcagccagatacatcaagatcttgtaccaaagcagtaagtagtatatgtaat

SEQ ID NO: 398981 - DNA, 50 bp, Artificial
  Synthetic oligonucleotide
gagcagccagggattctcactttcttatcggaacaatatgtaggggacga

SEQ ID NO: 398982 - DNA, 55 bp, Artificial
  Synthetic oligonucleotide
gagcagcgcgagcaacgttggatgaaaatggtcgactacaaggagtcttttgcac

SEQ ID NO: 398983 - DNA, 59 bp, Artificial
  Synthetic oligonucleotide
gagcagcggggctagcgagtggatgttccgccccccgttggctccgagtgaggcttatc

SEQ ID NO: 398984 - DNA, 60 bp, Artificial
  Synthetic oligonucleotide
gagcagcgtgatgacgtcaagcataccggtgttgtgcgttgtgttagtgatgttactagg

SEQ ID NO: 398985 - DNA, 55 bp, Artificial
  Synthetic oligonucleotide
gagcagctaacggtattgtacctaactttgtacatagtatggatagcagtcactt

SEQ ID NO: 398986 - DNA, 55 bp, Artificial
  Synthetic oligonucleotide
gagcagctaatagagagaccaaacaaggaaaagcaggatatgttactgacaaagg

SEQ ID NO: 398987 - DNA, 60 bp, Artificial
  Synthetic oligonucleotide
gagcagctcacaccaatgacataaggcaattggctgaggtagtgcaaaaggtagctacag

SEQ ID NO: 398988 - DNA, 60 bp, Artificial
  Synthetic oligonucleotide
gagcagctcttacgctacatggagggtgaacacaagcaactggcggctacaataatgcag

SEQ ID NO: 398989 - DNA, 55 bp, Artificial
  Synthetic oligonucleotide
gagcagcttgtttgtatacattttgtagcatcctcaattcacgtcattaaaccga

SEQ ID NO: 398990 - DNA, 55 bp, Artificial
  Synthetic oligonucleotide
gagcaggacaaatgatgctggatctgacagggtaatggtgtctccactagccgta

SEQ ID NO: 398991 - DNA, 55 bp, Artificial
  Synthetic oligonucleotide
gagcaggacaatacttctgatgcataggcagacagcgttctgatcaacggcgacc

SEQ ID NO: 398992 - DNA, 60 bp, Artificial
  Synthetic oligonucleotide
gagcaggacagcggagtcgagctgaccttaaacaatgaagctgaagatgttactactgag

SEQ ID NO: 398993 - DNA, 60 bp, Artificial
  Synthetic oligonucleotide
gagcaggacataacaaggttggatctctacaatacttggcactagcagcattagtaacac

SEQ ID NO: 398994 - DNA, 54 bp, Artificial
  Synthetic oligonucleotide
gagcaggacgggcctatacgcgagcggtatacgccctgaaagactcgctgtccg

SEQ ID NO: 398995 - DNA, 55 bp, Artificial
  Synthetic oligonucleotide
gagcaggagagatgcgcagaagacaatgcagccagagtggctgctagcttggcca

SEQ ID NO: 398996 - DNA, 60 bp, Artificial
  Synthetic oligonucleotide
gagcaggagatgagattccggacccgttgagtccgggagagcgcggcattcaaatgaaga

SEQ ID NO: 398997 - DNA, 58 bp, Artificial
  Synthetic oligonucleotide
gagcaggagccatagataatttacaccaaaaaggatggccaaataatcaaaactggcc

SEQ ID NO: 398998 - DNA, 55 bp, Artificial
  Synthetic oligonucleotide
gagcaggagtcattgcctactggcatacaaatcgcaatgtggttaaagggtgacg

SEQ ID NO: 398999 - DNA, 55 bp, Artificial
  Synthetic oligonucleotide
gagcaggattcgagtggcgggtggtggttggtcgtggaagacacaaaccaagcgg

SEQ ID NO: 399000 - DNA, 60 bp, Artificial
  Synthetic oligonucleotide
gagcaggcaataccataccgcgcatcagctgactggatgtcggttttcgagtataaccgc

SEQ ID NO: 399001 - DNA, 59 bp, Artificial
  Synthetic oligonucleotide
gagcaggctattgtgaggcggttttggaaggtcaacaatcacgtggtctacaaccacca

SEQ ID NO: 399002 - DNA, 60 bp, Artificial
  Synthetic oligonucleotide
gagcaggctgtggcttcagttacattagcgggcaattcctctctctgtcccgttagtggg

SEQ ID NO: 399003 - DNA, 55 bp, Artificial
  Synthetic oligonucleotide
gagcaggctttcgctggttttgacttcttcgacggagttatgaatgtggccgctc

SEQ ID NO: 399004 - DNA, 60 bp, Artificial
  Synthetic oligonucleotide
gagcagggatcaggatatgctgctgatcagaaaagcacgcagaatgcgattgacgggatc

SEQ ID NO: 399005 - DNA, 50 bp, Artificial
  Synthetic oligonucleotide
gagcagggcacttagtagatcaacagaacctggtggagcttattcgtgac

SEQ ID NO: 399006 - DNA, 60 bp, Artificial
  Synthetic oligonucleotide
gagcaggggagtgggtacgctgcagacaaagaatccactcaaaaggcaatagatggagtc

SEQ ID NO: 399007 - DNA, 55 bp, Artificial
  Synthetic oligonucleotide
gagcaggtctccgtatgtgtacttgacgatcccatcatacttgatgatcgctggt

SEQ ID NO: 399008 - DNA, 54 bp, Artificial
  Synthetic oligonucleotide
gagcagtaagtaacgctaatgcatcatagggacctgctagcattaataactact

SEQ ID NO: 399009 - DNA, 55 bp, Artificial
  Synthetic oligonucleotide
gagcagtacaaaccactttgagaaaattcaaatcatccccaggaattcttggtcc

SEQ ID NO: 399010 - DNA, 59 bp, Artificial
  Synthetic oligonucleotide
gagcagtacgaacgaaagtggggtgactaaacctcaatctacggtgccaatcgagcaga

SEQ ID NO: 399011 - DNA, 55 bp, Artificial
  Synthetic oligonucleotide
gagcagtatcataatccacgatagaattacgcatatttagcgcttctctacgcat

SEQ ID NO: 399012 - DNA, 60 bp, Artificial
  Synthetic oligonucleotide
gagcagtatcttgtgcaacatgaagatgctgcaaagtttttccggccactgatgggtgct

SEQ ID NO: 399013 - DNA, 60 bp, Artificial
  Synthetic oligonucleotide
gagcagtcagagctaggcttatcgcccagggggggaaggccgctatatgcggcaagtacc

SEQ ID NO: 399014 - DNA, 58 bp, Artificial
  Synthetic oligonucleotide
gagcagtccggcccgcagtccgtcccgccggaggttatcgacgacattctgggcctgc

SEQ ID NO: 399015 - DNA, 60 bp, Artificial
  Synthetic oligonucleotide
gagcagtctgtagatcatcatcctaaaataagtcaagttaaacacgcttcagttgaacag

SEQ ID NO: 399016 - DNA, 60 bp, Artificial
  Synthetic oligonucleotide
gagcagtgagaactttgaaatcatacattctccttttgtgcgtctattgcagaattgcgc

SEQ ID NO: 399017 - DNA, 60 bp, Artificial
  Synthetic oligonucleotide
gagcagtgatcataagccttcaagggttagatggctagccttcacagactacataactgg

SEQ ID NO: 399018 - DNA, 60 bp, Artificial
  Synthetic oligonucleotide
gagcagtgcggtggggtatcctgtgggtgctttaacatgaatccttcatgcttattctca

SEQ ID NO: 399019 - DNA, 55 bp, Artificial
  Synthetic oligonucleotide
gagcagtgcttgtcatgcaatccatcgccacagtagtggcagttgtctcgttggt

SEQ ID NO: 399020 - DNA, 59 bp, Artificial
  Synthetic oligonucleotide
gagcagtggcaggatggagtacttcggttacgtgttgaggggggtggctcaattacgca

SEQ ID NO: 399021 - DNA, 55 bp, Artificial
  Synthetic oligonucleotide
gagcagtgggagctaccagttcgaccagatgctcctgacagcgcagaacctgcct

SEQ ID NO: 399022 - DNA, 55 bp, Artificial
  Synthetic oligonucleotide
gagcagtgtatgccattcctattagccatcgaagggcaagtgcttacagctctga

SEQ ID NO: 399023 - DNA, 58 bp, Artificial
  Synthetic oligonucleotide
gagcagttaaactgtatagaaagcttaagagggagataacattccatggggccaaaga

SEQ ID NO: 399024 - DNA, 55 bp, Artificial
  Synthetic oligonucleotide
gagcagttgaggtgcaacaatctggcagatattacgtaccgcaaggtcgaacacg

SEQ ID NO: 399025 - DNA, 55 bp, Artificial
  Synthetic oligonucleotide
gagcataaggaacaacacgtatgaccatacccaatacagaacagagtcattgcag

SEQ ID NO: 399026 - DNA, 55 bp, Artificial
  Synthetic oligonucleotide
gagcatacaccaaaccggtgccgcctacatacttaacttgccctacagtactagc

SEQ ID NO: 399027 - DNA, 57 bp, Artificial
  Synthetic oligonucleotide
gagcatacattcctccaggcttaatgtttaatccactagtacctactagaagagcac

SEQ ID NO: 399028 - DNA, 60 bp, Artificial
  Synthetic oligonucleotide
gagcataccattaacaactacatacagttcaagagcaaacaccgtattgaaccagtatgt

SEQ ID NO: 399029 - DNA, 55 bp, Artificial
  Synthetic oligonucleotide
gagcatactaaaccattttgaaggaattcagatcatccgcaaaagttcttggtcc

SEQ ID NO: 399030 - DNA, 55 bp, Artificial
  Synthetic oligonucleotide
gagcatagaaagttttcttggcagatccggttgtgtacatgtttcagagctccaa

SEQ ID NO: 399031 - DNA, 55 bp, Artificial
  Synthetic oligonucleotide
gagcatagattcaaggagataccggataaggaattggctgtaagcgttttggcga

SEQ ID NO: 399032 - DNA, 55 bp, Artificial
  Synthetic oligonucleotide
gagcatattaagcaccttaagttattctttactagagttaaggaagtaggttgtg

SEQ ID NO: 399033 - DNA, 50 bp, Artificial
  Synthetic oligonucleotide
gagcatcaagattagatttttcacaagaccccagtaaatttactgaccca

SEQ ID NO: 399034 - DNA, 59 bp, Artificial
  Synthetic oligonucleotide
gagcatcaataagtctggcggaggagcaattatacctggtcaaagaagtaccgtttctg

SEQ ID NO: 399035 - DNA, 52 bp, Artificial
  Synthetic oligonucleotide
gagcatccagcccctaggaagagtgttattgccaaggtatttaaattcttcc

SEQ ID NO: 399036 - DNA, 58 bp, Artificial
  Synthetic oligonucleotide
gagcatcccttattgtaattacacaaagttttggtatgtaaatcacaccctgacagga

SEQ ID NO: 399037 - DNA, 55 bp, Artificial
  Synthetic oligonucleotide
gagcatcgagaggtcaataagcccggataaaactgagatcgtcaacggtgctgtg

SEQ ID NO: 399038 - DNA, 55 bp, Artificial
  Synthetic oligonucleotide
gagcatcgcacctataatgttctcgaataagatggcaaggctagggaaaggatac

SEQ ID NO: 399039 - DNA, 54 bp, Artificial
  Synthetic oligonucleotide
gagcatcgccccacgtatgtttgacgatgatgtataactttgaggtgtctagtg

SEQ ID NO: 399040 - DNA, 57 bp, Artificial
  Synthetic oligonucleotide
gagcatctatgcatatgttaacgtctaatttgactttcactgtatattccgaccttc

SEQ ID NO: 399041 - DNA, 60 bp, Artificial
  Synthetic oligonucleotide
gagcatctgcagggcaaatcagcgtacagcccacattctctgtgcagagaaacctcccgt

SEQ ID NO: 399042 - DNA, 59 bp, Artificial
  Synthetic oligonucleotide
gagcatcttaggggttttagtaagtcaatttctatatcagatacatttgaaagtgactc

SEQ ID NO: 399043 - DNA, 59 bp, Artificial
  Synthetic oligonucleotide
gagcatcttccatagttccattagttgaaggtacccctgatattagttttatatctcca

SEQ ID NO: 399044 - DNA, 55 bp, Artificial
  Synthetic oligonucleotide
gagcatgaagcttcggacacaaataccagcagaaatgctcgcaagtatcgatctg

SEQ ID NO: 399045 - DNA, 55 bp, Artificial
  Synthetic oligonucleotide
gagcatgagatggcttactttgaaatcagggcaattcccggtgcaaactgatgag

SEQ ID NO: 399046 - DNA, 59 bp, Artificial
  Synthetic oligonucleotide
gagcatgaggaaatcttagaccgtctcgggggacatttcagtgacttaggtctcaacta

SEQ ID NO: 399047 - DNA, 55 bp, Artificial
  Synthetic oligonucleotide
gagcatgcaatttcccagtttgataagttgcaaatggcctgtgagttggaccgtg

SEQ ID NO: 399048 - DNA, 60 bp, Artificial
  Synthetic oligonucleotide
gagcatgccttagcagctagcggaaagacaacgtttgttgaaactccagaagaatggcat

SEQ ID NO: 399049 - DNA, 59 bp, Artificial
  Synthetic oligonucleotide
gagcatgcgtctgaaacaactgtaaccaagttccctgttagttctggcttcatggttag

SEQ ID NO: 399050 - DNA, 55 bp, Artificial
  Synthetic oligonucleotide
gagcatgctcggcccggagagtgcggccctcctgcgcgcgcccgagttgccactg

SEQ ID NO: 399051 - DNA, 55 bp, Artificial
  Synthetic oligonucleotide
gagcatggaattttctctcactgacccaagactggaaccacacaaatgggagaga

SEQ ID NO: 399052 - DNA, 50 bp, Artificial
  Synthetic oligonucleotide
gagcatggatacccagagctcctagagttttagagtacctacacattggt

SEQ ID NO: 399053 - DNA, 60 bp, Artificial
  Synthetic oligonucleotide
gagcatgggagacaactccacatacctctagtcccttaagtgttttgaggaggcacgatg

SEQ ID NO: 399054 - DNA, 60 bp, Artificial
  Synthetic oligonucleotide
gagcatgggtacccagagcccctagagcactagaatacttgcatattggcaggacaaact

SEQ ID NO: 399055 - DNA, 60 bp, Artificial
  Synthetic oligonucleotide
gagcatggtgtccacgtgcacctagggctgtcccatacacacatactagatcaacaaatt

SEQ ID NO: 399056 - DNA, 58 bp, Artificial
  Synthetic oligonucleotide
gagcatgtcaagggaaaagatcttgtcagttaagcaaaaatgcttttctgacaacact

SEQ ID NO: 399057 - DNA, 55 bp, Artificial
  Synthetic oligonucleotide
gagcatgtggttaatcattacttccaaacccgccactatttacacactctatggg

SEQ ID NO: 399058 - DNA, 51 bp, Artificial
  Synthetic oligonucleotide
gagcattaagcaaactccctcaagcatacaccaatcgcttgcccgagatgc

SEQ ID NO: 399059 - DNA, 55 bp, Artificial
  Synthetic oligonucleotide
gagcattatgacgccatattgggcggaattaaagtcgcgaagtggatagtggacg

SEQ ID NO: 399060 - DNA, 53 bp, Artificial
  Synthetic oligonucleotide
gagcattcaatgtcgtgtaagccatttgtacaaatagaaacatcctatgttgg

SEQ ID NO: 399061 - DNA, 57 bp, Artificial
  Synthetic oligonucleotide
gagcattcatgccagtggagcttggatgaccacagaggacatgttggatgtctggaa

SEQ ID NO: 399062 - DNA, 55 bp, Artificial
  Synthetic oligonucleotide
gagcattccatgatttggatgtgggtaatggagccctaagattcggaccattggc

SEQ ID NO: 399063 - DNA, 60 bp, Artificial
  Synthetic oligonucleotide
gagcattccatgtgagtatttactctgatctttgaagctctttacatcatggggctccct

SEQ ID NO: 399064 - DNA, 58 bp, Artificial
  Synthetic oligonucleotide
gagcattgaccgtttcttaagggtccgagatcagctggggaacatactcctatctccc

SEQ ID NO: 399065 - DNA, 55 bp, Artificial
  Synthetic oligonucleotide
gagcattgctcccataatgttttcgaacaaaatggcaaggctaggaaaaggatac

SEQ ID NO: 399066 - DNA, 55 bp, Artificial
  Synthetic oligonucleotide
gagcattggcaagccacttggatcccagaatgggaggcggtacacactcctcccc

SEQ ID NO: 399067 - DNA, 60 bp, Artificial
  Synthetic oligonucleotide
gagcattgggttctaatgcaatggaggacggaaatgggtgcttcgaattgtatcacaaat

SEQ ID NO: 399068 - DNA, 50 bp, Artificial
  Synthetic oligonucleotide
gagcattgggttctaatgcgatagaagatggaaatggatgcttcgaattg

SEQ ID NO: 399069 - DNA, 60 bp, Artificial
  Synthetic oligonucleotide
gagcattggtcacctcaccatactgcactcaggcacgtcattctttgctggggggaccta

SEQ ID NO: 399070 - DNA, 60 bp, Artificial
  Synthetic oligonucleotide
gagcattgtgcgtcaatattttacgaatggttacttcactctctcttggcaacgctttca

SEQ ID NO: 399071 - DNA, 60 bp, Artificial
  Synthetic oligonucleotide
gagcattgttgcttccagagtattcgacattgtatcgccgttggctcgactctttttagt

SEQ ID NO: 399072 - DNA, 60 bp, Artificial
  Synthetic oligonucleotide
gagcatttagaaacgcatggtggttagagacaagaaatgaggcgggagagatgaaatacg

SEQ ID NO: 399073 - DNA, 54 bp, Artificial
  Synthetic oligonucleotide
gagcatttattgtctatcatatacgttaccaacgaatccaaaagtgatatggga

SEQ ID NO: 399074 - DNA, 51 bp, Artificial
  Synthetic oligonucleotide
gagcatttctacaaagtaatagccaagctagaattgtcagggaatgtgcta

SEQ ID NO: 399075 - DNA, 60 bp, Artificial
  Synthetic oligonucleotide
gagcatttgacctgggtcagtatgattaagtcaaaattctcacaggccgctaacttcgct

SEQ ID NO: 399076 - DNA, 56 bp, Artificial
  Synthetic oligonucleotide
gagcattttacgagagaaaaacacctagacttaaacagtctacttgatctgtttaa

SEQ ID NO: 399077 - DNA, 60 bp, Artificial
  Synthetic oligonucleotide
gagccaaaatatctttaccatttcacactccttttgatgatattgtgcagatgcaatgcc

SEQ ID NO: 399078 - DNA, 60 bp, Artificial
  Synthetic oligonucleotide
gagccaaacaaacagatgacaatttcctcaaactctgagggctctttaattgctctatat

SEQ ID NO: 399079 - DNA, 60 bp, Artificial
  Synthetic oligonucleotide
gagccaaagcactaacagatatagtggcattaactgaggaagcagaattagaattggcag

SEQ ID NO: 399080 - DNA, 60 bp, Artificial
  Synthetic oligonucleotide
gagccaaataattcggaagaagcttatcaatcacatattagaagtgtacgaagaagatta

SEQ ID NO: 399081 - DNA, 55 bp, Artificial
  Synthetic oligonucleotide
gagccaacacgaccactatgtgagaatgtatgtaagcagctcaggggtgaaccat

SEQ ID NO: 399082 - DNA, 55 bp, Artificial
  Synthetic oligonucleotide
gagccaaccccacaaattcacataccaggagaggttcacaacttgctagagctta

SEQ ID NO: 399083 - DNA, 54 bp, Artificial
  Synthetic oligonucleotide
gagccaactactgcgaagatcagaatggatctgagagatagaatgcaggttctg

SEQ ID NO: 399084 - DNA, 55 bp, Artificial
  Synthetic oligonucleotide
gagccaagattgctatgcccagggagttaataccgttccctgaattaaactatgg

SEQ ID NO: 399085 - DNA, 56 bp, Artificial
  Synthetic oligonucleotide
gagccaagtaacaacttcaaatgttataatgatgcagaaaggcaattataggggtc

SEQ ID NO: 399086 - DNA, 60 bp, Artificial
  Synthetic oligonucleotide
gagccaagtactgctactgtaaagaatgattatcgagatcgtttccaggtgatgcgtaag

SEQ ID NO: 399087 - DNA, 60 bp, Artificial
  Synthetic oligonucleotide
gagccaagtactgctactgtgaagaatgatctcagagatagatttcaagtgatcaggaag

SEQ ID NO: 399088 - DNA, 60 bp, Artificial
  Synthetic oligonucleotide
gagccaagtggacaaacagcagattggttttctattgggcagtatgttatgggctttgct

SEQ ID NO: 399089 - DNA, 60 bp, Artificial
  Synthetic oligonucleotide
gagccaatcagcaatactaattttcttaccgagaaagctgtggcttcagtaacattagcg

SEQ ID NO: 399090 - DNA, 60 bp, Artificial
  Synthetic oligonucleotide
gagccaatcttcgtctgggttcactaagatgatgcaaggtatgccaccccgtatcatctt

SEQ ID NO: 399091 - DNA, 55 bp, Artificial
  Synthetic oligonucleotide
gagccacaaagcttggcttcagatagaacacccttatcacaaatgaccttcagtt

SEQ ID NO: 399092 - DNA, 60 bp, Artificial
  Synthetic oligonucleotide
gagccacaagcgccgaaaggcataatccacacaactccaagggtgcgcaagatcaagacg

SEQ ID NO: 399093 - DNA, 60 bp, Artificial
  Synthetic oligonucleotide
gagccacacaagtgggagaagtattgtgtccttgaaataggagatatgctcctacggact

SEQ ID NO: 399094 - DNA, 55 bp, Artificial
  Synthetic oligonucleotide
gagccacagcgttgtgttggcttgttgctggttcttagtacgcataccaacttca

SEQ ID NO: 399095 - DNA, 56 bp, Artificial
  Synthetic oligonucleotide
gagccacataaaaatctgaaaacaggaaagtatgcaaaaaggaggtctgcccacac

SEQ ID NO: 399096 - DNA, 60 bp, Artificial
  Synthetic oligonucleotide
gagccaccaagaatacgatgtcctgctgcagctatgttctggtataaaaagtcaatgtgt

SEQ ID NO: 399097 - DNA, 55 bp, Artificial
  Synthetic oligonucleotide
gagccaccaccggaaagttgtcaagccgatctttgggtgaacaagttaagaagcc

SEQ ID NO: 399098 - DNA, 54 bp, Artificial
  Synthetic oligonucleotide
gagccaccgtaatcacgcgtcttttgggcgacgggccttcattattatcgtcag

SEQ ID NO: 399099 - DNA, 60 bp, Artificial
  Synthetic oligonucleotide
gagccacgagacaacgtggccccaacagtaatgatggaagtgccgacgtgggcactggac

SEQ ID NO: 399100 - DNA, 60 bp, Artificial
  Synthetic oligonucleotide
gagccacgagtatggcgagtatggtcgccaatttcaattctagatttacaatagcttaag

SEQ ID NO: 399101 - DNA, 55 bp, Artificial
  Synthetic oligonucleotide
gagccagaactcttctgccgccgaacttgcgaggatcaacaatcttgtcgcgagg

SEQ ID NO: 399102 - DNA, 55 bp, Artificial
  Synthetic oligonucleotide
gagccagacttcaccgcaagcgcaaaacttctcctgaaagtggacgatctccacc

SEQ ID NO: 399103 - DNA, 60 bp, Artificial
  Synthetic oligonucleotide
gagccagaggtggcatcctcgcctcgttatgcccggtcccagacaggtatccctcgagct

SEQ ID NO: 399104 - DNA, 60 bp, Artificial
  Synthetic oligonucleotide
gagccagattgctgatttacaaaactactgtaataaattggaagttgatctacagaataa

SEQ ID NO: 399105 - DNA, 55 bp, Artificial
  Synthetic oligonucleotide
gagccagatttccgaagacttgcataatcttatgctgtctgatgagatgaggtct

SEQ ID NO: 399106 - DNA, 58 bp, Artificial
  Synthetic oligonucleotide
gagccagctgtggcttggtttgaggcaaaccggcccaccctcccagcccttactatca

SEQ ID NO: 399107 - DNA, 56 bp, Artificial
  Synthetic oligonucleotide
gagccaggaacgtttaagttgacatcaagtatgttgagagcagaatcaaaagcaat

SEQ ID NO: 399108 - DNA, 55 bp, Artificial
  Synthetic oligonucleotide
gagccaggtgactgtggtggtaagctcttatgtaaacatggtgtcataggtatca

SEQ ID NO: 399109 - DNA, 53 bp, Artificial
  Synthetic oligonucleotide
gagccataagctctgtcttgcacagggacattctcagcactcacatggattcc

SEQ ID NO: 399110 - DNA, 56 bp, Artificial
  Synthetic oligonucleotide
gagccatcaagatcttgtaccaaagcagtaagtattgttaagtagtataggtaatg

SEQ ID NO: 399111 - DNA, 51 bp, Artificial
  Synthetic oligonucleotide
gagccatcacgagcagcgagggagacaagtggccgacggattggcctctcg

SEQ ID NO: 399112 - DNA, 60 bp, Artificial
  Synthetic oligonucleotide
gagccatcagagaatccactatacgagccatcagagaatctaagggggaggagttgcggt

SEQ ID NO: 399113 - DNA, 58 bp, Artificial
  Synthetic oligonucleotide
gagccatcagtgcagctccacccagatcctacagccagagtgcgtttctccaagaacc

SEQ ID NO: 399114 - DNA, 60 bp, Artificial
  Synthetic oligonucleotide
gagccatcatttgagtatgattatgtgttatctcgtgacacagacgatactgaaagctac

SEQ ID NO: 399115 - DNA, 55 bp, Artificial
  Synthetic oligonucleotide
gagccatccagttgttataaggaggggaaaggtatgcgtgacaaattgctcgact

SEQ ID NO: 399116 - DNA, 55 bp, Artificial
  Synthetic oligonucleotide
gagccatcggtaatcaacttagatgtggatcaccatgacacttacactggcaatg

SEQ ID NO: 399117 - DNA, 60 bp, Artificial
  Synthetic oligonucleotide
gagccatctccaacgtctttgaccaaaggcccatccaccaatcgtgactacttgaatcaa

SEQ ID NO: 399118 - DNA, 60 bp, Artificial
  Synthetic oligonucleotide
gagccatgacattaggaagcttgacatatcttgacctcttacgctatgtggtcacggttg

SEQ ID NO: 399119 - DNA, 55 bp, Artificial
  Synthetic oligonucleotide
gagccatgcccactcaaaatatgagtgcaaacctatttagtatctcatgtgtact

SEQ ID NO: 399120 - DNA, 55 bp, Artificial
  Synthetic oligonucleotide
gagccatggaagtgtcagcgcattgtcgaagaagtgactcagcaggcagaatcac

SEQ ID NO: 399121 - DNA, 51 bp, Artificial
  Synthetic oligonucleotide
gagccatggacattgcaggacacatcattggacatgtggaatgtgtcccca

SEQ ID NO: 399122 - DNA, 55 bp, Artificial
  Synthetic oligonucleotide
gagccatggcagaataattcaaaatgaggacatccccattggaaactgccacacg

SEQ ID NO: 399123 - DNA, 60 bp, Artificial
  Synthetic oligonucleotide
gagccatggcatcaagtcgaagatgtgcgcgcagcgttaattttagcggcagagttacac

SEQ ID NO: 399124 - DNA, 55 bp, Artificial
  Synthetic oligonucleotide
gagccatgggatgctcttcccgattccgcccaaactccttccccccaagggtcgc

SEQ ID NO: 399125 - DNA, 60 bp, Artificial
  Synthetic oligonucleotide
gagccatgtatgcaacaggaggcatagtaggaaatataagactagcacattgtaacatta

SEQ ID NO: 399126 - DNA, 55 bp, Artificial
  Synthetic oligonucleotide
gagccatgtggcgaagcctttcataagcccataaagagtgggagagcggtaacga

SEQ ID NO: 399127 - DNA, 60 bp, Artificial
  Synthetic oligonucleotide
gagccattcaattcagactggagaaaaaagccatcctaaggtatgcaaccaaagtgtcat

SEQ ID NO: 399128 - DNA, 55 bp, Artificial
  Synthetic oligonucleotide
gagccattccacgtcttacccgattttgtatcgcacacacagtttccattatacg

SEQ ID NO: 399129 - DNA, 60 bp, Artificial
  Synthetic oligonucleotide
gagccattgactagtcaattggtgtctcacaaacttagctatgcaatcggtgtctggggt

SEQ ID NO: 399130 - DNA, 57 bp, Artificial
  Synthetic oligonucleotide
gagcccaacattgtcaaaccacatgagaaaggcataaaccccaactacctcctggct

SEQ ID NO: 399131 - DNA, 60 bp, Artificial
  Synthetic oligonucleotide
gagcccaagaatgtctgtctgtcagctgcttgtgtaaatgagctttctcccaggatagct

SEQ ID NO: 399132 - DNA, 60 bp, Artificial
  Synthetic oligonucleotide
gagcccaagatgtcagcccaacgtattcatgagaatcaatatggacctgaatttgtaatg

SEQ ID NO: 399133 - DNA, 60 bp, Artificial
  Synthetic oligonucleotide
gagcccaatccaagtacgctgcgctaggtcacacttgcaaggagtactacccatgtaaga

SEQ ID NO: 399134 - DNA, 54 bp, Artificial
  Synthetic oligonucleotide
gagcccaatgaccgtattattatttgggtctacggcccaaatggtaacgaagga

SEQ ID NO: 399135 - DNA, 55 bp, Artificial
  Synthetic oligonucleotide
gagcccaatgtgcagcgcactcaggccccgatgaacagtgacgtgcggaatggac

SEQ ID NO: 399136 - DNA, 60 bp, Artificial
  Synthetic oligonucleotide
gagcccacacgtgcgcagcagattgcaggagtagtctcaagcataggtggagtcatctca

SEQ ID NO: 399137 - DNA, 56 bp, Artificial
  Synthetic oligonucleotide
gagcccagacgccgtttgaagctagaagtaccgcttaggcaggaggccgttaggaa

SEQ ID NO: 399138 - DNA, 60 bp, Artificial
  Synthetic oligonucleotide
gagcccagcacctctaatgctgatcattcggattatgctgatattgagctgtatccgtct

SEQ ID NO: 399139 - DNA, 60 bp, Artificial
  Synthetic oligonucleotide
gagcccagcactgcgacagttaagaacgatcttcgcgatcgtttccaagttatgcgaaag

SEQ ID NO: 399140 - DNA, 55 bp, Artificial
  Synthetic oligonucleotide
gagcccaggaggagtggcgcagcgcatacataacctgttggcgcatgtgctccac

SEQ ID NO: 399141 - DNA, 60 bp, Artificial
  Synthetic oligonucleotide
gagcccaggcaaagggtatgcaattgttgatgagccattctcagaaattcctcggcaagg

SEQ ID NO: 399142 - DNA, 60 bp, Artificial
  Synthetic oligonucleotide
gagcccaggctgaacattgaataagtcttgaatatccagtccatgagagtgcttagagtc

SEQ ID NO: 399143 - DNA, 60 bp, Artificial
  Synthetic oligonucleotide
gagcccagtaccgcaaccgtgaagaatgatttgcgtgataggtttcaagtgatgagaaaa

SEQ ID NO: 399144 - DNA, 55 bp, Artificial
  Synthetic oligonucleotide
gagcccatatttctagaagctagcatcaaacgtgacaagtatcacctggtgggag

SEQ ID NO: 399145 - DNA, 55 bp, Artificial
  Synthetic oligonucleotide
gagcccatgcatgatatcactttcctatcggaacaatatgtgggagatgatacgc

SEQ ID NO: 399146 - DNA, 60 bp, Artificial
  Synthetic oligonucleotide
gagcccattcaactccctcttcttgatgtgcgtcgagttctttggcatgctacccaggat

SEQ ID NO: 399147 - DNA, 55 bp, Artificial
  Synthetic oligonucleotide
gagcccattgatccacatccaagaccgaagcataaacactcaaaatctcccctac

SEQ ID NO: 399148 - DNA, 60 bp, Artificial
  Synthetic oligonucleotide
gagccccactggaattatgtagagaggcaagcatgtgtgaagtaactaggagagttggta

SEQ ID NO: 399149 - DNA, 53 bp, Artificial
  Synthetic oligonucleotide
gagccccagcgaattcacaactggtgcactctggctccaagtaggtaggccta

SEQ ID NO: 399150 - DNA, 55 bp, Artificial
  Synthetic oligonucleotide
gagccccagcttcaacgggctccagtggctcaggcctcccggatatctgggatgg

SEQ ID NO: 399151 - DNA, 55 bp, Artificial
  Synthetic oligonucleotide
gagccccatcaagcccagctgctacgtggtgtgcacgcgtgtgacaaatcgcggt

SEQ ID NO: 399152 - DNA, 59 bp, Artificial
  Synthetic oligonucleotide
gagccccctacatcttctatttattctgctacacctagtggctctatggttacttcgga

SEQ ID NO: 399153 - DNA, 55 bp, Artificial
  Synthetic oligonucleotide
gagccccctcggggaggggcgtcccacaaagcctttgaccattgcttggtgcttg

SEQ ID NO: 399154 - DNA, 56 bp, Artificial
  Synthetic oligonucleotide
gagccccgtgtgctcactttgagtcctccggcccctgaatgtggctaaccttaacc

SEQ ID NO: 399155 - DNA, 52 bp, Artificial
  Synthetic oligonucleotide
gagcccctaaaacctttgaggacaagtggtacccccaaacggacctgtgcga

SEQ ID NO: 399156 - DNA, 55 bp, Artificial
  Synthetic oligonucleotide
gagcccctaagccatggttgtactgcactatcaatctaagacggtccttctccgg

SEQ ID NO: 399157 - DNA, 58 bp, Artificial
  Synthetic oligonucleotide
gagcccctacaatcgaagcagactctcccggatctaacacgttggtcccaagcctgct

SEQ ID NO: 399158 - DNA, 58 bp, Artificial
  Synthetic oligonucleotide
gagcccctcgttcagactgttggacgagtatggcgagaattcttggctatcccccgac

SEQ ID NO: 399159 - DNA, 54 bp, Artificial
  Synthetic oligonucleotide
gagcccctgatgaacgcccgtggggtgaccgacgagggctcgtggactgacaac

SEQ ID NO: 399160 - DNA, 56 bp, Artificial
  Synthetic oligonucleotide
gagcccgaaaaccgcacgtgcggcaaaaacttgtggtccgtgtacacaatcagaaa

SEQ ID NO: 399161 - DNA, 54 bp, Artificial
  Synthetic oligonucleotide
gagcccgaactgtcacggccccgattgggcctccccggtttgccaacgtcattc

SEQ ID NO: 399162 - DNA, 55 bp, Artificial
  Synthetic oligonucleotide
gagcccgagccggacgtgacagtggttacatcaatgctagtcgacccatcgcact

SEQ ID NO: 399163 - DNA, 56 bp, Artificial
  Synthetic oligonucleotide
gagcccgataggattaagcgaagacgtgtctacttggttgtagacggaaaatctac

SEQ ID NO: 399164 - DNA, 58 bp, Artificial
  Synthetic oligonucleotide
gagcccgatgacagcatatccccggacccccccagaactcctgtatccagaaagcgac

SEQ ID NO: 399165 - DNA, 55 bp, Artificial
  Synthetic oligonucleotide
gagcccgcctgttaggaatttctgggcagagtactatggtgcagcagcttggaac

SEQ ID NO: 399166 - DNA, 50 bp, Artificial
  Synthetic oligonucleotide
gagcccgtgaagcgctttcagactcggctccccgtgagtgtctgacgtga

SEQ ID NO: 399167 - DNA, 56 bp, Artificial
  Synthetic oligonucleotide
gagccctagtgcgcactgggatggaccccaggatgtgctccctcatgcaaggatcg

SEQ ID NO: 399168 - DNA, 55 bp, Artificial
  Synthetic oligonucleotide
gagccctatggcatcgaatgcattcacggagaagggagtaggataagggtcccac

SEQ ID NO: 399169 - DNA, 55 bp, Artificial
  Synthetic oligonucleotide
gagccctcaagccctcaggtaattcactattccagtggaaaagacctatgcccag

SEQ ID NO: 399170 - DNA, 58 bp, Artificial
  Synthetic oligonucleotide
gagccctccgcctgaacctgaggagtgcaaaggcagcgctagtaagaaaaccgccgtg

SEQ ID NO: 399171 - DNA, 58 bp, Artificial
  Synthetic oligonucleotide
gagccctcgtagtcggtgtggtctgcgcggcaatactacgccggcacgttgggccggc

SEQ ID NO: 399172 - DNA, 59 bp, Artificial
  Synthetic oligonucleotide
gagccctctggactcacaatcagattaacctcctaccaattctaaagaccagatgggag

SEQ ID NO: 399173 - DNA, 55 bp, Artificial
  Synthetic oligonucleotide
gagccctgagctcagaacacttgcacaaagtctcattgatcagaaggtcaaagag

SEQ ID NO: 399174 - DNA, 60 bp, Artificial
  Synthetic oligonucleotide
gagccctgccgacctttgatgagttattcggagctaggatccacagccatggtaacctgg

SEQ ID NO: 399175 - DNA, 55 bp, Artificial
  Synthetic oligonucleotide
gagcccttctccacatacctagaagaatcagacagggcttagaaaggcttttgca

SEQ ID NO: 399176 - DNA, 53 bp, Artificial
  Synthetic oligonucleotide
gagcccttgactaccctggtcaagaccgtctaaacagactaaagagaaaatta

SEQ ID NO: 399177 - DNA, 55 bp, Artificial
  Synthetic oligonucleotide
gagcccttgtgcgtactgggatggatcctagaatgtgctctctgatgcaaggctc

SEQ ID NO: 399178 - DNA, 56 bp, Artificial
  Synthetic oligonucleotide
gagccctttgtttcttgttcgcccatggagtgtagaactttcttcctcactcaggg

SEQ ID NO: 399179 - DNA, 55 bp, Artificial
  Synthetic oligonucleotide
gagccgaaaacgtacacagatgcgtcacgtaggttactgctctctaacagcccag

SEQ ID NO: 399180 - DNA, 55 bp, Artificial
  Synthetic oligonucleotide
gagccgaacagacaaccaagagctccaacaagccagcacagggaccgaacaacac

SEQ ID NO: 399181 - DNA, 50 bp, Artificial
  Synthetic oligonucleotide
gagccgaagaacgaaagtgatatatcggtcaaattccaatttaaactaga

SEQ ID NO: 399182 - DNA, 60 bp, Artificial
  Synthetic oligonucleotide
gagccgagactcagattttgatgaaggttacacgctggccaatgtttcagctcgcactct

SEQ ID NO: 399183 - DNA, 55 bp, Artificial
  Synthetic oligonucleotide
gagccgaggcgcacttgcaagtgtggattccccctctcaacgtccgggggggtcg

SEQ ID NO: 399184 - DNA, 60 bp, Artificial
  Synthetic oligonucleotide
gagccgagtggtcagactgctgattggaaatccatcgggctttacatcttgagttttgcc

SEQ ID NO: 399185 - DNA, 60 bp, Artificial
  Synthetic oligonucleotide
gagccgatcaggaaaggaagcttattgctatggtgttcgatgcagtttggcctgatcagc

SEQ ID NO: 399186 - DNA, 60 bp, Artificial
  Synthetic oligonucleotide
gagccgatcatcacgttcaagtctaagggtaacatctcattgattagagctaacggttca

SEQ ID NO: 399187 - DNA, 55 bp, Artificial
  Synthetic oligonucleotide
gagccgatccgtcgaaacgagatgctagaaagtgcgccgctaatcgaatcggtct

SEQ ID NO: 399188 - DNA, 60 bp, Artificial
  Synthetic oligonucleotide
gagccgatgagcgtgactcttccgactgagcccttacgccgtaggatccagcgctaccac

SEQ ID NO: 399189 - DNA, 60 bp, Artificial
  Synthetic oligonucleotide
gagccgatgggccaatgagcagcccggaactaaatattataaaatgcgcggtgaatggtg

SEQ ID NO: 399190 - DNA, 55 bp, Artificial
  Synthetic oligonucleotide
gagccgattgaggacgcgtcaaaggggtgtttgcatacgagaaccatgatgtgga

SEQ ID NO: 399191 - DNA, 55 bp, Artificial
  Synthetic oligonucleotide
gagccgcaacatgtgggatccattaaccaacgagtttcccgaaaccctgcacggg

SEQ ID NO: 399192 - DNA, 55 bp, Artificial
  Synthetic oligonucleotide
gagccgccacctatgtaggcgcgggtatttctggtaaaagtagcgaatagcatct

SEQ ID NO: 399193 - DNA, 55 bp, Artificial
  Synthetic oligonucleotide
gagccgccgaggatactagcatggacgtgacgtctgagggtccgtgcgaagtcgt

SEQ ID NO: 399194 - DNA, 60 bp, Artificial
  Synthetic oligonucleotide
gagccgcgtgggaaacagccagacacactccagtcaactcctggttgggaaacatcatag

SEQ ID NO: 399195 - DNA, 60 bp, Artificial
  Synthetic oligonucleotide
gagccgctcagtctggatcaaaggccctattgctggcactacgcgcctcaaccatgcggt

SEQ ID NO: 399196 - DNA, 55 bp, Artificial
  Synthetic oligonucleotide
gagccgctttaagaaaggccaccttcaaggaccaatgcaggatgtgagttccctg

SEQ ID NO: 399197 - DNA, 57 bp, Artificial
  Synthetic oligonucleotide
gagccgggaacatccgaaggtatgtggacgtctaggggcaattcgggcaggagcacc

SEQ ID NO: 399198 - DNA, 57 bp, Artificial
  Synthetic oligonucleotide
gagccggggcgggaccaacatgacctgcaagaaccttcctgaccgctgggtggctta

SEQ ID NO: 399199 - DNA, 55 bp, Artificial
  Synthetic oligonucleotide
gagccggtcgtttccttccggcgtgactccattagacacccattcccgttctctg

SEQ ID NO: 399200 - DNA, 57 bp, Artificial
  Synthetic oligonucleotide
gagccgtcaccaatgccttatgtcccgtacccccggtcgacagaggtgtatgtccgc

SEQ ID NO: 399201 - DNA, 51 bp, Artificial
  Synthetic oligonucleotide
gagccgtcactgacgtgcgcgatcacgtaaacaggtgttgcggtgcacgtc

SEQ ID NO: 399202 - DNA, 60 bp, Artificial
  Synthetic oligonucleotide
gagccgtcttcaagtcaaatttaccaatcgagaactgcaatgccacatgccagactgttg

SEQ ID NO: 399203 - DNA, 60 bp, Artificial
  Synthetic oligonucleotide
gagccgtgttcaggtctaatttaccaatcgagaactgtgatgccacatgccagactattg

SEQ ID NO: 399204 - DNA, 60 bp, Artificial
  Synthetic oligonucleotide
gagccgttagctgaaccagacgtcaagtccggtcgtgtgtgtatgacgtcaacagaatct

SEQ ID NO: 399205 - DNA, 57 bp, Artificial
  Synthetic oligonucleotide
gagccgttattagatggtccataccaaccaaccactttcaatccaccaacaagctat

SEQ ID NO: 399206 - DNA, 56 bp, Artificial
  Synthetic oligonucleotide
gagccgttcagacctggcccccaggtcgaccgcttctgggaggtttcacacgccaa

SEQ ID NO: 399207 - DNA, 57 bp, Artificial
  Synthetic oligonucleotide
gagcctaaagacctattgcgttacgatgacgagtcttgtgaagtaatgccagaatgc

SEQ ID NO: 399208 - DNA, 59 bp, Artificial
  Synthetic oligonucleotide
gagcctaagacgttatgtgcagacgcgaaggaaggtacatcgaagatgagtgagcctac

SEQ ID NO: 399209 - DNA, 59 bp, Artificial
  Synthetic oligonucleotide
gagcctaataatgttcaatacttgttatgcaacactagtaatattaatagtaccagtaa

SEQ ID NO: 399210 - DNA, 58 bp, Artificial
  Synthetic oligonucleotide
gagcctaatacaccaacgtagactcgctcgttcacggggtgcgcatccgatttactta

SEQ ID NO: 399211 - DNA, 56 bp, Artificial
  Synthetic oligonucleotide
gagcctacagccatccggatgttttcctggaaaattgggtacgggcccattgacaa

SEQ ID NO: 399212 - DNA, 60 bp, Artificial
  Synthetic oligonucleotide
gagcctacgccacgcaaacgcggtcgccgcaagtctacgcccgtagagactgaatctagc

SEQ ID NO: 399213 - DNA, 55 bp, Artificial
  Synthetic oligonucleotide
gagcctacgctcaattgggcctcatacaaactcctctgagggagttttacgaggg

SEQ ID NO: 399214 - DNA, 52 bp, Artificial
  Synthetic oligonucleotide
gagcctactaggcctctagctgagaatgttcataggcagcttgggggtgaac

SEQ ID NO: 399215 - DNA, 60 bp, Artificial
  Synthetic oligonucleotide
gagcctactatggctgatgagggagaatctcacactatgggggcgactcagggacttgat

SEQ ID NO: 399216 - DNA, 55 bp, Artificial
  Synthetic oligonucleotide
gagcctagcactgctactgttaagaacgacaacagagatcgctttcaagttctac

SEQ ID NO: 399217 - DNA, 55 bp, Artificial
  Synthetic oligonucleotide
gagcctaggtaacactagcagaagacttctaggagaaagacctagaatgattgtc

SEQ ID NO: 399218 - DNA, 58 bp, Artificial
  Synthetic oligonucleotide
gagcctagtacggcaactgtgaagaacgataatagggatcgtttccaggtattgcgtc

SEQ ID NO: 399219 - DNA, 55 bp, Artificial
  Synthetic oligonucleotide
gagcctatattcaatacgagtatcaaccttacaccaccttatgacgacacgagcc

SEQ ID NO: 399220 - DNA, 55 bp, Artificial
  Synthetic oligonucleotide
gagcctattccaatacactattgtgcaccagcaggatttgcaattctcaaatgta

SEQ ID NO: 399221 - DNA, 57 bp, Artificial
  Synthetic oligonucleotide
gagcctcaattaaagaacgatttgtaaatcgttatgagttatcgtgaaatcgataac

SEQ ID NO: 399222 - DNA, 55 bp, Artificial
  Synthetic oligonucleotide
gagcctcagactgaaaagcatcatcatttcaaatggcggggtatcgaggtatcgg

SEQ ID NO: 399223 - DNA, 55 bp, Artificial
  Synthetic oligonucleotide
gagcctccctcagcttctagccgcaatcccgatgatggtgggtcaactccggttg

SEQ ID NO: 399224 - DNA, 55 bp, Artificial
  Synthetic oligonucleotide
gagcctccctcgtccttttgaagagtgactttgacagagtgccgaagtctaaagt

SEQ ID NO: 399225 - DNA, 55 bp, Artificial
  Synthetic oligonucleotide
gagcctccgacttacttccgcagttaattgcctttgcgtatgcgtcattggcgga

SEQ ID NO: 399226 - DNA, 58 bp, Artificial
  Synthetic oligonucleotide
gagcctccgacttacttcctgcgttaattgcctttgcgtaagcgtcgttggctgtctg

SEQ ID NO: 399227 - DNA, 60 bp, Artificial
  Synthetic oligonucleotide
gagcctcctatatatggcacagcaaaatttaagcagtggttctttgccggagggtatggc

SEQ ID NO: 399228 - DNA, 51 bp, Artificial
  Synthetic oligonucleotide
gagcctcgaagatagctgaagcaataaagattgacgatgatgctggaccag

SEQ ID NO: 399229 - DNA, 55 bp, Artificial
  Synthetic oligonucleotide
gagcctcggtacaacgtgacagccctcaccaggtcttcaatgttacttggagagt

SEQ ID NO: 399230 - DNA, 60 bp, Artificial
  Synthetic oligonucleotide
gagcctctagatcagccggagggatcaccatggggcgatatgatggtatacgggatgaag

SEQ ID NO: 399231 - DNA, 60 bp, Artificial
  Synthetic oligonucleotide
gagcctctcgagcactagctgcattgacggcgttgtggtaaacgtcgtctttgtttgatt

SEQ ID NO: 399232 - DNA, 55 bp, Artificial
  Synthetic oligonucleotide
gagcctctcgggcacatatgatgtacagaggattccaacgacctacgagatccca

SEQ ID NO: 399233 - DNA, 55 bp, Artificial
  Synthetic oligonucleotide
gagcctctgacttatttgcggagttgagagctttggcgtaagcgtcattggcgga

SEQ ID NO: 399234 - DNA, 55 bp, Artificial
  Synthetic oligonucleotide
gagcctgaagattctaatgctgaggtggaaaaggtagcgtcggaggcattgacta

SEQ ID NO: 399235 - DNA, 55 bp, Artificial
  Synthetic oligonucleotide
gagcctgacgacgattacgaaaacccaatcggcgaagttctagacgaggacacgg

SEQ ID NO: 399236 - DNA, 54 bp, Artificial
  Synthetic oligonucleotide
gagcctgatagcctgtacttaaccagtgattcagaggatagacaaaccttgtcc

SEQ ID NO: 399237 - DNA, 60 bp, Artificial
  Synthetic oligonucleotide
gagcctgatcagactatatcgaaataaaggtgacatagggccttatatggccctactcga

SEQ ID NO: 399238 - DNA, 55 bp, Artificial
  Synthetic oligonucleotide
gagcctgatgaccatctgaaggagaaatcatcactaagatatgggaatgtactgg

SEQ ID NO: 399239 - DNA, 55 bp, Artificial
  Synthetic oligonucleotide
gagcctgctgccagcaattctggacaacttgagggactatgggctctctccaacc

SEQ ID NO: 399240 - DNA, 60 bp, Artificial
  Synthetic oligonucleotide
gagcctgtgcatcttcctttaccaccacttgagagacttcatcttgattgcagcgaggac

SEQ ID NO: 399241 - DNA, 60 bp, Artificial
  Synthetic oligonucleotide
gagcctgtgcctttggagctaccaccgattgagagacttcatcttgattgccgcgaggac

SEQ ID NO: 399242 - DNA, 52 bp, Artificial
  Synthetic oligonucleotide
gagcctgtggtacaagcccaaagtgctgaagtctattttgacttctttcctg

SEQ ID NO: 399243 - DNA, 60 bp, Artificial
  Synthetic oligonucleotide
gagcctgttgacataaatggagtagaatatgtgctgtttgatcatgagattaattgggaa

SEQ ID NO: 399244 - DNA, 57 bp, Artificial
  Synthetic oligonucleotide
gagccttacaaacggatagcgttaggtaatgtaactgtcgaaagtaggactgataga

SEQ ID NO: 399245 - DNA, 55 bp, Artificial
  Synthetic oligonucleotide
gagccttacagaatgtggaacattcttgacagcaataaaggcatgcgactcagct

SEQ ID NO: 399246 - DNA, 58 bp, Artificial
  Synthetic oligonucleotide
gagccttaggcctccaacggattttggcaagccattactgtttgcggctgccggcgtc

SEQ ID NO: 399247 - DNA, 60 bp, Artificial
  Synthetic oligonucleotide
gagccttatgtgtcatgcgatcctggcaagtgttatcaatttgcactcgggcaggggacc

SEQ ID NO: 399248 - DNA, 55 bp, Artificial
  Synthetic oligonucleotide
gagccttcaggctctatataaggacttgtaagacctcattgctaggcatcggaga

SEQ ID NO: 399249 - DNA, 55 bp, Artificial
  Synthetic oligonucleotide
gagccttctgatgccaacaaccggaccggcgtccattccggacgacaccctagag

SEQ ID NO: 399250 - DNA, 60 bp, Artificial
  Synthetic oligonucleotide
gagccttctttacccagaactggactgcttctttgagtttgcacaccattctgacgatgc

SEQ ID NO: 399251 - DNA, 59 bp, Artificial
  Synthetic oligonucleotide
gagccttgaatactgtggaaggtctgttacgtgcacttgggtggaaataccaccatctg

SEQ ID NO: 399252 - DNA, 59 bp, Artificial
  Synthetic oligonucleotide
gagccttggaaacatccaggaagtcagcctaggactccttgtaccaattgctattgtaa

SEQ ID NO: 399253 - DNA, 57 bp, Artificial
  Synthetic oligonucleotide
gagccttggcgtaagcgtcattggcggattgttgtcctcctcgagcagatcgtccgt

SEQ ID NO: 399254 - DNA, 56 bp, Artificial
  Synthetic oligonucleotide
gagcctttaatggctccgttaattaattgtattcatgtagtagttatgtctaattt

SEQ ID NO: 399255 - DNA, 55 bp, Artificial
  Synthetic oligonucleotide
gagccttttggttcagataatacttccccagagttatctaaactccattttggtg

SEQ ID NO: 399256 - DNA, 59 bp, Artificial
  Synthetic oligonucleotide
gagcgaaaacgttggctgctacacatgttggggcgacgaatggattcgtttctacactg

SEQ ID NO: 399257 - DNA, 57 bp, Artificial
  Synthetic oligonucleotide
gagcgaaacttatcggcaccgacaactctgtggtcctctcgcgaaagtacacctcct

SEQ ID NO: 399258 - DNA, 59 bp, Artificial
  Synthetic oligonucleotide
gagcgaaacttatcgggactgacaactctgttgtcctctctcgcaaatacacctccttc

SEQ ID NO: 399259 - DNA, 55 bp, Artificial
  Synthetic oligonucleotide
gagcgaaacttatcggtacggacaactccgttgtcctctctcgaaaatacacctc

SEQ ID NO: 399260 - DNA, 59 bp, Artificial
  Synthetic oligonucleotide
gagcgaacattatcggcaccgacaattctgttgtcctctctaggaagtacacctccttc

SEQ ID NO: 399261 - DNA, 57 bp, Artificial
  Synthetic oligonucleotide
gagcgaacctcataggcaccgacaactctgttgtcctttctcggaaatataccgcct

SEQ ID NO: 399262 - DNA, 60 bp, Artificial
  Synthetic oligonucleotide
gagcgaactgcctgaatgttacatatatagttatttctgcaatatatctcagtgcctgtc

SEQ ID NO: 399263 - DNA, 54 bp, Artificial
  Synthetic oligonucleotide
gagcgaagggcccaagctcttagcgttttacccaccctactcgattgcattggg

SEQ ID NO: 399264 - DNA, 55 bp, Artificial
  Synthetic oligonucleotide
gagcgaaggggatcaggaagaattgtcagctcttgtggagatggggtaccatgct

SEQ ID NO: 399265 - DNA, 60 bp, Artificial
  Synthetic oligonucleotide
gagcgaatatcatcggaacagacaactctgttgtcctctctcggaagtacacctccttcc

SEQ ID NO: 399266 - DNA, 56 bp, Artificial
  Synthetic oligonucleotide
gagcgaatgggtattgattcgggtcgtatcattattcccaaactgaggaagggtaa

SEQ ID NO: 399267 - DNA, 55 bp, Artificial
  Synthetic oligonucleotide
gagcgaattacttgccttttctgacccatctagtcggtctttttggaattttata

SEQ ID NO: 399268 - DNA, 55 bp, Artificial
  Synthetic oligonucleotide
gagcgacaccactcaagtatcttagcgtatttcgctgcttgtaattatcgacgac

SEQ ID NO: 399269 - DNA, 60 bp, Artificial
  Synthetic oligonucleotide
gagcgacatactcaaagtcgacgctcctgagttatttttggccgtaactcaggagagcaa

SEQ ID NO: 399270 - DNA, 55 bp, Artificial
  Synthetic oligonucleotide
gagcgacatagacacgtacaacacggaggcgaaccacagcaactataggacgagc

SEQ ID NO: 399271 - DNA, 50 bp, Artificial
  Synthetic oligonucleotide
gagcgaccatcatggctgcattcacaggaaatgcagaaggcagaacatct

SEQ ID NO: 399272 - DNA, 58 bp, Artificial
  Synthetic oligonucleotide
gagcgaccccttgtcacaataaagatagggggacagctaaaggaagctctcttagata

SEQ ID NO: 399273 - DNA, 55 bp, Artificial
  Synthetic oligonucleotide
gagcgacctggagaaaagcaaggtttcgatatgttgagagttgataagcaacgtc

SEQ ID NO: 399274 - DNA, 60 bp, Artificial
  Synthetic oligonucleotide
gagcgacgacgtggcagtcagcaagatgctatcgactactgctcccgtgagacttacaaa

SEQ ID NO: 399275 - DNA, 55 bp, Artificial
  Synthetic oligonucleotide
gagcgacgattaaaataaactttcgttatctatcttgcaccggatcaagcgtcaa

SEQ ID NO: 399276 - DNA, 55 bp, Artificial
  Synthetic oligonucleotide
gagcgactaatgctctgaccggcctcattagcggcacccaaagtcttcaagaagc

SEQ ID NO: 399277 - DNA, 55 bp, Artificial
  Synthetic oligonucleotide
gagcgagaagttggaaagatatctgacgccaaaggtctttataaccgactcgttg

SEQ ID NO: 399278 - DNA, 58 bp, Artificial
  Synthetic oligonucleotide
gagcgagactggttgtgctcgcgaccgctacccctccgggctccgtcaccgtgcccca

SEQ ID NO: 399279 - DNA, 55 bp, Artificial
  Synthetic oligonucleotide
gagcgagagcggttgagaacgagataccggctgatttgacattgagccgccttgc

SEQ ID NO: 399280 - DNA, 60 bp, Artificial
  Synthetic oligonucleotide
gagcgagagtctgcttaagtattgctagtaagctgaatgggacattctatgctgagtcac

SEQ ID NO: 399281 - DNA, 55 bp, Artificial
  Synthetic oligonucleotide
gagcgagcaagaacagtacctgctgaagtcttgtatatgacacgacgagacgaca

SEQ ID NO: 399282 - DNA, 55 bp, Artificial
  Synthetic oligonucleotide
gagcgagcagacttgtctttacgtgacagatctagggcgggacgacagtggcgtg

SEQ ID NO: 399283 - DNA, 55 bp, Artificial
  Synthetic oligonucleotide
gagcgagcgctcatatcgagcattttcaagcccaagaaaatgatgcagatccttg

SEQ ID NO: 399284 - DNA, 60 bp, Artificial
  Synthetic oligonucleotide
gagcgagctcatcaatgtgattacgaagttaatgtttggcgtagaatcaagcagataatg

SEQ ID NO: 399285 - DNA, 55 bp, Artificial
  Synthetic oligonucleotide
gagcgagcttcagataaaattgctcaaggagtaataatcgcttatagagacatgc

SEQ ID NO: 399286 - DNA, 55 bp, Artificial
  Synthetic oligonucleotide
gagcgaggagaatcgataatcgtagaatctggggacccgaatgccctcttgaagc

SEQ ID NO: 399287 - DNA, 59 bp, Artificial
  Synthetic oligonucleotide
gagcgagggcgaagccagaatccgccactgtgcctctaccgagacgggctgttttgtgc

SEQ ID NO: 399288 - DNA, 56 bp, Artificial
  Synthetic oligonucleotide
gagcgaggtatgacggttgatggtttcgtctccattaaatgggtggacggaaacat

SEQ ID NO: 399289 - DNA, 55 bp, Artificial
  Synthetic oligonucleotide
gagcgagttagagttgggcagattctagccgtattgaatagaagatttgtcgcat

SEQ ID NO: 399290 - DNA, 60 bp, Artificial
  Synthetic oligonucleotide
gagcgataaaatcacacttgctagtagaggttatgagaatgtcaacacagtgcatgagat

SEQ ID NO: 399291 - DNA, 50 bp, Artificial
  Synthetic oligonucleotide
gagcgatactcgggtcccgcgtctcggatacgttcgagcgcaccaaacgt

SEQ ID NO: 399292 - DNA, 55 bp, Artificial
  Synthetic oligonucleotide
gagcgatatgcagactcaggctttccaagcacagcagtctcgcacacaacttctg

SEQ ID NO: 399293 - DNA, 55 bp, Artificial
  Synthetic oligonucleotide
gagcgatatggaaatgtctactcactggaagcccgagtccctgacgaagtgaacg

SEQ ID NO: 399294 - DNA, 58 bp, Artificial
  Synthetic oligonucleotide
gagcgatcgagcgtcccgtgggcgggtgccgtaggtgagtttacacaccgcagtcaag

SEQ ID NO: 399295 - DNA, 55 bp, Artificial
  Synthetic oligonucleotide
gagcgatgacaagattcaagcacaagccttgtattcagctcccggtttaacagca

SEQ ID NO: 399296 - DNA, 60 bp, Artificial
  Synthetic oligonucleotide
gagcgatgttttcgcgaccggaatagagtggttcctcgagtgtgatgaagactgcattct

SEQ ID NO: 399297 - DNA, 59 bp, Artificial
  Synthetic oligonucleotide
gagcgattacgtcgattaattgactttgattacggttggattgattatgcagttgtact

SEQ ID NO: 399298 - DNA, 51 bp, Artificial
  Synthetic oligonucleotide
gagcgcaacaggaacttttgctgggtgatatacaactggtgtgtccggagt

SEQ ID NO: 399299 - DNA, 55 bp, Artificial
  Synthetic oligonucleotide
gagcgcaagaccaacgccgttcacatatcggaggtttgaagtgggaatgctcacg

SEQ ID NO: 399300 - DNA, 55 bp, Artificial
  Synthetic oligonucleotide
gagcgcaatgggttcacaagatattagccaaggagtacagagaggtgcgcatggg

SEQ ID NO: 399301 - DNA, 57 bp, Artificial
  Synthetic oligonucleotide
gagcgcaatttattttcgaaatttgagttacagataagacacgtttatatatctaaa

SEQ ID NO: 399302 - DNA, 55 bp, Artificial
  Synthetic oligonucleotide
gagcgcacgcagaactatctaaaggtcgtcgtatccacatcgtagaccatcaagg

SEQ ID NO: 399303 - DNA, 60 bp, Artificial
  Synthetic oligonucleotide
gagcgcagtgtggcgactgcttgaccaaagaaccaaactcagggtcagcacactgcgaga

SEQ ID NO: 399304 - DNA, 60 bp, Artificial
  Synthetic oligonucleotide
gagcgcattgacgattgtccgcacgtgtcacgccctcaatgacctgcgttacttcatcag

SEQ ID NO: 399305 - DNA, 55 bp, Artificial
  Synthetic oligonucleotide
gagcgccaaattatgactgtagtatagttactgcgcgtatacaagatggttcggc

SEQ ID NO: 399306 - DNA, 51 bp, Artificial
  Synthetic oligonucleotide
gagcgccacatcagcagacgcggtcacaatcaattgtgtaccgtttaatct

SEQ ID NO: 399307 - DNA, 57 bp, Artificial
  Synthetic oligonucleotide
gagcgccaccctctgctcggccctatacgtgggggacctgtgcgggtctgtctttct

SEQ ID NO: 399308 - DNA, 54 bp, Artificial
  Synthetic oligonucleotide
gagcgccaccctgtgctcggccctctatataggagacttgtgcgggtcggtctt

SEQ ID NO: 399309 - DNA, 60 bp, Artificial
  Synthetic oligonucleotide
gagcgccatctgtggaagaattgtgtgcaaatcacaaggagtacacgcgcccaaccgact

SEQ ID NO: 399310 - DNA, 57 bp, Artificial
  Synthetic oligonucleotide
gagcgcccttgtaggtgagcacggtacgggtgtcgtcggggctgtgcacggtacgga

SEQ ID NO: 399311 - DNA, 60 bp, Artificial
  Synthetic oligonucleotide
gagcgccgagcctttcgtgaactcgcatcacagtcgcacctatactggacatgaggcacg

SEQ ID NO: 399312 - DNA, 55 bp, Artificial
  Synthetic oligonucleotide
gagcgccgtcactctgcttaatctgacaggcttcggtccgatctcttacgttcgc

SEQ ID NO: 399313 - DNA, 60 bp, Artificial
  Synthetic oligonucleotide
gagcgcctcaagcaaatttaccagtttgagtatgaggggctcctgcgccgtagcgcccta

SEQ ID NO: 399314 - DNA, 60 bp, Artificial
  Synthetic oligonucleotide
gagcgccttcgggcatctcgctggattcgagcggaggtgtggtggcgcctgccgtttcgg

SEQ ID NO: 399315 - DNA, 55 bp, Artificial
  Synthetic oligonucleotide
gagcgcgactaccgactttcggactttctgccgcctcgtgtctcgttgtcagtgc

SEQ ID NO: 399316 - DNA, 60 bp, Artificial
  Synthetic oligonucleotide
gagcgcgatgctttgatattacatgctagccagttagccatgacacttgcggctttaggg

SEQ ID NO: 399317 - DNA, 56 bp, Artificial
  Synthetic oligonucleotide
gagcgcgcacagacgaacgcaaagtttcaagttacagaaccgttaccgaaattgtc

SEQ ID NO: 399318 - DNA, 60 bp, Artificial
  Synthetic oligonucleotide
gagcgcgcatagcatcgtaaatgcctttgagtccgcacacagaaatatggtgcaagatct

SEQ ID NO: 399319 - DNA, 55 bp, Artificial
  Synthetic oligonucleotide
gagcgcgcctaatagcacgatacatacggcgaccattaaggccgacgcaaagccc

SEQ ID NO: 399320 - DNA, 59 bp, Artificial
  Synthetic oligonucleotide
gagcgcgctcattattggttcatcacaggcatccgtatatacgcctatcggtgacacct

SEQ ID NO: 399321 - DNA, 59 bp, Artificial
  Synthetic oligonucleotide
gagcgcgggctgaatttgccgccgcacggatcttgggaagtcgccctaatcattgacgg

SEQ ID NO: 399322 - DNA, 53 bp, Artificial
  Synthetic oligonucleotide
gagcgcgtagttgcaatccaaacacgggtacttggatattgagacacgtggac

SEQ ID NO: 399323 - DNA, 55 bp, Artificial
  Synthetic oligonucleotide
gagcgctaaacatccagtacccagccagaaacctgtagtctgtctcggcctatac

SEQ ID NO: 399324 - DNA, 56 bp, Artificial
  Synthetic oligonucleotide
gagcgctaccctctgttcggccctctacgtgggggacctatgcgggtctgtctttc

SEQ ID NO: 399325 - DNA, 55 bp, Artificial
  Synthetic oligonucleotide
gagcgctagtaagcagactatctcacattcctgcttcggctagacgtgttcttgg

SEQ ID NO: 399326 - DNA, 53 bp, Artificial
  Synthetic oligonucleotide
gagcgctgcaaactaaacccagatgaaatgatctctgaacctggtgacgggaa

SEQ ID NO: 399327 - DNA, 60 bp, Artificial
  Synthetic oligonucleotide
gagcgctgtgagaggggtctgaccaatgaacgttcgagtgtgcacgttcctagaccacgg

SEQ ID NO: 399328 - DNA, 58 bp, Artificial
  Synthetic oligonucleotide
gagcgctgtgagaggggtttgatcggtgaacgttcgagtgtgtacgtttctagaccac

SEQ ID NO: 399329 - DNA, 55 bp, Artificial
  Synthetic oligonucleotide
gagcgcttaatgtggtcagtaggaggtatctggcatcattgcataaggacgctct

SEQ ID NO: 399330 - DNA, 55 bp, Artificial
  Synthetic oligonucleotide
gagcgcttagtggatcggtacgatacagacattttcatcagttcaatacgttcgc

SEQ ID NO: 399331 - DNA, 55 bp, Artificial
  Synthetic oligonucleotide
gagcgcttgtccgcactgggatggatcccagaatgtgttccctaatgcaaggctc

SEQ ID NO: 399332 - DNA, 55 bp, Artificial
  Synthetic oligonucleotide
gagcggaaaactggttatgggtctggacaagatgagcagagtagcgaaggggaac

SEQ ID NO: 399333 - DNA, 57 bp, Artificial
  Synthetic oligonucleotide
gagcggaaattagttagttatgctaaaggtaaaccacttgaagctgatttaacagca

SEQ ID NO: 399334 - DNA, 60 bp, Artificial
  Synthetic oligonucleotide
gagcggaagatacgcagtgttagcgctggacgtgcactgtatatccctccctatgaagtg

SEQ ID NO: 399335 - DNA, 55 bp, Artificial
  Synthetic oligonucleotide
gagcggaagcgaaagtacagaaagctcctcagactggtcgagcgactaggaatcc

SEQ ID NO: 399336 - DNA, 57 bp, Artificial
  Synthetic oligonucleotide
gagcggaatctcaatcggaggagggctttctgcgagcgcgattgaagcagaagaagt

SEQ ID NO: 399337 - DNA, 60 bp, Artificial
  Synthetic oligonucleotide
gagcggaatggcacacgcattaccaatccgagctttgaaataggaaggcccagtctgacg

SEQ ID NO: 399338 - DNA, 60 bp, Artificial
  Synthetic oligonucleotide
gagcggaccatctatgaagcataggttaacacaactgcgcgacgtcattaaatcaagcta

SEQ ID NO: 399339 - DNA, 57 bp, Artificial
  Synthetic oligonucleotide
gagcggagctctttacctagtcatggctccggctaacggagctgtctttgtagcccg

SEQ ID NO: 399340 - DNA, 60 bp, Artificial
  Synthetic oligonucleotide
gagcggaggaaacaccaaccaacagagagcatctgcaggacaaatcagtgtacaacctac

SEQ ID NO: 399341 - DNA, 50 bp, Artificial
  Synthetic oligonucleotide
gagcggataccgcagtcgcgcccgctgtttcagatctccttgtccgagcc

SEQ ID NO: 399342 - DNA, 58 bp, Artificial
  Synthetic oligonucleotide
gagcggattcaaagattaggacgagttggaagacttaaagatgggcatgcactaagaa

SEQ ID NO: 399343 - DNA, 55 bp, Artificial
  Synthetic oligonucleotide
gagcggattcttaacacttatctgggacgacctgtggagcctgtgcctcttcagt

SEQ ID NO: 399344 - DNA, 55 bp, Artificial
  Synthetic oligonucleotide
gagcggattcttagcacttgcctgggaagatctgcggaacctgtgccttttcggc

SEQ ID NO: 399345 - DNA, 55 bp, Artificial
  Synthetic oligonucleotide
gagcggattcttagcacttgcctgggacgatctacggagcctgtgcctttggagc

SEQ ID NO: 399346 - DNA, 55 bp, Artificial
  Synthetic oligonucleotide
gagcggattttgcgacaggaacaggatataatggatgggccacaatagatgttga

SEQ ID NO: 399347 - DNA, 60 bp, Artificial
  Synthetic oligonucleotide
gagcggcacaggatttcaaattcattacacatgctggatggaagttatacccaagattgt

SEQ ID NO: 399348 - DNA, 58 bp, Artificial
  Synthetic oligonucleotide
gagcggcataaggacgacagcaggggtcttgtgcttcctgggtacaagtacctcggac

SEQ ID NO: 399349 - DNA, 60 bp, Artificial
  Synthetic oligonucleotide
gagcggctactgaagataagatccaagacggtgatgtggtagttgccatcgacatcgatt

SEQ ID NO: 399350 - DNA, 59 bp, Artificial
  Synthetic oligonucleotide
gagcggctgcctatcagtgcatgacaaggcatcgaacggctctgcacatcttgtgtcct

SEQ ID NO: 399351 - DNA, 54 bp, Artificial
  Synthetic oligonucleotide
gagcgggaaaggaaaatgggtgcgagtaactcagtcttaagtggtaggaaacta

SEQ ID NO: 399352 - DNA, 60 bp, Artificial
  Synthetic oligonucleotide
gagcgggacagatgttgaatgtgtctgtagggacaattggcggggaagcaatcgaccatg

SEQ ID NO: 399353 - DNA, 58 bp, Artificial
  Synthetic oligonucleotide
gagcgggaggctcgatagttttatgtgggaggagcgtgaagctcgaagttccgagagg

SEQ ID NO: 399354 - DNA, 60 bp, Artificial
  Synthetic oligonucleotide
gagcgggcagcagaactttgactggccggacaattcaatgcccagcttaattacttccaa

SEQ ID NO: 399355 - DNA, 54 bp, Artificial
  Synthetic oligonucleotide
gagcgggccggacaacggttgcggggtggttcgattccacatttcgctattagt

SEQ ID NO: 399356 - DNA, 54 bp, Artificial
  Synthetic oligonucleotide
gagcggggaatacactgtttctcgttcggttaattggggagatcctgaatttct

SEQ ID NO: 399357 - DNA, 60 bp, Artificial
  Synthetic oligonucleotide
gagcggggatataagagctgaaatcgaaagcgctggagtcactgcgagcctggctgcgag

SEQ ID NO: 399358 - DNA, 60 bp, Artificial
  Synthetic oligonucleotide
gagcgggttagggccattggctgccactttgttctcttgctcacggcagccccggagcca

SEQ ID NO: 399359 - DNA, 55 bp, Artificial
  Synthetic oligonucleotide
gagcggtaagaaggcgtcgcactacagaaatctgttcatggaagcgtggcgtggg

SEQ ID NO: 399360 - DNA, 55 bp, Artificial
  Synthetic oligonucleotide
gagcggtaccttatcgagcagttggtaccgctccacaacgtgcagcacaaccggc

SEQ ID NO: 399361 - DNA, 55 bp, Artificial
  Synthetic oligonucleotide
gagcggtagcaaatagcatgagggaggcgccaaactctcgacagggcactcccca

SEQ ID NO: 399362 - DNA, 60 bp, Artificial
  Synthetic oligonucleotide
gagcggtatgcagttttctgggctaccgagaaaggttgtgagtatccattactggataga

SEQ ID NO: 399363 - DNA, 60 bp, Artificial
  Synthetic oligonucleotide
gagcggtatgcggaaccattgcccaccatagtcaaccaaggcttgtgtgatgtgaaaact

SEQ ID NO: 399364 - DNA, 51 bp, Artificial
  Synthetic oligonucleotide
gagcggtcccccttagttccccattgggccttagggtagagtgggcaggcc

SEQ ID NO: 399365 - DNA, 52 bp, Artificial
  Synthetic oligonucleotide
gagcggtcgcaacctcgtggtagacgccagcctatccccaaggcacgtcggc

SEQ ID NO: 399366 - DNA, 60 bp, Artificial
  Synthetic oligonucleotide
gagcggtcgcagcctagaggcagacgtcagcctattcccaaggcacgtcggcccgagggc

SEQ ID NO: 399367 - DNA, 60 bp, Artificial
  Synthetic oligonucleotide
gagcggtgatcgatggcttcttggtgggtcccattgctggtattgacttgatttgactta

SEQ ID NO: 399368 - DNA, 60 bp, Artificial
  Synthetic oligonucleotide
gagcggtgttcataggtctggcactcttgaccttgtcaccacactataaattgctcctcg

SEQ ID NO: 399369 - DNA, 60 bp, Artificial
  Synthetic oligonucleotide
gagcggttatgctcaaacagactgtgtgttggaggcaatggctttccttgaggagtccca

SEQ ID NO: 399370 - DNA, 60 bp, Artificial
  Synthetic oligonucleotide
gagcggtttgctgagagtgagatcggatcagccgcaatcgatgggctagttcaaggcagt

SEQ ID NO: 399371 - DNA, 60 bp, Artificial
  Synthetic oligonucleotide
gagcggtttttcgctgcatttgatttggaagcacctcagtatgaggtattgccgatgcag

SEQ ID NO: 399372 - DNA, 55 bp, Artificial
  Synthetic oligonucleotide
gagcgtaaagttattttgcgtaagctatctataactaagagtggcccgttgcctg

SEQ ID NO: 399373 - DNA, 55 bp, Artificial
  Synthetic oligonucleotide
gagcgtaacgcagaaatctctgcttgcaacgctcgagctttgagtgagggaagac

SEQ ID NO: 399374 - DNA, 59 bp, Artificial
  Synthetic oligonucleotide
gagcgtacacaggattgcctaaccagaagcccaaagtacccactctcagacaggcgaaa

SEQ ID NO: 399375 - DNA, 55 bp, Artificial
  Synthetic oligonucleotide
gagcgtacactatggtcagatttacatcgcttaggtgcggaaattagtgcgtcag

SEQ ID NO: 399376 - DNA, 58 bp, Artificial
  Synthetic oligonucleotide
gagcgtacagggtgattaaaaatgacgaagtatttgaggctggaactgatggcttgtt

SEQ ID NO: 399377 - DNA, 55 bp, Artificial
  Synthetic oligonucleotide
gagcgtaccagtagggcgctgcctgaccttacctgcgttctcaactctgcgcagg

SEQ ID NO: 399378 - DNA, 55 bp, Artificial
  Synthetic oligonucleotide
gagcgtaccgtgtaattaaagatgatgaagtgctagaggctagtactgatggtaa

SEQ ID NO: 399379 - DNA, 55 bp, Artificial
  Synthetic oligonucleotide
gagcgtacggttcaacccctgcctcctctgtaaaattaccctagttgtggtgatc

SEQ ID NO: 399380 - DNA, 53 bp, Artificial
  Synthetic oligonucleotide
gagcgtacggttcaatccctgcctcctctgtaaaattccctagacttttagtt

SEQ ID NO: 399381 - DNA, 60 bp, Artificial
  Synthetic oligonucleotide
gagcgtactctacacgctccgattctatgtatcctccgactccaagacccatgttatcat

SEQ ID NO: 399382 - DNA, 55 bp, Artificial
  Synthetic oligonucleotide
gagcgtagtatacgtgatttacaggatcagataaattcaattctcgctgagatga

SEQ ID NO: 399383 - DNA, 60 bp, Artificial
  Synthetic oligonucleotide
gagcgtatgagagacattcttgaagttgttcgtggatctaaaaattcgtatgcttggcgt

SEQ ID NO: 399384 - DNA, 51 bp, Artificial
  Synthetic oligonucleotide
gagcgtatgctcatactagcctcacagttctccaagcgtcccctcctgatc

SEQ ID NO: 399385 - DNA, 57 bp, Artificial
  Synthetic oligonucleotide
gagcgtcaataaaatcgcccgttgatatttggataggtggtgaaaatatgaccgccc

SEQ ID NO: 399386 - DNA, 55 bp, Artificial
  Synthetic oligonucleotide
gagcgtcaatcgcactatccgataacatggtgtattcacgttcacccgacaggtc

SEQ ID NO: 399387 - DNA, 57 bp, Artificial
  Synthetic oligonucleotide
gagcgtcagcgtaagaagtcttctggtaaaggagatgggaaccggcagcgtaaaaca

SEQ ID NO: 399388 - DNA, 60 bp, Artificial
  Synthetic oligonucleotide
gagcgtcattccaatgatgttggtgacgcgaacaaggtttacagacgtagactagatttg

SEQ ID NO: 399389 - DNA, 56 bp, Artificial
  Synthetic oligonucleotide
gagcgtcccgtgggcgggtgccgtaggtgagtttacacaccgcagtcaaggggcaa

SEQ ID NO: 399390 - DNA, 60 bp, Artificial
  Synthetic oligonucleotide
gagcgtccctcaggtgttgtgtgctgttactcgaacagtttctaccgatgctgaagggtc

SEQ ID NO: 399391 - DNA, 51 bp, Artificial
  Synthetic oligonucleotide
gagcgtccgttaaagcctaataaaatactggtccccgtacgtcttttagta

SEQ ID NO: 399392 - DNA, 53 bp, Artificial
  Synthetic oligonucleotide
gagcgtcctcgatgagaaccactgctactggggctcgatcaccgagaccgatg

SEQ ID NO: 399393 - DNA, 58 bp, Artificial
  Synthetic oligonucleotide
gagcgtcctggcgagattcaactgcttgtccgacggggcctggtacttccgccacgac

SEQ ID NO: 399394 - DNA, 55 bp, Artificial
  Synthetic oligonucleotide
gagcgtcgctttgttggatcacatagacatattagaagccgtgaaggtgaataca

SEQ ID NO: 399395 - DNA, 55 bp, Artificial
  Synthetic oligonucleotide
gagcgtcggacgccaaccaagagccggtggttaccgtccaagacgagagcgggga

SEQ ID NO: 399396 - DNA, 53 bp, Artificial
  Synthetic oligonucleotide
gagcgtcgggagacccctatatattggtaaaccatgggggcggggtaagagtc

SEQ ID NO: 399397 - DNA, 58 bp, Artificial
  Synthetic oligonucleotide
gagcgtgacgtttgttttttaccttgtggtcatgtggtagcttgtgctacttgtgcgt

SEQ ID NO: 399398 - DNA, 59 bp, Artificial
  Synthetic oligonucleotide
gagcgtgagaatgccattgcttactgttaccctggggcgaccgtaaatgaagaggcact

SEQ ID NO: 399399 - DNA, 55 bp, Artificial
  Synthetic oligonucleotide
gagcgtgagttttcaaacaaggaacttaaaaccaatggctatccagatttgcagc

SEQ ID NO: 399400 - DNA, 60 bp, Artificial
  Synthetic oligonucleotide
gagcgtgatctgcaatcaaagattgaatcagtcgtttcgtcaatagaatggtatttacgt

SEQ ID NO: 399401 - DNA, 60 bp, Artificial
  Synthetic oligonucleotide
gagcgtgggagtcatacaatggcggctgtttgtcgaacgttggagactctgtatataaaa

SEQ ID NO: 399402 - DNA, 55 bp, Artificial
  Synthetic oligonucleotide
gagcgtgtaaattccaataaacagcgaaagaaacatggaattgaacgtgggcgcg

SEQ ID NO: 399403 - DNA, 55 bp, Artificial
  Synthetic oligonucleotide
gagcgtgtagtgggcgatttccctgttaagattgtggtgtatggcgcgcaagtca

SEQ ID NO: 399404 - DNA, 55 bp, Artificial
  Synthetic oligonucleotide
gagcgtgtcgcatggaaatcgtattacagaaatggggtaattcacaagggataag

SEQ ID NO: 399405 - DNA, 55 bp, Artificial
  Synthetic oligonucleotide
gagcgtgtctacgtttaatttaacgagtcaacatgcttttgaacctaacgctgcg

SEQ ID NO: 399406 - DNA, 55 bp, Artificial
  Synthetic oligonucleotide
gagcgtgtggtagtacttctacctatgcatcggaatacggcgccaagatgggccg

SEQ ID NO: 399407 - DNA, 55 bp, Artificial
  Synthetic oligonucleotide
gagcgtgtgtcgactctccaaactgctgataataatcgacgagtgagagtgaacg

SEQ ID NO: 399408 - DNA, 55 bp, Artificial
  Synthetic oligonucleotide
gagcgtgttcatgctgatgtgaatatggatggtttatcacctaagattgaaggcg

SEQ ID NO: 399409 - DNA, 55 bp, Artificial
  Synthetic oligonucleotide
gagcgtgttctatctgctcccgtaatcgatgctgagtcccctgggtctagcactg

SEQ ID NO: 399410 - DNA, 60 bp, Artificial
  Synthetic oligonucleotide
gagcgttaagtatgataaaagatgctccaataccaggagcagaaacatggtatatagatg

SEQ ID NO: 399411 - DNA, 54 bp, Artificial
  Synthetic oligonucleotide
gagcgttagttggtagatattctttaaacttagacgccaccttgtaatttaaga

SEQ ID NO: 399412 - DNA, 60 bp, Artificial
  Synthetic oligonucleotide
gagcgttcattcaaatcccagtgctaatgaaaggtggatcaaatcgtattataggtccta

SEQ ID NO: 399413 - DNA, 58 bp, Artificial
  Synthetic oligonucleotide
gagcgttctaaactgtccttctcaacgttggatgatatgagcgagtaccttacggaag

SEQ ID NO: 399414 - DNA, 55 bp, Artificial
  Synthetic oligonucleotide
gagcgttggtaccgactcaaccgatcgtacaaacggggactccctgataccgagc

SEQ ID NO: 399415 - DNA, 54 bp, Artificial
  Synthetic oligonucleotide
gagcgtttcgctgagttctctgatgacactccgcgtgcactgcgtggtgcgtct

SEQ ID NO: 399416 - DNA, 55 bp, Artificial
  Synthetic oligonucleotide
gagcgttttcgcatctagcttccaaattaatcgaaacggaggttgacccatccga

SEQ ID NO: 399417 - DNA, 60 bp, Artificial
  Synthetic oligonucleotide
gagcgttttgctgaaagtgagattggttcggccgcgattgatggactggttcaaggaagc

SEQ ID NO: 399418 - DNA, 58 bp, Artificial
  Synthetic oligonucleotide
gagctaaactataataaccagaacaggacaaatgtaacattgagtccccagatagaaa

SEQ ID NO: 399419 - DNA, 50 bp, Artificial
  Synthetic oligonucleotide
gagctaaagatttaactctatgcgcttctcaacgcagaaaagatagtgag

SEQ ID NO: 399420 - DNA, 55 bp, Artificial
  Synthetic oligonucleotide
gagctaaatgcagttggtttcagaacactcaaacataaatctctccacatcatgg

SEQ ID NO: 399421 - DNA, 55 bp, Artificial
  Synthetic oligonucleotide
gagctaaattatgttctctgggaaggaggacatgacctcactgtggtggccgggg

SEQ ID NO: 399422 - DNA, 59 bp, Artificial
  Synthetic oligonucleotide
gagctaaattccggtatacaaattgctcactaggagcccatccgatcccacagggagta

SEQ ID NO: 399423 - DNA, 55 bp, Artificial
  Synthetic oligonucleotide
gagctaacacaccagattcgcagattttaccaatgggttcttgaacaagctccgt

SEQ ID NO: 399424 - DNA, 55 bp, Artificial
  Synthetic oligonucleotide
gagctaacactgacagaatctatggatgttgtttcctttaaactgccaccccaat

SEQ ID NO: 399425 - DNA, 54 bp, Artificial
  Synthetic oligonucleotide
gagctaactccgggagctaccatcccgttcctcctaggtgtactatgctgtgtc

SEQ ID NO: 399426 - DNA, 55 bp, Artificial
  Synthetic oligonucleotide
gagctaagattagaggttggcaagcaaagactaaagtatgctcaggaagaactgt

SEQ ID NO: 399427 - DNA, 60 bp, Artificial
  Synthetic oligonucleotide
gagctaaggaatctgatgtcacaatctcgcactcgcgagatacttaccaaaactactgta

SEQ ID NO: 399428 - DNA, 60 bp, Artificial
  Synthetic oligonucleotide
gagctaaggaatctgatgtcgcagtctcgcactcgcgagatactcacaaaaaccaccgta

SEQ ID NO: 399429 - DNA, 53 bp, Artificial
  Synthetic oligonucleotide
gagctaaggcactaacagatgtagtaccattgactgaggaagcagaattagaa

SEQ ID NO: 399430 - DNA, 57 bp, Artificial
  Synthetic oligonucleotide
gagctaaggcttcttctttggatagtgagcaattgggatatgttaagaaatagtttt

SEQ ID NO: 399431 - DNA, 55 bp, Artificial
  Synthetic oligonucleotide
gagctaagtccgcggttatcggcagtgcatataacgcctgagagagcatctaagc

SEQ ID NO: 399432 - DNA, 60 bp, Artificial
  Synthetic oligonucleotide
gagctaatagataagatcacagttgactacaaagagagaattgcaaattacaacacttgg

SEQ ID NO: 399433 - DNA, 60 bp, Artificial
  Synthetic oligonucleotide
gagctaatcagagggcggcccaaagagaacacaatttggactagtgggagcagcatatcc

SEQ ID NO: 399434 - DNA, 57 bp, Artificial
  Synthetic oligonucleotide
gagctaatctcttggctaactttgtacccggaccgcagtactgataacctggtatgt

SEQ ID NO: 399435 - DNA, 52 bp, Artificial
  Synthetic oligonucleotide
gagctaattggaaagcgccataagcgcagtacacaattagctatcaagcgat

SEQ ID NO: 399436 - DNA, 59 bp, Artificial
  Synthetic oligonucleotide
gagctacaactaagagtggtagcagctgggaaatggtgcattatagtgcggggtacggt

SEQ ID NO: 399437 - DNA, 55 bp, Artificial
  Synthetic oligonucleotide
gagctacaattattaggccaacattcaggtgatgcaaccatagtgcaaggcactg

SEQ ID NO: 399438 - DNA, 53 bp, Artificial
  Synthetic oligonucleotide
gagctacaggggcctgaggacctcgcggtagagctagtgccagtagtgatggg

SEQ ID NO: 399439 - DNA, 55 bp, Artificial
  Synthetic oligonucleotide
gagctacatccggagttttacaaagactgctgacacaggagttgctgactgggac

SEQ ID NO: 399440 - DNA, 60 bp, Artificial
  Synthetic oligonucleotide
gagctacccagctttggggtgtctgggattaatgaatcggctgatatgagcattggagtg

SEQ ID NO: 399441 - DNA, 56 bp, Artificial
  Synthetic oligonucleotide
gagctacccccaactagggaacaatttgaatatcaggaacaagttaggctgaggcg

SEQ ID NO: 399442 - DNA, 55 bp, Artificial
  Synthetic oligonucleotide
gagctacgaaatctcatgcgtttggacggattttcacatgtcgaaaggaaacaca

SEQ ID NO: 399443 - DNA, 54 bp, Artificial
  Synthetic oligonucleotide
gagctacgcatgtacccgggccctatgccagggtactgtacgtcgtcgtggacc

SEQ ID NO: 399444 - DNA, 52 bp, Artificial
  Synthetic oligonucleotide
gagctactagggcaggaggcacaagtcgagatccccagttggtttggtgcag

SEQ ID NO: 399445 - DNA, 55 bp, Artificial
  Synthetic oligonucleotide
gagctagaatgcgagggattgaagctagggctgggcgaattagggagggtgatgg

SEQ ID NO: 399446 - DNA, 55 bp, Artificial
  Synthetic oligonucleotide
gagctagagtttcattgcaagtaggcgatgacttaaggtctatgcaggacgtgtc

SEQ ID NO: 399447 - DNA, 55 bp, Artificial
  Synthetic oligonucleotide
gagctagatatgtctgaattagctgattcaattttaaatgatcggttatgtaacc

SEQ ID NO: 399448 - DNA, 60 bp, Artificial
  Synthetic oligonucleotide
gagctagccatgtctacactagccatgctcgctgcaactgacgccgactgggggagtatt

SEQ ID NO: 399449 - DNA, 55 bp, Artificial
  Synthetic oligonucleotide
gagctagtacttcatgtcgacatcgagcaccaacgcattcccacatctggggtgc

SEQ ID NO: 399450 - DNA, 59 bp, Artificial
  Synthetic oligonucleotide
gagctagtatctgagacattgtgagaccagaaggcatcccgtgtccggcccctttgggt

SEQ ID NO: 399451 - DNA, 51 bp, Artificial
  Synthetic oligonucleotide
gagctagtatgctaagtatgaaagccatgggtttgattgaaatgggtaaac

SEQ ID NO: 399452 - DNA, 55 bp, Artificial
  Synthetic oligonucleotide
gagctagtccaaagctcttcaacagggaaaatatgcaacaaccctcataggatcc

SEQ ID NO: 399453 - DNA, 55 bp, Artificial
  Synthetic oligonucleotide
gagctagtccctgcagtgaaaatggagaacaatagaggtcttctggctaggaatg

SEQ ID NO: 399454 - DNA, 54 bp, Artificial
  Synthetic oligonucleotide
gagctagtgcatttgttattcaagacgaactgatgcaaaaaaaccatgcaaaag

SEQ ID NO: 399455 - DNA, 60 bp, Artificial
  Synthetic oligonucleotide
gagctagttagtagtcctccggcccctgaatgcggctaatcctaactgcggagcacatgc

SEQ ID NO: 399456 - DNA, 60 bp, Artificial
  Synthetic oligonucleotide
gagctagttccagttgaccatgaaagtaactccatgtttagaggattgcgcgactacaat

SEQ ID NO: 399457 - DNA, 56 bp, Artificial
  Synthetic oligonucleotide
gagctatacgaagaattaaagcgtttgaccgcatagactctgcttagctatcggct

SEQ ID NO: 399458 - DNA, 55 bp, Artificial
  Synthetic oligonucleotide
gagctatacgctcagtgctcaaggacggtgaaccccatataagcagtgcaaaggt

SEQ ID NO: 399459 - DNA, 58 bp, Artificial
  Synthetic oligonucleotide
gagctatatacctagagaatttacaggtactggagaagtatctagtaaagcataagtg

SEQ ID NO: 399460 - DNA, 60 bp, Artificial
  Synthetic oligonucleotide
gagctatatggtacatgtggttgggagccaggtaccttgagttcgaagcactcggattct

SEQ ID NO: 399461 - DNA, 60 bp, Artificial
  Synthetic oligonucleotide
gagctatattgctcttgactcaggccgtggaaactgggactgtattatgactagctatca

SEQ ID NO: 399462 - DNA, 55 bp, Artificial
  Synthetic oligonucleotide
gagctatcctgcacatacctacaagaataagacaaggcttcgaaagggctttgct

SEQ ID NO: 399463 - DNA, 60 bp, Artificial
  Synthetic oligonucleotide
gagctatcggtgctcgagaatctcgattcttttgacttagaggcgtttaagactttgtgc

SEQ ID NO: 399464 - DNA, 55 bp, Artificial
  Synthetic oligonucleotide
gagctatctcaaatatggtttaacaatgagtggagtgggtctgtgaagacctggc

SEQ ID NO: 399465 - DNA, 55 bp, Artificial
  Synthetic oligonucleotide
gagctatctccaacatacctacaagaatcagacagggccttgaaatagctttgca

SEQ ID NO: 399466 - DNA, 55 bp, Artificial
  Synthetic oligonucleotide
gagctatctccttcgtcttaaacgcaacgattcaggtctcctccatccgaacatg

SEQ ID NO: 399467 - DNA, 60 bp, Artificial
  Synthetic oligonucleotide
gagctatgctacctagcttcattcaagctctaaatgcacccacaacgcgtctccgaatca

SEQ ID NO: 399468 - DNA, 56 bp, Artificial
  Synthetic oligonucleotide
gagctatggattttactgctttacaagacactaaaagtaatgttcctttggacatt

SEQ ID NO: 399469 - DNA, 55 bp, Artificial
  Synthetic oligonucleotide
gagctatggccagtgatttcaatctaccaccagtagtagccaaagaaatagtcgc

SEQ ID NO: 399470 - DNA, 57 bp, Artificial
  Synthetic oligonucleotide
gagctatggcggttcagcctcgtaactttgctaaaccaatgcggggcggaatacggc

SEQ ID NO: 399471 - DNA, 60 bp, Artificial
  Synthetic oligonucleotide
gagctattactccatctactgcctgctgacaaatggttttttgatttctggactctacaa

SEQ ID NO: 399472 - DNA, 58 bp, Artificial
  Synthetic oligonucleotide
gagctattgacttatgtaaacaggtctgttaagattagctatgagataagtgtgctag

SEQ ID NO: 399473 - DNA, 55 bp, Artificial
  Synthetic oligonucleotide
gagctatttacatggccggctttgctgtgtgccatgttcttggccggtgtatgcg

SEQ ID NO: 399474 - DNA, 60 bp, Artificial
  Synthetic oligonucleotide
gagctatttccaacagcggaagagtacactgattcactaatggatccagcgattctaaca

SEQ ID NO: 399475 - DNA, 55 bp, Artificial
  Synthetic oligonucleotide
gagctatttggcccttatgcatctgcgtatgcaaacatgcatttgctagattcgc

SEQ ID NO: 399476 - DNA, 58 bp, Artificial
  Synthetic oligonucleotide
gagctattttcgagtgttgaggaggactatgtcgttgggcagcgtgtgtttttcgaag

SEQ ID NO: 399477 - DNA, 55 bp, Artificial
  Synthetic oligonucleotide
gagctcaagagaggccgcaacacggcaggtggtacctctacttattataacctgg

SEQ ID NO: 399478 - DNA, 55 bp, Artificial
  Synthetic oligonucleotide
gagctcaagagtcctacaaagcgccacttggtcattggaacatctggtgacccga

SEQ ID NO: 399479 - DNA, 55 bp, Artificial
  Synthetic oligonucleotide
gagctcaaggagatgccacctggttggtgagtgtcacaagaatagatgtcagtct

SEQ ID NO: 399480 - DNA, 60 bp, Artificial
  Synthetic oligonucleotide
gagctcaataatgaaatcagacgcacctatcgacacttgtgtttctgagtgtatcactcc

SEQ ID NO: 399481 - DNA, 55 bp, Artificial
  Synthetic oligonucleotide
gagctcaatatctccgtatgtctctctagtaacgagaagaaggagttgtgcgaag

SEQ ID NO: 399482 - DNA, 54 bp, Artificial
  Synthetic oligonucleotide
gagctcaatgtcctggagtcgcacaaaggccttgttgagtagctctacacgagc

SEQ ID NO: 399483 - DNA, 55 bp, Artificial
  Synthetic oligonucleotide
gagctcacaggatggcgctggaagagctcccggacgcgctacagacggttgccct

SEQ ID NO: 399484 - DNA, 60 bp, Artificial
  Synthetic oligonucleotide
gagctcacctatcttgccaaagacgatgtctttggctgtgggcgctctgccctcaaaagg

SEQ ID NO: 399485 - DNA, 55 bp, Artificial
  Synthetic oligonucleotide
gagctcagacgcgcacaggttgcttggattaatgagtgtaacttgaaagtacccg

SEQ ID NO: 399486 - DNA, 55 bp, Artificial
  Synthetic oligonucleotide
gagctcaggggtcccagggttgacagtaaaacacatagcagctactactaaggga

SEQ ID NO: 399487 - DNA, 55 bp, Artificial
  Synthetic oligonucleotide
gagctcaggtgtggaagtggggtgtttatacacaatgacgttgaggcatgggtgg

SEQ ID NO: 399488 - DNA, 60 bp, Artificial
  Synthetic oligonucleotide
gagctcatctattgaactggggatttactacacctgacaaaaagcatcagaaggaacctc

SEQ ID NO: 399489 - DNA, 58 bp, Artificial
  Synthetic oligonucleotide
gagctcatctgagtctatccagaattggactcaaggattcttggataaagtgtcaacg

SEQ ID NO: 399490 - DNA, 55 bp, Artificial
  Synthetic oligonucleotide
gagctcatcttttgacagtccacccactctcaggacattgtccttctgtgttgtc

SEQ ID NO: 399491 - DNA, 51 bp, Artificial
  Synthetic oligonucleotide
gagctcatgcacaaagatctgaccccgactggccactggatagaatcttcc

SEQ ID NO: 399492 - DNA, 60 bp, Artificial
  Synthetic oligonucleotide
gagctcatggcccaaccacaccgtaaccggagtatcagcatcatgctcccataatgggaa

SEQ ID NO: 399493 - DNA, 53 bp, Artificial
  Synthetic oligonucleotide
gagctcattccgcccagagaacattttctcgaatttagattggaaaggcagtg

SEQ ID NO: 399494 - DNA, 60 bp, Artificial
  Synthetic oligonucleotide
gagctccatcctgataagtggacagtgcagccaatacagttaccacagaaagagacctgg

SEQ ID NO: 399495 - DNA, 55 bp, Artificial
  Synthetic oligonucleotide
gagctcccagctctatataaggactcattgtatcagttgcaagcatgcaagtcac

SEQ ID NO: 399496 - DNA, 60 bp, Artificial
  Synthetic oligonucleotide
gagctccccctgaagccaaatccactgacgttgttcaatttgcaattgatcttataggtg

SEQ ID NO: 399497 - DNA, 56 bp, Artificial
  Synthetic oligonucleotide
gagctccggctcagtgaggggattaacgacccccagtaaaggctggtcttggcgga

SEQ ID NO: 399498 - DNA, 55 bp, Artificial
  Synthetic oligonucleotide
gagctcctagccaagttgatggcacaaggactatccaatggaacggtggtactcg

SEQ ID NO: 399499 - DNA, 59 bp, Artificial
  Synthetic oligonucleotide
gagctcctccattgcgggtagcgtaccaacatgggaaattgcgactaagaaagatctaa

SEQ ID NO: 399500 - DNA, 60 bp, Artificial
  Synthetic oligonucleotide
gagctcctgcaattttgacctgcacactagcacagcaacccagcaatcattcacaaggtg

SEQ ID NO: 399501 - DNA, 55 bp, Artificial
  Synthetic oligonucleotide
gagctcctgtataagttccgtgacagtatcagatctagtgtaagggagatagcaa

SEQ ID NO: 399502 - DNA, 60 bp, Artificial
  Synthetic oligonucleotide
gagctcgaaaaatgtatcaagcaggcatgcaaaataaaagttcgactcagaggggagcac

SEQ ID NO: 399503 - DNA, 60 bp, Artificial
  Synthetic oligonucleotide
gagctcgaatacttaatgatgcagatcccctatggttcaacgacatacgatatcggggga

SEQ ID NO: 399504 - DNA, 56 bp, Artificial
  Synthetic oligonucleotide
gagctcgaatcctacgctgccagtcagccataatcggctggtgctaatgtggttag

SEQ ID NO: 399505 - DNA, 57 bp, Artificial
  Synthetic oligonucleotide
gagctcgatatcaaacttagtgctaaatgcggccttaggatttccgacgggaattta

SEQ ID NO: 399506 - DNA, 55 bp, Artificial
  Synthetic oligonucleotide
gagctcgatgaacttatggagaactttgaaaccacctctaaatcactgctgagcg

SEQ ID NO: 399507 - DNA, 60 bp, Artificial
  Synthetic oligonucleotide
gagctcgcgtcatatgagcagagacgtggcgacttccggttttaatttaccttatcatgg

SEQ ID NO: 399508 - DNA, 60 bp, Artificial
  Synthetic oligonucleotide
gagctcgcgttatatgagcagagacgtggcaacatccggttttaatttaccctttcatca

SEQ ID NO: 399509 - DNA, 55 bp, Artificial
  Synthetic oligonucleotide
gagctcggtacccggttttcactccgtgcacgattccattcactatctattgagc

SEQ ID NO: 399510 - DNA, 53 bp, Artificial
  Synthetic oligonucleotide
gagctcgtttgaagtacgccttgtagtcctcgtatgagagtaggtcacgtagt

SEQ ID NO: 399511 - DNA, 55 bp, Artificial
  Synthetic oligonucleotide
gagctcgtttgggtcgaagacggaagcgagtttagccccggctttgctcccgcag

SEQ ID NO: 399512 - DNA, 60 bp, Artificial
  Synthetic oligonucleotide
gagctctacggcactgtgattgctctggactcatacattagagatttggcccagcgacat

SEQ ID NO: 399513 - DNA, 55 bp, Artificial
  Synthetic oligonucleotide
gagctctaggaaagtctgcagagaaagcatccattgctcttcctgtcacaggtaa

SEQ ID NO: 399514 - DNA, 55 bp, Artificial
  Synthetic oligonucleotide
gagctctaggcacagtactaattacagagacagcacaggtaaaatgttgacaggg

SEQ ID NO: 399515 - DNA, 55 bp, Artificial
  Synthetic oligonucleotide
gagctctatctaactacaagcgagtgcctctgcctaagtgtatgctatcaacttc

SEQ ID NO: 399516 - DNA, 53 bp, Artificial
  Synthetic oligonucleotide
gagctctatggtgtattttccgaaccggtttcatttaattgggccggtgttgg

SEQ ID NO: 399517 - DNA, 55 bp, Artificial
  Synthetic oligonucleotide
gagctctcaagactggatgataatagctgtcatagtcccatcacaattaggcggg

SEQ ID NO: 399518 - DNA, 55 bp, Artificial
  Synthetic oligonucleotide
gagctctcctccaaaacctattgtttctggtgtcttggtgtcctataaatactaa

SEQ ID NO: 399519 - DNA, 51 bp, Artificial
  Synthetic oligonucleotide
gagctctcgaaagtgaaatagctcaccaagtcgcagagagttactccaaaa

SEQ ID NO: 399520 - DNA, 60 bp, Artificial
  Synthetic oligonucleotide
gagctctgcatcagggttttgcattcaggcagttcccacaagagatttagacattgcgga

SEQ ID NO: 399521 - DNA, 60 bp, Artificial
  Synthetic oligonucleotide
gagctctgctcggaataggagtagacacagcgatggggggagatgctaggagttagagga

SEQ ID NO: 399522 - DNA, 55 bp, Artificial
  Synthetic oligonucleotide
gagctctggaagaaagttatattgtaacaactcttcagcagtcaccggatgactg

SEQ ID NO: 399523 - DNA, 60 bp, Artificial
  Synthetic oligonucleotide
gagctctggactgctgcctcacagattggtcaagctacggtagttaactacgtccagcta

SEQ ID NO: 399524 - DNA, 60 bp, Artificial
  Synthetic oligonucleotide
gagctctgtatatgtgcattgcccctggcaatggacttacattcactgcccatgggcaga

SEQ ID NO: 399525 - DNA, 55 bp, Artificial
  Synthetic oligonucleotide
gagctcttcaaggcataggtaacgttttgtctaatactgcccagggaatatttgg

SEQ ID NO: 399526 - DNA, 60 bp, Artificial
  Synthetic oligonucleotide
gagctcttcggtgcaaggatccacagccatgggaacctatctattactccttcattgaag

SEQ ID NO: 399527 - DNA, 59 bp, Artificial
  Synthetic oligonucleotide
gagctctttcatacagccacttgtcttgactagctctgtgttcaaaaagtttaactggt

SEQ ID NO: 399528 - DNA, 58 bp, Artificial
  Synthetic oligonucleotide
gagctgaaagcgtatatctacttctatcatgcgagagagttgggaacgagttagtagc

SEQ ID NO: 399529 - DNA, 55 bp, Artificial
  Synthetic oligonucleotide
gagctgaacaagcttcacaagaagtaaagggttggatgacagacaccttgttggt

SEQ ID NO: 399530 - DNA, 60 bp, Artificial
  Synthetic oligonucleotide
gagctgaacatggagacgcttaacatgactatgcctctgtcctgcacaaaaaatactagt

SEQ ID NO: 399531 - DNA, 60 bp, Artificial
  Synthetic oligonucleotide
gagctgacacaataagctcgcaaatagagctcgcagtcttgctttccaatgaaggaataa

SEQ ID NO: 399532 - DNA, 55 bp, Artificial
  Synthetic oligonucleotide
gagctgacatagcaactcaccctctagccacaacattaattggagagattgccag

SEQ ID NO: 399533 - DNA, 55 bp, Artificial
  Synthetic oligonucleotide
gagctgagaagcaaatactgggctataagaaccaggagtggaggaaacaccaatc

SEQ ID NO: 399534 - DNA, 58 bp, Artificial
  Synthetic oligonucleotide
gagctgagaggcccgaactggtcagaggtgttcccgtacggcgcaggcaactcgcggt

SEQ ID NO: 399535 - DNA, 55 bp, Artificial
  Synthetic oligonucleotide
gagctgaggtcattggcgaatctaagcatgcgaacgcagcatacacccattgtac

SEQ ID NO: 399536 - DNA, 55 bp, Artificial
  Synthetic oligonucleotide
gagctgattctgtacgacaaagaagagatcaggaggatctggcgtcaagcgaaca

SEQ ID NO: 399537 - DNA, 50 bp, Artificial
  Synthetic oligonucleotide
gagctgcaccagctagaagtcatcggcaacatatatgaggatccgcagct

SEQ ID NO: 399538 - DNA, 50 bp, Artificial
  Synthetic oligonucleotide
gagctgcacccagagttctacaaagattgattgctgacagtgttctacag

SEQ ID NO: 399539 - DNA, 55 bp, Artificial
  Synthetic oligonucleotide
gagctgcagattgtgtggcgggacaactggccatttggagtctgcgcaccatgcc

SEQ ID NO: 399540 - DNA, 58 bp, Artificial
  Synthetic oligonucleotide
gagctgcagcgtttaggaacgaagaagatccctgatgggggtcttgacgaatcctacc

SEQ ID NO: 399541 - DNA, 60 bp, Artificial
  Synthetic oligonucleotide
gagctgcataagagaagattgcaacgtagtctaggttcacatccgatttatatgggatcg

SEQ ID NO: 399542 - DNA, 60 bp, Artificial
  Synthetic oligonucleotide
gagctgcatccggagttctacaaggactgctgacattaagccttctacaactgctgacac

SEQ ID NO: 399543 - DNA, 60 bp, Artificial
  Synthetic oligonucleotide
gagctgccgaactccagaatcctggccaactctcagaatgcaggccataccctccagcag

SEQ ID NO: 399544 - DNA, 55 bp, Artificial
  Synthetic oligonucleotide
gagctgcctaatagcattagggccctatagagttcaagttgtctatgaaaggaca

SEQ ID NO: 399545 - DNA, 55 bp, Artificial
  Synthetic oligonucleotide
gagctgcgcaggccgtaactgccggggtgtgtggcccagatatgatccaagtgtc

SEQ ID NO: 399546 - DNA, 55 bp, Artificial
  Synthetic oligonucleotide
gagctgctgagacagagttcccagaactcaaagagctcgcttggccaagccgcgg

SEQ ID NO: 399547 - DNA, 56 bp, Artificial
  Synthetic oligonucleotide
gagctggaaagtagatgtatagaatttcattccaaatgtttagaaaattcgaaaaa

SEQ ID NO: 399548 - DNA, 60 bp, Artificial
  Synthetic oligonucleotide
gagctggaagcaacggtagccatggctaacacagaagtccgctaggtccttagcagaaat

SEQ ID NO: 399549 - DNA, 60 bp, Artificial
  Synthetic oligonucleotide
gagctggaattccactcgggcgctacgcattcaatacaattaataacttgtcaacggatc

SEQ ID NO: 399550 - DNA, 58 bp, Artificial
  Synthetic oligonucleotide
gagctggacatgttaatgggttccttgtatatcaatcggagacaggtaagacagtttt

SEQ ID NO: 399551 - DNA, 55 bp, Artificial
  Synthetic oligonucleotide
gagctggacctcggagttgggactcgatgcgttgtcttggctgaggacaaggtga

SEQ ID NO: 399552 - DNA, 53 bp, Artificial
  Synthetic oligonucleotide
gagctggacgtcgcacagtggtgcgatgatgatggcaaaagtaaaataagtag

SEQ ID NO: 399553 - DNA, 55 bp, Artificial
  Synthetic oligonucleotide
gagctggaggaggccagagtggaagcttcacttgctgatgatgggactgtagact

SEQ ID NO: 399554 - DNA, 59 bp, Artificial
  Synthetic oligonucleotide
gagctggaggcgtttgcaaagagatattcggatggctctgtttgtgtggagtcagatta

SEQ ID NO: 399555 - DNA, 57 bp, Artificial
  Synthetic oligonucleotide
gagctggagttttcaaacaaatatgtacgagcgatagttcctgaccaaacatttggt

SEQ ID NO: 399556 - DNA, 54 bp, Artificial
  Synthetic oligonucleotide
gagctggatgtcccgggggatgatattggtcgtggcctgcagttgatgggaagc

SEQ ID NO: 399557 - DNA, 60 bp, Artificial
  Synthetic oligonucleotide
gagctggcgccctcccgttcaccatgcggcaggaatcgagcgacagttctttgagggctg

SEQ ID NO: 399558 - DNA, 50 bp, Artificial
  Synthetic oligonucleotide
gagctggcggatcaagcgatataagagtgatctttcgtattgtcaaattc

SEQ ID NO: 399559 - DNA, 59 bp, Artificial
  Synthetic oligonucleotide
gagctggcgttgtttttgggatatgcagacgtcaaaatggcgtacaaacacgttccgca

SEQ ID NO: 399560 - DNA, 55 bp, Artificial
  Synthetic oligonucleotide
gagctgggaaaattcttttatcaggtctttagaatcaatcttccgaagagtcctt

SEQ ID NO: 399561 - DNA, 55 bp, Artificial
  Synthetic oligonucleotide
gagctgggtaacggttgtttcgagttctatcacaaatgtgataatgaatgtatgg

SEQ ID NO: 399562 - DNA, 60 bp, Artificial
  Synthetic oligonucleotide
gagctggtgcataaaagagtaacctcaccagaagactggatgatgatgcagccagacagt

SEQ ID NO: 399563 - DNA, 60 bp, Artificial
  Synthetic oligonucleotide
gagctggtgctggaataatagagactccgagaggcgctatcaaagttactgcccaactaa

SEQ ID NO: 399564 - DNA, 55 bp, Artificial
  Synthetic oligonucleotide
gagctggttcagagttcctcagcgggtagaatatgcgacagtcctcaccgaatcc

SEQ ID NO: 399565 - DNA, 55 bp, Artificial
  Synthetic oligonucleotide
gagctgtacaaggggataaacacaccaaatgtaagacgtgtaacaaacacaactg

SEQ ID NO: 399566 - DNA, 55 bp, Artificial
  Synthetic oligonucleotide
gagctgtacataggcaatccagcaaaggcaacaccctgcattgtatcagaagcac

SEQ ID NO: 399567 - DNA, 55 bp, Artificial
  Synthetic oligonucleotide
gagctgtaggagtctaaattggggacgcagatgttgggaacgtcaccttgcagtg

SEQ ID NO: 399568 - DNA, 55 bp, Artificial
  Synthetic oligonucleotide
gagctgtattgcaagtggaggagagatcttatctctttatgtgctgagaatagag

SEQ ID NO: 399569 - DNA, 60 bp, Artificial
  Synthetic oligonucleotide
gagctgtcctctaggtgaagctccgtccccatacaattcaaggttcgaatcagttgcatg

SEQ ID NO: 399570 - DNA, 55 bp, Artificial
  Synthetic oligonucleotide
gagctgttcatggacttccatgattttctgtctgctgcttttgaggccgacgcca

SEQ ID NO: 399571 - DNA, 58 bp, Artificial
  Synthetic oligonucleotide
gagctgttgggcatccgttaatgaataaatatggagattcagaaaaccctttgtctgg

SEQ ID NO: 399572 - DNA, 59 bp, Artificial
  Synthetic oligonucleotide
gagctgtttaatggtacatacaacagtacaggaaatgattcaaattcaaacctcatcac

SEQ ID NO: 399573 - DNA, 60 bp, Artificial
  Synthetic oligonucleotide
gagctgtttcagtcgggcatagtataaataagagcgcaagggaagggactgcgcatacta

SEQ ID NO: 399574 - DNA, 60 bp, Artificial
  Synthetic oligonucleotide
gagctgtttccaacagcggaagaatacaccgactcattgatggatccagcaattctaact

SEQ ID NO: 399575 - DNA, 58 bp, Artificial
  Synthetic oligonucleotide
gagctgtttgatatacagaggcgaagaggtatcctcctttcgtttaccacgttgagat

SEQ ID NO: 399576 - DNA, 60 bp, Artificial
  Synthetic oligonucleotide
gagctgttttggcttgtcaccagctagccaggggaacatgttttgcgagccagagctgtt

SEQ ID NO: 399577 - DNA, 55 bp, Artificial
  Synthetic oligonucleotide
gagcttaaaccagggacaaatgcacaagaagctgagttcttaaaaaagaataggg

SEQ ID NO: 399578 - DNA, 60 bp, Artificial
  Synthetic oligonucleotide
gagcttaaagttccagctgatttatccgattcagataatgcacatctgtcggatactcaa

SEQ ID NO: 399579 - DNA, 60 bp, Artificial
  Synthetic oligonucleotide
gagcttaacagtgcgctcgcaaatgggagtgtttaaggtgaacagcacagtaacactcca

SEQ ID NO: 399580 - DNA, 60 bp, Artificial
  Synthetic oligonucleotide
gagcttaacgcgatggctgcgactcacgcttacataagactcagcactttgatgagtcag

SEQ ID NO: 399581 - DNA, 60 bp, Artificial
  Synthetic oligonucleotide
gagcttacaccattattcacaacccattttgtcaggtatgatggaacaatgcaccctgaa

SEQ ID NO: 399582 - DNA, 60 bp, Artificial
  Synthetic oligonucleotide
gagcttacatgactctcggattgggaagtccgagctggaccatgactgggtgatagcctg

SEQ ID NO: 399583 - DNA, 57 bp, Artificial
  Synthetic oligonucleotide
gagcttaccgtatgttaggacttaatgtccaaacagtagactcttcgcagggttcag

SEQ ID NO: 399584 - DNA, 52 bp, Artificial
  Synthetic oligonucleotide
gagcttacggacatagtccactgccgaatggcggcccctagtcagcggaagg

SEQ ID NO: 399585 - DNA, 53 bp, Artificial
  Synthetic oligonucleotide
gagcttacggacattgtccactgccgtatggccgcccccacccagcgtaaggc

SEQ ID NO: 399586 - DNA, 55 bp, Artificial
  Synthetic oligonucleotide
gagcttagccgacaggatgcggtagtgggtattcgtattgaaatagtcgcgcagg

SEQ ID NO: 399587 - DNA, 60 bp, Artificial
  Synthetic oligonucleotide
gagcttatcctctcaacccctcttcaagaagcaaaggcgatcaatggctcaggtcagtga

SEQ ID NO: 399588 - DNA, 60 bp, Artificial
  Synthetic oligonucleotide
gagcttattttccaggtctggcaaaggtcctggagatactggcatgatgaacaagggatg

SEQ ID NO: 399589 - DNA, 55 bp, Artificial
  Synthetic oligonucleotide
gagcttcaaagcttagttagtgcgtaccgcactataaaacttggggaccacgaaa

SEQ ID NO: 399590 - DNA, 55 bp, Artificial
  Synthetic oligonucleotide
gagcttcaatatagccttgtaatgacgccgccagaatacactgttaagcagggcc

SEQ ID NO: 399591 - DNA, 60 bp, Artificial
  Synthetic oligonucleotide
gagcttcactggcaatgattatttcactcgaggaataacgaggcaccgtataatgagtgg

SEQ ID NO: 399592 - DNA, 51 bp, Artificial
  Synthetic oligonucleotide
gagcttcactggcgatgctctcaaagctgagatggccaatctgggagtaac

SEQ ID NO: 399593 - DNA, 55 bp, Artificial
  Synthetic oligonucleotide
gagcttcagcgatgcctgcatgtctctagataagaccaccagttctggccacccc

SEQ ID NO: 399594 - DNA, 54 bp, Artificial
  Synthetic oligonucleotide
gagcttcaggttcgaagagacaacccccgccccgaaacaggagccgaaagacag

SEQ ID NO: 399595 - DNA, 55 bp, Artificial
  Synthetic oligonucleotide
gagcttcaggttcgaggaagcaacccccgttccgaagcaggagtcgaaagacagg

SEQ ID NO: 399596 - DNA, 55 bp, Artificial
  Synthetic oligonucleotide
gagcttcaggttcgaggaggctccgaagcaggagccgaaagacagggaaccttta

SEQ ID NO: 399597 - DNA, 58 bp, Artificial
  Synthetic oligonucleotide
gagcttccgtcgtcgaaagcaggtaggaacctgctttcagcctgattgttgggttgtg

SEQ ID NO: 399598 - DNA, 55 bp, Artificial
  Synthetic oligonucleotide
gagcttcctacgctcattgatgtacggtcatggttacatgctgctgagttcaagg

SEQ ID NO: 399599 - DNA, 60 bp, Artificial
  Synthetic oligonucleotide
gagcttcggataaaatagctcaaggtgtaattattgcataccgtgaaatgcaactagact

SEQ ID NO: 399600 - DNA, 60 bp, Artificial
  Synthetic oligonucleotide
gagcttcggatttcgaagaagcattcaacgcgtctgcatagacctgagctaaatgctggc

SEQ ID NO: 399601 - DNA, 55 bp, Artificial
  Synthetic oligonucleotide
gagcttcgtgcttaaaactcacaacgtccgcaaggactttgtgcgctccgtcaag

SEQ ID NO: 399602 - DNA, 55 bp, Artificial
  Synthetic oligonucleotide
gagcttctagaggaactcaaacaagaagctgtcagacactttcctagaccatggc

SEQ ID NO: 399603 - DNA, 60 bp, Artificial
  Synthetic oligonucleotide
gagcttctcagtaattatggctaatttgattaaaaagggctgttacaacgcatataagca

SEQ ID NO: 399604 - DNA, 60 bp, Artificial
  Synthetic oligonucleotide
gagcttctcgcgaagatcacagctttaaagccaactgaggtgcatgtgccaacattgaaa

SEQ ID NO: 399605 - DNA, 55 bp, Artificial
  Synthetic oligonucleotide
gagcttctctaggagagcccttttcccagccagaggtggctggttaaataatacc

SEQ ID NO: 399606 - DNA, 60 bp, Artificial
  Synthetic oligonucleotide
gagcttctctttaataattcgcatggcctcttccttcgaagaggcatttagggcctctgc

SEQ ID NO: 399607 - DNA, 60 bp, Artificial
  Synthetic oligonucleotide
gagcttctgcgccacagatgtgttagtgccatggatgttttctacacactgatgcatgag

SEQ ID NO: 399608 - DNA, 60 bp, Artificial
  Synthetic oligonucleotide
gagcttctggcaagaatggacagcgtgtgcaacctcacctctgttcacaccatccgggag

SEQ ID NO: 399609 - DNA, 51 bp, Artificial
  Synthetic oligonucleotide
gagcttcttccctccggctgccagttgcttccttttgttctcgagggcctt

SEQ ID NO: 399610 - DNA, 54 bp, Artificial
  Synthetic oligonucleotide
gagcttgaattatttaaggactaataaccaaaacgatatcgttttgaaagtatg

SEQ ID NO: 399611 - DNA, 60 bp, Artificial
  Synthetic oligonucleotide
gagcttgaccagcagttttagacttaagaatacggagcatacaggcatcaattttatact

SEQ ID NO: 399612 - DNA, 60 bp, Artificial
  Synthetic oligonucleotide
gagcttgagcatatagttctgaatgcatctcacatcacaccctatgtgccaatggcatgc

SEQ ID NO: 399613 - DNA, 55 bp, Artificial
  Synthetic oligonucleotide
gagcttgagttgaagaatgataagggtaaactgcttcttggtcctgcgcgagtgg

SEQ ID NO: 399614 - DNA, 56 bp, Artificial
  Synthetic oligonucleotide
gagcttgagtttaggaatctgacacccgggaacaccaacacccgtgtatcccgata

SEQ ID NO: 399615 - DNA, 54 bp, Artificial
  Synthetic oligonucleotide
gagcttgatgtacttccacagacgtgacctcaggctggcggcaaatgctatctg

SEQ ID NO: 399616 - DNA, 59 bp, Artificial
  Synthetic oligonucleotide
gagcttggagacaccgggcccggaccgtccgcgctaagcttctgtccagaggaggcaga

SEQ ID NO: 399617 - DNA, 51 bp, Artificial
  Synthetic oligonucleotide
gagcttggcagttgtcataccctgcgcaggagccatgaagttgtcaaattt

SEQ ID NO: 399618 - DNA, 50 bp, Artificial
  Synthetic oligonucleotide
gagcttgggtcgagaaacataattggagcgatattcttaaaaggttgaca

SEQ ID NO: 399619 - DNA, 55 bp, Artificial
  Synthetic oligonucleotide
gagcttgtagagaagattctcatatgggtttctctgccctggaactccactgacg

SEQ ID NO: 399620 - DNA, 55 bp, Artificial
  Synthetic oligonucleotide
gagcttgtgaacaatcatgtagagagcagggcaagcgaaatcagtgaggctctag

SEQ ID NO: 399621 - DNA, 55 bp, Artificial
  Synthetic oligonucleotide
gagcttgtggacacatcgcgacgtgtgtatcgagtgcacgcggcagcagggcaaa

SEQ ID NO: 399622 - DNA, 53 bp, Artificial
  Synthetic oligonucleotide
gagcttgtgtctaaggacttctccgttttcgcgacgaagtggaataggtttac

SEQ ID NO: 399623 - DNA, 60 bp, Artificial
  Synthetic oligonucleotide
gagcttgtgtctactgggagggcagagcggttcgtatgcactcggctgacatctaccgcg

SEQ ID NO: 399624 - DNA, 57 bp, Artificial
  Synthetic oligonucleotide
gagctttaaatctctgtaggtagtttgtccaattatgtcacaccacagaagtaaggt

SEQ ID NO: 399625 - DNA, 55 bp, Artificial
  Synthetic oligonucleotide
gagctttaattttaccccgattattgcattagcagcgggtcatgagacgaacccg

SEQ ID NO: 399626 - DNA, 52 bp, Artificial
  Synthetic oligonucleotide
gagctttactttgaaacccttggttgttccacgcttcctacggtacctacgc

SEQ ID NO: 399627 - DNA, 59 bp, Artificial
  Synthetic oligonucleotide
gagctttaggttgatacattgtaacacctcaaccattacacagacctgtccaaagataa

SEQ ID NO: 399628 - DNA, 55 bp, Artificial
  Synthetic oligonucleotide
gagctttagtgcgtactgggatggatcccagaatgtgttctctgatgcaaggttc

SEQ ID NO: 399629 - DNA, 58 bp, Artificial
  Synthetic oligonucleotide
gagctttagttcctcgtaccccatcgctggggctgtctccgcttctggttctggtgga

SEQ ID NO: 399630 - DNA, 55 bp, Artificial
  Synthetic oligonucleotide
gagctttatcaaaagaatccggcggaagtgttttatagcgcaggctatgatacag

SEQ ID NO: 399631 - DNA, 55 bp, Artificial
  Synthetic oligonucleotide
gagctttatgagcttgtggaggctatggttgagaagggccaggatggctctgcgg

SEQ ID NO: 399632 - DNA, 59 bp, Artificial
  Synthetic oligonucleotide
gagctttcaaacggacacggttatatgaacagagcggagttcgaggctatattgccttg

SEQ ID NO: 399633 - DNA, 58 bp, Artificial
  Synthetic oligonucleotide
gagctttcctttacaattactggagacaacaccaaatggaatgagaatcaaaatcctc

SEQ ID NO: 399634 - DNA, 59 bp, Artificial
  Synthetic oligonucleotide
gagctttctcccttaaaatattgagtgccgatgatttagaccctgaattgattgcctcg

SEQ ID NO: 399635 - DNA, 60 bp, Artificial
  Synthetic oligonucleotide
gagctttgaatagattggctacacttgttacaacagttaatgggacaccaatgctgattt

SEQ ID NO: 399636 - DNA, 55 bp, Artificial
  Synthetic oligonucleotide
gagctttggcgtatcccttacgtcatccctgcgagtgaccacttatacactccag

SEQ ID NO: 399637 - DNA, 60 bp, Artificial
  Synthetic oligonucleotide
gagctttggtcaggactgagaatggtacgaatatacctggagcgcaatctcctcatccat

SEQ ID NO: 399638 - DNA, 55 bp, Artificial
  Synthetic oligonucleotide
gagctttgttaccaatggatacctttccgttacattggaaccacacgagctgacg

SEQ ID NO: 399639 - DNA, 55 bp, Artificial
  Synthetic oligonucleotide
gagctttgttggattgatttgcttttacttgctttacctttgggtgctgagagat

SEQ ID NO: 399640 - DNA, 60 bp, Artificial
  Synthetic oligonucleotide
gagcttttaccagtgccaattatcgctgataagtcgcgcattatatttaatgaaatgctc

SEQ ID NO: 399641 - DNA, 60 bp, Artificial
  Synthetic oligonucleotide
gagcttttacgcagcagagtatatcgatgtcgggttactcttgcgtgtacattattaacg

SEQ ID NO: 399642 - DNA, 60 bp, Artificial
  Synthetic oligonucleotide
gagcttttagcgctctgaatgttcggatggaaatgtgctgaccttgttggggatacgaga

SEQ ID NO: 399643 - DNA, 60 bp, Artificial
  Synthetic oligonucleotide
gagcttttagctgcctgaatgttcggatggaaatgtgctgacctgcttggggatgtgaga

SEQ ID NO: 399644 - DNA, 59 bp, Artificial
  Synthetic oligonucleotide
gagcttttcaagctcttaactccacgactccagaggctacctcttcttgttggctttgc

SEQ ID NO: 399645 - DNA, 55 bp, Artificial
  Synthetic oligonucleotide
gagctttttccgatgggttacacgtggggtctgtactgtcgtcgttggaatacgc

SEQ ID NO: 399646 - DNA, 56 bp, Artificial
  Synthetic oligonucleotide
gagctttttgttactgctgtggacagtacacgaggcactaattttagtatttctgt

SEQ ID NO: 399647 - DNA, 52 bp, Artificial
  Synthetic oligonucleotide
gaggaaaaagtggccggattcatgcaggaacgtggacaaatccgcattttta

SEQ ID NO: 399648 - DNA, 59 bp, Artificial
  Synthetic oligonucleotide
gaggaaaaatcttgtccagtttggagttggtgagaagaatggatgtgttagatgggtca

SEQ ID NO: 399649 - DNA, 51 bp, Artificial
  Synthetic oligonucleotide
gaggaaaagagctgagaaattgacggcaaaacttgagagtgatcatactaa

SEQ ID NO: 399650 - DNA, 57 bp, Artificial
  Synthetic oligonucleotide
gaggaaaatagaacatttcgacccatgtatgcagtttcctacccgaaccgaatgcga

SEQ ID NO: 399651 - DNA, 56 bp, Artificial
  Synthetic oligonucleotide
gaggaaacaagctctcctgggataacttcctagaggattttaagcaagctgttttc

SEQ ID NO: 399652 - DNA, 55 bp, Artificial
  Synthetic oligonucleotide
gaggaaacaccaatcaacagcgagcgtctgcggggcaaatcagcgtgcaacccac

SEQ ID NO: 399653 - DNA, 55 bp, Artificial
  Synthetic oligonucleotide
gaggaaacacgatgtcagcaacattggatgcaaattctctcagcataatctgatc

SEQ ID NO: 399654 - DNA, 55 bp, Artificial
  Synthetic oligonucleotide
gaggaaacccatggatggaggacaaaactcatgtatccagctgggaagatgttcc

SEQ ID NO: 399655 - DNA, 58 bp, Artificial
  Synthetic oligonucleotide
gaggaaacgactatgtggtcattggagtccacacggctgccgctcgtgggggaaacac

SEQ ID NO: 399656 - DNA, 55 bp, Artificial
  Synthetic oligonucleotide
gaggaaactcgactagaccaatgattacattggacatttctgcaaatgcggaatc

SEQ ID NO: 399657 - DNA, 58 bp, Artificial
  Synthetic oligonucleotide
gaggaaacttaataagggaagatgataatattttcgtcaactgaatatatgacaagaa

SEQ ID NO: 399658 - DNA, 54 bp, Artificial
  Synthetic oligonucleotide
gaggaaacttacgagcccaacactttgggccacgatttaattagggatcttata

SEQ ID NO: 399659 - DNA, 55 bp, Artificial
  Synthetic oligonucleotide
gaggaaagcaacccgaaggttgattcagttgatagtgagtggaagagatgagcag

SEQ ID NO: 399660 - DNA, 59 bp, Artificial
  Synthetic oligonucleotide
gaggaaatatcagcggaccgaagctgatagaggttttttcatcactactctcccgacaa

SEQ ID NO: 399661 - DNA, 52 bp, Artificial
  Synthetic oligonucleotide
gaggaaatcgccctccctacaacgggggaagttcccttctatggaaaagcta

SEQ ID NO: 399662 - DNA, 55 bp, Artificial
  Synthetic oligonucleotide
gaggaaatctcctgcgatagcgtttaccaaaatattgtaatggtcctaggtagcg

SEQ ID NO: 399663 - DNA, 52 bp, Artificial
  Synthetic oligonucleotide
gaggaaatgagatcgaagaatcgggggttggtacattggaatttgccttcga

SEQ ID NO: 399664 - DNA, 60 bp, Artificial
  Synthetic oligonucleotide
gaggaaatgctttgataatgactaccaggcctgcaaatttctacaaacaccagcaagtta

SEQ ID NO: 399665 - DNA, 55 bp, Artificial
  Synthetic oligonucleotide
gaggaaatggcacgcaactgtcactggtggaacctatgcgtccaaggagcaggct

SEQ ID NO: 399666 - DNA, 55 bp, Artificial
  Synthetic oligonucleotide
gaggaaattcactgcaaccgttacgggtggacaatatgcctctaaggaacaggcg

SEQ ID NO: 399667 - DNA, 51 bp, Artificial
  Synthetic oligonucleotide
gaggaaattcatccttaatcatgttaaggtactcctccttagacgtcgcag

SEQ ID NO: 399668 - DNA, 55 bp, Artificial
  Synthetic oligonucleotide
gaggaaattgctacgctgtctaggtatgtcatgatggaagggtttgtcagtcccc

SEQ ID NO: 399669 - DNA, 55 bp, Artificial
  Synthetic oligonucleotide
gaggaacaagagtaatcccaagaggacaactatccactagaggagttcagattgc

SEQ ID NO: 399670 - DNA, 60 bp, Artificial
  Synthetic oligonucleotide
gaggaacaatgtcacaaattgtgtggctgttctgataggcggttcatctgtgttacctgg

SEQ ID NO: 399671 - DNA, 58 bp, Artificial
  Synthetic oligonucleotide
gaggaacagaatgaaatttatgcatatactaaacgtaatgttctgcccaccttaactc

SEQ ID NO: 399672 - DNA, 58 bp, Artificial
  Synthetic oligonucleotide
gaggaacatggttatacgatcgtaccgcctgaatcaatgtatagtgccctgctacgta

SEQ ID NO: 399673 - DNA, 55 bp, Artificial
  Synthetic oligonucleotide
gaggaacattcctgagaaagcatcgagagggctctttggagcaatagctggattc

SEQ ID NO: 399674 - DNA, 58 bp, Artificial
  Synthetic oligonucleotide
gaggaaccatttaagagatttgatgggggtaccatactgcaattactcaagattctgg

SEQ ID NO: 399675 - DNA, 54 bp, Artificial
  Synthetic oligonucleotide
gaggaacccaatgggtttcgcatatgacacccgctgtttcgactcaacggtcac

SEQ ID NO: 399676 - DNA, 54 bp, Artificial
  Synthetic oligonucleotide
gaggaacccacctatactggttctgaatccgggctctttgaaaaggccaaccaa

SEQ ID NO: 399677 - DNA, 50 bp, Artificial
  Synthetic oligonucleotide
gaggaacctcctttcattgtactcaaaatgcaagaggctgccgtgaacgg

SEQ ID NO: 399678 - DNA, 52 bp, Artificial
  Synthetic oligonucleotide
gaggaacgaaccagctagtacacaggaccgacttgtcaggtactccaatggg

SEQ ID NO: 399679 - DNA, 55 bp, Artificial
  Synthetic oligonucleotide
gaggaacgagctgaagagcttgcaagacaaactaaggaacctgaagtgcaacttg

SEQ ID NO: 399680 - DNA, 55 bp, Artificial
  Synthetic oligonucleotide
gaggaacggaggaaacagcttctatgcagagctaaagtggttgatatcgaagagc

SEQ ID NO: 399681 - DNA, 55 bp, Artificial
  Synthetic oligonucleotide
gaggaacggagggaacagcttctatgcagaactaaaatggctagtgtcaaagacc

SEQ ID NO: 399682 - DNA, 56 bp, Artificial
  Synthetic oligonucleotide
gaggaacgtactctcgggaccagtaaatattcgaatataacggctaacgatcatcc

SEQ ID NO: 399683 - DNA, 60 bp, Artificial
  Synthetic oligonucleotide
gaggaacgtgcctcagagagaaacaagaggtctgtttggagcaatagcaggattcataga

SEQ ID NO: 399684 - DNA, 60 bp, Artificial
  Synthetic oligonucleotide
gaggaactacgttgagatgatgcggcagcatcacgtcgtgagattcgcgcatctcagcca

SEQ ID NO: 399685 - DNA, 55 bp, Artificial
  Synthetic oligonucleotide
gaggaactatactgaatttagatcccttaagtactgcgagttaatccgaactaga

SEQ ID NO: 399686 - DNA, 60 bp, Artificial
  Synthetic oligonucleotide
gaggaactatccacacttgttgagcgggggcatcttaatcttgggtatgttgctgatgtg

SEQ ID NO: 399687 - DNA, 55 bp, Artificial
  Synthetic oligonucleotide
gaggaactccaccgccccttcgtaatcgagggagagggagtgatcggtggtccga

SEQ ID NO: 399688 - DNA, 55 bp, Artificial
  Synthetic oligonucleotide
gaggaactgcaacaactctccaagatgaccctccaagcgctagtcacccacggcc

SEQ ID NO: 399689 - DNA, 57 bp, Artificial
  Synthetic oligonucleotide
gaggaacttattcacgtaaacatggtgtaagacgttcatatgtttcaccacgtgtta

SEQ ID NO: 399690 - DNA, 54 bp, Artificial
  Synthetic oligonucleotide
gaggaagaaactcgcgccgtagaagagggatgttgggacgcggaatgcgacgct

SEQ ID NO: 399691 - DNA, 51 bp, Artificial
  Synthetic oligonucleotide
gaggaagaagtcctaagaattgaggacgaggaagactgtgagtaccctgca

SEQ ID NO: 399692 - DNA, 55 bp, Artificial
  Synthetic oligonucleotide
gaggaagacaaccgtgttgaggaagaatgtaacggaggtggattatttatatttg

SEQ ID NO: 399693 - DNA, 60 bp, Artificial
  Synthetic oligonucleotide
gaggaagacgaattctgcattcttcagtgcccaggacttcaaagctgaattcttatcctc

SEQ ID NO: 399694 - DNA, 54 bp, Artificial
  Synthetic oligonucleotide
gaggaagactttttactccaggcccaacaaccacgacaactgttggttgaacac

SEQ ID NO: 399695 - DNA, 57 bp, Artificial
  Synthetic oligonucleotide
gaggaagagatcccgtgacagaccgaacaagggagcaggcccccaccaacctcacgc

SEQ ID NO: 399696 - DNA, 58 bp, Artificial
  Synthetic oligonucleotide
gaggaagagtccaagctgaacaggaacgaaataaaaggactgaaattgagcaatatgg

SEQ ID NO: 399697 - DNA, 55 bp, Artificial
  Synthetic oligonucleotide
gaggaagagtgagagtcttcggagcacggctgagtgagggcagtaagggcggcag

SEQ ID NO: 399698 - DNA, 55 bp, Artificial
  Synthetic oligonucleotide
gaggaagccagagccagctggacataatgccgccaacggagagtttatggcttcc

SEQ ID NO: 399699 - DNA, 51 bp, Artificial
  Synthetic oligonucleotide
gaggaagcctgcacacgaggtaccaaacatctgcttcgagaattgggagac

SEQ ID NO: 399700 - DNA, 60 bp, Artificial
  Synthetic oligonucleotide
gaggaagcgaatatcgctaatcgcaataatatgcacaacagtgaaactttccatccaatt

SEQ ID NO: 399701 - DNA, 55 bp, Artificial
  Synthetic oligonucleotide
gaggaagctccacttgacgacgcgcgatccaacaataccattggcaacggctgcc

SEQ ID NO: 399702 - DNA, 54 bp, Artificial
  Synthetic oligonucleotide
gaggaaggatcagcgcccgagagggagtaacggtaaagaggcggggaacgtcga

SEQ ID NO: 399703 - DNA, 55 bp, Artificial
  Synthetic oligonucleotide
gaggaaggatgttgtgatgcgaggtttcatcactgcgaacacgatattgaacgtt

SEQ ID NO: 399704 - DNA, 53 bp, Artificial
  Synthetic oligonucleotide
gaggaaggatttgtacgatacatccaacgtttggttcgaacaacgttcccgga

SEQ ID NO: 399705 - DNA, 60 bp, Artificial
  Synthetic oligonucleotide
gaggaaggcagtatcatccctgacagaacggctctatgtaggtggccccatggtaaactc

SEQ ID NO: 399706 - DNA, 50 bp, Artificial
  Synthetic oligonucleotide
gaggaaggcccttcggtgaaagttaagacgaacatcggggtttgggaacc

SEQ ID NO: 399707 - DNA, 57 bp, Artificial
  Synthetic oligonucleotide
gaggaaggccggaggaagccaagtatgtttggtggacgagcaacagtttagttgcac

SEQ ID NO: 399708 - DNA, 55 bp, Artificial
  Synthetic oligonucleotide
gaggaaggtgatagggtgacatgtggtacatgggagggtactggtgtgcgctcgc

SEQ ID NO: 399709 - DNA, 57 bp, Artificial
  Synthetic oligonucleotide
gaggaaggtttgtgttattggcagaaattataacgtgggtttggcccatgcgtcata

SEQ ID NO: 399710 - DNA, 55 bp, Artificial
  Synthetic oligonucleotide
gaggaagtagaacgcgtgcgatctgagcatcgcgaagaggctgctgcggcctgtc

SEQ ID NO: 399711 - DNA, 55 bp, Artificial
  Synthetic oligonucleotide
gaggaagtgatgaatcgcataactgagagaaatgatctacatgccgcttataggc

SEQ ID NO: 399712 - DNA, 55 bp, Artificial
  Synthetic oligonucleotide
gaggaagtgcaaaacttcaatggttcgtggagaggaacatggtcattcccgaagg

SEQ ID NO: 399713 - DNA, 55 bp, Artificial
  Synthetic oligonucleotide
gaggaagttgggtcacacactatcttcgcggacacaacgtacattgctgctcccc

SEQ ID NO: 399714 - DNA, 60 bp, Artificial
  Synthetic oligonucleotide
gaggaataagagtcagcaaaatgggcgtggatgaatactccagcacagagaaggtggtgg

SEQ ID NO: 399715 - DNA, 55 bp, Artificial
  Synthetic oligonucleotide
gaggaatactcccctgatacggttgggtacgatctaattcgcgatttaatttcta

SEQ ID NO: 399716 - DNA, 57 bp, Artificial
  Synthetic oligonucleotide
gaggaatacttgcctgaccccttacagactgacacctaatgcccaattgccgctctg

SEQ ID NO: 399717 - DNA, 53 bp, Artificial
  Synthetic oligonucleotide
gaggaatagtgctagtagcttgcttgataccatagcaatagcagtagctgaga

SEQ ID NO: 399718 - DNA, 55 bp, Artificial
  Synthetic oligonucleotide
gaggaatatgacttacagttcatatttcagctttgtaagataaccctcaccactg

SEQ ID NO: 399719 - DNA, 60 bp, Artificial
  Synthetic oligonucleotide
gaggaatcaatgcgattgataggtgacgctggtgttgatatcgcatgttcgcgtgcgcct

SEQ ID NO: 399720 - DNA, 60 bp, Artificial
  Synthetic oligonucleotide
gaggaatcactggatcgggctaggagattgctttggtggcactacaattgtttactgtgg

SEQ ID NO: 399721 - DNA, 55 bp, Artificial
  Synthetic oligonucleotide
gaggaatcagaaacacccgtgttactgcagcctaataccaatacaatgtccgtgg

SEQ ID NO: 399722 - DNA, 60 bp, Artificial
  Synthetic oligonucleotide
gaggaatcatctggaggccaatcgcagcgcactaaggttgtcgctgaaggggcttattct

SEQ ID NO: 399723 - DNA, 60 bp, Artificial
  Synthetic oligonucleotide
gaggaatccaccatgaaatcacgtagaggctttaccgtacaaagactaatgaatgctatg

SEQ ID NO: 399724 - DNA, 57 bp, Artificial
  Synthetic oligonucleotide
gaggaatccactttaaattattgtacctctacaattattgtaagagtgtgtaatgtc

SEQ ID NO: 399725 - DNA, 60 bp, Artificial
  Synthetic oligonucleotide
gaggaatccgacaattgtgctcgtgagccatttatccactatataaaggtgatgtgacat

SEQ ID NO: 399726 - DNA, 55 bp, Artificial
  Synthetic oligonucleotide
gaggaatctctgtgaactgttgggcgttgagcctccgtctgaatctgacctcgag

SEQ ID NO: 399727 - DNA, 58 bp, Artificial
  Synthetic oligonucleotide
gaggaatgaattatgagactacaatgtttaataaggtggcagtgctaatttgtgaagc

SEQ ID NO: 399728 - DNA, 60 bp, Artificial
  Synthetic oligonucleotide
gaggaatgcaaggaatggttggagactcggaatattatgcgagacagtaccgccgtgctt

SEQ ID NO: 399729 - DNA, 55 bp, Artificial
  Synthetic oligonucleotide
gaggaatgtctagaggcttctactgacattttccttgatgaacttgctactgttg

SEQ ID NO: 399730 - DNA, 60 bp, Artificial
  Synthetic oligonucleotide
gaggaatgtgacatgtatcatgacaagtctgggttgaaaagacatggtgacttcactaac

SEQ ID NO: 399731 - DNA, 50 bp, Artificial
  Synthetic oligonucleotide
gaggaatgttccagagattgtccaagggagaggcctgtttggggcaatag

SEQ ID NO: 399732 - DNA, 60 bp, Artificial
  Synthetic oligonucleotide
gaggaatgttcctcaaagagacacaaggggcctgtttggagcaatagcaggattcataga

SEQ ID NO: 399733 - DNA, 53 bp, Artificial
  Synthetic oligonucleotide
gaggaattatgtaccatgccacatcagacaagtaattaatacatggcataaag

SEQ ID NO: 399734 - DNA, 59 bp, Artificial
  Synthetic oligonucleotide
gaggaattcacaatggttggacggagggcaacagctatcctgagaaaagcaactagaag

SEQ ID NO: 399735 - DNA, 60 bp, Artificial
  Synthetic oligonucleotide
gaggaattcacaatggttgggcagagagcaacagctatcttgaggaaagcaaccagaagg

SEQ ID NO: 399736 - DNA, 55 bp, Artificial
  Synthetic oligonucleotide
gaggaattcactcggagatgagcagtgatcccacctccagaggaccccttcagcg

SEQ ID NO: 399737 - DNA, 55 bp, Artificial
  Synthetic oligonucleotide
gaggaattgacattaccatgcgtattttgcggaacacttatgtcccggaccgacc

SEQ ID NO: 399738 - DNA, 56 bp, Artificial
  Synthetic oligonucleotide
gaggaattgatggagaagaactggggccaatatcatgcccaagttattgtcactga

SEQ ID NO: 399739 - DNA, 53 bp, Artificial
  Synthetic oligonucleotide
gaggaatttaagagtggaataattcaaagcgggaaatatgaacccgttttgaa

SEQ ID NO: 399740 - DNA, 58 bp, Artificial
  Synthetic oligonucleotide
gaggacaactgtcgtatcaggctccctgaacaaaatgtctattggtagtactctttta

SEQ ID NO: 399741 - DNA, 52 bp, Artificial
  Synthetic oligonucleotide
gaggacaagaaggactcaagatccgggaacgaatccccaaaacgccggtaaa

SEQ ID NO: 399742 - DNA, 55 bp, Artificial
  Synthetic oligonucleotide
gaggacaagcaaagtgacgatgaggccccacgagtactcggctttgcttaccatc

SEQ ID NO: 399743 - DNA, 55 bp, Artificial
  Synthetic oligonucleotide
gaggacacatccaatggttatgatcactctaaagccgactggctagagtggacta

SEQ ID NO: 399744 - DNA, 54 bp, Artificial
  Synthetic oligonucleotide
gaggacacatgtaaggtggaaaatgtaagggcggaaagtaaccttatcacaaag

SEQ ID NO: 399745 - DNA, 55 bp, Artificial
  Synthetic oligonucleotide
gaggacaccaccactgttctcgctaccctagcgctcctgggatgtgacgtctccc

SEQ ID NO: 399746 - DNA, 60 bp, Artificial
  Synthetic oligonucleotide
gaggacaccctcccatggcacaagtggctgcccattctgagtgcagccgggttcaaaggc

SEQ ID NO: 399747 - DNA, 55 bp, Artificial
  Synthetic oligonucleotide
gaggacacgaaggaaccgttggactaagcgagggacaactcgctggggtgcgcgt

SEQ ID NO: 399748 - DNA, 55 bp, Artificial
  Synthetic oligonucleotide
gaggacactggtgagggtaggacgccggttacggtggtattacccatggccgtga

SEQ ID NO: 399749 - DNA, 60 bp, Artificial
  Synthetic oligonucleotide
gaggacagccattaggcattggccttagtggacatcctttgtttaataagttggatgata

SEQ ID NO: 399750 - DNA, 55 bp, Artificial
  Synthetic oligonucleotide
gaggacatccggtgtctagaggaacggcaaaactgaggtggcttgttgagagagg

SEQ ID NO: 399751 - DNA, 59 bp, Artificial
  Synthetic oligonucleotide
gaggaccaaacctatacaacatccggaatctccacatcccagaagtctgcctgaagtgg

SEQ ID NO: 399752 - DNA, 60 bp, Artificial
  Synthetic oligonucleotide
gaggaccacctagtgtcagcatgatcctagctgtagttgcatgaaacttgctacttggtt

SEQ ID NO: 399753 - DNA, 55 bp, Artificial
  Synthetic oligonucleotide
gaggaccactatttaaactctcttgatgccatctggctcatgggatgctgtgagg

SEQ ID NO: 399754 - DNA, 60 bp, Artificial
  Synthetic oligonucleotide
gaggaccagactaaccatctggtatccaatcttagttgatatgtagctacatcaagtcat

SEQ ID NO: 399755 - DNA, 60 bp, Artificial
  Synthetic oligonucleotide
gaggaccagcctacacagccagatgtcgccacgtgcagattttacacgctagaatcagtg

SEQ ID NO: 399756 - DNA, 60 bp, Artificial
  Synthetic oligonucleotide
gaggaccaggctaactacctggtatccgatcttaatcaatatgtaactatgtcaagtcat

SEQ ID NO: 399757 - DNA, 52 bp, Artificial
  Synthetic oligonucleotide
gaggacccacccacggggaccacttcctcaacgcccacgtggaacccaagga

SEQ ID NO: 399758 - DNA, 60 bp, Artificial
  Synthetic oligonucleotide
gaggacccccacccgatcatcgtgcacctgtatcgttctctagctgactcggcacagtcc

SEQ ID NO: 399759 - DNA, 60 bp, Artificial
  Synthetic oligonucleotide
gaggaccccttcagcgaacagaagagctctcggagcgtagagcaagaccgtagcgatggg

SEQ ID NO: 399760 - DNA, 51 bp, Artificial
  Synthetic oligonucleotide
gaggaccccttcagcgaacagagagcactgacacgcggggagtgagatcgt

SEQ ID NO: 399761 - DNA, 60 bp, Artificial
  Synthetic oligonucleotide
gaggaccccttcagcgaacagagaggctcctcctctgcgggagtagagccgtagcgatgg

SEQ ID NO: 399762 - DNA, 60 bp, Artificial
  Synthetic oligonucleotide
gaggacccgagtcatgagggggaggggataccgctatatgacgcaatcaaatgcatgaag

SEQ ID NO: 399763 - DNA, 59 bp, Artificial
  Synthetic oligonucleotide
gaggacccggagaaagaagtgttagtgtggaggtttgacagccgcctagcatttcatca

SEQ ID NO: 399764 - DNA, 55 bp, Artificial
  Synthetic oligonucleotide
gaggacccggagcaagaagctgccaatggagaccctagagaggttttgcaacctc

SEQ ID NO: 399765 - DNA, 53 bp, Artificial
  Synthetic oligonucleotide
gaggacccggagttaaggggtttggcttcaaatccggcaatgacgtatggttg

SEQ ID NO: 399766 - DNA, 57 bp, Artificial
  Synthetic oligonucleotide
gaggaccgagctaattacttggtatccaactttgacaagtatgtagctacgttaagc

SEQ ID NO: 399767 - DNA, 55 bp, Artificial
  Synthetic oligonucleotide
gaggacctagtggtaactgctaacaagaagtccgctgaagacgtcagggaggctc

SEQ ID NO: 399768 - DNA, 60 bp, Artificial
  Synthetic oligonucleotide
gaggacctggccataaggcaagagttttggctgaagcaatgagccaagcaacaagtacag

SEQ ID NO: 399769 - DNA, 56 bp, Artificial
  Synthetic oligonucleotide
gaggaccttttcaccaaccgaattctccattcattccgagagaattctcgggatgg

SEQ ID NO: 399770 - DNA, 60 bp, Artificial
  Synthetic oligonucleotide
gaggacgacacgcgaatgggactatacatgataggagcccgttcagagccctcataagct

SEQ ID NO: 399771 - DNA, 60 bp, Artificial
  Synthetic oligonucleotide
gaggacgactgggtcctcatagaaaaacctgtcctacaaaggcaggctgcgcactctgcg

SEQ ID NO: 399772 - DNA, 60 bp, Artificial
  Synthetic oligonucleotide
gaggacgagagtcgctctcggatgttatcggattcctcgatgctgtcctgtcgagtgaac

SEQ ID NO: 399773 - DNA, 58 bp, Artificial
  Synthetic oligonucleotide
gaggacgatatagtggtatcctacagtgccaaagagggggtctccggcctacctgagc

SEQ ID NO: 399774 - DNA, 55 bp, Artificial
  Synthetic oligonucleotide
gaggacgatcttagctgccaccaagccaccgtgcgtctcttacacaagaaagggg

SEQ ID NO: 399775 - DNA, 55 bp, Artificial
  Synthetic oligonucleotide
gaggacgatggggactggagagacatagtaaacttcctcagatttcagcaaatag

SEQ ID NO: 399776 - DNA, 60 bp, Artificial
  Synthetic oligonucleotide
gaggacgcaactgctggtctaactcatctgatgatctggcattctaatctgaatgatgcc

SEQ ID NO: 399777 - DNA, 60 bp, Artificial
  Synthetic oligonucleotide
gaggacgcaactgctggtctcacccacctgatgatatggcattccaatctaaatgatgcc

SEQ ID NO: 399778 - DNA, 60 bp, Artificial
  Synthetic oligonucleotide
gaggacgcattggtaggaatccatcacaagttggagatgagtactgctatggagggcaca

SEQ ID NO: 399779 - DNA, 60 bp, Artificial
  Synthetic oligonucleotide
gaggacgcgttattacatgacatcgccgtgtccggttggacctgtgcttactgcgcatcc

SEQ ID NO: 399780 - DNA, 60 bp, Artificial
  Synthetic oligonucleotide
gaggacgctagaatttggaaaagacgccctagatattatataaatgatatgcctgactat

SEQ ID NO: 399781 - DNA, 55 bp, Artificial
  Synthetic oligonucleotide
gaggacggaccatacattccattcaagctgactcagctgtcaacgacgtgaaaat

SEQ ID NO: 399782 - DNA, 55 bp, Artificial
  Synthetic oligonucleotide
gaggacggaccgaattgtagcactcctgtcactttcgatgaatctgcctttccgg

SEQ ID NO: 399783 - DNA, 57 bp, Artificial
  Synthetic oligonucleotide
gaggacggacgtcatgcccgtcgacaggtggactctcaacggtcccctcctgaggta

SEQ ID NO: 399784 - DNA, 58 bp, Artificial
  Synthetic oligonucleotide
gaggacggtagaatcctagatgatcctcccatgtgttacagagggcacctaggagggt

SEQ ID NO: 399785 - DNA, 55 bp, Artificial
  Synthetic oligonucleotide
gaggacggtgttaacatgtgtaccctcatggccatagaccttggtgaattgtgtg

SEQ ID NO: 399786 - DNA, 53 bp, Artificial
  Synthetic oligonucleotide
gaggacgtagacgcatcaccgtacaaggaccgtatcacggtaaacccaattat

SEQ ID NO: 399787 - DNA, 55 bp, Artificial
  Synthetic oligonucleotide
gaggacgtatcggaaactctgtgcgattcatcatctgctggggcgggctcccgag

SEQ ID NO: 399788 - DNA, 55 bp, Artificial
  Synthetic oligonucleotide
gaggactaagaatccctccggaaggagtattgagttgccttgaaagggttgacta

SEQ ID NO: 399789 - DNA, 60 bp, Artificial
  Synthetic oligonucleotide
gaggactaggctaactacctggtatccgatcttaattagcatgtagctatgtcaagtcaa

SEQ ID NO: 399790 - DNA, 57 bp, Artificial
  Synthetic oligonucleotide
gaggactatggatttggaattttcaccacaaacatatggttaaaactgcgtgactcc

SEQ ID NO: 399791 - DNA, 58 bp, Artificial
  Synthetic oligonucleotide
gaggactatgtgcgaaaaccgataaccagaccaaccgacatggacaaaatcagacgcc

SEQ ID NO: 399792 - DNA, 55 bp, Artificial
  Synthetic oligonucleotide
gaggactcgatctaggtcgtatgtcagccactgaagcagcaactacgcagagtct

SEQ ID NO: 399793 - DNA, 59 bp, Artificial
  Synthetic oligonucleotide
gaggactcggagagagaggtgttaatgtggaaatttaacagtagactggcatttgaaca

SEQ ID NO: 399794 - DNA, 56 bp, Artificial
  Synthetic oligonucleotide
gaggactcgtaatcccaatgtaccgacttttttccaagcgccgatcgatcacctac

SEQ ID NO: 399795 - DNA, 58 bp, Artificial
  Synthetic oligonucleotide
gaggactcttggactcccaacaatgtcaacgaccgaccttgaggcatacttcaaagac

SEQ ID NO: 399796 - DNA, 60 bp, Artificial
  Synthetic oligonucleotide
gaggactcttggactcgcagcttacataagaggactcttggactcgcagcaatgtcaacg

SEQ ID NO: 399797 - DNA, 60 bp, Artificial
  Synthetic oligonucleotide
gaggactcttggactctcagcaatgtcaacgaccgcaaggtcttacataagaggactctt

SEQ ID NO: 399798 - DNA, 60 bp, Artificial
  Synthetic oligonucleotide
gaggactcttggactttcagcaatgtcaacgcccgatgtcgaaacatacttcaaagactg

SEQ ID NO: 399799 - DNA, 60 bp, Artificial
  Synthetic oligonucleotide
gaggactgagatcataagaatgatggaaagtgccagaccagaagatgtgtctttccaggg

SEQ ID NO: 399800 - DNA, 58 bp, Artificial
  Synthetic oligonucleotide
gaggactgcaataggccaagtatcaaggcccatgttcctgtacgttagaaccaacgga

SEQ ID NO: 399801 - DNA, 60 bp, Artificial
  Synthetic oligonucleotide
gaggactgcatgataaaggcagttcgaggtgatctgaattttgtaaatagagcaaatcaa

SEQ ID NO: 399802 - DNA, 50 bp, Artificial
  Synthetic oligonucleotide
gaggactgcccacactaatgatgtaagacagttagtagaggcagtgcaca

SEQ ID NO: 399803 - DNA, 55 bp, Artificial
  Synthetic oligonucleotide
gaggactggctgcaccgagggccaaaggaattttgtgtgaaggtgctctgtccct

SEQ ID NO: 399804 - DNA, 55 bp, Artificial
  Synthetic oligonucleotide
gaggactgggatcctgatgccgatagtatgctactagataatataactgctgagg

SEQ ID NO: 399805 - DNA, 55 bp, Artificial
  Synthetic oligonucleotide
gaggactgggcagttcccgtgtcctccgaccaccagatgctcgatttcgtggctg

SEQ ID NO: 399806 - DNA, 59 bp, Artificial
  Synthetic oligonucleotide
gaggactggggaccctgcaccgaacatggagagcacaacatcaggattcctaggacccc

SEQ ID NO: 399807 - DNA, 57 bp, Artificial
  Synthetic oligonucleotide
gaggactgggttaacaaatctgacaacagaaagtgagaaagccctcagaaccgtctc

SEQ ID NO: 399808 - DNA, 60 bp, Artificial
  Synthetic oligonucleotide
gaggactggtgtactcttccacagtatctgggaatagcttagaagctgagtattcaaagt

SEQ ID NO: 399809 - DNA, 60 bp, Artificial
  Synthetic oligonucleotide
gaggactgtatcaactagtggaagatcgggctttgaaatcatcaaagtcacagaggggtg

SEQ ID NO: 399810 - DNA, 59 bp, Artificial
  Synthetic oligonucleotide
gaggactgtggaactgggactgagactggggtggaagggcattcaatacttgtggaatc

SEQ ID NO: 399811 - DNA, 58 bp, Artificial
  Synthetic oligonucleotide
gaggactgtggaacttctgggacacaacagtctcaagggactgagactggggtgggaa

SEQ ID NO: 399812 - DNA, 55 bp, Artificial
  Synthetic oligonucleotide
gaggacttcattatatgtaggggcccatactatgtcgagcgttatcaggcgactt

SEQ ID NO: 399813 - DNA, 55 bp, Artificial
  Synthetic oligonucleotide
gaggacttcccggaaggaactccaaaagagttggcacgagaattactcgttatga

SEQ ID NO: 399814 - DNA, 60 bp, Artificial
  Synthetic oligonucleotide
gaggacttctcaagttcatgttactgcccatgagaacagcctgagttccaatgaattctt

SEQ ID NO: 399815 - DNA, 60 bp, Artificial
  Synthetic oligonucleotide
gaggacttgcctgttcttgttggcccgaggatgtacaggctgagcttcctgttggaatta

SEQ ID NO: 399816 - DNA, 55 bp, Artificial
  Synthetic oligonucleotide
gaggacttgcgccctcgttaattagttagcacgcttaattactaccttattgtag

SEQ ID NO: 399817 - DNA, 52 bp, Artificial
  Synthetic oligonucleotide
gaggactttagacagtatactgcattcactctaccatcagtaaacaatgcag

SEQ ID NO: 399818 - DNA, 59 bp, Artificial
  Synthetic oligonucleotide
gaggagaaaatggaagttgacacaattgattggaaatctagatatgaacaattggaaaa

SEQ ID NO: 399819 - DNA, 55 bp, Artificial
  Synthetic oligonucleotide
gaggagaaaatggacggagaacaagaattgcatacgagaggatgtgcaacatcct

SEQ ID NO: 399820 - DNA, 55 bp, Artificial
  Synthetic oligonucleotide
gaggagaaacaaatacctggaagaacatcctagtgcggggaaggatccaaagaaa

SEQ ID NO: 399821 - DNA, 60 bp, Artificial
  Synthetic oligonucleotide
gaggagaaacaactggtaggaattgcactgtgccgtgcttctgggttgagatgataaggg

SEQ ID NO: 399822 - DNA, 55 bp, Artificial
  Synthetic oligonucleotide
gaggagacaagtaagacacaggtgcctgatctttattgcattgaatgcgtcaagg

SEQ ID NO: 399823 - DNA, 55 bp, Artificial
  Synthetic oligonucleotide
gaggagacaggggcactaccctgcaccaagaggaggaaagccatattctccggtt

SEQ ID NO: 399824 - DNA, 55 bp, Artificial
  Synthetic oligonucleotide
gaggagaccaaggaatctataaatacacagcagatcagatgctacacgtgccaca

SEQ ID NO: 399825 - DNA, 58 bp, Artificial
  Synthetic oligonucleotide
gaggagacccctcccttacaaatcgcagcaacaatgggggcccaaggtgagatgaagc

SEQ ID NO: 399826 - DNA, 59 bp, Artificial
  Synthetic oligonucleotide
gaggagactacttgaggttggctacaccccaaccagatatattcatgtttctaggctaa

SEQ ID NO: 399827 - DNA, 53 bp, Artificial
  Synthetic oligonucleotide
gaggagacttctggccctcagggagcgggaaaggagccgtccatcctttacgg

SEQ ID NO: 399828 - DNA, 57 bp, Artificial
  Synthetic oligonucleotide
gaggagagaaagtcgtggtgttagtgtgttgtgggatcgtgtttatcgtgttaatcg

SEQ ID NO: 399829 - DNA, 58 bp, Artificial
  Synthetic oligonucleotide
gaggagagaactaagacgcagtttgtgcatcttgttacctacaggcgaaaaggaaagc

SEQ ID NO: 399830 - DNA, 60 bp, Artificial
  Synthetic oligonucleotide
gaggagagcagattgtcacaacagcgaattcatgagaaccagtttggtccagaatttgta

SEQ ID NO: 399831 - DNA, 60 bp, Artificial
  Synthetic oligonucleotide
gaggagagctcctgctaaatcaattagcaggccgcatgataccgaaaggaactgtcacat

SEQ ID NO: 399832 - DNA, 59 bp, Artificial
  Synthetic oligonucleotide
gaggagaggcttataaaagtccactcatatatggaggggtttgagtctggtatgaagac

SEQ ID NO: 399833 - DNA, 55 bp, Artificial
  Synthetic oligonucleotide
gaggagagtgcaggacaagggtacttttcaacctctgttaaggtagacccgccag

SEQ ID NO: 399834 - DNA, 55 bp, Artificial
  Synthetic oligonucleotide
gaggagagtgtgtttggcactgagggtttggaagcacttgatttgaatacaagtg

SEQ ID NO: 399835 - DNA, 60 bp, Artificial
  Synthetic oligonucleotide
gaggagataaccccattcaacttgattggcatgactgtgaacagtcagaaactagctgac

SEQ ID NO: 399836 - DNA, 60 bp, Artificial
  Synthetic oligonucleotide
gaggagatatacaccacatctaaaaattggtattatacgtatagtgagtatgtattcatc

SEQ ID NO: 399837 - DNA, 55 bp, Artificial
  Synthetic oligonucleotide
gaggagatcaagtcctggagtgttgccggttgttggaaggccatgcctatgggcg

SEQ ID NO: 399838 - DNA, 60 bp, Artificial
  Synthetic oligonucleotide
gaggagatcattcgagctaaagaagctgtgggagcaaacccgctcaaaggcaggactgtt

SEQ ID NO: 399839 - DNA, 60 bp, Artificial
  Synthetic oligonucleotide
gaggagatgctgaccaacacgagcttgcttaattcaattgatgcttcatttggtattgaa

SEQ ID NO: 399840 - DNA, 55 bp, Artificial
  Synthetic oligonucleotide
gaggagattaaggataggttaattaggtctagtaaatatgaacccatagatttta

SEQ ID NO: 399841 - DNA, 55 bp, Artificial
  Synthetic oligonucleotide
gaggagattgcaacgtagcttaggatctcatccaatctacatgggatcaatggat

SEQ ID NO: 399842 - DNA, 55 bp, Artificial
  Synthetic oligonucleotide
gaggagattggtcttcatattgtgaggtttccctaacacaaagtactaaggtctc

SEQ ID NO: 399843 - DNA, 60 bp, Artificial
  Synthetic oligonucleotide
gaggagcaatcaattagtgacgcgtatataaccggaagtgccgcagtgactgcctagtat

SEQ ID NO: 399844 - DNA, 55 bp, Artificial
  Synthetic oligonucleotide
gaggagcacgaccactgcctcttccaggtcttccaacagggagctgcaatcaact

SEQ ID NO: 399845 - DNA, 60 bp, Artificial
  Synthetic oligonucleotide
gaggagcagtgggatcgggcaagtcaactggactaccataccatcttagtatgcgcggaa

SEQ ID NO: 399846 - DNA, 60 bp, Artificial
  Synthetic oligonucleotide
gaggagcatttgtgagaagcttgagcaatctgggctcccagtcggaggcaatgagaagaa

SEQ ID NO: 399847 - DNA, 55 bp, Artificial
  Synthetic oligonucleotide
gaggagccaacccctcctcgtagagttagtacaccaattgaaagaatcagtcagg

SEQ ID NO: 399848 - DNA, 55 bp, Artificial
  Synthetic oligonucleotide
gaggagccaggtataagagacaagttcacaacctcactcaagttatcaggggctc

SEQ ID NO: 399849 - DNA, 60 bp, Artificial
  Synthetic oligonucleotide
gaggagccattgaccggtcaatcggtgtctctcaactctctcctatgtaattggtgtctg

SEQ ID NO: 399850 - DNA, 60 bp, Artificial
  Synthetic oligonucleotide
gaggagccattgactggtcaatcggtgtctcttaaacttggctatgcaattggtgtctgg

SEQ ID NO: 399851 - DNA, 58 bp, Artificial
  Synthetic oligonucleotide
gaggagccattgtatattacgacccgctgaaactgatatctaagttaggttgtaaaca

SEQ ID NO: 399852 - DNA, 57 bp, Artificial
  Synthetic oligonucleotide
gaggagcccatggttccggatccttcatgaaaatcctatccaggttactggataggt

SEQ ID NO: 399853 - DNA, 55 bp, Artificial
  Synthetic oligonucleotide
gaggagccccctctccatccttatccttctttccgattattcctttgatgttccc

SEQ ID NO: 399854 - DNA, 53 bp, Artificial
  Synthetic oligonucleotide
gaggagccttagtgagaaacccactctcacggaactccacacatgagatgtac

SEQ ID NO: 399855 - DNA, 55 bp, Artificial
  Synthetic oligonucleotide
gaggagcgaatccaagttggcaaggacctgctcaactcctctggaagggtgaagg

SEQ ID NO: 399856 - DNA, 55 bp, Artificial
  Synthetic oligonucleotide
gaggagcgagggcacaagttatgtggttgcacagtcttcagatcccacacggctc

SEQ ID NO: 399857 - DNA, 60 bp, Artificial
  Synthetic oligonucleotide
gaggagcgcctcagacacatgaacttctggaccagaagcaacgataacctagagctaacc

SEQ ID NO: 399858 - DNA, 55 bp, Artificial
  Synthetic oligonucleotide
gaggagcgtggtttcaagcctacttaaatggaatggttcaaggtgacggtgccgc

SEQ ID NO: 399859 - DNA, 52 bp, Artificial
  Synthetic oligonucleotide
gaggagctaatcgggaaaatcccctaccgtttcagacgaagggacacaacct

SEQ ID NO: 399860 - DNA, 60 bp, Artificial
  Synthetic oligonucleotide
gaggagctataatcataatttctgaattagtcattggtaattcaatgccaacctccactg

SEQ ID NO: 399861 - DNA, 55 bp, Artificial
  Synthetic oligonucleotide
gaggagctatgaaagtaacaccctcaagccactaatcggagcatttatagatggc

SEQ ID NO: 399862 - DNA, 55 bp, Artificial
  Synthetic oligonucleotide
gaggagctcgaaggaaagagtcctcagcctctcctctccgaggagcttcggctca

SEQ ID NO: 399863 - DNA, 50 bp, Artificial
  Synthetic oligonucleotide
gaggagcttaattcatgggtgcaaatagggcgttttgactcattgtgtac

SEQ ID NO: 399864 - DNA, 59 bp, Artificial
  Synthetic oligonucleotide
gaggaggaaaaggattggattgtggtaccgacatggaggataccaggcaggctagagaa

SEQ ID NO: 399865 - DNA, 55 bp, Artificial
  Synthetic oligonucleotide
gaggaggaaagcaaagaaagcaacggggctagcgagtggatgttcctccccccga

SEQ ID NO: 399866 - DNA, 55 bp, Artificial
  Synthetic oligonucleotide
gaggaggaaggattttccagtctcagagagagcgcagctcctcccactcatcata

SEQ ID NO: 399867 - DNA, 60 bp, Artificial
  Synthetic oligonucleotide
gaggaggatctttggaactcgagcatgcatgaggtgcaaaagacctacttgtccaagcct

SEQ ID NO: 399868 - DNA, 60 bp, Artificial
  Synthetic oligonucleotide
gaggaggcaaagtcgagagggcggagacactctgaggagaggactcccaagaggacaaga

SEQ ID NO: 399869 - DNA, 55 bp, Artificial
  Synthetic oligonucleotide
gaggaggcagggctgccacatgtggtaagtacctcttcaactgggcagtaaggac

SEQ ID NO: 399870 - DNA, 57 bp, Artificial
  Synthetic oligonucleotide
gaggaggcatacacaaactttcgcaacacagggcgtatctcccgtgcaacattgtca

SEQ ID NO: 399871 - DNA, 60 bp, Artificial
  Synthetic oligonucleotide
gaggaggcattgactggtcaattggtgtctctcaaactctgctatgcaatcggtgtctgg

SEQ ID NO: 399872 - DNA, 55 bp, Artificial
  Synthetic oligonucleotide
gaggaggccctcaaaggatcagccaggcacatagaggaatgttcgtgctatgggc

SEQ ID NO: 399873 - DNA, 59 bp, Artificial
  Synthetic oligonucleotide
gaggaggccgacggacgaagaacgccacaagcacagacgcagagcgttggggcttccaa

SEQ ID NO: 399874 - DNA, 59 bp, Artificial
  Synthetic oligonucleotide
gaggaggcgacaatcattaacgttgccactggtcaacgggctttggtgtctagcattaa

SEQ ID NO: 399875 - DNA, 57 bp, Artificial
  Synthetic oligonucleotide
gaggaggcgatatagaagctgtagggcatgacagtcaggcgtatacgcatactgtta

SEQ ID NO: 399876 - DNA, 54 bp, Artificial
  Synthetic oligonucleotide
gaggaggcgtttgaaccccctgctaagataccattttctggcaccgtcgaaagg

SEQ ID NO: 399877 - DNA, 54 bp, Artificial
  Synthetic oligonucleotide
gaggaggcgtttgaatcccctggcaacataccactttttcgcaccgtcgaaagg

SEQ ID NO: 399878 - DNA, 54 bp, Artificial
  Synthetic oligonucleotide
gaggaggctaccgacaaggacgggtgcccaaaacccaaagatattgaggagttc

SEQ ID NO: 399879 - DNA, 54 bp, Artificial
  Synthetic oligonucleotide
gaggaggctggttactcagataggatcatgcaaataaccgcaggcaactccact

SEQ ID NO: 399880 - DNA, 60 bp, Artificial
  Synthetic oligonucleotide
gaggagggacacgcgtagtgaacttggatcagattgctccgatgagattcgttctggatc

SEQ ID NO: 399881 - DNA, 55 bp, Artificial
  Synthetic oligonucleotide
gaggagggacttcagaggttgaatgtcttctacggaagacaactttacttcgtag

SEQ ID NO: 399882 - DNA, 56 bp, Artificial
  Synthetic oligonucleotide
gaggagggcaccacgtttaggcagttcagggacaccatagtggaacaacaatacgg

SEQ ID NO: 399883 - DNA, 54 bp, Artificial
  Synthetic oligonucleotide
gaggagggcctgttcccaaccgagagacgccatgcacccggtactccaaaacgt

SEQ ID NO: 399884 - DNA, 59 bp, Artificial
  Synthetic oligonucleotide
gaggagggcttctggtccctgttgagacctctagaaggacttagaggctagccttgaga

SEQ ID NO: 399885 - DNA, 55 bp, Artificial
  Synthetic oligonucleotide
gaggaggggatagtatgcgtcaaagtataagaactatatccgaagcacagaaaca

SEQ ID NO: 399886 - DNA, 60 bp, Artificial
  Synthetic oligonucleotide
gaggagggggcgcactggccgtacgtgtgacggctcgtatgtgcgcctcatcagtcggta

SEQ ID NO: 399887 - DNA, 60 bp, Artificial
  Synthetic oligonucleotide
gaggaggtcacagacgagtgggacgaactacttgttcagtgagtctgacagtacgataat

SEQ ID NO: 399888 - DNA, 58 bp, Artificial
  Synthetic oligonucleotide
gaggaggtcatttgagttgaagaagctgtgggaacaaacccgctcaaaggcaggacta

SEQ ID NO: 399889 - DNA, 60 bp, Artificial
  Synthetic oligonucleotide
gaggaggtgatgagaacccaagaggcccagtaagcaaggagcacatagaatggtgcaggg

SEQ ID NO: 399890 - DNA, 60 bp, Artificial
  Synthetic oligonucleotide
gaggaggtgtgcaagttactgacagcaccacaggacgtttgtgtatgttagtggatcatg

SEQ ID NO: 399891 - DNA, 56 bp, Artificial
  Synthetic oligonucleotide
gaggaggtgttccgcacagactttggtttccacccgaacgccgagtggatcctgaa

SEQ ID NO: 399892 - DNA, 60 bp, Artificial
  Synthetic oligonucleotide
gaggagtatacagtgccatgttgtacatatcgagtctacctgaaatggaacaggataaat

SEQ ID NO: 399893 - DNA, 60 bp, Artificial
  Synthetic oligonucleotide
gaggagtcatgttcacctgcaatcgcactcagaccgtttacaacctccaacaagtagtaa

SEQ ID NO: 399894 - DNA, 50 bp, Artificial
  Synthetic oligonucleotide
gaggagtgaggccaactctatggtttaccaaagggtgtgcctagatgtta

SEQ ID NO: 399895 - DNA, 50 bp, Artificial
  Synthetic oligonucleotide
gaggagtgagggtcagtaaaacaggagtagacgaatattccagtaccgag

SEQ ID NO: 399896 - DNA, 55 bp, Artificial
  Synthetic oligonucleotide
gaggagtgccactatgcaagaaattttcgctgcaatcgactttgctggtatcgct

SEQ ID NO: 399897 - DNA, 58 bp, Artificial
  Synthetic oligonucleotide
gaggagtggcagttaggattcgttcctgcaccggataatcctatccacgatacataca

SEQ ID NO: 399898 - DNA, 60 bp, Artificial
  Synthetic oligonucleotide
gaggagtggctacgtatggggtgatcataaacacgcccaggaagtgacgtatgtcagcca

SEQ ID NO: 399899 - DNA, 56 bp, Artificial
  Synthetic oligonucleotide
gaggagtggggcgccgccgagataagtgccccgattgaccgagcttcaacccttta

SEQ ID NO: 399900 - DNA, 60 bp, Artificial
  Synthetic oligonucleotide
gaggagtgtggatatagtgacagggtgaggtcaatcaccatagggaactctaccataacc

SEQ ID NO: 399901 - DNA, 55 bp, Artificial
  Synthetic oligonucleotide
gaggagtgtggatgggaatattatgttaaggagtttgaaaacatcgcttctggtc

SEQ ID NO: 399902 - DNA, 60 bp, Artificial
  Synthetic oligonucleotide
gaggagttcgggtgcttagccataagtgacggatgtgtcttcggatcatgtcaagacata

SEQ ID NO: 399903 - DNA, 60 bp, Artificial
  Synthetic oligonucleotide
gaggagtttgagtatcgctcaatgctcgcggaagagtatgagcgtatgcaagaggaagcc

SEQ ID NO: 399904 - DNA, 58 bp, Artificial
  Synthetic oligonucleotide
gaggagtttgcctgtggaaaaagagcaaaaatgacccaaaatccacagaacagatctg

SEQ ID NO: 399905 - DNA, 55 bp, Artificial
  Synthetic oligonucleotide
gaggataactaaagggacattattctacgtacgattctattcggctacagcagag

SEQ ID NO: 399906 - DNA, 55 bp, Artificial
  Synthetic oligonucleotide
gaggatacaagcagaagtggagtactagaggtgatggactcccaaaagatacccg

SEQ ID NO: 399907 - DNA, 56 bp, Artificial
  Synthetic oligonucleotide
gaggatacagtgatcagcgtttatggaatctataatgggatgaagctgatcagact

SEQ ID NO: 399908 - DNA, 55 bp, Artificial
  Synthetic oligonucleotide
gaggataccctatggctaatatagtacgttgcgaaatgcctgatggagtccaccg

SEQ ID NO: 399909 - DNA, 56 bp, Artificial
  Synthetic oligonucleotide
gaggataccgcattcgaaactggaattgacggaacgttttatgcttacaaagtcga

SEQ ID NO: 399910 - DNA, 54 bp, Artificial
  Synthetic oligonucleotide
gaggatacctgccgaaattgcagcggaacaattgtgccttacagaggagcatgt

SEQ ID NO: 399911 - DNA, 55 bp, Artificial
  Synthetic oligonucleotide
gaggatacctgggaaagatgttctccgagctaagttatgagagcgtgaggacaca

SEQ ID NO: 399912 - DNA, 55 bp, Artificial
  Synthetic oligonucleotide
gaggatactgaggaggtgcaattccaggctaaaccggatggggagagaaacctcg

SEQ ID NO: 399913 - DNA, 55 bp, Artificial
  Synthetic oligonucleotide
gaggatagggatgacttaacagctactagtgtagcgtgtaaaattggcgtttcaa

SEQ ID NO: 399914 - DNA, 57 bp, Artificial
  Synthetic oligonucleotide
gaggatagtgtaaacccttttctgtcgggtacggagctaaagaatgatgatggtcca

SEQ ID NO: 399915 - DNA, 55 bp, Artificial
  Synthetic oligonucleotide
gaggatataagtctacactcctcaataatgacacccattagctctaaatcgtacc

SEQ ID NO: 399916 - DNA, 60 bp, Artificial
  Synthetic oligonucleotide
gaggatatctaccatgttcagcagatgattatcgtcaagcaagtatgattaacgcagtta

SEQ ID NO: 399917 - DNA, 60 bp, Artificial
  Synthetic oligonucleotide
gaggatattaatggcatcaggagaccaaaacatctatatgtatccatgcctactgcccag

SEQ ID NO: 399918 - DNA, 58 bp, Artificial
  Synthetic oligonucleotide
gaggatattggccaacaaaaggaccttgctgcattaaggttatgtattgaagtttggc

SEQ ID NO: 399919 - DNA, 55 bp, Artificial
  Synthetic oligonucleotide
gaggatatttccaaacagtttgcagagcgaacgcgcgtaaggcctcctccaaagg

SEQ ID NO: 399920 - DNA, 60 bp, Artificial
  Synthetic oligonucleotide
gaggatatttggaatcacacgacttggatgcagtgggatagagaaattagcaattacaca

SEQ ID NO: 399921 - DNA, 55 bp, Artificial
  Synthetic oligonucleotide
gaggatcaaagagcgatcgatccgcttgacttttgtgcaatgatttcacggaatg

SEQ ID NO: 399922 - DNA, 60 bp, Artificial
  Synthetic oligonucleotide
gaggatcaagaattgttaaccaaacatggtttgacacttgcacctattggattcaagtca

SEQ ID NO: 399923 - DNA, 55 bp, Artificial
  Synthetic oligonucleotide
gaggatcaagttacagtagcaatgcgtgaggagccgggagttatttcgacatcct

SEQ ID NO: 399924 - DNA, 58 bp, Artificial
  Synthetic oligonucleotide
gaggatcagccaccggaggggacgcgatgccaaagagtgggggaaatctcgcgaggga

SEQ ID NO: 399925 - DNA, 60 bp, Artificial
  Synthetic oligonucleotide
gaggatcagtagcccataaatcatgcctacctgcctgtgtttatggccttgcagtaacca

SEQ ID NO: 399926 - DNA, 58 bp, Artificial
  Synthetic oligonucleotide
gaggatcagtatggaccggaatttactatacgtaacaataattataagtcatcgtaca

SEQ ID NO: 399927 - DNA, 55 bp, Artificial
  Synthetic oligonucleotide
gaggatcatgttggaaactcatggcctcagtctgactccgtcgattggaatgacg

SEQ ID NO: 399928 - DNA, 58 bp, Artificial
  Synthetic oligonucleotide
gaggatcctaggcatttttgacttgcgcaactaaacgaacttgtttcattgccccata

SEQ ID NO: 399929 - DNA, 60 bp, Artificial
  Synthetic oligonucleotide
gaggatcctaggcgtcactgacttgcgctaatatttgagtctggtttattctcatcatgg

SEQ ID NO: 399930 - DNA, 55 bp, Artificial
  Synthetic oligonucleotide
gaggatcgacttttctctcactcgagcaactcgctgaactaagcaagagtgaccc

SEQ ID NO: 399931 - DNA, 55 bp, Artificial
  Synthetic oligonucleotide
gaggatcgcactgaatcgacatttctcgccgaaaagatcagagaacgccagttgc

SEQ ID NO: 399932 - DNA, 55 bp, Artificial
  Synthetic oligonucleotide
gaggatcgcgcggcactatccgatccagagttgagaagtgttgcgtttacgaggc

SEQ ID NO: 399933 - DNA, 55 bp, Artificial
  Synthetic oligonucleotide
gaggatcggggtgtatgcacggtcgtccccgtctcaaacttcctcgtgtcccctg

SEQ ID NO: 399934 - DNA, 53 bp, Artificial
  Synthetic oligonucleotide
gaggatcgttaacgggaaaacctcccatctcgttcgtcgaagccacgttggtg

SEQ ID NO: 399935 - DNA, 60 bp, Artificial
  Synthetic oligonucleotide
gaggatctcagctgaacatgggtgagatcaatggtaaagaacgtgtttgctcaacccagc

SEQ ID NO: 399936 - DNA, 60 bp, Artificial
  Synthetic oligonucleotide
gaggatctgaacagactgagggatctaaacaaagaggtagacaggttaatgtctatgaaa

SEQ ID NO: 399937 - DNA, 60 bp, Artificial
  Synthetic oligonucleotide
gaggatctggcgtcaagcgaacaatggagaagatgcaactgctggtcttactcatctgat

SEQ ID NO: 399938 - DNA, 60 bp, Artificial
  Synthetic oligonucleotide
gaggatcttgctgcccactggcacgctctgggcgccgcacaagaagtgaaaggacgtacc

SEQ ID NO: 399939 - DNA, 55 bp, Artificial
  Synthetic oligonucleotide
gaggatgaaacttgcagaggtctaaattatggagcaaaatgcatcagttttgacc

SEQ ID NO: 399940 - DNA, 56 bp, Artificial
  Synthetic oligonucleotide
gaggatgataagaacggactaacgtaagtttggggcggagcctggaagattcgatc

SEQ ID NO: 399941 - DNA, 55 bp, Artificial
  Synthetic oligonucleotide
gaggatgatatatttcggaagaaaaggctaaccatcatggacttacatccaggag

SEQ ID NO: 399942 - DNA, 50 bp, Artificial
  Synthetic oligonucleotide
gaggatgattacccagactgtaatttagctcttgtagccaatcaggtaga

SEQ ID NO: 399943 - DNA, 55 bp, Artificial
  Synthetic oligonucleotide
gaggatgatttagaacaacgtgccatgtcaggattaactggggaagatggaggac

SEQ ID NO: 399944 - DNA, 55 bp, Artificial
  Synthetic oligonucleotide
gaggatgcaatcacgcaagcattattcggtatcagtgcgcaaaatgtgaacgccc

SEQ ID NO: 399945 - DNA, 60 bp, Artificial
  Synthetic oligonucleotide
gaggatgctgatagattttagagaactaaataaggtgactcaagatttcacagaaattca

SEQ ID NO: 399946 - DNA, 53 bp, Artificial
  Synthetic oligonucleotide
gaggatgctgcacttggcagaggttctacctacgctaaactagaagttctact

SEQ ID NO: 399947 - DNA, 54 bp, Artificial
  Synthetic oligonucleotide
gaggatggacccagcggtacgtatggtggcgggggtcgttggtcatttaatgtt

SEQ ID NO: 399948 - DNA, 55 bp, Artificial
  Synthetic oligonucleotide
gaggatggatgttgtatcaaagagagttacaatgatgagcatatcaatccggagt

SEQ ID NO: 399949 - DNA, 54 bp, Artificial
  Synthetic oligonucleotide
gaggatggtgatatgtttgacataggtctaggtgctatggactttggttctttg

SEQ ID NO: 399950 - DNA, 55 bp, Artificial
  Synthetic oligonucleotide
gaggatgtagacagccctgaaaacgtcaagatggtgaatcagccaacaacagggc

SEQ ID NO: 399951 - DNA, 60 bp, Artificial
  Synthetic oligonucleotide
gaggatgtagcttggctatctaagactgaaaggtctcgtgggtggtatagatcgttcaca

SEQ ID NO: 399952 - DNA, 50 bp, Artificial
  Synthetic oligonucleotide
gaggatgtcaccgtaattggcaaaggtggcgtcaaacatgaaaagatcag

SEQ ID NO: 399953 - DNA, 55 bp, Artificial
  Synthetic oligonucleotide
gaggatgtccagtcagtcccctagcccaagcgcctacatcgtccttgatcctgga

SEQ ID NO: 399954 - DNA, 60 bp, Artificial
  Synthetic oligonucleotide
gaggatgtgaatctatatagtgccacaaatcctaggactgaaagctttaggaacgctagt

SEQ ID NO: 399955 - DNA, 55 bp, Artificial
  Synthetic oligonucleotide
gaggatgtggaaagagaaaggagggcagccctgtgctctctcactgtggaggagc

SEQ ID NO: 399956 - DNA, 60 bp, Artificial
  Synthetic oligonucleotide
gaggatgttcctgcaggctgtggcgttcgtgatattgaagcatatagatcgcgaaaggcg

SEQ ID NO: 399957 - DNA, 58 bp, Artificial
  Synthetic oligonucleotide
gaggatgttcgcaacattgctaaaacccatcggtcgcctacccttctacgaacgcaga

SEQ ID NO: 399958 - DNA, 55 bp, Artificial
  Synthetic oligonucleotide
gaggatgttctaatacctaagcggtttagacccgcaaaggatccgttagatagcc

SEQ ID NO: 399959 - DNA, 60 bp, Artificial
  Synthetic oligonucleotide
gaggatgttctgaatgtgcaaacgaacacttttgctatagagtcagccacggagaccatg

SEQ ID NO: 399960 - DNA, 60 bp, Artificial
  Synthetic oligonucleotide
gaggatgttgccccaattgaacacattgcaagtatgaggaggaactattttacagcggaa

SEQ ID NO: 399961 - DNA, 55 bp, Artificial
  Synthetic oligonucleotide
gaggattaacaaccaatgcaccgccacaaggcagagatgtggtcgaatggctcgg

SEQ ID NO: 399962 - DNA, 56 bp, Artificial
  Synthetic oligonucleotide
gaggattaacggagagtactgacttttgctagtcgggagtccgacccactatatgg

SEQ ID NO: 399963 - DNA, 55 bp, Artificial
  Synthetic oligonucleotide
gaggattcagaaccaaaagtgacacaccatccagacttatgtgattcccggaaga

SEQ ID NO: 399964 - DNA, 55 bp, Artificial
  Synthetic oligonucleotide
gaggattcagcgactaggaagagtggggagatctaagcctggaactgcattgcgt

SEQ ID NO: 399965 - DNA, 58 bp, Artificial
  Synthetic oligonucleotide
gaggattccaaatcccaactgccagttgccagttccgttggacaggtacttggcctgc

SEQ ID NO: 399966 - DNA, 55 bp, Artificial
  Synthetic oligonucleotide
gaggattccgcaaaggagaatgccacttcactggtggatgcccgaaaggccctcc

SEQ ID NO: 399967 - DNA, 60 bp, Artificial
  Synthetic oligonucleotide
gaggattcctctacgtttctataaggcaagatgatggggaattgagacctatcatggttg

SEQ ID NO: 399968 - DNA, 58 bp, Artificial
  Synthetic oligonucleotide
gaggattctagtattattaattcaggctctactatacctacctttactggtactgatg

SEQ ID NO: 399969 - DNA, 55 bp, Artificial
  Synthetic oligonucleotide
gaggattctccttatgaacctgctgttctttccatcaatgaccagcgccttgcag

SEQ ID NO: 399970 - DNA, 55 bp, Artificial
  Synthetic oligonucleotide
gaggattctgaaggcttactggagtggtgcactagaacactgaaacaggcatgtg

SEQ ID NO: 399971 - DNA, 50 bp, Artificial
  Synthetic oligonucleotide
gaggattgaacacattagttttaagagcagtgctacctagagatatggtg

SEQ ID NO: 399972 - DNA, 60 bp, Artificial
  Synthetic oligonucleotide
gaggattgcaaagatgttagcgatctaaaacaatatgatagtgatgagccaaagtctaga

SEQ ID NO: 399973 - DNA, 51 bp, Artificial
  Synthetic oligonucleotide
gaggattgcttgggaaaacccaggttggggtaggagtacacgtggagggtg

SEQ ID NO: 399974 - DNA, 56 bp, Artificial
  Synthetic oligonucleotide
gaggattggttcggatacccctggccctaccagttgctggcccccgtgccgcaaga

SEQ ID NO: 399975 - DNA, 60 bp, Artificial
  Synthetic oligonucleotide
gaggatttcagtaactcacatgtcgtccttaatactggctctcgcagaagcatcttaaat

SEQ ID NO: 399976 - DNA, 60 bp, Artificial
  Synthetic oligonucleotide
gaggatttgttcatcaaagaatggcatccaagattggaagatggtactctcgaacgatgt

SEQ ID NO: 399977 - DNA, 56 bp, Artificial
  Synthetic oligonucleotide
gaggattttgagaaagattatacagatgacgaccatcttattatcgctaacagtgc

SEQ ID NO: 399978 - DNA, 57 bp, Artificial
  Synthetic oligonucleotide
gaggatttttgttagagaggaccaatcagaagggccggttagagaggaatatgcagg

SEQ ID NO: 399979 - DNA, 55 bp, Artificial
  Synthetic oligonucleotide
gaggcaaacagcagggcacacaaagaggcactggcggaactgccagactccctgg

SEQ ID NO: 399980 - DNA, 57 bp, Artificial
  Synthetic oligonucleotide
gaggcaaaggatggtgcagacaaattccgtgattctacatttgtagatcccgtgtat

SEQ ID NO: 399981 - DNA, 60 bp, Artificial
  Synthetic oligonucleotide
gaggcaacccaaatcgaagttagacacctcgattcagtctgagtatcctgcgttgcaaac

SEQ ID NO: 399982 - DNA, 58 bp, Artificial
  Synthetic oligonucleotide
gaggcaactgccaacaaactttatgtcaacaagaacccttatacactggtatcaacaa

SEQ ID NO: 399983 - DNA, 55 bp, Artificial
  Synthetic oligonucleotide
gaggcaagagtggctagggtggaagccctggtagattgaatgatggtataccaag

SEQ ID NO: 399984 - DNA, 55 bp, Artificial
  Synthetic oligonucleotide
gaggcaagcaagacggaacccaggaaggatgagaactacacggaaatggtaaaca

SEQ ID NO: 399985 - DNA, 59 bp, Artificial
  Synthetic oligonucleotide
gaggcaagtggtcaaaaagtagcatagtgggatggcctcagattagggaaagaataaga

SEQ ID NO: 399986 - DNA, 56 bp, Artificial
  Synthetic oligonucleotide
gaggcaatctgtgacatgtacagcgcacctcgagttgatcccatcttcatcgcaac

SEQ ID NO: 399987 - DNA, 58 bp, Artificial
  Synthetic oligonucleotide
gaggcaatgagccaagcacaaaaaacaactgtaatgatgcagaaaagtaactttaagg

SEQ ID NO: 399988 - DNA, 54 bp, Artificial
  Synthetic oligonucleotide
gaggcaatgcaatatggacataaaggtgtatggcaagtaagaactggaactgac

SEQ ID NO: 399989 - DNA, 55 bp, Artificial
  Synthetic oligonucleotide
gaggcaattccccggtattcaactacaacaaggccaccaagagactcacggtcct

SEQ ID NO: 399990 - DNA, 55 bp, Artificial
  Synthetic oligonucleotide
gaggcaattctccagtgttcaattacaataaggccactaagagacttacagttct

SEQ ID NO: 399991 - DNA, 53 bp, Artificial
  Synthetic oligonucleotide
gaggcaatttgtacctagttcaaaccgccactaatggaaattggtcacctatg

SEQ ID NO: 399992 - DNA, 60 bp, Artificial
  Synthetic oligonucleotide
gaggcacaaaagtatggtagtaccaatcattgggaagtatgttatggcagcacagttata

SEQ ID NO: 399993 - DNA, 55 bp, Artificial
  Synthetic oligonucleotide
gaggcacagcgctgcaactgttattggactattgttaccgcatgcaagcgtcacc

SEQ ID NO: 399994 - DNA, 55 bp, Artificial
  Synthetic oligonucleotide
gaggcacaggaagatcatgataaatatcatagtaattggaaagcattggctgatg

SEQ ID NO: 399995 - DNA, 52 bp, Artificial
  Synthetic oligonucleotide
gaggcaccttggaccccaaaaacagtagggggattaggaggtttcataaatg

SEQ ID NO: 399996 - DNA, 56 bp, Artificial
  Synthetic oligonucleotide
gaggcacgtcggggctgtgtcgcatgagatccaaaatctcgcgttcgtgattcgta

SEQ ID NO: 399997 - DNA, 56 bp, Artificial
  Synthetic oligonucleotide
gaggcacgttcagtgactcgacgattcccgggcaaaaaaagtttcgccgtcatcca

SEQ ID NO: 399998 - DNA, 55 bp, Artificial
  Synthetic oligonucleotide
gaggcactacccaatcagtaccttctaaccctaaacattctaacctaaggatggc

SEQ ID NO: 399999 - DNA, 60 bp, Artificial
  Synthetic oligonucleotide
gaggcactatcctccttctcatccgtcgaacaatcccaaattacgcgcaaagctcttgcc

SEQ ID NO: 400000 - DNA, 52 bp, Artificial
  Synthetic oligonucleotide
gaggcactccaacgatcacagatggagttgactagagagttggcagtcaatg

SEQ ID NO: 400001 - DNA, 55 bp, Artificial
  Synthetic oligonucleotide
gaggcactctggcaacgtaacggcgaactcgtaccaatgctcggcttcgaaattg

SEQ ID NO: 400002 - DNA, 60 bp, Artificial
  Synthetic oligonucleotide
gaggcactctggcggtcttggagtgcctatgagcgacggttcggtgctcgatatagagcc

SEQ ID NO: 400003 - DNA, 57 bp, Artificial
  Synthetic oligonucleotide
gaggcagacgataagatttcttatcgttttacctttgatgaacctgtttcgtcagac

SEQ ID NO: 400004 - DNA, 57 bp, Artificial
  Synthetic oligonucleotide
gaggcagaggtttccttctaaattgaaagagaagggttgctgcgagaggtcttggtg

SEQ ID NO: 400005 - DNA, 57 bp, Artificial
  Synthetic oligonucleotide
gaggcagattcaaattaatttggttgattggacagagagtgagaacggaaaagaggg

SEQ ID NO: 400006 - DNA, 55 bp, Artificial
  Synthetic oligonucleotide
gaggcagcccattcagatgttcgagagtctctagctaggttcattcccactatcg

SEQ ID NO: 400007 - DNA, 54 bp, Artificial
  Synthetic oligonucleotide
gaggcagctccaacgtgcccataagaatgagagccaagtggtacgtaaacatgt

SEQ ID NO: 400008 - DNA, 51 bp, Artificial
  Synthetic oligonucleotide
gaggcagctgtctagtggccctagtgagctgacactaggagaccgatacgt

SEQ ID NO: 400009 - DNA, 55 bp, Artificial
  Synthetic oligonucleotide
gaggcaggaggtagcatcttttatgaatcagggtaaggtgagacgccttagtgat

SEQ ID NO: 400010 - DNA, 55 bp, Artificial
  Synthetic oligonucleotide
gaggcaggatgaattccaaatgcaaggccccacatacgactttgacgctgaccgg

SEQ ID NO: 400011 - DNA, 55 bp, Artificial
  Synthetic oligonucleotide
gaggcaggcgttcttgaatgctgacccatatgtgataacctcgctcaagattgcc

SEQ ID NO: 400012 - DNA, 60 bp, Artificial
  Synthetic oligonucleotide
gaggcagggattcttctcaaagattgaggagctatggccagtactcgatggctagacgtg

SEQ ID NO: 400013 - DNA, 54 bp, Artificial
  Synthetic oligonucleotide
gaggcagtaaaccacctaccaagggagctgattttccaggtttggcaaaggtct

SEQ ID NO: 400014 - DNA, 55 bp, Artificial
  Synthetic oligonucleotide
gaggcagtcaaccacttccatctgggagatgatatggacccagaactcaggcagc

SEQ ID NO: 400015 - DNA, 56 bp, Artificial
  Synthetic oligonucleotide
gaggcataaagttgcgtgtgatgcggaagggtcccggcacctcggaacggttgtta

SEQ ID NO: 400016 - DNA, 55 bp, Artificial
  Synthetic oligonucleotide
gaggcatacatgttcactcaagtactacactgttgtgatggatcccttagttagt

SEQ ID NO: 400017 - DNA, 55 bp, Artificial
  Synthetic oligonucleotide
gaggcatatcgccagctcaatgacggacagccggttaacgtcgggatgatggctc

SEQ ID NO: 400018 - DNA, 60 bp, Artificial
  Synthetic oligonucleotide
gaggcatcaaatgaaatagctgataccgaatggaaaaatacactgtcacagctgtttctg

SEQ ID NO: 400019 - DNA, 54 bp, Artificial
  Synthetic oligonucleotide
gaggcatccagagatacttgactgtggttcaaaagaggattataagctaaccct

SEQ ID NO: 400020 - DNA, 55 bp, Artificial
  Synthetic oligonucleotide
gaggcatcctcaggtgtgagcacggggtcattgggatcgtctcaattggcggccc

SEQ ID NO: 400021 - DNA, 60 bp, Artificial
  Synthetic oligonucleotide
gaggcatggctcataggttgagttgtaaggctgatatgctgtgcatcttacttgcaatcg

SEQ ID NO: 400022 - DNA, 50 bp, Artificial
  Synthetic oligonucleotide
gaggcatggtgcttttagttcaggcaaagactctctaagtaagttccaga

SEQ ID NO: 400023 - DNA, 55 bp, Artificial
  Synthetic oligonucleotide
gaggcatgtggttatagtgatagagttatgcaactaactttaggaaactccacca

SEQ ID NO: 400024 - DNA, 55 bp, Artificial
  Synthetic oligonucleotide
gaggcatgttgactaagtcaatcggtactcaataaacttggctatgcaattgggg

SEQ ID NO: 400025 - DNA, 55 bp, Artificial
  Synthetic oligonucleotide
gaggcattcaagccctattctagacccgacaaatggattgacttcacaagcttac

SEQ ID NO: 400026 - DNA, 51 bp, Artificial
  Synthetic oligonucleotide
gaggcattcatggcaacaaataaggcatattttttaaaccggcagcgtcaa

SEQ ID NO: 400027 - DNA, 57 bp, Artificial
  Synthetic oligonucleotide
gaggcatttcccggcatcaatttgcgacacgcgcggcggtgtgtacccctgggaggg

SEQ ID NO: 400028 - DNA, 54 bp, Artificial
  Synthetic oligonucleotide
gaggcatttgccccggaggcaagaaatgggctcgtaaagctaaagtacaaaggg

SEQ ID NO: 400029 - DNA, 60 bp, Artificial
  Synthetic oligonucleotide
gaggcatttgttcagtggaatcagatctttcagcaggactgaattgatcgcaccttcttc

SEQ ID NO: 400030 - DNA, 58 bp, Artificial
  Synthetic oligonucleotide
gaggccaactcgaccatctactctgtccccggcgatactcgcgaactagtcaagccga

SEQ ID NO: 400031 - DNA, 60 bp, Artificial
  Synthetic oligonucleotide
gaggccaagcaaagtatggcaccaggattaccgagtcttcgaagtaggcataattagaga

SEQ ID NO: 400032 - DNA, 60 bp, Artificial
  Synthetic oligonucleotide
gaggccaagccctggtacaagctcatcaaactcctaagccgcctgtcgtgcatggccgct

SEQ ID NO: 400033 - DNA, 55 bp, Artificial
  Synthetic oligonucleotide
gaggccaagcttttcaatgcactcccagacagattctacatccattcaggtaaga

SEQ ID NO: 400034 - DNA, 55 bp, Artificial
  Synthetic oligonucleotide
gaggccacacttgagggcggtgataacaaaggcacctactgtggcgctccgatcc

SEQ ID NO: 400035 - DNA, 59 bp, Artificial
  Synthetic oligonucleotide
gaggccacgccgggtaggatcgagggtacagcatcggtgcactaacttagttagcgcac

SEQ ID NO: 400036 - DNA, 54 bp, Artificial
  Synthetic oligonucleotide
gaggccacgcttcatttagtgttacgattgcgcggaggtcaattaattcgaact

SEQ ID NO: 400037 - DNA, 60 bp, Artificial
  Synthetic oligonucleotide
gaggccacggacggagacagtattctctgaaacagttgactatacaccacctggtgacac

SEQ ID NO: 400038 - DNA, 60 bp, Artificial
  Synthetic oligonucleotide
gaggccagaaagagctctcttacatgccgagtacttggggaatctaatgcatgttgaaca

SEQ ID NO: 400039 - DNA, 52 bp, Artificial
  Synthetic oligonucleotide
gaggccagccaacaggcggagcatcgtgtcggtagctaagatgatagaggac

SEQ ID NO: 400040 - DNA, 58 bp, Artificial
  Synthetic oligonucleotide
gaggccagtaacagaaattccatcatgggccggaaatattcttagaacccaagaatca

SEQ ID NO: 400041 - DNA, 51 bp, Artificial
  Synthetic oligonucleotide
gaggccatactgctggcattaccccccgaagccttgcggtatcgtctcggc

SEQ ID NO: 400042 - DNA, 55 bp, Artificial
  Synthetic oligonucleotide
gaggccatacttgagggcggagatgacaaaggcacctactgtggtgccccaatcc

SEQ ID NO: 400043 - DNA, 60 bp, Artificial
  Synthetic oligonucleotide
gaggccataggcatgtcaggacccttcacatacagaagcgacgaaaagaaagcagtacta

SEQ ID NO: 400044 - DNA, 60 bp, Artificial
  Synthetic oligonucleotide
gaggccatatccgacgacggaggatgaggctgagggatggcagactgggagctctcaact

SEQ ID NO: 400045 - DNA, 60 bp, Artificial
  Synthetic oligonucleotide
gaggccatatccgacgacgtaggctgctgctaggcgaaggcagagatgggagctctccaa

SEQ ID NO: 400046 - DNA, 59 bp, Artificial
  Synthetic oligonucleotide
gaggccatatttgattatactcccacaattagttcatggggtgtcatcttgcgttcggt

SEQ ID NO: 400047 - DNA, 60 bp, Artificial
  Synthetic oligonucleotide
gaggccatcaatattgcaattatggtcttgataatcatcacaagtgtcaaagctgtgtac

SEQ ID NO: 400048 - DNA, 60 bp, Artificial
  Synthetic oligonucleotide
gaggccatggtgtctagggcccggattgatgccagaattgacttcgagtcagggcggatt

SEQ ID NO: 400049 - DNA, 55 bp, Artificial
  Synthetic oligonucleotide
gaggccattaacttgctgattcggcgcggtttcgacctacgtgcggctgagagta

SEQ ID NO: 400050 - DNA, 58 bp, Artificial
  Synthetic oligonucleotide
gaggccattacccgagccagtgggagggcgcagactacgagctgcgggtgtacttccc

SEQ ID NO: 400051 - DNA, 57 bp, Artificial
  Synthetic oligonucleotide
gaggccccgaaccaacgcttcgctcccgccctggacttatgcacagacttgctcaac

SEQ ID NO: 400052 - DNA, 55 bp, Artificial
  Synthetic oligonucleotide
gaggcccgatgcagtagacacttgctacccattcgacgtgccagattaccagagt

SEQ ID NO: 400053 - DNA, 59 bp, Artificial
  Synthetic oligonucleotide
gaggcccggacatcgtatggtcaagatggacgaggaccgacttatcagagcggaaacca

SEQ ID NO: 400054 - DNA, 59 bp, Artificial
  Synthetic oligonucleotide
gaggcccggggcgggtgccgagactcctgcggagcagcgagaggcgagtcaaggggcaa

SEQ ID NO: 400055 - DNA, 55 bp, Artificial
  Synthetic oligonucleotide
gaggccctaatgacctagcccacattgttttacccgtacgactgtctccctcaat

SEQ ID NO: 400056 - DNA, 55 bp, Artificial
  Synthetic oligonucleotide
gaggccgaaatgggctgtgcaactttagacaacacaccatcaagtgcggagctgc

SEQ ID NO: 400057 - DNA, 55 bp, Artificial
  Synthetic oligonucleotide
gaggccgacgccaaaattgaggcggctaatgtcgagagtgtgttagacgcgtctg

SEQ ID NO: 400058 - DNA, 55 bp, Artificial
  Synthetic oligonucleotide
gaggccgatgtgaaaagagctgtcgcgaagtattcgctccgtgcgggtaacgccg

SEQ ID NO: 400059 - DNA, 55 bp, Artificial
  Synthetic oligonucleotide
gaggccgccctcttacattatgttgatccagataccaatcggaacctgggtgaat

SEQ ID NO: 400060 - DNA, 59 bp, Artificial
  Synthetic oligonucleotide
gaggccgctaatcgcgtagaaactcgtctgttgatcgctctcccatcgggagaattggt

SEQ ID NO: 400061 - DNA, 60 bp, Artificial
  Synthetic oligonucleotide
gaggccgctaccgtgatgtcatggacacatgggctagtggctccgagacaggaagctact

SEQ ID NO: 400062 - DNA, 50 bp, Artificial
  Synthetic oligonucleotide
gaggccgctactcgagagccctcgtctatggctcgcaaggcgacggcttg

SEQ ID NO: 400063 - DNA, 60 bp, Artificial
  Synthetic oligonucleotide
gaggccgctcgctcgcatgtcgagcgagtacagtgacccaatggcttcggctataggtta

SEQ ID NO: 400064 - DNA, 60 bp, Artificial
  Synthetic oligonucleotide
gaggccgtggaagtccttgcatactgccatgattcaccagatcttgttatgcaactccat

SEQ ID NO: 400065 - DNA, 55 bp, Artificial
  Synthetic oligonucleotide
gaggcctacatacagctgcatcttctcatttagctgcaataaaacgaactggaca

SEQ ID NO: 400066 - DNA, 55 bp, Artificial
  Synthetic oligonucleotide
gaggcctgcaattttgattacactgttgctttccgtatggttatgggtgagattt

SEQ ID NO: 400067 - DNA, 54 bp, Artificial
  Synthetic oligonucleotide
gaggcctgctctgagtttaagataaacgattattctccggagtggggtcatgaa

SEQ ID NO: 400068 - DNA, 55 bp, Artificial
  Synthetic oligonucleotide
gaggcctgtttggtgcaattgcaggattcatagaaggaggatggcctggtctgat

SEQ ID NO: 400069 - DNA, 53 bp, Artificial
  Synthetic oligonucleotide
gaggccttaatgcagctatcacgacaacagtttccaacgatgcccgttgatta

SEQ ID NO: 400070 - DNA, 57 bp, Artificial
  Synthetic oligonucleotide
gaggccttaatgcttagaaagccactttccttagatagtatagccaagggaatgaaa

SEQ ID NO: 400071 - DNA, 60 bp, Artificial
  Synthetic oligonucleotide
gaggccttatccaatcttctcgtgcacacgctatcgttgcactcactcgacatacggaga

SEQ ID NO: 400072 - DNA, 60 bp, Artificial
  Synthetic oligonucleotide
gaggccttctgggcgaagcacatgtggaacttcatcagtgggatacaatacttggcgggt

SEQ ID NO: 400073 - DNA, 60 bp, Artificial
  Synthetic oligonucleotide
gaggccttgagagtaagcgccttatttattcgagctcgagagataggatggagaaagtgg

SEQ ID NO: 400074 - DNA, 58 bp, Artificial
  Synthetic oligonucleotide
gaggccttggctttgctcccaccagtaagtttctgatccaaaatggagagcttattta

SEQ ID NO: 400075 - DNA, 55 bp, Artificial
  Synthetic oligonucleotide
gaggcgaaagactagggagaaagttcctatggacgtgtaattcgtccactcgaga

SEQ ID NO: 400076 - DNA, 55 bp, Artificial
  Synthetic oligonucleotide
gaggcgaaagaggaggaagtagttcaggaacaatactcaatgctatgcaaagcag

SEQ ID NO: 400077 - DNA, 55 bp, Artificial
  Synthetic oligonucleotide
gaggcgaataaatggatatcgatgggacagtcttgtaccataaaagtatgtccac

SEQ ID NO: 400078 - DNA, 57 bp, Artificial
  Synthetic oligonucleotide
gaggcgaattgaagaggcgggcaattgcaacacccggaatgcaaatcagggggttcg

SEQ ID NO: 400079 - DNA, 60 bp, Artificial
  Synthetic oligonucleotide
gaggcgacattgctcgttgagcgcactctttcgcatgaatacaatctcttcggtctatgc

SEQ ID NO: 400080 - DNA, 60 bp, Artificial
  Synthetic oligonucleotide
gaggcgactacaccagtgggtaagctcggagtgcgtcgctccatgctccggctcctggct

SEQ ID NO: 400081 - DNA, 54 bp, Artificial
  Synthetic oligonucleotide
gaggcgagagaggaaaccgaggacaccacgagtgagagctccattacgagtgcc

SEQ ID NO: 400082 - DNA, 58 bp, Artificial
  Synthetic oligonucleotide
gaggcgagaggaactcacgagaaggtgagtaaatttgctggcggtggccagacctagg

SEQ ID NO: 400083 - DNA, 57 bp, Artificial
  Synthetic oligonucleotide
gaggcgaggggtttgcttcggaggttcgcagacagtcttaaatctgccgtagaagga

SEQ ID NO: 400084 - DNA, 60 bp, Artificial
  Synthetic oligonucleotide
gaggcgatgatagaagatcataaagagataggtgacgaacgtgacaagcgtattcttcca

SEQ ID NO: 400085 - DNA, 59 bp, Artificial
  Synthetic oligonucleotide
gaggcgatgtggtaattcctgtcgttaggtcatctattggtagtaagaagcttaatcgc

SEQ ID NO: 400086 - DNA, 56 bp, Artificial
  Synthetic oligonucleotide
gaggcgcagtggtggtgctaacacgtggttagggaatagtttaatcttgtgtacct

SEQ ID NO: 400087 - DNA, 60 bp, Artificial
  Synthetic oligonucleotide
gaggcgccaccggagatagatcgtgtggttcagtacacctatgaaatcgcacgtctacag

SEQ ID NO: 400088 - DNA, 57 bp, Artificial
  Synthetic oligonucleotide
gaggcgcccaccccagtctcaccgtctcgcgggaaaagccagcctccaaggttcgca

SEQ ID NO: 400089 - DNA, 60 bp, Artificial
  Synthetic oligonucleotide
gaggcgctcgtactggctgactccttcatacgtgacctcggaaaagcagccacatcagcc

SEQ ID NO: 400090 - DNA, 60 bp, Artificial
  Synthetic oligonucleotide
gaggcgcttagcgcatctgagatgtctgccacggacgcaccggattggtgcctccgttct

SEQ ID NO: 400091 - DNA, 54 bp, Artificial
  Synthetic oligonucleotide
gaggcggctacctacctgtcaaggtagccccctcgggctcaatcggtggaagtc

SEQ ID NO: 400092 - DNA, 52 bp, Artificial
  Synthetic oligonucleotide
gaggcggctagtttcagaagctatcaatcgaaactcggtcgagatgggcggg

SEQ ID NO: 400093 - DNA, 55 bp, Artificial
  Synthetic oligonucleotide
gaggcggctgaattactccgacaggagttcttggccaagatgcctcagctgggac

SEQ ID NO: 400094 - DNA, 58 bp, Artificial
  Synthetic oligonucleotide
gaggcggctttacgtaattataagcctttacccactgtggatgtcagtgagagtgtcc

SEQ ID NO: 400095 - DNA, 60 bp, Artificial
  Synthetic oligonucleotide
gaggcgggacacaaaacttcaacatatgcgggatgtcagggcatcacagcacgcaaactg

SEQ ID NO: 400096 - DNA, 60 bp, Artificial
  Synthetic oligonucleotide
gaggcgggagatagggggttcagagcctagatctggacactatgtacaacattatgctgc

SEQ ID NO: 400097 - DNA, 55 bp, Artificial
  Synthetic oligonucleotide
gaggcgggtccaggggagtggttggggagtggtttcgccctcagagctgcatata

SEQ ID NO: 400098 - DNA, 55 bp, Artificial
  Synthetic oligonucleotide
gaggcggtaaatctgaaggcgggacgactatcgatcctagcttctcacacggagc

SEQ ID NO: 400099 - DNA, 55 bp, Artificial
  Synthetic oligonucleotide
gaggcggtacaaggttatgatctaacgatcaaccaaaaggaggtaagattatgag

SEQ ID NO: 400100 - DNA, 55 bp, Artificial
  Synthetic oligonucleotide
gaggcgtaatgacgcttcaaaggatgatcagaaatagagcccagcataacagacg

SEQ ID NO: 400101 - DNA, 55 bp, Artificial
  Synthetic oligonucleotide
gaggcgtatgagagacgaaggcacgcagtggtaagagtttcattgaaaccaggag

SEQ ID NO: 400102 - DNA, 55 bp, Artificial
  Synthetic oligonucleotide
gaggcgtcttcaacaggtaaggcgctatcagtattagcggattgttcatcatggg

SEQ ID NO: 400103 - DNA, 55 bp, Artificial
  Synthetic oligonucleotide
gaggcgtgatgtgcagattccagcgcaatggttaccaactctcactgcaatatgt

SEQ ID NO: 400104 - DNA, 53 bp, Artificial
  Synthetic oligonucleotide
gaggcgtggggatacccagaccttttacacgagattcggaaattttaccaatg

SEQ ID NO: 400105 - DNA, 54 bp, Artificial
  Synthetic oligonucleotide
gaggcgtggggttatccagatctcttggatcggattcgaaagttttattgttgg

SEQ ID NO: 400106 - DNA, 55 bp, Artificial
  Synthetic oligonucleotide
gaggcgtgtggttatagtgacagggtaatgcagctaactctgggcaactcaacga

SEQ ID NO: 400107 - DNA, 50 bp, Artificial
  Synthetic oligonucleotide
gaggcgtgtggttatagtgacagggttgcgcaactaactctgggtaattc

SEQ ID NO: 400108 - DNA, 56 bp, Artificial
  Synthetic oligonucleotide
gaggcgttgaggttggtaggtggttggaactacccactcctgaacaaaggctgcaa

SEQ ID NO: 400109 - DNA, 60 bp, Artificial
  Synthetic oligonucleotide
gaggcgttgataggtacttgttgtctatattctatcacgcagtggtcgatcttcatacag

SEQ ID NO: 400110 - DNA, 60 bp, Artificial
  Synthetic oligonucleotide
gaggcgtttcttacgctcagtcgatgagtgcaggtggatattgcatttaataaggtccac

SEQ ID NO: 400111 - DNA, 55 bp, Artificial
  Synthetic oligonucleotide
gaggctaaaacaggatatctgtggttaagcacctgggccccggcttgaggccaag

SEQ ID NO: 400112 - DNA, 60 bp, Artificial
  Synthetic oligonucleotide
gaggctaattccatgagctcatcttttgacagtccacccactctcaggacattgtccttc

SEQ ID NO: 400113 - DNA, 60 bp, Artificial
  Synthetic oligonucleotide
gaggctactctagagagagtcaggtcatctcttccgggattgccagacttcagattgtac

SEQ ID NO: 400114 - DNA, 60 bp, Artificial
  Synthetic oligonucleotide
gaggctagaaactccccactggcgacagtgttctagcctgcgtggctgcctgcacaccct

SEQ ID NO: 400115 - DNA, 60 bp, Artificial
  Synthetic oligonucleotide
gaggctagaaccacacaaatgggagaagtactgcgttcttgaagtgggagatatgcttct

SEQ ID NO: 400116 - DNA, 60 bp, Artificial
  Synthetic oligonucleotide
gaggctagacgatatcaacgagttcaggcggcaaggattcttccatacgaatatgatcga

SEQ ID NO: 400117 - DNA, 60 bp, Artificial
  Synthetic oligonucleotide
gaggctagagccacataaatgggaaaagtactgtgttcttgaagtaggagacatgctcct

SEQ ID NO: 400118 - DNA, 58 bp, Artificial
  Synthetic oligonucleotide
gaggctaggggcaaccgcctagcagaccaagcggcccgggaggcagccataaagacgc

SEQ ID NO: 400119 - DNA, 55 bp, Artificial
  Synthetic oligonucleotide
gaggctaggtacacgtacagagactacttgagagcacatcattatatgaatgcgg

SEQ ID NO: 400120 - DNA, 55 bp, Artificial
  Synthetic oligonucleotide
gaggctagtaatgtggtagcccgcatcaatatgaatgatctatatgcaactgccg

SEQ ID NO: 400121 - DNA, 57 bp, Artificial
  Synthetic oligonucleotide
gaggctagtagatactgatacgtgacgatggaattttcgagaactactttacgttcc

SEQ ID NO: 400122 - DNA, 55 bp, Artificial
  Synthetic oligonucleotide
gaggctataagatatgagctaggaagagcctctactagcggtgtgcaaccccgtc

SEQ ID NO: 400123 - DNA, 55 bp, Artificial
  Synthetic oligonucleotide
gaggctatacaagagatcgctggaatgacagcagacgtgctagaggcggcatcag

SEQ ID NO: 400124 - DNA, 55 bp, Artificial
  Synthetic oligonucleotide
gaggctatccagaagtgttagatgacgacagtaacagcacggcgctgacacatag

SEQ ID NO: 400125 - DNA, 60 bp, Artificial
  Synthetic oligonucleotide
gaggctatggaggttgccagtcaggctaggcagatggtgcaggctatgaggaccattggg

SEQ ID NO: 400126 - DNA, 56 bp, Artificial
  Synthetic oligonucleotide
gaggctattttctcagtagtgactctggctggaaaactaactttttgaaagaaggc

SEQ ID NO: 400127 - DNA, 55 bp, Artificial
  Synthetic oligonucleotide
gaggctcaatgggtaccgtcctatcaagttccccgtcctggagtcatgccatgca

SEQ ID NO: 400128 - DNA, 55 bp, Artificial
  Synthetic oligonucleotide
gaggctcacttcactgacccagctagcattgctgcaagaggatacatatctacca

SEQ ID NO: 400129 - DNA, 60 bp, Artificial
  Synthetic oligonucleotide
gaggctcagggtgctacgtttacggagactactatcatagctacggccgatgctagaggc

SEQ ID NO: 400130 - DNA, 55 bp, Artificial
  Synthetic oligonucleotide
gaggctcataaaaggagtctacagaccaaagaaactgaaagaagacatgttggcg

SEQ ID NO: 400131 - DNA, 55 bp, Artificial
  Synthetic oligonucleotide
gaggctcataacatttgggctacgcaagcctgtgtgcccattgatcctaacccac

SEQ ID NO: 400132 - DNA, 60 bp, Artificial
  Synthetic oligonucleotide
gaggctcccacacctgagtgggagagtggtcgtattaggcctctctggcctaaagatgat

SEQ ID NO: 400133 - DNA, 58 bp, Artificial
  Synthetic oligonucleotide
gaggctccgacggttgatcgggattgtgggagtcttatagttgcacaggtagaaggac

SEQ ID NO: 400134 - DNA, 57 bp, Artificial
  Synthetic oligonucleotide
gaggctcctcattggttgtcaaccccaaaggcggcacagttgacttcttcggatggg

SEQ ID NO: 400135 - DNA, 55 bp, Artificial
  Synthetic oligonucleotide
gaggctctgacctatggggtcaccgggacgtgggaggtgcaggtcggggggcgtg

SEQ ID NO: 400136 - DNA, 60 bp, Artificial
  Synthetic oligonucleotide
gaggctctgataggtaaattgatctccgatatatcggtgatcaattggagaccaataaat

SEQ ID NO: 400137 - DNA, 60 bp, Artificial
  Synthetic oligonucleotide
gaggctctgtgagagggggcctcgccattgaatgctggacatttctttggggccttatgt

SEQ ID NO: 400138 - DNA, 52 bp, Artificial
  Synthetic oligonucleotide
gaggctgaacattgatgagtatcatctcgtcgcctttgctctcactatgaat

SEQ ID NO: 400139 - DNA, 55 bp, Artificial
  Synthetic oligonucleotide
gaggctgaaccttttatgtggccggtatacgaagtgattaggaaatcaactgtag

SEQ ID NO: 400140 - DNA, 60 bp, Artificial
  Synthetic oligonucleotide
gaggctgaacttcgacagcccctatcgcagcagtgttgctgccccaactgtccttgtcac

SEQ ID NO: 400141 - DNA, 60 bp, Artificial
  Synthetic oligonucleotide
gaggctgacatcaccaactctacaaccagtgttgagaatttagtccgtataagattctca

SEQ ID NO: 400142 - DNA, 53 bp, Artificial
  Synthetic oligonucleotide
gaggctgcagaatgggatagattacatccagtccatgcagggcctatagcacc

SEQ ID NO: 400143 - DNA, 60 bp, Artificial
  Synthetic oligonucleotide
gaggctgcagaatgggataggttgcatccagtacaagcggggcctgttgcgccaggacaa

SEQ ID NO: 400144 - DNA, 60 bp, Artificial
  Synthetic oligonucleotide
gaggctgctaatgtggtggttgcgtatggtcaatggcccgaatacttgggtccacaagat

SEQ ID NO: 400145 - DNA, 59 bp, Artificial
  Synthetic oligonucleotide
gaggctggaaccacacaaatgggaaaagtactgtgtccttgaaataggagatatgctcc

SEQ ID NO: 400146 - DNA, 55 bp, Artificial
  Synthetic oligonucleotide
gaggctggcaaagcaatctgtagccgacgttttggaggcgcaacctgtgacgacc

SEQ ID NO: 400147 - DNA, 55 bp, Artificial
  Synthetic oligonucleotide
gaggctggtaccgcgacggcactaagctcgtccactaccacaagccacaaagccc

SEQ ID NO: 400148 - DNA, 60 bp, Artificial
  Synthetic oligonucleotide
gaggctgtaggcataaattggtctgcgcaccagcaccatgcacctttttcacctctgcct

SEQ ID NO: 400149 - DNA, 55 bp, Artificial
  Synthetic oligonucleotide
gaggctgtagggtcgtccagattcggaaaggtagaaaacacttgtggcagtccca

SEQ ID NO: 400150 - DNA, 60 bp, Artificial
  Synthetic oligonucleotide
gaggctgtggaagtcttggcttattgtcatgactcacctgatcttgttatgcagttacat

SEQ ID NO: 400151 - DNA, 55 bp, Artificial
  Synthetic oligonucleotide
gaggctgtgtcaagttcttatctaaccagttagcgataatgtcatgtaattcgtc

SEQ ID NO: 400152 - DNA, 57 bp, Artificial
  Synthetic oligonucleotide
gaggctgttatctcactacccccaccataactacgtccacataaccgacgcgtatcc

SEQ ID NO: 400153 - DNA, 55 bp, Artificial
  Synthetic oligonucleotide
gaggcttaaacccagaaatggctttgcaactttggtttccagaaattgactatga

SEQ ID NO: 400154 - DNA, 54 bp, Artificial
  Synthetic oligonucleotide
gaggcttaacgggaaagtatacgcgaacccggaaataatctcaaagcttatgaa

SEQ ID NO: 400155 - DNA, 55 bp, Artificial
  Synthetic oligonucleotide
gaggcttacaagtaatgggtcaacaacaacaattatctgcacaacaacgtgccgc

SEQ ID NO: 400156 - DNA, 60 bp, Artificial
  Synthetic oligonucleotide
gaggcttacagttctcgggaaagatgcaggcgcattgaccgaagatccagatgagggcac

SEQ ID NO: 400157 - DNA, 59 bp, Artificial
  Synthetic oligonucleotide
gaggcttactctgaaagcggtatattcaacataagttccccaacatgccttgtcaataa

SEQ ID NO: 400158 - DNA, 60 bp, Artificial
  Synthetic oligonucleotide
gaggcttatctcaacattgagacgactgagtacttttgtcgatttaagtcggcatctggt

SEQ ID NO: 400159 - DNA, 55 bp, Artificial
  Synthetic oligonucleotide
gaggcttcccgcctagagcatttgcaagtcaggattctctaatccctctgggaga

SEQ ID NO: 400160 - DNA, 55 bp, Artificial
  Synthetic oligonucleotide
gaggcttccttacaatagactcaggttacttctctgccaagtgctattcaaggac

SEQ ID NO: 400161 - DNA, 58 bp, Artificial
  Synthetic oligonucleotide
gaggcttcgacaaggcttggagatctaccttaactgagcccattgacccacacgggcc

SEQ ID NO: 400162 - DNA, 60 bp, Artificial
  Synthetic oligonucleotide
gaggcttcttgcgcccatcacagcttacgcgcaacaaacacgcggcctcttgggatgcat

SEQ ID NO: 400163 - DNA, 60 bp, Artificial
  Synthetic oligonucleotide
gaggcttgacccgcagccagatgacaggctactgatcagggtgccatttacagcacgcga

SEQ ID NO: 400164 - DNA, 60 bp, Artificial
  Synthetic oligonucleotide
gaggcttgataggcttaagaatagtttttgctgtgctctctatagtaaatagagttagga

SEQ ID NO: 400165 - DNA, 57 bp, Artificial
  Synthetic oligonucleotide
gaggcttgataggtttaagaatagcttttactgtactttctatagtgaagagagtta

SEQ ID NO: 400166 - DNA, 58 bp, Artificial
  Synthetic oligonucleotide
gaggcttggctagaatgagttgtgacgactcgtttaagttctttttatacaacaatga

SEQ ID NO: 400167 - DNA, 55 bp, Artificial
  Synthetic oligonucleotide
gaggcttgtcaggaatgtttaacttacgaccttcgatataaacaaactcgcggcg

SEQ ID NO: 400168 - DNA, 55 bp, Artificial
  Synthetic oligonucleotide
gaggcttgtggatactcagatagaattatccagataactcgtggtaattccacta

SEQ ID NO: 400169 - DNA, 57 bp, Artificial
  Synthetic oligonucleotide
gaggctttaacaagtggagccacactaacaaggacctagacctggccctgtactatg

SEQ ID NO: 400170 - DNA, 55 bp, Artificial
  Synthetic oligonucleotide
gaggctttgactcacagtttgttgatatgagtccagctagtaatgctagtgaatg

SEQ ID NO: 400171 - DNA, 55 bp, Artificial
  Synthetic oligonucleotide
gaggctttgcaagcactcatagggatttgtgttatgaccacttcttatgcaccca

SEQ ID NO: 400172 - DNA, 60 bp, Artificial
  Synthetic oligonucleotide
gagggaaaaaaagtgtactatgtgcactttgcagacgatgccgcacactactctgtgctg

SEQ ID NO: 400173 - DNA, 55 bp, Artificial
  Synthetic oligonucleotide
gagggaaacacaagcttgctatggaatggtcctatggccgtttccatgactgggg

SEQ ID NO: 400174 - DNA, 55 bp, Artificial
  Synthetic oligonucleotide
gagggaaacactttagtgaacgtgaatcctgaaactccggtttgctggaatggac

SEQ ID NO: 400175 - DNA, 51 bp, Artificial
  Synthetic oligonucleotide
gagggaaacgttccacaaggtacgcaattcccttacttaacttacaattta

SEQ ID NO: 400176 - DNA, 55 bp, Artificial
  Synthetic oligonucleotide
gagggaaattagctctataactttagagaggctggccacattaaaagctagtagc

SEQ ID NO: 400177 - DNA, 55 bp, Artificial
  Synthetic oligonucleotide
gagggaaattcaagcttgtgggaatgcatgtggcattcaatggcagggaaggaag

SEQ ID NO: 400178 - DNA, 55 bp, Artificial
  Synthetic oligonucleotide
gagggaacaacagcccttgtggtgttcagagacaatcggtggcaaggagaccagt

SEQ ID NO: 400179 - DNA, 60 bp, Artificial
  Synthetic oligonucleotide
gagggaacaattgagctcagtatcatcattcgagagattcgaaatattccccaaggaaag

SEQ ID NO: 400180 - DNA, 58 bp, Artificial
  Synthetic oligonucleotide
gagggaacagataggtttatagaattcatacaaagggtttgtagagctatctgcaacg

SEQ ID NO: 400181 - DNA, 57 bp, Artificial
  Synthetic oligonucleotide
gagggaaccctgtgaccctctacggctaacctgaatggaccgtgacatagtccagtc

SEQ ID NO: 400182 - DNA, 55 bp, Artificial
  Synthetic oligonucleotide
gagggaacctgatcaatccccactctagagggccgtatccggtttatatgggctc

SEQ ID NO: 400183 - DNA, 60 bp, Artificial
  Synthetic oligonucleotide
gagggaacggttcacacgggttcgcagcagccctaaagcgctcatacttcactcagagtc

SEQ ID NO: 400184 - DNA, 51 bp, Artificial
  Synthetic oligonucleotide
gagggaacgtatttcggaccctctttagactgtcgagtatctggatcgtac

SEQ ID NO: 400185 - DNA, 60 bp, Artificial
  Synthetic oligonucleotide
gagggaactgaagcatatcgtgaggatatgcgttgtaggggagatggaccccaagactcg

SEQ ID NO: 400186 - DNA, 53 bp, Artificial
  Synthetic oligonucleotide
gagggaacttttcaacgttgatggttgtaatttgaaacttgcctaatctaaac

SEQ ID NO: 400187 - DNA, 52 bp, Artificial
  Synthetic oligonucleotide
gagggaaggttctcattaatatcattagtaccatcaaatgacgactaccaga

SEQ ID NO: 400188 - DNA, 55 bp, Artificial
  Synthetic oligonucleotide
gagggaatacaacgagacagttaggatcgagaaggtaactcaatggcacaatgct

SEQ ID NO: 400189 - DNA, 60 bp, Artificial
  Synthetic oligonucleotide
gagggaatacaagcaggagtggatagattctacagaacctgcaagttagtcgggatcaat

SEQ ID NO: 400190 - DNA, 51 bp, Artificial
  Synthetic oligonucleotide
gagggaatcgttctatatgacgtagatttgacaatcgataacactgtatca

SEQ ID NO: 400191 - DNA, 56 bp, Artificial
  Synthetic oligonucleotide
gagggaatcgttgcaggtggctaccttttcctggaccagttctggttcgggtatca

SEQ ID NO: 400192 - DNA, 55 bp, Artificial
  Synthetic oligonucleotide
gagggaatgccaagaaacatagcatggatggttcaaagatccttagcccaagagc

SEQ ID NO: 400193 - DNA, 56 bp, Artificial
  Synthetic oligonucleotide
gagggacaccgatatatcggtgcctcaattggtaccaataaagggaaatgacgaaa

SEQ ID NO: 400194 - DNA, 60 bp, Artificial
  Synthetic oligonucleotide
gagggacacgcaatacccgtccaggattttcaagctctgagcgaaagtgctaccattgtg

SEQ ID NO: 400195 - DNA, 55 bp, Artificial
  Synthetic oligonucleotide
gagggacaggaagtctgcagaagacacaggcgtaaagcagacgggtcaaaattac

SEQ ID NO: 400196 - DNA, 60 bp, Artificial
  Synthetic oligonucleotide
gagggacatccggctgatataactaaattcctgacagacaccttaactattcagaatgct

SEQ ID NO: 400197 - DNA, 56 bp, Artificial
  Synthetic oligonucleotide
gagggacatgtaacaaaaaattgtagagcacctagaaagaaaggttgctggaaatg

SEQ ID NO: 400198 - DNA, 59 bp, Artificial
  Synthetic oligonucleotide
gagggaccaccgcactatcgctctcttggccaatcaaagtgcgccctgattcttaaggg

SEQ ID NO: 400199 - DNA, 54 bp, Artificial
  Synthetic oligonucleotide
gagggacccagacgaccgcactatcctctgggtttacggacctaatggtgggga

SEQ ID NO: 400200 - DNA, 52 bp, Artificial
  Synthetic oligonucleotide
gagggaccccagtgggatgtgaaaagttatgtagcgggttttaacttcgtta

SEQ ID NO: 400201 - DNA, 55 bp, Artificial
  Synthetic oligonucleotide
gagggaccctaaggatagctttctcggacatctcaattacacgactgagcaggtc

SEQ ID NO: 400202 - DNA, 53 bp, Artificial
  Synthetic oligonucleotide
gagggaccgaatacggtgcgaccgaatggggtacatataaaacaaggcccgta

SEQ ID NO: 400203 - DNA, 56 bp, Artificial
  Synthetic oligonucleotide
gagggaccgcatggcacctttagaacgtattatcgaccattagaaacactaggtgg

SEQ ID NO: 400204 - DNA, 60 bp, Artificial
  Synthetic oligonucleotide
gagggacgattcatgtttatgcagcataagccgttggcggcagatcaatcgtacttcact

SEQ ID NO: 400205 - DNA, 60 bp, Artificial
  Synthetic oligonucleotide
gagggacgcgatgcagatgtcaaaggaaatctactcaagatgatgaatgactcaatggct

SEQ ID NO: 400206 - DNA, 51 bp, Artificial
  Synthetic oligonucleotide
gagggacgttggttgttcgattaacctaagcggtaggggaattcccgtgat

SEQ ID NO: 400207 - DNA, 58 bp, Artificial
  Synthetic oligonucleotide
gagggactatcagctgcgccactcttagaggcctttaagagaatggacaccttttact

SEQ ID NO: 400208 - DNA, 60 bp, Artificial
  Synthetic oligonucleotide
gagggacttcatattgattgcaacgagagcagtggaacttctgggacgcagcagtctcaa

SEQ ID NO: 400209 - DNA, 52 bp, Artificial
  Synthetic oligonucleotide
gagggagaagacatctgaggagccagcgagtgttgggatcactatagaaggg

SEQ ID NO: 400210 - DNA, 60 bp, Artificial
  Synthetic oligonucleotide
gagggagaagccacacttgaaggcggtgacaacaagggaacatactgtggtgcaccaatc

SEQ ID NO: 400211 - DNA, 55 bp, Artificial
  Synthetic oligonucleotide
gagggagacggtgactaccgctaatacagagattaatacctacctactttgtacc

SEQ ID NO: 400212 - DNA, 55 bp, Artificial
  Synthetic oligonucleotide
gagggagacggttacaaccgcgaacactgaggttaatacttatcttctgtgtacg

SEQ ID NO: 400213 - DNA, 52 bp, Artificial
  Synthetic oligonucleotide
gagggagactctacgccgacgacacagcaggctgggacactcttattacaga

SEQ ID NO: 400214 - DNA, 54 bp, Artificial
  Synthetic oligonucleotide
gagggagagtagatagattagttttaatttcgagcggcgtttatacttttggga

SEQ ID NO: 400215 - DNA, 55 bp, Artificial
  Synthetic oligonucleotide
gagggagccgattccagatccgccggtgccagacatctcgctgtgtcggttcgtt

SEQ ID NO: 400216 - DNA, 57 bp, Artificial
  Synthetic oligonucleotide
gagggagcttcggctcagtgaggggattaacgaaccccagtaatggctggtcctggc

SEQ ID NO: 400217 - DNA, 55 bp, Artificial
  Synthetic oligonucleotide
gagggagggtaccgactcacatgagccgagtatcctcgactccgccgcagcttga

SEQ ID NO: 400218 - DNA, 55 bp, Artificial
  Synthetic oligonucleotide
gagggagggtgcacatttgtgcgccaatcttctacagtattgttttatgggtcgt

SEQ ID NO: 400219 - DNA, 60 bp, Artificial
  Synthetic oligonucleotide
gagggagtggccgagcagacggagagattgagagatctgcggcggaaagagaagaatggg

SEQ ID NO: 400220 - DNA, 55 bp, Artificial
  Synthetic oligonucleotide
gagggagttcctggggttcctattaacaccatatgtcatggattagaatttgact

SEQ ID NO: 400221 - DNA, 55 bp, Artificial
  Synthetic oligonucleotide
gagggatatatggtcatgcgagctagcggaagagatgccgcaagccaagtcagag

SEQ ID NO: 400222 - DNA, 50 bp, Artificial
  Synthetic oligonucleotide
gagggatcagctcggtagaccacgtcacagccggaaaggatttactagtg

SEQ ID NO: 400223 - DNA, 55 bp, Artificial
  Synthetic oligonucleotide
gagggatcccctaatgtggattttcctcgcgattccgagggtagtaatcaggcgg

SEQ ID NO: 400224 - DNA, 55 bp, Artificial
  Synthetic oligonucleotide
gagggatctatggcgtcctggtgattcctagtatagtcatccatccacctgaggt

SEQ ID NO: 400225 - DNA, 60 bp, Artificial
  Synthetic oligonucleotide
gagggatggagaggagataactgctcacactacttgttcagtcaatggagtaaatgattt

SEQ ID NO: 400226 - DNA, 60 bp, Artificial
  Synthetic oligonucleotide
gagggatggctcgtacaacaaaacacacatcgaggaatgtaatacctgtcctctctcaga

SEQ ID NO: 400227 - DNA, 55 bp, Artificial
  Synthetic oligonucleotide
gagggatgtcaatgatgactggaccgctggtgacttcgtagatgagaagaagcca

SEQ ID NO: 400228 - DNA, 59 bp, Artificial
  Synthetic oligonucleotide
gagggatgtgagaatttgttacatgcgtcgcctactgacctttcgacagaccgagttac

SEQ ID NO: 400229 - DNA, 60 bp, Artificial
  Synthetic oligonucleotide
gagggatgtgttcaggatccccatgtactaccgtggtcaattctattgtgaatcagcttg

SEQ ID NO: 400230 - DNA, 60 bp, Artificial
  Synthetic oligonucleotide
gagggattcagcggtatggttgcatcacaccacttcatccctatagagtcaagtcctaag

SEQ ID NO: 400231 - DNA, 59 bp, Artificial
  Synthetic oligonucleotide
gagggattgagaacgatagtgagacaaggtgtatcaattaaagggatgaattacacgtc

SEQ ID NO: 400232 - DNA, 55 bp, Artificial
  Synthetic oligonucleotide
gagggattgtgagatcagattaagtgaggcagcgataccgcatggagtgcaatct

SEQ ID NO: 400233 - DNA, 58 bp, Artificial
  Synthetic oligonucleotide
gagggattttttgacgtgatagcttacgaacattttgaatacaagaacgctatttgca

SEQ ID NO: 400234 - DNA, 60 bp, Artificial
  Synthetic oligonucleotide
gagggcaaacaattgaggtaatctatgatgaggatcccaataatagcaccagacatactg

SEQ ID NO: 400235 - DNA, 58 bp, Artificial
  Synthetic oligonucleotide
gagggcaaatcgacatttgcccgtgacctgtacagaagtgggtcctggttctacacac

SEQ ID NO: 400236 - DNA, 60 bp, Artificial
  Synthetic oligonucleotide
gagggcaacccttctagagatgatctgacattgtccagagtgactgctgccttagctggt

SEQ ID NO: 400237 - DNA, 60 bp, Artificial
  Synthetic oligonucleotide
gagggcaacctagtggcttgtgggcaagctgacagtgcgttggtaacaaagcatgttgtt

SEQ ID NO: 400238 - DNA, 60 bp, Artificial
  Synthetic oligonucleotide
gagggcaactacctaatggatgtaataggttatgttaaaagtggatcatattcagcaaca

SEQ ID NO: 400239 - DNA, 58 bp, Artificial
  Synthetic oligonucleotide
gagggcaagctttctcagatgtcaaaagaggtaacggccagaattgagccctttctta

SEQ ID NO: 400240 - DNA, 60 bp, Artificial
  Synthetic oligonucleotide
gagggcaccgtctcaatagacgttaaaaccctgtgctttggcacagcactgaacaagcga

SEQ ID NO: 400241 - DNA, 50 bp, Artificial
  Synthetic oligonucleotide
gagggcagacttcctttaggaacactgttgttcgagcgtcgtctgactgg

SEQ ID NO: 400242 - DNA, 55 bp, Artificial
  Synthetic oligonucleotide
gagggcaggatgaatgcaattatgcttaccaccatgagttgttacttgtcacctt

SEQ ID NO: 400243 - DNA, 60 bp, Artificial
  Synthetic oligonucleotide
gagggcataataaatgctaccgtgcacaacataacaccacagaatattagttcaaccgag

SEQ ID NO: 400244 - DNA, 55 bp, Artificial
  Synthetic oligonucleotide
gagggcatacgatacgcaaatacacgtatggtacgagataagaacggaaagagca

SEQ ID NO: 400245 - DNA, 55 bp, Artificial
  Synthetic oligonucleotide
gagggcatccggttgatcacatgggactcgggtttatgtacatcatttgaactcg

SEQ ID NO: 400246 - DNA, 60 bp, Artificial
  Synthetic oligonucleotide
gagggcatgcaagtgaggttccccattctgatgcagctctctacagattttaatgaactt

SEQ ID NO: 400247 - DNA, 55 bp, Artificial
  Synthetic oligonucleotide
gagggccacgtactgctcatccatgaaacccacggcccgaacctggcctcgaact

SEQ ID NO: 400248 - DNA, 59 bp, Artificial
  Synthetic oligonucleotide
gagggccatctcttgccggcgtcgtccaagtggtggacggacggtctccagaagcggca

SEQ ID NO: 400249 - DNA, 55 bp, Artificial
  Synthetic oligonucleotide
gagggccatgggcccttacatggagcggttggcgggcaaacacccaagcatttac

SEQ ID NO: 400250 - DNA, 55 bp, Artificial
  Synthetic oligonucleotide
gagggcccggtagggaccgagcgtctttgatttaaagctcagatttgcttttgtc

SEQ ID NO: 400251 - DNA, 56 bp, Artificial
  Synthetic oligonucleotide
gagggcccgtagggaccgagcgtctttgatttaaagtctggatctgctttgttgga

SEQ ID NO: 400252 - DNA, 54 bp, Artificial
  Synthetic oligonucleotide
gagggcccgtcgtaaccttgtacggtggacctaaataggtacgcactacagcta

SEQ ID NO: 400253 - DNA, 57 bp, Artificial
  Synthetic oligonucleotide
gagggcccgtgttcagggccctcgagagggagtgtgccgactacggaggagcgtctc

SEQ ID NO: 400254 - DNA, 55 bp, Artificial
  Synthetic oligonucleotide
gagggccctgaggtgttttgctaattggatatcatatgtgcatggtgccgatgct

SEQ ID NO: 400255 - DNA, 54 bp, Artificial
  Synthetic oligonucleotide
gagggcgaaaccacctgggttaacaccaaccttagccatctacctcactaccag

SEQ ID NO: 400256 - DNA, 60 bp, Artificial
  Synthetic oligonucleotide
gagggcgacatgcgaatgggaccatacatgataggagcccattcagagctctcataagct

SEQ ID NO: 400257 - DNA, 55 bp, Artificial
  Synthetic oligonucleotide
gagggcgacccaagtattggcagaaacactactagcaaacaatataggaaaattt

SEQ ID NO: 400258 - DNA, 60 bp, Artificial
  Synthetic oligonucleotide
gagggcgatcgcaatctggctcccagttttgtgaatgaagatggcgtcgaatgacgccgc

SEQ ID NO: 400259 - DNA, 60 bp, Artificial
  Synthetic oligonucleotide
gagggcggcaaggttcatgttgagaaggatgccgtctatgtccgcactctggagagcaat

SEQ ID NO: 400260 - DNA, 55 bp, Artificial
  Synthetic oligonucleotide
gagggcgtacctaaatacaccagggttgcccgtttgccaggaccatctggagttc

SEQ ID NO: 400261 - DNA, 60 bp, Artificial
  Synthetic oligonucleotide
gagggcgtcacatggatcttcaagcctgcaaaggtggttaagtcatccactctcaagtgc

SEQ ID NO: 400262 - DNA, 55 bp, Artificial
  Synthetic oligonucleotide
gagggcgtcttttcggtaggcgcctatgatctgctggagtcttacgctttcgcgc

SEQ ID NO: 400263 - DNA, 60 bp, Artificial
  Synthetic oligonucleotide
gagggcgtgatatacctccggcgtgaattgcatataaggcgccataatgtacgctttatt

SEQ ID NO: 400264 - DNA, 55 bp, Artificial
  Synthetic oligonucleotide
gagggcgtggtgcgcatagttcgcacgcgtgccatgacttactgcagggtaggct

SEQ ID NO: 400265 - DNA, 51 bp, Artificial
  Synthetic oligonucleotide
gagggctaaggtgtttaaccagtgtcactctcggagctacgggggctgtgg

SEQ ID NO: 400266 - DNA, 55 bp, Artificial
  Synthetic oligonucleotide
gagggctaccaggagctcgccagaaccctgcatgacctatgtgagcagcgtggac

SEQ ID NO: 400267 - DNA, 57 bp, Artificial
  Synthetic oligonucleotide
gagggctattaccgttgcgctgttgtcagggaaatatccgccggatttggtgacgaa

SEQ ID NO: 400268 - DNA, 60 bp, Artificial
  Synthetic oligonucleotide
gagggctccacctcatgttcttggagctttgatcagacataaaaggtaggagctgatctt

SEQ ID NO: 400269 - DNA, 60 bp, Artificial
  Synthetic oligonucleotide
gagggctctctgcgagcgcaatcgaagcagaggaagttcgcacaaagtggccacttcaca

SEQ ID NO: 400270 - DNA, 60 bp, Artificial
  Synthetic oligonucleotide
gagggctcttcggtgccatagctggattcatagaaggcggttggccaggactagttgcag

SEQ ID NO: 400271 - DNA, 60 bp, Artificial
  Synthetic oligonucleotide
gagggctgcaggaggtgcctaagtcggtagcaacggaagccgcactgctgtgttttgcat

SEQ ID NO: 400272 - DNA, 60 bp, Artificial
  Synthetic oligonucleotide
gagggctgtggcctttgttacaaagttatcatctagaataacagcactggagcccactcc

SEQ ID NO: 400273 - DNA, 54 bp, Artificial
  Synthetic oligonucleotide
gagggctgtgggtgggcaggttggctcctgtccccccgcggctcccgaccacat

SEQ ID NO: 400274 - DNA, 60 bp, Artificial
  Synthetic oligonucleotide
gagggcttaactgcctgcgagactgctttgctgcgtgtggctattggactcaagaattaa

SEQ ID NO: 400275 - DNA, 56 bp, Artificial
  Synthetic oligonucleotide
gagggcttccaaggctggtacagcagctaagaaacaggttggtaacacagcaacca

SEQ ID NO: 400276 - DNA, 54 bp, Artificial
  Synthetic oligonucleotide
gagggcttcccacctatagtatgtttagtgagggtatccctccgtccttaaatc

SEQ ID NO: 400277 - DNA, 60 bp, Artificial
  Synthetic oligonucleotide
gagggcttgatgtgtattctgtttgctgtatgccaaccagagatacattctgcagaatag

SEQ ID NO: 400278 - DNA, 51 bp, Artificial
  Synthetic oligonucleotide
gagggcttgcgtggccccaacccgtgctctgaactcttcaggaccccagtc

SEQ ID NO: 400279 - DNA, 55 bp, Artificial
  Synthetic oligonucleotide
gagggctttggatctagaaccggctatatgtcggatatgtccattgccttcttgc

SEQ ID NO: 400280 - DNA, 56 bp, Artificial
  Synthetic oligonucleotide
gagggcttttattggattagatagtcctaaatggcctcctatttatcctaatgtta

SEQ ID NO: 400281 - DNA, 55 bp, Artificial
  Synthetic oligonucleotide
gaggggaaaattgtgaatgttagcccattgtcaggaagtgctcagcatgtggagg

SEQ ID NO: 400282 - DNA, 50 bp, Artificial
  Synthetic oligonucleotide
gaggggaagttaggtatttggaacgggtctttgaaagccgaaattcgccc

SEQ ID NO: 400283 - DNA, 60 bp, Artificial
  Synthetic oligonucleotide
gaggggaatcgaccctcgatgcacaaattaggcattgggaactgattagacatgaacagg

SEQ ID NO: 400284 - DNA, 58 bp, Artificial
  Synthetic oligonucleotide
gaggggaattcttctactgtaatacaacatcattgtttaacagtacttggaatgctaa

SEQ ID NO: 400285 - DNA, 55 bp, Artificial
  Synthetic oligonucleotide
gaggggaattcttctactgtaattcaacaccactgtttaatagtacttgggtgcg

SEQ ID NO: 400286 - DNA, 50 bp, Artificial
  Synthetic oligonucleotide
gaggggaatttttctactgcaatacatcaggactgtttaatagcagatgg

SEQ ID NO: 400287 - DNA, 60 bp, Artificial
  Synthetic oligonucleotide
gaggggacaagcacgatatagagggtatgtgcgctacagtcgagggtatcaagaagcata

SEQ ID NO: 400288 - DNA, 60 bp, Artificial
  Synthetic oligonucleotide
gaggggactgcagctgattacaaaagcactcaatctgcaatagaccagatcacaggcaaa

SEQ ID NO: 400289 - DNA, 55 bp, Artificial
  Synthetic oligonucleotide
gaggggagatcgactgacagaacaattgatgaacttgggttccactctttgaaaa

SEQ ID NO: 400290 - DNA, 55 bp, Artificial
  Synthetic oligonucleotide
gaggggaggccttggaaattgctggaagtgtaggagctttggtgtctggagaggg

SEQ ID NO: 400291 - DNA, 60 bp, Artificial
  Synthetic oligonucleotide
gaggggagtgtagtggtctcggtagcgatcataaactctacttgggtgagagtctagtca

SEQ ID NO: 400292 - DNA, 59 bp, Artificial
  Synthetic oligonucleotide
gaggggatacaagcaggggtagatagattctatagaacctgcaaactagtcgggatcaa

SEQ ID NO: 400293 - DNA, 57 bp, Artificial
  Synthetic oligonucleotide
gaggggatggtcaacgactccattaaggaggagctccgacccctcatccaacagacc

SEQ ID NO: 400294 - DNA, 57 bp, Artificial
  Synthetic oligonucleotide
gaggggatgtcacggtaaagagcattggaacgtcggagaaactactcccaagaagca

SEQ ID NO: 400295 - DNA, 60 bp, Artificial
  Synthetic oligonucleotide
gaggggatgtgcaacaaatatttcagggtcgtaatgatcctatgatgatatatttagtgt

SEQ ID NO: 400296 - DNA, 55 bp, Artificial
  Synthetic oligonucleotide
gaggggattcaagctggagttgacagattttatcgaacctgcaaactagtcggaa

SEQ ID NO: 400297 - DNA, 55 bp, Artificial
  Synthetic oligonucleotide
gaggggcacttcatggagtttaccagagatactgcggcatcggttgccagcgaga

SEQ ID NO: 400298 - DNA, 60 bp, Artificial
  Synthetic oligonucleotide
gaggggcatagcgaatggtatgttgtgacagaagctgagtgtattaatagtttggataca

SEQ ID NO: 400299 - DNA, 60 bp, Artificial
  Synthetic oligonucleotide
gaggggccatatgtgggctaggttagctcgtgggagacctatctatggattagaggtgcc

SEQ ID NO: 400300 - DNA, 53 bp, Artificial
  Synthetic oligonucleotide
gaggggcccggtcatttacactactcggagcccggcgctaccaacaactctcc

SEQ ID NO: 400301 - DNA, 53 bp, Artificial
  Synthetic oligonucleotide
gaggggccttccaagatattttaagattcgcctgagaaaaagatctgtaaaga

SEQ ID NO: 400302 - DNA, 60 bp, Artificial
  Synthetic oligonucleotide
gaggggctcagcgtactacgatgcttgaagcggcttcttacatgtgaaggttaagcgcgt

SEQ ID NO: 400303 - DNA, 60 bp, Artificial
  Synthetic oligonucleotide
gaggggctcatatttgttcaagagagtgcgaagtgaatccaaggcgtactgtggctcaag

SEQ ID NO: 400304 - DNA, 60 bp, Artificial
  Synthetic oligonucleotide
gaggggcttgtccaactggacccatcctgtgaaggctgatgtgctgtcagacacaagagc

SEQ ID NO: 400305 - DNA, 56 bp, Artificial
  Synthetic oligonucleotide
gagggggacacagatgaattggcaaaacttgtggagatggggaactatgatcctgg

SEQ ID NO: 400306 - DNA, 55 bp, Artificial
  Synthetic oligonucleotide
gagggggacgttatacttaccctgggcattgtggcgagagacggtcaccgcgcgt

SEQ ID NO: 400307 - DNA, 58 bp, Artificial
  Synthetic oligonucleotide
gagggggatacaaatgaattggcaactcttgtggacatgggggactttgatcattggg

SEQ ID NO: 400308 - DNA, 57 bp, Artificial
  Synthetic oligonucleotide
gagggggatagtgacttacaagatcaggaataaacaattgccttgggaatacagaca

SEQ ID NO: 400309 - DNA, 51 bp, Artificial
  Synthetic oligonucleotide
gagggggatttggtgggatggcccagccctcctgggaccaagtctttggag

SEQ ID NO: 400310 - DNA, 53 bp, Artificial
  Synthetic oligonucleotide
gagggggccgcaagcgtgcaaggattccgcactttcacgttcgagagagcact

SEQ ID NO: 400311 - DNA, 50 bp, Artificial
  Synthetic oligonucleotide
gaggggggccaatagtcttggaggttaaagtgactttaagagtagacgat

SEQ ID NO: 400312 - DNA, 57 bp, Artificial
  Synthetic oligonucleotide
gaggggggcgtgacgccgtcatcttgctcatgtgtgctgtacacccgactctggtat

SEQ ID NO: 400313 - DNA, 53 bp, Artificial
  Synthetic oligonucleotide
gaggggggggtccactcggagtggaacagagaaatcacctccagaggacccct

SEQ ID NO: 400314 - DNA, 55 bp, Artificial
  Synthetic oligonucleotide
gaggggggtcgctccttcaccaaccctctggtcacggagactcaccttggggatc

SEQ ID NO: 400315 - DNA, 55 bp, Artificial
  Synthetic oligonucleotide
gagggggtcaaacaagagaacaatttgacgtgcacaaccattacccaaaacaaca

SEQ ID NO: 400316 - DNA, 60 bp, Artificial
  Synthetic oligonucleotide
gagggggtcagcatattgccgacgttcaatgagttgttcggggaatatgaagctgtgtat

SEQ ID NO: 400317 - DNA, 56 bp, Artificial
  Synthetic oligonucleotide
gagggggttaggcagagcgaaagtgacgtcattgaagagaatcttgcctgcccgtg

SEQ ID NO: 400318 - DNA, 57 bp, Artificial
  Synthetic oligonucleotide
gagggggtttgtacgacctcgccctgtcagactcattggcaaggagtctattgggtc

SEQ ID NO: 400319 - DNA, 58 bp, Artificial
  Synthetic oligonucleotide
gaggggtaacactttgtactgtgcttgactccacgctcggtccactggcgagtgttag

SEQ ID NO: 400320 - DNA, 52 bp, Artificial
  Synthetic oligonucleotide
gaggggtaactcccccgtgttcaactacaacaaggcaaccgaaaggcttaca

SEQ ID NO: 400321 - DNA, 60 bp, Artificial
  Synthetic oligonucleotide
gaggggtacccataccaatgatgtaagacaattaacagaggcagtgcagaaaatagccac

SEQ ID NO: 400322 - DNA, 52 bp, Artificial
  Synthetic oligonucleotide
gaggggtagagcacagactggaagctgcctgtaattggacgcggggcgagcg

SEQ ID NO: 400323 - DNA, 57 bp, Artificial
  Synthetic oligonucleotide
gaggggtagtcacctcagtcggtaagatcattggaatccacatcggtgggaacggac

SEQ ID NO: 400324 - DNA, 55 bp, Artificial
  Synthetic oligonucleotide
gaggggtatcaaaagctgtgggcacagcgaatgaagaacatgtatctgccagctg

SEQ ID NO: 400325 - DNA, 60 bp, Artificial
  Synthetic oligonucleotide
gaggggtatgaagaattcacaatggttgggagaaaagcaacagctattctcagaaaagca

SEQ ID NO: 400326 - DNA, 56 bp, Artificial
  Synthetic oligonucleotide
gaggggtatgcactcgacgtgatcgcttgcaggacgagatatccgtttggagtgac

SEQ ID NO: 400327 - DNA, 54 bp, Artificial
  Synthetic oligonucleotide
gaggggtcactaaataccaggtcacctgggaggtcgcggtcagacccaagcccc

SEQ ID NO: 400328 - DNA, 55 bp, Artificial
  Synthetic oligonucleotide
gaggggtcccacgttctcctgctgctggttgagccgtacgggtctatggaccatc

SEQ ID NO: 400329 - DNA, 55 bp, Artificial
  Synthetic oligonucleotide
gaggggtcgcactggtagggggaggttaggcatataccggtatgtcaccccagga

SEQ ID NO: 400330 - DNA, 60 bp, Artificial
  Synthetic oligonucleotide
gaggggtcggagtatgtcctccataacaatcgttgcgtgacgtcatatgtatcatatcct

SEQ ID NO: 400331 - DNA, 57 bp, Artificial
  Synthetic oligonucleotide
gaggggtcggatgttgaccccgctgaggaggccactgtgagtatctctggatcatat

SEQ ID NO: 400332 - DNA, 60 bp, Artificial
  Synthetic oligonucleotide
gaggggtcttcccctgaagaccagtgagacatggactagcacatccttgtttatgtataa

SEQ ID NO: 400333 - DNA, 57 bp, Artificial
  Synthetic oligonucleotide
gaggggtgcctcgtgaatcttacctgtcgacgcctgttacgcgtggggaacagactg

SEQ ID NO: 400334 - DNA, 53 bp, Artificial
  Synthetic oligonucleotide
gaggggtgtccgtcactctacaagttcaacccgtttagaggtgggctaaacag

SEQ ID NO: 400335 - DNA, 55 bp, Artificial
  Synthetic oligonucleotide
gaggggtgtgagcatggttggcccttggttgggcccaatcagcaggaccccattg

SEQ ID NO: 400336 - DNA, 55 bp, Artificial
  Synthetic oligonucleotide
gaggggtgttaattcagatgtggcgactgtgaatggccgggtgaagaagccggca

SEQ ID NO: 400337 - DNA, 55 bp, Artificial
  Synthetic oligonucleotide
gaggggttattagaggcttgcatctcaaaagatggtcaagagtcaattgtgtaac

SEQ ID NO: 400338 - DNA, 55 bp, Artificial
  Synthetic oligonucleotide
gaggggttctcagctgaatcgagaagactgctactcattgttcaggcgcttgggg

SEQ ID NO: 400339 - DNA, 55 bp, Artificial
  Synthetic oligonucleotide
gaggggtttgatgtgaacgttcgagtgtgcacgtttctggaccacagtgtgacgg

SEQ ID NO: 400340 - DNA, 54 bp, Artificial
  Synthetic oligonucleotide
gaggggtttgctgtatgtaaaaaaaccccaggtcgagtgcgacaaaactgcagg

SEQ ID NO: 400341 - DNA, 52 bp, Artificial
  Synthetic oligonucleotide
gagggtaaaacagaactcaaagggggggacgaagccgaagaatcaaaagatg

SEQ ID NO: 400342 - DNA, 53 bp, Artificial
  Synthetic oligonucleotide
gagggtaaaactaggtaacctgtataaggcttttcacacaaatccaggagtaa

SEQ ID NO: 400343 - DNA, 60 bp, Artificial
  Synthetic oligonucleotide
gagggtaatgtggggttaaatgagttggagcgcagtaagcgtatcgatcatgatggaggt

SEQ ID NO: 400344 - DNA, 59 bp, Artificial
  Synthetic oligonucleotide
gagggtacaggaaagctgggaccattgcatagtcaactaatttgactatgctaggggaa

SEQ ID NO: 400345 - DNA, 53 bp, Artificial
  Synthetic oligonucleotide
gagggtaccaataaaactgacatttgggttgctttattacttgttgaaccaaa

SEQ ID NO: 400346 - DNA, 55 bp, Artificial
  Synthetic oligonucleotide
gagggtaccccagttgatcgtcgacatatttgtgggcggtcattggggggtgttg

SEQ ID NO: 400347 - DNA, 56 bp, Artificial
  Synthetic oligonucleotide
gagggtaccgtcgagagtgtcccgattccttctgtccctgaagagacagttggtcc

SEQ ID NO: 400348 - DNA, 53 bp, Artificial
  Synthetic oligonucleotide
gagggtacgtgtgtgccacggatctatcgaagagggatgttaaccccggggtt

SEQ ID NO: 400349 - DNA, 60 bp, Artificial
  Synthetic oligonucleotide
gagggtaggtaccactacgctacgcagcagccttagctacgccggagcttagctcgccac

SEQ ID NO: 400350 - DNA, 53 bp, Artificial
  Synthetic oligonucleotide
gagggtaggtagcggtaaacgtagttttcctgagtacactagacaagaggtaa

SEQ ID NO: 400351 - DNA, 58 bp, Artificial
  Synthetic oligonucleotide
gagggtagtttctgaggactatcctttctctctaagttggcagctatattactctaaa

SEQ ID NO: 400352 - DNA, 55 bp, Artificial
  Synthetic oligonucleotide
gagggtatcaagcttcatcagaggaacaagagtggttccgagaggacagctgtct

SEQ ID NO: 400353 - DNA, 55 bp, Artificial
  Synthetic oligonucleotide
gagggtatcgtggtgttaaaccacttctctatgtagaccagtatggttgtgatta

SEQ ID NO: 400354 - DNA, 55 bp, Artificial
  Synthetic oligonucleotide
gagggtatgtgcgctacagtcgagggtatcaagaagcatagggtgcatccactgg

SEQ ID NO: 400355 - DNA, 57 bp, Artificial
  Synthetic oligonucleotide
gagggtcaccaccctcgttagctagttcctcggctagccagctgtccgccccgtctc

SEQ ID NO: 400356 - DNA, 60 bp, Artificial
  Synthetic oligonucleotide
gagggtcacccccctctatggccagctcctcggctagccaactgtccgctccatctctca

SEQ ID NO: 400357 - DNA, 55 bp, Artificial
  Synthetic oligonucleotide
gagggtcactgcattgctgagttccctaaccgtcacaagtctactccggcggttg

SEQ ID NO: 400358 - DNA, 55 bp, Artificial
  Synthetic oligonucleotide
gagggtcagccagtagaagtcttactagacacaggggctgacgactcaatagtag

SEQ ID NO: 400359 - DNA, 56 bp, Artificial
  Synthetic oligonucleotide
gagggtcattcagcctcggtcgccccgctataacgtatgtttgggtcgttatcttc

SEQ ID NO: 400360 - DNA, 55 bp, Artificial
  Synthetic oligonucleotide
gagggtcatttaacatttaaagatatcagcgcacataaagttggtccagaggcgg

SEQ ID NO: 400361 - DNA, 60 bp, Artificial
  Synthetic oligonucleotide
gagggtccatgtaaggtacagtcatttgagtctagacacgatgtagtccatatagggaag

SEQ ID NO: 400362 - DNA, 60 bp, Artificial
  Synthetic oligonucleotide
gagggtccctgtaaggttcagtcttatgagcagagggatgatgtgaagcacaccggtatt

SEQ ID NO: 400363 - DNA, 55 bp, Artificial
  Synthetic oligonucleotide
gagggtcctgggtcaggagactgggtccaagtttttcgcgctgaggaccacggga

SEQ ID NO: 400364 - DNA, 57 bp, Artificial
  Synthetic oligonucleotide
gagggtcggctaccataaaattcatcattgccgaccgtggaccgattgtccagaccg

SEQ ID NO: 400365 - DNA, 60 bp, Artificial
  Synthetic oligonucleotide
gagggtcgtcctatgggacgactatggaatgagtaatcccatccatgatgccctcaggtt

SEQ ID NO: 400366 - DNA, 59 bp, Artificial
  Synthetic oligonucleotide
gagggtctgaggccatcgagacctcaggtttcgtgctatctacgcgaaaggaagccgtc

SEQ ID NO: 400367 - DNA, 60 bp, Artificial
  Synthetic oligonucleotide
gagggtctgcaataaatcacacctcttttcatgttgcacacctcacacagacagggcttc

SEQ ID NO: 400368 - DNA, 60 bp, Artificial
  Synthetic oligonucleotide
gagggtctggtcaaataagttgcagccctgtgtttgcagtagaaagacctattgctctaa

SEQ ID NO: 400369 - DNA, 60 bp, Artificial
  Synthetic oligonucleotide
gagggtgaacaacattagtgaatgtttcagagacaatgatgatctggattcaatgacctt

SEQ ID NO: 400370 - DNA, 55 bp, Artificial
  Synthetic oligonucleotide
gagggtgaacctgtccgagtttgagtggctcatgactggtcagccgtctgccttt

SEQ ID NO: 400371 - DNA, 54 bp, Artificial
  Synthetic oligonucleotide
gagggtgaattgagacaaactgggccgtttaacgtcatcacacacaattcagtg

SEQ ID NO: 400372 - DNA, 55 bp, Artificial
  Synthetic oligonucleotide
gagggtgacactagtgctggttataaccacgatgtttccaacctgcgctcctgga

SEQ ID NO: 400373 - DNA, 55 bp, Artificial
  Synthetic oligonucleotide
gagggtgacgccagacagacccatttctcgcggactttcgagcctcgatccagtc

SEQ ID NO: 400374 - DNA, 55 bp, Artificial
  Synthetic oligonucleotide
gagggtgagcctacgcaaggcaatattccctccacgagtgcggtagcgtagtgtc

SEQ ID NO: 400375 - DNA, 52 bp, Artificial
  Synthetic oligonucleotide
gagggtgagtcgggagacagtgtcaccaaccaaggtaagctcctagcaatgc

SEQ ID NO: 400376 - DNA, 55 bp, Artificial
  Synthetic oligonucleotide
gagggtgcaacagcaagccgatcggataggagccgacgaaatgacaaccccgaca

SEQ ID NO: 400377 - DNA, 55 bp, Artificial
  Synthetic oligonucleotide
gagggtgccaaaccaggcgcaatatcagctcctgtcgctattagtcggcgagtgg

SEQ ID NO: 400378 - DNA, 55 bp, Artificial
  Synthetic oligonucleotide
gagggtgccacccggtaccacagtgaaattcgataagaggtgcaagaacgctgcc

SEQ ID NO: 400379 - DNA, 55 bp, Artificial
  Synthetic oligonucleotide
gagggtgctattaattgaaccgacgaggccacttgcagagaatgtatataagcag

SEQ ID NO: 400380 - DNA, 56 bp, Artificial
  Synthetic oligonucleotide
gagggtggaaggcccttaagtatctgggaaatcttatgcagtattggggtctagaa

SEQ ID NO: 400381 - DNA, 60 bp, Artificial
  Synthetic oligonucleotide
gagggtggcatgtaactccaacctgagtctatcctctcactggatacgactgatttacaa

SEQ ID NO: 400382 - DNA, 60 bp, Artificial
  Synthetic oligonucleotide
gagggtgggacaagcaatgtatgcccctcccatcgcaggaaacattgaatgtaactcaag

SEQ ID NO: 400383 - DNA, 53 bp, Artificial
  Synthetic oligonucleotide
gagggtggtttatggtggaagtcatagtagaacaaacaacagggtaccaggtg

SEQ ID NO: 400384 - DNA, 54 bp, Artificial
  Synthetic oligonucleotide
gagggtgtaacaaacaatagccagactacaggagagcaaagcccacgcacgcgt

SEQ ID NO: 400385 - DNA, 55 bp, Artificial
  Synthetic oligonucleotide
gagggtgtacccggctcaattaatagcatgctggagcgagcccaagtacatgcgc

SEQ ID NO: 400386 - DNA, 55 bp, Artificial
  Synthetic oligonucleotide
gagggttaagcaagttcggatcgagcaacatagttgtaatgacgagtggtttcgc

SEQ ID NO: 400387 - DNA, 52 bp, Artificial
  Synthetic oligonucleotide
gagggttaatggaaagggttttctacgtcgaaagatgcgggaagctcctacc

SEQ ID NO: 400388 - DNA, 58 bp, Artificial
  Synthetic oligonucleotide
gagggttacctcatccagggggattaattaaatgtaatcatatgacagtattagatat

SEQ ID NO: 400389 - DNA, 60 bp, Artificial
  Synthetic oligonucleotide
gagggttatcccctttgcaagtaagatcagatcgtgaagtaagtcgagtcgtgatcgctg

SEQ ID NO: 400390 - DNA, 54 bp, Artificial
  Synthetic oligonucleotide
gagggttcgggaccaacgagggaacgtactattgtctcccgaagaggtcagcga

SEQ ID NO: 400391 - DNA, 55 bp, Artificial
  Synthetic oligonucleotide
gagggttctgaggtcgacccggctgaacctgcacatcttgatgtttcggggacct

SEQ ID NO: 400392 - DNA, 55 bp, Artificial
  Synthetic oligonucleotide
gagggttgaagtccagatgtccactaagataattatgtgggcctaacgaacgagc

SEQ ID NO: 400393 - DNA, 51 bp, Artificial
  Synthetic oligonucleotide
gagggttggagtgcagcataaacctgcgggacgtgtgcaacgtctcacccg

SEQ ID NO: 400394 - DNA, 55 bp, Artificial
  Synthetic oligonucleotide
gagggttgggagtactatgacaactcgctcctatatgccaaattgtggcactacg

SEQ ID NO: 400395 - DNA, 59 bp, Artificial
  Synthetic oligonucleotide
gagggttgggtatattgcgatgcggatggttcacaattcgatacttcactaacacctta

SEQ ID NO: 400396 - DNA, 59 bp, Artificial
  Synthetic oligonucleotide
gagggttgtgataaggaagacgaatgtgaagcagaggcggctacgaaggtcctagtgac

SEQ ID NO: 400397 - DNA, 56 bp, Artificial
  Synthetic oligonucleotide
gagggttgttattccactagctctacccttaattccaatccagaccatagcaaaag

SEQ ID NO: 400398 - DNA, 52 bp, Artificial
  Synthetic oligonucleotide
gagggtttctgaactctacggagtagatcgggggggggtaatgcccctctct

SEQ ID NO: 400399 - DNA, 58 bp, Artificial
  Synthetic oligonucleotide
gagggttttacgggaacgacatcatcacaccccatccacaaaccgccctgcattcaca

SEQ ID NO: 400400 - DNA, 57 bp, Artificial
  Synthetic oligonucleotide
gagggttttggctgtatcagcgtattacggggtggtggttaacgggctgagtgcata

SEQ ID NO: 400401 - DNA, 55 bp, Artificial
  Synthetic oligonucleotide
gaggtaaactcatggcacattctatctaaggacaatgcgattagaataggggagg

SEQ ID NO: 400402 - DNA, 53 bp, Artificial
  Synthetic oligonucleotide
gaggtaaagtgattcaaaccccattcgagctaccattagatttataccccggt

SEQ ID NO: 400403 - DNA, 60 bp, Artificial
  Synthetic oligonucleotide
gaggtaaagttgtctctttcatgaataagtctagtcatttttggctaatgccactgatgg

SEQ ID NO: 400404 - DNA, 58 bp, Artificial
  Synthetic oligonucleotide
gaggtaaataattgagtccccaataggtaaatgaggcaccgatatatcggtgcctcta

SEQ ID NO: 400405 - DNA, 55 bp, Artificial
  Synthetic oligonucleotide
gaggtaaccaggttggatagtctgatcaacagtggtcataattcaattggtgagc

SEQ ID NO: 400406 - DNA, 58 bp, Artificial
  Synthetic oligonucleotide
gaggtaagagactactgtgagaagaagggttggatagtagacatcactagtcaggtgc

SEQ ID NO: 400407 - DNA, 55 bp, Artificial
  Synthetic oligonucleotide
gaggtaaggatctccgtaaagcgtgcccgacagagcaccttccccgtgtaccatg

SEQ ID NO: 400408 - DNA, 55 bp, Artificial
  Synthetic oligonucleotide
gaggtaatacgcaacaatcaggccacagccatagaagatgcgctggatctactag

SEQ ID NO: 400409 - DNA, 51 bp, Artificial
  Synthetic oligonucleotide
gaggtaatacgtacagggtattgggttcttttcccaccgtactttctagaa

SEQ ID NO: 400410 - DNA, 55 bp, Artificial
  Synthetic oligonucleotide
gaggtaattggaggggctgttgtagaaattgttacgaacatgaggggtgataaac

SEQ ID NO: 400411 - DNA, 60 bp, Artificial
  Synthetic oligonucleotide
gaggtacaccagacgcagaagatatgctagacgcacttatggccgccgaagggtgagttg

SEQ ID NO: 400412 - DNA, 57 bp, Artificial
  Synthetic oligonucleotide
gaggtaccaacaggccgtggagtcgttagcaatccgcccaataggggtacaggatgc

SEQ ID NO: 400413 - DNA, 57 bp, Artificial
  Synthetic oligonucleotide
gaggtaccagctgttggaaatgggtgtgaccctggatgaactacgatccaacaaccc

SEQ ID NO: 400414 - DNA, 54 bp, Artificial
  Synthetic oligonucleotide
gaggtacctcaggagatccacgtgaagaggttggctgataggttcttccggaca

SEQ ID NO: 400415 - DNA, 54 bp, Artificial
  Synthetic oligonucleotide
gaggtacgatcatgagtcgcacatccctgattaaattaatccatgtcgcccgtc

SEQ ID NO: 400416 - DNA, 50 bp, Artificial
  Synthetic oligonucleotide
gaggtacgcgtcatgggagataactaacagggagatggtgcaattgcgcc

SEQ ID NO: 400417 - DNA, 55 bp, Artificial
  Synthetic oligonucleotide
gaggtactcagtccagctcaaacaactgtgtcaatagtaggttcagacagagccg

SEQ ID NO: 400418 - DNA, 60 bp, Artificial
  Synthetic oligonucleotide
gaggtactcatcatctacccgagatatagtaacttcatatcaactgaggcatacctggtt

SEQ ID NO: 400419 - DNA, 59 bp, Artificial
  Synthetic oligonucleotide
gaggtactgttatcggaaaattctggagaagaacaatgtgccacgacctttacatgtga

SEQ ID NO: 400420 - DNA, 55 bp, Artificial
  Synthetic oligonucleotide
gaggtacttcagagcagatgatcaatatcctttcttggtacacccggttatgccc

SEQ ID NO: 400421 - DNA, 59 bp, Artificial
  Synthetic oligonucleotide
gaggtagaaatagtcacccggatgggtgagagaaagatcctcaagccaaggtggcttga

SEQ ID NO: 400422 - DNA, 55 bp, Artificial
  Synthetic oligonucleotide
gaggtagaagaggacattggagagaacagcagcttgttacaccctatgcaccagc

SEQ ID NO: 400423 - DNA, 55 bp, Artificial
  Synthetic oligonucleotide
gaggtagaccctacgctacatggtctttatgtagcttcgaaccaaagtgagacac

SEQ ID NO: 400424 - DNA, 60 bp, Artificial
  Synthetic oligonucleotide
gaggtagagttgtttcatttatgaatcacaaaagccatttctggttgcagcctttagcag

SEQ ID NO: 400425 - DNA, 55 bp, Artificial
  Synthetic oligonucleotide
gaggtagatatcagatgcaggctggaccagtctttcctcctggtatgcgttggga

SEQ ID NO: 400426 - DNA, 60 bp, Artificial
  Synthetic oligonucleotide
gaggtagatgctaacaaccgatcagctggtgatcagagcatggattcatcacgatgcatc

SEQ ID NO: 400427 - DNA, 54 bp, Artificial
  Synthetic oligonucleotide
gaggtagcaaacggcctgcaccgaaaacggtcacctttgatagcagtagcaaaa

SEQ ID NO: 400428 - DNA, 59 bp, Artificial
  Synthetic oligonucleotide
gaggtagcagcaatgttcccataagaatgagagctaagtggtaccccactttatcccac

SEQ ID NO: 400429 - DNA, 59 bp, Artificial
  Synthetic oligonucleotide
gaggtaggttacgatgtggcaaaacaccttgtggaacgtgttaccatggcatgtgaaga

SEQ ID NO: 400430 - DNA, 51 bp, Artificial
  Synthetic oligonucleotide
gaggtagtacctcaacttccgaagagcaggatagcgcctgctcaagacaaa

SEQ ID NO: 400431 - DNA, 55 bp, Artificial
  Synthetic oligonucleotide
gaggtagtccataagcctggtgatctggctcgccactaccaagccatcggtagcc

SEQ ID NO: 400432 - DNA, 56 bp, Artificial
  Synthetic oligonucleotide
gaggtagtgcaaaaagtggctacagaaagcatagtaatatggggaaagacccctaa

SEQ ID NO: 400433 - DNA, 60 bp, Artificial
  Synthetic oligonucleotide
gaggtagtggaaagagaatactgcaaagattgtactcctgatgaactcactacatgcact

SEQ ID NO: 400434 - DNA, 59 bp, Artificial
  Synthetic oligonucleotide
gaggtagtggacaggtcggaacatatggtttgaacacattcactaacatggaagtacaa

SEQ ID NO: 400435 - DNA, 52 bp, Artificial
  Synthetic oligonucleotide
gaggtagtgtatttgaataatactaccgtagaaaaagaaatttgtcccggaa

SEQ ID NO: 400436 - DNA, 59 bp, Artificial
  Synthetic oligonucleotide
gaggtagttcagggatcatgaaaacagaaggaacacttgaaaactgcgagaccaaatgc

SEQ ID NO: 400437 - DNA, 60 bp, Artificial
  Synthetic oligonucleotide
gaggtataaatagcatgtaggactagctatagagttagtagtgtattgctgtatgtaagg

SEQ ID NO: 400438 - DNA, 54 bp, Artificial
  Synthetic oligonucleotide
gaggtatacatatagggccagggagagcattttatacaacaggacaagtagtag

SEQ ID NO: 400439 - DNA, 57 bp, Artificial
  Synthetic oligonucleotide
gaggtatacctacttttctcactggtacctagcagacctaatgaaggaaccaggcaa

SEQ ID NO: 400440 - DNA, 55 bp, Artificial
  Synthetic oligonucleotide
gaggtatatggaacagccgcagttcaagtcaattcgtcgtcgacgtatggctctc

SEQ ID NO: 400441 - DNA, 55 bp, Artificial
  Synthetic oligonucleotide
gaggtatccggtcttcgcacgcttcccattttattctctcccgcaggacttgagg

SEQ ID NO: 400442 - DNA, 55 bp, Artificial
  Synthetic oligonucleotide
gaggtatgaacacacctgaggcagaagtgggttactacccctatgctgggttcac

SEQ ID NO: 400443 - DNA, 56 bp, Artificial
  Synthetic oligonucleotide
gaggtatgcacgaaactttataagctgtatttgacttatcgtatttgtccactacg

SEQ ID NO: 400444 - DNA, 55 bp, Artificial
  Synthetic oligonucleotide
gaggtatgtggtcctaataatggttttgaaatgtggagttctgagtgggcaaatc

SEQ ID NO: 400445 - DNA, 55 bp, Artificial
  Synthetic oligonucleotide
gaggtattgaaataggcagaggacaacctttaggggttggaacatcaggtcaccc

SEQ ID NO: 400446 - DNA, 55 bp, Artificial
  Synthetic oligonucleotide
gaggtattgatctggataaactcaaaatgatcgcatatggggacgacgtgattgc

SEQ ID NO: 400447 - DNA, 55 bp, Artificial
  Synthetic oligonucleotide
gaggtatttgatggtgttggattacccttaaagccattagagacatgggtatccg

SEQ ID NO: 400448 - DNA, 54 bp, Artificial
  Synthetic oligonucleotide
gaggtcaaatctgatggtccgcccgatacactcattatactaacgtatcctgat

SEQ ID NO: 400449 - DNA, 55 bp, Artificial
  Synthetic oligonucleotide
gaggtcaagccggaggatgtcgacaacctggttcgagccgcaggcaaagaattcc

SEQ ID NO: 400450 - DNA, 60 bp, Artificial
  Synthetic oligonucleotide
gaggtcaaggtgctcagacaaactatggctgaaggaaagcggagctccaatcttggagaa

SEQ ID NO: 400451 - DNA, 55 bp, Artificial
  Synthetic oligonucleotide
gaggtcacagctataggaaggctatgggtaggaaaacaatggtttaccctgccac

SEQ ID NO: 400452 - DNA, 58 bp, Artificial
  Synthetic oligonucleotide
gaggtcaccgtgcaggagctgcaagagacaaatctcggggttttgacgccccaccgag

SEQ ID NO: 400453 - DNA, 55 bp, Artificial
  Synthetic oligonucleotide
gaggtcacggcacgaagctccttctataaggccttcggaatcctcccagacaccc

SEQ ID NO: 400454 - DNA, 52 bp, Artificial
  Synthetic oligonucleotide
gaggtcagggactcaacctccaagaggcgacgcgtgtttatattacgggacc

SEQ ID NO: 400455 - DNA, 55 bp, Artificial
  Synthetic oligonucleotide
gaggtcataggccttcgatatccacttctctttgatcaggctttctccccgagga

SEQ ID NO: 400456 - DNA, 54 bp, Artificial
  Synthetic oligonucleotide
gaggtcatcaaccctgaagtcttattgggaacggttgtgtttcctccggaatta

SEQ ID NO: 400457 - DNA, 55 bp, Artificial
  Synthetic oligonucleotide
gaggtcatgtgttccgtggaccataaagtcggcgaaatcaaagaattctgccgca

SEQ ID NO: 400458 - DNA, 59 bp, Artificial
  Synthetic oligonucleotide
gaggtcattactcgttcgcgttgcctgttggctcatggccggtgatgcaaggagggagt

SEQ ID NO: 400459 - DNA, 60 bp, Artificial
  Synthetic oligonucleotide
gaggtcattaggattaatagtggatcaatgcaacggagttctatggcaggctagtgaggg

SEQ ID NO: 400460 - DNA, 55 bp, Artificial
  Synthetic oligonucleotide
gaggtccaactgtaccctcctggatacttggatttggtgatgttgtgtctcagtt

SEQ ID NO: 400461 - DNA, 55 bp, Artificial
  Synthetic oligonucleotide
gaggtccaatgggtttccaagggaacccccattctgcgtcagcccctccaatgtc

SEQ ID NO: 400462 - DNA, 60 bp, Artificial
  Synthetic oligonucleotide
gaggtccaatttatcgaaggagagacgggaaatggatgagagagctgattctatatgaca

SEQ ID NO: 400463 - DNA, 58 bp, Artificial
  Synthetic oligonucleotide
gaggtccacaatttcagccacctgggattcccgaacttgctgttgtctgttaattaga

SEQ ID NO: 400464 - DNA, 59 bp, Artificial
  Synthetic oligonucleotide
gaggtccagttcacgtccaactacggagcacaggactcgcttctctgggctcccgacaa

SEQ ID NO: 400465 - DNA, 60 bp, Artificial
  Synthetic oligonucleotide
gaggtccatctcttagaaccacaacagtcacaggaaagataatccatgaatggtgctgca

SEQ ID NO: 400466 - DNA, 55 bp, Artificial
  Synthetic oligonucleotide
gaggtccatttcgagcacatattgccgaacccaggagaggattacttagtacggt

SEQ ID NO: 400467 - DNA, 55 bp, Artificial
  Synthetic oligonucleotide
gaggtcccaaaactaataataagcggaggaatagaagtactcagcgtccgaacag

SEQ ID NO: 400468 - DNA, 56 bp, Artificial
  Synthetic oligonucleotide
gaggtcccctacaaggccgacaagttcgccgggttggtgtatgcagagatgggcct

SEQ ID NO: 400469 - DNA, 55 bp, Artificial
  Synthetic oligonucleotide
gaggtccctacacctgaggtgggacgttctgtcacagccaggacacaatataata

SEQ ID NO: 400470 - DNA, 60 bp, Artificial
  Synthetic oligonucleotide
gaggtccgaagagggcagtcagctctgaggcagtacagaacagaaataagaatcgggcaa

SEQ ID NO: 400471 - DNA, 58 bp, Artificial
  Synthetic oligonucleotide
gaggtccgccaattgactggcttggatgtgctccccggtaggaacgaggtcttcgctg

SEQ ID NO: 400472 - DNA, 55 bp, Artificial
  Synthetic oligonucleotide
gaggtccgccatgcagccaagtcaatgactccggacctaaatcctgttcccaaga

SEQ ID NO: 400473 - DNA, 55 bp, Artificial
  Synthetic oligonucleotide
gaggtcctaactgttaacttgtttggtgaagcttgtattgccttcagaagagttg

SEQ ID NO: 400474 - DNA, 58 bp, Artificial
  Synthetic oligonucleotide
gaggtccttctcgagctcctccgctttcttccttgcgctcacccactgctcaaggatg

SEQ ID NO: 400475 - DNA, 55 bp, Artificial
  Synthetic oligonucleotide
gaggtccttgctaagctgcatagagaagtcgacgcgtattgtacggctcgcctcg

SEQ ID NO: 400476 - DNA, 60 bp, Artificial
  Synthetic oligonucleotide
gaggtcgaatgggatatcgatctcgcggcagtgtgtggacatactttctttgcgttggaa

SEQ ID NO: 400477 - DNA, 55 bp, Artificial
  Synthetic oligonucleotide
gaggtcgaccaattaggatgatttcttttcccgacactctggtccagattgagcc

SEQ ID NO: 400478 - DNA, 56 bp, Artificial
  Synthetic oligonucleotide
gaggtcgactgaagagatcgcatatacggagatacgtctcagtcagttctaatcat

SEQ ID NO: 400479 - DNA, 55 bp, Artificial
  Synthetic oligonucleotide
gaggtcgagcttaaagacatgcctatcgacgttctgctcaatatcgaggggtatt

SEQ ID NO: 400480 - DNA, 55 bp, Artificial
  Synthetic oligonucleotide
gaggtcgagttagaacaggctcaaagcctattacaatcatgacatatggatacgc

SEQ ID NO: 400481 - DNA, 60 bp, Artificial
  Synthetic oligonucleotide
gaggtcgattcagcgtggaatactgttgctatctaatagacttggacaattagttgacct

SEQ ID NO: 400482 - DNA, 55 bp, Artificial
  Synthetic oligonucleotide
gaggtcgccgagagtgttaaatctcggtttattgttaagagaaagacggagcatt

SEQ ID NO: 400483 - DNA, 55 bp, Artificial
  Synthetic oligonucleotide
gaggtcgctagtcaagctagacagatggtgcaagcaatgagaaccattggaactc

SEQ ID NO: 400484 - DNA, 57 bp, Artificial
  Synthetic oligonucleotide
gaggtcggatagagcttcgctaagagagcgcttaggccctagtcgggacccccagta

SEQ ID NO: 400485 - DNA, 51 bp, Artificial
  Synthetic oligonucleotide
gaggtcggcacctttcctttacaattaatgaccctatgaatacaactgact

SEQ ID NO: 400486 - DNA, 55 bp, Artificial
  Synthetic oligonucleotide
gaggtcgtaacggcctacgcagaatggtataacaccaacatcaacgtaaagcgcc

SEQ ID NO: 400487 - DNA, 55 bp, Artificial
  Synthetic oligonucleotide
gaggtcgtctacggatgggcttctttccaaatgctacagaggacagtacttccga

SEQ ID NO: 400488 - DNA, 55 bp, Artificial
  Synthetic oligonucleotide
gaggtcgtgacattgatcctatctctgaattcgaacttgagtaccgtgcctggcg

SEQ ID NO: 400489 - DNA, 59 bp, Artificial
  Synthetic oligonucleotide
gaggtcgttttcccaaatgaagtgggagctagaatattgacatcagagtcacaattgac

SEQ ID NO: 400490 - DNA, 54 bp, Artificial
  Synthetic oligonucleotide
gaggtctaagaatagcagagtgttcctcctggtattaaagactttcaaaccctt

SEQ ID NO: 400491 - DNA, 56 bp, Artificial
  Synthetic oligonucleotide
gaggtctattagagtttaatttgcttgaccaaaggataatatggcaaaattggtac

SEQ ID NO: 400492 - DNA, 57 bp, Artificial
  Synthetic oligonucleotide
gaggtctcatctccaccccactgggcactccaccaaccgtaagtaacagcgatttta

SEQ ID NO: 400493 - DNA, 59 bp, Artificial
  Synthetic oligonucleotide
gaggtctcatctccactccattgggcactccaccaaccgtaagtaacagtgactttgta

SEQ ID NO: 400494 - DNA, 58 bp, Artificial
  Synthetic oligonucleotide
gaggtctctaacgagacaagtcacataagaaatcttacgaggctatgtcctccaccgg

SEQ ID NO: 400495 - DNA, 57 bp, Artificial
  Synthetic oligonucleotide
gaggtctctattaaaaccacacttaaagagctggtgcataaaagagtaacctcacca

SEQ ID NO: 400496 - DNA, 55 bp, Artificial
  Synthetic oligonucleotide
gaggtctctcaacaggaacctgaacagtcagaactaaaacctgaacaatccgagg

SEQ ID NO: 400497 - DNA, 58 bp, Artificial
  Synthetic oligonucleotide
gaggtctctcgccacaggcaggccgccccaggagtacctgtcttcccagggaagacaa

SEQ ID NO: 400498 - DNA, 56 bp, Artificial
  Synthetic oligonucleotide
gaggtctgacggtgtcttacgcactgtacgcgttaaattctttgacgcgcggcccc

SEQ ID NO: 400499 - DNA, 55 bp, Artificial
  Synthetic oligonucleotide
gaggtctgagggattataatccgatagctagcgtcatatgccatctcgtgaatga

SEQ ID NO: 400500 - DNA, 60 bp, Artificial
  Synthetic oligonucleotide
gaggtctgctcacactaatgatgtgaaacaattgacagaagcagtgcaaaagatatctct

SEQ ID NO: 400501 - DNA, 55 bp, Artificial
  Synthetic oligonucleotide
gaggtgaacaatgagatcgagattatagagggttccgaagttgccaatgtgccag

SEQ ID NO: 400502 - DNA, 51 bp, Artificial
  Synthetic oligonucleotide
gaggtgaacagagagcactataaacgtttagtagggatcgagggatgacac

SEQ ID NO: 400503 - DNA, 55 bp, Artificial
  Synthetic oligonucleotide
gaggtgaagatatgtctttccttgagaaggatgcaccttacatggtaggtgatgt

SEQ ID NO: 400504 - DNA, 55 bp, Artificial
  Synthetic oligonucleotide
gaggtgaagcttaataaggaaactttgtttgctcccgttaccagctccaacacag

SEQ ID NO: 400505 - DNA, 55 bp, Artificial
  Synthetic oligonucleotide
gaggtgaatgggtaaatatagtaaggtaaatgtgtccccaataggtaaatgagtc

SEQ ID NO: 400506 - DNA, 55 bp, Artificial
  Synthetic oligonucleotide
gaggtgacaatactgtggttagaccgcaatgaaaagtttagggatataagaaggt

SEQ ID NO: 400507 - DNA, 58 bp, Artificial
  Synthetic oligonucleotide
gaggtgacatattcccaccatacagttgcagtggagctactacttcagtaggcagagt

SEQ ID NO: 400508 - DNA, 55 bp, Artificial
  Synthetic oligonucleotide
gaggtgacgcgcttaaatccgctatcaaagagggcgctacgtccatgaaagtggc

SEQ ID NO: 400509 - DNA, 53 bp, Artificial
  Synthetic oligonucleotide
gaggtgacgtccagtattaccgtcacctctccccccgacctctaacccctgta

SEQ ID NO: 400510 - DNA, 60 bp, Artificial
  Synthetic oligonucleotide
gaggtgactgcaaagcaatatgctattctgaatctcatgacttctactgtggatcatgta

SEQ ID NO: 400511 - DNA, 56 bp, Artificial
  Synthetic oligonucleotide
gaggtgactgcaggtcgggtaataggaaggggcccctgagtgggatctacctgaaa

SEQ ID NO: 400512 - DNA, 60 bp, Artificial
  Synthetic oligonucleotide
gaggtgagagagcaattcactcaggcattatctgactatttgatgcagaatccggagtta

SEQ ID NO: 400513 - DNA, 60 bp, Artificial
  Synthetic oligonucleotide
gaggtgagatgacgtgggctgatatggtggaaggcgatcttgattgggacgcccgtgaag

SEQ ID NO: 400514 - DNA, 60 bp, Artificial
  Synthetic oligonucleotide
gaggtgagcatagaccaatgggttagcatggtacgcgccggactattgtccgcctcggtc

SEQ ID NO: 400515 - DNA, 55 bp, Artificial
  Synthetic oligonucleotide
gaggtgagtctattgaattgacggagtttaatggtcctcacacaagcacacctgc

SEQ ID NO: 400516 - DNA, 57 bp, Artificial
  Synthetic oligonucleotide
gaggtgagtgaaaccaccgaggtctaggggcaattcgggctagggcagtctagcgga

SEQ ID NO: 400517 - DNA, 55 bp, Artificial
  Synthetic oligonucleotide
gaggtgatagtgggttgatactgaatgctagagcactgagaggtaaattcggacg

SEQ ID NO: 400518 - DNA, 60 bp, Artificial
  Synthetic oligonucleotide
gaggtgatatcgaaacatggaaagcaaagatcggtactacttttgaagacaatctgctgg

SEQ ID NO: 400519 - DNA, 55 bp, Artificial
  Synthetic oligonucleotide
gaggtgatcaatcctgatatcacaatatccgataaacctctaaagcacgtgtcaa

SEQ ID NO: 400520 - DNA, 55 bp, Artificial
  Synthetic oligonucleotide
gaggtgatgattacgttcaagagagattagaatcgttgttcaaattgtcccctct

SEQ ID NO: 400521 - DNA, 54 bp, Artificial
  Synthetic oligonucleotide
gaggtgatggcattttggtaattagaagggttactaccatttggtttggggcta

SEQ ID NO: 400522 - DNA, 60 bp, Artificial
  Synthetic oligonucleotide
gaggtgatgggcaacaatttcagcgagatcgtgtcagtctgaggggtggggagcacattc

SEQ ID NO: 400523 - DNA, 55 bp, Artificial
  Synthetic oligonucleotide
gaggtgatggtacaccacatccttattgttatacagatggtgttatgaagaatgc

SEQ ID NO: 400524 - DNA, 60 bp, Artificial
  Synthetic oligonucleotide
gaggtgattatggcggtgcaggaaaatgcaacacaattaatgcgtagagcggcacaggat

SEQ ID NO: 400525 - DNA, 51 bp, Artificial
  Synthetic oligonucleotide
gaggtgatttgtggtgtaatgttttaaatcatgcgaagaaacatgtacctg

SEQ ID NO: 400526 - DNA, 55 bp, Artificial
  Synthetic oligonucleotide
gaggtgcacacagcaagaggcgagagcggcgactggtgagtacgcgagagcgtca

SEQ ID NO: 400527 - DNA, 55 bp, Artificial
  Synthetic oligonucleotide
gaggtgcacatcacatctacatcggggtctggggagtcctctgcagttgaccacg

SEQ ID NO: 400528 - DNA, 55 bp, Artificial
  Synthetic oligonucleotide
gaggtgcagccggattacccagaggattttcagtctgatgatcttgcccacaccc

SEQ ID NO: 400529 - DNA, 59 bp, Artificial
  Synthetic oligonucleotide
gaggtgccatttgacttagtcaatgggtaccaattgagaggatttcattctactcaggg

SEQ ID NO: 400530 - DNA, 60 bp, Artificial
  Synthetic oligonucleotide
gaggtgcctcgagagggtttcctaggggaagtgaggtgctcatcagaatcagctgctata

SEQ ID NO: 400531 - DNA, 55 bp, Artificial
  Synthetic oligonucleotide
gaggtgcctttaatcggcgcaggtatggccacagctgtagcgaccggtagggcga

SEQ ID NO: 400532 - DNA, 60 bp, Artificial
  Synthetic oligonucleotide
gaggtgcgagaattggccgccattggaaaagctccgtacatagctgagacagcacttcgc

SEQ ID NO: 400533 - DNA, 60 bp, Artificial
  Synthetic oligonucleotide
gaggtgcgcacccgatttatttaggagcaacgcactacgaagtgtcatattctcagttaa

SEQ ID NO: 400534 - DNA, 60 bp, Artificial
  Synthetic oligonucleotide
gaggtgcgctccacactaaatagtgggacacaagtgtctttcaagacagagcactacaag

SEQ ID NO: 400535 - DNA, 56 bp, Artificial
  Synthetic oligonucleotide
gaggtgctggcctttgcatttagagagttatatgtagtgtggcgcaacgactttcc

SEQ ID NO: 400536 - DNA, 55 bp, Artificial
  Synthetic oligonucleotide
gaggtgctggctcgtcaaaaccacagtctggtaacgtaaacgagagtggaaactc

SEQ ID NO: 400537 - DNA, 55 bp, Artificial
  Synthetic oligonucleotide
gaggtggaattgtcccatttattgaatgatgatttatcttaacaagtggccatgg

SEQ ID NO: 400538 - DNA, 57 bp, Artificial
  Synthetic oligonucleotide
gaggtggactcagtggttcctgtaaacaacaccattagggcagttaattccattgaa

SEQ ID NO: 400539 - DNA, 54 bp, Artificial
  Synthetic oligonucleotide
gaggtggactctggtcaatctgaggggttgcatcctgcacgggtacgtgacata

SEQ ID NO: 400540 - DNA, 60 bp, Artificial
  Synthetic oligonucleotide
gaggtggagagcaagacaaagacagatccgtgagattagtgagcggattcttgagtcttg

SEQ ID NO: 400541 - DNA, 60 bp, Artificial
  Synthetic oligonucleotide
gaggtggagagcaagacaaagtcagatcaattcgattagtgagcggattcttcgcgcttg

SEQ ID NO: 400542 - DNA, 60 bp, Artificial
  Synthetic oligonucleotide
gaggtggatagcagttcccacatggaggataccggagaggctagagaggtggcatagcct

SEQ ID NO: 400543 - DNA, 59 bp, Artificial
  Synthetic oligonucleotide
gaggtggatcagccggctactacggtggtcctgcccaggatgcaatgttaacttcccag

SEQ ID NO: 400544 - DNA, 57 bp, Artificial
  Synthetic oligonucleotide
gaggtggatgggatacgggtacacaggtacgctccggcgtgcaaacctctcctgcgg

SEQ ID NO: 400545 - DNA, 55 bp, Artificial
  Synthetic oligonucleotide
gaggtggcacctattactctatatctgctggtaatgttgtgattcaatctttgga

SEQ ID NO: 400546 - DNA, 54 bp, Artificial
  Synthetic oligonucleotide
gaggtggcagtataatagattcgctgtgataacacatggtaaaggtcactatag

SEQ ID NO: 400547 - DNA, 60 bp, Artificial
  Synthetic oligonucleotide
gaggtggcgagcaaggcagagacagatccgtgcgattagtgagcggattcttagcacttg

SEQ ID NO: 400548 - DNA, 58 bp, Artificial
  Synthetic oligonucleotide
gaggtggggagtcatcgccaggtcatctaacaacataatgttaggacatgtatctgtc

SEQ ID NO: 400549 - DNA, 55 bp, Artificial
  Synthetic oligonucleotide
gaggtggtatctaacaatacccaactagcgcttattgacgtagttgataatgtca

SEQ ID NO: 400550 - DNA, 60 bp, Artificial
  Synthetic oligonucleotide
gaggtggtggcatatttgtaaatatgcgagtgtctccgaatgagtttgcgagtgtctcca

SEQ ID NO: 400551 - DNA, 54 bp, Artificial
  Synthetic oligonucleotide
gaggtggttcctcttgttctcgagggccttccttcgtcggtggtcctccctctc

SEQ ID NO: 400552 - DNA, 60 bp, Artificial
  Synthetic oligonucleotide
gaggtggtttgagaactgacttactggtgcgttgtattcaatcaacagtaactcagaatg

SEQ ID NO: 400553 - DNA, 59 bp, Artificial
  Synthetic oligonucleotide
gaggtgtacacatccatgagatacaggggcctcgtctggtttcgagggggcgcgggcag

SEQ ID NO: 400554 - DNA, 60 bp, Artificial
  Synthetic oligonucleotide
gaggtgtatgacacagggatcacgtcatacaagagatcgagtgcataacacaaaaattgc

SEQ ID NO: 400555 - DNA, 51 bp, Artificial
  Synthetic oligonucleotide
gaggtgtccaacttattgaactggttcagtatgtattgaactggtttgatg

SEQ ID NO: 400556 - DNA, 60 bp, Artificial
  Synthetic oligonucleotide
gaggtgtcccattgcagagcaacagaatacataatgaagggggtatacataaatactgcc

SEQ ID NO: 400557 - DNA, 55 bp, Artificial
  Synthetic oligonucleotide
gaggtgtctattggaacgaatgtgtattctcaggactggagtaaaactgttcgca

SEQ ID NO: 400558 - DNA, 60 bp, Artificial
  Synthetic oligonucleotide
gaggtgtctcggatattggtggacgaagtggtgctgttacacttcggacaactctgtgcc

SEQ ID NO: 400559 - DNA, 60 bp, Artificial
  Synthetic oligonucleotide
gaggtgtggcctgggcgggactggggagtggcgagccctcagatgctgcatataagcagg

SEQ ID NO: 400560 - DNA, 60 bp, Artificial
  Synthetic oligonucleotide
gaggtgtgtaccaacatatttctcatatgtgcaatgatcccgagtctcgtttacttcaat

SEQ ID NO: 400561 - DNA, 55 bp, Artificial
  Synthetic oligonucleotide
gaggtgtgtggcccagtctactgcttcaccccaagccctgttgtggtggggacga

SEQ ID NO: 400562 - DNA, 53 bp, Artificial
  Synthetic oligonucleotide
gaggtgttaccctattcacaacttagtacgtgaagaacgtccctccaccgccc

SEQ ID NO: 400563 - DNA, 50 bp, Artificial
  Synthetic oligonucleotide
gaggtgttcacctctccgtatatcactcaactgtggtcctggctcggtaa

SEQ ID NO: 400564 - DNA, 53 bp, Artificial
  Synthetic oligonucleotide
gaggtgttcttcaaagaccgtaaggaggagaaggccccccgcttcattgtgtt

SEQ ID NO: 400565 - DNA, 60 bp, Artificial
  Synthetic oligonucleotide
gaggtgtttcaactagtctgattggtaattgcactgtgcgccaggtcaaaacaatgcaac

SEQ ID NO: 400566 - DNA, 52 bp, Artificial
  Synthetic oligonucleotide
gaggtgtttctatataactagagttaagtaacccagttgcatgttgcaaccc

SEQ ID NO: 400567 - DNA, 57 bp, Artificial
  Synthetic oligonucleotide
gaggtgtttgtgcgctctaaccaggagtcttttgaaaagaagtatgaacaagactac

SEQ ID NO: 400568 - DNA, 50 bp, Artificial
  Synthetic oligonucleotide
gaggttaaacccccaatacctgacgtcccggatgttccgagcgttaaacc

SEQ ID NO: 400569 - DNA, 55 bp, Artificial
  Synthetic oligonucleotide
gaggttaagaccgcctatgcccatgacttacattacgcgtaccgcatgggagatg

SEQ ID NO: 400570 - DNA, 51 bp, Artificial
  Synthetic oligonucleotide
gaggttaatccgacgtccatagttggactaggagacacctctaacagcccc

SEQ ID NO: 400571 - DNA, 55 bp, Artificial
  Synthetic oligonucleotide
gaggttacaaccagttcggaccttcattgctttcaacttcgcaaacgactactgc

SEQ ID NO: 400572 - DNA, 55 bp, Artificial
  Synthetic oligonucleotide
gaggttaccatcaggaaagtcgtcggtaggaggttttctcggcgaactggcacag

SEQ ID NO: 400573 - DNA, 58 bp, Artificial
  Synthetic oligonucleotide
gaggttactaacgggactatttgtgacattgagctgcctttagctaccggcacattct

SEQ ID NO: 400574 - DNA, 56 bp, Artificial
  Synthetic oligonucleotide
gaggttagataatcacccctccttgtacataatgctcagagatccgtctcttagag

SEQ ID NO: 400575 - DNA, 55 bp, Artificial
  Synthetic oligonucleotide
gaggttagtgaaacgcagggaacagaaaagctgacgataacatattcatcgtcca

SEQ ID NO: 400576 - DNA, 60 bp, Artificial
  Synthetic oligonucleotide
gaggttatcacgtatctctagtagatggatgtgataagcatgctatgcaggatccgacga

SEQ ID NO: 400577 - DNA, 55 bp, Artificial
  Synthetic oligonucleotide
gaggttatgaaagatgtctcgattgagaagatggtggctagacctgatgaagtgc

SEQ ID NO: 400578 - DNA, 55 bp, Artificial
  Synthetic oligonucleotide
gaggttcaaagtgccacgatcgcagcaacctcagatccatatctacagcgcgccg

SEQ ID NO: 400579 - DNA, 55 bp, Artificial
  Synthetic oligonucleotide
gaggttcaaggtgggacttttcccaaagtcgagttgtacagattgaggcaatatg

SEQ ID NO: 400580 - DNA, 60 bp, Artificial
  Synthetic oligonucleotide
gaggttcactggaattacaaagagagaatggtgacatttaaggttcctcatgccaagaga

SEQ ID NO: 400581 - DNA, 55 bp, Artificial
  Synthetic oligonucleotide
gaggttcaggggagatgggtataatgggacggtctttatggccaataccaagctg

SEQ ID NO: 400582 - DNA, 55 bp, Artificial
  Synthetic oligonucleotide
gaggttccggacaagtctctaccaaatcttgttcatgatgtcgtattttcacact

SEQ ID NO: 400583 - DNA, 55 bp, Artificial
  Synthetic oligonucleotide
gaggttcctagataacatagaaaagctagatatatgtggtaggaaccgtccgttc

SEQ ID NO: 400584 - DNA, 60 bp, Artificial
  Synthetic oligonucleotide
gaggttcctcccagtagctggtggaacaagcagtgtctatattgaggtgctgcatttaac

SEQ ID NO: 400585 - DNA, 55 bp, Artificial
  Synthetic oligonucleotide
gaggttccttctacgttcgtcacagcacaaagccccggtcggtggtgacacaccg

SEQ ID NO: 400586 - DNA, 55 bp, Artificial
  Synthetic oligonucleotide
gaggttctaatcgaagaagatgtgtggccccgcaagcaaaatgtagagcgctcgt

SEQ ID NO: 400587 - DNA, 60 bp, Artificial
  Synthetic oligonucleotide
gaggttctcatcaacaccaacgggtatatctaatgggtcgttcatatgcatgatgttcaa

SEQ ID NO: 400588 - DNA, 58 bp, Artificial
  Synthetic oligonucleotide
gaggttctgattccagtcgtgtcggcacacttggaggagttgaaagccgaggaggagg

SEQ ID NO: 400589 - DNA, 60 bp, Artificial
  Synthetic oligonucleotide
gaggttcttgtattatggggcattcaccacccatctaccagtactgatcaacaaagtctc

SEQ ID NO: 400590 - DNA, 55 bp, Artificial
  Synthetic oligonucleotide
gaggttgaaaaggattcgttatgtaatgaggtcattgacgtgcccgtgttatttt

SEQ ID NO: 400591 - DNA, 55 bp, Artificial
  Synthetic oligonucleotide
gaggttgaatcactgtgtgccagtgctaccaacctatccaaggcctccactctga

SEQ ID NO: 400592 - DNA, 59 bp, Artificial
  Synthetic oligonucleotide
gaggttgacacgtcggtcttgggatgggtggttgctagtgtggttgcttgggccatagc

SEQ ID NO: 400593 - DNA, 50 bp, Artificial
  Synthetic oligonucleotide
gaggttgacgaacttagtcgtatgttggtggaggcgaactataaggtcac

SEQ ID NO: 400594 - DNA, 54 bp, Artificial
  Synthetic oligonucleotide
gaggttgacttaacgccacataaccccttgaaggtttgtgacactaagttaaca

SEQ ID NO: 400595 - DNA, 59 bp, Artificial
  Synthetic oligonucleotide
gaggttgagcatgtcagacctacgtttgacgactctttcactccggtgtattagtgccc

SEQ ID NO: 400596 - DNA, 55 bp, Artificial
  Synthetic oligonucleotide
gaggttgagtggaaatatgtgtttgatggtcgaacgttccagagttatgcttttg

SEQ ID NO: 400597 - DNA, 55 bp, Artificial
  Synthetic oligonucleotide
gaggttgagtttctcaagcgtaaacctggttacttcccagagtccacatttatag

SEQ ID NO: 400598 - DNA, 50 bp, Artificial
  Synthetic oligonucleotide
gaggttgatccagctaatagtaagtgggagggatgagcagtcaattgcgg

SEQ ID NO: 400599 - DNA, 55 bp, Artificial
  Synthetic oligonucleotide
gaggttgatggaaagagatactctcttgtatcctcgcgtaagccaacagaccgag

SEQ ID NO: 400600 - DNA, 55 bp, Artificial
  Synthetic oligonucleotide
gaggttgcaataagcatactgagaacctccagtgatatcatccagtgtactggaa

SEQ ID NO: 400601 - DNA, 55 bp, Artificial
  Synthetic oligonucleotide
gaggttgctctgccgacgacgggagaaatccctttctacggcaaggctatccccc

SEQ ID NO: 400602 - DNA, 55 bp, Artificial
  Synthetic oligonucleotide
gaggttggattaaggcgcctatacaccagtaagcgtggttcgatggatgagttgg

SEQ ID NO: 400603 - DNA, 59 bp, Artificial
  Synthetic oligonucleotide
gaggttgggcatataccggtatgtcaccccaggggagagaccatcgggcatattcgaca

SEQ ID NO: 400604 - DNA, 55 bp, Artificial
  Synthetic oligonucleotide
gaggttggggcaattgatcagcagcgagatgtagcggcagcagggatgcgtttag

SEQ ID NO: 400605 - DNA, 60 bp, Artificial
  Synthetic oligonucleotide
gaggttggtccagctaatagtgagtgggggagacgaacagtcaattgctgaagcaataat

SEQ ID NO: 400606 - DNA, 54 bp, Artificial
  Synthetic oligonucleotide
gaggttggtcttccaaaccacgaaaaggcatggggacaaatctctcggtcccca

SEQ ID NO: 400607 - DNA, 59 bp, Artificial
  Synthetic oligonucleotide
gaggttgtcaatatgacccagacgaaactggtcctatatatacaaaatatcgtgaagac

SEQ ID NO: 400608 - DNA, 55 bp, Artificial
  Synthetic oligonucleotide
gaggttgtgtatgacaacgatccagacaatgtcaacgtgtacactatgtggagac

SEQ ID NO: 400609 - DNA, 59 bp, Artificial
  Synthetic oligonucleotide
gaggttgttcaacagacaagggtggacaagctgacccaaggtcgtcagacttatgattg

SEQ ID NO: 400610 - DNA, 55 bp, Artificial
  Synthetic oligonucleotide
gaggttgttggagacagaggaggggtgtaaaagaatcatagaagtcctctacccc

SEQ ID NO: 400611 - DNA, 58 bp, Artificial
  Synthetic oligonucleotide
gaggtttagaagagctattgagtcgccaaagctgattgacactttgtcgcttaatttt

SEQ ID NO: 400612 - DNA, 55 bp, Artificial
  Synthetic oligonucleotide
gaggtttatagcttcggtcttgtgtgcttttggcatggcatcagacatcagtccg

SEQ ID NO: 400613 - DNA, 55 bp, Artificial
  Synthetic oligonucleotide
gaggtttatccctcagtcgtggacttgcgttttgtagtgtgtacactgtggaggt

SEQ ID NO: 400614 - DNA, 59 bp, Artificial
  Synthetic oligonucleotide
gaggtttattgtattgtgcaaggcaaaatggggcaagatgccaggttcttctgtccaac

SEQ ID NO: 400615 - DNA, 55 bp, Artificial
  Synthetic oligonucleotide
gaggtttcatctgattaccaagatcttcacgagatatcgaggcgaaagaacttcg

SEQ ID NO: 400616 - DNA, 55 bp, Artificial
  Synthetic oligonucleotide
gaggtttcctgtgtcagtcggtaagaaggatgattgcgttttaggtggatgttgc

SEQ ID NO: 400617 - DNA, 55 bp, Artificial
  Synthetic oligonucleotide
gaggtttccttgcaagagaagaggctgaagtgagtgaggcagtgctggcaattaa

SEQ ID NO: 400618 - DNA, 59 bp, Artificial
  Synthetic oligonucleotide
gaggtttcgaaagagctagttagatgcgggatgcgattcaacaccgagcaagttaatgg

SEQ ID NO: 400619 - DNA, 60 bp, Artificial
  Synthetic oligonucleotide
gaggtttcggcagcaaatggtcgaacatcatattgaccagggaccaatcactcgtgagtg

SEQ ID NO: 400620 - DNA, 55 bp, Artificial
  Synthetic oligonucleotide
gaggtttgacagcaagctggctctaagacacatagccagagagcaacatccggag

SEQ ID NO: 400621 - DNA, 55 bp, Artificial
  Synthetic oligonucleotide
gaggtttgacagccaactggcattccgtcacatggcccgagagaagcatccggag

SEQ ID NO: 400622 - DNA, 60 bp, Artificial
  Synthetic oligonucleotide
gaggtttgacagccgcctagcatttcatcacgtggcccgagagctgcatccggagtactt

SEQ ID NO: 400623 - DNA, 55 bp, Artificial
  Synthetic oligonucleotide
gaggtttgtgtctaattccatccctagtggttgaaacagcaccacggacccggaa

SEQ ID NO: 400624 - DNA, 55 bp, Artificial
  Synthetic oligonucleotide
gaggttttacacttccccactaccgcactgaagggcagtttattgagttcacgag

SEQ ID NO: 400625 - DNA, 54 bp, Artificial
  Synthetic oligonucleotide
gaggttttagagctatcctcaacgtacccacaagaataagacagggtttagaaa

SEQ ID NO: 400626 - DNA, 60 bp, Artificial
  Synthetic oligonucleotide
gaggttttcagatcgaatggtctaacagctaatgaatcaggaaggttgatagatttcctc

SEQ ID NO: 400627 - DNA, 60 bp, Artificial
  Synthetic oligonucleotide
gaggttttcatatggattcctatctcctggtgcttcagatatgaacattccaagtgacct

SEQ ID NO: 400628 - DNA, 51 bp, Artificial
  Synthetic oligonucleotide
gaggttttctgtgttcaaccagagaaagggggtcgtaagccagctcgcctt

SEQ ID NO: 400629 - DNA, 51 bp, Artificial
  Synthetic oligonucleotide
gaggttttggcttacgtactattagaactttggctacacgttattgtagag

SEQ ID NO: 400630 - DNA, 57 bp, Artificial
  Synthetic oligonucleotide
gagtaaaaacttgtgggtggagcagtggcaggatggggtactacggttgcgtgttga

SEQ ID NO: 400631 - DNA, 56 bp, Artificial
  Synthetic oligonucleotide
gagtaaacccctcactagtctggtcgatgaggctgagaattccccacgggcgaccg

SEQ ID NO: 400632 - DNA, 54 bp, Artificial
  Synthetic oligonucleotide
gagtaaaggggttcgggtttctgaacggagataacacatggctcggtaggacca

SEQ ID NO: 400633 - DNA, 56 bp, Artificial
  Synthetic oligonucleotide
gagtaaatagattgtatgggttaccagctgtaaatccaaataatactagagatttt

SEQ ID NO: 400634 - DNA, 55 bp, Artificial
  Synthetic oligonucleotide
gagtaaatggcgacaatacgttgtagagaggttcgaatccttaatcactcgccaa

SEQ ID NO: 400635 - DNA, 60 bp, Artificial
  Synthetic oligonucleotide
gagtaaattcacaactctcttcaacatggaagctaaggtgatggaacctgcagtaccata

SEQ ID NO: 400636 - DNA, 59 bp, Artificial
  Synthetic oligonucleotide
gagtaacagctcgaattacattattgattgatacaatacccaacttatctaaatactta

SEQ ID NO: 400637 - DNA, 54 bp, Artificial
  Synthetic oligonucleotide
gagtaacaggtttaactcacaacctccaatagttcgttaaagcactatcttacg

SEQ ID NO: 400638 - DNA, 54 bp, Artificial
  Synthetic oligonucleotide
gagtaaccgctttaaagagcaggacgagaatggccggtgggttagttactgccg

SEQ ID NO: 400639 - DNA, 55 bp, Artificial
  Synthetic oligonucleotide
gagtaacctaagtataatacgccaaggcatgttatcccggcctccatttagagtc

SEQ ID NO: 400640 - DNA, 60 bp, Artificial
  Synthetic oligonucleotide
gagtaacctcaccagaagactggatgatgatgcagccagacagttacattgaaatgatgg

SEQ ID NO: 400641 - DNA, 51 bp, Artificial
  Synthetic oligonucleotide
gagtaacctgggcattggaggctaacgaatggcacagcctaacgaaccagt

SEQ ID NO: 400642 - DNA, 57 bp, Artificial
  Synthetic oligonucleotide
gagtaacgtaaatgttactacacggagaggaattacaagtaaatattcctatgcagc

SEQ ID NO: 400643 - DNA, 59 bp, Artificial
  Synthetic oligonucleotide
gagtaactagcaagatagttaagtggataatcaggatcatatcagcagtcacaataatc

SEQ ID NO: 400644 - DNA, 53 bp, Artificial
  Synthetic oligonucleotide
gagtaactatactaaactgagtaagtctaagagaaatgcttcgcgatctcaat

SEQ ID NO: 400645 - DNA, 51 bp, Artificial
  Synthetic oligonucleotide
gagtaactggtttcccgtaccctgcacactttgcaaaattggaggtcgacg

SEQ ID NO: 400646 - DNA, 56 bp, Artificial
  Synthetic oligonucleotide
gagtaactgtatgaatgatgtagtgagaggatgtgaccttccattatgcagctgaa

SEQ ID NO: 400647 - DNA, 60 bp, Artificial
  Synthetic oligonucleotide
gagtaacttgctcatctctcgcgctcttattggtcgtctgacaaacgacagttttacagg

SEQ ID NO: 400648 - DNA, 60 bp, Artificial
  Synthetic oligonucleotide
gagtaagagaagcggtgatggtgcgactagatttagacattgttgtccagctaaaagaat

SEQ ID NO: 400649 - DNA, 57 bp, Artificial
  Synthetic oligonucleotide
gagtaagagcttacacatacggagtgattgatatgccagacaattatgagaccctac

SEQ ID NO: 400650 - DNA, 57 bp, Artificial
  Synthetic oligonucleotide
gagtaagccagcttttaggaaaggattgttgaagtacaatgagccagttcgagttgg

SEQ ID NO: 400651 - DNA, 59 bp, Artificial
  Synthetic oligonucleotide
gagtaagctctttgccaccagtattgatgtgtaagtgttcaatttctttataagaactc

SEQ ID NO: 400652 - DNA, 58 bp, Artificial
  Synthetic oligonucleotide
gagtaaggatagtgttagcttcgaagctaaatcagtgtgtagcggtccaagaaattac

SEQ ID NO: 400653 - DNA, 55 bp, Artificial
  Synthetic oligonucleotide
gagtaaggctgtacgttgtggccctataataccatccgtcaagcatcacttcaac

SEQ ID NO: 400654 - DNA, 54 bp, Artificial
  Synthetic oligonucleotide
gagtaaggggcctatacttccctgctggtggctccagttccggaacaacaaacc

SEQ ID NO: 400655 - DNA, 55 bp, Artificial
  Synthetic oligonucleotide
gagtaaggtactgtccctatatgccctacccatgccatgcccttgcctatccctg

SEQ ID NO: 400656 - DNA, 60 bp, Artificial
  Synthetic oligonucleotide
gagtaagtcaatgcacgtcattgattcatatggatcgctcagtgttggattccacattct

SEQ ID NO: 400657 - DNA, 53 bp, Artificial
  Synthetic oligonucleotide
gagtaagtcatatgtaacgacaagcggggtattaatttacccgggtgttattc

SEQ ID NO: 400658 - DNA, 56 bp, Artificial
  Synthetic oligonucleotide
gagtaagttgactgttccgactgactttccggaaagatttgacaaacgctggattg

SEQ ID NO: 400659 - DNA, 60 bp, Artificial
  Synthetic oligonucleotide
gagtaagttgcacctttactgcgaacgctacagaaggaggtgcaagtattgtagcatctg

SEQ ID NO: 400660 - DNA, 57 bp, Artificial
  Synthetic oligonucleotide
gagtaatagccttcaaacctgtcaagaatccggaacccaaaggatacgtgctgaatg

SEQ ID NO: 400661 - DNA, 60 bp, Artificial
  Synthetic oligonucleotide
gagtaatcagtacctgaccgcggacaactaccagtctccgtgtgcgatacctgagttcga

SEQ ID NO: 400662 - DNA, 55 bp, Artificial
  Synthetic oligonucleotide
gagtaatcgattcctgttcagttggatgactgataacttcaatgacctgggtggt

SEQ ID NO: 400663 - DNA, 55 bp, Artificial
  Synthetic oligonucleotide
gagtaatgatcccttagctttacaggctcgttatgctcgaatgtacgatgatctg

SEQ ID NO: 400664 - DNA, 60 bp, Artificial
  Synthetic oligonucleotide
gagtaatgatgcttaccttttaggacgtgaaaaggcattgagggaatcacaccttgctga

SEQ ID NO: 400665 - DNA, 60 bp, Artificial
  Synthetic oligonucleotide
gagtaatggcaggagcttggatttctcgggtatcgaattattcgagccacaggctgctga

SEQ ID NO: 400666 - DNA, 60 bp, Artificial
  Synthetic oligonucleotide
gagtaatggtatcacctctagctgtaacatggtggaataggaatggcccgacaacaagta

SEQ ID NO: 400667 - DNA, 58 bp, Artificial
  Synthetic oligonucleotide
gagtaatggtgtctcccttagctgtgacctggtggaataggaatggacccacgacaag

SEQ ID NO: 400668 - DNA, 52 bp, Artificial
  Synthetic oligonucleotide
gagtaatttgcgcaggttggagtggcatagttgttaggagtggaattctaac

SEQ ID NO: 400669 - DNA, 55 bp, Artificial
  Synthetic oligonucleotide
gagtacaagctctgaattcttgtctaagggagacgtgccaattctgacaacgccc

SEQ ID NO: 400670 - DNA, 50 bp, Artificial
  Synthetic oligonucleotide
gagtacaatatatagtaataggagttcctaaggccatccggtataatatt

SEQ ID NO: 400671 - DNA, 55 bp, Artificial
  Synthetic oligonucleotide
gagtacaatggtccttcaagggtgacgaagatcgcattttttaaagcccacgctt

SEQ ID NO: 400672 - DNA, 56 bp, Artificial
  Synthetic oligonucleotide
gagtacacaggcaggaaagtaaggttacgtgatctggatttaaggcgaactgttag

SEQ ID NO: 400673 - DNA, 55 bp, Artificial
  Synthetic oligonucleotide
gagtacaccattctggtgggattaagactagagagggaaccgaaagcactaaaac

SEQ ID NO: 400674 - DNA, 53 bp, Artificial
  Synthetic oligonucleotide
gagtacaccctatgggatagtattcaagagttctcaatgatgggtcgtaagga

SEQ ID NO: 400675 - DNA, 55 bp, Artificial
  Synthetic oligonucleotide
gagtacacgttatgaagtgggtagcattgtttcagccgaaatcggtgcaatctga

SEQ ID NO: 400676 - DNA, 55 bp, Artificial
  Synthetic oligonucleotide
gagtacagacccaatcctaacgctatgctgtatcatttcggccatgactcgccac

SEQ ID NO: 400677 - DNA, 60 bp, Artificial
  Synthetic oligonucleotide
gagtacagagtccctggttcaattgtagtaaacgtcaaggacatgctatccgacatgatt

SEQ ID NO: 400678 - DNA, 50 bp, Artificial
  Synthetic oligonucleotide
gagtacagcatggtcgatcacttcgcgattacttggacgttggtgttctt

SEQ ID NO: 400679 - DNA, 59 bp, Artificial
  Synthetic oligonucleotide
gagtacagcgccccacacaagttccgggcgggtaagcagtacggcgctgtcacagacga

SEQ ID NO: 400680 - DNA, 55 bp, Artificial
  Synthetic oligonucleotide
gagtacaggatagtcgtcagtagttcaacgcaggcacggttctgccttgagatgc

SEQ ID NO: 400681 - DNA, 57 bp, Artificial
  Synthetic oligonucleotide
gagtacagggacaaacttatgtccatggtcaacacgacccgtgtgacctacgtggaa

SEQ ID NO: 400682 - DNA, 51 bp, Artificial
  Synthetic oligonucleotide
gagtacagtatttagatgggtagacatagacgtaccagaatcttctagaca

SEQ ID NO: 400683 - DNA, 60 bp, Artificial
  Synthetic oligonucleotide
gagtacagtgatccttcaagggtgacgaagatcgcattcttcactgcccagtttttgagt

SEQ ID NO: 400684 - DNA, 54 bp, Artificial
  Synthetic oligonucleotide
gagtacagtggtccttcgagagtgatgaagattgcattttttaaggcccaattc

SEQ ID NO: 400685 - DNA, 54 bp, Artificial
  Synthetic oligonucleotide
gagtacagtggtccttcgagggtgacgaagatcgcattcttgagagtccagttc

SEQ ID NO: 400686 - DNA, 60 bp, Artificial
  Synthetic oligonucleotide
gagtacataatgaagggagtgtacataaacacagccctactcaatgcatcttgtgcggca

SEQ ID NO: 400687 - DNA, 50 bp, Artificial
  Synthetic oligonucleotide
gagtacataatgaagggggtatacgttaatactgccctgctcaatgcatc

SEQ ID NO: 400688 - DNA, 57 bp, Artificial
  Synthetic oligonucleotide
gagtacatcatggcagacaccttagttgacaaagcattcactacaactctgatgaac

SEQ ID NO: 400689 - DNA, 55 bp, Artificial
  Synthetic oligonucleotide
gagtaccaattgggtctcactcaaacttggtgaaatgaattggggaatgggtctc

SEQ ID NO: 400690 - DNA, 60 bp, Artificial
  Synthetic oligonucleotide
gagtaccacgcaggcatatacagctccatattcctgtccccaggaagagcatactttgag

SEQ ID NO: 400691 - DNA, 56 bp, Artificial
  Synthetic oligonucleotide
gagtaccataagaattaggaactatgggaattaccacttcaaatcactcgagacag

SEQ ID NO: 400692 - DNA, 55 bp, Artificial
  Synthetic oligonucleotide
gagtacccaagcagctatcaaccaaatcaatgggaaactgaatagggtgattgag

SEQ ID NO: 400693 - DNA, 56 bp, Artificial
  Synthetic oligonucleotide
gagtacccgtgttggaagcatttcataattgcctatacaaagcttccgggtacaaa

SEQ ID NO: 400694 - DNA, 60 bp, Artificial
  Synthetic oligonucleotide
gagtaccgcgcaaaggagattcctgataacgctctggctgttagtgttctgatcaaagaa

SEQ ID NO: 400695 - DNA, 55 bp, Artificial
  Synthetic oligonucleotide
gagtaccgtcccaatccaaatgccatgttataccaatttggccatgattcgcccc

SEQ ID NO: 400696 - DNA, 60 bp, Artificial
  Synthetic oligonucleotide
gagtacctacagtctcgcttcaatgctgacttcctgtatcagtcagaggtccgtaagctg

SEQ ID NO: 400697 - DNA, 58 bp, Artificial
  Synthetic oligonucleotide
gagtacctattgtcaaatccttctgtctgtccagacggtttagatcgttctcgactta

SEQ ID NO: 400698 - DNA, 56 bp, Artificial
  Synthetic oligonucleotide
gagtacgaaaactcttttacaaaaagaattgtgaggcattgctcttttgtgcacac

SEQ ID NO: 400699 - DNA, 58 bp, Artificial
  Synthetic oligonucleotide
gagtacgaaactccctggtgcgttatccatttatggtccagtgttgatattagtgccc

SEQ ID NO: 400700 - DNA, 55 bp, Artificial
  Synthetic oligonucleotide
gagtacgacgacgtagagcacgtgttggaggaaacgctgtgcgaggaccgggagg

SEQ ID NO: 400701 - DNA, 55 bp, Artificial
  Synthetic oligonucleotide
gagtacgccgttggttccacccctctcatggtctccggcgatgactcgcttctcg

SEQ ID NO: 400702 - DNA, 55 bp, Artificial
  Synthetic oligonucleotide
gagtacgcgctcattgacccaagtactgatatgccaactgcaaccttattcgaac

SEQ ID NO: 400703 - DNA, 55 bp, Artificial
  Synthetic oligonucleotide
gagtacgctcagtctgtcccaagaggtaggggtacaccctgccacacgcgattga

SEQ ID NO: 400704 - DNA, 60 bp, Artificial
  Synthetic oligonucleotide
gagtacgtaaacgacgagctgctccacaagatatttatcctgcttgtaaggttgcaaaca

SEQ ID NO: 400705 - DNA, 58 bp, Artificial
  Synthetic oligonucleotide
gagtacgtcctagtttcaccatgggatggcagtgacctagctaaagtatcgacccatt

SEQ ID NO: 400706 - DNA, 55 bp, Artificial
  Synthetic oligonucleotide
gagtacgtgacgacatcagaatatgaattcgttcgatatcctactgatgctggtc

SEQ ID NO: 400707 - DNA, 60 bp, Artificial
  Synthetic oligonucleotide
gagtactaattcttgagggacatatcaacgctcaagatgcggtaatcggcagaacagact

SEQ ID NO: 400708 - DNA, 55 bp, Artificial
  Synthetic oligonucleotide
gagtactacccggcaaggtaccaatctcacctcatgttagctcaagggcactcag

SEQ ID NO: 400709 - DNA, 55 bp, Artificial
  Synthetic oligonucleotide
gagtactaccgaagaatatatatcagtagatgggaaaacatggttgttgtcccaa

SEQ ID NO: 400710 - DNA, 55 bp, Artificial
  Synthetic oligonucleotide
gagtactaggccagagagtacaacaggctagtgtggaagaaaagatgcaagcatg

SEQ ID NO: 400711 - DNA, 56 bp, Artificial
  Synthetic oligonucleotide
gagtactattagaatcaggaactatgggaattaccatttcaagtcacttgagacag

SEQ ID NO: 400712 - DNA, 60 bp, Artificial
  Synthetic oligonucleotide
gagtactcaaagtatgacagttttgtggcccagtcgtaaggcagtgaagtctgcactagt

SEQ ID NO: 400713 - DNA, 58 bp, Artificial
  Synthetic oligonucleotide
gagtactcgaagtactgaagtttagtggcccaatcataagggaatgatttgcggacca

SEQ ID NO: 400714 - DNA, 60 bp, Artificial
  Synthetic oligonucleotide
gagtactcgaatagacgctttcagaatacttggaatatctgagtgggatgctggcgggtt

SEQ ID NO: 400715 - DNA, 60 bp, Artificial
  Synthetic oligonucleotide
gagtactcgcgtgacaggagggtcgccagcccacagtgcctctggtcttgcgtccctctt

SEQ ID NO: 400716 - DNA, 54 bp, Artificial
  Synthetic oligonucleotide
gagtactcttcaaaccttcacatgacacgagtataacatttttcaggttaagaa

SEQ ID NO: 400717 - DNA, 57 bp, Artificial
  Synthetic oligonucleotide
gagtactgacccccacgccatcccaagaacagtggcgatcatagaccacctactatc

SEQ ID NO: 400718 - DNA, 59 bp, Artificial
  Synthetic oligonucleotide
gagtactgtatgacgaatacaaagcagccagaaactggtggacaaaatctaactcctta

SEQ ID NO: 400719 - DNA, 55 bp, Artificial
  Synthetic oligonucleotide
gagtacttacaacgatgaatcgcaggtggttgtcgctcttactaggcataggaag

SEQ ID NO: 400720 - DNA, 56 bp, Artificial
  Synthetic oligonucleotide
gagtactttaaagctggctaccggaatgaggaatgtaccagaaaagcgactcagag

SEQ ID NO: 400721 - DNA, 57 bp, Artificial
  Synthetic oligonucleotide
gagtactttaccacaagttggggacaacatacataacttgccacatggtggtaatta

SEQ ID NO: 400722 - DNA, 57 bp, Artificial
  Synthetic oligonucleotide
gagtagaagatctcaacaaacacccatacaacaagtaccgtagtaacatcgtacgtg

SEQ ID NO: 400723 - DNA, 55 bp, Artificial
  Synthetic oligonucleotide
gagtagacatgtattctcacaggtgcatgcagcattgctgagcactccagactag

SEQ ID NO: 400724 - DNA, 55 bp, Artificial
  Synthetic oligonucleotide
gagtagacctttgaattgaaatcgaggtgaccactcaagtaattatgggacccta

SEQ ID NO: 400725 - DNA, 58 bp, Artificial
  Synthetic oligonucleotide
gagtagacgattggctcattttgagttttactcggttttcgacgagcggcatcttagc

SEQ ID NO: 400726 - DNA, 55 bp, Artificial
  Synthetic oligonucleotide
gagtagagataacggcagagggaacccttgacagtttcttgcatgctgtcaagcc

SEQ ID NO: 400727 - DNA, 51 bp, Artificial
  Synthetic oligonucleotide
gagtagatacctatctgagggtaacggtggctccattgaagattgtcaatc

SEQ ID NO: 400728 - DNA, 52 bp, Artificial
  Synthetic oligonucleotide
gagtagatagaaagcgactttgttggtcttctttatatagcggctgcttgcg

SEQ ID NO: 400729 - DNA, 55 bp, Artificial
  Synthetic oligonucleotide
gagtagatcttggggctcaagtctagatgcccacaaaggtaattatgtgggccta

SEQ ID NO: 400730 - DNA, 55 bp, Artificial
  Synthetic oligonucleotide
gagtagcgctgaacgctctatggctggtgtaaataagcaatctggcgaactaggt

SEQ ID NO: 400731 - DNA, 52 bp, Artificial
  Synthetic oligonucleotide
gagtagcggtacactattgcgtcgtgcgaagtgacgtttgtgacgggtggga

SEQ ID NO: 400732 - DNA, 57 bp, Artificial
  Synthetic oligonucleotide
gagtagctcttctctccccctccggtttttcctctgttcggactggctcatcctcga

SEQ ID NO: 400733 - DNA, 55 bp, Artificial
  Synthetic oligonucleotide
gagtagctgcagttaaaagttactgttgtaaattttgtaccgttagcttcctgct

SEQ ID NO: 400734 - DNA, 55 bp, Artificial
  Synthetic oligonucleotide
gagtagctggtccctgggagtatgggttgtttattaagagaggatcgcataagcg

SEQ ID NO: 400735 - DNA, 54 bp, Artificial
  Synthetic oligonucleotide
gagtaggaaatgcagtctatgtaattaaactaaaacaagatgtagatgataatc

SEQ ID NO: 400736 - DNA, 56 bp, Artificial
  Synthetic oligonucleotide
gagtaggacacatagccagaaattgcagggcccctagaaaaaagggctgttggaaa

SEQ ID NO: 400737 - DNA, 55 bp, Artificial
  Synthetic oligonucleotide
gagtaggactaaacgactacccggtgggatcacaactaccttgcgagcctgaacc

SEQ ID NO: 400738 - DNA, 55 bp, Artificial
  Synthetic oligonucleotide
gagtaggactacacgagtacccggtagggtcgcaattaccttgcgagcctgaacc

SEQ ID NO: 400739 - DNA, 60 bp, Artificial
  Synthetic oligonucleotide
gagtaggagatacggaggacatccagatgttggctgtgagcccactctcttcggagcaag

SEQ ID NO: 400740 - DNA, 55 bp, Artificial
  Synthetic oligonucleotide
gagtaggaggacctagccacaaagctagaatattagctgaggcaatgagccaagc

SEQ ID NO: 400741 - DNA, 58 bp, Artificial
  Synthetic oligonucleotide
gagtaggaggggcggcgacaaacgaaggaagattttacgccctcattgccattgctgc

SEQ ID NO: 400742 - DNA, 60 bp, Artificial
  Synthetic oligonucleotide
gagtaggatactcgacggatccaatctacgggggacagcaaccagagtcagacctgctaa

SEQ ID NO: 400743 - DNA, 60 bp, Artificial
  Synthetic oligonucleotide
gagtaggatactgtgcatcactaacaaagagttactttgcctccgctcagggtgaaataa

SEQ ID NO: 400744 - DNA, 60 bp, Artificial
  Synthetic oligonucleotide
gagtaggatgcagttctcttctctaactgtaaatgtaagaggatcaggaatgaggatact

SEQ ID NO: 400745 - DNA, 55 bp, Artificial
  Synthetic oligonucleotide
gagtaggattatacgccgccccaaccaggctgttgactacggaactgttgagact

SEQ ID NO: 400746 - DNA, 58 bp, Artificial
  Synthetic oligonucleotide
gagtaggcctttttacagtgagaccgaaagcggtcgcgtgcagtacagtagactaggc

SEQ ID NO: 400747 - DNA, 55 bp, Artificial
  Synthetic oligonucleotide
gagtagggcagggtagacctgtgccaatactactcggtgagatggaagttggctc

SEQ ID NO: 400748 - DNA, 55 bp, Artificial
  Synthetic oligonucleotide
gagtagggctatctggttcatgtggctcggagctcggtacctagagttcgaagcc

SEQ ID NO: 400749 - DNA, 60 bp, Artificial
  Synthetic oligonucleotide
gagtagggttgggaggtgtggcggaagtgtggcatttgtaagtgggaggagctcacatgc

SEQ ID NO: 400750 - DNA, 60 bp, Artificial
  Synthetic oligonucleotide
gagtaggtatcttcgctgagttgtgtaaggcagtggagtcacgttatgaagtgataggaa

SEQ ID NO: 400751 - DNA, 58 bp, Artificial
  Synthetic oligonucleotide
gagtaggttgatcattatcggaccaagtaatgtatggatgcttggggttttgaacttc

SEQ ID NO: 400752 - DNA, 60 bp, Artificial
  Synthetic oligonucleotide
gagtagtagacagcttgcacacactcactgtagttaccggaaatggactaactgtagata

SEQ ID NO: 400753 - DNA, 58 bp, Artificial
  Synthetic oligonucleotide
gagtagtatgcgatgattcaacaaagggtgaagttgttatatctggtaaatccttacg

SEQ ID NO: 400754 - DNA, 53 bp, Artificial
  Synthetic oligonucleotide
gagtagtccccatagagggaagtagtagaaggaatacctttgggtttccatag

SEQ ID NO: 400755 - DNA, 56 bp, Artificial
  Synthetic oligonucleotide
gagtagtgaggtgaatttaagaggtttgtgtctaattccatccctagtggttgaaa

SEQ ID NO: 400756 - DNA, 58 bp, Artificial
  Synthetic oligonucleotide
gagtagtgatcctagattagaggtggattttaaggaagctctattctccaaatataag

SEQ ID NO: 400757 - DNA, 55 bp, Artificial
  Synthetic oligonucleotide
gagtataaccatctgaacaccatccaccttctcatgagccctattggccaatcct

SEQ ID NO: 400758 - DNA, 58 bp, Artificial
  Synthetic oligonucleotide
gagtataacccaggtcgtcattagctgtagacgtaaaatcagcggtccagtgttgaag

SEQ ID NO: 400759 - DNA, 55 bp, Artificial
  Synthetic oligonucleotide
gagtataagtggctaagatacgtaacatgtgtaattggtccagacacggatgaag

SEQ ID NO: 400760 - DNA, 60 bp, Artificial
  Synthetic oligonucleotide
gagtatacataaacacagccttgctcaatgcgtcttgcgcagctatggacgacttccagt

SEQ ID NO: 400761 - DNA, 57 bp, Artificial
  Synthetic oligonucleotide
gagtataccactcaaagatttgagcgaggaagaagttaaggcatttcgtacacttag

SEQ ID NO: 400762 - DNA, 55 bp, Artificial
  Synthetic oligonucleotide
gagtataccattctagcaactgcctcacagccgtcaaaatccaactatgcaagta

SEQ ID NO: 400763 - DNA, 57 bp, Artificial
  Synthetic oligonucleotide
gagtatacgatccagccaaggttgggtacacggcagattgtgccccaggcagaatcg

SEQ ID NO: 400764 - DNA, 60 bp, Artificial
  Synthetic oligonucleotide
gagtatataacgtctctaaatgcctcatgatttcattcgctcatcgacagccactgcgtg

SEQ ID NO: 400765 - DNA, 60 bp, Artificial
  Synthetic oligonucleotide
gagtatatgaacgactgtgaatagtttcactaaaagtccatgtagcaacccatgtatcaa

SEQ ID NO: 400766 - DNA, 60 bp, Artificial
  Synthetic oligonucleotide
gagtatatgagtatacaagtgaattaaattgaggaggagtagtaaggtatatagttgaga

SEQ ID NO: 400767 - DNA, 60 bp, Artificial
  Synthetic oligonucleotide
gagtatcaaatccgtacaggtggattcttttcgtgcctagctatgttgagaccgctccag

SEQ ID NO: 400768 - DNA, 55 bp, Artificial
  Synthetic oligonucleotide
gagtatcaagttatgactccttacttggctgatccagagttgtttgtgccacttg

SEQ ID NO: 400769 - DNA, 55 bp, Artificial
  Synthetic oligonucleotide
gagtatcatctaccccacaagaacagatagaatggatcactagggcaaacaaccc

SEQ ID NO: 400770 - DNA, 59 bp, Artificial
  Synthetic oligonucleotide
gagtatcattacctatgaaaataatacctgggtcaataagacgtatttgaacatcagcg

SEQ ID NO: 400771 - DNA, 60 bp, Artificial
  Synthetic oligonucleotide
gagtatccgaaatggaacttatgatcatgacatttatagagatgaggcaatcaacaaccg

SEQ ID NO: 400772 - DNA, 60 bp, Artificial
  Synthetic oligonucleotide
gagtatcgaaccaaagcgaggtgagtgctatgatcacggaaccgacattatctaccaatt

SEQ ID NO: 400773 - DNA, 53 bp, Artificial
  Synthetic oligonucleotide
gagtatcgcgcaccgaatatccgtagcgcagtcccgtctgctatgcagaacac

SEQ ID NO: 400774 - DNA, 60 bp, Artificial
  Synthetic oligonucleotide
gagtatctaaaacagataagcacaacgacctatgctttgatgagatatcaaattgatcgt

SEQ ID NO: 400775 - DNA, 55 bp, Artificial
  Synthetic oligonucleotide
gagtatgaagccgagataaatgaagttcgcaaaatacatgccgccctaatgaaaa

SEQ ID NO: 400776 - DNA, 60 bp, Artificial
  Synthetic oligonucleotide
gagtatgactgtaatctggcattgttacaaactgataaggtttcacgataaccaaatgta

SEQ ID NO: 400777 - DNA, 58 bp, Artificial
  Synthetic oligonucleotide
gagtatgagcgtgactgctacggggacgacgactatcccgactactacgacgggacat

SEQ ID NO: 400778 - DNA, 56 bp, Artificial
  Synthetic oligonucleotide
gagtatgataaatgcgatttctaaagctaagaaagcgttcaaacttccttaccaac

SEQ ID NO: 400779 - DNA, 55 bp, Artificial
  Synthetic oligonucleotide
gagtatgataccgaagggcttgagatcgttgagctacacccaggcggcagagagt

SEQ ID NO: 400780 - DNA, 60 bp, Artificial
  Synthetic oligonucleotide
gagtatgcactttttatagacttgatgtagtgccacttaatagagatagtacagataact

SEQ ID NO: 400781 - DNA, 52 bp, Artificial
  Synthetic oligonucleotide
gagtatgcagttcaaacaatggtcagttcagattgtcatctcgcttagcaag

SEQ ID NO: 400782 - DNA, 55 bp, Artificial
  Synthetic oligonucleotide
gagtatgccactcgtattagtgatgcaatagtggcagtgatctcaggctctatca

SEQ ID NO: 400783 - DNA, 58 bp, Artificial
  Synthetic oligonucleotide
gagtatggaattttctcttactgatccgaggctggagccacacaagtgggaaaagtac

SEQ ID NO: 400784 - DNA, 59 bp, Artificial
  Synthetic oligonucleotide
gagtatggaccagggcctcaagactctctgtatgagtttggttgatggggattttggaa

SEQ ID NO: 400785 - DNA, 54 bp, Artificial
  Synthetic oligonucleotide
gagtatggcagatggactgcacccatctagagggaagcataattttggtagcag

SEQ ID NO: 400786 - DNA, 55 bp, Artificial
  Synthetic oligonucleotide
gagtatgggaactcatccgatctatatgggatcgatggattacgctataagctac

SEQ ID NO: 400787 - DNA, 55 bp, Artificial
  Synthetic oligonucleotide
gagtatgggttaagctggctaacttgacaggatgggttaacgggactccacccta

SEQ ID NO: 400788 - DNA, 55 bp, Artificial
  Synthetic oligonucleotide
gagtatggtatgcatatcgcactaaatcatatggtgagaaagaggcgtcgtgttg

SEQ ID NO: 400789 - DNA, 60 bp, Artificial
  Synthetic oligonucleotide
gagtatgtcacagtggataaaatggagatgtgataaaatagaagaggggggagattggaa

SEQ ID NO: 400790 - DNA, 57 bp, Artificial
  Synthetic oligonucleotide
gagtatgtctagtaggggtaaattttcaacagaattatagctcatgtacagtgtcag

SEQ ID NO: 400791 - DNA, 54 bp, Artificial
  Synthetic oligonucleotide
gagtatgtgcagtgtagtggcacgagtgtggcagcggggtatgtgttaatgttt

SEQ ID NO: 400792 - DNA, 60 bp, Artificial
  Synthetic oligonucleotide
gagtatgtggttgcgttgtacgcgctgactaacgatttcaacaatagagaagatgtggtt

SEQ ID NO: 400793 - DNA, 58 bp, Artificial
  Synthetic oligonucleotide
gagtattacccaaaacatatccagtacaatcttttgattggagaaggaccatgtgaac

SEQ ID NO: 400794 - DNA, 59 bp, Artificial
  Synthetic oligonucleotide
gagtattatgaggtcgctggaaggttttcattgatatcgttagtaccatccaacgacga

SEQ ID NO: 400795 - DNA, 56 bp, Artificial
  Synthetic oligonucleotide
gagtattatttgacagaacttagatcgaaaggaatacaactctatcacgcattggg

SEQ ID NO: 400796 - DNA, 53 bp, Artificial
  Synthetic oligonucleotide
gagtattcttcatcgggtgcaaaatacgcttttccctcacgtaggttatagga

SEQ ID NO: 400797 - DNA, 55 bp, Artificial
  Synthetic oligonucleotide
gagtattgcgcctataatgttctcgaataaaatggcaagactagggaaagggtac

SEQ ID NO: 400798 - DNA, 56 bp, Artificial
  Synthetic oligonucleotide
gagtattggcttaattttgatggaacactactcggaaatattactatatttcccca

SEQ ID NO: 400799 - DNA, 52 bp, Artificial
  Synthetic oligonucleotide
gagtatttacgtagggtttacgtagacggagttagcctaggttatccggcga

SEQ ID NO: 400800 - DNA, 60 bp, Artificial
  Synthetic oligonucleotide
gagtatttcacagtggatatggaagtgttgtaatgattgtgaaggcgaggcagactggaa

SEQ ID NO: 400801 - DNA, 60 bp, Artificial
  Synthetic oligonucleotide
gagtatttccagtcatgactccaagcccagagatgtcaatgagaggaataagagtcagca

SEQ ID NO: 400802 - DNA, 58 bp, Artificial
  Synthetic oligonucleotide
gagtatttggtgtcttttggagtgtggattcgcacacctcccgcttacagaccaccaa

SEQ ID NO: 400803 - DNA, 53 bp, Artificial
  Synthetic oligonucleotide
gagtattttaccgcagtcgcctttataattggtgctaacgtttcgcaactaca

SEQ ID NO: 400804 - DNA, 55 bp, Artificial
  Synthetic oligonucleotide
gagtcaaaagggcaaatccttatgacctatacagaacctgtgctactggtgactg

SEQ ID NO: 400805 - DNA, 55 bp, Artificial
  Synthetic oligonucleotide
gagtcaaacatggagtggcgattctaagggatggtggtggaaactgcctgatgct

SEQ ID NO: 400806 - DNA, 55 bp, Artificial
  Synthetic oligonucleotide
gagtcaaagcctctgcgggggagaaaccaatcgttttagttccagacaattcgta

SEQ ID NO: 400807 - DNA, 53 bp, Artificial
  Synthetic oligonucleotide
gagtcaaatgattcttcgtacatcaaaaagaacagaaccagttggggtaatat

SEQ ID NO: 400808 - DNA, 57 bp, Artificial
  Synthetic oligonucleotide
gagtcaacaaaccataatcccgaatgtcgggtctagaccctgggtgagaggtctgtc

SEQ ID NO: 400809 - DNA, 60 bp, Artificial
  Synthetic oligonucleotide
gagtcaacaaagatttaccagattttggcgatctattcaactgccgccagttcattggta

SEQ ID NO: 400810 - DNA, 52 bp, Artificial
  Synthetic oligonucleotide
gagtcaacaagttccaagtcaataatgaactatggcagggtgttaaggcctg

SEQ ID NO: 400811 - DNA, 58 bp, Artificial
  Synthetic oligonucleotide
gagtcaaccactcgctcgcccctccgagttagagaggagaaccagtgagcgagttaac

SEQ ID NO: 400812 - DNA, 60 bp, Artificial
  Synthetic oligonucleotide
gagtcaactctcagcgccgtcgttgcgagctacctgtaccgcccatgctaagaactatgc

SEQ ID NO: 400813 - DNA, 60 bp, Artificial
  Synthetic oligonucleotide
gagtcaagagagagtcacttggaacgattggcaaacatcaaggcacttagatatgggggc

SEQ ID NO: 400814 - DNA, 55 bp, Artificial
  Synthetic oligonucleotide
gagtcaagatgtgatagataggatatacaagcaggtggctcttgaatccccactg

SEQ ID NO: 400815 - DNA, 60 bp, Artificial
  Synthetic oligonucleotide
gagtcaagcatgtcatactataggttatattacgtcaaaaattggtttgagtgcaatcca

SEQ ID NO: 400816 - DNA, 60 bp, Artificial
  Synthetic oligonucleotide
gagtcaatactttgggctgccagtgcttcagaagtacccttaaatcctgtatggaatgat

SEQ ID NO: 400817 - DNA, 60 bp, Artificial
  Synthetic oligonucleotide
gagtcaatagacaagctgttggtgccaccagaggtgtacgagacaataagcaagcaattc

SEQ ID NO: 400818 - DNA, 55 bp, Artificial
  Synthetic oligonucleotide
gagtcaatcctatgggctgcaagtgcgtcagaaacacccttaagccctacatgga

SEQ ID NO: 400819 - DNA, 60 bp, Artificial
  Synthetic oligonucleotide
gagtcaatgaaagttggagctgctttcacactcatctctatgtattcagagagacccggg

SEQ ID NO: 400820 - DNA, 60 bp, Artificial
  Synthetic oligonucleotide
gagtcaattagaaatgggacttacgatcatgacatatacagggacgaagcactgaacaat

SEQ ID NO: 400821 - DNA, 52 bp, Artificial
  Synthetic oligonucleotide
gagtcaattgtgggtgaccaaacattttcacaggatcattcaagtttgcaat

SEQ ID NO: 400822 - DNA, 56 bp, Artificial
  Synthetic oligonucleotide
gagtcacattttgttcatggtagagattctcttgttgacattttaaaagagcgtgg

SEQ ID NO: 400823 - DNA, 51 bp, Artificial
  Synthetic oligonucleotide
gagtcacccgaatggtggacagaaggtaaaatagagttttacttagggtca

SEQ ID NO: 400824 - DNA, 56 bp, Artificial
  Synthetic oligonucleotide
gagtcacctgggtggtggtggaagtttccagacgcactgaaagacatggggttgtt

SEQ ID NO: 400825 - DNA, 60 bp, Artificial
  Synthetic oligonucleotide
gagtcacgagtagctgattggagtgaggatttcgatagtgctcagatggatcagaattta

SEQ ID NO: 400826 - DNA, 60 bp, Artificial
  Synthetic oligonucleotide
gagtcacggaagatactaagaagctaatactcaaaggctgtgtttacatagcatatcatc

SEQ ID NO: 400827 - DNA, 59 bp, Artificial
  Synthetic oligonucleotide
gagtcacggaatgggatgctggtgagttggaaatatcgaattatggtgggacgtacacc

SEQ ID NO: 400828 - DNA, 60 bp, Artificial
  Synthetic oligonucleotide
gagtcactggttccaggaggctagcggactcgtcacacaggagacccagacggaccagct

SEQ ID NO: 400829 - DNA, 58 bp, Artificial
  Synthetic oligonucleotide
gagtcacttgattacgcactcgggaggtattacgacatacgattacagctctttggtg

SEQ ID NO: 400830 - DNA, 60 bp, Artificial
  Synthetic oligonucleotide
gagtcagaccgttgatgagagttaacgagatcagaaaacagcacagtgtaatgctcgtcc

SEQ ID NO: 400831 - DNA, 60 bp, Artificial
  Synthetic oligonucleotide
gagtcagagggaaagcagctatgaacctagatcacttgttggtctacaacccagagcaag

SEQ ID NO: 400832 - DNA, 60 bp, Artificial
  Synthetic oligonucleotide
gagtcagagtgtgtttgcatcaatgggacttgtacagtggtaatgactgatggaagtgca

SEQ ID NO: 400833 - DNA, 55 bp, Artificial
  Synthetic oligonucleotide
gagtcagatggatggcttaagaaatttactgagatgtgcaacgcagccagaggac

SEQ ID NO: 400834 - DNA, 58 bp, Artificial
  Synthetic oligonucleotide
gagtcagccatcaatgggaacttctgtatactttggtacacagagtggatccctggtt

SEQ ID NO: 400835 - DNA, 51 bp, Artificial
  Synthetic oligonucleotide
gagtcagctttgcttcagtcatgtattcatgggtcaagaacttctgcgata

SEQ ID NO: 400836 - DNA, 56 bp, Artificial
  Synthetic oligonucleotide
gagtcaggacagccacaaaacaaacttggaaattccatgtatttcccaactataag

SEQ ID NO: 400837 - DNA, 59 bp, Artificial
  Synthetic oligonucleotide
gagtcagggaggcccagagggtcttagagtttcacaacatttgggcctctgaagatcaa

SEQ ID NO: 400838 - DNA, 55 bp, Artificial
  Synthetic oligonucleotide
gagtcagggccatcgaggacgggattaattatgcaacagggaacctgcccggttg

SEQ ID NO: 400839 - DNA, 60 bp, Artificial
  Synthetic oligonucleotide
gagtcagtacaacaggacaactttgctaactaatatgaaggaggacatttacttggctga

SEQ ID NO: 400840 - DNA, 55 bp, Artificial
  Synthetic oligonucleotide
gagtcagtacatgcaatctgatgtgattttggatttcactcttatgagcagtcct

SEQ ID NO: 400841 - DNA, 60 bp, Artificial
  Synthetic oligonucleotide
gagtcagtgagctgagtagcccttatcgtgcagcagatgttggtatgaggagagtacaca

SEQ ID NO: 400842 - DNA, 55 bp, Artificial
  Synthetic oligonucleotide
gagtcagttattggaagagaagtccctctttatttatactgtaggacaactgccc

SEQ ID NO: 400843 - DNA, 55 bp, Artificial
  Synthetic oligonucleotide
gagtcataagtacgttccccattcatttgggacaaggcacacatgtttagaagac

SEQ ID NO: 400844 - DNA, 58 bp, Artificial
  Synthetic oligonucleotide
gagtcatataaagggacatcaagtgtctaattgaccaccctttaatgcgttgttggtg

SEQ ID NO: 400845 - DNA, 60 bp, Artificial
  Synthetic oligonucleotide
gagtcatcagaaaaattcataccaatgcgaacctatagagtgatggataacgataccgca

SEQ ID NO: 400846 - DNA, 60 bp, Artificial
  Synthetic oligonucleotide
gagtcatcttggtgggaatcaaagccatgctgcccaactttagaggaatggaagggagag

SEQ ID NO: 400847 - DNA, 60 bp, Artificial
  Synthetic oligonucleotide
gagtcatgaaggggaggggataccgctgtatgatgcgatcaagtgtatgaaaacattttt

SEQ ID NO: 400848 - DNA, 60 bp, Artificial
  Synthetic oligonucleotide
gagtcatgagggggagggaataccgctatatgatgcgatcaaatgcatgaagacattttt

SEQ ID NO: 400849 - DNA, 60 bp, Artificial
  Synthetic oligonucleotide
gagtcatgcgaggcgtcgtgctgttgctagtaacacaaggatgtatcctagtgtcggtaa

SEQ ID NO: 400850 - DNA, 60 bp, Artificial
  Synthetic oligonucleotide
gagtcattgactatatgaaagggctgccccagagctatcagcatagggaaacttattttg

SEQ ID NO: 400851 - DNA, 60 bp, Artificial
  Synthetic oligonucleotide
gagtcatttgatcccgctgagtttgttatgtcagatgggtttgcagcctacactctgtcc

SEQ ID NO: 400852 - DNA, 60 bp, Artificial
  Synthetic oligonucleotide
gagtccaaatcttgaaacagaggaagcacttgtgtatctccagttgattcctgaggttgt

SEQ ID NO: 400853 - DNA, 59 bp, Artificial
  Synthetic oligonucleotide
gagtccacccttagatcccaccactcgttctgtggctgtggtgatcccgtgcttcattt

SEQ ID NO: 400854 - DNA, 60 bp, Artificial
  Synthetic oligonucleotide
gagtccacgtgcgtttgattcgtagattcgctctctgttcaacgctgtcgagtatctgcg

SEQ ID NO: 400855 - DNA, 55 bp, Artificial
  Synthetic oligonucleotide
gagtccactacttagaggctagtggttgttcgtacattgggtcaagactcagtct

SEQ ID NO: 400856 - DNA, 51 bp, Artificial
  Synthetic oligonucleotide
gagtccagacgaacccagaaatgaggatgtactgcgacatatgtaggctaa

SEQ ID NO: 400857 - DNA, 60 bp, Artificial
  Synthetic oligonucleotide
gagtccagactttgaagctcaggaagcacttgtgtatctgtagtgcttgcctgagattgt

SEQ ID NO: 400858 - DNA, 60 bp, Artificial
  Synthetic oligonucleotide
gagtccagggacagcccccgaaagcatcctatactcatttgacttcagacatggagacta

SEQ ID NO: 400859 - DNA, 55 bp, Artificial
  Synthetic oligonucleotide
gagtccataacaaattgagctaccagtgaagccttgaaggtgatttgtgtctagg

SEQ ID NO: 400860 - DNA, 58 bp, Artificial
  Synthetic oligonucleotide
gagtccatgcacggtcgtgggtctgtgatgtgcgtgtggggctctgcccactggtctt

SEQ ID NO: 400861 - DNA, 50 bp, Artificial
  Synthetic oligonucleotide
gagtccatggcgggcgagagagggccctgcggcgatcttgagttcgcagg

SEQ ID NO: 400862 - DNA, 55 bp, Artificial
  Synthetic oligonucleotide
gagtccattcgctggaccaaggaccccaggcacactgaagaccacgtgcgttcgc

SEQ ID NO: 400863 - DNA, 57 bp, Artificial
  Synthetic oligonucleotide
gagtccattcgttggactaaggacccacgtaatacacaagaccacgtgcggtcactg

SEQ ID NO: 400864 - DNA, 55 bp, Artificial
  Synthetic oligonucleotide
gagtccattctttatacaaaattttgttgcccatgatggatcaatgcatcctgtc

SEQ ID NO: 400865 - DNA, 56 bp, Artificial
  Synthetic oligonucleotide
gagtccattgttcgcgagatctacgtttattacggacgaactggggcagggaaatc

SEQ ID NO: 400866 - DNA, 59 bp, Artificial
  Synthetic oligonucleotide
gagtcccacatagacgttaaacgtgggattagtgccagaatcgtggactccatggcctc

SEQ ID NO: 400867 - DNA, 55 bp, Artificial
  Synthetic oligonucleotide
gagtcccacatcgacataaacttcgaacactaataggagacaggaatgactgttc

SEQ ID NO: 400868 - DNA, 56 bp, Artificial
  Synthetic oligonucleotide
gagtcccacccagggatcttcgaaaattcgtgtcttgaaacgatggaagttgttca

SEQ ID NO: 400869 - DNA, 60 bp, Artificial
  Synthetic oligonucleotide
gagtcccactacgtcacgttttggagagcaacaatgtggatccgagcgatgacttgtacg

SEQ ID NO: 400870 - DNA, 56 bp, Artificial
  Synthetic oligonucleotide
gagtccccagctattttagacattgacctaactgactttgggcctcgaacacgtgg

SEQ ID NO: 400871 - DNA, 58 bp, Artificial
  Synthetic oligonucleotide
gagtcccccaccatgccaaactaccactggtgggtggagcatttgaacctgatggtag

SEQ ID NO: 400872 - DNA, 55 bp, Artificial
  Synthetic oligonucleotide
gagtcccgagtgaggcttatcccggggagattcggcctagtcccgaaatgtctgg

SEQ ID NO: 400873 - DNA, 52 bp, Artificial
  Synthetic oligonucleotide
gagtccctgacctaaaaggcgggtttacgcaaggaaacaataccttggacgc

SEQ ID NO: 400874 - DNA, 53 bp, Artificial
  Synthetic oligonucleotide
gagtcccttctgggtcttccggagcctcctttcgagatcatcccggttttttc

SEQ ID NO: 400875 - DNA, 56 bp, Artificial
  Synthetic oligonucleotide
gagtcccttgacttagaggcccaaaatctagttcaaaagcagggtattgtacctga

SEQ ID NO: 400876 - DNA, 57 bp, Artificial
  Synthetic oligonucleotide
gagtccgacccagctgcgcatgggggccaagtttaccggcacccttgagtatgaggt

SEQ ID NO: 400877 - DNA, 52 bp, Artificial
  Synthetic oligonucleotide
gagtccgaccctccccactttagcgcccagtttttgccttcttccccgcctg

SEQ ID NO: 400878 - DNA, 60 bp, Artificial
  Synthetic oligonucleotide
gagtccggtattcaggagattgaagagctgatttatgtcagatgaactaattcacgtagt

SEQ ID NO: 400879 - DNA, 52 bp, Artificial
  Synthetic oligonucleotide
gagtccgtatggcgctcgtggaacaccatatgtgaatcgtaagacctctggt

SEQ ID NO: 400880 - DNA, 60 bp, Artificial
  Synthetic oligonucleotide
gagtccgttgaaatcgaaccgaatggttgcaatcatgcgtggattcaaagagtgcaccat

SEQ ID NO: 400881 - DNA, 55 bp, Artificial
  Synthetic oligonucleotide
gagtcctaaatctagttgctcgaaaattatcactactggcaatcatctgggccaa

SEQ ID NO: 400882 - DNA, 56 bp, Artificial
  Synthetic oligonucleotide
gagtcctaagctagagcaatgttctttgcagagacaggttaataagaaagctagaa

SEQ ID NO: 400883 - DNA, 55 bp, Artificial
  Synthetic oligonucleotide
gagtcctccactgagatacccattacactaaccatagctccaatgtgctgcgagt

SEQ ID NO: 400884 - DNA, 58 bp, Artificial
  Synthetic oligonucleotide
gagtcctcctaccgagattgtcctgaattctacttacggatcgctcaaaggtggacca

SEQ ID NO: 400885 - DNA, 55 bp, Artificial
  Synthetic oligonucleotide
gagtcctcctggtgggacattctcaaagcactcttcagcacactggtggtggcgt

SEQ ID NO: 400886 - DNA, 55 bp, Artificial
  Synthetic oligonucleotide
gagtcctctggtgaacattagagtcgcaaactttgtaatatagtttccatgggat

SEQ ID NO: 400887 - DNA, 60 bp, Artificial
  Synthetic oligonucleotide
gagtcctgattgaaggaaaatgttttgtcccagatcagagtgtggttagtattatcaagc

SEQ ID NO: 400888 - DNA, 60 bp, Artificial
  Synthetic oligonucleotide
gagtcctgcagaaggcataatacatctgagggcatcatcgtttccataaatagtgttact

SEQ ID NO: 400889 - DNA, 55 bp, Artificial
  Synthetic oligonucleotide
gagtcctgcattccacaacatctatcagcgagtactagacaacactgcaccatca

SEQ ID NO: 400890 - DNA, 52 bp, Artificial
  Synthetic oligonucleotide
gagtcctggaagaactctgctttcgcagcctgccgaggctgcaagacctacc

SEQ ID NO: 400891 - DNA, 60 bp, Artificial
  Synthetic oligonucleotide
gagtcctgtcctgatgtcgaacgttcagttattcttgatgctagttctggtgatgtgaaa

SEQ ID NO: 400892 - DNA, 55 bp, Artificial
  Synthetic oligonucleotide
gagtccttaccaattgtcctattatcccttatttccaaggcagttgtgctcatct

SEQ ID NO: 400893 - DNA, 55 bp, Artificial
  Synthetic oligonucleotide
gagtccttcgaccccgctgagttcattatgtccgacgggtttgcggcctataccc

SEQ ID NO: 400894 - DNA, 58 bp, Artificial
  Synthetic oligonucleotide
gagtccttcgaccccgctgagtttatcatgtccgacgggtttgcagcctacaccctga

SEQ ID NO: 400895 - DNA, 55 bp, Artificial
  Synthetic oligonucleotide
gagtcctttcgtacattgcgtttgatgaccgagtctagatcaaacaggtcagaac

SEQ ID NO: 400896 - DNA, 53 bp, Artificial
  Synthetic oligonucleotide
gagtcgaaccaaacatctcaggggtcatgttctcaacaatgtgctggaacaca

SEQ ID NO: 400897 - DNA, 58 bp, Artificial
  Synthetic oligonucleotide
gagtcgaacccctttgtggtgccttcagagctggcgaaaacaggaatcggtccgtgca

SEQ ID NO: 400898 - DNA, 60 bp, Artificial
  Synthetic oligonucleotide
gagtcgaatacactgtcccacgtgtaaactcaccagctgcttcatgtgtgcccctatcta

SEQ ID NO: 400899 - DNA, 56 bp, Artificial
  Synthetic oligonucleotide
gagtcgaccgccgtaaaaggccgcgtcttctcggatgaaactgtgaaagaactaga

SEQ ID NO: 400900 - DNA, 58 bp, Artificial
  Synthetic oligonucleotide
gagtcgacgatttctaagatgtttacatcgtatgtaagtagagcaagattgaaagaag

SEQ ID NO: 400901 - DNA, 55 bp, Artificial
  Synthetic oligonucleotide
gagtcgacgcatcctatactgcattacacacaaagagtgtagcattgagcaacgc

SEQ ID NO: 400902 - DNA, 60 bp, Artificial
  Synthetic oligonucleotide
gagtcgagagctgcggcactttttgccgaactgccattggagtaccctcagggtgctcct

SEQ ID NO: 400903 - DNA, 60 bp, Artificial
  Synthetic oligonucleotide
gagtcgagctcagtccctaaatgctcaattggaagcggatgtcaaatcggctcaatcatg

SEQ ID NO: 400904 - DNA, 53 bp, Artificial
  Synthetic oligonucleotide
gagtcgaggcgcatctacaagtgtgggtcccccctcttaacgttcggggggcc

SEQ ID NO: 400905 - DNA, 57 bp, Artificial
  Synthetic oligonucleotide
gagtcgagtacaagctcccctgtcaagttcgtggtgctacctacgatacggtcactt

SEQ ID NO: 400906 - DNA, 55 bp, Artificial
  Synthetic oligonucleotide
gagtcgatttcgttatcagctaagtggcgtagcgtatcggcaacaagccggccgt

SEQ ID NO: 400907 - DNA, 60 bp, Artificial
  Synthetic oligonucleotide
gagtcgatttgaaacgtgccccagtcaagtatgtctccgtccttctcgatgtatgcctta

SEQ ID NO: 400908 - DNA, 55 bp, Artificial
  Synthetic oligonucleotide
gagtcgcagcatgagcccgatttcgtccaaacccacgcccgttcttgacgggtcc

SEQ ID NO: 400909 - DNA, 60 bp, Artificial
  Synthetic oligonucleotide
gagtcgcgttggctggatggctttataatggggttgtgacgacggtgattgatgatagtt

SEQ ID NO: 400910 - DNA, 60 bp, Artificial
  Synthetic oligonucleotide
gagtcgcttttgaaggaaactgcaatatgatttccgtaaggtcgtgagatagctgatatt

SEQ ID NO: 400911 - DNA, 54 bp, Artificial
  Synthetic oligonucleotide
gagtcggaaacaaactcaatcagccgtattcacgtacttaagcggacaggatga

SEQ ID NO: 400912 - DNA, 60 bp, Artificial
  Synthetic oligonucleotide
gagtcggaagacacaagccaggtcacgcactgcggataggtcatacggagaaggggttga

SEQ ID NO: 400913 - DNA, 60 bp, Artificial
  Synthetic oligonucleotide
gagtcggacggcacaaaccaggtcacgctctgcgaataggtcacacagagaaggggttga

SEQ ID NO: 400914 - DNA, 54 bp, Artificial
  Synthetic oligonucleotide
gagtcggatcgggcacgatctttatcgatcccgtgagaggaagtcgacgttagg

SEQ ID NO: 400915 - DNA, 53 bp, Artificial
  Synthetic oligonucleotide
gagtcggtatggaggtaagtacgacctccatctaacccagcaggaacaagctc

SEQ ID NO: 400916 - DNA, 51 bp, Artificial
  Synthetic oligonucleotide
gagtcggtttgaccagcatgtttccgaggatgctttgcggtttgaacatag

SEQ ID NO: 400917 - DNA, 53 bp, Artificial
  Synthetic oligonucleotide
gagtcgtaacaacgggcatgaagaggtcgtgagtcattagcaatgggtattcg

SEQ ID NO: 400918 - DNA, 60 bp, Artificial
  Synthetic oligonucleotide
gagtcgtcgatgtcaattgctcttgggccggtgtatctcatgcttgtagagcgcccaatt

SEQ ID NO: 400919 - DNA, 59 bp, Artificial
  Synthetic oligonucleotide
gagtcgtcgcaatacggtacaggcaattctgaaatggatctttccgttagcctggctaa

SEQ ID NO: 400920 - DNA, 54 bp, Artificial
  Synthetic oligonucleotide
gagtcgtcggggatataacttatccccttctcgttaggaaggcctcccgatgta

SEQ ID NO: 400921 - DNA, 55 bp, Artificial
  Synthetic oligonucleotide
gagtcgtggaagaggccagattaccaaccggccactgttgcgggctgtgctctcc

SEQ ID NO: 400922 - DNA, 60 bp, Artificial
  Synthetic oligonucleotide
gagtcgttatcttcttccagtggtcgtgtagatggatcgagtcgcatagactgtgatctc

SEQ ID NO: 400923 - DNA, 55 bp, Artificial
  Synthetic oligonucleotide
gagtcgttgagggttacgaggggcaggcggactcttggaagcaaacggtcgagcc

SEQ ID NO: 400924 - DNA, 50 bp, Artificial
  Synthetic oligonucleotide
gagtcgttggtgggccaagactccattctagagaaatcactaaaggccct

SEQ ID NO: 400925 - DNA, 60 bp, Artificial
  Synthetic oligonucleotide
gagtcgtttgcggattgttgtcctcctcttgcagatctaccgtcgatctggaattggccc

SEQ ID NO: 400926 - DNA, 53 bp, Artificial
  Synthetic oligonucleotide
gagtcgtttgtaaatagtaagagtcgtttgtaaatagtaagagtcgttagtaa

SEQ ID NO: 400927 - DNA, 56 bp, Artificial
  Synthetic oligonucleotide
gagtctaatggagttgaccctaatgctaaacaagggtcttcttactatggtcctgg

SEQ ID NO: 400928 - DNA, 54 bp, Artificial
  Synthetic oligonucleotide
gagtctaatggtgacctggttgccgctactggtaaccttactcctatggacgaa

SEQ ID NO: 400929 - DNA, 55 bp, Artificial
  Synthetic oligonucleotide
gagtctaccattcgtaatcctccagttactatttatatttctggagatacgggtg

SEQ ID NO: 400930 - DNA, 57 bp, Artificial
  Synthetic oligonucleotide
gagtctacgtaggccagttcagcacctagttcacggtcataatctacagacgcatcg

SEQ ID NO: 400931 - DNA, 55 bp, Artificial
  Synthetic oligonucleotide
gagtctactcagcagatggccagttcgattattaacacttcttttgaagccgcag

SEQ ID NO: 400932 - DNA, 60 bp, Artificial
  Synthetic oligonucleotide
gagtctactcctcgctacaaccaggagagccgccaatcgtcttacactgcttcgaagacc

SEQ ID NO: 400933 - DNA, 60 bp, Artificial
  Synthetic oligonucleotide
gagtctactgagtctgccctgcaagctcatttcaaagtgtgtaaacttacaacaaggttc

SEQ ID NO: 400934 - DNA, 55 bp, Artificial
  Synthetic oligonucleotide
gagtctagacgagcaggatcaactctttgagagtacaaagaagaatgtcctgcct

SEQ ID NO: 400935 - DNA, 55 bp, Artificial
  Synthetic oligonucleotide
gagtctaggcatattttggcgtcgttttgtatcggtgtctctccatttaactcta

SEQ ID NO: 400936 - DNA, 60 bp, Artificial
  Synthetic oligonucleotide
gagtctataagatcccgcgtgataatcaatggtgttactgctaggtctgaatgggatgta

SEQ ID NO: 400937 - DNA, 55 bp, Artificial
  Synthetic oligonucleotide
gagtctatcatctataggttcaacgttgacgtctgcaggtatggtgggtggtcca

SEQ ID NO: 400938 - DNA, 55 bp, Artificial
  Synthetic oligonucleotide
gagtctatcgcagcccgtgggacaagaacctttatcggctgaaaacgaaagtagc

SEQ ID NO: 400939 - DNA, 59 bp, Artificial
  Synthetic oligonucleotide
gagtctatgacgtcgacctaccgggactcgcgttgcgtgtgctcgcggacaacgaatgg

SEQ ID NO: 400940 - DNA, 52 bp, Artificial
  Synthetic oligonucleotide
gagtctatgactatagattggaatctggatcatatgatgccaacaacgacag

SEQ ID NO: 400941 - DNA, 58 bp, Artificial
  Synthetic oligonucleotide
gagtctcaaatgttggattgaatgtgtctctacatctaaaggaaaagggacccaaaca

SEQ ID NO: 400942 - DNA, 55 bp, Artificial
  Synthetic oligonucleotide
gagtctcaggttggtagattgccagttctacgggttcattaggtggtccttcaat

SEQ ID NO: 400943 - DNA, 55 bp, Artificial
  Synthetic oligonucleotide
gagtctcatatataggtatcccttaagccccctctcgggtcctcagtataatatt

SEQ ID NO: 400944 - DNA, 54 bp, Artificial
  Synthetic oligonucleotide
gagtctcatggatggtcagaatcctaatcgggctcttagtgttgtggattggca

SEQ ID NO: 400945 - DNA, 60 bp, Artificial
  Synthetic oligonucleotide
gagtctcccttggggataatccgtttgcccacatgatagcttgccatggactccatcatg

SEQ ID NO: 400946 - DNA, 60 bp, Artificial
  Synthetic oligonucleotide
gagtctcctgagcatgtttcagctcaccacactgcactcaggcaagcaatactatgctgg

SEQ ID NO: 400947 - DNA, 58 bp, Artificial
  Synthetic oligonucleotide
gagtctcctgggtccaatatcgttgtgcctaacctattcagttcgcgataggggtgta

SEQ ID NO: 400948 - DNA, 55 bp, Artificial
  Synthetic oligonucleotide
gagtctcgaagaagatggcgttagaactcaaagcagggatgacgcatggctagag

SEQ ID NO: 400949 - DNA, 55 bp, Artificial
  Synthetic oligonucleotide
gagtctcgagatcaattcgctaaggagtgcaaacttggtttgtacacaaacttac

SEQ ID NO: 400950 - DNA, 60 bp, Artificial
  Synthetic oligonucleotide
gagtctcgagttttgataaacgcagagaagaagcacgcaagagtgttggaatgcgaactg

SEQ ID NO: 400951 - DNA, 51 bp, Artificial
  Synthetic oligonucleotide
gagtctcgcacctgctcgctgaccgatcccgaccccaaagggcggcctttc

SEQ ID NO: 400952 - DNA, 55 bp, Artificial
  Synthetic oligonucleotide
gagtctgaatagaaggtctctaaatttgaagtttacccattctggcatgaaactg

SEQ ID NO: 400953 - DNA, 55 bp, Artificial
  Synthetic oligonucleotide
gagtctgaatgtgcgtgtgtaaatggctcttgctttaccgtaatgactgatggac

SEQ ID NO: 400954 - DNA, 55 bp, Artificial
  Synthetic oligonucleotide
gagtctgagagcaaagtcatcgtgcttgactcatttgatcccatcgccccggagt

SEQ ID NO: 400955 - DNA, 55 bp, Artificial
  Synthetic oligonucleotide
gagtctgcgccacggcatcaggttcagaacgtggcgccaaaggaggagtcacgct

SEQ ID NO: 400956 - DNA, 59 bp, Artificial
  Synthetic oligonucleotide
gagtctggacattcctcaccggtgacggtggtctaggctgcgttggcggcctacctatg

SEQ ID NO: 400957 - DNA, 60 bp, Artificial
  Synthetic oligonucleotide
gagtctgggtctaaattatcatccgcccaacactgattacaattcccgtcacatacatgc

SEQ ID NO: 400958 - DNA, 60 bp, Artificial
  Synthetic oligonucleotide
gagtctgggtctaatgcatctgcaaaacactggttacaatccccgttacaaatatgcatc

SEQ ID NO: 400959 - DNA, 56 bp, Artificial
  Synthetic oligonucleotide
gagtctggtcaagatgacctagaaactcaaatattgcattggaaatatttaagaga

SEQ ID NO: 400960 - DNA, 58 bp, Artificial
  Synthetic oligonucleotide
gagtctgtcaaaaatggtacctatgactatcccaaataccaggatgagagtaaattaa

SEQ ID NO: 400961 - DNA, 55 bp, Artificial
  Synthetic oligonucleotide
gagtctgtcaagaatggtacttataactatcccaaataccaaggtgaaagcagat

SEQ ID NO: 400962 - DNA, 55 bp, Artificial
  Synthetic oligonucleotide
gagtctgtggacactgacctatcagtgtataaagatataggtttaaaagtcgagg

SEQ ID NO: 400963 - DNA, 49 bp, Artificial
  Synthetic oligonucleotide
gagtctgtttatttaagtctcacccccgagggagggggccccccaaggg

SEQ ID NO: 400964 - DNA, 60 bp, Artificial
  Synthetic oligonucleotide
gagtcttaatggccttacaagatagtcccaacaaggtcaacatagtcactgattcacaat

SEQ ID NO: 400965 - DNA, 55 bp, Artificial
  Synthetic oligonucleotide
gagtcttaccaggcggtgtgtcgtccctgtctcacggggttcaggatggcccagt

SEQ ID NO: 400966 - DNA, 55 bp, Artificial
  Synthetic oligonucleotide
gagtcttagaaataggacaaaccccaattccatttatgtcaaaggaattctcaaa

SEQ ID NO: 400967 - DNA, 55 bp, Artificial
  Synthetic oligonucleotide
gagtcttagctcctcactatacaaacatagaaacatgagagtatcatacaagacc

SEQ ID NO: 400968 - DNA, 60 bp, Artificial
  Synthetic oligonucleotide
gagtcttagctgttcagcagctggataatgttgggaccagaggcgctcgtactattcaac

SEQ ID NO: 400969 - DNA, 60 bp, Artificial
  Synthetic oligonucleotide
gagtcttccgtgccattttggtatgacatatcggatgacgaagctcatgaatcaatgctg

SEQ ID NO: 400970 - DNA, 60 bp, Artificial
  Synthetic oligonucleotide
gagtcttcgcctgcaagtgggttgagttgacctatcaagatccactcacacgccatctag

SEQ ID NO: 400971 - DNA, 55 bp, Artificial
  Synthetic oligonucleotide
gagtcttctgacacttatgaggttacttgggattcagcgaaattcggcggtgtcg

SEQ ID NO: 400972 - DNA, 54 bp, Artificial
  Synthetic oligonucleotide
gagtcttgcgtcttagtgtgcctatggacaaatctggatctcccaatgctggta

SEQ ID NO: 400973 - DNA, 57 bp, Artificial
  Synthetic oligonucleotide
gagtcttggaccgtggcatcccaaatcgatggcattgcgcaagtggctgaagtgacc

SEQ ID NO: 400974 - DNA, 55 bp, Artificial
  Synthetic oligonucleotide
gagtcttggctcctctatatactcacatagaaacatgagagtatcaaacaagccc

SEQ ID NO: 400975 - DNA, 56 bp, Artificial
  Synthetic oligonucleotide
gagtcttggctgtggaaagatacctaaagaatcaacagctcctagggatttggggt

SEQ ID NO: 400976 - DNA, 55 bp, Artificial
  Synthetic oligonucleotide
gagtctttccctaggtcacctgcatctcgacggtactcctctttgtaggaggaag

SEQ ID NO: 400977 - DNA, 55 bp, Artificial
  Synthetic oligonucleotide
gagtcttttatagatcgtgagaagaagggacgcgctcaatcctgagtcgagagtg

SEQ ID NO: 400978 - DNA, 55 bp, Artificial
  Synthetic oligonucleotide
gagtgaaaccaccgaagtctaggggcaattcgggctgagttagtctagcggaccg

SEQ ID NO: 400979 - DNA, 54 bp, Artificial
  Synthetic oligonucleotide
gagtgaaactggacatcccagatgaaacgcgaattgcatttcatatcaaagaca

SEQ ID NO: 400980 - DNA, 60 bp, Artificial
  Synthetic oligonucleotide
gagtgaaagggcgcaattcgaacgaattaagcgccagcaaggtgccacacgagcttcaga

SEQ ID NO: 400981 - DNA, 60 bp, Artificial
  Synthetic oligonucleotide
gagtgaaatttttgaatctattagatggacaaagaaaccttctcagatgcaggagcatgt

SEQ ID NO: 400982 - DNA, 55 bp, Artificial
  Synthetic oligonucleotide
gagtgaacacacaggaagggagatagtcgatctcatgtgccacgccactttcacc

SEQ ID NO: 400983 - DNA, 60 bp, Artificial
  Synthetic oligonucleotide
gagtgaacagcatcctacatatgattacattattcctaaaggtcgtgataatcttcttat

SEQ ID NO: 400984 - DNA, 54 bp, Artificial
  Synthetic oligonucleotide
gagtgaacagccccaaaactttcagtattggaactcaagaaggaaaactagtaa

SEQ ID NO: 400985 - DNA, 60 bp, Artificial
  Synthetic oligonucleotide
gagtgaacaggcagcagaagctatggaggttgctagtcaggctaggcagatggtgcaggc

SEQ ID NO: 400986 - DNA, 60 bp, Artificial
  Synthetic oligonucleotide
gagtgaaccgctggatggcagacttgctgtgagactagaggctatgaaagaatataaacg

SEQ ID NO: 400987 - DNA, 55 bp, Artificial
  Synthetic oligonucleotide
gagtgaagagtctcaaactggcagtgggcctaaggaatgtgcctgctacatcagg

SEQ ID NO: 400988 - DNA, 51 bp, Artificial
  Synthetic oligonucleotide
gagtgaagatatcaaatcatcgagatgtactgagtgcctcaccaacataaa

SEQ ID NO: 400989 - DNA, 55 bp, Artificial
  Synthetic oligonucleotide
gagtgaagctgtcagacattttcctagggtatggctacgtggcttaggacagcat

SEQ ID NO: 400990 - DNA, 60 bp, Artificial
  Synthetic oligonucleotide
gagtgaagctgttagacatttccctaggatatggcttcatagcttaggacaacatatcta

SEQ ID NO: 400991 - DNA, 59 bp, Artificial
  Synthetic oligonucleotide
gagtgaaggatgctgagtgtggaattccttctaaagctcctaaggttggaggagaaaca

SEQ ID NO: 400992 - DNA, 55 bp, Artificial
  Synthetic oligonucleotide
gagtgaagtacaaaacacaaaactactagatcacacaggtgctaatgcaactgcc

SEQ ID NO: 400993 - DNA, 55 bp, Artificial
  Synthetic oligonucleotide
gagtgaagtatgtgctcaatgaaaccaccaactggttgtgggcgttcctggcacg

SEQ ID NO: 400994 - DNA, 55 bp, Artificial
  Synthetic oligonucleotide
gagtgaatagccaggaggtgccagctctaactgctgtggaaacaggagcatctgg

SEQ ID NO: 400995 - DNA, 55 bp, Artificial
  Synthetic oligonucleotide
gagtgaatattaccccaaaaggtaccagtcgcatgtgctgctagccgcgggcttc

SEQ ID NO: 400996 - DNA, 60 bp, Artificial
  Synthetic oligonucleotide
gagtgacaactgaggtaaccaggttggatagtctgatcaacagtggtcataattcaattg

SEQ ID NO: 400997 - DNA, 60 bp, Artificial
  Synthetic oligonucleotide
gagtgacacctatagtgtcacgctcttgttcaatgcttctggcagtacaaatgacctcat

SEQ ID NO: 400998 - DNA, 55 bp, Artificial
  Synthetic oligonucleotide
gagtgaccacttgttgtccgaaatgttgaacaaagagtattttgacagacaaggg

SEQ ID NO: 400999 - DNA, 58 bp, Artificial
  Synthetic oligonucleotide
gagtgacctggcatcgctcctagcctccgtccctgtaatggaaggcggcctctcgacc

SEQ ID NO: 401000 - DNA, 55 bp, Artificial
  Synthetic oligonucleotide
gagtgacgccgtaacccgaacactcgtgattgttgacgtcgaaaacgtatttggc

SEQ ID NO: 401001 - DNA, 55 bp, Artificial
  Synthetic oligonucleotide
gagtgacgctcagtgcgtaatcgtatcacagtattaagtatgtccagtcgttggg

SEQ ID NO: 401002 - DNA, 51 bp, Artificial
  Synthetic oligonucleotide
gagtgacggcccatggagacacaccacagctggacttgaaggcaaggccta

SEQ ID NO: 401003 - DNA, 55 bp, Artificial
  Synthetic oligonucleotide
gagtgacggcgtggggaggtactaacgagggtatttgtgtctgtggtctactacc

SEQ ID NO: 401004 - DNA, 55 bp, Artificial
  Synthetic oligonucleotide
gagtgacggtgcaagttcatcaagccccaaagggagatccatcgcctttggcacg

SEQ ID NO: 401005 - DNA, 55 bp, Artificial
  Synthetic oligonucleotide
gagtgacgtattcaatagtccacaggcgcgaagcaagatatcagcagcgttcggc

SEQ ID NO: 401006 - DNA, 57 bp, Artificial
  Synthetic oligonucleotide
gagtgacgtcggaaagaaaaatagatgaagtatcacttctgggctaaatttgttgtg

SEQ ID NO: 401007 - DNA, 55 bp, Artificial
  Synthetic oligonucleotide
gagtgacgtttgattttatctgtcgtccgtaatatctggatacggtgtgttcggg

SEQ ID NO: 401008 - DNA, 55 bp, Artificial
  Synthetic oligonucleotide
gagtgacttgaatattgaatcttgctcaactagatgccagtcagagattggaggg

SEQ ID NO: 401009 - DNA, 60 bp, Artificial
  Synthetic oligonucleotide
gagtgacttgagcattttagacgcatcatgcccgtcaacactatgcacacactgctagtg

SEQ ID NO: 401010 - DNA, 54 bp, Artificial
  Synthetic oligonucleotide
gagtgacttgtcgagcgagactgtgatagtggaaagtggttgtcccactgcaac

SEQ ID NO: 401011 - DNA, 60 bp, Artificial
  Synthetic oligonucleotide
gagtgagaaggataatttcgcctggttttgctaccatgtgtcggctagcgccaaggaaca

SEQ ID NO: 401012 - DNA, 60 bp, Artificial
  Synthetic oligonucleotide
gagtgagaataatgtacttaacagacgatgatcctgatcccgatttcgtacctgctatcc

SEQ ID NO: 401013 - DNA, 60 bp, Artificial
  Synthetic oligonucleotide
gagtgagataggtgcggcgacgattgatggattagtgcagggaagcgttcactcgataat

SEQ ID NO: 401014 - DNA, 60 bp, Artificial
  Synthetic oligonucleotide
gagtgagcaataataatggcaatacatcacacacaaagcccaaaaccacacagacaaagt

SEQ ID NO: 401015 - DNA, 60 bp, Artificial
  Synthetic oligonucleotide
gagtgagcctatggaatctaattggacatgtgtgggtaaataccagcagagttatgactt

SEQ ID NO: 401016 - DNA, 55 bp, Artificial
  Synthetic oligonucleotide
gagtgagcctcaaccatactcacaaacttacggcaaggcaccgatctgggaatct

SEQ ID NO: 401017 - DNA, 55 bp, Artificial
  Synthetic oligonucleotide
gagtgagcctcctcacgagtgtaaccccgatgatggtgggtctgtcaaggacagt

SEQ ID NO: 401018 - DNA, 58 bp, Artificial
  Synthetic oligonucleotide
gagtgagcctttctatgcaagtcccacgctccgtatgagaggtacaacaagctacgga

SEQ ID NO: 401019 - DNA, 55 bp, Artificial
  Synthetic oligonucleotide
gagtgagctgatgtgatcactgaggcatgtgccgatgcttcggtggtgggtgacg

SEQ ID NO: 401020 - DNA, 60 bp, Artificial
  Synthetic oligonucleotide
gagtgaggctaatctaccgatgcagtatcaaaaattcatgccaaccctgcctaacaatgt

SEQ ID NO: 401021 - DNA, 55 bp, Artificial
  Synthetic oligonucleotide
gagtgaggctatcgacttgttgctaaacgaaaacctcggtattgctgaggggatt

SEQ ID NO: 401022 - DNA, 59 bp, Artificial
  Synthetic oligonucleotide
gagtgataaattaattgaagttgaaaaggtcgatcacccaactctgcaatttgtacata

SEQ ID NO: 401023 - DNA, 60 bp, Artificial
  Synthetic oligonucleotide
gagtgatacgggcactgcgattaatagaatgtgatgtagttggacgggaacatgagatta

SEQ ID NO: 401024 - DNA, 60 bp, Artificial
  Synthetic oligonucleotide
gagtgatcatttcatgaacaatacagaaccattgtgtgatgctaagggttttgcaccctt

SEQ ID NO: 401025 - DNA, 51 bp, Artificial
  Synthetic oligonucleotide
gagtgatcattttaacgattgtcttccttatatagacgaaatgcataatgc

SEQ ID NO: 401026 - DNA, 60 bp, Artificial
  Synthetic oligonucleotide
gagtgatcggtggtccgattatgaccgtgattgaattcgaggatatagcttggcacttag

SEQ ID NO: 401027 - DNA, 55 bp, Artificial
  Synthetic oligonucleotide
gagtgatggagaccaggaggaattgtcagcacttgtggaaatggggcaccatgct

SEQ ID NO: 401028 - DNA, 58 bp, Artificial
  Synthetic oligonucleotide
gagtgatgggcgtatactttcctgctcgtggctcaagttcctggacagtaaaccctgt

SEQ ID NO: 401029 - DNA, 60 bp, Artificial
  Synthetic oligonucleotide
gagtgatggtatcacctttggcagtaacatggtggaatagaaatggacccgtgacaagta

SEQ ID NO: 401030 - DNA, 60 bp, Artificial
  Synthetic oligonucleotide
gagtgatgttattgcgtcgcaatgtttccattacgttttcattatgttcaagtctatcta

SEQ ID NO: 401031 - DNA, 55 bp, Artificial
  Synthetic oligonucleotide
gagtgattatggtggatatttagaagtaggtacccgtttcatgggtgcacagccc

SEQ ID NO: 401032 - DNA, 59 bp, Artificial
  Synthetic oligonucleotide
gagtgattcaataacagttgaaccaatacttgatgggccttatcaaccaacaacattta

SEQ ID NO: 401033 - DNA, 60 bp, Artificial
  Synthetic oligonucleotide
gagtgattcaggaccgttgttatcagtgttcgcgttacaagagatcatgcagaaagtaag

SEQ ID NO: 401034 - DNA, 51 bp, Artificial
  Synthetic oligonucleotide
gagtgattgtgctaagcagagacacgtcggtcaacaccaacgatttgtcat

SEQ ID NO: 401035 - DNA, 55 bp, Artificial
  Synthetic oligonucleotide
gagtgcaaacttcgctgcgattggaagtcgtctaaacccgaataatgcgcttccg

SEQ ID NO: 401036 - DNA, 55 bp, Artificial
  Synthetic oligonucleotide
gagtgcaaatggtacctcttccaggaggaagtaggtgagaagtgtggtacaccac

SEQ ID NO: 401037 - DNA, 55 bp, Artificial
  Synthetic oligonucleotide
gagtgcaacagctagctaatagcttttaggctggcacagcaaggcgagaggcgct

SEQ ID NO: 401038 - DNA, 60 bp, Artificial
  Synthetic oligonucleotide
gagtgcaagtgttcgaccaacattaccaggatgtacagaaggagattaagcttcgagcgt

SEQ ID NO: 401039 - DNA, 58 bp, Artificial
  Synthetic oligonucleotide
gagtgcaagtgttcgaccaacattacggagtgggactaaaggagattaagcttcgagc

SEQ ID NO: 401040 - DNA, 58 bp, Artificial
  Synthetic oligonucleotide
gagtgcaccgtttcgctcgggatagctattgtgacccacttaggtgtgtacttatccg

SEQ ID NO: 401041 - DNA, 55 bp, Artificial
  Synthetic oligonucleotide
gagtgcacgactcactggtgattgacgaaggagttgcctacctgatggacactcc

SEQ ID NO: 401042 - DNA, 60 bp, Artificial
  Synthetic oligonucleotide
gagtgcacggcgaatagctggttcaggtgagcgtgtgatatgggggaacttggatcgacc

SEQ ID NO: 401043 - DNA, 55 bp, Artificial
  Synthetic oligonucleotide
gagtgcacgttttatgtgcttaaagaccgccaatagagtggacacaatagccatg

SEQ ID NO: 401044 - DNA, 59 bp, Artificial
  Synthetic oligonucleotide
gagtgcagacttccaataacataggaggagtgctgaacatcaccttagattcatcaggg

SEQ ID NO: 401045 - DNA, 55 bp, Artificial
  Synthetic oligonucleotide
gagtgcagagttaccacggatactagtcgatcatgctagtcaaacaatgcatgtg

SEQ ID NO: 401046 - DNA, 59 bp, Artificial
  Synthetic oligonucleotide
gagtgcagccgacccgctgaataacacttggtggacccagcaagattcaccgttctgtt

SEQ ID NO: 401047 - DNA, 54 bp, Artificial
  Synthetic oligonucleotide
gagtgcaggcaatgtgacgtgttggtaccaaacaggaatagtggtgccccctgg

SEQ ID NO: 401048 - DNA, 55 bp, Artificial
  Synthetic oligonucleotide
gagtgcaggcattgaaccaaactggttgatcatgagtgaggaatccttgacatcc

SEQ ID NO: 401049 - DNA, 60 bp, Artificial
  Synthetic oligonucleotide
gagtgcatcatgtggggaatgctggaggtagccgatgtaacacaattgcgcgtgggagca

SEQ ID NO: 401050 - DNA, 55 bp, Artificial
  Synthetic oligonucleotide
gagtgcatttgttgcaacagaaaacataataggagatataagacaagcacattgt

SEQ ID NO: 401051 - DNA, 60 bp, Artificial
  Synthetic oligonucleotide
gagtgccaaagcatcaacatcgtatagtcgagatgagccacctgaggacgaaggaaaccg

SEQ ID NO: 401052 - DNA, 55 bp, Artificial
  Synthetic oligonucleotide
gagtgccactcaactgactcgactaccatcttgggcatcggcacagtcctggacc

SEQ ID NO: 401053 - DNA, 54 bp, Artificial
  Synthetic oligonucleotide
gagtgccactcatcggtcgcgccgaggcaatcgttcggcggcgcaaagaccaag

SEQ ID NO: 401054 - DNA, 53 bp, Artificial
  Synthetic oligonucleotide
gagtgccactccacggactctacgaccatccttggtataggcaccgtcctaga

SEQ ID NO: 401055 - DNA, 54 bp, Artificial
  Synthetic oligonucleotide
gagtgccactctgtagatgccacgagtgtcttgggaataggcaccgtcttagac

SEQ ID NO: 401056 - DNA, 60 bp, Artificial
  Synthetic oligonucleotide
gagtgccagaatagtagcaactactgttgacagaaggatcgctgatgctacgctatggca

SEQ ID NO: 401057 - DNA, 60 bp, Artificial
  Synthetic oligonucleotide
gagtgccagggccttcagcgatagtgagggagtgacgaaggcatgcgacaattggtcatt

SEQ ID NO: 401058 - DNA, 50 bp, Artificial
  Synthetic oligonucleotide
gagtgccattcccaggacgctacaaccatcctgggtataggaactgtcct

SEQ ID NO: 401059 - DNA, 60 bp, Artificial
  Synthetic oligonucleotide
gagtgcccaaaagcaagggagcaaccgtgctaaacttagaacacttgcttgagtatgctc

SEQ ID NO: 401060 - DNA, 55 bp, Artificial
  Synthetic oligonucleotide
gagtgcccaacactcatggagaaattgagaccacaaggtgataggaagcgatatt

SEQ ID NO: 401061 - DNA, 55 bp, Artificial
  Synthetic oligonucleotide
gagtgcccactttgcaaagcgtttccggtcaacagctacatactgtcggcgagac

SEQ ID NO: 401062 - DNA, 52 bp, Artificial
  Synthetic oligonucleotide
gagtgcccagtataaaccaactaaatccaaatctaatccaatgtgtttatac

SEQ ID NO: 401063 - DNA, 55 bp, Artificial
  Synthetic oligonucleotide
gagtgcccatgtccacgaacgccaatctgctgggtgttcggaagttccttgcagg

SEQ ID NO: 401064 - DNA, 60 bp, Artificial
  Synthetic oligonucleotide
gagtgcccccattgccctcgccacaaacagaaggagatcatgggcccaaaggcccatcta

SEQ ID NO: 401065 - DNA, 55 bp, Artificial
  Synthetic oligonucleotide
gagtgcccccttcaaacgcttacaccaacaccgtgtttaggaacacgctcttaga

SEQ ID NO: 401066 - DNA, 60 bp, Artificial
  Synthetic oligonucleotide
gagtgcccctgtgcgtgaatccatgtcccgtgcagttcaggtgctgatatatcgtgcacc

SEQ ID NO: 401067 - DNA, 58 bp, Artificial
  Synthetic oligonucleotide
gagtgcccgttaataccaatagtaccagggacgaccaaattggctactatcgcagagc

SEQ ID NO: 401068 - DNA, 50 bp, Artificial
  Synthetic oligonucleotide
gagtgccgtaacgttactcaacttaacggggttcggtccaatttcgtacg

SEQ ID NO: 401069 - DNA, 60 bp, Artificial
  Synthetic oligonucleotide
gagtgccgtacttcgtacgcgctcaagggctcatccgtgtatgcatgttagtgcggaaag

SEQ ID NO: 401070 - DNA, 60 bp, Artificial
  Synthetic oligonucleotide
gagtgcctccatcctcgtgatgctctcttccaatgatgcactcagctcccagaagtgaaa

SEQ ID NO: 401071 - DNA, 55 bp, Artificial
  Synthetic oligonucleotide
gagtgcctctgtacatgctggaaaactctgaccacgaagtgctacgcaacgggag

SEQ ID NO: 401072 - DNA, 60 bp, Artificial
  Synthetic oligonucleotide
gagtgcctgtaggcacgtcaatcattttgttactggataatggtcgcgttcattatcagt

SEQ ID NO: 401073 - DNA, 60 bp, Artificial
  Synthetic oligonucleotide
gagtgcgagagagatagaagacagtgagatcgagagaggatctttagcctcctcttaaag

SEQ ID NO: 401074 - DNA, 60 bp, Artificial
  Synthetic oligonucleotide
gagtgcgcagtcacttgtaggtatgatagggctagtgacttaaacgtggtaacacaagct

SEQ ID NO: 401075 - DNA, 60 bp, Artificial
  Synthetic oligonucleotide
gagtgcgcgattacaatggcatctcaacaattgtctgtcaattaacgaacgattctgatg

SEQ ID NO: 401076 - DNA, 55 bp, Artificial
  Synthetic oligonucleotide
gagtgcgctactttcttgagcatgtacgcacgagacgcaagttttgtgccaccag

SEQ ID NO: 401077 - DNA, 59 bp, Artificial
  Synthetic oligonucleotide
gagtgcgctcaaactatctagtttatcgctcaactgcgcgtagctttgtgctgaaacat

SEQ ID NO: 401078 - DNA, 55 bp, Artificial
  Synthetic oligonucleotide
gagtgcggatggatgcaaaccaacaccaagactctaagatttgtggcacttgaag

SEQ ID NO: 401079 - DNA, 56 bp, Artificial
  Synthetic oligonucleotide
gagtgcggcgaaaaagttaacattctctctcctcttttaggacctaatgcattttc

SEQ ID NO: 401080 - DNA, 54 bp, Artificial
  Synthetic oligonucleotide
gagtgcgggagttgcttctgactcggcacccaaatggcgtgtggccaaaactgt

SEQ ID NO: 401081 - DNA, 55 bp, Artificial
  Synthetic oligonucleotide
gagtgcggtacttggtttaatacccgttcttggaatgataaggaaagacagccga

SEQ ID NO: 401082 - DNA, 55 bp, Artificial
  Synthetic oligonucleotide
gagtgcgtacttagggccaaagtgcaagatatacaccttcggagaaagcacgggg

SEQ ID NO: 401083 - DNA, 54 bp, Artificial
  Synthetic oligonucleotide
gagtgcgtgggtgggcgccgttccatacttcttacactgtgaggtgtaagtacc

SEQ ID NO: 401084 - DNA, 55 bp, Artificial
  Synthetic oligonucleotide
gagtgcgttatccgttgacctatggatggtgcttcaagctagtgccagtatcacc

SEQ ID NO: 401085 - DNA, 55 bp, Artificial
  Synthetic oligonucleotide
gagtgcgttgaagttgaatggagtgatgattccctgatgagtgtacgggattcgg

SEQ ID NO: 401086 - DNA, 60 bp, Artificial
  Synthetic oligonucleotide
gagtgctacgatgccggagcagcctggtacgagcttacgcctgctgagactacggtgaga

SEQ ID NO: 401087 - DNA, 55 bp, Artificial
  Synthetic oligonucleotide
gagtgctacgcgtacatatgcgtcggcctaaacagatcgtttgaggctttggtag

SEQ ID NO: 401088 - DNA, 55 bp, Artificial
  Synthetic oligonucleotide
gagtgctactcccacaaccattcagaacatacatcccagcccaacaaacaggtct

SEQ ID NO: 401089 - DNA, 55 bp, Artificial
  Synthetic oligonucleotide
gagtgctatttgtcgagtctggttccaaaaggtctagataagaaattagcggcga

SEQ ID NO: 401090 - DNA, 60 bp, Artificial
  Synthetic oligonucleotide
gagtgctcacccgctagctccgccgctggctcagtccgctgtattgcgactgacacaaac

SEQ ID NO: 401091 - DNA, 60 bp, Artificial
  Synthetic oligonucleotide
gagtgctcctgttatcctcgatatcctggtgtcagatgtgtctgcagagacaactggaaa

SEQ ID NO: 401092 - DNA, 55 bp, Artificial
  Synthetic oligonucleotide
gagtgctgatatgcactcactcttaggcatgaggggcacttaaaggtttgttggt

SEQ ID NO: 401093 - DNA, 60 bp, Artificial
  Synthetic oligonucleotide
gagtgctgtaacactcaatcccggcttagtttactccagtatactaacatatgccatgga

SEQ ID NO: 401094 - DNA, 55 bp, Artificial
  Synthetic oligonucleotide
gagtgctgttggtcagttggaatgacaaagttctatggtgggtggaataaattgc

SEQ ID NO: 401095 - DNA, 60 bp, Artificial
  Synthetic oligonucleotide
gagtgctttccattatataggcgtcatatatcgtgatatatgaacctaattcaattacgt

SEQ ID NO: 401096 - DNA, 51 bp, Artificial
  Synthetic oligonucleotide
gagtgctttttccggaagtacggctttattcggctcgtgataggacggaga

SEQ ID NO: 401097 - DNA, 55 bp, Artificial
  Synthetic oligonucleotide
gagtggaaagagtcacatcaagccgttatacgcaactttgttgagaggtacaagc

SEQ ID NO: 401098 - DNA, 60 bp, Artificial
  Synthetic oligonucleotide
gagtggaacatgaaggcacagtatggaggtaatggcacacttggtgaagcaatctaccag

SEQ ID NO: 401099 - DNA, 59 bp, Artificial
  Synthetic oligonucleotide
gagtggaaccaggccccagaggagtggacaatctcgagttcagtgaaatggacaatcgg

SEQ ID NO: 401100 - DNA, 60 bp, Artificial
  Synthetic oligonucleotide
gagtggaacccaggctatagcatgcctacactttacaaaatacagcgtatgtgtctcgaa

SEQ ID NO: 401101 - DNA, 60 bp, Artificial
  Synthetic oligonucleotide
gagtggaagaaggttccattgggaaagtctgcaggactctgctagcaaagtctgtattca

SEQ ID NO: 401102 - DNA, 55 bp, Artificial
  Synthetic oligonucleotide
gagtggaagcattcgggccagggctcacccctccacatggcggtattttggggtg

SEQ ID NO: 401103 - DNA, 55 bp, Artificial
  Synthetic oligonucleotide
gagtggaattttgctttatgtcatacaacaattgaaccaggatgaacactctcac

SEQ ID NO: 401104 - DNA, 60 bp, Artificial
  Synthetic oligonucleotide
gagtggacacgtcaacatcctgtgtatgactatattattcctagaaatagagataatttg

SEQ ID NO: 401105 - DNA, 55 bp, Artificial
  Synthetic oligonucleotide
gagtggacgctggggctgacgcgaatgacgtttcgtaccaagatcatgattatgt

SEQ ID NO: 401106 - DNA, 60 bp, Artificial
  Synthetic oligonucleotide
gagtggagaaaaaagagcgacacaactgacacaactaatgctgcagccacgacattcgaa

SEQ ID NO: 401107 - DNA, 60 bp, Artificial
  Synthetic oligonucleotide
gagtggaggaaataccaatcaacaaaaggcatccgcaggccagatcagtgtgcagcctac

SEQ ID NO: 401108 - DNA, 55 bp, Artificial
  Synthetic oligonucleotide
gagtggaggaacataaaatccttcctgacagatcagacttactcctatggtggct

SEQ ID NO: 401109 - DNA, 55 bp, Artificial
  Synthetic oligonucleotide
gagtggagtggggtttcaaacgatgaaactcttaaaagtgccgtaaccacagcta

SEQ ID NO: 401110 - DNA, 60 bp, Artificial
  Synthetic oligonucleotide
gagtggatctatactgctaacccaagggtagatgtaggggccatctatcgaagatggatc

SEQ ID NO: 401111 - DNA, 52 bp, Artificial
  Synthetic oligonucleotide
gagtggatgcttccacgtgtactgtccgaggtttggcaacgtttgttgtcct

SEQ ID NO: 401112 - DNA, 55 bp, Artificial
  Synthetic oligonucleotide
gagtggattaaagctggattgctgagcggttgccaaattagaacatcaaatacgg

SEQ ID NO: 401113 - DNA, 60 bp, Artificial
  Synthetic oligonucleotide
gagtggattgtgcctcccgaatgcaccatgcccatcaacattatgcatgcactattagtg

SEQ ID NO: 401114 - DNA, 55 bp, Artificial
  Synthetic oligonucleotide
gagtggcaatagcacttagtgtactgaacttattgataggaatctcaaacgtcgg

SEQ ID NO: 401115 - DNA, 60 bp, Artificial
  Synthetic oligonucleotide
gagtggcaattagtcaataaaggagtcgggtatgccagtgacggaatgatcaaatataag

SEQ ID NO: 401116 - DNA, 51 bp, Artificial
  Synthetic oligonucleotide
gagtggcagatactaccttgctccttcaccaccttaccggccctgtccact

SEQ ID NO: 401117 - DNA, 60 bp, Artificial
  Synthetic oligonucleotide
gagtggcatctatatcaaaccaggaccgatctactaccaggactatgcggggcccgtcta

SEQ ID NO: 401118 - DNA, 55 bp, Artificial
  Synthetic oligonucleotide
gagtggcattatatcagctattggtgtggcgttctcttttcttgcaagtcctatt

SEQ ID NO: 401119 - DNA, 50 bp, Artificial
  Synthetic oligonucleotide
gagtggcccgccgtgtcaaacgttccagttacttctagttacgcggagtt

SEQ ID NO: 401120 - DNA, 55 bp, Artificial
  Synthetic oligonucleotide
gagtggccgtcttatttgtcagacaaagaggctaacccggttgaccagccaacgg

SEQ ID NO: 401121 - DNA, 54 bp, Artificial
  Synthetic oligonucleotide
gagtggccttagttcgcaccaagtaccaagaagacaccccgtttgtcagcgaaa

SEQ ID NO: 401122 - DNA, 60 bp, Artificial
  Synthetic oligonucleotide
gagtggcgagcccgtagatgctgcatataagcagctgcttttcgcctgtactgggtctct

SEQ ID NO: 401123 - DNA, 55 bp, Artificial
  Synthetic oligonucleotide
gagtggcgctgtgtgactacagtctgtgtgaaccctaccccgcgttgaatcgacg

SEQ ID NO: 401124 - DNA, 55 bp, Artificial
  Synthetic oligonucleotide
gagtggctcagacgttgttacctacgaacgtcccaattggagaggtctcttgtcc

SEQ ID NO: 401125 - DNA, 55 bp, Artificial
  Synthetic oligonucleotide
gagtggctctaaacctcgatcacctaatcctatacacgccggagcagacggactt

SEQ ID NO: 401126 - DNA, 60 bp, Artificial
  Synthetic oligonucleotide
gagtggctggtgccatcagatctccctacagttgcccaaatagaagagtggtatgctaca

SEQ ID NO: 401127 - DNA, 60 bp, Artificial
  Synthetic oligonucleotide
gagtggcttgagcattttggattcagcatgcccgtcaacattatgtacacaccactagtg

SEQ ID NO: 401128 - DNA, 59 bp, Artificial
  Synthetic oligonucleotide
gagtgggaaacttagttttcaacacagtcatacatgagaaaataggagaccatcaaata

SEQ ID NO: 401129 - DNA, 55 bp, Artificial
  Synthetic oligonucleotide
gagtgggaaccccgcgttacggcattaaatcaagaactcacacaatgcgcgcgct

SEQ ID NO: 401130 - DNA, 59 bp, Artificial
  Synthetic oligonucleotide
gagtgggaagtccctgagcatgaggtgactgcgctcgttgtggacatgatgtctcggtt

SEQ ID NO: 401131 - DNA, 59 bp, Artificial
  Synthetic oligonucleotide
gagtgggacacttcctcttgtatccagaaggggctgtcgacatcacagaaaactgcgtt

SEQ ID NO: 401132 - DNA, 60 bp, Artificial
  Synthetic oligonucleotide
gagtgggacaggatgcatccacaacaggcagggcctatcccaccaggccagataagagaa

SEQ ID NO: 401133 - DNA, 59 bp, Artificial
  Synthetic oligonucleotide
gagtgggacgtgaggacactggttgaaccaggagtacaagcaggagtggcacagacgat

SEQ ID NO: 401134 - DNA, 55 bp, Artificial
  Synthetic oligonucleotide
gagtgggagcattcgggccagggttcactccacctcatggagggcttttggggtg

SEQ ID NO: 401135 - DNA, 55 bp, Artificial
  Synthetic oligonucleotide
gagtgggatccagacggtgtctaagaaccagacggacctagcagacattgtgaaa

SEQ ID NO: 401136 - DNA, 55 bp, Artificial
  Synthetic oligonucleotide
gagtgggatgattttggaagagggtgctcctgaaggaactgttgcatccatcctc

SEQ ID NO: 401137 - DNA, 58 bp, Artificial
  Synthetic oligonucleotide
gagtgggcctcagtccgtttctcttggctcagtttactagtgccatttgttcagtggt

SEQ ID NO: 401138 - DNA, 55 bp, Artificial
  Synthetic oligonucleotide
gagtgggctaagggatggaagcataacacagataacatagcatggggttctctta

SEQ ID NO: 401139 - DNA, 51 bp, Artificial
  Synthetic oligonucleotide
gagtgggcttcccgtacttgacgttagactgccagtctctttgcgcgccca

SEQ ID NO: 401140 - DNA, 54 bp, Artificial
  Synthetic oligonucleotide
gagtgggcttttgaagggcttagacaagcttacgaaaacagggaggagaaagaa

SEQ ID NO: 401141 - DNA, 51 bp, Artificial
  Synthetic oligonucleotide
gagtggggacgccatattgccttcatccctcgttggcagcttgttgcatac

SEQ ID NO: 401142 - DNA, 59 bp, Artificial
  Synthetic oligonucleotide
gagtggggactatgtccaggggttcatgaactatgtggtaccttattacagagagatac

SEQ ID NO: 401143 - DNA, 55 bp, Artificial
  Synthetic oligonucleotide
gagtggggagaaccttccttacctggtagcgtaccaagccaccgtgtgcgctagg

SEQ ID NO: 401144 - DNA, 56 bp, Artificial
  Synthetic oligonucleotide
gagtggggagcacccgcctgtcagagcccatccccgcggcgggtggggagtgttta

SEQ ID NO: 401145 - DNA, 60 bp, Artificial
  Synthetic oligonucleotide
gagtggggatatggatacagccctagggaattgtgtcctgatggtcctcatgactaggca

SEQ ID NO: 401146 - DNA, 55 bp, Artificial
  Synthetic oligonucleotide
gagtgggggaccaatcagcgtgcgttacggagtgttacgaagtggcgggtaatac

SEQ ID NO: 401147 - DNA, 55 bp, Artificial
  Synthetic oligonucleotide
gagtggggtatggagccaagggagttctgcacaccatgtggcacgtcactagggg

SEQ ID NO: 401148 - DNA, 59 bp, Artificial
  Synthetic oligonucleotide
gagtggggtcttatccctggatggctgatgtacacagaaggccctggtgttcgctaccc

SEQ ID NO: 401149 - DNA, 55 bp, Artificial
  Synthetic oligonucleotide
gagtgggtaattattgaaaccacgactacctgccacaataatagggaacagtgta

SEQ ID NO: 401150 - DNA, 55 bp, Artificial
  Synthetic oligonucleotide
gagtgggtagatgttgtgtttgtgcatgtcaattctgtcatttgattaactctag

SEQ ID NO: 401151 - DNA, 53 bp, Artificial
  Synthetic oligonucleotide
gagtgggtataccttactgttcccaatcctaaggttgaagactatactattcc

SEQ ID NO: 401152 - DNA, 50 bp, Artificial
  Synthetic oligonucleotide
gagtgggtcaagcacccctccctcaattactatataagtagttatggcag

SEQ ID NO: 401153 - DNA, 60 bp, Artificial
  Synthetic oligonucleotide
gagtgggtcgccatatatagacgtacgtgttacatactcaattacagctgcgtttccgga

SEQ ID NO: 401154 - DNA, 55 bp, Artificial
  Synthetic oligonucleotide
gagtgggtgtaagccacatcattcattctcttaggaggttgtatcctgccacatt

SEQ ID NO: 401155 - DNA, 51 bp, Artificial
  Synthetic oligonucleotide
gagtggtaatgttattgactttaacttattggaccaaagaatcatttggca

SEQ ID NO: 401156 - DNA, 58 bp, Artificial
  Synthetic oligonucleotide
gagtggtacaaggactgctgacacagaagttgttgactgggactttccgctggggact

SEQ ID NO: 401157 - DNA, 54 bp, Artificial
  Synthetic oligonucleotide
gagtggtactttaaccacgagtcgtcgttgagacgcctgttcccttacaaggga

SEQ ID NO: 401158 - DNA, 55 bp, Artificial
  Synthetic oligonucleotide
gagtggtatgaggacctcatctgcggtattgcccggtgcgcccgccaggatggtt

SEQ ID NO: 401159 - DNA, 55 bp, Artificial
  Synthetic oligonucleotide
gagtggtattttgaacatcggtttcatctcttcggccctcgggcatgaaccgaac

SEQ ID NO: 401160 - DNA, 55 bp, Artificial
  Synthetic oligonucleotide
gagtggtcgtcgtgttgtgtcagtggagtacattagaggtgatggtcctcccagg

SEQ ID NO: 401161 - DNA, 57 bp, Artificial
  Synthetic oligonucleotide
gagtggtcgtgagtattgaccgctttttgagggttcgagatcagcggggaaatgtac

SEQ ID NO: 401162 - DNA, 55 bp, Artificial
  Synthetic oligonucleotide
gagtggtctcacgctcacgtttgaacaaccaacagaagctaacgtcgcattggct

SEQ ID NO: 401163 - DNA, 56 bp, Artificial
  Synthetic oligonucleotide
gagtggtgaactttcgagttcgctacagtaattccttgtctgatgacgttagtggg

SEQ ID NO: 401164 - DNA, 52 bp, Artificial
  Synthetic oligonucleotide
gagtggtgagaccccttcagccgaggacatggtcaacttgctcccggcgctg

SEQ ID NO: 401165 - DNA, 60 bp, Artificial
  Synthetic oligonucleotide
gagtggtgatgcagttttgtactcccatgcagcggctcgcttggctcatttccaaggaat

SEQ ID NO: 401166 - DNA, 55 bp, Artificial
  Synthetic oligonucleotide
gagtggtgccaacatcaagctagtacaatcgctaagctatataaacaaatcggct

SEQ ID NO: 401167 - DNA, 60 bp, Artificial
  Synthetic oligonucleotide
gagtggtgccgtgcacaaggacttttggggactttgatgcgatatctgttgagagtcttg

SEQ ID NO: 401168 - DNA, 58 bp, Artificial
  Synthetic oligonucleotide
gagtggtgcggctacgtgtttaagaagagagagggtctcccacactatccaattggta

SEQ ID NO: 401169 - DNA, 58 bp, Artificial
  Synthetic oligonucleotide
gagtggtggttgctgtggttaccacgggtgtgtttctaactgtgttgtttctcatagc

SEQ ID NO: 401170 - DNA, 55 bp, Artificial
  Synthetic oligonucleotide
gagtggtgtgatctgtgccttggtagttatgccttgaggagtggtggtttgtggg

SEQ ID NO: 401171 - DNA, 50 bp, Artificial
  Synthetic oligonucleotide
gagtggttcaatgggcaactggcgcccactacaaactcaaacctattcta

SEQ ID NO: 401172 - DNA, 55 bp, Artificial
  Synthetic oligonucleotide
gagtgtaacctgcaacatctactgcaatcttttatcatatgtacgcgtcggactg

SEQ ID NO: 401173 - DNA, 60 bp, Artificial
  Synthetic oligonucleotide
gagtgtaattggatttcttgcgctggctaaagattgggttgataggattgagcagtggct

SEQ ID NO: 401174 - DNA, 60 bp, Artificial
  Synthetic oligonucleotide
gagtgtagaattgacgtcaaacacagagatagtgtactattgactcaaactccagtaata

SEQ ID NO: 401175 - DNA, 60 bp, Artificial
  Synthetic oligonucleotide
gagtgtagaccccgagctgggttagtacagttgttgcgcccacgctgagtgctggtggga

SEQ ID NO: 401176 - DNA, 60 bp, Artificial
  Synthetic oligonucleotide
gagtgtatctttaggtttcgcaatcgcagcatatttttattcatcgggagggcattacga

SEQ ID NO: 401177 - DNA, 60 bp, Artificial
  Synthetic oligonucleotide
gagtgtatgtgcctgtatagctccttgttattatgtcgatggtacatgtgctaatgacta

SEQ ID NO: 401178 - DNA, 60 bp, Artificial
  Synthetic oligonucleotide
gagtgtcaaatagcacagtcctggagctataggcacaggtatagttgtgtggttagaact

SEQ ID NO: 401179 - DNA, 60 bp, Artificial
  Synthetic oligonucleotide
gagtgtcaagacacgacacttagtggctggcgtagactgctggtgcgcgaactcatagag

SEQ ID NO: 401180 - DNA, 60 bp, Artificial
  Synthetic oligonucleotide
gagtgtcaatgtattgacgggacctgtgttgtcgctgttacggatggtcctgcggctaat

SEQ ID NO: 401181 - DNA, 56 bp, Artificial
  Synthetic oligonucleotide
gagtgtcaccttaactctcctatcgttaaaggtaaaatagcacaattacacactat

SEQ ID NO: 401182 - DNA, 55 bp, Artificial
  Synthetic oligonucleotide
gagtgtcacgctactgggtcgcaggctagacgccgggcaactgtccgtgtgtact

SEQ ID NO: 401183 - DNA, 60 bp, Artificial
  Synthetic oligonucleotide
gagtgtcacgtcctagatagcaacgctatggcattcgtgtgtcttctcaaagagcacaat

SEQ ID NO: 401184 - DNA, 55 bp, Artificial
  Synthetic oligonucleotide
gagtgtcaggtccagactgccgtggactttgggaacagctacatcgcagagatgg

SEQ ID NO: 401185 - DNA, 55 bp, Artificial
  Synthetic oligonucleotide
gagtgtcataggctttatggcacttgctaaggattggactgataggattcaagac

SEQ ID NO: 401186 - DNA, 55 bp, Artificial
  Synthetic oligonucleotide
gagtgtccaccctcccctcactagaccagaaggacgcaacctgtctgatggggag

SEQ ID NO: 401187 - DNA, 57 bp, Artificial
  Synthetic oligonucleotide
gagtgtcccgagctctcctgacatttcggagagtgattcgtgttttgaacacgatga

SEQ ID NO: 401188 - DNA, 58 bp, Artificial
  Synthetic oligonucleotide
gagtgtccctttcatacctcctatggcagatcttccagataaaggaaaaccatttaca

SEQ ID NO: 401189 - DNA, 56 bp, Artificial
  Synthetic oligonucleotide
gagtgtcgagtgaataaacataaagattacgtcattacggggtagttgagcgcttt

SEQ ID NO: 401190 - DNA, 55 bp, Artificial
  Synthetic oligonucleotide
gagtgtcgggtggccaatgagtgcacactcgtgtcggctcttgggagtgtcctac

SEQ ID NO: 401191 - DNA, 60 bp, Artificial
  Synthetic oligonucleotide
gagtgtctgagttggtagtattgctctaaactatctgaagtcactaaacgcttgtgcggt

SEQ ID NO: 401192 - DNA, 60 bp, Artificial
  Synthetic oligonucleotide
gagtgtctgcataaaattctctaacaacagtaggagttgtgccaattatctggcctatgt

SEQ ID NO: 401193 - DNA, 55 bp, Artificial
  Synthetic oligonucleotide
gagtgtcttatgaggggttctcgaaggatgtacgaagaaacctgtgcgagagtct

SEQ ID NO: 401194 - DNA, 56 bp, Artificial
  Synthetic oligonucleotide
gagtgtgaataaaggtaggtcctcttacgctagacgtcggcgagctttaaagcttg

SEQ ID NO: 401195 - DNA, 55 bp, Artificial
  Synthetic oligonucleotide
gagtgtgacttggtctaactcttcaaaaggttggtggtggaaattaccggatgca

SEQ ID NO: 401196 - DNA, 50 bp, Artificial
  Synthetic oligonucleotide
gagtgtgagttagcgcgatccagtctgattagtatacctggcgcacgtac

SEQ ID NO: 401197 - DNA, 56 bp, Artificial
  Synthetic oligonucleotide
gagtgtgatgacatgtttgaagatgatcgacatttcttagagcatgaaaatgcaag

SEQ ID NO: 401198 - DNA, 60 bp, Artificial
  Synthetic oligonucleotide
gagtgtgatgagtaacgtgataacgaccaagcggctattgtatgaaacatacttagcttc

SEQ ID NO: 401199 - DNA, 59 bp, Artificial
  Synthetic oligonucleotide
gagtgtgatgcaaagactccaacagtgcataccgtggagtctctgaaggatttgtgcct

SEQ ID NO: 401200 - DNA, 60 bp, Artificial
  Synthetic oligonucleotide
gagtgtgatgtgtccgcattgtatcggagaattaatcagtacctgatattaacccccgat

SEQ ID NO: 401201 - DNA, 55 bp, Artificial
  Synthetic oligonucleotide
gagtgtgccgctaacgctaagtcagcgaatgatctgaggcagtacatcgtcaccc

SEQ ID NO: 401202 - DNA, 55 bp, Artificial
  Synthetic oligonucleotide
gagtgtgctcccacatgagagctttgtgttgcaaggaagaggacagtgataaatt

SEQ ID NO: 401203 - DNA, 55 bp, Artificial
  Synthetic oligonucleotide
gagtgtgcttgggctagctccactggcattgttaagaaggggctggagtggttcg

SEQ ID NO: 401204 - DNA, 55 bp, Artificial
  Synthetic oligonucleotide
gagtgtgctttgaggtttccgggaagaacctctggcactgttctgcgcaacatca

SEQ ID NO: 401205 - DNA, 55 bp, Artificial
  Synthetic oligonucleotide
gagtgtggattaaattatgacttcgatgatgtgcacaagaggattgagacaatcg

SEQ ID NO: 401206 - DNA, 60 bp, Artificial
  Synthetic oligonucleotide
gagtgtggattcgcactcctcccgcctacagaccaccaaatgcccctatcttatcaacac

SEQ ID NO: 401207 - DNA, 55 bp, Artificial
  Synthetic oligonucleotide
gagtgtgggagtcacctacgggtactccactggagaagaccacgttgctgggccc

SEQ ID NO: 401208 - DNA, 56 bp, Artificial
  Synthetic oligonucleotide
gagtgtggggccggaataccttaccacaaagataatgagccagtctacccgaagaa

SEQ ID NO: 401209 - DNA, 55 bp, Artificial
  Synthetic oligonucleotide
gagtgtgtagaacgatttatacgtcccggattccccgacgatatcccatatgcag

SEQ ID NO: 401210 - DNA, 55 bp, Artificial
  Synthetic oligonucleotide
gagtgtgtgcaagagttatacaagaatacttccttggcactggaaaggatgaaca

SEQ ID NO: 401211 - DNA, 55 bp, Artificial
  Synthetic oligonucleotide
gagtgtgtggttacattttgttaaggtgagagcccggtccattgaccgaatgcga

SEQ ID NO: 401212 - DNA, 55 bp, Artificial
  Synthetic oligonucleotide
gagtgtgttcgccctcgccagttacgtccagcatccccacaagaccgtcagggtc

SEQ ID NO: 401213 - DNA, 55 bp, Artificial
  Synthetic oligonucleotide
gagtgttaatagcttatactttaagggtaaacgtgatggtgatttacgtcggcgc

SEQ ID NO: 401214 - DNA, 55 bp, Artificial
  Synthetic oligonucleotide
gagtgttacctgatattcgttatgggctgcttaggcgggcccactttcgtgcacg

SEQ ID NO: 401215 - DNA, 54 bp, Artificial
  Synthetic oligonucleotide
gagtgttagaccagaggccataagagtgttttcttgtgctgactgggtgcacag

SEQ ID NO: 401216 - DNA, 55 bp, Artificial
  Synthetic oligonucleotide
gagtgttcacacaaggaggaatcatagactcaggatatcagggacaaatacaggt

SEQ ID NO: 401217 - DNA, 60 bp, Artificial
  Synthetic oligonucleotide
gagtgttccaaatctggacagatttgtatttcagatggccagtgccactgatgatgcaca

SEQ ID NO: 401218 - DNA, 54 bp, Artificial
  Synthetic oligonucleotide
gagtgttcccacccaacaggcccactgggtgttgtactctggtattacggtacc

SEQ ID NO: 401219 - DNA, 60 bp, Artificial
  Synthetic oligonucleotide
gagtgttccggagcatccgatgaatccatgttttggggacggcactgcatggatttgttc

SEQ ID NO: 401220 - DNA, 59 bp, Artificial
  Synthetic oligonucleotide
gagtgttcctgttaccctcgattccctaacgtcaggtgtgtctgcagagacaactggaa

SEQ ID NO: 401221 - DNA, 60 bp, Artificial
  Synthetic oligonucleotide
gagtgttgaaaatctaactgcaaacagccctgcatgctgagcatgcatggagtttgctac

SEQ ID NO: 401222 - DNA, 57 bp, Artificial
  Synthetic oligonucleotide
gagtgttgactaagtcgcacaaacgttctagtgttgttcggttggatacgcctatcg

SEQ ID NO: 401223 - DNA, 56 bp, Artificial
  Synthetic oligonucleotide
gagtgttggaatgcgaactgatgcatcgtacgtggatccagtttttgggatgacac

SEQ ID NO: 401224 - DNA, 55 bp, Artificial
  Synthetic oligonucleotide
gagtgttggagaatggtcacgtgagtgtctacggcgatggggatgtcaagtgtaa

SEQ ID NO: 401225 - DNA, 60 bp, Artificial
  Synthetic oligonucleotide
gagtgttggctgaggcaatgagccaagcaaacaataccgtactgatgcagaggagcaatg

SEQ ID NO: 401226 - DNA, 50 bp, Artificial
  Synthetic oligonucleotide
gagtgttgggagctgaccgagaccccatctgggaacgtcgtggcaacggg

SEQ ID NO: 401227 - DNA, 55 bp, Artificial
  Synthetic oligonucleotide
gagtgtttaaccaggccgcatggacccacgtcaaagagatcgtcccgcccaaacc

SEQ ID NO: 401228 - DNA, 57 bp, Artificial
  Synthetic oligonucleotide
gagtgtttcgccgtcgacagcttcagcttccccttgaacttggcgaagtgggtcctc

SEQ ID NO: 401229 - DNA, 55 bp, Artificial
  Synthetic oligonucleotide
gagttaaagggttaactccaaacgtgccactgatagcaataatgtgttgtcaatg

SEQ ID NO: 401230 - DNA, 60 bp, Artificial
  Synthetic oligonucleotide
gagttaaatacttatctacatgcaaagtctcaagttatggcaagtaatataatgaacaaa

SEQ ID NO: 401231 - DNA, 57 bp, Artificial
  Synthetic oligonucleotide
gagttaacatgccggtctcatttcagcgtcgtactggtgacgcttttacttattttg

SEQ ID NO: 401232 - DNA, 54 bp, Artificial
  Synthetic oligonucleotide
gagttaaccctactaaaactcaaccgtaatgagaagtttagggacatcagaggc

SEQ ID NO: 401233 - DNA, 57 bp, Artificial
  Synthetic oligonucleotide
gagttaacgtcagcgagttcattactgccttcacataaaaagttgattaagtatagt

SEQ ID NO: 401234 - DNA, 60 bp, Artificial
  Synthetic oligonucleotide
gagttaagagcagcacaccctaactgcgtcataaactacataatggaagtgaaaggctgt

SEQ ID NO: 401235 - DNA, 50 bp, Artificial
  Synthetic oligonucleotide
gagttaagctgccaatcttgcgtaggattacgcttgtatcccatggtgga

SEQ ID NO: 401236 - DNA, 57 bp, Artificial
  Synthetic oligonucleotide
gagttaaggacgataactattgacgggattacattgcagtacagaacaacgcttaag

SEQ ID NO: 401237 - DNA, 60 bp, Artificial
  Synthetic oligonucleotide
gagttaagttggtcggagcgctgtgctataagatactactcgtcaaagcaagcaatctgt

SEQ ID NO: 401238 - DNA, 52 bp, Artificial
  Synthetic oligonucleotide
gagttaatagcagaaatacagaagcaggggttgggccaatggacataccaaa

SEQ ID NO: 401239 - DNA, 52 bp, Artificial
  Synthetic oligonucleotide
gagttaatatatgcttgcagatcagcgaaagaatttgccttgttgcaagatg

SEQ ID NO: 401240 - DNA, 54 bp, Artificial
  Synthetic oligonucleotide
gagttaatccaggtttctattttaccaaacgttgtgatggtattacttgtgtcc

SEQ ID NO: 401241 - DNA, 58 bp, Artificial
  Synthetic oligonucleotide
gagttaatgactttggcttcctgggtgggcaataatttagaggatcctgcggctagag

SEQ ID NO: 401242 - DNA, 55 bp, Artificial
  Synthetic oligonucleotide
gagttaatgctctaggtcgaggacaagatagagaatcattaactgccttcgtggg

SEQ ID NO: 401243 - DNA, 59 bp, Artificial
  Synthetic oligonucleotide
gagttacaggacaggggttgcaggattattccagggtgacatatgctttccacttagac

SEQ ID NO: 401244 - DNA, 55 bp, Artificial
  Synthetic oligonucleotide
gagttacaggtaaccgatgagtgaccgttcgtacatggacaaatttgtcttttcc

SEQ ID NO: 401245 - DNA, 59 bp, Artificial
  Synthetic oligonucleotide
gagttacatggggtttatgtaatcaggtattctcgacttcatagcttactcagctcgtt

SEQ ID NO: 401246 - DNA, 56 bp, Artificial
  Synthetic oligonucleotide
gagttacattcctacccactaaggttcctgacaatagctttatccggctatctagt

SEQ ID NO: 401247 - DNA, 58 bp, Artificial
  Synthetic oligonucleotide
gagttacccgtctcttcgccgccctgtgatgaggcttgatagaggggggagttgagga

SEQ ID NO: 401248 - DNA, 60 bp, Artificial
  Synthetic oligonucleotide
gagttaccgcagaacttcccaattaactgtctcagctcatgaaaatagtcttagctccaa

SEQ ID NO: 401249 - DNA, 60 bp, Artificial
  Synthetic oligonucleotide
gagttaccgtctgacatcgagcggcgtcacagcgtacttcaacgcacccactctcgtgaa

SEQ ID NO: 401250 - DNA, 60 bp, Artificial
  Synthetic oligonucleotide
gagttacgaacgttaacatttagactgtataactcgaaagtcatccacgccgcatgtgca

SEQ ID NO: 401251 - DNA, 53 bp, Artificial
  Synthetic oligonucleotide
gagttacggaatattatgattttgagaggttatagttacgttaaccgaacacg

SEQ ID NO: 401252 - DNA, 56 bp, Artificial
  Synthetic oligonucleotide
gagttacgtaaaccagaaaagatctgtagtggaaagactaggattatagaagctag

SEQ ID NO: 401253 - DNA, 59 bp, Artificial
  Synthetic oligonucleotide
gagttacgtaatagatggtattggaagttgaaaaaagatactctgccagatggagacta

SEQ ID NO: 401254 - DNA, 56 bp, Artificial
  Synthetic oligonucleotide
gagttactatttaggcattgggggtattgtcaagggaaaggtgcatgtttgtagcc

SEQ ID NO: 401255 - DNA, 60 bp, Artificial
  Synthetic oligonucleotide
gagttactccttgctctcttcagaagttctctaccgagaacgtgcagtggctgtcataga

SEQ ID NO: 401256 - DNA, 55 bp, Artificial
  Synthetic oligonucleotide
gagttactctgcactttcgaagtcggcaagttggtaccgacagttgatccatatg

SEQ ID NO: 401257 - DNA, 55 bp, Artificial
  Synthetic oligonucleotide
gagttacttcccagacagccactcagggccgcgaagctagcgggtacagccatcg

SEQ ID NO: 401258 - DNA, 54 bp, Artificial
  Synthetic oligonucleotide
gagttactttctccgaagtcgtaggtcgctgattctatcatagcaaatcccaac

SEQ ID NO: 401259 - DNA, 55 bp, Artificial
  Synthetic oligonucleotide
gagttagaactgtcgattcttacttgatgctcaagaactggtttactgccgaccg

SEQ ID NO: 401260 - DNA, 51 bp, Artificial
  Synthetic oligonucleotide
gagttagacttgcaatcaaaagctagtgtaacagacttagaaggtaaagcg

SEQ ID NO: 401261 - DNA, 60 bp, Artificial
  Synthetic oligonucleotide
gagttagcagacatagaacaatataagaaggccatatcacaaaaactgcaaacaagtcta

SEQ ID NO: 401262 - DNA, 60 bp, Artificial
  Synthetic oligonucleotide
gagttagcagtaagatattgcgaagtataagactcggctattatgtagggcgtattatac

SEQ ID NO: 401263 - DNA, 55 bp, Artificial
  Synthetic oligonucleotide
gagttagggaattgggtattcggtgcaccaattttaccaaagacagtcttccatc

SEQ ID NO: 401264 - DNA, 60 bp, Artificial
  Synthetic oligonucleotide
gagttagtaaggcttgcacaggtgataccttttgcgaggatagataatgtctagagaaat

SEQ ID NO: 401265 - DNA, 54 bp, Artificial
  Synthetic oligonucleotide
gagttagtgctgcttccattgacatcttacggtacttctcggatcggtctccca

SEQ ID NO: 401266 - DNA, 55 bp, Artificial
  Synthetic oligonucleotide
gagttagtggacactatagcagacactataaaagcagaaatccctaaggagttcg

SEQ ID NO: 401267 - DNA, 54 bp, Artificial
  Synthetic oligonucleotide
gagttatactcggagcgtagtgtcgaattccgatctctcacttacgcgcatgcc

SEQ ID NO: 401268 - DNA, 55 bp, Artificial
  Synthetic oligonucleotide
gagttatagtcatcaatctgacaacgatcatgaaggacaattaaggcgagtagcg

SEQ ID NO: 401269 - DNA, 55 bp, Artificial
  Synthetic oligonucleotide
gagttatctgtgaaaatcagcggtcaaactaagcacaatcacgaactttctcagc

SEQ ID NO: 401270 - DNA, 55 bp, Artificial
  Synthetic oligonucleotide
gagttatgaaagacaacaacaagcaatctgggttcacatttatgcgaaacctctc

SEQ ID NO: 401271 - DNA, 55 bp, Artificial
  Synthetic oligonucleotide
gagttatgcagtccgtgttgcccatgttgccaaagctcaggtagggttactcacc

SEQ ID NO: 401272 - DNA, 58 bp, Artificial
  Synthetic oligonucleotide
gagttatgccacgaaggtacgcgcagtctcagtcaaggcgtttggtaatgaactttcg

SEQ ID NO: 401273 - DNA, 56 bp, Artificial
  Synthetic oligonucleotide
gagttatgcctccatggaaaagacacttacttatactacatcaaaatcttggatcc

SEQ ID NO: 401274 - DNA, 55 bp, Artificial
  Synthetic oligonucleotide
gagttatgctatcctgaattccgtggcggtgcttacatgcggacttcaggaagct

SEQ ID NO: 401275 - DNA, 55 bp, Artificial
  Synthetic oligonucleotide
gagttatgcttctcacggaagggacgctatactacaatggtcccaaaacctgagc

SEQ ID NO: 401276 - DNA, 60 bp, Artificial
  Synthetic oligonucleotide
gagttatgtgaagctaatatcactaatacttcggtttcgtctgttgcgatgttcaatggg

SEQ ID NO: 401277 - DNA, 55 bp, Artificial
  Synthetic oligonucleotide
gagttattgacgaagtcggcgaggatttaaattgtgagcttgaacgtttacgtga

SEQ ID NO: 401278 - DNA, 55 bp, Artificial
  Synthetic oligonucleotide
gagttcaaaacacagtttgatgttgccctactaatcgaagaggacctttcctttc

SEQ ID NO: 401279 - DNA, 60 bp, Artificial
  Synthetic oligonucleotide
gagttcaacaggtagatgttctgtccagtcacaaacgtcagagcataggtcgattcaaac

SEQ ID NO: 401280 - DNA, 55 bp, Artificial
  Synthetic oligonucleotide
gagttcaacgattattaatggatgcgtgaccttgaagtactacgtgatagcaacg

SEQ ID NO: 401281 - DNA, 56 bp, Artificial
  Synthetic oligonucleotide
gagttcaacgcacccgtgggatatactggctccccggcgcttgagttcactatcgg

SEQ ID NO: 401282 - DNA, 56 bp, Artificial
  Synthetic oligonucleotide
gagttcaatgactaaattatgaattcaattctaggcttaattgatactgttacaaa

SEQ ID NO: 401283 - DNA, 60 bp, Artificial
  Synthetic oligonucleotide
gagttcaatgagatagaacaacaaatcggaaatgtcattaattggacacgagattcaatg

SEQ ID NO: 401284 - DNA, 60 bp, Artificial
  Synthetic oligonucleotide
gagttcacaaatccaggcctgccccgagccgaactgttgacatgggccaaatgcctgtac

SEQ ID NO: 401285 - DNA, 55 bp, Artificial
  Synthetic oligonucleotide
gagttcacaacaaggtctacagggtctatagaatctctactgagatcggtggagg

SEQ ID NO: 401286 - DNA, 60 bp, Artificial
  Synthetic oligonucleotide
gagttcacaatggtcgggagaagagcaacggccattctcaggaaggcaaccagaagattg

SEQ ID NO: 401287 - DNA, 60 bp, Artificial
  Synthetic oligonucleotide
gagttcacagagggtggcttatgccaacttgtacgcaaatgtaggtagtgacaaattatc

SEQ ID NO: 401288 - DNA, 55 bp, Artificial
  Synthetic oligonucleotide
gagttcaccatctgaagggaagacgaatgcttgggtcaactcggcgtacgtcagc

SEQ ID NO: 401289 - DNA, 57 bp, Artificial
  Synthetic oligonucleotide
gagttcaccatgttggggatttacgacagatgggccgttctcccgcgccacgccaaa

SEQ ID NO: 401290 - DNA, 55 bp, Artificial
  Synthetic oligonucleotide
gagttcactgataacctccggggacgccaggcagcatggtactccatggatgggc

SEQ ID NO: 401291 - DNA, 60 bp, Artificial
  Synthetic oligonucleotide
gagttcagcacgctcgacaattgcaagttcgcaatcgtcggagaggaaaagggcgcgaac

SEQ ID NO: 401292 - DNA, 55 bp, Artificial
  Synthetic oligonucleotide
gagttcagcgactacattgttcactacagtctagaaacacccatggaggttgggc

SEQ ID NO: 401293 - DNA, 60 bp, Artificial
  Synthetic oligonucleotide
gagttcagtagttcctgcttatgtttttgctgtgatgcttttgcattctataggggcgat

SEQ ID NO: 401294 - DNA, 55 bp, Artificial
  Synthetic oligonucleotide
gagttcataacaccaatggctaaccttgaagacaagggcagagcatttaccagtg

SEQ ID NO: 401295 - DNA, 55 bp, Artificial
  Synthetic oligonucleotide
gagttcatcaatcaagtgcaggtcggtagattccgtaatgcgtcaggtaacgccg

SEQ ID NO: 401296 - DNA, 54 bp, Artificial
  Synthetic oligonucleotide
gagttcatcagaataggggagacatacagtgttccagacacattcgatatgtgt

SEQ ID NO: 401297 - DNA, 57 bp, Artificial
  Synthetic oligonucleotide
gagttcatcattacaaagcgatgacgacactacgggtataacgtacactcgggaggg

SEQ ID NO: 401298 - DNA, 60 bp, Artificial
  Synthetic oligonucleotide
gagttcatcggctctttttcttccgctcacccactgctcgaggacatcttctcttcctcc

SEQ ID NO: 401299 - DNA, 59 bp, Artificial
  Synthetic oligonucleotide
gagttcatgcttggacaggacattcgtaggctttccaattggtggagtcagtacgaaaa

SEQ ID NO: 401300 - DNA, 60 bp, Artificial
  Synthetic oligonucleotide
gagttcattaagaacggaggtgatccattcttaatcccatcacagtacgatagctggcgt

SEQ ID NO: 401301 - DNA, 60 bp, Artificial
  Synthetic oligonucleotide
gagttcattgagttctactatgatgagttgatatatctgtctgaaactgacttaggcact

SEQ ID NO: 401302 - DNA, 55 bp, Artificial
  Synthetic oligonucleotide
gagttccaaggaagtgcttgatttactaagagaaggtaagttgacagtgaacagt

SEQ ID NO: 401303 - DNA, 55 bp, Artificial
  Synthetic oligonucleotide
gagttccagtgctttctggaggtctatctacacagcgaaggcgactataggcccc

SEQ ID NO: 401304 - DNA, 60 bp, Artificial
  Synthetic oligonucleotide
gagttccccccgatcctgtattcggcgcactgactcacactaagtacacgtatgcgaggc

SEQ ID NO: 401305 - DNA, 58 bp, Artificial
  Synthetic oligonucleotide
gagttccccctactatggcaggaaaaggaactcaacgatttatggatctcattgactg

SEQ ID NO: 401306 - DNA, 55 bp, Artificial
  Synthetic oligonucleotide
gagttccccgacaccgtactcggattcaggtgtatgcttgctataagatacctgc

SEQ ID NO: 401307 - DNA, 55 bp, Artificial
  Synthetic oligonucleotide
gagttcccgagactggcatacaatcacgggtattatcttaaaatggccttgcagc

SEQ ID NO: 401308 - DNA, 55 bp, Artificial
  Synthetic oligonucleotide
gagttcccgtctggatgaatccaaatgtaatcttaaggccggagggagctacgcc

SEQ ID NO: 401309 - DNA, 56 bp, Artificial
  Synthetic oligonucleotide
gagttccggacgaccaaatgtatagattaagggacagactacgtttattgccagta

SEQ ID NO: 401310 - DNA, 60 bp, Artificial
  Synthetic oligonucleotide
gagttcctcacacagtttcgcggcggctcaccgcttactggagacagactttatatacca

SEQ ID NO: 401311 - DNA, 56 bp, Artificial
  Synthetic oligonucleotide
gagttcctctaacttctttcttgcgcccacccactgctcgaggatttcctcccttc

SEQ ID NO: 401312 - DNA, 55 bp, Artificial
  Synthetic oligonucleotide
gagttcctctgtcggggacgagaggtcagtacgtaggtcgtggatgaatatctgg

SEQ ID NO: 401313 - DNA, 60 bp, Artificial
  Synthetic oligonucleotide
gagttcctgatggacaggaaggtaattctccctagagttgcacatgatattctagataat

SEQ ID NO: 401314 - DNA, 51 bp, Artificial
  Synthetic oligonucleotide
gagttccttcccagaaaacaaaggatgcaatggaatgagtccgacgccatc

SEQ ID NO: 401315 - DNA, 58 bp, Artificial
  Synthetic oligonucleotide
gagttccttcgagtgatgatccaaacacaactctagagctttcaatggtgagccgaga

SEQ ID NO: 401316 - DNA, 53 bp, Artificial
  Synthetic oligonucleotide
gagttcgaatactaaggcctgggacacccaagtgactagtagggatctacggc

SEQ ID NO: 401317 - DNA, 60 bp, Artificial
  Synthetic oligonucleotide
gagttcgagtgctttctcaaatctaataagcgcaggcaatgtctcaaagagcatattcga

SEQ ID NO: 401318 - DNA, 60 bp, Artificial
  Synthetic oligonucleotide
gagttcgcgatctagtaggttcaaagcttggggagtggccaacgatgctagatgtcgcga

SEQ ID NO: 401319 - DNA, 56 bp, Artificial
  Synthetic oligonucleotide
gagttcgctccgtaacgcggacgaagcccttagcattaaccgctacttggatactc

SEQ ID NO: 401320 - DNA, 57 bp, Artificial
  Synthetic oligonucleotide
gagttcggaaaggctaaggggagtagggctatctggttcatgtggctcggagctcgg

SEQ ID NO: 401321 - DNA, 53 bp, Artificial
  Synthetic oligonucleotide
gagttcggatgcttctacctcactgttgccaaggcgcttcggcacatggcgga

SEQ ID NO: 401322 - DNA, 55 bp, Artificial
  Synthetic oligonucleotide
gagttcggcgtgcccacacaatagtaggtcttcctttttcaggaatgtagtatgg

SEQ ID NO: 401323 - DNA, 60 bp, Artificial
  Synthetic oligonucleotide
gagttcggggtgaagtgtggagcgcatgatagctggagtgtacttgcgggcaattgtgtc

SEQ ID NO: 401324 - DNA, 58 bp, Artificial
  Synthetic oligonucleotide
gagttcggtaacacattttccgttccagatccattgcgcgaggttcagcggttaggca

SEQ ID NO: 401325 - DNA, 55 bp, Artificial
  Synthetic oligonucleotide
gagttcggtgaggaattgcctccgattccttcggactttacagtctccgcggaag

SEQ ID NO: 401326 - DNA, 51 bp, Artificial
  Synthetic oligonucleotide
gagttcggtgctaatgaagcagcttcaatggctaagacgattaacaattac

SEQ ID NO: 401327 - DNA, 60 bp, Artificial
  Synthetic oligonucleotide
gagttctagcgaatgcattacatgagtcatttatggccttgtatggatttgatgtctcgt

SEQ ID NO: 401328 - DNA, 58 bp, Artificial
  Synthetic oligonucleotide
gagttctaggagtgttcctcctaggctctcctctccgaggaggtaccgagacctcaca

SEQ ID NO: 401329 - DNA, 58 bp, Artificial
  Synthetic oligonucleotide
gagttctcacaatcagactgcatcttaaactttacttattagcacaaatttgtttcgt

SEQ ID NO: 401330 - DNA, 60 bp, Artificial
  Synthetic oligonucleotide
gagttctccgagcgtgaattccagcaatatatttgactcatccagatcgttacagttttc

SEQ ID NO: 401331 - DNA, 58 bp, Artificial
  Synthetic oligonucleotide
gagttctcggctttgtcgaggaaatctttataactggacccctctccaggattgcaca

SEQ ID NO: 401332 - DNA, 51 bp, Artificial
  Synthetic oligonucleotide
gagttctctgtctaactcacgtgcccctctcccaatcagtagtatgggcat

SEQ ID NO: 401333 - DNA, 55 bp, Artificial
  Synthetic oligonucleotide
gagttctgaattctcctctcttcatgcttatcaagcccacatcttcagttagtca

SEQ ID NO: 401334 - DNA, 60 bp, Artificial
  Synthetic oligonucleotide
gagttctgggtatcaatgacccttatacaggaactactcacatccagaatcaagcctatg

SEQ ID NO: 401335 - DNA, 55 bp, Artificial
  Synthetic oligonucleotide
gagttctgtcgaggtatgaacaaccacaaatcagacctagcccatgtcataatgc

SEQ ID NO: 401336 - DNA, 55 bp, Artificial
  Synthetic oligonucleotide
gagttcttcacacctctgatgggagcttacaaacctagcaggttgaataaggatg

SEQ ID NO: 401337 - DNA, 56 bp, Artificial
  Synthetic oligonucleotide
gagttcttcgattcggtttgggtgtaccacttggcaaacagctcttgggttcgaga

SEQ ID NO: 401338 - DNA, 60 bp, Artificial
  Synthetic oligonucleotide
gagttcttcgcaagaagttctctgaagagcacatcctatccctatataccctatccttac

SEQ ID NO: 401339 - DNA, 55 bp, Artificial
  Synthetic oligonucleotide
gagttcttggggctgcgaagaatggggctgtattgctgttgggactggttgtgtc

SEQ ID NO: 401340 - DNA, 58 bp, Artificial
  Synthetic oligonucleotide
gagttgaaacagactgcctttgagcgaaattctttactcagggactcttggtccgaga

SEQ ID NO: 401341 - DNA, 56 bp, Artificial
  Synthetic oligonucleotide
gagttgaacaagagtgcattaactaaccgagagggcgttgcagtatctatccaggc

SEQ ID NO: 401342 - DNA, 55 bp, Artificial
  Synthetic oligonucleotide
gagttgaacgaggagttgcgtcaggtgcgtaacagggctctcgccgctaacgctg

SEQ ID NO: 401343 - DNA, 53 bp, Artificial
  Synthetic oligonucleotide
gagttgaagagccacccgttactccccccgtttctgattacgaatatactggg

SEQ ID NO: 401344 - DNA, 50 bp, Artificial
  Synthetic oligonucleotide
gagttgaagccacggtttggtgaggagatactagacgatgagccaactgg

SEQ ID NO: 401345 - DNA, 55 bp, Artificial
  Synthetic oligonucleotide
gagttgaaggaaggtggcatggatttttacgtgccaagacaagagccaatgttca

SEQ ID NO: 401346 - DNA, 60 bp, Artificial
  Synthetic oligonucleotide
gagttgaatgacgcggctcactctgatacaccgatcttgtgtctctcgttgtcccccgct

SEQ ID NO: 401347 - DNA, 55 bp, Artificial
  Synthetic oligonucleotide
gagttgaatgagtgggtcagggctagaggttttactggcatttgcacagaatcag

SEQ ID NO: 401348 - DNA, 60 bp, Artificial
  Synthetic oligonucleotide
gagttgaatgttatatacccggatacgaggatagttgcttatgataatacagcgaagtta

SEQ ID NO: 401349 - DNA, 55 bp, Artificial
  Synthetic oligonucleotide
gagttgacagaaatgttgatctccctcagcttgaggccgagcccagactgagttc

SEQ ID NO: 401350 - DNA, 55 bp, Artificial
  Synthetic oligonucleotide
gagttgacataaaccctggtcacgcggatctcagtgccaaggaggcgcaggatgt

SEQ ID NO: 401351 - DNA, 55 bp, Artificial
  Synthetic oligonucleotide
gagttgacgaaatctcaatgaacaatggacaagcaacaattacaagaatcggagg

SEQ ID NO: 401352 - DNA, 57 bp, Artificial
  Synthetic oligonucleotide
gagttgacgactcaatagtagcagggatagaattaggtagcaattacaccccaaaaa

SEQ ID NO: 401353 - DNA, 59 bp, Artificial
  Synthetic oligonucleotide
gagttgactttgactaatgaatcaatgataaacatcaccaattccatgagggtcttcac

SEQ ID NO: 401354 - DNA, 60 bp, Artificial
  Synthetic oligonucleotide
gagttgagagatcgtttgcaggtgttacatcggttcagtgcgactgttacaggtggacaa

SEQ ID NO: 401355 - DNA, 55 bp, Artificial
  Synthetic oligonucleotide
gagttgagctggacacttacaccatgatctcctacggagacgacatcgtggtcgc

SEQ ID NO: 401356 - DNA, 60 bp, Artificial
  Synthetic oligonucleotide
gagttgagcttgagatgcttcgggcggggatgtgtcacgttctactcgaccacccactaa

SEQ ID NO: 401357 - DNA, 51 bp, Artificial
  Synthetic oligonucleotide
gagttgaggaagatgaattttgcattgtgtagtgaccacgctctgagagat

SEQ ID NO: 401358 - DNA, 59 bp, Artificial
  Synthetic oligonucleotide
gagttgaggaagtgtgttggcatgaccgttccctatgtggcaaccaccgttaactgcta

SEQ ID NO: 401359 - DNA, 55 bp, Artificial
  Synthetic oligonucleotide
gagttgaggttgcgggagtacatggttatgagtggggtgcgacgaatcataggct

SEQ ID NO: 401360 - DNA, 55 bp, Artificial
  Synthetic oligonucleotide
gagttgagtacgggttgtcataccggtactgactttagtgggaacttctatggtc

SEQ ID NO: 401361 - DNA, 55 bp, Artificial
  Synthetic oligonucleotide
gagttgataaatcgttccgtatctctcgaaccataggagtttgaagtagagtgga

SEQ ID NO: 401362 - DNA, 60 bp, Artificial
  Synthetic oligonucleotide
gagttgatcaacagctctaaaatacctcaaagacatgactatctgcaggaaccgcacaca

SEQ ID NO: 401363 - DNA, 60 bp, Artificial
  Synthetic oligonucleotide
gagttgatcccaagcaggtccagatgtttatagtgggctgtactccatgtgagggagaac

SEQ ID NO: 401364 - DNA, 60 bp, Artificial
  Synthetic oligonucleotide
gagttgattccaaaaccggagccacggaagatacagatgaagtggataatagtaggagca

SEQ ID NO: 401365 - DNA, 60 bp, Artificial
  Synthetic oligonucleotide
gagttgatttaatcaaactggagaaattatcaggagtgaccctaattgtctccagcatgt

SEQ ID NO: 401366 - DNA, 55 bp, Artificial
  Synthetic oligonucleotide
gagttgcaaatgcaatccagcagtcggaaacacgaacggctgtgcaggagcttgc

SEQ ID NO: 401367 - DNA, 60 bp, Artificial
  Synthetic oligonucleotide
gagttgcacttaatgattcaagaagaaatactgaacttgttaggatgtcctgttgatgta

SEQ ID NO: 401368 - DNA, 55 bp, Artificial
  Synthetic oligonucleotide
gagttgccattcaccattgacaagtagtttgttcaaaaaaactccttgtttctac

SEQ ID NO: 401369 - DNA, 58 bp, Artificial
  Synthetic oligonucleotide
gagttgccctgttggtgaagctccctctccatacaattcaaggtttgagtcggttgct

SEQ ID NO: 401370 - DNA, 55 bp, Artificial
  Synthetic oligonucleotide
gagttgcctctggaccgttgtcacgatctggttggcagcctattccatgatagcg

SEQ ID NO: 401371 - DNA, 50 bp, Artificial
  Synthetic oligonucleotide
gagttgcgcaatagatggtattggaaactgaaacgtgatactttacccga

SEQ ID NO: 401372 - DNA, 52 bp, Artificial
  Synthetic oligonucleotide
gagttgcggtttccgcttgtcacatccgctgctctctgactggcctgacgcg

SEQ ID NO: 401373 - DNA, 55 bp, Artificial
  Synthetic oligonucleotide
gagttgctagacacaggtttgtctctgtgctagcccaacggcacttgtacaatcc

SEQ ID NO: 401374 - DNA, 55 bp, Artificial
  Synthetic oligonucleotide
gagttgctagttgctgcctatcttggtccagatgctgatcgttatgatgctgatc

SEQ ID NO: 401375 - DNA, 56 bp, Artificial
  Synthetic oligonucleotide
gagttgctatggaatgtctgactatttctacctttctttaacctttccggtgacta

SEQ ID NO: 401376 - DNA, 60 bp, Artificial
  Synthetic oligonucleotide
gagttgctcatattggtgaactcaaatctggagtttatgtaccattgcccacaaaaacta

SEQ ID NO: 401377 - DNA, 60 bp, Artificial
  Synthetic oligonucleotide
gagttgctcccgaagttgctttgtgacgctttcaaatccgctcaactgatcagcgagccg

SEQ ID NO: 401378 - DNA, 54 bp, Artificial
  Synthetic oligonucleotide
gagttgctgacagggactttccgctggggactttccaagggaggtgtggtttgg

SEQ ID NO: 401379 - DNA, 55 bp, Artificial
  Synthetic oligonucleotide
gagttgctgactaattgcttccataaggatgcctgggagtatatttggttccgga

SEQ ID NO: 401380 - DNA, 55 bp, Artificial
  Synthetic oligonucleotide
gagttgctggaaaagtctcaaccctttctcgtgagtacactaaggaggtggacag

SEQ ID NO: 401381 - DNA, 60 bp, Artificial
  Synthetic oligonucleotide
gagttgcttcacagcatccgagacaacatgcagcgaccataccgttctatcctgggaaag

SEQ ID NO: 401382 - DNA, 60 bp, Artificial
  Synthetic oligonucleotide
gagttggaacaatggtgatggagttggtcagaatgatcaaacgtggaatcaatgaccgaa

SEQ ID NO: 401383 - DNA, 60 bp, Artificial
  Synthetic oligonucleotide
gagttggaagctactatgagcagatggttactgtcgattactacacttctggcgcgcaga

SEQ ID NO: 401384 - DNA, 59 bp, Artificial
  Synthetic oligonucleotide
gagttggaagctttttttcttgaggtcatgaatgtgtccggcttgccagtgggtgctcc

SEQ ID NO: 401385 - DNA, 53 bp, Artificial
  Synthetic oligonucleotide
gagttggacatatctgaattagctgatctaatactgaatgagtggttatgtaa

SEQ ID NO: 401386 - DNA, 60 bp, Artificial
  Synthetic oligonucleotide
gagttggatagtggacaggcaatgggcccaggatctaaccttaccatggcagagcggtag

SEQ ID NO: 401387 - DNA, 55 bp, Artificial
  Synthetic oligonucleotide
gagttggatcttctgtgtcctaactgccgaaacagcgacctgcagcatggcggac

SEQ ID NO: 401388 - DNA, 55 bp, Artificial
  Synthetic oligonucleotide
gagttggcagggttctggactgtatgtttaactgcaaactgtgtgttgaaatatc

SEQ ID NO: 401389 - DNA, 54 bp, Artificial
  Synthetic oligonucleotide
gagttgggacgacgagcggacattcccacaacacgttactccagtcgatatgca

SEQ ID NO: 401390 - DNA, 55 bp, Artificial
  Synthetic oligonucleotide
gagttggtcagaatgatcaaacgtggaatcaatgaccgaaacttctggagaggtg

SEQ ID NO: 401391 - DNA, 55 bp, Artificial
  Synthetic oligonucleotide
gagttggtcattcccagtgagcgtcttcactatcgcaatcaaggttggcgctctg

SEQ ID NO: 401392 - DNA, 54 bp, Artificial
  Synthetic oligonucleotide
gagttggtcgtatagggcgggataaaccaggaacgtttattcaagttggcaaga

SEQ ID NO: 401393 - DNA, 60 bp, Artificial
  Synthetic oligonucleotide
gagttggtctctctcagtactggaacgggcgcgtttctgagcgcaaatcatatcgcatcc

SEQ ID NO: 401394 - DNA, 59 bp, Artificial
  Synthetic oligonucleotide
gagttggttatgctgaagagatcaggtatgtacaacagctatttggaagggttccaacg

SEQ ID NO: 401395 - DNA, 60 bp, Artificial
  Synthetic oligonucleotide
gagttggttgaatatcaagggaagcgtgaagaagcctggataacacgagtaatggctgta

SEQ ID NO: 401396 - DNA, 58 bp, Artificial
  Synthetic oligonucleotide
gagttgtatattagccttgcttataagagccatctagtggtataagtgtagattacac

SEQ ID NO: 401397 - DNA, 55 bp, Artificial
  Synthetic oligonucleotide
gagttgtccctttgccgcgggtattctatgcaccgagagaattgcctacagatcc

SEQ ID NO: 401398 - DNA, 58 bp, Artificial
  Synthetic oligonucleotide
gagttgtccgtgatcgaaattcctttcgaagacgttgagactcggagttatgagttca

SEQ ID NO: 401399 - DNA, 60 bp, Artificial
  Synthetic oligonucleotide
gagttgtcgcataaaagatactggcagctgcaatgtgatgggaaatgactggacaatagt

SEQ ID NO: 401400 - DNA, 51 bp, Artificial
  Synthetic oligonucleotide
gagttgtgagaccacgggtaccgtttattggcaacccaagccctcatggga

SEQ ID NO: 401401 - DNA, 60 bp, Artificial
  Synthetic oligonucleotide
gagttgtggcccgttgccagacaacgtggtgtggtgtgctctgtgtttgctgacgcaact

SEQ ID NO: 401402 - DNA, 58 bp, Artificial
  Synthetic oligonucleotide
gagttgtggtatcactaacagaaaagattatagggtacgtgctgttgtatacggtaga

SEQ ID NO: 401403 - DNA, 54 bp, Artificial
  Synthetic oligonucleotide
gagttgttgagtctaaagtcattgtgtatccattgcctttgtaaactgaggaac

SEQ ID NO: 401404 - DNA, 60 bp, Artificial
  Synthetic oligonucleotide
gagttgtttacctacatgcgctttgatgctgaattcacattcgtcgtagccaaacccaat

SEQ ID NO: 401405 - DNA, 55 bp, Artificial
  Synthetic oligonucleotide
gagttgtttggtaaatactcttcgagttccgatttcagcattcatttgcgtgagg

SEQ ID NO: 401406 - DNA, 57 bp, Artificial
  Synthetic oligonucleotide
gagtttaagatgtacactgtaaggccaagtgcggtcaaacggatcattattcagatg

SEQ ID NO: 401407 - DNA, 57 bp, Artificial
  Synthetic oligonucleotide
gagtttaatacaattagtatgtccaccattactaataacgtcaaacataaatccaca

SEQ ID NO: 401408 - DNA, 53 bp, Artificial
  Synthetic oligonucleotide
gagtttactagtctgggaatttatgacagaatatgtgtgatcccaactcactc

SEQ ID NO: 401409 - DNA, 58 bp, Artificial
  Synthetic oligonucleotide
gagtttactatgctgggcatttacgacagatgggccgttttaccacgccacgcaaagc

SEQ ID NO: 401410 - DNA, 53 bp, Artificial
  Synthetic oligonucleotide
gagtttactctcccctaggcccctctcttacttgaagggctcttcgggtggcc

SEQ ID NO: 401411 - DNA, 60 bp, Artificial
  Synthetic oligonucleotide
gagtttacttgctgccgcgcaggggcccacgattgggtgtgcgcgccacaagaaagacat

SEQ ID NO: 401412 - DNA, 56 bp, Artificial
  Synthetic oligonucleotide
gagtttacttgttaccgcgcaggggccctagattgggtgtgcgcgcgacgaggaaa

SEQ ID NO: 401413 - DNA, 60 bp, Artificial
  Synthetic oligonucleotide
gagtttagccagttcagtttctacactaacggactcattgtctgatgccgcttcttcagt

SEQ ID NO: 401414 - DNA, 55 bp, Artificial
  Synthetic oligonucleotide
gagtttatcagatgagcgatcctgtatgtaagttcaaacgcaccacggaagagcg

SEQ ID NO: 401415 - DNA, 55 bp, Artificial
  Synthetic oligonucleotide
gagtttatctattggctagggtgttactgcgttgggaattatcgtcgcaggcccg

SEQ ID NO: 401416 - DNA, 60 bp, Artificial
  Synthetic oligonucleotide
gagtttatgccgccagacgaaggaagcatcactttagtgactgcagactgatcttgggcg

SEQ ID NO: 401417 - DNA, 55 bp, Artificial
  Synthetic oligonucleotide
gagtttattctgccagtggtcgggtacggagcggagcggagaacacccgagcgac

SEQ ID NO: 401418 - DNA, 52 bp, Artificial
  Synthetic oligonucleotide
gagtttatttagtctaccttaaggtctcgacccacgttcgtgaaatagttaa

SEQ ID NO: 401419 - DNA, 54 bp, Artificial
  Synthetic oligonucleotide
gagtttcaacccaggcggactctaaagtgcttccgtgtgccggttataggcgag

SEQ ID NO: 401420 - DNA, 55 bp, Artificial
  Synthetic oligonucleotide
gagtttcagaccgtggcattcaccgacctcaaagtgcatgttagtgtctctgatg

SEQ ID NO: 401421 - DNA, 50 bp, Artificial
  Synthetic oligonucleotide
gagtttcaggttcgaggagacaacccctgctctgaagcaggagtcaaagg

SEQ ID NO: 401422 - DNA, 55 bp, Artificial
  Synthetic oligonucleotide
gagtttcataacgtcaacgtactatcatcaaacggaaaaacaacgcaatgggaaa

SEQ ID NO: 401423 - DNA, 55 bp, Artificial
  Synthetic oligonucleotide
gagtttcatggaataactggcagacaaaccgttccttaaattcaggtctgattga

SEQ ID NO: 401424 - DNA, 60 bp, Artificial
  Synthetic oligonucleotide
gagtttccacaatgttgcaagacgtggcaaacttgatgtcaacatggtccacgaattcag

SEQ ID NO: 401425 - DNA, 54 bp, Artificial
  Synthetic oligonucleotide
gagtttccggtgtagttagttttcatgactttaaaccaattgtgccttcgacaa

SEQ ID NO: 401426 - DNA, 59 bp, Artificial
  Synthetic oligonucleotide
gagtttccgtcaagtcatcgtctctcccccttcattccagaactgttgtctcagccttg

SEQ ID NO: 401427 - DNA, 60 bp, Artificial
  Synthetic oligonucleotide
gagtttccgttacaccatatgatgctgatgagacgcgatttcccaacgcgcgatcgcagt

SEQ ID NO: 401428 - DNA, 57 bp, Artificial
  Synthetic oligonucleotide
gagtttcctgaaaccgttcacggttttagatgtatgctagcagttaaatatcttcag

SEQ ID NO: 401429 - DNA, 50 bp, Artificial
  Synthetic oligonucleotide
gagtttccttggttccggggatcaagccctccccgggtgggcgtttgaat

SEQ ID NO: 401430 - DNA, 50 bp, Artificial
  Synthetic oligonucleotide
gagtttcgacactaaggcttgggacacccaagtaactagtagagatctac

SEQ ID NO: 401431 - DNA, 55 bp, Artificial
  Synthetic oligonucleotide
gagtttcgacgacaacaacgctatgatcggcgacaatgaatgttaaaagtgactc

SEQ ID NO: 401432 - DNA, 60 bp, Artificial
  Synthetic oligonucleotide
gagtttctaaattcgctgtcagtcacgatagcgactgtgatactctttgtgtccattgcc

SEQ ID NO: 401433 - DNA, 56 bp, Artificial
  Synthetic oligonucleotide
gagtttctacgttcttcccaatgtctaaagcaattaataccataacagtgcaagtg

SEQ ID NO: 401434 - DNA, 55 bp, Artificial
  Synthetic oligonucleotide
gagtttctgactgacaagcaatctaagcaggttcagcaacaacttaacagcatca

SEQ ID NO: 401435 - DNA, 60 bp, Artificial
  Synthetic oligonucleotide
gagtttctgcataaaatcgattgaagcactctgaagcatggcctgttatttgccttaatg

SEQ ID NO: 401436 - DNA, 55 bp, Artificial
  Synthetic oligonucleotide
gagtttcttaagagggcggacttcatgaacttcacctatccgccgcaagtggatg

SEQ ID NO: 401437 - DNA, 55 bp, Artificial
  Synthetic oligonucleotide
gagtttcttcattgattattccgttaaacttctgtgcttgcgttttagtttctaa

SEQ ID NO: 401438 - DNA, 60 bp, Artificial
  Synthetic oligonucleotide
gagtttgaactcatcaagatgtcctccccatatataaatgcgacaatagcattttttgtg

SEQ ID NO: 401439 - DNA, 55 bp, Artificial
  Synthetic oligonucleotide
gagtttgaatcgaatgcgatgcgtgtcgttcaaaacttgcagctcagaatccgag

SEQ ID NO: 401440 - DNA, 50 bp, Artificial
  Synthetic oligonucleotide
gagtttgactcattctttcggtccttcactctgaaagcgaaagtctgcag

SEQ ID NO: 401441 - DNA, 55 bp, Artificial
  Synthetic oligonucleotide
gagtttgactggacccgcttcgatggcacaattccacgcacccttctcaaacaca

SEQ ID NO: 401442 - DNA, 60 bp, Artificial
  Synthetic oligonucleotide
gagtttgccacagagtttgagctagacgatggcctcattatcttagcccattatctagac

SEQ ID NO: 401443 - DNA, 55 bp, Artificial
  Synthetic oligonucleotide
gagtttgctataagatgggtggaaagtggtcaaaacgtagtggggctggatggaa

SEQ ID NO: 401444 - DNA, 58 bp, Artificial
  Synthetic oligonucleotide
gagtttgctctttggtggtcattgagtggcgaacttactgtcttgttctctcggttta

SEQ ID NO: 401445 - DNA, 60 bp, Artificial
  Synthetic oligonucleotide
gagtttggatcgcttgatgaatcctcttattgatcagtatctgtactacctgaacagaac

SEQ ID NO: 401446 - DNA, 60 bp, Artificial
  Synthetic oligonucleotide
gagtttggccgcatttgctggtgctgctacatctagttcatcggcatccagtttggagga

SEQ ID NO: 401447 - DNA, 58 bp, Artificial
  Synthetic oligonucleotide
gagtttgggatccgcagtgggttcatattcgctatcccatgttgaagttcggtgtggg

SEQ ID NO: 401448 - DNA, 57 bp, Artificial
  Synthetic oligonucleotide
gagtttgtacctagaagctgctttagaatccctaggtaagatcttcgctagtaagac

SEQ ID NO: 401449 - DNA, 55 bp, Artificial
  Synthetic oligonucleotide
gagtttgtagagcatgatggcgtcattcaccctgtgatagtaataccgcctggcg

SEQ ID NO: 401450 - DNA, 52 bp, Artificial
  Synthetic oligonucleotide
gagtttgttatgcagcctttcatttctcggaggcattgcttttaggttcgcc

SEQ ID NO: 401451 - DNA, 52 bp, Artificial
  Synthetic oligonucleotide
gagtttgttggggtgtttaacggtgagtttgaagggcttatagagctgttag

SEQ ID NO: 401452 - DNA, 54 bp, Artificial
  Synthetic oligonucleotide
gagttttacaaggactgttgacatctacaagaactgctgacaccgagcttctga

SEQ ID NO: 401453 - DNA, 58 bp, Artificial
  Synthetic oligonucleotide
gagttttatagctgaaatcgtcaattaaggattaaacatactttctaatatgtatcag

SEQ ID NO: 401454 - DNA, 57 bp, Artificial
  Synthetic oligonucleotide
gagttttcaaccaaccagtcactagagcccgcaatttattaagagactcttctttga

SEQ ID NO: 401455 - DNA, 51 bp, Artificial
  Synthetic oligonucleotide
gagttttcaatcagactggcttattgaacgagggagaagttcaaaaggtgg

SEQ ID NO: 401456 - DNA, 56 bp, Artificial
  Synthetic oligonucleotide
gagttttccgtataaagtgtcgaggtctgatgcaaagaagagggcggaggaattcg

SEQ ID NO: 401457 - DNA, 54 bp, Artificial
  Synthetic oligonucleotide
gagttttcgcttgtggcttgttttcctgcttccggagtttactccggcaacttg

SEQ ID NO: 401458 - DNA, 56 bp, Artificial
  Synthetic oligonucleotide
gagttttcggaagaagtgcaactttgcaactaccccagtatgtgagtatgatggaa

SEQ ID NO: 401459 - DNA, 55 bp, Artificial
  Synthetic oligonucleotide
gagttttcggtttcttacactggatccgctttatctgtacactccctagctgggg

SEQ ID NO: 401460 - DNA, 53 bp, Artificial
  Synthetic oligonucleotide
gagttttctacgtggaaagtaaagataagaaggagttagtcgattgcccccaa

SEQ ID NO: 401461 - DNA, 55 bp, Artificial
  Synthetic oligonucleotide
gagttttctcttactgacccaaggttggagccacacaagtgggaaaagtactgtg

SEQ ID NO: 401462 - DNA, 55 bp, Artificial
  Synthetic oligonucleotide
gagttttgatgcttataatcgtataaccagtagtatttccactactgctagccca

SEQ ID NO: 401463 - DNA, 54 bp, Artificial
  Synthetic oligonucleotide
gagttttgccagacccagcctgtatttgatggcacccaatggagaatggtcagg

SEQ ID NO: 401464 - DNA, 55 bp, Artificial
  Synthetic oligonucleotide
gagttttgccctaccgataattcttaaggccttatatatgttatccaccaggggc

SEQ ID NO: 401465 - DNA, 55 bp, Artificial
  Synthetic oligonucleotide
gagttttgctctcacgttataagggaagatcgatgttggttggcgtcgtggccca

SEQ ID NO: 401466 - DNA, 60 bp, Artificial
  Synthetic oligonucleotide
gagttttgtccagcatccagaattgacagggctggactgcatgagaccttgcttctgggt

SEQ ID NO: 401467 - DNA, 54 bp, Artificial
  Synthetic oligonucleotide
gagttttgttgtgcaacaccgtaataagatctctcaggtcgcccggcggtttaa

SEQ ID NO: 401468 - DNA, 55 bp, Artificial
  Synthetic oligonucleotide
gagtttttagttactagagtcaatacgtggtattgtaagtttactagagtcgata

SEQ ID NO: 401469 - DNA, 57 bp, Artificial
  Synthetic oligonucleotide
gagtttttcaagatgcaacgcaagtatcacttaactattattgtttcgtctcagact

SEQ ID NO: 401470 - DNA, 59 bp, Artificial
  Synthetic oligonucleotide
gagtttttctcaagcccgagtacccccgtcacatctagttacatcatgcaaaggcgagc

SEQ ID NO: 401471 - DNA, 60 bp, Artificial
  Synthetic oligonucleotide
gagtttttctttcgtacactgctccctcggattatcagacagaacgctcactgtggagac

SEQ ID NO: 401472 - DNA, 54 bp, Artificial
  Synthetic oligonucleotide
gagtttttgaggttgacgccacaggtaagcgtacattcgttagaacgtcaaaca

SEQ ID NO: 401473 - DNA, 60 bp, Artificial
  Synthetic oligonucleotide
gagttttttcaaataatgtcgcaataaggaaatggctagtctctgattggcatgattgca

SEQ ID NO: 401474 - DNA, 59 bp, Artificial
  Synthetic oligonucleotide
gataaaaaaacaataattccgcagcctgaggaggttcgaaacagctggcctgtagctgc

SEQ ID NO: 401475 - DNA, 59 bp, Artificial
  Synthetic oligonucleotide
gataaaaacagaaaatccgataactcgacggcgaattgatcaatatcacacggatcagt

SEQ ID NO: 401476 - DNA, 60 bp, Artificial
  Synthetic oligonucleotide
gataaaaaccgatgtgaaacccactgttgctcacagtatgcatgttgagagggcgatccc

SEQ ID NO: 401477 - DNA, 55 bp, Artificial
  Synthetic oligonucleotide
gataaaagcagttagaggtgacctgaatttcgtcaacagagcaaatcagcggttg

SEQ ID NO: 401478 - DNA, 53 bp, Artificial
  Synthetic oligonucleotide
gataaaagcctcgtaaaagtgttgctttcatttcccaccccatcacgggttcc

SEQ ID NO: 401479 - DNA, 57 bp, Artificial
  Synthetic oligonucleotide
gataaaagctcttatctgttgtttatacagttttgggctagtccgtctttgtgattc

SEQ ID NO: 401480 - DNA, 60 bp, Artificial
  Synthetic oligonucleotide
gataaaagtgagattaaggctgcagcaggagcattagaggccgtagctgcgcatgtgtac

SEQ ID NO: 401481 - DNA, 58 bp, Artificial
  Synthetic oligonucleotide
gataaaatcatttttggaactagatcattaaatcctattgctccgggcaattttcaga

SEQ ID NO: 401482 - DNA, 60 bp, Artificial
  Synthetic oligonucleotide
gataaaatccgatgtgaaacctgtcgtgagcgacacactcaacatcgacagaccggttcc

SEQ ID NO: 401483 - DNA, 56 bp, Artificial
  Synthetic oligonucleotide
gataaaattgatgtcccgctcttcctaaaaaacgcgtgactgcggtaatctcggga

SEQ ID NO: 401484 - DNA, 56 bp, Artificial
  Synthetic oligonucleotide
gataaacaacgaaagagcatacattcctcctggattaatgtttaatccaaaagttc

SEQ ID NO: 401485 - DNA, 59 bp, Artificial
  Synthetic oligonucleotide
gataaacagtgtaattgagcgattatcacaattaggaggtgtattttaccatactgcac

SEQ ID NO: 401486 - DNA, 57 bp, Artificial
  Synthetic oligonucleotide
gataaaccatatcatttagcagcatggataaattcgagcattgagatgattgcatgc

SEQ ID NO: 401487 - DNA, 54 bp, Artificial
  Synthetic oligonucleotide
gataaacctctgcaaacccaatcgttatgattggcccgttttacaacacggggc

SEQ ID NO: 401488 - DNA, 60 bp, Artificial
  Synthetic oligonucleotide
gataaactccaggcctacatggatgcgtatatgaacccaacatatacgcgtgctctacga

SEQ ID NO: 401489 - DNA, 55 bp, Artificial
  Synthetic oligonucleotide
gataaagaccgatgttaagccggttatcaatgacactctgcatcttgagcgagct

SEQ ID NO: 401490 - DNA, 51 bp, Artificial
  Synthetic oligonucleotide
gataaagacgtaggattaggatatacaagtatatacgctcaaggtggcgta

SEQ ID NO: 401491 - DNA, 57 bp, Artificial
  Synthetic oligonucleotide
gataaagatggaaagatgatacgaagtttaacggtatttggcgtgggagagcatggg

SEQ ID NO: 401492 - DNA, 55 bp, Artificial
  Synthetic oligonucleotide
gataaagccgtttgtgactaataacgttgagattttcttcgtggcttttggtgta

SEQ ID NO: 401493 - DNA, 50 bp, Artificial
  Synthetic oligonucleotide
gataaagcgtagatgtgacaaaacagatgatgggggggactggaggcaaa

SEQ ID NO: 401494 - DNA, 60 bp, Artificial
  Synthetic oligonucleotide
gataaagcttaaacaagagagatggctcggtaagagactatcgcaatttgacattggtca

SEQ ID NO: 401495 - DNA, 55 bp, Artificial
  Synthetic oligonucleotide
gataaaggaaaatgggaagtaatgcaaatagaagggagtaatcaaagagcagagg

SEQ ID NO: 401496 - DNA, 59 bp, Artificial
  Synthetic oligonucleotide
gataaaggcagtccgaggtgatctgaatttcgtcaacagagcgaaccaacggctgaacc

SEQ ID NO: 401497 - DNA, 58 bp, Artificial
  Synthetic oligonucleotide
gataaagtaatagattttacgcaaaaacaaaagagaggtatcatcacattaaggatga

SEQ ID NO: 401498 - DNA, 60 bp, Artificial
  Synthetic oligonucleotide
gataaagtaccgctgcgacaggacatcggatggcggagactggaggcctattgttcagtt

SEQ ID NO: 401499 - DNA, 55 bp, Artificial
  Synthetic oligonucleotide
gataaagtagacacactaacagaaaccggagttcctgtgaccagctcagtggatc

SEQ ID NO: 401500 - DNA, 59 bp, Artificial
  Synthetic oligonucleotide
gataaagtatttgatgacggctctcctgagtgtggtgtacactgctggtttaaaaagtc

SEQ ID NO: 401501 - DNA, 52 bp, Artificial
  Synthetic oligonucleotide
gataaagttgcttgaaagaaaaggtagtttacaaaattataagatagttgaa

SEQ ID NO: 401502 - DNA, 59 bp, Artificial
  Synthetic oligonucleotide
gataaataagccagtgagtgtaagactagcggtataacattcccacagtgagaaccgtg

SEQ ID NO: 401503 - DNA, 60 bp, Artificial
  Synthetic oligonucleotide
gataaataattatgtgggcccaagctcctagcccacattgtcttgccggtcctagactca

SEQ ID NO: 401504 - DNA, 54 bp, Artificial
  Synthetic oligonucleotide
gataaatacaatgctgttgaaaggaaattagttaagtatgcgaggggtaaaccg

SEQ ID NO: 401505 - DNA, 57 bp, Artificial
  Synthetic oligonucleotide
gataaatacgaacgattcttgtctaagtgtaaaaatcaattacgcacaggtactcaa

SEQ ID NO: 401506 - DNA, 55 bp, Artificial
  Synthetic oligonucleotide
gataaatataggctggtgtgggcctgcaaaggccttgaaataggccgaggacagc

SEQ ID NO: 401507 - DNA, 55 bp, Artificial
  Synthetic oligonucleotide
gataaatatgggtggcggagtaagtgttgagctccctaaacgggatccgcctccg

SEQ ID NO: 401508 - DNA, 53 bp, Artificial
  Synthetic oligonucleotide
gataaatatgttaaggcaattgtacctgatcaaattttcgatgaattacagga

SEQ ID NO: 401509 - DNA, 60 bp, Artificial
  Synthetic oligonucleotide
gataaatcgagatgtgtaaatggtgaaacatgttgggaacacccatctgacttatgtgat

SEQ ID NO: 401510 - DNA, 58 bp, Artificial
  Synthetic oligonucleotide
gataaatctcccagtcgaaatggacgagctaactttatccattggaggttcaccagga

SEQ ID NO: 401511 - DNA, 60 bp, Artificial
  Synthetic oligonucleotide
gataaatctgctggtaacctaagtcgacggtatgagaagtgcacaaatgcatcaacagcc

SEQ ID NO: 401512 - DNA, 56 bp, Artificial
  Synthetic oligonucleotide
gataaatcttcccttgaccacgagtattacgcacacttcgtaagtccccccctgca

SEQ ID NO: 401513 - DNA, 55 bp, Artificial
  Synthetic oligonucleotide
gataaatgaaagccccaccagtggttacactgacagggctagttttacgcgggta

SEQ ID NO: 401514 - DNA, 60 bp, Artificial
  Synthetic oligonucleotide
gataaatgaaggtgcatttatcgaaggtgatgcttatgcattcagatcgggcggttcaaa

SEQ ID NO: 401515 - DNA, 59 bp, Artificial
  Synthetic oligonucleotide
gataaatggacagtccggccaataaagttaccagaaaaggatacatggactgtcaatga

SEQ ID NO: 401516 - DNA, 60 bp, Artificial
  Synthetic oligonucleotide
gataaatggcaaattcgacaggatcatttggtggcccctcaatgtcaatccatgttgtgt

SEQ ID NO: 401517 - DNA, 60 bp, Artificial
  Synthetic oligonucleotide
gataaatggttcgaatcaagtccgcactatcaatatacggaggggcgatagcggagtcat

SEQ ID NO: 401518 - DNA, 59 bp, Artificial
  Synthetic oligonucleotide
gataaattccaaaatcatcgaaagagatgacaacaatcgacagatatcagataccttcg

SEQ ID NO: 401519 - DNA, 60 bp, Artificial
  Synthetic oligonucleotide
gataacaaatctaagttttgatcaattgatctgtcttctgcaactgatagatttcctata

SEQ ID NO: 401520 - DNA, 60 bp, Artificial
  Synthetic oligonucleotide
gataacaagccacataggtcattgacacgcaatcaggaagaaactttgtcctttcttgaa

SEQ ID NO: 401521 - DNA, 55 bp, Artificial
  Synthetic oligonucleotide
gataacaagtcaccttatgttaaggactgtacttgtttctccgaccctgcaactg

SEQ ID NO: 401522 - DNA, 55 bp, Artificial
  Synthetic oligonucleotide
gataacaattgagcaagagttggtaggagagttctgaggcggggtgtcccttggc

SEQ ID NO: 401523 - DNA, 57 bp, Artificial
  Synthetic oligonucleotide
gataacacatcaattctcaattttatagatgtggagttcatacctgtttgggtgagc

SEQ ID NO: 401524 - DNA, 52 bp, Artificial
  Synthetic oligonucleotide
gataacacgtagtagtaactacataccgttgttactgccagtgcatgcaccc

SEQ ID NO: 401525 - DNA, 55 bp, Artificial
  Synthetic oligonucleotide
gataacagaaatggtcccggagagaaacgaacaaggacaaactctatggagtaaa

SEQ ID NO: 401526 - DNA, 60 bp, Artificial
  Synthetic oligonucleotide
gataacagcctgggatggtcaagcagcacttaacgttcataatccgactgctgctaatgc

SEQ ID NO: 401527 - DNA, 58 bp, Artificial
  Synthetic oligonucleotide
gataacagtcaaaagcgagatcgagtacggtatacctttgtttgttagagacgcgcta

SEQ ID NO: 401528 - DNA, 60 bp, Artificial
  Synthetic oligonucleotide
gataacatgagagtcgcaattgaccattactctggtcaattgttgtcactggatatcccc

SEQ ID NO: 401529 - DNA, 56 bp, Artificial
  Synthetic oligonucleotide
gataacatgcctcagtacgttatgcgattttgctagaaaaggctgtgactctctca

SEQ ID NO: 401530 - DNA, 51 bp, Artificial
  Synthetic oligonucleotide
gataacattaatggcgcgtcgcctcatgtatgcttgacgatgatgtacaac

SEQ ID NO: 401531 - DNA, 55 bp, Artificial
  Synthetic oligonucleotide
gataacattagaaacggacatgtcattaatcaactaatggaagccttgatgcagc

SEQ ID NO: 401532 - DNA, 60 bp, Artificial
  Synthetic oligonucleotide
gataacattccatggagctaaggaagtggcactcagctactcaactggtgcacttgccag

SEQ ID NO: 401533 - DNA, 60 bp, Artificial
  Synthetic oligonucleotide
gataacattccatggggccaaagaaatagcactcagttattctgctggtgcacttgcctg

SEQ ID NO: 401534 - DNA, 60 bp, Artificial
  Synthetic oligonucleotide
gataacattccatggggctaaggaggtcgcactcagctactcagccggtgcgcttgccgg

SEQ ID NO: 401535 - DNA, 55 bp, Artificial
  Synthetic oligonucleotide
gataaccacacgacactataacccaggccgcggtgtacatgagtcgccgagttag

SEQ ID NO: 401536 - DNA, 60 bp, Artificial
  Synthetic oligonucleotide
gataaccactgacatctcagaaatgggagcgaactttggagcgcaacgggtcatagatag

SEQ ID NO: 401537 - DNA, 54 bp, Artificial
  Synthetic oligonucleotide
gataaccatatgtgttgggtagccgcaattcctatcgctctagctggcgctcag

SEQ ID NO: 401538 - DNA, 59 bp, Artificial
  Synthetic oligonucleotide
gataacccactttgcggactctttcattgatgctggttctagacctgctttcttacagt

SEQ ID NO: 401539 - DNA, 55 bp, Artificial
  Synthetic oligonucleotide
gataacccatgtaaagttgatctacacacccagtccattgacggtgcttggggct

SEQ ID NO: 401540 - DNA, 52 bp, Artificial
  Synthetic oligonucleotide
gataaccccaatgttttgcaccggtgttttcttagaccggttggcagggacg

SEQ ID NO: 401541 - DNA, 56 bp, Artificial
  Synthetic oligonucleotide
gataaccctaggtgctataacataaagcactttacgcttggaactccaaaggataa

SEQ ID NO: 401542 - DNA, 60 bp, Artificial
  Synthetic oligonucleotide
gataaccctgttcgccctcagcactctgattgccctaattgttcttaactacatgtcagc

SEQ ID NO: 401543 - DNA, 50 bp, Artificial
  Synthetic oligonucleotide
gataacctacggcctagctccgaaaatcgcctcctggtcagctccaatct

SEQ ID NO: 401544 - DNA, 56 bp, Artificial
  Synthetic oligonucleotide
gataacctcccctctgaagcaggggcagaaagacagggaacagggctcacccttag

SEQ ID NO: 401545 - DNA, 60 bp, Artificial
  Synthetic oligonucleotide
gataacctctcagttgtcgaggccacgcttagctcacttaggcaaatcttagctggcaac

SEQ ID NO: 401546 - DNA, 56 bp, Artificial
  Synthetic oligonucleotide
gataacgatctatgccatggtctacattataccggatgcacatggacttcagactg

SEQ ID NO: 401547 - DNA, 57 bp, Artificial
  Synthetic oligonucleotide
gataacgcccgtcggttaatcttttccgatacagttactcagatgcttaaggagaca

SEQ ID NO: 401548 - DNA, 59 bp, Artificial
  Synthetic oligonucleotide
gataacgctaacacacattccgagcgtaacttctattacatggtgtcaactgggaagaa

SEQ ID NO: 401549 - DNA, 55 bp, Artificial
  Synthetic oligonucleotide
gataacggggacggtgagaaaagtgcttctgtacatatgctttagtttaaattcc

SEQ ID NO: 401550 - DNA, 56 bp, Artificial
  Synthetic oligonucleotide
gataacggtgaatggacgaaccgtcaggtacagctcttcttgcggttcccaagccg

SEQ ID NO: 401551 - DNA, 59 bp, Artificial
  Synthetic oligonucleotide
gataacgttgggcctttagcagcttcgatcatagtaagcccacccgtgaatgggactca

SEQ ID NO: 401552 - DNA, 52 bp, Artificial
  Synthetic oligonucleotide
gataacgtttcgtgctgtagaacattgacatccctcgccgtgaacctatcaa

SEQ ID NO: 401553 - DNA, 55 bp, Artificial
  Synthetic oligonucleotide
gataactagttgaaatgtaaggtcatacgtccgtgcgctgccctgaggaacaagg

SEQ ID NO: 401554 - DNA, 56 bp, Artificial
  Synthetic oligonucleotide
gataactcgtcccccccggccgtaccgcagacataccaagtggcccatctacacgc

SEQ ID NO: 401555 - DNA, 60 bp, Artificial
  Synthetic oligonucleotide
gataactgtaccgcacaatgtcaggacattcaggcaaatgcgcgctaacgttggcgaggt

SEQ ID NO: 401556 - DNA, 55 bp, Artificial
  Synthetic oligonucleotide
gataactgtgcagtgttgcctacacatgcagaatgtggtgagatactcaatgttg

SEQ ID NO: 401557 - DNA, 53 bp, Artificial
  Synthetic oligonucleotide
gataactgtttgtgcgaaagatacgctggtcaaatcttttctatcggagacgt

SEQ ID NO: 401558 - DNA, 55 bp, Artificial
  Synthetic oligonucleotide
gataacttcagaggctcaattatttaataagccatattggctgcaacgtgcccag

SEQ ID NO: 401559 - DNA, 53 bp, Artificial
  Synthetic oligonucleotide
gataagaaattcaaaatcctcacgctccaatcagcggccatccgtataatatt

SEQ ID NO: 401560 - DNA, 60 bp, Artificial
  Synthetic oligonucleotide
gataagaatcatttgatcttgatagatgatttaccgtgataccgtcatcatcagcatagc

SEQ ID NO: 401561 - DNA, 55 bp, Artificial
  Synthetic oligonucleotide
gataagaccggagaagtgcgagaaaactgaagacccagcagagttcaagctcctg

SEQ ID NO: 401562 - DNA, 58 bp, Artificial
  Synthetic oligonucleotide
gataagacggagggttgacgtaaaccctggtcacgcagacctcagtgccaaagaagca

SEQ ID NO: 401563 - DNA, 50 bp, Artificial
  Synthetic oligonucleotide
gataagagaaccaaggggaagtgatatagcaggatctactagtaacctgc

SEQ ID NO: 401564 - DNA, 55 bp, Artificial
  Synthetic oligonucleotide
gataagagcaatgggtgtgtctaatgctgtgcaatgtgtatttgccaatgcgttt

SEQ ID NO: 401565 - DNA, 60 bp, Artificial
  Synthetic oligonucleotide
gataagagtaagagcgcgataacaagtcaacaggcaactcgctcgctcggagtaagagaa

SEQ ID NO: 401566 - DNA, 60 bp, Artificial
  Synthetic oligonucleotide
gataagataagcccagcgcagcatgctgcgagagcaaaacgtagattccgtgggacgcgc

SEQ ID NO: 401567 - DNA, 55 bp, Artificial
  Synthetic oligonucleotide
gataagatcttgaccgtcggagctcggaaggggatatcaacggaatgtttcgccg

SEQ ID NO: 401568 - DNA, 52 bp, Artificial
  Synthetic oligonucleotide
gataagatgaaacgatactgcgatgacagtacagtggttgacaggaagctta

SEQ ID NO: 401569 - DNA, 60 bp, Artificial
  Synthetic oligonucleotide
gataagatgagtgacgatgattgtccttatgtcaataatgttgctccattcgggagtaac

SEQ ID NO: 401570 - DNA, 60 bp, Artificial
  Synthetic oligonucleotide
gataagcacatgactcgaacactattaaatcgtatcttgtagacatcagtcgatgtcttg

SEQ ID NO: 401571 - DNA, 55 bp, Artificial
  Synthetic oligonucleotide
gataagcacgtggagatgaggagacccatcgtcgtgaagctctctgcagattctg

SEQ ID NO: 401572 - DNA, 60 bp, Artificial
  Synthetic oligonucleotide
gataagcactattgggatgctataaagtttagatactgtgcaccaccgggttatgcccta

SEQ ID NO: 401573 - DNA, 60 bp, Artificial
  Synthetic oligonucleotide
gataagcagagcaataaggctagtccgtccactatggagcctggtacatccagtcgcgag

SEQ ID NO: 401574 - DNA, 55 bp, Artificial
  Synthetic oligonucleotide
gataagccagacacattatagatacgtgaacacagatgtgtatactagtgcgggg

SEQ ID NO: 401575 - DNA, 55 bp, Artificial
  Synthetic oligonucleotide
gataagccgcgactaagtaaggtagcttgcgccacctcactcagccgggcatccc

SEQ ID NO: 401576 - DNA, 55 bp, Artificial
  Synthetic oligonucleotide
gataagccggattggcgcattactaccaactttcatcaaaaccttgttgaccaaa

SEQ ID NO: 401577 - DNA, 60 bp, Artificial
  Synthetic oligonucleotide
gataagcgaactattgctgaactgactagactctctcgtcttacggatcagccgcacaac

SEQ ID NO: 401578 - DNA, 59 bp, Artificial
  Synthetic oligonucleotide
gataagcgtaaatagtgtcgtcaatgttcgcatcgctcttgaatttaagagcgatgctc

SEQ ID NO: 401579 - DNA, 56 bp, Artificial
  Synthetic oligonucleotide
gataaggacattgttaagaagttgcgtaaatgcggaagtactaatttaactcgtca

SEQ ID NO: 401580 - DNA, 55 bp, Artificial
  Synthetic oligonucleotide
gataaggagggtgtgacatgttagaaggcacgtatagaaatcgtgtgcataacgg

SEQ ID NO: 401581 - DNA, 58 bp, Artificial
  Synthetic oligonucleotide
gataaggcagctgggggacttccactacgtgacgggcatgaccactgacaaccttaaa

SEQ ID NO: 401582 - DNA, 55 bp, Artificial
  Synthetic oligonucleotide
gataaggctgaggtgaagcaatatattttcaatgatcgtacgaagagactcttta

SEQ ID NO: 401583 - DNA, 53 bp, Artificial
  Synthetic oligonucleotide
gataaggtactttcgaagaaggaagaagttgtaacggatagtcaagaagaagt

SEQ ID NO: 401584 - DNA, 60 bp, Artificial
  Synthetic oligonucleotide
gataaggtcatagtcttgacttcagtgatacagctcggacacatccggagaacattaatc

SEQ ID NO: 401585 - DNA, 60 bp, Artificial
  Synthetic oligonucleotide
gataagtcaaagaatacagttagatcttcagactgtaaccactgcaaacatgccaaacat

SEQ ID NO: 401586 - DNA, 59 bp, Artificial
  Synthetic oligonucleotide
gataagtccaccgattttgagtggtgcgattttgttcgctcgttggagttctcagaatc

SEQ ID NO: 401587 - DNA, 58 bp, Artificial
  Synthetic oligonucleotide
gataagtcgcttctcggacttacctgggatgtatgaatactttgatccaaagtccaga

SEQ ID NO: 401588 - DNA, 56 bp, Artificial
  Synthetic oligonucleotide
gataagtctagtgttaattactggttccctaagatgagagatatggtgatagtccc

SEQ ID NO: 401589 - DNA, 55 bp, Artificial
  Synthetic oligonucleotide
gataagtcttccgtcataaccggaaactttgggtcctctggaccaattaatgctc

SEQ ID NO: 401590 - DNA, 56 bp, Artificial
  Synthetic oligonucleotide
gataagtggaaactagttgactttaaccagtacactttactaagcagtagtcacag

SEQ ID NO: 401591 - DNA, 60 bp, Artificial
  Synthetic oligonucleotide
gataagtggatcaattctcctatgttcaacgcgaagttacgactagcccatggagaaatc

SEQ ID NO: 401592 - DNA, 60 bp, Artificial
  Synthetic oligonucleotide
gataagtgtataatggcctttgattatacgaattatgatggtagcatacaccccatttgg

SEQ ID NO: 401593 - DNA, 60 bp, Artificial
  Synthetic oligonucleotide
gataagtgtttgccgggaaacagcactatactcaatgagtatgatgccgtaactatgcaa

SEQ ID NO: 401594 - DNA, 60 bp, Artificial
  Synthetic oligonucleotide
gataagttattgatcgctcttaaatggcaacccttctcctactcattagagccagttgac

SEQ ID NO: 401595 - DNA, 57 bp, Artificial
  Synthetic oligonucleotide
gataagttcacacaatgcacctacgaaaagacatcatatcacatgaatggcaataac

SEQ ID NO: 401596 - DNA, 55 bp, Artificial
  Synthetic oligonucleotide
gataagttgaacatccctgaggattgggtagatcaaataaatcagaacccatcag

SEQ ID NO: 401597 - DNA, 56 bp, Artificial
  Synthetic oligonucleotide
gataagttgacccatgaaatacgcaagttctacgcatggatgatcgaacaggctcc

SEQ ID NO: 401598 - DNA, 60 bp, Artificial
  Synthetic oligonucleotide
gataagtttctcgtggactctattgagcgcgccaggaaggcagctcaagcttgcctaagc

SEQ ID NO: 401599 - DNA, 54 bp, Artificial
  Synthetic oligonucleotide
gataataaaagctggagggttaggttataaatggagtgaaatttcgtataaagc

SEQ ID NO: 401600 - DNA, 58 bp, Artificial
  Synthetic oligonucleotide
gataataaccattggatcaatctgtatggtaattggaatagtcagcttgatgttgcac

SEQ ID NO: 401601 - DNA, 60 bp, Artificial
  Synthetic oligonucleotide
gataataatcggcatacaaatcagaccatcctctacaagtttaacctgcaggggacctgc

SEQ ID NO: 401602 - DNA, 60 bp, Artificial
  Synthetic oligonucleotide
gataatacatctgaattagatgcatcggagttagcagatcttatattgaatgaatggctg

SEQ ID NO: 401603 - DNA, 53 bp, Artificial
  Synthetic oligonucleotide
gataatacatgctccaccaagcctactgatggtgcagttacacagaggtacaa

SEQ ID NO: 401604 - DNA, 54 bp, Artificial
  Synthetic oligonucleotide
gataataccaacttgtacaccgtaccccttccggggattgcaaccactggtagc

SEQ ID NO: 401605 - DNA, 55 bp, Artificial
  Synthetic oligonucleotide
gataatacccttactgtggaattcaggcagtaagttagccaataacctaaactta

SEQ ID NO: 401606 - DNA, 60 bp, Artificial
  Synthetic oligonucleotide
gataatagaaaggaacataacagaaatagtgtatgtgactaacaccactatagagaaaga

SEQ ID NO: 401607 - DNA, 55 bp, Artificial
  Synthetic oligonucleotide
gataatagcgtgtccagcgttctctgtcttgcagggtcttgtgtatcttctcgag

SEQ ID NO: 401608 - DNA, 56 bp, Artificial
  Synthetic oligonucleotide
gataatagggaagaagacctttgttgagacgtatcgacagatacaaatagatctta

SEQ ID NO: 401609 - DNA, 59 bp, Artificial
  Synthetic oligonucleotide
gataatagtaatacctcctatactttgagaagttgtaacacctcaatcattacacaggc

SEQ ID NO: 401610 - DNA, 60 bp, Artificial
  Synthetic oligonucleotide
gataatagtagctataggttgacaagttgtaacacctcaatcattaaacaggcctgtcca

SEQ ID NO: 401611 - DNA, 60 bp, Artificial
  Synthetic oligonucleotide
gataatatacataagtttgcaaacggcggaacatatcgagacggttccaagtgtatcaca

SEQ ID NO: 401612 - DNA, 60 bp, Artificial
  Synthetic oligonucleotide
gataatattagtgcagcccagataactatgtgtccccatgtgattgttgatgtgagacag

SEQ ID NO: 401613 - DNA, 55 bp, Artificial
  Synthetic oligonucleotide
gataatattcataagttttcaaacggtggtaagtatcaagacggaacgaagcgta

SEQ ID NO: 401614 - DNA, 55 bp, Artificial
  Synthetic oligonucleotide
gataatcaacaggtacaccaagaaaatcagctgcacgttcaacggtttctctaga

SEQ ID NO: 401615 - DNA, 50 bp, Artificial
  Synthetic oligonucleotide
gataatcaaccacatctattgagaatgagaactttcaagaatgaagtgac

SEQ ID NO: 401616 - DNA, 56 bp, Artificial
  Synthetic oligonucleotide
gataatcagctcgataagaatgcaaactttttgtggggtcagcgggaataccatgc

SEQ ID NO: 401617 - DNA, 54 bp, Artificial
  Synthetic oligonucleotide
gataatcccagggttgaggttatattagaagatgttatctaaccaacggaaaaa

SEQ ID NO: 401618 - DNA, 55 bp, Artificial
  Synthetic oligonucleotide
gataatcctgtttaataatggcccgtcaattgaatgcaactcgttagttgacgcg

SEQ ID NO: 401619 - DNA, 54 bp, Artificial
  Synthetic oligonucleotide
gataatctatagaacgaatggtcagcaagcaatcggtggtctcacaacagacgc

SEQ ID NO: 401620 - DNA, 55 bp, Artificial
  Synthetic oligonucleotide
gataatctccacagaggtagccttttgacgcaccatcactagggtaaactttgtg

SEQ ID NO: 401621 - DNA, 54 bp, Artificial
  Synthetic oligonucleotide
gataatcttgtctttcagatggcgttttggcagcccggacaaaagctgtatttg

SEQ ID NO: 401622 - DNA, 58 bp, Artificial
  Synthetic oligonucleotide
gataatgaagaacttttcgaaaagaacagtagaatactcactgtttgcattcaaggcg

SEQ ID NO: 401623 - DNA, 50 bp, Artificial
  Synthetic oligonucleotide
gataatgaattactaaccctcatctatcgtaaatatccacagtatcttga

SEQ ID NO: 401624 - DNA, 59 bp, Artificial
  Synthetic oligonucleotide
gataatgacaatagacctagatcctgtaatatacgattcaaaattcgaaaagcaactag

SEQ ID NO: 401625 - DNA, 58 bp, Artificial
  Synthetic oligonucleotide
gataatgagaggctcgtatgggcttgcagaggggtggagataggaaggggccaaccct

SEQ ID NO: 401626 - DNA, 50 bp, Artificial
  Synthetic oligonucleotide
gataatgagccacatcttttgaaattgagagctttcgaatctcccataac

SEQ ID NO: 401627 - DNA, 60 bp, Artificial
  Synthetic oligonucleotide
gataatgagtatatagccacgcacatgtacccggtatttttacgtctcgtgaaggagcag

SEQ ID NO: 401628 - DNA, 60 bp, Artificial
  Synthetic oligonucleotide
gataatgatcgtttatcgatcattatcataggttaggtctagaggtctagatagattagc

SEQ ID NO: 401629 - DNA, 55 bp, Artificial
  Synthetic oligonucleotide
gataatgatgaagtgatacacgataagttgatagacatatctgtctctaggtata

SEQ ID NO: 401630 - DNA, 50 bp, Artificial
  Synthetic oligonucleotide
gataatgccgtgaaaggaccccagtatgaatatatattcgactgggcgtc

SEQ ID NO: 401631 - DNA, 50 bp, Artificial
  Synthetic oligonucleotide
gataatgcgaataaatcgcaaaatgttggaccttctactcttccgaggtc

SEQ ID NO: 401632 - DNA, 57 bp, Artificial
  Synthetic oligonucleotide
gataatggcttggggatgcgctgtgttagtcggaagggtcgggcgctattataaccc

SEQ ID NO: 401633 - DNA, 54 bp, Artificial
  Synthetic oligonucleotide
gataatggtaatgaaagtgatactaatactacatataggttaataagttgtaac

SEQ ID NO: 401634 - DNA, 55 bp, Artificial
  Synthetic oligonucleotide
gataatggtctatccggtaaaggatctgcccttaagttatttgtgacccagtcag

SEQ ID NO: 401635 - DNA, 55 bp, Artificial
  Synthetic oligonucleotide
gataatggtgtccgcaacattaacgatggctcctggagagttgctgaactatctg

SEQ ID NO: 401636 - DNA, 55 bp, Artificial
  Synthetic oligonucleotide
gataatggtttggtggtcaaggtacgtagtagagtcccacatattcgcacgtatg

SEQ ID NO: 401637 - DNA, 54 bp, Artificial
  Synthetic oligonucleotide
gataatgtatccttttagaaataaacgtggttatttctttagtcatagacgatt

SEQ ID NO: 401638 - DNA, 57 bp, Artificial
  Synthetic oligonucleotide
gataatgtatccttttagaagtaaacgtggttattgctttagtcatcgacgatctac

SEQ ID NO: 401639 - DNA, 60 bp, Artificial
  Synthetic oligonucleotide
gataatgtatgtgccaccaggtggcccggtaccagataaggttgactcatatgtgtggca

SEQ ID NO: 401640 - DNA, 60 bp, Artificial
  Synthetic oligonucleotide
gataattcaagaggaatgaattatgagactacaatgtttaataaggtggcagtgctaatt

SEQ ID NO: 401641 - DNA, 60 bp, Artificial
  Synthetic oligonucleotide
gataattcatcagaatacatagaaaattggaacttacaaaatagaagacagcgcaccgga

SEQ ID NO: 401642 - DNA, 55 bp, Artificial
  Synthetic oligonucleotide
gataattctaaaggttttgtacctcaacctgggacatcaaaatctattgcgactg

SEQ ID NO: 401643 - DNA, 51 bp, Artificial
  Synthetic oligonucleotide
gataattctgacctaactaggaaataatcatctggtgagcagtacttggga

SEQ ID NO: 401644 - DNA, 60 bp, Artificial
  Synthetic oligonucleotide
gataatttgtttgatgtcatacaggatatgagagaaacgcacaaacggccgattgagtat

SEQ ID NO: 401645 - DNA, 55 bp, Artificial
  Synthetic oligonucleotide
gatacaaagaacaggcccatttgaagttacattagactcatacttaagcacacaa

SEQ ID NO: 401646 - DNA, 57 bp, Artificial
  Synthetic oligonucleotide
gatacaaagcataatacaaggcgaaaaccttggtgattcaattaagcaggcggttat

SEQ ID NO: 401647 - DNA, 57 bp, Artificial
  Synthetic oligonucleotide
gatacaaagtatgtcgacttaccaaaaggtgaaactgatttattgtatatggctacg

SEQ ID NO: 401648 - DNA, 53 bp, Artificial
  Synthetic oligonucleotide
gatacaaagtcctggtgctaaacccgtcggttgcagctaccttagggtttggg

SEQ ID NO: 401649 - DNA, 55 bp, Artificial
  Synthetic oligonucleotide
gatacaacatgggttataccagagtggagaattgaatgtcttgctacgacttatg

SEQ ID NO: 401650 - DNA, 52 bp, Artificial
  Synthetic oligonucleotide
gatacaacctccgcagctccggtcaagcctcctcgtagatgggatcgagtga

SEQ ID NO: 401651 - DNA, 58 bp, Artificial
  Synthetic oligonucleotide
gatacaacggattacaaattcctagcaggtttcaccgcaggcttcgtttcatcgatac

SEQ ID NO: 401652 - DNA, 55 bp, Artificial
  Synthetic oligonucleotide
gatacaacgtcacaacatcctatcccaactccgggacttgagccagcgcacgcgg

SEQ ID NO: 401653 - DNA, 52 bp, Artificial
  Synthetic oligonucleotide
gatacaagataacagtgacataaaggtagtaccaaggaggaaagcaaaaatc

SEQ ID NO: 401654 - DNA, 60 bp, Artificial
  Synthetic oligonucleotide
gatacaagtgtgaatctaacaacgcatacaggttactcttgttgggttctggatgttatg

SEQ ID NO: 401655 - DNA, 56 bp, Artificial
  Synthetic oligonucleotide
gatacaatatttgcgtaacgcttaaaggtgacacttagcgagggggaatcctaata

SEQ ID NO: 401656 - DNA, 55 bp, Artificial
  Synthetic oligonucleotide
gatacaatggactcacattaagaggagttacaatgaggccaacatcccaggctca

SEQ ID NO: 401657 - DNA, 59 bp, Artificial
  Synthetic oligonucleotide
gatacaatgtaaacgctatagagcgtcgtattacaataaaggagtacatggactaatgt

SEQ ID NO: 401658 - DNA, 55 bp, Artificial
  Synthetic oligonucleotide
gatacaattgacccagggtcatcctgcaaaacacgcaggtttccgatagtggtgc

SEQ ID NO: 401659 - DNA, 59 bp, Artificial
  Synthetic oligonucleotide
gatacaattgcatacctattcttcgattacatcttgcactatgtcgagtgtgtatggtc

SEQ ID NO: 401660 - DNA, 60 bp, Artificial
  Synthetic oligonucleotide
gatacaattgttcaaatgaaagtattgtgttacgagtcgatgatattattaatgatacct

SEQ ID NO: 401661 - DNA, 60 bp, Artificial
  Synthetic oligonucleotide
gatacacaacgcgcactagacaggaccgccaacctggttcactcccgcgcagagtccaac

SEQ ID NO: 401662 - DNA, 58 bp, Artificial
  Synthetic oligonucleotide
gatacacaacgtttggtctgggcatgtgtaggccttgaaataggtaggggacagccat

SEQ ID NO: 401663 - DNA, 58 bp, Artificial
  Synthetic oligonucleotide
gatacacacaaaactcggcagcctacgggtcatgacactccagaccctggacggggaa

SEQ ID NO: 401664 - DNA, 60 bp, Artificial
  Synthetic oligonucleotide
gatacacacactagttcgcgatatggcacgtacacggacaaggtctcatgttaacagctc

SEQ ID NO: 401665 - DNA, 55 bp, Artificial
  Synthetic oligonucleotide
gatacacaccaatgaacacgatcctcatagtctattcgctgaagtgacactcgat

SEQ ID NO: 401666 - DNA, 60 bp, Artificial
  Synthetic oligonucleotide
gatacacagacaaagatacctacaccagtgcaggatttctatcgtgttggtatcaaacat

SEQ ID NO: 401667 - DNA, 60 bp, Artificial
  Synthetic oligonucleotide
gatacacataccgatgccacaggggtgacacgcaaattcaaacgagaagatcatttgagc

SEQ ID NO: 401668 - DNA, 55 bp, Artificial
  Synthetic oligonucleotide
gatacacatggattaattgttgagtgctatgagcaggtcggagatttaagagctg

SEQ ID NO: 401669 - DNA, 55 bp, Artificial
  Synthetic oligonucleotide
gatacaccactcgatggtgacatactcttccctgatcaagatgacattgaactcg

SEQ ID NO: 401670 - DNA, 60 bp, Artificial
  Synthetic oligonucleotide
gatacaccatggacacagtcaacaggacacatcaatattcagaaaaggggaaatggacaa

SEQ ID NO: 401671 - DNA, 57 bp, Artificial
  Synthetic oligonucleotide
gatacacccagtgcttttgacgactagtcaatttaagaggtacttttggtacagtga

SEQ ID NO: 401672 - DNA, 56 bp, Artificial
  Synthetic oligonucleotide
gatacaccttacgagttggttgatatagattgggccggcgttacatacgttatcct

SEQ ID NO: 401673 - DNA, 60 bp, Artificial
  Synthetic oligonucleotide
gatacactatgtataggttaccatgcaaataattcaactgacactgttgatacaatacta

SEQ ID NO: 401674 - DNA, 57 bp, Artificial
  Synthetic oligonucleotide
gatacactcagtacgaaacaagagtagtgccaaacggttccagaaaacttgctattg

SEQ ID NO: 401675 - DNA, 60 bp, Artificial
  Synthetic oligonucleotide
gatacactcgagtcgttgtgtatctgatgtcctctacttggtacgtcttgaaatagaggg

SEQ ID NO: 401676 - DNA, 59 bp, Artificial
  Synthetic oligonucleotide
gatacagaactctcctttacaataactggagacaacaccaaatggaatgaaaatcagaa

SEQ ID NO: 401677 - DNA, 54 bp, Artificial
  Synthetic oligonucleotide
gatacagaccccttttgtcccttgctagttactggacttatccagtttgttccc

SEQ ID NO: 401678 - DNA, 60 bp, Artificial
  Synthetic oligonucleotide
gatacagacgctgaggatttgattgccaaatcgattagggatgtgaatactgctagcgac

SEQ ID NO: 401679 - DNA, 56 bp, Artificial
  Synthetic oligonucleotide
gatacagcaccatatgctacgttgataaataactctgagccactaactagataatg

SEQ ID NO: 401680 - DNA, 51 bp, Artificial
  Synthetic oligonucleotide
gatacagcagacgaaggagcagattatttatgttcgattgtgtatggagta

SEQ ID NO: 401681 - DNA, 59 bp, Artificial
  Synthetic oligonucleotide
gatacagcagcagtaagtctccacgggggccctgcaacaaacagggattacctacggca

SEQ ID NO: 401682 - DNA, 60 bp, Artificial
  Synthetic oligonucleotide
gatacagcatatgccaattcgtcacagcaggagacgttcttaacttcaacgttatgctta

SEQ ID NO: 401683 - DNA, 54 bp, Artificial
  Synthetic oligonucleotide
gatacagcctcagtgtgactatgcacacatacaggtgctgtcctgccaatgggg

SEQ ID NO: 401684 - DNA, 60 bp, Artificial
  Synthetic oligonucleotide
gatacagctgatgttcgtattggcgtatcgcaccaaatctaactatgaagacggtcttgg

SEQ ID NO: 401685 - DNA, 60 bp, Artificial
  Synthetic oligonucleotide
gatacaggctgtaataaacagtttggataagttcaagatatattatcttgataagaaaga

SEQ ID NO: 401686 - DNA, 55 bp, Artificial
  Synthetic oligonucleotide
gatacagtaaggtatcctaaaggtgtggaccgatcgtttggctcatttgatagcc

SEQ ID NO: 401687 - DNA, 60 bp, Artificial
  Synthetic oligonucleotide
gatacagtacaggggattgcattttcaggtagtcctctttatacatctactggtgtcttg

SEQ ID NO: 401688 - DNA, 56 bp, Artificial
  Synthetic oligonucleotide
gatacagtactagaaaagaatgtaacagtaacccactctgttaaccttctagaaga

SEQ ID NO: 401689 - DNA, 55 bp, Artificial
  Synthetic oligonucleotide
gatacagtagttgaaggtgatacggtattagaatgaacacctggaacggaacccc

SEQ ID NO: 401690 - DNA, 58 bp, Artificial
  Synthetic oligonucleotide
gatacagtcgcgaagagtctgggacgtaacgaccacgttaatgacttcgcctctacga

SEQ ID NO: 401691 - DNA, 55 bp, Artificial
  Synthetic oligonucleotide
gatacagtggtcatggaggttgcgttctctgggaccaaaccctgtaggatcccgg

SEQ ID NO: 401692 - DNA, 60 bp, Artificial
  Synthetic oligonucleotide
gatacagtgtttgatatggttgagtgagctaaaaacttaacacactagtcatgatgtgac

SEQ ID NO: 401693 - DNA, 55 bp, Artificial
  Synthetic oligonucleotide
gatacagtttgcctaaagtcgaaatatgtataacgttaagttttacatgctcccc

SEQ ID NO: 401694 - DNA, 60 bp, Artificial
  Synthetic oligonucleotide
gatacataatgcaacgatatgactacttctctctgaatcgtgagacgggagattcgatat

SEQ ID NO: 401695 - DNA, 55 bp, Artificial
  Synthetic oligonucleotide
gatacatatcgaccccggatgagggaaaggcgttagagcgacttataggatcaag

SEQ ID NO: 401696 - DNA, 55 bp, Artificial
  Synthetic oligonucleotide
gatacatcacttgctggtatcaaactgacttgattacacctccaaacacagcccc

SEQ ID NO: 401697 - DNA, 60 bp, Artificial
  Synthetic oligonucleotide
gatacatctattaggacatttggtactagaagatgtgttctctcagcgtttcctgacact

SEQ ID NO: 401698 - DNA, 60 bp, Artificial
  Synthetic oligonucleotide
gatacatgataatctggctgattctgagactattgaacaggtagctgaatggatacttaa

SEQ ID NO: 401699 - DNA, 55 bp, Artificial
  Synthetic oligonucleotide
gatacattcacaggaatcgaaggtaaaggtttctacgaacgtgaagaggacagac

SEQ ID NO: 401700 - DNA, 55 bp, Artificial
  Synthetic oligonucleotide
gatacattctggagtactcggagcagacaccggggaaacgagtggggatgtcggc

SEQ ID NO: 401701 - DNA, 53 bp, Artificial
  Synthetic oligonucleotide
gatacattgagaatctgcttggagaagatgaaaagaagcacttcgtagaatgg

SEQ ID NO: 401702 - DNA, 55 bp, Artificial
  Synthetic oligonucleotide
gataccaaaagggactggaggtaaacagatctctaatcaaatcaagagcctgcaa

SEQ ID NO: 401703 - DNA, 59 bp, Artificial
  Synthetic oligonucleotide
gataccaacagcggggtcacgagcgcttgcacctacaatggtggatcgtccttttacag

SEQ ID NO: 401704 - DNA, 58 bp, Artificial
  Synthetic oligonucleotide
gataccaagtcgaagaatctgttattcgtgcactggtactttccctcgaattgaataa

SEQ ID NO: 401705 - DNA, 55 bp, Artificial
  Synthetic oligonucleotide
gataccaagttaatgtcggttcagagcgtcttaaacgacgtacaacggaggattg

SEQ ID NO: 401706 - DNA, 60 bp, Artificial
  Synthetic oligonucleotide
gataccaatgctgtggaatgagatggcctcacggaaacggagtggccaacgctcggtaga

SEQ ID NO: 401707 - DNA, 53 bp, Artificial
  Synthetic oligonucleotide
gataccacattccgtagcccgcaagatgttgtgccgcttgtgcgtttaatggc

SEQ ID NO: 401708 - DNA, 60 bp, Artificial
  Synthetic oligonucleotide
gataccactatgatgctgattactctcggtgggattcaacacaacagagagccgtgttgg

SEQ ID NO: 401709 - DNA, 51 bp, Artificial
  Synthetic oligonucleotide
gataccactcgtagcactaacatgactttatgtgctgaagttacaaaggaa

SEQ ID NO: 401710 - DNA, 56 bp, Artificial
  Synthetic oligonucleotide
gataccagaaaggagagtagtggctcaaggaccagaagaagagtttggtaggtccc

SEQ ID NO: 401711 - DNA, 60 bp, Artificial
  Synthetic oligonucleotide
gataccagcaacaagaagttgtcatcatggatgacttaaaccagaacccagatggtcagg

SEQ ID NO: 401712 - DNA, 55 bp, Artificial
  Synthetic oligonucleotide
gataccagtgaagatcaattcaagatccactacaagggtaacggagagtccaaga

SEQ ID NO: 401713 - DNA, 55 bp, Artificial
  Synthetic oligonucleotide
gataccatacctcccgaagacgaaggacataaactgtggaagtttgatcggtgag

SEQ ID NO: 401714 - DNA, 60 bp, Artificial
  Synthetic oligonucleotide
gataccatattaatgaagacgtcacccaagtatacgccggtgacgacatggctatggacc

SEQ ID NO: 401715 - DNA, 56 bp, Artificial
  Synthetic oligonucleotide
gataccatgagactaaccccaagatcaacccctagggataccgttcatcgggtgga

SEQ ID NO: 401716 - DNA, 60 bp, Artificial
  Synthetic oligonucleotide
gataccatggtatcaagtactcttgaactgagaagcaggtactgggccataaggaccaga

SEQ ID NO: 401717 - DNA, 58 bp, Artificial
  Synthetic oligonucleotide
gataccatgttgactattaaaggaaaattggctcaaaacgataaacgagaatcacagc

SEQ ID NO: 401718 - DNA, 55 bp, Artificial
  Synthetic oligonucleotide
gataccattggaaaagttgagacttggggttggacgcagaagctcgctgtctgac

SEQ ID NO: 401719 - DNA, 58 bp, Artificial
  Synthetic oligonucleotide
gataccatttagttagagacaggaacagctatatttggccagggcaggaaataactac

SEQ ID NO: 401720 - DNA, 55 bp, Artificial
  Synthetic oligonucleotide
gatacccaaaggcactggggatatattggtggactgctcaggagggcagcaacac

SEQ ID NO: 401721 - DNA, 55 bp, Artificial
  Synthetic oligonucleotide
gatacccacaatcaattctgacggagtggtttcaaaggagaaattgagagtggat

SEQ ID NO: 401722 - DNA, 50 bp, Artificial
  Synthetic oligonucleotide
gatacccacctaatactgaagatagctcaaagtagtcatatgttgggtca

SEQ ID NO: 401723 - DNA, 51 bp, Artificial
  Synthetic oligonucleotide
gatacccagcaacatggcttggatttgaattacatccagataaatggagat

SEQ ID NO: 401724 - DNA, 59 bp, Artificial
  Synthetic oligonucleotide
gatacccatatgggcacgcccggactacaatccaccactgttagagtcttggaaggatc

SEQ ID NO: 401725 - DNA, 59 bp, Artificial
  Synthetic oligonucleotide
gatacccatcagaaaccatatcaattgcagcaggttggttggagctagaataggtttag

SEQ ID NO: 401726 - DNA, 52 bp, Artificial
  Synthetic oligonucleotide
gataccccaaaggttaaggctaaaactcctctatacgtcttcaagagtcccc

SEQ ID NO: 401727 - DNA, 54 bp, Artificial
  Synthetic oligonucleotide
gataccccaacaataccattggagtggcacccagaattaccttcacaaggaatt

SEQ ID NO: 401728 - DNA, 55 bp, Artificial
  Synthetic oligonucleotide
gataccccactggtagacctggcagatgaggcaggacttaccccactggcgacag

SEQ ID NO: 401729 - DNA, 54 bp, Artificial
  Synthetic oligonucleotide
gatacccgcaataggataatagaggtggaaaatcctcctaatcctacaaacggg

SEQ ID NO: 401730 - DNA, 56 bp, Artificial
  Synthetic oligonucleotide
gataccctacaacgtttctacgccctcgtgcctgtctacatgcaccgctgggagcg

SEQ ID NO: 401731 - DNA, 56 bp, Artificial
  Synthetic oligonucleotide
gataccctggcgtcgtggctttcacgtggccggtcgaccggtctgagttcccggca

SEQ ID NO: 401732 - DNA, 56 bp, Artificial
  Synthetic oligonucleotide
gataccctgggtcaacgtgactcctgacgggctgtgttaccccacctctcccagga

SEQ ID NO: 401733 - DNA, 55 bp, Artificial
  Synthetic oligonucleotide
gataccctttccgttgttatatgtgatcgtcatctgttgcttgttggatctatgg

SEQ ID NO: 401734 - DNA, 58 bp, Artificial
  Synthetic oligonucleotide
gataccgaatctggacgctgcgatccgtggccacggcccctcctggttacttgtcaag

SEQ ID NO: 401735 - DNA, 55 bp, Artificial
  Synthetic oligonucleotide
gataccgactgataaccgtaaactcgagtcatcgtgagaccagatgacagtatct

SEQ ID NO: 401736 - DNA, 60 bp, Artificial
  Synthetic oligonucleotide
gataccgaggcgaatccagtagaccaaccaaccgagcctgatgtagccgcgtgcaggttc

SEQ ID NO: 401737 - DNA, 60 bp, Artificial
  Synthetic oligonucleotide
gataccgcctcagctctatatcgggaagccttagagtcttctgagcattgctcacctcac

SEQ ID NO: 401738 - DNA, 57 bp, Artificial
  Synthetic oligonucleotide
gataccgctttatgatgcggtcaaatgcatgaaaacgttctttgggtggaaggaacc

SEQ ID NO: 401739 - DNA, 55 bp, Artificial
  Synthetic oligonucleotide
gataccggttctgaacaccgggagcggtcacaagagagtaggtacaacgaaggag

SEQ ID NO: 401740 - DNA, 58 bp, Artificial
  Synthetic oligonucleotide
gataccgttcccacagttgtttgggtccataaacgctagctgtgcggatttgtctata

SEQ ID NO: 401741 - DNA, 54 bp, Artificial
  Synthetic oligonucleotide
gatacctaaaggcacaagcggcaagcaaatttcgaaccaaattaaaaaacttca

SEQ ID NO: 401742 - DNA, 55 bp, Artificial
  Synthetic oligonucleotide
gatacctacgcagccgtactcgtatctcgtagcgcgtagctaatgtcgtagctac

SEQ ID NO: 401743 - DNA, 57 bp, Artificial
  Synthetic oligonucleotide
gatacctatgggaccgggtagagtattttatgcaacaggacaaataataggagatat

SEQ ID NO: 401744 - DNA, 51 bp, Artificial
  Synthetic oligonucleotide
gatacctatgggtctatgtttcttattagatctagacgattctatcactgg

SEQ ID NO: 401745 - DNA, 60 bp, Artificial
  Synthetic oligonucleotide
gatacctcatcatcttcggatacctcatcatcttcggtctctgtaacttccgttacggat

SEQ ID NO: 401746 - DNA, 52 bp, Artificial
  Synthetic oligonucleotide
gatacctctggatcgtcgttcgagcagatatcgctatcagactccgagccgg

SEQ ID NO: 401747 - DNA, 55 bp, Artificial
  Synthetic oligonucleotide
gatacctgatggatcccatttatacttggctgaaggcagtggcgcttctatgaca

SEQ ID NO: 401748 - DNA, 53 bp, Artificial
  Synthetic oligonucleotide
gatacctggatgtttaacacacaaggaatcttcccagactggcagaactacac

SEQ ID NO: 401749 - DNA, 50 bp, Artificial
  Synthetic oligonucleotide
gataccttcgtactatatagaggtgtgtaccacagaggtgtagacaagga

SEQ ID NO: 401750 - DNA, 57 bp, Artificial
  Synthetic oligonucleotide
gataccttttgaatgtgatacgttaacactttcgttatagctcttatcaaggttatc

SEQ ID NO: 401751 - DNA, 60 bp, Artificial
  Synthetic oligonucleotide
gatacgaacgaaaagggtggattatcatacgcgacgattaaatatgctactgagaccaca

SEQ ID NO: 401752 - DNA, 55 bp, Artificial
  Synthetic oligonucleotide
gatacgaagttgtatctgaggttagttatgttgatgtaccaaagctagatggcta

SEQ ID NO: 401753 - DNA, 52 bp, Artificial
  Synthetic oligonucleotide
gatacgaatgtggatccagtctctgttcttatggggaacgaatcagcattca

SEQ ID NO: 401754 - DNA, 55 bp, Artificial
  Synthetic oligonucleotide
gatacgaccccatcctcttccaccgaatccaccggtgttgttaattcccctgcga

SEQ ID NO: 401755 - DNA, 58 bp, Artificial
  Synthetic oligonucleotide
gatacgacgaaggttccacgtttctactacatccgagctatcgccgatagcaggaatt

SEQ ID NO: 401756 - DNA, 58 bp, Artificial
  Synthetic oligonucleotide
gatacgactttgagagagagggatactcactagtcggaatcgatcctttccgtcttct

SEQ ID NO: 401757 - DNA, 59 bp, Artificial
  Synthetic oligonucleotide
gatacgactttgagagagagggatactccctagttgggattgatcctttccgtctgctc

SEQ ID NO: 401758 - DNA, 55 bp, Artificial
  Synthetic oligonucleotide
gatacgaggacaatcatcagtaccacggaaatagatcactttaggctctttagac

SEQ ID NO: 401759 - DNA, 60 bp, Artificial
  Synthetic oligonucleotide
gatacgaggcccaaccatgactacccctgagcgtgcagctctggttgagcgggccgcgca

SEQ ID NO: 401760 - DNA, 51 bp, Artificial
  Synthetic oligonucleotide
gatacgatcgcttcgggcgttgacatgccctgcaatgcaaggcgattgtta

SEQ ID NO: 401761 - DNA, 60 bp, Artificial
  Synthetic oligonucleotide
gatacgatgatggttgacgtggaaggatctacatcgctctctaacaggcgatataattgt

SEQ ID NO: 401762 - DNA, 55 bp, Artificial
  Synthetic oligonucleotide
gatacgattgggtacgatcttgtacgcgatttaatttcagtaattcgtgctcgca

SEQ ID NO: 401763 - DNA, 60 bp, Artificial
  Synthetic oligonucleotide
gatacgcaagtctgatgcgtctggcggaagagccatggtcagatggagtatcatcaaatg

SEQ ID NO: 401764 - DNA, 60 bp, Artificial
  Synthetic oligonucleotide
gatacgcaggggataggatgacgtacggccgcaagatgtactggacactgttcgcagaca

SEQ ID NO: 401765 - DNA, 55 bp, Artificial
  Synthetic oligonucleotide
gatacgcatatgttgcacaaatccgtaggccaataccaagtttccaagaacgact

SEQ ID NO: 401766 - DNA, 59 bp, Artificial
  Synthetic oligonucleotide
gatacgctgatggtagacgtggaaggatccattcctctctctaaccggcgtattaattg

SEQ ID NO: 401767 - DNA, 59 bp, Artificial
  Synthetic oligonucleotide
gatacgctgttgaaacactggagttcgaaattcagccaatgtgccccgcaaacacgggc

SEQ ID NO: 401768 - DNA, 58 bp, Artificial
  Synthetic oligonucleotide
gatacgcttataaacattggtgaagttaacgtagcactccgcacctgtgaatattacg

SEQ ID NO: 401769 - DNA, 53 bp, Artificial
  Synthetic oligonucleotide
gatacgcttggttacgagttaatacgggatttaatttgtattgtccgttctcg

SEQ ID NO: 401770 - DNA, 60 bp, Artificial
  Synthetic oligonucleotide
gatacggacagatctcggtgacctaatatctgtcgtatacgattctggatcaaaaatcct

SEQ ID NO: 401771 - DNA, 60 bp, Artificial
  Synthetic oligonucleotide
gatacggaccagcattgagcatcaacgaattgagcaatcttgcgaaaggggagaaagcta

SEQ ID NO: 401772 - DNA, 59 bp, Artificial
  Synthetic oligonucleotide
gatacggaggcagccttctttaggaacatgttaccatttcatatggttagattcgcacg

SEQ ID NO: 401773 - DNA, 60 bp, Artificial
  Synthetic oligonucleotide
gatacggatactccaagatacagttactattagtaacgatctgtcagatctgtatcttgg

SEQ ID NO: 401774 - DNA, 54 bp, Artificial
  Synthetic oligonucleotide
gatacggcctaacgttgtttcttgcgtgataatatagctgatcgcttcacgttc

SEQ ID NO: 401775 - DNA, 55 bp, Artificial
  Synthetic oligonucleotide
gatacgggaattggtccagcttttcaccggcgctgaccaattcaaccagctgctt

SEQ ID NO: 401776 - DNA, 59 bp, Artificial
  Synthetic oligonucleotide
gatacgggagcgacccattctgtagtgcagaaacctgtggggcctatgtctaaggaatc

SEQ ID NO: 401777 - DNA, 55 bp, Artificial
  Synthetic oligonucleotide
gatacgggttgaaaagagggccttctacggaaggagtgcctaagtctatgaggga

SEQ ID NO: 401778 - DNA, 60 bp, Artificial
  Synthetic oligonucleotide
gatacgtaaacaacagcatgacgtaattaatgaacccctggctgagatcactgatggtgt

SEQ ID NO: 401779 - DNA, 54 bp, Artificial
  Synthetic oligonucleotide
gatacgtaacgaggaggtggagtggcggttcactacccggagtcgctactcccc

SEQ ID NO: 401780 - DNA, 60 bp, Artificial
  Synthetic oligonucleotide
gatacgtaactctgagatgggacggagaagttctagatgctaattgcgtcaggagtttat

SEQ ID NO: 401781 - DNA, 52 bp, Artificial
  Synthetic oligonucleotide
gatacgtatgttggctcaaagatttattcgcaagacaaatatagaatacttg

SEQ ID NO: 401782 - DNA, 55 bp, Artificial
  Synthetic oligonucleotide
gatacgtcgattgtttggcctatattatgtcaatgtacgtacccactagtcaggc

SEQ ID NO: 401783 - DNA, 59 bp, Artificial
  Synthetic oligonucleotide
gatacgtctaagttaactccgtcactagctgcttgtacttcattatactttcctgagag

SEQ ID NO: 401784 - DNA, 60 bp, Artificial
  Synthetic oligonucleotide
gatacgtgatactattaggttgtatgaggagtccaaacatgaggtttgtaaggagactgc

SEQ ID NO: 401785 - DNA, 54 bp, Artificial
  Synthetic oligonucleotide
gatacgtgatagcccaacgttattaacattttgtagcccttgcgagataaggta

SEQ ID NO: 401786 - DNA, 50 bp, Artificial
  Synthetic oligonucleotide
gatacgtgcggaaacacggcacgatagacgggctccttcatgatcgactt

SEQ ID NO: 401787 - DNA, 60 bp, Artificial
  Synthetic oligonucleotide
gatacgtggcaatcacaacctagagacgaagatgagctccgaatctatgaagcacaggca

SEQ ID NO: 401788 - DNA, 60 bp, Artificial
  Synthetic oligonucleotide
gatacgtgttggagatacatagatgattatctaagaaatttattagatgggaatcccata

SEQ ID NO: 401789 - DNA, 60 bp, Artificial
  Synthetic oligonucleotide
gatacgttactgggcaaagtattaaaccttccagcgcatatatcagcgatgtcattatct

SEQ ID NO: 401790 - DNA, 60 bp, Artificial
  Synthetic oligonucleotide
gatacgttcaaaagtggcaccaatttaaacaaggagatgtacaatagatgtatcacggca

SEQ ID NO: 401791 - DNA, 50 bp, Artificial
  Synthetic oligonucleotide
gatactaaactagttacaggtatagcggcgaagatcgaggctatagagga

SEQ ID NO: 401792 - DNA, 56 bp, Artificial
  Synthetic oligonucleotide
gatactaacaaacctcgtgtcggaggtgagctttgggttccatctctaacagaggg

SEQ ID NO: 401793 - DNA, 55 bp, Artificial
  Synthetic oligonucleotide
gatactaacactcctaaaaccggaggtgagctctgggttccctctctaacagagg

SEQ ID NO: 401794 - DNA, 54 bp, Artificial
  Synthetic oligonucleotide
gatactaacgtagtttaggctcagtctttcttgcactatgcgcgagtagtaaag

SEQ ID NO: 401795 - DNA, 55 bp, Artificial
  Synthetic oligonucleotide
gatactaagatggagtgagtccaagaatatagatcgacgtcttactcacatgttt

SEQ ID NO: 401796 - DNA, 60 bp, Artificial
  Synthetic oligonucleotide
gatactaatctcttattcttctgatttagtcatataccgaacaaacacaaaaggtgatga

SEQ ID NO: 401797 - DNA, 57 bp, Artificial
  Synthetic oligonucleotide
gatactaatgcatgaacactgtaagcagagacacttacagtgaagaactcggtatcg

SEQ ID NO: 401798 - DNA, 55 bp, Artificial
  Synthetic oligonucleotide
gatactaattacacctagactatctaagtacttcagtacatgggttctaaaaacc

SEQ ID NO: 401799 - DNA, 55 bp, Artificial
  Synthetic oligonucleotide
gatactacaagtaatggaatcggatgctcaccagctagtacagaaacttatgaag

SEQ ID NO: 401800 - DNA, 60 bp, Artificial
  Synthetic oligonucleotide
gatactactaactgacgatccggagatagaattgtcattatatcctgctggaagaaccag

SEQ ID NO: 401801 - DNA, 60 bp, Artificial
  Synthetic oligonucleotide
gatactacttctgggagtatgtagaacgtacaggtcagaggcaacttgcgtcacaggcca

SEQ ID NO: 401802 - DNA, 59 bp, Artificial
  Synthetic oligonucleotide
gatactaggtctagcaaacctggtgttgtactttcggtggatgggccctcagcgcctca

SEQ ID NO: 401803 - DNA, 60 bp, Artificial
  Synthetic oligonucleotide
gatactatacatgattttcagagtcctctgcactcacatacctcctttgccaccacacgt

SEQ ID NO: 401804 - DNA, 55 bp, Artificial
  Synthetic oligonucleotide
gatactataccgtagccccgaatgatttggatgatcaactcgtgagatgcactgg

SEQ ID NO: 401805 - DNA, 60 bp, Artificial
  Synthetic oligonucleotide
gatactatcgaccaaattagtgatatcatataaggaatctgctggtgcgcatacgtgtgt

SEQ ID NO: 401806 - DNA, 59 bp, Artificial
  Synthetic oligonucleotide
gatactatcttggcattggtattccctcaagagccgttacttgagtttccaccagtaca

SEQ ID NO: 401807 - DNA, 58 bp, Artificial
  Synthetic oligonucleotide
gatactattaccaggaaaggaggaagattggatcttagagttgcaaataggaaatata

SEQ ID NO: 401808 - DNA, 60 bp, Artificial
  Synthetic oligonucleotide
gatactattcggttgttattccagttgatgcgtccaccaaatatgacaccagctgttaat

SEQ ID NO: 401809 - DNA, 55 bp, Artificial
  Synthetic oligonucleotide
gatactattcgtgacaaggcgaagtcgtttgcgtctaccgtctctttgacctcta

SEQ ID NO: 401810 - DNA, 55 bp, Artificial
  Synthetic oligonucleotide
gatactattgattgtgctgaggcgatgaaataccgcattcgtacggtcgatagtt

SEQ ID NO: 401811 - DNA, 55 bp, Artificial
  Synthetic oligonucleotide
gatactattggtacattcagaggcatatttcaaatagggccagtttgattggaca

SEQ ID NO: 401812 - DNA, 60 bp, Artificial
  Synthetic oligonucleotide
gatactcaaatctacactcatgatgatacaaaagatagttatgagaatgcgtttcttatc

SEQ ID NO: 401813 - DNA, 53 bp, Artificial
  Synthetic oligonucleotide
gatactcacccttgtcgttgcagacccttaccccaaacccgaggggaccagac

SEQ ID NO: 401814 - DNA, 55 bp, Artificial
  Synthetic oligonucleotide
gatactccaaccgcggaacaggtgtgatgtggctggtttacgacactactcccgg

SEQ ID NO: 401815 - DNA, 60 bp, Artificial
  Synthetic oligonucleotide
gatactccaagaggggaagatgcccaatttactggctcatgcactagccccatggggaat

SEQ ID NO: 401816 - DNA, 60 bp, Artificial
  Synthetic oligonucleotide
gatactctaaagaagggcttagatgagttggcaccattgtatgctagtgagaacaagagg

SEQ ID NO: 401817 - DNA, 60 bp, Artificial
  Synthetic oligonucleotide
gatactctcatagattattgcaccggtgactgcatgatggaccggtaaggccagtagcac

SEQ ID NO: 401818 - DNA, 58 bp, Artificial
  Synthetic oligonucleotide
gatactctctcacaatttttgcaatctgactgacagtttcaaaaaaagttcgtttgac

SEQ ID NO: 401819 - DNA, 55 bp, Artificial
  Synthetic oligonucleotide
gatactctgcaacatgtgtcggcagcaattaaagcccgaaactacttagctcatg

SEQ ID NO: 401820 - DNA, 55 bp, Artificial
  Synthetic oligonucleotide
gatactctttctcaactatttctaactaaaggatggcctactggatccgtgtact

SEQ ID NO: 401821 - DNA, 60 bp, Artificial
  Synthetic oligonucleotide
gatactgaaactcagcaagaagggaggcggtttgtcgcaagcctgttcatctccgcattg

SEQ ID NO: 401822 - DNA, 59 bp, Artificial
  Synthetic oligonucleotide
gatactgaggtacgtagcgttaagcacgttatcgacagtatcgcccttctaactcagcg

SEQ ID NO: 401823 - DNA, 55 bp, Artificial
  Synthetic oligonucleotide
gatactgatttgagcccgtcaatggtcaaagaggctgaaatgtctatgccagagc

SEQ ID NO: 401824 - DNA, 55 bp, Artificial
  Synthetic oligonucleotide
gatactgctaatttaatgtacatttcaaacttatcgagctcccacgaccatcgtc

SEQ ID NO: 401825 - DNA, 60 bp, Artificial
  Synthetic oligonucleotide
gatactggcagcggccggaaagtcagataagatctgcattgggtaccatgccaacaattc

SEQ ID NO: 401826 - DNA, 60 bp, Artificial
  Synthetic oligonucleotide
gatactgtatacgctaattccacacaagaagagacgttccttacgtccactctatgcctg

SEQ ID NO: 401827 - DNA, 60 bp, Artificial
  Synthetic oligonucleotide
gatactgtcaaaattagcgagttcattgatctttcgaaacaggatgagatacttccggca

SEQ ID NO: 401828 - DNA, 57 bp, Artificial
  Synthetic oligonucleotide
gatactgtccaaggtgtagcattttcaggacatccattgtatacgtccctttccgtg

SEQ ID NO: 401829 - DNA, 60 bp, Artificial
  Synthetic oligonucleotide
gatactgtcgaatgttgagctgatgaataatgtttcattcgtttgctacgagcataaatg

SEQ ID NO: 401830 - DNA, 60 bp, Artificial
  Synthetic oligonucleotide
gatactgtctgatctagaattaaatatcactgagccctcaacccaggagtattcaaccac

SEQ ID NO: 401831 - DNA, 60 bp, Artificial
  Synthetic oligonucleotide
gatactgtggggaatccatcaccctaatgatgcagcagaacaaacaacactctatcagaa

SEQ ID NO: 401832 - DNA, 55 bp, Artificial
  Synthetic oligonucleotide
gatactgtggtggagttctatacaaaatagggcagatcataggaatacatgtggg

SEQ ID NO: 401833 - DNA, 52 bp, Artificial
  Synthetic oligonucleotide
gatactgttcgaaggaaaccctagttcttgaactgggtactccggtggttcc

SEQ ID NO: 401834 - DNA, 60 bp, Artificial
  Synthetic oligonucleotide
gatacttaatgagtggctttgtaatccaatggacataccgttgtattattatcagcagac

SEQ ID NO: 401835 - DNA, 55 bp, Artificial
  Synthetic oligonucleotide
gatacttacggtgtcatcagaacaactcgtcaaacaattgatgaggacatttcaa

SEQ ID NO: 401836 - DNA, 55 bp, Artificial
  Synthetic oligonucleotide
gatacttcctacactagctaggctaacaacacgtataccagatgcaactattggt

SEQ ID NO: 401837 - DNA, 57 bp, Artificial
  Synthetic oligonucleotide
gatacttctaggaccggccgatagctttaaggggcagggatggcgactccttgcgcc

SEQ ID NO: 401838 - DNA, 53 bp, Artificial
  Synthetic oligonucleotide
gatacttgagtacttggttcttgaagacccttaagaaaagaccagtcggaggg

SEQ ID NO: 401839 - DNA, 55 bp, Artificial
  Synthetic oligonucleotide
gatacttgcaaataaaacgaggacattcactgctgcgccactagacactctactg

SEQ ID NO: 401840 - DNA, 60 bp, Artificial
  Synthetic oligonucleotide
gatacttgggcaccctgaatatacgtgatatgatctcagacttcaagggtgtccagtatg

SEQ ID NO: 401841 - DNA, 54 bp, Artificial
  Synthetic oligonucleotide
gatacttgtgaggggtaactcccctgtgtttaactataacaaggcaaccaagag

SEQ ID NO: 401842 - DNA, 56 bp, Artificial
  Synthetic oligonucleotide
gatactttaatcaacagttcgatgcgtggatcaagacgggagaattgcgaatccgc

SEQ ID NO: 401843 - DNA, 55 bp, Artificial
  Synthetic oligonucleotide
gatactttcggcgagtccatatcttggttcgaccattccggtcgcttacaacacc

SEQ ID NO: 401844 - DNA, 60 bp, Artificial
  Synthetic oligonucleotide
gatactttggattaccatttgactatgcatcatttgatcatcagccaacaactttcgaag

SEQ ID NO: 401845 - DNA, 50 bp, Artificial
  Synthetic oligonucleotide
gatactttgttggcagatggtagcacaagggatgttgatatacagccgcg

SEQ ID NO: 401846 - DNA, 55 bp, Artificial
  Synthetic oligonucleotide
gatagaaaacatcgagctatggtgcaaacaaaatgtcctccactactagtgacct

SEQ ID NO: 401847 - DNA, 51 bp, Artificial
  Synthetic oligonucleotide
gatagaaaaggacaaagtctacctgtcatgggtaccagcacacaaggggat

SEQ ID NO: 401848 - DNA, 55 bp, Artificial
  Synthetic oligonucleotide
gatagaaagatggacgaagtttcacaggtaggaatttaattcgttatcggtttga

SEQ ID NO: 401849 - DNA, 56 bp, Artificial
  Synthetic oligonucleotide
gatagaaagatggacgaagtttcgcacgttggaatttaattcgctttcgattctaa

SEQ ID NO: 401850 - DNA, 58 bp, Artificial
  Synthetic oligonucleotide
gatagaaagatggatgaagtttcgcatgtcggaatttaattcgctttcgatttaagga

SEQ ID NO: 401851 - DNA, 60 bp, Artificial
  Synthetic oligonucleotide
gatagaacaacagattgggaatgtcataaattggacaagagactcagtaactgaattgtg

SEQ ID NO: 401852 - DNA, 60 bp, Artificial
  Synthetic oligonucleotide
gatagaacattaataccatctcatactggaactagtggcacaccaacaaatatataccat

SEQ ID NO: 401853 - DNA, 56 bp, Artificial
  Synthetic oligonucleotide
gatagaacccagtcgaagcaggtcttatataaagttgaaacgactccgtttcagag

SEQ ID NO: 401854 - DNA, 60 bp, Artificial
  Synthetic oligonucleotide
gatagaaccgtctctgagtggccaaaagccacctgtactggagactgccctgaccggtgc

SEQ ID NO: 401855 - DNA, 59 bp, Artificial
  Synthetic oligonucleotide
gatagaacgagcagccgcattcgaggtctacccgcctacgtctgacggccctggtcttc

SEQ ID NO: 401856 - DNA, 55 bp, Artificial
  Synthetic oligonucleotide
gatagaacggctttcagaggtcttatatccactccattgggcactccaccaacag

SEQ ID NO: 401857 - DNA, 60 bp, Artificial
  Synthetic oligonucleotide
gatagaagaagttcaactttctatgactaatcttaggttcactagcagtgacaatatggg

SEQ ID NO: 401858 - DNA, 55 bp, Artificial
  Synthetic oligonucleotide
gatagaagacccagtgatgatagttggctaaattttgatggaactctacttggta

SEQ ID NO: 401859 - DNA, 54 bp, Artificial
  Synthetic oligonucleotide
gatagaaggggttgacagatataagttgggccccatagttaatattatcttgag

SEQ ID NO: 401860 - DNA, 55 bp, Artificial
  Synthetic oligonucleotide
gatagaatcgtcaatcgaaaagatagtctgctcggagcagcaagaggtaatctcg

SEQ ID NO: 401861 - DNA, 54 bp, Artificial
  Synthetic oligonucleotide
gatagaatgaatgggctagtattccccccggcccgtcgaattttttacatgtcc

SEQ ID NO: 401862 - DNA, 60 bp, Artificial
  Synthetic oligonucleotide
gatagacagaatgaggatcagaacatggaatagtttagtgaaacatcatatgtatgtctc

SEQ ID NO: 401863 - DNA, 57 bp, Artificial
  Synthetic oligonucleotide
gatagacagtgcaccgcgaagttggcagacatagtggactcagcccaagagctcgtt

SEQ ID NO: 401864 - DNA, 55 bp, Artificial
  Synthetic oligonucleotide
gatagacatggagcaatcacaagtactaacataaaccaccctagctgcgtctggg

SEQ ID NO: 401865 - DNA, 56 bp, Artificial
  Synthetic oligonucleotide
gatagaccggcccggatcggaagaagtcctggagtttgaggtacaatggattcgga

SEQ ID NO: 401866 - DNA, 55 bp, Artificial
  Synthetic oligonucleotide
gatagactaggggatcttctgctctgcacaaccagccacacggcacagtgcgccg

SEQ ID NO: 401867 - DNA, 55 bp, Artificial
  Synthetic oligonucleotide
gatagactatatacggcgatgattgatcgtattttaataaacgggtggatcgaga

SEQ ID NO: 401868 - DNA, 55 bp, Artificial
  Synthetic oligonucleotide
gatagactcttgagcaaaactctttccgctactactcgcaagctacaccactcgc

SEQ ID NO: 401869 - DNA, 53 bp, Artificial
  Synthetic oligonucleotide
gatagacttaagctattatcagtaacgaaagctggggagttgagatggcttca

SEQ ID NO: 401870 - DNA, 60 bp, Artificial
  Synthetic oligonucleotide
gatagacttacccttggtcacatatatcaaagatgagctgagaagtgctgacaaagttag

SEQ ID NO: 401871 - DNA, 55 bp, Artificial
  Synthetic oligonucleotide
gatagagacgtggaagaagcctgactacgagccacctgtggtccatggctgcgcg

SEQ ID NO: 401872 - DNA, 60 bp, Artificial
  Synthetic oligonucleotide
gatagagagtgctttaacccttgcttttatgtggaattgatcagaggcaggccgaaagag

SEQ ID NO: 401873 - DNA, 60 bp, Artificial
  Synthetic oligonucleotide
gatagagccatccaacaggctatcagaggggagaagtatacgtggtgcacattcaaggaa

SEQ ID NO: 401874 - DNA, 60 bp, Artificial
  Synthetic oligonucleotide
gatagagcgcacgccatattcactgcgccgactggggatccaggatggaaagatctagca

SEQ ID NO: 401875 - DNA, 60 bp, Artificial
  Synthetic oligonucleotide
gatagaggaacgagagaagctagcacgcaagctgtctgaggattcgtatgacatcgagaa

SEQ ID NO: 401876 - DNA, 55 bp, Artificial
  Synthetic oligonucleotide
gatagagggcgactcattttcaccttttagttactagagtcgcctaagtttataa

SEQ ID NO: 401877 - DNA, 54 bp, Artificial
  Synthetic oligonucleotide
gatagagggtttttaataaacgcagatgcttccgtatctaacctaagagttaaa

SEQ ID NO: 401878 - DNA, 59 bp, Artificial
  Synthetic oligonucleotide
gatagagtcagatcactcacgttaggcaattccactattaccacacaggagagcgcgaa

SEQ ID NO: 401879 - DNA, 60 bp, Artificial
  Synthetic oligonucleotide
gatagagtccgagctcgatcatctgaacgcggaggtcgcacctgtggtgcggaagatgtg

SEQ ID NO: 401880 - DNA, 60 bp, Artificial
  Synthetic oligonucleotide
gatagagtcggtggagtgaaattccagttgtgcttggctttctgctataaaataatggga

SEQ ID NO: 401881 - DNA, 55 bp, Artificial
  Synthetic oligonucleotide
gatagagtggcacagccaccagtgtttattatttagtactttgtaaaactacagg

SEQ ID NO: 401882 - DNA, 52 bp, Artificial
  Synthetic oligonucleotide
gatagagtgggtaaaatcgggactcaaagttatgctcgattggttatggatt

SEQ ID NO: 401883 - DNA, 55 bp, Artificial
  Synthetic oligonucleotide
gatagagtgggtgcctgattcattacacaggacgatcgtgtcacttgcatgcaaa

SEQ ID NO: 401884 - DNA, 55 bp, Artificial
  Synthetic oligonucleotide
gatagagtggtgcgtatcagtgtccttcccgagactggtgcacgtggtggaaacc

SEQ ID NO: 401885 - DNA, 56 bp, Artificial
  Synthetic oligonucleotide
gatagagttattccgtttctgccaggtcttccttcaactatcttatacttcgaaac

SEQ ID NO: 401886 - DNA, 60 bp, Artificial
  Synthetic oligonucleotide
gatagataaattgtattgtgatgagatctttatggtgcattccggggaatggctgtctgt

SEQ ID NO: 401887 - DNA, 60 bp, Artificial
  Synthetic oligonucleotide
gatagatatgttgataaattttgtcagaatcaaactgtcccccctcgctcaaatgatcaa

SEQ ID NO: 401888 - DNA, 60 bp, Artificial
  Synthetic oligonucleotide
gatagatcacgtacgactgtaagttcgtcaaggtcatcttgtctggaaactacgcagcct

SEQ ID NO: 401889 - DNA, 55 bp, Artificial
  Synthetic oligonucleotide
gatagatgagtcttctcctttcagcactcccatccaaggggtcctggctgttcag

SEQ ID NO: 401890 - DNA, 60 bp, Artificial
  Synthetic oligonucleotide
gatagatgagttgtttacgctgattagatgtaatttcacatatgattatatcgatgacat

SEQ ID NO: 401891 - DNA, 51 bp, Artificial
  Synthetic oligonucleotide
gatagatggagtgaagttggaatcaacaagggtctaccagattctggcgat

SEQ ID NO: 401892 - DNA, 60 bp, Artificial
  Synthetic oligonucleotide
gatagatggcacttgttgcccctgacgaaatgcttcgaagttccagacctgctagacccg

SEQ ID NO: 401893 - DNA, 57 bp, Artificial
  Synthetic oligonucleotide
gatagatggtttggttgtactcccaggaaaatgctacaatatgttggaactgattta

SEQ ID NO: 401894 - DNA, 60 bp, Artificial
  Synthetic oligonucleotide
gatagatgtgttcggaaaagagagaacatgacttcatctctcaaacggtaagcagtttac

SEQ ID NO: 401895 - DNA, 58 bp, Artificial
  Synthetic oligonucleotide
gatagattacgcagtagagcaggtttactcggagtcccttggattttaggcctctcag

SEQ ID NO: 401896 - DNA, 59 bp, Artificial
  Synthetic oligonucleotide
gatagattgtttataatgttcaaaggtttgttgcagcaatgtaactatacttgtactta

SEQ ID NO: 401897 - DNA, 60 bp, Artificial
  Synthetic oligonucleotide
gatagcaaggtgtgcatgcagaactggggtttattggtcaagaacttacggcaagtgctt

SEQ ID NO: 401898 - DNA, 60 bp, Artificial
  Synthetic oligonucleotide
gatagcaatgctgtatacaccacttagggctaataatgctggggaagatgtcttcacagt

SEQ ID NO: 401899 - DNA, 54 bp, Artificial
  Synthetic oligonucleotide
gatagcacagatttgaaagatcacatagactcttggggtccggtcaggagagag

SEQ ID NO: 401900 - DNA, 60 bp, Artificial
  Synthetic oligonucleotide
gatagcaccgagccgagtcagcaaattgattgggagagggttggggattcaatcagaagc

SEQ ID NO: 401901 - DNA, 56 bp, Artificial
  Synthetic oligonucleotide
gatagcacttaggtacatccgtaccgctagtggatgctgtgccactacctctgtga

SEQ ID NO: 401902 - DNA, 52 bp, Artificial
  Synthetic oligonucleotide
gatagcacttgacaaatatggtgtagacctgcccatggttacatttcttaaa

SEQ ID NO: 401903 - DNA, 60 bp, Artificial
  Synthetic oligonucleotide
gatagcagacaaagcgtctaccatgagacgtcagacgacgcctccattaggcacttgggt

SEQ ID NO: 401904 - DNA, 60 bp, Artificial
  Synthetic oligonucleotide
gatagcagagttggcaaattgtctccgtcaattactaatcactggtctgtgatgtatgca

SEQ ID NO: 401905 - DNA, 55 bp, Artificial
  Synthetic oligonucleotide
gatagcagcctctgacacttataagggccgtatatggtggagtaacccttatcca

SEQ ID NO: 401906 - DNA, 59 bp, Artificial
  Synthetic oligonucleotide
gatagcatgacaagaatcttagagcccttcaggataaaaaacccagacatagttattta

SEQ ID NO: 401907 - DNA, 55 bp, Artificial
  Synthetic oligonucleotide
gatagcattaagtgtccacgtctaagtaaacagcttgagaacaatgtttgggccg

SEQ ID NO: 401908 - DNA, 60 bp, Artificial
  Synthetic oligonucleotide
gatagccaaactgtgtcagatcaaacatttcaaacaggattttttgctacttcagctcag

SEQ ID NO: 401909 - DNA, 55 bp, Artificial
  Synthetic oligonucleotide
gatagccagagagctgcttcgcgacctccatctgctgattcatcagcgcgagctc

SEQ ID NO: 401910 - DNA, 55 bp, Artificial
  Synthetic oligonucleotide
gatagccagttcatggggtcatgcactaatcctatgggaaaccaggggtacggag

SEQ ID NO: 401911 - DNA, 60 bp, Artificial
  Synthetic oligonucleotide
gatagccatcttaaaggcgtaatttctcaatgcatcaccaaatcccttgcgcatacggat

SEQ ID NO: 401912 - DNA, 60 bp, Artificial
  Synthetic oligonucleotide
gatagcccgatagttaccaataagatagtagctatcctggagtatgctagagtccctcac

SEQ ID NO: 401913 - DNA, 55 bp, Artificial
  Synthetic oligonucleotide
gatagccgactaactagttgcgagatcggagtctcagtctagttcattgcaaaga

SEQ ID NO: 401914 - DNA, 60 bp, Artificial
  Synthetic oligonucleotide
gatagccgagacctgcatggcgacactaacattttctaatgttaggacgcaggtgtgttt

SEQ ID NO: 401915 - DNA, 56 bp, Artificial
  Synthetic oligonucleotide
gatagccgagtctttcacggacaaaggccgaaccacgtacgcagtgggtcaggacg

SEQ ID NO: 401916 - DNA, 59 bp, Artificial
  Synthetic oligonucleotide
gatagcctccaagacgaccagtcattcggaggtaatcttggaaaggctgtatttcaggc

SEQ ID NO: 401917 - DNA, 60 bp, Artificial
  Synthetic oligonucleotide
gatagcctggtcggagtatcaactactcaatacgttcagatggacaattttgaacccatc

SEQ ID NO: 401918 - DNA, 55 bp, Artificial
  Synthetic oligonucleotide
gatagcgagcctcccgttcgagaccagtgggccgccgttgagccgatgctcgctc

SEQ ID NO: 401919 - DNA, 60 bp, Artificial
  Synthetic oligonucleotide
gatagcgcattagcagtgagtgttttatcgaagaatcgtgcaattcaggaaaatcataaa

SEQ ID NO: 401920 - DNA, 55 bp, Artificial
  Synthetic oligonucleotide
gatagcgtgcatgcaacacgtgaccgaggagaagctttggtggctggtccacccc

SEQ ID NO: 401921 - DNA, 59 bp, Artificial
  Synthetic oligonucleotide
gatagcgttatcccacctgctcgtgatcaacacggcttttcttcaccgcgtggattacc

SEQ ID NO: 401922 - DNA, 55 bp, Artificial
  Synthetic oligonucleotide
gatagctactatgaatacatctggcgatacttatgatgtatacgtgttctgtgcc

SEQ ID NO: 401923 - DNA, 60 bp, Artificial
  Synthetic oligonucleotide
gatagctcacacacggtgattaaaagagtcaactacggtgaggatatagacgctatgagc

SEQ ID NO: 401924 - DNA, 60 bp, Artificial
  Synthetic oligonucleotide
gatagctgccgagtgtaaactcggatgttataactatctgaagcctaatgaaccccgcaa

SEQ ID NO: 401925 - DNA, 55 bp, Artificial
  Synthetic oligonucleotide
gatagctggtatgaacaagttggaggatggtttgagatgcattgtttattgcttg

SEQ ID NO: 401926 - DNA, 60 bp, Artificial
  Synthetic oligonucleotide
gatagctttcgattttatcgatgagtcaaccatgtcatatgttcatgattgggagaatat

SEQ ID NO: 401927 - DNA, 55 bp, Artificial
  Synthetic oligonucleotide
gatagctttgaactgggcgcgacaggcgttttgtgtcaagggatcaaagagaccc

SEQ ID NO: 401928 - DNA, 60 bp, Artificial
  Synthetic oligonucleotide
gataggaaatccaccttctattacagcagtaacaatggaagagtcagcagagccatggat

SEQ ID NO: 401929 - DNA, 55 bp, Artificial
  Synthetic oligonucleotide
gataggaaccttgggatggacgaggtactgaggcaaaggttgcgggctgaactac

SEQ ID NO: 401930 - DNA, 60 bp, Artificial
  Synthetic oligonucleotide
gataggaagcatacatgtcaactttgctacttgaaacattcaaagcagatcccaacttgt

SEQ ID NO: 401931 - DNA, 54 bp, Artificial
  Synthetic oligonucleotide
gataggacaaggttaggtgtggggtcaaagaatgatcccagtccggttctttta

SEQ ID NO: 401932 - DNA, 60 bp, Artificial
  Synthetic oligonucleotide
gataggaccttatcctatggtgtaccagaagatgagagactacgcgtacatggtttgtaa

SEQ ID NO: 401933 - DNA, 58 bp, Artificial
  Synthetic oligonucleotide
gataggagcgacctcgcattggcaccgggggcagtgacttcctgtgggttataaaaga

SEQ ID NO: 401934 - DNA, 60 bp, Artificial
  Synthetic oligonucleotide
gataggagtaagaccatagcgatggggggagatgctaggagtcgggagagaccgaagcga

SEQ ID NO: 401935 - DNA, 60 bp, Artificial
  Synthetic oligonucleotide
gataggatactgatcactccagatgagcacaagtacgcattgaaaattgtatgccaagat

SEQ ID NO: 401936 - DNA, 56 bp, Artificial
  Synthetic oligonucleotide
gataggatattaaaatggattgcaagtattgtgtactttgggggcctgggtatagg

SEQ ID NO: 401937 - DNA, 60 bp, Artificial
  Synthetic oligonucleotide
gataggatcagagaccaggcagtatcattggaaacagttgtactaatggcagctcattgc

SEQ ID NO: 401938 - DNA, 55 bp, Artificial
  Synthetic oligonucleotide
gataggatcccagtcaccaaggtgacgttaaaagagggcatggatgggccaaaag

SEQ ID NO: 401939 - DNA, 55 bp, Artificial
  Synthetic oligonucleotide
gataggcaaactcctcactaagcaaccccaggactggctcaaatcttgggatgcc

SEQ ID NO: 401940 - DNA, 55 bp, Artificial
  Synthetic oligonucleotide
gataggcactggcccatactcaaatggagtcagtagagctaggttagctgctgca

SEQ ID NO: 401941 - DNA, 56 bp, Artificial
  Synthetic oligonucleotide
gataggcagtggttccccggtctatttcaccacacggttgcacccagttttcacaa

SEQ ID NO: 401942 - DNA, 57 bp, Artificial
  Synthetic oligonucleotide
gataggccccagggcacccgcggtagcaccgtacaagacactcaaaagagcggccca

SEQ ID NO: 401943 - DNA, 55 bp, Artificial
  Synthetic oligonucleotide
gataggccgggagtagaacccccgccgacaggagtccccatcgatagttgattgt

SEQ ID NO: 401944 - DNA, 53 bp, Artificial
  Synthetic oligonucleotide
gataggccttcgactccctttcggacctggtcttctaattccggccttaatgg

SEQ ID NO: 401945 - DNA, 60 bp, Artificial
  Synthetic oligonucleotide
gataggctatggcggaggattgagttgatcgatccgctgctctttgaattaccgaacttc

SEQ ID NO: 401946 - DNA, 55 bp, Artificial
  Synthetic oligonucleotide
gataggctgctcttattacattcgaaattcctattacaccaagctcatggaggta

SEQ ID NO: 401947 - DNA, 58 bp, Artificial
  Synthetic oligonucleotide
gatagggaacttaattactcacacggacaatgaggtagtggtatacttcttactgctc

SEQ ID NO: 401948 - DNA, 60 bp, Artificial
  Synthetic oligonucleotide
gatagggacgttccgaagttcgtggtgatcgatgagggaagcacgcacttcgatgcgcga

SEQ ID NO: 401949 - DNA, 60 bp, Artificial
  Synthetic oligonucleotide
gatagggagtcttgctcagtccagctggcccgagccctcagaagtcacatgtgggcgaaa

SEQ ID NO: 401950 - DNA, 56 bp, Artificial
  Synthetic oligonucleotide
gatagggagtttattttaactaagataatgcagatgacgtcagtcgcaattactgg

SEQ ID NO: 401951 - DNA, 60 bp, Artificial
  Synthetic oligonucleotide
gatagggctactggcctacttaagcctgcggtcatgggtatagattatgctcaagctcac

SEQ ID NO: 401952 - DNA, 55 bp, Artificial
  Synthetic oligonucleotide
gataggggcacccacaataggatggcaggaggggactgcgggtccgtcgttccat

SEQ ID NO: 401953 - DNA, 60 bp, Artificial
  Synthetic oligonucleotide
gatagggttatgtaataatgtcagttcagtacaatgcacacatggaattaagccagtgat

SEQ ID NO: 401954 - DNA, 58 bp, Artificial
  Synthetic oligonucleotide
gatagggttgatacgcttcagaaagggaccagtactataatttcacagagtagtgtag

SEQ ID NO: 401955 - DNA, 56 bp, Artificial
  Synthetic oligonucleotide
gataggtaaatgggacaccaataccccaaagaccccaattgagacaccgatatatc

SEQ ID NO: 401956 - DNA, 54 bp, Artificial
  Synthetic oligonucleotide
gataggtacctgttgtattatattcgcgatgtacaatctagggacgtgggattt

SEQ ID NO: 401957 - DNA, 55 bp, Artificial
  Synthetic oligonucleotide
gataggtagctacactccagaatccctaaatgcctcacttccgaatgatgctgct

SEQ ID NO: 401958 - DNA, 55 bp, Artificial
  Synthetic oligonucleotide
gataggtcagatttggaaactatcctaagaggtgctagggtgtgcaatacatggc

SEQ ID NO: 401959 - DNA, 54 bp, Artificial
  Synthetic oligonucleotide
gataggtcgaaaaatctagcatccttgatgttggacttgccggataattgtatg

SEQ ID NO: 401960 - DNA, 54 bp, Artificial
  Synthetic oligonucleotide
gataggtctttcgccgtattcgattacggtgagggttttgaagtagtgtacgga

SEQ ID NO: 401961 - DNA, 52 bp, Artificial
  Synthetic oligonucleotide
gataggtgagtatgaggatgaaaaaagggctatacaagtgctggataatata

SEQ ID NO: 401962 - DNA, 60 bp, Artificial
  Synthetic oligonucleotide
gataggtgcggcttcgcatcggcaacgtgggcagtgacttcctgtaagatataaaagacc

SEQ ID NO: 401963 - DNA, 59 bp, Artificial
  Synthetic oligonucleotide
gataggtgcttcctcgcgtatcgcggtgataaccgtggacatgcgtgttacacgggact

SEQ ID NO: 401964 - DNA, 60 bp, Artificial
  Synthetic oligonucleotide
gataggtgtcactcgtctctactacgcctatcagtatgatcgcggtgacttcccttgtaa

SEQ ID NO: 401965 - DNA, 60 bp, Artificial
  Synthetic oligonucleotide
gataggttccaaataccagctcgactgagtgatctggtcataccgggtgtctctgtccac

SEQ ID NO: 401966 - DNA, 53 bp, Artificial
  Synthetic oligonucleotide
gataggttcgtaatggatcttaagcgggacgtgaaagtgaccccgggaaccaa

SEQ ID NO: 401967 - DNA, 55 bp, Artificial
  Synthetic oligonucleotide
gataggttgagggagttcaatgacgcttgtcgaactcccgatgacaatggaatgg

SEQ ID NO: 401968 - DNA, 56 bp, Artificial
  Synthetic oligonucleotide
gataggttggtccttgcaactggacccaggaacgtccctcaaagagagacaagagg

SEQ ID NO: 401969 - DNA, 57 bp, Artificial
  Synthetic oligonucleotide
gatagtaacaagtgatgcagatgtatacgcaacatggttaccaaacggggttggttt

SEQ ID NO: 401970 - DNA, 57 bp, Artificial
  Synthetic oligonucleotide
gatagtaactatgaatggaaatgactttcaaactggaggaattggcaatttacccat

SEQ ID NO: 401971 - DNA, 51 bp, Artificial
  Synthetic oligonucleotide
gatagtaagcatgaccctctcctgacaccagaccgtgtgcgtctgatggga

SEQ ID NO: 401972 - DNA, 60 bp, Artificial
  Synthetic oligonucleotide
gatagtaagtgggagagacgaacagtcaattgctgaagcaataattgtagccatggtgtt

SEQ ID NO: 401973 - DNA, 60 bp, Artificial
  Synthetic oligonucleotide
gatagtacaagtttgcgtgatcatgagacatattggggggctgtgcgaagggaacatgga

SEQ ID NO: 401974 - DNA, 60 bp, Artificial
  Synthetic oligonucleotide
gatagtatttctgattcgcaaacggcttctgacatcatcacaaatacacgctcaatttcg

SEQ ID NO: 401975 - DNA, 55 bp, Artificial
  Synthetic oligonucleotide
gatagtcaggtgaatggccgcgattggcgtgtggcctctaagtcacctattcaat

SEQ ID NO: 401976 - DNA, 57 bp, Artificial
  Synthetic oligonucleotide
gatagtcagttccctgccattccaaaacatcaaccctagaacagtggggaaatgccc

SEQ ID NO: 401977 - DNA, 60 bp, Artificial
  Synthetic oligonucleotide
gatagtcccccctcaagccctgacctgcatgatctgcctgctccatcctacgaaggctcc

SEQ ID NO: 401978 - DNA, 54 bp, Artificial
  Synthetic oligonucleotide
gatagtccgtattataagagcggggaatacactgtttctcgttcggttaattgg

SEQ ID NO: 401979 - DNA, 60 bp, Artificial
  Synthetic oligonucleotide
gatagtcgcacacatttcttgctgtgttgcaagaaggaatagttagtttgggaagacata

SEQ ID NO: 401980 - DNA, 55 bp, Artificial
  Synthetic oligonucleotide
gatagtctccgacaatctccctccaaaccgagttccctccgctggaattgaatca

SEQ ID NO: 401981 - DNA, 56 bp, Artificial
  Synthetic oligonucleotide
gatagtgaaaaaggactaccacccatttcccgaggtagtgtgtccataactagtca

SEQ ID NO: 401982 - DNA, 52 bp, Artificial
  Synthetic oligonucleotide
gatagtgacattttacaacaagacaagtactcataaacccagtagaatacgt

SEQ ID NO: 401983 - DNA, 56 bp, Artificial
  Synthetic oligonucleotide
gatagtgaccatctggtatcaaactaatttcgttgtacccaccggggcacccacca

SEQ ID NO: 401984 - DNA, 60 bp, Artificial
  Synthetic oligonucleotide
gatagtgagaataaccagtttggttgcaacaaaccatcatactcatccaagaggaagaag

SEQ ID NO: 401985 - DNA, 55 bp, Artificial
  Synthetic oligonucleotide
gatagtggaagacatcatacagcagctattaggcaaggaagctgtgtaccttaca

SEQ ID NO: 401986 - DNA, 57 bp, Artificial
  Synthetic oligonucleotide
gatagtggccaccaataaagtttataaacaatggattgtccaagactggaaggactg

SEQ ID NO: 401987 - DNA, 55 bp, Artificial
  Synthetic oligonucleotide
gatagtggctgctcacttggggctcaagatgaaatgtataacttacggggagtca

SEQ ID NO: 401988 - DNA, 60 bp, Artificial
  Synthetic oligonucleotide
gatagtgggcgtgaaccgtcacacgcgactcagtgtggatctacagaccattaggtccag

SEQ ID NO: 401989 - DNA, 52 bp, Artificial
  Synthetic oligonucleotide
gatagtggtctaggtcctcggggttgaccgcacggtagggaaacatttgcgc

SEQ ID NO: 401990 - DNA, 50 bp, Artificial
  Synthetic oligonucleotide
gatagtgtaaacccttttctatcaggtacggagttgaaaaatgatgatgg

SEQ ID NO: 401991 - DNA, 54 bp, Artificial
  Synthetic oligonucleotide
gatagtgtatgttcacaatctgattctagcacgtgttattgggccgatcctatg

SEQ ID NO: 401992 - DNA, 55 bp, Artificial
  Synthetic oligonucleotide
gatagtgtatttgaataacaccaccatagagaaagagatatgccccaaagtagtg

SEQ ID NO: 401993 - DNA, 52 bp, Artificial
  Synthetic oligonucleotide
gatagtgttggcatacgcttcgttcaggtaacggacagcagtgaggggtgcc

SEQ ID NO: 401994 - DNA, 59 bp, Artificial
  Synthetic oligonucleotide
gatagttaaaaaaggagattcagcaatcatgaaaagtgaactggagtatggtaactgta

SEQ ID NO: 401995 - DNA, 56 bp, Artificial
  Synthetic oligonucleotide
gatagttacacttgcccaatgttaaacgtatttaactatacaggatataggcagcg

SEQ ID NO: 401996 - DNA, 59 bp, Artificial
  Synthetic oligonucleotide
gatagttactatgaatggaaatgactttcagacaggagggattggaaatttgccaatta

SEQ ID NO: 401997 - DNA, 58 bp, Artificial
  Synthetic oligonucleotide
gatagttagcgtaaggtcgttcctcaagcgaatcgttgaactctatcacgatgtaaag

SEQ ID NO: 401998 - DNA, 55 bp, Artificial
  Synthetic oligonucleotide
gatagttcaaaccgcagtaacgtggatgagttcatacggcgcgcttgtaacgaac

SEQ ID NO: 401999 - DNA, 50 bp, Artificial
  Synthetic oligonucleotide
gatagttcaagcttataaaccttgtacttatgatcagataacaactttcg

SEQ ID NO: 402000 - DNA, 58 bp, Artificial
  Synthetic oligonucleotide
gatagttccgatcctgagggaccagccgcggggaccaggagtcgccgtgcccgcagtc

SEQ ID NO: 402001 - DNA, 60 bp, Artificial
  Synthetic oligonucleotide
gatagttgctgcatggacgaccatcaagacagcaatggggaacaacactttcagcgagac

SEQ ID NO: 402002 - DNA, 50 bp, Artificial
  Synthetic oligonucleotide
gatagttggtatttgtggtttaccaacgccagttcaacgataaattgctt

SEQ ID NO: 402003 - DNA, 60 bp, Artificial
  Synthetic oligonucleotide
gatagttgtaaatgttgattcttcaactttaatagtctcaagcatgttgccaccatcaat

SEQ ID NO: 402004 - DNA, 58 bp, Artificial
  Synthetic oligonucleotide
gatagttgtggcaaacaattaactggtaagataataactaaatacactcactggctgg

SEQ ID NO: 402005 - DNA, 60 bp, Artificial
  Synthetic oligonucleotide
gatagtttacctacagacccaacacatgcgtattacattcagccagctgatggtactcct

SEQ ID NO: 402006 - DNA, 58 bp, Artificial
  Synthetic oligonucleotide
gatagtttatactggcgtctgtagaactctgatcaaagcccaaacaacggacgattcc

SEQ ID NO: 402007 - DNA, 55 bp, Artificial
  Synthetic oligonucleotide
gatagtttcctaccactccgccaggtagttgtggattttgatttatccacgacaa

SEQ ID NO: 402008 - DNA, 56 bp, Artificial
  Synthetic oligonucleotide
gatagtttgccttgacgttagatcgtggctactgaaaagtaagcgcgtgagactgc

SEQ ID NO: 402009 - DNA, 60 bp, Artificial
  Synthetic oligonucleotide
gatagtttggcatgccccctgatgctgaggcagcaagtatgaacgtatgatgtgttctct

SEQ ID NO: 402010 - DNA, 55 bp, Artificial
  Synthetic oligonucleotide
gatagtttggcttcgcgatactagtcaaacgagcggagctgcgcagagacatatc

SEQ ID NO: 402011 - DNA, 50 bp, Artificial
  Synthetic oligonucleotide
gatagttttgtgatgatcacgcaacgaacacatgttcaatcgtcggtgac

SEQ ID NO: 402012 - DNA, 60 bp, Artificial
  Synthetic oligonucleotide
gatataacaacgagttatacgtatatgttatctgacgaagtgtatgtagtgaatgttagt

SEQ ID NO: 402013 - DNA, 56 bp, Artificial
  Synthetic oligonucleotide
gatataaccactggtgataagaaccctagtaaacttattaggctagacaccacaac

SEQ ID NO: 402014 - DNA, 57 bp, Artificial
  Synthetic oligonucleotide
gatataacccaccatacgtatgggccgctatgatgcacggtgtgacgataagatata

SEQ ID NO: 402015 - DNA, 56 bp, Artificial
  Synthetic oligonucleotide
gatataacctagagacgaccaacctcttacagatgaaccctaaaatggagagtgtt

SEQ ID NO: 402016 - DNA, 55 bp, Artificial
  Synthetic oligonucleotide
gatataagggagtctggcggggagacggagtcatgcataccacctgcccatgtgg

SEQ ID NO: 402017 - DNA, 57 bp, Artificial
  Synthetic oligonucleotide
gatataataaggccagaaacaaaggtgtatcgaaaagcagttgaggagagtgtttta

SEQ ID NO: 402018 - DNA, 51 bp, Artificial
  Synthetic oligonucleotide
gatataatgagaactgcgcaacaactactgtgtgttcatttcagaattggg

SEQ ID NO: 402019 - DNA, 55 bp, Artificial
  Synthetic oligonucleotide
gatataatggattgacattacggggagtaacaatgagacctgcctcgcaagccca

SEQ ID NO: 402020 - DNA, 59 bp, Artificial
  Synthetic oligonucleotide
gatataatggttgggcgacgattgatgttgagtatagagaacccgcgccttacgtacac

SEQ ID NO: 402021 - DNA, 51 bp, Artificial
  Synthetic oligonucleotide
gatataatgtatacgaatagtattcaatgtttaatgcgtcaaatttactga

SEQ ID NO: 402022 - DNA, 55 bp, Artificial
  Synthetic oligonucleotide
gatataattaagcggagcaaccgagaggttaaattccagggtcctccgaagagag

SEQ ID NO: 402023 - DNA, 55 bp, Artificial
  Synthetic oligonucleotide
gatataattagtctatgggaccaaagcctaaagccatgtgtaaagttaacccctc

SEQ ID NO: 402024 - DNA, 55 bp, Artificial
  Synthetic oligonucleotide
gatataattcaatctttcttcccacggtttggacagactgttagggatatcgcta

SEQ ID NO: 402025 - DNA, 55 bp, Artificial
  Synthetic oligonucleotide
gatatacagacgctgcagaaattaaaacgaaagtatttaggcagtccattaggtg

SEQ ID NO: 402026 - DNA, 55 bp, Artificial
  Synthetic oligonucleotide
gatatacagttcatggctcaatttccgtctacttattttagtgatgacgacgcct

SEQ ID NO: 402027 - DNA, 55 bp, Artificial
  Synthetic oligonucleotide
gatatacatttgaaatagaagaacccacccctccaagacgcacaagcacccctgt

SEQ ID NO: 402028 - DNA, 57 bp, Artificial
  Synthetic oligonucleotide
gatataccaaagcgtgcggagcgcctccttgtgtcatcggaggggagggcaacaata

SEQ ID NO: 402029 - DNA, 60 bp, Artificial
  Synthetic oligonucleotide
gatataccagatagcggagagcatggacgtagaactgggagcaccaagattgctacaccc

SEQ ID NO: 402030 - DNA, 55 bp, Artificial
  Synthetic oligonucleotide
gatataccccttatagtagctaagcagatagttaatgaatgtgcacaatgtcagc

SEQ ID NO: 402031 - DNA, 55 bp, Artificial
  Synthetic oligonucleotide
gatataccgcaatgggaaccctcaaaaggatggaatgattggcaacaagtgcctt

SEQ ID NO: 402032 - DNA, 57 bp, Artificial
  Synthetic oligonucleotide
gatataccgtgtggaagtttatatatttttgggatgaaagcggtgattggcataagg

SEQ ID NO: 402033 - DNA, 55 bp, Artificial
  Synthetic oligonucleotide
gatatacctgataaggagctagcagtcagcattctagcgaagaacaacgcaattg

SEQ ID NO: 402034 - DNA, 58 bp, Artificial
  Synthetic oligonucleotide
gatatacgagtcctcgggtctgaaatccctattccggatagagatcgcgtcctgttat

SEQ ID NO: 402035 - DNA, 60 bp, Artificial
  Synthetic oligonucleotide
gatatactaaaatcgtcacacactgagttctataatatatctcctagatgtagaatgttc

SEQ ID NO: 402036 - DNA, 60 bp, Artificial
  Synthetic oligonucleotide
gatatactaatgcgtagaactgtaggtaggaggacacataaaactaattcaatcgaagca

SEQ ID NO: 402037 - DNA, 57 bp, Artificial
  Synthetic oligonucleotide
gatatactccattaactacaatgaagaaggttttgagtacatccctggttctcaggg

SEQ ID NO: 402038 - DNA, 60 bp, Artificial
  Synthetic oligonucleotide
gatatactcctggtgtcattcctccagtaaatatagacagaccgatcccactaggtcgca

SEQ ID NO: 402039 - DNA, 54 bp, Artificial
  Synthetic oligonucleotide
gatatacttggagctaagaaggtcatttgtcagggtgattctcaacaaatacct

SEQ ID NO: 402040 - DNA, 60 bp, Artificial
  Synthetic oligonucleotide
gatatagacgccattctctgcttgaggcacagtgataggttcccctgtgcgtgaatccat

SEQ ID NO: 402041 - DNA, 55 bp, Artificial
  Synthetic oligonucleotide
gatatagagagaggcatggtggacagtggcctcctgtgacattacctgaccatgc

SEQ ID NO: 402042 - DNA, 60 bp, Artificial
  Synthetic oligonucleotide
gatatagagctttcaggatctgatatggtagctattgtacgggctccattacatagaatt

SEQ ID NO: 402043 - DNA, 59 bp, Artificial
  Synthetic oligonucleotide
gatatagaggaaccaagtggtcaaacagcagactggtatacaatcggagtgtatgtcat

SEQ ID NO: 402044 - DNA, 59 bp, Artificial
  Synthetic oligonucleotide
gatatagatggatgacccatcgtttctcacgggtaggtctacttatgctaaacgtagga

SEQ ID NO: 402045 - DNA, 60 bp, Artificial
  Synthetic oligonucleotide
gatatagcccatacagggaaagttatatgtatatccgatattacacgtggtaatggtctg

SEQ ID NO: 402046 - DNA, 55 bp, Artificial
  Synthetic oligonucleotide
gatatagccttttccggtcccgtatcgaaagtacgccgtcgtctcaattacgaca

SEQ ID NO: 402047 - DNA, 60 bp, Artificial
  Synthetic oligonucleotide
gatatagcgacagagttagatcaataacactcgggaactcgactataacgacacaagagt

SEQ ID NO: 402048 - DNA, 60 bp, Artificial
  Synthetic oligonucleotide
gatatagcgggagttttgtccagcatccagaattaacaggactggattgcatgagacctt

SEQ ID NO: 402049 - DNA, 55 bp, Artificial
  Synthetic oligonucleotide
gatatagctcccgagaatatagaagtcaaacgattaggggataataggaaggttt

SEQ ID NO: 402050 - DNA, 55 bp, Artificial
  Synthetic oligonucleotide
gatatagctgtacaaatgaatgaagaaggtccattaaacccaggagtaaacccat

SEQ ID NO: 402051 - DNA, 58 bp, Artificial
  Synthetic oligonucleotide
gatataggggatgcctatttttccatcccactagacccagactataggcagtatacag

SEQ ID NO: 402052 - DNA, 55 bp, Artificial
  Synthetic oligonucleotide
gatatagtaatgtttgtcgtcgttttggtgttcctttcaacatcagggaacagcc

SEQ ID NO: 402053 - DNA, 55 bp, Artificial
  Synthetic oligonucleotide
gatatagtacagtccgcaaccatgttcccttaccaaccatccatgtacccaatgc

SEQ ID NO: 402054 - DNA, 55 bp, Artificial
  Synthetic oligonucleotide
gatatagtacatcattatctgaataccgttgggataggtcctgctatagcagact

SEQ ID NO: 402055 - DNA, 60 bp, Artificial
  Synthetic oligonucleotide
gatatagtaccaatcagcaatagcaataaaacattcaggctaatacattgtaatacctca

SEQ ID NO: 402056 - DNA, 60 bp, Artificial
  Synthetic oligonucleotide
gatatagtaccacttgatgggaataagaacaactctggtaatgagagcaactctattggg

SEQ ID NO: 402057 - DNA, 57 bp, Artificial
  Synthetic oligonucleotide
gatatagtcatttccactcccgcctcgaaggtacgacgccgtctgaacttcgacacc

SEQ ID NO: 402058 - DNA, 53 bp, Artificial
  Synthetic oligonucleotide
gatatagtggtcgttacatgatagttcggttgacacatcaagccacgacgggt

SEQ ID NO: 402059 - DNA, 59 bp, Artificial
  Synthetic oligonucleotide
gatatataagaactgtctttactttttacagacactcagacatagactttattataaca

SEQ ID NO: 402060 - DNA, 60 bp, Artificial
  Synthetic oligonucleotide
gatatataagacctaatttacttcaagatagattgaacttgcacgataattttgaatcac

SEQ ID NO: 402061 - DNA, 55 bp, Artificial
  Synthetic oligonucleotide
gatatataataggtgggaggtggacagattaattttgatttcgagtggcgattac

SEQ ID NO: 402062 - DNA, 60 bp, Artificial
  Synthetic oligonucleotide
gatatatagctgctcccctctcctggattgcacagcacgattgacggtatgccaccttta

SEQ ID NO: 402063 - DNA, 53 bp, Artificial
  Synthetic oligonucleotide
gatatatcagctgagctgcacactggtgacgtgtgtgtgaccacaccagctga

SEQ ID NO: 402064 - DNA, 55 bp, Artificial
  Synthetic oligonucleotide
gatatatcgccaggcggcccgctgggtgggcgttatgccggaaatgccgtcaaac

SEQ ID NO: 402065 - DNA, 55 bp, Artificial
  Synthetic oligonucleotide
gatatatgccacgatacggtcttcagcgaaacttgaccgactatagcttagctcg

SEQ ID NO: 402066 - DNA, 60 bp, Artificial
  Synthetic oligonucleotide
gatatatggctcatgaaaaaacgattcaacgtacaggctgtggtgaagtacgtgcgaaga

SEQ ID NO: 402067 - DNA, 54 bp, Artificial
  Synthetic oligonucleotide
gatatatgtatgcgaactcacgacaaattgtttttaatacacgtagaaataata

SEQ ID NO: 402068 - DNA, 60 bp, Artificial
  Synthetic oligonucleotide
gatatatgttgagaaattgtaacacctcagtcattacgcaggcctgcccaaagacatcct

SEQ ID NO: 402069 - DNA, 51 bp, Artificial
  Synthetic oligonucleotide
gatatattaggaggtcaccaaggccaggacaccttgagtcgacaagaacat

SEQ ID NO: 402070 - DNA, 56 bp, Artificial
  Synthetic oligonucleotide
gatatattcaaacacccaccgtccaagagagcggactacaacagtgcgactcaaca

SEQ ID NO: 402071 - DNA, 60 bp, Artificial
  Synthetic oligonucleotide
gatatattgaggactcaggagtcatcctgcacttgcatacggggttattgctactgggtg

SEQ ID NO: 402072 - DNA, 60 bp, Artificial
  Synthetic oligonucleotide
gatatcaaaactcgcttttgatcttgccccattagactatgatgaacaaatgcaacgaat

SEQ ID NO: 402073 - DNA, 60 bp, Artificial
  Synthetic oligonucleotide
gatatcaaaccagttgtttcggatacgttacacctcgaacgagctgttgctgcaactata

SEQ ID NO: 402074 - DNA, 54 bp, Artificial
  Synthetic oligonucleotide
gatatcaacctacttacgaataccccgcttatcccgacctttccgaacacgatc

SEQ ID NO: 402075 - DNA, 59 bp, Artificial
  Synthetic oligonucleotide
gatatcaactccattagggagcccccctatagtcagcaatagtgactttctttgtgtag

SEQ ID NO: 402076 - DNA, 60 bp, Artificial
  Synthetic oligonucleotide
gatatcaagaatcctgatcttataatagaagacaagcccatcaagcatctaacaccggcc

SEQ ID NO: 402077 - DNA, 60 bp, Artificial
  Synthetic oligonucleotide
gatatcaatagtttctatcatgtcctcttgcttgaattctgttatggtcgattctttgta

SEQ ID NO: 402078 - DNA, 60 bp, Artificial
  Synthetic oligonucleotide
gatatcaatgggctcatcatgtacaattaaagtatgtccacttaatacacaaactcttgg

SEQ ID NO: 402079 - DNA, 60 bp, Artificial
  Synthetic oligonucleotide
gatatcacaccaattgacactgtagaccccacagcatcatccatcgtacccctcaatgaa

SEQ ID NO: 402080 - DNA, 55 bp, Artificial
  Synthetic oligonucleotide
gatatcacagtttgacattggtcagtacaagaatatgctgaatgtcctcacagcg

SEQ ID NO: 402081 - DNA, 60 bp, Artificial
  Synthetic oligonucleotide
gatatcagctagtcactacagatacactactccagacacatactcaaaagctggctacat

SEQ ID NO: 402082 - DNA, 57 bp, Artificial
  Synthetic oligonucleotide
gatatcagctcttgttattatctgtagaaatcatgatgatctagtcacagttactgc

SEQ ID NO: 402083 - DNA, 57 bp, Artificial
  Synthetic oligonucleotide
gatatcaggggtcctccggcgcctacgccccacaagaaatacagggggcctgctata

SEQ ID NO: 402084 - DNA, 59 bp, Artificial
  Synthetic oligonucleotide
gatatcaggttttaaagaggtttcaagcaactgtcactggaggaccgtctggttgcaga

SEQ ID NO: 402085 - DNA, 55 bp, Artificial
  Synthetic oligonucleotide
gatatcatagagctaatgcagagagtgcaggcacatggctacacctccttcttca

SEQ ID NO: 402086 - DNA, 55 bp, Artificial
  Synthetic oligonucleotide
gatatcatgatcaattgtgagacaacacctgaagcactctctcaatgggccctcg

SEQ ID NO: 402087 - DNA, 60 bp, Artificial
  Synthetic oligonucleotide
gatatcatggacagtgagcgggacactagctgtgacagtgcacggtggcaactatcctgg

SEQ ID NO: 402088 - DNA, 54 bp, Artificial
  Synthetic oligonucleotide
gatatcattcccccggaggacatgtacacctcactgctgcgcttggccaagaac

SEQ ID NO: 402089 - DNA, 60 bp, Artificial
  Synthetic oligonucleotide
gatatccaagaggatataacccgccatgaacaacagcttgttgttgccagacagaaactt

SEQ ID NO: 402090 - DNA, 55 bp, Artificial
  Synthetic oligonucleotide
gatatccacgaatgatggcgattgtggcaatccactagttagtgtctccgacggc

SEQ ID NO: 402091 - DNA, 60 bp, Artificial
  Synthetic oligonucleotide
gatatccaggaaatcgcctcatgtacttgtggcgctctccaggcataccaaaactatgac

SEQ ID NO: 402092 - DNA, 60 bp, Artificial
  Synthetic oligonucleotide
gatatccaggacgagataacccgccatgaacagcaacttgttgctgccagacaaaaactc

SEQ ID NO: 402093 - DNA, 60 bp, Artificial
  Synthetic oligonucleotide
gatatccattcaacaataccatacattgttgatctgattgatccagaaagcggggacgtg

SEQ ID NO: 402094 - DNA, 54 bp, Artificial
  Synthetic oligonucleotide
gatatcccagataatacgttggcggtaagtgttctatcaaaaaatcgtgtcata

SEQ ID NO: 402095 - DNA, 58 bp, Artificial
  Synthetic oligonucleotide
gatatcccgccgtgttggaacgagactcaaggagataaacgcggtctaatcagtgcga

SEQ ID NO: 402096 - DNA, 60 bp, Artificial
  Synthetic oligonucleotide
gatatcccgtgtgcaagacgtgatgtcaattcaaccaaagaagggtgatgtcattattgc

SEQ ID NO: 402097 - DNA, 60 bp, Artificial
  Synthetic oligonucleotide
gatatccctcgtgataagaaggattatctgcaatacagtttaatagagatgtttaaggat

SEQ ID NO: 402098 - DNA, 60 bp, Artificial
  Synthetic oligonucleotide
gatatccgaccaatcataatctcgttacttattagcacgtgcgtacaggccgacagaatc

SEQ ID NO: 402099 - DNA, 57 bp, Artificial
  Synthetic oligonucleotide
gatatccgtacggaggaggcaatctaccagtgttgtgacttggacccccaagcccgc

SEQ ID NO: 402100 - DNA, 60 bp, Artificial
  Synthetic oligonucleotide
gatatccttactggctatacttcttcggaagatcagagagagatctaaaagcactagcaa

SEQ ID NO: 402101 - DNA, 55 bp, Artificial
  Synthetic oligonucleotide
gatatcctttgactgttgagactaaaggtggacctgtaccttttttggcccgcag

SEQ ID NO: 402102 - DNA, 55 bp, Artificial
  Synthetic oligonucleotide
gatatcgacgctagatagacagtcgcccactagagttaccgtctccgaatgcggc

SEQ ID NO: 402103 - DNA, 60 bp, Artificial
  Synthetic oligonucleotide
gatatcgaggatgtgcaagggtacgtgcgttcgcaagtgcaaacgatgataacgaaggtg

SEQ ID NO: 402104 - DNA, 55 bp, Artificial
  Synthetic oligonucleotide
gatatcggagagctccgacactgccagcatctcctacactgacggggaagggtcc

SEQ ID NO: 402105 - DNA, 50 bp, Artificial
  Synthetic oligonucleotide
gatatcgtgtcgtgttgctatagtaagggtacacgcggggcgctgtgcat

SEQ ID NO: 402106 - DNA, 55 bp, Artificial
  Synthetic oligonucleotide
gatatctacttgttgtatactgctaacttcacattcggagattctgaagaaccag

SEQ ID NO: 402107 - DNA, 59 bp, Artificial
  Synthetic oligonucleotide
gatatctagagggtcgaccactagtatagtggagcatccacagacatcattcatgatta

SEQ ID NO: 402108 - DNA, 60 bp, Artificial
  Synthetic oligonucleotide
gatatctagcccgctggtacgtgtcaacaggctaggcccaggaatacccgatcatccgct

SEQ ID NO: 402109 - DNA, 60 bp, Artificial
  Synthetic oligonucleotide
gatatctcacacttttacaaatgtgtgcttttagaaagatagtgaagggccagagtgaga

SEQ ID NO: 402110 - DNA, 55 bp, Artificial
  Synthetic oligonucleotide
gatatctcacagaggtaagaacatacacgtaaacataactggaactcatggaagc

SEQ ID NO: 402111 - DNA, 55 bp, Artificial
  Synthetic oligonucleotide
gatatctcagatacgacgggacggaagcttcattgcacagagctcttggatcttg

SEQ ID NO: 402112 - DNA, 52 bp, Artificial
  Synthetic oligonucleotide
gatatctccgaaggattatcttcgaggactagcaaggggtgtattgattggc

SEQ ID NO: 402113 - DNA, 54 bp, Artificial
  Synthetic oligonucleotide
gatatctccgtattttatacttgggttaagtagataaagagagtacgaaccgta

SEQ ID NO: 402114 - DNA, 55 bp, Artificial
  Synthetic oligonucleotide
gatatctcggacctgttagacaattgtgacctggatcagggcaattcacgggaac

SEQ ID NO: 402115 - DNA, 60 bp, Artificial
  Synthetic oligonucleotide
gatatctctcaagtgattattctagcttttgacttgatattcgagagaagaaggagggtt

SEQ ID NO: 402116 - DNA, 60 bp, Artificial
  Synthetic oligonucleotide
gatatctgaccagctgttgatgaggaaccatttgagggacttaatgggggtgccttactg

SEQ ID NO: 402117 - DNA, 60 bp, Artificial
  Synthetic oligonucleotide
gatatctgacgagtatgagctcctaatctcagattctgaagacggcgattaatgattaaa

SEQ ID NO: 402118 - DNA, 54 bp, Artificial
  Synthetic oligonucleotide
gatatctgagtcgccagttatatcggctataatagactttcagacattaaagct

SEQ ID NO: 402119 - DNA, 57 bp, Artificial
  Synthetic oligonucleotide
gatatctgtagagttgccttctagttttcctgtttctactcccttggaaccgatgac

SEQ ID NO: 402120 - DNA, 55 bp, Artificial
  Synthetic oligonucleotide
gatatctgtatcaggataacgagcgagtggctcatactcatgtagtaaacggcac

SEQ ID NO: 402121 - DNA, 58 bp, Artificial
  Synthetic oligonucleotide
gatatctgtcctcccagcagttatcgcacgtctacccttcctcgtggacacccgagac

SEQ ID NO: 402122 - DNA, 55 bp, Artificial
  Synthetic oligonucleotide
gatatcttaatcttggtggacggcagacagctcgtaccttgatgtacaacttccc

SEQ ID NO: 402123 - DNA, 54 bp, Artificial
  Synthetic oligonucleotide
gatatcttccttcgtcatgctctccagtttatttcttcttggcacaaatatgtt

SEQ ID NO: 402124 - DNA, 50 bp, Artificial
  Synthetic oligonucleotide
gatatgaaaaccagaagcatagttggggtacatagccttgcatccgtaaa

SEQ ID NO: 402125 - DNA, 55 bp, Artificial
  Synthetic oligonucleotide
gatatgaaacatcggacagaatgaaactgcatagagcatctggtttatgtccagg

SEQ ID NO: 402126 - DNA, 57 bp, Artificial
  Synthetic oligonucleotide
gatatgaacgcggcctacatattcgccctgagaccgacttttccgtattcgtatggg

SEQ ID NO: 402127 - DNA, 55 bp, Artificial
  Synthetic oligonucleotide
gatatgaagcaagctatcaagcagagtctatgcgtgggcagttctgaacgccttg

SEQ ID NO: 402128 - DNA, 60 bp, Artificial
  Synthetic oligonucleotide
gatatgaatgactgctttgtatctagacatgttaaagtctgtatcattgggacagtttct

SEQ ID NO: 402129 - DNA, 53 bp, Artificial
  Synthetic oligonucleotide
gatatgaatttacacgacatttcatagactactgtaatcgatgttatggtgtg

SEQ ID NO: 402130 - DNA, 55 bp, Artificial
  Synthetic oligonucleotide
gatatgacatatcagccattaagaaaacaattcccgaagacattccgttagaagc

SEQ ID NO: 402131 - DNA, 58 bp, Artificial
  Synthetic oligonucleotide
gatatgaccaagagtcaacactttgcgtgttggccgtatggaatgctttaaggtttat

SEQ ID NO: 402132 - DNA, 60 bp, Artificial
  Synthetic oligonucleotide
gatatgacgtctgcggaagtatgggcggggccttcgtctaatctgaaatacagcgcatgc

SEQ ID NO: 402133 - DNA, 58 bp, Artificial
  Synthetic oligonucleotide
gatatgactttgagagagaggggtactctctggtcggaatagatcctttccggctact

SEQ ID NO: 402134 - DNA, 60 bp, Artificial
  Synthetic oligonucleotide
gatatgagactagcatgctacatagctcaccgccctatcgagttagctatcctaaagaga

SEQ ID NO: 402135 - DNA, 55 bp, Artificial
  Synthetic oligonucleotide
gatatgagggacaattggagaagtgaattatttaagtacaaggtagtacaaatta

SEQ ID NO: 402136 - DNA, 56 bp, Artificial
  Synthetic oligonucleotide
gatatgaggtaattctgggcggatgcaagtgaaattaggccattttggcgcgaaaa

SEQ ID NO: 402137 - DNA, 55 bp, Artificial
  Synthetic oligonucleotide
gatatgatacacatgatgtcagcgatctaatacgtgaacataatcaattcgtgat

SEQ ID NO: 402138 - DNA, 55 bp, Artificial
  Synthetic oligonucleotide
gatatgatcttgcgcgcatgtgaaaagttaggacatagcatagttaggaagtgtg

SEQ ID NO: 402139 - DNA, 60 bp, Artificial
  Synthetic oligonucleotide
gatatgattcaggtgtcactaaatgctggagcgagaggggatgtacaacagatatttcag

SEQ ID NO: 402140 - DNA, 60 bp, Artificial
  Synthetic oligonucleotide
gatatgcaaccgtaccattcctacggtggacctggtgaggatcactatgtaccgatggga

SEQ ID NO: 402141 - DNA, 60 bp, Artificial
  Synthetic oligonucleotide
gatatgcaccggctacatctcagcaaggttgggcgagttcacacccaccaacatccggaa

SEQ ID NO: 402142 - DNA, 60 bp, Artificial
  Synthetic oligonucleotide
gatatgcagcagacagagaaagtactcaaaaggctatagacggaattacaaataaggtca

SEQ ID NO: 402143 - DNA, 55 bp, Artificial
  Synthetic oligonucleotide
gatatgcatgggacatcatgctgtggccaatgggactatggtaaagaccctagcc

SEQ ID NO: 402144 - DNA, 60 bp, Artificial
  Synthetic oligonucleotide
gatatgccgcccccacctgctattgctgatttgttgaagagcgtggatagtgaagaattg

SEQ ID NO: 402145 - DNA, 55 bp, Artificial
  Synthetic oligonucleotide
gatatgcctagcattcaaaggagatggtatcaacacagggaagtcaggggttccg

SEQ ID NO: 402146 - DNA, 55 bp, Artificial
  Synthetic oligonucleotide
gatatgcctttatatcattgttaagaagaccccatattgctgccagggctatagg

SEQ ID NO: 402147 - DNA, 59 bp, Artificial
  Synthetic oligonucleotide
gatatgcgaagtagatcactcttaacgcctcgcaaatttacaacattgggatccttaaa

SEQ ID NO: 402148 - DNA, 60 bp, Artificial
  Synthetic oligonucleotide
gatatgctgcggataattcgggatcatatgaccaaccacatgttgtttgtgccagatcga

SEQ ID NO: 402149 - DNA, 55 bp, Artificial
  Synthetic oligonucleotide
gatatgcttttgatttctacaggctaacttcgagaactcctgtgcgtgctaggga

SEQ ID NO: 402150 - DNA, 60 bp, Artificial
  Synthetic oligonucleotide
gatatggaaatgttcttgatgtaaattccattgacttagaagagccaagtgggcaaacag

SEQ ID NO: 402151 - DNA, 57 bp, Artificial
  Synthetic oligonucleotide
gatatggaataacatgacttggctacaatgggataaagaggttagcaattacacaca

SEQ ID NO: 402152 - DNA, 54 bp, Artificial
  Synthetic oligonucleotide
gatatggaattgagactagaatggcagctttgactctatccactctcagaccag

SEQ ID NO: 402153 - DNA, 60 bp, Artificial
  Synthetic oligonucleotide
gatatggacaatcggccgtttgggggagtgatgagcatcgggctagcgctgaggttggca

SEQ ID NO: 402154 - DNA, 52 bp, Artificial
  Synthetic oligonucleotide
gatatggacaatcggccgtttggttggcagggttcagcgcgaggagtcagct

SEQ ID NO: 402155 - DNA, 60 bp, Artificial
  Synthetic oligonucleotide
gatatggaccaaagcaccggtacgacagttgaggctatttcagcgttgtgtgttagtcaa

SEQ ID NO: 402156 - DNA, 57 bp, Artificial
  Synthetic oligonucleotide
gatatggagtattgtttcaaacagtctcaggaattagttcacttgtttccgccggga

SEQ ID NO: 402157 - DNA, 55 bp, Artificial
  Synthetic oligonucleotide
gatatggatgacttatacatcattatggatgctgacacacaagcggaagttgatg

SEQ ID NO: 402158 - DNA, 60 bp, Artificial
  Synthetic oligonucleotide
gatatggatggacgagaatatcaagctcaagaaccacaccaatagtgtcatgttttggtt

SEQ ID NO: 402159 - DNA, 55 bp, Artificial
  Synthetic oligonucleotide
gatatggattatactgtatcaggagacgggactgaatatcttgctacggttggtg

SEQ ID NO: 402160 - DNA, 51 bp, Artificial
  Synthetic oligonucleotide
gatatggcagatactgtgcccgtatccgttaaccagctttccaatctgcgt

SEQ ID NO: 402161 - DNA, 60 bp, Artificial
  Synthetic oligonucleotide
gatatggcgcttatggctagttctggcttctgggcgagtcctaattatatgacacaatat

SEQ ID NO: 402162 - DNA, 60 bp, Artificial
  Synthetic oligonucleotide
gatatggctggataagcataactattatgatatagatctggtctattcaaatttctcgca

SEQ ID NO: 402163 - DNA, 60 bp, Artificial
  Synthetic oligonucleotide
gatatggctgttgagaataaaaattctagagatgcaggcaaagtcgttgactctgaaact

SEQ ID NO: 402164 - DNA, 60 bp, Artificial
  Synthetic oligonucleotide
gatatgggagttaagaattcagctgacttctctgagtcagtcaggcgagcccctaaattc

SEQ ID NO: 402165 - DNA, 60 bp, Artificial
  Synthetic oligonucleotide
gatatgggccagcattaagcatcaatgaactgagcaaccttgcgaaaggagaaaaagcta

SEQ ID NO: 402166 - DNA, 60 bp, Artificial
  Synthetic oligonucleotide
gatatggggaggggagaattcagaacacactatggagtggaaagcgcgcggtgatgcgca

SEQ ID NO: 402167 - DNA, 55 bp, Artificial
  Synthetic oligonucleotide
gatatggggagtacatcaccccgcaactctaaaggaacaccaagacttgtacaaa

SEQ ID NO: 402168 - DNA, 52 bp, Artificial
  Synthetic oligonucleotide
gatatggggctatgaatttcaaagggctgcaagagaataggtctgaggtgcc

SEQ ID NO: 402169 - DNA, 55 bp, Artificial
  Synthetic oligonucleotide
gatatgggtaagtcttttcctaatcgatctaggtcgtatatcaagttgaaacggc

SEQ ID NO: 402170 - DNA, 55 bp, Artificial
  Synthetic oligonucleotide
gatatgggtatcccggtagtccattcggtagaggcaaacggtatccaatcggtcc

SEQ ID NO: 402171 - DNA, 60 bp, Artificial
  Synthetic oligonucleotide
gatatgggtcaggctcattctcatcgtcccagacttcagactcccagtccagaggaccca

SEQ ID NO: 402172 - DNA, 60 bp, Artificial
  Synthetic oligonucleotide
gatatggtccagcggaagatattcacggcgaatctcaacccagacaaaatctgtgtctca

SEQ ID NO: 402173 - DNA, 60 bp, Artificial
  Synthetic oligonucleotide
gatatggtctgttccagttcgctcatagctcataaacggttcgaggtggcccttagtcat

SEQ ID NO: 402174 - DNA, 57 bp, Artificial
  Synthetic oligonucleotide
gatatggttcgcacttgcgagggaaaacggggttatcttacaggtctgcctgcccag

SEQ ID NO: 402175 - DNA, 56 bp, Artificial
  Synthetic oligonucleotide
gatatggttgagttattagcattgattaaacactgtggcaaattagagccaacacc

SEQ ID NO: 402176 - DNA, 50 bp, Artificial
  Synthetic oligonucleotide
gatatgtaccttataataacttgaattggatatcctctggaggggaatgt

SEQ ID NO: 402177 - DNA, 60 bp, Artificial
  Synthetic oligonucleotide
gatatgtataagcgcggattgaattacgatccgagttgggcgatgaagttcgtggttaca

SEQ ID NO: 402178 - DNA, 55 bp, Artificial
  Synthetic oligonucleotide
gatatgtcagaactagctgatcttattttgaacgaatggctatgcaatccgatgg

SEQ ID NO: 402179 - DNA, 56 bp, Artificial
  Synthetic oligonucleotide
gatatgtcgaaacccttaagcgcatgtgccgacttcccggggtacttcattagtac

SEQ ID NO: 402180 - DNA, 55 bp, Artificial
  Synthetic oligonucleotide
gatatgtcggacatcttcaactcaccacagaacaaggcttctatcttgagcgctc

SEQ ID NO: 402181 - DNA, 59 bp, Artificial
  Synthetic oligonucleotide
gatatgtcggtgtcaggttactgatcctcctttgatacgtcatgaagactatgattgta

SEQ ID NO: 402182 - DNA, 55 bp, Artificial
  Synthetic oligonucleotide
gatatgtctcttatggctagtggtgcattttgggcgagtcctaactatatgactc

SEQ ID NO: 402183 - DNA, 60 bp, Artificial
  Synthetic oligonucleotide
gatatgtgcctgatggcactattacctatcgtaaggagggttgtcgtatgagtggggata

SEQ ID NO: 402184 - DNA, 60 bp, Artificial
  Synthetic oligonucleotide
gatatgtgtgaaaacctgacacagaactgcgacgttaaatatcctaacatcattgcagtt

SEQ ID NO: 402185 - DNA, 53 bp, Artificial
  Synthetic oligonucleotide
gatatgtgtgccctcaggaacttgagagaaattgacacccatgaatgcatttt

SEQ ID NO: 402186 - DNA, 58 bp, Artificial
  Synthetic oligonucleotide
gatatgttatgtattttgtgcttattgcggaatggtacacgaaaagaagggcctgatt

SEQ ID NO: 402187 - DNA, 57 bp, Artificial
  Synthetic oligonucleotide
gatatgttcaaatagcttacgactcaccatccgtggttgatggagctacacaatacg

SEQ ID NO: 402188 - DNA, 53 bp, Artificial
  Synthetic oligonucleotide
gatatgttccagctaggacaagcagtagcacgtgatgctgaagctcagatgag

SEQ ID NO: 402189 - DNA, 58 bp, Artificial
  Synthetic oligonucleotide
gatatgttgactaacatgactaacgatccaaaagtagtacatacgttaaatttataca

SEQ ID NO: 402190 - DNA, 60 bp, Artificial
  Synthetic oligonucleotide
gatattacgcaatcgctcaaaatgggcactaagctggctgcgccgactgtgtagagatgc

SEQ ID NO: 402191 - DNA, 58 bp, Artificial
  Synthetic oligonucleotide
gatattacgtcagtagtacacccttctttagaagcggtgtccagaagacacatactgg

SEQ ID NO: 402192 - DNA, 57 bp, Artificial
  Synthetic oligonucleotide
gatattacgttgtgtttagtagtagggccttatgaaacagcgtctagttcaaagaca

SEQ ID NO: 402193 - DNA, 60 bp, Artificial
  Synthetic oligonucleotide
gatattactaatgatgtttctggaaatagtactattggatcaatgaatattagtttccaa

SEQ ID NO: 402194 - DNA, 60 bp, Artificial
  Synthetic oligonucleotide
gatattactacctcacccgtgactgtaccactccacttgcgcgagctgcttgggagacag

SEQ ID NO: 402195 - DNA, 60 bp, Artificial
  Synthetic oligonucleotide
gatattagagcactgattccagagaatccaactggagccgcagaggccgtggtgtgtgtg

SEQ ID NO: 402196 - DNA, 60 bp, Artificial
  Synthetic oligonucleotide
gatattagcctcatcgaggcactcactacattagttgatgtagtctagtctattcccgga

SEQ ID NO: 402197 - DNA, 54 bp, Artificial
  Synthetic oligonucleotide
gatattagtagagttgtctgcaacgtccaaaacgaaaaatcgcgacaaaaattt

SEQ ID NO: 402198 - DNA, 50 bp, Artificial
  Synthetic oligonucleotide
gatattatttttgagggggtcataattgaccccgtggtaataggatagtt

SEQ ID NO: 402199 - DNA, 52 bp, Artificial
  Synthetic oligonucleotide
gatattcaacacagccacagggaccataggggcggttgcattggattacccc

SEQ ID NO: 402200 - DNA, 50 bp, Artificial
  Synthetic oligonucleotide
gatattcaacagtggggatatactgggtctttaactagcaatcatgacct

SEQ ID NO: 402201 - DNA, 60 bp, Artificial
  Synthetic oligonucleotide
gatattcataagcaggagtggactattaagccgctctctggtcagattatcttcgggtcc

SEQ ID NO: 402202 - DNA, 60 bp, Artificial
  Synthetic oligonucleotide
gatattcatctccgttacggaaacagcacatggtgtccgtagctgcacgatacaacgact

SEQ ID NO: 402203 - DNA, 60 bp, Artificial
  Synthetic oligonucleotide
gatattcatgatgctatacaagaaggtgttggtacccgaaatgcaggcgcgtatgcgtgc

SEQ ID NO: 402204 - DNA, 60 bp, Artificial
  Synthetic oligonucleotide
gatattccccaagacaagttggcccaatcatgacacgaacagaggtgtgacggcagcatg

SEQ ID NO: 402205 - DNA, 60 bp, Artificial
  Synthetic oligonucleotide
gatattccctatatgaggatgtaggtcctggattgcagaggaagatagtgggaattcccc

SEQ ID NO: 402206 - DNA, 58 bp, Artificial
  Synthetic oligonucleotide
gatattcccttcaaatccgttgaagtcgaatggaacgtgcatgtctccgtacgtgtac

SEQ ID NO: 402207 - DNA, 55 bp, Artificial
  Synthetic oligonucleotide
gatattccgattgccgtcgcttgcaaagacaacgccacattttgggaacgcgtcc

SEQ ID NO: 402208 - DNA, 58 bp, Artificial
  Synthetic oligonucleotide
gatattcgaagcagttacaatgactctatcaactataggttcaacgttgacaactgca

SEQ ID NO: 402209 - DNA, 50 bp, Artificial
  Synthetic oligonucleotide
gatattcgaggcatcaagtggaagggtagtcggcagggttaaggtcggga

SEQ ID NO: 402210 - DNA, 55 bp, Artificial
  Synthetic oligonucleotide
gatattcgtcccgatgggactctatgtagttaaatgcgttgggaggattgaccaa

SEQ ID NO: 402211 - DNA, 60 bp, Artificial
  Synthetic oligonucleotide
gatattcgtgaattgcttactatcatacccacttctactaccgctggcaagttatcatgt

SEQ ID NO: 402212 - DNA, 55 bp, Artificial
  Synthetic oligonucleotide
gatattctcaagatgatgaaaactgatcgagatgctgagattgcacgcaaggagc

SEQ ID NO: 402213 - DNA, 60 bp, Artificial
  Synthetic oligonucleotide
gatattgaggacgtgcaaggatacgtgcgctcgcaagtgcaaacgatgataacaaaagtg

SEQ ID NO: 402214 - DNA, 60 bp, Artificial
  Synthetic oligonucleotide
gatattgatcagtttcccctcgggagacggtttctagctcagcagggcttaggatgcaca

SEQ ID NO: 402215 - DNA, 51 bp, Artificial
  Synthetic oligonucleotide
gatattgatgatctgtaatgctactgaaaagttatgggtcacagtctatta

SEQ ID NO: 402216 - DNA, 55 bp, Artificial
  Synthetic oligonucleotide
gatattgcattatggtcgcagttaacctgtagcttatatattcctgtgtcggagc

SEQ ID NO: 402217 - DNA, 54 bp, Artificial
  Synthetic oligonucleotide
gatattgcgggagagtctacgtagctccacggagtcctggctgcgtgttcgggg

SEQ ID NO: 402218 - DNA, 51 bp, Artificial
  Synthetic oligonucleotide
gatattggcgaggttaaccgtaataacgtaggctagcaatggaaactggat

SEQ ID NO: 402219 - DNA, 56 bp, Artificial
  Synthetic oligonucleotide
gatattggggattaataatgggaaaaagttcaatgggaagcaaaggattagatgta

SEQ ID NO: 402220 - DNA, 60 bp, Artificial
  Synthetic oligonucleotide
gatattggggtgtatttgtcccacactggagacactgcaagtgtgcatatgaaactgcac

SEQ ID NO: 402221 - DNA, 54 bp, Artificial
  Synthetic oligonucleotide
gatattgtcgctgtaactaaacttattaacggtgggactaacggattaagtgac

SEQ ID NO: 402222 - DNA, 57 bp, Artificial
  Synthetic oligonucleotide
gatattgtggtggaattttatacaaaattggtcaagtcttgggtattcatgttggtg

SEQ ID NO: 402223 - DNA, 55 bp, Artificial
  Synthetic oligonucleotide
gatatttaaatactcttaagaaacgaccagtctgaggccgtaaggtcgtccagac

SEQ ID NO: 402224 - DNA, 60 bp, Artificial
  Synthetic oligonucleotide
gatatttcgcactcctagtgaatcttcctagtatatccgctgaaaaaacagagaggcaac

SEQ ID NO: 402225 - DNA, 60 bp, Artificial
  Synthetic oligonucleotide
gatatttctgctagaaagactcttaatcgttctgaacactttcttgaaagttgcggctga

SEQ ID NO: 402226 - DNA, 55 bp, Artificial
  Synthetic oligonucleotide
gatatttgagactgctcaggttgtggccgctgcacttcggatgttcctgtgagcg

SEQ ID NO: 402227 - DNA, 55 bp, Artificial
  Synthetic oligonucleotide
gatatttggatgggacgaacgatcaaagaggattcacgctcaggttatgagacgt

SEQ ID NO: 402228 - DNA, 53 bp, Artificial
  Synthetic oligonucleotide
gatatttggtctagtcaagactttagattggtcatttaatcatcaagtaggtc

SEQ ID NO: 402229 - DNA, 59 bp, Artificial
  Synthetic oligonucleotide
gatattttcctggtacatgcccactggggatctgggaatgtatagttggattagtctaa

SEQ ID NO: 402230 - DNA, 60 bp, Artificial
  Synthetic oligonucleotide
gatatttttaacatgcctcatgtagtgtgcaatcttgagatgggccgcaagtttcgcttc

SEQ ID NO: 402231 - DNA, 60 bp, Artificial
  Synthetic oligonucleotide
gatatttttacaatcgccatagattacagtgaatatgatacacaccttactcgatataat

SEQ ID NO: 402232 - DNA, 60 bp, Artificial
  Synthetic oligonucleotide
gatcaaaaaggaagcagtatatgtaggatgggtgccagctcacaaaggactaggtggtaa

SEQ ID NO: 402233 - DNA, 60 bp, Artificial
  Synthetic oligonucleotide
gatcaaaaccatgtcaagaattgtcgtatatgagttgaacaagtgttcaactacagcata

SEQ ID NO: 402234 - DNA, 60 bp, Artificial
  Synthetic oligonucleotide
gatcaaaagcagaaatcggatcgctcctcttccaagccggcaggtttgagagagtcgaag

SEQ ID NO: 402235 - DNA, 58 bp, Artificial
  Synthetic oligonucleotide
gatcaaacatccagggacctagtagtcagttatgtcaacactactagtggcctaaagt

SEQ ID NO: 402236 - DNA, 56 bp, Artificial
  Synthetic oligonucleotide
gatcaaacctgcgaacaccttaaagtttcctgcggcccaaaatctgtacagttcca

SEQ ID NO: 402237 - DNA, 60 bp, Artificial
  Synthetic oligonucleotide
gatcaaactacccagttgcccaaagatcatacaacaacacaagcggggagcaaatgctga

SEQ ID NO: 402238 - DNA, 60 bp, Artificial
  Synthetic oligonucleotide
gatcaaagaagccatcctacggaagatcgatgttcgttcgatcgagaggcaggttgtgga

SEQ ID NO: 402239 - DNA, 60 bp, Artificial
  Synthetic oligonucleotide
gatcaaagaataatatggcagaactggtatgcgtttacatcctcaatgaaacaaggcaac

SEQ ID NO: 402240 - DNA, 51 bp, Artificial
  Synthetic oligonucleotide
gatcaaagctcggatcattctctataatgaggtttactggggaggccagca

SEQ ID NO: 402241 - DNA, 55 bp, Artificial
  Synthetic oligonucleotide
gatcaaatacatggtatatcaagtggagaggggacaggagggtactcggcatgtg

SEQ ID NO: 402242 - DNA, 55 bp, Artificial
  Synthetic oligonucleotide
gatcaaatataacgctcctcgctactattccgcgcaatatcgggcagttaccgcg

SEQ ID NO: 402243 - DNA, 58 bp, Artificial
  Synthetic oligonucleotide
gatcaacaaaaacacaaaacgttacagtgaatccaggaccattcgcgcaaactggata

SEQ ID NO: 402244 - DNA, 55 bp, Artificial
  Synthetic oligonucleotide
gatcaacaactatgtccatcaacctgagctcttctctgccatcgtcgctacgatg

SEQ ID NO: 402245 - DNA, 55 bp, Artificial
  Synthetic oligonucleotide
gatcaacaataagattgatgaccaaatacaggacatatgggcatacaatgcagag

SEQ ID NO: 402246 - DNA, 55 bp, Artificial
  Synthetic oligonucleotide
gatcaacaattcgctttgtgagattgaattgaagcattagagctatatcgagccg

SEQ ID NO: 402247 - DNA, 60 bp, Artificial
  Synthetic oligonucleotide
gatcaacagaacaattagcggtgtttgtgatgcactaaccaacaggacttcactcacgct

SEQ ID NO: 402248 - DNA, 53 bp, Artificial
  Synthetic oligonucleotide
gatcaacagcgagggggcataccaattgccagccaattattacgatgccatgc

SEQ ID NO: 402249 - DNA, 60 bp, Artificial
  Synthetic oligonucleotide
gatcaacaggcccgtgtatcgcaagcccagagtcttcagaatgtacagaagccctgatgt

SEQ ID NO: 402250 - DNA, 60 bp, Artificial
  Synthetic oligonucleotide
gatcaaccatctacgattggagatcaatcatcaacaccacctaagttagttaaacaacaa

SEQ ID NO: 402251 - DNA, 58 bp, Artificial
  Synthetic oligonucleotide
gatcaaccctccgtctgcgaattggtctcttcttcgctattttgtgttggaccttgat

SEQ ID NO: 402252 - DNA, 52 bp, Artificial
  Synthetic oligonucleotide
gatcaacccttaaggtacacagtagcagtgagtgcacggtaaccggcacaat

SEQ ID NO: 402253 - DNA, 55 bp, Artificial
  Synthetic oligonucleotide
gatcaaccggtcacgtttgagcaggcacgaaatgcatatctcggagctgccgaga

SEQ ID NO: 402254 - DNA, 53 bp, Artificial
  Synthetic oligonucleotide
gatcaacgaatgcgatgtagatccgtccagtgtcagaacgctggtctagtagc

SEQ ID NO: 402255 - DNA, 57 bp, Artificial
  Synthetic oligonucleotide
gatcaacggcccggaatcggtactggtcaacacataccaatgggtcattaggaactg

SEQ ID NO: 402256 - DNA, 54 bp, Artificial
  Synthetic oligonucleotide
gatcaacgggttccctgtaaaagtgtatgaactgcccgttctgtggttggaaaa

SEQ ID NO: 402257 - DNA, 60 bp, Artificial
  Synthetic oligonucleotide
gatcaactataagaactgctgacatcgagcttctctctgggactttccgctggggacttt

SEQ ID NO: 402258 - DNA, 55 bp, Artificial
  Synthetic oligonucleotide
gatcaactattaggtcaattggctcttcagcatctgcatggacagaaatctcgac

SEQ ID NO: 402259 - DNA, 50 bp, Artificial
  Synthetic oligonucleotide
gatcaactcaaataagtcctaatactttaccagatataataacggaagca

SEQ ID NO: 402260 - DNA, 60 bp, Artificial
  Synthetic oligonucleotide
gatcaactccttgtttcaaactgcatttgatcttgccccagacactgtcttgctgcagcc

SEQ ID NO: 402261 - DNA, 55 bp, Artificial
  Synthetic oligonucleotide
gatcaactctcccgaggagatctggggcagctggtgcagcagtgaagggagttgg

SEQ ID NO: 402262 - DNA, 51 bp, Artificial
  Synthetic oligonucleotide
gatcaactgagtgttgagctctgtttgatagaggaatgggtcagattgtga

SEQ ID NO: 402263 - DNA, 56 bp, Artificial
  Synthetic oligonucleotide
gatcaagaaaagtaatgcgtacccaacaataaagaggacctacaacaacaccaata

SEQ ID NO: 402264 - DNA, 60 bp, Artificial
  Synthetic oligonucleotide
gatcaagaacacaactcagctacacttattgccgattccggacagagatctcctgttaat

SEQ ID NO: 402265 - DNA, 53 bp, Artificial
  Synthetic oligonucleotide
gatcaagaaccaccactgctgaagaagggacacccttaattgacgaccaaata

SEQ ID NO: 402266 - DNA, 55 bp, Artificial
  Synthetic oligonucleotide
gatcaagaaccgaggataaaatcggacagcctgctatcaagccgcggtgcccttc

SEQ ID NO: 402267 - DNA, 60 bp, Artificial
  Synthetic oligonucleotide
gatcaagaatcaagacctctaacggcattcacatgtccacaaggtcactacgaatggaat

SEQ ID NO: 402268 - DNA, 60 bp, Artificial
  Synthetic oligonucleotide
gatcaagaatgcctgcaaatttaagattcactgagtcagttagcgagccatggctagttg

SEQ ID NO: 402269 - DNA, 60 bp, Artificial
  Synthetic oligonucleotide
gatcaagacacattatgttccgctcttcaagggattaactatggctgatgatctcacctc

SEQ ID NO: 402270 - DNA, 56 bp, Artificial
  Synthetic oligonucleotide
gatcaagatgtaataatatactacggtactaaaccaaaacaagacgacaattggac

SEQ ID NO: 402271 - DNA, 58 bp, Artificial
  Synthetic oligonucleotide
gatcaagattagtgcccccaagaacgcacccctactagaacccctacttgacatctgc

SEQ ID NO: 402272 - DNA, 60 bp, Artificial
  Synthetic oligonucleotide
gatcaagcgcaaaaggacctggagaacgcgcgaacgagaatgttgacagaggagatggaa

SEQ ID NO: 402273 - DNA, 60 bp, Artificial
  Synthetic oligonucleotide
gatcaagcgccgagacgtgttgcaattcccattacgtcatctattaagatggttgatccg

SEQ ID NO: 402274 - DNA, 60 bp, Artificial
  Synthetic oligonucleotide
gatcaagcgttcatccgaggagttaaaacagatgcagattcagattaatttggttgattg

SEQ ID NO: 402275 - DNA, 60 bp, Artificial
  Synthetic oligonucleotide
gatcaaggatatctccgtctttctccacgtaggcttcgacatcgcttgagctcttagctc

SEQ ID NO: 402276 - DNA, 55 bp, Artificial
  Synthetic oligonucleotide
gatcaaggcagtccggggtgatttgaactttgtcaatagggcaaaccagcggcta

SEQ ID NO: 402277 - DNA, 60 bp, Artificial
  Synthetic oligonucleotide
gatcaagggggccacagcgacaggggaggaattctcacaggccacgaaacatttgcttga

SEQ ID NO: 402278 - DNA, 52 bp, Artificial
  Synthetic oligonucleotide
gatcaagtcccagaggagatagaatgctgggttcctaaactctactcagatt

SEQ ID NO: 402279 - DNA, 60 bp, Artificial
  Synthetic oligonucleotide
gatcaagtcgcttcgaactctacgtcttatgaccgagcataagtcgaataagactaaggc

SEQ ID NO: 402280 - DNA, 60 bp, Artificial
  Synthetic oligonucleotide
gatcaagtgaacaagcagcagaggctatggaaattgccagccaagctaggcaaatggtac

SEQ ID NO: 402281 - DNA, 51 bp, Artificial
  Synthetic oligonucleotide
gatcaagttcttactgaaatgccagattatttactactaaaagatatggca

SEQ ID NO: 402282 - DNA, 60 bp, Artificial
  Synthetic oligonucleotide
gatcaatactcaacccattgacatatcaaccgaactgagtaaggttaatgcatccctcca

SEQ ID NO: 402283 - DNA, 57 bp, Artificial
  Synthetic oligonucleotide
gatcaatacttcataactaccggtaacgtttaagcgctttctccatcctaccacagc

SEQ ID NO: 402284 - DNA, 60 bp, Artificial
  Synthetic oligonucleotide
gatcaatatcgcacgcaaacagaggttaccgcaattattgatcttcagccatggcactaa

SEQ ID NO: 402285 - DNA, 55 bp, Artificial
  Synthetic oligonucleotide
gatcaatatggacaagtaagtgtcgcagattattatgactgggttggtatgagca

SEQ ID NO: 402286 - DNA, 59 bp, Artificial
  Synthetic oligonucleotide
gatcaatcagcaatcgatcagatggttagaaggtttttcgtagttcttcaaacctaagc

SEQ ID NO: 402287 - DNA, 55 bp, Artificial
  Synthetic oligonucleotide
gatcaatccgtggtccggcccgagtgtccgttgacgactgggacgactcgttcca

SEQ ID NO: 402288 - DNA, 56 bp, Artificial
  Synthetic oligonucleotide
gatcaatcgaccttaccgctgcaactgatagatttccaattagtttacaacgtcgg

SEQ ID NO: 402289 - DNA, 60 bp, Artificial
  Synthetic oligonucleotide
gatcaatcgtatcaccccgttacctctttcgatccatccacgttcaacacattgctacag

SEQ ID NO: 402290 - DNA, 60 bp, Artificial
  Synthetic oligonucleotide
gatcaatcgtgcacagagatttcgtggtgcagagcaacagataaaatttgtctgccagag

SEQ ID NO: 402291 - DNA, 60 bp, Artificial
  Synthetic oligonucleotide
gatcaatctcactaagaaagctgatcctgtaccacgtgtgatccagccccgtgctccccg

SEQ ID NO: 402292 - DNA, 55 bp, Artificial
  Synthetic oligonucleotide
gatcaatgacgacatggttggtcctcagtgggaaccaataataaacctggttacc

SEQ ID NO: 402293 - DNA, 59 bp, Artificial
  Synthetic oligonucleotide
gatcaatggacacaccatatacgaactcaacgcaagaggaagtattcctaacttcgact

SEQ ID NO: 402294 - DNA, 58 bp, Artificial
  Synthetic oligonucleotide
gatcaatggattatacgattagttttgatcaacttagcaccaacgctttacagttggt

SEQ ID NO: 402295 - DNA, 60 bp, Artificial
  Synthetic oligonucleotide
gatcaatttaaagcctatagaagaaccaccctcatcagtatggcagatctcacatcaacc

SEQ ID NO: 402296 - DNA, 53 bp, Artificial
  Synthetic oligonucleotide
gatcaatttagttatgatgtaagtaagcagcttagttatagggattacgtata

SEQ ID NO: 402297 - DNA, 60 bp, Artificial
  Synthetic oligonucleotide
gatcaatttctcatacttacgacaaattgcatcagccccacaatgagttacataaccatc

SEQ ID NO: 402298 - DNA, 59 bp, Artificial
  Synthetic oligonucleotide
gatcacaaaccagtgagtggcttgtcgtaacgcgcaagtctgtggcggaacccgactac

SEQ ID NO: 402299 - DNA, 60 bp, Artificial
  Synthetic oligonucleotide
gatcacaaacgctggttcaaatgcgacacactatcgctggaaacaaagagtggcaaacat

SEQ ID NO: 402300 - DNA, 60 bp, Artificial
  Synthetic oligonucleotide
gatcacaaatcaaaggaagagcatgggagaacaccactgttgatcttgagggcaaaccat

SEQ ID NO: 402301 - DNA, 60 bp, Artificial
  Synthetic oligonucleotide
gatcacaacggacacagcatacattagtgacactctgcacttcttggatccgagctacat

SEQ ID NO: 402302 - DNA, 59 bp, Artificial
  Synthetic oligonucleotide
gatcacaattacacaatgattctggggcgcgcgacgccgtaggagtgaaagcccgtaac

SEQ ID NO: 402303 - DNA, 60 bp, Artificial
  Synthetic oligonucleotide
gatcacacatccgaacaaatgcattgtagcgatcgaggtatctgatgaaagagttccggc

SEQ ID NO: 402304 - DNA, 55 bp, Artificial
  Synthetic oligonucleotide
gatcacaccaggtaggtacagaacagcaatctgtggactctatcctgcacagatc

SEQ ID NO: 402305 - DNA, 59 bp, Artificial
  Synthetic oligonucleotide
gatcacagaccgctacccatacaaggtgcaagtcaaagggggattcgaggaattcacca

SEQ ID NO: 402306 - DNA, 51 bp, Artificial
  Synthetic oligonucleotide
gatcacagcctcatgagtatcatctctacctttcatctgtccattcccaac

SEQ ID NO: 402307 - DNA, 55 bp, Artificial
  Synthetic oligonucleotide
gatcacaggaaacatctgtcaaaattcctggagatctgcaaggcgaatgggctgg

SEQ ID NO: 402308 - DNA, 60 bp, Artificial
  Synthetic oligonucleotide
gatcacaggacccagcatacacccaggcatgctggcactaaacaagagagctagatttat

SEQ ID NO: 402309 - DNA, 55 bp, Artificial
  Synthetic oligonucleotide
gatcacaggcaaattgaatcgtttaattggcaaaacaaatcagcagtttgagctg

SEQ ID NO: 402310 - DNA, 53 bp, Artificial
  Synthetic oligonucleotide
gatcacagtagagtagttaacgttggaccaagaaaagaatctaagtttacttt

SEQ ID NO: 402311 - DNA, 55 bp, Artificial
  Synthetic oligonucleotide
gatcacatacattttgtcatactggacatccctggaataaatcgtggggtcagct

SEQ ID NO: 402312 - DNA, 60 bp, Artificial
  Synthetic oligonucleotide
gatcacattcgcttgtgagtcctaccgttgaggtgtgtcccgtaagcgtaggcacacctc

SEQ ID NO: 402313 - DNA, 57 bp, Artificial
  Synthetic oligonucleotide
gatcacattgactcaccatcatcaatctgggtctttgctggggcacctgataggtgc

SEQ ID NO: 402314 - DNA, 54 bp, Artificial
  Synthetic oligonucleotide
gatcacatttacatgtacaaacgaacttaataaaggttgttacctcgcaaccgt

SEQ ID NO: 402315 - DNA, 60 bp, Artificial
  Synthetic oligonucleotide
gatcacatttggaggtgcaagcctattggaatttgacaccagagaagggatggctatcct

SEQ ID NO: 402316 - DNA, 55 bp, Artificial
  Synthetic oligonucleotide
gatcaccaaacttgacctatgctgctgcggtcgaatcaatggcccatgacacggc

SEQ ID NO: 402317 - DNA, 59 bp, Artificial
  Synthetic oligonucleotide
gatcaccaatctattggtgatcaatcggtactcaatatttggctatacccaaaataccc

SEQ ID NO: 402318 - DNA, 54 bp, Artificial
  Synthetic oligonucleotide
gatcaccatatcttgtggtagtaagcctatgacataacttagaacccctggcat

SEQ ID NO: 402319 - DNA, 57 bp, Artificial
  Synthetic oligonucleotide
gatcacccacattttggatgggaagtcatgaagtcaatggaacgtggatgatacaca

SEQ ID NO: 402320 - DNA, 54 bp, Artificial
  Synthetic oligonucleotide
gatcacccagcattacttagatcaagtgaagcatttccagttaacgcatacaaa

SEQ ID NO: 402321 - DNA, 57 bp, Artificial
  Synthetic oligonucleotide
gatcacccgccgacaagttaagactgtcacatatgcctttctttatggggcgggaaa

SEQ ID NO: 402322 - DNA, 52 bp, Artificial
  Synthetic oligonucleotide
gatcacctggggttcattcgtagcgagcgatgcaggtgtagtaatctttggt

SEQ ID NO: 402323 - DNA, 55 bp, Artificial
  Synthetic oligonucleotide
gatcaccttatactagtgctaacttctttcaggattagagcgcttagatgtgacc

SEQ ID NO: 402324 - DNA, 55 bp, Artificial
  Synthetic oligonucleotide
gatcacgacagagactacctgtttacctatgcaggtataagacaggttgtggata

SEQ ID NO: 402325 - DNA, 60 bp, Artificial
  Synthetic oligonucleotide
gatcacgaggaattatccttccgggccatgtgttctaacatgattctcaatcttcctggt

SEQ ID NO: 402326 - DNA, 55 bp, Artificial
  Synthetic oligonucleotide
gatcacgatcactaaattctgccgcgttctattatagggtttaggtatagcttag

SEQ ID NO: 402327 - DNA, 60 bp, Artificial
  Synthetic oligonucleotide
gatcacgcccaggtgtctggtcgactatccttataggctctggcattatccttgtactat

SEQ ID NO: 402328 - DNA, 55 bp, Artificial
  Synthetic oligonucleotide
gatcacgctgacaagaatcatctagagatatcagccaagaggacaattgtaggca

SEQ ID NO: 402329 - DNA, 55 bp, Artificial
  Synthetic oligonucleotide
gatcacgtattcgctggttcatgtggcttattacgcgtatctttgtgcgcagggg

SEQ ID NO: 402330 - DNA, 55 bp, Artificial
  Synthetic oligonucleotide
gatcacgtcaagacgtttacgcacgtcttagacatatttgtgccgccgactcacg

SEQ ID NO: 402331 - DNA, 55 bp, Artificial
  Synthetic oligonucleotide
gatcacgttatttccagagatcgaatagctattgccaattcgtgtctgagtcacg

SEQ ID NO: 402332 - DNA, 54 bp, Artificial
  Synthetic oligonucleotide
gatcactaaaattactctaactaaatcaaagaaactaccgaagaaagaagctac

SEQ ID NO: 402333 - DNA, 51 bp, Artificial
  Synthetic oligonucleotide
gatcactaagttcggtgacttgtcttcgttgatctagtttgttgcgtatgg

SEQ ID NO: 402334 - DNA, 60 bp, Artificial
  Synthetic oligonucleotide
gatcactagcaagctggatccaaagtgagttcaataaggcgtgtgaattgactgattcca

SEQ ID NO: 402335 - DNA, 60 bp, Artificial
  Synthetic oligonucleotide
gatcactagcgagttggatccagagtgaattcaacaaggcgtgtgagctgaccgattcaa

SEQ ID NO: 402336 - DNA, 60 bp, Artificial
  Synthetic oligonucleotide
gatcactcagaatatgagagttgcagctgcacattatactgcccaactctcaacattaga

SEQ ID NO: 402337 - DNA, 55 bp, Artificial
  Synthetic oligonucleotide
gatcactctttggtggttcgccaatcctccagtaggggtacagtagggactgcgg

SEQ ID NO: 402338 - DNA, 54 bp, Artificial
  Synthetic oligonucleotide
gatcactgaaatcggttcgccccaattgcagtgcggcacccgcaacattcgccc

SEQ ID NO: 402339 - DNA, 54 bp, Artificial
  Synthetic oligonucleotide
gatcactgatagtttcatccagtaataccaatgtaggtagcgtaatgcattctg

SEQ ID NO: 402340 - DNA, 60 bp, Artificial
  Synthetic oligonucleotide
gatcactggtgcgagggaggcaattgctggaatgctagacaccacaaaggggttgataag

SEQ ID NO: 402341 - DNA, 55 bp, Artificial
  Synthetic oligonucleotide
gatcactggtgcttttaccctatatgtaataccacagtctgtttacgaactcggg

SEQ ID NO: 402342 - DNA, 60 bp, Artificial
  Synthetic oligonucleotide
gatcactgtgacaacagttgacaacatcttacccttccactcacagaacaccttgataaa

SEQ ID NO: 402343 - DNA, 60 bp, Artificial
  Synthetic oligonucleotide
gatcacttgaatggtgcagaatgggatgtcttcatagagcgacccactgctgtggacact

SEQ ID NO: 402344 - DNA, 60 bp, Artificial
  Synthetic oligonucleotide
gatcacttggcacgaaattcttgagctggggcactattagcctctctcttgatgccgagg

SEQ ID NO: 402345 - DNA, 60 bp, Artificial
  Synthetic oligonucleotide
gatcagaatctcccctcaatctactcctattgcaagatctttgctcaagctggatttgag

SEQ ID NO: 402346 - DNA, 60 bp, Artificial
  Synthetic oligonucleotide
gatcagaattttacgcaatattggatgtatgggacattagcaccattaaaagattcgtac

SEQ ID NO: 402347 - DNA, 58 bp, Artificial
  Synthetic oligonucleotide
gatcagaccttttggtgagctgtgattgggaaaggtttcccaggtacacacctcctga

SEQ ID NO: 402348 - DNA, 59 bp, Artificial
  Synthetic oligonucleotide
gatcagacgcgcggatggaaaatatgactttcagtttctagaggtggaaggactagtaa

SEQ ID NO: 402349 - DNA, 60 bp, Artificial
  Synthetic oligonucleotide
gatcagagagcgcgaggttattgctacagacgctggtcaagtgatggacacgcttaatgg

SEQ ID NO: 402350 - DNA, 55 bp, Artificial
  Synthetic oligonucleotide
gatcagagattatattggagccagaatgcgaaagattgaagccagggcgggacga

SEQ ID NO: 402351 - DNA, 60 bp, Artificial
  Synthetic oligonucleotide
gatcagagcttagcccgctgctattgtctacaacggagtggcaggtactgccctgttcct

SEQ ID NO: 402352 - DNA, 60 bp, Artificial
  Synthetic oligonucleotide
gatcagaggcagaccaaaagagagtagtgtattgtggacatccaatagtatagtagcgct

SEQ ID NO: 402353 - DNA, 55 bp, Artificial
  Synthetic oligonucleotide
gatcagaggctcaactaggttatgttaagaacttaagcaagccggcaaaagcagc

SEQ ID NO: 402354 - DNA, 60 bp, Artificial
  Synthetic oligonucleotide
gatcagagggtttgtgtactttgttgaaacgctggcaaggagcatatgtgagaagcttga

SEQ ID NO: 402355 - DNA, 58 bp, Artificial
  Synthetic oligonucleotide
gatcagatacttatagaaatttgtggaaagaaagctataggtacagtgttagtaggac

SEQ ID NO: 402356 - DNA, 55 bp, Artificial
  Synthetic oligonucleotide
gatcagatagtcaaatgacgataccgtatcaacatacactttcagtccgttgcgc

SEQ ID NO: 402357 - DNA, 52 bp, Artificial
  Synthetic oligonucleotide
gatcagatcaaattagtggcagggtttgcacaaatgaccacatacacaacaa

SEQ ID NO: 402358 - DNA, 55 bp, Artificial
  Synthetic oligonucleotide
gatcagatccctgctatgaagaaagtattatcagaacctgataaggagttctagc

SEQ ID NO: 402359 - DNA, 55 bp, Artificial
  Synthetic oligonucleotide
gatcagatctgcagagaagcttgctggcgccgtggtacaaggtggggagaagggg

SEQ ID NO: 402360 - DNA, 60 bp, Artificial
  Synthetic oligonucleotide
gatcagatgcgcctattgacacatgcatctctgaatgtattactcctaatggaagcatcc

SEQ ID NO: 402361 - DNA, 52 bp, Artificial
  Synthetic oligonucleotide
gatcagcacgaaagacgggcattgtggactgcccattgtaagcacaagggac

SEQ ID NO: 402362 - DNA, 60 bp, Artificial
  Synthetic oligonucleotide
gatcagcagagaagtggccaaagggaaatccaggcttattgaggcatctagcttgaatga

SEQ ID NO: 402363 - DNA, 55 bp, Artificial
  Synthetic oligonucleotide
gatcagcagcagcaagtgaatatgtgtggaaggaagacaccagggttggagatca

SEQ ID NO: 402364 - DNA, 55 bp, Artificial
  Synthetic oligonucleotide
gatcagcagtcacgggttattccttttccctagctggaatcactgaaggtttcag

SEQ ID NO: 402365 - DNA, 55 bp, Artificial
  Synthetic oligonucleotide
gatcagcagtttgtatcagtcacactttccggctgagtacgtccactgccagcgg

SEQ ID NO: 402366 - DNA, 60 bp, Artificial
  Synthetic oligonucleotide
gatcagcattgataggagcttcagaccctcggttataactgaagagggattgacctgaga

SEQ ID NO: 402367 - DNA, 56 bp, Artificial
  Synthetic oligonucleotide
gatcagccaaacacattatcggtttgtgaaggaggattcttacaccgacgccggtt

SEQ ID NO: 402368 - DNA, 60 bp, Artificial
  Synthetic oligonucleotide
gatcagcctgtcatcttcaggatgggaggagtgggcgatcctgaagttgaagttggctat

SEQ ID NO: 402369 - DNA, 55 bp, Artificial
  Synthetic oligonucleotide
gatcagcgccaaggtaaggaggtactgaatataagagggactcgaggtcaaccgg

SEQ ID NO: 402370 - DNA, 59 bp, Artificial
  Synthetic oligonucleotide
gatcagctacatggtttccaaattagacggatggtgactgaattttgtgataggttacg

SEQ ID NO: 402371 - DNA, 55 bp, Artificial
  Synthetic oligonucleotide
gatcagctagacagattagttcaagaagctaacgaaaccgctagtaatgcaaaga

SEQ ID NO: 402372 - DNA, 60 bp, Artificial
  Synthetic oligonucleotide
gatcagctagtagtcaggcctacacaaagataatgtattttcacaagggattagtgatca

SEQ ID NO: 402373 - DNA, 60 bp, Artificial
  Synthetic oligonucleotide
gatcagctcaagccctattcagaaccacgcggtctgctccccccccaggagatcttggat

SEQ ID NO: 402374 - DNA, 51 bp, Artificial
  Synthetic oligonucleotide
gatcagctcttatcgttgataatcgtgatggacgtagtgtcacttcttgct

SEQ ID NO: 402375 - DNA, 55 bp, Artificial
  Synthetic oligonucleotide
gatcagctgttgtgatgctcatataacgttgacggcgtatgcgtttaacagtatc

SEQ ID NO: 402376 - DNA, 55 bp, Artificial
  Synthetic oligonucleotide
gatcagcttaacctgaggttgaagtgttgacacactcgccaacacatggggcagc

SEQ ID NO: 402377 - DNA, 51 bp, Artificial
  Synthetic oligonucleotide
gatcaggaagcatcacctcgggtaccgtcttgggtctacagggctgtcggt

SEQ ID NO: 402378 - DNA, 60 bp, Artificial
  Synthetic oligonucleotide
gatcaggaagttctatgcaactgtgacaggtggtcagtatgccagtagagaacagacatt

SEQ ID NO: 402379 - DNA, 60 bp, Artificial
  Synthetic oligonucleotide
gatcaggactcattccagtggcaatcggggtgtaacccttcagtgatagcagatgtagag

SEQ ID NO: 402380 - DNA, 50 bp, Artificial
  Synthetic oligonucleotide
gatcaggagactcaggaggatctgtcagtgacatctccaacgcaggacga

SEQ ID NO: 402381 - DNA, 55 bp, Artificial
  Synthetic oligonucleotide
gatcaggagcgtcccggttgggcgctgcttggctctgcctgcgttttcaactcta

SEQ ID NO: 402382 - DNA, 55 bp, Artificial
  Synthetic oligonucleotide
gatcaggagtgttagtgctggtcgcgcactctatatcccaccgtatgaactcttg

SEQ ID NO: 402383 - DNA, 56 bp, Artificial
  Synthetic oligonucleotide
gatcaggatacgagacaaagggttaaccctggaatttggaacgttgacttagatga

SEQ ID NO: 402384 - DNA, 58 bp, Artificial
  Synthetic oligonucleotide
gatcaggcattaaatggaaaattcggctcagtagtaagaaatagaaattggatgactg

SEQ ID NO: 402385 - DNA, 52 bp, Artificial
  Synthetic oligonucleotide
gatcaggcattccgagcacaccgcacaacaccagtgatacatagcggaatga

SEQ ID NO: 402386 - DNA, 55 bp, Artificial
  Synthetic oligonucleotide
gatcaggcccctggcttacacccagatgcttggtcgattacccatacaggctgtg

SEQ ID NO: 402387 - DNA, 51 bp, Artificial
  Synthetic oligonucleotide
gatcaggctatgtactaagatgggattgaatgttgtaggtggtgcctctag

SEQ ID NO: 402388 - DNA, 55 bp, Artificial
  Synthetic oligonucleotide
gatcaggctcaaggcaaaggtccaatttacgaatttcccaactttctgtggctgg

SEQ ID NO: 402389 - DNA, 55 bp, Artificial
  Synthetic oligonucleotide
gatcaggctgaaacggctggggtgaggctgacggttttagcaacagcaactcccc

SEQ ID NO: 402390 - DNA, 60 bp, Artificial
  Synthetic oligonucleotide
gatcagggatttaaacaatcacagaatcgggtgtcacagtcatttttgaatgaccctaca

SEQ ID NO: 402391 - DNA, 55 bp, Artificial
  Synthetic oligonucleotide
gatcaggggacggcccaaccacaatacgatctggactagtgggagcagcatttcc

SEQ ID NO: 402392 - DNA, 60 bp, Artificial
  Synthetic oligonucleotide
gatcaggggctacattagaagaaatgatgacagcatgtcagggagtgggagggcctagcc

SEQ ID NO: 402393 - DNA, 55 bp, Artificial
  Synthetic oligonucleotide
gatcagggtatgagatgctaaaagttccgaatgcggaaacagacaatcagtccag

SEQ ID NO: 402394 - DNA, 55 bp, Artificial
  Synthetic oligonucleotide
gatcagggtgcctgatctatatgtgaccttccacgacagattagtgactgagtac

SEQ ID NO: 402395 - DNA, 60 bp, Artificial
  Synthetic oligonucleotide
gatcaggtgacgatccaagcccaaagaggctggtggtgtattcttcactaaggcgttgga

SEQ ID NO: 402396 - DNA, 60 bp, Artificial
  Synthetic oligonucleotide
gatcaggtgcaattcagaatcttcagtcctgagtgctcatgaatcatgccttagggcacc

SEQ ID NO: 402397 - DNA, 55 bp, Artificial
  Synthetic oligonucleotide
gatcaggtgtcgatggtttgagtggcccgccgtgtctaacgttccagtcacttct

SEQ ID NO: 402398 - DNA, 51 bp, Artificial
  Synthetic oligonucleotide
gatcaggttacacaatccatgtccagtgtaatgcatccaagtttcatcaag

SEQ ID NO: 402399 - DNA, 55 bp, Artificial
  Synthetic oligonucleotide
gatcaggttacacagtgcacgtccagtgtaacgcttcaaaatttcatcagggcac

SEQ ID NO: 402400 - DNA, 56 bp, Artificial
  Synthetic oligonucleotide
gatcagtacttaaggaatggattggatggcaattatgtatgtttagatatgaaaca

SEQ ID NO: 402401 - DNA, 60 bp, Artificial
  Synthetic oligonucleotide
gatcagtagcccataagtcctgcctgcctgcgtgtatatacggacttgccgtggccagtg

SEQ ID NO: 402402 - DNA, 60 bp, Artificial
  Synthetic oligonucleotide
gatcagtatgggcgatgcttgagttatggactctaggagactgtacttgtccacattgga

SEQ ID NO: 402403 - DNA, 55 bp, Artificial
  Synthetic oligonucleotide
gatcagtcagctccagaggtgatcggagaaatacacttcgagtacactctggtgc

SEQ ID NO: 402404 - DNA, 55 bp, Artificial
  Synthetic oligonucleotide
gatcagtgcgattcagagaatattggatgcagttctagcgcctgttctccgtctg

SEQ ID NO: 402405 - DNA, 60 bp, Artificial
  Synthetic oligonucleotide
gatcagtggcccacaagtcctgcttgcccgcctgtgtgtacggacttgcagtggccagtg

SEQ ID NO: 402406 - DNA, 57 bp, Artificial
  Synthetic oligonucleotide
gatcagtgggccatggtagggacgaaaagtagttttgcaagcaagggagtatttgta

SEQ ID NO: 402407 - DNA, 55 bp, Artificial
  Synthetic oligonucleotide
gatcagtgtcccctacctgtgatatacagtaatgggcctcgatatagatatcata

SEQ ID NO: 402408 - DNA, 57 bp, Artificial
  Synthetic oligonucleotide
gatcagttagacaatgtaccttaggcttacttttcagtacttccctgagtaggctag

SEQ ID NO: 402409 - DNA, 55 bp, Artificial
  Synthetic oligonucleotide
gatcagttagttcaactgcatcagcttggacggaagtatctaacattacatcaga

SEQ ID NO: 402410 - DNA, 60 bp, Artificial
  Synthetic oligonucleotide
gatcagttcgatgcctggtatacgagttggatcgatttgattcattattttaatgatgag

SEQ ID NO: 402411 - DNA, 60 bp, Artificial
  Synthetic oligonucleotide
gatcagttgccagatgatagcctgataagaaggtaccccaaggaagccgccgttgctctg

SEQ ID NO: 402412 - DNA, 58 bp, Artificial
  Synthetic oligonucleotide
gatcagtttatagagtttaacgaagacgaggtgatacatacaaagtacgctaatccta

SEQ ID NO: 402413 - DNA, 56 bp, Artificial
  Synthetic oligonucleotide
gatcagtttcagttaggtcaattagtagtaatataacatcgcggattagtacagcc

SEQ ID NO: 402414 - DNA, 55 bp, Artificial
  Synthetic oligonucleotide
gatcataaactttggcaattcctattctacactcggaagctgtaaggttgggcct

SEQ ID NO: 402415 - DNA, 57 bp, Artificial
  Synthetic oligonucleotide
gatcataaagtaacggatctcggacgacgccacaaatttttgctgtttaacatagtg

SEQ ID NO: 402416 - DNA, 53 bp, Artificial
  Synthetic oligonucleotide
gatcataagaaagaagtacagtacgaaattctacaaaaaacaatcccgacttt

SEQ ID NO: 402417 - DNA, 53 bp, Artificial
  Synthetic oligonucleotide
gatcataagggtggtaagtgggtttcaattactaactttgggtatgggaacac

SEQ ID NO: 402418 - DNA, 55 bp, Artificial
  Synthetic oligonucleotide
gatcataccactaatcagcaagcagaactgatagctatcaagctagctcttgagg

SEQ ID NO: 402419 - DNA, 55 bp, Artificial
  Synthetic oligonucleotide
gatcatacctacaccatgcgaagtgtcggtgaatacatgcaagaacaacaatccc

SEQ ID NO: 402420 - DNA, 55 bp, Artificial
  Synthetic oligonucleotide
gatcatacgagacagtctggacacaggagaggacctggttatgatctacgcagac

SEQ ID NO: 402421 - DNA, 60 bp, Artificial
  Synthetic oligonucleotide
gatcatagcaagaccatacttagaaaggtgtacggccacaattttatgagccagatagac

SEQ ID NO: 402422 - DNA, 60 bp, Artificial
  Synthetic oligonucleotide
gatcataggataagataagcttagataagataacataggttacttcactataggaaaaga

SEQ ID NO: 402423 - DNA, 55 bp, Artificial
  Synthetic oligonucleotide
gatcatagggaggttaggaggttatcacttagatgcccggcagatgttacgcatt

SEQ ID NO: 402424 - DNA, 60 bp, Artificial
  Synthetic oligonucleotide
gatcatatgttcaacgcattattacccgacctaattgctggggcgcatcagaacgccgac

SEQ ID NO: 402425 - DNA, 60 bp, Artificial
  Synthetic oligonucleotide
gatcatattgtcggcttgctgttctatgtcatcagagaactgggtttcatttagatatga

SEQ ID NO: 402426 - DNA, 60 bp, Artificial
  Synthetic oligonucleotide
gatcatcaaaaattgggagactgtgaagatccaatggtcccaagaccccacaatgctata

SEQ ID NO: 402427 - DNA, 51 bp, Artificial
  Synthetic oligonucleotide
gatcatcaagatcatgtcatgaaagtccttaggagaattgaaagcttaggc

SEQ ID NO: 402428 - DNA, 60 bp, Artificial
  Synthetic oligonucleotide
gatcatcaaggacgtaaaaagccgtttgcctaatatctccaacatgcatttgtgtaactg

SEQ ID NO: 402429 - DNA, 60 bp, Artificial
  Synthetic oligonucleotide
gatcatcagaaactgggaaactgttaaaattcagtggtctcagaaccctacaatgctata

SEQ ID NO: 402430 - DNA, 60 bp, Artificial
  Synthetic oligonucleotide
gatcatcagagataaccgagatttaggtggtacgagctgagagcagtcgaagttgtatgc

SEQ ID NO: 402431 - DNA, 55 bp, Artificial
  Synthetic oligonucleotide
gatcatccaatgtgcaaaatctggaggtctgtcaccatagcagcagcaatgggtg

SEQ ID NO: 402432 - DNA, 55 bp, Artificial
  Synthetic oligonucleotide
gatcatccccaaaagttattggtccgatcatgaagcctcatcaggggtgagctca

SEQ ID NO: 402433 - DNA, 58 bp, Artificial
  Synthetic oligonucleotide
gatcatcctaaagtatattcagcattattgaatctgccagatggtgcttatattggtg

SEQ ID NO: 402434 - DNA, 60 bp, Artificial
  Synthetic oligonucleotide
gatcatcgaatacgcacagaacgcatggtcgtccgttcctgcgggcatcgctgcatgggt

SEQ ID NO: 402435 - DNA, 60 bp, Artificial
  Synthetic oligonucleotide
gatcatcggacggtttgttagtggaccagacactataactgagaagcgtactatggattc

SEQ ID NO: 402436 - DNA, 59 bp, Artificial
  Synthetic oligonucleotide
gatcatcgtataagcctcgtgctatacggcgaacgtttgcgaaaactccatataaccag

SEQ ID NO: 402437 - DNA, 52 bp, Artificial
  Synthetic oligonucleotide
gatcatctagcagcagggagctagatcaccctagggttgcaactaccctatc

SEQ ID NO: 402438 - DNA, 50 bp, Artificial
  Synthetic oligonucleotide
gatcatctctggcaagtgtgggtcacgttacgtgcgtttcgtcgcttgac

SEQ ID NO: 402439 - DNA, 60 bp, Artificial
  Synthetic oligonucleotide
gatcatgaagcctcatcaggagtgagctcagcatgcccatacctgggaagtccctccttt

SEQ ID NO: 402440 - DNA, 57 bp, Artificial
  Synthetic oligonucleotide
gatcatgaagggtttagatataccctattctgaacctattgaaccatgtaaattgtt

SEQ ID NO: 402441 - DNA, 60 bp, Artificial
  Synthetic oligonucleotide
gatcatgaatgatactggtcgtatgttggataatgtcagacgtatgatcgacgacagatc

SEQ ID NO: 402442 - DNA, 58 bp, Artificial
  Synthetic oligonucleotide
gatcatgacatagctgatattcgtctctatgagactctatgtaattaaacgcatttgg

SEQ ID NO: 402443 - DNA, 55 bp, Artificial
  Synthetic oligonucleotide
gatcatgagcgaaaagacggtgacgccagcgcagggacttttagagcgacttgcc

SEQ ID NO: 402444 - DNA, 60 bp, Artificial
  Synthetic oligonucleotide
gatcatgatgagtggggggaggctcaaaaagtctcacatcaagaggtacatctcagtcag

SEQ ID NO: 402445 - DNA, 58 bp, Artificial
  Synthetic oligonucleotide
gatcatgcacacccccgggtgcgtgccctgtgttcgggagaacaactcctcccgctgt

SEQ ID NO: 402446 - DNA, 52 bp, Artificial
  Synthetic oligonucleotide
gatcatgcacacccctgggtgcgtgccctgcgttcgggaggccaacatctcc

SEQ ID NO: 402447 - DNA, 55 bp, Artificial
  Synthetic oligonucleotide
gatcatgcacattgccaccactaaggtacagaggagacgacggatgctggtacgg

SEQ ID NO: 402448 - DNA, 55 bp, Artificial
  Synthetic oligonucleotide
gatcatgcatattcttcagtgtggttcccaccataagttatgtgtgcttcgcttc

SEQ ID NO: 402449 - DNA, 55 bp, Artificial
  Synthetic oligonucleotide
gatcatgctggacatgctaagtcaacatgaacctcgagaaaatctgggaaagtca

SEQ ID NO: 402450 - DNA, 55 bp, Artificial
  Synthetic oligonucleotide
gatcatggctaattcattgggagcaagagctgctgatcacattggaggcaaatcc

SEQ ID NO: 402451 - DNA, 60 bp, Artificial
  Synthetic oligonucleotide
gatcatgtatattccaccaggggcaccccgcccatcatcctgggatgactacacatggca

SEQ ID NO: 402452 - DNA, 55 bp, Artificial
  Synthetic oligonucleotide
gatcatgtgtactcaaccggccatacattaaggatgactatacagcacatgttgc

SEQ ID NO: 402453 - DNA, 57 bp, Artificial
  Synthetic oligonucleotide
gatcatgttagagtcattaatgtcaaaccatacatacacattgtggtcaaaacagca

SEQ ID NO: 402454 - DNA, 55 bp, Artificial
  Synthetic oligonucleotide
gatcattaaatacacgaattgcagcctacccttgctttcttcaagcgtcaggtac

SEQ ID NO: 402455 - DNA, 55 bp, Artificial
  Synthetic oligonucleotide
gatcattaacttgagaaccaacaactgtgccaccctagtgttaccgtacgttaat

SEQ ID NO: 402456 - DNA, 55 bp, Artificial
  Synthetic oligonucleotide
gatcattatcacattacgtgcaaaacatgcctgcgtccaatcaatgaaatcaccc

SEQ ID NO: 402457 - DNA, 60 bp, Artificial
  Synthetic oligonucleotide
gatcattcagacaaaggcttcagtttggggatcgacagcatctggtaagtccatcgtgga

SEQ ID NO: 402458 - DNA, 60 bp, Artificial
  Synthetic oligonucleotide
gatcattcatgagactggtcttcttaaataatgctaggattgatgagttatggactggaa

SEQ ID NO: 402459 - DNA, 55 bp, Artificial
  Synthetic oligonucleotide
gatcattctacggtcggagcaagcggtgtttatccctctttaatgtcccgtgttg

SEQ ID NO: 402460 - DNA, 53 bp, Artificial
  Synthetic oligonucleotide
gatcattgcagtgcagaatttgcatctagaattgtgagttcagattataatta

SEQ ID NO: 402461 - DNA, 52 bp, Artificial
  Synthetic oligonucleotide
gatcattgctcaactatccaatatgatgaaatcgctatctattggggttgag

SEQ ID NO: 402462 - DNA, 57 bp, Artificial
  Synthetic oligonucleotide
gatcattgtcttactattaacttgaaattaatgtgtaagttagtaatgaaattaata

SEQ ID NO: 402463 - DNA, 53 bp, Artificial
  Synthetic oligonucleotide
gatcatttaatctagttattgcgatactagactacgatgaagataaaggtgat

SEQ ID NO: 402464 - DNA, 58 bp, Artificial
  Synthetic oligonucleotide
gatcatttacactttgaacaaccatgagctaactcctagaaagttagatttaggtgaa

SEQ ID NO: 402465 - DNA, 60 bp, Artificial
  Synthetic oligonucleotide
gatcatttcacaatggatattattgttgccaactaccatagtcataatcaagttcttgcc

SEQ ID NO: 402466 - DNA, 55 bp, Artificial
  Synthetic oligonucleotide
gatcatttgtcttgaaattgtagattctcttacatctcacagttactgtaggtgg

SEQ ID NO: 402467 - DNA, 59 bp, Artificial
  Synthetic oligonucleotide
gatcatttttcactcactaccgcaaagatgtttgaccgccagtaccccaccgttcatga

SEQ ID NO: 402468 - DNA, 54 bp, Artificial
  Synthetic oligonucleotide
gatccaaagtgtgcatatgttgggaccatggccctagatagggtaaagctcatg

SEQ ID NO: 402469 - DNA, 60 bp, Artificial
  Synthetic oligonucleotide
gatccaaatgcattactgaagcacagatttgaaataattgaaggaagagaccgaacaatg

SEQ ID NO: 402470 - DNA, 60 bp, Artificial
  Synthetic oligonucleotide
gatccaaatgcattgctgaaacaccggtttgagataattgaaggaagagaccggacaatg

SEQ ID NO: 402471 - DNA, 56 bp, Artificial
  Synthetic oligonucleotide
gatccaacatttagagtagtgattcaagatgaaaaacgagttgtttactctgaaaa

SEQ ID NO: 402472 - DNA, 60 bp, Artificial
  Synthetic oligonucleotide
gatccaaccagcccaaacattgaattgcatcacttagcaattcctttcccaggcgaatta

SEQ ID NO: 402473 - DNA, 55 bp, Artificial
  Synthetic oligonucleotide
gatccaagacggtgatgtggtagttgccatcgacatcgattactacctgcgtgac

SEQ ID NO: 402474 - DNA, 60 bp, Artificial
  Synthetic oligonucleotide
gatccaagcagtggggcagtgtggtatgtcactatgtggcggattacccttgctccaggc

SEQ ID NO: 402475 - DNA, 55 bp, Artificial
  Synthetic oligonucleotide
gatccaagctttccagcaccttaatttgcagtggctgcaacacatcgacgggagg

SEQ ID NO: 402476 - DNA, 55 bp, Artificial
  Synthetic oligonucleotide
gatccaagtgtcaagtatcagatacatgttgctcctagaagaaattatcctggtg

SEQ ID NO: 402477 - DNA, 54 bp, Artificial
  Synthetic oligonucleotide
gatccaatcccagaccctacccacccttgctaccctccccacccagctatcccc

SEQ ID NO: 402478 - DNA, 55 bp, Artificial
  Synthetic oligonucleotide
gatccaatggctatgatgttgtccaaatattcattacctattgtggaggaaccag

SEQ ID NO: 402479 - DNA, 60 bp, Artificial
  Synthetic oligonucleotide
gatccaatgggaatctaattgctccatggtatggacacattcttccaggagagagccacg

SEQ ID NO: 402480 - DNA, 55 bp, Artificial
  Synthetic oligonucleotide
gatccaatggtcccaaaatcctacgatgctatacaataagatggagtttgagcca

SEQ ID NO: 402481 - DNA, 60 bp, Artificial
  Synthetic oligonucleotide
gatccaatgtttttgctgaaggaacacaatctgcagagatacgaacatatgataaaaacc

SEQ ID NO: 402482 - DNA, 60 bp, Artificial
  Synthetic oligonucleotide
gatccaatttccaaactaagagcataacgagtatagtctctgagactagcacgataatgc

SEQ ID NO: 402483 - DNA, 60 bp, Artificial
  Synthetic oligonucleotide
gatccacaaactacatgtacctctttgaaaggagtgaattgcttatcgccaagatcgcga

SEQ ID NO: 402484 - DNA, 59 bp, Artificial
  Synthetic oligonucleotide
gatccacaattatactgcgactacaacgtagtgttaatgaaatatgacacgacattgca

SEQ ID NO: 402485 - DNA, 55 bp, Artificial
  Synthetic oligonucleotide
gatccacagctagttgctaccctccatgagtggctggtccctggcgccgccacaa

SEQ ID NO: 402486 - DNA, 57 bp, Artificial
  Synthetic oligonucleotide
gatccaccctgcactgatcaagtcctataacctgtcctggatcgatgagtgtggtac

SEQ ID NO: 402487 - DNA, 56 bp, Artificial
  Synthetic oligonucleotide
gatccacctcccgtgcctaagcccagagcctgtaagaaggaagggtgttgttgtgg

SEQ ID NO: 402488 - DNA, 60 bp, Artificial
  Synthetic oligonucleotide
gatccacctgaacgatgatggaattatcgttcctcaacctgacattgatagtaaactcca

SEQ ID NO: 402489 - DNA, 60 bp, Artificial
  Synthetic oligonucleotide
gatccacgttatgttatgagactgcagagtgcttctactatacgtagtgttgcatatgtt

SEQ ID NO: 402490 - DNA, 60 bp, Artificial
  Synthetic oligonucleotide
gatccactcaccagtttttcgattagatcgcatgcagttaagacaaatgcagacgctggc

SEQ ID NO: 402491 - DNA, 60 bp, Artificial
  Synthetic oligonucleotide
gatccactcatgttcatcagccccagttgtctcttgatcattcccgtaacatatgcatga

SEQ ID NO: 402492 - DNA, 60 bp, Artificial
  Synthetic oligonucleotide
gatccactctcctacgccggatggctcgcttcttgaactgtctgtgactgactttgattg

SEQ ID NO: 402493 - DNA, 60 bp, Artificial
  Synthetic oligonucleotide
gatccactgctgtgagcggtgcaaccccagcaccctgattcgatggtcattctctacgga

SEQ ID NO: 402494 - DNA, 55 bp, Artificial
  Synthetic oligonucleotide
gatccacttcctcaagtggacacaattttcccattgggattggagcctaacgtcg

SEQ ID NO: 402495 - DNA, 56 bp, Artificial
  Synthetic oligonucleotide
gatccagaaagaattgcaaggcaaggaagtacctatggtctgaccattacaccacc

SEQ ID NO: 402496 - DNA, 60 bp, Artificial
  Synthetic oligonucleotide
gatccagagttgtttgtgccacttgagtccgttatgcgagctcattgtgatgaattcggt

SEQ ID NO: 402497 - DNA, 60 bp, Artificial
  Synthetic oligonucleotide
gatccagagtttagaccatatacagctttcactattccctccattaatcatcaagaacca

SEQ ID NO: 402498 - DNA, 58 bp, Artificial
  Synthetic oligonucleotide
gatccagctctagtcacaggtggtgaatacgctaactgtgtgtatgcgtggtacttaa

SEQ ID NO: 402499 - DNA, 58 bp, Artificial
  Synthetic oligonucleotide
gatccagtatccagagacctagtagtcagttatgtcaacactaccgcgggcctaaagt

SEQ ID NO: 402500 - DNA, 55 bp, Artificial
  Synthetic oligonucleotide
gatccagtgtgcagcactgatgatagctgatataaaaggggactattcggtcctc

SEQ ID NO: 402501 - DNA, 55 bp, Artificial
  Synthetic oligonucleotide
gatccagttctcctaacaactccttcaactcagaagctgtccatatactcatggc

SEQ ID NO: 402502 - DNA, 60 bp, Artificial
  Synthetic oligonucleotide
gatccagtttacgaactggagaagcttgagttctgccagggacatccactgtgcatcaac

SEQ ID NO: 402503 - DNA, 60 bp, Artificial
  Synthetic oligonucleotide
gatccatactgcggaactcctagcagcttgtttcgctcgcagccggtctggagcgaaaat

SEQ ID NO: 402504 - DNA, 60 bp, Artificial
  Synthetic oligonucleotide
gatccatactgcggaactcctagccgcttgctttgctcgcagccggtctggagcaaagct

SEQ ID NO: 402505 - DNA, 60 bp, Artificial
  Synthetic oligonucleotide
gatccatactgcggaactgctagccgcctgttttgctcgcagccggtctggagcaaaact

SEQ ID NO: 402506 - DNA, 60 bp, Artificial
  Synthetic oligonucleotide
gatccatactgcggaagtcgtagcagcatgttttgctcgcagcaggtctggggcgaaact

SEQ ID NO: 402507 - DNA, 55 bp, Artificial
  Synthetic oligonucleotide
gatccatagggaggttctttccttccgacacgttgtgcaatcctggcaataagat

SEQ ID NO: 402508 - DNA, 60 bp, Artificial
  Synthetic oligonucleotide
gatccatcaattcagttgcatgaatcggaaaaagattcgaatgcatcagatataatcgag

SEQ ID NO: 402509 - DNA, 53 bp, Artificial
  Synthetic oligonucleotide
gatccatccatagtgtctctggtggaggaagccaatttaatagatgcaggact

SEQ ID NO: 402510 - DNA, 60 bp, Artificial
  Synthetic oligonucleotide
gatccatcgcttgaatgttgtaactgaatctatcaatgggattcttttcataattgattg

SEQ ID NO: 402511 - DNA, 54 bp, Artificial
  Synthetic oligonucleotide
gatccatctaacctgagggtagttacatcgcagtccccttacgtggtcgtagct

SEQ ID NO: 402512 - DNA, 55 bp, Artificial
  Synthetic oligonucleotide
gatccatgagagagtaaaggaagcagtcccaggggagacatcagcagtagaatgc

SEQ ID NO: 402513 - DNA, 55 bp, Artificial
  Synthetic oligonucleotide
gatccattatggcaacaatgggagaatcaagtaggcaatagacaaatcactcccc

SEQ ID NO: 402514 - DNA, 58 bp, Artificial
  Synthetic oligonucleotide
gatccattattccattccagccttaacaacgaaccatgacataacctacaactaccgc

SEQ ID NO: 402515 - DNA, 55 bp, Artificial
  Synthetic oligonucleotide
gatccattcgattagtgaacggattcttagcgattgcctgggacgacctccggag

SEQ ID NO: 402516 - DNA, 55 bp, Artificial
  Synthetic oligonucleotide
gatccattcgattagtgagcggattcttagcacttatctggaacgatctgaggag

SEQ ID NO: 402517 - DNA, 55 bp, Artificial
  Synthetic oligonucleotide
gatccattcggttagtgagcggattcttagcacttgtctgggaagacctgcggag

SEQ ID NO: 402518 - DNA, 55 bp, Artificial
  Synthetic oligonucleotide
gatccattcgtagtaatcgtagaacttcaattcatcttcctctgcgtctgtagaa

SEQ ID NO: 402519 - DNA, 60 bp, Artificial
  Synthetic oligonucleotide
gatccattgcttaatgactttcccgagtcggttcacggctttcggtgtatgctagctgtc

SEQ ID NO: 402520 - DNA, 53 bp, Artificial
  Synthetic oligonucleotide
gatccattgggcctgttctgcttccgagggaaccgatgtcatgttgaaccgac

SEQ ID NO: 402521 - DNA, 59 bp, Artificial
  Synthetic oligonucleotide
gatccatttaatgttaaatctttatgtatatacttcccaaatgcagttgtaggttctca

SEQ ID NO: 402522 - DNA, 54 bp, Artificial
  Synthetic oligonucleotide
gatcccaaatactttgatggctatgatcaacaaagcgtggtcataatggatgac

SEQ ID NO: 402523 - DNA, 60 bp, Artificial
  Synthetic oligonucleotide
gatcccaaatctgcatcaattttcatcaccatacgttgggatggttccactcactgaagg

SEQ ID NO: 402524 - DNA, 60 bp, Artificial
  Synthetic oligonucleotide
gatcccaaatgagatcgttagcgttagtgctacggtcaatcgatgcttggagagttctta

SEQ ID NO: 402525 - DNA, 60 bp, Artificial
  Synthetic oligonucleotide
gatcccaacgacacagtgactttcaccttcaatggggcattcatagcccctgacagggca

SEQ ID NO: 402526 - DNA, 55 bp, Artificial
  Synthetic oligonucleotide
gatcccaataaatgtgggcgtacgcagcatgataacgggctttggatgatccttt

SEQ ID NO: 402527 - DNA, 57 bp, Artificial
  Synthetic oligonucleotide
gatcccaatccggttcttctagaaccacgagctaagattgccgggaaggcaaagaca

SEQ ID NO: 402528 - DNA, 59 bp, Artificial
  Synthetic oligonucleotide
gatcccaatgataagcaaatgcagaacaaaagaagggcggcggaaaacaaatctgtatg

SEQ ID NO: 402529 - DNA, 55 bp, Artificial
  Synthetic oligonucleotide
gatcccaccgagcaggcttctcacagtagggcaaaactgcattctcaagccatct

SEQ ID NO: 402530 - DNA, 54 bp, Artificial
  Synthetic oligonucleotide
gatcccacgaagtcccgctgcacagaagacctaccgaagccagaccatcacgtc

SEQ ID NO: 402531 - DNA, 56 bp, Artificial
  Synthetic oligonucleotide
gatcccagaatgggacttcgtatctaccccaccactggtcaggttgacatttaacc

SEQ ID NO: 402532 - DNA, 58 bp, Artificial
  Synthetic oligonucleotide
gatcccagactgggacttcgtatctaccccaccactggtcagactagcatttaactta

SEQ ID NO: 402533 - DNA, 60 bp, Artificial
  Synthetic oligonucleotide
gatcccagcaacgaagcactcaatggtgtttgccagagcatacactccaatggctgcaat

SEQ ID NO: 402534 - DNA, 51 bp, Artificial
  Synthetic oligonucleotide
gatcccagcctctaaattgggcaccgcgcctacgcataacccggtacgcct

SEQ ID NO: 402535 - DNA, 55 bp, Artificial
  Synthetic oligonucleotide
gatcccaggtgtgaccagactggctcaagatggtcttaagctcccactcaggtgt

SEQ ID NO: 402536 - DNA, 58 bp, Artificial
  Synthetic oligonucleotide
gatcccataccgagcagagggcgagtgaggacgcgaacgctgaacccgttacactcgg

SEQ ID NO: 402537 - DNA, 60 bp, Artificial
  Synthetic oligonucleotide
gatcccatattgaaccttgcagaggatccgcatccagcaatagagactattgcacaaagg

SEQ ID NO: 402538 - DNA, 54 bp, Artificial
  Synthetic oligonucleotide
gatcccatgatgcttgttgcttctcaaggttttatgcccagattgaatgttcaa

SEQ ID NO: 402539 - DNA, 60 bp, Artificial
  Synthetic oligonucleotide
gatcccatgatgtcatttgcggggacgctcgaagtccacaccctcgggcgcacaatgtca

SEQ ID NO: 402540 - DNA, 55 bp, Artificial
  Synthetic oligonucleotide
gatcccattaaagagcttgagtatgtcaccagtggagaatatcttagggacccag

SEQ ID NO: 402541 - DNA, 55 bp, Artificial
  Synthetic oligonucleotide
gatcccatttggaaaggaccagccaaacttctgtggaaaggagaaggggcagtgg

SEQ ID NO: 402542 - DNA, 57 bp, Artificial
  Synthetic oligonucleotide
gatccccaatatccccgattgagcccccaatatattggggtctcaaatgggagctct

SEQ ID NO: 402543 - DNA, 55 bp, Artificial
  Synthetic oligonucleotide
gatccccagactattttagctacactgactttgattggatgttcaggatcaccat

SEQ ID NO: 402544 - DNA, 55 bp, Artificial
  Synthetic oligonucleotide
gatccccatgagcatccaaccatgacatgggaaatattagaaagatttgttggga

SEQ ID NO: 402545 - DNA, 55 bp, Artificial
  Synthetic oligonucleotide
gatccccatgcttgggcagtggccttcattgatggatgttgcaactgcagcatat

SEQ ID NO: 402546 - DNA, 60 bp, Artificial
  Synthetic oligonucleotide
gatcccccgctatgtcctatagtactatctcagttgttaggcacaacatagcggatgcac

SEQ ID NO: 402547 - DNA, 55 bp, Artificial
  Synthetic oligonucleotide
gatcccccggtggtctggctgggaggaagaccgggagactttgtgcaaattgagc

SEQ ID NO: 402548 - DNA, 60 bp, Artificial
  Synthetic oligonucleotide
gatccccctcaaaactcgctcatgcaattggagactggagtacaatatatactagaaccc

SEQ ID NO: 402549 - DNA, 57 bp, Artificial
  Synthetic oligonucleotide
gatcccctaccccacaataaagcttcatggcgaacaccactaaagactcgacttcca

SEQ ID NO: 402550 - DNA, 55 bp, Artificial
  Synthetic oligonucleotide
gatcccctaccgaacggtcggcaccgcactgtggcaggcataagcaaggtttggg

SEQ ID NO: 402551 - DNA, 60 bp, Artificial
  Synthetic oligonucleotide
gatcccctcaatagtacatgaggctttaaacgttgcattgatagcagttagcatcatatc

SEQ ID NO: 402552 - DNA, 52 bp, Artificial
  Synthetic oligonucleotide
gatcccctcatgaaaggattgaagaagtgtggcgtagacaccgcagtgttag

SEQ ID NO: 402553 - DNA, 55 bp, Artificial
  Synthetic oligonucleotide
gatcccctcttcgagtgcgttgaaatcgaatggagctatggtaccttgatgcgtg

SEQ ID NO: 402554 - DNA, 55 bp, Artificial
  Synthetic oligonucleotide
gatccccttcctctcgtgtcaaacgggatataggggagtctgggcaggtgacggg

SEQ ID NO: 402555 - DNA, 57 bp, Artificial
  Synthetic oligonucleotide
gatcccgaagggtacagcccagctttacgcgggggatgactcggcaattgacggcaa

SEQ ID NO: 402556 - DNA, 51 bp, Artificial
  Synthetic oligonucleotide
gatcccgcaggatcctttagagtcactatcagagtggctttgcaaaacccc

SEQ ID NO: 402557 - DNA, 54 bp, Artificial
  Synthetic oligonucleotide
gatcccgcctttaatttgaacgggcttcccgtacttagtattggactgccaatc

SEQ ID NO: 402558 - DNA, 55 bp, Artificial
  Synthetic oligonucleotide
gatcccggatcgggcctggaactctgggtacgaatggatcacagaatacatcggg

SEQ ID NO: 402559 - DNA, 59 bp, Artificial
  Synthetic oligonucleotide
gatcccgtgtttgtgctatacaagacatgggttgtttgactgagctgtttgttggtaac

SEQ ID NO: 402560 - DNA, 59 bp, Artificial
  Synthetic oligonucleotide
gatccctaaagtgtgggtaccacctgaggatccgcttgccagccctagtcgactggcaa

SEQ ID NO: 402561 - DNA, 55 bp, Artificial
  Synthetic oligonucleotide
gatccctaatcagattcccaattgggacagctcccgttcttgggaactacaagga

SEQ ID NO: 402562 - DNA, 59 bp, Artificial
  Synthetic oligonucleotide
gatccctagtgtggctgggggatgcatcggcttcaccccatacggcagtccggcgggtg

SEQ ID NO: 402563 - DNA, 57 bp, Artificial
  Synthetic oligonucleotide
gatccctcatggcgccagatggcgggaacctcaaaggttagccgctctactaacttt

SEQ ID NO: 402564 - DNA, 51 bp, Artificial
  Synthetic oligonucleotide
gatccctcccgtccccggtttgacgacccctcggtacgtcttcgagacaac

SEQ ID NO: 402565 - DNA, 56 bp, Artificial
  Synthetic oligonucleotide
gatccctcctttaatttgaactggcttaccgtacttgcaattggactgccagtcct

SEQ ID NO: 402566 - DNA, 55 bp, Artificial
  Synthetic oligonucleotide
gatccctcgcatgcattcaacggtgtaaagttggaaggtgatgcccggcagactc

SEQ ID NO: 402567 - DNA, 55 bp, Artificial
  Synthetic oligonucleotide
gatccctctcatataacagcagagacggccgggagaaggttggcgagaggatcgc

SEQ ID NO: 402568 - DNA, 56 bp, Artificial
  Synthetic oligonucleotide
gatccctgggaggagtgtttacatctataggaaaggctctccaccaagttttcgga

SEQ ID NO: 402569 - DNA, 57 bp, Artificial
  Synthetic oligonucleotide
gatccctgtagggggtgtctccaagaactttctcccagcaatgaagagcttcttggg

SEQ ID NO: 402570 - DNA, 55 bp, Artificial
  Synthetic oligonucleotide
gatcccttcgcctctttgattgccagtccactgctgaggcatacaaagcagaact

SEQ ID NO: 402571 - DNA, 60 bp, Artificial
  Synthetic oligonucleotide
gatccgaaaatcgaaactaacaagtttgctgcaatatgcacccacctagaagtatgcttc

SEQ ID NO: 402572 - DNA, 58 bp, Artificial
  Synthetic oligonucleotide
gatccgaacgcattattgaaacaccgatttgagataattgaagggagagaccgaacaa

SEQ ID NO: 402573 - DNA, 54 bp, Artificial
  Synthetic oligonucleotide
gatccgaactccaaccaacgggtaggtcgaacccgcggagtcgagaatgattac

SEQ ID NO: 402574 - DNA, 58 bp, Artificial
  Synthetic oligonucleotide
gatccgaataacaagaagttggtgttattggtcatgcagtctaaaatcccatttgagt

SEQ ID NO: 402575 - DNA, 60 bp, Artificial
  Synthetic oligonucleotide
gatccgaatcggcagtatgctgcatgaaccaacagaccaatcgtttgtcactcttggcag

SEQ ID NO: 402576 - DNA, 55 bp, Artificial
  Synthetic oligonucleotide
gatccgacgtgtttcgcgcctcgttcccgtttggcgtttatttgtatactcgtca

SEQ ID NO: 402577 - DNA, 55 bp, Artificial
  Synthetic oligonucleotide
gatccgacgttgcgaaagttaggtatattttgtcaggggagaatcgaggattagg

SEQ ID NO: 402578 - DNA, 53 bp, Artificial
  Synthetic oligonucleotide
gatccgactctccagggcgagtatgatcgagtccaccttcagtagagcccggc

SEQ ID NO: 402579 - DNA, 57 bp, Artificial
  Synthetic oligonucleotide
gatccgaggggactatccctctcgagaatcggcaaatggggccccctcgctcgtatc

SEQ ID NO: 402580 - DNA, 60 bp, Artificial
  Synthetic oligonucleotide
gatccgagttgtggagtcatcggtatagatagacctgaactgtactctgagctgaaccgt

SEQ ID NO: 402581 - DNA, 55 bp, Artificial
  Synthetic oligonucleotide
gatccgatggatcaggcacaactaaggcattcacaaactcaatgcaagcgttctc

SEQ ID NO: 402582 - DNA, 55 bp, Artificial
  Synthetic oligonucleotide
gatccgatggtttgggcccgtatctacggtgcctataatctgggccctgggacga

SEQ ID NO: 402583 - DNA, 55 bp, Artificial
  Synthetic oligonucleotide
gatccgcagggttgcttcaaagttctgttgcttcatgaagtggctcggccaggag

SEQ ID NO: 402584 - DNA, 60 bp, Artificial
  Synthetic oligonucleotide
gatccgcagtgatgtactcccctgtgcgtgaatccatcatcatggcagttgatcgatata

SEQ ID NO: 402585 - DNA, 53 bp, Artificial
  Synthetic oligonucleotide
gatccgcctatgattcaatccttaggatgggatagagaaatagtacccgtgta

SEQ ID NO: 402586 - DNA, 55 bp, Artificial
  Synthetic oligonucleotide
gatccgcgactgtcttgggtcgtttccttaaaggtaccgcagaaccctcgcacac

SEQ ID NO: 402587 - DNA, 55 bp, Artificial
  Synthetic oligonucleotide
gatccgcgcaacacacaggatcatgtccgatcattgtgcttattggcttggcaca

SEQ ID NO: 402588 - DNA, 55 bp, Artificial
  Synthetic oligonucleotide
gatccggaagccgtcctagtagcatcaatctttgtgtggtaccctgataggcaat

SEQ ID NO: 402589 - DNA, 55 bp, Artificial
  Synthetic oligonucleotide
gatccggagatcacacaacagtggatttccgatatgaaagcgaagactggtgcta

SEQ ID NO: 402590 - DNA, 55 bp, Artificial
  Synthetic oligonucleotide
gatccggagggactctccttttgtggaatgaccttagttagaaatcaacatgggg

SEQ ID NO: 402591 - DNA, 55 bp, Artificial
  Synthetic oligonucleotide
gatccggccttctgcaagagcatggtcactctttcagagttgtttcctgagaact

SEQ ID NO: 402592 - DNA, 55 bp, Artificial
  Synthetic oligonucleotide
gatccggctagcgaataagtaccttctagttttggcttgctctgtaacatgccgc

SEQ ID NO: 402593 - DNA, 57 bp, Artificial
  Synthetic oligonucleotide
gatccggtcaatttaaataacgctccggtgcgttcgtttgtgcaatggtattcgcaa

SEQ ID NO: 402594 - DNA, 60 bp, Artificial
  Synthetic oligonucleotide
gatccgtactcctgatgtgcccagagggtgtgaagggccttgtaaagtccagtcattcga

SEQ ID NO: 402595 - DNA, 58 bp, Artificial
  Synthetic oligonucleotide
gatccgtctaatcccttaataagagcatagtactgacgtgggtttagtacagcaacac

SEQ ID NO: 402596 - DNA, 58 bp, Artificial
  Synthetic oligonucleotide
gatccgtctagtcccttaataagagcatagtactgacgtgggtttagtacagcaacac

SEQ ID NO: 402597 - DNA, 55 bp, Artificial
  Synthetic oligonucleotide
gatccgtgacaatttctcttccttgagtctagttactctgattgttgtgggttcc

SEQ ID NO: 402598 - DNA, 55 bp, Artificial
  Synthetic oligonucleotide
gatccgtgagattagtgagcggattcttagcacttgcctgggacgacttgaggag

SEQ ID NO: 402599 - DNA, 60 bp, Artificial
  Synthetic oligonucleotide
gatccgttacagatgaatcaagtagataattaatacccaacttatagatagctgcttgtg

SEQ ID NO: 402600 - DNA, 55 bp, Artificial
  Synthetic oligonucleotide
gatccgttacccgcttgtgtacttcgaaaagcctagtatcgccttggaaacttca

SEQ ID NO: 402601 - DNA, 51 bp, Artificial
  Synthetic oligonucleotide
gatccgttcagatcaaaagtaatatgttgcgaacatgtcagccgtccgatc

SEQ ID NO: 402602 - DNA, 55 bp, Artificial
  Synthetic oligonucleotide
gatccgttgccccgagggtgtgttcgtcaatcaaccccgcaagttggtgatggcc

SEQ ID NO: 402603 - DNA, 55 bp, Artificial
  Synthetic oligonucleotide
gatccgttgttgaggactgcagtagacagtgtgttgaagcgcacagtactgaagg

SEQ ID NO: 402604 - DNA, 55 bp, Artificial
  Synthetic oligonucleotide
gatccgtttcgtcgtatcggaatgataatcccagaacatagtaccatgctctata

SEQ ID NO: 402605 - DNA, 55 bp, Artificial
  Synthetic oligonucleotide
gatccgtttgcagacagacaacacaaaccactttgaggttgctgggacaactgtg

SEQ ID NO: 402606 - DNA, 51 bp, Artificial
  Synthetic oligonucleotide
gatccgttttaaacctcctgtgtctcgcaatcgccttgcagcttattgggg

SEQ ID NO: 402607 - DNA, 55 bp, Artificial
  Synthetic oligonucleotide
gatcctaaaagatacagctgcgattgaccttgaaactcgtcaaaagttcggagtt

SEQ ID NO: 402608 - DNA, 60 bp, Artificial
  Synthetic oligonucleotide
gatcctaaattgatgggatgggactatcctaagtgtgatagagctatgccctcaatgatt

SEQ ID NO: 402609 - DNA, 59 bp, Artificial
  Synthetic oligonucleotide
gatcctaacctagagtcctggaaccatccaggcagtcagcctaatactccttgcaataa

SEQ ID NO: 402610 - DNA, 57 bp, Artificial
  Synthetic oligonucleotide
gatcctaagaaaactggagggcccatatacaggagagtagatggaaaatggattagg

SEQ ID NO: 402611 - DNA, 60 bp, Artificial
  Synthetic oligonucleotide
gatcctaagcagcccgccatccttagcgcagaggatgaacgccttaagggaacgatccat

SEQ ID NO: 402612 - DNA, 55 bp, Artificial
  Synthetic oligonucleotide
gatcctaataacgagagaggggccccaggagtaaaaggatgggcctttgacaatg

SEQ ID NO: 402613 - DNA, 60 bp, Artificial
  Synthetic oligonucleotide
gatcctaatgacacggtaaccttcactttcaatggggcattcatagctcctgacagggca

SEQ ID NO: 402614 - DNA, 60 bp, Artificial
  Synthetic oligonucleotide
gatcctaatggatggacagataccgacagtgatttctcagtgaaacaggatgttgtggca

SEQ ID NO: 402615 - DNA, 55 bp, Artificial
  Synthetic oligonucleotide
gatcctaatggtgtcgcgggacatgctagcttttgtaccaatagaagcagtaacc

SEQ ID NO: 402616 - DNA, 60 bp, Artificial
  Synthetic oligonucleotide
gatcctaatgtgatacatggaactagagaaagcggatggctcgaggtaggaagtgatttt

SEQ ID NO: 402617 - DNA, 54 bp, Artificial
  Synthetic oligonucleotide
gatcctaattactttataggaattaaatttaatagtataccttatgaatacgat

SEQ ID NO: 402618 - DNA, 55 bp, Artificial
  Synthetic oligonucleotide
gatcctaccactagcacacctattccaggcactgccccacgacctcgtttgggcc

SEQ ID NO: 402619 - DNA, 60 bp, Artificial
  Synthetic oligonucleotide
gatcctaccgcaatgtctgaaggccttgactagatgtgtattctggtccgagacattggt

SEQ ID NO: 402620 - DNA, 59 bp, Artificial
  Synthetic oligonucleotide
gatcctaccttagagaacaaggtcagggttcagacctaccaatatggctagccttctca

SEQ ID NO: 402621 - DNA, 58 bp, Artificial
  Synthetic oligonucleotide
gatcctacgggccgccacctcgatctacggggctccaggacaggcagagccaccccaa

SEQ ID NO: 402622 - DNA, 60 bp, Artificial
  Synthetic oligonucleotide
gatcctacggttgtcatggctgggcgagaggtctgattctgagtctcaactaactctcct

SEQ ID NO: 402623 - DNA, 55 bp, Artificial
  Synthetic oligonucleotide
gatcctacgtgaaaacgtatggcaacacgtaatggtgtgggcgagattaacgacc

SEQ ID NO: 402624 - DNA, 55 bp, Artificial
  Synthetic oligonucleotide
gatcctactaacccatcaattggaggtggtgatggtgattggcaaaatggtgtta

SEQ ID NO: 402625 - DNA, 59 bp, Artificial
  Synthetic oligonucleotide
gatcctactacaaagaaggagtacctctagaggcaacagtgcagaaaaatctagcaaac

SEQ ID NO: 402626 - DNA, 55 bp, Artificial
  Synthetic oligonucleotide
gatcctagaaacacccaggatcatgttcgctcactgtgcctattagcttggcaca

SEQ ID NO: 402627 - DNA, 56 bp, Artificial
  Synthetic oligonucleotide
gatcctagaataaccttttactatgacaaaacgctgcctgatttaaagaatgtacc

SEQ ID NO: 402628 - DNA, 56 bp, Artificial
  Synthetic oligonucleotide
gatcctagacatcaagagaaccccaggtaataaaccgaggatcgctgaaatgatct

SEQ ID NO: 402629 - DNA, 60 bp, Artificial
  Synthetic oligonucleotide
gatcctagagtgcttgtgtttgatgagtcagtgccctgccgctgtaggactttcctaaag

SEQ ID NO: 402630 - DNA, 54 bp, Artificial
  Synthetic oligonucleotide
gatcctagatcggcacccgtttgggaaattgtgggatccggatttacaaaatcc

SEQ ID NO: 402631 - DNA, 59 bp, Artificial
  Synthetic oligonucleotide
gatcctaggcaatcccaaatgcgatctttatctgaatggtagagagtggtcatacattg

SEQ ID NO: 402632 - DNA, 55 bp, Artificial
  Synthetic oligonucleotide
gatcctagggtaacggcaatgataagcttctgcttaatgtttcgcttgtcaattt

SEQ ID NO: 402633 - DNA, 59 bp, Artificial
  Synthetic oligonucleotide
gatcctatggacggttttgatatgttacagcagtggtttgattctatttcgccaactgg

SEQ ID NO: 402634 - DNA, 59 bp, Artificial
  Synthetic oligonucleotide
gatcctatgggagagcagtctctattgaggggtatttttgtaatggccgttattgtgga

SEQ ID NO: 402635 - DNA, 59 bp, Artificial
  Synthetic oligonucleotide
gatcctatgttggcaatacagtacgaccccaatcgggagtactttactgacatgcatgg

SEQ ID NO: 402636 - DNA, 51 bp, Artificial
  Synthetic oligonucleotide
gatcctattccgaacctcgtcccatcggtacccgttaccttaccaaacctc

SEQ ID NO: 402637 - DNA, 55 bp, Artificial
  Synthetic oligonucleotide
gatcctattgagcttcaattattaggtcagcattctggggatgctactattgtcc

SEQ ID NO: 402638 - DNA, 57 bp, Artificial
  Synthetic oligonucleotide
gatcctcaaatattgggggaatctcctacagtattggggtcaggagctaaggaatag

SEQ ID NO: 402639 - DNA, 51 bp, Artificial
  Synthetic oligonucleotide
gatcctcacacagggattgccgctgtacgagaagaacaacggttgggcctg

SEQ ID NO: 402640 - DNA, 60 bp, Artificial
  Synthetic oligonucleotide
gatcctcacagtcatgaggtttatcttgtatgtagacttgctgcggattttagaactatc

SEQ ID NO: 402641 - DNA, 60 bp, Artificial
  Synthetic oligonucleotide
gatcctcaggtgtgagcacggagtgattggtctcgtgacgatggggggtgaaggagtggt

SEQ ID NO: 402642 - DNA, 58 bp, Artificial
  Synthetic oligonucleotide
gatcctcagtcctactttgaggatgatatatttgcgggaaaagctaataggatgtttt

SEQ ID NO: 402643 - DNA, 60 bp, Artificial
  Synthetic oligonucleotide
gatcctcattgtgatgtctttcaagatgaaacatgggacctctttgtagagcggagcaat

SEQ ID NO: 402644 - DNA, 52 bp, Artificial
  Synthetic oligonucleotide
gatcctcccgttcatacattgaattcagtaacggtaacacgggcaccccaga

SEQ ID NO: 402645 - DNA, 55 bp, Artificial
  Synthetic oligonucleotide
gatcctccggagttacacgggttcaattgaacctcgccagatgtaaaccggcgaa

SEQ ID NO: 402646 - DNA, 56 bp, Artificial
  Synthetic oligonucleotide
gatcctcgaaaggggtgccgatttcctaaagtttccaattgctgagaccgagccag

SEQ ID NO: 402647 - DNA, 55 bp, Artificial
  Synthetic oligonucleotide
gatcctcgagttggttcagactaattcaacttatgtgtttcacaccttgggccgt

SEQ ID NO: 402648 - DNA, 60 bp, Artificial
  Synthetic oligonucleotide
gatcctctattgaagattgccatgggatccatcatgtttgttgtgcactcgaccgtgtcc

SEQ ID NO: 402649 - DNA, 53 bp, Artificial
  Synthetic oligonucleotide
gatcctctcatatacatctaacactatgctacctgttcagctgttagaggatg

SEQ ID NO: 402650 - DNA, 57 bp, Artificial
  Synthetic oligonucleotide
gatcctcttcagaacccactaccagatactttatacggtttcaggtgtatgctttcc

SEQ ID NO: 402651 - DNA, 53 bp, Artificial
  Synthetic oligonucleotide
gatcctgaacttaggacacttgctcagagtttgattgacgttaaagtgaagga

SEQ ID NO: 402652 - DNA, 55 bp, Artificial
  Synthetic oligonucleotide
gatcctgaagacatactctttcttttcccaaatgtggaagagctggaacaattag

SEQ ID NO: 402653 - DNA, 57 bp, Artificial
  Synthetic oligonucleotide
gatcctgaagtttggacgggattcatccaaggggtgcgtgatggtattcggactaaa

SEQ ID NO: 402654 - DNA, 60 bp, Artificial
  Synthetic oligonucleotide
gatcctgaattacaaccagcaatgctattcaacatctgcgtccatctagaggtctgctat

SEQ ID NO: 402655 - DNA, 55 bp, Artificial
  Synthetic oligonucleotide
gatcctgaattcgggatgatcaaaatgaggaaaggagtaactttctcgttgcggc

SEQ ID NO: 402656 - DNA, 60 bp, Artificial
  Synthetic oligonucleotide
gatcctgacacaccctttccacagccatcaatatcctattcattacatagtcctcagacc

SEQ ID NO: 402657 - DNA, 60 bp, Artificial
  Synthetic oligonucleotide
gatcctgagctaagaggccttgctcagtcactcatagaccagaaggtaaaagagatatca

SEQ ID NO: 402658 - DNA, 60 bp, Artificial
  Synthetic oligonucleotide
gatcctgagctccggggcctggcacaggcattaattgatcaaaaagtgaaggaaatatct

SEQ ID NO: 402659 - DNA, 58 bp, Artificial
  Synthetic oligonucleotide
gatcctgagctgagaacactagcacagagtttgattgatctcaaagtgaaggaaatct

SEQ ID NO: 402660 - DNA, 57 bp, Artificial
  Synthetic oligonucleotide
gatcctgataaagaaaggctggtatggagttgtataggcacagaaattggaagggga

SEQ ID NO: 402661 - DNA, 58 bp, Artificial
  Synthetic oligonucleotide
gatcctgataacacggcctatccgtttgcagtttctggcggaaaagtcgtgattacta

SEQ ID NO: 402662 - DNA, 55 bp, Artificial
  Synthetic oligonucleotide
gatcctgataagctgtgcatgtttccagatttcatatctgagggtgaagtttcgt

SEQ ID NO: 402663 - DNA, 50 bp, Artificial
  Synthetic oligonucleotide
gatcctgatgactctgcttccgctcaagtgtgtttaacggaatcagcttc

SEQ ID NO: 402664 - DNA, 55 bp, Artificial
  Synthetic oligonucleotide
gatcctgattgagaatgctgctgaccaccgggtttgtatttctacttatactact

SEQ ID NO: 402665 - DNA, 55 bp, Artificial
  Synthetic oligonucleotide
gatcctgcacaggagatatgcaggaacagtggctttcctggtgttcagagacacc

SEQ ID NO: 402666 - DNA, 60 bp, Artificial
  Synthetic oligonucleotide
gatcctggacatactgaggcaccatgtgggtgagaatcatcagtttgtgacgatgctcgt

SEQ ID NO: 402667 - DNA, 54 bp, Artificial
  Synthetic oligonucleotide
gatcctggagtaaaaggatttgcattcctagatggagagaactcatggctcgga

SEQ ID NO: 402668 - DNA, 60 bp, Artificial
  Synthetic oligonucleotide
gatcctggagttgattccacccacatccccagtaacatgcgtagatataaggccaacggc

SEQ ID NO: 402669 - DNA, 60 bp, Artificial
  Synthetic oligonucleotide
gatcctgtcacacaatgacccaccggattcaccactgcgtcgctacgtgcgccgttgtgt

SEQ ID NO: 402670 - DNA, 52 bp, Artificial
  Synthetic oligonucleotide
gatccttcgataggaggagtctccggaatgtcactctcgagattcctcataa

SEQ ID NO: 402671 - DNA, 60 bp, Artificial
  Synthetic oligonucleotide
gatccttgctatttatagtacggtatcgagcagtctagttttggtgggactgatcgttgc

SEQ ID NO: 402672 - DNA, 55 bp, Artificial
  Synthetic oligonucleotide
gatccttgggttggtgataatttgtagagcctcaaatgacctgtgggtcacggtc

SEQ ID NO: 402673 - DNA, 60 bp, Artificial
  Synthetic oligonucleotide
gatccttgggttggtgataatttgtagcgcctcagagcaactgtgggtcacagtccatta

SEQ ID NO: 402674 - DNA, 53 bp, Artificial
  Synthetic oligonucleotide
gatccttgtaaattgataacgttcggtggtacattttgtacttcccaattggg

SEQ ID NO: 402675 - DNA, 55 bp, Artificial
  Synthetic oligonucleotide
gatcctttcaaagcaggaattctcaagtaccaaaacccaatgggagaattggacc

SEQ ID NO: 402676 - DNA, 55 bp, Artificial
  Synthetic oligonucleotide
gatcctttccgcctactccagaacagccaggtattcagcctcatcaggcctaatg

SEQ ID NO: 402677 - DNA, 60 bp, Artificial
  Synthetic oligonucleotide
gatcgaaaacggtacaccccatctatctaggttctatgcattatgacatatctttctcag

SEQ ID NO: 402678 - DNA, 59 bp, Artificial
  Synthetic oligonucleotide
gatcgaaaggagttaattagacgaactctcgagacagtatgtgcgggtaacaatatata

SEQ ID NO: 402679 - DNA, 55 bp, Artificial
  Synthetic oligonucleotide
gatcgaacggtttaacggctaatgaatcaggaaggctaatagattttcttaagga

SEQ ID NO: 402680 - DNA, 55 bp, Artificial
  Synthetic oligonucleotide
gatcgaagatttgtaatgtcaacctgagagcacactagggagctccccactcccg

SEQ ID NO: 402681 - DNA, 52 bp, Artificial
  Synthetic oligonucleotide
gatcgaaggagcctgacccatgcccgagtacgcacctcactactttcccgct

SEQ ID NO: 402682 - DNA, 55 bp, Artificial
  Synthetic oligonucleotide
gatcgaagggttcgccgacatgcggcgtgagttcctcgctgtccgttccgaattg

SEQ ID NO: 402683 - DNA, 55 bp, Artificial
  Synthetic oligonucleotide
gatcgaatccctaagggatgtgttggtccttgtaaggtccaggattacgagttta

SEQ ID NO: 402684 - DNA, 53 bp, Artificial
  Synthetic oligonucleotide
gatcgaatgacggaatggacctagctagatactttgggtgttcaataacactc

SEQ ID NO: 402685 - DNA, 60 bp, Artificial
  Synthetic oligonucleotide
gatcgaatggcctaacagctaatgagtcaggaaggctaatagatttcttaaaggatgtaa

SEQ ID NO: 402686 - DNA, 56 bp, Artificial
  Synthetic oligonucleotide
gatcgaattttatttctgaagtttggtctacaaacatggtgtgttccattttctta

SEQ ID NO: 402687 - DNA, 55 bp, Artificial
  Synthetic oligonucleotide
gatcgaccacgaggcgccgtcgcccctagctcatatgaaatggacacaggcacac

SEQ ID NO: 402688 - DNA, 54 bp, Artificial
  Synthetic oligonucleotide
gatcgactccgttaggggttatagggacccgagagggttccggctcgctcaata

SEQ ID NO: 402689 - DNA, 51 bp, Artificial
  Synthetic oligonucleotide
gatcgacttcatattgcttatatatgtgctaacgcacatatataaatgctc

SEQ ID NO: 402690 - DNA, 55 bp, Artificial
  Synthetic oligonucleotide
gatcgacttctcaggcattagggataaatacattaacctacatgatagcagagcc

SEQ ID NO: 402691 - DNA, 57 bp, Artificial
  Synthetic oligonucleotide
gatcgagaagattacgtcaagaatttcgctggtcaaaccgttggtgacctctaccca

SEQ ID NO: 402692 - DNA, 52 bp, Artificial
  Synthetic oligonucleotide
gatcgagagggttttcccggtactttacccgggattcgaattgagctgtctt

SEQ ID NO: 402693 - DNA, 58 bp, Artificial
  Synthetic oligonucleotide
gatcgagagtcccagacaaggaacacgaggacaaagatcttggcacagggggacaatc

SEQ ID NO: 402694 - DNA, 60 bp, Artificial
  Synthetic oligonucleotide
gatcgagatcactaaattccgctgcatttaactacagagtatagatatagcttagattag

SEQ ID NO: 402695 - DNA, 55 bp, Artificial
  Synthetic oligonucleotide
gatcgagattatgagtgataaaattgtgacacaacctcaggggttgattgagcgg

SEQ ID NO: 402696 - DNA, 57 bp, Artificial
  Synthetic oligonucleotide
gatcgaggcgaggggtttgcttcggaggttcgctgatagtcttaaatccgccgtaga

SEQ ID NO: 402697 - DNA, 59 bp, Artificial
  Synthetic oligonucleotide
gatcgagggaattgatgaacaccatggacggtcaattaaggtcattggggctggttctc

SEQ ID NO: 402698 - DNA, 57 bp, Artificial
  Synthetic oligonucleotide
gatcgaggtacggccaatttcttacagatgttaacggatggtcgacggacgattata

SEQ ID NO: 402699 - DNA, 56 bp, Artificial
  Synthetic oligonucleotide
gatcgagtactcatccatccggattcgcccttcgttctgccgcccggagacttcta

SEQ ID NO: 402700 - DNA, 60 bp, Artificial
  Synthetic oligonucleotide
gatcgagtcttcgtcttctaatcggtctgtgcttggctattcggtgttgcaccttgaccg

SEQ ID NO: 402701 - DNA, 60 bp, Artificial
  Synthetic oligonucleotide
gatcgataagacacgagtaagctgttgctgagtacgagtgacacgtgtgaactaaaaata

SEQ ID NO: 402702 - DNA, 54 bp, Artificial
  Synthetic oligonucleotide
gatcgataggttaggtaactttgggccaaggcttcctatcatgatccgaactag

SEQ ID NO: 402703 - DNA, 60 bp, Artificial
  Synthetic oligonucleotide
gatcgatatataatacgtacacccacacggcagatcaactcgcttcctgcgaatgctctt

SEQ ID NO: 402704 - DNA, 60 bp, Artificial
  Synthetic oligonucleotide
gatcgatatcaagtttaactgacgctatgtctgatgctgcctcctcaattaacagatcgc

SEQ ID NO: 402705 - DNA, 55 bp, Artificial
  Synthetic oligonucleotide
gatcgatcaaaaggtaaaggaaatatctaatcaggagccgctcaagctttaaata

SEQ ID NO: 402706 - DNA, 50 bp, Artificial
  Synthetic oligonucleotide
gatcgatccagtttacaggtcatataagaatagaggtgctttcggcaact

SEQ ID NO: 402707 - DNA, 60 bp, Artificial
  Synthetic oligonucleotide
gatcgatccatctctaaacgcttcggatccttcatcactacgtttgatgacatcggctga

SEQ ID NO: 402708 - DNA, 60 bp, Artificial
  Synthetic oligonucleotide
gatcgatcttcatgcaggttcgactgagtctagctgtcaactgagacgccgtggacggaa

SEQ ID NO: 402709 - DNA, 58 bp, Artificial
  Synthetic oligonucleotide
gatcgatgctaccacagaggtcggtcgcgcttgtaccggttgtactgttagccctggg

SEQ ID NO: 402710 - DNA, 59 bp, Artificial
  Synthetic oligonucleotide
gatcgatgtggggaggatgaccacgacgagttagggttcatggtaccacctggcctctc

SEQ ID NO: 402711 - DNA, 55 bp, Artificial
  Synthetic oligonucleotide
gatcgattcggagcacgaattcggatgagtaccctctggatttctctcgcgtccg

SEQ ID NO: 402712 - DNA, 59 bp, Artificial
  Synthetic oligonucleotide
gatcgattgccggtgtttcgcaaccgagttagagatataaggaacaaactgacggatca

SEQ ID NO: 402713 - DNA, 60 bp, Artificial
  Synthetic oligonucleotide
gatcgattgtagccaaacatttctcgcacgatgaacttgggcgccggaagccttgaaagc

SEQ ID NO: 402714 - DNA, 57 bp, Artificial
  Synthetic oligonucleotide
gatcgatttcaggtcttaaggaaatttactgcaacggttacaggtggtcagtatgct

SEQ ID NO: 402715 - DNA, 55 bp, Artificial
  Synthetic oligonucleotide
gatcgcaataaaccaatcctgtgtttatcactatcaccagcttcagatccgagac

SEQ ID NO: 402716 - DNA, 50 bp, Artificial
  Synthetic oligonucleotide
gatcgcaataccccggtttgtttcgcaggtgatgatatgtactcccctgg

SEQ ID NO: 402717 - DNA, 60 bp, Artificial
  Synthetic oligonucleotide
gatcgcacaaggagtaattattgcatacagagaaatgcgcttagactacgatgagctgta

SEQ ID NO: 402718 - DNA, 55 bp, Artificial
  Synthetic oligonucleotide
gatcgcacagtgtggagagggccaaagtatgaggaagatgtcaacctagggagcg

SEQ ID NO: 402719 - DNA, 55 bp, Artificial
  Synthetic oligonucleotide
gatcgcaccacccccttatgaagaggacactagcatggagtatgctccgagcgct

SEQ ID NO: 402720 - DNA, 60 bp, Artificial
  Synthetic oligonucleotide
gatcgcagcaatgtcaagagtacggataaacaatgccttagcttatttcttgttaagata

SEQ ID NO: 402721 - DNA, 55 bp, Artificial
  Synthetic oligonucleotide
gatcgccacatgcatccagacgcctccgtaatgaaagttgtttcgcgtgacgtgc

SEQ ID NO: 402722 - DNA, 55 bp, Artificial
  Synthetic oligonucleotide
gatcgccagcagtaaaacgagtaaggttttgctgaacaacattgcgccgcagtgg

SEQ ID NO: 402723 - DNA, 55 bp, Artificial
  Synthetic oligonucleotide
gatcgcccttctgtgggagaaatcgcaatctcggactaagataagggactttgta

SEQ ID NO: 402724 - DNA, 60 bp, Artificial
  Synthetic oligonucleotide
gatcgccgtgtagtggtgacgactccgatacccgtgtctcaacgggctacagagttctgc

SEQ ID NO: 402725 - DNA, 60 bp, Artificial
  Synthetic oligonucleotide
gatcgcctgtaggataaggcgtccgggtttatctcgatctagtgtacgctagaatcagtg

SEQ ID NO: 402726 - DNA, 55 bp, Artificial
  Synthetic oligonucleotide
gatcgcgatcgttaaattccgctgcgttttactatagagtataggtatagcttag

SEQ ID NO: 402727 - DNA, 55 bp, Artificial
  Synthetic oligonucleotide
gatcgcgcaattagagtctcatgcgacgaccacaccgatgaattggcctctgctt

SEQ ID NO: 402728 - DNA, 59 bp, Artificial
  Synthetic oligonucleotide
gatcgcgctcatcgtatccgttctcgtttcaggtgccgcatcgttccggaagaaacgcc

SEQ ID NO: 402729 - DNA, 60 bp, Artificial
  Synthetic oligonucleotide
gatcgcgtgctgacgtcatgggcaaatccggggcgctacatcacgcctcgcacggcgaaa

SEQ ID NO: 402730 - DNA, 60 bp, Artificial
  Synthetic oligonucleotide
gatcgctagcaagctggatccagagtgaattcaacaaggcatgtgaattgaccgattcaa

SEQ ID NO: 402731 - DNA, 60 bp, Artificial
  Synthetic oligonucleotide
gatcgctcgatgagggagaacccatcgtgctccactgcttcgagaacatcccgagtgact

SEQ ID NO: 402732 - DNA, 60 bp, Artificial
  Synthetic oligonucleotide
gatcgctgaacgttgtacgcgtcggcctatcaaagagtactcgcctatatcagtttcgaa

SEQ ID NO: 402733 - DNA, 51 bp, Artificial
  Synthetic oligonucleotide
gatcgctgaacttttctcaactaagacacacattggataatggagttggtg

SEQ ID NO: 402734 - DNA, 55 bp, Artificial
  Synthetic oligonucleotide
gatcgctgagcttgaatcgaaattggcgtctgctgccgctatgtcaactgctgag

SEQ ID NO: 402735 - DNA, 55 bp, Artificial
  Synthetic oligonucleotide
gatcgcttaactcgtcagcgttctattacagagtataggtgcatgaaaggtatca

SEQ ID NO: 402736 - DNA, 53 bp, Artificial
  Synthetic oligonucleotide
gatcgcttacgcaaggtttgcgcatttccactatcggtggaatgggaatttcg

SEQ ID NO: 402737 - DNA, 60 bp, Artificial
  Synthetic oligonucleotide
gatcgctttggcctgcgaacagaatcaacctaatcaagccagtctacgtctaagtacgac

SEQ ID NO: 402738 - DNA, 55 bp, Artificial
  Synthetic oligonucleotide
gatcggaaaagtccacgtggcttgttgtgattcgttgtccgtcatccttttgtcg

SEQ ID NO: 402739 - DNA, 54 bp, Artificial
  Synthetic oligonucleotide
gatcggaaaatataacagacaatgtcaaaacgataatagtacatcttaatgagt

SEQ ID NO: 402740 - DNA, 58 bp, Artificial
  Synthetic oligonucleotide
gatcggaaatcatgtttgtcaaccccaccatggacgtctgcatgtcgacgccatagtc

SEQ ID NO: 402741 - DNA, 60 bp, Artificial
  Synthetic oligonucleotide
gatcggaacctgttgccgatattctatgacgcagtggtcgattttcatacaactacgact

SEQ ID NO: 402742 - DNA, 51 bp, Artificial
  Synthetic oligonucleotide
gatcggaagaaacttctgttcagtcagaagttgaagtgctgtgtcagaagg

SEQ ID NO: 402743 - DNA, 52 bp, Artificial
  Synthetic oligonucleotide
gatcggacttgaattcgatttagcaaggttgaatgcgatagacattccaact

SEQ ID NO: 402744 - DNA, 55 bp, Artificial
  Synthetic oligonucleotide
gatcggcacttgagtagagcggctgggtgagcgtgcagaaggcggcattctttag

SEQ ID NO: 402745 - DNA, 53 bp, Artificial
  Synthetic oligonucleotide
gatcggcgacgaaaacactgccgtttattttggacgtcaaccgtttgttgatt

SEQ ID NO: 402746 - DNA, 55 bp, Artificial
  Synthetic oligonucleotide
gatcggcgcgctattcggtttgggagacgcaaatttcccgctgagctcgtttgaa

SEQ ID NO: 402747 - DNA, 55 bp, Artificial
  Synthetic oligonucleotide
gatcggctcagagggtgtcgtggagaagatccttaagaacttagtcaaactcatc

SEQ ID NO: 402748 - DNA, 55 bp, Artificial
  Synthetic oligonucleotide
gatcggctggcatacggagtataggaggtcgctgagtggtaagcttgcagacttg

SEQ ID NO: 402749 - DNA, 55 bp, Artificial
  Synthetic oligonucleotide
gatcggctggggcgaccctatcacccattggagccacggacaaaatcagtggccc

SEQ ID NO: 402750 - DNA, 60 bp, Artificial
  Synthetic oligonucleotide
gatcggcttttttctggtgagctacgcgatctcgaaaaagctgcatctgagtatgatcct

SEQ ID NO: 402751 - DNA, 58 bp, Artificial
  Synthetic oligonucleotide
gatcgggaatgagaatacttgtaagaggcaactctccggtattcaactacaacaaggc

SEQ ID NO: 402752 - DNA, 60 bp, Artificial
  Synthetic oligonucleotide
gatcgggacaatttctaactactgatgacaggcaatcacccagtgcattaccaaactatg

SEQ ID NO: 402753 - DNA, 60 bp, Artificial
  Synthetic oligonucleotide
gatcgggctttatggcaatggagtcataatgcccaacggctcatatataagcgcgatagt

SEQ ID NO: 402754 - DNA, 55 bp, Artificial
  Synthetic oligonucleotide
gatcggggccgttgcttcccgccgctggatgagtcggatcgggcacgatctttat

SEQ ID NO: 402755 - DNA, 55 bp, Artificial
  Synthetic oligonucleotide
gatcgggtagcacatcgggtacctgacagacgaaaccgtcaggctaagtcgtggt

SEQ ID NO: 402756 - DNA, 53 bp, Artificial
  Synthetic oligonucleotide
gatcggtacaggtaggggaagtggtggtagctttgggtatagacctttcgagg

SEQ ID NO: 402757 - DNA, 53 bp, Artificial
  Synthetic oligonucleotide
gatcggtctagctatcgcggggggaatgatctacgcgtcatacaccgggtcgc

SEQ ID NO: 402758 - DNA, 51 bp, Artificial
  Synthetic oligonucleotide
gatcggttgtacctgatctgaaggaaaaagagttagtctcaaccgaagctc

SEQ ID NO: 402759 - DNA, 52 bp, Artificial
  Synthetic oligonucleotide
gatcgtaaaagaaataggacagaggtatgtgagattctaaagttggacaaaa

SEQ ID NO: 402760 - DNA, 55 bp, Artificial
  Synthetic oligonucleotide
gatcgtaaaagttgttatatgctttgaccgtatgtaactcaaggtgcgaaagtgc

SEQ ID NO: 402761 - DNA, 55 bp, Artificial
  Synthetic oligonucleotide
gatcgtaacccactttcagacaaccgtcatatcgatcgaccgatcgtgagtacac

SEQ ID NO: 402762 - DNA, 55 bp, Artificial
  Synthetic oligonucleotide
gatcgtacaagatcatttaattgggccattgacattgttatattggattgggccc

SEQ ID NO: 402763 - DNA, 52 bp, Artificial
  Synthetic oligonucleotide
gatcgtaggccaacacgtcacacgtgggtgccccgtctaacgtaccccctaa

SEQ ID NO: 402764 - DNA, 55 bp, Artificial
  Synthetic oligonucleotide
gatcgtatccattgtaatgctcatcactaagacccaacctcctagcttcttgtag

SEQ ID NO: 402765 - DNA, 55 bp, Artificial
  Synthetic oligonucleotide
gatcgtatttatacaactataacgctaatgatgagggaccgcatggcacctttag

SEQ ID NO: 402766 - DNA, 56 bp, Artificial
  Synthetic oligonucleotide
gatcgtatttccttatggacgcgtgagagacaaaagggaatgtatagatatgatga

SEQ ID NO: 402767 - DNA, 58 bp, Artificial
  Synthetic oligonucleotide
gatcgtcatgattaattctgtgagttaaaacatgagtgctttccattatataggcgtc

SEQ ID NO: 402768 - DNA, 60 bp, Artificial
  Synthetic oligonucleotide
gatcgtcatgttctttcattaattagtgtatgtgtgactggattgatgtggatgtttgtg

SEQ ID NO: 402769 - DNA, 55 bp, Artificial
  Synthetic oligonucleotide
gatcgtcattgttatgtgtgtttaaccatacatgagtctttctgggttaaatatg

SEQ ID NO: 402770 - DNA, 56 bp, Artificial
  Synthetic oligonucleotide
gatcgtcctcctcagccttaggggaaacagtatgccagggacgtggggtggtaaga

SEQ ID NO: 402771 - DNA, 60 bp, Artificial
  Synthetic oligonucleotide
gatcgtcgcccatagttgagcttgggcctttcccagagccatgcctcgactccacttcag

SEQ ID NO: 402772 - DNA, 55 bp, Artificial
  Synthetic oligonucleotide
gatcgtcgctccaaatggatgtagttgaatacggattgggatacttactggaagc

SEQ ID NO: 402773 - DNA, 56 bp, Artificial
  Synthetic oligonucleotide
gatcgtcgtccgtttgggactcccatggattttggtcaggtttttaacatgtatga

SEQ ID NO: 402774 - DNA, 52 bp, Artificial
  Synthetic oligonucleotide
gatcgtgaaaaggtgtggttgcagtgctataaaagtttttctgagccatatg

SEQ ID NO: 402775 - DNA, 60 bp, Artificial
  Synthetic oligonucleotide
gatcgtgacagccgaagaaatgacgaatagatatttgcaacagttggatgaacgcttaca

SEQ ID NO: 402776 - DNA, 55 bp, Artificial
  Synthetic oligonucleotide
gatcgtgactcgtgtaatggtgtctatggcaatattagcaagaacgccgtcttag

SEQ ID NO: 402777 - DNA, 57 bp, Artificial
  Synthetic oligonucleotide
gatcgtgcctggttcaaaccgagttcactagtaatttctcatccgaggtttatgtcg

SEQ ID NO: 402778 - DNA, 60 bp, Artificial
  Synthetic oligonucleotide
gatcgtgctcctcatattactgatagtctctatgtcaccggttcaatctgcaccaataag

SEQ ID NO: 402779 - DNA, 56 bp, Artificial
  Synthetic oligonucleotide
gatcgtggcacttggaacggcgtttgtaacggcgtacaagcactctaagacgtttc

SEQ ID NO: 402780 - DNA, 51 bp, Artificial
  Synthetic oligonucleotide
gatcgtggttgaccccgacactttcactacggccctccggtctggctactc

SEQ ID NO: 402781 - DNA, 58 bp, Artificial
  Synthetic oligonucleotide
gatcgtgtaataacgtatcattggactcaggctacatttttgaaggactacaataaaa

SEQ ID NO: 402782 - DNA, 57 bp, Artificial
  Synthetic oligonucleotide
gatcgtgtatccggatctcgggggtcccgggtttgcgagaagagagcacttcacgac

SEQ ID NO: 402783 - DNA, 55 bp, Artificial
  Synthetic oligonucleotide
gatcgtgtcaggttgaagcagtccgacctgttagcgaaggtcatcgatgaaggac

SEQ ID NO: 402784 - DNA, 53 bp, Artificial
  Synthetic oligonucleotide
gatcgtgtccggtctatcactctgggaaattccacaattacaacccaggagtg

SEQ ID NO: 402785 - DNA, 50 bp, Artificial
  Synthetic oligonucleotide
gatcgtgttggtagatttgaccgtagtcaaacattttcgggcgcgatgtc

SEQ ID NO: 402786 - DNA, 60 bp, Artificial
  Synthetic oligonucleotide
gatcgttaccaggtcctgcatcgatggaatgccaccgttactggtggccaatatgcctgt

SEQ ID NO: 402787 - DNA, 56 bp, Artificial
  Synthetic oligonucleotide
gatcgttactacatacggcatgtatttaaacgggtactgtccgtggagaaggataa

SEQ ID NO: 402788 - DNA, 60 bp, Artificial
  Synthetic oligonucleotide
gatcgttatcaagttttgcgcaagtttcatcatactgtaaccggtggtcagtatgcgagc

SEQ ID NO: 402789 - DNA, 60 bp, Artificial
  Synthetic oligonucleotide
gatcgttatccgcacattaactacgcaaagcctagtatcgcctttgatgtattaagactg

SEQ ID NO: 402790 - DNA, 56 bp, Artificial
  Synthetic oligonucleotide
gatcgttcggcttctccggtcaccaccgtgtggactgtttcgcagttctttgcccg

SEQ ID NO: 402791 - DNA, 57 bp, Artificial
  Synthetic oligonucleotide
gatcgttctcctatgaacggtatatttgttatacttttgatcgtggacaagaaacca

SEQ ID NO: 402792 - DNA, 60 bp, Artificial
  Synthetic oligonucleotide
gatcgttctgatgtgtttttcaagttggtgctatgtgatgtttctccctccggagtgggc

SEQ ID NO: 402793 - DNA, 58 bp, Artificial
  Synthetic oligonucleotide
gatcgttcttggactcggctcgcgataccgcccacgttatcagggacgattctcggcc

SEQ ID NO: 402794 - DNA, 55 bp, Artificial
  Synthetic oligonucleotide
gatcgtttagcttcaaaggctacggtttcaggtgacatgtataattcgtatgcta

SEQ ID NO: 402795 - DNA, 52 bp, Artificial
  Synthetic oligonucleotide
gatcgtttgggagaatttagttttgtaggtaaagttcagtggaaagttttca

SEQ ID NO: 402796 - DNA, 60 bp, Artificial
  Synthetic oligonucleotide
gatcgtttgtcctggctgggggaagctgaatgcaatgccgtagtgccggactttcgctcc

SEQ ID NO: 402797 - DNA, 59 bp, Artificial
  Synthetic oligonucleotide
gatctaaacctgtatgtgtcatatccacatgttttaatagtgactgattttttccctgt

SEQ ID NO: 402798 - DNA, 57 bp, Artificial
  Synthetic oligonucleotide
gatctaaatttagcattaatgtcattccaccatgcatttagagggacatctagcttc

SEQ ID NO: 402799 - DNA, 58 bp, Artificial
  Synthetic oligonucleotide
gatctaacacgctggtccccagccgatttaggtgcctgtaggggtggagctcgttctc

SEQ ID NO: 402800 - DNA, 60 bp, Artificial
  Synthetic oligonucleotide
gatctaaccctgcttgctcgtagcatggtcgttgttaggccctctgtggcgagcaaagta

SEQ ID NO: 402801 - DNA, 59 bp, Artificial
  Synthetic oligonucleotide
gatctaacctctctacctagtgataatttgcaggtcgaacaggttatgacaactaccga

SEQ ID NO: 402802 - DNA, 55 bp, Artificial
  Synthetic oligonucleotide
gatctaacgatgtcgtttaattgggccattgacatcgtaatgtttgattgtgagc

SEQ ID NO: 402803 - DNA, 56 bp, Artificial
  Synthetic oligonucleotide
gatctaactgactcagaaatgaacaaactgtttgaaagaacaaggaagcaactgag

SEQ ID NO: 402804 - DNA, 51 bp, Artificial
  Synthetic oligonucleotide
gatctaactgtagggctcagtgacgtgcttggaccttccgtacttgtgaag

SEQ ID NO: 402805 - DNA, 52 bp, Artificial
  Synthetic oligonucleotide
gatctaaggagtatttcttgcgcagtataccacctaatcatggtatgcaaga

SEQ ID NO: 402806 - DNA, 60 bp, Artificial
  Synthetic oligonucleotide
gatctaataaagcatgaattagccataggtaagcaacggtatcaaagagcaagaaaagag

SEQ ID NO: 402807 - DNA, 55 bp, Artificial
  Synthetic oligonucleotide
gatctaatggcaagtgacacagtgacagacctgcctgatagggaagcagaagctc

SEQ ID NO: 402808 - DNA, 60 bp, Artificial
  Synthetic oligonucleotide
gatctaatgtcacaatcccgcactcgcgagatactaacgaagaccacagtggaccatatg

SEQ ID NO: 402809 - DNA, 55 bp, Artificial
  Synthetic oligonucleotide
gatctacaccagtcacatcataatttgaggtcaataagtttgaagacatgtcgcc

SEQ ID NO: 402810 - DNA, 53 bp, Artificial
  Synthetic oligonucleotide
gatctacaggtctaccacatcggaaatttactaaaaggggataaggtaaatgg

SEQ ID NO: 402811 - DNA, 55 bp, Artificial
  Synthetic oligonucleotide
gatctacgccggcacgttaagaatgtaccgacagtgctggaaattggacccagtg

SEQ ID NO: 402812 - DNA, 60 bp, Artificial
  Synthetic oligonucleotide
gatctacgtcatcaatgacgttgaaccaagcatcattattgtacacctttggactcagat

SEQ ID NO: 402813 - DNA, 60 bp, Artificial
  Synthetic oligonucleotide
gatctacgttacatccaatggggaatgtgaaagctgcctgtgcagcctgatcatcgctta

SEQ ID NO: 402814 - DNA, 60 bp, Artificial
  Synthetic oligonucleotide
gatctactcagatttctccacacacgctaccagatattgtcactgaggcttcggaaaagt

SEQ ID NO: 402815 - DNA, 56 bp, Artificial
  Synthetic oligonucleotide
gatctagaagtggcagtgaagcacgagggaaacctcacgtgggtcccgaacggggc

SEQ ID NO: 402816 - DNA, 55 bp, Artificial
  Synthetic oligonucleotide
gatctagagagtgtgcgccgtcatttgcaaggtgagactggtcatttaaggagtc

SEQ ID NO: 402817 - DNA, 55 bp, Artificial
  Synthetic oligonucleotide
gatctagatggccgcacaagtaattgtgcctaccaagcgatctagcccacatggt

SEQ ID NO: 402818 - DNA, 60 bp, Artificial
  Synthetic oligonucleotide
gatctagatgtccacacagataatatgtggacctaatgatctggcccacatcgtcttccc

SEQ ID NO: 402819 - DNA, 50 bp, Artificial
  Synthetic oligonucleotide
gatctagattagtaagagcagttcagatggaaattttgcttcgggtaact

SEQ ID NO: 402820 - DNA, 55 bp, Artificial
  Synthetic oligonucleotide
gatctagcagtccgagatgacagcagaatggaccgccttgagcaagcgatggacg

SEQ ID NO: 402821 - DNA, 57 bp, Artificial
  Synthetic oligonucleotide
gatctagcccaaatagttttgccggaacgactatcgccctctattacaatactattg

SEQ ID NO: 402822 - DNA, 55 bp, Artificial
  Synthetic oligonucleotide
gatctagccgagtttagacagaagatgaagggcgactataggaagcaaccagggg

SEQ ID NO: 402823 - DNA, 60 bp, Artificial
  Synthetic oligonucleotide
gatctaggaatcgatgtcgttcactttgaagatttaaccagccattggcacgcattggga

SEQ ID NO: 402824 - DNA, 56 bp, Artificial
  Synthetic oligonucleotide
gatctaggcgaggcctcttcagtttggtacgcctgcgagaacgagcggtgcagcgg

SEQ ID NO: 402825 - DNA, 52 bp, Artificial
  Synthetic oligonucleotide
gatctaggggtgaggtatttgttatacgagagcccttcatatcgtgttccat

SEQ ID NO: 402826 - DNA, 54 bp, Artificial
  Synthetic oligonucleotide
gatctaggtcaataatcccagcaaagctggggtgcatcatggctcttggatagg

SEQ ID NO: 402827 - DNA, 51 bp, Artificial
  Synthetic oligonucleotide
gatctagtacgatgaggagcatacagctagaagtgatcttggtcattgaat

SEQ ID NO: 402828 - DNA, 60 bp, Artificial
  Synthetic oligonucleotide
gatctagtgctgtgttagaggttgctgacccaagccctcccacacgctcgcgtgttagta

SEQ ID NO: 402829 - DNA, 57 bp, Artificial
  Synthetic oligonucleotide
gatctagttccggtgtttgagaacacccacgttagttacgcttgctggcaggaggag

SEQ ID NO: 402830 - DNA, 55 bp, Artificial
  Synthetic oligonucleotide
gatctatagatacttaaggactcttaagaaacctgacctccagtctgccatggca

SEQ ID NO: 402831 - DNA, 58 bp, Artificial
  Synthetic oligonucleotide
gatctatccaggaattaagataaaacaattgtgtaaattaatcagaggagctaaggct

SEQ ID NO: 402832 - DNA, 54 bp, Artificial
  Synthetic oligonucleotide
gatctatcgtggcaaacgtttaggtccctggttttcagtaccaaacgacacggc

SEQ ID NO: 402833 - DNA, 60 bp, Artificial
  Synthetic oligonucleotide
gatctatgaaaggttgaatgttgcaattgaaaatggtcgtttgcttgatgtaatagactc

SEQ ID NO: 402834 - DNA, 60 bp, Artificial
  Synthetic oligonucleotide
gatctatgcaaccgcaacggatatgcaacatccgttcggctcaccactaactgacactcc

SEQ ID NO: 402835 - DNA, 55 bp, Artificial
  Synthetic oligonucleotide
gatctatggaagcacttgctagccttttaagagctcctcatggtgaggaccatga

SEQ ID NO: 402836 - DNA, 60 bp, Artificial
  Synthetic oligonucleotide
gatctatggagtaggggctacgaatccagaagttattgcggccatccatcattggcagaa

SEQ ID NO: 402837 - DNA, 60 bp, Artificial
  Synthetic oligonucleotide
gatctatggtcttacaatgcggaacttcttgtggcactggaaaaccagcatacaattgat

SEQ ID NO: 402838 - DNA, 57 bp, Artificial
  Synthetic oligonucleotide
gatctatgtccaccgcgctccgaattcaagtcccacggaaattgaaacccagattta

SEQ ID NO: 402839 - DNA, 55 bp, Artificial
  Synthetic oligonucleotide
gatctatgtctctggagcatcgacataatctttgcgaaggtaagaccgcatgttc

SEQ ID NO: 402840 - DNA, 57 bp, Artificial
  Synthetic oligonucleotide
gatctatgttctgatgttacctgggcatcttctaaggaagcggggaaagaaactacg

SEQ ID NO: 402841 - DNA, 60 bp, Artificial
  Synthetic oligonucleotide
gatctattccccagacacagtcggttacgatcttgtccgagatctcattctcgttctccg

SEQ ID NO: 402842 - DNA, 54 bp, Artificial
  Synthetic oligonucleotide
gatctattcctgtgatatcataacttgaactataaatgttggatgaaagatctc

SEQ ID NO: 402843 - DNA, 60 bp, Artificial
  Synthetic oligonucleotide
gatctattggacatgggatgattcaattagcttgcggatttgtgactacattaaatagcc

SEQ ID NO: 402844 - DNA, 59 bp, Artificial
  Synthetic oligonucleotide
gatctatttctatgattcagtatcgaattaataaagattgaattttattatattcgaac

SEQ ID NO: 402845 - DNA, 55 bp, Artificial
  Synthetic oligonucleotide
gatctatttgctgagtgtggattaaattatgacttcgatgatgtgcacaagagga

SEQ ID NO: 402846 - DNA, 60 bp, Artificial
  Synthetic oligonucleotide
gatctcaaacaatccttctctcagaaaatagctacttcactattcatgtaaatttatcta

SEQ ID NO: 402847 - DNA, 55 bp, Artificial
  Synthetic oligonucleotide
gatctcaactatcagcaaggtttggataggatgtggtcacgaagaacgcgctggg

SEQ ID NO: 402848 - DNA, 55 bp, Artificial
  Synthetic oligonucleotide
gatctcaatgggaacggattgcacggtaaaagtttgtccacttaatacacaaacg

SEQ ID NO: 402849 - DNA, 59 bp, Artificial
  Synthetic oligonucleotide
gatctcacatgtggagggaattagcgttaggtagagtaatatacggtcttgaggtacca

SEQ ID NO: 402850 - DNA, 51 bp, Artificial
  Synthetic oligonucleotide
gatctcacccccccgcactcggcccgttctaagttcgggtacggggcgaag

SEQ ID NO: 402851 - DNA, 60 bp, Artificial
  Synthetic oligonucleotide
gatctcactaacaccaacgcagcaggcggaaggtaccgctccatggccgcaggaggacgc

SEQ ID NO: 402852 - DNA, 57 bp, Artificial
  Synthetic oligonucleotide
gatctcactaggtataccgaaaatagacgctgatacgtacgtcggatcgaaaattta

SEQ ID NO: 402853 - DNA, 60 bp, Artificial
  Synthetic oligonucleotide
gatctcatacgcgatcttataggtgttgttcgtgcgaagaattatgtcgaagcgaccagc

SEQ ID NO: 402854 - DNA, 55 bp, Artificial
  Synthetic oligonucleotide
gatctcatgctaggaacaaatggattgatcagagcattacatactgtttggagat

SEQ ID NO: 402855 - DNA, 60 bp, Artificial
  Synthetic oligonucleotide
gatctccaagattaaacgtgatgatcttggtcagcaagtgggtcccggctatgtcatgct

SEQ ID NO: 402856 - DNA, 59 bp, Artificial
  Synthetic oligonucleotide
gatctccaagtaacaacagaggcaataaccagtcccgtggtaattcgcagaatcgtgga

SEQ ID NO: 402857 - DNA, 59 bp, Artificial
  Synthetic oligonucleotide
gatctccacaattaccgtcccagttgcgttaattggaacctgttgcctgtactctatga

SEQ ID NO: 402858 - DNA, 60 bp, Artificial
  Synthetic oligonucleotide
gatctccatgcagtctcttgaagattacgaaaaggctttaactgacagattgacccatac

SEQ ID NO: 402859 - DNA, 54 bp, Artificial
  Synthetic oligonucleotide
gatctcccagttatgttccaggccaaaccatgttatatagcatttaaagcagag

SEQ ID NO: 402860 - DNA, 55 bp, Artificial
  Synthetic oligonucleotide
gatctccccgaagcccaacctcgaacaagcacaacaactagaggtttggctggga

SEQ ID NO: 402861 - DNA, 55 bp, Artificial
  Synthetic oligonucleotide
gatctcccgcgaagaatttgtgggatcgtatcaaggcaggaagcgcacgatctac

SEQ ID NO: 402862 - DNA, 60 bp, Artificial
  Synthetic oligonucleotide
gatctccgttagatcatgagacagctgatattcgtcacggtgagattctatataattaaa

SEQ ID NO: 402863 - DNA, 60 bp, Artificial
  Synthetic oligonucleotide
gatctcctcaactaccctagatgggcaaacagacgtcgtgagctgcaatctaaatacccg

SEQ ID NO: 402864 - DNA, 54 bp, Artificial
  Synthetic oligonucleotide
gatctcctgtgaattcctatactaatacaccctacactggtgctctcggcttgc

SEQ ID NO: 402865 - DNA, 58 bp, Artificial
  Synthetic oligonucleotide
gatctccttcgctaaataggggtgcctctggcgcacacggggtgtaactactaacata

SEQ ID NO: 402866 - DNA, 60 bp, Artificial
  Synthetic oligonucleotide
gatctccttgaaaatttgcaggcctaccagaaacggatgggagtgcaaatgcagcgattc

SEQ ID NO: 402867 - DNA, 56 bp, Artificial
  Synthetic oligonucleotide
gatctcgaagtttcggattgtaatttggacatgtcggtgtttaacgactggtccaa

SEQ ID NO: 402868 - DNA, 60 bp, Artificial
  Synthetic oligonucleotide
gatctcgctagccggactgttgaaactagcgacatcgttaaagctgtgatattcactccc

SEQ ID NO: 402869 - DNA, 55 bp, Artificial
  Synthetic oligonucleotide
gatctcgctccagtctccggcttgcacccacgaaatgaggggcagctttccgacc

SEQ ID NO: 402870 - DNA, 53 bp, Artificial
  Synthetic oligonucleotide
gatctcgctgaagtgcaagtggaagcctttcttgtgtctagtgtccaaggcag

SEQ ID NO: 402871 - DNA, 51 bp, Artificial
  Synthetic oligonucleotide
gatctcggagagaggacactcgagagcttcactaggcttctagaggatccc

SEQ ID NO: 402872 - DNA, 60 bp, Artificial
  Synthetic oligonucleotide
gatctcggcgcatttccgtggtcagggttggactcgtgagcagtcgattgagtggatttc

SEQ ID NO: 402873 - DNA, 60 bp, Artificial
  Synthetic oligonucleotide
gatctcgtctgcctgcttcctcctacaaactactctccgcttgctgttgcaacccgaatg

SEQ ID NO: 402874 - DNA, 60 bp, Artificial
  Synthetic oligonucleotide
gatctcgtgacctctggtccgttaggtttcttgctggctcttcctaagatgagatcttga

SEQ ID NO: 402875 - DNA, 59 bp, Artificial
  Synthetic oligonucleotide
gatctcgtttaaagatcagtcgagctacttgacaattttctgcgcacccatcccgggtg

SEQ ID NO: 402876 - DNA, 60 bp, Artificial
  Synthetic oligonucleotide
gatctctactcttgtttgcacccgcctcatcaatgcagaaccacatgactcaacatctag

SEQ ID NO: 402877 - DNA, 55 bp, Artificial
  Synthetic oligonucleotide
gatctctagggattcacccttctatagccccgtccaggattggaacactgacccc

SEQ ID NO: 402878 - DNA, 57 bp, Artificial
  Synthetic oligonucleotide
gatctctaggtgagaaggttagaaaacccattggtcttgctaagggacaagctcaca

SEQ ID NO: 402879 - DNA, 60 bp, Artificial
  Synthetic oligonucleotide
gatctctagtcaaacgcaattcgttgctgcgaactcattcctgcgtgctgtggacggtaa

SEQ ID NO: 402880 - DNA, 58 bp, Artificial
  Synthetic oligonucleotide
gatctctcaggttatcaagattatttaccccttgacctggttgcaagtgcttatttaa

SEQ ID NO: 402881 - DNA, 60 bp, Artificial
  Synthetic oligonucleotide
gatctctcccaagggcatcagctaatttacgtcatcccagatataatgatgactattcgg

SEQ ID NO: 402882 - DNA, 60 bp, Artificial
  Synthetic oligonucleotide
gatctctcggacttaatgccgtcgctttctacaggggtgtggacgtgtcagtgatcccta

SEQ ID NO: 402883 - DNA, 60 bp, Artificial
  Synthetic oligonucleotide
gatctctctgggctcaaggggttgtaacatgtaatctgaccaatctagctgattgtaaag

SEQ ID NO: 402884 - DNA, 60 bp, Artificial
  Synthetic oligonucleotide
gatctctcttacagagttgggtatttatgtgcggggctgcccagtgatactccaagggga

SEQ ID NO: 402885 - DNA, 58 bp, Artificial
  Synthetic oligonucleotide
gatctctggcgtagccgggggatgcgtagctttcggcccccggagcattgacatgctt

SEQ ID NO: 402886 - DNA, 55 bp, Artificial
  Synthetic oligonucleotide
gatctctgtatgggtgtattgcgttttctaattccgagtccgcatccgtgtgcga

SEQ ID NO: 402887 - DNA, 60 bp, Artificial
  Synthetic oligonucleotide
gatctcttccatgaactaacagatcggataccattggatgagttaacagcgaatggtccg

SEQ ID NO: 402888 - DNA, 60 bp, Artificial
  Synthetic oligonucleotide
gatctgaaaacatcacgaacaatgccaaaaacataatagtacagctcaatgaaactgtac

SEQ ID NO: 402889 - DNA, 60 bp, Artificial
  Synthetic oligonucleotide
gatctgaaaatctgacagacaatgctaaaaccataatagtacaacttaataaatccatag

SEQ ID NO: 402890 - DNA, 60 bp, Artificial
  Synthetic oligonucleotide
gatctgaaaatctgacagacaatgttaaaacaataatagtacatcttaaagatcccatag

SEQ ID NO: 402891 - DNA, 55 bp, Artificial
  Synthetic oligonucleotide
gatctgaaacgagtccaccacacaacgaagactattgcgagtatggcaatgagta

SEQ ID NO: 402892 - DNA, 53 bp, Artificial
  Synthetic oligonucleotide
gatctgaaggggtgcaccccggtaagagctcggcccgaaggccgggttctact

SEQ ID NO: 402893 - DNA, 60 bp, Artificial
  Synthetic oligonucleotide
gatctgaattttgttaatagggcaaatcagcgattgaaccctatgcatcaactcctgcga

SEQ ID NO: 402894 - DNA, 55 bp, Artificial
  Synthetic oligonucleotide
gatctgacctaccgccataaagtggtgaaagtcatgagaccagggcctgatggga

SEQ ID NO: 402895 - DNA, 59 bp, Artificial
  Synthetic oligonucleotide
gatctgactaagttgaaggaatgcatggacaagtacggtctaaacctaccaatggtgac

SEQ ID NO: 402896 - DNA, 58 bp, Artificial
  Synthetic oligonucleotide
gatctgactcgaactcaaatgtacaaaagcgtccgttcccctcaaaatgcaccaagcg

SEQ ID NO: 402897 - DNA, 60 bp, Artificial
  Synthetic oligonucleotide
gatctgagagtatatgcctcagcaatgagtctcctctagaggggttgatatactactggg

SEQ ID NO: 402898 - DNA, 60 bp, Artificial
  Synthetic oligonucleotide
gatctgagagtgtcaagctttatcagaggaacaagagtagtcccaagaggacaactgtcc

SEQ ID NO: 402899 - DNA, 55 bp, Artificial
  Synthetic oligonucleotide
gatctgagcattgatttggttcactatgaagatctgacagctcattggcacgctt

SEQ ID NO: 402900 - DNA, 55 bp, Artificial
  Synthetic oligonucleotide
gatctgagtcgcatgacaaactctgatctagttgatcaattacgaagcataccgg

SEQ ID NO: 402901 - DNA, 60 bp, Artificial
  Synthetic oligonucleotide
gatctgagtgggatgtagacaagtctgtgttacaggcgttatctatgacttttcttttac

SEQ ID NO: 402902 - DNA, 60 bp, Artificial
  Synthetic oligonucleotide
gatctgatcagacacgggccagctcaacaatcgatattctcatgcaaatcatgtcacagg

SEQ ID NO: 402903 - DNA, 52 bp, Artificial
  Synthetic oligonucleotide
gatctgatcctcacatgctttagggggtgggtgaaacaattgcagatagact

SEQ ID NO: 402904 - DNA, 60 bp, Artificial
  Synthetic oligonucleotide
gatctgcaacatagaaggccattatgccaacgaatgtcctaatcgacaagtctcggagaa

SEQ ID NO: 402905 - DNA, 60 bp, Artificial
  Synthetic oligonucleotide
gatctgcaacttaagccggtagacaggaaaatgagctctgctgtgggatttgtcccaact

SEQ ID NO: 402906 - DNA, 54 bp, Artificial
  Synthetic oligonucleotide
gatctgcaagaacgctactgccatgtacatgctccgtggttgggaaagatcccc

SEQ ID NO: 402907 - DNA, 55 bp, Artificial
  Synthetic oligonucleotide
gatctgcaaggcggcttctttagaaggggcgttcaaggcttctgcggcagcgtcg

SEQ ID NO: 402908 - DNA, 60 bp, Artificial
  Synthetic oligonucleotide
gatctgcagctattatgtgcgcagagagatatatgtataaggtacggcaggcgtacaaga

SEQ ID NO: 402909 - DNA, 59 bp, Artificial
  Synthetic oligonucleotide
gatctgcatcacctcgtttagatttacgtaggagtctttgaacttgagaaacttgtgta

SEQ ID NO: 402910 - DNA, 56 bp, Artificial
  Synthetic oligonucleotide
gatctgcatcattaggaaggagttctacttcaccataccaaaagtactttttaaac

SEQ ID NO: 402911 - DNA, 60 bp, Artificial
  Synthetic oligonucleotide
gatctgcatgcatagctaccatacacactaaattagtacatggagaggagggtgtttata

SEQ ID NO: 402912 - DNA, 60 bp, Artificial
  Synthetic oligonucleotide
gatctgcattgggtatcacgccaacaattcaacaacacaagtagatacgctacttgagaa

SEQ ID NO: 402913 - DNA, 55 bp, Artificial
  Synthetic oligonucleotide
gatctgcctgcatagcagtcattcacacagatcttaaacatgaccatgaaggcca

SEQ ID NO: 402914 - DNA, 58 bp, Artificial
  Synthetic oligonucleotide
gatctgccttgtggagacgggatagggcgtttgccttccaaatgcagtatcttaaact

SEQ ID NO: 402915 - DNA, 53 bp, Artificial
  Synthetic oligonucleotide
gatctgcgaaccggtagagtttagttgcaacctaacacacataaagcattgat

SEQ ID NO: 402916 - DNA, 55 bp, Artificial
  Synthetic oligonucleotide
gatctgcggcgaaaagagaagaatgggacgcatgctaaagtcgttgagagagggg

SEQ ID NO: 402917 - DNA, 55 bp, Artificial
  Synthetic oligonucleotide
gatctgcgtccgtaaggtcaataggtagtaatacgacgatgcgaattagtactgc

SEQ ID NO: 402918 - DNA, 56 bp, Artificial
  Synthetic oligonucleotide
gatctgctttgttggatttatcaaagctgccttattgaaagccgccggtcccctgc

SEQ ID NO: 402919 - DNA, 58 bp, Artificial
  Synthetic oligonucleotide
gatctggaaagacatggagcaatcacaagtagcaatacagcacatactaatgctgact

SEQ ID NO: 402920 - DNA, 56 bp, Artificial
  Synthetic oligonucleotide
gatctggaaccgtagtattcccagaccaattataaagggatttgagacaagggcac

SEQ ID NO: 402921 - DNA, 60 bp, Artificial
  Synthetic oligonucleotide
gatctggacgggtcaactccggcctggctgcacgcaaccacgctacagattaagacgggc

SEQ ID NO: 402922 - DNA, 60 bp, Artificial
  Synthetic oligonucleotide
gatctggcacaagttgcagcagctcctgatccagattttgctgacattgtcacaataggt

SEQ ID NO: 402923 - DNA, 60 bp, Artificial
  Synthetic oligonucleotide
gatctggcattccaacctgaatgatgccacatatcagagaacaagagctctcgtacgcac

SEQ ID NO: 402924 - DNA, 58 bp, Artificial
  Synthetic oligonucleotide
gatctggcccacattgttttacccgtacgactatcaccttctatcacaatgcttttcg

SEQ ID NO: 402925 - DNA, 60 bp, Artificial
  Synthetic oligonucleotide
gatctggcgtcgatctggaattcgccccactcagtggtatccccatctttgtcgatgtag

SEQ ID NO: 402926 - DNA, 60 bp, Artificial
  Synthetic oligonucleotide
gatctggcgttgtgcccagactcgtggtgcgcgaatctgctgtaattccacctccttcat

SEQ ID NO: 402927 - DNA, 55 bp, Artificial
  Synthetic oligonucleotide
gatctggctagtatcggtggaggaagcaagtattttcgtttctacacactaaatt

SEQ ID NO: 402928 - DNA, 60 bp, Artificial
  Synthetic oligonucleotide
gatctgggaatgtggacaatgagggtggaagtaaccagaagccgatgtccactagaatag

SEQ ID NO: 402929 - DNA, 55 bp, Artificial
  Synthetic oligonucleotide
gatctgggacataggcctgcagtctagcgcaactatggtagcaccatggatatcc

SEQ ID NO: 402930 - DNA, 55 bp, Artificial
  Synthetic oligonucleotide
gatctgggcaagatagaaccgggtcgaagtaggtcctatatcaagttgaaacgac

SEQ ID NO: 402931 - DNA, 59 bp, Artificial
  Synthetic oligonucleotide
gatctgggtgtgcgcgtatgcgagaagatggccctatacgacttggtttctaaactccc

SEQ ID NO: 402932 - DNA, 60 bp, Artificial
  Synthetic oligonucleotide
gatctggtattatcatttcagatacaccagtccacgattgcaatacaacttgtcagacac

SEQ ID NO: 402933 - DNA, 59 bp, Artificial
  Synthetic oligonucleotide
gatctggtggtacgactcgatgctggttgcctgtacggtcatcgcccgagttcctttcg

SEQ ID NO: 402934 - DNA, 60 bp, Artificial
  Synthetic oligonucleotide
gatctggtgtctctcaactttctctatgtaatcggtgtctggagtcccatatataggtaa

SEQ ID NO: 402935 - DNA, 55 bp, Artificial
  Synthetic oligonucleotide
gatctggtgtgacatatgactcaataatagcctgtggtgaagggtctagcccgaa

SEQ ID NO: 402936 - DNA, 51 bp, Artificial
  Synthetic oligonucleotide
gatctggtttttgtgtacatgtacaggtgaatgcttcttccttccatcagg

SEQ ID NO: 402937 - DNA, 60 bp, Artificial
  Synthetic oligonucleotide
gatctgtaacgagacagtagtgagggaatacaatgagacagtcaggatagagaagataac

SEQ ID NO: 402938 - DNA, 50 bp, Artificial
  Synthetic oligonucleotide
gatctgtacaaagagcgttacaacttttatcaaatagaacagctcaaata

SEQ ID NO: 402939 - DNA, 60 bp, Artificial
  Synthetic oligonucleotide
gatctgtacaacatttagccaagtgaaacgacaatggttactgatggtacaagttcgata

SEQ ID NO: 402940 - DNA, 59 bp, Artificial
  Synthetic oligonucleotide
gatctgtagctacttttattatgcaaggaagcaaattatcagggtcagaatgttacata

SEQ ID NO: 402941 - DNA, 55 bp, Artificial
  Synthetic oligonucleotide
gatctgtcaaccaaatttacatctccggtatagtctttgatgtcgatggttgagg

SEQ ID NO: 402942 - DNA, 55 bp, Artificial
  Synthetic oligonucleotide
gatctgtcaatctatcaggggtctccttagtgataaagtgacacaagtaagacag

SEQ ID NO: 402943 - DNA, 55 bp, Artificial
  Synthetic oligonucleotide
gatctgtcgcctgatgtgatcaatgatctgaagattctcaaggctcaggagactc

SEQ ID NO: 402944 - DNA, 56 bp, Artificial
  Synthetic oligonucleotide
gatctgtctaaagccgcaagcttacctgttattaaggccaattttagtagtctcgg

SEQ ID NO: 402945 - DNA, 56 bp, Artificial
  Synthetic oligonucleotide
gatctgtctaataacaactttaatctaattggaactaatgtagaaaattctgtttc

SEQ ID NO: 402946 - DNA, 54 bp, Artificial
  Synthetic oligonucleotide
gatctgtctcgggagtttaggtattagttacaagtgtgtaaaacctctactacc

SEQ ID NO: 402947 - DNA, 60 bp, Artificial
  Synthetic oligonucleotide
gatctgtgaatcaccttacaacgtttcaatttgctcgcgaatatggcttaagtactacat

SEQ ID NO: 402948 - DNA, 55 bp, Artificial
  Synthetic oligonucleotide
gatctgtgccgtactcgtacgtgggcaagccgctcacagtatcgctcagccacgc

SEQ ID NO: 402949 - DNA, 50 bp, Artificial
  Synthetic oligonucleotide
gatctgtgctgcaggaatccccgaatcctctactgtctggtctcttcacc

SEQ ID NO: 402950 - DNA, 55 bp, Artificial
  Synthetic oligonucleotide
gatctgtggtatttgatagaatgtgtgaattgtcagggcctttatatagatcacg

SEQ ID NO: 402951 - DNA, 55 bp, Artificial
  Synthetic oligonucleotide
gatctgtgtttctagtccgttgaagtcgaaaggtactagtattgccccgtaccca

SEQ ID NO: 402952 - DNA, 60 bp, Artificial
  Synthetic oligonucleotide
gatctgttctctaaacgaactttaaaatctgtgtagctgtcgctcggctgcatgcctagt

SEQ ID NO: 402953 - DNA, 60 bp, Artificial
  Synthetic oligonucleotide
gatctgttgaacttaacatggggatcaggcggtgtgccgccttcgcagccgtaaacactg

SEQ ID NO: 402954 - DNA, 55 bp, Artificial
  Synthetic oligonucleotide
gatctgttgctagccgctccaactttagcacgactccaggatctggagacctgtg

SEQ ID NO: 402955 - DNA, 52 bp, Artificial
  Synthetic oligonucleotide
gatctgtttcgcgttgttattaggcgcgtcgctatacattatgggcgctcgg

SEQ ID NO: 402956 - DNA, 58 bp, Artificial
  Synthetic oligonucleotide
gatcttaacaacacttctgaaactcgtaatcgtaaacaaagagatccaagtgtagtga

SEQ ID NO: 402957 - DNA, 57 bp, Artificial
  Synthetic oligonucleotide
gatcttaacaggaaatactcttaggcagaaggtagctccctcgactgggtgacaaga

SEQ ID NO: 402958 - DNA, 59 bp, Artificial
  Synthetic oligonucleotide
gatcttaagagcccgaccaagagacacttagttgtgggaacatctggtgagcccaaata

SEQ ID NO: 402959 - DNA, 55 bp, Artificial
  Synthetic oligonucleotide
gatcttaatttaatgccagtcaacactcctaccaaaacaaagatacacccaagtg

SEQ ID NO: 402960 - DNA, 58 bp, Artificial
  Synthetic oligonucleotide
gatcttacaggtatgatccttgaggagggttgccccgagggcacggtgtgttcagtac

SEQ ID NO: 402961 - DNA, 55 bp, Artificial
  Synthetic oligonucleotide
gatcttacccaacatcctaatacagattctgctgatgattggtaccaatggttag

SEQ ID NO: 402962 - DNA, 55 bp, Artificial
  Synthetic oligonucleotide
gatcttactttaatcaacgtcgacattattcacgcaatcatgtgtggaaacggcc

SEQ ID NO: 402963 - DNA, 60 bp, Artificial
  Synthetic oligonucleotide
gatcttagacaatttcactgtgctgaggaacaaggcataactgattacatacacatgttg

SEQ ID NO: 402964 - DNA, 59 bp, Artificial
  Synthetic oligonucleotide
gatcttatgatcgaaattgaacggtatgcggttttctgggctgccggaaaaggatgtga

SEQ ID NO: 402965 - DNA, 60 bp, Artificial
  Synthetic oligonucleotide
gatcttatggcagatgcccaagcacagggtgcaaccttgtttagtgacataacatctcct

SEQ ID NO: 402966 - DNA, 50 bp, Artificial
  Synthetic oligonucleotide
gatcttatggttgaaattgagcggtatgcggttttctgggctaccgaaaa

SEQ ID NO: 402967 - DNA, 60 bp, Artificial
  Synthetic oligonucleotide
gatcttcaaacaccttgggatataaccttctcacagattggatcacatgattcaaactta

SEQ ID NO: 402968 - DNA, 57 bp, Artificial
  Synthetic oligonucleotide
gatcttcaataaagaaaggcgtgagcagcaagcctcccattaaaatgggttccactg

SEQ ID NO: 402969 - DNA, 59 bp, Artificial
  Synthetic oligonucleotide
gatcttcaatatattatgtatcccgtcctccaaattattgaagtcgaaaggtggtatga

SEQ ID NO: 402970 - DNA, 60 bp, Artificial
  Synthetic oligonucleotide
gatcttcacccaatgcttaccaggccaagtttgagtctgttgcatggtcggccacagcat

SEQ ID NO: 402971 - DNA, 58 bp, Artificial
  Synthetic oligonucleotide
gatcttcacgtcgatcctaaactccatccccttctcgttattatatttgatcgtcatt

SEQ ID NO: 402972 - DNA, 60 bp, Artificial
  Synthetic oligonucleotide
gatcttcagttcgtacaaaaacgcgataagtacatgtagcatttgtcacgcacgatgaca

SEQ ID NO: 402973 - DNA, 54 bp, Artificial
  Synthetic oligonucleotide
gatcttcatacaactgcgactgaatcgtgctgatagttgagacgctgtggaagg

SEQ ID NO: 402974 - DNA, 60 bp, Artificial
  Synthetic oligonucleotide
gatcttcatacagctacgactgagcctggcgcttatctgagccgccgcagatggaaactg

SEQ ID NO: 402975 - DNA, 60 bp, Artificial
  Synthetic oligonucleotide
gatcttcatgtcttccatgatgcgaacgtcgactgtgaatctgactccctgcttgtttgt

SEQ ID NO: 402976 - DNA, 60 bp, Artificial
  Synthetic oligonucleotide
gatcttcccgaaaaacatgatcgtgaaatcttttcagagactcatggtcactcaaatgca

SEQ ID NO: 402977 - DNA, 56 bp, Artificial
  Synthetic oligonucleotide
gatcttcggacaagatgatttccttaagctgctccaagccttacagtggaaagctg

SEQ ID NO: 402978 - DNA, 55 bp, Artificial
  Synthetic oligonucleotide
gatcttcgtcgaaaattcgtttggaaatagtgctaattcggacacatcgaaagag

SEQ ID NO: 402979 - DNA, 55 bp, Artificial
  Synthetic oligonucleotide
gatcttcgtgatcgttaccaagtcttacgtaagttcgattcaactgtcactggag

SEQ ID NO: 402980 - DNA, 50 bp, Artificial
  Synthetic oligonucleotide
gatcttcgtggcactgaatgtcctcgtcattccatgggtggatatatggt

SEQ ID NO: 402981 - DNA, 58 bp, Artificial
  Synthetic oligonucleotide
gatcttctgggtaaagttatcccgataactcagttgctgttcgggttgtgtatatcag

SEQ ID NO: 402982 - DNA, 56 bp, Artificial
  Synthetic oligonucleotide
gatcttcttgaaaatttacaggcctatcagaaacgaatgggggtgcagatgcaacg

SEQ ID NO: 402983 - DNA, 60 bp, Artificial
  Synthetic oligonucleotide
gatcttgaaataaaggggatttggtacttcccagatatagacgccactccatgcttgagc

SEQ ID NO: 402984 - DNA, 52 bp, Artificial
  Synthetic oligonucleotide
gatcttgaacaattgaaccgcagctgttcagtgcaaggagtaagaggagtta

SEQ ID NO: 402985 - DNA, 55 bp, Artificial
  Synthetic oligonucleotide
gatcttgaacactgttttgcacaaacagcctacatctcatcttcagagacccagg

SEQ ID NO: 402986 - DNA, 60 bp, Artificial
  Synthetic oligonucleotide
gatcttgaacattgaggagactagtagcacaatactgtttcctgtggagcagatcggaac

SEQ ID NO: 402987 - DNA, 55 bp, Artificial
  Synthetic oligonucleotide
gatcttgagacaagcaaagaaccctctagtgtctcctttgatgtcaaattcgagg

SEQ ID NO: 402988 - DNA, 59 bp, Artificial
  Synthetic oligonucleotide
gatcttgattaccaaattggctatgtatgtagtgggatatttggggacaatcccaggcc

SEQ ID NO: 402989 - DNA, 55 bp, Artificial
  Synthetic oligonucleotide
gatcttgcgaatgcgatggaagagaaacgaattaagtacttgatgggtacgtttc

SEQ ID NO: 402990 - DNA, 55 bp, Artificial
  Synthetic oligonucleotide
gatcttgctgaccatgtaaaatattgggagctaataagggcagaaggtgccctag

SEQ ID NO: 402991 - DNA, 60 bp, Artificial
  Synthetic oligonucleotide
gatcttggacgggagattcggttaactatgcagcatctcgatttctcggtgtcaaccaga

SEQ ID NO: 402992 - DNA, 60 bp, Artificial
  Synthetic oligonucleotide
gatcttggagggctatatgaagcaatcgaggagtgcctgattaacgatccctgggttttg

SEQ ID NO: 402993 - DNA, 55 bp, Artificial
  Synthetic oligonucleotide
gatcttggcagcgcttgcacccaatgtcttttacggtgatgcttatgaggacaca

SEQ ID NO: 402994 - DNA, 60 bp, Artificial
  Synthetic oligonucleotide
gatcttggctatattgatgtaccggatatagattcggctgacgaaactcatctgccaatt

SEQ ID NO: 402995 - DNA, 60 bp, Artificial
  Synthetic oligonucleotide
gatcttggctgggaggtcctgttcaattaagataggtcaccatatcgagctgcaacatgt

SEQ ID NO: 402996 - DNA, 58 bp, Artificial
  Synthetic oligonucleotide
gatcttggtaacgtaatgacgggactttacgtttattgcattgatgtatttcaatgga

SEQ ID NO: 402997 - DNA, 56 bp, Artificial
  Synthetic oligonucleotide
gatcttggtcatggacgcgaacggtgtgcgtcgtccactacttggccggtgggtta

SEQ ID NO: 402998 - DNA, 58 bp, Artificial
  Synthetic oligonucleotide
gatcttgtaactcagacgttcattccgagtgatgcttttcttaaggataactttaaga

SEQ ID NO: 402999 - DNA, 50 bp, Artificial
  Synthetic oligonucleotide
gatcttgtgccatgctaagaaagtacaaggccttgacaagacgtgcgacg

SEQ ID NO: 403000 - DNA, 55 bp, Artificial
  Synthetic oligonucleotide
gatcttgttggtgtcggtagttttgcgagcgatcatgcctttgattacatcgatc

SEQ ID NO: 403001 - DNA, 54 bp, Artificial
  Synthetic oligonucleotide
gatctttagagcctaacgtggtctttcagagcgtttgttacaaccgtttttgat

SEQ ID NO: 403002 - DNA, 59 bp, Artificial
  Synthetic oligonucleotide
gatctttctaaatgtttgtctgtttacattctgtgaaacagtctggctttacatttgta

SEQ ID NO: 403003 - DNA, 54 bp, Artificial
  Synthetic oligonucleotide
gatctttctgctcccgtagacgcaaagcctcttgacttaaaacccgtggacgta

SEQ ID NO: 403004 - DNA, 60 bp, Artificial
  Synthetic oligonucleotide
gatctttgagaatttacctggctgatctaggcgacaaggagttatctccgatagacggac

SEQ ID NO: 403005 - DNA, 60 bp, Artificial
  Synthetic oligonucleotide
gatctttggagttagagtacctcatgatgcaagtaccgtacggttcgctgacctacgata

SEQ ID NO: 403006 - DNA, 52 bp, Artificial
  Synthetic oligonucleotide
gatctttggtcttacaatgcggaactccttgtcgccctagagaatcagcata

SEQ ID NO: 403007 - DNA, 55 bp, Artificial
  Synthetic oligonucleotide
gatctttgtcaatcccggtgccctcagagctggtctagctgatctcgagatggcc

SEQ ID NO: 403008 - DNA, 57 bp, Artificial
  Synthetic oligonucleotide
gatcttttagatccgaatattactttcgtcatcgcttcaggagacgatagtttaata

SEQ ID NO: 403009 - DNA, 56 bp, Artificial
  Synthetic oligonucleotide
gatcttttcatgagggtcttaagtggggaggatggtggaaccattttttgaccaga

SEQ ID NO: 403010 - DNA, 55 bp, Artificial
  Synthetic oligonucleotide
gatgaaaaagacacccgagttcaattggcagagttctatcgcttcaatgacggtc

SEQ ID NO: 403011 - DNA, 51 bp, Artificial
  Synthetic oligonucleotide
gatgaaaaagtacaatggcgtattaactcagtatggtatggcggaacctct

SEQ ID NO: 403012 - DNA, 56 bp, Artificial
  Synthetic oligonucleotide
gatgaaaacatcaagacgaaaaaccatactaatagtgtcatgtttttccttgttcg

SEQ ID NO: 403013 - DNA, 59 bp, Artificial
  Synthetic oligonucleotide
gatgaaaacatcatgcttaagaaccataccaatagtgtcattttttggttggtccgtga

SEQ ID NO: 403014 - DNA, 60 bp, Artificial
  Synthetic oligonucleotide
gatgaaaacgttagccgtggacctgacgtctccagtcgtaagcgcagatcgcattaagaa

SEQ ID NO: 403015 - DNA, 60 bp, Artificial
  Synthetic oligonucleotide
gatgaaaagagatgcaagtgcgtggtagagaacctgcccctgtgggcagccttctactgc

SEQ ID NO: 403016 - DNA, 55 bp, Artificial
  Synthetic oligonucleotide
gatgaaaagtatcaccttcaagactaaaagatgggctgattgggcggaagaggag

SEQ ID NO: 403017 - DNA, 60 bp, Artificial
  Synthetic oligonucleotide
gatgaaaatgctagcaactttcatcacacgaaacgcatgttggaagttgtgcgcgagtta

SEQ ID NO: 403018 - DNA, 58 bp, Artificial
  Synthetic oligonucleotide
gatgaaacaactgatacactttcctttcctactatttcaacagaatattcagtgaacg

SEQ ID NO: 403019 - DNA, 55 bp, Artificial
  Synthetic oligonucleotide
gatgaaacaatcaatttccgagagacggacggataacagcatgtttgaagcccac

SEQ ID NO: 403020 - DNA, 57 bp, Artificial
  Synthetic oligonucleotide
gatgaaacgaggatcgagaacggtcggtaactgaacgtcaaagcgatccatgttacc

SEQ ID NO: 403021 - DNA, 60 bp, Artificial
  Synthetic oligonucleotide
gatgaaactggcagagggtgatccggtcatctcgatgggagacacaaatggtaggagagc

SEQ ID NO: 403022 - DNA, 60 bp, Artificial
  Synthetic oligonucleotide
gatgaaagatcacacgtgcgagaatatatcagtgcttgaaggagcgaagtcacagttact

SEQ ID NO: 403023 - DNA, 55 bp, Artificial
  Synthetic oligonucleotide
gatgaaagtgtcactgtcttcagaatccaaatgaacctaaccgaaagaatgtact

SEQ ID NO: 403024 - DNA, 50 bp, Artificial
  Synthetic oligonucleotide
gatgaaagttgtacctgagatggattcagataatcgcatgattcggtact

SEQ ID NO: 403025 - DNA, 60 bp, Artificial
  Synthetic oligonucleotide
gatgaaataggagaatgtacaacacttgaagacaagacatggccaattgtattctgtagc

SEQ ID NO: 403026 - DNA, 50 bp, Artificial
  Synthetic oligonucleotide
gatgaaatctatgctaccacaagctcagcttaaaataaaatacttgagtg

SEQ ID NO: 403027 - DNA, 60 bp, Artificial
  Synthetic oligonucleotide
gatgaaatgcgtgtgagaaatgtgcttactgataaggatacgaggaatcttttgagatca

SEQ ID NO: 403028 - DNA, 58 bp, Artificial
  Synthetic oligonucleotide
gatgaaatggaggttagaaatcgcctcactgagaataacaacgaccttaccaagcgcc

SEQ ID NO: 403029 - DNA, 55 bp, Artificial
  Synthetic oligonucleotide
gatgaaatggttagagaatcgcaaagaaacggaattgcaccgcagtcagaatcgc

SEQ ID NO: 403030 - DNA, 55 bp, Artificial
  Synthetic oligonucleotide
gatgaaatgtctagttccagtccttcggactgcgatgccggataagcgaaagacc

SEQ ID NO: 403031 - DNA, 59 bp, Artificial
  Synthetic oligonucleotide
gatgaaattgaagaattcttttgtcactataggtaataaggtgttacaatatggagcag

SEQ ID NO: 403032 - DNA, 60 bp, Artificial
  Synthetic oligonucleotide
gatgaaatttgcgcaggtgtgccatcattatattccatgcgcgatcatatcattgattgc

SEQ ID NO: 403033 - DNA, 53 bp, Artificial
  Synthetic oligonucleotide
gatgaacaagagctatttaacagattgccgagaccaggaatgacaacggcgtt

SEQ ID NO: 403034 - DNA, 58 bp, Artificial
  Synthetic oligonucleotide
gatgaacaattaaatggactaatgtactcttcaataggaggcatgaaaatgcgttcca

SEQ ID NO: 403035 - DNA, 58 bp, Artificial
  Synthetic oligonucleotide
gatgaacaattcctttctccattgtttcttcatccattttcgttgcgtgtcttaggtc

SEQ ID NO: 403036 - DNA, 60 bp, Artificial
  Synthetic oligonucleotide
gatgaacaccttctaatgtgtctttcatcttactcggttctgctttttcacttacatgaa

SEQ ID NO: 403037 - DNA, 60 bp, Artificial
  Synthetic oligonucleotide
gatgaacagatacatgttgcaactaatagcttggtgtgtaccgaactaggactcacacca

SEQ ID NO: 403038 - DNA, 60 bp, Artificial
  Synthetic oligonucleotide
gatgaacagatgtatcaaaaatgctgcaatctattcgagaaatttttccctagcagttca

SEQ ID NO: 403039 - DNA, 60 bp, Artificial
  Synthetic oligonucleotide
gatgaacagatgtatcaaaagtgctgcagcctatttgagaaattcttccctagcagctca

SEQ ID NO: 403040 - DNA, 57 bp, Artificial
  Synthetic oligonucleotide
gatgaacatcatgtttgaggaggtgtttcgcacggagttcggtttccacccaaacgc

SEQ ID NO: 403041 - DNA, 55 bp, Artificial
  Synthetic oligonucleotide
gatgaacatgaacgaggatggaccagctatcttcgagaggcacgcgcggcacacc

SEQ ID NO: 403042 - DNA, 55 bp, Artificial
  Synthetic oligonucleotide
gatgaaccaactggatcatcgctcgtttgaaaagattcacaagatgattgactgg

SEQ ID NO: 403043 - DNA, 50 bp, Artificial
  Synthetic oligonucleotide
gatgaacgtcatagttggggtttcacattaggcgagcatttacttaggtt

SEQ ID NO: 403044 - DNA, 60 bp, Artificial
  Synthetic oligonucleotide
gatgaacgtggaatgactaacatcctgactgtggatcatgtcgttgggttatccaaagac

SEQ ID NO: 403045 - DNA, 60 bp, Artificial
  Synthetic oligonucleotide
gatgaacgttctgatactactaagcgtcacactctggatatgattaaaattgttatggat

SEQ ID NO: 403046 - DNA, 57 bp, Artificial
  Synthetic oligonucleotide
gatgaactagagttaaaacggtggttctttgactactatgcgacattaccgctcgaa

SEQ ID NO: 403047 - DNA, 55 bp, Artificial
  Synthetic oligonucleotide
gatgaactgctcagtgattagaccatataagtcagaggtgttgtgtaggatgccc

SEQ ID NO: 403048 - DNA, 60 bp, Artificial
  Synthetic oligonucleotide
gatgaactgttggagccttacgtctatgatgaacttgattcccttgccgttgttatatat

SEQ ID NO: 403049 - DNA, 55 bp, Artificial
  Synthetic oligonucleotide
gatgaacttatctgaggagacattccagcatgagagactagggcggttctcattc

SEQ ID NO: 403050 - DNA, 55 bp, Artificial
  Synthetic oligonucleotide
gatgaacttgactctactgacctggttaacattgcttcccacatccgaaaggcac

SEQ ID NO: 403051 - DNA, 60 bp, Artificial
  Synthetic oligonucleotide
gatgaagacattatgtggcggttcaggcctatgtaagcacaacgaatgggtaattcgtga

SEQ ID NO: 403052 - DNA, 60 bp, Artificial
  Synthetic oligonucleotide
gatgaagactatcagggcaggctgtgtaatcccctgaatccgtttgtcagtcataaggaa

SEQ ID NO: 403053 - DNA, 53 bp, Artificial
  Synthetic oligonucleotide
gatgaagagccaagacagcaggagagcaccgttaaggcgtggtgcgacctcgc

SEQ ID NO: 403054 - DNA, 54 bp, Artificial
  Synthetic oligonucleotide
gatgaagattgatgtcgtgtctaacaacatggcaacaacggagcaaatggcaaa

SEQ ID NO: 403055 - DNA, 59 bp, Artificial
  Synthetic oligonucleotide
gatgaagcattaaacaaccgatttcaaattagaggtgttgagttgaaatcaggctacaa

SEQ ID NO: 403056 - DNA, 60 bp, Artificial
  Synthetic oligonucleotide
gatgaagcgccctcgctaccaccgcacctcctattactccatatgcagcgagcctcatcg

SEQ ID NO: 403057 - DNA, 56 bp, Artificial
  Synthetic oligonucleotide
gatgaagcttacacatacgattatgttattttaaagcgaccagacctaaagagtgg

SEQ ID NO: 403058 - DNA, 60 bp, Artificial
  Synthetic oligonucleotide
gatgaaggatggcaggagggtattttcatgcttggacgcgtgctgctgagatgggaattg

SEQ ID NO: 403059 - DNA, 60 bp, Artificial
  Synthetic oligonucleotide
gatgaaggcaatattattggtcttgctatacacatttacagccgcgaatgcagacacact

SEQ ID NO: 403060 - DNA, 60 bp, Artificial
  Synthetic oligonucleotide
gatgaaggcacagggtatacatggttgtaccccactaaggcacaaacagccaatgcaact

SEQ ID NO: 403061 - DNA, 55 bp, Artificial
  Synthetic oligonucleotide
gatgaagggaagggcgtacgttcattgctgcaacccatgcatggatttgagagat

SEQ ID NO: 403062 - DNA, 54 bp, Artificial
  Synthetic oligonucleotide
gatgaaggggaagttgccagtccagaatctagtgaagacgaggagcaacaggta

SEQ ID NO: 403063 - DNA, 54 bp, Artificial
  Synthetic oligonucleotide
gatgaagggtaaacaacgttggtctaagttatatggcaaacgtgataaggaagt

SEQ ID NO: 403064 - DNA, 60 bp, Artificial
  Synthetic oligonucleotide
gatgaaggtaccccacctcgtaccagtactcctgtgcaacgagcagtgcaatcacttagt

SEQ ID NO: 403065 - DNA, 60 bp, Artificial
  Synthetic oligonucleotide
gatgaaggtacctgttggtatctctggtgtatactttgcactgacctgcatagttaaagt

SEQ ID NO: 403066 - DNA, 55 bp, Artificial
  Synthetic oligonucleotide
gatgaaggtgacaattaagattaacggtgcaattactaatgacgatgatgctccg

SEQ ID NO: 403067 - DNA, 60 bp, Artificial
  Synthetic oligonucleotide
gatgaagtatcctctcttcgcttcagtcatgtccaatatatccgtcttctcaacagtctt

SEQ ID NO: 403068 - DNA, 58 bp, Artificial
  Synthetic oligonucleotide
gatgaagtccaacaaggaaactggccgctacaatatcaatggtccaacccagaccaaa

SEQ ID NO: 403069 - DNA, 57 bp, Artificial
  Synthetic oligonucleotide
gatgaagtctctcaagtaggtgtttaattcgctttcaattcgaagttgatggtaact

SEQ ID NO: 403070 - DNA, 60 bp, Artificial
  Synthetic oligonucleotide
gatgaagtgacaaccgctccactacagtcgtactgactgtatttccaatctagtatcata

SEQ ID NO: 403071 - DNA, 55 bp, Artificial
  Synthetic oligonucleotide
gatgaagtgctggtgtctgatattggtggacgtaatggcgagctttcggggtggg

SEQ ID NO: 403072 - DNA, 60 bp, Artificial
  Synthetic oligonucleotide
gatgaagttaagacggatattgaacagcagctaaattctattgatgtaatcaatccgatt

SEQ ID NO: 403073 - DNA, 60 bp, Artificial
  Synthetic oligonucleotide
gatgaagttcaagattccaagagctcaacagccgcagattcatgtatacagtgccccatg

SEQ ID NO: 403074 - DNA, 60 bp, Artificial
  Synthetic oligonucleotide
gatgaagttgttaaaatgctcgaagaaccggtgaaacatgatgaccacctattgcaagac

SEQ ID NO: 403075 - DNA, 60 bp, Artificial
  Synthetic oligonucleotide
gatgaatacattcaaagaacagacatctactatcatgccaatagtgatcgccttctcact

SEQ ID NO: 403076 - DNA, 60 bp, Artificial
  Synthetic oligonucleotide
gatgaatacattcaaaggactaacatctactatcacgccaatactgacagactactcact

SEQ ID NO: 403077 - DNA, 55 bp, Artificial
  Synthetic oligonucleotide
gatgaataccactgtatatcgacttacttgcttccacaaccgggagcggatacgg

SEQ ID NO: 403078 - DNA, 58 bp, Artificial
  Synthetic oligonucleotide
gatgaatactccaatgcggaaagggtagtggtgagcattgaccgttttttgagagtcc

SEQ ID NO: 403079 - DNA, 60 bp, Artificial
  Synthetic oligonucleotide
gatgaatactccagcacagagagggtggtagtgagcattgaccgattcttaagagttcgg

SEQ ID NO: 403080 - DNA, 58 bp, Artificial
  Synthetic oligonucleotide
gatgaatcagcttatacaggtgacctaacaatacaaacagaggaagttgaagttaaac

SEQ ID NO: 403081 - DNA, 58 bp, Artificial
  Synthetic oligonucleotide
gatgaatccagcacttctgacacaacctttcgaagtccccaggatgttgttcctttgg

SEQ ID NO: 403082 - DNA, 60 bp, Artificial
  Synthetic oligonucleotide
gatgaatccatcggaaatagtagatgtcgttcggagacgctatttcgtgaataagtgtac

SEQ ID NO: 403083 - DNA, 55 bp, Artificial
  Synthetic oligonucleotide
gatgaatctggccacctgggtgggaagtaatttggaagatccagcatcatgcccc

SEQ ID NO: 403084 - DNA, 56 bp, Artificial
  Synthetic oligonucleotide
gatgaatgaacggtccagattaattccttagcgacgaagaaaggaatctttcaggg

SEQ ID NO: 403085 - DNA, 55 bp, Artificial
  Synthetic oligonucleotide
gatgaatgaatggttaatctttaataagttggtcttagtgtacccgtccttgcca

SEQ ID NO: 403086 - DNA, 59 bp, Artificial
  Synthetic oligonucleotide
gatgaatgaattcacaacgcccatcttacaagaggttatggaaaactctaaaattatgc

SEQ ID NO: 403087 - DNA, 55 bp, Artificial
  Synthetic oligonucleotide
gatgaatgcatgtgtgaattcgtatttgattcgattcgtcacggagaaaacgtta

SEQ ID NO: 403088 - DNA, 57 bp, Artificial
  Synthetic oligonucleotide
gatgaatggcactgggttcaccaagacgtgcggaggtcccccgtgcaacatcggggg

SEQ ID NO: 403089 - DNA, 60 bp, Artificial
  Synthetic oligonucleotide
gatgaattagagttgaagcgctggttctttgattattacgcgacattattgcttgaaagg

SEQ ID NO: 403090 - DNA, 58 bp, Artificial
  Synthetic oligonucleotide
gatgaattcgagcgaacaaaatttaaacatgagcttacacagaacatcactacaagtg

SEQ ID NO: 403091 - DNA, 55 bp, Artificial
  Synthetic oligonucleotide
gatgaattgtatggctacagtgcagatataaatgttgcctccagcaaggctagtg

SEQ ID NO: 403092 - DNA, 60 bp, Artificial
  Synthetic oligonucleotide
gatgaatttaccttcgaactgaataagcgcatgaagatggggttcaccattatcgtgacg

SEQ ID NO: 403093 - DNA, 54 bp, Artificial
  Synthetic oligonucleotide
gatgaatttactagattcccggctggtaaagtttaccattcgttgtctaaagaa

SEQ ID NO: 403094 - DNA, 55 bp, Artificial
  Synthetic oligonucleotide
gatgaatttggacttgcaataatcatagccttgttaatcataacactaggggtgg

SEQ ID NO: 403095 - DNA, 56 bp, Artificial
  Synthetic oligonucleotide
gatgacaaaggtaattgcgtccacaggacgccctcgcagaagaccttatgcagcta

SEQ ID NO: 403096 - DNA, 60 bp, Artificial
  Synthetic oligonucleotide
gatgacaaattagccactgtccccatttccccagaatggctctctgcttctggcaccccc

SEQ ID NO: 403097 - DNA, 53 bp, Artificial
  Synthetic oligonucleotide
gatgacaaccagctacatggaccagggtaatgagagcatggacctaagtgcag

SEQ ID NO: 403098 - DNA, 55 bp, Artificial
  Synthetic oligonucleotide
gatgacaaggaaaccacccagaaagctgccatttctaagtataatatgttcacct

SEQ ID NO: 403099 - DNA, 55 bp, Artificial
  Synthetic oligonucleotide
gatgacaaggagctcaaagtcctggacgccaaagaactggtggatcccgagggag

SEQ ID NO: 403100 - DNA, 55 bp, Artificial
  Synthetic oligonucleotide
gatgacacaaactttgctcatccagaatgctaacccagattgtaaatccatcctt

SEQ ID NO: 403101 - DNA, 55 bp, Artificial
  Synthetic oligonucleotide
gatgacacagaaaactccaacatagcacatgggaatgttggtcaggattcacggg

SEQ ID NO: 403102 - DNA, 52 bp, Artificial
  Synthetic oligonucleotide
gatgacacatcagacggagtagaagtgaaggtcaggttccttgtcagataca

SEQ ID NO: 403103 - DNA, 55 bp, Artificial
  Synthetic oligonucleotide
gatgacacgtccctggagtatctgaacctcatctcagatcagttgaagtcggcca

SEQ ID NO: 403104 - DNA, 51 bp, Artificial
  Synthetic oligonucleotide
gatgacactgaacaatgtgttcaatccatacaagtatcacctgttcatgcg

SEQ ID NO: 403105 - DNA, 55 bp, Artificial
  Synthetic oligonucleotide
gatgacacttccttcgaggacatcaatggtatcaggagaccgaagcacctatatg

SEQ ID NO: 403106 - DNA, 60 bp, Artificial
  Synthetic oligonucleotide
gatgacacttttcattgcctacaaattttgtacatgccctcaccgtaaggtgaggatgcc

SEQ ID NO: 403107 - DNA, 55 bp, Artificial
  Synthetic oligonucleotide
gatgacagacctgacggctggtggctatgcgatcgacgtgcagcctgacaccgtg

SEQ ID NO: 403108 - DNA, 60 bp, Artificial
  Synthetic oligonucleotide
gatgacagagagatcagtcaaaattatcctatagtgcagaatcctcaagggcaaatggta

SEQ ID NO: 403109 - DNA, 58 bp, Artificial
  Synthetic oligonucleotide
gatgacagatggtaaaccagttacgaagttagacttaaagcggttcattgactgtgcc

SEQ ID NO: 403110 - DNA, 60 bp, Artificial
  Synthetic oligonucleotide
gatgacagcatgccaaggagtggaaggacctggtcataaagcaagggttttggctgaagc

SEQ ID NO: 403111 - DNA, 55 bp, Artificial
  Synthetic oligonucleotide
gatgacagctactccaccgggcaagagtgaggcattccccgagtccaaaggagcc

SEQ ID NO: 403112 - DNA, 58 bp, Artificial
  Synthetic oligonucleotide
gatgacagtgaaattgcatttaaatatgcacaattggcagacatagaaagtaacgctg

SEQ ID NO: 403113 - DNA, 60 bp, Artificial
  Synthetic oligonucleotide
gatgacataacaattgtgagaggtgtaataaagagtcatggagtaccttgcttagtagat

SEQ ID NO: 403114 - DNA, 55 bp, Artificial
  Synthetic oligonucleotide
gatgacatcacagtttatgccaataagtacatggtgtacagcagcaccctgttgt

SEQ ID NO: 403115 - DNA, 60 bp, Artificial
  Synthetic oligonucleotide
gatgacatggacccagagctcagaggtctggcacaggcattgatagatcaaaaggtgaag

SEQ ID NO: 403116 - DNA, 55 bp, Artificial
  Synthetic oligonucleotide
gatgacattagcgaaagctttgtgatacttgaacgtgagtatattgagttgtacc

SEQ ID NO: 403117 - DNA, 56 bp, Artificial
  Synthetic oligonucleotide
gatgacattataactttacgtgttaaaggttatatattccattacttagatgaatc

SEQ ID NO: 403118 - DNA, 55 bp, Artificial
  Synthetic oligonucleotide
gatgacattcattatgaattgtgaagtgacacttacagggaagcttgaccttgcg

SEQ ID NO: 403119 - DNA, 60 bp, Artificial
  Synthetic oligonucleotide
gatgacatttttgatggtatttcggaagttgcaatcggtgcattattgctttgcttaggt

SEQ ID NO: 403120 - DNA, 60 bp, Artificial
  Synthetic oligonucleotide
gatgaccaagactccattcttggcagagatggtttaccagcaacacgattcaacgcttac

SEQ ID NO: 403121 - DNA, 60 bp, Artificial
  Synthetic oligonucleotide
gatgaccaatgcatggaaacaatcagaaacggaacctatgacaggcaaaagtatcaagaa

SEQ ID NO: 403122 - DNA, 60 bp, Artificial
  Synthetic oligonucleotide
gatgaccagcgaagacccggtgaatgatccatggaacgtcctcggtggcacaccctggac

SEQ ID NO: 403123 - DNA, 55 bp, Artificial
  Synthetic oligonucleotide
gatgaccattcgcaatcaccgtgctcgttcggcgatcacctacgagacttcgcag

SEQ ID NO: 403124 - DNA, 60 bp, Artificial
  Synthetic oligonucleotide
gatgaccatttactacgtgattctgagttagctggattactatcaatgtcatcagcctca

SEQ ID NO: 403125 - DNA, 60 bp, Artificial
  Synthetic oligonucleotide
gatgacccatacgcagtggccgttgcatgtcataaatgtggtaaccaagtggcattttgt

SEQ ID NO: 403126 - DNA, 57 bp, Artificial
  Synthetic oligonucleotide
gatgacccatggaacaaccgcgcggtacgtggatacattaagtcccctgcggagtcg

SEQ ID NO: 403127 - DNA, 56 bp, Artificial
  Synthetic oligonucleotide
gatgacccggtggatgagagaacgataatccctttcgaccctacggatttcgtgct

SEQ ID NO: 403128 - DNA, 60 bp, Artificial
  Synthetic oligonucleotide
gatgacctaacacagtattgcaacgatttgtatgatgagttcctggatcatagtcaatct

SEQ ID NO: 403129 - DNA, 60 bp, Artificial
  Synthetic oligonucleotide
gatgacctccttgaaaatttgcaggcataccagaagcggatgggagtgcagatgcagcga

SEQ ID NO: 403130 - DNA, 51 bp, Artificial
  Synthetic oligonucleotide
gatgacctgactttgatgaatggaaagcaagcacaagagataacagaatta

SEQ ID NO: 403131 - DNA, 51 bp, Artificial
  Synthetic oligonucleotide
gatgacgatatatcgatagtgtgtcgatttataaacgtatcgagcgattgg

SEQ ID NO: 403132 - DNA, 60 bp, Artificial
  Synthetic oligonucleotide
gatgacgccgtagcagtgaagatcgaaggtcatcgtgtcccagtactgcgacgccggtag

SEQ ID NO: 403133 - DNA, 60 bp, Artificial
  Synthetic oligonucleotide
gatgacgcggagagagaagtgctaaagtgggtgtttgacagccgcctagcatttcatcac

SEQ ID NO: 403134 - DNA, 60 bp, Artificial
  Synthetic oligonucleotide
gatgacggaagcgctgcaaacaagtggattatacggagtgatgtctgtagttgtagtccg

SEQ ID NO: 403135 - DNA, 59 bp, Artificial
  Synthetic oligonucleotide
gatgacggtgaaggatcagagtagtgtccttggtggtatgtgtgtatctgttgtaagag

SEQ ID NO: 403136 - DNA, 58 bp, Artificial
  Synthetic oligonucleotide
gatgacgtaaccgtgtaccccctacctgatggtgctacctcgctgaccccttgcacat

SEQ ID NO: 403137 - DNA, 55 bp, Artificial
  Synthetic oligonucleotide
gatgacgtgacgactgaggatagtagggccgttgcgcatggtaatcccatgcaag

SEQ ID NO: 403138 - DNA, 58 bp, Artificial
  Synthetic oligonucleotide
gatgacgtggcacacgcaacagcgtacttcaccgcaccaacaggtgacacgagatgga

SEQ ID NO: 403139 - DNA, 60 bp, Artificial
  Synthetic oligonucleotide
gatgacgtgtatgtgcctaattgttctattgttgaattgctggagccgcatgagacattg

SEQ ID NO: 403140 - DNA, 57 bp, Artificial
  Synthetic oligonucleotide
gatgacgttcgttggtaacctatacgattctaggttcttggccgatatagctctttc

SEQ ID NO: 403141 - DNA, 60 bp, Artificial
  Synthetic oligonucleotide
gatgactacaattggatatctaagatgtctgcggacgtggtaccctgggcccacggtgat

SEQ ID NO: 403142 - DNA, 55 bp, Artificial
  Synthetic oligonucleotide
gatgactaccctgaatgctgcctagctttattagccaaccaacctgaacccacta

SEQ ID NO: 403143 - DNA, 52 bp, Artificial
  Synthetic oligonucleotide
gatgactacggtacattacaacggattattagattctatacggaacaacgtt

SEQ ID NO: 403144 - DNA, 52 bp, Artificial
  Synthetic oligonucleotide
gatgactataaaccatgttcagtggcggaaatggggctacattcatcaactt

SEQ ID NO: 403145 - DNA, 55 bp, Artificial
  Synthetic oligonucleotide
gatgactatcagacaccaatcatgaattcagttacagtaaggcaggatctagaac

SEQ ID NO: 403146 - DNA, 60 bp, Artificial
  Synthetic oligonucleotide
gatgactatgtcttggttggagcacatgagtgccctattctaatgtgaacttggaagatg

SEQ ID NO: 403147 - DNA, 54 bp, Artificial
  Synthetic oligonucleotide
gatgactctaaactcgtgaactgtcggcacacctagcgtaggggcccgggggtt

SEQ ID NO: 403148 - DNA, 59 bp, Artificial
  Synthetic oligonucleotide
gatgactctaatctcaaacttgactcgtcaaatgtcgaagctttgggcctcggtgaatt

SEQ ID NO: 403149 - DNA, 55 bp, Artificial
  Synthetic oligonucleotide
gatgactctagctacctgggtgggaagtaatttggatgaccctgcatccagggat

SEQ ID NO: 403150 - DNA, 57 bp, Artificial
  Synthetic oligonucleotide
gatgactctggtgttaaaaacaatcttttgggtaaagctataactattgatcaggcg

SEQ ID NO: 403151 - DNA, 60 bp, Artificial
  Synthetic oligonucleotide
gatgactgggatgaacaactgcttttccatataagacgtttgtcttcgcttcccgcagca

SEQ ID NO: 403152 - DNA, 60 bp, Artificial
  Synthetic oligonucleotide
gatgactgttcattagaaggtctcattctaggcaatcccaaatgtgatctttatctgaat

SEQ ID NO: 403153 - DNA, 55 bp, Artificial
  Synthetic oligonucleotide
gatgactgttgtcagtcaccattgtgccacatcctgttatcacagaagtctgtca

SEQ ID NO: 403154 - DNA, 59 bp, Artificial
  Synthetic oligonucleotide
gatgacttaacggtattgagatacgctaatgagattgaagggtatataaacaaagtata

SEQ ID NO: 403155 - DNA, 55 bp, Artificial
  Synthetic oligonucleotide
gatgacttcccgaaatttgtttggccaaaacgacattggtgtgaaacttactaca

SEQ ID NO: 403156 - DNA, 60 bp, Artificial
  Synthetic oligonucleotide
gatgacttcttggtgggtcccactgctggtattgacgtgatttgacgtatattgggccaa

SEQ ID NO: 403157 - DNA, 57 bp, Artificial
  Synthetic oligonucleotide
gatgacttgtctagtcaacagaaatcgtctatgcgacgtgccatcgcaaaggcgaag

SEQ ID NO: 403158 - DNA, 55 bp, Artificial
  Synthetic oligonucleotide
gatgactttagatcaatggaggcttttgctggtatctttaaatcccctcatggag

SEQ ID NO: 403159 - DNA, 55 bp, Artificial
  Synthetic oligonucleotide
gatgactttgctccgagtggccctattgactacctcgctgctgacctgatcgcgt

SEQ ID NO: 403160 - DNA, 60 bp, Artificial
  Synthetic oligonucleotide
gatgacttttgttgtgctggcaatacactaatgccaccatttctcgaaccacaaagcaca

SEQ ID NO: 403161 - DNA, 55 bp, Artificial
  Synthetic oligonucleotide
gatgagaacaagtgtaagaataggaccagggcgagtattctataaaacaggatcc

SEQ ID NO: 403162 - DNA, 60 bp, Artificial
  Synthetic oligonucleotide
gatgagaacatcaagctgaagaaccacacgaacagtgtcatgttctggttggtaagagat

SEQ ID NO: 403163 - DNA, 50 bp, Artificial
  Synthetic oligonucleotide
gatgagaagctggatcaacttcaaacatcgaaggctgaagtaattgagtg

SEQ ID NO: 403164 - DNA, 60 bp, Artificial
  Synthetic oligonucleotide
gatgagaatgaacctgatcaatctgggatccctatggaattgagcgatgggccgggaacc

SEQ ID NO: 403165 - DNA, 59 bp, Artificial
  Synthetic oligonucleotide
gatgagaatgcttaccaagatgctcagtcaacctgggactagcgaagggggttctcccg

SEQ ID NO: 403166 - DNA, 60 bp, Artificial
  Synthetic oligonucleotide
gatgagacagagtatggtgtcaagactgactcagggtgcccagatggtgccagatgttac

SEQ ID NO: 403167 - DNA, 55 bp, Artificial
  Synthetic oligonucleotide
gatgagaccagtgatgcggacacaactttccgatgcccacaagatgtagtaccgc

SEQ ID NO: 403168 - DNA, 51 bp, Artificial
  Synthetic oligonucleotide
gatgagacctgaaacccgacagtcaatggaaatgctattccatgctaaatg

SEQ ID NO: 403169 - DNA, 50 bp, Artificial
  Synthetic oligonucleotide
gatgagacgaagttgatggatcaacgcttacgtgaaaatcagtttggccc

SEQ ID NO: 403170 - DNA, 52 bp, Artificial
  Synthetic oligonucleotide
gatgagactatctgcaggtttcggttttaatattgtaatcacgtaagttcaa

SEQ ID NO: 403171 - DNA, 60 bp, Artificial
  Synthetic oligonucleotide
gatgagactgcattgaatgtattattcgagaaggagctaattgcggagtcaggtgatgaa

SEQ ID NO: 403172 - DNA, 60 bp, Artificial
  Synthetic oligonucleotide
gatgagagaactgatcctatatgacaaagaggagatcagaaggatctggcgtcaagcaaa

SEQ ID NO: 403173 - DNA, 60 bp, Artificial
  Synthetic oligonucleotide
gatgagagaattgattctatatgacaaagaggagatcagaagaatttggcgccaagcgaa

SEQ ID NO: 403174 - DNA, 55 bp, Artificial
  Synthetic oligonucleotide
gatgagagaggctttactcacgaacaaattccatcatgtgatagatgcaaccggt

SEQ ID NO: 403175 - DNA, 50 bp, Artificial
  Synthetic oligonucleotide
gatgagatccttagtcacactggcggtcgcagctattacaactcttgcct

SEQ ID NO: 403176 - DNA, 55 bp, Artificial
  Synthetic oligonucleotide
gatgagccaacaataataagtgtaggtgatgcagtatcttatggtaacatcttgc

SEQ ID NO: 403177 - DNA, 60 bp, Artificial
  Synthetic oligonucleotide
gatgagccaacaattctgaatgtaggagatgcaatatcttatggaaatatcttactgagt

SEQ ID NO: 403178 - DNA, 50 bp, Artificial
  Synthetic oligonucleotide
gatgagccaaccgtagggcaatacgtacagatgaagtagctccccctctt

SEQ ID NO: 403179 - DNA, 60 bp, Artificial
  Synthetic oligonucleotide
gatgagcccacgggacgtcatgatgtcactcaaattccaaattcggcgatgtttgatgta

SEQ ID NO: 403180 - DNA, 55 bp, Artificial
  Synthetic oligonucleotide
gatgagcgatctccaattaccacagaacacactacactaccatactttgtggtgc

SEQ ID NO: 403181 - DNA, 55 bp, Artificial
  Synthetic oligonucleotide
gatgagcgcacaagactacatagaagcctcggatcatctgcgcgaactagcgcga

SEQ ID NO: 403182 - DNA, 55 bp, Artificial
  Synthetic oligonucleotide
gatgagcggatatattataatggtaagtcgttgacatttgtacttaccgcaggtc

SEQ ID NO: 403183 - DNA, 57 bp, Artificial
  Synthetic oligonucleotide
gatgagcgtaagggtcttttccttatgtcgccagataatgccgtgaaaggaccccag

SEQ ID NO: 403184 - DNA, 60 bp, Artificial
  Synthetic oligonucleotide
gatgagctattcggtgcaaggatccacagccatggtaatctcgcgatagcaccctctctg

SEQ ID NO: 403185 - DNA, 60 bp, Artificial
  Synthetic oligonucleotide
gatgagctccaggccttcattaatgccaagatattgggttatgagcaattaggagataag

SEQ ID NO: 403186 - DNA, 60 bp, Artificial
  Synthetic oligonucleotide
gatgagctgagaagcaagagcaaggtggaacagggcaaatccagactgattgaagcctct

SEQ ID NO: 403187 - DNA, 60 bp, Artificial
  Synthetic oligonucleotide
gatgagctgagctcctcatcacagaaaagatcctcctctggcttatattctcttgcccgt

SEQ ID NO: 403188 - DNA, 60 bp, Artificial
  Synthetic oligonucleotide
gatgagctgtcctgttggtgaagttccctctccatacaactcaagatttgaatcagtcgc

SEQ ID NO: 403189 - DNA, 56 bp, Artificial
  Synthetic oligonucleotide
gatgagcttagatctctagataagatcagaaaagggaagtctcgcctgattgaggc

SEQ ID NO: 403190 - DNA, 55 bp, Artificial
  Synthetic oligonucleotide
gatgagcttcgtggcctcacttttcgcccacaacccggtggtacaaaccctatac

SEQ ID NO: 403191 - DNA, 58 bp, Artificial
  Synthetic oligonucleotide
gatgagctttgcgtgaacctgaatgtacccgcaaatgttccttattcaagagtcattt

SEQ ID NO: 403192 - DNA, 59 bp, Artificial
  Synthetic oligonucleotide
gatgaggaactaactctcataatcgtgtagggaatcgttagtaggatctcagaacaagg

SEQ ID NO: 403193 - DNA, 58 bp, Artificial
  Synthetic oligonucleotide
gatgaggacctatctaagccaattactacggaaggatccttattattggctccaacaa

SEQ ID NO: 403194 - DNA, 54 bp, Artificial
  Synthetic oligonucleotide
gatgaggatcttttgcccaagatggggcatcgtatctaacgagatactcatatt

SEQ ID NO: 403195 - DNA, 60 bp, Artificial
  Synthetic oligonucleotide
gatgaggatggtgtcccagttgacctaagcgacttccatggactggatactaagaccatt

SEQ ID NO: 403196 - DNA, 60 bp, Artificial
  Synthetic oligonucleotide
gatgaggattgctgtaaggctctgcaatgtccgggaataggcgactagctgagtactcaa

SEQ ID NO: 403197 - DNA, 55 bp, Artificial
  Synthetic oligonucleotide
gatgaggcaaacaagtggatatcaatgggagactcatgtacgatcaaggtatgtc

SEQ ID NO: 403198 - DNA, 56 bp, Artificial
  Synthetic oligonucleotide
gatgaggccgcccctagttttgtttctggtgctatggctaaagctggtaaaggact

SEQ ID NO: 403199 - DNA, 55 bp, Artificial
  Synthetic oligonucleotide
gatgaggctgtcagtcttatcgagggcataaatcactcacaccatatctatcgca

SEQ ID NO: 403200 - DNA, 55 bp, Artificial
  Synthetic oligonucleotide
gatgagggagcaatagatgggctaattcgtgcctttggggagtcaggcgtagctg

SEQ ID NO: 403201 - DNA, 54 bp, Artificial
  Synthetic oligonucleotide
gatgaggtgctccagttgaggctcctcaaaacttgctcatgtaattggagcatt

SEQ ID NO: 403202 - DNA, 60 bp, Artificial
  Synthetic oligonucleotide
gatgaggtgtcttttatgcaatccgtgattactgatgtgacaggccaactgacagcggtg

SEQ ID NO: 403203 - DNA, 54 bp, Artificial
  Synthetic oligonucleotide
gatgaggttcgttctaaacagatcagcgttagtgtccataggtttaaggtgctt

SEQ ID NO: 403204 - DNA, 51 bp, Artificial
  Synthetic oligonucleotide
gatgaggttttgcttactgaggatggaaatctaatcttctgctggcttaaa

SEQ ID NO: 403205 - DNA, 51 bp, Artificial
  Synthetic oligonucleotide
gatgagtaagcctcgtgactccgcagtcatttctgcaagtgtcccggataa

SEQ ID NO: 403206 - DNA, 60 bp, Artificial
  Synthetic oligonucleotide
gatgagtacaagaacaccagagattcggacattgttttcacctgggccattcatcaccca

SEQ ID NO: 403207 - DNA, 60 bp, Artificial
  Synthetic oligonucleotide
gatgagtatggaggacaccaggacagtattgtgatacataatatttcagcccatgaggat

SEQ ID NO: 403208 - DNA, 55 bp, Artificial
  Synthetic oligonucleotide
gatgagtcataagatagtgcattttagcgcagcgggagctaacttctggaagggt

SEQ ID NO: 403209 - DNA, 60 bp, Artificial
  Synthetic oligonucleotide
gatgagtcatcgaaaaggtatgagttgcagtgtgtaggtgcgtgcgagcgtgttgctttt

SEQ ID NO: 403210 - DNA, 51 bp, Artificial
  Synthetic oligonucleotide
gatgagtggagtggccacgatgttacgcatatcccagataggcgaatgttt

SEQ ID NO: 403211 - DNA, 60 bp, Artificial
  Synthetic oligonucleotide
gatgagtgtccaacattcctattatgaactggcgagctaggactatgcatccagtacagc

SEQ ID NO: 403212 - DNA, 59 bp, Artificial
  Synthetic oligonucleotide
gatgagtgtgaacttgttccacttagcggtgacaccctaccgcgaggtgagatcccaaa

SEQ ID NO: 403213 - DNA, 55 bp, Artificial
  Synthetic oligonucleotide
gatgagtgtgcgtttattcctaacttcgttgatgcatggcttgctattcagccgg

SEQ ID NO: 403214 - DNA, 60 bp, Artificial
  Synthetic oligonucleotide
gatgagttcccctgtgcgtgaatccataattgtgacaggctagtgctatgaaatatgaac

SEQ ID NO: 403215 - DNA, 60 bp, Artificial
  Synthetic oligonucleotide
gatgagttcccctgtgcgtgaatccatgggcgtggcaagctaatgctatgaagtatgaac

SEQ ID NO: 403216 - DNA, 60 bp, Artificial
  Synthetic oligonucleotide
gatgagttgtaccttactgagccggctatagcttggttcgaggctaatcgacccactctc

SEQ ID NO: 403217 - DNA, 54 bp, Artificial
  Synthetic oligonucleotide
gatgagttgttaatgtccatcccgtccgggtacgacaacctcaaacttgagggt

SEQ ID NO: 403218 - DNA, 60 bp, Artificial
  Synthetic oligonucleotide
gatgagtttctgtcaggggacagcgattgactgtctccatcctcgagtttgatctcgagt

SEQ ID NO: 403219 - DNA, 52 bp, Artificial
  Synthetic oligonucleotide
gatgagtttgttaaaaccaaaaccgttcaaactttgaagagtctaagacgta

SEQ ID NO: 403220 - DNA, 60 bp, Artificial
  Synthetic oligonucleotide
gatgataacgaaagtgagtagaggattttgtcacgatttagcgcagctaatattgatgct

SEQ ID NO: 403221 - DNA, 60 bp, Artificial
  Synthetic oligonucleotide
gatgataatagacaggatgtctcattagaccctaaacagacccaaatgttcataattggt

SEQ ID NO: 403222 - DNA, 60 bp, Artificial
  Synthetic oligonucleotide
gatgataatctcgattataagttatcatgtaataatccagaatcatgtgaattgtatgaa

SEQ ID NO: 403223 - DNA, 60 bp, Artificial
  Synthetic oligonucleotide
gatgatacagcttcgttaaatgctgctgcgctgttctcgcagacaacaggcaatactatt

SEQ ID NO: 403224 - DNA, 55 bp, Artificial
  Synthetic oligonucleotide
gatgatacatagtctctgctcttagcatctgaaagtgtgtctagagaaggccaat

SEQ ID NO: 403225 - DNA, 60 bp, Artificial
  Synthetic oligonucleotide
gatgatactacccttttacagtcccgcagcttcatccgtgagacgcttcgtgagatccga

SEQ ID NO: 403226 - DNA, 55 bp, Artificial
  Synthetic oligonucleotide
gatgatactggaaatccgataatggttttgcctgaatctggttcggctactgatg

SEQ ID NO: 403227 - DNA, 55 bp, Artificial
  Synthetic oligonucleotide
gatgatagaactatcttctgggtgtatggccctactggtggggaaggaaatccac

SEQ ID NO: 403228 - DNA, 60 bp, Artificial
  Synthetic oligonucleotide
gatgatagaatataggcttaaatcttatgattggtggagaatgagattctatgaccagtg

SEQ ID NO: 403229 - DNA, 60 bp, Artificial
  Synthetic oligonucleotide
gatgatagctcctatccaaaggacggtggcagcgtgacctcattggaaaacctgtgggac

SEQ ID NO: 403230 - DNA, 57 bp, Artificial
  Synthetic oligonucleotide
gatgataggaccaaggccccctgttaatggccaacaagggaggattgattattactg

SEQ ID NO: 403231 - DNA, 60 bp, Artificial
  Synthetic oligonucleotide
gatgatagggttaatacagcactagatccaaagcaagttcagcttttcattgttggttgc

SEQ ID NO: 403232 - DNA, 60 bp, Artificial
  Synthetic oligonucleotide
gatgatatagagaacatatctgatgataaactgcttacagtggattttgatctagacacg

SEQ ID NO: 403233 - DNA, 55 bp, Artificial
  Synthetic oligonucleotide
gatgatatcaacgaaaagaacttgacaattgactttgaactctcccaagatggcg

SEQ ID NO: 403234 - DNA, 51 bp, Artificial
  Synthetic oligonucleotide
gatgatatccagtttgccaaaaaggtgtttagacatgcacaacatgatgcg

SEQ ID NO: 403235 - DNA, 60 bp, Artificial
  Synthetic oligonucleotide
gatgatatgcaatctccatgtgcactgccttggtaccatccaacaaaagagatctttata

SEQ ID NO: 403236 - DNA, 60 bp, Artificial
  Synthetic oligonucleotide
gatgatattaaaaccagtgcagaatcaataggaagtctatgtcaagaactagaattcaga

SEQ ID NO: 403237 - DNA, 56 bp, Artificial
  Synthetic oligonucleotide
gatgatcaacaaagtgttgttcaatttggatatgaccccgtaaacttaagagtgac

SEQ ID NO: 403238 - DNA, 60 bp, Artificial
  Synthetic oligonucleotide
gatgatcaatgattccttctcctcgatgatgtcagcgttcttggatgaggaaggagttca

SEQ ID NO: 403239 - DNA, 60 bp, Artificial
  Synthetic oligonucleotide
gatgatcacgtaatccgtagtgttggccgactgcttgtaaggactctggtttgcatactg

SEQ ID NO: 403240 - DNA, 60 bp, Artificial
  Synthetic oligonucleotide
gatgatcagcaacgggacctatctaaatgagactcatttttctgatgagattgaacagga

SEQ ID NO: 403241 - DNA, 58 bp, Artificial
  Synthetic oligonucleotide
gatgatccctgaaaggaatgaacaaggacaaaccctctggagcaaaacaaacgatgcc

SEQ ID NO: 403242 - DNA, 55 bp, Artificial
  Synthetic oligonucleotide
gatgatccttgctgcggaactcaaatgtttcgggaacacagctgttgcaaagtgc

SEQ ID NO: 403243 - DNA, 56 bp, Artificial
  Synthetic oligonucleotide
gatgatcgaccttcgtctgagccaaatgctgagtgaagacatgactggtcttccgg

SEQ ID NO: 403244 - DNA, 55 bp, Artificial
  Synthetic oligonucleotide
gatgatctagatgatgctgtatcatacattaagcacaatttcccagatgccatac

SEQ ID NO: 403245 - DNA, 60 bp, Artificial
  Synthetic oligonucleotide
gatgatctggcattccaatctgaatgatgccacataccagagaacaagagctctcgtacg

SEQ ID NO: 403246 - DNA, 60 bp, Artificial
  Synthetic oligonucleotide
gatgatctggcattccaatcttaatgatgccacatatcagaggacaagggcacttgtgcg

SEQ ID NO: 403247 - DNA, 59 bp, Artificial
  Synthetic oligonucleotide
gatgatctggtggagccttacgtctacgatgaacttgatcccctttccgttgtcatatg

SEQ ID NO: 403248 - DNA, 55 bp, Artificial
  Synthetic oligonucleotide
gatgatcttatcaagtgggtgctgaactcggatctcattccgcatgatgacaggc

SEQ ID NO: 403249 - DNA, 55 bp, Artificial
  Synthetic oligonucleotide
gatgatcttgtagcccaagtctcacctggctgtagcataatgggcctatggccag

SEQ ID NO: 403250 - DNA, 56 bp, Artificial
  Synthetic oligonucleotide
gatgatgaaatttaagatcccgaggtcacagcaaccgcaaattcatatttatacgg

SEQ ID NO: 403251 - DNA, 60 bp, Artificial
  Synthetic oligonucleotide
gatgatgaagcttgctactagaagattgaagcagttcgttgatgcgaaccccgacaattt

SEQ ID NO: 403252 - DNA, 60 bp, Artificial
  Synthetic oligonucleotide
gatgatgaccaattcccaggacacggagctctcctttaccatcactggagataacaccaa

SEQ ID NO: 403253 - DNA, 55 bp, Artificial
  Synthetic oligonucleotide
gatgatgactaccataggaattgtactcctctcccaaagcactataccagagacc

SEQ ID NO: 403254 - DNA, 55 bp, Artificial
  Synthetic oligonucleotide
gatgatgactgggttacatttagggagatcttagctgcagcaaatagttttgcac

SEQ ID NO: 403255 - DNA, 57 bp, Artificial
  Synthetic oligonucleotide
gatgatgagacaacaatgtttgcacctttcggacccctagtagaaaaagcaaactgg

SEQ ID NO: 403256 - DNA, 60 bp, Artificial
  Synthetic oligonucleotide
gatgatgaggtgtggatcttgtgtcaaacaatgtatccacatgggcgtttaccagaggga

SEQ ID NO: 403257 - DNA, 60 bp, Artificial
  Synthetic oligonucleotide
gatgatgagtgcatggaaagagagaagaacggcacatatgactatcccaaatattcagaa

SEQ ID NO: 403258 - DNA, 60 bp, Artificial
  Synthetic oligonucleotide
gatgatgagtgcatggagagtgtgaagaatggtacatatgactatcctaaatattcagaa

SEQ ID NO: 403259 - DNA, 60 bp, Artificial
  Synthetic oligonucleotide
gatgatgattgttggtttgctggcaatactctgatgccaccatttcttgaaccgggaagt

SEQ ID NO: 403260 - DNA, 60 bp, Artificial
  Synthetic oligonucleotide
gatgatgcaggaagaaaagaagagctcttatctgatgattgatgcagtgaatagacccaa

SEQ ID NO: 403261 - DNA, 59 bp, Artificial
  Synthetic oligonucleotide
gatgatgcctgctaggttcgatcccaaggttcccaaatatgagcccttagataaaggaa

SEQ ID NO: 403262 - DNA, 52 bp, Artificial
  Synthetic oligonucleotide
gatgatgctacatatcaagcgtggttatttattgacgttaatatgagaggag

SEQ ID NO: 403263 - DNA, 58 bp, Artificial
  Synthetic oligonucleotide
gatgatgctcgctgagcagttcaaacagaaggccctcggccttctgcagaccgcatcc

SEQ ID NO: 403264 - DNA, 55 bp, Artificial
  Synthetic oligonucleotide
gatgatggaataagggcccatcgggcccgttaagatgggttttgggcttctgggc

SEQ ID NO: 403265 - DNA, 55 bp, Artificial
  Synthetic oligonucleotide
gatgatggaattatcgttcctcaacctgacattgatagtaaactccattcccttc

SEQ ID NO: 403266 - DNA, 55 bp, Artificial
  Synthetic oligonucleotide
gatgatggacactactgaaatagtggaattccaggctaggagtacgaaccaagct

SEQ ID NO: 403267 - DNA, 60 bp, Artificial
  Synthetic oligonucleotide
gatgatggatgaggccgtaaagcaatctgcattggttaattcggaaagagttagactgga

SEQ ID NO: 403268 - DNA, 55 bp, Artificial
  Synthetic oligonucleotide
gatgatgggcaactaatagacgtactaaacaatctaaacagggaaacggccactg

SEQ ID NO: 403269 - DNA, 60 bp, Artificial
  Synthetic oligonucleotide
gatgatggtcgtcaacggttctcaagttgatagatcatttattcaagaatctagcttcga

SEQ ID NO: 403270 - DNA, 60 bp, Artificial
  Synthetic oligonucleotide
gatgatgtcagccctggttgtgcattgaaaaggtcagcaaggtccataccatgtgagtac

SEQ ID NO: 403271 - DNA, 60 bp, Artificial
  Synthetic oligonucleotide
gatgatgttaacaaaagtgcactccaggcgagacggtcggctgtgtcagcactggaaacc

SEQ ID NO: 403272 - DNA, 55 bp, Artificial
  Synthetic oligonucleotide
gatgatgttgggcagaaccctgatggtgaagatcttaagctgttctgccagatgg

SEQ ID NO: 403273 - DNA, 51 bp, Artificial
  Synthetic oligonucleotide
gatgattaaaatttgagcattgagtgtgaactgtgacttggcatcgatcac

SEQ ID NO: 403274 - DNA, 55 bp, Artificial
  Synthetic oligonucleotide
gatgattacaactcaaatctgctggagaaggatttggctggagaagctcagggtc

SEQ ID NO: 403275 - DNA, 55 bp, Artificial
  Synthetic oligonucleotide
gatgattacccagaatgctgcttggcactagttgcaaatcaggtagaacccacaa

SEQ ID NO: 403276 - DNA, 55 bp, Artificial
  Synthetic oligonucleotide
gatgattacccattcttggcacgcgatccgagatttaagcatcgagtgtatcaac

SEQ ID NO: 403277 - DNA, 60 bp, Artificial
  Synthetic oligonucleotide
gatgattaggttccaggatgtacgacatagctgaagatagatggagtttgaaggatcacc

SEQ ID NO: 403278 - DNA, 55 bp, Artificial
  Synthetic oligonucleotide
gatgattcagagtttccagacactttaccgaatacaccagctttgacagcagagg

SEQ ID NO: 403279 - DNA, 60 bp, Artificial
  Synthetic oligonucleotide
gatgattcatggtctgctagtccagaggaggacgaaaaatacaccattccttggagcaat

SEQ ID NO: 403280 - DNA, 57 bp, Artificial
  Synthetic oligonucleotide
gatgattctgatgataacacttgtaaaggtttagattatagcttaagctgtgctggg

SEQ ID NO: 403281 - DNA, 58 bp, Artificial
  Synthetic oligonucleotide
gatgattgaggttaattccctgactcacagataagaaaattgtggttagagagggaaa

SEQ ID NO: 403282 - DNA, 58 bp, Artificial
  Synthetic oligonucleotide
gatgattgagtcgtggggatacgacaagttaactcacgagatacgcaagttttacgcg

SEQ ID NO: 403283 - DNA, 55 bp, Artificial
  Synthetic oligonucleotide
gatgatttaggtcaaaacccagatggtgaagacatgtccctattctgtcagatgg

SEQ ID NO: 403284 - DNA, 59 bp, Artificial
  Synthetic oligonucleotide
gatgatttcaaagattggactacttttacatgctcagaaggattatatacttggaacgt

SEQ ID NO: 403285 - DNA, 60 bp, Artificial
  Synthetic oligonucleotide
gatgatttcgaaatgggcgtgctacggtataacaactacacactcagcacgttcatctac

SEQ ID NO: 403286 - DNA, 60 bp, Artificial
  Synthetic oligonucleotide
gatgatttcgcgaagcacttcaatagatatgcttcgatggctatccaacaatatttgagg

SEQ ID NO: 403287 - DNA, 58 bp, Artificial
  Synthetic oligonucleotide
gatgatttggcactccaatctcaatgacaccacctatcaaagaacaagggctcttgtt

SEQ ID NO: 403288 - DNA, 54 bp, Artificial
  Synthetic oligonucleotide
gatgatttggttttgggggcccgttcttatgagcatcttaccgccgtttattcc

SEQ ID NO: 403289 - DNA, 58 bp, Artificial
  Synthetic oligonucleotide
gatgattttcccactagaaacgacactgtcaccgggataatgaacactggattggcct

SEQ ID NO: 403290 - DNA, 58 bp, Artificial
  Synthetic oligonucleotide
gatgattttgctctcatcgtaaatgcaccgaatcatgagggaatacaagcaggggtgg

SEQ ID NO: 403291 - DNA, 60 bp, Artificial
  Synthetic oligonucleotide
gatgcaaaagtgctcttccagaactgggggattgaatcaatcgacaatgtaatgggaatg

SEQ ID NO: 403292 - DNA, 60 bp, Artificial
  Synthetic oligonucleotide
gatgcaaaagtgctgttccagaattggggaattgaacctattgataatgtcatggggatg

SEQ ID NO: 403293 - DNA, 58 bp, Artificial
  Synthetic oligonucleotide
gatgcaaaagtgcttttccaaaactgggggattgaacccattgacaatgtgatgggaa

SEQ ID NO: 403294 - DNA, 53 bp, Artificial
  Synthetic oligonucleotide
gatgcaaagaaaatgtttgggttgttgctccgaagaacccaaaagtaaaagtc

SEQ ID NO: 403295 - DNA, 60 bp, Artificial
  Synthetic oligonucleotide
gatgcaaagcagatgatcatcttatgtctcactaggggcaacaagcccagcaagatgata

SEQ ID NO: 403296 - DNA, 60 bp, Artificial
  Synthetic oligonucleotide
gatgcaaatgggtgggtgtcaacagataaggactcaaatggtgtgcaggacattatagac

SEQ ID NO: 403297 - DNA, 55 bp, Artificial
  Synthetic oligonucleotide
gatgcaaattgagtctgttcagcaacaactaacattcagaccaacccgacgcgcg

SEQ ID NO: 403298 - DNA, 50 bp, Artificial
  Synthetic oligonucleotide
gatgcaaccaagatcggtagaaaccaggaacctggtagatggcagcattt

SEQ ID NO: 403299 - DNA, 55 bp, Artificial
  Synthetic oligonucleotide
gatgcaaccccggcaactggttttccgccctgaggtactttggaatcatcccatt

SEQ ID NO: 403300 - DNA, 58 bp, Artificial
  Synthetic oligonucleotide
gatgcaacgctctcctcaggttgtggttgaaccgtatttgtacgtggtatatcctcgt

SEQ ID NO: 403301 - DNA, 60 bp, Artificial
  Synthetic oligonucleotide
gatgcaacgctctcctcaggttgtggttgaacctgatttgtatgtggtacaccttgctcc

SEQ ID NO: 403302 - DNA, 60 bp, Artificial
  Synthetic oligonucleotide
gatgcaacttcaatgatactagccggcaattcctctctttgccccatcagtgggtgggct

SEQ ID NO: 403303 - DNA, 58 bp, Artificial
  Synthetic oligonucleotide
gatgcaagagcagatcctaccaatgtgacttcgtcaaaatcgtctattctttcgctcg

SEQ ID NO: 403304 - DNA, 60 bp, Artificial
  Synthetic oligonucleotide
gatgcaagcctcagtcctgtgtggttcagagctctagaactggttctacgagagattggt

SEQ ID NO: 403305 - DNA, 58 bp, Artificial
  Synthetic oligonucleotide
gatgcaagtggcggcgctacagggtaacgataccctgtctaagcgtttcgtctattac

SEQ ID NO: 403306 - DNA, 60 bp, Artificial
  Synthetic oligonucleotide
gatgcaatgggatagagaagttagtaattacacaggcataatatatgggttgcttgaaga

SEQ ID NO: 403307 - DNA, 55 bp, Artificial
  Synthetic oligonucleotide
gatgcacaaatcaggggtttggaaagacgcatacaagatagactaggtttgaggg

SEQ ID NO: 403308 - DNA, 55 bp, Artificial
  Synthetic oligonucleotide
gatgcacaagactggctgaaggaaccacatacaccgcaagatgcacaggctgtac

SEQ ID NO: 403309 - DNA, 56 bp, Artificial
  Synthetic oligonucleotide
gatgcacaagattctacacctttaacttatacagaagaccaactgttagatgaacc

SEQ ID NO: 403310 - DNA, 60 bp, Artificial
  Synthetic oligonucleotide
gatgcacacaaaaagaatctctacgaccactctctcatgagcattatctctacctttcat

SEQ ID NO: 403311 - DNA, 60 bp, Artificial
  Synthetic oligonucleotide
gatgcacatcacttttcttagtgatggaggtgttcttggcctcaatactgaacgttctga

SEQ ID NO: 403312 - DNA, 60 bp, Artificial
  Synthetic oligonucleotide
gatgcaccctccgaggagagtgtttaagaggttattcattgacgaagggttgatgcttca

SEQ ID NO: 403313 - DNA, 60 bp, Artificial
  Synthetic oligonucleotide
gatgcacgcacaggctttacatggttataccccactaaagctccttctaccaatgcaaca

SEQ ID NO: 403314 - DNA, 58 bp, Artificial
  Synthetic oligonucleotide
gatgcacgcccccagttggtcaacattgggatatagctaaaccctgtgaacctaaagc

SEQ ID NO: 403315 - DNA, 53 bp, Artificial
  Synthetic oligonucleotide
gatgcacgcccctcgaaagcctttacagcaattttgcaaaacaagttctatta

SEQ ID NO: 403316 - DNA, 60 bp, Artificial
  Synthetic oligonucleotide
gatgcacgtatgcatgacagggaacgataatgatgcaagtgcccagataatatatgcagg

SEQ ID NO: 403317 - DNA, 55 bp, Artificial
  Synthetic oligonucleotide
gatgcactagttgaacttgctgcctcaggggatccaacactgccagactcacttg

SEQ ID NO: 403318 - DNA, 53 bp, Artificial
  Synthetic oligonucleotide
gatgcagaaagaatatgcacttttttatagacttgatttagcacgattagaag

SEQ ID NO: 403319 - DNA, 60 bp, Artificial
  Synthetic oligonucleotide
gatgcagaaagagcggtggaattggaccccgatgatgttaacaaaagcacattacagagc

SEQ ID NO: 403320 - DNA, 60 bp, Artificial
  Synthetic oligonucleotide
gatgcagaaagaggcaagctgaagaggcgggcaattgcaacacccgggatgcagatcaga

SEQ ID NO: 403321 - DNA, 55 bp, Artificial
  Synthetic oligonucleotide
gatgcagaagacgtccttcagcaatccatcagcactcttttgcagtcattggaaa

SEQ ID NO: 403322 - DNA, 60 bp, Artificial
  Synthetic oligonucleotide
gatgcagaagactatgactcgacacttgtcgcgtaaccggaagcctcatgagaaggtttc

SEQ ID NO: 403323 - DNA, 54 bp, Artificial
  Synthetic oligonucleotide
gatgcagaccgacagctttgtgctatccggtaagtatccagtgcggaaggtcaa

SEQ ID NO: 403324 - DNA, 55 bp, Artificial
  Synthetic oligonucleotide
gatgcagagaggcaattttaggggccagagaccaataaagtgtttcaactgtggc

SEQ ID NO: 403325 - DNA, 55 bp, Artificial
  Synthetic oligonucleotide
gatgcagagcgacgagcaaatgtgattgatccgccaggctatccgttgggatagg

SEQ ID NO: 403326 - DNA, 60 bp, Artificial
  Synthetic oligonucleotide
gatgcagataatgccaatttgtataccatgtggaaatttgtgtattacgtggatgaggat

SEQ ID NO: 403327 - DNA, 50 bp, Artificial
  Synthetic oligonucleotide
gatgcagatggtgtacataatcccagacactatgatgacagtaagggatt

SEQ ID NO: 403328 - DNA, 60 bp, Artificial
  Synthetic oligonucleotide
gatgcagcctataagaccatcaagagcctagtctgcaatgaaatgaccgacaaggcagtc

SEQ ID NO: 403329 - DNA, 55 bp, Artificial
  Synthetic oligonucleotide
gatgcagccttgtactctaaactgggacattgggaagtgcaatatgaaaaccaag

SEQ ID NO: 403330 - DNA, 55 bp, Artificial
  Synthetic oligonucleotide
gatgcagcgtcacggttgcatactctacagaatgctaacaatgtaatgttatcac

SEQ ID NO: 403331 - DNA, 55 bp, Artificial
  Synthetic oligonucleotide
gatgcaggtgcattgaccgaagatccagaggaaggcacagctggagtggagtctg

SEQ ID NO: 403332 - DNA, 59 bp, Artificial
  Synthetic oligonucleotide
gatgcaggttatggccgactttgtaaatcgatttggttcaccatttcatcaaggtaata

SEQ ID NO: 403333 - DNA, 56 bp, Artificial
  Synthetic oligonucleotide
gatgcagtacaggttctaaaacgaaagtatttgggtagtccacttagtgatattag

SEQ ID NO: 403334 - DNA, 58 bp, Artificial
  Synthetic oligonucleotide
gatgcagtgggaaaaagaaattaacaattacacaggcttaatatacaacttgattgaa

SEQ ID NO: 403335 - DNA, 53 bp, Artificial
  Synthetic oligonucleotide
gatgcagtttccttacaagctttcttacaacctttgtttcattaggacacagt

SEQ ID NO: 403336 - DNA, 55 bp, Artificial
  Synthetic oligonucleotide
gatgcatacgtttcagttggatcatcaaagtacaaccgaaggttcactccagaga

SEQ ID NO: 403337 - DNA, 55 bp, Artificial
  Synthetic oligonucleotide
gatgcatagtgcgttgctaaaggaatctaaagctcgatccttgctagccgctgga

SEQ ID NO: 403338 - DNA, 55 bp, Artificial
  Synthetic oligonucleotide
gatgcatcgaacaatgcggaggggttggctgtgcttgcttcagtgtttatgcctc

SEQ ID NO: 403339 - DNA, 55 bp, Artificial
  Synthetic oligonucleotide
gatgcatcggagttagcagatcttatattgaatgaatggctgtgcaatcctatgg

SEQ ID NO: 403340 - DNA, 55 bp, Artificial
  Synthetic oligonucleotide
gatgcatcggcttcaccccatacggcagtccggcgggtgtttacggatgggaccg

SEQ ID NO: 403341 - DNA, 53 bp, Artificial
  Synthetic oligonucleotide
gatgcatctatgcgtcacccacgcccaacggccatttcgtgacttccccgaat

SEQ ID NO: 403342 - DNA, 55 bp, Artificial
  Synthetic oligonucleotide
gatgcatgaatttgtcgtgcgtacgttgcagaagatcggtcaaatcccggatatg

SEQ ID NO: 403343 - DNA, 60 bp, Artificial
  Synthetic oligonucleotide
gatgcattgccttggaatgatccggcccaattgaggaatgaactgcgaatggccgcttgg

SEQ ID NO: 403344 - DNA, 60 bp, Artificial
  Synthetic oligonucleotide
gatgcatttgttagaggaagaaccagattatagaacgataatctgggtgtatggacctgc

SEQ ID NO: 403345 - DNA, 57 bp, Artificial
  Synthetic oligonucleotide
gatgccaacttattttgaatcaattatacaacctcttctacacaaaacatagtttat

SEQ ID NO: 403346 - DNA, 60 bp, Artificial
  Synthetic oligonucleotide
gatgccaatcatcctgtcttatggaggcatgggtaatcctgaggctgaggtgggttatta

SEQ ID NO: 403347 - DNA, 55 bp, Artificial
  Synthetic oligonucleotide
gatgccacagtcccaaatctagaagcctatccccacaagttggtccagttttcgg

SEQ ID NO: 403348 - DNA, 60 bp, Artificial
  Synthetic oligonucleotide
gatgccacatgtcagactattgtaggagtcctaaggactaacaaaacatttcagaatgtg

SEQ ID NO: 403349 - DNA, 53 bp, Artificial
  Synthetic oligonucleotide
gatgccactagcatgtcgttggaccaaggacttaaaactctctgtatgagcct

SEQ ID NO: 403350 - DNA, 50 bp, Artificial
  Synthetic oligonucleotide
gatgccactggagacttttatttacatcccagtttaaccttacgcaaacg

SEQ ID NO: 403351 - DNA, 55 bp, Artificial
  Synthetic oligonucleotide
gatgccagaaaatggatacggagaaaacgatatccaagtggcaagactcaccgct

SEQ ID NO: 403352 - DNA, 60 bp, Artificial
  Synthetic oligonucleotide
gatgccagagggaataagttatggtcacgatccgatgaaagatgggaacaaggaagagat

SEQ ID NO: 403353 - DNA, 55 bp, Artificial
  Synthetic oligonucleotide
gatgccagcattttatctagtgaatatcggttgccaattgccactatgattaagg

SEQ ID NO: 403354 - DNA, 60 bp, Artificial
  Synthetic oligonucleotide
gatgccaggacccaattatttgatggctcatatggataagtttccggcgaattcaacaat

SEQ ID NO: 403355 - DNA, 60 bp, Artificial
  Synthetic oligonucleotide
gatgccaggggtctcatccagtcatcccgagctcatgctatagttgcactcacccgccac

SEQ ID NO: 403356 - DNA, 58 bp, Artificial
  Synthetic oligonucleotide
gatgccaggtgtttattgtgccgatacctcttttcagttagcctctaagctagttatg

SEQ ID NO: 403357 - DNA, 55 bp, Artificial
  Synthetic oligonucleotide
gatgccatactggcatgttctagtttaagtgtgtccaatttgtttaaacctggag

SEQ ID NO: 403358 - DNA, 55 bp, Artificial
  Synthetic oligonucleotide
gatgccatcatgactcgttgtcttgccattcacgagtgctttgtgaagcgcgtgg

SEQ ID NO: 403359 - DNA, 55 bp, Artificial
  Synthetic oligonucleotide
gatgccatggaccaactgactaatagtttgatcacgaactatatggatccgccgg

SEQ ID NO: 403360 - DNA, 58 bp, Artificial
  Synthetic oligonucleotide
gatgcccaggctcttttacatggacttgacttctccgaagtcagtaatgttcaacggt

SEQ ID NO: 403361 - DNA, 51 bp, Artificial
  Synthetic oligonucleotide
gatgcccattccgagacaaaagcgcgagtccaagctaatacaaacgaagca

SEQ ID NO: 403362 - DNA, 55 bp, Artificial
  Synthetic oligonucleotide
gatgccccgttgcagttgcccatttgtctgcctcttcacagtaagtcacactcag

SEQ ID NO: 403363 - DNA, 59 bp, Artificial
  Synthetic oligonucleotide
gatgcccctatgggcacgcccggattacaatcctccactgctagagtcctggaaagacc

SEQ ID NO: 403364 - DNA, 60 bp, Artificial
  Synthetic oligonucleotide
gatgccctaaggattcttggacaggctacgaggagcacattttcgtggatggttgacatt

SEQ ID NO: 403365 - DNA, 55 bp, Artificial
  Synthetic oligonucleotide
gatgccctacattgggccaggccaaccaacaaatttggctttgcacaacccgtgg

SEQ ID NO: 403366 - DNA, 51 bp, Artificial
  Synthetic oligonucleotide
gatgccctagcggtggcccgagtccaggttgacttcctgagacttgagtta

SEQ ID NO: 403367 - DNA, 55 bp, Artificial
  Synthetic oligonucleotide
gatgccctcaagttaagtattgaggacccaagccatgaaggggaagggatacccc

SEQ ID NO: 403368 - DNA, 59 bp, Artificial
  Synthetic oligonucleotide
gatgccctcaggttacaagaactcgctgacacttgccccctcaccttaaactgtgacag

SEQ ID NO: 403369 - DNA, 51 bp, Artificial
  Synthetic oligonucleotide
gatgccctgatgtacttcaacccctctcagatactagacctcttcattcag

SEQ ID NO: 403370 - DNA, 60 bp, Artificial
  Synthetic oligonucleotide
gatgccctgtccacgtgttacatcatgtgcatggtgtccgcttgcaacgacttttcagtg

SEQ ID NO: 403371 - DNA, 55 bp, Artificial
  Synthetic oligonucleotide
gatgccgaccggcctcaatacgcatgctcgcgtaagttggctagttgccacgtca

SEQ ID NO: 403372 - DNA, 55 bp, Artificial
  Synthetic oligonucleotide
gatgccgagctttcaaacgctccggaaatctcctgtgatgccgacatacgcgctt

SEQ ID NO: 403373 - DNA, 60 bp, Artificial
  Synthetic oligonucleotide
gatgccgctgaaactggtcacaccagcaatgtgcaacctgaagatatgattgagactagg

SEQ ID NO: 403374 - DNA, 60 bp, Artificial
  Synthetic oligonucleotide
gatgccgctgtggaaggtgagaggacaaggagagtgatattgctcatggagcaatggaaa

SEQ ID NO: 403375 - DNA, 55 bp, Artificial
  Synthetic oligonucleotide
gatgccgcttatgttagaagggcatttaagtcctcttgaacacgttagtttcagc

SEQ ID NO: 403376 - DNA, 51 bp, Artificial
  Synthetic oligonucleotide
gatgccggagactcgaaactgcgtggagtgcggcggaacagccgtgttaca

SEQ ID NO: 403377 - DNA, 54 bp, Artificial
  Synthetic oligonucleotide
gatgccggttagacttatccgtcttcaattcttgggagaagggtagtaataaag

SEQ ID NO: 403378 - DNA, 51 bp, Artificial
  Synthetic oligonucleotide
gatgccgtagctgagagagtaaagactaccatccgccagaatgcgcctaaa

SEQ ID NO: 403379 - DNA, 55 bp, Artificial
  Synthetic oligonucleotide
gatgccgtatgcccacattcaggcggagcgttatatacgtttaggaaagtcgcgc

SEQ ID NO: 403380 - DNA, 60 bp, Artificial
  Synthetic oligonucleotide
gatgccgtctggctgttccgcaacaagcatcatcaacacaattctgaacaacatctacgt

SEQ ID NO: 403381 - DNA, 55 bp, Artificial
  Synthetic oligonucleotide
gatgccgtgtcgttttggggcaactcctgtgaggccgtatggctggaacacagag

SEQ ID NO: 403382 - DNA, 55 bp, Artificial
  Synthetic oligonucleotide
gatgcctacctagcatcatacaacaagtataagtacttttctggtaccgcctcgg

SEQ ID NO: 403383 - DNA, 55 bp, Artificial
  Synthetic oligonucleotide
gatgcctactattcagtcacaatggtggtgttttactgtcttcttcctttctgcg

SEQ ID NO: 403384 - DNA, 60 bp, Artificial
  Synthetic oligonucleotide
gatgcctagagccaggtatagatgacgtcaccgctattgtcagtatattcattgtttatg

SEQ ID NO: 403385 - DNA, 57 bp, Artificial
  Synthetic oligonucleotide
gatgcctctcgtttcgaccaacacgtctctaaggaggcgttggagtttgaacacaaa

SEQ ID NO: 403386 - DNA, 55 bp, Artificial
  Synthetic oligonucleotide
gatgcctctgagtctaaattgcttactgtatctgttatggacttatcacagatgt

SEQ ID NO: 403387 - DNA, 52 bp, Artificial
  Synthetic oligonucleotide
gatgcctgataaggatcttcccatgataagatatcatggacgtaaattctta

SEQ ID NO: 403388 - DNA, 60 bp, Artificial
  Synthetic oligonucleotide
gatgcctgggaacgtaaccatcgacctggggacgagctgtatcttactgagccagccata

SEQ ID NO: 403389 - DNA, 60 bp, Artificial
  Synthetic oligonucleotide
gatgccttcatacatttgatgaggtctttggcgccaggatccacagtcatggaaatctaa

SEQ ID NO: 403390 - DNA, 57 bp, Artificial
  Synthetic oligonucleotide
gatgccttcctctaagctattgaagtcaagtggtggcattatcccattgtgcctgta

SEQ ID NO: 403391 - DNA, 60 bp, Artificial
  Synthetic oligonucleotide
gatgccttgttaacaggaataccagatgccactaggcttaaatccctagtgatgcacatc

SEQ ID NO: 403392 - DNA, 55 bp, Artificial
  Synthetic oligonucleotide
gatgcgaactttaccgaatttcaccactttggtgcacgccagtgacagatgacag

SEQ ID NO: 403393 - DNA, 55 bp, Artificial
  Synthetic oligonucleotide
gatgcgaatgctaatttagctctagtaaacttagtagatatgcggatgaagtggt

SEQ ID NO: 403394 - DNA, 60 bp, Artificial
  Synthetic oligonucleotide
gatgcgactgctggtctcacccatttgatgatctggcattccaatttgaatgacgccacg

SEQ ID NO: 403395 - DNA, 60 bp, Artificial
  Synthetic oligonucleotide
gatgcgatcagctttgaaagcaacgggaactttatagctcctgaatatgcatacaagata

SEQ ID NO: 403396 - DNA, 55 bp, Artificial
  Synthetic oligonucleotide
gatgcgattatccgatggggtacgatagtgagtcgagacaaagatttgggtgcac

SEQ ID NO: 403397 - DNA, 60 bp, Artificial
  Synthetic oligonucleotide
gatgcgattcgcagacggttctacatggactgcgatatagaggtaacagactcctacaag

SEQ ID NO: 403398 - DNA, 60 bp, Artificial
  Synthetic oligonucleotide
gatgcgattcgtaaccgcaagtgcactaatgacgctctatatgttaaaccagaacctcat

SEQ ID NO: 403399 - DNA, 55 bp, Artificial
  Synthetic oligonucleotide
gatgcgcaaaccctggaccagcctttaaatctatccctggccgcttggccagtga

SEQ ID NO: 403400 - DNA, 60 bp, Artificial
  Synthetic oligonucleotide
gatgcgcagcgggctagaccaggtgttgtcgtccctttccaaatgagtgagagccaacag

SEQ ID NO: 403401 - DNA, 55 bp, Artificial
  Synthetic oligonucleotide
gatgcgccaaagagagggcctgttgggcgtgagcatcttgactggtgcagagagt

SEQ ID NO: 403402 - DNA, 51 bp, Artificial
  Synthetic oligonucleotide
gatgcgccgaagaaggagcaaggaagtcgacatcactcgcattgaagggag

SEQ ID NO: 403403 - DNA, 55 bp, Artificial
  Synthetic oligonucleotide
gatgcgcgacattattacacgcatatagaaacgagtcaaccatttggccaaatcg

SEQ ID NO: 403404 - DNA, 60 bp, Artificial
  Synthetic oligonucleotide
gatgcgcgataaattggaacgtggtgaagttgaagtggatgatacatttgtggatgaaaa

SEQ ID NO: 403405 - DNA, 55 bp, Artificial
  Synthetic oligonucleotide
gatgcgcgtggctgggcggtgtggagccagtcactacgtggtgaccacaacttac

SEQ ID NO: 403406 - DNA, 60 bp, Artificial
  Synthetic oligonucleotide
gatgcgctaagctcgaagcagaatcaatcagcggtctttcagtatctgagccaacaagag

SEQ ID NO: 403407 - DNA, 55 bp, Artificial
  Synthetic oligonucleotide
gatgcgctcaaagcttaattgttatgtggtcccctatttaaacttcgttaccaag

SEQ ID NO: 403408 - DNA, 53 bp, Artificial
  Synthetic oligonucleotide
gatgcgctcagttgtgaggtgtgccattcgtccatcttcgatgcaccgatcaa

SEQ ID NO: 403409 - DNA, 55 bp, Artificial
  Synthetic oligonucleotide
gatgcgctgagcggttgaagcgaatgggagagctctgtttctctcggaggggacg

SEQ ID NO: 403410 - DNA, 55 bp, Artificial
  Synthetic oligonucleotide
gatgcgcttgaaattgctataaatcctttcgggatgccaggcaatccaactgatc

SEQ ID NO: 403411 - DNA, 53 bp, Artificial
  Synthetic oligonucleotide
gatgcggaccctattttttgggcacctatgacaaacgcttcccgggctttatt

SEQ ID NO: 403412 - DNA, 60 bp, Artificial
  Synthetic oligonucleotide
gatgcggctgttgagaccttgggcgacgataatctcacagcaacggagggcctgctagag

SEQ ID NO: 403413 - DNA, 60 bp, Artificial
  Synthetic oligonucleotide
gatgcgggcctgcttgctaaggcgggaaaggagtatggcctaacaatgacaccagcggat

SEQ ID NO: 403414 - DNA, 55 bp, Artificial
  Synthetic oligonucleotide
gatgcgggtgcattaactgaagacccggatgaaggcacagctggagtggagtctg

SEQ ID NO: 403415 - DNA, 57 bp, Artificial
  Synthetic oligonucleotide
gatgcggtttcgagcgctttggaaggggaacttactttcagaatagctgcccgctta

SEQ ID NO: 403416 - DNA, 57 bp, Artificial
  Synthetic oligonucleotide
gatgcgtacactaacgtaaataacgtttggttgcaaaagatggcccgtgatagcttc

SEQ ID NO: 403417 - DNA, 51 bp, Artificial
  Synthetic oligonucleotide
gatgcgtagtgctggggactacttaggtgctgcacaagccaaatatgacgg

SEQ ID NO: 403418 - DNA, 55 bp, Artificial
  Synthetic oligonucleotide
gatgcgtattggttagccgtggagagatctgtgagtgtgagttggggtttcggcc

SEQ ID NO: 403419 - DNA, 50 bp, Artificial
  Synthetic oligonucleotide
gatgcgtcaataaggtatcatctccgctgaagatagtaaaccgaccggag

SEQ ID NO: 403420 - DNA, 55 bp, Artificial
  Synthetic oligonucleotide
gatgcgtcgctatgatggaacacctcaggttactcgtggacgaaagcggaagcag

SEQ ID NO: 403421 - DNA, 60 bp, Artificial
  Synthetic oligonucleotide
gatgcgtctacgcattcgctacacagagtaatcacacagatggcgtagtgagaggatgtg

SEQ ID NO: 403422 - DNA, 55 bp, Artificial
  Synthetic oligonucleotide
gatgcgtctcataactggtaattttaagtgtgttggtaaaggttgtaataatggg

SEQ ID NO: 403423 - DNA, 58 bp, Artificial
  Synthetic oligonucleotide
gatgcgtgagggccggatgggcgacttattgtttcccaactggcttccaccatccacc

SEQ ID NO: 403424 - DNA, 53 bp, Artificial
  Synthetic oligonucleotide
gatgcgtgtgacccatctgtgacgcgatctgctttcgcagacctaacgctgtc

SEQ ID NO: 403425 - DNA, 55 bp, Artificial
  Synthetic oligonucleotide
gatgctaaagaaggatgtagtggttggtttatgttagaagccgcgtgctcagatg

SEQ ID NO: 403426 - DNA, 60 bp, Artificial
  Synthetic oligonucleotide
gatgctaaaggtcccgaatgcggaaacagacaatcagtccggtccagttgcacatcaagt

SEQ ID NO: 403427 - DNA, 60 bp, Artificial
  Synthetic oligonucleotide
gatgctaacacacttggcttccacacaatgatcattccgtaagtaaggcctttctttgca

SEQ ID NO: 403428 - DNA, 60 bp, Artificial
  Synthetic oligonucleotide
gatgctaaggctccggccttggtgtatggcccaggacaaggtgtgaccatagacggtgag

SEQ ID NO: 403429 - DNA, 60 bp, Artificial
  Synthetic oligonucleotide
gatgctaatctctggactcgcgaggtgtcttttaagcggcgccactattatgatcttgct

SEQ ID NO: 403430 - DNA, 55 bp, Artificial
  Synthetic oligonucleotide
gatgctactagatagaggacatattgtaaccaaagtggatggaagaaccatgaag

SEQ ID NO: 403431 - DNA, 55 bp, Artificial
  Synthetic oligonucleotide
gatgctagatccacaaccaaatttcatgacatgcaatagcatcgcagcggcccta

SEQ ID NO: 403432 - DNA, 57 bp, Artificial
  Synthetic oligonucleotide
gatgctaggagttagaggagaccgaagcgaggaggaaagcaaagaaagcaacggggc

SEQ ID NO: 403433 - DNA, 60 bp, Artificial
  Synthetic oligonucleotide
gatgctagtctcagcccagtttggtttagagcactggagttggtacttagagagattggc

SEQ ID NO: 403434 - DNA, 57 bp, Artificial
  Synthetic oligonucleotide
gatgctatatcacgaattagattgctggcattatcaacactattgtgtaacctctac

SEQ ID NO: 403435 - DNA, 60 bp, Artificial
  Synthetic oligonucleotide
gatgctatatctgccataagcccctgtgttgggaggagaaggaggcattactggtcggca

SEQ ID NO: 403436 - DNA, 60 bp, Artificial
  Synthetic oligonucleotide
gatgctatgcgtgatgcgggtatcgtaggtgtactgacactagataatcaggatctgaat

SEQ ID NO: 403437 - DNA, 60 bp, Artificial
  Synthetic oligonucleotide
gatgctattctaatgaatatgccagatgctgttatttcactacatcgttattttagaggg

SEQ ID NO: 403438 - DNA, 56 bp, Artificial
  Synthetic oligonucleotide
gatgctattggagacctgcttagggcctacgactcgtgtccttatactgctgccat

SEQ ID NO: 403439 - DNA, 60 bp, Artificial
  Synthetic oligonucleotide
gatgctattgtatcaagtactcttgagctgagaagcagatactgggccataagaaccaga

SEQ ID NO: 403440 - DNA, 55 bp, Artificial
  Synthetic oligonucleotide
gatgctcaaatgttcgcgagtaacgcatgtacaaactccgttagcggggatgcgt

SEQ ID NO: 403441 - DNA, 59 bp, Artificial
  Synthetic oligonucleotide
gatgctcaagatggagtctactcggcagatggtagattctattattaacacttcttttg

SEQ ID NO: 403442 - DNA, 60 bp, Artificial
  Synthetic oligonucleotide
gatgctcaccgatgaactctggttctagtggacatctgctgtaggtcaggaaggtgtttg

SEQ ID NO: 403443 - DNA, 51 bp, Artificial
  Synthetic oligonucleotide
gatgctcactgggaacctatgcgaggaaccgccgatcaagcgcgtgagtac

SEQ ID NO: 403444 - DNA, 60 bp, Artificial
  Synthetic oligonucleotide
gatgctcagccccggagactttgcaccgtgccctcagtaatctacaacttgcggcagcca

SEQ ID NO: 403445 - DNA, 60 bp, Artificial
  Synthetic oligonucleotide
gatgctcccggactttcatatacacataactatgacgtcttgatgcagtacatgacgtgt

SEQ ID NO: 403446 - DNA, 55 bp, Artificial
  Synthetic oligonucleotide
gatgctccgctcagattgtaaaccccgttgtataatttatctgcataggagagtc

SEQ ID NO: 403447 - DNA, 57 bp, Artificial
  Synthetic oligonucleotide
gatgctccttctgagcgtgggagtgtatctctaacgccccggtttcccttgtggctt

SEQ ID NO: 403448 - DNA, 59 bp, Artificial
  Synthetic oligonucleotide
gatgctcctttagaaatcattaactctatctgtaagtggcctgattttattcagatgac

SEQ ID NO: 403449 - DNA, 54 bp, Artificial
  Synthetic oligonucleotide
gatgctcgatccctccctcccccccgggtgtcgcccaggaatggcgggacccca

SEQ ID NO: 403450 - DNA, 60 bp, Artificial
  Synthetic oligonucleotide
gatgctcgtaagaaagatgactcaagctgccgaagacttccacaagagttttgggggaga

SEQ ID NO: 403451 - DNA, 60 bp, Artificial
  Synthetic oligonucleotide
gatgctctacaaggccaatggaaccaccactgacacggcaggacaattcattatcacgat

SEQ ID NO: 403452 - DNA, 60 bp, Artificial
  Synthetic oligonucleotide
gatgctctcgctcgcgtcgctctacatgtgcaccgtatatatggtgaagacggcggcttg

SEQ ID NO: 403453 - DNA, 60 bp, Artificial
  Synthetic oligonucleotide
gatgctctgggggcgcttatgacatcataatgtgtgatgagtgccattcaactgactcga

SEQ ID NO: 403454 - DNA, 58 bp, Artificial
  Synthetic oligonucleotide
gatgctctggtcccactcagggctcaacaaagggccgcgaataacccgaataggaata

SEQ ID NO: 403455 - DNA, 60 bp, Artificial
  Synthetic oligonucleotide
gatgctcttgaggactgcaataggtcaagtatcaaggcccctgttcttgtacattaggac

SEQ ID NO: 403456 - DNA, 54 bp, Artificial
  Synthetic oligonucleotide
gatgctcttttactcgagcgccgatccatctcgaaagagaatcgccaccacaat

SEQ ID NO: 403457 - DNA, 54 bp, Artificial
  Synthetic oligonucleotide
gatgctgaaaaccagacccaatactttgggtttacaaccccatggaattaccta

SEQ ID NO: 403458 - DNA, 55 bp, Artificial
  Synthetic oligonucleotide
gatgctgatattataaagttggagtgttacggcaatcctgcaaccgaccaatcag

SEQ ID NO: 403459 - DNA, 60 bp, Artificial
  Synthetic oligonucleotide
gatgctgatcgtgcgacttatttaattggtggtagagctatcgtaatacctcgtaattta

SEQ ID NO: 403460 - DNA, 59 bp, Artificial
  Synthetic oligonucleotide
gatgctgatcgttatgatgctgatcttgacgcgcttagtgctgctctgatagtcggaca

SEQ ID NO: 403461 - DNA, 55 bp, Artificial
  Synthetic oligonucleotide
gatgctgatgagacgcgatttcccaacgcgcgatcgcagtatcgtggaggcacgg

SEQ ID NO: 403462 - DNA, 60 bp, Artificial
  Synthetic oligonucleotide
gatgctgattctatattagcagccattagtgtaggtactttacgccagcacattggttcg

SEQ ID NO: 403463 - DNA, 60 bp, Artificial
  Synthetic oligonucleotide
gatgctgcatataagcagccgcttttcgcttgtactgggtctctcttggtagaccagatc

SEQ ID NO: 403464 - DNA, 60 bp, Artificial
  Synthetic oligonucleotide
gatgctgctaggaggatacttgcagatcgtaagagagtcgtctcggtagtacctgacgac

SEQ ID NO: 403465 - DNA, 58 bp, Artificial
  Synthetic oligonucleotide
gatgctggatggtctcagcagagatatgttggacttttttgctgaggctggcctcaat

SEQ ID NO: 403466 - DNA, 60 bp, Artificial
  Synthetic oligonucleotide
gatgctgggaaattacgtggagatgctacgacaaactttactcgtgctactgagttaggc

SEQ ID NO: 403467 - DNA, 55 bp, Artificial
  Synthetic oligonucleotide
gatgctggggaggcactggatttggacacacgaccaggtccctcatgtgatagat

SEQ ID NO: 403468 - DNA, 60 bp, Artificial
  Synthetic oligonucleotide
gatgctgggttcttggtaagtccggtaattcatatgcgtgaatgaggactgagtagccca

SEQ ID NO: 403469 - DNA, 56 bp, Artificial
  Synthetic oligonucleotide
gatgctggtaaaatattaccattgtcaaagtctatggaattagatgctgtggagtc

SEQ ID NO: 403470 - DNA, 60 bp, Artificial
  Synthetic oligonucleotide
gatgctggtatcccattgagccaattgaccattgcacctcaccaatggattaaccttagg

SEQ ID NO: 403471 - DNA, 55 bp, Artificial
  Synthetic oligonucleotide
gatgctggtggcttacgtacatctgcatcagacaactttacacgtccaacgcaat

SEQ ID NO: 403472 - DNA, 55 bp, Artificial
  Synthetic oligonucleotide
gatgctgtactgttcaaccgtccatactggcttgagagggcacaaggacaaaaca

SEQ ID NO: 403473 - DNA, 55 bp, Artificial
  Synthetic oligonucleotide
gatgctgtccagcgacttgcgtatgtggcactcaaagtcaatcacctgcatgtca

SEQ ID NO: 403474 - DNA, 54 bp, Artificial
  Synthetic oligonucleotide
gatgctgtcccactgacctcattcgatttctcgagagcgacgcgttgtaatctt

SEQ ID NO: 403475 - DNA, 59 bp, Artificial
  Synthetic oligonucleotide
gatgctgtcccttactttattccctttgagtggaatacagctgtctttgcttcctcacg

SEQ ID NO: 403476 - DNA, 55 bp, Artificial
  Synthetic oligonucleotide
gatgctgtggccacaaatctactatcacttcctgctgatgtctgcagagaactaa

SEQ ID NO: 403477 - DNA, 60 bp, Artificial
  Synthetic oligonucleotide
gatgctgttagatatgggacatctggacaatatgaagtccgcattaacaacgaaactgtg

SEQ ID NO: 403478 - DNA, 60 bp, Artificial
  Synthetic oligonucleotide
gatgctgttgcaacaacacactcctggacccccaaaagaaatcggtccatcttgaataca

SEQ ID NO: 403479 - DNA, 60 bp, Artificial
  Synthetic oligonucleotide
gatgcttagcaccagatgttagcataccctggagctagttatctcacttacatgatgaca

SEQ ID NO: 403480 - DNA, 60 bp, Artificial
  Synthetic oligonucleotide
gatgcttgattatatcgtttacagcgcagaggaggtgcactacgttgggtgcggtgattt

SEQ ID NO: 403481 - DNA, 55 bp, Artificial
  Synthetic oligonucleotide
gatgcttgccactcacactccacctgccaattgggctaagcagggtctccctgag

SEQ ID NO: 403482 - DNA, 55 bp, Artificial
  Synthetic oligonucleotide
gatgcttggcgacatgccgatgtgttgatggatcgtgcgcaaccatgttgacaca

SEQ ID NO: 403483 - DNA, 60 bp, Artificial
  Synthetic oligonucleotide
gatgctttcagacaaaaggcttaggcatttcctatggcaggaagaagcggagacagcgac

SEQ ID NO: 403484 - DNA, 50 bp, Artificial
  Synthetic oligonucleotide
gatgctttccgcgtgtatggtcgaaatccgtagacccaaacttaccgaaa

SEQ ID NO: 403485 - DNA, 53 bp, Artificial
  Synthetic oligonucleotide
gatgctttgactcaactgtcaccgagagagacattagaactgaggagtcgata

SEQ ID NO: 403486 - DNA, 56 bp, Artificial
  Synthetic oligonucleotide
gatggaaacaacttacggaagcacctaggaagcagtcgggagtgaattcttgttag

SEQ ID NO: 403487 - DNA, 55 bp, Artificial
  Synthetic oligonucleotide
gatggaaacgttggtacaacggtagagaacacggaaagacatacgaccgatgacg

SEQ ID NO: 403488 - DNA, 54 bp, Artificial
  Synthetic oligonucleotide
gatggaaactaacgtatgtaggctataatggaaagaatacacgaggtcattata

SEQ ID NO: 403489 - DNA, 56 bp, Artificial
  Synthetic oligonucleotide
gatggaaactggtccttagtatggggaataatcaggactcttttaccaggacaagc

SEQ ID NO: 403490 - DNA, 55 bp, Artificial
  Synthetic oligonucleotide
gatggaaagatcctggcttaggtttcttcttattagacaatccttactgtgcagg

SEQ ID NO: 403491 - DNA, 57 bp, Artificial
  Synthetic oligonucleotide
gatggaaaggctacggttcccggtatctgctcaagcggggaagggtgaactgtgcgc

SEQ ID NO: 403492 - DNA, 59 bp, Artificial
  Synthetic oligonucleotide
gatggaaatgagatagccttgtacttgacaagcactttacctaagacggtggactctct

SEQ ID NO: 403493 - DNA, 50 bp, Artificial
  Synthetic oligonucleotide
gatggaaatgtgcgctcctacttggggataccaggtcgaagaatcgtgga

SEQ ID NO: 403494 - DNA, 58 bp, Artificial
  Synthetic oligonucleotide
gatggaaatttgatagaggtacgttactatacttatactatacgctaagggatgcttg

SEQ ID NO: 403495 - DNA, 55 bp, Artificial
  Synthetic oligonucleotide
gatggaacaattccagagagctgctcagttagcccaggaggtgccattgtgttga

SEQ ID NO: 403496 - DNA, 54 bp, Artificial
  Synthetic oligonucleotide
gatggaacctccggttgctataggaccaaataagggtttggctgaacaaggacc

SEQ ID NO: 403497 - DNA, 59 bp, Artificial
  Synthetic oligonucleotide
gatggaacctgccgtaccatatatttgctcgaagttcctactctctgacgagttcggta

SEQ ID NO: 403498 - DNA, 54 bp, Artificial
  Synthetic oligonucleotide
gatggaacgagccccagaagatcgggggccacagagagcaccctacaatgaatg

SEQ ID NO: 403499 - DNA, 55 bp, Artificial
  Synthetic oligonucleotide
gatggaacgtgggttgcaatgcaaacatcggacgaaaccaagtggtgtcctcctg

SEQ ID NO: 403500 - DNA, 55 bp, Artificial
  Synthetic oligonucleotide
gatggaactatatggatcacgttctatcacaatttggccccagaaagaggatggt

SEQ ID NO: 403501 - DNA, 56 bp, Artificial
  Synthetic oligonucleotide
gatggaactattgttaagaagttcaggggtaacaacagtggacagccttcaactgt

SEQ ID NO: 403502 - DNA, 55 bp, Artificial
  Synthetic oligonucleotide
gatggaagccgctcagacaaaccagcgcttgatgtattacctgacggactaattg

SEQ ID NO: 403503 - DNA, 56 bp, Artificial
  Synthetic oligonucleotide
gatggaaggatccacttaccaatctgtggtatgggccagaccctgtactaatatgg

SEQ ID NO: 403504 - DNA, 60 bp, Artificial
  Synthetic oligonucleotide
gatggaaggcttaactcagtcacagcgaagagaggtcgtggggctgatactctcattgac

SEQ ID NO: 403505 - DNA, 55 bp, Artificial
  Synthetic oligonucleotide
gatggaagtcgttcagcaaacacgggtggacaaactgacacaaggccgacagacc

SEQ ID NO: 403506 - DNA, 60 bp, Artificial
  Synthetic oligonucleotide
gatggaagtgattatggcggtgcaggaaaatgcgacacaattaatgcgtagagcggcaca

SEQ ID NO: 403507 - DNA, 55 bp, Artificial
  Synthetic oligonucleotide
gatggaagtgcatcaggacgagctgacactaaaatattgttcatcgaagagggga

SEQ ID NO: 403508 - DNA, 53 bp, Artificial
  Synthetic oligonucleotide
gatggaatccgcgaacgaaattgctcgaatgagcggggagacaggaacctggg

SEQ ID NO: 403509 - DNA, 55 bp, Artificial
  Synthetic oligonucleotide
gatggaatgatcctggctcagagccgcacttggaatctcggctggtccgtttcgg

SEQ ID NO: 403510 - DNA, 55 bp, Artificial
  Synthetic oligonucleotide
gatggaatgcagtcaaaatcgaaatcttactataatggcaaacaatggccaggcg

SEQ ID NO: 403511 - DNA, 55 bp, Artificial
  Synthetic oligonucleotide
gatggaatgcgatcctagtcgaccgttgtcaattttatacgagattttcaataca

SEQ ID NO: 403512 - DNA, 55 bp, Artificial
  Synthetic oligonucleotide
gatggaattaccttatatttgctcggccccgcaggggaattggactcctccagaa

SEQ ID NO: 403513 - DNA, 55 bp, Artificial
  Synthetic oligonucleotide
gatggaattcgaaccctttcaatctttggtacctaaagctgctagaggccaatac

SEQ ID NO: 403514 - DNA, 60 bp, Artificial
  Synthetic oligonucleotide
gatggacaaacttgtgacatcgtcaatggtgccttggggagtccaggctgtgatcacttg

SEQ ID NO: 403515 - DNA, 55 bp, Artificial
  Synthetic oligonucleotide
gatggacactacgccgcaatctgagtatgctgcgttgcagactgtggtttacccg

SEQ ID NO: 403516 - DNA, 60 bp, Artificial
  Synthetic oligonucleotide
gatggacagacggtacaactacaagtctcaaatgactcaagtactctttggaaattcata

SEQ ID NO: 403517 - DNA, 58 bp, Artificial
  Synthetic oligonucleotide
gatggacagagaagaagcgtggtagggtaaaaaagggtcagtcaaatagagaatatga

SEQ ID NO: 403518 - DNA, 60 bp, Artificial
  Synthetic oligonucleotide
gatggacagataccgacagtgatttctcagtgaaacaggatgttgtggcaatgactgatt

SEQ ID NO: 403519 - DNA, 59 bp, Artificial
  Synthetic oligonucleotide
gatggacagatcaccccagcacgaatacggagcgttacagacggtggtgtttcccgata

SEQ ID NO: 403520 - DNA, 55 bp, Artificial
  Synthetic oligonucleotide
gatggacaggtcattgctaacatccttgccagtgaactgagttctgtgaaacggg

SEQ ID NO: 403521 - DNA, 58 bp, Artificial
  Synthetic oligonucleotide
gatggacatcctgtttcattagattgtaaacacaaagcgcccttgcaaattaagtttc

SEQ ID NO: 403522 - DNA, 55 bp, Artificial
  Synthetic oligonucleotide
gatggacatctcatagcatttgactactcaggttatgacgccagcttaagccccg

SEQ ID NO: 403523 - DNA, 55 bp, Artificial
  Synthetic oligonucleotide
gatggacatctcatagcgtttgactattcaggctatgacgccagccttagcccag

SEQ ID NO: 403524 - DNA, 59 bp, Artificial
  Synthetic oligonucleotide
gatggaccaaaagccaagaatagttagagtcacgggtgcacctatcaagaagagatcag

SEQ ID NO: 403525 - DNA, 60 bp, Artificial
  Synthetic oligonucleotide
gatggaccacctgcgatcgatcgagtggttcaatatacgtatgaggtggcaagattcgag

SEQ ID NO: 403526 - DNA, 55 bp, Artificial
  Synthetic oligonucleotide
gatggaccttgtcaggctggagattgtggaggaaagctgctttgcaagcacggtg

SEQ ID NO: 403527 - DNA, 55 bp, Artificial
  Synthetic oligonucleotide
gatggacgaacgaggacggctcaccgcgatacaacccgacatgggccacattcgc

SEQ ID NO: 403528 - DNA, 60 bp, Artificial
  Synthetic oligonucleotide
gatggactaaaaagccatcacagatgcaagaacatgttctgtcactgtgtcatttaatgt

SEQ ID NO: 403529 - DNA, 60 bp, Artificial
  Synthetic oligonucleotide
gatggactagttcaaggtagcgttcactcaatcatgaccggggagtcatatggcgaatcg

SEQ ID NO: 403530 - DNA, 60 bp, Artificial
  Synthetic oligonucleotide
gatggactcaggaaggagaagaagacagatccattattggagctatggaggctgatctgt

SEQ ID NO: 403531 - DNA, 60 bp, Artificial
  Synthetic oligonucleotide
gatggactccccgcgctgaaccattagagcggcgaggctagacgcgagctgatcgcgtcg

SEQ ID NO: 403532 - DNA, 60 bp, Artificial
  Synthetic oligonucleotide
gatggactctcactcgaacatttctactagaagcgatgataatgctattgtggcgggttg

SEQ ID NO: 403533 - DNA, 52 bp, Artificial
  Synthetic oligonucleotide
gatggactgacccacgctacccagactgtccataagttcccccaggccgtcc

SEQ ID NO: 403534 - DNA, 60 bp, Artificial
  Synthetic oligonucleotide
gatggactggattgatagatggatggtatggttaccatcatcagaatggacagggatcag

SEQ ID NO: 403535 - DNA, 55 bp, Artificial
  Synthetic oligonucleotide
gatggacttaagggattagcatgcatggatatctcatacggatgtgaggtggacg

SEQ ID NO: 403536 - DNA, 60 bp, Artificial
  Synthetic oligonucleotide
gatggacttgcctaccttcgtgatgaatgtctaactaaacatccttcacttggagacagt

SEQ ID NO: 403537 - DNA, 55 bp, Artificial
  Synthetic oligonucleotide
gatggactttgacatctgcagatttcttttcgttatagtcgtcttgtcaccattg

SEQ ID NO: 403538 - DNA, 51 bp, Artificial
  Synthetic oligonucleotide
gatggagaaaaatgacttctatccagcacgctatcagtcacacatgaccat

SEQ ID NO: 403539 - DNA, 60 bp, Artificial
  Synthetic oligonucleotide
gatggagaagaatgccccaagctcaggaacgcctgcaacatataaagcagttggagggca

SEQ ID NO: 403540 - DNA, 55 bp, Artificial
  Synthetic oligonucleotide
gatggagacgtcatcaatccatttggagagggagaggcgaaacctgctctgtatg

SEQ ID NO: 403541 - DNA, 55 bp, Artificial
  Synthetic oligonucleotide
gatggagagcaatcctcaattgtgtaccaaatctaaggtgaacatcgtccctccc

SEQ ID NO: 403542 - DNA, 60 bp, Artificial
  Synthetic oligonucleotide
gatggagagtggcgtgacggttttgattggatcactgagtatgaagggcgcaccgcatgg

SEQ ID NO: 403543 - DNA, 59 bp, Artificial
  Synthetic oligonucleotide
gatggagcagggggtcacagattacatcaagggacttggcgatgcctttggtacagggt

SEQ ID NO: 403544 - DNA, 55 bp, Artificial
  Synthetic oligonucleotide
gatggagctccaccgtgttctataaaatgctggtttgcaaagtcaggtgagtggc

SEQ ID NO: 403545 - DNA, 55 bp, Artificial
  Synthetic oligonucleotide
gatggagctgtggacgcttctgcaccatctgtcatcaccccttcagagtccacag

SEQ ID NO: 403546 - DNA, 55 bp, Artificial
  Synthetic oligonucleotide
gatggaggacaaaacccatgtatccagttgggaagatgttccatatttaggaaaa

SEQ ID NO: 403547 - DNA, 60 bp, Artificial
  Synthetic oligonucleotide
gatggaggagccctctgtcggacgcgtgtaccctcgcaattctggagataagcattggtc

SEQ ID NO: 403548 - DNA, 56 bp, Artificial
  Synthetic oligonucleotide
gatggaggatcctgttttgctttaagtgttgcagaagaaccaggggcctgtttaag

SEQ ID NO: 403549 - DNA, 55 bp, Artificial
  Synthetic oligonucleotide
gatggaggcaatgtcacaaataatggcacagagatattcagacctggaggaggag

SEQ ID NO: 403550 - DNA, 60 bp, Artificial
  Synthetic oligonucleotide
gatggagtaaaactggaatcaatgggggtctatcagattctggcgatctactcaactgtc

SEQ ID NO: 403551 - DNA, 52 bp, Artificial
  Synthetic oligonucleotide
gatggagtctgacgggaggatcggctccgatattcctagaacgacggatgct

SEQ ID NO: 403552 - DNA, 52 bp, Artificial
  Synthetic oligonucleotide
gatggagttcgaactagatatctccactctaacagggatattcagtaacctg

SEQ ID NO: 403553 - DNA, 60 bp, Artificial
  Synthetic oligonucleotide
gatggagttgccggatgtggtaaatcgtaccagatagctaactctgtagatctatctgat

SEQ ID NO: 403554 - DNA, 60 bp, Artificial
  Synthetic oligonucleotide
gatggataaattgtttacgttgattaggtgcaatttcacatatgattatattgacgacgt

SEQ ID NO: 403555 - DNA, 55 bp, Artificial
  Synthetic oligonucleotide
gatggatacagattaccaggggcggttgtgcaatccgctgaatccatttgtcagc

SEQ ID NO: 403556 - DNA, 55 bp, Artificial
  Synthetic oligonucleotide
gatggatagcaggggccgcgtttacgtgcaatcctctggcgtgtcgcctcagtct

SEQ ID NO: 403557 - DNA, 55 bp, Artificial
  Synthetic oligonucleotide
gatggatatacgggcgctgtgaccaacgggaagggtgctgtatacaaacgtagcg

SEQ ID NO: 403558 - DNA, 58 bp, Artificial
  Synthetic oligonucleotide
gatggatatgataaattcattcttaggaagttgccaaatggaacccgggaattagcca

SEQ ID NO: 403559 - DNA, 55 bp, Artificial
  Synthetic oligonucleotide
gatggatatgcacccgcccccgagtttatgttgccgttcaaaataaactactaaa

SEQ ID NO: 403560 - DNA, 60 bp, Artificial
  Synthetic oligonucleotide
gatggatatgctgcgatagctgaacaatgtgttcacataaggcactgtagaagacattta

SEQ ID NO: 403561 - DNA, 55 bp, Artificial
  Synthetic oligonucleotide
gatggatcaacatgagagacattagatctcgaacttcagtgttagactattgttg

SEQ ID NO: 403562 - DNA, 60 bp, Artificial
  Synthetic oligonucleotide
gatggatcaattctcccaatcacgccaaatctcttacacaaacattagtgtcaaacaatg

SEQ ID NO: 403563 - DNA, 55 bp, Artificial
  Synthetic oligonucleotide
gatggatcacaatttgatagttcactatcgccatatttgatcaacgcagttctca

SEQ ID NO: 403564 - DNA, 55 bp, Artificial
  Synthetic oligonucleotide
gatggatcaggtacgagaaagcagaaatcctgggaatgctgaaattgaagatctc

SEQ ID NO: 403565 - DNA, 55 bp, Artificial
  Synthetic oligonucleotide
gatggatcaggtcagagaaagccgtagtcctggaaatgctgaaatcgaggacctc

SEQ ID NO: 403566 - DNA, 59 bp, Artificial
  Synthetic oligonucleotide
gatggatccagctattttaacgtcattatcttcaaatcttaacgcagttatgttttggc

SEQ ID NO: 403567 - DNA, 53 bp, Artificial
  Synthetic oligonucleotide
gatggatcgagatcaacacttcatcgttatcactgatggaagcaattatcccc

SEQ ID NO: 403568 - DNA, 50 bp, Artificial
  Synthetic oligonucleotide
gatggatctttaatgtcccaaatcttggctattcccccacctgcagctga

SEQ ID NO: 403569 - DNA, 58 bp, Artificial
  Synthetic oligonucleotide
gatggatgaagtctctcaggtaggtatttaattcgctttcaattcaaagttgttggtg

SEQ ID NO: 403570 - DNA, 52 bp, Artificial
  Synthetic oligonucleotide
gatggatgaatgtgagacatccgaggacgaatcggaaagcgtgtgttatcaa

SEQ ID NO: 403571 - DNA, 59 bp, Artificial
  Synthetic oligonucleotide
gatggatgacaacgtcgccaagagggaccacacgaacatcattacttactggttggtcc

SEQ ID NO: 403572 - DNA, 60 bp, Artificial
  Synthetic oligonucleotide
gatggatgatatccccgctgatatttacatccgtcattatagtactctgaagaaaatacg

SEQ ID NO: 403573 - DNA, 55 bp, Artificial
  Synthetic oligonucleotide
gatggatgctagtgacgtcagatcttaagtgctttggaaacacagcactagcaaa

SEQ ID NO: 403574 - DNA, 60 bp, Artificial
  Synthetic oligonucleotide
gatggatgctctgaaattaagcattgaggacccgagtcatgagggggaggggataccgct

SEQ ID NO: 403575 - DNA, 55 bp, Artificial
  Synthetic oligonucleotide
gatggatggagatgaacaagtcgaatacccactgaaaccaatcgttgagaatgca

SEQ ID NO: 403576 - DNA, 60 bp, Artificial
  Synthetic oligonucleotide
gatggatgggactttgacctactgcgctgactactcgcggtgggactccaccttgccacg

SEQ ID NO: 403577 - DNA, 60 bp, Artificial
  Synthetic oligonucleotide
gatggatgtatgagcagctagctgggaaccttaaggcaatagcacactgccctagtcaac

SEQ ID NO: 403578 - DNA, 55 bp, Artificial
  Synthetic oligonucleotide
gatggatgtttaggtatgttcggactatctatatctctggcttcaaaaccgacag

SEQ ID NO: 403579 - DNA, 59 bp, Artificial
  Synthetic oligonucleotide
gatggatttatctacattcaattggaaaagttgctgtagaaggtggaagatattacgaa

SEQ ID NO: 403580 - DNA, 55 bp, Artificial
  Synthetic oligonucleotide
gatggcaatattctgcagacaataggttcagccacactaacagacgttcctgttc

SEQ ID NO: 403581 - DNA, 55 bp, Artificial
  Synthetic oligonucleotide
gatggcaattggttaggtgaccacctatctgacaagggccgggttaccgacccaa

SEQ ID NO: 403582 - DNA, 55 bp, Artificial
  Synthetic oligonucleotide
gatggcacagtacaccccaagatcgatgtgctgttacgtccttataagttgaggg

SEQ ID NO: 403583 - DNA, 59 bp, Artificial
  Synthetic oligonucleotide
gatggcacattttacgcgtatagagttgatacttttgatgaagttccgttcgacgtgga

SEQ ID NO: 403584 - DNA, 57 bp, Artificial
  Synthetic oligonucleotide
gatggcaccaattaccttctctgtaacaacacctcaaaggtgtcgtatcttacttac

SEQ ID NO: 403585 - DNA, 60 bp, Artificial
  Synthetic oligonucleotide
gatggcaccataccacaacaattacttcgtatcattcgacaagtcaggtgggagtttctc

SEQ ID NO: 403586 - DNA, 60 bp, Artificial
  Synthetic oligonucleotide
gatggcaccccagactcgtgcccgagtggcggcattgtacaatgccgccgttagcacctt

SEQ ID NO: 403587 - DNA, 60 bp, Artificial
  Synthetic oligonucleotide
gatggcactaagagcaatgaaggatttaagatcctgcacagtcctttcactagattgctt

SEQ ID NO: 403588 - DNA, 55 bp, Artificial
  Synthetic oligonucleotide
gatggcactcgtcattgacatgcgagccattttacggaaagagtttggtgtgaga

SEQ ID NO: 403589 - DNA, 60 bp, Artificial
  Synthetic oligonucleotide
gatggcagcagctacatgtggtctggcgagtgtcttccattcaagaacacaatgaatacc

SEQ ID NO: 403590 - DNA, 60 bp, Artificial
  Synthetic oligonucleotide
gatggcagtgtgtcagggcaagaagagaacacagaacgccataccgttgatgacgtcaat

SEQ ID NO: 403591 - DNA, 60 bp, Artificial
  Synthetic oligonucleotide
gatggcatatttaccaccaatattacaacaagaatatgcattgagatatttttcgaagtc

SEQ ID NO: 403592 - DNA, 55 bp, Artificial
  Synthetic oligonucleotide
gatggcatcatgcaacagaccaccgttagagcggagaatgatctgactactaatg

SEQ ID NO: 403593 - DNA, 55 bp, Artificial
  Synthetic oligonucleotide
gatggcatcgaaaggcttgagtccggaccgggttaccctcggaggacagaccctg

SEQ ID NO: 403594 - DNA, 60 bp, Artificial
  Synthetic oligonucleotide
gatggcattaaccgctgactgatgactcattagcttggcacgtccggggacgtaacgatg

SEQ ID NO: 403595 - DNA, 60 bp, Artificial
  Synthetic oligonucleotide
gatggcattgtggtaccacggctattggatatcactctgaaagcttacgacgataggaag

SEQ ID NO: 403596 - DNA, 60 bp, Artificial
  Synthetic oligonucleotide
gatggccaaaggtggcttaccaaagctcgcaaggaagccatcctatccatccctgtgcct

SEQ ID NO: 403597 - DNA, 60 bp, Artificial
  Synthetic oligonucleotide
gatggccacaagagattctttccagtcattcaatgttacagaacctcatataactagtaa

SEQ ID NO: 403598 - DNA, 55 bp, Artificial
  Synthetic oligonucleotide
gatggccacacaaataattgtgtagacccagagaccttgcccacgtcgtcttccc

SEQ ID NO: 403599 - DNA, 55 bp, Artificial
  Synthetic oligonucleotide
gatggccaccttcagaatgagaccaatgttcgcagtcgggctactgtttcgcaga

SEQ ID NO: 403600 - DNA, 60 bp, Artificial
  Synthetic oligonucleotide
gatggccagcgccacagatgatgcacagaaggactccatctatgcatcggctctagtgga

SEQ ID NO: 403601 - DNA, 60 bp, Artificial
  Synthetic oligonucleotide
gatggccagtaaaaacagtacatacagacaatggccccattttcatcagtactgcggtta

SEQ ID NO: 403602 - DNA, 55 bp, Artificial
  Synthetic oligonucleotide
gatggccccaccgctcaagtctccaagcgctgaggcatgcggttatagtgatcgt

SEQ ID NO: 403603 - DNA, 55 bp, Artificial
  Synthetic oligonucleotide
gatggccccgtcagactgtttcccggcgttgtcgttatgtaatcggggcgtccta

SEQ ID NO: 403604 - DNA, 55 bp, Artificial
  Synthetic oligonucleotide
gatggcccgacacaactatccctgaggcaaccattgcttcaaatggcaacttcgc

SEQ ID NO: 403605 - DNA, 56 bp, Artificial
  Synthetic oligonucleotide
gatggcccgagtgatgggctggcctcgtacaaaattttcaagatcgaaaaggggaa

SEQ ID NO: 403606 - DNA, 60 bp, Artificial
  Synthetic oligonucleotide
gatggccggaagtaaaatgaaggacgtcgcgcgagagttccctgatatctacgtcagaca

SEQ ID NO: 403607 - DNA, 60 bp, Artificial
  Synthetic oligonucleotide
gatggccggagtatcttaaggataaagaagccacggcagaggatcaacccacacagccag

SEQ ID NO: 403608 - DNA, 50 bp, Artificial
  Synthetic oligonucleotide
gatggccgtcttaaccttaaaacatccttccattgttatggtgcctgtac

SEQ ID NO: 403609 - DNA, 60 bp, Artificial
  Synthetic oligonucleotide
gatggccgttcggagattacgaggtctattagggcttacacggatgaggctgtgcgcaca

SEQ ID NO: 403610 - DNA, 56 bp, Artificial
  Synthetic oligonucleotide
gatggcctacgatatagagacctatagccctgttaagggaaccgtcccagacccaa

SEQ ID NO: 403611 - DNA, 58 bp, Artificial
  Synthetic oligonucleotide
gatggcctactggatccgtttattttagagagtacacggacatagtatccttctcagt

SEQ ID NO: 403612 - DNA, 60 bp, Artificial
  Synthetic oligonucleotide
gatggcctatatgaccccacctgccttgcctcagaactaccctacgatgccccctcagaa

SEQ ID NO: 403613 - DNA, 55 bp, Artificial
  Synthetic oligonucleotide
gatggcctcaagtgtactgttgtggatggccagtgtggagcctcatcggatagcg

SEQ ID NO: 403614 - DNA, 55 bp, Artificial
  Synthetic oligonucleotide
gatggcctcattaagaagatcttgcgcgggtgcgccacggctgcgggcttggttg

SEQ ID NO: 403615 - DNA, 50 bp, Artificial
  Synthetic oligonucleotide
gatggcctctccaatacttcagagtcacctagagaacataatcgaactac

SEQ ID NO: 403616 - DNA, 60 bp, Artificial
  Synthetic oligonucleotide
gatggcctgctgtaagggagagaataagacgaactgagccagcggcagatggggtgggag

SEQ ID NO: 403617 - DNA, 58 bp, Artificial
  Synthetic oligonucleotide
gatggcgactttgaggttgaagattaccttcccaaaatcaacctcaagtcatcaagtg

SEQ ID NO: 403618 - DNA, 52 bp, Artificial
  Synthetic oligonucleotide
gatggcgatcctggatcacaaatcaccgctgtttttggaggaaggtgcaccg

SEQ ID NO: 403619 - DNA, 55 bp, Artificial
  Synthetic oligonucleotide
gatggcgcactcatcaccggactgacctttcttgaccccaaagatgccacacggg

SEQ ID NO: 403620 - DNA, 60 bp, Artificial
  Synthetic oligonucleotide
gatggcgcggtgtcgtacaccattgagggtacacgaatgagtggggacatgaacacatcc

SEQ ID NO: 403621 - DNA, 60 bp, Artificial
  Synthetic oligonucleotide
gatggcgtgtcggcaacagtaatcaacttggtactttgatgtcaaccacaatcagttcgg

SEQ ID NO: 403622 - DNA, 55 bp, Artificial
  Synthetic oligonucleotide
gatggcgttctggcagcctagtcaaaggctatacctgcctcccacacctgtgaca

SEQ ID NO: 403623 - DNA, 53 bp, Artificial
  Synthetic oligonucleotide
gatggcgtttcacactgcacggataaagtatacgctgttgccttgcacagttt

SEQ ID NO: 403624 - DNA, 55 bp, Artificial
  Synthetic oligonucleotide
gatggcgtttccggtttacctgagctctccaccgtcaggcaaccggaagaaacta

SEQ ID NO: 403625 - DNA, 58 bp, Artificial
  Synthetic oligonucleotide
gatggctacaaactgaactttgcttcggtggttgcccctgacgcgcctttctggatta

SEQ ID NO: 403626 - DNA, 55 bp, Artificial
  Synthetic oligonucleotide
gatggctacactgattttggtactcatccctcaccaaatggtaaaggagatgcaa

SEQ ID NO: 403627 - DNA, 55 bp, Artificial
  Synthetic oligonucleotide
gatggctacgaaggctctcccgaaaggaactcattcgaaatacactaaatgggtt

SEQ ID NO: 403628 - DNA, 59 bp, Artificial
  Synthetic oligonucleotide
gatggctactaccaccaatccactaatcaggcatgaaaacagaatggtgctagctagca

SEQ ID NO: 403629 - DNA, 52 bp, Artificial
  Synthetic oligonucleotide
gatggctactatcaggcttttatgtatgcaaatgcccctaccttaaaactct

SEQ ID NO: 403630 - DNA, 57 bp, Artificial
  Synthetic oligonucleotide
gatggctactggaaagttactggtggcctactcacccccgggagctcaaccacctca

SEQ ID NO: 403631 - DNA, 55 bp, Artificial
  Synthetic oligonucleotide
gatggctagcagaggcctttgggattcctttcgtcagtccgagagaggcgaggag

SEQ ID NO: 403632 - DNA, 55 bp, Artificial
  Synthetic oligonucleotide
gatggctatacctacatagcagactggttgtgtttacatttaagcagccatttcc

SEQ ID NO: 403633 - DNA, 56 bp, Artificial
  Synthetic oligonucleotide
gatggctatccaacaatatttgagagttggctatgctgaagaagtcaggtatgtgc

SEQ ID NO: 403634 - DNA, 60 bp, Artificial
  Synthetic oligonucleotide
gatggctcacagtttgacagctcgctatcaccatatttgatcaacgcagtactcaacatc

SEQ ID NO: 403635 - DNA, 60 bp, Artificial
  Synthetic oligonucleotide
gatggctccaataggtgcgcgagagagtgcagttatgttagtttcgaatagcattaaaga

SEQ ID NO: 403636 - DNA, 60 bp, Artificial
  Synthetic oligonucleotide
gatggctcctaacttgattgagtaccagcctgagatggacactgcagagtgcactacaaa

SEQ ID NO: 403637 - DNA, 52 bp, Artificial
  Synthetic oligonucleotide
gatggctcctgtccccccgaggttcccgtccctcttggggccccaatgaccc

SEQ ID NO: 403638 - DNA, 55 bp, Artificial
  Synthetic oligonucleotide
gatggctccttggaaatccagaatgtgatagacttctaactgtgccagaatggtc

SEQ ID NO: 403639 - DNA, 58 bp, Artificial
  Synthetic oligonucleotide
gatggctcgtacccaaatctgagcaagtcctatgttaacgacaaagagaaagaagtcc

SEQ ID NO: 403640 - DNA, 58 bp, Artificial
  Synthetic oligonucleotide
gatggctctaattcctcatcacaatgcagatcttgctcatcaaagccttgattgaatt

SEQ ID NO: 403641 - DNA, 59 bp, Artificial
  Synthetic oligonucleotide
gatggctctgggtgggccccacagactaccttgactgaatttgacttatatttgggcca

SEQ ID NO: 403642 - DNA, 60 bp, Artificial
  Synthetic oligonucleotide
gatggctcttcagctattcatcaaggactataggtacacgtaccgatgccacaggggtga

SEQ ID NO: 403643 - DNA, 50 bp, Artificial
  Synthetic oligonucleotide
gatggctgatggctacacggcgcagattcatagcgcgcgggaggtagcgg

SEQ ID NO: 403644 - DNA, 60 bp, Artificial
  Synthetic oligonucleotide
gatggctgcctgcaaatattcaactgagtcattaacagaaaaccttgaccttagaatcaa

SEQ ID NO: 403645 - DNA, 60 bp, Artificial
  Synthetic oligonucleotide
gatggctggaccgatatccggtatgcgtagagtgcaagttcggcgcctgcgtcttgaacg

SEQ ID NO: 403646 - DNA, 56 bp, Artificial
  Synthetic oligonucleotide
gatggctggcgtcccgctgactgaggtggcccggaagttccccacgacttatgtaa

SEQ ID NO: 403647 - DNA, 60 bp, Artificial
  Synthetic oligonucleotide
gatggctgggtcgagtgaacaggcagcggaggccatggaggttgccagtcaggctaggca

SEQ ID NO: 403648 - DNA, 56 bp, Artificial
  Synthetic oligonucleotide
gatggcttcttggaaacccaatgtgtgatgaattcctgaatgtaccggaatggtca

SEQ ID NO: 403649 - DNA, 55 bp, Artificial
  Synthetic oligonucleotide
gatggcttgcgatctctgtggaacactttggtagtgctgtggtgtgtccaccgga

SEQ ID NO: 403650 - DNA, 55 bp, Artificial
  Synthetic oligonucleotide
gatggctttaattgggcaagtgattcgattatgcactctccacagcttaaacttt

SEQ ID NO: 403651 - DNA, 50 bp, Artificial
  Synthetic oligonucleotide
gatggctttcgttccccacatcctggataggtgcatcagcaataaaggct

SEQ ID NO: 403652 - DNA, 55 bp, Artificial
  Synthetic oligonucleotide
gatggcttttcctacgttggtctttcagatcttcctagtgatcttcaatttcccc

SEQ ID NO: 403653 - DNA, 54 bp, Artificial
  Synthetic oligonucleotide
gatgggaaagctttcctttccacaaggcacggatgtcacactgcgtagaatgcc

SEQ ID NO: 403654 - DNA, 60 bp, Artificial
  Synthetic oligonucleotide
gatgggaaatccaggtcaaacatattggcgatactacagagctatgtgtatcaggaaccg

SEQ ID NO: 403655 - DNA, 59 bp, Artificial
  Synthetic oligonucleotide
gatgggaacacatattcggtacggagtgcacgaccactcattgggcaatgttcggcggg

SEQ ID NO: 403656 - DNA, 55 bp, Artificial
  Synthetic oligonucleotide
gatgggaacgtggagcagggaaatacacgagaactatatcaccaacaggagtgtg

SEQ ID NO: 403657 - DNA, 53 bp, Artificial
  Synthetic oligonucleotide
gatgggaatccgctaaagcaactccgtaagcaggatctatttacttatcagac

SEQ ID NO: 403658 - DNA, 57 bp, Artificial
  Synthetic oligonucleotide
gatgggaatgaatgggatcttagtaaattcttaaaccatgaaaacacaagtagagtc

SEQ ID NO: 403659 - DNA, 60 bp, Artificial
  Synthetic oligonucleotide
gatgggaatgatcggaatattgcccgacatgaccccaagtacagagatgtcgctgagggg

SEQ ID NO: 403660 - DNA, 60 bp, Artificial
  Synthetic oligonucleotide
gatgggaatgatcgggatactacctgacatgaccccaagcactgaaatgtcactgagagg

SEQ ID NO: 403661 - DNA, 60 bp, Artificial
  Synthetic oligonucleotide
gatgggaatgattgggatattgcctgacatgactccaagtacagagatgtcactgagagg

SEQ ID NO: 403662 - DNA, 54 bp, Artificial
  Synthetic oligonucleotide
gatgggacaacttgtgaccctcttccaatcgatcccagagatcatagaggaggc

SEQ ID NO: 403663 - DNA, 60 bp, Artificial
  Synthetic oligonucleotide
gatgggacaatcttgcactataaaagtgtgcccattgaatacacagactttaggaatagg

SEQ ID NO: 403664 - DNA, 58 bp, Artificial
  Synthetic oligonucleotide
gatgggacttctccaattgggcatctggcttggtagactggcttggggggccactaag

SEQ ID NO: 403665 - DNA, 60 bp, Artificial
  Synthetic oligonucleotide
gatgggagaataattgggcagactgatgtaaatttcaatgggggacacatagaggagtgt

SEQ ID NO: 403666 - DNA, 60 bp, Artificial
  Synthetic oligonucleotide
gatgggagagactgcacactaatagatgctctactaggggaccctcattgtgatgtattc

SEQ ID NO: 403667 - DNA, 55 bp, Artificial
  Synthetic oligonucleotide
gatgggagccggtttgacacatctttggcaccaatattgtttcaacttgtgtgtc

SEQ ID NO: 403668 - DNA, 57 bp, Artificial
  Synthetic oligonucleotide
gatgggagctccaaactctatatcaaccggttgcgccttcgaaatccgccgctcccc

SEQ ID NO: 403669 - DNA, 60 bp, Artificial
  Synthetic oligonucleotide
gatgggagctgacgaaggcacagcgcagcgctctgctcaggttattctgctttgtgtgct

SEQ ID NO: 403670 - DNA, 60 bp, Artificial
  Synthetic oligonucleotide
gatgggaggacgaacccggggcacacacagcatcagtgaacggacccgatacagcttcta

SEQ ID NO: 403671 - DNA, 55 bp, Artificial
  Synthetic oligonucleotide
gatgggagtagatgaatactccagtacagagagggtagtagtgagcatcgaccga

SEQ ID NO: 403672 - DNA, 55 bp, Artificial
  Synthetic oligonucleotide
gatgggagtggatgagtactccagtacggagagggtggtggtaagcattgatcgc

SEQ ID NO: 403673 - DNA, 55 bp, Artificial
  Synthetic oligonucleotide
gatgggagtttgatagaagcctggcacggagacacagagcccgagagctgcatcc

SEQ ID NO: 403674 - DNA, 55 bp, Artificial
  Synthetic oligonucleotide
gatgggatcatatgttacacaggtagatccttatgtagcagataaattgatccac

SEQ ID NO: 403675 - DNA, 55 bp, Artificial
  Synthetic oligonucleotide
gatgggatcgttgggaaaattctcgatgattgcaccgggtcagtacaagaggtcg

SEQ ID NO: 403676 - DNA, 57 bp, Artificial
  Synthetic oligonucleotide
gatgggattccacctttaatttggactggcttcccgtatttgcaatttgactgccag

SEQ ID NO: 403677 - DNA, 55 bp, Artificial
  Synthetic oligonucleotide
gatgggattgccaaataccttggtgcaaaacgtcctcacactgtgcgtgaaatcc

SEQ ID NO: 403678 - DNA, 57 bp, Artificial
  Synthetic oligonucleotide
gatgggcacattgttggaatacatggattaacatccaatgattcagaaaagaacttc

SEQ ID NO: 403679 - DNA, 55 bp, Artificial
  Synthetic oligonucleotide
gatgggcagcattcactaccacatggtggtacctattgtgatgcagcaaagcggg

SEQ ID NO: 403680 - DNA, 55 bp, Artificial
  Synthetic oligonucleotide
gatgggcatccaatgttgactttgatcgagactcatctgtcatcatggcaccgcc

SEQ ID NO: 403681 - DNA, 59 bp, Artificial
  Synthetic oligonucleotide
gatgggccacagtgccgacgaggaaaccgcaggtgggaggatcagccaccggcgaggga

SEQ ID NO: 403682 - DNA, 60 bp, Artificial
  Synthetic oligonucleotide
gatgggccataaggatggctaatgtaactacaggacgagaaccaggtgatataccagaga

SEQ ID NO: 403683 - DNA, 56 bp, Artificial
  Synthetic oligonucleotide
gatgggccgcagttcccgacgaggagcccgcaagtgggaggatcagccaccggagg

SEQ ID NO: 403684 - DNA, 54 bp, Artificial
  Synthetic oligonucleotide
gatgggccgcctataaagacaggtttgttgaatttgacagagctaatgaagtcc

SEQ ID NO: 403685 - DNA, 59 bp, Artificial
  Synthetic oligonucleotide
gatgggcctcagtgccgacgaggggtccgcaagcgggaggatcagccaccggtgaggga

SEQ ID NO: 403686 - DNA, 54 bp, Artificial
  Synthetic oligonucleotide
gatgggcgtttcttttctactggattaccttctggttttcccgacttgtcaggc

SEQ ID NO: 403687 - DNA, 55 bp, Artificial
  Synthetic oligonucleotide
gatgggctagggtcacatgtagtacaaatgatcaaatccctaatttgggaacctt

SEQ ID NO: 403688 - DNA, 60 bp, Artificial
  Synthetic oligonucleotide
gatgggctcttcttgcacagtcaaagtgtgtccattaaatacgcagacacttggtattgg

SEQ ID NO: 403689 - DNA, 60 bp, Artificial
  Synthetic oligonucleotide
gatgggctgatatagatgccaagagactgcacggcatactacgtcgacaagtgaacagtc

SEQ ID NO: 403690 - DNA, 57 bp, Artificial
  Synthetic oligonucleotide
gatgggctggacccaatggacatggacaaatcacccgggttgccatacgttaagaaa

SEQ ID NO: 403691 - DNA, 56 bp, Artificial
  Synthetic oligonucleotide
gatgggctggatccaatggacatggataaatcacctggacttccatatgttaagaa

SEQ ID NO: 403692 - DNA, 59 bp, Artificial
  Synthetic oligonucleotide
gatgggcttcagacttttaaacaatgggtctcacacaaccagctagccgggatgcaact

SEQ ID NO: 403693 - DNA, 56 bp, Artificial
  Synthetic oligonucleotide
gatggggacatgtttgatatagggttcggaaatattaacaataaggttctctctac

SEQ ID NO: 403694 - DNA, 60 bp, Artificial
  Synthetic oligonucleotide
gatggggaccgtgcagtgattacgtacgagggggactctagtgcgggatataatcatgat

SEQ ID NO: 403695 - DNA, 57 bp, Artificial
  Synthetic oligonucleotide
gatggggagaacaattagcaaggattcacgttcaggttacgagactttcagggtcat

SEQ ID NO: 403696 - DNA, 55 bp, Artificial
  Synthetic oligonucleotide
gatggggagatattaggtttctacgtctagtgtggtccgctcccacgcttgatgg

SEQ ID NO: 403697 - DNA, 56 bp, Artificial
  Synthetic oligonucleotide
gatggggagctctcaactctataccaaccggtgcgccttcgaaatccgccgccccc

SEQ ID NO: 403698 - DNA, 55 bp, Artificial
  Synthetic oligonucleotide
gatggggagttactggcatttgattactcaaacttcgatgccagcttatcaccca

SEQ ID NO: 403699 - DNA, 55 bp, Artificial
  Synthetic oligonucleotide
gatggggcaaatacaaccatggctcttagcaaagtcaagttgaatgatacactca

SEQ ID NO: 403700 - DNA, 55 bp, Artificial
  Synthetic oligonucleotide
gatggggcaccccaatgtggggtaaagtgctggtttgtaaaatccggagaatgga

SEQ ID NO: 403701 - DNA, 57 bp, Artificial
  Synthetic oligonucleotide
gatggggctattccctcaacttcatggggtatgtgattggaagttgggggagcttac

SEQ ID NO: 403702 - DNA, 57 bp, Artificial
  Synthetic oligonucleotide
gatgggggatgacagcttcgagatttggtttaaaggactggaagagtatcttgggaa

SEQ ID NO: 403703 - DNA, 50 bp, Artificial
  Synthetic oligonucleotide
gatgggggcatattgccgcgccatatagctttcaggcacgattgctagag

SEQ ID NO: 403704 - DNA, 50 bp, Artificial
  Synthetic oligonucleotide
gatgggggtgacttttatttacaccctagttattatttattaaaacgacg

SEQ ID NO: 403705 - DNA, 57 bp, Artificial
  Synthetic oligonucleotide
gatgggggttggtagatgtggagtttagacagcccagtccgtacgacttggtgcaaa

SEQ ID NO: 403706 - DNA, 56 bp, Artificial
  Synthetic oligonucleotide
gatggggtaaagctggaatcaacaaggatttaccaaattttggcgatctactcaac

SEQ ID NO: 403707 - DNA, 51 bp, Artificial
  Synthetic oligonucleotide
gatggggtcgttttaattaacttctcctacaagcgtctaaacggacgttgg

SEQ ID NO: 403708 - DNA, 54 bp, Artificial
  Synthetic oligonucleotide
gatggggtgcggttacacaggtacgctccggcgtgcaaacccctcctacgggag

SEQ ID NO: 403709 - DNA, 60 bp, Artificial
  Synthetic oligonucleotide
gatggggttactctttacattttatgggctatgtcattggatgttatgggtcattgccac

SEQ ID NO: 403710 - DNA, 56 bp, Artificial
  Synthetic oligonucleotide
gatgggtaaaactactaaagagttaatcataggtttatattcctgtgtgcaaactc

SEQ ID NO: 403711 - DNA, 60 bp, Artificial
  Synthetic oligonucleotide
gatgggtaactacaagcgcaaggatactaatattcaggcgtactgggaatcatacctcac

SEQ ID NO: 403712 - DNA, 55 bp, Artificial
  Synthetic oligonucleotide
gatgggtaatcactcagcgaagaccctggtccgcttctacttcgatgacggacgc

SEQ ID NO: 403713 - DNA, 59 bp, Artificial
  Synthetic oligonucleotide
gatgggtacatcacgaagaaacatagaggcaacaatagtgggcaaccctcaactgttgt

SEQ ID NO: 403714 - DNA, 57 bp, Artificial
  Synthetic oligonucleotide
gatgggtacctacaccatatgggacttgggtctccaatccactcttaatttcaccat

SEQ ID NO: 403715 - DNA, 60 bp, Artificial
  Synthetic oligonucleotide
gatgggtacctgttgcctgtactctatcacgcaatgatcgatcttcatacatgaacgact

SEQ ID NO: 403716 - DNA, 55 bp, Artificial
  Synthetic oligonucleotide
gatgggtacgatgtggctcaatgcgggatcagaaatacaggtcgctggattcgac

SEQ ID NO: 403717 - DNA, 55 bp, Artificial
  Synthetic oligonucleotide
gatgggtatctagcaataacacagctgcagatagtagtcaaggacgttcacaacc

SEQ ID NO: 403718 - DNA, 55 bp, Artificial
  Synthetic oligonucleotide
gatgggtcacagtttgatagttcgctaacaccatatttaatcaatgcagtgctgg

SEQ ID NO: 403719 - DNA, 51 bp, Artificial
  Synthetic oligonucleotide
gatgggtcctattgatgacccagaaggagaaagactcatgtggcagtttga

SEQ ID NO: 403720 - DNA, 55 bp, Artificial
  Synthetic oligonucleotide
gatgggtcgccatacagctacaatggtggtagtcacacttcccaaggttggccag

SEQ ID NO: 403721 - DNA, 60 bp, Artificial
  Synthetic oligonucleotide
gatgggtctcatgtcagatccggagtggccacgggtccatacgtaggaggccagtcgagc

SEQ ID NO: 403722 - DNA, 60 bp, Artificial
  Synthetic oligonucleotide
gatgggtgaacacaagtctcggttgttgtgcaacatagaggcgaaactgcgagtacttct

SEQ ID NO: 403723 - DNA, 60 bp, Artificial
  Synthetic oligonucleotide
gatgggtgcagaatctagaagtaaagtggaaacatctggttatcaagtaggacagccgat

SEQ ID NO: 403724 - DNA, 56 bp, Artificial
  Synthetic oligonucleotide
gatgggtgcgagagcgtcagtattaagcgggggaaaattagatcaatgggaaaaaa

SEQ ID NO: 403725 - DNA, 60 bp, Artificial
  Synthetic oligonucleotide
gatgggtgcgagagcgtcattattacgcgggggaaaattagatgcatgggagaagattcg

SEQ ID NO: 403726 - DNA, 60 bp, Artificial
  Synthetic oligonucleotide
gatgggtggagatgctaggagttagaggaggccgaagcgaggaggaaagcaaagaaagca

SEQ ID NO: 403727 - DNA, 52 bp, Artificial
  Synthetic oligonucleotide
gatgggtggattaccgtactgaccccatctcgggtaaaagggtcggcacccc

SEQ ID NO: 403728 - DNA, 55 bp, Artificial
  Synthetic oligonucleotide
gatgggtgggactcttacataggcgggtctttcttgtttagctataacccaggcg

SEQ ID NO: 403729 - DNA, 60 bp, Artificial
  Synthetic oligonucleotide
gatgggtggtatggattccgatatcagaattcggaagggacagggcaagctgcagatcta

SEQ ID NO: 403730 - DNA, 55 bp, Artificial
  Synthetic oligonucleotide
gatgggtggtatggtttcagacatcaaaattcacaaggagaggggacggcggctg

SEQ ID NO: 403731 - DNA, 55 bp, Artificial
  Synthetic oligonucleotide
gatgggtggtggatttatgcatggtggtgtcatacataaattgaaccctaccgac

SEQ ID NO: 403732 - DNA, 55 bp, Artificial
  Synthetic oligonucleotide
gatgggtgttttcactgaacctcttctggacaatgagcttggtgttagcatcgcc

SEQ ID NO: 403733 - DNA, 55 bp, Artificial
  Synthetic oligonucleotide
gatgggttcaaagtcttacgagtaatgactgtgtgagaaggtaagccgttctcca

SEQ ID NO: 403734 - DNA, 60 bp, Artificial
  Synthetic oligonucleotide
gatgggttcccctgtgcgtgaatccatggtcgtggcaggctatggatatgaagtatgaac

SEQ ID NO: 403735 - DNA, 60 bp, Artificial
  Synthetic oligonucleotide
gatgggttgggcacaaattcacaaatgcatgatttaaattcacacatacactgattgggt

SEQ ID NO: 403736 - DNA, 51 bp, Artificial
  Synthetic oligonucleotide
gatgggtttgcatttaccagatcacccacgggaaggctgaaaatgacactc

SEQ ID NO: 403737 - DNA, 60 bp, Artificial
  Synthetic oligonucleotide
gatgggtttgtaagagggctacaaacaagagatcagctaatgtcttacattctgagaatg

SEQ ID NO: 403738 - DNA, 55 bp, Artificial
  Synthetic oligonucleotide
gatggtaaggggttacatttgtttattcaatgtttcgcccctaattctgaagcga

SEQ ID NO: 403739 - DNA, 58 bp, Artificial
  Synthetic oligonucleotide
gatggtaaggtttggatggatgacaacgtcgccaaaagagaccataccaatattatta

SEQ ID NO: 403740 - DNA, 59 bp, Artificial
  Synthetic oligonucleotide
gatggtaaggtttggatggatgacaacgtcgccaagagggaccacacgaacatcattac

SEQ ID NO: 403741 - DNA, 55 bp, Artificial
  Synthetic oligonucleotide
gatggtaattattcacagcatggtcctctactgtcaacaccgaaactgtatggag

SEQ ID NO: 403742 - DNA, 55 bp, Artificial
  Synthetic oligonucleotide
gatggtacaggcgatgaggacaattggaactcaacctagctccagtgcaggcctg

SEQ ID NO: 403743 - DNA, 57 bp, Artificial
  Synthetic oligonucleotide
gatggtacctgaacttgggagtgttacatgtaaagtccataataaagcttacacgct

SEQ ID NO: 403744 - DNA, 57 bp, Artificial
  Synthetic oligonucleotide
gatggtactcccgaacgatgtctaaaactaacagaatggggatggaactgtatgtaa

SEQ ID NO: 403745 - DNA, 59 bp, Artificial
  Synthetic oligonucleotide
gatggtactgggtcatgcgacagtccagtcaataatgggaaggggagatacggagtaaa

SEQ ID NO: 403746 - DNA, 55 bp, Artificial
  Synthetic oligonucleotide
gatggtagcatacatgttggaaagagagttggttcgcaaaacgagattcctccca

SEQ ID NO: 403747 - DNA, 55 bp, Artificial
  Synthetic oligonucleotide
gatggtagcctggtgggtaggcatcgagcaagcatttggagtaccatacaacccc

SEQ ID NO: 403748 - DNA, 55 bp, Artificial
  Synthetic oligonucleotide
gatggtaggcacctaaatttacccgacacgccaactccgaaacgtcgtatcaaca

SEQ ID NO: 403749 - DNA, 55 bp, Artificial
  Synthetic oligonucleotide
gatggtagtatgcatccactaatacacgaagaattgaagcagttcaaactcaggg

SEQ ID NO: 403750 - DNA, 55 bp, Artificial
  Synthetic oligonucleotide
gatggtagtcaattcgacagttctttgtcaccatacctcatcaatgccgttttgc

SEQ ID NO: 403751 - DNA, 60 bp, Artificial
  Synthetic oligonucleotide
gatggtatactcgtgggtttgctgagtggtttcactgggtctattgtccactgtatctcc

SEQ ID NO: 403752 - DNA, 59 bp, Artificial
  Synthetic oligonucleotide
gatggtatcacctttggctgtaacgtggtggaacagaaatggaccaacaacaagcacag

SEQ ID NO: 403753 - DNA, 60 bp, Artificial
  Synthetic oligonucleotide
gatggtatggtttccagcatcagaacgaacaggggactggcattgctgcggataaagttt

SEQ ID NO: 403754 - DNA, 59 bp, Artificial
  Synthetic oligonucleotide
gatggtatgtttagccaagctaatgattaaacccagatgtatactcaccgattctacct

SEQ ID NO: 403755 - DNA, 60 bp, Artificial
  Synthetic oligonucleotide
gatggtcaagcacaagttgccacgatggaattggcagaatgaccatttgcgtgcaaggga

SEQ ID NO: 403756 - DNA, 55 bp, Artificial
  Synthetic oligonucleotide
gatggtcaattcacgggatcatgcactagtccaatgggaaatcagggatatgggg

SEQ ID NO: 403757 - DNA, 55 bp, Artificial
  Synthetic oligonucleotide
gatggtcactcgactgcatacctgaagcccatgcaggatgtttcgtgcgcatggt

SEQ ID NO: 403758 - DNA, 60 bp, Artificial
  Synthetic oligonucleotide
gatggtcagagctgatccccaatacaggcacacactcgatcggatcttaccacgcatatt

SEQ ID NO: 403759 - DNA, 53 bp, Artificial
  Synthetic oligonucleotide
gatggtcagccctgttatgagtgtgatcggttttcttgccttggctaaggatt

SEQ ID NO: 403760 - DNA, 60 bp, Artificial
  Synthetic oligonucleotide
gatggtcagtgcacctccttatattattaacgctactgacgcaatgttgcttgaatcctg

SEQ ID NO: 403761 - DNA, 60 bp, Artificial
  Synthetic oligonucleotide
gatggtccacgtgctgggaaaccggtcaacgatgtaactgtgtacatcgccgcaggctca

SEQ ID NO: 403762 - DNA, 53 bp, Artificial
  Synthetic oligonucleotide
gatggtccagcactagttgccatgacggcatcggacgaatgaccatttgtgtg

SEQ ID NO: 403763 - DNA, 51 bp, Artificial
  Synthetic oligonucleotide
gatggtcccggttgccgttccgggagaccaattcgccgtgagggaaagcct

SEQ ID NO: 403764 - DNA, 60 bp, Artificial
  Synthetic oligonucleotide
gatggtcctacgaatcttctgacagtttaccgtgtgcctatgcatacgtgttttctgaag

SEQ ID NO: 403765 - DNA, 60 bp, Artificial
  Synthetic oligonucleotide
gatggtcgtttgaccccagctacagttgcgaaagtgattcagaggccacccactctgact

SEQ ID NO: 403766 - DNA, 55 bp, Artificial
  Synthetic oligonucleotide
gatggtctacaattactgttcttacgccgggcaaaactagtagagaatcaagggt

SEQ ID NO: 403767 - DNA, 58 bp, Artificial
  Synthetic oligonucleotide
gatggtgaacgaggcatggttactattcctattgggggctctcgtaaacttgtatgaa

SEQ ID NO: 403768 - DNA, 55 bp, Artificial
  Synthetic oligonucleotide
gatggtgaatatcgcaacacagtgagtacgagcatcaggtacgaagcgccaacgg

SEQ ID NO: 403769 - DNA, 58 bp, Artificial
  Synthetic oligonucleotide
gatggtgaatgtataatggcttttgattacactaattatgatggtagcatacaccctg

SEQ ID NO: 403770 - DNA, 60 bp, Artificial
  Synthetic oligonucleotide
gatggtgaatgtcttatggcctttgattactccaactatgatggtagtttgaacccagta

SEQ ID NO: 403771 - DNA, 60 bp, Artificial
  Synthetic oligonucleotide
gatggtgacaatacgtggctaggacgaacaataagcactgcttctagatctgggtatgaa

SEQ ID NO: 403772 - DNA, 55 bp, Artificial
  Synthetic oligonucleotide
gatggtgacactctgcctaatatgttcgtttacactgccaacacacagtacgggt

SEQ ID NO: 403773 - DNA, 55 bp, Artificial
  Synthetic oligonucleotide
gatggtgaccactaccaacccactaatcaggcatgaaaacagaatggtgctggcc

SEQ ID NO: 403774 - DNA, 60 bp, Artificial
  Synthetic oligonucleotide
gatggtgacctcaaataagttcatgtatgatcctagccctgtatcagagagagatttcgc

SEQ ID NO: 403775 - DNA, 55 bp, Artificial
  Synthetic oligonucleotide
gatggtgagagattcgtgacaggacctccaacgatgtgggcatatggacagaatg

SEQ ID NO: 403776 - DNA, 60 bp, Artificial
  Synthetic oligonucleotide
gatggtgagcgtgaacagtttggaacggatttccttcaattatgtccaatgccacttcag

SEQ ID NO: 403777 - DNA, 55 bp, Artificial
  Synthetic oligonucleotide
gatggtgcaatagttgggttccacagtttaacaagtatgaacacagaccaaaact

SEQ ID NO: 403778 - DNA, 51 bp, Artificial
  Synthetic oligonucleotide
gatggtgcccagttagaggctaatgggccagagcaatatgtgccgtcgttt

SEQ ID NO: 403779 - DNA, 60 bp, Artificial
  Synthetic oligonucleotide
gatggtgcccatcaaccatatgatgggagtgtttacaagtccactataatcgaacttgaa

SEQ ID NO: 403780 - DNA, 60 bp, Artificial
  Synthetic oligonucleotide
gatggtgctaatcgagttaggcgttctcaaatcatagatgaggatgacgtatttgtgcca

SEQ ID NO: 403781 - DNA, 55 bp, Artificial
  Synthetic oligonucleotide
gatggtgctattgtcaaacagagcccatccaaacaagctgtgacagaagtatgct

SEQ ID NO: 403782 - DNA, 60 bp, Artificial
  Synthetic oligonucleotide
gatggtgcttcaagctagtaccaatggagccagacaaggtagaagaggccaatgaaggag

SEQ ID NO: 403783 - DNA, 55 bp, Artificial
  Synthetic oligonucleotide
gatggtggaaataaccacaataatgataccgagacctttagacctggaggaggag

SEQ ID NO: 403784 - DNA, 60 bp, Artificial
  Synthetic oligonucleotide
gatggtggaacattatcaggaccttgaatggagagggaggcagtataaattcactcttaa

SEQ ID NO: 403785 - DNA, 60 bp, Artificial
  Synthetic oligonucleotide
gatggtggacattcttaggcagaacccaacggaagaacaagctgtggatatatgcaaagc

SEQ ID NO: 403786 - DNA, 59 bp, Artificial
  Synthetic oligonucleotide
gatggtggacgcatcaacgcaaatctcaaacgttagtagaagcttacgactacgcgaat

SEQ ID NO: 403787 - DNA, 55 bp, Artificial
  Synthetic oligonucleotide
gatggtgggtccaagaacgagtccgagcccgagaccttcagacctggaggaggag

SEQ ID NO: 403788 - DNA, 55 bp, Artificial
  Synthetic oligonucleotide
gatggtggtaaccagagcaatgtcactaccgagatcttcagacctggaggaggag

SEQ ID NO: 403789 - DNA, 55 bp, Artificial
  Synthetic oligonucleotide
gatggtggtaataatgaaagcaagcccaccgagaccttcagacctggaggaggag

SEQ ID NO: 403790 - DNA, 60 bp, Artificial
  Synthetic oligonucleotide
gatggtggtaatacttggctaggaaggacaataagcacagcttcaagatccggatacgag

SEQ ID NO: 403791 - DNA, 55 bp, Artificial
  Synthetic oligonucleotide
gatggtggtaatagcgaggacaataccacagagatcttcagacctggaggaggag

SEQ ID NO: 403792 - DNA, 55 bp, Artificial
  Synthetic oligonucleotide
gatggtggtaatgggactaatgacaccaaccccgaggtcgagaccttcagacctg

SEQ ID NO: 403793 - DNA, 55 bp, Artificial
  Synthetic oligonucleotide
gatggtggtaggggcaatgacacggacaataccaccgagatcttcagacctggag

SEQ ID NO: 403794 - DNA, 54 bp, Artificial
  Synthetic oligonucleotide
gatggtggtgaggaactagaactacgtgtgtttgggtccccaaatgtgaccttg

SEQ ID NO: 403795 - DNA, 55 bp, Artificial
  Synthetic oligonucleotide
gatggtggtgaggacaataacagcaccaccgagatcttcagacctggaggaggag

SEQ ID NO: 403796 - DNA, 55 bp, Artificial
  Synthetic oligonucleotide
gatggtgtaaacagatcccatactccttgaattaatcctggctccggcatctatt

SEQ ID NO: 403797 - DNA, 53 bp, Artificial
  Synthetic oligonucleotide
gatggtgtcaaccactaatttcattcccccaatggcagctctggaagataagg

SEQ ID NO: 403798 - DNA, 58 bp, Artificial
  Synthetic oligonucleotide
gatggtgtcacccctagctgtaacctggtggaacagaaatggaccgacaacaagtaca

SEQ ID NO: 403799 - DNA, 57 bp, Artificial
  Synthetic oligonucleotide
gatggtgtcgcccacctctaaagtggagccttgtattgttagtgttacttatggtaa

SEQ ID NO: 403800 - DNA, 60 bp, Artificial
  Synthetic oligonucleotide
gatggtgtggatgccttatccatattgccgggttctcactggatcttacaatgtggatgc

SEQ ID NO: 403801 - DNA, 60 bp, Artificial
  Synthetic oligonucleotide
gatggtgtttagattgttgtcagcacacggatttgacttactgccaaggatgtttaatat

SEQ ID NO: 403802 - DNA, 60 bp, Artificial
  Synthetic oligonucleotide
gatggttaagcatggcgtaagaccatcgcatattgcgcggatggttccattggcggtaga

SEQ ID NO: 403803 - DNA, 60 bp, Artificial
  Synthetic oligonucleotide
gatggttacatgaagattgacctggatttgaataatggagttgattactcaacaattgga

SEQ ID NO: 403804 - DNA, 55 bp, Artificial
  Synthetic oligonucleotide
gatggttaccatggtgaagaagtgggtgctattgatgacttttatggctggctgc

SEQ ID NO: 403805 - DNA, 60 bp, Artificial
  Synthetic oligonucleotide
gatggttatcccaccttcggggagcatctccaagcaaatgacctagattatggccaatgc

SEQ ID NO: 403806 - DNA, 55 bp, Artificial
  Synthetic oligonucleotide
gatggttcaatctttggcaactggaaagcctgtcaaactctcgccttgatgcacg

SEQ ID NO: 403807 - DNA, 51 bp, Artificial
  Synthetic oligonucleotide
gatggttcagattgcacaggcatcggggacaacaatacaacctgtgtatat

SEQ ID NO: 403808 - DNA, 60 bp, Artificial
  Synthetic oligonucleotide
gatggttcagtgggcttatgataatgatctgaaagacgagtctgaaattgcatacaaata

SEQ ID NO: 403809 - DNA, 60 bp, Artificial
  Synthetic oligonucleotide
gatggttcatgcgcgccgctcaagcggtagctgcagtggtgtgtggtccggatatgattc

SEQ ID NO: 403810 - DNA, 53 bp, Artificial
  Synthetic oligonucleotide
gatggttccgtggcgacccctttaaccagagtttcagccgaacaatggggtcg

SEQ ID NO: 403811 - DNA, 56 bp, Artificial
  Synthetic oligonucleotide
gatggttcgtctcctaaattagaaggagttttctctattgttatagttgtggatcg

SEQ ID NO: 403812 - DNA, 55 bp, Artificial
  Synthetic oligonucleotide
gatggttctaatatctctacacaatggcctagccggaggaatgatggtgttgttc

SEQ ID NO: 403813 - DNA, 54 bp, Artificial
  Synthetic oligonucleotide
gatggttctaccatcgaaatgccgaatgttgataagtctctcggcctacaaaac

SEQ ID NO: 403814 - DNA, 59 bp, Artificial
  Synthetic oligonucleotide
gatggttgcgactacgttggaacatagatttgaagatataccagacaaaaaacttgcta

SEQ ID NO: 403815 - DNA, 60 bp, Artificial
  Synthetic oligonucleotide
gatggttgcgtgccattttgcgattcttaggtgccggaatggcgatgactgcgactggag

SEQ ID NO: 403816 - DNA, 51 bp, Artificial
  Synthetic oligonucleotide
gatggttggatcaaaaaatttacagagatgtgtaatgcagctaggggccta

SEQ ID NO: 403817 - DNA, 55 bp, Artificial
  Synthetic oligonucleotide
gatggttgggaattcggtataacgctcggtaagatgtcaatacgagttatgaaaa

SEQ ID NO: 403818 - DNA, 57 bp, Artificial
  Synthetic oligonucleotide
gatggttgttcaacatggagaccgacgggcggattggttcggacattcctccctcga

SEQ ID NO: 403819 - DNA, 55 bp, Artificial
  Synthetic oligonucleotide
gatggtttaccagcaacacgattcaacgcttacagtggcttgctgccaaccttcg

SEQ ID NO: 403820 - DNA, 60 bp, Artificial
  Synthetic oligonucleotide
gatggtttataggtacagacttgctcttagtgtgatggatgagctaaggaccttgttccc

SEQ ID NO: 403821 - DNA, 55 bp, Artificial
  Synthetic oligonucleotide
gatggtttcgtttgcatccgctagcaagttagatacgaacaagtcaatgccgtat

SEQ ID NO: 403822 - DNA, 51 bp, Artificial
  Synthetic oligonucleotide
gatggtttctagattgttatgggtgactcaaggcactgcagaccgagaaaa

SEQ ID NO: 403823 - DNA, 55 bp, Artificial
  Synthetic oligonucleotide
gatggtttggattacatggatcgtattcccttagccacctctgaaggatttcctc

SEQ ID NO: 403824 - DNA, 55 bp, Artificial
  Synthetic oligonucleotide
gatgtaaactctgatatgcacacactacttggagtgcgcaacatgtaaggcgcgt

SEQ ID NO: 403825 - DNA, 55 bp, Artificial
  Synthetic oligonucleotide
gatgtaaataggaacatgcacaacctgctgggtgttaggggtgtctgatgccccg

SEQ ID NO: 403826 - DNA, 57 bp, Artificial
  Synthetic oligonucleotide
gatgtaaatgttttagtgggaactccgcttcagatgaactaggttttagttcaatgc

SEQ ID NO: 403827 - DNA, 59 bp, Artificial
  Synthetic oligonucleotide
gatgtaacagcaaatgataagtggaaatacctgcatagcagactaaaggtgtttacctt

SEQ ID NO: 403828 - DNA, 60 bp, Artificial
  Synthetic oligonucleotide
gatgtaactacaagttacacatatatgctatcggatgaagtatacgtagcaaacataagt

SEQ ID NO: 403829 - DNA, 60 bp, Artificial
  Synthetic oligonucleotide
gatgtaactacctccgaatctacagatccatacagcaaatatcgcttctgggatatagat

SEQ ID NO: 403830 - DNA, 55 bp, Artificial
  Synthetic oligonucleotide
gatgtaagacacaacaagaagagcttgtttgaaatgtcgaacgtatttcacttgc

SEQ ID NO: 403831 - DNA, 60 bp, Artificial
  Synthetic oligonucleotide
gatgtaagagcaaatctaaagaatctgcgagggtccagaagcaacgctggaatgtttcag

SEQ ID NO: 403832 - DNA, 60 bp, Artificial
  Synthetic oligonucleotide
gatgtaagtgcttacgtcttgagccatagagattgcctatataaggtaacctcactagtt

SEQ ID NO: 403833 - DNA, 55 bp, Artificial
  Synthetic oligonucleotide
gatgtaatcgcatcttacccctggcctatcgatgcttccttacttgctgaggcgg

SEQ ID NO: 403834 - DNA, 60 bp, Artificial
  Synthetic oligonucleotide
gatgtaatggaaaagtgtacaatctaagagaccaaattgctcagttgtctccatttcaag

SEQ ID NO: 403835 - DNA, 59 bp, Artificial
  Synthetic oligonucleotide
gatgtaattataatacggaacaagtgtaagtatgaggtgaaagaggagatattagaata

SEQ ID NO: 403836 - DNA, 60 bp, Artificial
  Synthetic oligonucleotide
gatgtacaaatctctgatgaagtttggtgagtcgatgcctcggtttacagatatgtctac

SEQ ID NO: 403837 - DNA, 60 bp, Artificial
  Synthetic oligonucleotide
gatgtacaactctcactgcgttctcttatatggagttgaaagtggggtatatcaccacta

SEQ ID NO: 403838 - DNA, 60 bp, Artificial
  Synthetic oligonucleotide
gatgtacaccccaggaggagaagtgagaaatgatgatgttgaccaaagtttgattatcgc

SEQ ID NO: 403839 - DNA, 60 bp, Artificial
  Synthetic oligonucleotide
gatgtacactccaggaggggaagtaagaaatgatgatgttgaccaaagcttaattattgc

SEQ ID NO: 403840 - DNA, 50 bp, Artificial
  Synthetic oligonucleotide
gatgtacaggaacctcacaaagtattagttcctaaggtttcaggaagtca

SEQ ID NO: 403841 - DNA, 60 bp, Artificial
  Synthetic oligonucleotide
gatgtacatactgcttggatctatgttaggagtaccctatggattggtgagatacctacg

SEQ ID NO: 403842 - DNA, 55 bp, Artificial
  Synthetic oligonucleotide
gatgtacatgaaagaaacgtactaagtttgtggggctcgaagtgttcgcgagaaa

SEQ ID NO: 403843 - DNA, 55 bp, Artificial
  Synthetic oligonucleotide
gatgtaccagactatgaatcactcaggtctctaattgcttcctcaggaaccctag

SEQ ID NO: 403844 - DNA, 60 bp, Artificial
  Synthetic oligonucleotide
gatgtaccatgtcacgaacgactgccccaacgcaagcattgtgtatgaggcggcggacgt

SEQ ID NO: 403845 - DNA, 55 bp, Artificial
  Synthetic oligonucleotide
gatgtaccggatatagattcggctgacgaaactcatctgccaattgggtctgttg

SEQ ID NO: 403846 - DNA, 55 bp, Artificial
  Synthetic oligonucleotide
gatgtacgcactacatcaagggacgaccattagaaacaagcactcaaacggaaca

SEQ ID NO: 403847 - DNA, 51 bp, Artificial
  Synthetic oligonucleotide
gatgtacgctagtcaccaactgtgtgataaaggggagagaagttcgtaagg

SEQ ID NO: 403848 - DNA, 55 bp, Artificial
  Synthetic oligonucleotide
gatgtacgtgaatgatttaccggcggtggcgagagtagacttattatacggaata

SEQ ID NO: 403849 - DNA, 60 bp, Artificial
  Synthetic oligonucleotide
gatgtacgtttgaatcgcatactctgtagtacagcttccatggaattggatctttgaggg

SEQ ID NO: 403850 - DNA, 60 bp, Artificial
  Synthetic oligonucleotide
gatgtactagcatagaagactggatgatgacagatccagacagttatatagaaatgatgg

SEQ ID NO: 403851 - DNA, 60 bp, Artificial
  Synthetic oligonucleotide
gatgtactccccggtgcgaaaatccatatccatgacagttaatactgaggtaatatgagc

SEQ ID NO: 403852 - DNA, 60 bp, Artificial
  Synthetic oligonucleotide
gatgtactcccctgtcttcgagtacttatcaggtgacagacaagtagaagagtggcccaa

SEQ ID NO: 403853 - DNA, 60 bp, Artificial
  Synthetic oligonucleotide
gatgtactggtcgcagtttgcctcgaagtagctcagctgcgccggagtcatgtccctcag

SEQ ID NO: 403854 - DNA, 60 bp, Artificial
  Synthetic oligonucleotide
gatgtacttccatcgacgtgatctcaggctggctgccaacgccatttgttcagcagttcc

SEQ ID NO: 403855 - DNA, 59 bp, Artificial
  Synthetic oligonucleotide
gatgtactttgatcaccaactgcgtcataaagggaagagaggtcaggaaggggcagtcg

SEQ ID NO: 403856 - DNA, 50 bp, Artificial
  Synthetic oligonucleotide
gatgtagaaacaaacccgggccctaacttttcaaagttttgtgtccaagg

SEQ ID NO: 403857 - DNA, 56 bp, Artificial
  Synthetic oligonucleotide
gatgtagaagtattttaagcgattgaaacgaatgggagtggattaattctaccctc

SEQ ID NO: 403858 - DNA, 58 bp, Artificial
  Synthetic oligonucleotide
gatgtagacttagttgtagagtacgagagaaattgcgtgtggttcgatttatccgccc

SEQ ID NO: 403859 - DNA, 50 bp, Artificial
  Synthetic oligonucleotide
gatgtagagcatgcagtctctgcaatctcaagttgagctagtttaagctc

SEQ ID NO: 403860 - DNA, 60 bp, Artificial
  Synthetic oligonucleotide
gatgtagatcagtctccagacatgttgaacgcggctgagatcaatatggaattcgagcag

SEQ ID NO: 403861 - DNA, 60 bp, Artificial
  Synthetic oligonucleotide
gatgtagatggtgagatgtacaatgagtatacaatgttaattagagatgaaatagtcaag

SEQ ID NO: 403862 - DNA, 53 bp, Artificial
  Synthetic oligonucleotide
gatgtagcacttgccgtctagcgcgtcctccaaccggctaatcagcacacccg

SEQ ID NO: 403863 - DNA, 60 bp, Artificial
  Synthetic oligonucleotide
gatgtagcattgagattaccttgcaaccaattagatctaataacttgtctattagtggtg

SEQ ID NO: 403864 - DNA, 60 bp, Artificial
  Synthetic oligonucleotide
gatgtagcctctcagccactagccaccactctaattggtgaaatatccagctattacact

SEQ ID NO: 403865 - DNA, 55 bp, Artificial
  Synthetic oligonucleotide
gatgtaggactggccgcaaggccacctatagtaattgaacctgtgggggcgtccg

SEQ ID NO: 403866 - DNA, 58 bp, Artificial
  Synthetic oligonucleotide
gatgtaggagatgcttatttttcatgtcccttagatgaagattttagaaagtatacag

SEQ ID NO: 403867 - DNA, 55 bp, Artificial
  Synthetic oligonucleotide
gatgtaggagtggtcgattgcgacgcatttgaggaagctatcattagagttattg

SEQ ID NO: 403868 - DNA, 60 bp, Artificial
  Synthetic oligonucleotide
gatgtaggcatgacacagaagtccaactttccaactttaggcttttgcttcacacaatca

SEQ ID NO: 403869 - DNA, 55 bp, Artificial
  Synthetic oligonucleotide
gatgtaggtgtgaagttacaccactacaaccatctctaccaggatactcgcccca

SEQ ID NO: 403870 - DNA, 60 bp, Artificial
  Synthetic oligonucleotide
gatgtaggtgttccaccatccaggttttgacgatcctgagatgatccatgtgtggactga

SEQ ID NO: 403871 - DNA, 54 bp, Artificial
  Synthetic oligonucleotide
gatgtagtacaaatgggcaaagataatagtagctataggttgacaagttgtaac

SEQ ID NO: 403872 - DNA, 55 bp, Artificial
  Synthetic oligonucleotide
gatgtagtatgcagtggaggttcttacagttttgcgttgcctgtaggcaatcatc

SEQ ID NO: 403873 - DNA, 55 bp, Artificial
  Synthetic oligonucleotide
gatgtagtcaaaccagaatacgatagagtggaagaggaacttcagcgcgtgcgag

SEQ ID NO: 403874 - DNA, 50 bp, Artificial
  Synthetic oligonucleotide
gatgtagtcagtggtgtatactagaagcagaatgttctgacaatagttta

SEQ ID NO: 403875 - DNA, 60 bp, Artificial
  Synthetic oligonucleotide
gatgtagttcatatagggaaggtcatgtgtattagtgatgtgactcgtggtacggggtta

SEQ ID NO: 403876 - DNA, 52 bp, Artificial
  Synthetic oligonucleotide
gatgtagttggggctaacccgaggtcgccgatactgtagctggcgagggcag

SEQ ID NO: 403877 - DNA, 56 bp, Artificial
  Synthetic oligonucleotide
gatgtagtttagtctattcctgtgttaggcgtttctacgatgtacgctcttttacg

SEQ ID NO: 403878 - DNA, 55 bp, Artificial
  Synthetic oligonucleotide
gatgtatactcctcctgatggatcatccggtatagtctttgtggcaacagtctcg

SEQ ID NO: 403879 - DNA, 60 bp, Artificial
  Synthetic oligonucleotide
gatgtatatgcatacggagatgtatcaaagtggacgatacggcaattacgaggtcatggg

SEQ ID NO: 403880 - DNA, 60 bp, Artificial
  Synthetic oligonucleotide
gatgtatcactttagattcactgaatgtcagaaatgtctgtactgggatgatttctatag

SEQ ID NO: 403881 - DNA, 60 bp, Artificial
  Synthetic oligonucleotide
gatgtatcacttttcccttggatagatataatgcttgatttatcgtatgctgttgatggg

SEQ ID NO: 403882 - DNA, 55 bp, Artificial
  Synthetic oligonucleotide
gatgtatcagttcgacatgacaacctctgagattgaacaagtaggatatggctac

SEQ ID NO: 403883 - DNA, 60 bp, Artificial
  Synthetic oligonucleotide
gatgtatcattagcttatcggggtcgagtcagaactggttcaaaaccaattactatcatg

SEQ ID NO: 403884 - DNA, 54 bp, Artificial
  Synthetic oligonucleotide
gatgtatccccgtcggcgacttgcaaccggtcccttgtactctcctaggttggg

SEQ ID NO: 403885 - DNA, 50 bp, Artificial
  Synthetic oligonucleotide
gatgtatcgttcagtcaaagatatgttcgctgccatcgaatacataccag

SEQ ID NO: 403886 - DNA, 58 bp, Artificial
  Synthetic oligonucleotide
gatgtatctagagttccggacgaccaaatgtatagattaagggatagattacgcttat

SEQ ID NO: 403887 - DNA, 60 bp, Artificial
  Synthetic oligonucleotide
gatgtatcttgtgcgtcaacccaccatgtccgtacttcgcgagtactcccaagtccctga

SEQ ID NO: 403888 - DNA, 60 bp, Artificial
  Synthetic oligonucleotide
gatgtatggaaatagatcagagtgaattaattgacacctgtagtggtcttgtaaaaaagc

SEQ ID NO: 403889 - DNA, 56 bp, Artificial
  Synthetic oligonucleotide
gatgtatggttttgaccctcaggaatacaaccttatccgctttgttgacccactta

SEQ ID NO: 403890 - DNA, 60 bp, Artificial
  Synthetic oligonucleotide
gatgtatgtagataactgatttgctaacctgatgagagcaaaggtttcatttgctagacg

SEQ ID NO: 403891 - DNA, 60 bp, Artificial
  Synthetic oligonucleotide
gatgtattaatgtccgtggatgtcaggataccgcgtgaagtgacaaagaacatagacgtc

SEQ ID NO: 403892 - DNA, 60 bp, Artificial
  Synthetic oligonucleotide
gatgtattcccctgtgcgtgaatccgtgatcatggcagttgatcgatatataatacgaac

SEQ ID NO: 403893 - DNA, 55 bp, Artificial
  Synthetic oligonucleotide
gatgtattcgttagtgacgtcgatcctttaccacccagcctccccggtgagtcga

SEQ ID NO: 403894 - DNA, 60 bp, Artificial
  Synthetic oligonucleotide
gatgtattgtggaacatagtcccacagtaggttgtcacatcctgtcagccccagatcaga

SEQ ID NO: 403895 - DNA, 57 bp, Artificial
  Synthetic oligonucleotide
gatgtattgtttaacatcggatgcagattttgctccctggaagttggggtggaaggt

SEQ ID NO: 403896 - DNA, 51 bp, Artificial
  Synthetic oligonucleotide
gatgtattttttattcgagggtgtgttgatggcttgaatttgggaaagtgc

SEQ ID NO: 403897 - DNA, 54 bp, Artificial
  Synthetic oligonucleotide
gatgtcaacaaatccactgtagcaattgaatggagactcaggtggaatggtcgt

SEQ ID NO: 403898 - DNA, 53 bp, Artificial
  Synthetic oligonucleotide
gatgtcaacccgagggggcctatccagatcctgaactagagtatagaaatata

SEQ ID NO: 403899 - DNA, 55 bp, Artificial
  Synthetic oligonucleotide
gatgtcaaggcagatgataggtggctatatttgcacagccgcctggtcaccttcc

SEQ ID NO: 403900 - DNA, 55 bp, Artificial
  Synthetic oligonucleotide
gatgtcaatatgtatatcaggcccgaacaacaatgcatcagcagtgatctggtac

SEQ ID NO: 403901 - DNA, 55 bp, Artificial
  Synthetic oligonucleotide
gatgtcacaagagggacgctgaggcgagcgacaccgtaggagtgaaaagcccgag

SEQ ID NO: 403902 - DNA, 50 bp, Artificial
  Synthetic oligonucleotide
gatgtcacacgaggtaatgggctgacccatcgtgttgggaagagattttg

SEQ ID NO: 403903 - DNA, 60 bp, Artificial
  Synthetic oligonucleotide
gatgtcacagttagaattagagaggaggaacctgcgttaatcgcctggctcaagtccatc

SEQ ID NO: 403904 - DNA, 55 bp, Artificial
  Synthetic oligonucleotide
gatgtcacatctacaacatgtacaatacggaattgtaataaactaggaccgagag

SEQ ID NO: 403905 - DNA, 52 bp, Artificial
  Synthetic oligonucleotide
gatgtcaccaaaccgcgttcccaattacaacttgttcgttatggatgaggct

SEQ ID NO: 403906 - DNA, 50 bp, Artificial
  Synthetic oligonucleotide
gatgtcaccgcgagacatcgttcccgtgtttgcgggccgagacgccatac

SEQ ID NO: 403907 - DNA, 59 bp, Artificial
  Synthetic oligonucleotide
gatgtcaccgtatacccgctcccggatggggctaactcgttgacaccctgcacttgcca

SEQ ID NO: 403908 - DNA, 56 bp, Artificial
  Synthetic oligonucleotide
gatgtcacgactaccacttgtactattagaaattgtaaaaagttgggaccacgaga

SEQ ID NO: 403909 - DNA, 56 bp, Artificial
  Synthetic oligonucleotide
gatgtcactcgtggaaccgggctgacccatagagttggtaagcgtttttgtgttaa

SEQ ID NO: 403910 - DNA, 60 bp, Artificial
  Synthetic oligonucleotide
gatgtcactcttttaacgtgtttactgtcattaggtgcggcttgtgctagctcaggtgtt

SEQ ID NO: 403911 - DNA, 57 bp, Artificial
  Synthetic oligonucleotide
gatgtcagagcactcaatcagaggtaaactaaatatgtgcactgcaacccaaatgtg

SEQ ID NO: 403912 - DNA, 53 bp, Artificial
  Synthetic oligonucleotide
gatgtcagtattgatgatcgtttgctcaatcgcagagctgccttttatagtaa

SEQ ID NO: 403913 - DNA, 60 bp, Artificial
  Synthetic oligonucleotide
gatgtcagtgtcaaaagccttgtgcgccatggatacttggtacacttctacgggagtagg

SEQ ID NO: 403914 - DNA, 60 bp, Artificial
  Synthetic oligonucleotide
gatgtcagtgttgatatgcaccgtgtcgcgtcaatctacgttgaggttgatagtgtaaca

SEQ ID NO: 403915 - DNA, 58 bp, Artificial
  Synthetic oligonucleotide
gatgtcagttaggttaagactggtatatttaagtgtaggatagttaggagacagtctg

SEQ ID NO: 403916 - DNA, 55 bp, Artificial
  Synthetic oligonucleotide
gatgtcatccggtatgagccaaaagagcaccagaatactcgcgatgagattgcgg

SEQ ID NO: 403917 - DNA, 60 bp, Artificial
  Synthetic oligonucleotide
gatgtcatcctcttatgttaagttcttcactgaagtgaagcctcgacccccatcaacaaa

SEQ ID NO: 403918 - DNA, 55 bp, Artificial
  Synthetic oligonucleotide
gatgtcatgcgcggagcgaatgacttatttgataacatgcctcagtacgttatgc

SEQ ID NO: 403919 - DNA, 60 bp, Artificial
  Synthetic oligonucleotide
gatgtcatggagagcaaactcatgaagagtttgtgtcccgaattcgacaaatgacggttt

SEQ ID NO: 403920 - DNA, 55 bp, Artificial
  Synthetic oligonucleotide
gatgtcattaagatagcgtgtaggaacgcagggtacaaggaagcatgtttacatg

SEQ ID NO: 403921 - DNA, 60 bp, Artificial
  Synthetic oligonucleotide
gatgtcatttgtcaagaatccgacggatacagggcatggcacagttgtcatgcaagtaaa

SEQ ID NO: 403922 - DNA, 58 bp, Artificial
  Synthetic oligonucleotide
gatgtccaaaagatcacgatcactaaattctgccgcgttctattatagggtttaggta

SEQ ID NO: 403923 - DNA, 55 bp, Artificial
  Synthetic oligonucleotide
gatgtccaacgcactggaatcccaccagatctcccagcaaatccaaatgttggtt

SEQ ID NO: 403924 - DNA, 55 bp, Artificial
  Synthetic oligonucleotide
gatgtccacaactgataccttttggggcatagggaccgacaattacgacttcatg

SEQ ID NO: 403925 - DNA, 57 bp, Artificial
  Synthetic oligonucleotide
gatgtcccacttcaatggatcgcgtcagctatagtcctggaatttttcatgatggtg

SEQ ID NO: 403926 - DNA, 55 bp, Artificial
  Synthetic oligonucleotide
gatgtcccagaaaagaaaggtgaatcctcaaagtgcgtggccgaagaagaggagg

SEQ ID NO: 403927 - DNA, 55 bp, Artificial
  Synthetic oligonucleotide
gatgtcccagacgcgtggaacgctgtgaaaacagtgttcggggatgcccctggag

SEQ ID NO: 403928 - DNA, 59 bp, Artificial
  Synthetic oligonucleotide
gatgtccccctctcacaacgcgcactaggaggttcaacatgttagtggccccacgatgt

SEQ ID NO: 403929 - DNA, 55 bp, Artificial
  Synthetic oligonucleotide
gatgtccctaacaacaaacccacaggacaaggtcaacaatcagctagtgaccgaa

SEQ ID NO: 403930 - DNA, 57 bp, Artificial
  Synthetic oligonucleotide
gatgtccgacaccaactccaaggcttccacttttgtatcgtttgaccttgactatgt

SEQ ID NO: 403931 - DNA, 59 bp, Artificial
  Synthetic oligonucleotide
gatgtccgagacgttacgtgttgacgccgtcgttccttgtgaattactgacagaccaca

SEQ ID NO: 403932 - DNA, 55 bp, Artificial
  Synthetic oligonucleotide
gatgtccgggctaaggctgcaacctttgatagtgctgtatggcgacaatgggtga

SEQ ID NO: 403933 - DNA, 60 bp, Artificial
  Synthetic oligonucleotide
gatgtcgacgtattcataggtgcttgttccgaaccaatctatcgcatatacaataggttg

SEQ ID NO: 403934 - DNA, 52 bp, Artificial
  Synthetic oligonucleotide
gatgtcgcacattctctctctagacggtgcgttcttgatttggagacaagta

SEQ ID NO: 403935 - DNA, 55 bp, Artificial
  Synthetic oligonucleotide
gatgtcgcgccaagcttggatcgagactagtgcactgattgaacgcatttcggag

SEQ ID NO: 403936 - DNA, 60 bp, Artificial
  Synthetic oligonucleotide
gatgtcggactctcctgatagttggatgagacagtgtaaatgagggaacccgtctgaatg

SEQ ID NO: 403937 - DNA, 53 bp, Artificial
  Synthetic oligonucleotide
gatgtcggatactgtatccaaagcatccacatttgtatcgtttgatcttgact

SEQ ID NO: 403938 - DNA, 60 bp, Artificial
  Synthetic oligonucleotide
gatgtcggcaaagaacaatgatggtgagtcggcaaaatgcccaattcatccggatgttgc

SEQ ID NO: 403939 - DNA, 55 bp, Artificial
  Synthetic oligonucleotide
gatgtcgtctcggtaatcctctctgcggacccacacgaattccgggtacgccctc

SEQ ID NO: 403940 - DNA, 57 bp, Artificial
  Synthetic oligonucleotide
gatgtcgtggtcggaaacctatggttgctggacgaaggaagtggaggaactaatggc

SEQ ID NO: 403941 - DNA, 60 bp, Artificial
  Synthetic oligonucleotide
gatgtctaagctaaaagctgttcgtgctatatgcttcggtgattcggaacaaattgcttt

SEQ ID NO: 403942 - DNA, 55 bp, Artificial
  Synthetic oligonucleotide
gatgtctaatagtagtgtgcctctttcagaggtttatgtccatttacgtaactgg

SEQ ID NO: 403943 - DNA, 55 bp, Artificial
  Synthetic oligonucleotide
gatgtctacgcacaaataccactgcgtatgccctatgcgcagcgcagaagacccc

SEQ ID NO: 403944 - DNA, 55 bp, Artificial
  Synthetic oligonucleotide
gatgtctagtccgttgtcccgacagtcgtttgttaactgcaaacgattgtgtgcc

SEQ ID NO: 403945 - DNA, 60 bp, Artificial
  Synthetic oligonucleotide
gatgtctatccgcgaactactcgacgacggcttgtttgtgcaaatcggatcagccctgcg

SEQ ID NO: 403946 - DNA, 58 bp, Artificial
  Synthetic oligonucleotide
gatgtctatgttaacggcgaaactccagcaaagatcggtgacgccaaactaactatag

SEQ ID NO: 403947 - DNA, 55 bp, Artificial
  Synthetic oligonucleotide
gatgtctcaatctatcgtggtggacatgatgcaaggatcagatgatagtagcatg

SEQ ID NO: 403948 - DNA, 55 bp, Artificial
  Synthetic oligonucleotide
gatgtctccttctgcctaaacccaagcgcttcgcacagtggctactcgacgtgcc

SEQ ID NO: 403949 - DNA, 52 bp, Artificial
  Synthetic oligonucleotide
gatgtctctagaaccaactgcagactgtggagtggaaaaaggctttacaacg

SEQ ID NO: 403950 - DNA, 55 bp, Artificial
  Synthetic oligonucleotide
gatgtctctatgcaaatgtggagagatcaggtggcgcagaaattgatcactaacc

SEQ ID NO: 403951 - DNA, 60 bp, Artificial
  Synthetic oligonucleotide
gatgtctcttggacaagcaatagtatagttactttctgtggattagacaatgaacctgga

SEQ ID NO: 403952 - DNA, 60 bp, Artificial
  Synthetic oligonucleotide
gatgtctgatacgatgtctaaggcgtccaattttgtatcgtttgatctcgattatatcgg

SEQ ID NO: 403953 - DNA, 60 bp, Artificial
  Synthetic oligonucleotide
gatgtctgatcatatgtccaaggcatctacatttgtatcatttgacctcgactatgtcgg

SEQ ID NO: 403954 - DNA, 55 bp, Artificial
  Synthetic oligonucleotide
gatgtctgcacttgacaacgtgatatcatgctgcacacggcgcaaggctattgcc

SEQ ID NO: 403955 - DNA, 50 bp, Artificial
  Synthetic oligonucleotide
gatgtctggacactatgtaccgatctatgatgtatcactttagattcact

SEQ ID NO: 403956 - DNA, 60 bp, Artificial
  Synthetic oligonucleotide
gatgtctgtccaacctcggatctacttgcccacgattcattcggcccaatcgctagatgt

SEQ ID NO: 403957 - DNA, 55 bp, Artificial
  Synthetic oligonucleotide
gatgtctgtgataacattctagtttatgtcgctagttacaatgaggttgaccagt

SEQ ID NO: 403958 - DNA, 60 bp, Artificial
  Synthetic oligonucleotide
gatgtctgtgcaactctccagcaatctttaattgcggatctttgaacactaccactgtaa

SEQ ID NO: 403959 - DNA, 55 bp, Artificial
  Synthetic oligonucleotide
gatgtcttgtcagttcacagctctccgttacctatagctgcctgaagctcttcat

SEQ ID NO: 403960 - DNA, 55 bp, Artificial
  Synthetic oligonucleotide
gatgtgaaacctaagactgatttaacaccgcaatttgaatactcagctctacaga

SEQ ID NO: 403961 - DNA, 53 bp, Artificial
  Synthetic oligonucleotide
gatgtgaacatggacggagtaatttcgaagatagagggtgtgttctctcttgt

SEQ ID NO: 403962 - DNA, 59 bp, Artificial
  Synthetic oligonucleotide
gatgtgaagggccctgtaaagtccagtcttatgagcaacggggtgatattaagcacacc

SEQ ID NO: 403963 - DNA, 60 bp, Artificial
  Synthetic oligonucleotide
gatgtgaagttgtcatcagatcaagctcgtctaatggaggatgtggtatgggaacgttac

SEQ ID NO: 403964 - DNA, 60 bp, Artificial
  Synthetic oligonucleotide
gatgtgacaaattactcggtgatcgaagttggtcatacatagtagagaggcctgacgccc

SEQ ID NO: 403965 - DNA, 55 bp, Artificial
  Synthetic oligonucleotide
gatgtgacacttaacatagaggagaatttaacattcgatgctttcgtacaagcgc

SEQ ID NO: 403966 - DNA, 54 bp, Artificial
  Synthetic oligonucleotide
gatgtgacagcaacgttcgactggttgtgcagtgtacagaaacagacatcagag

SEQ ID NO: 403967 - DNA, 58 bp, Artificial
  Synthetic oligonucleotide
gatgtgacatcccaaagttgaaaatgtatcccgccaaataccaagtggtcccatctgg

SEQ ID NO: 403968 - DNA, 57 bp, Artificial
  Synthetic oligonucleotide
gatgtgacgctcccgtcccattgatccttaacttttcaattatggcccttacgctat

SEQ ID NO: 403969 - DNA, 60 bp, Artificial
  Synthetic oligonucleotide
gatgtgacgtctgcggtagaatgggcgggcatatctacctcgtctaatctgaaatgtagc

SEQ ID NO: 403970 - DNA, 60 bp, Artificial
  Synthetic oligonucleotide
gatgtgacgtctgcggtagtaggggcgggcatatcttcgcctaaactgaaatatagcgca

SEQ ID NO: 403971 - DNA, 60 bp, Artificial
  Synthetic oligonucleotide
gatgtgacgtctgcggtagtatgggcgggtatatcgtcgtctgacctgagatatagcgca

SEQ ID NO: 403972 - DNA, 60 bp, Artificial
  Synthetic oligonucleotide
gatgtgacgtctgcggtagtatgggcgggtccatcttcgtctaatctgaaatatagcgca

SEQ ID NO: 403973 - DNA, 60 bp, Artificial
  Synthetic oligonucleotide
gatgtgacgtctgcggtattgtgggcgggcatatcttcttctctgaaatgtagcgcatgc

SEQ ID NO: 403974 - DNA, 55 bp, Artificial
  Synthetic oligonucleotide
gatgtgactgtgttaggaagcttgttacaattagatttccaaaaccccagagtct

SEQ ID NO: 403975 - DNA, 55 bp, Artificial
  Synthetic oligonucleotide
gatgtgatcaacgactacgtgttcatcaagacgcacctgggttcgaaattgggga

SEQ ID NO: 403976 - DNA, 59 bp, Artificial
  Synthetic oligonucleotide
gatgtgatggacgaacacatttctagcacgtggaatgcggttattaggaggcacatgtt

SEQ ID NO: 403977 - DNA, 57 bp, Artificial
  Synthetic oligonucleotide
gatgtgattaccttggggaccgccgcagtaccgggaatcccgtcactgacagttgag

SEQ ID NO: 403978 - DNA, 55 bp, Artificial
  Synthetic oligonucleotide
gatgtgcaaggtgtaagccggttgctcataccagtaaaagctcaggagacagtgg

SEQ ID NO: 403979 - DNA, 55 bp, Artificial
  Synthetic oligonucleotide
gatgtgcaatccgcaattgctaagctgagtcaaatcgtgagtgagccaagcgggc

SEQ ID NO: 403980 - DNA, 60 bp, Artificial
  Synthetic oligonucleotide
gatgtgccacagcacacagatcggtgggataaggatggtggacatccttaggcaaaatcc

SEQ ID NO: 403981 - DNA, 54 bp, Artificial
  Synthetic oligonucleotide
gatgtgcccggttacactttcgaaccagggcaacactcatccggttttgaaccc

SEQ ID NO: 403982 - DNA, 59 bp, Artificial
  Synthetic oligonucleotide
gatgtgccggattattcctcccttaggtcactagttgcctcatcaggcaccctggagtt

SEQ ID NO: 403983 - DNA, 55 bp, Artificial
  Synthetic oligonucleotide
gatgtgcgggctgcggcaatgccgaccccaagtattccggaaccgagcaggcaaa

SEQ ID NO: 403984 - DNA, 55 bp, Artificial
  Synthetic oligonucleotide
gatgtgcgtaccctggagcccattcaattgcctcttcttgacgtgcgtcgagttc

SEQ ID NO: 403985 - DNA, 60 bp, Artificial
  Synthetic oligonucleotide
gatgtgcgtgactgaatcaattttggagtttaatatgtggtaccgaatgcgtgaagagag

SEQ ID NO: 403986 - DNA, 55 bp, Artificial
  Synthetic oligonucleotide
gatgtgctcagggtgagccctgaaaatgacgttgacagaataaaggtgccgaaat

SEQ ID NO: 403987 - DNA, 56 bp, Artificial
  Synthetic oligonucleotide
gatgtgcttactgtccccgataagatccccgctatgctgcgacattggatggatga

SEQ ID NO: 403988 - DNA, 55 bp, Artificial
  Synthetic oligonucleotide
gatgtgctttgaattttgagctaactcctttcttcaccacccatttaatccgcca

SEQ ID NO: 403989 - DNA, 60 bp, Artificial
  Synthetic oligonucleotide
gatgtgctttggctttctctcaccgctgccgagtatgaccagtccacttacggctcttcg

SEQ ID NO: 403990 - DNA, 55 bp, Artificial
  Synthetic oligonucleotide
gatgtggaaaggcgctctgggaaaagacggttataaactcagttatgatccggct

SEQ ID NO: 403991 - DNA, 55 bp, Artificial
  Synthetic oligonucleotide
gatgtggaaatgtctcatacggcttaagcctgtacttacagggcccacacccctg

SEQ ID NO: 403992 - DNA, 55 bp, Artificial
  Synthetic oligonucleotide
gatgtggaagtgtctcatcagactcaaacccacccttaccggccccactccactc

SEQ ID NO: 403993 - DNA, 60 bp, Artificial
  Synthetic oligonucleotide
gatgtggacttttcgggaagggaagcattgacacatgtgcaaaattctcctgcactagta

SEQ ID NO: 403994 - DNA, 60 bp, Artificial
  Synthetic oligonucleotide
gatgtggaggtatgaagataagtggtcagctccatctaatatatttgcattcgctctcca

SEQ ID NO: 403995 - DNA, 60 bp, Artificial
  Synthetic oligonucleotide
gatgtggatataatgtcatcattatatactacattcagaacggtaagtacattgttactg

SEQ ID NO: 403996 - DNA, 60 bp, Artificial
  Synthetic oligonucleotide
gatgtggatgatggtgacgtatcagagtaatgtcgttggtgggtgtagtgtaactgttat

SEQ ID NO: 403997 - DNA, 60 bp, Artificial
  Synthetic oligonucleotide
gatgtggatgcttcaatgtcaacccatcttgcttatttgttcatacttccctaaagagca

SEQ ID NO: 403998 - DNA, 60 bp, Artificial
  Synthetic oligonucleotide
gatgtggcacaatggacgtaaggtgtatgaggatttttccagtaagatacgcagtgtcag

SEQ ID NO: 403999 - DNA, 55 bp, Artificial
  Synthetic oligonucleotide
gatgtggcactttccagcaaaacggccggtcaaacagccgtcccaagtacccagg

SEQ ID NO: 404000 - DNA, 55 bp, Artificial
  Synthetic oligonucleotide
gatgtggccggtcggagagtcacctaagggagtggaggaaggttccatcgggaag

SEQ ID NO: 404001 - DNA, 60 bp, Artificial
  Synthetic oligonucleotide
gatgtggcgcatgctcttggcattaccatagtgagcttccaggttgggaaacctggactg

SEQ ID NO: 404002 - DNA, 55 bp, Artificial
  Synthetic oligonucleotide
gatgtggcggcctagtgaaaaccaggtatatgtgcctcctcccgccccagtatcc

SEQ ID NO: 404003 - DNA, 60 bp, Artificial
  Synthetic oligonucleotide
gatgtggctccgattgagcacattgcaagcatgagaaggaattatttcacagcagaggtg

SEQ ID NO: 404004 - DNA, 60 bp, Artificial
  Synthetic oligonucleotide
gatgtggctgaacgcgggatcagagattcaggtcgctgggtttgattattcatgtgcgat

SEQ ID NO: 404005 - DNA, 57 bp, Artificial
  Synthetic oligonucleotide
gatgtgggaaattaacggtccagagtcggtattagttaacacataccaatggatcat

SEQ ID NO: 404006 - DNA, 55 bp, Artificial
  Synthetic oligonucleotide
gatgtgggagattaacggaccagaatcagtgctagttaacacatatcagtggatc

SEQ ID NO: 404007 - DNA, 51 bp, Artificial
  Synthetic oligonucleotide
gatgtgggggatgcatacttttcagttcccttagacaaagaatttaggaaa

SEQ ID NO: 404008 - DNA, 55 bp, Artificial
  Synthetic oligonucleotide
gatgtggtaaatcctgctgttggtgtaaattgggtcctctgttttgattatcgtg

SEQ ID NO: 404009 - DNA, 55 bp, Artificial
  Synthetic oligonucleotide
gatgtggtaagtaccccaatctaaagaaaccaacagtttggcgtagaggacacta

SEQ ID NO: 404010 - DNA, 58 bp, Artificial
  Synthetic oligonucleotide
gatgtggtaccaattagtaatgggaataagactagttataggctaatacattgtaatg

SEQ ID NO: 404011 - DNA, 54 bp, Artificial
  Synthetic oligonucleotide
gatgtggtcgcggtgtacgaacttctaagagcccggggttgaacgcccggtgtg

SEQ ID NO: 404012 - DNA, 56 bp, Artificial
  Synthetic oligonucleotide
gatgtggtgaaaataatgaaggatatgaaacgagaactgtttgaaatggatgttac

SEQ ID NO: 404013 - DNA, 60 bp, Artificial
  Synthetic oligonucleotide
gatgtggttaaatgcaggatcagaaattcaggtcgctggatttgactattcatgcgctat

SEQ ID NO: 404014 - DNA, 55 bp, Artificial
  Synthetic oligonucleotide
gatgtggtttgacctcactgcttgaacgttgtataggcggacaaggaatcctgac

SEQ ID NO: 404015 - DNA, 58 bp, Artificial
  Synthetic oligonucleotide
gatgtgtacacaaccatcacagtgttgctgaaaccagtttagaaaacttcttcggaag

SEQ ID NO: 404016 - DNA, 55 bp, Artificial
  Synthetic oligonucleotide
gatgtgtacagaactcaaactcagtgacaatgaagggaggctgatccagaacagt

SEQ ID NO: 404017 - DNA, 60 bp, Artificial
  Synthetic oligonucleotide
gatgtgtcactgctttgtcaaatggtatccacagtggacttcatacctccaatggcttct

SEQ ID NO: 404018 - DNA, 50 bp, Artificial
  Synthetic oligonucleotide
gatgtgtgaccattatggccccagacaagcccacaatagatttggaacta

SEQ ID NO: 404019 - DNA, 53 bp, Artificial
  Synthetic oligonucleotide
gatgtgtgatcacccagctttgtcaagatcaagcgaaatttttaaagtgaacg

SEQ ID NO: 404020 - DNA, 53 bp, Artificial
  Synthetic oligonucleotide
gatgtgtggccaaacgttaaatttttctgggccgggcttctgtaaaccaacac

SEQ ID NO: 404021 - DNA, 55 bp, Artificial
  Synthetic oligonucleotide
gatgtgttaaagctagataacgacgactatttaagctattacgaactagaagcgg

SEQ ID NO: 404022 - DNA, 55 bp, Artificial
  Synthetic oligonucleotide
gatgtgttcacatcctgcaacggatctttgtacttccacctacccacttcagggg

SEQ ID NO: 404023 - DNA, 55 bp, Artificial
  Synthetic oligonucleotide
gatgtgttcccaggaaggaaagaacctgccgccttgcacccaaaggatcatagac

SEQ ID NO: 404024 - DNA, 60 bp, Artificial
  Synthetic oligonucleotide
gatgtgttgagtatgataatggttggtatcaactatgtgttaagatacaacgcgctatcg

SEQ ID NO: 404025 - DNA, 55 bp, Artificial
  Synthetic oligonucleotide
gatgtgttgttagcagccaatcgtgagactgcaaaggatgcgaagaccagcgggg

SEQ ID NO: 404026 - DNA, 55 bp, Artificial
  Synthetic oligonucleotide
gatgtgtttgagggtaccaaggaaccagctgtactatcagacagagatccacgcc

SEQ ID NO: 404027 - DNA, 55 bp, Artificial
  Synthetic oligonucleotide
gatgttaaacctccagccctccgtgatcgcaaaatcttaggtaacaggtcggcca

SEQ ID NO: 404028 - DNA, 52 bp, Artificial
  Synthetic oligonucleotide
gatgttaagcatctttggaggcccaagctaaaaggggtggaatacagggtgg

SEQ ID NO: 404029 - DNA, 60 bp, Artificial
  Synthetic oligonucleotide
gatgttaaggaacttgtatgctgagattatatacacccccatattaacagcagatggcac

SEQ ID NO: 404030 - DNA, 52 bp, Artificial
  Synthetic oligonucleotide
gatgttaagtagacttagaaagggctataggcctgttttctcttcccccccc

SEQ ID NO: 404031 - DNA, 60 bp, Artificial
  Synthetic oligonucleotide
gatgttaatgtcggttttttctcatgaggactatttgattgcgagagagctaatagtatt

SEQ ID NO: 404032 - DNA, 54 bp, Artificial
  Synthetic oligonucleotide
gatgttaattgttgggggtttgaaacgtatgtccgtggaatgtttggccgagga

SEQ ID NO: 404033 - DNA, 58 bp, Artificial
  Synthetic oligonucleotide
gatgttacgataaacccaggaccatttgctcaaactggatacgctccagtgaactggg

SEQ ID NO: 404034 - DNA, 55 bp, Artificial
  Synthetic oligonucleotide
gatgttacgcgtggaactgggctgactcaccgagtgggtaaaaggttttgtgtta

SEQ ID NO: 404035 - DNA, 56 bp, Artificial
  Synthetic oligonucleotide
gatgttactaagggagttggtttgacccatcgcactgggaagcggtttactatcaa

SEQ ID NO: 404036 - DNA, 55 bp, Artificial
  Synthetic oligonucleotide
gatgttactactgcgacctgtactatcagaaattgtaagaaattggggccaaggg

SEQ ID NO: 404037 - DNA, 55 bp, Artificial
  Synthetic oligonucleotide
gatgttactcactacggtggttacgaccgattttcgcgtgatgtattcgaactac

SEQ ID NO: 404038 - DNA, 55 bp, Artificial
  Synthetic oligonucleotide
gatgttactcgtgggactgggctgacccatcgagtgggtaaaaggttttgtgtta

SEQ ID NO: 404039 - DNA, 56 bp, Artificial
  Synthetic oligonucleotide
gatgttactcgtggtattgggcttacccacagggtaggcaagagattttgtgttaa

SEQ ID NO: 404040 - DNA, 60 bp, Artificial
  Synthetic oligonucleotide
gatgttaggattttggttcagcccggtattgcctccgagctagtcatccccagtgagcgc

SEQ ID NO: 404041 - DNA, 59 bp, Artificial
  Synthetic oligonucleotide
gatgttatcaactattcgactttaattcaccagatctagaaaagctgattagaataccg

SEQ ID NO: 404042 - DNA, 60 bp, Artificial
  Synthetic oligonucleotide
gatgttatcagcagccgggataaatgtcggaccaatatcaccggattacacacagcatat

SEQ ID NO: 404043 - DNA, 55 bp, Artificial
  Synthetic oligonucleotide
gatgttatcgcgaggacagccggtaatttactgagagcagactgatgcggccttc

SEQ ID NO: 404044 - DNA, 60 bp, Artificial
  Synthetic oligonucleotide
gatgttatgacatatattcatagtatgaacccgtccattttagaggattggaattttggc

SEQ ID NO: 404045 - DNA, 60 bp, Artificial
  Synthetic oligonucleotide
gatgttatgccagcccttgccgtggagctttgtcagacctgtactgcaggttgcgacagg

SEQ ID NO: 404046 - DNA, 59 bp, Artificial
  Synthetic oligonucleotide
gatgttcaaaaattcgctgatctagtaactgaatctccagtcatttctgcaataataga

SEQ ID NO: 404047 - DNA, 58 bp, Artificial
  Synthetic oligonucleotide
gatgttcaaaagcccagatgtacctaggggatgtgaaggcccatgtaaggttcaatcg

SEQ ID NO: 404048 - DNA, 60 bp, Artificial
  Synthetic oligonucleotide
gatgttcaaggctacgtaagatcgcaggttcagacaatgataacaaaggtgagtcgtgga

SEQ ID NO: 404049 - DNA, 57 bp, Artificial
  Synthetic oligonucleotide
gatgttcaataggtcgtataaacctgaagacgtctggatgctattacttacgtctag

SEQ ID NO: 404050 - DNA, 60 bp, Artificial
  Synthetic oligonucleotide
gatgttcattgctgtgagcgtgtagtctgtctatctgatggtgtaacaccggagataaat

SEQ ID NO: 404051 - DNA, 60 bp, Artificial
  Synthetic oligonucleotide
gatgttccccgtggatgtgaaggcccatgtaaagtccaatcttatgagcaacgggatgat

SEQ ID NO: 404052 - DNA, 53 bp, Artificial
  Synthetic oligonucleotide
gatgttcctcctttccaccattgtatttggggacgccagttattagggcgttt

SEQ ID NO: 404053 - DNA, 53 bp, Artificial
  Synthetic oligonucleotide
gatgttcctcgttgaagttaagaacaaacttgatagatacgaggtctcgaagc

SEQ ID NO: 404054 - DNA, 51 bp, Artificial
  Synthetic oligonucleotide
gatgttctatctaaaatagatacaacagtgtttgcgagtatcgttaaagac

SEQ ID NO: 404055 - DNA, 60 bp, Artificial
  Synthetic oligonucleotide
gatgttctccctcccttgccgcttgctcacacccacacatttaattcggcctcttgtgac

SEQ ID NO: 404056 - DNA, 55 bp, Artificial
  Synthetic oligonucleotide
gatgttctgaatgggcaactcaaagaaccagtttactctacaaagctgtgccggc

SEQ ID NO: 404057 - DNA, 53 bp, Artificial
  Synthetic oligonucleotide
gatgttctgccaacatatttgaatcagcaccgggaacggttagtaggaaactg

SEQ ID NO: 404058 - DNA, 57 bp, Artificial
  Synthetic oligonucleotide
gatgttcttccttgttcgggatcgacgtcctgttgacaaacctcaggattttggtga

SEQ ID NO: 404059 - DNA, 55 bp, Artificial
  Synthetic oligonucleotide
gatgttgaaggggaaagaagatgttatgtagattttgaagcagaggctgttaagt

SEQ ID NO: 404060 - DNA, 54 bp, Artificial
  Synthetic oligonucleotide
gatgttgaatcctcttccatggtatctcccgctaccgttgttggctatttaatg

SEQ ID NO: 404061 - DNA, 55 bp, Artificial
  Synthetic oligonucleotide
gatgttgaccagagtttgatcattgctgctagaaacctcgttaggagagcaacgg

SEQ ID NO: 404062 - DNA, 53 bp, Artificial
  Synthetic oligonucleotide
gatgttgaccccaatttgaattgttgggaacctgtgtataacaccggtttacc

SEQ ID NO: 404063 - DNA, 60 bp, Artificial
  Synthetic oligonucleotide
gatgttgaggagaatttgtacgtcaactcgctgcatactagttgctcgtatacgatctca

SEQ ID NO: 404064 - DNA, 60 bp, Artificial
  Synthetic oligonucleotide
gatgttgagtgaacttttcttagtgtcaatcatattcagaattggatgactctgagacaa

SEQ ID NO: 404065 - DNA, 53 bp, Artificial
  Synthetic oligonucleotide
gatgttgatgttgtgtactttgacgatgtgctcaccactgacggaattacgat

SEQ ID NO: 404066 - DNA, 59 bp, Artificial
  Synthetic oligonucleotide
gatgttgccctacttacagggattccatcttgatagatagtttctgttataacatttcc

SEQ ID NO: 404067 - DNA, 56 bp, Artificial
  Synthetic oligonucleotide
gatgttgccctttaatatgtggtaaagcagtagtctttaaagatagaaacacaggg

SEQ ID NO: 404068 - DNA, 55 bp, Artificial
  Synthetic oligonucleotide
gatgttgccttctatctgagtgctaaggagttttacaaagttaaaggaatacctc

SEQ ID NO: 404069 - DNA, 60 bp, Artificial
  Synthetic oligonucleotide
gatgttgcggaaaagcaggcacgattctcccgggaatctgggtcgacagcacacaaggta

SEQ ID NO: 404070 - DNA, 51 bp, Artificial
  Synthetic oligonucleotide
gatgttgcggcgtcgggaaaggccgttaaattttctccgatggtggctaca

SEQ ID NO: 404071 - DNA, 56 bp, Artificial
  Synthetic oligonucleotide
gatgttgcgtaaggttgatcccacttttgtggacaaccggctattatgggaagctg

SEQ ID NO: 404072 - DNA, 60 bp, Artificial
  Synthetic oligonucleotide
gatgttgctacaaatttaatgatgtacgtgaatgatttaccggcggtggcgagagtagac

SEQ ID NO: 404073 - DNA, 55 bp, Artificial
  Synthetic oligonucleotide
gatgttgctagcaaagagagatccgactactgtccccttggttgtaacggtggca

SEQ ID NO: 404074 - DNA, 59 bp, Artificial
  Synthetic oligonucleotide
gatgttgctgcgactggaaaggcagttaagttttccccgatggttgctaccctcgctca

SEQ ID NO: 404075 - DNA, 55 bp, Artificial
  Synthetic oligonucleotide
gatgttggaagtggctccattaattgaatctgtttatgcgtcggagttatcagtg

SEQ ID NO: 404076 - DNA, 50 bp, Artificial
  Synthetic oligonucleotide
gatgttggacaagagaaccaggctattacgactgtataacgccggcacct

SEQ ID NO: 404077 - DNA, 55 bp, Artificial
  Synthetic oligonucleotide
gatgttggatctttatttgtgagaccagttagagtgcccatacaagattttccgc

SEQ ID NO: 404078 - DNA, 55 bp, Artificial
  Synthetic oligonucleotide
gatgttggattgccctccatacatacaccaagtaaaaccaagcttcaacctagtg

SEQ ID NO: 404079 - DNA, 57 bp, Artificial
  Synthetic oligonucleotide
gatgttggatttaagtgccgaggtcatcgaaacggcggctgaggaggtaccaatctt

SEQ ID NO: 404080 - DNA, 55 bp, Artificial
  Synthetic oligonucleotide
gatgttggcatagcaccaatcaatacacccagtaaaacaaaattgtaccctagcg

SEQ ID NO: 404081 - DNA, 58 bp, Artificial
  Synthetic oligonucleotide
gatgttgggtcagtgtttcctgataagttggctactatatttgatattcccgataacg

SEQ ID NO: 404082 - DNA, 57 bp, Artificial
  Synthetic oligonucleotide
gatgttggttcagtgtttcctactaagttatcgagtatatttgatattcccgataac

SEQ ID NO: 404083 - DNA, 59 bp, Artificial
  Synthetic oligonucleotide
gatgttgtcaagagatttcgctcggcaaataagcaggggagtgattgttaccggagttc

SEQ ID NO: 404084 - DNA, 58 bp, Artificial
  Synthetic oligonucleotide
gatgttgtgtctcgagtctacggagtcagtcccgggctggtacataaccttattggta

SEQ ID NO: 404085 - DNA, 55 bp, Artificial
  Synthetic oligonucleotide
gatgttgttcacgtctggattaagtgatttctcatcacatcttgtatgcgcaggc

SEQ ID NO: 404086 - DNA, 58 bp, Artificial
  Synthetic oligonucleotide
gatgttgttcgagagctggtgtaaagcttactgccgtaatccaaaagaggtggtgccc

SEQ ID NO: 404087 - DNA, 60 bp, Artificial
  Synthetic oligonucleotide
gatgtttaacgacacaatcccatacagtgctgaggttttagctacagttacacgtcacag

SEQ ID NO: 404088 - DNA, 56 bp, Artificial
  Synthetic oligonucleotide
gatgtttatgactactacaaagacttgggatacacccccaaccgagcaggcctaac

SEQ ID NO: 404089 - DNA, 55 bp, Artificial
  Synthetic oligonucleotide
gatgtttcaggtataaccctgaagcaggcaactactgcaccctgtgctgttatgg

SEQ ID NO: 404090 - DNA, 55 bp, Artificial
  Synthetic oligonucleotide
gatgtttccatgcactcaacgatcggaatcaaacctgctttcagtgttggtaatc

SEQ ID NO: 404091 - DNA, 58 bp, Artificial
  Synthetic oligonucleotide
gatgtttcccctcatactccacgaggtttgtgagtctcccagataactacgtcgcctg

SEQ ID NO: 404092 - DNA, 60 bp, Artificial
  Synthetic oligonucleotide
gatgtttcgcgatttgtgccgatacgctagtcagatagtggttggtagcacagtgctggc

SEQ ID NO: 404093 - DNA, 55 bp, Artificial
  Synthetic oligonucleotide
gatgtttctggcacctatgcggtttacggccgtcagcttgaggctctatatagag

SEQ ID NO: 404094 - DNA, 59 bp, Artificial
  Synthetic oligonucleotide
gatgtttgacgaccaaggtgtgatacccgagcttaattgtcagtggaggaagattagga

SEQ ID NO: 404095 - DNA, 55 bp, Artificial
  Synthetic oligonucleotide
gatgtttgatcggcggggagttgtagcccatctgagagaagccattttgcgtcag

SEQ ID NO: 404096 - DNA, 60 bp, Artificial
  Synthetic oligonucleotide
gatgtttgcacgctctggaccaggtgggcatttatggattctgtcatctggcgcgcctaa

SEQ ID NO: 404097 - DNA, 60 bp, Artificial
  Synthetic oligonucleotide
gatgtttggcaccgttgtagcatcgggagccggcgcagactatgaccccggcgtcgctgc

SEQ ID NO: 404098 - DNA, 59 bp, Artificial
  Synthetic oligonucleotide
gatgtttgtaggagaccctttcagtcctcctagtgacccgaccgactgtgatctctcaa

SEQ ID NO: 404099 - DNA, 60 bp, Artificial
  Synthetic oligonucleotide
gatgtttgttggtcccctgctactaatgtagattctatatatgtggcttgtgttgctact

SEQ ID NO: 404100 - DNA, 55 bp, Artificial
  Synthetic oligonucleotide
gatgttttaaattccagcaatgttgctgagggtgtaaccataccggtaaatgccg

SEQ ID NO: 404101 - DNA, 59 bp, Artificial
  Synthetic oligonucleotide
gatgttttatcttgttcgtgacagaaggccctatggtactgctatggatttcggtcagg

SEQ ID NO: 404102 - DNA, 56 bp, Artificial
  Synthetic oligonucleotide
gatgttttgtaaagaggccataaataagggggtgtgtgacgctattagcgcccaac

SEQ ID NO: 404103 - DNA, 57 bp, Artificial
  Synthetic oligonucleotide
gatgtttttgagaggcggagagacggttgaacggcatgtgaaattgaaggttaacgc

SEQ ID NO: 404104 - DNA, 60 bp, Artificial
  Synthetic oligonucleotide
gattaaaacagaggctagatatgtcaggaattcaagtggagtcttctcaaacaatgtggc

SEQ ID NO: 404105 - DNA, 56 bp, Artificial
  Synthetic oligonucleotide
gattaaacctagatgtatactttccgattctacctttgtttgccacaagcgttatc

SEQ ID NO: 404106 - DNA, 55 bp, Artificial
  Synthetic oligonucleotide
gattaaacgtaaccaagatggcaattggttaggtgatcacctttctaataagggc

SEQ ID NO: 404107 - DNA, 55 bp, Artificial
  Synthetic oligonucleotide
gattaaagtgggaacctactactaagggagctagtgctgctagattaggtaaggc

SEQ ID NO: 404108 - DNA, 55 bp, Artificial
  Synthetic oligonucleotide
gattaacacgatcgtgggcgtcttcattgggttgttctggacgaatgtccctccc

SEQ ID NO: 404109 - DNA, 55 bp, Artificial
  Synthetic oligonucleotide
gattaacactgaaggaatcattgttgtgcacggaattgctggaactgggaaaacc

SEQ ID NO: 404110 - DNA, 56 bp, Artificial
  Synthetic oligonucleotide
gattaacagcacagggaatctaatcgcccctcggggttacttcaagatacgaagtg

SEQ ID NO: 404111 - DNA, 59 bp, Artificial
  Synthetic oligonucleotide
gattaacccgggtacacccagatagctgcctcaaggatcacataggctacagtacccag

SEQ ID NO: 404112 - DNA, 59 bp, Artificial
  Synthetic oligonucleotide
gattaaccgagcaatacattgttatgttatacttatttgatcctttcttcacagctaat

SEQ ID NO: 404113 - DNA, 58 bp, Artificial
  Synthetic oligonucleotide
gattaacctacgccatgacatcacatatgatcagttatgttctatccaccatcacgac

SEQ ID NO: 404114 - DNA, 60 bp, Artificial
  Synthetic oligonucleotide
gattaacgcgcggacaatgtgagcatttgatacgacatatgatcagttatcatattaaca

SEQ ID NO: 404115 - DNA, 55 bp, Artificial
  Synthetic oligonucleotide
gattaacggcggggaccgccaagattagccgaactggcaataattcacgggctct

SEQ ID NO: 404116 - DNA, 60 bp, Artificial
  Synthetic oligonucleotide
gattaactggcctctgtacttaaagtgcatgatgtattatatgtatactcagagctccca

SEQ ID NO: 404117 - DNA, 58 bp, Artificial
  Synthetic oligonucleotide
gattaacttagcattaatgtgcgacaatcaactcgattcaaatggtaactttgtttgg

SEQ ID NO: 404118 - DNA, 59 bp, Artificial
  Synthetic oligonucleotide
gattaagaattgtagaggcgatgaattataaaccagcgagaaacgatggaatcgttgta

SEQ ID NO: 404119 - DNA, 53 bp, Artificial
  Synthetic oligonucleotide
gattaagacacaacttaaacctgtcgaagatacgtctcaattgttcgagagac

SEQ ID NO: 404120 - DNA, 58 bp, Artificial
  Synthetic oligonucleotide
gattaagagtagttccagttgatcttttcaattctatgcttagtgtttcttcgagcgg

SEQ ID NO: 404121 - DNA, 56 bp, Artificial
  Synthetic oligonucleotide
gattaagcgtgatgttaagcctaaacttgacttatcacctcaatctgaatatggtg

SEQ ID NO: 404122 - DNA, 55 bp, Artificial
  Synthetic oligonucleotide
gattaaggatacgcagggccgctacatcttgggtaaccctcagggtgtcttggct

SEQ ID NO: 404123 - DNA, 55 bp, Artificial
  Synthetic oligonucleotide
gattaaggcctctggtgtttcaaagggatctgaagacttttgcagcactcacagt

SEQ ID NO: 404124 - DNA, 55 bp, Artificial
  Synthetic oligonucleotide
gattaataagacggtgagctatcctgagatggctcaatttacaactcgaggtggt

SEQ ID NO: 404125 - DNA, 51 bp, Artificial
  Synthetic oligonucleotide
gattaatacgggtttactatataaggggtggtgggttcaattactaactac

SEQ ID NO: 404126 - DNA, 60 bp, Artificial
  Synthetic oligonucleotide
gattaatagttagtaacaagtatgagcctttgatggctcctcttgttaattgtattcatg

SEQ ID NO: 404127 - DNA, 57 bp, Artificial
  Synthetic oligonucleotide
gattaatcggctaaaattaaaggtacaaagtggagatgagacaattagaaatcttgc

SEQ ID NO: 404128 - DNA, 55 bp, Artificial
  Synthetic oligonucleotide
gattaatcgtcaagagcaatctaaaggatggacgtttaacatcgaagaaggagct

SEQ ID NO: 404129 - DNA, 60 bp, Artificial
  Synthetic oligonucleotide
gattaatctctagcagtggcggccgaacagggactagaaagcgaaagtgagaccagagga

SEQ ID NO: 404130 - DNA, 60 bp, Artificial
  Synthetic oligonucleotide
gattaatgaggcaatgcaactatgaatatacgtatgaatagtcacataatataatcacaa

SEQ ID NO: 404131 - DNA, 58 bp, Artificial
  Synthetic oligonucleotide
gattaatgattcaactacagtggaaccagttttagatggtccttatcaacccactaca

SEQ ID NO: 404132 - DNA, 55 bp, Artificial
  Synthetic oligonucleotide
gattaatgccgcgggtctggtaactttcaataccgcgggcaactatgccgttcgc

SEQ ID NO: 404133 - DNA, 52 bp, Artificial
  Synthetic oligonucleotide
gattaatgcgggtttattataagggtggtaagtgggtttcaattactaacta

SEQ ID NO: 404134 - DNA, 51 bp, Artificial
  Synthetic oligonucleotide
gattaatggaagatatagggagtgggtataatgcggaggatttaactacac

SEQ ID NO: 404135 - DNA, 51 bp, Artificial
  Synthetic oligonucleotide
gattaatgtaggagataggatcaaatttagcttgtgacaagcagcctcaga

SEQ ID NO: 404136 - DNA, 60 bp, Artificial
  Synthetic oligonucleotide
gattaattcagggtagtgttcactcaataatgacaggtgattcgtatggtgaaagtgtga

SEQ ID NO: 404137 - DNA, 60 bp, Artificial
  Synthetic oligonucleotide
gattaatttgccaataacaggatcgatggacactacatatgcaaattctacacagaatga

SEQ ID NO: 404138 - DNA, 55 bp, Artificial
  Synthetic oligonucleotide
gattacaaagagaatagattcatcgagattggagtgacaaggagggaagttcaca

SEQ ID NO: 404139 - DNA, 55 bp, Artificial
  Synthetic oligonucleotide
gattacaaggagaacagattcatcgaaattggagtgacaagaagagaagtccaca

SEQ ID NO: 404140 - DNA, 60 bp, Artificial
  Synthetic oligonucleotide
gattacaaggagagccgattcattgaaattggagtgacgcgaagggaggtccacatatac

SEQ ID NO: 404141 - DNA, 60 bp, Artificial
  Synthetic oligonucleotide
gattacaatagggatctccttgtcagcacaactaccgctcacggatgtgataccatcgcc

SEQ ID NO: 404142 - DNA, 60 bp, Artificial
  Synthetic oligonucleotide
gattacaatgtagtactaatgaaatatgatgctacgctacagctagatatgtcagagctc

SEQ ID NO: 404143 - DNA, 57 bp, Artificial
  Synthetic oligonucleotide
gattacacaaaaaacttccactttcactctaaaagggtcactgcacacggagacaca

SEQ ID NO: 404144 - DNA, 55 bp, Artificial
  Synthetic oligonucleotide
gattacaccaattatgatggcagtatacaccctgtttggtttgaagctctgaagc

SEQ ID NO: 404145 - DNA, 60 bp, Artificial
  Synthetic oligonucleotide
gattacagaggtggacgaatacatgaaagaggctgtagatcattatgcaggccaattgat

SEQ ID NO: 404146 - DNA, 60 bp, Artificial
  Synthetic oligonucleotide
gattacagatatacataccggtgccatagaggggacacacaaattcaaacgaggagatca

SEQ ID NO: 404147 - DNA, 60 bp, Artificial
  Synthetic oligonucleotide
gattacagctgcttataaactaagcgcctctgatagaatgtgcagactgagacttccgga

SEQ ID NO: 404148 - DNA, 55 bp, Artificial
  Synthetic oligonucleotide
gattacaggtaagagacctatcgagtacattgaagagtgctgtaacacgtatgat

SEQ ID NO: 404149 - DNA, 55 bp, Artificial
  Synthetic oligonucleotide
gattacaggttgcagttggtagtttagggaacggcaactgccgtcttctcgaagc

SEQ ID NO: 404150 - DNA, 60 bp, Artificial
  Synthetic oligonucleotide
gattacatacataaccagaaatcagcccgaatggttcagaaatgttctaagtgttgctcc

SEQ ID NO: 404151 - DNA, 57 bp, Artificial
  Synthetic oligonucleotide
gattacataggccggctataacatctaggcgtggtgttgttaggtttagtagaattg

SEQ ID NO: 404152 - DNA, 55 bp, Artificial
  Synthetic oligonucleotide
gattacatccgtgagataacgctcactgttccaaagcagtacaggcctagaagat

SEQ ID NO: 404153 - DNA, 50 bp, Artificial
  Synthetic oligonucleotide
gattacatgagttacagaagaacgtctcagttgacggtttcagcccatga

SEQ ID NO: 404154 - DNA, 60 bp, Artificial
  Synthetic oligonucleotide
gattacatgagttcactaaagagatatgaagacacaactttggttgaggacacagtactg

SEQ ID NO: 404155 - DNA, 56 bp, Artificial
  Synthetic oligonucleotide
gattaccaacagcatttggtacatacaacccggaagtgggcactcgtttgttggcc

SEQ ID NO: 404156 - DNA, 51 bp, Artificial
  Synthetic oligonucleotide
gattaccactatgatctactgcaagcacagaggtacggtattgaagatggg

SEQ ID NO: 404157 - DNA, 54 bp, Artificial
  Synthetic oligonucleotide
gattaccagagtttgagaagcatacttgccaataatgggaaatttgaattcatt

SEQ ID NO: 404158 - DNA, 56 bp, Artificial
  Synthetic oligonucleotide
gattaccagggaaggctgtgtaatcctctgaacccgtttgtcagtcataaggaaat

SEQ ID NO: 404159 - DNA, 55 bp, Artificial
  Synthetic oligonucleotide
gattaccagggcagactgtgtaatcctctgaatccgctcgtcagccataaggaaa

SEQ ID NO: 404160 - DNA, 53 bp, Artificial
  Synthetic oligonucleotide
gattaccagtcggtaatcggaccaaggttctcttcgcaattttccgcgtttag

SEQ ID NO: 404161 - DNA, 55 bp, Artificial
  Synthetic oligonucleotide
gattaccatatcctaaaggacgatcgtatgcttgggaagagagtggaacttgcgt

SEQ ID NO: 404162 - DNA, 55 bp, Artificial
  Synthetic oligonucleotide
gattaccatcgaagggggaatagactctcgcctgcatcgaatattctcccagcga

SEQ ID NO: 404163 - DNA, 60 bp, Artificial
  Synthetic oligonucleotide
gattaccatcggatattgatcaagatgtccccggtctgtctcttaactttgtaggatggc

SEQ ID NO: 404164 - DNA, 56 bp, Artificial
  Synthetic oligonucleotide
gattaccattatgtgcgggtattgacccattaaactcggatccttttctcaaaatg

SEQ ID NO: 404165 - DNA, 56 bp, Artificial
  Synthetic oligonucleotide
gattaccattggctacggaccgtaaagaccaccaaggagtctctcgttattatatc

SEQ ID NO: 404166 - DNA, 51 bp, Artificial
  Synthetic oligonucleotide
gattacccctgccaccttggtgaacattcagagaacgaacattgaaggcaa

SEQ ID NO: 404167 - DNA, 54 bp, Artificial
  Synthetic oligonucleotide
gattaccgggggtccctttcctctcatgccaacgtgggtacaagggagtctggc

SEQ ID NO: 404168 - DNA, 55 bp, Artificial
  Synthetic oligonucleotide
gattacctagcaagggtgaagcctccctttcaaccgaagcgtccagcctcgcccg

SEQ ID NO: 404169 - DNA, 50 bp, Artificial
  Synthetic oligonucleotide
gattacctatatatatgacaccgggttcaggccagttcatgacaactgac

SEQ ID NO: 404170 - DNA, 60 bp, Artificial
  Synthetic oligonucleotide
gattacctgcgaggccgtgcagacgttagtaactctagtggcgcagatatccgagaccca

SEQ ID NO: 404171 - DNA, 55 bp, Artificial
  Synthetic oligonucleotide
gattaccttcggggaaagcaaccagacccggagatgttgaaagatccgctctgtt

SEQ ID NO: 404172 - DNA, 53 bp, Artificial
  Synthetic oligonucleotide
gattacctttcccactgtttgaacttgtacgaaacgtgtaatctttcgtctaa

SEQ ID NO: 404173 - DNA, 56 bp, Artificial
  Synthetic oligonucleotide
gattacgaacagtggtcaatcccttacgtcatcccggcgagtaaccataagtacac

SEQ ID NO: 404174 - DNA, 55 bp, Artificial
  Synthetic oligonucleotide
gattacgacatcactcttcagatcatgaatcctattgaacatagggtttcgcgcg

SEQ ID NO: 404175 - DNA, 58 bp, Artificial
  Synthetic oligonucleotide
gattacgagttacaaggacctgaggaccttgcagtggaactcgttcctatagtgatgg

SEQ ID NO: 404176 - DNA, 56 bp, Artificial
  Synthetic oligonucleotide
gattacgattgtcaaaaagtttactactaatacaccacaccaagtcaccaccatac

SEQ ID NO: 404177 - DNA, 55 bp, Artificial
  Synthetic oligonucleotide
gattacgcaaagtgtatagtggtaactggtatactatccaaagagctctactccc

SEQ ID NO: 404178 - DNA, 56 bp, Artificial
  Synthetic oligonucleotide
gattacgcactatcgatgaaaggctaatcgttgctctctcgttgtatagagacaaa

SEQ ID NO: 404179 - DNA, 60 bp, Artificial
  Synthetic oligonucleotide
gattacgcctactaggcagacgatgtatgtcgactctatacaggcggccctaaaagctct

SEQ ID NO: 404180 - DNA, 55 bp, Artificial
  Synthetic oligonucleotide
gattacgcgatttatagctgtgaagaagtacactatgtggggagcggtgacggac

SEQ ID NO: 404181 - DNA, 57 bp, Artificial
  Synthetic oligonucleotide
gattacgcgggtctgtaccacatttatttgtaaaggcgtcctccacgtggcattgga

SEQ ID NO: 404182 - DNA, 60 bp, Artificial
  Synthetic oligonucleotide
gattacgctatgaaaatatcgtgcactagagacccaggagataaagcatcattcagagtg

SEQ ID NO: 404183 - DNA, 55 bp, Artificial
  Synthetic oligonucleotide
gattacggacgtacgcaccgccgagatccttttgcggccgcactcgattgtaggg

SEQ ID NO: 404184 - DNA, 59 bp, Artificial
  Synthetic oligonucleotide
gattacggatacaagtttcagtacgggtggactcgaacagcggagcaagtaatgagtga

SEQ ID NO: 404185 - DNA, 52 bp, Artificial
  Synthetic oligonucleotide
gattacgggacaggagtaccgaatcaaggctatgtgatgtatgcaagggtat

SEQ ID NO: 404186 - DNA, 57 bp, Artificial
  Synthetic oligonucleotide
gattacggttcatgaagcccagggtgctacctttacggagaccacaattatagctac

SEQ ID NO: 404187 - DNA, 58 bp, Artificial
  Synthetic oligonucleotide
gattacgtgatggatgattcaggtgttaaaaacaatctgttgggtaaagcggcaacta

SEQ ID NO: 404188 - DNA, 59 bp, Artificial
  Synthetic oligonucleotide
gattacgtgggatcagcctattgcaacgttggtccaggatcggcaaaatttgaaatcca

SEQ ID NO: 404189 - DNA, 59 bp, Artificial
  Synthetic oligonucleotide
gattacgtgttacgtcaaagcggttacgcaattgtatggtgaaggatcactcatttatc

SEQ ID NO: 404190 - DNA, 60 bp, Artificial
  Synthetic oligonucleotide
gattacgttaacaacgaactcgtccctgctatgcaacatatgtcatgtgaattagttggg

SEQ ID NO: 404191 - DNA, 54 bp, Artificial
  Synthetic oligonucleotide
gattacgttaggggagtgtcaaaaactactgtccgtgctaatcagggtagtacc

SEQ ID NO: 404192 - DNA, 55 bp, Artificial
  Synthetic oligonucleotide
gattactagagaacacacttttaatggtgacgtcatccgattcgcagcctggtta

SEQ ID NO: 404193 - DNA, 55 bp, Artificial
  Synthetic oligonucleotide
gattactcagacgtatccggtcaataacgtcagagcaaaggatctcgcacctgtt

SEQ ID NO: 404194 - DNA, 59 bp, Artificial
  Synthetic oligonucleotide
gattactcgggagcatccgcagaatttatgaaatggagtaaagctaaggtaaatggcaa

SEQ ID NO: 404195 - DNA, 55 bp, Artificial
  Synthetic oligonucleotide
gattactctcggtgggattcaacacaacaaagggccgtgttggcagcagccttag

SEQ ID NO: 404196 - DNA, 59 bp, Artificial
  Synthetic oligonucleotide
gattactctgtttgctgtggaatttggacttcgagcgttggaacaactcatagtggacg

SEQ ID NO: 404197 - DNA, 55 bp, Artificial
  Synthetic oligonucleotide
gattactgtgcagttgttgagttctgcaatctggataattgtaagttcgcgattg

SEQ ID NO: 404198 - DNA, 59 bp, Artificial
  Synthetic oligonucleotide
gattacttaacgagggagcatgagaacaacttcgacttgacgcagttggggctcgcacc

SEQ ID NO: 404199 - DNA, 55 bp, Artificial
  Synthetic oligonucleotide
gattacttactaccgggatggaaattaacgtatgttggatacaacggaagtgata

SEQ ID NO: 404200 - DNA, 60 bp, Artificial
  Synthetic oligonucleotide
gattacttcgcgaggattgcagtcgtcctctactggctgccactccgtccatccattggt

SEQ ID NO: 404201 - DNA, 57 bp, Artificial
  Synthetic oligonucleotide
gattacttggtactactttacttaacatagatgcaaattacgttgagaacgctagaa

SEQ ID NO: 404202 - DNA, 56 bp, Artificial
  Synthetic oligonucleotide
gattacttgtgcaactcccaccacctgtacagagataaacactactttgtgcgcgg

SEQ ID NO: 404203 - DNA, 60 bp, Artificial
  Synthetic oligonucleotide
gattagaaaccaagcaatacgtgaaggctatctcgcagaacgagataaatatatgcgtgt

SEQ ID NO: 404204 - DNA, 55 bp, Artificial
  Synthetic oligonucleotide
gattagaaaggagtgtgcaataagcgattaccgggaaggtgccatctgcttaggt

SEQ ID NO: 404205 - DNA, 55 bp, Artificial
  Synthetic oligonucleotide
gattagaagcattcagacaggatggaaccgttaaaagtgccctggtcttcacagg

SEQ ID NO: 404206 - DNA, 58 bp, Artificial
  Synthetic oligonucleotide
gattagaatagcaagtaagtgtactcgtccattttgtccttgatagaaactctggtta

SEQ ID NO: 404207 - DNA, 55 bp, Artificial
  Synthetic oligonucleotide
gattagaatcgttatttaaattgtcccctctatgtggaacacctcatatgggacc

SEQ ID NO: 404208 - DNA, 50 bp, Artificial
  Synthetic oligonucleotide
gattagaattcatccgtccttcagataacatttcagacagtctggtcttg

SEQ ID NO: 404209 - DNA, 55 bp, Artificial
  Synthetic oligonucleotide
gattagacgtgctagaggtagaaatagattagaattaatatcacgtgagtttcct

SEQ ID NO: 404210 - DNA, 57 bp, Artificial
  Synthetic oligonucleotide
gattagagcgaagaattatgtcgaagcgaccaggagatataattttttccacgcccg

SEQ ID NO: 404211 - DNA, 57 bp, Artificial
  Synthetic oligonucleotide
gattagagggtagcttgggcttcattttaatcgacgatcgagttatggtgaacaaaa

SEQ ID NO: 404212 - DNA, 51 bp, Artificial
  Synthetic oligonucleotide
gattagaggtagtgtttccaggctaataataagcgtcagaacttcctttcc

SEQ ID NO: 404213 - DNA, 60 bp, Artificial
  Synthetic oligonucleotide
gattagatcaaaaactgtgcaccccatttatttaggctcgatgcattacgatattactta

SEQ ID NO: 404214 - DNA, 60 bp, Artificial
  Synthetic oligonucleotide
gattagatcgaatgcagttaagacaaatgcagatgctggcgtgtctatggattcatcaac

SEQ ID NO: 404215 - DNA, 60 bp, Artificial
  Synthetic oligonucleotide
gattagatctgaagatatattagacaataccaaaaccataatagtacaacttaagaagca

SEQ ID NO: 404216 - DNA, 59 bp, Artificial
  Synthetic oligonucleotide
gattagcaagaaaagtacccatgttcactataaagaagttttgggatcacatcgcgcag

SEQ ID NO: 404217 - DNA, 53 bp, Artificial
  Synthetic oligonucleotide
gattagcagcagtttagaacaaacgagttccgcgtccgcacaaacgaactgcg

SEQ ID NO: 404218 - DNA, 55 bp, Artificial
  Synthetic oligonucleotide
gattagcaggccccataccggtagccatagacgcgtccgacatattaaattacga

SEQ ID NO: 404219 - DNA, 52 bp, Artificial
  Synthetic oligonucleotide
gattagcattgatagagtccatgtaatcccttgtactccctgtggtgtttgt

SEQ ID NO: 404220 - DNA, 55 bp, Artificial
  Synthetic oligonucleotide
gattagccattcaattcaaattgggaaccaaaaccaaaccgaaacatgcaatcaa

SEQ ID NO: 404221 - DNA, 60 bp, Artificial
  Synthetic oligonucleotide
gattagcctctgtacgtgccgatctcaactatcagcaaggtttggataggatgtggtcac

SEQ ID NO: 404222 - DNA, 58 bp, Artificial
  Synthetic oligonucleotide
gattagcggttgaagagccaccgttttcaataacacgcacacgagtaaatggattgta

SEQ ID NO: 404223 - DNA, 60 bp, Artificial
  Synthetic oligonucleotide
gattagcgtgttatcagagagtcgctatctctcattgattacctgtgagccactactata

SEQ ID NO: 404224 - DNA, 50 bp, Artificial
  Synthetic oligonucleotide
gattaggaacgctttctctgaaactgaagacgtcactccgttagttggta

SEQ ID NO: 404225 - DNA, 54 bp, Artificial
  Synthetic oligonucleotide
gattaggaatcaaagtgacggacgggattgacaaaacaaaggtcggaattgagt

SEQ ID NO: 404226 - DNA, 55 bp, Artificial
  Synthetic oligonucleotide
gattaggacgcaggggcaccatacagactagaagtggtatacaaattggtcaagc

SEQ ID NO: 404227 - DNA, 55 bp, Artificial
  Synthetic oligonucleotide
gattaggagcaccaagttctctatccttaacagtgaccaccctcgcattgaggtg

SEQ ID NO: 404228 - DNA, 60 bp, Artificial
  Synthetic oligonucleotide
gattaggcaatctggctgtgatgaggttcactggtgagtttgggacctttttgttcaaca

SEQ ID NO: 404229 - DNA, 53 bp, Artificial
  Synthetic oligonucleotide
gattaggggacaatagaaaggtgttgacattgcaaccgaaagccccgaaagtt

SEQ ID NO: 404230 - DNA, 55 bp, Artificial
  Synthetic oligonucleotide
gattagggtgcagtactagaaagagggttgcacctgtccctaaggtcaccgaaaa

SEQ ID NO: 404231 - DNA, 60 bp, Artificial
  Synthetic oligonucleotide
gattaggtgatgttgcgattctgtcgtagcagtgactatgtctggatctatctgcttggg

SEQ ID NO: 404232 - DNA, 51 bp, Artificial
  Synthetic oligonucleotide
gattagtaatacaatgcataaagttgatgatttcgtttctacaatagatgt

SEQ ID NO: 404233 - DNA, 60 bp, Artificial
  Synthetic oligonucleotide
gattagtagtcagtaataagtatgagcctttaatggcccctatgcttaactgtattcatg

SEQ ID NO: 404234 - DNA, 59 bp, Artificial
  Synthetic oligonucleotide
gattagtagtgatagggtccatgtaattccttgtattccatgtggtgcttgtcttaagc

SEQ ID NO: 404235 - DNA, 55 bp, Artificial
  Synthetic oligonucleotide
gattagtatcacctccgtaaggatactgaccactggctgggctcgtcacccctcc

SEQ ID NO: 404236 - DNA, 60 bp, Artificial
  Synthetic oligonucleotide
gattagtatggatagggtccatgtaatcctatgtattccttgtggtgtgtgtcttaaaca

SEQ ID NO: 404237 - DNA, 52 bp, Artificial
  Synthetic oligonucleotide
gattagtatggcaggttctgacttagacgaggttctaaactggagttctaaa

SEQ ID NO: 404238 - DNA, 57 bp, Artificial
  Synthetic oligonucleotide
gattagtggcagcccttgaaggtatggcggctccagaaaccacaaaagaatacttac

SEQ ID NO: 404239 - DNA, 60 bp, Artificial
  Synthetic oligonucleotide
gattagtttaccatcccttcactgagtgcggcacccattgcgtatgtggtgctagatacg

SEQ ID NO: 404240 - DNA, 58 bp, Artificial
  Synthetic oligonucleotide
gattagtttatgattccgagttacaaatgcattgtctccgtgggcctctaaaatttca

SEQ ID NO: 404241 - DNA, 59 bp, Artificial
  Synthetic oligonucleotide
gattataaaactgtgcctaaagatttagaagtactgaagactcatgctctctgttccgt

SEQ ID NO: 404242 - DNA, 55 bp, Artificial
  Synthetic oligonucleotide
gattatacagatactgtgaaggctatttcatgctgcccaaaaggtagctacgggt

SEQ ID NO: 404243 - DNA, 60 bp, Artificial
  Synthetic oligonucleotide
gattatacagggtatgatgcttctcttagtccagcatggttcgaggctctcaagatggtg

SEQ ID NO: 404244 - DNA, 60 bp, Artificial
  Synthetic oligonucleotide
gattatacattgggagtataaattgctcaacgaagtacgagaggtgtgcataaaggatgg

SEQ ID NO: 404245 - DNA, 57 bp, Artificial
  Synthetic oligonucleotide
gattataccaaatacctggtgagggatgaagttagaacattaatacccaggttgatg

SEQ ID NO: 404246 - DNA, 55 bp, Artificial
  Synthetic oligonucleotide
gattatactataagcttcctcgtctcttaggtttagggccgtggataagtcagca

SEQ ID NO: 404247 - DNA, 60 bp, Artificial
  Synthetic oligonucleotide
gattatagcattgactccagttatgtgtgctcaggacttgttggagatacaccgaggaac

SEQ ID NO: 404248 - DNA, 60 bp, Artificial
  Synthetic oligonucleotide
gattatagtgttgagtccagttatgtgtgctcaggacttgttggcgacacaccaagaaat

SEQ ID NO: 404249 - DNA, 56 bp, Artificial
  Synthetic oligonucleotide
gattatatcaatacaattgtacaagcaatgactcccagacatcgggcgatttatcc

SEQ ID NO: 404250 - DNA, 60 bp, Artificial
  Synthetic oligonucleotide
gattatatcgtttacagtgccgaagaggtgcactatgtcggatgtggtgacctacgtacc

SEQ ID NO: 404251 - DNA, 60 bp, Artificial
  Synthetic oligonucleotide
gattatatgacctatagtgcagatgtagtctattacgttggatcgggggacttacgtaca

SEQ ID NO: 404252 - DNA, 54 bp, Artificial
  Synthetic oligonucleotide
gattatatgatcttgctcttaagcagtatgatgcagaagagacggaggtgagcg

SEQ ID NO: 404253 - DNA, 55 bp, Artificial
  Synthetic oligonucleotide
gattatatggtacagcgccaggcatggtaaaccaccctgcagcatacttgcaggt

SEQ ID NO: 404254 - DNA, 55 bp, Artificial
  Synthetic oligonucleotide
gattatcaaattcctatatcaaagcagtgagtataattaaataagtacatgtaat

SEQ ID NO: 404255 - DNA, 52 bp, Artificial
  Synthetic oligonucleotide
gattatcaggtctctagttagactcgtctcagctctagtcatagtggtgagg

SEQ ID NO: 404256 - DNA, 56 bp, Artificial
  Synthetic oligonucleotide
gattatccacgtagtcgactcgtatgggtcattgtcaacaggataccacatcctta

SEQ ID NO: 404257 - DNA, 57 bp, Artificial
  Synthetic oligonucleotide
gattatcccaagtatgaagaagagtctagattaaataggaacgaaatcaaaggagta

SEQ ID NO: 404258 - DNA, 60 bp, Artificial
  Synthetic oligonucleotide
gattatcccaatcaccacagttggatgtaatgtggtgccatgtaggtgcgacttgaactg

SEQ ID NO: 404259 - DNA, 60 bp, Artificial
  Synthetic oligonucleotide
gattatccggcaatcaacattgatgtgaggtgtcacagactcctctctagtgtttcttac

SEQ ID NO: 404260 - DNA, 58 bp, Artificial
  Synthetic oligonucleotide
gattatcctatgtttgcctctatcgctggcggtatcgcctccgcacttgccggaggcc

SEQ ID NO: 404261 - DNA, 58 bp, Artificial
  Synthetic oligonucleotide
gattatcgggcaaggaggtacgtccgaaatcgtcccttgtggtgacgatgaggaatca

SEQ ID NO: 404262 - DNA, 54 bp, Artificial
  Synthetic oligonucleotide
gattatcgtgaaatataggggatttggaacctcccagataaaaacggaattctc

SEQ ID NO: 404263 - DNA, 60 bp, Artificial
  Synthetic oligonucleotide
gattatctcgtcagaaaggaggaaggatatcgaggatgtgcaagggtacgtgcgttcgca

SEQ ID NO: 404264 - DNA, 55 bp, Artificial
  Synthetic oligonucleotide
gattatctgagctttcgggaccatcagccgtagccagattactgaaatcgcagct

SEQ ID NO: 404265 - DNA, 55 bp, Artificial
  Synthetic oligonucleotide
gattatctgcgagacctaacgaaagcatgggattacgttccaatgtgcgcggcag

SEQ ID NO: 404266 - DNA, 58 bp, Artificial
  Synthetic oligonucleotide
gattatctgttacctggatggaagttaacgtatgtaggctataatggaaagaacacac

SEQ ID NO: 404267 - DNA, 60 bp, Artificial
  Synthetic oligonucleotide
gattatgacatcactgtctgtcctttgcccagagatgtacaaccgtttagggcgaagata

SEQ ID NO: 404268 - DNA, 55 bp, Artificial
  Synthetic oligonucleotide
gattatgagaagaacatgtacaagacagaactggcggatttcccaggatatatca

SEQ ID NO: 404269 - DNA, 55 bp, Artificial
  Synthetic oligonucleotide
gattatgaggcatttgatcgttcacaggatgagaaggtgctagatttggaggtcg

SEQ ID NO: 404270 - DNA, 53 bp, Artificial
  Synthetic oligonucleotide
gattatgagggtggtgagtgggtttcaattactaactacgggtaggggaacac

SEQ ID NO: 404271 - DNA, 55 bp, Artificial
  Synthetic oligonucleotide
gattatgataaggaccaggatataggtcacttctgtctcagcccaagatgcaaca

SEQ ID NO: 404272 - DNA, 60 bp, Artificial
  Synthetic oligonucleotide
gattatgcaaatcggacatcggaatagagaaatcgaacatcgattatgcaaatgagcccg

SEQ ID NO: 404273 - DNA, 60 bp, Artificial
  Synthetic oligonucleotide
gattatgcaactcatgatttctctatcggccatcctctcaacatgcctagctttatccct

SEQ ID NO: 404274 - DNA, 60 bp, Artificial
  Synthetic oligonucleotide
gattatgcaaggctttacatatggggagttcatcacccttcgacagacacagagcaaacc

SEQ ID NO: 404275 - DNA, 52 bp, Artificial
  Synthetic oligonucleotide
gattatgccgagggtgtaaatcgtgactcgttagatatggccgagggtataa

SEQ ID NO: 404276 - DNA, 55 bp, Artificial
  Synthetic oligonucleotide
gattatggaacggttaatcattggatcgattgggtaacagatatgattatggtcg

SEQ ID NO: 404277 - DNA, 60 bp, Artificial
  Synthetic oligonucleotide
gattatggagtcgtgccttacagatgtggcaaccaaacatacgccgaagacggagcgaac

SEQ ID NO: 404278 - DNA, 52 bp, Artificial
  Synthetic oligonucleotide
gattatggataatgaccttaattaacccagaaaagaaccccttaacccgagc

SEQ ID NO: 404279 - DNA, 52 bp, Artificial
  Synthetic oligonucleotide
gattatggtatgattggagtgttaggcccacatatattccttatgaaaagtc

SEQ ID NO: 404280 - DNA, 60 bp, Artificial
  Synthetic oligonucleotide
gattatggtctaacaatgactccagctgataaaggggagacattttctgatgtgacctgg

SEQ ID NO: 404281 - DNA, 57 bp, Artificial
  Synthetic oligonucleotide
gattatggtgcagccccccaatgttcggtcccctgcagctgcactgtactgggtgca

SEQ ID NO: 404282 - DNA, 60 bp, Artificial
  Synthetic oligonucleotide
gattatgtgaaggacgtggctttatttggaccatgctgctgagtttatttgcgattgaag

SEQ ID NO: 404283 - DNA, 60 bp, Artificial
  Synthetic oligonucleotide
gattatgtgcttgcgagtactaatcatactttactccaccccccaacaatcacgtgtaca

SEQ ID NO: 404284 - DNA, 52 bp, Artificial
  Synthetic oligonucleotide
gattattatataacccatacaatttgcaagacttacgtaataagtaatcatt

SEQ ID NO: 404285 - DNA, 60 bp, Artificial
  Synthetic oligonucleotide
gattattatgttcaagaggtcacacaggtgtagatgcccaacggtagcgaatctcctagt

SEQ ID NO: 404286 - DNA, 55 bp, Artificial
  Synthetic oligonucleotide
gattattattgacacgtgatggagggagaaacactacagaggagacattcagacc

SEQ ID NO: 404287 - DNA, 58 bp, Artificial
  Synthetic oligonucleotide
gattattcagttgtggttgatacgctcaacgaggagactaagtggtattgtgaggtca

SEQ ID NO: 404288 - DNA, 60 bp, Artificial
  Synthetic oligonucleotide
gattattctgaactggagcatgatccattgaacggtcgtgcctatagaaaggagttggtg

SEQ ID NO: 404289 - DNA, 60 bp, Artificial
  Synthetic oligonucleotide
gattattgatcgtgtcaaatttatgttctttcattaattagtgtatgtatgactagattg

SEQ ID NO: 404290 - DNA, 53 bp, Artificial
  Synthetic oligonucleotide
gattattggatgttactggctccaacgacacctggcgtaattgttgaaggtac

SEQ ID NO: 404291 - DNA, 59 bp, Artificial
  Synthetic oligonucleotide
gattattgggacgattcaaaagcatttcgaaatatggtgtatgttagatcattagcagc

SEQ ID NO: 404292 - DNA, 58 bp, Artificial
  Synthetic oligonucleotide
gattattgggatgattctcaagcatttagaaatatggtgtatgttaggtcattagccg

SEQ ID NO: 404293 - DNA, 60 bp, Artificial
  Synthetic oligonucleotide
gattattgggctgcatatcataactgtaagtataccagtctgatgtagtagcaggaagat

SEQ ID NO: 404294 - DNA, 57 bp, Artificial
  Synthetic oligonucleotide
gattattgtcccggaaggaaagggatcattttgggtgcactggataacaactcaaga

SEQ ID NO: 404295 - DNA, 56 bp, Artificial
  Synthetic oligonucleotide
gattattgtcctagtgggtctcatagacgccggcaaagggaaagtgtaattcggag

SEQ ID NO: 404296 - DNA, 59 bp, Artificial
  Synthetic oligonucleotide
gattattgtcctgctggttctcacaaacgccggcaacgagaatctgtaattcgaagtcc

SEQ ID NO: 404297 - DNA, 54 bp, Artificial
  Synthetic oligonucleotide
gattattgtccttctggttcccataaacgtcgtcaacgggaatcggtaattaga

SEQ ID NO: 404298 - DNA, 57 bp, Artificial
  Synthetic oligonucleotide
gattattgtgaggaataggcacctcctcaaatcggacgttcgtttcatctttgaacg

SEQ ID NO: 404299 - DNA, 55 bp, Artificial
  Synthetic oligonucleotide
gattattgttgtggacctgcttcatgctatactattgtgtgggaaattagtgcag

SEQ ID NO: 404300 - DNA, 56 bp, Artificial
  Synthetic oligonucleotide
gattatttacaaatggcggctgagccctacggagactgtatgtttttttgcctccg

SEQ ID NO: 404301 - DNA, 60 bp, Artificial
  Synthetic oligonucleotide
gattatttctcctggccgagactgaattgcacggcctcagtcctgttgagttaatcaatc

SEQ ID NO: 404302 - DNA, 59 bp, Artificial
  Synthetic oligonucleotide
gattatttggtatggagagactggtgctgatttacagcgaattttaagatcgtcagggt

SEQ ID NO: 404303 - DNA, 57 bp, Artificial
  Synthetic oligonucleotide
gattatttgttccagctaattaaattagttagctatgattatctcccaatcatatac

SEQ ID NO: 404304 - DNA, 55 bp, Artificial
  Synthetic oligonucleotide
gattcaaaagacactgtacgactccccggtcattgatctaaaggagtctgatggg

SEQ ID NO: 404305 - DNA, 52 bp, Artificial
  Synthetic oligonucleotide
gattcaaacgcctttggggcggtatcgagggtccttcgacggatgttcccgg

SEQ ID NO: 404306 - DNA, 55 bp, Artificial
  Synthetic oligonucleotide
gattcaaactcactttatcctctagtagtctcgaactctcaggctttcttgctac

SEQ ID NO: 404307 - DNA, 60 bp, Artificial
  Synthetic oligonucleotide
gattcaaagctatcgtcgaatcaactactgaagtaggcaactttcgcgtagttgattgga

SEQ ID NO: 404308 - DNA, 58 bp, Artificial
  Synthetic oligonucleotide
gattcaaagtcgagtccaagaaggatatgcgcgagaagcgtaagatcaagtcgccgaa

SEQ ID NO: 404309 - DNA, 57 bp, Artificial
  Synthetic oligonucleotide
gattcaaagtgagttcaataaggcgtgtgaactgactgattcaagctggatagagct

SEQ ID NO: 404310 - DNA, 55 bp, Artificial
  Synthetic oligonucleotide
gattcaaatctggatgtgggcgatcaagtagtacattggatgtatgaagttgacg

SEQ ID NO: 404311 - DNA, 50 bp, Artificial
  Synthetic oligonucleotide
gattcaacaagcgacgtcgcgtgttggtctgattgagttgctccctgttg

SEQ ID NO: 404312 - DNA, 59 bp, Artificial
  Synthetic oligonucleotide
gattcaacagggaaacatgttcctggaggctattgtctagaacaatgggctattgtttg

SEQ ID NO: 404313 - DNA, 54 bp, Artificial
  Synthetic oligonucleotide
gattcaacgcaaaagtagtggtggcatttgccacaatcatcggtgcagaatgta

SEQ ID NO: 404314 - DNA, 52 bp, Artificial
  Synthetic oligonucleotide
gattcaactccaccgtgcgaggcttaaggctcatcggaatgccgtgaaagca

SEQ ID NO: 404315 - DNA, 60 bp, Artificial
  Synthetic oligonucleotide
gattcaagaatatgttcttaactgcacctatttcgttccaaagataagtgcagaagccaa

SEQ ID NO: 404316 - DNA, 60 bp, Artificial
  Synthetic oligonucleotide
gattcaagacgtgccactacttacgctgatgcataaacgggcgtgcgctcaacgattagt

SEQ ID NO: 404317 - DNA, 59 bp, Artificial
  Synthetic oligonucleotide
gattcaagagcttctgggccgtgggaattcggaatacttgcggagcaggggagccacaa

SEQ ID NO: 404318 - DNA, 59 bp, Artificial
  Synthetic oligonucleotide
gattcaagccctaggttctgattctccatgttagagagactggaaattaaacgattata

SEQ ID NO: 404319 - DNA, 57 bp, Artificial
  Synthetic oligonucleotide
gattcaagtctacaaaacggatgggacatttttttcagacctatgcttggtatgcct

SEQ ID NO: 404320 - DNA, 55 bp, Artificial
  Synthetic oligonucleotide
gattcaagtctgggtcgctgctggagacgattttgctctagctgttcccacgact

SEQ ID NO: 404321 - DNA, 55 bp, Artificial
  Synthetic oligonucleotide
gattcaagtgacggcatgatgttgggcgtcgctaaaccatcgaatgtgcaagcag

SEQ ID NO: 404322 - DNA, 60 bp, Artificial
  Synthetic oligonucleotide
gattcaagtggacgattattattggcataggccgtaagtatgctttgcctgccctactcg

SEQ ID NO: 404323 - DNA, 59 bp, Artificial
  Synthetic oligonucleotide
gattcaataaccgacatttggacttatcaagcagagctattagtggcaatggagaatca

SEQ ID NO: 404324 - DNA, 60 bp, Artificial
  Synthetic oligonucleotide
gattcaatccgataccggcgagagatccgatattatcaccgattttgaagctagtgaagc

SEQ ID NO: 404325 - DNA, 57 bp, Artificial
  Synthetic oligonucleotide
gattcacaacaaaatgttcttactccaggaagacaggttaatggtacatttggcaat

SEQ ID NO: 404326 - DNA, 58 bp, Artificial
  Synthetic oligonucleotide
gattcacagcccgatatgtgagtaggggtcactcaatcattcctaagatcactttgcc

SEQ ID NO: 404327 - DNA, 60 bp, Artificial
  Synthetic oligonucleotide
gattcacatggacaggtgtcaatcaaaacgggagaagtagcgcctgcagaaggggatcag

SEQ ID NO: 404328 - DNA, 60 bp, Artificial
  Synthetic oligonucleotide
gattcacccaactatgccaatgaaggagatccatgaatctatccggtggaccaaggacgc

SEQ ID NO: 404329 - DNA, 55 bp, Artificial
  Synthetic oligonucleotide
gattcaccgagcctgatccagatctggaggacccagtaccaggaatggagacgct

SEQ ID NO: 404330 - DNA, 60 bp, Artificial
  Synthetic oligonucleotide
gattcacgagagttaatcaatccaaccacttatggaattggtatgacctatcattgttat

SEQ ID NO: 404331 - DNA, 55 bp, Artificial
  Synthetic oligonucleotide
gattcactacaaaccagccgaatatttccatgatgcagccacattatggatcgca

SEQ ID NO: 404332 - DNA, 60 bp, Artificial
  Synthetic oligonucleotide
gattcactagtaggtgatgacgagttgatagtcccatcctcattcggccttatcgccaat

SEQ ID NO: 404333 - DNA, 60 bp, Artificial
  Synthetic oligonucleotide
gattcacttcctgggcgtaacttatgtactcatataagtaactgcacttccgaatggctg

SEQ ID NO: 404334 - DNA, 58 bp, Artificial
  Synthetic oligonucleotide
gattcagaaattcatttaccacctttctgaagagctatatgacataagactgcaacac

SEQ ID NO: 404335 - DNA, 55 bp, Artificial
  Synthetic oligonucleotide
gattcagaagaagcaatagggaaagtccttctatttgcaggagtcccatccaaca

SEQ ID NO: 404336 - DNA, 55 bp, Artificial
  Synthetic oligonucleotide
gattcagaatggatcagtggacattgaattggcaaaacactacctaattttggtg

SEQ ID NO: 404337 - DNA, 52 bp, Artificial
  Synthetic oligonucleotide
gattcagacaatgcttcgatatgtcatgatggagggttttgtctcacagcct

SEQ ID NO: 404338 - DNA, 60 bp, Artificial
  Synthetic oligonucleotide
gattcagacgacgtgttcatattgcattgtgtcgcaccacatcatgcgaatgaatcgttc

SEQ ID NO: 404339 - DNA, 56 bp, Artificial
  Synthetic oligonucleotide
gattcagaggcataacttttctttgggttcaatgttatacagtaacttttgaagtg

SEQ ID NO: 404340 - DNA, 51 bp, Artificial
  Synthetic oligonucleotide
gattcagaggttagggcgagtgggtaggaataaagctggagtcgcactgag

SEQ ID NO: 404341 - DNA, 60 bp, Artificial
  Synthetic oligonucleotide
gattcagagtgaattcaataaggcatgtgagttgacggattccagctggatagagcttga

SEQ ID NO: 404342 - DNA, 55 bp, Artificial
  Synthetic oligonucleotide
gattcagatcatacgaaggcggctgtttatgaagttcgtccatccggaccaacgg

SEQ ID NO: 404343 - DNA, 60 bp, Artificial
  Synthetic oligonucleotide
gattcagcagcccacttaattgaaatcatgaataactgcagacataggtccttagcatac

SEQ ID NO: 404344 - DNA, 60 bp, Artificial
  Synthetic oligonucleotide
gattcagcgtagacagcgctcgattatgccacttaatgttgttcagcagcaagtgtcagc

SEQ ID NO: 404345 - DNA, 55 bp, Artificial
  Synthetic oligonucleotide
gattcagcttacaagattgagggaacgttgtatgatgtctcgcaggtggtggttc

SEQ ID NO: 404346 - DNA, 60 bp, Artificial
  Synthetic oligonucleotide
gattcaggagcagatatatcagtcattaatgagaaagattggattcaaggtaattcaatt

SEQ ID NO: 404347 - DNA, 58 bp, Artificial
  Synthetic oligonucleotide
gattcaggagggataacagggactaacgcatattcctttatgaagcatgggttaggaa

SEQ ID NO: 404348 - DNA, 51 bp, Artificial
  Synthetic oligonucleotide
gattcaggtaagtcaaataggtgcttggcattcaagaccaatagaaatttc

SEQ ID NO: 404349 - DNA, 60 bp, Artificial
  Synthetic oligonucleotide
gattcaggttactattcagccaaatgttactcaggaacatctaattcagggcttcagctg

SEQ ID NO: 404350 - DNA, 56 bp, Artificial
  Synthetic oligonucleotide
gattcagtacttcattgcgcgtgcggaggccatgctgcacgtttgggtgcccccgt

SEQ ID NO: 404351 - DNA, 60 bp, Artificial
  Synthetic oligonucleotide
gattcagtcacggaatatgataagaagcttgtttcgcgcatacaaattcgagttaatcct

SEQ ID NO: 404352 - DNA, 59 bp, Artificial
  Synthetic oligonucleotide
gattcagtctgttgaccgtactgcagttactggggcttcatattttacttctgtggatc

SEQ ID NO: 404353 - DNA, 55 bp, Artificial
  Synthetic oligonucleotide
gattcagtgtaccttagaatggctttcggtcatttgtatgagactttccacgcaa

SEQ ID NO: 404354 - DNA, 60 bp, Artificial
  Synthetic oligonucleotide
gattcagttgttcccacaccagcaagctaaggatgacaccctgatgtgggccaccattga

SEQ ID NO: 404355 - DNA, 60 bp, Artificial
  Synthetic oligonucleotide
gattcatagaagggggatggcaaggaatggtagatggatggtatggttatcaccatagca

SEQ ID NO: 404356 - DNA, 60 bp, Artificial
  Synthetic oligonucleotide
gattcatatggttcgctagacacccaatttcatgttcttaaggcaaacactgtaagtcag

SEQ ID NO: 404357 - DNA, 56 bp, Artificial
  Synthetic oligonucleotide
gattcatattgatggcaattctcaccttcaaaccccctaagcagctcttaatcgct

SEQ ID NO: 404358 - DNA, 60 bp, Artificial
  Synthetic oligonucleotide
gattcatcataaaggggagatctcacttgaggaatgatactgatgtggtgaattttgtga

SEQ ID NO: 404359 - DNA, 60 bp, Artificial
  Synthetic oligonucleotide
gattcatcccttatgtcagcatacgtgcaccgagattggttatagaggagttgatggaga

SEQ ID NO: 404360 - DNA, 57 bp, Artificial
  Synthetic oligonucleotide
gattcatccgttcgatacaacatttgtttatcaagcggatggggagtttattaccaa

SEQ ID NO: 404361 - DNA, 55 bp, Artificial
  Synthetic oligonucleotide
gattcatcgctttccagaagccattagcgtctgaatgttagatccatagtatagg

SEQ ID NO: 404362 - DNA, 50 bp, Artificial
  Synthetic oligonucleotide
gattcatcgtcagtcatcctcttatcatggatctctacaatcaccgtccc

SEQ ID NO: 404363 - DNA, 58 bp, Artificial
  Synthetic oligonucleotide
gattcatgaactgaggaccaagacgcacgctaaaattacgatttccctctcaaccgaa

SEQ ID NO: 404364 - DNA, 60 bp, Artificial
  Synthetic oligonucleotide
gattcatgacttggatgcggcaggagggacggtcagcgtgagtctaccatgggccgtggt

SEQ ID NO: 404365 - DNA, 57 bp, Artificial
  Synthetic oligonucleotide
gattcatgtaacggtgtttatgcaaacataagcaagaacgccctcttagtttattac

SEQ ID NO: 404366 - DNA, 60 bp, Artificial
  Synthetic oligonucleotide
gattcatgtacaattaaggtatgtccattaaatacgcagacattaggaataggatgtctt

SEQ ID NO: 404367 - DNA, 60 bp, Artificial
  Synthetic oligonucleotide
gattcatgtagatgtagagcatcagcgaatcccttcgctaccgctctcccggtctagggt

SEQ ID NO: 404368 - DNA, 55 bp, Artificial
  Synthetic oligonucleotide
gattcattactggctcgaagttacacgggcctccgagtctcttgtccacagtatc

SEQ ID NO: 404369 - DNA, 54 bp, Artificial
  Synthetic oligonucleotide
gattcattccccaggttacccttatattacccagggtgtgtcccgcagatccct

SEQ ID NO: 404370 - DNA, 60 bp, Artificial
  Synthetic oligonucleotide
gattcattcgaccagggttggggccctatttcatatgacaacatcactggcccatctgag

SEQ ID NO: 404371 - DNA, 51 bp, Artificial
  Synthetic oligonucleotide
gattcattcgtttgtagggatgccctattcgacgtatcatcatacgcccag

SEQ ID NO: 404372 - DNA, 50 bp, Artificial
  Synthetic oligonucleotide
gattcattggttgctatctgtgctctgaatggtatagatcacactctcag

SEQ ID NO: 404373 - DNA, 58 bp, Artificial
  Synthetic oligonucleotide
gattcatttggagccgaagtgactgggtcacgcaaagatgaacctccttcacttaaac

SEQ ID NO: 404374 - DNA, 60 bp, Artificial
  Synthetic oligonucleotide
gattccaaagcagtagcagtagttcattatgggggagtgcctactgacgtcattaattcc

SEQ ID NO: 404375 - DNA, 55 bp, Artificial
  Synthetic oligonucleotide
gattccaaaggaatgtgtggactactacgttcgggcgagttacgtgccgacccag

SEQ ID NO: 404376 - DNA, 56 bp, Artificial
  Synthetic oligonucleotide
gattccaacttaattagatccatatgcaacacacatcatattttcagggatgagat

SEQ ID NO: 404377 - DNA, 60 bp, Artificial
  Synthetic oligonucleotide
gattccaagaggaaagctttccacaagaggagttcagattgcttcaaatgagaatgtgga

SEQ ID NO: 404378 - DNA, 60 bp, Artificial
  Synthetic oligonucleotide
gattccaagctacagatcactttacctgcgttgggtgaacgccgtgtgcggtgacgcata

SEQ ID NO: 404379 - DNA, 55 bp, Artificial
  Synthetic oligonucleotide
gattccaagtctttccctcaattaagtgatttatcgattagtaatttggaaagga

SEQ ID NO: 404380 - DNA, 60 bp, Artificial
  Synthetic oligonucleotide
gattccaattgttctactgaatatgtcatcactagaaaaattgggtgcactcatcggatc

SEQ ID NO: 404381 - DNA, 56 bp, Artificial
  Synthetic oligonucleotide
gattccaccggttggtgcgtctaccgccgaaagggtttgctaattcatgctccgga

SEQ ID NO: 404382 - DNA, 55 bp, Artificial
  Synthetic oligonucleotide
gattccacctgtactaacccgcctatttgcaatgcaggattaagcaaacaggtta

SEQ ID NO: 404383 - DNA, 55 bp, Artificial
  Synthetic oligonucleotide
gattccacgcgctcattataatgcgacgacttgtagggtcctctttgatggtgcg

SEQ ID NO: 404384 - DNA, 60 bp, Artificial
  Synthetic oligonucleotide
gattccacttggaccaactaccaggagcaggatcagtactatttgaagaaccgatgatta

SEQ ID NO: 404385 - DNA, 60 bp, Artificial
  Synthetic oligonucleotide
gattccagatggtgattttacaattgccggaaggtacattgtatcagacgaggatgctat

SEQ ID NO: 404386 - DNA, 60 bp, Artificial
  Synthetic oligonucleotide
gattccagcgccaggatggacccacttgcatctcgccaaatgacctggagtctaagtacg

SEQ ID NO: 404387 - DNA, 60 bp, Artificial
  Synthetic oligonucleotide
gattccattcgatgtccaaaaattcgccgacttagtgactgactcgccagttatatcggc

SEQ ID NO: 404388 - DNA, 60 bp, Artificial
  Synthetic oligonucleotide
gattcccacacacttgtggctgatatcaaaaggctactgcctatataaacacatctctgg

SEQ ID NO: 404389 - DNA, 55 bp, Artificial
  Synthetic oligonucleotide
gattcccacggatctcgcacccggcgccaggtaaagcctccacctgaacttctcc

SEQ ID NO: 404390 - DNA, 59 bp, Artificial
  Synthetic oligonucleotide
gattcccacttgctattgtcgagtctttgcaaactagacgtgtatacccaacacgccga

SEQ ID NO: 404391 - DNA, 55 bp, Artificial
  Synthetic oligonucleotide
gattccctacaccggctcacccacctcagctatcagaagatgaaggcactccttg

SEQ ID NO: 404392 - DNA, 51 bp, Artificial
  Synthetic oligonucleotide
gattccctggtcgctgtaaaacaaccaggagatgggacagtagccagaact

SEQ ID NO: 404393 - DNA, 55 bp, Artificial
  Synthetic oligonucleotide
gattcccttcgcgccatttgtgcagatctggaagggtcgagttccccgctcccca

SEQ ID NO: 404394 - DNA, 56 bp, Artificial
  Synthetic oligonucleotide
gattccctttctaatcgccttcataatgtttgtttatcgaagattgacttctaccg

SEQ ID NO: 404395 - DNA, 56 bp, Artificial
  Synthetic oligonucleotide
gattccctttgtgtcctgccaacgcgggtacaggggggtctggcgaggggatggca

SEQ ID NO: 404396 - DNA, 59 bp, Artificial
  Synthetic oligonucleotide
gattccctttgtgtcctgccaacgcgggtataagggagtctggcgaggagatggtatca

SEQ ID NO: 404397 - DNA, 59 bp, Artificial
  Synthetic oligonucleotide
gattccgaacctactggcctctatggcaacgtgtccaagaatgcacttatagtttatta

SEQ ID NO: 404398 - DNA, 55 bp, Artificial
  Synthetic oligonucleotide
gattccgcatagagtacccctaaagatcgggcatcttcgccgcctagcccacggc

SEQ ID NO: 404399 - DNA, 55 bp, Artificial
  Synthetic oligonucleotide
gattccgtgagtgtttagttaagaagtcggattggagaggcaggaatgcataggg

SEQ ID NO: 404400 - DNA, 55 bp, Artificial
  Synthetic oligonucleotide
gattccgtgtatggaggaacattagaggctgaaaccaagacaccgttacatgagc

SEQ ID NO: 404401 - DNA, 60 bp, Artificial
  Synthetic oligonucleotide
gattcctaccagtagctggcggaacaagcagcgtgtatatcgaggtgttgcatttgactc

SEQ ID NO: 404402 - DNA, 60 bp, Artificial
  Synthetic oligonucleotide
gattcctaccggtagcaggcggaacaagcagtgtgtacattgaggtattgcatttgactc

SEQ ID NO: 404403 - DNA, 60 bp, Artificial
  Synthetic oligonucleotide
gattcctcccagtagctggcgggacaagcagtgtgtacatcgaagtattgcatctaactc

SEQ ID NO: 404404 - DNA, 52 bp, Artificial
  Synthetic oligonucleotide
gattcctcgacaccggggcgaactttaaagtacccctgtacacccctgtcaa

SEQ ID NO: 404405 - DNA, 60 bp, Artificial
  Synthetic oligonucleotide
gattcctgtttttctacaggaagccctaaacatcgctctggtggctgttagcctgatagc

SEQ ID NO: 404406 - DNA, 55 bp, Artificial
  Synthetic oligonucleotide
gattccttatcaggtgatgtactgccccactgggtcagttgtaccagcaaactct

SEQ ID NO: 404407 - DNA, 59 bp, Artificial
  Synthetic oligonucleotide
gattccttcgctcttaccttgcgataactagagtctactcagtagtacgtctactagta

SEQ ID NO: 404408 - DNA, 53 bp, Artificial
  Synthetic oligonucleotide
gattcgaaccggcgccggctagccaggatgtcgacattcacccgtcgattgat

SEQ ID NO: 404409 - DNA, 52 bp, Artificial
  Synthetic oligonucleotide
gattcgaataaagataatccccttggtttcaaggaaagctggggtttcggga

SEQ ID NO: 404410 - DNA, 56 bp, Artificial
  Synthetic oligonucleotide
gattcgaataagtctgccgtagtcatcggccccttttctgtgggctcgacgtgttt

SEQ ID NO: 404411 - DNA, 51 bp, Artificial
  Synthetic oligonucleotide
gattcgaataattcagataaatggtattctataatgtatccctctcgactc

SEQ ID NO: 404412 - DNA, 56 bp, Artificial
  Synthetic oligonucleotide
gattcgaatgacttttacctagttgccaactatgattgggtgcctacttcaacccc

SEQ ID NO: 404413 - DNA, 60 bp, Artificial
  Synthetic oligonucleotide
gattcgaccaacacgtaagtgtgccagcattacagttcgaacacacctgctacatgtctc

SEQ ID NO: 404414 - DNA, 55 bp, Artificial
  Synthetic oligonucleotide
gattcgactagttgccgtcgttattataactgtttcggcgaactagtaacttgtc

SEQ ID NO: 404415 - DNA, 60 bp, Artificial
  Synthetic oligonucleotide
gattcgagaaacatgaatacacttactcgtatgaacgtgatggccaagtagtgaacgcca

SEQ ID NO: 404416 - DNA, 58 bp, Artificial
  Synthetic oligonucleotide
gattcgagcctcaattaaagaacgatttgtaaatcgttatgagttatcgtgaaatgga

SEQ ID NO: 404417 - DNA, 53 bp, Artificial
  Synthetic oligonucleotide
gattcgagggtatttgcactgagtcagattatgaggccttcgacgcttcacag

SEQ ID NO: 404418 - DNA, 55 bp, Artificial
  Synthetic oligonucleotide
gattcgataaaggaaggcatgaaaatggttaggcagagaggtactaatatcgcgg

SEQ ID NO: 404419 - DNA, 52 bp, Artificial
  Synthetic oligonucleotide
gattcgatgcattgttccatgactcaccgccatatgatccactgaataatcc

SEQ ID NO: 404420 - DNA, 60 bp, Artificial
  Synthetic oligonucleotide
gattcgcactcctccagcttatagaccaccaaatgcccctatcttatcaacacttccgga

SEQ ID NO: 404421 - DNA, 55 bp, Artificial
  Synthetic oligonucleotide
gattcgcagaattgacggggaaacactcaccgcgtatattccagcggaatcaaac

SEQ ID NO: 404422 - DNA, 51 bp, Artificial
  Synthetic oligonucleotide
gattcgccacggccctccatttcctcaacgcaatgtcaaaggttagaaaag

SEQ ID NO: 404423 - DNA, 53 bp, Artificial
  Synthetic oligonucleotide
gattcgcccttcgttctgccgcccggagacttctacgcagcatacagagtggc

SEQ ID NO: 404424 - DNA, 60 bp, Artificial
  Synthetic oligonucleotide
gattcgcgctcaggctatgagaccttcagggtcattggtggttgggccactgctaattcc

SEQ ID NO: 404425 - DNA, 55 bp, Artificial
  Synthetic oligonucleotide
gattcgcggtctggctatgagacatttagggtcattggtggttggaccactgcca

SEQ ID NO: 404426 - DNA, 53 bp, Artificial
  Synthetic oligonucleotide
gattcgcgtctccaggggattgtggtggcatactcagatgtcaccacggggtg

SEQ ID NO: 404427 - DNA, 51 bp, Artificial
  Synthetic oligonucleotide
gattcgctccaatgaaagcttctatggaaaaggctctatcctgtgtatgtt

SEQ ID NO: 404428 - DNA, 60 bp, Artificial
  Synthetic oligonucleotide
gattcggaaatcgtcttgaataaacgagctataccaacttgcgcatcacagaattggctc

SEQ ID NO: 404429 - DNA, 55 bp, Artificial
  Synthetic oligonucleotide
gattcggccaactctaggcattcctacttatgtcatgtcaaatttgttctctatc

SEQ ID NO: 404430 - DNA, 55 bp, Artificial
  Synthetic oligonucleotide
gattcggccttttgtgacaagccccttggtgaaaggacctctctctttctggcgt

SEQ ID NO: 404431 - DNA, 51 bp, Artificial
  Synthetic oligonucleotide
gattcgggcgttgccaatcacgtaagtgattagtggtcataaaggagacca

SEQ ID NO: 404432 - DNA, 55 bp, Artificial
  Synthetic oligonucleotide
gattcgggttcctaaatggagacaatacatggttaggtaggaccattagcccgag

SEQ ID NO: 404433 - DNA, 55 bp, Artificial
  Synthetic oligonucleotide
gattcggtttccgagacagtcctttctgcatgtctctacctaggactatcatggg

SEQ ID NO: 404434 - DNA, 58 bp, Artificial
  Synthetic oligonucleotide
gattcgtaagctgactaagctgatctctacttatgttgagaagattctactgagtatt

SEQ ID NO: 404435 - DNA, 55 bp, Artificial
  Synthetic oligonucleotide
gattcgtacgactaagatagttggggatcacccgctggtcatagaacgtgtgcgg

SEQ ID NO: 404436 - DNA, 55 bp, Artificial
  Synthetic oligonucleotide
gattcgtcactctatccaggtttatattggcgacgtcggtattgacaaatgccaa

SEQ ID NO: 404437 - DNA, 50 bp, Artificial
  Synthetic oligonucleotide
gattcgtcgtcagtcatcctcttgtcatggatctccactatcacagatcc

SEQ ID NO: 404438 - DNA, 58 bp, Artificial
  Synthetic oligonucleotide
gattcgtctacaatttcgatgaagattgttacgaatgtcccacttgtgaacaagtatt

SEQ ID NO: 404439 - DNA, 55 bp, Artificial
  Synthetic oligonucleotide
gattcgtgagcccagttacgctgatttacgagagatggacgatttactcttagag

SEQ ID NO: 404440 - DNA, 55 bp, Artificial
  Synthetic oligonucleotide
gattcgtggaatcttcaggccaaagttgatgcgggaattactccttgatgagcca

SEQ ID NO: 404441 - DNA, 60 bp, Artificial
  Synthetic oligonucleotide
gattcgtggacagggtactgtctgcactgttggaagaaatgcatggagaaaggccaacgc

SEQ ID NO: 404442 - DNA, 60 bp, Artificial
  Synthetic oligonucleotide
gattcgtggctagaattactgcgtcacttataatgcgtgactgctaggtgaggggggcat

SEQ ID NO: 404443 - DNA, 60 bp, Artificial
  Synthetic oligonucleotide
gattcgttgatgttgcattgcctactttcgatcgacaatggcagttggaggtcggggaac

SEQ ID NO: 404444 - DNA, 55 bp, Artificial
  Synthetic oligonucleotide
gattcgttgggatacgacctaatacgtgatttaatttctgtcgtcagggccaaaa

SEQ ID NO: 404445 - DNA, 55 bp, Artificial
  Synthetic oligonucleotide
gattcgtttgggtcattaacagttggataccatgtgcttaaggcaggaactgtta

SEQ ID NO: 404446 - DNA, 60 bp, Artificial
  Synthetic oligonucleotide
gattctacatacagatgtgcactgaactcaagctcagcgaccacgaagggaggctgatcc

SEQ ID NO: 404447 - DNA, 58 bp, Artificial
  Synthetic oligonucleotide
gattctaccaaaatgttgactggatgcaagccagacaaacaggcgtagggtacaaacc

SEQ ID NO: 404448 - DNA, 60 bp, Artificial
  Synthetic oligonucleotide
gattctacggaatcatattctatagattcgtcagaatcaattccactatatatcgattcg

SEQ ID NO: 404449 - DNA, 60 bp, Artificial
  Synthetic oligonucleotide
gattctactcgcgcaaggcagctaaacgctggcttcgcaagcatcgccgcacggccttgc

SEQ ID NO: 404450 - DNA, 58 bp, Artificial
  Synthetic oligonucleotide
gattctacttcattgaaggccggcacaggtagatttgttcatactattaccgttccga

SEQ ID NO: 404451 - DNA, 60 bp, Artificial
  Synthetic oligonucleotide
gattctacttcgaatttgcgaagccagcactcaatccagatcaagccgtgcttaagtgga

SEQ ID NO: 404452 - DNA, 55 bp, Artificial
  Synthetic oligonucleotide
gattctacttctaagtcggattttgctcataacctccgggtcgcatcctatcgga

SEQ ID NO: 404453 - DNA, 54 bp, Artificial
  Synthetic oligonucleotide
gattctagcacactccgaaggttggtcccgcgcgttatttccacaggtgctaga

SEQ ID NO: 404454 - DNA, 58 bp, Artificial
  Synthetic oligonucleotide
gattctaggcataatttcgcgtcgttttgtatcggtgtctctctaaaagtactagcta

SEQ ID NO: 404455 - DNA, 59 bp, Artificial
  Synthetic oligonucleotide
gattctatctccaaggatcaggttcccttcgatacaaaggctattagcgcggccaaatc

SEQ ID NO: 404456 - DNA, 60 bp, Artificial
  Synthetic oligonucleotide
gattctatggatttcctttgccatatcatgctttttgctgtgtgttgttctactgggatt

SEQ ID NO: 404457 - DNA, 54 bp, Artificial
  Synthetic oligonucleotide
gattctatggggtgaaaaactttcaatacctacaagagaccttaagactatcct

SEQ ID NO: 404458 - DNA, 55 bp, Artificial
  Synthetic oligonucleotide
gattctcaacagtaattgagcagcatgagaaaacagtgatggataactatccaca

SEQ ID NO: 404459 - DNA, 60 bp, Artificial
  Synthetic oligonucleotide
gattctcagatggaatggtgcagtccgacccacagacatggggttggtgtcgaattctag

SEQ ID NO: 404460 - DNA, 55 bp, Artificial
  Synthetic oligonucleotide
gattctcagtccacaggccaattaattacacgtagatcagcgatcagaacaacac

SEQ ID NO: 404461 - DNA, 50 bp, Artificial
  Synthetic oligonucleotide
gattctccagggagacctcagcaaaaggatcctaggcattaaggctatca

SEQ ID NO: 404462 - DNA, 58 bp, Artificial
  Synthetic oligonucleotide
gattctccgtaacttggagggtatttacaagtacatcgtgtaatacataatcaactgc

SEQ ID NO: 404463 - DNA, 55 bp, Artificial
  Synthetic oligonucleotide
gattctcgagttggttgtctggaactgttgaggaactacccagaaacaccagtcc

SEQ ID NO: 404464 - DNA, 55 bp, Artificial
  Synthetic oligonucleotide
gattctgaccgaattgtcttcaaagttcataatcagctggtttctctaaggccag

SEQ ID NO: 404465 - DNA, 53 bp, Artificial
  Synthetic oligonucleotide
gattctgacctaccccctcccagtagggtcgcccaggaatggcgggaccccac

SEQ ID NO: 404466 - DNA, 56 bp, Artificial
  Synthetic oligonucleotide
gattctgagattgcctatcaatatgctttattagctgatgatgatcctaatgctgc

SEQ ID NO: 404467 - DNA, 56 bp, Artificial
  Synthetic oligonucleotide
gattctgcaccagtgccttttacatcctcaaatacaaccataaactgatctatacc

SEQ ID NO: 404468 - DNA, 60 bp, Artificial
  Synthetic oligonucleotide
gattctgcccagagatcaatggacccagcatacaacaactggtggttctcgggcctgtgc

SEQ ID NO: 404469 - DNA, 60 bp, Artificial
  Synthetic oligonucleotide
gattctgcccagggaacaatggactcagcacacgacgactggtggttctcaggcctgtgc

SEQ ID NO: 404470 - DNA, 60 bp, Artificial
  Synthetic oligonucleotide
gattctgccttgaaccattgcaactttggcctgctggttgtgcctattagcccgttagat

SEQ ID NO: 404471 - DNA, 59 bp, Artificial
  Synthetic oligonucleotide
gattctgcgaaacaggtgtattctcgtaggtcgatagaggacgttcatagtagtacgaa

SEQ ID NO: 404472 - DNA, 60 bp, Artificial
  Synthetic oligonucleotide
gattctgcgtctccatcttgctggaaggaatccagagggttaggccatttcactgtagag

SEQ ID NO: 404473 - DNA, 55 bp, Artificial
  Synthetic oligonucleotide
gattctggcgatctattcaactgtcgccagctcattgatactgttagtctctctg

SEQ ID NO: 404474 - DNA, 60 bp, Artificial
  Synthetic oligonucleotide
gattctggtatatctgatgtcgaataataaaagaaaggtcacatttgccactacaagact

SEQ ID NO: 404475 - DNA, 55 bp, Artificial
  Synthetic oligonucleotide
gattctggtccctaccaagtatgcgaagctgtttacccttaagcagctctctcgc

SEQ ID NO: 404476 - DNA, 60 bp, Artificial
  Synthetic oligonucleotide
gattctgtatcatttcgccacatatctgtcatcctcactcagatggttacagtttcgatt

SEQ ID NO: 404477 - DNA, 60 bp, Artificial
  Synthetic oligonucleotide
gattctgtcccatgataagaatctcccagaagagtacagacttcctaccataatgatgtc

SEQ ID NO: 404478 - DNA, 52 bp, Artificial
  Synthetic oligonucleotide
gattctgtcccgaacttgatacgtaacggcggggctctccccggagggtccc

SEQ ID NO: 404479 - DNA, 60 bp, Artificial
  Synthetic oligonucleotide
gattcttaaagtctcactttcgtgagctgatgaagggccctccggggtgtgctcagcact

SEQ ID NO: 404480 - DNA, 55 bp, Artificial
  Synthetic oligonucleotide
gattcttacaagaatcaaagttgcctttgagagttactccttgctctcttcagaa

SEQ ID NO: 404481 - DNA, 55 bp, Artificial
  Synthetic oligonucleotide
gattcttacttgatgttaaagaaatggttcaccgccgaccgtttattggtcgatg

SEQ ID NO: 404482 - DNA, 58 bp, Artificial
  Synthetic oligonucleotide
gattcttagcacttttctgggaagacctgcggaacctgtgccttttctgctaccacca

SEQ ID NO: 404483 - DNA, 58 bp, Artificial
  Synthetic oligonucleotide
gattcttcactacacttcctcactcctacacaccctacaccaggaatttattagaaca

SEQ ID NO: 404484 - DNA, 60 bp, Artificial
  Synthetic oligonucleotide
gattcttccccgatcaccagttgcatactcagcaagacgagactcagggcatactcacaa

SEQ ID NO: 404485 - DNA, 53 bp, Artificial
  Synthetic oligonucleotide
gattcttgttgaagttacgtcgcaagctacagttaaagcgccgcagattacat

SEQ ID NO: 404486 - DNA, 60 bp, Artificial
  Synthetic oligonucleotide
gattctttatcagacgcagcatcatcaatatcaagaggttcatctatacgttcgattgga

SEQ ID NO: 404487 - DNA, 59 bp, Artificial
  Synthetic oligonucleotide
gattctttcgcgaccggaatagagtggttcttcgagtttgatgaagattgcattcttta

SEQ ID NO: 404488 - DNA, 60 bp, Artificial
  Synthetic oligonucleotide
gattctttgatggatccagctattttaacgtcattatcttcaaatcttaacgcagttatg

SEQ ID NO: 404489 - DNA, 56 bp, Artificial
  Synthetic oligonucleotide
gattctttggaactcgtattcggattctaataattatctttgaacggaagtatgcg

SEQ ID NO: 404490 - DNA, 53 bp, Artificial
  Synthetic oligonucleotide
gattgaaactgctgtggatgcaacttatgacaatcttattgcatcctggatta

SEQ ID NO: 404491 - DNA, 55 bp, Artificial
  Synthetic oligonucleotide
gattgaaagacgacaactcgtaaggattaacaaataattcttggattggggcaaa

SEQ ID NO: 404492 - DNA, 55 bp, Artificial
  Synthetic oligonucleotide
gattgaaattctacaacgccaacatctgatgaaacccgtttagatacttcactgg

SEQ ID NO: 404493 - DNA, 55 bp, Artificial
  Synthetic oligonucleotide
gattgaaattgagaatagcgtttgctacagctagggaggagcaggaaaatgacta

SEQ ID NO: 404494 - DNA, 60 bp, Artificial
  Synthetic oligonucleotide
gattgaacacattgcaagcatgaggaggaactattttacagcggaagtgtcccattgcag

SEQ ID NO: 404495 - DNA, 55 bp, Artificial
  Synthetic oligonucleotide
gattgaacatcacattgatcaaggaccaatcactcgtgagtgcatcgcattgcgc

SEQ ID NO: 404496 - DNA, 59 bp, Artificial
  Synthetic oligonucleotide
gattgaacctaaaaacctcatttcattgctatggtgcctgcacaaaataccaataccca

SEQ ID NO: 404497 - DNA, 52 bp, Artificial
  Synthetic oligonucleotide
gattgaacctgatctggacgtgatatactctggtcgttgtgtatggtagatc

SEQ ID NO: 404498 - DNA, 60 bp, Artificial
  Synthetic oligonucleotide
gattgaactggctgaccaaatctgatggaaatgcatacccactccaaaacttgacaaaag

SEQ ID NO: 404499 - DNA, 60 bp, Artificial
  Synthetic oligonucleotide
gattgaagcaactacgcttcaaagggacggtgaagattgaacaggttcaatcgcctatga

SEQ ID NO: 404500 - DNA, 60 bp, Artificial
  Synthetic oligonucleotide
gattgaagcatggggatatcctgagctgttgcaagagattagaaaattctatctctggtt

SEQ ID NO: 404501 - DNA, 55 bp, Artificial
  Synthetic oligonucleotide
gattgaagcgaggggcttaaccttgtctgtcttacgcgcgaatgtcgaggccgcg

SEQ ID NO: 404502 - DNA, 55 bp, Artificial
  Synthetic oligonucleotide
gattgaagtgtcttcctgcaatttcacatctatgatgaattccaaacccttgttg

SEQ ID NO: 404503 - DNA, 55 bp, Artificial
  Synthetic oligonucleotide
gattgaatgtccacacacagtagtgctagggcaaggttatgttgcaggttcagtc

SEQ ID NO: 404504 - DNA, 60 bp, Artificial
  Synthetic oligonucleotide
gattgaattacacattcgccacaaagactgaaaacaaggaagagctgtggtttatgtcac

SEQ ID NO: 404505 - DNA, 55 bp, Artificial
  Synthetic oligonucleotide
gattgaattattccaagccatatcaggtgatcagcagtcatcactcgaacttgcg

SEQ ID NO: 404506 - DNA, 60 bp, Artificial
  Synthetic oligonucleotide
gattgacatacagccaacagcacgaaaacgtacgggccaaaactgcaaagtgaagcatcg

SEQ ID NO: 404507 - DNA, 60 bp, Artificial
  Synthetic oligonucleotide
gattgacattcacgggctgcccatggagaagcagggtaactttatagtaggacagaactg

SEQ ID NO: 404508 - DNA, 52 bp, Artificial
  Synthetic oligonucleotide
gattgaccagaaagtgaaggaaatctcaaaccaggaacctatgaaattataa

SEQ ID NO: 404509 - DNA, 60 bp, Artificial
  Synthetic oligonucleotide
gattgacgcagcattagatcaattgaagacagaatatactgaagatgtagatggtgagat

SEQ ID NO: 404510 - DNA, 58 bp, Artificial
  Synthetic oligonucleotide
gattgacggattggtattatctccgtaagtataccgaccactggctgggctcgtcacc

SEQ ID NO: 404511 - DNA, 55 bp, Artificial
  Synthetic oligonucleotide
gattgacgtcagtgagatcggtgggcactattacattgccaagagctagggtttc

SEQ ID NO: 404512 - DNA, 52 bp, Artificial
  Synthetic oligonucleotide
gattgactcatttggatctttaagcacaggttatcatattctcaaggctaat

SEQ ID NO: 404513 - DNA, 57 bp, Artificial
  Synthetic oligonucleotide
gattgactgatagggcctcgggaggattaagaagctcaattaacgcagtaaggggaa

SEQ ID NO: 404514 - DNA, 50 bp, Artificial
  Synthetic oligonucleotide
gattgagaaagagactcgtgtactgactgaacttagtctcccgccgatca

SEQ ID NO: 404515 - DNA, 59 bp, Artificial
  Synthetic oligonucleotide
gattgagagattagctagtgacttagaagcgttaggcaatgctgatgctcgcgtacgat

SEQ ID NO: 404516 - DNA, 60 bp, Artificial
  Synthetic oligonucleotide
gattgagaggatatccatgggaaagtgataaaattagttatactaattctttgcttgatc

SEQ ID NO: 404517 - DNA, 50 bp, Artificial
  Synthetic oligonucleotide
gattgagcaagtggagtacatgtcgcacacattcaagaaacgaggcgcta

SEQ ID NO: 404518 - DNA, 60 bp, Artificial
  Synthetic oligonucleotide
gattgagcatcaaattggcaatgtcatcaattggaccaaagattcaataaccgacatttg

SEQ ID NO: 404519 - DNA, 51 bp, Artificial
  Synthetic oligonucleotide
gattgagccgagtttacgcggttacacaaattaccgagtccgtaaacgtct

SEQ ID NO: 404520 - DNA, 57 bp, Artificial
  Synthetic oligonucleotide
gattgaggaatacatcaaggactgtgtatttaaggactgggaggagtcgggggagga

SEQ ID NO: 404521 - DNA, 55 bp, Artificial
  Synthetic oligonucleotide
gattgaggatctttaggttgcttaacctaaagagacgacagaggacggtggtagg

SEQ ID NO: 404522 - DNA, 60 bp, Artificial
  Synthetic oligonucleotide
gattgaggcaaatgttcgactagcttcatgttaggtcgttcaagactgtctggcccttat

SEQ ID NO: 404523 - DNA, 60 bp, Artificial
  Synthetic oligonucleotide
gattgaggcaggcacaagattcaacttaggtcctgtgaccattacattgtcagagccaag

SEQ ID NO: 404524 - DNA, 58 bp, Artificial
  Synthetic oligonucleotide
gattgaggcatggggttatgactggttggtgtatgaaatccgacttttctatagttgg

SEQ ID NO: 404525 - DNA, 60 bp, Artificial
  Synthetic oligonucleotide
gattgaggtagaaagagatggcatgcaagaggaggcgatacaggagatcgcggggatgac

SEQ ID NO: 404526 - DNA, 55 bp, Artificial
  Synthetic oligonucleotide
gattgagtggtactgttttgccatataattgggatgctcgcagagccaacgcttt

SEQ ID NO: 404527 - DNA, 51 bp, Artificial
  Synthetic oligonucleotide
gattgagttctcactgactatcaggtaatcctgatgtctgttccgggtcaa

SEQ ID NO: 404528 - DNA, 55 bp, Artificial
  Synthetic oligonucleotide
gattgataatcatgagggatatgtgaacctgtatgctgaaaacaaccctagggtt

SEQ ID NO: 404529 - DNA, 55 bp, Artificial
  Synthetic oligonucleotide
gattgatactatcttgcctcccttgaccgtgtccgaagcaagcggtgccagaact

SEQ ID NO: 404530 - DNA, 59 bp, Artificial
  Synthetic oligonucleotide
gattgatatgggaatctctgccaaatcaccatactcaacaataaagaatccgtctttcc

SEQ ID NO: 404531 - DNA, 59 bp, Artificial
  Synthetic oligonucleotide
gattgatcaaaaagcaccgtatccagaattaaagcttccactatctagaacaatgtgtt

SEQ ID NO: 404532 - DNA, 59 bp, Artificial
  Synthetic oligonucleotide
gattgatcataagagaagaatctttgacatcccatactttaactaccccacctcttgat

SEQ ID NO: 404533 - DNA, 55 bp, Artificial
  Synthetic oligonucleotide
gattgatcatttcctacacgtttaggtttggtacgttgatttctagcccctgcgg

SEQ ID NO: 404534 - DNA, 60 bp, Artificial
  Synthetic oligonucleotide
gattgatcgtgctcagttccatggcattcggacgacgatccatgatcgggtatgtgtgct

SEQ ID NO: 404535 - DNA, 60 bp, Artificial
  Synthetic oligonucleotide
gattgatgaaatggacagagaggccaggctagaaggcgacgtttggctcaaaagtatgat

SEQ ID NO: 404536 - DNA, 59 bp, Artificial
  Synthetic oligonucleotide
gattgatgagttaaaaaggcagctagcagataggattgcaaccggaaagaaccttggaa

SEQ ID NO: 404537 - DNA, 60 bp, Artificial
  Synthetic oligonucleotide
gattgatgatcattgggtgattcagaagtgtcatacaacgaaggaagcgattaccgtaac

SEQ ID NO: 404538 - DNA, 60 bp, Artificial
  Synthetic oligonucleotide
gattgatgcggcagattgtttcaggaatagtggtgataaggatattcttgttatcgctat

SEQ ID NO: 404539 - DNA, 59 bp, Artificial
  Synthetic oligonucleotide
gattgatggagacgaaggactgtagacgaataatttgggtgtatggcccacaaggtgga

SEQ ID NO: 404540 - DNA, 60 bp, Artificial
  Synthetic oligonucleotide
gattgatgggccactaccaaaagacaatgaaccaagtggctatgcccaaacagattgtgt

SEQ ID NO: 404541 - DNA, 60 bp, Artificial
  Synthetic oligonucleotide
gattgattataacaaggctgctctgagcaaattcaaggaggatgtggaatctgctttaca

SEQ ID NO: 404542 - DNA, 60 bp, Artificial
  Synthetic oligonucleotide
gattgattggcttcgaacttttgtccacatgttcccagacagtggatcattagttatacc

SEQ ID NO: 404543 - DNA, 60 bp, Artificial
  Synthetic oligonucleotide
gattgcaaaattgcccccttaatggtagcatacatgctggaaagagagttagttcgcaag

SEQ ID NO: 404544 - DNA, 60 bp, Artificial
  Synthetic oligonucleotide
gattgcaaaattgcccccttgatggtagcatacatgctagaaagagaattagtccgaaaa

SEQ ID NO: 404545 - DNA, 60 bp, Artificial
  Synthetic oligonucleotide
gattgcaacaaagttgacatcaacaacctgcacaatgttgagggtataggcattttaaat

SEQ ID NO: 404546 - DNA, 55 bp, Artificial
  Synthetic oligonucleotide
gattgcaacacacgcggcaatgagatcactcaaggcgattcatgtgctgatggtg

SEQ ID NO: 404547 - DNA, 55 bp, Artificial
  Synthetic oligonucleotide
gattgcaagaatactttgatacagctggtaaagatggagtaatcagtcaccagta

SEQ ID NO: 404548 - DNA, 60 bp, Artificial
  Synthetic oligonucleotide
gattgcaagacacactcttcttgcacgggtatcacagccggactgtggtgtgtggttctc

SEQ ID NO: 404549 - DNA, 60 bp, Artificial
  Synthetic oligonucleotide
gattgcaagcttacagaagagatggagatgggaatatatcaaattactggggtgcggata

SEQ ID NO: 404550 - DNA, 59 bp, Artificial
  Synthetic oligonucleotide
gattgcaatacgacttgtcaaacacccaaaggtgctataaacaccagccttccatttca

SEQ ID NO: 404551 - DNA, 58 bp, Artificial
  Synthetic oligonucleotide
gattgcaattacgatctatcggtgatgttgaagtacacatccatattccaaaatttgg

SEQ ID NO: 404552 - DNA, 58 bp, Artificial
  Synthetic oligonucleotide
gattgcaccgggtcagtacaagaggtcgtaatacaacctaagtggtggcgcttcataa

SEQ ID NO: 404553 - DNA, 55 bp, Artificial
  Synthetic oligonucleotide
gattgcactagtgtgattcaagacacagctcactacctcgtagacgggatgacca

SEQ ID NO: 404554 - DNA, 60 bp, Artificial
  Synthetic oligonucleotide
gattgcactgatgttaataccactagtagtagtttgaggaatgctactaataccacaagt

SEQ ID NO: 404555 - DNA, 60 bp, Artificial
  Synthetic oligonucleotide
gattgcagagctagtgagtactattactcaaaaccagatcacatatcagcaagagctgca

SEQ ID NO: 404556 - DNA, 56 bp, Artificial
  Synthetic oligonucleotide
gattgcagaggaagattgttgggattccacctttaatttgaattggtctcccgtac

SEQ ID NO: 404557 - DNA, 60 bp, Artificial
  Synthetic oligonucleotide
gattgcagccggatcggcgtgttaagaagcctcgcaccacaggcagataaactgatacca

SEQ ID NO: 404558 - DNA, 55 bp, Artificial
  Synthetic oligonucleotide
gattgcagcgtacagttccgaaacacgaactcatccactgcagtcttggaatccg

SEQ ID NO: 404559 - DNA, 60 bp, Artificial
  Synthetic oligonucleotide
gattgcagtcctcatgtactatggtagtaccatggattagcaacaccacgtatcggcaaa

SEQ ID NO: 404560 - DNA, 55 bp, Artificial
  Synthetic oligonucleotide
gattgcatgatctctttagctgtcagtaactattataagcctttgagtagcatgc

SEQ ID NO: 404561 - DNA, 60 bp, Artificial
  Synthetic oligonucleotide
gattgcatggctaaacacaacaattggggaatcgtgatcctgccattatccaaattagac

SEQ ID NO: 404562 - DNA, 56 bp, Artificial
  Synthetic oligonucleotide
gattgcattctaaaaagttgaacaattcgttgctaattcaacttttcgtacgttgc

SEQ ID NO: 404563 - DNA, 58 bp, Artificial
  Synthetic oligonucleotide
gattgccaaatacgaaacagaaatagcgggtattatcaagcaaagagactgttttgac

SEQ ID NO: 404564 - DNA, 54 bp, Artificial
  Synthetic oligonucleotide
gattgccagtccctttgggcccccatgaattccttaaagtgctttaggtagtgg

SEQ ID NO: 404565 - DNA, 60 bp, Artificial
  Synthetic oligonucleotide
gattgcccctttaatggttgcatacatgctggaaagagaattggttcgcaagaccagatt

SEQ ID NO: 404566 - DNA, 56 bp, Artificial
  Synthetic oligonucleotide
gattgcctccaattcaaaatactaggaatgtagtaccagtatcattatcagcaagg

SEQ ID NO: 404567 - DNA, 60 bp, Artificial
  Synthetic oligonucleotide
gattgcctcggcatatgcgtcgttggcagactgctgacctcctctagctgatcttccatc

SEQ ID NO: 404568 - DNA, 60 bp, Artificial
  Synthetic oligonucleotide
gattgcgcatacatagggccgtatgaagatctagcgagtaggatctcttcagcacaaacg

SEQ ID NO: 404569 - DNA, 55 bp, Artificial
  Synthetic oligonucleotide
gattgcgcgtgcagtttagctggcagttcatactcgtggtgttggaagtgcgatt

SEQ ID NO: 404570 - DNA, 56 bp, Artificial
  Synthetic oligonucleotide
gattgcggcagcccggttttaatgagtgaccatgtccccaacggttcggaagatac

SEQ ID NO: 404571 - DNA, 54 bp, Artificial
  Synthetic oligonucleotide
gattgcggcagcccggttttgatgggcgactatgtccctaacgggtcgggggaa

SEQ ID NO: 404572 - DNA, 51 bp, Artificial
  Synthetic oligonucleotide
gattgcgggtatgaccgctgatgtgttagaggctgcttcagaggaggttcc

SEQ ID NO: 404573 - DNA, 52 bp, Artificial
  Synthetic oligonucleotide
gattgcggtgacaggtacaaccctccataccctacgagtgttgagttatgcg

SEQ ID NO: 404574 - DNA, 53 bp, Artificial
  Synthetic oligonucleotide
gattgcgtaagagtcaagaaggatgaatcaccggggaaaattgagctccaagt

SEQ ID NO: 404575 - DNA, 55 bp, Artificial
  Synthetic oligonucleotide
gattgcgtaattgattttggacttaaagtggtggctacccttgacacagacaacc

SEQ ID NO: 404576 - DNA, 60 bp, Artificial
  Synthetic oligonucleotide
gattgcgtccaagaggtgagcatagaccaatgggttagcatggtacgcgccggactattg

SEQ ID NO: 404577 - DNA, 55 bp, Artificial
  Synthetic oligonucleotide
gattgcgttctggtgagggattgcgtattactagggtaacagaacggctcgtggt

SEQ ID NO: 404578 - DNA, 50 bp, Artificial
  Synthetic oligonucleotide
gattgcgttgatttgttacgataccatatgtctcattactatgatttaag

SEQ ID NO: 404579 - DNA, 60 bp, Artificial
  Synthetic oligonucleotide
gattgctaacataccatttaatttgtcacagagagctgtgttagcaccactttctatggg

SEQ ID NO: 404580 - DNA, 60 bp, Artificial
  Synthetic oligonucleotide
gattgctacaaaggattcatttcaatctttcaatgtcacagaaccccacatatctgcaag

SEQ ID NO: 404581 - DNA, 59 bp, Artificial
  Synthetic oligonucleotide
gattgctactgcagacttatcgtttacgaagaattctgatgagcaattgtacatgacgt

SEQ ID NO: 404582 - DNA, 60 bp, Artificial
  Synthetic oligonucleotide
gattgctcaagcaaaaatatgctactgttcgtgtgctcaagaacggtactcttacgtacc

SEQ ID NO: 404583 - DNA, 55 bp, Artificial
  Synthetic oligonucleotide
gattgctcaagccctacaaactcagggagtctgaaatgttgttaaccaaattagc

SEQ ID NO: 404584 - DNA, 60 bp, Artificial
  Synthetic oligonucleotide
gattgctcccttaatggtggcatacatgttggaaagagaactggtgcgcaagaccagatt

SEQ ID NO: 404585 - DNA, 55 bp, Artificial
  Synthetic oligonucleotide
gattgctcgcgcgatcgaatctaaatacggtacgaaagttgatgtttacagagat

SEQ ID NO: 404586 - DNA, 60 bp, Artificial
  Synthetic oligonucleotide
gattgctggcattcagtccgctacatctcgccagaatacgaaggattctgtttatgccca

SEQ ID NO: 404587 - DNA, 55 bp, Artificial
  Synthetic oligonucleotide
gattgctggcgcccatcacggcgtatgcccagcaaacaagaggcctcctagggtg

SEQ ID NO: 404588 - DNA, 55 bp, Artificial
  Synthetic oligonucleotide
gattgctgtcagaaatcctgcatctctggacgatataatattctgaaatcgcaag

SEQ ID NO: 404589 - DNA, 55 bp, Artificial
  Synthetic oligonucleotide
gattgcttataccgttgatctgtcggaagcaactgccatattctctggagatgac

SEQ ID NO: 404590 - DNA, 58 bp, Artificial
  Synthetic oligonucleotide
gattgctttgcagactctgccataaggaaagccctattaggacacataggttttccta

SEQ ID NO: 404591 - DNA, 59 bp, Artificial
  Synthetic oligonucleotide
gattggaaaggcggctgaacggtttgcagaaagtgaaatcgggtccgcagcgatagatg

SEQ ID NO: 404592 - DNA, 60 bp, Artificial
  Synthetic oligonucleotide
gattggaagaagatatcatcggattcagccgataatcgacaatatgtaccatgcgtcgat

SEQ ID NO: 404593 - DNA, 55 bp, Artificial
  Synthetic oligonucleotide
gattggaaggtgtgtcaacgaattgtgggtcttttgggatttgctgcccccttta

SEQ ID NO: 404594 - DNA, 55 bp, Artificial
  Synthetic oligonucleotide
gattggaagtggtcctcagagcataaaagtggatgaattgcggaaggtcaagcga

SEQ ID NO: 404595 - DNA, 58 bp, Artificial
  Synthetic oligonucleotide
gattggaagttggggatccttgccacaagaacatattgtatacaaaatcaaacaatgt

SEQ ID NO: 404596 - DNA, 51 bp, Artificial
  Synthetic oligonucleotide
gattggaattatcatgacgaggaaatgcataagtggcttgatagtcgcaag

SEQ ID NO: 404597 - DNA, 59 bp, Artificial
  Synthetic oligonucleotide
gattggacactaaacagaaatcaaccggccgcaactgcattagccaacactatagaagt

SEQ ID NO: 404598 - DNA, 54 bp, Artificial
  Synthetic oligonucleotide
gattggacatactagccaatatgactaatgacgctagagttattcagacgttaa

SEQ ID NO: 404599 - DNA, 60 bp, Artificial
  Synthetic oligonucleotide
gattggacattaaacaggaatcagccagccgcaactgcattagccaatactatagaggtc

SEQ ID NO: 404600 - DNA, 56 bp, Artificial
  Synthetic oligonucleotide
gattggactccccgggctattgaattccagtacaccactagtctgcgggggaagcc

SEQ ID NO: 404601 - DNA, 57 bp, Artificial
  Synthetic oligonucleotide
gattggagaataagatcaaatagtatggattcaaagttggatttgctgggtttgggg

SEQ ID NO: 404602 - DNA, 56 bp, Artificial
  Synthetic oligonucleotide
gattggagcagaactgtcagcctctgtcaaacaacatgtgggcccaggacaatatg

SEQ ID NO: 404603 - DNA, 55 bp, Artificial
  Synthetic oligonucleotide
gattggagcgggcatggctaccgcggttgcaacaggaagggcgattgagggagct

SEQ ID NO: 404604 - DNA, 54 bp, Artificial
  Synthetic oligonucleotide
gattggaggaccgtttgccggtctcgtcgtcggacttaccagcttggtccccga

SEQ ID NO: 404605 - DNA, 56 bp, Artificial
  Synthetic oligonucleotide
gattggagtcatggtgggcacgtttggctctggaaaaagccacagtgtggttgaat

SEQ ID NO: 404606 - DNA, 60 bp, Artificial
  Synthetic oligonucleotide
gattggagtgaccgcattgagcagtggttaagtgaaccctgtaagcttcttccagacaca

SEQ ID NO: 404607 - DNA, 51 bp, Artificial
  Synthetic oligonucleotide
gattggatactcactaaccatgttgaatcagggaggaacaacagcaataca

SEQ ID NO: 404608 - DNA, 50 bp, Artificial
  Synthetic oligonucleotide
gattggatggtaatgttgtgtgtttagatttgaaacatagagcgccatgt

SEQ ID NO: 404609 - DNA, 50 bp, Artificial
  Synthetic oligonucleotide
gattggattcttccaatcattgcccgagattattaatgaagcgttgaaca

SEQ ID NO: 404610 - DNA, 59 bp, Artificial
  Synthetic oligonucleotide
gattggattcttgagagtgaccacttgttgtccgaaatgttgaacaaagagtattttga

SEQ ID NO: 404611 - DNA, 56 bp, Artificial
  Synthetic oligonucleotide
gattggcaacctcctctagcacttctaccgtcgacctggaaaactccccattcaat

SEQ ID NO: 404612 - DNA, 52 bp, Artificial
  Synthetic oligonucleotide
gattggcatataggcttacgaccccctccctccgcatctgtagaagatcaat

SEQ ID NO: 404613 - DNA, 58 bp, Artificial
  Synthetic oligonucleotide
gattggccagctgccgacgccttaccgactttgcccagggctggggccctattagtca

SEQ ID NO: 404614 - DNA, 59 bp, Artificial
  Synthetic oligonucleotide
gattggccatccggtgacaaacagagcgattgtatacctattcgttggacttgtaccgc

SEQ ID NO: 404615 - DNA, 52 bp, Artificial
  Synthetic oligonucleotide
gattggccatccggtgtctaatagagcgataatctaccagtttgttggattt

SEQ ID NO: 404616 - DNA, 55 bp, Artificial
  Synthetic oligonucleotide
gattggccccaaagccagttccaaatcgtttgttactcgccaattagttgctaag

SEQ ID NO: 404617 - DNA, 51 bp, Artificial
  Synthetic oligonucleotide
gattggccccgcgcttggaacccgtgtcgggcctgtcacactcctaacgcc

SEQ ID NO: 404618 - DNA, 56 bp, Artificial
  Synthetic oligonucleotide
gattggcgagctgccgaccccttaccgattttgaccagggctggggccctatcagt

SEQ ID NO: 404619 - DNA, 50 bp, Artificial
  Synthetic oligonucleotide
gattggcgccggttaaacggagacgataaatgtgttagggtttcagacgt

SEQ ID NO: 404620 - DNA, 55 bp, Artificial
  Synthetic oligonucleotide
gattggctgagcattgttgtctatcttacatcctttgtggttccgatactgctcg

SEQ ID NO: 404621 - DNA, 59 bp, Artificial
  Synthetic oligonucleotide
gattggctttatgagattgcggagtaaattatggagactgttatcggaaaatttattgc

SEQ ID NO: 404622 - DNA, 55 bp, Artificial
  Synthetic oligonucleotide
gattgggaaaacatcatggtcctacatagtagagaaaccaaatcccgtcaatgga

SEQ ID NO: 404623 - DNA, 55 bp, Artificial
  Synthetic oligonucleotide
gattgggacctcaacccacacaaggacaactggccggactccaacaaggtgggag

SEQ ID NO: 404624 - DNA, 51 bp, Artificial
  Synthetic oligonucleotide
gattgggacttcggcccaacgaggatcactggccagagggaaatttcgtac

SEQ ID NO: 404625 - DNA, 55 bp, Artificial
  Synthetic oligonucleotide
gattgggagccgcttaagcaatacaaccatccagatgttctttcagaattctccg

SEQ ID NO: 404626 - DNA, 55 bp, Artificial
  Synthetic oligonucleotide
gattgggatttctcaagtgaagaggttgaaggtgaggcacttttccctttagttg

SEQ ID NO: 404627 - DNA, 60 bp, Artificial
  Synthetic oligonucleotide
gattgggcaacttatcgcgagtttcggtatctagaggatactagagtgatacacataact

SEQ ID NO: 404628 - DNA, 55 bp, Artificial
  Synthetic oligonucleotide
gattgggccagtgtgatagggtcgtgttcgccaccactgggaccggcctgtcaca

SEQ ID NO: 404629 - DNA, 55 bp, Artificial
  Synthetic oligonucleotide
gattgggccctatgccgtgcagacctaaagaaatcgtctctagtgagggacctgt

SEQ ID NO: 404630 - DNA, 60 bp, Artificial
  Synthetic oligonucleotide
gattgggccctctgcaacccggtttgtgatgctgaatcacctgggtctaacgcgctggat

SEQ ID NO: 404631 - DNA, 57 bp, Artificial
  Synthetic oligonucleotide
gattgggccctttgtaacccaacttgtgatgctgaatccccggggtctaatgcgcta

SEQ ID NO: 404632 - DNA, 60 bp, Artificial
  Synthetic oligonucleotide
gattgggcgaaccttgtttgggaagatagctctcgcgacttgctcgtgtcatctaccacc

SEQ ID NO: 404633 - DNA, 54 bp, Artificial
  Synthetic oligonucleotide
gattgggctatcctaacgattaagggccgaaggcccgtttaaatatgtgttgga

SEQ ID NO: 404634 - DNA, 59 bp, Artificial
  Synthetic oligonucleotide
gattgggctcgttgtagcccaacctgtgatgcggaatcacctgggtctaatacacttgg

SEQ ID NO: 404635 - DNA, 60 bp, Artificial
  Synthetic oligonucleotide
gattgggctgatcggattgagcaatggctaagtgaaccttgtaaactactcccagataca

SEQ ID NO: 404636 - DNA, 53 bp, Artificial
  Synthetic oligonucleotide
gattgggggccaggtaggactggccttccggtccaaataggggtgccttgaaa

SEQ ID NO: 404637 - DNA, 60 bp, Artificial
  Synthetic oligonucleotide
gattgggtcgcaatgggcttcaaatgggacgatcgatatgctgctttcgattgtttcgaa

SEQ ID NO: 404638 - DNA, 57 bp, Artificial
  Synthetic oligonucleotide
gattgggtcggatgttcctccggcgaatacctcatggtcgccttgtaagcgggcgat

SEQ ID NO: 404639 - DNA, 55 bp, Artificial
  Synthetic oligonucleotide
gattgggtgccaacttcaacgacaaaagtgtataagcaagttccgcagcaatttg

SEQ ID NO: 404640 - DNA, 53 bp, Artificial
  Synthetic oligonucleotide
gattgggtggcaaattacccgggagttggaggtggatcctttattgacgaccg

SEQ ID NO: 404641 - DNA, 55 bp, Artificial
  Synthetic oligonucleotide
gattgggttcaactcggttgcgattgctgcaccgattgggaatccgaaatccatg

SEQ ID NO: 404642 - DNA, 56 bp, Artificial
  Synthetic oligonucleotide
gattgggttcgggcccattgacaatcccgaaaaatgcgattggcatttcgtcctaa

SEQ ID NO: 404643 - DNA, 55 bp, Artificial
  Synthetic oligonucleotide
gattggtacacactatcaaggaaaacctatgcaccgccaagagaagggcacttgc

SEQ ID NO: 404644 - DNA, 60 bp, Artificial
  Synthetic oligonucleotide
gattggtacctgttgcctgtactctatgacgcagtggtcgattttcatacagctccgatg

SEQ ID NO: 404645 - DNA, 58 bp, Artificial
  Synthetic oligonucleotide
gattggtatgtgagtaataagccatgtgtgccatgtatttacaatgttggaacgcctg

SEQ ID NO: 404646 - DNA, 53 bp, Artificial
  Synthetic oligonucleotide
gattggtcaaagttgagagcttggtgcgctatgttgtagcagtcgggatcaca

SEQ ID NO: 404647 - DNA, 57 bp, Artificial
  Synthetic oligonucleotide
gattggtcactcaaaattacacttccgagctaacgactgaagaaaatcggtcttcaa

SEQ ID NO: 404648 - DNA, 55 bp, Artificial
  Synthetic oligonucleotide
gattggtcaggtgtttccctttgctctggcttgtgatagaatagtcttgcatctg

SEQ ID NO: 404649 - DNA, 60 bp, Artificial
  Synthetic oligonucleotide
gattggtcggccgatcaagaacctactggcatctgtcaagccgctcaacatccttaacat

SEQ ID NO: 404650 - DNA, 56 bp, Artificial
  Synthetic oligonucleotide
gattggtcgggatacagtggaagttttgtccaacaccctgaattaacaggaatgaa

SEQ ID NO: 404651 - DNA, 60 bp, Artificial
  Synthetic oligonucleotide
gattggtgaagcttgtccaggcgtggtcattggctcaaatctagccatgtaccggcgaaa

SEQ ID NO: 404652 - DNA, 60 bp, Artificial
  Synthetic oligonucleotide
gattggtgagaggacacacgcggagacaactatggtaaaagagtatcggaataagattga

SEQ ID NO: 404653 - DNA, 56 bp, Artificial
  Synthetic oligonucleotide
gattggtgcagaaagtagacccactaactttaagttagtggaaatgtcccgatgac

SEQ ID NO: 404654 - DNA, 55 bp, Artificial
  Synthetic oligonucleotide
gattggtggaaagatagtgctcaatttagaccacttgctggaatataacccacca

SEQ ID NO: 404655 - DNA, 59 bp, Artificial
  Synthetic oligonucleotide
gattggtggggcctcctacaccatggctgttgcccaagtgtctgtgtggactcttgttc

SEQ ID NO: 404656 - DNA, 57 bp, Artificial
  Synthetic oligonucleotide
gattgtaacgatgcaaactcgagacgtttacataacgttgtaaaaggattgtgctat

SEQ ID NO: 404657 - DNA, 58 bp, Artificial
  Synthetic oligonucleotide
gattgtacacaacatgttcgtaaaataggtggcgtgactatacaccgtgaagtactta

SEQ ID NO: 404658 - DNA, 58 bp, Artificial
  Synthetic oligonucleotide
gattgtacccgaagttgcatacttggtcatcgtcagttcggaaacagaacgtatcttg

SEQ ID NO: 404659 - DNA, 55 bp, Artificial
  Synthetic oligonucleotide
gattgtaccgatccatgcatgtaatatgatgaagagctgtctaattgcattaggg

SEQ ID NO: 404660 - DNA, 55 bp, Artificial
  Synthetic oligonucleotide
gattgtaccttacctctggcaagttgtcacagttgtgctaagcgtgatcaccgtc

SEQ ID NO: 404661 - DNA, 56 bp, Artificial
  Synthetic oligonucleotide
gattgtactgagagacaggttaattttttagggaagatctggccttcccacaacaa

SEQ ID NO: 404662 - DNA, 60 bp, Artificial
  Synthetic oligonucleotide
gattgtacttagcatattcaccttatgacgatcgagtggacccagcacgttcaattttaa

SEQ ID NO: 404663 - DNA, 60 bp, Artificial
  Synthetic oligonucleotide
gattgtagcagcaagaacaaggtccgcagccaacaaattggtgacactgactcataaggt

SEQ ID NO: 404664 - DNA, 60 bp, Artificial
  Synthetic oligonucleotide
gattgtagtccagggatatggcaattagattgcacacatctagagggaaaagtcatcctg

SEQ ID NO: 404665 - DNA, 60 bp, Artificial
  Synthetic oligonucleotide
gattgtatctcgtggcccactctgtatcgttgttcgccaggctaggccttcgccactgcg

SEQ ID NO: 404666 - DNA, 59 bp, Artificial
  Synthetic oligonucleotide
gattgtatgaaaaatccctccaatagcaactgtccaaactgcaattgggctgattaccc

SEQ ID NO: 404667 - DNA, 58 bp, Artificial
  Synthetic oligonucleotide
gattgtatgataaaggcagttagaggggatctgaatttcgtcaacagggcaaaccaac

SEQ ID NO: 404668 - DNA, 59 bp, Artificial
  Synthetic oligonucleotide
gattgtattaaacaaagtaacaagatgaccactgggaatacatcattagtgcgactagt

SEQ ID NO: 404669 - DNA, 51 bp, Artificial
  Synthetic oligonucleotide
gattgtattatttgctgaccgtcagactatctcatctgccagagtgctccg

SEQ ID NO: 404670 - DNA, 55 bp, Artificial
  Synthetic oligonucleotide
gattgtcaacaataaaagttggggacatcacataccaatggaatcagcaagggag

SEQ ID NO: 404671 - DNA, 55 bp, Artificial
  Synthetic oligonucleotide
gattgtcaccgagagtggtgccccaccgaccgacttacaaaagatggtcatgggc

SEQ ID NO: 404672 - DNA, 60 bp, Artificial
  Synthetic oligonucleotide
gattgtcatttcagttaatgcgtccaccaaatatgacaccagctgttaacgcattatttc

SEQ ID NO: 404673 - DNA, 53 bp, Artificial
  Synthetic oligonucleotide
gattgtcctcctcgagtttcttgatggttctcttggccttccggagccttctc

SEQ ID NO: 404674 - DNA, 58 bp, Artificial
  Synthetic oligonucleotide
gattgtcctttagacacagcacttccggatattcccgcatttagctgtcccgacaatt

SEQ ID NO: 404675 - DNA, 55 bp, Artificial
  Synthetic oligonucleotide
gattgtcgatctgccaaacacagaccctccaacgatgtatatttcgaaggacgga

SEQ ID NO: 404676 - DNA, 59 bp, Artificial
  Synthetic oligonucleotide
gattgtcgattttatcgtcgacgtgctttccgctatcgtcgaccttgccgtggctgcgg

SEQ ID NO: 404677 - DNA, 55 bp, Artificial
  Synthetic oligonucleotide
gattgtctgagcaggctgaaaacctatttgctggttaaattgttcaactggaatg

SEQ ID NO: 404678 - DNA, 60 bp, Artificial
  Synthetic oligonucleotide
gattgtcttgaacaaactggccatacctaaccgaggagtgaacgcatggctcacagccag

SEQ ID NO: 404679 - DNA, 60 bp, Artificial
  Synthetic oligonucleotide
gattgtgaaaccagtcgaggacaattcgttgaagcatgagcgacctttgtgtgccactat

SEQ ID NO: 404680 - DNA, 55 bp, Artificial
  Synthetic oligonucleotide
gattgtgaagtgcagagtccctatgctatctccattcacggagcgtacgacatgg

SEQ ID NO: 404681 - DNA, 55 bp, Artificial
  Synthetic oligonucleotide
gattgtgaatgcgattcaaagaatcatttggaagaacacgaacgagatgtttgtg

SEQ ID NO: 404682 - DNA, 55 bp, Artificial
  Synthetic oligonucleotide
gattgtgacaagtgtgacggaaaaggttacgtggttacccatgattgctcatcta

SEQ ID NO: 404683 - DNA, 60 bp, Artificial
  Synthetic oligonucleotide
gattgtgagtattgatcgtttcttaagagttcgagatcagcaggggaacgtactcctatc

SEQ ID NO: 404684 - DNA, 59 bp, Artificial
  Synthetic oligonucleotide
gattgtgatggggagcgactgggtgtcgcggttgctaagacacagcaactaagaggggt

SEQ ID NO: 404685 - DNA, 60 bp, Artificial
  Synthetic oligonucleotide
gattgtgctagagtatgggtccacaagttgttatgggagactctcaagtgcgtgtgctgg

SEQ ID NO: 404686 - DNA, 58 bp, Artificial
  Synthetic oligonucleotide
gattgtggaacttctaggacgcagggggagggaagtcctcagctattggtagaatatc

SEQ ID NO: 404687 - DNA, 60 bp, Artificial
  Synthetic oligonucleotide
gattgtggaggcatactaaggtgtgagcatggtgtcatcggtattgttactatgggaggt

SEQ ID NO: 404688 - DNA, 60 bp, Artificial
  Synthetic oligonucleotide
gattgtggcttctgtcagacctagagacaatgttagacaagtaagaaattatggacccag

SEQ ID NO: 404689 - DNA, 55 bp, Artificial
  Synthetic oligonucleotide
gattgtggggcttctgggttttgctgcccctttcacacaatgtggttatcctgcg

SEQ ID NO: 404690 - DNA, 60 bp, Artificial
  Synthetic oligonucleotide
gattgtgtcaaccaccaccgcatcaggttgtgacaacattgcacgatgtaattgtaactc

SEQ ID NO: 404691 - DNA, 51 bp, Artificial
  Synthetic oligonucleotide
gattgtgtcaactgccgcccataccttcctggcaacctgcattaacggggt

SEQ ID NO: 404692 - DNA, 60 bp, Artificial
  Synthetic oligonucleotide
gattgtgttctcatatgcgaaactcgtgacgtggggcgtgtcgtggataagttaacgaca

SEQ ID NO: 404693 - DNA, 59 bp, Artificial
  Synthetic oligonucleotide
gattgttacgaaactctagtgtattgcgtgcaacggtatgtcagctcccgagcccttaa

SEQ ID NO: 404694 - DNA, 51 bp, Artificial
  Synthetic oligonucleotide
gattgttacggttaaagacgcaacaaccctgactcccggaaaatccgttgt

SEQ ID NO: 404695 - DNA, 55 bp, Artificial
  Synthetic oligonucleotide
gattgttatgtcacaggcacaactcggctgtatatacccaaggaaggcgggatgg

SEQ ID NO: 404696 - DNA, 60 bp, Artificial
  Synthetic oligonucleotide
gattgttcactagatgggatggaacagaagttcaagttcacgcttacacccctgatggaa

SEQ ID NO: 404697 - DNA, 60 bp, Artificial
  Synthetic oligonucleotide
gattgttcgcaacagatgttcttacatctgcattatccatgaacgactttacaacatttt

SEQ ID NO: 404698 - DNA, 60 bp, Artificial
  Synthetic oligonucleotide
gattgttgcaatggatgatactggaaatccgataatggttttgcctgaatctggttcggc

SEQ ID NO: 404699 - DNA, 55 bp, Artificial
  Synthetic oligonucleotide
gattgttggccgggtccatgacgcaaggaagaacgccgcgttagcgtggccggat

SEQ ID NO: 404700 - DNA, 60 bp, Artificial
  Synthetic oligonucleotide
gattgttgtgcaaccaggccttgcctcggagttggtaatccctagtgaacgcctgcacta

SEQ ID NO: 404701 - DNA, 55 bp, Artificial
  Synthetic oligonucleotide
gattgtttcacgtgtaccagccgttgttgtataccttggcatatgcgacgtttgc

SEQ ID NO: 404702 - DNA, 60 bp, Artificial
  Synthetic oligonucleotide
gattgtttgctagtaataatgtgtgtcgtacttgcaatagttctactgtggcccaataat

SEQ ID NO: 404703 - DNA, 53 bp, Artificial
  Synthetic oligonucleotide
gattgtttgtaatccagccgatctggagctaagaaacatttgtcgggtgctat

SEQ ID NO: 404704 - DNA, 55 bp, Artificial
  Synthetic oligonucleotide
gattgtttgtacatgggtgctggacttgtggcggccacttgcattgtcacactgc

SEQ ID NO: 404705 - DNA, 54 bp, Artificial
  Synthetic oligonucleotide
gattgttttaggtcaagcactactgtttcccccggtcaacgttgatatgctccg

SEQ ID NO: 404706 - DNA, 60 bp, Artificial
  Synthetic oligonucleotide
gattgttttgtatctaggcatgttaaggtctgcataattggtacagtatctaaattctct

SEQ ID NO: 404707 - DNA, 60 bp, Artificial
  Synthetic oligonucleotide
gatttaaaagctatagagccactggaatgcatgctgtcgaactaatggcaaaaaagcaca

SEQ ID NO: 404708 - DNA, 59 bp, Artificial
  Synthetic oligonucleotide
gatttaaaatcgggcttccatcaggttgccatggcaaaagagtccatcccttggactgc

SEQ ID NO: 404709 - DNA, 60 bp, Artificial
  Synthetic oligonucleotide
gatttaaaatgtttactcaacattgctgccaacgtatagatgaacatttctgtggagccc

SEQ ID NO: 404710 - DNA, 52 bp, Artificial
  Synthetic oligonucleotide
gatttaaactctagagtgatcggcctagatataaacccaggtgaatacactg

SEQ ID NO: 404711 - DNA, 59 bp, Artificial
  Synthetic oligonucleotide
gatttaaaggaactagtgtcaacagaggcacaaatccagaaaatgtcgcaggatttaca

SEQ ID NO: 404712 - DNA, 55 bp, Artificial
  Synthetic oligonucleotide
gatttaacaagtagcatgtcagacgcagcttcctcaattagtagatctacatcga

SEQ ID NO: 404713 - DNA, 57 bp, Artificial
  Synthetic oligonucleotide
gatttaacactatggcgaagaaacgtaagaccaagccaaagagagtccgcgttgcga

SEQ ID NO: 404714 - DNA, 59 bp, Artificial
  Synthetic oligonucleotide
gatttaacctacaaatacatactagctgttataatgaaccctatattgaccactggaga

SEQ ID NO: 404715 - DNA, 56 bp, Artificial
  Synthetic oligonucleotide
gatttaacgagcgcaacaaggaaggaaaaaggacatgtaacgtcgacacaatcgcg

SEQ ID NO: 404716 - DNA, 59 bp, Artificial
  Synthetic oligonucleotide
gatttaactatcataaaccatactaattgcaacttgacgattcgaagataggaactgct

SEQ ID NO: 404717 - DNA, 50 bp, Artificial
  Synthetic oligonucleotide
gatttaagaagttgcgaacacacaatgcagcaaagattgcacataagctc

SEQ ID NO: 404718 - DNA, 57 bp, Artificial
  Synthetic oligonucleotide
gatttaagcactgtggtagttttttgagttccatacctgattttcatgaaagtttca

SEQ ID NO: 404719 - DNA, 55 bp, Artificial
  Synthetic oligonucleotide
gatttaagtcctatagtacctgctgactccatagaactacagccattatctcgcc

SEQ ID NO: 404720 - DNA, 55 bp, Artificial
  Synthetic oligonucleotide
gatttaagtgagatggtgcaacatgagagcgcgttactacacagaggactacgtg

SEQ ID NO: 404721 - DNA, 60 bp, Artificial
  Synthetic oligonucleotide
gatttaagttcctacttgatgaggttgaatcactgtgtgccagtgctaccaacctatcca

SEQ ID NO: 404722 - DNA, 60 bp, Artificial
  Synthetic oligonucleotide
gatttaatctgcctgttgcggtgtaaaaattatgccgaagcgttccatcgatacagtgtc

SEQ ID NO: 404723 - DNA, 55 bp, Artificial
  Synthetic oligonucleotide
gatttaatttggcgcgaccttggttataccgcagacaatgaatggttcgagcagg

SEQ ID NO: 404724 - DNA, 55 bp, Artificial
  Synthetic oligonucleotide
gatttacaagtagtaaatgagtgcccttcccgaaatcggaaatatttgactccag

SEQ ID NO: 404725 - DNA, 60 bp, Artificial
  Synthetic oligonucleotide
gatttacactgcttcgctttagctgcatggctgcacactaatttttataactacgctttt

SEQ ID NO: 404726 - DNA, 55 bp, Artificial
  Synthetic oligonucleotide
gatttacagttgacagttaagccatacaatcagaagatagacttgtcgcagttag

SEQ ID NO: 404727 - DNA, 55 bp, Artificial
  Synthetic oligonucleotide
gatttaccagcaactgatgcagaaaagatgtacatagccaaagagggttattgct

SEQ ID NO: 404728 - DNA, 56 bp, Artificial
  Synthetic oligonucleotide
gatttaccatttgtttcacgagctattccgtgtctgctacctaggaaagtgaactt

SEQ ID NO: 404729 - DNA, 60 bp, Artificial
  Synthetic oligonucleotide
gatttaccctgcagagatgttgtgtgtcgaaggtttttacgctcctttgatgtatcgtga

SEQ ID NO: 404730 - DNA, 59 bp, Artificial
  Synthetic oligonucleotide
gatttacctcactttggtgaagtatgctgaaaaggccagtaaattcattcagaattcaa

SEQ ID NO: 404731 - DNA, 60 bp, Artificial
  Synthetic oligonucleotide
gatttacgcgaatagcaacgccactaggggcgctgtacgcagctgcagagaactcgccta

SEQ ID NO: 404732 - DNA, 55 bp, Artificial
  Synthetic oligonucleotide
gatttactccattattttcgtttgctctaactctggcacacactgtagtccagtt

SEQ ID NO: 404733 - DNA, 55 bp, Artificial
  Synthetic oligonucleotide
gatttactgcacgtaactttttgtttaaccgttcaacctcaattaagagacatga

SEQ ID NO: 404734 - DNA, 58 bp, Artificial
  Synthetic oligonucleotide
gatttactgtccgcttttaccatgccagacgacaaatttactgaacaaggggatgcga

SEQ ID NO: 404735 - DNA, 55 bp, Artificial
  Synthetic oligonucleotide
gatttactgtgggtggaggacgatacaatggaacagggcgttaccgactatgtga

SEQ ID NO: 404736 - DNA, 55 bp, Artificial
  Synthetic oligonucleotide
gatttacttatcagttatgttctaagtaagttagatagggagccgagggctctgc

SEQ ID NO: 404737 - DNA, 58 bp, Artificial
  Synthetic oligonucleotide
gatttagaaaggcagcttggtgagttaagggaagagttcaactcactatcgcaagaaa

SEQ ID NO: 404738 - DNA, 55 bp, Artificial
  Synthetic oligonucleotide
gatttagacaggcttatagtgagttcatgaacgcggcttggtctatgccctcgac

SEQ ID NO: 404739 - DNA, 55 bp, Artificial
  Synthetic oligonucleotide
gatttagactttaacgggggatactattggatcccctacgatgagcctcctagcg

SEQ ID NO: 404740 - DNA, 55 bp, Artificial
  Synthetic oligonucleotide
gatttagcagctccacatgttggccatactttctttgtaccaggccacacaagag

SEQ ID NO: 404741 - DNA, 60 bp, Artificial
  Synthetic oligonucleotide
gatttaggcatcatgtagattgccaagtatacattgttgtaaaggcactctattgtcttg

SEQ ID NO: 404742 - DNA, 56 bp, Artificial
  Synthetic oligonucleotide
gatttaggtatcgatctggttcactacgaagatttgactgctcattggcacgcctt

SEQ ID NO: 404743 - DNA, 57 bp, Artificial
  Synthetic oligonucleotide
gatttaggtctgtcgatagatggaattaccttatatttgctcggccccgcaggggaa

SEQ ID NO: 404744 - DNA, 57 bp, Artificial
  Synthetic oligonucleotide
gatttaggtttaggttagcggtggaagagccaccattcgcgataatgagaacaagag

SEQ ID NO: 404745 - DNA, 59 bp, Artificial
  Synthetic oligonucleotide
gatttagtgctctcctcaggttgtggttgaaccggatttgtatgtggtatatccttgtg

SEQ ID NO: 404746 - DNA, 51 bp, Artificial
  Synthetic oligonucleotide
gatttagttttccgagagttattaattcagctgatggtaccactacatggt

SEQ ID NO: 404747 - DNA, 60 bp, Artificial
  Synthetic oligonucleotide
gatttataagacaatcggggatacggcagtacgattcgcggagagcgatatcggctcggc

SEQ ID NO: 404748 - DNA, 54 bp, Artificial
  Synthetic oligonucleotide
gatttataatggcggaaggaggaagagtagagttagttgaaagagtaggggaag

SEQ ID NO: 404749 - DNA, 60 bp, Artificial
  Synthetic oligonucleotide
gatttatatttgcgggcgtatgttgagagctagggaagtgatctgtcagggtgattctaa

SEQ ID NO: 404750 - DNA, 60 bp, Artificial
  Synthetic oligonucleotide
gatttatccagcttatgcctttgacaatcctgccgctatgtatactgctgctgacaaact

SEQ ID NO: 404751 - DNA, 55 bp, Artificial
  Synthetic oligonucleotide
gatttatccagggattaaggtaaagcaactgtgtaaactcctcaggggagccaag

SEQ ID NO: 404752 - DNA, 60 bp, Artificial
  Synthetic oligonucleotide
gatttatccatcatggataagcaagctcgtgtggcactggcagagcatgtcgtttattgc

SEQ ID NO: 404753 - DNA, 60 bp, Artificial
  Synthetic oligonucleotide
gatttatccatgtcatagatattccgacagaatccacatgtagcaccttcattaattgca

SEQ ID NO: 404754 - DNA, 55 bp, Artificial
  Synthetic oligonucleotide
gatttatcggtgtacgactaagcccgttagaaacgcctctccttacggcactcac

SEQ ID NO: 404755 - DNA, 55 bp, Artificial
  Synthetic oligonucleotide
gatttatctaaagcagccaaatctaaagaaaccggtcccgggcactataaattgc

SEQ ID NO: 404756 - DNA, 57 bp, Artificial
  Synthetic oligonucleotide
gatttatggggattgagttgtggcaactagacaaagaagaaactttaatacatgagt

SEQ ID NO: 404757 - DNA, 55 bp, Artificial
  Synthetic oligonucleotide
gatttatggtacaatggcccgctacatgagaaaattcaggaaccaatattgccca

SEQ ID NO: 404758 - DNA, 54 bp, Artificial
  Synthetic oligonucleotide
gatttatgtaccttagaaggaaaccggcttgaagagttcaaaaccaggacgcgc

SEQ ID NO: 404759 - DNA, 57 bp, Artificial
  Synthetic oligonucleotide
gatttattcaccatatgattttggtttgatatcaattggtatacctaaattgggtta

SEQ ID NO: 404760 - DNA, 60 bp, Artificial
  Synthetic oligonucleotide
gatttattcacgtatgttttctcatttacgtgatgattctgattatcggtctgcccttac

SEQ ID NO: 404761 - DNA, 57 bp, Artificial
  Synthetic oligonucleotide
gatttattggcattggacaagtgggacagtctgtggagttggtttaacataacaaaa

SEQ ID NO: 404762 - DNA, 55 bp, Artificial
  Synthetic oligonucleotide
gatttcaaaaggagataacatactcgtgtacgtggcaagctacaacgaggtggac

SEQ ID NO: 404763 - DNA, 58 bp, Artificial
  Synthetic oligonucleotide
gatttcaattctccagatctagagaagctcatccggattccatttaagggtaagatac

SEQ ID NO: 404764 - DNA, 55 bp, Artificial
  Synthetic oligonucleotide
gatttcaccagcaaacctcttaccccggaggcttgggcggtcacgtggcaaccga

SEQ ID NO: 404765 - DNA, 52 bp, Artificial
  Synthetic oligonucleotide
gatttcacgatccgaaattacgacgttttgaaagaaagttcgttcgtatacg

SEQ ID NO: 404766 - DNA, 51 bp, Artificial
  Synthetic oligonucleotide
gatttcagcagagttagacctatttaccctagaaacactcttacagtacct

SEQ ID NO: 404767 - DNA, 53 bp, Artificial
  Synthetic oligonucleotide
gatttcagtcgtgtacgcaatgaactcgagaggctcaacagttggtaggtact

SEQ ID NO: 404768 - DNA, 60 bp, Artificial
  Synthetic oligonucleotide
gatttcagtctaccgttactggtggccagtatgcatctaaggagcaagccatagttagga

SEQ ID NO: 404769 - DNA, 55 bp, Artificial
  Synthetic oligonucleotide
gatttcatcaaaagcaattgtccgttgtttggaggaatgataaagcgtttgggtc

SEQ ID NO: 404770 - DNA, 52 bp, Artificial
  Synthetic oligonucleotide
gatttcatcgagcctgccaacaacgcacggcactacaccgacgaaggcagct

SEQ ID NO: 404771 - DNA, 58 bp, Artificial
  Synthetic oligonucleotide
gatttcatggtcgggcattttcaaccctctaactggtagtccactgagggatctacaa

SEQ ID NO: 404772 - DNA, 53 bp, Artificial
  Synthetic oligonucleotide
gatttcatgtgtggagatgtcaggtaatattcgtgcacctttggaagaaatgc

SEQ ID NO: 404773 - DNA, 56 bp, Artificial
  Synthetic oligonucleotide
gatttccaacgacgtacaggggatgccaatacatatctaggtaacacgttggttac

SEQ ID NO: 404774 - DNA, 55 bp, Artificial
  Synthetic oligonucleotide
gatttccaattgagagggcgaagacacattggtttaagaacctctgccaggcctc

SEQ ID NO: 404775 - DNA, 60 bp, Artificial
  Synthetic oligonucleotide
gatttccactgccgtcgaagaattcattcagtcctgggctgctgctacatctaccgctaa

SEQ ID NO: 404776 - DNA, 55 bp, Artificial
  Synthetic oligonucleotide
gatttccagacacatcattttatgatccctgcctccagcgtttggtttgggcctg

SEQ ID NO: 404777 - DNA, 59 bp, Artificial
  Synthetic oligonucleotide
gatttccaggaattaatgttagtaaacgatgtgtattttcatcgtagcgtgatacctga

SEQ ID NO: 404778 - DNA, 56 bp, Artificial
  Synthetic oligonucleotide
gatttccatgttacgaatcaacctcctcttaaataaattttaggcatccgatagcc

SEQ ID NO: 404779 - DNA, 55 bp, Artificial
  Synthetic oligonucleotide
gatttccccagtccagacgttctatttctgtcaagcgtactgatgggaaacgtcg

SEQ ID NO: 404780 - DNA, 60 bp, Artificial
  Synthetic oligonucleotide
gatttcccctgtgcgtgaatccatgcccggtgcagtctatgtggaagtagatggagcaac

SEQ ID NO: 404781 - DNA, 59 bp, Artificial
  Synthetic oligonucleotide
gatttcccggctattcaaggctggctccgggcaactgagaagcggcggaatgaagctta

SEQ ID NO: 404782 - DNA, 57 bp, Artificial
  Synthetic oligonucleotide
gatttcccgtatgcactcctccgtgccttgagttatctaacgggaacacgtattgct

SEQ ID NO: 404783 - DNA, 55 bp, Artificial
  Synthetic oligonucleotide
gatttccgaaagctccttatgtcggtcgacgtaagagtcctcactgatgaggtcg

SEQ ID NO: 404784 - DNA, 55 bp, Artificial
  Synthetic oligonucleotide
gatttccgagttgcgtacactacgccattactgttcgagatgtgttgcatggaat

SEQ ID NO: 404785 - DNA, 54 bp, Artificial
  Synthetic oligonucleotide
gatttccgcaaggcgaggagactctcggcgtgacctgcccgcaaccagagtcca

SEQ ID NO: 404786 - DNA, 54 bp, Artificial
  Synthetic oligonucleotide
gatttccggaggcacgaaggctctatcctaaaaatggggtagcgcctgggaggg

SEQ ID NO: 404787 - DNA, 58 bp, Artificial
  Synthetic oligonucleotide
gatttccggagtactacaaagactgagaactgctgacacgcagaacttgctgacacag

SEQ ID NO: 404788 - DNA, 51 bp, Artificial
  Synthetic oligonucleotide
gatttccggtataaccgggggatgcgtaggtttcagaccacaaggggttcc

SEQ ID NO: 404789 - DNA, 55 bp, Artificial
  Synthetic oligonucleotide
gatttcctagatttactaggataagagaggataaaacgtggaaagaatctaccca

SEQ ID NO: 404790 - DNA, 59 bp, Artificial
  Synthetic oligonucleotide
gatttcctattcttattatcaactctcttttgagactcctcactaaggtcgtcatagag

SEQ ID NO: 404791 - DNA, 59 bp, Artificial
  Synthetic oligonucleotide
gatttcctcaggtgttgactcctcagaagcgggacccttatgtggtgacaggaatagcc

SEQ ID NO: 404792 - DNA, 55 bp, Artificial
  Synthetic oligonucleotide
gatttcctctcgtcaagacgaatccaacgggcccatgggcagtccatagtgccca

SEQ ID NO: 404793 - DNA, 54 bp, Artificial
  Synthetic oligonucleotide
gatttcctgtatttgtgcttacgcttgtgaactctgtcggtgaatcttctgagt

SEQ ID NO: 404794 - DNA, 60 bp, Artificial
  Synthetic oligonucleotide
gatttcgaactatgccgacgacatatgcactgacatgggttttgagacaaaatttatgtc

SEQ ID NO: 404795 - DNA, 60 bp, Artificial
  Synthetic oligonucleotide
gatttcgaacttaaagattcgataattacatcatatgatggttgtttaggcatattcgga

SEQ ID NO: 404796 - DNA, 60 bp, Artificial
  Synthetic oligonucleotide
gatttcgacggttatactgtcgctacggaggacattaacatggatgttcaggattgtaga

SEQ ID NO: 404797 - DNA, 55 bp, Artificial
  Synthetic oligonucleotide
gatttcgagaaacagttaaggccgggtcccggcaacttagtgcaggatgtatccg

SEQ ID NO: 404798 - DNA, 55 bp, Artificial
  Synthetic oligonucleotide
gatttcggaggtggtacttttgacacttcgttgattgtgcgagacggtaaggtcg

SEQ ID NO: 404799 - DNA, 59 bp, Artificial
  Synthetic oligonucleotide
gatttcgtcttccgcgatatcaatgcgagtttcttctggccctgccgcctcttggaaac

SEQ ID NO: 404800 - DNA, 55 bp, Artificial
  Synthetic oligonucleotide
gatttcgtgactactaattacatgtcattgatttcaggaatgtggctgctgaccg

SEQ ID NO: 404801 - DNA, 51 bp, Artificial
  Synthetic oligonucleotide
gatttctagacatttgtgtagcaattgacatgacctcagagtgtttgggta

SEQ ID NO: 404802 - DNA, 55 bp, Artificial
  Synthetic oligonucleotide
gatttctatgaaatgacttcacgcacaccagctagagctaaggaagcccacatgc

SEQ ID NO: 404803 - DNA, 55 bp, Artificial
  Synthetic oligonucleotide
gatttctcagtgaaacaggatgttgtggcaataactgattggtcagggtacagcg

SEQ ID NO: 404804 - DNA, 59 bp, Artificial
  Synthetic oligonucleotide
gatttctccctgacatctagctctaagtacacctatcgaaggaagctcacaaacccact

SEQ ID NO: 404805 - DNA, 60 bp, Artificial
  Synthetic oligonucleotide
gatttctccgttccaaccgatgaactgtaaatgatgcgtgatgcagtgttgccctaatcc

SEQ ID NO: 404806 - DNA, 51 bp, Artificial
  Synthetic oligonucleotide
gatttctctagaccagcgcacaccaatgacttcactgctttcgatcagtca

SEQ ID NO: 404807 - DNA, 58 bp, Artificial
  Synthetic oligonucleotide
gatttctctcatgacctcatccttgctaggcttcttctcagatggttccttacctggt

SEQ ID NO: 404808 - DNA, 55 bp, Artificial
  Synthetic oligonucleotide
gatttctgagagaaatgaccacgatatcgatgttaaacctctgtcgtttatcacg

SEQ ID NO: 404809 - DNA, 60 bp, Artificial
  Synthetic oligonucleotide
gatttctgctcgctcatgcaagggaacttaataaaggacaaagagtggtacacagtccac

SEQ ID NO: 404810 - DNA, 55 bp, Artificial
  Synthetic oligonucleotide
gatttctgcttgagaatggcccgtgatacagatttacactcacaggacacaccca

SEQ ID NO: 404811 - DNA, 55 bp, Artificial
  Synthetic oligonucleotide
gatttcttcaacagactgaattggctgaccaaatctgatggaaatgcatacccac

SEQ ID NO: 404812 - DNA, 55 bp, Artificial
  Synthetic oligonucleotide
gatttctttgcaagacttccaagtcggggatttacttagagagcgattcgtatcc

SEQ ID NO: 404813 - DNA, 56 bp, Artificial
  Synthetic oligonucleotide
gatttcttttactaacgctgctataagaatacaagtttgttaagatgtaatctttg

SEQ ID NO: 404814 - DNA, 55 bp, Artificial
  Synthetic oligonucleotide
gatttgaaatttgaaacgtgggacccattggatacaccttattccgattcacacc

SEQ ID NO: 404815 - DNA, 58 bp, Artificial
  Synthetic oligonucleotide
gatttgaatgaaacaatattggataattgaagaccatttagacggagggctttatata

SEQ ID NO: 404816 - DNA, 59 bp, Artificial
  Synthetic oligonucleotide
gatttgacccaacttgatgtacatgaatggctcgatagtacacgttatccacttacctt

SEQ ID NO: 404817 - DNA, 55 bp, Artificial
  Synthetic oligonucleotide
gatttgagaagactcaggatggccaataattctcttggaagtggtgtaattgggg

SEQ ID NO: 404818 - DNA, 59 bp, Artificial
  Synthetic oligonucleotide
gatttgagaatggtaactcaaacgctagccgagataggccaactcaccgttatgaggtc

SEQ ID NO: 404819 - DNA, 51 bp, Artificial
  Synthetic oligonucleotide
gatttgagagagaaactgaagaacagttagcacaagcatttaaaagaccag

SEQ ID NO: 404820 - DNA, 60 bp, Artificial
  Synthetic oligonucleotide
gatttgagcattgacttagttcattatgaagatcttaccgcccattggcatgcattggga

SEQ ID NO: 404821 - DNA, 59 bp, Artificial
  Synthetic oligonucleotide
gatttgagcccaagactgcaacagttgcgtgtatcgtcccaaggatccagtaaaagacg

SEQ ID NO: 404822 - DNA, 54 bp, Artificial
  Synthetic oligonucleotide
gatttgagttattacaccatctttaacggacagagatctcatgttgaactggat

SEQ ID NO: 404823 - DNA, 60 bp, Artificial
  Synthetic oligonucleotide
gatttgataaggagatgacatcgacacttgatgtttttttgcaatcccccagatagtcgt

SEQ ID NO: 404824 - DNA, 55 bp, Artificial
  Synthetic oligonucleotide
gatttgataattttgatatttacacctgtggagatgtgcagacagtcaaatcccc

SEQ ID NO: 404825 - DNA, 57 bp, Artificial
  Synthetic oligonucleotide
gatttgatacagatgcaaaacggtacggggtaaaaggcatatgggaagtacatatgg

SEQ ID NO: 404826 - DNA, 55 bp, Artificial
  Synthetic oligonucleotide
gatttgatagcaggttgtggcttcgattttgagaccaactcacaggaagaagggc

SEQ ID NO: 404827 - DNA, 60 bp, Artificial
  Synthetic oligonucleotide
gatttgatggacccaaatgtgaaattcgttgtcgcttccggtgatgattcattgataggc

SEQ ID NO: 404828 - DNA, 60 bp, Artificial
  Synthetic oligonucleotide
gatttgatgtcacagtctcgcactcgcgagatactaacaaaaaccactgtggaccatatg

SEQ ID NO: 404829 - DNA, 60 bp, Artificial
  Synthetic oligonucleotide
gatttgcatcagatgtatatgttgtttgagactactagacattgttgagaaattagactt

SEQ ID NO: 404830 - DNA, 60 bp, Artificial
  Synthetic oligonucleotide
gatttgcattcctggatggagagaactcatggctcgggaggacaattagcaaagactcca

SEQ ID NO: 404831 - DNA, 55 bp, Artificial
  Synthetic oligonucleotide
gatttgccataccaatcatcctgaaagctctctacatgctttccacccgtgggag

SEQ ID NO: 404832 - DNA, 60 bp, Artificial
  Synthetic oligonucleotide
gatttgccattccaggacgcgcatatcagggccctcgctcgcaggtagcaacagaggccg

SEQ ID NO: 404833 - DNA, 58 bp, Artificial
  Synthetic oligonucleotide
gatttgcctcggcacttgtcccaaaggtggtgacacaagtcggttccgtgatagaaga

SEQ ID NO: 404834 - DNA, 57 bp, Artificial
  Synthetic oligonucleotide
gatttgcgcaagtctgccgttaccatcatatcggcactaagtgctttcttcgatgtg

SEQ ID NO: 404835 - DNA, 59 bp, Artificial
  Synthetic oligonucleotide
gatttggaaccctccaagtaaaaacggaactctctgcctgatatgcagtgatgggatcc

SEQ ID NO: 404836 - DNA, 60 bp, Artificial
  Synthetic oligonucleotide
gatttggaaccctccagatatactcgccattcatcgcttgacgagcagtgatgggttccc

SEQ ID NO: 404837 - DNA, 57 bp, Artificial
  Synthetic oligonucleotide
gatttggaactatcgtagctagaaattttgatactattcgtttatcatttcaattag

SEQ ID NO: 404838 - DNA, 55 bp, Artificial
  Synthetic oligonucleotide
gatttggaagaaccaagtgggcaaactgcagactggaaggctataggggtttatg

SEQ ID NO: 404839 - DNA, 60 bp, Artificial
  Synthetic oligonucleotide
gatttggaagagatatgcgttccttacctcgagagagcagctacgcttgttaaggatgtt

SEQ ID NO: 404840 - DNA, 55 bp, Artificial
  Synthetic oligonucleotide
gatttggaaggatctatcgctctttctaacaggcgttttaattgttggtctacgt

SEQ ID NO: 404841 - DNA, 55 bp, Artificial
  Synthetic oligonucleotide
gatttggacgaggtcttacaatcacgccccgctgtctacatcacacaagccccga

SEQ ID NO: 404842 - DNA, 55 bp, Artificial
  Synthetic oligonucleotide
gatttggaggatcgacttgtcaaatgttgtccctgagttgaaaacctttgctgct

SEQ ID NO: 404843 - DNA, 55 bp, Artificial
  Synthetic oligonucleotide
gatttggataaatggagcaaggactacttcaatgatcactctgggacagacagcg

SEQ ID NO: 404844 - DNA, 55 bp, Artificial
  Synthetic oligonucleotide
gatttggatggaatatcaatgttcgagtgcttgtggctgtgtgaggacggcacac

SEQ ID NO: 404845 - DNA, 59 bp, Artificial
  Synthetic oligonucleotide
gatttggatggatgagaacatcaagaccaagaatcatacgaatagtgttatgttttttt

SEQ ID NO: 404846 - DNA, 60 bp, Artificial
  Synthetic oligonucleotide
gatttggatttcggcagggcaatgatgtatggatgggaaggacaattagtaggacatcaa

SEQ ID NO: 404847 - DNA, 50 bp, Artificial
  Synthetic oligonucleotide
gatttggatttttctgcttttgacgctagtttgagtccattcatgataag

SEQ ID NO: 404848 - DNA, 56 bp, Artificial
  Synthetic oligonucleotide
gatttggcaaaactgtttaaactagaacgtggttctgagaccttagagacagaaga

SEQ ID NO: 404849 - DNA, 55 bp, Artificial
  Synthetic oligonucleotide
gatttggcgttctatctcagggaaaagggatggtaccagatccgcgtgacgatgg

SEQ ID NO: 404850 - DNA, 55 bp, Artificial
  Synthetic oligonucleotide
gatttggcttggggaaactgatactctatcagagttggaaccgatcctcaacccg

SEQ ID NO: 404851 - DNA, 59 bp, Artificial
  Synthetic oligonucleotide
gatttgggcaatgcaattgggccttaattttatgggcttctattattgggctatgatat

SEQ ID NO: 404852 - DNA, 55 bp, Artificial
  Synthetic oligonucleotide
gatttggggatgtgatgtcggagttgcaactgtttgcgcagctgcgttcaagggg

SEQ ID NO: 404853 - DNA, 55 bp, Artificial
  Synthetic oligonucleotide
gatttggggcgaaccatggctggacagcatggacatagtcaacatcatcaataag

SEQ ID NO: 404854 - DNA, 59 bp, Artificial
  Synthetic oligonucleotide
gatttggtacctcccaaataaaaacgggattctctgcctgatgcgcagtgatgttctcc

SEQ ID NO: 404855 - DNA, 60 bp, Artificial
  Synthetic oligonucleotide
gatttggtatcattgaattcgctacgatttagattcagtctaacagtagatgaaccatct

SEQ ID NO: 404856 - DNA, 56 bp, Artificial
  Synthetic oligonucleotide
gatttggtcttcttcccggatggtgaggagtctgaggcttatatccaacccctttc

SEQ ID NO: 404857 - DNA, 54 bp, Artificial
  Synthetic oligonucleotide
gatttggtgggatactgatgtcaatcatcctgagttctcaggtacagatggtcg

SEQ ID NO: 404858 - DNA, 59 bp, Artificial
  Synthetic oligonucleotide
gatttggttggttctgtgaacatccctagttctctccttagagattgagtccagcggaa

SEQ ID NO: 404859 - DNA, 50 bp, Artificial
  Synthetic oligonucleotide
gatttgtatcccgaacgacacatcgtttctagcaattgcgaacgcggtac

SEQ ID NO: 404860 - DNA, 60 bp, Artificial
  Synthetic oligonucleotide
gatttgtatgactacaaggagagccgattcattgaaattggagtgacgcgaagggaggtc

SEQ ID NO: 404861 - DNA, 59 bp, Artificial
  Synthetic oligonucleotide
gatttgtatgactataaagagaaccgattcattgaaattggagtgacacggagagaagt

SEQ ID NO: 404862 - DNA, 60 bp, Artificial
  Synthetic oligonucleotide
gatttgtccatatcataaatatttcgacagaatccgcatgtagcaccctcattaattgca

SEQ ID NO: 404863 - DNA, 50 bp, Artificial
  Synthetic oligonucleotide
gatttgtcccaatagaaaggccgagggttaaccccggcccttattacaaa

SEQ ID NO: 404864 - DNA, 57 bp, Artificial
  Synthetic oligonucleotide
gatttgtggagatgtggttcactgcacatgagcgatcacatattaccgacagagaag

SEQ ID NO: 404865 - DNA, 59 bp, Artificial
  Synthetic oligonucleotide
gatttgttaacatcgctaggaacctcaatggatatcaacaaatcaatttagaagagtta

SEQ ID NO: 404866 - DNA, 56 bp, Artificial
  Synthetic oligonucleotide
gatttgttaattcctctcggattatcaccatacgctaatgtgattttcaattcggc

SEQ ID NO: 404867 - DNA, 60 bp, Artificial
  Synthetic oligonucleotide
gatttgttattgaatgaatggttatgtaatccaatggacgtgaccttatattattatcaa

SEQ ID NO: 404868 - DNA, 54 bp, Artificial
  Synthetic oligonucleotide
gatttgttcggggtgattaccgttcgcttccataaacgctttaagagccatctc

SEQ ID NO: 404869 - DNA, 60 bp, Artificial
  Synthetic oligonucleotide
gatttgttctagcgctaaatggacctccggtcgtgtgattggtaccatcgctacgactca

SEQ ID NO: 404870 - DNA, 60 bp, Artificial
  Synthetic oligonucleotide
gatttgttctgtaggtccgtgggatatggaaaatacaacaccatgcttgtagatgaggtc

SEQ ID NO: 404871 - DNA, 60 bp, Artificial
  Synthetic oligonucleotide
gatttgttgagtatacctgtactataactctgatgacctggtgaggcctgacgtctatta

SEQ ID NO: 404872 - DNA, 60 bp, Artificial
  Synthetic oligonucleotide
gatttgtttgtcaggagatggatggccatatattgcatcaagaacctcaataacaggaag

SEQ ID NO: 404873 - DNA, 53 bp, Artificial
  Synthetic oligonucleotide
gattttaaagggaagactgtttggtttgttccaagtataaaagcagggaatga

SEQ ID NO: 404874 - DNA, 56 bp, Artificial
  Synthetic oligonucleotide
gattttaacaatggagatacctggaggcagaaattaacatttccaaaagagggtca

SEQ ID NO: 404875 - DNA, 60 bp, Artificial
  Synthetic oligonucleotide
gattttaacttatttgactgatggttatgcgtttgcttgatggatgacgtaatgattcaa

SEQ ID NO: 404876 - DNA, 55 bp, Artificial
  Synthetic oligonucleotide
gattttaacttgcttggaatccatgacaactgtgctgtactacctacacatgcac

SEQ ID NO: 404877 - DNA, 60 bp, Artificial
  Synthetic oligonucleotide
gattttaagcggagtgccacctcagcagatgcgacgacatacaactgtgtgccgtttaat

SEQ ID NO: 404878 - DNA, 57 bp, Artificial
  Synthetic oligonucleotide
gattttacaatgcccctaagctaatgactctggacgctatgggagacctcttagggg

SEQ ID NO: 404879 - DNA, 55 bp, Artificial
  Synthetic oligonucleotide
gattttacacgtcttggagggccagcacctgagtgttcagatgctaccgaaaata

SEQ ID NO: 404880 - DNA, 55 bp, Artificial
  Synthetic oligonucleotide
gattttacgcgttggcaagggtcaatcgagttcaaatccgatgagatcatgccta

SEQ ID NO: 404881 - DNA, 60 bp, Artificial
  Synthetic oligonucleotide
gattttagagcatcccagatcttgtctgatatggcaatttctcctcacggggaagatcac

SEQ ID NO: 404882 - DNA, 55 bp, Artificial
  Synthetic oligonucleotide
gattttagatccctactggtataaccgccggatgtccataaccccagacttacta

SEQ ID NO: 404883 - DNA, 60 bp, Artificial
  Synthetic oligonucleotide
gattttagcttggtttcgttcgccactcagccttggcactccaacattggaggctcagtg

SEQ ID NO: 404884 - DNA, 60 bp, Artificial
  Synthetic oligonucleotide
gattttagtagaagaagtcaaaatgatacttatatatctaatgatgcacttttgtcagac

SEQ ID NO: 404885 - DNA, 58 bp, Artificial
  Synthetic oligonucleotide
gattttatacatgagcgagcacagtttaatctctcaaaattcataagacgtaagaccg

SEQ ID NO: 404886 - DNA, 57 bp, Artificial
  Synthetic oligonucleotide
gattttatcagtgacacgactggtgtgagctttaatgaacacacgcaccattattac

SEQ ID NO: 404887 - DNA, 55 bp, Artificial
  Synthetic oligonucleotide
gattttatctgcttgctgtttattagtggggttagtcttggggattctggcacta

SEQ ID NO: 404888 - DNA, 60 bp, Artificial
  Synthetic oligonucleotide
gattttattatctcaagctcttccattcttcagaaattatgtcaacgtgcaatcgaaggg

SEQ ID NO: 404889 - DNA, 59 bp, Artificial
  Synthetic oligonucleotide
gattttattgaatcaactagcaggaagaatgatcccaaaagggactgtcacatggtcgg

SEQ ID NO: 404890 - DNA, 55 bp, Artificial
  Synthetic oligonucleotide
gattttcaattgatcccaatgataagcaaatgtagaaccaaagagggaaggcgaa

SEQ ID NO: 404891 - DNA, 57 bp, Artificial
  Synthetic oligonucleotide
gattttcacacccgtctccaaggtacggcgccgtctgaacttcgacagcccgtatgc

SEQ ID NO: 404892 - DNA, 58 bp, Artificial
  Synthetic oligonucleotide
gattttcactacgtgacgggtatgactactgacaatctcaaatgcccgtgccaggtcc

SEQ ID NO: 404893 - DNA, 60 bp, Artificial
  Synthetic oligonucleotide
gattttcagaatccgcgacttcatattcaggatacatatttagagacttatccaataaca

SEQ ID NO: 404894 - DNA, 60 bp, Artificial
  Synthetic oligonucleotide
gattttcagcaagtcttcaattgttatgacaatgaacccagcactgctactgtaaaaaac

SEQ ID NO: 404895 - DNA, 50 bp, Artificial
  Synthetic oligonucleotide
gattttcatacagctacgactgagtctggaagctaattgcgacactgtgg

SEQ ID NO: 404896 - DNA, 56 bp, Artificial
  Synthetic oligonucleotide
gattttcccaccgaatgatcgggatagtatcttaactcttctacttttatctacac

SEQ ID NO: 404897 - DNA, 58 bp, Artificial
  Synthetic oligonucleotide
gattttcgcgtatgaaagtattttctacgcatgaagctgagggaggtaccttcgacaa

SEQ ID NO: 404898 - DNA, 54 bp, Artificial
  Synthetic oligonucleotide
gattttctagcctctgagtgcccttttttacctaaacccaagaatccttcagag

SEQ ID NO: 404899 - DNA, 55 bp, Artificial
  Synthetic oligonucleotide
gattttctcaagagaacttttgttcagaggagcagtaccatctgggacgctccag

SEQ ID NO: 404900 - DNA, 60 bp, Artificial
  Synthetic oligonucleotide
gattttgaatttcccagataaacacgccattctctgtttgagctgcagtgatgggttccc

SEQ ID NO: 404901 - DNA, 59 bp, Artificial
  Synthetic oligonucleotide
gattttgactacactaacctgttcggtgttgctcctgccgatggagagccagacccaac

SEQ ID NO: 404902 - DNA, 54 bp, Artificial
  Synthetic oligonucleotide
gattttgagaaggacgcgtacctaaactctcggtcggagctagtgttcccaaac

SEQ ID NO: 404903 - DNA, 57 bp, Artificial
  Synthetic oligonucleotide
gattttgcccaaagataggtggacacagcatacaacaactgggggttcacgggcctg

SEQ ID NO: 404904 - DNA, 60 bp, Artificial
  Synthetic oligonucleotide
gattttggcgtgtcaacaattatgtggtgtacaaccaccaagaagctgctaagtatgaga

SEQ ID NO: 404905 - DNA, 52 bp, Artificial
  Synthetic oligonucleotide
gattttggggcgcgcgacgccgtaggagtgaaaagcccgaaaggacttttcc

SEQ ID NO: 404906 - DNA, 58 bp, Artificial
  Synthetic oligonucleotide
gattttggtttcgcctacggatggaagcgacctagcgctgattaacactcatttatcc

SEQ ID NO: 404907 - DNA, 54 bp, Artificial
  Synthetic oligonucleotide
gattttgtagtttgacggtcgtagacgaaaggacgtggaagcggcgattttgga

SEQ ID NO: 404908 - DNA, 58 bp, Artificial
  Synthetic oligonucleotide
gatttttgtcccaaagcagttatcacttccataagcgttaggtactctgaattatcta

SEQ ID NO: 404909 - DNA, 55 bp, Artificial
  Synthetic oligonucleotide
gattttttgcttatagggtagaaacatttgaggaaattccgttcgatgtgcaaag

SEQ ID NO: 404910 - DNA, 58 bp, Artificial
  Synthetic oligonucleotide
gcaaaaaaccctctgagtctgcaaagacagatgaaggtcccttggtttcattgaccaa

SEQ ID NO: 404911 - DNA, 59 bp, Artificial
  Synthetic oligonucleotide
gcaaaaaagagaataaagctttctacttttttgctccacacacgctcgactcagatggc

SEQ ID NO: 404912 - DNA, 55 bp, Artificial
  Synthetic oligonucleotide
gcaaaaaatagcctgggaaagcatagtaatctgggggaagactcctaaatttaga

SEQ ID NO: 404913 - DNA, 56 bp, Artificial
  Synthetic oligonucleotide
gcaaaaacaacggagatcgttatccgcaaggtgcctacgcaaagcctagtaacctc

SEQ ID NO: 404914 - DNA, 60 bp, Artificial
  Synthetic oligonucleotide
gcaaaaacacgagagaaacctgtgatatgctcggaacgtgttagtttgctggatcagcat

SEQ ID NO: 404915 - DNA, 57 bp, Artificial
  Synthetic oligonucleotide
gcaaaaagaaactcgtactgactcagtggaacccggcagtagttaagaggtgcaaca

SEQ ID NO: 404916 - DNA, 51 bp, Artificial
  Synthetic oligonucleotide
gcaaaaagtccggaattccttgggggattctaaggttaggagacctttgac

SEQ ID NO: 404917 - DNA, 55 bp, Artificial
  Synthetic oligonucleotide
gcaaaaatgaggactgcccacactaatgatgtgaagcaattaacagaagcagtgc

SEQ ID NO: 404918 - DNA, 53 bp, Artificial
  Synthetic oligonucleotide
gcaaaacacattgaagcgtgggtcccacgtgctcccagggctttaccatacac

SEQ ID NO: 404919 - DNA, 60 bp, Artificial
  Synthetic oligonucleotide
gcaaaacacgtggccttatggttactctatgcccatcgcagtccggtactcccaagatgc

SEQ ID NO: 404920 - DNA, 55 bp, Artificial
  Synthetic oligonucleotide
gcaaaacagcactcttgggatgatacttttagtcgaattgttaaagaatggcagg

SEQ ID NO: 404921 - DNA, 53 bp, Artificial
  Synthetic oligonucleotide
gcaaaacaggagacaacgaacaggttttacatttcacaaaccaaacattttcc

SEQ ID NO: 404922 - DNA, 53 bp, Artificial
  Synthetic oligonucleotide
gcaaaacatgacggcgtcgacatcagtatattgcgccagggcctccgtacaag

SEQ ID NO: 404923 - DNA, 55 bp, Artificial
  Synthetic oligonucleotide
gcaaaacatgagttgcgaaactgaactgtacgttgggaattatgctggtgccaat

SEQ ID NO: 404924 - DNA, 55 bp, Artificial
  Synthetic oligonucleotide
gcaaaacatgtgggaggtgcatgtgggcaacaatgttattcaccaaccatgcgac

SEQ ID NO: 404925 - DNA, 60 bp, Artificial
  Synthetic oligonucleotide
gcaaaaccagagctaacaaatccttatgatcatatcttggttagacttggtagagcgcgt

SEQ ID NO: 404926 - DNA, 55 bp, Artificial
  Synthetic oligonucleotide
gcaaaacccaactgaggagcaagcagtggagatatgtaaggcagcgatgggcctg

SEQ ID NO: 404927 - DNA, 60 bp, Artificial
  Synthetic oligonucleotide
gcaaaacgcacaattccactacctctaccgatcagggttctgtattcacgtgcagtgcaa

SEQ ID NO: 404928 - DNA, 56 bp, Artificial
  Synthetic oligonucleotide
gcaaaacggaagcctcgctttaccaataaccagcgagctagaactgttaggccaaa

SEQ ID NO: 404929 - DNA, 55 bp, Artificial
  Synthetic oligonucleotide
gcaaaacgtgacaataaatccaggaccatttgctcagactggatacgcacccgtg

SEQ ID NO: 404930 - DNA, 55 bp, Artificial
  Synthetic oligonucleotide
gcaaaacgtgagagtttttcccagagaaagtctctgaggcttgttgcagtagagc

SEQ ID NO: 404931 - DNA, 60 bp, Artificial
  Synthetic oligonucleotide
gcaaaactactgatcctgttatgtgcactttcagccacagatgcagacacaatatgtata

SEQ ID NO: 404932 - DNA, 50 bp, Artificial
  Synthetic oligonucleotide
gcaaaactagctgaaagctacaacaagaacataacagagataacatttag

SEQ ID NO: 404933 - DNA, 55 bp, Artificial
  Synthetic oligonucleotide
gcaaaactattttagagcccgacgatcgctggtgtagaagcgacgaacgttcccc

SEQ ID NO: 404934 - DNA, 55 bp, Artificial
  Synthetic oligonucleotide
gcaaaactcgatctccattgaaaatttgaggcataagacgggcctgatacgtgcc

SEQ ID NO: 404935 - DNA, 60 bp, Artificial
  Synthetic oligonucleotide
gcaaaactctcaaccatatttatagttcaaattctattctccatactgtgtatggagaat

SEQ ID NO: 404936 - DNA, 55 bp, Artificial
  Synthetic oligonucleotide
gcaaaactgttcttactgcatgggcatcacgatagtccgtattataagagcgggg

SEQ ID NO: 404937 - DNA, 60 bp, Artificial
  Synthetic oligonucleotide
gcaaaacttggatgcatcatctgcctggggtatgtttgcccacacatacggtccattgtg

SEQ ID NO: 404938 - DNA, 55 bp, Artificial
  Synthetic oligonucleotide
gcaaaagaataggtctctgaaattgaagatgtatgacgacatgcttggttcgggt

SEQ ID NO: 404939 - DNA, 56 bp, Artificial
  Synthetic oligonucleotide
gcaaaagactacggaggtaaaattggacattacttcttcagagcaaagcgtgcctt

SEQ ID NO: 404940 - DNA, 60 bp, Artificial
  Synthetic oligonucleotide
gcaaaagatatgaactagaaattggcaccagaataggtgatggacagagaagttggatga

SEQ ID NO: 404941 - DNA, 55 bp, Artificial
  Synthetic oligonucleotide
gcaaaagcaggcaccgaacagcggcattcatcacctattcgggcactagcgtgga

SEQ ID NO: 404942 - DNA, 55 bp, Artificial
  Synthetic oligonucleotide
gcaaaagccctacagtttataccagtggaaacccttagtacacaggctaggtctc

SEQ ID NO: 404943 - DNA, 55 bp, Artificial
  Synthetic oligonucleotide
gcaaaagccgggcagaccctggcgtgcttccaccacaacgtgctctgcagattgg

SEQ ID NO: 404944 - DNA, 53 bp, Artificial
  Synthetic oligonucleotide
gcaaaagcgaaatgcctcgattgtggcgagactttcgttgaaaggcaagactt

SEQ ID NO: 404945 - DNA, 59 bp, Artificial
  Synthetic oligonucleotide
gcaaaaggactaaaagagactctgccactaatttgtataatcaatgtagaataactggc

SEQ ID NO: 404946 - DNA, 60 bp, Artificial
  Synthetic oligonucleotide
gcaaaaggagagaaggctaatgtactgattgggcaaggagacgtagtgttggtgatgaaa

SEQ ID NO: 404947 - DNA, 56 bp, Artificial
  Synthetic oligonucleotide
gcaaaatacaacaaccccttgtagcaaaatgcgacaacaaagattctcctataaaa

SEQ ID NO: 404948 - DNA, 55 bp, Artificial
  Synthetic oligonucleotide
gcaaaatactctgtatggctccggtgatcgatacgttaggatgggaactgaaagc

SEQ ID NO: 404949 - DNA, 59 bp, Artificial
  Synthetic oligonucleotide
gcaaaataggatacagattgacccagtcaaactgagcagcggctacaaagatgtgatac

SEQ ID NO: 404950 - DNA, 55 bp, Artificial
  Synthetic oligonucleotide
gcaaaatcagccagtttagttcacctccgttaattttgttggtaggcttcccaga

SEQ ID NO: 404951 - DNA, 55 bp, Artificial
  Synthetic oligonucleotide
gcaaaatccagctggggatgatatgaccctattctgtcaaatggtttcaagtgtc

SEQ ID NO: 404952 - DNA, 60 bp, Artificial
  Synthetic oligonucleotide
gcaaaatccccgttatgctcgatggacatctcatagcgtttgactattcaggctatgacg

SEQ ID NO: 404953 - DNA, 51 bp, Artificial
  Synthetic oligonucleotide
gcaaaatcgatgagctaaggagacagctagctgaccgtgtagctgcaggga

SEQ ID NO: 404954 - DNA, 54 bp, Artificial
  Synthetic oligonucleotide
gcaaaatcgcacagttccacattacaggaccacaggcaaattccttgaatttac

SEQ ID NO: 404955 - DNA, 57 bp, Artificial
  Synthetic oligonucleotide
gcaaaatcgtgaggatgaatttaggattggcgaacataatttttacaccataacacg

SEQ ID NO: 404956 - DNA, 58 bp, Artificial
  Synthetic oligonucleotide
gcaaaatctgagctactaatactgcttgaatatatagatagagagtgtaaggactacg

SEQ ID NO: 404957 - DNA, 55 bp, Artificial
  Synthetic oligonucleotide
gcaaaatctggatgcaaggtggacatgcagccgttccactcatatggaggtccga

SEQ ID NO: 404958 - DNA, 60 bp, Artificial
  Synthetic oligonucleotide
gcaaaatctgtattcaacagtctatatgcatcaccacaactcgaggggttttcagctgaa

SEQ ID NO: 404959 - DNA, 55 bp, Artificial
  Synthetic oligonucleotide
gcaaaatcttcgtccagattgtgtttactcaccaattgtcttataagtttctcgg

SEQ ID NO: 404960 - DNA, 60 bp, Artificial
  Synthetic oligonucleotide
gcaaaatgcaacatttccgacagtcaacttttcgtctctattgggaacgcaagtggcaca

SEQ ID NO: 404961 - DNA, 52 bp, Artificial
  Synthetic oligonucleotide
gcaaaatggaaaacaagatcgaggtgaacagcaaggatgagatgaacaaatg

SEQ ID NO: 404962 - DNA, 58 bp, Artificial
  Synthetic oligonucleotide
gcaaaatggagggagtggtgcttgcaaaagagggcccgccaatggctttttcagtaga

SEQ ID NO: 404963 - DNA, 57 bp, Artificial
  Synthetic oligonucleotide
gcaaaatgggtacgtagttaaccactgcgtatcaggattgcaggccacgaagggtat

SEQ ID NO: 404964 - DNA, 54 bp, Artificial
  Synthetic oligonucleotide
gcaaaattatggggttaatttacctattacaggatccatggacactacatatgc

SEQ ID NO: 404965 - DNA, 58 bp, Artificial
  Synthetic oligonucleotide
gcaaaattcctatgggagtgggcctcagtccgtttctcttggctcagtttactagcgc

SEQ ID NO: 404966 - DNA, 55 bp, Artificial
  Synthetic oligonucleotide
gcaaaattgctatataagtggcttaaactagcatgagtatttccaggtcaaccac

SEQ ID NO: 404967 - DNA, 60 bp, Artificial
  Synthetic oligonucleotide
gcaaaattgctcccttgatggtagcatacatgctagaaagagagttggtccgcaaaacga

SEQ ID NO: 404968 - DNA, 60 bp, Artificial
  Synthetic oligonucleotide
gcaaaattgctcctttaatggtagcatatatgctggagagagaactggtccgcaaaacca

SEQ ID NO: 404969 - DNA, 55 bp, Artificial
  Synthetic oligonucleotide
gcaaaattgtgcatggatgaaaggaactctgaacttttatgttgtggcacgagca

SEQ ID NO: 404970 - DNA, 57 bp, Artificial
  Synthetic oligonucleotide
gcaaaatttcccctttgatggttgcatacatgttagagagggaacttgtccgcaaaa

SEQ ID NO: 404971 - DNA, 58 bp, Artificial
  Synthetic oligonucleotide
gcaaacaaaactcggccttaaatgaggtcctgtgagaggggacctcgccattgaatgc

SEQ ID NO: 404972 - DNA, 58 bp, Artificial
  Synthetic oligonucleotide
gcaaacaagggtggacaaactgacacaaggcagacagacctatgactggactctaaat

SEQ ID NO: 404973 - DNA, 59 bp, Artificial
  Synthetic oligonucleotide
gcaaacaattcaacagagcaggttgacacaataatggaaaagaacgttactgttacaca

SEQ ID NO: 404974 - DNA, 55 bp, Artificial
  Synthetic oligonucleotide
gcaaacaccgtattgaaccagtatgtctgttagtgcatggtagcccggggactgg

SEQ ID NO: 404975 - DNA, 60 bp, Artificial
  Synthetic oligonucleotide
gcaaacacctgcattgtgagggctctagatgtggggatcatgtgcaaagatgatatcaca

SEQ ID NO: 404976 - DNA, 55 bp, Artificial
  Synthetic oligonucleotide
gcaaacacggcagctttaagtaacaaagtcctagcagaatacaaagttcctggcg

SEQ ID NO: 404977 - DNA, 52 bp, Artificial
  Synthetic oligonucleotide
gcaaacagactatttccccagatgaactgggtctaacttcagcccaagacga

SEQ ID NO: 404978 - DNA, 60 bp, Artificial
  Synthetic oligonucleotide
gcaaacaggcctattatagaaattgatatgaacacattggagcacacgagtagatacgtg

SEQ ID NO: 404979 - DNA, 60 bp, Artificial
  Synthetic oligonucleotide
gcaaacagtataagaagatcaattcatagatactgcttatacggtcagtcatagacgtac

SEQ ID NO: 404980 - DNA, 55 bp, Artificial
  Synthetic oligonucleotide
gcaaacagtgataataatcctaaggtgaagatgtgtcgaaagtgactgaacctct

SEQ ID NO: 404981 - DNA, 60 bp, Artificial
  Synthetic oligonucleotide
gcaaacagtgtgtgcgcatatgaggcaacccatttgcagcctgtacaaacttttatcgct

SEQ ID NO: 404982 - DNA, 56 bp, Artificial
  Synthetic oligonucleotide
gcaaacataccagagtggatcagacggctctcagaacagctttaattcgttcggag

SEQ ID NO: 404983 - DNA, 57 bp, Artificial
  Synthetic oligonucleotide
gcaaacatccggaagccacatactcccggtgtggctccggtccctggattacaccca

SEQ ID NO: 404984 - DNA, 55 bp, Artificial
  Synthetic oligonucleotide
gcaaaccacaattcacaacagcgacaattccgaaatacaattcaacctcaaacct

SEQ ID NO: 404985 - DNA, 60 bp, Artificial
  Synthetic oligonucleotide
gcaaaccactgaacgagcgagtcaatcattggacggtgacaggacccgggactgtgacac

SEQ ID NO: 404986 - DNA, 60 bp, Artificial
  Synthetic oligonucleotide
gcaaaccatccgtggatgtctggctcgatgacatacaccaggagaacccggctaagacac

SEQ ID NO: 404987 - DNA, 60 bp, Artificial
  Synthetic oligonucleotide
gcaaaccatgctgcagcgctgtatacgtttaccggtgggggcaatgcgtttagtctagga

SEQ ID NO: 404988 - DNA, 55 bp, Artificial
  Synthetic oligonucleotide
gcaaaccattacaccaacagaattgggactaacctcagcacaagatgatggccct

SEQ ID NO: 404989 - DNA, 54 bp, Artificial
  Synthetic oligonucleotide
gcaaaccatttcaccaagcttgaatcttaaccccaaccttgaactcgtagactt

SEQ ID NO: 404990 - DNA, 55 bp, Artificial
  Synthetic oligonucleotide
gcaaacccagattgtaagactattctaaaagcactgggaccaacagccacactag

SEQ ID NO: 404991 - DNA, 60 bp, Artificial
  Synthetic oligonucleotide
gcaaacccagcatatctcacagatcgattacctgcaatattcagcttacacctagagcaa

SEQ ID NO: 404992 - DNA, 52 bp, Artificial
  Synthetic oligonucleotide
gcaaacccatggtggactccgtcccccttctccacactccttccccccgcgg

SEQ ID NO: 404993 - DNA, 55 bp, Artificial
  Synthetic oligonucleotide
gcaaaccccaagagaaggggttctggcgggcctgagtagagtcagttacgaccat

SEQ ID NO: 404994 - DNA, 55 bp, Artificial
  Synthetic oligonucleotide
gcaaaccctaccattctaccaacaaaggcttgaagctcgtaggacttggcgcgag

SEQ ID NO: 404995 - DNA, 53 bp, Artificial
  Synthetic oligonucleotide
gcaaaccctgcaaactgcttacgctaaaaaaattaacgtagatggtctttttc

SEQ ID NO: 404996 - DNA, 55 bp, Artificial
  Synthetic oligonucleotide
gcaaaccgctagctccgaagagccttagcttaacgccggaatgcagggagccacg

SEQ ID NO: 404997 - DNA, 55 bp, Artificial
  Synthetic oligonucleotide
gcaaacctaacgttgatccatttgcagcgttagaagaacgtctcgccccgtactt

SEQ ID NO: 404998 - DNA, 58 bp, Artificial
  Synthetic oligonucleotide
gcaaacctagggctaggtgttgttgctataacaacactcgttacagctctagttgtag

SEQ ID NO: 404999 - DNA, 55 bp, Artificial
  Synthetic oligonucleotide
gcaaacgcctaatgggcttgggcttttcaacagaccaaaagtccacacagtctgc

SEQ ID NO: 405000 - DNA, 57 bp, Artificial
  Synthetic oligonucleotide
gcaaacggaagattgggccatttgctcccgtcttggtttcaagcattatattgtggg

SEQ ID NO: 405001 - DNA, 58 bp, Artificial
  Synthetic oligonucleotide
gcaaacggactgtgtcttggaagcaatggctttccttgaagaatcccacccagggatc

SEQ ID NO: 405002 - DNA, 55 bp, Artificial
  Synthetic oligonucleotide
gcaaacggatcaatgcgttctgcccaaccgaattggctatgaccaacccaacgtc

SEQ ID NO: 405003 - DNA, 60 bp, Artificial
  Synthetic oligonucleotide
gcaaacggcatggaactttatgcgtatgagagcttacccgccaaacggcgtaatgccatc

SEQ ID NO: 405004 - DNA, 52 bp, Artificial
  Synthetic oligonucleotide
gcaaacgtctggtgcgcatgacacccggatacgggctgaacagggcgcaaac

SEQ ID NO: 405005 - DNA, 55 bp, Artificial
  Synthetic oligonucleotide
gcaaacgttaaatctttgtaactttcctagtatttggttgcttgtcaacacattc

SEQ ID NO: 405006 - DNA, 55 bp, Artificial
  Synthetic oligonucleotide
gcaaacgttctattgtgatcgtaactaggaactcgggatggattctttgttccgc

SEQ ID NO: 405007 - DNA, 58 bp, Artificial
  Synthetic oligonucleotide
gcaaactatttgaatggatgtcaatccgaccttacttttcttaaaagtgccagcacaa

SEQ ID NO: 405008 - DNA, 60 bp, Artificial
  Synthetic oligonucleotide
gcaaactccctcttttcctgacattcatttacatcaagacattaccaacaagtgtcaaca

SEQ ID NO: 405009 - DNA, 60 bp, Artificial
  Synthetic oligonucleotide
gcaaactccgatcgtccaggcccaacagatgcagcagctaatcagtgcagtttctgccct

SEQ ID NO: 405010 - DNA, 55 bp, Artificial
  Synthetic oligonucleotide
gcaaactcgaggcttaatgggcaccattgtgaccagtctaacggggagagacgcc

SEQ ID NO: 405011 - DNA, 60 bp, Artificial
  Synthetic oligonucleotide
gcaaactgacggaattgaacatacaaagtgagctgacatacataagtgatcgttacttct

SEQ ID NO: 405012 - DNA, 55 bp, Artificial
  Synthetic oligonucleotide
gcaaactgatgcagcttctccagtaactgttcacgatacatttacagttacccca

SEQ ID NO: 405013 - DNA, 55 bp, Artificial
  Synthetic oligonucleotide
gcaaactgcaacgtctctgagcgcaatgatcaagtgtccactgtgagaaatgcca

SEQ ID NO: 405014 - DNA, 55 bp, Artificial
  Synthetic oligonucleotide
gcaaactgcaatcccgaacattggatctagaccctgggtaaggggccagcctggc

SEQ ID NO: 405015 - DNA, 51 bp, Artificial
  Synthetic oligonucleotide
gcaaactgcttgagaaagtcgggaaagaaggtgatccaattgagtagaaaa

SEQ ID NO: 405016 - DNA, 52 bp, Artificial
  Synthetic oligonucleotide
gcaaactgggaacgcgtagccgtcagtaacgaaaccaaactcttttcaaacg

SEQ ID NO: 405017 - DNA, 55 bp, Artificial
  Synthetic oligonucleotide
gcaaactggtaaggggcagctacttgattatgctgaactaccacagaagaaagag

SEQ ID NO: 405018 - DNA, 58 bp, Artificial
  Synthetic oligonucleotide
gcaaactgtggaagctgtacgcacggtgtagcagactagcggttagaggagacccctc

SEQ ID NO: 405019 - DNA, 55 bp, Artificial
  Synthetic oligonucleotide
gcaaacttcataaactacagaggcggaacaaattacccgctctcacgcacccaag

SEQ ID NO: 405020 - DNA, 55 bp, Artificial
  Synthetic oligonucleotide
gcaaactttcctaaactacaacaggacagagcaggggtccctttagatatagtgg

SEQ ID NO: 405021 - DNA, 52 bp, Artificial
  Synthetic oligonucleotide
gcaaagaaagcaacggggctagccgacgggtgttccgccccccgagagggga

SEQ ID NO: 405022 - DNA, 55 bp, Artificial
  Synthetic oligonucleotide
gcaaagaataatgcgattgtagcgaacacaaaagaggttcagcacattaaggagg

SEQ ID NO: 405023 - DNA, 51 bp, Artificial
  Synthetic oligonucleotide
gcaaagaatgcattatagaaatggcgatccccaaactccatttcaaatagc

SEQ ID NO: 405024 - DNA, 57 bp, Artificial
  Synthetic oligonucleotide
gcaaagaatggtgactccccaattactgtccctccaaatggatactttagatttgaa

SEQ ID NO: 405025 - DNA, 60 bp, Artificial
  Synthetic oligonucleotide
gcaaagacttttgcttgcgcatggcacgagatactaacctacacctgcaaagtggtgcaa

SEQ ID NO: 405026 - DNA, 57 bp, Artificial
  Synthetic oligonucleotide
gcaaagagcgtgtgtggcccggtatattgcttcacccccagccccgtggtagtggga

SEQ ID NO: 405027 - DNA, 59 bp, Artificial
  Synthetic oligonucleotide
gcaaagagctacgaacctagcacattgggttttgaatacgtccgtgatctcatctccgt

SEQ ID NO: 405028 - DNA, 55 bp, Artificial
  Synthetic oligonucleotide
gcaaagaggggccaacacagcacacaatcaaagaacagcccgaaacaacagcagg

SEQ ID NO: 405029 - DNA, 60 bp, Artificial
  Synthetic oligonucleotide
gcaaagagtactgaccaagtgtgaataccctgcaggacatagtcaggtagggacactaca

SEQ ID NO: 405030 - DNA, 55 bp, Artificial
  Synthetic oligonucleotide
gcaaagagtaggtagggctgttcttaacatacctgtaagaataagacaaggcgcg

SEQ ID NO: 405031 - DNA, 56 bp, Artificial
  Synthetic oligonucleotide
gcaaagataattatgaggacctatggcacgtgcccacatggttttacccgtgcgac

SEQ ID NO: 405032 - DNA, 55 bp, Artificial
  Synthetic oligonucleotide
gcaaagatcttgggatctatgtgcctgtacttgacaaggaacgcctgttctgctc

SEQ ID NO: 405033 - DNA, 57 bp, Artificial
  Synthetic oligonucleotide
gcaaagatgatcctacacgtaaaacaactataggagaagattgggaacgaattcacc

SEQ ID NO: 405034 - DNA, 60 bp, Artificial
  Synthetic oligonucleotide
gcaaagatggagagatcactttgtacaagtccattacgtactggaagagagaagaatgga

SEQ ID NO: 405035 - DNA, 55 bp, Artificial
  Synthetic oligonucleotide
gcaaagatgttacaacaacctacaggaggatataccacgctcgaacgcttcaact

SEQ ID NO: 405036 - DNA, 50 bp, Artificial
  Synthetic oligonucleotide
gcaaagatgttagtgaccttaagcagtatgacagcgatgagccagaacct

SEQ ID NO: 405037 - DNA, 60 bp, Artificial
  Synthetic oligonucleotide
gcaaagatgttagtgatctaagacaatatgacagtgatgaaccggagtctagatcgatag

SEQ ID NO: 405038 - DNA, 60 bp, Artificial
  Synthetic oligonucleotide
gcaaagatgttagtgatctgaaacagtatgatagtgatgagccagagcccagatcgctag

SEQ ID NO: 405039 - DNA, 60 bp, Artificial
  Synthetic oligonucleotide
gcaaagatgttgcgggtttgtgtggtgaatagtggtgccaaatattgcacctgtcaaggc

SEQ ID NO: 405040 - DNA, 55 bp, Artificial
  Synthetic oligonucleotide
gcaaagattatcggagagggtctttcctcgaatcctcttttcaactcgtgtgtgg

SEQ ID NO: 405041 - DNA, 56 bp, Artificial
  Synthetic oligonucleotide
gcaaagattgtggaacatcacacgttaatgactactcataagatgtgtgcaaactg

SEQ ID NO: 405042 - DNA, 50 bp, Artificial
  Synthetic oligonucleotide
gcaaagcacgatagcgggaattccacctttaatttgaacaggctttccat

SEQ ID NO: 405043 - DNA, 60 bp, Artificial
  Synthetic oligonucleotide
gcaaagcagcaatgggtctgaggatcagctcatccttcagctttggaggcttcactttca

SEQ ID NO: 405044 - DNA, 60 bp, Artificial
  Synthetic oligonucleotide
gcaaagccaggatgtcaatatgtatatcaggcccaaacaacaatgcatcagcagtgatct

SEQ ID NO: 405045 - DNA, 57 bp, Artificial
  Synthetic oligonucleotide
gcaaagccatatagtaccccgactattttcctacctccagcatacaatcaacaaggg

SEQ ID NO: 405046 - DNA, 52 bp, Artificial
  Synthetic oligonucleotide
gcaaagccatgccctttaagggttcggggtgttcacctaccagtaaaagctt

SEQ ID NO: 405047 - DNA, 59 bp, Artificial
  Synthetic oligonucleotide
gcaaagcccgctcctactagaggagactgggaaactgagatgcaggcctgtaaagcctt

SEQ ID NO: 405048 - DNA, 50 bp, Artificial
  Synthetic oligonucleotide
gcaaagccgagagaacggttgtggttctcaatagaaagacattcgagaag

SEQ ID NO: 405049 - DNA, 55 bp, Artificial
  Synthetic oligonucleotide
gcaaagcctaaatgacagtgactttaagcacgaaccatggacactgcaggacaca

SEQ ID NO: 405050 - DNA, 55 bp, Artificial
  Synthetic oligonucleotide
gcaaagcctagtatcaccctagaaggtgtgtggttggtcgctcagccgtgaaccc

SEQ ID NO: 405051 - DNA, 60 bp, Artificial
  Synthetic oligonucleotide
gcaaagccttctcaataataagttttccatagcgggaagtgttgcaggagcgatcacagg

SEQ ID NO: 405052 - DNA, 59 bp, Artificial
  Synthetic oligonucleotide
gcaaagccttgattcagaaaattgcagtcagtacccaatgagtggttatttacttgtaa

SEQ ID NO: 405053 - DNA, 60 bp, Artificial
  Synthetic oligonucleotide
gcaaagcgaaaggcagtagagctatatggtacatgtggttgggagccaggtaccttgagt

SEQ ID NO: 405054 - DNA, 51 bp, Artificial
  Synthetic oligonucleotide
gcaaagcgcaacttctttagacaaccaaaacgtgaagaacgggtttgcatg

SEQ ID NO: 405055 - DNA, 55 bp, Artificial
  Synthetic oligonucleotide
gcaaagcggatggctaaatatcaacaacaagggagaatcaatgctaggtatgtac

SEQ ID NO: 405056 - DNA, 55 bp, Artificial
  Synthetic oligonucleotide
gcaaagcggcaatgggtttaagaatcagttcctcctttagctttggaggtttcac

SEQ ID NO: 405057 - DNA, 55 bp, Artificial
  Synthetic oligonucleotide
gcaaagctacgcgactctctcctctcgcctgatgcatctatgcgtcacccacgcc

SEQ ID NO: 405058 - DNA, 55 bp, Artificial
  Synthetic oligonucleotide
gcaaagctcaccacattgaatgggattggaagattaccatgccattgattccatc

SEQ ID NO: 405059 - DNA, 55 bp, Artificial
  Synthetic oligonucleotide
gcaaagctcgaaagccaacaacgagtgattccaaagtttcagctggaagctttca

SEQ ID NO: 405060 - DNA, 57 bp, Artificial
  Synthetic oligonucleotide
gcaaagctcgtttcgacccgaggcagatgcggttcccgcctgctttggccggccaac

SEQ ID NO: 405061 - DNA, 59 bp, Artificial
  Synthetic oligonucleotide
gcaaagcttgctgcccaaggctccgcctgggccaaacgactcatgaacaatggttgggg

SEQ ID NO: 405062 - DNA, 55 bp, Artificial
  Synthetic oligonucleotide
gcaaaggaaaatagacaggttaattaagagaataggagaaagagcagaagacagt

SEQ ID NO: 405063 - DNA, 55 bp, Artificial
  Synthetic oligonucleotide
gcaaaggaaggggaagggattctaaggaaaagacaagaagatgcgggatatgacc

SEQ ID NO: 405064 - DNA, 55 bp, Artificial
  Synthetic oligonucleotide
gcaaaggacacaacaggcagcagctgatacagggaacagcagccaggtcagccaa

SEQ ID NO: 405065 - DNA, 55 bp, Artificial
  Synthetic oligonucleotide
gcaaaggacgctttaagatataaggatccactcagaaacatatggttcgatgagg

SEQ ID NO: 405066 - DNA, 51 bp, Artificial
  Synthetic oligonucleotide
gcaaaggatctcttgactgtatatatagaaaggagagcgtccaacaatcaa

SEQ ID NO: 405067 - DNA, 60 bp, Artificial
  Synthetic oligonucleotide
gcaaaggatgaagtcatgatacagggaggtagatattatgaacatgctccaccagagtta

SEQ ID NO: 405068 - DNA, 57 bp, Artificial
  Synthetic oligonucleotide
gcaaaggatgcgaagaccagcggggtcattccggagaccctcttgtaccgagtgaga

SEQ ID NO: 405069 - DNA, 53 bp, Artificial
  Synthetic oligonucleotide
gcaaaggatgtattgagatatacagatcctgttagggagcttgacatggagca

SEQ ID NO: 405070 - DNA, 60 bp, Artificial
  Synthetic oligonucleotide
gcaaaggcaataacattttatgctgcgattatagtagctttgatgggttactttccaagc

SEQ ID NO: 405071 - DNA, 55 bp, Artificial
  Synthetic oligonucleotide
gcaaaggcatggcttaaacacaatagccaagcaaaatatgtgaaggattgtgcag

SEQ ID NO: 405072 - DNA, 60 bp, Artificial
  Synthetic oligonucleotide
gcaaaggcgctagaccaattcgatctaagtatgtattttcgacttgcatatgcagcgccc

SEQ ID NO: 405073 - DNA, 55 bp, Artificial
  Synthetic oligonucleotide
gcaaaggctcatcaacaaccactggggactgcgccccaaaagcatgcaagtccgc

SEQ ID NO: 405074 - DNA, 60 bp, Artificial
  Synthetic oligonucleotide
gcaaagggagcagattacagtgttggacataggagatgcctattttagctgccctttaga

SEQ ID NO: 405075 - DNA, 55 bp, Artificial
  Synthetic oligonucleotide
gcaaagggcccgttccttgaattaccaagatcttgtaagaggattcccagaggag

SEQ ID NO: 405076 - DNA, 60 bp, Artificial
  Synthetic oligonucleotide
gcaaagggggtcaagaccaaatctctgttcatacaccagagcgtccccgagattatcaca

SEQ ID NO: 405077 - DNA, 59 bp, Artificial
  Synthetic oligonucleotide
gcaaagggtaagtgatcaagcctataagatcataccacaaaaacagaggcttggtggtc

SEQ ID NO: 405078 - DNA, 52 bp, Artificial
  Synthetic oligonucleotide
gcaaagggtgctcagtggatggttgactctattcggagtttgataagatgga

SEQ ID NO: 405079 - DNA, 55 bp, Artificial
  Synthetic oligonucleotide
gcaaaggtcatagtggattgatcataaatcctgacaacataattggcaggaggcc

SEQ ID NO: 405080 - DNA, 55 bp, Artificial
  Synthetic oligonucleotide
gcaaaggtgaaggtggttcagtcgagcattacaatactatgcagttagctaacct

SEQ ID NO: 405081 - DNA, 58 bp, Artificial
  Synthetic oligonucleotide
gcaaaggtgtgttgtgttaaattaactgctatggacttagaattaccaataacagcaa

SEQ ID NO: 405082 - DNA, 55 bp, Artificial
  Synthetic oligonucleotide
gcaaaggttgtgtctatttagagaaaatgcgtttcatacacagggacctggctgc

SEQ ID NO: 405083 - DNA, 55 bp, Artificial
  Synthetic oligonucleotide
gcaaaggtttctagggtcgctcgagcatgcaaagagggtggtctatagcattgtg

SEQ ID NO: 405084 - DNA, 60 bp, Artificial
  Synthetic oligonucleotide
gcaaagtacccgaactcttcagatctagacatgctcactcagagtcaccctatactagga

SEQ ID NO: 405085 - DNA, 55 bp, Artificial
  Synthetic oligonucleotide
gcaaagtactaaatcttatggcatgttattattactggcaggtggaggtacaacg

SEQ ID NO: 405086 - DNA, 55 bp, Artificial
  Synthetic oligonucleotide
gcaaagtagatacgcccgtgattgcaactaagatggacacgttacgggtgcatct

SEQ ID NO: 405087 - DNA, 55 bp, Artificial
  Synthetic oligonucleotide
gcaaagtagattataaaccgtttaaccagagctcgccgagcagtccactagttcc

SEQ ID NO: 405088 - DNA, 60 bp, Artificial
  Synthetic oligonucleotide
gcaaagtcaagttgaacgatacactcaacaaagatcaacttctgtcatccagcaaataca

SEQ ID NO: 405089 - DNA, 55 bp, Artificial
  Synthetic oligonucleotide
gcaaagtcgccattacaggaattatcactaaatgtaagcagtacacaggcaagac

SEQ ID NO: 405090 - DNA, 60 bp, Artificial
  Synthetic oligonucleotide
gcaaagtcgtccgcggtcggaacccagtctctaacggtgctcatacgtgcaagtctgcac

SEQ ID NO: 405091 - DNA, 54 bp, Artificial
  Synthetic oligonucleotide
gcaaagtctctagaggctaaatgtccgagagggtcgatgatacgaccgttagcg

SEQ ID NO: 405092 - DNA, 55 bp, Artificial
  Synthetic oligonucleotide
gcaaagtgacgatgaggccccacgagtactcggctttgcttaccatcaacgcaag

SEQ ID NO: 405093 - DNA, 60 bp, Artificial
  Synthetic oligonucleotide
gcaaagtgattgggatccacattggtggcaacggtaggcaaggtttctgcgccgccctga

SEQ ID NO: 405094 - DNA, 60 bp, Artificial
  Synthetic oligonucleotide
gcaaagttaagaccagtatcggatatggtagactactacaattcgcacaggtatgagatt

SEQ ID NO: 405095 - DNA, 59 bp, Artificial
  Synthetic oligonucleotide
gcaaagttacgtggcgtcggcagtgactcccttgagattaaacagtagcacgaaggtgc

SEQ ID NO: 405096 - DNA, 60 bp, Artificial
  Synthetic oligonucleotide
gcaaagttcaaggccacgccatcatatctattcatgaaggttaccgtattcgccttagag

SEQ ID NO: 405097 - DNA, 57 bp, Artificial
  Synthetic oligonucleotide
gcaaagttccaggttctttgaaggtcaagataaattgccaggttgctcccacttgcg

SEQ ID NO: 405098 - DNA, 55 bp, Artificial
  Synthetic oligonucleotide
gcaaagttcttgctaattgggtagcgaacctctacctcaacttgatctgaggggt

SEQ ID NO: 405099 - DNA, 56 bp, Artificial
  Synthetic oligonucleotide
gcaaagttgccttcgattgtacaagggctcgcttggcatatggaatggatcgttga

SEQ ID NO: 405100 - DNA, 55 bp, Artificial
  Synthetic oligonucleotide
gcaaagttggagtaactactccgttgtcagataggattacatcaacaaacttctg

SEQ ID NO: 405101 - DNA, 58 bp, Artificial
  Synthetic oligonucleotide
gcaaataactttaagagctttgtatgacgaatacgaacattatagaaactggtggaca

SEQ ID NO: 405102 - DNA, 55 bp, Artificial
  Synthetic oligonucleotide
gcaaatacagtctcccttctttgccacggcaaattttggggatgacggtactgcc

SEQ ID NO: 405103 - DNA, 57 bp, Artificial
  Synthetic oligonucleotide
gcaaatacctactaggaacccagctttactgacacagccttcccgcgcaatagtatt

SEQ ID NO: 405104 - DNA, 55 bp, Artificial
  Synthetic oligonucleotide
gcaaatacctgagccactatacaccacaccatataccagtacaaccctggattac

SEQ ID NO: 405105 - DNA, 55 bp, Artificial
  Synthetic oligonucleotide
gcaaatagaattggacaactccattggtaacccaccctgcataacatctgtgaca

SEQ ID NO: 405106 - DNA, 60 bp, Artificial
  Synthetic oligonucleotide
gcaaatagccatttggtgaaactggtatgcagtggcgagttagaggctccagttggcgga

SEQ ID NO: 405107 - DNA, 58 bp, Artificial
  Synthetic oligonucleotide
gcaaatagcgaggaccaagcaaagaccagttttgacgaaatttataatacagttgaga

SEQ ID NO: 405108 - DNA, 55 bp, Artificial
  Synthetic oligonucleotide
gcaaatagtctattaacatcaacgaaagtggacctaccaatatttcgagcactga

SEQ ID NO: 405109 - DNA, 55 bp, Artificial
  Synthetic oligonucleotide
gcaaatatcagttgtcagaaggagctgttggatgagtctacagacatcacagggt

SEQ ID NO: 405110 - DNA, 55 bp, Artificial
  Synthetic oligonucleotide
gcaaatatcctgactacattaagatgggtaaagacaactatggggactctttgtt

SEQ ID NO: 405111 - DNA, 60 bp, Artificial
  Synthetic oligonucleotide
gcaaatatcctgtccaaattagcatttaggttgtggtactgcagtacatagtcctttgga

SEQ ID NO: 405112 - DNA, 60 bp, Artificial
  Synthetic oligonucleotide
gcaaatatggaatcgtgggagaagaatacgctccaactacaggaatgccccatctccaag

SEQ ID NO: 405113 - DNA, 55 bp, Artificial
  Synthetic oligonucleotide
gcaaatattgtctgagcctccaaagctacgaaatgttgctgctgcattgttctgg

SEQ ID NO: 405114 - DNA, 55 bp, Artificial
  Synthetic oligonucleotide
gcaaatcaaaaggaccagctcccatactatcgttattgagtgcagtcttgatcct

SEQ ID NO: 405115 - DNA, 58 bp, Artificial
  Synthetic oligonucleotide
gcaaatcaaggagtcgttaatcaagctcaaaatcgcccaggttattccagtcccaatg

SEQ ID NO: 405116 - DNA, 55 bp, Artificial
  Synthetic oligonucleotide
gcaaatcacgttcgggcaatcaagaatgtttattccacacataacactaagtttc

SEQ ID NO: 405117 - DNA, 58 bp, Artificial
  Synthetic oligonucleotide
gcaaatcagataagcaacaatagaacagtcccacattaccgtcttggtggtaagtttg

SEQ ID NO: 405118 - DNA, 60 bp, Artificial
  Synthetic oligonucleotide
gcaaatcagcggagactgtcgggaggagcgcaatcccacaaggcaagaccaaagctccga

SEQ ID NO: 405119 - DNA, 55 bp, Artificial
  Synthetic oligonucleotide
gcaaatccagattgtaagggcattttaagagcattaggaacaggagctacattag

SEQ ID NO: 405120 - DNA, 55 bp, Artificial
  Synthetic oligonucleotide
gcaaatccgacatttgcccccacggattacgtgccagcgtgcatgtgcgaatccg

SEQ ID NO: 405121 - DNA, 55 bp, Artificial
  Synthetic oligonucleotide
gcaaatccgcctcctgcttcaaccaatcgccagtccggaaggcagcctaccccac

SEQ ID NO: 405122 - DNA, 55 bp, Artificial
  Synthetic oligonucleotide
gcaaatcctacatcaaactccattttggtatccccttcaattactgagtatgctg

SEQ ID NO: 405123 - DNA, 55 bp, Artificial
  Synthetic oligonucleotide
gcaaatcctatgaaggatatggtgctatgcgttggtaaagaagccactgaagatc

SEQ ID NO: 405124 - DNA, 60 bp, Artificial
  Synthetic oligonucleotide
gcaaatcgagattgatcgactcgccataggcttgcccagcatagtaggcatccgtatcgt

SEQ ID NO: 405125 - DNA, 55 bp, Artificial
  Synthetic oligonucleotide
gcaaatcgtcattttgactttaatcaagagaccgcagggtggagcacaccacggt

SEQ ID NO: 405126 - DNA, 55 bp, Artificial
  Synthetic oligonucleotide
gcaaatctttcaagagtatccgctctctgttgccaccatctgtcgttacctctcc

SEQ ID NO: 405127 - DNA, 54 bp, Artificial
  Synthetic oligonucleotide
gcaaatctttgccccccccccgacgcgagaaagaccttgtcagtgggcgttaca

SEQ ID NO: 405128 - DNA, 56 bp, Artificial
  Synthetic oligonucleotide
gcaaatcttttggacaaaacccacgagattgatttaatggtgaggacaattaaaca

SEQ ID NO: 405129 - DNA, 55 bp, Artificial
  Synthetic oligonucleotide
gcaaatgagatagcgcgtgtgactggcgagacgacaacatggggaccagcgcgtc

SEQ ID NO: 405130 - DNA, 56 bp, Artificial
  Synthetic oligonucleotide
gcaaatgagggcacgcgtacggcactctcagtggtcacctggaaccaaaaaggggt

SEQ ID NO: 405131 - DNA, 55 bp, Artificial
  Synthetic oligonucleotide
gcaaatgatacttgtaggctgcaaacccgctgttggacaacattgggatgttgct

SEQ ID NO: 405132 - DNA, 59 bp, Artificial
  Synthetic oligonucleotide
gcaaatgcaaagcgtggaccccgactcccaacacgatgttgtcttggtataccctcagc

SEQ ID NO: 405133 - DNA, 55 bp, Artificial
  Synthetic oligonucleotide
gcaaatgcgacattcaatagccggcaacaaggaatggcaaacatggttattgccg

SEQ ID NO: 405134 - DNA, 60 bp, Artificial
  Synthetic oligonucleotide
gcaaatgcgcttatctaataaccttatggagcttagtagctcaggtttgcgagtagacca

SEQ ID NO: 405135 - DNA, 58 bp, Artificial
  Synthetic oligonucleotide
gcaaatgctatgtgggtttggtttggtgtattttgttaactatggagttgatagtgtg

SEQ ID NO: 405136 - DNA, 58 bp, Artificial
  Synthetic oligonucleotide
gcaaatggaaactccctggacagaacaaagcatctgagaagatttgtgcttacgcaag

SEQ ID NO: 405137 - DNA, 60 bp, Artificial
  Synthetic oligonucleotide
gcaaatggaacaaaagtgaacacactaacagagagggggattgaagtagtgaatgccaca

SEQ ID NO: 405138 - DNA, 58 bp, Artificial
  Synthetic oligonucleotide
gcaaatggaaggtgagactcttgagcaaccgaaaatttcaaaatcttgcgttagtaca

SEQ ID NO: 405139 - DNA, 60 bp, Artificial
  Synthetic oligonucleotide
gcaaatggacgttgctacctcgagcctagagtcatgggcccgcatcgacgtttgcggtaa

SEQ ID NO: 405140 - DNA, 55 bp, Artificial
  Synthetic oligonucleotide
gcaaatggaggctttcattgaaccaaagcccagtgtgtttaagtgttttgctaac

SEQ ID NO: 405141 - DNA, 59 bp, Artificial
  Synthetic oligonucleotide
gcaaatggctgggtcaagtgaacaggcagcggaacgcatggaggttgctagtcaggcta

SEQ ID NO: 405142 - DNA, 55 bp, Artificial
  Synthetic oligonucleotide
gcaaatggggcataccacggtgcttctgcgacggtagctctggatgcttcttatc

SEQ ID NO: 405143 - DNA, 55 bp, Artificial
  Synthetic oligonucleotide
gcaaatggtggactggcacttgcgtgtttgagatttgtattgagaagactcagtt

SEQ ID NO: 405144 - DNA, 55 bp, Artificial
  Synthetic oligonucleotide
gcaaatggttaggtattgacccaccacccagtagacaaggtgattcatggcttaa

SEQ ID NO: 405145 - DNA, 60 bp, Artificial
  Synthetic oligonucleotide
gcaaatggttcttcattattagctgatcatttatcagagcatttactgctttgttgatca

SEQ ID NO: 405146 - DNA, 60 bp, Artificial
  Synthetic oligonucleotide
gcaaatgtctaagttgataatctgcgtcggaagcgctggtgttgtcttgaatattgggcc

SEQ ID NO: 405147 - DNA, 60 bp, Artificial
  Synthetic oligonucleotide
gcaaatgtgcatagagcgatgtggtgctgaaccaccacgtgacactgagaatgatattag

SEQ ID NO: 405148 - DNA, 60 bp, Artificial
  Synthetic oligonucleotide
gcaaatgtggatagacgcttacatactacagtgggatctggatcaagcgcaaaaggatct

SEQ ID NO: 405149 - DNA, 55 bp, Artificial
  Synthetic oligonucleotide
gcaaattagaaaacactggtgtatccccaacgctttcctcaggttgtagttgaac

SEQ ID NO: 405150 - DNA, 60 bp, Artificial
  Synthetic oligonucleotide
gcaaattcagacgatgagtggctatggacgagcatgggtcatcaaccgttctgagaatct

SEQ ID NO: 405151 - DNA, 57 bp, Artificial
  Synthetic oligonucleotide
gcaaattcccccactacgcccatacaaacaaacacgacatgtcgaaactcagaggtc

SEQ ID NO: 405152 - DNA, 60 bp, Artificial
  Synthetic oligonucleotide
gcaaattcgaagcattcacatcaaatggatggggtgctgtgaattcaggggcaggagtaa

SEQ ID NO: 405153 - DNA, 58 bp, Artificial
  Synthetic oligonucleotide
gcaaattcgcttgtactgttcatgctgctctggcataagcttgaaagaggttcttagg

SEQ ID NO: 405154 - DNA, 59 bp, Artificial
  Synthetic oligonucleotide
gcaaattcttgacaaaatctattagtacatagagaatacgctcgtaatgggttgaatcc

SEQ ID NO: 405155 - DNA, 60 bp, Artificial
  Synthetic oligonucleotide
gcaaattctttatgatgtatgagatcaatccgggctgagcattggtgaggtcctttagaa

SEQ ID NO: 405156 - DNA, 58 bp, Artificial
  Synthetic oligonucleotide
gcaaattgcacttgtattcccatcccaacatctggggctttcgcaaaattcctatggg

SEQ ID NO: 405157 - DNA, 60 bp, Artificial
  Synthetic oligonucleotide
gcaaattgccatcctggtaactactgtaacattgcatttcaagcaatatgaatgcaactc

SEQ ID NO: 405158 - DNA, 55 bp, Artificial
  Synthetic oligonucleotide
gcaaattgcccacactaacgattttactgcttttgaccagtcacaagatgctgcc

SEQ ID NO: 405159 - DNA, 52 bp, Artificial
  Synthetic oligonucleotide
gcaaattgttgccacccggaccttctcacaactgcacaccgaaatcgtagca

SEQ ID NO: 405160 - DNA, 54 bp, Artificial
  Synthetic oligonucleotide
gcaaatttaaacagaggcttaaacccagaaatggctttgcaactttggtttcca

SEQ ID NO: 405161 - DNA, 59 bp, Artificial
  Synthetic oligonucleotide
gcaaatttatgaaagaggggaatcgaccctcgatgcacaaattaggcattgggaactga

SEQ ID NO: 405162 - DNA, 59 bp, Artificial
  Synthetic oligonucleotide
gcaaatttgtggttctggacgagtacactctgttgaccgaagtgcctccggtatttgca

SEQ ID NO: 405163 - DNA, 55 bp, Artificial
  Synthetic oligonucleotide
gcaaattttcctcagcatgtgagactcttttgcgatatgaagacggtgacagcac

SEQ ID NO: 405164 - DNA, 60 bp, Artificial
  Synthetic oligonucleotide
gcaacaaaatcgattagtgatgatctacgattcaacgcaattagggagatgttatcctat

SEQ ID NO: 405165 - DNA, 60 bp, Artificial
  Synthetic oligonucleotide
gcaacaaaccagttgcgataggtcaagcacttctgtttccccggtcaatgttgatatgct

SEQ ID NO: 405166 - DNA, 55 bp, Artificial
  Synthetic oligonucleotide
gcaacaaacctggggcatcctcttatcctagacacctgcaccattgaagggttgg

SEQ ID NO: 405167 - DNA, 59 bp, Artificial
  Synthetic oligonucleotide
gcaacaaagctcggtagggtgaacattgcttcatacttccgttctttcacctcagttga

SEQ ID NO: 405168 - DNA, 60 bp, Artificial
  Synthetic oligonucleotide
gcaacaaatctgggacgtcccctcattctggacacctgtaccattgaagggctgatctat

SEQ ID NO: 405169 - DNA, 60 bp, Artificial
  Synthetic oligonucleotide
gcaacaaatgtggatgtcagtaatagctgactttcatgatcctatgtgtaattgttggca

SEQ ID NO: 405170 - DNA, 55 bp, Artificial
  Synthetic oligonucleotide
gcaacaaattgatggttaaacgcgcaccgctacatgtagctcgcgttttggagaa

SEQ ID NO: 405171 - DNA, 55 bp, Artificial
  Synthetic oligonucleotide
gcaacaaatttccctcggccgaccacaaccgatcaggtttacatggtgtgtttgg

SEQ ID NO: 405172 - DNA, 60 bp, Artificial
  Synthetic oligonucleotide
gcaacaacagtgggcaaccctcaacggtggtggataacacactaatggttgtgatctcta

SEQ ID NO: 405173 - DNA, 55 bp, Artificial
  Synthetic oligonucleotide
gcaacaaccacccctgcagtattagacattacacctgcttctgggtctgtgcaac

SEQ ID NO: 405174 - DNA, 55 bp, Artificial
  Synthetic oligonucleotide
gcaacaaccaggaaacgtatgggtcacctgggcaaataagacgggccgaacagat

SEQ ID NO: 405175 - DNA, 60 bp, Artificial
  Synthetic oligonucleotide
gcaacaaccggaaaatcagacaagatctgcattgggtatcatgcaaacaattcaacaacg

SEQ ID NO: 405176 - DNA, 55 bp, Artificial
  Synthetic oligonucleotide
gcaacaactgtgaatggagaattcacaatgcttggcatttatgatcgtgttgcag

SEQ ID NO: 405177 - DNA, 55 bp, Artificial
  Synthetic oligonucleotide
gcaacaagacctgaggtgaatggacaaggaggtagaatggaattctcgtggacta

SEQ ID NO: 405178 - DNA, 60 bp, Artificial
  Synthetic oligonucleotide
gcaacaagactctagccggctcacggggtccggtcacacagatgtactccagtgctgagg

SEQ ID NO: 405179 - DNA, 60 bp, Artificial
  Synthetic oligonucleotide
gcaacaaggagcaagtcagctgtccgcaacctgaacccggcagctttaatgtgacgggat

SEQ ID NO: 405180 - DNA, 60 bp, Artificial
  Synthetic oligonucleotide
gcaacaaggcccaaggtgagaggtcaagcagggagaatgaactattactggacactagta

SEQ ID NO: 405181 - DNA, 55 bp, Artificial
  Synthetic oligonucleotide
gcaacaagtaagacaaaacatggtgcaggtcactccgcttagaaatgcgcaaggc

SEQ ID NO: 405182 - DNA, 52 bp, Artificial
  Synthetic oligonucleotide
gcaacaagtacagtccactacccaaaagtatataaaacctacttcgaaaagg

SEQ ID NO: 405183 - DNA, 55 bp, Artificial
  Synthetic oligonucleotide
gcaacaagtacgaacctcttatggctcccatgatcaactgtattcatgtggtagt

SEQ ID NO: 405184 - DNA, 60 bp, Artificial
  Synthetic oligonucleotide
gcaacaagtagttacagttatggatgacttgtgtcaaaatccagatggtaaagatatggc

SEQ ID NO: 405185 - DNA, 58 bp, Artificial
  Synthetic oligonucleotide
gcaacaagtgtgacaacagaagatataaaccggactttcaagccggtgatagggccaa

SEQ ID NO: 405186 - DNA, 55 bp, Artificial
  Synthetic oligonucleotide
gcaacaagttggaggaccagttgttgcattggcaatgtgtgcgtttggaacatgc

SEQ ID NO: 405187 - DNA, 60 bp, Artificial
  Synthetic oligonucleotide
gcaacaataccttgcgctgccccactgattgcttccgcaagcatccagaggccacgtact

SEQ ID NO: 405188 - DNA, 55 bp, Artificial
  Synthetic oligonucleotide
gcaacaatcagaatgttaattgaaggactcgaagtatcatttgaggactctcgtg

SEQ ID NO: 405189 - DNA, 55 bp, Artificial
  Synthetic oligonucleotide
gcaacaatcgtgaacacacgtgctactccggattggacgttactgagtgcggcga

SEQ ID NO: 405190 - DNA, 59 bp, Artificial
  Synthetic oligonucleotide
gcaacaatctcctctccatacttttttccactgcaccggtatcgtacaaacatatataa

SEQ ID NO: 405191 - DNA, 55 bp, Artificial
  Synthetic oligonucleotide
gcaacaatgaagagtcaactagtaaccaagcatgttgttaaaggagagtgtcgac

SEQ ID NO: 405192 - DNA, 55 bp, Artificial
  Synthetic oligonucleotide
gcaacaattacagcacagtgcacatgcacaagacccctggacactgcgagacacg

SEQ ID NO: 405193 - DNA, 60 bp, Artificial
  Synthetic oligonucleotide
gcaacaattctacataccattcaatgaataccccagtctaactcagtccataggtacttc

SEQ ID NO: 405194 - DNA, 54 bp, Artificial
  Synthetic oligonucleotide
gcaacaattggcggccgtcctcaaccccataaggaagacgttccccgcgtcaac

SEQ ID NO: 405195 - DNA, 55 bp, Artificial
  Synthetic oligonucleotide
gcaacaatttgccatacggcatcctactgccagcggatccacacctggtaacagg

SEQ ID NO: 405196 - DNA, 56 bp, Artificial
  Synthetic oligonucleotide
gcaacacaaatgtttatcaccagtctttagatgatattcgggacttctatgaagac

SEQ ID NO: 405197 - DNA, 55 bp, Artificial
  Synthetic oligonucleotide
gcaacacaacctgccggtgtaccggcgacacaacactcactgccgcgagttctgg

SEQ ID NO: 405198 - DNA, 55 bp, Artificial
  Synthetic oligonucleotide
gcaacacacttcacctaatctgcctcattatatccacaaataagctctgtgatgc

SEQ ID NO: 405199 - DNA, 55 bp, Artificial
  Synthetic oligonucleotide
gcaacacatcatacataacccaagcttgtgagaagtccaattatgagccagttcc

SEQ ID NO: 405200 - DNA, 60 bp, Artificial
  Synthetic oligonucleotide
gcaacacatgcagttcgtagctgcttgtgtaactgggagagtgccactcctagcctcctt

SEQ ID NO: 405201 - DNA, 55 bp, Artificial
  Synthetic oligonucleotide
gcaacaccaattgagattggtttggtggacactcggtgtttcgagaagggttttg

SEQ ID NO: 405202 - DNA, 55 bp, Artificial
  Synthetic oligonucleotide
gcaacaccacctggaagagaggttgaattctcaactcagtttccagttaaacttg

SEQ ID NO: 405203 - DNA, 60 bp, Artificial
  Synthetic oligonucleotide
gcaacaccattgctagcccttctcactccaggactgaagtgtttacatttagacatatat

SEQ ID NO: 405204 - DNA, 58 bp, Artificial
  Synthetic oligonucleotide
gcaacacccgggatgcaaatcagaggtttcgtgtactttgttgaaacgctagctagga

SEQ ID NO: 405205 - DNA, 55 bp, Artificial
  Synthetic oligonucleotide
gcaacacggatcaaacatccttgtttatgttgcaagttataatgaagttgatgcc

SEQ ID NO: 405206 - DNA, 50 bp, Artificial
  Synthetic oligonucleotide
gcaacacggctagtactgaagttaaaaccgtaagttctgaagcggatcgc

SEQ ID NO: 405207 - DNA, 57 bp, Artificial
  Synthetic oligonucleotide
gcaacactaccgcttgacatgttttcaatgttttccggaattaaatcgacagtggaa

SEQ ID NO: 405208 - DNA, 55 bp, Artificial
  Synthetic oligonucleotide
gcaacactactggcgaattccggataagatcaacaccagatttgtcaattgtcag

SEQ ID NO: 405209 - DNA, 55 bp, Artificial
  Synthetic oligonucleotide
gcaacactcacagcgctcggtgcacaatggtctttccctccagggcaacgttcag

SEQ ID NO: 405210 - DNA, 55 bp, Artificial
  Synthetic oligonucleotide
gcaacactcatacagtacgtttgcaacaacacgtaccagcaatgtgtctatacct

SEQ ID NO: 405211 - DNA, 59 bp, Artificial
  Synthetic oligonucleotide
gcaacactccctgaagctctgctaagcctgactaaagttttcataagggactccgatct

SEQ ID NO: 405212 - DNA, 55 bp, Artificial
  Synthetic oligonucleotide
gcaacactggtaaggaagccgccgtggtgaggctagctagagacatggcgaagca

SEQ ID NO: 405213 - DNA, 60 bp, Artificial
  Synthetic oligonucleotide
gcaacactgtgcttggggcatcatgcagtaccaaacggaacaatagtgaaaacaataacg

SEQ ID NO: 405214 - DNA, 55 bp, Artificial
  Synthetic oligonucleotide
gcaacacttgtgacaacagttaatgggactcccatgttaatttcagagggacccc

SEQ ID NO: 405215 - DNA, 60 bp, Artificial
  Synthetic oligonucleotide
gcaacagaatgcgatggtccagatacaagttgtgttttatgtttccatggataagactct

SEQ ID NO: 405216 - DNA, 60 bp, Artificial
  Synthetic oligonucleotide
gcaacagaccaccgttagagcggagaatgatctgactactaatgttatcagacgtgtatc

SEQ ID NO: 405217 - DNA, 60 bp, Artificial
  Synthetic oligonucleotide
gcaacagagtacataatgaagggagtatatataaacacggctttgctcaatgcttcttgt

SEQ ID NO: 405218 - DNA, 60 bp, Artificial
  Synthetic oligonucleotide
gcaacagcacatgttgcaactcacagtctggggcattaagcagctccaggcaagagtcct

SEQ ID NO: 405219 - DNA, 60 bp, Artificial
  Synthetic oligonucleotide
gcaacagcaggtttccgagattatgcgccagatgcttacgcaagctcaaacggctggtca

SEQ ID NO: 405220 - DNA, 55 bp, Artificial
  Synthetic oligonucleotide
gcaacagctcaccatatctaagaggcgatgaagtacacgacgaccctggaatcgc

SEQ ID NO: 405221 - DNA, 59 bp, Artificial
  Synthetic oligonucleotide
gcaacagctccatcaatagttccactatcagaaggaacacctaatatagactttgtggc

SEQ ID NO: 405222 - DNA, 60 bp, Artificial
  Synthetic oligonucleotide
gcaacagctggtctcactcacttgatgatctggcattccaatttgaatgacgccacgtat

SEQ ID NO: 405223 - DNA, 55 bp, Artificial
  Synthetic oligonucleotide
gcaacagctgtatagaattttaagtgcgtgtgcgcattgtgggtcagcagtgcgg

SEQ ID NO: 405224 - DNA, 55 bp, Artificial
  Synthetic oligonucleotide
gcaacaggaacaaaagcacagggaaacccagatgtatggaacttcctatggaatt

SEQ ID NO: 405225 - DNA, 55 bp, Artificial
  Synthetic oligonucleotide
gcaacaggcatggggccagagttttgcaagagctgctggtttgagcgtaggagtc

SEQ ID NO: 405226 - DNA, 59 bp, Artificial
  Synthetic oligonucleotide
gcaacagggcgctagcgcaggaactacctcttctgtagagacatcactccgacagactg

SEQ ID NO: 405227 - DNA, 54 bp, Artificial
  Synthetic oligonucleotide
gcaacagggtatgatgaaagttaaacaggcgatgctcctagagggtggattctc

SEQ ID NO: 405228 - DNA, 55 bp, Artificial
  Synthetic oligonucleotide
gcaacagtaactgcaaagatcctaataatgagagagggaacccgggagtaaaagg

SEQ ID NO: 405229 - DNA, 55 bp, Artificial
  Synthetic oligonucleotide
gcaacagtacatccctactgattgctaacattatgtaagctcatataccacgatt

SEQ ID NO: 405230 - DNA, 60 bp, Artificial
  Synthetic oligonucleotide
gcaacagtatgtttccttatgcagattgccatcctagcaacgactgtaacactgcatttc

SEQ ID NO: 405231 - DNA, 57 bp, Artificial
  Synthetic oligonucleotide
gcaacagtctaattgccttgtgtggaagcccagtctcagttgggtccggttctttcc

SEQ ID NO: 405232 - DNA, 55 bp, Artificial
  Synthetic oligonucleotide
gcaacatactgcttagtggtaaccagacagctagaatgctcaaatacagctatcc

SEQ ID NO: 405233 - DNA, 57 bp, Artificial
  Synthetic oligonucleotide
gcaacatagggcaaaagtagaagagttaagacaacatctattgaagtggggacttac

SEQ ID NO: 405234 - DNA, 59 bp, Artificial
  Synthetic oligonucleotide
gcaacatagtgtttgaattaaacaaacacgcgtcgttgaatttcgcgatcatatgtgtt

SEQ ID NO: 405235 - DNA, 55 bp, Artificial
  Synthetic oligonucleotide
gcaacatccaattggtctaatccaagtcctaaaacggtctatgtcaaggaagcca

SEQ ID NO: 405236 - DNA, 55 bp, Artificial
  Synthetic oligonucleotide
gcaacatctggaattatcaaagctgaagcaggagcaccccagtgttagcttcacc

SEQ ID NO: 405237 - DNA, 55 bp, Artificial
  Synthetic oligonucleotide
gcaacatctttgatgacggttcaacgccttacaacgttcgtatctggcacgcgcc

SEQ ID NO: 405238 - DNA, 60 bp, Artificial
  Synthetic oligonucleotide
gcaacatgaagatggatctcatgccgggtacgccagttgcgtcaagttattcgacggcac

SEQ ID NO: 405239 - DNA, 56 bp, Artificial
  Synthetic oligonucleotide
gcaacatgccacgtttacctagggcacttcgtttcggaccgaatatggaggtctta

SEQ ID NO: 405240 - DNA, 59 bp, Artificial
  Synthetic oligonucleotide
gcaacatgcgtaaccttattcgacgggacaaacggattgttgactgcgcaacatgtagt

SEQ ID NO: 405241 - DNA, 55 bp, Artificial
  Synthetic oligonucleotide
gcaacatggccttcacctacttgaggtatttcataggaccgaaccaacccatagc

SEQ ID NO: 405242 - DNA, 60 bp, Artificial
  Synthetic oligonucleotide
gcaacatgggagattggccttcttgcacatacacaggagttacccagcacaatcatgctt

SEQ ID NO: 405243 - DNA, 55 bp, Artificial
  Synthetic oligonucleotide
gcaacatggggatggattagttggttactaaaatccaaaccagtacactacttag

SEQ ID NO: 405244 - DNA, 60 bp, Artificial
  Synthetic oligonucleotide
gcaacatggttgccagaagtaaaatgtgtgcacacccccatattagttagatggtattac

SEQ ID NO: 405245 - DNA, 57 bp, Artificial
  Synthetic oligonucleotide
gcaacattaccatgtatggtggagcaattcaaagttaagtggctaggacagtatgaa

SEQ ID NO: 405246 - DNA, 55 bp, Artificial
  Synthetic oligonucleotide
gcaaccaagaacgacagtttgtccgatgtggacttactgaaaggtgttaagttgg

SEQ ID NO: 405247 - DNA, 60 bp, Artificial
  Synthetic oligonucleotide
gcaaccaagaggcttacagtcctcggaaaggatgcaggtgcactgacagaagacccagat

SEQ ID NO: 405248 - DNA, 55 bp, Artificial
  Synthetic oligonucleotide
gcaaccaagaggcttacagtcctcgggaaggacgcgggtgcgttaacagaagacc

SEQ ID NO: 405249 - DNA, 60 bp, Artificial
  Synthetic oligonucleotide
gcaaccaattgcaagtatgacggcggtgcaaaggccagcagttttggagcatgatgcatc

SEQ ID NO: 405250 - DNA, 55 bp, Artificial
  Synthetic oligonucleotide
gcaaccacacgaatttagacatgttacgtagtttaacgactatggagatgtatca

SEQ ID NO: 405251 - DNA, 58 bp, Artificial
  Synthetic oligonucleotide
gcaaccacagggtttgccagtgatgaacacaccgggaagcaatcaattcttaacgtcc

SEQ ID NO: 405252 - DNA, 58 bp, Artificial
  Synthetic oligonucleotide
gcaaccaccgccgggtggtctagtagttcgacctgcggcggctagtggagattcttca

SEQ ID NO: 405253 - DNA, 52 bp, Artificial
  Synthetic oligonucleotide
gcaaccacgcacgtcgttgctcaaactggtatcacatgtcgatgtcccaaat

SEQ ID NO: 405254 - DNA, 58 bp, Artificial
  Synthetic oligonucleotide
gcaaccacggtctctacccgagaatgaggagtatgagaccgaccaaatactcccagac

SEQ ID NO: 405255 - DNA, 52 bp, Artificial
  Synthetic oligonucleotide
gcaaccagagacgactgatctctactgttatgagcaattaaatgacagctca

SEQ ID NO: 405256 - DNA, 60 bp, Artificial
  Synthetic oligonucleotide
gcaaccagatgaagcgaataaatggatatcaatgggacagtcttgtactataaaggtatg

SEQ ID NO: 405257 - DNA, 55 bp, Artificial
  Synthetic oligonucleotide
gcaaccagcgggcaccgtcggcctatcgcagatcccaaaagggataaccagcgca

SEQ ID NO: 405258 - DNA, 55 bp, Artificial
  Synthetic oligonucleotide
gcaaccaggaaaggaaaccgtattcaagcgcacattagttggagaaatcttgaac

SEQ ID NO: 405259 - DNA, 60 bp, Artificial
  Synthetic oligonucleotide
gcaaccataatcttgtttccgtgtcataagataacttgcaacacttgcatgaacaaggta

SEQ ID NO: 405260 - DNA, 55 bp, Artificial
  Synthetic oligonucleotide
gcaaccatatgcagatctccaccatcgggataagaccgagctccagccaaatccc

SEQ ID NO: 405261 - DNA, 60 bp, Artificial
  Synthetic oligonucleotide
gcaaccatcgcccatttcgcttctgtttgagacttaaaacacttgcctttgagctccatc

SEQ ID NO: 405262 - DNA, 60 bp, Artificial
  Synthetic oligonucleotide
gcaaccatcgcgaaatgagggagattctatatcacatgtgggaaggtgatatgcatggcc

SEQ ID NO: 405263 - DNA, 55 bp, Artificial
  Synthetic oligonucleotide
gcaaccatggaggctgatctctcccaagggcatcagctaatttacgtcatcccag

SEQ ID NO: 405264 - DNA, 57 bp, Artificial
  Synthetic oligonucleotide
gcaaccatgtgtccccgacacactacgtgcctgagactgacgcgtcaaagaatgtga

SEQ ID NO: 405265 - DNA, 57 bp, Artificial
  Synthetic oligonucleotide
gcaaccattacctcgagataaagaggacttgtgtgtgtccttgtttaatttcgagac

SEQ ID NO: 405266 - DNA, 55 bp, Artificial
  Synthetic oligonucleotide
gcaacccaaacccatctcgtttggtatctgtttccgctttgtcagcgcatcatcg

SEQ ID NO: 405267 - DNA, 59 bp, Artificial
  Synthetic oligonucleotide
gcaacccaacttgaacgtaatcttgtacgcgagattcttgaagatcgtactgtaactca

SEQ ID NO: 405268 - DNA, 50 bp, Artificial
  Synthetic oligonucleotide
gcaacccaatggacatcacattgtattattatcaacagacggacgaagca

SEQ ID NO: 405269 - DNA, 55 bp, Artificial
  Synthetic oligonucleotide
gcaacccaatgttgcatatcctcaggaacgttgttaaacgaggataatggatatg

SEQ ID NO: 405270 - DNA, 60 bp, Artificial
  Synthetic oligonucleotide
gcaacccactctcgcggaattccacgcatgaaatgtactgggtgtcaaatgcctccggga

SEQ ID NO: 405271 - DNA, 55 bp, Artificial
  Synthetic oligonucleotide
gcaacccagactttcctggcatcttgcatcaacggggtgtgttggactgtctacc

SEQ ID NO: 405272 - DNA, 55 bp, Artificial
  Synthetic oligonucleotide
gcaacccatgcactggatagtgcttacccagatggttttcggagctactgggtgg

SEQ ID NO: 405273 - DNA, 50 bp, Artificial
  Synthetic oligonucleotide
gcaaccccaccatggacctccttacgggcgttcccaacagcatgcttcag

SEQ ID NO: 405274 - DNA, 52 bp, Artificial
  Synthetic oligonucleotide
gcaaccccccgtccctcctcccaggagaaaacggacggtccaactcactgag

SEQ ID NO: 405275 - DNA, 55 bp, Artificial
  Synthetic oligonucleotide
gcaacccgatgtctaaaactggtctttccgaggaattacgggtcatcgcgctgcc

SEQ ID NO: 405276 - DNA, 55 bp, Artificial
  Synthetic oligonucleotide
gcaacccgcagtatttaggatgagctaacacgtcccatgcatacgtgtacgggtc

SEQ ID NO: 405277 - DNA, 53 bp, Artificial
  Synthetic oligonucleotide
gcaacccggggacgatcctctcctgggaaccaagtcgttactagaaacgcgac

SEQ ID NO: 405278 - DNA, 52 bp, Artificial
  Synthetic oligonucleotide
gcaacccggggatacacttgtgttcttgggtcctttagaagaaggcgggtta

SEQ ID NO: 405279 - DNA, 60 bp, Artificial
  Synthetic oligonucleotide
gcaaccctactacattatcatcacaatatactacatctaatctgctacattgtatccatg

SEQ ID NO: 405280 - DNA, 57 bp, Artificial
  Synthetic oligonucleotide
gcaaccctaggattggctgaggacactgtgtacagtagaaacccggcagaaagttac

SEQ ID NO: 405281 - DNA, 54 bp, Artificial
  Synthetic oligonucleotide
gcaaccctagttctaccagcggaggcaatgcatgagttaccatcacttcacccc

SEQ ID NO: 405282 - DNA, 53 bp, Artificial
  Synthetic oligonucleotide
gcaaccctctttaggaggttggataactaagaattttcttaggcaccctaata

SEQ ID NO: 405283 - DNA, 60 bp, Artificial
  Synthetic oligonucleotide
gcaaccgaacaaaaatgaaattagtgatggatggacattgatggtcgagagggttcaaga

SEQ ID NO: 405284 - DNA, 55 bp, Artificial
  Synthetic oligonucleotide
gcaaccgccatgtataaatcaaactatggtagctgaaaatgtgcccatgaatgtt

SEQ ID NO: 405285 - DNA, 50 bp, Artificial
  Synthetic oligonucleotide
gcaaccggaaagaaccttggaaaggaacaggacccaacaggggttgaacc

SEQ ID NO: 405286 - DNA, 57 bp, Artificial
  Synthetic oligonucleotide
gcaaccgttaccccccgcgctctgagagcggctctattggtccgagaccaatgtgcg

SEQ ID NO: 405287 - DNA, 55 bp, Artificial
  Synthetic oligonucleotide
gcaaccgttactggtggacaatatgcctgtaaggaacaggcgttggttaagaaat

SEQ ID NO: 405288 - DNA, 58 bp, Artificial
  Synthetic oligonucleotide
gcaaccgttgcatgacttatgccggttgccagggtctcactgcccctaaaatccaaat

SEQ ID NO: 405289 - DNA, 55 bp, Artificial
  Synthetic oligonucleotide
gcaaccgtttaaattgagaacattaaggaatgagtatgtggttgcgttgtacgcg

SEQ ID NO: 405290 - DNA, 60 bp, Artificial
  Synthetic oligonucleotide
gcaacctacagaaagtgtggatcaggcccctggcttacacccagatgcttggtcgattac

SEQ ID NO: 405291 - DNA, 58 bp, Artificial
  Synthetic oligonucleotide
gcaacctactttctcggtacagagaaatcttcctttcgagagagctaccataatggcg

SEQ ID NO: 405292 - DNA, 52 bp, Artificial
  Synthetic oligonucleotide
gcaacctcacaacaacatggcaatggctgggcaatgatggcgtgtccaggac

SEQ ID NO: 405293 - DNA, 60 bp, Artificial
  Synthetic oligonucleotide
gcaacctcagctcttgagaatatgggaatagaatatgattatcaggatgtgtattctaga

SEQ ID NO: 405294 - DNA, 60 bp, Artificial
  Synthetic oligonucleotide
gcaacctcctctagctgatcttccatcgacctggaaaactccatgatcaaggatgtctcc

SEQ ID NO: 405295 - DNA, 55 bp, Artificial
  Synthetic oligonucleotide
gcaacctctcattgtctgtttggtgaacatagtgctcacttgtgtttgtgttcgc

SEQ ID NO: 405296 - DNA, 60 bp, Artificial
  Synthetic oligonucleotide
gcaacctgctcatgacaatttaatgggtacgatgtggttgaatgcaggttcggagattca

SEQ ID NO: 405297 - DNA, 57 bp, Artificial
  Synthetic oligonucleotide
gcaaccttgacaaattagaacaaagtcctgatagttcaggtttagatgatgatagtg

SEQ ID NO: 405298 - DNA, 60 bp, Artificial
  Synthetic oligonucleotide
gcaaccttttccaggttccgcatggtaccaggagtcaatgctattcagtgcgctgttacc

SEQ ID NO: 405299 - DNA, 50 bp, Artificial
  Synthetic oligonucleotide
gcaacgaaacgagaacgcagatcgttaacatgctaatcgggatggctgac

SEQ ID NO: 405300 - DNA, 55 bp, Artificial
  Synthetic oligonucleotide
gcaacgaatccattaagttgtcatcgtcgggacccactctcaggcccggttccgc

SEQ ID NO: 405301 - DNA, 57 bp, Artificial
  Synthetic oligonucleotide
gcaacgacatcggactcctgaagaagatctggaagtataagaagcctctcattgcta

SEQ ID NO: 405302 - DNA, 55 bp, Artificial
  Synthetic oligonucleotide
gcaacgagacttgaatctatatcaaggtttagaccaactggcagatgaggctgga

SEQ ID NO: 405303 - DNA, 59 bp, Artificial
  Synthetic oligonucleotide
gcaacgattttggtggtgctgcattacaattactattaatacattcttggaccgtagtc

SEQ ID NO: 405304 - DNA, 55 bp, Artificial
  Synthetic oligonucleotide
gcaacgcaacccaaaagtttggttcttcgtatcagatgcacaggttggaaggttc

SEQ ID NO: 405305 - DNA, 55 bp, Artificial
  Synthetic oligonucleotide
gcaacgcactaggttctgactgaagccagactcaattacaaaccctttaccggag

SEQ ID NO: 405306 - DNA, 60 bp, Artificial
  Synthetic oligonucleotide
gcaacgcagctgtgcgccagtgactccactgtagagccgtgcagcgcttaactgaagacg

SEQ ID NO: 405307 - DNA, 50 bp, Artificial
  Synthetic oligonucleotide
gcaacgcataaacgtatacaatcgtgaaaacggctattaagaacagcagt

SEQ ID NO: 405308 - DNA, 52 bp, Artificial
  Synthetic oligonucleotide
gcaacgcatgcattatagaaatggagatccgcaaacaccgtttcaaatagcg

SEQ ID NO: 405309 - DNA, 60 bp, Artificial
  Synthetic oligonucleotide
gcaacgcccgagacaacaagatgggtagagaggtgtacggagatgacgacgtcatagaac

SEQ ID NO: 405310 - DNA, 55 bp, Artificial
  Synthetic oligonucleotide
gcaacgcctccattgttctgcgccactatggcaagggaccagtggtctacatccc

SEQ ID NO: 405311 - DNA, 55 bp, Artificial
  Synthetic oligonucleotide
gcaacgcctgagcaaaacgctaagcagctacgacacacactcaatgccggcgatc

SEQ ID NO: 405312 - DNA, 56 bp, Artificial
  Synthetic oligonucleotide
gcaacgcgcctgtaactggaattttgacgcaaatttccaatgctgttagtaacggt

SEQ ID NO: 405313 - DNA, 60 bp, Artificial
  Synthetic oligonucleotide
gcaacgcggctcttggagcagtgttcgctgaacagaatcaatggagcacagcgcgtgagg

SEQ ID NO: 405314 - DNA, 60 bp, Artificial
  Synthetic oligonucleotide
gcaacgcgtcccagtttcatgctggctcgcttttagtctttatggctccagagttttaca

SEQ ID NO: 405315 - DNA, 60 bp, Artificial
  Synthetic oligonucleotide
gcaacgcgtgatgtcgacgtatatttaggcgcatgttcagagtccgtatatcacatatac

SEQ ID NO: 405316 - DNA, 55 bp, Artificial
  Synthetic oligonucleotide
gcaacgcgttaacttctaataccgcaaaaaagatctatagtacaattggaaaagc

SEQ ID NO: 405317 - DNA, 60 bp, Artificial
  Synthetic oligonucleotide
gcaacgcgttttcacagtagcctccattagaagcatgttgattaagtgaggaccaagcta

SEQ ID NO: 405318 - DNA, 55 bp, Artificial
  Synthetic oligonucleotide
gcaacgctaccgaacccacgttcatcgataagacggcaggcacgtttccgtccgc

SEQ ID NO: 405319 - DNA, 58 bp, Artificial
  Synthetic oligonucleotide
gcaacgctagtaagttccatcaaggggcactgctagtcgctatccttccagagtatgt

SEQ ID NO: 405320 - DNA, 60 bp, Artificial
  Synthetic oligonucleotide
gcaacgctgtctgacgagtgggtgtttaaggcgatggagaagatctcgaacaagaaaaca

SEQ ID NO: 405321 - DNA, 60 bp, Artificial
  Synthetic oligonucleotide
gcaacgctttcaatgcttcgctagtaaaattaggtgcaatcaaatacagacggccattgc

SEQ ID NO: 405322 - DNA, 55 bp, Artificial
  Synthetic oligonucleotide
gcaacggaacaggtgattttgattacgtcaaaatggcaaacgccaataaagatgc

SEQ ID NO: 405323 - DNA, 58 bp, Artificial
  Synthetic oligonucleotide
gcaacggcagaggaccagccgacccaaccggacgtagcgacatgcagattttatacct

SEQ ID NO: 405324 - DNA, 60 bp, Artificial
  Synthetic oligonucleotide
gcaacgggatgatattaagcatactggtattgttcgttgtgttagtgatgttactcgtgg

SEQ ID NO: 405325 - DNA, 59 bp, Artificial
  Synthetic oligonucleotide
gcaacgggggccttatagcgcccagatacggatacatcattgagaagtacggtacagga

SEQ ID NO: 405326 - DNA, 50 bp, Artificial
  Synthetic oligonucleotide
gcaacggtcgtcggaaacgacgaaaaaaacgtcttaatcttaccattgct

SEQ ID NO: 405327 - DNA, 55 bp, Artificial
  Synthetic oligonucleotide
gcaacggtgtagtccgtacccagggtcaaggtggattccacaccgtctgcgtcgc

SEQ ID NO: 405328 - DNA, 50 bp, Artificial
  Synthetic oligonucleotide
gcaacggttgcactgaggagtcggattctatattcataccgactattctg

SEQ ID NO: 405329 - DNA, 60 bp, Artificial
  Synthetic oligonucleotide
gcaacgtcaacgtttcacgactacgttgtaaatgtgcaatgtacaggtgcgacgcagcag

SEQ ID NO: 405330 - DNA, 55 bp, Artificial
  Synthetic oligonucleotide
gcaacgtcaccgttaccagctccgttgaactggttgaaaatgagcacaccggatc

SEQ ID NO: 405331 - DNA, 55 bp, Artificial
  Synthetic oligonucleotide
gcaacgtgacgttacggtcgtacccgtagaggcactggtagatggttgccggcgc

SEQ ID NO: 405332 - DNA, 57 bp, Artificial
  Synthetic oligonucleotide
gcaacgtggcggtattagataccgcccattgtaggttctgcaatacacgcgcgggaa

SEQ ID NO: 405333 - DNA, 59 bp, Artificial
  Synthetic oligonucleotide
gcaacgtgtgctcattacggacgaccagcgtagacctataccttacgtgtataagtctc

SEQ ID NO: 405334 - DNA, 57 bp, Artificial
  Synthetic oligonucleotide
gcaacgtttctgtccgcagtaggccacgacgttggttccatggatacggactccgcc

SEQ ID NO: 405335 - DNA, 55 bp, Artificial
  Synthetic oligonucleotide
gcaacgtttgggaacgaagaagatccctgattggggtcttgacgaatcctaccta

SEQ ID NO: 405336 - DNA, 60 bp, Artificial
  Synthetic oligonucleotide
gcaactaacggatcatgagttgttgttacttgtggcacgacagagctgcatatcatctcc

SEQ ID NO: 405337 - DNA, 60 bp, Artificial
  Synthetic oligonucleotide
gcaactaagtctcatgacgaccctaagatgtcaaaccaacggttgcatgaggatcaattc

SEQ ID NO: 405338 - DNA, 55 bp, Artificial
  Synthetic oligonucleotide
gcaactacagctaggagcaaggacgaacccgactacgggtgtcgggactgagagg

SEQ ID NO: 405339 - DNA, 60 bp, Artificial
  Synthetic oligonucleotide
gcaactagaggcgttgacaatccagtcagaaacgcagttcttgacaggtattaactctca

SEQ ID NO: 405340 - DNA, 55 bp, Artificial
  Synthetic oligonucleotide
gcaactaggacaggttatgctcctggttctgtgtgcagttcaacttttgctaatg

SEQ ID NO: 405341 - DNA, 57 bp, Artificial
  Synthetic oligonucleotide
gcaactagtggaacttctccttcaataccagtaacagtaaccattgcccctatgttc

SEQ ID NO: 405342 - DNA, 55 bp, Artificial
  Synthetic oligonucleotide
gcaactataattctatttccgtgccacaagataacctgcaacacttgcatgagcg

SEQ ID NO: 405343 - DNA, 59 bp, Artificial
  Synthetic oligonucleotide
gcaactatacaaaattttggtacatcaatgataccatcacaggaagacattctttaccg

SEQ ID NO: 405344 - DNA, 60 bp, Artificial
  Synthetic oligonucleotide
gcaactatgggatgctaagggaggctatgccaaattacactgattatatttcgaccaagg

SEQ ID NO: 405345 - DNA, 55 bp, Artificial
  Synthetic oligonucleotide
gcaactattactagttggttgtaagccagctacaggtgaacactgggatgctgct

SEQ ID NO: 405346 - DNA, 57 bp, Artificial
  Synthetic oligonucleotide
gcaactattcaatctggtagtagacgtccaaacacagggaagattgttactaacgac

SEQ ID NO: 405347 - DNA, 56 bp, Artificial
  Synthetic oligonucleotide
gcaactattcctgatatagagctggctgaattggttttaccttgtagcttattaag

SEQ ID NO: 405348 - DNA, 50 bp, Artificial
  Synthetic oligonucleotide
gcaactattgaatgaactcagaaaacgcttgtggggaatactagcatatt

SEQ ID NO: 405349 - DNA, 60 bp, Artificial
  Synthetic oligonucleotide
gcaactattggatgctacatgcgaaggcttcaaacttagtctagcctaccaatcttcact

SEQ ID NO: 405350 - DNA, 60 bp, Artificial
  Synthetic oligonucleotide
gcaactattgtggtttcatatatcgtgcattacttttggaagagagactgtacttgaata

SEQ ID NO: 405351 - DNA, 60 bp, Artificial
  Synthetic oligonucleotide
gcaactccacactcagtatgggtgtttgcatgtgcaccagatcgttgcccaccaacagcc

SEQ ID NO: 405352 - DNA, 60 bp, Artificial
  Synthetic oligonucleotide
gcaactccacgggcctttaccatgtcaccaatgattgccctaactcgagcattgtgtacg

SEQ ID NO: 405353 - DNA, 52 bp, Artificial
  Synthetic oligonucleotide
gcaactccatgatgcggagtctgagctggtggaagccaaggctagactcctt

SEQ ID NO: 405354 - DNA, 55 bp, Artificial
  Synthetic oligonucleotide
gcaactcccgttacgtcctgattatggtaatatctgggtcggcgatgcgctatcc

SEQ ID NO: 405355 - DNA, 60 bp, Artificial
  Synthetic oligonucleotide
gcaactccggaaccgaaaggatatgtgctggaaatcagcgatgttggtgcataccgaatt

SEQ ID NO: 405356 - DNA, 55 bp, Artificial
  Synthetic oligonucleotide
gcaactcctcaactataacacaagcctgtccaaaggtctcttttgaaccaattcc

SEQ ID NO: 405357 - DNA, 60 bp, Artificial
  Synthetic oligonucleotide
gcaactcctcggggctctaccatgtcaccaatgattgccccaattcgagtattgtgtacg

SEQ ID NO: 405358 - DNA, 54 bp, Artificial
  Synthetic oligonucleotide
gcaactccttaactatccggttcacgagctttggaaaacaggccacctcctggg

SEQ ID NO: 405359 - DNA, 55 bp, Artificial
  Synthetic oligonucleotide
gcaactcgagaaatacaagacgttgagtggggtaatgaggtaacaatcggtagtg

SEQ ID NO: 405360 - DNA, 51 bp, Artificial
  Synthetic oligonucleotide
gcaactcgcaccccaggacatgcattgcgtcaaaagtatacaatgaccact

SEQ ID NO: 405361 - DNA, 55 bp, Artificial
  Synthetic oligonucleotide
gcaactcgccgctggtttacagctaggccaaggcgaggtggtactgatagggaac

SEQ ID NO: 405362 - DNA, 56 bp, Artificial
  Synthetic oligonucleotide
gcaactcggcttacaatggtccccaatccagcaaaagttttgcccaagtcgtgtac

SEQ ID NO: 405363 - DNA, 57 bp, Artificial
  Synthetic oligonucleotide
gcaactcgttccattcactcgtttaggttcttaattatgatttatgcaattgttggc

SEQ ID NO: 405364 - DNA, 50 bp, Artificial
  Synthetic oligonucleotide
gcaactctacgtttgtgggcatcagcgtcggtttgggtatcgccggccta

SEQ ID NO: 405365 - DNA, 51 bp, Artificial
  Synthetic oligonucleotide
gcaactctaggtctaggtctagaggacggtctaggtctaacacaaggtcta

SEQ ID NO: 405366 - DNA, 60 bp, Artificial
  Synthetic oligonucleotide
gcaactctcaccatctatacagagacaaacactactttgtaagaggaggaatgccatctg

SEQ ID NO: 405367 - DNA, 57 bp, Artificial
  Synthetic oligonucleotide
gcaactctctattgtgtacatgaaggaatagatgtacgagacaccaaggaggcctta

SEQ ID NO: 405368 - DNA, 60 bp, Artificial
  Synthetic oligonucleotide
gcaactctgattaccatcaccactagcgccatggctgaagctcccgcttcccaccatcgt

SEQ ID NO: 405369 - DNA, 55 bp, Artificial
  Synthetic oligonucleotide
gcaactgaagttgggttatcatccgtgtgtcgtcgagtgctggtaccatgtactg

SEQ ID NO: 405370 - DNA, 60 bp, Artificial
  Synthetic oligonucleotide
gcaactgaatgactgtgtcgtgccactagttggtccggcgctagattcagcctgcgtccc

SEQ ID NO: 405371 - DNA, 55 bp, Artificial
  Synthetic oligonucleotide
gcaactgataccaacacatcagaaagccaagacatctcagttaatggtcctgaaa

SEQ ID NO: 405372 - DNA, 51 bp, Artificial
  Synthetic oligonucleotide
gcaactgatcctgaatgcgcaaagaaattttacgaaatatatggagaccgt

SEQ ID NO: 405373 - DNA, 60 bp, Artificial
  Synthetic oligonucleotide
gcaactgcattacagtagagagggtgcctcatgctatgagcgttaccctctctgctactt

SEQ ID NO: 405374 - DNA, 52 bp, Artificial
  Synthetic oligonucleotide
gcaactgcgttccaactgtgactgggaatatggaagtcgatgccatttccga

SEQ ID NO: 405375 - DNA, 55 bp, Artificial
  Synthetic oligonucleotide
gcaactgctacccatatgacgtgccagattacgcatctctcagatctctagtggc

SEQ ID NO: 405376 - DNA, 55 bp, Artificial
  Synthetic oligonucleotide
gcaactgctctcatccggctttcagcacattcatgtaggtatggtactcgttcgg

SEQ ID NO: 405377 - DNA, 60 bp, Artificial
  Synthetic oligonucleotide
gcaactgctggcctcactcacctgatgatctggcattccaacctaaatgatgccacatac

SEQ ID NO: 405378 - DNA, 60 bp, Artificial
  Synthetic oligonucleotide
gcaactgctggccttacccatttgatgatatggcattccaacctcaatgatgccacttac

SEQ ID NO: 405379 - DNA, 60 bp, Artificial
  Synthetic oligonucleotide
gcaactgctgtgatccctactgaattgcttgtcggctcccctgaaagtcttaatccctgg

SEQ ID NO: 405380 - DNA, 56 bp, Artificial
  Synthetic oligonucleotide
gcaactggaaacctagtggtaccaagatatgcctttgcaatgaatagaggttctga

SEQ ID NO: 405381 - DNA, 55 bp, Artificial
  Synthetic oligonucleotide
gcaactggaacaagctgtactcgaccaacatgtacgcatactccctgacaggcga

SEQ ID NO: 405382 - DNA, 55 bp, Artificial
  Synthetic oligonucleotide
gcaactggactaaggaatgttccacagattgagactagaggactcttcggagcta

SEQ ID NO: 405383 - DNA, 58 bp, Artificial
  Synthetic oligonucleotide
gcaactggcaaattagccttcacaaaggcttttcaaaccaacgcctactacagatgtg

SEQ ID NO: 405384 - DNA, 60 bp, Artificial
  Synthetic oligonucleotide
gcaactggctagtcaatgcagacagactagtaagtagcaagaccgggaataggtacatac

SEQ ID NO: 405385 - DNA, 59 bp, Artificial
  Synthetic oligonucleotide
gcaactggtacgttcataaacattgagaagtcgctgcagagggagttgggtttcacacg

SEQ ID NO: 405386 - DNA, 55 bp, Artificial
  Synthetic oligonucleotide
gcaactgtaagaagttgggaccaagagaaaacgtagcagtaatccaagtaggcgg

SEQ ID NO: 405387 - DNA, 52 bp, Artificial
  Synthetic oligonucleotide
gcaactgtcacgggagagaggagcccgttttcgggcacttgtctcctaaaca

SEQ ID NO: 405388 - DNA, 57 bp, Artificial
  Synthetic oligonucleotide
gcaactgtcatttgaccacatctaccccactggttctgcaacatactgccctggagc

SEQ ID NO: 405389 - DNA, 58 bp, Artificial
  Synthetic oligonucleotide
gcaactgtccactagaggagtccaaattgcttcaaacgaaaacatggaaacaatggac

SEQ ID NO: 405390 - DNA, 55 bp, Artificial
  Synthetic oligonucleotide
gcaactgtggggacccagacaggttatcaaaggcacccggtctttccgccttcag

SEQ ID NO: 405391 - DNA, 55 bp, Artificial
  Synthetic oligonucleotide
gcaactgttacagcaattagaaccagctctcaagacagggtcagaaagcctgcag

SEQ ID NO: 405392 - DNA, 60 bp, Artificial
  Synthetic oligonucleotide
gcaactgttactggtggtcagtatgcaagcaaggagcaagcaatagtcaggaaattcatg

SEQ ID NO: 405393 - DNA, 55 bp, Artificial
  Synthetic oligonucleotide
gcaacttaccacagcaatatcgaccgctagtaacagtttaaccaaactcagcaac

SEQ ID NO: 405394 - DNA, 55 bp, Artificial
  Synthetic oligonucleotide
gcaacttcccagtcttctttaggaacaaaatccaaattgggtacttcgacagaca

SEQ ID NO: 405395 - DNA, 55 bp, Artificial
  Synthetic oligonucleotide
gcaacttccttgtgccttttgcaagaagacggtgtgtacagcagagatttatgca

SEQ ID NO: 405396 - DNA, 55 bp, Artificial
  Synthetic oligonucleotide
gcaacttcggtataatgggcgataagtatcttgttctcggtgacactgtaactgg

SEQ ID NO: 405397 - DNA, 59 bp, Artificial
  Synthetic oligonucleotide
gcaacttctccctaatgatttggagagccgtgtgtttatccggatcattaaacggctca

SEQ ID NO: 405398 - DNA, 60 bp, Artificial
  Synthetic oligonucleotide
gcaacttgaagctttaactatacaatctgaaacgcagtttctcgctggtataaattcaca

SEQ ID NO: 405399 - DNA, 55 bp, Artificial
  Synthetic oligonucleotide
gcaacttgaggttaactgatgtgactttgaagagtggaaattggaaagacaagtt

SEQ ID NO: 405400 - DNA, 55 bp, Artificial
  Synthetic oligonucleotide
gcaacttgctccgccaaccatgactcccctgatgccgagctcatagaggccaacc

SEQ ID NO: 405401 - DNA, 55 bp, Artificial
  Synthetic oligonucleotide
gcaacttggattcaaagagggcaagatccgacgtggcgttcagacgaatgtactt

SEQ ID NO: 405402 - DNA, 55 bp, Artificial
  Synthetic oligonucleotide
gcaacttgggtcccaaagaaagtcaagggaatgataggttggtctgtagacgcag

SEQ ID NO: 405403 - DNA, 56 bp, Artificial
  Synthetic oligonucleotide
gcaacttgttgaaaggggatagagtaaacgggcatctaattcacaaaattgaacca

SEQ ID NO: 405404 - DNA, 55 bp, Artificial
  Synthetic oligonucleotide
gcaactttcacccgtctcctttgatgggcggctttggacttaaacatccgcctcc

SEQ ID NO: 405405 - DNA, 55 bp, Artificial
  Synthetic oligonucleotide
gcaactttgcactacgttgttgcagcagactggactctccaacgtcaatcgtcgt

SEQ ID NO: 405406 - DNA, 55 bp, Artificial
  Synthetic oligonucleotide
gcaactttgggatcagagagtggtcatacctgattgaggatcctggggcgcccca

SEQ ID NO: 405407 - DNA, 60 bp, Artificial
  Synthetic oligonucleotide
gcaactttttcacctctgcctagtcatctcatgttcatgtcctactgttcaagcctccaa

SEQ ID NO: 405408 - DNA, 56 bp, Artificial
  Synthetic oligonucleotide
gcaagaaaagcatactggactgcgttaaaccaacctaatgacctggctgttaacat

SEQ ID NO: 405409 - DNA, 55 bp, Artificial
  Synthetic oligonucleotide
gcaagaaactgcagggccccaagaaggaaggggtgctggaaatgtggacaagagg

SEQ ID NO: 405410 - DNA, 55 bp, Artificial
  Synthetic oligonucleotide
gcaagaaagggtccaagtgccacaactagcaggtttaaagtgttctctgttcgtg

SEQ ID NO: 405411 - DNA, 56 bp, Artificial
  Synthetic oligonucleotide
gcaagaaatggcccagatcagaagaaaatttgaactgtttacttacactagattcg

SEQ ID NO: 405412 - DNA, 60 bp, Artificial
  Synthetic oligonucleotide
gcaagaaattgcattgtcgcaactaattgatttggcaacgttaccacttgacatgttctc

SEQ ID NO: 405413 - DNA, 56 bp, Artificial
  Synthetic oligonucleotide
gcaagaaattggagtatttacctagagagtacgaagagttcttttgatttgtgtgc

SEQ ID NO: 405414 - DNA, 55 bp, Artificial
  Synthetic oligonucleotide
gcaagaacaaggtccgcagtcaacaaactagtgacactgactcataagataggcc

SEQ ID NO: 405415 - DNA, 60 bp, Artificial
  Synthetic oligonucleotide
gcaagaaccagtgcatgtagatgtaactcaagccgaagtgcatatccaaaacgaagaggt

SEQ ID NO: 405416 - DNA, 55 bp, Artificial
  Synthetic oligonucleotide
gcaagaacctctccataccgcacgaactgatgaacaacggcgacgactgcatagt

SEQ ID NO: 405417 - DNA, 55 bp, Artificial
  Synthetic oligonucleotide
gcaagaacgccatattagtttatcattgttggatgtctgatgtaacgtccagcgc

SEQ ID NO: 405418 - DNA, 58 bp, Artificial
  Synthetic oligonucleotide
gcaagaactcacagtgtccgacagcgtgctggtctttgaactcacagatatagtccat

SEQ ID NO: 405419 - DNA, 59 bp, Artificial
  Synthetic oligonucleotide
gcaagaactcgctgacacttgtcccctcaccctaaactgtgacaggattgagaacaaag

SEQ ID NO: 405420 - DNA, 60 bp, Artificial
  Synthetic oligonucleotide
gcaagaagacaggcgacattccattagaagtcttgataaaatattgcgattcgcttacta

SEQ ID NO: 405421 - DNA, 55 bp, Artificial
  Synthetic oligonucleotide
gcaagaagaggcaccctttgctgatatctactgacaaaggattaagagtagttcc

SEQ ID NO: 405422 - DNA, 55 bp, Artificial
  Synthetic oligonucleotide
gcaagaagccttaaagcattttgatcctcgcttgctaactgcgcttggtaacttt

SEQ ID NO: 405423 - DNA, 60 bp, Artificial
  Synthetic oligonucleotide
gcaagaagcggctaacatcatagtcggttatggtgagtggccttcctactgctcggattc

SEQ ID NO: 405424 - DNA, 55 bp, Artificial
  Synthetic oligonucleotide
gcaagaatcaagaccagactattcaccatcaggcaggaaatggccattaggggcc

SEQ ID NO: 405425 - DNA, 60 bp, Artificial
  Synthetic oligonucleotide
gcaagaatccaagtagcacacttactcgggaagagagcacagcgcgacttgttaactgga

SEQ ID NO: 405426 - DNA, 59 bp, Artificial
  Synthetic oligonucleotide
gcaagaatctgagttctccttctatggtgatgacgaggtggtttcgaccaacctcgagt

SEQ ID NO: 405427 - DNA, 55 bp, Artificial
  Synthetic oligonucleotide
gcaagaatgagaggtgcccacactaatgatgtaagacaattggcagaggcagtgc

SEQ ID NO: 405428 - DNA, 55 bp, Artificial
  Synthetic oligonucleotide
gcaagaatgtcacatacgaatgtaagtgtggtgactacagcacgggtaccgtgag

SEQ ID NO: 405429 - DNA, 56 bp, Artificial
  Synthetic oligonucleotide
gcaagaatgtcagctccgtccaatgcacacatggaatcaggccagtagtatcaact

SEQ ID NO: 405430 - DNA, 59 bp, Artificial
  Synthetic oligonucleotide
gcaagaattccactacctaatttgaatgaggatctaacctgtggaaatctactaatgtg

SEQ ID NO: 405431 - DNA, 52 bp, Artificial
  Synthetic oligonucleotide
gcaagaattcccctccccaatttaaatgaggacctaacctgtggaaatttac

SEQ ID NO: 405432 - DNA, 55 bp, Artificial
  Synthetic oligonucleotide
gcaagaattgcatcaactttgcagataatggctgaaagagttagccgccacaagg

SEQ ID NO: 405433 - DNA, 55 bp, Artificial
  Synthetic oligonucleotide
gcaagacaaaggctagagatggctcttaaagtgagcaaagccgcaggtctgaacg

SEQ ID NO: 405434 - DNA, 55 bp, Artificial
  Synthetic oligonucleotide
gcaagacaaatgtatagaaggataggtcaaaagtatagaatgcctagagaggcag

SEQ ID NO: 405435 - DNA, 51 bp, Artificial
  Synthetic oligonucleotide
gcaagacaacagcagatccataagattagtgagcggattcttagcgattgc

SEQ ID NO: 405436 - DNA, 57 bp, Artificial
  Synthetic oligonucleotide
gcaagacaaggacagaaccctttatccaagaatggtagcgcagcggacgaaaaccaa

SEQ ID NO: 405437 - DNA, 60 bp, Artificial
  Synthetic oligonucleotide
gcaagacaggcccagatcgactcgattggtgagcggattcttagcacttgcctgggacga

SEQ ID NO: 405438 - DNA, 54 bp, Artificial
  Synthetic oligonucleotide
gcaagacagtcttgagggattgtcattttgtgggtttactaacgaacttattag

SEQ ID NO: 405439 - DNA, 57 bp, Artificial
  Synthetic oligonucleotide
gcaagacataattcagttgaagcagcaaggactgtctacggccatgatgtataaaga

SEQ ID NO: 405440 - DNA, 58 bp, Artificial
  Synthetic oligonucleotide
gcaagacatgggtcgcatgtttgggggctggcacttgttccgacacattaaaacccgc

SEQ ID NO: 405441 - DNA, 55 bp, Artificial
  Synthetic oligonucleotide
gcaagacattatatttgcctacgatccgtctctcaagaagttatcgcacctatcg

SEQ ID NO: 405442 - DNA, 60 bp, Artificial
  Synthetic oligonucleotide
gcaagaccagattcctcccggtagctggcggaacaagcagtgtgtacatcgaagtattgc

SEQ ID NO: 405443 - DNA, 55 bp, Artificial
  Synthetic oligonucleotide
gcaagaccagctgtgaatggacaaagagggagaattgactattattggtctgtgc

SEQ ID NO: 405444 - DNA, 55 bp, Artificial
  Synthetic oligonucleotide
gcaagacccaacaggagtcgagccaggggaccatcttaaagaaagatcgatgctg

SEQ ID NO: 405445 - DNA, 56 bp, Artificial
  Synthetic oligonucleotide
gcaagacctgcttaacgtcacagactccgtagcaaaagggctacagcttgccggtg

SEQ ID NO: 405446 - DNA, 55 bp, Artificial
  Synthetic oligonucleotide
gcaagaccttaggagatttagtgagggaagctgaaaagatctttaataaacgaga

SEQ ID NO: 405447 - DNA, 55 bp, Artificial
  Synthetic oligonucleotide
gcaagacgcaaattccatccctagtctctggggtaccggtggggctgtattgacg

SEQ ID NO: 405448 - DNA, 60 bp, Artificial
  Synthetic oligonucleotide
gcaagacggcatatcaagacaaaaagaagcaagcgctaattgcattcggtgaactatgtc

SEQ ID NO: 405449 - DNA, 58 bp, Artificial
  Synthetic oligonucleotide
gcaagacgtggcaaacttgatgtcaacatggtccgtgaattcagtcacggaaattgga

SEQ ID NO: 405450 - DNA, 55 bp, Artificial
  Synthetic oligonucleotide
gcaagactgagcacattatgagcgtgcaacctagccagatggcgaaaactgagcc

SEQ ID NO: 405451 - DNA, 60 bp, Artificial
  Synthetic oligonucleotide
gcaagactgatggagcaaaccttgcctatcaaccctccaaagaatgaggacccagacctc

SEQ ID NO: 405452 - DNA, 60 bp, Artificial
  Synthetic oligonucleotide
gcaagacttaaccctgtatctgcagtatttgataacatatcccgcagtcgcataacccgg

SEQ ID NO: 405453 - DNA, 55 bp, Artificial
  Synthetic oligonucleotide
gcaagagaaactgttaaaatacctggttaaacatgaacaccttgatgctgctctt

SEQ ID NO: 405454 - DNA, 59 bp, Artificial
  Synthetic oligonucleotide
gcaagagaagttggggatcccagcctcgtttacaggcttgctagacgaaatagccaata

SEQ ID NO: 405455 - DNA, 60 bp, Artificial
  Synthetic oligonucleotide
gcaagagacggatctctgggtccttgacacattcaccaaatcatttggagaacttggcct

SEQ ID NO: 405456 - DNA, 60 bp, Artificial
  Synthetic oligonucleotide
gcaagagacgtggcgtgccttctgggtcgtggtggacccagatggtcgactcagttgtga

SEQ ID NO: 405457 - DNA, 55 bp, Artificial
  Synthetic oligonucleotide
gcaagagactcggagcctaggcggctccaagttcagtgtctgtaccgttgtgtcc

SEQ ID NO: 405458 - DNA, 52 bp, Artificial
  Synthetic oligonucleotide
gcaagagacttgttggtgcaggagactggtacaaaagtcatgcatgctacca

SEQ ID NO: 405459 - DNA, 57 bp, Artificial
  Synthetic oligonucleotide
gcaagagagtaggtcagatgtaagtttggatatagttaatgaaacctgcaaatatcc

SEQ ID NO: 405460 - DNA, 53 bp, Artificial
  Synthetic oligonucleotide
gcaagagagtcccaatggggttctcgtatgatacccgctgctttgactctaca

SEQ ID NO: 405461 - DNA, 55 bp, Artificial
  Synthetic oligonucleotide
gcaagagatacaaatctacatacacaagtaggagcaataacacaaaacccggtag

SEQ ID NO: 405462 - DNA, 60 bp, Artificial
  Synthetic oligonucleotide
gcaagagcactggacatgacgagcgagcttttccaatccatagaagccgccctcgactct

SEQ ID NO: 405463 - DNA, 60 bp, Artificial
  Synthetic oligonucleotide
gcaagagcacttactgtaatgcgggcatgtgccactttacaagaagcaagaatcgttttg

SEQ ID NO: 405464 - DNA, 58 bp, Artificial
  Synthetic oligonucleotide
gcaagagcagtggcaaggcccaatgttcgacaaaagatgtttaacttgaccagactaa

SEQ ID NO: 405465 - DNA, 60 bp, Artificial
  Synthetic oligonucleotide
gcaagagctgcatcaataggtgtttttatgtggagttgataagaggaaggccgcaggaga

SEQ ID NO: 405466 - DNA, 57 bp, Artificial
  Synthetic oligonucleotide
gcaagagggacaatgggtactgggttcccaagtctccagagaagaagtatgttccaa

SEQ ID NO: 405467 - DNA, 57 bp, Artificial
  Synthetic oligonucleotide
gcaagagggggcctaacaacagctttttcagtaggctgaactggttgtacaaatcag

SEQ ID NO: 405468 - DNA, 55 bp, Artificial
  Synthetic oligonucleotide
gcaagaggtgattaatcacaggcccatcgctcagagacgacccatccctagattc

SEQ ID NO: 405469 - DNA, 58 bp, Artificial
  Synthetic oligonucleotide
gcaagagtttaccactcagtatgtcgaaagtctttgtagatatcgaggccgagagccc

SEQ ID NO: 405470 - DNA, 60 bp, Artificial
  Synthetic oligonucleotide
gcaagataacatcagatcgcacgacacttagaagtatcattgacgatcacttgagagggg

SEQ ID NO: 405471 - DNA, 55 bp, Artificial
  Synthetic oligonucleotide
gcaagataccctgcgtgggtgaatggcgctactccgagacgcctcactaaatacg

SEQ ID NO: 405472 - DNA, 60 bp, Artificial
  Synthetic oligonucleotide
gcaagatagctcccttaatggtggcatacatgctggaaagagagttggtccgcagaacga

SEQ ID NO: 405473 - DNA, 55 bp, Artificial
  Synthetic oligonucleotide
gcaagatatggacatatggttagtgtgtctcacgagccactcgtggttgacggag

SEQ ID NO: 405474 - DNA, 59 bp, Artificial
  Synthetic oligonucleotide
gcaagatccacggcgcgtttagctatatccgctctcaggcgatcccccctcggagaccc

SEQ ID NO: 405475 - DNA, 51 bp, Artificial
  Synthetic oligonucleotide
gcaagatgggctccagatcttctaccaggatcccagtacctctgatgctga

SEQ ID NO: 405476 - DNA, 55 bp, Artificial
  Synthetic oligonucleotide
gcaagatgtattctgtgtacagacgtgggtataagacgccgtataggagtccgta

SEQ ID NO: 405477 - DNA, 57 bp, Artificial
  Synthetic oligonucleotide
gcaagatgtgtcacatcaaggaaggaataaatccaagcgcattcaagcactcaagtt

SEQ ID NO: 405478 - DNA, 60 bp, Artificial
  Synthetic oligonucleotide
gcaagattaaacattgaagacgcggtgcgaataccgttcctcatgaatgatatccctgaa

SEQ ID NO: 405479 - DNA, 55 bp, Artificial
  Synthetic oligonucleotide
gcaagattcaggaccagaggtaaacgtagtaacagattcacagtatgcattaggg

SEQ ID NO: 405480 - DNA, 55 bp, Artificial
  Synthetic oligonucleotide
gcaagcaaaccgaagagcctattcaggtaagcagtatgatgcatactgtgtgcaa

SEQ ID NO: 405481 - DNA, 55 bp, Artificial
  Synthetic oligonucleotide
gcaagcaaagtcgccgggaagtgccacacagttctaacagtatagctagtcctaa

SEQ ID NO: 405482 - DNA, 55 bp, Artificial
  Synthetic oligonucleotide
gcaagcaaatatgaatccaactgactcccgtactgccatttcaatggccctgcca

SEQ ID NO: 405483 - DNA, 60 bp, Artificial
  Synthetic oligonucleotide
gcaagcaaggtagcctacactctacagacggacgtcaactccatacagcgaacagtcact

SEQ ID NO: 405484 - DNA, 51 bp, Artificial
  Synthetic oligonucleotide
gcaagcaatcataaacgggactgaaaagctcggattgagaatcaatttgga

SEQ ID NO: 405485 - DNA, 55 bp, Artificial
  Synthetic oligonucleotide
gcaagcaatccccgttccaaaatgcttacaacgtcaaaggcaatgccaccagtgc

SEQ ID NO: 405486 - DNA, 59 bp, Artificial
  Synthetic oligonucleotide
gcaagcacaccacaccaccttgcaagtgctcaccaaccaggaaccacacccaccaaatt

SEQ ID NO: 405487 - DNA, 55 bp, Artificial
  Synthetic oligonucleotide
gcaagcaccaagcatatttcaaagacatatgcagacagccttaaatggcgcagat

SEQ ID NO: 405488 - DNA, 58 bp, Artificial
  Synthetic oligonucleotide
gcaagcacctaccctagtccaaatccccgaagtctccctcgccatcaagggaccatca

SEQ ID NO: 405489 - DNA, 55 bp, Artificial
  Synthetic oligonucleotide
gcaagcaccttagaaacatacctatactgctaccacaatggacatgaaccaacac

SEQ ID NO: 405490 - DNA, 56 bp, Artificial
  Synthetic oligonucleotide
gcaagcacggggttttcctggacaatccctagaggtcccaacactgttgggagaca

SEQ ID NO: 405491 - DNA, 55 bp, Artificial
  Synthetic oligonucleotide
gcaagcactttattgaccaactatgttgcagccaccacctttacatggacaagca

SEQ ID NO: 405492 - DNA, 51 bp, Artificial
  Synthetic oligonucleotide
gcaagcagaaaccaccgcacttttacttaaacaaagtgaacaaaccatcaa

SEQ ID NO: 405493 - DNA, 60 bp, Artificial
  Synthetic oligonucleotide
gcaagcagcgaaccagctgtataaggtcaagcacttctgtttccccggtcaatgttgata

SEQ ID NO: 405494 - DNA, 55 bp, Artificial
  Synthetic oligonucleotide
gcaagcagtaagaacatgccaagcaggataacgcagaagagcatggaaccgcctc

SEQ ID NO: 405495 - DNA, 60 bp, Artificial
  Synthetic oligonucleotide
gcaagcagtgaacgtctgctcaatgtgggccatccatattttgagctcaaaaaaggagag

SEQ ID NO: 405496 - DNA, 52 bp, Artificial
  Synthetic oligonucleotide
gcaagcatgacaagaatcttagagccctttagaacacaaaatccagagatag

SEQ ID NO: 405497 - DNA, 60 bp, Artificial
  Synthetic oligonucleotide
gcaagcatgagaaggaactatttcacagcagaagtgtctcattgcagagctacagagtac

SEQ ID NO: 405498 - DNA, 55 bp, Artificial
  Synthetic oligonucleotide
gcaagcatgaggagaaattatttcacagcagaagtgtctcattgtagggcgacag

SEQ ID NO: 405499 - DNA, 55 bp, Artificial
  Synthetic oligonucleotide
gcaagcattccagagtcccggcgtgacgcgatgctaggcacgcacgtcatatggg

SEQ ID NO: 405500 - DNA, 60 bp, Artificial
  Synthetic oligonucleotide
gcaagcattcttgggtcagggcgtacagagagtcaaaggcaccgcctcagggttgaatga

SEQ ID NO: 405501 - DNA, 56 bp, Artificial
  Synthetic oligonucleotide
gcaagccagaaattggcctgtcgtaacgcgtaagtctgtggcggaaccgactactt

SEQ ID NO: 405502 - DNA, 60 bp, Artificial
  Synthetic oligonucleotide
gcaagccagacaatgcatgtgattgactcatttggatccctcactacaggttaccatgtc

SEQ ID NO: 405503 - DNA, 58 bp, Artificial
  Synthetic oligonucleotide
gcaagccatactatgctggggggacctaatgaatctagccacctgggtgggtagtaat

SEQ ID NO: 405504 - DNA, 58 bp, Artificial
  Synthetic oligonucleotide
gcaagccatccaaccgggtgcctaaccagtatcgcttcaaaagcaacaaagagttgga

SEQ ID NO: 405505 - DNA, 60 bp, Artificial
  Synthetic oligonucleotide
gcaagcccaagatgtacacaatgtacaaaagccctgatgttccacgaggatgtgaaggcc

SEQ ID NO: 405506 - DNA, 60 bp, Artificial
  Synthetic oligonucleotide
gcaagcccaagatgtacaggacgtacaaaagcactgatgtgcccaaaggttgtgaaggcc

SEQ ID NO: 405507 - DNA, 60 bp, Artificial
  Synthetic oligonucleotide
gcaagcccactgtctcagtgcgtcttgttctggcttatctagccaggatttaaatgagga

SEQ ID NO: 405508 - DNA, 54 bp, Artificial
  Synthetic oligonucleotide
gcaagccccgttggcacacgactcatcgatcccgtccgatacagacttagcctg

SEQ ID NO: 405509 - DNA, 55 bp, Artificial
  Synthetic oligonucleotide
gcaagcccgcacggctaatcgtattccccgacctaggggtccgggtatgcgagaa

SEQ ID NO: 405510 - DNA, 55 bp, Artificial
  Synthetic oligonucleotide
gcaagccggttgtacgaggaggtctttgctcctacgagtgatggcaagactcctg

SEQ ID NO: 405511 - DNA, 60 bp, Artificial
  Synthetic oligonucleotide
gcaagcgaagataacggagatggagttgatgggacgtgcatctccaccgtggatatacaa

SEQ ID NO: 405512 - DNA, 59 bp, Artificial
  Synthetic oligonucleotide
gcaagcgagacccctgcacgtggcaggcccacacctagtgatgcaccaagagacgagcc

SEQ ID NO: 405513 - DNA, 60 bp, Artificial
  Synthetic oligonucleotide
gcaagcgagatcaatccttctacgtctcgtttgtctcttcgcaaatctatggcgaagctt

SEQ ID NO: 405514 - DNA, 50 bp, Artificial
  Synthetic oligonucleotide
gcaagcgagtgtgtctggccctatctatataagactctcgagttcgcgcc

SEQ ID NO: 405515 - DNA, 60 bp, Artificial
  Synthetic oligonucleotide
gcaagcgatgggcccgtgggtgagaaacttgtgagcatgctggactacgccgtacatggc

SEQ ID NO: 405516 - DNA, 55 bp, Artificial
  Synthetic oligonucleotide
gcaagcgattgggaaagtgaaagccgcttgagctgcgtcttcaaggctgacgcga

SEQ ID NO: 405517 - DNA, 55 bp, Artificial
  Synthetic oligonucleotide
gcaagcgcaggatgggtatgtattgacaatgtaaagctagcacaagaacccaccg

SEQ ID NO: 405518 - DNA, 60 bp, Artificial
  Synthetic oligonucleotide
gcaagcgcatgccatgatggtgtgagctggttaacaattggggtttctgggccagataat

SEQ ID NO: 405519 - DNA, 55 bp, Artificial
  Synthetic oligonucleotide
gcaagcgcgggattactgcactaaggaggatacccgcttcgacggaccttgggag

SEQ ID NO: 405520 - DNA, 60 bp, Artificial
  Synthetic oligonucleotide
gcaagcgcgtgacatcatacttggctggttgcggttccactcctacccgaacacagtcgc

SEQ ID NO: 405521 - DNA, 60 bp, Artificial
  Synthetic oligonucleotide
gcaagcgcttttgtgttaagtctatatatattttaggcaagatatggatggacgataata

SEQ ID NO: 405522 - DNA, 59 bp, Artificial
  Synthetic oligonucleotide
gcaagcgtcaaggtggctggaccgtgcccagaccgccaaaactccttctgacgcacaaa

SEQ ID NO: 405523 - DNA, 55 bp, Artificial
  Synthetic oligonucleotide
gcaagcgtcgttgctcgattaacggagtggtacaatcctatgaacccaagtgcat

SEQ ID NO: 405524 - DNA, 55 bp, Artificial
  Synthetic oligonucleotide
gcaagcgtggaccattctcttttcgttgtttggttcttatgttgcctaggtaact

SEQ ID NO: 405525 - DNA, 51 bp, Artificial
  Synthetic oligonucleotide
gcaagctatgacgtattggattgttaagaaccagggcattgcagcgatatt

SEQ ID NO: 405526 - DNA, 52 bp, Artificial
  Synthetic oligonucleotide
gcaagctattctgtgctggggggatgtaatgaatctagccacctgggtgggc

SEQ ID NO: 405527 - DNA, 60 bp, Artificial
  Synthetic oligonucleotide
gcaagctcaagcgagacatttgttttctcgaaagacaatctcgcgggaagttccagtgga

SEQ ID NO: 405528 - DNA, 60 bp, Artificial
  Synthetic oligonucleotide
gcaagctccgcgccgtaaggcaagctgaaccaaagtagtgacccgacaatgtgccaccaa

SEQ ID NO: 405529 - DNA, 50 bp, Artificial
  Synthetic oligonucleotide
gcaagctctacgcatgggcattccacaagtggaggaacggggaaggtgcc

SEQ ID NO: 405530 - DNA, 57 bp, Artificial
  Synthetic oligonucleotide
gcaagctctctttttgggaggctggtacgaccaaagccggctatccctacaattaca

SEQ ID NO: 405531 - DNA, 60 bp, Artificial
  Synthetic oligonucleotide
gcaagctgattatatgaccgcaacacgagaggttgacttcacagtgccggatgtacaaaa

SEQ ID NO: 405532 - DNA, 55 bp, Artificial
  Synthetic oligonucleotide
gcaagctgcttgcgcgtcttggggtgacggtccccgaaaatgcagacatcaccga

SEQ ID NO: 405533 - DNA, 60 bp, Artificial
  Synthetic oligonucleotide
gcaagctggagagcgcatcgatattaacgattatccctatatagggttcgccatcatgct

SEQ ID NO: 405534 - DNA, 60 bp, Artificial
  Synthetic oligonucleotide
gcaagctggatccagagtgaattcaacaaggcatgtgaattgaccgattcgagctggata

SEQ ID NO: 405535 - DNA, 57 bp, Artificial
  Synthetic oligonucleotide
gcaagcttaatctgctagctagggaggttttagctgtggattcaaataaaacacgtt

SEQ ID NO: 405536 - DNA, 60 bp, Artificial
  Synthetic oligonucleotide
gcaagcttacattgatatgtcgtgggatgccacgagaaacacacgctatcaatacaggga

SEQ ID NO: 405537 - DNA, 55 bp, Artificial
  Synthetic oligonucleotide
gcaagcttcccctgagatgcattctaggatttgtagctttagactcttcaaagag

SEQ ID NO: 405538 - DNA, 55 bp, Artificial
  Synthetic oligonucleotide
gcaagcttccttcgatcgctatttcgtgaaatatgttattccccattgtattttt

SEQ ID NO: 405539 - DNA, 58 bp, Artificial
  Synthetic oligonucleotide
gcaagctttgctatactcctagattcgttcatgctgggagcatacaggtcagatcaca

SEQ ID NO: 405540 - DNA, 51 bp, Artificial
  Synthetic oligonucleotide
gcaaggaaaccagcagataccaataccaccatgggcatcaattttgcaagt

SEQ ID NO: 405541 - DNA, 59 bp, Artificial
  Synthetic oligonucleotide
gcaaggaaacggtggaacacagaatagaagggtggcactggcgaatggtgatagtacaa

SEQ ID NO: 405542 - DNA, 55 bp, Artificial
  Synthetic oligonucleotide
gcaaggaaatcgggttgcacgcggagctagcaaactgtggtgatgattgtgtgct

SEQ ID NO: 405543 - DNA, 55 bp, Artificial
  Synthetic oligonucleotide
gcaaggaacataataagcccggtcatgggggtcattgggttctcattttttgtaa

SEQ ID NO: 405544 - DNA, 58 bp, Artificial
  Synthetic oligonucleotide
gcaaggaagaattgattattattggtcggtattgaaaccaggtcaaacactgcgagta

SEQ ID NO: 405545 - DNA, 60 bp, Artificial
  Synthetic oligonucleotide
gcaaggaagatcgagtcttcgtcttctaatcggtctgtgcttggctattcggtgttgcac

SEQ ID NO: 405546 - DNA, 55 bp, Artificial
  Synthetic oligonucleotide
gcaaggaagtattaccaagaggagcctgaagctaagcttgttggcctgagcctgg

SEQ ID NO: 405547 - DNA, 60 bp, Artificial
  Synthetic oligonucleotide
gcaaggaatgactaacagccctacgctgtgtcagaaatttgttgctacagcaatagctcc

SEQ ID NO: 405548 - DNA, 55 bp, Artificial
  Synthetic oligonucleotide
gcaaggaattggtagggctattctcaatatacctgtaagaataagacaaggcttg

SEQ ID NO: 405549 - DNA, 55 bp, Artificial
  Synthetic oligonucleotide
gcaaggaatttggtcagtcctgtaatgagtgtgattgggtttgtatccctcgcta

SEQ ID NO: 405550 - DNA, 55 bp, Artificial
  Synthetic oligonucleotide
gcaaggacaaaggacggacctacagctgctggttaaagacacaatggagcccagc

SEQ ID NO: 405551 - DNA, 55 bp, Artificial
  Synthetic oligonucleotide
gcaaggacagacaatgccatcagaaatcatgttgatagtgaggacaagctgacgc

SEQ ID NO: 405552 - DNA, 60 bp, Artificial
  Synthetic oligonucleotide
gcaaggacagacactatggagtaaagtgaatgatgccggatcagaccgagtgatgatatc

SEQ ID NO: 405553 - DNA, 54 bp, Artificial
  Synthetic oligonucleotide
gcaaggacagcacttaactttgagttgacacccttcttcaccgtgcactttatc

SEQ ID NO: 405554 - DNA, 60 bp, Artificial
  Synthetic oligonucleotide
gcaaggactacttcaatgatcactctgggacagacagcgactacgaagcctttgatagat

SEQ ID NO: 405555 - DNA, 55 bp, Artificial
  Synthetic oligonucleotide
gcaaggagcaagtaaaacgcgtgaagctatgtatagattttctggggcgcttgct

SEQ ID NO: 405556 - DNA, 55 bp, Artificial
  Synthetic oligonucleotide
gcaaggatatatagaagcggtgcagttacaagaattaaggaactcaattgggtgg

SEQ ID NO: 405557 - DNA, 59 bp, Artificial
  Synthetic oligonucleotide
gcaaggatcatacttcgtctaaccaatatgtttccatggggattctcgttcagaccgcg

SEQ ID NO: 405558 - DNA, 59 bp, Artificial
  Synthetic oligonucleotide
gcaaggattctgttgacctttgccaattcacagcagcaaacagacttttttcggactgt

SEQ ID NO: 405559 - DNA, 60 bp, Artificial
  Synthetic oligonucleotide
gcaaggattgataatccctgttcagggtccgtccacatcttctcggtcacgccgcgtgcg

SEQ ID NO: 405560 - DNA, 55 bp, Artificial
  Synthetic oligonucleotide
gcaaggattttgcaagcatcaatgacaagattcagaagttcatttaccacctgtc

SEQ ID NO: 405561 - DNA, 60 bp, Artificial
  Synthetic oligonucleotide
gcaaggcaacaaacagtgtcagcattggaggataaactcgcagactataagagaagaatg

SEQ ID NO: 405562 - DNA, 60 bp, Artificial
  Synthetic oligonucleotide
gcaaggcaacccttaaatgcatggagtaccacacaggcatttacagctccatattcctaa

SEQ ID NO: 405563 - DNA, 60 bp, Artificial
  Synthetic oligonucleotide
gcaaggcacgcaagtccgctgcatgaatagcacgcaagcttggtggtcgtgggacacata

SEQ ID NO: 405564 - DNA, 55 bp, Artificial
  Synthetic oligonucleotide
gcaaggcagatttgtacacaagggcgtgtctctgcaccatgtggggaggggcccc

SEQ ID NO: 405565 - DNA, 60 bp, Artificial
  Synthetic oligonucleotide
gcaaggcaggcacaaatgtcaactgtgcttcctaaggaatgggtgcgaccggcagacttt

SEQ ID NO: 405566 - DNA, 60 bp, Artificial
  Synthetic oligonucleotide
gcaaggccaaacggtttggatggtcgatgtaaagagtgtaagcgtgatgcatatctggct

SEQ ID NO: 405567 - DNA, 60 bp, Artificial
  Synthetic oligonucleotide
gcaaggccgacctacggtgcaggtgggatcactgtgctggttgaggttgctgacatggag

SEQ ID NO: 405568 - DNA, 55 bp, Artificial
  Synthetic oligonucleotide
gcaaggcgcgcattccccacgctttccgataggattaagcgtggagtatacatgg

SEQ ID NO: 405569 - DNA, 58 bp, Artificial
  Synthetic oligonucleotide
gcaaggcgcgttagcgcagttcggagaatggttgtggtccaacccaatcgagccggac

SEQ ID NO: 405570 - DNA, 55 bp, Artificial
  Synthetic oligonucleotide
gcaaggctacgacccctcctccagttccaaataaacaagacaaggcgagtgatgg

SEQ ID NO: 405571 - DNA, 55 bp, Artificial
  Synthetic oligonucleotide
gcaaggctacttccccaggggtgaggcacgggcacccttagcgggcctcttggaa

SEQ ID NO: 405572 - DNA, 60 bp, Artificial
  Synthetic oligonucleotide
gcaaggctcacacattccagttttcgaaggacggcatcaatggcagttccaagggaacta

SEQ ID NO: 405573 - DNA, 60 bp, Artificial
  Synthetic oligonucleotide
gcaaggctgccgtgcgtaaagagggtgacgttaagcaagatatgggtccatcagtgtcta

SEQ ID NO: 405574 - DNA, 57 bp, Artificial
  Synthetic oligonucleotide
gcaaggcttcatgcattttaagcaaaagcagcggcttaccgctctaaagaaactttt

SEQ ID NO: 405575 - DNA, 55 bp, Artificial
  Synthetic oligonucleotide
gcaagggaaaatgcctgaggttgccggtcactttagactaagtgaagagaagcgg

SEQ ID NO: 405576 - DNA, 55 bp, Artificial
  Synthetic oligonucleotide
gcaagggaatgtagagggtacagctgaatcaatttgtagttattggttgaagact

SEQ ID NO: 405577 - DNA, 60 bp, Artificial
  Synthetic oligonucleotide
gcaagggactaatggagaagggctacttggtcacaaaggtagatggacgcacaatgaaga

SEQ ID NO: 405578 - DNA, 55 bp, Artificial
  Synthetic oligonucleotide
gcaagggagcccataattgggtccattcttgagcaggatgatcataagttctacc

SEQ ID NO: 405579 - DNA, 59 bp, Artificial
  Synthetic oligonucleotide
gcaagggaggattgactattattggtcggtactaaaaccaggtcagacattgcgagtga

SEQ ID NO: 405580 - DNA, 55 bp, Artificial
  Synthetic oligonucleotide
gcaagggatggggtgtgtactaaaacagtgcctatcatattgagcccctccttgc

SEQ ID NO: 405581 - DNA, 55 bp, Artificial
  Synthetic oligonucleotide
gcaagggcctgtaggcaacccaagagaaatcaaggccctccagttgcacaggcta

SEQ ID NO: 405582 - DNA, 59 bp, Artificial
  Synthetic oligonucleotide
gcaagggcggcacactcatcgatatttctcacttcgaacgctggttaccgggcgcccca

SEQ ID NO: 405583 - DNA, 59 bp, Artificial
  Synthetic oligonucleotide
gcaagggctgccccaaaccccacagattgaatcacatggcggtttgtagctgtggtgtt

SEQ ID NO: 405584 - DNA, 60 bp, Artificial
  Synthetic oligonucleotide
gcaaggggatgggaattgtgcaaccatacatgcggaatgattttgatcgaagtgaaatgc

SEQ ID NO: 405585 - DNA, 60 bp, Artificial
  Synthetic oligonucleotide
gcaaggggccaacagaccagtgatcgaaatagatatgaatgccatggagcatacaagtca

SEQ ID NO: 405586 - DNA, 54 bp, Artificial
  Synthetic oligonucleotide
gcaagggggtgactttctctttgagaccaactaacgatttaacgttctcctcat

SEQ ID NO: 405587 - DNA, 60 bp, Artificial
  Synthetic oligonucleotide
gcaaggggtgttcacttggacgatcacagatgctgctggcaacgacatgcctggaggtta

SEQ ID NO: 405588 - DNA, 55 bp, Artificial
  Synthetic oligonucleotide
gcaaggggtttatgctcgagatttcttaaacattcgaactaaagcaacatgggat

SEQ ID NO: 405589 - DNA, 59 bp, Artificial
  Synthetic oligonucleotide
gcaagggtttccatgtcccggctaaggagcaagtagaaggaatgggggcagctctgatg

SEQ ID NO: 405590 - DNA, 54 bp, Artificial
  Synthetic oligonucleotide
gcaaggtactggaaaacctgttaaatggatgactcttaattccaatgctcaacg

SEQ ID NO: 405591 - DNA, 60 bp, Artificial
  Synthetic oligonucleotide
gcaaggtagcttacactctacagacggacgtgaactccatacagcgaacagtcactatca

SEQ ID NO: 405592 - DNA, 55 bp, Artificial
  Synthetic oligonucleotide
gcaaggtcagaagcttggcaagctgcccgttatggctgccacgcaagctcccaac

SEQ ID NO: 405593 - DNA, 60 bp, Artificial
  Synthetic oligonucleotide
gcaaggtcgctcaccccatgtacttgtggctctagtgacctctatctggtcacgagggag

SEQ ID NO: 405594 - DNA, 58 bp, Artificial
  Synthetic oligonucleotide
gcaaggtctaatgctgtcgcacacccagagttagtcatggggtccaggctattgagcc

SEQ ID NO: 405595 - DNA, 57 bp, Artificial
  Synthetic oligonucleotide
gcaaggtctctataagactattaacaatccacacactccaattttaactctgcaaac

SEQ ID NO: 405596 - DNA, 55 bp, Artificial
  Synthetic oligonucleotide
gcaaggtctgaggacgtaaacgagtccagattcggcaaattagaaaacactggtg

SEQ ID NO: 405597 - DNA, 55 bp, Artificial
  Synthetic oligonucleotide
gcaaggtgaggcagttcatggtcaagtttccgtttggccgaacttgtcctcattg

SEQ ID NO: 405598 - DNA, 54 bp, Artificial
  Synthetic oligonucleotide
gcaaggtgataccctagtattcctaggccctatggaaggtgggggtttgatatt

SEQ ID NO: 405599 - DNA, 56 bp, Artificial
  Synthetic oligonucleotide
gcaaggttacaagcgaatatgggtcaattacgggcggctttacgaagaattatgga

SEQ ID NO: 405600 - DNA, 60 bp, Artificial
  Synthetic oligonucleotide
gcaaggttatcgcctgtcaggggcgatcaaaacctgtgagcgtgccctggcagggaatac

SEQ ID NO: 405601 - DNA, 60 bp, Artificial
  Synthetic oligonucleotide
gcaaggtttgaagcagtagcatggtcagccactgcatgccatgacggaaagaagtggatg

SEQ ID NO: 405602 - DNA, 57 bp, Artificial
  Synthetic oligonucleotide
gcaagtaaatacatcaatagaaggttggtttaaccacttcttaatttctgtgctcaa

SEQ ID NO: 405603 - DNA, 60 bp, Artificial
  Synthetic oligonucleotide
gcaagtaactttatcggtggagaatacgtcacagacacaatggaagttcattgatgtgag

SEQ ID NO: 405604 - DNA, 55 bp, Artificial
  Synthetic oligonucleotide
gcaagtaccttagtgataagtggttgtttaggtctctattttatcgttcttctag

SEQ ID NO: 405605 - DNA, 60 bp, Artificial
  Synthetic oligonucleotide
gcaagtagactatacacattatgaggacaagataatattagtatgggtagaaacaaattc

SEQ ID NO: 405606 - DNA, 60 bp, Artificial
  Synthetic oligonucleotide
gcaagtagatatctccaagaggctggatgacgaagttcgatacgtcgactggctccggaa

SEQ ID NO: 405607 - DNA, 58 bp, Artificial
  Synthetic oligonucleotide
gcaagtagcaaccttggagcatgccccggcatttatgtttcgcaaggagttggggacg

SEQ ID NO: 405608 - DNA, 51 bp, Artificial
  Synthetic oligonucleotide
gcaagtaggaactactacttcacaagatgcggcctataaaaccttgaagag

SEQ ID NO: 405609 - DNA, 60 bp, Artificial
  Synthetic oligonucleotide
gcaagtagggaattcaataacttgaccaaaggactctgtactataaattcatggcacata

SEQ ID NO: 405610 - DNA, 60 bp, Artificial
  Synthetic oligonucleotide
gcaagtagtacctagtgataccatgcaaaccagacatgtgaagaattaccactcgaggtc

SEQ ID NO: 405611 - DNA, 55 bp, Artificial
  Synthetic oligonucleotide
gcaagtataactttactcgactaggccacaaacttggggatccaattgtcgttaa

SEQ ID NO: 405612 - DNA, 60 bp, Artificial
  Synthetic oligonucleotide
gcaagtatatggtgttagtcctggcttggtacataacctgattggaatgcttcagactat

SEQ ID NO: 405613 - DNA, 55 bp, Artificial
  Synthetic oligonucleotide
gcaagtatcaagattgtcgaataggttaaggttcaaagaaatggttacgcaaacc

SEQ ID NO: 405614 - DNA, 55 bp, Artificial
  Synthetic oligonucleotide
gcaagtatgaagtcctctaaaacgtgatgcggtgttagacttccatagtctacgt

SEQ ID NO: 405615 - DNA, 55 bp, Artificial
  Synthetic oligonucleotide
gcaagtatgaggagaaactatttcacagcggaagtgtctcactgcagggcaacgg

SEQ ID NO: 405616 - DNA, 55 bp, Artificial
  Synthetic oligonucleotide
gcaagtatgaggagaaattattttacagcggaagtatcccattgcagggctactg

SEQ ID NO: 405617 - DNA, 60 bp, Artificial
  Synthetic oligonucleotide
gcaagtatgaggaggaactacttcacagcagaagtgtcccattgcagggccactgaatac

SEQ ID NO: 405618 - DNA, 55 bp, Artificial
  Synthetic oligonucleotide
gcaagtcaggttcagtcaggtgttttgagtggtgataggatttacggtgggacca

SEQ ID NO: 405619 - DNA, 60 bp, Artificial
  Synthetic oligonucleotide
gcaagtcagtgtacaaaggaccacgagactatagtgctatagctacattgatttgccagc

SEQ ID NO: 405620 - DNA, 55 bp, Artificial
  Synthetic oligonucleotide
gcaagtcatatttctgcatgagtcttttgcagttcctaggtggcgctgtaatatc

SEQ ID NO: 405621 - DNA, 56 bp, Artificial
  Synthetic oligonucleotide
gcaagtcatgcagggaagttgttcaaggagaacggagtgaccctagatcagctgag

SEQ ID NO: 405622 - DNA, 60 bp, Artificial
  Synthetic oligonucleotide
gcaagtccagactgattgaggcctctagcttgaatgattcagtggccatgagaatggcgt

SEQ ID NO: 405623 - DNA, 55 bp, Artificial
  Synthetic oligonucleotide
gcaagtctgtcatacaaccgtaccgtggcagtggaataataggacccctgattgg

SEQ ID NO: 405624 - DNA, 60 bp, Artificial
  Synthetic oligonucleotide
gcaagtcttctaatgcccaactatgctctgcacccatccatcattcccactccgggttac

SEQ ID NO: 405625 - DNA, 60 bp, Artificial
  Synthetic oligonucleotide
gcaagtcttgcttgtccagagggtgatgacttctataagtaggattgcagcaaatccatt

SEQ ID NO: 405626 - DNA, 58 bp, Artificial
  Synthetic oligonucleotide
gcaagtgaacaaggtgagatccaatgggtgaaacctaacaaggagaccggcagactaa

SEQ ID NO: 405627 - DNA, 60 bp, Artificial
  Synthetic oligonucleotide
gcaagtgacagaagtgatctggagcatgacagggtagtgtcccaactaaaagagctatta

SEQ ID NO: 405628 - DNA, 55 bp, Artificial
  Synthetic oligonucleotide
gcaagtgagtgaggttgtacctcgacacttatagtgggcactattactagcttcg

SEQ ID NO: 405629 - DNA, 60 bp, Artificial
  Synthetic oligonucleotide
gcaagtgcagatacaccgctccttgagcctggatggacagacacagcacacggtgtgggc

SEQ ID NO: 405630 - DNA, 60 bp, Artificial
  Synthetic oligonucleotide
gcaagtgcgaacggctgaataaccacagaactgcttgcatgcaagaaatgacgaattaaa

SEQ ID NO: 405631 - DNA, 51 bp, Artificial
  Synthetic oligonucleotide
gcaagtgcggtaatgagtcttggactgttggtgactggactggctttaaaa

SEQ ID NO: 405632 - DNA, 57 bp, Artificial
  Synthetic oligonucleotide
gcaagtggaaacgcgattttatatgtggctggccaccacggaataacggcaattgtt

SEQ ID NO: 405633 - DNA, 60 bp, Artificial
  Synthetic oligonucleotide
gcaagtggaagatgactttatagacattcgaattccaggcattgacatcccaatatatga

SEQ ID NO: 405634 - DNA, 55 bp, Artificial
  Synthetic oligonucleotide
gcaagtggaggccaaacacatggccactgagattagatctgagcgcggcaagctg

SEQ ID NO: 405635 - DNA, 55 bp, Artificial
  Synthetic oligonucleotide
gcaagtggatctggtttctacacgatggtggctctgtaccttgccacttttaggg

SEQ ID NO: 405636 - DNA, 55 bp, Artificial
  Synthetic oligonucleotide
gcaagtggcctgcaatgaccatttcctatccacgcagcttcacgtgaggatcgga

SEQ ID NO: 405637 - DNA, 55 bp, Artificial
  Synthetic oligonucleotide
gcaagtggcgaatccaatgttttaacttcaacgtcataatttggcgcaactaaag

SEQ ID NO: 405638 - DNA, 56 bp, Artificial
  Synthetic oligonucleotide
gcaagtgggacgcccagtcatgttgttttttaccctactcacagagttgctcccgg

SEQ ID NO: 405639 - DNA, 60 bp, Artificial
  Synthetic oligonucleotide
gcaagtgggtagcatgataggcacaacgatggaaagcctcaaacaacaacttcaaggacc

SEQ ID NO: 405640 - DNA, 54 bp, Artificial
  Synthetic oligonucleotide
gcaagtggtcaaaacgtagtggatggagtgctgtaagggaaaaaatgcaccgaa

SEQ ID NO: 405641 - DNA, 54 bp, Artificial
  Synthetic oligonucleotide
gcaagtggtgtttacccctctttaatgtcccgtgttgtttacaaacattacaga

SEQ ID NO: 405642 - DNA, 58 bp, Artificial
  Synthetic oligonucleotide
gcaagtgtatgcacttttttatagatctgatatagtaccacttgatacgggtagctct

SEQ ID NO: 405643 - DNA, 60 bp, Artificial
  Synthetic oligonucleotide
gcaagtgtgttagagatggcagtggaggtttcatgtacattcgtgaggttttaaataagc

SEQ ID NO: 405644 - DNA, 57 bp, Artificial
  Synthetic oligonucleotide
gcaagtgttcgattcaatatgggatattgacgatggactaataggcggaacgaggtt

SEQ ID NO: 405645 - DNA, 57 bp, Artificial
  Synthetic oligonucleotide
gcaagtgttgttggttgggggccccactctctgcatgcctgcccggccctggttttg

SEQ ID NO: 405646 - DNA, 57 bp, Artificial
  Synthetic oligonucleotide
gcaagttaaggcttgtgttactcagactaatcctgttcccggcgcggctttccaatc

SEQ ID NO: 405647 - DNA, 52 bp, Artificial
  Synthetic oligonucleotide
gcaagttacgcagagattgtcgggattggcacgaagccctgtcgaaagagtt

SEQ ID NO: 405648 - DNA, 50 bp, Artificial
  Synthetic oligonucleotide
gcaagttacttgagaacgcatctgctagagataatcttaaagagcgagct

SEQ ID NO: 405649 - DNA, 58 bp, Artificial
  Synthetic oligonucleotide
gcaagttaggagagcgaaatgactcagcccgatgtttcgtggggcgacccgactcaac

SEQ ID NO: 405650 - DNA, 56 bp, Artificial
  Synthetic oligonucleotide
gcaagttccttgcgcagtctagcctccccctgaaccgtaaacgttcgcggtcgcca

SEQ ID NO: 405651 - DNA, 55 bp, Artificial
  Synthetic oligonucleotide
gcaagttcgctcctctcaacaggtacatcgaaaagaaagtcactcaaagccttcc

SEQ ID NO: 405652 - DNA, 57 bp, Artificial
  Synthetic oligonucleotide
gcaagttcgttggtattaccaaagtctgggatgctcaagtacgtgataagaaactac

SEQ ID NO: 405653 - DNA, 55 bp, Artificial
  Synthetic oligonucleotide
gcaagttgaatcgagaggcctatgcaaaggatctgctcaaatatgctggcgacat

SEQ ID NO: 405654 - DNA, 51 bp, Artificial
  Synthetic oligonucleotide
gcaagttgagatcagtttcaatggaggccatatagaagaatgctcgtgcta

SEQ ID NO: 405655 - DNA, 58 bp, Artificial
  Synthetic oligonucleotide
gcaagttgagcaactcttaaatccacctgggagcagtttccttagtatgctattaaac

SEQ ID NO: 405656 - DNA, 53 bp, Artificial
  Synthetic oligonucleotide
gcaagttgatataagcaagcatctagggcgcaaagtgtacccgtttccgatac

SEQ ID NO: 405657 - DNA, 55 bp, Artificial
  Synthetic oligonucleotide
gcaagttgcttctaaacttcccgctaatctccgtgagaataacgctcacctcgtt

SEQ ID NO: 405658 - DNA, 60 bp, Artificial
  Synthetic oligonucleotide
gcaagttggatgctatgcaaccacactttgtgttcaacacaagaatgacatcgagtgatt

SEQ ID NO: 405659 - DNA, 60 bp, Artificial
  Synthetic oligonucleotide
gcaagttgtgaagcctactcagaaactggcatatttaatattagctcacctacatgtctg

SEQ ID NO: 405660 - DNA, 60 bp, Artificial
  Synthetic oligonucleotide
gcaagtttaaggaatgttcttagcaggacatatgccacattcggaaggagaataagattg

SEQ ID NO: 405661 - DNA, 57 bp, Artificial
  Synthetic oligonucleotide
gcaagtttatataatgttaaagtcgataaagcgttgctgcgtcaaattaatactaac

SEQ ID NO: 405662 - DNA, 55 bp, Artificial
  Synthetic oligonucleotide
gcaagtttctatgcgtttgggagaggagtcaggggtgatatcgacatcttacgcg

SEQ ID NO: 405663 - DNA, 54 bp, Artificial
  Synthetic oligonucleotide
gcaagtttgcgaagatctgggtccctggcctacatttggtgaggtattgagaca

SEQ ID NO: 405664 - DNA, 60 bp, Artificial
  Synthetic oligonucleotide
gcaagtttgtggagttggtttgacatatcaaattggctgtggtatataaggatattcata

SEQ ID NO: 405665 - DNA, 58 bp, Artificial
  Synthetic oligonucleotide
gcaataaagcactaaaactattgttgattcaagggtacaacccattgcaggtagggca

SEQ ID NO: 405666 - DNA, 60 bp, Artificial
  Synthetic oligonucleotide
gcaataaagggcagctacttgacggaggaatcgtacaagtacgataacttcacgatcata

SEQ ID NO: 405667 - DNA, 55 bp, Artificial
  Synthetic oligonucleotide
gcaataaatccagtaacagtagaagtaccatacatttgttcagaaggggaagacc

SEQ ID NO: 405668 - DNA, 55 bp, Artificial
  Synthetic oligonucleotide
gcaataacatgtgataacacacatttgccacatttcattgttcgtggtcggatgg

SEQ ID NO: 405669 - DNA, 60 bp, Artificial
  Synthetic oligonucleotide
gcaataactcagctactttaattctcccatatgtcaatgcagtccctatggattctatgc

SEQ ID NO: 405670 - DNA, 55 bp, Artificial
  Synthetic oligonucleotide
gcaataaggactgttaggccacatgctgccatgggctggggatctaaggtgtcgg

SEQ ID NO: 405671 - DNA, 57 bp, Artificial
  Synthetic oligonucleotide
gcaataaggagccagctgttctctctgaacatgaccccagattagaagtcaatttca

SEQ ID NO: 405672 - DNA, 60 bp, Artificial
  Synthetic oligonucleotide
gcaataaggccctacttatccgtagtatcatcaacaccacttttgttgtgtacatattga

SEQ ID NO: 405673 - DNA, 50 bp, Artificial
  Synthetic oligonucleotide
gcaatacacacgggaggccgacgaaccagaggaattcgcctacgctcgga

SEQ ID NO: 405674 - DNA, 54 bp, Artificial
  Synthetic oligonucleotide
gcaatacacgggtagaacggtcggggaggccatcttccaatcgggaactaggct

SEQ ID NO: 405675 - DNA, 60 bp, Artificial
  Synthetic oligonucleotide
gcaatacagcggctagcaatgctgattgtgcctggctggaagcacaggaggatgaggaag

SEQ ID NO: 405676 - DNA, 57 bp, Artificial
  Synthetic oligonucleotide
gcaatacatcagcactgtttaatggtacatacaatgggacagaaagtaattcaactg

SEQ ID NO: 405677 - DNA, 58 bp, Artificial
  Synthetic oligonucleotide
gcaatacatcaggactgtttaatagttcttgggatattaatggttcttggtatggtaa

SEQ ID NO: 405678 - DNA, 57 bp, Artificial
  Synthetic oligonucleotide
gcaataccagtacgttcaactaatgatcttagtctggtcatagtgatatctatagtg

SEQ ID NO: 405679 - DNA, 60 bp, Artificial
  Synthetic oligonucleotide
gcaataccagtacgttcaactaatgatcttagtctggtcatagtgatatctatagtgcgc

SEQ ID NO: 405680 - DNA, 57 bp, Artificial
  Synthetic oligonucleotide
gcaataccagtaggaccagtgtttccaccaggcatgaattggacggaattgattact

SEQ ID NO: 405681 - DNA, 55 bp, Artificial
  Synthetic oligonucleotide
gcaataccgctttagcatctcaaggcgctcttgtaggtgaaagtgttatctctag

SEQ ID NO: 405682 - DNA, 57 bp, Artificial
  Synthetic oligonucleotide
gcaatacctgtacggtgtagggtcagtggttgtctcctacgcagttaagtgggagta

SEQ ID NO: 405683 - DNA, 57 bp, Artificial
  Synthetic oligonucleotide
gcaatactaactgaacagttattgtccaacgaacatatcggtaagtatttcgaaaga

SEQ ID NO: 405684 - DNA, 55 bp, Artificial
  Synthetic oligonucleotide
gcaatactagacacaggagcggcaatttgtgtctgtgatggaaatatggtggacg

SEQ ID NO: 405685 - DNA, 59 bp, Artificial
  Synthetic oligonucleotide
gcaatactctatagattgtgtcacgccgcttttttggttccgcttatacaaactataga

SEQ ID NO: 405686 - DNA, 52 bp, Artificial
  Synthetic oligonucleotide
gcaatagaatacaagaaccctggtggcaagaagatgacgccaacagttacca

SEQ ID NO: 405687 - DNA, 55 bp, Artificial
  Synthetic oligonucleotide
gcaatagcactacacagtctttatgatatcccagctgatgagcttggtgccgcgt

SEQ ID NO: 405688 - DNA, 55 bp, Artificial
  Synthetic oligonucleotide
gcaatagcacttggaattacaatagttctagcaagggcacagagtcaaatggcac

SEQ ID NO: 405689 - DNA, 60 bp, Artificial
  Synthetic oligonucleotide
gcaatagcagtggcagggtggacagatagagttatagaagtagtacaaagagcctggaga

SEQ ID NO: 405690 - DNA, 60 bp, Artificial
  Synthetic oligonucleotide
gcaatagcagtggtgcattatggggggattcctactgatgtgatcaattcctgggcaggg

SEQ ID NO: 405691 - DNA, 58 bp, Artificial
  Synthetic oligonucleotide
gcaatagcatcgcagcggccctaaaaatagcagctttcgggccctgtgtttacgcacc

SEQ ID NO: 405692 - DNA, 55 bp, Artificial
  Synthetic oligonucleotide
gcaatagcccagttgaccgcatgtggagttttaacaacctctgaggctcgggaaa

SEQ ID NO: 405693 - DNA, 55 bp, Artificial
  Synthetic oligonucleotide
gcaatagcccccccgcttcctatacgggactatcaataccagaccccttccaatc

SEQ ID NO: 405694 - DNA, 58 bp, Artificial
  Synthetic oligonucleotide
gcaatagctggttttatagagggtggttggccaggtttgatcaatggttggtatggat

SEQ ID NO: 405695 - DNA, 60 bp, Artificial
  Synthetic oligonucleotide
gcaatagctgtagaatagctaagtgcgagtcagagttccacgctaacaatgcaaggccaa

SEQ ID NO: 405696 - DNA, 59 bp, Artificial
  Synthetic oligonucleotide
gcaataggccaggtgtcaaggcccatgttcctgtatgttaggaccaatgggacctccaa

SEQ ID NO: 405697 - DNA, 55 bp, Artificial
  Synthetic oligonucleotide
gcaatagggattatggtaagtcaagttatctatgaatacaaggaggaactggaga

SEQ ID NO: 405698 - DNA, 56 bp, Artificial
  Synthetic oligonucleotide
gcaataggtacaaacgggacacagaatgtgatctcgcagataaggagaattctact

SEQ ID NO: 405699 - DNA, 58 bp, Artificial
  Synthetic oligonucleotide
gcaatagtagtgtggactatagtagctatagaatttaagaaaatactaaagcaaagga

SEQ ID NO: 405700 - DNA, 60 bp, Artificial
  Synthetic oligonucleotide
gcaatagtcagtcttgctaaaagtgaccaaatttgcattggttatcatgcaaacaactcg

SEQ ID NO: 405701 - DNA, 55 bp, Artificial
  Synthetic oligonucleotide
gcaatagtgtccaggatcagtttcgtctggtaaggtatgcccgccacaatatcta

SEQ ID NO: 405702 - DNA, 54 bp, Artificial
  Synthetic oligonucleotide
gcaatagttctttctaagccaaaggtgagtgagttccttaaccttacaaaggcc

SEQ ID NO: 405703 - DNA, 55 bp, Artificial
  Synthetic oligonucleotide
gcaatataaccctagaggagagtgtgtttggcactgaaggtttggaagctctcga

SEQ ID NO: 405704 - DNA, 54 bp, Artificial
  Synthetic oligonucleotide
gcaatatctaaacgtcgtacatttgtattacgccctctttcacgcgtacacctt

SEQ ID NO: 405705 - DNA, 57 bp, Artificial
  Synthetic oligonucleotide
gcaatatctcaaaaggaaatttcgatatgattctaaacggaaagtatgggaagcacc

SEQ ID NO: 405706 - DNA, 56 bp, Artificial
  Synthetic oligonucleotide
gcaatatcttatcaccagagccgaagcgcatttgcaagtgtggatcccccccctaa

SEQ ID NO: 405707 - DNA, 55 bp, Artificial
  Synthetic oligonucleotide
gcaatatgcactctctgttgggagtgcagcaacatcactagtctcctggaaaccc

SEQ ID NO: 405708 - DNA, 55 bp, Artificial
  Synthetic oligonucleotide
gcaatatgtcatcatataattcttctcctatgccagcaccagttgcaccacatgt

SEQ ID NO: 405709 - DNA, 60 bp, Artificial
  Synthetic oligonucleotide
gcaatatgtgatgtcaagggctttgcacctttctccaaagacaatgggataagaattggt

SEQ ID NO: 405710 - DNA, 60 bp, Artificial
  Synthetic oligonucleotide
gcaatattacgctggctaacatctttcaggcgattgtctatgcctcctacgcttggactc

SEQ ID NO: 405711 - DNA, 59 bp, Artificial
  Synthetic oligonucleotide
gcaatattcgaggatagtggaaagcctgaattttcatacctagacaactcaaagtatag

SEQ ID NO: 405712 - DNA, 60 bp, Artificial
  Synthetic oligonucleotide
gcaatattgcgggactgaggtctatgtggtgggcatgtcacgttccgatcaaaggaagga

SEQ ID NO: 405713 - DNA, 60 bp, Artificial
  Synthetic oligonucleotide
gcaatcaaaagtggactccagatcccgactcctggcttctagatgaccaagctgccaccc

SEQ ID NO: 405714 - DNA, 60 bp, Artificial
  Synthetic oligonucleotide
gcaatcaagtattgctggaatctcctacaatactggagtcaggaactaacgaagagtgct

SEQ ID NO: 405715 - DNA, 59 bp, Artificial
  Synthetic oligonucleotide
gcaatcaagtatttgcagcttgtagaggctacgtattctcccgatacgttggggtacga

SEQ ID NO: 405716 - DNA, 55 bp, Artificial
  Synthetic oligonucleotide
gcaatcacaatcggagacctgggtacaagacacaaaaccagggcccatgggacga

SEQ ID NO: 405717 - DNA, 55 bp, Artificial
  Synthetic oligonucleotide
gcaatcacagaatgagaacaacatacttacgaaaggtgtaaacccgaccggcgtc

SEQ ID NO: 405718 - DNA, 55 bp, Artificial
  Synthetic oligonucleotide
gcaatcaccactagagtagtacgctcgctcagtcattccgagaagaaggagcaag

SEQ ID NO: 405719 - DNA, 55 bp, Artificial
  Synthetic oligonucleotide
gcaatcacgcaagcattattcggtatcagtgcgcaaaatgtgaacgcccatggct

SEQ ID NO: 405720 - DNA, 50 bp, Artificial
  Synthetic oligonucleotide
gcaatcactgagcagtacaaacgagaactatcaagatttcgcagagatcc

SEQ ID NO: 405721 - DNA, 58 bp, Artificial
  Synthetic oligonucleotide
gcaatcagaagacgaaatcaggtatattagcaatacaataaagacattagggaatgcc

SEQ ID NO: 405722 - DNA, 55 bp, Artificial
  Synthetic oligonucleotide
gcaatcagacaggcttcaaactgatatagctgaaacacctccaacagaaggtgac

SEQ ID NO: 405723 - DNA, 55 bp, Artificial
  Synthetic oligonucleotide
gcaatcagacagtatgccagcccactgtctacttaatgggaccaatccagacttg

SEQ ID NO: 405724 - DNA, 60 bp, Artificial
  Synthetic oligonucleotide
gcaatcaggcactaatatgtcaatattctggcaacatggacaaccgttccctagattctc

SEQ ID NO: 405725 - DNA, 60 bp, Artificial
  Synthetic oligonucleotide
gcaatcaggtcagacaggttacatctctgtaggtcaaaatgtgccgtttgtcactggtaa

SEQ ID NO: 405726 - DNA, 60 bp, Artificial
  Synthetic oligonucleotide
gcaatcaggtcagcacagtacaatgtacacatgggattaagccagtggtttcaactcaac

SEQ ID NO: 405727 - DNA, 60 bp, Artificial
  Synthetic oligonucleotide
gcaatcagtgagaaccccagaagtcataaagtactgtgaagataacaagtggattattcc

SEQ ID NO: 405728 - DNA, 55 bp, Artificial
  Synthetic oligonucleotide
gcaatcagttcggttgtggttatataccgtatagttacattgtgttctccgtcag

SEQ ID NO: 405729 - DNA, 60 bp, Artificial
  Synthetic oligonucleotide
gcaatcataaggaaagcaaccagaaggctgattcaactgatagtaagtggaagggacgaa

SEQ ID NO: 405730 - DNA, 60 bp, Artificial
  Synthetic oligonucleotide
gcaatcattcttggagacccgctccaaggcgagtatcattccactcacccatcctcttcc

SEQ ID NO: 405731 - DNA, 55 bp, Artificial
  Synthetic oligonucleotide
gcaatccaatacaacgaagttaggattaagaggaagaagggagactacgcagtag

SEQ ID NO: 405732 - DNA, 60 bp, Artificial
  Synthetic oligonucleotide
gcaatccacaatggttggtcagatctgtaggtactacactcaatggtctggttcccttaa

SEQ ID NO: 405733 - DNA, 60 bp, Artificial
  Synthetic oligonucleotide
gcaatccaccttggttggtcagatatgtaggtactacactcagtggtcaggctcactgga

SEQ ID NO: 405734 - DNA, 60 bp, Artificial
  Synthetic oligonucleotide
gcaatccactctgaaggaacccgcactagggtgtgccatactgaactaattcgagcagta

SEQ ID NO: 405735 - DNA, 55 bp, Artificial
  Synthetic oligonucleotide
gcaatccagcatgcagctagtcgtaacgagcaattgcgggacgggaccaactact

SEQ ID NO: 405736 - DNA, 60 bp, Artificial
  Synthetic oligonucleotide
gcaatccagctatcccagtgggagacatctataaaagatggataatcctgggattaaata

SEQ ID NO: 405737 - DNA, 59 bp, Artificial
  Synthetic oligonucleotide
gcaatccagtacctgcggtcatacgtttcataaccgtgcgtacgggcatcgatacttaa

SEQ ID NO: 405738 - DNA, 60 bp, Artificial
  Synthetic oligonucleotide
gcaatccatctcactgtaggcctaacatgctgcgagtggaagaaaaattctgagttgtat

SEQ ID NO: 405739 - DNA, 60 bp, Artificial
  Synthetic oligonucleotide
gcaatcccataatagtactcttcccaactgcatgagtgtactccaaagtagaactggaat

SEQ ID NO: 405740 - DNA, 59 bp, Artificial
  Synthetic oligonucleotide
gcaatccgaaaagtgagatgttaagagctcggacattaaactatcaggacctggttaga

SEQ ID NO: 405741 - DNA, 60 bp, Artificial
  Synthetic oligonucleotide
gcaatccgactgatcttactgtcgtagcaacatatgggcacgagcgtaatatggaacgtg

SEQ ID NO: 405742 - DNA, 55 bp, Artificial
  Synthetic oligonucleotide
gcaatcctgtctatatctacgataacgaaccgcgcaatcgagaaatcaccaaccg

SEQ ID NO: 405743 - DNA, 55 bp, Artificial
  Synthetic oligonucleotide
gcaatcgaaacgaatatcattacgtttacatgaggtcatagcgactaagacacgc

SEQ ID NO: 405744 - DNA, 55 bp, Artificial
  Synthetic oligonucleotide
gcaatcgacaagccgatatacattacgtcactcgacacgcaagagcagatagagt

SEQ ID NO: 405745 - DNA, 55 bp, Artificial
  Synthetic oligonucleotide
gcaatcgcagctcttttgtgcatttgcaattagttttccattctctcagtaatcg

SEQ ID NO: 405746 - DNA, 58 bp, Artificial
  Synthetic oligonucleotide
gcaatcgccattcttgaaattgctgtttcaattcttaccatttatagtatttacggtg

SEQ ID NO: 405747 - DNA, 60 bp, Artificial
  Synthetic oligonucleotide
gcaatcgcgcgcgccgcttatgtgtagcccactttgcacgggtgtgggttgcacaaacgg

SEQ ID NO: 405748 - DNA, 60 bp, Artificial
  Synthetic oligonucleotide
gcaatcgctgttgagacgaaagccgagcgtaaatgttgccatgtgcgtacagaagtgtgg

SEQ ID NO: 405749 - DNA, 59 bp, Artificial
  Synthetic oligonucleotide
gcaatcggtgtctattggagtacaggatagagaaataatgcccggattcccaaaatgcc

SEQ ID NO: 405750 - DNA, 60 bp, Artificial
  Synthetic oligonucleotide
gcaatcgtagcagacctcccgccagatagccagagatcagagctaatcctcgaggaccca

SEQ ID NO: 405751 - DNA, 51 bp, Artificial
  Synthetic oligonucleotide
gcaatcgtgcgaaagagtatacgagggcaagcttggaatttggaatgggtc

SEQ ID NO: 405752 - DNA, 55 bp, Artificial
  Synthetic oligonucleotide
gcaatcgtggcgaatacaagagaggtccaacatattaaggaagaaattctaccga

SEQ ID NO: 405753 - DNA, 56 bp, Artificial
  Synthetic oligonucleotide
gcaatctacctagccttacaagattcaggattagaagtaaatatagtaacggactc

SEQ ID NO: 405754 - DNA, 59 bp, Artificial
  Synthetic oligonucleotide
gcaatctagccataacatcctcactgaaagaccggttttatattcgacacgtgttcaaa

SEQ ID NO: 405755 - DNA, 59 bp, Artificial
  Synthetic oligonucleotide
gcaatctattacatcgacttcttctacccacaagcattgttgtggtaaatgtctaatta

SEQ ID NO: 405756 - DNA, 60 bp, Artificial
  Synthetic oligonucleotide
gcaatctcagcattgtcccttcactgaaagaccgttattatattcgccacgtgttcaaac

SEQ ID NO: 405757 - DNA, 57 bp, Artificial
  Synthetic oligonucleotide
gcaatctcatttgcggggggacacggatgttgtaacagttgtgactttcgagtttag

SEQ ID NO: 405758 - DNA, 58 bp, Artificial
  Synthetic oligonucleotide
gcaatctgcccggtcttggcaaggcgcccgggagcacttatgaataacgcccttcctc

SEQ ID NO: 405759 - DNA, 55 bp, Artificial
  Synthetic oligonucleotide
gcaatctggtacaaatgcctctgttttctggcaatatggtcagacatatcctcga

SEQ ID NO: 405760 - DNA, 57 bp, Artificial
  Synthetic oligonucleotide
gcaatctgtctccgaagactgcgaagcgtaggttaattcctggtttggggctggttc

SEQ ID NO: 405761 - DNA, 60 bp, Artificial
  Synthetic oligonucleotide
gcaatcttagatatccctggctagcctgctgcaatgaaaacttaattataacacttagat

SEQ ID NO: 405762 - DNA, 60 bp, Artificial
  Synthetic oligonucleotide
gcaatcttgtattaatcattattcgttctttcgcagtacggtgcaattatgagtggtaat

SEQ ID NO: 405763 - DNA, 60 bp, Artificial
  Synthetic oligonucleotide
gcaatctttgcaaatagcaagcatagtaggaataatagtagcattcatagcagccataat

SEQ ID NO: 405764 - DNA, 59 bp, Artificial
  Synthetic oligonucleotide
gcaatgaaacagtcattagggaatacaatgaaacagtaaggattgagaaggtaacacaa

SEQ ID NO: 405765 - DNA, 60 bp, Artificial
  Synthetic oligonucleotide
gcaatgaaagaatatggagaagatccaaaaatcgaaacaaacaagttcgctgcgatatgt

SEQ ID NO: 405766 - DNA, 60 bp, Artificial
  Synthetic oligonucleotide
gcaatgaaagttatccagtggcagaccaagggtcgtgtgggtgttagttcagcgactatg

SEQ ID NO: 405767 - DNA, 55 bp, Artificial
  Synthetic oligonucleotide
gcaatgaacccctcactgctagaggaatggcaattagggtttgtcccaactccag

SEQ ID NO: 405768 - DNA, 55 bp, Artificial
  Synthetic oligonucleotide
gcaatgaacctattagtagcacccctgtacctggtgtaagtaggatcgctggacc

SEQ ID NO: 405769 - DNA, 59 bp, Artificial
  Synthetic oligonucleotide
gcaatgaatggaaggcaaatggtccaagtcggactgtgagtaactatgaggccaggaag

SEQ ID NO: 405770 - DNA, 59 bp, Artificial
  Synthetic oligonucleotide
gcaatgaattcgaatattttggaagattggcaattgggatttgtaccaacaccagataa

SEQ ID NO: 405771 - DNA, 55 bp, Artificial
  Synthetic oligonucleotide
gcaatgacaactaatcttggtctaactgatggcgccccaatccaacatcttcagt

SEQ ID NO: 405772 - DNA, 60 bp, Artificial
  Synthetic oligonucleotide
gcaatgacccttgaggagtgatattttgttatccaaaatggatgggaagctcaacttgac

SEQ ID NO: 405773 - DNA, 60 bp, Artificial
  Synthetic oligonucleotide
gcaatgactcccagacatcgggcgatttatccagaagggtggatgctgaggtatgcgtaa

SEQ ID NO: 405774 - DNA, 56 bp, Artificial
  Synthetic oligonucleotide
gcaatgagaggttggaacaagtccgggcagatttccttgcccaccccatcaatttt

SEQ ID NO: 405775 - DNA, 55 bp, Artificial
  Synthetic oligonucleotide
gcaatgagagtgatggagacacagaggaattgtcaaaacttgtggaaatggggcc

SEQ ID NO: 405776 - DNA, 52 bp, Artificial
  Synthetic oligonucleotide
gcaatgagccaaatatcacaaccacctaccataatgatgcagagaggcaatt

SEQ ID NO: 405777 - DNA, 60 bp, Artificial
  Synthetic oligonucleotide
gcaatgagccaagcaacaaactcaactgccataatgatgcagaggggcaattttaggact

SEQ ID NO: 405778 - DNA, 60 bp, Artificial
  Synthetic oligonucleotide
gcaatgagccaagcaacaaagtcagctacagctaccatgatgatgcagagaggcaatttt

SEQ ID NO: 405779 - DNA, 52 bp, Artificial
  Synthetic oligonucleotide
gcaatgagccaagtaacaactccacctacaatgatgatgcagagaggtaatt

SEQ ID NO: 405780 - DNA, 60 bp, Artificial
  Synthetic oligonucleotide
gcaatgagccaagtacagaatacaaatgtaatgatgcagagaggcaattttagaggccca

SEQ ID NO: 405781 - DNA, 60 bp, Artificial
  Synthetic oligonucleotide
gcaatgagccaagtctcaaattcagccactgtaatgatgcagagaggcaattttaggggc

SEQ ID NO: 405782 - DNA, 60 bp, Artificial
  Synthetic oligonucleotide
gcaatgagccaagttacaggttcagctaacataatgatgcagagaggcaactttaagaac

SEQ ID NO: 405783 - DNA, 55 bp, Artificial
  Synthetic oligonucleotide
gcaatgagtccactgtttgaccagtcggcggtaacattctctatgttccgtgaac

SEQ ID NO: 405784 - DNA, 53 bp, Artificial
  Synthetic oligonucleotide
gcaatgagtttggaatttacaggaagagcagttacgtgtcctccgtagctatc

SEQ ID NO: 405785 - DNA, 54 bp, Artificial
  Synthetic oligonucleotide
gcaatgataacatttccagtatccctagcagcaaaactgcaatcaacttctggt

SEQ ID NO: 405786 - DNA, 59 bp, Artificial
  Synthetic oligonucleotide
gcaatgatagccttaacaccggctttatagcagggcttatctattaccacaaattcaac

SEQ ID NO: 405787 - DNA, 56 bp, Artificial
  Synthetic oligonucleotide
gcaatgatcccagagaacccatgtggaacgaatgaggcggttgtttgtgttaacac

SEQ ID NO: 405788 - DNA, 60 bp, Artificial
  Synthetic oligonucleotide
gcaatgatgactacggctcattcatccgcaacccacgcgatggattcaacgcctcgtcct

SEQ ID NO: 405789 - DNA, 55 bp, Artificial
  Synthetic oligonucleotide
gcaatgatgattctgtgtgttgccctctattattttgttggagcctttatcgggg

SEQ ID NO: 405790 - DNA, 56 bp, Artificial
  Synthetic oligonucleotide
gcaatgattgaagcttggggttacgatgaacttttgcagcacattcggaaattcta

SEQ ID NO: 405791 - DNA, 55 bp, Artificial
  Synthetic oligonucleotide
gcaatgatttacatcgatgagtgtgcgtttattcctaacttcgttgatgcgtggc

SEQ ID NO: 405792 - DNA, 56 bp, Artificial
  Synthetic oligonucleotide
gcaatgatttttctgtgctactattggtagaatttaaggtaactaaaaatagagaa

SEQ ID NO: 405793 - DNA, 55 bp, Artificial
  Synthetic oligonucleotide
gcaatgcaatcaacccgcgtcttgatacttcagagacaaacttacgagcgggtgg

SEQ ID NO: 405794 - DNA, 60 bp, Artificial
  Synthetic oligonucleotide
gcaatgcacgacgaatatgtctccctgttgatcagatcagcggaccgcattaccctctcg

SEQ ID NO: 405795 - DNA, 60 bp, Artificial
  Synthetic oligonucleotide
gcaatgcacgttgttgtccattcatttgcggtaaggcagtgatgtttagggatcgcaata

SEQ ID NO: 405796 - DNA, 55 bp, Artificial
  Synthetic oligonucleotide
gcaatgcagccctaggtgccatatacactgatgagaacaagtggaagtcggcacg

SEQ ID NO: 405797 - DNA, 60 bp, Artificial
  Synthetic oligonucleotide
gcaatgcagctagaggtcttgaatggatagggaacaaaatatccaaatttattgagtgga

SEQ ID NO: 405798 - DNA, 55 bp, Artificial
  Synthetic oligonucleotide
gcaatgcagcttttcgagggatcctgtccggaagactggaccagctacggaatcc

SEQ ID NO: 405799 - DNA, 60 bp, Artificial
  Synthetic oligonucleotide
gcaatgcatatctgacttctccaccctaatgaagaatatcttatctgtgtctcaatataa

SEQ ID NO: 405800 - DNA, 51 bp, Artificial
  Synthetic oligonucleotide
gcaatgcccagaaaagtcgagtactgaccacatcagctctggtcacaaaag

SEQ ID NO: 405801 - DNA, 57 bp, Artificial
  Synthetic oligonucleotide
gcaatgcccgatagcccgcttctgttgggaaagggctcacatcggttgttttccgag

SEQ ID NO: 405802 - DNA, 55 bp, Artificial
  Synthetic oligonucleotide
gcaatgcccggacggggatctaccgttcgggtcttgaggagcgtaacgtggctca

SEQ ID NO: 405803 - DNA, 55 bp, Artificial
  Synthetic oligonucleotide
gcaatgccgaacttcccagcacgagcgatgccagacaagagctcacactcccaac

SEQ ID NO: 405804 - DNA, 51 bp, Artificial
  Synthetic oligonucleotide
gcaatgcgactctcaaaccccgctgttgcgtagggttcccgcaccatctcg

SEQ ID NO: 405805 - DNA, 55 bp, Artificial
  Synthetic oligonucleotide
gcaatgctacggtccataatggtaatagcaatgctacggtcaataatgatagtag

SEQ ID NO: 405806 - DNA, 52 bp, Artificial
  Synthetic oligonucleotide
gcaatgctagtaaaagatatagccgagatacataatagagaatctagacaga

SEQ ID NO: 405807 - DNA, 55 bp, Artificial
  Synthetic oligonucleotide
gcaatgctagtgggacaagtcacgatgctagacctagtgaaactcattgtggcag

SEQ ID NO: 405808 - DNA, 60 bp, Artificial
  Synthetic oligonucleotide
gcaatgctctgcttagggagtgtcccgaacgacggagatcttgttgagctggcaagagcc

SEQ ID NO: 405809 - DNA, 60 bp, Artificial
  Synthetic oligonucleotide
gcaatgctggaggaaaatcacaaagatgcgtcagcactccatggtcatattttaacttca

SEQ ID NO: 405810 - DNA, 60 bp, Artificial
  Synthetic oligonucleotide
gcaatgcttattgatgggatgtacataccaaagcttgaaccagagagaatagtttccata

SEQ ID NO: 405811 - DNA, 53 bp, Artificial
  Synthetic oligonucleotide
gcaatgcttgtgaatgtcagtgagaaggatgctaaggattttacgaaatttgt

SEQ ID NO: 405812 - DNA, 55 bp, Artificial
  Synthetic oligonucleotide
gcaatggacgtttggcgcgcggtttacgcgaacatgccagagagtattcgcgcaa

SEQ ID NO: 405813 - DNA, 60 bp, Artificial
  Synthetic oligonucleotide
gcaatggcacatgtagttcccctaacctctcagtaggagtcaagccctgatgcgccaaca

SEQ ID NO: 405814 - DNA, 60 bp, Artificial
  Synthetic oligonucleotide
gcaatggccacagatggatccttcattgattgctaaacagccaagctcttcacatcccca

SEQ ID NO: 405815 - DNA, 60 bp, Artificial
  Synthetic oligonucleotide
gcaatggccttacatttactgcccatgggcagacccgtctgtactttaagagtgttggca

SEQ ID NO: 405816 - DNA, 60 bp, Artificial
  Synthetic oligonucleotide
gcaatggcgctgctccttggataggtagagattcgttgttctaagagttccctaattatg

SEQ ID NO: 405817 - DNA, 58 bp, Artificial
  Synthetic oligonucleotide
gcaatggcggaagtcaatttcagtacgtaagtaccagacataaaactgtctcctgtcg

SEQ ID NO: 405818 - DNA, 60 bp, Artificial
  Synthetic oligonucleotide
gcaatggctagtgattttaacataccacctgtagtagcaaaagaaatagtagcctgctgt

SEQ ID NO: 405819 - DNA, 60 bp, Artificial
  Synthetic oligonucleotide
gcaatggctcgccatggtatgacccggctgtatgcagctctccacctccccccggaggta

SEQ ID NO: 405820 - DNA, 60 bp, Artificial
  Synthetic oligonucleotide
gcaatgggacaatcatgcacaataaaagtgtgtccattgaatactcaaacactggggata

SEQ ID NO: 405821 - DNA, 60 bp, Artificial
  Synthetic oligonucleotide
gcaatgggacagtcatgtactattaaagtatgtccattgaatgcccaaacactaggaata

SEQ ID NO: 405822 - DNA, 55 bp, Artificial
  Synthetic oligonucleotide
gcaatgggcaatgcatgtgaagtgttaggggaaacaccagactggatagtacgac

SEQ ID NO: 405823 - DNA, 60 bp, Artificial
  Synthetic oligonucleotide
gcaatgggcctgagaattagctcttccttcagctttggaggcttcactttcaaaagaaca

SEQ ID NO: 405824 - DNA, 55 bp, Artificial
  Synthetic oligonucleotide
gcaatggggcagtagttgaggtggacactagtgatagagttgcttttaggtgtcg

SEQ ID NO: 405825 - DNA, 55 bp, Artificial
  Synthetic oligonucleotide
gcaatgggtcatgtctcgaatgtgtgaccttgaaggatgttggtccccaacacca

SEQ ID NO: 405826 - DNA, 55 bp, Artificial
  Synthetic oligonucleotide
gcaatgggtggggtcgatttcctacgtctagctttggccggctagcgtctctcgt

SEQ ID NO: 405827 - DNA, 60 bp, Artificial
  Synthetic oligonucleotide
gcaatgggtgttttgaattttggcacaaatgcgacgatgagtgcatcaactcagttaaga

SEQ ID NO: 405828 - DNA, 54 bp, Artificial
  Synthetic oligonucleotide
gcaatggtcagagcagttcattatgctatgcactcatgcaaggtacaagaaaat

SEQ ID NO: 405829 - DNA, 54 bp, Artificial
  Synthetic oligonucleotide
gcaatggtcgattttcatacaactacggttgtgtcttgcggataattgcgacgc

SEQ ID NO: 405830 - DNA, 60 bp, Artificial
  Synthetic oligonucleotide
gcaatggtcgattttcatacagctccgactaagtctggcagcgtactgcgacgccgtcga

SEQ ID NO: 405831 - DNA, 57 bp, Artificial
  Synthetic oligonucleotide
gcaatggtgtttggataggaaggactaaaagtaacagactcagaaagggatttgaga

SEQ ID NO: 405832 - DNA, 52 bp, Artificial
  Synthetic oligonucleotide
gcaatggttaatgggcctcttccaaatccagaggcaccgattagagtggtgt

SEQ ID NO: 405833 - DNA, 55 bp, Artificial
  Synthetic oligonucleotide
gcaatggttcaaggagacaatcaagctatagctgtaaccacaagagtacccaata

SEQ ID NO: 405834 - DNA, 52 bp, Artificial
  Synthetic oligonucleotide
gcaatggttcataatacagcagtgtctacattcattagctaccctgatgtgg

SEQ ID NO: 405835 - DNA, 60 bp, Artificial
  Synthetic oligonucleotide
gcaatgtaaacagcgaccacaactataacagatattcgtgtaccctctgcaacctttgca

SEQ ID NO: 405836 - DNA, 55 bp, Artificial
  Synthetic oligonucleotide
gcaatgtactgtgaagaatgtaacatgtatcatgacaaatctgggctgaagagac

SEQ ID NO: 405837 - DNA, 52 bp, Artificial
  Synthetic oligonucleotide
gcaatgtatgcccctcctatccaaggaataataaggtgcgaatctaacatta

SEQ ID NO: 405838 - DNA, 59 bp, Artificial
  Synthetic oligonucleotide
gcaatgtcaagggtacggataaataacgcattagcttattttttgctaagatacatctg

SEQ ID NO: 405839 - DNA, 50 bp, Artificial
  Synthetic oligonucleotide
gcaatgtcgaccgcgccgagtcaggtgcaggctccgcgtgagcttgacga

SEQ ID NO: 405840 - DNA, 55 bp, Artificial
  Synthetic oligonucleotide
gcaatgtcggagttttcagggtgatcatatcacgcgtattatccgagacacggca

SEQ ID NO: 405841 - DNA, 60 bp, Artificial
  Synthetic oligonucleotide
gcaatgtgactattaatccaggtccattcgcacagacaagttacgcaccagttgattggg

SEQ ID NO: 405842 - DNA, 55 bp, Artificial
  Synthetic oligonucleotide
gcaatgtgattaacacacttcgtaacaagaacttgctcccaatgcacgcacgcgt

SEQ ID NO: 405843 - DNA, 53 bp, Artificial
  Synthetic oligonucleotide
gcaatgtgcagcagacggaggccattactactgatagaggaatatttttcccc

SEQ ID NO: 405844 - DNA, 55 bp, Artificial
  Synthetic oligonucleotide
gcaatgtgcagcatacagagcatactagcatagaggattctttgccgaagccgaa

SEQ ID NO: 405845 - DNA, 60 bp, Artificial
  Synthetic oligonucleotide
gcaatgtggattgttatcctgacaattcactagtttgtagatacgacacacgaaacttga

SEQ ID NO: 405846 - DNA, 60 bp, Artificial
  Synthetic oligonucleotide
gcaatgtgtcctatcgttcgatgcctcccgacagtctatgggggccgggtcgcacagcct

SEQ ID NO: 405847 - DNA, 55 bp, Artificial
  Synthetic oligonucleotide
gcaatgtgtcgctggtgtgagcttttgcttgatgcgtagtattgcgataggtcac

SEQ ID NO: 405848 - DNA, 58 bp, Artificial
  Synthetic oligonucleotide
gcaatgtgtcgtgtgatgctgaattctatttgataccaagatcgcagaccgatttatg

SEQ ID NO: 405849 - DNA, 60 bp, Artificial
  Synthetic oligonucleotide
gcaatgttcagctaatcatctgagttccatgcatcttataatacagaatgcatacaaaca

SEQ ID NO: 405850 - DNA, 55 bp, Artificial
  Synthetic oligonucleotide
gcaatgttcagttctacgtgtcttgcaaagacggcgtagttgcgtagacgctgga

SEQ ID NO: 405851 - DNA, 55 bp, Artificial
  Synthetic oligonucleotide
gcaattaaaccggaatgcgagtcatatctcgacaggttcgagggtttatttagcg

SEQ ID NO: 405852 - DNA, 60 bp, Artificial
  Synthetic oligonucleotide
gcaattaaatccgcattcaacatagcagaggacctagtggtaactgctaataagaagtcc

SEQ ID NO: 405853 - DNA, 59 bp, Artificial
  Synthetic oligonucleotide
gcaattaaatctatttttgagccgtccactgacatgatcgttaccgcgaacaagaagtc

SEQ ID NO: 405854 - DNA, 55 bp, Artificial
  Synthetic oligonucleotide
gcaattaacaatgtatctatcagtccatcaatctcgtcagactctcgccatactg

SEQ ID NO: 405855 - DNA, 55 bp, Artificial
  Synthetic oligonucleotide
gcaattaacaccagcaaattccccaacatgtacatcccagtgggacaggtcacgg

SEQ ID NO: 405856 - DNA, 55 bp, Artificial
  Synthetic oligonucleotide
gcaattaacgactcagcccatcactagaggtgtcaatatgtacataccaaccgcc

SEQ ID NO: 405857 - DNA, 59 bp, Artificial
  Synthetic oligonucleotide
gcaattaatacagaaggacaaagtctacctgtcatgggtaccagcacataaaggaatcg

SEQ ID NO: 405858 - DNA, 60 bp, Artificial
  Synthetic oligonucleotide
gcaattaatagatacaatgggttaacacttagatcagtcacaatgcggccaacttcgcaa

SEQ ID NO: 405859 - DNA, 60 bp, Artificial
  Synthetic oligonucleotide
gcaattacattgaacaaaacatgatcagcagctctaattacattgttaattgagataaca

SEQ ID NO: 405860 - DNA, 60 bp, Artificial
  Synthetic oligonucleotide
gcaattaccactattagagaaccagatcacgaacttggagcagtccgctgcctcgcaaga

SEQ ID NO: 405861 - DNA, 57 bp, Artificial
  Synthetic oligonucleotide
gcaattagaccaaaccccacttggtagaaagttcttgttccagactaatgtgttgca

SEQ ID NO: 405862 - DNA, 55 bp, Artificial
  Synthetic oligonucleotide
gcaattagctgctgctcgggtgacggcacacattcgagcggcgaagcgggcacta

SEQ ID NO: 405863 - DNA, 60 bp, Artificial
  Synthetic oligonucleotide
gcaattagcttaactagttgcagaggtaatgaaaatggcgtattataggcgctcgtatag

SEQ ID NO: 405864 - DNA, 60 bp, Artificial
  Synthetic oligonucleotide
gcaattagtacaacaaatgagttcattggcatagatgaacagagttcagtttacaaggac

SEQ ID NO: 405865 - DNA, 60 bp, Artificial
  Synthetic oligonucleotide
gcaattagtggtaatacattcctggacagtcgtccttacaatatcgttcagttgtgccag

SEQ ID NO: 405866 - DNA, 60 bp, Artificial
  Synthetic oligonucleotide
gcaattataactgcgcatgaaagtagtttgagctcctatgaatttttcagtggagttctc

SEQ ID NO: 405867 - DNA, 60 bp, Artificial
  Synthetic oligonucleotide
gcaattatactaaattctggtatgtaaatgacacaataacaggcagacacagcctgcctc

SEQ ID NO: 405868 - DNA, 60 bp, Artificial
  Synthetic oligonucleotide
gcaattattgatagtgacgtttatatataaacggtcacgattgcgccacgtgtttcaata

SEQ ID NO: 405869 - DNA, 55 bp, Artificial
  Synthetic oligonucleotide
gcaattcaacctctgactaaagtagactcaattaccacttttgggtttggccacc

SEQ ID NO: 405870 - DNA, 60 bp, Artificial
  Synthetic oligonucleotide
gcaattcaactcacaatcaggcattctttggcagttcgcattttcttagttagcgagctt

SEQ ID NO: 405871 - DNA, 52 bp, Artificial
  Synthetic oligonucleotide
gcaattcaatgcaccagctaaggggactcccattacttatgatggagagccc

SEQ ID NO: 405872 - DNA, 59 bp, Artificial
  Synthetic oligonucleotide
gcaattcacaagcaaaaatagtaaaggactgtgcaaccatgtgtagacattataaacgg

SEQ ID NO: 405873 - DNA, 55 bp, Artificial
  Synthetic oligonucleotide
gcaattcagagagaagagaaaggtatcacagacaagttcacaacctcactcaggt

SEQ ID NO: 405874 - DNA, 60 bp, Artificial
  Synthetic oligonucleotide
gcaattcagagtgagatattcaccgattatgtcggatggtgaaccagggctttacaacgg

SEQ ID NO: 405875 - DNA, 60 bp, Artificial
  Synthetic oligonucleotide
gcaattcatggtctaattgtggcgaatcatctttgtccttataggtcataggaaattcat

SEQ ID NO: 405876 - DNA, 60 bp, Artificial
  Synthetic oligonucleotide
gcaattcatgttggtggaaatggacgtgtgggatatggagcagcattgctgcgtaaatat

SEQ ID NO: 405877 - DNA, 60 bp, Artificial
  Synthetic oligonucleotide
gcaattccagaccattgcggcgcgtgtcgaggacggtgtgcccgttccagcggacgccat

SEQ ID NO: 405878 - DNA, 55 bp, Artificial
  Synthetic oligonucleotide
gcaattcccgaagtttgaaagctccgattctctgaaggaaccattaatccggaag

SEQ ID NO: 405879 - DNA, 60 bp, Artificial
  Synthetic oligonucleotide
gcaattcccggtgcaaactgatgagtataagaacactagggactcggacattgtattcac

SEQ ID NO: 405880 - DNA, 58 bp, Artificial
  Synthetic oligonucleotide
gcaattcctcgggcctttaccatgtcaccaacgactgccctaattcgagtattgtgta

SEQ ID NO: 405881 - DNA, 55 bp, Artificial
  Synthetic oligonucleotide
gcaattcgactcagctcctgcttccggtaccgcgaatgtggttaaagtcgtgaag

SEQ ID NO: 405882 - DNA, 55 bp, Artificial
  Synthetic oligonucleotide
gcaattcgtcacgtgaagagaacttattcgaaaggctctgaagagcgtaagtctc

SEQ ID NO: 405883 - DNA, 55 bp, Artificial
  Synthetic oligonucleotide
gcaattctaaagtgtagagataaggattttaatggaacggggctatgcacaaatg

SEQ ID NO: 405884 - DNA, 55 bp, Artificial
  Synthetic oligonucleotide
gcaattctccagtattcaattacaacaaggccaccaaaaggctcactgttctcgg

SEQ ID NO: 405885 - DNA, 55 bp, Artificial
  Synthetic oligonucleotide
gcaattctgaaagggattacaaatgtctggagaagcgggatcctacagctactca

SEQ ID NO: 405886 - DNA, 60 bp, Artificial
  Synthetic oligonucleotide
gcaattcttctagcattgcaggattcaggagtagaggtaaacatagtaacagactcacaa

SEQ ID NO: 405887 - DNA, 60 bp, Artificial
  Synthetic oligonucleotide
gcaattgaaaacgcagcaacgctcggagccagggggccggcatcagtctcattctcatcc

SEQ ID NO: 405888 - DNA, 55 bp, Artificial
  Synthetic oligonucleotide
gcaattgaaaccaattctaatgacagtgtcacaaatggtggctacccgtgaaggg

SEQ ID NO: 405889 - DNA, 58 bp, Artificial
  Synthetic oligonucleotide
gcaattgaccaaattgctaaaggtcaagcacttctgtttccccggtcaagattgatac

SEQ ID NO: 405890 - DNA, 57 bp, Artificial
  Synthetic oligonucleotide
gcaattgagaatgcgtacctgccttacgtagccttttgcccgatgacggaaccccca

SEQ ID NO: 405891 - DNA, 60 bp, Artificial
  Synthetic oligonucleotide
gcaattgcagcccttatctgatcgtcttggagtggagggatccccccacacccttcacga

SEQ ID NO: 405892 - DNA, 60 bp, Artificial
  Synthetic oligonucleotide
gcaattgctagttaaggagttggatcttctgtgtcctaactgccgaaacagcgacctgca

SEQ ID NO: 405893 - DNA, 55 bp, Artificial
  Synthetic oligonucleotide
gcaattgctgatgtgaaacgattaattaaagctggctgtctagatatctgggtcc

SEQ ID NO: 405894 - DNA, 60 bp, Artificial
  Synthetic oligonucleotide
gcaattggagtaatggagtgcaatttatactagaaccctcaatctcgcgaatagcgagat

SEQ ID NO: 405895 - DNA, 55 bp, Artificial
  Synthetic oligonucleotide
gcaattggctataaggccatgggttgcacttgtgtggaggaagccatgaacctgc

SEQ ID NO: 405896 - DNA, 57 bp, Artificial
  Synthetic oligonucleotide
gcaattggctcgagttattttagaggctaaacacacctcaaccccaccagaaatctg

SEQ ID NO: 405897 - DNA, 60 bp, Artificial
  Synthetic oligonucleotide
gcaattggctttacgtcatcgcatcctctgaaccattttaccaccactgctcggcaacac

SEQ ID NO: 405898 - DNA, 58 bp, Artificial
  Synthetic oligonucleotide
gcaattgggcgcaaggtcagcgaagtcaacctcagcgtatggtcgtgggttctatgcc

SEQ ID NO: 405899 - DNA, 55 bp, Artificial
  Synthetic oligonucleotide
gcaattggtcaggatagagacagacattaggcgggaggtgtcacattccaggtgc

SEQ ID NO: 405900 - DNA, 57 bp, Artificial
  Synthetic oligonucleotide
gcaattggtgcgtatggcctcgcaaaacccatacacagctgaagcaatgatatgcgt

SEQ ID NO: 405901 - DNA, 54 bp, Artificial
  Synthetic oligonucleotide
gcaattgtgggccaacaatatttcttggggttttagaagataataagggagtag

SEQ ID NO: 405902 - DNA, 55 bp, Artificial
  Synthetic oligonucleotide
gcaattgtgtacgatgcacaggacactgtacccaccactcggacccaggtctcac

SEQ ID NO: 405903 - DNA, 55 bp, Artificial
  Synthetic oligonucleotide
gcaattgttcattgctaaagatgtgcaatgcggagggtattaaaatgagcttcac

SEQ ID NO: 405904 - DNA, 60 bp, Artificial
  Synthetic oligonucleotide
gcaatttatattgtctgtctggctattttatcgaaccgtgatcggtgactggccagtgcc

SEQ ID NO: 405905 - DNA, 55 bp, Artificial
  Synthetic oligonucleotide
gcaatttcaacgtttgtaagaggttgacaggcaggagtaccggagaaagactccc

SEQ ID NO: 405906 - DNA, 59 bp, Artificial
  Synthetic oligonucleotide
gcaatttcgagtaagatctgaagagcctactgtgctaggttggtcttcctccggagccg

SEQ ID NO: 405907 - DNA, 55 bp, Artificial
  Synthetic oligonucleotide
gcaatttcgtccctcgtaatacttcctgtttgtgaggccgaaggcccaggatcga

SEQ ID NO: 405908 - DNA, 55 bp, Artificial
  Synthetic oligonucleotide
gcaatttctgctattgtcattaaggatgttgcaactaatcaaacaggtaccactg

SEQ ID NO: 405909 - DNA, 56 bp, Artificial
  Synthetic oligonucleotide
gcaatttgaagtcttcatactctatgtcattctgttcatagttcttttccgctacc

SEQ ID NO: 405910 - DNA, 60 bp, Artificial
  Synthetic oligonucleotide
gcaatttgattatatcatcgttaccctgcgcagtcagcaccatgttgtttgggaggtgtc

SEQ ID NO: 405911 - DNA, 60 bp, Artificial
  Synthetic oligonucleotide
gcaatttgtgcaaatgtctaagagggtaatctgcgtccgaagcgcttgtgttgtctaaaa

SEQ ID NO: 405912 - DNA, 55 bp, Artificial
  Synthetic oligonucleotide
gcaatttgtttaaccgttcaaccgctgtgaaacgacatgatgcgagacgtcgaag

SEQ ID NO: 405913 - DNA, 57 bp, Artificial
  Synthetic oligonucleotide
gcaattttaagtataaggaatagtaatgcataatggtctgcggaaaaaatactcgag

SEQ ID NO: 405914 - DNA, 55 bp, Artificial
  Synthetic oligonucleotide
gcaattttattcagggccctactttaaatataggtgcgagtaataagtagccgcc

SEQ ID NO: 405915 - DNA, 59 bp, Artificial
  Synthetic oligonucleotide
gcaattttctctaatgtctgagttatgaagaacaaataatccatcttggatctgtgagc

SEQ ID NO: 405916 - DNA, 56 bp, Artificial
  Synthetic oligonucleotide
gcaattttcttttatcgggaaagtacagtggaagatcttcactccaaaatctgaat

SEQ ID NO: 405917 - DNA, 51 bp, Artificial
  Synthetic oligonucleotide
gcaattttgaggcacttaactatacaaaggataccactaagctcgtagaga

SEQ ID NO: 405918 - DNA, 56 bp, Artificial
  Synthetic oligonucleotide
gcacaaaatgaatttcgttaccgccttgcataaactcgttggcaaacctatcgaag

SEQ ID NO: 405919 - DNA, 55 bp, Artificial
  Synthetic oligonucleotide
gcacaaaattgtgctgtgtggtatgggagccttacaagataggagatctcccgtg

SEQ ID NO: 405920 - DNA, 55 bp, Artificial
  Synthetic oligonucleotide
gcacaaaccagtgatcttcggagaagactacattaccgaggcagacttgccttac

SEQ ID NO: 405921 - DNA, 60 bp, Artificial
  Synthetic oligonucleotide
gcacaaacctggatccagacaacgttattgattccctcatgggtacgcccctgatcaatc

SEQ ID NO: 405922 - DNA, 55 bp, Artificial
  Synthetic oligonucleotide
gcacaaactcgagttttgttgtccaaggctatggctggtggtgatgtgttattgg

SEQ ID NO: 405923 - DNA, 57 bp, Artificial
  Synthetic oligonucleotide
gcacaaagaattgtatacgatgacgaattgcagatgcacatattgagaggcccatta

SEQ ID NO: 405924 - DNA, 60 bp, Artificial
  Synthetic oligonucleotide
gcacaaagaccgcgtgcaggtgttactcagttgaaatcattgttgacgcaattaacagaa

SEQ ID NO: 405925 - DNA, 60 bp, Artificial
  Synthetic oligonucleotide
gcacaaagagctggtagagcttttcttcacatacctagaagaatcagacaaggcttcgaa

SEQ ID NO: 405926 - DNA, 60 bp, Artificial
  Synthetic oligonucleotide
gcacaaataagggcatgcgagaataagctacgagcgtgcaggcaacttaagatgattgga

SEQ ID NO: 405927 - DNA, 55 bp, Artificial
  Synthetic oligonucleotide
gcacaaatcatagtatgctggcaccaccaactatcacatccttaccagcaatgaa

SEQ ID NO: 405928 - DNA, 60 bp, Artificial
  Synthetic oligonucleotide
gcacaaatccagaaaatgtcgcaggatttgcaattagaggcattaacaattcagtcagaa

SEQ ID NO: 405929 - DNA, 57 bp, Artificial
  Synthetic oligonucleotide
gcacaaatctccggacatgtcaaaaacggttccatgagaatcgtcgggcctagaacc

SEQ ID NO: 405930 - DNA, 55 bp, Artificial
  Synthetic oligonucleotide
gcacaaatgcagtcgggggaagtggaacaaacaattatggagtaaagggattcgg

SEQ ID NO: 405931 - DNA, 60 bp, Artificial
  Synthetic oligonucleotide
gcacaaatgctgggcttgttgagccgataatttccaatgctgctcgtatgcttgcgaaaa

SEQ ID NO: 405932 - DNA, 60 bp, Artificial
  Synthetic oligonucleotide
gcacaaatgcttgatattctgtcagccacccaccaggccctcaatatctccaaccccagc

SEQ ID NO: 405933 - DNA, 58 bp, Artificial
  Synthetic oligonucleotide
gcacaaatggtaatatctgtcgagctattaacttgttaactcacgataatcgtacttc

SEQ ID NO: 405934 - DNA, 56 bp, Artificial
  Synthetic oligonucleotide
gcacaaatggttagatattacaaacgtggagaaatgcgagatatgtctatttcagc

SEQ ID NO: 405935 - DNA, 55 bp, Artificial
  Synthetic oligonucleotide
gcacaaatgtttactaccatgcgaatagtgaaaggcttctaacggtgggccatcc

SEQ ID NO: 405936 - DNA, 55 bp, Artificial
  Synthetic oligonucleotide
gcacaaattatatcccctgccatctgaaacaggtagtcatgtcctggatgagagt

SEQ ID NO: 405937 - DNA, 60 bp, Artificial
  Synthetic oligonucleotide
gcacaaattgacagagatgtgctaagctcatccatgccgaaattgtttagcgactttgtt

SEQ ID NO: 405938 - DNA, 57 bp, Artificial
  Synthetic oligonucleotide
gcacaacaaccaattgtgctaaaatgggagccacaactgagcacactctccattgga

SEQ ID NO: 405939 - DNA, 55 bp, Artificial
  Synthetic oligonucleotide
gcacaacaatgacagggcaaagccttaattttggtttagatacgttcagcggcgc

SEQ ID NO: 405940 - DNA, 60 bp, Artificial
  Synthetic oligonucleotide
gcacaacaatttgcaagtgaagctcaagttgtgtttgccactcctaggctctttcctgaa

SEQ ID NO: 405941 - DNA, 55 bp, Artificial
  Synthetic oligonucleotide
gcacaacacacacacgatgcttgtaatcgtgaaatcttgtctaaggttcctctcc

SEQ ID NO: 405942 - DNA, 54 bp, Artificial
  Synthetic oligonucleotide
gcacaacacaccagcgatacggaatgcgcgtaatgcctacgcgcgtgcccagag

SEQ ID NO: 405943 - DNA, 55 bp, Artificial
  Synthetic oligonucleotide
gcacaacacagataacacctacgcttatccgacgaatgcggaactggatggcggt

SEQ ID NO: 405944 - DNA, 55 bp, Artificial
  Synthetic oligonucleotide
gcacaacaccaatgtcattgagtatatagagaggccagatagtgatcatttcgtg

SEQ ID NO: 405945 - DNA, 55 bp, Artificial
  Synthetic oligonucleotide
gcacaacacgccgtagttgagaaaatgttaatatacgcaaaacacactagagaat

SEQ ID NO: 405946 - DNA, 55 bp, Artificial
  Synthetic oligonucleotide
gcacaacactactgagcatgctcaaccaatccgacgtcaaaagttacatgtcggc

SEQ ID NO: 405947 - DNA, 55 bp, Artificial
  Synthetic oligonucleotide
gcacaacactcacagtctttagttaaacctatgcgagacttcctgctaatgtcag

SEQ ID NO: 405948 - DNA, 55 bp, Artificial
  Synthetic oligonucleotide
gcacaacagcggttggcctctgcaacctcatgaggggagggtggttggctggaat

SEQ ID NO: 405949 - DNA, 55 bp, Artificial
  Synthetic oligonucleotide
gcacaacatggtcatggataggagatgcatcaaatgatcgcatagggcgctcacg

SEQ ID NO: 405950 - DNA, 54 bp, Artificial
  Synthetic oligonucleotide
gcacaaccaccttcgcaataggatagaaaaccggaacaatttcagaaggtcaat

SEQ ID NO: 405951 - DNA, 55 bp, Artificial
  Synthetic oligonucleotide
gcacaacccgtgattgaggtatcggacagacctgaggcgtcatctcaaacgcccg

SEQ ID NO: 405952 - DNA, 60 bp, Artificial
  Synthetic oligonucleotide
gcacaaccgatcgtaaatggcaaccggcacccgaagatggcgcagagtggctaaatggta

SEQ ID NO: 405953 - DNA, 55 bp, Artificial
  Synthetic oligonucleotide
gcacaactaaaacctctagtagatgctactaccaatcaaacctggtcacattacg

SEQ ID NO: 405954 - DNA, 55 bp, Artificial
  Synthetic oligonucleotide
gcacaactaacacaccgcacacctgcttaagcacttgctttgccgtcactactat

SEQ ID NO: 405955 - DNA, 60 bp, Artificial
  Synthetic oligonucleotide
gcacaactagtagcgttgctgcgttgttgtattactgaatttacaatattgtcactgtgg

SEQ ID NO: 405956 - DNA, 56 bp, Artificial
  Synthetic oligonucleotide
gcacaactagtcttgttacctttactccgaacagctcataaaatacaacaccctta

SEQ ID NO: 405957 - DNA, 60 bp, Artificial
  Synthetic oligonucleotide
gcacaactcctatttcagaactcatgagatgttcacctgttctgaatcgatgcaagaaaa

SEQ ID NO: 405958 - DNA, 59 bp, Artificial
  Synthetic oligonucleotide
gcacaactgaaaaggtatgtgcctacgctagtggaaaattcggcataatcaagtccaca

SEQ ID NO: 405959 - DNA, 60 bp, Artificial
  Synthetic oligonucleotide
gcacaactgtatagtgctgtttgggcctgctaacacagggaaatcatactttggaatgag

SEQ ID NO: 405960 - DNA, 55 bp, Artificial
  Synthetic oligonucleotide
gcacaacttcgaacagtgacattagtgaaggatttaatcttgcttctgttaaggt

SEQ ID NO: 405961 - DNA, 60 bp, Artificial
  Synthetic oligonucleotide
gcacaagaaattatgtctcgcgagctcatcaaacatcagtacggagagttattttcttgg

SEQ ID NO: 405962 - DNA, 60 bp, Artificial
  Synthetic oligonucleotide
gcacaagaagagcatgataaataccataataactggagggccatggctagtgaatacaac

SEQ ID NO: 405963 - DNA, 50 bp, Artificial
  Synthetic oligonucleotide
gcacaagacccctgacctacccggttgggggtttttgcgtaattaaccca

SEQ ID NO: 405964 - DNA, 59 bp, Artificial
  Synthetic oligonucleotide
gcacaagagagttcctccacgttgttaacacctactctggtatggcctccaacaccaga

SEQ ID NO: 405965 - DNA, 60 bp, Artificial
  Synthetic oligonucleotide
gcacaagagggaaactagctgacactgcagggactttccaagagaggctgtaacatggga

SEQ ID NO: 405966 - DNA, 55 bp, Artificial
  Synthetic oligonucleotide
gcacaagagggcttaatgagaccacagagaggaatgcagaatgccagtataatgt

SEQ ID NO: 405967 - DNA, 55 bp, Artificial
  Synthetic oligonucleotide
gcacaagaggtggcacatacacgtagtgttagacataagcgtgggaaatccaaga

SEQ ID NO: 405968 - DNA, 60 bp, Artificial
  Synthetic oligonucleotide
gcacaagatacaccacagggagtcacgctgaacgtaggtggcgtaaacatgagagctggc

SEQ ID NO: 405969 - DNA, 55 bp, Artificial
  Synthetic oligonucleotide
gcacaagattgcgttagacaaacgtacggatgattctggcagaatggcggatcac

SEQ ID NO: 405970 - DNA, 55 bp, Artificial
  Synthetic oligonucleotide
gcacaagcaactctctttccacatgtgattgctgatgttaggactctagacccca

SEQ ID NO: 405971 - DNA, 60 bp, Artificial
  Synthetic oligonucleotide
gcacaagcaatccaaactcgatgaggggcgctaccgcctcataatgagcgtttccttggt

SEQ ID NO: 405972 - DNA, 55 bp, Artificial
  Synthetic oligonucleotide
gcacaagcagtctccccaaactttaggtttcttagttaactcttgcttgtgactt

SEQ ID NO: 405973 - DNA, 55 bp, Artificial
  Synthetic oligonucleotide
gcacaagctacaccaaggagaagcaatgagacttggtgaaaagagccctccaaaa

SEQ ID NO: 405974 - DNA, 54 bp, Artificial
  Synthetic oligonucleotide
gcacaagctcaaatgactaagtaccaagacagtgcgaaggcattagctgcaagc

SEQ ID NO: 405975 - DNA, 52 bp, Artificial
  Synthetic oligonucleotide
gcacaagctcatactgaacacatatcacctttcagacagtgtatagcgaata

SEQ ID NO: 405976 - DNA, 55 bp, Artificial
  Synthetic oligonucleotide
gcacaaggcccgagagctgtatccggattactacaaggactgctgacagcgttac

SEQ ID NO: 405977 - DNA, 54 bp, Artificial
  Synthetic oligonucleotide
gcacaagggcggttagcctgtaaggaagactacagatatgcgatttcgtcaacc

SEQ ID NO: 405978 - DNA, 55 bp, Artificial
  Synthetic oligonucleotide
gcacaaggggaatcgtctcttgcagatcacgtgttggtgacatcaggttctgggg

SEQ ID NO: 405979 - DNA, 55 bp, Artificial
  Synthetic oligonucleotide
gcacaagtaattgtggggtcccaaactacgcgcccacatagttttgcccgtacga

SEQ ID NO: 405980 - DNA, 55 bp, Artificial
  Synthetic oligonucleotide
gcacaagtagcacaatatgtaaattggacaaggtttagggataactgtacgtggc

SEQ ID NO: 405981 - DNA, 50 bp, Artificial
  Synthetic oligonucleotide
gcacaagtatgagggcattaaagattgcattccagcaggaaaggacatgt

SEQ ID NO: 405982 - DNA, 57 bp, Artificial
  Synthetic oligonucleotide
gcacaagtgaaatgcccttagcatccctacagagggtatattgggaaaaggaggaac

SEQ ID NO: 405983 - DNA, 60 bp, Artificial
  Synthetic oligonucleotide
gcacaagtgtcaacgcagaaaactggagcacatgaaaccagtataagcgccagcggtagc

SEQ ID NO: 405984 - DNA, 59 bp, Artificial
  Synthetic oligonucleotide
gcacaagttatcaatgacttaggttattcgaaagaaaagataacagctgattcggctga

SEQ ID NO: 405985 - DNA, 59 bp, Artificial
  Synthetic oligonucleotide
gcacaagttctatgcaaaggtaacgggtgggcagtatgcgagtaacgagcaggcgttgg

SEQ ID NO: 405986 - DNA, 60 bp, Artificial
  Synthetic oligonucleotide
gcacaagttctatggcaaggtgacaggtggacagtatgccagcaacgagcaggctatagt

SEQ ID NO: 405987 - DNA, 57 bp, Artificial
  Synthetic oligonucleotide
gcacaatacatgatagaatccctcatagaacccttttaatgaacgaattgggtgttc

SEQ ID NO: 405988 - DNA, 60 bp, Artificial
  Synthetic oligonucleotide
gcacaatcacgtgcatatggtgaaatattcattattcgtggtaaccatgaaggaaagttg

SEQ ID NO: 405989 - DNA, 58 bp, Artificial
  Synthetic oligonucleotide
gcacaatctatgttgttcgcgaagaaccctcagggttcctcgtgtgggcattcgttgt

SEQ ID NO: 405990 - DNA, 60 bp, Artificial
  Synthetic oligonucleotide
gcacaatgatctgatccagcaccatttcaggccactaagcaacatgccacatataaagcc

SEQ ID NO: 405991 - DNA, 60 bp, Artificial
  Synthetic oligonucleotide
gcacaatggaatgctgtgtgcaacaaatctgggacatcctctcattttggacacttgtac

SEQ ID NO: 405992 - DNA, 55 bp, Artificial
  Synthetic oligonucleotide
gcacaatggagtgatgcgcgatggcatttacatccctaaactcgagaaagaacgg

SEQ ID NO: 405993 - DNA, 58 bp, Artificial
  Synthetic oligonucleotide
gcacaatggcctggacagtggtaaacagcatttgtaacactacaggggttgagaaacc

SEQ ID NO: 405994 - DNA, 60 bp, Artificial
  Synthetic oligonucleotide
gcacaatgtcatgaccaggtgcaatatgcatctgggggctcgccgaggcatgtttatgcc

SEQ ID NO: 405995 - DNA, 53 bp, Artificial
  Synthetic oligonucleotide
gcacaattaaagtttgcccactaaatacacagacacttggaattggatgtgtg

SEQ ID NO: 405996 - DNA, 60 bp, Artificial
  Synthetic oligonucleotide
gcacaattgagaacacccccaaaggcatattcagctacaaaatataatcgtaatcgagga

SEQ ID NO: 405997 - DNA, 60 bp, Artificial
  Synthetic oligonucleotide
gcacaattgatttcacaaatgagcaatgtggcgaattggcagcagcaattagtcaatcga

SEQ ID NO: 405998 - DNA, 56 bp, Artificial
  Synthetic oligonucleotide
gcacaattgcattgataattacgccattgaaataagtttcgcctatgtgaaaggtg

SEQ ID NO: 405999 - DNA, 55 bp, Artificial
  Synthetic oligonucleotide
gcacacaaaatgccattaacgggattacaaacaaggtgaattctgtaatcgagaa

SEQ ID NO: 406000 - DNA, 60 bp, Artificial
  Synthetic oligonucleotide
gcacacaaagaggctgtgcagcatctaaaacgaaagtttctaggcagtccgcggagcagc

SEQ ID NO: 406001 - DNA, 58 bp, Artificial
  Synthetic oligonucleotide
gcacacaaattggcgggacaaggatggtggacattcttaggcagaacccgacggaaga

SEQ ID NO: 406002 - DNA, 56 bp, Artificial
  Synthetic oligonucleotide
gcacacaacgaattacagcacacagctgtaaagcgcgaactcattcaccgcaatct

SEQ ID NO: 406003 - DNA, 52 bp, Artificial
  Synthetic oligonucleotide
gcacacaagggcatccacgggtcgggggcgtttttccacgggtttttgcctc

SEQ ID NO: 406004 - DNA, 55 bp, Artificial
  Synthetic oligonucleotide
gcacacaatagcaccctggagtgtgggtatttccaagttctctggtggctgggat

SEQ ID NO: 406005 - DNA, 54 bp, Artificial
  Synthetic oligonucleotide
gcacacaccacctctaggccctatgtaggggcagttccgttagcggaccggggg

SEQ ID NO: 406006 - DNA, 55 bp, Artificial
  Synthetic oligonucleotide
gcacacactacttggagtgcgcaacatgtaaagcgcgtatgcctactgggatgaa

SEQ ID NO: 406007 - DNA, 60 bp, Artificial
  Synthetic oligonucleotide
gcacacactgcatgttgtgcaagtggaggccaaacacatggccactgagattagatctga

SEQ ID NO: 406008 - DNA, 55 bp, Artificial
  Synthetic oligonucleotide
gcacacagcactttagctgtatgagggaacacccgacgtccatggttggactagg

SEQ ID NO: 406009 - DNA, 55 bp, Artificial
  Synthetic oligonucleotide
gcacacagcccgagagctgcatccggagttctacaaggactgctgacacaggagt

SEQ ID NO: 406010 - DNA, 55 bp, Artificial
  Synthetic oligonucleotide
gcacacagggcggaccagagtggctatgcaggtacgccaggcatatctcccttcc

SEQ ID NO: 406011 - DNA, 60 bp, Artificial
  Synthetic oligonucleotide
gcacacagtatgattccctctattcggctttagcttactcggactagaagtaatacatag

SEQ ID NO: 406012 - DNA, 59 bp, Artificial
  Synthetic oligonucleotide
gcacacatacaatctacaattagcaacgcccttcttgaaagcgtgagtggtaaaaacac

SEQ ID NO: 406013 - DNA, 55 bp, Artificial
  Synthetic oligonucleotide
gcacacatcactacaactggatcattacccgcaaaaccttccgcataacttaggg

SEQ ID NO: 406014 - DNA, 55 bp, Artificial
  Synthetic oligonucleotide
gcacacatggaattaagccaactgtaactactcagttgatactcaatggcagctt

SEQ ID NO: 406015 - DNA, 55 bp, Artificial
  Synthetic oligonucleotide
gcacacattagcgcgtgcgctacagagggaagcggctgaaaggactgaagctgaa

SEQ ID NO: 406016 - DNA, 60 bp, Artificial
  Synthetic oligonucleotide
gcacacattcaggtaccatacctgggtgttgacagacacgaccagggaactcgtcacaag

SEQ ID NO: 406017 - DNA, 60 bp, Artificial
  Synthetic oligonucleotide
gcacacatttagaaggcaaaatcataatagttgctgtccatgtagcaagtggctttatag

SEQ ID NO: 406018 - DNA, 60 bp, Artificial
  Synthetic oligonucleotide
gcacacatttggaagtctgtttcatgtattcagatttccacttcattgacgaacgaggag

SEQ ID NO: 406019 - DNA, 55 bp, Artificial
  Synthetic oligonucleotide
gcacaccacatgcccctgcggagcagagctagcaggccacatcaagaacggctca

SEQ ID NO: 406020 - DNA, 58 bp, Artificial
  Synthetic oligonucleotide
gcacaccctgctgctacgaaaaggaaccggaggaaaccctacgcatgcttgaggacaa

SEQ ID NO: 406021 - DNA, 59 bp, Artificial
  Synthetic oligonucleotide
gcacacccttcttggggtgcaacagcaccactgacgtgacggaaaccctggttgcagta

SEQ ID NO: 406022 - DNA, 58 bp, Artificial
  Synthetic oligonucleotide
gcacaccgagtgaatgcgcaaacaccataccatgtagtgtactggatataattttacg

SEQ ID NO: 406023 - DNA, 57 bp, Artificial
  Synthetic oligonucleotide
gcacaccgatcaatagtgggcgtggcacaccagctacgtcttgatcaagtacttctg

SEQ ID NO: 406024 - DNA, 51 bp, Artificial
  Synthetic oligonucleotide
gcacaccgcatggctcttgaagaactgcccgacgcattggagaccatcaca

SEQ ID NO: 406025 - DNA, 55 bp, Artificial
  Synthetic oligonucleotide
gcacaccgccgagcgattcaatcctgcggttcacatcccgtgacttcacaagtct

SEQ ID NO: 406026 - DNA, 51 bp, Artificial
  Synthetic oligonucleotide
gcacaccgggcaccccaacgctcggtatgccgcacagatgcgcagtgatac

SEQ ID NO: 406027 - DNA, 50 bp, Artificial
  Synthetic oligonucleotide
gcacaccggtattacggtacccttgtgcgcctgttttatataccctcccc

SEQ ID NO: 406028 - DNA, 60 bp, Artificial
  Synthetic oligonucleotide
gcacaccgtgtacgatatggcctgggctcttcggagacacctgaaatggactggacagtg

SEQ ID NO: 406029 - DNA, 60 bp, Artificial
  Synthetic oligonucleotide
gcacacctctaatagcgcctgtgctgtggttgtggtctaggcacgcatctagtggtgcct

SEQ ID NO: 406030 - DNA, 53 bp, Artificial
  Synthetic oligonucleotide
gcacacctgcaatagtgattgacattttggactcctctgcagattactatctg

SEQ ID NO: 406031 - DNA, 50 bp, Artificial
  Synthetic oligonucleotide
gcacacctgggattaaacctgtggtatcaactcaattgctgttaaatggc

SEQ ID NO: 406032 - DNA, 55 bp, Artificial
  Synthetic oligonucleotide
gcacacgaccgccctaacgctaattactgattataacagctcacacatgagcgac

SEQ ID NO: 406033 - DNA, 59 bp, Artificial
  Synthetic oligonucleotide
gcacacgcagattcttttcgcggctttgttgaacaacttcctgacacgttaggcgccta

SEQ ID NO: 406034 - DNA, 55 bp, Artificial
  Synthetic oligonucleotide
gcacacgctcagcggttccacgagtctcacaggtggggtacagtttcggcgatcg

SEQ ID NO: 406035 - DNA, 60 bp, Artificial
  Synthetic oligonucleotide
gcacacgctggtgcccctgggcacggagaccatcaccgacagctacatgagtgcacccgc

SEQ ID NO: 406036 - DNA, 55 bp, Artificial
  Synthetic oligonucleotide
gcacacgctgtggggtgaaatttacatgcgcactgcagatgggtggactgtaacc

SEQ ID NO: 406037 - DNA, 53 bp, Artificial
  Synthetic oligonucleotide
gcacacggaatgtaggaggtcgctgagtaagtacgaacaaaatttacgttgta

SEQ ID NO: 406038 - DNA, 60 bp, Artificial
  Synthetic oligonucleotide
gcacacggagacacccctcagttggacctaaaagcgaggccaacatatggtgcaggcgaa

SEQ ID NO: 406039 - DNA, 55 bp, Artificial
  Synthetic oligonucleotide
gcacacggtagtgagtgaccttatcagggagtatatcaacagatcagttattggg

SEQ ID NO: 406040 - DNA, 52 bp, Artificial
  Synthetic oligonucleotide
gcacacgtgattataacgcaatggctgttcgtacacgttcagacattagaga

SEQ ID NO: 406041 - DNA, 58 bp, Artificial
  Synthetic oligonucleotide
gcacacgtgtcccgtcgcaaacgcgccacccagcacacgggcggggggcgccagaagc

SEQ ID NO: 406042 - DNA, 51 bp, Artificial
  Synthetic oligonucleotide
gcacacgtgtgtcaggcttatacgggctaccagcatttaatccgaatagcg

SEQ ID NO: 406043 - DNA, 57 bp, Artificial
  Synthetic oligonucleotide
gcacactaagtacactcgatgggtgtctcagtcgaaagtccaacgttccgtttccac

SEQ ID NO: 406044 - DNA, 55 bp, Artificial
  Synthetic oligonucleotide
gcacactagggtgtagacttggaggctttgctataatgagattcacaggggagtt

SEQ ID NO: 406045 - DNA, 60 bp, Artificial
  Synthetic oligonucleotide
gcacactattgtgctaatgacgtagacttgcagtcttcgggccttgtgcggaagaatgct

SEQ ID NO: 406046 - DNA, 60 bp, Artificial
  Synthetic oligonucleotide
gcacactcatagccatggatttgggagagatgtgtgatgacacggtcacttacaaatgcc

SEQ ID NO: 406047 - DNA, 58 bp, Artificial
  Synthetic oligonucleotide
gcacactcccgcattcgttcccgcccgtaagtacatagaagtgccagaacagcctacc

SEQ ID NO: 406048 - DNA, 55 bp, Artificial
  Synthetic oligonucleotide
gcacactcgaattcctccgataggaaagttcgcacaccgttagtggattctgcga

SEQ ID NO: 406049 - DNA, 58 bp, Artificial
  Synthetic oligonucleotide
gcacactcttcataaccataagtttgtccacctcttgatttagatcccttagtttgtc

SEQ ID NO: 406050 - DNA, 60 bp, Artificial
  Synthetic oligonucleotide
gcacactggcgattatgagattaactggtgagggacccaccttcgacgctaacacagagt

SEQ ID NO: 406051 - DNA, 60 bp, Artificial
  Synthetic oligonucleotide
gcacactgtcctagtcagcttgtgacgaagcacacggttaaggggaagtgccaaatgttc

SEQ ID NO: 406052 - DNA, 55 bp, Artificial
  Synthetic oligonucleotide
gcacactttagcaaaatggtttcatttgacggtcctccaattaaaactgggcttc

SEQ ID NO: 406053 - DNA, 60 bp, Artificial
  Synthetic oligonucleotide
gcacactttcatcatggagcacgttcacatggatggctgttcagctctacgacatgccga

SEQ ID NO: 406054 - DNA, 60 bp, Artificial
  Synthetic oligonucleotide
gcacagaacaggtatgtaaacatatcgatgcaaatgactgtctagttacaccatcagtta

SEQ ID NO: 406055 - DNA, 60 bp, Artificial
  Synthetic oligonucleotide
gcacagaaccagcaggacaaaaatgaacaagacttattggcattagacaaatgggcaagt

SEQ ID NO: 406056 - DNA, 60 bp, Artificial
  Synthetic oligonucleotide
gcacagaaggactggaggcgttagatctaggcactagtgcaggttacccctacgtggcga

SEQ ID NO: 406057 - DNA, 60 bp, Artificial
  Synthetic oligonucleotide
gcacagaaggtctagaagcacttgatcttaccactagtgctgggtttccctatgtatcta

SEQ ID NO: 406058 - DNA, 60 bp, Artificial
  Synthetic oligonucleotide
gcacagaatgtctacacgtatgtgcggcacatgaattccggacacgccaactatgagcag

SEQ ID NO: 406059 - DNA, 55 bp, Artificial
  Synthetic oligonucleotide
gcacagacacatggctaactgtgagtaattataataagttgggagctcatctgag

SEQ ID NO: 406060 - DNA, 60 bp, Artificial
  Synthetic oligonucleotide
gcacagacgttcgttggtgtactatactgcgattgaggataggctgttttctgatatcaa

SEQ ID NO: 406061 - DNA, 60 bp, Artificial
  Synthetic oligonucleotide
gcacagagaaaaaacgacgatccatacatcataagaacgctcgctcctataggctcagat

SEQ ID NO: 406062 - DNA, 59 bp, Artificial
  Synthetic oligonucleotide
gcacagagaggggggtattcacactgaacaaggagggtaatctccatgcgaactatgaa

SEQ ID NO: 406063 - DNA, 60 bp, Artificial
  Synthetic oligonucleotide
gcacagagatatgctcccagaacctcggcttgatgacatcgaaagatttagacaagaggg

SEQ ID NO: 406064 - DNA, 55 bp, Artificial
  Synthetic oligonucleotide
gcacagagatcgcactgagctttcgccgctactgctttccaccacgcagtggcag

SEQ ID NO: 406065 - DNA, 55 bp, Artificial
  Synthetic oligonucleotide
gcacagaggtggtgctggtgagcaactgagtaatgcatgtgaaagatttgaaagc

SEQ ID NO: 406066 - DNA, 51 bp, Artificial
  Synthetic oligonucleotide
gcacagatacagccatccattcagacaggatcagaagagattaaatcatta

SEQ ID NO: 406067 - DNA, 55 bp, Artificial
  Synthetic oligonucleotide
gcacagatcacgagcacacgagcgcgccacttgaaggagatagagtccgagctcg

SEQ ID NO: 406068 - DNA, 60 bp, Artificial
  Synthetic oligonucleotide
gcacagatccgtagatcctactgctcaatgtctgccggcgtccaactttaccttctgatg

SEQ ID NO: 406069 - DNA, 55 bp, Artificial
  Synthetic oligonucleotide
gcacagatcctacgcaggaacaatggccctggtagtcttcagggataccaggtgg

SEQ ID NO: 406070 - DNA, 55 bp, Artificial
  Synthetic oligonucleotide
gcacagatgcagatgcaagcagaacttcaaagagcgagattagcaaccaacgcac

SEQ ID NO: 406071 - DNA, 60 bp, Artificial
  Synthetic oligonucleotide
gcacagatggactagaagctctggaccttaccactagtgcaggttatccctatgtagcac

SEQ ID NO: 406072 - DNA, 57 bp, Artificial
  Synthetic oligonucleotide
gcacagattagaagcgatttgcgcagctatgatagagtcctggggttattctgaact

SEQ ID NO: 406073 - DNA, 55 bp, Artificial
  Synthetic oligonucleotide
gcacagcaaaatttaagcagtggttctttgccggagggtatggctttgggaaggc

SEQ ID NO: 406074 - DNA, 60 bp, Artificial
  Synthetic oligonucleotide
gcacagcaagcagaagctggcacaaagaacagcggcccggtcagccaaaattttcctata

SEQ ID NO: 406075 - DNA, 60 bp, Artificial
  Synthetic oligonucleotide
gcacagcaggcagaagctgaccaaggaaaggtcagtcaaaattatcctatagtacagaat

SEQ ID NO: 406076 - DNA, 55 bp, Artificial
  Synthetic oligonucleotide
gcacagcatcagtgcgcaggtggtctttgtcgcgaatctcgatgagatgcagaaa

SEQ ID NO: 406077 - DNA, 55 bp, Artificial
  Synthetic oligonucleotide
gcacagccaacagtggtgaaactagccggagaatggttgatcaccccagtgggta

SEQ ID NO: 406078 - DNA, 60 bp, Artificial
  Synthetic oligonucleotide
gcacagccacagtaaaaatgatacttggagacatccaatacaaatctatgagcccggtag

SEQ ID NO: 406079 - DNA, 60 bp, Artificial
  Synthetic oligonucleotide
gcacagccagggttgacaagtgcagtgatagaggctctccccagaaacatggtcatcacc

SEQ ID NO: 406080 - DNA, 55 bp, Artificial
  Synthetic oligonucleotide
gcacagccagtgttggcttgtactggtgtccccaatggcactccgtccgtcagca

SEQ ID NO: 406081 - DNA, 55 bp, Artificial
  Synthetic oligonucleotide
gcacagccatgattgaggtattagaaagttcacagtcacaacaattacaaggttt

SEQ ID NO: 406082 - DNA, 55 bp, Artificial
  Synthetic oligonucleotide
gcacagccgaaacagaagttggacttgtcaattcagactgagtacccggctctgc

SEQ ID NO: 406083 - DNA, 60 bp, Artificial
  Synthetic oligonucleotide
gcacagcctcttgtccggtttgagaaagctggacttagggcagatcaaccttctgccagt

SEQ ID NO: 406084 - DNA, 51 bp, Artificial
  Synthetic oligonucleotide
gcacagcggcacctcagaaacggggtgtcaagtccaagtcgccaaccgtca

SEQ ID NO: 406085 - DNA, 60 bp, Artificial
  Synthetic oligonucleotide
gcacagctcatcaagcgagtggtcgaacgcttttacccagggatagtatttgatctaaat

SEQ ID NO: 406086 - DNA, 55 bp, Artificial
  Synthetic oligonucleotide
gcacagcttagtccgcgacttgaaagtatttcactgtcaccacagcagaagtcaa

SEQ ID NO: 406087 - DNA, 55 bp, Artificial
  Synthetic oligonucleotide
gcacagcttctagatctgggtacgagatgctgaaagtgcctaatgcattgacaga

SEQ ID NO: 406088 - DNA, 55 bp, Artificial
  Synthetic oligonucleotide
gcacaggactgaggcaatttgcgcacgaatgattgaagcatggggttatacagat

SEQ ID NO: 406089 - DNA, 59 bp, Artificial
  Synthetic oligonucleotide
gcacaggaggtgattataattttgcactaccagttggccaatggccatacatgacaggt

SEQ ID NO: 406090 - DNA, 55 bp, Artificial
  Synthetic oligonucleotide
gcacagggaattaccggttgacttctgctgtcacaagtttgaagagtgccaggtt

SEQ ID NO: 406091 - DNA, 55 bp, Artificial
  Synthetic oligonucleotide
gcacagggcctccctcatgtggaacgagctgagtaagatcaaccctaccagcgtg

SEQ ID NO: 406092 - DNA, 59 bp, Artificial
  Synthetic oligonucleotide
gcacagggcgccctaactttgtcactcccgaagcaacaggatagcttacctgatactaa

SEQ ID NO: 406093 - DNA, 56 bp, Artificial
  Synthetic oligonucleotide
gcacaggggtattaacagacaccagtagacccaaggataaaacaataggggaatgc

SEQ ID NO: 406094 - DNA, 55 bp, Artificial
  Synthetic oligonucleotide
gcacaggggtcctcacagacacgagcaggccatcagacaaatcaacaggagactg

SEQ ID NO: 406095 - DNA, 56 bp, Artificial
  Synthetic oligonucleotide
gcacagggtaactgggagcccctcggttgcggggtgcacctaggtacaataccagc

SEQ ID NO: 406096 - DNA, 55 bp, Artificial
  Synthetic oligonucleotide
gcacaggtacgcacccaggggaaggcaaaccagagcagcgcctctggctttagga

SEQ ID NO: 406097 - DNA, 53 bp, Artificial
  Synthetic oligonucleotide
gcacaggtggtcgaacaggatatattcctttgcaatctaccccacgtcctgag

SEQ ID NO: 406098 - DNA, 55 bp, Artificial
  Synthetic oligonucleotide
gcacaggttctttaaggcagcactcatgcattttgtcaatgacagagccttgctt

SEQ ID NO: 406099 - DNA, 51 bp, Artificial
  Synthetic oligonucleotide
gcacagtacggagcaacggccaaaggcattgcgttcgcaactggtctgtcg

SEQ ID NO: 406100 - DNA, 55 bp, Artificial
  Synthetic oligonucleotide
gcacagtactctggcaccatcaacctccacttcatgtttactggctccactgact

SEQ ID NO: 406101 - DNA, 55 bp, Artificial
  Synthetic oligonucleotide
gcacagtagcatttgtaacaaaagcattctccccaaactacacacttcttctggt

SEQ ID NO: 406102 - DNA, 55 bp, Artificial
  Synthetic oligonucleotide
gcacagtagtaagcagatatgcacatcacgtagtaaaatatatcatgcagcgcct

SEQ ID NO: 406103 - DNA, 55 bp, Artificial
  Synthetic oligonucleotide
gcacagtatgatcgcatattgaaacccaagggtgtaatcgtgctgtttggatcac

SEQ ID NO: 406104 - DNA, 60 bp, Artificial
  Synthetic oligonucleotide
gcacagtatgatgaagatagcccacggtttcttttggcacatgcttttcatactatccgt

SEQ ID NO: 406105 - DNA, 60 bp, Artificial
  Synthetic oligonucleotide
gcacagtatggaggaaatggcacacttggtgaagcaatttaccaagttgttgatactagt

SEQ ID NO: 406106 - DNA, 55 bp, Artificial
  Synthetic oligonucleotide
gcacagtcatggtgtgcaagctattgaaggacaagctcatccaagaaccctcggc

SEQ ID NO: 406107 - DNA, 59 bp, Artificial
  Synthetic oligonucleotide
gcacagtgtatgctaaagcgaaaggtcctgataaggtcacggaaacaagaaacttgcta

SEQ ID NO: 406108 - DNA, 59 bp, Artificial
  Synthetic oligonucleotide
gcacagtgtggagaggtccaaagtatgaggaagatgtcaacttagggagcggaacacga

SEQ ID NO: 406109 - DNA, 60 bp, Artificial
  Synthetic oligonucleotide
gcacagttaatgaagtctgcgaacgaaactaatatcttcaaactacgtgcgcagtattat

SEQ ID NO: 406110 - DNA, 58 bp, Artificial
  Synthetic oligonucleotide
gcacagttatctacactagacataaacccccaacccctctcattggaagagagtgtgt

SEQ ID NO: 406111 - DNA, 55 bp, Artificial
  Synthetic oligonucleotide
gcacagtttggccaattatattccgtctactgtagcaagggccatttcgtggtca

SEQ ID NO: 406112 - DNA, 57 bp, Artificial
  Synthetic oligonucleotide
gcacagttttaattgtggaggagaatttttctactgtaattcatcacaactgtttaa

SEQ ID NO: 406113 - DNA, 55 bp, Artificial
  Synthetic oligonucleotide
gcacataaagacatcctacttagaggtgcagttggatcagggaaatcgactggct

SEQ ID NO: 406114 - DNA, 51 bp, Artificial
  Synthetic oligonucleotide
gcacataatatgggacctaggtttgcagtccagttgcgtgttatgcgtccc

SEQ ID NO: 406115 - DNA, 60 bp, Artificial
  Synthetic oligonucleotide
gcacataatttgcgtggatgtagtccgatgcattggcagacacaaaatcatcagactctg

SEQ ID NO: 406116 - DNA, 55 bp, Artificial
  Synthetic oligonucleotide
gcacatactatgtctgccagagcaaccggaattgcctacgcatccgccggacaag

SEQ ID NO: 406117 - DNA, 55 bp, Artificial
  Synthetic oligonucleotide
gcacatactccgtgggccaatacactttcagagacgtgcaatactaggggctttg

SEQ ID NO: 406118 - DNA, 51 bp, Artificial
  Synthetic oligonucleotide
gcacatactgaatccaggtaagctctcggaacagttagctagggacggtgg

SEQ ID NO: 406119 - DNA, 56 bp, Artificial
  Synthetic oligonucleotide
gcacatacttaatgctactattgattgtctcatatgcatcagcatgttcagaactg

SEQ ID NO: 406120 - DNA, 55 bp, Artificial
  Synthetic oligonucleotide
gcacatagtcaccgtgaggtgacgcctactgaggcagtgaagtaccttagtgtcg

SEQ ID NO: 406121 - DNA, 60 bp, Artificial
  Synthetic oligonucleotide
gcacatatttctctactagaaaggacatgtgcctgcatatcacagtgtactcagttactg

SEQ ID NO: 406122 - DNA, 55 bp, Artificial
  Synthetic oligonucleotide
gcacatcaatatgtagcgctagcaactaaaggcactaaatggcaaccaggcaaca

SEQ ID NO: 406123 - DNA, 55 bp, Artificial
  Synthetic oligonucleotide
gcacatcaattcttacagaccacaatcccacatatagaacttatgtgttcctctg

SEQ ID NO: 406124 - DNA, 60 bp, Artificial
  Synthetic oligonucleotide
gcacatcaggagtttactattcaagatactacaacaaattttatccagtaatctgtgaga

SEQ ID NO: 406125 - DNA, 59 bp, Artificial
  Synthetic oligonucleotide
gcacatcatggaaaaaatctacaaggaggacttaaaagcacagtggtacgagctaagct

SEQ ID NO: 406126 - DNA, 55 bp, Artificial
  Synthetic oligonucleotide
gcacatccgatctgccagtggaagcttgtgggcatgttgcagccttaatgtgtca

SEQ ID NO: 406127 - DNA, 60 bp, Artificial
  Synthetic oligonucleotide
gcacatccggagtggagtccgctgttctgagaggattcctcattctaggtaaggaagata

SEQ ID NO: 406128 - DNA, 58 bp, Artificial
  Synthetic oligonucleotide
gcacatcctgagttggtcattggatccaagttgttgagtcttttttctcccttataaa

SEQ ID NO: 406129 - DNA, 55 bp, Artificial
  Synthetic oligonucleotide
gcacatcgatatgcaggtggcctgcatgagcttatcggcccacgaaagatcgacc

SEQ ID NO: 406130 - DNA, 55 bp, Artificial
  Synthetic oligonucleotide
gcacatctccttgcgcaaagtattattcgtgatcttggctatattgatgtaccgg

SEQ ID NO: 406131 - DNA, 55 bp, Artificial
  Synthetic oligonucleotide
gcacatctgggagtccaattctcaatgcacagggtgttgttgtgggcttgtacgg

SEQ ID NO: 406132 - DNA, 56 bp, Artificial
  Synthetic oligonucleotide
gcacatcttaagggcccatggactgttggtataaccaaatttaaaggcaggtggaa

SEQ ID NO: 406133 - DNA, 55 bp, Artificial
  Synthetic oligonucleotide
gcacatcttcacaaatctgtcgacaaactctgttgtctcacaatccctcattata

SEQ ID NO: 406134 - DNA, 53 bp, Artificial
  Synthetic oligonucleotide
gcacatcttggagagaccggaccctaccgacgttttccaaaataaggcgaacg

SEQ ID NO: 406135 - DNA, 55 bp, Artificial
  Synthetic oligonucleotide
gcacatctttctgggcactatcgctataatgcggatgtcaggcgaaggacccacc

SEQ ID NO: 406136 - DNA, 60 bp, Artificial
  Synthetic oligonucleotide
gcacatgaaagtatgcagactggaaggtgattgggttacctttagagaggtcttagctgc

SEQ ID NO: 406137 - DNA, 60 bp, Artificial
  Synthetic oligonucleotide
gcacatgaatcgatccattcaagtggtgtttaccacgtgtgccaaagacgagttgcgtcc

SEQ ID NO: 406138 - DNA, 55 bp, Artificial
  Synthetic oligonucleotide
gcacatgaggaagatgaagactgggtaggctttccagtcgagccgctggtaccgc

SEQ ID NO: 406139 - DNA, 55 bp, Artificial
  Synthetic oligonucleotide
gcacatgctcacaaaccagtgggtggtgtgtcgtaatgggcaactctgcagcgga

SEQ ID NO: 406140 - DNA, 55 bp, Artificial
  Synthetic oligonucleotide
gcacatggaccggagtggacactaatagtggagttacgagcgcttgcccctatgc

SEQ ID NO: 406141 - DNA, 60 bp, Artificial
  Synthetic oligonucleotide
gcacatggggtgtcatgccctcagtcccaatgcccatattgctttacccactgtgaaccc

SEQ ID NO: 406142 - DNA, 59 bp, Artificial
  Synthetic oligonucleotide
gcacatggggttgcgaagaatttgggtgcttagctgtaagcgatggatgtgtttacggg

SEQ ID NO: 406143 - DNA, 55 bp, Artificial
  Synthetic oligonucleotide
gcacatggggtttcatgccctcagtcccaatgtccatactgcttcactcattgtg

SEQ ID NO: 406144 - DNA, 55 bp, Artificial
  Synthetic oligonucleotide
gcacatgggtagaggcggtgggcgtgagtaccacatttccagcctccccgaggaa

SEQ ID NO: 406145 - DNA, 60 bp, Artificial
  Synthetic oligonucleotide
gcacatgggtgtgacacaattgctaggtgcaattgcaacactggagtgtatttctgcaag

SEQ ID NO: 406146 - DNA, 60 bp, Artificial
  Synthetic oligonucleotide
gcacatggtgacttcactcttacagcaccctggtgcaagactgggtgccctgaattttgg

SEQ ID NO: 406147 - DNA, 60 bp, Artificial
  Synthetic oligonucleotide
gcacatggtgtgcgcagattcaagggccttgacatggttgccattcggcgcccaagtgct

SEQ ID NO: 406148 - DNA, 54 bp, Artificial
  Synthetic oligonucleotide
gcacatggtttacatattttctgtctgttgcataactaacagctctgattacat

SEQ ID NO: 406149 - DNA, 60 bp, Artificial
  Synthetic oligonucleotide
gcacatgtatggagttgaacctgaaaactacagtatgattcgttttgttgatccactcac

SEQ ID NO: 406150 - DNA, 60 bp, Artificial
  Synthetic oligonucleotide
gcacatgtgcgccgtagtttggctgccatcccgtcattcacagaggagggtctcttggac

SEQ ID NO: 406151 - DNA, 55 bp, Artificial
  Synthetic oligonucleotide
gcacatgttgcaatgactaatccagtgattgaacaccagaggttgagggccctct

SEQ ID NO: 406152 - DNA, 53 bp, Artificial
  Synthetic oligonucleotide
gcacattaaaaattggtgacttgcaggggctagtattaagacagctgatgaac

SEQ ID NO: 406153 - DNA, 60 bp, Artificial
  Synthetic oligonucleotide
gcacattaagactaagtgctatatgtggcctaagccacagttcaagagactgaccgcgac

SEQ ID NO: 406154 - DNA, 59 bp, Artificial
  Synthetic oligonucleotide
gcacattaatgagttgtcccataggagttgccccctctcctagtaacagccgctttgaa

SEQ ID NO: 406155 - DNA, 54 bp, Artificial
  Synthetic oligonucleotide
gcacattactaaggttaacggtaggctgtactataaccaggtgtttagaggttg

SEQ ID NO: 406156 - DNA, 55 bp, Artificial
  Synthetic oligonucleotide
gcacattactacatgtaccagatacgtgcatgttaattgaaccacccaaattgcg

SEQ ID NO: 406157 - DNA, 55 bp, Artificial
  Synthetic oligonucleotide
gcacattatgctatcatagggccagggctccaagcgaaagcaaccagagaagccc

SEQ ID NO: 406158 - DNA, 55 bp, Artificial
  Synthetic oligonucleotide
gcacattcaaatatcaatccgaaccatcggatatgacgacgactggaatggggag

SEQ ID NO: 406159 - DNA, 55 bp, Artificial
  Synthetic oligonucleotide
gcacattcagattgcaggcaacggttcgattgcaaggcgcatcgaaaagcctctc

SEQ ID NO: 406160 - DNA, 55 bp, Artificial
  Synthetic oligonucleotide
gcacattccagggcaggtccgcaacatgctagaagtggttcaagtggaatcaatg

SEQ ID NO: 406161 - DNA, 60 bp, Artificial
  Synthetic oligonucleotide
gcacattctattgctattgaactatgtgtaccaggtttccatggctgggctacagcagca

SEQ ID NO: 406162 - DNA, 59 bp, Artificial
  Synthetic oligonucleotide
gcacattgacaaaggaactgctaaaggataacaatttcaatattgtgaatgccctatcc

SEQ ID NO: 406163 - DNA, 55 bp, Artificial
  Synthetic oligonucleotide
gcacattgagcaccacagagtcaacacatgctgtgtcaccaacagctgaaccctt

SEQ ID NO: 406164 - DNA, 60 bp, Artificial
  Synthetic oligonucleotide
gcacattgcgagtatgagaagaaactatttcacagcggaagtatcccattgcagggctac

SEQ ID NO: 406165 - DNA, 52 bp, Artificial
  Synthetic oligonucleotide
gcacattgctacgagtttcgtgatctgagagtggcagcgttcaagggggacg

SEQ ID NO: 406166 - DNA, 52 bp, Artificial
  Synthetic oligonucleotide
gcacattggaatattctcaatctcgcgtttgaaggccacgttgggtggaatg

SEQ ID NO: 406167 - DNA, 53 bp, Artificial
  Synthetic oligonucleotide
gcacattgtaacattagtaaagcaaaatgggacaaaactttaaaacaggtagt

SEQ ID NO: 406168 - DNA, 59 bp, Artificial
  Synthetic oligonucleotide
gcacattgtaacattagtagagcaaaatggaataacactttaagacagatagtggaaaa

SEQ ID NO: 406169 - DNA, 58 bp, Artificial
  Synthetic oligonucleotide
gcacattgtaaccttagtaaatcagattggaacaacgctttaagacaggtagcgagaa

SEQ ID NO: 406170 - DNA, 59 bp, Artificial
  Synthetic oligonucleotide
gcacattgtaaccttagtgaagcagattgggataacactttaagacagatagcgagaaa

SEQ ID NO: 406171 - DNA, 56 bp, Artificial
  Synthetic oligonucleotide
gcacattgtaggatgagaggtaattggacaggagcagttaaggagataaggagcag

SEQ ID NO: 406172 - DNA, 60 bp, Artificial
  Synthetic oligonucleotide
gcacatttccatcaattgctaccccgaagtgttttgtcatgagtggggttgatattgagt

SEQ ID NO: 406173 - DNA, 58 bp, Artificial
  Synthetic oligonucleotide
gcacatttgttcaaaggcagggattacgtgcattgctgtatgcccaatctggacatac

SEQ ID NO: 406174 - DNA, 60 bp, Artificial
  Synthetic oligonucleotide
gcaccaaaatcagctatgccgaacattacagtgacaaagggaggagacactatttacatt

SEQ ID NO: 406175 - DNA, 55 bp, Artificial
  Synthetic oligonucleotide
gcaccaaactctgagtatggagtatgttacccagggtatttctccgactatgagg

SEQ ID NO: 406176 - DNA, 58 bp, Artificial
  Synthetic oligonucleotide
gcaccaaactgagaatagcaacaggactaagaaacgtcccctctattcaatccagagg

SEQ ID NO: 406177 - DNA, 56 bp, Artificial
  Synthetic oligonucleotide
gcaccaaatgaaagactgtactgaaagacaggctaattttttagggagactttggc

SEQ ID NO: 406178 - DNA, 55 bp, Artificial
  Synthetic oligonucleotide
gcaccaaatgctgaaagtctgcgaggcattgtgcgatttgcagctgctgcttttg

SEQ ID NO: 406179 - DNA, 55 bp, Artificial
  Synthetic oligonucleotide
gcaccaaattcaccaagaccggcgagtttcagacgaacgggttggggtatcactc

SEQ ID NO: 406180 - DNA, 59 bp, Artificial
  Synthetic oligonucleotide
gcaccaaattgtagaaccgctaactaatgaggttatatataattacattcctgagagat

SEQ ID NO: 406181 - DNA, 59 bp, Artificial
  Synthetic oligonucleotide
gcaccaacaatgtcatattcaccgacctccagatacttcaggtctacgggggcacccgc

SEQ ID NO: 406182 - DNA, 55 bp, Artificial
  Synthetic oligonucleotide
gcaccaacatcagagcaagattcatcaaggcaatagcatgaaccgttccgtacaa

SEQ ID NO: 406183 - DNA, 57 bp, Artificial
  Synthetic oligonucleotide
gcaccaacatttattaccatgcatatagtgaccgcctgctaacagttgggcatccat

SEQ ID NO: 406184 - DNA, 55 bp, Artificial
  Synthetic oligonucleotide
gcaccaactgcggatgaggaacgtggcgccctctgaggtttcgtctgaggtcagc

SEQ ID NO: 406185 - DNA, 60 bp, Artificial
  Synthetic oligonucleotide
gcaccaagctagcggcgccgaccgtatagatatatgcgaccgatatctatacctaggaag

SEQ ID NO: 406186 - DNA, 55 bp, Artificial
  Synthetic oligonucleotide
gcaccaagtcgagttagcaaattaactggaaggggattgggaatccaatcagaag

SEQ ID NO: 406187 - DNA, 58 bp, Artificial
  Synthetic oligonucleotide
gcaccaatacccatataatggccacggaagcctctaattatgcccagtatcgggttgt

SEQ ID NO: 406188 - DNA, 55 bp, Artificial
  Synthetic oligonucleotide
gcaccaatactgcctggtttccaccctactccagcaattcacatccctggcgagg

SEQ ID NO: 406189 - DNA, 60 bp, Artificial
  Synthetic oligonucleotide
gcaccaatatcacttgagaaaagacgtgcacagatatcggcattgctggcgatgttacag

SEQ ID NO: 406190 - DNA, 55 bp, Artificial
  Synthetic oligonucleotide
gcaccaatcccttgtcggcaaacagtctccattccaaaatgcctacaatgtcaaa

SEQ ID NO: 406191 - DNA, 60 bp, Artificial
  Synthetic oligonucleotide
gcaccaatcgagttaatatacgcatgccgatcagccaaagagtttgctgcgttacaagat

SEQ ID NO: 406192 - DNA, 54 bp, Artificial
  Synthetic oligonucleotide
gcaccaattgaattaatatatgcatgccgatcagctaaagaatttgctatatta

SEQ ID NO: 406193 - DNA, 55 bp, Artificial
  Synthetic oligonucleotide
gcaccaattggcatatattggtggtacaaatgcaaatgtggggtataaccacact

SEQ ID NO: 406194 - DNA, 55 bp, Artificial
  Synthetic oligonucleotide
gcaccacaaacccattgcacaccacaacttccattgacaaccaccacgcagactg

SEQ ID NO: 406195 - DNA, 59 bp, Artificial
  Synthetic oligonucleotide
gcaccacagaagatactaaccaaaatcatgcctaaggccacatctaagacgcgtcattt

SEQ ID NO: 406196 - DNA, 55 bp, Artificial
  Synthetic oligonucleotide
gcaccacagtaatcctctgtaacgatgtacgcaggatctgtgacactagagccac

SEQ ID NO: 406197 - DNA, 60 bp, Artificial
  Synthetic oligonucleotide
gcaccacatggagaagatcatgatattgagcgaaatgctgtgagtgctttaagaattgta

SEQ ID NO: 406198 - DNA, 55 bp, Artificial
  Synthetic oligonucleotide
gcaccaccttccaggtactgcgcaagaactacaatacagttataggaacttccgt

SEQ ID NO: 406199 - DNA, 55 bp, Artificial
  Synthetic oligonucleotide
gcaccaccttccaggtgttgcgcgacaagtataaccacatgataggcttcccctt

SEQ ID NO: 406200 - DNA, 55 bp, Artificial
  Synthetic oligonucleotide
gcaccacgtgctgccgttcctatttggtggcgggtcgaacggtaagagcgtgctc

SEQ ID NO: 406201 - DNA, 54 bp, Artificial
  Synthetic oligonucleotide
gcaccactaagcctacagtaatattctcagccttaattccaaacaattcaccta

SEQ ID NO: 406202 - DNA, 55 bp, Artificial
  Synthetic oligonucleotide
gcaccactagtgcggcacagattaaggtctacgccaacattgccccaacctacgt

SEQ ID NO: 406203 - DNA, 59 bp, Artificial
  Synthetic oligonucleotide
gcaccactcaatcattgttaaataagtttgctagtacgcgccaaatagaaggaacacca

SEQ ID NO: 406204 - DNA, 56 bp, Artificial
  Synthetic oligonucleotide
gcaccactcctggagttgcaaaggtgagtcgccgtttgaattactcccctcgtttg

SEQ ID NO: 406205 - DNA, 55 bp, Artificial
  Synthetic oligonucleotide
gcaccactgacattgcgcaatctagtatctgcttacaaaaccagatatgacgaga

SEQ ID NO: 406206 - DNA, 55 bp, Artificial
  Synthetic oligonucleotide
gcaccactggaaaggataaacgctgctacaaaaggacatatgtcccctgccatat

SEQ ID NO: 406207 - DNA, 55 bp, Artificial
  Synthetic oligonucleotide
gcaccactgtcaaacttgggtcaacagacacattagttttctttgggccacttca

SEQ ID NO: 406208 - DNA, 55 bp, Artificial
  Synthetic oligonucleotide
gcaccacttccggagtttccaggaacggatcatccgacatgccttgccctaggcc

SEQ ID NO: 406209 - DNA, 54 bp, Artificial
  Synthetic oligonucleotide
gcaccagaagtggtggataagtgtactattgtccctgacattggtcaggtccca

SEQ ID NO: 406210 - DNA, 55 bp, Artificial
  Synthetic oligonucleotide
gcaccagaagttgccatatgtctttctcccgaagaccgtttagcccctacgttaa

SEQ ID NO: 406211 - DNA, 60 bp, Artificial
  Synthetic oligonucleotide
gcaccagagagcgcaagcttacgtatggctgcttgtgggcgtttcgcactaagaaagtgc

SEQ ID NO: 406212 - DNA, 55 bp, Artificial
  Synthetic oligonucleotide
gcaccagattctatagagtcaccatatgctccatgggtgtttgcctgtgcacctg

SEQ ID NO: 406213 - DNA, 55 bp, Artificial
  Synthetic oligonucleotide
gcaccagcacatggaggtgaggttccccatcctcgtgcagttctctagctacgtg

SEQ ID NO: 406214 - DNA, 55 bp, Artificial
  Synthetic oligonucleotide
gcaccagcctattttattatggtggcagctccagacttcttactgtgggacaccc

SEQ ID NO: 406215 - DNA, 57 bp, Artificial
  Synthetic oligonucleotide
gcaccaggaaatttaatagcagaagtgtcggaacgaacacgcgagaactttatccaa

SEQ ID NO: 406216 - DNA, 55 bp, Artificial
  Synthetic oligonucleotide
gcaccaggattaccgagtcttcgaagtaggcataattagagaactaggagtgggc

SEQ ID NO: 406217 - DNA, 55 bp, Artificial
  Synthetic oligonucleotide
gcaccaggcaactatcccgctctctggagttatgcgatgggtgtagcagttgtac

SEQ ID NO: 406218 - DNA, 60 bp, Artificial
  Synthetic oligonucleotide
gcaccaggcgcccaattacccacatttatagcactcctttgctgcgctaagtctgcacgc

SEQ ID NO: 406219 - DNA, 52 bp, Artificial
  Synthetic oligonucleotide
gcaccaggtcttaatccccacgatgtcattatcctcagtaacggcaacgccc

SEQ ID NO: 406220 - DNA, 60 bp, Artificial
  Synthetic oligonucleotide
gcaccaggtttcgaacctaagcctatggaatgacaaacctgtatgttgacttcagcactg

SEQ ID NO: 406221 - DNA, 55 bp, Artificial
  Synthetic oligonucleotide
gcaccagtaactgctggcagctctagttgggtagatcgtactgtttgggaatctg

SEQ ID NO: 406222 - DNA, 60 bp, Artificial
  Synthetic oligonucleotide
gcaccagtctcttgttggcaagcaatctccattccagaacgcctataacgtcaagggcaa

SEQ ID NO: 406223 - DNA, 55 bp, Artificial
  Synthetic oligonucleotide
gcaccagttgaagaaactgtctcagacgaagttcccgggtatgtgttttctcccg

SEQ ID NO: 406224 - DNA, 55 bp, Artificial
  Synthetic oligonucleotide
gcaccatagaattaaccaccaggtggtgccaccccttgcaacgtcaagggccaaa

SEQ ID NO: 406225 - DNA, 55 bp, Artificial
  Synthetic oligonucleotide
gcaccatagagggttggatcttggggaatcctaaatgcgacttattgcttggcga

SEQ ID NO: 406226 - DNA, 55 bp, Artificial
  Synthetic oligonucleotide
gcaccatatggagcttcctacaggagttcatgctggtacagacttggaaggtaac

SEQ ID NO: 406227 - DNA, 60 bp, Artificial
  Synthetic oligonucleotide
gcaccatcaaagtgacgtgaactgcccgcatgctcttcggctccgagcttaaacgagcct

SEQ ID NO: 406228 - DNA, 60 bp, Artificial
  Synthetic oligonucleotide
gcaccatcagttggattccgccaacagatcaaggtgcactcactgagtggattgtcactc

SEQ ID NO: 406229 - DNA, 55 bp, Artificial
  Synthetic oligonucleotide
gcaccatcctgaacatttgtggcagcagtgttaaccatattaccacttggtgtaa

SEQ ID NO: 406230 - DNA, 55 bp, Artificial
  Synthetic oligonucleotide
gcaccatcgtaatgtgagcttcattattctaactggagacagtaggcagtctgtg

SEQ ID NO: 406231 - DNA, 60 bp, Artificial
  Synthetic oligonucleotide
gcaccatcgtcctagtcacgaggttcgcttgcgattctctgatttctacaatgtcggaga

SEQ ID NO: 406232 - DNA, 60 bp, Artificial
  Synthetic oligonucleotide
gcaccatggtggttccgtggattagtaacaccagttatcgcagaactgtcaaagatgatt

SEQ ID NO: 406233 - DNA, 55 bp, Artificial
  Synthetic oligonucleotide
gcaccatggttgcaccatggatctcaagcacatacttccgcaggactaaagcaga

SEQ ID NO: 406234 - DNA, 55 bp, Artificial
  Synthetic oligonucleotide
gcaccattatcataacaggcgaatcagtttccatagtaggttgtgtgtattcaga

SEQ ID NO: 406235 - DNA, 60 bp, Artificial
  Synthetic oligonucleotide
gcaccattgcgctgtgttaaggggccacattcagctggtgctggattgggctcaattttc

SEQ ID NO: 406236 - DNA, 55 bp, Artificial
  Synthetic oligonucleotide
gcaccattgtgtatggacacaatactggaaatgcccaattggtgtcgaggaggcc

SEQ ID NO: 406237 - DNA, 60 bp, Artificial
  Synthetic oligonucleotide
gcaccattgttgtcagcaggcatatttggtgctaaaccacttcagtctttacaagtgtgc

SEQ ID NO: 406238 - DNA, 51 bp, Artificial
  Synthetic oligonucleotide
gcaccatttcatcagaacacgactcttcgaatgcgtggattgacatcgttt

SEQ ID NO: 406239 - DNA, 55 bp, Artificial
  Synthetic oligonucleotide
gcaccatttctcggacgcagctgaagcatatatcgagatgagatgtgcaagtggg

SEQ ID NO: 406240 - DNA, 55 bp, Artificial
  Synthetic oligonucleotide
gcacccaaacacctacgtgcgttatcatcgcggtatccatgccctgtaccaggcg

SEQ ID NO: 406241 - DNA, 55 bp, Artificial
  Synthetic oligonucleotide
gcacccaatatggtttgaggcattagggaaggttttagatcagatagggtaccct

SEQ ID NO: 406242 - DNA, 55 bp, Artificial
  Synthetic oligonucleotide
gcacccaatctgcaatagatcagatcacaggcaaattgaatcgtctgatcgacaa

SEQ ID NO: 406243 - DNA, 55 bp, Artificial
  Synthetic oligonucleotide
gcacccaccaaggcaaagagacaagtggtgacgagagaaagaagagcagtgacaa

SEQ ID NO: 406244 - DNA, 55 bp, Artificial
  Synthetic oligonucleotide
gcacccacctagaaaacaaagtcatcatagtagcagtgcatgtagctagtggatt

SEQ ID NO: 406245 - DNA, 55 bp, Artificial
  Synthetic oligonucleotide
gcacccactatcgaagccgaatcacctggatctagtacgctggttcctagcctgt

SEQ ID NO: 406246 - DNA, 52 bp, Artificial
  Synthetic oligonucleotide
gcacccactgagccagacgttagtagcaaccggttttacaccctagaatcgg

SEQ ID NO: 406247 - DNA, 55 bp, Artificial
  Synthetic oligonucleotide
gcacccagaataacttctcactcggccttgaatgcgtgattatggaagagtgtgg

SEQ ID NO: 406248 - DNA, 55 bp, Artificial
  Synthetic oligonucleotide
gcacccagcgcaagcagggcctcatccaccaggccagataagagaaccaagggga

SEQ ID NO: 406249 - DNA, 55 bp, Artificial
  Synthetic oligonucleotide
gcacccagtacaaacgcctgaagtcggcactaaagagtcgaaaagacagagtgac

SEQ ID NO: 406250 - DNA, 55 bp, Artificial
  Synthetic oligonucleotide
gcacccagtcaccaagtacatcatgacatgtatgtcggccgacctggaggtcgtc

SEQ ID NO: 406251 - DNA, 55 bp, Artificial
  Synthetic oligonucleotide
gcacccagtttcttccagcgcgccagacgcaagtttaggcaagccaccaagccat

SEQ ID NO: 406252 - DNA, 55 bp, Artificial
  Synthetic oligonucleotide
gcacccatgtctggtttacagagtatgctactaagggcaattggcatcgaagcag

SEQ ID NO: 406253 - DNA, 60 bp, Artificial
  Synthetic oligonucleotide
gcacccattgggcatactttggcacatgcgagtctcccacctaattgatgaaatggtctc

SEQ ID NO: 406254 - DNA, 52 bp, Artificial
  Synthetic oligonucleotide
gcacccatttggagggacaaatcatctgtgtagcagtacacgtggccagtgg

SEQ ID NO: 406255 - DNA, 57 bp, Artificial
  Synthetic oligonucleotide
gcaccccaactcaaccccattgatggaccattgcctgaggataacgaaccaagcggg

SEQ ID NO: 406256 - DNA, 55 bp, Artificial
  Synthetic oligonucleotide
gcacccccagtgcaggttgccctagataaagcctgtgtcccctaccttactaagg

SEQ ID NO: 406257 - DNA, 60 bp, Artificial
  Synthetic oligonucleotide
gcacccccatgcacaataacatgctggttcactaaatcaggtgagtggctccttggtata

SEQ ID NO: 406258 - DNA, 56 bp, Artificial
  Synthetic oligonucleotide
gcacccccgcctttcgcgtcttcaagctcgccgttccaaccaccgagcttcgcgac

SEQ ID NO: 406259 - DNA, 54 bp, Artificial
  Synthetic oligonucleotide
gcacccctaaaattaatgactaagcctctcttttgtttagattagctttgttaa

SEQ ID NO: 406260 - DNA, 53 bp, Artificial
  Synthetic oligonucleotide
gcacccctacagaacttgggcttacctagggagttacaccaccgagccaaagg

SEQ ID NO: 406261 - DNA, 55 bp, Artificial
  Synthetic oligonucleotide
gcacccctagacactccctccaacgcttagctgcacttcagctgtgcactaacgc

SEQ ID NO: 406262 - DNA, 55 bp, Artificial
  Synthetic oligonucleotide
gcacccctgtttattatggggctcctagtgggtcccttacatctagtgattctca

SEQ ID NO: 406263 - DNA, 55 bp, Artificial
  Synthetic oligonucleotide
gcaccccttgctactgtaaagcttgtgcctatcattgtatgcagtgtttccttac

SEQ ID NO: 406264 - DNA, 55 bp, Artificial
  Synthetic oligonucleotide
gcacccgaagtgattcaatcaatgttgtattgggactttctttcgaatcgacaag

SEQ ID NO: 406265 - DNA, 53 bp, Artificial
  Synthetic oligonucleotide
gcacccgattgggagccctactcgccgaggcaaatacattgctcggcagggac

SEQ ID NO: 406266 - DNA, 55 bp, Artificial
  Synthetic oligonucleotide
gcacccggatgcacaagcattcttcaaaccactaatgagtgcataccaaccaagc

SEQ ID NO: 406267 - DNA, 52 bp, Artificial
  Synthetic oligonucleotide
gcacccggggtgtggcgaaggctgtagactttgtaccagttgagtccctcga

SEQ ID NO: 406268 - DNA, 57 bp, Artificial
  Synthetic oligonucleotide
gcacccgtatagtaccccagaggactactatcgattgcttctcaaagtttaaggcta

SEQ ID NO: 406269 - DNA, 55 bp, Artificial
  Synthetic oligonucleotide
gcacccgtgaattggggacccggagagacgaatgactcaacaacagtcgaaccag

SEQ ID NO: 406270 - DNA, 55 bp, Artificial
  Synthetic oligonucleotide
gcaccctatctgtcaacatggaatggaggacgaagacagagaagtgttggtctgg

SEQ ID NO: 406271 - DNA, 55 bp, Artificial
  Synthetic oligonucleotide
gcaccctatgagcctacatggaatggataccgagggagaagtgttaaagtggcag

SEQ ID NO: 406272 - DNA, 55 bp, Artificial
  Synthetic oligonucleotide
gcaccctgacatgcttaaaatggctgctgaccgttatggaaatagttgctggttc

SEQ ID NO: 406273 - DNA, 52 bp, Artificial
  Synthetic oligonucleotide
gcaccctggaaaggtgagcaagaaggactctaagaagaagccgccagcagcg

SEQ ID NO: 406274 - DNA, 56 bp, Artificial
  Synthetic oligonucleotide
gcaccctgttcataggggcctcttcctaccactccgacccctgcgggtccaatcac

SEQ ID NO: 406275 - DNA, 55 bp, Artificial
  Synthetic oligonucleotide
gcacccttagacacactcttagctggtaaggtctgtgtggatgattttaacaatc

SEQ ID NO: 406276 - DNA, 55 bp, Artificial
  Synthetic oligonucleotide
gcacccttatctcgcaagaagagacgccgacacaactactcagagtccagctccg

SEQ ID NO: 406277 - DNA, 55 bp, Artificial
  Synthetic oligonucleotide
gcacccttatgatcgtcgctgtgccagagtgccaattcccaggtgagcctagtgc

SEQ ID NO: 406278 - DNA, 55 bp, Artificial
  Synthetic oligonucleotide
gcacccttgtctgctcgatcgaactgggaaactgaagggttataggagtggcgtc

SEQ ID NO: 406279 - DNA, 54 bp, Artificial
  Synthetic oligonucleotide
gcacccttgtgagtaactgctgtgcaccctgccttagtttctatccacgccccg

SEQ ID NO: 406280 - DNA, 59 bp, Artificial
  Synthetic oligonucleotide
gcaccctttttgagtaaggctgtacgttgtggccctataataccatccgtcaagcatca

SEQ ID NO: 406281 - DNA, 55 bp, Artificial
  Synthetic oligonucleotide
gcaccgaagcgcatggagacacctagcattagatttccaccagtggtggtgcgaa

SEQ ID NO: 406282 - DNA, 55 bp, Artificial
  Synthetic oligonucleotide
gcaccgaatttaagcctagatcagcactaaaatgcaagggtttccatgtcccggc

SEQ ID NO: 406283 - DNA, 60 bp, Artificial
  Synthetic oligonucleotide
gcaccgactctagaggaaattcacggagctagccggcttcagattgtgccatataccggc

SEQ ID NO: 406284 - DNA, 60 bp, Artificial
  Synthetic oligonucleotide
gcaccgagagggtgactgtgagcattgaccgtttcttaagggtccgagatcagctgggga

SEQ ID NO: 406285 - DNA, 60 bp, Artificial
  Synthetic oligonucleotide
gcaccgagagggtggtagtgagcattgatcgtttcctgagagttcgagatcaacgaggga

SEQ ID NO: 406286 - DNA, 55 bp, Artificial
  Synthetic oligonucleotide
gcaccgagccaatgaaactagaggatgcagtgtacggaactgaaggccttgaagc

SEQ ID NO: 406287 - DNA, 55 bp, Artificial
  Synthetic oligonucleotide
gcaccgaggagaaaagggtgctggaagtgtggtcaggaaggacaccagatgaggg

SEQ ID NO: 406288 - DNA, 55 bp, Artificial
  Synthetic oligonucleotide
gcaccgaggtgcaagccacttctcaaggatgaggtctcctttagcgtggggctca

SEQ ID NO: 406289 - DNA, 60 bp, Artificial
  Synthetic oligonucleotide
gcaccgagtccatacaatatcagagtagaatgtataggatggtccagcacttcatgccat

SEQ ID NO: 406290 - DNA, 55 bp, Artificial
  Synthetic oligonucleotide
gcaccgataggtaaatgagacaccgatacatcgggtcctctattggggacattgg

SEQ ID NO: 406291 - DNA, 51 bp, Artificial
  Synthetic oligonucleotide
gcaccgattgggtggtgggcgctgcaggggtgcatcacagcgtagcagagg

SEQ ID NO: 406292 - DNA, 57 bp, Artificial
  Synthetic oligonucleotide
gcaccgatttgaaataattgaaggaagagaccgaacgatggcctggactgtggtaaa

SEQ ID NO: 406293 - DNA, 55 bp, Artificial
  Synthetic oligonucleotide
gcaccgcaagtatggcgtgatgtcattcgcagtgattcacgatagcttcgggacc

SEQ ID NO: 406294 - DNA, 55 bp, Artificial
  Synthetic oligonucleotide
gcaccgcaccagtgagcgcgcgattcggcgtatgcgaaagaacctcaccgaagag

SEQ ID NO: 406295 - DNA, 55 bp, Artificial
  Synthetic oligonucleotide
gcaccgcccacgttacaaagataagtataacgatgagcgataatgaccgtgatag

SEQ ID NO: 406296 - DNA, 60 bp, Artificial
  Synthetic oligonucleotide
gcaccgcccatgggatcaccatgcgccctagggctgttctgttgttgttcctcgtgcttc

SEQ ID NO: 406297 - DNA, 55 bp, Artificial
  Synthetic oligonucleotide
gcaccggagtaccaactcacttagcaacagactacgagctcaaggagatagtggg

SEQ ID NO: 406298 - DNA, 60 bp, Artificial
  Synthetic oligonucleotide
gcaccggagttaaggatggtaacctcaaataagttcatgtatgatcctagccctatatca

SEQ ID NO: 406299 - DNA, 55 bp, Artificial
  Synthetic oligonucleotide
gcaccggataatgaaactcattataggatatggggatgtgagaaggacatcctag

SEQ ID NO: 406300 - DNA, 55 bp, Artificial
  Synthetic oligonucleotide
gcaccggatatgccagataccgaaacccctcagtattcgcatatagaggaggctc

SEQ ID NO: 406301 - DNA, 55 bp, Artificial
  Synthetic oligonucleotide
gcaccggatttgacatgtcacacaccctggcataggcgatgtcaaatagccaggt

SEQ ID NO: 406302 - DNA, 56 bp, Artificial
  Synthetic oligonucleotide
gcaccggctcgtagaatgttttccgagcaccagtaccattgcgtttgccccatgcg

SEQ ID NO: 406303 - DNA, 55 bp, Artificial
  Synthetic oligonucleotide
gcaccgggagagaggccctctggcatgttcgactcatccgtcctctgtgagtgct

SEQ ID NO: 406304 - DNA, 55 bp, Artificial
  Synthetic oligonucleotide
gcaccgggtgcggtcgaattattactcattcgatagttgttgttgccagctacca

SEQ ID NO: 406305 - DNA, 53 bp, Artificial
  Synthetic oligonucleotide
gcaccggtgcacactgcgactcgactgcccgcctcgtaaacccctagactcgt

SEQ ID NO: 406306 - DNA, 55 bp, Artificial
  Synthetic oligonucleotide
gcaccgtaaacagtccacacatcacgctcatagataatcacatcagtagcgctga

SEQ ID NO: 406307 - DNA, 55 bp, Artificial
  Synthetic oligonucleotide
gcaccgtacattgctgaaagtgcactccgcaagttgtacttggataaagatgcag

SEQ ID NO: 406308 - DNA, 50 bp, Artificial
  Synthetic oligonucleotide
gcaccgtataggtgtttactctccgaaccaccacttttccgcagtcatct

SEQ ID NO: 406309 - DNA, 51 bp, Artificial
  Synthetic oligonucleotide
gcaccgtgccctcagtaatctacaacttgcggcagccaggggaacccactg

SEQ ID NO: 406310 - DNA, 57 bp, Artificial
  Synthetic oligonucleotide
gcaccgttctacacgactaagtaaaccattgattcgtcgagtatttgataatgtagt

SEQ ID NO: 406311 - DNA, 55 bp, Artificial
  Synthetic oligonucleotide
gcaccgttgttggtggttcactacgctattacgatgtaatggctaacggcggcac

SEQ ID NO: 406312 - DNA, 55 bp, Artificial
  Synthetic oligonucleotide
gcacctaactgtgatgtgagtgatgtcaccaaattatatttgggcggtatgtctt

SEQ ID NO: 406313 - DNA, 55 bp, Artificial
  Synthetic oligonucleotide
gcacctaagatcctcagaggcctcttgacaatgatgagtggtgcaggatcctccg

SEQ ID NO: 406314 - DNA, 55 bp, Artificial
  Synthetic oligonucleotide
gcacctaaggattgtactgataaagaccataaaacctacttgagtgaggcttcat

SEQ ID NO: 406315 - DNA, 55 bp, Artificial
  Synthetic oligonucleotide
gcacctaatagcctttgactactcgggttacgacgctagtctcagcccagtgtgg

SEQ ID NO: 406316 - DNA, 52 bp, Artificial
  Synthetic oligonucleotide
gcacctaattaaattccgtaataatatcggtccaataacgcacgcaaagatt

SEQ ID NO: 406317 - DNA, 53 bp, Artificial
  Synthetic oligonucleotide
gcacctacacgaacgggcggttcgtgtccttcccgaaaatcgggagtagcagg

SEQ ID NO: 406318 - DNA, 55 bp, Artificial
  Synthetic oligonucleotide
gcacctacagtgcagaaaggggtaggcgtggattcatcctttacttgggagcagt

SEQ ID NO: 406319 - DNA, 60 bp, Artificial
  Synthetic oligonucleotide
gcacctaccttctgtgtttcacctacgtggcaagcagaattacacatgtcggtgtgagac

SEQ ID NO: 406320 - DNA, 55 bp, Artificial
  Synthetic oligonucleotide
gcacctacgcctgtttcaccacgtttaatggctgtcagacgttcttgcttataat

SEQ ID NO: 406321 - DNA, 55 bp, Artificial
  Synthetic oligonucleotide
gcacctagagcattaaaatgacaatccagatcgctttcagcatagatatagctgg

SEQ ID NO: 406322 - DNA, 60 bp, Artificial
  Synthetic oligonucleotide
gcacctagtgcccgcgcatacatgtgtcgacagcgcagatattcagaatctaacacaagt

SEQ ID NO: 406323 - DNA, 60 bp, Artificial
  Synthetic oligonucleotide
gcacctataacattgcgtcataccgcaaattcaaccaaccaaaaggttcgtgatgctgat

SEQ ID NO: 406324 - DNA, 58 bp, Artificial
  Synthetic oligonucleotide
gcacctataatgttctcaaacaagatggcaaggctaggaaaagggtacatgttcgaaa

SEQ ID NO: 406325 - DNA, 55 bp, Artificial
  Synthetic oligonucleotide
gcacctattgacacctgcatctccgaatgtatcactccgaacggaagcatcccca

SEQ ID NO: 406326 - DNA, 55 bp, Artificial
  Synthetic oligonucleotide
gcacctcaccgcggccagcatacacccgggcatcatgatgctcagcaagagacac

SEQ ID NO: 406327 - DNA, 56 bp, Artificial
  Synthetic oligonucleotide
gcacctcatatataacggtacgactaggtttcttgccgaaaaaccgcagtatagga

SEQ ID NO: 406328 - DNA, 60 bp, Artificial
  Synthetic oligonucleotide
gcacctcatggactgtgctacccaggagaactggacaacaacggagaattgaggcatttg

SEQ ID NO: 406329 - DNA, 55 bp, Artificial
  Synthetic oligonucleotide
gcacctcatttggttattacagtataagaggcctaaaaaacctagaggtactcag

SEQ ID NO: 406330 - DNA, 53 bp, Artificial
  Synthetic oligonucleotide
gcacctccaaccttacgtcaggtgttatggggcccacatcagataatgcacgg

SEQ ID NO: 406331 - DNA, 55 bp, Artificial
  Synthetic oligonucleotide
gcacctcccaatggaactccatcgcccactggcttcacaccctctgtgcgctctc

SEQ ID NO: 406332 - DNA, 56 bp, Artificial
  Synthetic oligonucleotide
gcacctccgcttctccccgtctccggccagaagcttttctccaaccgatccttcac

SEQ ID NO: 406333 - DNA, 60 bp, Artificial
  Synthetic oligonucleotide
gcacctccgttcaaaccaacaatgagctggcttgcgctctgcaccatctaaggtgcgcca

SEQ ID NO: 406334 - DNA, 55 bp, Artificial
  Synthetic oligonucleotide
gcacctcgaaatctacgcaaaaggcgtacgacagaaaggataagtccccttctaa

SEQ ID NO: 406335 - DNA, 52 bp, Artificial
  Synthetic oligonucleotide
gcacctctgggaagacaacagccagtcgacgggtcattcatggtgcacatac

SEQ ID NO: 406336 - DNA, 55 bp, Artificial
  Synthetic oligonucleotide
gcacctgaactatatgacgatgcattaactctcggaggatatgatgcagtccaac

SEQ ID NO: 406337 - DNA, 50 bp, Artificial
  Synthetic oligonucleotide
gcacctgacactcgccacgatagcggtgaggggtgtggttccacgtgtgt

SEQ ID NO: 406338 - DNA, 55 bp, Artificial
  Synthetic oligonucleotide
gcacctgataatttccacaaacgtgaattctgtctcactatcctgccctccctcc

SEQ ID NO: 406339 - DNA, 52 bp, Artificial
  Synthetic oligonucleotide
gcacctgatagatgcccaccgacagcattgtatgtagcaggagttccagagc

SEQ ID NO: 406340 - DNA, 60 bp, Artificial
  Synthetic oligonucleotide
gcacctgatggggaatgtccatgacgcctgtaatgattcgttgtctgtcattcttttgtc

SEQ ID NO: 406341 - DNA, 55 bp, Artificial
  Synthetic oligonucleotide
gcacctgcagtgttccagaggaagatggatgactgtttcagaggaaccgaaaggt

SEQ ID NO: 406342 - DNA, 55 bp, Artificial
  Synthetic oligonucleotide
gcacctgcctagagcagagttagaatcgataagagctcgatgggagcataggttc

SEQ ID NO: 406343 - DNA, 55 bp, Artificial
  Synthetic oligonucleotide
gcacctgcgacagaaaagggagcctcagtcttttcttgctggaagtgttaccggc

SEQ ID NO: 406344 - DNA, 53 bp, Artificial
  Synthetic oligonucleotide
gcacctggatattcaagcctcatgaggtgttaaaggctgcaacattgatttgt

SEQ ID NO: 406345 - DNA, 55 bp, Artificial
  Synthetic oligonucleotide
gcacctggtgcgattttatcactgcttttgtggaagcaccgcaggcgcccgccga

SEQ ID NO: 406346 - DNA, 60 bp, Artificial
  Synthetic oligonucleotide
gcacctgtattcagcaattcgtgtgggaacagttgtgactgcatatgaggactgctctgg

SEQ ID NO: 406347 - DNA, 50 bp, Artificial
  Synthetic oligonucleotide
gcacctgtcaacccaatggcagcagaaatcgtgacaaaccaggcacactc

SEQ ID NO: 406348 - DNA, 50 bp, Artificial
  Synthetic oligonucleotide
gcacctgtggcggttcagcggtatagccggtacgctccaacgttgtgttc

SEQ ID NO: 406349 - DNA, 53 bp, Artificial
  Synthetic oligonucleotide
gcacctgtggctcgtcggacctgttcctggttaccaggaatgccgacgtggtg

SEQ ID NO: 406350 - DNA, 55 bp, Artificial
  Synthetic oligonucleotide
gcaccttaatagatctgtagaaatcaattgtaccagaccctccaacaatgtaaga

SEQ ID NO: 406351 - DNA, 59 bp, Artificial
  Synthetic oligonucleotide
gcaccttaccaaccctattaatgaccaacaaagtgtgtcgctacatattgagatcgaaa

SEQ ID NO: 406352 - DNA, 55 bp, Artificial
  Synthetic oligonucleotide
gcaccttatgggaaaggtgtacgacgcctgtaaggactcgttatccgtcatgcgc

SEQ ID NO: 406353 - DNA, 56 bp, Artificial
  Synthetic oligonucleotide
gcaccttcacaggcacttttacgccagataacaaccagacgacacccgcccgtaaa

SEQ ID NO: 406354 - DNA, 60 bp, Artificial
  Synthetic oligonucleotide
gcaccttcgcttgctacgaatgatgtcgctgcgtcgacaatgggtgctctggcgaatacg

SEQ ID NO: 406355 - DNA, 57 bp, Artificial
  Synthetic oligonucleotide
gcaccttcgttaataagagccagttgaaagttagaactttgaagatatataatcgag

SEQ ID NO: 406356 - DNA, 60 bp, Artificial
  Synthetic oligonucleotide
gcaccttgtgctgtgatggatattactggagtacagtcaactttgagattccgtgttcct

SEQ ID NO: 406357 - DNA, 55 bp, Artificial
  Synthetic oligonucleotide
gcaccttgttcttagctctcgtaagaatgaccgtgtcaatctcgtaatgccccac

SEQ ID NO: 406358 - DNA, 58 bp, Artificial
  Synthetic oligonucleotide
gcacctttgagtttacgtgaagttttagtgtcttacagtgatagtggcttgccactta

SEQ ID NO: 406359 - DNA, 55 bp, Artificial
  Synthetic oligonucleotide
gcacctttgctttgtgaggagtcatcattatccattgatgacactccagaggagg

SEQ ID NO: 406360 - DNA, 55 bp, Artificial
  Synthetic oligonucleotide
gcacctttggtgttgccccggccggggtgtgtctttgaacgcagtagaatgtgct

SEQ ID NO: 406361 - DNA, 50 bp, Artificial
  Synthetic oligonucleotide
gcaccttttactcaatgtggttatcctgcgttaaagcccttgtatgcatg

SEQ ID NO: 406362 - DNA, 55 bp, Artificial
  Synthetic oligonucleotide
gcacgaaaacgtacgggccaaaactgcaaagtgaagcatcgaggagaaacgacgc

SEQ ID NO: 406363 - DNA, 55 bp, Artificial
  Synthetic oligonucleotide
gcacgaaagcaagaggaggcgcttaagaaggaacatgctgacacgaatgaaggtg

SEQ ID NO: 406364 - DNA, 55 bp, Artificial
  Synthetic oligonucleotide
gcacgaaattgagaatggctacaggattaagaaatatcccgtctattcaatctag

SEQ ID NO: 406365 - DNA, 60 bp, Artificial
  Synthetic oligonucleotide
gcacgaacaatgtctgtgtttgagataacaccattctacacaagccaagtagtacggtat

SEQ ID NO: 406366 - DNA, 57 bp, Artificial
  Synthetic oligonucleotide
gcacgaaccaaatgtcaactattgtggtaaacactgaattggtagccaacatcactt

SEQ ID NO: 406367 - DNA, 60 bp, Artificial
  Synthetic oligonucleotide
gcacgaactgtggagaaatgtatggtccaggtctaacgacggaatggacctagccagata

SEQ ID NO: 406368 - DNA, 55 bp, Artificial
  Synthetic oligonucleotide
gcacgaagcgaaaactttaatgaagggccttcgtgattacaatccaatagcccaa

SEQ ID NO: 406369 - DNA, 51 bp, Artificial
  Synthetic oligonucleotide
gcacgaataagccgcgtaacgtgcgccaggcatcaccattactcacccgta

SEQ ID NO: 406370 - DNA, 55 bp, Artificial
  Synthetic oligonucleotide
gcacgacaatcgctagtggagtcatctagatcaggaccgcacgttgaattgtacc

SEQ ID NO: 406371 - DNA, 55 bp, Artificial
  Synthetic oligonucleotide
gcacgacacttagaagtatcattgacgatcacttgagaggggtctttcacaacgg

SEQ ID NO: 406372 - DNA, 52 bp, Artificial
  Synthetic oligonucleotide
gcacgacaggcacatttgtggtgccacgagttaagctccatactagcaaaat

SEQ ID NO: 406373 - DNA, 59 bp, Artificial
  Synthetic oligonucleotide
gcacgacatatataactcttgatcaaacttgcgaacaccttaaagtttcctgcggccca

SEQ ID NO: 406374 - DNA, 55 bp, Artificial
  Synthetic oligonucleotide
gcacgaccgacaagtcgggcgcccctacctacaactggggtgcgaatgatacgga

SEQ ID NO: 406375 - DNA, 60 bp, Artificial
  Synthetic oligonucleotide
gcacgaccggagatgtatcctcaattaagaattcaggtgatatgaaaggtatggatgccc

SEQ ID NO: 406376 - DNA, 52 bp, Artificial
  Synthetic oligonucleotide
gcacgaccggattatggccggagtccagcaggcctactgggaggccgcacaa

SEQ ID NO: 406377 - DNA, 55 bp, Artificial
  Synthetic oligonucleotide
gcacgaccggtcaatcgcgttgtccgggttggcgcatttcctcaacctcgatggc

SEQ ID NO: 406378 - DNA, 55 bp, Artificial
  Synthetic oligonucleotide
gcacgacggtagaggccacgtgtcttttgactcgcaagcctctttactacttgat

SEQ ID NO: 406379 - DNA, 55 bp, Artificial
  Synthetic oligonucleotide
gcacgactgacagtgttactgttgtcaagacccatcttgccttgtctgcgccaga

SEQ ID NO: 406380 - DNA, 55 bp, Artificial
  Synthetic oligonucleotide
gcacgactgtaacaacatgctacaagagaccacgctacagttactcgatggggcg

SEQ ID NO: 406381 - DNA, 57 bp, Artificial
  Synthetic oligonucleotide
gcacgacttgcagtgggtggtcgggctccccgctctaccacaaaggttgcgtggttg

SEQ ID NO: 406382 - DNA, 55 bp, Artificial
  Synthetic oligonucleotide
gcacgagaagataaattgcatcttggtgggcatggaagattgcctctacatgggg

SEQ ID NO: 406383 - DNA, 60 bp, Artificial
  Synthetic oligonucleotide
gcacgagaccgatccagtatcaagcaagctaatatgggtaaatttggacagcaatctggc

SEQ ID NO: 406384 - DNA, 55 bp, Artificial
  Synthetic oligonucleotide
gcacgagactcgcaaataactcggatgctgctaactcatttacattcttgagagg

SEQ ID NO: 406385 - DNA, 60 bp, Artificial
  Synthetic oligonucleotide
gcacgagctcaattgcaattacaacatatgcccatactgcgcgtccagactaacttcaga

SEQ ID NO: 406386 - DNA, 60 bp, Artificial
  Synthetic oligonucleotide
gcacgagctcactcgagaagaaaagatcgacgccacagttggtcagaagaaaaaggctta

SEQ ID NO: 406387 - DNA, 55 bp, Artificial
  Synthetic oligonucleotide
gcacgaggactgtgtcttgggtaaggtaagggctccgaggtgccactaggaggag

SEQ ID NO: 406388 - DNA, 55 bp, Artificial
  Synthetic oligonucleotide
gcacgagggatacacgggtatgtcatcggtacgtcgccacttacacccgttgtat

SEQ ID NO: 406389 - DNA, 55 bp, Artificial
  Synthetic oligonucleotide
gcacgagggccaaaaggacagtattgaactatacctttctaggctcgagaggggc

SEQ ID NO: 406390 - DNA, 60 bp, Artificial
  Synthetic oligonucleotide
gcacgataaccggaaacgtcagtcacggatcgacaacctcgcagattaataacactcatc

SEQ ID NO: 406391 - DNA, 55 bp, Artificial
  Synthetic oligonucleotide
gcacgataacggcaagcgcgacggaacgaagaccgcacgacaaccatgcgtagca

SEQ ID NO: 406392 - DNA, 60 bp, Artificial
  Synthetic oligonucleotide
gcacgataccgccattcagacatcccgtttttctgttactggtagtatcactcctgttgc

SEQ ID NO: 406393 - DNA, 60 bp, Artificial
  Synthetic oligonucleotide
gcacgatctgctcttatcttgagaggatcagtggctcataagtcctgcctgcctgcttgt

SEQ ID NO: 406394 - DNA, 60 bp, Artificial
  Synthetic oligonucleotide
gcacgatgcccggtctctaaggagcatagcaacgagttatgccactactcggacccaggc

SEQ ID NO: 406395 - DNA, 55 bp, Artificial
  Synthetic oligonucleotide
gcacgatggaccaacagcaggttatggaaacctgtttgtttaccgtctatccggg

SEQ ID NO: 406396 - DNA, 60 bp, Artificial
  Synthetic oligonucleotide
gcacgatgtctctcatattggaaaggtaatgtgtatcagcgatgttacacgaggaaccgg

SEQ ID NO: 406397 - DNA, 60 bp, Artificial
  Synthetic oligonucleotide
gcacgatgtttgttgcttagccatagccacaagatctttcctcgcaactcgcagctctct

SEQ ID NO: 406398 - DNA, 60 bp, Artificial
  Synthetic oligonucleotide
gcacgattacaacgtgaaatttatgataagagcgcgataacgagcatgcatgacaaactg

SEQ ID NO: 406399 - DNA, 55 bp, Artificial
  Synthetic oligonucleotide
gcacgatttaagtgtggcaagaacaggctaacagtttctaaatgcatgagcacgc

SEQ ID NO: 406400 - DNA, 55 bp, Artificial
  Synthetic oligonucleotide
gcacgatttgatgtaccagttcgacatgacaacctctgaaattgaacaagtggga

SEQ ID NO: 406401 - DNA, 60 bp, Artificial
  Synthetic oligonucleotide
gcacgcaacgcggcacaccagatatggcttgcttgcagatccgcttatcgggcaatcatc

SEQ ID NO: 406402 - DNA, 59 bp, Artificial
  Synthetic oligonucleotide
gcacgcaatgcgttcattacaactcagttcactggtgtaatgagggtattggggctttt

SEQ ID NO: 406403 - DNA, 60 bp, Artificial
  Synthetic oligonucleotide
gcacgcaattgcgtcgattattaagagcgcagcacatgtacgatcggcgttcttgtatcg

SEQ ID NO: 406404 - DNA, 60 bp, Artificial
  Synthetic oligonucleotide
gcacgcacaagaacgtacagctagctgacattattaagacggttgacgtccgtattcctc

SEQ ID NO: 406405 - DNA, 55 bp, Artificial
  Synthetic oligonucleotide
gcacgcacacacagagccagagcactgcatccagagtactataaagactgctgac

SEQ ID NO: 406406 - DNA, 60 bp, Artificial
  Synthetic oligonucleotide
gcacgcacattatatgggatgtggggttacagtccagctgcgtactgtgcataccatgga

SEQ ID NO: 406407 - DNA, 55 bp, Artificial
  Synthetic oligonucleotide
gcacgcacgccttaggtagttcggcaattggtgcatggtttgaattctgtttatg

SEQ ID NO: 406408 - DNA, 55 bp, Artificial
  Synthetic oligonucleotide
gcacgcagaactctagtccagctaatcaagccgtacaaatacttatgagcgatcg

SEQ ID NO: 406409 - DNA, 55 bp, Artificial
  Synthetic oligonucleotide
gcacgcagacacatagcccgagaacggcatccagattactataaagactgctgac

SEQ ID NO: 406410 - DNA, 60 bp, Artificial
  Synthetic oligonucleotide
gcacgcagacgaacccctgcacagcgctcgttcccacgatagcatggcctctgggtaggg

SEQ ID NO: 406411 - DNA, 55 bp, Artificial
  Synthetic oligonucleotide
gcacgcagagcatcccatgctcccagaaattccgctgtggcaaatcttctgcccg

SEQ ID NO: 406412 - DNA, 57 bp, Artificial
  Synthetic oligonucleotide
gcacgcaggagactagcagcactgcgatattcagcggaaccctgccgtttgcaccaa

SEQ ID NO: 406413 - DNA, 60 bp, Artificial
  Synthetic oligonucleotide
gcacgcatgtagtgtgggatgtgggtctacagtctacaatttctatgattgttccatgga

SEQ ID NO: 406414 - DNA, 55 bp, Artificial
  Synthetic oligonucleotide
gcacgcattaggggcggctcaaatggctgtgggacgtacactagtcgaagcgtac

SEQ ID NO: 406415 - DNA, 55 bp, Artificial
  Synthetic oligonucleotide
gcacgccactttctgcaaatcaactaactttgtttacaagattggtggggatgca

SEQ ID NO: 406416 - DNA, 55 bp, Artificial
  Synthetic oligonucleotide
gcacgccataacgccgcggccctagctgttcgaacgagcgcttatttgctcggtc

SEQ ID NO: 406417 - DNA, 60 bp, Artificial
  Synthetic oligonucleotide
gcacgccggcggaacctgcccgcgcccgtgagacgtcggtgctagaggcacagtgctcag

SEQ ID NO: 406418 - DNA, 54 bp, Artificial
  Synthetic oligonucleotide
gcacgccgttcagaagacctccgagggtagaatttcctacacgttccggcgact

SEQ ID NO: 406419 - DNA, 60 bp, Artificial
  Synthetic oligonucleotide
gcacgcctaaaatagagccaagtgtagtttctactatcttagagtatcgcactagagcta

SEQ ID NO: 406420 - DNA, 51 bp, Artificial
  Synthetic oligonucleotide
gcacgcctcccacgaacacgcccatggggggggctccgccccccccaaacc

SEQ ID NO: 406421 - DNA, 55 bp, Artificial
  Synthetic oligonucleotide
gcacgcctctctttaaatatggatcgtgtaccctgcttggttagaaagttccttt

SEQ ID NO: 406422 - DNA, 60 bp, Artificial
  Synthetic oligonucleotide
gcacgcgaaagcagctatgggccaacaggcccatgtaccggaagcccagattatatcgtc

SEQ ID NO: 406423 - DNA, 55 bp, Artificial
  Synthetic oligonucleotide
gcacgcgacccaccccgtggtgctagcgagccaatcagatgattttcggggaagc

SEQ ID NO: 406424 - DNA, 55 bp, Artificial
  Synthetic oligonucleotide
gcacgcgattacgaattcccttggtttacttatggaagcggtccagcgacctcag

SEQ ID NO: 406425 - DNA, 60 bp, Artificial
  Synthetic oligonucleotide
gcacgcgcaagcgcagagctgctccacaagacatttatcctgcatgcaaaatatctaaca

SEQ ID NO: 406426 - DNA, 60 bp, Artificial
  Synthetic oligonucleotide
gcacgcgcattatcagttattgaagcatgtacaactttagtagattcaagggtgagcatg

SEQ ID NO: 406427 - DNA, 55 bp, Artificial
  Synthetic oligonucleotide
gcacgcgcggcaatacggtcactcacccagcgcctatactgtggaggccctatgt

SEQ ID NO: 406428 - DNA, 55 bp, Artificial
  Synthetic oligonucleotide
gcacgcgcgttacaacgagaagctactgagagaactgagactgaatccaagatgg

SEQ ID NO: 406429 - DNA, 55 bp, Artificial
  Synthetic oligonucleotide
gcacgcgctcaatcattccatgtttaaagaagatatccacgaagtgccacggttc

SEQ ID NO: 406430 - DNA, 60 bp, Artificial
  Synthetic oligonucleotide
gcacgcggactgtgactgtagcaattgaaggtaaacgaagcgatttgctagccgtaactc

SEQ ID NO: 406431 - DNA, 55 bp, Artificial
  Synthetic oligonucleotide
gcacgctactttaaccatgattggaagtttattgattgtgatggaagcaggttcg

SEQ ID NO: 406432 - DNA, 55 bp, Artificial
  Synthetic oligonucleotide
gcacgctagggccgctgagaaaggaaggcgcaaacaagggaagaaagcccatggt

SEQ ID NO: 406433 - DNA, 55 bp, Artificial
  Synthetic oligonucleotide
gcacgctatgcttttaacttctatgaggtgacttctaaaacgccaaatagggcaa

SEQ ID NO: 406434 - DNA, 59 bp, Artificial
  Synthetic oligonucleotide
gcacgctcgacaattgcaagttcgcaatcgtcggagaggaaaagggcgcgaacggtaca

SEQ ID NO: 406435 - DNA, 52 bp, Artificial
  Synthetic oligonucleotide
gcacgctcgttatagtcagtcgtagtgccaatttgcgcgtattcactcgaga

SEQ ID NO: 406436 - DNA, 60 bp, Artificial
  Synthetic oligonucleotide
gcacgctgacgacatcgtgaggcacgtccttgacaaggtgaagaattccgggggcattag

SEQ ID NO: 406437 - DNA, 52 bp, Artificial
  Synthetic oligonucleotide
gcacgcttacaagtagtgacaccaatgactccaatttccgttggtatcaaca

SEQ ID NO: 406438 - DNA, 55 bp, Artificial
  Synthetic oligonucleotide
gcacgcttcggcgataaatcctttgtttacaagacacaatgccgattgatagcag

SEQ ID NO: 406439 - DNA, 60 bp, Artificial
  Synthetic oligonucleotide
gcacgcttcggcgataaatcctttgtttgtaacaaaatgccgatcgatagcagttcgata

SEQ ID NO: 406440 - DNA, 57 bp, Artificial
  Synthetic oligonucleotide
gcacgcttgtccagtttaggggaggcaagctcgtgaccttttccatgtttgacaacc

SEQ ID NO: 406441 - DNA, 60 bp, Artificial
  Synthetic oligonucleotide
gcacgcttttgcgataaatcctcatcaaatttacaggacactatgccgatcgatagtagc

SEQ ID NO: 406442 - DNA, 55 bp, Artificial
  Synthetic oligonucleotide
gcacggaaccgtggacattgcgtgacacaagccaggaaatgtgggacacagagcc

SEQ ID NO: 406443 - DNA, 55 bp, Artificial
  Synthetic oligonucleotide
gcacggacaatgagagggacgccatctacagctcagcactcattgaggccacccg

SEQ ID NO: 406444 - DNA, 58 bp, Artificial
  Synthetic oligonucleotide
gcacggactatagctatagggttgtcgtcgggcggtacgcctcagtatatgagtaaaa

SEQ ID NO: 406445 - DNA, 55 bp, Artificial
  Synthetic oligonucleotide
gcacggagcattacagattgtactcataagagtaaggtctttaccatggtgcagg

SEQ ID NO: 406446 - DNA, 58 bp, Artificial
  Synthetic oligonucleotide
gcacggagtttcgatccacatgttcaagttttacgtgatgtcagtacctccacgtggg

SEQ ID NO: 406447 - DNA, 56 bp, Artificial
  Synthetic oligonucleotide
gcacggataaacaaacataccttaatatacaatcaattaaattgaactaccgttga

SEQ ID NO: 406448 - DNA, 60 bp, Artificial
  Synthetic oligonucleotide
gcacggatatacgtgagcgtcctggtactcatgtatattccccttccccaagtggctcta

SEQ ID NO: 406449 - DNA, 60 bp, Artificial
  Synthetic oligonucleotide
gcacggatatctataattgggaccatgtgtaacgataaggtttgactggcagatttatcg

SEQ ID NO: 406450 - DNA, 55 bp, Artificial
  Synthetic oligonucleotide
gcacggattcacagtcatggtacgttagccattactccgtcactgacagatcgtt

SEQ ID NO: 406451 - DNA, 55 bp, Artificial
  Synthetic oligonucleotide
gcacggattccacgtgggtgagaatccaagtattacttactgacgccggttctca

SEQ ID NO: 406452 - DNA, 55 bp, Artificial
  Synthetic oligonucleotide
gcacggcaaagtaacaaagtgcaaggcttaccagtgagaatgcctagtggtgctc

SEQ ID NO: 406453 - DNA, 56 bp, Artificial
  Synthetic oligonucleotide
gcacggccagactacaatcctcctctggttgaggcatggaagcggccagattacga

SEQ ID NO: 406454 - DNA, 56 bp, Artificial
  Synthetic oligonucleotide
gcacggccattggcagtaagcccacagggtttacggaagagtccctctggtgtttg

SEQ ID NO: 406455 - DNA, 55 bp, Artificial
  Synthetic oligonucleotide
gcacggcccagcctggctgaagctgtaggtcaggggaaggactagaggttagtgg

SEQ ID NO: 406456 - DNA, 53 bp, Artificial
  Synthetic oligonucleotide
gcacggccggactacaaccccccgttgctggaggtgtggaaaaagccggacta

SEQ ID NO: 406457 - DNA, 50 bp, Artificial
  Synthetic oligonucleotide
gcacggctatctaccgcgaccttttggagcacgtccaggctctcaggcga

SEQ ID NO: 406458 - DNA, 60 bp, Artificial
  Synthetic oligonucleotide
gcacggctttctatgtattaggtagcatatgaagcgataaggttttctgacacattgtac

SEQ ID NO: 406459 - DNA, 51 bp, Artificial
  Synthetic oligonucleotide
gcacgggaacgtggcatgcatactatagaccaccaggtggtgccaccaggc

SEQ ID NO: 406460 - DNA, 60 bp, Artificial
  Synthetic oligonucleotide
gcacgggaccatgcagaacctgcacgactcttgctcaaggaacctctatgtatccctcct

SEQ ID NO: 406461 - DNA, 55 bp, Artificial
  Synthetic oligonucleotide
gcacgggaggtgtctgtagagtatcgcgatcgtcgtcggaaagttgaggctactg

SEQ ID NO: 406462 - DNA, 55 bp, Artificial
  Synthetic oligonucleotide
gcacgggcaacgttcctgtaaatggttgccagtcgtaccatttagggtcatcatg

SEQ ID NO: 406463 - DNA, 51 bp, Artificial
  Synthetic oligonucleotide
gcacgggcggtactcgcctgttggctacaggttgtgctaaagggaacgaat

SEQ ID NO: 406464 - DNA, 56 bp, Artificial
  Synthetic oligonucleotide
gcacgggggagctgtgtcaattgagggacggggttttagacaagcttatagtgaat

SEQ ID NO: 406465 - DNA, 51 bp, Artificial
  Synthetic oligonucleotide
gcacggggtctaggggggcttgtcccccctcctacgtagattccccctcac

SEQ ID NO: 406466 - DNA, 53 bp, Artificial
  Synthetic oligonucleotide
gcacggggtggacagagtgcagccgcgttagactcttttgaacgcacgggtaa

SEQ ID NO: 406467 - DNA, 55 bp, Artificial
  Synthetic oligonucleotide
gcacgggtctcgccgaatctctcggtgcctcaccggtgatcaagatttacagcgg

SEQ ID NO: 406468 - DNA, 55 bp, Artificial
  Synthetic oligonucleotide
gcacgggttccgacctggggtagagttgtccacaacactgatgttagaaggggtg

SEQ ID NO: 406469 - DNA, 51 bp, Artificial
  Synthetic oligonucleotide
gcacgggttctgtgaccctccaccgtcctaatctcttcacagcattgtccc

SEQ ID NO: 406470 - DNA, 56 bp, Artificial
  Synthetic oligonucleotide
gcacggtagacccgtgaaagcatgccgtacgacgtgcagagttacagctcataacg

SEQ ID NO: 406471 - DNA, 50 bp, Artificial
  Synthetic oligonucleotide
gcacggtcacaacgactggtcagaaacaccctatagaggagtttatagcc

SEQ ID NO: 406472 - DNA, 59 bp, Artificial
  Synthetic oligonucleotide
gcacggtcagtagtaccggatctaaaagaactagtctcaacagaagcgcagattcaaaa

SEQ ID NO: 406473 - DNA, 60 bp, Artificial
  Synthetic oligonucleotide
gcacggtctgcactcatcctgaggggatcagtggcccacaagtcctacatgcctgctggt

SEQ ID NO: 406474 - DNA, 60 bp, Artificial
  Synthetic oligonucleotide
gcacggtctgctctcattctgaggggatcagtggcccacaagtcctgtctgcctgcttgt

SEQ ID NO: 406475 - DNA, 57 bp, Artificial
  Synthetic oligonucleotide
gcacggtctggccagtaaggcgcgcgcagtcattgacgctctgtagacacggagaaa

SEQ ID NO: 406476 - DNA, 55 bp, Artificial
  Synthetic oligonucleotide
gcacggtgatccgggtttgtgggcagtctaccgggtcattcttctcgaccgtgca

SEQ ID NO: 406477 - DNA, 58 bp, Artificial
  Synthetic oligonucleotide
gcacggtgtcgtttctttgagagtgtagaccatgcaagttaagcactacgatctattg

SEQ ID NO: 406478 - DNA, 55 bp, Artificial
  Synthetic oligonucleotide
gcacggttaagaacgggagagctaagagccacaaaggttggacttacctagcctc

SEQ ID NO: 406479 - DNA, 56 bp, Artificial
  Synthetic oligonucleotide
gcacggttcaagtgtttacggactcggagtatcagctcccgtacgtgctcgggtcg

SEQ ID NO: 406480 - DNA, 55 bp, Artificial
  Synthetic oligonucleotide
gcacggttttgttctaagaataacaactacgctcatatcgcagctgggaagactc

SEQ ID NO: 406481 - DNA, 55 bp, Artificial
  Synthetic oligonucleotide
gcacgtacagataccactatattgctgcgaacgattaatgatactacacaagcaa

SEQ ID NO: 406482 - DNA, 55 bp, Artificial
  Synthetic oligonucleotide
gcacgtacccacggagccatccgtcagcgtgataataaatagatcgtcgtggtct

SEQ ID NO: 406483 - DNA, 55 bp, Artificial
  Synthetic oligonucleotide
gcacgtactatggatgaagcttttgttgacgcatatgatgacgtcatcgatgtaa

SEQ ID NO: 406484 - DNA, 55 bp, Artificial
  Synthetic oligonucleotide
gcacgtagctcgagagctgcatccggagtactacaaagactgctgacaccgagct

SEQ ID NO: 406485 - DNA, 60 bp, Artificial
  Synthetic oligonucleotide
gcacgtaggtggttggttgatcgtttcagtgattgtggttaacaacaatcaacatatcta

SEQ ID NO: 406486 - DNA, 55 bp, Artificial
  Synthetic oligonucleotide
gcacgtagttgcagcgggaccgggtaacggcaatacgcatgatctagaaattgat

SEQ ID NO: 406487 - DNA, 60 bp, Artificial
  Synthetic oligonucleotide
gcacgtataccaccagggattctcagcacgtcaacgacagaagctcaagtttaaggatgc

SEQ ID NO: 406488 - DNA, 55 bp, Artificial
  Synthetic oligonucleotide
gcacgtatccctgggcaatgtcgtccgggttttccgcggtgatctgtgccgcttc

SEQ ID NO: 406489 - DNA, 57 bp, Artificial
  Synthetic oligonucleotide
gcacgtatggcaacgcctatctttcctcttatggataatttgcgtttagatacgcag

SEQ ID NO: 406490 - DNA, 55 bp, Artificial
  Synthetic oligonucleotide
gcacgtccctttcgatgacgtgcattgcagttggtctagtaacactatacctagg

SEQ ID NO: 406491 - DNA, 59 bp, Artificial
  Synthetic oligonucleotide
gcacgtcgccgtctgaacttcgacggcccgtatgtcaaccgtgtgagtgtccccattgc

SEQ ID NO: 406492 - DNA, 55 bp, Artificial
  Synthetic oligonucleotide
gcacgtcttttagctgtatatcagtcgcccctgagacctactccagagttctctc

SEQ ID NO: 406493 - DNA, 55 bp, Artificial
  Synthetic oligonucleotide
gcacgtgatgaattcgttaacgtgaaatttgacacgaaaagcacaagtggtacca

SEQ ID NO: 406494 - DNA, 55 bp, Artificial
  Synthetic oligonucleotide
gcacgtgcaattagcagtctcgtaagtggcaattggttgtcattcgcaaatccac

SEQ ID NO: 406495 - DNA, 55 bp, Artificial
  Synthetic oligonucleotide
gcacgtgcagtgtaatgctagtaaatttcatcaaggcactttactggtgaccatg

SEQ ID NO: 406496 - DNA, 56 bp, Artificial
  Synthetic oligonucleotide
gcacgtggattccgaggaacttgaaggcattacttccgttggtctgtcccgtcttc

SEQ ID NO: 406497 - DNA, 52 bp, Artificial
  Synthetic oligonucleotide
gcacgtggcgccacccaagggcacggaggtcttcgggcgcaagcctgaagag

SEQ ID NO: 406498 - DNA, 55 bp, Artificial
  Synthetic oligonucleotide
gcacgtgtgggttccccccctcaacgtccgaggggggcgcgacgctatcatctta

SEQ ID NO: 406499 - DNA, 60 bp, Artificial
  Synthetic oligonucleotide
gcacgttaaagtcttgtactgttacatatgctgataaccctagtagtaagatggtttgca

SEQ ID NO: 406500 - DNA, 55 bp, Artificial
  Synthetic oligonucleotide
gcacgttagcagagccttcatctgtcttcaagctctaaccacatttgtgtccgtg

SEQ ID NO: 406501 - DNA, 55 bp, Artificial
  Synthetic oligonucleotide
gcacgttattttcgacgccgtagccgactaacaatacggcgtgattgagaccgtt

SEQ ID NO: 406502 - DNA, 50 bp, Artificial
  Synthetic oligonucleotide
gcacgttcatagccagtatgtgtgctagcagcactacctttatacaacac

SEQ ID NO: 406503 - DNA, 57 bp, Artificial
  Synthetic oligonucleotide
gcacgttgactagtccagatgtccccagaggatgtgaaggcccatgcaaggtccagt

SEQ ID NO: 406504 - DNA, 60 bp, Artificial
  Synthetic oligonucleotide
gcacgttgatgctaggctattcggttacgatgcgtcccttgcagctgaattaggtaagat

SEQ ID NO: 406505 - DNA, 60 bp, Artificial
  Synthetic oligonucleotide
gcacgttgggaatgatggtattggtactcatatcatattaactacatcttatctagagcg

SEQ ID NO: 406506 - DNA, 55 bp, Artificial
  Synthetic oligonucleotide
gcacgttggtgaaccccgcgggcgtggaagggagtacatatcgcagattgtcgct

SEQ ID NO: 406507 - DNA, 59 bp, Artificial
  Synthetic oligonucleotide
gcacgtttagaataatcattttcacaagcgttatgcaatttctttgactgtctgactag

SEQ ID NO: 406508 - DNA, 58 bp, Artificial
  Synthetic oligonucleotide
gcacgtttatgcaggaagacctcatcctagtccagccggataccgactgggttggtgg

SEQ ID NO: 406509 - DNA, 55 bp, Artificial
  Synthetic oligonucleotide
gcacgtttctcgaagtttacttttcgatgacctgccgtagcctaacctgtctggg

SEQ ID NO: 406510 - DNA, 60 bp, Artificial
  Synthetic oligonucleotide
gcacgtttcttagtgggtacagagtataaccagtccagcagtgcagtgcaagcattattt

SEQ ID NO: 406511 - DNA, 55 bp, Artificial
  Synthetic oligonucleotide
gcactaacgaaggcaatatttcgcccagatgtcttgagtgaattgatggaggaag

SEQ ID NO: 406512 - DNA, 55 bp, Artificial
  Synthetic oligonucleotide
gcactaactcaaagcacgtaaagaccgcactgtatgcgatggcgtatggtgcatc

SEQ ID NO: 406513 - DNA, 60 bp, Artificial
  Synthetic oligonucleotide
gcactaactgacaatgacatatggaccaatgagaatcgttccccatagtctcattgtttt

SEQ ID NO: 406514 - DNA, 60 bp, Artificial
  Synthetic oligonucleotide
gcactaagaatgaggatgaagcaagtcgcaatgcaattgatcgaagatttgtaatgtcaa

SEQ ID NO: 406515 - DNA, 55 bp, Artificial
  Synthetic oligonucleotide
gcactaaggagctacgcttttaaagtcgcaatcgagtttcatggatcagaggcgg

SEQ ID NO: 406516 - DNA, 55 bp, Artificial
  Synthetic oligonucleotide
gcactaaggtgccggctgcgtatgcagcccaagggtataaggtacttgtcctgaa

SEQ ID NO: 406517 - DNA, 60 bp, Artificial
  Synthetic oligonucleotide
gcactaagtaatgtcagccaatcatgtgcaagactggaagacgcggtagttacgtattga

SEQ ID NO: 406518 - DNA, 54 bp, Artificial
  Synthetic oligonucleotide
gcactaataataccaggaatccgggatttacttaaaactaaagcctacagagta

SEQ ID NO: 406519 - DNA, 53 bp, Artificial
  Synthetic oligonucleotide
gcactaataatagtgcgaccatagtaatgccgtatataaattgtgtccccatg

SEQ ID NO: 406520 - DNA, 55 bp, Artificial
  Synthetic oligonucleotide
gcactaatattaccgcgccttcttttcctgcgagggcccggtagggaccgagcgc

SEQ ID NO: 406521 - DNA, 60 bp, Artificial
  Synthetic oligonucleotide
gcactaatgcaaccaatggcttcaataccttggacccataaccaatgctgggtatggctc

SEQ ID NO: 406522 - DNA, 57 bp, Artificial
  Synthetic oligonucleotide
gcactaatggttagatattacaaacgaggtgaaatgaaagatatgagcatatctgcc

SEQ ID NO: 406523 - DNA, 57 bp, Artificial
  Synthetic oligonucleotide
gcactaatgttcggtctaattgtggaacgcaaagcgacgggttcatgggtgttagac

SEQ ID NO: 406524 - DNA, 60 bp, Artificial
  Synthetic oligonucleotide
gcactacaaacatgatagatcccatggccatattcaatcgagggtccttgccacaagttc

SEQ ID NO: 406525 - DNA, 60 bp, Artificial
  Synthetic oligonucleotide
gcactacaatatgcggttcataatcagtcggaaacatatcaagggcagaaactgccctga

SEQ ID NO: 406526 - DNA, 55 bp, Artificial
  Synthetic oligonucleotide
gcactacaccttgtggcagtatgtgtactacacggacatgactgaccaatggcag

SEQ ID NO: 406527 - DNA, 55 bp, Artificial
  Synthetic oligonucleotide
gcactacagatggatgtattctaggacttcatagtctcgcgaacaatcgcaacag

SEQ ID NO: 406528 - DNA, 60 bp, Artificial
  Synthetic oligonucleotide
gcactacagggcgcctatgcatgttagtagaccatgaatacaagtacccatatgtgttag

SEQ ID NO: 406529 - DNA, 55 bp, Artificial
  Synthetic oligonucleotide
gcactaccagcactagcactgtgggtagcactgccagcactagcactgtgggtag

SEQ ID NO: 406530 - DNA, 60 bp, Artificial
  Synthetic oligonucleotide
gcactaccgtgctgtgcccgagccgtattcaactccggaggagtacagattctcattggc

SEQ ID NO: 406531 - DNA, 60 bp, Artificial
  Synthetic oligonucleotide
gcactacgcatgcccgccaaagtgcgcagtattttcactgcgttgccttatgaggtcatc

SEQ ID NO: 406532 - DNA, 60 bp, Artificial
  Synthetic oligonucleotide
gcactacgcgcctcaaccgtgtggtattgtgcccacgttgcaggtgtgtggcccagtata

SEQ ID NO: 406533 - DNA, 60 bp, Artificial
  Synthetic oligonucleotide
gcactactactttgatcttagtgcaattgaacctatagagcctgatgttattgagctttc

SEQ ID NO: 406534 - DNA, 55 bp, Artificial
  Synthetic oligonucleotide
gcactactctgaagaaccctggcgcttttcgcagtcaaccgtggtttactagacg

SEQ ID NO: 406535 - DNA, 59 bp, Artificial
  Synthetic oligonucleotide
gcactactgtgaagtcaggatggttcaaaagtacgacgtacataactcttgatcaaacc

SEQ ID NO: 406536 - DNA, 55 bp, Artificial
  Synthetic oligonucleotide
gcactacttcacctgttttacagattcagcaatcaggaaagcctgtctagggcag

SEQ ID NO: 406537 - DNA, 55 bp, Artificial
  Synthetic oligonucleotide
gcactacttggacatttatcgccgcctatccaattgtatccataaccaaaacgag

SEQ ID NO: 406538 - DNA, 55 bp, Artificial
  Synthetic oligonucleotide
gcactagagagccttgctaaaactgcatatagtgcagaggagtggacattaaggg

SEQ ID NO: 406539 - DNA, 52 bp, Artificial
  Synthetic oligonucleotide
gcactagccttgcgctagatttcaaacttaacaaaacggacttaaataccta

SEQ ID NO: 406540 - DNA, 54 bp, Artificial
  Synthetic oligonucleotide
gcactagcggtgaacaataccgtagctagggttaggcgacaagaactcgcgcct

SEQ ID NO: 406541 - DNA, 55 bp, Artificial
  Synthetic oligonucleotide
gcactagctacgcacatagcccacagggatgcgagcagaatcccagatgtctgga

SEQ ID NO: 406542 - DNA, 54 bp, Artificial
  Synthetic oligonucleotide
gcactaggatgccgcactaggatgccgcacacgcacaagaatacaacgtcgccg

SEQ ID NO: 406543 - DNA, 55 bp, Artificial
  Synthetic oligonucleotide
gcactaggcttcaaagtcgaggtaggtcgagaactcgaattctgttcacacattt

SEQ ID NO: 406544 - DNA, 55 bp, Artificial
  Synthetic oligonucleotide
gcactagggagaacaggctacaccgtacatgttcaatgtaatgcaaccaaattcc

SEQ ID NO: 406545 - DNA, 55 bp, Artificial
  Synthetic oligonucleotide
gcactagggttaaagggccactacattgtatttgcactaagggaaatgggaggtg

SEQ ID NO: 406546 - DNA, 50 bp, Artificial
  Synthetic oligonucleotide
gcactagtagtatatgaacccaagccaatagtaacccatggtagtcattt

SEQ ID NO: 406547 - DNA, 60 bp, Artificial
  Synthetic oligonucleotide
gcactagtgcgcacagggatggatcccaggatgtgctccctcatgcagggctcaacactc

SEQ ID NO: 406548 - DNA, 55 bp, Artificial
  Synthetic oligonucleotide
gcactagtggtattactggccgagacggtcttagcgaccatgttcgaccacgtac

SEQ ID NO: 406549 - DNA, 55 bp, Artificial
  Synthetic oligonucleotide
gcactagttccaggagtggctttgagatggtttgggatccaaatggatggaccga

SEQ ID NO: 406550 - DNA, 60 bp, Artificial
  Synthetic oligonucleotide
gcactataggtgtggacaaagaaacagcccaagttaggttgcagactgatacaacgaatc

SEQ ID NO: 406551 - DNA, 55 bp, Artificial
  Synthetic oligonucleotide
gcactatcattatcttggcagaagtggttatactgtacatgttcaatgcaatgcc

SEQ ID NO: 406552 - DNA, 55 bp, Artificial
  Synthetic oligonucleotide
gcactatccccggggactgtggctgtccttatgtgtacaagagaggcaatgattg

SEQ ID NO: 406553 - DNA, 52 bp, Artificial
  Synthetic oligonucleotide
gcactatcgtctgggtttacggacccactggtggggaaggtaaatcccagtt

SEQ ID NO: 406554 - DNA, 60 bp, Artificial
  Synthetic oligonucleotide
gcactatctgagttgtccattcttaaggactctagcgaatttgatgttgaagagttcaaa

SEQ ID NO: 406555 - DNA, 55 bp, Artificial
  Synthetic oligonucleotide
gcactatcttcggagcctattcagtaccaacgtattgagtcggtatcggcacaga

SEQ ID NO: 406556 - DNA, 55 bp, Artificial
  Synthetic oligonucleotide
gcactatcttctgggtgtatggtcccacaggtggtgaagggaaatccacgtttgc

SEQ ID NO: 406557 - DNA, 55 bp, Artificial
  Synthetic oligonucleotide
gcactatgaacggccgtgggttgtcgagtacaaacttcttcacgcccttagccac

SEQ ID NO: 406558 - DNA, 60 bp, Artificial
  Synthetic oligonucleotide
gcactatgtgccggagagcgacgcagctgctcgcgtcactaccatacttagcagtctcac

SEQ ID NO: 406559 - DNA, 55 bp, Artificial
  Synthetic oligonucleotide
gcactatgtggaacaactcaggcccctgttaccagaggatgtcactgagcccctg

SEQ ID NO: 406560 - DNA, 59 bp, Artificial
  Synthetic oligonucleotide
gcactatgttcacactcgcattggtccgcttcccgccgactcatgaaatggagatgcat

SEQ ID NO: 406561 - DNA, 58 bp, Artificial
  Synthetic oligonucleotide
gcactattacgttggcttacgtagtcagcaaacccttgtagagatgtagttgcgaacg

SEQ ID NO: 406562 - DNA, 57 bp, Artificial
  Synthetic oligonucleotide
gcactattagtatgaacgggtatcgcataactgacttagccaacccaattaactccc

SEQ ID NO: 406563 - DNA, 59 bp, Artificial
  Synthetic oligonucleotide
gcactattgggatactatgaggtttagatactgtgcaccaccgggctttgccctactaa

SEQ ID NO: 406564 - DNA, 55 bp, Artificial
  Synthetic oligonucleotide
gcactatttgccatgctattcaactcggaaaagagtgacggagtctttaaaatac

SEQ ID NO: 406565 - DNA, 56 bp, Artificial
  Synthetic oligonucleotide
gcactatttgtatataagtttggaaaaaacacccttgtttctactgatcacgcgta

SEQ ID NO: 406566 - DNA, 55 bp, Artificial
  Synthetic oligonucleotide
gcactcaaagcaaatcccaacctgtggcgtgattgatgtacgtgcgtcagaactg

SEQ ID NO: 406567 - DNA, 55 bp, Artificial
  Synthetic oligonucleotide
gcactcaactcctgcagtacagtgatcaatgtttgcaacctgcaaactgaagacg

SEQ ID NO: 406568 - DNA, 55 bp, Artificial
  Synthetic oligonucleotide
gcactcaagaatatttcgatcaagaagtgccagatagtgtatagtggtagcacct

SEQ ID NO: 406569 - DNA, 60 bp, Artificial
  Synthetic oligonucleotide
gcactcaatgacacatggaagatagagaaagcctcttttatcgaagttaaaagctgccac

SEQ ID NO: 406570 - DNA, 58 bp, Artificial
  Synthetic oligonucleotide
gcactcaattttagcgttgtaccacacaccttcgtcagctcatgtatgtggtaaactg

SEQ ID NO: 406571 - DNA, 54 bp, Artificial
  Synthetic oligonucleotide
gcactcacaagtacagtgtttctgattgctcgccagggcgagccagcttaacgt

SEQ ID NO: 406572 - DNA, 53 bp, Artificial
  Synthetic oligonucleotide
gcactcacacattagatttatctctcctgttgttaggataggattcattataa

SEQ ID NO: 406573 - DNA, 52 bp, Artificial
  Synthetic oligonucleotide
gcactcaccattcaaccacgatcaaacaaggcgcccagtgacgaggagttgg

SEQ ID NO: 406574 - DNA, 58 bp, Artificial
  Synthetic oligonucleotide
gcactcacccgcgttgccaaagttgacgatatatctgtgctcatgcgtgatatcggcg

SEQ ID NO: 406575 - DNA, 55 bp, Artificial
  Synthetic oligonucleotide
gcactcacgttctgccacttctagttaaatcgcggtcaagcgtaaaacaaaagcc

SEQ ID NO: 406576 - DNA, 60 bp, Artificial
  Synthetic oligonucleotide
gcactcacttggaagtatgtttcatgtattcggactttcacttcatagatgagcgaggag

SEQ ID NO: 406577 - DNA, 58 bp, Artificial
  Synthetic oligonucleotide
gcactcacttggaagtctgtttcatgtactcggatttccactttattaatgaactggg

SEQ ID NO: 406578 - DNA, 60 bp, Artificial
  Synthetic oligonucleotide
gcactcagatgactatgtacagaaaggaccctttggagggggactaagcagcatgagatt

SEQ ID NO: 406579 - DNA, 51 bp, Artificial
  Synthetic oligonucleotide
gcactcagattctgcggtctgagtcccttctctgctgggctgaaaaggcct

SEQ ID NO: 406580 - DNA, 55 bp, Artificial
  Synthetic oligonucleotide
gcactcagtgacccgaacgcccatcggatgcgaaattttcttgcaaacgcaccac

SEQ ID NO: 406581 - DNA, 56 bp, Artificial
  Synthetic oligonucleotide
gcactcataccaatgtgggatccgttagtaaacgactttcctgaaaccgctcacgg

SEQ ID NO: 406582 - DNA, 58 bp, Artificial
  Synthetic oligonucleotide
gcactcataccagtccggctaccggtttctgtctgaaaatgtatcgagaggtgtacct

SEQ ID NO: 406583 - DNA, 60 bp, Artificial
  Synthetic oligonucleotide
gcactcatcctgagaggatcagtggcccataagtcctgcttgcctgcttgtgtgtacgga

SEQ ID NO: 406584 - DNA, 55 bp, Artificial
  Synthetic oligonucleotide
gcactcatgttgtctgggatgtcggactacaatccaccatatcaatggtggtgcc

SEQ ID NO: 406585 - DNA, 60 bp, Artificial
  Synthetic oligonucleotide
gcactcattctgagaggatcagtagcccataagtcatgcctgcctgcgtgtatatacggg

SEQ ID NO: 406586 - DNA, 55 bp, Artificial
  Synthetic oligonucleotide
gcactcattctgagaggatccgtggctcataaatcctgcctgcctgcttgcgtgt

SEQ ID NO: 406587 - DNA, 55 bp, Artificial
  Synthetic oligonucleotide
gcactccaagaaagaatctttacctccaccttggacagtgggttgggacgagcct

SEQ ID NO: 406588 - DNA, 55 bp, Artificial
  Synthetic oligonucleotide
gcactccaatattttggggacctccccattgagtgcatagtgaagagcaccgggg

SEQ ID NO: 406589 - DNA, 60 bp, Artificial
  Synthetic oligonucleotide
gcactccaatgggaccgtcaaagacagaagccctcacagaacattgatgagttgtcctgt

SEQ ID NO: 406590 - DNA, 60 bp, Artificial
  Synthetic oligonucleotide
gcactccacacttacgtctgtgtgcacgcgagaaccgatggactttcgttcacccaccta

SEQ ID NO: 406591 - DNA, 57 bp, Artificial
  Synthetic oligonucleotide
gcactccacacttacgttgtgcgtacgcggggcccgatggactatcgttcacccacc

SEQ ID NO: 406592 - DNA, 55 bp, Artificial
  Synthetic oligonucleotide
gcactccagaaagctgagtcgcagttgtccttcccgtttacatcacgcgctgggg

SEQ ID NO: 406593 - DNA, 55 bp, Artificial
  Synthetic oligonucleotide
gcactccagctttgaggcgacgtgcgactgaaccggacgtgttggcatcggttcg

SEQ ID NO: 406594 - DNA, 55 bp, Artificial
  Synthetic oligonucleotide
gcactccaggcgagacggtcggctgtgtcagcactggaaaccaagctcggagaac

SEQ ID NO: 406595 - DNA, 55 bp, Artificial
  Synthetic oligonucleotide
gcactcccacaccgcgaacctcaacgtgttggggaacgcgaatatcggatccggc

SEQ ID NO: 406596 - DNA, 55 bp, Artificial
  Synthetic oligonucleotide
gcactcccattccagcatctggtgcacgaccacgtattggcctatacagtaaggc

SEQ ID NO: 406597 - DNA, 55 bp, Artificial
  Synthetic oligonucleotide
gcactccccttaacctggagaggtttaatagatctcacaggctattatgaagcag

SEQ ID NO: 406598 - DNA, 50 bp, Artificial
  Synthetic oligonucleotide
gcactcccgcctgccaagtgaaactcggggaggagtgagtgcgggacatc

SEQ ID NO: 406599 - DNA, 58 bp, Artificial
  Synthetic oligonucleotide
gcactccgaaaatcgaaccaaccatggttgcgacaacgttagaacatagattcaaaga

SEQ ID NO: 406600 - DNA, 55 bp, Artificial
  Synthetic oligonucleotide
gcactccggagattagcatgggatcacatttgcataagatgccggtgcttccagt

SEQ ID NO: 406601 - DNA, 50 bp, Artificial
  Synthetic oligonucleotide
gcactccggttccgatttgtcaccgcccagatacgttgcggcgtccacgc

SEQ ID NO: 406602 - DNA, 60 bp, Artificial
  Synthetic oligonucleotide
gcactccgtcgaatgttgggaggtacctttggcgctatgtatgcagctataatgcgtata

SEQ ID NO: 406603 - DNA, 60 bp, Artificial
  Synthetic oligonucleotide
gcactcctacgccagatctacgtgccttaggtcatctaagccgctatggatcgcatctct

SEQ ID NO: 406604 - DNA, 58 bp, Artificial
  Synthetic oligonucleotide
gcactcctcccgcctacagaccaccaaatgcacctatcttatccacacttccggaaac

SEQ ID NO: 406605 - DNA, 56 bp, Artificial
  Synthetic oligonucleotide
gcactcgagcttgaatttagaaatttgacccctgggaacactaacacccgtgtgtc

SEQ ID NO: 406606 - DNA, 55 bp, Artificial
  Synthetic oligonucleotide
gcactcgagtccagtttcgatgaaattgccaagagatttagtgggaaagtgctgg

SEQ ID NO: 406607 - DNA, 60 bp, Artificial
  Synthetic oligonucleotide
gcactcgatttacagaaagggcgattacattattacagagtcttggtgtaatccaatctg

SEQ ID NO: 406608 - DNA, 55 bp, Artificial
  Synthetic oligonucleotide
gcactcgcatgttcctaaagattcgggaaactaacacgacggagtgtgattcgaa

SEQ ID NO: 406609 - DNA, 55 bp, Artificial
  Synthetic oligonucleotide
gcactcgcattctcagagacctaaggctacgagcttgaatctaggattcatgttc

SEQ ID NO: 406610 - DNA, 60 bp, Artificial
  Synthetic oligonucleotide
gcactcgccgggggtatccccatctatcaagatttctacagacacctgatatctatcacg

SEQ ID NO: 406611 - DNA, 60 bp, Artificial
  Synthetic oligonucleotide
gcactcgcgagatactaacaagaaccactgtggatcatatggccataatcaagaaataca

SEQ ID NO: 406612 - DNA, 56 bp, Artificial
  Synthetic oligonucleotide
gcactcgcgagatactgacaaaaaccaccgtggaccacatggccataatcaagaag

SEQ ID NO: 406613 - DNA, 55 bp, Artificial
  Synthetic oligonucleotide
gcactcggagcaatgtttgaagagcagaaccaatggaagaatgcacgagaagccg

SEQ ID NO: 406614 - DNA, 60 bp, Artificial
  Synthetic oligonucleotide
gcactcggaggattaactagctgagactccatttagtttattaggttgcgcagctaaatg

SEQ ID NO: 406615 - DNA, 58 bp, Artificial
  Synthetic oligonucleotide
gcactcggagggataggggggacgagcctccacataagaagtaccggcaaaatgagca

SEQ ID NO: 406616 - DNA, 60 bp, Artificial
  Synthetic oligonucleotide
gcactcgggcagggtaccacgctgaacaacaaacactcaaacggcacaatacatgataga

SEQ ID NO: 406617 - DNA, 55 bp, Artificial
  Synthetic oligonucleotide
gcactcgtggagtggctaaagcggtggacttcatccccgtagagagcctagagac

SEQ ID NO: 406618 - DNA, 55 bp, Artificial
  Synthetic oligonucleotide
gcactcgtggggtggctaaagcagtggactttgtgccagtcgagtccctcgaaac

SEQ ID NO: 406619 - DNA, 55 bp, Artificial
  Synthetic oligonucleotide
gcactctaaaacgttcactatattgtgattaagacacgtcaacctaccggtgtcg

SEQ ID NO: 406620 - DNA, 55 bp, Artificial
  Synthetic oligonucleotide
gcactctagtattgggatatgaaaagccagcacgtagagttgctaagtccagctc

SEQ ID NO: 406621 - DNA, 55 bp, Artificial
  Synthetic oligonucleotide
gcactctatagagtacgtgcctgcgagttacgtcaactcaggtgccgtcacactt

SEQ ID NO: 406622 - DNA, 55 bp, Artificial
  Synthetic oligonucleotide
gcactctcggaggcagcttacactcatgtccgtcctgtcctaaaagaagccttgg

SEQ ID NO: 406623 - DNA, 58 bp, Artificial
  Synthetic oligonucleotide
gcactctcgggggaatccgacgtccagcaagcccaacgctacaacatgttgatggccc

SEQ ID NO: 406624 - DNA, 55 bp, Artificial
  Synthetic oligonucleotide
gcactctctagtctttgagagcatttgtgacacattcaaatccgttcgaaagttc

SEQ ID NO: 406625 - DNA, 60 bp, Artificial
  Synthetic oligonucleotide
gcactctctcaccatcaacatacttgtttatgactacactcttattgctggctaagtcca

SEQ ID NO: 406626 - DNA, 55 bp, Artificial
  Synthetic oligonucleotide
gcactctctcgcgcagttgacagcatacactttgtgaactccaacgcccaatcca

SEQ ID NO: 406627 - DNA, 59 bp, Artificial
  Synthetic oligonucleotide
gcactctgaatgtttgggtggaacccgttgatatcaaagaaccttgagtcagtgattct

SEQ ID NO: 406628 - DNA, 60 bp, Artificial
  Synthetic oligonucleotide
gcactctgagcgagtacgtggatgtgataccctccgtcttcatgtgtctccctgacagat

SEQ ID NO: 406629 - DNA, 60 bp, Artificial
  Synthetic oligonucleotide
gcactctgagtgacgactgggtatgggtgatgcagaacagcggagtggagatcagaggct

SEQ ID NO: 406630 - DNA, 55 bp, Artificial
  Synthetic oligonucleotide
gcactctgatgaactgttggagccttacgtctattatgaacttgattccgttacc

SEQ ID NO: 406631 - DNA, 60 bp, Artificial
  Synthetic oligonucleotide
gcactctgcaccattgaaaggtactcctctctagatgttgcgtgcgtcatgatttctctc

SEQ ID NO: 406632 - DNA, 55 bp, Artificial
  Synthetic oligonucleotide
gcactctggcctattgttataaggcaggccatgctgaacaaagagagcatactag

SEQ ID NO: 406633 - DNA, 56 bp, Artificial
  Synthetic oligonucleotide
gcactctggtattacggtacccttgtgcgcctgttttacacgcccctccccaagca

SEQ ID NO: 406634 - DNA, 56 bp, Artificial
  Synthetic oligonucleotide
gcactctgtcaaccttctagaaaacaaacataatggaaaactatgtaaactaagag

SEQ ID NO: 406635 - DNA, 55 bp, Artificial
  Synthetic oligonucleotide
gcactcttagatactagatatcttgagtaccaacatgctaatcttggaactgctg

SEQ ID NO: 406636 - DNA, 60 bp, Artificial
  Synthetic oligonucleotide
gcactcttctatggaatactgtctggaacatggctgttattacccactgttatgacttcc

SEQ ID NO: 406637 - DNA, 55 bp, Artificial
  Synthetic oligonucleotide
gcactcttgacgacaccggcactaccatgagaatatatatagatcagtccgaccc

SEQ ID NO: 406638 - DNA, 55 bp, Artificial
  Synthetic oligonucleotide
gcactctttgagtgaagctgctgaggtgaaaaccaatgctagatcgctgggttgg

SEQ ID NO: 406639 - DNA, 58 bp, Artificial
  Synthetic oligonucleotide
gcactctttgcactctgaatgttagggtggaaactctcaatgtcgaagaacccttggt

SEQ ID NO: 406640 - DNA, 55 bp, Artificial
  Synthetic oligonucleotide
gcactgacaacaggggaggttagagcttccatacgccttacattggacgactatg

SEQ ID NO: 406641 - DNA, 60 bp, Artificial
  Synthetic oligonucleotide
gcactgacccaatgtgcgctgacttcgaacaccattgacattgtgctccacagcacgaag

SEQ ID NO: 406642 - DNA, 55 bp, Artificial
  Synthetic oligonucleotide
gcactgacgcttccgaccgcagtaaagcatattgccgctgttagagttttacgaa

SEQ ID NO: 406643 - DNA, 60 bp, Artificial
  Synthetic oligonucleotide
gcactgactcctcaggaaagtgaatcattcccttcaggcacacctgcagaggtctcgctg

SEQ ID NO: 406644 - DNA, 55 bp, Artificial
  Synthetic oligonucleotide
gcactgactgcagcattgtgctgcatacctggggctcgcgcggatcaaccctacc

SEQ ID NO: 406645 - DNA, 55 bp, Artificial
  Synthetic oligonucleotide
gcactgagacaaataatcagagaatctggaggaattgacaaagagtcaatgggct

SEQ ID NO: 406646 - DNA, 60 bp, Artificial
  Synthetic oligonucleotide
gcactgagagagtggtcgtgagtattgaccgtttcttaagggtccgagatcagcgaggga

SEQ ID NO: 406647 - DNA, 60 bp, Artificial
  Synthetic oligonucleotide
gcactgagagagtggttgtgagcattgaccatttcttaagggttagagatcagaggggga

SEQ ID NO: 406648 - DNA, 58 bp, Artificial
  Synthetic oligonucleotide
gcactgagcaagcgaatttacttcgcgccgccacttattgcgcccactgattaccatt

SEQ ID NO: 406649 - DNA, 55 bp, Artificial
  Synthetic oligonucleotide
gcactgagccttctcatagcgcctttgagaacctgaacggatgttacgggtaggg

SEQ ID NO: 406650 - DNA, 60 bp, Artificial
  Synthetic oligonucleotide
gcactgagtggaatcgatttgagtcacctgaggactcctagaattgaacctcaaacgctg

SEQ ID NO: 406651 - DNA, 55 bp, Artificial
  Synthetic oligonucleotide
gcactgataatgagggaaggaattaaattgctttgccgcggagggacactgatct

SEQ ID NO: 406652 - DNA, 59 bp, Artificial
  Synthetic oligonucleotide
gcactgatacttaaataccctcaagaaatgcgaggtctgaggttgtaaatgagtccaaa

SEQ ID NO: 406653 - DNA, 51 bp, Artificial
  Synthetic oligonucleotide
gcactgatggtttagaagctctagacctcactaccagtgcaggctacccct

SEQ ID NO: 406654 - DNA, 60 bp, Artificial
  Synthetic oligonucleotide
gcactgatgtgtctagctatgttcccatgcggaaagataacctgccctgactgtgtaaca

SEQ ID NO: 406655 - DNA, 55 bp, Artificial
  Synthetic oligonucleotide
gcactgcagaaggaaattggcgagaggacgcatgcggagacagttatggtgaagg

SEQ ID NO: 406656 - DNA, 55 bp, Artificial
  Synthetic oligonucleotide
gcactgcatcaacagactccttgacttcctctaagcactcaagtacattgtgatc

SEQ ID NO: 406657 - DNA, 55 bp, Artificial
  Synthetic oligonucleotide
gcactgcatgtagatggacaactaactagagcaagtcgggtaccataccgtaagc

SEQ ID NO: 406658 - DNA, 53 bp, Artificial
  Synthetic oligonucleotide
gcactgcattgttacacgccggcctcggtaaagttctgtgtggccatcacggg

SEQ ID NO: 406659 - DNA, 60 bp, Artificial
  Synthetic oligonucleotide
gcactgccagtcgtcaattcattacatgctcatggggttgggtgtaagtgctctattctc

SEQ ID NO: 406660 - DNA, 58 bp, Artificial
  Synthetic oligonucleotide
gcactgcgcgaattttgggacaaactatcccctaggggccgcaagctgttgtacgtca

SEQ ID NO: 406661 - DNA, 60 bp, Artificial
  Synthetic oligonucleotide
gcactgcggctgcagatgctcgctgacacctgccccgtcacgctcaactgtgacagaatt

SEQ ID NO: 406662 - DNA, 55 bp, Artificial
  Synthetic oligonucleotide
gcactgctaaaggtacaagagtccgtcacatccttccatggtgagtatgaagagg

SEQ ID NO: 406663 - DNA, 55 bp, Artificial
  Synthetic oligonucleotide
gcactgcttcgaagatctcagacccagtgacgaagacgaaggagaatacatcggg

SEQ ID NO: 406664 - DNA, 60 bp, Artificial
  Synthetic oligonucleotide
gcactgcttgataatatggtagtgcgtaacataacaaaagattccgctgtgtttatggtt

SEQ ID NO: 406665 - DNA, 55 bp, Artificial
  Synthetic oligonucleotide
gcactggaacttgccttcgaactggataagcacgtggagatgaggctccccattc

SEQ ID NO: 406666 - DNA, 58 bp, Artificial
  Synthetic oligonucleotide
gcactggaactttccttcgaactgaaataagaacgtggatatgcggagacccatcttc

SEQ ID NO: 406667 - DNA, 55 bp, Artificial
  Synthetic oligonucleotide
gcactggaattagatcctctacgctcttcgccggtttctcaagcagacttaaagg

SEQ ID NO: 406668 - DNA, 56 bp, Artificial
  Synthetic oligonucleotide
gcactggacgttctacttacgcaagacgtcgcagagctatttccatcggtaggtgt

SEQ ID NO: 406669 - DNA, 55 bp, Artificial
  Synthetic oligonucleotide
gcactggagaatgcccgtgctgaaatgctattaacaaagactgcaactgattacc

SEQ ID NO: 406670 - DNA, 60 bp, Artificial
  Synthetic oligonucleotide
gcactggagcaaaaactggctaaatacgagtacatgggagagaacttgttgacacttgtc

SEQ ID NO: 406671 - DNA, 55 bp, Artificial
  Synthetic oligonucleotide
gcactggagttccagggaggatactttgagctagttgattcactcgcgctagctc

SEQ ID NO: 406672 - DNA, 60 bp, Artificial
  Synthetic oligonucleotide
gcactggatcactggacgtgcttccaatgcgctgtcgcagttgctataaatgagccagtc

SEQ ID NO: 406673 - DNA, 60 bp, Artificial
  Synthetic oligonucleotide
gcactggcaatcatgatagctggtctatctttctggatgtgctccaatggatcattgcaa

SEQ ID NO: 406674 - DNA, 55 bp, Artificial
  Synthetic oligonucleotide
gcactggcagcactccaggaggcatgaggacccggaatcctgtgacaacaaccct

SEQ ID NO: 406675 - DNA, 55 bp, Artificial
  Synthetic oligonucleotide
gcactggccggattttctcgggcgaacctgctccgcggaatgattctcccgtcga

SEQ ID NO: 406676 - DNA, 55 bp, Artificial
  Synthetic oligonucleotide
gcactggctcaaacagcccagtaaggagtttaaccgcgctactctattacgcgct

SEQ ID NO: 406677 - DNA, 58 bp, Artificial
  Synthetic oligonucleotide
gcactgggacagaccccccagaaagctacactcagacattcccctctacccctgggca

SEQ ID NO: 406678 - DNA, 56 bp, Artificial
  Synthetic oligonucleotide
gcactgggggaaatggggccttttgttcctggggatgttaataatctgtaatgcta

SEQ ID NO: 406679 - DNA, 60 bp, Artificial
  Synthetic oligonucleotide
gcactggggtgtcatcggtgccatattgtattacagtatggttgcgaactgggctaaagt

SEQ ID NO: 406680 - DNA, 55 bp, Artificial
  Synthetic oligonucleotide
gcactggtactctcaatcggaccaagtgcgcgtatttctccgctcgcctctaccg

SEQ ID NO: 406681 - DNA, 55 bp, Artificial
  Synthetic oligonucleotide
gcactggtgcacatctacatgccagtttggtgaccctggtgatataatgagtccg

SEQ ID NO: 406682 - DNA, 56 bp, Artificial
  Synthetic oligonucleotide
gcactggttcaaaccggcaacctttcaacagacggcgttactcttaaatgcctgta

SEQ ID NO: 406683 - DNA, 50 bp, Artificial
  Synthetic oligonucleotide
gcactggttctaactacaaatcaaacgcagtgatcatcaacgaatcaggg

SEQ ID NO: 406684 - DNA, 60 bp, Artificial
  Synthetic oligonucleotide
gcactggttgtttcgaaatctttcacaaatgtgatgacgactgtatggccagtataagga

SEQ ID NO: 406685 - DNA, 55 bp, Artificial
  Synthetic oligonucleotide
gcactgtaagtgactcaggggaggtggtattaacatgcaagagtccctctgctcc

SEQ ID NO: 406686 - DNA, 56 bp, Artificial
  Synthetic oligonucleotide
gcactgtagcaacacggagggactaaagttgtaaatatggaatgtttggggactgt

SEQ ID NO: 406687 - DNA, 60 bp, Artificial
  Synthetic oligonucleotide
gcactgtaggacatgtcgatcaaatatatcgttatttctgttccctaaagttgcggtgag

SEQ ID NO: 406688 - DNA, 55 bp, Artificial
  Synthetic oligonucleotide
gcactgtatggcacagatggactggagccaattgatgttaacactagtgctggtt

SEQ ID NO: 406689 - DNA, 55 bp, Artificial
  Synthetic oligonucleotide
gcactgtattaactgtctgtcgtcacaacggctatcgttctgaattaggtggcgg

SEQ ID NO: 406690 - DNA, 60 bp, Artificial
  Synthetic oligonucleotide
gcactgtattgggcgtctccatcctgaatcttggacaaaagagatacaccaagaccactt

SEQ ID NO: 406691 - DNA, 60 bp, Artificial
  Synthetic oligonucleotide
gcactgtattttgcacattggcaggacccggaacagactgtgaggcatactcagatacag

SEQ ID NO: 406692 - DNA, 57 bp, Artificial
  Synthetic oligonucleotide
gcactgtcagcaacttttaattcacagcaggcctcttggctcggcacattgacgccg

SEQ ID NO: 406693 - DNA, 55 bp, Artificial
  Synthetic oligonucleotide
gcactgtcagcggaataggagcacaagctgtctcacatctgagagcgcatattgg

SEQ ID NO: 406694 - DNA, 60 bp, Artificial
  Synthetic oligonucleotide
gcactgtcatgaggagcgcccgccccggcactgacttgatcacacttgcaacgtcccact

SEQ ID NO: 406695 - DNA, 60 bp, Artificial
  Synthetic oligonucleotide
gcactgtccgccaagctagaacaatgcaactattcgaattaccgcctttcttcatggttg

SEQ ID NO: 406696 - DNA, 55 bp, Artificial
  Synthetic oligonucleotide
gcactgtcgtatggcagcacccagtcagcgtaaggcggtcctgtcgactcttgtc

SEQ ID NO: 406697 - DNA, 55 bp, Artificial
  Synthetic oligonucleotide
gcactgtgacaccagctgtacacgaagacgagcagtgtcaggagcaaataagcct

SEQ ID NO: 406698 - DNA, 60 bp, Artificial
  Synthetic oligonucleotide
gcactgtgtgatgaacacttgtgcatgctccggactgataaggactatatttgtgaacac

SEQ ID NO: 406699 - DNA, 55 bp, Artificial
  Synthetic oligonucleotide
gcactgttccttgggttcctaggtgcagcaggaagcactatgggcgcagcggctg

SEQ ID NO: 406700 - DNA, 56 bp, Artificial
  Synthetic oligonucleotide
gcactgttccttgtgaacaggagttccttttacctcgtgtaaatgagactcgggcg

SEQ ID NO: 406701 - DNA, 55 bp, Artificial
  Synthetic oligonucleotide
gcactgttgatgtactcacactgggattgagggcttcgccattgttgtctacgcc

SEQ ID NO: 406702 - DNA, 55 bp, Artificial
  Synthetic oligonucleotide
gcacttaacagggacagaaggattttctaagttgccaatgtacacagcagctgtc

SEQ ID NO: 406703 - DNA, 60 bp, Artificial
  Synthetic oligonucleotide
gcacttaaccctggccttttagaaacagcagaaggatgtcaacaattattagagcagctc

SEQ ID NO: 406704 - DNA, 51 bp, Artificial
  Synthetic oligonucleotide
gcacttaagttaatggtacttaggctaatggtactcagttaaatagcactg

SEQ ID NO: 406705 - DNA, 58 bp, Artificial
  Synthetic oligonucleotide
gcacttaattcaattaaagttactcaatctgacgttgctagtgtcctttcaagagtag

SEQ ID NO: 406706 - DNA, 55 bp, Artificial
  Synthetic oligonucleotide
gcacttaatttgatctgtgagtctgtctggtgtctcttttgtaatgaagtgacaa

SEQ ID NO: 406707 - DNA, 50 bp, Artificial
  Synthetic oligonucleotide
gcacttacaatcaacaactcagtcaccactaatgctgattgtgcctggct

SEQ ID NO: 406708 - DNA, 60 bp, Artificial
  Synthetic oligonucleotide
gcacttagaaacgtcagccaaccatgtgcaagactgggagactcggtatgtacgcatgga

SEQ ID NO: 406709 - DNA, 60 bp, Artificial
  Synthetic oligonucleotide
gcacttagcatcaatgagctgagcaatcttgcgaaaggggagaaggctaacgtattgata

SEQ ID NO: 406710 - DNA, 58 bp, Artificial
  Synthetic oligonucleotide
gcacttagggacaacctggaacctgggaccttcgatcttggagggctgtatgaagcaa

SEQ ID NO: 406711 - DNA, 58 bp, Artificial
  Synthetic oligonucleotide
gcacttatcggtgcacccccgttgacaagcaaatggtaccggatccggttgcagtgga

SEQ ID NO: 406712 - DNA, 60 bp, Artificial
  Synthetic oligonucleotide
gcacttatgaatcagtgcgacgtgacatcgtatgtgacgtatcctattcttggtctagag

SEQ ID NO: 406713 - DNA, 60 bp, Artificial
  Synthetic oligonucleotide
gcacttcaagctactcactatgctcaagattttccgtacctcgcgtcgtctgctaaaagt

SEQ ID NO: 406714 - DNA, 57 bp, Artificial
  Synthetic oligonucleotide
gcacttcagactggtcttgcgggcccatttaaaggtggagccttgaaaggagggcca

SEQ ID NO: 406715 - DNA, 55 bp, Artificial
  Synthetic oligonucleotide
gcacttcatgatcaatgctctgaatgattacaactatgaaatggactactcacag

SEQ ID NO: 406716 - DNA, 60 bp, Artificial
  Synthetic oligonucleotide
gcacttccagttgggtgtgaacttgaatggaatgtcgtcgatgatattatacttggcgtt

SEQ ID NO: 406717 - DNA, 55 bp, Artificial
  Synthetic oligonucleotide
gcacttccagtttaggcgatattaagaagggtgccctgtacctagtaacctgtac

SEQ ID NO: 406718 - DNA, 55 bp, Artificial
  Synthetic oligonucleotide
gcacttccctaatcatatctgcaatccctataacctgtgtaacatagggtggccg

SEQ ID NO: 406719 - DNA, 59 bp, Artificial
  Synthetic oligonucleotide
gcacttccgaatggctgagttttcgacgcccgtccgcagcgagggagcgacggaggagc

SEQ ID NO: 406720 - DNA, 54 bp, Artificial
  Synthetic oligonucleotide
gcacttccgcacctaaggagttcgatttctcgaattctttagttcctcgttata

SEQ ID NO: 406721 - DNA, 55 bp, Artificial
  Synthetic oligonucleotide
gcacttcctggtgctatgaatgcattgactctttcaaagcaaggattcactatgc

SEQ ID NO: 406722 - DNA, 54 bp, Artificial
  Synthetic oligonucleotide
gcacttcgcgctttacaaaacgaggtagcgtgtaatcgaacccgtttaaataga

SEQ ID NO: 406723 - DNA, 55 bp, Artificial
  Synthetic oligonucleotide
gcacttctgaacgttcccctccgaccaaacgtcgtctaccacgttcttcagagcc

SEQ ID NO: 406724 - DNA, 60 bp, Artificial
  Synthetic oligonucleotide
gcacttctggcatatcatgcagcgtcaatgccaagttgacttctccagacgaatttacac

SEQ ID NO: 406725 - DNA, 55 bp, Artificial
  Synthetic oligonucleotide
gcacttctggcttcagaaggggtcagttgttattaacctcgagcaaacgggtagc

SEQ ID NO: 406726 - DNA, 55 bp, Artificial
  Synthetic oligonucleotide
gcacttctgttaccccggactgagtatcaataagctgcttacgtggctgaaggag

SEQ ID NO: 406727 - DNA, 55 bp, Artificial
  Synthetic oligonucleotide
gcacttctgttttcccggactgagtatcaatagactgctcacgcggttgaaggag

SEQ ID NO: 406728 - DNA, 60 bp, Artificial
  Synthetic oligonucleotide
gcacttgaaagtatcttgcggtcccaaatccatacagttccatgcatgctttaatcagca

SEQ ID NO: 406729 - DNA, 60 bp, Artificial
  Synthetic oligonucleotide
gcacttgaagacacccataccaacccagtggcaatgttccaatacgattgtgcccttctc

SEQ ID NO: 406730 - DNA, 55 bp, Artificial
  Synthetic oligonucleotide
gcacttgacctctgctggtggtctctatacattcgacgagctgtttggtgctagg

SEQ ID NO: 406731 - DNA, 51 bp, Artificial
  Synthetic oligonucleotide
gcacttgatcttggaactagtgcgagctacccgtacgttgcaatgggcatc

SEQ ID NO: 406732 - DNA, 55 bp, Artificial
  Synthetic oligonucleotide
gcacttgatgctgcagaaactggacacactagtaatgtacagccggaggatatgg

SEQ ID NO: 406733 - DNA, 55 bp, Artificial
  Synthetic oligonucleotide
gcacttgcaccagaggaggaggatggcccggatatagtcacataccaaggtgatg

SEQ ID NO: 406734 - DNA, 58 bp, Artificial
  Synthetic oligonucleotide
gcacttgcactgctcaccggcacacgcagaattcgtacgcaactaccggctcgaaagg

SEQ ID NO: 406735 - DNA, 60 bp, Artificial
  Synthetic oligonucleotide
gcacttgccagttgtatgggcctcatatacaacaggatgggggctgtgaccactgaagtg

SEQ ID NO: 406736 - DNA, 55 bp, Artificial
  Synthetic oligonucleotide
gcacttgccgtctagcgcgtcctccaaccggctaatcagcacacccgcgtcgttt

SEQ ID NO: 406737 - DNA, 51 bp, Artificial
  Synthetic oligonucleotide
gcacttgcctactacggttttaaaccgaatcttcgtaaaacgttcgtgtcc

SEQ ID NO: 406738 - DNA, 55 bp, Artificial
  Synthetic oligonucleotide
gcacttgcctgggacgacctacggaacctgtgcctcttcagttaccgccgcttga

SEQ ID NO: 406739 - DNA, 53 bp, Artificial
  Synthetic oligonucleotide
gcacttgcggtacgccctacggtgcgacgcttcaacatccaggggtcttggcc

SEQ ID NO: 406740 - DNA, 55 bp, Artificial
  Synthetic oligonucleotide
gcacttggaacaagactgaagcgctagatgacactgaaggagaggtcaacatcac

SEQ ID NO: 406741 - DNA, 59 bp, Artificial
  Synthetic oligonucleotide
gcacttggaacgagactggagcgataaatggcactgtaggaaatgacactatcacactc

SEQ ID NO: 406742 - DNA, 55 bp, Artificial
  Synthetic oligonucleotide
gcacttggctccgatttaggcaggcttcttggaatacaacatgtcaagtggaacc

SEQ ID NO: 406743 - DNA, 60 bp, Artificial
  Synthetic oligonucleotide
gcacttgggcaggggaccacactagataacaaacattcaaatggcacaatacatgataga

SEQ ID NO: 406744 - DNA, 55 bp, Artificial
  Synthetic oligonucleotide
gcacttggggcaagtttaaatcttggtgggacagcctttacacaccacaggcagg

SEQ ID NO: 406745 - DNA, 55 bp, Artificial
  Synthetic oligonucleotide
gcacttggtcgaacataagcacttgaaccgtatgaacgttggcgatcacgatacg

SEQ ID NO: 406746 - DNA, 50 bp, Artificial
  Synthetic oligonucleotide
gcacttggtcgggctacaagacgacccccggccttcttacgagtttggcc

SEQ ID NO: 406747 - DNA, 55 bp, Artificial
  Synthetic oligonucleotide
gcacttggtcttcaggggtgtgctttccagtcaactgttgctgagttgcagcgtc

SEQ ID NO: 406748 - DNA, 60 bp, Artificial
  Synthetic oligonucleotide
gcacttgtagtgcgcacgtattttgagcattgtattatacaatgcagatggtgagatcca

SEQ ID NO: 406749 - DNA, 60 bp, Artificial
  Synthetic oligonucleotide
gcacttgtctgctattattacaggcgattacaccaccaagtgcaatcgcagcaatgtcaa

SEQ ID NO: 406750 - DNA, 60 bp, Artificial
  Synthetic oligonucleotide
gcacttgtgatgcaccatcgtaatgtgagcttcattattctaactggagacagtaggcag

SEQ ID NO: 406751 - DNA, 60 bp, Artificial
  Synthetic oligonucleotide
gcacttgtgtagacccagttgagacctcaggttgtggttgaattggatctgtatcgttat

SEQ ID NO: 406752 - DNA, 59 bp, Artificial
  Synthetic oligonucleotide
gcacttgtgtagtggtaatgactgatgggcccgcaaataaccaggcgttcacaaaagta

SEQ ID NO: 406753 - DNA, 60 bp, Artificial
  Synthetic oligonucleotide
gcacttgttgcctgtattctacgacgcagtggtcgattttcatacagcttctcgtcagtc

SEQ ID NO: 406754 - DNA, 55 bp, Artificial
  Synthetic oligonucleotide
gcacttgttggcccatcccttcatcatgggctttaggaagctacctatgggagtg

SEQ ID NO: 406755 - DNA, 60 bp, Artificial
  Synthetic oligonucleotide
gcacttgttgtattatgaattggtcaatgtaccaaaagacactcttggcggcactttgct

SEQ ID NO: 406756 - DNA, 50 bp, Artificial
  Synthetic oligonucleotide
gcactttaaattttccaattagtcctattgacactgtaccagtaaaattg

SEQ ID NO: 406757 - DNA, 59 bp, Artificial
  Synthetic oligonucleotide
gcactttactaattacattacctcatactgattatgcctggacttttgttcttgcggag

SEQ ID NO: 406758 - DNA, 55 bp, Artificial
  Synthetic oligonucleotide
gcactttccagagcgctggccgttgtgtcgatgggttgggtgaggcggtagatca

SEQ ID NO: 406759 - DNA, 51 bp, Artificial
  Synthetic oligonucleotide
gcactttcgatatacagagccgtcgaggaaggggcatctaagctagggctg

SEQ ID NO: 406760 - DNA, 60 bp, Artificial
  Synthetic oligonucleotide
gcactttcgcactaccgttcgtcggatcgcagagggtcaggctacacggatcaactgcga

SEQ ID NO: 406761 - DNA, 55 bp, Artificial
  Synthetic oligonucleotide
gcactttgaaccccacataaagctgataggatcagcccctggttcaaacccctcc

SEQ ID NO: 406762 - DNA, 55 bp, Artificial
  Synthetic oligonucleotide
gcactttgagctatcacctttcataatgtctgagttggttaagtttgatggttcg

SEQ ID NO: 406763 - DNA, 55 bp, Artificial
  Synthetic oligonucleotide
gcactttgattggtacctgagtacaatggactgttgagggtgacgaattctgcat

SEQ ID NO: 406764 - DNA, 55 bp, Artificial
  Synthetic oligonucleotide
gcactttggccccttcctactcatgatgcacaatgtttcatacctcgccacccgg

SEQ ID NO: 406765 - DNA, 55 bp, Artificial
  Synthetic oligonucleotide
gcactttgtgggccagctaacacagaacacctcggatatagtggtacaggcccca

SEQ ID NO: 406766 - DNA, 53 bp, Artificial
  Synthetic oligonucleotide
gcacttttaagcccacggccgattagcacgctaaagggttcgtcgggtgggcc

SEQ ID NO: 406767 - DNA, 55 bp, Artificial
  Synthetic oligonucleotide
gcacttttagccaacctaacgtcgctacagtagcggctgcacctgaagaggagac

SEQ ID NO: 406768 - DNA, 60 bp, Artificial
  Synthetic oligonucleotide
gcacttttttataagcctgatgtagtaccacttaaggagaacagcagtgagtatatgtta

SEQ ID NO: 406769 - DNA, 60 bp, Artificial
  Synthetic oligonucleotide
gcacttttttatagatctgatgtagtaccacttgataatgaaactagtgagaatggatct

SEQ ID NO: 406770 - DNA, 55 bp, Artificial
  Synthetic oligonucleotide
gcagaaaacccagatttggaaatagaggcaaagtgtgttggatgcccatcatgtt

SEQ ID NO: 406771 - DNA, 59 bp, Artificial
  Synthetic oligonucleotide
gcagaaacacgtaagacatatccacatagtaataagaaagaaacacatagccatcatac

SEQ ID NO: 406772 - DNA, 55 bp, Artificial
  Synthetic oligonucleotide
gcagaaacactactagcaaaaggagtaggtgagttattcagtgaaaatgggatgg

SEQ ID NO: 406773 - DNA, 55 bp, Artificial
  Synthetic oligonucleotide
gcagaaaccgcctttatctgtgccgcttactttagtgaacctcaggtaatgtacg

SEQ ID NO: 406774 - DNA, 60 bp, Artificial
  Synthetic oligonucleotide
gcagaaactatgcagtgaggtcagatgactatgtggtgaacaaagggttcgggggctcct

SEQ ID NO: 406775 - DNA, 55 bp, Artificial
  Synthetic oligonucleotide
gcagaaactgtacaggtcgtctgcagacacagtcgattactttgttggcggcgat

SEQ ID NO: 406776 - DNA, 55 bp, Artificial
  Synthetic oligonucleotide
gcagaaagaatctctttggatccgcataaaaggagatcaaatgaccatctgggcc

SEQ ID NO: 406777 - DNA, 50 bp, Artificial
  Synthetic oligonucleotide
gcagaaagagaagtgctagtatggaagtttgacagccgcctagcactgag

SEQ ID NO: 406778 - DNA, 60 bp, Artificial
  Synthetic oligonucleotide
gcagaaagattagtacgtatacctcctagctattatgtgtctacacaatgcagagcctta

SEQ ID NO: 406779 - DNA, 56 bp, Artificial
  Synthetic oligonucleotide
gcagaaagcgcttcgggaaaatcgttaagaaagccagctcttggtgcattaaaccg

SEQ ID NO: 406780 - DNA, 55 bp, Artificial
  Synthetic oligonucleotide
gcagaaaggcttaccaacgcaacaacaaaatcaaattagcccaaaagcggtgtca

SEQ ID NO: 406781 - DNA, 55 bp, Artificial
  Synthetic oligonucleotide
gcagaaatctagtgcgttatcagaatgatccaaagagtgtccggggaactcgcct

SEQ ID NO: 406782 - DNA, 55 bp, Artificial
  Synthetic oligonucleotide
gcagaaatgcaagaaacgcgccgcgaatgcgttgcggtcacaaccgtccctgaag

SEQ ID NO: 406783 - DNA, 60 bp, Artificial
  Synthetic oligonucleotide
gcagaaatgcctggcattctccggtgggccgttgagggctgcttaatgtggcagaaggaa

SEQ ID NO: 406784 - DNA, 56 bp, Artificial
  Synthetic oligonucleotide
gcagaaatgggcggcttccggtctctcttacgatgacttgcccgatctgcacgccg

SEQ ID NO: 406785 - DNA, 55 bp, Artificial
  Synthetic oligonucleotide
gcagaaattaaatatggagtggctcttttcagcatcacatcttcgcagtggagac

SEQ ID NO: 406786 - DNA, 52 bp, Artificial
  Synthetic oligonucleotide
gcagaaatttcgaggtaataacagcggtcagccgagcacagttgttgacaac

SEQ ID NO: 406787 - DNA, 60 bp, Artificial
  Synthetic oligonucleotide
gcagaacaacataaacgccatcctaggcacgaatgttagcatccctttcctcagtgcaac

SEQ ID NO: 406788 - DNA, 56 bp, Artificial
  Synthetic oligonucleotide
gcagaacacattagccgaccgaatcctaaaatgggttagctcatttttatactttg

SEQ ID NO: 406789 - DNA, 60 bp, Artificial
  Synthetic oligonucleotide
gcagaacaccgttacgggagcagcacaccagctgacggcatctgttgatgcgaggttaga

SEQ ID NO: 406790 - DNA, 51 bp, Artificial
  Synthetic oligonucleotide
gcagaacaggttaggggaccgtggaaccaaacacccctacgggtggttaga

SEQ ID NO: 406791 - DNA, 55 bp, Artificial
  Synthetic oligonucleotide
gcagaacagtgtgtgtcagcaaagcagcaatgtctaccggggatccatacccaaa

SEQ ID NO: 406792 - DNA, 57 bp, Artificial
  Synthetic oligonucleotide
gcagaaccaaagaaggaagacggaagactaatctgtatgggttcattataagaggaa

SEQ ID NO: 406793 - DNA, 55 bp, Artificial
  Synthetic oligonucleotide
gcagaaccggtggatgttcgatcagctcactggaaatctgaaagcaatagcacac

SEQ ID NO: 406794 - DNA, 60 bp, Artificial
  Synthetic oligonucleotide
gcagaaccttactggcaaaatctgtattcaacagtctatatgcgtctccacaactcgagg

SEQ ID NO: 406795 - DNA, 59 bp, Artificial
  Synthetic oligonucleotide
gcagaaccttttttctgacccaaggcgctttgctgaatgacaggcattctaatggaacc

SEQ ID NO: 406796 - DNA, 55 bp, Artificial
  Synthetic oligonucleotide
gcagaacgacaggaaattgtcgacaataacaattggtcaggctattccggaagct

SEQ ID NO: 406797 - DNA, 55 bp, Artificial
  Synthetic oligonucleotide
gcagaactagtcaaatttgatggctcaatgcacccacaaatccatgaagcacttg

SEQ ID NO: 406798 - DNA, 55 bp, Artificial
  Synthetic oligonucleotide
gcagaactatcgtggtcccatgcagacatcaggacgaactgataggaagggcacg

SEQ ID NO: 406799 - DNA, 59 bp, Artificial
  Synthetic oligonucleotide
gcagaactattgcaatggtgctttaatgagtacgaatgtactcttactggctttaaaca

SEQ ID NO: 406800 - DNA, 55 bp, Artificial
  Synthetic oligonucleotide
gcagaactgaattgatcgcacctacttcttggggagaagtgaatgatggagcaac

SEQ ID NO: 406801 - DNA, 55 bp, Artificial
  Synthetic oligonucleotide
gcagaactgcccagaatattagttgatcatgatactcaaacgtgtcatgtcgttg

SEQ ID NO: 406802 - DNA, 59 bp, Artificial
  Synthetic oligonucleotide
gcagaagaagatagttattgggccttacaagcccctcccattcagaaatccagcgacta

SEQ ID NO: 406803 - DNA, 60 bp, Artificial
  Synthetic oligonucleotide
gcagaagacagtagaagatttctctagagccattcttgaatgctgtcctagtgagaccat

SEQ ID NO: 406804 - DNA, 60 bp, Artificial
  Synthetic oligonucleotide
gcagaagacagtggcaatgagagcgaaggggatacagaggaactctcaagacttattgac

SEQ ID NO: 406805 - DNA, 60 bp, Artificial
  Synthetic oligonucleotide
gcagaagacagtggcaatgagagcgaaggggatcaggaagaattgtcagctcttgtggag

SEQ ID NO: 406806 - DNA, 54 bp, Artificial
  Synthetic oligonucleotide
gcagaagacagtggcaatgagagcgagggggacacagaagaattggcacgactt

SEQ ID NO: 406807 - DNA, 60 bp, Artificial
  Synthetic oligonucleotide
gcagaagacagtggcaatgagagcgagggtggtcaggaggaattgtcagcacttatggag

SEQ ID NO: 406808 - DNA, 60 bp, Artificial
  Synthetic oligonucleotide
gcagaagacagtggcaatgatagtgacggggatcgggaagaattatcggcatgtatgggg

SEQ ID NO: 406809 - DNA, 60 bp, Artificial
  Synthetic oligonucleotide
gcagaagatctatgcactcttttataggattgatacagtacaaattgacaatagtagtac

SEQ ID NO: 406810 - DNA, 60 bp, Artificial
  Synthetic oligonucleotide
gcagaagatgcttatcaaacagctctattcctcctacaaatcgcaggtagatggcctatg

SEQ ID NO: 406811 - DNA, 55 bp, Artificial
  Synthetic oligonucleotide
gcagaagcactaggaccgagcaggtgtccaataaccgttccacgacagttagcga

SEQ ID NO: 406812 - DNA, 60 bp, Artificial
  Synthetic oligonucleotide
gcagaagccatctgtgtgcttaagacatgccttgtgttaaattgcatgcagtttaaactt

SEQ ID NO: 406813 - DNA, 55 bp, Artificial
  Synthetic oligonucleotide
gcagaagccttgcacatagggctagaacagtaccaggagaagtactgtatatgac

SEQ ID NO: 406814 - DNA, 55 bp, Artificial
  Synthetic oligonucleotide
gcagaaggaactatatgcaaattttcagctcccgccaccgtccgcgaattctctg

SEQ ID NO: 406815 - DNA, 55 bp, Artificial
  Synthetic oligonucleotide
gcagaaggcaactacaacggacagaggtatatgaatttgcctttggtgacttaaa

SEQ ID NO: 406816 - DNA, 57 bp, Artificial
  Synthetic oligonucleotide
gcagaaggcgtcccgtccccgtggaatgggcacaggcagcggttccactcttggtgg

SEQ ID NO: 406817 - DNA, 60 bp, Artificial
  Synthetic oligonucleotide
gcagaaggggatattccaatcgctggagtgaaaagctccagaatctattctgatgtgagt

SEQ ID NO: 406818 - DNA, 55 bp, Artificial
  Synthetic oligonucleotide
gcagaagttcaactaggaatcccacatccagcaggattaatagagcatgagcacg

SEQ ID NO: 406819 - DNA, 55 bp, Artificial
  Synthetic oligonucleotide
gcagaagttctggcacaaatcaatgcaatgaattctaacatattggaagaatggc

SEQ ID NO: 406820 - DNA, 55 bp, Artificial
  Synthetic oligonucleotide
gcagaagttgagtatgactcatggtatcctaatcctttggaccctacctcgttgg

SEQ ID NO: 406821 - DNA, 55 bp, Artificial
  Synthetic oligonucleotide
gcagaagttggaaaggcaccttacatatcagaaactgcgttgcgtaatctgtaca

SEQ ID NO: 406822 - DNA, 60 bp, Artificial
  Synthetic oligonucleotide
gcagaatacaaagttcctggcgaaattgtaatgtctgttaaagagatgttgtcagatatg

SEQ ID NO: 406823 - DNA, 56 bp, Artificial
  Synthetic oligonucleotide
gcagaatacccactcgacccagtgggagtaggcctctgggtagaccttttaattca

SEQ ID NO: 406824 - DNA, 55 bp, Artificial
  Synthetic oligonucleotide
gcagaatagagtagttccacactatcggtcaacaggtgagtttctggagttcaca

SEQ ID NO: 406825 - DNA, 55 bp, Artificial
  Synthetic oligonucleotide
gcagaataggcattagtctacgaagaagactaagaggaagggatggatccggtag

SEQ ID NO: 406826 - DNA, 60 bp, Artificial
  Synthetic oligonucleotide
gcagaatataaatgcgtattgatcagctgttgtgatgctcatataacgttgacggcgtat

SEQ ID NO: 406827 - DNA, 60 bp, Artificial
  Synthetic oligonucleotide
gcagaatattatgagattgctggtagattctcactcatatcactagtaccaacaaacgat

SEQ ID NO: 406828 - DNA, 55 bp, Artificial
  Synthetic oligonucleotide
gcagaatcagcaactcctaaacctgtggggctgtagaggaaggcaaatctgttac

SEQ ID NO: 406829 - DNA, 55 bp, Artificial
  Synthetic oligonucleotide
gcagaatcttatagagcggatcgtgatgcgtggggtcacaaaggatagagcgtac

SEQ ID NO: 406830 - DNA, 59 bp, Artificial
  Synthetic oligonucleotide
gcagaatgctatggttcagattcaggtagttttttacatttcgatggataagaccttaa

SEQ ID NO: 406831 - DNA, 56 bp, Artificial
  Synthetic oligonucleotide
gcagaatggaagagtgcatgttgatggaacccttcttggcacaacacccgtctctg

SEQ ID NO: 406832 - DNA, 55 bp, Artificial
  Synthetic oligonucleotide
gcagaatggaatgactgcttacatctggtatcagcaaaagagtggagatgctgac

SEQ ID NO: 406833 - DNA, 55 bp, Artificial
  Synthetic oligonucleotide
gcagaatgtagtgaatctgataatagcgagcaagggtgtgaagaaagcctgtctg

SEQ ID NO: 406834 - DNA, 60 bp, Artificial
  Synthetic oligonucleotide
gcagaatgtttgctctcagccaaggtaccacactacggggtcggcacgcaaatgggacta

SEQ ID NO: 406835 - DNA, 55 bp, Artificial
  Synthetic oligonucleotide
gcagaattaaatcaagtgcaatgtgtaggaggtcattactcgttcgcgttgcctg

SEQ ID NO: 406836 - DNA, 52 bp, Artificial
  Synthetic oligonucleotide
gcagaattaatcgaagcactgaatagacacgacaaacacttgcctgttttca

SEQ ID NO: 406837 - DNA, 55 bp, Artificial
  Synthetic oligonucleotide
gcagaattccgccgtgttgtgcgttttggtgtggtagttttgccagtgcatggcg

SEQ ID NO: 406838 - DNA, 60 bp, Artificial
  Synthetic oligonucleotide
gcagaattctttacaaacgtggcatcagatcaacctccagcacatcaacgtgtatatctc

SEQ ID NO: 406839 - DNA, 60 bp, Artificial
  Synthetic oligonucleotide
gcagaattgcactctgtgacagagccgaaaacgattcgtcggtatacgactcgtgcattg

SEQ ID NO: 406840 - DNA, 60 bp, Artificial
  Synthetic oligonucleotide
gcagaattgttgcgatggtctctaaaactcgttggaataaacatgtcaccgagtaaatgc

SEQ ID NO: 406841 - DNA, 55 bp, Artificial
  Synthetic oligonucleotide
gcagaattgttggttctgctggaaaatgaaaggactttggattttcatgactcaa

SEQ ID NO: 406842 - DNA, 56 bp, Artificial
  Synthetic oligonucleotide
gcagaatttagccatacaccccggtttctacgttgattaaattcagcgctcacagg

SEQ ID NO: 406843 - DNA, 60 bp, Artificial
  Synthetic oligonucleotide
gcagaatttagtgaagatcctgaactacaaccaacaatgctattcaacatctgcgtccat

SEQ ID NO: 406844 - DNA, 55 bp, Artificial
  Synthetic oligonucleotide
gcagacaaaggcgtctgtacagtaaatggtgctaaatggaatataatcaagtgtg

SEQ ID NO: 406845 - DNA, 55 bp, Artificial
  Synthetic oligonucleotide
gcagacaacaagcactaaatcttctaagatctgatccgcgagtattacgtgaatt

SEQ ID NO: 406846 - DNA, 55 bp, Artificial
  Synthetic oligonucleotide
gcagacaacatatccaatctttaagctgggatgagtataggcaattgatagccgt

SEQ ID NO: 406847 - DNA, 55 bp, Artificial
  Synthetic oligonucleotide
gcagacaagctcgaacaatggcagcttttgagttatcaccgttctatatgaagga

SEQ ID NO: 406848 - DNA, 55 bp, Artificial
  Synthetic oligonucleotide
gcagacaaggcaacaaagtgtgtagataagtttcaagctcattgggacatgatgt

SEQ ID NO: 406849 - DNA, 52 bp, Artificial
  Synthetic oligonucleotide
gcagacaatggcatttgatcttgggagtaacttgcgtttgcaagggtcttct

SEQ ID NO: 406850 - DNA, 55 bp, Artificial
  Synthetic oligonucleotide
gcagacacaacactcttttgtgcctcagaggcgtcagctcttaacaaagaggccc

SEQ ID NO: 406851 - DNA, 51 bp, Artificial
  Synthetic oligonucleotide
gcagacacagcacaggatacagcatactttctcttaagattagcagggaga

SEQ ID NO: 406852 - DNA, 55 bp, Artificial
  Synthetic oligonucleotide
gcagacacaggtcctcatcgtgggttgtgcccctgcatggggtgagcactggaat

SEQ ID NO: 406853 - DNA, 55 bp, Artificial
  Synthetic oligonucleotide
gcagacacagttatgtattttgggctgtgcccctgctattggggaacactgggct

SEQ ID NO: 406854 - DNA, 55 bp, Artificial
  Synthetic oligonucleotide
gcagacacagtttgccactgaaaggtggacacttatggacacaagctcagagacc

SEQ ID NO: 406855 - DNA, 55 bp, Artificial
  Synthetic oligonucleotide
gcagacactactcctttggtcccaatcaccgtaaccattgcaccgatggagacag

SEQ ID NO: 406856 - DNA, 55 bp, Artificial
  Synthetic oligonucleotide
gcagacagcggattcacgcagtatgagttaggctcagtccgtgacattacgcgct

SEQ ID NO: 406857 - DNA, 57 bp, Artificial
  Synthetic oligonucleotide
gcagacagggctgaacattttcaaatacaggaagacaagcaatctaccacacatcaa

SEQ ID NO: 406858 - DNA, 59 bp, Artificial
  Synthetic oligonucleotide
gcagacagtaaactcactattctattttcggtgcacgggcattactctctgccgaaaat

SEQ ID NO: 406859 - DNA, 60 bp, Artificial
  Synthetic oligonucleotide
gcagacagtttcccctgctcgcaaatcaaggagttgtcaatcaagctcaaaatcgcccag

SEQ ID NO: 406860 - DNA, 57 bp, Artificial
  Synthetic oligonucleotide
gcagacatagttcagaccggaccctttagctacaaagacgaacttaaaaacagcaca

SEQ ID NO: 406861 - DNA, 57 bp, Artificial
  Synthetic oligonucleotide
gcagacatcctgcaaaactctgctcgttggatctccacgctggaagcgatggctctc

SEQ ID NO: 406862 - DNA, 60 bp, Artificial
  Synthetic oligonucleotide
gcagacatgaaaaaccgagtggaggtgtatgcagatgaaggcacgataactgagaatttt

SEQ ID NO: 406863 - DNA, 55 bp, Artificial
  Synthetic oligonucleotide
gcagacatgaaatacacagaaggcagatccaagtacctcatagaaaacctgcctc

SEQ ID NO: 406864 - DNA, 60 bp, Artificial
  Synthetic oligonucleotide
gcagacatgattgaccagacagtgaacaaccaagtgaaccgttccttgactgcattgcaa

SEQ ID NO: 406865 - DNA, 60 bp, Artificial
  Synthetic oligonucleotide
gcagacatggtacttgtgaaaggtcagaagttggtgtgtgcttatctactagcggtagat

SEQ ID NO: 406866 - DNA, 60 bp, Artificial
  Synthetic oligonucleotide
gcagaccaccaaagacaataaaggaactcggattcgattcaaggatgatagctccttcga

SEQ ID NO: 406867 - DNA, 60 bp, Artificial
  Synthetic oligonucleotide
gcagaccaccatacaaacgactggcaacagatcttcatgagaatgtcaccaatcaaagga

SEQ ID NO: 406868 - DNA, 60 bp, Artificial
  Synthetic oligonucleotide
gcagaccacgcatgtggtcgatgccatggaggcccatcagtttattaaggctcctggcat

SEQ ID NO: 406869 - DNA, 55 bp, Artificial
  Synthetic oligonucleotide
gcagaccagagccatcagccccaccagaagagagcttcggttttggggaagaggc

SEQ ID NO: 406870 - DNA, 60 bp, Artificial
  Synthetic oligonucleotide
gcagaccagctagttaagtccggtagaccgtcagctcagctcctgacggcggtgaacgca

SEQ ID NO: 406871 - DNA, 53 bp, Artificial
  Synthetic oligonucleotide
gcagacccaaagtgtttgtggcgcttccgctagcgatatcggtgctatcggcc

SEQ ID NO: 406872 - DNA, 55 bp, Artificial
  Synthetic oligonucleotide
gcagacccattggcttcgctattggagatgtgccatagtacacaaattggaggga

SEQ ID NO: 406873 - DNA, 60 bp, Artificial
  Synthetic oligonucleotide
gcagaccccagtgcccctagattatgtcaacttggaggcggtgtgccgccgcatagactt

SEQ ID NO: 406874 - DNA, 55 bp, Artificial
  Synthetic oligonucleotide
gcagaccccttcgccactgatcctgaaggtgtcgttattacttttgaacccgagg

SEQ ID NO: 406875 - DNA, 55 bp, Artificial
  Synthetic oligonucleotide
gcagaccgaactcagcagtttaagagggataaacttgaagcatgggcgagggagg

SEQ ID NO: 406876 - DNA, 55 bp, Artificial
  Synthetic oligonucleotide
gcagacctacaagcgtgactttacatttgggcgaattaattctgtgtctgctgga

SEQ ID NO: 406877 - DNA, 54 bp, Artificial
  Synthetic oligonucleotide
gcagacctactaaaatcagttgactcagaggaggttagacactactgtgaatca

SEQ ID NO: 406878 - DNA, 55 bp, Artificial
  Synthetic oligonucleotide
gcagacctgcaactgtcttatcatggtcagttgaaagtagtaggtatccaccgtg

SEQ ID NO: 406879 - DNA, 55 bp, Artificial
  Synthetic oligonucleotide
gcagacgaaacgccacctactatcagcccaacaggacgagattccgttagcccag

SEQ ID NO: 406880 - DNA, 60 bp, Artificial
  Synthetic oligonucleotide
gcagacgaaatctgcattggatacctgagcaacaactcaacagagaaagtggacacaata

SEQ ID NO: 406881 - DNA, 52 bp, Artificial
  Synthetic oligonucleotide
gcagacgaccctaggtttcctgccgttgcgcaaatggcccctaatgtagctg

SEQ ID NO: 406882 - DNA, 55 bp, Artificial
  Synthetic oligonucleotide
gcagacgataactggaggtaaaatcttcgtcttgaagctcatcagtcaactcacg

SEQ ID NO: 406883 - DNA, 60 bp, Artificial
  Synthetic oligonucleotide
gcagacgcacaaatgtctttggatcagagtagtgttgctatcatgtctaagtgtagggct

SEQ ID NO: 406884 - DNA, 54 bp, Artificial
  Synthetic oligonucleotide
gcagacgcctacaggaacgaataagattttgagttatggtcaggcgtattatat

SEQ ID NO: 406885 - DNA, 58 bp, Artificial
  Synthetic oligonucleotide
gcagacgctttgtccaaaatgccctgaacgggaatggagacccaaacaacatggatag

SEQ ID NO: 406886 - DNA, 55 bp, Artificial
  Synthetic oligonucleotide
gcagacggagagactgagagatctgcggcgaaaagagaagagtgggacgcatgcc

SEQ ID NO: 406887 - DNA, 60 bp, Artificial
  Synthetic oligonucleotide
gcagacgtgaaggcgctacaacaactactgctggacaatttgtccatagtgtgtcctcgc

SEQ ID NO: 406888 - DNA, 60 bp, Artificial
  Synthetic oligonucleotide
gcagacgttcgtgaaaacatgcatagccacgtagccacatggtgttgactgagaataact

SEQ ID NO: 406889 - DNA, 56 bp, Artificial
  Synthetic oligonucleotide
gcagacgttgtacaaaccgtcgtgaggaggtacgtcctctgtgctatgcggggggg

SEQ ID NO: 406890 - DNA, 55 bp, Artificial
  Synthetic oligonucleotide
gcagacgtttaagaagcgatgctgggtctttcgcttcttggagcagtactgttaa

SEQ ID NO: 406891 - DNA, 60 bp, Artificial
  Synthetic oligonucleotide
gcagactacacagggtatgcatgagatcgctgaatctctaagagcagttattccaccaac

SEQ ID NO: 406892 - DNA, 60 bp, Artificial
  Synthetic oligonucleotide
gcagactacagctgctgcttcctttcaggtggcattagccgtggccgacaactcgaaaga

SEQ ID NO: 406893 - DNA, 55 bp, Artificial
  Synthetic oligonucleotide
gcagactattcagcctgggacagtactcagcagagggagatcatgcgccacagcc

SEQ ID NO: 406894 - DNA, 60 bp, Artificial
  Synthetic oligonucleotide
gcagactcgttcgaaggcaggattgttggtatcagatggagggccaaacctatacaatat

SEQ ID NO: 406895 - DNA, 55 bp, Artificial
  Synthetic oligonucleotide
gcagactctgccataagaaaagccatattaggacatatagtcagtcctaggtgtg

SEQ ID NO: 406896 - DNA, 60 bp, Artificial
  Synthetic oligonucleotide
gcagactgctactaatccctctgtatttgtcaagatgtcagaccccccagcccaagtgtc

SEQ ID NO: 406897 - DNA, 60 bp, Artificial
  Synthetic oligonucleotide
gcagactgctgacctcctctagctgatcttccatcgacttggaaaactccaaaatcaatg

SEQ ID NO: 406898 - DNA, 53 bp, Artificial
  Synthetic oligonucleotide
gcagacttacacatctatgctgaggacgagccagttaaccatacaaagagtac

SEQ ID NO: 406899 - DNA, 60 bp, Artificial
  Synthetic oligonucleotide
gcagacttagataaatatgatgctatgaaaagccatgagagagtaacatggaatgactgg

SEQ ID NO: 406900 - DNA, 55 bp, Artificial
  Synthetic oligonucleotide
gcagacttccactaaccctagtatcttttggaccgaaggtaatgcatcacccagg

SEQ ID NO: 406901 - DNA, 58 bp, Artificial
  Synthetic oligonucleotide
gcagacttcttcctacacctagaagttcgactcccaccgcaaggatgtgtagcaagtc

SEQ ID NO: 406902 - DNA, 53 bp, Artificial
  Synthetic oligonucleotide
gcagacttggaagtcataaccagtacctgggtcatagtgggaggggtcctcgc

SEQ ID NO: 406903 - DNA, 60 bp, Artificial
  Synthetic oligonucleotide
gcagagaaaccatatatgccaaggtatggtttacagcgcaattcgactgacatgacactg

SEQ ID NO: 406904 - DNA, 59 bp, Artificial
  Synthetic oligonucleotide
gcagagaacagggagattctaaaacaccctgtgcatggagtatattatgacccgtcaaa

SEQ ID NO: 406905 - DNA, 55 bp, Artificial
  Synthetic oligonucleotide
gcagagaaggttcacttcgctgggttcgcagcacctgcgtgtgaaagtggggaag

SEQ ID NO: 406906 - DNA, 55 bp, Artificial
  Synthetic oligonucleotide
gcagagaaggttcatagtccaggtgtggtttcttcattgtccacaggaaatgcag

SEQ ID NO: 406907 - DNA, 60 bp, Artificial
  Synthetic oligonucleotide
gcagagaatgccactaatgtcacggtccctattactgtatcaattagtccaatgtttgct

SEQ ID NO: 406908 - DNA, 59 bp, Artificial
  Synthetic oligonucleotide
gcagagacagccggagaccaattttaacatccagctcgcattggcagttatagtagtcg

SEQ ID NO: 406909 - DNA, 55 bp, Artificial
  Synthetic oligonucleotide
gcagagacataagcgatttgaagcaatatgatagtgacgaacctgaattgaggtc

SEQ ID NO: 406910 - DNA, 60 bp, Artificial
  Synthetic oligonucleotide
gcagagaccgaggtgtgagcagccatgattggaccgaaacctaccctggaggacatcgtc

SEQ ID NO: 406911 - DNA, 60 bp, Artificial
  Synthetic oligonucleotide
gcagagacgaagacagcacaagccaagcaagcgacgactcatcaagcacctccagcgggt

SEQ ID NO: 406912 - DNA, 55 bp, Artificial
  Synthetic oligonucleotide
gcagagagctcttccctgtgacactttcatatccagcatgattaaggtcggtccc

SEQ ID NO: 406913 - DNA, 55 bp, Artificial
  Synthetic oligonucleotide
gcagagagcttaattgtaatgtgtgttctaatcgtgctacatgctacaattctag

SEQ ID NO: 406914 - DNA, 52 bp, Artificial
  Synthetic oligonucleotide
gcagagaggcagcatatcaaaggtctctcaagaatctagacttctgcaaaga

SEQ ID NO: 406915 - DNA, 56 bp, Artificial
  Synthetic oligonucleotide
gcagagagtgttaccctaacaagagggcagaatacagttaaagtatcagggaaggg

SEQ ID NO: 406916 - DNA, 55 bp, Artificial
  Synthetic oligonucleotide
gcagagataatggtcagagcaattgataagatttctatctgcaaaccaacagcat

SEQ ID NO: 406917 - DNA, 59 bp, Artificial
  Synthetic oligonucleotide
gcagagatacaactgcccaatcaaagcgtataccaggagcgcaggcaggagaactcaac

SEQ ID NO: 406918 - DNA, 58 bp, Artificial
  Synthetic oligonucleotide
gcagagatacactcacaactcagattggtcaataaactcatggaagagaatatgttac

SEQ ID NO: 406919 - DNA, 55 bp, Artificial
  Synthetic oligonucleotide
gcagagatcaacaatctcagatcaacattagccatactcagtggagatagcagca

SEQ ID NO: 406920 - DNA, 60 bp, Artificial
  Synthetic oligonucleotide
gcagagatcgtactaaaccagctatgcgtacgattcttcggactggatttggactcaggt

SEQ ID NO: 406921 - DNA, 60 bp, Artificial
  Synthetic oligonucleotide
gcagagatcttgaaatcacagttggggccggcattctggacacgggagttgcggtacact

SEQ ID NO: 406922 - DNA, 55 bp, Artificial
  Synthetic oligonucleotide
gcagagatgagacagcgcgtacaagctgacagaaatgttgttaattacccatcaa

SEQ ID NO: 406923 - DNA, 60 bp, Artificial
  Synthetic oligonucleotide
gcagagatgctgtcagatgaaagatagtgccaaaacactggttggtgactgctttttgga

SEQ ID NO: 406924 - DNA, 57 bp, Artificial
  Synthetic oligonucleotide
gcagagatgttttccctcggtgtaaagtaggaatgcgttagtcaacgtctggaatac

SEQ ID NO: 406925 - DNA, 55 bp, Artificial
  Synthetic oligonucleotide
gcagagattgcatacacactgtgccaagcttcagctaataggccctgggagcatg

SEQ ID NO: 406926 - DNA, 60 bp, Artificial
  Synthetic oligonucleotide
gcagagcaagttctgtgagagaactactcaacaccaagttcttaatgttgttaggtttca

SEQ ID NO: 406927 - DNA, 60 bp, Artificial
  Synthetic oligonucleotide
gcagagcaatttattgaggtgcaaatcgctgtagctgaatcgaaccatgatactgaatca

SEQ ID NO: 406928 - DNA, 60 bp, Artificial
  Synthetic oligonucleotide
gcagagcataacaaacgcgataaaatctcgtatgatgaaagatcacacgtgcgagaacat

SEQ ID NO: 406929 - DNA, 56 bp, Artificial
  Synthetic oligonucleotide
gcagagccatcgcaagggaggattttcctcgggtactgaccataccccgaccccag

SEQ ID NO: 406930 - DNA, 60 bp, Artificial
  Synthetic oligonucleotide
gcagagccgaagcaggctacgcctgactccactgacatctttgcgatgccgtggaatctt

SEQ ID NO: 406931 - DNA, 60 bp, Artificial
  Synthetic oligonucleotide
gcagagcctgacctttagagtgattggaaggacatactcattacatgtgactaggcctgg

SEQ ID NO: 406932 - DNA, 55 bp, Artificial
  Synthetic oligonucleotide
gcagagccttagaaaaggagccagatatactagggaaagtaaccttcacagaagc

SEQ ID NO: 406933 - DNA, 60 bp, Artificial
  Synthetic oligonucleotide
gcagagccttgttcagaggtctagagagaggaagaggcatgttgacttggtcaactggtg

SEQ ID NO: 406934 - DNA, 55 bp, Artificial
  Synthetic oligonucleotide
gcagagcgaaccgtccgctgtgaatcgcatttgtgtagcctaggatctctatgtt

SEQ ID NO: 406935 - DNA, 57 bp, Artificial
  Synthetic oligonucleotide
gcagagcgggactagttggggagatagacctccctcttgaaggcacaactaacccga

SEQ ID NO: 406936 - DNA, 55 bp, Artificial
  Synthetic oligonucleotide
gcagagctaaccatggtctgagcaaagagaatgctacgtcgtataatgtgaggac

SEQ ID NO: 406937 - DNA, 55 bp, Artificial
  Synthetic oligonucleotide
gcagagctagaactggcggaaaacagggaagttctaaaagaaccagtgcatggag

SEQ ID NO: 406938 - DNA, 55 bp, Artificial
  Synthetic oligonucleotide
gcagagctattagtcgcactggagaaccagcacactatagatgtgactgactcgg

SEQ ID NO: 406939 - DNA, 55 bp, Artificial
  Synthetic oligonucleotide
gcagagctcgtcagaagtagtgtggaagacagacgcgatcaacaaccggctgtca

SEQ ID NO: 406940 - DNA, 55 bp, Artificial
  Synthetic oligonucleotide
gcagagctgcctcgtattttggtggatcacaacacacaaacgtgtcatgtggtcg

SEQ ID NO: 406941 - DNA, 55 bp, Artificial
  Synthetic oligonucleotide
gcagagctgctttagtatcaaagagaagtttcgaatacaagaatcatacctcgtc

SEQ ID NO: 406942 - DNA, 60 bp, Artificial
  Synthetic oligonucleotide
gcagagctgtttatgggcgccatgagggttggtccagaatgggggatcattgcattcaag

SEQ ID NO: 406943 - DNA, 60 bp, Artificial
  Synthetic oligonucleotide
gcagagcttctacgcttggaccttcacgaaggagactatccagagtggctgcagctcctt

SEQ ID NO: 406944 - DNA, 55 bp, Artificial
  Synthetic oligonucleotide
gcagagcttctagtggccctggaaaaccaacatacaattgatctgactgattctg

SEQ ID NO: 406945 - DNA, 56 bp, Artificial
  Synthetic oligonucleotide
gcagaggaagggttaaagtggcagaacgccaccatgaacgttttgtactgcttaat

SEQ ID NO: 406946 - DNA, 50 bp, Artificial
  Synthetic oligonucleotide
gcagaggaatgtgggttcagtgacagggtgagatcccttaccctgggtaa

SEQ ID NO: 406947 - DNA, 52 bp, Artificial
  Synthetic oligonucleotide
gcagaggactcgcgaccgcatctacaatgcgatgggggccctatggacctgt

SEQ ID NO: 406948 - DNA, 60 bp, Artificial
  Synthetic oligonucleotide
gcagaggagattcccagatgtcttaatccaagcgagaccatctcacttctggaaggcggt

SEQ ID NO: 406949 - DNA, 55 bp, Artificial
  Synthetic oligonucleotide
gcagaggcacgataccagctgcagcgtcgggtagctcgtgtcctaggaaggccat

SEQ ID NO: 406950 - DNA, 51 bp, Artificial
  Synthetic oligonucleotide
gcagaggcatacatgccacagatgtcatagacataaaggggctcttctagt

SEQ ID NO: 406951 - DNA, 60 bp, Artificial
  Synthetic oligonucleotide
gcagaggctaaacaaaaggagctacttaataagagcattgacactgaacacaatgacaaa

SEQ ID NO: 406952 - DNA, 55 bp, Artificial
  Synthetic oligonucleotide
gcagaggcttagaaatcagtaggggacaaccattaggtgttgggagcaccggcca

SEQ ID NO: 406953 - DNA, 55 bp, Artificial
  Synthetic oligonucleotide
gcagagggaacaggaacggctgcagatctcaagtcgactcaggcagccattgatc

SEQ ID NO: 406954 - DNA, 60 bp, Artificial
  Synthetic oligonucleotide
gcagagggaagcagctgtgactgacttgttacccttgctaccaggtgagccgcaatttcg

SEQ ID NO: 406955 - DNA, 60 bp, Artificial
  Synthetic oligonucleotide
gcagagggcttcaggttggaacttatgaggccaagagacatgagcatgtccctcctgttt

SEQ ID NO: 406956 - DNA, 60 bp, Artificial
  Synthetic oligonucleotide
gcagaggtcctggagatactggcatgatgaacaagggatgtcagaaagttacacaaagta

SEQ ID NO: 406957 - DNA, 59 bp, Artificial
  Synthetic oligonucleotide
gcagaggttaggcctgatctcctcacagtagctaagagcatgacagggcaagtggaaga

SEQ ID NO: 406958 - DNA, 60 bp, Artificial
  Synthetic oligonucleotide
gcagaggttcctgaatgggacacttcctcttgtatccagaaggggctgtcgacatcacag

SEQ ID NO: 406959 - DNA, 51 bp, Artificial
  Synthetic oligonucleotide
gcagaggttgcaatacctccactggctttattttattggaggtgcaacacg

SEQ ID NO: 406960 - DNA, 60 bp, Artificial
  Synthetic oligonucleotide
gcagaggttgtcagtaggatgatagtacatcctcgaggtgaggatcatgacccaatccaa

SEQ ID NO: 406961 - DNA, 58 bp, Artificial
  Synthetic oligonucleotide
gcagaggtttaaggaggatcgtaatggtgaaaacatcgcggaagcgttgtgtgcagat

SEQ ID NO: 406962 - DNA, 55 bp, Artificial
  Synthetic oligonucleotide
gcagaggttttaacacaaattaatgcaatgaactcaggtatcttagaagagtggc

SEQ ID NO: 406963 - DNA, 60 bp, Artificial
  Synthetic oligonucleotide
gcagagtacatcagtgcgaaagcaccccatctcagtgagtacatcgaacctgaagaaaag

SEQ ID NO: 406964 - DNA, 55 bp, Artificial
  Synthetic oligonucleotide
gcagagtagcaggcaaatagtacctgatagagacgtgaacacagggacagttggg

SEQ ID NO: 406965 - DNA, 55 bp, Artificial
  Synthetic oligonucleotide
gcagagtcaaactcaggaggagacgtggttcatctagcgctgatggcgaccttta

SEQ ID NO: 406966 - DNA, 55 bp, Artificial
  Synthetic oligonucleotide
gcagagtcatcgataccatcacgtgtggttttgccgacctcatggggtacatccc

SEQ ID NO: 406967 - DNA, 55 bp, Artificial
  Synthetic oligonucleotide
gcagagtctacagtctttaaaggtgaaccagtctggcacaagcgacagtggcacc

SEQ ID NO: 406968 - DNA, 55 bp, Artificial
  Synthetic oligonucleotide
gcagagtgaaatgaaattttacagagtaggtggtgaagttcagcaaagaatgaag

SEQ ID NO: 406969 - DNA, 55 bp, Artificial
  Synthetic oligonucleotide
gcagagtgcctcttacagcagatgtaatggctcatttgaatgtcatgaacccaaa

SEQ ID NO: 406970 - DNA, 60 bp, Artificial
  Synthetic oligonucleotide
gcagagtgctgtggatgttgacgatggtcattttgtcaacatagagctggagtaaaagat

SEQ ID NO: 406971 - DNA, 55 bp, Artificial
  Synthetic oligonucleotide
gcagagtgtaggtgcatgtgttgtttgttcatcacaaacttctttgcgttgtggc

SEQ ID NO: 406972 - DNA, 55 bp, Artificial
  Synthetic oligonucleotide
gcagagttacctcgcattctagttgatcatagaaatcagatatgccatgtagtcg

SEQ ID NO: 406973 - DNA, 55 bp, Artificial
  Synthetic oligonucleotide
gcagagttgaataatatatattgcgatggaggagattacagcttcagagtgccag

SEQ ID NO: 406974 - DNA, 60 bp, Artificial
  Synthetic oligonucleotide
gcagagttttactcacagtcaaatcaattgttgtcatatggtgacgtaacgcgatttttg

SEQ ID NO: 406975 - DNA, 60 bp, Artificial
  Synthetic oligonucleotide
gcagataagggacccaacaggaagtgacattgctgggacaactagcacccagcaagagca

SEQ ID NO: 406976 - DNA, 60 bp, Artificial
  Synthetic oligonucleotide
gcagataatgtgtccacaaatttatgttgggttaatggagcatccagatacagtacctca

SEQ ID NO: 406977 - DNA, 57 bp, Artificial
  Synthetic oligonucleotide
gcagatacaagtggttttctatatttcaatggataaaactttgaatcaataccccgc

SEQ ID NO: 406978 - DNA, 55 bp, Artificial
  Synthetic oligonucleotide
gcagatacacccttacttgaacctggctggtcagatacagctcatggggtaggtg

SEQ ID NO: 406979 - DNA, 60 bp, Artificial
  Synthetic oligonucleotide
gcagatacagagtgcctgatggcacccccatatgttttgctggtgatgacatgtgcgctc

SEQ ID NO: 406980 - DNA, 60 bp, Artificial
  Synthetic oligonucleotide
gcagatacagcgagtcagtcatgtcatcttacgaatggagtaagcaacaaatgaaaagcg

SEQ ID NO: 406981 - DNA, 60 bp, Artificial
  Synthetic oligonucleotide
gcagatacagcgagtcagtcgtgtcatcttacgaatggagtaagcaacgtacaaagagcg

SEQ ID NO: 406982 - DNA, 55 bp, Artificial
  Synthetic oligonucleotide
gcagatacatatgcactggaatcctgacagataccagcaggcccggggacaagcc

SEQ ID NO: 406983 - DNA, 60 bp, Artificial
  Synthetic oligonucleotide
gcagatagaaatgtggacgtgtttagagcggcgatgtcggacccaatctatcggatacac

SEQ ID NO: 406984 - DNA, 55 bp, Artificial
  Synthetic oligonucleotide
gcagatatccccagtgcactcacccatcagatggcatcgtcgagaacttaggcac

SEQ ID NO: 406985 - DNA, 55 bp, Artificial
  Synthetic oligonucleotide
gcagatatgcttatccaaccatgggttaggtggtgaaggtcggcacttagtgcta

SEQ ID NO: 406986 - DNA, 59 bp, Artificial
  Synthetic oligonucleotide
gcagatatggagctcgaaacaactaaaggcctaagatcatttttgggcctcctgaacta

SEQ ID NO: 406987 - DNA, 58 bp, Artificial
  Synthetic oligonucleotide
gcagatatggggttcgtgaaacaatcagaacccgccttggtactgctataggggcaag

SEQ ID NO: 406988 - DNA, 55 bp, Artificial
  Synthetic oligonucleotide
gcagatatgtgtgcactggaattctgacagataccagcagacccggggacaaacc

SEQ ID NO: 406989 - DNA, 60 bp, Artificial
  Synthetic oligonucleotide
gcagatattacggtggtccccgcatgcaaatgttgtcagctatggatattgcatgtgtgt

SEQ ID NO: 406990 - DNA, 60 bp, Artificial
  Synthetic oligonucleotide
gcagatcagagggtttgtgtactttgtcgaaacgctagcaaggagcatatgtgagaaact

SEQ ID NO: 406991 - DNA, 60 bp, Artificial
  Synthetic oligonucleotide
gcagatcaggccctacagccaccctgccctaatctagtaagttactccagctaccacgcc

SEQ ID NO: 406992 - DNA, 55 bp, Artificial
  Synthetic oligonucleotide
gcagatcatagacgtaactgtttatccgtatcgacaagttgcagtatatcactcg

SEQ ID NO: 406993 - DNA, 55 bp, Artificial
  Synthetic oligonucleotide
gcagatcatcgccatgaactcgctgtatcacggcgataaggtcagagcgcaggcc

SEQ ID NO: 406994 - DNA, 58 bp, Artificial
  Synthetic oligonucleotide
gcagatccattaactgttcagctattctgtgatgaggatatatcagaattcgtagaat

SEQ ID NO: 406995 - DNA, 60 bp, Artificial
  Synthetic oligonucleotide
gcagatcccgaggtgaatgcaactgggcaacgacattttagcgcgatgagcccagttacg

SEQ ID NO: 406996 - DNA, 59 bp, Artificial
  Synthetic oligonucleotide
gcagatccttcgagggtcaggaggaatcgataaagagtcaatgggtttcacctatagtg

SEQ ID NO: 406997 - DNA, 60 bp, Artificial
  Synthetic oligonucleotide
gcagatcggctagcagagtaaaacatttagtgtgcgcggcccctaaccaagtactgataa

SEQ ID NO: 406998 - DNA, 52 bp, Artificial
  Synthetic oligonucleotide
gcagatcgggcccgctcttctgcggaagaacataaaggttctcttcgccgct

SEQ ID NO: 406999 - DNA, 55 bp, Artificial
  Synthetic oligonucleotide
gcagatcggtgacgaggacgtacagctgcacatcaagcccgtgatggaggtgctg

SEQ ID NO: 407000 - DNA, 56 bp, Artificial
  Synthetic oligonucleotide
gcagatctagacccgtacgataaatcccttcattcgagagtttttcctagagggaa

SEQ ID NO: 407001 - DNA, 60 bp, Artificial
  Synthetic oligonucleotide
gcagatctagagaaaagctgcacaatgtttcctctaaacagagctattagagctagatcg

SEQ ID NO: 407002 - DNA, 60 bp, Artificial
  Synthetic oligonucleotide
gcagatctagtaactgactctccggtcatctcagccattatagactttaagacactcaag

SEQ ID NO: 407003 - DNA, 60 bp, Artificial
  Synthetic oligonucleotide
gcagatctgcgaatctgctttataaaaagaggcctgcgtgccctctaaagcaacggtagt

SEQ ID NO: 407004 - DNA, 60 bp, Artificial
  Synthetic oligonucleotide
gcagatctggagctacacaccaagaaaattgaagtgtcaggactgaagtttgcaagtctg

SEQ ID NO: 407005 - DNA, 60 bp, Artificial
  Synthetic oligonucleotide
gcagatcttcaacaatattgtaataaattggaaactgacttgcaaggcaaatttagttca

SEQ ID NO: 407006 - DNA, 55 bp, Artificial
  Synthetic oligonucleotide
gcagatcttgtatgaaacatacttgtcttcattatgtggtgggttctcggaggga

SEQ ID NO: 407007 - DNA, 55 bp, Artificial
  Synthetic oligonucleotide
gcagatgaagtaagctttccagtcagacctcaagtgcctttaaggccaatgactt

SEQ ID NO: 407008 - DNA, 55 bp, Artificial
  Synthetic oligonucleotide
gcagatgacctcgttgggctcgcccttgttcgacaccgacgagtcccagaaccca

SEQ ID NO: 407009 - DNA, 60 bp, Artificial
  Synthetic oligonucleotide
gcagatgacgctctatacaatcaaaaccctgagtatgctaggcgtctcaaaccttttcag

SEQ ID NO: 407010 - DNA, 55 bp, Artificial
  Synthetic oligonucleotide
gcagatgagccctggacactgatggataccagtagggagcgcctgttagtggagc

SEQ ID NO: 407011 - DNA, 55 bp, Artificial
  Synthetic oligonucleotide
gcagatgagtggaaggtttccaagtgactggtacacacctactacaaagtaccgg

SEQ ID NO: 407012 - DNA, 59 bp, Artificial
  Synthetic oligonucleotide
gcagatgatccaaattatttcataggtattaaatttagacacatcccttataaatacga

SEQ ID NO: 407013 - DNA, 55 bp, Artificial
  Synthetic oligonucleotide
gcagatgatgagacatctctggagaaggctataacagaagcactatttggttccg

SEQ ID NO: 407014 - DNA, 55 bp, Artificial
  Synthetic oligonucleotide
gcagatgatgcatctaaggatgtcgtgagaactatgattaggactcacatcaagg

SEQ ID NO: 407015 - DNA, 56 bp, Artificial
  Synthetic oligonucleotide
gcagatgattttagcaaactttggatgggcacacaagcaaggacctagtgattggc

SEQ ID NO: 407016 - DNA, 55 bp, Artificial
  Synthetic oligonucleotide
gcagatgcaaaggtgggactgttagatgatgccacacacccatgttgggtgtaca

SEQ ID NO: 407017 - DNA, 55 bp, Artificial
  Synthetic oligonucleotide
gcagatgcacgtgctgcgtgggccgatacattttcagcgcagggcaatcttaggt

SEQ ID NO: 407018 - DNA, 55 bp, Artificial
  Synthetic oligonucleotide
gcagatgcatactattctataccattagatccatcctttgctcagtatacggcat

SEQ ID NO: 407019 - DNA, 60 bp, Artificial
  Synthetic oligonucleotide
gcagatgcatttagtgtactagcgccagatttcaatctatttggcgttgtaccaatacaa

SEQ ID NO: 407020 - DNA, 60 bp, Artificial
  Synthetic oligonucleotide
gcagatgccgggttgactattcctgccgttgatctggtggtctctccttgtttggattac

SEQ ID NO: 407021 - DNA, 55 bp, Artificial
  Synthetic oligonucleotide
gcagatgctagcaagacttaggaagggctataggccagtattctcctcccctccc

SEQ ID NO: 407022 - DNA, 59 bp, Artificial
  Synthetic oligonucleotide
gcagatgctataccaggctggggttggctcctgaaaggtggctggttcgtccttaggaa

SEQ ID NO: 407023 - DNA, 60 bp, Artificial
  Synthetic oligonucleotide
gcagatgctgaactggttagcgatgccagtgttttctcattgcttgatgatatcgatttt

SEQ ID NO: 407024 - DNA, 55 bp, Artificial
  Synthetic oligonucleotide
gcagatggccgccatgttaggattagatgaaaagctgattatggcggatccgcct

SEQ ID NO: 407025 - DNA, 53 bp, Artificial
  Synthetic oligonucleotide
gcagatggctatgtggcggcctagcgaaaacaaagtatacctgcctcctaccc

SEQ ID NO: 407026 - DNA, 59 bp, Artificial
  Synthetic oligonucleotide
gcagatggctgcttggttgccgaaccagggtaaggtgtatcttccaccttccagacctg

SEQ ID NO: 407027 - DNA, 55 bp, Artificial
  Synthetic oligonucleotide
gcagatgggtcagccagcacttgacctcgaccaagggtttgttaatgcccacaag

SEQ ID NO: 407028 - DNA, 60 bp, Artificial
  Synthetic oligonucleotide
gcagatgtgattcccgtgcgcaggaggggtgacacccgcggcgcgctgttaagccccagg

SEQ ID NO: 407029 - DNA, 60 bp, Artificial
  Synthetic oligonucleotide
gcagatgtgtatactgttcttcgacccgaattcgcaatacacggcgtaaatccaatgccc

SEQ ID NO: 407030 - DNA, 54 bp, Artificial
  Synthetic oligonucleotide
gcagatgttaatgatgaaggtgaactgatatctactggttttgatccaaatctt

SEQ ID NO: 407031 - DNA, 60 bp, Artificial
  Synthetic oligonucleotide
gcagatgttagcagacaatctatgcaacgtttcagattgtgtagtgtttgtcacatggtg

SEQ ID NO: 407032 - DNA, 60 bp, Artificial
  Synthetic oligonucleotide
gcagatgtttattcagttttgagacctgagttcgcaatccacggcgtaaatccaatgcct

SEQ ID NO: 407033 - DNA, 55 bp, Artificial
  Synthetic oligonucleotide
gcagattaatggtgcgctcaggtctgcgaggagggcacagacgagtgggacgaac

SEQ ID NO: 407034 - DNA, 55 bp, Artificial
  Synthetic oligonucleotide
gcagattactcagcctgggacagcactcaacagagagagatcatgcgccatagcc

SEQ ID NO: 407035 - DNA, 57 bp, Artificial
  Synthetic oligonucleotide
gcagattcaagggccttgacatggttgccattcggcgcccaagtgctatgagaccac

SEQ ID NO: 407036 - DNA, 53 bp, Artificial
  Synthetic oligonucleotide
gcagattcccaggatccgggatcggtgcccagtgacctatgagcgatacgcga

SEQ ID NO: 407037 - DNA, 55 bp, Artificial
  Synthetic oligonucleotide
gcagattccttcacgctcattcagaacaggctccggctcgtcactacggggacgg

SEQ ID NO: 407038 - DNA, 60 bp, Artificial
  Synthetic oligonucleotide
gcagattcggatgactcaagcagctgctcagagtgtgattccgatgcattgctatctgac

SEQ ID NO: 407039 - DNA, 60 bp, Artificial
  Synthetic oligonucleotide
gcagattctcttcttccgctcgttcatgccaggtgctagtggtcacactgatggtgctat

SEQ ID NO: 407040 - DNA, 55 bp, Artificial
  Synthetic oligonucleotide
gcagattctggattcactggcggaagccgggatccccgacggaattgtggtgggg

SEQ ID NO: 407041 - DNA, 55 bp, Artificial
  Synthetic oligonucleotide
gcagattgccatcttaacaacgactgttacactgcatttcaagcaaaacgagtgc
